United States Patent Application Publication US 2018/0305408 A1 - sequence listing, part 3

SEQ ID NO: 31263 - protein, 33 aa, Artificial Sequence
  Cyclic GFR-binding peptide
  MOD_RES (2)..(2): Xaa is C or S
GXESVAMGYHYKLYTVVGKDKYLISIPSLKTPV

SEQ ID NO: 31264 - protein, 25 aa, Artificial Sequence
  Cyclic GFR-binding peptide
VVMEEYQKYVVKDYEDIYLMSIPSL

SEQ ID NO: 31265 - protein, 29 aa, Artificial Sequence
  Cyclic GFR-binding peptide
VVMNRYKKLIVNNSSDFYLVSIANLKTPA

SEQ ID NO: 31266 - protein, 30 aa, Artificial Sequence; identical to SEQ ID NO: 3031
  Cyclic GFR-binding peptide
  MOD_RES (1)..(3): Xaa is C or S

SEQ ID NO: 31267 - protein, 36 aa, Artificial Sequence
  Cyclic GFR-binding peptide
  MOD_RES (32)..(33): Xaa is C or S
GEVVMDEYKFKVVKENEDLYLMSIPELETPVXXAKP

SEQ ID NO: 31268 - protein, 29 aa, Artificial Sequence
  Cyclic GFR-binding peptide
AVSMGEEYQKYTPVGMDDIYLVSIPSLKT

SEQ ID NO: 31269 - protein, 25 aa, Artificial Sequence
  Cyclic GFR-binding peptide
RYKKLIKPTKGIFYLISIANLDQSV

SEQ ID NO: 31270 - protein, 31 aa, Artificial Sequence; identical to SEQ ID NO: 3035
  Cyclic GFR-binding peptide
  MOD_RES (26)..(27): Xaa is C or S

SEQ ID NO: 31271 - protein, 26 aa, Artificial Sequence
  Cyclic GFR-binding peptide
VMNYHYKLIVNNSSDKYLVSIPSLKT

SEQ ID NO: 31272 - protein, 21 aa, Artificial Sequence
  Cyclic GFR-binding peptide
DEYKFKVVKENEDLYLMSIPE

SEQ ID NO: 31273 - protein, 28 aa, Artificial Sequence
  Cyclic GFR-binding peptide
  MOD_RES (26)..(27): Xaa is C or S
EYKFKIVNSSDDLYLVSIPELKTPAXXP

SEQ ID NO: 31274 - protein, 28 aa, Artificial Sequence
  Cyclic GFR-binding peptide
SMGEEYKFKTPVGMDDLYLVSIPELKTP

SEQ ID NO: 31275 - protein, 23 aa, Artificial Sequence
  Cyclic GFR-binding peptide
AMGRYKKLYTVVGKDFYLISIAN

SEQ ID NO: 31276 - protein, 28 aa, Artificial Sequence
  Cyclic GFR-binding peptide
  MOD_RES (2)..(2): Xaa is C or S
GXSRVVMNEYKFKIVNSSDDLYLVSIPE

SEQ ID NO: 31277 - protein, 23 aa, Artificial Sequence
  Cyclic GFR-binding peptide
NYHYKLIVNNSSDKYLVSIPSLK

SEQ ID NO: 31278 - protein, 29 aa, Artificial Sequence
  Cyclic GFR-binding peptide
  MOD_RES (26)..(27): Xaa is C or S
EYKFKTPVGMDDLYLVSIPELKTPVXXAK

SEQ ID NO: 31279 - protein, 36 aa, Artificial Sequence; identical to SEQ ID NO: 3047
  Cyclic GFR-binding peptide
  MOD_RES (31)..(32): Xaa is C or S

SEQ ID NO: 31280 - protein, 28 aa, Artificial Sequence
  Cyclic GFR-binding peptide
VMEYHYKLVVKDYEDKYLMSIPSLETPV

SEQ ID NO: 31281 - protein, 24 aa, Artificial Sequence
  Cyclic GFR-binding peptide
YHYKLYTVVGKDKYLISIPSLKTP

SEQ ID NO: 31282 - protein, 28 aa, Artificial Sequence
  Cyclic GFR-binding peptide
  MOD_RES (28)..(28): Xaa is C or S
MERYKKLVVKDYEDFYLMSIANLETPVX

SEQ ID NO: 31283 - protein, 27 aa, Artificial Sequence
  Cyclic GFR-binding peptide
  MOD_RES (26)..(27): Xaa is C or S
EYQKYVKPTRGVIYLISIPSLDQPVXX

SEQ ID NO: 31284 - protein, 27 aa, Artificial Sequence
  Cyclic GFR-binding peptide
MNRYKKLIVNSSDDFYLVSIANLKTPA

SEQ ID NO: 31285 - protein, 31 aa, Artificial Sequence
  Cyclic GFR-binding peptide
  MOD_RES (29)..(30): Xaa is C or S
VMNEYKFKIVNNSSDLYLVSIPELKTPAXXA

SEQ ID NO: 31286 - protein, 25 aa, Artificial Sequence
  Cyclic GFR-binding peptide
NEYKFKIVNSSDDLYLVSIPELQTP

SEQ ID NO: 31287 - protein, 33 aa, Artificial Sequence
  Cyclic GFR-binding peptide
  MOD_RES (27)..(28): Xaa is C or S
MEYQKYIKPTKGIIYLISIPSLDQSVXXPSASA

SEQ ID NO: 31288 - protein, 32 aa, Artificial Sequence; identical to SEQ ID NO: 3056
  Cyclic GFR-binding peptide
  MOD_RES (29)..(30): Xaa is C or S

SEQ ID NO: 31289 - protein, 38 aa, Artificial Sequence; identical to SEQ ID NO: 3057
  Cyclic GFR-binding peptide
  MOD_RES (1)..(3)..(34)..(35): Xaa is C or S

SEQ ID NO: 31290 - protein, 30 aa, Artificial Sequence
  Cyclic GFR-binding peptide
  MOD_RES (29)..(30): Xaa is C or S
AMGRYKKLYTVVGKDFYLISIANLKTPVXX

SEQ ID NO: 31291 - protein, 26 aa, Artificial Sequence
  Cyclic GFR-binding peptide
NRYKKLIVNNSSDFYLVSIANLKTPA

SEQ ID NO: 31292 - protein, 30 aa, Artificial Sequence
  Cyclic GFR-binding peptide
EVVMEEYQKYVVKDYEDIYLMSIPSLETPV

SEQ ID NO: 31293 - protein, 37 aa, Artificial Sequence; identical to SEQ ID NO: 3061
  Cyclic GFR-binding peptide
  MOD_RES (2)..(4)..(35)..(36): Xaa is C or S

SEQ ID NO: 31294 - protein, 37 aa, Artificial Sequence
  Cyclic GFR-binding peptide
  MOD_RES (2)..(34)..(35): Xaa is C or S
GXARVVMNEYQKYIVNSSDDIYLVSIPSLQTPAXXPK

SEQ ID NO: 31295 - protein, 39 aa, Artificial Sequence
  Cyclic GFR-binding peptide
  MOD_RES (2)..(4)..(35)..(36): Xaa is C or S
SXKXSRVIMEYKFKVKPKRGVLYLISIPELAQPVXXPAA

SEQ ID NO: 31296 - protein, 35 aa, Artificial Sequence
  Cyclic GFR-binding peptide
  MOD_RES (1)..(33)..(34): Xaa is C or S
XSRVVMNEYKFKIVNSSDDLYLVSIPELKTPAXXP

SEQ ID NO: 31297 - protein, 26 aa, Artificial Sequence
  Cyclic GFR-binding peptide
  MOD_RES (26)..(26): Xaa is C or S
EYQKYVKPTRGVIYLISIPSLDQPVX

SEQ ID NO: 31298 - protein, 27 aa, Artificial Sequence
  Cyclic GFR-binding peptide
EVVMDYHYKLVVNNAADKYLISIPSLR

SEQ ID NO: 31299 - protein, 23 aa, Artificial Sequence
  Cyclic GFR-binding peptide
VIMEYQKYVKPKRGVIYLISIPS

SEQ ID NO: 31300 - protein, 26 aa, Artificial Sequence
  Cyclic GFR-binding peptide
MDEYKFKVVNNAADLYLISIPELRAP

SEQ ID NO: 31301 - protein, 30 aa, Artificial Sequence
  Cyclic GFR-binding peptide
  MOD_RES (30)..(30): Xaa is C or S
VVMNEYQKYIVNSSDDIYLVSIPSLKTPAX

SEQ ID NO: 31302 - protein, 42 aa, Artificial Sequence; identical to SEQ ID NO: 3064
  Cyclic GFR-binding peptide
  MOD_RES (2)..(4)..(36)..(37): Xaa is C or S

SEQ ID NO: 31303 - protein, 27 aa, Artificial Sequence
  Cyclic GFR-binding peptide
SKVIMEYKFKIKPTKGILYLISIPELD

SEQ ID NO: 31304 - protein, 34 aa, Artificial Sequence; identical to SEQ ID NO: 3067
  Cyclic GFR-binding peptide
  MOD_RES (1)..(3): Xaa is C or S

SEQ ID NO: 31305 - protein, 30 aa, Artificial Sequence
  Cyclic GFR-binding peptide
  MOD_RES (27)..(28): Xaa is C or S
NEYQKYIVNNSSDIYLVSIPSLKTPAXXAK

SEQ ID NO: 31306 - protein, 36 aa, Artificial Sequence
  Cyclic GFR-binding peptide
  MOD_RES (30)..(31): Xaa is C or S
SMGEEYKFKTPVGMDDLYLVSIPELKTPVXXAKGVK

SEQ ID NO: 31307 - protein, 25 aa, Artificial Sequence
  Cyclic GFR-binding peptide
VVMEEYKFKVVKDYEDLYLMSIPEL

SEQ ID NO: 31308 - protein, 38 aa, Artificial Sequence
  Cyclic GFR-binding peptide
  MOD_RES (2)..(4)..(37)..(38): Xaa is C or S
RXGXEAVSMGEEYKFKTPVGMDDLYLVSIPELKTPVXX

SEQ ID NO: 31309 - protein, 42 aa, Artificial Sequence; identical to SEQ ID NO: 3070
  Cyclic GFR-binding peptide
  MOD_RES (2)..(4)..(36)..(37): Xaa is C or S

SEQ ID NO: 31310 - protein, 28 aa, Artificial Sequence
  Cyclic GFR-binding peptide
  MOD_RES (27)..(27): Xaa is C or S
NEYKFKIVNSSDDLYLVSIPELKTPAXT

SEQ ID NO: 31311 - protein, 30 aa, Artificial Sequence; identical to SEQ ID NO: 3072
  Cyclic GFR-binding peptide
  MOD_RES (2)..(2): Xaa is C or S

SEQ ID NO: 31312 - protein, 35 aa, Artificial Sequence
  Cyclic GFR-binding peptide
  MOD_RES (2)..(4): Xaa is C or S
RXGXGEVVMDEYQKYVVKENEDIYLMSIPSLETPV

SEQ ID NO: 31313 - protein, 26 aa, Artificial Sequence
  Cyclic GFR-binding peptide
MEEYQKYVVKDYEDIYLMSIPSLETP

SEQ ID NO: 31314 - protein, 32 aa, Artificial Sequence
  Cyclic GFR-binding peptide
  MOD_RES (26)..(27): Xaa is C or S
EYKFKVKPTRGVLYLISIPELDQPVXXPSASA

SEQ ID NO: 31315 - protein, 28 aa, Artificial Sequence
  Cyclic GFR-binding peptide
  MOD_RES (27)..(28): Xaa is C or S
NEYQKYIVNNSSDIYLVSIPSLKTPAXX

SEQ ID NO: 31316 - protein, 29 aa, Artificial Sequence
  Cyclic GFR-binding peptide
  MOD_RES (2)..(4): Xaa is C or S
SXKXSKVVMEYQKYVKPTRGVIYLISIPS

SEQ ID NO: 31317 - protein, 25 aa, Artificial Sequence
  Cyclic GFR-binding peptide
VMNRYKKLIVNSSDDFYLVSIANLK

SEQ ID NO: 31318 - protein, 36 aa, Artificial Sequence; identical to SEQ ID NO: 3076
  Cyclic GFR-binding peptide
  MOD_RES (2)..(34)..(35): Xaa is C or S

SEQ ID NO: 31319 - protein, 30 aa, Artificial Sequence
  Cyclic GFR-binding peptide
  MOD_RES (30)..(30): Xaa is C or S
VVMDEYKFKVVNNAADLYLISIPELRAPVX

SEQ ID NO: 31320 - protein, 27 aa, Artificial Sequence
  Cyclic GFR-binding peptide
GERYKKLTPVGMDDFYLVSIANLKTPV

SEQ ID NO: 31321 - protein, 34 aa, Artificial Sequence
  Cyclic GFR-binding peptide
  MOD_RES (30)..(31): Xaa is C or S
KVIMEYKFKIKPTKGILYLISIPELDQSVXXPSA

SEQ ID NO: 31322 - protein, 32 aa, Artificial Sequence
  Cyclic GFR-binding peptide
  MOD_RES (28)..(29): Xaa is C or S
MGRYKKLYTVVGKDFYLISIANLKTPVXXAKS

SEQ ID NO: 31323 - protein, 29 aa, Artificial Sequence
  Cyclic GFR-binding peptide
  MOD_RES (28)..(29): Xaa is C or S
IMEYKFKIKPTKGILYLISIPELDQSVXX

SEQ ID NO: 31324 - protein, 34 aa, Artificial Sequence; identical to SEQ ID NO: 3079
  Cyclic GFR-binding peptide
  MOD_RES (30)..(31): Xaa is C or S

SEQ ID NO: 31325 - protein, 36 aa, Artificial Sequence; identical to SEQ ID NO: 3080
  Cyclic GFR-binding peptide
  MOD_RES (31)..(32): Xaa is C or S

SEQ ID NO: 31326 - protein, 32 aa, Artificial Sequence
  Cyclic GFR-binding peptide
  MOD_RES (1)..(1): Xaa is C or S
XAEVVMDRYKKLVVNNAADFYLISIANLRAPV

SEQ ID NO: 31327 - protein, 29 aa, Artificial Sequence
  Cyclic GFR-binding peptide
SKVIMYHYKLIKPTKGIKYLISIPSLDQS

SEQ ID NO: 31328 - protein, 35 aa, Artificial Sequence
  Cyclic GFR-binding peptide
  MOD_RES (29)..(30): Xaa is C or S
VMNEYKFKIVNNSSDLYLVSIPELKTPAXXAKPVA

SEQ ID NO: 31329 - protein, 31 aa, Artificial Sequence; identical to SEQ ID NO: 3084
  Cyclic GFR-binding peptide
  MOD_RES (28)..(29): Xaa is C or S

SEQ ID NO: 31330 - protein, 34 aa, Artificial Sequence; identical to SEQ ID NO: 3086
  Cyclic GFR-binding peptide
  MOD_RES (1)..(33)..(34): Xaa is C or S

SEQ ID NO: 31331 - protein, 35 aa, Artificial Sequence; identical to SEQ ID NO: 3087
  Cyclic GFR-binding peptide
  MOD_RES (29)..(30): Xaa is C or S

SEQ ID NO: 31332 - protein, 31 aa, Artificial Sequence
  Cyclic GFR-binding peptide
  MOD_RES (1)..(1): Xaa is C or S
XAKVVMNEYQKYIVNNSSDIYLVSIPSLKTP

SEQ ID NO: 31333 - protein, 34 aa, Artificial Sequence
  Cyclic GFR-binding peptide
  MOD_RES (28)..(29): Xaa is C or S
MEEYQKYVVKDYEDIYLMSIPSLETPVXXAKPIS

SEQ ID NO: 31334 - protein, 37 aa, Artificial Sequence
  Cyclic GFR-binding peptide
  MOD_RES (32)..(33): Xaa is C or S
AKVVMNEYKFKIVNNSSDLYLVSIPELKTPAXXAKPV

SEQ ID NO: 31335 - protein, 36 aa, Artificial Sequence
  Cyclic GFR-binding peptide
  MOD_RES (31)..(32): Xaa is C or S
SVAMGEYQKYYTVVGKDIYLISIPSLKTPVXXAKSA

SEQ ID NO: 31336 - protein, 30 aa, Artificial Sequence
  Cyclic GFR-binding peptide
SRVVMNEYKFKIVNSSDDLYLVSIPELKTP

SEQ ID NO: 31337 - protein, 28 aa, Artificial Sequence
  Cyclic GFR-binding peptide
GEVVMEEYQKYVVKDYEDIYLMSIPSLE

SEQ ID NO: 31338 - protein, 32 aa, Artificial Sequence; identical to SEQ ID NO: 3089
  Cyclic GFR-binding peptide
  MOD_RES (1)..(1): Xaa is C or S

SEQ ID NO: 31339 - protein, 30 aa, Artificial Sequence
  Cyclic GFR-binding peptide
  MOD_RES (2)..(2): Xaa is C or S
GXAEVVMDEYKFKVVNNAADLYLISIPELR

SEQ ID NO: 31340 - protein, 34 aa, Artificial Sequence; identical to SEQ ID NO: 3091
  Cyclic GFR-binding peptide
  MOD_RES (32)..(33): Xaa is C or S

SEQ ID NO: 31341 - protein, 35 aa, Artificial Sequence; identical to SEQ ID NO: 3092
  Cyclic GFR-binding peptide
  MOD_RES (31)..(32): Xaa is C or S

SEQ ID NO: 31342 - protein, 24 aa, Artificial Sequence
  Cyclic GFR-binding peptide
KVIMEYQKYIKPTKGIIYLISIPS

SEQ ID NO: 31343 - protein, 23 aa, Artificial Sequence
  Cyclic GFR-binding peptide
VMNEYQKYIVNSSDDIYLVSIPS

SEQ ID NO: 31344 - protein, 30 aa, Artificial Sequence
  Cyclic GFR-binding peptide
  MOD_RES (2)..(4): Xaa is C or S
SXKXSKVVMEYQKYVKPTRGVIYLISIPSL

SEQ ID NO: 31345 - protein, 33 aa, Artificial Sequence; identical to SEQ ID NO: 3093
  Cyclic GFR-binding peptide
  MOD_RES (31)..(32): Xaa is C or S

SEQ ID NO: 31346 - protein, 29 aa, Artificial Sequence
  Cyclic GFR-binding peptide
  MOD_RES (28)..(29): Xaa is C or S
VMEYKFKVKPTRGVLYLISIPELDQPVXX

SEQ ID NO: 31347 - protein, 40 aa, Artificial Sequence; identical to SEQ ID NO: 3094
  Cyclic GFR-binding peptide
  MOD_RES (2)..(35)..(36): Xaa is C or S

SEQ ID NO: 31348 - protein, 23 aa, Artificial Sequence
  Cyclic GFR-binding peptide
MNEYQKYIVNNSSDIYLVSIPSL

SEQ ID NO: 31349 - protein, 34 aa, Artificial Sequence
  Cyclic GFR-binding peptide
  MOD_RES (29)..(30): Xaa is C or S
VMDEYKFKVVKENEDLYLMSIPELETPVXXAKPI

SEQ ID NO: 31350 - protein, 34 aa, Artificial Sequence; identical to SEQ ID NO: 3097
  Cyclic GFR-binding peptide
  MOD_RES (2)..(33)..(34): Xaa is C or S

SEQ ID NO: 31351 - protein, 28 aa, Artificial Sequence
  Cyclic GFR-binding peptide
  MOD_RES (27)..(27): Xaa is C or S
NEYQKYIVNSSDDIYLVSIPSLKTPAXT

SEQ ID NO: 31352 - protein, 37 aa, Artificial Sequence; identical to SEQ ID NO: 3098
  Cyclic GFR-binding peptide
  MOD_RES (32)..(32): Xaa is C or S

SEQ ID NO: 31353 - protein, 23 aa, Artificial Sequence
  Cyclic GFR-binding peptide
VIMEYKFKIKPTKGILYLISIPE

SEQ ID NO: 31354 - protein, 27 aa, Artificial Sequence
  Cyclic GFR-binding peptide
  MOD_RES (26)..(27): Xaa is C or S
EYQKYTPVGMDDIYLVSIPSLKTPVXX

SEQ ID NO: 31355 - protein, 32 aa, Artificial Sequence
  Cyclic GFR-binding peptide
  MOD_RES (29)..(30): Xaa is C or S
VMDRYKKLVVNNAADFYLISIANLRAPVXXSA

SEQ ID NO: 31356 - protein, 32 aa, Artificial Sequence; identical to SEQ ID NO: 3103
  Cyclic GFR-binding peptide
  MOD_RES (2)..(2): Xaa is C or S

SEQ ID NO: 31357 - protein, 28 aa, Artificial Sequence
  Cyclic GFR-binding peptide
VIMYHYKLIKPTKGIKYLISIPSLDQSV

SEQ ID NO: 31358 - protein, 31 aa, Artificial Sequence
  Cyclic GFR-binding peptide
  MOD_RES (1)..(3): Xaa is C or S
XGXAKVVMNEYKFKIVNNSSDLYLVSIPELK

SEQ ID NO: 31359 - protein, 29 aa, Artificial Sequence
  Cyclic GFR-binding peptide
  MOD_RES (28)..(29): Xaa is C or S
MDYHYKLVVKENEDKYLMSIPSLETPVXX

SEQ ID NO: 31360 - protein, 28 aa, Artificial Sequence
  Cyclic GFR-binding peptide
  MOD_RES (1)..(1): Xaa is C or S
XSKVVMYHYKLVKPTRGVKYLISIPSLD

SEQ ID NO: 31361 - protein, 29 aa, Artificial Sequence
  Cyclic GFR-binding peptide
  MOD_RES (1)..(3): Xaa is C or S
XGXSRVVMNRYKKLIVNSSDDFYLVSIAN

SEQ ID NO: 31362 - protein, 30 aa, Artificial Sequence
  Cyclic GFR-binding peptide
GEVVMEEYQKYVVKDYEDIYLMSIPSLETP

SEQ ID NO: 31363 - protein, 24 aa, Artificial Sequence
  Cyclic GFR-binding peptide
MNYHYKLIVNSSDDKYLVSIPSLQ

SEQ ID NO: 31364 - protein, 35 aa, Artificial Sequence; identical to SEQ ID NO: 3111
  Cyclic GFR-binding peptide
  MOD_RES (1)..(33)..(34): Xaa is C or S

SEQ ID NO: 31365 - protein, 31 aa, Artificial Sequence; identical to SEQ ID NO: 3113
  Cyclic GFR-binding peptide
  MOD_RES (26)..(27): Xaa is C or S

SEQ ID NO: 31366 - protein, 27 aa, Artificial Sequence
  Cyclic GFR-binding peptide
VVMNEYKFKIVNNSSDLYLVSIPELKT

SEQ ID NO: 31367 - protein, 36 aa, Artificial Sequence
  Cyclic GFR-binding peptide
  MOD_RES (2)..(4)..(36): Xaa is C or S
RXGXAEVVMDRYKKLVVNNAADFYLISIANLRAPVX

SEQ ID NO: 31368 - protein, 35 aa, Artificial Sequence; identical to SEQ ID NO: 3114
  Cyclic GFR-binding peptide
  MOD_RES (1)..(33)..(34): Xaa is C or S

SEQ ID NO: 31369 - protein, 29 aa, Artificial Sequence
  Cyclic GFR-binding peptide
VVMNYHYKLIVNNSSDKYLVSIPSLKTPA

SEQ ID NO: 31370 - protein, 30 aa, Artificial Sequence
  Cyclic GFR-binding peptide
  MOD_RES (1)..(1): Xaa is C or S
XSRVIMEYKFKVKPKRGVLYLISIPELAQP

SEQ ID NO: 31371 - protein, 35 aa, Artificial Sequence
  Cyclic GFR-binding peptide
  MOD_RES (1)..(3)..(35): Xaa is C or S
XGXAKVVMNEYQKYIVNNSSDIYLVSIPSLKTPAX

SEQ ID NO: 31372 - protein, 23 aa, Artificial Sequence
  Cyclic GFR-binding peptide
MGERYKKLTPVGMDDFYLVSIAN

SEQ ID NO: 31373 - protein, 30 aa, Artificial Sequence
  Cyclic GFR-binding peptide
  MOD_RES (28)..(29): Xaa is C or S
MDYHYKLVVNNAADKYLISIPSLRAPVXXS

SEQ ID NO: 31374 - protein, 22 aa, Artificial Sequence
  Cyclic GFR-binding peptide
NEYKFKIVNNSSDLYLVSIPEL

SEQ ID NO: 31375 - protein, 35 aa, Artificial Sequence; identical to SEQ ID NO: 3117
  Cyclic GFR-binding peptide
  MOD_RES (1)..(3)..(34)..(35): Xaa is C or S

SEQ ID NO: 31376 - protein, 23 aa, Artificial Sequence
  Cyclic GFR-binding peptide
MEEYQKYVVKDYEDIYLMSIPSL

SEQ ID NO: 31377 - protein, 32 aa, Artificial Sequence
  Cyclic GFR-binding peptide
  MOD_RES (2)..(2): Xaa is C or S
GXARVVMNEYQKYIVNSSDDIYLVSIPSLQTP

SEQ ID NO: 31378 - protein, 34 aa, Artificial Sequence
  Cyclic GFR-binding peptide
  MOD_RES (28)..(28): Xaa is C or S
MNEYQKYIVNSSDDIYLVSIPSLKTPAXTPKTVH

SEQ ID NO: 31379 - protein, 30 aa, Artificial Sequence
  Cyclic GFR-binding peptide
  MOD_RES (28)..(29): Xaa is C or S
VMEYQKYVKPTRGVIYLISIPSLDQPVXXP

SEQ ID NO: 31380 - protein, 21 aa, Artificial Sequence
  Cyclic GFR-binding peptide
MEYQKYVKPKRGVIYLISIPS

SEQ ID NO: 31381 - protein, 33 aa, Artificial Sequence; identical to SEQ ID NO: 3124
  Cyclic GFR-binding peptide
  MOD_RES (1)..(32)..(33): Xaa is C or S

SEQ ID NO: 31382 - protein, 27 aa, Artificial Sequence
  Cyclic GFR-binding peptide
AVSMGERYKKLTPVGMDDFYLVSIANL

SEQ ID NO: 31383 - protein, 20 aa, Artificial Sequence
  Cyclic GFR-binding peptide
RYKKLIVNNSSDFYLVSIAN

SEQ ID NO: 31384 - protein, 32 aa, Artificial Sequence
  Cyclic GFR-binding peptide
  MOD_RES (2)..(2): Xaa is C or S
GXAEVVMDEYKFKVVNNAADLYLISIPELRAP

SEQ ID NO: 31385 - protein, 35 aa, Artificial Sequence; identical to SEQ ID NO: 3128
  Cyclic GFR-binding peptide
  MOD_RES (1)..(3)..(34)..(35): Xaa is C or S

SEQ ID NO: 31386 - protein, 27 aa, Artificial Sequence
  Cyclic GFR-binding peptide
MNYHYKLIVNSSDDKYLVSIPSLQTPA

SEQ ID NO: 31387 - protein, 30 aa, Artificial Sequence; identical to SEQ ID NO: 3130
  Cyclic GFR-binding peptide
  MOD_RES (27)..(28): Xaa is C or S

SEQ ID NO: 31388 - protein, 31 aa, Artificial Sequence
  Cyclic GFR-binding peptide
  MOD_RES (30)..(31): Xaa is C or S
KVIMEYKFKIKPTKGILYLISIPELDQSVXX

SEQ ID NO: 31389 - protein, 39 aa, Artificial Sequence
  Cyclic GFR-binding peptide
  MOD_RES (2)..(34)..(35): Xaa is C or S
GXAKVVMNEYQKYIVNNSSDIYLVSIPSLKTPAXXAKPV

SEQ ID NO: 31390 - protein, 25 aa, Artificial Sequence
  Cyclic GFR-binding peptide
VVMRYKKLVKPTRGVFYLISIANLD

SEQ ID NO: 31391 - protein, 25 aa, Artificial Sequence
  Cyclic GFR-binding peptide
MYHYKLIKPTKGIKYLISIPSLDQS

SEQ ID NO: 31392 - protein, 27 aa, Artificial Sequence
  Cyclic GFR-binding peptide
VVMEYHYKLVVKDYEDKYLMSIPSLET

SEQ ID NO: 31393 - protein, 23 aa, Artificial Sequence
  Cyclic GFR-binding peptide
MNRYKKLIVNNSSDFYLVSIANL

SEQ ID NO: 31394 - protein, 32 aa, Artificial Sequence
  Cyclic GFR-binding peptide
  MOD_RES (32)..(32): Xaa is C or S
AKVVMNEYKFKIVNNSSDLYLVSIPELKTPAX

SEQ ID NO: 31395 - protein, 27 aa, Artificial Sequence
  Cyclic GFR-binding peptide
  MOD_RES (1)..(1): Xaa is C or S
XARVVMNYHYKLIVNSSDDKYLVSIPS

SEQ ID NO: 31396 - protein, 30 aa, Artificial Sequence
  Cyclic GFR-binding peptide
  MOD_RES (30)..(30): Xaa is C or S
RVIMEYQKYVKPKRGVIYLISIPSLAQPVX

SEQ ID NO: 31397 - protein, 29 aa, Artificial Sequence
  Cyclic GFR-binding peptide
  MOD_RES (1)..(3): Xaa is C or S
XKXSKVIMEYQKYIKPTKGIIYLISIPSL

SEQ ID NO: 31398 - protein, 37 aa, Artificial Sequence
  Cyclic GFR-binding peptide
  MOD_RES (31)..(31): Xaa is C or S
RVVMNEYKFKIVNSSDDLYLVSIPELKTPAXTPKTVH

SEQ ID NO: 31399 - protein, 33 aa, Artificial Sequence
  Cyclic GFR-binding peptide
  MOD_RES (29)..(30): Xaa is C or S
AMGYHYKLYTVVGKDKYLISIPSLKTPVXXAKS

SEQ ID NO: 31400 - protein, 34 aa, Artificial Sequence; identical to SEQ ID NO: 3143
  Cyclic GFR-binding peptide
  MOD_RES (1)..(3): Xaa is C or S

SEQ ID NO: 31401 - protein, 34 aa, Artificial Sequence; identical to SEQ ID NO: 3145
  Cyclic GFR-binding peptide
  MOD_RES (28)..(28): Xaa is C or S

SEQ ID NO: 31402 - protein, 34 aa, Artificial Sequence
  Cyclic GFR-binding peptide
  MOD_RES (28)..(29): Xaa is C or S
MNEYQKYIVNNSSDIYLVSIPSLKTPAXXAKPVA

SEQ ID NO: 31403 - protein, 31 aa, Artificial Sequence; identical to SEQ ID NO: 3146
  Cyclic GFR-binding peptide
  MOD_RES (2)..(4): Xaa is C or S

SEQ ID NO: 31404 - protein, 32 aa, Artificial Sequence
  Cyclic GFR-binding peptide
  MOD_RES (31)..(32): Xaa is C or S
SRVIMEYQKYVKPKRGVIYLISIPSLAQPVXX

SEQ ID NO: 31405 - protein, 35 aa, Artificial Sequence
  Cyclic GFR-binding peptide
  MOD_RES (32)..(33): Xaa is C or S
AKVVMNEYQKYIVNNSSDIYLVSIPSLKTPAXXAK

SEQ ID NO: 31406 - protein, 40 aa, Artificial Sequence
  Cyclic GFR-binding peptide
  MOD_RES (2)..(34)..(35): Xaa is C or S
GXAEVVMDEYKFKVVNNAADLYLISIPELRAPVXXSAPAA

SEQ ID NO: 31407 - protein, 28 aa, Artificial Sequence
  Cyclic GFR-binding peptide
KVIMYHYKLIKPTKGIKYLISIPSLDQS

SEQ ID NO: 31408 - protein, 23 aa, Artificial Sequence
  Cyclic GFR-binding peptide
GEEYQKYTPVGMDDIYLVSIPSL

SEQ ID NO: 31409 - protein, 39 aa, Artificial Sequence; identical to SEQ ID NO: 3150
  Cyclic GFR-binding peptide
  MOD_RES (2)..(4)..(36)..(37): Xaa is C or S

SEQ ID NO: 31410 - protein, 29 aa, Artificial Sequence
  Cyclic GFR-binding peptide
EAVSMGEEYKFKTPVGMDDLYLVSIPELK

SEQ ID NO: 31411 - protein, 34 aa, Artificial Sequence
  Cyclic GFR-binding peptide
  MOD_RES (28)..(29): Xaa is C or S
MGRYKKLYTVVGKDFYLISIANLKTPVXXAKSAK

SEQ ID NO: 31412 - protein, 40 aa, Artificial Sequence
  Cyclic GFR-binding peptide
  MOD_RES (2)..(4)..(35)..(36): Xaa is C or S
SXKXSRVIMEYKFKVKPKRGVLYLISIPELAQPVXXPAAS

SEQ ID NO: 31413 - protein, 28 aa, Artificial Sequence
  Cyclic GFR-binding peptide
  MOD_RES (28)..(28): Xaa is C or S
MNYHYKLIVNSSDDKYLVSIPSLKTPAX

SEQ ID NO: 31414 - protein, 41 aa, Artificial Sequence; identical to SEQ ID NO: 3155
  Cyclic GFR-binding peptide
  MOD_RES (1)..(3)..(35)..(36): Xaa is C or S

SEQ ID NO: 31415 - protein, 34 aa, Artificial Sequence; identical to SEQ ID NO: 3156
  Cyclic GFR-binding peptide
  MOD_RES (2)..(4): Xaa is C or S

SEQ ID NO: 31416 - protein, 30 aa, Artificial Sequence
  Cyclic GFR-binding peptide
  MOD_RES (27)..(28): Xaa is C or S
MEYQKYIKPTKGIIYLISIPSLDQSVXXPS

SEQ ID NO: 31417 - protein, 38 aa, Artificial Sequence; identical to SEQ ID NO: 3157
  Cyclic GFR-binding peptide
  MOD_RES (2)..(4)..(36): Xaa is C or S

SEQ ID NO: 31418 - protein, 28 aa, Artificial Sequence
  Cyclic GFR-binding peptide
SRVVMNEYKFKIVNSSDDLYLVSIPELK

SEQ ID NO: 31419 - protein, 28 aa, Artificial Sequence
  Cyclic GFR-binding peptide
SRVIMYHYKLVKPKRGVKYLISIPSLAQ

SEQ ID NO: 31420 - protein, 26 aa, Artificial Sequence
  Cyclic GFR-binding peptide
NYHYKLIVNSSDDKYLVSIPSLKTPA

SEQ ID NO: 31421 - protein, 37 aa, Artificial Sequence; identical to SEQ ID NO: 3163
  Cyclic GFR-binding peptide
  MOD_RES (2)..(34)..(35): Xaa is C or S

SEQ ID NO: 31422 - protein, 25 aa, Artificial Sequence
  Cyclic GFR-binding peptide
EYQKYIVNNSSDIYLVSIPSLKTPA

SEQ ID NO: 31423 - protein, 32 aa, Artificial Sequence
  Cyclic GFR-binding peptide
  MOD_RES (2)..(2): Xaa is C or S
KXSKVVMEYKFKVKPTRGVLYLISIPELDQPV

SEQ ID NO: 31424 - protein, 28 aa, Artificial Sequence
  Cyclic GFR-binding peptide
  MOD_RES (27)..(28): Xaa is C or S
NEYKFKIVNNSSDLYLVSIPELKTPAXX

SEQ ID NO: 31425 - protein, 33 aa, Artificial Sequence; identical to SEQ ID NO: 3168
  Cyclic GFR-binding peptide
  MOD_RES (28)..(29): Xaa is C or S

SEQ ID NO: 31426 - protein, 26 aa, Artificial Sequence
  Cyclic GFR-binding peptide
MEYHYKLVVKDYEDKYLMSIPSLETP

SEQ ID NO: 31427 - protein, 33 aa, Artificial Sequence
  Cyclic GFR-binding peptide
  MOD_RES (29)..(29): Xaa is C or S
VMNEYQKYIVNSSDDIYLVSIPSLKTPAXTPKT

SEQ ID NO: 31428 - protein, 36 aa, Artificial Sequence
  Cyclic GFR-binding peptide
  MOD_RES (31)..(32): Xaa is C or S
KVVMNEYKFKIVNNSSDLYLVSIPELKTPAXXAKPV

SEQ ID NO: 31429 - protein, 34 aa, Artificial Sequence; identical to SEQ ID NO: 3170
  Cyclic GFR-binding peptide
  MOD_RES (1)..(33)..(34): Xaa is C or S

SEQ ID NO: 31430 - protein, 34 aa, Artificial Sequence; identical to SEQ ID NO: 3171
  Cyclic GFR-binding peptide
  MOD_RES (28)..(29): Xaa is C or S

SEQ ID NO: 31431 - protein, 33 aa, Artificial Sequence; identical to SEQ ID NO: 3175
  Cyclic GFR-binding peptide
  MOD_RES (27)..(28): Xaa is C or S

SEQ ID NO: 31432 - protein, 24 aa, Artificial Sequence
  Cyclic GFR-binding peptide
NEYKFKIVNSSDDLYLVSIPELQT

SEQ ID NO: 31433 - protein, 25 aa, Artificial Sequence
  Cyclic GFR-binding peptide
EVVMDEYKFKVVKENEDLYLMSIPE

SEQ ID NO: 31434 - protein, 38 aa, Artificial Sequence; identical to SEQ ID NO: 3176
  Cyclic GFR-binding peptide
  MOD_RES (2)..(34): Xaa is C or S

SEQ ID NO: 31435 - protein, 31 aa, Artificial Sequence
  Cyclic GFR-binding peptide
  MOD_RES (1)..(1): Xaa is C or S
XAKVVMNEYKFKIVNNSSDLYLVSIPELKTP

SEQ ID NO: 31436 - protein, 32 aa, Artificial Sequence
  Cyclic GFR-binding peptide
  MOD_RES (29)..(30): Xaa is C or S
VMNEYKFKIVNNSSDLYLVSIPELKTPAXXAK

SEQ ID NO: 31437 - protein, 29 aa, Artificial Sequence
  Cyclic GFR-binding peptide
  MOD_RES (1)..(1): Xaa is C or S
XSRVVMNEYKFKIVNSSDDLYLVSIPELK

SEQ ID NO: 31438 - protein, 29 aa, Artificial Sequence
  Cyclic GFR-binding peptide
  MOD_RES (2)..(4): Xaa is C or S
SXKXSKVIMRYKKLIKPTKGIFYLISIAN

SEQ ID NO: 31439 - protein, 23 aa, Artificial Sequence
  Cyclic GFR-binding peptide
MEYHYKLVVKDYEDKYLMSIPSL

SEQ ID NO: 31440 - protein, 21 aa, Artificial Sequence
  Cyclic GFR-binding peptide
NEYKFKIVNSSDDLYLVSIPE

SEQ ID NO: 31441 - protein, 34 aa, Artificial Sequence; identical to SEQ ID NO: 3180
  Cyclic GFR-binding peptide
  MOD_RES (31)..(32): Xaa is C or S

SEQ ID NO: 31442 - protein, 38 aa, Artificial Sequence
  Cyclic GFR-binding peptide
  MOD_RES (2)..(34)..(35): Xaa is C or S
GXSRVVMNEYQKYIVNSSDDIYLVSIPSLKTPAXXPKP

SEQ ID NO: 31443 - protein, 27 aa, Artificial Sequence
  Cyclic GFR-binding peptide
EVVMEEYQKYVVKDYEDIYLMSIPSLE

SEQ ID NO: 31444 - protein, 32 aa, Artificial Sequence; identical to SEQ ID NO: 3183
  Cyclic GFR-binding peptide
  MOD_RES (30)..(31): Xaa is C or S

SEQ ID NO: 31445 - protein, 36 aa, Artificial Sequence; identical to SEQ ID NO: 3184
  Cyclic GFR-binding peptide
  MOD_RES (1)..(3)..(34)..(35): Xaa is C or S

SEQ ID NO: 31446 - protein, 26 aa, Artificial Sequence
  Cyclic GFR-binding peptide
SMGEEYKFKTPVGMDDLYLVSIPELK

SEQ ID NO: 31447 - protein, 27 aa, Artificial Sequence
  Cyclic GFR-binding peptide
IMEYKFKIKPTKGILYLISIPELDQSV

SEQ ID NO: 31448 - protein, 29 aa, Artificial Sequence
  Cyclic GFR-binding peptide
  MOD_RES (1)..(1): Xaa is C or S
XESVAMGRYKKLYTVVGKDFYLISIANLK

SEQ ID NO: 31449 - protein, 26 aa, Artificial Sequence
  Cyclic GFR-binding peptide
EVVMDRYKKLVVNNAADFYLISIANL

SEQ ID NO: 31450 - protein, 26 aa, Artificial Sequence
  Cyclic GFR-binding peptide
  MOD_RES (26)..(26): Xaa is C or S
YHYKLVVKDYEDKYLMSIPSLETPVX

SEQ ID NO: 31451 - protein, 36 aa, Artificial Sequence
  Cyclic GFR-binding peptide
  MOD_RES (32)..(33): Xaa is C or S
ARVVMNEYQKYIVNSSDDIYLVSIPSLQTPAXXPKP

SEQ ID NO: 31452 - protein, 30 aa, Artificial Sequence
  Cyclic GFR-binding peptide
  MOD_RES (2)..(4): Xaa is C or S
SXKXSRVIMEYQKYVKPKRGVIYLISIPSL

SEQ ID NO: 31453 - protein, 24 aa, Artificial Sequence
  Cyclic GFR-binding peptide
MNEYQKYIVNSSDDIYLVSIPSLQ

SEQ ID NO: 31454 - protein, 29 aa, Artificial Sequence
  Cyclic GFR-binding peptide
AVSMGERYKKLTPVGMDDFYLVSIANLKT

SEQ ID NO: 31455 - protein, 34 aa, Artificial Sequence
  Cyclic GFR-binding peptide
  MOD_RES (29)..(30): Xaa is C or S
VMDRYKKLVVNNAADFYLISIANLRAPVXXSAPA

SEQ ID NO: 31456 - protein, 29 aa, Artificial Sequence
  Cyclic GFR-binding peptide
  MOD_RES (1)..(1): Xaa is C or S
XESVAMGYHYKLYTVVGKDKYLISIPSLK

SEQ ID NO: 31457 - protein, 32 aa, Artificial Sequence; identical to SEQ ID NO: 3191
  Cyclic GFR-binding peptide
  MOD_RES (32)..(32): Xaa is C or S

SEQ ID NO: 31458 - protein, 31 aa, Artificial Sequence; identical to SEQ ID NO: 3192
  Cyclic GFR-binding peptide
  MOD_RES (29)..(30): Xaa is C or S

SEQ ID NO: 31459 - protein, 23 aa, Artificial Sequence
  Cyclic GFR-binding peptide
DRYKKLVVKENEDFYLMSIANLE

SEQ ID NO: 31460 - protein, 33 aa, Artificial Sequence
  Cyclic GFR-binding peptide
  MOD_RES (2)..(33): Xaa is C or S
KXSKVVMEYQKYVKPTRGVIYLISIPSLDQPVX

SEQ ID NO: 31461 - protein, 32 aa, Artificial Sequence
  Cyclic GFR-binding peptide
  MOD_RES (26)..(27): Xaa is C or S
EYQKYVVKENEDIYLMSIPSLETPVXXAKPIK

SEQ ID NO: 31462 - protein, 37 aa, Artificial Sequence
  Cyclic GFR-binding peptide
  MOD_RES (1)..(33)..(34): Xaa is C or S
XAKVVMNEYQKYIVNNSSDIYLVSIPSLKTPAXXAKP

SEQ ID NO: 31463 - protein, 34 aa, Artificial Sequence
  Cyclic GFR-binding peptide
  MOD_RES (2)..(33)..(34): Xaa is C or S
KXSKVVMEYKFKVKPTRGVLYLISIPELDQPVXX

SEQ ID NO: 31464 - protein, 29 aa, Artificial Sequence
  Cyclic GFR-binding peptide
VVMDEYKFKVVNNAADLYLISIPELRAPV

SEQ ID NO: 31465 - protein, 38 aa, Artificial Sequence; identical to SEQ ID NO: 3198
  Cyclic GFR-binding peptide
  MOD_RES (2)..(4)..(35)..(36): Xaa is C or S

SEQ ID NO: 31466 - protein, 30 aa, Artificial Sequence; identical to SEQ ID NO: 3199
  Cyclic GFR-binding peptide
  MOD_RES (28)..(29): Xaa is C or S

SEQ ID NO: 31467 - protein, 41 aa, Artificial Sequence
  Cyclic GFR-binding peptide
  MOD_RES (2)..(4)..(36): Xaa is C or S
HXGXSRVVMNEYKFKIVNSSDDLYLVSIPELKTPAXTPKTV

SEQ ID NO: 31468 - protein, 42 aa, Artificial Sequence
  Cyclic GFR-binding peptide
  MOD_RES (2)..(4)..(36)..(37): Xaa is C or S
RXGXESVAMGRYKKLYTVVGKDFYLISIANLKTPVXXAKSAK

SEQ ID NO: 31469 - protein, 26 aa, Artificial Sequence
  Cyclic GFR-binding peptide
  MOD_RES (1)..(1): Xaa is C or S
XSRVIMYHYKLVKPKRGVKYLISIPS

SEQ ID NO: 31470 - protein, 31 aa, Artificial Sequence; identical to SEQ ID NO: 3203
  Cyclic GFR-binding peptide
  MOD_RES (28)..(28): Xaa is C or S

SEQ ID NO: 31471 - protein, 38 aa, Artificial Sequence
  Cyclic GFR-binding peptide
  MOD_RES (2)..(33)..(34): Xaa is C or S
KXSKVIMEYQKYIKPTKGIIYLISIPSLDQSVXXPSAS

SEQ ID NO: 31472 - protein, 32 aa, Artificial Sequence; identical to SEQ ID NO: 3205
  Cyclic GFR-binding peptide
  MOD_RES (30)..(31): Xaa is C or S

SEQ ID NO: 31473 - protein, 30 aa, Artificial Sequence
  Cyclic GFR-binding peptide
SKVIMEYKFKIKPTKGILYLISIPELDQSV

SEQ ID NO: 31474 - protein, 29 aa, Artificial Sequence
  Cyclic GFR-binding peptide
  MOD_RES (2)..(2): Xaa is C or S
GXESVAMGRYKKLYTVVGKDFYLISIANL

SEQ ID NO: 31475 - protein, 32 aa, Artificial Sequence; identical to SEQ ID NO: 3206
  Cyclic GFR-binding peptide
  MOD_RES (32)..(32): Xaa is C or S

SEQ ID NO: 31476 - protein, 31 aa, Artificial Sequence
  Cyclic GFR-binding peptide
  MOD_RES (1)..(3): Xaa is C or S
XGXGEVVMEEYKFKVVKDYEDLYLMSIPELE

SEQ ID NO: 31477 - protein, 23 aa, Artificial Sequence
  Cyclic GFR-binding peptide
EYQKYIVNSSDDIYLVSIPSLQT

SEQ ID NO: 31478 - protein, 38 aa, Artificial Sequence; identical to SEQ ID NO: 3214
  Cyclic GFR-binding peptide
  MOD_RES (1)..(3)..(34)..(35): Xaa is C or S

SEQ ID NO: 31479 - protein, 26 aa, Artificial Sequence
  Cyclic GFR-binding peptide
  MOD_RES (26)..(26): Xaa is C or S
EYQKYVKPKRGVIYLISIPSLAQPVX

SEQ ID NO: 31480 - protein, 30 aa, Artificial Sequence; identical to SEQ ID NO: 3216
  Cyclic GFR-binding peptide
  MOD_RES (1)..(3): Xaa is C or S

SEQ ID NO: 31481 - protein, 29 aa, Artificial Sequence
  Cyclic GFR-binding peptide
GEVVMEYHYKLVVKDYEDKYLMSIPSLET

SEQ ID NO: 31482 - protein, 26 aa, Artificial Sequence
  Cyclic GFR-binding peptide
MDEYKFKVVKENEDLYLMSIPELETP

SEQ ID NO: 31483 - protein, 25 aa, Artificial Sequence
  Cyclic GFR-binding peptide
RYKKLTPVGMDDFYLVSIANLKTPV

SEQ ID NO: 31484 - protein, 28 aa, Artificial Sequence
  Cyclic GFR-binding peptide
  MOD_RES (28)..(28): Xaa is C or S
MNEYQKYIVNSSDDIYLVSIPSLQTPAX

SEQ ID NO: 31485 - protein, 39 aa, Artificial Sequence
  Cyclic GFR-binding peptide
  MOD_RES (1)..(3)..(36)..(37): Xaa is C or S
XGXEAVSMGEEYKFKTPVGMDDLYLVSIPELKTPVXXAK

SEQ ID NO: 31486 - protein, 31 aa, Artificial Sequence
  Cyclic GFR-binding peptide
  MOD_RES (26)..(27): Xaa is C or S
EYKFKIVNSSDDLYLVSIPELKTPAXXPKPV

SEQ ID NO: 31487 - protein, 26 aa, Artificial Sequence
  Cyclic GFR-binding peptide
NEYQKYIVNNSSDIYLVSIPSLKTPA

SEQ ID NO: 31488 - protein, 28 aa, Artificial Sequence
  Cyclic GFR-binding peptide
  MOD_RES (28)..(28): Xaa is C or S
VMEYKFKVKPTRGVLYLISIPELDQPVX

SEQ ID NO: 31489 - protein, 32 aa, Artificial Sequence
  Cyclic GFR-binding peptide
  MOD_RES (2)..(4): Xaa is C or S
RXGXGEVVMDEYKFKVVKENEDLYLMSIPELE

SEQ ID NO: 31490 - protein, 30 aa, Artificial Sequence
  Cyclic GFR-binding peptide
  MOD_RES (28)..(29): Xaa is C or S
IMEYKFKVKPKRGVLYLISIPELAQPVXXP

SEQ ID NO: 31491 - protein, 37 aa, Artificial Sequence; identical to SEQ ID NO: 3223
  Cyclic GFR-binding peptide
  MOD_RES (1)..(3)..(34)..(35): Xaa is C or S

SEQ ID NO: 31492 - protein, 39 aa, Artificial Sequence
  Cyclic GFR-binding peptide
  MOD_RES (2)..(34)..(35): Xaa is C or S
GXESVAMGRYKKLYTVVGKDFYLISIANLKTPVXXAKSA

SEQ ID NO: 31493 - protein, 36 aa, Artificial Sequence; identical to SEQ ID NO: 3224
  Cyclic GFR-binding peptide
  MOD_RES (1)..(32)..(33): Xaa is C or S

SEQ ID NO: 31494 - protein, 26 aa, Artificial Sequence
  Cyclic GFR-binding peptide
RVIMEYQKYVKPKRGVIYLISIPSLA

SEQ ID NO: 31495 - protein, 30 aa, Artificial Sequence; identical to SEQ ID NO: 3229
  Cyclic GFR-binding peptide
  MOD_RES (30)..(30): Xaa is C or S

SEQ ID NO: 31496 - protein, 21 aa, Artificial Sequence
  Cyclic GFR-binding peptide
DYHYKLVVKENEDKYLMSIPS

SEQ ID NO: 31497 - protein, 30 aa, Artificial Sequence
  Cyclic GFR-binding peptide
  MOD_RES (2)..(2): Xaa is C or S
GXGEVVMEEYKFKVVKDYEDLYLMSIPELE

SEQ ID NO: 31498 - protein, 27 aa, Artificial Sequence
  Cyclic GFR-binding peptide
  MOD_RES (26)..(27): Xaa is C or S
EYKFKVVKDYEDLYLMSIPELETPVXX

SEQ ID NO: 31499 - protein, 30 aa, Artificial Sequence
  Cyclic GFR-binding peptide
  MOD_RES (26)..(27): Xaa is C or S
EYKFKVKPKRGVLYLISIPELAQPVXXPAA

SEQ ID NO: 31500 - protein, 34 aa, Artificial Sequence
  Cyclic GFR-binding peptide
  MOD_RES (31)..(32): Xaa is C or S
SKVVMEYKFKVKPTRGVLYLISIPELDQPVXXPS

SEQ ID NO: 31501 - protein, 33 aa, Artificial Sequence; identical to SEQ ID NO: 3233
  Cyclic GFR-binding peptide
  MOD_RES (1)..(3): Xaa is C or S

SEQ ID NO: 31502 - protein, 33 aa, Artificial Sequence
  Cyclic GFR-binding peptide
  MOD_RES (2)..(4): Xaa is C or S
SXKXSKVIMEYKFKIKPTKGILYLISIPELDQS

SEQ ID NO: 31503 - protein, 30 aa, Artificial Sequence; identical to SEQ ID NO: 3234
  Cyclic GFR-binding peptide
  MOD_RES (29)..(30): Xaa is C or S

SEQ ID NO: 31504 - protein, 36 aa, Artificial Sequence; identical to SEQ ID NO: 3235
  Cyclic GFR-binding peptide
  MOD_RES (2)..(34)..(35): Xaa is C or S

SEQ ID NO: 31505 - protein, 38 aa, Artificial Sequence; identical to SEQ ID NO: 3236
  Cyclic GFR-binding peptide
  MOD_RES (2)..(33)..(34): Xaa is C or S

SEQ ID NO: 31506 - protein, 34 aa, Artificial Sequence
  Cyclic GFR-binding peptide
  MOD_RES (30)..(31): Xaa is C or S
VAMGRYKKLYTVVGKDFYLISIANLKTPVXXAKS

SEQ ID NO: 31507 - protein, 29 aa, Artificial Sequence
  Cyclic GFR-binding peptide
RVIMEYKFKVKPKRGVLYLISIPELAQPV

SEQ ID NO: 31508 - protein, 27 aa, Artificial Sequence
  Cyclic GFR-binding peptide
MDEYKFKVVKENEDLYLMSIPELETPV

SEQ ID NO: 31509 - protein, 26 aa, Artificial Sequence
  Cyclic GFR-binding peptide
MERYKKLVVKDYEDFYLMSIANLETP

SEQ ID NO: 31510 - protein, 28 aa, Artificial Sequence
  Cyclic GFR-binding peptide
VIMRYKKLVKPKRGVFYLISIANLAQPV

SEQ ID NO: 31511 - protein, 24 aa, Artificial Sequence
  Cyclic GFR-binding peptide
KVVMEYQKYVKPTRGVIYLISIPS

SEQ ID NO: 31512 - protein, 29 aa, Artificial Sequence
  Cyclic GFR-binding peptide
  MOD_RES (29)..(29): Xaa is C or S
VIMRYKKLVKPKRGVFYLISIANLAQPVX

SEQ ID NO: 31513 - protein, 40 aa, Artificial Sequence
  Cyclic GFR-binding peptide
  MOD_RES (2)..(4)..(36)..(37): Xaa is C or S
HXGXAKVVMNEYKFKIVNNSSDLYLVSIPELKTPAXXAKP

SEQ ID NO: 31514 - protein, 27 aa, Artificial Sequence
  Cyclic GFR-binding peptide
GEEYQKYTPVGMDDIYLVSIPSLKTPV

SEQ ID NO: 31515 - protein, 34 aa, Artificial Sequence
  Cyclic GFR-binding peptide
  MOD_RES (29)..(30): Xaa is C or S
VMEEYKFKVVKDYEDLYLMSIPELETPVXXAKPI

SEQ ID NO: 31516 - protein, 36 aa, Artificial Sequence
  Cyclic GFR-binding peptide
  MOD_RES (1)..(3)..(36): Xaa is C or S
XGXEAVSMGEEYKFKTPVGMDDLYLVSIPELKTPVX

SEQ ID NO: 31517 - protein, 29 aa, Artificial Sequence
  Cyclic GFR-binding peptide
  MOD_RES (29)..(29): Xaa is C or S
VMDYHYKLVVNNAADKYLISIPSLRAPVX

SEQ ID NO: 31518 - protein, 33 aa, Artificial Sequence
  Cyclic GFR-binding peptide
  MOD_RES (2)..(4): Xaa is C or S
RXGXEAVSMGEEYQKYTPVGMDDIYLVSIPSLK

SEQ ID NO: 31519 - protein, 24 aa, Artificial Sequence
  Cyclic GFR-binding peptide
ERYKKLVVKDYEDFYLMSIANLET

SEQ ID NO: 31520 - protein, 33 aa, Artificial Sequence
  Cyclic GFR-binding peptide
  MOD_RES (31)..(32): Xaa is C or S
SKVVMEYQKYVKPTRGVIYLISIPSLDQPVXXP

SEQ ID NO: 31521 - protein, 24 aa, Artificial Sequence
  Cyclic GFR-binding peptide
EEYQKYVVKDYEDIYLMSIPSLET

SEQ ID NO: 31522 - protein, 34 aa, Artificial Sequence
  Cyclic GFR-binding peptide
  MOD_RES (28)..(29): Xaa is C or S
MGYHYKLYTVVGKDKYLISIPSLKTPVXXAKSAK

SEQ ID NO: 31523 - protein, 23 aa, Artificial Sequence
  Cyclic GFR-binding peptide
NRYKKLIVNNSSDFYLVSIANLK

SEQ ID NO: 31524 - protein, 36 aa, Artificial Sequence
  Cyclic GFR-binding peptide
  MOD_RES (31)..(32): Xaa is C or S
EVVMDEYKFKVVNNAADLYLISIPELRAPVXXSAPA

SEQ ID NO: 31525 - protein, 31 aa, Artificial Sequence; identical to SEQ ID NO: 3254
  Cyclic GFR-binding peptide
  MOD_RES (1)..(3): Xaa is C or S

SEQ ID NO: 31526 - protein, 29 aa, Artificial Sequence
  Cyclic GFR-binding peptide
  MOD_RES (27)..(28): Xaa is C or S
GYHYKLYTVVGKDKYLISIPSLKTPVXXA

SEQ ID NO: 31527 - protein, 33 aa, Artificial Sequence; identical to SEQ ID NO: 3255
  Cyclic GFR-binding peptide
  MOD_RES (1)..(3): Xaa is C or S

SEQ ID NO: 31528 - protein, 41 aa, Artificial Sequence
  Cyclic GFR-binding peptide
  MOD_RES (2)..(4)..(36)..(37): Xaa is C or S
HXGXSRVVMNEYKFKIVNSSDDLYLVSIPELKTPAXXPKPV

SEQ ID NO: 31529 - protein, 32 aa, Artificial Sequence
  Cyclic GFR-binding peptide
  MOD_RES (2)..(4): Xaa is C or S
RXGXGEVVMDEYQKYVVKENEDIYLMSIPSLE

SEQ ID NO: 31530 - protein, 25 aa, Artificial Sequence
  Cyclic GFR-binding peptide
EVVMDYHYKLVVKENEDKYLMSIPS

SEQ ID NO: 31531 - protein, 29 aa, Artificial Sequence
  Cyclic GFR-binding peptide
  MOD_RES (29)..(29): Xaa is C or S
VMDYHYKLVVKENEDKYLMSIPSLETPVX

SEQ ID NO: 31532 - protein, 35 aa, Artificial Sequence
  Cyclic GFR-binding peptide
  MOD_RES (29)..(30): Xaa is C or S
VIMEYQKYIKPTKGIIYLISIPSLDQSVXXPSASA

SEQ ID NO: 31533 - protein, 36 aa, Artificial Sequence
  Cyclic GFR-binding peptide
  MOD_RES (30)..(31): Xaa is C or S
RVIMEYQKYVKPKRGVIYLISIPSLAQPVXXPAASA

SEQ ID NO: 31534 - protein, 29 aa, Artificial Sequence
  Cyclic GFR-binding peptide
  MOD_RES (28)..(29): Xaa is C or S
MNRYKKLIVNSSDDFYLVSIANLKTPAXX

SEQ ID NO: 31535 - protein, 26 aa, Artificial Sequence
  Cyclic GFR-binding peptide
IMEYKFKIKPTKGILYLISIPELDQS

SEQ ID NO: 31536 - protein, 28 aa, Artificial Sequence
  Cyclic GFR-binding peptide
  MOD_RES (1)..(1): Xaa is C or S
XARVVMNEYKFKIVNSSDDLYLVSIPEL

SEQ ID NO: 31537 - protein, 22 aa, Artificial Sequence
  Cyclic GFR-binding peptide
MEEYKFKVVKDYEDLYLMSIPE

SEQ ID NO: 31538 - protein, 36 aa, Artificial Sequence
  Cyclic GFR-binding peptide
  MOD_RES (30)..(31): Xaa is C or S
VVMNEYQKYIVNSSDDIYLVSIPSLKTPAXXPKPVY

SEQ ID NO: 31539 - protein, 32 aa, Artificial Sequence; identical to SEQ ID NO: 3265
  Cyclic GFR-binding peptide
  MOD_RES (2)..(2): Xaa is C or S

SEQ ID NO: 31540 - protein, 28 aa, Artificial Sequence
  Cyclic GFR-binding peptide
RVVMNEYQKYIVNSSDDIYLVSIPSLQT

SEQ ID NO: 31541 - protein, 37 aa, Artificial Sequence
  Cyclic GFR-binding peptide
  MOD_RES (2)..(4)..(36)..(37): Xaa is C or S
HXGXARVVMNEYKFKIVNSSDDLYLVSIPELQTPAXX

SEQ ID NO: 31542 - protein, 30 aa, Artificial Sequence; identical to SEQ ID NO: 3268
  Cyclic GFR-binding peptide
  MOD_RES (1)..(1): Xaa is C or S

SEQ ID NO: 31543 - protein, 39 aa, Artificial Sequence
  Cyclic GFR-binding peptide
  MOD_RES (1)..(3)..(35)..(36): Xaa is C or S
XGXESVAMGRYKKLYTVVGKDFYLISIANLKTPVXXAKS

SEQ ID NO: 31544 - protein, 33 aa, Artificial Sequence; identical to SEQ ID NO: 3269
  Cyclic GFR-binding peptide
  MOD_RES (2)..(4): Xaa is C or S

SEQ ID NO: 31545 - protein, 35 aa, Artificial Sequence; identical to SEQ ID NO: 3273
  Cyclic GFR-binding peptide
  MOD_RES (30)..(31): Xaa is C or S

SEQ ID NO: 31546 - protein, 23 aa, Artificial Sequence
  Cyclic GFR-binding peptide
VMNEYKFKIVNSSDDLYLVSIPE

SEQ ID NO: 31547 - protein, 29 aa, Artificial Sequence
  Cyclic GFR-binding peptide
  MOD_RES (28)..(29): Xaa is C or S
MDYHYKLVVNNAADKYLISIPSLRAPVXX

SEQ ID NO: 31548 - protein, 36 aa, Artificial Sequence
  Cyclic GFR-binding peptide
  MOD_RES (30)..(31): Xaa is C or S
SMGEEYQKYTPVGMDDIYLVSIPSLKTPVXXAKGVK

SEQ ID NO: 31549 - protein, 35 aa, Artificial Sequence
  Cyclic GFR-binding peptide
  MOD_RES (29)..(30): Xaa is C or S
AMGRYKKLYTVVGKDFYLISIANLKTPVXXAKSAK

SEQ ID NO: 31550 - protein, 23 aa, Artificial Sequence
  Cyclic GFR-binding peptide
MDEYKFKVVKENEDLYLMSIPEL

SEQ ID NO: 31551 - protein, 33 aa, Artificial Sequence
  Cyclic GFR-binding peptide
  MOD_RES (31)..(32): Xaa is C or S
SKVIMEYQKYIKPTKGIIYLISIPSLDQSVXXP

SEQ ID NO: 31552 - protein, 25 aa, Artificial Sequence
  Cyclic GFR-binding peptide
MNEYQKYIVNSSDDIYLVSIPSLKT

SEQ ID NO: 31553 - protein, 29 aa, Artificial Sequence
  Cyclic GFR-binding peptide
  MOD_RES (26)..(27): Xaa is C or S
EYQKYVKPKRGVIYLISIPSLAQPVXXPA

SEQ ID NO: 31554 - protein, 28 aa, Artificial Sequence
  Cyclic GFR-binding peptide
EVVMDEYKFKVVKENEDLYLMSIPELET

SEQ ID NO: 31555 - protein, 32 aa, Artificial Sequence; identical to SEQ ID NO: 3280
  Cyclic GFR-binding peptide
  MOD_RES (2)..(4): Xaa is C or S

SEQ ID NO: 31556 - protein, 37 aa, Artificial Sequence
  Cyclic GFR-binding peptide
  MOD_RES (2)..(34)..(35): Xaa is C or S
GXAEVVMDYHYKLVVNNAADKYLISIPSLRAPVXXSA

SEQ ID NO: 31557 - protein, 32 aa, Artificial Sequence; identical to SEQ ID NO: 3282
  Cyclic GFR-binding peptide
  MOD_RES (27)..(28): Xaa is C or S

SEQ ID NO: 31558 - protein, 34 aa, Artificial Sequence; identical to SEQ ID NO: 3283
  Cyclic GFR-binding peptide
  MOD_RES (29)..(30): Xaa is C or S

SEQ ID NO: 31559 - protein, 38 aa, Artificial Sequence; identical to SEQ ID NO: 3284
  Cyclic GFR-binding peptide
  MOD_RES (2)..(4)..(36)..(37): Xaa is C or S

SEQ ID NO: 31560 - protein, 40 aa, Artificial Sequence
  Cyclic GFR-binding peptide
  MOD_RES (2)..(4)..(37)..(38): Xaa is C or S
RXGXEAVSMGEEYQKYTPVGMDDIYLVSIPSLKTPVXXAK

SEQ ID NO: 31561 - protein, 33 aa, Artificial Sequence
  Cyclic GFR-binding peptide
  MOD_RES (29)..(29): Xaa is C or S
VMNEYKFKIVNSSDDLYLVSIPELKTPAXTPKT

SEQ ID NO: 31562 - protein, 32 aa, Artificial Sequence
  Cyclic GFR-binding peptide
  MOD_RES (1)..(3): Xaa is C or S
XGXARVVMNEYQKYIVNSSDDIYLVSIPSLQT

SEQ ID NO: 31563 - protein, 37 aa, Artificial Sequence
  Cyclic GFR-binding peptide
  MOD_RES (31)..(32): Xaa is C or S
SVAMGYHYKLYTVVGKDKYLISIPSLKTPVXXAKSAK

SEQ ID NO: 31564 - protein, 32 aa, Artificial Sequence; identical to SEQ ID NO: 3289
  Cyclic GFR-binding peptide
  MOD_RES (2)..(2): Xaa is C or S

SEQ ID NO: 31565 - protein, 31 aa, Artificial Sequence
  Cyclic GFR-binding peptide
  MOD_RES (28)..(29): Xaa is C or S
MEEYQKYVVKDYEDIYLMSIPSLETPVXXAK

SEQ ID NO: 31566 - protein, 35 aa, Artificial Sequence; identical to SEQ ID NO: 3294
  Cyclic GFR-binding peptide
  MOD_RES (1)..(32)..(33): Xaa is C or S

SEQ ID NO: 31567 - protein, 28 aa, Artificial Sequence
  Cyclic GFR-binding peptide
EVVMDRYKKLVVNNAADFYLISIANLRA

SEQ ID NO: 31568 - protein, 36 aa, Artificial Sequence
  Cyclic GFR-binding peptide
  MOD_RES (1)..(3)..(36): Xaa is C or S
XGXEAVSMGEEYQKYTPVGMDDIYLVSIPSLKTPVX

SEQ ID NO: 31569 - protein, 22 aa, Artificial Sequence
  Cyclic GFR-binding peptide
YHYKLVVKENEDKYLMSIPSLE

SEQ ID NO: 31570 - protein, 22 aa, Artificial Sequence
  Cyclic GFR-binding peptide
EEYQKYVVKDYEDIYLMSIPSL

SEQ ID NO: 31571 - protein, 31 aa, Artificial Sequence
  Cyclic GFR-binding peptide
  MOD_RES (27)..(28): Xaa is C or S
EEYKFKTPVGMDDLYLVSIPELKTPVXXAKG

SEQ ID NO: 31572 - protein, 33 aa, Artificial Sequence; identical to SEQ ID NO: 3300
  Cyclic GFR-binding peptide
  MOD_RES (27)..(28): Xaa is C or S

SEQ ID NO: 31573 - protein, 35 aa, Artificial Sequence
  Cyclic GFR-binding peptide
  MOD_RES (30)..(31): Xaa is C or S
VAMGEYQKYYTVVGKDIYLISIPSLKTPVXXAKSA

SEQ ID NO: 31574 - protein, 32 aa, Artificial Sequence
  Cyclic GFR-binding peptide
  MOD_RES (1)..(32): Xaa is C or S
XSKVVMEYKFKVKPTRGVLYLISIPELDQPVX

SEQ ID NO: 31575 - protein, 26 aa, Artificial Sequence
  Cyclic GFR-binding peptide
VSMGERYKKLTPVGMDDFYLVSIANL

SEQ ID NO: 31576 - protein, 31 aa, Artificial Sequence; identical to SEQ ID NO: 3308
  Cyclic GFR-binding peptide
  MOD_RES (28)..(29): Xaa is C or S

SEQ ID NO: 31577 - protein, 37 aa, Artificial Sequence; identical to SEQ ID NO: 3309
  Cyclic GFR-binding peptide
  MOD_RES (1)..(32)..(33): Xaa is C or S

SEQ ID NO: 31578 - protein, 22 aa, Artificial Sequence
  Cyclic GFR-binding peptide
ERYKKLVVKDYEDFYLMSIANL

SEQ ID NO: 31579 - protein, 25 aa, Artificial Sequence
  Cyclic GFR-binding peptide
VVMNRYKKLIVNNSSDFYLVSIANL

SEQ ID NO: 31580 - protein, 27 aa, Artificial Sequence
  Cyclic GFR-binding peptide
MDYHYKLVVNNAADKYLISIPSLRAPV

SEQ ID NO: 31581 - protein, 31 aa, Artificial Sequence
  Cyclic GFR-binding peptide
  MOD_RES (28)..(29): Xaa is C or S
VMEYQKYVKPTRGVIYLISIPSLDQPVXXPS

SEQ ID NO: 31582 - protein, 38 aa, Artificial Sequence
  Cyclic GFR-binding peptide
  MOD_RES (32)..(33): Xaa is C or S
AEVVMDYHYKLVVNNAADKYLISIPSLRAPVXXSAPAA

SEQ ID NO: 31583 - protein, 30 aa, Artificial Sequence
  Cyclic GFR-binding peptide
  MOD_RES (27)..(27): Xaa is C or S
NEYQKYIVNSSDDIYLVSIPSLKTPAXTPK

SEQ ID NO: 31584 - protein, 36 aa, Artificial Sequence
  Cyclic GFR-binding peptide
  MOD_RES (32)..(33): Xaa is C or S
SRVVMNEYKFKIVNSSDDLYLVSIPELKTPAXXPKP

SEQ ID NO: 31585 - protein, 33 aa, Artificial Sequence
  Cyclic GFR-binding peptide
  MOD_RES (2)..(2): Xaa is C or S
GXAEVVMDYHYKLVVNNAADKYLISIPSLRAPV

SEQ ID NO: 31586 - protein, 38 aa, Artificial Sequence
  Cyclic GFR-binding peptide
  MOD_RES (2)..(4)..(35)..(36): Xaa is C or S
SXKXSKVVMEYKFKVKPTRGVLYLISIPELDQPVXXPS

SEQ ID NO: 31587 - protein, 31 aa, Artificial Sequence
  Cyclic GFR-binding peptide
  MOD_RES (2)..(2): Xaa is C or S
GXAKVVMNEYKFKIVNNSSDLYLVSIPELKT

SEQ ID NO: 31588 - protein, 30 aa, Artificial Sequence
  Cyclic GFR-binding peptide
  MOD_RES (29)..(29): Xaa is C or S
VMNEYKFKIVNSSDDLYLVSIPELKTPAXT

SEQ ID NO: 31589 - protein, 29 aa, Artificial Sequence
  Cyclic GFR-binding peptide
SVAMGRYKKLYTVVGKDFYLISIANLKTP

SEQ ID NO: 31590 - protein, 39 aa, Artificial Sequence
  Cyclic GFR-binding peptide
  MOD_RES (1)..(3)..(35): Xaa is C or S
XGXSRVVMNEYKFKIVNSSDDLYLVSIPELKTPAXTPKT

SEQ ID NO: 31591 - protein, 34 aa, Artificial Sequence
  Cyclic GFR-binding peptide
  MOD_RES (32)..(32): Xaa is C or S
SRVVMNEYQKYIVNSSDDIYLVSIPSLKTPAXTP

SEQ ID NO: 31592 - protein, 27 aa, Artificial Sequence
  Cyclic GFR-binding peptide
  MOD_RES (2)..(2): Xaa is C or S
KXSRVIMEYKFKVKPKRGVLYLISIPE

SEQ ID NO: 31593 - protein, 28 aa, Artificial Sequence
  Cyclic GFR-binding peptide
EAVSMGERYKKLTPVGMDDFYLVSIANL

SEQ ID NO: 31594 - protein, 21 aa, Artificial Sequence
  Cyclic GFR-binding peptide
EEYKFKTPVGMDDLYLVSIPE

SEQ ID NO: 31595 - protein, 40 aa, Artificial Sequence; identical to SEQ ID NO: 3316
  Cyclic GFR-binding peptide
  MOD_RES (2)..(4)..(36)..(37): Xaa is C or S

SEQ ID NO: 31596 - protein, 27 aa, Artificial Sequence
  Cyclic GFR-binding peptide
SRVVMNRYKKLIVNSSDDFYLVSIANL

SEQ ID NO: 31597 - protein, 26 aa, Artificial Sequence
  Cyclic GFR-binding peptide
DEYKFKVVKENEDLYLMSIPELETPV

SEQ ID NO: 31598 - protein, 23 aa, Artificial Sequence
  Cyclic GFR-binding peptide
VIMRYKKLVKPKRGVFYLISIAN

SEQ ID NO: 31599 - protein, 35 aa, Artificial Sequence
  Cyclic GFR-binding peptide
  MOD_RES (31)..(32): Xaa is C or S
EVVMDEYQKYVVKENEDIYLMSIPSLETPVXXAKP

SEQ ID NO: 31600 - protein, 26 aa, Artificial Sequence
  Cyclic GFR-binding peptide
SRVVMNEYQKYIVNSSDDIYLVSIPS

SEQ ID NO: 31601 - protein, 27 aa, Artificial Sequence
  Cyclic GFR-binding peptide
MEEYQKYVVKDYEDIYLMSIPSLETPV

SEQ ID NO: 31602 - protein, 24 aa, Artificial Sequence
  Cyclic GFR-binding peptide
YHYKLVVKDYEDKYLMSIPSLETP

SEQ ID NO: 31603 - protein, 39 aa, Artificial Sequence; identical to SEQ ID NO: 3322
  Cyclic GFR-binding peptide
  MOD_RES (2)..(34): Xaa is C or S

SEQ ID NO: 31604 - protein, 31 aa, Artificial Sequence
  Cyclic GFR-binding peptide
  MOD_RES (2)..(2): Xaa is C or S
GXGEVVMDEYKFKVVKENEDLYLMSIPELET

SEQ ID NO: 31605 - protein, 34 aa, Artificial Sequence
  Cyclic GFR-binding peptide
  MOD_RES (28)..(29): Xaa is C or S
MNEYKFKIVNSSDDLYLVSIPELQTPAXXPKPVT

SEQ ID NO: 31606 - protein, 28 aa, Artificial Sequence
  Cyclic GFR-binding peptide
EVVMDYHYKLVVKENEDKYLMSIPSLET

SEQ ID NO: 31607 - protein, 29 aa, Artificial Sequence
  Cyclic GFR-binding peptide
  MOD_RES (1)..(3): Xaa is C or S
XKXSKVVMRYKKLVKPTRGVFYLISIANL

SEQ ID NO: 31608 - protein, 28 aa, Artificial Sequence
  Cyclic GFR-binding peptide
  MOD_RES (1)..(1): Xaa is C or S
XSKVIMRYKKLIKPTKGIFYLISIANLD

SEQ ID NO: 31609 - protein, 40 aa, Artificial Sequence; identical to SEQ ID NO: 3331
  Cyclic GFR-binding peptide
  MOD_RES (1)..(3)..(34)..(35): Xaa is C or S

SEQ ID NO: 31610 - protein, 26 aa, Artificial Sequence
  Cyclic GFR-binding peptide
ARVVMNEYQKYIVNSSDDIYLVSIPS

SEQ ID NO: 31611 - protein, 38 aa, Artificial Sequence; identical to SEQ ID NO: 3333
  Cyclic GFR-binding peptide
  MOD_RES (1)..(32)..(33): Xaa is C or S

SEQ ID NO: 31612 - protein, 27 aa, Artificial Sequence
  Cyclic GFR-binding peptide
VMDYHYKLVVKENEDKYLMSIPSLETP

SEQ ID NO: 31613 - protein, 31 aa, Artificial Sequence
  Cyclic GFR-binding peptide
  MOD_RES (1)..(3): Xaa is C or S
XKXSKVIMEYKFKIKPTKGILYLISIPELDQ

SEQ ID NO: 31614 - protein, 39 aa, Artificial Sequence; identical to SEQ ID NO: 3336
  Cyclic GFR-binding peptide
  MOD_RES (1)..(3)..(34)..(35): Xaa is C or S

SEQ ID NO: 31615 - protein, 38 aa, Artificial Sequence; identical to SEQ ID NO: 3337
  Cyclic GFR-binding peptide
  MOD_RES (2)..(35)..(36): Xaa is C or S

SEQ ID NO: 31616 - protein, 29 aa, Artificial Sequence
  Cyclic GFR-binding peptide
  MOD_RES (27)..(28): Xaa is C or S
DEYQKYVVKENEDIYLMSIPSLETPVXXA

SEQ ID NO: 31617 - protein, 28 aa, Artificial Sequence
  Cyclic GFR-binding peptide
  MOD_RES (27)..(28): Xaa is C or S
DRYKKLVVNNAADFYLISIANLRAPVXX

SEQ ID NO: 31618 - protein, 26 aa, Artificial Sequence
  Cyclic GFR-binding peptide
GERYKKLTPVGMDDFYLVSIANLKTP

SEQ ID NO: 31619 - protein, 30 aa, Artificial Sequence
  Cyclic GFR-binding peptide
AEVVMDEYKFKVVNNAADLYLISIPELRAP

SEQ ID NO: 31620 - protein, 27 aa, Artificial Sequence
  Cyclic GFR-binding peptide
MNYHYKLIVNSSDDKYLVSIPSLKTPA

SEQ ID NO: 31621 - protein, 33 aa, Artificial Sequence; identical to SEQ ID NO: 3342
  Cyclic GFR-binding peptide
  MOD_RES (30)..(30): Xaa is C or S

SEQ ID NO: 31622 - protein, 38 aa, Artificial Sequence; identical to SEQ ID NO: 3346
  Cyclic GFR-binding peptide
  MOD_RES (1)..(3)..(34)..(35): Xaa is C or S

SEQ ID NO: 31623 - protein, 37 aa, Artificial Sequence; identical to SEQ ID NO: 3348
  Cyclic GFR-binding peptide
  MOD_RES (1)..(33)..(34): Xaa is C or S

SEQ ID NO: 31624 - protein, 29 aa, Artificial Sequence
  Cyclic GFR-binding peptide
  MOD_RES (1)..(1): Xaa is C or S
XSRVIMEYKFKVKPKRGVLYLISIPELAQ

SEQ ID NO: 31625 - protein, 27 aa, Artificial Sequence
  Cyclic GFR-binding peptide
VMDYHYKLVVNNAADKYLISIPSLRAP

SEQ ID NO: 31626 - protein, 31 aa, Artificial Sequence; identical to SEQ ID NO: 3350
  Cyclic GFR-binding peptide
  MOD_RES (2)..(4): Xaa is C or S

SEQ ID NO: 31627 - protein, 27 aa, Artificial Sequence
  Cyclic GFR-binding peptide
VIMEYKFKVKPKRGVLYLISIPELAQP

SEQ ID NO: 31628 - protein, 32 aa, Artificial Sequence; identical to SEQ ID NO: 3351
  Cyclic GFR-binding peptide
  MOD_RES (28)..(29): Xaa is C or S

SEQ ID NO: 31629 - protein, 24 aa, Artificial Sequence
  Cyclic GFR-binding peptide
NYHYKLIVNSSDDKYLVSIPSLQT

SEQ ID NO: 31630 - protein, 28 aa, Artificial Sequence
  Cyclic GFR-binding peptide
SRVIMEYKFKVKPKRGVLYLISIPELAQ

SEQ ID NO: 31631 - protein, 34 aa, Artificial Sequence; identical to SEQ ID NO: 3354
  Cyclic GFR-binding peptide
  MOD_RES (2)..(4): Xaa is C or S

SEQ ID NO: 31632 - protein, 36 aa, Artificial Sequence; identical to SEQ ID NO: 3355
  Cyclic GFR-binding peptide
  MOD_RES (1)..(33)..(34): Xaa is C or S

SEQ ID NO: 31633 - protein, 30 aa, Artificial Sequence
  Cyclic GFR-binding peptide
  MOD_RES (1)..(3): Xaa is C or S
XGXAEVVMDEYKFKVVNNAADLYLISIPEL

SEQ ID NO: 31634 - protein, 32 aa, Artificial Sequence
  Cyclic GFR-binding peptide
  MOD_RES (2)..(2): Xaa is C or S
KXSKVVMEYQKYVKPTRGVIYLISIPSLDQPV

SEQ ID NO: 31635 - protein, 28 aa, Artificial Sequence
  Cyclic GFR-binding peptide
  MOD_RES (27)..(27): Xaa is C or S
NRYKKLIVNSSDDFYLVSIANLKTPAXT

SEQ ID NO: 31636 - protein, 37 aa, Artificial Sequence; identical to SEQ ID NO: 3362
  Cyclic GFR-binding peptide
  MOD_RES (2)..(4)..(36)..(37): Xaa is C or S

SEQ ID NO: 31637 - protein, 35 aa, Artificial Sequence; identical to SEQ ID NO: 3363
  Cyclic GFR-binding peptide
  MOD_RES (1)..(32)..(33): Xaa is C or S

SEQ ID NO: 31638 - protein, 37 aa, Artificial Sequence
  Cyclic GFR-binding peptide
  MOD_RES (1)..(34)..(35): Xaa is C or S
XEAVSMGEEYQKYTPVGMDDIYLVSIPSLKTPVXXAK

SEQ ID NO: 31639 - protein, 37 aa, Artificial Sequence; identical to SEQ ID NO: 3366
  Cyclic GFR-binding peptide
  MOD_RES (1)..(32)..(33): Xaa is C or S

SEQ ID NO: 31640 - protein, 26 aa, Artificial Sequence
  Cyclic GFR-binding peptide
GEEYQKYTPVGMDDIYLVSIPSLKTP

SEQ ID NO: 31641 - protein, 37 aa, Artificial Sequence; identical to SEQ ID NO: 3370
  Cyclic GFR-binding peptide
  MOD_RES (1)..(33)..(34): Xaa is C or S

SEQ ID NO: 31642 - protein, 21 aa, Artificial Sequence
  Cyclic GFR-binding peptide
EYQKYIVNSSDDIYLVSIPSL

SEQ ID NO: 31643 - protein, 21 aa, Artificial Sequence
  Cyclic GFR-binding peptide
EYQKYTPVGMDDIYLVSIPSL

SEQ ID NO: 31644 - protein, 28 aa, Artificial Sequence
  Cyclic GFR-binding peptide
VMDYHYKLVVKENEDKYLMSIPSLETPV

SEQ ID NO: 31645 - protein, 35 aa, Artificial Sequence
  Cyclic GFR-binding peptide
  MOD_RES (2)..(34)..(35): Xaa is C or S
GXAKVVMNEYQKYIVNNSSDIYLVSIPSLKTPAXX

SEQ ID NO: 31646 - protein, 31 aa, Artificial Sequence
  Cyclic GFR-binding peptide
  MOD_RES (29)..(30): Xaa is C or S
AMGYHYKLYTVVGKDKYLISIPSLKTPVXXA

SEQ ID NO: 31647 - protein, 29 aa, Artificial Sequence
  Cyclic GFR-binding peptide
  MOD_RES (28)..(29): Xaa is C or S
MNEYQKYIVNSSDDIYLVSIPSLKTPAXX

SEQ ID NO: 31648 - protein, 31 aa, Artificial Sequence
  Cyclic GFR-binding peptide
  MOD_RES (28)..(29): Xaa is C or S
IMEYQKYIKPTKGIIYLISIPSLDQSVXXPS

SEQ ID NO: 31649 - protein, 42 aa, Artificial Sequence; identical to SEQ ID NO: 3375
  Cyclic GFR-binding peptide
  MOD_RES (2)..(4)..(36)..(37): Xaa is C or S

SEQ ID NO: 31650 - protein, 33 aa, Artificial Sequence
  Cyclic GFR-binding peptide
  MOD_RES (2)..(4): Xaa is C or S
HXGXSRVVMNEYQKYIVNSSDDIYLVSIPSLKT

SEQ ID NO: 31651 - protein, 38 aa, Artificial Sequence; identical to SEQ ID NO: 3376
  Cyclic GFR-binding peptide
  MOD_RES (2)..(34)..(35): Xaa is C or S

SEQ ID NO: 31652 - protein, 31 aa, Artificial Sequence
  Cyclic GFR-binding peptide
  MOD_RES (31)..(31): Xaa is C or S
SVAMGYHYKLYTVVGKDKYLISIPSLKTPVX

SEQ ID NO: 31653 - protein, 28 aa, Artificial Sequence
  Cyclic GFR-binding peptide
  MOD_RES (26)..(27): Xaa is C or S
EYKFKVVKDYEDLYLMSIPELETPVXXA

SEQ ID NO: 31654 - protein, 30 aa, Artificial Sequence
  Cyclic GFR-binding peptide
  MOD_RES (30)..(30): Xaa is C or S
RVIMEYKFKVKPKRGVLYLISIPELAQPVX

SEQ ID NO: 31655 - protein, 33 aa, Artificial Sequence
  Cyclic GFR-binding peptide
  MOD_RES (32)..(33): Xaa is C or S
AVSMGEEYKFKTPVGMDDLYLVSIPELKTPVXX

SEQ ID NO: 31656 - protein, 21 aa, Artificial Sequence
  Cyclic GFR-binding peptide
NYHYKLIVNSSDDKYLVSIPS

SEQ ID NO: 31657 - protein, 37 aa, Artificial Sequence
  Cyclic GFR-binding peptide
  MOD_RES (2)..(4)..(36)..(37): Xaa is C or S
HXGXARVVMNEYQKYIVNSSDDIYLVSIPSLQTPAXX

SEQ ID NO: 31658 - protein, 27 aa, Artificial Sequence
  Cyclic GFR-binding peptide
VIMRYKKLVKPKRGVFYLISIANLAQP

SEQ ID NO: 31659 - protein, 35 aa, Artificial Sequence
  Cyclic GFR-binding peptide
  MOD_RES (1)..(3)..(35): Xaa is C or S
XGXGEVVMDEYKFKVVKENEDLYLMSIPELETPVX

SEQ ID NO: 31660 - protein, 35 aa, Artificial Sequence; identical to SEQ ID NO: 3386
  Cyclic GFR-binding peptide
  MOD_RES (29)..(30): Xaa is C or S

SEQ ID NO: 31661 - protein, 31 aa, Artificial Sequence
  Cyclic GFR-binding peptide
  MOD_RES (30)..(31): Xaa is C or S
VVMNEYQKYIVNNSSDIYLVSIPSLKTPAXX

SEQ ID NO: 31662 - protein, 37 aa, Artificial Sequence
  Cyclic GFR-binding peptide
  MOD_RES (2)..(33)..(34): Xaa is C or S
KXSRVIMEYQKYVKPKRGVIYLISIPSLAQPVXXPAA

SEQ ID NO: 31663 - protein, 31 aa, Artificial Sequence
  Cyclic GFR-binding peptide
  MOD_RES (1)..(1): Xaa is C or S
XEAVSMGEEYKFKTPVGMDDLYLVSIPELKT

SEQ ID NO: 31664 - protein, 24 aa, Artificial Sequence
  Cyclic GFR-binding peptide
EYQKYIVNNSSDIYLVSIPSLKTP

SEQ ID NO: 31665 - protein, 32 aa, Artificial Sequence
  Cyclic GFR-binding peptide
  MOD_RES (31)..(32): Xaa is C or S
SVAMGYHYKLYTVVGKDKYLISIPSLKTPVXX

SEQ ID NO: 31666 - protein, 24 aa, Artificial Sequence
  Cyclic GFR-binding peptide
VVMNYHYKLIVNNSSDKYLVSIPS

SEQ ID NO: 31667 - protein, 34 aa, Artificial Sequence
  Cyclic GFR-binding peptide
  MOD_RES (1)..(3)..(34): Xaa is C or S
XKXSKVVMEYKFKVKPTRGVLYLISIPELDQPVX

SEQ ID NO: 31668 - protein, 29 aa, Artificial Sequence
  Cyclic GFR-binding peptide
  MOD_RES (2)..(2): Xaa is C or S
GXEAVSMGERYKKLTPVGMDDFYLVSIAN

SEQ ID NO: 31669 - protein, 35 aa, Artificial Sequence; identical to SEQ ID NO: 3392
  Cyclic GFR-binding peptide
  MOD_RES (1)..(3)..(35): Xaa is C or S

SEQ ID NO: 31670 - protein, 32 aa, Artificial Sequence; identical to SEQ ID NO: 3393
  Cyclic GFR-binding peptide
  MOD_RES (2)..(2): Xaa is C or S

SEQ ID NO: 31671 - protein, 37 aa, Artificial Sequence
  Cyclic GFR-binding peptide
  MOD_RES (1)..(33)..(34): Xaa is C or S
XAKVVMNEYKFKIVNNSSDLYLVSIPELKTPAXXAKP

SEQ ID NO: 31672 - protein, 29 aa, Artificial Sequence
  Cyclic GFR-binding peptide
  MOD_RES (1)..(3): Xaa is C or S
XGXARVVMNYHYKLIVNSSDDKYLVSIPS

SEQ ID NO: 31673 - protein, 34 aa, Artificial Sequence
  Cyclic GFR-binding peptide
  MOD_RES (2)..(34): Xaa is C or S
GXAKVVMNEYKFKIVNNSSDLYLVSIPELKTPAX

SEQ ID NO: 31674 - protein, 31 aa, Artificial Sequence
  Cyclic GFR-binding peptide
  MOD_RES (2)..(4): Xaa is C or S
RXGXGEVVMEEYQKYVVKDYEDIYLMSIPSL

SEQ ID NO: 31675 - protein, 36 aa, Artificial Sequence
  Cyclic GFR-binding peptide
  MOD_RES (31)..(32): Xaa is C or S
VSMGEEYKFKTPVGMDDLYLVSIPELKTPVXXAKGV

SEQ ID NO: 31676 - protein, 36 aa, Artificial Sequence
  Cyclic GFR-binding peptide
  MOD_RES (1)..(3)..(35)..(36): Xaa is C or S
XGXESVAMGYHYKLYTVVGKDKYLISIPSLKTPVXX

SEQ ID NO: 31677 - protein, 32 aa, Artificial Sequence
  Cyclic GFR-binding peptide
  MOD_RES (27)..(28): Xaa is C or S
NEYQKYIVNNSSDIYLVSIPSLKTPAXXAKPV

SEQ ID NO: 31678 - protein, 32 aa, Artificial Sequence; identical to SEQ ID NO: 3400
  Cyclic GFR-binding peptide
  MOD_RES (26)..(27): Xaa is C or S

SEQ ID NO: 31679 - protein, 28 aa, Artificial Sequence
  Cyclic GFR-binding peptide
  MOD_RES (2)..(2): Xaa is C or S
GXAKVVMNEYQKYIVNNSSDIYLVSIPS

SEQ ID NO: 31680 - protein, 36 aa, Artificial Sequence
  Cyclic GFR-binding peptide
  MOD_RES (30)..(31): Xaa is C or S
VVMDEYKFKVVNNAADLYLISIPELRAPVXXSAPAA

SEQ ID NO: 31681 - protein, 28 aa, Artificial Sequence
  Cyclic GFR-binding peptide
  MOD_RES (2)..(2): Xaa is C or S
GXAEVVMDEYKFKVVNNAADLYLISIPE

SEQ ID NO: 31682 - protein, 36 aa, Artificial Sequence
  Cyclic GFR-binding peptide
  MOD_RES (1)..(33)..(34): Xaa is C or S
XAKVVMNEYKFKIVNNSSDLYLVSIPELKTPAXXAK

SEQ ID NO: 31683 - protein, 42 aa, Artificial Sequence
  Cyclic GFR-binding peptide
  MOD_RES (2)..(4)..(36)..(37): Xaa is C or S
RXGXGEVVMEEYQKYVVKDYEDIYLMSIPSLETPVXXAKPIS

SEQ ID NO: 31684 - protein, 32 aa, Artificial Sequence
  Cyclic GFR-binding peptide
  MOD_RES (26)..(27): Xaa is C or S
RYKKLVVNNAADFYLISIANLRAPVXXSAPAA

SEQ ID NO: 31685 - protein, 31 aa, Artificial Sequence
  Cyclic GFR-binding peptide
  MOD_RES (2)..(4): Xaa is C or S
SXKXSKVVMEYQKYVKPTRGVIYLISIPSLD

SEQ ID NO: 31686 - protein, 24 aa, Artificial Sequence
  Cyclic GFR-binding peptide
MNYHYKLIVNSSDDKYLVSIPSLK

SEQ ID NO: 31687 - protein, 42 aa, Artificial Sequence; identical to SEQ ID NO: 3408
  Cyclic GFR-binding peptide
  MOD_RES (2)..(4)..(36)..(37): Xaa is C or S

SEQ ID NO: 31688 - protein, 36 aa, Artificial Sequence
  Cyclic GFR-binding peptide
  MOD_RES (1)..(3)..(35)..(36): Xaa is C or S
XGXAKVVMNEYKFKIVNNSSDLYLVSIPELKTPAXX

SEQ ID NO: 31689 - protein, 32 aa, Artificial Sequence
  Cyclic GFR-binding peptide
  MOD_RES (28)..(29): Xaa is C or S
MNEYKFKIVNNSSDLYLVSIPELKTPAXXAKP

SEQ ID NO: 31690 - protein, 36 aa, Artificial Sequence; identical to SEQ ID NO: 3410
  Cyclic GFR-binding peptide
  MOD_RES (30)..(31): Xaa is C or S

SEQ ID NO: 31691 - protein, 33 aa, Artificial Sequence; identical to SEQ ID NO: 3411
  Cyclic GFR-binding peptide
  MOD_RES (28)..(29): Xaa is C or S

SEQ ID NO: 31692 - protein, 28 aa, Artificial Sequence
  Cyclic GFR-binding peptide
VMDYHYKLVVNNAADKYLISIPSLRAPV

SEQ ID NO: 31693 - protein, 40 aa, Artificial Sequence; identical to SEQ ID NO: 3412
  Cyclic GFR-binding peptide
  MOD_RES (2)..(34)..(35): Xaa is C or S

SEQ ID NO: 31694 - protein, 27 aa, Artificial Sequence
  Cyclic GFR-binding peptide
MERYKKLVVKDYEDFYLMSIANLETPV

SEQ ID NO: 31695 - protein, 37 aa, Artificial Sequence; identical to SEQ ID NO: 3415
  Cyclic GFR-binding peptide
  MOD_RES (2)..(4)..(36)..(37): Xaa is C or S

SEQ ID NO: 31696 - protein, 35 aa, Artificial Sequence; identical to SEQ ID NO: 3417
  Cyclic GFR-binding peptide
  MOD_RES (31)..(32): Xaa is C or S

SEQ ID NO: 31697 - protein, 30 aa, Artificial Sequence; identical to SEQ ID NO: 3422
  Cyclic GFR-binding peptide

SEQ ID NO: 31698 - protein, 26 aa, Artificial Sequence
  Cyclic GFR-binding peptide
RVVMNEYQKYIVNSSDDIYLVSIPSL

SEQ ID NO: 31699 - protein, 29 aa, Artificial Sequence
  Cyclic GFR-binding peptide
  MOD_RES (1)..(1): Xaa is C or S
XSRVVMNEYQKYIVNSSDDIYLVSIPSLK

SEQ ID NO: 31700 - protein, 41 aa, Artificial Sequence
  Cyclic GFR-binding peptide
  MOD_RES (1)..(3)..(35)..(36): Xaa is C or S
XGXARVVMNEYKFKIVNSSDDLYLVSIPELQTPAXXPKPVT

SEQ ID NO: 31701 - protein, 34 aa, Artificial Sequence; identical to SEQ ID NO: 3426
  Cyclic GFR-binding peptide
  MOD_RES (33)..(34): Xaa is C or S

SEQ ID NO: 31702 - protein, 30 aa, Artificial Sequence; identical to SEQ ID NO: 3429
  Cyclic GFR-binding peptide
  MOD_RES (28)..(29): Xaa is C or S

SEQ ID NO: 31703 - protein, 35 aa, Artificial Sequence; identical to SEQ ID NO: 3431
  Cyclic GFR-binding peptide
  MOD_RES (32)..(33): Xaa is C or S

SEQ ID NO: 31704 - protein, 34 aa, Artificial Sequence
  Cyclic GFR-binding peptide
  MOD_RES (1)..(3)..(34): Xaa is C or S
XKXSKVIMEYKFKIKPTKGILYLISIPELDQSVX

SEQ ID NO: 31705 - protein, 31 aa, Artificial Sequence
  Cyclic GFR-binding peptide
  MOD_RES (2)..(2): Xaa is C or S
GXESVAMGYHYKLYTVVGKDKYLISIPSLKT

SEQ ID NO: 31706 - protein, 29 aa, Artificial Sequence
  Cyclic GFR-binding peptide
  MOD_RES (26)..(27): Xaa is C or S
EYQKYIVNSSDDIYLVSIPSLQTPAXXPK

SEQ ID NO: 31707 - protein, 30 aa, Artificial Sequence
  Cyclic GFR-binding peptide
  MOD_RES (2)..(4): Xaa is C or S
HXGXAKVVMNEYQKYIVNNSSDIYLVSIPS

SEQ ID NO: 31708 - protein, 28 aa, Artificial Sequence
  Cyclic GFR-binding peptide
  MOD_RES (26)..(27): Xaa is C or S
YHYKLVVKDYEDKYLMSIPSLETPVXXA

SEQ ID NO: 31709 - protein, 29 aa, Artificial Sequence
  Cyclic GFR-binding peptide
  MOD_RES (1)..(3): Xaa is C or S
XGXSRVVMNEYQKYIVNSSDDIYLVSIPS

SEQ ID NO: 31710 - protein, 26 aa, Artificial Sequence
  Cyclic GFR-binding peptide
  MOD_RES (1)..(1): Xaa is C or S
XSKVVMEYQKYVKPTRGVIYLISIPS

SEQ ID NO: 31711 - protein, 28 aa, Artificial Sequence
  Cyclic GFR-binding peptide
  MOD_RES (2)..(2): Xaa is C or S
GXAKVVMNYHYKLIVNNSSDKYLVSIPS

SEQ ID NO: 31712 - protein, 30 aa, Artificial Sequence; identical to SEQ ID NO: 3441
  Cyclic GFR-binding peptide
  MOD_RES (1)..(1): Xaa is C or S

SEQ ID NO: 31713 - protein, 24 aa, Artificial Sequence
  Cyclic GFR-binding peptide
VIMEYQKYIKPTKGIIYLISIPSL

SEQ ID NO: 31714 - protein, 37 aa, Artificial Sequence; identical to SEQ ID NO: 3446
  Cyclic GFR-binding peptide
  MOD_RES (2)..(34): Xaa is C or S

SEQ ID NO: 31715 - protein, 36 aa, Artificial Sequence
  Cyclic GFR-binding peptide
  MOD_RES (1)..(33)..(34): Xaa is C or S
XESVAMGEYQKYYTVVGKDIYLISIPSLKTPVXXAK

SEQ ID NO: 31716 - protein, 28 aa, Artificial Sequence
  Cyclic GFR-binding peptide
  MOD_RES (1)..(1): Xaa is C or S
XAEVVMDEYKFKVVNNAADLYLISIPEL

SEQ ID NO: 31717 - protein, 32 aa, Artificial Sequence
  Cyclic GFR-binding peptide
  MOD_RES (29)..(30): Xaa is C or S
VMNEYKFKIVNSSDDLYLVSIPELQTPAXXPK

SEQ ID NO: 31718 - protein, 38 aa, Artificial Sequence; identical to SEQ ID NO: 3450
  Cyclic GFR-binding peptide
  MOD_RES (1)..(32)..(33): Xaa is C or S

SEQ ID NO: 31719 - protein, 33 aa, Artificial Sequence
  Cyclic GFR-binding peptide
  MOD_RES (32)..(33): Xaa is C or S
AKVVMNEYKFKIVNNSSDLYLVSIPELKTPAXX

SEQ ID NO: 31720 - protein, 24 aa, Artificial Sequence
  Cyclic GFR-binding peptide
EYQKYVKPKRGVIYLISIPSLAQP

SEQ ID NO: 31721 - protein, 29 aa, Artificial Sequence
  Cyclic GFR-binding peptide
SKVIMEYKFKIKPTKGILYLISIPELDQS

SEQ ID NO: 31722 - protein, 33 aa, Artificial Sequence
  Cyclic GFR-binding peptide
  MOD_RES (1)..(3): Xaa is C or S
XGXAKVVMNEYQKYIVNNSSDIYLVSIPSLKTP

SEQ ID NO: 31723 - protein, 33 aa, Artificial Sequence
  Cyclic GFR-binding peptide
  MOD_RES (30)..(31): Xaa is C or S
RVIMEYQKYVKPKRGVIYLISIPSLAQPVXXPA

SEQ ID NO: 31724 - protein, 34 aa, Artificial Sequence
  Cyclic GFR-binding peptide
  MOD_RES (30)..(31): Xaa is C or S
KVIMEYQKYIKPTKGIIYLISIPSLDQSVXXPSA

SEQ ID NO: 31725 - protein, 34 aa, Artificial Sequence; identical to SEQ ID NO: 3452
  Cyclic GFR-binding peptide
  MOD_RES (32)..(33): Xaa is C or S

SEQ ID NO: 31726 - protein, 36 aa, Artificial Sequence; identical to SEQ ID NO: 3454
  Cyclic GFR-binding peptide
  MOD_RES (31)..(32): Xaa is C or S

SEQ ID NO: 31727 - protein, 31 aa, Artificial Sequence
  Cyclic GFR-binding peptide
  MOD_RES (1)..(1): Xaa is C or S
XSKVIMEYKFKIKPTKGILYLISIPELDQSV

SEQ ID NO: 31728 - protein, 22 aa, Artificial Sequence
  Cyclic GFR-binding peptide
MNYHYKLIVNNSSDKYLVSIPS

SEQ ID NO: 31729 - protein, 24 aa, Artificial Sequence
  Cyclic GFR-binding peptide
VVMDRYKKLVVNNAADFYLISIAN

SEQ ID NO: 31730 - protein, 21 aa, Artificial Sequence
  Cyclic GFR-binding peptide
MRYKKLVKPKRGVFYLISIAN

SEQ ID NO: 31731 - protein, 33 aa, Artificial Sequence
  Cyclic GFR-binding peptide
  MOD_RES (1)..(3): Xaa is C or S
XKXSKVVMEYKFKVKPTRGVLYLISIPELDQPV

SEQ ID NO: 31732 - protein, 31 aa, Artificial Sequence
  Cyclic GFR-binding peptide
  MOD_RES (2)..(2): Xaa is C or S
GXESVAMGEYQKYYTVVGKDIYLISIPSLKT

SEQ ID NO: 31733 - protein, 37 aa, Artificial Sequence; identical to SEQ ID NO: 3460
  Cyclic GFR-binding peptide
  MOD_RES (2)..(34)..(35): Xaa is C or S

SEQ ID NO: 31734 - protein, 32 aa, Artificial Sequence
  Cyclic GFR-binding peptide
  MOD_RES (26)..(27): Xaa is C or S
RYKKLYTVVGKDFYLISIANLKTPVXXAKSAK

SEQ ID NO: 31735 - protein, 31 aa, Artificial Sequence
  Cyclic GFR-binding peptide
  MOD_RES (28)..(29): Xaa is C or S
MNEYKFKIVNSSDDLYLVSIPELKTPAXXPK

SEQ ID NO: 31736 - protein, 30 aa, Artificial Sequence; identical to SEQ ID NO: 3463
  Cyclic GFR-binding peptide
  MOD_RES (2)..(4): Xaa is C or S

SEQ ID NO: 31737 - protein, 35 aa, Artificial Sequence; identical to SEQ ID NO: 3465
  Cyclic GFR-binding peptide
  MOD_RES (1)..(33)..(34): Xaa is C or S

SEQ ID NO: 31738 - protein, 32 aa, Artificial Sequence
  Cyclic GFR-binding peptide
  MOD_RES (1)..(3): Xaa is C or S
XGXSRVVMNEYQKYIVNSSDDIYLVSIPSLKT

SEQ ID NO: 31739 - protein, 34 aa, Artificial Sequence
  Cyclic GFR-binding peptide
  MOD_RES (1)..(3): Xaa is C or S
XGXGEVVMDEYQKYVVKENEDIYLMSIPSLETPV

SEQ ID NO: 31740 - protein, 30 aa, Artificial Sequence
  Cyclic GFR-binding peptide
  MOD_RES (28)..(29): Xaa is C or S
MNEYQKYIVNNSSDIYLVSIPSLKTPAXXA

SEQ ID NO: 31741 - protein, 41 aa, Artificial Sequence; identical to SEQ ID NO: 3470
  Cyclic GFR-binding peptide
  MOD_RES (2)..(4)..(35)..(36): Xaa is C or S

SEQ ID NO: 31742 - protein, 24 aa, Artificial Sequence
  Cyclic GFR-binding peptide
EYKFKVVKDYEDLYLMSIPELETP

SEQ ID NO: 31743 - protein, 33 aa, Artificial Sequence
  Cyclic GFR-binding peptide
  MOD_RES (27)..(28): Xaa is C or S
MEYKFKVKPKRGVLYLISIPELAQPVXXPAASA

SEQ ID NO: 31744 - protein, 24 aa, Artificial Sequence
  Cyclic GFR-binding peptide
VMEYKFKVKPTRGVLYLISIPELD

SEQ ID NO: 31745 - protein, 22 aa, Artificial Sequence
  Cyclic GFR-binding peptide
NYHYKLIVNNSSDKYLVSIPSL

SEQ ID NO: 31746 - protein, 37 aa, Artificial Sequence
  Cyclic GFR-binding peptide
  MOD_RES (2)..(4)..(35)..(36): Xaa is C or S
SXKXSKVVMEYKFKVKPTRGVLYLISIPELDQPVXXP

SEQ ID NO: 31747 - protein, 34 aa, Artificial Sequence; identical to SEQ ID NO: 3475
  Cyclic GFR-binding peptide
  MOD_RES (31)..(32): Xaa is C or S

SEQ ID NO: 31748 - protein, 36 aa, Artificial Sequence
  Cyclic GFR-binding peptide
  MOD_RES (32)..(33): Xaa is C or S
AEVVMDEYKFKVVNNAADLYLISIPELRAPVXXSAP

SEQ ID NO: 31749 - protein, 33 aa, Artificial Sequence
  Cyclic GFR-binding peptide
  MOD_RES (1)..(3): Xaa is C or S
XKXSKVIMEYKFKIKPTKGILYLISIPELDQSV

SEQ ID NO: 31750 - protein, 40 aa, Artificial Sequence
  Cyclic GFR-binding peptide
  MOD_RES (2)..(4)..(36)..(37): Xaa is C or S
RXGXESVAMGEYQKYYTVVGKDIYLISIPSLKTPVXXAKS

SEQ ID NO: 31751 - protein, 33 aa, Artificial Sequence
  Cyclic GFR-binding peptide
  MOD_RES (32)..(32): Xaa is C or S
SRVVMNEYKFKIVNSSDDLYLVSIPELKTPAXT

SEQ ID NO: 31752 - protein, 28 aa, Artificial Sequence
  Cyclic GFR-binding peptide
GEVVMERYKKLVVKDYEDFYLMSIANLE

SEQ ID NO: 31753 - protein, 31 aa, Artificial Sequence; identical to SEQ ID NO: 3479
  Cyclic GFR-binding peptide
  MOD_RES (27)..(28): Xaa is C or S

SEQ ID NO: 31754 - protein, 31 aa, Artificial Sequence
  Cyclic GFR-binding peptide
  MOD_RES (2)..(2): Xaa is C or S
GXAEVVMDYHYKLVVNNAADKYLISIPSLRA

SEQ ID NO: 31755 - protein, 32 aa, Artificial Sequence
  Cyclic GFR-binding peptide
  MOD_RES (1)..(32): Xaa is C or S
XSKVIMEYKFKIKPTKGILYLISIPELDQSVX

SEQ ID NO: 31756 - protein, 30 aa, Artificial Sequence
  Cyclic GFR-binding peptide
  MOD_RES (2)..(4): Xaa is C or S
HXGXAKVVMNEYKFKIVNNSSDLYLVSIPE

SEQ ID NO: 31757 - protein, 37 aa, Artificial Sequence
  Cyclic GFR-binding peptide
  MOD_RES (2)..(34)..(35): Xaa is C or S
GXGEVVMDEYQKYVVKENEDIYLMSIPSLETPVXXAK

SEQ ID NO: 31758 - protein, 33 aa, Artificial Sequence
  Cyclic GFR-binding peptide
  MOD_RES (2)..(33): Xaa is C or S
KXSKVVMEYKFKVKPTRGVLYLISIPELDQPVX

SEQ ID NO: 31759 - protein, 27 aa, Artificial Sequence
  Cyclic GFR-binding peptide
SVAMGRYKKLYTVVGKDFYLISIANLK

SEQ ID NO: 31760 - protein, 31 aa, Artificial Sequence; identical to SEQ ID NO: 3484
  Cyclic GFR-binding peptide
  MOD_RES (2)..(4): Xaa is C or S

SEQ ID NO: 31761 - protein, 39 aa, Artificial Sequence
  Cyclic GFR-binding peptide
  MOD_RES (2)..(34): Xaa is C or S
GXSRVVMNEYQKYIVNSSDDIYLVSIPSLKTPAXTPKTV

SEQ ID NO: 31762 - protein, 31 aa, Artificial Sequence
  Cyclic GFR-binding peptide
  MOD_RES (2)..(4): Xaa is C or S
RXGXGEVVMEEYKFKVVKDYEDLYLMSIPEL

SEQ ID NO: 31763 - protein, 30 aa, Artificial Sequence
  Cyclic GFR-binding peptide
  MOD_RES (27)..(28): Xaa is C or S
DEYKFKVVKENEDLYLMSIPELETPVXXAK

SEQ ID NO: 31764 - protein, 30 aa, Artificial Sequence; identical to SEQ ID NO: 3487
  Cyclic GFR-binding peptide
  MOD_RES (1)..(1): Xaa is C or S

SEQ ID NO: 31765 - protein, 22 aa, Artificial Sequence
  Cyclic GFR-binding peptide
EYKFKVVKENEDLYLMSIPELE

SEQ ID NO: 31766 - protein, 30 aa, Artificial Sequence; identical to SEQ ID NO: 3488
  Cyclic GFR-binding peptide

SEQ ID NO: 31767 - protein, 25 aa, Artificial Sequence
  Cyclic GFR-binding peptide
MEYKFKIKPTKGILYLISIPELDQS

SEQ ID NO: 31768 - protein, 27 aa, Artificial Sequence
  Cyclic GFR-binding peptide
AVSMGEEYQKYTPVGMDDIYLVSIPSL

SEQ ID NO: 31769 - protein, 28 aa, Artificial Sequence
  Cyclic GFR-binding peptide
VIMEYKFKVKPKRGVLYLISIPELAQPV

SEQ ID NO: 31770 - protein, 25 aa, Artificial Sequence
  Cyclic GFR-binding peptide
ERYKKLVVKDYEDFYLMSIANLETP

SEQ ID NO: 31771 - protein, 32 aa, Artificial Sequence; identical to SEQ ID NO: 3494
  Cyclic GFR-binding peptide
  MOD_RES (1)..(32): Xaa is C or S

SEQ ID NO: 31772 - protein, 28 aa, Artificial Sequence
  Cyclic GFR-binding peptide
  MOD_RES (28)..(28): Xaa is C or S
MDYHYKLVVNNAADKYLISIPSLRAPVX

SEQ ID NO: 31773 - protein, 30 aa, Artificial Sequence
  Cyclic GFR-binding peptide
SKVVMEYKFKVKPTRGVLYLISIPELDQPV

SEQ ID NO: 31774 - protein, 33 aa, Artificial Sequence
  Cyclic GFR-binding peptide
  MOD_RES (2)..(4): Xaa is C or S
RXGXESVAMGRYKKLYTVVGKDFYLISIANLKT

SEQ ID NO: 31775 - protein, 31 aa, Artificial Sequence; identical to SEQ ID NO: 3495
  Cyclic GFR-binding peptide
  MOD_RES (1)..(1): Xaa is C or S

SEQ ID NO: 31776 - protein, 23 aa, Artificial Sequence
  Cyclic GFR-binding peptide
RYKKLVVKDYEDFYLMSIANLET

SEQ ID NO: 31777 - protein, 31 aa, Artificial Sequence
  Cyclic GFR-binding peptide
  MOD_RES (2)..(4): Xaa is C or S
RXGXAEVVMDRYKKLVVNNAADFYLISIANL

SEQ ID NO: 31778 - protein, 24 aa, Artificial Sequence
  Cyclic GFR-binding peptide
MGEEYQKYTPVGMDDIYLVSIPSL

SEQ ID NO: 31779 - protein, 30 aa, Artificial Sequence; identical to SEQ ID NO: 3497
  Cyclic GFR-binding peptide
  MOD_RES (26)..(27): Xaa is C or S

SEQ ID NO: 31780 - protein, 30 aa, Artificial Sequence; identical to SEQ ID NO: 3501
  Cyclic GFR-binding peptide
  MOD_RES (27)..(28): Xaa is C or S

SEQ ID NO: 31781 - protein, 36 aa, Artificial Sequence; identical to SEQ ID NO: 3502
  Cyclic GFR-binding peptide
  MOD_RES (2)..(4)..(35)..(36): Xaa is C or S

SEQ ID NO: 31782 - protein, 32 aa, Artificial Sequence
  Cyclic GFR-binding peptide
  MOD_RES (30)..(31): Xaa is C or S
KVVMEYQKYVKPTRGVIYLISIPSLDQPVXXP

SEQ ID NO: 31783 - protein, 40 aa, Artificial Sequence; identical to SEQ ID NO: 3504
  Cyclic GFR-binding peptide
  MOD_RES (1)..(3)..(34)..(35): Xaa is C or S

SEQ ID NO: 31784 - protein, 34 aa, Artificial Sequence; identical to SEQ ID NO: 3505
  Cyclic GFR-binding peptide
  MOD_RES (30)..(31): Xaa is C or S

SEQ ID NO: 31785 - protein, 30 aa, Artificial Sequence; identical to SEQ ID NO: 3507
  Cyclic GFR-binding peptide
  MOD_RES (2)..(2): Xaa is C or S

SEQ ID NO: 31786 - protein, 27 aa, Artificial Sequence
  Cyclic GFR-binding peptide
  MOD_RES (26)..(26): Xaa is C or S
RYKKLIVNSSDDFYLVSIANLKTPAXT

SEQ ID NO: 31787 - protein, 28 aa, Artificial Sequence
  Cyclic GFR-binding peptide
  MOD_RES (2)..(2): Xaa is C or S
GXSRVVMNYHYKLIVNSSDDKYLVSIPS

SEQ ID NO: 31788 - protein, 27 aa, Artificial Sequence
  Cyclic GFR-binding peptide
VMNEYKFKIVNSSDDLYLVSIPELQTP

SEQ ID NO: 31789 - protein, 36 aa, Artificial Sequence; identical to SEQ ID NO: 3514
  Cyclic GFR-binding peptide
  MOD_RES (1)..(33)..(34): Xaa is C or S

SEQ ID NO: 31790 - protein, 32 aa, Artificial Sequence
  Cyclic GFR-binding peptide
  MOD_RES (1)..(3): Xaa is C or S
XKXSKVIMEYQKYIKPTKGIIYLISIPSLDQS

SEQ ID NO: 31791 - protein, 33 aa, Artificial Sequence
  Cyclic GFR-binding peptide
  MOD_RES (29)..(30): Xaa is C or S
VIMEYQKYVKPKRGVIYLISIPSLAQPVXXPAA

SEQ ID NO: 31792 - protein, 34 aa, Artificial Sequence
  Cyclic GFR-binding peptide
  MOD_RES (2)..(4): Xaa is C or S
RXGXESVAMGEYKFKYTVVGKDLYLISIPELKTP

SEQ ID NO: 31793 - protein, 31 aa, Artificial Sequence
  Cyclic GFR-binding peptide
  MOD_RES (1)..(3): Xaa is C or S
XKXSRVIMEYKFKVKPKRGVLYLISIPELAQ

SEQ ID NO: 31794 - protein, 37 aa, Artificial Sequence; identical to SEQ ID NO: 3517
  Cyclic GFR-binding peptide
  MOD_RES (2)..(4)..(35)..(36): Xaa is C or S

SEQ ID NO: 31795 - protein, 35 aa, Artificial Sequence
  Cyclic GFR-binding peptide
  MOD_RES (31)..(32): Xaa is C or S
RVVMNEYQKYIVNSSDDIYLVSIPSLKTPAXXPKP

SEQ ID NO: 31796 - protein, 32 aa, Artificial Sequence
  Cyclic GFR-binding peptide
  MOD_RES (29)..(30): Xaa is C or S
VIMEYKFKVKPKRGVLYLISIPELAQPVXXPA

SEQ ID NO: 31797 - protein, 30 aa, Artificial Sequence
  Cyclic GFR-binding peptide
  MOD_RES (26)..(27): Xaa is C or S
EYQKYIVNSSDDIYLVSIPSLQTPAXXPKP

SEQ ID NO: 31798 - protein, 25 aa, Artificial Sequence
  Cyclic GFR-binding peptide
VVMNEYQKYIVNNSSDIYLVSIPSL

SEQ ID NO: 31799 - protein, 24 aa, Artificial Sequence
  Cyclic GFR-binding peptide
EEYKFKVVKDYEDLYLMSIPELET

SEQ ID NO: 31800 - protein, 29 aa, Artificial Sequence
  Cyclic GFR-binding peptide
  MOD_RES (1)..(1): Xaa is C or S
XARVVMNEYKFKIVNSSDDLYLVSIPELQ

SEQ ID NO: 31801 - protein, 35 aa, Artificial Sequence; identical to SEQ ID NO: 3519
  Cyclic GFR-binding peptide
  MOD_RES (1)..(3)..(34)..(35): Xaa is C or S

SEQ ID NO: 31802 - protein, 30 aa, Artificial Sequence; identical to SEQ ID NO: 3520
  Cyclic GFR-binding peptide
  MOD_RES (2)..(2): Xaa is C or S

SEQ ID NO: 31803 - protein, 38 aa, Artificial Sequence; identical to SEQ ID NO: 3522
  Cyclic GFR-binding peptide
  MOD_RES (1)..(33)..(34): Xaa is C or S

SEQ ID NO: 31804 - protein, 29 aa, Artificial Sequence
  Cyclic GFR-binding peptide
  MOD_RES (2)..(2): Xaa is C or S
GXSRVVMNYHYKLIVNSSDDKYLVSIPSL

SEQ ID NO: 31805 - protein, 29 aa, Artificial Sequence
  Cyclic GFR-binding peptide
  MOD_RES (2)..(4): Xaa is C or S
SXKXSKVVMYHYKLVKPTRGVKYLISIPS

SEQ ID NO: 31806 - protein, 29 aa, Artificial Sequence
  Cyclic GFR-binding peptide
EAVSMGEEYQKYTPVGMDDIYLVSIPSLK

SEQ ID NO: 31807 - protein, 29 aa, Artificial Sequence
  Cyclic GFR-binding peptide
SVAMGYHYKLYTVVGKDKYLISIPSLKTP

SEQ ID NO: 31808 - protein, 25 aa, Artificial Sequence
  Cyclic GFR-binding peptide
MNYHYKLIVNSSDDKYLVSIPSLKT

SEQ ID NO: 31809 - protein, 29 aa, Artificial Sequence
  Cyclic GFR-binding peptide
  MOD_RES (2)..(4): Xaa is C or S
SXKXSRVIMRYKKLVKPKRGVFYLISIAN

SEQ ID NO: 31810 - protein, 29 aa, Artificial Sequence
  Cyclic GFR-binding peptide
  MOD_RES (1)..(3): Xaa is C or S
XGXARVVMNEYKFKIVNSSDDLYLVSIPE

SEQ ID NO: 31811 - protein, 30 aa, Artificial Sequence; identical to SEQ ID NO: 3529
  Cyclic GFR-binding peptide

SEQ ID NO: 31812 - protein, 25 aa, Artificial Sequence
  Cyclic GFR-binding peptide
EVVMEEYQKYVVKDYEDIYLMSIPS

SEQ ID NO: 31813 - protein, 28 aa, Artificial Sequence
  Cyclic GFR-binding peptide
  MOD_RES (1)..(1): Xaa is C or S
XSRVIMEYQKYVKPKRGVIYLISIPSLA

SEQ ID NO: 31814 - protein, 23 aa, Artificial Sequence
  Cyclic GFR-binding peptide
NYHYKLIVNSSDDKYLVSIPSLK

SEQ ID NO: 31815 - protein, 22 aa, Artificial Sequence
  Cyclic GFR-binding peptide
EEYKFKVVKDYEDLYLMSIPEL

SEQ ID NO: 31816 - protein, 32 aa, Artificial Sequence
  Cyclic GFR-binding peptide
  MOD_RES (30)..(31): Xaa is C or S
VVMNEYQKYIVNNSSDIYLVSIPSLKTPAXXA

SEQ ID NO: 31817 - protein, 29 aa, Artificial Sequence
  Cyclic GFR-binding peptide
  MOD_RES (1)..(1): Xaa is C or S
XSRVVMNRYKKLIVNSSDDFYLVSIANLK

SEQ ID NO: 31818 - protein, 30 aa, Artificial Sequence
  Cyclic GFR-binding peptide
  MOD_RES (28)..(29): Xaa is C or S
MDRYKKLVVNNAADFYLISIANLRAPVXXS

SEQ ID NO: 31819 - protein, 28 aa, Artificial Sequence
  Cyclic GFR-binding peptide
  MOD_RES (26)..(26): Xaa is C or S
RYKKLIVNSSDDFYLVSIANLKTPAXTP

SEQ ID NO: 31820 - protein, 29 aa, Artificial Sequence
  Cyclic GFR-binding peptide
  MOD_RES (28)..(28): Xaa is C or S
MNEYQKYIVNSSDDIYLVSIPSLKTPAXT

SEQ ID NO: 31821 - protein, 22 aa, Artificial Sequence
  Cyclic GFR-binding peptide
EYQKYTPVGMDDIYLVSIPSLK

SEQ ID NO: 31822 - protein, 38 aa, Artificial Sequence; identical to SEQ ID NO: 3541
  Cyclic GFR-binding peptide
  MOD_RES (1)..(33): Xaa is C or S

SEQ ID NO: 31823 - protein, 31 aa, Artificial Sequence; identical to SEQ ID NO: 3542
  Cyclic GFR-binding peptide
  MOD_RES (28)..(29): Xaa is C or S

SEQ ID NO: 31824 - protein, 37 aa, Artificial Sequence
  Cyclic GFR-binding peptide
  MOD_RES (1)..(3)..(34)..(35): Xaa is C or S
XKXSKVIMEYQKYIKPTKGIIYLISIPSLDQSVXXPS

SEQ ID NO: 31825 - protein, 30 aa, Artificial Sequence
  Cyclic GFR-binding peptide
  MOD_RES (29)..(30): Xaa is C or S
MGEEYKFKTPVGMDDLYLVSIPELKTPVXX

SEQ ID NO: 31826 - protein, 31 aa, Artificial Sequence
  Cyclic GFR-binding peptide
  MOD_RES (2)..(2): Xaa is C or S
GXGEVVMDEYQKYVVKENEDIYLMSIPSLET

SEQ ID NO: 31827 - protein, 35 aa, Artificial Sequence
  Cyclic GFR-binding peptide
  MOD_RES (1)..(3)..(35): Xaa is C or S
XGXAEVVMDRYKKLVVNNAADFYLISIANLRAPVX

SEQ ID NO: 31828 - protein, 35 aa, Artificial Sequence; identical to SEQ ID NO: 3544
  Cyclic GFR-binding peptide
  MOD_RES (2)..(4)..(35): Xaa is C or S

SEQ ID NO: 31829 - protein, 30 aa, Artificial Sequence
  Cyclic GFR-binding peptide
  MOD_RES (26)..(27): Xaa is C or S
YHYKLYTVVGKDKYLISIPSLKTPVXXAKS

SEQ ID NO: 31830 - protein, 34 aa, Artificial Sequence
  Cyclic GFR-binding peptide
  MOD_RES (1)..(33)..(34): Xaa is C or S
XAEVVMDRYKKLVVNNAADFYLISIANLRAPVXX

SEQ ID NO: 31831 - protein, 30 aa, Artificial Sequence
  Cyclic GFR-binding peptide
  MOD_RES (1)..(3): Xaa is C or S
XGXGEVVMEEYQKYVVKDYEDIYLMSIPSL

SEQ ID NO: 31832 - protein, 31 aa, Artificial Sequence
  Cyclic GFR-binding peptide
  MOD_RES (29)..(30): Xaa is C or S
VVMEYKFKVKPTRGVLYLISIPELDQPVXXP

SEQ ID NO: 31833 - protein, 29 aa, Artificial Sequence
  Cyclic GFR-binding peptide
  MOD_RES (26)..(27): Xaa is C or S
RYKKLVKPTRGVFYLISIANLDQPVXXPS

SEQ ID NO: 31834 - protein, 35 aa, Artificial Sequence; identical to SEQ ID NO: 3549
  Cyclic GFR-binding peptide
  MOD_RES (1)..(3)..(35): Xaa is C or S

SEQ ID NO: 31835 - protein, 29 aa, Artificial Sequence
  Cyclic GFR-binding peptide
  MOD_RES (27)..(28): Xaa is C or S
NYHYKLIVNNSSDKYLVSIPSLKTPAXXA

SEQ ID NO: 31836 - protein, 38 aa, Artificial Sequence
  Cyclic GFR-binding peptide
  MOD_RES (32)..(32): Xaa is C or S
SRVVMNEYQKYIVNSSDDIYLVSIPSLKTPAXTPKTVH

SEQ ID NO: 31837 - protein, 27 aa, Artificial Sequence
  Cyclic GFR-binding peptide
  MOD_RES (1)..(1): Xaa is C or S
XSKVVMRYKKLVKPTRGVFYLISIANL

SEQ ID NO: 31838 - protein, 28 aa, Artificial Sequence
  Cyclic GFR-binding peptide
VMDRYKKLVVKENEDFYLMSIANLETPV

SEQ ID NO: 31839 - protein, 41 aa, Artificial Sequence; identical to SEQ ID NO: 3561
  Cyclic GFR-binding peptide
  MOD_RES (2)..(4)..(36)..(37): Xaa is C or S

SEQ ID NO: 31840 - protein, 29 aa, Artificial Sequence
  Cyclic GFR-binding peptide
  MOD_RES (29)..(29): Xaa is C or S
VVMYHYKLVKPTRGVKYLISIPSLDQPVX

SEQ ID NO: 31841 - protein, 33 aa, Artificial Sequence
  Cyclic GFR-binding peptide
  MOD_RES (1)..(32)..(33): Xaa is C or S
XSKVVMEYQKYVKPTRGVIYLISIPSLDQPVXX

SEQ ID NO: 31842 - protein, 30 aa, Artificial Sequence
  Cyclic GFR-binding peptide
  MOD_RES (1)..(3): Xaa is C or S
XKXSKVVMEYKFKVKPTRGVLYLISIPELD

SEQ ID NO: 31843 - protein, 41 aa, Artificial Sequence; identical to SEQ ID NO: 3563
  Cyclic GFR-binding peptide
  MOD_RES (1)..(3)..(35): Xaa is C or S

SEQ ID NO: 31844 - protein, 26 aa, Artificial Sequence
  Cyclic GFR-binding peptide
  MOD_RES (1)..(1): Xaa is C or S
XSKVVMYHYKLVKPTRGVKYLISIPS

SEQ ID NO: 31845 - protein, 21 aa, Artificial Sequence
  Cyclic GFR-binding peptide
EYQKYVVKENEDIYLMSIPSL

SEQ ID NO: 31846 - protein, 27 aa, Artificial Sequence
  Cyclic GFR-binding peptide
  MOD_RES (2)..(2): Xaa is C or S
KXSKVIMYHYKLIKPTKGIKYLISIPS

SEQ ID NO: 31847 - protein, 24 aa, Artificial Sequence
  Cyclic GFR-binding peptide
VIMRYKKLVKPKRGVFYLISIANL

SEQ ID NO: 31848 - protein, 26 aa, Artificial Sequence
  Cyclic GFR-binding peptide
  MOD_RES (26)..(26): Xaa is C or S
EYQKYIVNSSDDIYLVSIPSLKTPAX

SEQ ID NO: 31849 - protein, 34 aa, Artificial Sequence
  Cyclic GFR-binding peptide
  MOD_RES (30)..(31): Xaa is C or S
RVIMEYQKYVKPKRGVIYLISIPSLAQPVXXPAA

SEQ ID NO: 31850 - protein, 27 aa, Artificial Sequence
  Cyclic GFR-binding peptide
KVVMRYKKLVKPTRGVFYLISIANLDQ

SEQ ID NO: 31851 - protein, 34 aa, Artificial Sequence; identical to SEQ ID NO: 3579
  Cyclic GFR-binding peptide
  MOD_RES (1)..(3)..(34): Xaa is C or S

SEQ ID NO: 31852 - protein, 34 aa, Artificial Sequence
  Cyclic GFR-binding peptide
  MOD_RES (2)..(4): Xaa is C or S
RXGXAEVVMDEYKFKVVNNAADLYLISIPELRAP

SEQ ID NO: 31853 - protein, 32 aa, Artificial Sequence
  Cyclic GFR-binding peptide
  MOD_RES (29)..(29): Xaa is C or S
VMNEYQKYIVNSSDDIYLVSIPSLKTPAXTPK

SEQ ID NO: 31854 - protein, 35 aa, Artificial Sequence; identical to SEQ ID NO: 3581
  Cyclic GFR-binding peptide
  MOD_RES (30)..(31): Xaa is C or S

SEQ ID NO: 31855 - protein, 27 aa, Artificial Sequence
  Cyclic GFR-binding peptide
  MOD_RES (2)..(2): Xaa is C or S
KXSRVIMYHYKLVKPKRGVKYLISIPS

SEQ ID NO: 31856 - protein, 32 aa, Artificial Sequence; identical to SEQ ID NO: 3586
  Cyclic GFR-binding peptide
  MOD_RES (26)..(27): Xaa is C or S

SEQ ID NO: 31857 - protein, 35 aa, Artificial Sequence
  Cyclic GFR-binding peptide
  MOD_RES (2)..(33)..(34): Xaa is C or S
KXSKVIMEYQKYIKPTKGIIYLISIPSLDQSVXXP

SEQ ID NO: 31858 - protein, 34 aa, Artificial Sequence
  Cyclic GFR-binding peptide
  MOD_RES (2)..(4): Xaa is C or S
HXGXARVVMNEYQKYIVNSSDDIYLVSIPSLQTP

SEQ ID NO: 31859 - protein, 31 aa, Artificial Sequence
  Cyclic GFR-binding peptide
  MOD_RES (2)..(2): Xaa is C or S
GXARVVMNEYQKYIVNSSDDIYLVSIPSLQT

SEQ ID NO: 31860 - protein, 29 aa, Artificial Sequence
  Cyclic GFR-binding peptide
  MOD_RES (28)..(28): Xaa is C or S
MNEYKFKIVNSSDDLYLVSIPELKTPAXT

SEQ ID NO: 31861 - protein, 29 aa, Artificial Sequence
  Cyclic GFR-binding peptide
GEVVMDYHYKLVVKENEDKYLMSIPSLET

SEQ ID NO: 31862 - protein, 31 aa, Artificial Sequence
  Cyclic GFR-binding peptide
  MOD_RES (26)..(27): Xaa is C or S
EYKFKVVNNAADLYLISIPELRAPVXXSAPA

SEQ ID NO: 31863 - protein, 28 aa, Artificial Sequence
  Cyclic GFR-binding peptide
  MOD_RES (26)..(27): Xaa is C or S
RYKKLVVKENEDFYLMSIANLETPVXXA

SEQ ID NO: 31864 - protein, 27 aa, Artificial Sequence
  Cyclic GFR-binding peptide
  MOD_RES (26)..(27): Xaa is C or S
YHYKLIVNNSSDKYLVSIPSLKTPAXX

SEQ ID NO: 31865 - protein, 42 aa, Artificial Sequence; identical to SEQ ID NO: 3596
  Cyclic GFR-binding peptide
  MOD_RES (2)..(4)..(37)..(38): Xaa is C or S

SEQ ID NO: 31866 - protein, 38 aa, Artificial Sequence
  Cyclic GFR-binding peptide
  MOD_RES (2)..(34)..(35): Xaa is C or S
GXAKVVMNEYKFKIVNNSSDLYLVSIPELKTPAXXAKP

SEQ ID NO: 31867 - protein, 29 aa, Artificial Sequence
  Cyclic GFR-binding peptide
  MOD_RES (27)..(28): Xaa is C or S
ERYKKLTPVGMDDFYLVSIANLKTPVXXA

SEQ ID NO: 31868 - protein, 32 aa, Artificial Sequence; identical to SEQ ID NO: 3598
  Cyclic GFR-binding peptide
  MOD_RES (28)..(29): Xaa is C or S

SEQ ID NO: 31869 - protein, 30 aa, Artificial Sequence; identical to SEQ ID NO: 3602
  Cyclic GFR-binding peptide
  MOD_RES (1)..(3): Xaa is C or S

SEQ ID NO: 31870 - protein, 27 aa, Artificial Sequence
  Cyclic GFR-binding peptide
GEVVMDYHYKLVVKENEDKYLMSIPSL

SEQ ID NO: 31871 - protein, 31 aa, Artificial Sequence; identical to SEQ ID NO: 3606
  Cyclic GFR-binding peptide
  MOD_RES (29)..(30): Xaa is C or S

SEQ ID NO: 31872 - protein, 30 aa, Artificial Sequence
  Cyclic GFR-binding peptide
  MOD_RES (29)..(30): Xaa is C or S
VMEEYKFKVVKDYEDLYLMSIPELETPVXX

SEQ ID NO: 31873 - protein, 38 aa, Artificial Sequence
  Cyclic GFR-binding peptide
  MOD_RES (32)..(33): Xaa is C or S
SRVVMNEYQKYIVNSSDDIYLVSIPSLKTPAXXPKPVY

SEQ ID NO: 31874 - protein, 33 aa, Artificial Sequence; identical to SEQ ID NO: 3608
  Cyclic GFR-binding peptide
  MOD_RES (31)..(31): Xaa is C or S

SEQ ID NO: 31875 - protein, 26 aa, Artificial Sequence
  Cyclic GFR-binding peptide
AEVVMDYHYKLVVNNAADKYLISIPS

SEQ ID NO: 31876 - protein, 30 aa, Artificial Sequence
  Cyclic GFR-binding peptide
  MOD_RES (29)..(30): Xaa is C or S
VVMEYQKYVKPTRGVIYLISIPSLDQPVXX

SEQ ID NO: 31877 - protein, 38 aa, Artificial Sequence
  Cyclic GFR-binding peptide
  MOD_RES (32)..(33): Xaa is C or S
ESVAMGRYKKLYTVVGKDFYLISIANLKTPVXXAKSAK

SEQ ID NO: 31878 - protein, 22 aa, Artificial Sequence
  Cyclic GFR-binding peptide
VMRYKKLVKPTRGVFYLISIAN

SEQ ID NO: 31879 - protein, 27 aa, Artificial Sequence
  Cyclic GFR-binding peptide
  MOD_RES (27)..(27): Xaa is C or S
GYHYKLYTVVGKDKYLISIPSLKTPVX

SEQ ID NO: 31880 - protein, 30 aa, Artificial Sequence; identical to SEQ ID NO: 3612
  Cyclic GFR-binding peptide
  MOD_RES (27)..(28): Xaa is C or S

SEQ ID NO: 31881 - protein, 41 aa, Artificial Sequence
  Cyclic GFR-binding peptide
  MOD_RES (1)..(3)..(35)..(36): Xaa is C or S
XGXGEVVMEEYQKYVVKDYEDIYLMSIPSLETPVXXAKPIS

SEQ ID NO: 31882 - protein, 31 aa, Artificial Sequence
  Cyclic GFR-binding peptide
  MOD_RES (1)..(1): Xaa is C or S
XGEVVMEEYKFKVVKDYEDLYLMSIPELETP

SEQ ID NO: 31883 - protein, 32 aa, Artificial Sequence
  Cyclic GFR-binding peptide
  MOD_RES (1)..(1): Xaa is C or S
XARVVMNEYQKYIVNSSDDIYLVSIPSLQTPA

SEQ ID NO: 31884 - protein, 34 aa, Artificial Sequence
  Cyclic GFR-binding peptide
  MOD_RES (32)..(33): Xaa is C or S
AVSMGEEYKFKTPVGMDDLYLVSIPELKTPVXXA

SEQ ID NO: 31885 - protein, 39 aa, Artificial Sequence
  Cyclic GFR-binding peptide
  MOD_RES (1)..(33)..(34): Xaa is C or S
XGEVVMDEYKFKVVKENEDLYLMSIPELETPVXXAKPIK

SEQ ID NO: 31886 - protein, 42 aa, Artificial Sequence
  Cyclic GFR-binding peptide
  MOD_RES (2)..(4)..(36)..(37): Xaa is C or S
RXGXGEVVMDEYQKYVVKENEDIYLMSIPSLETPVXXAKPIK

SEQ ID NO: 31887 - protein, 31 aa, Artificial Sequence
  Cyclic GFR-binding peptide
  MOD_RES (30)..(31): Xaa is C or S
VVMDEYKFKVVKENEDLYLMSIPELETPVXX

SEQ ID NO: 31888 - protein, 34 aa, Artificial Sequence
  Cyclic GFR-binding peptide
  MOD_RES (1)..(3): Xaa is C or S
XGXEAVSMGEEYKFKTPVGMDDLYLVSIPELKTP

SEQ ID NO: 31889 - protein, 35 aa, Artificial Sequence
  Cyclic GFR-binding peptide
  MOD_RES (32)..(32): Xaa is C or S
SRVVMNEYQKYIVNSSDDIYLVSIPSLKTPAXTPK

SEQ ID NO: 31890 - protein, 31 aa, Artificial Sequence
  Cyclic GFR-binding peptide
  MOD_RES (28)..(29): Xaa is C or S
MGRYKKLYTVVGKDFYLISIANLKTPVXXAK

SEQ ID NO: 31891 - protein, 38 aa, Artificial Sequence
  Cyclic GFR-binding peptide
  MOD_RES (2)..(33)..(34): Xaa is C or S
KXSKVVMEYQKYVKPTRGVIYLISIPSLDQPVXXPSAS

SEQ ID NO: 31892 - protein, 34 aa, Artificial Sequence
  Cyclic GFR-binding peptide
  MOD_RES (2)..(4): Xaa is C or S
RXGXGEVVMDEYQKYVVKENEDIYLMSIPSLETP

SEQ ID NO: 31893 - protein, 31 aa, Artificial Sequence; identical to SEQ ID NO: 3624
  Cyclic GFR-binding peptide
  MOD_RES (28)..(29): Xaa is C or S

SEQ ID NO: 31894 - protein, 28 aa, Artificial Sequence
  Cyclic GFR-binding peptide
ESVAMGEYQKYYTVVGKDIYLISIPSLK

SEQ ID NO: 31895 - protein, 35 aa, Artificial Sequence
  Cyclic GFR-binding peptide
  MOD_RES (31)..(32): Xaa is C or S
SKVIMEYKFKIKPTKGILYLISIPELDQSVXXPSA

SEQ ID NO: 31896 - protein, 31 aa, Artificial Sequence
  Cyclic GFR-binding peptide
  MOD_RES (26)..(27): Xaa is C or S
EYQKYIVNNSSDIYLVSIPSLKTPAXXAKPV

SEQ ID NO: 31897 - protein, 30 aa, Artificial Sequence
  Cyclic GFR-binding peptide
GEVVMDEYKFKVVKENEDLYLMSIPELETP

SEQ ID NO: 31898 - protein, 36 aa, Artificial Sequence
  Cyclic GFR-binding peptide
  MOD_RES (32)..(33): Xaa is C or S
ESVAMGEYQKYYTVVGKDIYLISIPSLKTPVXXAKS

SEQ ID NO: 31899 - protein, 33 aa, Artificial Sequence; identical to SEQ ID NO: 3631
  Cyclic GFR-binding peptide
  MOD_RES (2)..(33): Xaa is C or S

SEQ ID NO: 31900 - protein, 29 aa, Artificial Sequence
  Cyclic GFR-binding peptide
VVMNEYKFKIVNSSDDLYLVSIPELKTPA

SEQ ID NO: 31901 - protein, 33 aa, Artificial Sequence
  Cyclic GFR-binding peptide
  MOD_RES (27)..(28): Xaa is C or S
EEYKFKTPVGMDDLYLVSIPELKTPVXXAKGVK

SEQ ID NO: 31902 - protein, 30 aa, Artificial Sequence; identical to SEQ ID NO: 3633
  Cyclic GFR-binding peptide
  MOD_RES (2)..(4): Xaa is C or S

SEQ ID NO: 31903 - protein, 33 aa, Artificial Sequence; identical to SEQ ID NO: 3634
  Cyclic GFR-binding peptide
  MOD_RES (28)..(29): Xaa is C or S

SEQ ID NO: 31904 - protein, 38 aa, Artificial Sequence
  Cyclic GFR-binding peptide
  MOD_RES (1)..(3)..(34)..(35): Xaa is C or S
XKXSKVVMEYQKYVKPTRGVIYLISIPSLDQPVXXPSA

SEQ ID NO: 31905 - protein, 33 aa, Artificial Sequence; identical to SEQ ID NO: 3636
  Cyclic GFR-binding peptide
  MOD_RES (2)..(33): Xaa is C or S

SEQ ID NO: 31906 - protein, 33 aa, Artificial Sequence
  Cyclic GFR-binding peptide
  MOD_RES (2)..(2): Xaa is C or S
GXGEVVMEEYQKYVVKDYEDIYLMSIPSLETPV

SEQ ID NO: 31907 - protein, 29 aa, Artificial Sequence
  Cyclic GFR-binding peptide
  MOD_RES (29)..(29): Xaa is C or S
VMDRYKKLVVNNAADFYLISIANLRAPVX

SEQ ID NO: 31908 - protein, 33 aa, Artificial Sequence
  Cyclic GFR-binding peptide
  MOD_RES (31)..(32): Xaa is C or S
EVVMDEYKFKVVKENEDLYLMSIPELETPVXXA

SEQ ID NO: 31909 - protein, 34 aa, Artificial Sequence
  Cyclic GFR-binding peptide
  MOD_RES (31)..(32): Xaa is C or S
SKVVMEYQKYVKPTRGVIYLISIPSLDQPVXXPS

SEQ ID NO: 31910 - protein, 40 aa, Artificial Sequence; identical to SEQ ID NO: 3640
  Cyclic GFR-binding peptide
  MOD_RES (2)..(34): Xaa is C or S

SEQ ID NO: 31911 - protein, 31 aa, Artificial Sequence
  Cyclic GFR-binding peptide
  MOD_RES (29)..(30): Xaa is C or S
VMDEYKFKVVNNAADLYLISIPELRAPVXXS

SEQ ID NO: 31912 - protein, 24 aa, Artificial Sequence
  Cyclic GFR-binding peptide
EYHYKLVVKDYEDKYLMSIPSLET

SEQ ID NO: 31913 - protein, 29 aa, Artificial Sequence
  Cyclic GFR-binding peptide
SRVIMEYKFKVKPKRGVLYLISIPELAQP

SEQ ID NO: 31914 - protein, 40 aa, Artificial Sequence; identical to SEQ ID NO: 3646
  Cyclic GFR-binding peptide
  MOD_RES (2)..(4)..(36)..(37): Xaa is C or S

SEQ ID NO: 31915 - protein, 32 aa, Artificial Sequence; identical to SEQ ID NO: 3648
  Cyclic GFR-binding peptide
  MOD_RES (31)..(32): Xaa is C or S

SEQ ID NO: 31916 - protein, 33 aa, Artificial Sequence
  Cyclic GFR-binding peptide
  MOD_RES (28)..(29): Xaa is C or S
IMEYQKYVKPKRGVIYLISIPSLAQPVXXPAAS

SEQ ID NO: 31917 - protein, 28 aa, Artificial Sequence
  Cyclic GFR-binding peptide
  MOD_RES (1)..(3): Xaa is C or S
XKXSKVIMEYKFKIKPTKGILYLISIPE

SEQ ID NO: 31918 - protein, 28 aa, Artificial Sequence
  Cyclic GFR-binding peptide
VVMEEYQKYVVKDYEDIYLMSIPSLETP

SEQ ID NO: 31919 - protein, 26 aa, Artificial Sequence
  Cyclic GFR-binding peptide
EVVMEEYQKYVVKDYEDIYLMSIPSL

SEQ ID NO: 31920 - protein, 34 aa, Artificial Sequence
  Cyclic GFR-binding peptide
  MOD_RES (28)..(29): Xaa is C or S
MNEYQKYIVNSSDDIYLVSIPSLKTPAXXPKPVY

SEQ ID NO: 31921 - protein, 32 aa, Artificial Sequence; identical to SEQ ID NO: 3653
  Cyclic GFR-binding peptide
  MOD_RES (1)..(1): Xaa is C or S

SEQ ID NO: 31922 - protein, 30 aa, Artificial Sequence; identical to SEQ ID NO: 3654
  Cyclic GFR-binding peptide

SEQ ID NO: 31923 - protein, 33 aa, Artificial Sequence
  Cyclic GFR-binding peptide
  MOD_RES (29)..(30): Xaa is C or S
VMNEYQKYIVNNSSDIYLVSIPSLKTPAXXAKP

SEQ ID NO: 31924 - protein, 32 aa, Artificial Sequence
  Cyclic GFR-binding peptide
  MOD_RES (30)..(31): Xaa is C or S
RVIMEYQKYVKPKRGVIYLISIPSLAQPVXXP

SEQ ID NO: 31925 - protein, 31 aa, Artificial Sequence; identical to SEQ ID NO: 3657
  Cyclic GFR-binding peptide
  MOD_RES (30)..(31): Xaa is C or S

SEQ ID NO: 31926 - protein, 24 aa, Artificial Sequence
  Cyclic GFR-binding peptide
MNEYQKYIVNSSDDIYLVSIPSLK

SEQ ID NO: 31927 - protein, 23 aa, Artificial Sequence
  Cyclic GFR-binding peptide
RYKKLVKPKRGVFYLISIANLAQ

SEQ ID NO: 31928 - protein, 38 aa, Artificial Sequence; identical to SEQ ID NO: 3659
  Cyclic GFR-binding peptide
  MOD_RES (1)..(3)..(35)..(36): Xaa is C or S

SEQ ID NO: 31929 - protein, 25 aa, Artificial Sequence
  Cyclic GFR-binding peptide
VVMDRYKKLVVNNAADFYLISIANL

SEQ ID NO: 31930 - protein, 41 aa, Artificial Sequence
  Cyclic GFR-binding peptide
  MOD_RES (2)..(4)..(35)..(36): Xaa is C or S
SXKXSKVVMEYQKYVKPTRGVIYLISIPSLDQPVXXPSASA

SEQ ID NO: 31931 - protein, 27 aa, Artificial Sequence
  Cyclic GFR-binding peptide
  MOD_RES (26)..(27): Xaa is C or S
EYKFKIVNSSDDLYLVSIPELKTPAXX

SEQ ID NO: 31932 - protein, 21 aa, Artificial Sequence
  Cyclic GFR-binding peptide
MEYQKYVKPTRGVIYLISIPS

SEQ ID NO: 31933 - protein, 33 aa, Artificial Sequence
  Cyclic GFR-binding peptide
  MOD_RES (28)..(29): Xaa is C or S
MNEYKFKIVNNSSDLYLVSIPELKTPAXXAKPV

SEQ ID NO: 31934 - protein, 29 aa, Artificial Sequence
  Cyclic GFR-binding peptide
  MOD_RES (2)..(2): Xaa is C or S
GXAKVVMNEYQKYIVNNSSDIYLVSIPSL

SEQ ID NO: 31935 - protein, 31 aa, Artificial Sequence
  Cyclic GFR-binding peptide
  MOD_RES (1)..(3): Xaa is C or S
XGXGEVVMEEYQKYVVKDYEDIYLMSIPSLE

SEQ ID NO: 31936 - protein, 39 aa, Artificial Sequence
  Cyclic GFR-binding peptide
  MOD_RES (2)..(34)..(35): Xaa is C or S
GXARVVMNEYKFKIVNSSDDLYLVSIPELQTPAXXPKPV

SEQ ID NO: 31937 - protein, 27 aa, Artificial Sequence
  Cyclic GFR-binding peptide
  MOD_RES (27)..(27): Xaa is C or S
DEYKFKVVKENEDLYLMSIPELETPVX

SEQ ID NO: 31938 - protein, 33 aa, Artificial Sequence; identical to SEQ ID NO: 3664
  Cyclic GFR-binding peptide
  MOD_RES (1)..(3): Xaa is C or S

SEQ ID NO: 31939 - protein, 38 aa, Artificial Sequence
  Cyclic GFR-binding peptide
  MOD_RES (2)..(4)..(36)..(37): Xaa is C or S
HXGXARVVMNEYQKYIVNSSDDIYLVSIPSLQTPAXXP

SEQ ID NO: 31940 - protein, 32 aa, Artificial Sequence
  Cyclic GFR-binding peptide
  MOD_RES (31)..(32): Xaa is C or S
RVVMNEYKFKIVNSSDDLYLVSIPELQTPAXX

SEQ ID NO: 31941 - protein, 21 aa, Artificial Sequence
  Cyclic GFR-binding peptide
NEYQKYIVNNSSDIYLVSIPS

SEQ ID NO: 31942 - protein, 31 aa, Artificial Sequence
  Cyclic GFR-binding peptide
  MOD_RES (1)..(1): Xaa is C or S
XARVVMNEYKFKIVNSSDDLYLVSIPELQTP

SEQ ID NO: 31943 - protein, 30 aa, Artificial Sequence
  Cyclic GFR-binding peptide
SKVIMEYQKYIKPTKGIIYLISIPSLDQSV

SEQ ID NO: 31944 - protein, 39 aa, Artificial Sequence
  Cyclic GFR-binding peptide
  MOD_RES (2)..(4)..(35)..(36): Xaa is C or S
SXKXSRVIMEYQKYVKPKRGVIYLISIPSLAQPVXXPAA

SEQ ID NO: 31945 - protein, 34 aa, Artificial Sequence
  Cyclic GFR-binding peptide
  MOD_RES (30)..(31): Xaa is C or S
VVMNEYKFKIVNNSSDLYLVSIPELKTPAXXAKP

SEQ ID NO: 31946 - protein, 27 aa, Artificial Sequence
  Cyclic GFR-binding peptide
VVMNEYQKYIVNNSSDIYLVSIPSLKT

SEQ ID NO: 31947 - protein, 40 aa, Artificial Sequence
  Cyclic GFR-binding peptide
  MOD_RES (1)..(34)..(35): Xaa is C or S
XEAVSMGEEYQKYTPVGMDDIYLVSIPSLKTPVXXAKGVK

SEQ ID NO: 31948 - protein, 34 aa, Artificial Sequence
  Cyclic GFR-binding peptide
  MOD_RES (30)..(30): Xaa is C or S
VVMNEYQKYIVNSSDDIYLVSIPSLKTPAXTPKT

SEQ ID NO: 31949 - protein, 24 aa, Artificial Sequence
  Cyclic GFR-binding peptide
EYKFKVKPKRGVLYLISIPELAQP

SEQ ID NO: 31950 - protein, 38 aa, Artificial Sequence; identical to SEQ ID NO: 3669
  Cyclic GFR-binding peptide
  MOD_RES (2)..(34)..(35): Xaa is C or S

SEQ ID NO: 31951 - protein, 37 aa, Artificial Sequence
  Cyclic GFR-binding peptide
  MOD_RES (1)..(33)..(34): Xaa is C or S
XESVAMGYHYKLYTVVGKDKYLISIPSLKTPVXXAKS

SEQ ID NO: 31952 - protein, 37 aa, Artificial Sequence; identical to SEQ ID NO: 3670
  Cyclic GFR-binding peptide
  MOD_RES (31)..(32): Xaa is C or S

SEQ ID NO: 31953 - protein, 32 aa, Artificial Sequence
  Cyclic GFR-binding peptide
  MOD_RES (27)..(28): Xaa is C or S
NEYQKYIVNSSDDIYLVSIPSLKTPAXXPKPV

SEQ ID NO: 31954 - protein, 33 aa, Artificial Sequence; identical to SEQ ID NO: 3672
  Cyclic GFR-binding peptide
  MOD_RES (31)..(32): Xaa is C or S

SEQ ID NO: 31955 - protein, 38 aa, Artificial Sequence
  Cyclic GFR-binding peptide
  MOD_RES (2)..(33)..(34): Xaa is C or S
KXSRVIMEYKFKVKPKRGVLYLISIPELAQPVXXPAAS

SEQ ID NO: 31956 - protein, 24 aa, Artificial Sequence
  Cyclic GFR-binding peptide
RYKKLIVNSSDDFYLVSIANLKTP

SEQ ID NO: 31957 - protein, 26 aa, Artificial Sequence
  Cyclic GFR-binding peptide
NEYKFKIVNNSSDLYLVSIPELKTPA

SEQ ID NO: 31958 - protein, 34 aa, Artificial Sequence; identical to SEQ ID NO: 3682
  Cyclic GFR-binding peptide
  MOD_RES (28)..(29): Xaa is C or S

SEQ ID NO: 31959 - protein, 37 aa, Artificial Sequence
  Cyclic GFR-binding peptide
  MOD_RES (31)..(32): Xaa is C or S
RVVMNEYQKYIVNSSDDIYLVSIPSLKTPAXXPKPVY

SEQ ID NO: 31960 - protein, 36 aa, Artificial Sequence
  Cyclic GFR-binding peptide
  MOD_RES (30)..(31): Xaa is C or S
VAMGEYQKYYTVVGKDIYLISIPSLKTPVXXAKSAK

SEQ ID NO: 31961 - protein, 30 aa, Artificial Sequence; identical to SEQ ID NO: 3684
  Cyclic GFR-binding peptide

SEQ ID NO: 31962 - protein, 37 aa, Artificial Sequence; identical to SEQ ID NO: 3686
  Cyclic GFR-binding peptide
  MOD_RES (2)..(4)..(35)..(36): Xaa is C or S

SEQ ID NO: 31963 - protein, 32 aa, Artificial Sequence
  Cyclic GFR-binding peptide
  MOD_RES (2)..(4): Xaa is C or S
RXGXAEVVMDEYQKYVVNNAADIYLISIPSLR

SEQ ID NO: 31964 - protein, 27 aa, Artificial Sequence
  Cyclic GFR-binding peptide
  MOD_RES (27)..(27): Xaa is C or S
DYHYKLVVKENEDKYLMSIPSLETPVX

SEQ ID NO: 31965 - protein, 22 aa, Artificial Sequence
  Cyclic GFR-binding peptide
EYHYKLVVKDYEDKYLMSIPSL

SEQ ID NO: 31966 - protein, 28 aa, Artificial Sequence
  Cyclic GFR-binding peptide
  MOD_RES (1)..(3): Xaa is C or S
XKXSRVIMRYKKLVKPKRGVFYLISIAN

SEQ ID NO: 31967 - protein, 36 aa, Artificial Sequence
  Cyclic GFR-binding peptide
  MOD_RES (1)..(33)..(34): Xaa is C or S
XGEVVMEEYKFKVVKDYEDLYLMSIPELETPVXXAK

SEQ ID NO: 31968 - protein, 30 aa, Artificial Sequence; identical to SEQ ID NO: 3693
  Cyclic GFR-binding peptide
  MOD_RES (28)..(29): Xaa is C or S

SEQ ID NO: 31969 - protein, 26 aa, Artificial Sequence
  Cyclic GFR-binding peptide
KVIMEYQKYIKPTKGIIYLISIPSLD

SEQ ID NO: 31970 - protein, 36 aa, Artificial Sequence; identical to SEQ ID NO: 3694
  Cyclic GFR-binding peptide
  MOD_RES (32)..(33): Xaa is C or S

SEQ ID NO: 31971 - protein, 30 aa, Artificial Sequence
  Cyclic GFR-binding peptide
  MOD_RES (2)..(4): Xaa is C or S
SXKXSRVIMEYKFKVKPKRGVLYLISIPEL

SEQ ID NO: 31972 - protein, 27 aa, Artificial Sequence
  Cyclic GFR-binding peptide
VMEYHYKLVVKDYEDKYLMSIPSLETP

SEQ ID NO: 31973 - protein, 36 aa, Artificial Sequence; identical to SEQ ID NO: 3701
  Cyclic GFR-binding peptide
  MOD_RES (2)..(34)..(35): Xaa is C or S

SEQ ID NO: 31974 - protein, 30 aa, Artificial Sequence
  Cyclic GFR-binding peptide
  MOD_RES (28)..(29): Xaa is C or S
MNEYQKYIVNSSDDIYLVSIPSLQTPAXXP

SEQ ID NO: 31975 - protein, 36 aa, Artificial Sequence; identical to SEQ ID NO: 3704
  Cyclic GFR-binding peptide
  MOD_RES (1)..(32)..(33): Xaa is C or S

SEQ ID NO: 31976 - protein, 28 aa, Artificial Sequence
  Cyclic GFR-binding peptide
  MOD_RES (1)..(1): Xaa is C or S
XESVAMGRYKKLYTVVGKDFYLISIANL

SEQ ID NO: 31977 - protein, 31 aa, Artificial Sequence
  Cyclic GFR-binding peptide
AEVVMDYHYKLVVNNAADKYLISIPSLRAPV

SEQ ID NO: 31978 - protein, 38 aa, Artificial Sequence
  Cyclic GFR-binding peptide
  MOD_RES (2)..(34)..(35): Xaa is C or S
GXSRVVMNEYKFKIVNSSDDLYLVSIPELKTPAXXPKP

SEQ ID NO: 31979 - protein, 32 aa, Artificial Sequence
  Cyclic GFR-binding peptide
  MOD_RES (28)..(28): Xaa is C or S
MNEYKFKIVNSSDDLYLVSIPELKTPAXTPKT

SEQ ID NO: 31980 - protein, 32 aa, Artificial Sequence
  Cyclic GFR-binding peptide
  MOD_RES (1)..(3): Xaa is C or S
XGXAKVVMNEYKFKIVNNSSDLYLVSIPELKT

SEQ ID NO: 31981 - protein, 25 aa, Artificial Sequence
  Cyclic GFR-binding peptide
EEYKFKVVKDYEDLYLMSIPELETP

SEQ ID NO: 31982 - protein, 31 aa, Artificial Sequence
  Cyclic GFR-binding peptide
  MOD_RES (31)..(31): Xaa is C or S
EVVMDEYKFKVVKENEDLYLMSIPELETPVX

SEQ ID NO: 31983 - protein, 34 aa, Artificial Sequence; identical to SEQ ID NO: 3711
  Cyclic GFR-binding peptide
  MOD_RES (1)..(32)..(33): Xaa is C or S

SEQ ID NO: 31984 - protein, 37 aa, Artificial Sequence; identical to SEQ ID NO: 3714
  Cyclic GFR-binding peptide
  MOD_RES (2)..(4)..(36)..(37): Xaa is C or S

SEQ ID NO: 31985 - protein, 25 aa, Artificial Sequence
  Cyclic GFR-binding peptide
NEYQKYIVNSSDDIYLVSIPSLQTP

SEQ ID NO: 31986 - protein, 40 aa, Artificial Sequence
  Cyclic GFR-binding peptide
  MOD_RES (2)..(4)..(35)..(36): Xaa is C or S
SXKXSKVVMEYQKYVKPTRGVIYLISIPSLDQPVXXPSAS

SEQ ID NO: 31987 - protein, 36 aa, Artificial Sequence; identical to SEQ ID NO: 3718
  Cyclic GFR-binding peptide
  MOD_RES (31)..(32): Xaa is C or S

SEQ ID NO: 31988 - protein, 27 aa, Artificial Sequence
  Cyclic GFR-binding peptide
  MOD_RES (27)..(27): Xaa is C or S
NEYQKYIVNSSDDIYLVSIPSLQTPAX

SEQ ID NO: 31989 - protein, 37 aa, Artificial Sequence
  Cyclic GFR-binding peptide
  MOD_RES (32)..(33): Xaa is C or S
AEVVMDYHYKLVVNNAADKYLISIPSLRAPVXXSAPA

SEQ ID NO: 31990 - protein, 30 aa, Artificial Sequence
  Cyclic GFR-binding peptide
  MOD_RES (30)..(30): Xaa is C or S
VVMEEYQKYVVKDYEDIYLMSIPSLETPVX

SEQ ID NO: 31991 - protein, 34 aa, Artificial Sequence; identical to SEQ ID NO: 3720
  Cyclic GFR-binding peptide
  MOD_RES (29)..(30): Xaa is C or S

SEQ ID NO: 31992 - protein, 22 aa, Artificial Sequence
  Cyclic GFR-binding peptide
MEYKFKVKPTRGVLYLISIPEL

SEQ ID NO: 31993 - protein, 33 aa, Artificial Sequence
  Cyclic GFR-binding peptide
  MOD_RES (27)..(28): Xaa is C or S
DEYQKYVVKENEDIYLMSIPSLETPVXXAKPIK

SEQ ID NO: 31994 - protein, 29 aa, Artificial Sequence
  Cyclic GFR-binding peptide
  MOD_RES (26)..(27): Xaa is C or S
EYQKYIVNSSDDIYLVSIPSLKTPAXXPK

SEQ ID NO: 31995 - protein, 32 aa, Artificial Sequence; identical to SEQ ID NO: 3723
  Cyclic GFR-binding peptide
  MOD_RES (32)..(32): Xaa is C or S

SEQ ID NO: 31996 - protein, 35 aa, Artificial Sequence; identical to SEQ ID NO: 3724
  Cyclic GFR-binding peptide
  MOD_RES (31)..(32): Xaa is C or S

SEQ ID NO: 31997 - protein, 25 aa, Artificial Sequence
  Cyclic GFR-binding peptide
GERYKKLTPVGMDDFYLVSIANLKT

SEQ ID NO: 31998 - protein, 40 aa, Artificial Sequence; identical to SEQ ID NO: 3726
  Cyclic GFR-binding peptide
  MOD_RES (1)..(3)..(35)..(36): Xaa is C or S

SEQ ID NO: 31999 - protein, 31 aa, Artificial Sequence
  Cyclic GFR-binding peptide
GEVVMDEYKFKVVKENEDLYLMSIPELETPV

SEQ ID NO: 32000 - protein, 36 aa, Artificial Sequence
  Cyclic GFR-binding peptide
  MOD_RES (2)..(34)..(35): Xaa is C or S
GXESVAMGRYKKLYTVVGKDFYLISIANLKTPVXXA

SEQ ID NO: 32001 - protein, 38 aa, Artificial Sequence
  Cyclic GFR-binding peptide
  MOD_RES (32)..(33): Xaa is C or S
ARVVMNEYKFKIVNSSDDLYLVSIPELQTPAXXPKPVT

SEQ ID NO: 32002 - protein, 32 aa, Artificial Sequence
  Cyclic GFR-binding peptide
  MOD_RES (1)..(1): Xaa is C or S
XEAVSMGEEYQKYTPVGMDDIYLVSIPSLKTP

SEQ ID NO: 32003 - protein, 34 aa, Artificial Sequence; identical to SEQ ID NO: 3729
  Cyclic GFR-binding peptide
  MOD_RES (30)..(30): Xaa is C or S

SEQ ID NO: 32004 - protein, 24 aa, Artificial Sequence
  Cyclic GFR-binding peptide
RYKKLYTVVGKDFYLISIANLKTP

SEQ ID NO: 32005 - protein, 38 aa, Artificial Sequence
  Cyclic GFR-binding peptide
  MOD_RES (1)..(3)..(35)..(36): Xaa is C or S
XGXESVAMGRYKKLYTVVGKDFYLISIANLKTPVXXAK

SEQ ID NO: 32006 - protein, 33 aa, Artificial Sequence
  Cyclic GFR-binding peptide
  MOD_RES (27)..(28): Xaa is C or S
GEYQKYYTVVGKDIYLISIPSLKTPVXXAKSAK

SEQ ID NO: 32007 - protein, 37 aa, Artificial Sequence
  Cyclic GFR-binding peptide
  MOD_RES (1)..(3)..(35)..(36): Xaa is C or S
XGXAKVVMNEYQKYIVNNSSDIYLVSIPSLKTPAXXA

SEQ ID NO: 32008 - protein, 27 aa, Artificial Sequence
  Cyclic GFR-binding peptide
AKVVMNEYKFKIVNNSSDLYLVSIPEL

SEQ ID NO: 32009 - protein, 27 aa, Artificial Sequence
  Cyclic GFR-binding peptide
  MOD_RES (1)..(1): Xaa is C or S
XAKVVMNYHYKLIVNNSSDKYLVSIPS

SEQ ID NO: 32010 - protein, 40 aa, Artificial Sequence
  Cyclic GFR-binding peptide
  MOD_RES (1)..(3)..(35)..(36): Xaa is C or S
XGXGEVVMDEYQKYVVKENEDIYLMSIPSLETPVXXAKPI

SEQ ID NO: 32011 - protein, 34 aa, Artificial Sequence
  Cyclic GFR-binding peptide
  MOD_RES (2)..(4): Xaa is C or S
RXGXAEVVMDYHYKLVVNNAADKYLISIPSLRAP

SEQ ID NO: 32012 - protein, 27 aa, Artificial Sequence
  Cyclic GFR-binding peptide
  MOD_RES (26)..(27): Xaa is C or S
RYKKLVVNNAADFYLISIANLRAPVXX

SEQ ID NO: 32013 - protein, 42 aa, Artificial Sequence
  Cyclic GFR-binding peptide
  MOD_RES (2)..(4)..(36)..(37): Xaa is C or S
RXGXAEVVMDRYKKLVVNNAADFYLISIANLRAPVXXSAPAA

SEQ ID NO: 32014 - protein, 31 aa, Artificial Sequence
  Cyclic GFR-binding peptide
  MOD_RES (31)..(31): Xaa is C or S
RVVMNEYQKYIVNSSDDIYLVSIPSLKTPAX

SEQ ID NO: 32015 - protein, 24 aa, Artificial Sequence
  Cyclic GFR-binding peptide
VMYHYKLVKPTRGVKYLISIPSLD

SEQ ID NO: 32016 - protein, 27 aa, Artificial Sequence
  Cyclic GFR-binding peptide
  MOD_RES (26)..(27): Xaa is C or S
YHYKLVVNNAADKYLISIPSLRAPVXX

SEQ ID NO: 32017 - protein, 28 aa, Artificial Sequence
  Cyclic GFR-binding peptide
  MOD_RES (28)..(28): Xaa is C or S
MNRYKKLIVNSSDDFYLVSIANLKTPAX

SEQ ID NO: 32018 - protein, 31 aa, Artificial Sequence; identical to SEQ ID NO: 3748
  Cyclic GFR-binding peptide
  MOD_RES (27)..(28): Xaa is C or S

SEQ ID NO: 32019 - protein, 35 aa, Artificial Sequence
  Cyclic GFR-binding peptide
  MOD_RES (31)..(32): Xaa is C or S
VSMGEEYKFKTPVGMDDLYLVSIPELKTPVXXAKG

SEQ ID NO: 32020 - protein, 24 aa, Artificial Sequence
  Cyclic GFR-binding peptide
IMEYQKYVKPKRGVIYLISIPSLA

SEQ ID NO: 32021 - protein, 33 aa, Artificial Sequence
  Cyclic GFR-binding peptide
  MOD_RES (1)..(3): Xaa is C or S
XGXGEVVMDEYKFKVVKENEDLYLMSIPELETP

SEQ ID NO: 32022 - protein, 31 aa, Artificial Sequence; identical to SEQ ID NO: 3752
  Cyclic GFR-binding peptide
  MOD_RES (27)..(28): Xaa is C or S

SEQ ID NO: 32023 - protein, 26 aa, Artificial Sequence
  Cyclic GFR-binding peptide
ERYKKLTPVGMDDFYLVSIANLKTPV

SEQ ID NO: 32024 - protein, 31 aa, Artificial Sequence; identical to SEQ ID NO: 3754
  Cyclic GFR-binding peptide
  MOD_RES (29)..(29): Xaa is C or S

SEQ ID NO: 32025 - protein, 28 aa, Artificial Sequence
  Cyclic GFR-binding peptide
VVMNEYKFKIVNSSDDLYLVSIPELQTP

SEQ ID NO: 32026 - protein, 29 aa, Artificial Sequence
  Cyclic GFR-binding peptide
  MOD_RES (27)..(28): Xaa is C or S
NEYKFKIVNNSSDLYLVSIPELKTPAXXA

SEQ ID NO: 32027 - protein, 22 aa, Artificial Sequence
  Cyclic GFR-binding peptide
MGEYQKYYTVVGKDIYLISIPS

SEQ ID NO: 32028 - protein, 22 aa, Artificial Sequence
  Cyclic GFR-binding peptide
EYKFKIVNNSSDLYLVSIPELK

SEQ ID NO: 32029 - protein, 30 aa, Artificial Sequence
  Cyclic GFR-binding peptide
  MOD_RES (1)..(1): Xaa is C or S
XESVAMGYHYKLYTVVGKDKYLISIPSLKT

SEQ ID NO: 32030 - protein, 36 aa, Artificial Sequence
  Cyclic GFR-binding peptide
  MOD_RES (1)..(3)..(34)..(35): Xaa is C or S
XKXSKVVMEYKFKVKPTRGVLYLISIPELDQPVXXP

SEQ ID NO: 32031 - protein, 24 aa, Artificial Sequence
  Cyclic GFR-binding peptide
IMEYKFKVKPKRGVLYLISIPELA

SEQ ID NO: 32032 - protein, 30 aa, Artificial Sequence
  Cyclic GFR-binding peptide
AEVVMDYHYKLVVNNAADKYLISIPSLRAP

SEQ ID NO: 32033 - protein, 37 aa, Artificial Sequence; identical to SEQ ID NO: 3765
  Cyclic GFR-binding peptide
  MOD_RES (2)..(34)..(35): Xaa is C or S

SEQ ID NO: 32034 - protein, 40 aa, Artificial Sequence
  Cyclic GFR-binding peptide
  MOD_RES (1)..(3)..(34)..(35): Xaa is C or S
XKXSRVIMEYKFKVKPKRGVLYLISIPELAQPVXXPAASA

SEQ ID NO: 32035 - protein, 33 aa, Artificial Sequence; identical to SEQ ID NO: 3766
  Cyclic GFR-binding peptide
  MOD_RES (28)..(29): Xaa is C or S

SEQ ID NO: 32036 - protein, 31 aa, Artificial Sequence
  Cyclic GFR-binding peptide
  MOD_RES (27)..(28): Xaa is C or S
NEYQKYIVNSSDDIYLVSIPSLQTPAXXPKP

SEQ ID NO: 32037 - protein, 34 aa, Artificial Sequence
  Cyclic GFR-binding peptide
  MOD_RES (2)..(4): Xaa is C or S
RXGXESVAMGYHYKLYTVVGKDKYLISIPSLKTP

SEQ ID NO: 32038 - protein, 29 aa, Artificial Sequence
  Cyclic GFR-binding peptide
  MOD_RES (1)..(3): Xaa is C or S
XGXESVAMGRYKKLYTVVGKDFYLISIAN

SEQ ID NO: 32039 - protein, 30 aa, Artificial Sequence
  Cyclic GFR-binding peptide
EVVMDRYKKLVVNNAADFYLISIANLRAPV

SEQ ID NO: 32040 - protein, 30 aa, Artificial Sequence
  Cyclic GFR-binding peptide
  MOD_RES (29)..(30): Xaa is C or S
VIMEYKFKIKPTKGILYLISIPELDQSVXX

SEQ ID NO: 32041 - protein, 30 aa, Artificial Sequence
  Cyclic GFR-binding peptide
  MOD_RES (28)..(29): Xaa is C or S
MNEYKFKIVNSSDDLYLVSIPELQTPAXXP

SEQ ID NO: 32042 - protein, 27 aa, Artificial Sequence
  Cyclic GFR-binding peptide
AKVVMNRYKKLIVNNSSDFYLVSIANL

SEQ ID NO: 32043 - protein, 27 aa, Artificial Sequence
  Cyclic GFR-binding peptide
VVMDEYKFKVVNNAADLYLISIPELRA

SEQ ID NO: 32044 - protein, 36 aa, Artificial Sequence
  Cyclic GFR-binding peptide
  MOD_RES (1)..(3)..(35)..(36): Xaa is C or S
XGXESVAMGEYQKYYTVVGKDIYLISIPSLKTPVXX

SEQ ID NO: 32045 - protein, 28 aa, Artificial Sequence
  Cyclic GFR-binding peptide
SVAMGYHYKLYTVVGKDKYLISIPSLKT

SEQ ID NO: 32046 - protein, 40 aa, Artificial Sequence
  Cyclic GFR-binding peptide
  MOD_RES (1)..(3)..(36)..(37): Xaa is C or S
XGXEAVSMGEEYKFKTPVGMDDLYLVSIPELKTPVXXAKG

SEQ ID NO: 32047 - protein, 38 aa, Artificial Sequence
  Cyclic GFR-binding peptide
  MOD_RES (1)..(3)..(35)..(36): Xaa is C or S
XGXAEVVMDEYKFKVVNNAADLYLISIPELRAPVXXSA

SEQ ID NO: 32048 - protein, 33 aa, Artificial Sequence; identical to SEQ ID NO: 3776
  Cyclic GFR-binding peptide
  MOD_RES (32)..(33): Xaa is C or S

SEQ ID NO: 32049 - protein, 28 aa, Artificial Sequence
  Cyclic GFR-binding peptide
VVMRYKKLVKPTRGVFYLISIANLDQPV

SEQ ID NO: 32050 - protein, 27 aa, Artificial Sequence
  Cyclic GFR-binding peptide
SKVVMRYKKLVKPTRGVFYLISIANLD

SEQ ID NO: 32051 - protein, 33 aa, Artificial Sequence; identical to SEQ ID NO: 3786
  Cyclic GFR-binding peptide
  MOD_RES (1)..(33): Xaa is C or S

SEQ ID NO: 32052 - protein, 33 aa, Artificial Sequence
  Cyclic GFR-binding peptide
  MOD_RES (1)..(33): Xaa is C or S
XGEVVMEEYQKYVVKDYEDIYLMSIPSLETPVX

SEQ ID NO: 32053 - protein, 25 aa, Artificial Sequence
  Cyclic GFR-binding peptide
EEYKFKTPVGMDDLYLVSIPELKTP

SEQ ID NO: 32054 - protein, 29 aa, Artificial Sequence
  Cyclic GFR-binding peptide
  MOD_RES (1)..(3): Xaa is C or S
XKXSRVIMYHYKLVKPKRGVKYLISIPSL

SEQ ID NO: 32055 - protein, 34 aa, Artificial Sequence; identical to SEQ ID NO: 3790
  Cyclic GFR-binding peptide
  MOD_RES (1)..(3): Xaa is C or S

SEQ ID NO: 32056 - protein, 34 aa, Artificial Sequence
  Cyclic GFR-binding peptide
  MOD_RES (2)..(4): Xaa is C or S
SXKXSKVVMEYQKYVKPTRGVIYLISIPSLDQPV

SEQ ID NO: 32057 - protein, 28 aa, Artificial Sequence
  Cyclic GFR-binding peptide
VIMYHYKLVKPKRGVKYLISIPSLAQPV

SEQ ID NO: 32058 - protein, 35 aa, Artificial Sequence; identical to SEQ ID NO: 3792
  Cyclic GFR-binding peptide
  MOD_RES (2)..(34)..(35): Xaa is C or S

SEQ ID NO: 32059 - protein, 29 aa, Artificial Sequence
  Cyclic GFR-binding peptide
  MOD_RES (29)..(29): Xaa is C or S
VMDEYKFKVVNNAADLYLISIPELRAPVX

SEQ ID NO: 32060 - protein, 25 aa, Artificial Sequence
  Cyclic GFR-binding peptide
MEYQKYVKPKRGVIYLISIPSLAQP

SEQ ID NO: 32061 - protein, 28 aa, Artificial Sequence
  Cyclic GFR-binding peptide
  MOD_RES (1)..(3): Xaa is C or S
XKXSKVVMEYQKYVKPTRGVIYLISIPS

SEQ ID NO: 32062 - protein, 30 aa, Artificial Sequence; identical to SEQ ID NO: 3793
  Cyclic GFR-binding peptide
  MOD_RES (2)..(4): Xaa is C or S

SEQ ID NO: 32063 - protein, 25 aa, Artificial Sequence
  Cyclic GFR-binding peptide
IMRYKKLVKPKRGVFYLISIANLAQ

SEQ ID NO: 32064 - protein, 21 aa, Artificial Sequence
  Cyclic GFR-binding peptide
DEYKFKVVNNAADLYLISIPE

SEQ ID NO: 32065 - protein, 23 aa, Artificial Sequence
  Cyclic GFR-binding peptide
MDYHYKLVVNNAADKYLISIPSL

SEQ ID NO: 32066 - protein, 24 aa, Artificial Sequence
  Cyclic GFR-binding peptide
YHYKLIVNSSDDKYLVSIPSLKTP

SEQ ID NO: 32067 - protein, 29 aa, Artificial Sequence
  Cyclic GFR-binding peptide
  MOD_RES (1)..(1): Xaa is C or S
XSKVIMEYKFKIKPTKGILYLISIPELDQ

SEQ ID NO: 32068 - protein, 34 aa, Artificial Sequence
  Cyclic GFR-binding peptide
  MOD_RES (32)..(33): Xaa is C or S
GEVVMEEYQKYVVKDYEDIYLMSIPSLETPVXXA

SEQ ID NO: 32069 - protein, 35 aa, Artificial Sequence
  Cyclic GFR-binding peptide
  MOD_RES (2)..(33)..(34): Xaa is C or S
KXSRVIMEYKFKVKPKRGVLYLISIPELAQPVXXP

SEQ ID NO: 32070 - protein, 34 aa, Artificial Sequence; identical to SEQ ID NO: 3801
  Cyclic GFR-binding peptide
  MOD_RES (2)..(34): Xaa is C or S

SEQ ID NO: 32071 - protein, 25 aa, Artificial Sequence
  Cyclic GFR-binding peptide
VMDEYKFKVVNNAADLYLISIPELR

SEQ ID NO: 32072 - protein, 33 aa, Artificial Sequence
  Cyclic GFR-binding peptide
  MOD_RES (28)..(29): Xaa is C or S
GEEYQKYTPVGMDDIYLVSIPSLKTPVXXAKGV

SEQ ID NO: 32073 - protein, 29 aa, Artificial Sequence
  Cyclic GFR-binding peptide
VAMGYHYKLYTVVGKDKYLISIPSLKTPV

SEQ ID NO: 32074 - protein, 38 aa, Artificial Sequence
  Cyclic GFR-binding peptide
  MOD_RES (2)..(34): Xaa is C or S
GXSRVVMNEYKFKIVNSSDDLYLVSIPELKTPAXTPKT

SEQ ID NO: 32075 - protein, 42 aa, Artificial Sequence; identical to SEQ ID NO: 3802
  Cyclic GFR-binding peptide
  MOD_RES (2)..(4)..(36)..(37): Xaa is C or S

SEQ ID NO: 32076 - protein, 33 aa, Artificial Sequence; identical to SEQ ID NO: 3804
  Cyclic GFR-binding peptide
  MOD_RES (1)..(32)..(33): Xaa is C or S

SEQ ID NO: 32077 - protein, 41 aa, Artificial Sequence
  Cyclic GFR-binding peptide
  MOD_RES (2)..(4)..(36)..(37): Xaa is C or S
RXGXESVAMGRYKKLYTVVGKDFYLISIANLKTPVXXAKSA

SEQ ID NO: 32078 - protein, 35 aa, Artificial Sequence; identical to SEQ ID NO: 3805
  Cyclic GFR-binding peptide
  MOD_RES (1)..(3)..(34)..(35): Xaa is C or S

SEQ ID NO: 32079 - protein, 35 aa, Artificial Sequence
  Cyclic GFR-binding peptide
  MOD_RES (2)..(4): Xaa is C or S
RXGXSEVVMDPIKGYVVNNASDFYLINIPSLRTPV

SEQ ID NO: 32080 - protein, 31 aa, Artificial Sequence
  Cyclic GFR-binding peptide
  MOD_RES (31)..(31): Xaa is C or S
SRVIMEYQKYVKPKRGVIYLISIPSLAQPVX

SEQ ID NO: 32081 - protein, 35 aa, Artificial Sequence; identical to SEQ ID NO: 3806
  Cyclic GFR-binding peptide
  MOD_RES (31)..(32): Xaa is C or S

SEQ ID NO: 32082 - protein, 21 aa, Artificial Sequence
  Cyclic GFR-binding peptide
RYKKLIVNNSSDFYLVSIANL

SEQ ID NO: 32083 - protein, 23 aa, Artificial Sequence
  Cyclic GFR-binding peptide
VMNEYKFKIVNNSSDLYLVSIPE

SEQ ID NO: 32084 - protein, 23 aa, Artificial Sequence
  Cyclic GFR-binding peptide
YHYKLVKPKRGVKYLISIPSLAQ

SEQ ID NO: 32085 - protein, 32 aa, Artificial Sequence
  Cyclic GFR-binding peptide
  MOD_RES (31)..(32): Xaa is C or S
VSMGEEYKFKTPVGMDDLYLVSIPELKTPVXX

SEQ ID NO: 32086 - protein, 32 aa, Artificial Sequence
  Cyclic GFR-binding peptide
  MOD_RES (28)..(29): Xaa is C or S
GEEYQKYTPVGMDDIYLVSIPSLKTPVXXAKG

SEQ ID NO: 32087 - protein, 28 aa, Artificial Sequence
  Cyclic GFR-binding peptide
  MOD_RES (26)..(26): Xaa is C or S
YHYKLIVNSSDDKYLVSIPSLKTPAXTP

SEQ ID NO: 32088 - protein, 34 aa, Artificial Sequence
  Cyclic GFR-binding peptide
  MOD_RES (1)..(33)..(34): Xaa is C or S
XGEVVMDEYQKYVVKENEDIYLMSIPSLETPVXX

SEQ ID NO: 32089 - protein, 33 aa, Artificial Sequence; identical to SEQ ID NO: 3813
  Cyclic GFR-binding peptide
  MOD_RES (31)..(32): Xaa is C or S

SEQ ID NO: 32090 - protein, 24 aa, Artificial Sequence
  Cyclic GFR-binding peptide
MNEYKFKIVNSSDDLYLVSIPELK

SEQ ID NO: 32091 - protein, 34 aa, Artificial Sequence
  Cyclic GFR-binding peptide
  MOD_RES (32)..(33): Xaa is C or S
GEVVMDEYQKYVVKENEDIYLMSIPSLETPVXXA

SEQ ID NO: 32092 - protein, 37 aa, Artificial Sequence
  Cyclic GFR-binding peptide
  MOD_RES (31)..(32): Xaa is C or S
SVAMGEYQKYYTVVGKDIYLISIPSLKTPVXXAKSAK

SEQ ID NO: 32093 - protein, 25 aa, Artificial Sequence
  Cyclic GFR-binding peptide
MGEEYKFKTPVGMDDLYLVSIPELK

SEQ ID NO: 32094 - protein, 30 aa, Artificial Sequence
  Cyclic GFR-binding peptide
  MOD_RES (29)..(30): Xaa is C or S
VMDEYQKYVVKENEDIYLMSIPSLETPVXX

SEQ ID NO: 32095 - protein, 33 aa, Artificial Sequence
  Cyclic GFR-binding peptide
  MOD_RES (28)..(29): Xaa is C or S
IMEYKFKVKPKRGVLYLISIPELAQPVXXPAAS

SEQ ID NO: 32096 - protein, 36 aa, Artificial Sequence; identical to SEQ ID NO: 3822
  Cyclic GFR-binding peptide
  MOD_RES (2)..(4): Xaa is C or S

SEQ ID NO: 32097 - protein, 36 aa, Artificial Sequence; identical to SEQ ID NO: 3823
  Cyclic GFR-binding peptide
  MOD_RES (30)..(31): Xaa is C or S

SEQ ID NO: 32098 - protein, 34 aa, Artificial Sequence
  Cyclic GFR-binding peptide
  MOD_RES (31)..(32): Xaa is C or S
KVVMNEYKFKIVNNSSDLYLVSIPELKTPAXXAK

SEQ ID NO: 32099 - protein, 38 aa, Artificial Sequence
  Cyclic GFR-binding peptide
  MOD_RES (2)..(4)..(35)..(36): Xaa is C or S
SXKXSKVIMEYKFKIKPTKGILYLISIPELDQSVXXPS

SEQ ID NO: 32100 - protein, 38 aa, Artificial Sequence; identical to SEQ ID NO: 3825
  Cyclic GFR-binding peptide
  MOD_RES (2)..(33)..(34): Xaa is C or S

SEQ ID NO: 32101 - protein, 28 aa, Artificial Sequence
  Cyclic GFR-binding peptide
  MOD_RES (1)..(3): Xaa is C or S
XKXSRVIMYHYKLVKPKRGVKYLISIPS

SEQ ID NO: 32102 - protein, 25 aa, Artificial Sequence
  Cyclic GFR-binding peptide
VVMERYKKLVVKDYEDFYLMSIANL

SEQ ID NO: 32103 - protein, 35 aa, Artificial Sequence
  Cyclic GFR-binding peptide
  MOD_RES (2)..(35): Xaa is C or S
GXEAVSMGEEYQKYTPVGMDDIYLVSIPSLKTPVX

SEQ ID NO: 32104 - protein, 24 aa, Artificial Sequence
  Cyclic GFR-binding peptide
EEYKFKTPVGMDDLYLVSIPELKT

SEQ ID NO: 32105 - protein, 34 aa, Artificial Sequence; identical to SEQ ID NO: 3831
  Cyclic GFR-binding peptide
  MOD_RES (2)..(4): Xaa is C or S

SEQ ID NO: 32106 - protein, 28 aa, Artificial Sequence
  Cyclic GFR-binding peptide
  MOD_RES (27)..(28): Xaa is C or S
MEYQKYVKPKRGVIYLISIPSLAQPVXX

SEQ ID NO: 32107 - protein, 25 aa, Artificial Sequence
  Cyclic GFR-binding peptide
KVVMRYKKLVKPTRGVFYLISIANL

SEQ ID NO: 32108 - protein, 29 aa, Artificial Sequence
  Cyclic GFR-binding peptide
  MOD_RES (1)..(3): Xaa is C or S
XGXAKVVMNRYKKLIVNNSSDFYLVSIAN

SEQ ID NO: 32109 - protein, 29 aa, Artificial Sequence
  Cyclic GFR-binding peptide
KVIMYHYKLIKPTKGIKYLISIPSLDQSV

SEQ ID NO: 32110 - protein, 43 aa, Artificial Sequence
  Cyclic GFR-binding peptide
  MOD_RES (2)..(4)..(37)..(38): Xaa is C or S
RXGXEAVSMGEEYKFKTPVGMDDLYLVSIPELKTPVXXAKGVK

SEQ ID NO: 32111 - protein, 40 aa, Artificial Sequence
  Cyclic GFR-binding peptide
  MOD_RES (2)..(34)..(35): Xaa is C or S
GXSRVVMNEYQKYIVNSSDDIYLVSIPSLKTPAXXPKPVY

SEQ ID NO: 32112 - protein, 29 aa, Artificial Sequence
  Cyclic GFR-binding peptide
  MOD_RES (27)..(27): Xaa is C or S
NEYQKYIVNSSDDIYLVSIPSLKTPAXTP

SEQ ID NO: 32113 - protein, 35 aa, Artificial Sequence; identical to SEQ ID NO: 3841
  Cyclic GFR-binding peptide
  MOD_RES (2)..(34)..(35): Xaa is C or S

SEQ ID NO: 32114 - protein, 32 aa, Artificial Sequence
  Cyclic GFR-binding peptide
  MOD_RES (30)..(31): Xaa is C or S
SMGEEYKFKTPVGMDDLYLVSIPELKTPVXXA

SEQ ID NO: 32115 - protein, 24 aa, Artificial Sequence
  Cyclic GFR-binding peptide
NEYQKYIVNSSDDIYLVSIPSLQT

SEQ ID NO: 32116 - protein, 40 aa, Artificial Sequence
  Cyclic GFR-binding peptide
  MOD_RES (2)..(34)..(35): Xaa is C or S
GXESVAMGEYQKYYTVVGKDIYLISIPSLKTPVXXAKSAK

SEQ ID NO: 32117 - protein, 33 aa, Artificial Sequence; identical to SEQ ID NO: 3842
  Cyclic GFR-binding peptide
  MOD_RES (1)..(32)..(33): Xaa is C or S

SEQ ID NO: 32118 - protein, 30 aa, Artificial Sequence; identical to SEQ ID NO: 3843
  Cyclic GFR-binding peptide
  MOD_RES (2)..(2): Xaa is C or S

SEQ ID NO: 32119 - protein, 26 aa, Artificial Sequence
  Cyclic GFR-binding peptide
  MOD_RES (26)..(26): Xaa is C or S
EYKFKTPVGMDDLYLVSIPELKTPVX

SEQ ID NO: 32120 - protein, 38 aa, Artificial Sequence; identical to SEQ ID NO: 3844
  Cyclic GFR-binding peptide
  MOD_RES (1)..(3)..(36)..(37): Xaa is C or S

SEQ ID NO: 32121 - protein, 34 aa, Artificial Sequence
  Cyclic GFR-binding peptide
  MOD_RES (1)..(33)..(34): Xaa is C or S
XGEVVMEEYQKYVVKDYEDIYLMSIPSLETPVXX

SEQ ID NO: 32122 - protein, 26 aa, Artificial Sequence
  Cyclic GFR-binding peptide
  MOD_RES (26)..(26): Xaa is C or S
EYKFKVKPTRGVLYLISIPELDQPVX

SEQ ID NO: 32123 - protein, 36 aa, Artificial Sequence; identical to SEQ ID NO: 3845
  Cyclic GFR-binding peptide
  MOD_RES (32)..(33): Xaa is C or S

SEQ ID NO: 32124 - protein, 36 aa, Artificial Sequence
  Cyclic GFR-binding peptide
  MOD_RES (30)..(31): Xaa is C or S
KVIMEYKFKIKPTKGILYLISIPELDQSVXXPSASA

SEQ ID NO: 32125 - protein, 35 aa, Artificial Sequence
  Cyclic GFR-binding peptide
  MOD_RES (2)..(4): Xaa is C or S
HXGXSRVVMNEYQKYIVNSSDDIYLVSIPSLKTPA

SEQ ID NO: 32126 - protein, 29 aa, Artificial Sequence
  Cyclic GFR-binding peptide
  MOD_RES (29)..(29): Xaa is C or S
VMNYHYKLIVNNSSDKYLVSIPSLKTPAX

SEQ ID NO: 32127 - protein, 28 aa, Artificial Sequence
  Cyclic GFR-binding peptide
  MOD_RES (1)..(1): Xaa is C or S
XSRVIMYHYKLVKPKRGVKYLISIPSLA

SEQ ID NO: 32128 - protein, 32 aa, Artificial Sequence; identical to SEQ ID NO: 3849
  Cyclic GFR-binding peptide
  MOD_RES (2)..(4): Xaa is C or S

SEQ ID NO: 32129 - protein, 32 aa, Artificial Sequence
  Cyclic GFR-binding peptide
  MOD_RES (2)..(4): Xaa is C or S
RXGXGEVVMEEYKFKVVKDYEDLYLMSIPELE

SEQ ID NO: 32130 - protein, 29 aa, Artificial Sequence
  Cyclic GFR-binding peptide
  MOD_RES (29)..(29): Xaa is C or S
VIMEYQKYVKPKRGVIYLISIPSLAQPVX

SEQ ID NO: 32131 - protein, 35 aa, Artificial Sequence
  Cyclic GFR-binding peptide
  MOD_RES (29)..(30): Xaa is C or S
MGEEYQKYTPVGMDDIYLVSIPSLKTPVXXAKGVK

SEQ ID NO: 32132 - protein, 24 aa, Artificial Sequence
  Cyclic GFR-binding peptide
VIMEYKFKVKPKRGVLYLISIPEL

SEQ ID NO: 32133 - protein, 23 aa, Artificial Sequence
  Cyclic GFR-binding peptide
ERYKKLTPVGMDDFYLVSIANLK

SEQ ID NO: 32134 - protein, 34 aa, Artificial Sequence
  Cyclic GFR-binding peptide
  MOD_RES (28)..(29): Xaa is C or S
MNEYKFKIVNSSDDLYLVSIPELKTPAXXPKPVY

SEQ ID NO: 32135 - protein, 40 aa, Artificial Sequence
  Cyclic GFR-binding peptide
  MOD_RES (1)..(3)..(35)..(36): Xaa is C or S
XGXESVAMGYHYKLYTVVGKDKYLISIPSLKTPVXXAKSA

SEQ ID NO: 32136 - protein, 32 aa, Artificial Sequence
  Cyclic GFR-binding peptide
  MOD_RES (27)..(28): Xaa is C or S
GYHYKLYTVVGKDKYLISIPSLKTPVXXAKSA

SEQ ID NO: 32137 - protein, 30 aa, Artificial Sequence
  Cyclic GFR-binding peptide
  MOD_RES (28)..(29): Xaa is C or S
IMEYQKYIKPTKGIIYLISIPSLDQSVXXP

SEQ ID NO: 32138 - protein, 26 aa, Artificial Sequence
  Cyclic GFR-binding peptide
VMDYHYKLVVKENEDKYLMSIPSLET

SEQ ID NO: 32139 - protein, 34 aa, Artificial Sequence
  Cyclic GFR-binding peptide
  MOD_RES (29)..(30): Xaa is C or S
MGEEYKFKTPVGMDDLYLVSIPELKTPVXXAKGV

SEQ ID NO: 32140 - protein, 31 aa, Artificial Sequence
  Cyclic GFR-binding peptide
  MOD_RES (27)..(28): Xaa is C or S
EEYQKYVVKDYEDIYLMSIPSLETPVXXAKP

SEQ ID NO: 32141 - protein, 33 aa, Artificial Sequence
  Cyclic GFR-binding peptide
  MOD_RES (28)..(29): Xaa is C or S
MNEYQKYIVNNSSDIYLVSIPSLKTPAXXAKPV

SEQ ID NO: 32142 - protein, 35 aa, Artificial Sequence
  Cyclic GFR-binding peptide
  MOD_RES (1)..(3)..(35): Xaa is C or S
XGXGEVVMDEYQKYVVKENEDIYLMSIPSLETPVX

SEQ ID NO: 32143 - protein, 28 aa, Artificial Sequence
  Cyclic GFR-binding peptide
AEVVMDRYKKLVVNNAADFYLISIANLR

SEQ ID NO: 32144 - protein, 28 aa, Artificial Sequence
  Cyclic GFR-binding peptide
  MOD_RES (2)..(2): Xaa is C or S
GXAEVVMDRYKKLVVNNAADFYLISIAN

SEQ ID NO: 32145 - protein, 26 aa, Artificial Sequence
  Cyclic GFR-binding peptide
KVVMNEYQKYIVNNSSDIYLVSIPSL

SEQ ID NO: 32146 - protein, 31 aa, Artificial Sequence; identical to SEQ ID NO: 3860
  Cyclic GFR-binding peptide
  MOD_RES (1)..(1): Xaa is C or S

SEQ ID NO: 32147 - protein, 25 aa, Artificial Sequence
  Cyclic GFR-binding peptide
VVMNYHYKLIVNNSSDKYLVSIPSL

SEQ ID NO: 32148 - protein, 41 aa, Artificial Sequence
  Cyclic GFR-binding peptide
  MOD_RES (1)..(3)..(35)..(36): Xaa is C or S
XGXESVAMGEYQKYYTVVGKDIYLISIPSLKTPVXXAKSAK

SEQ ID NO: 32149 - protein, 27 aa, Artificial Sequence
  Cyclic GFR-binding peptide
VIMYHYKLIKPTKGIKYLISIPSLDQS

SEQ ID NO: 32150 - protein, 31 aa, Artificial Sequence; identical to SEQ ID NO: 3865
  Cyclic GFR-binding peptide
  MOD_RES (28)..(29): Xaa is C or S

SEQ ID NO: 32151 - protein, 27 aa, Artificial Sequence
  Cyclic GFR-binding peptide
RVVMNEYKFKIVNSSDDLYLVSIPELK

SEQ ID NO: 32152 - protein, 28 aa, Artificial Sequence
  Cyclic GFR-binding peptide
  MOD_RES (26)..(27): Xaa is C or S
EYQKYVKPTRGVIYLISIPSLDQPVXXP

SEQ ID NO: 32153 - protein, 29 aa, Artificial Sequence
  Cyclic GFR-binding peptide
  MOD_RES (26)..(27): Xaa is C or S
EYKFKIKPTKGILYLISIPELDQSVXXPS

SEQ ID NO: 32154 - protein, 27 aa, Artificial Sequence
  Cyclic GFR-binding peptide
  MOD_RES (26)..(27): Xaa is C or S
RYKKLVKPKRGVFYLISIANLAQPVXX

SEQ ID NO: 32155 - protein, 31 aa, Artificial Sequence; identical to SEQ ID NO: 3868
  Cyclic GFR-binding peptide
  MOD_RES (29)..(30): Xaa is C or S

SEQ ID NO: 32156 - protein, 34 aa, Artificial Sequence; identical to SEQ ID NO: 3869
  Cyclic GFR-binding peptide
  MOD_RES (29)..(30): Xaa is C or S

SEQ ID NO: 32157 - protein, 35 aa, Artificial Sequence
  Cyclic GFR-binding peptide
  MOD_RES (31)..(32): Xaa is C or S
SRVIMEYKFKVKPKRGVLYLISIPELAQPVXXPAA

SEQ ID NO: 32158 - protein, 26 aa, Artificial Sequence
  Cyclic GFR-binding peptide
GEVVMDEYKFKVVKENEDLYLMSIPE

SEQ ID NO: 32159 - protein, 30 aa, Artificial Sequence; identical to SEQ ID NO: 3873
  Cyclic GFR-binding peptide
  MOD_RES (30)..(30): Xaa is C or S

SEQ ID NO: 32160 - protein, 29 aa, Artificial Sequence
  Cyclic GFR-binding peptide
  MOD_RES (28)..(29): Xaa is C or S
MERYKKLVVKDYEDFYLMSIANLETPVXX

SEQ ID NO: 32161 - protein, 31 aa, Artificial Sequence
  Cyclic GFR-binding peptide
  MOD_RES (31)..(31): Xaa is C or S
SKVIMEYKFKIKPTKGILYLISIPELDQSVX

SEQ ID NO: 32162 - protein, 34 aa, Artificial Sequence
  Cyclic GFR-binding peptide
  MOD_RES (31)..(31): Xaa is C or S
RVVMNEYQKYIVNSSDDIYLVSIPSLKTPAXTPK

SEQ ID NO: 32163 - protein, 33 aa, Artificial Sequence
  Cyclic GFR-binding peptide
  MOD_RES (32)..(33): Xaa is C or S
AEVVMDEYKFKVVNNAADLYLISIPELRAPVXX

SEQ ID NO: 32164 - protein, 37 aa, Artificial Sequence
  Cyclic GFR-binding peptide
  MOD_RES (32)..(33): Xaa is C or S
ESVAMGYHYKLYTVVGKDKYLISIPSLKTPVXXAKSA

SEQ ID NO: 32165 - protein, 25 aa, Artificial Sequence
  Cyclic GFR-binding peptide
EYHYKLVVKDYEDKYLMSIPSLETP

SEQ ID NO: 32166 - protein, 29 aa, Artificial Sequence
  Cyclic GFR-binding peptide
  MOD_RES (2)..(2): Xaa is C or S
GXGEVVMEEYQKYVVKDYEDIYLMSIPSL

SEQ ID NO: 32167 - protein, 29 aa, Artificial Sequence
  Cyclic GFR-binding peptide
  MOD_RES (1)..(1): Xaa is C or S
XSKVVMYHYKLVKPTRGVKYLISIPSLDQ

SEQ ID NO: 32168 - protein, 34 aa, Artificial Sequence; identical to SEQ ID NO: 3880
  Cyclic GFR-binding peptide
  MOD_RES (1)..(3)..(34): Xaa is C or S

SEQ ID NO: 32169 - protein, 30 aa, Artificial Sequence
  Cyclic GFR-binding peptide
  MOD_RES (2)..(4): Xaa is C or S
RXGXAEVVMDRYKKLVVNNAADFYLISIAN

SEQ ID NO: 32170 - protein, 32 aa, Artificial Sequence; identical to SEQ ID NO: 3881
  Cyclic GFR-binding peptide
  MOD_RES (30)..(31): Xaa is C or S

SEQ ID NO: 32171 - protein, 22 aa, Artificial Sequence
  Cyclic GFR-binding peptide
MYHYKLVKPTRGVKYLISIPSL

SEQ ID NO: 32172 - protein, 37 aa, Artificial Sequence
  Cyclic GFR-binding peptide
  MOD_RES (2)..(4)..(36)..(37): Xaa is C or S
HXGXSRVVMNEYKFKIVNSSDDLYLVSIPELKTPAXX

SEQ ID NO: 32173 - protein, 34 aa, Artificial Sequence; identical to SEQ ID NO: 3884
  Cyclic GFR-binding peptide
  MOD_RES (30)..(31): Xaa is C or S

SEQ ID NO: 32174 - protein, 38 aa, Artificial Sequence
  Cyclic GFR-binding peptide
  MOD_RES (32)..(33): Xaa is C or S
AEVVMDRYKKLVVNNAADFYLISIANLRAPVXXSAPAA

SEQ ID NO: 32175 - protein, 35 aa, Artificial Sequence; identical to SEQ ID NO: 3885
  Cyclic GFR-binding peptide
  MOD_RES (1)..(33)..(34): Xaa is C or S

SEQ ID NO: 32176 - protein, 30 aa, Artificial Sequence; identical to SEQ ID NO: 3886
  Cyclic GFR-binding peptide
  MOD_RES (1)..(1): Xaa is C or S

SEQ ID NO: 32177 - protein, 39 aa, Artificial Sequence
  Cyclic GFR-binding peptide
  MOD_RES (2)..(33)..(34): Xaa is C or S
KXSKVIMEYQKYIKPTKGIIYLISIPSLDQSVXXPSASA

SEQ ID NO: 32178 - protein, 41 aa, Artificial Sequence
  Cyclic GFR-binding peptide
  MOD_RES (2)..(4)..(36): Xaa is C or S
HXGXSRVVMNEYQKYIVNSSDDIYLVSIPSLKTPAXTPKTV

SEQ ID NO: 32179 - protein, 30 aa, Artificial Sequence; identical to SEQ ID NO: 3892
  Cyclic GFR-binding peptide
  MOD_RES (28)..(28): Xaa is C or S

SEQ ID NO: 32180 - protein, 29 aa, Artificial Sequence
  Cyclic GFR-binding peptide
  MOD_RES (1)..(3): Xaa is C or S
XGXAEVVMDRYKKLVVNNAADFYLISIAN

SEQ ID NO: 32181 - protein, 34 aa, Artificial Sequence; identical to SEQ ID NO: 3893
  Cyclic GFR-binding peptide
  MOD_RES (2)..(4): Xaa is C or S

SEQ ID NO: 32182 - protein, 32 aa, Artificial Sequence
  Cyclic GFR-binding peptide
  MOD_RES (29)..(30): Xaa is C or S
VIMEYQKYIKPTKGIIYLISIPSLDQSVXXPS

SEQ ID NO: 32183 - protein, 21 aa, Artificial Sequence
  Cyclic GFR-binding peptide
YHYKLIKPTKGIKYLISIPSL

SEQ ID NO: 32184 - protein, 26 aa, Artificial Sequence
  Cyclic GFR-binding peptide
VVMYHYKLVKPTRGVKYLISIPSLDQ

SEQ ID NO: 32185 - protein, 31 aa, Artificial Sequence
  Cyclic GFR-binding peptide
  MOD_RES (26)..(27): Xaa is C or S
EYQKYIVNSSDDIYLVSIPSLQTPAXXPKPV

SEQ ID NO: 32186 - protein, 33 aa, Artificial Sequence
  Cyclic GFR-binding peptide
  MOD_RES (28)..(29): Xaa is C or S
MGEYQKYYTVVGKDIYLISIPSLKTPVXXAKSA

SEQ ID NO: 32187 - protein, 35 aa, Artificial Sequence
  Cyclic GFR-binding peptide
  MOD_RES (29)..(30): Xaa is C or S
VMDEYQKYVVKENEDIYLMSIPSLETPVXXAKPIK

SEQ ID NO: 32188 - protein, 30 aa, Artificial Sequence
  Cyclic GFR-binding peptide
  MOD_RES (29)..(30): Xaa is C or S
VMNEYQKYIVNSSDDIYLVSIPSLKTPAXX

SEQ ID NO: 32189 - protein, 30 aa, Artificial Sequence
  Cyclic GFR-binding peptide
  MOD_RES (29)..(30): Xaa is C or S
VMNEYQKYIVNNSSDIYLVSIPSLKTPAXX

SEQ ID NO: 32190 - protein, 36 aa, Artificial Sequence
  Cyclic GFR-binding peptide
  MOD_RES (30)..(30): Xaa is C or S
VVMNEYKFKIVNSSDDLYLVSIPELKTPAXTPKTVH

SEQ ID NO: 32191 - protein, 39 aa, Artificial Sequence
  Cyclic GFR-binding peptide
  MOD_RES (1)..(33)..(34): Xaa is C or S
XAKVVMNEYKFKIVNNSSDLYLVSIPELKTPAXXAKPVA

SEQ ID NO: 32192 - protein, 20 aa, Artificial Sequence
  Cyclic GFR-binding peptide
EYQKYIVNNSSDIYLVSIPS

SEQ ID NO: 32193 - protein, 34 aa, Artificial Sequence
  Cyclic GFR-binding peptide
  MOD_RES (1)..(3): Xaa is C or S
XGXSRVVMNEYQKYIVNSSDDIYLVSIPSLKTPA

SEQ ID NO: 32194 - protein, 31 aa, Artificial Sequence
  Cyclic GFR-binding peptide
  MOD_RES (2)..(4): Xaa is C or S
RXGXEAVSMGEEYKFKTPVGMDDLYLVSIPE

SEQ ID NO: 32195 - protein, 24 aa, Artificial Sequence
  Cyclic GFR-binding peptide
SMGEEYQKYTPVGMDDIYLVSIPS

SEQ ID NO: 32196 - protein, 38 aa, Artificial Sequence
  Cyclic GFR-binding peptide
  MOD_RES (2)..(34)..(35): Xaa is C or S
GXGEVVMDEYKFKVVKENEDLYLMSIPELETPVXXAKP

SEQ ID NO: 32197 - protein, 33 aa, Artificial Sequence; identical to SEQ ID NO: 3901
  Cyclic GFR-binding peptide
  MOD_RES (29)..(30): Xaa is C or S

SEQ ID NO: 32198 - protein, 32 aa, Artificial Sequence
  Cyclic GFR-binding peptide
  MOD_RES (31)..(32): Xaa is C or S
SVAMGRYKKLYTVVGKDFYLISIANLKTPVXX

SEQ ID NO: 32199 - protein, 28 aa, Artificial Sequence
  Cyclic GFR-binding peptide
SKVIMEYQKYIKPTKGIIYLISIPSLDQ

SEQ ID NO: 32200 - protein, 33 aa, Artificial Sequence
  Cyclic GFR-binding peptide
  MOD_RES (1)..(3): Xaa is C or S
XKXSKVIMEYQKYIKPTKGIIYLISIPSLDQSV

SEQ ID NO: 32201 - protein, 29 aa, Artificial Sequence
  Cyclic GFR-binding peptide
EVVMEEYKFKVVKDYEDLYLMSIPELETP

SEQ ID NO: 32202 - protein, 28 aa, Artificial Sequence
  Cyclic GFR-binding peptide
  MOD_RES (2)..(2): Xaa is C or S
GXGEVVMEEYQKYVVKDYEDIYLMSIPS

SEQ ID NO: 32203 - protein, 23 aa, Artificial Sequence
  Cyclic GFR-binding peptide
VMEYQKYVKPTRGVIYLISIPSL

SEQ ID NO: 32204 - protein, 29 aa, Artificial Sequence
  Cyclic GFR-binding peptide
  MOD_RES (28)..(29): Xaa is C or S
MNYHYKLIVNSSDDKYLVSIPSLKTPAXX

SEQ ID NO: 32205 - protein, 24 aa, Artificial Sequence
  Cyclic GFR-binding peptide
VVMNEYQKYIVNNSSDIYLVSIPS

SEQ ID NO: 32206 - protein, 35 aa, Artificial Sequence; identical to SEQ ID NO: 3908
  Cyclic GFR-binding peptide
  MOD_RES (30)..(31): Xaa is C or S

SEQ ID NO: 32207 - protein, 32 aa, Artificial Sequence; identical to SEQ ID NO: 3910
  Cyclic GFR-binding peptide
  MOD_RES (29)..(30): Xaa is C or S

SEQ ID NO: 32208 - protein, 22 aa, Artificial Sequence
  Cyclic GFR-binding peptide
EYQKYVKPKRGVIYLISIPSLA

SEQ ID NO: 32209 - protein, 34 aa, Artificial Sequence
  Cyclic GFR-binding peptide
  MOD_RES (1)..(3)..(34): Xaa is C or S
XKXSKVVMEYQKYVKPTRGVIYLISIPSLDQPVX

SEQ ID NO: 32210 - protein, 29 aa, Artificial Sequence
  Cyclic GFR-binding peptide
  MOD_RES (26)..(27): Xaa is C or S
YHYKLVKPTRGVKYLISIPSLDQPVXXPS

SEQ ID NO: 32211 - protein, 30 aa, Artificial Sequence
  Cyclic GFR-binding peptide
  MOD_RES (26)..(27): Xaa is C or S
RYKKLYTVVGKDFYLISIANLKTPVXXAKS

SEQ ID NO: 32212 - protein, 37 aa, Artificial Sequence; identical to SEQ ID NO: 3913
  Cyclic GFR-binding peptide
  MOD_RES (2)..(33)..(34): Xaa is C or S

SEQ ID NO: 32213 - protein, 33 aa, Artificial Sequence; identical to SEQ ID NO: 3914
  Cyclic GFR-binding peptide
  MOD_RES (29)..(30): Xaa is C or S

SEQ ID NO: 32214 - protein, 31 aa, Artificial Sequence; identical to SEQ ID NO: 3915
  Cyclic GFR-binding peptide
  MOD_RES (1)..(1): Xaa is C or S

SEQ ID NO: 32215 - protein, 28 aa, Artificial Sequence
  Cyclic GFR-binding peptide
  MOD_RES (27)..(27): Xaa is C or S
NYHYKLIVNSSDDKYLVSIPSLKTPAXT

SEQ ID NO: 32216 - protein, 29 aa, Artificial Sequence
  Cyclic GFR-binding peptide
  MOD_RES (1)..(1): Xaa is C or S
XSKVIMYHYKLIKPTKGIKYLISIPSLDQ

SEQ ID NO: 32217 - protein, 40 aa, Artificial Sequence
  Cyclic GFR-binding peptide
  MOD_RES (2)..(4)..(35)..(36): Xaa is C or S
SXKXSKVIMEYKFKIKPTKGILYLISIPELDQSVXXPSAS

SEQ ID NO: 32218 - protein, 32 aa, Artificial Sequence
  Cyclic GFR-binding peptide
  MOD_RES (1)..(3): Xaa is C or S
XGXAEVVMDYHYKLVVNNAADKYLISIPSLRA

SEQ ID NO: 32219 - protein, 35 aa, Artificial Sequence; identical to SEQ ID NO: 3919
  Cyclic GFR-binding peptide
  MOD_RES (29)..(30): Xaa is C or S

SEQ ID NO: 32220 - protein, 32 aa, Artificial Sequence; identical to SEQ ID NO: 3920
  Cyclic GFR-binding peptide
  MOD_RES (2)..(4): Xaa is C or S

SEQ ID NO: 32221 - protein, 21 aa, Artificial Sequence
  Cyclic GFR-binding peptide
EYKFKIVNSSDDLYLVSIPEL

SEQ ID NO: 32222 - protein, 24 aa, Artificial Sequence
  Cyclic GFR-binding peptide
VVMEYHYKLVVKDYEDKYLMSIPS

SEQ ID NO: 32223 - protein, 39 aa, Artificial Sequence
  Cyclic GFR-binding peptide
  MOD_RES (2)..(4)..(36)..(37): Xaa is C or S
HXGXAKVVMNEYQKYIVNNSSDIYLVSIPSLKTPAXXAK

SEQ ID NO: 32224 - protein, 36 aa, Artificial Sequence; identical to SEQ ID NO: 3923
  Cyclic GFR-binding peptide
  MOD_RES (30)..(31): Xaa is C or S

SEQ ID NO: 32225 - protein, 29 aa, Artificial Sequence
  Cyclic GFR-binding peptide
EVVMDEYKFKVVNNAADLYLISIPELRAP

SEQ ID NO: 32226 - protein, 27 aa, Artificial Sequence
  Cyclic GFR-binding peptide
  MOD_RES (26)..(27): Xaa is C or S
RYKKLIVNNSSDFYLVSIANLKTPAXX

SEQ ID NO: 32227 - protein, 35 aa, Artificial Sequence
  Cyclic GFR-binding peptide
  MOD_RES (32)..(33): Xaa is C or S
ARVVMNEYQKYIVNSSDDIYLVSIPSLQTPAXXPK

SEQ ID NO: 32228 - protein, 28 aa, Artificial Sequence
  Cyclic GFR-binding peptide
  MOD_RES (27)..(28): Xaa is C or S
NEYQKYIVNSSDDIYLVSIPSLKTPAXX

SEQ ID NO: 32229 - protein, 35 aa, Artificial Sequence; identical to SEQ ID NO: 3928
  Cyclic GFR-binding peptide
  MOD_RES (1)..(33)..(34): Xaa is C or S

SEQ ID NO: 32230 - protein, 24 aa, Artificial Sequence
  Cyclic GFR-binding peptide
RYKKLVVNNAADFYLISIANLRAP

SEQ ID NO: 32231 - protein, 32 aa, Artificial Sequence
  Cyclic GFR-binding peptide
  MOD_RES (29)..(30): Xaa is C or S
AMGEYQKYYTVVGKDIYLISIPSLKTPVXXAK

SEQ ID NO: 32232 - protein, 28 aa, Artificial Sequence
  Cyclic GFR-binding peptide
EVVMDEYKFKVVNNAADLYLISIPELRA

SEQ ID NO: 32233 - protein, 27 aa, Artificial Sequence
  Cyclic GFR-binding peptide
  MOD_RES (26)..(27): Xaa is C or S
EYQKYVVKENEDIYLMSIPSLETPVXX

SEQ ID NO: 32234 - protein, 41 aa, Artificial Sequence; identical to SEQ ID NO: 3935
  Cyclic GFR-binding peptide
  MOD_RES (1)..(3)..(35)..(36): Xaa is C or S

SEQ ID NO: 32235 - protein, 27 aa, Artificial Sequence
  Cyclic GFR-binding peptide
VVMEEYKFKVVKDYEDLYLMSIPELET

SEQ ID NO: 32236 - protein, 29 aa, Artificial Sequence
  Cyclic GFR-binding peptide
  MOD_RES (2)..(2): Xaa is C or S
GXAEVVMDRYKKLVVNNAADFYLISIANL

SEQ ID NO: 32237 - protein, 29 aa, Artificial Sequence
  Cyclic GFR-binding peptide
VSMGERYKKLTPVGMDDFYLVSIANLKTP

SEQ ID NO: 32238 - protein, 36 aa, Artificial Sequence
  Cyclic GFR-binding peptide
  MOD_RES (30)..(31): Xaa is C or S
KVVMEYQKYVKPTRGVIYLISIPSLDQPVXXPSASA

SEQ ID NO: 32239 - protein, 34 aa, Artificial Sequence; identical to SEQ ID NO: 3939
  Cyclic GFR-binding peptide
  MOD_RES (30)..(31): Xaa is C or S

SEQ ID NO: 32240 - protein, 27 aa, Artificial Sequence
  Cyclic GFR-binding peptide
VVMNEYQKYIVNSSDDIYLVSIPSLKT

SEQ ID NO: 32241 - protein, 36 aa, Artificial Sequence
  Cyclic GFR-binding peptide
  MOD_RES (30)..(31): Xaa is C or S
VAMGYHYKLYTVVGKDKYLISIPSLKTPVXXAKSAK

SEQ ID NO: 32242 - protein, 27 aa, Artificial Sequence
  Cyclic GFR-binding peptide
  MOD_RES (1)..(1): Xaa is C or S
XGEVVMDEYKFKVVKENEDLYLMSIPE

SEQ ID NO: 32243 - protein, 29 aa, Artificial Sequence
  Cyclic GFR-binding peptide
  MOD_RES (27)..(28): Xaa is C or S
DYHYKLVVKENEDKYLMSIPSLETPVXXA

SEQ ID NO: 32244 - protein, 23 aa, Artificial Sequence
  Cyclic GFR-binding peptide
NEYQKYIVNNSSDIYLVSIPSLK

SEQ ID NO: 32245 - protein, 41 aa, Artificial Sequence
  Cyclic GFR-binding peptide
  MOD_RES (2)..(4)..(35)..(36): Xaa is C or S
SXKXSKVVMEYKFKVKPTRGVLYLISIPELDQPVXXPSASA

SEQ ID NO: 32246 - protein, 34 aa, Artificial Sequence
  Cyclic GFR-binding peptide
  MOD_RES (32)..(33): Xaa is C or S
SRVVMNEYKFKIVNSSDDLYLVSIPELKTPAXXP

SEQ ID NO: 32247 - protein, 28 aa, Artificial Sequence
  Cyclic GFR-binding peptide
  MOD_RES (1)..(1): Xaa is C or S
XARVVMNEYQKYIVNSSDDIYLVSIPSL

SEQ ID NO: 32248 - protein, 35 aa, Artificial Sequence
  Cyclic GFR-binding peptide
  MOD_RES (30)..(31): Xaa is C or S
VVMDYHYKLVVNNAADKYLISIPSLRAPVXXSAPA

SEQ ID NO: 32249 - protein, 37 aa, Artificial Sequence; identical to SEQ ID NO: 3944
  Cyclic GFR-binding peptide
  MOD_RES (2)..(34)..(35): Xaa is C or S

SEQ ID NO: 32250 - protein, 33 aa, Artificial Sequence
  Cyclic GFR-binding peptide
  MOD_RES (30)..(31): Xaa is C or S
RVIMEYKFKVKPKRGVLYLISIPELAQPVXXPA

SEQ ID NO: 32251 - protein, 29 aa, Artificial Sequence
  Cyclic GFR-binding peptide
SRVVMNYHYKLIVNSSDDKYLVSIPSLKT

SEQ ID NO: 32252 - protein, 38 aa, Artificial Sequence
  Cyclic GFR-binding peptide
  MOD_RES (1)..(32)..(33): Xaa is C or S
XSKVVMEYKFKVKPTRGVLYLISIPELDQPVXXPSASA

SEQ ID NO: 32253 - protein, 32 aa, Artificial Sequence
  Cyclic GFR-binding peptide
  MOD_RES (2)..(4): Xaa is C or S
SXKXSRVIMEYKFKVKPKRGVLYLISIPELAQ

SEQ ID NO: 32254 - protein, 32 aa, Artificial Sequence
  Cyclic GFR-binding peptide
  MOD_RES (30)..(31): Xaa is C or S
KVIMEYKFKIKPTKGILYLISIPELDQSVXXP

SEQ ID NO: 32255 - protein, 37 aa, Artificial Sequence
  Cyclic GFR-binding peptide
  MOD_RES (32)..(33): Xaa is C or S
ESVAMGEYQKYYTVVGKDIYLISIPSLKTPVXXAKSA

SEQ ID NO: 32256 - protein, 20 aa, Artificial Sequence
  Cyclic GFR-binding peptide
YHYKLVKPKRGVKYLISIPS

SEQ ID NO: 32257 - protein, 40 aa, Artificial Sequence
  Cyclic GFR-binding peptide
  MOD_RES (2)..(4)..(36)..(37): Xaa is C or S
RXGXGEVVMDEYKFKVVKENEDLYLMSIPELETPVXXAKP

SEQ ID NO: 32258 - protein, 33 aa, Artificial Sequence
  Cyclic GFR-binding peptide
  MOD_RES (27)..(28): Xaa is C or S
NEYQKYIVNNSSDIYLVSIPSLKTPAXXAKPVA

SEQ ID NO: 32259 - protein, 30 aa, Artificial Sequence; identical to SEQ ID NO: 3949
  Cyclic GFR-binding peptide
  MOD_RES (2)..(2): Xaa is C or S

SEQ ID NO: 32260 - protein, 31 aa, Artificial Sequence; identical to SEQ ID NO: 3950
  Cyclic GFR-binding peptide
  MOD_RES (30)..(31): Xaa is C or S

SEQ ID NO: 32261 - protein, 28 aa, Artificial Sequence
  Cyclic GFR-binding peptide
EVVMEEYKFKVVKDYEDLYLMSIPELET

SEQ ID NO: 32262 - protein, 32 aa, Artificial Sequence; identical to SEQ ID NO: 3952
  Cyclic GFR-binding peptide
  MOD_RES (1)..(3): Xaa is C or S

SEQ ID NO: 32263 - protein, 35 aa, Artificial Sequence
  Cyclic GFR-binding peptide
  MOD_RES (30)..(31): Xaa is C or S
VVMNEYKFKIVNSSDDLYLVSIPELKTPAXXPKPV

SEQ ID NO: 32264 - protein, 27 aa, Artificial Sequence
  Cyclic GFR-binding peptide
MNEYQKYIVNSSDDIYLVSIPSLKTPA

SEQ ID NO: 32265 - protein, 23 aa, Artificial Sequence
  Cyclic GFR-binding peptide
EYQKYIKPTKGIIYLISIPSLDQ

SEQ ID NO: 32266 - protein, 35 aa, Artificial Sequence
  Cyclic GFR-binding peptide
  MOD_RES (2)..(33)..(34): Xaa is C or S
KXSKVVMEYQKYVKPTRGVIYLISIPSLDQPVXXP

SEQ ID NO: 32267 - protein, 30 aa, Artificial Sequence
  Cyclic GFR-binding peptide
  MOD_RES (27)..(28): Xaa is C or S
DYHYKLVVNNAADKYLISIPSLRAPVXXSA

SEQ ID NO: 32268 - protein, 21 aa, Artificial Sequence
  Cyclic GFR-binding peptide
RYKKLVKPKRGVFYLISIANL

SEQ ID NO: 32269 - protein, 32 aa, Artificial Sequence; identical to SEQ ID NO: 3963
  Cyclic GFR-binding peptide
  MOD_RES (30)..(31): Xaa is C or S

SEQ ID NO: 32270 - protein, 27 aa, Artificial Sequence
  Cyclic GFR-binding peptide
VVMNYHYKLIVNNSSDKYLVSIPSLKT

SEQ ID NO: 32271 - protein, 26 aa, Artificial Sequence
  Cyclic GFR-binding peptide
VVMDYHYKLVVNNAADKYLISIPSLR

SEQ ID NO: 32272 - protein, 22 aa, Artificial Sequence
  Cyclic GFR-binding peptide
MYHYKLVKPKRGVKYLISIPSL

SEQ ID NO: 32273 - protein, 29 aa, Artificial Sequence
  Cyclic GFR-binding peptide
VVMNEYQKYIVNSSDDIYLVSIPSLQTPA

SEQ ID NO: 32274 - protein, 35 aa, Artificial Sequence
  Cyclic GFR-binding peptide
  MOD_RES (2)..(34)..(35): Xaa is C or S
GXARVVMNEYQKYIVNSSDDIYLVSIPSLQTPAXX

SEQ ID NO: 32275 - protein, 31 aa, Artificial Sequence
  Cyclic GFR-binding peptide
  MOD_RES (1)..(1): Xaa is C or S
XSRVVMNEYKFKIVNSSDDLYLVSIPELKTP

SEQ ID NO: 32276 - protein, 34 aa, Artificial Sequence
  Cyclic GFR-binding peptide
  MOD_RES (1)..(33)..(34): Xaa is C or S
XAKVVMNEYQKYIVNNSSDIYLVSIPSLKTPAXX

SEQ ID NO: 32277 - protein, 27 aa, Artificial Sequence
  Cyclic GFR-binding peptide
  MOD_RES (27)..(27): Xaa is C or S
NYHYKLIVNNSSDKYLVSIPSLKTPAX

SEQ ID NO: 32278 - protein, 33 aa, Artificial Sequence
  Cyclic GFR-binding peptide
  MOD_RES (1)..(3): Xaa is C or S
XGXAEVVMDRYKKLVVNNAADFYLISIANLRAP

SEQ ID NO: 32279 - protein, 29 aa, Artificial Sequence
  Cyclic GFR-binding peptide
  MOD_RES (1)..(1): Xaa is C or S
XSKVVMEYQKYVKPTRGVIYLISIPSLDQ

SEQ ID NO: 32280 - protein, 32 aa, Artificial Sequence
  Cyclic GFR-binding peptide
  MOD_RES (2)..(4): Xaa is C or S
RXGXAEVVMDYHYKLVVNNAADKYLISIPSLR

SEQ ID NO: 32281 - protein, 27 aa, Artificial Sequence
  Cyclic GFR-binding peptide
  MOD_RES (1)..(1): Xaa is C or S
XESVAMGYHYKLYTVVGKDKYLISIPS

SEQ ID NO: 32282 - protein, 31 aa, Artificial Sequence
  Cyclic GFR-binding peptide
  MOD_RES (29)..(30): Xaa is C or S
VMDRYKKLVVNNAADFYLISIANLRAPVXXS

SEQ ID NO: 32283 - protein, 30 aa, Artificial Sequence
  Cyclic GFR-binding peptide
  MOD_RES (27)..(28): Xaa is C or S
DEYKFKVVNNAADLYLISIPELRAPVXXSA

SEQ ID NO: 32284 - protein, 31 aa, Artificial Sequence; identical to SEQ ID NO: 3979
  Cyclic GFR-binding peptide
  MOD_RES (1)..(3): Xaa is C or S

SEQ ID NO: 32285 - protein, 28 aa, Artificial Sequence
  Cyclic GFR-binding peptide
  MOD_RES (1)..(1): Xaa is C or S
XSRVIMEYKFKVKPKRGVLYLISIPELA

SEQ ID NO: 32286 - protein, 36 aa, Artificial Sequence
  Cyclic GFR-binding peptide
  MOD_RES (31)..(32): Xaa is C or S
RVVMNEYKFKIVNSSDDLYLVSIPELQTPAXXPKPV

SEQ ID NO: 32287 - protein, 25 aa, Artificial Sequence
  Cyclic GFR-binding peptide
EYQKYYTVVGKDIYLISIPSLKTPV

SEQ ID NO: 32288 - protein, 31 aa, Artificial Sequence
  Cyclic GFR-binding peptide
  MOD_RES (29)..(30): Xaa is C or S
VMNEYKFKIVNSSDDLYLVSIPELKTPAXXP

SEQ ID NO: 32289 - protein, 38 aa, Artificial Sequence; identical to SEQ ID NO: 3981
  Cyclic GFR-binding peptide
  MOD_RES (2)..(4)..(36)..(37): Xaa is C or S

SEQ ID NO: 32290 - protein, 24 aa, Artificial Sequence
  Cyclic GFR-binding peptide
MGEYQKYYTVVGKDIYLISIPSLK

SEQ ID NO: 32291 - protein, 36 aa, Artificial Sequence
  Cyclic GFR-binding peptide
  MOD_RES (1)..(33): Xaa is C or S
XSRVVMNEYKFKIVNSSDDLYLVSIPELKTPAXTPK

SEQ ID NO: 32292 - protein, 38 aa, Artificial Sequence
  Cyclic GFR-binding peptide
  MOD_RES (1)..(33)..(34): Xaa is C or S
XAEVVMDEYKFKVVNNAADLYLISIPELRAPVXXSAPA

SEQ ID NO: 32293 - protein, 26 aa, Artificial Sequence
  Cyclic GFR-binding peptide
MNEYKFKIVNNSSDLYLVSIPELKTP

SEQ ID NO: 32294 - protein, 31 aa, Artificial Sequence; identical to SEQ ID NO: 3983
  Cyclic GFR-binding peptide
  MOD_RES (1)..(1): Xaa is C or S

SEQ ID NO: 32295 - protein, 28 aa, Artificial Sequence
  Cyclic GFR-binding peptide
VVMDYHYKLVVNNAADKYLISIPSLRAP

SEQ ID NO: 32296 - protein, 27 aa, Artificial Sequence
  Cyclic GFR-binding peptide
  MOD_RES (27)..(27): Xaa is C or S
NEYKFKIVNNSSDLYLVSIPELKTPAX

SEQ ID NO: 32297 - protein, 30 aa, Artificial Sequence
  Cyclic GFR-binding peptide
  MOD_RES (1)..(3): Xaa is C or S
XGXAKVVMNEYQKYIVNNSSDIYLVSIPSL

SEQ ID NO: 32298 - protein, 29 aa, Artificial Sequence
  Cyclic GFR-binding peptide
  MOD_RES (29)..(29): Xaa is C or S
VMNYHYKLIVNSSDDKYLVSIPSLKTPAX

SEQ ID NO: 32299 - protein, 38 aa, Artificial Sequence
  Cyclic GFR-binding peptide
  MOD_RES (1)..(3)..(35)..(36): Xaa is C or S
XGXAKVVMNEYKFKIVNNSSDLYLVSIPELKTPAXXAK

SEQ ID NO: 32300 - protein, 36 aa, Artificial Sequence
  Cyclic GFR-binding peptide
  MOD_RES (2)..(33)..(34): Xaa is C or S
KXSKVVMEYQKYVKPTRGVIYLISIPSLDQPVXXPS

SEQ ID NO: 32301 - protein, 21 aa, Artificial Sequence
  Cyclic GFR-binding peptide
NRYKKLIVNNSSDFYLVSIAN

SEQ ID NO: 32302 - protein, 35 aa, Artificial Sequence; identical to SEQ ID NO: 3990
  Cyclic GFR-binding peptide
  MOD_RES (2)..(4): Xaa is C or S

SEQ ID NO: 32303 - protein, 34 aa, Artificial Sequence; identical to SEQ ID NO: 3991
  Cyclic GFR-binding peptide
  MOD_RES (2)..(33)..(34): Xaa is C or S

SEQ ID NO: 32304 - protein, 30 aa, Artificial Sequence; identical to SEQ ID NO: 3992
  Cyclic GFR-binding peptide
  MOD_RES (29)..(30): Xaa is C or S

SEQ ID NO: 32305 - protein, 34 aa, Artificial Sequence; identical to SEQ ID NO: 3993
  Cyclic GFR-binding peptide
  MOD_RES (32)..(33): Xaa is C or S

SEQ ID NO: 32306 - protein, 34 aa, Artificial Sequence; identical to SEQ ID NO: 3994
  Cyclic GFR-binding peptide
  MOD_RES (2)..(34): Xaa is C or S

SEQ ID NO: 32307 - protein, 27 aa, Artificial Sequence
  Cyclic GFR-binding peptide
  MOD_RES (26)..(27): Xaa is C or S
RYKKLYTVVGKDFYLISIANLKTPVXX

SEQ ID NO: 32308 - protein, 37 aa, Artificial Sequence
  Cyclic GFR-binding peptide
  MOD_RES (2)..(4)..(36)..(37): Xaa is C or S
RXGXAEVVMDRYKKLVVNNAADFYLISIANLRAPVXX

SEQ ID NO: 32309 - protein, 32 aa, Artificial Sequence
  Cyclic GFR-binding peptide
  MOD_RES (2)..(2): Xaa is C or S
GXAKVVMNEYQKYIVNNSSDIYLVSIPSLKTP

SEQ ID NO: 32310 - protein, 26 aa, Artificial Sequence
  Cyclic GFR-binding peptide
MGRYKKLYTVVGKDFYLISIANLKTP

SEQ ID NO: 32311 - protein, 34 aa, Artificial Sequence; identical to SEQ ID NO: 3998
  Cyclic GFR-binding peptide
  MOD_RES (32)..(32): Xaa is C or S

SEQ ID NO: 32312 - protein, 38 aa, Artificial Sequence
  Cyclic GFR-binding peptide
  MOD_RES (2)..(4)..(36)..(37): Xaa is C or S
HXGXAKVVMNEYKFKIVNNSSDLYLVSIPELKTPAXXA

SEQ ID NO: 32313 - protein, 34 aa, Artificial Sequence
  Cyclic GFR-binding peptide
  MOD_RES (32)..(33): Xaa is C or S
AKVVMNEYQKYIVNNSSDIYLVSIPSLKTPAXXA

SEQ ID NO: 32314 - protein, 27 aa, Artificial Sequence
  Cyclic GFR-binding peptide
  MOD_RES (27)..(27): Xaa is C or S
DYHYKLVVNNAADKYLISIPSLRAPVX

SEQ ID NO: 32315 - protein, 36 aa, Artificial Sequence
  Cyclic GFR-binding peptide
  MOD_RES (1)..(32)..(33): Xaa is C or S
XSKVIMEYQKYIKPTKGIIYLISIPSLDQSVXXPSA

SEQ ID NO: 32316 - protein, 37 aa, Artificial Sequence
  Cyclic GFR-binding peptide
  MOD_RES (2)..(4)..(36)..(37): Xaa is C or S
HXGXSRVVMNEYQKYIVNSSDDIYLVSIPSLKTPAXX

SEQ ID NO: 32317 - protein, 25 aa, Artificial Sequence
  Cyclic GFR-binding peptide
MGYHYKLYTVVGKDKYLISIPSLKT

SEQ ID NO: 32318 - protein, 33 aa, Artificial Sequence
  Cyclic GFR-binding peptide
  MOD_RES (2)..(4): Xaa is C or S
RXGXEAVSMGEEYKFKTPVGMDDLYLVSIPELK

SEQ ID NO: 32319 - protein, 39 aa, Artificial Sequence
  Cyclic GFR-binding peptide
  MOD_RES (1)..(3)..(35)..(36): Xaa is C or S
XGXAEVVMDRYKKLVVNNAADFYLISIANLRAPVXXSAP

SEQ ID NO: 32320 - protein, 35 aa, Artificial Sequence; identical to SEQ ID NO: 4001
  Cyclic GFR-binding peptide
  MOD_RES (29)..(30): Xaa is C or S

SEQ ID NO: 32321 - protein, 34 aa, Artificial Sequence; identical to SEQ ID NO: 4004
  Cyclic GFR-binding peptide
  MOD_RES (31)..(32): Xaa is C or S

SEQ ID NO: 32322 - protein, 20 aa, Artificial Sequence
  Cyclic GFR-binding peptide
EYQKYVVKDYEDIYLMSIPS

SEQ ID NO: 32323 - protein, 23 aa, Artificial Sequence
  Cyclic GFR-binding peptide
DRYKKLVVNNAADFYLISIANLR

SEQ ID NO: 32324 - protein, 23 aa, Artificial Sequence
  Cyclic GFR-binding peptide
EYQKYVVKDYEDIYLMSIPSLET

SEQ ID NO: 32325 - protein, 36 aa, Artificial Sequence; identical to SEQ ID NO: 4005
  Cyclic GFR-binding peptide
  MOD_RES (2)..(34): Xaa is C or S

SEQ ID NO: 32326 - protein, 37 aa, Artificial Sequence
  Cyclic GFR-binding peptide
  MOD_RES (33)..(34): Xaa is C or S
EAVSMGEEYQKYTPVGMDDIYLVSIPSLKTPVXXAKG

SEQ ID NO: 32327 - protein, 33 aa, Artificial Sequence; identical to SEQ ID NO: 4010
  Cyclic GFR-binding peptide
  MOD_RES (2)..(4): Xaa is C or S

SEQ ID NO: 32328 - protein, 28 aa, Artificial Sequence
  Cyclic GFR-binding peptide
RVVMNEYQKYIVNSSDDIYLVSIPSLKT

SEQ ID NO: 32329 - protein, 23 aa, Artificial Sequence
  Cyclic GFR-binding peptide
VMERYKKLVVKDYEDFYLMSIAN

SEQ ID NO: 32330 - protein, 24 aa, Artificial Sequence
  Cyclic GFR-binding peptide
EYQKYVVKENEDIYLMSIPSLETP

SEQ ID NO: 32331 - protein, 28 aa, Artificial Sequence
  Cyclic GFR-binding peptide
KVIMRYKKLIKPTKGIFYLISIANLDQS

SEQ ID NO: 32332 - protein, 24 aa, Artificial Sequence
  Cyclic GFR-binding peptide
MEYKFKIKPTKGILYLISIPELDQ

SEQ ID NO: 32333 - protein, 33 aa, Artificial Sequence
  Cyclic GFR-binding peptide
  MOD_RES (28)..(29): Xaa is C or S
GEEYKFKTPVGMDDLYLVSIPELKTPVXXAKGV

SEQ ID NO: 32334 - protein, 39 aa, Artificial Sequence; identical to SEQ ID NO: 4022
  Cyclic GFR-binding peptide
  MOD_RES (1)..(3)..(35)..(36): Xaa is C or S

SEQ ID NO: 32335 - protein, 33 aa, Artificial Sequence
  Cyclic GFR-binding peptide
  MOD_RES (1)..(3): Xaa is C or S
XKXSKVVMEYQKYVKPTRGVIYLISIPSLDQPV

SEQ ID NO: 32336 - protein, 41 aa, Artificial Sequence; identical to SEQ ID NO: 4026
  Cyclic GFR-binding peptide
  MOD_RES (1)..(3)..(35)..(36): Xaa is C or S

SEQ ID NO: 32337 - protein, 26 aa, Artificial Sequence
  Cyclic GFR-binding peptide
VVMEYKFKVKPTRGVLYLISIPELDQ

SEQ ID NO: 32338 - protein, 32 aa, Artificial Sequence; identical to SEQ ID NO: 4027
  Cyclic GFR-binding peptide
  MOD_RES (27)..(28): Xaa is C or S

SEQ ID NO: 32339 - protein, 26 aa, Artificial Sequence
  Cyclic GFR-binding peptide
AVSMGERYKKLTPVGMDDFYLVSIAN

SEQ ID NO: 32340 - protein, 36 aa, Artificial Sequence
  Cyclic GFR-binding peptide
  MOD_RES (31)..(32): Xaa is C or S
SVAMGYHYKLYTVVGKDKYLISIPSLKTPVXXAKSA

SEQ ID NO: 32341 - protein, 38 aa, Artificial Sequence; identical to SEQ ID NO: 4033
  Cyclic GFR-binding peptide
  MOD_RES (32)..(33): Xaa is C or S

SEQ ID NO: 32342 - protein, 31 aa, Artificial Sequence
  Cyclic GFR-binding peptide
  MOD_RES (1)..(1): Xaa is C or S
XAEVVMDEYKFKVVNNAADLYLISIPELRAP

SEQ ID NO: 32343 - protein, 38 aa, Artificial Sequence
  Cyclic GFR-binding peptide
  MOD_RES (1)..(33)..(34): Xaa is C or S
XARVVMNEYKFKIVNSSDDLYLVSIPELQTPAXXPKPV

SEQ ID NO: 32344 - protein, 37 aa, Artificial Sequence
  Cyclic GFR-binding peptide
  MOD_RES (32)..(33): Xaa is C or S
GEVVMEEYKFKVVKDYEDLYLMSIPELETPVXXAKPI

SEQ ID NO: 32345 - protein, 28 aa, Artificial Sequence
  Cyclic GFR-binding peptide
  MOD_RES (26)..(27): Xaa is C or S
EYKFKIVNNSSDLYLVSIPELKTPAXXA

SEQ ID NO: 32346 - protein, 24 aa, Artificial Sequence
  Cyclic GFR-binding peptide
EYQKYIVNSSDDIYLVSIPSLQTP

SEQ ID NO: 32347 - protein, 26 aa, Artificial Sequence
  Cyclic GFR-binding peptide
VMDEYKFKVVNNAADLYLISIPELRA

SEQ ID NO: 32348 - protein, 27 aa, Artificial Sequence
  Cyclic GFR-binding peptide
VVMDYHYKLVVKENEDKYLMSIPSLET

SEQ ID NO: 32349 - protein, 27 aa, Artificial Sequence
  Cyclic GFR-binding peptide
KVVMNEYKFKIVNNSSDLYLVSIPELK

SEQ ID NO: 32350 - protein, 41 aa, Artificial Sequence
  Cyclic GFR-binding peptide
  MOD_RES (2)..(4)..(36)..(37): Xaa is C or S
RXGXGEVVMDEYKFKVVKENEDLYLMSIPELETPVXXAKPI

SEQ ID NO: 32351 - protein, 29 aa, Artificial Sequence
  Cyclic GFR-binding peptide
  MOD_RES (1)..(1): Xaa is C or S
XGEVVMEEYKFKVVKDYEDLYLMSIPELE

SEQ ID NO: 32352 - protein, 20 aa, Artificial Sequence
  Cyclic GFR-binding peptide
YHYKLIVNSSDDKYLVSIPS

SEQ ID NO: 32353 - protein, 36 aa, Artificial Sequence; identical to SEQ ID NO: 4038
  Cyclic GFR-binding peptide
  MOD_RES (30)..(31): Xaa is C or S

SEQ ID NO: 32354 - protein, 35 aa, Artificial Sequence
  Cyclic GFR-binding peptide
  MOD_RES (1)..(32)..(33): Xaa is C or S
XSKVIMEYQKYIKPTKGIIYLISIPSLDQSVXXPS

SEQ ID NO: 32355 - protein, 43 aa, Artificial Sequence
  Cyclic GFR-binding peptide
  MOD_RES (2)..(4)..(37)..(38): Xaa is C or S
RXGXEAVSMGEEYQKYTPVGMDDIYLVSIPSLKTPVXXAKGVK

SEQ ID NO: 32356 - protein, 33 aa, Artificial Sequence
  Cyclic GFR-binding peptide
  MOD_RES (28)..(29): Xaa is C or S
MNEYQKYIVNSSDDIYLVSIPSLQTPAXXPKPV

SEQ ID NO: 32357 - protein, 28 aa, Artificial Sequence
  Cyclic GFR-binding peptide
  MOD_RES (28)..(28): Xaa is C or S
MDYHYKLVVKENEDKYLMSIPSLETPVX

SEQ ID NO: 32358 - protein, 34 aa, Artificial Sequence
  Cyclic GFR-binding peptide
  MOD_RES (29)..(30): Xaa is C or S
AMGEYQKYYTVVGKDIYLISIPSLKTPVXXAKSA

SEQ ID NO: 32359 - protein, 33 aa, Artificial Sequence; identical to SEQ ID NO: 4045
  Cyclic GFR-binding peptide
  MOD_RES (27)..(28): Xaa is C or S

SEQ ID NO: 32360 - protein, 32 aa, Artificial Sequence
  Cyclic GFR-binding peptide
  MOD_RES (28)..(29): Xaa is C or S
GEEYKFKTPVGMDDLYLVSIPELKTPVXXAKG

SEQ ID NO: 32361 - protein, 21 aa, Artificial Sequence
  Cyclic GFR-binding peptide
GYHYKLYTVVGKDKYLISIPS

SEQ ID NO: 32362 - protein, 32 aa, Artificial Sequence
  Cyclic GFR-binding peptide
  MOD_RES (2)..(2): Xaa is C or S
GXESVAMGRYKKLYTVVGKDFYLISIANLKTP

SEQ ID NO: 32363 - protein, 21 aa, Artificial Sequence
  Cyclic GFR-binding peptide
ERYKKLTPVGMDDFYLVSIAN

SEQ ID NO: 32364 - protein, 28 aa, Artificial Sequence
  Cyclic GFR-binding peptide
  MOD_RES (2)..(2): Xaa is C or S
KXSRVIMEYQKYVKPKRGVIYLISIPSL

SEQ ID NO: 32365 - protein, 32 aa, Artificial Sequence
  Cyclic GFR-binding peptide
  MOD_RES (1)..(1): Xaa is C or S
XAEVVMDEYKFKVVNNAADLYLISIPELRAPV

SEQ ID NO: 32366 - protein, 33 aa, Artificial Sequence; identical to SEQ ID NO: 4052
  Cyclic GFR-binding peptide
  MOD_RES (29)..(29): Xaa is C or S

SEQ ID NO: 32367 - protein, 39 aa, Artificial Sequence
  Cyclic GFR-binding peptide
  MOD_RES (2)..(34)..(35): Xaa is C or S
GXGEVVMDEYQKYVVKENEDIYLMSIPSLETPVXXAKPI

SEQ ID NO: 32368 - protein, 28 aa, Artificial Sequence
  Cyclic GFR-binding peptide
VMNYHYKLIVNSSDDKYLVSIPSLQTPA

SEQ ID NO: 32369 - protein, 28 aa, Artificial Sequence
  Cyclic GFR-binding peptide
AMGEYQKYYTVVGKDIYLISIPSLKTPV

SEQ ID NO: 32370 - protein, 27 aa, Artificial Sequence
  Cyclic GFR-binding peptide
SMGERYKKLTPVGMDDFYLVSIANLKT

SEQ ID NO: 32371 - protein, 29 aa, Artificial Sequence
  Cyclic GFR-binding peptide
RVVMNEYQKYIVNSSDDIYLVSIPSLKTP

SEQ ID NO: 32372 - protein, 27 aa, Artificial Sequence
  Cyclic GFR-binding peptide
  MOD_RES (27)..(27): Xaa is C or S
DEYKFKVVNNAADLYLISIPELRAPVX

SEQ ID NO: 32373 - protein, 31 aa, Artificial Sequence; identical to SEQ ID NO: 4066
  Cyclic GFR-binding peptide
  MOD_RES (28)..(29): Xaa is C or S

SEQ ID NO: 32374 - protein, 40 aa, Artificial Sequence
  Cyclic GFR-binding peptide
  MOD_RES (2)..(34)..(35): Xaa is C or S
GXAEVVMDYHYKLVVNNAADKYLISIPSLRAPVXXSAPAA

SEQ ID NO: 32375 - protein, 38 aa, Artificial Sequence; identical to SEQ ID NO: 4069
  Cyclic GFR-binding peptide
  MOD_RES (2)..(4)..(36)..(37): Xaa is C or S

SEQ ID NO: 32376 - protein, 34 aa, Artificial Sequence; identical to SEQ ID NO: 4070
  Cyclic GFR-binding peptide
  MOD_RES (1)..(3)..(34): Xaa is C or S

SEQ ID NO: 32377 - protein, 21 aa, Artificial Sequence
  Cyclic GFR-binding peptide
YHYKLVKPKRGVKYLISIPSL

SEQ ID NO: 32378 - protein, 32 aa, Artificial Sequence
  Cyclic GFR-binding peptide
  MOD_RES (2)..(4): Xaa is C or S
SXKXSRVIMEYQKYVKPKRGVIYLISIPSLAQ

SEQ ID NO: 32379 - protein, 35 aa, Artificial Sequence
  Cyclic GFR-binding peptide
  MOD_RES (30)..(31): Xaa is C or S
VAMGYHYKLYTVVGKDKYLISIPSLKTPVXXAKSA

SEQ ID NO: 32380 - protein, 30 aa, Artificial Sequence
  Cyclic GFR-binding peptide
  MOD_RES (2)..(2): Xaa is C or S
GXESVAMGEYQKYYTVVGKDIYLISIPSLK

SEQ ID NO: 32381 - protein, 33 aa, Artificial Sequence
  Cyclic GFR-binding peptide
  MOD_RES (2)..(4): Xaa is C or S
SXKXSKVVMEYQKYVKPTRGVIYLISIPSLDQP

SEQ ID NO: 32382 - protein, 22 aa, Artificial Sequence
  Cyclic GFR-binding peptide
MDYHYKLVVKENEDKYLMSIPS

SEQ ID NO: 32383 - protein, 36 aa, Artificial Sequence; identical to SEQ ID NO: 4076
  Cyclic GFR-binding peptide
  MOD_RES (2)..(4)..(35)..(36): Xaa is C or S

SEQ ID NO: 32384 - protein, 26 aa, Artificial Sequence
  Cyclic GFR-binding peptide
VAMGYHYKLYTVVGKDKYLISIPSLK

SEQ ID NO: 32385 - protein, 39 aa, Artificial Sequence; identical to SEQ ID NO: 4077
  Cyclic GFR-binding peptide
  MOD_RES (1)..(3)..(35): Xaa is C or S

SEQ ID NO: 32386 - protein, 21 aa, Artificial Sequence
  Cyclic GFR-binding peptide
EYQKYVVKDYEDIYLMSIPSL

SEQ ID NO: 32387 - protein, 23 aa, Artificial Sequence
  Cyclic GFR-binding peptide
VMNYHYKLIVNSSDDKYLVSIPS

SEQ ID NO: 32388 - protein, 29 aa, Artificial Sequence
  Cyclic GFR-binding peptide
  MOD_RES (27)..(28): Xaa is C or S
DEYKFKVVKENEDLYLMSIPELETPVXXA

SEQ ID NO: 32389 - protein, 34 aa, Artificial Sequence; identical to SEQ ID NO: 4079
  Cyclic GFR-binding peptide
  MOD_RES (31)..(32): Xaa is C or S

SEQ ID NO: 32390 - protein, 31 aa, Artificial Sequence
  Cyclic GFR-binding peptide
  MOD_RES (30)..(31): Xaa is C or S
KVIMEYQKYIKPTKGIIYLISIPSLDQSVXX

SEQ ID NO: 32391 - protein, 29 aa, Artificial Sequence
  Cyclic GFR-binding peptide
ARVVMNEYQKYIVNSSDDIYLVSIPSLQT

SEQ ID NO: 32392 - protein, 31 aa, Artificial Sequence
  Cyclic GFR-binding peptide
  MOD_RES (1)..(3): Xaa is C or S
XGXESVAMGRYKKLYTVVGKDFYLISIANLK

SEQ ID NO: 32393 - protein, 30 aa, Artificial Sequence; identical to SEQ ID NO: 4085
  Cyclic GFR-binding peptide
  MOD_RES (1)..(1): Xaa is C or S

SEQ ID NO: 32394 - protein, 34 aa, Artificial Sequence
  Cyclic GFR-binding peptide
  MOD_RES (2)..(4): Xaa is C or S
SXKXSKVIMEYKFKIKPTKGILYLISIPELDQSV

SEQ ID NO: 32395 - protein, 35 aa, Artificial Sequence
  Cyclic GFR-binding peptide
  MOD_RES (2)..(34)..(35): Xaa is C or S
GXSRVVMNEYKFKIVNSSDDLYLVSIPELKTPAXX

SEQ ID NO: 32396 - protein, 27 aa, Artificial Sequence
  Cyclic GFR-binding peptide
  MOD_RES (26)..(27): Xaa is C or S
EYQKYVVKDYEDIYLMSIPSLETPVXX

SEQ ID NO: 32397 - protein, 26 aa, Artificial Sequence
  Cyclic GFR-binding peptide
ERYKKLVVKDYEDFYLMSIANLETPV

SEQ ID NO: 32398 - protein, 30 aa, Artificial Sequence
  Cyclic GFR-binding peptide
  MOD_RES (26)..(27): Xaa is C or S
EYQKYVKPKRGVIYLISIPSLAQPVXXPAA

SEQ ID NO: 32399 - protein, 31 aa, Artificial Sequence; identical to SEQ ID NO: 4091
  Cyclic GFR-binding peptide
  MOD_RES (27)..(28): Xaa is C or S

SEQ ID NO: 32400 - protein, 36 aa, Artificial Sequence
  Cyclic GFR-binding peptide
  MOD_RES (2)..(4)..(36): Xaa is C or S
HXGXSRVVMNEYKFKIVNSSDDLYLVSIPELKTPAX

SEQ ID NO: 32401 - protein, 25 aa, Artificial Sequence
  Cyclic GFR-binding peptide
EYKFKVKPTRGVLYLISIPELDQPV

SEQ ID NO: 32402 - protein, 33 aa, Artificial Sequence; identical to SEQ ID NO: 4092
  Cyclic GFR-binding peptide
  MOD_RES (1)..(33): Xaa is C or S

SEQ ID NO: 32403 - protein, 20 aa, Artificial Sequence
  Cyclic GFR-binding peptide
RYKKLYTVVGKDFYLISIAN

SEQ ID NO: 32404 - protein, 20 aa, Artificial Sequence
  Cyclic GFR-binding peptide
RYKKLVKPKRGVFYLISIAN

SEQ ID NO: 32405 - protein, 23 aa, Artificial Sequence
  Cyclic GFR-binding peptide
MEYKFKVKPTRGVLYLISIPELD

SEQ ID NO: 32406 - protein, 30 aa, Artificial Sequence
  Cyclic GFR-binding peptide
  MOD_RES (30)..(30): Xaa is C or S
VVMNEYKFKIVNSSDDLYLVSIPELKTPAX

SEQ ID NO: 32407 - protein, 26 aa, Artificial Sequence
  Cyclic GFR-binding peptide
RVIMEYKFKVKPKRGVLYLISIPELA

SEQ ID NO: 32408 - protein, 33 aa, Artificial Sequence; identical to SEQ ID NO: 4097
  Cyclic GFR-binding peptide
  MOD_RES (1)..(3): Xaa is C or S

SEQ ID NO: 32409 - protein, 31 aa, Artificial Sequence
  Cyclic GFR-binding peptide
  MOD_RES (31)..(31): Xaa is C or S
EVVMEEYQKYVVKDYEDIYLMSIPSLETPVX

SEQ ID NO: 32410 - protein, 34 aa, Artificial Sequence; identical to SEQ ID NO: 4098
  Cyclic GFR-binding peptide
  MOD_RES (29)..(29): Xaa is C or S

SEQ ID NO: 32411 - protein, 26 aa, Artificial Sequence
  Cyclic GFR-binding peptide
VMDRYKKLVVNNAADFYLISIANLRA

SEQ ID NO: 32412 - protein, 29 aa, Artificial Sequence
  Cyclic GFR-binding peptide
  MOD_RES (28)..(29): Xaa is C or S
MDEYKFKVVKENEDLYLMSIPELETPVXX

SEQ ID NO: 32413 - protein, 25 aa, Artificial Sequence
  Cyclic GFR-binding peptide
EYQKYIVNSSDDIYLVSIPSLKTPA

SEQ ID NO: 32414 - protein, 27 aa, Artificial Sequence
  Cyclic GFR-binding peptide
SKVIMEYQKYIKPTKGIIYLISIPSLD

SEQ ID NO: 32415 - protein, 35 aa, Artificial Sequence
  Cyclic GFR-binding peptide
  MOD_RES (29)..(30): Xaa is C or S
VIMEYKFKVKPKRGVLYLISIPELAQPVXXPAASA

SEQ ID NO: 32416 - protein, 33 aa, Artificial Sequence; identical to SEQ ID NO: 4104
  Cyclic GFR-binding peptide
  MOD_RES (1)..(3): Xaa is C or S

SEQ ID NO: 32417 - protein, 29 aa, Artificial Sequence
  Cyclic GFR-binding peptide
  MOD_RES (1)..(1): Xaa is C or S
XGEVVMERYKKLVVKDYEDFYLMSIANLE

SEQ ID NO: 32418 - protein, 24 aa, Artificial Sequence
  Cyclic GFR-binding peptide
VMDEYQKYVVKENEDIYLMSIPSL

SEQ ID NO: 32419 - protein, 31 aa, Artificial Sequence; identical to SEQ ID NO: 4110
  Cyclic GFR-binding peptide
  MOD_RES (1)..(3): Xaa is C or S

SEQ ID NO: 32420 - protein, 33 aa, Artificial Sequence
  Cyclic GFR-binding peptide
  MOD_RES (2)..(4): Xaa is C or S
HXGXAKVVMNEYQKYIVNNSSDIYLVSIPSLKT

SEQ ID NO: 32421 - protein, 37 aa, Artificial Sequence
  Cyclic GFR-binding peptide
  MOD_RES (1)..(32)..(33): Xaa is C or S
XSKVIMEYKFKIKPTKGILYLISIPELDQSVXXPSAS

SEQ ID NO: 32422 - protein, 32 aa, Artificial Sequence; identical to SEQ ID NO: 4113
  Cyclic GFR-binding peptide
  MOD_RES (26)..(27): Xaa is C or S

SEQ ID NO: 32423 - protein, 31 aa, Artificial Sequence
  Cyclic GFR-binding peptide
EAVSMGEEYQKYTPVGMDDIYLVSIPSLKTP

SEQ ID NO: 32424 - protein, 32 aa, Artificial Sequence
  Cyclic GFR-binding peptide
  MOD_RES (1)..(3): Xaa is C or S
XKXSKVVMEYQKYVKPTRGVIYLISIPSLDQP

SEQ ID NO: 32425 - protein, 23 aa, Artificial Sequence
  Cyclic GFR-binding peptide
IMRYKKLIKPTKGIFYLISIANL

SEQ ID NO: 32426 - protein, 35 aa, Artificial Sequence; identical to SEQ ID NO: 4119
  Cyclic GFR-binding peptide
  MOD_RES (32)..(33): Xaa is C or S

SEQ ID NO: 32427 - protein, 31 aa, Artificial Sequence; identical to SEQ ID NO: 4121
  Cyclic GFR-binding peptide
  MOD_RES (1)..(1): Xaa is C or S

SEQ ID NO: 32428 - protein, 23 aa, Artificial Sequence
  Cyclic GFR-binding peptide
VMEYKFKVKPTRGVLYLISIPEL

SEQ ID NO: 32429 - protein, 33 aa, Artificial Sequence
  Cyclic GFR-binding peptide
  MOD_RES (28)..(29): Xaa is C or S
MNEYKFKIVNSSDDLYLVSIPELQTPAXXPKPV

SEQ ID NO: 32430 - protein, 33 aa, Artificial Sequence
  Cyclic GFR-binding peptide
  MOD_RES (29)..(30): Xaa is C or S
VMDEYQKYVVKENEDIYLMSIPSLETPVXXAKP

SEQ ID NO: 32431 - protein, 41 aa, Artificial Sequence; identical to SEQ ID NO: 4127
  Cyclic GFR-binding peptide
  MOD_RES (2)..(4)..(36)..(37): Xaa is C or S

SEQ ID NO: 32432 - protein, 25 aa, Artificial Sequence
  Cyclic GFR-binding peptide
KVVMNEYQKYIVNNSSDIYLVSIPS

SEQ ID NO: 32433 - protein, 33 aa, Artificial Sequence; identical to SEQ ID NO: 4129
  Cyclic GFR-binding peptide
  MOD_RES (2)..(2): Xaa is C or S

SEQ ID NO: 32434 - protein, 24 aa, Artificial Sequence
  Cyclic GFR-binding peptide
NYHYKLIVNNSSDKYLVSIPSLKT

SEQ ID NO: 32435 - protein, 36 aa, Artificial Sequence
  Cyclic GFR-binding peptide
  MOD_RES (2)..(4)..(36): Xaa is C or S
HXGXSRVVMNEYQKYIVNSSDDIYLVSIPSLKTPAX

SEQ ID NO: 32436 - protein, 38 aa, Artificial Sequence; identical to SEQ ID NO: 4131
  Cyclic GFR-binding peptide
  MOD_RES (1)..(3)..(34)..(35): Xaa is C or S

SEQ ID NO: 32437 - protein, 32 aa, Artificial Sequence; identical to SEQ ID NO: 4135
  Cyclic GFR-binding peptide
  MOD_RES (26)..(27): Xaa is C or S

SEQ ID NO: 32438 - protein, 35 aa, Artificial Sequence
  Cyclic GFR-binding peptide
  MOD_RES (30)..(30): Xaa is C or S
VVMNEYQKYIVNSSDDIYLVSIPSLKTPAXTPKTV

SEQ ID NO: 32439 - protein, 26 aa, Artificial Sequence
  Cyclic GFR-binding peptide
MEYQKYVKPTRGVIYLISIPSLDQPV

SEQ ID NO: 32440 - protein, 34 aa, Artificial Sequence
  Cyclic GFR-binding peptide
  MOD_RES (31)..(32): Xaa is C or S
EVVMDRYKKLVVNNAADFYLISIANLRAPVXXSA

SEQ ID NO: 32441 - protein, 40 aa, Artificial Sequence; identical to SEQ ID NO: 4138
  Cyclic GFR-binding peptide
  MOD_RES (1)..(3)..(35)..(36): Xaa is C or S

SEQ ID NO: 32442 - protein, 33 aa, Artificial Sequence
  Cyclic GFR-binding peptide
  MOD_RES (2)..(33): Xaa is C or S
KXSKVIMEYKFKIKPTKGILYLISIPELDQSVX

SEQ ID NO: 32443 - protein, 37 aa, Artificial Sequence
  Cyclic GFR-binding peptide
  MOD_RES (33)..(34): Xaa is C or S
EAVSMGEEYKFKTPVGMDDLYLVSIPELKTPVXXAKG

SEQ ID NO: 32444 - protein, 33 aa, Artificial Sequence
  Cyclic GFR-binding peptide
  MOD_RES (1)..(33): Xaa is C or S
XAEVVMDRYKKLVVNNAADFYLISIANLRAPVX

SEQ ID NO: 32445 - protein, 32 aa, Artificial Sequence; identical to SEQ ID NO: 4144
  Cyclic GFR-binding peptide
  MOD_RES (30)..(31): Xaa is C or S

SEQ ID NO: 32446 - protein, 32 aa, Artificial Sequence; identical to SEQ ID NO: 4145
  Cyclic GFR-binding peptide
  MOD_RES (28)..(29): Xaa is C or S

SEQ ID NO: 32447 - protein, 23 aa, Artificial Sequence
  Cyclic GFR-binding peptide
YHYKLYTVVGKDKYLISIPSLKT

SEQ ID NO: 32448 - protein, 41 aa, Artificial Sequence
  Cyclic GFR-binding peptide
  MOD_RES (1)..(3)..(35)..(36): Xaa is C or S
XGXGEVVMEEYKFKVVKDYEDLYLMSIPELETPVXXAKPIS

SEQ ID NO: 32449 - protein, 32 aa, Artificial Sequence; identical to SEQ ID NO: 4147
  Cyclic GFR-binding peptide
  MOD_RES (1)..(3): Xaa is C or S

SEQ ID NO: 32450 - protein, 34 aa, Artificial Sequence; identical to SEQ ID NO: 4148
  Cyclic GFR-binding peptide
  MOD_RES (29)..(30): Xaa is C or S

SEQ ID NO: 32451 - protein, 38 aa, Artificial Sequence; identical to SEQ ID NO: 4151
  Cyclic GFR-binding peptide
  MOD_RES (1)..(3)..(34)..(35): Xaa is C or S

SEQ ID NO: 32452 - protein, 37 aa, Artificial Sequence; identical to SEQ ID NO: 4152
  Cyclic GFR-binding peptide
  MOD_RES (32)..(32): Xaa is C or S

SEQ ID NO: 32453 - protein, 23 aa, Artificial Sequence
  Cyclic GFR-binding peptide
YHYKLIVNSSDDKYLVSIPSLKT

SEQ ID NO: 32454 - protein, 26 aa, Artificial Sequence
  Cyclic GFR-binding peptide
NEYQKYIVNSSDDIYLVSIPSLQTPA

SEQ ID NO: 32455 - protein, 37 aa, Artificial Sequence; identical to SEQ ID NO: 4156
  Cyclic GFR-binding peptide
  MOD_RES (1)..(3)..(35): Xaa is C or S

SEQ ID NO: 32456 - protein, 31 aa, Artificial Sequence; identical to SEQ ID NO: 4158
  Cyclic GFR-binding peptide
  MOD_RES (1)..(1): Xaa is C or S

SEQ ID NO: 32457 - protein, 31 aa, Artificial Sequence
  Cyclic GFR-binding peptide
  MOD_RES (31)..(31): Xaa is C or S
KVVMNEYQKYIVNNSSDIYLVSIPSLKTPAX

SEQ ID NO: 32458 - protein, 33 aa, Artificial Sequence
  Cyclic GFR-binding peptide
  MOD_RES (30)..(31): Xaa is C or S
VVMNEYKFKIVNSSDDLYLVSIPELKTPAXXPK

SEQ ID NO: 32459 - protein, 33 aa, Artificial Sequence
  Cyclic GFR-binding peptide
  MOD_RES (1)..(33): Xaa is C or S
XAKVVMNEYQKYIVNNSSDIYLVSIPSLKTPAX

SEQ ID NO: 32460 - protein, 30 aa, Artificial Sequence; identical to SEQ ID NO: 4160
  Cyclic GFR-binding peptide
  MOD_RES (27)..(28): Xaa is C or S

SEQ ID NO: 32461 - protein, 31 aa, Artificial Sequence
  Cyclic GFR-binding peptide
  MOD_RES (27)..(28): Xaa is C or S
DEYKFKVVKENEDLYLMSIPELETPVXXAKP

SEQ ID NO: 32462 - protein, 41 aa, Artificial Sequence
  Cyclic GFR-binding peptide
  MOD_RES (1)..(3)..(36)..(37): Xaa is C or S
XGXEAVSMGEEYQKYTPVGMDDIYLVSIPSLKTPVXXAKGV

SEQ ID NO: 32463 - protein, 22 aa, Artificial Sequence
  Cyclic GFR-binding peptide
MDRYKKLVVNNAADFYLISIAN

SEQ ID NO: 32464 - protein, 29 aa, Artificial Sequence
  Cyclic GFR-binding peptide
  MOD_RES (26)..(27): Xaa is C or S
RYKKLTPVGMDDFYLVSIANLKTPVXXAK

SEQ ID NO: 32465 - protein, 30 aa, Artificial Sequence
  Cyclic GFR-binding peptide
  MOD_RES (1)..(3): Xaa is C or S
XGXAKVVMNEYKFKIVNNSSDLYLVSIPEL

SEQ ID NO: 32466 - protein, 33 aa, Artificial Sequence
  Cyclic GFR-binding peptide
  MOD_RES (30)..(31): Xaa is C or S
VVMNEYQKYIVNSSDDIYLVSIPSLQTPAXXPK

SEQ ID NO: 32467 - protein, 31 aa, Artificial Sequence
  Cyclic GFR-binding peptide
  MOD_RES (29)..(29): Xaa is C or S
VMNEYKFKIVNSSDDLYLVSIPELKTPAXTP

SEQ ID NO: 32468 - protein, 20 aa, Artificial Sequence
  Cyclic GFR-binding peptide
RYKKLIVNSSDDFYLVSIAN

SEQ ID NO: 32469 - protein, 31 aa, Artificial Sequence; identical to SEQ ID NO: 4170
  Cyclic GFR-binding peptide

SEQ ID NO: 32470 - protein, 30 aa, Artificial Sequence
  Cyclic GFR-binding peptide
  MOD_RES (30)..(30): Xaa is C or S
VAMGRYKKLYTVVGKDFYLISIANLKTPVX

SEQ ID NO: 32471 - protein, 31 aa, Artificial Sequence; identical to SEQ ID NO: 4171
  Cyclic GFR-binding peptide
  MOD_RES (27)..(28): Xaa is C or S

SEQ ID NO: 32472 - protein, 30 aa, Artificial Sequence
  Cyclic GFR-binding peptide
  MOD_RES (2)..(2): Xaa is C or S
GXAEVVMDYHYKLVVNNAADKYLISIPSLR

SEQ ID NO: 32473 - protein, 31 aa, Artificial Sequence
  Cyclic GFR-binding peptide
  MOD_RES (26)..(26): Xaa is C or S
EYKFKIVNSSDDLYLVSIPELKTPAXTPKTV

SEQ ID NO: 32474 - protein, 28 aa, Artificial Sequence
  Cyclic GFR-binding peptide
VSMGERYKKLTPVGMDDFYLVSIANLKT

SEQ ID NO: 32475 - protein, 27 aa, Artificial Sequence
  Cyclic GFR-binding peptide
  MOD_RES (26)..(27): Xaa is C or S
YHYKLYTVVGKDKYLISIPSLKTPVXX

SEQ ID NO: 32476 - protein, 33 aa, Artificial Sequence
  Cyclic GFR-binding peptide
  MOD_RES (30)..(31): Xaa is C or S
SMGEEYQKYTPVGMDDIYLVSIPSLKTPVXXAK

SEQ ID NO: 32477 - protein, 34 aa, Artificial Sequence
  Cyclic GFR-binding peptide
  MOD_RES (2)..(33)..(34): Xaa is C or S
KXSKVIMEYKFKIKPTKGILYLISIPELDQSVXX

SEQ ID NO: 32478 - protein, 31 aa, Artificial Sequence
  Cyclic GFR-binding peptide
  MOD_RES (27)..(28): Xaa is C or S
DRYKKLVVNNAADFYLISIANLRAPVXXSAP

SEQ ID NO: 32479 - protein, 39 aa, Artificial Sequence
  Cyclic GFR-binding peptide
  MOD_RES (1)..(34)..(35): Xaa is C or S
XEAVSMGEEYKFKTPVGMDDLYLVSIPELKTPVXXAKGV

SEQ ID NO: 32480 - protein, 30 aa, Artificial Sequence; identical to SEQ ID NO: 4184
  Cyclic GFR-binding peptide
  MOD_RES (1)..(3): Xaa is C or S

SEQ ID NO: 32481 - protein, 30 aa, Artificial Sequence
  Cyclic GFR-binding peptide
  MOD_RES (30)..(30): Xaa is C or S
VVMNEYQKYIVNSSDDIYLVSIPSLQTPAX

SEQ ID NO: 32482 - protein, 32 aa, Artificial Sequence; identical to SEQ ID NO: 4185
  Cyclic GFR-binding peptide
  MOD_RES (1)..(3): Xaa is C or S

SEQ ID NO: 32483 - protein, 29 aa, Artificial Sequence
  Cyclic GFR-binding peptide
  MOD_RES (1)..(1): Xaa is C or S
XGEVVMDRYKKLVVKENEDFYLMSIANLE

SEQ ID NO: 32484 - protein, 36 aa, Artificial Sequence
  Cyclic GFR-binding peptide
  MOD_RES (1)..(33)..(34): Xaa is C or S
XARVVMNEYKFKIVNSSDDLYLVSIPELQTPAXXPK

SEQ ID NO: 32485 - protein, 31 aa, Artificial Sequence
  Cyclic GFR-binding peptide
  MOD_RES (30)..(31): Xaa is C or S
VAMGYHYKLYTVVGKDKYLISIPSLKTPVXX

SEQ ID NO: 32486 - protein, 25 aa, Artificial Sequence
  Cyclic GFR-binding peptide
NYHYKLIVNNSSDKYLVSIPSLKTP

SEQ ID NO: 32487 - protein, 30 aa, Artificial Sequence
  Cyclic GFR-binding peptide
SVAMGEYQKYYTVVGKDIYLISIPSLKTPV

SEQ ID NO: 32488 - protein, 35 aa, Artificial Sequence
  Cyclic GFR-binding peptide
  MOD_RES (30)..(31): Xaa is C or S
RVIMEYKFKVKPKRGVLYLISIPELAQPVXXPAAS

SEQ ID NO: 32489 - protein, 36 aa, Artificial Sequence
  Cyclic GFR-binding peptide
  MOD_RES (1)..(33)..(34): Xaa is C or S
XGEVVMDEYQKYVVKENEDIYLMSIPSLETPVXXAK

SEQ ID NO: 32490 - protein, 37 aa, Artificial Sequence
  Cyclic GFR-binding peptide
  MOD_RES (1)..(3)..(35)..(36): Xaa is C or S
XGXARVVMNEYKFKIVNSSDDLYLVSIPELQTPAXXP

SEQ ID NO: 32491 - protein, 33 aa, Artificial Sequence
  Cyclic GFR-binding peptide
  MOD_RES (28)..(29): Xaa is C or S
IMEYQKYIKPTKGIIYLISIPSLDQSVXXPSAS

SEQ ID NO: 32492 - protein, 26 aa, Artificial Sequence
  Cyclic GFR-binding peptide
MNEYQKYIVNNSSDIYLVSIPSLKTP

SEQ ID NO: 32493 - protein, 37 aa, Artificial Sequence
  Cyclic GFR-binding peptide
  MOD_RES (32)..(32): Xaa is C or S
SRVVMNEYQKYIVNSSDDIYLVSIPSLKTPAXTPKTV

SEQ ID NO: 32494 - protein, 38 aa, Artificial Sequence
  Cyclic GFR-binding peptide
  MOD_RES (2)..(34)..(35): Xaa is C or S
GXESVAMGEYQKYYTVVGKDIYLISIPSLKTPVXXAKS

SEQ ID NO: 32495 - protein, 29 aa, Artificial Sequence
  Cyclic GFR-binding peptide
  MOD_RES (26)..(27): Xaa is C or S
RYKKLIKPTKGIFYLISIANLDQSVXXPS

SEQ ID NO: 32496 - protein, 36 aa, Artificial Sequence; identical to SEQ ID NO: 4193
  Cyclic GFR-binding peptide
  MOD_RES (1)..(33): Xaa is C or S

SEQ ID NO: 32497 - protein, 36 aa, Artificial Sequence; identical to SEQ ID NO: 4199
  Cyclic GFR-binding peptide
  MOD_RES (2)..(33)..(34): Xaa is C or S

SEQ ID NO: 32498 - protein, 31 aa, Artificial Sequence; identical to SEQ ID NO: 4201
  Cyclic GFR-binding peptide
  MOD_RES (30)..(30): Xaa is C or S

SEQ ID NO: 32499 - protein, 32 aa, Artificial Sequence; identical to SEQ ID NO: 4204
  Cyclic GFR-binding peptide
  MOD_RES (1)..(32): Xaa is C or S

SEQ ID NO: 32500 - protein, 31 aa, Artificial Sequence; identical to SEQ ID NO: 4205
  Cyclic GFR-binding peptide
  MOD_RES (27)..(28): Xaa is C or S

SEQ ID NO: 32501 - protein, 36 aa, Artificial Sequence
  Cyclic GFR-binding peptide
  MOD_RES (2)..(35)..(36): Xaa is C or S
GXEAVSMGEEYQKYTPVGMDDIYLVSIPSLKTPVXX

SEQ ID NO: 32502 - protein, 32 aa, Artificial Sequence
  Cyclic GFR-binding peptide
  MOD_RES (28)..(28): Xaa is C or S
MNEYQKYIVNSSDDIYLVSIPSLKTPAXTPKT

SEQ ID NO: 32503 - protein, 27 aa, Artificial Sequence
  Cyclic GFR-binding peptide
MEYHYKLVVKDYEDKYLMSIPSLETPV

SEQ ID NO: 32504 - protein, 33 aa, Artificial Sequence
  Cyclic GFR-binding peptide
  MOD_RES (2)..(4): Xaa is C or S
HXGXAKVVMNEYKFKIVNNSSDLYLVSIPELKT

SEQ ID NO: 32505 - protein, 31 aa, Artificial Sequence
  Cyclic GFR-binding peptide
  MOD_RES (2)..(2): Xaa is C or S
GXSRVVMNEYKFKIVNSSDDLYLVSIPELKT

SEQ ID NO: 32506 - protein, 32 aa, Artificial Sequence; identical to SEQ ID NO: 4210
  Cyclic GFR-binding peptide
  MOD_RES (2)..(4): Xaa is C or S

SEQ ID NO: 32507 - protein, 32 aa, Artificial Sequence; identical to SEQ ID NO: 4212
  Cyclic GFR-binding peptide
  MOD_RES (31)..(32): Xaa is C or S

SEQ ID NO: 32508 - protein, 24 aa, Artificial Sequence
  Cyclic GFR-binding peptide
VMEYHYKLVVKDYEDKYLMSIPSL

SEQ ID NO: 32509 - protein, 38 aa, Artificial Sequence; identical to SEQ ID NO: 4215
  Cyclic GFR-binding peptide
  MOD_RES (1)..(33)..(34): Xaa is C or S

SEQ ID NO: 32510 - protein, 32 aa, Artificial Sequence
  Cyclic GFR-binding peptide
  MOD_RES (1)..(1): Xaa is C or S
XGEVVMDEYQKYVVKENEDIYLMSIPSLETPV

SEQ ID NO: 32511 - protein, 28 aa, Artificial Sequence
  Cyclic GFR-binding peptide
  MOD_RES (1)..(1): Xaa is C or S
XGEVVMDYHYKLVVKENEDKYLMSIPSL

SEQ ID NO: 32512 - protein, 34 aa, Artificial Sequence
  Cyclic GFR-binding peptide
  MOD_RES (31)..(32): Xaa is C or S
VSMGEEYQKYTPVGMDDIYLVSIPSLKTPVXXAK

SEQ ID NO: 32513 - protein, 27 aa, Artificial Sequence
  Cyclic GFR-binding peptide
  MOD_RES (27)..(27): Xaa is C or S
MEYKFKIKPTKGILYLISIPELDQSVX

SEQ ID NO: 32514 - protein, 31 aa, Artificial Sequence; identical to SEQ ID NO: 4217
  Cyclic GFR-binding peptide
  MOD_RES (2)..(4): Xaa is C or S

SEQ ID NO: 32515 - protein, 26 aa, Artificial Sequence
  Cyclic GFR-binding peptide
GEVVMEEYQKYVVKDYEDIYLMSIPS

SEQ ID NO: 32516 - protein, 33 aa, Artificial Sequence
  Cyclic GFR-binding peptide
  MOD_RES (29)..(30): Xaa is C or S
VIMEYKFKIKPTKGILYLISIPELDQSVXXPSA

SEQ ID NO: 32517 - protein, 34 aa, Artificial Sequence
  Cyclic GFR-binding peptide
  MOD_RES (28)..(28): Xaa is C or S
MNEYKFKIVNSSDDLYLVSIPELKTPAXTPKTVH

SEQ ID NO: 32518 - protein, 28 aa, Artificial Sequence
  Cyclic GFR-binding peptide
  MOD_RES (26)..(27): Xaa is C or S
EYQKYIKPTKGIIYLISIPSLDQSVXXP

SEQ ID NO: 32519 - protein, 31 aa, Artificial Sequence; identical to SEQ ID NO: 4223
  Cyclic GFR-binding peptide
  MOD_RES (26)..(26): Xaa is C or S

SEQ ID NO: 32520 - protein, 31 aa, Artificial Sequence
  Cyclic GFR-binding peptide
  MOD_RES (28)..(29): Xaa is C or S
MNEYQKYIVNSSDDIYLVSIPSLKTPAXXPK

SEQ ID NO: 32521 - protein, 39 aa, Artificial Sequence; identical to SEQ ID NO: 4224
  Cyclic GFR-binding peptide
  MOD_RES (1)..(33)..(34): Xaa is C or S

SEQ ID NO: 32522 - protein, 34 aa, Artificial Sequence; identical to SEQ ID NO: 4225
  Cyclic GFR-binding peptide
  MOD_RES (2)..(33)..(34): Xaa is C or S

SEQ ID NO: 32523 - protein, 21 aa, Artificial Sequence
  Cyclic GFR-binding peptide
EYKFKIVNNSSDLYLVSIPEL

SEQ ID NO: 32524 - protein, 27 aa, Artificial Sequence
  Cyclic GFR-binding peptide
VIMEYKFKIKPTKGILYLISIPELDQS

SEQ ID NO: 32525 - protein, 30 aa, Artificial Sequence
  Cyclic GFR-binding peptide
VSMGEEYKFKTPVGMDDLYLVSIPELKTPV

SEQ ID NO: 32526 - protein, 24 aa, Artificial Sequence
  Cyclic GFR-binding peptide
GEEYKFKTPVGMDDLYLVSIPELK

SEQ ID NO: 32527 - protein, 25 aa, Artificial Sequence
  Cyclic GFR-binding peptide
IMYHYKLVKPKRGVKYLISIPSLAQ

SEQ ID NO: 32528 - protein, 33 aa, Artificial Sequence
  Cyclic GFR-binding peptide
  MOD_RES (30)..(31): Xaa is C or S
VAMGRYKKLYTVVGKDFYLISIANLKTPVXXAK

SEQ ID NO: 32529 - protein, 29 aa, Artificial Sequence
  Cyclic GFR-binding peptide
  MOD_RES (27)..(28): Xaa is C or S
NEYQKYIVNSSDDIYLVSIPSLQTPAXXP

SEQ ID NO: 32530 - protein, 25 aa, Artificial Sequence
  Cyclic GFR-binding peptide
SRVIMEYQKYVKPKRGVIYLISIPS

SEQ ID NO: 32531 - protein, 36 aa, Artificial Sequence
  Cyclic GFR-binding peptide
  MOD_RES (2)..(4)..(36): Xaa is C or S
RXGXGEVVMEEYQKYVVKDYEDIYLMSIPSLETPVX

SEQ ID NO: 32532 - protein, 38 aa, Artificial Sequence; identical to SEQ ID NO: 4238
  Cyclic GFR-binding peptide
  MOD_RES (2)..(4)..(35)..(36): Xaa is C or S

SEQ ID NO: 32533 - protein, 34 aa, Artificial Sequence; identical to SEQ ID NO: 4239
  Cyclic GFR-binding peptide
  MOD_RES (1)..(33)..(34): Xaa is C or S

SEQ ID NO: 32534 - protein, 37 aa, Artificial Sequence
  Cyclic GFR-binding peptide
  MOD_RES (1)..(33): Xaa is C or S
XSRVVMNEYQKYIVNSSDDIYLVSIPSLKTPAXTPKT

SEQ ID NO: 32535 - protein, 37 aa, Artificial Sequence
  Cyclic GFR-binding peptide
  MOD_RES (32)..(33): Xaa is C or S
SRVVMNEYKFKIVNSSDDLYLVSIPELKTPAXXPKPV

SEQ ID NO: 32536 - protein, 35 aa, Artificial Sequence
  Cyclic GFR-binding peptide
  MOD_RES (2)..(4): Xaa is C or S
RXGXESVAMGRYKKLYTVVGKDFYLISIANLKTPV

SEQ ID NO: 32537 - protein, 32 aa, Artificial Sequence
  Cyclic GFR-binding peptide
  MOD_RES (31)..(32): Xaa is C or S
EVVMDRYKKLVVNNAADFYLISIANLRAPVXX

SEQ ID NO: 32538 - protein, 26 aa, Artificial Sequence
  Cyclic GFR-binding peptide
VVMNEYKFKIVNSSDDLYLVSIPELK

SEQ ID NO: 32539 - protein, 36 aa, Artificial Sequence; identical to SEQ ID NO: 4241
  Cyclic GFR-binding peptide
  MOD_RES (1)..(3)..(35)..(36): Xaa is C or S

SEQ ID NO: 32540 - protein, 26 aa, Artificial Sequence
  Cyclic GFR-binding peptide
MNEYKFKIVNSSDDLYLVSIPELQTP

SEQ ID NO: 32541 - protein, 27 aa, Artificial Sequence
  Cyclic GFR-binding peptide
ESVAMGRYKKLYTVVGKDFYLISIANL

SEQ ID NO: 32542 - protein, 39 aa, Artificial Sequence
  Cyclic GFR-binding peptide
  MOD_RES (1)..(3)..(35)..(36): Xaa is C or S
XGXAKVVMNEYQKYIVNNSSDIYLVSIPSLKTPAXXAKP

SEQ ID NO: 32543 - protein, 37 aa, Artificial Sequence
  Cyclic GFR-binding peptide
  MOD_RES (31)..(32): Xaa is C or S
EVVMDRYKKLVVNNAADFYLISIANLRAPVXXSAPAA

SEQ ID NO: 32544 - protein, 37 aa, Artificial Sequence; identical to SEQ ID NO: 4246
  Cyclic GFR-binding peptide
  MOD_RES (1)..(32)..(33): Xaa is C or S

SEQ ID NO: 32545 - protein, 37 aa, Artificial Sequence
  Cyclic GFR-binding peptide
  MOD_RES (1)..(3)..(35)..(36): Xaa is C or S
XGXESVAMGRYKKLYTVVGKDFYLISIANLKTPVXXA

SEQ ID NO: 32546 - protein, 33 aa, Artificial Sequence
  Cyclic GFR-binding peptide
  MOD_RES (31)..(31): Xaa is C or S
RVVMNEYKFKIVNSSDDLYLVSIPELKTPAXTP

SEQ ID NO: 32547 - protein, 26 aa, Artificial Sequence
  Cyclic GFR-binding peptide
GEVVMEEYKFKVVKDYEDLYLMSIPE

SEQ ID NO: 32548 - protein, 34 aa, Artificial Sequence
  Cyclic GFR-binding peptide
  MOD_RES (2)..(4): Xaa is C or S
RXGXGEVVMDEYKFKVVKENEDLYLMSIPELETP

SEQ ID NO: 32549 - protein, 25 aa, Artificial Sequence
  Cyclic GFR-binding peptide
MRYKKLVKPKRGVFYLISIANLAQP

SEQ ID NO: 32550 - protein, 24 aa, Artificial Sequence
  Cyclic GFR-binding peptide
EYQKYVVKDYEDIYLMSIPSLETP

SEQ ID NO: 32551 - protein, 31 aa, Artificial Sequence
  Cyclic GFR-binding peptide
  MOD_RES (27)..(28): Xaa is C or S
NEYKFKIVNNSSDLYLVSIPELKTPAXXAKP

SEQ ID NO: 32552 - protein, 22 aa, Artificial Sequence
  Cyclic GFR-binding peptide
MNYHYKLIVNSSDDKYLVSIPS

SEQ ID NO: 32553 - protein, 24 aa, Artificial Sequence
  Cyclic GFR-binding peptide
VMERYKKLVVKDYEDFYLMSIANL

SEQ ID NO: 32554 - protein, 35 aa, Artificial Sequence; identical to SEQ ID NO: 4257
  Cyclic GFR-binding peptide
  MOD_RES (30)..(30): Xaa is C or S

SEQ ID NO: 32555 - protein, 34 aa, Artificial Sequence
  Cyclic GFR-binding peptide
  MOD_RES (1)..(3): Xaa is C or S
XGXGEVVMDEYKFKVVKENEDLYLMSIPELETPV

SEQ ID NO: 32556 - protein, 24 aa, Artificial Sequence
  Cyclic GFR-binding peptide
YHYKLIVNNSSDKYLVSIPSLKTP

SEQ ID NO: 32557 - protein, 25 aa, Artificial Sequence
  Cyclic GFR-binding peptide
MDRYKKLVVNNAADFYLISIANLRA

SEQ ID NO: 32558 - protein, 33 aa, Artificial Sequence
  Cyclic GFR-binding peptide
  MOD_RES (32)..(33): Xaa is C or S
ESVAMGRYKKLYTVVGKDFYLISIANLKTPVXX

SEQ ID NO: 32559 - protein, 33 aa, Artificial Sequence; identical to SEQ ID NO: 4261
  Cyclic GFR-binding peptide
  MOD_RES (31)..(32): Xaa is C or S

SEQ ID NO: 32560 - protein, 32 aa, Artificial Sequence; identical to SEQ ID NO: 4262
  Cyclic GFR-binding peptide
  MOD_RES (31)..(32): Xaa is C or S

SEQ ID NO: 32561 - protein, 26 aa, Artificial Sequence
  Cyclic GFR-binding peptide
EEYQKYVVKDYEDIYLMSIPSLETPV

SEQ ID NO: 32562 - protein, 20 aa, Artificial Sequence
  Cyclic GFR-binding peptide
YHYKLYTVVGKDKYLISIPS

SEQ ID NO: 32563 - protein, 21 aa, Artificial Sequence
  Cyclic GFR-binding peptide
EEYQKYTPVGMDDIYLVSIPS

SEQ ID NO: 32564 - protein, 31 aa, Artificial Sequence
  Cyclic GFR-binding peptide
  MOD_RES (1)..(1): Xaa is C or S
XGEVVMDEYKFKVVKENEDLYLMSIPELETP

SEQ ID NO: 32565 - protein, 26 aa, Artificial Sequence
  Cyclic GFR-binding peptide
DEYKFKVVNNAADLYLISIPELRAPV

SEQ ID NO: 32566 - protein, 28 aa, Artificial Sequence
  Cyclic GFR-binding peptide
VVMEYKFKVKPTRGVLYLISIPELDQPV

SEQ ID NO: 32567 - protein, 28 aa, Artificial Sequence
  Cyclic GFR-binding peptide
  MOD_RES (27)..(28): Xaa is C or S
MEYKFKIKPTKGILYLISIPELDQSVXX

SEQ ID NO: 32568 - protein, 31 aa, Artificial Sequence
  Cyclic GFR-binding peptide
  MOD_RES (29)..(30): Xaa is C or S
VMNEYQKYIVNSSDDIYLVSIPSLQTPAXXP

SEQ ID NO: 32569 - protein, 40 aa, Artificial Sequence; identical to SEQ ID NO: 4270
  Cyclic GFR-binding peptide
  MOD_RES (1)..(3)..(34)..(35): Xaa is C or S

SEQ ID NO: 32570 - protein, 39 aa, Artificial Sequence; identical to SEQ ID NO: 4273
  Cyclic GFR-binding peptide
  MOD_RES (2)..(34)..(35): Xaa is C or S

SEQ ID NO: 32571 - protein, 28 aa, Artificial Sequence
  Cyclic GFR-binding peptide
  MOD_RES (28)..(28): Xaa is C or S
MDEYQKYVVKENEDIYLMSIPSLETPVX

SEQ ID NO: 32572 - protein, 36 aa, Artificial Sequence
  Cyclic GFR-binding peptide
  MOD_RES (2)..(4)..(35)..(36): Xaa is C or S
SXKXSRVIMEYQKYVKPKRGVIYLISIPSLAQPVXX

SEQ ID NO: 32573 - protein, 24 aa, Artificial Sequence
  Cyclic GFR-binding peptide
VVMERYKKLVVKDYEDFYLMSIAN

SEQ ID NO: 32574 - protein, 22 aa, Artificial Sequence
  Cyclic GFR-binding peptide
EYKFKVKPTRGVLYLISIPELD

SEQ ID NO: 32575 - protein, 30 aa, Artificial Sequence; identical to SEQ ID NO: 4276
  Cyclic GFR-binding peptide
  MOD_RES (29)..(30): Xaa is C or S

SEQ ID NO: 32576 - protein, 29 aa, Artificial Sequence
  Cyclic GFR-binding peptide
  MOD_RES (1)..(1): Xaa is C or S
XEAVSMGEEYQKYTPVGMDDIYLVSIPSL

SEQ ID NO: 32577 - protein, 28 aa, Artificial Sequence
  Cyclic GFR-binding peptide
  MOD_RES (1)..(3): Xaa is C or S
XKXSRVIMEYQKYVKPKRGVIYLISIPS

SEQ ID NO: 32578 - protein, 29 aa, Artificial Sequence
  Cyclic GFR-binding peptide
GEVVMDEYQKYVVKENEDIYLMSIPSLET

SEQ ID NO: 32579 - protein, 35 aa, Artificial Sequence
  Cyclic GFR-binding peptide
  MOD_RES (2)..(4)..(35): Xaa is C or S
SXKXSKVIMEYKFKIKPTKGILYLISIPELDQSVX

SEQ ID NO: 32580 - protein, 35 aa, Artificial Sequence
  Cyclic GFR-binding peptide
  MOD_RES (30)..(31): Xaa is C or S
VVMNEYQKYIVNSSDDIYLVSIPSLQTPAXXPKPV

SEQ ID NO: 32581 - protein, 24 aa, Artificial Sequence
  Cyclic GFR-binding peptide
VVMEYQKYVKPTRGVIYLISIPSL

SEQ ID NO: 32582 - protein, 23 aa, Artificial Sequence
  Cyclic GFR-binding peptide
VMEEYKFKVVKDYEDLYLMSIPE

SEQ ID NO: 32583 - protein, 30 aa, Artificial Sequence
  Cyclic GFR-binding peptide
  MOD_RES (2)..(2): Xaa is C or S
GXGEVVMDEYKFKVVKENEDLYLMSIPELE

SEQ ID NO: 32584 - protein, 23 aa, Artificial Sequence
  Cyclic GFR-binding peptide
VMNRYKKLIVNNSSDFYLVSIAN

SEQ ID NO: 32585 - protein, 29 aa, Artificial Sequence
  Cyclic GFR-binding peptide
  MOD_RES (28)..(29): Xaa is C or S
MDEYKFKVVNNAADLYLISIPELRAPVXX

SEQ ID NO: 32586 - protein, 38 aa, Artificial Sequence
  Cyclic GFR-binding peptide
  MOD_RES (2)..(4)..(36)..(37): Xaa is C or S
HXGXARVVMNEYKFKIVNSSDDLYLVSIPELQTPAXXP

SEQ ID NO: 32587 - protein, 32 aa, Artificial Sequence; identical to SEQ ID NO: 4285
  Cyclic GFR-binding peptide
  MOD_RES (30)..(31): Xaa is C or S

SEQ ID NO: 32588 - protein, 33 aa, Artificial Sequence; identical to SEQ ID NO: 4286
  Cyclic GFR-binding peptide
  MOD_RES (29)..(30): Xaa is C or S

SEQ ID NO: 32589 - protein, 38 aa, Artificial Sequence
  Cyclic GFR-binding peptide
  MOD_RES (1)..(3)..(35)..(36): Xaa is C or S
XGXAKVVMNEYQKYIVNNSSDIYLVSIPSLKTPAXXAK

SEQ ID NO: 32590 - protein, 37 aa, Artificial Sequence; identical to SEQ ID NO: 4288
  Cyclic GFR-binding peptide
  MOD_RES (31)..(32): Xaa is C or S

SEQ ID NO: 32591 - protein, 39 aa, Artificial Sequence
  Cyclic GFR-binding peptide
  MOD_RES (2)..(33)..(34): Xaa is C or S
KXSRVIMEYKFKVKPKRGVLYLISIPELAQPVXXPAASA

SEQ ID NO: 32592 - protein, 33 aa, Artificial Sequence
  Cyclic GFR-binding peptide
  MOD_RES (31)..(32): Xaa is C or S
EVVMEEYKFKVVKDYEDLYLMSIPELETPVXXA

SEQ ID NO: 32593 - protein, 25 aa, Artificial Sequence
  Cyclic GFR-binding peptide
VIMYHYKLVKPKRGVKYLISIPSLA

SEQ ID NO: 32594 - protein, 33 aa, Artificial Sequence; identical to SEQ ID NO: 4292
  Cyclic GFR-binding peptide
  MOD_RES (31)..(32): Xaa is C or S

SEQ ID NO: 32595 - protein, 29 aa, Artificial Sequence
  Cyclic GFR-binding peptide
  MOD_RES (2)..(2): Xaa is C or S
GXGEVVMDEYQKYVVKENEDIYLMSIPSL

SEQ ID NO: 32596 - protein, 34 aa, Artificial Sequence
  Cyclic GFR-binding peptide
  MOD_RES (29)..(29): Xaa is C or S
VMNEYKFKIVNSSDDLYLVSIPELKTPAXTPKTV

SEQ ID NO: 32597 - protein, 37 aa, Artificial Sequence; identical to SEQ ID NO: 4294
  Cyclic GFR-binding peptide
  MOD_RES (1)..(3)..(35)..(36): Xaa is C or S

SEQ ID NO: 32598 - protein, 34 aa, Artificial Sequence; identical to SEQ ID NO: 4295
  Cyclic GFR-binding peptide
  MOD_RES (1)..(3): Xaa is C or S

SEQ ID NO: 32599 - protein, 31 aa, Artificial Sequence; identical to SEQ ID NO: 4296
  Cyclic GFR-binding peptide
  MOD_RES (2)..(2): Xaa is C or S

SEQ ID NO: 32600 - protein, 28 aa, Artificial Sequence
  Cyclic GFR-binding peptide
  MOD_RES (2)..(2): Xaa is C or S
GXARVVMNEYQKYIVNSSDDIYLVSIPS

SEQ ID NO: 32601 - protein, 27 aa, Artificial Sequence
  Cyclic GFR-binding peptide
  MOD_RES (26)..(27): Xaa is C or S
YHYKLVKPKRGVKYLISIPSLAQPVXX

SEQ ID NO: 32602 - protein, 31 aa, Artificial Sequence
  Cyclic GFR-binding peptide
  MOD_RES (27)..(28): Xaa is C or S
MEYKFKVKPKRGVLYLISIPELAQPVXXPAA

SEQ ID NO: 32603 - protein, 31 aa, Artificial Sequence; identical to SEQ ID NO: 4298
  Cyclic GFR-binding peptide
  MOD_RES (2)..(2): Xaa is C or S

SEQ ID NO: 32604 - protein, 30 aa, Artificial Sequence
  Cyclic GFR-binding peptide
EVVMDPIKGYVVNNASDFYLINIPSLRTPV

SEQ ID NO: 32605 - protein, 23 aa, Artificial Sequence
  Cyclic GFR-binding peptide
VMYHYKLVKPTRGVKYLISIPSL

SEQ ID NO: 32606 - protein, 36 aa, Artificial Sequence
  Cyclic GFR-binding peptide
  MOD_RES (2)..(4)..(36): Xaa is C or S
RXGXESVAMGRYKKLYTVVGKDFYLISIANLKTPVX

SEQ ID NO: 32607 - protein, 32 aa, Artificial Sequence; identical to SEQ ID NO: 4303
  Cyclic GFR-binding peptide
  MOD_RES (27)..(27): Xaa is C or S

SEQ ID NO: 32608 - protein, 34 aa, Artificial Sequence; identical to SEQ ID NO: 4304
  Cyclic GFR-binding peptide
  MOD_RES (30)..(31): Xaa is C or S

SEQ ID NO: 32609 - protein, 34 aa, Artificial Sequence; identical to SEQ ID NO: 4306
  Cyclic GFR-binding peptide
  MOD_RES (31)..(32): Xaa is C or S

SEQ ID NO: 32610 - protein, 28 aa, Artificial Sequence
  Cyclic GFR-binding peptide
  MOD_RES (27)..(28): Xaa is C or S
EEYKFKVVKDYEDLYLMSIPELETPVXX

SEQ ID NO: 32611 - protein, 38 aa, Artificial Sequence
  Cyclic GFR-binding peptide
  MOD_RES (32)..(33): Xaa is C or S
GEVVMEEYKFKVVKDYEDLYLMSIPELETPVXXAKPIS

SEQ ID NO: 32612 - protein, 26 aa, Artificial Sequence
  Cyclic GFR-binding peptide
MEYQKYIKPTKGIIYLISIPSLDQSV

SEQ ID NO: 32613 - protein, 27 aa, Artificial Sequence
  Cyclic GFR-binding peptide
  MOD_RES (26)..(27): Xaa is C or S
EYQKYIVNNSSDIYLVSIPSLKTPAXX

SEQ ID NO: 32614 - protein, 30 aa, Artificial Sequence; identical to SEQ ID NO: 4308
  Cyclic GFR-binding peptide
  MOD_RES (1)..(1): Xaa is C or S

SEQ ID NO: 32615 - protein, 38 aa, Artificial Sequence
  Cyclic GFR-binding peptide
  MOD_RES (2)..(34)..(35): Xaa is C or S
GXARVVMNEYKFKIVNSSDDLYLVSIPELQTPAXXPKP

SEQ ID NO: 32616 - protein, 28 aa, Artificial Sequence
  Cyclic GFR-binding peptide
  MOD_RES (1)..(1): Xaa is C or S
XAKVVMNRYKKLIVNNSSDFYLVSIANL

SEQ ID NO: 32617 - protein, 38 aa, Artificial Sequence; identical to SEQ ID NO: 4316
  Cyclic GFR-binding peptide
  MOD_RES (32)..(33): Xaa is C or S

SEQ ID NO: 32618 - protein, 27 aa, Artificial Sequence
  Cyclic GFR-binding peptide
GEVVMDEYQKYVVKENEDIYLMSIPSL

SEQ ID NO: 32619 - protein, 33 aa, Artificial Sequence; identical to SEQ ID NO: 4318
  Cyclic GFR-binding peptide
  MOD_RES (27)..(28): Xaa is C or S

SEQ ID NO: 32620 - protein, 33 aa, Artificial Sequence
  Cyclic GFR-binding peptide
  MOD_RES (2)..(2): Xaa is C or S
GXARVVMNEYKFKIVNSSDDLYLVSIPELQTPA

SEQ ID NO: 32621 - protein, 36 aa, Artificial Sequence
  Cyclic GFR-binding peptide
  MOD_RES (1)..(34)..(35): Xaa is C or S
XEAVSMGEEYQKYTPVGMDDIYLVSIPSLKTPVXXA

SEQ ID NO: 32622 - protein, 38 aa, Artificial Sequence
  Cyclic GFR-binding peptide
  MOD_RES (1)..(33)..(34): Xaa is C or S
XSRVVMNEYQKYIVNSSDDIYLVSIPSLKTPAXXPKPV

SEQ ID NO: 32623 - protein, 24 aa, Artificial Sequence
  Cyclic GFR-binding peptide
YHYKLVVKENEDKYLMSIPSLETP

SEQ ID NO: 32624 - protein, 32 aa, Artificial Sequence
  Cyclic GFR-binding peptide
  MOD_RES (28)..(29): Xaa is C or S
MNEYKFKIVNSSDDLYLVSIPELQTPAXXPKP

SEQ ID NO: 32625 - protein, 31 aa, Artificial Sequence
  Cyclic GFR-binding peptide
  MOD_RES (28)..(29): Xaa is C or S
MDEYQKYVVKENEDIYLMSIPSLETPVXXAK

SEQ ID NO: 32626 - protein, 30 aa, Artificial Sequence; identical to SEQ ID NO: 4323
  Cyclic GFR-binding peptide
  MOD_RES (26)..(27): Xaa is C or S

SEQ ID NO: 32627 - protein, 21 aa, Artificial Sequence
  Cyclic GFR-binding peptide
RYKKLIKPTKGIFYLISIANL

SEQ ID NO: 32628 - protein, 21 aa, Artificial Sequence
  Cyclic GFR-binding peptide
YHYKLVVNNAADKYLISIPSL

SEQ ID NO: 32629 - protein, 33 aa, Artificial Sequence; identical to SEQ ID NO: 4326
  Cyclic GFR-binding peptide
  MOD_RES (1)..(3): Xaa is C or S

SEQ ID NO: 32630 - protein, 26 aa, Artificial Sequence
  Cyclic GFR-binding peptide
  MOD_RES (26)..(26): Xaa is C or S
YHYKLIVNSSDDKYLVSIPSLKTPAX

SEQ ID NO: 32631 - protein, 40 aa, Artificial Sequence; identical to SEQ ID NO: 4330
  Cyclic GFR-binding peptide
  MOD_RES (2)..(4)..(35)..(36): Xaa is C or S

SEQ ID NO: 32632 - protein, 35 aa, Artificial Sequence
  Cyclic GFR-binding peptide
  MOD_RES (29)..(30): Xaa is C or S
VVMEYKFKVKPTRGVLYLISIPELDQPVXXPSASA

SEQ ID NO: 32633 - protein, 30 aa, Artificial Sequence; identical to SEQ ID NO: 4331
  Cyclic GFR-binding peptide
  MOD_RES (29)..(30): Xaa is C or S

SEQ ID NO: 32634 - protein, 29 aa, Artificial Sequence
  Cyclic GFR-binding peptide
  MOD_RES (1)..(3): Xaa is C or S
XKXSKVVMYHYKLVKPTRGVKYLISIPSL

SEQ ID NO: 32635 - protein, 26 aa, Artificial Sequence
  Cyclic GFR-binding peptide
RVVMNEYKFKIVNSSDDLYLVSIPEL

SEQ ID NO: 32636 - protein, 33 aa, Artificial Sequence; identical to SEQ ID NO: 4333
  Cyclic GFR-binding peptide
  MOD_RES (2)..(4): Xaa is C or S

SEQ ID NO: 32637 - protein, 26 aa, Artificial Sequence
  Cyclic GFR-binding peptide
DYHYKLVVNNAADKYLISIPSLRAPV

SEQ ID NO: 32638 - protein, 31 aa, Artificial Sequence; identical to SEQ ID NO: 4334
  Cyclic GFR-binding peptide
  MOD_RES (1)..(3): Xaa is C or S

SEQ ID NO: 32639 - protein, 25 aa, Artificial Sequence
  Cyclic GFR-binding peptide
VIMRYKKLVKPKRGVFYLISIANLA

SEQ ID NO: 32640 - protein, 29 aa, Artificial Sequence
  Cyclic GFR-binding peptide
  MOD_RES (2)..(2): Xaa is C or S
GXARVVMNEYQKYIVNSSDDIYLVSIPSL

SEQ ID NO: 32641 - protein, 29 aa, Artificial Sequence
  Cyclic GFR-binding peptide
ESVAMGRYKKLYTVVGKDFYLISIANLKT

SEQ ID NO: 32642 - protein, 28 aa, Artificial Sequence
  Cyclic GFR-binding peptide
ESVAMGYHYKLYTVVGKDKYLISIPSLK

SEQ ID NO: 32643 - protein, 35 aa, Artificial Sequence; identical to SEQ ID NO: 4343
  Cyclic GFR-binding peptide
  MOD_RES (32)..(32): Xaa is C or S

SEQ ID NO: 32644 - protein, 33 aa, Artificial Sequence
  Cyclic GFR-binding peptide
  MOD_RES (32)..(33): Xaa is C or S
ARVVMNEYQKYIVNSSDDIYLVSIPSLQTPAXX

SEQ ID NO: 32645 - protein, 29 aa, Artificial Sequence
  Cyclic GFR-binding peptide
  MOD_RES (1)..(1): Xaa is C or S
XGEVVMDEYQKYVVKENEDIYLMSIPSLE

SEQ ID NO: 32646 - protein, 28 aa, Artificial Sequence
  Cyclic GFR-binding peptide
SKVVMRYKKLVKPTRGVFYLISIANLDQ

SEQ ID NO: 32647 - protein, 27 aa, Artificial Sequence
  Cyclic GFR-binding peptide
ESVAMGEYQKYYTVVGKDIYLISIPSL

SEQ ID NO: 32648 - protein, 31 aa, Artificial Sequence; identical to SEQ ID NO: 4348
  Cyclic GFR-binding peptide
  MOD_RES (30)..(31): Xaa is C or S

SEQ ID NO: 32649 - protein, 30 aa, Artificial Sequence
  Cyclic GFR-binding peptide
  MOD_RES (30)..(30): Xaa is C or S
KVIMEYQKYIKPTKGIIYLISIPSLDQSVX

SEQ ID NO: 32650 - protein, 31 aa, Artificial Sequence
  Cyclic GFR-binding peptide
  MOD_RES (2)..(4): Xaa is C or S
RXGXESVAMGYHYKLYTVVGKDKYLISIPSL

SEQ ID NO: 32651 - protein, 34 aa, Artificial Sequence
  Cyclic GFR-binding peptide
  MOD_RES (1)..(3): Xaa is C or S
XGXAEVVMDEYKFKVVNNAADLYLISIPELRAPV

SEQ ID NO: 32652 - protein, 32 aa, Artificial Sequence
  Cyclic GFR-binding peptide
  MOD_RES (32)..(32): Xaa is C or S
GEVVMEEYKFKVVKDYEDLYLMSIPELETPVX

SEQ ID NO: 32653 - protein, 30 aa, Artificial Sequence
  Cyclic GFR-binding peptide
  MOD_RES (1)..(1): Xaa is C or S
XSKVIMEYQKYIKPTKGIIYLISIPSLDQS

SEQ ID NO: 32654 - protein, 30 aa, Artificial Sequence
  Cyclic GFR-binding peptide
ESVAMGYHYKLYTVVGKDKYLISIPSLKTP

SEQ ID NO: 32655 - protein, 29 aa, Artificial Sequence
  Cyclic GFR-binding peptide
  MOD_RES (1)..(1): Xaa is C or S
XGEVVMDEYKFKVVKENEDLYLMSIPELE

SEQ ID NO: 32656 - protein, 42 aa, Artificial Sequence; identical to SEQ ID NO: 4357
  Cyclic GFR-binding peptide
  MOD_RES (2)..(4)..(36)..(37): Xaa is C or S

SEQ ID NO: 32657 - protein, 32 aa, Artificial Sequence; identical to SEQ ID NO: 4359
  Cyclic GFR-binding peptide
  MOD_RES (2)..(4): Xaa is C or S

SEQ ID NO: 32658 - protein, 30 aa, Artificial Sequence
  Cyclic GFR-binding peptide
SKVVMEYQKYVKPTRGVIYLISIPSLDQPV

SEQ ID NO: 32659 - protein, 40 aa, Artificial Sequence
  Cyclic GFR-binding peptide
  MOD_RES (1)..(3)..(36)..(37): Xaa is C or S
XGXEAVSMGEEYQKYTPVGMDDIYLVSIPSLKTPVXXAKG

SEQ ID NO: 32660 - protein, 34 aa, Artificial Sequence
  Cyclic GFR-binding peptide
  MOD_RES (2)..(4): Xaa is C or S
RXGXESVAMGEYQKYYTVVGKDIYLISIPSLKTP

SEQ ID NO: 32661 - protein, 38 aa, Artificial Sequence
  Cyclic GFR-binding peptide
  MOD_RES (1)..(3)..(34)..(35): Xaa is C or S
XKXSKVIMEYQKYIKPTKGIIYLISIPSLDQSVXXPSA

SEQ ID NO: 32662 - protein, 34 aa, Artificial Sequence; identical to SEQ ID NO: 4368
  Cyclic GFR-binding peptide
  MOD_RES (2)..(4): Xaa is C or S

SEQ ID NO: 32663 - protein, 33 aa, Artificial Sequence; identical to SEQ ID NO: 4370
  Cyclic GFR-binding peptide
  MOD_RES (1)..(3): Xaa is C or S

SEQ ID NO: 32664 - protein, 32 aa, Artificial Sequence
  Cyclic GFR-binding peptide
  MOD_RES (30)..(31): Xaa is C or S
VVMDEYQKYVVKENEDIYLMSIPSLETPVXXA

SEQ ID NO: 32665 - protein, 24 aa, Artificial Sequence
  Cyclic GFR-binding peptide
VVMDYHYKLVVNNAADKYLISIPS

SEQ ID NO: 32666 - protein, 32 aa, Artificial Sequence
  Cyclic GFR-binding peptide
  MOD_RES (31)..(32): Xaa is C or S
VSMGEEYQKYTPVGMDDIYLVSIPSLKTPVXX

SEQ ID NO: 32667 - protein, 27 aa, Artificial Sequence
  Cyclic GFR-binding peptide
VMDEYQKYVVKENEDIYLMSIPSLETP

SEQ ID NO: 32668 - protein, 24 aa, Artificial Sequence
  Cyclic GFR-binding peptide
VMEYQKYVKPTRGVIYLISIPSLD

SEQ ID NO: 32669 - protein, 34 aa, Artificial Sequence
  Cyclic GFR-binding peptide
  MOD_RES (2)..(4): Xaa is C or S
SXKXSKVIMEYQKYIKPTKGIIYLISIPSLDQSV

SEQ ID NO: 32670 - protein, 29 aa, Artificial Sequence
  Cyclic GFR-binding peptide
KVIMRYKKLIKPTKGIFYLISIANLDQSV

SEQ ID NO: 32671 - protein, 39 aa, Artificial Sequence; identical to SEQ ID NO: 4375
  Cyclic GFR-binding peptide
  MOD_RES (2)..(4)..(35)..(36): Xaa is C or S

SEQ ID NO: 32672 - protein, 32 aa, Artificial Sequence; identical to SEQ ID NO: 4376
  Cyclic GFR-binding peptide
  MOD_RES (28)..(29): Xaa is C or S

SEQ ID NO: 32673 - protein, 33 aa, Artificial Sequence
  Cyclic GFR-binding peptide
  MOD_RES (28)..(28): Xaa is C or S
MNEYQKYIVNSSDDIYLVSIPSLKTPAXTPKTV

SEQ ID NO: 32674 - protein, 37 aa, Artificial Sequence; identical to SEQ ID NO: 4381
  Cyclic GFR-binding peptide
  MOD_RES (1)..(3)..(35)..(36): Xaa is C or S

SEQ ID NO: 32675 - protein, 29 aa, Artificial Sequence
  Cyclic GFR-binding peptide
VAMGRYKKLYTVVGKDFYLISIANLKTPV

SEQ ID NO: 32676 - protein, 30 aa, Artificial Sequence
  Cyclic GFR-binding peptide
  MOD_RES (28)..(29): Xaa is C or S
VMEYKFKVKPTRGVLYLISIPELDQPVXXP

SEQ ID NO: 32677 - protein, 28 aa, Artificial Sequence
  Cyclic GFR-binding peptide
  MOD_RES (2)..(2): Xaa is C or S
KXSRVIMEYKFKVKPKRGVLYLISIPEL

SEQ ID NO: 32678 - protein, 34 aa, Artificial Sequence
  Cyclic GFR-binding peptide
  MOD_RES (30)..(31): Xaa is C or S
VVMEEYQKYVVKDYEDIYLMSIPSLETPVXXAKP

SEQ ID NO: 32679 - protein, 25 aa, Artificial Sequence
  Cyclic GFR-binding peptide
MYHYKLVKPTRGVKYLISIPSLDQP

SEQ ID NO: 32680 - protein, 27 aa, Artificial Sequence
  Cyclic GFR-binding peptide
EVVMEYHYKLVVKDYEDKYLMSIPSLE

SEQ ID NO: 32681 - protein, 29 aa, Artificial Sequence
  Cyclic GFR-binding peptide
  MOD_RES (1)..(3): Xaa is C or S
XGXSRVVMNEYKFKIVNSSDDLYLVSIPE

SEQ ID NO: 32682 - protein, 29 aa, Artificial Sequence
  Cyclic GFR-binding peptide
  MOD_RES (1)..(3): Xaa is C or S
XGXGEVVMDEYKFKVVKENEDLYLMSIPE

SEQ ID NO: 32683 - protein, 30 aa, Artificial Sequence
  Cyclic GFR-binding peptide
  MOD_RES (30)..(30): Xaa is C or S
VAMGEYQKYYTVVGKDIYLISIPSLKTPVX

SEQ ID NO: 32684 - protein, 29 aa, Artificial Sequence
  Cyclic GFR-binding peptide
  MOD_RES (28)..(29): Xaa is C or S
VMEYQKYVKPTRGVIYLISIPSLDQPVXX

SEQ ID NO: 32685 - protein, 29 aa, Artificial Sequence
  Cyclic GFR-binding peptide
VVMEYHYKLVVKDYEDKYLMSIPSLETPV

SEQ ID NO: 32686 - protein, 38 aa, Artificial Sequence
  Cyclic GFR-binding peptide
  MOD_RES (32)..(33): Xaa is C or S
AVSMGEEYKFKTPVGMDDLYLVSIPELKTPVXXAKGVK

SEQ ID NO: 32687 - protein, 34 aa, Artificial Sequence
  Cyclic GFR-binding peptide
  MOD_RES (2)..(4): Xaa is C or S
HXGXARVVMNEYKFKIVNSSDDLYLVSIPELQTP

SEQ ID NO: 32688 - protein, 33 aa, Artificial Sequence; identical to SEQ ID NO: 4395
  Cyclic GFR-binding peptide
  MOD_RES (1)..(3): Xaa is C or S

SEQ ID NO: 32689 - protein, 26 aa, Artificial Sequence
  Cyclic GFR-binding peptide
  MOD_RES (1)..(1): Xaa is C or S
XSKVIMEYQKYIKPTKGIIYLISIPS

SEQ ID NO: 32690 - protein, 41 aa, Artificial Sequence
  Cyclic GFR-binding peptide
  MOD_RES (1)..(3)..(35)..(36): Xaa is C or S
XGXAEVVMDEYKFKVVNNAADLYLISIPELRAPVXXSAPAA

SEQ ID NO: 32691 - protein, 37 aa, Artificial Sequence; identical to SEQ ID NO: 4398
  Cyclic GFR-binding peptide
  MOD_RES (1)..(33)..(34): Xaa is C or S

SEQ ID NO: 32692 - protein, 37 aa, Artificial Sequence; identical to SEQ ID NO: 4400
  Cyclic GFR-binding peptide
  MOD_RES (32)..(33): Xaa is C or S

SEQ ID NO: 32693 - protein, 29 aa, Artificial Sequence
  Cyclic GFR-binding peptide
  MOD_RES (2)..(2): Xaa is C or S
GXARVVMNEYKFKIVNSSDDLYLVSIPEL

SEQ ID NO: 32694 - protein, 39 aa, Artificial Sequence; identical to SEQ ID NO: 4401
  Cyclic GFR-binding peptide
  MOD_RES (2)..(35)..(36): Xaa is C or S

SEQ ID NO: 32695 - protein, 33 aa, Artificial Sequence; identical to SEQ ID NO: 4402
  Cyclic GFR-binding peptide
  MOD_RES (1)..(32)..(33): Xaa is C or S

SEQ ID NO: 32696 - protein, 26 aa, Artificial Sequence
  Cyclic GFR-binding peptide
VSMGEEYQKYTPVGMDDIYLVSIPSL

SEQ ID NO: 32697 - protein, 37 aa, Artificial Sequence; identical to SEQ ID NO: 4404
  Cyclic GFR-binding peptide
  MOD_RES (31)..(32): Xaa is C or S

SEQ ID NO: 32698 - protein, 35 aa, Artificial Sequence; identical to SEQ ID NO: 4411
  Cyclic GFR-binding peptide
  MOD_RES (1)..(3)..(34)..(35): Xaa is C or S

SEQ ID NO: 32699 - protein, 27 aa, Artificial Sequence
  Cyclic GFR-binding peptide
  MOD_RES (1)..(1): Xaa is C or S
XSRVIMEYKFKVKPKRGVLYLISIPEL

SEQ ID NO: 32700 - protein, 29 aa, Artificial Sequence
  Cyclic GFR-binding peptide
VAMGEYQKYYTVVGKDIYLISIPSLKTPV

SEQ ID NO: 32701 - protein, 28 aa, Artificial Sequence
  Cyclic GFR-binding peptide
SRVVMNRYKKLIVNSSDDFYLVSIANLK

SEQ ID NO: 32702 - protein, 28 aa, Artificial Sequence
  Cyclic GFR-binding peptide
  MOD_RES (2)..(2): Xaa is C or S
KXSKVIMRYKKLIKPTKGIFYLISIANL

SEQ ID NO: 32703 - protein, 30 aa, Artificial Sequence
  Cyclic GFR-binding peptide
  MOD_RES (30)..(30): Xaa is C or S
VAMGYHYKLYTVVGKDKYLISIPSLKTPVX

SEQ ID NO: 32704 - protein, 38 aa, Artificial Sequence
  Cyclic GFR-binding peptide
  MOD_RES (1)..(33)..(34): Xaa is C or S
XSRVVMNEYKFKIVNSSDDLYLVSIPELKTPAXXPKPV

SEQ ID NO: 32705 - protein, 34 aa, Artificial Sequence
  Cyclic GFR-binding peptide
  MOD_RES (1)..(3): Xaa is C or S
XGXSRVVMNEYKFKIVNSSDDLYLVSIPELKTPA

SEQ ID NO: 32706 - protein, 31 aa, Artificial Sequence
  Cyclic GFR-binding peptide
  MOD_RES (30)..(31): Xaa is C or S
VVMNEYQKYIVNSSDDIYLVSIPSLQTPAXX

SEQ ID NO: 32707 - protein, 32 aa, Artificial Sequence
  Cyclic GFR-binding peptide
  MOD_RES (31)..(32): Xaa is C or S
RVVMNEYQKYIVNSSDDIYLVSIPSLQTPAXX

SEQ ID NO: 32708 - protein, 24 aa, Artificial Sequence
  Cyclic GFR-binding peptide
SMGERYKKLTPVGMDDFYLVSIAN

SEQ ID NO: 32709 - protein, 32 aa, Artificial Sequence
  Cyclic GFR-binding peptide
  MOD_RES (32)..(32): Xaa is C or S
ARVVMNEYQKYIVNSSDDIYLVSIPSLQTPAX

SEQ ID NO: 32710 - protein, 31 aa, Artificial Sequence
  Cyclic GFR-binding peptide
  MOD_RES (1)..(3): Xaa is C or S
XGXAEVVMDYHYKLVVNNAADKYLISIPSLR

SEQ ID NO: 32711 - protein, 29 aa, Artificial Sequence
  Cyclic GFR-binding peptide
  MOD_RES (27)..(28): Xaa is C or S
EEYQKYTPVGMDDIYLVSIPSLKTPVXXA

SEQ ID NO: 32712 - protein, 28 aa, Artificial Sequence
  Cyclic GFR-binding peptide
AKVVMNEYQKYIVNNSSDIYLVSIPSLK

SEQ ID NO: 32713 - protein, 39 aa, Artificial Sequence
  Cyclic GFR-binding peptide
  MOD_RES (2)..(34)..(35): Xaa is C or S
GXGEVVMEEYQKYVVKDYEDIYLMSIPSLETPVXXAKPI

SEQ ID NO: 32714 - protein, 38 aa, Artificial Sequence; identical to SEQ ID NO: 4425
  Cyclic GFR-binding peptide
  MOD_RES (2)..(4)..(36)..(37): Xaa is C or S

SEQ ID NO: 32715 - protein, 31 aa, Artificial Sequence
  Cyclic GFR-binding peptide
GEVVMEEYQKYVVKDYEDIYLMSIPSLETPV

SEQ ID NO: 32716 - protein, 31 aa, Artificial Sequence
  Cyclic GFR-binding peptide
  MOD_RES (2)..(2): Xaa is C or S
GXGEVVMEEYKFKVVKDYEDLYLMSIPELET

SEQ ID NO: 32717 - protein, 35 aa, Artificial Sequence
  Cyclic GFR-binding peptide
  MOD_RES (2)..(4): Xaa is C or S
HXGXAKVVMNEYKFKIVNNSSDLYLVSIPELKTPA

SEQ ID NO: 32718 - protein, 30 aa, Artificial Sequence
  Cyclic GFR-binding peptide
AKVVMNEYQKYIVNNSSDIYLVSIPSLKTP

SEQ ID NO: 32719 - protein, 29 aa, Artificial Sequence
  Cyclic GFR-binding peptide
  MOD_RES (1)..(3): Xaa is C or S
XKXSRVIMRYKKLVKPKRGVFYLISIANL

SEQ ID NO: 32720 - protein, 25 aa, Artificial Sequence
  Cyclic GFR-binding peptide
NRYKKLIVNSSDDFYLVSIANLKTP

SEQ ID NO: 32721 - protein, 28 aa, Artificial Sequence
  Cyclic GFR-binding peptide
  MOD_RES (1)..(3): Xaa is C or S
XKXSKVVMRYKKLVKPTRGVFYLISIAN

SEQ ID NO: 32722 - protein, 22 aa, Artificial Sequence
  Cyclic GFR-binding peptide
RYKKLVVKENEDFYLMSIANLE

SEQ ID NO: 32723 - protein, 23 aa, Artificial Sequence
  Cyclic GFR-binding peptide
MGEEYQKYTPVGMDDIYLVSIPS

SEQ ID NO: 32724 - protein, 24 aa, Artificial Sequence
  Cyclic GFR-binding peptide
VVMEEYQKYVVKDYEDIYLMSIPS

SEQ ID NO: 32725 - protein, 32 aa, Artificial Sequence; identical to SEQ ID NO: 4434
  Cyclic GFR-binding peptide
  MOD_RES (32)..(32): Xaa is C or S

SEQ ID NO: 32726 - protein, 38 aa, Artificial Sequence
  Cyclic GFR-binding peptide
  MOD_RES (1)..(33)..(34): Xaa is C or S
XAEVVMDRYKKLVVNNAADFYLISIANLRAPVXXSAPA

SEQ ID NO: 32727 - protein, 31 aa, Artificial Sequence
  Cyclic GFR-binding peptide
  MOD_RES (28)..(29): Xaa is C or S
MGYHYKLYTVVGKDKYLISIPSLKTPVXXAK

SEQ ID NO: 32728 - protein, 32 aa, Artificial Sequence
  Cyclic GFR-binding peptide
  MOD_RES (28)..(29): Xaa is C or S
MNEYQKYIVNNSSDIYLVSIPSLKTPAXXAKP

SEQ ID NO: 32729 - protein, 26 aa, Artificial Sequence
  Cyclic GFR-binding peptide
SKVIMEYQKYIKPTKGIIYLISIPSL

SEQ ID NO: 32730 - protein, 28 aa, Artificial Sequence
  Cyclic GFR-binding peptide
  MOD_RES (28)..(28): Xaa is C or S
MDEYKFKVVNNAADLYLISIPELRAPVX

SEQ ID NO: 32731 - protein, 31 aa, Artificial Sequence; identical to SEQ ID NO: 4441
  Cyclic GFR-binding peptide
  MOD_RES (2)..(4): Xaa is C or S

SEQ ID NO: 32732 - protein, 28 aa, Artificial Sequence
  Cyclic GFR-binding peptide
VMNEYKFKIVNNSSDLYLVSIPELKTPA

SEQ ID NO: 32733 - protein, 36 aa, Artificial Sequence
  Cyclic GFR-binding peptide
  MOD_RES (31)..(32): Xaa is C or S
VSMGEEYQKYTPVGMDDIYLVSIPSLKTPVXXAKGV

SEQ ID NO: 32734 - protein, 30 aa, Artificial Sequence; identical to SEQ ID NO: 4444
  Cyclic GFR-binding peptide

SEQ ID NO: 32735 - protein, 24 aa, Artificial Sequence
  Cyclic GFR-binding peptide
VMRYKKLVKPTRGVFYLISIANLD

SEQ ID NO: 32736 - protein, 34 aa, Artificial Sequence
  Cyclic GFR-binding peptide
  MOD_RES (28)..(29): Xaa is C or S
MEEYKFKVVKDYEDLYLMSIPELETPVXXAKPIS

SEQ ID NO: 32737 - protein, 29 aa, Artificial Sequence
  Cyclic GFR-binding peptide
  MOD_RES (28)..(29): Xaa is C or S
MDEYQKYVVKENEDIYLMSIPSLETPVXX

SEQ ID NO: 32738 - protein, 27 aa, Artificial Sequence
  Cyclic GFR-binding peptide
  MOD_RES (1)..(1): Xaa is C or S
XGEVVMEEYKFKVVKDYEDLYLMSIPE

SEQ ID NO: 32739 - protein, 32 aa, Artificial Sequence; identical to SEQ ID NO: 4447
  Cyclic GFR-binding peptide
  MOD_RES (32)..(32): Xaa is C or S

SEQ ID NO: 32740 - protein, 28 aa, Artificial Sequence
  Cyclic GFR-binding peptide
  MOD_RES (27)..(28): Xaa is C or S
NRYKKLIVNSSDDFYLVSIANLKTPAXX

SEQ ID NO: 32741 - protein, 37 aa, Artificial Sequence
  Cyclic GFR-binding peptide
  MOD_RES (2)..(34)..(35): Xaa is C or S
GXESVAMGEYQKYYTVVGKDIYLISIPSLKTPVXXAK

SEQ ID NO: 32742 - protein, 36 aa, Artificial Sequence
  Cyclic GFR-binding peptide
  MOD_RES (1)..(3)..(35): Xaa is C or S
XGXSRVVMNEYKFKIVNSSDDLYLVSIPELKTPAXT

SEQ ID NO: 32743 - protein, 36 aa, Artificial Sequence; identical to SEQ ID NO: 4452
  Cyclic GFR-binding peptide
  MOD_RES (1)..(3)..(36): Xaa is C or S

SEQ ID NO: 32744 - protein, 40 aa, Artificial Sequence; identical to SEQ ID NO: 4453
  Cyclic GFR-binding peptide
  MOD_RES (2)..(34)..(35): Xaa is C or S

SEQ ID NO: 32745 - protein, 25 aa, Artificial Sequence
  Cyclic GFR-binding peptide
VMEYHYKLVVKDYEDKYLMSIPSLE

SEQ ID NO: 32746 - protein, 39 aa, Artificial Sequence; identical to SEQ ID NO: 4455
  Cyclic GFR-binding peptide
  MOD_RES (2)..(4)..(36)..(37): Xaa is C or S

SEQ ID NO: 32747 - protein, 27 aa, Artificial Sequence
  Cyclic GFR-binding peptide
MGYHYKLYTVVGKDKYLISIPSLKTPV

SEQ ID NO: 32748 - protein, 30 aa, Artificial Sequence
  Cyclic GFR-binding peptide
RVVMNEYKFKIVNSSDDLYLVSIPELQTPA

SEQ ID NO: 32749 - protein, 36 aa, Artificial Sequence; identical to SEQ ID NO: 4457
  Cyclic GFR-binding peptide
  MOD_RES (30)..(31): Xaa is C or S

SEQ ID NO: 32750 - protein, 29 aa, Artificial Sequence
  Cyclic GFR-binding peptide
  MOD_RES (28)..(29): Xaa is C or S
IMEYQKYIKPTKGIIYLISIPSLDQSVXX

SEQ ID NO: 32751 - protein, 31 aa, Artificial Sequence
  Cyclic GFR-binding peptide
GEVVMEEYKFKVVKDYEDLYLMSIPELETPV

SEQ ID NO: 32752 - protein, 32 aa, Artificial Sequence
  Cyclic GFR-binding peptide
  MOD_RES (2)..(4): Xaa is C or S
RXGXESVAMGRYKKLYTVVGKDFYLISIANLK

SEQ ID NO: 32753 - protein, 30 aa, Artificial Sequence
  Cyclic GFR-binding peptide
  MOD_RES (1)..(3): Xaa is C or S
XGXGEVVMEEYKFKVVKDYEDLYLMSIPEL

SEQ ID NO: 32754 - protein, 30 aa, Artificial Sequence
  Cyclic GFR-binding peptide
  MOD_RES (1)..(1): Xaa is C or S
XGEVVMDEYKFKVVKENEDLYLMSIPELET

SEQ ID NO: 32755 - protein, 35 aa, Artificial Sequence
  Cyclic GFR-binding peptide
  MOD_RES (2)..(4): Xaa is C or S
HXGXARVVMNEYKFKIVNSSDDLYLVSIPELQTPA

SEQ ID NO: 32756 - protein, 30 aa, Artificial Sequence
  Cyclic GFR-binding peptide
  MOD_RES (28)..(29): Xaa is C or S
MNEYKFKIVNNSSDLYLVSIPELKTPAXXA

SEQ ID NO: 32757 - protein, 41 aa, Artificial Sequence
  Cyclic GFR-binding peptide
  MOD_RES (2)..(4)..(36)..(37): Xaa is C or S
RXGXAEVVMDRYKKLVVNNAADFYLISIANLRAPVXXSAPA

SEQ ID NO: 32758 - protein, 26 aa, Artificial Sequence
  Cyclic GFR-binding peptide
EVVMDEYKFKVVKENEDLYLMSIPEL

SEQ ID NO: 32759 - protein, 29 aa, Artificial Sequence
  Cyclic GFR-binding peptide
  MOD_RES (2)..(2): Xaa is C or S
GXEAVSMGEEYQKYTPVGMDDIYLVSIPS

SEQ ID NO: 32760 - protein, 26 aa, Artificial Sequence
  Cyclic GFR-binding peptide
MDEYQKYVVKENEDIYLMSIPSLETP

SEQ ID NO: 32761 - protein, 26 aa, Artificial Sequence
  Cyclic GFR-binding peptide
GYHYKLYTVVGKDKYLISIPSLKTPV

SEQ ID NO: 32762 - protein, 34 aa, Artificial Sequence; identical to SEQ ID NO: 4463
  Cyclic GFR-binding peptide
  MOD_RES (31)..(32): Xaa is C or S

SEQ ID NO: 32763 - protein, 31 aa, Artificial Sequence
  Cyclic GFR-binding peptide
  MOD_RES (31)..(31): Xaa is C or S
SVAMGEYQKYYTVVGKDIYLISIPSLKTPVX

SEQ ID NO: 32764 - protein, 20 aa, Artificial Sequence
  Cyclic GFR-binding peptide
EYKFKIVNSSDDLYLVSIPE

SEQ ID NO: 32765 - protein, 31 aa, Artificial Sequence; identical to SEQ ID NO: 4464
  Cyclic GFR-binding peptide
  MOD_RES (30)..(31): Xaa is C or S

SEQ ID NO: 32766 - protein, 35 aa, Artificial Sequence
  Cyclic GFR-binding peptide
  MOD_RES (1)..(3)..(34)..(35): Xaa is C or S
XKXSKVVMEYQKYVKPTRGVIYLISIPSLDQPVXX

SEQ ID NO: 32767 - protein, 36 aa, Artificial Sequence
  Cyclic GFR-binding peptide
  MOD_RES (2)..(33)..(34): Xaa is C or S
KXSRVIMEYKFKVKPKRGVLYLISIPELAQPVXXPA

SEQ ID NO: 32768 - protein, 33 aa, Artificial Sequence
  Cyclic GFR-binding peptide
  MOD_RES (29)..(30): Xaa is C or S
VMEEYKFKVVKDYEDLYLMSIPELETPVXXAKP

SEQ ID NO: 32769 - protein, 27 aa, Artificial Sequence
  Cyclic GFR-binding peptide
KVVMYHYKLVKPTRGVKYLISIPSLDQ

SEQ ID NO: 32770 - protein, 39 aa, Artificial Sequence
  Cyclic GFR-binding peptide
  MOD_RES (1)..(33)..(34): Xaa is C or S
XGEVVMEEYQKYVVKDYEDIYLMSIPSLETPVXXAKPIS

SEQ ID NO: 32771 - protein, 31 aa, Artificial Sequence; identical to SEQ ID NO: 4469
  Cyclic GFR-binding peptide
  MOD_RES (29)..(30): Xaa is C or S

SEQ ID NO: 32772 - protein, 25 aa, Artificial Sequence
  Cyclic GFR-binding peptide
VVMNYHYKLIVNSSDDKYLVSIPSL

SEQ ID NO: 32773 - protein, 25 aa, Artificial Sequence
  Cyclic GFR-binding peptide
MNEYKFKIVNSSDDLYLVSIPELKT

SEQ ID NO: 32774 - protein, 41 aa, Artificial Sequence; identical to SEQ ID NO: 4476
  Cyclic GFR-binding peptide
  MOD_RES (1)..(3)..(35)..(36): Xaa is C or S

SEQ ID NO: 32775 - protein, 25 aa, Artificial Sequence
  Cyclic GFR-binding peptide
YHYKLVKPKRGVKYLISIPSLAQPV

SEQ ID NO: 32776 - protein, 36 aa, Artificial Sequence; identical to SEQ ID NO: 4478
  Cyclic GFR-binding peptide
  MOD_RES (31)..(32): Xaa is C or S

SEQ ID NO: 32777 - protein, 40 aa, Artificial Sequence; identical to SEQ ID NO: 4480
  Cyclic GFR-binding peptide
  MOD_RES (2)..(4)..(36)..(37): Xaa is C or S

SEQ ID NO: 32778 - protein, 29 aa, Artificial Sequence
  Cyclic GFR-binding peptide
  MOD_RES (1)..(3): Xaa is C or S
XGXARVVMNEYQKYIVNSSDDIYLVSIPS

SEQ ID NO: 32779 - protein, 32 aa, Artificial Sequence
  Cyclic GFR-binding peptide
  MOD_RES (30)..(31): Xaa is C or S
VVMNEYKFKIVNSSDDLYLVSIPELQTPAXXP

SEQ ID NO: 32780 - protein, 34 aa, Artificial Sequence
  Cyclic GFR-binding peptide
  MOD_RES (29)..(30): Xaa is C or S
VVMEYQKYVKPTRGVIYLISIPSLDQPVXXPSAS

SEQ ID NO: 32781 - protein, 25 aa, Artificial Sequence
  Cyclic GFR-binding peptide
KVVMEYKFKVKPTRGVLYLISIPEL

SEQ ID NO: 32782 - protein, 39 aa, Artificial Sequence; identical to SEQ ID NO: 4487
  Cyclic GFR-binding peptide
  MOD_RES (2)..(4)..(36)..(37): Xaa is C or S

SEQ ID NO: 32783 - protein, 25 aa, Artificial Sequence
  Cyclic GFR-binding peptide
RYKKLIVNSSDDFYLVSIANLKTPA

SEQ ID NO: 32784 - protein, 35 aa, Artificial Sequence
  Cyclic GFR-binding peptide
  MOD_RES (2)..(4): Xaa is C or S
RXGXGEVVMEEYQKYVVKDYEDIYLMSIPSLETPV

SEQ ID NO: 32785 - protein, 33 aa, Artificial Sequence
  Cyclic GFR-binding peptide
  MOD_RES (33)..(33): Xaa is C or S
EAVSMGEEYQKYTPVGMDDIYLVSIPSLKTPVX

SEQ ID NO: 32786 - protein, 34 aa, Artificial Sequence; identical to SEQ ID NO: 4493
  Cyclic GFR-binding peptide
  MOD_RES (32)..(33): Xaa is C or S

SEQ ID NO: 32787 - protein, 28 aa, Artificial Sequence
  Cyclic GFR-binding peptide
VAMGEYQKYYTVVGKDIYLISIPSLKTP

SEQ ID NO: 32788 - protein, 33 aa, Artificial Sequence
  Cyclic GFR-binding peptide
  MOD_RES (32)..(33): Xaa is C or S
ARVVMNEYKFKIVNSSDDLYLVSIPELQTPAXX

SEQ ID NO: 32789 - protein, 33 aa, Artificial Sequence
  Cyclic GFR-binding peptide
  MOD_RES (31)..(32): Xaa is C or S
RVVMNEYQKYIVNSSDDIYLVSIPSLQTPAXXP

SEQ ID NO: 32790 - protein, 25 aa, Artificial Sequence
  Cyclic GFR-binding peptide
SVAMGYHYKLYTVVGKDKYLISIPS

SEQ ID NO: 32791 - protein, 38 aa, Artificial Sequence
  Cyclic GFR-binding peptide
  MOD_RES (32)..(33): Xaa is C or S
AKVVMNEYKFKIVNNSSDLYLVSIPELKTPAXXAKPVA

SEQ ID NO: 32792 - protein, 36 aa, Artificial Sequence
  Cyclic GFR-binding peptide
  MOD_RES (31)..(32): Xaa is C or S
SKVIMEYKFKIKPTKGILYLISIPELDQSVXXPSAS

SEQ ID NO: 32793 - protein, 24 aa, Artificial Sequence
  Cyclic GFR-binding peptide
RYKKLVVKDYEDFYLMSIANLETP

SEQ ID NO: 32794 - protein, 29 aa, Artificial Sequence
  Cyclic GFR-binding peptide
  MOD_RES (1)..(1): Xaa is C or S
XAKVVMNEYKFKIVNNSSDLYLVSIPELK

SEQ ID NO: 32795 - protein, 32 aa, Artificial Sequence; identical to SEQ ID NO: 4497
  Cyclic GFR-binding peptide

SEQ ID NO: 32796 - protein, 38 aa, Artificial Sequence
  Cyclic GFR-binding peptide
  MOD_RES (32)..(33): Xaa is C or S
AVSMGEEYQKYTPVGMDDIYLVSIPSLKTPVXXAKGVK

SEQ ID NO: 32797 - protein, 31 aa, Artificial Sequence; identical to SEQ ID NO: 4498
  Cyclic GFR-binding peptide
  MOD_RES (31)..(31): Xaa is C or S

SEQ ID NO: 32798 - protein, 37 aa, Artificial Sequence; identical to SEQ ID NO: 4499
  Cyclic GFR-binding peptide
  MOD_RES (1)..(3)..(34)..(35): Xaa is C or S

SEQ ID NO: 32799 - protein, 27 aa, Artificial Sequence
  Cyclic GFR-binding peptide
  MOD_RES (26)..(27): Xaa is C or S
YHYKLIVNSSDDKYLVSIPSLKTPAXX

SEQ ID NO: 32800 - protein, 25 aa, Artificial Sequence
  Cyclic GFR-binding peptide
MGERYKKLTPVGMDDFYLVSIANLK

SEQ ID NO: 32801 - protein, 33 aa, Artificial Sequence; identical to SEQ ID NO: 4503
  Cyclic GFR-binding peptide
  MOD_RES (28)..(29): Xaa is C or S

SEQ ID NO: 32802 - protein, 26 aa, Artificial Sequence
  Cyclic GFR-binding peptide
VVMNEYKFKIVNSSDDLYLVSIPELQ

SEQ ID NO: 32803 - protein, 28 aa, Artificial Sequence
  Cyclic GFR-binding peptide
  MOD_RES (26)..(27): Xaa is C or S
EYKFKIVNSSDDLYLVSIPELQTPAXXP

SEQ ID NO: 32804 - protein, 34 aa, Artificial Sequence
  Cyclic GFR-binding peptide
  MOD_RES (28)..(29): Xaa is C or S
MDEYKFKVVKENEDLYLMSIPELETPVXXAKPIK

SEQ ID NO: 32805 - protein, 37 aa, Artificial Sequence
  Cyclic GFR-binding peptide
  MOD_RES (1)..(33)..(34): Xaa is C or S
XAEVVMDRYKKLVVNNAADFYLISIANLRAPVXXSAP

SEQ ID NO: 32806 - protein, 30 aa, Artificial Sequence; identical to SEQ ID NO: 4511
  Cyclic GFR-binding peptide
  MOD_RES (29)..(30): Xaa is C or S

SEQ ID NO: 32807 - protein, 32 aa, Artificial Sequence
  Cyclic GFR-binding peptide
  MOD_RES (2)..(4): Xaa is C or S
RXGXGEVVMEEYQKYVVKDYEDIYLMSIPSLE

SEQ ID NO: 32808 - protein, 34 aa, Artificial Sequence; identical to SEQ ID NO: 4513
  Cyclic GFR-binding peptide
  MOD_RES (32)..(33): Xaa is C or S

SEQ ID NO: 32809 - protein, 34 aa, Artificial Sequence; identical to SEQ ID NO: 4514
  Cyclic GFR-binding peptide
  MOD_RES (1)..(3): Xaa is C or S

SEQ ID NO: 32810 - protein, 38 aa, Artificial Sequence; identical to SEQ ID NO: 4515
  Cyclic GFR-binding peptide
  MOD_RES (32)..(32): Xaa is C or S

SEQ ID NO: 32811 - protein, 29 aa, Artificial Sequence
  Cyclic GFR-binding peptide
  MOD_RES (29)..(29): Xaa is C or S
VVMEYKFKVKPTRGVLYLISIPELDQPVX

SEQ ID NO: 32812 - protein, 35 aa, Artificial Sequence
  Cyclic GFR-binding peptide
  MOD_RES (31)..(31): Xaa is C or S
RVVMNEYKFKIVNSSDDLYLVSIPELKTPAXTPKT

SEQ ID NO: 32813 - protein, 37 aa, Artificial Sequence
  Cyclic GFR-binding peptide
  MOD_RES (2)..(34)..(35): Xaa is C or S
GXGEVVMDEYKFKVVKENEDLYLMSIPELETPVXXAK

SEQ ID NO: 32814 - protein, 33 aa, Artificial Sequence
  Cyclic GFR-binding peptide
  MOD_RES (32)..(33): Xaa is C or S
SRVVMNEYQKYIVNSSDDIYLVSIPSLKTPAXX

SEQ ID NO: 32815 - protein, 28 aa, Artificial Sequence
  Cyclic GFR-binding peptide
  MOD_RES (27)..(28): Xaa is C or S
MYHYKLIKPTKGIKYLISIPSLDQSVXX

SEQ ID NO: 32816 - protein, 27 aa, Artificial Sequence
  Cyclic GFR-binding peptide
MEEYKFKVVKDYEDLYLMSIPELETPV

SEQ ID NO: 32817 - protein, 30 aa, Artificial Sequence
  Cyclic GFR-binding peptide
  MOD_RES (2)..(2): Xaa is C or S
KXSRVIMEYQKYVKPKRGVIYLISIPSLAQ

SEQ ID NO: 32818 - protein, 27 aa, Artificial Sequence
  Cyclic GFR-binding peptide
  MOD_RES (1)..(1): Xaa is C or S
XSRVVMNEYKFKIVNSSDDLYLVSIPE

SEQ ID NO: 32819 - protein, 31 aa, Artificial Sequence
  Cyclic GFR-binding peptide
  MOD_RES (2)..(4): Xaa is C or S
SXKXSKVVMEYKFKVKPTRGVLYLISIPELD

SEQ ID NO: 32820 - protein, 36 aa, Artificial Sequence
  Cyclic GFR-binding peptide
  MOD_RES (30)..(31): Xaa is C or S
VVMEEYKFKVVKDYEDLYLMSIPELETPVXXAKPIS

SEQ ID NO: 32821 - protein, 32 aa, Artificial Sequence
  Cyclic GFR-binding peptide
  MOD_RES (1)..(1): Xaa is C or S
XGEVVMDEYKFKVVKENEDLYLMSIPELETPV

SEQ ID NO: 32822 - protein, 32 aa, Artificial Sequence; identical to SEQ ID NO: 4518
  Cyclic GFR-binding peptide
  MOD_RES (28)..(29): Xaa is C or S

SEQ ID NO: 32823 - protein, 33 aa, Artificial Sequence; identical to SEQ ID NO: 4519
  Cyclic GFR-binding peptide
  MOD_RES (2)..(4): Xaa is C or S

SEQ ID NO: 32824 - protein, 27 aa, Artificial Sequence
  Cyclic GFR-binding peptide
  MOD_RES (26)..(27): Xaa is C or S
EYKFKVKPKRGVLYLISIPELAQPVXX

SEQ ID NO: 32825 - protein, 23 aa, Artificial Sequence
  Cyclic GFR-binding peptide
EYQKYIVNNSSDIYLVSIPSLKT

SEQ ID NO: 32826 - protein, 24 aa, Artificial Sequence
  Cyclic GFR-binding peptide
KVVMYHYKLVKPTRGVKYLISIPS

SEQ ID NO: 32827 - protein, 31 aa, Artificial Sequence
  Cyclic GFR-binding peptide
  MOD_RES (2)..(2): Xaa is C or S
GXSRVVMNEYQKYIVNSSDDIYLVSIPSLKT

SEQ ID NO: 32828 - protein, 29 aa, Artificial Sequence
  Cyclic GFR-binding peptide
SKVVMRYKKLVKPTRGVFYLISIANLDQP

SEQ ID NO: 32829 - protein, 29 aa, Artificial Sequence
  Cyclic GFR-binding peptide
  MOD_RES (1)..(3): Xaa is C or S
XKXSKVVMEYQKYVKPTRGVIYLISIPSL

SEQ ID NO: 32830 - protein, 28 aa, Artificial Sequence
  Cyclic GFR-binding peptide
  MOD_RES (26)..(27): Xaa is C or S
RYKKLYTVVGKDFYLISIANLKTPVXXA

SEQ ID NO: 32831 - protein, 23 aa, Artificial Sequence
  Cyclic GFR-binding peptide
MDEYQKYVVKENEDIYLMSIPSL

SEQ ID NO: 32832 - protein, 39 aa, Artificial Sequence; identical to SEQ ID NO: 4528
  Cyclic GFR-binding peptide
  MOD_RES (2)..(33)..(34): Xaa is C or S

SEQ ID NO: 32833 - protein, 41 aa, Artificial Sequence; identical to SEQ ID NO: 4529
  Cyclic GFR-binding peptide
  MOD_RES (2)..(4)..(35)..(36): Xaa is C or S

SEQ ID NO: 32834 - protein, 26 aa, Artificial Sequence
  Cyclic GFR-binding peptide
VAMGRYKKLYTVVGKDFYLISIANLK

SEQ ID NO: 32835 - protein, 32 aa, Artificial Sequence
  Cyclic GFR-binding peptide
  MOD_RES (27)..(28): Xaa is C or S
NEYKFKIVNSSDDLYLVSIPELQTPAXXPKPV

SEQ ID NO: 32836 - protein, 25 aa, Artificial Sequence
  Cyclic GFR-binding peptide
RVVMNEYQKYIVNSSDDIYLVSIPS

SEQ ID NO: 32837 - protein, 35 aa, Artificial Sequence
  Cyclic GFR-binding peptide
  MOD_RES (31)..(32): Xaa is C or S
SKVIMEYQKYIKPTKGIIYLISIPSLDQSVXXPSA

SEQ ID NO: 32838 - protein, 27 aa, Artificial Sequence
  Cyclic GFR-binding peptide
  MOD_RES (27)..(27): Xaa is C or S
MEYQKYVKPTRGVIYLISIPSLDQPVX

SEQ ID NO: 32839 - protein, 38 aa, Artificial Sequence
  Cyclic GFR-binding peptide
  MOD_RES (1)..(33)..(34): Xaa is C or S
XGEVVMDEYKFKVVKENEDLYLMSIPELETPVXXAKPI

SEQ ID NO: 32840 - protein, 36 aa, Artificial Sequence; identical to SEQ ID NO: 4536
  Cyclic GFR-binding peptide
  MOD_RES (31)..(32): Xaa is C or S

SEQ ID NO: 32841 - protein, 30 aa, Artificial Sequence; identical to SEQ ID NO: 4538
  Cyclic GFR-binding peptide
  MOD_RES (30)..(30): Xaa is C or S

SEQ ID NO: 32842 - protein, 25 aa, Artificial Sequence
  Cyclic GFR-binding peptide
MEEYKFKVVKDYEDLYLMSIPELET

SEQ ID NO: 32843 - protein, 32 aa, Artificial Sequence
  Cyclic GFR-binding peptide
  MOD_RES (32)..(32): Xaa is C or S
AEVVMDEYKFKVVNNAADLYLISIPELRAPVX

SEQ ID NO: 32844 - protein, 33 aa, Artificial Sequence; identical to SEQ ID NO: 4541
  Cyclic GFR-binding peptide
  MOD_RES (29)..(30): Xaa is C or S

SEQ ID NO: 32845 - protein, 29 aa, Artificial Sequence
  Cyclic GFR-binding peptide
SRVIMEYQKYVKPKRGVIYLISIPSLAQP

SEQ ID NO: 32846 - protein, 33 aa, Artificial Sequence; identical to SEQ ID NO: 4546
  Cyclic GFR-binding peptide
  MOD_RES (2)..(4): Xaa is C or S

SEQ ID NO: 32847 - protein, 21 aa, Artificial Sequence
  Cyclic GFR-binding peptide
MEYQKYIKPTKGIIYLISIPS

SEQ ID NO: 32848 - protein, 25 aa, Artificial Sequence
  Cyclic GFR-binding peptide
VMNEYKFKIVNSSDDLYLVSIPELQ

SEQ ID NO: 32849 - protein, 25 aa, Artificial Sequence
  Cyclic GFR-binding peptide
VMNEYQKYIVNSSDDIYLVSIPSLK

SEQ ID NO: 32850 - protein, 27 aa, Artificial Sequence
  Cyclic GFR-binding peptide
  MOD_RES (26)..(26): Xaa is C or S
EYKFKIVNSSDDLYLVSIPELKTPAXT

SEQ ID NO: 32851 - protein, 36 aa, Artificial Sequence
  Cyclic GFR-binding peptide
  MOD_RES (1)..(33)..(34): Xaa is C or S
XGEVVMDEYKFKVVKENEDLYLMSIPELETPVXXAK

SEQ ID NO: 32852 - protein, 32 aa, Artificial Sequence
  Cyclic GFR-binding peptide
  MOD_RES (1)..(1): Xaa is C or S
XGEVVMEEYKFKVVKDYEDLYLMSIPELETPV

SEQ ID NO: 32853 - protein, 30 aa, Artificial Sequence; identical to SEQ ID NO: 4556
  Cyclic GFR-binding peptide
  MOD_RES (28)..(29): Xaa is C or S

SEQ ID NO: 32854 - protein, 28 aa, Artificial Sequence
  Cyclic GFR-binding peptide
KVVMEYQKYVKPTRGVIYLISIPSLDQP

SEQ ID NO: 32855 - protein, 32 aa, Artificial Sequence
  Cyclic GFR-binding peptide
  MOD_RES (26)..(27): Xaa is C or S
EYKFKTPVGMDDLYLVSIPELKTPVXXAKGVK

SEQ ID NO: 32856 - protein, 34 aa, Artificial Sequence; identical to SEQ ID NO: 4561
  Cyclic GFR-binding peptide
  MOD_RES (29)..(29): Xaa is C or S

SEQ ID NO: 32857 - protein, 36 aa, Artificial Sequence
  Cyclic GFR-binding peptide
  MOD_RES (1)..(33)..(34): Xaa is C or S
XSRVVMNEYKFKIVNSSDDLYLVSIPELKTPAXXPK

SEQ ID NO: 32858 - protein, 21 aa, Artificial Sequence
  Cyclic GFR-binding peptide
ERYKKLVVKDYEDFYLMSIAN

SEQ ID NO: 32859 - protein, 25 aa, Artificial Sequence
  Cyclic GFR-binding peptide
EVVMDEYQKYVVKENEDIYLMSIPS

SEQ ID NO: 32860 - protein, 36 aa, Artificial Sequence
  Cyclic GFR-binding peptide
  MOD_RES (30)..(31): Xaa is C or S
VVMNEYKFKIVNSSDDLYLVSIPELQTPAXXPKPVT

SEQ ID NO: 32861 - protein, 33 aa, Artificial Sequence; identical to SEQ ID NO: 4568
  Cyclic GFR-binding peptide
  MOD_RES (29)..(30): Xaa is C or S

SEQ ID NO: 32862 - protein, 30 aa, Artificial Sequence
  Cyclic GFR-binding peptide
  MOD_RES (27)..(28): Xaa is C or S
EEYKFKTPVGMDDLYLVSIPELKTPVXXAK

SEQ ID NO: 32863 - protein, 35 aa, Artificial Sequence; identical to SEQ ID NO: 4571
  Cyclic GFR-binding peptide
  MOD_RES (1)..(33)..(34): Xaa is C or S

SEQ ID NO: 32864 - protein, 28 aa, Artificial Sequence
  Cyclic GFR-binding peptide
  MOD_RES (1)..(1): Xaa is C or S
XSRVVMNEYQKYIVNSSDDIYLVSIPSL

SEQ ID NO: 32865 - protein, 32 aa, Artificial Sequence
  Cyclic GFR-binding peptide
  MOD_RES (2)..(2): Xaa is C or S
KXSKVIMEYKFKIKPTKGILYLISIPELDQSV

SEQ ID NO: 32866 - protein, 31 aa, Artificial Sequence
  Cyclic GFR-binding peptide
  MOD_RES (28)..(29): Xaa is C or S
MEEYKFKVVKDYEDLYLMSIPELETPVXXAK

SEQ ID NO: 32867 - protein, 29 aa, Artificial Sequence
  Cyclic GFR-binding peptide
EVVMEYHYKLVVKDYEDKYLMSIPSLETP

SEQ ID NO: 32868 - protein, 34 aa, Artificial Sequence
  Cyclic GFR-binding peptide
  MOD_RES (1)..(3): Xaa is C or S
XGXESVAMGYHYKLYTVVGKDKYLISIPSLKTPV

SEQ ID NO: 32869 - protein, 36 aa, Artificial Sequence
  Cyclic GFR-binding peptide
  MOD_RES (1)..(33)..(34): Xaa is C or S
XESVAMGYHYKLYTVVGKDKYLISIPSLKTPVXXAK

SEQ ID NO: 32870 - protein, 31 aa, Artificial Sequence
  Cyclic GFR-binding peptide
  MOD_RES (28)..(28): Xaa is C or S
MNEYKFKIVNSSDDLYLVSIPELKTPAXTPK

SEQ ID NO: 32871 - protein, 33 aa, Artificial Sequence
  Cyclic GFR-binding peptide
  MOD_RES (1)..(32)..(33): Xaa is C or S
XSKVVMEYKFKVKPTRGVLYLISIPELDQPVXX

SEQ ID NO: 32872 - protein, 33 aa, Artificial Sequence
  Cyclic GFR-binding peptide
  MOD_RES (2)..(33): Xaa is C or S
KXSRVIMEYKFKVKPKRGVLYLISIPELAQPVX

SEQ ID NO: 32873 - protein, 35 aa, Artificial Sequence
  Cyclic GFR-binding peptide
  MOD_RES (31)..(32): Xaa is C or S
RVVMNEYKFKIVNSSDDLYLVSIPELKTPAXXPKP

SEQ ID NO: 32874 - protein, 33 aa, Artificial Sequence
  Cyclic GFR-binding peptide
  MOD_RES (2)..(4): Xaa is C or S
RXGXGEVVMDEYKFKVVKENEDLYLMSIPELET

SEQ ID NO: 32875 - protein, 27 aa, Artificial Sequence
  Cyclic GFR-binding peptide
  MOD_RES (26)..(26): Xaa is C or S
YHYKLIVNSSDDKYLVSIPSLKTPAXT

SEQ ID NO: 32876 - protein, 21 aa, Artificial Sequence
  Cyclic GFR-binding peptide
RYKKLVVKENEDFYLMSIANL

SEQ ID NO: 32877 - protein, 28 aa, Artificial Sequence
  Cyclic GFR-binding peptide
  MOD_RES (26)..(27): Xaa is C or S
RYKKLVVKDYEDFYLMSIANLETPVXXA

SEQ ID NO: 32878 - protein, 35 aa, Artificial Sequence; identical to SEQ ID NO: 4582
  Cyclic GFR-binding peptide
  MOD_RES (30)..(31): Xaa is C or S

SEQ ID NO: 32879 - protein, 27 aa, Artificial Sequence
  Cyclic GFR-binding peptide
  MOD_RES (27)..(27): Xaa is C or S
ERYKKLVVKDYEDFYLMSIANLETPVX

SEQ ID NO: 32880 - protein, 21 aa, Artificial Sequence
  Cyclic GFR-binding peptide
YHYKLVVKDYEDKYLMSIPSL

SEQ ID NO: 32881 - protein, 25 aa, Artificial Sequence
  Cyclic GFR-binding peptide
VVMNEYQKYIVNSSDDIYLVSIPSL

SEQ ID NO: 32882 - protein, 38 aa, Artificial Sequence; identical to SEQ ID NO: 4587
  Cyclic GFR-binding peptide
  MOD_RES (1)..(3)..(35): Xaa is C or S

SEQ ID NO: 32883 - protein, 39 aa, Artificial Sequence
  Cyclic GFR-binding peptide
  MOD_RES (1)..(33)..(34): Xaa is C or S
XARVVMNEYKFKIVNSSDDLYLVSIPELQTPAXXPKPVT

SEQ ID NO: 32884 - protein, 39 aa, Artificial Sequence
  Cyclic GFR-binding peptide
  MOD_RES (2)..(4)..(37)..(38): Xaa is C or S
RXGXEAVSMGEEYKFKTPVGMDDLYLVSIPELKTPVXXA

SEQ ID NO: 32885 - protein, 34 aa, Artificial Sequence
  Cyclic GFR-binding peptide
  MOD_RES (1)..(33)..(34): Xaa is C or S
XSRVVMNEYQKYIVNSSDDIYLVSIPSLKTPAXX

SEQ ID NO: 32886 - protein, 34 aa, Artificial Sequence
  Cyclic GFR-binding peptide
  MOD_RES (31)..(32): Xaa is C or S
SRVIMEYQKYVKPKRGVIYLISIPSLAQPVXXPA

SEQ ID NO: 32887 - protein, 37 aa, Artificial Sequence; identical to SEQ ID NO: 4595
  Cyclic GFR-binding peptide
  MOD_RES (2)..(34)..(35): Xaa is C or S

SEQ ID NO: 32888 - protein, 36 aa, Artificial Sequence; identical to SEQ ID NO: 4596
  Cyclic GFR-binding peptide
  MOD_RES (2)..(34)..(35): Xaa is C or S

SEQ ID NO: 32889 - protein, 34 aa, Artificial Sequence; identical to SEQ ID NO: 4597
  Cyclic GFR-binding peptide
  MOD_RES (2)..(4): Xaa is C or S

SEQ ID NO: 32890 - protein, 29 aa, Artificial Sequence
  Cyclic GFR-binding peptide
KVIMEYQKYIKPTKGIIYLISIPSLDQSV

SEQ ID NO: 32891 - protein, 31 aa, Artificial Sequence
  Cyclic GFR-binding peptide
  MOD_RES (1)..(1): Xaa is C or S
XSRVVMNEYQKYIVNSSDDIYLVSIPSLKTP

SEQ ID NO: 32892 - protein, 27 aa, Artificial Sequence
  Cyclic GFR-binding peptide
MNEYKFKIVNSSDDLYLVSIPELKTPA

SEQ ID NO: 32893 - protein, 29 aa, Artificial Sequence
  Cyclic GFR-binding peptide
  MOD_RES (27)..(28): Xaa is C or S
MEYQKYVKPTRGVIYLISIPSLDQPVXXP

SEQ ID NO: 32894 - protein, 24 aa, Artificial Sequence
  Cyclic GFR-binding peptide
VMEEYKFKVVKDYEDLYLMSIPEL

SEQ ID NO: 32895 - protein, 30 aa, Artificial Sequence
  Cyclic GFR-binding peptide
EAVSMGEEYKFKTPVGMDDLYLVSIPELKT

SEQ ID NO: 32896 - protein, 30 aa, Artificial Sequence
  Cyclic GFR-binding peptide
  MOD_RES (1)..(1): Xaa is C or S
XGEVVMEEYKFKVVKDYEDLYLMSIPELET

SEQ ID NO: 32897 - protein, 35 aa, Artificial Sequence
  Cyclic GFR-binding peptide
  MOD_RES (29)..(30): Xaa is C or S
VMNEYKFKIVNSSDDLYLVSIPELQTPAXXPKPVT

SEQ ID NO: 32898 - protein, 30 aa, Artificial Sequence
  Cyclic GFR-binding peptide
  MOD_RES (26)..(27): Xaa is C or S
EYKFKIKPTKGILYLISIPELDQSVXXPSA

SEQ ID NO: 32899 - protein, 33 aa, Artificial Sequence
  Cyclic GFR-binding peptide
  MOD_RES (31)..(32): Xaa is C or S
EVVMEEYQKYVVKDYEDIYLMSIPSLETPVXXA

SEQ ID NO: 32900 - protein, 30 aa, Artificial Sequence
  Cyclic GFR-binding peptide
  MOD_RES (28)..(29): Xaa is C or S
IMEYQKYVKPKRGVIYLISIPSLAQPVXXP

SEQ ID NO: 32901 - protein, 23 aa, Artificial Sequence
  Cyclic GFR-binding peptide
VVMEYQKYVKPTRGVIYLISIPS

SEQ ID NO: 32902 - protein, 30 aa, Artificial Sequence; identical to SEQ ID NO: 4601
  Cyclic GFR-binding peptide

SEQ ID NO: 32903 - protein, 31 aa, Artificial Sequence; identical to SEQ ID NO: 4603
  Cyclic GFR-binding peptide
  MOD_RES (29)..(30): Xaa is C or S

SEQ ID NO: 32904 - protein, 32 aa, Artificial Sequence
  Cyclic GFR-binding peptide
  MOD_RES (26)..(27): Xaa is C or S
EYQKYIVNNSSDIYLVSIPSLKTPAXXAKPVA

SEQ ID NO: 32905 - protein, 31 aa, Artificial Sequence; identical to SEQ ID NO: 4608
  Cyclic GFR-binding peptide
  MOD_RES (26)..(27): Xaa is C or S

SEQ ID NO: 32906 - protein, 31 aa, Artificial Sequence
  Cyclic GFR-binding peptide
  MOD_RES (26)..(27): Xaa is C or S
EYKFKVVKENEDLYLMSIPELETPVXXAKPI

SEQ ID NO: 32907 - protein, 32 aa, Artificial Sequence
  Cyclic GFR-binding peptide
  MOD_RES (27)..(28): Xaa is C or S
MEYKFKIKPTKGILYLISIPELDQSVXXPSAS

SEQ ID NO: 32908 - protein, 21 aa, Artificial Sequence
  Cyclic GFR-binding peptide
YHYKLIVNNSSDKYLVSIPSL

SEQ ID NO: 32909 - protein, 29 aa, Artificial Sequence
  Cyclic GFR-binding peptide
  MOD_RES (1)..(1): Xaa is C or S
XSKVIMEYQKYIKPTKGIIYLISIPSLDQ

SEQ ID NO: 32910 - protein, 28 aa, Artificial Sequence
  Cyclic GFR-binding peptide
  MOD_RES (2)..(2): Xaa is C or S
GXESVAMGRYKKLYTVVGKDFYLISIAN

SEQ ID NO: 32911 - protein, 30 aa, Artificial Sequence; identical to SEQ ID NO: 4613
  Cyclic GFR-binding peptide
  MOD_RES (2)..(2): Xaa is C or S

SEQ ID NO: 32912 - protein, 37 aa, Artificial Sequence
  Cyclic GFR-binding peptide
  MOD_RES (1)..(3)..(35)..(36): Xaa is C or S
XGXGEVVMEEYQKYVVKDYEDIYLMSIPSLETPVXXA

SEQ ID NO: 32913 - protein, 36 aa, Artificial Sequence; identical to SEQ ID NO: 4616
  Cyclic GFR-binding peptide
  MOD_RES (2)..(4)..(36): Xaa is C or S

SEQ ID NO: 32914 - protein, 24 aa, Artificial Sequence
  Cyclic GFR-binding peptide
YHYKLIVNSSDDKYLVSIPSLQTP

SEQ ID NO: 32915 - protein, 31 aa, Artificial Sequence; identical to SEQ ID NO: 4620
  Cyclic GFR-binding peptide
  MOD_RES (29)..(30): Xaa is C or S

SEQ ID NO: 32916 - protein, 33 aa, Artificial Sequence
  Cyclic GFR-binding peptide
  MOD_RES (28)..(29): Xaa is C or S
MDEYKFKVVKENEDLYLMSIPELETPVXXAKPI

SEQ ID NO: 32917 - protein, 37 aa, Artificial Sequence
  Cyclic GFR-binding peptide
  MOD_RES (2)..(34)..(35): Xaa is C or S
GXARVVMNEYKFKIVNSSDDLYLVSIPELQTPAXXPK

SEQ ID NO: 32918 - protein, 26 aa, Artificial Sequence
  Cyclic GFR-binding peptide
NRYKKLIVNSSDDFYLVSIANLKTPA

SEQ ID NO: 32919 - protein, 30 aa, Artificial Sequence
  Cyclic GFR-binding peptide
  MOD_RES (30)..(30): Xaa is C or S
VVMDEYKFKVVKENEDLYLMSIPELETPVX

SEQ ID NO: 32920 - protein, 27 aa, Artificial Sequence
  Cyclic GFR-binding peptide
RVIMYHYKLVKPKRGVKYLISIPSLAQ

SEQ ID NO: 32921 - protein, 37 aa, Artificial Sequence
  Cyclic GFR-binding peptide
  MOD_RES (2)..(4)..(35)..(36): Xaa is C or S
SXKXSRVIMEYQKYVKPKRGVIYLISIPSLAQPVXXP

SEQ ID NO: 32922 - protein, 32 aa, Artificial Sequence; identical to SEQ ID NO: 4628
  Cyclic GFR-binding peptide
  MOD_RES (26)..(26): Xaa is C or S

SEQ ID NO: 32923 - protein, 36 aa, Artificial Sequence; identical to SEQ ID NO: 4629
  Cyclic GFR-binding peptide
  MOD_RES (30)..(31): Xaa is C or S

SEQ ID NO: 32924 - protein, 24 aa, Artificial Sequence
  Cyclic GFR-binding peptide
NRYKKLIVNSSDDFYLVSIANLKT

SEQ ID NO: 32925 - protein, 24 aa, Artificial Sequence
  Cyclic GFR-binding peptide
MEYQKYVKPKRGVIYLISIPSLAQ

SEQ ID NO: 32926 - protein, 30 aa, Artificial Sequence
  Cyclic GFR-binding peptide
  MOD_RES (29)..(30): Xaa is C or S
VMDYHYKLVVNNAADKYLISIPSLRAPVXX

SEQ ID NO: 32927 - protein, 33 aa, Artificial Sequence; identical to SEQ ID NO: 4632
  Cyclic GFR-binding peptide
  MOD_RES (2)..(4): Xaa is C or S

SEQ ID NO: 32928 - protein, 38 aa, Artificial Sequence; identical to SEQ ID NO: 4634
  Cyclic GFR-binding peptide
  MOD_RES (2)..(4)..(35)..(36): Xaa is C or S

SEQ ID NO: 32929 - protein, 27 aa, Artificial Sequence
  Cyclic GFR-binding peptide
MDEYQKYVVKENEDIYLMSIPSLETPV

SEQ ID NO: 32930 - protein, 32 aa, Artificial Sequence
  Cyclic GFR-binding peptide
  MOD_RES (1)..(3): Xaa is C or S
XGXSRVVMNEYKFKIVNSSDDLYLVSIPELKT

SEQ ID NO: 32931 - protein, 34 aa, Artificial Sequence; identical to SEQ ID NO: 4637
  Cyclic GFR-binding peptide
  MOD_RES (2)..(4): Xaa is C or S

SEQ ID NO: 32932 - protein, 25 aa, Artificial Sequence
  Cyclic GFR-binding peptide
VMDRYKKLVVNNAADFYLISIANLR

SEQ ID NO: 32933 - protein, 32 aa, Artificial Sequence
  Cyclic GFR-binding peptide
  MOD_RES (29)..(30): Xaa is C or S
MGEEYQKYTPVGMDDIYLVSIPSLKTPVXXAK

SEQ ID NO: 32934 - protein, 29 aa, Artificial Sequence
  Cyclic GFR-binding peptide
VVMEEYQKYVVKDYEDIYLMSIPSLETPV

SEQ ID NO: 32935 - protein, 25 aa, Artificial Sequence
  Cyclic GFR-binding peptide
VSMGERYKKLTPVGMDDFYLVSIAN

SEQ ID NO: 32936 - protein, 36 aa, Artificial Sequence
  Cyclic GFR-binding peptide
  MOD_RES (32)..(33): Xaa is C or S
AKVVMNEYQKYIVNNSSDIYLVSIPSLKTPAXXAKP

SEQ ID NO: 32937 - protein, 28 aa, Artificial Sequence
  Cyclic GFR-binding peptide
  MOD_RES (26)..(26): Xaa is C or S
EYQKYIVNSSDDIYLVSIPSLKTPAXTP

SEQ ID NO: 32938 - protein, 32 aa, Artificial Sequence
  Cyclic GFR-binding peptide
  MOD_RES (29)..(30): Xaa is C or S
VMEEYQKYVVKDYEDIYLMSIPSLETPVXXAK

SEQ ID NO: 32939 - protein, 31 aa, Artificial Sequence
  Cyclic GFR-binding peptide
  MOD_RES (26)..(27): Xaa is C or S
YHYKLVVNNAADKYLISIPSLRAPVXXSAPA

SEQ ID NO: 32940 - protein, 38 aa, Artificial Sequence; identical to SEQ ID NO: 4642
  Cyclic GFR-binding peptide
  MOD_RES (2)..(33)..(34): Xaa is C or S

SEQ ID NO: 32941 - protein, 34 aa, Artificial Sequence; identical to SEQ ID NO: 4644
  Cyclic GFR-binding peptide
  MOD_RES (31)..(32): Xaa is C or S

SEQ ID NO: 32942 - protein, 26 aa, Artificial Sequence
  Cyclic GFR-binding peptide
KVIMYHYKLIKPTKGIKYLISIPSLD

SEQ ID NO: 32943 - protein, 24 aa, Artificial Sequence
  Cyclic GFR-binding peptide
MYHYKLVKPTRGVKYLISIPSLDQ

SEQ ID NO: 32944 - protein, 25 aa, Artificial Sequence
  Cyclic GFR-binding peptide
VMEEYKFKVVKDYEDLYLMSIPELE

SEQ ID NO: 32945 - protein, 31 aa, Artificial Sequence; identical to SEQ ID NO: 4650
  Cyclic GFR-binding peptide
  MOD_RES (29)..(30): Xaa is C or S

SEQ ID NO: 32946 - protein, 32 aa, Artificial Sequence
  Cyclic GFR-binding peptide
  MOD_RES (32)..(32): Xaa is C or S
ESVAMGEYQKYYTVVGKDIYLISIPSLKTPVX

SEQ ID NO: 32947 - protein, 23 aa, Artificial Sequence
  Cyclic GFR-binding peptide
EYQKYYTVVGKDIYLISIPSLKT

SEQ ID NO: 32948 - protein, 25 aa, Artificial Sequence
  Cyclic GFR-binding peptide
RVIMEYKFKVKPKRGVLYLISIPEL

SEQ ID NO: 32949 - protein, 33 aa, Artificial Sequence; identical to SEQ ID NO: 4654
  Cyclic GFR-binding peptide
  MOD_RES (28)..(29): Xaa is C or S

SEQ ID NO: 32950 - protein, 22 aa, Artificial Sequence
  Cyclic GFR-binding peptide
MEYKFKVKPKRGVLYLISIPEL

SEQ ID NO: 32951 - protein, 33 aa, Artificial Sequence
  Cyclic GFR-binding peptide
  MOD_RES (1)..(33): Xaa is C or S
XESVAMGRYKKLYTVVGKDFYLISIANLKTPVX

SEQ ID NO: 32952 - protein, 27 aa, Artificial Sequence
  Cyclic GFR-binding peptide
VVMDEYQKYVVKENEDIYLMSIPSLET

SEQ ID NO: 32953 - protein, 35 aa, Artificial Sequence; identical to SEQ ID NO: 4656
  Cyclic GFR-binding peptide
  MOD_RES (2)..(34)..(35): Xaa is C or S

SEQ ID NO: 32954 - protein, 32 aa, Artificial Sequence; identical to SEQ ID NO: 4657
  Cyclic GFR-binding peptide
  MOD_RES (30)..(31): Xaa is C or S

SEQ ID NO: 32955 - protein, 31 aa, Artificial Sequence; identical to SEQ ID NO: 4659
  Cyclic GFR-binding peptide
  MOD_RES (28)..(29): Xaa is C or S

SEQ ID NO: 32956 - protein, 31 aa, Artificial Sequence; identical to SEQ ID NO: 4662
  Cyclic GFR-binding peptide
  MOD_RES (31)..(31): Xaa is C or S

SEQ ID NO: 32957 - protein, 31 aa, Artificial Sequence
  Cyclic GFR-binding peptide
  MOD_RES (30)..(31): Xaa is C or S
VAMGEYQKYYTVVGKDIYLISIPSLKTPVXX

SEQ ID NO: 32958 - protein, 30 aa, Artificial Sequence
  Cyclic GFR-binding peptide
  MOD_RES (28)..(29): Xaa is C or S
GEEYKFKTPVGMDDLYLVSIPELKTPVXXA

SEQ ID NO: 32959 - protein, 27 aa, Artificial Sequence
  Cyclic GFR-binding peptide
  MOD_RES (2)..(2): Xaa is C or S
KXSKVVMYHYKLVKPTRGVKYLISIPS

SEQ ID NO: 32960 - protein, 31 aa, Artificial Sequence; identical to SEQ ID NO: 4665
  Cyclic GFR-binding peptide
  MOD_RES (2)..(2): Xaa is C or S

SEQ ID NO: 32961 - protein, 39 aa, Artificial Sequence; identical to SEQ ID NO: 4668
  Cyclic GFR-binding peptide
  MOD_RES (1)..(3)..(35)..(36): Xaa is C or S

SEQ ID NO: 32962 - protein, 23 aa, Artificial Sequence
  Cyclic GFR-binding peptide
MYHYKLVKPTRGVKYLISIPSLD

SEQ ID NO: 32963 - protein, 31 aa, Artificial Sequence
  Cyclic GFR-binding peptide
  MOD_RES (27)..(28): Xaa is C or S
MEYKFKVKPTRGVLYLISIPELDQPVXXPSA

SEQ ID NO: 32964 - protein, 23 aa, Artificial Sequence
  Cyclic GFR-binding peptide
MNEYKFKIVNSSDDLYLVSIPEL

SEQ ID NO: 32965 - protein, 37 aa, Artificial Sequence; identical to SEQ ID NO: 4671
  Cyclic GFR-binding peptide
  MOD_RES (1)..(3)..(34)..(35): Xaa is C or S

SEQ ID NO: 32966 - protein, 31 aa, Artificial Sequence
  Cyclic GFR-binding peptide
  MOD_RES (2)..(4): Xaa is C or S
HXGXSRVVMNEYQKYIVNSSDDIYLVSIPSL

SEQ ID NO: 32967 - protein, 27 aa, Artificial Sequence
  Cyclic GFR-binding peptide
SRVIMEYKFKVKPKRGVLYLISIPELA

SEQ ID NO: 32968 - protein, 27 aa, Artificial Sequence
  Cyclic GFR-binding peptide
  MOD_RES (26)..(27): Xaa is C or S
RYKKLVVKDYEDFYLMSIANLETPVXX

SEQ ID NO: 32969 - protein, 35 aa, Artificial Sequence
  Cyclic GFR-binding peptide
  MOD_RES (30)..(31): Xaa is C or S
SMGEEYKFKTPVGMDDLYLVSIPELKTPVXXAKGV

SEQ ID NO: 32970 - protein, 32 aa, Artificial Sequence
  Cyclic GFR-binding peptide
  MOD_RES (1)..(1): Xaa is C or S
XSRVVMNEYQKYIVNSSDDIYLVSIPSLKTPA

SEQ ID NO: 32971 - protein, 33 aa, Artificial Sequence
  Cyclic GFR-binding peptide
  MOD_RES (29)..(30): Xaa is C or S
MGEEYKFKTPVGMDDLYLVSIPELKTPVXXAKG

SEQ ID NO: 32972 - protein, 35 aa, Artificial Sequence
  Cyclic GFR-binding peptide
  MOD_RES (30)..(31): Xaa is C or S
KVVMEYKFKVKPTRGVLYLISIPELDQPVXXPSAS

SEQ ID NO: 32973 - protein, 31 aa, Artificial Sequence
  Cyclic GFR-binding peptide
  MOD_RES (1)..(1): Xaa is C or S
XESVAMGYHYKLYTVVGKDKYLISIPSLKTP

SEQ ID NO: 32974 - protein, 33 aa, Artificial Sequence; identical to SEQ ID NO: 4677
  Cyclic GFR-binding peptide
  MOD_RES (28)..(29): Xaa is C or S

SEQ ID NO: 32975 - protein, 36 aa, Artificial Sequence
  Cyclic GFR-binding peptide
  MOD_RES (2)..(34): Xaa is C or S
GXSRVVMNEYKFKIVNSSDDLYLVSIPELKTPAXTP

SEQ ID NO: 32976 - protein, 27 aa, Artificial Sequence
  Cyclic GFR-binding peptide
SRVIMYHYKLVKPKRGVKYLISIPSLA

SEQ ID NO: 32977 - protein, 41 aa, Artificial Sequence
  Cyclic GFR-binding peptide
  MOD_RES (1)..(3)..(35)..(36): Xaa is C or S
XGXARVVMNEYQKYIVNSSDDIYLVSIPSLQTPAXXPKPVT

SEQ ID NO: 32978 - protein, 32 aa, Artificial Sequence
  Cyclic GFR-binding peptide
  MOD_RES (26)..(27): Xaa is C or S
EYKFKVVNNAADLYLISIPELRAPVXXSAPAA

SEQ ID NO: 32979 - protein, 37 aa, Artificial Sequence; identical to SEQ ID NO: 4681
  Cyclic GFR-binding peptide
  MOD_RES (1)..(32)..(33): Xaa is C or S

SEQ ID NO: 32980 - protein, 22 aa, Artificial Sequence
  Cyclic GFR-binding peptide
YHYKLVKPKRGVKYLISIPSLA

SEQ ID NO: 32981 - protein, 39 aa, Artificial Sequence
  Cyclic GFR-binding peptide
  MOD_RES (1)..(33): Xaa is C or S
XSRVVMNEYKFKIVNSSDDLYLVSIPELKTPAXTPKTVH

SEQ ID NO: 32982 - protein, 37 aa, Artificial Sequence; identical to SEQ ID NO: 4686
  Cyclic GFR-binding peptide
  MOD_RES (31)..(32): Xaa is C or S

SEQ ID NO: 32983 - protein, 32 aa, Artificial Sequence
  Cyclic GFR-binding peptide
  MOD_RES (28)..(29): Xaa is C or S
MDEYKFKVVNNAADLYLISIPELRAPVXXSAP

SEQ ID NO: 32984 - protein, 40 aa, Artificial Sequence
  Cyclic GFR-binding peptide
  MOD_RES (2)..(4)..(36)..(37): Xaa is C or S
RXGXESVAMGRYKKLYTVVGKDFYLISIANLKTPVXXAKS

SEQ ID NO: 32985 - protein, 34 aa, Artificial Sequence
  Cyclic GFR-binding peptide
  MOD_RES (2)..(34): Xaa is C or S
GXESVAMGEYQKYYTVVGKDIYLISIPSLKTPVX

SEQ ID NO: 32986 - protein, 26 aa, Artificial Sequence
  Cyclic GFR-binding peptide
NYHYKLIVNNSSDKYLVSIPSLKTPA

SEQ ID NO: 32987 - protein, 31 aa, Artificial Sequence; identical to SEQ ID NO: 4692
  Cyclic GFR-binding peptide
  MOD_RES (29)..(30): Xaa is C or S

SEQ ID NO: 32988 - protein, 31 aa, Artificial Sequence
  Cyclic GFR-binding peptide
  MOD_RES (1)..(3): Xaa is C or S
XGXSRVVMNEYQKYIVNSSDDIYLVSIPSLK

SEQ ID NO: 32989 - protein, 28 aa, Artificial Sequence
  Cyclic GFR-binding peptide
VAMGRYKKLYTVVGKDFYLISIANLKTP

SEQ ID NO: 32990 - protein, 32 aa, Artificial Sequence; identical to SEQ ID NO: 4696
  Cyclic GFR-binding peptide
  MOD_RES (2)..(4): Xaa is C or S

SEQ ID NO: 32991 - protein, 22 aa, Artificial Sequence
  Cyclic GFR-binding peptide
MNEYQKYIVNSSDDIYLVSIPS

SEQ ID NO: 32992 - protein, 33 aa, Artificial Sequence
  Cyclic GFR-binding peptide
  MOD_RES (2)..(2): Xaa is C or S
GXEAVSMGEEYKFKTPVGMDDLYLVSIPELKTP

SEQ ID NO: 32993 - protein, 32 aa, Artificial Sequence
  Cyclic GFR-binding peptide
  MOD_RES (27)..(27): Xaa is C or S
NEYKFKIVNSSDDLYLVSIPELKTPAXTPKTV

SEQ ID NO: 32994 - protein, 32 aa, Artificial Sequence
  Cyclic GFR-binding peptide
  MOD_RES (32)..(32): Xaa is C or S
GEVVMDEYKFKVVKENEDLYLMSIPELETPVX

SEQ ID NO: 32995 - protein, 33 aa, Artificial Sequence
  Cyclic GFR-binding peptide
  MOD_RES (27)..(28): Xaa is C or S
GRYKKLYTVVGKDFYLISIANLKTPVXXAKSAK

SEQ ID NO: 32996 - protein, 39 aa, Artificial Sequence
  Cyclic GFR-binding peptide
  MOD_RES (1)..(3)..(35)..(36): Xaa is C or S
XGXARVVMNEYQKYIVNSSDDIYLVSIPSLQTPAXXPKP

SEQ ID NO: 32997 - protein, 33 aa, Artificial Sequence; identical to SEQ ID NO: 4697
  Cyclic GFR-binding peptide
  MOD_RES (32)..(32): Xaa is C or S

SEQ ID NO: 32998 - protein, 33 aa, Artificial Sequence; identical to SEQ ID NO: 4698
  Cyclic GFR-binding peptide
  MOD_RES (31)..(32): Xaa is C or S

SEQ ID NO: 32999 - protein, 29 aa, Artificial Sequence
  Cyclic GFR-binding peptide
GEVVMEEYQKYVVKDYEDIYLMSIPSLET

SEQ ID NO: 33000 - protein, 25 aa, Artificial Sequence
  Cyclic GFR-binding peptide
EYQKYVKPKRGVIYLISIPSLAQPV

SEQ ID NO: 33001 - protein, 27 aa, Artificial Sequence
  Cyclic GFR-binding peptide
  MOD_RES (27)..(27): Xaa is C or S
EEYQKYVVKDYEDIYLMSIPSLETPVX

SEQ ID NO: 33002 - protein, 28 aa, Artificial Sequence
  Cyclic GFR-binding peptide
  MOD_RES (28)..(28): Xaa is C or S
MDRYKKLVVKENEDFYLMSIANLETPVX

SEQ ID NO: 33003 - protein, 36 aa, Artificial Sequence
  Cyclic GFR-binding peptide
  MOD_RES (2)..(4)..(36): Xaa is C or S
HXGXAKVVMNEYQKYIVNNSSDIYLVSIPSLKTPAX

SEQ ID NO: 33004 - protein, 30 aa, Artificial Sequence; identical to SEQ ID NO: 4705
  Cyclic GFR-binding peptide
  MOD_RES (28)..(29): Xaa is C or S

SEQ ID NO: 33005 - protein, 34 aa, Artificial Sequence
  Cyclic GFR-binding peptide
  MOD_RES (2)..(34): Xaa is C or S
GXSRVVMNEYQKYIVNSSDDIYLVSIPSLKTPAX

SEQ ID NO: 33006 - protein, 30 aa, Artificial Sequence
  Cyclic GFR-binding peptide
  MOD_RES (28)..(29): Xaa is C or S
IMEYKFKIKPTKGILYLISIPELDQSVXXP

SEQ ID NO: 33007 - protein, 34 aa, Artificial Sequence
  Cyclic GFR-binding peptide
  MOD_RES (2)..(34): Xaa is C or S
GXAEVVMDYHYKLVVNNAADKYLISIPSLRAPVX

SEQ ID NO: 33008 - protein, 30 aa, Artificial Sequence
  Cyclic GFR-binding peptide
  MOD_RES (27)..(28): Xaa is C or S
NEYKFKIVNSSDDLYLVSIPELQTPAXXPK

SEQ ID NO: 33009 - protein, 31 aa, Artificial Sequence
  Cyclic GFR-binding peptide
  MOD_RES (2)..(4): Xaa is C or S
RXGXGEVVMDEYQKYVVKENEDIYLMSIPSL

SEQ ID NO: 33010 - protein, 27 aa, Artificial Sequence
  Cyclic GFR-binding peptide
VVMERYKKLVVKDYEDFYLMSIANLET

SEQ ID NO: 33011 - protein, 30 aa, Artificial Sequence
  Cyclic GFR-binding peptide
EVVMDEYQKYVVKENEDIYLMSIPSLETPV

SEQ ID NO: 33012 - protein, 37 aa, Artificial Sequence; identical to SEQ ID NO: 4709
  Cyclic GFR-binding peptide
  MOD_RES (31)..(32): Xaa is C or S

SEQ ID NO: 33013 - protein, 29 aa, Artificial Sequence
  Cyclic GFR-binding peptide
  MOD_RES (2)..(2): Xaa is C or S
GXAEVVMDEYKFKVVNNAADLYLISIPEL

SEQ ID NO: 33014 - protein, 27 aa, Artificial Sequence
  Cyclic GFR-binding peptide
GEVVMEEYQKYVVKDYEDIYLMSIPSL

SEQ ID NO: 33015 - protein, 22 aa, Artificial Sequence
  Cyclic GFR-binding peptide
MDEYKFKVVKENEDLYLMSIPE

SEQ ID NO: 33016 - protein, 35 aa, Artificial Sequence; identical to SEQ ID NO: 4711
  Cyclic GFR-binding peptide
  MOD_RES (1)..(3)..(35): Xaa is C or S

SEQ ID NO: 33017 - protein, 36 aa, Artificial Sequence
  Cyclic GFR-binding peptide
  MOD_RES (2)..(4)..(36): Xaa is C or S
HXGXAKVVMNEYKFKIVNNSSDLYLVSIPELKTPAX

SEQ ID NO: 33018 - protein, 38 aa, Artificial Sequence; identical to SEQ ID NO: 4714
  Cyclic GFR-binding peptide
  MOD_RES (2)..(4)..(37)..(38): Xaa is C or S

SEQ ID NO: 33019 - protein, 32 aa, Artificial Sequence
  Cyclic GFR-binding peptide
  MOD_RES (31)..(31): Xaa is C or S
RVVMNEYQKYIVNSSDDIYLVSIPSLKTPAXT

SEQ ID NO: 33020 - protein, 29 aa, Artificial Sequence
  Cyclic GFR-binding peptide
  MOD_RES (26)..(27): Xaa is C or S
EYQKYTPVGMDDIYLVSIPSLKTPVXXAK

SEQ ID NO: 33021 - protein, 29 aa, Artificial Sequence
  Cyclic GFR-binding peptide
  MOD_RES (27)..(28): Xaa is C or S
DEYKFKVVNNAADLYLISIPELRAPVXXS

SEQ ID NO: 33022 - protein, 37 aa, Artificial Sequence; identical to SEQ ID NO: 4721
  Cyclic GFR-binding peptide
  MOD_RES (32)..(33): Xaa is C or S

SEQ ID NO: 33023 - protein, 39 aa, Artificial Sequence
  Cyclic GFR-binding peptide
  MOD_RES (1)..(3)..(35)..(36): Xaa is C or S
XGXESVAMGYHYKLYTVVGKDKYLISIPSLKTPVXXAKS

SEQ ID NO: 33024 - protein, 33 aa, Artificial Sequence; identical to SEQ ID NO: 4724
  Cyclic GFR-binding peptide
  MOD_RES (1)..(3): Xaa is C or S

SEQ ID NO: 33025 - protein, 23 aa, Artificial Sequence
  Cyclic GFR-binding peptide
YHYKLVVKDYEDKYLMSIPSLET

SEQ ID NO: 33026 - protein, 31 aa, Artificial Sequence; identical to SEQ ID NO: 4727
  Cyclic GFR-binding peptide
  MOD_RES (1)..(3): Xaa is C or S

SEQ ID NO: 33027 - protein, 28 aa, Artificial Sequence
  Cyclic GFR-binding peptide
  MOD_RES (28)..(28): Xaa is C or S
MNEYKFKIVNSSDDLYLVSIPELQTPAX

SEQ ID NO: 33028 - protein, 31 aa, Artificial Sequence; identical to SEQ ID NO: 4728
  Cyclic GFR-binding peptide
  MOD_RES (2)..(2): Xaa is C or S

SEQ ID NO: 33029 - protein, 30 aa, Artificial Sequence; identical to SEQ ID NO: 4729
  Cyclic GFR-binding peptide
  MOD_RES (2)..(4): Xaa is C or S

SEQ ID NO: 33030 - protein, 32 aa, Artificial Sequence; identical to SEQ ID NO: 4731
  Cyclic GFR-binding peptide
  MOD_RES (2)..(2): Xaa is C or S

SEQ ID NO: 33031 - protein, 23 aa, Artificial Sequence
  Cyclic GFR-binding peptide
GEEYKFKTPVGMDDLYLVSIPEL

SEQ ID NO: 33032 - protein, 41 aa, Artificial Sequence
  Cyclic GFR-binding peptide
  MOD_RES (2)..(4)..(35)..(36): Xaa is C or S
SXKXSKVIMEYKFKIKPTKGILYLISIPELDQSVXXPSASA

SEQ ID NO: 33033 - protein, 40 aa, Artificial Sequence
  Cyclic GFR-binding peptide
  MOD_RES (1)..(3)..(35)..(36): Xaa is C or S
XGXGEVVMDEYKFKVVKENEDLYLMSIPELETPVXXAKPI

SEQ ID NO: 33034 - protein, 25 aa, Artificial Sequence
  Cyclic GFR-binding peptide
IMEYQKYIKPTKGIIYLISIPSLDQ

SEQ ID NO: 33035 - protein, 34 aa, Artificial Sequence
  Cyclic GFR-binding peptide
  MOD_RES (28)..(29): Xaa is C or S
MNEYQKYIVNSSDDIYLVSIPSLQTPAXXPKPVT

SEQ ID NO: 33036 - protein, 34 aa, Artificial Sequence
  Cyclic GFR-binding peptide
  MOD_RES (31)..(32): Xaa is C or S
EVVMEEYKFKVVKDYEDLYLMSIPELETPVXXAK

SEQ ID NO: 33037 - protein, 30 aa, Artificial Sequence; identical to SEQ ID NO: 4732
  Cyclic GFR-binding peptide
  MOD_RES (26)..(27): Xaa is C or S

SEQ ID NO: 33038 - protein, 32 aa, Artificial Sequence
  Cyclic GFR-binding peptide
  MOD_RES (30)..(30): Xaa is C or S
VVMNEYQKYIVNSSDDIYLVSIPSLKTPAXTP

SEQ ID NO: 33039 - protein, 31 aa, Artificial Sequence; identical to SEQ ID NO: 4735
  Cyclic GFR-binding peptide
  MOD_RES (29)..(30): Xaa is C or S

SEQ ID NO: 33040 - protein, 23 aa, Artificial Sequence
  Cyclic GFR-binding peptide
YHYKLVVNNAADKYLISIPSLRA

SEQ ID NO: 33041 - protein, 25 aa, Artificial Sequence
  Cyclic GFR-binding peptide
EYKFKIKPTKGILYLISIPELDQSV

SEQ ID NO: 33042 - protein, 26 aa, Artificial Sequence
  Cyclic GFR-binding peptide
VAMGEYQKYYTVVGKDIYLISIPSLK

SEQ ID NO: 33043 - protein, 36 aa, Artificial Sequence
  Cyclic GFR-binding peptide
  MOD_RES (32)..(33): Xaa is C or S
AEVVMDYHYKLVVNNAADKYLISIPSLRAPVXXSAP

SEQ ID NO: 33044 - protein, 28 aa, Artificial Sequence
  Cyclic GFR-binding peptide
AEVVMDEYKFKVVNNAADLYLISIPELR

SEQ ID NO: 33045 - protein, 32 aa, Artificial Sequence
  Cyclic GFR-binding peptide
EAVSMGEEYKFKTPVGMDDLYLVSIPELKTPV

SEQ ID NO: 33046 - protein, 31 aa, Artificial Sequence
  Cyclic GFR-binding peptide
  MOD_RES (30)..(31): Xaa is C or S
VVMNEYKFKIVNSSDDLYLVSIPELKTPAXX

SEQ ID NO: 33047 - protein, 33 aa, Artificial Sequence; identical to SEQ ID NO: 4741
  Cyclic GFR-binding peptide
  MOD_RES (2)..(4): Xaa is C or S

SEQ ID NO: 33048 - protein, 32 aa, Artificial Sequence
  Cyclic GFR-binding peptide
  MOD_RES (27)..(28): Xaa is C or S
EEYQKYVVKDYEDIYLMSIPSLETPVXXAKPI

SEQ ID NO: 33049 - protein, 33 aa, Artificial Sequence
  Cyclic GFR-binding peptide
  MOD_RES (2)..(2): Xaa is C or S
GXAEVVMDEYKFKVVNNAADLYLISIPELRAPV

SEQ ID NO: 33050 - protein, 27 aa, Artificial Sequence
  Cyclic GFR-binding peptide
AMGRYKKLYTVVGKDFYLISIANLKTP

SEQ ID NO: 33051 - protein, 34 aa, Artificial Sequence
  Cyclic GFR-binding peptide
  MOD_RES (29)..(30): Xaa is C or S
VMNEYQKYIVNSSDDIYLVSIPSLKTPAXXPKPV

SEQ ID NO: 33052 - protein, 26 aa, Artificial Sequence
  Cyclic GFR-binding peptide
MRYKKLIKPTKGIFYLISIANLDQSV

SEQ ID NO: 33053 - protein, 29 aa, Artificial Sequence
  Cyclic GFR-binding peptide
VVMNYHYKLIVNSSDDKYLVSIPSLQTPA

SEQ ID NO: 33054 - protein, 32 aa, Artificial Sequence; identical to SEQ ID NO: 4748
  Cyclic GFR-binding peptide
  MOD_RES (30)..(31): Xaa is C or S

SEQ ID NO: 33055 - protein, 31 aa, Artificial Sequence
  Cyclic GFR-binding peptide
  MOD_RES (2)..(4): Xaa is C or S
RXGXAEVVMDEYKFKVVNNAADLYLISIPEL

SEQ ID NO: 33056 - protein, 36 aa, Artificial Sequence; identical to SEQ ID NO: 4749
  Cyclic GFR-binding peptide
  MOD_RES (31)..(32): Xaa is C or S

SEQ ID NO: 33057 - protein, 27 aa, Artificial Sequence
  Cyclic GFR-binding peptide
MGRYKKLYTVVGKDFYLISIANLKTPV

SEQ ID NO: 33058 - protein, 34 aa, Artificial Sequence
  Cyclic GFR-binding peptide
  MOD_RES (2)..(34): Xaa is C or S
GXARVVMNEYQKYIVNSSDDIYLVSIPSLQTPAX

SEQ ID NO: 33059 - protein, 20 aa, Artificial Sequence
  Cyclic GFR-binding peptide
YHYKLIVNNSSDKYLVSIPS

SEQ ID NO: 33060 - protein, 31 aa, Artificial Sequence
  Cyclic GFR-binding peptide
  MOD_RES (27)..(28): Xaa is C or S
MEYQKYVKPKRGVIYLISIPSLAQPVXXPAA

SEQ ID NO: 33061 - protein, 23 aa, Artificial Sequence
  Cyclic GFR-binding peptide
IMYHYKLIKPTKGIKYLISIPSL

SEQ ID NO: 33062 - protein, 35 aa, Artificial Sequence
  Cyclic GFR-binding peptide
  MOD_RES (1)..(33): Xaa is C or S
XSRVVMNEYKFKIVNSSDDLYLVSIPELKTPAXTP

SEQ ID NO: 33063 - protein, 31 aa, Artificial Sequence; identical to SEQ ID NO: 4755
  Cyclic GFR-binding peptide
  MOD_RES (26)..(27): Xaa is C or S

SEQ ID NO: 33064 - protein, 28 aa, Artificial Sequence
  Cyclic GFR-binding peptide
VVMNEYKFKIVNSSDDLYLVSIPELKTP

SEQ ID NO: 33065 - protein, 24 aa, Artificial Sequence
  Cyclic GFR-binding peptide
VMNYHYKLIVNSSDDKYLVSIPSL

SEQ ID NO: 33066 - protein, 25 aa, Artificial Sequence
  Cyclic GFR-binding peptide
MGRYKKLYTVVGKDFYLISIANLKT

SEQ ID NO: 33067 - protein, 36 aa, Artificial Sequence; identical to SEQ ID NO: 4757
  Cyclic GFR-binding peptide
  MOD_RES (31)..(32): Xaa is C or S

SEQ ID NO: 33068 - protein, 28 aa, Artificial Sequence
  Cyclic GFR-binding peptide
EVVMEYHYKLVVKDYEDKYLMSIPSLET

SEQ ID NO: 33069 - protein, 34 aa, Artificial Sequence
  Cyclic GFR-binding peptide
  MOD_RES (2)..(34): Xaa is C or S
GXGEVVMDEYKFKVVKENEDLYLMSIPELETPVX

SEQ ID NO: 33070 - protein, 42 aa, Artificial Sequence
  Cyclic GFR-binding peptide
  MOD_RES (2)..(4)..(36)..(37): Xaa is C or S
HXGXSRVVMNEYQKYIVNSSDDIYLVSIPSLKTPAXXPKPVY

SEQ ID NO: 33071 - protein, 23 aa, Artificial Sequence
  Cyclic GFR-binding peptide
MEEYKFKVVKDYEDLYLMSIPEL

SEQ ID NO: 33072 - protein, 33 aa, Artificial Sequence
  Cyclic GFR-binding peptide
  MOD_RES (31)..(32): Xaa is C or S
KVVMNEYQKYIVNNSSDIYLVSIPSLKTPAXXA

SEQ ID NO: 33073 - protein, 27 aa, Artificial Sequence
  Cyclic GFR-binding peptide
  MOD_RES (27)..(27): Xaa is C or S
NRYKKLIVNSSDDFYLVSIANLKTPAX

SEQ ID NO: 33074 - protein, 36 aa, Artificial Sequence; identical to SEQ ID NO: 4762
  Cyclic GFR-binding peptide
  MOD_RES (1)..(33)..(34): Xaa is C or S

SEQ ID NO: 33075 - protein, 23 aa, Artificial Sequence
  Cyclic GFR-binding peptide
NEYKFKIVNSSDDLYLVSIPELK

SEQ ID NO: 33076 - protein, 29 aa, Artificial Sequence
  Cyclic GFR-binding peptide
VVMDEYKFKVVKENEDLYLMSIPELETPV

SEQ ID NO: 33077 - protein, 28 aa, Artificial Sequence
  Cyclic GFR-binding peptide
  MOD_RES (1)..(1): Xaa is C or S
XSKVIMYHYKLIKPTKGIKYLISIPSLD

SEQ ID NO: 33078 - protein, 28 aa, Artificial Sequence
  Cyclic GFR-binding peptide
RVVMNYHYKLIVNSSDDKYLVSIPSLQT

SEQ ID NO: 33079 - protein, 37 aa, Artificial Sequence
  Cyclic GFR-binding peptide
  MOD_RES (2)..(35)..(36): Xaa is C or S
GXEAVSMGEEYKFKTPVGMDDLYLVSIPELKTPVXXA

SEQ ID NO: 33080 - protein, 28 aa, Artificial Sequence
  Cyclic GFR-binding peptide
VMNRYKKLIVNNSSDFYLVSIANLKTPA

SEQ ID NO: 33081 - protein, 35 aa, Artificial Sequence; identical to SEQ ID NO: 4767
  Cyclic GFR-binding peptide
  MOD_RES (31)..(31): Xaa is C or S

SEQ ID NO: 33082 - protein, 35 aa, Artificial Sequence
  Cyclic GFR-binding peptide
  MOD_RES (31)..(32): Xaa is C or S
EVVMEEYQKYVVKDYEDIYLMSIPSLETPVXXAKP

SEQ ID NO: 33083 - protein, 22 aa, Artificial Sequence
  Cyclic GFR-binding peptide
GEEYQKYTPVGMDDIYLVSIPS

SEQ ID NO: 33084 - protein, 35 aa, Artificial Sequence
  Cyclic GFR-binding peptide
  MOD_RES (32)..(33): Xaa is C or S
ESVAMGRYKKLYTVVGKDFYLISIANLKTPVXXAK

SEQ ID NO: 33085 - protein, 28 aa, Artificial Sequence
  Cyclic GFR-binding peptide
  MOD_RES (26)..(27): Xaa is C or S
YHYKLVVKENEDKYLMSIPSLETPVXXA

SEQ ID NO: 33086 - protein, 28 aa, Artificial Sequence
  Cyclic GFR-binding peptide
KVVMNRYKKLIVNNSSDFYLVSIANLKT

SEQ ID NO: 33087 - protein, 29 aa, Artificial Sequence
  Cyclic GFR-binding peptide
  MOD_RES (27)..(27): Xaa is C or S
NRYKKLIVNSSDDFYLVSIANLKTPAXTP

SEQ ID NO: 33088 - protein, 25 aa, Artificial Sequence
  Cyclic GFR-binding peptide
VMRYKKLVKPTRGVFYLISIANLDQ

SEQ ID NO: 33089 - protein, 36 aa, Artificial Sequence; identical to SEQ ID NO: 4775
  Cyclic GFR-binding peptide
  MOD_RES (2)..(34)..(35): Xaa is C or S

SEQ ID NO: 33090 - protein, 28 aa, Artificial Sequence
  Cyclic GFR-binding peptide
  MOD_RES (26)..(27): Xaa is C or S
EYKFKVVKENEDLYLMSIPELETPVXXA

SEQ ID NO: 33091 - protein, 31 aa, Artificial Sequence; identical to SEQ ID NO: 4777
  Cyclic GFR-binding peptide
  MOD_RES (1)..(3): Xaa is C or S

SEQ ID NO: 33092 - protein, 35 aa, Artificial Sequence; identical to SEQ ID NO: 4778
  Cyclic GFR-binding peptide
  MOD_RES (30)..(31): Xaa is C or S

SEQ ID NO: 33093 - protein, 34 aa, Artificial Sequence
  Cyclic GFR-binding peptide
  MOD_RES (1)..(3): Xaa is C or S
XGXEAVSMGEEYQKYTPVGMDDIYLVSIPSLKTP

SEQ ID NO: 33094 - protein, 27 aa, Artificial Sequence
  Cyclic GFR-binding peptide
AMGYHYKLYTVVGKDKYLISIPSLKTP

SEQ ID NO: 33095 - protein, 35 aa, Artificial Sequence
  Cyclic GFR-binding peptide
  MOD_RES (2)..(4): Xaa is C or S
HXGXAKVVMNEYQKYIVNNSSDIYLVSIPSLKTPA

SEQ ID NO: 33096 - protein, 29 aa, Artificial Sequence
  Cyclic GFR-binding peptide
  MOD_RES (2)..(2): Xaa is C or S
KXSKVVMYHYKLVKPTRGVKYLISIPSLD

SEQ ID NO: 33097 - protein, 38 aa, Artificial Sequence
  Cyclic GFR-binding peptide
  MOD_RES (1)..(34)..(35): Xaa is C or S
XEAVSMGEEYKFKTPVGMDDLYLVSIPELKTPVXXAKG

SEQ ID NO: 33098 - protein, 26 aa, Artificial Sequence
  Cyclic GFR-binding peptide
KVVMNEYKFKIVNNSSDLYLVSIPEL

SEQ ID NO: 33099 - protein, 29 aa, Artificial Sequence
  Cyclic GFR-binding peptide
  MOD_RES (28)..(29): Xaa is C or S
MGRYKKLYTVVGKDFYLISIANLKTPVXX

SEQ ID NO: 33100 - protein, 29 aa, Artificial Sequence
  Cyclic GFR-binding peptide
  MOD_RES (27)..(28): Xaa is C or S
DYHYKLVVNNAADKYLISIPSLRAPVXXS

SEQ ID NO: 33101 - protein, 24 aa, Artificial Sequence
  Cyclic GFR-binding peptide
VMNEYQKYIVNNSSDIYLVSIPSL

SEQ ID NO: 33102 - protein, 38 aa, Artificial Sequence; identical to SEQ ID NO: 4783
  Cyclic GFR-binding peptide
  MOD_RES (32)..(33): Xaa is C or S

SEQ ID NO: 33103 - protein, 37 aa, Artificial Sequence; identical to SEQ ID NO: 4786
  Cyclic GFR-binding peptide
  MOD_RES (31)..(32): Xaa is C or S

SEQ ID NO: 33104 - protein, 34 aa, Artificial Sequence
  Cyclic GFR-binding peptide
  MOD_RES (1)..(33)..(34): Xaa is C or S
XESVAMGRYKKLYTVVGKDFYLISIANLKTPVXX

SEQ ID NO: 33105 - protein, 33 aa, Artificial Sequence
  Cyclic GFR-binding peptide
  MOD_RES (32)..(33): Xaa is C or S
ESVAMGEYQKYYTVVGKDIYLISIPSLKTPVXX

SEQ ID NO: 33106 - protein, 35 aa, Artificial Sequence
  Cyclic GFR-binding peptide
  MOD_RES (2)..(33)..(34): Xaa is C or S
KXSKVIMEYKFKIKPTKGILYLISIPELDQSVXXP

SEQ ID NO: 33107 - protein, 35 aa, Artificial Sequence; identical to SEQ ID NO: 4788
  Cyclic GFR-binding peptide
  MOD_RES (1)..(3)..(35): Xaa is C or S

SEQ ID NO: 33108 - protein, 24 aa, Artificial Sequence
  Cyclic GFR-binding peptide
MRYKKLVKPKRGVFYLISIANLAQ

SEQ ID NO: 33109 - protein, 32 aa, Artificial Sequence
  Cyclic GFR-binding peptide
  MOD_RES (26)..(27): Xaa is C or S
EYQKYIKPTKGIIYLISIPSLDQSVXXPSASA

SEQ ID NO: 33110 - protein, 20 aa, Artificial Sequence
  Cyclic GFR-binding peptide
EYQKYVKPKRGVIYLISIPS

SEQ ID NO: 33111 - protein, 20 aa, Artificial Sequence
  Cyclic GFR-binding peptide
YHYKLVVKDYEDKYLMSIPS

SEQ ID NO: 33112 - protein, 33 aa, Artificial Sequence
  Cyclic GFR-binding peptide
  MOD_RES (2)..(4): Xaa is C or S
SXKXSKVIMEYQKYIKPTKGIIYLISIPSLDQS

SEQ ID NO: 33113 - protein, 23 aa, Artificial Sequence
  Cyclic GFR-binding peptide
VMNYHYKLIVNNSSDKYLVSIPS

SEQ ID NO: 33114 - protein, 26 aa, Artificial Sequence
  Cyclic GFR-binding peptide
MEEYKFKVVKDYEDLYLMSIPELETP

SEQ ID NO: 33115 - protein, 26 aa, Artificial Sequence
  Cyclic GFR-binding peptide
  MOD_RES (26)..(26): Xaa is C or S
RYKKLTPVGMDDFYLVSIANLKTPVX

SEQ ID NO: 33116 - protein, 38 aa, Artificial Sequence
  Cyclic GFR-binding peptide
  MOD_RES (1)..(33)..(34): Xaa is C or S
XESVAMGEYQKYYTVVGKDIYLISIPSLKTPVXXAKSA

SEQ ID NO: 33117 - protein, 30 aa, Artificial Sequence
  Cyclic GFR-binding peptide
  MOD_RES (1)..(3): Xaa is C or S
XGXESVAMGEYQKYYTVVGKDIYLISIPSL

SEQ ID NO: 33118 - protein, 36 aa, Artificial Sequence; identical to SEQ ID NO: 4805
  Cyclic GFR-binding peptide
  MOD_RES (1)..(32)..(33): Xaa is C or S

SEQ ID NO: 33119 - protein, 29 aa, Artificial Sequence
  Cyclic GFR-binding peptide
  MOD_RES (29)..(29): Xaa is C or S
VMNEYKFKIVNNSSDLYLVSIPELKTPAX

SEQ ID NO: 33120 - protein, 31 aa, Artificial Sequence
  Cyclic GFR-binding peptide
  MOD_RES (2)..(4): Xaa is C or S
RXGXAEVVMDEYQKYVVNNAADIYLISIPSL

SEQ ID NO: 33121 - protein, 23 aa, Artificial Sequence
  Cyclic GFR-binding peptide
MRYKKLVKPKRGVFYLISIANLA

SEQ ID NO: 33122 - protein, 25 aa, Artificial Sequence
  Cyclic GFR-binding peptide
VMDYHYKLVVNNAADKYLISIPSLR

SEQ ID NO: 33123 - protein, 30 aa, Artificial Sequence; identical to SEQ ID NO: 4810
  Cyclic GFR-binding peptide
  MOD_RES (26)..(27): Xaa is C or S

SEQ ID NO: 33124 - protein, 38 aa, Artificial Sequence
  Cyclic GFR-binding peptide
  MOD_RES (2)..(33)..(34): Xaa is C or S
KXSRVIMEYQKYVKPKRGVIYLISIPSLAQPVXXPAAS

SEQ ID NO: 33125 - protein, 37 aa, Artificial Sequence; identical to SEQ ID NO: 4815
  Cyclic GFR-binding peptide
  MOD_RES (2)..(4)..(36)..(37): Xaa is C or S

SEQ ID NO: 33126 - protein, 25 aa, Artificial Sequence
  Cyclic GFR-binding peptide
MGEYQKYYTVVGKDIYLISIPSLKT

SEQ ID NO: 33127 - protein, 31 aa, Artificial Sequence
  Cyclic GFR-binding peptide
  MOD_RES (31)..(31): Xaa is C or S
EVVMEEYKFKVVKDYEDLYLMSIPELETPVX

SEQ ID NO: 33128 - protein, 33 aa, Artificial Sequence; identical to SEQ ID NO: 4816
  Cyclic GFR-binding peptide
  MOD_RES (29)..(30): Xaa is C or S

SEQ ID NO: 33129 - protein, 34 aa, Artificial Sequence
  Cyclic GFR-binding peptide
  MOD_RES (30)..(31): Xaa is C or S
VVMDEYKFKVVKENEDLYLMSIPELETPVXXAKP

SEQ ID NO: 33130 - protein, 26 aa, Artificial Sequence
  Cyclic GFR-binding peptide
MGERYKKLTPVGMDDFYLVSIANLKT

SEQ ID NO: 33131 - protein, 33 aa, Artificial Sequence; identical to SEQ ID NO: 4819
  Cyclic GFR-binding peptide
  MOD_RES (30)..(31): Xaa is C or S

SEQ ID NO: 33132 - protein, 25 aa, Artificial Sequence
  Cyclic GFR-binding peptide
VVMDEYKFKVVNNAADLYLISIPEL

SEQ ID NO: 33133 - protein, 30 aa, Artificial Sequence; identical to SEQ ID NO: 4821
  Cyclic GFR-binding peptide

SEQ ID NO: 33134 - protein, 33 aa, Artificial Sequence
  Cyclic GFR-binding peptide
  MOD_RES (31)..(32): Xaa is C or S
RVVMNEYKFKIVNSSDDLYLVSIPELKTPAXXP

SEQ ID NO: 33135 - protein, 30 aa, Artificial Sequence
  Cyclic GFR-binding peptide
  MOD_RES (2)..(4): Xaa is C or S
HXGXARVVMNEYQKYIVNSSDDIYLVSIPS

SEQ ID NO: 33136 - protein, 39 aa, Artificial Sequence
  Cyclic GFR-binding peptide
  MOD_RES (1)..(3)..(35)..(36): Xaa is C or S
XGXGEVVMDEYKFKVVKENEDLYLMSIPELETPVXXAKP

SEQ ID NO: 33137 - protein, 26 aa, Artificial Sequence
  Cyclic GFR-binding peptide
VMNEYQKYIVNSSDDIYLVSIPSLKT

SEQ ID NO: 33138 - protein, 28 aa, Artificial Sequence
  Cyclic GFR-binding peptide
  MOD_RES (1)..(1): Xaa is C or S
XAEVVMDYHYKLVVNNAADKYLISIPSL

SEQ ID NO: 33139 - protein, 29 aa, Artificial Sequence
  Cyclic GFR-binding peptide
  MOD_RES (29)..(29): Xaa is C or S
VMNEYQKYIVNSSDDIYLVSIPSLQTPAX

SEQ ID NO: 33140 - protein, 28 aa, Artificial Sequence
  Cyclic GFR-binding peptide
VMNEYQKYIVNSSDDIYLVSIPSLQTPA

SEQ ID NO: 33141 - protein, 35 aa, Artificial Sequence
  Cyclic GFR-binding peptide
  MOD_RES (1)..(34)..(35): Xaa is C or S
XEAVSMGEEYQKYTPVGMDDIYLVSIPSLKTPVXX

SEQ ID NO: 33142 - protein, 36 aa, Artificial Sequence
  Cyclic GFR-binding peptide
  MOD_RES (2)..(34)..(35): Xaa is C or S
GXAEVVMDRYKKLVVNNAADFYLISIANLRAPVXXS

SEQ ID NO: 33143 - protein, 34 aa, Artificial Sequence
  Cyclic GFR-binding peptide
  MOD_RES (31)..(32): Xaa is C or S
RVVMNEYKFKIVNSSDDLYLVSIPELQTPAXXPK

SEQ ID NO: 33144 - protein, 34 aa, Artificial Sequence; identical to SEQ ID NO: 4827
  Cyclic GFR-binding peptide
  MOD_RES (2)..(34): Xaa is C or S

SEQ ID NO: 33145 - protein, 35 aa, Artificial Sequence; identical to SEQ ID NO: 4830
  Cyclic GFR-binding peptide
  MOD_RES (1)..(3): Xaa is C or S

SEQ ID NO: 33146 - protein, 32 aa, Artificial Sequence
  Cyclic GFR-binding peptide
  MOD_RES (1)..(3): Xaa is C or S
XKXSKVVMEYKFKVKPTRGVLYLISIPELDQP

SEQ ID NO: 33147 - protein, 26 aa, Artificial Sequence
  Cyclic GFR-binding peptide
MGYHYKLYTVVGKDKYLISIPSLKTP

SEQ ID NO: 33148 - protein, 31 aa, Artificial Sequence
  Cyclic GFR-binding peptide
  MOD_RES (31)..(31): Xaa is C or S
RVVMNEYKFKIVNSSDDLYLVSIPELKTPAX

SEQ ID NO: 33149 - protein, 30 aa, Artificial Sequence; identical to SEQ ID NO: 4833
  Cyclic GFR-binding peptide
  MOD_RES (29)..(30): Xaa is C or S

SEQ ID NO: 33150 - protein, 24 aa, Artificial Sequence
  Cyclic GFR-binding peptide
AMGRYKKLYTVVGKDFYLISIANL

SEQ ID NO: 33151 - protein, 32 aa, Artificial Sequence; identical to SEQ ID NO: 4836
  Cyclic GFR-binding peptide
  MOD_RES (31)..(32): Xaa is C or S

SEQ ID NO: 33152 - protein, 28 aa, Artificial Sequence
  Cyclic GFR-binding peptide
AKVVMNEYKFKIVNNSSDLYLVSIPELK

SEQ ID NO: 33153 - protein, 25 aa, Artificial Sequence
  Cyclic GFR-binding peptide
VIMEYKFKVKPKRGVLYLISIPELA

SEQ ID NO: 33154 - protein, 26 aa, Artificial Sequence
  Cyclic GFR-binding peptide
KVVMEYKFKVKPTRGVLYLISIPELD

SEQ ID NO: 33155 - protein, 28 aa, Artificial Sequence
  Cyclic GFR-binding peptide
VIMEYQKYIKPTKGIIYLISIPSLDQSV

SEQ ID NO: 33156 - protein, 30 aa, Artificial Sequence
  Cyclic GFR-binding peptide
  MOD_RES (27)..(28): Xaa is C or S
GRYKKLYTVVGKDFYLISIANLKTPVXXAK

SEQ ID NO: 33157 - protein, 26 aa, Artificial Sequence
  Cyclic GFR-binding peptide
SRVVMNYHYKLIVNSSDDKYLVSIPS

SEQ ID NO: 33158 - protein, 33 aa, Artificial Sequence; identical to SEQ ID NO: 4841
  Cyclic GFR-binding peptide
  MOD_RES (1)..(3): Xaa is C or S

SEQ ID NO: 33159 - protein, 30 aa, Artificial Sequence
  Cyclic GFR-binding peptide
  MOD_RES (26)..(27): Xaa is C or S
EYQKYYTVVGKDIYLISIPSLKTPVXXAKS

SEQ ID NO: 33160 - protein, 41 aa, Artificial Sequence; identical to SEQ ID NO: 4843
  Cyclic GFR-binding peptide
  MOD_RES (2)..(4)..(36)..(37): Xaa is C or S

SEQ ID NO: 33161 - protein, 31 aa, Artificial Sequence; identical to SEQ ID NO: 4844
  Cyclic GFR-binding peptide
  MOD_RES (30)..(31): Xaa is C or S

SEQ ID NO: 33162 - protein, 34 aa, Artificial Sequence
  Cyclic GFR-binding peptide
  MOD_RES (31)..(32): Xaa is C or S
SKVIMEYQKYIKPTKGIIYLISIPSLDQSVXXPS

SEQ ID NO: 33163 - protein, 26 aa, Artificial Sequence
  Cyclic GFR-binding peptide
SKVVMYHYKLVKPTRGVKYLISIPSL

SEQ ID NO: 33164 - protein, 26 aa, Artificial Sequence
  Cyclic GFR-binding peptide
ARVVMNYHYKLIVNSSDDKYLVSIPS

SEQ ID NO: 33165 - protein, 32 aa, Artificial Sequence
  Cyclic GFR-binding peptide
  MOD_RES (29)..(30): Xaa is C or S
VMDEYKFKVVKENEDLYLMSIPELETPVXXAK

SEQ ID NO: 33166 - protein, 23 aa, Artificial Sequence
  Cyclic GFR-binding peptide
MEYQKYIKPTKGIIYLISIPSLD

SEQ ID NO: 33167 - protein, 39 aa, Artificial Sequence
  Cyclic GFR-binding peptide
  MOD_RES (2)..(4)..(36)..(37): Xaa is C or S
RXGXAEVVMDRYKKLVVNNAADFYLISIANLRAPVXXSA

SEQ ID NO: 33168 - protein, 31 aa, Artificial Sequence; identical to SEQ ID NO: 4849
  Cyclic GFR-binding peptide
  MOD_RES (26)..(27): Xaa is C or S

SEQ ID NO: 33169 - protein, 28 aa, Artificial Sequence
  Cyclic GFR-binding peptide
  MOD_RES (26)..(27): Xaa is C or S
YHYKLIKPTKGIKYLISIPSLDQSVXXP

SEQ ID NO: 33170 - protein, 30 aa, Artificial Sequence
  Cyclic GFR-binding peptide
  MOD_RES (26)..(27): Xaa is C or S
YHYKLVVNNAADKYLISIPSLRAPVXXSAP

SEQ ID NO: 33171 - protein, 29 aa, Artificial Sequence
  Cyclic GFR-binding peptide
  MOD_RES (28)..(29): Xaa is C or S
MNEYKFKIVNSSDDLYLVSIPELKTPAXX

SEQ ID NO: 33172 - protein, 39 aa, Artificial Sequence
  Cyclic GFR-binding peptide
  MOD_RES (1)..(33)..(34): Xaa is C or S
XARVVMNEYQKYIVNSSDDIYLVSIPSLQTPAXXPKPVT

SEQ ID NO: 33173 - protein, 30 aa, Artificial Sequence; identical to SEQ ID NO: 4855
  Cyclic GFR-binding peptide
  MOD_RES (26)..(27): Xaa is C or S

SEQ ID NO: 33174 - protein, 22 aa, Artificial Sequence
  Cyclic GFR-binding peptide
EYKFKVVNNAADLYLISIPELR

SEQ ID NO: 33175 - protein, 37 aa, Artificial Sequence; identical to SEQ ID NO: 4858
  Cyclic GFR-binding peptide
  MOD_RES (32)..(33): Xaa is C or S

SEQ ID NO: 33176 - protein, 25 aa, Artificial Sequence
  Cyclic GFR-binding peptide
EYKFKTPVGMDDLYLVSIPELKTPV

SEQ ID NO: 33177 - protein, 30 aa, Artificial Sequence; identical to SEQ ID NO: 4859
  Cyclic GFR-binding peptide
  MOD_RES (30)..(30): Xaa is C or S

SEQ ID NO: 33178 - protein, 26 aa, Artificial Sequence
  Cyclic GFR-binding peptide
VVMDEYKFKVVKENEDLYLMSIPELE

SEQ ID NO: 33179 - protein, 28 aa, Artificial Sequence
  Cyclic GFR-binding peptide
  MOD_RES (28)..(28): Xaa is C or S
IMEYQKYIKPTKGIIYLISIPSLDQSVX

SEQ ID NO: 33180 - protein, 37 aa, Artificial Sequence
  Cyclic GFR-binding peptide
  MOD_RES (31)..(32): Xaa is C or S
EVVMDEYKFKVVKENEDLYLMSIPELETPVXXAKPIK

SEQ ID NO: 33181 - protein, 26 aa, Artificial Sequence
  Cyclic GFR-binding peptide
  MOD_RES (1)..(1): Xaa is C or S
XSKVIMEYKFKIKPTKGILYLISIPE

SEQ ID NO: 33182 - protein, 27 aa, Artificial Sequence
  Cyclic GFR-binding peptide
  MOD_RES (26)..(27): Xaa is C or S
YHYKLVVKENEDKYLMSIPSLETPVXX

SEQ ID NO: 33183 - protein, 36 aa, Artificial Sequence
  Cyclic GFR-binding peptide
  MOD_RES (1)..(33)..(34): Xaa is C or S
XSRVVMNEYQKYIVNSSDDIYLVSIPSLKTPAXXPK

SEQ ID NO: 33184 - protein, 38 aa, Artificial Sequence; identical to SEQ ID NO: 4865
  Cyclic GFR-binding peptide
  MOD_RES (2)..(34)..(35): Xaa is C or S

SEQ ID NO: 33185 - protein, 32 aa, Artificial Sequence; identical to SEQ ID NO: 4866
  Cyclic GFR-binding peptide
  MOD_RES (1)..(1): Xaa is C or S

SEQ ID NO: 33186 - protein, 22 aa, Artificial Sequence
  Cyclic GFR-binding peptide
IMEYQKYVKPKRGVIYLISIPS

SEQ ID NO: 33187 - protein, 39 aa, Artificial Sequence
  Cyclic GFR-binding peptide
  MOD_RES (1)..(33)..(34): Xaa is C or S
XESVAMGYHYKLYTVVGKDKYLISIPSLKTPVXXAKSAK

SEQ ID NO: 33188 - protein, 24 aa, Artificial Sequence
  Cyclic GFR-binding peptide
IMRYKKLIKPTKGIFYLISIANLD

SEQ ID NO: 33189 - protein, 30 aa, Artificial Sequence
  Cyclic GFR-binding peptide
  MOD_RES (26)..(27): Xaa is C or S
EYQKYIVNNSSDIYLVSIPSLKTPAXXAKP

SEQ ID NO: 33190 - protein, 33 aa, Artificial Sequence
  Cyclic GFR-binding peptide
  MOD_RES (30)..(31): Xaa is C or S
VVMEEYQKYVVKDYEDIYLMSIPSLETPVXXAK

SEQ ID NO: 33191 - protein, 27 aa, Artificial Sequence
  Cyclic GFR-binding peptide
VVMNYHYKLIVNSSDDKYLVSIPSLKT

SEQ ID NO: 33192 - protein, 34 aa, Artificial Sequence
  Cyclic GFR-binding peptide
  MOD_RES (28)..(29): Xaa is C or S
MDEYKFKVVNNAADLYLISIPELRAPVXXSAPAA

SEQ ID NO: 33193 - protein, 41 aa, Artificial Sequence
  Cyclic GFR-binding peptide
  MOD_RES (1)..(3)..(35): Xaa is C or S
XGXSRVVMNEYQKYIVNSSDDIYLVSIPSLKTPAXTPKTVH

SEQ ID NO: 33194 - protein, 31 aa, Artificial Sequence
  Cyclic GFR-binding peptide
  MOD_RES (30)..(31): Xaa is C or S
VVMEEYQKYVVKDYEDIYLMSIPSLETPVXX

SEQ ID NO: 33195 - protein, 38 aa, Artificial Sequence
  Cyclic GFR-binding peptide
  MOD_RES (1)..(3)..(35)..(36): Xaa is C or S
XGXGEVVMEEYKFKVVKDYEDLYLMSIPELETPVXXAK

SEQ ID NO: 33196 - protein, 32 aa, Artificial Sequence; identical to SEQ ID NO: 4873
  Cyclic GFR-binding peptide
  MOD_RES (1)..(32): Xaa is C or S

SEQ ID NO: 33197 - protein, 29 aa, Artificial Sequence
  Cyclic GFR-binding peptide
  MOD_RES (29)..(29): Xaa is C or S
VMNRYKKLIVNNSSDFYLVSIANLKTPAX

SEQ ID NO: 33198 - protein, 29 aa, Artificial Sequence
  Cyclic GFR-binding peptide
  MOD_RES (27)..(28): Xaa is C or S
MRYKKLVKPTRGVFYLISIANLDQPVXXP

SEQ ID NO: 33199 - protein, 34 aa, Artificial Sequence; identical to SEQ ID NO: 4876
  Cyclic GFR-binding peptide
  MOD_RES (28)..(29): Xaa is C or S

SEQ ID NO: 33200 - protein, 31 aa, Artificial Sequence
  Cyclic GFR-binding peptide
  MOD_RES (28)..(29): Xaa is C or S
IMEYQKYVKPKRGVIYLISIPSLAQPVXXPA

SEQ ID NO: 33201 - protein, 30 aa, Artificial Sequence; identical to SEQ ID NO: 4877
  Cyclic GFR-binding peptide
  MOD_RES (30)..(30): Xaa is C or S

SEQ ID NO: 33202 - protein, 34 aa, Artificial Sequence; identical to SEQ ID NO: 4879
  Cyclic GFR-binding peptide
  MOD_RES (28)..(29): Xaa is C or S

SEQ ID NO: 33203 - protein, 26 aa, Artificial Sequence
  Cyclic GFR-binding peptide
  MOD_RES (26)..(26): Xaa is C or S
EYQKYIVNNSSDIYLVSIPSLKTPAX

SEQ ID NO: 33204 - protein, 39 aa, Artificial Sequence; identical to SEQ ID NO: 4881
  Cyclic GFR-binding peptide
  MOD_RES (1)..(33)..(34): Xaa is C or S

SEQ ID NO: 33205 - protein, 36 aa, Artificial Sequence; identical to SEQ ID NO: 4882
  Cyclic GFR-binding peptide
  MOD_RES (2)..(4)..(35)..(36): Xaa is C or S

SEQ ID NO: 33206 - protein, 36 aa, Artificial Sequence
  Cyclic GFR-binding peptide
  MOD_RES (2)..(4)..(36): Xaa is C or S
HXGXARVVMNEYKFKIVNSSDDLYLVSIPELQTPAX

SEQ ID NO: 33207 - protein, 21 aa, Artificial Sequence
  Cyclic GFR-binding peptide
MRYKKLIKPTKGIFYLISIAN

SEQ ID NO: 33208 - protein, 33 aa, Artificial Sequence; identical to SEQ ID NO: 4886
  Cyclic GFR-binding peptide
  MOD_RES (30)..(31): Xaa is C or S

SEQ ID NO: 33209 - protein, 22 aa, Artificial Sequence
  Cyclic GFR-binding peptide
EYKFKVVKDYEDLYLMSIPELE

SEQ ID NO: 33210 - protein, 30 aa, Artificial Sequence; identical to SEQ ID NO: 4887
  Cyclic GFR-binding peptide

SEQ ID NO: 33211 - protein, 21 aa, Artificial Sequence
  Cyclic GFR-binding peptide
DYHYKLVVNNAADKYLISIPS

SEQ ID NO: 33212 - protein, 34 aa, Artificial Sequence
  Cyclic GFR-binding peptide
  MOD_RES (2)..(4): Xaa is C or S
SXKXSKVVMEYKFKVKPTRGVLYLISIPELDQPV

SEQ ID NO: 33213 - protein, 36 aa, Artificial Sequence; identical to SEQ ID NO: 4893
  Cyclic GFR-binding peptide
  MOD_RES (2)..(34)..(35): Xaa is C or S

SEQ ID NO: 33214 - protein, 38 aa, Artificial Sequence
  Cyclic GFR-binding peptide
  MOD_RES (2)..(4)..(35)..(36): Xaa is C or S
SXKXSKVVMEYQKYVKPTRGVIYLISIPSLDQPVXXPS

SEQ ID NO: 33215 - protein, 26 aa, Artificial Sequence
  Cyclic GFR-binding peptide
VVMEEYQKYVVKDYEDIYLMSIPSLE

SEQ ID NO: 33216 - protein, 35 aa, Artificial Sequence; identical to SEQ ID NO: 4898
  Cyclic GFR-binding peptide
  MOD_RES (1)..(3)..(35): Xaa is C or S

SEQ ID NO: 33217 - protein, 34 aa, Artificial Sequence; identical to SEQ ID NO: 4899
  Cyclic GFR-binding peptide
  MOD_RES (2)..(34): Xaa is C or S

SEQ ID NO: 33218 - protein, 39 aa, Artificial Sequence
  Cyclic GFR-binding peptide
  MOD_RES (1)..(33)..(34): Xaa is C or S
XAEVVMDYHYKLVVNNAADKYLISIPSLRAPVXXSAPAA

SEQ ID NO: 33219 - protein, 35 aa, Artificial Sequence; identical to SEQ ID NO: 4901
  Cyclic GFR-binding peptide
  MOD_RES (2)..(4): Xaa is C or S

SEQ ID NO: 33220 - protein, 36 aa, Artificial Sequence
  Cyclic GFR-binding peptide
  MOD_RES (1)..(3)..(35)..(36): Xaa is C or S
XGXESVAMGRYKKLYTVVGKDFYLISIANLKTPVXX

SEQ ID NO: 33221 - protein, 27 aa, Artificial Sequence
  Cyclic GFR-binding peptide
  MOD_RES (1)..(1): Xaa is C or S
XSRVIMRYKKLVKPKRGVFYLISIANL

SEQ ID NO: 33222 - protein, 24 aa, Artificial Sequence
  Cyclic GFR-binding peptide
VIMYHYKLVKPKRGVKYLISIPSL

SEQ ID NO: 33223 - protein, 27 aa, Artificial Sequence
  Cyclic GFR-binding peptide
KVVMEYKFKVKPTRGVLYLISIPELDQ

SEQ ID NO: 33224 - protein, 41 aa, Artificial Sequence; identical to SEQ ID NO: 4905
  Cyclic GFR-binding peptide
  MOD_RES (2)..(4)..(36): Xaa is C or S

SEQ ID NO: 33225 - protein, 39 aa, Artificial Sequence
  Cyclic GFR-binding peptide
  MOD_RES (2)..(34)..(35): Xaa is C or S
GXAKVVMNEYKFKIVNNSSDLYLVSIPELKTPAXXAKPV

SEQ ID NO: 33226 - protein, 22 aa, Artificial Sequence
  Cyclic GFR-binding peptide
GERYKKLTPVGMDDFYLVSIAN

SEQ ID NO: 33227 - protein, 30 aa, Artificial Sequence; identical to SEQ ID NO: 4908
  Cyclic GFR-binding peptide
  MOD_RES (28)..(28): Xaa is C or S

SEQ ID NO: 33228 - protein, 34 aa, Artificial Sequence; identical to SEQ ID NO: 4910
  Cyclic GFR-binding peptide
  MOD_RES (32)..(33): Xaa is C or S

SEQ ID NO: 33229 - protein, 37 aa, Artificial Sequence
  Cyclic GFR-binding peptide
  MOD_RES (2)..(34)..(35): Xaa is C or S
GXSRVVMNEYKFKIVNSSDDLYLVSIPELKTPAXXPK

SEQ ID NO: 33230 - protein, 26 aa, Artificial Sequence
  Cyclic GFR-binding peptide
VIMYHYKLVKPKRGVKYLISIPSLAQ

SEQ ID NO: 33231 - protein, 30 aa, Artificial Sequence; identical to SEQ ID NO: 4914
  Cyclic GFR-binding peptide
  MOD_RES (2)..(2): Xaa is C or S

SEQ ID NO: 33232 - protein, 42 aa, Artificial Sequence
  Cyclic GFR-binding peptide
  MOD_RES (2)..(4)..(36)..(37): Xaa is C or S
HXGXSRVVMNEYKFKIVNSSDDLYLVSIPELKTPAXXPKPVY

SEQ ID NO: 33233 - protein, 31 aa, Artificial Sequence; identical to SEQ ID NO: 4918
  Cyclic GFR-binding peptide
  MOD_RES (28)..(29): Xaa is C or S

SEQ ID NO: 33234 - protein, 32 aa, Artificial Sequence; identical to SEQ ID NO: 4919
  Cyclic GFR-binding peptide
  MOD_RES (31)..(32): Xaa is C or S

SEQ ID NO: 33235 - protein, 33 aa, Artificial Sequence
  Cyclic GFR-binding peptide
  MOD_RES (1)..(3): Xaa is C or S
XGXAEVVMDEYKFKVVNNAADLYLISIPELRAP

SEQ ID NO: 33236 - protein, 32 aa, Artificial Sequence; identical to SEQ ID NO: 4920
  Cyclic GFR-binding peptide
  MOD_RES (1)..(3): Xaa is C or S

SEQ ID NO: 33237 - protein, 28 aa, Artificial Sequence
  Cyclic GFR-binding peptide
  MOD_RES (28)..(28): Xaa is C or S
VMEYQKYVKPTRGVIYLISIPSLDQPVX

SEQ ID NO: 33238 - protein, 32 aa, Artificial Sequence
  Cyclic GFR-binding peptide
  MOD_RES (30)..(31): Xaa is C or S
VVMDEYKFKVVKENEDLYLMSIPELETPVXXA

SEQ ID NO: 33239 - protein, 23 aa, Artificial Sequence
  Cyclic GFR-binding peptide
GEYQKYYTVVGKDIYLISIPSLK

SEQ ID NO: 33240 - protein, 23 aa, Artificial Sequence
  Cyclic GFR-binding peptide
EYQKYIVNSSDDIYLVSIPSLKT

SEQ ID NO: 33241 - protein, 35 aa, Artificial Sequence; identical to SEQ ID NO: 4922
  Cyclic GFR-binding peptide
  MOD_RES (2)..(34)..(35): Xaa is C or S

SEQ ID NO: 33242 - protein, 29 aa, Artificial Sequence
  Cyclic GFR-binding peptide
  MOD_RES (1)..(1): Xaa is C or S
XAEVVMDYHYKLVVNNAADKYLISIPSLR

SEQ ID NO: 33243 - protein, 32 aa, Artificial Sequence
  Cyclic GFR-binding peptide
  MOD_RES (1)..(3): Xaa is C or S
XGXARVVMNEYKFKIVNSSDDLYLVSIPELQT

SEQ ID NO: 33244 - protein, 24 aa, Artificial Sequence
  Cyclic GFR-binding peptide
DRYKKLVVNNAADFYLISIANLRA

SEQ ID NO: 33245 - protein, 29 aa, Artificial Sequence
  Cyclic GFR-binding peptide
  MOD_RES (29)..(29): Xaa is C or S
AMGRYKKLYTVVGKDFYLISIANLKTPVX

SEQ ID NO: 33246 - protein, 34 aa, Artificial Sequence; identical to SEQ ID NO: 4925
  Cyclic GFR-binding peptide
  MOD_RES (28)..(29): Xaa is C or S

SEQ ID NO: 33247 - protein, 34 aa, Artificial Sequence; identical to SEQ ID NO: 4926
  Cyclic GFR-binding peptide
  MOD_RES (1)..(3)..(34): Xaa is C or S

SEQ ID NO: 33248 - protein, 32 aa, Artificial Sequence; identical to SEQ ID NO: 4928
  Cyclic GFR-binding peptide
  MOD_RES (29)..(30): Xaa is C or S

SEQ ID NO: 33249 - protein, 35 aa, Artificial Sequence
  Cyclic GFR-binding peptide
  MOD_RES (31)..(32): Xaa is C or S
SVAMGEYQKYYTVVGKDIYLISIPSLKTPVXXAKS

SEQ ID NO: 33250 - protein, 33 aa, Artificial Sequence
  Cyclic GFR-binding peptide
  MOD_RES (1)..(3): Xaa is C or S
XGXARVVMNEYKFKIVNSSDDLYLVSIPELQTP

SEQ ID NO: 33251 - protein, 22 aa, Artificial Sequence
  Cyclic GFR-binding peptide
MERYKKLVVKDYEDFYLMSIAN

SEQ ID NO: 33252 - protein, 33 aa, Artificial Sequence; identical to SEQ ID NO: 4934
  Cyclic GFR-binding peptide
  MOD_RES (30)..(31): Xaa is C or S

SEQ ID NO: 33253 - protein, 38 aa, Artificial Sequence
  Cyclic GFR-binding peptide
  MOD_RES (32)..(33): Xaa is C or S
AEVVMDEYKFKVVNNAADLYLISIPELRAPVXXSAPAA

SEQ ID NO: 33254 - protein, 31 aa, Artificial Sequence; identical to SEQ ID NO: 4936
  Cyclic GFR-binding peptide
  MOD_RES (1)..(1): Xaa is C or S

SEQ ID NO: 33255 - protein, 23 aa, Artificial Sequence
  Cyclic GFR-binding peptide
EYKFKVVNNAADLYLISIPELRA

SEQ ID NO: 33256 - protein, 30 aa, Artificial Sequence
  Cyclic GFR-binding peptide
  MOD_RES (2)..(4): Xaa is C or S
HXGXARVVMNEYKFKIVNSSDDLYLVSIPE

SEQ ID NO: 33257 - protein, 29 aa, Artificial Sequence
  Cyclic GFR-binding peptide
  MOD_RES (1)..(3): Xaa is C or S
XGXGEVVMEYHYKLVVKDYEDKYLMSIPS

SEQ ID NO: 33258 - protein, 38 aa, Artificial Sequence; identical to SEQ ID NO: 4940
  Cyclic GFR-binding peptide
  MOD_RES (1)..(32)..(33): Xaa is C or S

SEQ ID NO: 33259 - protein, 32 aa, Artificial Sequence; identical to SEQ ID NO: 4941
  Cyclic GFR-binding peptide
  MOD_RES (27)..(28): Xaa is C or S

SEQ ID NO: 33260 - protein, 36 aa, Artificial Sequence; identical to SEQ ID NO: 4946
  Cyclic GFR-binding peptide
  MOD_RES (2)..(33)..(34): Xaa is C or S

SEQ ID NO: 33261 - protein, 37 aa, Artificial Sequence; identical to SEQ ID NO: 4947
  Cyclic GFR-binding peptide
  MOD_RES (1)..(32)..(33): Xaa is C or S

SEQ ID NO: 33262 - protein, 25 aa, Artificial Sequence
  Cyclic GFR-binding peptide
VMERYKKLVVKDYEDFYLMSIANLE

SEQ ID NO: 33263 - protein, 31 aa, Artificial Sequence; identical to SEQ ID NO: 4950
  Cyclic GFR-binding peptide
  MOD_RES (2)..(4): Xaa is C or S

SEQ ID NO: 33264 - protein, 25 aa, Artificial Sequence
  Cyclic GFR-binding peptide
VMNYHYKLIVNSSDDKYLVSIPSLQ

SEQ ID NO: 33265 - protein, 36 aa, Artificial Sequence
  Cyclic GFR-binding peptide
  MOD_RES (1)..(3)..(34)..(35): Xaa is C or S
XKXSRVIMEYQKYVKPKRGVIYLISIPSLAQPVXXP

SEQ ID NO: 33266 - protein, 26 aa, Artificial Sequence
  Cyclic GFR-binding peptide
VVMNYHYKLIVNSSDDKYLVSIPSLQ

SEQ ID NO: 33267 - protein, 35 aa, Artificial Sequence; identical to SEQ ID NO: 4959
  Cyclic GFR-binding peptide
  MOD_RES (1)..(32)..(33): Xaa is C or S

SEQ ID NO: 33268 - protein, 40 aa, Artificial Sequence
  Cyclic GFR-binding peptide
  MOD_RES (2)..(4)..(36)..(37): Xaa is C or S
HXGXSRVVMNEYKFKIVNSSDDLYLVSIPELKTPAXXPKP

SEQ ID NO: 33269 - protein, 36 aa, Artificial Sequence; identical to SEQ ID NO: 4961
  Cyclic GFR-binding peptide
  MOD_RES (32)..(33): Xaa is C or S

SEQ ID NO: 33270 - protein, 34 aa, Artificial Sequence
  Cyclic GFR-binding peptide
  MOD_RES (30)..(31): Xaa is C or S
KVVMEYQKYVKPTRGVIYLISIPSLDQPVXXPSA

SEQ ID NO: 33271 - protein, 21 aa, Artificial Sequence
  Cyclic GFR-binding peptide
EEYQKYVVKDYEDIYLMSIPS

SEQ ID NO: 33272 - protein, 34 aa, Artificial Sequence
  Cyclic GFR-binding peptide
  MOD_RES (2)..(34): Xaa is C or S
GXESVAMGRYKKLYTVVGKDFYLISIANLKTPVX

SEQ ID NO: 33273 - protein, 33 aa, Artificial Sequence
  Cyclic GFR-binding peptide
  MOD_RES (31)..(32): Xaa is C or S
EVVMDEYKFKVVNNAADLYLISIPELRAPVXXS

SEQ ID NO: 33274 - protein, 26 aa, Artificial Sequence
  Cyclic GFR-binding peptide
GEYQKYYTVVGKDIYLISIPSLKTPV

SEQ ID NO: 33275 - protein, 32 aa, Artificial Sequence
  Cyclic GFR-binding peptide
  MOD_RES (30)..(31): Xaa is C or S
VVMDEYKFKVVNNAADLYLISIPELRAPVXXS

SEQ ID NO: 33276 - protein, 41 aa, Artificial Sequence; identical to SEQ ID NO: 4962
  Cyclic GFR-binding peptide
  MOD_RES (1)..(3)..(35): Xaa is C or S

SEQ ID NO: 33277 - protein, 38 aa, Artificial Sequence; identical to SEQ ID NO: 4963
  Cyclic GFR-binding peptide
  MOD_RES (1)..(33)..(34): Xaa is C or S

SEQ ID NO: 33278 - protein, 26 aa, Artificial Sequence
  Cyclic GFR-binding peptide
VVMDRYKKLVVNNAADFYLISIANLR

SEQ ID NO: 33279 - protein, 22 aa, Artificial Sequence
  Cyclic GFR-binding peptide
MDYHYKLVVNNAADKYLISIPS

SEQ ID NO: 33280 - protein, 33 aa, Artificial Sequence; identical to SEQ ID NO: 4964
  Cyclic GFR-binding peptide
  MOD_RES (28)..(29): Xaa is C or S

SEQ ID NO: 33281 - protein, 36 aa, Artificial Sequence; identical to SEQ ID NO: 4966
  Cyclic GFR-binding peptide
  MOD_RES (33)..(34): Xaa is C or S

SEQ ID NO: 33282 - protein, 27 aa, Artificial Sequence
  Cyclic GFR-binding peptide
SRVIMEYQKYVKPKRGVIYLISIPSLA

SEQ ID NO: 33283 - protein, 34 aa, Artificial Sequence
  Cyclic GFR-binding peptide
  MOD_RES (30)..(31): Xaa is C or S
SMGEEYQKYTPVGMDDIYLVSIPSLKTPVXXAKG

SEQ ID NO: 33284 - protein, 23 aa, Artificial Sequence
  Cyclic GFR-binding peptide
EYKFKVKPTRGVLYLISIPELDQ

SEQ ID NO: 33285 - protein, 30 aa, Artificial Sequence
  Cyclic GFR-binding peptide
  MOD_RES (2)..(4): Xaa is C or S
RXGXESVAMGYHYKLYTVVGKDKYLISIPS

SEQ ID NO: 33286 - protein, 37 aa, Artificial Sequence
  Cyclic GFR-binding peptide
  MOD_RES (1)..(34)..(35): Xaa is C or S
XEAVSMGEEYKFKTPVGMDDLYLVSIPELKTPVXXAK

SEQ ID NO: 33287 - protein, 31 aa, Artificial Sequence; identical to SEQ ID NO: 4969
  Cyclic GFR-binding peptide
  MOD_RES (1)..(1): Xaa is C or S

SEQ ID NO: 33288 - protein, 31 aa, Artificial Sequence; identical to SEQ ID NO: 4971
  Cyclic GFR-binding peptide
  MOD_RES (1)..(1): Xaa is C or S

SEQ ID NO: 33289 - protein, 21 aa, Artificial Sequence
  Cyclic GFR-binding peptide
YHYKLIVNSSDDKYLVSIPSL

SEQ ID NO: 33290 - protein, 26 aa, Artificial Sequence
  Cyclic GFR-binding peptide
RVVMNYHYKLIVNSSDDKYLVSIPSL

SEQ ID NO: 33291 - protein, 26 aa, Artificial Sequence
  Cyclic GFR-binding peptide
  MOD_RES (26)..(26): Xaa is C or S
RYKKLIKPTKGIFYLISIANLDQSVX

SEQ ID NO: 33292 - protein, 26 aa, Artificial Sequence
  Cyclic GFR-binding peptide
VMNEYKFKIVNNSSDLYLVSIPELKT

SEQ ID NO: 33293 - protein, 32 aa, Artificial Sequence; identical to SEQ ID NO: 4977
  Cyclic GFR-binding peptide
  MOD_RES (28)..(29): Xaa is C or S

SEQ ID NO: 33294 - protein, 39 aa, Artificial Sequence
  Cyclic GFR-binding peptide
  MOD_RES (1)..(33)..(34): Xaa is C or S
XGEVVMDEYQKYVVKENEDIYLMSIPSLETPVXXAKPIK

SEQ ID NO: 33295 - protein, 26 aa, Artificial Sequence
  Cyclic GFR-binding peptide
MYHYKLVKPKRGVKYLISIPSLAQPV

SEQ ID NO: 33296 - protein, 30 aa, Artificial Sequence; identical to SEQ ID NO: 4980
  Cyclic GFR-binding peptide
  MOD_RES (1)..(3): Xaa is C or S

SEQ ID NO: 33297 - protein, 27 aa, Artificial Sequence
  Cyclic GFR-binding peptide
RVVMNEYQKYIVNSSDDIYLVSIPSLQ

SEQ ID NO: 33298 - protein, 28 aa, Artificial Sequence
  Cyclic GFR-binding peptide
  MOD_RES (27)..(28): Xaa is C or S
GYHYKLYTVVGKDKYLISIPSLKTPVXX

SEQ ID NO: 33299 - protein, 32 aa, Artificial Sequence
  Cyclic GFR-binding peptide
  MOD_RES (26)..(27): Xaa is C or S
EYQKYVKPTRGVIYLISIPSLDQPVXXPSASA

SEQ ID NO: 33300 - protein, 26 aa, Artificial Sequence
  Cyclic GFR-binding peptide
GEVVMEYHYKLVVKDYEDKYLMSIPS

SEQ ID NO: 33301 - protein, 30 aa, Artificial Sequence
  Cyclic GFR-binding peptide
  MOD_RES (1)..(3): Xaa is C or S
XKXSKVIMEYKFKIKPTKGILYLISIPELD

SEQ ID NO: 33302 - protein, 33 aa, Artificial Sequence; identical to SEQ ID NO: 4987
  Cyclic GFR-binding peptide
  MOD_RES (1)..(3): Xaa is C or S

SEQ ID NO: 33303 - protein, 31 aa, Artificial Sequence
  Cyclic GFR-binding peptide
  MOD_RES (31)..(31): Xaa is C or S
SKVIMEYQKYIKPTKGIIYLISIPSLDQSVX

SEQ ID NO: 33304 - protein, 32 aa, Artificial Sequence
  Cyclic GFR-binding peptide
  MOD_RES (27)..(28): Xaa is C or S
MEYQKYIKPTKGIIYLISIPSLDQSVXXPSAS

SEQ ID NO: 33305 - protein, 29 aa, Artificial Sequence
  Cyclic GFR-binding peptide
  MOD_RES (26)..(27): Xaa is C or S
EYKFKVVKDYEDLYLMSIPELETPVXXAK

SEQ ID NO: 33306 - protein, 36 aa, Artificial Sequence
  Cyclic GFR-binding peptide
  MOD_RES (1)..(33)..(34): Xaa is C or S
XAEVVMDYHYKLVVNNAADKYLISIPSLRAPVXXSA

SEQ ID NO: 33307 - protein, 36 aa, Artificial Sequence
  Cyclic GFR-binding peptide
  MOD_RES (31)..(32): Xaa is C or S
KVVMNEYQKYIVNNSSDIYLVSIPSLKTPAXXAKPV

SEQ ID NO: 33308 - protein, 30 aa, Artificial Sequence
  Cyclic GFR-binding peptide
  MOD_RES (1)..(3): Xaa is C or S
XKXSKVVMEYQKYVKPTRGVIYLISIPSLD

SEQ ID NO: 33309 - protein, 35 aa, Artificial Sequence; identical to SEQ ID NO: 4991
  Cyclic GFR-binding peptide
  MOD_RES (2)..(34)..(35): Xaa is C or S

SEQ ID NO: 33310 - protein, 36 aa, Artificial Sequence
  Cyclic GFR-binding peptide
  MOD_RES (31)..(32): Xaa is C or S
SVAMGRYKKLYTVVGKDFYLISIANLKTPVXXAKSA

SEQ ID NO: 33311 - protein, 27 aa, Artificial Sequence
  Cyclic GFR-binding peptide
  MOD_RES (26)..(27): Xaa is C or S
RYKKLVVKENEDFYLMSIANLETPVXX

SEQ ID NO: 33312 - protein, 37 aa, Artificial Sequence; identical to SEQ ID NO: 4995
  Cyclic GFR-binding peptide
  MOD_RES (31)..(32): Xaa is C or S

SEQ ID NO: 33313 - protein, 36 aa, Artificial Sequence
  Cyclic GFR-binding peptide
  MOD_RES (1)..(3)..(35)..(36): Xaa is C or S
XGXAKVVMNEYQKYIVNNSSDIYLVSIPSLKTPAXX

SEQ ID NO: 33314 - protein, 27 aa, Artificial Sequence
  Cyclic GFR-binding peptide
VMNEYQKYIVNSSDDIYLVSIPSLKTP

SEQ ID NO: 33315 - protein, 34 aa, Artificial Sequence
  Cyclic GFR-binding peptide
  MOD_RES (2)..(4): Xaa is C or S
RXGXEAVSMGEEYKFKTPVGMDDLYLVSIPELKT

SEQ ID NO: 33316 - protein, 36 aa, Artificial Sequence
  Cyclic GFR-binding peptide
  MOD_RES (2)..(34)..(35): Xaa is C or S
GXGEVVMDEYKFKVVKENEDLYLMSIPELETPVXXA

SEQ ID NO: 33317 - protein, 27 aa, Artificial Sequence
  Cyclic GFR-binding peptide
EVVMEEYKFKVVKDYEDLYLMSIPELE

SEQ ID NO: 33318 - protein, 25 aa, Artificial Sequence
  Cyclic GFR-binding peptide
MNEYQKYIVNNSSDIYLVSIPSLKT

SEQ ID NO: 33319 - protein, 29 aa, Artificial Sequence
  Cyclic GFR-binding peptide
  MOD_RES (28)..(29): Xaa is C or S
MNEYKFKIVNSSDDLYLVSIPELQTPAXX

SEQ ID NO: 33320 - protein, 35 aa, Artificial Sequence
  Cyclic GFR-binding peptide
  MOD_RES (2)..(34)..(35): Xaa is C or S
GXAEVVMDRYKKLVVNNAADFYLISIANLRAPVXX

SEQ ID NO: 33321 - protein, 28 aa, Artificial Sequence
  Cyclic GFR-binding peptide
RVVMNEYKFKIVNSSDDLYLVSIPELKT

SEQ ID NO: 33322 - protein, 28 aa, Artificial Sequence
  Cyclic GFR-binding peptide
  MOD_RES (28)..(28): Xaa is C or S
GEEYKFKTPVGMDDLYLVSIPELKTPVX

SEQ ID NO: 33323 - protein, 26 aa, Artificial Sequence
  Cyclic GFR-binding peptide
SKVVMRYKKLVKPTRGVFYLISIANL

SEQ ID NO: 33324 - protein, 39 aa, Artificial Sequence
  Cyclic GFR-binding peptide
  MOD_RES (1)..(3)..(35)..(36): Xaa is C or S
XGXGEVVMEEYKFKVVKDYEDLYLMSIPELETPVXXAKP

SEQ ID NO: 33325 - protein, 32 aa, Artificial Sequence; identical to SEQ ID NO: 4999
  Cyclic GFR-binding peptide
  MOD_RES (29)..(30): Xaa is C or S

SEQ ID NO: 33326 - protein, 21 aa, Artificial Sequence
  Cyclic GFR-binding peptide
EYKFKVVKDYEDLYLMSIPEL

SEQ ID NO: 33327 - protein, 35 aa, Artificial Sequence
  Cyclic GFR-binding peptide
  MOD_RES (2)..(34)..(35): Xaa is C or S
GXAKVVMNEYKFKIVNNSSDLYLVSIPELKTPAXX

SEQ ID NO: 33328 - protein, 35 aa, Artificial Sequence
  Cyclic GFR-binding peptide
  MOD_RES (2)..(34)..(35): Xaa is C or S
GXAEVVMDEYKFKVVNNAADLYLISIPELRAPVXX

SEQ ID NO: 33329 - protein, 25 aa, Artificial Sequence
  Cyclic GFR-binding peptide
MEYHYKLVVKDYEDKYLMSIPSLET

SEQ ID NO: 33330 - protein, 33 aa, Artificial Sequence
  Cyclic GFR-binding peptide
  MOD_RES (28)..(29): Xaa is C or S
MGRYKKLYTVVGKDFYLISIANLKTPVXXAKSA

SEQ ID NO: 33331 - protein, 27 aa, Artificial Sequence
  Cyclic GFR-binding peptide
VSMGERYKKLTPVGMDDFYLVSIANLK

SEQ ID NO: 33332 - protein, 32 aa, Artificial Sequence; identical to SEQ ID NO: 5006
  Cyclic GFR-binding peptide
  MOD_RES (2)..(4): Xaa is C or S

SEQ ID NO: 33333 - protein, 35 aa, Artificial Sequence; identical to SEQ ID NO: 5008
  Cyclic GFR-binding peptide
  MOD_RES (2)..(4)..(35): Xaa is C or S

SEQ ID NO: 33334 - protein, 35 aa, Artificial Sequence
  Cyclic GFR-binding peptide
  MOD_RES (2)..(34)..(35): Xaa is C or S
GXSRVVMNEYQKYIVNSSDDIYLVSIPSLKTPAXX

SEQ ID NO: 33335 - protein, 39 aa, Artificial Sequence
  Cyclic GFR-binding peptide
  MOD_RES (2)..(34)..(35): Xaa is C or S
GXARVVMNEYQKYIVNSSDDIYLVSIPSLQTPAXXPKPV

SEQ ID NO: 33336 - protein, 36 aa, Artificial Sequence
  Cyclic GFR-binding peptide
  MOD_RES (31)..(32): Xaa is C or S
SRVIMEYKFKVKPKRGVLYLISIPELAQPVXXPAAS

SEQ ID NO: 33337 - protein, 31 aa, Artificial Sequence
  Cyclic GFR-binding peptide
  MOD_RES (31)..(31): Xaa is C or S
KVVMNEYKFKIVNNSSDLYLVSIPELKTPAX

SEQ ID NO: 33338 - protein, 33 aa, Artificial Sequence
  Cyclic GFR-binding peptide
  MOD_RES (27)..(28): Xaa is C or S
DEYKFKVVNNAADLYLISIPELRAPVXXSAPAA

SEQ ID NO: 33339 - protein, 35 aa, Artificial Sequence
  Cyclic GFR-binding peptide
  MOD_RES (1)..(3)..(35): Xaa is C or S
XGXAEVVMDYHYKLVVNNAADKYLISIPSLRAPVX

SEQ ID NO: 33340 - protein, 32 aa, Artificial Sequence
  Cyclic GFR-binding peptide
EAVSMGEEYQKYTPVGMDDIYLVSIPSLKTPV

SEQ ID NO: 33341 - protein, 25 aa, Artificial Sequence
  Cyclic GFR-binding peptide
EYKFKIVNSSDDLYLVSIPELKTPA

SEQ ID NO: 33342 - protein, 22 aa, Artificial Sequence
  Cyclic GFR-binding peptide
ERYKKLTPVGMDDFYLVSIANL

SEQ ID NO: 33343 - protein, 36 aa, Artificial Sequence
  Cyclic GFR-binding peptide
  MOD_RES (30)..(31): Xaa is C or S
VAMGRYKKLYTVVGKDFYLISIANLKTPVXXAKSAK

SEQ ID NO: 33344 - protein, 33 aa, Artificial Sequence
  Cyclic GFR-binding peptide
  MOD_RES (27)..(27): Xaa is C or S
NEYQKYIVNSSDDIYLVSIPSLKTPAXTPKTVH

SEQ ID NO: 33345 - protein, 36 aa, Artificial Sequence
  Cyclic GFR-binding peptide
  MOD_RES (2)..(4)..(36): Xaa is C or S
RXGXGEVVMEEYKFKVVKDYEDLYLMSIPELETPVX

SEQ ID NO: 33346 - protein, 29 aa, Artificial Sequence
  Cyclic GFR-binding peptide
  MOD_RES (1)..(3): Xaa is C or S
XGXAKVVMNYHYKLIVNNSSDKYLVSIPS

SEQ ID NO: 33347 - protein, 34 aa, Artificial Sequence; identical to SEQ ID NO: 5020
  Cyclic GFR-binding peptide
  MOD_RES (1)..(3)..(34): Xaa is C or S

SEQ ID NO: 33348 - protein, 29 aa, Artificial Sequence
  Cyclic GFR-binding peptide
  MOD_RES (27)..(28): Xaa is C or S
MEYKFKVKPTRGVLYLISIPELDQPVXXP

SEQ ID NO: 33349 - protein, 30 aa, Artificial Sequence
  Cyclic GFR-binding peptide
EAVSMGEEYQKYTPVGMDDIYLVSIPSLKT

SEQ ID NO: 33350 - protein, 32 aa, Artificial Sequence
  Cyclic GFR-binding peptide
  MOD_RES (31)..(32): Xaa is C or S
SVAMGEYQKYYTVVGKDIYLISIPSLKTPVXX

SEQ ID NO: 33351 - protein, 34 aa, Artificial Sequence
  Cyclic GFR-binding peptide
  MOD_RES (32)..(33): Xaa is C or S
ESVAMGRYKKLYTVVGKDFYLISIANLKTPVXXA

SEQ ID NO: 33352 - protein, 36 aa, Artificial Sequence
  Cyclic GFR-binding peptide
  MOD_RES (2)..(34)..(35): Xaa is C or S
GXESVAMGEYQKYYTVVGKDIYLISIPSLKTPVXXA

SEQ ID NO: 33353 - protein, 40 aa, Artificial Sequence; identical to SEQ ID NO: 5025
  Cyclic GFR-binding peptide
  MOD_RES (2)..(4)..(36): Xaa is C or S

SEQ ID NO: 33354 - protein, 39 aa, Artificial Sequence; identical to SEQ ID NO: 5030
  Cyclic GFR-binding peptide
  MOD_RES (2)..(4)..(37)..(38): Xaa is C or S

SEQ ID NO: 33355 - protein, 35 aa, Artificial Sequence
  Cyclic GFR-binding peptide
  MOD_RES (31)..(32): Xaa is C or S
SRVIMEYQKYVKPKRGVIYLISIPSLAQPVXXPAA

SEQ ID NO: 33356 - protein, 38 aa, Artificial Sequence; identical to SEQ ID NO: 5032
  Cyclic GFR-binding peptide
  MOD_RES (1)..(3)..(35)..(36): Xaa is C or S

SEQ ID NO: 33357 - protein, 29 aa, Artificial Sequence
  Cyclic GFR-binding peptide
  MOD_RES (27)..(28): Xaa is C or S
MEYKFKVKPKRGVLYLISIPELAQPVXXP

SEQ ID NO: 33358 - protein, 26 aa, Artificial Sequence
  Cyclic GFR-binding peptide
MEYKFKVKPTRGVLYLISIPELDQPV

SEQ ID NO: 33359 - protein, 37 aa, Artificial Sequence; identical to SEQ ID NO: 5034
  Cyclic GFR-binding peptide
  MOD_RES (1)..(34)..(35): Xaa is C or S

SEQ ID NO: 33360 - protein, 34 aa, Artificial Sequence; identical to SEQ ID NO: 5035
  Cyclic GFR-binding peptide
  MOD_RES (29)..(30): Xaa is C or S

SEQ ID NO: 33361 - protein, 29 aa, Artificial Sequence
  Cyclic GFR-binding peptide
  MOD_RES (28)..(29): Xaa is C or S
IMEYQKYVKPKRGVIYLISIPSLAQPVXX

SEQ ID NO: 33362 - protein, 36 aa, Artificial Sequence; identical to SEQ ID NO: 5036
  Cyclic GFR-binding peptide
  MOD_RES (2)..(4)..(36): Xaa is C or S

SEQ ID NO: 33363 - protein, 40 aa, Artificial Sequence; identical to SEQ ID NO: 5037
  Cyclic GFR-binding peptide
  MOD_RES (1)..(3)..(35)..(36): Xaa is C or S

SEQ ID NO: 33364 - protein, 20 aa, Artificial Sequence
  Cyclic GFR-binding peptide
EYKFKVKPKRGVLYLISIPE

SEQ ID NO: 33365 - protein, 29 aa, Artificial Sequence
  Cyclic GFR-binding peptide
  MOD_RES (29)..(29): Xaa is C or S
MGEEYKFKTPVGMDDLYLVSIPELKTPVX

SEQ ID NO: 33366 - protein, 25 aa, Artificial Sequence
  Cyclic GFR-binding peptide
MDYHYKLVVNNAADKYLISIPSLRA

SEQ ID NO: 33367 - protein, 35 aa, Artificial Sequence
  Cyclic GFR-binding peptide
  MOD_RES (1)..(33): Xaa is C or S
XSRVVMNEYQKYIVNSSDDIYLVSIPSLKTPAXTP

SEQ ID NO: 33368 - protein, 28 aa, Artificial Sequence
  Cyclic GFR-binding peptide
  MOD_RES (27)..(28): Xaa is C or S
NEYQKYIVNSSDDIYLVSIPSLQTPAXX

SEQ ID NO: 33369 - protein, 24 aa, Artificial Sequence
  Cyclic GFR-binding peptide
MEYKFKVKPKRGVLYLISIPELAQ

SEQ ID NO: 33370 - protein, 39 aa, Artificial Sequence
  Cyclic GFR-binding peptide
  MOD_RES (1)..(33)..(34): Xaa is C or S
XSRVVMNEYKFKIVNSSDDLYLVSIPELKTPAXXPKPVY

SEQ ID NO: 33371 - protein, 41 aa, Artificial Sequence
  Cyclic GFR-binding peptide
  MOD_RES (1)..(3)..(35): Xaa is C or S
XGXSRVVMNEYKFKIVNSSDDLYLVSIPELKTPAXTPKTVH

SEQ ID NO: 33372 - protein, 32 aa, Artificial Sequence; identical to SEQ ID NO: 5041
  Cyclic GFR-binding peptide
  MOD_RES (2)..(2): Xaa is C or S

SEQ ID NO: 33373 - protein, 20 aa, Artificial Sequence
  Cyclic GFR-binding peptide
EYKFKVKPTRGVLYLISIPE

SEQ ID NO: 33374 - protein, 27 aa, Artificial Sequence
  Cyclic GFR-binding peptide
VVMDRYKKLVVKENEDFYLMSIANLET

SEQ ID NO: 33375 - protein, 29 aa, Artificial Sequence
  Cyclic GFR-binding peptide
  MOD_RES (27)..(28): Xaa is C or S
MYHYKLVKPKRGVKYLISIPSLAQPVXXP

SEQ ID NO: 33376 - protein, 31 aa, Artificial Sequence
  Cyclic GFR-binding peptide
  MOD_RES (26)..(27): Xaa is C or S
EYKFKVVKDYEDLYLMSIPELETPVXXAKPI

SEQ ID NO: 33377 - protein, 29 aa, Artificial Sequence
  Cyclic GFR-binding peptide
  MOD_RES (29)..(29): Xaa is C or S
VVMEYQKYVKPTRGVIYLISIPSLDQPVX

SEQ ID NO: 33378 - protein, 33 aa, Artificial Sequence; identical to SEQ ID NO: 5049
  Cyclic GFR-binding peptide
  MOD_RES (32)..(32): Xaa is C or S

SEQ ID NO: 33379 - protein, 37 aa, Artificial Sequence
  Cyclic GFR-binding peptide
  MOD_RES (1)..(32)..(33): Xaa is C or S
XSKVVMEYKFKVKPTRGVLYLISIPELDQPVXXPSAS

SEQ ID NO: 33380 - protein, 27 aa, Artificial Sequence
  Cyclic GFR-binding peptide
  MOD_RES (26)..(27): Xaa is C or S
EYKFKTPVGMDDLYLVSIPELKTPVXX

SEQ ID NO: 33381 - protein, 38 aa, Artificial Sequence; identical to SEQ ID NO: 5052
  Cyclic GFR-binding peptide
  MOD_RES (32)..(33): Xaa is C or S

SEQ ID NO: 33382 - protein, 34 aa, Artificial Sequence
  Cyclic GFR-binding peptide
  MOD_RES (32)..(33): Xaa is C or S
GEVVMDEYKFKVVKENEDLYLMSIPELETPVXXA

SEQ ID NO: 33383 - protein, 33 aa, Artificial Sequence; identical to SEQ ID NO: 5057
  Cyclic GFR-binding peptide
  MOD_RES (1)..(3): Xaa is C or S

SEQ ID NO: 33384 - protein, 33 aa, Artificial Sequence
  Cyclic GFR-binding peptide
  MOD_RES (30)..(31): Xaa is C or S
VVMDRYKKLVVNNAADFYLISIANLRAPVXXSA

SEQ ID NO: 33385 - protein, 36 aa, Artificial Sequence; identical to SEQ ID NO: 5058
  Cyclic GFR-binding peptide
  MOD_RES (30)..(31): Xaa is C or S

SEQ ID NO: 33386 - protein, 23 aa, Artificial Sequence
  Cyclic GFR-binding peptide
VMDYHYKLVVNNAADKYLISIPS

SEQ ID NO: 33387 - protein, 37 aa, Artificial Sequence
  Cyclic GFR-binding peptide
  MOD_RES (1)..(3)..(35)..(36): Xaa is C or S
XGXSRVVMNEYKFKIVNSSDDLYLVSIPELKTPAXXP

SEQ ID NO: 33388 - protein, 34 aa, Artificial Sequence; identical to SEQ ID NO: 5059
  Cyclic GFR-binding peptide
  MOD_RES (28)..(29): Xaa is C or S

SEQ ID NO: 33389 - protein, 29 aa, Artificial Sequence
  Cyclic GFR-binding peptide
  MOD_RES (29)..(29): Xaa is C or S
VMEEYKFKVVKDYEDLYLMSIPELETPVX

SEQ ID NO: 33390 - protein, 31 aa, Artificial Sequence
  Cyclic GFR-binding peptide
  MOD_RES (29)..(30): Xaa is C or S
MGEEYKFKTPVGMDDLYLVSIPELKTPVXXA

SEQ ID NO: 33391 - protein, 26 aa, Artificial Sequence
  Cyclic GFR-binding peptide
VMDEYQKYVVKENEDIYLMSIPSLET

SEQ ID NO: 33392 - protein, 29 aa, Artificial Sequence
  Cyclic GFR-binding peptide
  MOD_RES (2)..(4): Xaa is C or S
SXKXSRVIMYHYKLVKPKRGVKYLISIPS

SEQ ID NO: 33393 - protein, 24 aa, Artificial Sequence
  Cyclic GFR-binding peptide
EYQKYYTVVGKDIYLISIPSLKTP

SEQ ID NO: 33394 - protein, 33 aa, Artificial Sequence
  Cyclic GFR-binding peptide
  MOD_RES (1)..(33): Xaa is C or S
XARVVMNEYQKYIVNSSDDIYLVSIPSLQTPAX

SEQ ID NO: 33395 - protein, 29 aa, Artificial Sequence
  Cyclic GFR-binding peptide
  MOD_RES (29)..(29): Xaa is C or S
VIMEYKFKIKPTKGILYLISIPELDQSVX

SEQ ID NO: 33396 - protein, 34 aa, Artificial Sequence
  Cyclic GFR-binding peptide
  MOD_RES (2)..(4): Xaa is C or S
HXGXSRVVMNEYQKYIVNSSDDIYLVSIPSLKTP

SEQ ID NO: 33397 - protein, 34 aa, Artificial Sequence
  Cyclic GFR-binding peptide
  MOD_RES (31)..(32): Xaa is C or S
KVVMNEYQKYIVNNSSDIYLVSIPSLKTPAXXAK

SEQ ID NO: 33398 - protein, 39 aa, Artificial Sequence; identical to SEQ ID NO: 5066
  Cyclic GFR-binding peptide
  MOD_RES (2)..(34)..(35): Xaa is C or S

SEQ ID NO: 33399 - protein, 23 aa, Artificial Sequence
  Cyclic GFR-binding peptide
YHYKLIKPTKGIKYLISIPSLDQ

SEQ ID NO: 33400 - protein, 26 aa, Artificial Sequence
  Cyclic GFR-binding peptide
VVMNRYKKLIVNSSDDFYLVSIANLK

SEQ ID NO: 33401 - protein, 26 aa, Artificial Sequence
  Cyclic GFR-binding peptide
MYHYKLIKPTKGIKYLISIPSLDQSV

SEQ ID NO: 33402 - protein, 35 aa, Artificial Sequence; identical to SEQ ID NO: 5073
  Cyclic GFR-binding peptide
  MOD_RES (1)..(3)..(35): Xaa is C or S

SEQ ID NO: 33403 - protein, 34 aa, Artificial Sequence
  Cyclic GFR-binding peptide
  MOD_RES (32)..(33): Xaa is C or S
AEVVMDEYKFKVVNNAADLYLISIPELRAPVXXS

SEQ ID NO: 33404 - protein, 33 aa, Artificial Sequence; identical to SEQ ID NO: 5075
  Cyclic GFR-binding peptide
  MOD_RES (31)..(32): Xaa is C or S

SEQ ID NO: 33405 - protein, 39 aa, Artificial Sequence
  Cyclic GFR-binding peptide
  MOD_RES (1)..(3)..(34)..(35): Xaa is C or S
XKXSKVIMEYKFKIKPTKGILYLISIPELDQSVXXPSAS

SEQ ID NO: 33406 - protein, 27 aa, Artificial Sequence
  Cyclic GFR-binding peptide
  MOD_RES (1)..(1): Xaa is C or S
XSRVIMEYQKYVKPKRGVIYLISIPSL

SEQ ID NO: 33407 - protein, 32 aa, Artificial Sequence; identical to SEQ ID NO: 5078
  Cyclic GFR-binding peptide
  MOD_RES (31)..(32): Xaa is C or S

SEQ ID NO: 33408 - protein, 25 aa, Artificial Sequence
  Cyclic GFR-binding peptide
RVVMNYHYKLIVNSSDDKYLVSIPS

SEQ ID NO: 33409 - protein, 28 aa, Artificial Sequence
  Cyclic GFR-binding peptide
RVVMNRYKKLIVNSSDDFYLVSIANLKT

SEQ ID NO: 33410 - protein, 32 aa, Artificial Sequence
  Cyclic GFR-binding peptide
  MOD_RES (27)..(28): Xaa is C or S
MEYKFKVKPKRGVLYLISIPELAQPVXXPAAS

SEQ ID NO: 33411 - protein, 25 aa, Artificial Sequence
  Cyclic GFR-binding peptide
DRYKKLVVKENEDFYLMSIANLETP

SEQ ID NO: 33412 - protein, 20 aa, Artificial Sequence
  Cyclic GFR-binding peptide
RYKKLIKPTKGIFYLISIAN

SEQ ID NO: 33413 - protein, 36 aa, Artificial Sequence
  Cyclic GFR-binding peptide
  MOD_RES (1)..(33)..(34): Xaa is C or S
XAEVVMDRYKKLVVNNAADFYLISIANLRAPVXXSA

SEQ ID NO: 33414 - protein, 37 aa, Artificial Sequence; identical to SEQ ID NO: 5089
  Cyclic GFR-binding peptide
  MOD_RES (32)..(33): Xaa is C or S

SEQ ID NO: 33415 - protein, 29 aa, Artificial Sequence
  Cyclic GFR-binding peptide
VSMGEEYQKYTPVGMDDIYLVSIPSLKTP

SEQ ID NO: 33416 - protein, 35 aa, Artificial Sequence
  Cyclic GFR-binding peptide
  MOD_RES (2)..(4)..(35): Xaa is C or S
SXKXSRVIMEYQKYVKPKRGVIYLISIPSLAQPVX

SEQ ID NO: 33417 - protein, 35 aa, Artificial Sequence; identical to SEQ ID NO: 5091
  Cyclic GFR-binding peptide
  MOD_RES (2)..(4): Xaa is C or S

SEQ ID NO: 33418 - protein, 34 aa, Artificial Sequence
  Cyclic GFR-binding peptide
  MOD_RES (28)..(29): Xaa is C or S
MDRYKKLVVNNAADFYLISIANLRAPVXXSAPAA

SEQ ID NO: 33419 - protein, 36 aa, Artificial Sequence; identical to SEQ ID NO: 5094
  Cyclic GFR-binding peptide
  MOD_RES (31)..(32): Xaa is C or S

SEQ ID NO: 33420 - protein, 22 aa, Artificial Sequence
  Cyclic GFR-binding peptide
MRYKKLIKPTKGIFYLISIANL

SEQ ID NO: 33421 - protein, 29 aa, Artificial Sequence
  Cyclic GFR-binding peptide
VVMNYHYKLIVNSSDDKYLVSIPSLKTPA

SEQ ID NO: 33422 - protein, 30 aa, Artificial Sequence; identical to SEQ ID NO: 5099
  Cyclic GFR-binding peptide
  MOD_RES (26)..(27): Xaa is C or S

SEQ ID NO: 33423 - protein, 27 aa, Artificial Sequence
  Cyclic GFR-binding peptide
MGEYQKYYTVVGKDIYLISIPSLKTPV

SEQ ID NO: 33424 - protein, 33 aa, Artificial Sequence; identical to SEQ ID NO: 5101
  Cyclic GFR-binding peptide
  MOD_RES (32)..(33): Xaa is C or S

SEQ ID NO: 33425 - protein, 25 aa, Artificial Sequence
  Cyclic GFR-binding peptide
VIMEYQKYIKPTKGIIYLISIPSLD

SEQ ID NO: 33426 - protein, 32 aa, Artificial Sequence
  Cyclic GFR-binding peptide
  MOD_RES (1)..(1): Xaa is C or S
XARVVMNEYKFKIVNSSDDLYLVSIPELQTPA

SEQ ID NO: 33427 - protein, 31 aa, Artificial Sequence; identical to SEQ ID NO: 5103
  Cyclic GFR-binding peptide
  MOD_RES (31)..(31): Xaa is C or S

SEQ ID NO: 33428 - protein, 35 aa, Artificial Sequence
  Cyclic GFR-binding peptide
  MOD_RES (1)..(3)..(35): Xaa is C or S
XGXAEVVMDEYKFKVVNNAADLYLISIPELRAPVX

SEQ ID NO: 33429 - protein, 39 aa, Artificial Sequence; identical to SEQ ID NO: 5104
  Cyclic GFR-binding peptide
  MOD_RES (2)..(4)..(36)..(37): Xaa is C or S

SEQ ID NO: 33430 - protein, 29 aa, Artificial Sequence
  Cyclic GFR-binding peptide
  MOD_RES (1)..(3): Xaa is C or S
XGXGEVVMEEYQKYVVKDYEDIYLMSIPS

SEQ ID NO: 33431 - protein, 34 aa, Artificial Sequence
  Cyclic GFR-binding peptide
  MOD_RES (31)..(32): Xaa is C or S
SRVIMEYKFKVKPKRGVLYLISIPELAQPVXXPA

SEQ ID NO: 33432 - protein, 38 aa, Artificial Sequence; identical to SEQ ID NO: 5105
  Cyclic GFR-binding peptide
  MOD_RES (1)..(33)..(34): Xaa is C or S

SEQ ID NO: 33433 - protein, 23 aa, Artificial Sequence
  Cyclic GFR-binding peptide
VMRYKKLVKPTRGVFYLISIANL

SEQ ID NO: 33434 - protein, 25 aa, Artificial Sequence
  Cyclic GFR-binding peptide
YHYKLYTVVGKDKYLISIPSLKTPV

SEQ ID NO: 33435 - protein, 32 aa, Artificial Sequence; identical to SEQ ID NO: 5109
  Cyclic GFR-binding peptide
  MOD_RES (2)..(2): Xaa is C or S

SEQ ID NO: 33436 - protein, 36 aa, Artificial Sequence
  Cyclic GFR-binding peptide
  MOD_RES (2)..(4)..(35)..(36): Xaa is C or S
SXKXSRVIMEYKFKVKPKRGVLYLISIPELAQPVXX

SEQ ID NO: 33437 - protein, 38 aa, Artificial Sequence; identical to SEQ ID NO: 5112
  Cyclic GFR-binding peptide
  MOD_RES (2)..(33)..(34): Xaa is C or S

SEQ ID NO: 33438 - protein, 34 aa, Artificial Sequence
  Cyclic GFR-binding peptide
  MOD_RES (33)..(34): Xaa is C or S
EAVSMGEEYKFKTPVGMDDLYLVSIPELKTPVXX

SEQ ID NO: 33439 - protein, 29 aa, Artificial Sequence
  Cyclic GFR-binding peptide
  MOD_RES (2)..(4): Xaa is C or S
SXKXSRVIMEYKFKVKPKRGVLYLISIPE

SEQ ID NO: 33440 - protein, 25 aa, Artificial Sequence
  Cyclic GFR-binding peptide
GRYKKLYTVVGKDFYLISIANLKTP

SEQ ID NO: 33441 - protein, 26 aa, Artificial Sequence
  Cyclic GFR-binding peptide
MGEYQKYYTVVGKDIYLISIPSLKTP

SEQ ID NO: 33442 - protein, 28 aa, Artificial Sequence
  Cyclic GFR-binding peptide
  MOD_RES (1)..(3): Xaa is C or S
XKXSKVVMEYKFKVKPTRGVLYLISIPE

SEQ ID NO: 33443 - protein, 39 aa, Artificial Sequence
  Cyclic GFR-binding peptide
  MOD_RES (2)..(4)..(36)..(37): Xaa is C or S
RXGXGEVVMEEYQKYVVKDYEDIYLMSIPSLETPVXXAK

SEQ ID NO: 33444 - protein, 38 aa, Artificial Sequence
  Cyclic GFR-binding peptide
  MOD_RES (1)..(3)..(35): Xaa is C or S
XGXSRVVMNEYQKYIVNSSDDIYLVSIPSLKTPAXTPK

SEQ ID NO: 33445 - protein, 31 aa, Artificial Sequence
  Cyclic GFR-binding peptide
ESVAMGEYQKYYTVVGKDIYLISIPSLKTPV

SEQ ID NO: 33446 - protein, 30 aa, Artificial Sequence
  Cyclic GFR-binding peptide
  MOD_RES (30)..(30): Xaa is C or S
VVMDRYKKLVVNNAADFYLISIANLRAPVX

SEQ ID NO: 33447 - protein, 22 aa, Artificial Sequence
  Cyclic GFR-binding peptide
NRYKKLIVNSSDDFYLVSIANL

SEQ ID NO: 33448 - protein, 28 aa, Artificial Sequence
  Cyclic GFR-binding peptide
  MOD_RES (26)..(27): Xaa is C or S
EYKFKIKPTKGILYLISIPELDQSVXXP

SEQ ID NO: 33449 - protein, 30 aa, Artificial Sequence; identical to SEQ ID NO: 5123
  Cyclic GFR-binding peptide
  MOD_RES (1)..(3): Xaa is C or S

SEQ ID NO: 33450 - protein, 33 aa, Artificial Sequence; identical to SEQ ID NO: 5125
  Cyclic GFR-binding peptide
  MOD_RES (1)..(33): Xaa is C or S

SEQ ID NO: 33451 - protein, 28 aa, Artificial Sequence
  Cyclic GFR-binding peptide
  MOD_RES (26)..(27): Xaa is C or S
EYKFKVKPKRGVLYLISIPELAQPVXXP

SEQ ID NO: 33452 - protein, 27 aa, Artificial Sequence
  Cyclic GFR-binding peptide
VVMNRYKKLIVNNSSDFYLVSIANLKT

SEQ ID NO: 33453 - protein, 32 aa, Artificial Sequence; identical to SEQ ID NO: 5132
  Cyclic GFR-binding peptide
  MOD_RES (2)..(4): Xaa is C or S

SEQ ID NO: 33454 - protein, 28 aa, Artificial Sequence
  Cyclic GFR-binding peptide
KVVMYHYKLVKPTRGVKYLISIPSLDQP

SEQ ID NO: 33455 - protein, 30 aa, Artificial Sequence
  Cyclic GFR-binding peptide
  MOD_RES (1)..(1): Xaa is C or S
XARVVMNEYKFKIVNSSDDLYLVSIPELQT

SEQ ID NO: 33456 - protein, 28 aa, Artificial Sequence
  Cyclic GFR-binding peptide
VVMNEYKFKIVNNSSDLYLVSIPELKTP

SEQ ID NO: 33457 - protein, 33 aa, Artificial Sequence; identical to SEQ ID NO: 5134
  Cyclic GFR-binding peptide
  MOD_RES (1)..(33): Xaa is C or S

SEQ ID NO: 33458 - protein, 38 aa, Artificial Sequence
  Cyclic GFR-binding peptide
  MOD_RES (32)..(33): Xaa is C or S
ARVVMNEYQKYIVNSSDDIYLVSIPSLQTPAXXPKPVT

SEQ ID NO: 33459 - protein, 33 aa, Artificial Sequence
  Cyclic GFR-binding peptide
  MOD_RES (2)..(2): Xaa is C or S
GXEAVSMGEEYQKYTPVGMDDIYLVSIPSLKTP

SEQ ID NO: 33460 - protein, 27 aa, Artificial Sequence
  Cyclic GFR-binding peptide
VMNRYKKLIVNSSDDFYLVSIANLKTP

SEQ ID NO: 33461 - protein, 32 aa, Artificial Sequence
  Cyclic GFR-binding peptide
  MOD_RES (2)..(4): Xaa is C or S
RXGXESVAMGYHYKLYTVVGKDKYLISIPSLK

SEQ ID NO: 33462 - protein, 22 aa, Artificial Sequence
  Cyclic GFR-binding peptide
VMEYKFKVKPTRGVLYLISIPE

SEQ ID NO: 33463 - protein, 35 aa, Artificial Sequence
  Cyclic GFR-binding peptide
  MOD_RES (31)..(32): Xaa is C or S
EVVMDEYKFKVVKENEDLYLMSIPELETPVXXAKP

SEQ ID NO: 33464 - protein, 29 aa, Artificial Sequence
  Cyclic GFR-binding peptide
AKVVMNEYKFKIVNNSSDLYLVSIPELKT

SEQ ID NO: 33465 - protein, 25 aa, Artificial Sequence
  Cyclic GFR-binding peptide
KVVMNYHYKLIVNNSSDKYLVSIPS

SEQ ID NO: 33466 - protein, 32 aa, Artificial Sequence
  Cyclic GFR-binding peptide
  MOD_RES (1)..(32): Xaa is C or S
XSRVIMEYKFKVKPKRGVLYLISIPELAQPVX

SEQ ID NO: 33467 - protein, 25 aa, Artificial Sequence
  Cyclic GFR-binding peptide
GEEYQKYTPVGMDDIYLVSIPSLKT

SEQ ID NO: 33468 - protein, 31 aa, Artificial Sequence; identical to SEQ ID NO: 5147
  Cyclic GFR-binding peptide
  MOD_RES (26)..(27): Xaa is C or S

SEQ ID NO: 33469 - protein, 32 aa, Artificial Sequence; identical to SEQ ID NO: 5149
  Cyclic GFR-binding peptide
  MOD_RES (27)..(28): Xaa is C or S

SEQ ID NO: 33470 - protein, 31 aa, Artificial Sequence
  Cyclic GFR-binding peptide
  MOD_RES (2)..(2): Xaa is C or S
GXAEVVMDEYKFKVVNNAADLYLISIPELRA

SEQ ID NO: 33471 - protein, 30 aa, Artificial Sequence; identical to SEQ ID NO: 5150
  Cyclic GFR-binding peptide
  MOD_RES (1)..(1): Xaa is C or S

SEQ ID NO: 33472 - protein, 30 aa, Artificial Sequence; identical to SEQ ID NO: 5151
  Cyclic GFR-binding peptide
  MOD_RES (27)..(28): Xaa is C or S

SEQ ID NO: 33473 - protein, 33 aa, Artificial Sequence
  Cyclic GFR-binding peptide
  MOD_RES (27)..(28): Xaa is C or S
DYHYKLVVNNAADKYLISIPSLRAPVXXSAPAA

SEQ ID NO: 33474 - protein, 31 aa, Artificial Sequence
  Cyclic GFR-binding peptide
SRVVMNEYKFKIVNSSDDLYLVSIPELKTPA

SEQ ID NO: 33475 - protein, 37 aa, Artificial Sequence
  Cyclic GFR-binding peptide
  MOD_RES (1)..(33)..(34): Xaa is C or S
XSRVVMNEYQKYIVNSSDDIYLVSIPSLKTPAXXPKP

SEQ ID NO: 33476 - protein, 31 aa, Artificial Sequence; identical to SEQ ID NO: 5154
  Cyclic GFR-binding peptide
  MOD_RES (31)..(31): Xaa is C or S

SEQ ID NO: 33477 - protein, 25 aa, Artificial Sequence
  Cyclic GFR-binding peptide
YHYKLIVNNSSDKYLVSIPSLKTPA

SEQ ID NO: 33478 - protein, 29 aa, Artificial Sequence
  Cyclic GFR-binding peptide
  MOD_RES (1)..(1): Xaa is C or S
XSRVIMEYQKYVKPKRGVIYLISIPSLAQ

SEQ ID NO: 33479 - protein, 25 aa, Artificial Sequence
  Cyclic GFR-binding peptide
YHYKLIVNSSDDKYLVSIPSLQTPA

SEQ ID NO: 33480 - protein, 38 aa, Artificial Sequence; identical to SEQ ID NO: 5161
  Cyclic GFR-binding peptide
  MOD_RES (1)..(3)..(35)..(36): Xaa is C or S

SEQ ID NO: 33481 - protein, 33 aa, Artificial Sequence; identical to SEQ ID NO: 5162
  Cyclic GFR-binding peptide
  MOD_RES (27)..(28): Xaa is C or S

SEQ ID NO: 33482 - protein, 38 aa, Artificial Sequence
  Cyclic GFR-binding peptide
  MOD_RES (2)..(34)..(35): Xaa is C or S
GXAKVVMNEYQKYIVNNSSDIYLVSIPSLKTPAXXAKP

SEQ ID NO: 33483 - protein, 40 aa, Artificial Sequence
  Cyclic GFR-binding peptide
  MOD_RES (2)..(34)..(35): Xaa is C or S
GXESVAMGYHYKLYTVVGKDKYLISIPSLKTPVXXAKSAK

SEQ ID NO: 33484 - protein, 26 aa, Artificial Sequence
  Cyclic GFR-binding peptide
IMRYKKLIKPTKGIFYLISIANLDQS

SEQ ID NO: 33485 - protein, 29 aa, Artificial Sequence
  Cyclic GFR-binding peptide
  MOD_RES (29)..(29): Xaa is C or S
VVMRYKKLVKPTRGVFYLISIANLDQPVX

SEQ ID NO: 33486 - protein, 39 aa, Artificial Sequence; identical to SEQ ID NO: 5167
  Cyclic GFR-binding peptide
  MOD_RES (2)..(4)..(36): Xaa is C or S

SEQ ID NO: 33487 - protein, 32 aa, Artificial Sequence; identical to SEQ ID NO: 5168
  Cyclic GFR-binding peptide
  MOD_RES (31)..(32): Xaa is C or S

SEQ ID NO: 33488 - protein, 29 aa, Artificial Sequence
  Cyclic GFR-binding peptide
  MOD_RES (26)..(27): Xaa is C or S
YHYKLVVNNAADKYLISIPSLRAPVXXSA

SEQ ID NO: 33489 - protein, 24 aa, Artificial Sequence
  Cyclic GFR-binding peptide
MDRYKKLVVNNAADFYLISIANLR

SEQ ID NO: 33490 - protein, 37 aa, Artificial Sequence
  Cyclic GFR-binding peptide
  MOD_RES (2)..(34)..(35): Xaa is C or S
GXESVAMGYHYKLYTVVGKDKYLISIPSLKTPVXXAK

SEQ ID NO: 33491 - protein, 34 aa, Artificial Sequence
  Cyclic GFR-binding peptide
  MOD_RES (30)..(31): Xaa is C or S
KVVMEYKFKVKPTRGVLYLISIPELDQPVXXPSA

SEQ ID NO: 33492 - protein, 33 aa, Artificial Sequence; identical to SEQ ID NO: 5170
  Cyclic GFR-binding peptide
  MOD_RES (32)..(33): Xaa is C or S

SEQ ID NO: 33493 - protein, 32 aa, Artificial Sequence; identical to SEQ ID NO: 5171
  Cyclic GFR-binding peptide
  MOD_RES (31)..(32): Xaa is C or S

SEQ ID NO: 33494 - protein, 26 aa, Artificial Sequence
  Cyclic GFR-binding peptide
  MOD_RES (26)..(26): Xaa is C or S
YHYKLVVNNAADKYLISIPSLRAPVX

SEQ ID NO: 33495 - protein, 39 aa, Artificial Sequence; identical to SEQ ID NO: 5173
  Cyclic GFR-binding peptide
  MOD_RES (1)..(3)..(35)..(36): Xaa is C or S

SEQ ID NO: 33496 - protein, 32 aa, Artificial Sequence
  Cyclic GFR-binding peptide
  MOD_RES (31)..(32): Xaa is C or S
EVVMDYHYKLVVNNAADKYLISIPSLRAPVXX

SEQ ID NO: 33497 - protein, 20 aa, Artificial Sequence
  Cyclic GFR-binding peptide
YHYKLVVNNAADKYLISIPS

SEQ ID NO: 33498 - protein, 33 aa, Artificial Sequence
  Cyclic GFR-binding peptide
  MOD_RES (1)..(33): Xaa is C or S
XESVAMGEYQKYYTVVGKDIYLISIPSLKTPVX

SEQ ID NO: 33499 - protein, 29 aa, Artificial Sequence
  Cyclic GFR-binding peptide
  MOD_RES (1)..(3): Xaa is C or S
XGXGEVVMDEYQKYVVKENEDIYLMSIPS

SEQ ID NO: 33500 - protein, 33 aa, Artificial Sequence; identical to SEQ ID NO: 5178
  Cyclic GFR-binding peptide
  MOD_RES (31)..(32): Xaa is C or S

SEQ ID NO: 33501 - protein, 31 aa, Artificial Sequence; identical to SEQ ID NO: 5181
  Cyclic GFR-binding peptide
  MOD_RES (2)..(4): Xaa is C or S

SEQ ID NO: 33502 - protein, 27 aa, Artificial Sequence
  Cyclic GFR-binding peptide
MNRYKKLIVNNSSDFYLVSIANLKTPA

SEQ ID NO: 33503 - protein, 28 aa, Artificial Sequence
  Cyclic GFR-binding peptide
  MOD_RES (28)..(28): Xaa is C or S
IMEYQKYVKPKRGVIYLISIPSLAQPVX

SEQ ID NO: 33504 - protein, 35 aa, Artificial Sequence; identical to SEQ ID NO: 5187
  Cyclic GFR-binding peptide
  MOD_RES (32)..(33): Xaa is C or S

SEQ ID NO: 33505 - protein, 26 aa, Artificial Sequence
  Cyclic GFR-binding peptide
MYHYKLVKPTRGVKYLISIPSLDQPV

SEQ ID NO: 33506 - protein, 35 aa, Artificial Sequence; identical to SEQ ID NO: 5189
  Cyclic GFR-binding peptide
  MOD_RES (31)..(32): Xaa is C or S

SEQ ID NO: 33507 - protein, 32 aa, Artificial Sequence
  Cyclic GFR-binding peptide
  MOD_RES (2)..(4): Xaa is C or S
HXGXAKVVMNEYKFKIVNNSSDLYLVSIPELK

SEQ ID NO: 33508 - protein, 38 aa, Artificial Sequence
  Cyclic GFR-binding peptide
  MOD_RES (1)..(3)..(34)..(35): Xaa is C or S
XKXSRVIMEYKFKVKPKRGVLYLISIPELAQPVXXPAA

SEQ ID NO: 33509 - protein, 24 aa, Artificial Sequence
  Cyclic GFR-binding peptide
GEYQKYYTVVGKDIYLISIPSLKT

SEQ ID NO: 33510 - protein, 37 aa, Artificial Sequence
  Cyclic GFR-binding peptide
  MOD_RES (31)..(32): Xaa is C or S
EVVMDYHYKLVVNNAADKYLISIPSLRAPVXXSAPAA

SEQ ID NO: 33511 - protein, 32 aa, Artificial Sequence
  Cyclic GFR-binding peptide
  MOD_RES (30)..(31): Xaa is C or S
VAMGEYQKYYTVVGKDIYLISIPSLKTPVXXA

SEQ ID NO: 33512 - protein, 24 aa, Artificial Sequence
  Cyclic GFR-binding peptide
VIMYHYKLIKPTKGIKYLISIPSL

SEQ ID NO: 33513 - protein, 28 aa, Artificial Sequence
  Cyclic GFR-binding peptide
AKVVMNYHYKLIVNNSSDKYLVSIPSLK

SEQ ID NO: 33514 - protein, 35 aa, Artificial Sequence; identical to SEQ ID NO: 5197
  Cyclic GFR-binding peptide
  MOD_RES (33)..(34): Xaa is C or S

SEQ ID NO: 33515 - protein, 33 aa, Artificial Sequence; identical to SEQ ID NO: 5199
  Cyclic GFR-binding peptide
  MOD_RES (1)..(33): Xaa is C or S

SEQ ID NO: 33516 - protein, 32 aa, Artificial Sequence
  Cyclic GFR-binding peptide
  MOD_RES (1)..(3): Xaa is C or S
XGXGEVVMDEYKFKVVKENEDLYLMSIPELET

SEQ ID NO: 33517 - protein, 39 aa, Artificial Sequence
  Cyclic GFR-binding peptide
  MOD_RES (2)..(34)..(35): Xaa is C or S
GXESVAMGEYQKYYTVVGKDIYLISIPSLKTPVXXAKSA

SEQ ID NO: 33518 - protein, 29 aa, Artificial Sequence
  Cyclic GFR-binding peptide
  MOD_RES (26)..(27): Xaa is C or S
EYQKYVKPTRGVIYLISIPSLDQPVXXPS

SEQ ID NO: 33519 - protein, 33 aa, Artificial Sequence
  Cyclic GFR-binding peptide
  MOD_RES (1)..(33): Xaa is C or S
XAKVVMNEYKFKIVNNSSDLYLVSIPELKTPAX

SEQ ID NO: 33520 - protein, 31 aa, Artificial Sequence
  Cyclic GFR-binding peptide
  MOD_RES (27)..(27): Xaa is C or S
NEYKFKIVNSSDDLYLVSIPELKTPAXTPKT

SEQ ID NO: 33521 - protein, 27 aa, Artificial Sequence
  Cyclic GFR-binding peptide
  MOD_RES (26)..(27): Xaa is C or S
EYKFKIVNNSSDLYLVSIPELKTPAXX

SEQ ID NO: 33522 - protein, 26 aa, Artificial Sequence
  Cyclic GFR-binding peptide
VMERYKKLVVKDYEDFYLMSIANLET

SEQ ID NO: 33523 - protein, 25 aa, Artificial Sequence
  Cyclic GFR-binding peptide
VVMNRYKKLIVNSSDDFYLVSIANL

SEQ ID NO: 33524 - protein, 20 aa, Artificial Sequence
  Cyclic GFR-binding peptide
EYQKYYTVVGKDIYLISIPS

SEQ ID NO: 33525 - protein, 26 aa, Artificial Sequence
  Cyclic GFR-binding peptide
MEYKFKVKPKRGVLYLISIPELAQPV

SEQ ID NO: 33526 - protein, 35 aa, Artificial Sequence
  Cyclic GFR-binding peptide
  MOD_RES (31)..(32): Xaa is C or S
SVAMGRYKKLYTVVGKDFYLISIANLKTPVXXAKS

SEQ ID NO: 33527 - protein, 35 aa, Artificial Sequence
  Cyclic GFR-binding peptide
  MOD_RES (30)..(31): Xaa is C or S
VAMGRYKKLYTVVGKDFYLISIANLKTPVXXAKSA

SEQ ID NO: 33528 - protein, 33 aa, Artificial Sequence; identical to SEQ ID NO: 5207
  Cyclic GFR-binding peptide
  MOD_RES (27)..(28): Xaa is C or S

SEQ ID NO: 33529 - protein, 28 aa, Artificial Sequence
  Cyclic GFR-binding peptide
  MOD_RES (27)..(28): Xaa is C or S
EEYQKYTPVGMDDIYLVSIPSLKTPVXX

SEQ ID NO: 33530 - protein, 30 aa, Artificial Sequence
  Cyclic GFR-binding peptide
GEVVMDEYQKYVVKENEDIYLMSIPSLETP

SEQ ID NO: 33531 - protein, 29 aa, Artificial Sequence
  Cyclic GFR-binding peptide
  MOD_RES (1)..(1): Xaa is C or S
XSRVIMYHYKLVKPKRGVKYLISIPSLAQ

SEQ ID NO: 33532 - protein, 28 aa, Artificial Sequence
  Cyclic GFR-binding peptide
  MOD_RES (2)..(2): Xaa is C or S
GXESVAMGEYQKYYTVVGKDIYLISIPS

SEQ ID NO: 33533 - protein, 28 aa, Artificial Sequence
  Cyclic GFR-binding peptide
VMDRYKKLVVNNAADFYLISIANLRAPV

SEQ ID NO: 33534 - protein, 21 aa, Artificial Sequence
  Cyclic GFR-binding peptide
EYHYKLVVKDYEDKYLMSIPS

SEQ ID NO: 33535 - protein, 24 aa, Artificial Sequence
  Cyclic GFR-binding peptide
DRYKKLVVKENEDFYLMSIANLET

SEQ ID NO: 33536 - protein, 29 aa, Artificial Sequence
  Cyclic GFR-binding peptide
  MOD_RES (1)..(1): Xaa is C or S
XGEVVMEEYQKYVVKDYEDIYLMSIPSLE

SEQ ID NO: 33537 - protein, 36 aa, Artificial Sequence; identical to SEQ ID NO: 5217
  Cyclic GFR-binding peptide
  MOD_RES (30)..(31): Xaa is C or S

SEQ ID NO: 33538 - protein, 33 aa, Artificial Sequence; identical to SEQ ID NO: 5218
  Cyclic GFR-binding peptide
  MOD_RES (30)..(31): Xaa is C or S

SEQ ID NO: 33539 - protein, 21 aa, Artificial Sequence
  Cyclic GFR-binding peptide
EYQKYVKPTRGVIYLISIPSL

SEQ ID NO: 33540 - protein, 39 aa, Artificial Sequence
  Cyclic GFR-binding peptide
  MOD_RES (2)..(4)..(36)..(37): Xaa is C or S
HXGXAKVVMNEYKFKIVNNSSDLYLVSIPELKTPAXXAK

SEQ ID NO: 33541 - protein, 27 aa, Artificial Sequence
  Cyclic GFR-binding peptide
  MOD_RES (27)..(27): Xaa is C or S
NEYQKYIVNSSDDIYLVSIPSLKTPAX

SEQ ID NO: 33542 - protein, 33 aa, Artificial Sequence
  Cyclic GFR-binding peptide
  MOD_RES (2)..(2): Xaa is C or S
GXESVAMGRYKKLYTVVGKDFYLISIANLKTPV

SEQ ID NO: 33543 - protein, 39 aa, Artificial Sequence
  Cyclic GFR-binding peptide
  MOD_RES (1)..(3)..(35): Xaa is C or S
XGXSRVVMNEYQKYIVNSSDDIYLVSIPSLKTPAXTPKT

SEQ ID NO: 33544 - protein, 37 aa, Artificial Sequence
  Cyclic GFR-binding peptide
  MOD_RES (2)..(4)..(36)..(37): Xaa is C or S
RXGXGEVVMEEYKFKVVKDYEDLYLMSIPELETPVXX

SEQ ID NO: 33545 - protein, 37 aa, Artificial Sequence; identical to SEQ ID NO: 5230
  Cyclic GFR-binding peptide
  MOD_RES (2)..(4)..(35)..(36): Xaa is C or S

SEQ ID NO: 33546 - protein, 28 aa, Artificial Sequence
  Cyclic GFR-binding peptide
  MOD_RES (1)..(1): Xaa is C or S
XGEVVMDEYQKYVVKENEDIYLMSIPSL

SEQ ID NO: 33547 - protein, 34 aa, Artificial Sequence
  Cyclic GFR-binding peptide
  MOD_RES (30)..(31): Xaa is C or S
VVMNEYQKYIVNSSDDIYLVSIPSLQTPAXXPKP

SEQ ID NO: 33548 - protein, 32 aa, Artificial Sequence
  Cyclic GFR-binding peptide
  MOD_RES (1)..(3): Xaa is C or S
XGXGEVVMEEYKFKVVKDYEDLYLMSIPELET

SEQ ID NO: 33549 - protein, 30 aa, Artificial Sequence; identical to SEQ ID NO: 5232
  Cyclic GFR-binding peptide
  MOD_RES (28)..(29): Xaa is C or S

SEQ ID NO: 33550 - protein, 28 aa, Artificial Sequence
  Cyclic GFR-binding peptide
  MOD_RES (2)..(2): Xaa is C or S
GXAKVVMNEYKFKIVNNSSDLYLVSIPE

SEQ ID NO: 33551 - protein, 36 aa, Artificial Sequence
  Cyclic GFR-binding peptide
  MOD_RES (1)..(3)..(35)..(36): Xaa is C or S
XGXGEVVMEEYQKYVVKDYEDIYLMSIPSLETPVXX

SEQ ID NO: 33552 - protein, 30 aa, Artificial Sequence; identical to SEQ ID NO: 5238
  Cyclic GFR-binding peptide

SEQ ID NO: 33553 - protein, 22 aa, Artificial Sequence
  Cyclic GFR-binding peptide
DRYKKLVVKENEDFYLMSIANL

SEQ ID NO: 33554 - protein, 31 aa, Artificial Sequence
  Cyclic GFR-binding peptide
  MOD_RES (28)..(29): Xaa is C or S
MDRYKKLVVNNAADFYLISIANLRAPVXXSA

SEQ ID NO: 33555 - protein, 35 aa, Artificial Sequence; identical to SEQ ID NO: 5240
  Cyclic GFR-binding peptide
  MOD_RES (32)..(33): Xaa is C or S

SEQ ID NO: 33556 - protein, 34 aa, Artificial Sequence
  Cyclic GFR-binding peptide
  MOD_RES (2)..(33)..(34): Xaa is C or S
KXSRVIMEYKFKVKPKRGVLYLISIPELAQPVXX

SEQ ID NO: 33557 - protein, 25 aa, Artificial Sequence
  Cyclic GFR-binding peptide
MEYKFKVKPKRGVLYLISIPELAQP

SEQ ID NO: 33558 - protein, 35 aa, Artificial Sequence
  Cyclic GFR-binding peptide
  MOD_RES (1)..(3)..(35): Xaa is C or S
XGXSRVVMNEYQKYIVNSSDDIYLVSIPSLKTPAX

SEQ ID NO: 33559 - protein, 30 aa, Artificial Sequence; identical to SEQ ID NO: 5246
  Cyclic GFR-binding peptide
  MOD_RES (29)..(30): Xaa is C or S

SEQ ID NO: 33560 - protein, 32 aa, Artificial Sequence; identical to SEQ ID NO: 5247
  Cyclic GFR-binding peptide
  MOD_RES (28)..(29): Xaa is C or S

SEQ ID NO: 33561 - protein, 39 aa, Artificial Sequence; identical to SEQ ID NO: 5248
  Cyclic GFR-binding peptide
  MOD_RES (2)..(4)..(35)..(36): Xaa is C or S

SEQ ID NO: 33562 - protein, 24 aa, Artificial Sequence
  Cyclic GFR-binding peptide
MEEYKFKVVKDYEDLYLMSIPELE

SEQ ID NO: 33563 - protein, 29 aa, Artificial Sequence
  Cyclic GFR-binding peptide
EVVMDRYKKLVVKENEDFYLMSIANLETP

SEQ ID NO: 33564 - protein, 30 aa, Artificial Sequence
  Cyclic GFR-binding peptide
  MOD_RES (1)..(3): Xaa is C or S
XGXESVAMGRYKKLYTVVGKDFYLISIANL

SEQ ID NO: 33565 - protein, 28 aa, Artificial Sequence
  Cyclic GFR-binding peptide
  MOD_RES (1)..(1): Xaa is C or S
XSKVIMEYKFKIKPTKGILYLISIPELD

SEQ ID NO: 33566 - protein, 33 aa, Artificial Sequence; identical to SEQ ID NO: 5252
  Cyclic GFR-binding peptide
  MOD_RES (28)..(29): Xaa is C or S

SEQ ID NO: 33567 - protein, 32 aa, Artificial Sequence
  Cyclic GFR-binding peptide
  MOD_RES (28)..(29): Xaa is C or S
MDRYKKLVVNNAADFYLISIANLRAPVXXSAP

SEQ ID NO: 33568 - protein, 35 aa, Artificial Sequence
  Cyclic GFR-binding peptide
  MOD_RES (2)..(4)..(35): Xaa is C or S
SXKXSKVVMEYKFKVKPTRGVLYLISIPELDQPVX

SEQ ID NO: 33569 - protein, 30 aa, Artificial Sequence
  Cyclic GFR-binding peptide
  MOD_RES (29)..(30): Xaa is C or S
VMNEYQKYIVNSSDDIYLVSIPSLQTPAXX

SEQ ID NO: 33570 - protein, 31 aa, Artificial Sequence; identical to SEQ ID NO: 5254
  Cyclic GFR-binding peptide
  MOD_RES (31)..(31): Xaa is C or S

SEQ ID NO: 33571 - protein, 28 aa, Artificial Sequence
  Cyclic GFR-binding peptide
  MOD_RES (1)..(1): Xaa is C or S
XSKVVMRYKKLVKPTRGVFYLISIANLD

SEQ ID NO: 33572 - protein, 33 aa, Artificial Sequence
  Cyclic GFR-binding peptide
  MOD_RES (27)..(28): Xaa is C or S
NEYKFKIVNNSSDLYLVSIPELKTPAXXAKPVA

SEQ ID NO: 33573 - protein, 26 aa, Artificial Sequence
  Cyclic GFR-binding peptide
VMEEYKFKVVKDYEDLYLMSIPELET

SEQ ID NO: 33574 - protein, 33 aa, Artificial Sequence
  Cyclic GFR-binding peptide
  MOD_RES (2)..(4): Xaa is C or S
RXGXAEVVMDEYKFKVVNNAADLYLISIPELRA

SEQ ID NO: 33575 - protein, 29 aa, Artificial Sequence
  Cyclic GFR-binding peptide
  MOD_RES (2)..(4): Xaa is C or S
SXKXSKVIMYHYKLIKPTKGIKYLISIPS

SEQ ID NO: 33576 - protein, 28 aa, Artificial Sequence
  Cyclic GFR-binding peptide
AVSMGEEYQKYTPVGMDDIYLVSIPSLK

SEQ ID NO: 33577 - protein, 33 aa, Artificial Sequence; identical to SEQ ID NO: 5262
  Cyclic GFR-binding peptide
  MOD_RES (2)..(4): Xaa is C or S

SEQ ID NO: 33578 - protein, 27 aa, Artificial Sequence
  Cyclic GFR-binding peptide
  MOD_RES (2)..(2): Xaa is C or S
KXSKVVMEYKFKVKPTRGVLYLISIPE

SEQ ID NO: 33579 - protein, 39 aa, Artificial Sequence; identical to SEQ ID NO: 5264
  Cyclic GFR-binding peptide
  MOD_RES (1)..(3)..(35)..(36): Xaa is C or S

SEQ ID NO: 33580 - protein, 40 aa, Artificial Sequence
  Cyclic GFR-binding peptide
  MOD_RES (2)..(35)..(36): Xaa is C or S
GXEAVSMGEEYKFKTPVGMDDLYLVSIPELKTPVXXAKGV

SEQ ID NO: 33581 - protein, 31 aa, Artificial Sequence
  Cyclic GFR-binding peptide
  MOD_RES (26)..(27): Xaa is C or S
EYQKYVKPKRGVIYLISIPSLAQPVXXPAAS

SEQ ID NO: 33582 - protein, 23 aa, Artificial Sequence
  Cyclic GFR-binding peptide
YHYKLIVNNSSDKYLVSIPSLKT

SEQ ID NO: 33583 - protein, 34 aa, Artificial Sequence
  Cyclic GFR-binding peptide
  MOD_RES (29)..(30): Xaa is C or S
AMGYHYKLYTVVGKDKYLISIPSLKTPVXXAKSA

SEQ ID NO: 33584 - protein, 24 aa, Artificial Sequence
  Cyclic GFR-binding peptide
MNRYKKLIVNNSSDFYLVSIANLK

SEQ ID NO: 33585 - protein, 28 aa, Artificial Sequence
  Cyclic GFR-binding peptide
VVMERYKKLVVKDYEDFYLMSIANLETP

SEQ ID NO: 33586 - protein, 29 aa, Artificial Sequence
  Cyclic GFR-binding peptide
KVVMEYQKYVKPTRGVIYLISIPSLDQPV

SEQ ID NO: 33587 - protein, 37 aa, Artificial Sequence
  Cyclic GFR-binding peptide
  MOD_RES (2)..(33)..(34): Xaa is C or S
KXSKVIMEYQKYIKPTKGIIYLISIPSLDQSVXXPSA

SEQ ID NO: 33588 - protein, 29 aa, Artificial Sequence
  Cyclic GFR-binding peptide
  MOD_RES (2)..(2): Xaa is C or S
GXGEVVMERYKKLVVKDYEDFYLMSIANL

SEQ ID NO: 33589 - protein, 25 aa, Artificial Sequence
  Cyclic GFR-binding peptide
IMEYKFKIKPTKGILYLISIPELDQ

SEQ ID NO: 33590 - protein, 27 aa, Artificial Sequence
  Cyclic GFR-binding peptide
  MOD_RES (26)..(27): Xaa is C or S
EYKFKIVNSSDDLYLVSIPELQTPAXX

SEQ ID NO: 33591 - protein, 35 aa, Artificial Sequence
  Cyclic GFR-binding peptide
  MOD_RES (30)..(31): Xaa is C or S
VVMDEYQKYVVKENEDIYLMSIPSLETPVXXAKPI

SEQ ID NO: 33592 - protein, 30 aa, Artificial Sequence; identical to SEQ ID NO: 5287
  Cyclic GFR-binding peptide
  MOD_RES (30)..(30): Xaa is C or S

SEQ ID NO: 33593 - protein, 39 aa, Artificial Sequence
  Cyclic GFR-binding peptide
  MOD_RES (1)..(33)..(34): Xaa is C or S
XESVAMGEYQKYYTVVGKDIYLISIPSLKTPVXXAKSAK

SEQ ID NO: 33594 - protein, 31 aa, Artificial Sequence
  Cyclic GFR-binding peptide
  MOD_RES (1)..(3): Xaa is C or S
XGXEAVSMGEEYQKYTPVGMDDIYLVSIPSL

SEQ ID NO: 33595 - protein, 30 aa, Artificial Sequence
  Cyclic GFR-binding peptide
  MOD_RES (1)..(3): Xaa is C or S
XGXAEVVMDRYKKLVVNNAADFYLISIANL

SEQ ID NO: 33596 - protein, 30 aa, Artificial Sequence
  Cyclic GFR-binding peptide
  MOD_RES (1)..(1): Xaa is C or S
XSKVIMEYKFKIKPTKGILYLISIPELDQS

SEQ ID NO: 33597 - protein, 28 aa, Artificial Sequence
  Cyclic GFR-binding peptide
  MOD_RES (26)..(27): Xaa is C or S
EYQKYIVNSSDDIYLVSIPSLKTPAXXP

SEQ ID NO: 33598 - protein, 34 aa, Artificial Sequence; identical to SEQ ID NO: 5291
  Cyclic GFR-binding peptide
  MOD_RES (2)..(34): Xaa is C or S

SEQ ID NO: 33599 - protein, 27 aa, Artificial Sequence
  Cyclic GFR-binding peptide
ARVVMNEYKFKIVNSSDDLYLVSIPEL

SEQ ID NO: 33600 - protein, 33 aa, Artificial Sequence
  Cyclic GFR-binding peptide
  MOD_RES (31)..(31): Xaa is C or S
RVVMNEYQKYIVNSSDDIYLVSIPSLKTPAXTP

SEQ ID NO: 33601 - protein, 27 aa, Artificial Sequence
  Cyclic GFR-binding peptide
VMDEYKFKVVNNAADLYLISIPELRAP

SEQ ID NO: 33602 - protein, 23 aa, Artificial Sequence
  Cyclic GFR-binding peptide
MNEYQKYIVNSSDDIYLVSIPSL

SEQ ID NO: 33603 - protein, 32 aa, Artificial Sequence; identical to SEQ ID NO: 5296
  Cyclic GFR-binding peptide
  MOD_RES (1)..(3): Xaa is C or S

SEQ ID NO: 33604 - protein, 36 aa, Artificial Sequence; identical to SEQ ID NO: 5299
  Cyclic GFR-binding peptide
  MOD_RES (32)..(33): Xaa is C or S

SEQ ID NO: 33605 - protein, 24 aa, Artificial Sequence
  Cyclic GFR-binding peptide
GRYKKLYTVVGKDFYLISIANLKT

SEQ ID NO: 33606 - protein, 39 aa, Artificial Sequence
  Cyclic GFR-binding peptide
  MOD_RES (2)..(34)..(35): Xaa is C or S
GXGEVVMEEYKFKVVKDYEDLYLMSIPELETPVXXAKPI

SEQ ID NO: 33607 - protein, 31 aa, Artificial Sequence; identical to SEQ ID NO: 5300
  Cyclic GFR-binding peptide
  MOD_RES (1)..(1): Xaa is C or S

SEQ ID NO: 33608 - protein, 31 aa, Artificial Sequence
  Cyclic GFR-binding peptide
  MOD_RES (2)..(2): Xaa is C or S
KXSKVIMEYKFKIKPTKGILYLISIPELDQS

SEQ ID NO: 33609 - protein, 37 aa, Artificial Sequence
  Cyclic GFR-binding peptide
  MOD_RES (2)..(4)..(36): Xaa is C or S
HXGXSRVVMNEYKFKIVNSSDDLYLVSIPELKTPAXT

SEQ ID NO: 33610 - protein, 29 aa, Artificial Sequence
  Cyclic GFR-binding peptide
  MOD_RES (27)..(28): Xaa is C or S
MRYKKLVKPKRGVFYLISIANLAQPVXXP

SEQ ID NO: 33611 - protein, 28 aa, Artificial Sequence
  Cyclic GFR-binding peptide
VMNEYKFKIVNSSDDLYLVSIPELQTPA

SEQ ID NO: 33612 - protein, 39 aa, Artificial Sequence
  Cyclic GFR-binding peptide
  MOD_RES (2)..(4)..(36)..(37): Xaa is C or S
RXGXGEVVMDEYQKYVVKENEDIYLMSIPSLETPVXXAK

SEQ ID NO: 33613 - protein, 34 aa, Artificial Sequence
  Cyclic GFR-binding peptide
  MOD_RES (31)..(32): Xaa is C or S
VSMGEEYKFKTPVGMDDLYLVSIPELKTPVXXAK

SEQ ID NO: 33614 - protein, 38 aa, Artificial Sequence
  Cyclic GFR-binding peptide
  MOD_RES (2)..(4)..(36)..(37): Xaa is C or S
HXGXAKVVMNEYQKYIVNNSSDIYLVSIPSLKTPAXXA

SEQ ID NO: 33615 - protein, 25 aa, Artificial Sequence
  Cyclic GFR-binding peptide
YHYKLVVNNAADKYLISIPSLRAPV

SEQ ID NO: 33616 - protein, 26 aa, Artificial Sequence
  Cyclic GFR-binding peptide
AKVVMNEYKFKIVNNSSDLYLVSIPE

SEQ ID NO: 33617 - protein, 35 aa, Artificial Sequence
  Cyclic GFR-binding peptide
  MOD_RES (32)..(33): Xaa is C or S
ARVVMNEYKFKIVNSSDDLYLVSIPELQTPAXXPK

SEQ ID NO: 33618 - protein, 22 aa, Artificial Sequence
  Cyclic GFR-binding peptide
EEYKFKTPVGMDDLYLVSIPEL

SEQ ID NO: 33619 - protein, 34 aa, Artificial Sequence
  Cyclic GFR-binding peptide
  MOD_RES (1)..(33)..(34): Xaa is C or S
XAKVVMNEYKFKIVNNSSDLYLVSIPELKTPAXX

SEQ ID NO: 33620 - protein, 27 aa, Artificial Sequence
  Cyclic GFR-binding peptide
VIMRYKKLIKPTKGIFYLISIANLDQS

SEQ ID NO: 33621 - protein, 25 aa, Artificial Sequence
  Cyclic GFR-binding peptide
SKVIMRYKKLIKPTKGIFYLISIAN

SEQ ID NO: 33622 - protein, 35 aa, Artificial Sequence
  Cyclic GFR-binding peptide
  MOD_RES (30)..(31): Xaa is C or S
VVMNEYKFKIVNSSDDLYLVSIPELQTPAXXPKPV

SEQ ID NO: 33623 - protein, 32 aa, Artificial Sequence
  Cyclic GFR-binding peptide
  MOD_RES (2)..(2): Xaa is C or S
GXGEVVMDEYKFKVVKENEDLYLMSIPELETP

SEQ ID NO: 33624 - protein, 31 aa, Artificial Sequence; identical to SEQ ID NO: 5312
  Cyclic GFR-binding peptide
  MOD_RES (31)..(31): Xaa is C or S

SEQ ID NO: 33625 - protein, 25 aa, Artificial Sequence
  Cyclic GFR-binding peptide
VVMDYHYKLVVNNAADKYLISIPSL

SEQ ID NO: 33626 - protein, 37 aa, Artificial Sequence
  Cyclic GFR-binding peptide
  MOD_RES (32)..(32): Xaa is C or S
SRVVMNEYKFKIVNSSDDLYLVSIPELKTPAXTPKTV

SEQ ID NO: 33627 - protein, 23 aa, Artificial Sequence
  Cyclic GFR-binding peptide
MEYQKYVKPKRGVIYLISIPSLA

SEQ ID NO: 33628 - protein, 23 aa, Artificial Sequence
  Cyclic GFR-binding peptide
EYKFKIVNSSDDLYLVSIPELKT

SEQ ID NO: 33629 - protein, 29 aa, Artificial Sequence
  Cyclic GFR-binding peptide
  MOD_RES (28)..(29): Xaa is C or S
MNEYQKYIVNNSSDIYLVSIPSLKTPAXX

SEQ ID NO: 33630 - protein, 31 aa, Artificial Sequence
  Cyclic GFR-binding peptide
  MOD_RES (2)..(4): Xaa is C or S
HXGXAKVVMNEYQKYIVNNSSDIYLVSIPSL

SEQ ID NO: 33631 - protein, 35 aa, Artificial Sequence
  Cyclic GFR-binding peptide
  MOD_RES (32)..(33): Xaa is C or S
AKVVMNEYKFKIVNNSSDLYLVSIPELKTPAXXAK

SEQ ID NO: 33632 - protein, 24 aa, Artificial Sequence
  Cyclic GFR-binding peptide
IMYHYKLVKPKRGVKYLISIPSLA

SEQ ID NO: 33633 - protein, 26 aa, Artificial Sequence
  Cyclic GFR-binding peptide
GEVVMDEYQKYVVKENEDIYLMSIPS

SEQ ID NO: 33634 - protein, 31 aa, Artificial Sequence
  Cyclic GFR-binding peptide
  MOD_RES (2)..(4): Xaa is C or S
HXGXAKVVMNEYKFKIVNNSSDLYLVSIPEL

SEQ ID NO: 33635 - protein, 25 aa, Artificial Sequence
  Cyclic GFR-binding peptide
MNEYKFKIVNSSDDLYLVSIPELQT

SEQ ID NO: 33636 - protein, 34 aa, Artificial Sequence; identical to SEQ ID NO: 5324
  Cyclic GFR-binding peptide
  MOD_RES (28)..(29): Xaa is C or S

SEQ ID NO: 33637 - protein, 29 aa, Artificial Sequence
  Cyclic GFR-binding peptide
  MOD_RES (2)..(2): Xaa is C or S
KXSKVIMEYQKYIKPTKGIIYLISIPSLD

SEQ ID NO: 33638 - protein, 28 aa, Artificial Sequence
  Cyclic GFR-binding peptide
  MOD_RES (2)..(2): Xaa is C or S
GXGEVVMDYHYKLVVKENEDKYLMSIPS

SEQ ID NO: 33639 - protein, 34 aa, Artificial Sequence; identical to SEQ ID NO: 5333
  Cyclic GFR-binding peptide
  MOD_RES (2)..(34): Xaa is C or S

SEQ ID NO: 33640 - protein, 27 aa, Artificial Sequence
  Cyclic GFR-binding peptide
VVMNEYQKYIVNSSDDIYLVSIPSLQT

SEQ ID NO: 33641 - protein, 33 aa, Artificial Sequence
  Cyclic GFR-binding peptide
  MOD_RES (29)..(30): Xaa is C or S
AMGRYKKLYTVVGKDFYLISIANLKTPVXXAKS

SEQ ID NO: 33642 - protein, 36 aa, Artificial Sequence
  Cyclic GFR-binding peptide
  MOD_RES (31)..(32): Xaa is C or S
EVVMEEYKFKVVKDYEDLYLMSIPELETPVXXAKPI

SEQ ID NO: 33643 - protein, 36 aa, Artificial Sequence; identical to SEQ ID NO: 5337
  Cyclic GFR-binding peptide
  MOD_RES (31)..(32): Xaa is C or S

SEQ ID NO: 33644 - protein, 38 aa, Artificial Sequence
  Cyclic GFR-binding peptide
  MOD_RES (1)..(33)..(34): Xaa is C or S
XESVAMGRYKKLYTVVGKDFYLISIANLKTPVXXAKSA

SEQ ID NO: 33645 - protein, 28 aa, Artificial Sequence
  Cyclic GFR-binding peptide
VMDEYKFKVVNNAADLYLISIPELRAPV

SEQ ID NO: 33646 - protein, 37 aa, Artificial Sequence
  Cyclic GFR-binding peptide
  MOD_RES (1)..(33)..(34): Xaa is C or S
XGEVVMEEYQKYVVKDYEDIYLMSIPSLETPVXXAKP

SEQ ID NO: 33647 - protein, 34 aa, Artificial Sequence; identical to SEQ ID NO: 5339
  Cyclic GFR-binding peptide
  MOD_RES (30)..(31): Xaa is C or S

SEQ ID NO: 33648 - protein, 30 aa, Artificial Sequence
  Cyclic GFR-binding peptide
  MOD_RES (2)..(4): Xaa is C or S
HXGXSRVVMNEYKFKIVNSSDDLYLVSIPE

SEQ ID NO: 33649 - protein, 32 aa, Artificial Sequence
  Cyclic GFR-binding peptide
  MOD_RES (1)..(1): Xaa is C or S
XEAVSMGEEYKFKTPVGMDDLYLVSIPELKTP

SEQ ID NO: 33650 - protein, 25 aa, Artificial Sequence
  Cyclic GFR-binding peptide
EVVMDEYKFKVVNNAADLYLISIPE

SEQ ID NO: 33651 - protein, 33 aa, Artificial Sequence; identical to SEQ ID NO: 5342
  Cyclic GFR-binding peptide
  MOD_RES (28)..(28): Xaa is C or S

SEQ ID NO: 33652 - protein, 32 aa, Artificial Sequence; identical to SEQ ID NO: 5345
  Cyclic GFR-binding peptide
  MOD_RES (1)..(3): Xaa is C or S

SEQ ID NO: 33653 - protein, 34 aa, Artificial Sequence; identical to SEQ ID NO: 5347
  Cyclic GFR-binding peptide
  MOD_RES (1)..(3): Xaa is C or S

SEQ ID NO: 33654 - protein, 32 aa, Artificial Sequence; identical to SEQ ID NO: 5348
  Cyclic GFR-binding peptide
  MOD_RES (26)..(27): Xaa is C or S

SEQ ID NO: 33655 - protein, 31 aa, Artificial Sequence; identical to SEQ ID NO: 5349
  Cyclic GFR-binding peptide
  MOD_RES (2)..(2): Xaa is C or S

SEQ ID NO: 33656 - protein, 23 aa, Artificial Sequence
  Cyclic GFR-binding peptide
EYKFKTPVGMDDLYLVSIPELKT

SEQ ID NO: 33657 - protein, 30 aa, Artificial Sequence; identical to SEQ ID NO: 5352
  Cyclic GFR-binding peptide
  MOD_RES (29)..(30): Xaa is C or S

SEQ ID NO: 33658 - protein, 34 aa, Artificial Sequence
  Cyclic GFR-binding peptide
  MOD_RES (1)..(3): Xaa is C or S
XGXESVAMGRYKKLYTVVGKDFYLISIANLKTPV

SEQ ID NO: 33659 - protein, 31 aa, Artificial Sequence; identical to SEQ ID NO: 5355
  Cyclic GFR-binding peptide
  MOD_RES (30)..(31): Xaa is C or S

SEQ ID NO: 33660 - protein, 33 aa, Artificial Sequence; identical to SEQ ID NO: 5356
  Cyclic GFR-binding peptide
  MOD_RES (29)..(30): Xaa is C or S

SEQ ID NO: 33661 - protein, 29 aa, Artificial Sequence
  Cyclic GFR-binding peptide
  MOD_RES (26)..(27): Xaa is C or S
EYKFKVVKENEDLYLMSIPELETPVXXAK

SEQ ID NO: 33662 - protein, 31 aa, Artificial Sequence; identical to SEQ ID NO: 5357
  Cyclic GFR-binding peptide
  MOD_RES (27)..(27): Xaa is C or S

SEQ ID NO: 33663 - protein, 35 aa, Artificial Sequence
  Cyclic GFR-binding peptide
  MOD_RES (1)..(32)..(33): Xaa is C or S
XSRVIMEYQKYVKPKRGVIYLISIPSLAQPVXXPA

SEQ ID NO: 33664 - protein, 31 aa, Artificial Sequence
  Cyclic GFR-binding peptide
  MOD_RES (29)..(30): Xaa is C or S
AMGRYKKLYTVVGKDFYLISIANLKTPVXXA

SEQ ID NO: 33665 - protein, 33 aa, Artificial Sequence
  Cyclic GFR-binding peptide
  MOD_RES (1)..(3): Xaa is C or S
XGXAEVVMDYHYKLVVNNAADKYLISIPSLRAP

SEQ ID NO: 33666 - protein, 33 aa, Artificial Sequence; identical to SEQ ID NO: 5359
  Cyclic GFR-binding peptide
  MOD_RES (2)..(4): Xaa is C or S

SEQ ID NO: 33667 - protein, 34 aa, Artificial Sequence
  Cyclic GFR-binding peptide
  MOD_RES (2)..(34): Xaa is C or S
GXSRVVMNEYKFKIVNSSDDLYLVSIPELKTPAX

SEQ ID NO: 33668 - protein, 26 aa, Artificial Sequence
  Cyclic GFR-binding peptide
  MOD_RES (26)..(26): Xaa is C or S
YHYKLIVNNSSDKYLVSIPSLKTPAX

SEQ ID NO: 33669 - protein, 31 aa, Artificial Sequence; identical to SEQ ID NO: 5363
  Cyclic GFR-binding peptide
  MOD_RES (1)..(3): Xaa is C or S

SEQ ID NO: 33670 - protein, 23 aa, Artificial Sequence
  Cyclic GFR-binding peptide
VMDEYKFKVVKENEDLYLMSIPE

SEQ ID NO: 33671 - protein, 28 aa, Artificial Sequence
  Cyclic GFR-binding peptide
  MOD_RES (2)..(2): Xaa is C or S
GXSRVVMNEYQKYIVNSSDDIYLVSIPS

SEQ ID NO: 33672 - protein, 34 aa, Artificial Sequence
  Cyclic GFR-binding peptide
  MOD_RES (1)..(32)..(33): Xaa is C or S
XSKVVMEYKFKVKPTRGVLYLISIPELDQPVXXP

SEQ ID NO: 33673 - protein, 25 aa, Artificial Sequence
  Cyclic GFR-binding peptide
DYHYKLVVKENEDKYLMSIPSLETP

SEQ ID NO: 33674 - protein, 37 aa, Artificial Sequence; identical to SEQ ID NO: 5366
  Cyclic GFR-binding peptide
  MOD_RES (1)..(33)..(34): Xaa is C or S

SEQ ID NO: 33675 - protein, 32 aa, Artificial Sequence
  Cyclic GFR-binding peptide
  MOD_RES (2)..(4): Xaa is C or S
RXGXESVAMGEYKFKYTVVGKDLYLISIPELK

SEQ ID NO: 33676 - protein, 32 aa, Artificial Sequence; identical to SEQ ID NO: 5368
  Cyclic GFR-binding peptide
  MOD_RES (1)..(3): Xaa is C or S

SEQ ID NO: 33677 - protein, 28 aa, Artificial Sequence
  Cyclic GFR-binding peptide
  MOD_RES (26)..(27): Xaa is C or S
EYQKYVVKENEDIYLMSIPSLETPVXXA

SEQ ID NO: 33678 - protein, 35 aa, Artificial Sequence
  Cyclic GFR-binding peptide
  MOD_RES (30)..(31): Xaa is C or S
KVIMEYQKYIKPTKGIIYLISIPSLDQSVXXPSAS

SEQ ID NO: 33679 - protein, 36 aa, Artificial Sequence
  Cyclic GFR-binding peptide
  MOD_RES (1)..(33)..(34): Xaa is C or S
XESVAMGRYKKLYTVVGKDFYLISIANLKTPVXXAK

SEQ ID NO: 33680 - protein, 34 aa, Artificial Sequence; identical to SEQ ID NO: 5372
  Cyclic GFR-binding peptide
  MOD_RES (32)..(33): Xaa is C or S

SEQ ID NO: 33681 - protein, 22 aa, Artificial Sequence
  Cyclic GFR-binding peptide
YHYKLIVNNSSDKYLVSIPSLK

SEQ ID NO: 33682 - protein, 35 aa, Artificial Sequence; identical to SEQ ID NO: 5375
  Cyclic GFR-binding peptide
  MOD_RES (2)..(4): Xaa is C or S

SEQ ID NO: 33683 - protein, 33 aa, Artificial Sequence
  Cyclic GFR-binding peptide
  MOD_RES (31)..(32): Xaa is C or S
SVAMGYHYKLYTVVGKDKYLISIPSLKTPVXXA

SEQ ID NO: 33684 - protein, 29 aa, Artificial Sequence
  Cyclic GFR-binding peptide
EVVMDEYKFKVVKENEDLYLMSIPELETP

SEQ ID NO: 33685 - protein, 36 aa, Artificial Sequence
  Cyclic GFR-binding peptide
  MOD_RES (1)..(3)..(35)..(36): Xaa is C or S
XGXGEVVMDEYQKYVVKENEDIYLMSIPSLETPVXX

SEQ ID NO: 33686 - protein, 33 aa, Artificial Sequence
  Cyclic GFR-binding peptide
  MOD_RES (1)..(33): Xaa is C or S
XAEVVMDEYKFKVVNNAADLYLISIPELRAPVX

SEQ ID NO: 33687 - protein, 32 aa, Artificial Sequence; identical to SEQ ID NO: 5380
  Cyclic GFR-binding peptide
  MOD_RES (31)..(32): Xaa is C or S

SEQ ID NO: 33688 - protein, 32 aa, Artificial Sequence
  Cyclic GFR-binding peptide
  MOD_RES (30)..(31): Xaa is C or S
VAMGYHYKLYTVVGKDKYLISIPSLKTPVXXA

SEQ ID NO: 33689 - protein, 35 aa, Artificial Sequence; identical to SEQ ID NO: 5382
  Cyclic GFR-binding peptide
  MOD_RES (32)..(32): Xaa is C or S

SEQ ID NO: 33690 - protein, 31 aa, Artificial Sequence; identical to SEQ ID NO: 5384
  Cyclic GFR-binding peptide
  MOD_RES (26)..(27): Xaa is C or S

SEQ ID NO: 33691 - protein, 35 aa, Artificial Sequence; identical to SEQ ID NO: 5385
  Cyclic GFR-binding peptide
  MOD_RES (31)..(32): Xaa is C or S

SEQ ID NO: 33692 - protein, 38 aa, Artificial Sequence
  Cyclic GFR-binding peptide
  MOD_RES (1)..(33)..(34): Xaa is C or S
XARVVMNEYQKYIVNSSDDIYLVSIPSLQTPAXXPKPV

SEQ ID NO: 33693 - protein, 31 aa, Artificial Sequence; identical to SEQ ID NO: 5387
  Cyclic GFR-binding peptide
  MOD_RES (28)..(29): Xaa is C or S

SEQ ID NO: 33694 - protein, 39 aa, Artificial Sequence; identical to SEQ ID NO: 5389
  Cyclic GFR-binding peptide
  MOD_RES (1)..(3)..(36)..(37): Xaa is C or S

SEQ ID NO: 33695 - protein, 38 aa, Artificial Sequence
  Cyclic GFR-binding peptide
  MOD_RES (2)..(35)..(36): Xaa is C or S
GXEAVSMGEEYKFKTPVGMDDLYLVSIPELKTPVXXAK

SEQ ID NO: 33696 - protein, 26 aa, Artificial Sequence
  Cyclic GFR-binding peptide
MRYKKLVKPKRGVFYLISIANLAQPV

SEQ ID NO: 33697 - protein, 21 aa, Artificial Sequence
  Cyclic GFR-binding peptide
MYHYKLVKPTRGVKYLISIPS

SEQ ID NO: 33698 - protein, 26 aa, Artificial Sequence
  Cyclic GFR-binding peptide
MGEEYQKYTPVGMDDIYLVSIPSLKT

SEQ ID NO: 33699 - protein, 34 aa, Artificial Sequence
  Cyclic GFR-binding peptide
  MOD_RES (1)..(33)..(34): Xaa is C or S
XESVAMGEYQKYYTVVGKDIYLISIPSLKTPVXX

SEQ ID NO: 33700 - protein, 32 aa, Artificial Sequence
  Cyclic GFR-binding peptide
  MOD_RES (30)..(31): Xaa is C or S
VVMNEYKFKIVNSSDDLYLVSIPELKTPAXXP

SEQ ID NO: 33701 - protein, 31 aa, Artificial Sequence
  Cyclic GFR-binding peptide
  MOD_RES (31)..(31): Xaa is C or S
SRVIMEYKFKVKPKRGVLYLISIPELAQPVX

SEQ ID NO: 33702 - protein, 22 aa, Artificial Sequence
  Cyclic GFR-binding peptide
MYHYKLIKPTKGIKYLISIPSL

SEQ ID NO: 33703 - protein, 36 aa, Artificial Sequence
  Cyclic GFR-binding peptide
  MOD_RES (1)..(3)..(34)..(35): Xaa is C or S
XKXSRVIMEYKFKVKPKRGVLYLISIPELAQPVXXP

SEQ ID NO: 33704 - protein, 22 aa, Artificial Sequence
  Cyclic GFR-binding peptide
NEYKFKIVNSSDDLYLVSIPEL

SEQ ID NO: 33705 - protein, 30 aa, Artificial Sequence
  Cyclic GFR-binding peptide
  MOD_RES (27)..(28): Xaa is C or S
GEYQKYYTVVGKDIYLISIPSLKTPVXXAK

SEQ ID NO: 33706 - protein, 29 aa, Artificial Sequence
  Cyclic GFR-binding peptide
  MOD_RES (1)..(3): Xaa is C or S
XKXSKVVMEYKFKVKPTRGVLYLISIPEL

SEQ ID NO: 33707 - protein, 33 aa, Artificial Sequence
  Cyclic GFR-binding peptide
  MOD_RES (1)..(3): Xaa is C or S
XGXEAVSMGEEYKFKTPVGMDDLYLVSIPELKT

SEQ ID NO: 33708 - protein, 28 aa, Artificial Sequence
  Cyclic GFR-binding peptide
  MOD_RES (27)..(28): Xaa is C or S
GRYKKLYTVVGKDFYLISIANLKTPVXX

SEQ ID NO: 33709 - protein, 26 aa, Artificial Sequence
  Cyclic GFR-binding peptide
  MOD_RES (26)..(26): Xaa is C or S
YHYKLVKPTRGVKYLISIPSLDQPVX

SEQ ID NO: 33710 - protein, 26 aa, Artificial Sequence
  Cyclic GFR-binding peptide
ESVAMGRYKKLYTVVGKDFYLISIAN

SEQ ID NO: 33711 - protein, 31 aa, Artificial Sequence
  Cyclic GFR-binding peptide
  MOD_RES (1)..(1): Xaa is C or S
XSRVIMEYKFKVKPKRGVLYLISIPELAQPV

SEQ ID NO: 33712 - protein, 24 aa, Artificial Sequence
  Cyclic GFR-binding peptide
EYKFKIVNNSSDLYLVSIPELKTP

SEQ ID NO: 33713 - protein, 32 aa, Artificial Sequence; identical to SEQ ID NO: 5405
  Cyclic GFR-binding peptide
  MOD_RES (31)..(32): Xaa is C or S

SEQ ID NO: 33714 - protein, 22 aa, Artificial Sequence
  Cyclic GFR-binding peptide
VMEYQKYVKPTRGVIYLISIPS

SEQ ID NO: 33715 - protein, 33 aa, Artificial Sequence
  Cyclic GFR-binding peptide
  MOD_RES (1)..(32)..(33): Xaa is C or S
XSRVIMEYKFKVKPKRGVLYLISIPELAQPVXX

SEQ ID NO: 33716 - protein, 24 aa, Artificial Sequence
  Cyclic GFR-binding peptide
VVMNYHYKLIVNSSDDKYLVSIPS

SEQ ID NO: 33717 - protein, 35 aa, Artificial Sequence; identical to SEQ ID NO: 5410
  Cyclic GFR-binding peptide
  MOD_RES (2)..(4): Xaa is C or S

SEQ ID NO: 33718 - protein, 35 aa, Artificial Sequence; identical to SEQ ID NO: 5411
  Cyclic GFR-binding peptide
  MOD_RES (30)..(30): Xaa is C or S

SEQ ID NO: 33719 - protein, 32 aa, Artificial Sequence; identical to SEQ ID NO: 5412
  Cyclic GFR-binding peptide
  MOD_RES (1)..(32): Xaa is C or S

SEQ ID NO: 33720 - protein, 30 aa, Artificial Sequence
  Cyclic GFR-binding peptide
SRVVMNEYQKYIVNSSDDIYLVSIPSLKTP

SEQ ID NO: 33721 - protein, 21 aa, Artificial Sequence
  Cyclic GFR-binding peptide
MEYKFKVKPTRGVLYLISIPE

SEQ ID NO: 33722 - protein, 31 aa, Artificial Sequence
  Cyclic GFR-binding peptide
  MOD_RES (26)..(27): Xaa is C or S
EYQKYIVNSSDDIYLVSIPSLKTPAXXPKPV

SEQ ID NO: 33723 - protein, 29 aa, Artificial Sequence
  Cyclic GFR-binding peptide
  MOD_RES (28)..(28): Xaa is C or S
MNYHYKLIVNSSDDKYLVSIPSLKTPAXT

SEQ ID NO: 33724 - protein, 24 aa, Artificial Sequence
  Cyclic GFR-binding peptide
VVMDEYKFKVVNNAADLYLISIPE

SEQ ID NO: 33725 - protein, 25 aa, Artificial Sequence
  Cyclic GFR-binding peptide
VIMRYKKLIKPTKGIFYLISIANLD

SEQ ID NO: 33726 - protein, 27 aa, Artificial Sequence
  Cyclic GFR-binding peptide
VMEEYQKYVVKDYEDIYLMSIPSLETP

SEQ ID NO: 33727 - protein, 29 aa, Artificial Sequence
  Cyclic GFR-binding peptide
  MOD_RES (29)..(29): Xaa is C or S
VIMRYKKLIKPTKGIFYLISIANLDQSVX

SEQ ID NO: 33728 - protein, 41 aa, Artificial Sequence
  Cyclic GFR-binding peptide
  MOD_RES (2)..(4)..(35)..(36): Xaa is C or S
SXKXSRVIMEYQKYVKPKRGVIYLISIPSLAQPVXXPAASA

SEQ ID NO: 33729 - protein, 26 aa, Artificial Sequence
  Cyclic GFR-binding peptide
VMRYKKLVKPTRGVFYLISIANLDQP

SEQ ID NO: 33730 - protein, 35 aa, Artificial Sequence; identical to SEQ ID NO: 5423
  Cyclic GFR-binding peptide
  MOD_RES (31)..(32): Xaa is C or S

SEQ ID NO: 33731 - protein, 39 aa, Artificial Sequence
  Cyclic GFR-binding peptide
  MOD_RES (2)..(4)..(36)..(37): Xaa is C or S
RXGXGEVVMDEYKFKVVKENEDLYLMSIPELETPVXXAK

SEQ ID NO: 33732 - protein, 34 aa, Artificial Sequence
  Cyclic GFR-binding peptide
  MOD_RES (1)..(3)..(34): Xaa is C or S
XKXSKVIMEYQKYIKPTKGIIYLISIPSLDQSVX

SEQ ID NO: 33733 - protein, 32 aa, Artificial Sequence
  Cyclic GFR-binding peptide
  MOD_RES (1)..(3): Xaa is C or S
XGXEAVSMGEEYKFKTPVGMDDLYLVSIPELK

SEQ ID NO: 33734 - protein, 30 aa, Artificial Sequence; identical to SEQ ID NO: 5424
  Cyclic GFR-binding peptide

SEQ ID NO: 33735 - protein, 28 aa, Artificial Sequence
  Cyclic GFR-binding peptide
  MOD_RES (26)..(27): Xaa is C or S
RYKKLIVNNSSDFYLVSIANLKTPAXXA

SEQ ID NO: 33736 - protein, 34 aa, Artificial Sequence
  Cyclic GFR-binding peptide
  MOD_RES (1)..(3): Xaa is C or S
XGXAKVVMNEYKFKIVNNSSDLYLVSIPELKTPA

SEQ ID NO: 33737 - protein, 29 aa, Artificial Sequence
  Cyclic GFR-binding peptide
  MOD_RES (29)..(29): Xaa is C or S
VMNRYKKLIVNSSDDFYLVSIANLKTPAX

SEQ ID NO: 33738 - protein, 30 aa, Artificial Sequence; identical to SEQ ID NO: 5431
  Cyclic GFR-binding peptide
  MOD_RES (29)..(29): Xaa is C or S

SEQ ID NO: 33739 - protein, 34 aa, Artificial Sequence
  Cyclic GFR-binding peptide
  MOD_RES (29)..(30): Xaa is C or S
VIMEYKFKIKPTKGILYLISIPELDQSVXXPSAS

SEQ ID NO: 33740 - protein, 27 aa, Artificial Sequence
  Cyclic GFR-binding peptide
IMYHYKLVKPKRGVKYLISIPSLAQPV

SEQ ID NO: 33741 - protein, 41 aa, Artificial Sequence
  Cyclic GFR-binding peptide
  MOD_RES (2)..(4)..(36)..(37): Xaa is C or S
RXGXGEVVMEEYQKYVVKDYEDIYLMSIPSLETPVXXAKPI

SEQ ID NO: 33742 - protein, 33 aa, Artificial Sequence
  Cyclic GFR-binding peptide
  MOD_RES (1)..(3): Xaa is C or S
XGXESVAMGYHYKLYTVVGKDKYLISIPSLKTP

SEQ ID NO: 33743 - protein, 28 aa, Artificial Sequence
  Cyclic GFR-binding peptide
GEVVMEEYKFKVVKDYEDLYLMSIPELE

SEQ ID NO: 33744 - protein, 26 aa, Artificial Sequence
  Cyclic GFR-binding peptide
VMEEYQKYVVKDYEDIYLMSIPSLET

SEQ ID NO: 33745 - protein, 28 aa, Artificial Sequence
  Cyclic GFR-binding peptide
  MOD_RES (26)..(27): Xaa is C or S
RYKKLVKPTRGVFYLISIANLDQPVXXP

SEQ ID NO: 33746 - protein, 34 aa, Artificial Sequence; identical to SEQ ID NO: 5435
  Cyclic GFR-binding peptide
  MOD_RES (2)..(4): Xaa is C or S

SEQ ID NO: 33747 - protein, 31 aa, Artificial Sequence
  Cyclic GFR-binding peptide
  MOD_RES (26)..(27): Xaa is C or S
EYKFKIKPTKGILYLISIPELDQSVXXPSAS

SEQ ID NO: 33748 - protein, 27 aa, Artificial Sequence
  Cyclic GFR-binding peptide
ARVVMNYHYKLIVNSSDDKYLVSIPSL

SEQ ID NO: 33749 - protein, 33 aa, Artificial Sequence
  Cyclic GFR-binding peptide
  MOD_RES (2)..(4): Xaa is C or S
SXKXSKVVMEYKFKVKPTRGVLYLISIPELDQP

SEQ ID NO: 33750 - protein, 34 aa, Artificial Sequence
  Cyclic GFR-binding peptide
  MOD_RES (29)..(30): Xaa is C or S
VMNEYKFKIVNNSSDLYLVSIPELKTPAXXAKPV

SEQ ID NO: 33751 - protein, 32 aa, Artificial Sequence; identical to SEQ ID NO: 5437
  Cyclic GFR-binding peptide
  MOD_RES (29)..(30): Xaa is C or S

SEQ ID NO: 33752 - protein, 36 aa, Artificial Sequence
  Cyclic GFR-binding peptide
  MOD_RES (32)..(33): Xaa is C or S
AEVVMDRYKKLVVNNAADFYLISIANLRAPVXXSAP

SEQ ID NO: 33753 - protein, 29 aa, Artificial Sequence
  Cyclic GFR-binding peptide
EVVMDYHYKLVVNNAADKYLISIPSLRAP

SEQ ID NO: 33754 - protein, 22 aa, Artificial Sequence
  Cyclic GFR-binding peptide
EYKFKIVNSSDDLYLVSIPELK

SEQ ID NO: 33755 - protein, 40 aa, Artificial Sequence
  Cyclic GFR-binding peptide
  MOD_RES (2)..(4)..(36)..(37): Xaa is C or S
RXGXGEVVMDEYQKYVVKENEDIYLMSIPSLETPVXXAKP

SEQ ID NO: 33756 - protein, 32 aa, Artificial Sequence
  Cyclic GFR-binding peptide
  MOD_RES (32)..(32): Xaa is C or S
AEVVMDRYKKLVVNNAADFYLISIANLRAPVX

SEQ ID NO: 33757 - protein, 37 aa, Artificial Sequence; identical to SEQ ID NO: 5441
  Cyclic GFR-binding peptide
  MOD_RES (1)..(3)..(35)..(36): Xaa is C or S

SEQ ID NO: 33758 - protein, 31 aa, Artificial Sequence
  Cyclic GFR-binding peptide
  MOD_RES (29)..(30): Xaa is C or S
VIMEYKFKVKPKRGVLYLISIPELAQPVXXP

SEQ ID NO: 33759 - protein, 30 aa, Artificial Sequence; identical to SEQ ID NO: 5443
  Cyclic GFR-binding peptide
  MOD_RES (1)..(3): Xaa is C or S

SEQ ID NO: 33760 - protein, 25 aa, Artificial Sequence
  Cyclic GFR-binding peptide
VMYHYKLVKPTRGVKYLISIPSLDQ

SEQ ID NO: 33761 - protein, 36 aa, Artificial Sequence
  Cyclic GFR-binding peptide
  MOD_RES (2)..(33)..(34): Xaa is C or S
KXSKVIMEYKFKIKPTKGILYLISIPELDQSVXXPS

SEQ ID NO: 33762 - protein, 37 aa, Artificial Sequence
  Cyclic GFR-binding peptide
  MOD_RES (1)..(33)..(34): Xaa is C or S
XAEVVMDEYKFKVVNNAADLYLISIPELRAPVXXSAP

SEQ ID NO: 33763 - protein, 38 aa, Artificial Sequence
  Cyclic GFR-binding peptide
  MOD_RES (1)..(33)..(34): Xaa is C or S
XESVAMGYHYKLYTVVGKDKYLISIPSLKTPVXXAKSA

SEQ ID NO: 33764 - protein, 27 aa, Artificial Sequence
  Cyclic GFR-binding peptide
SRVVMNYHYKLIVNSSDDKYLVSIPSL

SEQ ID NO: 33765 - protein, 25 aa, Artificial Sequence
  Cyclic GFR-binding peptide
SVAMGRYKKLYTVVGKDFYLISIAN

SEQ ID NO: 33766 - protein, 30 aa, Artificial Sequence
  Cyclic GFR-binding peptide
  MOD_RES (1)..(3): Xaa is C or S
XGXARVVMNEYQKYIVNSSDDIYLVSIPSL

SEQ ID NO: 33767 - protein, 40 aa, Artificial Sequence; identical to SEQ ID NO: 5449
  Cyclic GFR-binding peptide
  MOD_RES (1)..(3)..(35)..(36): Xaa is C or S

SEQ ID NO: 33768 - protein, 27 aa, Artificial Sequence
  Cyclic GFR-binding peptide
MGERYKKLTPVGMDDFYLVSIANLKTP

SEQ ID NO: 33769 - protein, 32 aa, Artificial Sequence
  Cyclic GFR-binding peptide
  MOD_RES (2)..(4): Xaa is C or S
RXGXESVAMGEYQKYYTVVGKDIYLISIPSLK

SEQ ID NO: 33770 - protein, 26 aa, Artificial Sequence
  Cyclic GFR-binding peptide
SKVIMRYKKLIKPTKGIFYLISIANL

SEQ ID NO: 33771 - protein, 26 aa, Artificial Sequence
  Cyclic GFR-binding peptide
IMYHYKLVKPKRGVKYLISIPSLAQP

SEQ ID NO: 33772 - protein, 33 aa, Artificial Sequence
  Cyclic GFR-binding peptide
  MOD_RES (29)..(30): Xaa is C or S
VMNEYQKYIVNSSDDIYLVSIPSLQTPAXXPKP

SEQ ID NO: 33773 - protein, 31 aa, Artificial Sequence
  Cyclic GFR-binding peptide
  MOD_RES (1)..(1): Xaa is C or S
XGEVVMEEYQKYVVKDYEDIYLMSIPSLETP

SEQ ID NO: 33774 - protein, 33 aa, Artificial Sequence
  Cyclic GFR-binding peptide
  MOD_RES (1)..(1): Xaa is C or S
XEAVSMGEEYQKYTPVGMDDIYLVSIPSLKTPV

SEQ ID NO: 33775 - protein, 34 aa, Artificial Sequence; identical to SEQ ID NO: 5462
  Cyclic GFR-binding peptide
  MOD_RES (28)..(29): Xaa is C or S

SEQ ID NO: 33776 - protein, 36 aa, Artificial Sequence; identical to SEQ ID NO: 5463
  Cyclic GFR-binding peptide
  MOD_RES (30)..(30): Xaa is C or S

SEQ ID NO: 33777 - protein, 33 aa, Artificial Sequence; identical to SEQ ID NO: 5466
  Cyclic GFR-binding peptide
  MOD_RES (30)..(31): Xaa is C or S

SEQ ID NO: 33778 - protein, 29 aa, Artificial Sequence
  Cyclic GFR-binding peptide
  MOD_RES (2)..(2): Xaa is C or S
GXEAVSMGEEYKFKTPVGMDDLYLVSIPE

SEQ ID NO: 33779 - protein, 33 aa, Artificial Sequence
  Cyclic GFR-binding peptide
  MOD_RES (28)..(29): Xaa is C or S
VMEYQKYVKPTRGVIYLISIPSLDQPVXXPSAS

SEQ ID NO: 33780 - protein, 32 aa, Artificial Sequence; identical to SEQ ID NO: 5470
  Cyclic GFR-binding peptide
  MOD_RES (1)..(3): Xaa is C or S

SEQ ID NO: 33781 - protein, 28 aa, Artificial Sequence
  Cyclic GFR-binding peptide
  MOD_RES (2)..(2): Xaa is C or S
KXSKVVMEYKFKVKPTRGVLYLISIPEL

SEQ ID NO: 33782 - protein, 35 aa, Artificial Sequence
  Cyclic GFR-binding peptide
  MOD_RES (29)..(30): Xaa is C or S
VMEEYQKYVVKDYEDIYLMSIPSLETPVXXAKPIS

SEQ ID NO: 33783 - protein, 33 aa, Artificial Sequence
  Cyclic GFR-binding peptide
  MOD_RES (30)..(31): Xaa is C or S
VVMEEYKFKVVKDYEDLYLMSIPELETPVXXAK

SEQ ID NO: 33784 - protein, 32 aa, Artificial Sequence
  Cyclic GFR-binding peptide
  MOD_RES (29)..(30): Xaa is C or S
MGEEYKFKTPVGMDDLYLVSIPELKTPVXXAK

SEQ ID NO: 33785 - protein, 34 aa, Artificial Sequence; identical to SEQ ID NO: 5472
  Cyclic GFR-binding peptide
  MOD_RES (1)..(32)..(33): Xaa is C or S

SEQ ID NO: 33786 - protein, 26 aa, Artificial Sequence
  Cyclic GFR-binding peptide
SVAMGRYKKLYTVVGKDFYLISIANL

SEQ ID NO: 33787 - protein, 32 aa, Artificial Sequence; identical to SEQ ID NO: 5473
  Cyclic GFR-binding peptide
  MOD_RES (26)..(27): Xaa is C or S

SEQ ID NO: 33788 - protein, 33 aa, Artificial Sequence
  Cyclic GFR-binding peptide
  MOD_RES (2)..(4): Xaa is C or S
RXGXAEVVMDRYKKLVVNNAADFYLISIANLRA

SEQ ID NO: 33789 - protein, 35 aa, Artificial Sequence
  Cyclic GFR-binding peptide
  MOD_RES (32)..(33): Xaa is C or S
SRVVMNEYQKYIVNSSDDIYLVSIPSLKTPAXXPK

SEQ ID NO: 33790 - protein, 25 aa, Artificial Sequence
  Cyclic GFR-binding peptide
IMEYKFKVKPKRGVLYLISIPELAQ

SEQ ID NO: 33791 - protein, 32 aa, Artificial Sequence
  Cyclic GFR-binding peptide
  MOD_RES (1)..(3): Xaa is C or S
XGXEAVSMGEEYQKYTPVGMDDIYLVSIPSLK

SEQ ID NO: 33792 - protein, 31 aa, Artificial Sequence
  Cyclic GFR-binding peptide
  MOD_RES (26)..(27): Xaa is C or S
EYQKYTPVGMDDIYLVSIPSLKTPVXXAKGV

SEQ ID NO: 33793 - protein, 26 aa, Artificial Sequence
  Cyclic GFR-binding peptide
VMDRYKKLVVKENEDFYLMSIANLET

SEQ ID NO: 33794 - protein, 37 aa, Artificial Sequence
  Cyclic GFR-binding peptide
  MOD_RES (1)..(3)..(35)..(36): Xaa is C or S
XGXGEVVMEEYKFKVVKDYEDLYLMSIPELETPVXXA

SEQ ID NO: 33795 - protein, 35 aa, Artificial Sequence
  Cyclic GFR-binding peptide
  MOD_RES (33)..(34): Xaa is C or S
EAVSMGEEYQKYTPVGMDDIYLVSIPSLKTPVXXA

SEQ ID NO: 33796 - protein, 28 aa, Artificial Sequence
  Cyclic GFR-binding peptide
SRVIMEYQKYVKPKRGVIYLISIPSLAQ

SEQ ID NO: 33797 - protein, 27 aa, Artificial Sequence
  Cyclic GFR-binding peptide
VMNRYKKLIVNNSSDFYLVSIANLKTP

SEQ ID NO: 33798 - protein, 22 aa, Artificial Sequence
  Cyclic GFR-binding peptide
IMYHYKLVKPKRGVKYLISIPS

SEQ ID NO: 33799 - protein, 28 aa, Artificial Sequence
  Cyclic GFR-binding peptide
  MOD_RES (26)..(26): Xaa is C or S
EYKFKIVNSSDDLYLVSIPELKTPAXTP

SEQ ID NO: 33800 - protein, 33 aa, Artificial Sequence; identical to SEQ ID NO: 5483
  Cyclic GFR-binding peptide
  MOD_RES (1)..(33): Xaa is C or S

SEQ ID NO: 33801 - protein, 32 aa, Artificial Sequence; identical to SEQ ID NO: 5484
  Cyclic GFR-binding peptide
  MOD_RES (27)..(28): Xaa is C or S

SEQ ID NO: 33802 - protein, 27 aa, Artificial Sequence
  Cyclic GFR-binding peptide
  MOD_RES (27)..(27): Xaa is C or S
MYHYKLIKPTKGIKYLISIPSLDQSVX

SEQ ID NO: 33803 - protein, 22 aa, Artificial Sequence
  Cyclic GFR-binding peptide
EYQKYVVKENEDIYLMSIPSLE

SEQ ID NO: 33804 - protein, 29 aa, Artificial Sequence
  Cyclic GFR-binding peptide
  MOD_RES (29)..(29): Xaa is C or S
VIMYHYKLVKPKRGVKYLISIPSLAQPVX

SEQ ID NO: 33805 - protein, 41 aa, Artificial Sequence
  Cyclic GFR-binding peptide
  MOD_RES (1)..(3)..(36)..(37): Xaa is C or S
XGXEAVSMGEEYKFKTPVGMDDLYLVSIPELKTPVXXAKGV

SEQ ID NO: 33806 - protein, 34 aa, Artificial Sequence
  Cyclic GFR-binding peptide
  MOD_RES (30)..(31): Xaa is C or S
VVMDEYKFKVVNNAADLYLISIPELRAPVXXSAP

SEQ ID NO: 33807 - protein, 42 aa, Artificial Sequence
  Cyclic GFR-binding peptide
  MOD_RES (2)..(4)..(36): Xaa is C or S
HXGXSRVVMNEYKFKIVNSSDDLYLVSIPELKTPAXTPKTVH

SEQ ID NO: 33808 - protein, 42 aa, Artificial Sequence
  Cyclic GFR-binding peptide
  MOD_RES (2)..(4)..(36): Xaa is C or S
HXGXSRVVMNEYQKYIVNSSDDIYLVSIPSLKTPAXTPKTVH

SEQ ID NO: 33809 - protein, 23 aa, Artificial Sequence
  Cyclic GFR-binding peptide
EEYQKYVVKDYEDIYLMSIPSLE

SEQ ID NO: 33810 - protein, 31 aa, Artificial Sequence; identical to SEQ ID NO: 5492
  Cyclic GFR-binding peptide
  MOD_RES (1)..(3): Xaa is C or S

SEQ ID NO: 33811 - protein, 32 aa, Artificial Sequence; identical to SEQ ID NO: 5494
  Cyclic GFR-binding peptide
  MOD_RES (29)..(30): Xaa is C or S

SEQ ID NO: 33812 - protein, 28 aa, Artificial Sequence
  Cyclic GFR-binding peptide
  MOD_RES (26)..(27): Xaa is C or S
YHYKLIVNNSSDKYLVSIPSLKTPAXXA

SEQ ID NO: 33813 - protein, 31 aa, Artificial Sequence
  Cyclic GFR-binding peptide
  MOD_RES (1)..(1): Xaa is C or S
XAEVVMDRYKKLVVNNAADFYLISIANLRAP

SEQ ID NO: 33814 - protein, 35 aa, Artificial Sequence; identical to SEQ ID NO: 5499
  Cyclic GFR-binding peptide
  MOD_RES (29)..(30): Xaa is C or S

SEQ ID NO: 33815 - protein, 39 aa, Artificial Sequence; identical to SEQ ID NO: 5500
  Cyclic GFR-binding peptide
  MOD_RES (2)..(4)..(36)..(37): Xaa is C or S

SEQ ID NO: 33816 - protein, 31 aa, Artificial Sequence
  Cyclic GFR-binding peptide
  MOD_RES (1)..(1): Xaa is C or S
XAEVVMDYHYKLVVNNAADKYLISIPSLRAP

SEQ ID NO: 33817 - protein, 24 aa, Artificial Sequence
  Cyclic GFR-binding peptide
MEEYQKYVVKDYEDIYLMSIPSLE

SEQ ID NO: 33818 - protein, 26 aa, Artificial Sequence
  Cyclic GFR-binding peptide
  MOD_RES (26)..(26): Xaa is C or S
EYQKYVVKDYEDIYLMSIPSLETPVX

SEQ ID NO: 33819 - protein, 29 aa, Artificial Sequence
  Cyclic GFR-binding peptide
  MOD_RES (2)..(2): Xaa is C or S
KXSKVIMYHYKLIKPTKGIKYLISIPSLD

SEQ ID NO: 33820 - protein, 27 aa, Artificial Sequence
  Cyclic GFR-binding peptide
RVIMEYKFKVKPKRGVLYLISIPELAQ

SEQ ID NO: 33821 - protein, 26 aa, Artificial Sequence
  Cyclic GFR-binding peptide
  MOD_RES (26)..(26): Xaa is C or S
RYKKLVVNNAADFYLISIANLRAPVX

SEQ ID NO: 33822 - protein, 40 aa, Artificial Sequence
  Cyclic GFR-binding peptide
  MOD_RES (2)..(4)..(35)..(36): Xaa is C or S
SXKXSKVIMEYQKYIKPTKGIIYLISIPSLDQSVXXPSAS

SEQ ID NO: 33823 - protein, 38 aa, Artificial Sequence
  Cyclic GFR-binding peptide
  MOD_RES (1)..(33): Xaa is C or S
XSRVVMNEYQKYIVNSSDDIYLVSIPSLKTPAXTPKTV

SEQ ID NO: 33824 - protein, 30 aa, Artificial Sequence
  Cyclic GFR-binding peptide
ARVVMNEYKFKIVNSSDDLYLVSIPELQTP

SEQ ID NO: 33825 - protein, 32 aa, Artificial Sequence
  Cyclic GFR-binding peptide
  MOD_RES (2)..(2): Xaa is C or S
GXAKVVMNEYKFKIVNNSSDLYLVSIPELKTP

SEQ ID NO: 33826 - protein, 29 aa, Artificial Sequence
  Cyclic GFR-binding peptide
  MOD_RES (27)..(28): Xaa is C or S
MYHYKLVKPTRGVKYLISIPSLDQPVXXP

SEQ ID NO: 33827 - protein, 33 aa, Artificial Sequence; identical to SEQ ID NO: 5509
  Cyclic GFR-binding peptide
  MOD_RES (28)..(29): Xaa is C or S

SEQ ID NO: 33828 - protein, 35 aa, Artificial Sequence
  Cyclic GFR-binding peptide
  MOD_RES (30)..(31): Xaa is C or S
VVMEEYQKYVVKDYEDIYLMSIPSLETPVXXAKPI

SEQ ID NO: 33829 - protein, 30 aa, Artificial Sequence
  Cyclic GFR-binding peptide
RVVMNEYQKYIVNSSDDIYLVSIPSLKTPA

SEQ ID NO: 33830 - protein, 30 aa, Artificial Sequence
  Cyclic GFR-binding peptide
  MOD_RES (29)..(30): Xaa is C or S
VMDRYKKLVVNNAADFYLISIANLRAPVXX

SEQ ID NO: 33831 - protein, 39 aa, Artificial Sequence
  Cyclic GFR-binding peptide
  MOD_RES (2)..(4)..(35)..(36): Xaa is C or S
SXKXSKVVMEYKFKVKPTRGVLYLISIPELDQPVXXPSA

SEQ ID NO: 33832 - protein, 38 aa, Artificial Sequence; identical to SEQ ID NO: 5513
  Cyclic GFR-binding peptide
  MOD_RES (2)..(33)..(34): Xaa is C or S

SEQ ID NO: 33833 - protein, 25 aa, Artificial Sequence
  Cyclic GFR-binding peptide
SRVIMRYKKLVKPKRGVFYLISIAN

SEQ ID NO: 33834 - protein, 38 aa, Artificial Sequence
  Cyclic GFR-binding peptide
  MOD_RES (33)..(34): Xaa is C or S
EAVSMGEEYKFKTPVGMDDLYLVSIPELKTPVXXAKGV

SEQ ID NO: 33835 - protein, 40 aa, Artificial Sequence
  Cyclic GFR-binding peptide
  MOD_RES (2)..(34)..(35): Xaa is C or S
GXSRVVMNEYKFKIVNSSDDLYLVSIPELKTPAXXPKPVY

SEQ ID NO: 33836 - protein, 26 aa, Artificial Sequence
  Cyclic GFR-binding peptide
  MOD_RES (1)..(1): Xaa is C or S
XSRVIMEYKFKVKPKRGVLYLISIPE

SEQ ID NO: 33837 - protein, 32 aa, Artificial Sequence
  Cyclic GFR-binding peptide
  MOD_RES (2)..(4): Xaa is C or S
HXGXSRVVMNEYKFKIVNSSDDLYLVSIPELK

SEQ ID NO: 33838 - protein, 29 aa, Artificial Sequence
  Cyclic GFR-binding peptide
  MOD_RES (28)..(29): Xaa is C or S
GEEYKFKTPVGMDDLYLVSIPELKTPVXX

SEQ ID NO: 33839 - protein, 36 aa, Artificial Sequence; identical to SEQ ID NO: 5521
  Cyclic GFR-binding peptide
  MOD_RES (2)..(4)..(36): Xaa is C or S

SEQ ID NO: 33840 - protein, 31 aa, Artificial Sequence
  Cyclic GFR-binding peptide
AEVVMDEYKFKVVNNAADLYLISIPELRAPV

SEQ ID NO: 33841 - protein, 31 aa, Artificial Sequence; identical to SEQ ID NO: 5522
  Cyclic GFR-binding peptide
  MOD_RES (1)..(3): Xaa is C or S

SEQ ID NO: 33842 - protein, 32 aa, Artificial Sequence
  Cyclic GFR-binding peptide
  MOD_RES (2)..(2): Xaa is C or S
GXESVAMGYHYKLYTVVGKDKYLISIPSLKTP

SEQ ID NO: 33843 - protein, 37 aa, Artificial Sequence; identical to SEQ ID NO: 5524
  Cyclic GFR-binding peptide
  MOD_RES (2)..(33)..(34): Xaa is C or S

SEQ ID NO: 33844 - protein, 29 aa, Artificial Sequence
  Cyclic GFR-binding peptide
  MOD_RES (2)..(4): Xaa is C or S
SXKXSKVIMEYKFKIKPTKGILYLISIPE

SEQ ID NO: 33845 - protein, 34 aa, Artificial Sequence; identical to SEQ ID NO: 5526
  Cyclic GFR-binding peptide
  MOD_RES (31)..(32): Xaa is C or S

SEQ ID NO: 33846 - protein, 34 aa, Artificial Sequence
  Cyclic GFR-binding peptide
  MOD_RES (1)..(3): Xaa is C or S
XGXAKVVMNEYQKYIVNNSSDIYLVSIPSLKTPA

SEQ ID NO: 33847 - protein, 29 aa, Artificial Sequence
  Cyclic GFR-binding peptide
  MOD_RES (28)..(29): Xaa is C or S
MEEYKFKVVKDYEDLYLMSIPELETPVXX

SEQ ID NO: 33848 - protein, 26 aa, Artificial Sequence
  Cyclic GFR-binding peptide
MEYKFKIKPTKGILYLISIPELDQSV

SEQ ID NO: 33849 - protein, 30 aa, Artificial Sequence; identical to SEQ ID NO: 5528
  Cyclic GFR-binding peptide
  MOD_RES (2)..(2): Xaa is C or S

SEQ ID NO: 33850 - protein, 23 aa, Artificial Sequence
  Cyclic GFR-binding peptide
NEYKFKIVNSSDDLYLVSIPELQ

SEQ ID NO: 33851 - protein, 29 aa, Artificial Sequence
  Cyclic GFR-binding peptide
  MOD_RES (26)..(27): Xaa is C or S
YHYKLVKPKRGVKYLISIPSLAQPVXXPA

SEQ ID NO: 33852 - protein, 33 aa, Artificial Sequence
  Cyclic GFR-binding peptide
  MOD_RES (2)..(2): Xaa is C or S
GXGEVVMDEYQKYVVKENEDIYLMSIPSLETPV

SEQ ID NO: 33853 - protein, 24 aa, Artificial Sequence
  Cyclic GFR-binding peptide
MYHYKLVKPKRGVKYLISIPSLAQ

SEQ ID NO: 33854 - protein, 21 aa, Artificial Sequence
  Cyclic GFR-binding peptide
EEYKFKVVKDYEDLYLMSIPE

SEQ ID NO: 33855 - protein, 28 aa, Artificial Sequence
  Cyclic GFR-binding peptide
  MOD_RES (28)..(28): Xaa is C or S
MNEYQKYIVNNSSDIYLVSIPSLKTPAX

SEQ ID NO: 33856 - protein, 33 aa, Artificial Sequence; identical to SEQ ID NO: 5536
  Cyclic GFR-binding peptide
  MOD_RES (30)..(31): Xaa is C or S

SEQ ID NO: 33857 - protein, 26 aa, Artificial Sequence
  Cyclic GFR-binding peptide
MNYHYKLIVNSSDDKYLVSIPSLQTP

SEQ ID NO: 33858 - protein, 34 aa, Artificial Sequence
  Cyclic GFR-binding peptide
  MOD_RES (1)..(33)..(34): Xaa is C or S
XGEVVMDEYKFKVVKENEDLYLMSIPELETPVXX

SEQ ID NO: 33859 - protein, 27 aa, Artificial Sequence
  Cyclic GFR-binding peptide
AMGEYQKYYTVVGKDIYLISIPSLKTP

SEQ ID NO: 33860 - protein, 30 aa, Artificial Sequence; identical to SEQ ID NO: 5538
  Cyclic GFR-binding peptide
  MOD_RES (27)..(28): Xaa is C or S

SEQ ID NO: 33861 - protein, 34 aa, Artificial Sequence
  Cyclic GFR-binding peptide
  MOD_RES (31)..(32): Xaa is C or S
RVVMNEYQKYIVNSSDDIYLVSIPSLQTPAXXPK

SEQ ID NO: 33862 - protein, 36 aa, Artificial Sequence
  Cyclic GFR-binding peptide
  MOD_RES (1)..(32)..(33): Xaa is C or S
XSRVIMEYKFKVKPKRGVLYLISIPELAQPVXXPAA

SEQ ID NO: 33863 - protein, 36 aa, Artificial Sequence
  Cyclic GFR-binding peptide
  MOD_RES (1)..(33)..(34): Xaa is C or S
XGEVVMEEYQKYVVKDYEDIYLMSIPSLETPVXXAK

SEQ ID NO: 33864 - protein, 29 aa, Artificial Sequence
  Cyclic GFR-binding peptide
  MOD_RES (26)..(26): Xaa is C or S
RYKKLIVNSSDDFYLVSIANLKTPAXTPK

SEQ ID NO: 33865 - protein, 23 aa, Artificial Sequence
  Cyclic GFR-binding peptide
MGEYQKYYTVVGKDIYLISIPSL

SEQ ID NO: 33866 - protein, 30 aa, Artificial Sequence
  Cyclic GFR-binding peptide
  MOD_RES (30)..(30): Xaa is C or S
KVIMEYKFKIKPTKGILYLISIPELDQSVX

SEQ ID NO: 33867 - protein, 30 aa, Artificial Sequence
  Cyclic GFR-binding peptide
  MOD_RES (2)..(2): Xaa is C or S
KXSRVIMEYKFKVKPKRGVLYLISIPELAQ

SEQ ID NO: 33868 - protein, 41 aa, Artificial Sequence; identical to SEQ ID NO: 5546
  Cyclic GFR-binding peptide
  MOD_RES (2)..(4)..(35)..(36): Xaa is C or S

SEQ ID NO: 33869 - protein, 23 aa, Artificial Sequence
  Cyclic GFR-binding peptide
NEYQKYIVNSSDDIYLVSIPSLK

SEQ ID NO: 33870 - protein, 28 aa, Artificial Sequence
  Cyclic GFR-binding peptide
SKVVMYHYKLVKPTRGVKYLISIPSLDQ

SEQ ID NO: 33871 - protein, 38 aa, Artificial Sequence
  Cyclic GFR-binding peptide
  MOD_RES (1)..(32)..(33): Xaa is C or S
XSRVIMEYKFKVKPKRGVLYLISIPELAQPVXXPAASA

SEQ ID NO: 33872 - protein, 31 aa, Artificial Sequence; identical to SEQ ID NO: 5548
  Cyclic GFR-binding peptide
  MOD_RES (29)..(30): Xaa is C or S

SEQ ID NO: 33873 - protein, 30 aa, Artificial Sequence; identical to SEQ ID NO: 5550
  Cyclic GFR-binding peptide
  MOD_RES (1)..(3): Xaa is C or S

SEQ ID NO: 33874 - protein, 31 aa, Artificial Sequence
  Cyclic GFR-binding peptide
  MOD_RES (2)..(4): Xaa is C or S
RXGXEAVSMGEEYQKYTPVGMDDIYLVSIPS

SEQ ID NO: 33875 - protein, 36 aa, Artificial Sequence
  Cyclic GFR-binding peptide
  MOD_RES (2)..(4)..(36): Xaa is C or S
RXGXGEVVMDEYKFKVVKENEDLYLMSIPELETPVX

SEQ ID NO: 33876 - protein, 39 aa, Artificial Sequence; identical to SEQ ID NO: 5551
  Cyclic GFR-binding peptide
  MOD_RES (2)..(4)..(35)..(36): Xaa is C or S

SEQ ID NO: 33877 - protein, 29 aa, Artificial Sequence
  Cyclic GFR-binding peptide
  MOD_RES (29)..(29): Xaa is C or S
AMGEYQKYYTVVGKDIYLISIPSLKTPVX

SEQ ID NO: 33878 - protein, 25 aa, Artificial Sequence
  Cyclic GFR-binding peptide
DEYKFKVVKENEDLYLMSIPELETP

SEQ ID NO: 33879 - protein, 34 aa, Artificial Sequence
  Cyclic GFR-binding peptide
  MOD_RES (32)..(33): Xaa is C or S
AKVVMNEYKFKIVNNSSDLYLVSIPELKTPAXXA

SEQ ID NO: 33880 - protein, 28 aa, Artificial Sequence
  Cyclic GFR-binding peptide
KVVMNEYKFKIVNNSSDLYLVSIPELKT

SEQ ID NO: 33881 - protein, 33 aa, Artificial Sequence; identical to SEQ ID NO: 5557
  Cyclic GFR-binding peptide
  MOD_RES (27)..(28): Xaa is C or S

SEQ ID NO: 33882 - protein, 27 aa, Artificial Sequence
  Cyclic GFR-binding peptide
EAVSMGEEYQKYTPVGMDDIYLVSIPS

SEQ ID NO: 33883 - protein, 31 aa, Artificial Sequence
  Cyclic GFR-binding peptide
  MOD_RES (1)..(3): Xaa is C or S
XGXESVAMGYHYKLYTVVGKDKYLISIPSLK

SEQ ID NO: 33884 - protein, 25 aa, Artificial Sequence
  Cyclic GFR-binding peptide
VMEEYQKYVVKDYEDIYLMSIPSLE

SEQ ID NO: 33885 - protein, 37 aa, Artificial Sequence
  Cyclic GFR-binding peptide
  MOD_RES (31)..(32): Xaa is C or S
VSMGEEYKFKTPVGMDDLYLVSIPELKTPVXXAKGVK

SEQ ID NO: 33886 - protein, 29 aa, Artificial Sequence
  Cyclic GFR-binding peptide
KVIMEYKFKIKPTKGILYLISIPELDQSV

SEQ ID NO: 33887 - protein, 21 aa, Artificial Sequence
  Cyclic GFR-binding peptide
RYKKLYTVVGKDFYLISIANL

SEQ ID NO: 33888 - protein, 36 aa, Artificial Sequence
  Cyclic GFR-binding peptide
  MOD_RES (30)..(31): Xaa is C or S
VVMNEYQKYIVNNSSDIYLVSIPSLKTPAXXAKPVA

SEQ ID NO: 33889 - protein, 40 aa, Artificial Sequence
  Cyclic GFR-binding peptide
  MOD_RES (1)..(3)..(34)..(35): Xaa is C or S
XKXSKVIMEYKFKIKPTKGILYLISIPELDQSVXXPSASA

SEQ ID NO: 33890 - protein, 30 aa, Artificial Sequence
  Cyclic GFR-binding peptide
  MOD_RES (2)..(4): Xaa is C or S
RXGXGEVVMEEYKFKVVKDYEDLYLMSIPE

SEQ ID NO: 33891 - protein, 25 aa, Artificial Sequence
  Cyclic GFR-binding peptide
VVMNEYKFKIVNNSSDLYLVSIPEL

SEQ ID NO: 33892 - protein, 41 aa, Artificial Sequence
  Cyclic GFR-binding peptide
  MOD_RES (1)..(3)..(35)..(36): Xaa is C or S
XGXAKVVMNEYQKYIVNNSSDIYLVSIPSLKTPAXXAKPVA

SEQ ID NO: 33893 - protein, 29 aa, Artificial Sequence
  Cyclic GFR-binding peptide
  MOD_RES (26)..(27): Xaa is C or S
RYKKLIVNSSDDFYLVSIANLKTPAXXPK

SEQ ID NO: 33894 - protein, 40 aa, Artificial Sequence; identical to SEQ ID NO: 5566
  Cyclic GFR-binding peptide
  MOD_RES (1)..(3)..(35)..(36): Xaa is C or S

SEQ ID NO: 33895 - protein, 28 aa, Artificial Sequence
  Cyclic GFR-binding peptide
VVMNRYKKLIVNSSDDFYLVSIANLKTP

SEQ ID NO: 33896 - protein, 30 aa, Artificial Sequence
  Cyclic GFR-binding peptide
  MOD_RES (29)..(30): Xaa is C or S
VMDEYKFKVVNNAADLYLISIPELRAPVXX

SEQ ID NO: 33897 - protein, 35 aa, Artificial Sequence
  Cyclic GFR-binding peptide
  MOD_RES (2)..(34): Xaa is C or S
GXSRVVMNEYKFKIVNSSDDLYLVSIPELKTPAXT

SEQ ID NO: 33898 - protein, 32 aa, Artificial Sequence; identical to SEQ ID NO: 5569
  Cyclic GFR-binding peptide
  MOD_RES (28)..(29): Xaa is C or S

SEQ ID NO: 33899 - protein, 32 aa, Artificial Sequence
  Cyclic GFR-binding peptide
  MOD_RES (27)..(28): Xaa is C or S
EEYKFKTPVGMDDLYLVSIPELKTPVXXAKGV

SEQ ID NO: 33900 - protein, 28 aa, Artificial Sequence
  Cyclic GFR-binding peptide
  MOD_RES (26)..(27): Xaa is C or S
EYQKYVVKDYEDIYLMSIPSLETPVXXA

SEQ ID NO: 33901 - protein, 34 aa, Artificial Sequence; identical to SEQ ID NO: 5572
  Cyclic GFR-binding peptide
  MOD_RES (31)..(32): Xaa is C or S

SEQ ID NO: 33902 - protein, 30 aa, Artificial Sequence; identical to SEQ ID NO: 5574
  Cyclic GFR-binding peptide
  MOD_RES (2)..(4): Xaa is C or S

SEQ ID NO: 33903 - protein, 36 aa, Artificial Sequence
  Cyclic GFR-binding peptide
  MOD_RES (1)..(32)..(33): Xaa is C or S
XSKVVMEYQKYVKPTRGVIYLISIPSLDQPVXXPSA

SEQ ID NO: 33904 - protein, 29 aa, Artificial Sequence
  Cyclic GFR-binding peptide
  MOD_RES (27)..(28): Xaa is C or S
NRYKKLIVNSSDDFYLVSIANLKTPAXXP

SEQ ID NO: 33905 - protein, 30 aa, Artificial Sequence
  Cyclic GFR-binding peptide
  MOD_RES (2)..(2): Xaa is C or S
KXSKVVMEYQKYVKPTRGVIYLISIPSLDQ

SEQ ID NO: 33906 - protein, 26 aa, Artificial Sequence
  Cyclic GFR-binding peptide
  MOD_RES (26)..(26): Xaa is C or S
YHYKLVKPKRGVKYLISIPSLAQPVX

SEQ ID NO: 33907 - protein, 31 aa, Artificial Sequence
  Cyclic GFR-binding peptide
  MOD_RES (30)..(31): Xaa is C or S
VVMNEYQKYIVNSSDDIYLVSIPSLKTPAXX

SEQ ID NO: 33908 - protein, 31 aa, Artificial Sequence; identical to SEQ ID NO: 5580
  Cyclic GFR-binding peptide
  MOD_RES (1)..(3): Xaa is C or S

SEQ ID NO: 33909 - protein, 31 aa, Artificial Sequence
  Cyclic GFR-binding peptide
  MOD_RES (31)..(31): Xaa is C or S
EVVMDRYKKLVVNNAADFYLISIANLRAPVX

SEQ ID NO: 33910 - protein, 35 aa, Artificial Sequence
  Cyclic GFR-binding peptide
  MOD_RES (1)..(32)..(33): Xaa is C or S
XSKVIMEYKFKIKPTKGILYLISIPELDQSVXXPS

SEQ ID NO: 33911 - protein, 31 aa, Artificial Sequence
  Cyclic GFR-binding peptide
  MOD_RES (2)..(2): Xaa is C or S
GXARVVMNEYKFKIVNSSDDLYLVSIPELQT

SEQ ID NO: 33912 - protein, 31 aa, Artificial Sequence
  Cyclic GFR-binding peptide
  MOD_RES (1)..(3): Xaa is C or S
XKXSKVIMEYQKYIKPTKGIIYLISIPSLDQ

SEQ ID NO: 33913 - protein, 31 aa, Artificial Sequence
  Cyclic GFR-binding peptide
  MOD_RES (2)..(4): Xaa is C or S
HXGXARVVMNEYKFKIVNSSDDLYLVSIPEL

SEQ ID NO: 33914 - protein, 36 aa, Artificial Sequence; identical to SEQ ID NO: 5585
  Cyclic GFR-binding peptide
  MOD_RES (31)..(32): Xaa is C or S

SEQ ID NO: 33915 - protein, 33 aa, Artificial Sequence
  Cyclic GFR-binding peptide
  MOD_RES (31)..(32): Xaa is C or S
SKVIMEYKFKIKPTKGILYLISIPELDQSVXXP

SEQ ID NO: 33916 - protein, 25 aa, Artificial Sequence
  Cyclic GFR-binding peptide
VSMGEEYKFKTPVGMDDLYLVSIPE

SEQ ID NO: 33917 - protein, 40 aa, Artificial Sequence
  Cyclic GFR-binding peptide
  MOD_RES (1)..(3)..(35)..(36): Xaa is C or S
XGXAEVVMDRYKKLVVNNAADFYLISIANLRAPVXXSAPA

SEQ ID NO: 33918 - protein, 30 aa, Artificial Sequence
  Cyclic GFR-binding peptide
  MOD_RES (2)..(4): Xaa is C or S
RXGXESVAMGRYKKLYTVVGKDFYLISIAN

SEQ ID NO: 33919 - protein, 33 aa, Artificial Sequence; identical to SEQ ID NO: 5591
  Cyclic GFR-binding peptide
  MOD_RES (1)..(3): Xaa is C or S

SEQ ID NO: 33920 - protein, 29 aa, Artificial Sequence
  Cyclic GFR-binding peptide
VVMDRYKKLVVNNAADFYLISIANLRAPV

SEQ ID NO: 33921 - protein, 26 aa, Artificial Sequence
  Cyclic GFR-binding peptide
VMDEYKFKVVKENEDLYLMSIPELET

SEQ ID NO: 33922 - protein, 24 aa, Artificial Sequence
  Cyclic GFR-binding peptide
DEYKFKVVKENEDLYLMSIPELET

SEQ ID NO: 33923 - protein, 39 aa, Artificial Sequence
  Cyclic GFR-binding peptide
  MOD_RES (2)..(4)..(36)..(37): Xaa is C or S
RXGXESVAMGRYKKLYTVVGKDFYLISIANLKTPVXXAK

SEQ ID NO: 33924 - protein, 29 aa, Artificial Sequence
  Cyclic GFR-binding peptide
  MOD_RES (29)..(29): Xaa is C or S
MGERYKKLTPVGMDDFYLVSIANLKTPVX

SEQ ID NO: 33925 - protein, 29 aa, Artificial Sequence
  Cyclic GFR-binding peptide
  MOD_RES (2)..(2): Xaa is C or S
GXGEVVMDYHYKLVVKENEDKYLMSIPSL

SEQ ID NO: 33926 - protein, 35 aa, Artificial Sequence
  Cyclic GFR-binding peptide
  MOD_RES (1)..(3)..(35): Xaa is C or S
XGXESVAMGYHYKLYTVVGKDKYLISIPSLKTPVX

SEQ ID NO: 33927 - protein, 30 aa, Artificial Sequence; identical to SEQ ID NO: 5596
  Cyclic GFR-binding peptide
  MOD_RES (2)..(2): Xaa is C or S

SEQ ID NO: 33928 - protein, 33 aa, Artificial Sequence
  Cyclic GFR-binding peptide
  MOD_RES (27)..(28): Xaa is C or S
MEYKFKVKPTRGVLYLISIPELDQPVXXPSASA

SEQ ID NO: 33929 - protein, 30 aa, Artificial Sequence
  Cyclic GFR-binding peptide
EVVMDEYKFKVVKENEDLYLMSIPELETPV

SEQ ID NO: 33930 - protein, 36 aa, Artificial Sequence
  Cyclic GFR-binding peptide
  MOD_RES (1)..(33)..(34): Xaa is C or S
XAEVVMDEYKFKVVNNAADLYLISIPELRAPVXXSA

SEQ ID NO: 33931 - protein, 41 aa, Artificial Sequence; identical to SEQ ID NO: 5599
  Cyclic GFR-binding peptide
  MOD_RES (2)..(4)..(36)..(37): Xaa is C or S

SEQ ID NO: 33932 - protein, 38 aa, Artificial Sequence
  Cyclic GFR-binding peptide
  MOD_RES (32)..(33): Xaa is C or S
GEVVMEEYQKYVVKDYEDIYLMSIPSLETPVXXAKPIS

SEQ ID NO: 33933 - protein, 33 aa, Artificial Sequence
  Cyclic GFR-binding peptide
  MOD_RES (30)..(31): Xaa is C or S
KVIMEYQKYIKPTKGIIYLISIPSLDQSVXXPS

SEQ ID NO: 33934 - protein, 35 aa, Artificial Sequence; identical to SEQ ID NO: 5601
  Cyclic GFR-binding peptide
  MOD_RES (29)..(30): Xaa is C or S

SEQ ID NO: 33935 - protein, 33 aa, Artificial Sequence
  Cyclic GFR-binding peptide
  MOD_RES (29)..(30): Xaa is C or S
VMNEYQKYIVNSSDDIYLVSIPSLKTPAXXPKP

SEQ ID NO: 33936 - protein, 37 aa, Artificial Sequence
  Cyclic GFR-binding peptide
  MOD_RES (1)..(3)..(35)..(36): Xaa is C or S
XGXGEVVMDEYKFKVVKENEDLYLMSIPELETPVXXA

SEQ ID NO: 33937 - protein, 27 aa, Artificial Sequence
  Cyclic GFR-binding peptide
  MOD_RES (27)..(27): Xaa is C or S
MRYKKLVKPTRGVFYLISIANLDQPVX

SEQ ID NO: 33938 - protein, 38 aa, Artificial Sequence
  Cyclic GFR-binding peptide
  MOD_RES (1)..(3)..(35)..(36): Xaa is C or S
XGXAEVVMDRYKKLVVNNAADFYLISIANLRAPVXXSA

SEQ ID NO: 33939 - protein, 26 aa, Artificial Sequence
  Cyclic GFR-binding peptide
EVVMEEYKFKVVKDYEDLYLMSIPEL

SEQ ID NO: 33940 - protein, 34 aa, Artificial Sequence; identical to SEQ ID NO: 5606
  Cyclic GFR-binding peptide
  MOD_RES (28)..(29): Xaa is C or S

SEQ ID NO: 33941 - protein, 25 aa, Artificial Sequence
  Cyclic GFR-binding peptide
MYHYKLVKPKRGVKYLISIPSLAQP

SEQ ID NO: 33942 - protein, 29 aa, Artificial Sequence
  Cyclic GFR-binding peptide
  MOD_RES (26)..(27): Xaa is C or S
YHYKLIVNSSDDKYLVSIPSLQTPAXXPK

SEQ ID NO: 33943 - protein, 33 aa, Artificial Sequence
  Cyclic GFR-binding peptide
  MOD_RES (27)..(28): Xaa is C or S
NEYQKYIVNSSDDIYLVSIPSLQTPAXXPKPVT

SEQ ID NO: 33944 - protein, 28 aa, Artificial Sequence
  Cyclic GFR-binding peptide
  MOD_RES (26)..(27): Xaa is C or S
EYKFKVVNNAADLYLISIPELRAPVXXS

SEQ ID NO: 33945 - protein, 31 aa, Artificial Sequence
  Cyclic GFR-binding peptide
ARVVMNEYQKYIVNSSDDIYLVSIPSLQTPA

SEQ ID NO: 33946 - protein, 30 aa, Artificial Sequence
  Cyclic GFR-binding peptide
  MOD_RES (2)..(4): Xaa is C or S
RXGXGEVVMEEYQKYVVKDYEDIYLMSIPS

SEQ ID NO: 33947 - protein, 32 aa, Artificial Sequence; identical to SEQ ID NO: 5617
  Cyclic GFR-binding peptide
  MOD_RES (30)..(31): Xaa is C or S

SEQ ID NO: 33948 - protein, 31 aa, Artificial Sequence; identical to SEQ ID NO: 5619
  Cyclic GFR-binding peptide
  MOD_RES (31)..(31): Xaa is C or S

SEQ ID NO: 33949 - protein, 30 aa, Artificial Sequence; identical to SEQ ID NO: 5621
  Cyclic GFR-binding peptide

SEQ ID NO: 33950 - protein, 36 aa, Artificial Sequence
  Cyclic GFR-binding peptide
  MOD_RES (30)..(31): Xaa is C or S
VVMDRYKKLVVNNAADFYLISIANLRAPVXXSAPAA

SEQ ID NO: 33951 - protein, 27 aa, Artificial Sequence
  Cyclic GFR-binding peptide
SRVVMNEYKFKIVNSSDDLYLVSIPEL

SEQ ID NO: 33952 - protein, 23 aa, Artificial Sequence
  Cyclic GFR-binding peptide
EEYQKYTPVGMDDIYLVSIPSLK

SEQ ID NO: 33953 - protein, 33 aa, Artificial Sequence
  Cyclic GFR-binding peptide
  MOD_RES (29)..(30): Xaa is C or S
MGEEYQKYTPVGMDDIYLVSIPSLKTPVXXAKG

SEQ ID NO: 33954 - protein, 23 aa, Artificial Sequence
  Cyclic GFR-binding peptide
AMGYHYKLYTVVGKDKYLISIPS

SEQ ID NO: 33955 - protein, 33 aa, Artificial Sequence
  Cyclic GFR-binding peptide
  MOD_RES (29)..(30): Xaa is C or S
VVMEYKFKVKPTRGVLYLISIPELDQPVXXPSA

SEQ ID NO: 33956 - protein, 31 aa, Artificial Sequence; identical to SEQ ID NO: 5626
  Cyclic GFR-binding peptide
  MOD_RES (30)..(31): Xaa is C or S

SEQ ID NO: 33957 - protein, 24 aa, Artificial Sequence
  Cyclic GFR-binding peptide
YHYKLVKPKRGVKYLISIPSLAQP

SEQ ID NO: 33958 - protein, 35 aa, Artificial Sequence; identical to SEQ ID NO: 5629
  Cyclic GFR-binding peptide
  MOD_RES (1)..(3)..(35): Xaa is C or S

SEQ ID NO: 33959 - protein, 37 aa, Artificial Sequence
  Cyclic GFR-binding peptide
  MOD_RES (32)..(33): Xaa is C or S
GEVVMDEYKFKVVKENEDLYLMSIPELETPVXXAKPI

SEQ ID NO: 33960 - protein, 33 aa, Artificial Sequence; identical to SEQ ID NO: 5630
  Cyclic GFR-binding peptide
  MOD_RES (28)..(29): Xaa is C or S

SEQ ID NO: 33961 - protein, 32 aa, Artificial Sequence
  Cyclic GFR-binding peptide
  MOD_RES (2)..(2): Xaa is C or S
GXESVAMGEYQKYYTVVGKDIYLISIPSLKTP

SEQ ID NO: 33962 - protein, 29 aa, Artificial Sequence
  Cyclic GFR-binding peptide
  MOD_RES (29)..(29): Xaa is C or S
VMDEYQKYVVKENEDIYLMSIPSLETPVX

SEQ ID NO: 33963 - protein, 31 aa, Artificial Sequence
  Cyclic GFR-binding peptide
  MOD_RES (27)..(28): Xaa is C or S
DEYQKYVVKENEDIYLMSIPSLETPVXXAKP

SEQ ID NO: 33964 - protein, 26 aa, Artificial Sequence
  Cyclic GFR-binding peptide
  MOD_RES (26)..(26): Xaa is C or S
YHYKLIVNSSDDKYLVSIPSLQTPAX

SEQ ID NO: 33965 - protein, 26 aa, Artificial Sequence
  Cyclic GFR-binding peptide
VVMEYHYKLVVKDYEDKYLMSIPSLE

SEQ ID NO: 33966 - protein, 27 aa, Artificial Sequence
  Cyclic GFR-binding peptide
  MOD_RES (27)..(27): Xaa is C or S
NYHYKLIVNSSDDKYLVSIPSLQTPAX

SEQ ID NO: 33967 - protein, 37 aa, Artificial Sequence; identical to SEQ ID NO: 5637
  Cyclic GFR-binding peptide
  MOD_RES (2)..(34)..(35): Xaa is C or S

SEQ ID NO: 33968 - protein, 27 aa, Artificial Sequence
  Cyclic GFR-binding peptide
VMDRYKKLVVKENEDFYLMSIANLETP

SEQ ID NO: 33969 - protein, 29 aa, Artificial Sequence
  Cyclic GFR-binding peptide
  MOD_RES (26)..(27): Xaa is C or S
YHYKLIVNSSDDKYLVSIPSLKTPAXXPK

SEQ ID NO: 33970 - protein, 27 aa, Artificial Sequence
  Cyclic GFR-binding peptide
  MOD_RES (1)..(1): Xaa is C or S
XSKVIMRYKKLIKPTKGIFYLISIANL

SEQ ID NO: 33971 - protein, 33 aa, Artificial Sequence
  Cyclic GFR-binding peptide
  MOD_RES (29)..(30): Xaa is C or S
VMNEYKFKIVNSSDDLYLVSIPELQTPAXXPKP

SEQ ID NO: 33972 - protein, 35 aa, Artificial Sequence; identical to SEQ ID NO: 5644
  Cyclic GFR-binding peptide
  MOD_RES (1)..(32)..(33): Xaa is C or S

SEQ ID NO: 33973 - protein, 34 aa, Artificial Sequence
  Cyclic GFR-binding peptide
  MOD_RES (1)..(33)..(34): Xaa is C or S
XARVVMNEYQKYIVNSSDDIYLVSIPSLQTPAXX

SEQ ID NO: 33974 - protein, 29 aa, Artificial Sequence
  Cyclic GFR-binding peptide
  MOD_RES (26)..(27): Xaa is C or S
YHYKLVVKENEDKYLMSIPSLETPVXXAK

SEQ ID NO: 33975 - protein, 35 aa, Artificial Sequence; identical to SEQ ID NO: 5646
  Cyclic GFR-binding peptide
  MOD_RES (2)..(33)..(34): Xaa is C or S

SEQ ID NO: 33976 - protein, 29 aa, Artificial Sequence
  Cyclic GFR-binding peptide
VVMNEYQKYIVNNSSDIYLVSIPSLKTPA

SEQ ID NO: 33977 - protein, 22 aa, Artificial Sequence
  Cyclic GFR-binding peptide
VMYHYKLVKPTRGVKYLISIPS

SEQ ID NO: 33978 - protein, 28 aa, Artificial Sequence
  Cyclic GFR-binding peptide
  MOD_RES (2)..(2): Xaa is C or S
GXGEVVMEYHYKLVVKDYEDKYLMSIPS

SEQ ID NO: 33979 - protein, 32 aa, Artificial Sequence
  Cyclic GFR-binding peptide
  MOD_RES (26)..(27): Xaa is C or S
EYKFKVKPKRGVLYLISIPELAQPVXXPAASA

SEQ ID NO: 33980 - protein, 31 aa, Artificial Sequence
  Cyclic GFR-binding peptide
AKVVMNEYKFKIVNNSSDLYLVSIPELKTPA

SEQ ID NO: 33981 - protein, 32 aa, Artificial Sequence
  Cyclic GFR-binding peptide
  MOD_RES (1)..(3): Xaa is C or S
XGXAKVVMNEYQKYIVNNSSDIYLVSIPSLKT

SEQ ID NO: 33982 - protein, 38 aa, Artificial Sequence
  Cyclic GFR-binding peptide
  MOD_RES (2)..(34)..(35): Xaa is C or S
GXGEVVMEEYKFKVVKDYEDLYLMSIPELETPVXXAKP

SEQ ID NO: 33983 - protein, 26 aa, Artificial Sequence
  Cyclic GFR-binding peptide
  MOD_RES (1)..(1): Xaa is C or S
XSKVIMYHYKLIKPTKGIKYLISIPS

SEQ ID NO: 33984 - protein, 28 aa, Artificial Sequence
  Cyclic GFR-binding peptide
  MOD_RES (26)..(27): Xaa is C or S
RYKKLVVNNAADFYLISIANLRAPVXXS

SEQ ID NO: 33985 - protein, 31 aa, Artificial Sequence; identical to SEQ ID NO: 5657
  Cyclic GFR-binding peptide

SEQ ID NO: 33986 - protein, 28 aa, Artificial Sequence
  Cyclic GFR-binding peptide
VAMGYHYKLYTVVGKDKYLISIPSLKTP

SEQ ID NO: 33987 - protein, 27 aa, Artificial Sequence
  Cyclic GFR-binding peptide
EAVSMGERYKKLTPVGMDDFYLVSIAN

SEQ ID NO: 33988 - protein, 32 aa, Artificial Sequence; identical to SEQ ID NO: 5659
  Cyclic GFR-binding peptide
  MOD_RES (30)..(31): Xaa is C or S

SEQ ID NO: 33989 - protein, 35 aa, Artificial Sequence
  Cyclic GFR-binding peptide
  MOD_RES (2)..(4): Xaa is C or S
RXGXAEVVMDRYKKLVVNNAADFYLISIANLRAPV

SEQ ID NO: 33990 - protein, 25 aa, Artificial Sequence
  Cyclic GFR-binding peptide
IMYHYKLIKPTKGIKYLISIPSLDQ

SEQ ID NO: 33991 - protein, 28 aa, Artificial Sequence
  Cyclic GFR-binding peptide
  MOD_RES (26)..(27): Xaa is C or S
YHYKLVKPTRGVKYLISIPSLDQPVXXP

SEQ ID NO: 33992 - protein, 25 aa, Artificial Sequence
  Cyclic GFR-binding peptide
MERYKKLVVKDYEDFYLMSIANLET

SEQ ID NO: 33993 - protein, 23 aa, Artificial Sequence
  Cyclic GFR-binding peptide
VMDRYKKLVVKENEDFYLMSIAN

SEQ ID NO: 33994 - protein, 38 aa, Artificial Sequence; identical to SEQ ID NO: 5666
  Cyclic GFR-binding peptide
  MOD_RES (2)..(4)..(35)..(36): Xaa is C or S

SEQ ID NO: 33995 - protein, 34 aa, Artificial Sequence
  Cyclic GFR-binding peptide
  MOD_RES (2)..(34): Xaa is C or S
GXARVVMNEYKFKIVNSSDDLYLVSIPELQTPAX

SEQ ID NO: 33996 - protein, 24 aa, Artificial Sequence
  Cyclic GFR-binding peptide
YHYKLVVNNAADKYLISIPSLRAP

SEQ ID NO: 33997 - protein, 32 aa, Artificial Sequence; identical to SEQ ID NO: 5670
  Cyclic GFR-binding peptide
  MOD_RES (32)..(32): Xaa is C or S

SEQ ID NO: 33998 - protein, 27 aa, Artificial Sequence
  Cyclic GFR-binding peptide
  MOD_RES (26)..(27): Xaa is C or S
RYKKLIVNSSDDFYLVSIANLKTPAXX

SEQ ID NO: 33999 - protein, 35 aa, Artificial Sequence
  Cyclic GFR-binding peptide
  MOD_RES (32)..(33): Xaa is C or S
AVSMGEEYKFKTPVGMDDLYLVSIPELKTPVXXAK

SEQ ID NO: 34000 - protein, 37 aa, Artificial Sequence
  Cyclic GFR-binding peptide
  MOD_RES (31)..(32): Xaa is C or S
KVVMNEYKFKIVNNSSDLYLVSIPELKTPAXXAKPVA

SEQ ID NO: 34001 - protein, 28 aa, Artificial Sequence
  Cyclic GFR-binding peptide
  MOD_RES (26)..(27): Xaa is C or S
EYQKYYTVVGKDIYLISIPSLKTPVXXA

SEQ ID NO: 34002 - protein, 39 aa, Artificial Sequence; identical to SEQ ID NO: 5673
  Cyclic GFR-binding peptide
  MOD_RES (2)..(34)..(35): Xaa is C or S

SEQ ID NO: 34003 - protein, 32 aa, Artificial Sequence; identical to SEQ ID NO: 5674
  Cyclic GFR-binding peptide
  MOD_RES (27)..(28): Xaa is C or S

SEQ ID NO: 34004 - protein, 30 aa, Artificial Sequence
  Cyclic GFR-binding peptide
  MOD_RES (1)..(1): Xaa is C or S
XAEVVMDYHYKLVVNNAADKYLISIPSLRA

SEQ ID NO: 34005 - protein, 30 aa, Artificial Sequence
  Cyclic GFR-binding peptide
  MOD_RES (29)..(30): Xaa is C or S
AMGYHYKLYTVVGKDKYLISIPSLKTPVXX

SEQ ID NO: 34006 - protein, 37 aa, Artificial Sequence; identical to SEQ ID NO: 5676
  Cyclic GFR-binding peptide
  MOD_RES (1)..(33)..(34): Xaa is C or S

SEQ ID NO: 34007 - protein, 37 aa, Artificial Sequence
  Cyclic GFR-binding peptide
  MOD_RES (2)..(4)..(37): Xaa is C or S
RXGXEAVSMGEEYKFKTPVGMDDLYLVSIPELKTPVX

SEQ ID NO: 34008 - protein, 36 aa, Artificial Sequence; identical to SEQ ID NO: 5677
  Cyclic GFR-binding peptide
  MOD_RES (1)..(3)..(35)..(36): Xaa is C or S

SEQ ID NO: 34009 - protein, 32 aa, Artificial Sequence; identical to SEQ ID NO: 5680
  Cyclic GFR-binding peptide
  MOD_RES (28)..(29): Xaa is C or S

SEQ ID NO: 34010 - protein, 38 aa, Artificial Sequence
  Cyclic GFR-binding peptide
  MOD_RES (1)..(32)..(33): Xaa is C or S
XSKVIMEYKFKIKPTKGILYLISIPELDQSVXXPSASA

SEQ ID NO: 34011 - protein, 31 aa, Artificial Sequence
  Cyclic GFR-binding peptide
  MOD_RES (31)..(31): Xaa is C or S
SKVVMEYQKYVKPTRGVIYLISIPSLDQPVX

SEQ ID NO: 34012 - protein, 25 aa, Artificial Sequence
  Cyclic GFR-binding peptide
VIMEYKFKIKPTKGILYLISIPELD

SEQ ID NO: 34013 - protein, 36 aa, Artificial Sequence
  Cyclic GFR-binding peptide
  MOD_RES (2)..(4): Xaa is C or S
RXGXEAVSMGEEYQKYTPVGMDDIYLVSIPSLKTPV

SEQ ID NO: 34014 - protein, 23 aa, Artificial Sequence
  Cyclic GFR-binding peptide
MDRYKKLVVNNAADFYLISIANL

SEQ ID NO: 34015 - protein, 27 aa, Artificial Sequence
  Cyclic GFR-binding peptide
  MOD_RES (1)..(1): Xaa is C or S
XGEVVMDRYKKLVVKENEDFYLMSIAN

SEQ ID NO: 34016 - protein, 35 aa, Artificial Sequence; identical to SEQ ID NO: 5683
  Cyclic GFR-binding peptide
  MOD_RES (31)..(32): Xaa is C or S

SEQ ID NO: 34017 - protein, 30 aa, Artificial Sequence
  Cyclic GFR-binding peptide
  MOD_RES (27)..(28): Xaa is C or S
NEYKFKIVNSSDDLYLVSIPELKTPAXXPK

SEQ ID NO: 34018 - protein, 34 aa, Artificial Sequence
  Cyclic GFR-binding peptide
  MOD_RES (28)..(29): Xaa is C or S
MDEYQKYVVKENEDIYLMSIPSLETPVXXAKPIK

SEQ ID NO: 34019 - protein, 31 aa, Artificial Sequence; identical to SEQ ID NO: 5688
  Cyclic GFR-binding peptide
  MOD_RES (2)..(4): Xaa is C or S

SEQ ID NO: 34020 - protein, 36 aa, Artificial Sequence
  Cyclic GFR-binding peptide
  MOD_RES (32)..(33): Xaa is C or S
ESVAMGYHYKLYTVVGKDKYLISIPSLKTPVXXAKS

SEQ ID NO: 34021 - protein, 26 aa, Artificial Sequence
  Cyclic GFR-binding peptide
  MOD_RES (26)..(26): Xaa is C or S
EYQKYVVKENEDIYLMSIPSLETPVX

SEQ ID NO: 34022 - protein, 28 aa, Artificial Sequence
  Cyclic GFR-binding peptide
  MOD_RES (27)..(28): Xaa is C or S
NYHYKLIVNSSDDKYLVSIPSLQTPAXX

SEQ ID NO: 34023 - protein, 35 aa, Artificial Sequence; identical to SEQ ID NO: 5692
  Cyclic GFR-binding peptide
  MOD_RES (29)..(30): Xaa is C or S

SEQ ID NO: 34024 - protein, 32 aa, Artificial Sequence
  Cyclic GFR-binding peptide
  MOD_RES (31)..(31): Xaa is C or S
RVVMNEYKFKIVNSSDDLYLVSIPELKTPAXT

SEQ ID NO: 34025 - protein, 22 aa, Artificial Sequence
  Cyclic GFR-binding peptide
IMEYQKYIKPTKGIIYLISIPS

SEQ ID NO: 34026 - protein, 33 aa, Artificial Sequence; identical to SEQ ID NO: 5696
  Cyclic GFR-binding peptide
  MOD_RES (28)..(29): Xaa is C or S

SEQ ID NO: 34027 - protein, 31 aa, Artificial Sequence; identical to SEQ ID NO: 5697
  Cyclic GFR-binding peptide
  MOD_RES (31)..(31): Xaa is C or S

SEQ ID NO: 34028 - protein, 34 aa, Artificial Sequence
  Cyclic GFR-binding peptide
  MOD_RES (28)..(29): Xaa is C or S
GEEYKFKTPVGMDDLYLVSIPELKTPVXXAKGVK

SEQ ID NO: 34029 - protein, 30 aa, Artificial Sequence
  Cyclic GFR-binding peptide
AEVVMDRYKKLVVNNAADFYLISIANLRAP

SEQ ID NO: 34030 - protein, 34 aa, Artificial Sequence
  Cyclic GFR-binding peptide
  MOD_RES (1)..(33): Xaa is C or S
XSRVVMNEYQKYIVNSSDDIYLVSIPSLKTPAXT

SEQ ID NO: 34031 - protein, 22 aa, Artificial Sequence
  Cyclic GFR-binding peptide
IMEYKFKVKPKRGVLYLISIPE

SEQ ID NO: 34032 - protein, 34 aa, Artificial Sequence; identical to SEQ ID NO: 5699
  Cyclic GFR-binding peptide
  MOD_RES (1)..(33)..(34): Xaa is C or S

SEQ ID NO: 34033 - protein, 31 aa, Artificial Sequence
  Cyclic GFR-binding peptide
  MOD_RES (26)..(27): Xaa is C or S
RYKKLVVNNAADFYLISIANLRAPVXXSAPA

SEQ ID NO: 34034 - protein, 27 aa, Artificial Sequence
  Cyclic GFR-binding peptide
  MOD_RES (27)..(27): Xaa is C or S
MEYKFKVKPKRGVLYLISIPELAQPVX

SEQ ID NO: 34035 - protein, 26 aa, Artificial Sequence
  Cyclic GFR-binding peptide
  MOD_RES (26)..(26): Xaa is C or S
RYKKLIVNNSSDFYLVSIANLKTPAX

SEQ ID NO: 34036 - protein, 28 aa, Artificial Sequence
  Cyclic GFR-binding peptide
  MOD_RES (27)..(28): Xaa is C or S
MEYKFKVKPKRGVLYLISIPELAQPVXX

SEQ ID NO: 34037 - protein, 31 aa, Artificial Sequence
  Cyclic GFR-binding peptide
  MOD_RES (31)..(31): Xaa is C or S
EVVMDYHYKLVVNNAADKYLISIPSLRAPVX

SEQ ID NO: 34038 - protein, 27 aa, Artificial Sequence
  Cyclic GFR-binding peptide
EVVMDEYKFKVVKENEDLYLMSIPELE

SEQ ID NO: 34039 - protein, 41 aa, Artificial Sequence; identical to SEQ ID NO: 5704
  Cyclic GFR-binding peptide
  MOD_RES (1)..(3)..(35)..(36): Xaa is C or S

SEQ ID NO: 34040 - protein, 28 aa, Artificial Sequence
  Cyclic GFR-binding peptide
  MOD_RES (27)..(28): Xaa is C or S
EYHYKLVVKDYEDKYLMSIPSLETPVXX

SEQ ID NO: 34041 - protein, 26 aa, Artificial Sequence
  Cyclic GFR-binding peptide
SVAMGYHYKLYTVVGKDKYLISIPSL

SEQ ID NO: 34042 - protein, 39 aa, Artificial Sequence; identical to SEQ ID NO: 5708
  Cyclic GFR-binding peptide
  MOD_RES (2)..(4)..(35)..(36): Xaa is C or S

SEQ ID NO: 34043 - protein, 22 aa, Artificial Sequence
  Cyclic GFR-binding peptide
RYKKLIVNNSSDFYLVSIANLK

SEQ ID NO: 34044 - protein, 27 aa, Artificial Sequence
  Cyclic GFR-binding peptide
VMEEYKFKVVKDYEDLYLMSIPELETP

SEQ ID NO: 34045 - protein, 35 aa, Artificial Sequence
  Cyclic GFR-binding peptide
  MOD_RES (2)..(4): Xaa is C or S
RXGXEAVSMGEEYKFKTPVGMDDLYLVSIPELKTP

SEQ ID NO: 34046 - protein, 33 aa, Artificial Sequence; identical to SEQ ID NO: 5712
  Cyclic GFR-binding peptide
  MOD_RES (2)..(2): Xaa is C or S

SEQ ID NO: 34047 - protein, 37 aa, Artificial Sequence
  Cyclic GFR-binding peptide
  MOD_RES (32)..(33): Xaa is C or S
AKVVMNEYQKYIVNNSSDIYLVSIPSLKTPAXXAKPV

SEQ ID NO: 34048 - protein, 31 aa, Artificial Sequence
  Cyclic GFR-binding peptide
  MOD_RES (1)..(3): Xaa is C or S
XGXEAVSMGEEYKFKTPVGMDDLYLVSIPEL

SEQ ID NO: 34049 - protein, 22 aa, Artificial Sequence
  Cyclic GFR-binding peptide
EEYQKYTPVGMDDIYLVSIPSL

SEQ ID NO: 34050 - protein, 31 aa, Artificial Sequence; identical to SEQ ID NO: 5715
  Cyclic GFR-binding peptide
  MOD_RES (1)..(3): Xaa is C or S

SEQ ID NO: 34051 - protein, 21 aa, Artificial Sequence
  Cyclic GFR-binding peptide
RYKKLVVKDYEDFYLMSIANL

SEQ ID NO: 34052 - protein, 39 aa, Artificial Sequence
  Cyclic GFR-binding peptide
  MOD_RES (2)..(4)..(36)..(37): Xaa is C or S
RXGXGEVVMEEYKFKVVKDYEDLYLMSIPELETPVXXAK

SEQ ID NO: 34053 - protein, 27 aa, Artificial Sequence
  Cyclic GFR-binding peptide
SMGEEYQKYTPVGMDDIYLVSIPSLKT

SEQ ID NO: 34054 - protein, 27 aa, Artificial Sequence
  Cyclic GFR-binding peptide
  MOD_RES (26)..(27): Xaa is C or S
YHYKLIKPTKGIKYLISIPSLDQSVXX

SEQ ID NO: 34055 - protein, 30 aa, Artificial Sequence
  Cyclic GFR-binding peptide
  MOD_RES (29)..(30): Xaa is C or S
VIMEYQKYIKPTKGIIYLISIPSLDQSVXX

SEQ ID NO: 34056 - protein, 28 aa, Artificial Sequence
  Cyclic GFR-binding peptide
  MOD_RES (2)..(2): Xaa is C or S
GXARVVMNEYKFKIVNSSDDLYLVSIPE

SEQ ID NO: 34057 - protein, 36 aa, Artificial Sequence
  Cyclic GFR-binding peptide
  MOD_RES (1)..(34)..(35): Xaa is C or S
XEAVSMGEEYKFKTPVGMDDLYLVSIPELKTPVXXA

SEQ ID NO: 34058 - protein, 31 aa, Artificial Sequence; identical to SEQ ID NO: 5723
  Cyclic GFR-binding peptide
  MOD_RES (31)..(31): Xaa is C or S

SEQ ID NO: 34059 - protein, 25 aa, Artificial Sequence
  Cyclic GFR-binding peptide
SKVIMEYQKYIKPTKGIIYLISIPS

SEQ ID NO: 34060 - protein, 33 aa, Artificial Sequence; identical to SEQ ID NO: 5727
  Cyclic GFR-binding peptide
  MOD_RES (2)..(4): Xaa is C or S

SEQ ID NO: 34061 - protein, 37 aa, Artificial Sequence; identical to SEQ ID NO: 5729
  Cyclic GFR-binding peptide
  MOD_RES (1)..(3)..(35)..(36): Xaa is C or S

SEQ ID NO: 34062 - protein, 37 aa, Artificial Sequence
  Cyclic GFR-binding peptide
  MOD_RES (32)..(33): Xaa is C or S
AEVVMDEYKFKVVNNAADLYLISIPELRAPVXXSAPA

SEQ ID NO: 34063 - protein, 30 aa, Artificial Sequence; identical to SEQ ID NO: 5733
  Cyclic GFR-binding peptide
  MOD_RES (30)..(30): Xaa is C or S

SEQ ID NO: 34064 - protein, 32 aa, Artificial Sequence
  Cyclic GFR-binding peptide
  MOD_RES (28)..(29): Xaa is C or S
MDYHYKLVVNNAADKYLISIPSLRAPVXXSAP

SEQ ID NO: 34065 - protein, 32 aa, Artificial Sequence
  Cyclic GFR-binding peptide
  MOD_RES (1)..(3): Xaa is C or S
XGXGEVVMDEYQKYVVKENEDIYLMSIPSLET

SEQ ID NO: 34066 - protein, 34 aa, Artificial Sequence; identical to SEQ ID NO: 5735
  Cyclic GFR-binding peptide
  MOD_RES (31)..(32): Xaa is C or S

SEQ ID NO: 34067 - protein, 34 aa, Artificial Sequence
  Cyclic GFR-binding peptide
  MOD_RES (30)..(31): Xaa is C or S
VVMNEYKFKIVNSSDDLYLVSIPELKTPAXXPKP

SEQ ID NO: 34068 - protein, 34 aa, Artificial Sequence
  Cyclic GFR-binding peptide
  MOD_RES (28)..(29): Xaa is C or S
MDYHYKLVVNNAADKYLISIPSLRAPVXXSAPAA

SEQ ID NO: 34069 - protein, 27 aa, Artificial Sequence
  Cyclic GFR-binding peptide
MGEEYKFKTPVGMDDLYLVSIPELKTP

SEQ ID NO: 34070 - protein, 25 aa, Artificial Sequence
  Cyclic GFR-binding peptide
KVVMNEYKFKIVNNSSDLYLVSIPE

SEQ ID NO: 34071 - protein, 24 aa, Artificial Sequence
  Cyclic GFR-binding peptide
EYKFKIVNSSDDLYLVSIPELKTP

SEQ ID NO: 34072 - protein, 30 aa, Artificial Sequence
  Cyclic GFR-binding peptide
  MOD_RES (2)..(2): Xaa is C or S
GXARVVMNEYKFKIVNSSDDLYLVSIPELQ

SEQ ID NO: 34073 - protein, 31 aa, Artificial Sequence; identical to SEQ ID NO: 5741
  Cyclic GFR-binding peptide
  MOD_RES (27)..(28): Xaa is C or S

SEQ ID NO: 34074 - protein, 33 aa, Artificial Sequence; identical to SEQ ID NO: 5742
  Cyclic GFR-binding peptide
  MOD_RES (31)..(31): Xaa is C or S

SEQ ID NO: 34075 - protein, 24 aa, Artificial Sequence
  Cyclic GFR-binding peptide
VVMRYKKLVKPTRGVFYLISIANL

SEQ ID NO: 34076 - protein, 33 aa, Artificial Sequence
  Cyclic GFR-binding peptide
  MOD_RES (2)..(2): Xaa is C or S
GXARVVMNEYQKYIVNSSDDIYLVSIPSLQTPA

SEQ ID NO: 34077 - protein, 37 aa, Artificial Sequence
  Cyclic GFR-binding peptide
  MOD_RES (2)..(4)..(36)..(37): Xaa is C or S
RXGXGEVVMEEYQKYVVKDYEDIYLMSIPSLETPVXX

SEQ ID NO: 34078 - protein, 40 aa, Artificial Sequence
  Cyclic GFR-binding peptide
  MOD_RES (2)..(34)..(35): Xaa is C or S
GXAKVVMNEYQKYIVNNSSDIYLVSIPSLKTPAXXAKPVA

SEQ ID NO: 34079 - protein, 34 aa, Artificial Sequence
  Cyclic GFR-binding peptide
  MOD_RES (1)..(33)..(34): Xaa is C or S
XARVVMNEYKFKIVNSSDDLYLVSIPELQTPAXX

SEQ ID NO: 34080 - protein, 39 aa, Artificial Sequence
  Cyclic GFR-binding peptide
  MOD_RES (2)..(34)..(35): Xaa is C or S
GXAEVVMDRYKKLVVNNAADFYLISIANLRAPVXXSAPA

SEQ ID NO: 34081 - protein, 23 aa, Artificial Sequence
  Cyclic GFR-binding peptide
VMDEYQKYVVKENEDIYLMSIPS

SEQ ID NO: 34082 - protein, 31 aa, Artificial Sequence
  Cyclic GFR-binding peptide
  MOD_RES (30)..(31): Xaa is C or S
RVIMEYKFKVKPKRGVLYLISIPELAQPVXX

SEQ ID NO: 34083 - protein, 30 aa, Artificial Sequence
  Cyclic GFR-binding peptide
  MOD_RES (26)..(27): Xaa is C or S
EYKFKIVNSSDDLYLVSIPELKTPAXXPKP

SEQ ID NO: 34084 - protein, 29 aa, Artificial Sequence
  Cyclic GFR-binding peptide
  MOD_RES (1)..(1): Xaa is C or S
XSKVVMEYKFKVKPTRGVLYLISIPELDQ

SEQ ID NO: 34085 - protein, 35 aa, Artificial Sequence
  Cyclic GFR-binding peptide
  MOD_RES (1)..(33)..(34): Xaa is C or S
XAKVVMNEYKFKIVNNSSDLYLVSIPELKTPAXXA

SEQ ID NO: 34086 - protein, 42 aa, Artificial Sequence
  Cyclic GFR-binding peptide
  MOD_RES (2)..(4)..(36)..(37): Xaa is C or S
RXGXGEVVMDEYKFKVVKENEDLYLMSIPELETPVXXAKPIK

SEQ ID NO: 34087 - protein, 23 aa, Artificial Sequence
  Cyclic GFR-binding peptide
MNYHYKLIVNSSDDKYLVSIPSL

SEQ ID NO: 34088 - protein, 25 aa, Artificial Sequence
  Cyclic GFR-binding peptide
RYKKLVVKDYEDFYLMSIANLETPV

SEQ ID NO: 34089 - protein, 30 aa, Artificial Sequence
  Cyclic GFR-binding peptide
EVVMEEYKFKVVKDYEDLYLMSIPELETPV

SEQ ID NO: 34090 - protein, 29 aa, Artificial Sequence
  Cyclic GFR-binding peptide
SRVIMYHYKLVKPKRGVKYLISIPSLAQP

SEQ ID NO: 34091 - protein, 29 aa, Artificial Sequence
  Cyclic GFR-binding peptide
VVMDYHYKLVVNNAADKYLISIPSLRAPV

SEQ ID NO: 34092 - protein, 36 aa, Artificial Sequence
  Cyclic GFR-binding peptide
  MOD_RES (2)..(33)..(34): Xaa is C or S
KXSKVVMEYKFKVKPTRGVLYLISIPELDQPVXXPS

SEQ ID NO: 34093 - protein, 34 aa, Artificial Sequence; identical to SEQ ID NO: 5755
  Cyclic GFR-binding peptide
  MOD_RES (1)..(33)..(34): Xaa is C or S

SEQ ID NO: 34094 - protein, 36 aa, Artificial Sequence; identical to SEQ ID NO: 5756
  Cyclic GFR-binding peptide
  MOD_RES (1)..(32)..(33): Xaa is C or S

SEQ ID NO: 34095 - protein, 31 aa, Artificial Sequence
  Cyclic GFR-binding peptide
  MOD_RES (30)..(31): Xaa is C or S
VVMDEYKFKVVNNAADLYLISIPELRAPVXX

SEQ ID NO: 34096 - protein, 25 aa, Artificial Sequence
  Cyclic GFR-binding peptide
VVMEYHYKLVVKDYEDKYLMSIPSL

SEQ ID NO: 34097 - protein, 26 aa, Artificial Sequence
  Cyclic GFR-binding peptide
  MOD_RES (26)..(26): Xaa is C or S
EYKFKIKPTKGILYLISIPELDQSVX

SEQ ID NO: 34098 - protein, 30 aa, Artificial Sequence; identical to SEQ ID NO: 5761
  Cyclic GFR-binding peptide
  MOD_RES (2)..(4): Xaa is C or S

SEQ ID NO: 34099 - protein, 37 aa, Artificial Sequence; identical to SEQ ID NO: 5762
  Cyclic GFR-binding peptide
  MOD_RES (2)..(33)..(34): Xaa is C or S

SEQ ID NO: 34100 - protein, 22 aa, Artificial Sequence
  Cyclic GFR-binding peptide
MEYQKYIKPTKGIIYLISIPSL

SEQ ID NO: 34101 - protein, 35 aa, Artificial Sequence
  Cyclic GFR-binding peptide
  MOD_RES (30)..(31): Xaa is C or S
VVMEEYKFKVVKDYEDLYLMSIPELETPVXXAKPI

SEQ ID NO: 34102 - protein, 27 aa, Artificial Sequence
  Cyclic GFR-binding peptide
RVVMNEYQKYIVNSSDDIYLVSIPSLK

SEQ ID NO: 34103 - protein, 36 aa, Artificial Sequence; identical to SEQ ID NO: 5765
  Cyclic GFR-binding peptide
  MOD_RES (2)..(35)..(36): Xaa is C or S

SEQ ID NO: 34104 - protein, 27 aa, Artificial Sequence
  Cyclic GFR-binding peptide
EVVMDRYKKLVVKENEDFYLMSIANLE

SEQ ID NO: 34105 - protein, 23 aa, Artificial Sequence
  Cyclic GFR-binding peptide
EYQKYVVKENEDIYLMSIPSLET

SEQ ID NO: 34106 - protein, 25 aa, Artificial Sequence
  Cyclic GFR-binding peptide
DEYQKYVVKENEDIYLMSIPSLETP

SEQ ID NO: 34107 - protein, 31 aa, Artificial Sequence
  Cyclic GFR-binding peptide
  MOD_RES (27)..(28): Xaa is C or S
MEYQKYVKPTRGVIYLISIPSLDQPVXXPSA

SEQ ID NO: 34108 - protein, 33 aa, Artificial Sequence
  Cyclic GFR-binding peptide
  MOD_RES (28)..(29): Xaa is C or S
MGYHYKLYTVVGKDKYLISIPSLKTPVXXAKSA

SEQ ID NO: 34109 - protein, 36 aa, Artificial Sequence
  Cyclic GFR-binding peptide
  MOD_RES (30)..(31): Xaa is C or S
KVIMEYQKYIKPTKGIIYLISIPSLDQSVXXPSASA

SEQ ID NO: 34110 - protein, 35 aa, Artificial Sequence; identical to SEQ ID NO: 5775
  Cyclic GFR-binding peptide
  MOD_RES (2)..(33)..(34): Xaa is C or S

SEQ ID NO: 34111 - protein, 32 aa, Artificial Sequence; identical to SEQ ID NO: 5776
  Cyclic GFR-binding peptide
  MOD_RES (31)..(31): Xaa is C or S

SEQ ID NO: 34112 - protein, 31 aa, Artificial Sequence; identical to SEQ ID NO: 5777
  Cyclic GFR-binding peptide
  MOD_RES (30)..(30): Xaa is C or S

SEQ ID NO: 34113 - protein, 27 aa, Artificial Sequence
  Cyclic GFR-binding peptide
  MOD_RES (27)..(27): Xaa is C or S
EEYKFKTPVGMDDLYLVSIPELKTPVX

SEQ ID NO: 34114 - protein, 32 aa, Artificial Sequence; identical to SEQ ID NO: 5778
  Cyclic GFR-binding peptide
  MOD_RES (1)..(32): Xaa is C or S

SEQ ID NO: 34115 - protein, 36 aa, Artificial Sequence
  Cyclic GFR-binding peptide
  MOD_RES (1)..(3)..(35)..(36): Xaa is C or S
XGXGEVVMEEYKFKVVKDYEDLYLMSIPELETPVXX

SEQ ID NO: 34116 - protein, 28 aa, Artificial Sequence
  Cyclic GFR-binding peptide
  MOD_RES (1)..(1): Xaa is C or S
XESVAMGEYQKYYTVVGKDIYLISIPSL

SEQ ID NO: 34117 - protein, 24 aa, Artificial Sequence
  Cyclic GFR-binding peptide
KVIMRYKKLIKPTKGIFYLISIAN

SEQ ID NO: 34118 - protein, 38 aa, Artificial Sequence
  Cyclic GFR-binding peptide
  MOD_RES (1)..(3)..(35)..(36): Xaa is C or S
XGXGEVVMEEYQKYVVKDYEDIYLMSIPSLETPVXXAK

SEQ ID NO: 34119 - protein, 37 aa, Artificial Sequence
  Cyclic GFR-binding peptide
  MOD_RES (31)..(31): Xaa is C or S
RVVMNEYQKYIVNSSDDIYLVSIPSLKTPAXTPKTVH

SEQ ID NO: 34120 - protein, 21 aa, Artificial Sequence
  Cyclic GFR-binding peptide
MRYKKLVKPTRGVFYLISIAN

SEQ ID NO: 34121 - protein, 31 aa, Artificial Sequence; identical to SEQ ID NO: 5784
  Cyclic GFR-binding peptide
  MOD_RES (30)..(31): Xaa is C or S

SEQ ID NO: 34122 - protein, 26 aa, Artificial Sequence
  Cyclic GFR-binding peptide
MEYQKYVKPKRGVIYLISIPSLAQPV

SEQ ID NO: 34123 - protein, 30 aa, Artificial Sequence
  Cyclic GFR-binding peptide
  MOD_RES (1)..(1): Xaa is C or S
XAEVVMDRYKKLVVNNAADFYLISIANLRA

SEQ ID NO: 34124 - protein, 22 aa, Artificial Sequence
  Cyclic GFR-binding peptide
NEYQKYIVNSSDDIYLVSIPSL

SEQ ID NO: 34125 - protein, 22 aa, Artificial Sequence
  Cyclic GFR-binding peptide
YHYKLIVNSSDDKYLVSIPSLQ

SEQ ID NO: 34126 - protein, 34 aa, Artificial Sequence
  Cyclic GFR-binding peptide
  MOD_RES (2)..(2): Xaa is C or S
GXEAVSMGEEYKFKTPVGMDDLYLVSIPELKTPV

SEQ ID NO: 34127 - protein, 35 aa, Artificial Sequence
  Cyclic GFR-binding peptide
  MOD_RES (1)..(33)..(34): Xaa is C or S
XAKVVMNEYQKYIVNNSSDIYLVSIPSLKTPAXXA

SEQ ID NO: 34128 - protein, 38 aa, Artificial Sequence
  Cyclic GFR-binding peptide
  MOD_RES (2)..(4)..(35)..(36): Xaa is C or S
SXKXSRVIMEYKFKVKPKRGVLYLISIPELAQPVXXPA

SEQ ID NO: 34129 - protein, 23 aa, Artificial Sequence
  Cyclic GFR-binding peptide
VMNEYQKYIVNNSSDIYLVSIPS

SEQ ID NO: 34130 - protein, 35 aa, Artificial Sequence
  Cyclic GFR-binding peptide
  MOD_RES (1)..(33)..(34): Xaa is C or S
XESVAMGEYQKYYTVVGKDIYLISIPSLKTPVXXA

SEQ ID NO: 34131 - protein, 24 aa, Artificial Sequence
  Cyclic GFR-binding peptide
VVMNEYKFKIVNNSSDLYLVSIPE

SEQ ID NO: 34132 - protein, 35 aa, Artificial Sequence
  Cyclic GFR-binding peptide
  MOD_RES (31)..(32): Xaa is C or S
SKVVMEYKFKVKPTRGVLYLISIPELDQPVXXPSA

SEQ ID NO: 34133 - protein, 27 aa, Artificial Sequence
  Cyclic GFR-binding peptide
KVVMNEYQKYIVNNSSDIYLVSIPSLK

SEQ ID NO: 34134 - protein, 28 aa, Artificial Sequence
  Cyclic GFR-binding peptide
EAVSMGEEYKFKTPVGMDDLYLVSIPEL

SEQ ID NO: 34135 - protein, 23 aa, Artificial Sequence
  Cyclic GFR-binding peptide
VIMYHYKLVKPKRGVKYLISIPS

SEQ ID NO: 34136 - protein, 23 aa, Artificial Sequence
  Cyclic GFR-binding peptide
YHYKLIVNSSDDKYLVSIPSLQT

SEQ ID NO: 34137 - protein, 30 aa, Artificial Sequence; identical to SEQ ID NO: 5800
  Cyclic GFR-binding peptide
  MOD_RES (1)..(1): Xaa is C or S

SEQ ID NO: 34138 - protein, 25 aa, Artificial Sequence
  Cyclic GFR-binding peptide
VMNRYKKLIVNNSSDFYLVSIANLK

SEQ ID NO: 34139 - protein, 33 aa, Artificial Sequence; identical to SEQ ID NO: 5806
  Cyclic GFR-binding peptide
  MOD_RES (30)..(31): Xaa is C or S

SEQ ID NO: 34140 - protein, 32 aa, Artificial Sequence
  Cyclic GFR-binding peptide
  MOD_RES (1)..(1): Xaa is C or S
XAKVVMNEYQKYIVNNSSDIYLVSIPSLKTPA

SEQ ID NO: 34141 - protein, 26 aa, Artificial Sequence
  Cyclic GFR-binding peptide
VMNYHYKLIVNSSDDKYLVSIPSLKT

SEQ ID NO: 34142 - protein, 24 aa, Artificial Sequence
  Cyclic GFR-binding peptide
VMNYHYKLIVNNSSDKYLVSIPSL

SEQ ID NO: 34143 - protein, 22 aa, Artificial Sequence
  Cyclic GFR-binding peptide
MGRYKKLYTVVGKDFYLISIAN

SEQ ID NO: 34144 - protein, 34 aa, Artificial Sequence
  Cyclic GFR-binding peptide
  MOD_RES (31)..(32): Xaa is C or S
EVVMDEYKFKVVKENEDLYLMSIPELETPVXXAK

SEQ ID NO: 34145 - protein, 26 aa, Artificial Sequence
  Cyclic GFR-binding peptide
MNEYQKYIVNSSDDIYLVSIPSLKTP

SEQ ID NO: 34146 - protein, 32 aa, Artificial Sequence
  Cyclic GFR-binding peptide
  MOD_RES (32)..(32): Xaa is C or S
AKVVMNEYQKYIVNNSSDIYLVSIPSLKTPAX

SEQ ID NO: 34147 - protein, 28 aa, Artificial Sequence
  Cyclic GFR-binding peptide
VMNRYKKLIVNSSDDFYLVSIANLKTPA

SEQ ID NO: 34148 - protein, 34 aa, Artificial Sequence; identical to SEQ ID NO: 5820
  Cyclic GFR-binding peptide
  MOD_RES (28)..(29): Xaa is C or S

SEQ ID NO: 34149 - protein, 29 aa, Artificial Sequence
  Cyclic GFR-binding peptide
KVVMNEYQKYIVNNSSDIYLVSIPSLKTP

SEQ ID NO: 34150 - protein, 28 aa, Artificial Sequence
  Cyclic GFR-binding peptide
VMEEYQKYVVKDYEDIYLMSIPSLETPV

SEQ ID NO: 34151 - protein, 31 aa, Artificial Sequence
  Cyclic GFR-binding peptide
  MOD_RES (30)..(31): Xaa is C or S
SMGEEYKFKTPVGMDDLYLVSIPELKTPVXX

SEQ ID NO: 34152 - protein, 23 aa, Artificial Sequence
  Cyclic GFR-binding peptide
IMEYQKYVKPKRGVIYLISIPSL

SEQ ID NO: 34153 - protein, 27 aa, Artificial Sequence
  Cyclic GFR-binding peptide
  MOD_RES (27)..(27): Xaa is C or S
NEYKFKIVNSSDDLYLVSIPELQTPAX

SEQ ID NO: 34154 - protein, 29 aa, Artificial Sequence
  Cyclic GFR-binding peptide
  MOD_RES (29)..(29): Xaa is C or S
VMNEYKFKIVNSSDDLYLVSIPELKTPAX

SEQ ID NO: 34155 - protein, 30 aa, Artificial Sequence; identical to SEQ ID NO: 5822
  Cyclic GFR-binding peptide
  MOD_RES (26)..(27): Xaa is C or S

SEQ ID NO: 34156 - protein, 23 aa, Artificial Sequence
  Cyclic GFR-binding peptide
EYKFKVKPKRGVLYLISIPELAQ

SEQ ID NO: 34157 - protein, 34 aa, Artificial Sequence; identical to SEQ ID NO: 5828
  Cyclic GFR-binding peptide
  MOD_RES (29)..(30): Xaa is C or S

SEQ ID NO: 34158 - protein, 30 aa, Artificial Sequence; identical to SEQ ID NO: 5829
  Cyclic GFR-binding peptide

SEQ ID NO: 34159 - protein, 32 aa, Artificial Sequence
  Cyclic GFR-binding peptide
  MOD_RES (27)..(28): Xaa is C or S
DEYKFKVVKENEDLYLMSIPELETPVXXAKPI

SEQ ID NO: 34160 - protein, 30 aa, Artificial Sequence
  Cyclic GFR-binding peptide
GEVVMEEYKFKVVKDYEDLYLMSIPELETP

SEQ ID NO: 34161 - protein, 37 aa, Artificial Sequence
  Cyclic GFR-binding peptide
  MOD_RES (1)..(3)..(34)..(35): Xaa is C or S
XKXSKVVMEYQKYVKPTRGVIYLISIPSLDQPVXXPS

SEQ ID NO: 34162 - protein, 23 aa, Artificial Sequence
  Cyclic GFR-binding peptide
RYKKLTPVGMDDFYLVSIANLKT

SEQ ID NO: 34163 - protein, 29 aa, Artificial Sequence
  Cyclic GFR-binding peptide
  MOD_RES (27)..(28): Xaa is C or S
EEYKFKVVKDYEDLYLMSIPELETPVXXA

SEQ ID NO: 34164 - protein, 23 aa, Artificial Sequence
  Cyclic GFR-binding peptide
RYKKLIVNSSDDFYLVSIANLKT

SEQ ID NO: 34165 - protein, 23 aa, Artificial Sequence
  Cyclic GFR-binding peptide
RYKKLVVNNAADFYLISIANLRA

SEQ ID NO: 34166 - protein, 28 aa, Artificial Sequence
  Cyclic GFR-binding peptide
  MOD_RES (27)..(28): Xaa is C or S
GEYQKYYTVVGKDIYLISIPSLKTPVXX

SEQ ID NO: 34167 - protein, 38 aa, Artificial Sequence; identical to SEQ ID NO: 5834
  Cyclic GFR-binding peptide
  MOD_RES (32)..(33): Xaa is C or S

SEQ ID NO: 34168 - protein, 33 aa, Artificial Sequence; identical to SEQ ID NO: 5835
  Cyclic GFR-binding peptide
  MOD_RES (2)..(4): Xaa is C or S

SEQ ID NO: 34169 - protein, 28 aa, Artificial Sequence
  Cyclic GFR-binding peptide
SKVVMEYKFKVKPTRGVLYLISIPELDQ

SEQ ID NO: 34170 - protein, 31 aa, Artificial Sequence; identical to SEQ ID NO: 5837
  Cyclic GFR-binding peptide

SEQ ID NO: 34171 - protein, 21 aa, Artificial Sequence
  Cyclic GFR-binding peptide
EYKFKVKPKRGVLYLISIPEL

SEQ ID NO: 34172 - protein, 30 aa, Artificial Sequence
  Cyclic GFR-binding peptide
  MOD_RES (27)..(28): Xaa is C or S
EEYKFKVVKDYEDLYLMSIPELETPVXXAK

SEQ ID NO: 34173 - protein, 27 aa, Artificial Sequence
  Cyclic GFR-binding peptide
VVMEYQKYVKPTRGVIYLISIPSLDQP

SEQ ID NO: 34174 - protein, 28 aa, Artificial Sequence
  Cyclic GFR-binding peptide
  MOD_RES (27)..(28): Xaa is C or S
NEYKFKIVNSSDDLYLVSIPELQTPAXX

SEQ ID NO: 34175 - protein, 28 aa, Artificial Sequence
  Cyclic GFR-binding peptide
VMNEYKFKIVNSSDDLYLVSIPELKTPA

SEQ ID NO: 34176 - protein, 28 aa, Artificial Sequence
  Cyclic GFR-binding peptide
  MOD_RES (1)..(3): Xaa is C or S
XKXSKVVMYHYKLVKPTRGVKYLISIPS

SEQ ID NO: 34177 - protein, 31 aa, Artificial Sequence
  Cyclic GFR-binding peptide
  MOD_RES (1)..(3): Xaa is C or S
XGXAEVVMDRYKKLVVNNAADFYLISIANLR

SEQ ID NO: 34178 - protein, 34 aa, Artificial Sequence
  Cyclic GFR-binding peptide
  MOD_RES (28)..(29): Xaa is C or S
IMEYQKYVKPKRGVIYLISIPSLAQPVXXPAASA

SEQ ID NO: 34179 - protein, 29 aa, Artificial Sequence
  Cyclic GFR-binding peptide
VVMNRYKKLIVNSSDDFYLVSIANLKTPA

SEQ ID NO: 34180 - protein, 36 aa, Artificial Sequence
  Cyclic GFR-binding peptide
  MOD_RES (32)..(33): Xaa is C or S
GEVVMDEYQKYVVKENEDIYLMSIPSLETPVXXAKP

SEQ ID NO: 34181 - protein, 31 aa, Artificial Sequence; identical to SEQ ID NO: 5842
  Cyclic GFR-binding peptide
  MOD_RES (26)..(27): Xaa is C or S

SEQ ID NO: 34182 - protein, 40 aa, Artificial Sequence; identical to SEQ ID NO: 5843
  Cyclic GFR-binding peptide
  MOD_RES (2)..(4)..(36)..(37): Xaa is C or S

SEQ ID NO: 34183 - protein, 26 aa, Artificial Sequence
  Cyclic GFR-binding peptide
ARVVMNEYKFKIVNSSDDLYLVSIPE

SEQ ID NO: 34184 - protein, 38 aa, Artificial Sequence; identical to SEQ ID NO: 5848
  Cyclic GFR-binding peptide
  MOD_RES (2)..(4)..(36)..(37): Xaa is C or S

SEQ ID NO: 34185 - protein, 30 aa, Artificial Sequence
  Cyclic GFR-binding peptide
  MOD_RES (28)..(28): Xaa is C or S
MNEYKFKIVNSSDDLYLVSIPELKTPAXTP

SEQ ID NO: 34186 - protein, 27 aa, Artificial Sequence
  Cyclic GFR-binding peptide
  MOD_RES (27)..(27): Xaa is C or S
GEYQKYYTVVGKDIYLISIPSLKTPVX

SEQ ID NO: 34187 - protein, 35 aa, Artificial Sequence
  Cyclic GFR-binding peptide
  MOD_RES (32)..(33): Xaa is C or S
AEVVMDYHYKLVVNNAADKYLISIPSLRAPVXXSA

SEQ ID NO: 34188 - protein, 25 aa, Artificial Sequence
  Cyclic GFR-binding peptide
YHYKLVVKENEDKYLMSIPSLETPV

SEQ ID NO: 34189 - protein, 39 aa, Artificial Sequence
  Cyclic GFR-binding peptide
  MOD_RES (1)..(3)..(35)..(36): Xaa is C or S
XGXGEVVMEEYQKYVVKDYEDIYLMSIPSLETPVXXAKP

SEQ ID NO: 34190 - protein, 36 aa, Artificial Sequence; identical to SEQ ID NO: 5855
  Cyclic GFR-binding peptide
  MOD_RES (31)..(31): Xaa is C or S

SEQ ID NO: 34191 - protein, 41 aa, Artificial Sequence
  Cyclic GFR-binding peptide
  MOD_RES (1)..(3)..(35)..(36): Xaa is C or S
XGXAEVVMDRYKKLVVNNAADFYLISIANLRAPVXXSAPAA

SEQ ID NO: 34192 - protein, 31 aa, Artificial Sequence
  Cyclic GFR-binding peptide
  MOD_RES (28)..(29): Xaa is C or S
MNEYQKYIVNNSSDIYLVSIPSLKTPAXXAK

SEQ ID NO: 34193 - protein, 39 aa, Artificial Sequence; identical to SEQ ID NO: 5857
  Cyclic GFR-binding peptide
  MOD_RES (1)..(33): Xaa is C or S

SEQ ID NO: 34194 - protein, 39 aa, Artificial Sequence; identical to SEQ ID NO: 5858
  Cyclic GFR-binding peptide
  MOD_RES (2)..(4)..(36)..(37): Xaa is C or S

SEQ ID NO: 34195 - protein, 26 aa, Artificial Sequence
  Cyclic GFR-binding peptide
VMNEYQKYIVNNSSDIYLVSIPSLKT

SEQ ID NO: 34196 - protein, 24 aa, Artificial Sequence
  Cyclic GFR-binding peptide
GERYKKLTPVGMDDFYLVSIANLK

SEQ ID NO: 34197 - protein, 26 aa, Artificial Sequence
  Cyclic GFR-binding peptide
SRVVMNEYKFKIVNSSDDLYLVSIPE

SEQ ID NO: 34198 - protein, 29 aa, Artificial Sequence
  Cyclic GFR-binding peptide
AVSMGEEYKFKTPVGMDDLYLVSIPELKT

SEQ ID NO: 34199 - protein, 36 aa, Artificial Sequence; identical to SEQ ID NO: 5864
  Cyclic GFR-binding peptide
  MOD_RES (2)..(33)..(34): Xaa is C or S

SEQ ID NO: 34200 - protein, 32 aa, Artificial Sequence
  Cyclic GFR-binding peptide
  MOD_RES (27)..(28): Xaa is C or S
NEYKFKIVNSSDDLYLVSIPELKTPAXXPKPV

SEQ ID NO: 34201 - protein, 27 aa, Artificial Sequence
  Cyclic GFR-binding peptide
  MOD_RES (27)..(27): Xaa is C or S
EYHYKLVVKDYEDKYLMSIPSLETPVX

SEQ ID NO: 34202 - protein, 24 aa, Artificial Sequence
  Cyclic GFR-binding peptide
NEYKFKIVNNSSDLYLVSIPELKT

SEQ ID NO: 34203 - protein, 36 aa, Artificial Sequence
  Cyclic GFR-binding peptide
  MOD_RES (1)..(3)..(35)..(36): Xaa is C or S
XGXARVVMNEYKFKIVNSSDDLYLVSIPELQTPAXX

SEQ ID NO: 34204 - protein, 30 aa, Artificial Sequence; identical to SEQ ID NO: 5868
  Cyclic GFR-binding peptide
  MOD_RES (1)..(1): Xaa is C or S

SEQ ID NO: 34205 - protein, 30 aa, Artificial Sequence
  Cyclic GFR-binding peptide
  MOD_RES (27)..(28): Xaa is C or S
EEYQKYTPVGMDDIYLVSIPSLKTPVXXAK

SEQ ID NO: 34206 - protein, 36 aa, Artificial Sequence; identical to SEQ ID NO: 5870
  Cyclic GFR-binding peptide
  MOD_RES (1)..(3)..(35)..(36): Xaa is C or S

SEQ ID NO: 34207 - protein, 22 aa, Artificial Sequence
  Cyclic GFR-binding peptide
YHYKLIKPTKGIKYLISIPSLD

SEQ ID NO: 34208 - protein, 35 aa, Artificial Sequence; identical to SEQ ID NO: 5872
  Cyclic GFR-binding peptide
  MOD_RES (2)..(33)..(34): Xaa is C or S

SEQ ID NO: 34209 - protein, 39 aa, Artificial Sequence; identical to SEQ ID NO: 5874
  Cyclic GFR-binding peptide
  MOD_RES (2)..(34)..(35): Xaa is C or S

SEQ ID NO: 34210 - protein, 26 aa, Artificial Sequence
  Cyclic GFR-binding peptide
SKVIMEYKFKIKPTKGILYLISIPEL

SEQ ID NO: 34211 - protein, 32 aa, Artificial Sequence
  Cyclic GFR-binding peptide
  MOD_RES (30)..(31): Xaa is C or S
VVMNEYKFKIVNNSSDLYLVSIPELKTPAXXA

SEQ ID NO: 34212 - protein, 37 aa, Artificial Sequence; identical to SEQ ID NO: 5878
  Cyclic GFR-binding peptide
  MOD_RES (32)..(33): Xaa is C or S

SEQ ID NO: 34213 - protein, 39 aa, Artificial Sequence; identical to SEQ ID NO: 5879
  Cyclic GFR-binding peptide
  MOD_RES (2)..(33)..(34): Xaa is C or S

SEQ ID NO: 34214 - protein, 28 aa, Artificial Sequence
  Cyclic GFR-binding peptide
  MOD_RES (27)..(28): Xaa is C or S
MEYKFKVKPTRGVLYLISIPELDQPVXX

SEQ ID NO: 34215 - protein, 27 aa, Artificial Sequence
  Cyclic GFR-binding peptide
IMRYKKLVKPKRGVFYLISIANLAQPV

SEQ ID NO: 34216 - protein, 37 aa, Artificial Sequence
  Cyclic GFR-binding peptide
  MOD_RES (32)..(33): Xaa is C or S
ESVAMGRYKKLYTVVGKDFYLISIANLKTPVXXAKSA

SEQ ID NO: 34217 - protein, 28 aa, Artificial Sequence
  Cyclic GFR-binding peptide
  MOD_RES (1)..(3): Xaa is C or S
XKXSKVIMRYKKLIKPTKGIFYLISIAN

SEQ ID NO: 34218 - protein, 27 aa, Artificial Sequence
  Cyclic GFR-binding peptide
  MOD_RES (27)..(27): Xaa is C or S
MEYKFKVKPTRGVLYLISIPELDQPVX

SEQ ID NO: 34219 - protein, 35 aa, Artificial Sequence; identical to SEQ ID NO: 5883
  Cyclic GFR-binding peptide
  MOD_RES (2)..(34)..(35): Xaa is C or S

SEQ ID NO: 34220 - protein, 30 aa, Artificial Sequence
  Cyclic GFR-binding peptide
  MOD_RES (29)..(30): Xaa is C or S
VMNEYKFKIVNNSSDLYLVSIPELKTPAXX

SEQ ID NO: 34221 - protein, 31 aa, Artificial Sequence; identical to SEQ ID NO: 5884
  Cyclic GFR-binding peptide
  MOD_RES (1)..(1): Xaa is C or S

SEQ ID NO: 34222 - protein, 35 aa, Artificial Sequence
  Cyclic GFR-binding peptide
  MOD_RES (1)..(3)..(34)..(35): Xaa is C or S
XKXSKVVMEYKFKVKPTRGVLYLISIPELDQPVXX

SEQ ID NO: 34223 - protein, 24 aa, Artificial Sequence
  Cyclic GFR-binding peptide
GEEYQKYTPVGMDDIYLVSIPSLK

SEQ ID NO: 34224 - protein, 37 aa, Artificial Sequence; identical to SEQ ID NO: 5885
  Cyclic GFR-binding peptide
  MOD_RES (31)..(32): Xaa is C or S

SEQ ID NO: 34225 - protein, 24 aa, Artificial Sequence
  Cyclic GFR-binding peptide
MDYHYKLVVNNAADKYLISIPSLR

SEQ ID NO: 34226 - protein, 33 aa, Artificial Sequence
  Cyclic GFR-binding peptide
  MOD_RES (32)..(33): Xaa is C or S
AVSMGEEYQKYTPVGMDDIYLVSIPSLKTPVXX

SEQ ID NO: 34227 - protein, 31 aa, Artificial Sequence; identical to SEQ ID NO: 5892
  Cyclic GFR-binding peptide
  MOD_RES (26)..(26): Xaa is C or S

SEQ ID NO: 34228 - protein, 25 aa, Artificial Sequence
  Cyclic GFR-binding peptide
NEYQKYIVNNSSDIYLVSIPSLKTP

SEQ ID NO: 34229 - protein, 28 aa, Artificial Sequence
  Cyclic GFR-binding peptide
  MOD_RES (2)..(2): Xaa is C or S
KXSKVIMEYQKYIKPTKGIIYLISIPSL

SEQ ID NO: 34230 - protein, 25 aa, Artificial Sequence
  Cyclic GFR-binding peptide
EYKFKVVKENEDLYLMSIPELETPV

SEQ ID NO: 34231 - protein, 31 aa, Artificial Sequence
  Cyclic GFR-binding peptide
  MOD_RES (1)..(3): Xaa is C or S
XGXSRVVMNEYKFKIVNSSDDLYLVSIPELK

SEQ ID NO: 34232 - protein, 30 aa, Artificial Sequence
  Cyclic GFR-binding peptide
  MOD_RES (2)..(2): Xaa is C or S
GXAKVVMNEYQKYIVNNSSDIYLVSIPSLK

SEQ ID NO: 34233 - protein, 33 aa, Artificial Sequence
  Cyclic GFR-binding peptide
  MOD_RES (31)..(32): Xaa is C or S
EVVMDYHYKLVVNNAADKYLISIPSLRAPVXXS

SEQ ID NO: 34234 - protein, 40 aa, Artificial Sequence; identical to SEQ ID NO: 5897
  Cyclic GFR-binding peptide
  MOD_RES (2)..(34)..(35): Xaa is C or S

SEQ ID NO: 34235 - protein, 25 aa, Artificial Sequence
  Cyclic GFR-binding peptide
MDEYKFKVVKENEDLYLMSIPELET

SEQ ID NO: 34236 - protein, 39 aa, Artificial Sequence; identical to SEQ ID NO: 5899
  Cyclic GFR-binding peptide
  MOD_RES (1)..(33): Xaa is C or S

SEQ ID NO: 34237 - protein, 32 aa, Artificial Sequence; identical to SEQ ID NO: 5900
  Cyclic GFR-binding peptide
  MOD_RES (31)..(32): Xaa is C or S

SEQ ID NO: 34238 - protein, 30 aa, Artificial Sequence
  Cyclic GFR-binding peptide
KVVMNEYQKYIVNNSSDIYLVSIPSLKTPA

SEQ ID NO: 34239 - protein, 30 aa, Artificial Sequence; identical to SEQ ID NO: 5902
  Cyclic GFR-binding peptide
  MOD_RES (29)..(30): Xaa is C or S

SEQ ID NO: 34240 - protein, 24 aa, Artificial Sequence
  Cyclic GFR-binding peptide
MNEYQKYIVNNSSDIYLVSIPSLK

SEQ ID NO: 34241 - protein, 32 aa, Artificial Sequence
  Cyclic GFR-binding peptide
  MOD_RES (32)..(32): Xaa is C or S
ESVAMGYHYKLYTVVGKDKYLISIPSLKTPVX

SEQ ID NO: 34242 - protein, 31 aa, Artificial Sequence
  Cyclic GFR-binding peptide
  MOD_RES (27)..(28): Xaa is C or S
MEYKFKIKPTKGILYLISIPELDQSVXXPSA

SEQ ID NO: 34243 - protein, 30 aa, Artificial Sequence
  Cyclic GFR-binding peptide
  MOD_RES (1)..(1): Xaa is C or S
XSRVVMNEYQKYIVNSSDDIYLVSIPSLKT

SEQ ID NO: 34244 - protein, 28 aa, Artificial Sequence
  Cyclic GFR-binding peptide
  MOD_RES (2)..(2): Xaa is C or S
KXSKVVMEYQKYVKPTRGVIYLISIPSL

SEQ ID NO: 34245 - protein, 32 aa, Artificial Sequence
  Cyclic GFR-binding peptide
  MOD_RES (28)..(29): Xaa is C or S
MEEYKFKVVKDYEDLYLMSIPELETPVXXAKP

SEQ ID NO: 34246 - protein, 29 aa, Artificial Sequence
  Cyclic GFR-binding peptide
  MOD_RES (27)..(28): Xaa is C or S
EEYQKYVVKDYEDIYLMSIPSLETPVXXA

SEQ ID NO: 34247 - protein, 37 aa, Artificial Sequence
  Cyclic GFR-binding peptide
  MOD_RES (31)..(32): Xaa is C or S
RVVMNEYQKYIVNSSDDIYLVSIPSLQTPAXXPKPVT

SEQ ID NO: 34248 - protein, 24 aa, Artificial Sequence
  Cyclic GFR-binding peptide
EYKFKTPVGMDDLYLVSIPELKTP

SEQ ID NO: 34249 - protein, 41 aa, Artificial Sequence; identical to SEQ ID NO: 5910
  Cyclic GFR-binding peptide
  MOD_RES (2)..(4)..(35)..(36): Xaa is C or S

SEQ ID NO: 34250 - protein, 33 aa, Artificial Sequence; identical to SEQ ID NO: 5911
  Cyclic GFR-binding peptide
  MOD_RES (28)..(29): Xaa is C or S

SEQ ID NO: 34251 - protein, 30 aa, Artificial Sequence
  Cyclic GFR-binding peptide
  MOD_RES (1)..(1): Xaa is C or S
XSRVIMEYQKYVKPKRGVIYLISIPSLAQP

SEQ ID NO: 34252 - protein, 35 aa, Artificial Sequence; identical to SEQ ID NO: 5913
  Cyclic GFR-binding peptide
  MOD_RES (2)..(34)..(35): Xaa is C or S

SEQ ID NO: 34253 - protein, 36 aa, Artificial Sequence; identical to SEQ ID NO: 5914
  Cyclic GFR-binding peptide
  MOD_RES (2)..(4)..(36): Xaa is C or S

SEQ ID NO: 34254 - protein, 30 aa, Artificial Sequence; identical to SEQ ID NO: 5915
  Cyclic GFR-binding peptide
  MOD_RES (28)..(29): Xaa is C or S

SEQ ID NO: 34255 - protein, 30 aa, Artificial Sequence; identical to SEQ ID NO: 5919
  Cyclic GFR-binding peptide
  MOD_RES (26)..(27): Xaa is C or S

SEQ ID NO: 34256 - protein, 26 aa, Artificial Sequence
  Cyclic GFR-binding peptide
MNYHYKLIVNSSDDKYLVSIPSLKTP

SEQ ID NO: 34257 - protein, 23 aa, Artificial Sequence
  Cyclic GFR-binding peptide
MRYKKLVKPTRGVFYLISIANLD

SEQ ID NO: 34258 - protein, 28 aa, Artificial Sequence
  Cyclic GFR-binding peptide
KVIMEYQKYIKPTKGIIYLISIPSLDQS

SEQ ID NO: 34259 - protein, 26 aa, Artificial Sequence
  Cyclic GFR-binding peptide
GEVVMDRYKKLVVKENEDFYLMSIAN

SEQ ID NO: 34260 - protein, 29 aa, Artificial Sequence
  Cyclic GFR-binding peptide
  MOD_RES (29)..(29): Xaa is C or S
VMERYKKLVVKDYEDFYLMSIANLETPVX

SEQ ID NO: 34261 - protein, 29 aa, Artificial Sequence
  Cyclic GFR-binding peptide
  MOD_RES (1)..(1): Xaa is C or S
XSRVIMRYKKLVKPKRGVFYLISIANLAQ

SEQ ID NO: 34262 - protein, 23 aa, Artificial Sequence
  Cyclic GFR-binding peptide
IMRYKKLVKPKRGVFYLISIANL

SEQ ID NO: 34263 - protein, 35 aa, Artificial Sequence; identical to SEQ ID NO: 5931
  Cyclic GFR-binding peptide
  MOD_RES (30)..(31): Xaa is C or S

SEQ ID NO: 34264 - protein, 30 aa, Artificial Sequence; identical to SEQ ID NO: 5932
  Cyclic GFR-binding peptide
  MOD_RES (30)..(30): Xaa is C or S

SEQ ID NO: 34265 - protein, 30 aa, Artificial Sequence
  Cyclic GFR-binding peptide
  MOD_RES (2)..(2): Xaa is C or S
KXSKVIMEYKFKIKPTKGILYLISIPELDQ

SEQ ID NO: 34266 - protein, 24 aa, Artificial Sequence
  Cyclic GFR-binding peptide
EYKFKVVNNAADLYLISIPELRAP

SEQ ID NO: 34267 - protein, 25 aa, Artificial Sequence
  Cyclic GFR-binding peptide
VMDEYQKYVVKENEDIYLMSIPSLE

SEQ ID NO: 34268 - protein, 38 aa, Artificial Sequence
  Cyclic GFR-binding peptide
  MOD_RES (1)..(33): Xaa is C or S
XSRVVMNEYKFKIVNSSDDLYLVSIPELKTPAXTPKTV

SEQ ID NO: 34269 - protein, 31 aa, Artificial Sequence; identical to SEQ ID NO: 5936
  Cyclic GFR-binding peptide

SEQ ID NO: 34270 - protein, 27 aa, Artificial Sequence
  Cyclic GFR-binding peptide
RVIMEYQKYVKPKRGVIYLISIPSLAQ

SEQ ID NO: 34271 - protein, 26 aa, Artificial Sequence
  Cyclic GFR-binding peptide
EVVMEYHYKLVVKDYEDKYLMSIPSL

SEQ ID NO: 34272 - protein, 22 aa, Artificial Sequence
  Cyclic GFR-binding peptide
RYKKLVVNNAADFYLISIANLR

SEQ ID NO: 34273 - protein, 31 aa, Artificial Sequence
  Cyclic GFR-binding peptide
  MOD_RES (28)..(29): Xaa is C or S
MDYHYKLVVNNAADKYLISIPSLRAPVXXSA

SEQ ID NO: 34274 - protein, 22 aa, Artificial Sequence
  Cyclic GFR-binding peptide
EYKFKIVNSSDDLYLVSIPELQ

SEQ ID NO: 34275 - protein, 32 aa, Artificial Sequence
  Cyclic GFR-binding peptide
  MOD_RES (31)..(32): Xaa is C or S
EVVMDEYKFKVVKENEDLYLMSIPELETPVXX

SEQ ID NO: 34276 - protein, 27 aa, Artificial Sequence
  Cyclic GFR-binding peptide
  MOD_RES (26)..(27): Xaa is C or S
EYKFKIKPTKGILYLISIPELDQSVXX

SEQ ID NO: 34277 - protein, 25 aa, Artificial Sequence
  Cyclic GFR-binding peptide
VMNEYKFKIVNNSSDLYLVSIPELK

SEQ ID NO: 34278 - protein, 24 aa, Artificial Sequence
  Cyclic GFR-binding peptide
NEYQKYIVNNSSDIYLVSIPSLKT

SEQ ID NO: 34279 - protein, 41 aa, Artificial Sequence
  Cyclic GFR-binding peptide
  MOD_RES (2)..(4)..(35)..(36): Xaa is C or S
SXKXSKVIMEYQKYIKPTKGIIYLISIPSLDQSVXXPSASA

SEQ ID NO: 34280 - protein, 34 aa, Artificial Sequence
  Cyclic GFR-binding peptide
  MOD_RES (1)..(33)..(34): Xaa is C or S
XAEVVMDEYKFKVVNNAADLYLISIPELRAPVXX

SEQ ID NO: 34281 - protein, 27 aa, Artificial Sequence
  Cyclic GFR-binding peptide
  MOD_RES (1)..(1): Xaa is C or S
XSKVVMEYQKYVKPTRGVIYLISIPSL

SEQ ID NO: 34282 - protein, 37 aa, Artificial Sequence
  Cyclic GFR-binding peptide
  MOD_RES (2)..(4)..(36)..(37): Xaa is C or S
RXGXESVAMGRYKKLYTVVGKDFYLISIANLKTPVXX

SEQ ID NO: 34283 - protein, 36 aa, Artificial Sequence; identical to SEQ ID NO: 5942
  Cyclic GFR-binding peptide
  MOD_RES (2)..(33)..(34): Xaa is C or S

SEQ ID NO: 34284 - protein, 36 aa, Artificial Sequence
  Cyclic GFR-binding peptide
  MOD_RES (31)..(31): Xaa is C or S
RVVMNEYKFKIVNSSDDLYLVSIPELKTPAXTPKTV

SEQ ID NO: 34285 - protein, 30 aa, Artificial Sequence
  Cyclic GFR-binding peptide
  MOD_RES (1)..(3): Xaa is C or S
XKXSRVIMEYQKYVKPKRGVIYLISIPSLA

SEQ ID NO: 34286 - protein, 28 aa, Artificial Sequence
  Cyclic GFR-binding peptide
  MOD_RES (1)..(3): Xaa is C or S
XKXSKVIMYHYKLIKPTKGIKYLISIPS

SEQ ID NO: 34287 - protein, 29 aa, Artificial Sequence
  Cyclic GFR-binding peptide
  MOD_RES (29)..(29): Xaa is C or S
VMEEYQKYVVKDYEDIYLMSIPSLETPVX

SEQ ID NO: 34288 - protein, 30 aa, Artificial Sequence; identical to SEQ ID NO: 5950
  Cyclic GFR-binding peptide

SEQ ID NO: 34289 - protein, 27 aa, Artificial Sequence
  Cyclic GFR-binding peptide
VSMGEEYQKYTPVGMDDIYLVSIPSLK

SEQ ID NO: 34290 - protein, 33 aa, Artificial Sequence
  Cyclic GFR-binding peptide
  MOD_RES (1)..(33): Xaa is C or S
XGEVVMDEYQKYVVKENEDIYLMSIPSLETPVX

SEQ ID NO: 34291 - protein, 33 aa, Artificial Sequence
  Cyclic GFR-binding peptide
  MOD_RES (31)..(32): Xaa is C or S
SRVIMEYQKYVKPKRGVIYLISIPSLAQPVXXP

SEQ ID NO: 34292 - protein, 39 aa, Artificial Sequence
  Cyclic GFR-binding peptide
  MOD_RES (2)..(34)..(35): Xaa is C or S
GXGEVVMDEYKFKVVKENEDLYLMSIPELETPVXXAKPI

SEQ ID NO: 34293 - protein, 29 aa, Artificial Sequence
  Cyclic GFR-binding peptide
  MOD_RES (26)..(27): Xaa is C or S
RYKKLVVKDYEDFYLMSIANLETPVXXAK

SEQ ID NO: 34294 - protein, 38 aa, Artificial Sequence
  Cyclic GFR-binding peptide
  MOD_RES (1)..(34)..(35): Xaa is C or S
XEAVSMGEEYQKYTPVGMDDIYLVSIPSLKTPVXXAKG

SEQ ID NO: 34295 - protein, 38 aa, Artificial Sequence; identical to SEQ ID NO: 5952
  Cyclic GFR-binding peptide
  MOD_RES (32)..(33): Xaa is C or S

SEQ ID NO: 34296 - protein, 28 aa, Artificial Sequence
  Cyclic GFR-binding peptide
  MOD_RES (2)..(2): Xaa is C or S
GXGEVVMDEYQKYVVKENEDIYLMSIPS

SEQ ID NO: 34297 - protein, 25 aa, Artificial Sequence
  Cyclic GFR-binding peptide
NEYKFKIVNNSSDLYLVSIPELKTP

SEQ ID NO: 34298 - protein, 40 aa, Artificial Sequence; identical to SEQ ID NO: 5956
  Cyclic GFR-binding peptide
  MOD_RES (2)..(4)..(35)..(36): Xaa is C or S

SEQ ID NO: 34299 - protein, 29 aa, Artificial Sequence
  Cyclic GFR-binding peptide
AEVVMDYHYKLVVNNAADKYLISIPSLRA

SEQ ID NO: 34300 - protein, 27 aa, Artificial Sequence
  Cyclic GFR-binding peptide
VMDRYKKLVVNNAADFYLISIANLRAP

SEQ ID NO: 34301 - protein, 28 aa, Artificial Sequence
  Cyclic GFR-binding peptide
  MOD_RES (2)..(2): Xaa is C or S
KXSRVIMRYKKLVKPKRGVFYLISIANL

SEQ ID NO: 34302 - protein, 24 aa, Artificial Sequence
  Cyclic GFR-binding peptide
RVIMEYKFKVKPKRGVLYLISIPE

SEQ ID NO: 34303 - protein, 31 aa, Artificial Sequence
  Cyclic GFR-binding peptide
  MOD_RES (27)..(28): Xaa is C or S
MEYQKYIKPTKGIIYLISIPSLDQSVXXPSA

SEQ ID NO: 34304 - protein, 28 aa, Artificial Sequence
  Cyclic GFR-binding peptide
  MOD_RES (27)..(28): Xaa is C or S
EEYKFKTPVGMDDLYLVSIPELKTPVXX

SEQ ID NO: 34305 - protein, 27 aa, Artificial Sequence
  Cyclic GFR-binding peptide
  MOD_RES (1)..(1): Xaa is C or S
XGEVVMDYHYKLVVKENEDKYLMSIPS

SEQ ID NO: 34306 - protein, 29 aa, Artificial Sequence
  Cyclic GFR-binding peptide
  MOD_RES (26)..(27): Xaa is C or S
EYKFKIVNSSDDLYLVSIPELKTPAXXPK

SEQ ID NO: 34307 - protein, 30 aa, Artificial Sequence; identical to SEQ ID NO: 5963
  Cyclic GFR-binding peptide
  MOD_RES (2)..(4): Xaa is C or S

SEQ ID NO: 34308 - protein, 33 aa, Artificial Sequence
  Cyclic GFR-binding peptide
  MOD_RES (27)..(28): Xaa is C or S
DRYKKLVVNNAADFYLISIANLRAPVXXSAPAA

SEQ ID NO: 34309 - protein, 24 aa, Artificial Sequence
  Cyclic GFR-binding peptide
RYKKLVVKENEDFYLMSIANLETP

SEQ ID NO: 34310 - protein, 29 aa, Artificial Sequence
  Cyclic GFR-binding peptide
RVIMRYKKLVKPKRGVFYLISIANLAQPV

SEQ ID NO: 34311 - protein, 41 aa, Artificial Sequence
  Cyclic GFR-binding peptide
  MOD_RES (1)..(3)..(35)..(36): Xaa is C or S
XGXGEVVMDEYKFKVVKENEDLYLMSIPELETPVXXAKPIK

SEQ ID NO: 34312 - protein, 29 aa, Artificial Sequence
  Cyclic GFR-binding peptide
  MOD_RES (2)..(2): Xaa is C or S
KXSKVVMEYQKYVKPTRGVIYLISIPSLD

SEQ ID NO: 34313 - protein, 35 aa, Artificial Sequence
  Cyclic GFR-binding peptide
  MOD_RES (2)..(34)..(35): Xaa is C or S
GXESVAMGRYKKLYTVVGKDFYLISIANLKTPVXX

SEQ ID NO: 34314 - protein, 34 aa, Artificial Sequence; identical to SEQ ID NO: 5969
  Cyclic GFR-binding peptide
  MOD_RES (2)..(34): Xaa is C or S

SEQ ID NO: 34315 - protein, 39 aa, Artificial Sequence; identical to SEQ ID NO: 5972
  Cyclic GFR-binding peptide
  MOD_RES (2)..(33)..(34): Xaa is C or S

SEQ ID NO: 34316 - protein, 37 aa, Artificial Sequence; identical to SEQ ID NO: 5973
  Cyclic GFR-binding peptide
  MOD_RES (1)..(3)..(36)..(37): Xaa is C or S

SEQ ID NO: 34317 - protein, 31 aa, Artificial Sequence
  Cyclic GFR-binding peptide
AVSMGEEYKFKTPVGMDDLYLVSIPELKTPV

SEQ ID NO: 34318 - protein, 37 aa, Artificial Sequence
  Cyclic GFR-binding peptide
  MOD_RES (2)..(4)..(36)..(37): Xaa is C or S
HXGXAKVVMNEYKFKIVNNSSDLYLVSIPELKTPAXX

SEQ ID NO: 34319 - protein, 26 aa, Artificial Sequence
  Cyclic GFR-binding peptide
  MOD_RES (26)..(26): Xaa is C or S
RYKKLVVKENEDFYLMSIANLETPVX

SEQ ID NO: 34320 - protein, 32 aa, Artificial Sequence; identical to SEQ ID NO: 5975
  Cyclic GFR-binding peptide
  MOD_RES (2)..(4): Xaa is C or S

SEQ ID NO: 34321 - protein, 27 aa, Artificial Sequence
  Cyclic GFR-binding peptide
VMERYKKLVVKDYEDFYLMSIANLETP

SEQ ID NO: 34322 - protein, 33 aa, Artificial Sequence; identical to SEQ ID NO: 5977
  Cyclic GFR-binding peptide
  MOD_RES (30)..(31): Xaa is C or S

SEQ ID NO: 34323 - protein, 33 aa, Artificial Sequence
  Cyclic GFR-binding peptide
  MOD_RES (2)..(2): Xaa is C or S
GXSRVVMNEYQKYIVNSSDDIYLVSIPSLKTPA

SEQ ID NO: 34324 - protein, 32 aa, Artificial Sequence
  Cyclic GFR-binding peptide
  MOD_RES (1)..(32): Xaa is C or S
XSKVIMEYQKYIKPTKGIIYLISIPSLDQSVX

SEQ ID NO: 34325 - protein, 20 aa, Artificial Sequence
  Cyclic GFR-binding peptide
EYQKYIKPTKGIIYLISIPS

SEQ ID NO: 34326 - protein, 34 aa, Artificial Sequence; identical to SEQ ID NO: 5981
  Cyclic GFR-binding peptide
  MOD_RES (28)..(29): Xaa is C or S

SEQ ID NO: 34327 - protein, 30 aa, Artificial Sequence
  Cyclic GFR-binding peptide
  MOD_RES (28)..(29): Xaa is C or S
MDEYKFKVVKENEDLYLMSIPELETPVXXA

SEQ ID NO: 34328 - protein, 32 aa, Artificial Sequence; identical to SEQ ID NO: 5982
  Cyclic GFR-binding peptide
  MOD_RES (27)..(28): Xaa is C or S

SEQ ID NO: 34329 - protein, 40 aa, Artificial Sequence; identical to SEQ ID NO: 5983
  Cyclic GFR-binding peptide
  MOD_RES (1)..(34)..(35): Xaa is C or S

SEQ ID NO: 34330 - protein, 25 aa, Artificial Sequence
  Cyclic GFR-binding peptide
EYQKYVVKDYEDIYLMSIPSLETPV

SEQ ID NO: 34331 - protein, 32 aa, Artificial Sequence; identical to SEQ ID NO: 5986
  Cyclic GFR-binding peptide
  MOD_RES (32)..(32): Xaa is C or S

SEQ ID NO: 34332 - protein, 36 aa, Artificial Sequence
  Cyclic GFR-binding peptide
  MOD_RES (30)..(31): Xaa is C or S
VVMNEYKFKIVNNSSDLYLVSIPELKTPAXXAKPVA

SEQ ID NO: 34333 - protein, 30 aa, Artificial Sequence
  Cyclic GFR-binding peptide
  MOD_RES (27)..(28): Xaa is C or S
NEYQKYIVNSSDDIYLVSIPSLKTPAXXPK

SEQ ID NO: 34334 - protein, 30 aa, Artificial Sequence; identical to SEQ ID NO: 5988
  Cyclic GFR-binding peptide
  MOD_RES (27)..(28): Xaa is C or S

SEQ ID NO: 34335 - protein, 32 aa, Artificial Sequence
  Cyclic GFR-binding peptide
  MOD_RES (27)..(28): Xaa is C or S
MEYQKYVKPKRGVIYLISIPSLAQPVXXPAAS

SEQ ID NO: 34336 - protein, 34 aa, Artificial Sequence
  Cyclic GFR-binding peptide
  MOD_RES (2)..(34): Xaa is C or S
GXGEVVMDEYQKYVVKENEDIYLMSIPSLETPVX

SEQ ID NO: 34337 - protein, 35 aa, Artificial Sequence; identical to SEQ ID NO: 5991
  Cyclic GFR-binding peptide
  MOD_RES (29)..(29): Xaa is C or S

SEQ ID NO: 34338 - protein, 34 aa, Artificial Sequence; identical to SEQ ID NO: 5992
  Cyclic GFR-binding peptide
  MOD_RES (1)..(3)..(34): Xaa is C or S

SEQ ID NO: 34339 - protein, 36 aa, Artificial Sequence
  Cyclic GFR-binding peptide
  MOD_RES (32)..(33): Xaa is C or S
ARVVMNEYKFKIVNSSDDLYLVSIPELQTPAXXPKP

SEQ ID NO: 34340 - protein, 27 aa, Artificial Sequence
  Cyclic GFR-binding peptide
  MOD_RES (27)..(27): Xaa is C or S
MYHYKLVKPTRGVKYLISIPSLDQPVX

SEQ ID NO: 34341 - protein, 36 aa, Artificial Sequence; identical to SEQ ID NO: 5997
  Cyclic GFR-binding peptide
  MOD_RES (2)..(4)..(36): Xaa is C or S

SEQ ID NO: 34342 - protein, 26 aa, Artificial Sequence
  Cyclic GFR-binding peptide
VVMNEYKFKIVNNSSDLYLVSIPELK

SEQ ID NO: 34343 - protein, 35 aa, Artificial Sequence; identical to SEQ ID NO: 5999
  Cyclic GFR-binding peptide
  MOD_RES (2)..(34): Xaa is C or S

SEQ ID NO: 34344 - protein, 26 aa, Artificial Sequence
  Cyclic GFR-binding peptide
AMGYHYKLYTVVGKDKYLISIPSLKT

SEQ ID NO: 34345 - protein, 32 aa, Artificial Sequence
  Cyclic GFR-binding peptide
  MOD_RES (26)..(27): Xaa is C or S
EYQKYTPVGMDDIYLVSIPSLKTPVXXAKGVK

SEQ ID NO: 34346 - protein, 29 aa, Artificial Sequence
  Cyclic GFR-binding peptide
  MOD_RES (2)..(2): Xaa is C or S
KXSRVIMRYKKLVKPKRGVFYLISIANLA

SEQ ID NO: 34347 - protein, 21 aa, Artificial Sequence
  Cyclic GFR-binding peptide
RYKKLVVNNAADFYLISIANL

SEQ ID NO: 34348 - protein, 25 aa, Artificial Sequence
  Cyclic GFR-binding peptide
VMNYHYKLIVNSSDDKYLVSIPSLK

SEQ ID NO: 34349 - protein, 26 aa, Artificial Sequence
  Cyclic GFR-binding peptide
VMNEYQKYIVNSSDDIYLVSIPSLQT

SEQ ID NO: 34350 - protein, 26 aa, Artificial Sequence
  Cyclic GFR-binding peptide
MRYKKLVKPTRGVFYLISIANLDQPV

SEQ ID NO: 34351 - protein, 39 aa, Artificial Sequence
  Cyclic GFR-binding peptide
  MOD_RES (2)..(4)..(35)..(36): Xaa is C or S
SXKXSKVIMEYQKYIKPTKGIIYLISIPSLDQSVXXPSA

SEQ ID NO: 34352 - protein, 21 aa, Artificial Sequence
  Cyclic GFR-binding peptide
EYQKYYTVVGKDIYLISIPSL

SEQ ID NO: 34353 - protein, 28 aa, Artificial Sequence
  Cyclic GFR-binding peptide
VMDEYKFKVVKENEDLYLMSIPELETPV

SEQ ID NO: 34354 - protein, 22 aa, Artificial Sequence
  Cyclic GFR-binding peptide
RYKKLIVNSSDDFYLVSIANLK

SEQ ID NO: 34355 - protein, 22 aa, Artificial Sequence
  Cyclic GFR-binding peptide
RYKKLTPVGMDDFYLVSIANLK

SEQ ID NO: 34356 - protein, 29 aa, Artificial Sequence
  Cyclic GFR-binding peptide
  MOD_RES (26)..(27): Xaa is C or S
YHYKLYTVVGKDKYLISIPSLKTPVXXAK

SEQ ID NO: 34357 - protein, 22 aa, Artificial Sequence
  Cyclic GFR-binding peptide
DEYQKYVVKENEDIYLMSIPSL

SEQ ID NO: 34358 - protein, 25 aa, Artificial Sequence
  Cyclic GFR-binding peptide
SRVIMEYKFKVKPKRGVLYLISIPE

SEQ ID NO: 34359 - protein, 39 aa, Artificial Sequence
  Cyclic GFR-binding peptide
  MOD_RES (1)..(3)..(35)..(36): Xaa is C or S
XGXSRVVMNEYKFKIVNSSDDLYLVSIPELKTPAXXPKP

SEQ ID NO: 34360 - protein, 28 aa, Artificial Sequence
  Cyclic GFR-binding peptide
  MOD_RES (26)..(27): Xaa is C or S
EYKFKVKPTRGVLYLISIPELDQPVXXP

SEQ ID NO: 34361 - protein, 38 aa, Artificial Sequence
  Cyclic GFR-binding peptide
  MOD_RES (1)..(33)..(34): Xaa is C or S
XAKVVMNEYKFKIVNNSSDLYLVSIPELKTPAXXAKPV

SEQ ID NO: 34362 - protein, 34 aa, Artificial Sequence
  Cyclic GFR-binding peptide
  MOD_RES (30)..(31): Xaa is C or S
VVMNEYQKYIVNNSSDIYLVSIPSLKTPAXXAKP

SEQ ID NO: 34363 - protein, 33 aa, Artificial Sequence
  Cyclic GFR-binding peptide
  MOD_RES (30)..(30): Xaa is C or S
VVMNEYKFKIVNSSDDLYLVSIPELKTPAXTPK

SEQ ID NO: 34364 - protein, 31 aa, Artificial Sequence; identical to SEQ ID NO: 6012
  Cyclic GFR-binding peptide
  MOD_RES (26)..(27): Xaa is C or S

SEQ ID NO: 34365 - protein, 28 aa, Artificial Sequence
  Cyclic GFR-binding peptide
  MOD_RES (1)..(1): Xaa is C or S
XAKVVMNEYQKYIVNNSSDIYLVSIPSL

SEQ ID NO: 34366 - protein, 26 aa, Artificial Sequence
  Cyclic GFR-binding peptide
NEYKFKIVNSSDDLYLVSIPELQTPA

SEQ ID NO: 34367 - protein, 35 aa, Artificial Sequence
  Cyclic GFR-binding peptide
  MOD_RES (29)..(30): Xaa is C or S
VMEEYKFKVVKDYEDLYLMSIPELETPVXXAKPIS

SEQ ID NO: 34368 - protein, 34 aa, Artificial Sequence
  Cyclic GFR-binding peptide
  MOD_RES (2)..(4): Xaa is C or S
RXGXGEVVMEEYKFKVVKDYEDLYLMSIPELETP

SEQ ID NO: 34369 - protein, 21 aa, Artificial Sequence
  Cyclic GFR-binding peptide
RYKKLVKPTRGVFYLISIANL

SEQ ID NO: 34370 - protein, 26 aa, Artificial Sequence
  Cyclic GFR-binding peptide
  MOD_RES (26)..(26): Xaa is C or S
RYKKLIVNSSDDFYLVSIANLKTPAX

SEQ ID NO: 34371 - protein, 25 aa, Artificial Sequence
  Cyclic GFR-binding peptide
GYHYKLYTVVGKDKYLISIPSLKTP

SEQ ID NO: 34372 - protein, 28 aa, Artificial Sequence
  Cyclic GFR-binding peptide
  MOD_RES (2)..(2): Xaa is C or S
GXAKVVMNRYKKLIVNNSSDFYLVSIAN

SEQ ID NO: 34373 - protein, 24 aa, Artificial Sequence
  Cyclic GFR-binding peptide
DEYQKYVVKENEDIYLMSIPSLET

SEQ ID NO: 34374 - protein, 33 aa, Artificial Sequence
  Cyclic GFR-binding peptide
  MOD_RES (30)..(31): Xaa is C or S
VVMDYHYKLVVNNAADKYLISIPSLRAPVXXSA

SEQ ID NO: 34375 - protein, 35 aa, Artificial Sequence; identical to SEQ ID NO: 6022
  Cyclic GFR-binding peptide
  MOD_RES (2)..(4): Xaa is C or S

SEQ ID NO: 34376 - protein, 34 aa, Artificial Sequence
  Cyclic GFR-binding peptide
  MOD_RES (30)..(31): Xaa is C or S
RVIMEYKFKVKPKRGVLYLISIPELAQPVXXPAA

SEQ ID NO: 34377 - protein, 28 aa, Artificial Sequence
  Cyclic GFR-binding peptide
VMNEYQKYIVNSSDDIYLVSIPSLKTPA

SEQ ID NO: 34378 - protein, 29 aa, Artificial Sequence
  Cyclic GFR-binding peptide
  MOD_RES (2)..(2): Xaa is C or S
GXESVAMGYHYKLYTVVGKDKYLISIPSL

SEQ ID NO: 34379 - protein, 36 aa, Artificial Sequence; identical to SEQ ID NO: 6024
  Cyclic GFR-binding peptide
  MOD_RES (32)..(32): Xaa is C or S

SEQ ID NO: 34380 - protein, 38 aa, Artificial Sequence; identical to SEQ ID NO: 6025
  Cyclic GFR-binding peptide
  MOD_RES (1)..(3)..(35): Xaa is C or S

SEQ ID NO: 34381 - protein, 38 aa, Artificial Sequence; identical to SEQ ID NO: 6026
  Cyclic GFR-binding peptide
  MOD_RES (2)..(34)..(35): Xaa is C or S

SEQ ID NO: 34382 - protein, 28 aa, Artificial Sequence
  Cyclic GFR-binding peptide
  MOD_RES (26)..(27): Xaa is C or S
RYKKLIKPTKGIFYLISIANLDQSVXXP

SEQ ID NO: 34383 - protein, 34 aa, Artificial Sequence; identical to SEQ ID NO: 6029
  Cyclic GFR-binding peptide
  MOD_RES (31)..(32): Xaa is C or S

SEQ ID NO: 34384 - protein, 30 aa, Artificial Sequence
  Cyclic GFR-binding peptide
  MOD_RES (29)..(30): Xaa is C or S
VMNEYKFKIVNSSDDLYLVSIPELQTPAXX

SEQ ID NO: 34385 - protein, 29 aa, Artificial Sequence
  Cyclic GFR-binding peptide
  MOD_RES (27)..(28): Xaa is C or S
NEYQKYIVNSSDDIYLVSIPSLKTPAXXP

SEQ ID NO: 34386 - protein, 27 aa, Artificial Sequence
  Cyclic GFR-binding peptide
VMDEYKFKVVKENEDLYLMSIPELETP

SEQ ID NO: 34387 - protein, 29 aa, Artificial Sequence
  Cyclic GFR-binding peptide
  MOD_RES (2)..(2): Xaa is C or S
KXSRVIMYHYKLVKPKRGVKYLISIPSLA

SEQ ID NO: 34388 - protein, 26 aa, Artificial Sequence
  Cyclic GFR-binding peptide
EVVMERYKKLVVKDYEDFYLMSIANL

SEQ ID NO: 34389 - protein, 39 aa, Artificial Sequence
  Cyclic GFR-binding peptide
  MOD_RES (2)..(4)..(36): Xaa is C or S
HXGXSRVVMNEYKFKIVNSSDDLYLVSIPELKTPAXTPK

SEQ ID NO: 34390 - protein, 23 aa, Artificial Sequence
  Cyclic GFR-binding peptide
YHYKLVKPTRGVKYLISIPSLDQ

SEQ ID NO: 34391 - protein, 38 aa, Artificial Sequence; identical to SEQ ID NO: 6037
  Cyclic GFR-binding peptide
  MOD_RES (32)..(33): Xaa is C or S

SEQ ID NO: 34392 - protein, 39 aa, Artificial Sequence; identical to SEQ ID NO: 6038
  Cyclic GFR-binding peptide
  MOD_RES (1)..(34)..(35): Xaa is C or S

SEQ ID NO: 34393 - protein, 32 aa, Artificial Sequence; identical to SEQ ID NO: 6039
  Cyclic GFR-binding peptide
  MOD_RES (2)..(2): Xaa is C or S

SEQ ID NO: 34394 - protein, 29 aa, Artificial Sequence
  Cyclic GFR-binding peptide
RVVMNEYQKYIVNSSDDIYLVSIPSLQTP

SEQ ID NO: 34395 - protein, 26 aa, Artificial Sequence
  Cyclic GFR-binding peptide
AVSMGEEYKFKTPVGMDDLYLVSIPE

SEQ ID NO: 34396 - protein, 30 aa, Artificial Sequence; identical to SEQ ID NO: 6047
  Cyclic GFR-binding peptide

SEQ ID NO: 34397 - protein, 29 aa, Artificial Sequence
  Cyclic GFR-binding peptide
  MOD_RES (1)..(3): Xaa is C or S
XGXGEVVMERYKKLVVKDYEDFYLMSIAN

SEQ ID NO: 34398 - protein, 28 aa, Artificial Sequence
  Cyclic GFR-binding peptide
  MOD_RES (27)..(28): Xaa is C or S
MYHYKLVKPTRGVKYLISIPSLDQPVXX

SEQ ID NO: 34399 - protein, 37 aa, Artificial Sequence; identical to SEQ ID NO: 6050
  Cyclic GFR-binding peptide
  MOD_RES (1)..(3)..(35)..(36): Xaa is C or S

SEQ ID NO: 34400 - protein, 32 aa, Artificial Sequence; identical to SEQ ID NO: 6053
  Cyclic GFR-binding peptide
  MOD_RES (1)..(3): Xaa is C or S

SEQ ID NO: 34401 - protein, 28 aa, Artificial Sequence
  Cyclic GFR-binding peptide
  MOD_RES (1)..(1): Xaa is C or S
XEAVSMGERYKKLTPVGMDDFYLVSIAN

SEQ ID NO: 34402 - protein, 37 aa, Artificial Sequence
  Cyclic GFR-binding peptide
  MOD_RES (1)..(3)..(35)..(36): Xaa is C or S
XGXAEVVMDRYKKLVVNNAADFYLISIANLRAPVXXS

SEQ ID NO: 34403 - protein, 30 aa, Artificial Sequence
  Cyclic GFR-binding peptide
VSMGEEYQKYTPVGMDDIYLVSIPSLKTPV

SEQ ID NO: 34404 - protein, 29 aa, Artificial Sequence
  Cyclic GFR-binding peptide
  MOD_RES (1)..(3): Xaa is C or S
XGXAKVVMNEYQKYIVNNSSDIYLVSIPS

SEQ ID NO: 34405 - protein, 34 aa, Artificial Sequence
  Cyclic GFR-binding peptide
  MOD_RES (1)..(34): Xaa is C or S
XEAVSMGEEYQKYTPVGMDDIYLVSIPSLKTPVX

SEQ ID NO: 34406 - protein, 31 aa, Artificial Sequence; identical to SEQ ID NO: 6057
  Cyclic GFR-binding peptide
  MOD_RES (29)..(30): Xaa is C or S

SEQ ID NO: 34407 - protein, 25 aa, Artificial Sequence
  Cyclic GFR-binding peptide
SRVIMYHYKLVKPKRGVKYLISIPS

SEQ ID NO: 34408 - protein, 27 aa, Artificial Sequence
  Cyclic GFR-binding peptide
  MOD_RES (27)..(27): Xaa is C or S
ERYKKLTPVGMDDFYLVSIANLKTPVX

SEQ ID NO: 34409 - protein, 33 aa, Artificial Sequence; identical to SEQ ID NO: 6060
  Cyclic GFR-binding peptide
  MOD_RES (30)..(31): Xaa is C or S

SEQ ID NO: 34410 - protein, 28 aa, Artificial Sequence
  Cyclic GFR-binding peptide
  MOD_RES (27)..(28): Xaa is C or S
ERYKKLTPVGMDDFYLVSIANLKTPVXX

SEQ ID NO: 34411 - protein, 37 aa, Artificial Sequence; identical to SEQ ID NO: 6066
  Cyclic GFR-binding peptide
  MOD_RES (1)..(33)..(34): Xaa is C or S

SEQ ID NO: 34412 - protein, 33 aa, Artificial Sequence; identical to SEQ ID NO: 6068
  Cyclic GFR-binding peptide
  MOD_RES (32)..(33): Xaa is C or S

SEQ ID NO: 34413 - protein, 39 aa, Artificial Sequence; identical to SEQ ID NO: 6069
  Cyclic GFR-binding peptide
  MOD_RES (1)..(3)..(35)..(36): Xaa is C or S

SEQ ID NO: 34414 - protein, 32 aa, Artificial Sequence; identical to SEQ ID NO: 6070
  Cyclic GFR-binding peptide
  MOD_RES (1)..(3): Xaa is C or S

SEQ ID NO: 34415 - protein, 33 aa, Artificial Sequence
  Cyclic GFR-binding peptide
  MOD_RES (2)..(2): Xaa is C or S
GXAEVVMDRYKKLVVNNAADFYLISIANLRAPV

SEQ ID NO: 34416 - protein, 33 aa, Artificial Sequence
  Cyclic GFR-binding peptide
  MOD_RES (31)..(32): Xaa is C or S
EVVMDEYQKYVVKENEDIYLMSIPSLETPVXXA

SEQ ID NO: 34417 - protein, 27 aa, Artificial Sequence
  Cyclic GFR-binding peptide
  MOD_RES (27)..(27): Xaa is C or S
EEYQKYTPVGMDDIYLVSIPSLKTPVX

SEQ ID NO: 34418 - protein, 34 aa, Artificial Sequence; identical to SEQ ID NO: 6071
  Cyclic GFR-binding peptide
  MOD_RES (2)..(4): Xaa is C or S

SEQ ID NO: 34419 - protein, 27 aa, Artificial Sequence
  Cyclic GFR-binding peptide
MGEEYQKYTPVGMDDIYLVSIPSLKTP

SEQ ID NO: 34420 - protein, 22 aa, Artificial Sequence
  Cyclic GFR-binding peptide
IMRYKKLIKPTKGIFYLISIAN

SEQ ID NO: 34421 - protein, 28 aa, Artificial Sequence
  Cyclic GFR-binding peptide
KVIMEYKFKIKPTKGILYLISIPELDQS

SEQ ID NO: 34422 - protein, 29 aa, Artificial Sequence
  Cyclic GFR-binding peptide
  MOD_RES (29)..(29): Xaa is C or S
VMNEYQKYIVNSSDDIYLVSIPSLKTPAX

SEQ ID NO: 34423 - protein, 31 aa, Artificial Sequence
  Cyclic GFR-binding peptide
  MOD_RES (26)..(27): Xaa is C or S
EYKFKVKPTRGVLYLISIPELDQPVXXPSAS

SEQ ID NO: 34424 - protein, 22 aa, Artificial Sequence
  Cyclic GFR-binding peptide
MEYKFKIKPTKGILYLISIPEL

SEQ ID NO: 34425 - protein, 35 aa, Artificial Sequence
  Cyclic GFR-binding peptide
  MOD_RES (1)..(3): Xaa is C or S
XGXEAVSMGEEYKFKTPVGMDDLYLVSIPELKTPV

SEQ ID NO: 34426 - protein, 36 aa, Artificial Sequence; identical to SEQ ID NO: 6075
  Cyclic GFR-binding peptide
  MOD_RES (1)..(33)..(34): Xaa is C or S

SEQ ID NO: 34427 - protein, 31 aa, Artificial Sequence
  Cyclic GFR-binding peptide
  MOD_RES (28)..(29): Xaa is C or S
IMEYKFKVKPKRGVLYLISIPELAQPVXXPA

SEQ ID NO: 34428 - protein, 32 aa, Artificial Sequence
  Cyclic GFR-binding peptide
  MOD_RES (1)..(1): Xaa is C or S
XESVAMGEYQKYYTVVGKDIYLISIPSLKTPV

SEQ ID NO: 34429 - protein, 38 aa, Artificial Sequence
  Cyclic GFR-binding peptide
  MOD_RES (1)..(33)..(34): Xaa is C or S
XAKVVMNEYQKYIVNNSSDIYLVSIPSLKTPAXXAKPV

SEQ ID NO: 34430 - protein, 31 aa, Artificial Sequence; identical to SEQ ID NO: 6078
  Cyclic GFR-binding peptide
  MOD_RES (2)..(4): Xaa is C or S

SEQ ID NO: 34431 - protein, 26 aa, Artificial Sequence
  Cyclic GFR-binding peptide
SKVVMEYQKYVKPTRGVIYLISIPSL

SEQ ID NO: 34432 - protein, 31 aa, Artificial Sequence
  Cyclic GFR-binding peptide
  MOD_RES (2)..(2): Xaa is C or S
GXESVAMGRYKKLYTVVGKDFYLISIANLKT

SEQ ID NO: 34433 - protein, 23 aa, Artificial Sequence
  Cyclic GFR-binding peptide
NYHYKLIVNSSDDKYLVSIPSLQ

SEQ ID NO: 34434 - protein, 29 aa, Artificial Sequence
  Cyclic GFR-binding peptide
  MOD_RES (1)..(3): Xaa is C or S
XKXSRVIMEYKFKVKPKRGVLYLISIPEL

SEQ ID NO: 34435 - protein, 39 aa, Artificial Sequence; identical to SEQ ID NO: 6085
  Cyclic GFR-binding peptide
  MOD_RES (2)..(34): Xaa is C or S

SEQ ID NO: 34436 - protein, 26 aa, Artificial Sequence
  Cyclic GFR-binding peptide
  MOD_RES (26)..(26): Xaa is C or S
EYQKYYTVVGKDIYLISIPSLKTPVX

SEQ ID NO: 34437 - protein, 35 aa, Artificial Sequence
  Cyclic GFR-binding peptide
  MOD_RES (29)..(30): Xaa is C or S
AMGYHYKLYTVVGKDKYLISIPSLKTPVXXAKSAK

SEQ ID NO: 34438 - protein, 23 aa, Artificial Sequence
  Cyclic GFR-binding peptide
ERYKKLVVKDYEDFYLMSIANLE

SEQ ID NO: 34439 - protein, 30 aa, Artificial Sequence
  Cyclic GFR-binding peptide
  MOD_RES (28)..(29): Xaa is C or S
GEEYQKYTPVGMDDIYLVSIPSLKTPVXXA

SEQ ID NO: 34440 - protein, 39 aa, Artificial Sequence
  Cyclic GFR-binding peptide
  MOD_RES (1)..(3)..(34)..(35): Xaa is C or S
XKXSRVIMEYKFKVKPKRGVLYLISIPELAQPVXXPAAS

SEQ ID NO: 34441 - protein, 33 aa, Artificial Sequence
  Cyclic GFR-binding peptide
  MOD_RES (32)..(32): Xaa is C or S
SRVVMNEYQKYIVNSSDDIYLVSIPSLKTPAXT

SEQ ID NO: 34442 - protein, 34 aa, Artificial Sequence
  Cyclic GFR-binding peptide
  MOD_RES (30)..(31): Xaa is C or S
SMGEEYKFKTPVGMDDLYLVSIPELKTPVXXAKG

SEQ ID NO: 34443 - protein, 32 aa, Artificial Sequence
  Cyclic GFR-binding peptide
  MOD_RES (1)..(1): Xaa is C or S
XAKVVMNEYKFKIVNNSSDLYLVSIPELKTPA

SEQ ID NO: 34444 - protein, 31 aa, Artificial Sequence; identical to SEQ ID NO: 6090
  Cyclic GFR-binding peptide
  MOD_RES (1)..(3): Xaa is C or S

SEQ ID NO: 34445 - protein, 23 aa, Artificial Sequence
  Cyclic GFR-binding peptide
VMEEYQKYVVKDYEDIYLMSIPS

SEQ ID NO: 34446 - protein, 39 aa, Artificial Sequence
  Cyclic GFR-binding peptide
  MOD_RES (1)..(3)..(35)..(36): Xaa is C or S
XGXARVVMNEYKFKIVNSSDDLYLVSIPELQTPAXXPKP

SEQ ID NO: 34447 - protein, 35 aa, Artificial Sequence
  Cyclic GFR-binding peptide
  MOD_RES (31)..(32): Xaa is C or S
SVAMGYHYKLYTVVGKDKYLISIPSLKTPVXXAKS

SEQ ID NO: 34448 - protein, 35 aa, Artificial Sequence; identical to SEQ ID NO: 6091
  Cyclic GFR-binding peptide
  MOD_RES (1)..(3)..(35): Xaa is C or S

SEQ ID NO: 34449 - protein, 37 aa, Artificial Sequence
  Cyclic GFR-binding peptide
  MOD_RES (2)..(34)..(35): Xaa is C or S
GXAKVVMNEYKFKIVNNSSDLYLVSIPELKTPAXXAK

SEQ ID NO: 34450 - protein, 38 aa, Artificial Sequence
  Cyclic GFR-binding peptide
  MOD_RES (1)..(3)..(35)..(36): Xaa is C or S
XGXARVVMNEYKFKIVNSSDDLYLVSIPELQTPAXXPK

SEQ ID NO: 34451 - protein, 22 aa, Artificial Sequence
  Cyclic GFR-binding peptide
MGYHYKLYTVVGKDKYLISIPS

SEQ ID NO: 34452 - protein, 25 aa, Artificial Sequence
  Cyclic GFR-binding peptide
YHYKLIVNSSDDKYLVSIPSLKTPA

SEQ ID NO: 34453 - protein, 24 aa, Artificial Sequence
  Cyclic GFR-binding peptide
MYHYKLIKPTKGIKYLISIPSLDQ

SEQ ID NO: 34454 - protein, 33 aa, Artificial Sequence; identical to SEQ ID NO: 6096
  Cyclic GFR-binding peptide
  MOD_RES (30)..(31): Xaa is C or S

SEQ ID NO: 34455 - protein, 29 aa, Artificial Sequence
  Cyclic GFR-binding peptide
VVMNEYKFKIVNNSSDLYLVSIPELKTPA

SEQ ID NO: 34456 - protein, 40 aa, Artificial Sequence
  Cyclic GFR-binding peptide
  MOD_RES (2)..(34)..(35): Xaa is C or S
GXGEVVMEEYKFKVVKDYEDLYLMSIPELETPVXXAKPIS

SEQ ID NO: 34457 - protein, 36 aa, Artificial Sequence
  Cyclic GFR-binding peptide
  MOD_RES (1)..(3)..(34)..(35): Xaa is C or S
XKXSKVIMEYKFKIKPTKGILYLISIPELDQSVXXP

SEQ ID NO: 34458 - protein, 36 aa, Artificial Sequence; identical to SEQ ID NO: 6100
  Cyclic GFR-binding peptide
  MOD_RES (2)..(4)..(35)..(36): Xaa is C or S

SEQ ID NO: 34459 - protein, 36 aa, Artificial Sequence
  Cyclic GFR-binding peptide
  MOD_RES (2)..(34)..(35): Xaa is C or S
GXARVVMNEYKFKIVNSSDDLYLVSIPELQTPAXXP

SEQ ID NO: 34460 - protein, 33 aa, Artificial Sequence
  Cyclic GFR-binding peptide
  MOD_RES (32)..(33): Xaa is C or S
AKVVMNEYQKYIVNNSSDIYLVSIPSLKTPAXX

SEQ ID NO: 34461 - protein, 29 aa, Artificial Sequence
  Cyclic GFR-binding peptide
  MOD_RES (29)..(29): Xaa is C or S
VMDEYKFKVVKENEDLYLMSIPELETPVX

SEQ ID NO: 34462 - protein, 25 aa, Artificial Sequence
  Cyclic GFR-binding peptide
VMEYKFKVKPTRGVLYLISIPELDQ

SEQ ID NO: 34463 - protein, 36 aa, Artificial Sequence
  Cyclic GFR-binding peptide
  MOD_RES (2)..(33)..(34): Xaa is C or S
KXSKVIMEYQKYIKPTKGIIYLISIPSLDQSVXXPS

SEQ ID NO: 34464 - protein, 24 aa, Artificial Sequence
  Cyclic GFR-binding peptide
RVIMEYQKYVKPKRGVIYLISIPS

SEQ ID NO: 34465 - protein, 29 aa, Artificial Sequence
  Cyclic GFR-binding peptide
  MOD_RES (2)..(2): Xaa is C or S
GXAKVVMNEYKFKIVNNSSDLYLVSIPEL

SEQ ID NO: 34466 - protein, 26 aa, Artificial Sequence
  Cyclic GFR-binding peptide
MNRYKKLIVNSSDDFYLVSIANLKTP

SEQ ID NO: 34467 - protein, 24 aa, Artificial Sequence
  Cyclic GFR-binding peptide
IMRYKKLVKPKRGVFYLISIANLA

SEQ ID NO: 34468 - protein, 29 aa, Artificial Sequence
  Cyclic GFR-binding peptide
EVVMDYHYKLVVKENEDKYLMSIPSLETP

SEQ ID NO: 34469 - protein, 33 aa, Artificial Sequence
  Cyclic GFR-binding peptide
  MOD_RES (1)..(3): Xaa is C or S
XGXARVVMNEYQKYIVNSSDDIYLVSIPSLQTP

SEQ ID NO: 34470 - protein, 28 aa, Artificial Sequence
  Cyclic GFR-binding peptide
VMERYKKLVVKDYEDFYLMSIANLETPV

SEQ ID NO: 34471 - protein, 35 aa, Artificial Sequence
  Cyclic GFR-binding peptide
  MOD_RES (2)..(35): Xaa is C or S
GXEAVSMGEEYKFKTPVGMDDLYLVSIPELKTPVX

SEQ ID NO: 34472 - protein, 29 aa, Artificial Sequence
  Cyclic GFR-binding peptide
  MOD_RES (1)..(3): Xaa is C or S
XKXSKVIMEYKFKIKPTKGILYLISIPEL

SEQ ID NO: 34473 - protein, 35 aa, Artificial Sequence
  Cyclic GFR-binding peptide
  MOD_RES (2)..(4)..(35): Xaa is C or S
SXKXSKVIMEYQKYIKPTKGIIYLISIPSLDQSVX

SEQ ID NO: 34474 - protein, 36 aa, Artificial Sequence; identical to SEQ ID NO: 6119
  Cyclic GFR-binding peptide
  MOD_RES (32)..(33): Xaa is C or S

SEQ ID NO: 34475 - protein, 24 aa, Artificial Sequence
  Cyclic GFR-binding peptide
VVMEYKFKVKPTRGVLYLISIPEL

SEQ ID NO: 34476 - protein, 25 aa, Artificial Sequence
  Cyclic GFR-binding peptide
VVMDYHYKLVVKENEDKYLMSIPSL

SEQ ID NO: 34477 - protein, 30 aa, Artificial Sequence
  Cyclic GFR-binding peptide
  MOD_RES (2)..(2): Xaa is C or S
GXGEVVMDEYQKYVVKENEDIYLMSIPSLE

SEQ ID NO: 34478 - protein, 36 aa, Artificial Sequence
  Cyclic GFR-binding peptide
  MOD_RES (32)..(33): Xaa is C or S
GEVVMEEYKFKVVKDYEDLYLMSIPELETPVXXAKP

SEQ ID NO: 34479 - protein, 36 aa, Artificial Sequence; identical to SEQ ID NO: 6121
  Cyclic GFR-binding peptide
  MOD_RES (32)..(33): Xaa is C or S

SEQ ID NO: 34480 - protein, 33 aa, Artificial Sequence; identical to SEQ ID NO: 6122
  Cyclic GFR-binding peptide
  MOD_RES (2)..(2): Xaa is C or S

SEQ ID NO: 34481 - protein, 37 aa, Artificial Sequence
  Cyclic GFR-binding peptide
  MOD_RES (2)..(34): Xaa is C or S
GXSRVVMNEYQKYIVNSSDDIYLVSIPSLKTPAXTPK

SEQ ID NO: 34482 - protein, 32 aa, Artificial Sequence
  Cyclic GFR-binding peptide
  MOD_RES (31)..(32): Xaa is C or S
SKVIMEYQKYIKPTKGIIYLISIPSLDQSVXX

SEQ ID NO: 34483 - protein, 20 aa, Artificial Sequence
  Cyclic GFR-binding peptide
RYKKLVKPTRGVFYLISIAN

SEQ ID NO: 34484 - protein, 36 aa, Artificial Sequence
  Cyclic GFR-binding peptide
  MOD_RES (2)..(34)..(35): Xaa is C or S
GXSRVVMNEYKFKIVNSSDDLYLVSIPELKTPAXXP

SEQ ID NO: 34485 - protein, 36 aa, Artificial Sequence
  Cyclic GFR-binding peptide
  MOD_RES (2)..(34)..(35): Xaa is C or S
GXGEVVMEEYQKYVVKDYEDIYLMSIPSLETPVXXA

SEQ ID NO: 34486 - protein, 21 aa, Artificial Sequence
  Cyclic GFR-binding peptide
EYKFKVVKENEDLYLMSIPEL

SEQ ID NO: 34487 - protein, 33 aa, Artificial Sequence
  Cyclic GFR-binding peptide
  MOD_RES (30)..(31): Xaa is C or S
SMGEEYKFKTPVGMDDLYLVSIPELKTPVXXAK

SEQ ID NO: 34488 - protein, 27 aa, Artificial Sequence
  Cyclic GFR-binding peptide
  MOD_RES (27)..(27): Xaa is C or S
MRYKKLVKPKRGVFYLISIANLAQPVX

SEQ ID NO: 34489 - protein, 31 aa, Artificial Sequence; identical to SEQ ID NO: 6136
  Cyclic GFR-binding peptide
  MOD_RES (29)..(30): Xaa is C or S

SEQ ID NO: 34490 - protein, 26 aa, Artificial Sequence
  Cyclic GFR-binding peptide
RVIMRYKKLVKPKRGVFYLISIANLA

SEQ ID NO: 34491 - protein, 41 aa, Artificial Sequence; identical to SEQ ID NO: 6138
  Cyclic GFR-binding peptide
  MOD_RES (2)..(4)..(36)..(37): Xaa is C or S

SEQ ID NO: 34492 - protein, 32 aa, Artificial Sequence
  Cyclic GFR-binding peptide
  MOD_RES (26)..(26): Xaa is C or S
EYKFKIVNSSDDLYLVSIPELKTPAXTPKTVH

SEQ ID NO: 34493 - protein, 33 aa, Artificial Sequence; identical to SEQ ID NO: 6140
  Cyclic GFR-binding peptide
  MOD_RES (2)..(4): Xaa is C or S

SEQ ID NO: 34494 - protein, 32 aa, Artificial Sequence; identical to SEQ ID NO: 6142
  Cyclic GFR-binding peptide
  MOD_RES (2)..(2): Xaa is C or S

SEQ ID NO: 34495 - protein, 25 aa, Artificial Sequence
  Cyclic GFR-binding peptide
VMNEYQKYIVNNSSDIYLVSIPSLK

SEQ ID NO: 34496 - protein, 32 aa, Artificial Sequence
  Cyclic GFR-binding peptide
  MOD_RES (26)..(27): Xaa is C or S
EYKFKIVNSSDDLYLVSIPELQTPAXXPKPVT

SEQ ID NO: 34497 - protein, 36 aa, Artificial Sequence
  Cyclic GFR-binding peptide
  MOD_RES (1)..(33): Xaa is C or S
XSRVVMNEYQKYIVNSSDDIYLVSIPSLKTPAXTPK

SEQ ID NO: 34498 - protein, 39 aa, Artificial Sequence
  Cyclic GFR-binding peptide
  MOD_RES (1)..(3)..(35)..(36): Xaa is C or S
XGXGEVVMDEYQKYVVKENEDIYLMSIPSLETPVXXAKP

SEQ ID NO: 34499 - protein, 31 aa, Artificial Sequence
  Cyclic GFR-binding peptide
  MOD_RES (2)..(4): Xaa is C or S
SXKXSRVIMEYQKYVKPKRGVIYLISIPSLA

SEQ ID NO: 34500 - protein, 27 aa, Artificial Sequence
  Cyclic GFR-binding peptide
GEVVMEYHYKLVVKDYEDKYLMSIPSL

SEQ ID NO: 34501 - protein, 35 aa, Artificial Sequence; identical to SEQ ID NO: 6152
  Cyclic GFR-binding peptide
  MOD_RES (29)..(30): Xaa is C or S

SEQ ID NO: 34502 - protein, 39 aa, Artificial Sequence
  Cyclic GFR-binding peptide
  MOD_RES (1)..(33)..(34): Xaa is C or S
XAKVVMNEYQKYIVNNSSDIYLVSIPSLKTPAXXAKPVA

SEQ ID NO: 34503 - protein, 27 aa, Artificial Sequence
  Cyclic GFR-binding peptide
  MOD_RES (27)..(27): Xaa is C or S
MEYQKYVKPKRGVIYLISIPSLAQPVX

SEQ ID NO: 34504 - protein, 33 aa, Artificial Sequence
  Cyclic GFR-binding peptide
  MOD_RES (32)..(33): Xaa is C or S
AEVVMDRYKKLVVNNAADFYLISIANLRAPVXX

SEQ ID NO: 34505 - protein, 25 aa, Artificial Sequence
  Cyclic GFR-binding peptide
MEEYQKYVVKDYEDIYLMSIPSLET

SEQ ID NO: 34506 - protein, 30 aa, Artificial Sequence
  Cyclic GFR-binding peptide
  MOD_RES (30)..(30): Xaa is C or S
KVVMEYQKYVKPTRGVIYLISIPSLDQPVX

SEQ ID NO: 34507 - protein, 35 aa, Artificial Sequence; identical to SEQ ID NO: 6155
  Cyclic GFR-binding peptide
  MOD_RES (31)..(32): Xaa is C or S

SEQ ID NO: 34508 - protein, 39 aa, Artificial Sequence
  Cyclic GFR-binding peptide
  MOD_RES (2)..(34)..(35): Xaa is C or S
GXESVAMGYHYKLYTVVGKDKYLISIPSLKTPVXXAKSA

SEQ ID NO: 34509 - protein, 36 aa, Artificial Sequence; identical to SEQ ID NO: 6156
  Cyclic GFR-binding peptide
  MOD_RES (1)..(33)..(34): Xaa is C or S

SEQ ID NO: 34510 - protein, 27 aa, Artificial Sequence
  Cyclic GFR-binding peptide
AVSMGEEYKFKTPVGMDDLYLVSIPEL

SEQ ID NO: 34511 - protein, 30 aa, Artificial Sequence
  Cyclic GFR-binding peptide
  MOD_RES (2)..(2): Xaa is C or S
GXSRVVMNEYKFKIVNSSDDLYLVSIPELK

SEQ ID NO: 34512 - protein, 31 aa, Artificial Sequence
  Cyclic GFR-binding peptide
  MOD_RES (2)..(2): Xaa is C or S
KXSKVVMEYQKYVKPTRGVIYLISIPSLDQP

SEQ ID NO: 34513 - protein, 34 aa, Artificial Sequence; identical to SEQ ID NO: 6159
  Cyclic GFR-binding peptide
  MOD_RES (30)..(31): Xaa is C or S

SEQ ID NO: 34514 - protein, 26 aa, Artificial Sequence
  Cyclic GFR-binding peptide
  MOD_RES (1)..(1): Xaa is C or S
XSKVVMEYKFKVKPTRGVLYLISIPE

SEQ ID NO: 34515 - protein, 37 aa, Artificial Sequence
  Cyclic GFR-binding peptide
  MOD_RES (2)..(4)..(36)..(37): Xaa is C or S
RXGXESVAMGYHYKLYTVVGKDKYLISIPSLKTPVXX

SEQ ID NO: 34516 - protein, 25 aa, Artificial Sequence
  Cyclic GFR-binding peptide
RVVMNEYKFKIVNSSDDLYLVSIPE

SEQ ID NO: 34517 - protein, 32 aa, Artificial Sequence; identical to SEQ ID NO: 6161
  Cyclic GFR-binding peptide
  MOD_RES (27)..(28): Xaa is C or S

SEQ ID NO: 34518 - protein, 26 aa, Artificial Sequence
  Cyclic GFR-binding peptide
  MOD_RES (26)..(26): Xaa is C or S
EYKFKIVNSSDDLYLVSIPELQTPAX

SEQ ID NO: 34519 - protein, 26 aa, Artificial Sequence
  Cyclic GFR-binding peptide
VMNRYKKLIVNNSSDFYLVSIANLKT

SEQ ID NO: 34520 - protein, 27 aa, Artificial Sequence
  Cyclic GFR-binding peptide
  MOD_RES (26)..(27): Xaa is C or S
YHYKLIVNSSDDKYLVSIPSLQTPAXX

SEQ ID NO: 34521 - protein, 30 aa, Artificial Sequence
  Cyclic GFR-binding peptide
  MOD_RES (2)..(2): Xaa is C or S
GXEAVSMGEEYQKYTPVGMDDIYLVSIPSL

SEQ ID NO: 34522 - protein, 40 aa, Artificial Sequence
  Cyclic GFR-binding peptide
  MOD_RES (2)..(34): Xaa is C or S
GXSRVVMNEYKFKIVNSSDDLYLVSIPELKTPAXTPKTVH

SEQ ID NO: 34523 - protein, 35 aa, Artificial Sequence
  Cyclic GFR-binding peptide
  MOD_RES (1)..(3): Xaa is C or S
XGXEAVSMGEEYQKYTPVGMDDIYLVSIPSLKTPV

SEQ ID NO: 34524 - protein, 32 aa, Artificial Sequence
  Cyclic GFR-binding peptide
  MOD_RES (2)..(2): Xaa is C or S
GXGEVVMEEYQKYVVKDYEDIYLMSIPSLETP

SEQ ID NO: 34525 - protein, 29 aa, Artificial Sequence
  Cyclic GFR-binding peptide
  MOD_RES (1)..(1): Xaa is C or S
XAEVVMDEYKFKVVNNAADLYLISIPELR

SEQ ID NO: 34526 - protein, 35 aa, Artificial Sequence; identical to SEQ ID NO: 6167
  Cyclic GFR-binding peptide
  MOD_RES (2)..(33)..(34): Xaa is C or S

SEQ ID NO: 34527 - protein, 32 aa, Artificial Sequence
  Cyclic GFR-binding peptide
  MOD_RES (26)..(27): Xaa is C or S
EYKFKIVNSSDDLYLVSIPELKTPAXXPKPVY

SEQ ID NO: 34528 - protein, 22 aa, Artificial Sequence
  Cyclic GFR-binding peptide
MNEYKFKIVNSSDDLYLVSIPE

SEQ ID NO: 34529 - protein, 31 aa, Artificial Sequence; identical to SEQ ID NO: 6168
  Cyclic GFR-binding peptide
  MOD_RES (1)..(3): Xaa is C or S

SEQ ID NO: 34530 - protein, 39 aa, Artificial Sequence
  Cyclic GFR-binding peptide
  MOD_RES (1)..(33)..(34): Xaa is C or S
XSRVVMNEYQKYIVNSSDDIYLVSIPSLKTPAXXPKPVY

SEQ ID NO: 34531 - protein, 36 aa, Artificial Sequence
  Cyclic GFR-binding peptide
  MOD_RES (2)..(34)..(35): Xaa is C or S
GXAKVVMNEYQKYIVNNSSDIYLVSIPSLKTPAXXA

SEQ ID NO: 34532 - protein, 29 aa, Artificial Sequence
  Cyclic GFR-binding peptide
  MOD_RES (29)..(29): Xaa is C or S
MGEEYQKYTPVGMDDIYLVSIPSLKTPVX

SEQ ID NO: 34533 - protein, 38 aa, Artificial Sequence; identical to SEQ ID NO: 6170
  Cyclic GFR-binding peptide
  MOD_RES (1)..(3)..(35)..(36): Xaa is C or S

SEQ ID NO: 34534 - protein, 30 aa, Artificial Sequence
  Cyclic GFR-binding peptide
  MOD_RES (1)..(1): Xaa is C or S
XSRVVMNEYKFKIVNSSDDLYLVSIPELKT

SEQ ID NO: 34535 - protein, 21 aa, Artificial Sequence
  Cyclic GFR-binding peptide
EYQKYIKPTKGIIYLISIPSL

SEQ ID NO: 34536 - protein, 31 aa, Artificial Sequence
  Cyclic GFR-binding peptide
  MOD_RES (31)..(31): Xaa is C or S
EVVMDEYKFKVVNNAADLYLISIPELRAPVX

SEQ ID NO: 34537 - protein, 33 aa, Artificial Sequence; identical to SEQ ID NO: 6173
  Cyclic GFR-binding peptide
  MOD_RES (1)..(32)..(33): Xaa is C or S

SEQ ID NO: 34538 - protein, 28 aa, Artificial Sequence
  Cyclic GFR-binding peptide
  MOD_RES (2)..(2): Xaa is C or S
KXSKVIMEYKFKIKPTKGILYLISIPEL

SEQ ID NO: 34539 - protein, 37 aa, Artificial Sequence; identical to SEQ ID NO: 6175
  Cyclic GFR-binding peptide
  MOD_RES (31)..(32): Xaa is C or S

SEQ ID NO: 34540 - protein, 25 aa, Artificial Sequence
  Cyclic GFR-binding peptide
AMGYHYKLYTVVGKDKYLISIPSLK

SEQ ID NO: 34541 - protein, 32 aa, Artificial Sequence
  Cyclic GFR-binding peptide
  MOD_RES (30)..(31): Xaa is C or S
VVMNEYQKYIVNSSDDIYLVSIPSLKTPAXXP

SEQ ID NO: 34542 - protein, 31 aa, Artificial Sequence
  Cyclic GFR-binding peptide
  MOD_RES (2)..(4): Xaa is C or S
RXGXESVAMGEYQKYYTVVGKDIYLISIPSL

SEQ ID NO: 34543 - protein, 34 aa, Artificial Sequence
  Cyclic GFR-binding peptide
  MOD_RES (29)..(30): Xaa is C or S
VMDYHYKLVVNNAADKYLISIPSLRAPVXXSAPA

SEQ ID NO: 34544 - protein, 34 aa, Artificial Sequence
  Cyclic GFR-binding peptide
  MOD_RES (30)..(31): Xaa is C or S
VVMNEYQKYIVNSSDDIYLVSIPSLKTPAXXPKP

SEQ ID NO: 34545 - protein, 30 aa, Artificial Sequence
  Cyclic GFR-binding peptide
  MOD_RES (1)..(1): Xaa is C or S
XEAVSMGEEYQKYTPVGMDDIYLVSIPSLK

SEQ ID NO: 34546 - protein, 30 aa, Artificial Sequence; identical to SEQ ID NO: 6177
  Cyclic GFR-binding peptide
  MOD_RES (26)..(27): Xaa is C or S

SEQ ID NO: 34547 - protein, 24 aa, Artificial Sequence
  Cyclic GFR-binding peptide
VVMNRYKKLIVNSSDDFYLVSIAN

SEQ ID NO: 34548 - protein, 31 aa, Artificial Sequence
  Cyclic GFR-binding peptide
  MOD_RES (2)..(4): Xaa is C or S
RXGXESVAMGEYKFKYTVVGKDLYLISIPEL

SEQ ID NO: 34549 - protein, 36 aa, Artificial Sequence; identical to SEQ ID NO: 6183
  Cyclic GFR-binding peptide
  MOD_RES (1)..(3)..(35)..(36): Xaa is C or S

SEQ ID NO: 34550 - protein, 23 aa, Artificial Sequence
  Cyclic GFR-binding peptide
MEYQKYVKPTRGVIYLISIPSLD

SEQ ID NO: 34551 - protein, 28 aa, Artificial Sequence
  Cyclic GFR-binding peptide
VVMEYHYKLVVKDYEDKYLMSIPSLETP

SEQ ID NO: 34552 - protein, 30 aa, Artificial Sequence
  Cyclic GFR-binding peptide
  MOD_RES (30)..(30): Xaa is C or S
VVMNEYKFKIVNNSSDLYLVSIPELKTPAX

SEQ ID NO: 34553 - protein, 36 aa, Artificial Sequence; identical to SEQ ID NO: 6185
  Cyclic GFR-binding peptide
  MOD_RES (31)..(32): Xaa is C or S

SEQ ID NO: 34554 - protein, 30 aa, Artificial Sequence
  Cyclic GFR-binding peptide
  MOD_RES (26)..(27): Xaa is C or S
EYKFKVKPTRGVLYLISIPELDQPVXXPSA

SEQ ID NO: 34555 - protein, 32 aa, Artificial Sequence; identical to SEQ ID NO: 6188
  Cyclic GFR-binding peptide
  MOD_RES (2)..(2): Xaa is C or S

SEQ ID NO: 34556 - protein, 24 aa, Artificial Sequence
  Cyclic GFR-binding peptide
NRYKKLIVNNSSDFYLVSIANLKT

SEQ ID NO: 34557 - protein, 34 aa, Artificial Sequence
  Cyclic GFR-binding peptide
  MOD_RES (2)..(4): Xaa is C or S
HXGXSRVVMNEYKFKIVNSSDDLYLVSIPELKTP

SEQ ID NO: 34558 - protein, 32 aa, Artificial Sequence
  Cyclic GFR-binding peptide
  MOD_RES (32)..(32): Xaa is C or S
AVSMGEEYQKYTPVGMDDIYLVSIPSLKTPVX

SEQ ID NO: 34559 - protein, 40 aa, Artificial Sequence
  Cyclic GFR-binding peptide
  MOD_RES (1)..(3)..(35)..(36): Xaa is C or S
XGXARVVMNEYKFKIVNSSDDLYLVSIPELQTPAXXPKPV

SEQ ID NO: 34560 - protein, 30 aa, Artificial Sequence; identical to SEQ ID NO: 6193
  Cyclic GFR-binding peptide
  MOD_RES (2)..(4): Xaa is C or S

SEQ ID NO: 34561 - protein, 25 aa, Artificial Sequence
  Cyclic GFR-binding peptide
VVMYHYKLVKPTRGVKYLISIPSLD

SEQ ID NO: 34562 - protein, 31 aa, Artificial Sequence
  Cyclic GFR-binding peptide
  MOD_RES (2)..(2): Xaa is C or S
KXSKVVMEYKFKVKPTRGVLYLISIPELDQP

SEQ ID NO: 34563 - protein, 33 aa, Artificial Sequence
  Cyclic GFR-binding peptide
  MOD_RES (29)..(30): Xaa is C or S
VVMEYQKYVKPTRGVIYLISIPSLDQPVXXPSA

SEQ ID NO: 34564 - protein, 35 aa, Artificial Sequence
  Cyclic GFR-binding peptide
  MOD_RES (1)..(3)..(35): Xaa is C or S
XGXARVVMNEYQKYIVNSSDDIYLVSIPSLQTPAX

SEQ ID NO: 34565 - protein, 26 aa, Artificial Sequence
  Cyclic GFR-binding peptide
VIMEYKFKIKPTKGILYLISIPELDQ

SEQ ID NO: 34566 - protein, 31 aa, Artificial Sequence
  Cyclic GFR-binding peptide
  MOD_RES (1)..(3): Xaa is C or S
XGXARVVMNEYKFKIVNSSDDLYLVSIPELQ

SEQ ID NO: 34567 - protein, 24 aa, Artificial Sequence
  Cyclic GFR-binding peptide
KVVMRYKKLVKPTRGVFYLISIAN

SEQ ID NO: 34568 - protein, 28 aa, Artificial Sequence
  Cyclic GFR-binding peptide
MGEEYQKYTPVGMDDIYLVSIPSLKTPV

SEQ ID NO: 34569 - protein, 30 aa, Artificial Sequence
  Cyclic GFR-binding peptide
  MOD_RES (26)..(27): Xaa is C or S
EYKFKVVKDYEDLYLMSIPELETPVXXAKP

SEQ ID NO: 34570 - protein, 34 aa, Artificial Sequence; identical to SEQ ID NO: 6204
  Cyclic GFR-binding peptide
  MOD_RES (30)..(30): Xaa is C or S

SEQ ID NO: 34571 - protein, 33 aa, Artificial Sequence
  Cyclic GFR-binding peptide
  MOD_RES (28)..(29): Xaa is C or S
MEEYKFKVVKDYEDLYLMSIPELETPVXXAKPI

SEQ ID NO: 34572 - protein, 33 aa, Artificial Sequence; identical to SEQ ID NO: 6206
  Cyclic GFR-binding peptide
  MOD_RES (27)..(27): Xaa is C or S

SEQ ID NO: 34573 - protein, 42 aa, Artificial Sequence; identical to SEQ ID NO: 6207
  Cyclic GFR-binding peptide
  MOD_RES (1)..(3)..(36)..(37): Xaa is C or S

SEQ ID NO: 34574 - protein, 32 aa, Artificial Sequence; identical to SEQ ID NO: 6208
  Cyclic GFR-binding peptide
  MOD_RES (26)..(27): Xaa is C or S

SEQ ID NO: 34575 - protein, 29 aa, Artificial Sequence
  Cyclic GFR-binding peptide
  MOD_RES (1)..(1): Xaa is C or S
XEAVSMGEEYKFKTPVGMDDLYLVSIPEL

SEQ ID NO: 34576 - protein, 32 aa, Artificial Sequence
  Cyclic GFR-binding peptide
  MOD_RES (30)..(31): Xaa is C or S
RVIMEYKFKVKPKRGVLYLISIPELAQPVXXP

SEQ ID NO: 34577 - protein, 31 aa, Artificial Sequence; identical to SEQ ID NO: 6215
  Cyclic GFR-binding peptide
  MOD_RES (2)..(2): Xaa is C or S

SEQ ID NO: 34578 - protein, 30 aa, Artificial Sequence; identical to SEQ ID NO: 6219
  Cyclic GFR-binding peptide

SEQ ID NO: 34579 - protein, 32 aa, Artificial Sequence
  Cyclic GFR-binding peptide
  MOD_RES (31)..(32): Xaa is C or S
EVVMDEYKFKVVNNAADLYLISIPELRAPVXX

SEQ ID NO: 34580 - protein, 35 aa, Artificial Sequence
  Cyclic GFR-binding peptide
  MOD_RES (2)..(4): Xaa is C or S
RXGXESVAMGEYQKYYTVVGKDIYLISIPSLKTPV

SEQ ID NO: 34581 - protein, 20 aa, Artificial Sequence
  Cyclic GFR-binding peptide
RYKKLVVNNAADFYLISIAN

SEQ ID NO: 34582 - protein, 29 aa, Artificial Sequence
  Cyclic GFR-binding peptide
  MOD_RES (26)..(26): Xaa is C or S
EYQKYIVNSSDDIYLVSIPSLKTPAXTPK

SEQ ID NO: 34583 - protein, 38 aa, Artificial Sequence
  Cyclic GFR-binding peptide
  MOD_RES (2)..(4)..(36)..(37): Xaa is C or S
RXGXESVAMGRYKKLYTVVGKDFYLISIANLKTPVXXA

SEQ ID NO: 34584 - protein, 26 aa, Artificial Sequence
  Cyclic GFR-binding peptide
IMRYKKLVKPKRGVFYLISIANLAQP

SEQ ID NO: 34585 - protein, 34 aa, Artificial Sequence; identical to SEQ ID NO: 6227
  Cyclic GFR-binding peptide
  MOD_RES (31)..(32): Xaa is C or S

SEQ ID NO: 34586 - protein, 37 aa, Artificial Sequence
  Cyclic GFR-binding peptide
  MOD_RES (2)..(4)..(35)..(36): Xaa is C or S
SXKXSRVIMEYKFKVKPKRGVLYLISIPELAQPVXXP

SEQ ID NO: 34587 - protein, 39 aa, Artificial Sequence
  Cyclic GFR-binding peptide
  MOD_RES (2)..(4)..(36)..(37): Xaa is C or S
RXGXAEVVMDEYKFKVVNNAADLYLISIPELRAPVXXSA

SEQ ID NO: 34588 - protein, 27 aa, Artificial Sequence
  Cyclic GFR-binding peptide
  MOD_RES (26)..(27): Xaa is C or S
EYKFKVVNNAADLYLISIPELRAPVXX

SEQ ID NO: 34589 - protein, 25 aa, Artificial Sequence
  Cyclic GFR-binding peptide
SMGERYKKLTPVGMDDFYLVSIANL

SEQ ID NO: 34590 - protein, 26 aa, Artificial Sequence
  Cyclic GFR-binding peptide
IMEYQKYVKPKRGVIYLISIPSLAQP

SEQ ID NO: 34591 - protein, 29 aa, Artificial Sequence
  Cyclic GFR-binding peptide
  MOD_RES (29)..(29): Xaa is C or S
VMDRYKKLVVKENEDFYLMSIANLETPVX

SEQ ID NO: 34592 - protein, 37 aa, Artificial Sequence; identical to SEQ ID NO: 6233
  Cyclic GFR-binding peptide
  MOD_RES (2)..(34): Xaa is C or S

SEQ ID NO: 34593 - protein, 33 aa, Artificial Sequence; identical to SEQ ID NO: 6234
  Cyclic GFR-binding peptide
  MOD_RES (1)..(3): Xaa is C or S

SEQ ID NO: 34594 - protein, 39 aa, Artificial Sequence
  Cyclic GFR-binding peptide
  MOD_RES (1)..(33)..(34): Xaa is C or S
XAEVVMDEYKFKVVNNAADLYLISIPELRAPVXXSAPAA

SEQ ID NO: 34595 - protein, 26 aa, Artificial Sequence
  Cyclic GFR-binding peptide
EEYQKYTPVGMDDIYLVSIPSLKTPV

SEQ ID NO: 34596 - protein, 31 aa, Artificial Sequence
  Cyclic GFR-binding peptide
  MOD_RES (30)..(31): Xaa is C or S
RVIMEYQKYVKPKRGVIYLISIPSLAQPVXX

SEQ ID NO: 34597 - protein, 34 aa, Artificial Sequence; identical to SEQ ID NO: 6236
  Cyclic GFR-binding peptide
  MOD_RES (29)..(30): Xaa is C or S

SEQ ID NO: 34598 - protein, 33 aa, Artificial Sequence; identical to SEQ ID NO: 6238
  Cyclic GFR-binding peptide
  MOD_RES (27)..(28): Xaa is C or S

SEQ ID NO: 34599 - protein, 33 aa, Artificial Sequence
  Cyclic GFR-binding peptide
  MOD_RES (27)..(28): Xaa is C or S
NEYKFKIVNSSDDLYLVSIPELQTPAXXPKPVT

SEQ ID NO: 34600 - protein, 31 aa, Artificial Sequence
  Cyclic GFR-binding peptide
  MOD_RES (1)..(1): Xaa is C or S
XSKVVMEYQKYVKPTRGVIYLISIPSLDQPV

SEQ ID NO: 34601 - protein, 32 aa, Artificial Sequence
  Cyclic GFR-binding peptide
  MOD_RES (31)..(32): Xaa is C or S
SKVVMEYQKYVKPTRGVIYLISIPSLDQPVXX

SEQ ID NO: 34602 - protein, 20 aa, Artificial Sequence
  Cyclic GFR-binding peptide
YHYKLVVKENEDKYLMSIPS

SEQ ID NO: 34603 - protein, 31 aa, Artificial Sequence; identical to SEQ ID NO: 6248
  Cyclic GFR-binding peptide
  MOD_RES (26)..(27): Xaa is C or S

SEQ ID NO: 34604 - protein, 27 aa, Artificial Sequence
  Cyclic GFR-binding peptide
AEVVMDYHYKLVVNNAADKYLISIPSL

SEQ ID NO: 34605 - protein, 36 aa, Artificial Sequence; identical to SEQ ID NO: 6252
  Cyclic GFR-binding peptide
  MOD_RES (30)..(30): Xaa is C or S

SEQ ID NO: 34606 - protein, 24 aa, Artificial Sequence
  Cyclic GFR-binding peptide
YHYKLIKPTKGIKYLISIPSLDQS

SEQ ID NO: 34607 - protein, 34 aa, Artificial Sequence; identical to SEQ ID NO: 6254
  Cyclic GFR-binding peptide
  MOD_RES (32)..(33): Xaa is C or S

SEQ ID NO: 34608 - protein, 31 aa, Artificial Sequence; identical to SEQ ID NO: 6255
  Cyclic GFR-binding peptide
  MOD_RES (29)..(30): Xaa is C or S

SEQ ID NO: 34609 - protein, 39 aa, Artificial Sequence
  Cyclic GFR-binding peptide
  MOD_RES (2)..(4)..(36): Xaa is C or S
HXGXSRVVMNEYQKYIVNSSDDIYLVSIPSLKTPAXTPK

SEQ ID NO: 34610 - protein, 33 aa, Artificial Sequence
  Cyclic GFR-binding peptide
  MOD_RES (31)..(32): Xaa is C or S
EVVMDRYKKLVVNNAADFYLISIANLRAPVXXS

SEQ ID NO: 34611 - protein, 28 aa, Artificial Sequence
  Cyclic GFR-binding peptide
VVMNEYQKYIVNNSSDIYLVSIPSLKTP

SEQ ID NO: 34612 - protein, 30 aa, Artificial Sequence
  Cyclic GFR-binding peptide
  MOD_RES (30)..(30): Xaa is C or S
VVMDYHYKLVVNNAADKYLISIPSLRAPVX

SEQ ID NO: 34613 - protein, 28 aa, Artificial Sequence
  Cyclic GFR-binding peptide
SVAMGRYKKLYTVVGKDFYLISIANLKT

SEQ ID NO: 34614 - protein, 21 aa, Artificial Sequence
  Cyclic GFR-binding peptide
YHYKLVVKENEDKYLMSIPSL

SEQ ID NO: 34615 - protein, 37 aa, Artificial Sequence; identical to SEQ ID NO: 6259
  Cyclic GFR-binding peptide
  MOD_RES (1)..(33)..(34): Xaa is C or S

SEQ ID NO: 34616 - protein, 30 aa, Artificial Sequence; identical to SEQ ID NO: 6261
  Cyclic GFR-binding peptide
  MOD_RES (27)..(28): Xaa is C or S

SEQ ID NO: 34617 - protein, 33 aa, Artificial Sequence; identical to SEQ ID NO: 6262
  Cyclic GFR-binding peptide
  MOD_RES (2)..(4): Xaa is C or S

SEQ ID NO: 34618 - protein, 38 aa, Artificial Sequence; identical to SEQ ID NO: 6263
  Cyclic GFR-binding peptide
  MOD_RES (1)..(3)..(35)..(36): Xaa is C or S

SEQ ID NO: 34619 - protein, 26 aa, Artificial Sequence
  Cyclic GFR-binding peptide
  MOD_RES (26)..(26): Xaa is C or S
YHYKLIKPTKGIKYLISIPSLDQSVX

SEQ ID NO: 34620 - protein, 38 aa, Artificial Sequence; identical to SEQ ID NO: 6268
  Cyclic GFR-binding peptide
  MOD_RES (32)..(32): Xaa is C or S

SEQ ID NO: 34621 - protein, 38 aa, Artificial Sequence; identical to SEQ ID NO: 6269
  Cyclic GFR-binding peptide
  MOD_RES (2)..(34): Xaa is C or S

SEQ ID NO: 34622 - protein, 24 aa, Artificial Sequence
  Cyclic GFR-binding peptide
GYHYKLYTVVGKDKYLISIPSLKT

SEQ ID NO: 34623 - protein, 32 aa, Artificial Sequence; identical to SEQ ID NO: 6270
  Cyclic GFR-binding peptide
  MOD_RES (26)..(26): Xaa is C or S

SEQ ID NO: 34624 - protein, 32 aa, Artificial Sequence; identical to SEQ ID NO: 6271
  Cyclic GFR-binding peptide
  MOD_RES (27)..(28): Xaa is C or S

SEQ ID NO: 34625 - protein, 32 aa, Artificial Sequence; identical to SEQ ID NO: 6272
  Cyclic GFR-binding peptide
  MOD_RES (1)..(3): Xaa is C or S

SEQ ID NO: 34626 - protein, 26 aa, Artificial Sequence
  Cyclic GFR-binding peptide
VIMRYKKLIKPTKGIFYLISIANLDQ

SEQ ID NO: 34627 - protein, 30 aa, Artificial Sequence; identical to SEQ ID NO: 6274
  Cyclic GFR-binding peptide
  MOD_RES (2)..(2): Xaa is C or S

SEQ ID NO: 34628 - protein, 31 aa, Artificial Sequence; identical to SEQ ID NO: 6276
  Cyclic GFR-binding peptide
  MOD_RES (2)..(2): Xaa is C or S

SEQ ID NO: 34629 - protein, 26 aa, Artificial Sequence
  Cyclic GFR-binding peptide
EYHYKLVVKDYEDKYLMSIPSLETPV

SEQ ID NO: 34630 - protein, 31 aa, Artificial Sequence
  Cyclic GFR-binding peptide
  MOD_RES (1)..(1): Xaa is C or S
XSKVIMEYQKYIKPTKGIIYLISIPSLDQSV

SEQ ID NO: 34631 - protein, 40 aa, Artificial Sequence; identical to SEQ ID NO: 6282
  Cyclic GFR-binding peptide
  MOD_RES (2)..(34)..(35): Xaa is C or S

SEQ ID NO: 34632 - protein, 27 aa, Artificial Sequence
  Cyclic GFR-binding peptide
EVVMDYHYKLVVKENEDKYLMSIPSLE

SEQ ID NO: 34633 - protein, 33 aa, Artificial Sequence
  Cyclic GFR-binding peptide
  MOD_RES (2)..(4): Xaa is C or S
RXGXAEVVMDYHYKLVVNNAADKYLISIPSLRA

SEQ ID NO: 34634 - protein, 26 aa, Artificial Sequence
  Cyclic GFR-binding peptide
SKVIMYHYKLIKPTKGIKYLISIPSL

SEQ ID NO: 34635 - protein, 25 aa, Artificial Sequence
  Cyclic GFR-binding peptide
RYKKLYTVVGKDFYLISIANLKTPV

SEQ ID NO: 34636 - protein, 36 aa, Artificial Sequence
  Cyclic GFR-binding peptide
  MOD_RES (1)..(3)..(35)..(36): Xaa is C or S
XGXSRVVMNEYKFKIVNSSDDLYLVSIPELKTPAXX

SEQ ID NO: 34637 - protein, 29 aa, Artificial Sequence
  Cyclic GFR-binding peptide
  MOD_RES (1)..(3): Xaa is C or S
XGXGEVVMDRYKKLVVKENEDFYLMSIAN

SEQ ID NO: 34638 - protein, 41 aa, Artificial Sequence
  Cyclic GFR-binding peptide
  MOD_RES (2)..(35)..(36): Xaa is C or S
GXEAVSMGEEYKFKTPVGMDDLYLVSIPELKTPVXXAKGVK

SEQ ID NO: 34639 - protein, 40 aa, Artificial Sequence
  Cyclic GFR-binding peptide
  MOD_RES (2)..(4)..(37)..(38): Xaa is C or S
RXGXEAVSMGEEYKFKTPVGMDDLYLVSIPELKTPVXXAK

SEQ ID NO: 34640 - protein, 34 aa, Artificial Sequence
  Cyclic GFR-binding peptide
  MOD_RES (29)..(30): Xaa is C or S
VMNEYQKYIVNNSSDIYLVSIPSLKTPAXXAKPV

SEQ ID NO: 34641 - protein, 23 aa, Artificial Sequence
  Cyclic GFR-binding peptide
VIMYHYKLIKPTKGIKYLISIPS

SEQ ID NO: 34642 - protein, 35 aa, Artificial Sequence
  Cyclic GFR-binding peptide
  MOD_RES (30)..(31): Xaa is C or S
KVIMEYKFKIKPTKGILYLISIPELDQSVXXPSAS

SEQ ID NO: 34643 - protein, 31 aa, Artificial Sequence; identical to SEQ ID NO: 6293
  Cyclic GFR-binding peptide
  MOD_RES (30)..(31): Xaa is C or S

SEQ ID NO: 34644 - protein, 39 aa, Artificial Sequence
  Cyclic GFR-binding peptide
  MOD_RES (2)..(35)..(36): Xaa is C or S
GXEAVSMGEEYQKYTPVGMDDIYLVSIPSLKTPVXXAKG

SEQ ID NO: 34645 - protein, 28 aa, Artificial Sequence
  Cyclic GFR-binding peptide
EVVMEEYQKYVVKDYEDIYLMSIPSLET

SEQ ID NO: 34646 - protein, 20 aa, Artificial Sequence
  Cyclic GFR-binding peptide
RYKKLVVKDYEDFYLMSIAN

SEQ ID NO: 34647 - protein, 32 aa, Artificial Sequence
  Cyclic GFR-binding peptide
  MOD_RES (29)..(30): Xaa is C or S
AMGRYKKLYTVVGKDFYLISIANLKTPVXXAK

SEQ ID NO: 34648 - protein, 29 aa, Artificial Sequence
  Cyclic GFR-binding peptide
  MOD_RES (2)..(2): Xaa is C or S
KXSKVVMEYKFKVKPTRGVLYLISIPELD

SEQ ID NO: 34649 - protein, 37 aa, Artificial Sequence
  Cyclic GFR-binding peptide
  MOD_RES (31)..(32): Xaa is C or S
EVVMDEYKFKVVNNAADLYLISIPELRAPVXXSAPAA

SEQ ID NO: 34650 - protein, 30 aa, Artificial Sequence; identical to SEQ ID NO: 6298
  Cyclic GFR-binding peptide

SEQ ID NO: 34651 - protein, 37 aa, Artificial Sequence; identical to SEQ ID NO: 6301
  Cyclic GFR-binding peptide
  MOD_RES (2)..(33)..(34): Xaa is C or S

SEQ ID NO: 34652 - protein, 34 aa, Artificial Sequence
  Cyclic GFR-binding peptide
  MOD_RES (30)..(31): Xaa is C or S
VAMGEYQKYYTVVGKDIYLISIPSLKTPVXXAKS

SEQ ID NO: 34653 - protein, 41 aa, Artificial Sequence
  Cyclic GFR-binding peptide
  MOD_RES (1)..(3)..(35)..(36): Xaa is C or S
XGXSRVVMNEYKFKIVNSSDDLYLVSIPELKTPAXXPKPVY

SEQ ID NO: 34654 - protein, 31 aa, Artificial Sequence
  Cyclic GFR-binding peptide
  MOD_RES (2)..(2): Xaa is C or S
GXAEVVMDRYKKLVVNNAADFYLISIANLRA

SEQ ID NO: 34655 - protein, 38 aa, Artificial Sequence
  Cyclic GFR-binding peptide
  MOD_RES (2)..(4)..(36)..(37): Xaa is C or S
RXGXGEVVMEEYQKYVVKDYEDIYLMSIPSLETPVXXA

SEQ ID NO: 34656 - protein, 27 aa, Artificial Sequence
  Cyclic GFR-binding peptide
SMGEEYKFKTPVGMDDLYLVSIPELKT

SEQ ID NO: 34657 - protein, 38 aa, Artificial Sequence
  Cyclic GFR-binding peptide
  MOD_RES (1)..(3)..(35)..(36): Xaa is C or S
XGXGEVVMDEYQKYVVKENEDIYLMSIPSLETPVXXAK

SEQ ID NO: 34658 - protein, 26 aa, Artificial Sequence
  Cyclic GFR-binding peptide
EVVMDEYQKYVVKENEDIYLMSIPSL

SEQ ID NO: 34659 - protein, 40 aa, Artificial Sequence
  Cyclic GFR-binding peptide
  MOD_RES (2)..(4)..(36)..(37): Xaa is C or S
RXGXAEVVMDRYKKLVVNNAADFYLISIANLRAPVXXSAP

SEQ ID NO: 34660 - protein, 36 aa, Artificial Sequence; identical to SEQ ID NO: 6310
  Cyclic GFR-binding peptide
  MOD_RES (30)..(31): Xaa is C or S

SEQ ID NO: 34661 - protein, 33 aa, Artificial Sequence
  Cyclic GFR-binding peptide
  MOD_RES (32)..(33): Xaa is C or S
ESVAMGYHYKLYTVVGKDKYLISIPSLKTPVXX

SEQ ID NO: 34662 - protein, 32 aa, Artificial Sequence; identical to SEQ ID NO: 6311
  Cyclic GFR-binding peptide
  MOD_RES (28)..(29): Xaa is C or S

SEQ ID NO: 34663 - protein, 38 aa, Artificial Sequence
  Cyclic GFR-binding peptide
  MOD_RES (2)..(4)..(36)..(37): Xaa is C or S
RXGXGEVVMEEYKFKVVKDYEDLYLMSIPELETPVXXA

SEQ ID NO: 34664 - protein, 34 aa, Artificial Sequence
  Cyclic GFR-binding peptide
  MOD_RES (29)..(30): Xaa is C or S
VMNEYQKYIVNSSDDIYLVSIPSLQTPAXXPKPV

SEQ ID NO: 34665 - protein, 23 aa, Artificial Sequence
  Cyclic GFR-binding peptide
RYKKLIKPTKGIFYLISIANLDQ

SEQ ID NO: 34666 - protein, 31 aa, Artificial Sequence; identical to SEQ ID NO: 6316
  Cyclic GFR-binding peptide
  MOD_RES (2)..(4): Xaa is C or S

SEQ ID NO: 34667 - protein, 33 aa, Artificial Sequence
  Cyclic GFR-binding peptide
  MOD_RES (28)..(28): Xaa is C or S
MNEYKFKIVNSSDDLYLVSIPELKTPAXTPKTV

SEQ ID NO: 34668 - protein, 37 aa, Artificial Sequence
  Cyclic GFR-binding peptide
  MOD_RES (2)..(4)..(36)..(37): Xaa is C or S
HXGXAKVVMNEYQKYIVNNSSDIYLVSIPSLKTPAXX

SEQ ID NO: 34669 - protein, 38 aa, Artificial Sequence
  Cyclic GFR-binding peptide
  MOD_RES (2)..(4)..(37)..(38): Xaa is C or S
RXGXEAVSMGEEYQKYTPVGMDDIYLVSIPSLKTPVXX

SEQ ID NO: 34670 - protein, 24 aa, Artificial Sequence
  Cyclic GFR-binding peptide
MEYHYKLVVKDYEDKYLMSIPSLE

SEQ ID NO: 34671 - protein, 36 aa, Artificial Sequence
  Cyclic GFR-binding peptide
  MOD_RES (32)..(33): Xaa is C or S
SRVVMNEYQKYIVNSSDDIYLVSIPSLKTPAXXPKP

SEQ ID NO: 34672 - protein, 31 aa, Artificial Sequence
  Cyclic GFR-binding peptide
  MOD_RES (29)..(30): Xaa is C or S
VIMEYQKYVKPKRGVIYLISIPSLAQPVXXP

SEQ ID NO: 34673 - protein, 34 aa, Artificial Sequence
  Cyclic GFR-binding peptide
  MOD_RES (1)..(3): Xaa is C or S
XGXAEVVMDRYKKLVVNNAADFYLISIANLRAPV

SEQ ID NO: 34674 - protein, 26 aa, Artificial Sequence
  Cyclic GFR-binding peptide
MNEYQKYIVNSSDDIYLVSIPSLQTP

SEQ ID NO: 34675 - protein, 29 aa, Artificial Sequence
  Cyclic GFR-binding peptide
EVVMDRYKKLVVNNAADFYLISIANLRAP

SEQ ID NO: 34676 - protein, 34 aa, Artificial Sequence
  Cyclic GFR-binding peptide
  MOD_RES (31)..(32): Xaa is C or S
RVVMNEYQKYIVNSSDDIYLVSIPSLKTPAXXPK

SEQ ID NO: 34677 - protein, 30 aa, Artificial Sequence
  Cyclic GFR-binding peptide
RVVMNEYQKYIVNSSDDIYLVSIPSLQTPA

SEQ ID NO: 34678 - protein, 28 aa, Artificial Sequence
  Cyclic GFR-binding peptide
AEVVMDYHYKLVVNNAADKYLISIPSLR

SEQ ID NO: 34679 - protein, 40 aa, Artificial Sequence
  Cyclic GFR-binding peptide
  MOD_RES (2)..(34)..(35): Xaa is C or S
GXARVVMNEYKFKIVNSSDDLYLVSIPELQTPAXXPKPVT

SEQ ID NO: 34680 - protein, 36 aa, Artificial Sequence; identical to SEQ ID NO: 6325
  Cyclic GFR-binding peptide
  MOD_RES (31)..(31): Xaa is C or S

SEQ ID NO: 34681 - protein, 28 aa, Artificial Sequence
  Cyclic GFR-binding peptide
  MOD_RES (27)..(28): Xaa is C or S
MRYKKLVKPKRGVFYLISIANLAQPVXX

SEQ ID NO: 34682 - protein, 31 aa, Artificial Sequence; identical to SEQ ID NO: 6329
  Cyclic GFR-binding peptide
  MOD_RES (1)..(3): Xaa is C or S

SEQ ID NO: 34683 - protein, 34 aa, Artificial Sequence
  Cyclic GFR-binding peptide
  MOD_RES (32)..(32): Xaa is C or S
SRVVMNEYKFKIVNSSDDLYLVSIPELKTPAXTP

SEQ ID NO: 34684 - protein, 25 aa, Artificial Sequence
  Cyclic GFR-binding peptide
VAMGYHYKLYTVVGKDKYLISIPSL

SEQ ID NO: 34685 - protein, 22 aa, Artificial Sequence
  Cyclic GFR-binding peptide
MDRYKKLVVKENEDFYLMSIAN

SEQ ID NO: 34686 - protein, 34 aa, Artificial Sequence
  Cyclic GFR-binding peptide
  MOD_RES (29)..(30): Xaa is C or S
VIMEYQKYIKPTKGIIYLISIPSLDQSVXXPSAS

SEQ ID NO: 34687 - protein, 38 aa, Artificial Sequence; identical to SEQ ID NO: 6333
  Cyclic GFR-binding peptide
  MOD_RES (2)..(34)..(35): Xaa is C or S

SEQ ID NO: 34688 - protein, 32 aa, Artificial Sequence; identical to SEQ ID NO: 6334
  Cyclic GFR-binding peptide
  MOD_RES (26)..(27): Xaa is C or S

SEQ ID NO: 34689 - protein, 33 aa, Artificial Sequence
  Cyclic GFR-binding peptide
  MOD_RES (29)..(30): Xaa is C or S
VMNEYKFKIVNNSSDLYLVSIPELKTPAXXAKP

SEQ ID NO: 34690 - protein, 38 aa, Artificial Sequence
  Cyclic GFR-binding peptide
  MOD_RES (2)..(34): Xaa is C or S
GXSRVVMNEYQKYIVNSSDDIYLVSIPSLKTPAXTPKT

SEQ ID NO: 34691 - protein, 36 aa, Artificial Sequence; identical to SEQ ID NO: 6336
  Cyclic GFR-binding peptide
  MOD_RES (2)..(34)..(35): Xaa is C or S

SEQ ID NO: 34692 - protein, 27 aa, Artificial Sequence
  Cyclic GFR-binding peptide
  MOD_RES (1)..(1): Xaa is C or S
XSRVIMYHYKLVKPKRGVKYLISIPSL

SEQ ID NO: 34693 - protein, 29 aa, Artificial Sequence
  Cyclic GFR-binding peptide
  MOD_RES (27)..(28): Xaa is C or S
ERYKKLVVKDYEDFYLMSIANLETPVXXA

SEQ ID NO: 34694 - protein, 34 aa, Artificial Sequence; identical to SEQ ID NO: 6340
  Cyclic GFR-binding peptide
  MOD_RES (29)..(30): Xaa is C or S

SEQ ID NO: 34695 - protein, 30 aa, Artificial Sequence
  Cyclic GFR-binding peptide
  MOD_RES (2)..(2): Xaa is C or S
KXSKVIMEYQKYIKPTKGIIYLISIPSLDQ

SEQ ID NO: 34696 - protein, 30 aa, Artificial Sequence; identical to SEQ ID NO: 6342
  Cyclic GFR-binding peptide
  MOD_RES (26)..(27): Xaa is C or S

SEQ ID NO: 34697 - protein, 35 aa, Artificial Sequence; identical to SEQ ID NO: 6343
  Cyclic GFR-binding peptide
  MOD_RES (2)..(4)..(35): Xaa is C or S

SEQ ID NO: 34698 - protein, 33 aa, Artificial Sequence
  Cyclic GFR-binding peptide
  MOD_RES (1)..(3): Xaa is C or S
XGXSRVVMNEYQKYIVNSSDDIYLVSIPSLKTP

SEQ ID NO: 34699 - protein, 39 aa, Artificial Sequence; identical to SEQ ID NO: 6344
  Cyclic GFR-binding peptide
  MOD_RES (2)..(4)..(36)..(37): Xaa is C or S

SEQ ID NO: 34700 - protein, 32 aa, Artificial Sequence
  Cyclic GFR-binding peptide
  MOD_RES (28)..(29): Xaa is C or S
VMEYQKYVKPTRGVIYLISIPSLDQPVXXPSA

SEQ ID NO: 34701 - protein, 27 aa, Artificial Sequence
  Cyclic GFR-binding peptide
  MOD_RES (26)..(27): Xaa is C or S
EYQKYYTVVGKDIYLISIPSLKTPVXX

SEQ ID NO: 34702 - protein, 28 aa, Artificial Sequence
  Cyclic GFR-binding peptide
GEVVMDRYKKLVVKENEDFYLMSIANLE

SEQ ID NO: 34703 - protein, 40 aa, Artificial Sequence
  Cyclic GFR-binding peptide
  MOD_RES (2)..(4)..(35)..(36): Xaa is C or S
SXKXSKVVMEYKFKVKPTRGVLYLISIPELDQPVXXPSAS

SEQ ID NO: 34704 - protein, 37 aa, Artificial Sequence
  Cyclic GFR-binding peptide
  MOD_RES (31)..(32): Xaa is C or S
SKVIMEYQKYIKPTKGIIYLISIPSLDQSVXXPSASA

SEQ ID NO: 34705 - protein, 33 aa, Artificial Sequence; identical to SEQ ID NO: 6348
  Cyclic GFR-binding peptide
  MOD_RES (31)..(32): Xaa is C or S

SEQ ID NO: 34706 - protein, 29 aa, Artificial Sequence
  Cyclic GFR-binding peptide
  MOD_RES (2)..(2): Xaa is C or S
GXESVAMGEYQKYYTVVGKDIYLISIPSL

SEQ ID NO: 34707 - protein, 28 aa, Artificial Sequence
  Cyclic GFR-binding peptide
  MOD_RES (1)..(1): Xaa is C or S
XAKVVMNEYKFKIVNNSSDLYLVSIPEL

SEQ ID NO: 34708 - protein, 22 aa, Artificial Sequence
  Cyclic GFR-binding peptide
MDEYQKYVVKENEDIYLMSIPS

SEQ ID NO: 34709 - protein, 37 aa, Artificial Sequence
  Cyclic GFR-binding peptide
  MOD_RES (2)..(34)..(35): Xaa is C or S
GXGEVVMEEYKFKVVKDYEDLYLMSIPELETPVXXAK

SEQ ID NO: 34710 - protein, 28 aa, Artificial Sequence
  Cyclic GFR-binding peptide
VVMDRYKKLVVNNAADFYLISIANLRAP

SEQ ID NO: 34711 - protein, 31 aa, Artificial Sequence; identical to SEQ ID NO: 6353
  Cyclic GFR-binding peptide
  MOD_RES (27)..(28): Xaa is C or S

SEQ ID NO: 34712 - protein, 38 aa, Artificial Sequence; identical to SEQ ID NO: 6355
  Cyclic GFR-binding peptide
  MOD_RES (6)..(7): Xaa is C or S

SEQ ID NO: 34713 - protein, 35 aa, Artificial Sequence
  Cyclic GFR-binding peptide
  MOD_RES (5)..(6): Xaa is C or S
SASPXXVPQDLSPISILYIVGRTPKVYKQYEMVVK

SEQ ID NO: 34714 - protein, 27 aa, Artificial Sequence
  Cyclic GFR-binding peptide
PQDLEPISILYLVGRTPKVKFKYEMVV

SEQ ID NO: 34715 - protein, 27 aa, Artificial Sequence
  Cyclic GFR-binding peptide
PTKLSPISVLYKDDSSNVILKYHYNMV

SEQ ID NO: 34716 - protein, 24 aa, Artificial Sequence
  Cyclic GFR-binding peptide
QDLNAISILYFIGKTPKILKKYRM

SEQ ID NO: 34717 - protein, 29 aa, Artificial Sequence
  Cyclic GFR-binding peptide
  MOD_RES (29)..(29): Xaa is C or S
QDLNAISILYFVGRTPKVLKKYRMVVKSX

SEQ ID NO: 34718 - protein, 31 aa, Artificial Sequence; identical to SEQ ID NO: 6362
  Cyclic GFR-binding peptide
  MOD_RES (30)..(30): Xaa is C or S

SEQ ID NO: 34719 - protein, 30 aa, Artificial Sequence; identical to SEQ ID NO: 6363
  Cyclic GFR-binding peptide
  MOD_RES (30)..(30): Xaa is C or S

SEQ ID NO: 34720 - protein, 35 aa, Artificial Sequence
  Cyclic GFR-binding peptide
  MOD_RES (2)..(3)..(35): Xaa is C or S
AXXVPTELSPISMLYIDENEKVVYKQYEDMVVEGX

SEQ ID NO: 34721 - protein, 33 aa, Artificial Sequence; identical to SEQ ID NO: 6366
  Cyclic GFR-binding peptide
  MOD_RES (32)..(32): Xaa is C or S

SEQ ID NO: 34722 - protein, 24 aa, Artificial Sequence
  Cyclic GFR-binding peptide
SPISILYIDKGVVTYYKQYEGMAV

SEQ ID NO: 34723 - protein, 40 aa, Artificial Sequence
  Cyclic GFR-binding peptide
  MOD_RES (4)..(5)..(37)..(39): Xaa is C or S
PKAXXVPTELEPISMLYLDEYDKVVKFKYEEMVVEGXGXR

SEQ ID NO: 34724 - protein, 28 aa, Artificial Sequence
  Cyclic GFR-binding peptide
PQALNAISILYFVGRKPKVLKKYRMIVR

SEQ ID NO: 34725 - protein, 25 aa, Artificial Sequence
  Cyclic GFR-binding peptide
LNAISMLYFDENEKVVLKKYRDMVV

SEQ ID NO: 34726 - protein, 36 aa, Artificial Sequence; identical to SEQ ID NO: 6371
  Cyclic GFR-binding peptide
  MOD_RES (3)..(4)..(36): Xaa is C or S

SEQ ID NO: 34727 - protein, 32 aa, Artificial Sequence; identical to SEQ ID NO: 6373
  Cyclic GFR-binding peptide
  MOD_RES (1)..(32): Xaa is C or S

SEQ ID NO: 34728 - protein, 28 aa, Artificial Sequence
  Cyclic GFR-binding peptide
  MOD_RES (2)..(3): Xaa is C or S
AXXVPTKLEPISVLYLDDMGVPTKFKYE

SEQ ID NO: 34729 - protein, 27 aa, Artificial Sequence
  Cyclic GFR-binding peptide
  MOD_RES (1)..(1): Xaa is C or S
XAPTKLNAISVLYFDSSNNVILKKYRN

SEQ ID NO: 34730 - protein, 32 aa, Artificial Sequence
  Cyclic GFR-binding peptide
  MOD_RES (31)..(31): Xaa is C or S
PTELEPISMLYLDEYDKVVKFKYEEMVVEGXG

SEQ ID NO: 34731 - protein, 32 aa, Artificial Sequence
  Cyclic GFR-binding peptide
  MOD_RES (1)..(2): Xaa is C or S
XXAPTKLSPISVLYIDSSNNVIYKQYENMVVK

SEQ ID NO: 34732 - protein, 32 aa, Artificial Sequence
  Cyclic GFR-binding peptide
  MOD_RES (2)..(3): Xaa is C or S
AXXVPTKLNAISILYFDKGVVTYLKKYRGMAV

SEQ ID NO: 34733 - protein, 25 aa, Artificial Sequence
  Cyclic GFR-binding peptide
PQDLSPISILYIVGRTPKVYKQYEM

SEQ ID NO: 34734 - protein, 28 aa, Artificial Sequence
  Cyclic GFR-binding peptide
PQDLEPISILYLVGRTPKVKFKYEMVVK

SEQ ID NO: 34735 - protein, 24 aa, Artificial Sequence
  Cyclic GFR-binding peptide
LEPISMLYLDENEKVVKFKYEDMV

SEQ ID NO: 34736 - protein, 33 aa, Artificial Sequence
  Cyclic GFR-binding peptide
  MOD_RES (2)..(3): Xaa is C or S
PXXVPQDLEPISILYLVGRTPKVKFKYEMVVKS

SEQ ID NO: 34737 - protein, 22 aa, Artificial Sequence
  Cyclic GFR-binding peptide
LNAISILYFVGRKPKVLKKYRM

SEQ ID NO: 34738 - protein, 35 aa, Artificial Sequence; identical to SEQ ID NO: 6380
  Cyclic GFR-binding peptide
  MOD_RES (4)..(5): Xaa is C or S

SEQ ID NO: 34739 - protein, 31 aa, Artificial Sequence
  Cyclic GFR-binding peptide
  MOD_RES (31)..(31): Xaa is C or S
PTKLSPISILYIDKGVVTYYKQYEGMAVSEX

SEQ ID NO: 34740 - protein, 29 aa, Artificial Sequence
  Cyclic GFR-binding peptide
  MOD_RES (4)..(4): Xaa is C or S
KPTXAPTKLEPISVLYLDDSSNVIKFKYE

SEQ ID NO: 34741 - protein, 34 aa, Artificial Sequence; identical to SEQ ID NO: 6381
  Cyclic GFR-binding peptide
  MOD_RES (32)..(34): Xaa is C or S

SEQ ID NO: 34742 - protein, 22 aa, Artificial Sequence
  Cyclic GFR-binding peptide
KLSPISVLYIDDSSNVIYKQYE

SEQ ID NO: 34743 - protein, 29 aa, Artificial Sequence
  Cyclic GFR-binding peptide
  MOD_RES (1)..(2): Xaa is C or S
XXAPTKLNAISVLYFDSSNNVILKKYRNM

SEQ ID NO: 34744 - protein, 28 aa, Artificial Sequence
  Cyclic GFR-binding peptide
VPTELEPISMLYLDEYDKVVKFKYEEMV

SEQ ID NO: 34745 - protein, 32 aa, Artificial Sequence
  Cyclic GFR-binding peptide
  MOD_RES (31)..(31): Xaa is C or S
PTKLEPISVLYLDDSSNVIKFKYENMVVRSXG

SEQ ID NO: 34746 - protein, 37 aa, Artificial Sequence
  Cyclic GFR-binding peptide
  MOD_RES (4)..(5)..(36): Xaa is C or S
ASPXXVSQDLEPISILYLIGKTPKIKFKYEMIVKSXK

SEQ ID NO: 34747 - protein, 40 aa, Artificial Sequence
  Cyclic GFR-binding peptide
  MOD_RES (4)..(5)..(37)..(39): Xaa is C or S
PKPXXAPTQLEPISVLYLDDSSNVIKFKYENMVVRAXGXH

SEQ ID NO: 34748 - protein, 35 aa, Artificial Sequence
  Cyclic GFR-binding peptide
  MOD_RES (6)..(7): Xaa is C or S
AAPASXXVPARLNAISILYFDAANNVVLKKYRDMV

SEQ ID NO: 34749 - protein, 31 aa, Artificial Sequence
  Cyclic GFR-binding peptide
  MOD_RES (29)..(31): Xaa is C or S
ELSPISMLYIDENEKVVYKQYEDMVVEGXGX

SEQ ID NO: 34750 - protein, 32 aa, Artificial Sequence
  Cyclic GFR-binding peptide
  MOD_RES (4)..(5): Xaa is C or S
ASPXXVSQDLSPISILYIIGKTPKIYKQYEMI

SEQ ID NO: 34751 - protein, 36 aa, Artificial Sequence
  Cyclic GFR-binding peptide
  MOD_RES (5)..(6): Xaa is C or S
IPKAXXVPTELSPISMLYIDEYDKVVYKQYEEMVVE

SEQ ID NO: 34752 - protein, 35 aa, Artificial Sequence; identical to SEQ ID NO: 6385
  Cyclic GFR-binding peptide
  MOD_RES (5)..(6): Xaa is C or S

SEQ ID NO: 34753 - protein, 39 aa, Artificial Sequence; identical to SEQ ID NO: 6386
  Cyclic GFR-binding peptide
  MOD_RES (4)..(5)..(37)..(39): Xaa is C or S

SEQ ID NO: 34754 - protein, 34 aa, Artificial Sequence
  Cyclic GFR-binding peptide
  MOD_RES (1)..(2)..(34): Xaa is C or S
XXVPARLSPISILYKDAANNVVLKYHYDMVVEAX

SEQ ID NO: 34755 - protein, 32 aa, Artificial Sequence; identical to SEQ ID NO: 6389
  Cyclic GFR-binding peptide
  MOD_RES (1)..(2): Xaa is C or S

SEQ ID NO: 34756 - protein, 24 aa, Artificial Sequence
  Cyclic GFR-binding peptide
ELEPISMLYLDENEKVVKFKYEDM

SEQ ID NO: 34757 - protein, 31 aa, Artificial Sequence; identical to SEQ ID NO: 6390
  Cyclic GFR-binding peptide
  MOD_RES (3)..(4): Xaa is C or S

SEQ ID NO: 34758 - protein, 35 aa, Artificial Sequence
  Cyclic GFR-binding peptide
  MOD_RES (1)..(33)..(35): Xaa is C or S
XVPTELEPISMLYLDEYDKVVKFKYEEMVVEGXGX

SEQ ID NO: 34759 - protein, 30 aa, Artificial Sequence; identical to SEQ ID NO: 6394
  Cyclic GFR-binding peptide

SEQ ID NO: 34760 - protein, 32 aa, Artificial Sequence; identical to SEQ ID NO: 6396
  Cyclic GFR-binding peptide
  MOD_RES (1)..(1): Xaa is C or S

SEQ ID NO: 34761 - protein, 29 aa, Artificial Sequence
  Cyclic GFR-binding peptide
PQALNAISILYFVGRKPKVLKKYRMIVRS

SEQ ID NO: 34762 - protein, 31 aa, Artificial Sequence
  Cyclic GFR-binding peptide
  MOD_RES (1)..(1): Xaa is C or S
XVPTKLNAISILYFDKGVVTYLKKYRGMAVS

SEQ ID NO: 34763 - protein, 30 aa, Artificial Sequence; identical to SEQ ID NO: 6406
  Cyclic GFR-binding peptide
  MOD_RES (3)..(4): Xaa is C or S

SEQ ID NO: 34764 - protein, 30 aa, Artificial Sequence; identical to SEQ ID NO: 6407
  Cyclic GFR-binding peptide
  MOD_RES (29)..(29): Xaa is C or S

SEQ ID NO: 34765 - protein, 35 aa, Artificial Sequence; identical to SEQ ID NO: 6408
  Cyclic GFR-binding peptide
  MOD_RES (6)..(7): Xaa is C or S

SEQ ID NO: 34766 - protein, 32 aa, Artificial Sequence; identical to SEQ ID NO: 6409
  Cyclic GFR-binding peptide
  MOD_RES (32)..(32): Xaa is C or S

SEQ ID NO: 34767 - protein, 24 aa, Artificial Sequence
  Cyclic GFR-binding peptide
TKLEPISVLYLDDSSNVIKFKYEN

SEQ ID NO: 34768 - protein, 34 aa, Artificial Sequence
  Cyclic GFR-binding peptide
  MOD_RES (1)..(33): Xaa is C or S
XVPTELSPISMLYIDEYDKVVYKQYEEMVVEGXG

SEQ ID NO: 34769 - protein, 30 aa, Artificial Sequence
  Cyclic GFR-binding peptide
APTKLEPISVLYLDSSNNVIKFKYENMVVK

SEQ ID NO: 34770 - protein, 42 aa, Artificial Sequence
  Cyclic GFR-binding peptide
  MOD_RES (6)..(7)..(39)..(41): Xaa is C or S
AAPASXXVPARLEPISILYLDAANNVVKFKYEDMVVEAXGXR

SEQ ID NO: 34771 - protein, 33 aa, Artificial Sequence; identical to SEQ ID NO: 6412
  Cyclic GFR-binding peptide
  MOD_RES (3)..(4): Xaa is C or S

SEQ ID NO: 34772 - protein, 23 aa, Artificial Sequence
  Cyclic GFR-binding peptide
KLEPISVLYLDDMGVPTKFKYEE

SEQ ID NO: 34773 - protein, 32 aa, Artificial Sequence
  Cyclic GFR-binding peptide
  MOD_RES (4)..(5): Xaa is C or S
ASPXXVSQDLEPISILYLIGKTPKIKFKYEMI

SEQ ID NO: 34774 - protein, 25 aa, Artificial Sequence
  Cyclic GFR-binding peptide
PTKLNAISVLYFDSSNNVILKKYRN

SEQ ID NO: 34775 - protein, 36 aa, Artificial Sequence
  Cyclic GFR-binding peptide
  MOD_RES (5)..(6): Xaa is C or S
SASPXXVPQDLSPISILYIVGRTPKVYKQYEMVVKS

SEQ ID NO: 34776 - protein, 26 aa, Artificial Sequence
  Cyclic GFR-binding peptide
QDLSPISILYIIGKTPKIYKQYEMIV

SEQ ID NO: 34777 - protein, 33 aa, Artificial Sequence; identical to SEQ ID NO: 6416
  Cyclic GFR-binding peptide
  MOD_RES (4)..(5): Xaa is C or S

SEQ ID NO: 34778 - protein, 38 aa, Artificial Sequence
  Cyclic GFR-binding peptide
  MOD_RES (3)..(35)..(37): Xaa is C or S
PTXAPTKLSPISVLYIDDSSNVIYKQYENMVVRSXGXH

SEQ ID NO: 34779 - protein, 25 aa, Artificial Sequence
  Cyclic GFR-binding peptide
ELEPISMLYLDENEKVVKFKYEDMV

SEQ ID NO: 34780 - protein, 37 aa, Artificial Sequence
  Cyclic GFR-binding peptide
  MOD_RES (6)..(7): Xaa is C or S
ASAAPXXVPQALSPISILYIVGRKPKVYKQYEMIVRS

SEQ ID NO: 34781 - protein, 41 aa, Artificial Sequence
  Cyclic GFR-binding peptide
  MOD_RES (6)..(7)..(39)..(41): Xaa is C or S
YVPKPXXAPTKLSPISVLYIDDSSNVIYKQYENMVVRSXGX

SEQ ID NO: 34782 - protein, 31 aa, Artificial Sequence
  Cyclic GFR-binding peptide
  MOD_RES (1)..(2): Xaa is C or S
XXVPARLNAISILYFDAANNVVLKKYRDMVV

SEQ ID NO: 34783 - protein, 24 aa, Artificial Sequence
  Cyclic GFR-binding peptide
ELSPISMLYIDENEKVVYKQYEDM

SEQ ID NO: 34784 - protein, 32 aa, Artificial Sequence
  Cyclic GFR-binding peptide
  MOD_RES (1)..(32): Xaa is C or S
XVPQDLSPISILYIVGRTPKVYKQYEMVVKSX

SEQ ID NO: 34785 - protein, 40 aa, Artificial Sequence
  Cyclic GFR-binding peptide
  MOD_RES (5)..(6)..(38)..(40): Xaa is C or S
VPKPXXAPTKLEPISVLYLDDSSNVIKFKYENMVVRSXGX

SEQ ID NO: 34786 - protein, 26 aa, Artificial Sequence
  Cyclic GFR-binding peptide
  MOD_RES (1)..(1): Xaa is C or S
XVPTELNAISMLYFDEYDKVVLKKYR

SEQ ID NO: 34787 - protein, 40 aa, Artificial Sequence; identical to SEQ ID NO: 6421
  Cyclic GFR-binding peptide
  MOD_RES (4)..(5)..(38)..(40): Xaa is C or S

SEQ ID NO: 34788 - protein, 37 aa, Artificial Sequence
  Cyclic GFR-binding peptide
  MOD_RES (4)..(5)..(37): Xaa is C or S
SKAXXVPTKLNAISILYFDKGVVTYLKKYRGMAVSEX

SEQ ID NO: 34789 - protein, 20 aa, Artificial Sequence
  Cyclic GFR-binding peptide
EPISMLYLDENEKVVKFKYE

SEQ ID NO: 34790 - protein, 42 aa, Artificial Sequence
  Cyclic GFR-binding peptide
  MOD_RES (6)..(7)..(39)..(41): Xaa is C or S
AAPASXXVPARLSPISILYKDAANNVVLKYHYDMVVEAXGXR

SEQ ID NO: 34791 - protein, 28 aa, Artificial Sequence
  Cyclic GFR-binding peptide
VPTKLEPISVLYLDDMGVPTKFKYEEGM

SEQ ID NO: 34792 - protein, 24 aa, Artificial Sequence
  Cyclic GFR-binding peptide
SQDLEPISILYLIGKTPKIKFKYE

SEQ ID NO: 34793 - protein, 25 aa, Artificial Sequence
  Cyclic GFR-binding peptide
QDLNAISILYFIGKTPKILKKYRMI

SEQ ID NO: 34794 - protein, 27 aa, Artificial Sequence
  Cyclic GFR-binding peptide
TKLSPISILYKDKGVVTYLKYHYGMAV

SEQ ID NO: 34795 - protein, 26 aa, Artificial Sequence
  Cyclic GFR-binding peptide
  MOD_RES (1)..(1): Xaa is C or S
XVPARLEPISILYLDAANNVVKFKYE

SEQ ID NO: 34796 - protein, 41 aa, Artificial Sequence
  Cyclic GFR-binding peptide
  MOD_RES (6)..(7)..(39)..(41): Xaa is C or S
KIPKAXXVPTELSPISMLYIDENEKVVYKQYEDMVVEGXGX

SEQ ID NO: 34797 - protein, 26 aa, Artificial Sequence
  Cyclic GFR-binding peptide
  MOD_RES (1)..(1): Xaa is C or S
XVPTELSPISMLYKDENEKVVLKYHY

SEQ ID NO: 34798 - protein, 37 aa, Artificial Sequence
  Cyclic GFR-binding peptide
  MOD_RES (3)..(4)..(36): Xaa is C or S
ASXXVPARLEPISILYLDAANNVVKFKYEDMVVEAXG

SEQ ID NO: 34799 - protein, 33 aa, Artificial Sequence; identical to SEQ ID NO: 6435
  Cyclic GFR-binding peptide
  MOD_RES (30)..(32): Xaa is C or S

SEQ ID NO: 34800 - protein, 36 aa, Artificial Sequence
  Cyclic GFR-binding peptide
  MOD_RES (6)..(6): Xaa is C or S
VTKPTXAPTKLSPISVLYIDDSSNVIYKQYENMVVR

SEQ ID NO: 34801 - protein, 37 aa, Artificial Sequence
  Cyclic GFR-binding peptide
  MOD_RES (4)..(5)..(37): Xaa is C or S
PKAXXVPTELEPISMLYLDENEKVVKFKYEDMVVEGX

SEQ ID NO: 34802 - protein, 28 aa, Artificial Sequence
  Cyclic GFR-binding peptide
PTELSPISMLYKDENEKVVLKYHYDMVV

SEQ ID NO: 34803 - protein, 26 aa, Artificial Sequence
  Cyclic GFR-binding peptide
SPISILYIDKGVVTYYKQYEGMAVSE

SEQ ID NO: 34804 - protein, 32 aa, Artificial Sequence; identical to SEQ ID NO: 6441
  Cyclic GFR-binding peptide
  MOD_RES (29)..(31): Xaa is C or S

SEQ ID NO: 34805 - protein, 25 aa, Artificial Sequence
  Cyclic GFR-binding peptide
LSPISILYIVGRKPKVYKQYEMIVR

SEQ ID NO: 34806 - protein, 33 aa, Artificial Sequence; identical to SEQ ID NO: 6442
  Cyclic GFR-binding peptide
  MOD_RES (1)..(32): Xaa is C or S

SEQ ID NO: 34807 - protein, 35 aa, Artificial Sequence
  Cyclic GFR-binding peptide
  MOD_RES (3)..(4)..(35): Xaa is C or S
SPXXVPQDLEPISILYLVGRTPKVKFKYEMVVKSX

SEQ ID NO: 34808 - protein, 26 aa, Artificial Sequence
  Cyclic GFR-binding peptide
KLSPISVLYIDSSNNVIYKQYENMVV

SEQ ID NO: 34809 - protein, 30 aa, Artificial Sequence; identical to SEQ ID NO: 6445
  Cyclic GFR-binding peptide
  MOD_RES (1)..(2): Xaa is C or S

SEQ ID NO: 34810 - protein, 27 aa, Artificial Sequence
  Cyclic GFR-binding peptide
LNAISMLYFDEYDKVVLKKYREMVVEG

SEQ ID NO: 34811 - protein, 34 aa, Artificial Sequence
  Cyclic GFR-binding peptide
  MOD_RES (6)..(7): Xaa is C or S
ASASPXXVPQDLEPISILYLVGRTPKVKFKYEMV

SEQ ID NO: 34812 - protein, 27 aa, Artificial Sequence
  Cyclic GFR-binding peptide
  MOD_RES (26)..(26): Xaa is C or S
NAISILYFIGKTPKILKKYRMIVKSXK

SEQ ID NO: 34813 - protein, 27 aa, Artificial Sequence
  Cyclic GFR-binding peptide
  MOD_RES (27)..(27): Xaa is C or S
LEPISILYLIGKTPKIKFKYEMIVKSX

SEQ ID NO: 34814 - protein, 29 aa, Artificial Sequence
  Cyclic GFR-binding peptide
  MOD_RES (29)..(29): Xaa is C or S
KLSPISILYIDKGVVTYYKQYEGMAVSEX

SEQ ID NO: 34815 - protein, 41 aa, Artificial Sequence
  Cyclic GFR-binding peptide
  MOD_RES (5)..(6)..(38)..(40): Xaa is C or S
VPKAXXAPTKLEPISVLYLDSSNNVIKFKYENMVVKAXGXH

SEQ ID NO: 34816 - protein, 36 aa, Artificial Sequence
  Cyclic GFR-binding peptide
  MOD_RES (6)..(7): Xaa is C or S
TVPKPXXAPTQLSPISVLYIDDSSNVIYKQYENMVV

SEQ ID NO: 34817 - protein, 31 aa, Artificial Sequence
  Cyclic GFR-binding peptide
  MOD_RES (4)..(5): Xaa is C or S
GKAXXVPTKLSPISVLYIDDMGVPTYKQYEE

SEQ ID NO: 34818 - protein, 27 aa, Artificial Sequence
  Cyclic GFR-binding peptide
APTQLSPISVLYIDDSSNVIYKQYENM

SEQ ID NO: 34819 - protein, 33 aa, Artificial Sequence
  Cyclic GFR-binding peptide
  MOD_RES (1)..(33): Xaa is C or S
XAPTKLEPISVLYLDDSSNVIKFKYENMVVRSX

SEQ ID NO: 34820 - protein, 30 aa, Artificial Sequence
  Cyclic GFR-binding peptide
  MOD_RES (27)..(29): Xaa is C or S
SPISILYKDAANNVVLKYHYDMVVEAXGXR

SEQ ID NO: 34821 - protein, 29 aa, Artificial Sequence
  Cyclic GFR-binding peptide
TKLSPISILYKDKGVVTYLKYHYGMAVSE

SEQ ID NO: 34822 - protein, 30 aa, Artificial Sequence; identical to SEQ ID NO: 6458
  Cyclic GFR-binding peptide
  MOD_RES (1)..(1): Xaa is C or S

SEQ ID NO: 34823 - protein, 31 aa, Artificial Sequence; identical to SEQ ID NO: 6459
  Cyclic GFR-binding peptide

SEQ ID NO: 34824 - protein, 26 aa, Artificial Sequence
  Cyclic GFR-binding peptide
KLSPISVLYKDSSNNVILKYHYNMVV

SEQ ID NO: 34825 - protein, 36 aa, Artificial Sequence
  Cyclic GFR-binding peptide
  MOD_RES (1)..(2)..(33)..(35): Xaa is C or S
XXVSQDLEPISILYLIGKTPKIKFKYEMIVKSXKXS

SEQ ID NO: 34826 - protein, 37 aa, Artificial Sequence; identical to SEQ ID NO: 6462
  Cyclic GFR-binding peptide
  MOD_RES (5)..(6): Xaa is C or S

SEQ ID NO: 34827 - protein, 38 aa, Artificial Sequence; identical to SEQ ID NO: 6467
  Cyclic GFR-binding peptide
  MOD_RES (5)..(6)..(38): Xaa is C or S

SEQ ID NO: 34828 - protein, 31 aa, Artificial Sequence; identical to SEQ ID NO: 6468
  Cyclic GFR-binding peptide
  MOD_RES (4)..(5): Xaa is C or S

SEQ ID NO: 34829 - protein, 23 aa, Artificial Sequence
  Cyclic GFR-binding peptide
ELEPISMLYLDEYDKVVKFKYEE

SEQ ID NO: 34830 - protein, 30 aa, Artificial Sequence
  Cyclic GFR-binding peptide
  MOD_RES (3)..(4): Xaa is C or S
APXXVPQALSPISILYIVGRKPKVYKQYEM

SEQ ID NO: 34831 - protein, 33 aa, Artificial Sequence
  Cyclic GFR-binding peptide
  MOD_RES (32)..(32): Xaa is C or S
VPTKLSPISILYIDKGVVTYYKQYEGMAVSEXG

SEQ ID NO: 34832 - protein, 28 aa, Artificial Sequence
  Cyclic GFR-binding peptide
  MOD_RES (2)..(3): Xaa is C or S
PXXVPQALSPISILYKVGRKPKVLKYHY

SEQ ID NO: 34833 - protein, 30 aa, Artificial Sequence
  Cyclic GFR-binding peptide
PTKLNAISILYFDKGVVTYLKKYRGMAVSE

SEQ ID NO: 34834 - protein, 29 aa, Artificial Sequence
  Cyclic GFR-binding peptide
  MOD_RES (3)..(4): Xaa is C or S
KAXXVPTELSPISMLYIDENEKVVYKQYE

SEQ ID NO: 34835 - protein, 38 aa, Artificial Sequence
  Cyclic GFR-binding peptide
  MOD_RES (6)..(7): Xaa is C or S
KIPKAXXVPTELEPISMLYLDENEKVVKFKYEDMVVEG

SEQ ID NO: 34836 - protein, 26 aa, Artificial Sequence
  Cyclic GFR-binding peptide
DLSPISILYKVGRTPKVLKYHYMVVK

SEQ ID NO: 34837 - protein, 30 aa, Artificial Sequence; identical to SEQ ID NO: 6475
  Cyclic GFR-binding peptide
  MOD_RES (2)..(3): Xaa is C or S

SEQ ID NO: 34838 - protein, 36 aa, Artificial Sequence
  Cyclic GFR-binding peptide
  MOD_RES (6)..(7): Xaa is C or S
AAPASXXVPARLSPISILYKDAANNVVLKYHYDMVV

SEQ ID NO: 34839 - protein, 37 aa, Artificial Sequence; identical to SEQ ID NO: 6476
  Cyclic GFR-binding peptide
  MOD_RES (6)..(7): Xaa is C or S

SEQ ID NO: 34840 - protein, 36 aa, Artificial Sequence; identical to SEQ ID NO: 6477
  Cyclic GFR-binding peptide
  MOD_RES (2)..(3)..(34)..(36): Xaa is C or S

SEQ ID NO: 34841 - protein, 28 aa, Artificial Sequence
  Cyclic GFR-binding peptide
QALNAISILYFVGRKPKVLKKYRMIVRS

SEQ ID NO: 34842 - protein, 32 aa, Artificial Sequence
  Cyclic GFR-binding peptide
  MOD_RES (6)..(6): Xaa is C or S
VTKPTXAPTKLSPISVLYIDDSSNVIYKQYEN

SEQ ID NO: 34843 - protein, 27 aa, Artificial Sequence
  Cyclic GFR-binding peptide
  MOD_RES (27)..(27): Xaa is C or S
NAISVLYFDSSNNVILKKYRNMVVKAX

SEQ ID NO: 34844 - protein, 30 aa, Artificial Sequence; identical to SEQ ID NO: 6481
  Cyclic GFR-binding peptide
  MOD_RES (29)..(29): Xaa is C or S

SEQ ID NO: 34845 - protein, 38 aa, Artificial Sequence
  Cyclic GFR-binding peptide
  MOD_RES (3)..(4)..(36)..(38): Xaa is C or S
KAXXVPTELEPISMLYLDENEKVVKFKYEDMVVEGXGX

SEQ ID NO: 34846 - protein, 28 aa, Artificial Sequence
  Cyclic GFR-binding peptide
PTKLSPISVLYKDDSSNVILKYHYNMVV

SEQ ID NO: 34847 - protein, 35 aa, Artificial Sequence; identical to SEQ ID NO: 6484
  Cyclic GFR-binding peptide
  MOD_RES (3)..(4)..(35): Xaa is C or S

SEQ ID NO: 34848 - protein, 35 aa, Artificial Sequence; identical to SEQ ID NO: 6486
  Cyclic GFR-binding peptide
  MOD_RES (1)..(33)..(35): Xaa is C or S

SEQ ID NO: 34849 - protein, 25 aa, Artificial Sequence
  Cyclic GFR-binding peptide
PTKLEPISVLYLDDSSNVIKFKYEN

SEQ ID NO: 34850 - protein, 39 aa, Artificial Sequence
  Cyclic GFR-binding peptide
  MOD_RES (3)..(4)..(36)..(38): Xaa is C or S
KPXXAPTKLSPISVLYIDDSSNVIYKQYENMVVRSXGXH

SEQ ID NO: 34851 - protein, 23 aa, Artificial Sequence
  Cyclic GFR-binding peptide
ELSPISMLYKDEYDKVVLKYHYE

SEQ ID NO: 34852 - protein, 41 aa, Artificial Sequence
  Cyclic GFR-binding peptide
  MOD_RES (6)..(7)..(39)..(41): Xaa is C or S
KASKAXXVPTKLSPISILYKDKGVVTYLKYHYGMAVSEXGX

SEQ ID NO: 34853 - protein, 31 aa, Artificial Sequence
  Cyclic GFR-binding peptide
  MOD_RES (3)..(4): Xaa is C or S
KAXXVPTKLEPISVLYLDDMGVPTKFKYEEG

SEQ ID NO: 34854 - protein, 29 aa, Artificial Sequence
  Cyclic GFR-binding peptide
  MOD_RES (1)..(2): Xaa is C or S
XXVPTKLSPISILYIDKGVVTYYKQYEGM

SEQ ID NO: 34855 - protein, 32 aa, Artificial Sequence; identical to SEQ ID NO: 6490
  Cyclic GFR-binding peptide
  MOD_RES (31)..(31): Xaa is C or S

SEQ ID NO: 34856 - protein, 23 aa, Artificial Sequence
  Cyclic GFR-binding peptide
TKLEPISVLYLDSSNNVIKFKYE

SEQ ID NO: 34857 - protein, 35 aa, Artificial Sequence
  Cyclic GFR-binding peptide
  MOD_RES (1)..(33)..(35): Xaa is C or S
XAPTKLEPISVLYLDSSNNVIKFKYENMVVKAXGX

SEQ ID NO: 34858 - protein, 27 aa, Artificial Sequence
  Cyclic GFR-binding peptide
PTKLSPISVLYKDSSNNVILKYHYNMV

SEQ ID NO: 34859 - protein, 34 aa, Artificial Sequence
  Cyclic GFR-binding peptide
  MOD_RES (32)..(34): Xaa is C or S
VPTKLSPISILYIDKGVVTYYKQYEGMAVSEXGX

SEQ ID NO: 34860 - protein, 32 aa, Artificial Sequence
  Cyclic GFR-binding peptide
  MOD_RES (3)..(4): Xaa is C or S
KPXXAPTQLSPISVLYIDDSSNVIYKQYENMV

SEQ ID NO: 34861 - protein, 36 aa, Artificial Sequence
  Cyclic GFR-binding peptide
  MOD_RES (2)..(3)..(35): Xaa is C or S
AXXVPTELSPISMLYIDENEKVVYKQYEDMVVEGXG

SEQ ID NO: 34862 - protein, 41 aa, Artificial Sequence; identical to SEQ ID NO: 6496
  Cyclic GFR-binding peptide
  MOD_RES (6)..(7)..(39)..(41): Xaa is C or S

SEQ ID NO: 34863 - protein, 38 aa, Artificial Sequence; identical to SEQ ID NO: 6497
  Cyclic GFR-binding peptide
  MOD_RES (2)..(3)..(35)..(37): Xaa is C or S

SEQ ID NO: 34864 - protein, 28 aa, Artificial Sequence
  Cyclic GFR-binding peptide
QDLSPISILYIVGRTPKVYKQYEMVVKS

SEQ ID NO: 34865 - protein, 25 aa, Artificial Sequence
  Cyclic GFR-binding peptide
LSPISILYKVGRKPKVLKYHYMIVR

SEQ ID NO: 34866 - protein, 28 aa, Artificial Sequence
  Cyclic GFR-binding peptide
  MOD_RES (28)..(28): Xaa is C or S
LSPISILYKDKGVVTYLKYHYGMAVSEX

SEQ ID NO: 34867 - protein, 30 aa, Artificial Sequence
  Cyclic GFR-binding peptide
  MOD_RES (30)..(30): Xaa is C or S
TKLNAISILYFDKGVVTYLKKYRGMAVSEX

SEQ ID NO: 34868 - protein, 23 aa, Artificial Sequence
  Cyclic GFR-binding peptide
LNAISMLYFDENEKVVLKKYRDM

SEQ ID NO: 34869 - protein, 40 aa, Artificial Sequence; identical to SEQ ID NO: 6504
  Cyclic GFR-binding peptide
  MOD_RES (4)..(5)..(37)..(39): Xaa is C or S

SEQ ID NO: 34870 - protein, 32 aa, Artificial Sequence
  Cyclic GFR-binding peptide
  MOD_RES (6)..(7): Xaa is C or S
ASAAPXXVPQALSPISILYIVGRKPKVYKQYE

SEQ ID NO: 34871 - protein, 35 aa, Artificial Sequence
  Cyclic GFR-binding peptide
  MOD_RES (6)..(7): Xaa is C or S
TVPKPXXAPTQLSPISVLYIDDSSNVIYKQYENMV

SEQ ID NO: 34872 - protein, 29 aa, Artificial Sequence
  Cyclic GFR-binding peptide
VPQDLNAISILYFVGRTPKVLKKYRMVVK

SEQ ID NO: 34873 - protein, 25 aa, Artificial Sequence
  Cyclic GFR-binding peptide
SPISILYKIGKTPKILKYHYMIVKS

SEQ ID NO: 34874 - protein, 35 aa, Artificial Sequence
  Cyclic GFR-binding peptide
  MOD_RES (6)..(7): Xaa is C or S
KIPKAXXVPTELEPISMLYLDENEKVVKFKYEDMV

SEQ ID NO: 34875 - protein, 31 aa, Artificial Sequence
  Cyclic GFR-binding peptide
APTKLSPISVLYIDDSSNVIYKQYENMVVRS

SEQ ID NO: 34876 - protein, 34 aa, Artificial Sequence; identical to SEQ ID NO: 6511
  Cyclic GFR-binding peptide
  MOD_RES (3)..(4): Xaa is C or S

SEQ ID NO: 34877 - protein, 38 aa, Artificial Sequence; identical to SEQ ID NO: 6512
  Cyclic GFR-binding peptide
  MOD_RES (2)..(3)..(35)..(37): Xaa is C or S

SEQ ID NO: 34878 - protein, 40 aa, Artificial Sequence
  Cyclic GFR-binding peptide
  MOD_RES (5)..(6)..(38)..(40): Xaa is C or S
IPKAXXVPTELEPISMLYLDEYDKVVKFKYEEMVVEGXGX

SEQ ID NO: 34879 - protein, 39 aa, Artificial Sequence; identical to SEQ ID NO: 6516
  Cyclic GFR-binding peptide
  MOD_RES (4)..(5)..(37)..(39): Xaa is C or S

SEQ ID NO: 34880 - protein, 25 aa, Artificial Sequence
  Cyclic GFR-binding peptide
VPTELEPISMLYLDEYDKVVKFKYE

SEQ ID NO: 34881 - protein, 30 aa, Artificial Sequence
  Cyclic GFR-binding peptide
  MOD_RES (2)..(3): Xaa is C or S
AXXVPTELSPISMLYIDEYDKVVYKQYEEM

SEQ ID NO: 34882 - protein, 34 aa, Artificial Sequence
  Cyclic GFR-binding peptide
  MOD_RES (3)..(4): Xaa is C or S
KAXXVPTELSPISMLYIDENEKVVYKQYEDMVVE

SEQ ID NO: 34883 - protein, 32 aa, Artificial Sequence
  Cyclic GFR-binding peptide
  MOD_RES (4)..(5): Xaa is C or S
SKAXXVPTKLSPISILYIDKGVVTYYKQYEGM

SEQ ID NO: 34884 - protein, 37 aa, Artificial Sequence
  Cyclic GFR-binding peptide
  MOD_RES (3)..(4)..(36): Xaa is C or S
ASXXVPARLNAISILYFDAANNVVLKKYRDMVVEAXG

SEQ ID NO: 34885 - protein, 31 aa, Artificial Sequence
  Cyclic GFR-binding peptide
  MOD_RES (4)..(5): Xaa is C or S
PKPXXAPTKLEPISVLYLDDSSNVIKFKYEN

SEQ ID NO: 34886 - protein, 37 aa, Artificial Sequence
  Cyclic GFR-binding peptide
  MOD_RES (1)..(2)..(34)..(36): Xaa is C or S
XXVPARLSPISILYKDAANNVVLKYHYDMVVEAXGXR

SEQ ID NO: 34887 - protein, 32 aa, Artificial Sequence; identical to SEQ ID NO: 6518
  Cyclic GFR-binding peptide
  MOD_RES (1)..(2): Xaa is C or S

SEQ ID NO: 34888 - protein, 38 aa, Artificial Sequence; identical to SEQ ID NO: 6519
  Cyclic GFR-binding peptide
  MOD_RES (5)..(6)..(38): Xaa is C or S

SEQ ID NO: 34889 - protein, 32 aa, Artificial Sequence; identical to SEQ ID NO: 6520
  Cyclic GFR-binding peptide
  MOD_RES (3)..(4): Xaa is C or S

SEQ ID NO: 34890 - protein, 36 aa, Artificial Sequence; identical to SEQ ID NO: 6521
  Cyclic GFR-binding peptide
  MOD_RES (4)..(5)..(36): Xaa is C or S

SEQ ID NO: 34891 - protein, 33 aa, Artificial Sequence
  Cyclic GFR-binding peptide
  MOD_RES (31)..(33): Xaa is C or S
PTKLEPISVLYLDDSSNVIKFKYENMVVRSXGX

SEQ ID NO: 34892 - protein, 26 aa, Artificial Sequence
  Cyclic GFR-binding peptide
PTELNAISMLYFDENEKVVLKKYRDM

SEQ ID NO: 34893 - protein, 40 aa, Artificial Sequence; identical to SEQ ID NO: 6524
  Cyclic GFR-binding peptide
  MOD_RES (4)..(5)..(37)..(39): Xaa is C or S

SEQ ID NO: 34894 - protein, 38 aa, Artificial Sequence
  Cyclic GFR-binding peptide
  MOD_RES (4)..(5)..(37): Xaa is C or S
PASXXVPARLNAISILYFDAANNVVLKKYRDMVVEAXG

SEQ ID NO: 34895 - protein, 23 aa, Artificial Sequence
  Cyclic GFR-binding peptide
TELEPISMLYLDENEKVVKFKYE

SEQ ID NO: 34896 - protein, 35 aa, Artificial Sequence; identical to SEQ ID NO: 6527
  Cyclic GFR-binding peptide
  MOD_RES (6)..(7): Xaa is C or S

SEQ ID NO: 34897 - protein, 34 aa, Artificial Sequence
  Cyclic GFR-binding peptide
  MOD_RES (4)..(5): Xaa is C or S
PKAXXVPTELEPISMLYLDEYDKVVKFKYEEMVV

SEQ ID NO: 34898 - protein, 41 aa, Artificial Sequence
  Cyclic GFR-binding peptide
  MOD_RES (5)..(6)..(38)..(40): Xaa is C or S
IPKAXXVPTELEPISMLYLDEYDKVVKFKYEEMVVEGXGXR

SEQ ID NO: 34899 - protein, 29 aa, Artificial Sequence
  Cyclic GFR-binding peptide
TKLSPISVLYIDSSNNVIYKQYENMVVKA

SEQ ID NO: 34900 - protein, 24 aa, Artificial Sequence
  Cyclic GFR-binding peptide
LSPISILYIVGRKPKVYKQYEMIV

SEQ ID NO: 34901 - protein, 28 aa, Artificial Sequence
  Cyclic GFR-binding peptide
  MOD_RES (2)..(3): Xaa is C or S
PXXAPTKLSPISVLYKDDSSNVILKYHY

SEQ ID NO: 34902 - protein, 22 aa, Artificial Sequence
  Cyclic GFR-binding peptide
LSPISILYIDKGVVTYYKQYEG

SEQ ID NO: 34903 - protein, 33 aa, Artificial Sequence
  Cyclic GFR-binding peptide
  MOD_RES (5)..(6): Xaa is C or S
IPKAXXVPTELSPISMLYIDEYDKVVYKQYEEM

SEQ ID NO: 34904 - protein, 33 aa, Artificial Sequence; identical to SEQ ID NO: 6532
  Cyclic GFR-binding peptide
  MOD_RES (4)..(5): Xaa is C or S

SEQ ID NO: 34905 - protein, 36 aa, Artificial Sequence; identical to SEQ ID NO: 6533
  Cyclic GFR-binding peptide
  MOD_RES (3)..(4)..(36): Xaa is C or S

SEQ ID NO: 34906 - protein, 42 aa, Artificial Sequence
  Cyclic GFR-binding peptide
  MOD_RES (6)..(7)..(39)..(41): Xaa is C or S
KASKAXXVPTKLSPISILYIDKGVVTYYKQYEGMAVSEXGXR

SEQ ID NO: 34907 - protein, 32 aa, Artificial Sequence; identical to SEQ ID NO: 6534
  Cyclic GFR-binding peptide
  MOD_RES (1)..(1): Xaa is C or S

SEQ ID NO: 34908 - protein, 38 aa, Artificial Sequence
  Cyclic GFR-binding peptide
  MOD_RES (3)..(4)..(36)..(38): Xaa is C or S
KPXXAPTKLSPISVLYIDDSSNVIYKQYENMVVRSXGX

SEQ ID NO: 34909 - protein, 24 aa, Artificial Sequence
  Cyclic GFR-binding peptide
QDLSPISILYIVGRTPKVYKQYEM

SEQ ID NO: 34910 - protein, 27 aa, Artificial Sequence
  Cyclic GFR-binding peptide
  MOD_RES (1)..(2): Xaa is C or S
XXVPQDLNAISILYFVGRTPKVLKKYR

SEQ ID NO: 34911 - protein, 33 aa, Artificial Sequence
  Cyclic GFR-binding peptide
  MOD_RES (2)..(3): Xaa is C or S
AXXVPTKLNAISILYFDKGVVTYLKKYRGMAVS

SEQ ID NO: 34912 - protein, 25 aa, Artificial Sequence
  Cyclic GFR-binding peptide
QLSPISVLYIDDSSNVIYKQYENMV

SEQ ID NO: 34913 - protein, 31 aa, Artificial Sequence; identical to SEQ ID NO: 6542
  Cyclic GFR-binding peptide
  MOD_RES (5)..(6): Xaa is C or S

SEQ ID NO: 34914 - protein, 27 aa, Artificial Sequence
  Cyclic GFR-binding peptide
VPQALSPISILYIVGRKPKVYKQYEMI

SEQ ID NO: 34915 - protein, 30 aa, Artificial Sequence
  Cyclic GFR-binding peptide
  MOD_RES (27)..(29): Xaa is C or S
EPISILYLDAANNVVKFKYEDMVVEAXGXR

SEQ ID NO: 34916 - protein, 27 aa, Artificial Sequence
  Cyclic GFR-binding peptide
VPQDLSPISILYKVGRTPKVLKYHYMV

SEQ ID NO: 34917 - protein, 33 aa, Artificial Sequence; identical to SEQ ID NO: 6548
  Cyclic GFR-binding peptide
  MOD_RES (2)..(3): Xaa is C or S

SEQ ID NO: 34918 - protein, 31 aa, Artificial Sequence
  Cyclic GFR-binding peptide
  MOD_RES (2)..(3): Xaa is C or S
PXXAPTKLSPISVLYIDDSSNVIYKQYENMV

SEQ ID NO: 34919 - protein, 34 aa, Artificial Sequence; identical to SEQ ID NO: 6554
  Cyclic GFR-binding peptide
  MOD_RES (5)..(6): Xaa is C or S

SEQ ID NO: 34920 - protein, 32 aa, Artificial Sequence
  Cyclic GFR-binding peptide
  MOD_RES (5)..(6): Xaa is C or S
ASKAXXVPTKLNAISILYFDKGVVTYLKKYRG

SEQ ID NO: 34921 - protein, 35 aa, Artificial Sequence
  Cyclic GFR-binding peptide
  MOD_RES (1)..(2)..(34): Xaa is C or S
XXVPTKLSPISILYKDKGVVTYLKYHYGMAVSEXG

SEQ ID NO: 34922 - protein, 26 aa, Artificial Sequence
  Cyclic GFR-binding peptide
APTQLSPISVLYKDDSSNVILKYHYN

SEQ ID NO: 34923 - protein, 33 aa, Artificial Sequence
  Cyclic GFR-binding peptide
  MOD_RES (3)..(4): Xaa is C or S
SPXXVSQDLEPISILYLIGKTPKIKFKYEMIVK

SEQ ID NO: 34924 - protein, 22 aa, Artificial Sequence
  Cyclic GFR-binding peptide
DLEPISILYLIGKTPKIKFKYE

SEQ ID NO: 34925 - protein, 28 aa, Artificial Sequence
  Cyclic GFR-binding peptide
  MOD_RES (1)..(1): Xaa is C or S
XVPTKLNAISVLYFDDMGVPTLKKYREG

SEQ ID NO: 34926 - protein, 31 aa, Artificial Sequence
  Cyclic GFR-binding peptide
  MOD_RES (5)..(6): Xaa is C or S
IPKAXXVPTELSPISMLYIDENEKVVYKQYE

SEQ ID NO: 34927 - protein, 34 aa, Artificial Sequence
  Cyclic GFR-binding peptide
  MOD_RES (31)..(33): Xaa is C or S
PTKLNAISILYFDKGVVTYLKKYRGMAVSEXGXR

SEQ ID NO: 34928 - protein, 26 aa, Artificial Sequence
  Cyclic GFR-binding peptide
KLSPISVLYIDDSSNVIYKQYENMVV

SEQ ID NO: 34929 - protein, 41 aa, Artificial Sequence
  Cyclic GFR-binding peptide
  MOD_RES (5)..(6)..(38)..(40): Xaa is C or S
VPKPXXAPTQLSPISVLYIDDSSNVIYKQYENMVVRAXGXH

SEQ ID NO: 34930 - protein, 29 aa, Artificial Sequence
  Cyclic GFR-binding peptide
  MOD_RES (3)..(4): Xaa is C or S
KAXXVPTKLNAISILYFDKGVVTYLKKYR

SEQ ID NO: 34931 - protein, 31 aa, Artificial Sequence; identical to SEQ ID NO: 6567
  Cyclic GFR-binding peptide
  MOD_RES (1)..(1): Xaa is C or S

SEQ ID NO: 34932 - protein, 27 aa, Artificial Sequence
  Cyclic GFR-binding peptide
APTKLSPISVLYIDSSNNVIYKQYENM

SEQ ID NO: 34933 - protein, 31 aa, Artificial Sequence; identical to SEQ ID NO: 6569
  Cyclic GFR-binding peptide
  MOD_RES (4)..(5): Xaa is C or S

SEQ ID NO: 34934 - protein, 37 aa, Artificial Sequence
  Cyclic GFR-binding peptide
  MOD_RES (3)..(35)..(37): Xaa is C or S
PTXAPTKLEPISVLYLDDSSNVIKFKYENMVVRSXGX

SEQ ID NO: 34935 - protein, 40 aa, Artificial Sequence; identical to SEQ ID NO: 6573
  Cyclic GFR-binding peptide
  MOD_RES (4)..(5)..(37)..(39): Xaa is C or S

SEQ ID NO: 34936 - protein, 24 aa, Artificial Sequence
  Cyclic GFR-binding peptide
DLEPISILYLIGKTPKIKFKYEMI

SEQ ID NO: 34937 - protein, 26 aa, Artificial Sequence
  Cyclic GFR-binding peptide
ELSPISMLYIDENEKVVYKQYEDMVV

SEQ ID NO: 34938 - protein, 28 aa, Artificial Sequence
  Cyclic GFR-binding peptide
  MOD_RES (1)..(1): Xaa is C or S
XVPQALNAISILYFVGRKPKVLKKYRMI

SEQ ID NO: 34939 - protein, 33 aa, Artificial Sequence; identical to SEQ ID NO: 6578
  Cyclic GFR-binding peptide
  MOD_RES (4)..(5): Xaa is C or S

SEQ ID NO: 34940 - protein, 34 aa, Artificial Sequence
  Cyclic GFR-binding peptide
  MOD_RES (6)..(7): Xaa is C or S
ASASPXXVSQDLEPISILYLIGKTPKIKFKYEMI

SEQ ID NO: 34941 - protein, 30 aa, Artificial Sequence; identical to SEQ ID NO: 6581
  Cyclic GFR-binding peptide
  MOD_RES (4)..(5): Xaa is C or S

SEQ ID NO: 34942 - protein, 20 aa, Artificial Sequence
  Cyclic GFR-binding peptide
EPISILYLDAANNVVKFKYE

SEQ ID NO: 34943 - protein, 31 aa, Artificial Sequence
  Cyclic GFR-binding peptide
  MOD_RES (4)..(5): Xaa is C or S
PASXXVPARLEPISILYLDAANNVVKFKYED

SEQ ID NO: 34944 - protein, 39 aa, Artificial Sequence
  Cyclic GFR-binding peptide
  MOD_RES (3)..(4)..(37)..(39): Xaa is C or S
KAXXVPTKLSPISVLYIDDMGVPTYKQYEEGMSVAEXGX

SEQ ID NO: 34945 - protein, 33 aa, Artificial Sequence
  Cyclic GFR-binding peptide
  MOD_RES (5)..(6): Xaa is C or S
APASXXVPARLSPISILYKDAANNVVLKYHYDM

SEQ ID NO: 34946 - protein, 27 aa, Artificial Sequence
  Cyclic GFR-binding peptide
KLSPISILYIDKGVVTYYKQYEGMAVS

SEQ ID NO: 34947 - protein, 31 aa, Artificial Sequence
  Cyclic GFR-binding peptide
  MOD_RES (5)..(5): Xaa is C or S
TKPTXAPTKLSPISVLYIDDSSNVIYKQYEN

SEQ ID NO: 34948 - protein, 27 aa, Artificial Sequence
  Cyclic GFR-binding peptide
  MOD_RES (1)..(2): Xaa is C or S
XXVPQDLSPISILYKVGRTPKVLKYHY

SEQ ID NO: 34949 - protein, 31 aa, Artificial Sequence; identical to SEQ ID NO: 6591
  Cyclic GFR-binding peptide
  MOD_RES (5)..(6): Xaa is C or S

SEQ ID NO: 34950 - protein, 29 aa, Artificial Sequence
  Cyclic GFR-binding peptide
TELEPISMLYLDEYDKVVKFKYEEMVVEG

SEQ ID NO: 34951 - protein, 30 aa, Artificial Sequence
  Cyclic GFR-binding peptide
PTKLSPISVLYIDDMGVPTYKQYEEGMSVA

SEQ ID NO: 34952 - protein, 37 aa, Artificial Sequence; identical to SEQ ID NO: 6594
  Cyclic GFR-binding peptide
  MOD_RES (5)..(6): Xaa is C or S

SEQ ID NO: 34953 - protein, 40 aa, Artificial Sequence; identical to SEQ ID NO: 6598
  Cyclic GFR-binding peptide
  MOD_RES (6)..(7)..(38)..(40): Xaa is C or S

SEQ ID NO: 34954 - protein, 35 aa, Artificial Sequence; identical to SEQ ID NO: 6599
  Cyclic GFR-binding peptide
  MOD_RES (4)..(5): Xaa is C or S

SEQ ID NO: 34955 - protein, 35 aa, Artificial Sequence
  Cyclic GFR-binding peptide
  MOD_RES (2)..(34): Xaa is C or S
TXAPTKLSPISVLYIDDSSNVIYKQYENMVVRSXG

SEQ ID NO: 34956 - protein, 23 aa, Artificial Sequence
  Cyclic GFR-binding peptide
ALEPISILYLVGRKPKVKFKYEM

SEQ ID NO: 34957 - protein, 37 aa, Artificial Sequence; identical to SEQ ID NO: 6601
  Cyclic GFR-binding peptide
  MOD_RES (2)..(3)..(35)..(37): Xaa is C or S

SEQ ID NO: 34958 - protein, 25 aa, Artificial Sequence
  Cyclic GFR-binding peptide
LNAISILYFIGKTPKILKKYRMIVK

SEQ ID NO: 34959 - protein, 30 aa, Artificial Sequence
  Cyclic GFR-binding peptide
  MOD_RES (28)..(30): Xaa is C or S
LSPISILYKDKGVVTYLKYHYGMAVSEXGX

SEQ ID NO: 34960 - protein, 33 aa, Artificial Sequence
  Cyclic GFR-binding peptide
  MOD_RES (32)..(32): Xaa is C or S
VPTELEPISMLYLDENEKVVKFKYEDMVVEGXG

SEQ ID NO: 34961 - protein, 39 aa, Artificial Sequence; identical to SEQ ID NO: 6604
  Cyclic GFR-binding peptide
  MOD_RES (4)..(5)..(36)..(38): Xaa is C or S

SEQ ID NO: 34962 - protein, 23 aa, Artificial Sequence
  Cyclic GFR-binding peptide
LSPISILYKVGRKPKVLKYHYMI

SEQ ID NO: 34963 - protein, 31 aa, Artificial Sequence
  Cyclic GFR-binding peptide
  MOD_RES (3)..(4): Xaa is C or S
KAXXVPTKLSPISVLYIDDMGVPTYKQYEEG

SEQ ID NO: 34964 - protein, 40 aa, Artificial Sequence; identical to SEQ ID NO: 6609
  Cyclic GFR-binding peptide
  MOD_RES (5)..(6)..(37)..(39): Xaa is C or S

SEQ ID NO: 34965 - protein, 25 aa, Artificial Sequence
  Cyclic GFR-binding peptide
VSQDLSPISILYIIGKTPKIYKQYE

SEQ ID NO: 34966 - protein, 35 aa, Artificial Sequence
  Cyclic GFR-binding peptide
  MOD_RES (6)..(7): Xaa is C or S
ASASPXXVSQDLEPISILYLIGKTPKIKFKYEMIV

SEQ ID NO: 34967 - protein, 37 aa, Artificial Sequence
  Cyclic GFR-binding peptide
  MOD_RES (6)..(7): Xaa is C or S
ASASPXXVPQDLSPISILYIVGRTPKVYKQYEMVVKS

SEQ ID NO: 34968 - protein, 30 aa, Artificial Sequence
  Cyclic GFR-binding peptide
  MOD_RES (30)..(30): Xaa is C or S
PQDLEPISILYLVGRTPKVKFKYEMVVKSX

SEQ ID NO: 34969 - protein, 26 aa, Artificial Sequence
  Cyclic GFR-binding peptide
VPTELEPISMLYLDEYDKVVKFKYEE

SEQ ID NO: 34970 - protein, 34 aa, Artificial Sequence
  Cyclic GFR-binding peptide
  MOD_RES (31)..(33): Xaa is C or S
PTELSPISMLYIDEYDKVVYKQYEEMVVEGXGXR

SEQ ID NO: 34971 - protein, 28 aa, Artificial Sequence
  Cyclic GFR-binding peptide
PTKLNAISVLYFDDMGVPTLKKYREGMS

SEQ ID NO: 34972 - protein, 32 aa, Artificial Sequence
  Cyclic GFR-binding peptide
  MOD_RES (1)..(2): Xaa is C or S
XXAPTKLSPISVLYIDDSSNVIYKQYENMVVR

SEQ ID NO: 34973 - protein, 30 aa, Artificial Sequence
  Cyclic GFR-binding peptide
APTKLEPISVLYLDDSSNVIKFKYENMVVR

SEQ ID NO: 34974 - protein, 23 aa, Artificial Sequence
  Cyclic GFR-binding peptide
EPISVLYLDDMGVPTKFKYEEGM

SEQ ID NO: 34975 - protein, 33 aa, Artificial Sequence
  Cyclic GFR-binding peptide
  MOD_RES (5)..(6): Xaa is C or S
VPKPXXAPTKLSPISVLYIDDSSNVIYKQYENM

SEQ ID NO: 34976 - protein, 38 aa, Artificial Sequence; identical to SEQ ID NO: 6616
  Cyclic GFR-binding peptide
  MOD_RES (4)..(5)..(37): Xaa is C or S

SEQ ID NO: 34977 - protein, 20 aa, Artificial Sequence
  Cyclic GFR-binding peptide
SPISILYKVGRTPKVLKYHY

SEQ ID NO: 34978 - protein, 39 aa, Artificial Sequence
  Cyclic GFR-binding peptide
  MOD_RES (4)..(5)..(37)..(39): Xaa is C or S
SKAXXVPTKLSPISILYIDKGVVTYYKQYEGMAVSEXGX

SEQ ID NO: 34979 - protein, 34 aa, Artificial Sequence; identical to SEQ ID NO: 6621
  Cyclic GFR-binding peptide
  MOD_RES (31)..(33): Xaa is C or S

SEQ ID NO: 34980 - protein, 27 aa, Artificial Sequence
  Cyclic GFR-binding peptide
  MOD_RES (1)..(1): Xaa is C or S
XAPTKLEPISVLYLDDSSNVIKFKYEN

SEQ ID NO: 34981 - protein, 30 aa, Artificial Sequence; identical to SEQ ID NO: 6624
  Cyclic GFR-binding peptide
  MOD_RES (5)..(5): Xaa is C or S

SEQ ID NO: 34982 - protein, 35 aa, Artificial Sequence
  Cyclic GFR-binding peptide
  MOD_RES (1)..(33)..(35): Xaa is C or S
XAPTQLEPISVLYLDDSSNVIKFKYENMVVRAXGX

SEQ ID NO: 34983 - protein, 32 aa, Artificial Sequence; identical to SEQ ID NO: 6625
  Cyclic GFR-binding peptide
  MOD_RES (2)..(2): Xaa is C or S

SEQ ID NO: 34984 - protein, 29 aa, Artificial Sequence
  Cyclic GFR-binding peptide
  MOD_RES (29)..(29): Xaa is C or S
KLSPISVLYKDDSSNVILKYHYNMVVRSX

SEQ ID NO: 34985 - protein, 28 aa, Artificial Sequence
  Cyclic GFR-binding peptide
ELSPISMLYIDENEKVVYKQYEDMVVEG

SEQ ID NO: 34986 - protein, 34 aa, Artificial Sequence
  Cyclic GFR-binding peptide
  MOD_RES (3)..(4): Xaa is C or S
KAXXVPTKLSPISILYIDKGVVTYYKQYEGMAVS

SEQ ID NO: 34987 - protein, 25 aa, Artificial Sequence
  Cyclic GFR-binding peptide
ELNAISMLYFDENEKVVLKKYRDMV

SEQ ID NO: 34988 - protein, 37 aa, Artificial Sequence
  Cyclic GFR-binding peptide
  MOD_RES (5)..(6): Xaa is C or S
VGKAXXVPTKLEPISVLYLDDMGVPTKFKYEEGMSVA

SEQ ID NO: 34989 - protein, 33 aa, Artificial Sequence
  Cyclic GFR-binding peptide
  MOD_RES (31)..(33): Xaa is C or S
TKLSPISVLYIDDMGVPTYKQYEEGMSVAEXGX

SEQ ID NO: 34990 - protein, 35 aa, Artificial Sequence
  Cyclic GFR-binding peptide
  MOD_RES (1)..(2)..(35): Xaa is C or S
XXVPTKLEPISVLYLDDMGVPTKFKYEEGMSVAEX

SEQ ID NO: 34991 - protein, 30 aa, Artificial Sequence
  Cyclic GFR-binding peptide
  MOD_RES (28)..(30): Xaa is C or S
DLSPISILYIIGKTPKIYKQYEMIVKSXKX

SEQ ID NO: 34992 - protein, 35 aa, Artificial Sequence; identical to SEQ ID NO: 6630
  Cyclic GFR-binding peptide
  MOD_RES (6)..(7): Xaa is C or S

SEQ ID NO: 34993 - protein, 39 aa, Artificial Sequence; identical to SEQ ID NO: 6632
  Cyclic GFR-binding peptide
  MOD_RES (6)..(7)..(39): Xaa is C or S

SEQ ID NO: 34994 - protein, 32 aa, Artificial Sequence; identical to SEQ ID NO: 6634
  Cyclic GFR-binding peptide
  MOD_RES (30)..(32): Xaa is C or S

SEQ ID NO: 34995 - protein, 28 aa, Artificial Sequence
  Cyclic GFR-binding peptide
VPQDLSPISILYIVGRTPKVYKQYEMVV

SEQ ID NO: 34996 - protein, 35 aa, Artificial Sequence; identical to SEQ ID NO: 6635
  Cyclic GFR-binding peptide
  MOD_RES (5)..(6): Xaa is C or S

SEQ ID NO: 34997 - protein, 31 aa, Artificial Sequence; identical to SEQ ID NO: 6637
  Cyclic GFR-binding peptide
  MOD_RES (30)..(30): Xaa is C or S

SEQ ID NO: 34998 - protein, 38 aa, Artificial Sequence; identical to SEQ ID NO: 6639
  Cyclic GFR-binding peptide
  MOD_RES (3)..(4)..(36)..(38): Xaa is C or S

SEQ ID NO: 34999 - protein, 30 aa, Artificial Sequence
  Cyclic GFR-binding peptide
VPARLEPISILYLDAANNVVKFKYEDMVVE

SEQ ID NO: 35000 - protein, 28 aa, Artificial Sequence
  Cyclic GFR-binding peptide
ELSPISMLYKDEYDKVVLKYHYEMVVEG

SEQ ID NO: 35001 - protein, 29 aa, Artificial Sequence
  Cyclic GFR-binding peptide
PTKLEPISVLYLDDMGVPTKFKYEEGMSV

SEQ ID NO: 35002 - protein, 33 aa, Artificial Sequence
  Cyclic GFR-binding peptide
  MOD_RES (4)..(5): Xaa is C or S
PASXXVPARLEPISILYLDAANNVVKFKYEDMV

SEQ ID NO: 35003 - protein, 22 aa, Artificial Sequence
  Cyclic GFR-binding peptide
SPISILYKIGKTPKILKYHYMI

SEQ ID NO: 35004 - protein, 30 aa, Artificial Sequence
  Cyclic GFR-binding peptide
  MOD_RES (28)..(30): Xaa is C or S
LSPISILYKDAANNVVLKYHYDMVVEAXGX

SEQ ID NO: 35005 - protein, 30 aa, Artificial Sequence
  Cyclic GFR-binding peptide
  MOD_RES (3)..(4): Xaa is C or S
KAXXAPTKLEPISVLYLDSSNNVIKFKYEN

SEQ ID NO: 35006 - protein, 29 aa, Artificial Sequence
  Cyclic GFR-binding peptide
  MOD_RES (3)..(4): Xaa is C or S
KAXXAPTKLNAISVLYFDSSNNVILKKYR

SEQ ID NO: 35007 - protein, 25 aa, Artificial Sequence
  Cyclic GFR-binding peptide
TQLSPISVLYKDDSSNVILKYHYNM

SEQ ID NO: 35008 - protein, 30 aa, Artificial Sequence; identical to SEQ ID NO: 6652
  Cyclic GFR-binding peptide
  MOD_RES (28)..(30): Xaa is C or S

SEQ ID NO: 35009 - protein, 32 aa, Artificial Sequence; identical to SEQ ID NO: 6653
  Cyclic GFR-binding peptide
  MOD_RES (6)..(7): Xaa is C or S

SEQ ID NO: 35010 - protein, 38 aa, Artificial Sequence
  Cyclic GFR-binding peptide
  MOD_RES (3)..(4)..(36)..(38): Xaa is C or S
ASXXVPARLSPISILYKDAANNVVLKYHYDMVVEAXGX

SEQ ID NO: 35011 - protein, 27 aa, Artificial Sequence
  Cyclic GFR-binding peptide
  MOD_RES (27)..(27): Xaa is C or S
LSPISILYKIGKTPKILKYHYMIVKSX

SEQ ID NO: 35012 - protein, 28 aa, Artificial Sequence
  Cyclic GFR-binding peptide
VPTKLNAISVLYFDDMGVPTLKKYREGM

SEQ ID NO: 35013 - protein, 28 aa, Artificial Sequence
  Cyclic GFR-binding peptide
  MOD_RES (1)..(2): Xaa is C or S
XXVSQDLNAISILYFIGKTPKILKKYRM

SEQ ID NO: 35014 - protein, 24 aa, Artificial Sequence
  Cyclic GFR-binding peptide
KLSPISVLYKDSSNNVILKYHYNM

SEQ ID NO: 35015 - protein, 30 aa, Artificial Sequence; identical to SEQ ID NO: 6661
  Cyclic GFR-binding peptide

SEQ ID NO: 35016 - protein, 33 aa, Artificial Sequence
  Cyclic GFR-binding peptide
  MOD_RES (4)..(5): Xaa is C or S
PASXXVPARLNAISILYFDAANNVVLKKYRDMV

SEQ ID NO: 35017 - protein, 37 aa, Artificial Sequence
  Cyclic GFR-binding peptide
  MOD_RES (1)..(2)..(34)..(36): Xaa is C or S
XXVPARLEPISILYLDAANNVVKFKYEDMVVEAXGXR

SEQ ID NO: 35018 - protein, 25 aa, Artificial Sequence
  Cyclic GFR-binding peptide
LSPISILYIDKGVVTYYKQYEGMAV

SEQ ID NO: 35019 - protein, 36 aa, Artificial Sequence; identical to SEQ ID NO: 6662
  Cyclic GFR-binding peptide
  MOD_RES (3)..(4)..(36): Xaa is C or S

SEQ ID NO: 35020 - protein, 28 aa, Artificial Sequence
  Cyclic GFR-binding peptide
TELNAISMLYFDEYDKVVLKKYREMVVE

SEQ ID NO: 35021 - protein, 21 aa, Artificial Sequence
  Cyclic GFR-binding peptide
EPISILYLIGKTPKIKFKYEM

SEQ ID NO: 35022 - protein, 35 aa, Artificial Sequence
  Cyclic GFR-binding peptide
  MOD_RES (1)..(2)..(33)..(35): Xaa is C or S
XXVSQDLEPISILYLIGKTPKIKFKYEMIVKSXKX

SEQ ID NO: 35023 - protein, 38 aa, Artificial Sequence
  Cyclic GFR-binding peptide
  MOD_RES (3)..(4)..(36)..(38): Xaa is C or S
KPXXAPTKLEPISVLYLDDSSNVIKFKYENMVVRSXGX

SEQ ID NO: 35024 - protein, 29 aa, Artificial Sequence
  Cyclic GFR-binding peptide
  MOD_RES (29)..(29): Xaa is C or S
ELSPISMLYKDENEKVVLKYHYDMVVEGX

SEQ ID NO: 35025 - protein, 36 aa, Artificial Sequence; identical to SEQ ID NO: 6668
  Cyclic GFR-binding peptide
  MOD_RES (6)..(7): Xaa is C or S

SEQ ID NO: 35026 - protein, 30 aa, Artificial Sequence
  Cyclic GFR-binding peptide
  MOD_RES (30)..(30): Xaa is C or S
PQDLSPISILYIVGRTPKVYKQYEMVVKSX

SEQ ID NO: 35027 - protein, 29 aa, Artificial Sequence
  Cyclic GFR-binding peptide
  MOD_RES (28)..(28): Xaa is C or S
LSPISILYKDAANNVVLKYHYDMVVEAXG

SEQ ID NO: 35028 - protein, 33 aa, Artificial Sequence; identical to SEQ ID NO: 6670
  Cyclic GFR-binding peptide
  MOD_RES (32)..(32): Xaa is C or S

SEQ ID NO: 35029 - protein, 36 aa, Artificial Sequence; identical to SEQ ID NO: 6672
  Cyclic GFR-binding peptide
  MOD_RES (1)..(2)..(34)..(36): Xaa is C or S

SEQ ID NO: 35030 - protein, 36 aa, Artificial Sequence
  Cyclic GFR-binding peptide
  MOD_RES (4)..(5)..(36): Xaa is C or S
ASPXXVPQDLEPISILYLVGRTPKVKFKYEMVVKSX

SEQ ID NO: 35031 - protein, 31 aa, Artificial Sequence
  Cyclic GFR-binding peptide
  MOD_RES (1)..(2): Xaa is C or S
XXVPTELEPISMLYLDEYDKVVKFKYEEMVV

SEQ ID NO: 35032 - protein, 28 aa, Artificial Sequence
  Cyclic GFR-binding peptide
TKLSPISVLYKDSSNNVILKYHYNMVVK

SEQ ID NO: 35033 - protein, 37 aa, Artificial Sequence; identical to SEQ ID NO: 6675
  Cyclic GFR-binding peptide
  MOD_RES (4)..(5)..(36): Xaa is C or S

SEQ ID NO: 35034 - protein, 35 aa, Artificial Sequence
  Cyclic GFR-binding peptide
  MOD_RES (5)..(6): Xaa is C or S
IPKAXXVPTELEPISMLYLDENEKVVKFKYEDMVV

SEQ ID NO: 35035 - protein, 26 aa, Artificial Sequence
  Cyclic GFR-binding peptide
  MOD_RES (26)..(26): Xaa is C or S
NAISILYFVGRTPKVLKKYRMVVKSX

SEQ ID NO: 35036 - protein, 41 aa, Artificial Sequence; identical to SEQ ID NO: 6678
  Cyclic GFR-binding peptide
  MOD_RES (5)..(6)..(38)..(40): Xaa is C or S

SEQ ID NO: 35037 - protein, 35 aa, Artificial Sequence
  Cyclic GFR-binding peptide
  MOD_RES (4)..(5): Xaa is C or S
PKAXXAPTKLEPISVLYLDSSNNVIKFKYENMVVK

SEQ ID NO: 35038 - protein, 28 aa, Artificial Sequence
  Cyclic GFR-binding peptide
PTKLSPISVLYKDSSNNVILKYHYNMVV

SEQ ID NO: 35039 - protein, 24 aa, Artificial Sequence
  Cyclic GFR-binding peptide
LNAISILYFIGKTPKILKKYRMIV

SEQ ID NO: 35040 - protein, 31 aa, Artificial Sequence
  Cyclic GFR-binding peptide
  MOD_RES (1)..(1): Xaa is C or S
XVPTKLSPISVLYIDDMGVPTYKQYEEGMSV

SEQ ID NO: 35041 - protein, 36 aa, Artificial Sequence
  Cyclic GFR-binding peptide
  MOD_RES (1)..(33)..(35): Xaa is C or S
XVPARLSPISILYKDAANNVVLKYHYDMVVEAXGXR

SEQ ID NO: 35042 - protein, 25 aa, Artificial Sequence
  Cyclic GFR-binding peptide
KLSPISVLYKDSSNNVILKYHYNMV

SEQ ID NO: 35043 - protein, 36 aa, Artificial Sequence
  Cyclic GFR-binding peptide
  MOD_RES (5)..(6): Xaa is C or S
SAAPXXVPQALSPISILYIVGRKPKVYKQYEMIVRS

SEQ ID NO: 35044 - protein, 32 aa, Artificial Sequence
  Cyclic GFR-binding peptide
  MOD_RES (3)..(4): Xaa is C or S
SPXXVPQDLSPISILYIVGRTPKVYKQYEMVV

SEQ ID NO: 35045 - protein, 40 aa, Artificial Sequence
  Cyclic GFR-binding peptide
  MOD_RES (5)..(6)..(38)..(40): Xaa is C or S
IPKAXXVPTELSPISMLYIDEYDKVVYKQYEEMVVEGXGX

SEQ ID NO: 35046 - protein, 35 aa, Artificial Sequence; identical to SEQ ID NO: 6686
  Cyclic GFR-binding peptide
  MOD_RES (1)..(2)..(34): Xaa is C or S

SEQ ID NO: 35047 - protein, 33 aa, Artificial Sequence; identical to SEQ ID NO: 6687
  Cyclic GFR-binding peptide
  MOD_RES (2)..(3): Xaa is C or S

SEQ ID NO: 35048 - protein, 36 aa, Artificial Sequence; identical to SEQ ID NO: 6688
  Cyclic GFR-binding peptide
  MOD_RES (4)..(5): Xaa is C or S

SEQ ID NO: 35049 - protein, 37 aa, Artificial Sequence
  Cyclic GFR-binding peptide
  MOD_RES (3)..(35)..(37): Xaa is C or S
PTXAPTKLSPISVLYIDDSSNVIYKQYENMVVRSXGX

SEQ ID NO: 35050 - protein, 27 aa, Artificial Sequence
  Cyclic GFR-binding peptide
VPTKLEPISVLYLDDMGVPTKFKYEEG

SEQ ID NO: 35051 - protein, 27 aa, Artificial Sequence
  Cyclic GFR-binding peptide
PQALSPISILYKVGRKPKVLKYHYMIV

SEQ ID NO: 35052 - protein, 29 aa, Artificial Sequence
  Cyclic GFR-binding peptide
  MOD_RES (1)..(1): Xaa is C or S
XAPTQLEPISVLYLDDSSNVIKFKYENMV

SEQ ID NO: 35053 - protein, 34 aa, Artificial Sequence; identical to SEQ ID NO: 6693
  Cyclic GFR-binding peptide
  MOD_RES (31)..(33): Xaa is C or S

SEQ ID NO: 35054 - protein, 34 aa, Artificial Sequence
  Cyclic GFR-binding peptide
  MOD_RES (5)..(6): Xaa is C or S
SASPXXVPQDLEPISILYLVGRTPKVKFKYEMVV

SEQ ID NO: 35055 - protein, 37 aa, Artificial Sequence
  Cyclic GFR-binding peptide
  MOD_RES (4)..(36): Xaa is C or S
KPTXAPTKLEPISVLYLDDSSNVIKFKYENMVVRSXG

SEQ ID NO: 35056 - protein, 29 aa, Artificial Sequence
  Cyclic GFR-binding peptide
TKLEPISVLYLDDSSNVIKFKYENMVVRS

SEQ ID NO: 35057 - protein, 28 aa, Artificial Sequence
  Cyclic GFR-binding peptide
  MOD_RES (27)..(27): Xaa is C or S
LSPISILYKVGRKPKVLKYHYMIVRSXK

SEQ ID NO: 35058 - protein, 38 aa, Artificial Sequence; identical to SEQ ID NO: 6697
  Cyclic GFR-binding peptide
  MOD_RES (3)..(4)..(36)..(38): Xaa is C or S

SEQ ID NO: 35059 - protein, 31 aa, Artificial Sequence
  Cyclic GFR-binding peptide
  MOD_RES (3)..(4): Xaa is C or S
ASXXVPARLEPISILYLDAANNVVKFKYEDM

SEQ ID NO: 35060 - protein, 31 aa, Artificial Sequence
  Cyclic GFR-binding peptide
  MOD_RES (30)..(30): Xaa is C or S
KLSPISVLYIDDMGVPTYKQYEEGMSVAEXG

SEQ ID NO: 35061 - protein, 36 aa, Artificial Sequence
  Cyclic GFR-binding peptide
  MOD_RES (1)..(33)..(35): Xaa is C or S
XVPTELSPISMLYIDENEKVVYKQYEDMVVEGXGXR

SEQ ID NO: 35062 - protein, 32 aa, Artificial Sequence
  Cyclic GFR-binding peptide
  MOD_RES (29)..(31): Xaa is C or S
LSPISVLYIDDMGVPTYKQYEEGMSVAEXGXR

SEQ ID NO: 35063 - protein, 30 aa, Artificial Sequence
  Cyclic GFR-binding peptide
  MOD_RES (29)..(29): Xaa is C or S
QDLEPISILYLVGRTPKVKFKYEMVVKSXK

SEQ ID NO: 35064 - protein, 30 aa, Artificial Sequence
  Cyclic GFR-binding peptide
  MOD_RES (3)..(4): Xaa is C or S
KAXXVPTKLSPISILYKDKGVVTYLKYHYG

SEQ ID NO: 35065 - protein, 21 aa, Artificial Sequence
  Cyclic GFR-binding peptide
LEPISVLYLDDMGVPTKFKYE

SEQ ID NO: 35066 - protein, 39 aa, Artificial Sequence
  Cyclic GFR-binding peptide
  MOD_RES (3)..(4)..(36)..(38): Xaa is C or S
KAXXVPTKLSPISILYIDKGVVTYYKQYEGMAVSEXGXR

SEQ ID NO: 35067 - protein, 33 aa, Artificial Sequence; identical to SEQ ID NO: 6700
  Cyclic GFR-binding peptide
  MOD_RES (6)..(7): Xaa is C or S

SEQ ID NO: 35068 - protein, 27 aa, Artificial Sequence
  Cyclic GFR-binding peptide
  MOD_RES (1)..(1): Xaa is C or S
XVPTKLNAISILYFDKGVVTYLKKYRG

SEQ ID NO: 35069 - protein, 32 aa, Artificial Sequence; identical to SEQ ID NO: 6702
  Cyclic GFR-binding peptide
  MOD_RES (4)..(5): Xaa is C or S

SEQ ID NO: 35070 - protein, 31 aa, Artificial Sequence
  Cyclic GFR-binding peptide
VPTKLSPISVLYIDDMGVPTYKQYEEGMSVA

SEQ ID NO: 35071 - protein, 35 aa, Artificial Sequence
  Cyclic GFR-binding peptide
  MOD_RES (2)..(3)..(35): Xaa is C or S
PXXAPTKLSPISVLYIDDSSNVIYKQYENMVVRSX

SEQ ID NO: 35072 - protein, 40 aa, Artificial Sequence; identical to SEQ ID NO: 6703
  Cyclic GFR-binding peptide
  MOD_RES (5)..(6)..(38)..(40): Xaa is C or S

SEQ ID NO: 35073 - protein, 27 aa, Artificial Sequence
  Cyclic GFR-binding peptide
QLEPISVLYLDDSSNVIKFKYENMVVR

SEQ ID NO: 35074 - protein, 34 aa, Artificial Sequence; identical to SEQ ID NO: 6705
  Cyclic GFR-binding peptide
  MOD_RES (2)..(3): Xaa is C or S

SEQ ID NO: 35075 - protein, 35 aa, Artificial Sequence
  Cyclic GFR-binding peptide
  MOD_RES (6)..(7): Xaa is C or S
AAPASXXVPARLEPISILYLDAANNVVKFKYEDMV

SEQ ID NO: 35076 - protein, 29 aa, Artificial Sequence
  Cyclic GFR-binding peptide
  MOD_RES (1)..(2): Xaa is C or S
XXVPQALNAISILYFVGRKPKVLKKYRMI

SEQ ID NO: 35077 - protein, 35 aa, Artificial Sequence; identical to SEQ ID NO: 6711
  Cyclic GFR-binding peptide
  MOD_RES (2)..(3)..(35): Xaa is C or S

SEQ ID NO: 35078 - protein, 39 aa, Artificial Sequence
  Cyclic GFR-binding peptide
  MOD_RES (3)..(4)..(36)..(38): Xaa is C or S
ASXXVPARLSPISILYKDAANNVVLKYHYDMVVEAXGXR

SEQ ID NO: 35079 - protein, 33 aa, Artificial Sequence
  Cyclic GFR-binding peptide
  MOD_RES (31)..(33): Xaa is C or S
PTELEPISMLYLDEYDKVVKFKYEEMVVEGXGX

SEQ ID NO: 35080 - protein, 27 aa, Artificial Sequence
  Cyclic GFR-binding peptide
QDLNAISILYFIGKTPKILKKYRMIVK

SEQ ID NO: 35081 - protein, 30 aa, Artificial Sequence
  Cyclic GFR-binding peptide
VPQALEPISILYLVGRKPKVKFKYEMIVRS

SEQ ID NO: 35082 - protein, 36 aa, Artificial Sequence; identical to SEQ ID NO: 6716
  Cyclic GFR-binding peptide
  MOD_RES (6)..(7): Xaa is C or S

SEQ ID NO: 35083 - protein, 31 aa, Artificial Sequence; identical to SEQ ID NO: 6717
  Cyclic GFR-binding peptide
  MOD_RES (31)..(31): Xaa is C or S

SEQ ID NO: 35084 - protein, 36 aa, Artificial Sequence
  Cyclic GFR-binding peptide
  MOD_RES (1)..(33)..(35): Xaa is C or S
XVPTKLSPISILYIDKGVVTYYKQYEGMAVSEXGXR

SEQ ID NO: 35085 - protein, 28 aa, Artificial Sequence
  Cyclic GFR-binding peptide
APTKLSPISVLYIDSSNNVIYKQYENMV

SEQ ID NO: 35086 - protein, 38 aa, Artificial Sequence
  Cyclic GFR-binding peptide
  MOD_RES (4)..(5)..(36)..(38): Xaa is C or S
AAPXXVPQALSPISILYIVGRKPKVYKQYEMIVRSXKX

SEQ ID NO: 35087 - protein, 29 aa, Artificial Sequence
  Cyclic GFR-binding peptide
  MOD_RES (3)..(4): Xaa is C or S
APXXVPQALEPISILYLVGRKPKVKFKYE

SEQ ID NO: 35088 - protein, 28 aa, Artificial Sequence
  Cyclic GFR-binding peptide
PTKLSPISVLYIDDSSNVIYKQYENMVV

SEQ ID NO: 35089 - protein, 38 aa, Artificial Sequence; identical to SEQ ID NO: 6723
  Cyclic GFR-binding peptide
  MOD_RES (3)..(4)..(35)..(37): Xaa is C or S

SEQ ID NO: 35090 - protein, 22 aa, Artificial Sequence
  Cyclic GFR-binding peptide
ELSPISMLYIDEYDKVVYKQYE

SEQ ID NO: 35091 - protein, 41 aa, Artificial Sequence
  Cyclic GFR-binding peptide
  MOD_RES (5)..(6)..(38)..(40): Xaa is C or S
APASXXVPARLSPISILYKDAANNVVLKYHYDMVVEAXGXR

SEQ ID NO: 35092 - protein, 30 aa, Artificial Sequence
  Cyclic GFR-binding peptide
  MOD_RES (27)..(29): Xaa is C or S
SPISMLYIDENEKVVYKQYEDMVVEGXGXR

SEQ ID NO: 35093 - protein, 38 aa, Artificial Sequence
  Cyclic GFR-binding peptide
  MOD_RES (4)..(5)..(37): Xaa is C or S
SKAXXVPTKLSPISILYKDKGVVTYLKYHYGMAVSEXG

SEQ ID NO: 35094 - protein, 38 aa, Artificial Sequence
  Cyclic GFR-binding peptide
  MOD_RES (6)..(7): Xaa is C or S
KASKAXXVPTKLSPISILYKDKGVVTYLKYHYGMAVSE

SEQ ID NO: 35095 - protein, 37 aa, Artificial Sequence
  Cyclic GFR-binding peptide
  MOD_RES (1)..(2)..(34)..(36): Xaa is C or S
XXVPTELSPISMLYIDENEKVVYKQYEDMVVEGXGXR

SEQ ID NO: 35096 - protein, 33 aa, Artificial Sequence; identical to SEQ ID NO: 6727
  Cyclic GFR-binding peptide
  MOD_RES (6)..(7): Xaa is C or S

SEQ ID NO: 35097 - protein, 25 aa, Artificial Sequence
  Cyclic GFR-binding peptide
ARLEPISILYLDAANNVVKFKYEDM

SEQ ID NO: 35098 - protein, 28 aa, Artificial Sequence
  Cyclic GFR-binding peptide
KLEPISVLYLDDMGVPTKFKYEEGMSVA

SEQ ID NO: 35099 - protein, 37 aa, Artificial Sequence
  Cyclic GFR-binding peptide
  MOD_RES (2)..(3)..(34)..(36): Xaa is C or S
PXXVSQDLSPISILYIIGKTPKIYKQYEMIVKSXKXS

SEQ ID NO: 35100 - protein, 33 aa, Artificial Sequence
  Cyclic GFR-binding peptide
  MOD_RES (7)..(7): Xaa is C or S
HVTKPTXAPTKLEPISVLYLDDSSNVIKFKYEN

SEQ ID NO: 35101 - protein, 26 aa, Artificial Sequence
  Cyclic GFR-binding peptide
NAISILYFDAANNVVLKKYRDMVVEA

SEQ ID NO: 35102 - protein, 30 aa, Artificial Sequence
  Cyclic GFR-binding peptide
  MOD_RES (1)..(2): Xaa is C or S
XXVPTELEPISMLYLDENEKVVKFKYEDMV

SEQ ID NO: 35103 - protein, 31 aa, Artificial Sequence
  Cyclic GFR-binding peptide
  MOD_RES (30)..(30): Xaa is C or S
SQDLSPISILYIIGKTPKIYKQYEMIVKSXK

SEQ ID NO: 35104 - protein, 32 aa, Artificial Sequence; identical to SEQ ID NO: 6732
  Cyclic GFR-binding peptide
  MOD_RES (30)..(32): Xaa is C or S

SEQ ID NO: 35105 - protein, 35 aa, Artificial Sequence
  Cyclic GFR-binding peptide
  MOD_RES (3)..(4): Xaa is C or S
ASXXVPARLEPISILYLDAANNVVKFKYEDMVVEA

SEQ ID NO: 35106 - protein, 32 aa, Artificial Sequence
  Cyclic GFR-binding peptide
  MOD_RES (29)..(31): Xaa is C or S
KLSPISVLYIDDSSNVIYKQYENMVVRSXGXH

SEQ ID NO: 35107 - protein, 21 aa, Artificial Sequence
  Cyclic GFR-binding peptide
LEPISILYLVGRTPKVKFKYE

SEQ ID NO: 35108 - protein, 29 aa, Artificial Sequence
  Cyclic GFR-binding peptide
  MOD_RES (29)..(29): Xaa is C or S
LNAISVLYFDDMGVPTLKKYREGMSVAEX

SEQ ID NO: 35109 - protein, 30 aa, Artificial Sequence
  Cyclic GFR-binding peptide
  MOD_RES (27)..(29): Xaa is C or S
SPISVLYIDDSSNVIYKQYENMVVRSXGXH

SEQ ID NO: 35110 - protein, 27 aa, Artificial Sequence
  Cyclic GFR-binding peptide
LNAISMLYFDENEKVVLKKYRDMVVEG

SEQ ID NO: 35111 - protein, 28 aa, Artificial Sequence
  Cyclic GFR-binding peptide
  MOD_RES (2)..(3): Xaa is C or S
PXXAPTQLSPISVLYIDDSSNVIYKQYE

SEQ ID NO: 35112 - protein, 39 aa, Artificial Sequence
  Cyclic GFR-binding peptide
  MOD_RES (5)..(6)..(38): Xaa is C or S
VPKPXXAPTKLSPISVLYIDDSSNVIYKQYENMVVRSXG

SEQ ID NO: 35113 - protein, 23 aa, Artificial Sequence
  Cyclic GFR-binding peptide
NAISILYFDAANNVVLKKYRDMV

SEQ ID NO: 35114 - protein, 27 aa, Artificial Sequence
  Cyclic GFR-binding peptide
  MOD_RES (1)..(1): Xaa is C or S
XVPTELNAISMLYFDENEKVVLKKYRD

SEQ ID NO: 35115 - protein, 36 aa, Artificial Sequence
  Cyclic GFR-binding peptide
  MOD_RES (2)..(3)..(35): Xaa is C or S
AXXVPTKLSPISILYKDKGVVTYLKYHYGMAVSEXG

SEQ ID NO: 35116 - protein, 37 aa, Artificial Sequence
  Cyclic GFR-binding peptide
  MOD_RES (2)..(3)..(34)..(36): Xaa is C or S
PXXVSQDLEPISILYLIGKTPKIKFKYEMIVKSXKXS

SEQ ID NO: 35117 - protein, 29 aa, Artificial Sequence
  Cyclic GFR-binding peptide
  MOD_RES (3)..(4): Xaa is C or S
KPXXAPTQLEPISVLYLDDSSNVIKFKYE

SEQ ID NO: 35118 - protein, 29 aa, Artificial Sequence
  Cyclic GFR-binding peptide
VPQDLEPISILYLVGRTPKVKFKYEMVVK

SEQ ID NO: 35119 - protein, 35 aa, Artificial Sequence; identical to SEQ ID NO: 6749
  Cyclic GFR-binding peptide
  MOD_RES (4)..(5): Xaa is C or S

SEQ ID NO: 35120 - protein, 31 aa, Artificial Sequence; identical to SEQ ID NO: 6751
  Cyclic GFR-binding peptide
  MOD_RES (31)..(31): Xaa is C or S

SEQ ID NO: 35121 - protein, 29 aa, Artificial Sequence
  Cyclic GFR-binding peptide
  MOD_RES (3)..(4): Xaa is C or S
KAXXVPTELSPISMLYKDEYDKVVLKYHY

SEQ ID NO: 35122 - protein, 23 aa, Artificial Sequence
  Cyclic GFR-binding peptide
LNAISILYFDKGVVTYLKKYRGM

SEQ ID NO: 35123 - protein, 36 aa, Artificial Sequence
  Cyclic GFR-binding peptide
  MOD_RES (4)..(5): Xaa is C or S
GKAXXVPTKLSPISVLYIDDMGVPTYKQYEEGMSVA

SEQ ID NO: 35124 - protein, 31 aa, Artificial Sequence
  Cyclic GFR-binding peptide
  MOD_RES (4)..(5): Xaa is C or S
PKAXXAPTKLSPISVLYIDSSNNVIYKQYEN

SEQ ID NO: 35125 - protein, 36 aa, Artificial Sequence
  Cyclic GFR-binding peptide
  MOD_RES (5)..(5): Xaa is C or S
TKPTXAPTKLSPISVLYIDDSSNVIYKQYENMVVRS

SEQ ID NO: 35126 - protein, 24 aa, Artificial Sequence
  Cyclic GFR-binding peptide
SPISILYKDKGVVTYLKYHYGMAV

SEQ ID NO: 35127 - protein, 28 aa, Artificial Sequence
  Cyclic GFR-binding peptide
  MOD_RES (1)..(1): Xaa is C or S
XAPTKLNAISVLYFDSSNNVILKKYRNM

SEQ ID NO: 35128 - protein, 29 aa, Artificial Sequence
  Cyclic GFR-binding peptide
  MOD_RES (2)..(3): Xaa is C or S
PXXAPTQLEPISVLYLDDSSNVIKFKYEN

SEQ ID NO: 35129 - protein, 30 aa, Artificial Sequence; identical to SEQ ID NO: 6758
  Cyclic GFR-binding peptide
  MOD_RES (30)..(30): Xaa is C or S

SEQ ID NO: 35130 - protein, 41 aa, Artificial Sequence
  Cyclic GFR-binding peptide
  MOD_RES (5)..(6)..(38)..(40): Xaa is C or S
APASXXVPARLEPISILYLDAANNVVKFKYEDMVVEAXGXR

SEQ ID NO: 35131 - protein, 38 aa, Artificial Sequence
  Cyclic GFR-binding peptide
  MOD_RES (2)..(3)..(36)..(38): Xaa is C or S
AXXVPTKLEPISVLYLDDMGVPTKFKYEEGMSVAEXGX

SEQ ID NO: 35132 - protein, 29 aa, Artificial Sequence
  Cyclic GFR-binding peptide
  MOD_RES (1)..(2): Xaa is C or S
XXVPTKLNAISVLYFDDMGVPTLKKYREG

SEQ ID NO: 35133 - protein, 27 aa, Artificial Sequence
  Cyclic GFR-binding peptide
VPQALEPISILYLVGRKPKVKFKYEMI

SEQ ID NO: 35134 - protein, 29 aa, Artificial Sequence
  Cyclic GFR-binding peptide
KLNAISVLYFDDMGVPTLKKYREGMSVAE

SEQ ID NO: 35135 - protein, 40 aa, Artificial Sequence
  Cyclic GFR-binding peptide
  MOD_RES (4)..(5)..(37)..(39): Xaa is C or S
PASXXVPARLSPISILYKDAANNVVLKYHYDMVVEAXGXR

SEQ ID NO: 35136 - protein, 34 aa, Artificial Sequence
  Cyclic GFR-binding peptide
  MOD_RES (2)..(3): Xaa is C or S
PXXAPTQLSPISVLYIDDSSNVIYKQYENMVVRA

SEQ ID NO: 35137 - protein, 27 aa, Artificial Sequence
  Cyclic GFR-binding peptide
  MOD_RES (27)..(27): Xaa is C or S
LSPISILYKVGRTPKVLKYHYMVVKSX

SEQ ID NO: 35138 - protein, 32 aa, Artificial Sequence
  Cyclic GFR-binding peptide
  MOD_RES (2)..(3): Xaa is C or S
PXXAPTQLSPISVLYIDDSSNVIYKQYENMVV

SEQ ID NO: 35139 - protein, 30 aa, Artificial Sequence
  Cyclic GFR-binding peptide
  MOD_RES (4)..(5): Xaa is C or S
PKAXXAPTKLEPISVLYLDSSNNVIKFKYE

SEQ ID NO: 35140 - protein, 26 aa, Artificial Sequence
  Cyclic GFR-binding peptide
KLNAISVLYFDDMGVPTLKKYREGMS

SEQ ID NO: 35141 - protein, 32 aa, Artificial Sequence; identical to SEQ ID NO: 6764
  Cyclic GFR-binding peptide
  MOD_RES (29)..(31): Xaa is C or S

SEQ ID NO: 35142 - protein, 25 aa, Artificial Sequence
  Cyclic GFR-binding peptide
SPISILYIVGRTPKVYKQYEMVVKS

SEQ ID NO: 35143 - protein, 28 aa, Artificial Sequence
  Cyclic GFR-binding peptide
  MOD_RES (27)..(27): Xaa is C or S
NAISMLYFDENEKVVLKKYRDMVVEGXG

SEQ ID NO: 35144 - protein, 20 aa, Artificial Sequence
  Cyclic GFR-binding peptide
NAISVLYFDDMGVPTLKKYR

SEQ ID NO: 35145 - protein, 36 aa, Artificial Sequence; identical to SEQ ID NO: 6769
  Cyclic GFR-binding peptide
  MOD_RES (3)..(35): Xaa is C or S

SEQ ID NO: 35146 - protein, 30 aa, Artificial Sequence
  Cyclic GFR-binding peptide
  MOD_RES (2)..(3): Xaa is C or S
PXXAPTKLEPISVLYLDDSSNVIKFKYENM

SEQ ID NO: 35147 - protein, 29 aa, Artificial Sequence
  Cyclic GFR-binding peptide
  MOD_RES (1)..(2): Xaa is C or S
XXVPARLNAISILYFDAANNVVLKKYRDM

SEQ ID NO: 35148 - protein, 25 aa, Artificial Sequence
  Cyclic GFR-binding peptide
APTKLEPISVLYLDSSNNVIKFKYE

SEQ ID NO: 35149 - protein, 41 aa, Artificial Sequence
  Cyclic GFR-binding peptide
  MOD_RES (4)..(5)..(38)..(40): Xaa is C or S
GKAXXVPTKLSPISVLYIDDMGVPTYKQYEEGMSVAEXGXR

SEQ ID NO: 35150 - protein, 36 aa, Artificial Sequence
  Cyclic GFR-binding peptide
  MOD_RES (1)..(33)..(35): Xaa is C or S
XVPARLEPISILYLDAANNVVKFKYEDMVVEAXGXR

SEQ ID NO: 35151 - protein, 27 aa, Artificial Sequence
  Cyclic GFR-binding peptide
LSPISVLYIDDSSNVIYKQYENMVVRS

SEQ ID NO: 35152 - protein, 25 aa, Artificial Sequence
  Cyclic GFR-binding peptide
PTKLSPISVLYKDDSSNVILKYHYN

SEQ ID NO: 35153 - protein, 26 aa, Artificial Sequence
  Cyclic GFR-binding peptide
PARLSPISILYKDAANNVVLKYHYDM

SEQ ID NO: 35154 - protein, 30 aa, Artificial Sequence
  Cyclic GFR-binding peptide
VPTKLSPISILYKDKGVVTYLKYHYGMAVS

SEQ ID NO: 35155 - protein, 33 aa, Artificial Sequence
  Cyclic GFR-binding peptide
  MOD_RES (6)..(7): Xaa is C or S
SIPKAXXVPTELSPISMLYIDEYDKVVYKQYEE

SEQ ID NO: 35156 - protein, 32 aa, Artificial Sequence
  Cyclic GFR-binding peptide
  MOD_RES (29)..(31): Xaa is C or S
QDLEPISILYLVGRTPKVKFKYEMVVKSXKXS

SEQ ID NO: 35157 - protein, 32 aa, Artificial Sequence
  Cyclic GFR-binding peptide
  MOD_RES (30)..(32): Xaa is C or S
TKLSPISILYKDKGVVTYLKYHYGMAVSEXGX

SEQ ID NO: 35158 - protein, 25 aa, Artificial Sequence
  Cyclic GFR-binding peptide
KLEPISVLYLDDSSNVIKFKYENMV

SEQ ID NO: 35159 - protein, 31 aa, Artificial Sequence; identical to SEQ ID NO: 6780
  Cyclic GFR-binding peptide
  MOD_RES (1)..(2): Xaa is C or S

SEQ ID NO: 35160 - protein, 30 aa, Artificial Sequence; identical to SEQ ID NO: 6782
  Cyclic GFR-binding peptide
  MOD_RES (1)..(1): Xaa is C or S

SEQ ID NO: 35161 - protein, 31 aa, Artificial Sequence
  Cyclic GFR-binding peptide
  MOD_RES (2)..(3): Xaa is C or S
PXXVPQDLSPISILYIVGRTPKVYKQYEMVV

SEQ ID NO: 35162 - protein, 42 aa, Artificial Sequence
  Cyclic GFR-binding peptide
  MOD_RES (5)..(6)..(39)..(41): Xaa is C or S
VGKAXXVPTKLSPISVLYIDDMGVPTYKQYEEGMSVAEXGXR

SEQ ID NO: 35163 - protein, 29 aa, Artificial Sequence
  Cyclic GFR-binding peptide
  MOD_RES (28)..(28): Xaa is C or S
LSPISVLYKDDSSNVILKYHYNMVVRAXG

SEQ ID NO: 35164 - protein, 33 aa, Artificial Sequence; identical to SEQ ID NO: 6787
  Cyclic GFR-binding peptide
  MOD_RES (3)..(4): Xaa is C or S

SEQ ID NO: 35165 - protein, 41 aa, Artificial Sequence; identical to SEQ ID NO: 6789
  Cyclic GFR-binding peptide
  MOD_RES (6)..(7)..(38)..(40): Xaa is C or S

SEQ ID NO: 35166 - protein, 31 aa, Artificial Sequence; identical to SEQ ID NO: 6792
  Cyclic GFR-binding peptide
  MOD_RES (1)..(1): Xaa is C or S

SEQ ID NO: 35167 - protein, 28 aa, Artificial Sequence
  Cyclic GFR-binding peptide
KLSPISVLYIDDSSNVIYKQYENMVVRS

SEQ ID NO: 35168 - protein, 33 aa, Artificial Sequence
  Cyclic GFR-binding peptide
  MOD_RES (1)..(2): Xaa is C or S
XXVPARLSPISILYKDAANNVVLKYHYDMVVEA

SEQ ID NO: 35169 - protein, 30 aa, Artificial Sequence
  Cyclic GFR-binding peptide
  MOD_RES (28)..(30): Xaa is C or S
LSPISMLYIDENEKVVYKQYEDMVVEGXGX

SEQ ID NO: 35170 - protein, 28 aa, Artificial Sequence
  Cyclic GFR-binding peptide
  MOD_RES (2)..(3): Xaa is C or S
SXXVPARLSPISILYKDAANNVVLKYHY

SEQ ID NO: 35171 - protein, 40 aa, Artificial Sequence
  Cyclic GFR-binding peptide
  MOD_RES (5)..(6)..(38)..(40): Xaa is C or S
ASKAXXVPTKLSPISILYIDKGVVTYYKQYEGMAVSEXGX

SEQ ID NO: 35172 - protein, 34 aa, Artificial Sequence
  Cyclic GFR-binding peptide
  MOD_RES (5)..(6): Xaa is C or S
VPKPXXAPTQLEPISVLYLDDSSNVIKFKYENMV

SEQ ID NO: 35173 - protein, 29 aa, Artificial Sequence
  Cyclic GFR-binding peptide
  MOD_RES (2)..(3): Xaa is C or S
PXXVPQALSPISILYIVGRKPKVYKQYEM

SEQ ID NO: 35174 - protein, 31 aa, Artificial Sequence
  Cyclic GFR-binding peptide
APTQLEPISVLYLDDSSNVIKFKYENMVVRA

SEQ ID NO: 35175 - protein, 30 aa, Artificial Sequence
  Cyclic GFR-binding peptide
  MOD_RES (1)..(1): Xaa is C or S
XAPTKLSPISVLYIDSSNNVIYKQYENMVV

SEQ ID NO: 35176 - protein, 37 aa, Artificial Sequence
  Cyclic GFR-binding peptide
  MOD_RES (2)..(34)..(36): Xaa is C or S
TXAPTKLSPISVLYIDDSSNVIYKQYENMVVRSXGXH

SEQ ID NO: 35177 - protein, 34 aa, Artificial Sequence
  Cyclic GFR-binding peptide
  MOD_RES (3)..(4): Xaa is C or S
KPXXAPTKLEPISVLYLDDSSNVIKFKYENMVVR

SEQ ID NO: 35178 - protein, 37 aa, Artificial Sequence; identical to SEQ ID NO: 6798
  Cyclic GFR-binding peptide
  MOD_RES (5)..(6): Xaa is C or S

SEQ ID NO: 35179 - protein, 31 aa, Artificial Sequence
  Cyclic GFR-binding peptide
VPTKLNAISILYFDKGVVTYLKKYRGMAVSE

SEQ ID NO: 35180 - protein, 33 aa, Artificial Sequence
  Cyclic GFR-binding peptide
  MOD_RES (1)..(33): Xaa is C or S
XAPTQLEPISVLYLDDSSNVIKFKYENMVVRAX

SEQ ID NO: 35181 - protein, 37 aa, Artificial Sequence
  Cyclic GFR-binding peptide
  MOD_RES (5)..(6): Xaa is C or S
IPKAXXVPTELSPISMLYIDENEKVVYKQYEDMVVEG

SEQ ID NO: 35182 - protein, 27 aa, Artificial Sequence
  Cyclic GFR-binding peptide
LSPISVLYIDDSSNVIYKQYENMVVRA

SEQ ID NO: 35183 - protein, 37 aa, Artificial Sequence; identical to SEQ ID NO: 6803
  Cyclic GFR-binding peptide
  MOD_RES (6)..(7): Xaa is C or S

SEQ ID NO: 35184 - protein, 37 aa, Artificial Sequence
  Cyclic GFR-binding peptide
  MOD_RES (4)..(5)..(37): Xaa is C or S
PKPXXAPTKLEPISVLYLDDSSNVIKFKYENMVVRSX

SEQ ID NO: 35185 - protein, 33 aa, Artificial Sequence
  Cyclic GFR-binding peptide
  MOD_RES (5)..(6): Xaa is C or S
VPKPXXAPTKLEPISVLYLDDSSNVIKFKYENM

SEQ ID NO: 35186 - protein, 28 aa, Artificial Sequence
  Cyclic GFR-binding peptide
VPTELSPISMLYIDENEKVVYKQYEDMV

SEQ ID NO: 35187 - protein, 29 aa, Artificial Sequence
  Cyclic GFR-binding peptide
  MOD_RES (2)..(3): Xaa is C or S
AXXVPTKLNAISILYFDKGVVTYLKKYRG

SEQ ID NO: 35188 - protein, 26 aa, Artificial Sequence
  Cyclic GFR-binding peptide
VPTKLEPISVLYLDDMGVPTKFKYEE

SEQ ID NO: 35189 - protein, 39 aa, Artificial Sequence; identical to SEQ ID NO: 6808
  Cyclic GFR-binding peptide
  MOD_RES (5)..(6)..(38): Xaa is C or S

SEQ ID NO: 35190 - protein, 28 aa, Artificial Sequence
  Cyclic GFR-binding peptide
KLSPISVLYKDDSSNVILKYHYNMVVRS

SEQ ID NO: 35191 - protein, 28 aa, Artificial Sequence
  Cyclic GFR-binding peptide
  MOD_RES (28)..(28): Xaa is C or S
LEPISVLYLDDSSNVIKFKYENMVVRSX

SEQ ID NO: 35192 - protein, 35 aa, Artificial Sequence
  Cyclic GFR-binding peptide
  MOD_RES (4)..(5): Xaa is C or S
PKAXXVPTELEPISMLYLDEYDKVVKFKYEEMVVE

SEQ ID NO: 35193 - protein, 24 aa, Artificial Sequence
  Cyclic GFR-binding peptide
KLEPISVLYLDSSNNVIKFKYENM

SEQ ID NO: 35194 - protein, 26 aa, Artificial Sequence
  Cyclic GFR-binding peptide
TQLEPISVLYLDDSSNVIKFKYENMV

SEQ ID NO: 35195 - protein, 29 aa, Artificial Sequence
  Cyclic GFR-binding peptide
VPQALSPISILYKVGRKPKVLKYHYMIVR

SEQ ID NO: 35196 - protein, 24 aa, Artificial Sequence
  Cyclic GFR-binding peptide
SPISILYKVGRKPKVLKYHYMIVR

SEQ ID NO: 35197 - protein, 25 aa, Artificial Sequence
  Cyclic GFR-binding peptide
SPISILYIDKGVVTYYKQYEGMAVS

SEQ ID NO: 35198 - protein, 29 aa, Artificial Sequence
  Cyclic GFR-binding peptide
  MOD_RES (29)..(29): Xaa is C or S
KLSPISVLYIDSSNNVIYKQYENMVVKAX

SEQ ID NO: 35199 - protein, 30 aa, Artificial Sequence
  Cyclic GFR-binding peptide
PTQLSPISVLYIDDSSNVIYKQYENMVVRA

SEQ ID NO: 35200 - protein, 35 aa, Artificial Sequence; identical to SEQ ID NO: 6818
  Cyclic GFR-binding peptide
  MOD_RES (1)..(32)..(34): Xaa is C or S

SEQ ID NO: 35201 - protein, 28 aa, Artificial Sequence
  Cyclic GFR-binding peptide
  MOD_RES (1)..(2): Xaa is C or S
XXVPQDLNAISILYFVGRTPKVLKKYRM

SEQ ID NO: 35202 - protein, 32 aa, Artificial Sequence; identical to SEQ ID NO: 6822
  Cyclic GFR-binding peptide
  MOD_RES (29)..(31): Xaa is C or S

SEQ ID NO: 35203 - protein, 37 aa, Artificial Sequence; identical to SEQ ID NO: 6824
  Cyclic GFR-binding peptide
  MOD_RES (5)..(6): Xaa is C or S

SEQ ID NO: 35204 - protein, 28 aa, Artificial Sequence
  Cyclic GFR-binding peptide
  MOD_RES (28)..(28): Xaa is C or S
LEPISMLYLDENEKVVKFKYEDMVVEGX

SEQ ID NO: 35205 - protein, 28 aa, Artificial Sequence
  Cyclic GFR-binding peptide
  MOD_RES (1)..(2): Xaa is C or S
XXVPQALSPISILYKVGRKPKVLKYHYM

SEQ ID NO: 35206 - protein, 34 aa, Artificial Sequence
  Cyclic GFR-binding peptide
  MOD_RES (31)..(33): Xaa is C or S
PARLNAISILYFDAANNVVLKKYRDMVVEAXGXR

SEQ ID NO: 35207 - protein, 31 aa, Artificial Sequence
  Cyclic GFR-binding peptide
  MOD_RES (3)..(4): Xaa is C or S
KAXXAPTKLEPISVLYLDSSNNVIKFKYENM

SEQ ID NO: 35208 - protein, 28 aa, Artificial Sequence
  Cyclic GFR-binding peptide
QLEPISVLYLDDSSNVIKFKYENMVVRA

SEQ ID NO: 35209 - protein, 33 aa, Artificial Sequence
  Cyclic GFR-binding peptide
  MOD_RES (6)..(7): Xaa is C or S
ASAAPXXVPQALSPISILYIVGRKPKVYKQYEM

SEQ ID NO: 35210 - protein, 31 aa, Artificial Sequence; identical to SEQ ID NO: 6831
  Cyclic GFR-binding peptide
  MOD_RES (1)..(1): Xaa is C or S

SEQ ID NO: 35211 - protein, 29 aa, Artificial Sequence
  Cyclic GFR-binding peptide
  MOD_RES (28)..(28): Xaa is C or S
LEPISVLYLDDSSNVIKFKYENMVVRSXG

SEQ ID NO: 35212 - protein, 32 aa, Artificial Sequence
  Cyclic GFR-binding peptide
  MOD_RES (2)..(3): Xaa is C or S
SXXVPARLSPISILYKDAANNVVLKYHYDMVV

SEQ ID NO: 35213 - protein, 27 aa, Artificial Sequence
  Cyclic GFR-binding peptide
VPARLEPISILYLDAANNVVKFKYEDM

SEQ ID NO: 35214 - protein, 34 aa, Artificial Sequence; identical to SEQ ID NO: 6839
  Cyclic GFR-binding peptide
  MOD_RES (5)..(6): Xaa is C or S

SEQ ID NO: 35215 - protein, 26 aa, Artificial Sequence
  Cyclic GFR-binding peptide
DLSPISILYIVGRTPKVYKQYEMVVK

SEQ ID NO: 35216 - protein, 35 aa, Artificial Sequence
  Cyclic GFR-binding peptide
  MOD_RES (32)..(34): Xaa is C or S
VPARLEPISILYLDAANNVVKFKYEDMVVEAXGXR

SEQ ID NO: 35217 - protein, 32 aa, Artificial Sequence
  Cyclic GFR-binding peptide
  MOD_RES (31)..(31): Xaa is C or S
TKLEPISVLYLDDMGVPTKFKYEEGMSVAEXG

SEQ ID NO: 35218 - protein, 40 aa, Artificial Sequence
  Cyclic GFR-binding peptide
  MOD_RES (5)..(6)..(38)..(40): Xaa is C or S
APASXXVPARLSPISILYKDAANNVVLKYHYDMVVEAXGX

SEQ ID NO: 35219 - protein, 29 aa, Artificial Sequence
  Cyclic GFR-binding peptide
  MOD_RES (28)..(28): Xaa is C or S
LNAISMLYFDENEKVVLKKYRDMVVEGXG

SEQ ID NO: 35220 - protein, 30 aa, Artificial Sequence; identical to SEQ ID NO: 6854
  Cyclic GFR-binding peptide

SEQ ID NO: 35221 - protein, 32 aa, Artificial Sequence; identical to SEQ ID NO: 6855
  Cyclic GFR-binding peptide
  MOD_RES (3)..(4): Xaa is C or S

SEQ ID NO: 35222 - protein, 36 aa, Artificial Sequence; identical to SEQ ID NO: 6856
  Cyclic GFR-binding peptide
  MOD_RES (6)..(7): Xaa is C or S

SEQ ID NO: 35223 - protein, 30 aa, Artificial Sequence
  Cyclic GFR-binding peptide
  MOD_RES (1)..(1): Xaa is C or S
XVPTELSPISMLYIDENEKVVYKQYEDMVV

SEQ ID NO: 35224 - protein, 34 aa, Artificial Sequence
  Cyclic GFR-binding peptide
  MOD_RES (6)..(7): Xaa is C or S
AVPKAXXAPTKLEPISVLYLDSSNNVIKFKYENM

SEQ ID NO: 35225 - protein, 29 aa, Artificial Sequence
  Cyclic GFR-binding peptide
  MOD_RES (2)..(3): Xaa is C or S
PXXAPTQLSPISVLYKDDSSNVILKYHYN

SEQ ID NO: 35226 - protein, 36 aa, Artificial Sequence; identical to SEQ ID NO: 6863
  Cyclic GFR-binding peptide
  MOD_RES (2)..(34)..(36): Xaa is C or S

SEQ ID NO: 35227 - protein, 38 aa, Artificial Sequence; identical to SEQ ID NO: 6865
  Cyclic GFR-binding peptide
  MOD_RES (5)..(6)..(38): Xaa is C or S

SEQ ID NO: 35228 - protein, 21 aa, Artificial Sequence
  Cyclic GFR-binding peptide
NAISMLYFDENEKVVLKKYRD

SEQ ID NO: 35229 - protein, 30 aa, Artificial Sequence; identical to SEQ ID NO: 6867
  Cyclic GFR-binding peptide
  MOD_RES (28)..(30): Xaa is C or S

SEQ ID NO: 35230 - protein, 28 aa, Artificial Sequence
  Cyclic GFR-binding peptide
  MOD_RES (1)..(1): Xaa is C or S
XVPTKLSPISILYKDKGVVTYLKYHYGM

SEQ ID NO: 35231 - protein, 35 aa, Artificial Sequence
  Cyclic GFR-binding peptide
  MOD_RES (3)..(4): Xaa is C or S
KPXXAPTKLEPISVLYLDDSSNVIKFKYENMVVRS

SEQ ID NO: 35232 - protein, 23 aa, Artificial Sequence
  Cyclic GFR-binding peptide
TQLEPISVLYLDDSSNVIKFKYE

SEQ ID NO: 35233 - protein, 32 aa, Artificial Sequence; identical to SEQ ID NO: 6869
  Cyclic GFR-binding peptide
  MOD_RES (1)..(2): Xaa is C or S

SEQ ID NO: 35234 - protein, 38 aa, Artificial Sequence
  Cyclic GFR-binding peptide
  MOD_RES (4)..(5)..(37): Xaa is C or S
PASXXVPARLEPISILYLDAANNVVKFKYEDMVVEAXG

SEQ ID NO: 35235 - protein, 32 aa, Artificial Sequence
  Cyclic GFR-binding peptide
  MOD_RES (1)..(2): Xaa is C or S
XXVPQALEPISILYLVGRKPKVKFKYEMIVRS

SEQ ID NO: 35236 - protein, 38 aa, Artificial Sequence
  Cyclic GFR-binding peptide
  MOD_RES (2)..(3)..(35)..(37): Xaa is C or S
AXXVPTKLSPISILYKDKGVVTYLKYHYGMAVSEXGXR

SEQ ID NO: 35237 - protein, 31 aa, Artificial Sequence
  Cyclic GFR-binding peptide
  MOD_RES (5)..(6): Xaa is C or S
SASPXXVPQDLSPISILYIVGRTPKVYKQYE

SEQ ID NO: 35238 - protein, 36 aa, Artificial Sequence; identical to SEQ ID NO: 6871
  Cyclic GFR-binding peptide
  MOD_RES (4)..(5): Xaa is C or S

SEQ ID NO: 35239 - protein, 32 aa, Artificial Sequence
  Cyclic GFR-binding peptide
  MOD_RES (4)..(5): Xaa is C or S
PKPXXAPTKLEPISVLYLDDSSNVIKFKYENM

SEQ ID NO: 35240 - protein, 22 aa, Artificial Sequence
  Cyclic GFR-binding peptide
DLSPISILYIVGRTPKVYKQYE

SEQ ID NO: 35241 - protein, 27 aa, Artificial Sequence
  Cyclic GFR-binding peptide
APTKLEPISVLYLDSSNNVIKFKYENM

SEQ ID NO: 35242 - protein, 30 aa, Artificial Sequence; identical to SEQ ID NO: 6872
  Cyclic GFR-binding peptide
  MOD_RES (3)..(4): Xaa is C or S

SEQ ID NO: 35243 - protein, 34 aa, Artificial Sequence
  Cyclic GFR-binding peptide
  MOD_RES (4)..(5): Xaa is C or S
PKAXXVPTELSPISMLYIDENEKVVYKQYEDMVV

SEQ ID NO: 35244 - protein, 41 aa, Artificial Sequence
  Cyclic GFR-binding peptide
  MOD_RES (4)..(5)..(38)..(40): Xaa is C or S
GKAXXVPTKLEPISVLYLDDMGVPTKFKYEEGMSVAEXGXR

SEQ ID NO: 35245 - protein, 34 aa, Artificial Sequence
  Cyclic GFR-binding peptide
  MOD_RES (4)..(5): Xaa is C or S
SKAXXVPTKLSPISILYKDKGVVTYLKYHYGMAV

SEQ ID NO: 35246 - protein, 20 aa, Artificial Sequence
  Cyclic GFR-binding peptide
EPISVLYLDDMGVPTKFKYE

SEQ ID NO: 35247 - protein, 24 aa, Artificial Sequence
  Cyclic GFR-binding peptide
ELNAISMLYFDEYDKVVLKKYREM

SEQ ID NO: 35248 - protein, 33 aa, Artificial Sequence; identical to SEQ ID NO: 6880
  Cyclic GFR-binding peptide
  MOD_RES (1)..(2): Xaa is C or S

SEQ ID NO: 35249 - protein, 34 aa, Artificial Sequence; identical to SEQ ID NO: 6881
  Cyclic GFR-binding peptide
  MOD_RES (1)..(2)..(33): Xaa is C or S

SEQ ID NO: 35250 - protein, 29 aa, Artificial Sequence
  Cyclic GFR-binding peptide
PTKLSPISVLYKDSSNNVILKYHYNMVVK

SEQ ID NO: 35251 - protein, 28 aa, Artificial Sequence
  Cyclic GFR-binding peptide
  MOD_RES (28)..(28): Xaa is C or S
LNAISMLYFDENEKVVLKKYRDMVVEGX

SEQ ID NO: 35252 - protein, 30 aa, Artificial Sequence; identical to SEQ ID NO: 6885
  Cyclic GFR-binding peptide

SEQ ID NO: 35253 - protein, 21 aa, Artificial Sequence
  Cyclic GFR-binding peptide
SPISILYKIGKTPKILKYHYM

SEQ ID NO: 35254 - protein, 30 aa, Artificial Sequence; identical to SEQ ID NO: 6888
  Cyclic GFR-binding peptide
  MOD_RES (1)..(2): Xaa is C or S

SEQ ID NO: 35255 - protein, 27 aa, Artificial Sequence
  Cyclic GFR-binding peptide
PTQLSPISVLYIDDSSNVIYKQYENMV

SEQ ID NO: 35256 - protein, 28 aa, Artificial Sequence
  Cyclic GFR-binding peptide
  MOD_RES (27)..(27): Xaa is C or S
SPISVLYKDDSSNVILKYHYNMVVRAXG

SEQ ID NO: 35257 - protein, 32 aa, Artificial Sequence
  Cyclic GFR-binding peptide
  MOD_RES (6)..(7): Xaa is C or S
KIPKAXXVPTELEPISMLYLDENEKVVKFKYE

SEQ ID NO: 35258 - protein, 25 aa, Artificial Sequence
  Cyclic GFR-binding peptide
DLSPISILYKIGKTPKILKYHYMIV

SEQ ID NO: 35259 - protein, 35 aa, Artificial Sequence
  Cyclic GFR-binding peptide
  MOD_RES (3)..(4)..(35): Xaa is C or S
SPXXVPQDLSPISILYIVGRTPKVYKQYEMVVKSX

SEQ ID NO: 35260 - protein, 25 aa, Artificial Sequence
  Cyclic GFR-binding peptide
SQDLSPISILYIIGKTPKIYKQYEM

SEQ ID NO: 35261 - protein, 21 aa, Artificial Sequence
  Cyclic GFR-binding peptide
NAISILYFDAANNVVLKKYRD

SEQ ID NO: 35262 - protein, 34 aa, Artificial Sequence; identical to SEQ ID NO: 6893
  Cyclic GFR-binding peptide
  MOD_RES (4)..(5): Xaa is C or S

SEQ ID NO: 35263 - protein, 30 aa, Artificial Sequence; identical to SEQ ID NO: 6894
  Cyclic GFR-binding peptide

SEQ ID NO: 35264 - protein, 25 aa, Artificial Sequence
  Cyclic GFR-binding peptide
VPTELNAISMLYFDENEKVVLKKYR

SEQ ID NO: 35265 - protein, 23 aa, Artificial Sequence
  Cyclic GFR-binding peptide
ALSPISILYKVGRKPKVLKYHYM

SEQ ID NO: 35266 - protein, 26 aa, Artificial Sequence
  Cyclic GFR-binding peptide
  MOD_RES (1)..(1): Xaa is C or S
XAPTKLEPISVLYLDSSNNVIKFKYE

SEQ ID NO: 35267 - protein, 30 aa, Artificial Sequence; identical to SEQ ID NO: 6898
  Cyclic GFR-binding peptide
  MOD_RES (1)..(2): Xaa is C or S

SEQ ID NO: 35268 - protein, 34 aa, Artificial Sequence
  Cyclic GFR-binding peptide
  MOD_RES (2)..(3): Xaa is C or S
AXXVPTKLSPISILYIDKGVVTYYKQYEGMAVSE

SEQ ID NO: 35269 - protein, 24 aa, Artificial Sequence
  Cyclic GFR-binding peptide
TKLSPISVLYKDDSSNVILKYHYN

SEQ ID NO: 35270 - protein, 33 aa, Artificial Sequence; identical to SEQ ID NO: 6902
  Cyclic GFR-binding peptide
  MOD_RES (3)..(4): Xaa is C or S

SEQ ID NO: 35271 - protein, 27 aa, Artificial Sequence
  Cyclic GFR-binding peptide
  MOD_RES (27)..(27): Xaa is C or S
NAISILYFDKGVVTYLKKYRGMAVSEX

SEQ ID NO: 35272 - protein, 29 aa, Artificial Sequence
  Cyclic GFR-binding peptide
  MOD_RES (2)..(3): Xaa is C or S
SXXVPARLNAISILYFDAANNVVLKKYRD

SEQ ID NO: 35273 - protein, 33 aa, Artificial Sequence
  Cyclic GFR-binding peptide
  MOD_RES (1)..(32): Xaa is C or S
XVPQALSPISILYIVGRKPKVYKQYEMIVRSXK

SEQ ID NO: 35274 - protein, 34 aa, Artificial Sequence; identical to SEQ ID NO: 6903
  Cyclic GFR-binding peptide
  MOD_RES (4)..(4): Xaa is C or S

SEQ ID NO: 35275 - protein, 24 aa, Artificial Sequence
  Cyclic GFR-binding peptide
EPISVLYLDDSSNVIKFKYENMVV

SEQ ID NO: 35276 - protein, 26 aa, Artificial Sequence
  Cyclic GFR-binding peptide
APTKLEPISVLYLDDSSNVIKFKYEN

SEQ ID NO: 35277 - protein, 25 aa, Artificial Sequence
  Cyclic GFR-binding peptide
NAISMLYFDENEKVVLKKYRDMVVE

SEQ ID NO: 35278 - protein, 33 aa, Artificial Sequence
  Cyclic GFR-binding peptide
  MOD_RES (3)..(4): Xaa is C or S
SPXXVPQDLSPISILYIVGRTPKVYKQYEMVVK

SEQ ID NO: 35279 - protein, 37 aa, Artificial Sequence
  Cyclic GFR-binding peptide
  MOD_RES (5)..(6)..(37): Xaa is C or S
SAAPXXVPQALEPISILYLVGRKPKVKFKYEMIVRSX

SEQ ID NO: 35280 - protein, 25 aa, Artificial Sequence
  Cyclic GFR-binding peptide
TELSPISMLYKDENEKVVLKYHYDM

SEQ ID NO: 35281 - protein, 32 aa, Artificial Sequence
  Cyclic GFR-binding peptide
  MOD_RES (3)..(4): Xaa is C or S
ASXXVPARLSPISILYKDAANNVVLKYHYDMV

SEQ ID NO: 35282 - protein, 34 aa, Artificial Sequence
  Cyclic GFR-binding peptide
  MOD_RES (32)..(34): Xaa is C or S
APTQLEPISVLYLDDSSNVIKFKYENMVVRAXGX

SEQ ID NO: 35283 - protein, 28 aa, Artificial Sequence
  Cyclic GFR-binding peptide
VSQDLNAISILYFIGKTPKILKKYRMIV

SEQ ID NO: 35284 - protein, 29 aa, Artificial Sequence
  Cyclic GFR-binding peptide
VPTELSPISMLYIDENEKVVYKQYEDMVV

SEQ ID NO: 35285 - protein, 28 aa, Artificial Sequence
  Cyclic GFR-binding peptide
  MOD_RES (1)..(1): Xaa is C or S
XVPARLNAISILYFDAANNVVLKKYRDM

SEQ ID NO: 35286 - protein, 30 aa, Artificial Sequence
  Cyclic GFR-binding peptide
  MOD_RES (30)..(30): Xaa is C or S
TKLEPISVLYLDSSNNVIKFKYENMVVKAX

SEQ ID NO: 35287 - protein, 32 aa, Artificial Sequence
  Cyclic GFR-binding peptide
  MOD_RES (3)..(3): Xaa is C or S
PTXAPTKLEPISVLYLDDSSNVIKFKYENMVV

SEQ ID NO: 35288 - protein, 31 aa, Artificial Sequence
  Cyclic GFR-binding peptide
  MOD_RES (1)..(2): Xaa is C or S
XXVPQDLSPISILYIVGRTPKVYKQYEMVVK

SEQ ID NO: 35289 - protein, 25 aa, Artificial Sequence
  Cyclic GFR-binding peptide
VPTKLSPISVLYIDDMGVPTYKQYE

SEQ ID NO: 35290 - protein, 40 aa, Artificial Sequence
  Cyclic GFR-binding peptide
  MOD_RES (6)..(7)..(38)..(40): Xaa is C or S
ASASPXXVPQDLEPISILYLVGRTPKVKFKYEMVVKSXKX

SEQ ID NO: 35291 - protein, 32 aa, Artificial Sequence
  Cyclic GFR-binding peptide
  MOD_RES (30)..(32): Xaa is C or S
TELSPISMLYIDEYDKVVYKQYEEMVVEGXGX

SEQ ID NO: 35292 - protein, 36 aa, Artificial Sequence; identical to SEQ ID NO: 6918
  Cyclic GFR-binding peptide
  MOD_RES (1)..(2)..(34)..(36): Xaa is C or S

SEQ ID NO: 35293 - protein, 31 aa, Artificial Sequence; identical to SEQ ID NO: 6919
  Cyclic GFR-binding peptide
  MOD_RES (31)..(31): Xaa is C or S

SEQ ID NO: 35294 - protein, 28 aa, Artificial Sequence
  Cyclic GFR-binding peptide
  MOD_RES (28)..(28): Xaa is C or S
LEPISMLYLDEYDKVVKFKYEEMVVEGX

SEQ ID NO: 35295 - protein, 32 aa, Artificial Sequence
  Cyclic GFR-binding peptide
  MOD_RES (31)..(31): Xaa is C or S
PARLSPISILYKDAANNVVLKYHYDMVVEAXG

SEQ ID NO: 35296 - protein, 35 aa, Artificial Sequence
  Cyclic GFR-binding peptide
  MOD_RES (1)..(33)..(35): Xaa is C or S
XVPTKLNAISILYFDKGVVTYLKKYRGMAVSEXGX

SEQ ID NO: 35297 - protein, 32 aa, Artificial Sequence
  Cyclic GFR-binding peptide
  MOD_RES (29)..(31): Xaa is C or S
LEPISVLYLDDMGVPTKFKYEEGMSVAEXGXR

SEQ ID NO: 35298 - protein, 30 aa, Artificial Sequence
  Cyclic GFR-binding peptide
VPARLSPISILYKDAANNVVLKYHYDMVVE

SEQ ID NO: 35299 - protein, 35 aa, Artificial Sequence
  Cyclic GFR-binding peptide
  MOD_RES (2)..(3): Xaa is C or S
AXXVPTKLEPISVLYLDDMGVPTKFKYEEGMSVAE

SEQ ID NO: 35300 - protein, 30 aa, Artificial Sequence
  Cyclic GFR-binding peptide
  MOD_RES (1)..(1): Xaa is C or S
XVPQDLEPISILYLVGRTPKVKFKYEMVVK

SEQ ID NO: 35301 - protein, 32 aa, Artificial Sequence; identical to SEQ ID NO: 6924
  Cyclic GFR-binding peptide
  MOD_RES (5)..(6): Xaa is C or S

SEQ ID NO: 35302 - protein, 29 aa, Artificial Sequence
  Cyclic GFR-binding peptide
  MOD_RES (3)..(4): Xaa is C or S
ASXXVPARLEPISILYLDAANNVVKFKYE

SEQ ID NO: 35303 - protein, 32 aa, Artificial Sequence
  Cyclic GFR-binding peptide
  MOD_RES (30)..(32): Xaa is C or S
PQALEPISILYLVGRKPKVKFKYEMIVRSXKX

SEQ ID NO: 35304 - protein, 29 aa, Artificial Sequence
  Cyclic GFR-binding peptide
PQDLSPISILYIVGRTPKVYKQYEMVVKS

SEQ ID NO: 35305 - protein, 32 aa, Artificial Sequence
  Cyclic GFR-binding peptide
  MOD_RES (6)..(7): Xaa is C or S
TVPKPXXAPTQLSPISVLYIDDSSNVIYKQYE

SEQ ID NO: 35306 - protein, 32 aa, Artificial Sequence
  Cyclic GFR-binding peptide
  MOD_RES (4)..(5): Xaa is C or S
PKAXXVPTELSPISMLYIDENEKVVYKQYEDM

SEQ ID NO: 35307 - protein, 36 aa, Artificial Sequence
  Cyclic GFR-binding peptide
  MOD_RES (5)..(6): Xaa is C or S
IPKAXXVPTELEPISMLYLDENEKVVKFKYEDMVVE

SEQ ID NO: 35308 - protein, 28 aa, Artificial Sequence
  Cyclic GFR-binding peptide
VSQDLEPISILYLIGKTPKIKFKYEMIV

SEQ ID NO: 35309 - protein, 32 aa, Artificial Sequence; identical to SEQ ID NO: 6930
  Cyclic GFR-binding peptide
  MOD_RES (2)..(3): Xaa is C or S

SEQ ID NO: 35310 - protein, 35 aa, Artificial Sequence; identical to SEQ ID NO: 6935
  Cyclic GFR-binding peptide
  MOD_RES (2)..(3)..(35): Xaa is C or S

SEQ ID NO: 35311 - protein, 31 aa, Artificial Sequence; identical to SEQ ID NO: 6936
  Cyclic GFR-binding peptide
  MOD_RES (31)..(31): Xaa is C or S

SEQ ID NO: 35312 - protein, 26 aa, Artificial Sequence
  Cyclic GFR-binding peptide
  MOD_RES (1)..(1): Xaa is C or S
XVSQDLSPISILYIIGKTPKIYKQYE

SEQ ID NO: 35313 - protein, 28 aa, Artificial Sequence
  Cyclic GFR-binding peptide
  MOD_RES (2)..(3): Xaa is C or S
PXXVPQALNAISILYFVGRKPKVLKKYR

SEQ ID NO: 35314 - protein, 29 aa, Artificial Sequence
  Cyclic GFR-binding peptide
  MOD_RES (2)..(3): Xaa is C or S
AXXVPTELSPISMLYKDEYDKVVLKYHYE

SEQ ID NO: 35315 - protein, 36 aa, Artificial Sequence
  Cyclic GFR-binding peptide
  MOD_RES (1)..(2)..(34)..(36): Xaa is C or S
XXVPTELEPISMLYLDENEKVVKFKYEDMVVEGXGX

SEQ ID NO: 35316 - protein, 29 aa, Artificial Sequence
  Cyclic GFR-binding peptide
  MOD_RES (29)..(29): Xaa is C or S
ELSPISMLYKDEYDKVVLKYHYEMVVEGX

SEQ ID NO: 35317 - protein, 34 aa, Artificial Sequence; identical to SEQ ID NO: 6940
  Cyclic GFR-binding peptide
  MOD_RES (4)..(5): Xaa is C or S

SEQ ID NO: 35318 - protein, 28 aa, Artificial Sequence
  Cyclic GFR-binding peptide
QDLSPISILYKIGKTPKILKYHYMIVKS

SEQ ID NO: 35319 - protein, 34 aa, Artificial Sequence
  Cyclic GFR-binding peptide
  MOD_RES (3)..(4): Xaa is C or S
KAXXVPTELSPISMLYIDEYDKVVYKQYEEMVVE

SEQ ID NO: 35320 - protein, 39 aa, Artificial Sequence; identical to SEQ ID NO: 6945
  Cyclic GFR-binding peptide
  MOD_RES (4)..(5)..(36)..(38): Xaa is C or S

SEQ ID NO: 35321 - protein, 32 aa, Artificial Sequence
  Cyclic GFR-binding peptide
  MOD_RES (29)..(31): Xaa is C or S
QDLSPISILYIIGKTPKIYKQYEMIVKSXKXS

SEQ ID NO: 35322 - protein, 27 aa, Artificial Sequence
  Cyclic GFR-binding peptide
  MOD_RES (26)..(26): Xaa is C or S
SPISILYIVGRTPKVYKQYEMVVKSXK

SEQ ID NO: 35323 - protein, 33 aa, Artificial Sequence
  Cyclic GFR-binding peptide
  MOD_RES (31)..(33): Xaa is C or S
VPQALEPISILYLVGRKPKVKFKYEMIVRSXKX

SEQ ID NO: 35324 - protein, 37 aa, Artificial Sequence
  Cyclic GFR-binding peptide
  MOD_RES (5)..(6)..(37): Xaa is C or S
SAAPXXVPQALSPISILYIVGRKPKVYKQYEMIVRSX

SEQ ID NO: 35325 - protein, 33 aa, Artificial Sequence
  Cyclic GFR-binding peptide
  MOD_RES (31)..(33): Xaa is C or S
PTKLSPISILYIDKGVVTYYKQYEGMAVSEXGX

SEQ ID NO: 35326 - protein, 33 aa, Artificial Sequence; identical to SEQ ID NO: 6948
  Cyclic GFR-binding peptide
  MOD_RES (31)..(33): Xaa is C or S

SEQ ID NO: 35327 - protein, 37 aa, Artificial Sequence; identical to SEQ ID NO: 6949
  Cyclic GFR-binding peptide
  MOD_RES (2)..(3)..(36): Xaa is C or S

SEQ ID NO: 35328 - protein, 33 aa, Artificial Sequence
  Cyclic GFR-binding peptide
  MOD_RES (1)..(33): Xaa is C or S
XVPTELEPISMLYLDENEKVVKFKYEDMVVEGX

SEQ ID NO: 35329 - protein, 35 aa, Artificial Sequence
  Cyclic GFR-binding peptide
  MOD_RES (4)..(5): Xaa is C or S
PKPXXAPTQLEPISVLYLDDSSNVIKFKYENMVVR

SEQ ID NO: 35330 - protein, 29 aa, Artificial Sequence
  Cyclic GFR-binding peptide
  MOD_RES (26)..(28): Xaa is C or S
EPISILYLVGRTPKVKFKYEMVVKSXKXS

SEQ ID NO: 35331 - protein, 31 aa, Artificial Sequence
  Cyclic GFR-binding peptide
  MOD_RES (1)..(2): Xaa is C or S
XXVPTKLSPISVLYIDDMGVPTYKQYEEGMS

SEQ ID NO: 35332 - protein, 30 aa, Artificial Sequence
  Cyclic GFR-binding peptide
  MOD_RES (1)..(2): Xaa is C or S
XXVPTELSPISMLYIDEYDKVVYKQYEEMV

SEQ ID NO: 35333 - protein, 28 aa, Artificial Sequence
  Cyclic GFR-binding peptide
  MOD_RES (1)..(2): Xaa is C or S
XXVSQDLSPISILYIIGKTPKIYKQYEM

SEQ ID NO: 35334 - protein, 32 aa, Artificial Sequence
  Cyclic GFR-binding peptide
  MOD_RES (6)..(7): Xaa is C or S
ASASPXXVSQDLEPISILYLIGKTPKIKFKYE

SEQ ID NO: 35335 - protein, 30 aa, Artificial Sequence
  Cyclic GFR-binding peptide
  MOD_RES (1)..(2): Xaa is C or S
XXVPQDLEPISILYLVGRTPKVKFKYEMVV

SEQ ID NO: 35336 - protein, 27 aa, Artificial Sequence
  Cyclic GFR-binding peptide
  MOD_RES (1)..(1): Xaa is C or S
XAPTKLSPISVLYKDDSSNVILKYHYN

SEQ ID NO: 35337 - protein, 30 aa, Artificial Sequence
  Cyclic GFR-binding peptide
  MOD_RES (2)..(3): Xaa is C or S
PXXAPTKLSPISVLYIDDSSNVIYKQYENM

SEQ ID NO: 35338 - protein, 27 aa, Artificial Sequence
  Cyclic GFR-binding peptide
ALNAISILYFVGRKPKVLKKYRMIVRS

SEQ ID NO: 35339 - protein, 28 aa, Artificial Sequence
  Cyclic GFR-binding peptide
TKLSPISVLYKDDSSNVILKYHYNMVVR

SEQ ID NO: 35340 - protein, 24 aa, Artificial Sequence
  Cyclic GFR-binding peptide
PQDLNAISILYFVGRTPKVLKKYR

SEQ ID NO: 35341 - protein, 29 aa, Artificial Sequence
  Cyclic GFR-binding peptide
  MOD_RES (28)..(28): Xaa is C or S
DLEPISILYLIGKTPKIKFKYEMIVKSXK

SEQ ID NO: 35342 - protein, 29 aa, Artificial Sequence
  Cyclic GFR-binding peptide
  MOD_RES (29)..(29): Xaa is C or S
QLSPISVLYKDDSSNVILKYHYNMVVRAX

SEQ ID NO: 35343 - protein, 27 aa, Artificial Sequence
  Cyclic GFR-binding peptide
  MOD_RES (27)..(27): Xaa is C or S
SPISVLYIDDSSNVIYKQYENMVVRSX

SEQ ID NO: 35344 - protein, 31 aa, Artificial Sequence; identical to SEQ ID NO: 6958
  Cyclic GFR-binding peptide
  MOD_RES (29)..(31): Xaa is C or S

SEQ ID NO: 35345 - protein, 38 aa, Artificial Sequence
  Cyclic GFR-binding peptide
  MOD_RES (6)..(7)..(38): Xaa is C or S
ASASPXXVSQDLSPISILYIIGKTPKIYKQYEMIVKSX

SEQ ID NO: 35346 - protein, 34 aa, Artificial Sequence
  Cyclic GFR-binding peptide
  MOD_RES (1)..(2)..(33): Xaa is C or S
XXVPQALSPISILYIVGRKPKVYKQYEMIVRSXK

SEQ ID NO: 35347 - protein, 29 aa, Artificial Sequence
  Cyclic GFR-binding peptide
  MOD_RES (1)..(2): Xaa is C or S
XXAPTQLSPISVLYKDDSSNVILKYHYNM

SEQ ID NO: 35348 - protein, 27 aa, Artificial Sequence
  Cyclic GFR-binding peptide
  MOD_RES (27)..(27): Xaa is C or S
SPISMLYIDEYDKVVYKQYEEMVVEGX

SEQ ID NO: 35349 - protein, 35 aa, Artificial Sequence
  Cyclic GFR-binding peptide
  MOD_RES (5)..(6): Xaa is C or S
VPKPXXAPTKLSPISVLYIDDSSNVIYKQYENMVV

SEQ ID NO: 35350 - protein, 39 aa, Artificial Sequence
  Cyclic GFR-binding peptide
  MOD_RES (3)..(4)..(36)..(38): Xaa is C or S
KPXXAPTQLEPISVLYLDDSSNVIKFKYENMVVRAXGXH

SEQ ID NO: 35351 - protein, 28 aa, Artificial Sequence
  Cyclic GFR-binding peptide
  MOD_RES (2)..(3): Xaa is C or S
AXXAPTKLSPISVLYIDSSNNVIYKQYE

SEQ ID NO: 35352 - protein, 35 aa, Artificial Sequence
  Cyclic GFR-binding peptide
  MOD_RES (1)..(2)..(34): Xaa is C or S
XXVPTELEPISMLYLDEYDKVVKFKYEEMVVEGXG

SEQ ID NO: 35353 - protein, 41 aa, Artificial Sequence; identical to SEQ ID NO: 6964
  Cyclic GFR-binding peptide
  MOD_RES (6)..(7)..(39)..(41): Xaa is C or S

SEQ ID NO: 35354 - protein, 38 aa, Artificial Sequence
  Cyclic GFR-binding peptide
  MOD_RES (4)..(5)..(36)..(38): Xaa is C or S
ASPXXVSQDLEPISILYLIGKTPKIKFKYEMIVKSXKX

SEQ ID NO: 35355 - protein, 34 aa, Artificial Sequence
  Cyclic GFR-binding peptide
  MOD_RES (3)..(4): Xaa is C or S
ASXXVPARLEPISILYLDAANNVVKFKYEDMVVE

SEQ ID NO: 35356 - protein, 29 aa, Artificial Sequence
  Cyclic GFR-binding peptide
  MOD_RES (2)..(3): Xaa is C or S
PXXAPTKLEPISVLYLDDSSNVIKFKYEN

SEQ ID NO: 35357 - protein, 34 aa, Artificial Sequence; identical to SEQ ID NO: 6972
  Cyclic GFR-binding peptide
  MOD_RES (31)..(33): Xaa is C or S

SEQ ID NO: 35358 - protein, 31 aa, Artificial Sequence
  Cyclic GFR-binding peptide
  MOD_RES (1)..(1): Xaa is C or S
XVPTKLEPISVLYLDDMGVPTKFKYEEGMSV

SEQ ID NO: 35359 - protein, 32 aa, Artificial Sequence
  Cyclic GFR-binding peptide
  MOD_RES (29)..(31): Xaa is C or S
RLNAISILYFDAANNVVLKKYRDMVVEAXGXR

SEQ ID NO: 35360 - protein, 32 aa, Artificial Sequence; identical to SEQ ID NO: 6974
  Cyclic GFR-binding peptide
  MOD_RES (2)..(3): Xaa is C or S

SEQ ID NO: 35361 - protein, 34 aa, Artificial Sequence; identical to SEQ ID NO: 6975
  Cyclic GFR-binding peptide
  MOD_RES (1)..(2)..(33): Xaa is C or S

SEQ ID NO: 35362 - protein, 28 aa, Artificial Sequence
  Cyclic GFR-binding peptide
  MOD_RES (2)..(3): Xaa is C or S
PXXVPQALSPISILYIVGRKPKVYKQYE

SEQ ID NO: 35363 - protein, 27 aa, Artificial Sequence
  Cyclic GFR-binding peptide
VPQDLSPISILYIVGRTPKVYKQYEMV

SEQ ID NO: 35364 - protein, 32 aa, Artificial Sequence
  Cyclic GFR-binding peptide
  MOD_RES (3)..(4): Xaa is C or S
KAXXVPTELSPISMLYIDENEKVVYKQYEDMV

SEQ ID NO: 35365 - protein, 29 aa, Artificial Sequence
  Cyclic GFR-binding peptide
PTELSPISMLYIDENEKVVYKQYEDMVVE

SEQ ID NO: 35366 - protein, 27 aa, Artificial Sequence
  Cyclic GFR-binding peptide
DLSPISILYIVGRTPKVYKQYEMVVKS

SEQ ID NO: 35367 - protein, 34 aa, Artificial Sequence
  Cyclic GFR-binding peptide
  MOD_RES (1)..(33): Xaa is C or S
XAPTKLSPISVLYIDSSNNVIYKQYENMVVKAXG

SEQ ID NO: 35368 - protein, 35 aa, Artificial Sequence; identical to SEQ ID NO: 6984
  Cyclic GFR-binding peptide
  MOD_RES (1)..(32)..(34): Xaa is C or S

SEQ ID NO: 35369 - protein, 29 aa, Artificial Sequence
  Cyclic GFR-binding peptide
  MOD_RES (28)..(28): Xaa is C or S
LSPISMLYKDEYDKVVLKYHYEMVVEGXG

SEQ ID NO: 35370 - protein, 36 aa, Artificial Sequence; identical to SEQ ID NO: 6989
  Cyclic GFR-binding peptide
  MOD_RES (4)..(5): Xaa is C or S

SEQ ID NO: 35371 - protein, 25 aa, Artificial Sequence
  Cyclic GFR-binding peptide
ALSPISILYIVGRKPKVYKQYEMIV

SEQ ID NO: 35372 - protein, 36 aa, Artificial Sequence
  Cyclic GFR-binding peptide
  MOD_RES (2)..(3)..(35): Xaa is C or S
PXXAPTKLSPISVLYIDDSSNVIYKQYENMVVRSXG

SEQ ID NO: 35373 - protein, 21 aa, Artificial Sequence
  Cyclic GFR-binding peptide
SPISVLYKDSSNNVILKYHYN

SEQ ID NO: 35374 - protein, 29 aa, Artificial Sequence
  Cyclic GFR-binding peptide
  MOD_RES (28)..(28): Xaa is C or S
ALEPISILYLVGRKPKVKFKYEMIVRSXK

SEQ ID NO: 35375 - protein, 31 aa, Artificial Sequence
  Cyclic GFR-binding peptide
  MOD_RES (28)..(30): Xaa is C or S
DLEPISILYLIGKTPKIKFKYEMIVKSXKXS

SEQ ID NO: 35376 - protein, 36 aa, Artificial Sequence
  Cyclic GFR-binding peptide
  MOD_RES (1)..(2)..(34)..(36): Xaa is C or S
XXVPARLEPISILYLDAANNVVKFKYEDMVVEAXGX

SEQ ID NO: 35377 - protein, 27 aa, Artificial Sequence
  Cyclic GFR-binding peptide
TELEPISMLYLDENEKVVKFKYEDMVV

SEQ ID NO: 35378 - protein, 39 aa, Artificial Sequence; identical to SEQ ID NO: 6996
  Cyclic GFR-binding peptide
  MOD_RES (6)..(7)..(39): Xaa is C or S

SEQ ID NO: 35379 - protein, 24 aa, Artificial Sequence
  Cyclic GFR-binding peptide
PTQLEPISVLYLDDSSNVIKFKYE

SEQ ID NO: 35380 - protein, 40 aa, Artificial Sequence
  Cyclic GFR-binding peptide
  MOD_RES (6)..(7)..(38)..(40): Xaa is C or S
ASASPXXVSQDLSPISILYIIGKTPKIYKQYEMIVKSXKX

SEQ ID NO: 35381 - protein, 40 aa, Artificial Sequence
  Cyclic GFR-binding peptide
  MOD_RES (6)..(7)..(39): Xaa is C or S
KIPKAXXVPTELEPISMLYLDENEKVVKFKYEDMVVEGXG

SEQ ID NO: 35382 - protein, 37 aa, Artificial Sequence; identical to SEQ ID NO: 6999
  Cyclic GFR-binding peptide
  MOD_RES (4)..(5): Xaa is C or S

SEQ ID NO: 35383 - protein, 33 aa, Artificial Sequence; identical to SEQ ID NO: 7000
  Cyclic GFR-binding peptide
  MOD_RES (4)..(5): Xaa is C or S

SEQ ID NO: 35384 - protein, 34 aa, Artificial Sequence; identical to SEQ ID NO: 7001
  Cyclic GFR-binding peptide
  MOD_RES (1)..(2)..(34): Xaa is C or S

SEQ ID NO: 35385 - protein, 27 aa, Artificial Sequence
  Cyclic GFR-binding peptide
  MOD_RES (1)..(1): Xaa is C or S
XVPTELEPISMLYLDEYDKVVKFKYEE

SEQ ID NO: 35386 - protein, 32 aa, Artificial Sequence
  Cyclic GFR-binding peptide
  MOD_RES (1)..(2): Xaa is C or S
XXAPTKLEPISVLYLDDSSNVIKFKYENMVVR

SEQ ID NO: 35387 - protein, 36 aa, Artificial Sequence; identical to SEQ ID NO: 7003
  Cyclic GFR-binding peptide
  MOD_RES (3)..(4)..(35): Xaa is C or S

SEQ ID NO: 35388 - protein, 29 aa, Artificial Sequence
  Cyclic GFR-binding peptide
PTQLEPISVLYLDDSSNVIKFKYENMVVR

SEQ ID NO: 35389 - protein, 27 aa, Artificial Sequence
  Cyclic GFR-binding peptide
TQLEPISVLYLDDSSNVIKFKYENMVV

SEQ ID NO: 35390 - protein, 28 aa, Artificial Sequence
  Cyclic GFR-binding peptide
  MOD_RES (28)..(28): Xaa is C or S
DLSPISILYIVGRTPKVYKQYEMVVKSX

SEQ ID NO: 35391 - protein, 40 aa, Artificial Sequence
  Cyclic GFR-binding peptide
  MOD_RES (4)..(5)..(37)..(39): Xaa is C or S
PKAXXVPTELSPISMLYIDEYDKVVYKQYEEMVVEGXGXR

SEQ ID NO: 35392 - protein, 36 aa, Artificial Sequence; identical to SEQ ID NO: 7007
  Cyclic GFR-binding peptide
  MOD_RES (4)..(36): Xaa is C or S

SEQ ID NO: 35393 - protein, 23 aa, Artificial Sequence
  Cyclic GFR-binding peptide
RLSPISILYKDAANNVVLKYHYD

SEQ ID NO: 35394 - protein, 36 aa, Artificial Sequence
  Cyclic GFR-binding peptide
  MOD_RES (5)..(6): Xaa is C or S
IPKAXXVPTELSPISMLYIDENEKVVYKQYEDMVVE

SEQ ID NO: 35395 - protein, 25 aa, Artificial Sequence
  Cyclic GFR-binding peptide
KLSPISVLYIDDMGVPTYKQYEEGM

SEQ ID NO: 35396 - protein, 33 aa, Artificial Sequence
  Cyclic GFR-binding peptide
  MOD_RES (1)..(2): Xaa is C or S
XXVPTELEPISMLYLDENEKVVKFKYEDMVVEG

SEQ ID NO: 35397 - protein, 22 aa, Artificial Sequence
  Cyclic GFR-binding peptide
LNAISILYFDKGVVTYLKKYRG

SEQ ID NO: 35398 - protein, 30 aa, Artificial Sequence
  Cyclic GFR-binding peptide
  MOD_RES (28)..(30): Xaa is C or S
LEPISMLYLDENEKVVKFKYEDMVVEGXGX

SEQ ID NO: 35399 - protein, 35 aa, Artificial Sequence; identical to SEQ ID NO: 7013
  Cyclic GFR-binding peptide
  MOD_RES (3)..(4): Xaa is C or S

SEQ ID NO: 35400 - protein, 30 aa, Artificial Sequence; identical to SEQ ID NO: 7017
  Cyclic GFR-binding peptide
  MOD_RES (4)..(4): Xaa is C or S

SEQ ID NO: 35401 - protein, 29 aa, Artificial Sequence
  Cyclic GFR-binding peptide
  MOD_RES (1)..(1): Xaa is C or S
XVPTKLSPISILYKDKGVVTYLKYHYGMA

SEQ ID NO: 35402 - protein, 32 aa, Artificial Sequence; identical to SEQ ID NO: 7019
  Cyclic GFR-binding peptide
  MOD_RES (3)..(4): Xaa is C or S

SEQ ID NO: 35403 - protein, 32 aa, Artificial Sequence
  Cyclic GFR-binding peptide
  MOD_RES (29)..(31): Xaa is C or S
QDLSPISILYIVGRTPKVYKQYEMVVKSXKXS

SEQ ID NO: 35404 - protein, 25 aa, Artificial Sequence
  Cyclic GFR-binding peptide
LSPISILYKIGKTPKILKYHYMIVK

SEQ ID NO: 35405 - protein, 30 aa, Artificial Sequence
  Cyclic GFR-binding peptide
  MOD_RES (4)..(5): Xaa is C or S
PKAXXVPTELEPISMLYLDENEKVVKFKYE

SEQ ID NO: 35406 - protein, 23 aa, Artificial Sequence
  Cyclic GFR-binding peptide
LEPISVLYLDSSNNVIKFKYENM

SEQ ID NO: 35407 - protein, 33 aa, Artificial Sequence; identical to SEQ ID NO: 7025
  Cyclic GFR-binding peptide
  MOD_RES (1)..(2): Xaa is C or S

SEQ ID NO: 35408 - protein, 42 aa, Artificial Sequence
  Cyclic GFR-binding peptide
  MOD_RES (6)..(7)..(40)..(42): Xaa is C or S
KVGKAXXVPTKLEPISVLYLDDMGVPTKFKYEEGMSVAEXGX

SEQ ID NO: 35409 - protein, 26 aa, Artificial Sequence
  Cyclic GFR-binding peptide
  MOD_RES (26)..(26): Xaa is C or S
NAISILYFVGRKPKVLKKYRMIVRSX

SEQ ID NO: 35410 - protein, 33 aa, Artificial Sequence
  Cyclic GFR-binding peptide
  MOD_RES (6)..(7): Xaa is C or S
ASASPXXVPQDLSPISILYIVGRTPKVYKQYEM

SEQ ID NO: 35411 - protein, 34 aa, Artificial Sequence; identical to SEQ ID NO: 7029
  Cyclic GFR-binding peptide
  MOD_RES (31)..(33): Xaa is C or S

SEQ ID NO: 35412 - protein, 32 aa, Artificial Sequence
  Cyclic GFR-binding peptide
  MOD_RES (4)..(5): Xaa is C or S
PKAXXVPTELEPISMLYLDENEKVVKFKYEDM

SEQ ID NO: 35413 - protein, 36 aa, Artificial Sequence; identical to SEQ ID NO: 7030
  Cyclic GFR-binding peptide
  MOD_RES (2)..(3)..(34)..(36): Xaa is C or S

SEQ ID NO: 35414 - protein, 29 aa, Artificial Sequence
  Cyclic GFR-binding peptide
TELEPISMLYLDENEKVVKFKYEDMVVEG

SEQ ID NO: 35415 - protein, 25 aa, Artificial Sequence
  Cyclic GFR-binding peptide
NAISVLYFDSSNNVILKKYRNMVVK

SEQ ID NO: 35416 - protein, 34 aa, Artificial Sequence
  Cyclic GFR-binding peptide
  MOD_RES (2)..(3)..(34): Xaa is C or S
PXXVSQDLEPISILYLIGKTPKIKFKYEMIVKSX

SEQ ID NO: 35417 - protein, 33 aa, Artificial Sequence; identical to SEQ ID NO: 7034
  Cyclic GFR-binding peptide
  MOD_RES (2)..(3): Xaa is C or S

SEQ ID NO: 35418 - protein, 34 aa, Artificial Sequence; identical to SEQ ID NO: 7035
  Cyclic GFR-binding peptide
  MOD_RES (6)..(7): Xaa is C or S

SEQ ID NO: 35419 - protein, 34 aa, Artificial Sequence
  Cyclic GFR-binding peptide
  MOD_RES (6)..(7): Xaa is C or S
ASAAPXXVPQALEPISILYLVGRKPKVKFKYEMI

SEQ ID NO: 35420 - protein, 35 aa, Artificial Sequence
  Cyclic GFR-binding peptide
  MOD_RES (2)..(3)..(35): Xaa is C or S
PXXAPTQLSPISVLYIDDSSNVIYKQYENMVVRAX

SEQ ID NO: 35421 - protein, 32 aa, Artificial Sequence; identical to SEQ ID NO: 7037
  Cyclic GFR-binding peptide
  MOD_RES (1)..(2): Xaa is C or S

SEQ ID NO: 35422 - protein, 40 aa, Artificial Sequence
  Cyclic GFR-binding peptide
  MOD_RES (4)..(5)..(37)..(39): Xaa is C or S
PKPXXAPTKLSPISVLYIDDSSNVIYKQYENMVVRSXGXH

SEQ ID NO: 35423 - protein, 35 aa, Artificial Sequence
  Cyclic GFR-binding peptide
  MOD_RES (2)..(3)..(35): Xaa is C or S
AXXVPTELEPISMLYLDEYDKVVKFKYEEMVVEGX

SEQ ID NO: 35424 - protein, 39 aa, Artificial Sequence; identical to SEQ ID NO: 7040
  Cyclic GFR-binding peptide
  MOD_RES (3)..(4)..(36)..(38): Xaa is C or S

SEQ ID NO: 35425 - protein, 27 aa, Artificial Sequence
  Cyclic GFR-binding peptide
LSPISVLYKDSSNNVILKYHYNMVVKA

SEQ ID NO: 35426 - protein, 22 aa, Artificial Sequence
  Cyclic GFR-binding peptide
EPISVLYLDSSNNVIKFKYENM

SEQ ID NO: 35427 - protein, 34 aa, Artificial Sequence
  Cyclic GFR-binding peptide
  MOD_RES (1)..(33): Xaa is C or S
XVPTKLSPISILYKDKGVVTYLKYHYGMAVSEXG

SEQ ID NO: 35428 - protein, 33 aa, Artificial Sequence
  Cyclic GFR-binding peptide
  MOD_RES (4)..(4): Xaa is C or S
KPTXAPTKLSPISVLYIDDSSNVIYKQYENMVV

SEQ ID NO: 35429 - protein, 31 aa, Artificial Sequence
  Cyclic GFR-binding peptide
  MOD_RES (5)..(6): Xaa is C or S
VPKAXXAPTKLEPISVLYLDSSNNVIKFKYE

SEQ ID NO: 35430 - protein, 28 aa, Artificial Sequence
  Cyclic GFR-binding peptide
PQDLNAISILYFVGRTPKVLKKYRMVVK

SEQ ID NO: 35431 - protein, 22 aa, Artificial Sequence
  Cyclic GFR-binding peptide
KLSPISILYKDKGVVTYLKYHY

SEQ ID NO: 35432 - protein, 34 aa, Artificial Sequence; identical to SEQ ID NO: 7047
  Cyclic GFR-binding peptide
  MOD_RES (5)..(6): Xaa is C or S

SEQ ID NO: 35433 - protein, 31 aa, Artificial Sequence
  Cyclic GFR-binding peptide
  MOD_RES (4)..(5): Xaa is C or S
PKPXXAPTQLEPISVLYLDDSSNVIKFKYEN

SEQ ID NO: 35434 - protein, 25 aa, Artificial Sequence
  Cyclic GFR-binding peptide
LEPISVLYLDDSSNVIKFKYENMVV

SEQ ID NO: 35435 - protein, 30 aa, Artificial Sequence; identical to SEQ ID NO: 7048
  Cyclic GFR-binding peptide
  MOD_RES (4)..(5): Xaa is C or S

SEQ ID NO: 35436 - protein, 39 aa, Artificial Sequence; identical to SEQ ID NO: 7049
  Cyclic GFR-binding peptide
  MOD_RES (5)..(6)..(37)..(39): Xaa is C or S

SEQ ID NO: 35437 - protein, 30 aa, Artificial Sequence; identical to SEQ ID NO: 7050
  Cyclic GFR-binding peptide

SEQ ID NO: 35438 - protein, 37 aa, Artificial Sequence
  Cyclic GFR-binding peptide
  MOD_RES (4)..(5)..(37): Xaa is C or S
PKPXXAPTQLEPISVLYLDDSSNVIKFKYENMVVRAX

SEQ ID NO: 35439 - protein, 38 aa, Artificial Sequence; identical to SEQ ID NO: 7051
  Cyclic GFR-binding peptide
  MOD_RES (3)..(35)..(37): Xaa is C or S

SEQ ID NO: 35440 - protein, 26 aa, Artificial Sequence
  Cyclic GFR-binding peptide
PQDLSPISILYIVGRTPKVYKQYEMV

SEQ ID NO: 35441 - protein, 32 aa, Artificial Sequence; identical to SEQ ID NO: 7054
  Cyclic GFR-binding peptide
  MOD_RES (31)..(31): Xaa is C or S

SEQ ID NO: 35442 - protein, 26 aa, Artificial Sequence
  Cyclic GFR-binding peptide
KLSPISVLYIDDMGVPTYKQYEEGMS

SEQ ID NO: 35443 - protein, 31 aa, Artificial Sequence
  Cyclic GFR-binding peptide
  MOD_RES (5)..(6): Xaa is C or S
IPKAXXVPTELSPISMLYIDEYDKVVYKQYE

SEQ ID NO: 35444 - protein, 29 aa, Artificial Sequence
  Cyclic GFR-binding peptide
  MOD_RES (2)..(3): Xaa is C or S
AXXAPTKLSPISVLYIDSSNNVIYKQYEN

SEQ ID NO: 35445 - protein, 29 aa, Artificial Sequence
  Cyclic GFR-binding peptide
TKLSPISILYIDKGVVTYYKQYEGMAVSE

SEQ ID NO: 35446 - protein, 32 aa, Artificial Sequence; identical to SEQ ID NO: 7056
  Cyclic GFR-binding peptide
  MOD_RES (5)..(6): Xaa is C or S

SEQ ID NO: 35447 - protein, 28 aa, Artificial Sequence
  Cyclic GFR-binding peptide
  MOD_RES (28)..(28): Xaa is C or S
LNAISMLYFDEYDKVVLKKYREMVVEGX

SEQ ID NO: 35448 - protein, 28 aa, Artificial Sequence
  Cyclic GFR-binding peptide
VPTKLSPISILYKDKGVVTYLKYHYGMA

SEQ ID NO: 35449 - protein, 24 aa, Artificial Sequence
  Cyclic GFR-binding peptide
SPISMLYKDENEKVVLKYHYDMVV

SEQ ID NO: 35450 - protein, 24 aa, Artificial Sequence
  Cyclic GFR-binding peptide
PQDLSPISILYKVGRTPKVLKYHY

SEQ ID NO: 35451 - protein, 22 aa, Artificial Sequence
  Cyclic GFR-binding peptide
LEPISMLYLDENEKVVKFKYED

SEQ ID NO: 35452 - protein, 23 aa, Artificial Sequence
  Cyclic GFR-binding peptide
LSPISILYIIGKTPKIYKQYEMI

SEQ ID NO: 35453 - protein, 32 aa, Artificial Sequence; identical to SEQ ID NO: 7066
  Cyclic GFR-binding peptide
  MOD_RES (29)..(31): Xaa is C or S

SEQ ID NO: 35454 - protein, 28 aa, Artificial Sequence
  Cyclic GFR-binding peptide
  MOD_RES (1)..(1): Xaa is C or S
XVPTELEPISMLYLDEYDKVVKFKYEEM

SEQ ID NO: 35455 - protein, 36 aa, Artificial Sequence
  Cyclic GFR-binding peptide
  MOD_RES (4)..(5)..(36): Xaa is C or S
AAPXXVPQALSPISILYIVGRKPKVYKQYEMIVRSX

SEQ ID NO: 35456 - protein, 38 aa, Artificial Sequence; identical to SEQ ID NO: 7070
  Cyclic GFR-binding peptide
  MOD_RES (2)..(3)..(35)..(37): Xaa is C or S

SEQ ID NO: 35457 - protein, 27 aa, Artificial Sequence
  Cyclic GFR-binding peptide
QDLSPISILYIIGKTPKIYKQYEMIVK

SEQ ID NO: 35458 - protein, 36 aa, Artificial Sequence; identical to SEQ ID NO: 7074
  Cyclic GFR-binding peptide
  MOD_RES (6)..(7): Xaa is C or S

SEQ ID NO: 35459 - protein, 41 aa, Artificial Sequence
  Cyclic GFR-binding peptide
  MOD_RES (5)..(6)..(38)..(40): Xaa is C or S
ASKAXXVPTKLSPISILYKDKGVVTYLKYHYGMAVSEXGXR

SEQ ID NO: 35460 - protein, 37 aa, Artificial Sequence
  Cyclic GFR-binding peptide
  MOD_RES (2)..(3)..(36): Xaa is C or S
AXXVPTKLSPISVLYIDDMGVPTYKQYEEGMSVAEXG

SEQ ID NO: 35461 - protein, 40 aa, Artificial Sequence
  Cyclic GFR-binding peptide
  MOD_RES (5)..(6)..(38)..(40): Xaa is C or S
VPKPXXAPTKLSPISVLYIDDSSNVIYKQYENMVVRSXGX

SEQ ID NO: 35462 - protein, 37 aa, Artificial Sequence
  Cyclic GFR-binding peptide
  MOD_RES (5)..(6): Xaa is C or S
VPKPXXAPTQLSPISVLYIDDSSNVIYKQYENMVVRA

SEQ ID NO: 35463 - protein, 29 aa, Artificial Sequence
  Cyclic GFR-binding peptide
  MOD_RES (27)..(29): Xaa is C or S
SPISMLYKDENEKVVLKYHYDMVVEGXGX

SEQ ID NO: 35464 - protein, 35 aa, Artificial Sequence
  Cyclic GFR-binding peptide
  MOD_RES (2)..(3)..(35): Xaa is C or S
PXXAPTQLEPISVLYLDDSSNVIKFKYENMVVRAX

SEQ ID NO: 35465 - protein, 35 aa, Artificial Sequence
  Cyclic GFR-binding peptide
  MOD_RES (6)..(7): Xaa is C or S
ASAAPXXVPQALSPISILYIVGRKPKVYKQYEMIV

SEQ ID NO: 35466 - protein, 28 aa, Artificial Sequence
  Cyclic GFR-binding peptide
  MOD_RES (26)..(28): Xaa is C or S
EPISILYLVGRKPKVKFKYEMIVRSXKX

SEQ ID NO: 35467 - protein, 33 aa, Artificial Sequence; identical to SEQ ID NO: 7080
  Cyclic GFR-binding peptide
  MOD_RES (5)..(6): Xaa is C or S

SEQ ID NO: 35468 - protein, 31 aa, Artificial Sequence
  Cyclic GFR-binding peptide
  MOD_RES (28)..(30): Xaa is C or S
LSPISVLYIDDSSNVIYKQYENMVVRAXGXH

SEQ ID NO: 35469 - protein, 35 aa, Artificial Sequence
  Cyclic GFR-binding peptide
  MOD_RES (5)..(6): Xaa is C or S
VPKAXXAPTKLEPISVLYLDSSNNVIKFKYENMVV

SEQ ID NO: 35470 - protein, 41 aa, Artificial Sequence
  Cyclic GFR-binding peptide
  MOD_RES (5)..(6)..(38)..(40): Xaa is C or S
VPKAXXAPTKLSPISVLYIDSSNNVIYKQYENMVVKAXGXH

SEQ ID NO: 35471 - protein, 22 aa, Artificial Sequence
  Cyclic GFR-binding peptide
LSPISILYIVGRKPKVYKQYEM

SEQ ID NO: 35472 - protein, 33 aa, Artificial Sequence
  Cyclic GFR-binding peptide
  MOD_RES (3)..(4): Xaa is C or S
KAXXVPTELEPISMLYLDENEKVVKFKYEDMVV

SEQ ID NO: 35473 - protein, 31 aa, Artificial Sequence
  Cyclic GFR-binding peptide
  MOD_RES (1)..(1): Xaa is C or S
XAPTQLEPISVLYLDDSSNVIKFKYENMVVR

SEQ ID NO: 35474 - protein, 30 aa, Artificial Sequence
  Cyclic GFR-binding peptide
  MOD_RES (2)..(3): Xaa is C or S
AXXVPTKLSPISILYIDKGVVTYYKQYEGM

SEQ ID NO: 35475 - protein, 24 aa, Artificial Sequence
  Cyclic GFR-binding peptide
SPISMLYIDENEKVVYKQYEDMVV

SEQ ID NO: 35476 - protein, 25 aa, Artificial Sequence
  Cyclic GFR-binding peptide
PTKLNAISVLYFDDMGVPTLKKYRE

SEQ ID NO: 35477 - protein, 30 aa, Artificial Sequence
  Cyclic GFR-binding peptide
  MOD_RES (1)..(2): Xaa is C or S
XXVPQALEPISILYLVGRKPKVKFKYEMIV

SEQ ID NO: 35478 - protein, 30 aa, Artificial Sequence
  Cyclic GFR-binding peptide
  MOD_RES (29)..(29): Xaa is C or S
ELSPISMLYIDEYDKVVYKQYEEMVVEGXG

SEQ ID NO: 35479 - protein, 34 aa, Artificial Sequence; identical to SEQ ID NO: 7087
  Cyclic GFR-binding peptide
  MOD_RES (2)..(3)..(34): Xaa is C or S

SEQ ID NO: 35480 - protein, 25 aa, Artificial Sequence
  Cyclic GFR-binding peptide
VPARLEPISILYLDAANNVVKFKYE

SEQ ID NO: 35481 - protein, 37 aa, Artificial Sequence
  Cyclic GFR-binding peptide
  MOD_RES (6)..(7): Xaa is C or S
TVPKPXXAPTQLEPISVLYLDDSSNVIKFKYENMVVR

SEQ ID NO: 35482 - protein, 39 aa, Artificial Sequence
  Cyclic GFR-binding peptide
  MOD_RES (6)..(7)..(39): Xaa is C or S
KASKAXXVPTKLNAISILYFDKGVVTYLKKYRGMAVSEX

SEQ ID NO: 35483 - protein, 33 aa, Artificial Sequence; identical to SEQ ID NO: 7088
  Cyclic GFR-binding peptide
  MOD_RES (7)..(7): Xaa is C or S

SEQ ID NO: 35484 - protein, 34 aa, Artificial Sequence; identical to SEQ ID NO: 7089
  Cyclic GFR-binding peptide
  MOD_RES (2)..(3): Xaa is C or S

SEQ ID NO: 35485 - protein, 27 aa, Artificial Sequence
  Cyclic GFR-binding peptide
  MOD_RES (1)..(2): Xaa is C or S
XXVPTELEPISMLYLDENEKVVKFKYE

SEQ ID NO: 35486 - protein, 33 aa, Artificial Sequence
  Cyclic GFR-binding peptide
  MOD_RES (1)..(2): Xaa is C or S
XXAPTKLEPISVLYLDDSSNVIKFKYENMVVRS

SEQ ID NO: 35487 - protein, 39 aa, Artificial Sequence
  Cyclic GFR-binding peptide
  MOD_RES (5)..(6)..(37)..(39): Xaa is C or S
SASPXXVPQDLEPISILYLVGRTPKVKFKYEMVVKSXKX

SEQ ID NO: 35488 - protein, 33 aa, Artificial Sequence
  Cyclic GFR-binding peptide
  MOD_RES (5)..(6): Xaa is C or S
APASXXVPARLNAISILYFDAANNVVLKKYRDM

SEQ ID NO: 35489 - protein, 37 aa, Artificial Sequence; identical to SEQ ID NO: 7096
  Cyclic GFR-binding peptide
  MOD_RES (4)..(5)..(36): Xaa is C or S

SEQ ID NO: 35490 - protein, 29 aa, Artificial Sequence
  Cyclic GFR-binding peptide
  MOD_RES (1)..(2): Xaa is C or S
XXVPQDLNAISILYFVGRTPKVLKKYRMV

SEQ ID NO: 35491 - protein, 30 aa, Artificial Sequence
  Cyclic GFR-binding peptide
  MOD_RES (28)..(30): Xaa is C or S
ALEPISILYLVGRKPKVKFKYEMIVRSXKX

SEQ ID NO: 35492 - protein, 37 aa, Artificial Sequence
  Cyclic GFR-binding peptide
  MOD_RES (5)..(6): Xaa is C or S
IPKAXXVPTELSPISMLYIDEYDKVVYKQYEEMVVEG

SEQ ID NO: 35493 - protein, 25 aa, Artificial Sequence
  Cyclic GFR-binding peptide
LNAISILYFDKGVVTYLKKYRGMAV

SEQ ID NO: 35494 - protein, 29 aa, Artificial Sequence
  Cyclic GFR-binding peptide
  MOD_RES (28)..(28): Xaa is C or S
DLNAISILYFIGKTPKILKKYRMIVKSXK

SEQ ID NO: 35495 - protein, 37 aa, Artificial Sequence
  Cyclic GFR-binding peptide
  MOD_RES (6)..(7): Xaa is C or S
ASASPXXVPQDLEPISILYLVGRTPKVKFKYEMVVKS

SEQ ID NO: 35496 - protein, 33 aa, Artificial Sequence
  Cyclic GFR-binding peptide
  MOD_RES (1)..(33): Xaa is C or S
XVPARLSPISILYKDAANNVVLKYHYDMVVEAX

SEQ ID NO: 35497 - protein, 32 aa, Artificial Sequence; identical to SEQ ID NO: 7101
  Cyclic GFR-binding peptide
  MOD_RES (2)..(3): Xaa is C or S

SEQ ID NO: 35498 - protein, 34 aa, Artificial Sequence; identical to SEQ ID NO: 7103
  Cyclic GFR-binding peptide
  MOD_RES (32)..(34): Xaa is C or S

SEQ ID NO: 35499 - protein, 38 aa, Artificial Sequence
  Cyclic GFR-binding peptide
  MOD_RES (3)..(35)..(37): Xaa is C or S
PTXAPTKLEPISVLYLDDSSNVIKFKYENMVVRSXGXH

SEQ ID NO: 35500 - protein, 34 aa, Artificial Sequence
  Cyclic GFR-binding peptide
  MOD_RES (4)..(5): Xaa is C or S
PKPXXAPTQLEPISVLYLDDSSNVIKFKYENMVV

SEQ ID NO: 35501 - protein, 29 aa, Artificial Sequence
  Cyclic GFR-binding peptide
  MOD_RES (3)..(4): Xaa is C or S
KAXXVPTELSPISMLYIDEYDKVVYKQYE

SEQ ID NO: 35502 - protein, 36 aa, Artificial Sequence
  Cyclic GFR-binding peptide
  MOD_RES (6)..(7): Xaa is C or S
SIPKAXXVPTELSPISMLYIDEYDKVVYKQYEEMVV

SEQ ID NO: 35503 - protein, 20 aa, Artificial Sequence
  Cyclic GFR-binding peptide
EPISILYLIGKTPKIKFKYE

SEQ ID NO: 35504 - protein, 34 aa, Artificial Sequence; identical to SEQ ID NO: 7107
  Cyclic GFR-binding peptide
  MOD_RES (4)..(5): Xaa is C or S

SEQ ID NO: 35505 - protein, 22 aa, Artificial Sequence
  Cyclic GFR-binding peptide
RLSPISILYKDAANNVVLKYHY

SEQ ID NO: 35506 - protein, 37 aa, Artificial Sequence
  Cyclic GFR-binding peptide
  MOD_RES (3)..(4)..(35)..(37): Xaa is C or S
APXXVPQALEPISILYLVGRKPKVKFKYEMIVRSXKX

SEQ ID NO: 35507 - protein, 33 aa, Artificial Sequence; identical to SEQ ID NO: 7110
  Cyclic GFR-binding peptide
  MOD_RES (30)..(32): Xaa is C or S

SEQ ID NO: 35508 - protein, 30 aa, Artificial Sequence
  Cyclic GFR-binding peptide
  MOD_RES (4)..(5): Xaa is C or S
ASPXXVSQDLSPISILYIIGKTPKIYKQYE

SEQ ID NO: 35509 - protein, 30 aa, Artificial Sequence
  Cyclic GFR-binding peptide
  MOD_RES (4)..(5): Xaa is C or S
PKPXXAPTQLEPISVLYLDDSSNVIKFKYE

SEQ ID NO: 35510 - protein, 25 aa, Artificial Sequence
  Cyclic GFR-binding peptide
LEPISILYLIGKTPKIKFKYEMIVK

SEQ ID NO: 35511 - protein, 35 aa, Artificial Sequence
  Cyclic GFR-binding peptide
  MOD_RES (3)..(4): Xaa is C or S
KAXXVPTELSPISMLYIDEYDKVVYKQYEEMVVEG

SEQ ID NO: 35512 - protein, 22 aa, Artificial Sequence
  Cyclic GFR-binding peptide
EPISILYLDAANNVVKFKYEDM

SEQ ID NO: 35513 - protein, 31 aa, Artificial Sequence; identical to SEQ ID NO: 7112
  Cyclic GFR-binding peptide
  MOD_RES (5)..(6): Xaa is C or S

SEQ ID NO: 35514 - protein, 24 aa, Artificial Sequence
  Cyclic GFR-binding peptide
LSPISMLYKDENEKVVLKYHYDMV

SEQ ID NO: 35515 - protein, 30 aa, Artificial Sequence; identical to SEQ ID NO: 7114
  Cyclic GFR-binding peptide
  MOD_RES (27)..(29): Xaa is C or S

SEQ ID NO: 35516 - protein, 35 aa, Artificial Sequence
  Cyclic GFR-binding peptide
  MOD_RES (5)..(6): Xaa is C or S
APASXXVPARLEPISILYLDAANNVVKFKYEDMVV

SEQ ID NO: 35517 - protein, 37 aa, Artificial Sequence; identical to SEQ ID NO: 7116
  Cyclic GFR-binding peptide
  MOD_RES (2)..(3)..(34)..(36): Xaa is C or S

SEQ ID NO: 35518 - protein, 35 aa, Artificial Sequence
  Cyclic GFR-binding peptide
  MOD_RES (3)..(4): Xaa is C or S
KAXXVPTELEPISMLYLDENEKVVKFKYEDMVVEG

SEQ ID NO: 35519 - protein, 27 aa, Artificial Sequence
  Cyclic GFR-binding peptide
PTKLEPISVLYLDSSNNVIKFKYENMV

SEQ ID NO: 35520 - protein, 29 aa, Artificial Sequence
  Cyclic GFR-binding peptide
  MOD_RES (27)..(29): Xaa is C or S
SPISVLYKDDSSNVILKYHYNMVVRSXGX

SEQ ID NO: 35521 - protein, 29 aa, Artificial Sequence
  Cyclic GFR-binding peptide
VPTKLSPISVLYIDDMGVPTYKQYEEGMS

SEQ ID NO: 35522 - protein, 26 aa, Artificial Sequence
  Cyclic GFR-binding peptide
LEPISVLYLDDMGVPTKFKYEEGMSV

SEQ ID NO: 35523 - protein, 27 aa, Artificial Sequence
  Cyclic GFR-binding peptide
VSQDLSPISILYKIGKTPKILKYHYMI

SEQ ID NO: 35524 - protein, 35 aa, Artificial Sequence
  Cyclic GFR-binding peptide
  MOD_RES (6)..(6): Xaa is C or S
VTKPTXAPTKLEPISVLYLDDSSNVIKFKYENMVV

SEQ ID NO: 35525 - protein, 30 aa, Artificial Sequence; identical to SEQ ID NO: 7123
  Cyclic GFR-binding peptide

SEQ ID NO: 35526 - protein, 33 aa, Artificial Sequence
  Cyclic GFR-binding peptide
  MOD_RES (4)..(5): Xaa is C or S
AAPXXVPQALEPISILYLVGRKPKVKFKYEMIV

SEQ ID NO: 35527 - protein, 23 aa, Artificial Sequence
  Cyclic GFR-binding peptide
QDLSPISILYIVGRTPKVYKQYE

SEQ ID NO: 35528 - protein, 24 aa, Artificial Sequence
  Cyclic GFR-binding peptide
SQDLNAISILYFIGKTPKILKKYR

SEQ ID NO: 35529 - protein, 33 aa, Artificial Sequence
  Cyclic GFR-binding peptide
  MOD_RES (31)..(33): Xaa is C or S
PTKLNAISILYFDKGVVTYLKKYRGMAVSEXGX

SEQ ID NO: 35530 - protein, 41 aa, Artificial Sequence
  Cyclic GFR-binding peptide
  MOD_RES (6)..(7)..(39)..(41): Xaa is C or S
AAPASXXVPARLSPISILYKDAANNVVLKYHYDMVVEAXGX

SEQ ID NO: 35531 - protein, 39 aa, Artificial Sequence
  Cyclic GFR-binding peptide
  MOD_RES (4)..(5)..(36)..(38): Xaa is C or S
ASPXXVSQDLEPISILYLIGKTPKIKFKYEMIVKSXKXS

SEQ ID NO: 35532 - protein, 31 aa, Artificial Sequence; identical to SEQ ID NO: 7129
  Cyclic GFR-binding peptide
  MOD_RES (2)..(3): Xaa is C or S

SEQ ID NO: 35533 - protein, 23 aa, Artificial Sequence
  Cyclic GFR-binding peptide
TKLNAISVLYFDSSNNVILKKYR

SEQ ID NO: 35534 - protein, 25 aa, Artificial Sequence
  Cyclic GFR-binding peptide
VPTELSPISMLYKDEYDKVVLKYHY

SEQ ID NO: 35535 - protein, 31 aa, Artificial Sequence; identical to SEQ ID NO: 7134
  Cyclic GFR-binding peptide
  MOD_RES (1)..(1): Xaa is C or S

SEQ ID NO: 35536 - protein, 38 aa, Artificial Sequence; identical to SEQ ID NO: 7136
  Cyclic GFR-binding peptide
  MOD_RES (2)..(3)..(35)..(37): Xaa is C or S

SEQ ID NO: 35537 - protein, 34 aa, Artificial Sequence
  Cyclic GFR-binding peptide
  MOD_RES (2)..(34): Xaa is C or S
TXAPTKLEPISVLYLDDSSNVIKFKYENMVVRSX

SEQ ID NO: 35538 - protein, 20 aa, Artificial Sequence
  Cyclic GFR-binding peptide
EPISMLYLDEYDKVVKFKYE

SEQ ID NO: 35539 - protein, 26 aa, Artificial Sequence
  Cyclic GFR-binding peptide
EPISILYLDAANNVVKFKYEDMVVEA

SEQ ID NO: 35540 - protein, 35 aa, Artificial Sequence
  Cyclic GFR-binding peptide
  MOD_RES (3)..(4): Xaa is C or S
KAXXVPTELEPISMLYLDEYDKVVKFKYEEMVVEG

SEQ ID NO: 35541 - protein, 30 aa, Artificial Sequence
  Cyclic GFR-binding peptide
  MOD_RES (29)..(29): Xaa is C or S
KLSPISVLYIDDSSNVIYKQYENMVVRSXG

SEQ ID NO: 35542 - protein, 38 aa, Artificial Sequence
  Cyclic GFR-binding peptide
  MOD_RES (5)..(6)..(38): Xaa is C or S
APASXXVPARLSPISILYKDAANNVVLKYHYDMVVEAX

SEQ ID NO: 35543 - protein, 39 aa, Artificial Sequence
  Cyclic GFR-binding peptide
  MOD_RES (6)..(7)..(38): Xaa is C or S
ASAAPXXVPQALSPISILYIVGRKPKVYKQYEMIVRSXK

SEQ ID NO: 35544 - protein, 29 aa, Artificial Sequence
  Cyclic GFR-binding peptide
  MOD_RES (27)..(29): Xaa is C or S
EPISMLYLDEYDKVVKFKYEEMVVEGXGX

SEQ ID NO: 35545 - protein, 27 aa, Artificial Sequence
  Cyclic GFR-binding peptide
  MOD_RES (1)..(2): Xaa is C or S
XXVPTKLNAISVLYFDDMGVPTLKKYR

SEQ ID NO: 35546 - protein, 32 aa, Artificial Sequence
  Cyclic GFR-binding peptide
  MOD_RES (5)..(6): Xaa is C or S
IPKAXXVPTELSPISMLYIDENEKVVYKQYED

SEQ ID NO: 35547 - protein, 35 aa, Artificial Sequence
  Cyclic GFR-binding peptide
  MOD_RES (3)..(4): Xaa is C or S
KAXXVPTELSPISMLYIDENEKVVYKQYEDMVVEG

SEQ ID NO: 35548 - protein, 26 aa, Artificial Sequence
  Cyclic GFR-binding peptide
  MOD_RES (1)..(1): Xaa is C or S
XVPQALEPISILYLVGRKPKVKFKYE

SEQ ID NO: 35549 - protein, 33 aa, Artificial Sequence
  Cyclic GFR-binding peptide
  MOD_RES (6)..(7): Xaa is C or S
ASASPXXVSQDLEPISILYLIGKTPKIKFKYEM

SEQ ID NO: 35550 - protein, 39 aa, Artificial Sequence
  Cyclic GFR-binding peptide
  MOD_RES (5)..(6)..(38): Xaa is C or S
APASXXVPARLEPISILYLDAANNVVKFKYEDMVVEAXG

SEQ ID NO: 35551 - protein, 33 aa, Artificial Sequence; identical to SEQ ID NO: 7142
  Cyclic GFR-binding peptide
  MOD_RES (1)..(1): Xaa is C or S

SEQ ID NO: 35552 - protein, 31 aa, Artificial Sequence; identical to SEQ ID NO: 7143
  Cyclic GFR-binding peptide
  MOD_RES (5)..(6): Xaa is C or S

SEQ ID NO: 35553 - protein, 34 aa, Artificial Sequence
  Cyclic GFR-binding peptide
  MOD_RES (31)..(33): Xaa is C or S
TKLSPISVLYIDDMGVPTYKQYEEGMSVAEXGXR

SEQ ID NO: 35554 - protein, 31 aa, Artificial Sequence; identical to SEQ ID NO: 7144
  Cyclic GFR-binding peptide
  MOD_RES (29)..(31): Xaa is C or S

SEQ ID NO: 35555 - protein, 29 aa, Artificial Sequence
  Cyclic GFR-binding peptide
VPTELEPISMLYLDEYDKVVKFKYEEMVV

SEQ ID NO: 35556 - protein, 40 aa, Artificial Sequence
  Cyclic GFR-binding peptide
  MOD_RES (4)..(5)..(37)..(39): Xaa is C or S
SKAXXVPTKLSPISILYKDKGVVTYLKYHYGMAVSEXGXR

SEQ ID NO: 35557 - protein, 27 aa, Artificial Sequence
  Cyclic GFR-binding peptide
  MOD_RES (1)..(1): Xaa is C or S
XVPQALSPISILYKVGRKPKVLKYHYM

SEQ ID NO: 35558 - protein, 30 aa, Artificial Sequence
  Cyclic GFR-binding peptide
  MOD_RES (3)..(4): Xaa is C or S
KAXXVPTELSPISMLYIDEYDKVVYKQYEE

SEQ ID NO: 35559 - protein, 32 aa, Artificial Sequence; identical to SEQ ID NO: 7150
  Cyclic GFR-binding peptide
  MOD_RES (2)..(3): Xaa is C or S

SEQ ID NO: 35560 - protein, 29 aa, Artificial Sequence
  Cyclic GFR-binding peptide
  MOD_RES (2)..(3): Xaa is C or S
AXXVPTKLEPISVLYLDDMGVPTKFKYEE

SEQ ID NO: 35561 - protein, 37 aa, Artificial Sequence
  Cyclic GFR-binding peptide
  MOD_RES (3)..(4)..(36): Xaa is C or S
KAXXVPTELSPISMLYIDEYDKVVYKQYEEMVVEGXG

SEQ ID NO: 35562 - protein, 23 aa, Artificial Sequence
  Cyclic GFR-binding peptide
EPISILYLVGRTPKVKFKYEMVV

SEQ ID NO: 35563 - protein, 35 aa, Artificial Sequence
  Cyclic GFR-binding peptide
  MOD_RES (1)..(33)..(35): Xaa is C or S
XVPTELSPISMLYIDEYDKVVYKQYEEMVVEGXGX

SEQ ID NO: 35564 - protein, 25 aa, Artificial Sequence
  Cyclic GFR-binding peptide
KLSPISILYIDKGVVTYYKQYEGMA

SEQ ID NO: 35565 - protein, 35 aa, Artificial Sequence
  Cyclic GFR-binding peptide
  MOD_RES (4)..(5): Xaa is C or S
PKPXXAPTQLSPISVLYIDDSSNVIYKQYENMVVR

SEQ ID NO: 35566 - protein, 36 aa, Artificial Sequence
  Cyclic GFR-binding peptide
  MOD_RES (1)..(2)..(34)..(36): Xaa is C or S
XXVPARLNAISILYFDAANNVVLKKYRDMVVEAXGX

SEQ ID NO: 35567 - protein, 27 aa, Artificial Sequence
  Cyclic GFR-binding peptide
QDLSPISILYKIGKTPKILKYHYMIVK

SEQ ID NO: 35568 - protein, 36 aa, Artificial Sequence
  Cyclic GFR-binding peptide
  MOD_RES (1)..(2)..(33)..(35): Xaa is C or S
XXVSQDLSPISILYIIGKTPKIYKQYEMIVKSXKXS

SEQ ID NO: 35569 - protein, 40 aa, Artificial Sequence; identical to SEQ ID NO: 7155
  Cyclic GFR-binding peptide
  MOD_RES (5)..(6)..(37)..(39): Xaa is C or S

SEQ ID NO: 35570 - protein, 24 aa, Artificial Sequence
  Cyclic GFR-binding peptide
LSPISMLYIDEYDKVVYKQYEEMV

SEQ ID NO: 35571 - protein, 32 aa, Artificial Sequence
  Cyclic GFR-binding peptide
  MOD_RES (3)..(4): Xaa is C or S
KAXXVPTELEPISMLYLDEYDKVVKFKYEEMV

SEQ ID NO: 35572 - protein, 36 aa, Artificial Sequence
  Cyclic GFR-binding peptide
  MOD_RES (1)..(2)..(34)..(36): Xaa is C or S
XXAPTKLSPISVLYIDDSSNVIYKQYENMVVRSXGX

SEQ ID NO: 35573 - protein, 37 aa, Artificial Sequence
  Cyclic GFR-binding peptide
  MOD_RES (2)..(3)..(34)..(36): Xaa is C or S
PXXVPQDLSPISILYIVGRTPKVYKQYEMVVKSXKXS

SEQ ID NO: 35574 - protein, 30 aa, Artificial Sequence; identical to SEQ ID NO: 7162
  Cyclic GFR-binding peptide
  MOD_RES (29)..(29): Xaa is C or S

SEQ ID NO: 35575 - protein, 26 aa, Artificial Sequence
  Cyclic GFR-binding peptide
SQDLSPISILYIIGKTPKIYKQYEMI

SEQ ID NO: 35576 - protein, 37 aa, Artificial Sequence; identical to SEQ ID NO: 7165
  Cyclic GFR-binding peptide
  MOD_RES (4)..(5)..(37): Xaa is C or S

SEQ ID NO: 35577 - protein, 35 aa, Artificial Sequence
  Cyclic GFR-binding peptide
  MOD_RES (5)..(6): Xaa is C or S
SAAPXXVPQALSPISILYIVGRKPKVYKQYEMIVR

SEQ ID NO: 35578 - protein, 38 aa, Artificial Sequence; identical to SEQ ID NO: 7168
  Cyclic GFR-binding peptide
  MOD_RES (4)..(5)..(37): Xaa is C or S

SEQ ID NO: 35579 - protein, 37 aa, Artificial Sequence
  Cyclic GFR-binding peptide
  MOD_RES (2)..(3)..(35)..(37): Xaa is C or S
AXXVPTELSPISMLYIDENEKVVYKQYEDMVVEGXGX

SEQ ID NO: 35580 - protein, 32 aa, Artificial Sequence
  Cyclic GFR-binding peptide
  MOD_RES (29)..(31): Xaa is C or S
QDLEPISILYLIGKTPKIKFKYEMIVKSXKXS

SEQ ID NO: 35581 - protein, 23 aa, Artificial Sequence
  Cyclic GFR-binding peptide
LSPISMLYKDENEKVVLKYHYDM

SEQ ID NO: 35582 - protein, 25 aa, Artificial Sequence
  Cyclic GFR-binding peptide
DLSPISILYIVGRTPKVYKQYEMVV

SEQ ID NO: 35583 - protein, 30 aa, Artificial Sequence
  Cyclic GFR-binding peptide
  MOD_RES (4)..(4): Xaa is C or S
KPTXAPTKLEPISVLYLDDSSNVIKFKYEN

SEQ ID NO: 35584 - protein, 24 aa, Artificial Sequence
  Cyclic GFR-binding peptide
ARLEPISILYLDAANNVVKFKYED

SEQ ID NO: 35585 - protein, 34 aa, Artificial Sequence; identical to SEQ ID NO: 7175
  Cyclic GFR-binding peptide
  MOD_RES (31)..(33): Xaa is C or S

SEQ ID NO: 35586 - protein, 29 aa, Artificial Sequence
  Cyclic GFR-binding peptide
  MOD_RES (27)..(29): Xaa is C or S
LSPISILYKIGKTPKILKYHYMIVKSXKX

SEQ ID NO: 35587 - protein, 32 aa, Artificial Sequence
  Cyclic GFR-binding peptide
  MOD_RES (31)..(31): Xaa is C or S
PTELSPISMLYIDENEKVVYKQYEDMVVEGXG

SEQ ID NO: 35588 - protein, 32 aa, Artificial Sequence; identical to SEQ ID NO: 7179
  Cyclic GFR-binding peptide
  MOD_RES (3)..(4): Xaa is C or S

SEQ ID NO: 35589 - protein, 22 aa, Artificial Sequence
  Cyclic GFR-binding peptide
LSPISMLYKDENEKVVLKYHYD

SEQ ID NO: 35590 - protein, 30 aa, Artificial Sequence
  Cyclic GFR-binding peptide
  MOD_RES (29)..(29): Xaa is C or S
KLNAISILYFDKGVVTYLKKYRGMAVSEXG

SEQ ID NO: 35591 - protein, 29 aa, Artificial Sequence
  Cyclic GFR-binding peptide
SQDLSPISILYIIGKTPKIYKQYEMIVKS

SEQ ID NO: 35592 - protein, 34 aa, Artificial Sequence
  Cyclic GFR-binding peptide
  MOD_RES (31)..(33): Xaa is C or S
PTKLEPISVLYLDSSNNVIKFKYENMVVKAXGXH

SEQ ID NO: 35593 - protein, 26 aa, Artificial Sequence
  Cyclic GFR-binding peptide
ELEPISMLYLDEYDKVVKFKYEEMVV

SEQ ID NO: 35594 - protein, 23 aa, Artificial Sequence
  Cyclic GFR-binding peptide
QDLEPISILYLIGKTPKIKFKYE

SEQ ID NO: 35595 - protein, 37 aa, Artificial Sequence
  Cyclic GFR-binding peptide
  MOD_RES (4)..(5)..(37): Xaa is C or S
PASXXVPARLSPISILYKDAANNVVLKYHYDMVVEAX

SEQ ID NO: 35596 - protein, 28 aa, Artificial Sequence
  Cyclic GFR-binding peptide
TELSPISMLYIDENEKVVYKQYEDMVVE

SEQ ID NO: 35597 - protein, 32 aa, Artificial Sequence; identical to SEQ ID NO: 7183
  Cyclic GFR-binding peptide
  MOD_RES (6)..(7): Xaa is C or S

SEQ ID NO: 35598 - protein, 25 aa, Artificial Sequence
  Cyclic GFR-binding peptide
NAISMLYFDEYDKVVLKKYREMVVE

SEQ ID NO: 35599 - protein, 33 aa, Artificial Sequence
  Cyclic GFR-binding peptide
  MOD_RES (1)..(2): Xaa is C or S
XXVPTELSPISMLYIDENEKVVYKQYEDMVVEG

SEQ ID NO: 35600 - protein, 27 aa, Artificial Sequence
  Cyclic GFR-binding peptide
  MOD_RES (26)..(26): Xaa is C or S
EPISILYLIGKTPKIKFKYEMIVKSXK

SEQ ID NO: 35601 - protein, 38 aa, Artificial Sequence
  Cyclic GFR-binding peptide
  MOD_RES (4)..(36)..(38): Xaa is C or S
KPTXAPTKLEPISVLYLDDSSNVIKFKYENMVVRSXGX

SEQ ID NO: 35602 - protein, 25 aa, Artificial Sequence
  Cyclic GFR-binding peptide
TKLSPISVLYKDSSNNVILKYHYNM

SEQ ID NO: 35603 - protein, 35 aa, Artificial Sequence; identical to SEQ ID NO: 7193
  Cyclic GFR-binding peptide
  MOD_RES (4)..(5): Xaa is C or S

SEQ ID NO: 35604 - protein, 29 aa, Artificial Sequence
  Cyclic GFR-binding peptide
  MOD_RES (1)..(1): Xaa is C or S
XVSQDLSPISILYIIGKTPKIYKQYEMIV

SEQ ID NO: 35605 - protein, 30 aa, Artificial Sequence
  Cyclic GFR-binding peptide
  MOD_RES (1)..(2): Xaa is C or S
XXVPTKLSPISILYIDKGVVTYYKQYEGMA

SEQ ID NO: 35606 - protein, 33 aa, Artificial Sequence
  Cyclic GFR-binding peptide
  MOD_RES (4)..(5): Xaa is C or S
PKAXXVPTELSPISMLYIDEYDKVVYKQYEEMV

SEQ ID NO: 35607 - protein, 34 aa, Artificial Sequence
  Cyclic GFR-binding peptide
  MOD_RES (2)..(3)..(34): Xaa is C or S
PXXVPQDLSPISILYIVGRTPKVYKQYEMVVKSX

SEQ ID NO: 35608 - protein, 31 aa, Artificial Sequence; identical to SEQ ID NO: 7198
  Cyclic GFR-binding peptide
  MOD_RES (30)..(30): Xaa is C or S

SEQ ID NO: 35609 - protein, 20 aa, Artificial Sequence
  Cyclic GFR-binding peptide
SPISILYIVGRTPKVYKQYE

SEQ ID NO: 35610 - protein, 26 aa, Artificial Sequence
  Cyclic GFR-binding peptide
VPTKLNAISILYFDKGVVTYLKKYRG

SEQ ID NO: 35611 - protein, 26 aa, Artificial Sequence
  Cyclic GFR-binding peptide
LEPISILYLVGRKPKVKFKYEMIVRS

SEQ ID NO: 35612 - protein, 33 aa, Artificial Sequence
  Cyclic GFR-binding peptide
  MOD_RES (32)..(32): Xaa is C or S
APTKLEPISVLYLDSSNNVIKFKYENMVVKAXG

SEQ ID NO: 35613 - protein, 23 aa, Artificial Sequence
  Cyclic GFR-binding peptide
TELEPISMLYLDEYDKVVKFKYE

SEQ ID NO: 35614 - protein, 31 aa, Artificial Sequence
  Cyclic GFR-binding peptide
  MOD_RES (5)..(6): Xaa is C or S
SASPXXVSQDLSPISILYIIGKTPKIYKQYE

SEQ ID NO: 35615 - protein, 27 aa, Artificial Sequence
  Cyclic GFR-binding peptide
TKLEPISVLYLDDSSNVIKFKYENMVV

SEQ ID NO: 35616 - protein, 24 aa, Artificial Sequence
  Cyclic GFR-binding peptide
LSPISILYKDAANNVVLKYHYDMV

SEQ ID NO: 35617 - protein, 27 aa, Artificial Sequence
  Cyclic GFR-binding peptide
TELSPISMLYIDEYDKVVYKQYEEMVV

SEQ ID NO: 35618 - protein, 30 aa, Artificial Sequence; identical to SEQ ID NO: 7205
  Cyclic GFR-binding peptide

SEQ ID NO: 35619 - protein, 32 aa, Artificial Sequence
  Cyclic GFR-binding peptide
  MOD_RES (2)..(3): Xaa is C or S
SXXVPARLNAISILYFDAANNVVLKKYRDMVV

SEQ ID NO: 35620 - protein, 23 aa, Artificial Sequence
  Cyclic GFR-binding peptide
NAISILYFVGRTPKVLKKYRMVV

SEQ ID NO: 35621 - protein, 32 aa, Artificial Sequence; identical to SEQ ID NO: 7207
  Cyclic GFR-binding peptide
  MOD_RES (1)..(2): Xaa is C or S

SEQ ID NO: 35622 - protein, 28 aa, Artificial Sequence
  Cyclic GFR-binding peptide
PQALEPISILYLVGRKPKVKFKYEMIVR

SEQ ID NO: 35623 - protein, 21 aa, Artificial Sequence
  Cyclic GFR-binding peptide
LEPISILYLDAANNVVKFKYE

SEQ ID NO: 35624 - protein, 28 aa, Artificial Sequence
  Cyclic GFR-binding peptide
TQLEPISVLYLDDSSNVIKFKYENMVVR

SEQ ID NO: 35625 - protein, 21 aa, Artificial Sequence
  Cyclic GFR-binding peptide
LSPISILYKVGRTPKVLKYHY

SEQ ID NO: 35626 - protein, 26 aa, Artificial Sequence
  Cyclic GFR-binding peptide
ELSPISMLYKDENEKVVLKYHYDMVV

SEQ ID NO: 35627 - protein, 40 aa, Artificial Sequence; identical to SEQ ID NO: 7211
  Cyclic GFR-binding peptide
  MOD_RES (6)..(7)..(39): Xaa is C or S

SEQ ID NO: 35628 - protein, 31 aa, Artificial Sequence
  Cyclic GFR-binding peptide
  MOD_RES (2)..(3): Xaa is C or S
AXXAPTKLSPISVLYIDSSNNVIYKQYENMV

SEQ ID NO: 35629 - protein, 29 aa, Artificial Sequence
  Cyclic GFR-binding peptide
  MOD_RES (3)..(4): Xaa is C or S
KAXXVPTELNAISMLYFDENEKVVLKKYR

SEQ ID NO: 35630 - protein, 31 aa, Artificial Sequence; identical to SEQ ID NO: 7214
  Cyclic GFR-binding peptide
  MOD_RES (5)..(6): Xaa is C or S

SEQ ID NO: 35631 - skipped

SEQ ID NO: 35632 - protein, 37 aa, Artificial Sequence
  Cyclic GFR-binding peptide
  MOD_RES (5)..(6): Xaa is C or S
VPKPXXAPTKLSPISVLYIDDSSNVIYKQYENMVVRS

SEQ ID NO: 35633 - protein, 26 aa, Artificial Sequence
  Cyclic GFR-binding peptide
QALNAISILYFVGRKPKVLKKYRMIV

SEQ ID NO: 35634 - protein, 37 aa, Artificial Sequence
  Cyclic GFR-binding peptide
  MOD_RES (5)..(6): Xaa is C or S
VPKPXXAPTQLEPISVLYLDDSSNVIKFKYENMVVRA

SEQ ID NO: 35635 - protein, 40 aa, Artificial Sequence; identical to SEQ ID NO: 7216
  Cyclic GFR-binding peptide
  MOD_RES (6)..(7)..(38)..(40): Xaa is C or S

SEQ ID NO: 35636 - protein, 32 aa, Artificial Sequence
  Cyclic GFR-binding peptide
  MOD_RES (4)..(4): Xaa is C or S
KPTXAPTKLEPISVLYLDDSSNVIKFKYENMV

SEQ ID NO: 35637 - protein, 33 aa, Artificial Sequence
  Cyclic GFR-binding peptide
  MOD_RES (1)..(2)..(33): Xaa is C or S
XXVSQDLSPISILYIIGKTPKIYKQYEMIVKSX

SEQ ID NO: 35638 - protein, 26 aa, Artificial Sequence
  Cyclic GFR-binding peptide
PTELSPISMLYKDENEKVVLKYHYDM

SEQ ID NO: 35639 - protein, 23 aa, Artificial Sequence
  Cyclic GFR-binding peptide
QDLNAISILYFVGRTPKVLKKYR

SEQ ID NO: 35640 - protein, 24 aa, Artificial Sequence
  Cyclic GFR-binding peptide
EPISMLYLDENEKVVKFKYEDMVV

SEQ ID NO: 35641 - protein, 34 aa, Artificial Sequence; identical to SEQ ID NO: 7221
  Cyclic GFR-binding peptide
  MOD_RES (4)..(5): Xaa is C or S

SEQ ID NO: 35642 - protein, 24 aa, Artificial Sequence
  Cyclic GFR-binding peptide
PQDLEPISILYLVGRTPKVKFKYE

SEQ ID NO: 35643 - protein, 28 aa, Artificial Sequence
  Cyclic GFR-binding peptide
  MOD_RES (28)..(28): Xaa is C or S
ALNAISILYFVGRKPKVLKKYRMIVRSX

SEQ ID NO: 35644 - protein, 36 aa, Artificial Sequence; identical to SEQ ID NO: 7223
  Cyclic GFR-binding peptide
  MOD_RES (4)..(5)..(36): Xaa is C or S

SEQ ID NO: 35645 - protein, 26 aa, Artificial Sequence
  Cyclic GFR-binding peptide
SPISVLYIDSSNNVIYKQYENMVVKA

SEQ ID NO: 35646 - protein, 29 aa, Artificial Sequence
  Cyclic GFR-binding peptide
  MOD_RES (3)..(4): Xaa is C or S
ASXXVPARLNAISILYFDAANNVVLKKYR

SEQ ID NO: 35647 - protein, 30 aa, Artificial Sequence
  Cyclic GFR-binding peptide
  MOD_RES (4)..(5): Xaa is C or S
GKAXXVPTKLEPISVLYLDDMGVPTKFKYE

SEQ ID NO: 35648 - protein, 29 aa, Artificial Sequence
  Cyclic GFR-binding peptide
TKLSPISVLYKDSSNNVILKYHYNMVVKA

SEQ ID NO: 35649 - protein, 27 aa, Artificial Sequence
  Cyclic GFR-binding peptide
DLNAISILYFIGKTPKILKKYRMIVKS

SEQ ID NO: 35650 - protein, 32 aa, Artificial Sequence
  Cyclic GFR-binding peptide
  MOD_RES (31)..(31): Xaa is C or S
VPQALSPISILYIVGRKPKVYKQYEMIVRSXK

SEQ ID NO: 35651 - protein, 32 aa, Artificial Sequence
  Cyclic GFR-binding peptide
  MOD_RES (4)..(5): Xaa is C or S
PKPXXAPTKLSPISVLYIDDSSNVIYKQYENM

SEQ ID NO: 35652 - protein, 26 aa, Artificial Sequence
  Cyclic GFR-binding peptide
KLSPISVLYKDDSSNVILKYHYNMVV

SEQ ID NO: 35653 - protein, 31 aa, Artificial Sequence
  Cyclic GFR-binding peptide
  MOD_RES (1)..(1): Xaa is C or S
XAPTQLSPISVLYIDDSSNVIYKQYENMVVR

SEQ ID NO: 35654 - protein, 35 aa, Artificial Sequence
  Cyclic GFR-binding peptide
  MOD_RES (7)..(7): Xaa is C or S
HVTKPTXAPTKLSPISVLYIDDSSNVIYKQYENMV

SEQ ID NO: 35655 - protein, 27 aa, Artificial Sequence
  Cyclic GFR-binding peptide
PQDLNAISILYFVGRTPKVLKKYRMVV

SEQ ID NO: 35656 - protein, 40 aa, Artificial Sequence
  Cyclic GFR-binding peptide
  MOD_RES (6)..(7)..(39): Xaa is C or S
TVPKPXXAPTQLSPISVLYIDDSSNVIYKQYENMVVRAXG

SEQ ID NO: 35657 - protein, 25 aa, Artificial Sequence
  Cyclic GFR-binding peptide
SPISILYKDAANNVVLKYHYDMVVE

SEQ ID NO: 35658 - protein, 36 aa, Artificial Sequence
  Cyclic GFR-binding peptide
  MOD_RES (3)..(4): Xaa is C or S
KAXXVPTKLEPISVLYLDDMGVPTKFKYEEGMSVAE

SEQ ID NO: 35659 - protein, 27 aa, Artificial Sequence
  Cyclic GFR-binding peptide
APTKLSPISVLYKDSSNNVILKYHYNM

SEQ ID NO: 35660 - protein, 23 aa, Artificial Sequence
  Cyclic GFR-binding peptide
KLNAISILYFDKGVVTYLKKYRG

SEQ ID NO: 35661 - protein, 22 aa, Artificial Sequence
  Cyclic GFR-binding peptide
KLSPISVLYKDDSSNVILKYHY

SEQ ID NO: 35662 - protein, 33 aa, Artificial Sequence; identical to SEQ ID NO: 7237
  Cyclic GFR-binding peptide
  MOD_RES (1)..(2)..(33): Xaa is C or S

SEQ ID NO: 35663 - protein, 37 aa, Artificial Sequence
  Cyclic GFR-binding peptide
  MOD_RES (3)..(4)..(36): Xaa is C or S
KAXXVPTKLNAISILYFDKGVVTYLKKYRGMAVSEXG

SEQ ID NO: 35664 - protein, 31 aa, Artificial Sequence
  Cyclic GFR-binding peptide
  MOD_RES (31)..(31): Xaa is C or S
TKLSPISVLYIDDMGVPTYKQYEEGMSVAEX

SEQ ID NO: 35665 - protein, 26 aa, Artificial Sequence
  Cyclic GFR-binding peptide
  MOD_RES (1)..(1): Xaa is C or S
XAPTKLEPISVLYLDDSSNVIKFKYE

SEQ ID NO: 35666 - protein, 25 aa, Artificial Sequence
  Cyclic GFR-binding peptide
VSQDLSPISILYKIGKTPKILKYHY

SEQ ID NO: 35667 - protein, 41 aa, Artificial Sequence
  Cyclic GFR-binding peptide
  MOD_RES (5)..(6)..(38)..(40): Xaa is C or S
VPKPXXAPTQLEPISVLYLDDSSNVIKFKYENMVVRAXGXH

SEQ ID NO: 35668 - protein, 39 aa, Artificial Sequence; identical to SEQ ID NO: 7243
  Cyclic GFR-binding peptide
  MOD_RES (5)..(6)..(38): Xaa is C or S

SEQ ID NO: 35669 - protein, 37 aa, Artificial Sequence; identical to SEQ ID NO: 7244
  Cyclic GFR-binding peptide
  MOD_RES (3)..(4)..(36): Xaa is C or S

SEQ ID NO: 35670 - protein, 31 aa, Artificial Sequence
  Cyclic GFR-binding peptide
  MOD_RES (2)..(3): Xaa is C or S
AXXVPTKLSPISVLYIDDMGVPTYKQYEEGM

SEQ ID NO: 35671 - protein, 28 aa, Artificial Sequence
  Cyclic GFR-binding peptide
  MOD_RES (1)..(1): Xaa is C or S
XVPQALSPISILYKVGRKPKVLKYHYMI

SEQ ID NO: 35672 - protein, 32 aa, Artificial Sequence
  Cyclic GFR-binding peptide
  MOD_RES (29)..(31): Xaa is C or S
KLSPISVLYIDSSNNVIYKQYENMVVKAXGXH

SEQ ID NO: 35673 - protein, 27 aa, Artificial Sequence
  Cyclic GFR-binding peptide
PTKLEPISVLYLDDSSNVIKFKYENMV

SEQ ID NO: 35674 - protein, 31 aa, Artificial Sequence
  Cyclic GFR-binding peptide
  MOD_RES (1)..(2): Xaa is C or S
XXVPTELSPISMLYIDENEKVVYKQYEDMVV

SEQ ID NO: 35675 - protein, 26 aa, Artificial Sequence
  Cyclic GFR-binding peptide
LNAISMLYFDENEKVVLKKYRDMVVE

SEQ ID NO: 35676 - protein, 21 aa, Artificial Sequence
  Cyclic GFR-binding peptide
SPISVLYIDDSSNVIYKQYEN

SEQ ID NO: 35677 - protein, 30 aa, Artificial Sequence
  Cyclic GFR-binding peptide
  MOD_RES (1)..(2): Xaa is C or S
XXVPTKLSPISVLYIDDMGVPTYKQYEEGM

SEQ ID NO: 35678 - protein, 36 aa, Artificial Sequence; identical to SEQ ID NO: 7249
  Cyclic GFR-binding peptide
  MOD_RES (1)..(33)..(35): Xaa is C or S

SEQ ID NO: 35679 - protein, 42 aa, Artificial Sequence
  Cyclic GFR-binding peptide
  MOD_RES (6)..(7)..(39)..(41): Xaa is C or S
TVPKPXXAPTQLSPISVLYIDDSSNVIYKQYENMVVRAXGXH

SEQ ID NO: 35680 - protein, 22 aa, Artificial Sequence
  Cyclic GFR-binding peptide
KLEPISVLYLDDMGVPTKFKYE

SEQ ID NO: 35681 - protein, 26 aa, Artificial Sequence
  Cyclic GFR-binding peptide
  MOD_RES (1)..(1): Xaa is C or S
XVPTKLNAISILYFDKGVVTYLKKYR

SEQ ID NO: 35682 - protein, 27 aa, Artificial Sequence
  Cyclic GFR-binding peptide
TQLSPISVLYKDDSSNVILKYHYNMVV

SEQ ID NO: 35683 - protein, 32 aa, Artificial Sequence; identical to SEQ ID NO: 7252
  Cyclic GFR-binding peptide
  MOD_RES (3)..(4): Xaa is C or S

SEQ ID NO: 35684 - protein, 24 aa, Artificial Sequence
  Cyclic GFR-binding peptide
TELSPISMLYKDENEKVVLKYHYD

SEQ ID NO: 35685 - protein, 26 aa, Artificial Sequence
  Cyclic GFR-binding peptide
ALSPISILYKVGRKPKVLKYHYMIVR

SEQ ID NO: 35686 - protein, 31 aa, Artificial Sequence
  Cyclic GFR-binding peptide
  MOD_RES (2)..(3): Xaa is C or S
AXXVPTKLSPISILYIDKGVVTYYKQYEGMA

SEQ ID NO: 35687 - protein, 28 aa, Artificial Sequence
  Cyclic GFR-binding peptide
ELSPISMLYKDENEKVVLKYHYDMVVEG

SEQ ID NO: 35688 - protein, 33 aa, Artificial Sequence; identical to SEQ ID NO: 7262
  Cyclic GFR-binding peptide
  MOD_RES (32)..(32): Xaa is C or S

SEQ ID NO: 35689 - protein, 40 aa, Artificial Sequence
  Cyclic GFR-binding peptide
  MOD_RES (5)..(6)..(38)..(40): Xaa is C or S
VPKPXXAPTQLSPISVLYIDDSSNVIYKQYENMVVRAXGX

SEQ ID NO: 35690 - protein, 24 aa, Artificial Sequence
  Cyclic GFR-binding peptide
SPISILYKIGKTPKILKYHYMIVK

SEQ ID NO: 35691 - protein, 29 aa, Artificial Sequence
  Cyclic GFR-binding peptide
  MOD_RES (28)..(28): Xaa is C or S
LSPISVLYIDDSSNVIYKQYENMVVRSXG

SEQ ID NO: 35692 - protein, 27 aa, Artificial Sequence
  Cyclic GFR-binding peptide
  MOD_RES (27)..(27): Xaa is C or S
EPISVLYLDSSNNVIKFKYENMVVKAX

SEQ ID NO: 35693 - protein, 31 aa, Artificial Sequence
  Cyclic GFR-binding peptide
  MOD_RES (29)..(31): Xaa is C or S
QLSPISVLYIDDSSNVIYKQYENMVVRAXGX

SEQ ID NO: 35694 - protein, 27 aa, Artificial Sequence
  Cyclic GFR-binding peptide
  MOD_RES (1)..(2): Xaa is C or S
XXVSQDLNAISILYFIGKTPKILKKYR

SEQ ID NO: 35695 - protein, 23 aa, Artificial Sequence
  Cyclic GFR-binding peptide
LSPISILYKDKGVVTYLKYHYGM

SEQ ID NO: 35696 - protein, 30 aa, Artificial Sequence
  Cyclic GFR-binding peptide
  MOD_RES (3)..(4): Xaa is C or S
SPXXVPQDLEPISILYLVGRTPKVKFKYEM

SEQ ID NO: 35697 - protein, 31 aa, Artificial Sequence; identical to SEQ ID NO: 7267
  Cyclic GFR-binding peptide
  MOD_RES (4)..(5): Xaa is C or S

SEQ ID NO: 35698 - protein, 37 aa, Artificial Sequence
  Cyclic GFR-binding peptide
  MOD_RES (2)..(3)..(35)..(37): Xaa is C or S
AXXVPTKLSPISILYIDKGVVTYYKQYEGMAVSEXGX

SEQ ID NO: 35699 - protein, 35 aa, Artificial Sequence; identical to SEQ ID NO: 7268
  Cyclic GFR-binding peptide
  MOD_RES (3)..(4)..(35): Xaa is C or S

SEQ ID NO: 35700 - protein, 29 aa, Artificial Sequence
  Cyclic GFR-binding peptide
  MOD_RES (28)..(28): Xaa is C or S
LNAISVLYFDSSNNVILKKYRNMVVKAXG

SEQ ID NO: 35701 - protein, 27 aa, Artificial Sequence
  Cyclic GFR-binding peptide
DLEPISILYLVGRTPKVKFKYEMVVKS

SEQ ID NO: 35702 - protein, 31 aa, Artificial Sequence
  Cyclic GFR-binding peptide
  MOD_RES (28)..(30): Xaa is C or S
LNAISILYFDKGVVTYLKKYRGMAVSEXGXR

SEQ ID NO: 35703 - protein, 36 aa, Artificial Sequence
  Cyclic GFR-binding peptide
  MOD_RES (4)..(5): Xaa is C or S
PKAXXAPTKLEPISVLYLDSSNNVIKFKYENMVVKA

SEQ ID NO: 35704 - protein, 32 aa, Artificial Sequence
  Cyclic GFR-binding peptide
  MOD_RES (1)..(2): Xaa is C or S
XXAPTKLEPISVLYLDSSNNVIKFKYENMVVK

SEQ ID NO: 35705 - protein, 39 aa, Artificial Sequence
  Cyclic GFR-binding peptide
  MOD_RES (7)..(39): Xaa is C or S
HVTKPTXAPTKLSPISVLYIDDSSNVIYKQYENMVVRSX

SEQ ID NO: 35706 - protein, 31 aa, Artificial Sequence
  Cyclic GFR-binding peptide
  MOD_RES (5)..(6): Xaa is C or S
VGKAXXVPTKLEPISVLYLDDMGVPTKFKYE

SEQ ID NO: 35707 - protein, 26 aa, Artificial Sequence
  Cyclic GFR-binding peptide
PARLNAISILYFDAANNVVLKKYRDM

SEQ ID NO: 35708 - protein, 36 aa, Artificial Sequence
  Cyclic GFR-binding peptide
  MOD_RES (5)..(6): Xaa is C or S
SASPXXVPQDLEPISILYLVGRTPKVKFKYEMVVKS

SEQ ID NO: 35709 - protein, 27 aa, Artificial Sequence
  Cyclic GFR-binding peptide
QDLEPISILYLIGKTPKIKFKYEMIVK

SEQ ID NO: 35710 - protein, 35 aa, Artificial Sequence
  Cyclic GFR-binding peptide
  MOD_RES (1)..(2)..(33)..(35): Xaa is C or S
XXVPQALEPISILYLVGRKPKVKFKYEMIVRSXKX

SEQ ID NO: 35711 - protein, 29 aa, Artificial Sequence
  Cyclic GFR-binding peptide
VPTKLNAISVLYFDDMGVPTLKKYREGMS

SEQ ID NO: 35712 - protein, 28 aa, Artificial Sequence
  Cyclic GFR-binding peptide
APTKLSPISVLYKDSSNNVILKYHYNMV

SEQ ID NO: 35713 - protein, 37 aa, Artificial Sequence
  Cyclic GFR-binding peptide
  MOD_RES (6)..(7): Xaa is C or S
ASAAPXXVPQALEPISILYLVGRKPKVKFKYEMIVRS

SEQ ID NO: 35714 - protein, 28 aa, Artificial Sequence
  Cyclic GFR-binding peptide
  MOD_RES (1)..(2): Xaa is C or S
XXVPTELNAISMLYFDENEKVVLKKYRD

SEQ ID NO: 35715 - protein, 27 aa, Artificial Sequence
  Cyclic GFR-binding peptide
ELSPISMLYIDENEKVVYKQYEDMVVE

SEQ ID NO: 35716 - protein, 34 aa, Artificial Sequence; identical to SEQ ID NO: 7282
  Cyclic GFR-binding peptide
  MOD_RES (4)..(5): Xaa is C or S

SEQ ID NO: 35717 - protein, 31 aa, Artificial Sequence; identical to SEQ ID NO: 7285
  Cyclic GFR-binding peptide
  MOD_RES (3)..(4): Xaa is C or S

SEQ ID NO: 35718 - protein, 33 aa, Artificial Sequence; identical to SEQ ID NO: 7286
  Cyclic GFR-binding peptide
  MOD_RES (6)..(7): Xaa is C or S

SEQ ID NO: 35719 - protein, 24 aa, Artificial Sequence
  Cyclic GFR-binding peptide
LNAISMLYFDENEKVVLKKYRDMV

SEQ ID NO: 35720 - protein, 23 aa, Artificial Sequence
  Cyclic GFR-binding peptide
TELNAISMLYFDENEKVVLKKYR

SEQ ID NO: 35721 - protein, 31 aa, Artificial Sequence
  Cyclic GFR-binding peptide
  MOD_RES (4)..(5): Xaa is C or S
SKAXXVPTKLSPISILYIDKGVVTYYKQYEG

SEQ ID NO: 35722 - protein, 25 aa, Artificial Sequence
  Cyclic GFR-binding peptide
TKLNAISVLYFDSSNNVILKKYRNM

SEQ ID NO: 35723 - protein, 24 aa, Artificial Sequence
  Cyclic GFR-binding peptide
LSPISILYKDKGVVTYLKYHYGMA

SEQ ID NO: 35724 - protein, 39 aa, Artificial Sequence
  Cyclic GFR-binding peptide
  MOD_RES (6)..(38): Xaa is C or S
VTKPTXAPTKLEPISVLYLDDSSNVIKFKYENMVVRSXG

SEQ ID NO: 35725 - protein, 28 aa, Artificial Sequence
  Cyclic GFR-binding peptide
PTQLSPISVLYIDDSSNVIYKQYENMVV

SEQ ID NO: 35726 - protein, 24 aa, Artificial Sequence
  Cyclic GFR-binding peptide
NAISMLYFDENEKVVLKKYRDMVV

SEQ ID NO: 35727 - protein, 34 aa, Artificial Sequence
  Cyclic GFR-binding peptide
  MOD_RES (5)..(6): Xaa is C or S
ASKAXXVPTKLNAISILYFDKGVVTYLKKYRGMA

SEQ ID NO: 35728 - protein, 33 aa, Artificial Sequence
  Cyclic GFR-binding peptide
  MOD_RES (31)..(33): Xaa is C or S
VPQALSPISILYIVGRKPKVYKQYEMIVRSXKX

SEQ ID NO: 35729 - protein, 36 aa, Artificial Sequence
  Cyclic GFR-binding peptide
  MOD_RES (1)..(33)..(35): Xaa is C or S
XAPTQLSPISVLYIDDSSNVIYKQYENMVVRAXGXH

SEQ ID NO: 35730 - protein, 32 aa, Artificial Sequence
  Cyclic GFR-binding peptide
  MOD_RES (5)..(6): Xaa is C or S
APASXXVPARLSPISILYKDAANNVVLKYHYD

SEQ ID NO: 35731 - protein, 26 aa, Artificial Sequence
  Cyclic GFR-binding peptide
TELSPISMLYKDEYDKVVLKYHYEMV

SEQ ID NO: 35732 - protein, 30 aa, Artificial Sequence; identical to SEQ ID NO: 7304
  Cyclic GFR-binding peptide
  MOD_RES (1)..(2): Xaa is C or S

SEQ ID NO: 35733 - protein, 29 aa, Artificial Sequence
  Cyclic GFR-binding peptide
VPTELSPISMLYKDENEKVVLKYHYDMVV

SEQ ID NO: 35734 - protein, 41 aa, Artificial Sequence; identical to SEQ ID NO: 7306
  Cyclic GFR-binding peptide
  MOD_RES (5)..(6)..(38)..(40): Xaa is C or S

SEQ ID NO: 35735 - protein, 37 aa, Artificial Sequence
  Cyclic GFR-binding peptide
  MOD_RES (2)..(3)..(35)..(37): Xaa is C or S
SXXVPARLSPISILYKDAANNVVLKYHYDMVVEAXGX

SEQ ID NO: 35736 - protein, 32 aa, Artificial Sequence
  Cyclic GFR-binding peptide
  MOD_RES (1)..(1): Xaa is C or S
XVPTELSPISMLYIDENEKVVYKQYEDMVVEG

SEQ ID NO: 35737 - protein, 42 aa, Artificial Sequence
  Cyclic GFR-binding peptide
  MOD_RES (5)..(6)..(39)..(41): Xaa is C or S
VGKAXXVPTKLEPISVLYLDDMGVPTKFKYEEGMSVAEXGXR

SEQ ID NO: 35738 - protein, 35 aa, Artificial Sequence
  Cyclic GFR-binding peptide
  MOD_RES (32)..(34): Xaa is C or S
VPTKLSPISILYKDKGVVTYLKYHYGMAVSEXGXR

SEQ ID NO: 35739 - protein, 28 aa, Artificial Sequence
  Cyclic GFR-binding peptide
  MOD_RES (28)..(28): Xaa is C or S
DLEPISILYLVGRTPKVKFKYEMVVKSX

SEQ ID NO: 35740 - protein, 38 aa, Artificial Sequence
  Cyclic GFR-binding peptide
  MOD_RES (2)..(3)..(35)..(37): Xaa is C or S
AXXVPTELEPISMLYLDENEKVVKFKYEDMVVEGXGXR

SEQ ID NO: 35741 - protein, 35 aa, Artificial Sequence; identical to SEQ ID NO: 7312
  Cyclic GFR-binding peptide
  MOD_RES (3)..(4): Xaa is C or S

SEQ ID NO: 35742 - protein, 27 aa, Artificial Sequence
  Cyclic GFR-binding peptide
  MOD_RES (1)..(2): Xaa is C or S
XXAPTKLSPISVLYIDDSSNVIYKQYE

SEQ ID NO: 35743 - protein, 32 aa, Artificial Sequence; identical to SEQ ID NO: 7315
  Cyclic GFR-binding peptide
  MOD_RES (31)..(31): Xaa is C or S

SEQ ID NO: 35744 - protein, 30 aa, Artificial Sequence
  Cyclic GFR-binding peptide
  MOD_RES (1)..(1): Xaa is C or S
XVPTKLSPISVLYIDDMGVPTYKQYEEGMS

SEQ ID NO: 35745 - protein, 35 aa, Artificial Sequence
  Cyclic GFR-binding peptide
  MOD_RES (32)..(34): Xaa is C or S
VPARLSPISILYKDAANNVVLKYHYDMVVEAXGXR

SEQ ID NO: 35746 - protein, 28 aa, Artificial Sequence
  Cyclic GFR-binding peptide
  MOD_RES (2)..(3): Xaa is C or S
PXXAPTQLSPISVLYKDDSSNVILKYHY

SEQ ID NO: 35747 - protein, 33 aa, Artificial Sequence; identical to SEQ ID NO: 7319
  Cyclic GFR-binding peptide
  MOD_RES (5)..(6): Xaa is C or S

SEQ ID NO: 35748 - protein, 34 aa, Artificial Sequence
  Cyclic GFR-binding peptide
  MOD_RES (2)..(3)..(34): Xaa is C or S
PXXVPQALEPISILYLVGRKPKVKFKYEMIVRSX

SEQ ID NO: 35749 - protein, 38 aa, Artificial Sequence
  Cyclic GFR-binding peptide
  MOD_RES (3)..(4)..(35)..(37): Xaa is C or S
APXXVPQALSPISILYIVGRKPKVYKQYEMIVRSXKXS

SEQ ID NO: 35750 - protein, 32 aa, Artificial Sequence
  Cyclic GFR-binding peptide
  MOD_RES (1)..(1): Xaa is C or S
XAPTKLSPISVLYIDDSSNVIYKQYENMVVRS

SEQ ID NO: 35751 - protein, 31 aa, Artificial Sequence; identical to SEQ ID NO: 7321
  Cyclic GFR-binding peptide
  MOD_RES (4)..(5): Xaa is C or S

SEQ ID NO: 35752 - protein, 28 aa, Artificial Sequence
  Cyclic GFR-binding peptide
  MOD_RES (1)..(2): Xaa is C or S
XXVPTELNAISMLYFDEYDKVVLKKYRE

SEQ ID NO: 35753 - protein, 39 aa, Artificial Sequence
  Cyclic GFR-binding peptide
  MOD_RES (6)..(7): Xaa is C or S
KVGKAXXVPTKLEPISVLYLDDMGVPTKFKYEEGMSVAE

SEQ ID NO: 35754 - protein, 33 aa, Artificial Sequence
  Cyclic GFR-binding peptide
  MOD_RES (1)..(2): Xaa is C or S
XXVPTELSPISMLYIDEYDKVVYKQYEEMVVEG

SEQ ID NO: 35755 - protein, 26 aa, Artificial Sequence
  Cyclic GFR-binding peptide
LSPISILYIDKGVVTYYKQYEGMAVS

SEQ ID NO: 35756 - protein, 32 aa, Artificial Sequence
  Cyclic GFR-binding peptide
  MOD_RES (29)..(31): Xaa is C or S
QLSPISVLYIDDSSNVIYKQYENMVVRAXGXH

SEQ ID NO: 35757 - protein, 37 aa, Artificial Sequence
  Cyclic GFR-binding peptide
  MOD_RES (4)..(5)..(37): Xaa is C or S
SKAXXVPTKLSPISILYIDKGVVTYYKQYEGMAVSEX

SEQ ID NO: 35758 - protein, 28 aa, Artificial Sequence
  Cyclic GFR-binding peptide
  MOD_RES (27)..(27): Xaa is C or S
SPISILYKDAANNVVLKYHYDMVVEAXG

SEQ ID NO: 35759 - protein, 35 aa, Artificial Sequence
  Cyclic GFR-binding peptide
  MOD_RES (3)..(4): Xaa is C or S
ASXXVPARLNAISILYFDAANNVVLKKYRDMVVEA

SEQ ID NO: 35760 - protein, 27 aa, Artificial Sequence
  Cyclic GFR-binding peptide
QLSPISVLYKDDSSNVILKYHYNMVVR

SEQ ID NO: 35761 - protein, 37 aa, Artificial Sequence
  Cyclic GFR-binding peptide
  MOD_RES (1)..(2)..(34)..(36): Xaa is C or S
XXVPTKLSPISILYIDKGVVTYYKQYEGMAVSEXGXR

SEQ ID NO: 35762 - protein, 33 aa, Artificial Sequence; identical to SEQ ID NO: 7332
  Cyclic GFR-binding peptide
  MOD_RES (1)..(2): Xaa is C or S

SEQ ID NO: 35763 - protein, 32 aa, Artificial Sequence
  Cyclic GFR-binding peptide
  MOD_RES (2)..(3): Xaa is C or S
AXXVPTELSPISMLYIDEYDKVVYKQYEEMVV

SEQ ID NO: 35764 - protein, 22 aa, Artificial Sequence
  Cyclic GFR-binding peptide
DLSPISILYKVGRTPKVLKYHY

SEQ ID NO: 35765 - protein, 33 aa, Artificial Sequence
  Cyclic GFR-binding peptide
  MOD_RES (1)..(2): Xaa is C or S
XXVPTELEPISMLYLDEYDKVVKFKYEEMVVEG

SEQ ID NO: 35766 - protein, 25 aa, Artificial Sequence
  Cyclic GFR-binding peptide
VPQDLSPISILYIVGRTPKVYKQYE

SEQ ID NO: 35767 - protein, 36 aa, Artificial Sequence
  Cyclic GFR-binding peptide
  MOD_RES (2)..(3)..(35): Xaa is C or S
PXXAPTQLSPISVLYIDDSSNVIYKQYENMVVRAXG

SEQ ID NO: 35768 - protein, 24 aa, Artificial Sequence
  Cyclic GFR-binding peptide
QLEPISVLYLDDSSNVIKFKYENM

SEQ ID NO: 35769 - protein, 33 aa, Artificial Sequence
  Cyclic GFR-binding peptide
  MOD_RES (30)..(32): Xaa is C or S
TKLSPISILYIDKGVVTYYKQYEGMAVSEXGXR

SEQ ID NO: 35770 - protein, 26 aa, Artificial Sequence
  Cyclic GFR-binding peptide
TQLSPISVLYKDDSSNVILKYHYNMV

SEQ ID NO: 35771 - protein, 27 aa, Artificial Sequence
  Cyclic GFR-binding peptide
KLNAISVLYFDSSNNVILKKYRNMVVK

SEQ ID NO: 35772 - protein, 40 aa, Artificial Sequence; identical to SEQ ID NO: 7340
  Cyclic GFR-binding peptide
  MOD_RES (6)..(7)..(39): Xaa is C or S

SEQ ID NO: 35773 - protein, 39 aa, Artificial Sequence; identical to SEQ ID NO: 7341
  Cyclic GFR-binding peptide
  MOD_RES (6)..(7)..(38): Xaa is C or S

SEQ ID NO: 35774 - protein, 32 aa, Artificial Sequence; identical to SEQ ID NO: 7342
  Cyclic GFR-binding peptide
  MOD_RES (3)..(4): Xaa is C or S

SEQ ID NO: 35775 - protein, 30 aa, Artificial Sequence
  Cyclic GFR-binding peptide
  MOD_RES (30)..(30): Xaa is C or S
TELSPISMLYIDENEKVVYKQYEDMVVEGX

SEQ ID NO: 35776 - protein, 32 aa, Artificial Sequence; identical to SEQ ID NO: 7343
  Cyclic GFR-binding peptide
  MOD_RES (6)..(7): Xaa is C or S

SEQ ID NO: 35777 - protein, 35 aa, Artificial Sequence; identical to SEQ ID NO: 7344
  Cyclic GFR-binding peptide
  MOD_RES (6)..(7): Xaa is C or S

SEQ ID NO: 35778 - protein, 27 aa, Artificial Sequence
  Cyclic GFR-binding peptide
  MOD_RES (1)..(1): Xaa is C or S
XVPTELSPISMLYIDENEKVVYKQYED

SEQ ID NO: 35779 - protein, 42 aa, Artificial Sequence
  Cyclic GFR-binding peptide
  MOD_RES (6)..(7)..(39)..(41): Xaa is C or S
TVPKPXXAPTQLEPISVLYLDDSSNVIKFKYENMVVRAXGXH

SEQ ID NO: 35780 - protein, 28 aa, Artificial Sequence
  Cyclic GFR-binding peptide
TKLSPISILYIDKGVVTYYKQYEGMAVS

SEQ ID NO: 35781 - protein, 42 aa, Artificial Sequence
  Cyclic GFR-binding peptide
  MOD_RES (6)..(7)..(39)..(41): Xaa is C or S
AVPKAXXAPTKLEPISVLYLDSSNNVIKFKYENMVVKAXGXH

SEQ ID NO: 35782 - protein, 36 aa, Artificial Sequence; identical to SEQ ID NO: 7345
  Cyclic GFR-binding peptide
  MOD_RES (6)..(7): Xaa is C or S

SEQ ID NO: 35783 - protein, 28 aa, Artificial Sequence
  Cyclic GFR-binding peptide
PTELSPISMLYIDENEKVVYKQYEDMVV

SEQ ID NO: 35784 - protein, 38 aa, Artificial Sequence
  Cyclic GFR-binding peptide
  MOD_RES (3)..(4)..(37): Xaa is C or S
KAXXVPTKLSPISVLYIDDMGVPTYKQYEEGMSVAEXG

SEQ ID NO: 35785 - protein, 39 aa, Artificial Sequence; identical to SEQ ID NO: 7347
  Cyclic GFR-binding peptide
  MOD_RES (6)..(7)..(39): Xaa is C or S

SEQ ID NO: 35786 - protein, 31 aa, Artificial Sequence
  Cyclic GFR-binding peptide
  MOD_RES (3)..(3): Xaa is C or S
PTXAPTKLSPISVLYIDDSSNVIYKQYENMV

SEQ ID NO: 35787 - protein, 31 aa, Artificial Sequence; identical to SEQ ID NO: 7348
  Cyclic GFR-binding peptide
  MOD_RES (1)..(1): Xaa is C or S

SEQ ID NO: 35788 - protein, 36 aa, Artificial Sequence
  Cyclic GFR-binding peptide
  MOD_RES (6)..(7): Xaa is C or S
KIPKAXXVPTELEPISMLYLDENEKVVKFKYEDMVV

SEQ ID NO: 35789 - protein, 29 aa, Artificial Sequence
  Cyclic GFR-binding peptide
  MOD_RES (28)..(28): Xaa is C or S
LSPISVLYKDSSNNVILKYHYNMVVKAXG

SEQ ID NO: 35790 - protein, 26 aa, Artificial Sequence
  Cyclic GFR-binding peptide
ELNAISMLYFDEYDKVVLKKYREMVV

SEQ ID NO: 35791 - protein, 31 aa, Artificial Sequence
  Cyclic GFR-binding peptide
  MOD_RES (4)..(5): Xaa is C or S
SKAXXVPTKLNAISILYFDKGVVTYLKKYRG

SEQ ID NO: 35792 - protein, 27 aa, Artificial Sequence
  Cyclic GFR-binding peptide
VSQDLSPISILYIIGKTPKIYKQYEMI

SEQ ID NO: 35793 - protein, 28 aa, Artificial Sequence
  Cyclic GFR-binding peptide
  MOD_RES (1)..(2): Xaa is C or S
XXVPQDLSPISILYIVGRTPKVYKQYEM

SEQ ID NO: 35794 - protein, 35 aa, Artificial Sequence; identical to SEQ ID NO: 7356
  Cyclic GFR-binding peptide
  MOD_RES (5)..(6): Xaa is C or S

SEQ ID NO: 35795 - protein, 29 aa, Artificial Sequence
  Cyclic GFR-binding peptide
  MOD_RES (1)..(2): Xaa is C or S
XXVSQDLNAISILYFIGKTPKILKKYRMI

SEQ ID NO: 35796 - protein, 31 aa, Artificial Sequence
  Cyclic GFR-binding peptide
  MOD_RES (1)..(2): Xaa is C or S
XXAPTQLEPISVLYLDDSSNVIKFKYENMVV

SEQ ID NO: 35797 - protein, 35 aa, Artificial Sequence
  Cyclic GFR-binding peptide
  MOD_RES (32)..(34): Xaa is C or S
APTQLSPISVLYIDDSSNVIYKQYENMVVRAXGXH

SEQ ID NO: 35798 - protein, 26 aa, Artificial Sequence
  Cyclic GFR-binding peptide
SQDLSPISILYKIGKTPKILKYHYMI

SEQ ID NO: 35799 - protein, 35 aa, Artificial Sequence; identical to SEQ ID NO: 7363
  Cyclic GFR-binding peptide
  MOD_RES (4)..(5): Xaa is C or S

SEQ ID NO: 35800 - protein, 30 aa, Artificial Sequence; identical to SEQ ID NO: 7364
  Cyclic GFR-binding peptide
  MOD_RES (4)..(5): Xaa is C or S

SEQ ID NO: 35801 - protein, 34 aa, Artificial Sequence
  Cyclic GFR-binding peptide
  MOD_RES (1)..(2)..(34): Xaa is C or S
XXAPTKLEPISVLYLDDSSNVIKFKYENMVVRSX

SEQ ID NO: 35802 - protein, 40 aa, Artificial Sequence
  Cyclic GFR-binding peptide
  MOD_RES (4)..(5)..(37)..(39): Xaa is C or S
PASXXVPARLEPISILYLDAANNVVKFKYEDMVVEAXGXR

SEQ ID NO: 35803 - protein, 34 aa, Artificial Sequence; identical to SEQ ID NO: 7368
  Cyclic GFR-binding peptide
  MOD_RES (2)..(3)..(34): Xaa is C or S

SEQ ID NO: 35804 - protein, 28 aa, Artificial Sequence
  Cyclic GFR-binding peptide
VPTKLNAISILYFDKGVVTYLKKYRGMA

SEQ ID NO: 35805 - protein, 38 aa, Artificial Sequence; identical to SEQ ID NO: 7372
  Cyclic GFR-binding peptide
  MOD_RES (6)..(7)..(38): Xaa is C or S

SEQ ID NO: 35806 - protein, 32 aa, Artificial Sequence
  Cyclic GFR-binding peptide
  MOD_RES (29)..(31): Xaa is C or S
QLEPISVLYLDDSSNVIKFKYENMVVRAXGXH

SEQ ID NO: 35807 - protein, 32 aa, Artificial Sequence
  Cyclic GFR-binding peptide
  MOD_RES (3)..(4): Xaa is C or S
KPXXAPTKLEPISVLYLDDSSNVIKFKYENMV

SEQ ID NO: 35808 - protein, 31 aa, Artificial Sequence
  Cyclic GFR-binding peptide
  MOD_RES (29)..(31): Xaa is C or S
RLEPISILYLDAANNVVKFKYEDMVVEAXGX

SEQ ID NO: 35809 - protein, 29 aa, Artificial Sequence
  Cyclic GFR-binding peptide
  MOD_RES (3)..(4): Xaa is C or S
SPXXVSQDLSPISILYIIGKTPKIYKQYE

SEQ ID NO: 35810 - protein, 31 aa, Artificial Sequence
  Cyclic GFR-binding peptide
  MOD_RES (3)..(4): Xaa is C or S
KAXXVPTKLSPISILYIDKGVVTYYKQYEGM

SEQ ID NO: 35811 - protein, 27 aa, Artificial Sequence
  Cyclic GFR-binding peptide
  MOD_RES (27)..(27): Xaa is C or S
LSPISILYIIGKTPKIYKQYEMIVKSX

SEQ ID NO: 35812 - protein, 22 aa, Artificial Sequence
  Cyclic GFR-binding peptide
KLSPISVLYIDSSNNVIYKQYE

SEQ ID NO: 35813 - protein, 40 aa, Artificial Sequence
  Cyclic GFR-binding peptide
  MOD_RES (6)..(7)..(39): Xaa is C or S
SIPKAXXVPTELSPISMLYIDEYDKVVYKQYEEMVVEGXG

SEQ ID NO: 35814 - protein, 21 aa, Artificial Sequence
  Cyclic GFR-binding peptide
SPISMLYIDENEKVVYKQYED

SEQ ID NO: 35815 - protein, 33 aa, Artificial Sequence
  Cyclic GFR-binding peptide
  MOD_RES (6)..(7): Xaa is C or S
KVGKAXXVPTKLSPISVLYIDDMGVPTYKQYEE

SEQ ID NO: 35816 - protein, 26 aa, Artificial Sequence
  Cyclic GFR-binding peptide
PTKLEPISVLYLDDMGVPTKFKYEEG

SEQ ID NO: 35817 - protein, 31 aa, Artificial Sequence
  Cyclic GFR-binding peptide
  MOD_RES (31)..(31): Xaa is C or S
PTKLNAISILYFDKGVVTYLKKYRGMAVSEX

SEQ ID NO: 35818 - protein, 32 aa, Artificial Sequence; identical to SEQ ID NO: 7375
  Cyclic GFR-binding peptide
  MOD_RES (5)..(6): Xaa is C or S

SEQ ID NO: 35819 - protein, 38 aa, Artificial Sequence
  Cyclic GFR-binding peptide
  MOD_RES (2)..(3)..(35)..(37): Xaa is C or S
AXXVPTELSPISMLYIDENEKVVYKQYEDMVVEGXGXR

SEQ ID NO: 35820 - protein, 40 aa, Artificial Sequence
  Cyclic GFR-binding peptide
  MOD_RES (6)..(7)..(40): Xaa is C or S
KVGKAXXVPTKLEPISVLYLDDMGVPTKFKYEEGMSVAEX

SEQ ID NO: 35821 - protein, 39 aa, Artificial Sequence
  Cyclic GFR-binding peptide
  MOD_RES (3)..(4)..(36)..(38): Xaa is C or S
KAXXVPTKLSPISILYKDKGVVTYLKYHYGMAVSEXGXR

SEQ ID NO: 35822 - protein, 29 aa, Artificial Sequence
  Cyclic GFR-binding peptide
PTELNAISMLYFDEYDKVVLKKYREMVVE

SEQ ID NO: 35823 - protein, 30 aa, Artificial Sequence
  Cyclic GFR-binding peptide
PTKLEPISVLYLDSSNNVIKFKYENMVVKA

SEQ ID NO: 35824 - protein, 32 aa, Artificial Sequence
  Cyclic GFR-binding peptide
  MOD_RES (4)..(5): Xaa is C or S
AAPXXVPQALSPISILYIVGRKPKVYKQYEMI

SEQ ID NO: 35825 - protein, 28 aa, Artificial Sequence
  Cyclic GFR-binding peptide
PQALSPISILYKVGRKPKVLKYHYMIVR

SEQ ID NO: 35826 - protein, 32 aa, Artificial Sequence
  Cyclic GFR-binding peptide
  MOD_RES (6)..(7): Xaa is C or S
SIPKAXXVPTELEPISMLYLDEYDKVVKFKYE

SEQ ID NO: 35827 - protein, 37 aa, Artificial Sequence; identical to SEQ ID NO: 7381
  Cyclic GFR-binding peptide
  MOD_RES (2)..(3)..(35)..(37): Xaa is C or S

SEQ ID NO: 35828 - protein, 32 aa, Artificial Sequence
  Cyclic GFR-binding peptide
  MOD_RES (1)..(1): Xaa is C or S
XAPTKLEPISVLYLDDSSNVIKFKYENMVVRS

SEQ ID NO: 35829 - protein, 31 aa, Artificial Sequence
  Cyclic GFR-binding peptide
  MOD_RES (30)..(30): Xaa is C or S
PQALEPISILYLVGRKPKVKFKYEMIVRSXK

SEQ ID NO: 35830 - protein, 26 aa, Artificial Sequence
  Cyclic GFR-binding peptide
PQALEPISILYLVGRKPKVKFKYEMI

SEQ ID NO: 35831 - protein, 22 aa, Artificial Sequence
  Cyclic GFR-binding peptide
LSPISVLYKDDSSNVILKYHYN

SEQ ID NO: 35832 - protein, 38 aa, Artificial Sequence
  Cyclic GFR-binding peptide
  MOD_RES (6)..(7): Xaa is C or S
AVPKAXXAPTKLSPISVLYIDSSNNVIYKQYENMVVKA

SEQ ID NO: 35833 - protein, 33 aa, Artificial Sequence
  Cyclic GFR-binding peptide
  MOD_RES (30)..(32): Xaa is C or S
TELSPISMLYIDENEKVVYKQYEDMVVEGXGXR

SEQ ID NO: 35834 - protein, 34 aa, Artificial Sequence
  Cyclic GFR-binding peptide
  MOD_RES (5)..(6): Xaa is C or S
VGKAXXVPTKLSPISVLYIDDMGVPTYKQYEEGM

SEQ ID NO: 35835 - protein, 28 aa, Artificial Sequence
  Cyclic GFR-binding peptide
  MOD_RES (28)..(28): Xaa is C or S
EPISVLYLDDMGVPTKFKYEEGMSVAEX

SEQ ID NO: 35836 - protein, 29 aa, Artificial Sequence
  Cyclic GFR-binding peptide
  MOD_RES (28)..(28): Xaa is C or S
DLNAISILYFVGRTPKVLKKYRMVVKSXK

SEQ ID NO: 35837 - protein, 36 aa, Artificial Sequence
  Cyclic GFR-binding peptide
  MOD_RES (2)..(3)..(35): Xaa is C or S
AXXVPTELEPISMLYLDEYDKVVKFKYEEMVVEGXG

SEQ ID NO: 35838 - protein, 27 aa, Artificial Sequence
  Cyclic GFR-binding peptide
  MOD_RES (1)..(1): Xaa is C or S
XVSQDLNAISILYFIGKTPKILKKYRM

SEQ ID NO: 35839 - protein, 31 aa, Artificial Sequence
  Cyclic GFR-binding peptide
  MOD_RES (1)..(2): Xaa is C or S
XXVPTKLNAISILYFDKGVVTYLKKYRGMAV

SEQ ID NO: 35840 - protein, 32 aa, Artificial Sequence; identical to SEQ ID NO: 7388
  Cyclic GFR-binding peptide
  MOD_RES (30)..(32): Xaa is C or S

SEQ ID NO: 35841 - protein, 36 aa, Artificial Sequence; identical to SEQ ID NO: 7389
  Cyclic GFR-binding peptide
  MOD_RES (4)..(5): Xaa is C or S

SEQ ID NO: 35842 - protein, 40 aa, Artificial Sequence
  Cyclic GFR-binding peptide
  MOD_RES (6)..(7)..(38)..(40): Xaa is C or S
ASASPXXVPQDLSPISILYIVGRTPKVYKQYEMVVKSXKX

SEQ ID NO: 35843 - protein, 31 aa, Artificial Sequence; identical to SEQ ID NO: 7390
  Cyclic GFR-binding peptide
  MOD_RES (4)..(5): Xaa is C or S

SEQ ID NO: 35844 - protein, 28 aa, Artificial Sequence
  Cyclic GFR-binding peptide
  MOD_RES (27)..(27): Xaa is C or S
SPISILYKDKGVVTYLKYHYGMAVSEXG

SEQ ID NO: 35845 - protein, 29 aa, Artificial Sequence
  Cyclic GFR-binding peptide
  MOD_RES (2)..(3): Xaa is C or S
AXXVPTKLSPISILYIDKGVVTYYKQYEG

SEQ ID NO: 35846 - protein, 34 aa, Artificial Sequence; identical to SEQ ID NO: 7394
  Cyclic GFR-binding peptide
  MOD_RES (3)..(4): Xaa is C or S

SEQ ID NO: 35847 - protein, 37 aa, Artificial Sequence
  Cyclic GFR-binding peptide
  MOD_RES (4)..(5)..(37): Xaa is C or S
PKAXXVPTELEPISMLYLDEYDKVVKFKYEEMVVEGX

SEQ ID NO: 35848 - protein, 34 aa, Artificial Sequence; identical to SEQ ID NO: 7396
  Cyclic GFR-binding peptide
  MOD_RES (3)..(3): Xaa is C or S

SEQ ID NO: 35849 - protein, 32 aa, Artificial Sequence
  Cyclic GFR-binding peptide
  MOD_RES (4)..(5): Xaa is C or S
ASPXXVPQDLEPISILYLVGRTPKVKFKYEMV

SEQ ID NO: 35850 - protein, 23 aa, Artificial Sequence
  Cyclic GFR-binding peptide
TKLSPISVLYIDDMGVPTYKQYE

SEQ ID NO: 35851 - protein, 28 aa, Artificial Sequence
  Cyclic GFR-binding peptide
  MOD_RES (1)..(1): Xaa is C or S
XAPTKLSPISVLYKDSSNNVILKYHYNM

SEQ ID NO: 35852 - protein, 27 aa, Artificial Sequence
  Cyclic GFR-binding peptide
  MOD_RES (1)..(2): Xaa is C or S
XXVPQDLEPISILYLVGRTPKVKFKYE

SEQ ID NO: 35853 - protein, 32 aa, Artificial Sequence; identical to SEQ ID NO: 7400
  Cyclic GFR-binding peptide
  MOD_RES (32)..(32): Xaa is C or S

SEQ ID NO: 35854 - protein, 28 aa, Artificial Sequence
  Cyclic GFR-binding peptide
  MOD_RES (28)..(28): Xaa is C or S
LNAISILYFDAANNVVLKKYRDMVVEAX

SEQ ID NO: 35855 - protein, 33 aa, Artificial Sequence
  Cyclic GFR-binding peptide
  MOD_RES (31)..(33): Xaa is C or S
PTKLEPISVLYLDSSNNVIKFKYENMVVKAXGX

SEQ ID NO: 35856 - protein, 25 aa, Artificial Sequence
  Cyclic GFR-binding peptide
NAISILYFDAANNVVLKKYRDMVVE

SEQ ID NO: 35857 - protein, 36 aa, Artificial Sequence
  Cyclic GFR-binding peptide
  MOD_RES (5)..(6): Xaa is C or S
VPKPXXAPTKLEPISVLYLDDSSNVIKFKYENMVVR

SEQ ID NO: 35858 - protein, 26 aa, Artificial Sequence
  Cyclic GFR-binding peptide
TKLSPISILYIDKGVVTYYKQYEGMA

SEQ ID NO: 35859 - protein, 27 aa, Artificial Sequence
  Cyclic GFR-binding peptide
TKLSPISILYIDKGVVTYYKQYEGMAV

SEQ ID NO: 35860 - protein, 36 aa, Artificial Sequence
  Cyclic GFR-binding peptide
  MOD_RES (1)..(2)..(33)..(35): Xaa is C or S
XXVPQDLSPISILYIVGRTPKVYKQYEMVVKSXKXS

SEQ ID NO: 35861 - protein, 37 aa, Artificial Sequence
  Cyclic GFR-binding peptide
  MOD_RES (6)..(7): Xaa is C or S
KVGKAXXVPTKLSPISVLYIDDMGVPTYKQYEEGMSV

SEQ ID NO: 35862 - protein, 27 aa, Artificial Sequence
  Cyclic GFR-binding peptide
VPQDLNAISILYFVGRTPKVLKKYRMV

SEQ ID NO: 35863 - protein, 32 aa, Artificial Sequence; identical to SEQ ID NO: 7403
  Cyclic GFR-binding peptide
  MOD_RES (30)..(32): Xaa is C or S

SEQ ID NO: 35864 - protein, 26 aa, Artificial Sequence
  Cyclic GFR-binding peptide
LSPISVLYKDSSNNVILKYHYNMVVK

SEQ ID NO: 35865 - protein, 29 aa, Artificial Sequence
  Cyclic GFR-binding peptide
  MOD_RES (1)..(2): Xaa is C or S
XXVPQALSPISILYKVGRKPKVLKYHYMI

SEQ ID NO: 35866 - protein, 25 aa, Artificial Sequence
  Cyclic GFR-binding peptide
PTKLSPISILYIDKGVVTYYKQYEG

SEQ ID NO: 35867 - protein, 37 aa, Artificial Sequence; identical to SEQ ID NO: 7410
  Cyclic GFR-binding peptide
  MOD_RES (3)..(4)..(36): Xaa is C or S

SEQ ID NO: 35868 - protein, 30 aa, Artificial Sequence; identical to SEQ ID NO: 7413
  Cyclic GFR-binding peptide
  MOD_RES (1)..(2): Xaa is C or S

SEQ ID NO: 35869 - protein, 38 aa, Artificial Sequence
  Cyclic GFR-binding peptide
  MOD_RES (2)..(3)..(35)..(37): Xaa is C or S
AXXVPTKLSPISILYIDKGVVTYYKQYEGMAVSEXGXR

SEQ ID NO: 35870 - protein, 30 aa, Artificial Sequence; identical to SEQ ID NO: 7414
  Cyclic GFR-binding peptide
  MOD_RES (1)..(2): Xaa is C or S

SEQ ID NO: 35871 - protein, 35 aa, Artificial Sequence
  Cyclic GFR-binding peptide
  MOD_RES (1)..(2)..(33)..(35): Xaa is C or S
XXVPQALSPISILYIVGRKPKVYKQYEMIVRSXKX

SEQ ID NO: 35872 - protein, 34 aa, Artificial Sequence
  Cyclic GFR-binding peptide
  MOD_RES (1)..(32)..(34): Xaa is C or S
XVPQALSPISILYIVGRKPKVYKQYEMIVRSXKX

SEQ ID NO: 35873 - protein, 29 aa, Artificial Sequence
  Cyclic GFR-binding peptide
  MOD_RES (3)..(4): Xaa is C or S
KAXXAPTKLSPISVLYKDSSNNVILKYHY

SEQ ID NO: 35874 - protein, 22 aa, Artificial Sequence
  Cyclic GFR-binding peptide
KLSPISILYIDKGVVTYYKQYE

SEQ ID NO: 35875 - protein, 31 aa, Artificial Sequence; identical to SEQ ID NO: 7417
  Cyclic GFR-binding peptide
  MOD_RES (28)..(30): Xaa is C or S

SEQ ID NO: 35876 - protein, 30 aa, Artificial Sequence
  Cyclic GFR-binding peptide
  MOD_RES (5)..(5): Xaa is C or S
TKPTXAPTKLEPISVLYLDDSSNVIKFKYE

SEQ ID NO: 35877 - protein, 29 aa, Artificial Sequence
  Cyclic GFR-binding peptide
ARLEPISILYLDAANNVVKFKYEDMVVEA

SEQ ID NO: 35878 - protein, 30 aa, Artificial Sequence; identical to SEQ ID NO: 7419
  Cyclic GFR-binding peptide
  MOD_RES (3)..(4): Xaa is C or S

SEQ ID NO: 35879 - protein, 31 aa, Artificial Sequence
  Cyclic GFR-binding peptide
  MOD_RES (28)..(30): Xaa is C or S
LEPISVLYLDDSSNVIKFKYENMVVRSXGXH

SEQ ID NO: 35880 - protein, 27 aa, Artificial Sequence
  Cyclic GFR-binding peptide
  MOD_RES (27)..(27): Xaa is C or S
SPISILYIDKGVVTYYKQYEGMAVSEX

SEQ ID NO: 35881 - protein, 25 aa, Artificial Sequence
  Cyclic GFR-binding peptide
LSPISILYIIGKTPKIYKQYEMIVK

SEQ ID NO: 35882 - protein, 40 aa, Artificial Sequence
  Cyclic GFR-binding peptide
  MOD_RES (5)..(6)..(39): Xaa is C or S
VGKAXXVPTKLSPISVLYIDDMGVPTYKQYEEGMSVAEXG

SEQ ID NO: 35883 - protein, 34 aa, Artificial Sequence
  Cyclic GFR-binding peptide
  MOD_RES (2)..(3)..(34): Xaa is C or S
PXXVSQDLSPISILYIIGKTPKIYKQYEMIVKSX

SEQ ID NO: 35884 - protein, 38 aa, Artificial Sequence; identical to SEQ ID NO: 7420
  Cyclic GFR-binding peptide
  MOD_RES (5)..(6)..(37): Xaa is C or S

SEQ ID NO: 35885 - protein, 27 aa, Artificial Sequence
  Cyclic GFR-binding peptide
  MOD_RES (26)..(26): Xaa is C or S
NAISILYFVGRTPKVLKKYRMVVKSXK

SEQ ID NO: 35886 - protein, 24 aa, Artificial Sequence
  Cyclic GFR-binding peptide
ELSPISMLYKDENEKVVLKYHYDM

SEQ ID NO: 35887 - protein, 33 aa, Artificial Sequence
  Cyclic GFR-binding peptide
  MOD_RES (4)..(5): Xaa is C or S
SKAXXVPTKLSPISILYIDKGVVTYYKQYEGMA

SEQ ID NO: 35888 - protein, 31 aa, Artificial Sequence
  Cyclic GFR-binding peptide
  MOD_RES (28)..(30): Xaa is C or S
LEPISMLYLDENEKVVKFKYEDMVVEGXGXR

SEQ ID NO: 35889 - protein, 27 aa, Artificial Sequence
  Cyclic GFR-binding peptide
TKLNAISILYFDKGVVTYLKKYRGMAV

SEQ ID NO: 35890 - protein, 38 aa, Artificial Sequence
  Cyclic GFR-binding peptide
  MOD_RES (4)..(5)..(37): Xaa is C or S
PKAXXVPTELSPISMLYIDEYDKVVYKQYEEMVVEGXG

SEQ ID NO: 35891 - protein, 32 aa, Artificial Sequence
  Cyclic GFR-binding peptide
  MOD_RES (2)..(3): Xaa is C or S
PXXVSQDLSPISILYIIGKTPKIYKQYEMIVK

SEQ ID NO: 35892 - protein, 23 aa, Artificial Sequence
  Cyclic GFR-binding peptide
QLSPISVLYIDDSSNVIYKQYEN

SEQ ID NO: 35893 - protein, 32 aa, Artificial Sequence
  Cyclic GFR-binding peptide
  MOD_RES (6)..(7): Xaa is C or S
KASKAXXVPTKLSPISILYKDKGVVTYLKYHY

SEQ ID NO: 35894 - protein, 32 aa, Artificial Sequence
  Cyclic GFR-binding peptide
  MOD_RES (3)..(4): Xaa is C or S
SPXXVSQDLEPISILYLIGKTPKIKFKYEMIV

SEQ ID NO: 35895 - protein, 28 aa, Artificial Sequence
  Cyclic GFR-binding peptide
PTELNAISMLYFDENEKVVLKKYRDMVV

SEQ ID NO: 35896 - protein, 26 aa, Artificial Sequence
  Cyclic GFR-binding peptide
LSPISILYKVGRKPKVLKYHYMIVRS

SEQ ID NO: 35897 - protein, 34 aa, Artificial Sequence; identical to SEQ ID NO: 7434
  Cyclic GFR-binding peptide
  MOD_RES (31)..(33): Xaa is C or S

SEQ ID NO: 35898 - protein, 21 aa, Artificial Sequence
  Cyclic GFR-binding peptide
EPISVLYLDSSNNVIKFKYEN

SEQ ID NO: 35899 - protein, 31 aa, Artificial Sequence; identical to SEQ ID NO: 7435
  Cyclic GFR-binding peptide
  MOD_RES (1)..(1): Xaa is C or S

SEQ ID NO: 35900 - protein, 33 aa, Artificial Sequence
  Cyclic GFR-binding peptide
  MOD_RES (4)..(5): Xaa is C or S
PKPXXAPTKLEPISVLYLDDSSNVIKFKYENMV

SEQ ID NO: 35901 - protein, 29 aa, Artificial Sequence
  Cyclic GFR-binding peptide
TELNAISMLYFDENEKVVLKKYRDMVVEG

SEQ ID NO: 35902 - protein, 27 aa, Artificial Sequence
  Cyclic GFR-binding peptide
  MOD_RES (26)..(26): Xaa is C or S
SPISILYIIGKTPKIYKQYEMIVKSXK

SEQ ID NO: 35903 - protein, 33 aa, Artificial Sequence; identical to SEQ ID NO: 7437
  Cyclic GFR-binding peptide
  MOD_RES (6)..(7): Xaa is C or S

SEQ ID NO: 35904 - protein, 27 aa, Artificial Sequence
  Cyclic GFR-binding peptide
LEPISMLYLDEYDKVVKFKYEEMVVEG

SEQ ID NO: 35905 - protein, 29 aa, Artificial Sequence
  Cyclic GFR-binding peptide
  MOD_RES (29)..(29): Xaa is C or S
RLNAISILYFDAANNVVLKKYRDMVVEAX

SEQ ID NO: 35906 - protein, 38 aa, Artificial Sequence
  Cyclic GFR-binding peptide
  MOD_RES (4)..(5)..(36)..(38): Xaa is C or S
ASPXXVPQDLEPISILYLVGRTPKVKFKYEMVVKSXKX

SEQ ID NO: 35907 - protein, 30 aa, Artificial Sequence
  Cyclic GFR-binding peptide
  MOD_RES (27)..(29): Xaa is C or S
LEPISILYLIGKTPKIKFKYEMIVKSXKXS

SEQ ID NO: 35908 - protein, 33 aa, Artificial Sequence
  Cyclic GFR-binding peptide
  MOD_RES (32)..(32): Xaa is C or S
APTKLEPISVLYLDDSSNVIKFKYENMVVRSXG

SEQ ID NO: 35909 - protein, 25 aa, Artificial Sequence
  Cyclic GFR-binding peptide
TELNAISMLYFDENEKVVLKKYRDM

SEQ ID NO: 35910 - protein, 22 aa, Artificial Sequence
  Cyclic GFR-binding peptide
SPISMLYIDEYDKVVYKQYEEM

SEQ ID NO: 35911 - protein, 32 aa, Artificial Sequence; identical to SEQ ID NO: 7440
  Cyclic GFR-binding peptide
  MOD_RES (3)..(4): Xaa is C or S

SEQ ID NO: 35912 - protein, 38 aa, Artificial Sequence; identical to SEQ ID NO: 7447
  Cyclic GFR-binding peptide
  MOD_RES (4)..(5)..(37): Xaa is C or S

SEQ ID NO: 35913 - protein, 30 aa, Artificial Sequence
  Cyclic GFR-binding peptide
  MOD_RES (2)..(3): Xaa is C or S
AXXVPTKLSPISILYKDKGVVTYLKYHYGM

SEQ ID NO: 35914 - protein, 27 aa, Artificial Sequence
  Cyclic GFR-binding peptide
SQDLSPISILYIIGKTPKIYKQYEMIV

SEQ ID NO: 35915 - protein, 38 aa, Artificial Sequence; identical to SEQ ID NO: 7448
  Cyclic GFR-binding peptide
  MOD_RES (6)..(7)..(38): Xaa is C or S

SEQ ID NO: 35916 - protein, 28 aa, Artificial Sequence
  Cyclic GFR-binding peptide
  MOD_RES (27)..(27): Xaa is C or S
LSPISILYKIGKTPKILKYHYMIVKSXK

SEQ ID NO: 35917 - protein, 33 aa, Artificial Sequence
  Cyclic GFR-binding peptide
  MOD_RES (4)..(5): Xaa is C or S
ASPXXVSQDLSPISILYIIGKTPKIYKQYEMIV

SEQ ID NO: 35918 - protein, 29 aa, Artificial Sequence
  Cyclic GFR-binding peptide
  MOD_RES (2)..(3): Xaa is C or S
AXXAPTKLNAISVLYFDSSNNVILKKYRN

SEQ ID NO: 35919 - protein, 31 aa, Artificial Sequence
  Cyclic GFR-binding peptide
  MOD_RES (3)..(4): Xaa is C or S
KPXXAPTQLSPISVLYIDDSSNVIYKQYENM

SEQ ID NO: 35920 - protein, 37 aa, Artificial Sequence
  Cyclic GFR-binding peptide
  MOD_RES (1)..(2)..(35)..(37): Xaa is C or S
XXVPTKLSPISVLYIDDMGVPTYKQYEEGMSVAEXGX

SEQ ID NO: 35921 - protein, 31 aa, Artificial Sequence
  Cyclic GFR-binding peptide
  MOD_RES (30)..(30): Xaa is C or S
TKLSPISVLYIDSSNNVIYKQYENMVVKAXG

SEQ ID NO: 35922 - protein, 37 aa, Artificial Sequence
  Cyclic GFR-binding peptide
  MOD_RES (1)..(2)..(35)..(37): Xaa is C or S
XXVPTKLEPISVLYLDDMGVPTKFKYEEGMSVAEXGX

SEQ ID NO: 35923 - protein, 25 aa, Artificial Sequence
  Cyclic GFR-binding peptide
TELSPISMLYIDENEKVVYKQYEDM

SEQ ID NO: 35924 - protein, 28 aa, Artificial Sequence
  Cyclic GFR-binding peptide
  MOD_RES (27)..(27): Xaa is C or S
EPISMLYLDENEKVVKFKYEDMVVEGXG

SEQ ID NO: 35925 - protein, 35 aa, Artificial Sequence
  Cyclic GFR-binding peptide
  MOD_RES (1)..(2)..(34): Xaa is C or S
XXVPTELSPISMLYIDENEKVVYKQYEDMVVEGXG

SEQ ID NO: 35926 - protein, 25 aa, Artificial Sequence
  Cyclic GFR-binding peptide
APTQLEPISVLYLDDSSNVIKFKYE

SEQ ID NO: 35927 - protein, 26 aa, Artificial Sequence
  Cyclic GFR-binding peptide
APTKLSPISVLYIDDSSNVIYKQYEN

SEQ ID NO: 35928 - protein, 22 aa, Artificial Sequence
  Cyclic GFR-binding peptide
ALEPISILYLVGRKPKVKFKYE

SEQ ID NO: 35929 - protein, 34 aa, Artificial Sequence
  Cyclic GFR-binding peptide
  MOD_RES (4)..(5): Xaa is C or S
PASXXVPARLNAISILYFDAANNVVLKKYRDMVV

SEQ ID NO: 35930 - protein, 29 aa, Artificial Sequence
  Cyclic GFR-binding peptide
TELNAISMLYFDEYDKVVLKKYREMVVEG

SEQ ID NO: 35931 - protein, 30 aa, Artificial Sequence; identical to SEQ ID NO: 7464
  Cyclic GFR-binding peptide
  MOD_RES (30)..(30): Xaa is C or S

SEQ ID NO: 35932 - protein, 25 aa, Artificial Sequence
  Cyclic GFR-binding peptide
QDLSPISILYIVGRTPKVYKQYEMV

SEQ ID NO: 35933 - protein, 28 aa, Artificial Sequence
  Cyclic GFR-binding peptide
  MOD_RES (1)..(1): Xaa is C or S
XVSQDLNAISILYFIGKTPKILKKYRMI

SEQ ID NO: 35934 - protein, 24 aa, Artificial Sequence
  Cyclic GFR-binding peptide
DLSPISILYIIGKTPKIYKQYEMI

SEQ ID NO: 35935 - protein, 37 aa, Artificial Sequence; identical to SEQ ID NO: 7466
  Cyclic GFR-binding peptide
  MOD_RES (2)..(34)..(36): Xaa is C or S

SEQ ID NO: 35936 - protein, 25 aa, Artificial Sequence
  Cyclic GFR-binding peptide
ELSPISMLYKDENEKVVLKYHYDMV

SEQ ID NO: 35937 - protein, 36 aa, Artificial Sequence; identical to SEQ ID NO: 7469
  Cyclic GFR-binding peptide
  MOD_RES (1)..(2)..(33)..(35): Xaa is C or S

SEQ ID NO: 35938 - protein, 32 aa, Artificial Sequence
  Cyclic GFR-binding peptide
  MOD_RES (1)..(1): Xaa is C or S
XAPTQLEPISVLYLDDSSNVIKFKYENMVVRA

SEQ ID NO: 35939 - protein, 40 aa, Artificial Sequence; identical to SEQ ID NO: 7470
  Cyclic GFR-binding peptide
  MOD_RES (3)..(4)..(37)..(39): Xaa is C or S

SEQ ID NO: 35940 - protein, 37 aa, Artificial Sequence
  Cyclic GFR-binding peptide
  MOD_RES (4)..(5)..(36): Xaa is C or S
ASPXXVPQDLEPISILYLVGRTPKVKFKYEMVVKSXK

SEQ ID NO: 35941 - protein, 28 aa, Artificial Sequence
  Cyclic GFR-binding peptide
  MOD_RES (28)..(28): Xaa is C or S
LSPISVLYKDSSNNVILKYHYNMVVKAX

SEQ ID NO: 35942 - protein, 22 aa, Artificial Sequence
  Cyclic GFR-binding peptide
ELSPISMLYKDEYDKVVLKYHY

SEQ ID NO: 35943 - protein, 33 aa, Artificial Sequence; identical to SEQ ID NO: 7473
  Cyclic GFR-binding peptide
  MOD_RES (1)..(32): Xaa is C or S

SEQ ID NO: 35944 - protein, 28 aa, Artificial Sequence
  Cyclic GFR-binding peptide
TKLEPISVLYLDDMGVPTKFKYEEGMSV

SEQ ID NO: 35945 - protein, 27 aa, Artificial Sequence
  Cyclic GFR-binding peptide
VSQDLNAISILYFIGKTPKILKKYRMI

SEQ ID NO: 35946 - protein, 34 aa, Artificial Sequence
  Cyclic GFR-binding peptide
  MOD_RES (1)..(2)..(34): Xaa is C or S
XXVPTKLSPISILYKDKGVVTYLKYHYGMAVSEX

SEQ ID NO: 35947 - protein, 32 aa, Artificial Sequence
  Cyclic GFR-binding peptide
  MOD_RES (5)..(6): Xaa is C or S
ASKAXXVPTKLSPISILYIDKGVVTYYKQYEG

SEQ ID NO: 35948 - protein, 32 aa, Artificial Sequence
  Cyclic GFR-binding peptide
  MOD_RES (5)..(6): Xaa is C or S
APASXXVPARLEPISILYLDAANNVVKFKYED

SEQ ID NO: 35949 - protein, 40 aa, Artificial Sequence
  Cyclic GFR-binding peptide
  MOD_RES (5)..(6)..(37)..(39): Xaa is C or S
SAAPXXVPQALSPISILYIVGRKPKVYKQYEMIVRSXKXS

SEQ ID NO: 35950 - protein, 33 aa, Artificial Sequence
  Cyclic GFR-binding peptide
  MOD_RES (6)..(7): Xaa is C or S
YVPKPXXAPTKLSPISVLYIDDSSNVIYKQYEN

SEQ ID NO: 35951 - protein, 27 aa, Artificial Sequence
  Cyclic GFR-binding peptide
  MOD_RES (27)..(27): Xaa is C or S
SPISVLYIDDSSNVIYKQYENMVVRAX

SEQ ID NO: 35952 - protein, 34 aa, Artificial Sequence; identical to SEQ ID NO: 7480
  Cyclic GFR-binding peptide
  MOD_RES (1)..(33): Xaa is C or S

SEQ ID NO: 35953 - protein, 37 aa, Artificial Sequence; identical to SEQ ID NO: 7481
  Cyclic GFR-binding peptide
  MOD_RES (1)..(2)..(34)..(36): Xaa is C or S

SEQ ID NO: 35954 - protein, 36 aa, Artificial Sequence; identical to SEQ ID NO: 7482
  Cyclic GFR-binding peptide
  MOD_RES (2)..(3)..(36): Xaa is C or S

SEQ ID NO: 35955 - protein, 39 aa, Artificial Sequence
  Cyclic GFR-binding peptide
  MOD_RES (5)..(6)..(37)..(39): Xaa is C or S
SASPXXVSQDLSPISILYIIGKTPKIYKQYEMIVKSXKX

SEQ ID NO: 35956 - protein, 31 aa, Artificial Sequence
  Cyclic GFR-binding peptide
  MOD_RES (6)..(6): Xaa is C or S
VTKPTXAPTKLSPISVLYIDDSSNVIYKQYE

SEQ ID NO: 35957 - protein, 34 aa, Artificial Sequence
  Cyclic GFR-binding peptide
  MOD_RES (1)..(33): Xaa is C or S
XVPARLNAISILYFDAANNVVLKKYRDMVVEAXG

SEQ ID NO: 35958 - protein, 31 aa, Artificial Sequence
  Cyclic GFR-binding peptide
  MOD_RES (5)..(6): Xaa is C or S
VPKPXXAPTQLEPISVLYLDDSSNVIKFKYE

SEQ ID NO: 35959 - protein, 38 aa, Artificial Sequence
  Cyclic GFR-binding peptide
  MOD_RES (5)..(6)..(38): Xaa is C or S
IPKAXXVPTELSPISMLYIDEYDKVVYKQYEEMVVEGX

SEQ ID NO: 35960 - protein, 20 aa, Artificial Sequence
  Cyclic GFR-binding peptide
NAISMLYFDENEKVVLKKYR

SEQ ID NO: 35961 - protein, 26 aa, Artificial Sequence
  Cyclic GFR-binding peptide
PQDLSPISILYKVGRTPKVLKYHYMV

SEQ ID NO: 35962 - protein, 28 aa, Artificial Sequence
  Cyclic GFR-binding peptide
  MOD_RES (2)..(3): Xaa is C or S
AXXVPTKLNAISVLYFDDMGVPTLKKYR

SEQ ID NO: 35963 - protein, 24 aa, Artificial Sequence
  Cyclic GFR-binding peptide
QDLSPISILYIIGKTPKIYKQYEM

SEQ ID NO: 35964 - protein, 33 aa, Artificial Sequence
  Cyclic GFR-binding peptide
  MOD_RES (4)..(5): Xaa is C or S
PKAXXVPTELEPISMLYLDENEKVVKFKYEDMV

SEQ ID NO: 35965 - protein, 22 aa, Artificial Sequence
  Cyclic GFR-binding peptide
DLNAISILYFIGKTPKILKKYR

SEQ ID NO: 35966 - protein, 23 aa, Artificial Sequence
  Cyclic GFR-binding peptide
RLEPISILYLDAANNVVKFKYED

SEQ ID NO: 35967 - protein, 36 aa, Artificial Sequence; identical to SEQ ID NO: 7491
  Cyclic GFR-binding peptide
  MOD_RES (1)..(2)..(34)..(36): Xaa is C or S

SEQ ID NO: 35968 - protein, 31 aa, Artificial Sequence
  Cyclic GFR-binding peptide
  MOD_RES (30)..(30): Xaa is C or S
KLEPISVLYLDDMGVPTKFKYEEGMSVAEXG

SEQ ID NO: 35969 - protein, 27 aa, Artificial Sequence
  Cyclic GFR-binding peptide
PQDLSPISILYKVGRTPKVLKYHYMVV

SEQ ID NO: 35970 - protein, 24 aa, Artificial Sequence
  Cyclic GFR-binding peptide
LNAISILYFDAANNVVLKKYRDMV

SEQ ID NO: 35971 - protein, 33 aa, Artificial Sequence
  Cyclic GFR-binding peptide
  MOD_RES (3)..(4): Xaa is C or S
KAXXVPTKLSPISILYIDKGVVTYYKQYEGMAV

SEQ ID NO: 35972 - protein, 25 aa, Artificial Sequence
  Cyclic GFR-binding peptide
PARLNAISILYFDAANNVVLKKYRD

SEQ ID NO: 35973 - protein, 23 aa, Artificial Sequence
  Cyclic GFR-binding peptide
LEPISILYLVGRKPKVKFKYEMI

SEQ ID NO: 35974 - protein, 32 aa, Artificial Sequence
  Cyclic GFR-binding peptide
  MOD_RES (6)..(7): Xaa is C or S
AAPASXXVPARLSPISILYKDAANNVVLKYHY

SEQ ID NO: 35975 - protein, 31 aa, Artificial Sequence; identical to SEQ ID NO: 7496
  Cyclic GFR-binding peptide
  MOD_RES (28)..(30): Xaa is C or S

SEQ ID NO: 35976 - protein, 31 aa, Artificial Sequence
  Cyclic GFR-binding peptide
  MOD_RES (5)..(6): Xaa is C or S
ASKAXXVPTKLSPISILYIDKGVVTYYKQYE

SEQ ID NO: 35977 - protein, 30 aa, Artificial Sequence
  Cyclic GFR-binding peptide
  MOD_RES (1)..(1): Xaa is C or S
XVPTELEPISMLYLDEYDKVVKFKYEEMVV

SEQ ID NO: 35978 - protein, 30 aa, Artificial Sequence
  Cyclic GFR-binding peptide
  MOD_RES (4)..(5): Xaa is C or S
PASXXVPARLEPISILYLDAANNVVKFKYE

SEQ ID NO: 35979 - protein, 34 aa, Artificial Sequence
  Cyclic GFR-binding peptide
  MOD_RES (32)..(34): Xaa is C or S
VPTELEPISMLYLDEYDKVVKFKYEEMVVEGXGX

SEQ ID NO: 35980 - protein, 31 aa, Artificial Sequence
  Cyclic GFR-binding peptide
  MOD_RES (3)..(4): Xaa is C or S
SPXXVSQDLEPISILYLIGKTPKIKFKYEMI

SEQ ID NO: 35981 - protein, 33 aa, Artificial Sequence
  Cyclic GFR-binding peptide
  MOD_RES (1)..(33): Xaa is C or S
XAPTKLSPISVLYIDDSSNVIYKQYENMVVRSX

SEQ ID NO: 35982 - protein, 34 aa, Artificial Sequence
  Cyclic GFR-binding peptide
  MOD_RES (32)..(34): Xaa is C or S
VPARLSPISILYKDAANNVVLKYHYDMVVEAXGX

SEQ ID NO: 35983 - protein, 35 aa, Artificial Sequence
  Cyclic GFR-binding peptide
  MOD_RES (2)..(3)..(34): Xaa is C or S
PXXVPQALSPISILYIVGRKPKVYKQYEMIVRSXK

SEQ ID NO: 35984 - protein, 31 aa, Artificial Sequence; identical to SEQ ID NO: 7499
  Cyclic GFR-binding peptide
  MOD_RES (3)..(4): Xaa is C or S

SEQ ID NO: 35985 - protein, 38 aa, Artificial Sequence; identical to SEQ ID NO: 7500
  Cyclic GFR-binding peptide
  MOD_RES (5)..(6): Xaa is C or S

SEQ ID NO: 35986 - protein, 36 aa, Artificial Sequence; identical to SEQ ID NO: 7501
  Cyclic GFR-binding peptide
  MOD_RES (3)..(4)..(35): Xaa is C or S

SEQ ID NO: 35987 - protein, 30 aa, Artificial Sequence
  Cyclic GFR-binding peptide
  MOD_RES (2)..(3): Xaa is C or S
AXXVPTELEPISMLYLDEYDKVVKFKYEEM

SEQ ID NO: 35988 - protein, 30 aa, Artificial Sequence
  Cyclic GFR-binding peptide
  MOD_RES (1)..(2): Xaa is C or S
XXAPTKLEPISVLYLDDSSNVIKFKYENMV

SEQ ID NO: 35989 - protein, 39 aa, Artificial Sequence
  Cyclic GFR-binding peptide
  MOD_RES (4)..(5)..(37)..(39): Xaa is C or S
PKPXXAPTKLSPISVLYIDDSSNVIYKQYENMVVRSXGX

SEQ ID NO: 35990 - protein, 32 aa, Artificial Sequence
  Cyclic GFR-binding peptide
  MOD_RES (1)..(2): Xaa is C or S
XXVPTELEPISMLYLDEYDKVVKFKYEEMVVE

SEQ ID NO: 35991 - protein, 26 aa, Artificial Sequence
  Cyclic GFR-binding peptide
DLEPISILYLIGKTPKIKFKYEMIVK

SEQ ID NO: 35992 - protein, 26 aa, Artificial Sequence
  Cyclic GFR-binding peptide
TKLEPISVLYLDDMGVPTKFKYEEGM

SEQ ID NO: 35993 - protein, 28 aa, Artificial Sequence
  Cyclic GFR-binding peptide
  MOD_RES (1)..(2): Xaa is C or S
XXVPTELSPISMLYIDENEKVVYKQYED

SEQ ID NO: 35994 - protein, 40 aa, Artificial Sequence; identical to SEQ ID NO: 7505
  Cyclic GFR-binding peptide
  MOD_RES (4)..(5)..(37)..(39): Xaa is C or S

SEQ ID NO: 35995 - protein, 27 aa, Artificial Sequence
  Cyclic GFR-binding peptide
VPTELNAISMLYFDENEKVVLKKYRDM

SEQ ID NO: 35996 - protein, 24 aa, Artificial Sequence
  Cyclic GFR-binding peptide
LEPISILYLDAANNVVKFKYEDMV

SEQ ID NO: 35997 - protein, 31 aa, Artificial Sequence
  Cyclic GFR-binding peptide
  MOD_RES (3)..(4): Xaa is C or S
SPXXVPQDLEPISILYLVGRTPKVKFKYEMV

SEQ ID NO: 35998 - protein, 24 aa, Artificial Sequence
  Cyclic GFR-binding peptide
RLEPISILYLDAANNVVKFKYEDM

SEQ ID NO: 35999 - protein, 38 aa, Artificial Sequence
  Cyclic GFR-binding peptide
  MOD_RES (3)..(4)..(36)..(38): Xaa is C or S
KPXXAPTQLSPISVLYIDDSSNVIYKQYENMVVRAXGX

SEQ ID NO: 36000 - protein, 30 aa, Artificial Sequence
  Cyclic GFR-binding peptide
  MOD_RES (30)..(30): Xaa is C or S
TQLSPISVLYIDDSSNVIYKQYENMVVRAX

SEQ ID NO: 36001 - protein, 34 aa, Artificial Sequence
  Cyclic GFR-binding peptide
  MOD_RES (31)..(33): Xaa is C or S
VPQALEPISILYLVGRKPKVKFKYEMIVRSXKXS

SEQ ID NO: 36002 - protein, 30 aa, Artificial Sequence; identical to SEQ ID NO: 7512
  Cyclic GFR-binding peptide
  MOD_RES (27)..(29): Xaa is C or S

SEQ ID NO: 36003 - protein, 31 aa, Artificial Sequence; identical to SEQ ID NO: 7514
  Cyclic GFR-binding peptide
  MOD_RES (1)..(2): Xaa is C or S

SEQ ID NO: 36004 - protein, 32 aa, Artificial Sequence
  Cyclic GFR-binding peptide
  MOD_RES (1)..(1): Xaa is C or S
XVPTKLNAISILYFDKGVVTYLKKYRGMAVSE

SEQ ID NO: 36005 - protein, 35 aa, Artificial Sequence; identical to SEQ ID NO: 7516
  Cyclic GFR-binding peptide
  MOD_RES (1)..(2)..(35): Xaa is C or S

SEQ ID NO: 36006 - protein, 40 aa, Artificial Sequence; identical to SEQ ID NO: 7517
  Cyclic GFR-binding peptide
  MOD_RES (5)..(6)..(38)..(40): Xaa is C or S

SEQ ID NO: 36007 - protein, 25 aa, Artificial Sequence
  Cyclic GFR-binding peptide
EPISILYLIGKTPKIKFKYEMIVKS

SEQ ID NO: 36008 - protein, 25 aa, Artificial Sequence
  Cyclic GFR-binding peptide
SPISMLYKDEYDKVVLKYHYEMVVE

SEQ ID NO: 36009 - protein, 32 aa, Artificial Sequence; identical to SEQ ID NO: 7519
  Cyclic GFR-binding peptide
  MOD_RES (4)..(5): Xaa is C or S

SEQ ID NO: 36010 - protein, 35 aa, Artificial Sequence
  Cyclic GFR-binding peptide
  MOD_RES (6)..(7): Xaa is C or S
ASASPXXVPQDLSPISILYIVGRTPKVYKQYEMVV

SEQ ID NO: 36011 - protein, 30 aa, Artificial Sequence
  Cyclic GFR-binding peptide
  MOD_RES (30)..(30): Xaa is C or S
TELSPISMLYIDEYDKVVYKQYEEMVVEGX

SEQ ID NO: 36012 - protein, 37 aa, Artificial Sequence
  Cyclic GFR-binding peptide
  MOD_RES (6)..(7): Xaa is C or S
SIPKAXXVPTELSPISMLYIDEYDKVVYKQYEEMVVE

SEQ ID NO: 36013 - protein, 39 aa, Artificial Sequence
  Cyclic GFR-binding peptide
  MOD_RES (6)..(7): Xaa is C or S
KVGKAXXVPTKLSPISVLYIDDMGVPTYKQYEEGMSVAE

SEQ ID NO: 36014 - protein, 30 aa, Artificial Sequence; identical to SEQ ID NO: 7521
  Cyclic GFR-binding peptide
  MOD_RES (1)..(1): Xaa is C or S

SEQ ID NO: 36015 - protein, 35 aa, Artificial Sequence
  Cyclic GFR-binding peptide
  MOD_RES (4)..(5): Xaa is C or S
ASPXXVPQDLSPISILYIVGRTPKVYKQYEMVVKS

SEQ ID NO: 36016 - protein, 32 aa, Artificial Sequence
  Cyclic GFR-binding peptide
  MOD_RES (1)..(1): Xaa is C or S
XVPTELSPISMLYIDEYDKVVYKQYEEMVVEG

SEQ ID NO: 36017 - protein, 31 aa, Artificial Sequence
  Cyclic GFR-binding peptide
  MOD_RES (4)..(5): Xaa is C or S
PASXXVPARLSPISILYKDAANNVVLKYHYD

SEQ ID NO: 36018 - protein, 24 aa, Artificial Sequence
  Cyclic GFR-binding peptide
PTELEPISMLYLDENEKVVKFKYE

SEQ ID NO: 36019 - protein, 26 aa, Artificial Sequence
  Cyclic GFR-binding peptide
NAISVLYFDSSNNVILKKYRNMVVKA

SEQ ID NO: 36020 - protein, 34 aa, Artificial Sequence
  Cyclic GFR-binding peptide
  MOD_RES (1)..(34): Xaa is C or S
XVPTKLEPISVLYLDDMGVPTKFKYEEGMSVAEX

SEQ ID NO: 36021 - protein, 41 aa, Artificial Sequence; identical to SEQ ID NO: 7526
  Cyclic GFR-binding peptide
  MOD_RES (6)..(7)..(38)..(40): Xaa is C or S

SEQ ID NO: 36022 - protein, 22 aa, Artificial Sequence
  Cyclic GFR-binding peptide
LNAISILYFVGRTPKVLKKYRM

SEQ ID NO: 36023 - protein, 34 aa, Artificial Sequence
  Cyclic GFR-binding peptide
  MOD_RES (6)..(7): Xaa is C or S
ASASPXXVSQDLSPISILYIIGKTPKIYKQYEMI

SEQ ID NO: 36024 - protein, 32 aa, Artificial Sequence
  Cyclic GFR-binding peptide
  MOD_RES (30)..(32): Xaa is C or S
SQDLEPISILYLIGKTPKIKFKYEMIVKSXKX

SEQ ID NO: 36025 - protein, 42 aa, Artificial Sequence; identical to SEQ ID NO: 7533
  Cyclic GFR-binding peptide
  MOD_RES (6)..(7)..(39)..(41): Xaa is C or S

SEQ ID NO: 36026 - protein, 22 aa, Artificial Sequence
  Cyclic GFR-binding peptide
EPISILYLIGKTPKIKFKYEMI

SEQ ID NO: 36027 - protein, 39 aa, Artificial Sequence; identical to SEQ ID NO: 7534
  Cyclic GFR-binding peptide
  MOD_RES (6)..(7)..(39): Xaa is C or S

SEQ ID NO: 36028 - protein, 32 aa, Artificial Sequence
  Cyclic GFR-binding peptide
  MOD_RES (5)..(6): Xaa is C or S
VGKAXXVPTKLSPISVLYIDDMGVPTYKQYEE

SEQ ID NO: 36029 - protein, 24 aa, Artificial Sequence
  Cyclic GFR-binding peptide
TKLNAISVLYFDDMGVPTLKKYRE

SEQ ID NO: 36030 - protein, 35 aa, Artificial Sequence
  Cyclic GFR-binding peptide
  MOD_RES (2)..(3)..(35): Xaa is C or S
AXXVPTELSPISMLYIDEYDKVVYKQYEEMVVEGX

SEQ ID NO: 36031 - protein, 36 aa, Artificial Sequence
  Cyclic GFR-binding peptide
  MOD_RES (3)..(4)..(35): Xaa is C or S
APXXVPQALSPISILYIVGRKPKVYKQYEMIVRSXK

SEQ ID NO: 36032 - protein, 29 aa, Artificial Sequence
  Cyclic GFR-binding peptide
  MOD_RES (1)..(2): Xaa is C or S
XXAPTKLSPISVLYKDSSNNVILKYHYNM

SEQ ID NO: 36033 - protein, 27 aa, Artificial Sequence
  Cyclic GFR-binding peptide
  MOD_RES (27)..(27): Xaa is C or S
SPISVLYIDSSNNVIYKQYENMVVKAX

SEQ ID NO: 36034 - protein, 31 aa, Artificial Sequence; identical to SEQ ID NO: 7542
  Cyclic GFR-binding peptide
  MOD_RES (31)..(31): Xaa is C or S

SEQ ID NO: 36035 - protein, 28 aa, Artificial Sequence
  Cyclic GFR-binding peptide
  MOD_RES (28)..(28): Xaa is C or S
LSPISVLYKDDSSNVILKYHYNMVVRAX

SEQ ID NO: 36036 - protein, 22 aa, Artificial Sequence
  Cyclic GFR-binding peptide
NAISILYFVGRKPKVLKKYRMI

SEQ ID NO: 36037 - protein, 30 aa, Artificial Sequence; identical to SEQ ID NO: 7551
  Cyclic GFR-binding peptide
  MOD_RES (30)..(30): Xaa is C or S

SEQ ID NO: 36038 - protein, 27 aa, Artificial Sequence
  Cyclic GFR-binding peptide
LEPISMLYLDENEKVVKFKYEDMVVEG

SEQ ID NO: 36039 - protein, 27 aa, Artificial Sequence
  Cyclic GFR-binding peptide
  MOD_RES (26)..(26): Xaa is C or S
NAISILYFVGRKPKVLKKYRMIVRSXK

SEQ ID NO: 36040 - protein, 36 aa, Artificial Sequence
  Cyclic GFR-binding peptide
  MOD_RES (1)..(33)..(35): Xaa is C or S
XVPTKLSPISILYKDKGVVTYLKYHYGMAVSEXGXR

SEQ ID NO: 36041 - protein, 33 aa, Artificial Sequence; identical to SEQ ID NO: 7556
  Cyclic GFR-binding peptide
  MOD_RES (2)..(3): Xaa is C or S

SEQ ID NO: 36042 - protein, 32 aa, Artificial Sequence
  Cyclic GFR-binding peptide
  MOD_RES (30)..(32): Xaa is C or S
ARLEPISILYLDAANNVVKFKYEDMVVEAXGX

SEQ ID NO: 36043 - protein, 33 aa, Artificial Sequence
  Cyclic GFR-binding peptide
  MOD_RES (2)..(3): Xaa is C or S
AXXVPTKLSPISVLYIDDMGVPTYKQYEEGMSV

SEQ ID NO: 36044 - protein, 32 aa, Artificial Sequence; identical to SEQ ID NO: 7559
  Cyclic GFR-binding peptide
  MOD_RES (32)..(32): Xaa is C or S

SEQ ID NO: 36045 - protein, 26 aa, Artificial Sequence
  Cyclic GFR-binding peptide
  MOD_RES (1)..(1): Xaa is C or S
XVPTELEPISMLYLDENEKVVKFKYE

SEQ ID NO: 36046 - protein, 27 aa, Artificial Sequence
  Cyclic GFR-binding peptide
APTQLEPISVLYLDDSSNVIKFKYENM

SEQ ID NO: 36047 - protein, 30 aa, Artificial Sequence; identical to SEQ ID NO: 7561
  Cyclic GFR-binding peptide
  MOD_RES (2)..(3): Xaa is C or S

SEQ ID NO: 36048 - protein, 42 aa, Artificial Sequence
  Cyclic GFR-binding peptide
  MOD_RES (6)..(7)..(40)..(42): Xaa is C or S
KVGKAXXVPTKLSPISVLYIDDMGVPTYKQYEEGMSVAEXGX

SEQ ID NO: 36049 - protein, 28 aa, Artificial Sequence
  Cyclic GFR-binding peptide
  MOD_RES (1)..(1): Xaa is C or S
XVPTKLSPISILYIDKGVVTYYKQYEGM

SEQ ID NO: 36050 - protein, 33 aa, Artificial Sequence; identical to SEQ ID NO: 7563
  Cyclic GFR-binding peptide
  MOD_RES (4)..(5): Xaa is C or S

SEQ ID NO: 36051 - protein, 38 aa, Artificial Sequence
  Cyclic GFR-binding peptide
  MOD_RES (5)..(6)..(38): Xaa is C or S
IPKAXXVPTELSPISMLYIDENEKVVYKQYEDMVVEGX

SEQ ID NO: 36052 - protein, 31 aa, Artificial Sequence
  Cyclic GFR-binding peptide
  MOD_RES (29)..(31): Xaa is C or S
QDLSPISILYIVGRTPKVYKQYEMVVKSXKX

SEQ ID NO: 36053 - protein, 37 aa, Artificial Sequence
  Cyclic GFR-binding peptide
  MOD_RES (6)..(7): Xaa is C or S
AVPKAXXAPTKLSPISVLYIDSSNNVIYKQYENMVVK

SEQ ID NO: 36054 - protein, 32 aa, Artificial Sequence
  Cyclic GFR-binding peptide
  MOD_RES (31)..(31): Xaa is C or S
PTQLEPISVLYLDDSSNVIKFKYENMVVRAXG

SEQ ID NO: 36055 - protein, 39 aa, Artificial Sequence
  Cyclic GFR-binding peptide
  MOD_RES (5)..(6)..(37)..(39): Xaa is C or S
SASPXXVPQDLSPISILYIVGRTPKVYKQYEMVVKSXKX

SEQ ID NO: 36056 - protein, 28 aa, Artificial Sequence
  Cyclic GFR-binding peptide
KLNAISVLYFDDMGVPTLKKYREGMSVA

SEQ ID NO: 36057 - protein, 24 aa, Artificial Sequence
  Cyclic GFR-binding peptide
PTKLNAISVLYFDDMGVPTLKKYR

SEQ ID NO: 36058 - protein, 36 aa, Artificial Sequence; identical to SEQ ID NO: 7569
  Cyclic GFR-binding peptide
  MOD_RES (3)..(4)..(36): Xaa is C or S

SEQ ID NO: 36059 - protein, 26 aa, Artificial Sequence
  Cyclic GFR-binding peptide
QDLSPISILYIVGRTPKVYKQYEMVV

SEQ ID NO: 36060 - protein, 26 aa, Artificial Sequence
  Cyclic GFR-binding peptide
PTKLEPISVLYLDDSSNVIKFKYENM

SEQ ID NO: 36061 - protein, 30 aa, Artificial Sequence; identical to SEQ ID NO: 7571
  Cyclic GFR-binding peptide
  MOD_RES (3)..(4): Xaa is C or S

SEQ ID NO: 36062 - protein, 29 aa, Artificial Sequence
  Cyclic GFR-binding peptide
  MOD_RES (3)..(4): Xaa is C or S
KAXXAPTKLEPISVLYLDSSNNVIKFKYE

SEQ ID NO: 36063 - protein, 37 aa, Artificial Sequence
  Cyclic GFR-binding peptide
  MOD_RES (3)..(4)..(35)..(37): Xaa is C or S
APXXVPQALSPISILYIVGRKPKVYKQYEMIVRSXKX

SEQ ID NO: 36064 - protein, 30 aa, Artificial Sequence
  Cyclic GFR-binding peptide
  MOD_RES (30)..(30): Xaa is C or S
ARLEPISILYLDAANNVVKFKYEDMVVEAX

SEQ ID NO: 36065 - protein, 32 aa, Artificial Sequence
  Cyclic GFR-binding peptide
  MOD_RES (31)..(31): Xaa is C or S
VPQALEPISILYLVGRKPKVKFKYEMIVRSXK

SEQ ID NO: 36066 - protein, 35 aa, Artificial Sequence
  Cyclic GFR-binding peptide
  MOD_RES (4)..(5): Xaa is C or S
PKAXXAPTKLSPISVLYIDSSNNVIYKQYENMVVK

SEQ ID NO: 36067 - protein, 34 aa, Artificial Sequence
  Cyclic GFR-binding peptide
  MOD_RES (6)..(7): Xaa is C or S
ASASPXXVPQDLSPISILYIVGRTPKVYKQYEMV

SEQ ID NO: 36068 - protein, 20 aa, Artificial Sequence
  Cyclic GFR-binding peptide
EPISVLYLDSSNNVIKFKYE

SEQ ID NO: 36069 - protein, 28 aa, Artificial Sequence
  Cyclic GFR-binding peptide
  MOD_RES (1)..(1): Xaa is C or S
XVPQDLNAISILYFVGRTPKVLKKYRMV

SEQ ID NO: 36070 - protein, 42 aa, Artificial Sequence
  Cyclic GFR-binding peptide
  MOD_RES (6)..(7)..(39)..(41): Xaa is C or S
AVPKAXXAPTKLSPISVLYIDSSNNVIYKQYENMVVKAXGXH

SEQ ID NO: 36071 - protein, 35 aa, Artificial Sequence; identical to SEQ ID NO: 7577
  Cyclic GFR-binding peptide
  MOD_RES (32)..(34): Xaa is C or S

SEQ ID NO: 36072 - protein, 29 aa, Artificial Sequence
  Cyclic GFR-binding peptide
  MOD_RES (2)..(3): Xaa is C or S
PXXAPTKLSPISVLYKDDSSNVILKYHYN

SEQ ID NO: 36073 - protein, 36 aa, Artificial Sequence
  Cyclic GFR-binding peptide
  MOD_RES (2)..(3)..(35): Xaa is C or S
SXXVPARLSPISILYKDAANNVVLKYHYDMVVEAXG

SEQ ID NO: 36074 - protein, 28 aa, Artificial Sequence
  Cyclic GFR-binding peptide
  MOD_RES (1)..(1): Xaa is C or S
XVPTKLNAISILYFDKGVVTYLKKYRGM

SEQ ID NO: 36075 - protein, 42 aa, Artificial Sequence; identical to SEQ ID NO: 7581
  Cyclic GFR-binding peptide
  MOD_RES (6)..(7)..(39)..(41): Xaa is C or S

SEQ ID NO: 36076 - protein, 31 aa, Artificial Sequence; identical to SEQ ID NO: 7582
  Cyclic GFR-binding peptide
  MOD_RES (1)..(2): Xaa is C or S

SEQ ID NO: 36077 - protein, 33 aa, Artificial Sequence
  Cyclic GFR-binding peptide
  MOD_RES (1)..(33): Xaa is C or S
XVPTKLSPISILYKDKGVVTYLKYHYGMAVSEX

SEQ ID NO: 36078 - protein, 32 aa, Artificial Sequence; identical to SEQ ID NO: 7584
  Cyclic GFR-binding peptide
  MOD_RES (4)..(5): Xaa is C or S

SEQ ID NO: 36079 - protein, 30 aa, Artificial Sequence; identical to SEQ ID NO: 7586
  Cyclic GFR-binding peptide
  MOD_RES (27)..(29): Xaa is C or S

SEQ ID NO: 36080 - protein, 39 aa, Artificial Sequence; identical to SEQ ID NO: 7587
  Cyclic GFR-binding peptide
  MOD_RES (6)..(7)..(39): Xaa is C or S

SEQ ID NO: 36081 - protein, 41 aa, Artificial Sequence; identical to SEQ ID NO: 7588
  Cyclic GFR-binding peptide
  MOD_RES (6)..(7)..(40): Xaa is C or S

SEQ ID NO: 36082 - protein, 34 aa, Artificial Sequence
  Cyclic GFR-binding peptide
  MOD_RES (2)..(3)..(34): Xaa is C or S
PXXVPQALSPISILYIVGRKPKVYKQYEMIVRSX

SEQ ID NO: 36083 - protein, 39 aa, Artificial Sequence
  Cyclic GFR-binding peptide
  MOD_RES (4)..(5)..(38): Xaa is C or S
GKAXXVPTKLEPISVLYLDDMGVPTKFKYEEGMSVAEXG

SEQ ID NO: 36084 - protein, 31 aa, Artificial Sequence
  Cyclic GFR-binding peptide
  MOD_RES (2)..(3): Xaa is C or S
AXXVPTELEPISMLYLDEYDKVVKFKYEEMV

SEQ ID NO: 36085 - protein, 34 aa, Artificial Sequence; identical to SEQ ID NO: 7591
  Cyclic GFR-binding peptide
  MOD_RES (6)..(7): Xaa is C or S

SEQ ID NO: 36086 - protein, 30 aa, Artificial Sequence
  Cyclic GFR-binding peptide
  MOD_RES (28)..(30): Xaa is C or S
LEPISVLYLDDSSNVIKFKYENMVVRAXGX

SEQ ID NO: 36087 - protein, 33 aa, Artificial Sequence; identical to SEQ ID NO: 7592
  Cyclic GFR-binding peptide
  MOD_RES (1)..(32): Xaa is C or S

SEQ ID NO: 36088 - protein, 31 aa, Artificial Sequence; identical to SEQ ID NO: 7593
  Cyclic GFR-binding peptide
  MOD_RES (30)..(30): Xaa is C or S

SEQ ID NO: 36089 - protein, 35 aa, Artificial Sequence
  Cyclic GFR-binding peptide
  MOD_RES (4)..(5): Xaa is C or S
PASXXVPARLEPISILYLDAANNVVKFKYEDMVVE

SEQ ID NO: 36090 - protein, 32 aa, Artificial Sequence
  Cyclic GFR-binding peptide
  MOD_RES (30)..(32): Xaa is C or S
PQALSPISILYIVGRKPKVYKQYEMIVRSXKX

SEQ ID NO: 36091 - protein, 30 aa, Artificial Sequence
  Cyclic GFR-binding peptide
  MOD_RES (30)..(30): Xaa is C or S
KLEPISVLYLDDMGVPTKFKYEEGMSVAEX

SEQ ID NO: 36092 - protein, 31 aa, Artificial Sequence
  Cyclic GFR-binding peptide
  MOD_RES (1)..(2): Xaa is C or S
XXVPQDLEPISILYLVGRTPKVKFKYEMVVK

SEQ ID NO: 36093 - protein, 32 aa, Artificial Sequence
  Cyclic GFR-binding peptide
  MOD_RES (6)..(7): Xaa is C or S
YVPKPXXAPTKLSPISVLYIDDSSNVIYKQYE

SEQ ID NO: 36094 - protein, 38 aa, Artificial Sequence
  Cyclic GFR-binding peptide
  MOD_RES (7)..(7): Xaa is C or S
HVTKPTXAPTKLEPISVLYLDDSSNVIKFKYENMVVRS

SEQ ID NO: 36095 - protein, 31 aa, Artificial Sequence; identical to SEQ ID NO: 7600
  Cyclic GFR-binding peptide
  MOD_RES (28)..(30): Xaa is C or S

SEQ ID NO: 36096 - protein, 35 aa, Artificial Sequence; identical to SEQ ID NO: 7602
  Cyclic GFR-binding peptide
  MOD_RES (1)..(2)..(33)..(35): Xaa is C or S

SEQ ID NO: 36097 - protein, 26 aa, Artificial Sequence
  Cyclic GFR-binding peptide
  MOD_RES (1)..(1): Xaa is C or S
XVPQALNAISILYFVGRKPKVLKKYR

SEQ ID NO: 36098 - protein, 20 aa, Artificial Sequence
  Cyclic GFR-binding peptide
SPISVLYIDDMGVPTYKQYE

SEQ ID NO: 36099 - protein, 26 aa, Artificial Sequence
  Cyclic GFR-binding peptide
DLNAISILYFIGKTPKILKKYRMIVK

SEQ ID NO: 36100 - protein, 29 aa, Artificial Sequence
  Cyclic GFR-binding peptide
  MOD_RES (2)..(3): Xaa is C or S
PXXVSQDLSPISILYKIGKTPKILKYHYM

SEQ ID NO: 36101 - protein, 34 aa, Artificial Sequence
  Cyclic GFR-binding peptide
  MOD_RES (32)..(34): Xaa is C or S
VPTELSPISMLYIDEYDKVVYKQYEEMVVEGXGX

SEQ ID NO: 36102 - protein, 31 aa, Artificial Sequence
  Cyclic GFR-binding peptide
  MOD_RES (31)..(31): Xaa is C or S
PTQLSPISVLYIDDSSNVIYKQYENMVVRAX

SEQ ID NO: 36103 - protein, 32 aa, Artificial Sequence; identical to SEQ ID NO: 7611
  Cyclic GFR-binding peptide
  MOD_RES (32)..(32): Xaa is C or S

SEQ ID NO: 36104 - protein, 33 aa, Artificial Sequence; identical to SEQ ID NO: 7614
  Cyclic GFR-binding peptide
  MOD_RES (1)..(32): Xaa is C or S

SEQ ID NO: 36105 - protein, 20 aa, Artificial Sequence
  Cyclic GFR-binding peptide
SPISVLYIDDSSNVIYKQYE

SEQ ID NO: 36106 - protein, 26 aa, Artificial Sequence
  Cyclic GFR-binding peptide
ARLSPISILYKDAANNVVLKYHYDMV

SEQ ID NO: 36107 - protein, 21 aa, Artificial Sequence
  Cyclic GFR-binding peptide
LEPISILYLIGKTPKIKFKYE

SEQ ID NO: 36108 - protein, 30 aa, Artificial Sequence
  Cyclic GFR-binding peptide
  MOD_RES (28)..(30): Xaa is C or S
EPISVLYLDDMGVPTKFKYEEGMSVAEXGX

SEQ ID NO: 36109 - protein, 31 aa, Artificial Sequence; identical to SEQ ID NO: 7616
  Cyclic GFR-binding peptide
  MOD_RES (2)..(3): Xaa is C or S

SEQ ID NO: 36110 - protein, 26 aa, Artificial Sequence
  Cyclic GFR-binding peptide
ELNAISMLYFDENEKVVLKKYRDMVV

SEQ ID NO: 36111 - protein, 34 aa, Artificial Sequence
  Cyclic GFR-binding peptide
  MOD_RES (4)..(4): Xaa is C or S
KPTXAPTKLEPISVLYLDDSSNVIKFKYENMVVR

SEQ ID NO: 36112 - protein, 30 aa, Artificial Sequence; identical to SEQ ID NO: 7623
  Cyclic GFR-binding peptide
  MOD_RES (30)..(30): Xaa is C or S

SEQ ID NO: 36113 - protein, 33 aa, Artificial Sequence; identical to SEQ ID NO: 7624
  Cyclic GFR-binding peptide
  MOD_RES (4)..(5): Xaa is C or S

SEQ ID NO: 36114 - protein, 31 aa, Artificial Sequence; identical to SEQ ID NO: 7625
  Cyclic GFR-binding peptide
  MOD_RES (1)..(2): Xaa is C or S

SEQ ID NO: 36115 - protein, 29 aa, Artificial Sequence
  Cyclic GFR-binding peptide
SQDLNAISILYFIGKTPKILKKYRMIVKS

SEQ ID NO: 36116 - protein, 22 aa, Artificial Sequence
  Cyclic GFR-binding peptide
LEPISILYLDAANNVVKFKYED

SEQ ID NO: 36117 - protein, 27 aa, Artificial Sequence
  Cyclic GFR-binding peptide
PTKLSPISVLYIDSSNNVIYKQYENMV

SEQ ID NO: 36118 - protein, 39 aa, Artificial Sequence
  Cyclic GFR-binding peptide
  MOD_RES (3)..(4)..(36)..(38): Xaa is C or S
KPXXAPTQLSPISVLYIDDSSNVIYKQYENMVVRAXGXH

SEQ ID NO: 36119 - protein, 27 aa, Artificial Sequence
  Cyclic GFR-binding peptide
  MOD_RES (27)..(27): Xaa is C or S
SPISVLYKDDSSNVILKYHYNMVVRSX

SEQ ID NO: 36120 - protein, 37 aa, Artificial Sequence
  Cyclic GFR-binding peptide
  MOD_RES (3)..(4)..(36): Xaa is C or S
KPXXAPTKLSPISVLYIDDSSNVIYKQYENMVVRSXG

SEQ ID NO: 36121 - protein, 28 aa, Artificial Sequence
  Cyclic GFR-binding peptide
QDLEPISILYLIGKTPKIKFKYEMIVKS

SEQ ID NO: 36122 - protein, 34 aa, Artificial Sequence; identical to SEQ ID NO: 7631
  Cyclic GFR-binding peptide
  MOD_RES (6)..(7): Xaa is C or S

SEQ ID NO: 36123 - protein, 30 aa, Artificial Sequence; identical to SEQ ID NO: 7634
  Cyclic GFR-binding peptide
  MOD_RES (27)..(29): Xaa is C or S

SEQ ID NO: 36124 - protein, 28 aa, Artificial Sequence
  Cyclic GFR-binding peptide
  MOD_RES (1)..(2): Xaa is C or S
XXAPTKLNAISVLYFDSSNNVILKKYRN

SEQ ID NO: 36125 - protein, 31 aa, Artificial Sequence; identical to SEQ ID NO: 7636
  Cyclic GFR-binding peptide
  MOD_RES (1)..(1): Xaa is C or S

SEQ ID NO: 36126 - protein, 31 aa, Artificial Sequence
  Cyclic GFR-binding peptide
  MOD_RES (5)..(6): Xaa is C or S
ASKAXXVPTKLSPISILYKDKGVVTYLKYHY

SEQ ID NO: 36127 - protein, 30 aa, Artificial Sequence
  Cyclic GFR-binding peptide
VPTKLNAISILYFDKGVVTYLKKYRGMAVS

SEQ ID NO: 36128 - protein, 29 aa, Artificial Sequence
  Cyclic GFR-binding peptide
PTQLSPISVLYKDDSSNVILKYHYNMVVR

SEQ ID NO: 36129 - protein, 33 aa, Artificial Sequence
  Cyclic GFR-binding peptide
  MOD_RES (1)..(2)..(33): Xaa is C or S
XXVSQDLEPISILYLIGKTPKIKFKYEMIVKSX

SEQ ID NO: 36130 - protein, 26 aa, Artificial Sequence
  Cyclic GFR-binding peptide
LEPISILYLVGRTPKVKFKYEMVVKS

SEQ ID NO: 36131 - protein, 26 aa, Artificial Sequence
  Cyclic GFR-binding peptide
PTKLSPISVLYKDSSNNVILKYHYNM

SEQ ID NO: 36132 - protein, 29 aa, Artificial Sequence
  Cyclic GFR-binding peptide
PTKLNAISVLYFDSSNNVILKKYRNMVVK

SEQ ID NO: 36133 - protein, 30 aa, Artificial Sequence; identical to SEQ ID NO: 7647
  Cyclic GFR-binding peptide
  MOD_RES (1)..(1): Xaa is C or S

SEQ ID NO: 36134 - protein, 31 aa, Artificial Sequence; identical to SEQ ID NO: 7649
  Cyclic GFR-binding peptide
  MOD_RES (30)..(30): Xaa is C or S

SEQ ID NO: 36135 - protein, 21 aa, Artificial Sequence
  Cyclic GFR-binding peptide
SPISILYIDKGVVTYYKQYEG

SEQ ID NO: 36136 - protein, 37 aa, Artificial Sequence; identical to SEQ ID NO: 7650
  Cyclic GFR-binding peptide
  MOD_RES (5)..(6): Xaa is C or S

SEQ ID NO: 36137 - protein, 30 aa, Artificial Sequence
  Cyclic GFR-binding peptide
VPQALSPISILYIVGRKPKVYKQYEMIVRS

SEQ ID NO: 36138 - protein, 29 aa, Artificial Sequence
  Cyclic GFR-binding peptide
  MOD_RES (29)..(29): Xaa is C or S
KLSPISVLYKDSSNNVILKYHYNMVVKAX

SEQ ID NO: 36139 - protein, 39 aa, Artificial Sequence
  Cyclic GFR-binding peptide
  MOD_RES (5)..(6)..(39): Xaa is C or S
VGKAXXVPTKLSPISVLYIDDMGVPTYKQYEEGMSVAEX

SEQ ID NO: 36140 - protein, 34 aa, Artificial Sequence; identical to SEQ ID NO: 7652
  Cyclic GFR-binding peptide
  MOD_RES (33)..(33): Xaa is C or S

SEQ ID NO: 36141 - protein, 42 aa, Artificial Sequence; identical to SEQ ID NO: 7653
  Cyclic GFR-binding peptide
  MOD_RES (7)..(39)..(41): Xaa is C or S

SEQ ID NO: 36142 - protein, 28 aa, Artificial Sequence
  Cyclic GFR-binding peptide
  MOD_RES (1)..(1): Xaa is C or S
XAPTKLEPISVLYLDDSSNVIKFKYENM

SEQ ID NO: 36143 - protein, 37 aa, Artificial Sequence
  Cyclic GFR-binding peptide
  MOD_RES (3)..(4)..(35)..(37): Xaa is C or S
SPXXVSQDLEPISILYLIGKTPKIKFKYEMIVKSXKX

SEQ ID NO: 36144 - protein, 27 aa, Artificial Sequence
  Cyclic GFR-binding peptide
RLNAISILYFDAANNVVLKKYRDMVVE

SEQ ID NO: 36145 - protein, 30 aa, Artificial Sequence; identical to SEQ ID NO: 7655
  Cyclic GFR-binding peptide
  MOD_RES (2)..(3): Xaa is C or S

SEQ ID NO: 36146 - protein, 23 aa, Artificial Sequence
  Cyclic GFR-binding peptide
EPISILYLVGRKPKVKFKYEMIV

SEQ ID NO: 36147 - protein, 36 aa, Artificial Sequence
  Cyclic GFR-binding peptide
  MOD_RES (7)..(7): Xaa is C or S
HVTKPTXAPTKLSPISVLYIDDSSNVIYKQYENMVV

SEQ ID NO: 36148 - protein, 36 aa, Artificial Sequence
  Cyclic GFR-binding peptide
  MOD_RES (5)..(6): Xaa is C or S
VPKPXXAPTQLSPISVLYIDDSSNVIYKQYENMVVR

SEQ ID NO: 36149 - protein, 40 aa, Artificial Sequence
  Cyclic GFR-binding peptide
  MOD_RES (5)..(37)..(39): Xaa is C or S
TKPTXAPTKLEPISVLYLDDSSNVIKFKYENMVVRSXGXH

SEQ ID NO: 36150 - protein, 36 aa, Artificial Sequence; identical to SEQ ID NO: 7661
  Cyclic GFR-binding peptide
  MOD_RES (6)..(7): Xaa is C or S

SEQ ID NO: 36151 - protein, 29 aa, Artificial Sequence
  Cyclic GFR-binding peptide
APTQLEPISVLYLDDSSNVIKFKYENMVV

SEQ ID NO: 36152 - protein, 21 aa, Artificial Sequence
  Cyclic GFR-binding peptide
LSPISILYIVGRKPKVYKQYE

SEQ ID NO: 36153 - protein, 25 aa, Artificial Sequence
  Cyclic GFR-binding peptide
EPISILYLVGRTPKVKFKYEMVVKS

SEQ ID NO: 36154 - protein, 31 aa, Artificial Sequence
  Cyclic GFR-binding peptide
  MOD_RES (29)..(31): Xaa is C or S
KLSPISVLYIDSSNNVIYKQYENMVVKAXGX

SEQ ID NO: 36155 - protein, 38 aa, Artificial Sequence
  Cyclic GFR-binding peptide
  MOD_RES (5)..(6)..(37): Xaa is C or S
SASPXXVPQDLEPISILYLVGRTPKVKFKYEMVVKSXK

SEQ ID NO: 36156 - protein, 23 aa, Artificial Sequence
  Cyclic GFR-binding peptide
DLNAISILYFIGKTPKILKKYRM

SEQ ID NO: 36157 - protein, 27 aa, Artificial Sequence
  Cyclic GFR-binding peptide
LEPISILYLDAANNVVKFKYEDMVVEA

SEQ ID NO: 36158 - protein, 26 aa, Artificial Sequence
  Cyclic GFR-binding peptide
TKLEPISVLYLDDSSNVIKFKYENMV

SEQ ID NO: 36159 - protein, 35 aa, Artificial Sequence; identical to SEQ ID NO: 7667
  Cyclic GFR-binding peptide
  MOD_RES (32)..(34): Xaa is C or S

SEQ ID NO: 36160 - protein, 39 aa, Artificial Sequence; identical to SEQ ID NO: 7668
  Cyclic GFR-binding peptide
  MOD_RES (6)..(7)..(39): Xaa is C or S

SEQ ID NO: 36161 - protein, 28 aa, Artificial Sequence
  Cyclic GFR-binding peptide
  MOD_RES (1)..(1): Xaa is C or S
XVPTKLSPISVLYIDDMGVPTYKQYEEG

SEQ ID NO: 36162 - protein, 25 aa, Artificial Sequence
  Cyclic GFR-binding peptide
VPQDLNAISILYFVGRTPKVLKKYR

SEQ ID NO: 36163 - protein, 27 aa, Artificial Sequence
  Cyclic GFR-binding peptide
  MOD_RES (1)..(2): Xaa is C or S
XXVPQALSPISILYIVGRKPKVYKQYE

SEQ ID NO: 36164 - protein, 27 aa, Artificial Sequence
  Cyclic GFR-binding peptide
LNAISILYFDAANNVVLKKYRDMVVEA

SEQ ID NO: 36165 - protein, 31 aa, Artificial Sequence
  Cyclic GFR-binding peptide
  MOD_RES (29)..(31): Xaa is C or S
QALSPISILYIVGRKPKVYKQYEMIVRSXKX

SEQ ID NO: 36166 - protein, 32 aa, Artificial Sequence; identical to SEQ ID NO: 7675
  Cyclic GFR-binding peptide
  MOD_RES (5)..(6): Xaa is C or S

SEQ ID NO: 36167 - protein, 30 aa, Artificial Sequence; identical to SEQ ID NO: 7676
  Cyclic GFR-binding peptide
  MOD_RES (2)..(3): Xaa is C or S

SEQ ID NO: 36168 - protein, 23 aa, Artificial Sequence
  Cyclic GFR-binding peptide
NAISILYFIGKTPKILKKYRMIV

SEQ ID NO: 36169 - protein, 24 aa, Artificial Sequence
  Cyclic GFR-binding peptide
LEPISVLYLDDSSNVIKFKYENMV

SEQ ID NO: 36170 - protein, 32 aa, Artificial Sequence; identical to SEQ ID NO: 7679
  Cyclic GFR-binding peptide
  MOD_RES (3)..(4): Xaa is C or S

SEQ ID NO: 36171 - protein, 24 aa, Artificial Sequence
  Cyclic GFR-binding peptide
LEPISVLYLDSSNNVIKFKYENMV

SEQ ID NO: 36172 - protein, 30 aa, Artificial Sequence
  Cyclic GFR-binding peptide
  MOD_RES (27)..(29): Xaa is C or S
LEPISILYLVGRTPKVKFKYEMVVKSXKXS

SEQ ID NO: 36173 - protein, 37 aa, Artificial Sequence; identical to SEQ ID NO: 7683
  Cyclic GFR-binding peptide
  MOD_RES (5)..(6)..(37): Xaa is C or S

SEQ ID NO: 36174 - protein, 35 aa, Artificial Sequence
  Cyclic GFR-binding peptide
  MOD_RES (2)..(3)..(35): Xaa is C or S
AXXVPTELEPISMLYLDENEKVVKFKYEDMVVEGX

SEQ ID NO: 36175 - protein, 28 aa, Artificial Sequence
  Cyclic GFR-binding peptide
ELEPISMLYLDENEKVVKFKYEDMVVEG

SEQ ID NO: 36176 - protein, 29 aa, Artificial Sequence
  Cyclic GFR-binding peptide
  MOD_RES (1)..(2): Xaa is C or S
XXAPTQLSPISVLYIDDSSNVIYKQYENM

SEQ ID NO: 36177 - protein, 28 aa, Artificial Sequence
  Cyclic GFR-binding peptide
  MOD_RES (1)..(2): Xaa is C or S
XXAPTKLEPISVLYLDDSSNVIKFKYEN

SEQ ID NO: 36178 - protein, 25 aa, Artificial Sequence
  Cyclic GFR-binding peptide
TKLEPISVLYLDSSNNVIKFKYENM

SEQ ID NO: 36179 - protein, 37 aa, Artificial Sequence
  Cyclic GFR-binding peptide
  MOD_RES (3)..(4)..(36): Xaa is C or S
KAXXAPTKLSPISVLYIDSSNNVIYKQYENMVVKAXG

SEQ ID NO: 36180 - protein, 34 aa, Artificial Sequence
  Cyclic GFR-binding peptide
  MOD_RES (5)..(6): Xaa is C or S
IPKAXXVPTELSPISMLYIDEYDKVVYKQYEEMV

SEQ ID NO: 36181 - protein, 28 aa, Artificial Sequence
  Cyclic GFR-binding peptide
PTQLSPISVLYKDDSSNVILKYHYNMVV

SEQ ID NO: 36182 - protein, 29 aa, Artificial Sequence
  Cyclic GFR-binding peptide
  MOD_RES (27)..(29): Xaa is C or S
SPISILYKDKGVVTYLKYHYGMAVSEXGX

SEQ ID NO: 36183 - protein, 28 aa, Artificial Sequence
  Cyclic GFR-binding peptide
VPQDLSPISILYKVGRTPKVLKYHYMVV

SEQ ID NO: 36184 - protein, 30 aa, Artificial Sequence; identical to SEQ ID NO: 7693
  Cyclic GFR-binding peptide
  MOD_RES (27)..(29): Xaa is C or S

SEQ ID NO: 36185 - protein, 25 aa, Artificial Sequence
  Cyclic GFR-binding peptide
VPARLNAISILYFDAANNVVLKKYR

SEQ ID NO: 36186 - protein, 25 aa, Artificial Sequence
  Cyclic GFR-binding peptide
TKLEPISVLYLDDMGVPTKFKYEEG

SEQ ID NO: 36187 - protein, 24 aa, Artificial Sequence
  Cyclic GFR-binding peptide
NAISILYFVGRKPKVLKKYRMIVR

SEQ ID NO: 36188 - protein, 26 aa, Artificial Sequence
  Cyclic GFR-binding peptide
VPTELSPISMLYIDENEKVVYKQYED

SEQ ID NO: 36189 - protein, 36 aa, Artificial Sequence; identical to SEQ ID NO: 7699
  Cyclic GFR-binding peptide
  MOD_RES (2)..(3)..(35): Xaa is C or S

SEQ ID NO: 36190 - protein, 30 aa, Artificial Sequence
  Cyclic GFR-binding peptide
  MOD_RES (28)..(30): Xaa is C or S
LSPISVLYIDDSSNVIYKQYENMVVRSXGX

SEQ ID NO: 36191 - protein, 35 aa, Artificial Sequence
  Cyclic GFR-binding peptide
  MOD_RES (4)..(5): Xaa is C or S
PASXXVPARLNAISILYFDAANNVVLKKYRDMVVE

SEQ ID NO: 36192 - protein, 34 aa, Artificial Sequence
  Cyclic GFR-binding peptide
  MOD_RES (3)..(4): Xaa is C or S
ASXXVPARLSPISILYKDAANNVVLKYHYDMVVE

SEQ ID NO: 36193 - protein, 34 aa, Artificial Sequence; identical to SEQ ID NO: 7706
  Cyclic GFR-binding peptide
  MOD_RES (2)..(3)..(34): Xaa is C or S

SEQ ID NO: 36194 - protein, 39 aa, Artificial Sequence
  Cyclic GFR-binding peptide
  MOD_RES (6)..(7)..(39): Xaa is C or S
AAPASXXVPARLNAISILYFDAANNVVLKKYRDMVVEAX

SEQ ID NO: 36195 - protein, 23 aa, Artificial Sequence
  Cyclic GFR-binding peptide
TELSPISMLYKDENEKVVLKYHY

SEQ ID NO: 36196 - protein, 36 aa, Artificial Sequence
  Cyclic GFR-binding peptide
  MOD_RES (33)..(35): Xaa is C or S
VPTKLEPISVLYLDDMGVPTKFKYEEGMSVAEXGXR

SEQ ID NO: 36197 - protein, 33 aa, Artificial Sequence
  Cyclic GFR-binding peptide
  MOD_RES (30)..(32): Xaa is C or S
TELSPISMLYIDEYDKVVYKQYEEMVVEGXGXR

SEQ ID NO: 36198 - protein, 31 aa, Artificial Sequence; identical to SEQ ID NO: 7708
  Cyclic GFR-binding peptide

SEQ ID NO: 36199 - protein, 33 aa, Artificial Sequence; identical to SEQ ID NO: 7709
  Cyclic GFR-binding peptide
  MOD_RES (2)..(3): Xaa is C or S

SEQ ID NO: 36200 - protein, 29 aa, Artificial Sequence
  Cyclic GFR-binding peptide
  MOD_RES (27)..(29): Xaa is C or S
EPISVLYLDSSNNVIKFKYENMVVKAXGX

SEQ ID NO: 36201 - protein, 32 aa, Artificial Sequence; identical to SEQ ID NO: 7711
  Cyclic GFR-binding peptide
  MOD_RES (6)..(7): Xaa is C or S

SEQ ID NO: 36202 - protein, 25 aa, Artificial Sequence
  Cyclic GFR-binding peptide
LSPISILYIVGRTPKVYKQYEMVVK

SEQ ID NO: 36203 - protein, 29 aa, Artificial Sequence
  Cyclic GFR-binding peptide
  MOD_RES (26)..(28): Xaa is C or S
NAISILYFVGRTPKVLKKYRMVVKSXKXS

SEQ ID NO: 36204 - protein, 37 aa, Artificial Sequence; identical to SEQ ID NO: 7715
  Cyclic GFR-binding peptide
  MOD_RES (1)..(2)..(34)..(36): Xaa is C or S

SEQ ID NO: 36205 - protein, 37 aa, Artificial Sequence; identical to SEQ ID NO: 7716
  Cyclic GFR-binding peptide
  MOD_RES (1)..(2)..(34)..(36): Xaa is C or S

SEQ ID NO: 36206 - protein, 28 aa, Artificial Sequence
  Cyclic GFR-binding peptide
PTELEPISMLYLDENEKVVKFKYEDMVV

SEQ ID NO: 36207 - protein, 41 aa, Artificial Sequence
  Cyclic GFR-binding peptide
  MOD_RES (6)..(7)..(39)..(41): Xaa is C or S
KASKAXXVPTKLNAISILYFDKGVVTYLKKYRGMAVSEXGX

SEQ ID NO: 36208 - protein, 37 aa, Artificial Sequence
  Cyclic GFR-binding peptide
  MOD_RES (6)..(7): Xaa is C or S
KIPKAXXVPTELSPISMLYIDENEKVVYKQYEDMVVE

SEQ ID NO: 36209 - protein, 28 aa, Artificial Sequence
  Cyclic GFR-binding peptide
  MOD_RES (28)..(28): Xaa is C or S
DLSPISILYIIGKTPKIYKQYEMIVKSX

SEQ ID NO: 36210 - protein, 32 aa, Artificial Sequence; identical to SEQ ID NO: 7719
  Cyclic GFR-binding peptide
  MOD_RES (3)..(3): Xaa is C or S

SEQ ID NO: 36211 - protein, 37 aa, Artificial Sequence; identical to SEQ ID NO: 7720
  Cyclic GFR-binding peptide
  MOD_RES (3)..(4)..(35)..(37): Xaa is C or S

SEQ ID NO: 36212 - protein, 28 aa, Artificial Sequence
  Cyclic GFR-binding peptide
KLNAISILYFDKGVVTYLKKYRGMAVSE

SEQ ID NO: 36213 - protein, 33 aa, Artificial Sequence; identical to SEQ ID NO: 7721
  Cyclic GFR-binding peptide
  MOD_RES (30)..(32): Xaa is C or S

SEQ ID NO: 36214 - protein, 34 aa, Artificial Sequence; identical to SEQ ID NO: 7723
  Cyclic GFR-binding peptide
  MOD_RES (5)..(6): Xaa is C or S

SEQ ID NO: 36215 - protein, 24 aa, Artificial Sequence
  Cyclic GFR-binding peptide
PQDLSPISILYIVGRTPKVYKQYE

SEQ ID NO: 36216 - protein, 30 aa, Artificial Sequence
  Cyclic GFR-binding peptide
  MOD_RES (4)..(5): Xaa is C or S
GKAXXVPTKLSPISVLYIDDMGVPTYKQYE

SEQ ID NO: 36217 - protein, 22 aa, Artificial Sequence
  Cyclic GFR-binding peptide
QLSPISVLYIDDSSNVIYKQYE

SEQ ID NO: 36218 - protein, 32 aa, Artificial Sequence
  Cyclic GFR-binding peptide
  MOD_RES (2)..(3): Xaa is C or S
PXXVPQDLEPISILYLVGRTPKVKFKYEMVVK

SEQ ID NO: 36219 - protein, 40 aa, Artificial Sequence; identical to SEQ ID NO: 7725
  Cyclic GFR-binding peptide
  MOD_RES (6)..(7)..(39): Xaa is C or S

SEQ ID NO: 36220 - protein, 37 aa, Artificial Sequence
  Cyclic GFR-binding peptide
  MOD_RES (6)..(7): Xaa is C or S
ASASPXXVSQDLEPISILYLIGKTPKIKFKYEMIVKS

SEQ ID NO: 36221 - protein, 39 aa, Artificial Sequence
  Cyclic GFR-binding peptide
  MOD_RES (5)..(6)..(38): Xaa is C or S
APASXXVPARLSPISILYKDAANNVVLKYHYDMVVEAXG

SEQ ID NO: 36222 - protein, 27 aa, Artificial Sequence
  Cyclic GFR-binding peptide
KLEPISVLYLDDMGVPTKFKYEEGMSV

SEQ ID NO: 36223 - protein, 28 aa, Artificial Sequence
  Cyclic GFR-binding peptide
  MOD_RES (2)..(3): Xaa is C or S
AXXVPTKLSPISILYKDKGVVTYLKYHY

SEQ ID NO: 36224 - protein, 26 aa, Artificial Sequence
  Cyclic GFR-binding peptide
LSPISMLYKDENEKVVLKYHYDMVVE

SEQ ID NO: 36225 - protein, 27 aa, Artificial Sequence
  Cyclic GFR-binding peptide
RLEPISILYLDAANNVVKFKYEDMVVE

SEQ ID NO: 36226 - protein, 25 aa, Artificial Sequence
  Cyclic GFR-binding peptide
APTKLNAISVLYFDSSNNVILKKYR

SEQ ID NO: 36227 - protein, 25 aa, Artificial Sequence
  Cyclic GFR-binding peptide
PTKLSPISVLYIDDMGVPTYKQYEE

SEQ ID NO: 36228 - protein, 30 aa, Artificial Sequence; identical to SEQ ID NO: 7732
  Cyclic GFR-binding peptide
  MOD_RES (1)..(1): Xaa is C or S

SEQ ID NO: 36229 - protein, 32 aa, Artificial Sequence
  Cyclic GFR-binding peptide
  MOD_RES (2)..(3): Xaa is C or S
AXXVPTKLSPISVLYIDDMGVPTYKQYEEGMS

SEQ ID NO: 36230 - protein, 30 aa, Artificial Sequence; identical to SEQ ID NO: 7737
  Cyclic GFR-binding peptide
  MOD_RES (3)..(4): Xaa is C or S

SEQ ID NO: 36231 - protein, 36 aa, Artificial Sequence; identical to SEQ ID NO: 7738
  Cyclic GFR-binding peptide
  MOD_RES (1)..(33)..(35): Xaa is C or S

SEQ ID NO: 36232 - protein, 33 aa, Artificial Sequence
  Cyclic GFR-binding peptide
  MOD_RES (1)..(1): Xaa is C or S
XVPTKLEPISVLYLDDMGVPTKFKYEEGMSVAE

SEQ ID NO: 36233 - protein, 23 aa, Artificial Sequence
  Cyclic GFR-binding peptide
SPISILYIIGKTPKIYKQYEMIV

SEQ ID NO: 36234 - protein, 28 aa, Artificial Sequence
  Cyclic GFR-binding peptide
  MOD_RES (27)..(27): Xaa is C or S
LNAISILYFVGRTPKVLKKYRMVVKSXK

SEQ ID NO: 36235 - protein, 28 aa, Artificial Sequence
  Cyclic GFR-binding peptide
  MOD_RES (1)..(1): Xaa is C or S
XVPTELSPISMLYKDEYDKVVLKYHYEM

SEQ ID NO: 36236 - protein, 32 aa, Artificial Sequence
  Cyclic GFR-binding peptide
  MOD_RES (1)..(1): Xaa is C or S
XVPARLSPISILYKDAANNVVLKYHYDMVVEA

SEQ ID NO: 36237 - protein, 29 aa, Artificial Sequence
  Cyclic GFR-binding peptide
PTKLEPISVLYLDDSSNVIKFKYENMVVR

SEQ ID NO: 36238 - protein, 29 aa, Artificial Sequence
  Cyclic GFR-binding peptide
  MOD_RES (29)..(29): Xaa is C or S
KLNAISVLYFDSSNNVILKKYRNMVVKAX

SEQ ID NO: 36239 - protein, 37 aa, Artificial Sequence
  Cyclic GFR-binding peptide
  MOD_RES (5)..(6): Xaa is C or S
VGKAXXVPTKLSPISVLYIDDMGVPTYKQYEEGMSVA

SEQ ID NO: 36240 - protein, 25 aa, Artificial Sequence
  Cyclic GFR-binding peptide
NAISILYFVGRTPKVLKKYRMVVKS

SEQ ID NO: 36241 - protein, 27 aa, Artificial Sequence
  Cyclic GFR-binding peptide
  MOD_RES (1)..(2): Xaa is C or S
XXVSQDLSPISILYIIGKTPKIYKQYE

SEQ ID NO: 36242 - protein, 28 aa, Artificial Sequence
  Cyclic GFR-binding peptide
QDLNAISILYFIGKTPKILKKYRMIVKS

SEQ ID NO: 36243 - protein, 29 aa, Artificial Sequence
  Cyclic GFR-binding peptide
PTELSPISMLYIDEYDKVVYKQYEEMVVE

SEQ ID NO: 36244 - protein, 31 aa, Artificial Sequence
  Cyclic GFR-binding peptide
  MOD_RES (28)..(30): Xaa is C or S
DLSPISILYIIGKTPKIYKQYEMIVKSXKXS

SEQ ID NO: 36245 - protein, 32 aa, Artificial Sequence
  Cyclic GFR-binding peptide
  MOD_RES (5)..(6): Xaa is C or S
APASXXVPARLNAISILYFDAANNVVLKKYRD

SEQ ID NO: 36246 - protein, 30 aa, Artificial Sequence
  Cyclic GFR-binding peptide
PTKLSPISILYIDKGVVTYYKQYEGMAVSE

SEQ ID NO: 36247 - protein, 42 aa, Artificial Sequence
  Cyclic GFR-binding peptide
  MOD_RES (6)..(7)..(39)..(41): Xaa is C or S
SIPKAXXVPTELEPISMLYLDEYDKVVKFKYEEMVVEGXGXR

SEQ ID NO: 36248 - protein, 27 aa, Artificial Sequence
  Cyclic GFR-binding peptide
  MOD_RES (27)..(27): Xaa is C or S
NAISMLYFDEYDKVVLKKYREMVVEGX

SEQ ID NO: 36249 - protein, 34 aa, Artificial Sequence; identical to SEQ ID NO: 7765
  Cyclic GFR-binding peptide
  MOD_RES (5)..(6): Xaa is C or S

SEQ ID NO: 36250 - protein, 32 aa, Artificial Sequence; identical to SEQ ID NO: 7766
  Cyclic GFR-binding peptide
  MOD_RES (2)..(3): Xaa is C or S

SEQ ID NO: 36251 - protein, 34 aa, Artificial Sequence; identical to SEQ ID NO: 7768
  Cyclic GFR-binding peptide
  MOD_RES (7)..(7): Xaa is C or S

SEQ ID NO: 36252 - protein, 40 aa, Artificial Sequence
  Cyclic GFR-binding peptide
  MOD_RES (6)..(7)..(38)..(40): Xaa is C or S
ASAAPXXVPQALSPISILYIVGRKPKVYKQYEMIVRSXKX

SEQ ID NO: 36253 - protein, 36 aa, Artificial Sequence
  Cyclic GFR-binding peptide
  MOD_RES (1)..(2)..(35): Xaa is C or S
XXVPTKLEPISVLYLDDMGVPTKFKYEEGMSVAEXG

SEQ ID NO: 36254 - protein, 39 aa, Artificial Sequence; identical to SEQ ID NO: 7770
  Cyclic GFR-binding peptide
  MOD_RES (5)..(6)..(38): Xaa is C or S

SEQ ID NO: 36255 - protein, 38 aa, Artificial Sequence
  Cyclic GFR-binding peptide
  MOD_RES (3)..(4)..(36)..(38): Xaa is C or S
KAXXVPTKLSPISILYKDKGVVTYLKYHYGMAVSEXGX

SEQ ID NO: 36256 - protein, 37 aa, Artificial Sequence
  Cyclic GFR-binding peptide
  MOD_RES (4)..(5)..(37): Xaa is C or S
PKAXXVPTELSPISMLYIDENEKVVYKQYEDMVVEGX

SEQ ID NO: 36257 - protein, 37 aa, Artificial Sequence; identical to SEQ ID NO: 7772
  Cyclic GFR-binding peptide
  MOD_RES (6)..(7): Xaa is C or S

SEQ ID NO: 36258 - protein, 35 aa, Artificial Sequence; identical to SEQ ID NO: 7773
  Cyclic GFR-binding peptide
  MOD_RES (5)..(6): Xaa is C or S

SEQ ID NO: 36259 - protein, 34 aa, Artificial Sequence; identical to SEQ ID NO: 7774
  Cyclic GFR-binding peptide
  MOD_RES (2)..(34): Xaa is C or S

SEQ ID NO: 36260 - protein, 21 aa, Artificial Sequence
  Cyclic GFR-binding peptide
LSPISVLYIDSSNNVIYKQYE

SEQ ID NO: 36261 - protein, 30 aa, Artificial Sequence
  Cyclic GFR-binding peptide
  MOD_RES (29)..(29): Xaa is C or S
KLSPISILYKDKGVVTYLKYHYGMAVSEXG

SEQ ID NO: 36262 - protein, 24 aa, Artificial Sequence
  Cyclic GFR-binding peptide
KLSPISILYKDKGVVTYLKYHYGM

SEQ ID NO: 36263 - protein, 31 aa, Artificial Sequence
  Cyclic GFR-binding peptide
  MOD_RES (2)..(3): Xaa is C or S
AXXVPTELSPISMLYIDENEKVVYKQYEDMV

SEQ ID NO: 36264 - protein, 27 aa, Artificial Sequence
  Cyclic GFR-binding peptide
  MOD_RES (27)..(27): Xaa is C or S
SPISMLYKDEYDKVVLKYHYEMVVEGX

SEQ ID NO: 36265 - protein, 37 aa, Artificial Sequence
  Cyclic GFR-binding peptide
  MOD_RES (4)..(5)..(36): Xaa is C or S
AAPXXVPQALEPISILYLVGRKPKVKFKYEMIVRSXK

SEQ ID NO: 36266 - protein, 33 aa, Artificial Sequence
  Cyclic GFR-binding peptide
  MOD_RES (6)..(7): Xaa is C or S
KIPKAXXVPTELEPISMLYLDENEKVVKFKYED

SEQ ID NO: 36267 - protein, 27 aa, Artificial Sequence
  Cyclic GFR-binding peptide
  MOD_RES (27)..(27): Xaa is C or S
EPISVLYLDDSSNVIKFKYENMVVRAX

SEQ ID NO: 36268 - protein, 36 aa, Artificial Sequence
  Cyclic GFR-binding peptide
  MOD_RES (6)..(7): Xaa is C or S
ASASPXXVPQDLEPISILYLVGRTPKVKFKYEMVVK

SEQ ID NO: 36269 - protein, 33 aa, Artificial Sequence
  Cyclic GFR-binding peptide
  MOD_RES (2)..(3): Xaa is C or S
PXXAPTKLSPISVLYIDDSSNVIYKQYENMVVR

SEQ ID NO: 36270 - protein, 38 aa, Artificial Sequence
  Cyclic GFR-binding peptide
  MOD_RES (5)..(6)..(38): Xaa is C or S
IPKAXXVPTELEPISMLYLDEYDKVVKFKYEEMVVEGX

SEQ ID NO: 36271 - protein, 32 aa, Artificial Sequence; identical to SEQ ID NO: 7778
  Cyclic GFR-binding peptide
  MOD_RES (31)..(31): Xaa is C or S

SEQ ID NO: 36272 - protein, 34 aa, Artificial Sequence
  Cyclic GFR-binding peptide
  MOD_RES (1)..(33): Xaa is C or S
XVPTELEPISMLYLDEYDKVVKFKYEEMVVEGXG

SEQ ID NO: 36273 - protein, 38 aa, Artificial Sequence
  Cyclic GFR-binding peptide
  MOD_RES (2)..(3)..(36)..(38): Xaa is C or S
AXXVPTKLSPISVLYIDDMGVPTYKQYEEGMSVAEXGX

SEQ ID NO: 36274 - protein, 32 aa, Artificial Sequence
  Cyclic GFR-binding peptide
  MOD_RES (2)..(3): Xaa is C or S
AXXVPTELEPISMLYLDEYDKVVKFKYEEMVV

SEQ ID NO: 36275 - protein, 29 aa, Artificial Sequence
  Cyclic GFR-binding peptide
PTKLEPISVLYLDSSNNVIKFKYENMVVK

SEQ ID NO: 36276 - protein, 31 aa, Artificial Sequence
  Cyclic GFR-binding peptide
VPTELSPISMLYIDENEKVVYKQYEDMVVEG

SEQ ID NO: 36277 - protein, 35 aa, Artificial Sequence; identical to SEQ ID NO: 7781
  Cyclic GFR-binding peptide
  MOD_RES (3)..(4): Xaa is C or S

SEQ ID NO: 36278 - protein, 30 aa, Artificial Sequence; identical to SEQ ID NO: 7782
  Cyclic GFR-binding peptide
  MOD_RES (4)..(5): Xaa is C or S

SEQ ID NO: 36279 - protein, 35 aa, Artificial Sequence; identical to SEQ ID NO: 7784
  Cyclic GFR-binding peptide
  MOD_RES (5)..(6): Xaa is C or S

SEQ ID NO: 36280 - protein, 27 aa, Artificial Sequence
  Cyclic GFR-binding peptide
  MOD_RES (27)..(27): Xaa is C or S
EPISILYLDAANNVVKFKYEDMVVEAX

SEQ ID NO: 36281 - protein, 31 aa, Artificial Sequence; identical to SEQ ID NO: 7787
  Cyclic GFR-binding peptide

SEQ ID NO: 36282 - protein, 35 aa, Artificial Sequence
  Cyclic GFR-binding peptide
  MOD_RES (4)..(4): Xaa is C or S
KPTXAPTKLEPISVLYLDDSSNVIKFKYENMVVRS

SEQ ID NO: 36283 - protein, 28 aa, Artificial Sequence
  Cyclic GFR-binding peptide
  MOD_RES (1)..(2): Xaa is C or S
XXVPTELSPISMLYIDEYDKVVYKQYEE

SEQ ID NO: 36284 - protein, 23 aa, Artificial Sequence
  Cyclic GFR-binding peptide
LSPISVLYKDSSNNVILKYHYNM

SEQ ID NO: 36285 - protein, 32 aa, Artificial Sequence
  Cyclic GFR-binding peptide
  MOD_RES (31)..(31): Xaa is C or S
TKLSPISVLYIDDMGVPTYKQYEEGMSVAEXG

SEQ ID NO: 36286 - protein, 31 aa, Artificial Sequence
  Cyclic GFR-binding peptide
  MOD_RES (5)..(6): Xaa is C or S
ASKAXXVPTKLNAISILYFDKGVVTYLKKYR

SEQ ID NO: 36287 - protein, 33 aa, Artificial Sequence
  Cyclic GFR-binding peptide
  MOD_RES (3)..(4): Xaa is C or S
KPXXAPTQLEPISVLYLDDSSNVIKFKYENMVV

SEQ ID NO: 36288 - protein, 35 aa, Artificial Sequence
  Cyclic GFR-binding peptide
  MOD_RES (32)..(34): Xaa is C or S
VPTELEPISMLYLDEYDKVVKFKYEEMVVEGXGXR

SEQ ID NO: 36289 - protein, 35 aa, Artificial Sequence
  Cyclic GFR-binding peptide
  MOD_RES (4)..(5): Xaa is C or S
GKAXXVPTKLSPISVLYIDDMGVPTYKQYEEGMSV

SEQ ID NO: 36290 - protein, 22 aa, Artificial Sequence
  Cyclic GFR-binding peptide
ELNAISMLYFDEYDKVVLKKYR

SEQ ID NO: 36291 - protein, 32 aa, Artificial Sequence
  Cyclic GFR-binding peptide
  MOD_RES (1)..(2): Xaa is C or S
XXVPQDLEPISILYLVGRTPKVKFKYEMVVKS

SEQ ID NO: 36292 - protein, 35 aa, Artificial Sequence; identical to SEQ ID NO: 7795
  Cyclic GFR-binding peptide
  MOD_RES (6)..(7): Xaa is C or S

SEQ ID NO: 36293 - protein, 41 aa, Artificial Sequence
  Cyclic GFR-binding peptide
  MOD_RES (5)..(6)..(38)..(40): Xaa is C or S
ASKAXXVPTKLSPISILYIDKGVVTYYKQYEGMAVSEXGXR

SEQ ID NO: 36294 - protein, 40 aa, Artificial Sequence; identical to SEQ ID NO: 7796
  Cyclic GFR-binding peptide
  MOD_RES (5)..(37)..(39): Xaa is C or S

SEQ ID NO: 36295 - protein, 35 aa, Artificial Sequence
  Cyclic GFR-binding peptide
  MOD_RES (2)..(3)..(35): Xaa is C or S
AXXVPTKLSPISILYKDKGVVTYLKYHYGMAVSEX

SEQ ID NO: 36296 - protein, 37 aa, Artificial Sequence; identical to SEQ ID NO: 7797
  Cyclic GFR-binding peptide
  MOD_RES (5)..(37): Xaa is C or S

SEQ ID NO: 36297 - protein, 31 aa, Artificial Sequence; identical to SEQ ID NO: 7798
  Cyclic GFR-binding peptide
  MOD_RES (1)..(2): Xaa is C or S

SEQ ID NO: 36298 - protein, 30 aa, Artificial Sequence
  Cyclic GFR-binding peptide
  MOD_RES (1)..(1): Xaa is C or S
XAPTQLEPISVLYLDDSSNVIKFKYENMVV

SEQ ID NO: 36299 - protein, 24 aa, Artificial Sequence
  Cyclic GFR-binding peptide
QDLEPISILYLVGRTPKVKFKYEM

SEQ ID NO: 36300 - protein, 28 aa, Artificial Sequence
  Cyclic GFR-binding peptide
LSPISVLYIDDMGVPTYKQYEEGMSVAE

SEQ ID NO: 36301 - protein, 31 aa, Artificial Sequence; identical to SEQ ID NO: 7801
  Cyclic GFR-binding peptide
  MOD_RES (28)..(30): Xaa is C or S

SEQ ID NO: 36302 - protein, 31 aa, Artificial Sequence; identical to SEQ ID NO: 7804
  Cyclic GFR-binding peptide
  MOD_RES (3)..(4): Xaa is C or S

SEQ ID NO: 36303 - protein, 26 aa, Artificial Sequence
  Cyclic GFR-binding peptide
  MOD_RES (1)..(1): Xaa is C or S
XVPTKLSPISVLYIDDMGVPTYKQYE

SEQ ID NO: 36304 - protein, 31 aa, Artificial Sequence; identical to SEQ ID NO: 7806
  Cyclic GFR-binding peptide
  MOD_RES (30)..(30): Xaa is C or S

SEQ ID NO: 36305 - protein, 22 aa, Artificial Sequence
  Cyclic GFR-binding peptide
LSPISILYKDAANNVVLKYHYD

SEQ ID NO: 36306 - protein, 40 aa, Artificial Sequence
  Cyclic GFR-binding peptide
  MOD_RES (5)..(6)..(38)..(40): Xaa is C or S
ASKAXXVPTKLNAISILYFDKGVVTYLKKYRGMAVSEXGX

SEQ ID NO: 36307 - protein, 32 aa, Artificial Sequence
  Cyclic GFR-binding peptide
  MOD_RES (5)..(6): Xaa is C or S
IPKAXXVPTELEPISMLYLDEYDKVVKFKYEE

SEQ ID NO: 36308 - protein, 23 aa, Artificial Sequence
  Cyclic GFR-binding peptide
SPISMLYKDEYDKVVLKYHYEMV

SEQ ID NO: 36309 - protein, 33 aa, Artificial Sequence
  Cyclic GFR-binding peptide
  MOD_RES (3)..(4): Xaa is C or S
KAXXAPTKLEPISVLYLDSSNNVIKFKYENMVV

SEQ ID NO: 36310 - protein, 29 aa, Artificial Sequence
  Cyclic GFR-binding peptide
  MOD_RES (2)..(3): Xaa is C or S
PXXVSQDLEPISILYLIGKTPKIKFKYEM

SEQ ID NO: 36311 - protein, 27 aa, Artificial Sequence
  Cyclic GFR-binding peptide
LSPISILYKDKGVVTYLKYHYGMAVSE

SEQ ID NO: 36312 - protein, 27 aa, Artificial Sequence
  Cyclic GFR-binding peptide
  MOD_RES (27)..(27): Xaa is C or S
SPISILYKDAANNVVLKYHYDMVVEAX

SEQ ID NO: 36313 - protein, 40 aa, Artificial Sequence; identical to SEQ ID NO: 7808
  Cyclic GFR-binding peptide
  MOD_RES (5)..(6)..(37)..(39): Xaa is C or S

SEQ ID NO: 36314 - protein, 38 aa, Artificial Sequence
  Cyclic GFR-binding peptide
  MOD_RES (4)..(5)..(37): Xaa is C or S
PKAXXVPTELSPISMLYIDENEKVVYKQYEDMVVEGXG

SEQ ID NO: 36315 - protein, 28 aa, Artificial Sequence
  Cyclic GFR-binding peptide
ARLSPISILYKDAANNVVLKYHYDMVVE

SEQ ID NO: 36316 - protein, 22 aa, Artificial Sequence
  Cyclic GFR-binding peptide
DLNAISILYFVGRTPKVLKKYR

SEQ ID NO: 36317 - protein, 31 aa, Artificial Sequence
  Cyclic GFR-binding peptide
  MOD_RES (2)..(3): Xaa is C or S
PXXAPTQLEPISVLYLDDSSNVIKFKYENMV

SEQ ID NO: 36318 - protein, 24 aa, Artificial Sequence
  Cyclic GFR-binding peptide
NAISILYFDKGVVTYLKKYRGMAV

SEQ ID NO: 36319 - protein, 33 aa, Artificial Sequence
  Cyclic GFR-binding peptide
  MOD_RES (3)..(4): Xaa is C or S
KPXXAPTKLSPISVLYIDDSSNVIYKQYENMVV

SEQ ID NO: 36320 - protein, 24 aa, Artificial Sequence
  Cyclic GFR-binding peptide
EPISVLYLDDMGVPTKFKYEEGMS

SEQ ID NO: 36321 - protein, 32 aa, Artificial Sequence
  Cyclic GFR-binding peptide
  MOD_RES (5)..(6): Xaa is C or S
SASPXXVPQDLSPISILYIVGRTPKVYKQYEM

SEQ ID NO: 36322 - protein, 29 aa, Artificial Sequence
  Cyclic GFR-binding peptide
  MOD_RES (1)..(2): Xaa is C or S
XXAPTKLEPISVLYLDSSNNVIKFKYENM

SEQ ID NO: 36323 - protein, 34 aa, Artificial Sequence; identical to SEQ ID NO: 7815
  Cyclic GFR-binding peptide
  MOD_RES (4)..(5): Xaa is C or S

SEQ ID NO: 36324 - protein, 40 aa, Artificial Sequence
  Cyclic GFR-binding peptide
  MOD_RES (5)..(6)..(38)..(40): Xaa is C or S
VPKAXXAPTKLSPISVLYIDSSNNVIYKQYENMVVKAXGX

SEQ ID NO: 36325 - protein, 28 aa, Artificial Sequence
  Cyclic GFR-binding peptide
  MOD_RES (1)..(1): Xaa is C or S
XAPTKLSPISVLYIDDSSNVIYKQYENM

SEQ ID NO: 36326 - protein, 38 aa, Artificial Sequence
  Cyclic GFR-binding peptide
  MOD_RES (5)..(6)..(37): Xaa is C or S
SASPXXVSQDLEPISILYLIGKTPKIKFKYEMIVKSXK

SEQ ID NO: 36327 - protein, 28 aa, Artificial Sequence
  Cyclic GFR-binding peptide
PTKLSPISVLYIDDMGVPTYKQYEEGMS

SEQ ID NO: 36328 - protein, 33 aa, Artificial Sequence; identical to SEQ ID NO: 7821
  Cyclic GFR-binding peptide
  MOD_RES (1)..(2): Xaa is C or S

SEQ ID NO: 36329 - protein, 29 aa, Artificial Sequence
  Cyclic GFR-binding peptide
  MOD_RES (3)..(4): Xaa is C or S
KAXXVPTKLSPISILYIDKGVVTYYKQYE

SEQ ID NO: 36330 - protein, 35 aa, Artificial Sequence
  Cyclic GFR-binding peptide
  MOD_RES (5)..(6): Xaa is C or S
VPKAXXAPTKLSPISVLYIDSSNNVIYKQYENMVV

SEQ ID NO: 36331 - protein, 35 aa, Artificial Sequence
  Cyclic GFR-binding peptide
  MOD_RES (6)..(7): Xaa is C or S
AAPASXXVPARLSPISILYKDAANNVVLKYHYDMV

SEQ ID NO: 36332 - protein, 33 aa, Artificial Sequence
  Cyclic GFR-binding peptide
  MOD_RES (30)..(32): Xaa is C or S
PQALEPISILYLVGRKPKVKFKYEMIVRSXKXS

SEQ ID NO: 36333 - protein, 32 aa, Artificial Sequence
  Cyclic GFR-binding peptide
  MOD_RES (32)..(32): Xaa is C or S
VPTKLNAISILYFDKGVVTYLKKYRGMAVSEX

SEQ ID NO: 36334 - protein, 23 aa, Artificial Sequence
  Cyclic GFR-binding peptide
DLSPISILYKIGKTPKILKYHYM

SEQ ID NO: 36335 - protein, 33 aa, Artificial Sequence
  Cyclic GFR-binding peptide
  MOD_RES (5)..(6): Xaa is C or S
IPKAXXVPTELSPISMLYIDENEKVVYKQYEDM

SEQ ID NO: 36336 - protein, 35 aa, Artificial Sequence
  Cyclic GFR-binding peptide
  MOD_RES (6)..(7): Xaa is C or S
AVPKAXXAPTKLSPISVLYIDSSNNVIYKQYENMV

SEQ ID NO: 36337 - protein, 36 aa, Artificial Sequence
  Cyclic GFR-binding peptide
  MOD_RES (2)..(3)..(35): Xaa is C or S
SXXVPARLEPISILYLDAANNVVKFKYEDMVVEAXG

SEQ ID NO: 36338 - protein, 21 aa, Artificial Sequence
  Cyclic GFR-binding peptide
LNAISVLYFDDMGVPTLKKYR

SEQ ID NO: 36339 - protein, 32 aa, Artificial Sequence
  Cyclic GFR-binding peptide
  MOD_RES (3)..(4): Xaa is C or S
KAXXVPTKLSPISILYKDKGVVTYLKYHYGMA

SEQ ID NO: 36340 - protein, 34 aa, Artificial Sequence
  Cyclic GFR-binding peptide
  MOD_RES (2)..(3): Xaa is C or S
AXXVPTKLSPISVLYIDDMGVPTYKQYEEGMSVA

SEQ ID NO: 36341 - protein, 34 aa, Artificial Sequence; identical to SEQ ID NO: 7834
  Cyclic GFR-binding peptide
  MOD_RES (3)..(4): Xaa is C or S

SEQ ID NO: 36342 - protein, 31 aa, Artificial Sequence
  Cyclic GFR-binding peptide
  MOD_RES (28)..(30): Xaa is C or S
ALEPISILYLVGRKPKVKFKYEMIVRSXKXS

SEQ ID NO: 36343 - protein, 33 aa, Artificial Sequence; identical to SEQ ID NO: 7836
  Cyclic GFR-binding peptide
  MOD_RES (4)..(5): Xaa is C or S

SEQ ID NO: 36344 - protein, 35 aa, Artificial Sequence
  Cyclic GFR-binding peptide
  MOD_RES (5)..(6): Xaa is C or S
APASXXVPARLNAISILYFDAANNVVLKKYRDMVV

SEQ ID NO: 36345 - protein, 36 aa, Artificial Sequence; identical to SEQ ID NO: 7837
  Cyclic GFR-binding peptide
  MOD_RES (1)..(33)..(35): Xaa is C or S

SEQ ID NO: 36346 - protein, 39 aa, Artificial Sequence; identical to SEQ ID NO: 7838
  Cyclic GFR-binding peptide
  MOD_RES (5)..(6)..(38): Xaa is C or S

SEQ ID NO: 36347 - protein, 29 aa, Artificial Sequence
  Cyclic GFR-binding peptide
  MOD_RES (29)..(29): Xaa is C or S
QLSPISVLYIDDSSNVIYKQYENMVVRAX

SEQ ID NO: 36348 - protein, 33 aa, Artificial Sequence; identical to SEQ ID NO: 7841
  Cyclic GFR-binding peptide
  MOD_RES (32)..(32): Xaa is C or S

SEQ ID NO: 36349 - protein, 36 aa, Artificial Sequence
  Cyclic GFR-binding peptide
  MOD_RES (3)..(35): Xaa is C or S
PTXAPTKLSPISVLYIDDSSNVIYKQYENMVVRSXG

SEQ ID NO: 36350 - protein, 27 aa, Artificial Sequence
  Cyclic GFR-binding peptide
KLSPISVLYKDSSNNVILKYHYNMVVK

SEQ ID NO: 36351 - protein, 30 aa, Artificial Sequence
  Cyclic GFR-binding peptide
  MOD_RES (2)..(3): Xaa is C or S
AXXVPTELSPISMLYIDENEKVVYKQYEDM

SEQ ID NO: 36352 - protein, 25 aa, Artificial Sequence
  Cyclic GFR-binding peptide
VPTELSPISMLYIDENEKVVYKQYE

SEQ ID NO: 36353 - protein, 28 aa, Artificial Sequence
  Cyclic GFR-binding peptide
  MOD_RES (1)..(2): Xaa is C or S
XXVPARLEPISILYLDAANNVVKFKYED

SEQ ID NO: 36354 - protein, 34 aa, Artificial Sequence
  Cyclic GFR-binding peptide
  MOD_RES (2)..(3): Xaa is C or S
SXXVPARLNAISILYFDAANNVVLKKYRDMVVEA

SEQ ID NO: 36355 - protein, 29 aa, Artificial Sequence
  Cyclic GFR-binding peptide
  MOD_RES (1)..(1): Xaa is C or S
XAPTQLSPISVLYKDDSSNVILKYHYNMV

SEQ ID NO: 36356 - protein, 26 aa, Artificial Sequence
  Cyclic GFR-binding peptide
QDLSPISILYKIGKTPKILKYHYMIV

SEQ ID NO: 36357 - protein, 32 aa, Artificial Sequence
  Cyclic GFR-binding peptide
  MOD_RES (32)..(32): Xaa is C or S
VPTKLSPISILYKDKGVVTYLKYHYGMAVSEX

SEQ ID NO: 36358 - protein, 35 aa, Artificial Sequence
  Cyclic GFR-binding peptide
  MOD_RES (32)..(34): Xaa is C or S
PTKLSPISVLYIDDMGVPTYKQYEEGMSVAEXGXR

SEQ ID NO: 36359 - protein, 29 aa, Artificial Sequence
  Cyclic GFR-binding peptide
  MOD_RES (3)..(3): Xaa is C or S
PTXAPTKLEPISVLYLDDSSNVIKFKYEN

SEQ ID NO: 36360 - protein, 34 aa, Artificial Sequence
  Cyclic GFR-binding peptide
  MOD_RES (6)..(6): Xaa is C or S
VTKPTXAPTKLSPISVLYIDDSSNVIYKQYENMV

SEQ ID NO: 36361 - protein, 39 aa, Artificial Sequence
  Cyclic GFR-binding peptide
  MOD_RES (4)..(5)..(37)..(39): Xaa is C or S
PASXXVPARLEPISILYLDAANNVVKFKYEDMVVEAXGX

SEQ ID NO: 36362 - protein, 22 aa, Artificial Sequence
  Cyclic GFR-binding peptide
DLSPISILYIIGKTPKIYKQYE

SEQ ID NO: 36363 - protein, 34 aa, Artificial Sequence; identical to SEQ ID NO: 7849
  Cyclic GFR-binding peptide
  MOD_RES (31)..(33): Xaa is C or S

SEQ ID NO: 36364 - protein, 35 aa, Artificial Sequence
  Cyclic GFR-binding peptide
  MOD_RES (6)..(7): Xaa is C or S
YVPKPXXAPTKLSPISVLYIDDSSNVIYKQYENMV

SEQ ID NO: 36365 - protein, 39 aa, Artificial Sequence; identical to SEQ ID NO: 7850
  Cyclic GFR-binding peptide
  MOD_RES (4)..(5)..(37)..(39): Xaa is C or S

SEQ ID NO: 36366 - protein, 28 aa, Artificial Sequence
  Cyclic GFR-binding peptide
  MOD_RES (26)..(28): Xaa is C or S
SPISILYIIGKTPKIYKQYEMIVKSXKX

SEQ ID NO: 36367 - protein, 35 aa, Artificial Sequence; identical to SEQ ID NO: 7852
  Cyclic GFR-binding peptide
  MOD_RES (4)..(5): Xaa is C or S

SEQ ID NO: 36368 - protein, 27 aa, Artificial Sequence
  Cyclic GFR-binding peptide
ELNAISMLYFDEYDKVVLKKYREMVVE

SEQ ID NO: 36369 - protein, 32 aa, Artificial Sequence; identical to SEQ ID NO: 7856
  Cyclic GFR-binding peptide
  MOD_RES (6)..(7): Xaa is C or S

SEQ ID NO: 36370 - protein, 36 aa, Artificial Sequence
  Cyclic GFR-binding peptide
  MOD_RES (3)..(4)..(36): Xaa is C or S
KAXXAPTKLSPISVLYIDSSNNVIYKQYENMVVKAX

SEQ ID NO: 36371 - protein, 35 aa, Artificial Sequence; identical to SEQ ID NO: 7858
  Cyclic GFR-binding peptide
  MOD_RES (2)..(34): Xaa is C or S

SEQ ID NO: 36372 - protein, 31 aa, Artificial Sequence
  Cyclic GFR-binding peptide
  MOD_RES (1)..(1): Xaa is C or S
XVPQDLEPISILYLVGRTPKVKFKYEMVVKS

SEQ ID NO: 36373 - protein, 29 aa, Artificial Sequence
  Cyclic GFR-binding peptide
VPQDLSPISILYKVGRTPKVLKYHYMVVK

SEQ ID NO: 36374 - protein, 34 aa, Artificial Sequence
  Cyclic GFR-binding peptide
  MOD_RES (5)..(6): Xaa is C or S
VPKPXXAPTKLEPISVLYLDDSSNVIKFKYENMV

SEQ ID NO: 36375 - protein, 37 aa, Artificial Sequence
  Cyclic GFR-binding peptide
  MOD_RES (4)..(5)..(36): Xaa is C or S
ASPXXVPQDLSPISILYIVGRTPKVYKQYEMVVKSXK

SEQ ID NO: 36376 - protein, 29 aa, Artificial Sequence
  Cyclic GFR-binding peptide
  MOD_RES (1)..(2): Xaa is C or S
XXVPTELNAISMLYFDENEKVVLKKYRDM

SEQ ID NO: 36377 - protein, 33 aa, Artificial Sequence
  Cyclic GFR-binding peptide
  MOD_RES (3)..(4): Xaa is C or S
KAXXVPTELSPISMLYIDENEKVVYKQYEDMVV

SEQ ID NO: 36378 - protein, 30 aa, Artificial Sequence; identical to SEQ ID NO: 7862
  Cyclic GFR-binding peptide
  MOD_RES (30)..(30): Xaa is C or S

SEQ ID NO: 36379 - protein, 22 aa, Artificial Sequence
  Cyclic GFR-binding peptide
LSPISILYIVGRTPKVYKQYEM

SEQ ID NO: 36380 - protein, 34 aa, Artificial Sequence
  Cyclic GFR-binding peptide
  MOD_RES (31)..(33): Xaa is C or S
PTKLSPISVLYIDSSNNVIYKQYENMVVKAXGXH

SEQ ID NO: 36381 - protein, 30 aa, Artificial Sequence; identical to SEQ ID NO: 7863
  Cyclic GFR-binding peptide

SEQ ID NO: 36382 - protein, 35 aa, Artificial Sequence; identical to SEQ ID NO: 7864
  Cyclic GFR-binding peptide
  MOD_RES (6)..(7): Xaa is C or S

SEQ ID NO: 36383 - protein, 23 aa, Artificial Sequence
  Cyclic GFR-binding peptide
ELSPISMLYIDENEKVVYKQYED

SEQ ID NO: 36384 - protein, 34 aa, Artificial Sequence
  Cyclic GFR-binding peptide
  MOD_RES (1)..(2)..(33): Xaa is C or S
XXVSQDLSPISILYIIGKTPKIYKQYEMIVKSXK

SEQ ID NO: 36385 - protein, 34 aa, Artificial Sequence
  Cyclic GFR-binding peptide
  MOD_RES (5)..(6): Xaa is C or S
SAAPXXVPQALEPISILYLVGRKPKVKFKYEMIV

SEQ ID NO: 36386 - protein, 41 aa, Artificial Sequence
  Cyclic GFR-binding peptide
  MOD_RES (5)..(6)..(38)..(40): Xaa is C or S
VPKPXXAPTKLSPISVLYIDDSSNVIYKQYENMVVRSXGXH

SEQ ID NO: 36387 - protein, 25 aa, Artificial Sequence
  Cyclic GFR-binding peptide
PTELSPISMLYIDEYDKVVYKQYEE

SEQ ID NO: 36388 - protein, 28 aa, Artificial Sequence
  Cyclic GFR-binding peptide
  MOD_RES (1)..(2): Xaa is C or S
XXVPTELSPISMLYKDENEKVVLKYHYD

SEQ ID NO: 36389 - protein, 35 aa, Artificial Sequence
  Cyclic GFR-binding peptide
  MOD_RES (2)..(3)..(35): Xaa is C or S
AXXVPTKLNAISILYFDKGVVTYLKKYRGMAVSEX

SEQ ID NO: 36390 - protein, 37 aa, Artificial Sequence; identical to SEQ ID NO: 7866
  Cyclic GFR-binding peptide
  MOD_RES (3)..(4)..(35)..(37): Xaa is C or S

SEQ ID NO: 36391 - protein, 31 aa, Artificial Sequence; identical to SEQ ID NO: 7868
  Cyclic GFR-binding peptide
  MOD_RES (30)..(30): Xaa is C or S

SEQ ID NO: 36392 - protein, 23 aa, Artificial Sequence
  Cyclic GFR-binding peptide
LNAISMLYFDEYDKVVLKKYREM

SEQ ID NO: 36393 - protein, 26 aa, Artificial Sequence
  Cyclic GFR-binding peptide
SPISVLYKDSSNNVILKYHYNMVVKA

SEQ ID NO: 36394 - protein, 40 aa, Artificial Sequence
  Cyclic GFR-binding peptide
  MOD_RES (6)..(38)..(40): Xaa is C or S
VTKPTXAPTKLEPISVLYLDDSSNVIKFKYENMVVRSXGX

SEQ ID NO: 36395 - protein, 29 aa, Artificial Sequence
  Cyclic GFR-binding peptide
  MOD_RES (1)..(2): Xaa is C or S
XXVPTELSPISMLYKDEYDKVVLKYHYEM

SEQ ID NO: 36396 - protein, 22 aa, Artificial Sequence
  Cyclic GFR-binding peptide
LSPISVLYIDSSNNVIYKQYEN

SEQ ID NO: 36397 - protein, 25 aa, Artificial Sequence
  Cyclic GFR-binding peptide
PARLEPISILYLDAANNVVKFKYED

SEQ ID NO: 36398 - protein, 36 aa, Artificial Sequence
  Cyclic GFR-binding peptide
  MOD_RES (3)..(4)..(36): Xaa is C or S
KPXXAPTQLSPISVLYIDDSSNVIYKQYENMVVRAX

SEQ ID NO: 36399 - protein, 31 aa, Artificial Sequence
  Cyclic GFR-binding peptide
  MOD_RES (4)..(5): Xaa is C or S
PKPXXAPTKLSPISVLYIDDSSNVIYKQYEN

SEQ ID NO: 36400 - protein, 32 aa, Artificial Sequence
  Cyclic GFR-binding peptide
  MOD_RES (4)..(5): Xaa is C or S
SKAXXVPTKLSPISILYKDKGVVTYLKYHYGM

SEQ ID NO: 36401 - protein, 35 aa, Artificial Sequence
  Cyclic GFR-binding peptide
  MOD_RES (32)..(34): Xaa is C or S
VPTELEPISMLYLDENEKVVKFKYEDMVVEGXGXR

SEQ ID NO: 36402 - protein, 38 aa, Artificial Sequence; identical to SEQ ID NO: 7873
  Cyclic GFR-binding peptide
  MOD_RES (4)..(5)..(36)..(38): Xaa is C or S

SEQ ID NO: 36403 - protein, 28 aa, Artificial Sequence
  Cyclic GFR-binding peptide
TKLSPISVLYIDDMGVPTYKQYEEGMSV

SEQ ID NO: 36404 - protein, 40 aa, Artificial Sequence
  Cyclic GFR-binding peptide
  MOD_RES (4)..(5)..(37)..(39): Xaa is C or S
PKAXXAPTKLSPISVLYIDSSNNVIYKQYENMVVKAXGXH

SEQ ID NO: 36405 - protein, 28 aa, Artificial Sequence
  Cyclic GFR-binding peptide
  MOD_RES (28)..(28): Xaa is C or S
LSPISMLYIDEYDKVVYKQYEEMVVEGX

SEQ ID NO: 36406 - protein, 29 aa, Artificial Sequence
  Cyclic GFR-binding peptide
VPTELNAISMLYFDEYDKVVLKKYREMVV

SEQ ID NO: 36407 - protein, 29 aa, Artificial Sequence
  Cyclic GFR-binding peptide
  MOD_RES (27)..(29): Xaa is C or S
LSPISILYIVGRKPKVYKQYEMIVRSXKX

SEQ ID NO: 36408 - protein, 40 aa, Artificial Sequence; identical to SEQ ID NO: 7875
  Cyclic GFR-binding peptide
  MOD_RES (4)..(5)..(37)..(39): Xaa is C or S

SEQ ID NO: 36409 - protein, 25 aa, Artificial Sequence
  Cyclic GFR-binding peptide
QALSPISILYIVGRKPKVYKQYEMI

SEQ ID NO: 36410 - protein, 34 aa, Artificial Sequence
  Cyclic GFR-binding peptide
  MOD_RES (6)..(7): Xaa is C or S
KASKAXXVPTKLSPISILYIDKGVVTYYKQYEGM

SEQ ID NO: 36411 - protein, 34 aa, Artificial Sequence
  Cyclic GFR-binding peptide
  MOD_RES (1)..(2)..(33): Xaa is C or S
XXVPQDLSPISILYIVGRTPKVYKQYEMVVKSXK

SEQ ID NO: 36412 - protein, 24 aa, Artificial Sequence
  Cyclic GFR-binding peptide
PTKLSPISVLYIDDSSNVIYKQYE

SEQ ID NO: 36413 - protein, 32 aa, Artificial Sequence; identical to SEQ ID NO: 7876
  Cyclic GFR-binding peptide
  MOD_RES (4)..(5): Xaa is C or S

SEQ ID NO: 36414 - protein, 28 aa, Artificial Sequence
  Cyclic GFR-binding peptide
  MOD_RES (27)..(27): Xaa is C or S
EPISMLYLDEYDKVVKFKYEEMVVEGXG

SEQ ID NO: 36415 - protein, 30 aa, Artificial Sequence
  Cyclic GFR-binding peptide
  MOD_RES (4)..(5): Xaa is C or S
PKPXXAPTKLSPISVLYIDDSSNVIYKQYE

SEQ ID NO: 36416 - protein, 37 aa, Artificial Sequence; identical to SEQ ID NO: 7879
  Cyclic GFR-binding peptide
  MOD_RES (2)..(3)..(34)..(36): Xaa is C or S

SEQ ID NO: 36417 - protein, 32 aa, Artificial Sequence
  Cyclic GFR-binding peptide
  MOD_RES (6)..(7): Xaa is C or S
SIPKAXXVPTELSPISMLYIDEYDKVVYKQYE

SEQ ID NO: 36418 - protein, 30 aa, Artificial Sequence; identical to SEQ ID NO: 7880
  Cyclic GFR-binding peptide
  MOD_RES (2)..(3): Xaa is C or S

SEQ ID NO: 36419 - protein, 32 aa, Artificial Sequence
  Cyclic GFR-binding peptide
  MOD_RES (31)..(31): Xaa is C or S
PTKLSPISVLYIDDSSNVIYKQYENMVVRSXG

SEQ ID NO: 36420 - protein, 32 aa, Artificial Sequence
  Cyclic GFR-binding peptide
  MOD_RES (3)..(4): Xaa is C or S
ASXXVPARLEPISILYLDAANNVVKFKYEDMV

SEQ ID NO: 36421 - protein, 35 aa, Artificial Sequence
  Cyclic GFR-binding peptide
  MOD_RES (1)..(2)..(34): Xaa is C or S
XXVPTELEPISMLYLDENEKVVKFKYEDMVVEGXG

SEQ ID NO: 36422 - protein, 23 aa, Artificial Sequence
  Cyclic GFR-binding peptide
QALSPISILYIVGRKPKVYKQYE

SEQ ID NO: 36423 - protein, 31 aa, Artificial Sequence
  Cyclic GFR-binding peptide
  MOD_RES (2)..(2): Xaa is C or S
TXAPTKLSPISVLYIDDSSNVIYKQYENMVV

SEQ ID NO: 36424 - protein, 40 aa, Artificial Sequence; identical to SEQ ID NO: 7887
  Cyclic GFR-binding peptide
  MOD_RES (6)..(7)..(39): Xaa is C or S

SEQ ID NO: 36425 - protein, 26 aa, Artificial Sequence
  Cyclic GFR-binding peptide
LNAISILYFVGRKPKVLKKYRMIVRS

SEQ ID NO: 36426 - protein, 35 aa, Artificial Sequence
  Cyclic GFR-binding peptide
  MOD_RES (2)..(3)..(34): Xaa is C or S
PXXVPQDLEPISILYLVGRTPKVKFKYEMVVKSXK

SEQ ID NO: 36427 - protein, 29 aa, Artificial Sequence
  Cyclic GFR-binding peptide
  MOD_RES (26)..(28): Xaa is C or S
SPISILYIVGRKPKVYKQYEMIVRSXKXS

SEQ ID NO: 36428 - protein, 36 aa, Artificial Sequence
  Cyclic GFR-binding peptide
  MOD_RES (2)..(3)..(35): Xaa is C or S
AXXAPTKLEPISVLYLDSSNNVIKFKYENMVVKAXG

SEQ ID NO: 36429 - protein, 31 aa, Artificial Sequence
  Cyclic GFR-binding peptide
  MOD_RES (2)..(3): Xaa is C or S
AXXVPTELEPISMLYLDENEKVVKFKYEDMV

SEQ ID NO: 36430 - protein, 32 aa, Artificial Sequence; identical to SEQ ID NO: 7892
  Cyclic GFR-binding peptide
  MOD_RES (32)..(32): Xaa is C or S

SEQ ID NO: 36431 - protein, 38 aa, Artificial Sequence
  Cyclic GFR-binding peptide
  MOD_RES (2)..(3)..(35)..(37): Xaa is C or S
SXXVPARLNAISILYFDAANNVVLKKYRDMVVEAXGXR

SEQ ID NO: 36432 - protein, 32 aa, Artificial Sequence
  Cyclic GFR-binding peptide
  MOD_RES (32)..(32): Xaa is C or S
APTKLEPISVLYLDDSSNVIKFKYENMVVRSX

SEQ ID NO: 36433 - protein, 32 aa, Artificial Sequence
  Cyclic GFR-binding peptide
  MOD_RES (30)..(32): Xaa is C or S
ARLNAISILYFDAANNVVLKKYRDMVVEAXGX

SEQ ID NO: 36434 - protein, 36 aa, Artificial Sequence; identical to SEQ ID NO: 7893
  Cyclic GFR-binding peptide
  MOD_RES (2)..(3)..(34)..(36): Xaa is C or S

SEQ ID NO: 36435 - protein, 35 aa, Artificial Sequence
  Cyclic GFR-binding peptide
  MOD_RES (2)..(3)..(35): Xaa is C or S
SXXVPARLNAISILYFDAANNVVLKKYRDMVVEAX

SEQ ID NO: 36436 - protein, 25 aa, Artificial Sequence
  Cyclic GFR-binding peptide
DLEPISILYLVGRTPKVKFKYEMVV

SEQ ID NO: 36437 - protein, 26 aa, Artificial Sequence
  Cyclic GFR-binding peptide
VPARLNAISILYFDAANNVVLKKYRD

SEQ ID NO: 36438 - protein, 32 aa, Artificial Sequence; identical to SEQ ID NO: 7897
  Cyclic GFR-binding peptide
  MOD_RES (29)..(31): Xaa is C or S

SEQ ID NO: 36439 - protein, 21 aa, Artificial Sequence
  Cyclic GFR-binding peptide
EPISILYLVGRKPKVKFKYEM

SEQ ID NO: 36440 - protein, 30 aa, Artificial Sequence
  Cyclic GFR-binding peptide
  MOD_RES (4)..(5): Xaa is C or S
ASPXXVPQDLSPISILYIVGRTPKVYKQYE

SEQ ID NO: 36441 - protein, 24 aa, Artificial Sequence
  Cyclic GFR-binding peptide
ARLSPISILYKDAANNVVLKYHYD

SEQ ID NO: 36442 - protein, 43 aa, Artificial Sequence; identical to SEQ ID NO: 7899
  Cyclic GFR-binding peptide
  MOD_RES (6)..(7)..(40)..(42): Xaa is C or S

SEQ ID NO: 36443 - protein, 25 aa, Artificial Sequence
  Cyclic GFR-binding peptide
EPISMLYLDEYDKVVKFKYEEMVVE

SEQ ID NO: 36444 - protein, 35 aa, Artificial Sequence
  Cyclic GFR-binding peptide
  MOD_RES (3)..(4): Xaa is C or S
KAXXVPTKLSPISILYKDKGVVTYLKYHYGMAVSE

SEQ ID NO: 36445 - protein, 29 aa, Artificial Sequence
  Cyclic GFR-binding peptide
TKLSPISVLYIDDSSNVIYKQYENMVVRS

SEQ ID NO: 36446 - protein, 28 aa, Artificial Sequence
  Cyclic GFR-binding peptide
APTKLSPISVLYKDDSSNVILKYHYNMV

SEQ ID NO: 36447 - protein, 31 aa, Artificial Sequence
  Cyclic GFR-binding peptide
  MOD_RES (1)..(2): Xaa is C or S
XXVPARLSPISILYKDAANNVVLKYHYDMVV

SEQ ID NO: 36448 - protein, 34 aa, Artificial Sequence
  Cyclic GFR-binding peptide
  MOD_RES (3)..(4): Xaa is C or S
KAXXVPTKLNAISILYFDKGVVTYLKKYRGMAVS

SEQ ID NO: 36449 - protein, 38 aa, Artificial Sequence
  Cyclic GFR-binding peptide
  MOD_RES (4)..(5)..(37): Xaa is C or S
SKAXXVPTKLNAISILYFDKGVVTYLKKYRGMAVSEXG

SEQ ID NO: 36450 - protein, 39 aa, Artificial Sequence
  Cyclic GFR-binding peptide
  MOD_RES (6)..(7)..(39): Xaa is C or S
SIPKAXXVPTELEPISMLYLDEYDKVVKFKYEEMVVEGX

SEQ ID NO: 36451 - protein, 26 aa, Artificial Sequence
  Cyclic GFR-binding peptide
SPISVLYIDDMGVPTYKQYEEGMSVA

SEQ ID NO: 36452 - protein, 30 aa, Artificial Sequence; identical to SEQ ID NO: 7905
  Cyclic GFR-binding peptide
  MOD_RES (27)..(29): Xaa is C or S

SEQ ID NO: 36453 - protein, 39 aa, Artificial Sequence
  Cyclic GFR-binding peptide
  MOD_RES (5)..(6)..(37)..(39): Xaa is C or S
SAAPXXVPQALSPISILYIVGRKPKVYKQYEMIVRSXKX

SEQ ID NO: 36454 - protein, 30 aa, Artificial Sequence; identical to SEQ ID NO: 7906
  Cyclic GFR-binding peptide
  MOD_RES (1)..(1): Xaa is C or S

SEQ ID NO: 36455 - protein, 33 aa, Artificial Sequence; identical to SEQ ID NO: 7907
  Cyclic GFR-binding peptide
  MOD_RES (3)..(4): Xaa is C or S

SEQ ID NO: 36456 - protein, 28 aa, Artificial Sequence
  Cyclic GFR-binding peptide
TELNAISMLYFDENEKVVLKKYRDMVVE

SEQ ID NO: 36457 - protein, 36 aa, Artificial Sequence
  Cyclic GFR-binding peptide
  MOD_RES (1)..(2)..(34)..(36): Xaa is C or S
XXAPTQLSPISVLYIDDSSNVIYKQYENMVVRAXGX

SEQ ID NO: 36458 - protein, 26 aa, Artificial Sequence
  Cyclic GFR-binding peptide
QALEPISILYLVGRKPKVKFKYEMIV

SEQ ID NO: 36459 - protein, 37 aa, Artificial Sequence
  Cyclic GFR-binding peptide
  MOD_RES (6)..(7): Xaa is C or S
YVPKPXXAPTKLEPISVLYLDDSSNVIKFKYENMVVR

SEQ ID NO: 36460 - protein, 34 aa, Artificial Sequence
  Cyclic GFR-binding peptide
  MOD_RES (2)..(3): Xaa is C or S
AXXVPTELEPISMLYLDEYDKVVKFKYEEMVVEG

SEQ ID NO: 36461 - protein, 27 aa, Artificial Sequence
  Cyclic GFR-binding peptide
KLSPISILYKDKGVVTYLKYHYGMAVS

SEQ ID NO: 36462 - protein, 33 aa, Artificial Sequence; identical to SEQ ID NO: 7913
  Cyclic GFR-binding peptide
  MOD_RES (31)..(33): Xaa is C or S

SEQ ID NO: 36463 - protein, 30 aa, Artificial Sequence; identical to SEQ ID NO: 7914
  Cyclic GFR-binding peptide
  MOD_RES (3)..(4): Xaa is C or S

SEQ ID NO: 36464 - protein, 24 aa, Artificial Sequence
  Cyclic GFR-binding peptide
DLSPISILYKIGKTPKILKYHYMI

SEQ ID NO: 36465 - protein, 30 aa, Artificial Sequence; identical to SEQ ID NO: 7918
  Cyclic GFR-binding peptide
  MOD_RES (27)..(29): Xaa is C or S

SEQ ID NO: 36466 - protein, 38 aa, Artificial Sequence; identical to SEQ ID NO: 7919
  Cyclic GFR-binding peptide
  MOD_RES (3)..(4)..(36)..(38): Xaa is C or S

SEQ ID NO: 36467 - protein, 24 aa, Artificial Sequence
  Cyclic GFR-binding peptide
TKLSPISVLYIDDMGVPTYKQYEE

SEQ ID NO: 36468 - protein, 36 aa, Artificial Sequence
  Cyclic GFR-binding peptide
  MOD_RES (4)..(5): Xaa is C or S
GKAXXVPTKLEPISVLYLDDMGVPTKFKYEEGMSVA

SEQ ID NO: 36469 - protein, 29 aa, Artificial Sequence
  Cyclic GFR-binding peptide
  MOD_RES (1)..(2): Xaa is C or S
XXVSQDLSPISILYKIGKTPKILKYHYMI

SEQ ID NO: 36470 - protein, 35 aa, Artificial Sequence
  Cyclic GFR-binding peptide
  MOD_RES (1)..(33)..(35): Xaa is C or S
XAPTKLEPISVLYLDDSSNVIKFKYENMVVRSXGX

SEQ ID NO: 36471 - protein, 37 aa, Artificial Sequence
  Cyclic GFR-binding peptide
  MOD_RES (1)..(2)..(34)..(36): Xaa is C or S
XXVPTELEPISMLYLDENEKVVKFKYEDMVVEGXGXR

SEQ ID NO: 36472 - protein, 30 aa, Artificial Sequence; identical to SEQ ID NO: 7922
  Cyclic GFR-binding peptide
  MOD_RES (2)..(3): Xaa is C or S

SEQ ID NO: 36473 - protein, 33 aa, Artificial Sequence
  Cyclic GFR-binding peptide
  MOD_RES (32)..(32): Xaa is C or S
VPTELEPISMLYLDEYDKVVKFKYEEMVVEGXG

SEQ ID NO: 36474 - protein, 36 aa, Artificial Sequence
  Cyclic GFR-binding peptide
  MOD_RES (2)..(34)..(36): Xaa is C or S
TXAPTKLSPISVLYIDDSSNVIYKQYENMVVRSXGX

SEQ ID NO: 36475 - protein, 36 aa, Artificial Sequence
  Cyclic GFR-binding peptide
  MOD_RES (2)..(3)..(34)..(36): Xaa is C or S
PXXVPQDLSPISILYIVGRTPKVYKQYEMVVKSXKX

SEQ ID NO: 36476 - protein, 26 aa, Artificial Sequence
  Cyclic GFR-binding peptide
SPISMLYKDENEKVVLKYHYDMVVEG

SEQ ID NO: 36477 - protein, 35 aa, Artificial Sequence
  Cyclic GFR-binding peptide
  MOD_RES (1)..(32)..(34): Xaa is C or S
XVPQDLSPISILYIVGRTPKVYKQYEMVVKSXKXS

SEQ ID NO: 36478 - protein, 28 aa, Artificial Sequence
  Cyclic GFR-binding peptide
PTELEPISMLYLDEYDKVVKFKYEEMVV

SEQ ID NO: 36479 - protein, 29 aa, Artificial Sequence
  Cyclic GFR-binding peptide
  MOD_RES (27)..(29): Xaa is C or S
SPISILYKDAANNVVLKYHYDMVVEAXGX

SEQ ID NO: 36480 - protein, 26 aa, Artificial Sequence
  Cyclic GFR-binding peptide
  MOD_RES (26)..(26): Xaa is C or S
NAISILYFIGKTPKILKKYRMIVKSX

SEQ ID NO: 36481 - protein, 28 aa, Artificial Sequence
  Cyclic GFR-binding peptide
KLNAISVLYFDSSNNVILKKYRNMVVKA

SEQ ID NO: 36482 - protein, 30 aa, Artificial Sequence; identical to SEQ ID NO: 7929
  Cyclic GFR-binding peptide
  MOD_RES (28)..(30): Xaa is C or S

SEQ ID NO: 36483 - protein, 24 aa, Artificial Sequence
  Cyclic GFR-binding peptide
PTKLNAISVLYFDSSNNVILKKYR

SEQ ID NO: 36484 - protein, 22 aa, Artificial Sequence
  Cyclic GFR-binding peptide
LNAISILYFDAANNVVLKKYRD

SEQ ID NO: 36485 - protein, 29 aa, Artificial Sequence
  Cyclic GFR-binding peptide
  MOD_RES (4)..(4): Xaa is C or S
KPTXAPTKLSPISVLYKDDSSNVILKYHY

SEQ ID NO: 36486 - protein, 30 aa, Artificial Sequence; identical to SEQ ID NO: 7934
  Cyclic GFR-binding peptide
  MOD_RES (29)..(29): Xaa is C or S

SEQ ID NO: 36487 - protein, 35 aa, Artificial Sequence
  Cyclic GFR-binding peptide
  MOD_RES (6)..(7): Xaa is C or S
KASKAXXVPTKLSPISILYIDKGVVTYYKQYEGMA

SEQ ID NO: 36488 - protein, 34 aa, Artificial Sequence
  Cyclic GFR-binding peptide
  MOD_RES (5)..(6): Xaa is C or S
SAAPXXVPQALSPISILYIVGRKPKVYKQYEMIV

SEQ ID NO: 36489 - protein, 34 aa, Artificial Sequence
  Cyclic GFR-binding peptide
  MOD_RES (2)..(3): Xaa is C or S
PXXAPTKLSPISVLYIDDSSNVIYKQYENMVVRS

SEQ ID NO: 36490 - protein, 37 aa, Artificial Sequence; identical to SEQ ID NO: 7938
  Cyclic GFR-binding peptide
  MOD_RES (1)..(34)..(36): Xaa is C or S

SEQ ID NO: 36491 - protein, 22 aa, Artificial Sequence
  Cyclic GFR-binding peptide
LSPISILYKDKGVVTYLKYHYG

SEQ ID NO: 36492 - protein, 33 aa, Artificial Sequence; identical to SEQ ID NO: 7939
  Cyclic GFR-binding peptide
  MOD_RES (32)..(32): Xaa is C or S

SEQ ID NO: 36493 - protein, 33 aa, Artificial Sequence; identical to SEQ ID NO: 7941
  Cyclic GFR-binding peptide
  MOD_RES (3)..(4): Xaa is C or S

SEQ ID NO: 36494 - protein, 40 aa, Artificial Sequence
  Cyclic GFR-binding peptide
  MOD_RES (6)..(7)..(39): Xaa is C or S
AVPKAXXAPTKLEPISVLYLDSSNNVIKFKYENMVVKAXG

SEQ ID NO: 36495 - protein, 35 aa, Artificial Sequence
  Cyclic GFR-binding peptide
  MOD_RES (2)..(3)..(35): Xaa is C or S
SXXVPARLSPISILYKDAANNVVLKYHYDMVVEAX

SEQ ID NO: 36496 - protein, 39 aa, Artificial Sequence; identical to SEQ ID NO: 7945
  Cyclic GFR-binding peptide
  MOD_RES (6)..(7)..(38): Xaa is C or S

SEQ ID NO: 36497 - protein, 23 aa, Artificial Sequence
  Cyclic GFR-binding peptide
SPISILYKVGRTPKVLKYHYMVV

SEQ ID NO: 36498 - protein, 35 aa, Artificial Sequence; identical to SEQ ID NO: 7947
  Cyclic GFR-binding peptide
  MOD_RES (3)..(4): Xaa is C or S

SEQ ID NO: 36499 - protein, 39 aa, Artificial Sequence
  Cyclic GFR-binding peptide
  MOD_RES (4)..(5)..(37)..(39): Xaa is C or S
PASXXVPARLSPISILYKDAANNVVLKYHYDMVVEAXGX

SEQ ID NO: 36500 - protein, 29 aa, Artificial Sequence
  Cyclic GFR-binding peptide
  MOD_RES (1)..(1): Xaa is C or S
XAPTKLSPISVLYIDSSNNVIYKQYENMV

SEQ ID NO: 36501 - protein, 33 aa, Artificial Sequence; identical to SEQ ID NO: 7952
  Cyclic GFR-binding peptide
  MOD_RES (1)..(33): Xaa is C or S

SEQ ID NO: 36502 - protein, 35 aa, Artificial Sequence; identical to SEQ ID NO: 7953
  Cyclic GFR-binding peptide
  MOD_RES (32)..(34): Xaa is C or S

SEQ ID NO: 36503 - protein, 35 aa, Artificial Sequence
  Cyclic GFR-binding peptide
  MOD_RES (3)..(4): Xaa is C or S
KAXXVPTKLSPISILYIDKGVVTYYKQYEGMAVSE

SEQ ID NO: 36504 - protein, 36 aa, Artificial Sequence; identical to SEQ ID NO: 7954
  Cyclic GFR-binding peptide
  MOD_RES (5)..(6): Xaa is C or S

SEQ ID NO: 36505 - protein, 25 aa, Artificial Sequence
  Cyclic GFR-binding peptide
VPQALEPISILYLVGRKPKVKFKYE

SEQ ID NO: 36506 - protein, 29 aa, Artificial Sequence
  Cyclic GFR-binding peptide
APTKLSPISVLYIDDSSNVIYKQYENMVV

SEQ ID NO: 36507 - protein, 30 aa, Artificial Sequence
  Cyclic GFR-binding peptide
  MOD_RES (29)..(29): Xaa is C or S
QLSPISVLYIDDSSNVIYKQYENMVVRAXG

SEQ ID NO: 36508 - protein, 32 aa, Artificial Sequence; identical to SEQ ID NO: 7960
  Cyclic GFR-binding peptide
  MOD_RES (5)..(6): Xaa is C or S

SEQ ID NO: 36509 - protein, 32 aa, Artificial Sequence; identical to SEQ ID NO: 7962
  Cyclic GFR-binding peptide
  MOD_RES (29)..(31): Xaa is C or S

SEQ ID NO: 36510 - protein, 31 aa, Artificial Sequence
  Cyclic GFR-binding peptide
  MOD_RES (4)..(5): Xaa is C or S
PKAXXVPTELEPISMLYLDEYDKVVKFKYEE

SEQ ID NO: 36511 - protein, 30 aa, Artificial Sequence
  Cyclic GFR-binding peptide
  MOD_RES (2)..(3): Xaa is C or S
AXXVPTKLNAISILYFDKGVVTYLKKYRGM

SEQ ID NO: 36512 - protein, 39 aa, Artificial Sequence
  Cyclic GFR-binding peptide
  MOD_RES (6)..(7)..(38): Xaa is C or S
ASASPXXVSQDLEPISILYLIGKTPKIKFKYEMIVKSXK

SEQ ID NO: 36513 - protein, 24 aa, Artificial Sequence
  Cyclic GFR-binding peptide
LEPISVLYLDDMGVPTKFKYEEGM

SEQ ID NO: 36514 - protein, 25 aa, Artificial Sequence
  Cyclic GFR-binding peptide
TQLSPISVLYIDDSSNVIYKQYENM

SEQ ID NO: 36515 - protein, 27 aa, Artificial Sequence
  Cyclic GFR-binding peptide
VPARLNAISILYFDAANNVVLKKYRDM

SEQ ID NO: 36516 - protein, 30 aa, Artificial Sequence; identical to SEQ ID NO: 7968
  Cyclic GFR-binding peptide

SEQ ID NO: 36517 - protein, 34 aa, Artificial Sequence
  Cyclic GFR-binding peptide
  MOD_RES (5)..(6): Xaa is C or S
IPKAXXVPTELSPISMLYIDENEKVVYKQYEDMV

SEQ ID NO: 36518 - protein, 25 aa, Artificial Sequence
  Cyclic GFR-binding peptide
LEPISVLYLDDMGVPTKFKYEEGMS

SEQ ID NO: 36519 - protein, 29 aa, Artificial Sequence
  Cyclic GFR-binding peptide
VPTKLEPISVLYLDDMGVPTKFKYEEGMS

SEQ ID NO: 36520 - protein, 25 aa, Artificial Sequence
  Cyclic GFR-binding peptide
VPQDLSPISILYKVGRTPKVLKYHY

SEQ ID NO: 36521 - protein, 38 aa, Artificial Sequence; identical to SEQ ID NO: 7972
  Cyclic GFR-binding peptide
  MOD_RES (3)..(4)..(35)..(37): Xaa is C or S

SEQ ID NO: 36522 - protein, 25 aa, Artificial Sequence
  Cyclic GFR-binding peptide
PTKLSPISVLYIDDSSNVIYKQYEN

SEQ ID NO: 36523 - protein, 26 aa, Artificial Sequence
  Cyclic GFR-binding peptide
LEPISILYLDAANNVVKFKYEDMVVE

SEQ ID NO: 36524 - protein, 40 aa, Artificial Sequence
  Cyclic GFR-binding peptide
  MOD_RES (6)..(7)..(39): Xaa is C or S
KASKAXXVPTKLNAISILYFDKGVVTYLKKYRGMAVSEXG

SEQ ID NO: 36525 - protein, 25 aa, Artificial Sequence
  Cyclic GFR-binding peptide
PQDLEPISILYLVGRTPKVKFKYEM

SEQ ID NO: 36526 - protein, 32 aa, Artificial Sequence
  Cyclic GFR-binding peptide
  MOD_RES (30)..(32): Xaa is C or S
TKLNAISILYFDKGVVTYLKKYRGMAVSEXGX

SEQ ID NO: 36527 - protein, 30 aa, Artificial Sequence
  Cyclic GFR-binding peptide
  MOD_RES (30)..(30): Xaa is C or S
TKLSPISILYIDKGVVTYYKQYEGMAVSEX

SEQ ID NO: 36528 - protein, 30 aa, Artificial Sequence; identical to SEQ ID NO: 7977
  Cyclic GFR-binding peptide
  MOD_RES (27)..(29): Xaa is C or S

SEQ ID NO: 36529 - protein, 34 aa, Artificial Sequence
  Cyclic GFR-binding peptide
  MOD_RES (3)..(4): Xaa is C or S
SPXXVSQDLEPISILYLIGKTPKIKFKYEMIVKS

SEQ ID NO: 36530 - protein, 34 aa, Artificial Sequence
  Cyclic GFR-binding peptide
  MOD_RES (32)..(34): Xaa is C or S
APTQLSPISVLYIDDSSNVIYKQYENMVVRAXGX

SEQ ID NO: 36531 - protein, 40 aa, Artificial Sequence
  Cyclic GFR-binding peptide
  MOD_RES (7)..(39): Xaa is C or S
HVTKPTXAPTKLSPISVLYIDDSSNVIYKQYENMVVRSXG

SEQ ID NO: 36532 - protein, 38 aa, Artificial Sequence
  Cyclic GFR-binding peptide
  MOD_RES (6)..(7): Xaa is C or S
KASKAXXVPTKLSPISILYIDKGVVTYYKQYEGMAVSE

SEQ ID NO: 36533 - protein, 35 aa, Artificial Sequence; identical to SEQ ID NO: 7980
  Cyclic GFR-binding peptide
  MOD_RES (5)..(6): Xaa is C or S

SEQ ID NO: 36534 - protein, 36 aa, Artificial Sequence
  Cyclic GFR-binding peptide
  MOD_RES (3)..(4): Xaa is C or S
KAXXVPTKLSPISVLYIDDMGVPTYKQYEEGMSVAE

SEQ ID NO: 36535 - protein, 34 aa, Artificial Sequence; identical to SEQ ID NO: 7983
  Cyclic GFR-binding peptide
  MOD_RES (1)..(2)..(34): Xaa is C or S

SEQ ID NO: 36536 - protein, 30 aa, Artificial Sequence
  Cyclic GFR-binding peptide
PTKLEPISVLYLDDMGVPTKFKYEEGMSVA

SEQ ID NO: 36537 - protein, 24 aa, Artificial Sequence
  Cyclic GFR-binding peptide
TKLSPISVLYIDDSSNVIYKQYEN

SEQ ID NO: 36538 - protein, 40 aa, Artificial Sequence; identical to SEQ ID NO: 7986
  Cyclic GFR-binding peptide
  MOD_RES (6)..(7)..(38)..(40): Xaa is C or S

SEQ ID NO: 36539 - protein, 41 aa, Artificial Sequence; identical to SEQ ID NO: 7987
  Cyclic GFR-binding peptide
  MOD_RES (5)..(6)..(39)..(41): Xaa is C or S

SEQ ID NO: 36540 - protein, 39 aa, Artificial Sequence
  Cyclic GFR-binding peptide
  MOD_RES (2)..(3)..(36)..(38): Xaa is C or S
AXXVPTKLSPISVLYIDDMGVPTYKQYEEGMSVAEXGXR

SEQ ID NO: 36541 - protein, 35 aa, Artificial Sequence
  Cyclic GFR-binding peptide
  MOD_RES (1)..(2)..(34): Xaa is C or S
XXVPTKLSPISILYIDKGVVTYYKQYEGMAVSEXG

SEQ ID NO: 36542 - protein, 27 aa, Artificial Sequence
  Cyclic GFR-binding peptide
  MOD_RES (26)..(26): Xaa is C or S
SPISILYIVGRKPKVYKQYEMIVRSXK

SEQ ID NO: 36543 - protein, 36 aa, Artificial Sequence
  Cyclic GFR-binding peptide
  MOD_RES (4)..(5): Xaa is C or S
SKAXXVPTKLNAISILYFDKGVVTYLKKYRGMAVSE

SEQ ID NO: 36544 - protein, 34 aa, Artificial Sequence; identical to SEQ ID NO: 7990
  Cyclic GFR-binding peptide
  MOD_RES (31)..(33): Xaa is C or S

SEQ ID NO: 36545 - protein, 29 aa, Artificial Sequence
  Cyclic GFR-binding peptide
PTKLSPISILYIDKGVVTYYKQYEGMAVS

SEQ ID NO: 36546 - protein, 36 aa, Artificial Sequence; identical to SEQ ID NO: 7993
  Cyclic GFR-binding peptide
  MOD_RES (1)..(2)..(34)..(36): Xaa is C or S

SEQ ID NO: 36547 - protein, 35 aa, Artificial Sequence; identical to SEQ ID NO: 7994
  Cyclic GFR-binding peptide
  MOD_RES (5)..(6): Xaa is C or S

SEQ ID NO: 36548 - protein, 27 aa, Artificial Sequence
  Cyclic GFR-binding peptide
QDLSPISILYIVGRTPKVYKQYEMVVK

SEQ ID NO: 36549 - protein, 40 aa, Artificial Sequence
  Cyclic GFR-binding peptide
  MOD_RES (6)..(38)..(40): Xaa is C or S
VTKPTXAPTKLSPISVLYIDDSSNVIYKQYENMVVRSXGX

SEQ ID NO: 36550 - protein, 37 aa, Artificial Sequence
  Cyclic GFR-binding peptide
  MOD_RES (3)..(4)..(35)..(37): Xaa is C or S
SPXXVPQDLEPISILYLVGRTPKVKFKYEMVVKSXKX

SEQ ID NO: 36551 - protein, 33 aa, Artificial Sequence
  Cyclic GFR-binding peptide
  MOD_RES (30)..(32): Xaa is C or S
TKLSPISILYKDKGVVTYLKYHYGMAVSEXGXR

SEQ ID NO: 36552 - protein, 27 aa, Artificial Sequence
  Cyclic GFR-binding peptide
  MOD_RES (27)..(27): Xaa is C or S
NAISILYFDAANNVVLKKYRDMVVEAX

SEQ ID NO: 36553 - protein, 35 aa, Artificial Sequence
  Cyclic GFR-binding peptide
  MOD_RES (1)..(33)..(35): Xaa is C or S
XVPTKLSPISILYIDKGVVTYYKQYEGMAVSEXGX

SEQ ID NO: 36554 - protein, 38 aa, Artificial Sequence; identical to SEQ ID NO: 8002
  Cyclic GFR-binding peptide
  MOD_RES (4)..(5)..(38): Xaa is C or S

SEQ ID NO: 36555 - protein, 27 aa, Artificial Sequence
  Cyclic GFR-binding peptide
  MOD_RES (1)..(1): Xaa is C or S
XVSQDLSPISILYIIGKTPKIYKQYEM

SEQ ID NO: 36556 - protein, 31 aa, Artificial Sequence; identical to SEQ ID NO: 8004
  Cyclic GFR-binding peptide
  MOD_RES (28)..(30): Xaa is C or S

SEQ ID NO: 36557 - protein, 32 aa, Artificial Sequence
  Cyclic GFR-binding peptide
  MOD_RES (5)..(6): Xaa is C or S
VPKAXXAPTKLEPISVLYLDSSNNVIKFKYEN

SEQ ID NO: 36558 - protein, 26 aa, Artificial Sequence
  Cyclic GFR-binding peptide
  MOD_RES (1)..(1): Xaa is C or S
XVPTKLSPISILYKDKGVVTYLKYHY

SEQ ID NO: 36559 - protein, 29 aa, Artificial Sequence
  Cyclic GFR-binding peptide
  MOD_RES (27)..(29): Xaa is C or S
EPISILYLDAANNVVKFKYEDMVVEAXGX

SEQ ID NO: 36560 - protein, 39 aa, Artificial Sequence; identical to SEQ ID NO: 8006
  Cyclic GFR-binding peptide
  MOD_RES (5)..(6)..(37)..(39): Xaa is C or S

SEQ ID NO: 36561 - protein, 32 aa, Artificial Sequence
  Cyclic GFR-binding peptide
  MOD_RES (6)..(7): Xaa is C or S
KASKAXXVPTKLSPISILYIDKGVVTYYKQYE

SEQ ID NO: 36562 - protein, 38 aa, Artificial Sequence
  Cyclic GFR-binding peptide
  MOD_RES (2)..(3)..(35)..(37): Xaa is C or S
SXXVPARLEPISILYLDAANNVVKFKYEDMVVEAXGXR

SEQ ID NO: 36563 - protein, 27 aa, Artificial Sequence
  Cyclic GFR-binding peptide
  MOD_RES (2)..(2): Xaa is C or S
TXAPTKLSPISVLYIDDSSNVIYKQYE

SEQ ID NO: 36564 - protein, 36 aa, Artificial Sequence; identical to SEQ ID NO: 8007
  Cyclic GFR-binding peptide
  MOD_RES (5)..(6): Xaa is C or S

SEQ ID NO: 36565 - protein, 28 aa, Artificial Sequence
  Cyclic GFR-binding peptide
VPQALSPISILYIVGRKPKVYKQYEMIV

SEQ ID NO: 36566 - protein, 30 aa, Artificial Sequence; identical to SEQ ID NO: 8008
  Cyclic GFR-binding peptide
  MOD_RES (29)..(29): Xaa is C or S

SEQ ID NO: 36567 - protein, 29 aa, Artificial Sequence
  Cyclic GFR-binding peptide
  MOD_RES (3)..(4): Xaa is C or S
KAXXAPTKLSPISVLYIDSSNNVIYKQYE

SEQ ID NO: 36568 - protein, 39 aa, Artificial Sequence
  Cyclic GFR-binding peptide
  MOD_RES (4)..(5)..(36)..(38): Xaa is C or S
ASPXXVPQDLSPISILYIVGRTPKVYKQYEMVVKSXKXS

SEQ ID NO: 36569 - protein, 25 aa, Artificial Sequence
  Cyclic GFR-binding peptide
LSPISILYKVGRTPKVLKYHYMVVK

SEQ ID NO: 36570 - protein, 30 aa, Artificial Sequence; identical to SEQ ID NO: 8012
  Cyclic GFR-binding peptide
  MOD_RES (29)..(29): Xaa is C or S

SEQ ID NO: 36571 - protein, 34 aa, Artificial Sequence; identical to SEQ ID NO: 8013
  Cyclic GFR-binding peptide
  MOD_RES (3)..(4): Xaa is C or S

SEQ ID NO: 36572 - protein, 31 aa, Artificial Sequence
  Cyclic GFR-binding peptide
  MOD_RES (29)..(31): Xaa is C or S
QDLEPISILYLVGRTPKVKFKYEMVVKSXKX

SEQ ID NO: 36573 - protein, 31 aa, Artificial Sequence
  Cyclic GFR-binding peptide
  MOD_RES (2)..(3): Xaa is C or S
SXXVPARLSPISILYKDAANNVVLKYHYDMV

SEQ ID NO: 36574 - protein, 32 aa, Artificial Sequence; identical to SEQ ID NO: 8014
  Cyclic GFR-binding peptide
  MOD_RES (6)..(7): Xaa is C or S

SEQ ID NO: 36575 - protein, 35 aa, Artificial Sequence; identical to SEQ ID NO: 8015
  Cyclic GFR-binding peptide
  MOD_RES (5)..(6): Xaa is C or S

SEQ ID NO: 36576 - protein, 34 aa, Artificial Sequence; identical to SEQ ID NO: 8016
  Cyclic GFR-binding peptide
  MOD_RES (4)..(5): Xaa is C or S

SEQ ID NO: 36577 - protein, 42 aa, Artificial Sequence; identical to SEQ ID NO: 8018
  Cyclic GFR-binding peptide
  MOD_RES (6)..(7)..(39)..(41): Xaa is C or S

SEQ ID NO: 36578 - protein, 28 aa, Artificial Sequence
  Cyclic GFR-binding peptide
PQALSPISILYIVGRKPKVYKQYEMIVR

SEQ ID NO: 36579 - protein, 28 aa, Artificial Sequence
  Cyclic GFR-binding peptide
  MOD_RES (1)..(2): Xaa is C or S
XXAPTKLSPISVLYKDDSSNVILKYHYN

SEQ ID NO: 36580 - protein, 29 aa, Artificial Sequence
  Cyclic GFR-binding peptide
  MOD_RES (27)..(29): Xaa is C or S
LNAISILYFIGKTPKILKKYRMIVKSXKX

SEQ ID NO: 36581 - protein, 24 aa, Artificial Sequence
  Cyclic GFR-binding peptide
PTKLSPISVLYIDDMGVPTYKQYE

SEQ ID NO: 36582 - protein, 31 aa, Artificial Sequence
  Cyclic GFR-binding peptide
  MOD_RES (30)..(30): Xaa is C or S
PQALSPISILYIVGRKPKVYKQYEMIVRSXK

SEQ ID NO: 36583 - protein, 39 aa, Artificial Sequence; identical to SEQ ID NO: 8023
  Cyclic GFR-binding peptide
  MOD_RES (3)..(4)..(36)..(38): Xaa is C or S

SEQ ID NO: 36584 - protein, 33 aa, Artificial Sequence; identical to SEQ ID NO: 8024
  Cyclic GFR-binding peptide
  MOD_RES (5)..(6): Xaa is C or S

SEQ ID NO: 36585 - protein, 36 aa, Artificial Sequence
  Cyclic GFR-binding peptide
  MOD_RES (5)..(6): Xaa is C or S
APASXXVPARLNAISILYFDAANNVVLKKYRDMVVE

SEQ ID NO: 36586 - protein, 31 aa, Artificial Sequence
  Cyclic GFR-binding peptide
  MOD_RES (4)..(5): Xaa is C or S
SKAXXVPTKLSPISILYKDKGVVTYLKYHYG

SEQ ID NO: 36587 - protein, 29 aa, Artificial Sequence
  Cyclic GFR-binding peptide
  MOD_RES (2)..(3): Xaa is C or S
PXXVSQDLNAISILYFIGKTPKILKKYRM

SEQ ID NO: 36588 - protein, 35 aa, Artificial Sequence; identical to SEQ ID NO: 8027
  Cyclic GFR-binding peptide
  MOD_RES (1)..(34): Xaa is C or S

SEQ ID NO: 36589 - protein, 35 aa, Artificial Sequence
  Cyclic GFR-binding peptide
  MOD_RES (1)..(2)..(33)..(35): Xaa is C or S
XXVSQDLSPISILYIIGKTPKIYKQYEMIVKSXKX

SEQ ID NO: 36590 - protein, 31 aa, Artificial Sequence; identical to SEQ ID NO: 8031
  Cyclic GFR-binding peptide
  MOD_RES (30)..(30): Xaa is C or S

SEQ ID NO: 36591 - protein, 21 aa, Artificial Sequence
  Cyclic GFR-binding peptide
LSPISILYKDKGVVTYLKYHY

SEQ ID NO: 36592 - protein, 35 aa, Artificial Sequence
  Cyclic GFR-binding peptide
  MOD_RES (7)..(7): Xaa is C or S
HVTKPTXAPTKLEPISVLYLDDSSNVIKFKYENMV

SEQ ID NO: 36593 - protein, 33 aa, Artificial Sequence
  Cyclic GFR-binding peptide
  MOD_RES (2)..(3): Xaa is C or S
PXXAPTQLEPISVLYLDDSSNVIKFKYENMVVR

SEQ ID NO: 36594 - protein, 26 aa, Artificial Sequence
  Cyclic GFR-binding peptide
  MOD_RES (26)..(26): Xaa is C or S
SPISILYIVGRKPKVYKQYEMIVRSX

SEQ ID NO: 36595 - protein, 33 aa, Artificial Sequence; identical to SEQ ID NO: 8033
  Cyclic GFR-binding peptide
  MOD_RES (32)..(32): Xaa is C or S

SEQ ID NO: 36596 - protein, 33 aa, Artificial Sequence; identical to SEQ ID NO: 8034
  Cyclic GFR-binding peptide
  MOD_RES (1)..(33): Xaa is C or S

SEQ ID NO: 36597 - protein, 34 aa, Artificial Sequence; identical to SEQ ID NO: 8035
  Cyclic GFR-binding peptide
  MOD_RES (5)..(6): Xaa is C or S

SEQ ID NO: 36598 - protein, 27 aa, Artificial Sequence
  Cyclic GFR-binding peptide
PQALSPISILYIVGRKPKVYKQYEMIV

SEQ ID NO: 36599 - protein, 31 aa, Artificial Sequence; identical to SEQ ID NO: 8036
  Cyclic GFR-binding peptide
  MOD_RES (30)..(30): Xaa is C or S

SEQ ID NO: 36600 - protein, 37 aa, Artificial Sequence
  Cyclic GFR-binding peptide
  MOD_RES (4)..(5)..(37): Xaa is C or S
PKPXXAPTQLSPISVLYIDDSSNVIYKQYENMVVRAX

SEQ ID NO: 36601 - protein, 33 aa, Artificial Sequence
  Cyclic GFR-binding peptide
  MOD_RES (4)..(5): Xaa is C or S
PASXXVPARLSPISILYKDAANNVVLKYHYDMV

SEQ ID NO: 36602 - protein, 29 aa, Artificial Sequence
  Cyclic GFR-binding peptide
  MOD_RES (28)..(28): Xaa is C or S
LEPISMLYLDEYDKVVKFKYEEMVVEGXG

SEQ ID NO: 36603 - protein, 29 aa, Artificial Sequence
  Cyclic GFR-binding peptide
  MOD_RES (27)..(29): Xaa is C or S
SPISILYIDKGVVTYYKQYEGMAVSEXGX

SEQ ID NO: 36604 - protein, 29 aa, Artificial Sequence
  Cyclic GFR-binding peptide
TQLEPISVLYLDDSSNVIKFKYENMVVRA

SEQ ID NO: 36605 - protein, 32 aa, Artificial Sequence; identical to SEQ ID NO: 8038
  Cyclic GFR-binding peptide
  MOD_RES (5)..(6): Xaa is C or S

SEQ ID NO: 36606 - protein, 35 aa, Artificial Sequence
  Cyclic GFR-binding peptide
  MOD_RES (5)..(6): Xaa is C or S
VGKAXXVPTKLSPISVLYIDDMGVPTYKQYEEGMS

SEQ ID NO: 36607 - protein, 34 aa, Artificial Sequence; identical to SEQ ID NO: 8040
  Cyclic GFR-binding peptide
  MOD_RES (1)..(2)..(34): Xaa is C or S

SEQ ID NO: 36608 - protein, 32 aa, Artificial Sequence
  Cyclic GFR-binding peptide
  MOD_RES (4)..(5): Xaa is C or S
PKAXXVPTELSPISMLYIDEYDKVVYKQYEEM

SEQ ID NO: 36609 - protein, 39 aa, Artificial Sequence; identical to SEQ ID NO: 8041
  Cyclic GFR-binding peptide
  MOD_RES (6)..(7): Xaa is C or S

SEQ ID NO: 36610 - protein, 24 aa, Artificial Sequence
  Cyclic GFR-binding peptide
PQALNAISILYFVGRKPKVLKKYR

SEQ ID NO: 36611 - protein, 38 aa, Artificial Sequence
  Cyclic GFR-binding peptide
  MOD_RES (5)..(6): Xaa is C or S
VGKAXXVPTKLSPISVLYIDDMGVPTYKQYEEGMSVAE

SEQ ID NO: 36612 - protein, 37 aa, Artificial Sequence; identical to SEQ ID NO: 8048
  Cyclic GFR-binding peptide
  MOD_RES (3)..(4)..(35)..(37): Xaa is C or S

SEQ ID NO: 36613 - protein, 31 aa, Artificial Sequence
  Cyclic GFR-binding peptide
  MOD_RES (31)..(31): Xaa is C or S
VPQALSPISILYIVGRKPKVYKQYEMIVRSX

SEQ ID NO: 36614 - protein, 30 aa, Artificial Sequence
  Cyclic GFR-binding peptide
  MOD_RES (3)..(4): Xaa is C or S
APXXVPQALEPISILYLVGRKPKVKFKYEM

SEQ ID NO: 36615 - protein, 32 aa, Artificial Sequence
  Cyclic GFR-binding peptide
  MOD_RES (3)..(4): Xaa is C or S
KAXXAPTKLSPISVLYIDSSNNVIYKQYENMV

SEQ ID NO: 36616 - protein, 24 aa, Artificial Sequence
  Cyclic GFR-binding peptide
EPISILYLIGKTPKIKFKYEMIVK

SEQ ID NO: 36617 - protein, 28 aa, Artificial Sequence
  Cyclic GFR-binding peptide
  MOD_RES (1)..(1): Xaa is C or S
XVSQDLSPISILYKIGKTPKILKYHYMI

SEQ ID NO: 36618 - protein, 31 aa, Artificial Sequence
  Cyclic GFR-binding peptide
  MOD_RES (2)..(3): Xaa is C or S
AXXVPTELSPISMLYIDEYDKVVYKQYEEMV

SEQ ID NO: 36619 - protein, 34 aa, Artificial Sequence; identical to SEQ ID NO: 8051
  Cyclic GFR-binding peptide
  MOD_RES (1)..(2)..(34): Xaa is C or S

SEQ ID NO: 36620 - protein, 33 aa, Artificial Sequence
  Cyclic GFR-binding peptide
  MOD_RES (3)..(4): Xaa is C or S
ASXXVPARLEPISILYLDAANNVVKFKYEDMVV

SEQ ID NO: 36621 - protein, 36 aa, Artificial Sequence; identical to SEQ ID NO: 8053
  Cyclic GFR-binding peptide
  MOD_RES (1)..(2)..(33)..(35): Xaa is C or S

SEQ ID NO: 36622 - protein, 26 aa, Artificial Sequence
  Cyclic GFR-binding peptide
LSPISILYKDAANNVVLKYHYDMVVE

SEQ ID NO: 36623 - protein, 37 aa, Artificial Sequence
  Cyclic GFR-binding peptide
  MOD_RES (1)..(34)..(36): Xaa is C or S
XVPTKLSPISVLYIDDMGVPTYKQYEEGMSVAEXGXR

SEQ ID NO: 36624 - protein, 26 aa, Artificial Sequence
  Cyclic GFR-binding peptide
QLSPISVLYIDDSSNVIYKQYENMVV

SEQ ID NO: 36625 - protein, 30 aa, Artificial Sequence
  Cyclic GFR-binding peptide
  MOD_RES (3)..(4): Xaa is C or S
KAXXVPTELSPISMLYIDENEKVVYKQYED

SEQ ID NO: 36626 - protein, 26 aa, Artificial Sequence
  Cyclic GFR-binding peptide
  MOD_RES (1)..(1): Xaa is C or S
XVPQDLNAISILYFVGRTPKVLKKYR

SEQ ID NO: 36627 - protein, 29 aa, Artificial Sequence
  Cyclic GFR-binding peptide
  MOD_RES (3)..(4): Xaa is C or S
APXXVPQALNAISILYFVGRKPKVLKKYR

SEQ ID NO: 36628 - protein, 38 aa, Artificial Sequence
  Cyclic GFR-binding peptide
  MOD_RES (6)..(7): Xaa is C or S
KIPKAXXVPTELSPISMLYIDENEKVVYKQYEDMVVEG

SEQ ID NO: 36629 - protein, 27 aa, Artificial Sequence
  Cyclic GFR-binding peptide
VPTELSPISMLYKDENEKVVLKYHYDM

SEQ ID NO: 36630 - protein, 26 aa, Artificial Sequence
  Cyclic GFR-binding peptide
TKLNAISILYFDKGVVTYLKKYRGMA

SEQ ID NO: 36631 - protein, 24 aa, Artificial Sequence
  Cyclic GFR-binding peptide
EPISILYLVGRTPKVKFKYEMVVK

SEQ ID NO: 36632 - protein, 32 aa, Artificial Sequence
  Cyclic GFR-binding peptide
  MOD_RES (1)..(2): Xaa is C or S
XXVPTELSPISMLYIDEYDKVVYKQYEEMVVE

SEQ ID NO: 36633 - protein, 29 aa, Artificial Sequence
  Cyclic GFR-binding peptide
  MOD_RES (1)..(2): Xaa is C or S
XXVPQALEPISILYLVGRKPKVKFKYEMI

SEQ ID NO: 36634 - protein, 38 aa, Artificial Sequence; identical to SEQ ID NO: 8060
  Cyclic GFR-binding peptide
  MOD_RES (5)..(6)..(38): Xaa is C or S

SEQ ID NO: 36635 - protein, 28 aa, Artificial Sequence
  Cyclic GFR-binding peptide
QLSPISVLYIDDSSNVIYKQYENMVVRA

SEQ ID NO: 36636 - protein, 27 aa, Artificial Sequence
  Cyclic GFR-binding peptide
  MOD_RES (27)..(27): Xaa is C or S
SPISMLYIDENEKVVYKQYEDMVVEGX

SEQ ID NO: 36637 - protein, 39 aa, Artificial Sequence; identical to SEQ ID NO: 8063
  Cyclic GFR-binding peptide
  MOD_RES (5)..(37)..(39): Xaa is C or S

SEQ ID NO: 36638 - protein, 37 aa, Artificial Sequence
  Cyclic GFR-binding peptide
  MOD_RES (5)..(6)..(37): Xaa is C or S
SASPXXVPQDLSPISILYIVGRTPKVYKQYEMVVKSX

SEQ ID NO: 36639 - protein, 32 aa, Artificial Sequence
  Cyclic GFR-binding peptide
  MOD_RES (32)..(32): Xaa is C or S
VPTELSPISMLYIDEYDKVVYKQYEEMVVEGX

SEQ ID NO: 36640 - protein, 29 aa, Artificial Sequence
  Cyclic GFR-binding peptide
PQDLSPISILYKVGRTPKVLKYHYMVVKS

SEQ ID NO: 36641 - protein, 33 aa, Artificial Sequence
  Cyclic GFR-binding peptide
  MOD_RES (1)..(33): Xaa is C or S
XVPTELEPISMLYLDEYDKVVKFKYEEMVVEGX

SEQ ID NO: 36642 - protein, 31 aa, Artificial Sequence; identical to SEQ ID NO: 8067
  Cyclic GFR-binding peptide
  MOD_RES (1)..(2): Xaa is C or S

SEQ ID NO: 36643 - protein, 33 aa, Artificial Sequence
  Cyclic GFR-binding peptide
  MOD_RES (2)..(3): Xaa is C or S
AXXAPTKLEPISVLYLDSSNNVIKFKYENMVVK

SEQ ID NO: 36644 - protein, 36 aa, Artificial Sequence
  Cyclic GFR-binding peptide
  MOD_RES (6)..(7): Xaa is C or S
KIPKAXXVPTELSPISMLYIDENEKVVYKQYEDMVV

SEQ ID NO: 36645 - protein, 25 aa, Artificial Sequence
  Cyclic GFR-binding peptide
PARLSPISILYKDAANNVVLKYHYD

SEQ ID NO: 36646 - protein, 31 aa, Artificial Sequence
  Cyclic GFR-binding peptide
  MOD_RES (29)..(31): Xaa is C or S
KLSPISILYIDKGVVTYYKQYEGMAVSEXGX

SEQ ID NO: 36647 - protein, 31 aa, Artificial Sequence; identical to SEQ ID NO: 8076
  Cyclic GFR-binding peptide
  MOD_RES (1)..(2): Xaa is C or S

SEQ ID NO: 36648 - protein, 28 aa, Artificial Sequence
  Cyclic GFR-binding peptide
  MOD_RES (1)..(1): Xaa is C or S
XVPQDLSPISILYKVGRTPKVLKYHYMV

SEQ ID NO: 36649 - protein, 32 aa, Artificial Sequence
  Cyclic GFR-binding peptide
  MOD_RES (1)..(32): Xaa is C or S
XVPQALSPISILYIVGRKPKVYKQYEMIVRSX

SEQ ID NO: 36650 - protein, 24 aa, Artificial Sequence
  Cyclic GFR-binding peptide
LSPISVLYIDDSSNVIYKQYENMV

SEQ ID NO: 36651 - protein, 39 aa, Artificial Sequence; identical to SEQ ID NO: 8079
  Cyclic GFR-binding peptide
  MOD_RES (5)..(6)..(37)..(39): Xaa is C or S

SEQ ID NO: 36652 - protein, 28 aa, Artificial Sequence
  Cyclic GFR-binding peptide
  MOD_RES (27)..(27): Xaa is C or S
LSPISILYKVGRTPKVLKYHYMVVKSXK

SEQ ID NO: 36653 - protein, 33 aa, Artificial Sequence
  Cyclic GFR-binding peptide
  MOD_RES (31)..(33): Xaa is C or S
PTELSPISMLYIDEYDKVVYKQYEEMVVEGXGX

SEQ ID NO: 36654 - protein, 30 aa, Artificial Sequence; identical to SEQ ID NO: 8081
  Cyclic GFR-binding peptide
  MOD_RES (2)..(3): Xaa is C or S

SEQ ID NO: 36655 - protein, 32 aa, Artificial Sequence; identical to SEQ ID NO: 8085
  Cyclic GFR-binding peptide
  MOD_RES (4)..(5): Xaa is C or S

SEQ ID NO: 36656 - protein, 30 aa, Artificial Sequence
  Cyclic GFR-binding peptide
  MOD_RES (1)..(2): Xaa is C or S
XXVPQALSPISILYIVGRKPKVYKQYEMIV

SEQ ID NO: 36657 - protein, 24 aa, Artificial Sequence
  Cyclic GFR-binding peptide
LNAISVLYFDDMGVPTLKKYREGM

SEQ ID NO: 36658 - protein, 41 aa, Artificial Sequence
  Cyclic GFR-binding peptide
  MOD_RES (5)..(6)..(38)..(40): Xaa is C or S
IPKAXXVPTELSPISMLYIDENEKVVYKQYEDMVVEGXGXR

SEQ ID NO: 36659 - protein, 28 aa, Artificial Sequence
  Cyclic GFR-binding peptide
  MOD_RES (28)..(28): Xaa is C or S
LSPISVLYKDDSSNVILKYHYNMVVRSX

SEQ ID NO: 36660 - protein, 26 aa, Artificial Sequence
  Cyclic GFR-binding peptide
VPTELNAISMLYFDENEKVVLKKYRD

SEQ ID NO: 36661 - protein, 29 aa, Artificial Sequence
  Cyclic GFR-binding peptide
TQLSPISVLYKDDSSNVILKYHYNMVVRA

SEQ ID NO: 36662 - protein, 25 aa, Artificial Sequence
  Cyclic GFR-binding peptide
LSPISMLYIDENEKVVYKQYEDMVV

SEQ ID NO: 36663 - protein, 31 aa, Artificial Sequence
  Cyclic GFR-binding peptide
  MOD_RES (1)..(1): Xaa is C or S
XVPTELSPISMLYIDENEKVVYKQYEDMVVE

SEQ ID NO: 36664 - protein, 40 aa, Artificial Sequence
  Cyclic GFR-binding peptide
  MOD_RES (6)..(7)..(39): Xaa is C or S
AAPASXXVPARLNAISILYFDAANNVVLKKYRDMVVEAXG

SEQ ID NO: 36665 - protein, 27 aa, Artificial Sequence
  Cyclic GFR-binding peptide
EPISVLYLDDMGVPTKFKYEEGMSVAE

SEQ ID NO: 36666 - protein, 32 aa, Artificial Sequence
  Cyclic GFR-binding peptide
  MOD_RES (1)..(2): Xaa is C or S
XXVPTELSPISMLYIDENEKVVYKQYEDMVVE

SEQ ID NO: 36667 - protein, 28 aa, Artificial Sequence
  Cyclic GFR-binding peptide
  MOD_RES (1)..(1): Xaa is C or S
XAPTKLEPISVLYLDSSNNVIKFKYENM

SEQ ID NO: 36668 - protein, 36 aa, Artificial Sequence; identical to SEQ ID NO: 8093
  Cyclic GFR-binding peptide
  MOD_RES (5)..(5): Xaa is C or S

SEQ ID NO: 36669 - protein, 34 aa, Artificial Sequence
  Cyclic GFR-binding peptide
  MOD_RES (2)..(3): Xaa is C or S
AXXVPTKLSPISILYKDKGVVTYLKYHYGMAVSE

SEQ ID NO: 36670 - protein, 41 aa, Artificial Sequence; identical to SEQ ID NO: 8094
  Cyclic GFR-binding peptide
  MOD_RES (6)..(7)..(39)..(41): Xaa is C or S

SEQ ID NO: 36671 - protein, 31 aa, Artificial Sequence; identical to SEQ ID NO: 8098
  Cyclic GFR-binding peptide
  MOD_RES (4)..(5): Xaa is C or S

SEQ ID NO: 36672 - protein, 34 aa, Artificial Sequence
  Cyclic GFR-binding peptide
  MOD_RES (1)..(2): Xaa is C or S
XXVPTKLSPISVLYIDDMGVPTYKQYEEGMSVAE

SEQ ID NO: 36673 - protein, 35 aa, Artificial Sequence
  Cyclic GFR-binding peptide
  MOD_RES (1)..(2)..(34): Xaa is C or S
XXAPTQLEPISVLYLDDSSNVIKFKYENMVVRAXG

SEQ ID NO: 36674 - protein, 31 aa, Artificial Sequence
  Cyclic GFR-binding peptide
  MOD_RES (2)..(3): Xaa is C or S
PXXVSQDLSPISILYIIGKTPKIYKQYEMIV

SEQ ID NO: 36675 - protein, 24 aa, Artificial Sequence
  Cyclic GFR-binding peptide
NAISVLYFDSSNNVILKKYRNMVV

SEQ ID NO: 36676 - protein, 27 aa, Artificial Sequence
  Cyclic GFR-binding peptide
DLSPISILYKIGKTPKILKYHYMIVKS

SEQ ID NO: 36677 - protein, 33 aa, Artificial Sequence; identical to SEQ ID NO: 8102
  Cyclic GFR-binding peptide
  MOD_RES (4)..(5): Xaa is C or S

SEQ ID NO: 36678 - protein, 29 aa, Artificial Sequence
  Cyclic GFR-binding peptide
  MOD_RES (1)..(2): Xaa is C or S
XXVPTKLSPISVLYIDDMGVPTYKQYEEG

SEQ ID NO: 36679 - protein, 28 aa, Artificial Sequence
  Cyclic GFR-binding peptide
PARLEPISILYLDAANNVVKFKYEDMVV

SEQ ID NO: 36680 - protein, 30 aa, Artificial Sequence
  Cyclic GFR-binding peptide
  MOD_RES (4)..(5): Xaa is C or S
PKAXXVPTELSPISMLYIDENEKVVYKQYE

SEQ ID NO: 36681 - protein, 32 aa, Artificial Sequence
  Cyclic GFR-binding peptide
  MOD_RES (6)..(7): Xaa is C or S
AVPKAXXAPTKLEPISVLYLDSSNNVIKFKYE

SEQ ID NO: 36682 - protein, 33 aa, Artificial Sequence
  Cyclic GFR-binding peptide
  MOD_RES (30)..(32): Xaa is C or S
TQLEPISVLYLDDSSNVIKFKYENMVVRAXGXH

SEQ ID NO: 36683 - protein, 24 aa, Artificial Sequence
  Cyclic GFR-binding peptide
ELNAISMLYFDENEKVVLKKYRDM

SEQ ID NO: 36684 - protein, 34 aa, Artificial Sequence; identical to SEQ ID NO: 8107
  Cyclic GFR-binding peptide
  MOD_RES (2)..(3)..(34): Xaa is C or S

SEQ ID NO: 36685 - protein, 32 aa, Artificial Sequence
  Cyclic GFR-binding peptide
  MOD_RES (4)..(5): Xaa is C or S
PKPXXAPTQLSPISVLYIDDSSNVIYKQYENM

SEQ ID NO: 36686 - protein, 30 aa, Artificial Sequence
  Cyclic GFR-binding peptide
  MOD_RES (2)..(3): Xaa is C or S
SXXVPARLEPISILYLDAANNVVKFKYEDM

SEQ ID NO: 36687 - protein, 38 aa, Artificial Sequence
  Cyclic GFR-binding peptide
  MOD_RES (3)..(4)..(35)..(37): Xaa is C or S
SPXXVSQDLSPISILYIIGKTPKIYKQYEMIVKSXKXS

SEQ ID NO: 36688 - protein, 28 aa, Artificial Sequence
  Cyclic GFR-binding peptide
  MOD_RES (27)..(27): Xaa is C or S
NAISMLYFDEYDKVVLKKYREMVVEGXG

SEQ ID NO: 36689 - protein, 23 aa, Artificial Sequence
  Cyclic GFR-binding peptide
SPISMLYKDENEKVVLKYHYDMV

SEQ ID NO: 36690 - protein, 33 aa, Artificial Sequence
  Cyclic GFR-binding peptide
  MOD_RES (2)..(3): Xaa is C or S
AXXVPTKLSPISILYIDKGVVTYYKQYEGMAVS

SEQ ID NO: 36691 - protein, 26 aa, Artificial Sequence
  Cyclic GFR-binding peptide
QDLNAISILYFVGRTPKVLKKYRMVV

SEQ ID NO: 36692 - protein, 21 aa, Artificial Sequence
  Cyclic GFR-binding peptide
SPISILYKVGRKPKVLKYHYM

SEQ ID NO: 36693 - protein, 28 aa, Artificial Sequence
  Cyclic GFR-binding peptide
  MOD_RES (1)..(2): Xaa is C or S
XXVPARLSPISILYKDAANNVVLKYHYD

SEQ ID NO: 36694 - protein, 30 aa, Artificial Sequence
  Cyclic GFR-binding peptide
  MOD_RES (29)..(29): Xaa is C or S
KLEPISVLYLDSSNNVIKFKYENMVVKAXG

SEQ ID NO: 36695 - protein, 29 aa, Artificial Sequence
  Cyclic GFR-binding peptide
  MOD_RES (1)..(2): Xaa is C or S
XXVPTKLSPISILYKDKGVVTYLKYHYGM

SEQ ID NO: 36696 - protein, 31 aa, Artificial Sequence; identical to SEQ ID NO: 8119
  Cyclic GFR-binding peptide
  MOD_RES (28)..(30): Xaa is C or S

SEQ ID NO: 36697 - protein, 25 aa, Artificial Sequence
  Cyclic GFR-binding peptide
LNAISILYFVGRKPKVLKKYRMIVR

SEQ ID NO: 36698 - protein, 30 aa, Artificial Sequence; identical to SEQ ID NO: 8122
  Cyclic GFR-binding peptide
  MOD_RES (28)..(30): Xaa is C or S

SEQ ID NO: 36699 - protein, 28 aa, Artificial Sequence
  Cyclic GFR-binding peptide
  MOD_RES (28)..(28): Xaa is C or S
LSPISMLYKDEYDKVVLKYHYEMVVEGX

SEQ ID NO: 36700 - protein, 34 aa, Artificial Sequence; identical to SEQ ID NO: 8125
  Cyclic GFR-binding peptide
  MOD_RES (1)..(33): Xaa is C or S

SEQ ID NO: 36701 - protein, 30 aa, Artificial Sequence; identical to SEQ ID NO: 8126
  Cyclic GFR-binding peptide
  MOD_RES (1)..(1): Xaa is C or S

SEQ ID NO: 36702 - protein, 33 aa, Artificial Sequence
  Cyclic GFR-binding peptide
  MOD_RES (5)..(6): Xaa is C or S
APASXXVPARLEPISILYLDAANNVVKFKYEDM

SEQ ID NO: 36703 - protein, 27 aa, Artificial Sequence
  Cyclic GFR-binding peptide
DLSPISILYKVGRTPKVLKYHYMVVKS

SEQ ID NO: 36704 - protein, 27 aa, Artificial Sequence
  Cyclic GFR-binding peptide
LSPISVLYIDSSNNVIYKQYENMVVKA

SEQ ID NO: 36705 - protein, 31 aa, Artificial Sequence
  Cyclic GFR-binding peptide
PTKLEPISVLYLDDMGVPTKFKYEEGMSVAE

SEQ ID NO: 36706 - protein, 37 aa, Artificial Sequence; identical to SEQ ID NO: 8130
  Cyclic GFR-binding peptide
  MOD_RES (6)..(7): Xaa is C or S

SEQ ID NO: 36707 - protein, 29 aa, Artificial Sequence
  Cyclic GFR-binding peptide
  MOD_RES (1)..(2): Xaa is C or S
XXVPQDLSPISILYKVGRTPKVLKYHYMV

SEQ ID NO: 36708 - protein, 30 aa, Artificial Sequence
  Cyclic GFR-binding peptide
  MOD_RES (28)..(30): Xaa is C or S
LEPISVLYLDDSSNVIKFKYENMVVRSXGX

SEQ ID NO: 36709 - protein, 41 aa, Artificial Sequence; identical to SEQ ID NO: 8132
  Cyclic GFR-binding peptide
  MOD_RES (4)..(5)..(38)..(40): Xaa is C or S

SEQ ID NO: 36710 - protein, 29 aa, Artificial Sequence
  Cyclic GFR-binding peptide
VPTELNAISMLYFDENEKVVLKKYRDMVV

SEQ ID NO: 36711 - protein, 31 aa, Artificial Sequence; identical to SEQ ID NO: 8136
  Cyclic GFR-binding peptide

SEQ ID NO: 36712 - protein, 34 aa, Artificial Sequence
  Cyclic GFR-binding peptide
  MOD_RES (1)..(32)..(34): Xaa is C or S
XVPQALEPISILYLVGRKPKVKFKYEMIVRSXKX

SEQ ID NO: 36713 - protein, 22 aa, Artificial Sequence
  Cyclic GFR-binding peptide
SPISMLYKDEYDKVVLKYHYEM

SEQ ID NO: 36714 - protein, 33 aa, Artificial Sequence
  Cyclic GFR-binding peptide
  MOD_RES (3)..(4): Xaa is C or S
KAXXVPTKLSPISILYKDKGVVTYLKYHYGMAV

SEQ ID NO: 36715 - protein, 36 aa, Artificial Sequence
  Cyclic GFR-binding peptide
  MOD_RES (5)..(5): Xaa is C or S
TKPTXAPTKLEPISVLYLDDSSNVIKFKYENMVVRS

SEQ ID NO: 36716 - protein, 34 aa, Artificial Sequence
  Cyclic GFR-binding peptide
  MOD_RES (2)..(3): Xaa is C or S
PXXAPTQLEPISVLYLDDSSNVIKFKYENMVVRA

SEQ ID NO: 36717 - protein, 23 aa, Artificial Sequence
  Cyclic GFR-binding peptide
LEPISILYLDAANNVVKFKYEDM

SEQ ID NO: 36718 - protein, 33 aa, Artificial Sequence; identical to SEQ ID NO: 8138
  Cyclic GFR-binding peptide
  MOD_RES (6)..(7): Xaa is C or S

SEQ ID NO: 36719 - protein, 33 aa, Artificial Sequence; identical to SEQ ID NO: 8140
  Cyclic GFR-binding peptide
  MOD_RES (1)..(2): Xaa is C or S

SEQ ID NO: 36720 - protein, 29 aa, Artificial Sequence
  Cyclic GFR-binding peptide
  MOD_RES (3)..(3): Xaa is C or S
PTXAPTKLSPISVLYKDDSSNVILKYHYN

SEQ ID NO: 36721 - protein, 32 aa, Artificial Sequence; identical to SEQ ID NO: 8143
  Cyclic GFR-binding peptide
  MOD_RES (2)..(3): Xaa is C or S

SEQ ID NO: 36722 - protein, 33 aa, Artificial Sequence
  Cyclic GFR-binding peptide
  MOD_RES (32)..(32): Xaa is C or S
APTKLSPISVLYIDSSNNVIYKQYENMVVKAXG

SEQ ID NO: 36723 - protein, 23 aa, Artificial Sequence
  Cyclic GFR-binding peptide
ELSPISMLYKDENEKVVLKYHYD

SEQ ID NO: 36724 - protein, 32 aa, Artificial Sequence; identical to SEQ ID NO: 8145
  Cyclic GFR-binding peptide
  MOD_RES (4)..(4): Xaa is C or S

SEQ ID NO: 36725 - protein, 32 aa, Artificial Sequence
  Cyclic GFR-binding peptide
  MOD_RES (7)..(7): Xaa is C or S
HVTKPTXAPTKLSPISVLYIDDSSNVIYKQYE

SEQ ID NO: 36726 - protein, 28 aa, Artificial Sequence
  Cyclic GFR-binding peptide
  MOD_RES (1)..(1): Xaa is C or S
XVPQALEPISILYLVGRKPKVKFKYEMI

SEQ ID NO: 36727 - protein, 30 aa, Artificial Sequence
  Cyclic GFR-binding peptide
  MOD_RES (3)..(3): Xaa is C or S
PTXAPTKLSPISVLYIDDSSNVIYKQYENM

SEQ ID NO: 36728 - protein, 26 aa, Artificial Sequence
  Cyclic GFR-binding peptide
LNAISVLYFDSSNNVILKKYRNMVVK

SEQ ID NO: 36729 - protein, 34 aa, Artificial Sequence
  Cyclic GFR-binding peptide
  MOD_RES (5)..(5): Xaa is C or S
TKPTXAPTKLEPISVLYLDDSSNVIKFKYENMVV

SEQ ID NO: 36730 - protein, 37 aa, Artificial Sequence; identical to SEQ ID NO: 8149
  Cyclic GFR-binding peptide
  MOD_RES (1)..(2)..(34)..(36): Xaa is C or S

SEQ ID NO: 36731 - protein, 31 aa, Artificial Sequence; identical to SEQ ID NO: 8150
  Cyclic GFR-binding peptide

SEQ ID NO: 36732 - protein, 35 aa, Artificial Sequence
  Cyclic GFR-binding peptide
  MOD_RES (3)..(4)..(35): Xaa is C or S
APXXVPQALEPISILYLVGRKPKVKFKYEMIVRSX

SEQ ID NO: 36733 - protein, 34 aa, Artificial Sequence
  Cyclic GFR-binding peptide
  MOD_RES (2)..(3): Xaa is C or S
SXXVPARLSPISILYKDAANNVVLKYHYDMVVEA

SEQ ID NO: 36734 - protein, 32 aa, Artificial Sequence
  Cyclic GFR-binding peptide
  MOD_RES (3)..(4): Xaa is C or S
KPXXAPTKLSPISVLYIDDSSNVIYKQYENMV

SEQ ID NO: 36735 - protein, 36 aa, Artificial Sequence; identical to SEQ ID NO: 8157
  Cyclic GFR-binding peptide
  MOD_RES (5)..(6): Xaa is C or S

SEQ ID NO: 36736 - protein, 30 aa, Artificial Sequence; identical to SEQ ID NO: 8158
  Cyclic GFR-binding peptide
  MOD_RES (4)..(5): Xaa is C or S

SEQ ID NO: 36737 - protein, 24 aa, Artificial Sequence
  Cyclic GFR-binding peptide
SQDLSPISILYIIGKTPKIYKQYE

SEQ ID NO: 36738 - protein, 32 aa, Artificial Sequence; identical to SEQ ID NO: 8159
  Cyclic GFR-binding peptide
  MOD_RES (3)..(4): Xaa is C or S

SEQ ID NO: 36739 - protein, 31 aa, Artificial Sequence; identical to SEQ ID NO: 8160
  Cyclic GFR-binding peptide
  MOD_RES (4)..(4): Xaa is C or S

SEQ ID NO: 36740 - protein, 32 aa, Artificial Sequence
  Cyclic GFR-binding peptide
  MOD_RES (31)..(31): Xaa is C or S
VSQDLSPISILYIIGKTPKIYKQYEMIVKSXK

SEQ ID NO: 36741 - protein, 36 aa, Artificial Sequence
  Cyclic GFR-binding peptide
  MOD_RES (2)..(3)..(34)..(36): Xaa is C or S
PXXVSQDLSPISILYIIGKTPKIYKQYEMIVKSXKX

SEQ ID NO: 36742 - protein, 30 aa, Artificial Sequence
  Cyclic GFR-binding peptide
  MOD_RES (1)..(1): Xaa is C or S
XVPTKLEPISVLYLDDMGVPTKFKYEEGMS

SEQ ID NO: 36743 - protein, 20 aa, Artificial Sequence
  Cyclic GFR-binding peptide
SPISILYKIGKTPKILKYHY

SEQ ID NO: 36744 - protein, 26 aa, Artificial Sequence
  Cyclic GFR-binding peptide
KLNAISVLYFDSSNNVILKKYRNMVV

SEQ ID NO: 36745 - protein, 35 aa, Artificial Sequence; identical to SEQ ID NO: 8167
  Cyclic GFR-binding peptide
  MOD_RES (1)..(32)..(34): Xaa is C or S

SEQ ID NO: 36746 - protein, 27 aa, Artificial Sequence
  Cyclic GFR-binding peptide
KLSPISVLYKDDSSNVILKYHYNMVVR

SEQ ID NO: 36747 - protein, 38 aa, Artificial Sequence
  Cyclic GFR-binding peptide
  MOD_RES (2)..(3)..(35)..(37): Xaa is C or S
PXXAPTKLSPISVLYIDDSSNVIYKQYENMVVRSXGXH

SEQ ID NO: 36748 - protein, 33 aa, Artificial Sequence
  Cyclic GFR-binding peptide
  MOD_RES (30)..(32): Xaa is C or S
PQALSPISILYIVGRKPKVYKQYEMIVRSXKXS

SEQ ID NO: 36749 - protein, 26 aa, Artificial Sequence
  Cyclic GFR-binding peptide
DLNAISILYFVGRTPKVLKKYRMVVK

SEQ ID NO: 36750 - protein, 39 aa, Artificial Sequence; identical to SEQ ID NO: 8170
  Cyclic GFR-binding peptide
  MOD_RES (5)..(6)..(37)..(39): Xaa is C or S

SEQ ID NO: 36751 - protein, 30 aa, Artificial Sequence
  Cyclic GFR-binding peptide
  MOD_RES (4)..(5): Xaa is C or S
PKAXXVPTELSPISMLYIDEYDKVVYKQYE

SEQ ID NO: 36752 - protein, 39 aa, Artificial Sequence; identical to SEQ ID NO: 8171
  Cyclic GFR-binding peptide
  MOD_RES (5)..(6)..(38): Xaa is C or S

SEQ ID NO: 36753 - protein, 38 aa, Artificial Sequence
  Cyclic GFR-binding peptide
  MOD_RES (6)..(7)..(38): Xaa is C or S
ASAAPXXVPQALSPISILYIVGRKPKVYKQYEMIVRSX

SEQ ID NO: 36754 - protein, 39 aa, Artificial Sequence; identical to SEQ ID NO: 8173
  Cyclic GFR-binding peptide
  MOD_RES (6)..(7)..(38): Xaa is C or S

SEQ ID NO: 36755 - protein, 30 aa, Artificial Sequence
  Cyclic GFR-binding peptide
  MOD_RES (27)..(29): Xaa is C or S
EPISMLYLDENEKVVKFKYEDMVVEGXGXR

SEQ ID NO: 36756 - protein, 26 aa, Artificial Sequence
  Cyclic GFR-binding peptide
  MOD_RES (1)..(1): Xaa is C or S
XAPTQLSPISVLYIDDSSNVIYKQYE

SEQ ID NO: 36757 - protein, 22 aa, Artificial Sequence
  Cyclic GFR-binding peptide
LNAISVLYFDSSNNVILKKYRN

SEQ ID NO: 36758 - protein, 28 aa, Artificial Sequence
  Cyclic GFR-binding peptide
QLSPISVLYKDDSSNVILKYHYNMVVRA

SEQ ID NO: 36759 - protein, 34 aa, Artificial Sequence
  Cyclic GFR-binding peptide
  MOD_RES (6)..(7): Xaa is C or S
KVGKAXXVPTKLSPISVLYIDDMGVPTYKQYEEG

SEQ ID NO: 36760 - protein, 36 aa, Artificial Sequence
  Cyclic GFR-binding peptide
  MOD_RES (5)..(6): Xaa is C or S
VPKPXXAPTKLSPISVLYIDDSSNVIYKQYENMVVR

SEQ ID NO: 36761 - protein, 22 aa, Artificial Sequence
  Cyclic GFR-binding peptide
NAISVLYFDSSNNVILKKYRNM

SEQ ID NO: 36762 - protein, 29 aa, Artificial Sequence
  Cyclic GFR-binding peptide
TKLNAISVLYFDSSNNVILKKYRNMVVKA

SEQ ID NO: 36763 - protein, 28 aa, Artificial Sequence
  Cyclic GFR-binding peptide
  MOD_RES (1)..(2): Xaa is C or S
XXAPTKLSPISVLYKDSSNNVILKYHYN

SEQ ID NO: 36764 - protein, 32 aa, Artificial Sequence
  Cyclic GFR-binding peptide
  MOD_RES (30)..(32): Xaa is C or S
TKLSPISILYIDKGVVTYYKQYEGMAVSEXGX

SEQ ID NO: 36765 - protein, 40 aa, Artificial Sequence; identical to SEQ ID NO: 8181
  Cyclic GFR-binding peptide
  MOD_RES (6)..(38)..(40): Xaa is C or S

SEQ ID NO: 36766 - protein, 38 aa, Artificial Sequence
  Cyclic GFR-binding peptide
  MOD_RES (6)..(7): Xaa is C or S
YVPKPXXAPTKLEPISVLYLDDSSNVIKFKYENMVVRS

SEQ ID NO: 36767 - protein, 30 aa, Artificial Sequence
  Cyclic GFR-binding peptide
  MOD_RES (29)..(29): Xaa is C or S
LEPISVLYLDDMGVPTKFKYEEGMSVAEXG

SEQ ID NO: 36768 - protein, 34 aa, Artificial Sequence
  Cyclic GFR-binding peptide
  MOD_RES (1)..(2)..(34): Xaa is C or S
XXVPTELEPISMLYLDEYDKVVKFKYEEMVVEGX

SEQ ID NO: 36769 - protein, 33 aa, Artificial Sequence
  Cyclic GFR-binding peptide
  MOD_RES (30)..(32): Xaa is C or S
TQLSPISVLYIDDSSNVIYKQYENMVVRAXGXH

SEQ ID NO: 36770 - protein, 37 aa, Artificial Sequence
  Cyclic GFR-binding peptide
  MOD_RES (5)..(6)..(37): Xaa is C or S
SASPXXVSQDLSPISILYIIGKTPKIYKQYEMIVKSX

SEQ ID NO: 36771 - protein, 24 aa, Artificial Sequence
  Cyclic GFR-binding peptide
LNAISVLYFDSSNNVILKKYRNMV

SEQ ID NO: 36772 - protein, 29 aa, Artificial Sequence
  Cyclic GFR-binding peptide
ARLNAISILYFDAANNVVLKKYRDMVVEA

SEQ ID NO: 36773 - protein, 27 aa, Artificial Sequence
  Cyclic GFR-binding peptide
ARLSPISILYKDAANNVVLKYHYDMVV

SEQ ID NO: 36774 - protein, 23 aa, Artificial Sequence
  Cyclic GFR-binding peptide
DLEPISILYLIGKTPKIKFKYEM

SEQ ID NO: 36775 - protein, 39 aa, Artificial Sequence
  Cyclic GFR-binding peptide
  MOD_RES (4)..(5)..(37)..(39): Xaa is C or S
PKAXXAPTKLEPISVLYLDSSNNVIKFKYENMVVKAXGX

SEQ ID NO: 36776 - protein, 34 aa, Artificial Sequence; identical to SEQ ID NO: 8190
  Cyclic GFR-binding peptide
  MOD_RES (6)..(7): Xaa is C or S

SEQ ID NO: 36777 - protein, 37 aa, Artificial Sequence; identical to SEQ ID NO: 8192
  Cyclic GFR-binding peptide
  MOD_RES (7)..(7): Xaa is C or S

SEQ ID NO: 36778 - protein, 33 aa, Artificial Sequence; identical to SEQ ID NO: 8193
  Cyclic GFR-binding peptide
  MOD_RES (33)..(33): Xaa is C or S

SEQ ID NO: 36779 - protein, 31 aa, Artificial Sequence; identical to SEQ ID NO: 8194
  Cyclic GFR-binding peptide
  MOD_RES (3)..(4): Xaa is C or S

SEQ ID NO: 36780 - protein, 31 aa, Artificial Sequence
  Cyclic GFR-binding peptide
  MOD_RES (30)..(30): Xaa is C or S
TELSPISMLYIDEYDKVVYKQYEEMVVEGXG

SEQ ID NO: 36781 - protein, 24 aa, Artificial Sequence
  Cyclic GFR-binding peptide
EPISMLYLDEYDKVVKFKYEEMVV

SEQ ID NO: 36782 - protein, 37 aa, Artificial Sequence
  Cyclic GFR-binding peptide
  MOD_RES (2)..(3)..(35)..(37): Xaa is C or S
SXXVPARLEPISILYLDAANNVVKFKYEDMVVEAXGX

SEQ ID NO: 36783 - protein, 34 aa, Artificial Sequence; identical to SEQ ID NO: 8198
  Cyclic GFR-binding peptide
  MOD_RES (4)..(5): Xaa is C or S

SEQ ID NO: 36784 - protein, 32 aa, Artificial Sequence
  Cyclic GFR-binding peptide
  MOD_RES (1)..(2): Xaa is C or S
XXVSQDLEPISILYLIGKTPKIKFKYEMIVKS

SEQ ID NO: 36785 - protein, 37 aa, Artificial Sequence; identical to SEQ ID NO: 8200
  Cyclic GFR-binding peptide
  MOD_RES (6)..(7): Xaa is C or S

SEQ ID NO: 36786 - protein, 28 aa, Artificial Sequence
  Cyclic GFR-binding peptide
  MOD_RES (1)..(2): Xaa is C or S
XXVPTELEPISMLYLDENEKVVKFKYED

SEQ ID NO: 36787 - protein, 37 aa, Artificial Sequence
  Cyclic GFR-binding peptide
  MOD_RES (6)..(7): Xaa is C or S
KASKAXXVPTKLNAISILYFDKGVVTYLKKYRGMAVS

SEQ ID NO: 36788 - protein, 36 aa, Artificial Sequence; identical to SEQ ID NO: 8205
  Cyclic GFR-binding peptide
  MOD_RES (5)..(6): Xaa is C or S

SEQ ID NO: 36789 - protein, 38 aa, Artificial Sequence; identical to SEQ ID NO: 8206
  Cyclic GFR-binding peptide
  MOD_RES (6)..(7): Xaa is C or S

SEQ ID NO: 36790 - protein, 38 aa, Artificial Sequence; identical to SEQ ID NO: 8207
  Cyclic GFR-binding peptide
  MOD_RES (6)..(7): Xaa is C or S

SEQ ID NO: 36791 - protein, 29 aa, Artificial Sequence
  Cyclic GFR-binding peptide
  MOD_RES (28)..(28): Xaa is C or S
ALSPISILYIVGRKPKVYKQYEMIVRSXK

SEQ ID NO: 36792 - protein, 37 aa, Artificial Sequence
  Cyclic GFR-binding peptide
  MOD_RES (2)..(3)..(35)..(37): Xaa is C or S
PXXAPTKLSPISVLYIDDSSNVIYKQYENMVVRSXGX

SEQ ID NO: 36793 - protein, 24 aa, Artificial Sequence
  Cyclic GFR-binding peptide
LSPISILYIDKGVVTYYKQYEGMA

SEQ ID NO: 36794 - protein, 23 aa, Artificial Sequence
  Cyclic GFR-binding peptide
LEPISILYLIGKTPKIKFKYEMI

SEQ ID NO: 36795 - protein, 31 aa, Artificial Sequence
  Cyclic GFR-binding peptide
VPARLNAISILYFDAANNVVLKKYRDMVVEA

SEQ ID NO: 36796 - protein, 25 aa, Artificial Sequence
  Cyclic GFR-binding peptide
KLNAISILYFDKGVVTYLKKYRGMA

SEQ ID NO: 36797 - protein, 27 aa, Artificial Sequence
  Cyclic GFR-binding peptide
  MOD_RES (1)..(2): Xaa is C or S
XXVPTELSPISMLYKDEYDKVVLKYHY

SEQ ID NO: 36798 - protein, 30 aa, Artificial Sequence; identical to SEQ ID NO: 8213
  Cyclic GFR-binding peptide
  MOD_RES (4)..(5): Xaa is C or S

SEQ ID NO: 36799 - protein, 38 aa, Artificial Sequence
  Cyclic GFR-binding peptide
  MOD_RES (2)..(3)..(35)..(37): Xaa is C or S
PXXAPTKLEPISVLYLDDSSNVIKFKYENMVVRSXGXH

SEQ ID NO: 36800 - protein, 24 aa, Artificial Sequence
  Cyclic GFR-binding peptide
SPISVLYIDDSSNVIYKQYENMVV

SEQ ID NO: 36801 - protein, 33 aa, Artificial Sequence
  Cyclic GFR-binding peptide
  MOD_RES (33)..(33): Xaa is C or S
VPTKLEPISVLYLDDMGVPTKFKYEEGMSVAEX

SEQ ID NO: 36802 - protein, 30 aa, Artificial Sequence; identical to SEQ ID NO: 8214
  Cyclic GFR-binding peptide
  MOD_RES (1)..(1): Xaa is C or S

SEQ ID NO: 36803 - protein, 22 aa, Artificial Sequence
  Cyclic GFR-binding peptide
SPISVLYIDSSNNVIYKQYENM

SEQ ID NO: 36804 - protein, 25 aa, Artificial Sequence
  Cyclic GFR-binding peptide
LSPISVLYIDDMGVPTYKQYEEGMS

SEQ ID NO: 36805 - protein, 25 aa, Artificial Sequence
  Cyclic GFR-binding peptide
APTQLSPISVLYIDDSSNVIYKQYE

SEQ ID NO: 36806 - protein, 39 aa, Artificial Sequence; identical to SEQ ID NO: 8216
  Cyclic GFR-binding peptide
  MOD_RES (5)..(6)..(37)..(39): Xaa is C or S

SEQ ID NO: 36807 - protein, 30 aa, Artificial Sequence
  Cyclic GFR-binding peptide
  MOD_RES (28)..(30): Xaa is C or S
SPISVLYIDDMGVPTYKQYEEGMSVAEXGX

SEQ ID NO: 36808 - protein, 36 aa, Artificial Sequence
  Cyclic GFR-binding peptide
  MOD_RES (6)..(7): Xaa is C or S
YVPKPXXAPTKLEPISVLYLDDSSNVIKFKYENMVV

SEQ ID NO: 36809 - protein, 34 aa, Artificial Sequence; identical to SEQ ID NO: 8220
  Cyclic GFR-binding peptide
  MOD_RES (32)..(34): Xaa is C or S

SEQ ID NO: 36810 - protein, 22 aa, Artificial Sequence
  Cyclic GFR-binding peptide
ALNAISILYFVGRKPKVLKKYR

SEQ ID NO: 36811 - protein, 25 aa, Artificial Sequence
  Cyclic GFR-binding peptide
PTQLSPISVLYKDDSSNVILKYHYN

SEQ ID NO: 36812 - protein, 28 aa, Artificial Sequence
  Cyclic GFR-binding peptide
  MOD_RES (1)..(1): Xaa is C or S
XVPTELEPISMLYLDENEKVVKFKYEDM

SEQ ID NO: 36813 - protein, 35 aa, Artificial Sequence
  Cyclic GFR-binding peptide
  MOD_RES (2)..(3)..(35): Xaa is C or S
SXXVPARLEPISILYLDAANNVVKFKYEDMVVEAX

SEQ ID NO: 36814 - protein, 32 aa, Artificial Sequence; identical to SEQ ID NO: 8223
  Cyclic GFR-binding peptide
  MOD_RES (5)..(5): Xaa is C or S

SEQ ID NO: 36815 - protein, 37 aa, Artificial Sequence
  Cyclic GFR-binding peptide
  MOD_RES (5)..(6): Xaa is C or S
APASXXVPARLNAISILYFDAANNVVLKKYRDMVVEA

SEQ ID NO: 36816 - protein, 28 aa, Artificial Sequence
  Cyclic GFR-binding peptide
  MOD_RES (1)..(1): Xaa is C or S
XVSQDLEPISILYLIGKTPKIKFKYEMI

SEQ ID NO: 36817 - protein, 30 aa, Artificial Sequence
  Cyclic GFR-binding peptide
  MOD_RES (29)..(29): Xaa is C or S
RLNAISILYFDAANNVVLKKYRDMVVEAXG

SEQ ID NO: 36818 - protein, 37 aa, Artificial Sequence; identical to SEQ ID NO: 8225
  Cyclic GFR-binding peptide
  MOD_RES (6)..(7): Xaa is C or S

SEQ ID NO: 36819 - protein, 23 aa, Artificial Sequence
  Cyclic GFR-binding peptide
KLEPISVLYLDSSNNVIKFKYEN

SEQ ID NO: 36820 - protein, 35 aa, Artificial Sequence; identical to SEQ ID NO: 8226
  Cyclic GFR-binding peptide
  MOD_RES (32)..(34): Xaa is C or S

SEQ ID NO: 36821 - protein, 30 aa, Artificial Sequence
  Cyclic GFR-binding peptide
  MOD_RES (3)..(4): Xaa is C or S
ASXXVPARLNAISILYFDAANNVVLKKYRD

SEQ ID NO: 36822 - protein, 33 aa, Artificial Sequence
  Cyclic GFR-binding peptide
  MOD_RES (3)..(4): Xaa is C or S
KAXXAPTKLSPISVLYIDSSNNVIYKQYENMVV

SEQ ID NO: 36823 - protein, 26 aa, Artificial Sequence
  Cyclic GFR-binding peptide
PQDLEPISILYLVGRTPKVKFKYEMV

SEQ ID NO: 36824 - protein, 25 aa, Artificial Sequence
  Cyclic GFR-binding peptide
SPISILYKVGRTPKVLKYHYMVVKS

SEQ ID NO: 36825 - protein, 23 aa, Artificial Sequence
  Cyclic GFR-binding peptide
KLSPISILYKDKGVVTYLKYHYG

SEQ ID NO: 36826 - protein, 30 aa, Artificial Sequence
  Cyclic GFR-binding peptide
  MOD_RES (30)..(30): Xaa is C or S
TKLSPISVLYIDSSNNVIYKQYENMVVKAX

SEQ ID NO: 36827 - protein, 33 aa, Artificial Sequence
  Cyclic GFR-binding peptide
  MOD_RES (1)..(2)..(33): Xaa is C or S
XXVPQALSPISILYIVGRKPKVYKQYEMIVRSX

SEQ ID NO: 36828 - protein, 33 aa, Artificial Sequence
  Cyclic GFR-binding peptide
  MOD_RES (30)..(32): Xaa is C or S
TELEPISMLYLDEYDKVVKFKYEEMVVEGXGXR

SEQ ID NO: 36829 - protein, 33 aa, Artificial Sequence; identical to SEQ ID NO: 8238
  Cyclic GFR-binding peptide
  MOD_RES (2)..(3): Xaa is C or S

SEQ ID NO: 36830 - protein, 33 aa, Artificial Sequence; identical to SEQ ID NO: 8240
  Cyclic GFR-binding peptide
  MOD_RES (6)..(7): Xaa is C or S

SEQ ID NO: 36831 - protein, 37 aa, Artificial Sequence
  Cyclic GFR-binding peptide
  MOD_RES (2)..(3)..(35)..(37): Xaa is C or S
PXXAPTQLSPISVLYIDDSSNVIYKQYENMVVRAXGX

SEQ ID NO: 36832 - protein, 38 aa, Artificial Sequence; identical to SEQ ID NO: 8243
  Cyclic GFR-binding peptide
  MOD_RES (4)..(5)..(37): Xaa is C or S

SEQ ID NO: 36833 - protein, 23 aa, Artificial Sequence
  Cyclic GFR-binding peptide
LNAISVLYFDDMGVPTLKKYREG

SEQ ID NO: 36834 - protein, 31 aa, Artificial Sequence
  Cyclic GFR-binding peptide
  MOD_RES (3)..(4): Xaa is C or S
KAXXVPTELEPISMLYLDENEKVVKFKYEDM

SEQ ID NO: 36835 - protein, 31 aa, Artificial Sequence
  Cyclic GFR-binding peptide
  MOD_RES (4)..(4): Xaa is C or S
KPTXAPTKLSPISVLYIDDSSNVIYKQYENM

SEQ ID NO: 36836 - protein, 36 aa, Artificial Sequence
  Cyclic GFR-binding peptide
  MOD_RES (6)..(7): Xaa is C or S
ASAAPXXVPQALEPISILYLVGRKPKVKFKYEMIVR

SEQ ID NO: 36837 - protein, 33 aa, Artificial Sequence
  Cyclic GFR-binding peptide
  MOD_RES (2)..(3): Xaa is C or S
PXXVPQALEPISILYLVGRKPKVKFKYEMIVRS

SEQ ID NO: 36838 - protein, 36 aa, Artificial Sequence
  Cyclic GFR-binding peptide
  MOD_RES (1)..(2)..(33)..(35): Xaa is C or S
XXVPQDLEPISILYLVGRTPKVKFKYEMVVKSXKXS

SEQ ID NO: 36839 - protein, 35 aa, Artificial Sequence
  Cyclic GFR-binding peptide
  MOD_RES (3)..(4): Xaa is C or S
KAXXVPTKLSPISVLYIDDMGVPTYKQYEEGMSVA

SEQ ID NO: 36840 - protein, 31 aa, Artificial Sequence; identical to SEQ ID NO: 8249
  Cyclic GFR-binding peptide
  MOD_RES (3)..(4): Xaa is C or S

SEQ ID NO: 36841 - protein, 34 aa, Artificial Sequence
  Cyclic GFR-binding peptide
  MOD_RES (5)..(6): Xaa is C or S
APASXXVPARLEPISILYLDAANNVVKFKYEDMV

SEQ ID NO: 36842 - protein, 33 aa, Artificial Sequence
  Cyclic GFR-binding peptide
  MOD_RES (6)..(7): Xaa is C or S
SIPKAXXVPTELEPISMLYLDEYDKVVKFKYEE

SEQ ID NO: 36843 - protein, 30 aa, Artificial Sequence; identical to SEQ ID NO: 8252
  Cyclic GFR-binding peptide
  MOD_RES (3)..(4): Xaa is C or S

SEQ ID NO: 36844 - protein, 34 aa, Artificial Sequence; identical to SEQ ID NO: 8253
  Cyclic GFR-binding peptide
  MOD_RES (1)..(34): Xaa is C or S

SEQ ID NO: 36845 - protein, 26 aa, Artificial Sequence
  Cyclic GFR-binding peptide
PTKLNAISVLYFDSSNNVILKKYRNM

SEQ ID NO: 36846 - protein, 41 aa, Artificial Sequence; identical to SEQ ID NO: 8256
  Cyclic GFR-binding peptide
  MOD_RES (5)..(6)..(38)..(40): Xaa is C or S

SEQ ID NO: 36847 - protein, 32 aa, Artificial Sequence; identical to SEQ ID NO: 8257
  Cyclic GFR-binding peptide
  MOD_RES (5)..(6): Xaa is C or S

SEQ ID NO: 36848 - protein, 33 aa, Artificial Sequence; identical to SEQ ID NO: 8259
  Cyclic GFR-binding peptide
  MOD_RES (3)..(4): Xaa is C or S

SEQ ID NO: 36849 - protein, 30 aa, Artificial Sequence
  Cyclic GFR-binding peptide
  MOD_RES (5)..(5): Xaa is C or S
TKPTXAPTKLSPISVLYIDDSSNVIYKQYE

SEQ ID NO: 36850 - protein, 29 aa, Artificial Sequence
  Cyclic GFR-binding peptide
  MOD_RES (1)..(2): Xaa is C or S
XXVPTELSPISMLYIDEYDKVVYKQYEEM

SEQ ID NO: 36851 - protein, 35 aa, Artificial Sequence
  Cyclic GFR-binding peptide
  MOD_RES (1)..(32)..(34): Xaa is C or S
XVPQALEPISILYLVGRKPKVKFKYEMIVRSXKXS

SEQ ID NO: 36852 - protein, 24 aa, Artificial Sequence
  Cyclic GFR-binding peptide
LEPISILYLIGKTPKIKFKYEMIV

SEQ ID NO: 36853 - protein, 31 aa, Artificial Sequence
  Cyclic GFR-binding peptide
APTKLSPISVLYIDSSNNVIYKQYENMVVKA

SEQ ID NO: 36854 - protein, 35 aa, Artificial Sequence; identical to SEQ ID NO: 8263
  Cyclic GFR-binding peptide
  MOD_RES (6)..(7): Xaa is C or S

SEQ ID NO: 36855 - protein, 29 aa, Artificial Sequence
  Cyclic GFR-binding peptide
PQDLEPISILYLVGRTPKVKFKYEMVVKS

SEQ ID NO: 36856 - protein, 23 aa, Artificial Sequence
  Cyclic GFR-binding peptide
EPISILYLDAANNVVKFKYEDMV

SEQ ID NO: 36857 - protein, 27 aa, Artificial Sequence
  Cyclic GFR-binding peptide
VPQDLEPISILYLVGRTPKVKFKYEMV

SEQ ID NO: 36858 - protein, 34 aa, Artificial Sequence; identical to SEQ ID NO: 8264
  Cyclic GFR-binding peptide
  MOD_RES (6)..(7): Xaa is C or S

SEQ ID NO: 36859 - protein, 21 aa, Artificial Sequence
  Cyclic GFR-binding peptide
NAISILYFDKGVVTYLKKYRG

SEQ ID NO: 36860 - protein, 37 aa, Artificial Sequence; identical to SEQ ID NO: 8265
  Cyclic GFR-binding peptide
  MOD_RES (2)..(3)..(35)..(37): Xaa is C or S

SEQ ID NO: 36861 - protein, 30 aa, Artificial Sequence; identical to SEQ ID NO: 8266
  Cyclic GFR-binding peptide
  MOD_RES (3)..(4): Xaa is C or S

SEQ ID NO: 36862 - protein, 37 aa, Artificial Sequence
  Cyclic GFR-binding peptide
  MOD_RES (2)..(3)..(35)..(37): Xaa is C or S
AXXAPTKLEPISVLYLDSSNNVIKFKYENMVVKAXGX

SEQ ID NO: 36863 - protein, 41 aa, Artificial Sequence
  Cyclic GFR-binding peptide
  MOD_RES (6)..(7)..(38)..(40): Xaa is C or S
ASAAPXXVPQALEPISILYLVGRKPKVKFKYEMIVRSXKXS

SEQ ID NO: 36864 - protein, 40 aa, Artificial Sequence; identical to SEQ ID NO: 8271
  Cyclic GFR-binding peptide
  MOD_RES (5)..(6)..(37)..(39): Xaa is C or S

SEQ ID NO: 36865 - protein, 31 aa, Artificial Sequence
  Cyclic GFR-binding peptide
  MOD_RES (1)..(2): Xaa is C or S
XXAPTKLEPISVLYLDSSNNVIKFKYENMVV

SEQ ID NO: 36866 - protein, 26 aa, Artificial Sequence
  Cyclic GFR-binding peptide
  MOD_RES (1)..(1): Xaa is C or S
XVPTELEPISMLYLDEYDKVVKFKYE

SEQ ID NO: 36867 - protein, 25 aa, Artificial Sequence
  Cyclic GFR-binding peptide
SQDLNAISILYFIGKTPKILKKYRM

SEQ ID NO: 36868 - protein, 38 aa, Artificial Sequence
  Cyclic GFR-binding peptide
  MOD_RES (4)..(5)..(37): Xaa is C or S
PASXXVPARLSPISILYKDAANNVVLKYHYDMVVEAXG

SEQ ID NO: 36869 - protein, 30 aa, Artificial Sequence
  Cyclic GFR-binding peptide
  MOD_RES (4)..(5): Xaa is C or S
PASXXVPARLNAISILYFDAANNVVLKKYR

SEQ ID NO: 36870 - protein, 36 aa, Artificial Sequence; identical to SEQ ID NO: 8281
  Cyclic GFR-binding peptide
  MOD_RES (2)..(3)..(34)..(36): Xaa is C or S

SEQ ID NO: 36871 - protein, 39 aa, Artificial Sequence
  Cyclic GFR-binding peptide
  MOD_RES (3)..(4)..(36)..(38): Xaa is C or S
KPXXAPTKLEPISVLYLDDSSNVIKFKYENMVVRSXGXH

SEQ ID NO: 36872 - protein, 30 aa, Artificial Sequence
  Cyclic GFR-binding peptide
  MOD_RES (27)..(29): Xaa is C or S
LSPISILYIIGKTPKIYKQYEMIVKSXKXS

SEQ ID NO: 36873 - protein, 23 aa, Artificial Sequence
  Cyclic GFR-binding peptide
TKLNAISILYFDKGVVTYLKKYR

SEQ ID NO: 36874 - protein, 32 aa, Artificial Sequence
  Cyclic GFR-binding peptide
  MOD_RES (31)..(31): Xaa is C or S
PARLNAISILYFDAANNVVLKKYRDMVVEAXG

SEQ ID NO: 36875 - protein, 30 aa, Artificial Sequence; identical to SEQ ID NO: 8286
  Cyclic GFR-binding peptide
  MOD_RES (2)..(3): Xaa is C or S

SEQ ID NO: 36876 - protein, 36 aa, Artificial Sequence
  Cyclic GFR-binding peptide
  MOD_RES (4)..(5)..(36): Xaa is C or S
ASPXXVSQDLEPISILYLIGKTPKIKFKYEMIVKSX

SEQ ID NO: 36877 - protein, 40 aa, Artificial Sequence; identical to SEQ ID NO: 8289
  Cyclic GFR-binding peptide
  MOD_RES (5)..(6)..(38)..(40): Xaa is C or S

SEQ ID NO: 36878 - protein, 23 aa, Artificial Sequence
  Cyclic GFR-binding peptide
ELEPISMLYLDENEKVVKFKYED

SEQ ID NO: 36879 - protein, 31 aa, Artificial Sequence; identical to SEQ ID NO: 8290
  Cyclic GFR-binding peptide
  MOD_RES (5)..(6): Xaa is C or S

SEQ ID NO: 36880 - protein, 24 aa, Artificial Sequence
  Cyclic GFR-binding peptide
QDLNAISILYFVGRTPKVLKKYRM

SEQ ID NO: 36881 - protein, 33 aa, Artificial Sequence; identical to SEQ ID NO: 8294
  Cyclic GFR-binding peptide
  MOD_RES (6)..(7): Xaa is C or S

SEQ ID NO: 36882 - protein, 24 aa, Artificial Sequence
  Cyclic GFR-binding peptide
KLNAISILYFDKGVVTYLKKYRGM

SEQ ID NO: 36883 - protein, 29 aa, Artificial Sequence
  Cyclic GFR-binding peptide
  MOD_RES (2)..(3): Xaa is C or S
AXXVPTELNAISMLYFDENEKVVLKKYRD

SEQ ID NO: 36884 - protein, 30 aa, Artificial Sequence; identical to SEQ ID NO: 8296
  Cyclic GFR-binding peptide
  MOD_RES (28)..(30): Xaa is C or S

SEQ ID NO: 36885 - protein, 41 aa, Artificial Sequence
  Cyclic GFR-binding peptide
  MOD_RES (6)..(7)..(39)..(41): Xaa is C or S
AVPKAXXAPTKLEPISVLYLDSSNNVIKFKYENMVVKAXGX

SEQ ID NO: 36886 - protein, 37 aa, Artificial Sequence
  Cyclic GFR-binding peptide
  MOD_RES (6)..(7): Xaa is C or S
SIPKAXXVPTELEPISMLYLDEYDKVVKFKYEEMVVE

SEQ ID NO: 36887 - protein, 29 aa, Artificial Sequence
  Cyclic GFR-binding peptide
  MOD_RES (3)..(4): Xaa is C or S
SPXXVPQDLEPISILYLVGRTPKVKFKYE

SEQ ID NO: 36888 - protein, 40 aa, Artificial Sequence
  Cyclic GFR-binding peptide
  MOD_RES (5)..(6)..(38)..(40): Xaa is C or S
APASXXVPARLEPISILYLDAANNVVKFKYEDMVVEAXGX

SEQ ID NO: 36889 - protein, 29 aa, Artificial Sequence
  Cyclic GFR-binding peptide
  MOD_RES (1)..(1): Xaa is C or S
XVPTELSPISMLYKDEYDKVVLKYHYEMV

SEQ ID NO: 36890 - protein, 27 aa, Artificial Sequence
  Cyclic GFR-binding peptide
  MOD_RES (1)..(1): Xaa is C or S
XAPTKLSPISVLYIDSSNNVIYKQYEN

SEQ ID NO: 36891 - protein, 39 aa, Artificial Sequence
  Cyclic GFR-binding peptide
  MOD_RES (5)..(6)..(38): Xaa is C or S
VPKPXXAPTKLEPISVLYLDDSSNVIKFKYENMVVRSXG

SEQ ID NO: 36892 - protein, 40 aa, Artificial Sequence
  Cyclic GFR-binding peptide
  MOD_RES (4)..(5)..(37)..(39): Xaa is C or S
PKPXXAPTQLSPISVLYIDDSSNVIYKQYENMVVRAXGXH

SEQ ID NO: 36893 - protein, 35 aa, Artificial Sequence; identical to SEQ ID NO: 8300
  Cyclic GFR-binding peptide
  MOD_RES (2)..(3)..(34): Xaa is C or S

SEQ ID NO: 36894 - protein, 35 aa, Artificial Sequence
  Cyclic GFR-binding peptide
  MOD_RES (1)..(2)..(34): Xaa is C or S
XXVPARLSPISILYKDAANNVVLKYHYDMVVEAXG

SEQ ID NO: 36895 - protein, 20 aa, Artificial Sequence
  Cyclic GFR-binding peptide
SPISMLYIDENEKVVYKQYE

SEQ ID NO: 36896 - protein, 31 aa, Artificial Sequence; identical to SEQ ID NO: 8301
  Cyclic GFR-binding peptide

SEQ ID NO: 36897 - protein, 38 aa, Artificial Sequence; identical to SEQ ID NO: 8302
  Cyclic GFR-binding peptide
  MOD_RES (6)..(7)..(38): Xaa is C or S

SEQ ID NO: 36898 - protein, 28 aa, Artificial Sequence
  Cyclic GFR-binding peptide
TKLSPISVLYIDSSNNVIYKQYENMVVK

SEQ ID NO: 36899 - protein, 34 aa, Artificial Sequence; identical to SEQ ID NO: 8303
  Cyclic GFR-binding peptide
  MOD_RES (32)..(34): Xaa is C or S

SEQ ID NO: 36900 - protein, 35 aa, Artificial Sequence; identical to SEQ ID NO: 8304
  Cyclic GFR-binding peptide
  MOD_RES (4)..(5): Xaa is C or S

SEQ ID NO: 36901 - protein, 35 aa, Artificial Sequence; identical to SEQ ID NO: 8305
  Cyclic GFR-binding peptide
  MOD_RES (2)..(3)..(34): Xaa is C or S

SEQ ID NO: 36902 - protein, 24 aa, Artificial Sequence
  Cyclic GFR-binding peptide
LSPISILYKVGRTPKVLKYHYMVV

SEQ ID NO: 36903 - protein, 35 aa, Artificial Sequence
  Cyclic GFR-binding peptide
  MOD_RES (4)..(5): Xaa is C or S
PASXXVPARLSPISILYKDAANNVVLKYHYDMVVE

SEQ ID NO: 36904 - protein, 37 aa, Artificial Sequence
  Cyclic GFR-binding peptide
  MOD_RES (5)..(37): Xaa is C or S
TKPTXAPTKLEPISVLYLDDSSNVIKFKYENMVVRSX

SEQ ID NO: 36905 - protein, 38 aa, Artificial Sequence
  Cyclic GFR-binding peptide
  MOD_RES (3)..(4)..(36)..(38): Xaa is C or S
KAXXVPTKLSPISILYIDKGVVTYYKQYEGMAVSEXGX

SEQ ID NO: 36906 - protein, 37 aa, Artificial Sequence
  Cyclic GFR-binding peptide
  MOD_RES (2)..(3)..(35)..(37): Xaa is C or S
AXXVPTKLSPISILYKDKGVVTYLKYHYGMAVSEXGX

SEQ ID NO: 36907 - protein, 30 aa, Artificial Sequence; identical to SEQ ID NO: 8309
  Cyclic GFR-binding peptide
  MOD_RES (28)..(30): Xaa is C or S

SEQ ID NO: 36908 - protein, 35 aa, Artificial Sequence
  Cyclic GFR-binding peptide
  MOD_RES (5)..(5): Xaa is C or S
TKPTXAPTKLSPISVLYIDDSSNVIYKQYENMVVR

SEQ ID NO: 36909 - protein, 31 aa, Artificial Sequence
  Cyclic GFR-binding peptide
  MOD_RES (2)..(2): Xaa is C or S
TXAPTKLEPISVLYLDDSSNVIKFKYENMVV

SEQ ID NO: 36910 - protein, 33 aa, Artificial Sequence
  Cyclic GFR-binding peptide
  MOD_RES (2)..(3): Xaa is C or S
AXXVPTKLEPISVLYLDDMGVPTKFKYEEGMSV

SEQ ID NO: 36911 - protein, 23 aa, Artificial Sequence
  Cyclic GFR-binding peptide
SPISILYIDKGVVTYYKQYEGMA

SEQ ID NO: 36912 - protein, 33 aa, Artificial Sequence
  Cyclic GFR-binding peptide
  MOD_RES (6)..(7): Xaa is C or S
YVPKPXXAPTKLEPISVLYLDDSSNVIKFKYEN

SEQ ID NO: 36913 - protein, 32 aa, Artificial Sequence
  Cyclic GFR-binding peptide
  MOD_RES (1)..(1): Xaa is C or S
XVPTKLEPISVLYLDDMGVPTKFKYEEGMSVA

SEQ ID NO: 36914 - protein, 27 aa, Artificial Sequence
  Cyclic GFR-binding peptide
QALNAISILYFVGRKPKVLKKYRMIVR

SEQ ID NO: 36915 - protein, 31 aa, Artificial Sequence; identical to SEQ ID NO: 8314
  Cyclic GFR-binding peptide
  MOD_RES (4)..(5): Xaa is C or S

SEQ ID NO: 36916 - protein, 28 aa, Artificial Sequence
  Cyclic GFR-binding peptide
PTKLNAISVLYFDSSNNVILKKYRNMVV

SEQ ID NO: 36917 - protein, 32 aa, Artificial Sequence; identical to SEQ ID NO: 8316
  Cyclic GFR-binding peptide
  MOD_RES (32)..(32): Xaa is C or S

SEQ ID NO: 36918 - protein, 30 aa, Artificial Sequence
  Cyclic GFR-binding peptide
  MOD_RES (27)..(29): Xaa is C or S
SPISILYIDKGVVTYYKQYEGMAVSEXGXR

SEQ ID NO: 36919 - protein, 35 aa, Artificial Sequence; identical to SEQ ID NO: 8319
  Cyclic GFR-binding peptide
  MOD_RES (1)..(2)..(34): Xaa is C or S

SEQ ID NO: 36920 - protein, 31 aa, Artificial Sequence; identical to SEQ ID NO: 8322
  Cyclic GFR-binding peptide
  MOD_RES (3)..(4): Xaa is C or S

SEQ ID NO: 36921 - protein, 31 aa, Artificial Sequence
  Cyclic GFR-binding peptide
  MOD_RES (2)..(3): Xaa is C or S
PXXVSQDLEPISILYLIGKTPKIKFKYEMIV

SEQ ID NO: 36922 - protein, 35 aa, Artificial Sequence; identical to SEQ ID NO: 8323
  Cyclic GFR-binding peptide
  MOD_RES (5)..(6): Xaa is C or S

SEQ ID NO: 36923 - protein, 40 aa, Artificial Sequence
  Cyclic GFR-binding peptide
  MOD_RES (5)..(6)..(38)..(40): Xaa is C or S
VPKAXXAPTKLEPISVLYLDSSNNVIKFKYENMVVKAXGX

SEQ ID NO: 36924 - protein, 36 aa, Artificial Sequence
  Cyclic GFR-binding peptide
  MOD_RES (5)..(6): Xaa is C or S
SASPXXVSQDLSPISILYIIGKTPKIYKQYEMIVKS

SEQ ID NO: 36925 - protein, 29 aa, Artificial Sequence
  Cyclic GFR-binding peptide
VPQALSPISILYIVGRKPKVYKQYEMIVR

SEQ ID NO: 36926 - protein, 35 aa, Artificial Sequence; identical to SEQ ID NO: 8325
  Cyclic GFR-binding peptide
  MOD_RES (3)..(4): Xaa is C or S

SEQ ID NO: 36927 - protein, 25 aa, Artificial Sequence
  Cyclic GFR-binding peptide
PQDLNAISILYFVGRTPKVLKKYRM

SEQ ID NO: 36928 - protein, 26 aa, Artificial Sequence
  Cyclic GFR-binding peptide
SPISILYKDKGVVTYLKYHYGMAVSE

SEQ ID NO: 36929 - protein, 29 aa, Artificial Sequence
  Cyclic GFR-binding peptide
PTKLSPISVLYKDDSSNVILKYHYNMVVR

SEQ ID NO: 36930 - protein, 29 aa, Artificial Sequence
  Cyclic GFR-binding peptide
  MOD_RES (29)..(29): Xaa is C or S
QDLNAISILYFIGKTPKILKKYRMIVKSX

SEQ ID NO: 36931 - protein, 35 aa, Artificial Sequence
  Cyclic GFR-binding peptide
  MOD_RES (6)..(7): Xaa is C or S
YVPKPXXAPTKLEPISVLYLDDSSNVIKFKYENMV

SEQ ID NO: 36932 - protein, 34 aa, Artificial Sequence
  Cyclic GFR-binding peptide
  MOD_RES (4)..(5): Xaa is C or S
PASXXVPARLSPISILYKDAANNVVLKYHYDMVV

SEQ ID NO: 36933 - protein, 34 aa, Artificial Sequence; identical to SEQ ID NO: 8330
  Cyclic GFR-binding peptide
  MOD_RES (31)..(33): Xaa is C or S

SEQ ID NO: 36934 - protein, 31 aa, Artificial Sequence; identical to SEQ ID NO: 8331
  Cyclic GFR-binding peptide
  MOD_RES (28)..(30): Xaa is C or S

SEQ ID NO: 36935 - protein, 32 aa, Artificial Sequence
  Cyclic GFR-binding peptide
  MOD_RES (29)..(31): Xaa is C or S
RLEPISILYLDAANNVVKFKYEDMVVEAXGXR

SEQ ID NO: 36936 - protein, 26 aa, Artificial Sequence
  Cyclic GFR-binding peptide
VPTELSPISMLYKDENEKVVLKYHYD

SEQ ID NO: 36937 - protein, 31 aa, Artificial Sequence
  Cyclic GFR-binding peptide
  MOD_RES (3)..(4): Xaa is C or S
KPXXAPTQLEPISVLYLDDSSNVIKFKYENM

SEQ ID NO: 36938 - protein, 42 aa, Artificial Sequence
  Cyclic GFR-binding peptide
  MOD_RES (6)..(7)..(39)..(41): Xaa is C or S
KASKAXXVPTKLSPISILYKDKGVVTYLKYHYGMAVSEXGXR

SEQ ID NO: 36939 - protein, 41 aa, Artificial Sequence
  Cyclic GFR-binding peptide
  MOD_RES (6)..(7)..(40): Xaa is C or S
KVGKAXXVPTKLSPISVLYIDDMGVPTYKQYEEGMSVAEXG

SEQ ID NO: 36940 - protein, 38 aa, Artificial Sequence; identical to SEQ ID NO: 8333
  Cyclic GFR-binding peptide
  MOD_RES (5)..(6)..(38): Xaa is C or S

SEQ ID NO: 36941 - protein, 32 aa, Artificial Sequence
  Cyclic GFR-binding peptide
  MOD_RES (32)..(32): Xaa is C or S
VPARLSPISILYKDAANNVVLKYHYDMVVEAX

SEQ ID NO: 36942 - protein, 30 aa, Artificial Sequence
  Cyclic GFR-binding peptide
  MOD_RES (3)..(4): Xaa is C or S
KPXXAPTQLSPISVLYIDDSSNVIYKQYEN

SEQ ID NO: 36943 - protein, 31 aa, Artificial Sequence
  Cyclic GFR-binding peptide
  MOD_RES (31)..(31): Xaa is C or S
PTELSPISMLYIDENEKVVYKQYEDMVVEGX

SEQ ID NO: 36944 - protein, 28 aa, Artificial Sequence
  Cyclic GFR-binding peptide
  MOD_RES (28)..(28): Xaa is C or S
SPISVLYIDDMGVPTYKQYEEGMSVAEX

SEQ ID NO: 36945 - protein, 30 aa, Artificial Sequence
  Cyclic GFR-binding peptide
  MOD_RES (3)..(4): Xaa is C or S
SPXXVPQDLSPISILYIVGRTPKVYKQYEM

SEQ ID NO: 36946 - protein, 29 aa, Artificial Sequence
  Cyclic GFR-binding peptide
  MOD_RES (1)..(1): Xaa is C or S
XVPQALEPISILYLVGRKPKVKFKYEMIV

SEQ ID NO: 36947 - protein, 32 aa, Artificial Sequence; identical to SEQ ID NO: 8338
  Cyclic GFR-binding peptide
  MOD_RES (29)..(31): Xaa is C or S

SEQ ID NO: 36948 - protein, 29 aa, Artificial Sequence
  Cyclic GFR-binding peptide
  MOD_RES (26)..(28): Xaa is C or S
SPISILYIIGKTPKIYKQYEMIVKSXKXS

SEQ ID NO: 36949 - protein, 25 aa, Artificial Sequence
  Cyclic GFR-binding peptide
SPISVLYIDDMGVPTYKQYEEGMSV

SEQ ID NO: 36950 - protein, 39 aa, Artificial Sequence
  Cyclic GFR-binding peptide
  MOD_RES (6)..(7)..(38): Xaa is C or S
ASASPXXVPQDLSPISILYIVGRTPKVYKQYEMVVKSXK

SEQ ID NO: 36951 - protein, 25 aa, Artificial Sequence
  Cyclic GFR-binding peptide
LEPISMLYLDENEKVVKFKYEDMVV

SEQ ID NO: 36952 - protein, 29 aa, Artificial Sequence
  Cyclic GFR-binding peptide
  MOD_RES (1)..(1): Xaa is C or S
XVSQDLSPISILYKIGKTPKILKYHYMIV

SEQ ID NO: 36953 - protein, 27 aa, Artificial Sequence
  Cyclic GFR-binding peptide
  MOD_RES (1)..(1): Xaa is C or S
XVPARLNAISILYFDAANNVVLKKYRD

SEQ ID NO: 36954 - protein, 35 aa, Artificial Sequence
  Cyclic GFR-binding peptide
  MOD_RES (6)..(7): Xaa is C or S
KVGKAXXVPTKLEPISVLYLDDMGVPTKFKYEEGM

SEQ ID NO: 36955 - protein, 28 aa, Artificial Sequence
  Cyclic GFR-binding peptide
  MOD_RES (1)..(1): Xaa is C or S
XAPTQLSPISVLYKDDSSNVILKYHYNM

SEQ ID NO: 36956 - protein, 35 aa, Artificial Sequence; identical to SEQ ID NO: 8345
  Cyclic GFR-binding peptide
  MOD_RES (3)..(35): Xaa is C or S

SEQ ID NO: 36957 - protein, 39 aa, Artificial Sequence
  Cyclic GFR-binding peptide
  MOD_RES (6)..(7)..(38): Xaa is C or S
ASASPXXVPQDLEPISILYLVGRTPKVKFKYEMVVKSXK

SEQ ID NO: 36958 - protein, 40 aa, Artificial Sequence
  Cyclic GFR-binding peptide
  MOD_RES (6)..(7)..(39): Xaa is C or S
KIPKAXXVPTELSPISMLYIDENEKVVYKQYEDMVVEGXG

SEQ ID NO: 36959 - protein, 32 aa, Artificial Sequence
  Cyclic GFR-binding peptide
  MOD_RES (5)..(6): Xaa is C or S
SASPXXVPQDLEPISILYLVGRTPKVKFKYEM

SEQ ID NO: 36960 - protein, 38 aa, Artificial Sequence
  Cyclic GFR-binding peptide
  MOD_RES (6)..(7)..(38): Xaa is C or S
ASASPXXVPQDLSPISILYIVGRTPKVYKQYEMVVKSX

SEQ ID NO: 36961 - protein, 34 aa, Artificial Sequence; identical to SEQ ID NO: 8348
  Cyclic GFR-binding peptide
  MOD_RES (1)..(2)..(33): Xaa is C or S

SEQ ID NO: 36962 - protein, 34 aa, Artificial Sequence
  Cyclic GFR-binding peptide
  MOD_RES (3)..(4): Xaa is C or S
KAXXVPTKLSPISILYKDKGVVTYLKYHYGMAVS

SEQ ID NO: 36963 - protein, 40 aa, Artificial Sequence
  Cyclic GFR-binding peptide
  MOD_RES (5)..(37)..(39): Xaa is C or S
TKPTXAPTKLSPISVLYIDDSSNVIYKQYENMVVRSXGXH

SEQ ID NO: 36964 - protein, 27 aa, Artificial Sequence
  Cyclic GFR-binding peptide
PTQLSPISVLYKDDSSNVILKYHYNMV

SEQ ID NO: 36965 - protein, 33 aa, Artificial Sequence
  Cyclic GFR-binding peptide
  MOD_RES (31)..(33): Xaa is C or S
PTELSPISMLYIDENEKVVYKQYEDMVVEGXGX

SEQ ID NO: 36966 - protein, 31 aa, Artificial Sequence
  Cyclic GFR-binding peptide
  MOD_RES (28)..(30): Xaa is C or S
LSPISILYKDAANNVVLKYHYDMVVEAXGXR

SEQ ID NO: 36967 - protein, 26 aa, Artificial Sequence
  Cyclic GFR-binding peptide
LSPISILYIVGRKPKVYKQYEMIVRS

SEQ ID NO: 36968 - protein, 22 aa, Artificial Sequence
  Cyclic GFR-binding peptide
EPISVLYLDDMGVPTKFKYEEG

SEQ ID NO: 36969 - protein, 31 aa, Artificial Sequence
  Cyclic GFR-binding peptide
VPTKLSPISILYKDKGVVTYLKYHYGMAVSE

SEQ ID NO: 36970 - protein, 34 aa, Artificial Sequence
  Cyclic GFR-binding peptide
  MOD_RES (31)..(33): Xaa is C or S
VPQALSPISILYIVGRKPKVYKQYEMIVRSXKXS

SEQ ID NO: 36971 - protein, 34 aa, Artificial Sequence; identical to SEQ ID NO: 8353
  Cyclic GFR-binding peptide
  MOD_RES (5)..(6): Xaa is C or S

SEQ ID NO: 36972 - protein, 33 aa, Artificial Sequence
  Cyclic GFR-binding peptide
  MOD_RES (6)..(7): Xaa is C or S
KASKAXXVPTKLSPISILYKDKGVVTYLKYHYG

SEQ ID NO: 36973 - protein, 26 aa, Artificial Sequence
  Cyclic GFR-binding peptide
RLEPISILYLDAANNVVKFKYEDMVV

SEQ ID NO: 36974 - protein, 33 aa, Artificial Sequence; identical to SEQ ID NO: 8355
  Cyclic GFR-binding peptide
  MOD_RES (30)..(32): Xaa is C or S

SEQ ID NO: 36975 - protein, 38 aa, Artificial Sequence
  Cyclic GFR-binding peptide
  MOD_RES (4)..(5)..(37): Xaa is C or S
PKPXXAPTQLSPISVLYIDDSSNVIYKQYENMVVRAXG

SEQ ID NO: 36976 - protein, 29 aa, Artificial Sequence
  Cyclic GFR-binding peptide
  MOD_RES (2)..(3): Xaa is C or S
PXXVSQDLSPISILYIIGKTPKIYKQYEM

SEQ ID NO: 36977 - protein, 36 aa, Artificial Sequence
  Cyclic GFR-binding peptide
  MOD_RES (1)..(2)..(34)..(36): Xaa is C or S
XXVPARLSPISILYKDAANNVVLKYHYDMVVEAXGX

SEQ ID NO: 36978 - protein, 29 aa, Artificial Sequence
  Cyclic GFR-binding peptide
  MOD_RES (3)..(4): Xaa is C or S
SPXXVSQDLSPISILYKIGKTPKILKYHY

SEQ ID NO: 36979 - protein, 31 aa, Artificial Sequence
  Cyclic GFR-binding peptide
  MOD_RES (29)..(31): Xaa is C or S
ELEPISMLYLDENEKVVKFKYEDMVVEGXGX

SEQ ID NO: 36980 - protein, 27 aa, Artificial Sequence
  Cyclic GFR-binding peptide
ARLNAISILYFDAANNVVLKKYRDMVV

SEQ ID NO: 36981 - protein, 38 aa, Artificial Sequence
  Cyclic GFR-binding peptide
  MOD_RES (2)..(3)..(35)..(37): Xaa is C or S
SXXVPARLSPISILYKDAANNVVLKYHYDMVVEAXGXR

SEQ ID NO: 36982 - protein, 32 aa, Artificial Sequence
  Cyclic GFR-binding peptide
  MOD_RES (3)..(4): Xaa is C or S
SPXXVPQDLEPISILYLVGRTPKVKFKYEMVV

SEQ ID NO: 36983 - protein, 33 aa, Artificial Sequence
  Cyclic GFR-binding peptide
  MOD_RES (5)..(6): Xaa is C or S
SASPXXVPQDLEPISILYLVGRTPKVKFKYEMV

SEQ ID NO: 36984 - protein, 36 aa, Artificial Sequence; identical to SEQ ID NO: 8366
  Cyclic GFR-binding peptide
  MOD_RES (2)..(3)..(34)..(36): Xaa is C or S

SEQ ID NO: 36985 - protein, 33 aa, Artificial Sequence
  Cyclic GFR-binding peptide
  MOD_RES (30)..(32): Xaa is C or S
TKLEPISVLYLDDSSNVIKFKYENMVVRSXGXH

SEQ ID NO: 36986 - protein, 22 aa, Artificial Sequence
  Cyclic GFR-binding peptide
KLNAISILYFDKGVVTYLKKYR

SEQ ID NO: 36987 - protein, 26 aa, Artificial Sequence
  Cyclic GFR-binding peptide
QALSPISILYIVGRKPKVYKQYEMIV

SEQ ID NO: 36988 - protein, 31 aa, Artificial Sequence
  Cyclic GFR-binding peptide
  MOD_RES (31)..(31): Xaa is C or S
VPQDLEPISILYLVGRTPKVKFKYEMVVKSX

SEQ ID NO: 36989 - protein, 27 aa, Artificial Sequence
  Cyclic GFR-binding peptide
  MOD_RES (27)..(27): Xaa is C or S
LEPISILYLVGRTPKVKFKYEMVVKSX

SEQ ID NO: 36990 - protein, 32 aa, Artificial Sequence
  Cyclic GFR-binding peptide
  MOD_RES (3)..(4): Xaa is C or S
APXXVPQALSPISILYIVGRKPKVYKQYEMIV

SEQ ID NO: 36991 - protein, 32 aa, Artificial Sequence
  Cyclic GFR-binding peptide
  MOD_RES (4)..(5): Xaa is C or S
AAPXXVPQALEPISILYLVGRKPKVKFKYEMI

SEQ ID NO: 36992 - protein, 34 aa, Artificial Sequence
  Cyclic GFR-binding peptide
  MOD_RES (33)..(33): Xaa is C or S
VPTKLSPISVLYIDDMGVPTYKQYEEGMSVAEXG

SEQ ID NO: 36993 - protein, 37 aa, Artificial Sequence; identical to SEQ ID NO: 8368
  Cyclic GFR-binding peptide
  MOD_RES (3)..(4)..(36): Xaa is C or S

SEQ ID NO: 36994 - protein, 33 aa, Artificial Sequence
  Cyclic GFR-binding peptide
  MOD_RES (3)..(4): Xaa is C or S
SPXXVPQDLEPISILYLVGRTPKVKFKYEMVVK

SEQ ID NO: 36995 - protein, 35 aa, Artificial Sequence
  Cyclic GFR-binding peptide
  MOD_RES (1)..(2)..(34): Xaa is C or S
XXVPTELSPISMLYIDEYDKVVYKQYEEMVVEGXG

SEQ ID NO: 36996 - protein, 35 aa, Artificial Sequence; identical to SEQ ID NO: 8370
  Cyclic GFR-binding peptide
  MOD_RES (5)..(6): Xaa is C or S

SEQ ID NO: 36997 - protein, 30 aa, Artificial Sequence; identical to SEQ ID NO: 8372
  Cyclic GFR-binding peptide
  MOD_RES (28)..(30): Xaa is C or S

SEQ ID NO: 36998 - protein, 28 aa, Artificial Sequence
  Cyclic GFR-binding peptide
  MOD_RES (2)..(3): Xaa is C or S
AXXVPTKLSPISVLYIDDMGVPTYKQYE

SEQ ID NO: 36999 - protein, 32 aa, Artificial Sequence
  Cyclic GFR-binding peptide
  MOD_RES (5)..(6): Xaa is C or S
VPKPXXAPTQLSPISVLYIDDSSNVIYKQYEN

SEQ ID NO: 37000 - protein, 30 aa, Artificial Sequence
  Cyclic GFR-binding peptide
  MOD_RES (3)..(4): Xaa is C or S
SPXXVSQDLEPISILYLIGKTPKIKFKYEM

SEQ ID NO: 37001 - protein, 28 aa, Artificial Sequence
  Cyclic GFR-binding peptide
  MOD_RES (1)..(1): Xaa is C or S
XVPTELSPISMLYIDEYDKVVYKQYEEM

SEQ ID NO: 37002 - protein, 36 aa, Artificial Sequence; identical to SEQ ID NO: 8374
  Cyclic GFR-binding peptide
  MOD_RES (6)..(7): Xaa is C or S

SEQ ID NO: 37003 - protein, 32 aa, Artificial Sequence; identical to SEQ ID NO: 8376
  Cyclic GFR-binding peptide
  MOD_RES (31)..(31): Xaa is C or S

SEQ ID NO: 37004 - protein, 33 aa, Artificial Sequence
  Cyclic GFR-binding peptide
  MOD_RES (1)..(32): Xaa is C or S
XVSQDLSPISILYIIGKTPKIYKQYEMIVKSXK

SEQ ID NO: 37005 - protein, 31 aa, Artificial Sequence; identical to SEQ ID NO: 8381
  Cyclic GFR-binding peptide
  MOD_RES (2)..(3): Xaa is C or S

SEQ ID NO: 37006 - protein, 32 aa, Artificial Sequence; identical to SEQ ID NO: 8382
  Cyclic GFR-binding peptide
  MOD_RES (6)..(7): Xaa is C or S

SEQ ID NO: 37007 - protein, 36 aa, Artificial Sequence
  Cyclic GFR-binding peptide
  MOD_RES (4)..(5): Xaa is C or S
PKAXXVPTELSPISMLYIDEYDKVVYKQYEEMVVEG

SEQ ID NO: 37008 - protein, 25 aa, Artificial Sequence
  Cyclic GFR-binding peptide
VPQALNAISILYFVGRKPKVLKKYR

SEQ ID NO: 37009 - protein, 36 aa, Artificial Sequence
  Cyclic GFR-binding peptide
  MOD_RES (5)..(6): Xaa is C or S
APASXXVPARLSPISILYKDAANNVVLKYHYDMVVE

SEQ ID NO: 37010 - protein, 31 aa, Artificial Sequence; identical to SEQ ID NO: 8389
  Cyclic GFR-binding peptide
  MOD_RES (4)..(5): Xaa is C or S

SEQ ID NO: 37011 - protein, 30 aa, Artificial Sequence
  Cyclic GFR-binding peptide
  MOD_RES (2)..(2): Xaa is C or S
TXAPTKLSPISVLYIDDSSNVIYKQYENMV

SEQ ID NO: 37012 - protein, 33 aa, Artificial Sequence
  Cyclic GFR-binding peptide
  MOD_RES (5)..(6): Xaa is C or S
SASPXXVSQDLEPISILYLIGKTPKIKFKYEMI

SEQ ID NO: 37013 - protein, 26 aa, Artificial Sequence
  Cyclic GFR-binding peptide
NAISMLYFDEYDKVVLKKYREMVVEG

SEQ ID NO: 37014 - protein, 27 aa, Artificial Sequence
  Cyclic GFR-binding peptide
  MOD_RES (1)..(2): Xaa is C or S
XXAPTQLSPISVLYIDDSSNVIYKQYE

SEQ ID NO: 37015 - protein, 31 aa, Artificial Sequence
  Cyclic GFR-binding peptide
  MOD_RES (5)..(6): Xaa is C or S
SAAPXXVPQALEPISILYLVGRKPKVKFKYE

SEQ ID NO: 37016 - protein, 34 aa, Artificial Sequence
  Cyclic GFR-binding peptide
  MOD_RES (1)..(33): Xaa is C or S
XVPARLEPISILYLDAANNVVKFKYEDMVVEAXG

SEQ ID NO: 37017 - protein, 35 aa, Artificial Sequence
  Cyclic GFR-binding peptide
  MOD_RES (32)..(34): Xaa is C or S
APTKLEPISVLYLDDSSNVIKFKYENMVVRSXGXH

SEQ ID NO: 37018 - protein, 29 aa, Artificial Sequence
  Cyclic GFR-binding peptide
  MOD_RES (28)..(28): Xaa is C or S
LEPISMLYLDENEKVVKFKYEDMVVEGXG

SEQ ID NO: 37019 - protein, 33 aa, Artificial Sequence
  Cyclic GFR-binding peptide
  MOD_RES (32)..(32): Xaa is C or S
VPTKLSPISILYKDKGVVTYLKYHYGMAVSEXG

SEQ ID NO: 37020 - protein, 25 aa, Artificial Sequence
  Cyclic GFR-binding peptide
LSPISMLYIDEYDKVVYKQYEEMVV

SEQ ID NO: 37021 - protein, 29 aa, Artificial Sequence
  Cyclic GFR-binding peptide
APTKLNAISVLYFDSSNNVILKKYRNMVV

SEQ ID NO: 37022 - protein, 30 aa, Artificial Sequence; identical to SEQ ID NO: 8396
  Cyclic GFR-binding peptide
  MOD_RES (28)..(30): Xaa is C or S

SEQ ID NO: 37023 - protein, 36 aa, Artificial Sequence
  Cyclic GFR-binding peptide
  MOD_RES (4)..(5): Xaa is C or S
PKAXXVPTELEPISMLYLDENEKVVKFKYEDMVVEG

SEQ ID NO: 37024 - protein, 29 aa, Artificial Sequence
  Cyclic GFR-binding peptide
TKLSPISVLYIDDMGVPTYKQYEEGMSVA

SEQ ID NO: 37025 - protein, 25 aa, Artificial Sequence
  Cyclic GFR-binding peptide
VSQDLNAISILYFIGKTPKILKKYR

SEQ ID NO: 37026 - protein, 31 aa, Artificial Sequence; identical to SEQ ID NO: 8398
  Cyclic GFR-binding peptide
  MOD_RES (5)..(6): Xaa is C or S

SEQ ID NO: 37027 - protein, 26 aa, Artificial Sequence
  Cyclic GFR-binding peptide
TKLSPISVLYKDSSNNVILKYHYNMV

SEQ ID NO: 37028 - protein, 21 aa, Artificial Sequence
  Cyclic GFR-binding peptide
EPISMLYLDENEKVVKFKYED

SEQ ID NO: 37029 - protein, 28 aa, Artificial Sequence
  Cyclic GFR-binding peptide
  MOD_RES (2)..(3): Xaa is C or S
PXXAPTKLEPISVLYLDDSSNVIKFKYE

SEQ ID NO: 37030 - protein, 28 aa, Artificial Sequence
  Cyclic GFR-binding peptide
PTKLEPISVLYLDDMGVPTKFKYEEGMS

SEQ ID NO: 37031 - protein, 23 aa, Artificial Sequence
  Cyclic GFR-binding peptide
NAISILYFDKGVVTYLKKYRGMA

SEQ ID NO: 37032 - protein, 28 aa, Artificial Sequence
  Cyclic GFR-binding peptide
  MOD_RES (27)..(27): Xaa is C or S
EPISVLYLDDSSNVIKFKYENMVVRSXG

SEQ ID NO: 37033 - protein, 23 aa, Artificial Sequence
  Cyclic GFR-binding peptide
KLSPISVLYKDSSNNVILKYHYN

SEQ ID NO: 37034 - protein, 29 aa, Artificial Sequence
  Cyclic GFR-binding peptide
  MOD_RES (3)..(4): Xaa is C or S
KAXXVPTKLEPISVLYLDDMGVPTKFKYE

SEQ ID NO: 37035 - protein, 36 aa, Artificial Sequence; identical to SEQ ID NO: 8409
  Cyclic GFR-binding peptide
  MOD_RES (5)..(6): Xaa is C or S

SEQ ID NO: 37036 - protein, 28 aa, Artificial Sequence
  Cyclic GFR-binding peptide
VPTELSPISMLYKDEYDKVVLKYHYEMV

SEQ ID NO: 37037 - protein, 24 aa, Artificial Sequence
  Cyclic GFR-binding peptide
PTKLSPISILYKDKGVVTYLKYHY

SEQ ID NO: 37038 - protein, 28 aa, Artificial Sequence
  Cyclic GFR-binding peptide
  MOD_RES (1)..(1): Xaa is C or S
XVPTELNAISMLYFDEYDKVVLKKYREM

SEQ ID NO: 37039 - protein, 27 aa, Artificial Sequence
  Cyclic GFR-binding peptide
  MOD_RES (1)..(2): Xaa is C or S
XXVPQDLSPISILYIVGRTPKVYKQYE

SEQ ID NO: 37040 - protein, 31 aa, Artificial Sequence
  Cyclic GFR-binding peptide
  MOD_RES (2)..(3): Xaa is C or S
AXXAPTKLEPISVLYLDSSNNVIKFKYENMV

SEQ ID NO: 37041 - protein, 25 aa, Artificial Sequence
  Cyclic GFR-binding peptide
PTQLEPISVLYLDDSSNVIKFKYEN

SEQ ID NO: 37042 - protein, 33 aa, Artificial Sequence
  Cyclic GFR-binding peptide
  MOD_RES (6)..(7): Xaa is C or S
ASASPXXVSQDLSPISILYIIGKTPKIYKQYEM

SEQ ID NO: 37043 - protein, 32 aa, Artificial Sequence; identical to SEQ ID NO: 8415
  Cyclic GFR-binding peptide
  MOD_RES (3)..(4): Xaa is C or S

SEQ ID NO: 37044 - protein, 38 aa, Artificial Sequence; identical to SEQ ID NO: 8416
  Cyclic GFR-binding peptide
  MOD_RES (4)..(5)..(36)..(38): Xaa is C or S

SEQ ID NO: 37045 - protein, 30 aa, Artificial Sequence
  Cyclic GFR-binding peptide
  MOD_RES (1)..(2): Xaa is C or S
XXVPTKLNAISILYFDKGVVTYLKKYRGMA

SEQ ID NO: 37046 - protein, 26 aa, Artificial Sequence
  Cyclic GFR-binding peptide
APTKLNAISVLYFDSSNNVILKKYRN

SEQ ID NO: 37047 - protein, 30 aa, Artificial Sequence
  Cyclic GFR-binding peptide
VPTELSPISMLYIDEYDKVVYKQYEEMVVE

SEQ ID NO: 37048 - protein, 37 aa, Artificial Sequence; identical to SEQ ID NO: 8420
  Cyclic GFR-binding peptide
  MOD_RES (2)..(3)..(34)..(36): Xaa is C or S

SEQ ID NO: 37049 - protein, 37 aa, Artificial Sequence
  Cyclic GFR-binding peptide
  MOD_RES (3)..(4)..(36): Xaa is C or S
KPXXAPTQLSPISVLYIDDSSNVIYKQYENMVVRAXG

SEQ ID NO: 37050 - protein, 39 aa, Artificial Sequence
  Cyclic GFR-binding peptide
  MOD_RES (4)..(5)..(36)..(38): Xaa is C or S
AAPXXVPQALEPISILYLVGRKPKVKFKYEMIVRSXKXS

SEQ ID NO: 37051 - protein, 35 aa, Artificial Sequence
  Cyclic GFR-binding peptide
  MOD_RES (2)..(3)..(35): Xaa is C or S
PXXAPTKLEPISVLYLDDSSNVIKFKYENMVVRSX

SEQ ID NO: 37052 - protein, 26 aa, Artificial Sequence
  Cyclic GFR-binding peptide
  MOD_RES (1)..(1): Xaa is C or S
XVPQDLSPISILYIVGRTPKVYKQYE

SEQ ID NO: 37053 - protein, 27 aa, Artificial Sequence
  Cyclic GFR-binding peptide
RLSPISILYKDAANNVVLKYHYDMVVE

SEQ ID NO: 37054 - protein, 23 aa, Artificial Sequence
  Cyclic GFR-binding peptide
SPISILYIVGRKPKVYKQYEMIV

SEQ ID NO: 37055 - protein, 26 aa, Artificial Sequence
  Cyclic GFR-binding peptide
PARLEPISILYLDAANNVVKFKYEDM

SEQ ID NO: 37056 - protein, 30 aa, Artificial Sequence
  Cyclic GFR-binding peptide
  MOD_RES (1)..(1): Xaa is C or S
XAPTKLSPISVLYIDDSSNVIYKQYENMVV

SEQ ID NO: 37057 - protein, 42 aa, Artificial Sequence; identical to SEQ ID NO: 8423
  Cyclic GFR-binding peptide
  MOD_RES (6)..(7)..(39)..(41): Xaa is C or S

SEQ ID NO: 37058 - protein, 27 aa, Artificial Sequence
  Cyclic GFR-binding peptide
DLEPISILYLIGKTPKIKFKYEMIVKS

SEQ ID NO: 37059 - protein, 34 aa, Artificial Sequence; identical to SEQ ID NO: 8426
  Cyclic GFR-binding peptide
  MOD_RES (32)..(34): Xaa is C or S

SEQ ID NO: 37060 - protein, 30 aa, Artificial Sequence
  Cyclic GFR-binding peptide
  MOD_RES (3)..(4): Xaa is C or S
KAXXAPTKLSPISVLYIDSSNNVIYKQYEN

SEQ ID NO: 37061 - protein, 36 aa, Artificial Sequence
  Cyclic GFR-binding peptide
  MOD_RES (6)..(7): Xaa is C or S
KVGKAXXVPTKLEPISVLYLDDMGVPTKFKYEEGMS

SEQ ID NO: 37062 - protein, 25 aa, Artificial Sequence
  Cyclic GFR-binding peptide
LEPISMLYLDEYDKVVKFKYEEMVV

SEQ ID NO: 37063 - protein, 38 aa, Artificial Sequence
  Cyclic GFR-binding peptide
  MOD_RES (1)..(2)..(35)..(37): Xaa is C or S
XXVPTKLEPISVLYLDDMGVPTKFKYEEGMSVAEXGXR

SEQ ID NO: 37064 - protein, 28 aa, Artificial Sequence
  Cyclic GFR-binding peptide
  MOD_RES (2)..(2): Xaa is C or S
TXAPTKLEPISVLYLDDSSNVIKFKYEN

SEQ ID NO: 37065 - protein, 30 aa, Artificial Sequence; identical to SEQ ID NO: 8429
  Cyclic GFR-binding peptide
  MOD_RES (29)..(29): Xaa is C or S

SEQ ID NO: 37066 - protein, 35 aa, Artificial Sequence
  Cyclic GFR-binding peptide
  MOD_RES (32)..(34): Xaa is C or S
VPTELSPISMLYIDENEKVVYKQYEDMVVEGXGXR

SEQ ID NO: 37067 - protein, 26 aa, Artificial Sequence
  Cyclic GFR-binding peptide
PTELSPISMLYIDEYDKVVYKQYEEM

SEQ ID NO: 37068 - protein, 32 aa, Artificial Sequence
  Cyclic GFR-binding peptide
  MOD_RES (6)..(7): Xaa is C or S
ASASPXXVPQDLEPISILYLVGRTPKVKFKYE

SEQ ID NO: 37069 - protein, 28 aa, Artificial Sequence
  Cyclic GFR-binding peptide
  MOD_RES (1)..(2): Xaa is C or S
XXAPTKLSPISVLYIDSSNNVIYKQYEN

SEQ ID NO: 37070 - protein, 29 aa, Artificial Sequence
  Cyclic GFR-binding peptide
  MOD_RES (26)..(28): Xaa is C or S
SPISILYIVGRTPKVYKQYEMVVKSXKXS

SEQ ID NO: 37071 - protein, 36 aa, Artificial Sequence; identical to SEQ ID NO: 8432
  Cyclic GFR-binding peptide
  MOD_RES (2)..(3)..(35): Xaa is C or S

SEQ ID NO: 37072 - protein, 30 aa, Artificial Sequence
  Cyclic GFR-binding peptide
  MOD_RES (1)..(1): Xaa is C or S
XVPARLEPISILYLDAANNVVKFKYEDMVV

SEQ ID NO: 37073 - protein, 27 aa, Artificial Sequence
  Cyclic GFR-binding peptide
VPTKLNAISVLYFDDMGVPTLKKYREG

SEQ ID NO: 37074 - protein, 34 aa, Artificial Sequence
  Cyclic GFR-binding peptide
  MOD_RES (4)..(5): Xaa is C or S
ASPXXVSQDLEPISILYLIGKTPKIKFKYEMIVK

SEQ ID NO: 37075 - protein, 32 aa, Artificial Sequence
  Cyclic GFR-binding peptide
  MOD_RES (4)..(5): Xaa is C or S
SKAXXVPTKLNAISILYFDKGVVTYLKKYRGM

SEQ ID NO: 37076 - protein, 29 aa, Artificial Sequence
  Cyclic GFR-binding peptide
  MOD_RES (1)..(2): Xaa is C or S
XXVSQDLEPISILYLIGKTPKIKFKYEMI

SEQ ID NO: 37077 - protein, 34 aa, Artificial Sequence; identical to SEQ ID NO: 8435
  Cyclic GFR-binding peptide
  MOD_RES (4)..(5): Xaa is C or S

SEQ ID NO: 37078 - protein, 36 aa, Artificial Sequence; identical to SEQ ID NO: 8436
  Cyclic GFR-binding peptide
  MOD_RES (5)..(6): Xaa is C or S

SEQ ID NO: 37079 - protein, 32 aa, Artificial Sequence
  Cyclic GFR-binding peptide
  MOD_RES (32)..(32): Xaa is C or S
VPARLNAISILYFDAANNVVLKKYRDMVVEAX

SEQ ID NO: 37080 - protein, 29 aa, Artificial Sequence
  Cyclic GFR-binding peptide
SQDLSPISILYKIGKTPKILKYHYMIVKS

SEQ ID NO: 37081 - protein, 35 aa, Artificial Sequence
  Cyclic GFR-binding peptide
  MOD_RES (6)..(7): Xaa is C or S
AVPKAXXAPTKLEPISVLYLDSSNNVIKFKYENMV

SEQ ID NO: 37082 - protein, 31 aa, Artificial Sequence; identical to SEQ ID NO: 8439
  Cyclic GFR-binding peptide
  MOD_RES (3)..(4): Xaa is C or S

SEQ ID NO: 37083 - protein, 34 aa, Artificial Sequence; identical to SEQ ID NO: 8441
  Cyclic GFR-binding peptide
  MOD_RES (1)..(2)..(34): Xaa is C or S

SEQ ID NO: 37084 - protein, 35 aa, Artificial Sequence; identical to SEQ ID NO: 8442
  Cyclic GFR-binding peptide
  MOD_RES (6)..(7): Xaa is C or S

SEQ ID NO: 37085 - protein, 31 aa, Artificial Sequence
  Cyclic GFR-binding peptide
  MOD_RES (31)..(31): Xaa is C or S
PTKLSPISVLYIDSSNNVIYKQYENMVVKAX

SEQ ID NO: 37086 - protein, 34 aa, Artificial Sequence
  Cyclic GFR-binding peptide
  MOD_RES (6)..(7): Xaa is C or S
SIPKAXXVPTELSPISMLYIDEYDKVVYKQYEEM

SEQ ID NO: 37087 - protein, 37 aa, Artificial Sequence
  Cyclic GFR-binding peptide
  MOD_RES (5)..(6): Xaa is C or S
VPKAXXAPTKLEPISVLYLDSSNNVIKFKYENMVVKA

SEQ ID NO: 37088 - protein, 36 aa, Artificial Sequence
  Cyclic GFR-binding peptide
  MOD_RES (5)..(6): Xaa is C or S
ASKAXXVPTKLSPISILYIDKGVVTYYKQYEGMAVS

SEQ ID NO: 37089 - protein, 30 aa, Artificial Sequence
  Cyclic GFR-binding peptide
PTKLEPISVLYLDDSSNVIKFKYENMVVRS

SEQ ID NO: 37090 - protein, 28 aa, Artificial Sequence
  Cyclic GFR-binding peptide
ELSPISMLYIDEYDKVVYKQYEEMVVEG

SEQ ID NO: 37091 - protein, 32 aa, Artificial Sequence; identical to SEQ ID NO: 8444
  Cyclic GFR-binding peptide
  MOD_RES (32)..(32): Xaa is C or S

SEQ ID NO: 37092 - protein, 30 aa, Artificial Sequence
  Cyclic GFR-binding peptide
  MOD_RES (29)..(29): Xaa is C or S
RLEPISILYLDAANNVVKFKYEDMVVEAXG

SEQ ID NO: 37093 - protein, 35 aa, Artificial Sequence; identical to SEQ ID NO: 8446
  Cyclic GFR-binding peptide
  MOD_RES (4)..(5): Xaa is C or S

SEQ ID NO: 37094 - protein, 24 aa, Artificial Sequence
  Cyclic GFR-binding peptide
SPISILYIIGKTPKIYKQYEMIVK

SEQ ID NO: 37095 - protein, 23 aa, Artificial Sequence
  Cyclic GFR-binding peptide
SPISVLYIDDSSNVIYKQYENMV

SEQ ID NO: 37096 - protein, 30 aa, Artificial Sequence
  Cyclic GFR-binding peptide
  MOD_RES (27)..(29): Xaa is C or S
LSPISILYIVGRTPKVYKQYEMVVKSXKXS

SEQ ID NO: 37097 - protein, 33 aa, Artificial Sequence; identical to SEQ ID NO: 8447
  Cyclic GFR-binding peptide
  MOD_RES (2)..(3): Xaa is C or S

SEQ ID NO: 37098 - protein, 29 aa, Artificial Sequence
  Cyclic GFR-binding peptide
  MOD_RES (1)..(2): Xaa is C or S
XXVPQDLEPISILYLVGRTPKVKFKYEMV

SEQ ID NO: 37099 - protein, 40 aa, Artificial Sequence; identical to SEQ ID NO: 8448
  Cyclic GFR-binding peptide
  MOD_RES (5)..(6)..(39): Xaa is C or S

SEQ ID NO: 37100 - protein, 23 aa, Artificial Sequence
  Cyclic GFR-binding peptide
LSPISVLYIDSSNNVIYKQYENM

SEQ ID NO: 37101 - protein, 34 aa, Artificial Sequence
  Cyclic GFR-binding peptide
  MOD_RES (5)..(6): Xaa is C or S
IPKAXXVPTELEPISMLYLDENEKVVKFKYEDMV

SEQ ID NO: 37102 - protein, 34 aa, Artificial Sequence; identical to SEQ ID NO: 8451
  Cyclic GFR-binding peptide
  MOD_RES (1)..(2)..(33): Xaa is C or S

SEQ ID NO: 37103 - protein, 28 aa, Artificial Sequence
  Cyclic GFR-binding peptide
  MOD_RES (2)..(2): Xaa is C or S
TXAPTKLSPISVLYIDDSSNVIYKQYEN

SEQ ID NO: 37104 - protein, 23 aa, Artificial Sequence
  Cyclic GFR-binding peptide
EPISILYLIGKTPKIKFKYEMIV

SEQ ID NO: 37105 - protein, 27 aa, Artificial Sequence
  Cyclic GFR-binding peptide
  MOD_RES (1)..(2): Xaa is C or S
XXVPTKLSPISVLYIDDMGVPTYKQYE

SEQ ID NO: 37106 - protein, 32 aa, Artificial Sequence
  Cyclic GFR-binding peptide
  MOD_RES (3)..(4): Xaa is C or S
ASXXVPARLNAISILYFDAANNVVLKKYRDMV

SEQ ID NO: 37107 - protein, 32 aa, Artificial Sequence; identical to SEQ ID NO: 8456
  Cyclic GFR-binding peptide
  MOD_RES (31)..(31): Xaa is C or S

SEQ ID NO: 37108 - protein, 28 aa, Artificial Sequence
  Cyclic GFR-binding peptide
VSQDLSPISILYKIGKTPKILKYHYMIV

SEQ ID NO: 37109 - protein, 31 aa, Artificial Sequence
  Cyclic GFR-binding peptide
  MOD_RES (29)..(31): Xaa is C or S
KLEPISVLYLDSSNNVIKFKYENMVVKAXGX

SEQ ID NO: 37110 - protein, 29 aa, Artificial Sequence
  Cyclic GFR-binding peptide
  MOD_RES (1)..(2): Xaa is C or S
XXVPTELSPISMLYKDENEKVVLKYHYDM

SEQ ID NO: 37111 - protein, 28 aa, Artificial Sequence
  Cyclic GFR-binding peptide
  MOD_RES (28)..(28): Xaa is C or S
DLSPISILYKVGRTPKVLKYHYMVVKSX

SEQ ID NO: 37112 - protein, 30 aa, Artificial Sequence
  Cyclic GFR-binding peptide
PTELSPISMLYIDEYDKVVYKQYEEMVVEG

SEQ ID NO: 37113 - protein, 24 aa, Artificial Sequence
  Cyclic GFR-binding peptide
QLSPISVLYKDDSSNVILKYHYNM

SEQ ID NO: 37114 - protein, 35 aa, Artificial Sequence; identical to SEQ ID NO: 8463
  Cyclic GFR-binding peptide
  MOD_RES (2)..(3)..(35): Xaa is C or S

SEQ ID NO: 37115 - protein, 31 aa, Artificial Sequence; identical to SEQ ID NO: 8465
  Cyclic GFR-binding peptide
  MOD_RES (5)..(6): Xaa is C or S

SEQ ID NO: 37116 - protein, 27 aa, Artificial Sequence
  Cyclic GFR-binding peptide
TKLEPISVLYLDSSNNVIKFKYENMVV

SEQ ID NO: 37117 - protein, 36 aa, Artificial Sequence
  Cyclic GFR-binding peptide
  MOD_RES (1)..(33)..(35): Xaa is C or S
XVPARLNAISILYFDAANNVVLKKYRDMVVEAXGXR

SEQ ID NO: 37118 - protein, 35 aa, Artificial Sequence; identical to SEQ ID NO: 8466
  Cyclic GFR-binding peptide
  MOD_RES (2)..(3)..(35): Xaa is C or S

SEQ ID NO: 37119 - protein, 29 aa, Artificial Sequence
  Cyclic GFR-binding peptide
APTKLSPISVLYKDSSNNVILKYHYNMVV

SEQ ID NO: 37120 - protein, 30 aa, Artificial Sequence
  Cyclic GFR-binding peptide
  MOD_RES (30)..(30): Xaa is C or S
PQALEPISILYLVGRKPKVKFKYEMIVRSX

SEQ ID NO: 37121 - protein, 35 aa, Artificial Sequence
  Cyclic GFR-binding peptide
  MOD_RES (1)..(33)..(35): Xaa is C or S
XAPTKLSPISVLYIDSSNNVIYKQYENMVVKAXGX

SEQ ID NO: 37122 - protein, 23 aa, Artificial Sequence
  Cyclic GFR-binding peptide
NAISVLYFDDMGVPTLKKYREGM

SEQ ID NO: 37123 - protein, 30 aa, Artificial Sequence
  Cyclic GFR-binding peptide
  MOD_RES (2)..(3): Xaa is C or S
SXXVPARLSPISILYKDAANNVVLKYHYDM

SEQ ID NO: 37124 - protein, 22 aa, Artificial Sequence
  Cyclic GFR-binding peptide
LEPISVLYLDSSNNVIKFKYEN

SEQ ID NO: 37125 - protein, 35 aa, Artificial Sequence; identical to SEQ ID NO: 8469
  Cyclic GFR-binding peptide
  MOD_RES (1)..(2)..(33)..(35): Xaa is C or S

SEQ ID NO: 37126 - protein, 23 aa, Artificial Sequence
  Cyclic GFR-binding peptide
LSPISMLYIDEYDKVVYKQYEEM

SEQ ID NO: 37127 - protein, 32 aa, Artificial Sequence
  Cyclic GFR-binding peptide
  MOD_RES (31)..(31): Xaa is C or S
PTQLSPISVLYIDDSSNVIYKQYENMVVRAXG

SEQ ID NO: 37128 - protein, 34 aa, Artificial Sequence
  Cyclic GFR-binding peptide
  MOD_RES (7)..(7): Xaa is C or S
HVTKPTXAPTKLSPISVLYIDDSSNVIYKQYENM

SEQ ID NO: 37129 - protein, 30 aa, Artificial Sequence
  Cyclic GFR-binding peptide
  MOD_RES (2)..(3): Xaa is C or S
PXXVPQDLSPISILYIVGRTPKVYKQYEMV

SEQ ID NO: 37130 - protein, 21 aa, Artificial Sequence
  Cyclic GFR-binding peptide
SPISILYIVGRKPKVYKQYEM

SEQ ID NO: 37131 - protein, 33 aa, Artificial Sequence; identical to SEQ ID NO: 8475
  Cyclic GFR-binding peptide
  MOD_RES (1)..(2)..(33): Xaa is C or S

SEQ ID NO: 37132 - protein, 27 aa, Artificial Sequence
  Cyclic GFR-binding peptide
LNAISVLYFDDMGVPTLKKYREGMSVA

SEQ ID NO: 37133 - protein, 20 aa, Artificial Sequence
  Cyclic GFR-binding peptide
NAISVLYFDSSNNVILKKYR

SEQ ID NO: 37134 - protein, 32 aa, Artificial Sequence
  Cyclic GFR-binding peptide
  MOD_RES (31)..(31): Xaa is C or S
PARLEPISILYLDAANNVVKFKYEDMVVEAXG

SEQ ID NO: 37135 - protein, 35 aa, Artificial Sequence; identical to SEQ ID NO: 8479
  Cyclic GFR-binding peptide
  MOD_RES (1)..(2)..(33)..(35): Xaa is C or S

SEQ ID NO: 37136 - protein, 27 aa, Artificial Sequence
  Cyclic GFR-binding peptide
APTQLSPISVLYKDDSSNVILKYHYNM

SEQ ID NO: 37137 - protein, 30 aa, Artificial Sequence; identical to SEQ ID NO: 8481
  Cyclic GFR-binding peptide
  MOD_RES (3)..(4): Xaa is C or S

SEQ ID NO: 37138 - protein, 31 aa, Artificial Sequence
  Cyclic GFR-binding peptide
  MOD_RES (1)..(2): Xaa is C or S
XXVSQDLEPISILYLIGKTPKIKFKYEMIVK

SEQ ID NO: 37139 - protein, 39 aa, Artificial Sequence
  Cyclic GFR-binding peptide
  MOD_RES (5)..(6)..(38): Xaa is C or S
VPKAXXAPTKLSPISVLYIDSSNNVIYKQYENMVVKAXG

SEQ ID NO: 37140 - protein, 25 aa, Artificial Sequence
  Cyclic GFR-binding peptide
DLNAISILYFVGRTPKVLKKYRMVV

SEQ ID NO: 37141 - protein, 25 aa, Artificial Sequence
  Cyclic GFR-binding peptide
SQDLSPISILYKIGKTPKILKYHYM

SEQ ID NO: 37142 - protein, 27 aa, Artificial Sequence
  Cyclic GFR-binding peptide
TELSPISMLYKDEYDKVVLKYHYEMVV

SEQ ID NO: 37143 - protein, 23 aa, Artificial Sequence
  Cyclic GFR-binding peptide
LNAISVLYFDSSNNVILKKYRNM

SEQ ID NO: 37144 - protein, 32 aa, Artificial Sequence
  Cyclic GFR-binding peptide
  MOD_RES (1)..(1): Xaa is C or S
XAPTKLEPISVLYLDSSNNVIKFKYENMVVKA

SEQ ID NO: 37145 - protein, 27 aa, Artificial Sequence
  Cyclic GFR-binding peptide
  MOD_RES (27)..(27): Xaa is C or S
SPISVLYKDDSSNVILKYHYNMVVRAX

SEQ ID NO: 37146 - protein, 30 aa, Artificial Sequence
  Cyclic GFR-binding peptide
  MOD_RES (1)..(1): Xaa is C or S
XVPQALSPISILYIVGRKPKVYKQYEMIVR

SEQ ID NO: 37147 - protein, 29 aa, Artificial Sequence
  Cyclic GFR-binding peptide
  MOD_RES (27)..(29): Xaa is C or S
LSPISILYIIGKTPKIYKQYEMIVKSXKX

SEQ ID NO: 37148 - protein, 37 aa, Artificial Sequence
  Cyclic GFR-binding peptide
  MOD_RES (7)..(7): Xaa is C or S
HVTKPTXAPTKLEPISVLYLDDSSNVIKFKYENMVVR

SEQ ID NO: 37149 - protein, 33 aa, Artificial Sequence
  Cyclic GFR-binding peptide
  MOD_RES (4)..(5): Xaa is C or S
SKAXXVPTKLSPISILYKDKGVVTYLKYHYGMA

SEQ ID NO: 37150 - protein, 34 aa, Artificial Sequence; identical to SEQ ID NO: 8494
  Cyclic GFR-binding peptide
  MOD_RES (32)..(34): Xaa is C or S

SEQ ID NO: 37151 - protein, 34 aa, Artificial Sequence
  Cyclic GFR-binding peptide
  MOD_RES (6)..(7): Xaa is C or S
AVPKAXXAPTKLSPISVLYIDSSNNVIYKQYENM

SEQ ID NO: 37152 - protein, 32 aa, Artificial Sequence
  Cyclic GFR-binding peptide
  MOD_RES (1)..(2): Xaa is C or S
XXVPQALSPISILYIVGRKPKVYKQYEMIVRS

SEQ ID NO: 37153 - protein, 35 aa, Artificial Sequence
  Cyclic GFR-binding peptide
  MOD_RES (3)..(4): Xaa is C or S
KAXXAPTKLSPISVLYIDSSNNVIYKQYENMVVKA

SEQ ID NO: 37154 - protein, 40 aa, Artificial Sequence
  Cyclic GFR-binding peptide
  MOD_RES (6)..(7)..(39): Xaa is C or S
AAPASXXVPARLEPISILYLDAANNVVKFKYEDMVVEAXG

SEQ ID NO: 37155 - protein, 28 aa, Artificial Sequence
  Cyclic GFR-binding peptide
SQDLSPISILYKIGKTPKILKYHYMIVK

SEQ ID NO: 37156 - protein, 23 aa, Artificial Sequence
  Cyclic GFR-binding peptide
LSPISVLYIDDMGVPTYKQYEEG

SEQ ID NO: 37157 - protein, 39 aa, Artificial Sequence; identical to SEQ ID NO: 8499
  Cyclic GFR-binding peptide
  MOD_RES (3)..(4)..(36)..(38): Xaa is C or S

SEQ ID NO: 37158 - protein, 29 aa, Artificial Sequence
  Cyclic GFR-binding peptide
KLEPISVLYLDDMGVPTKFKYEEGMSVAE

SEQ ID NO: 37159 - protein, 34 aa, Artificial Sequence
  Cyclic GFR-binding peptide
  MOD_RES (6)..(7): Xaa is C or S
KASKAXXVPTKLNAISILYFDKGVVTYLKKYRGM

SEQ ID NO: 37160 - protein, 40 aa, Artificial Sequence
  Cyclic GFR-binding peptide
  MOD_RES (5)..(6)..(37)..(39): Xaa is C or S
SAAPXXVPQALEPISILYLVGRKPKVKFKYEMIVRSXKXS

SEQ ID NO: 37161 - protein, 28 aa, Artificial Sequence
  Cyclic GFR-binding peptide
  MOD_RES (1)..(1): Xaa is C or S
XAPTKLSPISVLYKDDSSNVILKYHYNM

SEQ ID NO: 37162 - protein, 41 aa, Artificial Sequence; identical to SEQ ID NO: 8504
  Cyclic GFR-binding peptide
  MOD_RES (6)..(7)..(39)..(41): Xaa is C or S

SEQ ID NO: 37163 - protein, 30 aa, Artificial Sequence
  Cyclic GFR-binding peptide
  MOD_RES (3)..(4): Xaa is C or S
SPXXVSQDLSPISILYIIGKTPKIYKQYEM

SEQ ID NO: 37164 - protein, 28 aa, Artificial Sequence
  Cyclic GFR-binding peptide
KLEPISVLYLDDSSNVIKFKYENMVVRS

SEQ ID NO: 37165 - protein, 28 aa, Artificial Sequence
  Cyclic GFR-binding peptide
QALSPISILYKVGRKPKVLKYHYMIVRS

SEQ ID NO: 37166 - protein, 26 aa, Artificial Sequence
  Cyclic GFR-binding peptide
APTKLSPISVLYKDDSSNVILKYHYN

SEQ ID NO: 37167 - protein, 37 aa, Artificial Sequence; identical to SEQ ID NO: 8510
  Cyclic GFR-binding peptide
  MOD_RES (3)..(4)..(36): Xaa is C or S

SEQ ID NO: 37168 - protein, 25 aa, Artificial Sequence
  Cyclic GFR-binding peptide
APTKLSPISVLYIDSSNNVIYKQYE

SEQ ID NO: 37169 - protein, 32 aa, Artificial Sequence
  Cyclic GFR-binding peptide
  MOD_RES (31)..(31): Xaa is C or S
VPQDLEPISILYLVGRTPKVKFKYEMVVKSXK

SEQ ID NO: 37170 - protein, 28 aa, Artificial Sequence
  Cyclic GFR-binding peptide
  MOD_RES (1)..(2): Xaa is C or S
XXAPTKLEPISVLYLDSSNNVIKFKYEN

SEQ ID NO: 37171 - protein, 33 aa, Artificial Sequence; identical to SEQ ID NO: 8513
  Cyclic GFR-binding peptide
  MOD_RES (5)..(6): Xaa is C or S

SEQ ID NO: 37172 - protein, 26 aa, Artificial Sequence
  Cyclic GFR-binding peptide
PTELSPISMLYKDEYDKVVLKYHYEM

SEQ ID NO: 37173 - protein, 33 aa, Artificial Sequence
  Cyclic GFR-binding peptide
  MOD_RES (5)..(5): Xaa is C or S
TKPTXAPTKLSPISVLYIDDSSNVIYKQYENMV

SEQ ID NO: 37174 - protein, 36 aa, Artificial Sequence
  Cyclic GFR-binding peptide
  MOD_RES (5)..(6): Xaa is C or S
VPKAXXAPTKLEPISVLYLDSSNNVIKFKYENMVVK

SEQ ID NO: 37175 - protein, 34 aa, Artificial Sequence; identical to SEQ ID NO: 8515
  Cyclic GFR-binding peptide
  MOD_RES (6)..(7): Xaa is C or S

SEQ ID NO: 37176 - protein, 33 aa, Artificial Sequence; identical to SEQ ID NO: 8518
  Cyclic GFR-binding peptide
  MOD_RES (6)..(7): Xaa is C or S

SEQ ID NO: 37177 - protein, 24 aa, Artificial Sequence
  Cyclic GFR-binding peptide
TQLEPISVLYLDDSSNVIKFKYEN

SEQ ID NO: 37178 - protein, 25 aa, Artificial Sequence
  Cyclic GFR-binding peptide
EPISMLYLDENEKVVKFKYEDMVVE

SEQ ID NO: 37179 - protein, 31 aa, Artificial Sequence
  Cyclic GFR-binding peptide
  MOD_RES (31)..(31): Xaa is C or S
PTKLEPISVLYLDSSNNVIKFKYENMVVKAX

SEQ ID NO: 37180 - protein, 32 aa, Artificial Sequence
  Cyclic GFR-binding peptide
  MOD_RES (3)..(4): Xaa is C or S
KAXXAPTKLEPISVLYLDSSNNVIKFKYENMV

SEQ ID NO: 37181 - protein, 29 aa, Artificial Sequence
  Cyclic GFR-binding peptide
  MOD_RES (29)..(29): Xaa is C or S
KLEPISVLYLDDSSNVIKFKYENMVVRSX

SEQ ID NO: 37182 - protein, 29 aa, Artificial Sequence
  Cyclic GFR-binding peptide
  MOD_RES (26)..(28): Xaa is C or S
NAISILYFIGKTPKILKKYRMIVKSXKXS

SEQ ID NO: 37183 - protein, 23 aa, Artificial Sequence
  Cyclic GFR-binding peptide
LSPISMLYKDEYDKVVLKYHYEM

SEQ ID NO: 37184 - protein, 21 aa, Artificial Sequence
  Cyclic GFR-binding peptide
EPISVLYLDDSSNVIKFKYEN

SEQ ID NO: 37185 - protein, 34 aa, Artificial Sequence; identical to SEQ ID NO: 8522
  Cyclic GFR-binding peptide
  MOD_RES (3)..(4): Xaa is C or S

SEQ ID NO: 37186 - protein, 38 aa, Artificial Sequence
  Cyclic GFR-binding peptide
  MOD_RES (4)..(5)..(37): Xaa is C or S
PKPXXAPTKLSPISVLYIDDSSNVIYKQYENMVVRSXG

SEQ ID NO: 37187 - protein, 27 aa, Artificial Sequence
  Cyclic GFR-binding peptide
ELSPISMLYIDEYDKVVYKQYEEMVVE

SEQ ID NO: 37188 - protein, 36 aa, Artificial Sequence; identical to SEQ ID NO: 8525
  Cyclic GFR-binding peptide
  MOD_RES (2)..(3)..(34)..(36): Xaa is C or S

SEQ ID NO: 37189 - protein, 26 aa, Artificial Sequence
  Cyclic GFR-binding peptide
KLEPISVLYLDDMGVPTKFKYEEGMS

SEQ ID NO: 37190 - protein, 27 aa, Artificial Sequence
  Cyclic GFR-binding peptide
VSQDLEPISILYLIGKTPKIKFKYEMI

SEQ ID NO: 37191 - protein, 29 aa, Artificial Sequence
  Cyclic GFR-binding peptide
  MOD_RES (29)..(29): Xaa is C or S
KLNAISILYFDKGVVTYLKKYRGMAVSEX

SEQ ID NO: 37192 - protein, 26 aa, Artificial Sequence
  Cyclic GFR-binding peptide
LNAISILYFDAANNVVLKKYRDMVVE

SEQ ID NO: 37193 - protein, 26 aa, Artificial Sequence
  Cyclic GFR-binding peptide
  MOD_RES (1)..(1): Xaa is C or S
XVPTELSPISMLYKDEYDKVVLKYHY

SEQ ID NO: 37194 - protein, 36 aa, Artificial Sequence
  Cyclic GFR-binding peptide
  MOD_RES (4)..(5): Xaa is C or S
PKPXXAPTQLSPISVLYIDDSSNVIYKQYENMVVRA

SEQ ID NO: 37195 - protein, 30 aa, Artificial Sequence
  Cyclic GFR-binding peptide
  MOD_RES (27)..(29): Xaa is C or S
LSPISILYIVGRKPKVYKQYEMIVRSXKXS

SEQ ID NO: 37196 - protein, 24 aa, Artificial Sequence
  Cyclic GFR-binding peptide
QLSPISVLYIDDSSNVIYKQYENM

SEQ ID NO: 37197 - protein, 29 aa, Artificial Sequence
  Cyclic GFR-binding peptide
TKLNAISVLYFDDMGVPTLKKYREGMSVA

SEQ ID NO: 37198 - protein, 34 aa, Artificial Sequence
  Cyclic GFR-binding peptide
  MOD_RES (5)..(6): Xaa is C or S
APASXXVPARLNAISILYFDAANNVVLKKYRDMV

SEQ ID NO: 37199 - protein, 29 aa, Artificial Sequence
  Cyclic GFR-binding peptide
  MOD_RES (29)..(29): Xaa is C or S
KLSPISILYKDKGVVTYLKYHYGMAVSEX

SEQ ID NO: 37200 - protein, 32 aa, Artificial Sequence; identical to SEQ ID NO: 8530
  Cyclic GFR-binding peptide
  MOD_RES (1)..(1): Xaa is C or S

SEQ ID NO: 37201 - protein, 31 aa, Artificial Sequence; identical to SEQ ID NO: 8531
  Cyclic GFR-binding peptide
  MOD_RES (2)..(3): Xaa is C or S

SEQ ID NO: 37202 - protein, 23 aa, Artificial Sequence
  Cyclic GFR-binding peptide
ELNAISMLYFDENEKVVLKKYRD

SEQ ID NO: 37203 - protein, 33 aa, Artificial Sequence
  Cyclic GFR-binding peptide
  MOD_RES (1)..(32): Xaa is C or S
XVPQDLSPISILYIVGRTPKVYKQYEMVVKSXK

SEQ ID NO: 37204 - protein, 32 aa, Artificial Sequence
  Cyclic GFR-binding peptide
  MOD_RES (6)..(7): Xaa is C or S
KIPKAXXVPTELSPISMLYIDENEKVVYKQYE

SEQ ID NO: 37205 - protein, 37 aa, Artificial Sequence
  Cyclic GFR-binding peptide
  MOD_RES (4)..(5)..(37): Xaa is C or S
PKAXXAPTKLSPISVLYIDSSNNVIYKQYENMVVKAX

SEQ ID NO: 37206 - protein, 34 aa, Artificial Sequence
  Cyclic GFR-binding peptide
  MOD_RES (1)..(2)..(33): Xaa is C or S
XXVPQDLEPISILYLVGRTPKVKFKYEMVVKSXK

SEQ ID NO: 37207 - protein, 29 aa, Artificial Sequence
  Cyclic GFR-binding peptide
VPARLEPISILYLDAANNVVKFKYEDMVV

SEQ ID NO: 37208 - protein, 38 aa, Artificial Sequence; identical to SEQ ID NO: 8537
  Cyclic GFR-binding peptide
  MOD_RES (3)..(4)..(35)..(37): Xaa is C or S

SEQ ID NO: 37209 - protein, 30 aa, Artificial Sequence; identical to SEQ ID NO: 8538
  Cyclic GFR-binding peptide
  MOD_RES (2)..(3): Xaa is C or S

SEQ ID NO: 37210 - protein, 41 aa, Artificial Sequence
  Cyclic GFR-binding peptide
  MOD_RES (6)..(38)..(40): Xaa is C or S
VTKPTXAPTKLEPISVLYLDDSSNVIKFKYENMVVRSXGXH

SEQ ID NO: 37211 - protein, 42 aa, Artificial Sequence
  Cyclic GFR-binding peptide
  MOD_RES (6)..(7)..(39)..(41): Xaa is C or S
KASKAXXVPTKLNAISILYFDKGVVTYLKKYRGMAVSEXGXR

SEQ ID NO: 37212 - protein, 26 aa, Artificial Sequence
  Cyclic GFR-binding peptide
  MOD_RES (26)..(26): Xaa is C or S
SPISILYKVGRKPKVLKYHYMIVRSX

SEQ ID NO: 37213 - protein, 38 aa, Artificial Sequence
  Cyclic GFR-binding peptide
  MOD_RES (5)..(6)..(37): Xaa is C or S
SASPXXVSQDLSPISILYIIGKTPKIYKQYEMIVKSXK

SEQ ID NO: 37214 - protein, 32 aa, Artificial Sequence; identical to SEQ ID NO: 8543
  Cyclic GFR-binding peptide
  MOD_RES (2)..(3): Xaa is C or S

SEQ ID NO: 37215 - protein, 30 aa, Artificial Sequence
  Cyclic GFR-binding peptide
VSQDLEPISILYLIGKTPKIKFKYEMIVKS

SEQ ID NO: 37216 - protein, 29 aa, Artificial Sequence
  Cyclic GFR-binding peptide
  MOD_RES (28)..(28): Xaa is C or S
LNAISILYFDKGVVTYLKKYRGMAVSEXG

SEQ ID NO: 37217 - protein, 32 aa, Artificial Sequence; identical to SEQ ID NO: 8544
  Cyclic GFR-binding peptide
  MOD_RES (1)..(1): Xaa is C or S

SEQ ID NO: 37218 - protein, 31 aa, Artificial Sequence
  Cyclic GFR-binding peptide
  MOD_RES (29)..(31): Xaa is C or S
ELEPISMLYLDEYDKVVKFKYEEMVVEGXGX

SEQ ID NO: 37219 - protein, 23 aa, Artificial Sequence
  Cyclic GFR-binding peptide
TQLSPISVLYIDDSSNVIYKQYE

SEQ ID NO: 37220 - protein, 38 aa, Artificial Sequence; identical to SEQ ID NO: 8549
  Cyclic GFR-binding peptide
  MOD_RES (4)..(5)..(36)..(38): Xaa is C or S

SEQ ID NO: 37221 - protein, 26 aa, Artificial Sequence
  Cyclic GFR-binding peptide
  MOD_RES (1)..(1): Xaa is C or S
XVPQALSPISILYIVGRKPKVYKQYE

SEQ ID NO: 37222 - protein, 30 aa, Artificial Sequence; identical to SEQ ID NO: 8551
  Cyclic GFR-binding peptide
  MOD_RES (28)..(30): Xaa is C or S

SEQ ID NO: 37223 - protein, 29 aa, Artificial Sequence
  Cyclic GFR-binding peptide
TELSPISMLYKDEYDKVVLKYHYEMVVEG

SEQ ID NO: 37224 - protein, 26 aa, Artificial Sequence
  Cyclic GFR-binding peptide
PTELEPISMLYLDENEKVVKFKYEDM

SEQ ID NO: 37225 - protein, 25 aa, Artificial Sequence
  Cyclic GFR-binding peptide
VPTKLNAISVLYFDDMGVPTLKKYR

SEQ ID NO: 37226 - protein, 28 aa, Artificial Sequence
  Cyclic GFR-binding peptide
  MOD_RES (1)..(1): Xaa is C or S
XAPTQLSPISVLYIDDSSNVIYKQYENM

SEQ ID NO: 37227 - protein, 39 aa, Artificial Sequence
  Cyclic GFR-binding peptide
  MOD_RES (3)..(4)..(37)..(39): Xaa is C or S
KAXXVPTKLEPISVLYLDDMGVPTKFKYEEGMSVAEXGX

SEQ ID NO: 37228 - protein, 31 aa, Artificial Sequence
  Cyclic GFR-binding peptide
  MOD_RES (5)..(6): Xaa is C or S
VPKPXXAPTKLEPISVLYLDDSSNVIKFKYE

SEQ ID NO: 37229 - protein, 26 aa, Artificial Sequence
  Cyclic GFR-binding peptide
APTKLSPISVLYIDSSNNVIYKQYEN

SEQ ID NO: 37230 - protein, 28 aa, Artificial Sequence
  Cyclic GFR-binding peptide
  MOD_RES (1)..(1): Xaa is C or S
XVPQDLEPISILYLVGRTPKVKFKYEMV

SEQ ID NO: 37231 - protein, 32 aa, Artificial Sequence
  Cyclic GFR-binding peptide
  MOD_RES (29)..(31): Xaa is C or S
ELEPISMLYLDENEKVVKFKYEDMVVEGXGXR

SEQ ID NO: 37232 - protein, 30 aa, Artificial Sequence
  Cyclic GFR-binding peptide
  MOD_RES (2)..(3): Xaa is C or S
PXXVPQALEPISILYLVGRKPKVKFKYEMI

SEQ ID NO: 37233 - protein, 37 aa, Artificial Sequence; identical to SEQ ID NO: 8557
  Cyclic GFR-binding peptide
  MOD_RES (3)..(4)..(35)..(37): Xaa is C or S

SEQ ID NO: 37234 - protein, 39 aa, Artificial Sequence
  Cyclic GFR-binding peptide
  MOD_RES (5)..(6)..(38): Xaa is C or S
ASKAXXVPTKLNAISILYFDKGVVTYLKKYRGMAVSEXG

SEQ ID NO: 37235 - protein, 36 aa, Artificial Sequence; identical to SEQ ID NO: 8558
  Cyclic GFR-binding peptide
  MOD_RES (4)..(5)..(36): Xaa is C or S

SEQ ID NO: 37236 - protein, 26 aa, Artificial Sequence
  Cyclic GFR-binding peptide
ALSPISILYIVGRKPKVYKQYEMIVR

SEQ ID NO: 37237 - protein, 30 aa, Artificial Sequence; identical to SEQ ID NO: 8563
  Cyclic GFR-binding peptide
  MOD_RES (1)..(1): Xaa is C or S

SEQ ID NO: 37238 - protein, 21 aa, Artificial Sequence
  Cyclic GFR-binding peptide
SPISMLYKDENEKVVLKYHYD

SEQ ID NO: 37239 - protein, 30 aa, Artificial Sequence
  Cyclic GFR-binding peptide
  MOD_RES (29)..(29): Xaa is C or S
ELEPISMLYLDEYDKVVKFKYEEMVVEGXG

SEQ ID NO: 37240 - protein, 27 aa, Artificial Sequence
  Cyclic GFR-binding peptide
  MOD_RES (1)..(2): Xaa is C or S
XXVPTELEPISMLYLDEYDKVVKFKYE

SEQ ID NO: 37241 - protein, 30 aa, Artificial Sequence
  Cyclic GFR-binding peptide
  MOD_RES (4)..(5): Xaa is C or S
AAPXXVPQALEPISILYLVGRKPKVKFKYE

SEQ ID NO: 37242 - protein, 34 aa, Artificial Sequence
  Cyclic GFR-binding peptide
  MOD_RES (3)..(4): Xaa is C or S
SPXXVPQDLEPISILYLVGRTPKVKFKYEMVVKS

SEQ ID NO: 37243 - protein, 33 aa, Artificial Sequence; identical to SEQ ID NO: 8567
  Cyclic GFR-binding peptide
  MOD_RES (31)..(33): Xaa is C or S

SEQ ID NO: 37244 - protein, 33 aa, Artificial Sequence
  Cyclic GFR-binding peptide
  MOD_RES (30)..(32): Xaa is C or S
SQDLEPISILYLIGKTPKIKFKYEMIVKSXKXS

SEQ ID NO: 37245 - protein, 30 aa, Artificial Sequence; identical to SEQ ID NO: 8568
  Cyclic GFR-binding peptide
  MOD_RES (1)..(2): Xaa is C or S

SEQ ID NO: 37246 - protein, 36 aa, Artificial Sequence; identical to SEQ ID NO: 8569
  Cyclic GFR-binding peptide
  MOD_RES (2)..(3)..(35): Xaa is C or S

SEQ ID NO: 37247 - protein, 38 aa, Artificial Sequence; identical to SEQ ID NO: 8570
  Cyclic GFR-binding peptide
  MOD_RES (5)..(6)..(37): Xaa is C or S

SEQ ID NO: 37248 - protein, 34 aa, Artificial Sequence
  Cyclic GFR-binding peptide
  MOD_RES (4)..(5): Xaa is C or S
SKAXXVPTKLNAISILYFDKGVVTYLKKYRGMAV

SEQ ID NO: 37249 - protein, 29 aa, Artificial Sequence
  Cyclic GFR-binding peptide
VPQALEPISILYLVGRKPKVKFKYEMIVR

SEQ ID NO: 37250 - protein, 27 aa, Artificial Sequence
  Cyclic GFR-binding peptide
VPTELEPISMLYLDENEKVVKFKYEDM

SEQ ID NO: 37251 - protein, 26 aa, Artificial Sequence
  Cyclic GFR-binding peptide
PTELNAISMLYFDEYDKVVLKKYREM

SEQ ID NO: 37252 - protein, 28 aa, Artificial Sequence
  Cyclic GFR-binding peptide
VPQALNAISILYFVGRKPKVLKKYRMIV

SEQ ID NO: 37253 - protein, 24 aa, Artificial Sequence
  Cyclic GFR-binding peptide
SPISILYIVGRTPKVYKQYEMVVK

SEQ ID NO: 37254 - protein, 29 aa, Artificial Sequence
  Cyclic GFR-binding peptide
  MOD_RES (1)..(1): Xaa is C or S
XVPQALNAISILYFVGRKPKVLKKYRMIV

SEQ ID NO: 37255 - protein, 40 aa, Artificial Sequence
  Cyclic GFR-binding peptide
  MOD_RES (4)..(5)..(37)..(39): Xaa is C or S
PKAXXAPTKLEPISVLYLDSSNNVIKFKYENMVVKAXGXH

SEQ ID NO: 37256 - protein, 27 aa, Artificial Sequence
  Cyclic GFR-binding peptide
VPTKLSPISVLYIDDMGVPTYKQYEEG

SEQ ID NO: 37257 - protein, 34 aa, Artificial Sequence
  Cyclic GFR-binding peptide
  MOD_RES (5)..(6): Xaa is C or S
IPKAXXVPTELEPISMLYLDEYDKVVKFKYEEMV

SEQ ID NO: 37258 - protein, 36 aa, Artificial Sequence
  Cyclic GFR-binding peptide
  MOD_RES (1)..(34)..(36): Xaa is C or S
XVPTKLEPISVLYLDDMGVPTKFKYEEGMSVAEXGX

SEQ ID NO: 37259 - protein, 29 aa, Artificial Sequence
  Cyclic GFR-binding peptide
  MOD_RES (1)..(1): Xaa is C or S
XVPARLSPISILYKDAANNVVLKYHYDMV

SEQ ID NO: 37260 - protein, 33 aa, Artificial Sequence
  Cyclic GFR-binding peptide
  MOD_RES (30)..(32): Xaa is C or S
KLSPISVLYIDDMGVPTYKQYEEGMSVAEXGXR

SEQ ID NO: 37261 - protein, 24 aa, Artificial Sequence
  Cyclic GFR-binding peptide
TELNAISMLYFDEYDKVVLKKYRE

SEQ ID NO: 37262 - protein, 33 aa, Artificial Sequence
  Cyclic GFR-binding peptide
  MOD_RES (2)..(3): Xaa is C or S
PXXVPQDLSPISILYIVGRTPKVYKQYEMVVKS

SEQ ID NO: 37263 - protein, 24 aa, Artificial Sequence
  Cyclic GFR-binding peptide
TELSPISMLYIDEYDKVVYKQYEE

SEQ ID NO: 37264 - protein, 34 aa, Artificial Sequence
  Cyclic GFR-binding peptide
  MOD_RES (6)..(7): Xaa is C or S
KASKAXXVPTKLSPISILYKDKGVVTYLKYHYGM

SEQ ID NO: 37265 - protein, 23 aa, Artificial Sequence
  Cyclic GFR-binding peptide
KLNAISVLYFDSSNNVILKKYRN

SEQ ID NO: 37266 - protein, 36 aa, Artificial Sequence
  Cyclic GFR-binding peptide
  MOD_RES (5)..(6): Xaa is C or S
APASXXVPARLEPISILYLDAANNVVKFKYEDMVVE

SEQ ID NO: 37267 - protein, 31 aa, Artificial Sequence; identical to SEQ ID NO: 8585
  Cyclic GFR-binding peptide
  MOD_RES (29)..(31): Xaa is C or S

SEQ ID NO: 37268 - protein, 29 aa, Artificial Sequence
  Cyclic GFR-binding peptide
  MOD_RES (2)..(3): Xaa is C or S
AXXVPTKLSPISILYKDKGVVTYLKYHYG

SEQ ID NO: 37269 - protein, 33 aa, Artificial Sequence; identical to SEQ ID NO: 8586
  Cyclic GFR-binding peptide
  MOD_RES (31)..(33): Xaa is C or S

SEQ ID NO: 37270 - protein, 41 aa, Artificial Sequence
  Cyclic GFR-binding peptide
  MOD_RES (5)..(6)..(38)..(40): Xaa is C or S
VPKPXXAPTKLEPISVLYLDDSSNVIKFKYENMVVRSXGXH

SEQ ID NO: 37271 - protein, 32 aa, Artificial Sequence
  Cyclic GFR-binding peptide
  MOD_RES (29)..(31): Xaa is C or S
ELSPISMLYIDENEKVVYKQYEDMVVEGXGXR

SEQ ID NO: 37272 - protein, 25 aa, Artificial Sequence
  Cyclic GFR-binding peptide
SPISMLYKDENEKVVLKYHYDMVVE

SEQ ID NO: 37273 - protein, 29 aa, Artificial Sequence
  Cyclic GFR-binding peptide
  MOD_RES (1)..(1): Xaa is C or S
XVPTELSPISMLYKDENEKVVLKYHYDMV

SEQ ID NO: 37274 - protein, 35 aa, Artificial Sequence
  Cyclic GFR-binding peptide
  MOD_RES (6)..(7): Xaa is C or S
ASASPXXVSQDLSPISILYIIGKTPKIYKQYEMIV

SEQ ID NO: 37275 - protein, 36 aa, Artificial Sequence
  Cyclic GFR-binding peptide
  MOD_RES (6)..(7): Xaa is C or S
ASAAPXXVPQALSPISILYIVGRKPKVYKQYEMIVR

SEQ ID NO: 37276 - protein, 26 aa, Artificial Sequence
  Cyclic GFR-binding peptide
SQDLEPISILYLIGKTPKIKFKYEMI

SEQ ID NO: 37277 - protein, 28 aa, Artificial Sequence
  Cyclic GFR-binding peptide
  MOD_RES (28)..(28): Xaa is C or S
LEPISVLYLDDSSNVIKFKYENMVVRAX

SEQ ID NO: 37278 - protein, 22 aa, Artificial Sequence
  Cyclic GFR-binding peptide
EPISMLYLDEYDKVVKFKYEEM

SEQ ID NO: 37279 - protein, 36 aa, Artificial Sequence
  Cyclic GFR-binding peptide
  MOD_RES (6)..(7): Xaa is C or S
YVPKPXXAPTKLSPISVLYIDDSSNVIYKQYENMVV

SEQ ID NO: 37280 - protein, 32 aa, Artificial Sequence; identical to SEQ ID NO: 8595
  Cyclic GFR-binding peptide
  MOD_RES (31)..(31): Xaa is C or S

SEQ ID NO: 37281 - protein, 28 aa, Artificial Sequence
  Cyclic GFR-binding peptide
TQLSPISVLYIDDSSNVIYKQYENMVVR

SEQ ID NO: 37282 - protein, 37 aa, Artificial Sequence
  Cyclic GFR-binding peptide
  MOD_RES (1)..(2)..(34)..(36): Xaa is C or S
XXAPTQLEPISVLYLDDSSNVIKFKYENMVVRAXGXH

SEQ ID NO: 37283 - protein, 30 aa, Artificial Sequence; identical to SEQ ID NO: 8597
  Cyclic GFR-binding peptide
  MOD_RES (30)..(30): Xaa is C or S

SEQ ID NO: 37284 - protein, 39 aa, Artificial Sequence
  Cyclic GFR-binding peptide
  MOD_RES (4)..(5)..(37)..(39): Xaa is C or S
SKAXXVPTKLNAISILYFDKGVVTYLKKYRGMAVSEXGX

SEQ ID NO: 37285 - protein, 33 aa, Artificial Sequence; identical to SEQ ID NO: 8598
  Cyclic GFR-binding peptide
  MOD_RES (30)..(32): Xaa is C or S

SEQ ID NO: 37286 - protein, 35 aa, Artificial Sequence; identical to SEQ ID NO: 8602
  Cyclic GFR-binding peptide
  MOD_RES (5)..(6): Xaa is C or S

SEQ ID NO: 37287 - protein, 23 aa, Artificial Sequence
  Cyclic GFR-binding peptide
EPISVLYLDDSSNVIKFKYENMV

SEQ ID NO: 37288 - protein, 29 aa, Artificial Sequence
  Cyclic GFR-binding peptide
  MOD_RES (1)..(2): Xaa is C or S
XXVPARLSPISILYKDAANNVVLKYHYDM

SEQ ID NO: 37289 - protein, 36 aa, Artificial Sequence
  Cyclic GFR-binding peptide
  MOD_RES (6)..(7): Xaa is C or S
KVGKAXXVPTKLSPISVLYIDDMGVPTYKQYEEGMS

SEQ ID NO: 37290 - protein, 35 aa, Artificial Sequence
  Cyclic GFR-binding peptide
  MOD_RES (6)..(7): Xaa is C or S
KASKAXXVPTKLNAISILYFDKGVVTYLKKYRGMA

SEQ ID NO: 37291 - protein, 23 aa, Artificial Sequence
  Cyclic GFR-binding peptide
LEPISMLYLDENEKVVKFKYEDM

SEQ ID NO: 37292 - protein, 33 aa, Artificial Sequence
  Cyclic GFR-binding peptide
  MOD_RES (2)..(3): Xaa is C or S
PXXVSQDLSPISILYIIGKTPKIYKQYEMIVKS

SEQ ID NO: 37293 - protein, 25 aa, Artificial Sequence
  Cyclic GFR-binding peptide
TKLSPISVLYIDDSSNVIYKQYENM

SEQ ID NO: 37294 - protein, 29 aa, Artificial Sequence
  Cyclic GFR-binding peptide
  MOD_RES (3)..(4): Xaa is C or S
APXXVPQALSPISILYIVGRKPKVYKQYE

SEQ ID NO: 37295 - protein, 28 aa, Artificial Sequence
  Cyclic GFR-binding peptide
TELEPISMLYLDENEKVVKFKYEDMVVE

SEQ ID NO: 37296 - protein, 32 aa, Artificial Sequence; identical to SEQ ID NO: 8609
  Cyclic GFR-binding peptide
  MOD_RES (29)..(31): Xaa is C or S

SEQ ID NO: 37297 - protein, 37 aa, Artificial Sequence
  Cyclic GFR-binding peptide
  MOD_RES (3)..(4)..(36): Xaa is C or S
ASXXVPARLSPISILYKDAANNVVLKYHYDMVVEAXG

SEQ ID NO: 37298 - protein, 32 aa, Artificial Sequence; identical to SEQ ID NO: 8611
  Cyclic GFR-binding peptide
  MOD_RES (5)..(6): Xaa is C or S

SEQ ID NO: 37299 - protein, 34 aa, Artificial Sequence; identical to SEQ ID NO: 8612
  Cyclic GFR-binding peptide
  MOD_RES (5)..(6): Xaa is C or S

SEQ ID NO: 37300 - protein, 38 aa, Artificial Sequence; identical to SEQ ID NO: 8613
  Cyclic GFR-binding peptide
  MOD_RES (2)..(3)..(35)..(37): Xaa is C or S

SEQ ID NO: 37301 - protein, 40 aa, Artificial Sequence
  Cyclic GFR-binding peptide
  MOD_RES (3)..(4)..(37)..(39): Xaa is C or S
KAXXVPTKLSPISVLYIDDMGVPTYKQYEEGMSVAEXGXR

SEQ ID NO: 37302 - protein, 33 aa, Artificial Sequence
  Cyclic GFR-binding peptide
  MOD_RES (5)..(5): Xaa is C or S
TKPTXAPTKLEPISVLYLDDSSNVIKFKYENMV

SEQ ID NO: 37303 - protein, 32 aa, Artificial Sequence
  Cyclic GFR-binding peptide
  MOD_RES (30)..(32): Xaa is C or S
TQLSPISVLYIDDSSNVIYKQYENMVVRAXGX

SEQ ID NO: 37304 - protein, 37 aa, Artificial Sequence
  Cyclic GFR-binding peptide
  MOD_RES (6)..(7): Xaa is C or S
KASKAXXVPTKLSPISILYKDKGVVTYLKYHYGMAVS

SEQ ID NO: 37305 - protein, 32 aa, Artificial Sequence; identical to SEQ ID NO: 8618
  Cyclic GFR-binding peptide
  MOD_RES (31)..(31): Xaa is C or S

SEQ ID NO: 37306 - protein, 31 aa, Artificial Sequence
  Cyclic GFR-binding peptide
  MOD_RES (3)..(4): Xaa is C or S
KAXXVPTELSPISMLYIDEYDKVVYKQYEEM

SEQ ID NO: 37307 - protein, 35 aa, Artificial Sequence; identical to SEQ ID NO: 8621
  Cyclic GFR-binding peptide
  MOD_RES (3)..(4)..(35): Xaa is C or S

SEQ ID NO: 37308 - protein, 28 aa, Artificial Sequence
  Cyclic GFR-binding peptide
ARLNAISILYFDAANNVVLKKYRDMVVE

SEQ ID NO: 37309 - protein, 36 aa, Artificial Sequence
  Cyclic GFR-binding peptide
  MOD_RES (1)..(34)..(36): Xaa is C or S
XVPTKLSPISVLYIDDMGVPTYKQYEEGMSVAEXGX

SEQ ID NO: 37310 - protein, 22 aa, Artificial Sequence
  Cyclic GFR-binding peptide
ELSPISMLYKDENEKVVLKYHY

SEQ ID NO: 37311 - protein, 22 aa, Artificial Sequence
  Cyclic GFR-binding peptide
LSPISMLYIDEYDKVVYKQYEE

SEQ ID NO: 37312 - protein, 31 aa, Artificial Sequence
  Cyclic GFR-binding peptide
  MOD_RES (4)..(5): Xaa is C or S
GKAXXVPTKLEPISVLYLDDMGVPTKFKYEE

SEQ ID NO: 37313 - protein, 33 aa, Artificial Sequence; identical to SEQ ID NO: 8627
  Cyclic GFR-binding peptide
  MOD_RES (6)..(7): Xaa is C or S

SEQ ID NO: 37314 - protein, 35 aa, Artificial Sequence
  Cyclic GFR-binding peptide
  MOD_RES (5)..(6): Xaa is C or S
ASKAXXVPTKLSPISILYIDKGVVTYYKQYEGMAV

SEQ ID NO: 37315 - protein, 32 aa, Artificial Sequence
  Cyclic GFR-binding peptide
  MOD_RES (1)..(32): Xaa is C or S
XVPQDLEPISILYLVGRTPKVKFKYEMVVKSX

SEQ ID NO: 37316 - protein, 26 aa, Artificial Sequence
  Cyclic GFR-binding peptide
LNAISVLYFDDMGVPTLKKYREGMSV

SEQ ID NO: 37317 - protein, 31 aa, Artificial Sequence; identical to SEQ ID NO: 8634
  Cyclic GFR-binding peptide
  MOD_RES (3)..(4): Xaa is C or S

SEQ ID NO: 37318 - protein, 37 aa, Artificial Sequence; identical to SEQ ID NO: 8635
  Cyclic GFR-binding peptide
  MOD_RES (5)..(6)..(37): Xaa is C or S

SEQ ID NO: 37319 - protein, 22 aa, Artificial Sequence
  Cyclic GFR-binding peptide
LNAISMLYFDEYDKVVLKKYRE

SEQ ID NO: 37320 - protein, 25 aa, Artificial Sequence
  Cyclic GFR-binding peptide
LNAISVLYFDSSNNVILKKYRNMVV

SEQ ID NO: 37321 - protein, 27 aa, Artificial Sequence
  Cyclic GFR-binding peptide
VPARLSPISILYKDAANNVVLKYHYDM

SEQ ID NO: 37322 - protein, 31 aa, Artificial Sequence
  Cyclic GFR-binding peptide
  MOD_RES (3)..(4): Xaa is C or S
SPXXVPQDLSPISILYIVGRTPKVYKQYEMV

SEQ ID NO: 37323 - protein, 38 aa, Artificial Sequence
  Cyclic GFR-binding peptide
  MOD_RES (6)..(7): Xaa is C or S
AAPASXXVPARLSPISILYKDAANNVVLKYHYDMVVEA

SEQ ID NO: 37324 - protein, 30 aa, Artificial Sequence
  Cyclic GFR-binding peptide
  MOD_RES (4)..(4): Xaa is C or S
KPTXAPTKLSPISVLYIDDSSNVIYKQYEN

SEQ ID NO: 37325 - protein, 36 aa, Artificial Sequence
  Cyclic GFR-binding peptide
  MOD_RES (4)..(5): Xaa is C or S
PKPXXAPTKLEPISVLYLDDSSNVIKFKYENMVVRS

SEQ ID NO: 37326 - protein, 33 aa, Artificial Sequence
  Cyclic GFR-binding peptide
  MOD_RES (32)..(32): Xaa is C or S
VPARLSPISILYKDAANNVVLKYHYDMVVEAXG

SEQ ID NO: 37327 - protein, 38 aa, Artificial Sequence
  Cyclic GFR-binding peptide
  MOD_RES (3)..(4)..(35)..(37): Xaa is C or S
SPXXVPQDLEPISILYLVGRTPKVKFKYEMVVKSXKXS

SEQ ID NO: 37328 - protein, 31 aa, Artificial Sequence
  Cyclic GFR-binding peptide
  MOD_RES (30)..(30): Xaa is C or S
TKLEPISVLYLDSSNNVIKFKYENMVVKAXG

SEQ ID NO: 37329 - protein, 30 aa, Artificial Sequence
  Cyclic GFR-binding peptide
  MOD_RES (2)..(2): Xaa is C or S
TXAPTKLEPISVLYLDDSSNVIKFKYENMV

SEQ ID NO: 37330 - protein, 29 aa, Artificial Sequence
  Cyclic GFR-binding peptide
PTKLNAISILYFDKGVVTYLKKYRGMAVS

SEQ ID NO: 37331 - protein, 39 aa, Artificial Sequence
  Cyclic GFR-binding peptide
  MOD_RES (5)..(37)..(39): Xaa is C or S
TKPTXAPTKLEPISVLYLDDSSNVIKFKYENMVVRSXGX

SEQ ID NO: 37332 - protein, 34 aa, Artificial Sequence
  Cyclic GFR-binding peptide
  MOD_RES (3)..(3): Xaa is C or S
PTXAPTKLSPISVLYIDDSSNVIYKQYENMVVRS

SEQ ID NO: 37333 - protein, 27 aa, Artificial Sequence
  Cyclic GFR-binding peptide
  MOD_RES (26)..(26): Xaa is C or S
EPISILYLVGRKPKVKFKYEMIVRSXK

SEQ ID NO: 37334 - protein, 28 aa, Artificial Sequence
  Cyclic GFR-binding peptide
LNAISVLYFDDMGVPTLKKYREGMSVAE

SEQ ID NO: 37335 - protein, 21 aa, Artificial Sequence
  Cyclic GFR-binding peptide
EPISVLYLDDMGVPTKFKYEE

SEQ ID NO: 37336 - protein, 26 aa, Artificial Sequence
  Cyclic GFR-binding peptide
VPTELEPISMLYLDENEKVVKFKYED

SEQ ID NO: 37337 - protein, 23 aa, Artificial Sequence
  Cyclic GFR-binding peptide
NAISILYFVGRKPKVLKKYRMIV

SEQ ID NO: 37338 - protein, 35 aa, Artificial Sequence
  Cyclic GFR-binding peptide
  MOD_RES (4)..(5): Xaa is C or S
PKAXXVPTELSPISMLYIDENEKVVYKQYEDMVVE

SEQ ID NO: 37339 - protein, 26 aa, Artificial Sequence
  Cyclic GFR-binding peptide
SPISVLYIDDSSNVIYKQYENMVVRS

SEQ ID NO: 37340 - protein, 27 aa, Artificial Sequence
  Cyclic GFR-binding peptide
VPTELSPISMLYIDEYDKVVYKQYEEM

SEQ ID NO: 37341 - protein, 24 aa, Artificial Sequence
  Cyclic GFR-binding peptide
PTELSPISMLYKDEYDKVVLKYHY

SEQ ID NO: 37342 - protein, 39 aa, Artificial Sequence; identical to SEQ ID NO: 8646
  Cyclic GFR-binding peptide
  MOD_RES (6)..(38): Xaa is C or S

SEQ ID NO: 37343 - protein, 31 aa, Artificial Sequence
  Cyclic GFR-binding peptide
  MOD_RES (30)..(30): Xaa is C or S
TELEPISMLYLDENEKVVKFKYEDMVVEGXG

SEQ ID NO: 37344 - protein, 34 aa, Artificial Sequence
  Cyclic GFR-binding peptide
  MOD_RES (6)..(7): Xaa is C or S
TVPKPXXAPTQLEPISVLYLDDSSNVIKFKYENM

SEQ ID NO: 37345 - protein, 28 aa, Artificial Sequence
  Cyclic GFR-binding peptide
TELSPISMLYKDENEKVVLKYHYDMVVE

SEQ ID NO: 37346 - protein, 29 aa, Artificial Sequence
  Cyclic GFR-binding peptide
  MOD_RES (27)..(29): Xaa is C or S
LNAISILYFVGRTPKVLKKYRMVVKSXKX

SEQ ID NO: 37347 - protein, 28 aa, Artificial Sequence
  Cyclic GFR-binding peptide
  MOD_RES (28)..(28): Xaa is C or S
DLNAISILYFIGKTPKILKKYRMIVKSX

SEQ ID NO: 37348 - protein, 40 aa, Artificial Sequence; identical to SEQ ID NO: 8654
  Cyclic GFR-binding peptide
  MOD_RES (6)..(7)..(38)..(40): Xaa is C or S

SEQ ID NO: 37349 - protein, 26 aa, Artificial Sequence
  Cyclic GFR-binding peptide
SPISVLYIDDSSNVIYKQYENMVVRA

SEQ ID NO: 37350 - protein, 38 aa, Artificial Sequence; identical to SEQ ID NO: 8656
  Cyclic GFR-binding peptide
  MOD_RES (6)..(7)..(38): Xaa is C or S

SEQ ID NO: 37351 - protein, 27 aa, Artificial Sequence
  Cyclic GFR-binding peptide
PTELSPISMLYKDENEKVVLKYHYDMV

SEQ ID NO: 37352 - protein, 31 aa, Artificial Sequence
  Cyclic GFR-binding peptide
  MOD_RES (29)..(31): Xaa is C or S
QDLEPISILYLIGKTPKIKFKYEMIVKSXKX

SEQ ID NO: 37353 - protein, 39 aa, Artificial Sequence; identical to SEQ ID NO: 8659
  Cyclic GFR-binding peptide
  MOD_RES (5)..(6)..(37)..(39): Xaa is C or S

SEQ ID NO: 37354 - protein, 38 aa, Artificial Sequence; identical to SEQ ID NO: 8660
  Cyclic GFR-binding peptide
  MOD_RES (3)..(4)..(37): Xaa is C or S

SEQ ID NO: 37355 - protein, 29 aa, Artificial Sequence
  Cyclic GFR-binding peptide
  MOD_RES (2)..(3): Xaa is C or S
AXXVPTELSPISMLYIDENEKVVYKQYED

SEQ ID NO: 37356 - protein, 28 aa, Artificial Sequence
  Cyclic GFR-binding peptide
  MOD_RES (1)..(2): Xaa is C or S
XXVPARLNAISILYFDAANNVVLKKYRD

SEQ ID NO: 37357 - protein, 26 aa, Artificial Sequence
  Cyclic GFR-binding peptide
PTKLNAISVLYFDDMGVPTLKKYREG

SEQ ID NO: 37358 - protein, 30 aa, Artificial Sequence
  Cyclic GFR-binding peptide
PARLEPISILYLDAANNVVKFKYEDMVVEA

SEQ ID NO: 37359 - protein, 27 aa, Artificial Sequence
  Cyclic GFR-binding peptide
APTKLSPISVLYKDDSSNVILKYHYNM

SEQ ID NO: 37360 - protein, 33 aa, Artificial Sequence; identical to SEQ ID NO: 8665
  Cyclic GFR-binding peptide
  MOD_RES (4)..(4): Xaa is C or S

SEQ ID NO: 37361 - protein, 38 aa, Artificial Sequence; identical to SEQ ID NO: 8669
  Cyclic GFR-binding peptide
  MOD_RES (4)..(5)..(36)..(38): Xaa is C or S

SEQ ID NO: 37362 - protein, 37 aa, Artificial Sequence; identical to SEQ ID NO: 8671
  Cyclic GFR-binding peptide
  MOD_RES (4)..(5)..(37): Xaa is C or S

SEQ ID NO: 37363 - protein, 29 aa, Artificial Sequence
  Cyclic GFR-binding peptide
  MOD_RES (29)..(29): Xaa is C or S
QALEPISILYLVGRKPKVKFKYEMIVRSX

SEQ ID NO: 37364 - protein, 27 aa, Artificial Sequence
  Cyclic GFR-binding peptide
PARLSPISILYKDAANNVVLKYHYDMV

SEQ ID NO: 37365 - protein, 31 aa, Artificial Sequence; identical to SEQ ID NO: 8673
  Cyclic GFR-binding peptide
  MOD_RES (28)..(30): Xaa is C or S

SEQ ID NO: 37366 - protein, 27 aa, Artificial Sequence
  Cyclic GFR-binding peptide
PQALEPISILYLVGRKPKVKFKYEMIV

SEQ ID NO: 37367 - protein, 32 aa, Artificial Sequence; identical to SEQ ID NO: 8674
  Cyclic GFR-binding peptide
  MOD_RES (4)..(5): Xaa is C or S

SEQ ID NO: 37368 - protein, 24 aa, Artificial Sequence
  Cyclic GFR-binding peptide
TQLSPISVLYKDDSSNVILKYHYN

SEQ ID NO: 37369 - protein, 28 aa, Artificial Sequence
  Cyclic GFR-binding peptide
QALEPISILYLVGRKPKVKFKYEMIVRS

SEQ ID NO: 37370 - protein, 34 aa, Artificial Sequence; identical to SEQ ID NO: 8677
  Cyclic GFR-binding peptide
  MOD_RES (31)..(33): Xaa is C or S

SEQ ID NO: 37371 - protein, 36 aa, Artificial Sequence; identical to SEQ ID NO: 8678
  Cyclic GFR-binding peptide
  MOD_RES (3)..(4)..(36): Xaa is C or S

SEQ ID NO: 37372 - protein, 30 aa, Artificial Sequence
  Cyclic GFR-binding peptide
  MOD_RES (28)..(30): Xaa is C or S
LEPISILYLDAANNVVKFKYEDMVVEAXGX

SEQ ID NO: 37373 - protein, 32 aa, Artificial Sequence
  Cyclic GFR-binding peptide
  MOD_RES (31)..(31): Xaa is C or S
VPQDLSPISILYIVGRTPKVYKQYEMVVKSXK

SEQ ID NO: 37374 - protein, 37 aa, Artificial Sequence; identical to SEQ ID NO: 8683
  Cyclic GFR-binding peptide
  MOD_RES (1)..(2)..(34)..(36): Xaa is C or S

SEQ ID NO: 37375 - protein, 35 aa, Artificial Sequence; identical to SEQ ID NO: 8684
  Cyclic GFR-binding peptide
  MOD_RES (3)..(4)..(35): Xaa is C or S

SEQ ID NO: 37376 - protein, 37 aa, Artificial Sequence
  Cyclic GFR-binding peptide
  MOD_RES (3)..(4)..(37): Xaa is C or S
KAXXVPTKLSPISVLYIDDMGVPTYKQYEEGMSVAEX

SEQ ID NO: 37377 - protein, 37 aa, Artificial Sequence; identical to SEQ ID NO: 8687
  Cyclic GFR-binding peptide
  MOD_RES (5)..(6)..(37): Xaa is C or S

SEQ ID NO: 37378 - protein, 26 aa, Artificial Sequence
  Cyclic GFR-binding peptide
PTKLSPISVLYIDDMGVPTYKQYEEG

SEQ ID NO: 37379 - protein, 37 aa, Artificial Sequence; identical to SEQ ID NO: 8690
  Cyclic GFR-binding peptide
  MOD_RES (4)..(5)..(37): Xaa is C or S

SEQ ID NO: 37380 - protein, 21 aa, Artificial Sequence
  Cyclic GFR-binding peptide
LSPISVLYIDDSSNVIYKQYE

SEQ ID NO: 37381 - protein, 21 aa, Artificial Sequence
  Cyclic GFR-binding peptide
LSPISVLYIDDMGVPTYKQYE

SEQ ID NO: 37382 - protein, 28 aa, Artificial Sequence
  Cyclic GFR-binding peptide
VPTELSPISMLYKDENEKVVLKYHYDMV

SEQ ID NO: 37383 - protein, 35 aa, Artificial Sequence
  Cyclic GFR-binding peptide
  MOD_RES (1)..(2)..(34): Xaa is C or S
XXAPTKLSPISVLYIDSSNNVIYKQYENMVVKAXG

SEQ ID NO: 37384 - protein, 31 aa, Artificial Sequence
  Cyclic GFR-binding peptide
  MOD_RES (2)..(3): Xaa is C or S
AXXVPTKLSPISILYKDKGVVTYLKYHYGMA

SEQ ID NO: 37385 - protein, 29 aa, Artificial Sequence
  Cyclic GFR-binding peptide
  MOD_RES (1)..(2): Xaa is C or S
XXAPTKLSPISVLYIDDSSNVIYKQYENM

SEQ ID NO: 37386 - protein, 31 aa, Artificial Sequence
  Cyclic GFR-binding peptide
  MOD_RES (3)..(4): Xaa is C or S
SPXXVSQDLSPISILYIIGKTPKIYKQYEMI

SEQ ID NO: 37387 - protein, 42 aa, Artificial Sequence; identical to SEQ ID NO: 8695
  Cyclic GFR-binding peptide
  MOD_RES (6)..(7)..(39)..(41): Xaa is C or S

SEQ ID NO: 37388 - protein, 33 aa, Artificial Sequence
  Cyclic GFR-binding peptide
  MOD_RES (30)..(32): Xaa is C or S
TKLSPISVLYIDDSSNVIYKQYENMVVRSXGXH

SEQ ID NO: 37389 - protein, 38 aa, Artificial Sequence; identical to SEQ ID NO: 8696
  Cyclic GFR-binding peptide
  MOD_RES (4)..(5)..(37): Xaa is C or S

SEQ ID NO: 37390 - protein, 31 aa, Artificial Sequence
  Cyclic GFR-binding peptide
  MOD_RES (1)..(1): Xaa is C or S
XVPTKLSPISILYKDKGVVTYLKYHYGMAVS

SEQ ID NO: 37391 - protein, 28 aa, Artificial Sequence
  Cyclic GFR-binding peptide
  MOD_RES (2)..(3): Xaa is C or S
AXXVPTELEPISMLYLDEYDKVVKFKYE

SEQ ID NO: 37392 - protein, 30 aa, Artificial Sequence
  Cyclic GFR-binding peptide
  MOD_RES (1)..(1): Xaa is C or S
XVPQALEPISILYLVGRKPKVKFKYEMIVR

SEQ ID NO: 37393 - protein, 33 aa, Artificial Sequence
  Cyclic GFR-binding peptide
  MOD_RES (1)..(2): Xaa is C or S
XXVPTKLEPISVLYLDDMGVPTKFKYEEGMSVA

SEQ ID NO: 37394 - protein, 21 aa, Artificial Sequence
  Cyclic GFR-binding peptide
SPISVLYKDDSSNVILKYHYN

SEQ ID NO: 37395 - protein, 37 aa, Artificial Sequence
  Cyclic GFR-binding peptide
  MOD_RES (1)..(2)..(34)..(36): Xaa is C or S
XXAPTQLSPISVLYIDDSSNVIYKQYENMVVRAXGXH

SEQ ID NO: 37396 - protein, 27 aa, Artificial Sequence
  Cyclic GFR-binding peptide
PQALNAISILYFVGRKPKVLKKYRMIV

SEQ ID NO: 37397 - protein, 35 aa, Artificial Sequence
  Cyclic GFR-binding peptide
  MOD_RES (1)..(33)..(35): Xaa is C or S
XVPTELEPISMLYLDENEKVVKFKYEDMVVEGXGX

SEQ ID NO: 37398 - protein, 35 aa, Artificial Sequence; identical to SEQ ID NO: 8703
  Cyclic GFR-binding peptide
  MOD_RES (6)..(7): Xaa is C or S

SEQ ID NO: 37399 - protein, 31 aa, Artificial Sequence
  Cyclic GFR-binding peptide
  MOD_RES (1)..(2): Xaa is C or S
XXAPTKLSPISVLYIDSSNNVIYKQYENMVV

SEQ ID NO: 37400 - protein, 37 aa, Artificial Sequence
  Cyclic GFR-binding peptide
  MOD_RES (4)..(5)..(36): Xaa is C or S
AAPXXVPQALSPISILYIVGRKPKVYKQYEMIVRSXK

SEQ ID NO: 37401 - protein, 31 aa, Artificial Sequence
  Cyclic GFR-binding peptide
  MOD_RES (31)..(31): Xaa is C or S
TKLEPISVLYLDDMGVPTKFKYEEGMSVAEX

SEQ ID NO: 37402 - protein, 24 aa, Artificial Sequence
  Cyclic GFR-binding peptide
PTKLSPISVLYIDSSNNVIYKQYE

SEQ ID NO: 37403 - protein, 32 aa, Artificial Sequence
  Cyclic GFR-binding peptide
  MOD_RES (1)..(2): Xaa is C or S
XXVPTKLSPISILYKDKGVVTYLKYHYGMAVS

SEQ ID NO: 37404 - protein, 24 aa, Artificial Sequence
  Cyclic GFR-binding peptide
SPISVLYKDSSNNVILKYHYNMVV

SEQ ID NO: 37405 - protein, 34 aa, Artificial Sequence
  Cyclic GFR-binding peptide
  MOD_RES (1)..(32)..(34): Xaa is C or S
XVPQDLEPISILYLVGRTPKVKFKYEMVVKSXKX

SEQ ID NO: 37406 - protein, 29 aa, Artificial Sequence
  Cyclic GFR-binding peptide
  MOD_RES (28)..(28): Xaa is C or S
NAISVLYFDDMGVPTLKKYREGMSVAEXG

SEQ ID NO: 37407 - protein, 35 aa, Artificial Sequence; identical to SEQ ID NO: 8708
  Cyclic GFR-binding peptide
  MOD_RES (1)..(33)..(35): Xaa is C or S

SEQ ID NO: 37408 - protein, 32 aa, Artificial Sequence; identical to SEQ ID NO: 8709
  Cyclic GFR-binding peptide
  MOD_RES (31)..(31): Xaa is C or S

SEQ ID NO: 37409 - protein, 37 aa, Artificial Sequence
  Cyclic GFR-binding peptide
  MOD_RES (4)..(5)..(37): Xaa is C or S
PKAXXAPTKLEPISVLYLDSSNNVIKFKYENMVVKAX

SEQ ID NO: 37410 - protein, 29 aa, Artificial Sequence
  Cyclic GFR-binding peptide
  MOD_RES (27)..(29): Xaa is C or S
SPISVLYKDDSSNVILKYHYNMVVRAXGX

SEQ ID NO: 37411 - protein, 34 aa, Artificial Sequence
  Cyclic GFR-binding peptide
  MOD_RES (1)..(33): Xaa is C or S
XAPTKLEPISVLYLDSSNNVIKFKYENMVVKAXG

SEQ ID NO: 37412 - protein, 31 aa, Artificial Sequence
  Cyclic GFR-binding peptide
  MOD_RES (28)..(30): Xaa is C or S
LSPISMLYIDEYDKVVYKQYEEMVVEGXGXR

SEQ ID NO: 37413 - protein, 36 aa, Artificial Sequence
  Cyclic GFR-binding peptide
  MOD_RES (5)..(6): Xaa is C or S
VGKAXXVPTKLEPISVLYLDDMGVPTKFKYEEGMSV

SEQ ID NO: 37414 - protein, 36 aa, Artificial Sequence
  Cyclic GFR-binding peptide
  MOD_RES (1)..(2)..(34)..(36): Xaa is C or S
XXVPTKLSPISILYKDKGVVTYLKYHYGMAVSEXGX

SEQ ID NO: 37415 - protein, 32 aa, Artificial Sequence
  Cyclic GFR-binding peptide
  MOD_RES (5)..(6): Xaa is C or S
VPKAXXAPTKLSPISVLYIDSSNNVIYKQYEN

SEQ ID NO: 37416 - protein, 32 aa, Artificial Sequence; identical to SEQ ID NO: 8715
  Cyclic GFR-binding peptide
  MOD_RES (6)..(7): Xaa is C or S

SEQ ID NO: 37417 - protein, 28 aa, Artificial Sequence
  Cyclic GFR-binding peptide
  MOD_RES (27)..(27): Xaa is C or S
SPISVLYIDSSNNVIYKQYENMVVKAXG

SEQ ID NO: 37418 - protein, 36 aa, Artificial Sequence
  Cyclic GFR-binding peptide
  MOD_RES (6)..(7): Xaa is C or S
AAPASXXVPARLEPISILYLDAANNVVKFKYEDMVV

SEQ ID NO: 37419 - protein, 28 aa, Artificial Sequence
  Cyclic GFR-binding peptide
  MOD_RES (27)..(27): Xaa is C or S
EPISILYLDAANNVVKFKYEDMVVEAXG

SEQ ID NO: 37420 - protein, 36 aa, Artificial Sequence
  Cyclic GFR-binding peptide
  MOD_RES (3)..(4)..(36): Xaa is C or S
KAXXAPTKLEPISVLYLDSSNNVIKFKYENMVVKAX

SEQ ID NO: 37421 - protein, 42 aa, Artificial Sequence
  Cyclic GFR-binding peptide
  MOD_RES (6)..(7)..(39)..(41): Xaa is C or S
SIPKAXXVPTELSPISMLYIDEYDKVVYKQYEEMVVEGXGXR

SEQ ID NO: 37422 - protein, 32 aa, Artificial Sequence
  Cyclic GFR-binding peptide
  MOD_RES (6)..(7): Xaa is C or S
AAPASXXVPARLNAISILYFDAANNVVLKKYR

SEQ ID NO: 37423 - protein, 31 aa, Artificial Sequence
  Cyclic GFR-binding peptide
  MOD_RES (28)..(30): Xaa is C or S
DLSPISILYIVGRTPKVYKQYEMVVKSXKXS

SEQ ID NO: 37424 - protein, 24 aa, Artificial Sequence
  Cyclic GFR-binding peptide
KLSPISVLYKDDSSNVILKYHYNM

SEQ ID NO: 37425 - protein, 42 aa, Artificial Sequence; identical to SEQ ID NO: 8720
  Cyclic GFR-binding peptide
  MOD_RES (6)..(7)..(39)..(41): Xaa is C or S

SEQ ID NO: 37426 - protein, 36 aa, Artificial Sequence
  Cyclic GFR-binding peptide
  MOD_RES (1)..(2)..(34)..(36): Xaa is C or S
XXAPTKLEPISVLYLDSSNNVIKFKYENMVVKAXGX

SEQ ID NO: 37427 - protein, 32 aa, Artificial Sequence
  Cyclic GFR-binding peptide
  MOD_RES (4)..(5): Xaa is C or S
PKAXXAPTKLEPISVLYLDSSNNVIKFKYENM

SEQ ID NO: 37428 - protein, 36 aa, Artificial Sequence; identical to SEQ ID NO: 8722
  Cyclic GFR-binding peptide
  MOD_RES (6)..(7): Xaa is C or S

SEQ ID NO: 37429 - protein, 33 aa, Artificial Sequence; identical to SEQ ID NO: 8723
  Cyclic GFR-binding peptide
  MOD_RES (5)..(6): Xaa is C or S

SEQ ID NO: 37430 - protein, 28 aa, Artificial Sequence
  Cyclic GFR-binding peptide
VPARLSPISILYKDAANNVVLKYHYDMV

SEQ ID NO: 37431 - protein, 40 aa, Artificial Sequence; identical to SEQ ID NO: 8724
  Cyclic GFR-binding peptide
  MOD_RES (6)..(7)..(39): Xaa is C or S

SEQ ID NO: 37432 - protein, 27 aa, Artificial Sequence
  Cyclic GFR-binding peptide
VPTELNAISMLYFDEYDKVVLKKYREM

SEQ ID NO: 37433 - protein, 37 aa, Artificial Sequence; identical to SEQ ID NO: 8727
  Cyclic GFR-binding peptide
  MOD_RES (1)..(2)..(34)..(36): Xaa is C or S

SEQ ID NO: 37434 - protein, 35 aa, Artificial Sequence; identical to SEQ ID NO: 8729
  Cyclic GFR-binding peptide
  MOD_RES (4)..(5): Xaa is C or S

SEQ ID NO: 37435 - protein, 30 aa, Artificial Sequence; identical to SEQ ID NO: 8733
  Cyclic GFR-binding peptide

SEQ ID NO: 37436 - protein, 26 aa, Artificial Sequence
  Cyclic GFR-binding peptide
LSPISVLYIDDSSNVIYKQYENMVVR

SEQ ID NO: 37437 - protein, 29 aa, Artificial Sequence
  Cyclic GFR-binding peptide
  MOD_RES (29)..(29): Xaa is C or S
KLSPISVLYIDDSSNVIYKQYENMVVRSX

SEQ ID NO: 37438 - protein, 41 aa, Artificial Sequence
  Cyclic GFR-binding peptide
  MOD_RES (6)..(7)..(39)..(41): Xaa is C or S
TVPKPXXAPTQLEPISVLYLDDSSNVIKFKYENMVVRAXGX

SEQ ID NO: 37439 - protein, 34 aa, Artificial Sequence; identical to SEQ ID NO: 8737
  Cyclic GFR-binding peptide
  MOD_RES (1)..(2): Xaa is C or S

SEQ ID NO: 37440 - protein, 30 aa, Artificial Sequence; identical to SEQ ID NO: 8740
  Cyclic GFR-binding peptide
  MOD_RES (2)..(3): Xaa is C or S

SEQ ID NO: 37441 - protein, 35 aa, Artificial Sequence; identical to SEQ ID NO: 8742
  Cyclic GFR-binding peptide
  MOD_RES (3)..(4): Xaa is C or S

SEQ ID NO: 37442 - protein, 34 aa, Artificial Sequence
  Cyclic GFR-binding peptide
  MOD_RES (1)..(32)..(34): Xaa is C or S
XVSQDLEPISILYLIGKTPKIKFKYEMIVKSXKX

SEQ ID NO: 37443 - protein, 31 aa, Artificial Sequence
  Cyclic GFR-binding peptide
  MOD_RES (30)..(30): Xaa is C or S
TKLSPISILYKDKGVVTYLKYHYGMAVSEXG

SEQ ID NO: 37444 - protein, 29 aa, Artificial Sequence
  Cyclic GFR-binding peptide
  MOD_RES (3)..(4): Xaa is C or S
KPXXAPTQLSPISVLYIDDSSNVIYKQYE

SEQ ID NO: 37445 - protein, 30 aa, Artificial Sequence
  Cyclic GFR-binding peptide
  MOD_RES (27)..(29): Xaa is C or S
SPISVLYIDSSNNVIYKQYENMVVKAXGXH

SEQ ID NO: 37446 - protein, 28 aa, Artificial Sequence
  Cyclic GFR-binding peptide
  MOD_RES (2)..(3): Xaa is C or S
AXXVPTELSPISMLYKDEYDKVVLKYHY

SEQ ID NO: 37447 - protein, 29 aa, Artificial Sequence
  Cyclic GFR-binding peptide
  MOD_RES (27)..(29): Xaa is C or S
SPISVLYIDDSSNVIYKQYENMVVRSXGX

SEQ ID NO: 37448 - protein, 26 aa, Artificial Sequence
  Cyclic GFR-binding peptide
  MOD_RES (26)..(26): Xaa is C or S
SPISILYIVGRTPKVYKQYEMVVKSX

SEQ ID NO: 37449 - protein, 28 aa, Artificial Sequence
  Cyclic GFR-binding peptide
  MOD_RES (27)..(27): Xaa is C or S
SPISVLYKDSSNNVILKYHYNMVVKAXG

SEQ ID NO: 37450 - protein, 30 aa, Artificial Sequence; identical to SEQ ID NO: 8751
  Cyclic GFR-binding peptide
  MOD_RES (30)..(30): Xaa is C or S

SEQ ID NO: 37451 - protein, 24 aa, Artificial Sequence
  Cyclic GFR-binding peptide
LSPISILYIIGKTPKIYKQYEMIV

SEQ ID NO: 37452 - protein, 36 aa, Artificial Sequence
  Cyclic GFR-binding peptide
  MOD_RES (3)..(4)..(36): Xaa is C or S
KAXXVPTKLSPISILYIDKGVVTYYKQYEGMAVSEX

SEQ ID NO: 37453 - protein, 28 aa, Artificial Sequence
  Cyclic GFR-binding peptide
  MOD_RES (28)..(28): Xaa is C or S
LEPISILYLDAANNVVKFKYEDMVVEAX

SEQ ID NO: 37454 - protein, 32 aa, Artificial Sequence
  Cyclic GFR-binding peptide
  MOD_RES (3)..(4): Xaa is C or S
KPXXAPTQLEPISVLYLDDSSNVIKFKYENMV

SEQ ID NO: 37455 - protein, 38 aa, Artificial Sequence; identical to SEQ ID NO: 8758
  Cyclic GFR-binding peptide
  MOD_RES (6)..(7)..(38): Xaa is C or S

SEQ ID NO: 37456 - protein, 33 aa, Artificial Sequence
  Cyclic GFR-binding peptide
  MOD_RES (1)..(2): Xaa is C or S
XXAPTKLEPISVLYLDSSNNVIKFKYENMVVKA

SEQ ID NO: 37457 - protein, 24 aa, Artificial Sequence
  Cyclic GFR-binding peptide
PQALSPISILYIVGRKPKVYKQYE

SEQ ID NO: 37458 - protein, 29 aa, Artificial Sequence
  Cyclic GFR-binding peptide
SQDLEPISILYLIGKTPKIKFKYEMIVKS

SEQ ID NO: 37459 - protein, 33 aa, Artificial Sequence
  Cyclic GFR-binding peptide
  MOD_RES (31)..(33): Xaa is C or S
PTKLSPISVLYIDSSNNVIYKQYENMVVKAXGX

SEQ ID NO: 37460 - protein, 33 aa, Artificial Sequence
  Cyclic GFR-binding peptide
  MOD_RES (3)..(4): Xaa is C or S
APXXVPQALSPISILYIVGRKPKVYKQYEMIVR

SEQ ID NO: 37461 - protein, 34 aa, Artificial Sequence
  Cyclic GFR-binding peptide
  MOD_RES (4)..(5): Xaa is C or S
ASPXXVSQDLSPISILYIIGKTPKIYKQYEMIVK

SEQ ID NO: 37462 - protein, 34 aa, Artificial Sequence; identical to SEQ ID NO: 8760
  Cyclic GFR-binding peptide
  MOD_RES (2)..(3): Xaa is C or S

SEQ ID NO: 37463 - protein, 36 aa, Artificial Sequence; identical to SEQ ID NO: 8762
  Cyclic GFR-binding peptide
  MOD_RES (5)..(6): Xaa is C or S

SEQ ID NO: 37464 - protein, 31 aa, Artificial Sequence
  Cyclic GFR-binding peptide
  MOD_RES (31)..(31): Xaa is C or S
VSQDLEPISILYLIGKTPKIKFKYEMIVKSX

SEQ ID NO: 37465 - protein, 22 aa, Artificial Sequence
  Cyclic GFR-binding peptide
SPISVLYKDSSNNVILKYHYNM

SEQ ID NO: 37466 - protein, 24 aa, Artificial Sequence
  Cyclic GFR-binding peptide
NAISILYFDAANNVVLKKYRDMVV

SEQ ID NO: 37467 - protein, 21 aa, Artificial Sequence
  Cyclic GFR-binding peptide
NAISILYFVGRKPKVLKKYRM

SEQ ID NO: 37468 - protein, 33 aa, Artificial Sequence
  Cyclic GFR-binding peptide
  MOD_RES (31)..(33): Xaa is C or S
VPQDLEPISILYLVGRTPKVKFKYEMVVKSXKX

SEQ ID NO: 37469 - protein, 31 aa, Artificial Sequence
  Cyclic GFR-binding peptide
  MOD_RES (30)..(30): Xaa is C or S
TKLSPISILYIDKGVVTYYKQYEGMAVSEXG

SEQ ID NO: 37470 - protein, 37 aa, Artificial Sequence; identical to SEQ ID NO: 8768
  Cyclic GFR-binding peptide
  MOD_RES (3)..(4)..(36): Xaa is C or S

SEQ ID NO: 37471 - protein, 32 aa, Artificial Sequence
  Cyclic GFR-binding peptide
  MOD_RES (6)..(7): Xaa is C or S
KASKAXXVPTKLNAISILYFDKGVVTYLKKYR

SEQ ID NO: 37472 - protein, 31 aa, Artificial Sequence
  Cyclic GFR-binding peptide
  MOD_RES (3)..(4): Xaa is C or S
KPXXAPTKLEPISVLYLDDSSNVIKFKYENM

SEQ ID NO: 37473 - protein, 30 aa, Artificial Sequence; identical to SEQ ID NO: 8770
  Cyclic GFR-binding peptide
  MOD_RES (27)..(29): Xaa is C or S

SEQ ID NO: 37474 - protein, 35 aa, Artificial Sequence; identical to SEQ ID NO: 8771
  Cyclic GFR-binding peptide
  MOD_RES (2)..(3)..(35): Xaa is C or S

SEQ ID NO: 37475 - protein, 32 aa, Artificial Sequence
  Cyclic GFR-binding peptide
  MOD_RES (30)..(32): Xaa is C or S
TKLSPISVLYIDDSSNVIYKQYENMVVRSXGX

SEQ ID NO: 37476 - protein, 34 aa, Artificial Sequence
  Cyclic GFR-binding peptide
  MOD_RES (32)..(34): Xaa is C or S
VPTELSPISMLYIDENEKVVYKQYEDMVVEGXGX

SEQ ID NO: 37477 - protein, 30 aa, Artificial Sequence
  Cyclic GFR-binding peptide
  MOD_RES (2)..(3): Xaa is C or S
AXXAPTKLSPISVLYIDSSNNVIYKQYENM

SEQ ID NO: 37478 - protein, 41 aa, Artificial Sequence; identical to SEQ ID NO: 8776
  Cyclic GFR-binding peptide
  MOD_RES (6)..(7)..(38)..(40): Xaa is C or S

SEQ ID NO: 37479 - protein, 24 aa, Artificial Sequence
  Cyclic GFR-binding peptide
PTELEPISMLYLDEYDKVVKFKYE

SEQ ID NO: 37480 - protein, 33 aa, Artificial Sequence
  Cyclic GFR-binding peptide
  MOD_RES (6)..(7): Xaa is C or S
ASAAPXXVPQALEPISILYLVGRKPKVKFKYEM

SEQ ID NO: 37481 - protein, 24 aa, Artificial Sequence
  Cyclic GFR-binding peptide
DLEPISILYLVGRTPKVKFKYEMV

SEQ ID NO: 37482 - protein, 22 aa, Artificial Sequence
  Cyclic GFR-binding peptide
LSPISVLYKDSSNNVILKYHYN

SEQ ID NO: 37483 - protein, 37 aa, Artificial Sequence
  Cyclic GFR-binding peptide
  MOD_RES (2)..(3)..(34)..(36): Xaa is C or S
PXXVPQDLEPISILYLVGRTPKVKFKYEMVVKSXKXS

SEQ ID NO: 37484 - protein, 34 aa, Artificial Sequence; identical to SEQ ID NO: 8781
  Cyclic GFR-binding peptide
  MOD_RES (3)..(4): Xaa is C or S

SEQ ID NO: 37485 - protein, 36 aa, Artificial Sequence
  Cyclic GFR-binding peptide
  MOD_RES (4)..(5): Xaa is C or S
PASXXVPARLEPISILYLDAANNVVKFKYEDMVVEA

SEQ ID NO: 37486 - protein, 33 aa, Artificial Sequence
  Cyclic GFR-binding peptide
  MOD_RES (31)..(33): Xaa is C or S
VSQDLEPISILYLIGKTPKIKFKYEMIVKSXKX

SEQ ID NO: 37487 - protein, 40 aa, Artificial Sequence
  Cyclic GFR-binding peptide
  MOD_RES (4)..(5)..(37)..(39): Xaa is C or S
SKAXXVPTKLSPISILYIDKGVVTYYKQYEGMAVSEXGXR

SEQ ID NO: 37488 - protein, 33 aa, Artificial Sequence
  Cyclic GFR-binding peptide
  MOD_RES (2)..(2): Xaa is C or S
TXAPTKLEPISVLYLDDSSNVIKFKYENMVVRS

SEQ ID NO: 37489 - protein, 28 aa, Artificial Sequence
  Cyclic GFR-binding peptide
ELNAISMLYFDEYDKVVLKKYREMVVEG

SEQ ID NO: 37490 - protein, 31 aa, Artificial Sequence; identical to SEQ ID NO: 8784
  Cyclic GFR-binding peptide
  MOD_RES (4)..(5): Xaa is C or S

SEQ ID NO: 37491 - protein, 31 aa, Artificial Sequence
  Cyclic GFR-binding peptide
  MOD_RES (30)..(30): Xaa is C or S
ARLSPISILYKDAANNVVLKYHYDMVVEAXG

SEQ ID NO: 37492 - protein, 32 aa, Artificial Sequence
  Cyclic GFR-binding peptide
  MOD_RES (1)..(32): Xaa is C or S
XVSQDLEPISILYLIGKTPKIKFKYEMIVKSX

SEQ ID NO: 37493 - protein, 30 aa, Artificial Sequence
  Cyclic GFR-binding peptide
  MOD_RES (27)..(29): Xaa is C or S
EPISVLYLDSSNNVIKFKYENMVVKAXGXH

SEQ ID NO: 37494 - protein, 37 aa, Artificial Sequence
  Cyclic GFR-binding peptide
  MOD_RES (3)..(4)..(36): Xaa is C or S
KAXXVPTELSPISMLYIDENEKVVYKQYEDMVVEGXG

SEQ ID NO: 37495 - protein, 33 aa, Artificial Sequence
  Cyclic GFR-binding peptide
  MOD_RES (1)..(32): Xaa is C or S
XVPQDLEPISILYLVGRTPKVKFKYEMVVKSXK

SEQ ID NO: 37496 - protein, 27 aa, Artificial Sequence
  Cyclic GFR-binding peptide
KLNAISILYFDKGVVTYLKKYRGMAVS

SEQ ID NO: 37497 - protein, 39 aa, Artificial Sequence
  Cyclic GFR-binding peptide
  MOD_RES (6)..(38): Xaa is C or S
VTKPTXAPTKLSPISVLYIDDSSNVIYKQYENMVVRSXG

SEQ ID NO: 37498 - protein, 31 aa, Artificial Sequence
  Cyclic GFR-binding peptide
  MOD_RES (28)..(30): Xaa is C or S
LEPISMLYLDEYDKVVKFKYEEMVVEGXGXR

SEQ ID NO: 37499 - protein, 30 aa, Artificial Sequence
  Cyclic GFR-binding peptide
  MOD_RES (3)..(4): Xaa is C or S
KAXXVPTELEPISMLYLDENEKVVKFKYED

SEQ ID NO: 37500 - protein, 30 aa, Artificial Sequence; identical to SEQ ID NO: 8791
  Cyclic GFR-binding peptide
  MOD_RES (30)..(30): Xaa is C or S

SEQ ID NO: 37501 - protein, 22 aa, Artificial Sequence
  Cyclic GFR-binding peptide
ELEPISMLYLDENEKVVKFKYE

SEQ ID NO: 37502 - protein, 30 aa, Artificial Sequence; identical to SEQ ID NO: 8792
  Cyclic GFR-binding peptide

SEQ ID NO: 37503 - protein, 25 aa, Artificial Sequence
  Cyclic GFR-binding peptide
SQDLEPISILYLIGKTPKIKFKYEM

SEQ ID NO: 37504 - protein, 27 aa, Artificial Sequence
  Cyclic GFR-binding peptide
LSPISVLYIDDMGVPTYKQYEEGMSVA

SEQ ID NO: 37505 - protein, 28 aa, Artificial Sequence
  Cyclic GFR-binding peptide
VPQALEPISILYLVGRKPKVKFKYEMIV

SEQ ID NO: 37506 - protein, 25 aa, Artificial Sequence
  Cyclic GFR-binding peptide
PTELNAISMLYFDEYDKVVLKKYRE

SEQ ID NO: 37507 - protein, 32 aa, Artificial Sequence; identical to SEQ ID NO: 8797
  Cyclic GFR-binding peptide
  MOD_RES (1)..(32): Xaa is C or S

SEQ ID NO: 37508 - protein, 28 aa, Artificial Sequence
  Cyclic GFR-binding peptide
  MOD_RES (1)..(1): Xaa is C or S
XVPARLSPISILYKDAANNVVLKYHYDM

SEQ ID NO: 37509 - protein, 30 aa, Artificial Sequence
  Cyclic GFR-binding peptide
VPQDLEPISILYLVGRTPKVKFKYEMVVKS

SEQ ID NO: 37510 - protein, 33 aa, Artificial Sequence
  Cyclic GFR-binding peptide
  MOD_RES (30)..(32): Xaa is C or S
TKLNAISILYFDKGVVTYLKKYRGMAVSEXGXR

SEQ ID NO: 37511 - protein, 31 aa, Artificial Sequence; identical to SEQ ID NO: 8798
  Cyclic GFR-binding peptide
  MOD_RES (31)..(31): Xaa is C or S

SEQ ID NO: 37512 - protein, 23 aa, Artificial Sequence
  Cyclic GFR-binding peptide
TELNAISMLYFDEYDKVVLKKYR

SEQ ID NO: 37513 - protein, 31 aa, Artificial Sequence
  Cyclic GFR-binding peptide
  MOD_RES (28)..(30): Xaa is C or S
LNAISILYFDAANNVVLKKYRDMVVEAXGXR

SEQ ID NO: 37514 - protein, 24 aa, Artificial Sequence
  Cyclic GFR-binding peptide
LSPISVLYIDDMGVPTYKQYEEGM

SEQ ID NO: 37515 - protein, 30 aa, Artificial Sequence; identical to SEQ ID NO: 8800
  Cyclic GFR-binding peptide
  MOD_RES (4)..(5): Xaa is C or S

SEQ ID NO: 37516 - protein, 30 aa, Artificial Sequence; identical to SEQ ID NO: 8804
  Cyclic GFR-binding peptide
  MOD_RES (3)..(4): Xaa is C or S

SEQ ID NO: 37517 - protein, 36 aa, Artificial Sequence; identical to SEQ ID NO: 8805
  Cyclic GFR-binding peptide
  MOD_RES (1)..(2)..(33)..(35): Xaa is C or S

SEQ ID NO: 37518 - protein, 32 aa, Artificial Sequence
  Cyclic GFR-binding peptide
  MOD_RES (2)..(3): Xaa is C or S
PXXVPQDLSPISILYIVGRTPKVYKQYEMVVK

SEQ ID NO: 37519 - protein, 40 aa, Artificial Sequence; identical to SEQ ID NO: 8807
  Cyclic GFR-binding peptide
  MOD_RES (6)..(7)..(38)..(40): Xaa is C or S

SEQ ID NO: 37520 - protein, 34 aa, Artificial Sequence; identical to SEQ ID NO: 8808
  Cyclic GFR-binding peptide
  MOD_RES (4)..(5): Xaa is C or S

SEQ ID NO: 37521 - protein, 30 aa, Artificial Sequence; identical to SEQ ID NO: 8810
  Cyclic GFR-binding peptide
  MOD_RES (29)..(29): Xaa is C or S

SEQ ID NO: 37522 - protein, 28 aa, Artificial Sequence
  Cyclic GFR-binding peptide
  MOD_RES (27)..(27): Xaa is C or S
SPISVLYKDDSSNVILKYHYNMVVRSXG

SEQ ID NO: 37523 - protein, 27 aa, Artificial Sequence
  Cyclic GFR-binding peptide
PTQLEPISVLYLDDSSNVIKFKYENMV

SEQ ID NO: 37524 - protein, 32 aa, Artificial Sequence
  Cyclic GFR-binding peptide
  MOD_RES (30)..(32): Xaa is C or S
SQDLSPISILYIIGKTPKIYKQYEMIVKSXKX

SEQ ID NO: 37525 - protein, 33 aa, Artificial Sequence
  Cyclic GFR-binding peptide
  MOD_RES (4)..(5): Xaa is C or S
AAPXXVPQALSPISILYIVGRKPKVYKQYEMIV

SEQ ID NO: 37526 - protein, 31 aa, Artificial Sequence
  Cyclic GFR-binding peptide
  MOD_RES (29)..(31): Xaa is C or S
QALEPISILYLVGRKPKVKFKYEMIVRSXKX

SEQ ID NO: 37527 - protein, 37 aa, Artificial Sequence; identical to SEQ ID NO: 8814
  Cyclic GFR-binding peptide
  MOD_RES (2)..(3)..(34)..(36): Xaa is C or S

SEQ ID NO: 37528 - protein, 35 aa, Artificial Sequence
  Cyclic GFR-binding peptide
  MOD_RES (4)..(5): Xaa is C or S
PKPXXAPTKLSPISVLYIDDSSNVIYKQYENMVVR

SEQ ID NO: 37529 - protein, 32 aa, Artificial Sequence
  Cyclic GFR-binding peptide
  MOD_RES (3)..(4): Xaa is C or S
APXXVPQALEPISILYLVGRKPKVKFKYEMIV

SEQ ID NO: 37530 - protein, 30 aa, Artificial Sequence
  Cyclic GFR-binding peptide
  MOD_RES (4)..(5): Xaa is C or S
PKPXXAPTQLSPISVLYIDDSSNVIYKQYE

SEQ ID NO: 37531 - protein, 25 aa, Artificial Sequence
  Cyclic GFR-binding peptide
LSPISVLYIDSSNNVIYKQYENMVV

SEQ ID NO: 37532 - protein, 24 aa, Artificial Sequence
  Cyclic GFR-binding peptide
TELEPISMLYLDEYDKVVKFKYEE

SEQ ID NO: 37533 - protein, 29 aa, Artificial Sequence
  Cyclic GFR-binding peptide
  MOD_RES (29)..(29): Xaa is C or S
QLEPISVLYLDDSSNVIKFKYENMVVRAX

SEQ ID NO: 37534 - protein, 35 aa, Artificial Sequence; identical to SEQ ID NO: 8816
  Cyclic GFR-binding peptide
  MOD_RES (1)..(2)..(33)..(35): Xaa is C or S

SEQ ID NO: 37535 - protein, 30 aa, Artificial Sequence; identical to SEQ ID NO: 8817
  Cyclic GFR-binding peptide
  MOD_RES (29)..(29): Xaa is C or S

SEQ ID NO: 37536 - protein, 38 aa, Artificial Sequence; identical to SEQ ID NO: 8819
  Cyclic GFR-binding peptide
  MOD_RES (5)..(6)..(38): Xaa is C or S

SEQ ID NO: 37537 - protein, 29 aa, Artificial Sequence
  Cyclic GFR-binding peptide
  MOD_RES (28)..(28): Xaa is C or S
LSPISVLYKDDSSNVILKYHYNMVVRSXG

SEQ ID NO: 37538 - protein, 29 aa, Artificial Sequence
  Cyclic GFR-binding peptide
  MOD_RES (26)..(28): Xaa is C or S
SPISILYKVGRTPKVLKYHYMVVKSXKXS

SEQ ID NO: 37539 - protein, 29 aa, Artificial Sequence
  Cyclic GFR-binding peptide
KLSPISVLYIDDMGVPTYKQYEEGMSVAE

SEQ ID NO: 37540 - protein, 29 aa, Artificial Sequence
  Cyclic GFR-binding peptide
PTKLSPISILYKDKGVVTYLKYHYGMAVS

SEQ ID NO: 37541 - protein, 25 aa, Artificial Sequence
  Cyclic GFR-binding peptide
TKLSPISVLYKDDSSNVILKYHYNM

SEQ ID NO: 37542 - protein, 29 aa, Artificial Sequence
  Cyclic GFR-binding peptide
  MOD_RES (26)..(28): Xaa is C or S
NAISILYFVGRKPKVLKKYRMIVRSXKXS

SEQ ID NO: 37543 - protein, 29 aa, Artificial Sequence
  Cyclic GFR-binding peptide
  MOD_RES (27)..(29): Xaa is C or S
EPISVLYLDDSSNVIKFKYENMVVRAXGX

SEQ ID NO: 37544 - protein, 30 aa, Artificial Sequence; identical to SEQ ID NO: 8826
  Cyclic GFR-binding peptide

SEQ ID NO: 37545 - protein, 25 aa, Artificial Sequence
  Cyclic GFR-binding peptide
SPISMLYIDEYDKVVYKQYEEMVVE

SEQ ID NO: 37546 - protein, 28 aa, Artificial Sequence
  Cyclic GFR-binding peptide
  MOD_RES (28)..(28): Xaa is C or S
ALSPISILYIVGRKPKVYKQYEMIVRSX

SEQ ID NO: 37547 - protein, 23 aa, Artificial Sequence
  Cyclic GFR-binding peptide
KLSPISVLYKDDSSNVILKYHYN

SEQ ID NO: 37548 - protein, 22 aa, Artificial Sequence
  Cyclic GFR-binding peptide
LEPISMLYLDEYDKVVKFKYEE

SEQ ID NO: 37549 - protein, 32 aa, Artificial Sequence
  Cyclic GFR-binding peptide
  MOD_RES (2)..(3): Xaa is C or S
AXXAPTKLSPISVLYIDSSNNVIYKQYENMVV

SEQ ID NO: 37550 - protein, 30 aa, Artificial Sequence
  Cyclic GFR-binding peptide
  MOD_RES (2)..(3): Xaa is C or S
SXXVPARLNAISILYFDAANNVVLKKYRDM

SEQ ID NO: 37551 - protein, 29 aa, Artificial Sequence
  Cyclic GFR-binding peptide
  MOD_RES (2)..(2): Xaa is C or S
TXAPTKLSPISVLYIDDSSNVIYKQYENM

SEQ ID NO: 37552 - protein, 22 aa, Artificial Sequence
  Cyclic GFR-binding peptide
KLSPISVLYIDDMGVPTYKQYE

SEQ ID NO: 37553 - protein, 38 aa, Artificial Sequence; identical to SEQ ID NO: 8835
  Cyclic GFR-binding peptide
  MOD_RES (6)..(38): Xaa is C or S

SEQ ID NO: 37554 - protein, 31 aa, Artificial Sequence; identical to SEQ ID NO: 8836
  Cyclic GFR-binding peptide
  MOD_RES (3)..(4): Xaa is C or S

SEQ ID NO: 37555 - protein, 37 aa, Artificial Sequence
  Cyclic GFR-binding peptide
  MOD_RES (3)..(4)..(35)..(37): Xaa is C or S
SPXXVSQDLSPISILYIIGKTPKIYKQYEMIVKSXKX

SEQ ID NO: 37556 - protein, 30 aa, Artificial Sequence
  Cyclic GFR-binding peptide
  MOD_RES (1)..(2): Xaa is C or S
XXVPTKLEPISVLYLDDMGVPTKFKYEEGM

SEQ ID NO: 37557 - protein, 31 aa, Artificial Sequence
  Cyclic GFR-binding peptide
  MOD_RES (30)..(30): Xaa is C or S
TELSPISMLYIDENEKVVYKQYEDMVVEGXG

SEQ ID NO: 37558 - protein, 35 aa, Artificial Sequence
  Cyclic GFR-binding peptide
  MOD_RES (1)..(33)..(35): Xaa is C or S
XVPARLNAISILYFDAANNVVLKKYRDMVVEAXGX

SEQ ID NO: 37559 - protein, 35 aa, Artificial Sequence; identical to SEQ ID NO: 8838
  Cyclic GFR-binding peptide
  MOD_RES (1)..(32)..(34): Xaa is C or S

SEQ ID NO: 37560 - protein, 30 aa, Artificial Sequence
  Cyclic GFR-binding peptide
  MOD_RES (4)..(5): Xaa is C or S
SKAXXVPTKLSPISILYKDKGVVTYLKYHY

SEQ ID NO: 37561 - protein, 34 aa, Artificial Sequence
  Cyclic GFR-binding peptide
  MOD_RES (1)..(2)..(34): Xaa is C or S
XXVPARLNAISILYFDAANNVVLKKYRDMVVEAX

SEQ ID NO: 37562 - protein, 30 aa, Artificial Sequence
  Cyclic GFR-binding peptide
  MOD_RES (28)..(30): Xaa is C or S
LSPISMLYIDEYDKVVYKQYEEMVVEGXGX

SEQ ID NO: 37563 - protein, 31 aa, Artificial Sequence
  Cyclic GFR-binding peptide
  MOD_RES (2)..(3): Xaa is C or S
PXXVPQDLEPISILYLVGRTPKVKFKYEMVV

SEQ ID NO: 37564 - protein, 29 aa, Artificial Sequence
  Cyclic GFR-binding peptide
  MOD_RES (3)..(4): Xaa is C or S
SPXXVPQDLNAISILYFVGRTPKVLKKYR

SEQ ID NO: 37565 - protein, 35 aa, Artificial Sequence; identical to SEQ ID NO: 8842
  Cyclic GFR-binding peptide
  MOD_RES (1)..(33)..(35): Xaa is C or S

SEQ ID NO: 37566 - protein, 29 aa, Artificial Sequence
  Cyclic GFR-binding peptide
  MOD_RES (2)..(3): Xaa is C or S
AXXAPTKLSPISVLYKDSSNNVILKYHYN

SEQ ID NO: 37567 - protein, 38 aa, Artificial Sequence
  Cyclic GFR-binding peptide
  MOD_RES (7)..(7): Xaa is C or S
HVTKPTXAPTKLSPISVLYIDDSSNVIYKQYENMVVRS

SEQ ID NO: 37568 - protein, 27 aa, Artificial Sequence
  Cyclic GFR-binding peptide
  MOD_RES (27)..(27): Xaa is C or S
LNAISILYFVGRTPKVLKKYRMVVKSX

SEQ ID NO: 37569 - protein, 28 aa, Artificial Sequence
  Cyclic GFR-binding peptide
VPTELNAISMLYFDENEKVVLKKYRDMV

SEQ ID NO: 37570 - protein, 41 aa, Artificial Sequence; identical to SEQ ID NO: 8854
  Cyclic GFR-binding peptide
  MOD_RES (5)..(6)..(38)..(40): Xaa is C or S

SEQ ID NO: 37571 - protein, 29 aa, Artificial Sequence
  Cyclic GFR-binding peptide
  MOD_RES (1)..(1): Xaa is C or S
XVPQDLSPISILYKVGRTPKVLKYHYMVV

SEQ ID NO: 37572 - protein, 33 aa, Artificial Sequence
  Cyclic GFR-binding peptide
  MOD_RES (1)..(2)..(33): Xaa is C or S
XXVPQDLSPISILYIVGRTPKVYKQYEMVVKSX

SEQ ID NO: 37573 - protein, 30 aa, Artificial Sequence
  Cyclic GFR-binding peptide
  MOD_RES (28)..(30): Xaa is C or S
DLEPISILYLVGRTPKVKFKYEMVVKSXKX

SEQ ID NO: 37574 - protein, 26 aa, Artificial Sequence
  Cyclic GFR-binding peptide
  MOD_RES (26)..(26): Xaa is C or S
SPISILYKVGRTPKVLKYHYMVVKSX

SEQ ID NO: 37575 - protein, 21 aa, Artificial Sequence
  Cyclic GFR-binding peptide
LSPISMLYIDENEKVVYKQYE

SEQ ID NO: 37576 - protein, 27 aa, Artificial Sequence
  Cyclic GFR-binding peptide
  MOD_RES (26)..(26): Xaa is C or S
SPISILYKIGKTPKILKYHYMIVKSXK

SEQ ID NO: 37577 - protein, 24 aa, Artificial Sequence
  Cyclic GFR-binding peptide
LNAISILYFVGRKPKVLKKYRMIV

SEQ ID NO: 37578 - protein, 26 aa, Artificial Sequence
  Cyclic GFR-binding peptide
  MOD_RES (1)..(1): Xaa is C or S
XAPTKLSPISVLYIDDSSNVIYKQYE

SEQ ID NO: 37579 - protein, 34 aa, Artificial Sequence
  Cyclic GFR-binding peptide
  MOD_RES (4)..(5): Xaa is C or S
AAPXXVPQALSPISILYIVGRKPKVYKQYEMIVR

SEQ ID NO: 37580 - protein, 27 aa, Artificial Sequence
  Cyclic GFR-binding peptide
QDLNAISILYFVGRTPKVLKKYRMVVK

SEQ ID NO: 37581 - protein, 34 aa, Artificial Sequence; identical to SEQ ID NO: 8867
  Cyclic GFR-binding peptide
  MOD_RES (1)..(32)..(34): Xaa is C or S

SEQ ID NO: 37582 - protein, 34 aa, Artificial Sequence
  Cyclic GFR-binding peptide
  MOD_RES (31)..(33): Xaa is C or S
PARLEPISILYLDAANNVVKFKYEDMVVEAXGXR

SEQ ID NO: 37583 - protein, 32 aa, Artificial Sequence
  Cyclic GFR-binding peptide
  MOD_RES (4)..(4): Xaa is C or S
KPTXAPTKLSPISVLYIDDSSNVIYKQYENMV

SEQ ID NO: 37584 - protein, 35 aa, Artificial Sequence; identical to SEQ ID NO: 8869
  Cyclic GFR-binding peptide
  MOD_RES (5)..(6): Xaa is C or S

SEQ ID NO: 37585 - protein, 27 aa, Artificial Sequence
  Cyclic GFR-binding peptide
  MOD_RES (26)..(26): Xaa is C or S
SPISILYKVGRKPKVLKYHYMIVRSXK

SEQ ID NO: 37586 - protein, 32 aa, Artificial Sequence; identical to SEQ ID NO: 8874
  Cyclic GFR-binding peptide
  MOD_RES (6)..(7): Xaa is C or S

SEQ ID NO: 37587 - protein, 35 aa, Artificial Sequence
  Cyclic GFR-binding peptide
  MOD_RES (2)..(3)..(34): Xaa is C or S
PXXVSQDLSPISILYIIGKTPKIYKQYEMIVKSXK

SEQ ID NO: 37588 - protein, 34 aa, Artificial Sequence
  Cyclic GFR-binding peptide
  MOD_RES (31)..(33): Xaa is C or S
PTQLSPISVLYIDDSSNVIYKQYENMVVRAXGXH

SEQ ID NO: 37589 - protein, 31 aa, Artificial Sequence
  Cyclic GFR-binding peptide
  MOD_RES (30)..(30): Xaa is C or S
TQLSPISVLYIDDSSNVIYKQYENMVVRAXG

SEQ ID NO: 37590 - protein, 29 aa, Artificial Sequence
  Cyclic GFR-binding peptide
  MOD_RES (2)..(2): Xaa is C or S
TXAPTKLEPISVLYLDDSSNVIKFKYENM

SEQ ID NO: 37591 - protein, 29 aa, Artificial Sequence
  Cyclic GFR-binding peptide
TELSPISMLYKDENEKVVLKYHYDMVVEG

SEQ ID NO: 37592 - protein, 31 aa, Artificial Sequence
  Cyclic GFR-binding peptide
  MOD_RES (5)..(6): Xaa is C or S
APASXXVPARLEPISILYLDAANNVVKFKYE

SEQ ID NO: 37593 - protein, 28 aa, Artificial Sequence
  Cyclic GFR-binding peptide
  MOD_RES (2)..(3): Xaa is C or S
AXXVPTELNAISMLYFDENEKVVLKKYR

SEQ ID NO: 37594 - protein, 27 aa, Artificial Sequence
  Cyclic GFR-binding peptide
  MOD_RES (1)..(2): Xaa is C or S
XXAPTKLSPISVLYKDSSNNVILKYHY

SEQ ID NO: 37595 - protein, 42 aa, Artificial Sequence; identical to SEQ ID NO: 8884
  Cyclic GFR-binding peptide
  MOD_RES (5)..(6)..(39)..(41): Xaa is C or S

SEQ ID NO: 37596 - protein, 38 aa, Artificial Sequence
  Cyclic GFR-binding peptide
  MOD_RES (4)..(5)..(37): Xaa is C or S
PKAXXAPTKLEPISVLYLDSSNNVIKFKYENMVVKAXG

SEQ ID NO: 37597 - protein, 29 aa, Artificial Sequence
  Cyclic GFR-binding peptide
  MOD_RES (2)..(3): Xaa is C or S
AXXVPTKLNAISVLYFDDMGVPTLKKYRE

SEQ ID NO: 37598 - protein, 32 aa, Artificial Sequence; identical to SEQ ID NO: 8886
  Cyclic GFR-binding peptide
  MOD_RES (4)..(5): Xaa is C or S

SEQ ID NO: 37599 - protein, 30 aa, Artificial Sequence; identical to SEQ ID NO: 8890
  Cyclic GFR-binding peptide
  MOD_RES (28)..(30): Xaa is C or S

SEQ ID NO: 37600 - protein, 27 aa, Artificial Sequence
  Cyclic GFR-binding peptide
LSPISMLYKDENEKVVLKYHYDMVVEG

SEQ ID NO: 37601 - protein, 30 aa, Artificial Sequence
  Cyclic GFR-binding peptide
  MOD_RES (1)..(2): Xaa is C or S
XXVPTELEPISMLYLDEYDKVVKFKYEEMV

SEQ ID NO: 37602 - protein, 38 aa, Artificial Sequence
  Cyclic GFR-binding peptide
  MOD_RES (6)..(7): Xaa is C or S
YVPKPXXAPTKLSPISVLYIDDSSNVIYKQYENMVVRS

SEQ ID NO: 37603 - protein, 33 aa, Artificial Sequence; identical to SEQ ID NO: 8895
  Cyclic GFR-binding peptide
  MOD_RES (3)..(3): Xaa is C or S

SEQ ID NO: 37604 - protein, 26 aa, Artificial Sequence
  Cyclic GFR-binding peptide
SPISILYKDAANNVVLKYHYDMVVEA

SEQ ID NO: 37605 - protein, 30 aa, Artificial Sequence
  Cyclic GFR-binding peptide
  MOD_RES (1)..(2): Xaa is C or S
XXVPQDLSPISILYIVGRTPKVYKQYEMVV

SEQ ID NO: 37606 - protein, 38 aa, Artificial Sequence
  Cyclic GFR-binding peptide
  MOD_RES (6)..(7): Xaa is C or S
KASKAXXVPTKLNAISILYFDKGVVTYLKKYRGMAVSE

SEQ ID NO: 37607 - protein, 22 aa, Artificial Sequence
  Cyclic GFR-binding peptide
NAISILYFVGRTPKVLKKYRMV

SEQ ID NO: 37608 - protein, 27 aa, Artificial Sequence
  Cyclic GFR-binding peptide
  MOD_RES (1)..(1): Xaa is C or S
XVPTKLSPISILYKDKGVVTYLKYHYG

SEQ ID NO: 37609 - protein, 30 aa, Artificial Sequence; identical to SEQ ID NO: 8898
  Cyclic GFR-binding peptide
  MOD_RES (3)..(4): Xaa is C or S

SEQ ID NO: 37610 - protein, 41 aa, Artificial Sequence
  Cyclic GFR-binding peptide
  MOD_RES (6)..(7)..(39)..(41): Xaa is C or S
SIPKAXXVPTELSPISMLYIDEYDKVVYKQYEEMVVEGXGX

SEQ ID NO: 37611 - protein, 31 aa, Artificial Sequence
  Cyclic GFR-binding peptide
  MOD_RES (31)..(31): Xaa is C or S
PTELEPISMLYLDEYDKVVKFKYEEMVVEGX

SEQ ID NO: 37612 - protein, 32 aa, Artificial Sequence
  Cyclic GFR-binding peptide
  MOD_RES (32)..(32): Xaa is C or S
APTQLSPISVLYIDDSSNVIYKQYENMVVRAX

SEQ ID NO: 37613 - protein, 34 aa, Artificial Sequence
  Cyclic GFR-binding peptide
  MOD_RES (2)..(3): Xaa is C or S
AXXVPTKLEPISVLYLDDMGVPTKFKYEEGMSVA

SEQ ID NO: 37614 - protein, 39 aa, Artificial Sequence
  Cyclic GFR-binding peptide
  MOD_RES (6)..(7)..(39): Xaa is C or S
KIPKAXXVPTELEPISMLYLDENEKVVKFKYEDMVVEGX

SEQ ID NO: 37615 - protein, 42 aa, Artificial Sequence
  Cyclic GFR-binding peptide
  MOD_RES (6)..(7)..(39)..(41): Xaa is C or S
KIPKAXXVPTELSPISMLYIDENEKVVYKQYEDMVVEGXGXR

SEQ ID NO: 37616 - protein, 31 aa, Artificial Sequence
  Cyclic GFR-binding peptide
  MOD_RES (1)..(2): Xaa is C or S
XXVPTELEPISMLYLDENEKVVKFKYEDMVV

SEQ ID NO: 37617 - protein, 34 aa, Artificial Sequence
  Cyclic GFR-binding peptide
  MOD_RES (32)..(34): Xaa is C or S
PTKLEPISVLYLDDMGVPTKFKYEEGMSVAEXGX

SEQ ID NO: 37618 - protein, 35 aa, Artificial Sequence
  Cyclic GFR-binding peptide
  MOD_RES (4)..(4): Xaa is C or S
KPTXAPTKLSPISVLYIDDSSNVIYKQYENMVVRS

SEQ ID NO: 37619 - protein, 31 aa, Artificial Sequence
  Cyclic GFR-binding peptide
  MOD_RES (3)..(4): Xaa is C or S
KAXXVPTKLNAISILYFDKGVVTYLKKYRGM

SEQ ID NO: 37620 - protein, 38 aa, Artificial Sequence
  Cyclic GFR-binding peptide
  MOD_RES (5)..(6)..(37): Xaa is C or S
SASPXXVPQDLSPISILYIVGRTPKVYKQYEMVVKSXK

SEQ ID NO: 37621 - protein, 34 aa, Artificial Sequence
  Cyclic GFR-binding peptide
  MOD_RES (31)..(33): Xaa is C or S
PTELSPISMLYIDENEKVVYKQYEDMVVEGXGXR

SEQ ID NO: 37622 - protein, 31 aa, Artificial Sequence; identical to SEQ ID NO: 8909
  Cyclic GFR-binding peptide
  MOD_RES (3)..(4): Xaa is C or S

SEQ ID NO: 37623 - protein, 28 aa, Artificial Sequence
  Cyclic GFR-binding peptide
KLSPISILYIDKGVVTYYKQYEGMAVSE

SEQ ID NO: 37624 - protein, 35 aa, Artificial Sequence
  Cyclic GFR-binding peptide
  MOD_RES (4)..(5): Xaa is C or S
ASPXXVSQDLEPISILYLIGKTPKIKFKYEMIVKS

SEQ ID NO: 37625 - protein, 31 aa, Artificial Sequence
  Cyclic GFR-binding peptide
  MOD_RES (5)..(6): Xaa is C or S
VPKAXXAPTKLSPISVLYIDSSNNVIYKQYE

SEQ ID NO: 37626 - protein, 30 aa, Artificial Sequence
  Cyclic GFR-binding peptide
PTELEPISMLYLDENEKVVKFKYEDMVVEG

SEQ ID NO: 37627 - protein, 36 aa, Artificial Sequence
  Cyclic GFR-binding peptide
  MOD_RES (4)..(5): Xaa is C or S
SKAXXVPTKLSPISILYIDKGVVTYYKQYEGMAVSE

SEQ ID NO: 37628 - protein, 33 aa, Artificial Sequence; identical to SEQ ID NO: 8916
  Cyclic GFR-binding peptide
  MOD_RES (1)..(32): Xaa is C or S

SEQ ID NO: 37629 - protein, 29 aa, Artificial Sequence
  Cyclic GFR-binding peptide
APTKLEPISVLYLDDSSNVIKFKYENMVV

SEQ ID NO: 37630 - protein, 33 aa, Artificial Sequence
  Cyclic GFR-binding peptide
  MOD_RES (6)..(7): Xaa is C or S
KVGKAXXVPTKLEPISVLYLDDMGVPTKFKYEE

SEQ ID NO: 37631 - protein, 30 aa, Artificial Sequence; identical to SEQ ID NO: 8918
  Cyclic GFR-binding peptide
  MOD_RES (27)..(29): Xaa is C or S

SEQ ID NO: 37632 - protein, 33 aa, Artificial Sequence; identical to SEQ ID NO: 8919
  Cyclic GFR-binding peptide
  MOD_RES (5)..(6): Xaa is C or S

SEQ ID NO: 37633 - protein, 38 aa, Artificial Sequence
  Cyclic GFR-binding peptide
  MOD_RES (4)..(5)..(36)..(38): Xaa is C or S
ASPXXVPQDLSPISILYIVGRTPKVYKQYEMVVKSXKX

SEQ ID NO: 37634 - protein, 33 aa, Artificial Sequence; identical to SEQ ID NO: 8921
  Cyclic GFR-binding peptide
  MOD_RES (1)..(32): Xaa is C or S

SEQ ID NO: 37635 - protein, 33 aa, Artificial Sequence
  Cyclic GFR-binding peptide
  MOD_RES (32)..(32): Xaa is C or S
VPTELSPISMLYIDEYDKVVYKQYEEMVVEGXG

SEQ ID NO: 37636 - protein, 29 aa, Artificial Sequence
  Cyclic GFR-binding peptide
  MOD_RES (1)..(1): Xaa is C or S
XVPARLNAISILYFDAANNVVLKKYRDMV

SEQ ID NO: 37637 - protein, 33 aa, Artificial Sequence
  Cyclic GFR-binding peptide
  MOD_RES (2)..(3): Xaa is C or S
AXXVPTELEPISMLYLDENEKVVKFKYEDMVVE

SEQ ID NO: 37638 - protein, 34 aa, Artificial Sequence
  Cyclic GFR-binding peptide
  MOD_RES (3)..(4): Xaa is C or S
SPXXVPQDLSPISILYIVGRTPKVYKQYEMVVKS

SEQ ID NO: 37639 - protein, 40 aa, Artificial Sequence; identical to SEQ ID NO: 8924
  Cyclic GFR-binding peptide
  MOD_RES (7)..(39): Xaa is C or S

SEQ ID NO: 37640 - protein, 31 aa, Artificial Sequence
  Cyclic GFR-binding peptide
  MOD_RES (2)..(3): Xaa is C or S
SXXVPARLEPISILYLDAANNVVKFKYEDMV

SEQ ID NO: 37641 - protein, 24 aa, Artificial Sequence
  Cyclic GFR-binding peptide
TELSPISMLYKDEYDKVVLKYHYE

SEQ ID NO: 37642 - protein, 29 aa, Artificial Sequence
  Cyclic GFR-binding peptide
PQALEPISILYLVGRKPKVKFKYEMIVRS

SEQ ID NO: 37643 - protein, 40 aa, Artificial Sequence; identical to SEQ ID NO: 8929
  Cyclic GFR-binding peptide
  MOD_RES (4)..(5)..(37)..(39): Xaa is C or S

SEQ ID NO: 37644 - protein, 32 aa, Artificial Sequence; identical to SEQ ID NO: 8931
  Cyclic GFR-binding peptide
  MOD_RES (1)..(2): Xaa is C or S

SEQ ID NO: 37645 - protein, 33 aa, Artificial Sequence
  Cyclic GFR-binding peptide
  MOD_RES (5)..(6): Xaa is C or S
SAAPXXVPQALSPISILYIVGRKPKVYKQYEMI

SEQ ID NO: 37646 - protein, 28 aa, Artificial Sequence
  Cyclic GFR-binding peptide
  MOD_RES (26)..(28): Xaa is C or S
EPISILYLIGKTPKIKFKYEMIVKSXKX

SEQ ID NO: 37647 - protein, 28 aa, Artificial Sequence
  Cyclic GFR-binding peptide
PTELSPISMLYIDEYDKVVYKQYEEMVV

SEQ ID NO: 37648 - protein, 26 aa, Artificial Sequence
  Cyclic GFR-binding peptide
LSPISMLYIDEYDKVVYKQYEEMVVE

SEQ ID NO: 37649 - protein, 34 aa, Artificial Sequence
  Cyclic GFR-binding peptide
  MOD_RES (6)..(7): Xaa is C or S
YVPKPXXAPTKLSPISVLYIDDSSNVIYKQYENM

SEQ ID NO: 37650 - protein, 32 aa, Artificial Sequence; identical to SEQ ID NO: 8936
  Cyclic GFR-binding peptide
  MOD_RES (32)..(32): Xaa is C or S

SEQ ID NO: 37651 - protein, 30 aa, Artificial Sequence; identical to SEQ ID NO: 8937
  Cyclic GFR-binding peptide

SEQ ID NO: 37652 - protein, 33 aa, Artificial Sequence
  Cyclic GFR-binding peptide
  MOD_RES (4)..(5): Xaa is C or S
PKAXXAPTKLSPISVLYIDSSNNVIYKQYENMV

SEQ ID NO: 37653 - protein, 32 aa, Artificial Sequence
  Cyclic GFR-binding peptide
  MOD_RES (2)..(3): Xaa is C or S
PXXVPQALSPISILYIVGRKPKVYKQYEMIVR

SEQ ID NO: 37654 - protein, 31 aa, Artificial Sequence; identical to SEQ ID NO: 8939
  Cyclic GFR-binding peptide
  MOD_RES (1)..(2): Xaa is C or S

SEQ ID NO: 37655 - protein, 24 aa, Artificial Sequence
  Cyclic GFR-binding peptide
KLSPISVLYIDDSSNVIYKQYENM

SEQ ID NO: 37656 - protein, 23 aa, Artificial Sequence
  Cyclic GFR-binding peptide
QALNAISILYFVGRKPKVLKKYR

SEQ ID NO: 37657 - protein, 38 aa, Artificial Sequence; identical to SEQ ID NO: 8941
  Cyclic GFR-binding peptide
  MOD_RES (3)..(4)..(36)..(38): Xaa is C or S

SEQ ID NO: 37658 - protein, 25 aa, Artificial Sequence
  Cyclic GFR-binding peptide
LNAISILYFDAANNVVLKKYRDMVV

SEQ ID NO: 37659 - protein, 41 aa, Artificial Sequence
  Cyclic GFR-binding peptide
  MOD_RES (6)..(7)..(38)..(40): Xaa is C or S
ASASPXXVPQDLSPISILYIVGRTPKVYKQYEMVVKSXKXS

SEQ ID NO: 37660 - protein, 27 aa, Artificial Sequence
  Cyclic GFR-binding peptide
  MOD_RES (1)..(2): Xaa is C or S
XXAPTKLEPISVLYLDDSSNVIKFKYE

SEQ ID NO: 37661 - protein, 21 aa, Artificial Sequence
  Cyclic GFR-binding peptide
SPISILYIVGRTPKVYKQYEM

SEQ ID NO: 37662 - protein, 33 aa, Artificial Sequence
  Cyclic GFR-binding peptide
  MOD_RES (5)..(6): Xaa is C or S
VPKAXXAPTKLEPISVLYLDSSNNVIKFKYENM

SEQ ID NO: 37663 - protein, 29 aa, Artificial Sequence
  Cyclic GFR-binding peptide
  MOD_RES (28)..(28): Xaa is C or S
LSPISVLYIDSSNNVIYKQYENMVVKAXG

SEQ ID NO: 37664 - protein, 31 aa, Artificial Sequence
  Cyclic GFR-binding peptide
  MOD_RES (29)..(31): Xaa is C or S
ELSPISMLYIDEYDKVVYKQYEEMVVEGXGX

SEQ ID NO: 37665 - protein, 39 aa, Artificial Sequence
  Cyclic GFR-binding peptide
  MOD_RES (5)..(6)..(38): Xaa is C or S
VPKPXXAPTQLEPISVLYLDDSSNVIKFKYENMVVRAXG

SEQ ID NO: 37666 - protein, 27 aa, Artificial Sequence
  Cyclic GFR-binding peptide
  MOD_RES (1)..(1): Xaa is C or S
XVPTELEPISMLYLDENEKVVKFKYED

SEQ ID NO: 37667 - protein, 33 aa, Artificial Sequence; identical to SEQ ID NO: 8946
  Cyclic GFR-binding peptide
  MOD_RES (31)..(33): Xaa is C or S

SEQ ID NO: 37668 - protein, 38 aa, Artificial Sequence
  Cyclic GFR-binding peptide
  MOD_RES (2)..(3)..(35)..(37): Xaa is C or S
PXXAPTQLSPISVLYIDDSSNVIYKQYENMVVRAXGXH

SEQ ID NO: 37669 - protein, 32 aa, Artificial Sequence
  Cyclic GFR-binding peptide
  MOD_RES (1)..(2): Xaa is C or S
XXAPTQLEPISVLYLDDSSNVIKFKYENMVVR

SEQ ID NO: 37670 - protein, 21 aa, Artificial Sequence
  Cyclic GFR-binding peptide
SPISVLYIDSSNNVIYKQYEN

SEQ ID NO: 37671 - protein, 31 aa, Artificial Sequence
  Cyclic GFR-binding peptide
  MOD_RES (31)..(31): Xaa is C or S
PTQLEPISVLYLDDSSNVIKFKYENMVVRAX

SEQ ID NO: 37672 - protein, 30 aa, Artificial Sequence
  Cyclic GFR-binding peptide
VSQDLSPISILYIIGKTPKIYKQYEMIVKS

SEQ ID NO: 37673 - protein, 39 aa, Artificial Sequence
  Cyclic GFR-binding peptide
  MOD_RES (4)..(5)..(36)..(38): Xaa is C or S
AAPXXVPQALSPISILYIVGRKPKVYKQYEMIVRSXKXS

SEQ ID NO: 37674 - protein, 34 aa, Artificial Sequence
  Cyclic GFR-binding peptide
  MOD_RES (4)..(5): Xaa is C or S
PKAXXAPTKLEPISVLYLDSSNNVIKFKYENMVV

SEQ ID NO: 37675 - protein, 27 aa, Artificial Sequence
  Cyclic GFR-binding peptide
TKLSPISVLYIDSSNNVIYKQYENMVV

SEQ ID NO: 37676 - protein, 40 aa, Artificial Sequence
  Cyclic GFR-binding peptide
  MOD_RES (6)..(7)..(40): Xaa is C or S
KVGKAXXVPTKLSPISVLYIDDMGVPTYKQYEEGMSVAEX

SEQ ID NO: 37677 - protein, 34 aa, Artificial Sequence
  Cyclic GFR-binding peptide
  MOD_RES (5)..(5): Xaa is C or S
TKPTXAPTKLSPISVLYIDDSSNVIYKQYENMVV

SEQ ID NO: 37678 - protein, 24 aa, Artificial Sequence
  Cyclic GFR-binding peptide
PQALEPISILYLVGRKPKVKFKYE

SEQ ID NO: 37679 - protein, 38 aa, Artificial Sequence; identical to SEQ ID NO: 8949
  Cyclic GFR-binding peptide
  MOD_RES (4)..(5)..(37): Xaa is C or S

SEQ ID NO: 37680 - protein, 37 aa, Artificial Sequence
  Cyclic GFR-binding peptide
  MOD_RES (4)..(5)..(37): Xaa is C or S
SKAXXVPTKLSPISILYKDKGVVTYLKYHYGMAVSEX

SEQ ID NO: 37681 - protein, 37 aa, Artificial Sequence; identical to SEQ ID NO: 8950
  Cyclic GFR-binding peptide
  MOD_RES (6)..(7): Xaa is C or S

SEQ ID NO: 37682 - protein, 32 aa, Artificial Sequence
  Cyclic GFR-binding peptide
  MOD_RES (5)..(6): Xaa is C or S
VPKPXXAPTKLSPISVLYIDDSSNVIYKQYEN

SEQ ID NO: 37683 - protein, 33 aa, Artificial Sequence; identical to SEQ ID NO: 8952
  Cyclic GFR-binding peptide
  MOD_RES (2)..(3): Xaa is C or S

SEQ ID NO: 37684 - protein, 38 aa, Artificial Sequence
  Cyclic GFR-binding peptide
  MOD_RES (5)..(6)..(37): Xaa is C or S
SAAPXXVPQALEPISILYLVGRKPKVKFKYEMIVRSXK

SEQ ID NO: 37685 - protein, 26 aa, Artificial Sequence
  Cyclic GFR-binding peptide
APTKLEPISVLYLDSSNNVIKFKYEN

SEQ ID NO: 37686 - protein, 34 aa, Artificial Sequence; identical to SEQ ID NO: 8961
  Cyclic GFR-binding peptide
  MOD_RES (6)..(7): Xaa is C or S

SEQ ID NO: 37687 - protein, 37 aa, Artificial Sequence
  Cyclic GFR-binding peptide
  MOD_RES (6)..(7): Xaa is C or S
YVPKPXXAPTKLSPISVLYIDDSSNVIYKQYENMVVR

SEQ ID NO: 37688 - protein, 36 aa, Artificial Sequence
  Cyclic GFR-binding peptide
  MOD_RES (6)..(7): Xaa is C or S
KASKAXXVPTKLSPISILYIDKGVVTYYKQYEGMAV

SEQ ID NO: 37689 - protein, 30 aa, Artificial Sequence; identical to SEQ ID NO: 8962
  Cyclic GFR-binding peptide

SEQ ID NO: 37690 - protein, 37 aa, Artificial Sequence; identical to SEQ ID NO: 8964
  Cyclic GFR-binding peptide
  MOD_RES (2)..(3)..(34)..(36): Xaa is C or S

SEQ ID NO: 37691 - protein, 27 aa, Artificial Sequence
  Cyclic GFR-binding peptide
  MOD_RES (1)..(1): Xaa is C or S
XVPTELSPISMLYKDENEKVVLKYHYD

SEQ ID NO: 37692 - protein, 22 aa, Artificial Sequence
  Cyclic GFR-binding peptide
LSPISMLYKDEYDKVVLKYHYE

SEQ ID NO: 37693 - protein, 28 aa, Artificial Sequence
  Cyclic GFR-binding peptide
  MOD_RES (26)..(28): Xaa is C or S
NAISILYFVGRKPKVLKKYRMIVRSXKX

SEQ ID NO: 37694 - protein, 36 aa, Artificial Sequence
  Cyclic GFR-binding peptide
  MOD_RES (3)..(4)..(36): Xaa is C or S
KAXXVPTELEPISMLYLDEYDKVVKFKYEEMVVEGX

SEQ ID NO: 37695 - protein, 30 aa, Artificial Sequence; identical to SEQ ID NO: 8971
  Cyclic GFR-binding peptide
  MOD_RES (2)..(3): Xaa is C or S

SEQ ID NO: 37696 - protein, 26 aa, Artificial Sequence
  Cyclic GFR-binding peptide
DLSPISILYIIGKTPKIYKQYEMIVK

SEQ ID NO: 37697 - protein, 36 aa, Artificial Sequence; identical to SEQ ID NO: 8972
  Cyclic GFR-binding peptide
  MOD_RES (4)..(5): Xaa is C or S

SEQ ID NO: 37698 - protein, 30 aa, Artificial Sequence
  Cyclic GFR-binding peptide
  MOD_RES (27)..(29): Xaa is C or S
LEPISILYLVGRKPKVKFKYEMIVRSXKXS

SEQ ID NO: 37699 - protein, 27 aa, Artificial Sequence
  Cyclic GFR-binding peptide
PTELSPISMLYKDEYDKVVLKYHYEMV

SEQ ID NO: 37700 - protein, 36 aa, Artificial Sequence; identical to SEQ ID NO: 8979
  Cyclic GFR-binding peptide
  MOD_RES (2)..(3)..(35): Xaa is C or S

SEQ ID NO: 37701 - protein, 30 aa, Artificial Sequence
  Cyclic GFR-binding peptide
  MOD_RES (2)..(3): Xaa is C or S
PXXAPTQLSPISVLYIDDSSNVIYKQYENM

SEQ ID NO: 37702 - protein, 36 aa, Artificial Sequence; identical to SEQ ID NO: 8981
  Cyclic GFR-binding peptide
  MOD_RES (4)..(5)..(36): Xaa is C or S

SEQ ID NO: 37703 - protein, 28 aa, Artificial Sequence
  Cyclic GFR-binding peptide
  MOD_RES (28)..(28): Xaa is C or S
LNAISILYFDKGVVTYLKKYRGMAVSEX

SEQ ID NO: 37704 - protein, 31 aa, Artificial Sequence
  Cyclic GFR-binding peptide
VPARLSPISILYKDAANNVVLKYHYDMVVEA

SEQ ID NO: 37705 - protein, 38 aa, Artificial Sequence
  Cyclic GFR-binding peptide
  MOD_RES (4)..(5)..(37): Xaa is C or S
PKPXXAPTKLEPISVLYLDDSSNVIKFKYENMVVRSXG

SEQ ID NO: 37706 - protein, 32 aa, Artificial Sequence
  Cyclic GFR-binding peptide
  MOD_RES (5)..(5): Xaa is C or S
TKPTXAPTKLEPISVLYLDDSSNVIKFKYENM

SEQ ID NO: 37707 - protein, 32 aa, Artificial Sequence
  Cyclic GFR-binding peptide
  MOD_RES (30)..(32): Xaa is C or S
TKLEPISVLYLDSSNNVIKFKYENMVVKAXGX

SEQ ID NO: 37708 - protein, 25 aa, Artificial Sequence
  Cyclic GFR-binding peptide
PTELEPISMLYLDEYDKVVKFKYEE

SEQ ID NO: 37709 - protein, 31 aa, Artificial Sequence
  Cyclic GFR-binding peptide
  MOD_RES (1)..(1): Xaa is C or S
XVPTELEPISMLYLDENEKVVKFKYEDMVVE

SEQ ID NO: 37710 - protein, 34 aa, Artificial Sequence; identical to SEQ ID NO: 8988
  Cyclic GFR-binding peptide
  MOD_RES (2)..(3)..(34): Xaa is C or S

SEQ ID NO: 37711 - protein, 37 aa, Artificial Sequence; identical to SEQ ID NO: 8991
  Cyclic GFR-binding peptide
  MOD_RES (1)..(2)..(34)..(36): Xaa is C or S

SEQ ID NO: 37712 - protein, 25 aa, Artificial Sequence
  Cyclic GFR-binding peptide
PTQLSPISVLYIDDSSNVIYKQYEN

SEQ ID NO: 37713 - protein, 40 aa, Artificial Sequence
  Cyclic GFR-binding peptide
  MOD_RES (5)..(6)..(37)..(39): Xaa is C or S
SASPXXVPQDLSPISILYIVGRTPKVYKQYEMVVKSXKXS

SEQ ID NO: 37714 - protein, 27 aa, Artificial Sequence
  Cyclic GFR-binding peptide
  MOD_RES (1)..(1): Xaa is C or S
XAPTQLSPISVLYIDDSSNVIYKQYEN

SEQ ID NO: 37715 - protein, 37 aa, Artificial Sequence
  Cyclic GFR-binding peptide
  MOD_RES (5)..(6): Xaa is C or S
APASXXVPARLSPISILYKDAANNVVLKYHYDMVVEA

SEQ ID NO: 37716 - protein, 30 aa, Artificial Sequence
  Cyclic GFR-binding peptide
  MOD_RES (1)..(1): Xaa is C or S
XVPTELSPISMLYIDEYDKVVYKQYEEMVV

SEQ ID NO: 37717 - protein, 34 aa, Artificial Sequence; identical to SEQ ID NO: 8995
  Cyclic GFR-binding peptide
  MOD_RES (5)..(6): Xaa is C or S

SEQ ID NO: 37718 - protein, 22 aa, Artificial Sequence
  Cyclic GFR-binding peptide
LEPISILYLVGRTPKVKFKYEM

SEQ ID NO: 37719 - protein, 33 aa, Artificial Sequence
  Cyclic GFR-binding peptide
  MOD_RES (6)..(7): Xaa is C or S
KIPKAXXVPTELSPISMLYIDENEKVVYKQYED

SEQ ID NO: 37720 - protein, 29 aa, Artificial Sequence
  Cyclic GFR-binding peptide
  MOD_RES (3)..(4): Xaa is C or S
KPXXAPTKLSPISVLYIDDSSNVIYKQYE

SEQ ID NO: 37721 - protein, 32 aa, Artificial Sequence; identical to SEQ ID NO: 8998
  Cyclic GFR-binding peptide
  MOD_RES (1)..(1): Xaa is C or S

SEQ ID NO: 37722 - protein, 35 aa, Artificial Sequence; identical to SEQ ID NO: 8999
  Cyclic GFR-binding peptide
  MOD_RES (4)..(5): Xaa is C or S

SEQ ID NO: 37723 - protein, 25 aa, Artificial Sequence
  Cyclic GFR-binding peptide
TKLNAISVLYFDDMGVPTLKKYREG

SEQ ID NO: 37724 - protein, 40 aa, Artificial Sequence; identical to SEQ ID NO: 9001
  Cyclic GFR-binding peptide
  MOD_RES (5)..(6)..(38)..(40): Xaa is C or S

SEQ ID NO: 37725 - protein, 31 aa, Artificial Sequence
  Cyclic GFR-binding peptide
VPTELEPISMLYLDENEKVVKFKYEDMVVEG

SEQ ID NO: 37726 - protein, 36 aa, Artificial Sequence
  Cyclic GFR-binding peptide
  MOD_RES (2)..(3)..(35): Xaa is C or S
AXXVPTKLNAISILYFDKGVVTYLKKYRGMAVSEXG

SEQ ID NO: 37727 - protein, 38 aa, Artificial Sequence
  Cyclic GFR-binding peptide
  MOD_RES (6)..(7): Xaa is C or S
TVPKPXXAPTQLEPISVLYLDDSSNVIKFKYENMVVRA

SEQ ID NO: 37728 - protein, 32 aa, Artificial Sequence
  Cyclic GFR-binding peptide
  MOD_RES (32)..(32): Xaa is C or S
PTKLSPISVLYIDDMGVPTYKQYEEGMSVAEX

SEQ ID NO: 37729 - protein, 34 aa, Artificial Sequence; identical to SEQ ID NO: 9004
  Cyclic GFR-binding peptide
  MOD_RES (5)..(5): Xaa is C or S

SEQ ID NO: 37730 - protein, 24 aa, Artificial Sequence
  Cyclic GFR-binding peptide
PTKLNAISILYFDKGVVTYLKKYR

SEQ ID NO: 37731 - protein, 38 aa, Artificial Sequence
  Cyclic GFR-binding peptide
  MOD_RES (3)..(4)..(36)..(38): Xaa is C or S
KAXXVPTKLNAISILYFDKGVVTYLKKYRGMAVSEXGX

SEQ ID NO: 37732 - protein, 33 aa, Artificial Sequence
  Cyclic GFR-binding peptide
  MOD_RES (6)..(7): Xaa is C or S
KASKAXXVPTKLSPISILYIDKGVVTYYKQYEG

SEQ ID NO: 37733 - protein, 37 aa, Artificial Sequence
  Cyclic GFR-binding peptide
  MOD_RES (2)..(3)..(35)..(37): Xaa is C or S
AXXAPTKLSPISVLYIDSSNNVIYKQYENMVVKAXGX

SEQ ID NO: 37734 - protein, 27 aa, Artificial Sequence
  Cyclic GFR-binding peptide
LEPISVLYLDSSNNVIKFKYENMVVKA

SEQ ID NO: 37735 - protein, 27 aa, Artificial Sequence
  Cyclic GFR-binding peptide
  MOD_RES (27)..(27): Xaa is C or S
SPISVLYKDSSNNVILKYHYNMVVKAX

SEQ ID NO: 37736 - protein, 40 aa, Artificial Sequence
  Cyclic GFR-binding peptide
  MOD_RES (5)..(6)..(38)..(40): Xaa is C or S
IPKAXXVPTELSPISMLYIDENEKVVYKQYEDMVVEGXGX

SEQ ID NO: 37737 - protein, 34 aa, Artificial Sequence
  Cyclic GFR-binding peptide
  MOD_RES (31)..(33): Xaa is C or S
PARLSPISILYKDAANNVVLKYHYDMVVEAXGXR

SEQ ID NO: 37738 - protein, 27 aa, Artificial Sequence
  Cyclic GFR-binding peptide
  MOD_RES (1)..(2): Xaa is C or S
XXVPARLNAISILYFDAANNVVLKKYR

SEQ ID NO: 37739 - protein, 42 aa, Artificial Sequence
  Cyclic GFR-binding peptide
  MOD_RES (6)..(7)..(39)..(41): Xaa is C or S
AAPASXXVPARLNAISILYFDAANNVVLKKYRDMVVEAXGXR

SEQ ID NO: 37740 - protein, 31 aa, Artificial Sequence
  Cyclic GFR-binding peptide
  MOD_RES (1)..(1): Xaa is C or S
XAPTKLSPISVLYIDDSSNVIYKQYENMVVR

SEQ ID NO: 37741 - protein, 24 aa, Artificial Sequence
  Cyclic GFR-binding peptide
DLSPISILYKVGRTPKVLKYHYMV

SEQ ID NO: 37742 - protein, 27 aa, Artificial Sequence
  Cyclic GFR-binding peptide
  MOD_RES (1)..(2): Xaa is C or S
XXVPARLSPISILYKDAANNVVLKYHY

SEQ ID NO: 37743 - protein, 31 aa, Artificial Sequence; identical to SEQ ID NO: 9020
  Cyclic GFR-binding peptide
  MOD_RES (4)..(5): Xaa is C or S

SEQ ID NO: 37744 - protein, 35 aa, Artificial Sequence
  Cyclic GFR-binding peptide
  MOD_RES (4)..(5): Xaa is C or S
GKAXXVPTKLEPISVLYLDDMGVPTKFKYEEGMSV

SEQ ID NO: 37745 - protein, 24 aa, Artificial Sequence
  Cyclic GFR-binding peptide
ALSPISILYIVGRKPKVYKQYEMI

SEQ ID NO: 37746 - protein, 33 aa, Artificial Sequence
  Cyclic GFR-binding peptide
  MOD_RES (31)..(33): Xaa is C or S
PTELEPISMLYLDENEKVVKFKYEDMVVEGXGX

SEQ ID NO: 37747 - protein, 31 aa, Artificial Sequence; identical to SEQ ID NO: 9024
  Cyclic GFR-binding peptide
  MOD_RES (4)..(5): Xaa is C or S

SEQ ID NO: 37748 - protein, 26 aa, Artificial Sequence
  Cyclic GFR-binding peptide
VPTKLNAISVLYFDDMGVPTLKKYRE

SEQ ID NO: 37749 - protein, 31 aa, Artificial Sequence; identical to SEQ ID NO: 9026
  Cyclic GFR-binding peptide
  MOD_RES (3)..(3): Xaa is C or S

SEQ ID NO: 37750 - protein, 28 aa, Artificial Sequence
  Cyclic GFR-binding peptide
PTQLEPISVLYLDDSSNVIKFKYENMVV

SEQ ID NO: 37751 - protein, 29 aa, Artificial Sequence
  Cyclic GFR-binding peptide
  MOD_RES (2)..(3): Xaa is C or S
AXXAPTKLEPISVLYLDSSNNVIKFKYEN

SEQ ID NO: 37752 - protein, 22 aa, Artificial Sequence
  Cyclic GFR-binding peptide
SPISILYIDKGVVTYYKQYEGM

SEQ ID NO: 37753 - protein, 22 aa, Artificial Sequence
  Cyclic GFR-binding peptide
KLEPISVLYLDSSNNVIKFKYE

SEQ ID NO: 37754 - protein, 30 aa, Artificial Sequence
  Cyclic GFR-binding peptide
  MOD_RES (30)..(30): Xaa is C or S
TKLSPISILYKDKGVVTYLKYHYGMAVSEX

SEQ ID NO: 37755 - protein, 36 aa, Artificial Sequence
  Cyclic GFR-binding peptide
  MOD_RES (2)..(3)..(34)..(36): Xaa is C or S
PXXVPQDLEPISILYLVGRTPKVKFKYEMVVKSXKX

SEQ ID NO: 37756 - protein, 24 aa, Artificial Sequence
  Cyclic GFR-binding peptide
ALEPISILYLVGRKPKVKFKYEMI

SEQ ID NO: 37757 - protein, 30 aa, Artificial Sequence
  Cyclic GFR-binding peptide
PARLSPISILYKDAANNVVLKYHYDMVVEA

SEQ ID NO: 37758 - protein, 40 aa, Artificial Sequence
  Cyclic GFR-binding peptide
  MOD_RES (6)..(7)..(38)..(40): Xaa is C or S
ASAAPXXVPQALEPISILYLVGRKPKVKFKYEMIVRSXKX

SEQ ID NO: 37759 - protein, 33 aa, Artificial Sequence; identical to SEQ ID NO: 9036
  Cyclic GFR-binding peptide
  MOD_RES (5)..(6): Xaa is C or S

SEQ ID NO: 37760 - protein, 31 aa, Artificial Sequence
  Cyclic GFR-binding peptide
  MOD_RES (4)..(5): Xaa is C or S
PKPXXAPTQLSPISVLYIDDSSNVIYKQYEN

SEQ ID NO: 37761 - protein, 34 aa, Artificial Sequence
  Cyclic GFR-binding peptide
  MOD_RES (31)..(33): Xaa is C or S
PTKLSPISILYKDKGVVTYLKYHYGMAVSEXGXR

SEQ ID NO: 37762 - protein, 29 aa, Artificial Sequence
  Cyclic GFR-binding peptide
  MOD_RES (27)..(29): Xaa is C or S
NAISILYFDKGVVTYLKKYRGMAVSEXGX

SEQ ID NO: 37763 - protein, 30 aa, Artificial Sequence
  Cyclic GFR-binding peptide
VPARLNAISILYFDAANNVVLKKYRDMVVE

SEQ ID NO: 37764 - protein, 30 aa, Artificial Sequence
  Cyclic GFR-binding peptide
  MOD_RES (1)..(2): Xaa is C or S
XXVSQDLEPISILYLIGKTPKIKFKYEMIV

SEQ ID NO: 37765 - protein, 30 aa, Artificial Sequence
  Cyclic GFR-binding peptide
  MOD_RES (2)..(3): Xaa is C or S
PXXAPTQLEPISVLYLDDSSNVIKFKYENM

SEQ ID NO: 37766 - protein, 27 aa, Artificial Sequence
  Cyclic GFR-binding peptide
LNAISVLYFDSSNNVILKKYRNMVVKA

SEQ ID NO: 37767 - protein, 27 aa, Artificial Sequence
  Cyclic GFR-binding peptide
ARLEPISILYLDAANNVVKFKYEDMVV

SEQ ID NO: 37768 - protein, 36 aa, Artificial Sequence
  Cyclic GFR-binding peptide
  MOD_RES (1)..(2)..(34)..(36): Xaa is C or S
XXVPTKLSPISILYIDKGVVTYYKQYEGMAVSEXGX

SEQ ID NO: 37769 - protein, 28 aa, Artificial Sequence
  Cyclic GFR-binding peptide
TKLSPISILYKDKGVVTYLKYHYGMAVS

SEQ ID NO: 37770 - protein, 40 aa, Artificial Sequence
  Cyclic GFR-binding peptide
  MOD_RES (4)..(5)..(38)..(40): Xaa is C or S
GKAXXVPTKLEPISVLYLDDMGVPTKFKYEEGMSVAEXGX

SEQ ID NO: 37771 - protein, 38 aa, Artificial Sequence
  Cyclic GFR-binding peptide
  MOD_RES (3)..(4)..(36)..(38): Xaa is C or S
ASXXVPARLEPISILYLDAANNVVKFKYEDMVVEAXGX

SEQ ID NO: 37772 - protein, 33 aa, Artificial Sequence; identical to SEQ ID NO: 9045
  Cyclic GFR-binding peptide
  MOD_RES (1)..(2): Xaa is C or S

SEQ ID NO: 37773 - protein, 28 aa, Artificial Sequence
  Cyclic GFR-binding peptide
VPQDLNAISILYFVGRTPKVLKKYRMVV

SEQ ID NO: 37774 - protein, 27 aa, Artificial Sequence
  Cyclic GFR-binding peptide
DLNAISILYFVGRTPKVLKKYRMVVKS

SEQ ID NO: 37775 - protein, 33 aa, Artificial Sequence; identical to SEQ ID NO: 9055
  Cyclic GFR-binding peptide
  MOD_RES (1)..(33): Xaa is C or S

SEQ ID NO: 37776 - protein, 33 aa, Artificial Sequence
  Cyclic GFR-binding peptide
  MOD_RES (1)..(33): Xaa is C or S
XVPTELSPISMLYIDEYDKVVYKQYEEMVVEGX

SEQ ID NO: 37777 - protein, 25 aa, Artificial Sequence
  Cyclic GFR-binding peptide
PTKLEPISVLYLDDMGVPTKFKYEE

SEQ ID NO: 37778 - protein, 29 aa, Artificial Sequence
  Cyclic GFR-binding peptide
  MOD_RES (27)..(29): Xaa is C or S
LSPISILYKVGRKPKVLKYHYMIVRSXKX

SEQ ID NO: 37779 - protein, 34 aa, Artificial Sequence; identical to SEQ ID NO: 9059
  Cyclic GFR-binding peptide
  MOD_RES (32)..(34): Xaa is C or S

SEQ ID NO: 37780 - protein, 34 aa, Artificial Sequence
  Cyclic GFR-binding peptide
  MOD_RES (31)..(33): Xaa is C or S
VPQDLSPISILYIVGRTPKVYKQYEMVVKSXKXS

SEQ ID NO: 37781 - protein, 28 aa, Artificial Sequence
  Cyclic GFR-binding peptide
VPQALSPISILYKVGRKPKVLKYHYMIV

SEQ ID NO: 37782 - protein, 29 aa, Artificial Sequence
  Cyclic GFR-binding peptide
  MOD_RES (1)..(1): Xaa is C or S
XVPARLEPISILYLDAANNVVKFKYEDMV

SEQ ID NO: 37783 - protein, 25 aa, Artificial Sequence
  Cyclic GFR-binding peptide
PQALSPISILYIVGRKPKVYKQYEM

SEQ ID NO: 37784 - protein, 28 aa, Artificial Sequence
  Cyclic GFR-binding peptide
  MOD_RES (26)..(28): Xaa is C or S
SPISILYIVGRTPKVYKQYEMVVKSXKX

SEQ ID NO: 37785 - protein, 30 aa, Artificial Sequence; identical to SEQ ID NO: 9061
  Cyclic GFR-binding peptide
  MOD_RES (27)..(29): Xaa is C or S

SEQ ID NO: 37786 - protein, 25 aa, Artificial Sequence
  Cyclic GFR-binding peptide
QALNAISILYFVGRKPKVLKKYRMI

SEQ ID NO: 37787 - protein, 21 aa, Artificial Sequence
  Cyclic GFR-binding peptide
EPISILYLDAANNVVKFKYED

SEQ ID NO: 37788 - protein, 23 aa, Artificial Sequence
  Cyclic GFR-binding peptide
LSPISILYKDAANNVVLKYHYDM

SEQ ID NO: 37789 - protein, 24 aa, Artificial Sequence
  Cyclic GFR-binding peptide
PTKLSPISVLYKDDSSNVILKYHY

SEQ ID NO: 37790 - protein, 29 aa, Artificial Sequence
  Cyclic GFR-binding peptide
  MOD_RES (29)..(29): Xaa is C or S
QDLEPISILYLIGKTPKIKFKYEMIVKSX

SEQ ID NO: 37791 - protein, 34 aa, Artificial Sequence
  Cyclic GFR-binding peptide
  MOD_RES (2)..(3): Xaa is C or S
AXXVPTELSPISMLYIDEYDKVVYKQYEEMVVEG

SEQ ID NO: 37792 - protein, 35 aa, Artificial Sequence
  Cyclic GFR-binding peptide
  MOD_RES (2)..(3)..(34): Xaa is C or S
PXXVPQALEPISILYLVGRKPKVKFKYEMIVRSXK

SEQ ID NO: 37793 - protein, 34 aa, Artificial Sequence; identical to SEQ ID NO: 9068
  Cyclic GFR-binding peptide
  MOD_RES (1)..(33): Xaa is C or S

SEQ ID NO: 37794 - protein, 25 aa, Artificial Sequence
  Cyclic GFR-binding peptide
RLEPISILYLDAANNVVKFKYEDMV

SEQ ID NO: 37795 - protein, 33 aa, Artificial Sequence
  Cyclic GFR-binding peptide
  MOD_RES (5)..(6): Xaa is C or S
VGKAXXVPTKLSPISVLYIDDMGVPTYKQYEEG

SEQ ID NO: 37796 - protein, 29 aa, Artificial Sequence
  Cyclic GFR-binding peptide
VPTKLSPISILYKDKGVVTYLKYHYGMAV

SEQ ID NO: 37797 - protein, 38 aa, Artificial Sequence
  Cyclic GFR-binding peptide
  MOD_RES (5)..(37): Xaa is C or S
TKPTXAPTKLEPISVLYLDDSSNVIKFKYENMVVRSXG

SEQ ID NO: 37798 - protein, 42 aa, Artificial Sequence; identical to SEQ ID NO: 9069
  Cyclic GFR-binding peptide
  MOD_RES (6)..(7)..(39)..(41): Xaa is C or S

SEQ ID NO: 37799 - protein, 33 aa, Artificial Sequence; identical to SEQ ID NO: 9071
  Cyclic GFR-binding peptide
  MOD_RES (1)..(2)..(33): Xaa is C or S

SEQ ID NO: 37800 - protein, 41 aa, Artificial Sequence
  Cyclic GFR-binding peptide
  MOD_RES (5)..(6)..(38)..(40): Xaa is C or S
ASKAXXVPTKLNAISILYFDKGVVTYLKKYRGMAVSEXGXR

SEQ ID NO: 37801 - protein, 35 aa, Artificial Sequence; identical to SEQ ID NO: 9072
  Cyclic GFR-binding peptide
  MOD_RES (1)..(2)..(33)..(35): Xaa is C or S

SEQ ID NO: 37802 - protein, 35 aa, Artificial Sequence
  Cyclic GFR-binding peptide
  MOD_RES (32)..(34): Xaa is C or S
VPTRLSPINILYFDSANNVVYGKIPDMVVESXGXR

SEQ ID NO: 37803 - protein, 31 aa, Artificial Sequence
  Cyclic GFR-binding peptide
  MOD_RES (1)..(1): Xaa is C or S
XVPQALSPISILYIVGRKPKVYKQYEMIVRS

SEQ ID NO: 37804 - protein, 35 aa, Artificial Sequence; identical to SEQ ID NO: 9073
  Cyclic GFR-binding peptide
  MOD_RES (4)..(5): Xaa is C or S

SEQ ID NO: 37805 - protein, 21 aa, Artificial Sequence
  Cyclic GFR-binding peptide
LNAISVLYFDSSNNVILKKYR

SEQ ID NO: 37806 - protein, 23 aa, Artificial Sequence
  Cyclic GFR-binding peptide
EPISVLYLDSSNNVIKFKYENMV

SEQ ID NO: 37807 - protein, 23 aa, Artificial Sequence
  Cyclic GFR-binding peptide
QALSPISILYKVGRKPKVLKYHY

SEQ ID NO: 37808 - protein, 32 aa, Artificial Sequence
  Cyclic GFR-binding peptide
  MOD_RES (1)..(2): Xaa is C or S
XXVPTKLEPISVLYLDDMGVPTKFKYEEGMSV

SEQ ID NO: 37809 - protein, 32 aa, Artificial Sequence
  Cyclic GFR-binding peptide
  MOD_RES (4)..(5): Xaa is C or S
GKAXXVPTKLSPISVLYIDDMGVPTYKQYEEG

SEQ ID NO: 37810 - protein, 28 aa, Artificial Sequence
  Cyclic GFR-binding peptide
  MOD_RES (3)..(3): Xaa is C or S
PTXAPTKLSPISVLYKDDSSNVILKYHY

SEQ ID NO: 37811 - protein, 34 aa, Artificial Sequence
  Cyclic GFR-binding peptide
  MOD_RES (1)..(2)..(34): Xaa is C or S
XXVPTELSPISMLYIDENEKVVYKQYEDMVVEGX

SEQ ID NO: 37812 - protein, 33 aa, Artificial Sequence; identical to SEQ ID NO: 9080
  Cyclic GFR-binding peptide
  MOD_RES (2)..(3): Xaa is C or S

SEQ ID NO: 37813 - protein, 24 aa, Artificial Sequence
  Cyclic GFR-binding peptide
KLEPISVLYLDDSSNVIKFKYENM

SEQ ID NO: 37814 - protein, 34 aa, Artificial Sequence
  Cyclic GFR-binding peptide
  MOD_RES (2)..(3): Xaa is C or S
AXXVPTELSPISMLYIDENEKVVYKQYEDMVVEG

SEQ ID NO: 37815 - protein, 37 aa, Artificial Sequence
  Cyclic GFR-binding peptide
  MOD_RES (6)..(7): Xaa is C or S
KASKAXXVPTKLSPISILYIDKGVVTYYKQYEGMAVS

SEQ ID NO: 37816 - protein, 25 aa, Artificial Sequence
  Cyclic GFR-binding peptide
KLEPISVLYLDDMGVPTKFKYEEGM

SEQ ID NO: 37817 - protein, 30 aa, Artificial Sequence
  Cyclic GFR-binding peptide
  MOD_RES (1)..(2): Xaa is C or S
XXVPTELSPISMLYIDENEKVVYKQYEDMV

SEQ ID NO: 37818 - protein, 33 aa, Artificial Sequence
  Cyclic GFR-binding peptide
  MOD_RES (5)..(6): Xaa is C or S
SAAPXXVPQALEPISILYLVGRKPKVKFKYEMI

SEQ ID NO: 37819 - protein, 36 aa, Artificial Sequence; identical to SEQ ID NO: 9087
  Cyclic GFR-binding peptide
  MOD_RES (33)..(35): Xaa is C or S

SEQ ID NO: 37820 - protein, 36 aa, Artificial Sequence; identical to SEQ ID NO: 9088
  Cyclic GFR-binding peptide
  MOD_RES (6)..(7): Xaa is C or S

SEQ ID NO: 37821 - protein, 34 aa, Artificial Sequence
  Cyclic GFR-binding peptide
  MOD_RES (3)..(4): Xaa is C or S
KAXXAPTKLEPISVLYLDSSNNVIKFKYENMVVK

SEQ ID NO: 37822 - protein, 38 aa, Artificial Sequence
  Cyclic GFR-binding peptide
  MOD_RES (3)..(4)..(35)..(37): Xaa is C or S
SPXXVSQDLEPISILYLIGKTPKIKFKYEMIVKSXKXS

SEQ ID NO: 37823 - protein, 38 aa, Artificial Sequence; identical to SEQ ID NO: 9090
  Cyclic GFR-binding peptide
  MOD_RES (5)..(6)..(37): Xaa is C or S

SEQ ID NO: 37824 - protein, 28 aa, Artificial Sequence
  Cyclic GFR-binding peptide
  MOD_RES (26)..(28): Xaa is C or S
SPISILYKVGRKPKVLKYHYMIVRSXKX

SEQ ID NO: 37825 - protein, 25 aa, Artificial Sequence
  Cyclic GFR-binding peptide
LNAISMLYFDEYDKVVLKKYREMVV

SEQ ID NO: 37826 - protein, 35 aa, Artificial Sequence
  Cyclic GFR-binding peptide
  MOD_RES (1)..(34): Xaa is C or S
XVPTKLSPISVLYIDDMGVPTYKQYEEGMSVAEXG

SEQ ID NO: 37827 - protein, 24 aa, Artificial Sequence
  Cyclic GFR-binding peptide
TKLEPISVLYLDDMGVPTKFKYEE

SEQ ID NO: 37828 - protein, 34 aa, Artificial Sequence; identical to SEQ ID NO: 9096
  Cyclic GFR-binding peptide
  MOD_RES (31)..(33): Xaa is C or S

SEQ ID NO: 37829 - protein, 28 aa, Artificial Sequence
  Cyclic GFR-binding peptide
  MOD_RES (1)..(2): Xaa is C or S
XXVPQALSPISILYIVGRKPKVYKQYEM

SEQ ID NO: 37830 - protein, 25 aa, Artificial Sequence
  Cyclic GFR-binding peptide
LNAISILYFVGRTPKVLKKYRMVVK

SEQ ID NO: 37831 - protein, 29 aa, Artificial Sequence
  Cyclic GFR-binding peptide
  MOD_RES (27)..(29): Xaa is C or S
NAISVLYFDSSNNVILKKYRNMVVKAXGX

SEQ ID NO: 37832 - protein, 29 aa, Artificial Sequence
  Cyclic GFR-binding peptide
VSQDLSPISILYKIGKTPKILKYHYMIVK

SEQ ID NO: 37833 - protein, 43 aa, Artificial Sequence
  Cyclic GFR-binding peptide
  MOD_RES (6)..(7)..(40)..(42): Xaa is C or S
KVGKAXXVPTKLEPISVLYLDDMGVPTKFKYEEGMSVAEXGXR

SEQ ID NO: 37834 - protein, 40 aa, Artificial Sequence
  Cyclic GFR-binding peptide
  MOD_RES (6)..(7)..(39): Xaa is C or S
YVPKPXXAPTKLSPISVLYIDDSSNVIYKQYENMVVRSXG

SEQ ID NO: 37835 - protein, 29 aa, Artificial Sequence
  Cyclic GFR-binding peptide
  MOD_RES (3)..(3): Xaa is C or S
PTXAPTKLSPISVLYIDDSSNVIYKQYEN

SEQ ID NO: 37836 - protein, 35 aa, Artificial Sequence; identical to SEQ ID NO: 9106
  Cyclic GFR-binding peptide
  MOD_RES (1)..(2)..(34): Xaa is C or S

SEQ ID NO: 37837 - protein, 32 aa, Artificial Sequence
  Cyclic GFR-binding peptide
  MOD_RES (2)..(3): Xaa is C or S
AXXVPTKLEPISVLYLDDMGVPTKFKYEEGMS

SEQ ID NO: 37838 - protein, 24 aa, Artificial Sequence
  Cyclic GFR-binding peptide
TQLSPISVLYIDDSSNVIYKQYEN

SEQ ID NO: 37839 - protein, 40 aa, Artificial Sequence
  Cyclic GFR-binding peptide
  MOD_RES (6)..(7)..(39): Xaa is C or S
KASKAXXVPTKLSPISILYIDKGVVTYYKQYEGMAVSEXG

SEQ ID NO: 37840 - protein, 33 aa, Artificial Sequence; identical to SEQ ID NO: 9107
  Cyclic GFR-binding peptide
  MOD_RES (1)..(2)..(33): Xaa is C or S

SEQ ID NO: 37841 - protein, 30 aa, Artificial Sequence; identical to SEQ ID NO: 9108
  Cyclic GFR-binding peptide
  MOD_RES (29)..(29): Xaa is C or S

SEQ ID NO: 37842 - protein, 26 aa, Artificial Sequence
  Cyclic GFR-binding peptide
  MOD_RES (1)..(1): Xaa is C or S
XVPTKLEPISVLYLDDMGVPTKFKYE

SEQ ID NO: 37843 - protein, 38 aa, Artificial Sequence; identical to SEQ ID NO: 9109
  Cyclic GFR-binding peptide
  MOD_RES (2)..(3)..(36)..(38): Xaa is C or S

SEQ ID NO: 37844 - protein, 34 aa, Artificial Sequence
  Cyclic GFR-binding peptide
  MOD_RES (1)..(2)..(34): Xaa is C or S
XXVPTELSPISMLYIDEYDKVVYKQYEEMVVEGX

SEQ ID NO: 37845 - protein, 26 aa, Artificial Sequence
  Cyclic GFR-binding peptide
  MOD_RES (1)..(1): Xaa is C or S
XVPQDLEPISILYLVGRTPKVKFKYE

SEQ ID NO: 37846 - protein, 36 aa, Artificial Sequence; identical to SEQ ID NO: 9110
  Cyclic GFR-binding peptide
  MOD_RES (4)..(5): Xaa is C or S

SEQ ID NO: 37847 - protein, 36 aa, Artificial Sequence
  Cyclic GFR-binding peptide
  MOD_RES (6)..(7): Xaa is C or S
ASASPXXVSQDLEPISILYLIGKTPKIKFKYEMIVK

SEQ ID NO: 37848 - protein, 35 aa, Artificial Sequence
  Cyclic GFR-binding peptide
  MOD_RES (32)..(34): Xaa is C or S
APTKLSPISVLYIDDSSNVIYKQYENMVVRSXGXH

SEQ ID NO: 37849 - protein, 29 aa, Artificial Sequence
  Cyclic GFR-binding peptide
  MOD_RES (1)..(1): Xaa is C or S
XAPTKLSPISVLYKDSSNNVILKYHYNMV

SEQ ID NO: 37850 - protein, 28 aa, Artificial Sequence
  Cyclic GFR-binding peptide
  MOD_RES (28)..(28): Xaa is C or S
ALSPISILYKVGRKPKVLKYHYMIVRSX

SEQ ID NO: 37851 - protein, 32 aa, Artificial Sequence
  Cyclic GFR-binding peptide
  MOD_RES (29)..(31): Xaa is C or S
ELEPISMLYLDEYDKVVKFKYEEMVVEGXGXR

SEQ ID NO: 37852 - protein, 29 aa, Artificial Sequence
  Cyclic GFR-binding peptide
  MOD_RES (1)..(1): Xaa is C or S
XVPQALSPISILYIVGRKPKVYKQYEMIV

SEQ ID NO: 37853 - protein, 35 aa, Artificial Sequence
  Cyclic GFR-binding peptide
  MOD_RES (6)..(7): Xaa is C or S
KVGKAXXVPTKLSPISVLYIDDMGVPTYKQYEEGM

SEQ ID NO: 37854 - protein, 24 aa, Artificial Sequence
  Cyclic GFR-binding peptide
LEPISILYLVGRKPKVKFKYEMIV

SEQ ID NO: 37855 - protein, 23 aa, Artificial Sequence
  Cyclic GFR-binding peptide
KLNAISVLYFDDMGVPTLKKYRE

SEQ ID NO: 37856 - protein, 34 aa, Artificial Sequence
  Cyclic GFR-binding peptide
  MOD_RES (6)..(7): Xaa is C or S
YVPKPXXAPTKLEPISVLYLDDSSNVIKFKYENM

SEQ ID NO: 37857 - protein, 40 aa, Artificial Sequence
  Cyclic GFR-binding peptide
  MOD_RES (5)..(6)..(38)..(40): Xaa is C or S
ASKAXXVPTKLSPISILYKDKGVVTYLKYHYGMAVSEXGX

SEQ ID NO: 37858 - protein, 32 aa, Artificial Sequence
  Cyclic GFR-binding peptide
  MOD_RES (5)..(6): Xaa is C or S
ASKAXXVPTKLSPISILYKDKGVVTYLKYHYG

SEQ ID NO: 37859 - protein, 30 aa, Artificial Sequence
  Cyclic GFR-binding peptide
  MOD_RES (2)..(3): Xaa is C or S
PXXVSQDLSPISILYIIGKTPKIYKQYEMI

SEQ ID NO: 37860 - protein, 26 aa, Artificial Sequence
  Cyclic GFR-binding peptide
TELSPISMLYKDENEKVVLKYHYDMV

SEQ ID NO: 37861 - protein, 34 aa, Artificial Sequence
  Cyclic GFR-binding peptide
  MOD_RES (5)..(6): Xaa is C or S
VGKAXXVPTKLEPISVLYLDDMGVPTKFKYEEGM

SEQ ID NO: 37862 - protein, 31 aa, Artificial Sequence
  Cyclic GFR-binding peptide
  MOD_RES (4)..(5): Xaa is C or S
PKAXXVPTELSPISMLYIDEYDKVVYKQYEE

SEQ ID NO: 37863 - protein, 33 aa, Artificial Sequence
  Cyclic GFR-binding peptide
  MOD_RES (5)..(6): Xaa is C or S
VPKAXXAPTKLSPISVLYIDSSNNVIYKQYENM

SEQ ID NO: 37864 - protein, 35 aa, Artificial Sequence
  Cyclic GFR-binding peptide
  MOD_RES (1)..(33)..(35): Xaa is C or S
XVPTELSPISMLYIDENEKVVYKQYEDMVVEGXGX

SEQ ID NO: 37865 - protein, 28 aa, Artificial Sequence
  Cyclic GFR-binding peptide
RLNAISILYFDAANNVVLKKYRDMVVEA

SEQ ID NO: 37866 - protein, 28 aa, Artificial Sequence
  Cyclic GFR-binding peptide
  MOD_RES (27)..(27): Xaa is C or S
NAISILYFDAANNVVLKKYRDMVVEAXG

SEQ ID NO: 37867 - protein, 26 aa, Artificial Sequence
  Cyclic GFR-binding peptide
LSPISVLYIDSSNNVIYKQYENMVVK

SEQ ID NO: 37868 - protein, 31 aa, Artificial Sequence; identical to SEQ ID NO: 9124
  Cyclic GFR-binding peptide
  MOD_RES (31)..(31): Xaa is C or S

SEQ ID NO: 37869 - protein, 25 aa, Artificial Sequence
  Cyclic GFR-binding peptide
LSPISVLYKDSSNNVILKYHYNMVV

SEQ ID NO: 37870 - protein, 41 aa, Artificial Sequence
  Cyclic GFR-binding peptide
  MOD_RES (6)..(7)..(39)..(41): Xaa is C or S
KASKAXXVPTKLSPISILYIDKGVVTYYKQYEGMAVSEXGX

SEQ ID NO: 37871 - protein, 27 aa, Artificial Sequence
  Cyclic GFR-binding peptide
SQDLSPISILYKIGKTPKILKYHYMIV

SEQ ID NO: 37872 - protein, 31 aa, Artificial Sequence; identical to SEQ ID NO: 9128
  Cyclic GFR-binding peptide
  MOD_RES (3)..(4): Xaa is C or S

SEQ ID NO: 37873 - protein, 27 aa, Artificial Sequence
  Cyclic GFR-binding peptide
KLEPISVLYLDDSSNVIKFKYENMVVR

SEQ ID NO: 37874 - protein, 28 aa, Artificial Sequence
  Cyclic GFR-binding peptide
  MOD_RES (2)..(3): Xaa is C or S
PXXVPQDLSPISILYIVGRTPKVYKQYE

SEQ ID NO: 37875 - protein, 29 aa, Artificial Sequence
  Cyclic GFR-binding peptide
  MOD_RES (3)..(4): Xaa is C or S
SPXXVSQDLEPISILYLIGKTPKIKFKYE

SEQ ID NO: 37876 - protein, 27 aa, Artificial Sequence
  Cyclic GFR-binding peptide
  MOD_RES (1)..(2): Xaa is C or S
XXVPQALNAISILYFVGRKPKVLKKYR

SEQ ID NO: 37877 - protein, 31 aa, Artificial Sequence; identical to SEQ ID NO: 9131
  Cyclic GFR-binding peptide
  MOD_RES (2)..(3): Xaa is C or S

SEQ ID NO: 37878 - protein, 34 aa, Artificial Sequence; identical to SEQ ID NO: 9132
  Cyclic GFR-binding peptide
  MOD_RES (5)..(6): Xaa is C or S

SEQ ID NO: 37879 - protein, 35 aa, Artificial Sequence
  Cyclic GFR-binding peptide
  MOD_RES (4)..(5): Xaa is C or S
AAPXXVPQALEPISILYLVGRKPKVKFKYEMIVRS

SEQ ID NO: 37880 - protein, 26 aa, Artificial Sequence
  Cyclic GFR-binding peptide
EPISMLYLDENEKVVKFKYEDMVVEG

SEQ ID NO: 37881 - protein, 30 aa, Artificial Sequence; identical to SEQ ID NO: 9136
  Cyclic GFR-binding peptide
  MOD_RES (1)..(1): Xaa is C or S

SEQ ID NO: 37882 - protein, 29 aa, Artificial Sequence
  Cyclic GFR-binding peptide
  MOD_RES (1)..(2): Xaa is C or S
XXVPTELNAISMLYFDEYDKVVLKKYREM

SEQ ID NO: 37883 - protein, 31 aa, Artificial Sequence
  Cyclic GFR-binding peptide
  MOD_RES (1)..(1): Xaa is C or S
XVSQDLEPISILYLIGKTPKIKFKYEMIVKS

SEQ ID NO: 37884 - protein, 34 aa, Artificial Sequence
  Cyclic GFR-binding peptide
  MOD_RES (4)..(4): Xaa is C or S
KPTXAPTKLSPISVLYIDDSSNVIYKQYENMVVR

SEQ ID NO: 37885 - protein, 33 aa, Artificial Sequence
  Cyclic GFR-binding peptide
  MOD_RES (1)..(2): Xaa is C or S
XXVPARLEPISILYLDAANNVVKFKYEDMVVEA

SEQ ID NO: 37886 - protein, 37 aa, Artificial Sequence
  Cyclic GFR-binding peptide
  MOD_RES (5)..(6): Xaa is C or S
ASKAXXVPTKLSPISILYKDKGVVTYLKYHYGMAVSE

SEQ ID NO: 37887 - protein, 25 aa, Artificial Sequence
  Cyclic GFR-binding peptide
PTELSPISMLYKDEYDKVVLKYHYE

SEQ ID NO: 37888 - protein, 29 aa, Artificial Sequence
  Cyclic GFR-binding peptide
  MOD_RES (28)..(28): Xaa is C or S
LSPISMLYIDEYDKVVYKQYEEMVVEGXG

SEQ ID NO: 37889 - protein, 29 aa, Artificial Sequence
  Cyclic GFR-binding peptide
  MOD_RES (29)..(29): Xaa is C or S
QDLSPISILYKVGRTPKVLKYHYMVVKSX

SEQ ID NO: 37890 - protein, 34 aa, Artificial Sequence; identical to SEQ ID NO: 9141
  Cyclic GFR-binding peptide
  MOD_RES (1)..(32)..(34): Xaa is C or S

SEQ ID NO: 37891 - protein, 30 aa, Artificial Sequence
  Cyclic GFR-binding peptide
  MOD_RES (27)..(29): Xaa is C or S
NAISILYFDAANNVVLKKYRDMVVEAXGXR

SEQ ID NO: 37892 - protein, 32 aa, Artificial Sequence; identical to SEQ ID NO: 9142
  Cyclic GFR-binding peptide
  MOD_RES (2)..(3): Xaa is C or S

SEQ ID NO: 37893 - protein, 22 aa, Artificial Sequence
  Cyclic GFR-binding peptide
LSPISILYKVGRTPKVLKYHYM

SEQ ID NO: 37894 - protein, 37 aa, Artificial Sequence
  Cyclic GFR-binding peptide
  MOD_RES (1)..(2)..(34)..(36): Xaa is C or S
XXAPTKLEPISVLYLDDSSNVIKFKYENMVVRSXGXH

SEQ ID NO: 37895 - protein, 34 aa, Artificial Sequence; identical to SEQ ID NO: 9145
  Cyclic GFR-binding peptide
  MOD_RES (4)..(5): Xaa is C or S

SEQ ID NO: 37896 - protein, 38 aa, Artificial Sequence
  Cyclic GFR-binding peptide
  MOD_RES (6)..(7): Xaa is C or S
AAPASXXVPARLNAISILYFDAANNVVLKKYRDMVVEA

SEQ ID NO: 37897 - protein, 35 aa, Artificial Sequence; identical to SEQ ID NO: 9146
  Cyclic GFR-binding peptide
  MOD_RES (2)..(3)..(35): Xaa is C or S

SEQ ID NO: 37898 - protein, 30 aa, Artificial Sequence; identical to SEQ ID NO: 9147
  Cyclic GFR-binding peptide
  MOD_RES (30)..(30): Xaa is C or S

SEQ ID NO: 37899 - protein, 39 aa, Artificial Sequence
  Cyclic GFR-binding peptide
  MOD_RES (6)..(7)..(38): Xaa is C or S
ASASPXXVSQDLSPISILYIIGKTPKIYKQYEMIVKSXK

SEQ ID NO: 37900 - protein, 41 aa, Artificial Sequence
  Cyclic GFR-binding peptide
  MOD_RES (6)..(38)..(40): Xaa is C or S
VTKPTXAPTKLSPISVLYIDDSSNVIYKQYENMVVRSXGXH

SEQ ID NO: 37901 - protein, 29 aa, Artificial Sequence
  Cyclic GFR-binding peptide
  MOD_RES (27)..(29): Xaa is C or S
NAISILYFDAANNVVLKKYRDMVVEAXGX

SEQ ID NO: 37902 - protein, 32 aa, Artificial Sequence
  Cyclic GFR-binding peptide
  MOD_RES (3)..(4): Xaa is C or S
SPXXVSQDLSPISILYIIGKTPKIYKQYEMIV

SEQ ID NO: 37903 - protein, 21 aa, Artificial Sequence
  Cyclic GFR-binding peptide
LSPISILYKIGKTPKILKYHY

SEQ ID NO: 37904 - protein, 26 aa, Artificial Sequence
  Cyclic GFR-binding peptide
QDLSPISILYKVGRTPKVLKYHYMVV

SEQ ID NO: 37905 - protein, 31 aa, Artificial Sequence
  Cyclic GFR-binding peptide
  MOD_RES (5)..(6): Xaa is C or S
VPKPXXAPTQLSPISVLYIDDSSNVIYKQYE

SEQ ID NO: 37906 - protein, 33 aa, Artificial Sequence
  Cyclic GFR-binding peptide
  MOD_RES (5)..(6): Xaa is C or S
ASKAXXVPTKLSPISILYIDKGVVTYYKQYEGM

SEQ ID NO: 37907 - protein, 35 aa, Artificial Sequence
  Cyclic GFR-binding peptide
  MOD_RES (6)..(7): Xaa is C or S
KIPKAXXVPTELSPISMLYIDENEKVVYKQYEDMV

SEQ ID NO: 37908 - protein, 30 aa, Artificial Sequence
  Cyclic GFR-binding peptide
  MOD_RES (1)..(2): Xaa is C or S
XXAPTKLSPISVLYIDDSSNVIYKQYENMV

SEQ ID NO: 37909 - protein, 30 aa, Artificial Sequence
  Cyclic GFR-binding peptide
  MOD_RES (1)..(2): Xaa is C or S
XXAPTKLSPISVLYIDSSNNVIYKQYENMV

SEQ ID NO: 37910 - protein, 36 aa, Artificial Sequence
  Cyclic GFR-binding peptide
  MOD_RES (7)..(7): Xaa is C or S
HVTKPTXAPTKLEPISVLYLDDSSNVIKFKYENMVV

SEQ ID NO: 37911 - protein, 39 aa, Artificial Sequence
  Cyclic GFR-binding peptide
  MOD_RES (6)..(7)..(39): Xaa is C or S
AVPKAXXAPTKLEPISVLYLDSSNNVIKFKYENMVVKAX

SEQ ID NO: 37912 - protein, 20 aa, Artificial Sequence
  Cyclic GFR-binding peptide
SPISVLYIDSSNNVIYKQYE

SEQ ID NO: 37913 - protein, 34 aa, Artificial Sequence
  Cyclic GFR-binding peptide
  MOD_RES (32)..(34): Xaa is C or S
APTKLSPISVLYIDDSSNVIYKQYENMVVRSXGX

SEQ ID NO: 37914 - protein, 31 aa, Artificial Sequence
  Cyclic GFR-binding peptide
  MOD_RES (28)..(30): Xaa is C or S
EPISVLYLDDMGVPTKFKYEEGMSVAEXGXR

SEQ ID NO: 37915 - protein, 24 aa, Artificial Sequence
  Cyclic GFR-binding peptide
SPISVLYIDDMGVPTYKQYEEGMS

SEQ ID NO: 37916 - protein, 38 aa, Artificial Sequence
  Cyclic GFR-binding peptide
  MOD_RES (4)..(5)..(37): Xaa is C or S
PKAXXVPTELEPISMLYLDENEKVVKFKYEDMVVEGXG

SEQ ID NO: 37917 - protein, 33 aa, Artificial Sequence; identical to SEQ ID NO: 9158
  Cyclic GFR-binding peptide
  MOD_RES (4)..(5): Xaa is C or S

SEQ ID NO: 37918 - protein, 32 aa, Artificial Sequence
  Cyclic GFR-binding peptide
  MOD_RES (1)..(2): Xaa is C or S
XXVPTKLNAISILYFDKGVVTYLKKYRGMAVS

SEQ ID NO: 37919 - protein, 28 aa, Artificial Sequence
  Cyclic GFR-binding peptide
QDLSPISILYIIGKTPKIYKQYEMIVKS

SEQ ID NO: 37920 - protein, 33 aa, Artificial Sequence
  Cyclic GFR-binding peptide
  MOD_RES (31)..(33): Xaa is C or S
VSQDLSPISILYIIGKTPKIYKQYEMIVKSXKX

SEQ ID NO: 37921 - protein, 29 aa, Artificial Sequence
  Cyclic GFR-binding peptide
PTELEPISMLYLDEYDKVVKFKYEEMVVE

SEQ ID NO: 37922 - protein, 28 aa, Artificial Sequence
  Cyclic GFR-binding peptide
  MOD_RES (27)..(27): Xaa is C or S
SPISMLYIDEYDKVVYKQYEEMVVEGXG

SEQ ID NO: 37923 - protein, 23 aa, Artificial Sequence
  Cyclic GFR-binding peptide
LSPISILYIVGRTPKVYKQYEMV

SEQ ID NO: 37924 - protein, 29 aa, Artificial Sequence
  Cyclic GFR-binding peptide
  MOD_RES (1)..(2): Xaa is C or S
XXAPTKLSPISVLYKDDSSNVILKYHYNM

SEQ ID NO: 37925 - protein, 24 aa, Artificial Sequence
  Cyclic GFR-binding peptide
SPISVLYIDSSNNVIYKQYENMVV

SEQ ID NO: 37926 - protein, 35 aa, Artificial Sequence; identical to SEQ ID NO: 9165
  Cyclic GFR-binding peptide
  MOD_RES (5)..(6): Xaa is C or S

SEQ ID NO: 37927 - protein, 32 aa, Artificial Sequence; identical to SEQ ID NO: 9167
  Cyclic GFR-binding peptide
  MOD_RES (3)..(4): Xaa is C or S

SEQ ID NO: 37928 - protein, 22 aa, Artificial Sequence
  Cyclic GFR-binding peptide
ALSPISILYIVGRKPKVYKQYE

SEQ ID NO: 37929 - protein, 34 aa, Artificial Sequence
  Cyclic GFR-binding peptide
  MOD_RES (1)..(32)..(34): Xaa is C or S
XVPQDLSPISILYIVGRTPKVYKQYEMVVKSXKX

SEQ ID NO: 37930 - protein, 29 aa, Artificial Sequence
  Cyclic GFR-binding peptide
  MOD_RES (3)..(4): Xaa is C or S
SPXXVPQDLSPISILYKVGRTPKVLKYHY

SEQ ID NO: 37931 - protein, 30 aa, Artificial Sequence
  Cyclic GFR-binding peptide
  MOD_RES (4)..(5): Xaa is C or S
SKAXXVPTKLNAISILYFDKGVVTYLKKYR

SEQ ID NO: 37932 - protein, 37 aa, Artificial Sequence; identical to SEQ ID NO: 9170
  Cyclic GFR-binding peptide
  MOD_RES (4)..(5)..(36): Xaa is C or S

SEQ ID NO: 37933 - protein, 33 aa, Artificial Sequence; identical to SEQ ID NO: 9171
  Cyclic GFR-binding peptide
  MOD_RES (4)..(5): Xaa is C or S

SEQ ID NO: 37934 - protein, 31 aa, Artificial Sequence; identical to SEQ ID NO: 9172
  Cyclic GFR-binding peptide
  MOD_RES (31)..(31): Xaa is C or S

SEQ ID NO: 37935 - protein, 28 aa, Artificial Sequence
  Cyclic GFR-binding peptide
  MOD_RES (2)..(2): Xaa is C or S
TXAPTKLSPISVLYKDDSSNVILKYHYN

SEQ ID NO: 37936 - protein, 29 aa, Artificial Sequence
  Cyclic GFR-binding peptide
  MOD_RES (29)..(29): Xaa is C or S
QDLSPISILYKIGKTPKILKYHYMIVKSX

SEQ ID NO: 37937 - protein, 40 aa, Artificial Sequence
  Cyclic GFR-binding peptide
  MOD_RES (5)..(6)..(37)..(39): Xaa is C or S
SASPXXVSQDLEPISILYLIGKTPKIKFKYEMIVKSXKXS

SEQ ID NO: 37938 - protein, 32 aa, Artificial Sequence
  Cyclic GFR-binding peptide
  MOD_RES (30)..(32): Xaa is C or S
ARLSPISILYKDAANNVVLKYHYDMVVEAXGX

SEQ ID NO: 37939 - protein, 35 aa, Artificial Sequence; identical to SEQ ID NO: 9176
  Cyclic GFR-binding peptide
  MOD_RES (6)..(7): Xaa is C or S

SEQ ID NO: 37940 - protein, 32 aa, Artificial Sequence; identical to SEQ ID NO: 9177
  Cyclic GFR-binding peptide
  MOD_RES (29)..(31): Xaa is C or S

SEQ ID NO: 37941 - protein, 21 aa, Artificial Sequence
  Cyclic GFR-binding peptide
LEPISVLYLDDSSNVIKFKYE

SEQ ID NO: 37942 - protein, 24 aa, Artificial Sequence
  Cyclic GFR-binding peptide
SPISMLYKDEYDKVVLKYHYEMVV

SEQ ID NO: 37943 - protein, 39 aa, Artificial Sequence
  Cyclic GFR-binding peptide
  MOD_RES (3)..(4)..(36)..(38): Xaa is C or S
KAXXAPTKLSPISVLYIDSSNNVIYKQYENMVVKAXGXH

SEQ ID NO: 37944 - protein, 36 aa, Artificial Sequence; identical to SEQ ID NO: 9180
  Cyclic GFR-binding peptide
  MOD_RES (6)..(7): Xaa is C or S

SEQ ID NO: 37945 - protein, 29 aa, Artificial Sequence
  Cyclic GFR-binding peptide
PARLEPISILYLDAANNVVKFKYEDMVVE

SEQ ID NO: 37946 - protein, 27 aa, Artificial Sequence
  Cyclic GFR-binding peptide
  MOD_RES (1)..(2): Xaa is C or S
XXAPTKLNAISVLYFDSSNNVILKKYR

SEQ ID NO: 37947 - protein, 35 aa, Artificial Sequence
  Cyclic GFR-binding peptide
  MOD_RES (3)..(4): Xaa is C or S
KPXXAPTQLSPISVLYIDDSSNVIYKQYENMVVRA

SEQ ID NO: 37948 - protein, 28 aa, Artificial Sequence
  Cyclic GFR-binding peptide
  MOD_RES (1)..(2): Xaa is C or S
XXAPTKLSPISVLYIDDSSNVIYKQYEN

SEQ ID NO: 37949 - protein, 35 aa, Artificial Sequence; identical to SEQ ID NO: 9184
  Cyclic GFR-binding peptide
  MOD_RES (2)..(3)..(35): Xaa is C or S

SEQ ID NO: 37950 - protein, 24 aa, Artificial Sequence
  Cyclic GFR-binding peptide
PARLNAISILYFDAANNVVLKKYR

SEQ ID NO: 37951 - protein, 32 aa, Artificial Sequence
  Cyclic GFR-binding peptide
  MOD_RES (3)..(4): Xaa is C or S
KAXXVPTKLSPISILYIDKGVVTYYKQYEGMA

SEQ ID NO: 37952 - protein, 28 aa, Artificial Sequence
  Cyclic GFR-binding peptide
ARLEPISILYLDAANNVVKFKYEDMVVE

SEQ ID NO: 37953 - protein, 27 aa, Artificial Sequence
  Cyclic GFR-binding peptide
  MOD_RES (1)..(2): Xaa is C or S
XXVPTELSPISMLYIDENEKVVYKQYE

SEQ ID NO: 37954 - protein, 41 aa, Artificial Sequence; identical to SEQ ID NO: 9191
  Cyclic GFR-binding peptide
  MOD_RES (6)..(7)..(39)..(41): Xaa is C or S

SEQ ID NO: 37955 - protein, 27 aa, Artificial Sequence
  Cyclic GFR-binding peptide
TELEPISMLYLDEYDKVVKFKYEEMVV

SEQ ID NO: 37956 - protein, 29 aa, Artificial Sequence
  Cyclic GFR-binding peptide
  MOD_RES (28)..(28): Xaa is C or S
LNAISILYFDAANNVVLKKYRDMVVEAXG

SEQ ID NO: 37957 - protein, 29 aa, Artificial Sequence
  Cyclic GFR-binding peptide
PTKLNAISVLYFDDMGVPTLKKYREGMSV

SEQ ID NO: 37958 - protein, 36 aa, Artificial Sequence
  Cyclic GFR-binding peptide
  MOD_RES (6)..(7): Xaa is C or S
ASASPXXVPQDLSPISILYIVGRTPKVYKQYEMVVK

SEQ ID NO: 37959 - protein, 34 aa, Artificial Sequence; identical to SEQ ID NO: 9195
  Cyclic GFR-binding peptide
  MOD_RES (4)..(5): Xaa is C or S

SEQ ID NO: 37960 - protein, 27 aa, Artificial Sequence
  Cyclic GFR-binding peptide
TKLSPISVLYIDDSSNVIYKQYENMVV

SEQ ID NO: 37961 - protein, 36 aa, Artificial Sequence
  Cyclic GFR-binding peptide
  MOD_RES (6)..(7): Xaa is C or S
KASKAXXVPTKLSPISILYKDKGVVTYLKYHYGMAV

SEQ ID NO: 37962 - protein, 27 aa, Artificial Sequence
  Cyclic GFR-binding peptide
  MOD_RES (27)..(27): Xaa is C or S
EPISMLYLDENEKVVKFKYEDMVVEGX

SEQ ID NO: 37963 - protein, 29 aa, Artificial Sequence
  Cyclic GFR-binding peptide
  MOD_RES (2)..(3): Xaa is C or S
AXXVPTELSPISMLYKDENEKVVLKYHYD

SEQ ID NO: 37964 - protein, 23 aa, Artificial Sequence
  Cyclic GFR-binding peptide
KLSPISVLYIDSSNNVIYKQYEN

SEQ ID NO: 37965 - protein, 41 aa, Artificial Sequence
  Cyclic GFR-binding peptide
  MOD_RES (6)..(7)..(38)..(40): Xaa is C or S
ASASPXXVPQDLEPISILYLVGRTPKVKFKYEMVVKSXKXS

SEQ ID NO: 37966 - protein, 34 aa, Artificial Sequence
  Cyclic GFR-binding peptide
  MOD_RES (2)..(3): Xaa is C or S
PXXAPTKLEPISVLYLDDSSNVIKFKYENMVVRS

SEQ ID NO: 37967 - protein, 28 aa, Artificial Sequence
  Cyclic GFR-binding peptide
  MOD_RES (28)..(28): Xaa is C or S
LSPISVLYIDDSSNVIYKQYENMVVRAX

SEQ ID NO: 37968 - protein, 35 aa, Artificial Sequence
  Cyclic GFR-binding peptide
  MOD_RES (5)..(6): Xaa is C or S
APASXXVPARLSPISILYKDAANNVVLKYHYDMVV

SEQ ID NO: 37969 - protein, 37 aa, Artificial Sequence; identical to SEQ ID NO: 9199
  Cyclic GFR-binding peptide
  MOD_RES (3)..(4)..(36): Xaa is C or S

SEQ ID NO: 37970 - protein, 33 aa, Artificial Sequence
  Cyclic GFR-binding peptide
  MOD_RES (3)..(4): Xaa is C or S
APXXVPQALEPISILYLVGRKPKVKFKYEMIVR

SEQ ID NO: 37971 - protein, 29 aa, Artificial Sequence
  Cyclic GFR-binding peptide
TKLSPISVLYKDDSSNVILKYHYNMVVRS

SEQ ID NO: 37972 - protein, 38 aa, Artificial Sequence
  Cyclic GFR-binding peptide
  MOD_RES (6)..(7)..(38): Xaa is C or S
ASASPXXVPQDLEPISILYLVGRTPKVKFKYEMVVKSX

SEQ ID NO: 37973 - protein, 32 aa, Artificial Sequence
  Cyclic GFR-binding peptide
  MOD_RES (29)..(31): Xaa is C or S
QALEPISILYLVGRKPKVKFKYEMIVRSXKXS

SEQ ID NO: 37974 - protein, 32 aa, Artificial Sequence
  Cyclic GFR-binding peptide
  MOD_RES (2)..(3): Xaa is C or S
PXXVSQDLEPISILYLIGKTPKIKFKYEMIVK

SEQ ID NO: 37975 - protein, 37 aa, Artificial Sequence
  Cyclic GFR-binding peptide
  MOD_RES (5)..(6): Xaa is C or S
ASKAXXVPTKLSPISILYIDKGVVTYYKQYEGMAVSE

SEQ ID NO: 37976 - protein, 20 aa, Artificial Sequence
  Cyclic GFR-binding peptide
SPISILYKVGRKPKVLKYHY

SEQ ID NO: 37977 - protein, 40 aa, Artificial Sequence
  Cyclic GFR-binding peptide
  MOD_RES (4)..(5)..(37)..(39): Xaa is C or S
PKAXXVPTELEPISMLYLDENEKVVKFKYEDMVVEGXGXR

SEQ ID NO: 37978 - protein, 33 aa, Artificial Sequence
  Cyclic GFR-binding peptide
  MOD_RES (6)..(7): Xaa is C or S
AVPKAXXAPTKLSPISVLYIDSSNNVIYKQYEN

SEQ ID NO: 37979 - protein, 28 aa, Artificial Sequence
  Cyclic GFR-binding peptide
TELEPISMLYLDEYDKVVKFKYEEMVVE

SEQ ID NO: 37980 - protein, 32 aa, Artificial Sequence; identical to SEQ ID NO: 9204
  Cyclic GFR-binding peptide
  MOD_RES (30)..(32): Xaa is C or S

SEQ ID NO: 37981 - protein, 35 aa, Artificial Sequence
  Cyclic GFR-binding peptide
  MOD_RES (5)..(6): Xaa is C or S
VPKPXXAPTKLEPISVLYLDDSSNVIKFKYENMVV

SEQ ID NO: 37982 - protein, 27 aa, Artificial Sequence
  Cyclic GFR-binding peptide
APTKLSPISVLYIDDSSNVIYKQYENM

SEQ ID NO: 37983 - protein, 23 aa, Artificial Sequence
  Cyclic GFR-binding peptide
QDLSPISILYIIGKTPKIYKQYE

SEQ ID NO: 37984 - protein, 35 aa, Artificial Sequence
  Cyclic GFR-binding peptide
  MOD_RES (2)..(3)..(34): Xaa is C or S
PXXVPQDLSPISILYIVGRTPKVYKQYEMVVKSXK

SEQ ID NO: 37985 - protein, 30 aa, Artificial Sequence
  Cyclic GFR-binding peptide
  MOD_RES (3)..(4): Xaa is C or S
ASXXVPARLSPISILYKDAANNVVLKYHYD

SEQ ID NO: 37986 - protein, 21 aa, Artificial Sequence
  Cyclic GFR-binding peptide
LNAISILYFVGRKPKVLKKYR

SEQ ID NO: 37987 - protein, 32 aa, Artificial Sequence; identical to SEQ ID NO: 9213
  Cyclic GFR-binding peptide
  MOD_RES (2)..(3): Xaa is C or S

SEQ ID NO: 37988 - protein, 27 aa, Artificial Sequence
  Cyclic GFR-binding peptide
TKLSPISVLYKDSSNNVILKYHYNMVV

SEQ ID NO: 37989 - protein, 26 aa, Artificial Sequence
  Cyclic GFR-binding peptide
RLSPISILYKDAANNVVLKYHYDMVV

SEQ ID NO: 37990 - protein, 22 aa, Artificial Sequence
  Cyclic GFR-binding peptide
LSPISILYKVGRKPKVLKYHYM

SEQ ID NO: 37991 - protein, 29 aa, Artificial Sequence
  Cyclic GFR-binding peptide
APTQLSPISVLYIDDSSNVIYKQYENMVV

SEQ ID NO: 37992 - protein, 35 aa, Artificial Sequence
  Cyclic GFR-binding peptide
  MOD_RES (1)..(2)..(34): Xaa is C or S
XXAPTQLSPISVLYIDDSSNVIYKQYENMVVRAXG

SEQ ID NO: 37993 - protein, 31 aa, Artificial Sequence
  Cyclic GFR-binding peptide
  MOD_RES (31)..(31): Xaa is C or S
PTKLEPISVLYLDDSSNVIKFKYENMVVRSX

SEQ ID NO: 37994 - protein, 34 aa, Artificial Sequence
  Cyclic GFR-binding peptide
  MOD_RES (1)..(2)..(34): Xaa is C or S
XXAPTKLSPISVLYIDSSNNVIYKQYENMVVKAX

SEQ ID NO: 37995 - protein, 27 aa, Artificial Sequence
  Cyclic GFR-binding peptide
  MOD_RES (1)..(1): Xaa is C or S
XAPTKLSPISVLYKDSSNNVILKYHYN

SEQ ID NO: 37996 - protein, 33 aa, Artificial Sequence
  Cyclic GFR-binding peptide
  MOD_RES (31)..(33): Xaa is C or S
PARLNAISILYFDAANNVVLKKYRDMVVEAXGX

SEQ ID NO: 37997 - protein, 29 aa, Artificial Sequence
  Cyclic GFR-binding peptide
  MOD_RES (29)..(29): Xaa is C or S
QDLSPISILYIVGRTPKVYKQYEMVVKSX

SEQ ID NO: 37998 - protein, 32 aa, Artificial Sequence
  Cyclic GFR-binding peptide
  MOD_RES (29)..(31): Xaa is C or S
RLSPISILYKDAANNVVLKYHYDMVVEAXGXR

SEQ ID NO: 37999 - protein, 27 aa, Artificial Sequence
  Cyclic GFR-binding peptide
  MOD_RES (27)..(27): Xaa is C or S
SPISILYKDKGVVTYLKYHYGMAVSEX

SEQ ID NO: 38000 - protein, 31 aa, Artificial Sequence
  Cyclic GFR-binding peptide
  MOD_RES (2)..(3): Xaa is C or S
SXXVPARLNAISILYFDAANNVVLKKYRDMV

SEQ ID NO: 38001 - protein, 30 aa, Artificial Sequence
  Cyclic GFR-binding peptide
  MOD_RES (3)..(4): Xaa is C or S
ASXXVPARLEPISILYLDAANNVVKFKYED

SEQ ID NO: 38002 - protein, 31 aa, Artificial Sequence; identical to SEQ ID NO: 9227
  Cyclic GFR-binding peptide
  MOD_RES (29)..(31): Xaa is C or S

SEQ ID NO: 38003 - protein, 28 aa, Artificial Sequence
  Cyclic GFR-binding peptide
  MOD_RES (28)..(28): Xaa is C or S
ALEPISILYLVGRKPKVKFKYEMIVRSX

SEQ ID NO: 38004 - protein, 36 aa, Artificial Sequence
  Cyclic GFR-binding peptide
  MOD_RES (5)..(6): Xaa is C or S
VPKPXXAPTQLEPISVLYLDDSSNVIKFKYENMVVR

SEQ ID NO: 38005 - protein, 25 aa, Artificial Sequence
  Cyclic GFR-binding peptide
VPTKLSPISILYIDKGVVTYYKQYE

SEQ ID NO: 38006 - protein, 31 aa, Artificial Sequence
  Cyclic GFR-binding peptide
  MOD_RES (2)..(3): Xaa is C or S
PXXAPTKLEPISVLYLDDSSNVIKFKYENMV

SEQ ID NO: 38007 - protein, 38 aa, Artificial Sequence; identical to SEQ ID NO: 9229
  Cyclic GFR-binding peptide
  MOD_RES (2)..(3)..(35)..(37): Xaa is C or S

SEQ ID NO: 38008 - protein, 24 aa, Artificial Sequence
  Cyclic GFR-binding peptide
KLSPISILYIDKGVVTYYKQYEGM

SEQ ID NO: 38009 - protein, 36 aa, Artificial Sequence
  Cyclic GFR-binding peptide
  MOD_RES (4)..(36): Xaa is C or S
KPTXAPTKLEPISVLYLDDSSNVIKFKYENMVVRSX

SEQ ID NO: 38010 - protein, 38 aa, Artificial Sequence
  Cyclic GFR-binding peptide
  MOD_RES (5)..(6)..(38): Xaa is C or S
APASXXVPARLEPISILYLDAANNVVKFKYEDMVVEAX

SEQ ID NO: 38011 - protein, 26 aa, Artificial Sequence
  Cyclic GFR-binding peptide
PTKLEPISVLYLDSSNNVIKFKYENM

SEQ ID NO: 38012 - protein, 31 aa, Artificial Sequence; identical to SEQ ID NO: 9231
  Cyclic GFR-binding peptide
  MOD_RES (31)..(31): Xaa is C or S

SEQ ID NO: 38013 - protein, 28 aa, Artificial Sequence
  Cyclic GFR-binding peptide
PARLSPISILYKDAANNVVLKYHYDMVV

SEQ ID NO: 38014 - protein, 27 aa, Artificial Sequence
  Cyclic GFR-binding peptide
  MOD_RES (1)..(1): Xaa is C or S
XAPTKLEPISVLYLDSSNNVIKFKYEN

SEQ ID NO: 38015 - protein, 30 aa, Artificial Sequence
  Cyclic GFR-binding peptide
  MOD_RES (28)..(30): Xaa is C or S
LSPISVLYIDSSNNVIYKQYENMVVKAXGX

SEQ ID NO: 38016 - protein, 29 aa, Artificial Sequence
  Cyclic GFR-binding peptide
  MOD_RES (1)..(1): Xaa is C or S
XAPTKLSPISVLYKDDSSNVILKYHYNMV

SEQ ID NO: 38017 - protein, 38 aa, Artificial Sequence
  Cyclic GFR-binding peptide
  MOD_RES (3)..(4)..(36)..(38): Xaa is C or S
KAXXAPTKLEPISVLYLDSSNNVIKFKYENMVVKAXGX

SEQ ID NO: 38018 - protein, 36 aa, Artificial Sequence
  Cyclic GFR-binding peptide
  MOD_RES (3)..(4)..(35): Xaa is C or S
SPXXVPQDLSPISILYIVGRTPKVYKQYEMVVKSXK

SEQ ID NO: 38019 - protein, 21 aa, Artificial Sequence
  Cyclic GFR-binding peptide
NAISVLYFDSSNNVILKKYRN

SEQ ID NO: 38020 - protein, 35 aa, Artificial Sequence; identical to SEQ ID NO: 9237
  Cyclic GFR-binding peptide
  MOD_RES (32)..(34): Xaa is C or S

SEQ ID NO: 38021 - protein, 34 aa, Artificial Sequence; identical to SEQ ID NO: 9238
  Cyclic GFR-binding peptide
  MOD_RES (1)..(2)..(33): Xaa is C or S

SEQ ID NO: 38022 - protein, 30 aa, Artificial Sequence; identical to SEQ ID NO: 9239
  Cyclic GFR-binding peptide
  MOD_RES (1)..(2): Xaa is C or S

SEQ ID NO: 38023 - protein, 34 aa, Artificial Sequence; identical to SEQ ID NO: 9240
  Cyclic GFR-binding peptide
  MOD_RES (2)..(3): Xaa is C or S

SEQ ID NO: 38024 - protein, 34 aa, Artificial Sequence; identical to SEQ ID NO: 9241
  Cyclic GFR-binding peptide
  MOD_RES (1)..(33): Xaa is C or S

SEQ ID NO: 38025 - protein, 27 aa, Artificial Sequence
  Cyclic GFR-binding peptide
  MOD_RES (1)..(2): Xaa is C or S
XXVPTKLNAISILYFDKGVVTYLKKYR

SEQ ID NO: 38026 - protein, 37 aa, Artificial Sequence
  Cyclic GFR-binding peptide
  MOD_RES (1)..(2)..(34)..(36): Xaa is C or S
XXVPARLNAISILYFDAANNVVLKKYRDMVVEAXGXR

SEQ ID NO: 38027 - protein, 32 aa, Artificial Sequence
  Cyclic GFR-binding peptide
  MOD_RES (31)..(31): Xaa is C or S
PTKLSPISVLYIDSSNNVIYKQYENMVVKAXG

SEQ ID NO: 38028 - protein, 26 aa, Artificial Sequence
  Cyclic GFR-binding peptide
PTKLNAISILYFDKGVVTYLKKYRGM

SEQ ID NO: 38029 - protein, 38 aa, Artificial Sequence
  Cyclic GFR-binding peptide
  MOD_RES (2)..(3)..(35)..(37): Xaa is C or S
AXXAPTKLEPISVLYLDSSNNVIKFKYENMVVKAXGXH

SEQ ID NO: 38030 - protein, 34 aa, Artificial Sequence
  Cyclic GFR-binding peptide
  MOD_RES (2)..(3): Xaa is C or S
AXXAPTKLSPISVLYIDSSNNVIYKQYENMVVKA

SEQ ID NO: 38031 - protein, 27 aa, Artificial Sequence
  Cyclic GFR-binding peptide
  MOD_RES (1)..(1): Xaa is C or S
XVPARLSPISILYKDAANNVVLKYHYD

SEQ ID NO: 38032 - protein, 36 aa, Artificial Sequence
  Cyclic GFR-binding peptide
  MOD_RES (4)..(5)..(36): Xaa is C or S
ASPXXVSQDLSPISILYIIGKTPKIYKQYEMIVKSX

SEQ ID NO: 38033 - protein, 37 aa, Artificial Sequence
  Cyclic GFR-binding peptide
  MOD_RES (1)..(2)..(34)..(36): Xaa is C or S
XXAPTKLSPISVLYIDDSSNVIYKQYENMVVRSXGXH

SEQ ID NO: 38034 - protein, 25 aa, Artificial Sequence
  Cyclic GFR-binding peptide
TKLSPISILYKDKGVVTYLKYHYGM

SEQ ID NO: 38035 - protein, 33 aa, Artificial Sequence
  Cyclic GFR-binding peptide
  MOD_RES (30)..(32): Xaa is C or S
KLEPISVLYLDDMGVPTKFKYEEGMSVAEXGXR

SEQ ID NO: 38036 - protein, 39 aa, Artificial Sequence
  Cyclic GFR-binding peptide
  MOD_RES (4)..(5)..(37)..(39): Xaa is C or S
PASXXVPARLNAISILYFDAANNVVLKKYRDMVVEAXGX

SEQ ID NO: 38037 - protein, 35 aa, Artificial Sequence; identical to SEQ ID NO: 9246
  Cyclic GFR-binding peptide
  MOD_RES (6)..(7): Xaa is C or S

SEQ ID NO: 38038 - protein, 34 aa, Artificial Sequence; identical to SEQ ID NO: 9249
  Cyclic GFR-binding peptide
  MOD_RES (3)..(4): Xaa is C or S

SEQ ID NO: 38039 - protein, 20 aa, Artificial Sequence
  Cyclic GFR-binding peptide
SPISMLYIDEYDKVVYKQYE

SEQ ID NO: 38040 - protein, 23 aa, Artificial Sequence
  Cyclic GFR-binding peptide
RLNAISILYFDAANNVVLKKYRD

SEQ ID NO: 38041 - protein, 23 aa, Artificial Sequence
  Cyclic GFR-binding peptide
TELSPISMLYIDEYDKVVYKQYE

SEQ ID NO: 38042 - protein, 37 aa, Artificial Sequence
  Cyclic GFR-binding peptide
  MOD_RES (4)..(5): Xaa is C or S
GKAXXVPTKLSPISVLYIDDMGVPTYKQYEEGMSVAE

SEQ ID NO: 38043 - protein, 33 aa, Artificial Sequence; identical to SEQ ID NO: 9253
  Cyclic GFR-binding peptide
  MOD_RES (30)..(32): Xaa is C or S

SEQ ID NO: 38044 - protein, 28 aa, Artificial Sequence
  Cyclic GFR-binding peptide
TKLSPISVLYIDDSSNVIYKQYENMVVR

SEQ ID NO: 38045 - protein, 23 aa, Artificial Sequence
  Cyclic GFR-binding peptide
NAISMLYFDEYDKVVLKKYREMV

SEQ ID NO: 38046 - protein, 24 aa, Artificial Sequence
  Cyclic GFR-binding peptide
PTELSPISMLYIDENEKVVYKQYE

SEQ ID NO: 38047 - protein, 28 aa, Artificial Sequence
  Cyclic GFR-binding peptide
SQDLNAISILYFIGKTPKILKKYRMIVK

SEQ ID NO: 38048 - protein, 24 aa, Artificial Sequence
  Cyclic GFR-binding peptide
QDLEPISILYLIGKTPKIKFKYEM

SEQ ID NO: 38049 - protein, 33 aa, Artificial Sequence
  Cyclic GFR-binding peptide
  MOD_RES (5)..(6): Xaa is C or S
VGKAXXVPTKLEPISVLYLDDMGVPTKFKYEEG

SEQ ID NO: 38050 - protein, 39 aa, Artificial Sequence; identical to SEQ ID NO: 9265
  Cyclic GFR-binding peptide
  MOD_RES (4)..(5)..(37)..(39): Xaa is C or S

SEQ ID NO: 38051 - protein, 33 aa, Artificial Sequence
  Cyclic GFR-binding peptide
  MOD_RES (31)..(33): Xaa is C or S
VPQDLSPISILYIVGRTPKVYKQYEMVVKSXKX

SEQ ID NO: 38052 - protein, 41 aa, Artificial Sequence; identical to SEQ ID NO: 9269
  Cyclic GFR-binding peptide
  MOD_RES (6)..(7)..(39)..(41): Xaa is C or S

SEQ ID NO: 38053 - protein, 26 aa, Artificial Sequence
  Cyclic GFR-binding peptide
QDLEPISILYLVGRTPKVKFKYEMVV

SEQ ID NO: 38054 - protein, 32 aa, Artificial Sequence; identical to SEQ ID NO: 9270
  Cyclic GFR-binding peptide
  MOD_RES (5)..(6): Xaa is C or S

SEQ ID NO: 38055 - protein, 26 aa, Artificial Sequence
  Cyclic GFR-binding peptide
NAISVLYFDDMGVPTLKKYREGMSVA

SEQ ID NO: 38056 - protein, 36 aa, Artificial Sequence
  Cyclic GFR-binding peptide
  MOD_RES (5)..(6): Xaa is C or S
ASKAXXVPTKLSPISILYKDKGVVTYLKYHYGMAVS

SEQ ID NO: 38057 - protein, 38 aa, Artificial Sequence; identical to SEQ ID NO: 9276
  Cyclic GFR-binding peptide
  MOD_RES (6)..(7): Xaa is C or S

SEQ ID NO: 38058 - protein, 31 aa, Artificial Sequence
  Cyclic GFR-binding peptide
  MOD_RES (31)..(31): Xaa is C or S
PARLEPISILYLDAANNVVKFKYEDMVVEAX

SEQ ID NO: 38059 - protein, 38 aa, Artificial Sequence
  Cyclic GFR-binding peptide
  MOD_RES (5)..(6)..(38): Xaa is C or S
VPKPXXAPTQLEPISVLYLDDSSNVIKFKYENMVVRAX

SEQ ID NO: 38060 - protein, 37 aa, Artificial Sequence
  Cyclic GFR-binding peptide
  MOD_RES (5)..(6): Xaa is C or S
IPKAXXVPTELEPISMLYLDEYDKVVKFKYEEMVVEG

SEQ ID NO: 38061 - protein, 28 aa, Artificial Sequence
  Cyclic GFR-binding peptide
  MOD_RES (2)..(3): Xaa is C or S
AXXAPTKLEPISVLYLDSSNNVIKFKYE

SEQ ID NO: 38062 - protein, 24 aa, Artificial Sequence
  Cyclic GFR-binding peptide
PTQLSPISVLYIDDSSNVIYKQYE

SEQ ID NO: 38063 - protein, 26 aa, Artificial Sequence
  Cyclic GFR-binding peptide
ARLEPISILYLDAANNVVKFKYEDMV

SEQ ID NO: 38064 - protein, 27 aa, Artificial Sequence
  Cyclic GFR-binding peptide
TELSPISMLYKDENEKVVLKYHYDMVV

SEQ ID NO: 38065 - protein, 27 aa, Artificial Sequence
  Cyclic GFR-binding peptide
KLEPISVLYLDSSNNVIKFKYENMVVK

SEQ ID NO: 38066 - protein, 41 aa, Artificial Sequence
  Cyclic GFR-binding peptide
  MOD_RES (5)..(6)..(38)..(40): Xaa is C or S
IPKAXXVPTELEPISMLYLDENEKVVKFKYEDMVVEGXGXR

SEQ ID NO: 38067 - protein, 29 aa, Artificial Sequence
  Cyclic GFR-binding peptide
  MOD_RES (29)..(29): Xaa is C or S
ELEPISMLYLDEYDKVVKFKYEEMVVEGX

SEQ ID NO: 38068 - protein, 20 aa, Artificial Sequence
  Cyclic GFR-binding peptide
SPISVLYKDDSSNVILKYHY

SEQ ID NO: 38069 - protein, 36 aa, Artificial Sequence; identical to SEQ ID NO: 9281
  Cyclic GFR-binding peptide
  MOD_RES (6)..(7): Xaa is C or S

SEQ ID NO: 38070 - protein, 35 aa, Artificial Sequence
  Cyclic GFR-binding peptide
  MOD_RES (3)..(4)..(35): Xaa is C or S
SPXXVSQDLSPISILYIIGKTPKIYKQYEMIVKSX

SEQ ID NO: 38071 - protein, 43 aa, Artificial Sequence
  Cyclic GFR-binding peptide
  MOD_RES (6)..(7)..(40)..(42): Xaa is C or S
KVGKAXXVPTKLSPISVLYIDDMGVPTYKQYEEGMSVAEXGXR

SEQ ID NO: 38072 - protein, 33 aa, Artificial Sequence
  Cyclic GFR-binding peptide
  MOD_RES (5)..(6): Xaa is C or S
VPKPXXAPTQLSPISVLYIDDSSNVIYKQYENM

SEQ ID NO: 38073 - protein, 28 aa, Artificial Sequence
  Cyclic GFR-binding peptide
  MOD_RES (1)..(1): Xaa is C or S
XVPTELSPISMLYKDENEKVVLKYHYDM

SEQ ID NO: 38074 - protein, 34 aa, Artificial Sequence
  Cyclic GFR-binding peptide
  MOD_RES (5)..(6): Xaa is C or S
ASKAXXVPTKLSPISILYIDKGVVTYYKQYEGMA

SEQ ID NO: 38075 - protein, 33 aa, Artificial Sequence; identical to SEQ ID NO: 9288
  Cyclic GFR-binding peptide
  MOD_RES (6)..(7): Xaa is C or S

SEQ ID NO: 38076 - protein, 32 aa, Artificial Sequence
  Cyclic GFR-binding peptide
  MOD_RES (4)..(5): Xaa is C or S
GKAXXVPTKLEPISVLYLDDMGVPTKFKYEEG

SEQ ID NO: 38077 - protein, 21 aa, Artificial Sequence
  Cyclic GFR-binding peptide
SPISILYKDKGVVTYLKYHYG

SEQ ID NO: 38078 - protein, 32 aa, Artificial Sequence
  Cyclic GFR-binding peptide
  MOD_RES (31)..(31): Xaa is C or S
PTKLNAISILYFDKGVVTYLKKYRGMAVSEXG

SEQ ID NO: 38079 - protein, 21 aa, Artificial Sequence
  Cyclic GFR-binding peptide
NAISVLYFDDMGVPTLKKYRE

SEQ ID NO: 38080 - protein, 28 aa, Artificial Sequence
  Cyclic GFR-binding peptide
  MOD_RES (27)..(27): Xaa is C or S
LSPISILYIVGRKPKVYKQYEMIVRSXK

SEQ ID NO: 38081 - protein, 32 aa, Artificial Sequence
  Cyclic GFR-binding peptide
  MOD_RES (32)..(32): Xaa is C or S
VPARLEPISILYLDAANNVVKFKYEDMVVEAX

SEQ ID NO: 38082 - protein, 33 aa, Artificial Sequence; identical to SEQ ID NO: 9295
  Cyclic GFR-binding peptide
  MOD_RES (5)..(5): Xaa is C or S

SEQ ID NO: 38083 - protein, 39 aa, Artificial Sequence
  Cyclic GFR-binding peptide
  MOD_RES (5)..(6)..(38): Xaa is C or S
IPKAXXVPTELSPISMLYIDENEKVVYKQYEDMVVEGXG

SEQ ID NO: 38084 - protein, 28 aa, Artificial Sequence
  Cyclic GFR-binding peptide
APTQLSPISVLYKDDSSNVILKYHYNMV

SEQ ID NO: 38085 - protein, 28 aa, Artificial Sequence
  Cyclic GFR-binding peptide
VPTKLSPISILYIDKGVVTYYKQYEGMA

SEQ ID NO: 38086 - protein, 27 aa, Artificial Sequence
  Cyclic GFR-binding peptide
TKLNAISVLYFDDMGVPTLKKYREGMS

SEQ ID NO: 38087 - protein, 29 aa, Artificial Sequence
  Cyclic GFR-binding peptide
PTKLSPISVLYIDDSSNVIYKQYENMVVR

SEQ ID NO: 38088 - protein, 27 aa, Artificial Sequence
  Cyclic GFR-binding peptide
  MOD_RES (1)..(1): Xaa is C or S
XVPARLEPISILYLDAANNVVKFKYED

SEQ ID NO: 38089 - protein, 31 aa, Artificial Sequence; identical to SEQ ID NO: 9309
  Cyclic GFR-binding peptide
  MOD_RES (3)..(4): Xaa is C or S

SEQ ID NO: 38090 - protein, 40 aa, Artificial Sequence
  Cyclic GFR-binding peptide
  MOD_RES (6)..(7)..(39): Xaa is C or S
AAPASXXVPARLSPISILYKDAANNVVLKYHYDMVVEAXG

SEQ ID NO: 38091 - protein, 34 aa, Artificial Sequence; identical to SEQ ID NO: 9312
  Cyclic GFR-binding peptide
  MOD_RES (1)..(32)..(34): Xaa is C or S

SEQ ID NO: 38092 - protein, 21 aa, Artificial Sequence
  Cyclic GFR-binding peptide
LSPISILYKVGRKPKVLKYHY

SEQ ID NO: 38093 - protein, 32 aa, Artificial Sequence
  Cyclic GFR-binding peptide
  MOD_RES (29)..(31): Xaa is C or S
QALSPISILYIVGRKPKVYKQYEMIVRSXKXS

SEQ ID NO: 38094 - protein, 35 aa, Artificial Sequence
  Cyclic GFR-binding peptide
  MOD_RES (5)..(6): Xaa is C or S
ASKAXXVPTKLSPISILYKDKGVVTYLKYHYGMAV

SEQ ID NO: 38095 - protein, 30 aa, Artificial Sequence
  Cyclic GFR-binding peptide
  MOD_RES (29)..(29): Xaa is C or S
KLSPISILYIDKGVVTYYKQYEGMAVSEXG

SEQ ID NO: 38096 - protein, 33 aa, Artificial Sequence
  Cyclic GFR-binding peptide
  MOD_RES (30)..(32): Xaa is C or S
PQDLSPISILYIVGRTPKVYKQYEMVVKSXKXS

SEQ ID NO: 38097 - protein, 22 aa, Artificial Sequence
  Cyclic GFR-binding peptide
SPISMLYKDENEKVVLKYHYDM

SEQ ID NO: 38098 - protein, 36 aa, Artificial Sequence; identical to SEQ ID NO: 9317
  Cyclic GFR-binding peptide
  MOD_RES (1)..(2)..(33)..(35): Xaa is C or S

SEQ ID NO: 38099 - protein, 26 aa, Artificial Sequence
  Cyclic GFR-binding peptide
KLSPISILYKDKGVVTYLKYHYGMAV

SEQ ID NO: 38100 - protein, 21 aa, Artificial Sequence
  Cyclic GFR-binding peptide
LSPISMLYIDEYDKVVYKQYE

SEQ ID NO: 38101 - protein, 23 aa, Artificial Sequence
  Cyclic GFR-binding peptide
SPISVLYKDDSSNVILKYHYNMV

SEQ ID NO: 38102 - protein, 29 aa, Artificial Sequence
  Cyclic GFR-binding peptide
  MOD_RES (2)..(3): Xaa is C or S
AXXVPTELEPISMLYLDENEKVVKFKYED

SEQ ID NO: 38103 - protein, 34 aa, Artificial Sequence; identical to SEQ ID NO: 9319
  Cyclic GFR-binding peptide
  MOD_RES (3)..(4): Xaa is C or S

SEQ ID NO: 38104 - protein, 31 aa, Artificial Sequence
  Cyclic GFR-binding peptide
  MOD_RES (1)..(2): Xaa is C or S
XXVSQDLSPISILYIIGKTPKIYKQYEMIVK

SEQ ID NO: 38105 - protein, 29 aa, Artificial Sequence
  Cyclic GFR-binding peptide
TQLSPISVLYIDDSSNVIYKQYENMVVRA

SEQ ID NO: 38106 - protein, 31 aa, Artificial Sequence
  Cyclic GFR-binding peptide
  MOD_RES (29)..(31): Xaa is C or S
KLNAISILYFDKGVVTYLKKYRGMAVSEXGX

SEQ ID NO: 38107 - protein, 30 aa, Artificial Sequence; identical to SEQ ID NO: 9324
  Cyclic GFR-binding peptide
  MOD_RES (30)..(30): Xaa is C or S

SEQ ID NO: 38108 - protein, 34 aa, Artificial Sequence
  Cyclic GFR-binding peptide
  MOD_RES (31)..(33): Xaa is C or S
VSQDLEPISILYLIGKTPKIKFKYEMIVKSXKXS

SEQ ID NO: 38109 - protein, 35 aa, Artificial Sequence
  Cyclic GFR-binding peptide
  MOD_RES (1)..(2)..(34): Xaa is C or S
XXAPTKLEPISVLYLDDSSNVIKFKYENMVVRSXG

SEQ ID NO: 38110 - protein, 27 aa, Artificial Sequence
  Cyclic GFR-binding peptide
  MOD_RES (1)..(2): Xaa is C or S
XXVPTELSPISMLYIDEYDKVVYKQYE

SEQ ID NO: 38111 - protein, 26 aa, Artificial Sequence
  Cyclic GFR-binding peptide
VPTELNAISMLYFDEYDKVVLKKYRE

SEQ ID NO: 38112 - protein, 30 aa, Artificial Sequence
  Cyclic GFR-binding peptide
  MOD_RES (4)..(5): Xaa is C or S
AAPXXVPQALSPISILYIVGRKPKVYKQYE

SEQ ID NO: 38113 - protein, 31 aa, Artificial Sequence; identical to SEQ ID NO: 9330
  Cyclic GFR-binding peptide
  MOD_RES (4)..(5): Xaa is C or S

SEQ ID NO: 38114 - protein, 36 aa, Artificial Sequence
  Cyclic GFR-binding peptide
  MOD_RES (1)..(33)..(35): Xaa is C or S
XAPTKLEPISVLYLDDSSNVIKFKYENMVVRSXGXH

SEQ ID NO: 38115 - protein, 25 aa, Artificial Sequence
  Cyclic GFR-binding peptide
VPQDLEPISILYLVGRTPKVKFKYE

SEQ ID NO: 38116 - protein, 33 aa, Artificial Sequence; identical to SEQ ID NO: 9331
  Cyclic GFR-binding peptide
  MOD_RES (1)..(33): Xaa is C or S

SEQ ID NO: 38117 - protein, 20 aa, Artificial Sequence
  Cyclic GFR-binding peptide
NAISILYFDKGVVTYLKKYR

SEQ ID NO: 38118 - protein, 20 aa, Artificial Sequence
  Cyclic GFR-binding peptide
NAISILYFVGRKPKVLKKYR

SEQ ID NO: 38119 - protein, 23 aa, Artificial Sequence
  Cyclic GFR-binding peptide
DLEPISILYLVGRTPKVKFKYEM

SEQ ID NO: 38120 - protein, 30 aa, Artificial Sequence
  Cyclic GFR-binding peptide
  MOD_RES (1)..(1): Xaa is C or S
XAPTKLEPISVLYLDDSSNVIKFKYENMVV

SEQ ID NO: 38121 - protein, 26 aa, Artificial Sequence
  Cyclic GFR-binding peptide
ALEPISILYLVGRKPKVKFKYEMIVR

SEQ ID NO: 38122 - protein, 33 aa, Artificial Sequence; identical to SEQ ID NO: 9336
  Cyclic GFR-binding peptide
  MOD_RES (31)..(33): Xaa is C or S

SEQ ID NO: 38123 - protein, 31 aa, Artificial Sequence
  Cyclic GFR-binding peptide
  MOD_RES (1)..(1): Xaa is C or S
XVPTELSPISMLYIDEYDKVVYKQYEEMVVE

SEQ ID NO: 38124 - protein, 34 aa, Artificial Sequence; identical to SEQ ID NO: 9337
  Cyclic GFR-binding peptide
  MOD_RES (6)..(6): Xaa is C or S

SEQ ID NO: 38125 - protein, 26 aa, Artificial Sequence
  Cyclic GFR-binding peptide
ARLNAISILYFDAANNVVLKKYRDMV

SEQ ID NO: 38126 - protein, 29 aa, Artificial Sequence
  Cyclic GFR-binding peptide
  MOD_RES (1)..(2): Xaa is C or S
XXVPTELEPISMLYLDENEKVVKFKYEDM

SEQ ID NO: 38127 - protein, 25 aa, Artificial Sequence
  Cyclic GFR-binding peptide
APTKLSPISVLYIDDSSNVIYKQYE

SEQ ID NO: 38128 - protein, 27 aa, Artificial Sequence
  Cyclic GFR-binding peptide
DLSPISILYIIGKTPKIYKQYEMIVKS

SEQ ID NO: 38129 - protein, 35 aa, Artificial Sequence
  Cyclic GFR-binding peptide
  MOD_RES (6)..(7): Xaa is C or S
ASAAPXXVPQALEPISILYLVGRKPKVKFKYEMIV

SEQ ID NO: 38130 - protein, 33 aa, Artificial Sequence; identical to SEQ ID NO: 9343
  Cyclic GFR-binding peptide
  MOD_RES (31)..(33): Xaa is C or S

SEQ ID NO: 38131 - protein, 29 aa, Artificial Sequence
  Cyclic GFR-binding peptide
  MOD_RES (29)..(29): Xaa is C or S
ELNAISMLYFDEYDKVVLKKYREMVVEGX

SEQ ID NO: 38132 - protein, 24 aa, Artificial Sequence
  Cyclic GFR-binding peptide
LSPISMLYIDENEKVVYKQYEDMV

SEQ ID NO: 38133 - protein, 31 aa, Artificial Sequence; identical to SEQ ID NO: 9349
  Cyclic GFR-binding peptide
  MOD_RES (29)..(31): Xaa is C or S

SEQ ID NO: 38134 - protein, 33 aa, Artificial Sequence
  Cyclic GFR-binding peptide
  MOD_RES (30)..(32): Xaa is C or S
TKLSPISVLYIDSSNNVIYKQYENMVVKAXGXH

SEQ ID NO: 38135 - protein, 37 aa, Artificial Sequence
  Cyclic GFR-binding peptide
  MOD_RES (5)..(6)..(37): Xaa is C or S
SASPXXVSQDLEPISILYLIGKTPKIKFKYEMIVKSX

SEQ ID NO: 38136 - protein, 32 aa, Artificial Sequence; identical to SEQ ID NO: 9352
  Cyclic GFR-binding peptide
  MOD_RES (6)..(7): Xaa is C or S

SEQ ID NO: 38137 - protein, 31 aa, Artificial Sequence
  Cyclic GFR-binding peptide
PTKLSPISVLYIDDMGVPTYKQYEEGMSVAE

SEQ ID NO: 38138 - protein, 32 aa, Artificial Sequence
  Cyclic GFR-binding peptide
  MOD_RES (30)..(32): Xaa is C or S
PQDLSPISILYIVGRTPKVYKQYEMVVKSXKX

SEQ ID NO: 38139 - protein, 23 aa, Artificial Sequence
  Cyclic GFR-binding peptide
LNAISILYFIGKTPKILKKYRMI

SEQ ID NO: 38140 - protein, 35 aa, Artificial Sequence; identical to SEQ ID NO: 9358
  Cyclic GFR-binding peptide
  MOD_RES (3)..(4): Xaa is C or S

SEQ ID NO: 38141 - protein, 23 aa, Artificial Sequence
  Cyclic GFR-binding peptide
LEPISILYLVGRTPKVKFKYEMV

SEQ ID NO: 38142 - protein, 33 aa, Artificial Sequence
  Cyclic GFR-binding peptide
  MOD_RES (5)..(6): Xaa is C or S
VPKPXXAPTQLEPISVLYLDDSSNVIKFKYENM

SEQ ID NO: 38143 - protein, 33 aa, Artificial Sequence
  Cyclic GFR-binding peptide
  MOD_RES (4)..(5): Xaa is C or S
PKAXXVPTELSPISMLYIDENEKVVYKQYEDMV

SEQ ID NO: 38144 - protein, 41 aa, Artificial Sequence; identical to SEQ ID NO: 9364
  Cyclic GFR-binding peptide
  MOD_RES (5)..(6)..(38)..(40): Xaa is C or S

SEQ ID NO: 38145 - protein, 25 aa, Artificial Sequence
  Cyclic GFR-binding peptide
SPISVLYIDSSNNVIYKQYENMVVK

SEQ ID NO: 38146 - protein, 33 aa, Artificial Sequence; identical to SEQ ID NO: 9366
  Cyclic GFR-binding peptide
  MOD_RES (32)..(32): Xaa is C or S

SEQ ID NO: 38147 - protein, 24 aa, Artificial Sequence
  Cyclic GFR-binding peptide
TKLSPISVLYKDSSNNVILKYHYN

SEQ ID NO: 38148 - protein, 36 aa, Artificial Sequence
  Cyclic GFR-binding peptide
  MOD_RES (1)..(33)..(35): Xaa is C or S
XAPTKLSPISVLYIDDSSNVIYKQYENMVVRSXGXH

SEQ ID NO: 38149 - protein, 38 aa, Artificial Sequence; identical to SEQ ID NO: 9368
  Cyclic GFR-binding peptide
  MOD_RES (4)..(5)..(36)..(38): Xaa is C or S

SEQ ID NO: 38150 - protein, 32 aa, Artificial Sequence; identical to SEQ ID NO: 9372
  Cyclic GFR-binding peptide
  MOD_RES (6)..(7): Xaa is C or S

SEQ ID NO: 38151 - protein, 35 aa, Artificial Sequence
  Cyclic GFR-binding peptide
  MOD_RES (6)..(6): Xaa is C or S
VTKPTXAPTKLSPISVLYIDDSSNVIYKQYENMVV

SEQ ID NO: 38152 - protein, 26 aa, Artificial Sequence
  Cyclic GFR-binding peptide
VPQDLSPISILYIVGRTPKVYKQYEM

SEQ ID NO: 38153 - protein, 34 aa, Artificial Sequence
  Cyclic GFR-binding peptide
  MOD_RES (3)..(4): Xaa is C or S
ASXXVPARLNAISILYFDAANNVVLKKYRDMVVE

SEQ ID NO: 38154 - protein, 40 aa, Artificial Sequence; identical to SEQ ID NO: 9373
  Cyclic GFR-binding peptide
  MOD_RES (5)..(6)..(38)..(40): Xaa is C or S

SEQ ID NO: 38155 - protein, 33 aa, Artificial Sequence
  Cyclic GFR-binding peptide
  MOD_RES (1)..(32): Xaa is C or S
XVSQDLEPISILYLIGKTPKIKFKYEMIVKSXK

SEQ ID NO: 38156 - protein, 37 aa, Artificial Sequence
  Cyclic GFR-binding peptide
  MOD_RES (4)..(5): Xaa is C or S
GKAXXVPTKLEPISVLYLDDMGVPTKFKYEEGMSVAE

SEQ ID NO: 38157 - protein, 33 aa, Artificial Sequence
  Cyclic GFR-binding peptide
  MOD_RES (1)..(33): Xaa is C or S
XVPARLNAISILYFDAANNVVLKKYRDMVVEAX

SEQ ID NO: 38158 - protein, 32 aa, Artificial Sequence; identical to SEQ ID NO: 9378
  Cyclic GFR-binding peptide
  MOD_RES (2)..(3): Xaa is C or S

SEQ ID NO: 38159 - protein, 32 aa, Artificial Sequence; identical to SEQ ID NO: 9379
  Cyclic GFR-binding peptide
  MOD_RES (4)..(5): Xaa is C or S

SEQ ID NO: 38160 - protein, 23 aa, Artificial Sequence
  Cyclic GFR-binding peptide
TKLSPISILYKDKGVVTYLKYHY

SEQ ID NO: 38161 - protein, 41 aa, Artificial Sequence
  Cyclic GFR-binding peptide
  MOD_RES (6)..(7)..(39)..(41): Xaa is C or S
SIPKAXXVPTELEPISMLYLDEYDKVVKFKYEEMVVEGXGX

SEQ ID NO: 38162 - protein, 32 aa, Artificial Sequence; identical to SEQ ID NO: 9381
  Cyclic GFR-binding peptide
  MOD_RES (30)..(32): Xaa is C or S

SEQ ID NO: 38163 - protein, 34 aa, Artificial Sequence; identical to SEQ ID NO: 9382
  Cyclic GFR-binding peptide
  MOD_RES (5)..(6): Xaa is C or S

SEQ ID NO: 38164 - protein, 38 aa, Artificial Sequence; identical to SEQ ID NO: 9385
  Cyclic GFR-binding peptide
  MOD_RES (4)..(5)..(36)..(38): Xaa is C or S

SEQ ID NO: 38165 - protein, 37 aa, Artificial Sequence; identical to SEQ ID NO: 9386
  Cyclic GFR-binding peptide
  MOD_RES (6)..(6): Xaa is C or S

SEQ ID NO: 38166 - protein, 23 aa, Artificial Sequence
  Cyclic GFR-binding peptide
TKLSPISVLYKDDSSNVILKYHY

SEQ ID NO: 38167 - protein, 26 aa, Artificial Sequence
  Cyclic GFR-binding peptide
APTQLSPISVLYIDDSSNVIYKQYEN

SEQ ID NO: 38168 - protein, 37 aa, Artificial Sequence; identical to SEQ ID NO: 9390
  Cyclic GFR-binding peptide
  MOD_RES (3)..(35)..(37): Xaa is C or S

SEQ ID NO: 38169 - protein, 31 aa, Artificial Sequence; identical to SEQ ID NO: 9392
  Cyclic GFR-binding peptide
  MOD_RES (31)..(31): Xaa is C or S

SEQ ID NO: 38170 - protein, 31 aa, Artificial Sequence
  Cyclic GFR-binding peptide
  MOD_RES (1)..(1): Xaa is C or S
XAPTKLSPISVLYIDSSNNVIYKQYENMVVK

SEQ ID NO: 38171 - protein, 33 aa, Artificial Sequence
  Cyclic GFR-binding peptide
  MOD_RES (3)..(4): Xaa is C or S
KPXXAPTKLEPISVLYLDDSSNVIKFKYENMVV

SEQ ID NO: 38172 - protein, 33 aa, Artificial Sequence
  Cyclic GFR-binding peptide
  MOD_RES (1)..(33): Xaa is C or S
XAPTKLSPISVLYIDSSNNVIYKQYENMVVKAX

SEQ ID NO: 38173 - protein, 30 aa, Artificial Sequence; identical to SEQ ID NO: 9394
  Cyclic GFR-binding peptide
  MOD_RES (3)..(4): Xaa is C or S

SEQ ID NO: 38174 - protein, 31 aa, Artificial Sequence
  Cyclic GFR-binding peptide
  MOD_RES (4)..(5): Xaa is C or S
PKAXXVPTELEPISMLYLDENEKVVKFKYED

SEQ ID NO: 38175 - protein, 41 aa, Artificial Sequence
  Cyclic GFR-binding peptide
  MOD_RES (5)..(6)..(39)..(41): Xaa is C or S
VGKAXXVPTKLSPISVLYIDDMGVPTYKQYEEGMSVAEXGX

SEQ ID NO: 38176 - protein, 22 aa, Artificial Sequence
  Cyclic GFR-binding peptide
NAISILYFDAANNVVLKKYRDM

SEQ ID NO: 38177 - protein, 29 aa, Artificial Sequence
  Cyclic GFR-binding peptide
  MOD_RES (3)..(4): Xaa is C or S
KAXXVPTKLNAISVLYFDDMGVPTLKKYR

SEQ ID NO: 38178 - protein, 30 aa, Artificial Sequence
  Cyclic GFR-binding peptide
  MOD_RES (28)..(30): Xaa is C or S
LEPISVLYLDSSNNVIKFKYENMVVKAXGX

SEQ ID NO: 38179 - protein, 33 aa, Artificial Sequence
  Cyclic GFR-binding peptide
  MOD_RES (3)..(4): Xaa is C or S
KPXXAPTQLSPISVLYIDDSSNVIYKQYENMVV

SEQ ID NO: 38180 - protein, 31 aa, Artificial Sequence
  Cyclic GFR-binding peptide
  MOD_RES (3)..(3): Xaa is C or S
PTXAPTKLEPISVLYLDDSSNVIKFKYENMV

SEQ ID NO: 38181 - protein, 31 aa, Artificial Sequence; identical to SEQ ID NO: 9403
  Cyclic GFR-binding peptide

SEQ ID NO: 38182 - protein, 30 aa, Artificial Sequence
  Cyclic GFR-binding peptide
  MOD_RES (1)..(1): Xaa is C or S
XVPTKLNAISILYFDKGVVTYLKKYRGMAV

SEQ ID NO: 38183 - protein, 31 aa, Artificial Sequence; identical to SEQ ID NO: 9404
  Cyclic GFR-binding peptide
  MOD_RES (4)..(5): Xaa is C or S

SEQ ID NO: 38184 - protein, 30 aa, Artificial Sequence
  Cyclic GFR-binding peptide
  MOD_RES (29)..(29): Xaa is C or S
RLSPISILYKDAANNVVLKYHYDMVVEAXG

SEQ ID NO: 38185 - protein, 31 aa, Artificial Sequence
  Cyclic GFR-binding peptide
  MOD_RES (6)..(6): Xaa is C or S
VTKPTXAPTKLEPISVLYLDDSSNVIKFKYE

SEQ ID NO: 38186 - protein, 28 aa, Artificial Sequence
  Cyclic GFR-binding peptide
TKLNAISVLYFDDMGVPTLKKYREGMSV

SEQ ID NO: 38187 - protein, 27 aa, Artificial Sequence
  Cyclic GFR-binding peptide
  MOD_RES (1)..(2): Xaa is C or S
XXVPTKLSPISILYKDKGVVTYLKYHY

SEQ ID NO: 38188 - protein, 33 aa, Artificial Sequence
  Cyclic GFR-binding peptide
  MOD_RES (3)..(4): Xaa is C or S
KAXXVPTKLSPISVLYIDDMGVPTYKQYEEGMS

SEQ ID NO: 38189 - protein, 34 aa, Artificial Sequence
  Cyclic GFR-binding peptide
  MOD_RES (1)..(2)..(33): Xaa is C or S
XXVSQDLEPISILYLIGKTPKIKFKYEMIVKSXK

SEQ ID NO: 38190 - protein, 31 aa, Artificial Sequence
  Cyclic GFR-binding peptide
  MOD_RES (4)..(5): Xaa is C or S
PASXXVPARLNAISILYFDAANNVVLKKYRD

SEQ ID NO: 38191 - protein, 39 aa, Artificial Sequence
  Cyclic GFR-binding peptide
  MOD_RES (5)..(6)..(39): Xaa is C or S
VGKAXXVPTKLEPISVLYLDDMGVPTKFKYEEGMSVAEX

SEQ ID NO: 38192 - protein, 30 aa, Artificial Sequence; identical to SEQ ID NO: 9416
  Cyclic GFR-binding peptide
  MOD_RES (28)..(30): Xaa is C or S

SEQ ID NO: 38193 - protein, 30 aa, Artificial Sequence
  Cyclic GFR-binding peptide
  MOD_RES (1)..(1): Xaa is C or S
XAPTQLSPISVLYIDDSSNVIYKQYENMVV

SEQ ID NO: 38194 - protein, 32 aa, Artificial Sequence; identical to SEQ ID NO: 9417
  Cyclic GFR-binding peptide
  MOD_RES (30)..(32): Xaa is C or S

SEQ ID NO: 38195 - protein, 29 aa, Artificial Sequence
  Cyclic GFR-binding peptide
  MOD_RES (29)..(29): Xaa is C or S
ELNAISMLYFDENEKVVLKKYRDMVVEGX

SEQ ID NO: 38196 - protein, 36 aa, Artificial Sequence
  Cyclic GFR-binding peptide
  MOD_RES (3)..(4)..(36): Xaa is C or S
KPXXAPTQLEPISVLYLDDSSNVIKFKYENMVVRAX

SEQ ID NO: 38197 - protein, 31 aa, Artificial Sequence
  Cyclic GFR-binding peptide
  MOD_RES (1)..(2): Xaa is C or S
XXVPTKLSPISILYKDKGVVTYLKYHYGMAV

SEQ ID NO: 38198 - protein, 25 aa, Artificial Sequence
  Cyclic GFR-binding peptide
PTKLSPISVLYKDSSNNVILKYHYN

SEQ ID NO: 38199 - protein, 30 aa, Artificial Sequence
  Cyclic GFR-binding peptide
VPTKLSPISILYIDKGVVTYYKQYEGMAVS

SEQ ID NO: 38200 - protein, 35 aa, Artificial Sequence
  Cyclic GFR-binding peptide
  MOD_RES (5)..(6): Xaa is C or S
SAAPXXVPQALEPISILYLVGRKPKVKFKYEMIVR

SEQ ID NO: 38201 - protein, 36 aa, Artificial Sequence
  Cyclic GFR-binding peptide
  MOD_RES (3)..(4)..(36): Xaa is C or S
KAXXVPTELSPISMLYIDENEKVVYKQYEDMVVEGX

SEQ ID NO: 38202 - protein, 37 aa, Artificial Sequence
  Cyclic GFR-binding peptide
  MOD_RES (2)..(3)..(35)..(37): Xaa is C or S
PXXAPTQLEPISVLYLDDSSNVIKFKYENMVVRAXGX

SEQ ID NO: 38203 - protein, 33 aa, Artificial Sequence
  Cyclic GFR-binding peptide
  MOD_RES (5)..(6): Xaa is C or S
SASPXXVSQDLSPISILYIIGKTPKIYKQYEMI

SEQ ID NO: 38204 - protein, 26 aa, Artificial Sequence
  Cyclic GFR-binding peptide
PTKLSPISVLYIDSSNNVIYKQYENM

SEQ ID NO: 38205 - protein, 37 aa, Artificial Sequence
  Cyclic GFR-binding peptide
  MOD_RES (6)..(6): Xaa is C or S
VTKPTXAPTKLSPISVLYIDDSSNVIYKQYENMVVRS

SEQ ID NO: 38206 - protein, 38 aa, Artificial Sequence
  Cyclic GFR-binding peptide
  MOD_RES (4)..(5)..(37): Xaa is C or S
SKAXXVPTKLSPISILYIDKGVVTYYKQYEGMAVSEXG

SEQ ID NO: 38207 - protein, 29 aa, Artificial Sequence
  Cyclic GFR-binding peptide
  MOD_RES (3)..(4): Xaa is C or S
SPXXVSQDLNAISILYFIGKTPKILKKYR

SEQ ID NO: 38208 - protein, 36 aa, Artificial Sequence; identical to SEQ ID NO: 9429
  Cyclic GFR-binding peptide
  MOD_RES (3)..(4)..(35): Xaa is C or S

SEQ ID NO: 38209 - protein, 32 aa, Artificial Sequence; identical to SEQ ID NO: 9433
  Cyclic GFR-binding peptide
  MOD_RES (1)..(32): Xaa is C or S

SEQ ID NO: 38210 - protein, 36 aa, Artificial Sequence
  Cyclic GFR-binding peptide
  MOD_RES (1)..(2)..(35): Xaa is C or S
XXVPTKLSPISVLYIDDMGVPTYKQYEEGMSVAEXG

SEQ ID NO: 38211 - protein, 32 aa, Artificial Sequence
  Cyclic GFR-binding peptide
  MOD_RES (5)..(5): Xaa is C or S
TKPTXAPTKLSPISVLYIDDSSNVIYKQYENM

SEQ ID NO: 38212 - protein, 27 aa, Artificial Sequence
  Cyclic GFR-binding peptide
VPTELSPISMLYKDEYDKVVLKYHYEM

SEQ ID NO: 38213 - protein, 33 aa, Artificial Sequence
  Cyclic GFR-binding peptide
  MOD_RES (30)..(32): Xaa is C or S
TKLEPISVLYLDSSNNVIKFKYENMVVKAXGXH

SEQ ID NO: 38214 - protein, 31 aa, Artificial Sequence
  Cyclic GFR-binding peptide
  MOD_RES (30)..(30): Xaa is C or S
TKLEPISVLYLDDSSNVIKFKYENMVVRSXG

SEQ ID NO: 38215 - protein, 32 aa, Artificial Sequence; identical to SEQ ID NO: 9438
  Cyclic GFR-binding peptide
  MOD_RES (29)..(31): Xaa is C or S

SEQ ID NO: 38216 - protein, 24 aa, Artificial Sequence
  Cyclic GFR-binding peptide
LSPISMLYKDEYDKVVLKYHYEMV

SEQ ID NO: 38217 - protein, 32 aa, Artificial Sequence
  Cyclic GFR-binding peptide
  MOD_RES (32)..(32): Xaa is C or S
VPTELSPISMLYIDENEKVVYKQYEDMVVEGX

SEQ ID NO: 38218 - protein, 28 aa, Artificial Sequence
  Cyclic GFR-binding peptide
  MOD_RES (28)..(28): Xaa is C or S
LSPISMLYKDENEKVVLKYHYDMVVEGX

SEQ ID NO: 38219 - protein, 34 aa, Artificial Sequence
  Cyclic GFR-binding peptide
  MOD_RES (3)..(4): Xaa is C or S
KAXXVPTKLSPISVLYIDDMGVPTYKQYEEGMSV

SEQ ID NO: 38220 - protein, 27 aa, Artificial Sequence
  Cyclic GFR-binding peptide
  MOD_RES (1)..(1): Xaa is C or S
XVSQDLEPISILYLIGKTPKIKFKYEM

SEQ ID NO: 38221 - protein, 31 aa, Artificial Sequence; identical to SEQ ID NO: 9443
  Cyclic GFR-binding peptide
  MOD_RES (28)..(30): Xaa is C or S

SEQ ID NO: 38222 - protein, 26 aa, Artificial Sequence
  Cyclic GFR-binding peptide
SPISMLYIDEYDKVVYKQYEEMVVEG

SEQ ID NO: 38223 - protein, 33 aa, Artificial Sequence
  Cyclic GFR-binding peptide
  MOD_RES (4)..(5): Xaa is C or S
ASPXXVSQDLEPISILYLIGKTPKIKFKYEMIV

SEQ ID NO: 38224 - protein, 34 aa, Artificial Sequence
  Cyclic GFR-binding peptide
  MOD_RES (7)..(7): Xaa is C or S
HVTKPTXAPTKLEPISVLYLDDSSNVIKFKYENM

SEQ ID NO: 38225 - protein, 28 aa, Artificial Sequence
  Cyclic GFR-binding peptide
  MOD_RES (2)..(3): Xaa is C or S
PXXVSQDLSPISILYIIGKTPKIYKQYE

SEQ ID NO: 38226 - protein, 31 aa, Artificial Sequence; identical to SEQ ID NO: 9448
  Cyclic GFR-binding peptide
  MOD_RES (6)..(6): Xaa is C or S

SEQ ID NO: 38227 - protein, 31 aa, Artificial Sequence
  Cyclic GFR-binding peptide
  MOD_RES (3)..(4): Xaa is C or S
KPXXAPTKLSPISVLYIDDSSNVIYKQYENM

SEQ ID NO: 38228 - protein, 39 aa, Artificial Sequence; identical to SEQ ID NO: 9449
  Cyclic GFR-binding peptide
  MOD_RES (6)..(7)..(39): Xaa is C or S

SEQ ID NO: 38229 - protein, 34 aa, Artificial Sequence; identical to SEQ ID NO: 9450
  Cyclic GFR-binding peptide
  MOD_RES (1)..(2)..(33): Xaa is C or S

SEQ ID NO: 38230 - protein, 21 aa, Artificial Sequence
  Cyclic GFR-binding peptide
LEPISVLYLDSSNNVIKFKYE

SEQ ID NO: 38231 - protein, 27 aa, Artificial Sequence
  Cyclic GFR-binding peptide
SQDLEPISILYLIGKTPKIKFKYEMIV

SEQ ID NO: 38232 - protein, 30 aa, Artificial Sequence
  Cyclic GFR-binding peptide
VPTKLEPISVLYLDDMGVPTKFKYEEGMSV

SEQ ID NO: 38233 - protein, 24 aa, Artificial Sequence
  Cyclic GFR-binding peptide
KLEPISVLYLDDMGVPTKFKYEEG

SEQ ID NO: 38234 - protein, 25 aa, Artificial Sequence
  Cyclic GFR-binding peptide
QALSPISILYKVGRKPKVLKYHYMI

SEQ ID NO: 38235 - protein, 33 aa, Artificial Sequence
  Cyclic GFR-binding peptide
  MOD_RES (3)..(4): Xaa is C or S
KAXXVPTKLNAISILYFDKGVVTYLKKYRGMAV

SEQ ID NO: 38236 - protein, 29 aa, Artificial Sequence
  Cyclic GFR-binding peptide
  MOD_RES (2)..(3): Xaa is C or S
PXXAPTQLSPISVLYIDDSSNVIYKQYEN

SEQ ID NO: 38237 - protein, 25 aa, Artificial Sequence
  Cyclic GFR-binding peptide
SPISILYIVGRKPKVYKQYEMIVRS

SEQ ID NO: 38238 - protein, 36 aa, Artificial Sequence
  Cyclic GFR-binding peptide
  MOD_RES (1)..(33)..(35): Xaa is C or S
XVPTELSPISMLYIDEYDKVVYKQYEEMVVEGXGXR

SEQ ID NO: 38239 - protein, 38 aa, Artificial Sequence; identical to SEQ ID NO: 9459
  Cyclic GFR-binding peptide
  MOD_RES (3)..(4)..(35)..(37): Xaa is C or S

SEQ ID NO: 38240 - protein, 34 aa, Artificial Sequence; identical to SEQ ID NO: 9460
  Cyclic GFR-binding peptide
  MOD_RES (1)..(2)..(34): Xaa is C or S

SEQ ID NO: 38241 - protein, 37 aa, Artificial Sequence
  Cyclic GFR-binding peptide
  MOD_RES (5)..(37): Xaa is C or S
TKPTXAPTKLSPISVLYIDDSSNVIYKQYENMVVRSX

SEQ ID NO: 38242 - protein, 37 aa, Artificial Sequence
  Cyclic GFR-binding peptide
  MOD_RES (5)..(6): Xaa is C or S
VPKPXXAPTKLEPISVLYLDDSSNVIKFKYENMVVRS

SEQ ID NO: 38243 - protein, 35 aa, Artificial Sequence
  Cyclic GFR-binding peptide
  MOD_RES (32)..(34): Xaa is C or S
VPTKLNAISILYFDKGVVTYLKKYRGMAVSEXGXR

SEQ ID NO: 38244 - protein, 32 aa, Artificial Sequence
  Cyclic GFR-binding peptide
  MOD_RES (1)..(2): Xaa is C or S
XXVPARLNAISILYFDAANNVVLKKYRDMVVE

SEQ ID NO: 38245 - protein, 26 aa, Artificial Sequence
  Cyclic GFR-binding peptide
KLEPISVLYLDDSSNVIKFKYENMVV

SEQ ID NO: 38246 - protein, 36 aa, Artificial Sequence; identical to SEQ ID NO: 9461
  Cyclic GFR-binding peptide
  MOD_RES (1)..(2)..(34)..(36): Xaa is C or S

SEQ ID NO: 38247 - protein, 26 aa, Artificial Sequence
  Cyclic GFR-binding peptide
PTQLEPISVLYLDDSSNVIKFKYENM

SEQ ID NO: 38248 - protein, 27 aa, Artificial Sequence
  Cyclic GFR-binding peptide
LNAISILYFDKGVVTYLKKYRGMAVSE

SEQ ID NO: 38249 - protein, 39 aa, Artificial Sequence
  Cyclic GFR-binding peptide
  MOD_RES (4)..(5)..(37)..(39): Xaa is C or S
PKAXXAPTKLSPISVLYIDSSNNVIYKQYENMVVKAXGX

SEQ ID NO: 38250 - protein, 37 aa, Artificial Sequence
  Cyclic GFR-binding peptide
  MOD_RES (6)..(7): Xaa is C or S
AAPASXXVPARLNAISILYFDAANNVVLKKYRDMVVE

SEQ ID NO: 38251 - protein, 37 aa, Artificial Sequence; identical to SEQ ID NO: 9465
  Cyclic GFR-binding peptide
  MOD_RES (5)..(6)..(37): Xaa is C or S

SEQ ID NO: 38252 - protein, 37 aa, Artificial Sequence
  Cyclic GFR-binding peptide
  MOD_RES (2)..(3)..(35)..(37): Xaa is C or S
AXXVPTKLNAISILYFDKGVVTYLKKYRGMAVSEXGX

SEQ ID NO: 38253 - protein, 33 aa, Artificial Sequence
  Cyclic GFR-binding peptide
  MOD_RES (3)..(3): Xaa is C or S
PTXAPTKLEPISVLYLDDSSNVIKFKYENMVVR

SEQ ID NO: 38254 - protein, 26 aa, Artificial Sequence
  Cyclic GFR-binding peptide
EPISMLYLDEYDKVVKFKYEEMVVEG

SEQ ID NO: 38255 - protein, 34 aa, Artificial Sequence
  Cyclic GFR-binding peptide
  MOD_RES (31)..(33): Xaa is C or S
PTELEPISMLYLDENEKVVKFKYEDMVVEGXGXR

SEQ ID NO: 38256 - protein, 25 aa, Artificial Sequence
  Cyclic GFR-binding peptide
PQALNAISILYFVGRKPKVLKKYRM

SEQ ID NO: 38257 - protein, 24 aa, Artificial Sequence
  Cyclic GFR-binding peptide
PTELSPISMLYIDEYDKVVYKQYE

SEQ ID NO: 38258 - protein, 31 aa, Artificial Sequence
  Cyclic GFR-binding peptide
  MOD_RES (4)..(5): Xaa is C or S
PKAXXAPTKLEPISVLYLDSSNNVIKFKYEN

SEQ ID NO: 38259 - protein, 22 aa, Artificial Sequence
  Cyclic GFR-binding peptide
SPISVLYKDDSSNVILKYHYNM

SEQ ID NO: 38260 - protein, 24 aa, Artificial Sequence
  Cyclic GFR-binding peptide
LNAISMLYFDEYDKVVLKKYREMV

SEQ ID NO: 38261 - protein, 35 aa, Artificial Sequence; identical to SEQ ID NO: 9475
  Cyclic GFR-binding peptide
  MOD_RES (6)..(6): Xaa is C or S

SEQ ID NO: 38262 - protein, 34 aa, Artificial Sequence
  Cyclic GFR-binding peptide
  MOD_RES (32)..(34): Xaa is C or S
VPTELEPISMLYLDENEKVVKFKYEDMVVEGXGX

SEQ ID NO: 38263 - protein, 24 aa, Artificial Sequence
  Cyclic GFR-binding peptide
PTKLSPISVLYKDSSNNVILKYHY

SEQ ID NO: 38264 - protein, 25 aa, Artificial Sequence
  Cyclic GFR-binding peptide
ARLNAISILYFDAANNVVLKKYRDM

SEQ ID NO: 38265 - protein, 33 aa, Artificial Sequence
  Cyclic GFR-binding peptide
  MOD_RES (1)..(2): Xaa is C or S
XXVPTKLNAISILYFDKGVVTYLKKYRGMAVSE

SEQ ID NO: 38266 - protein, 33 aa, Artificial Sequence; identical to SEQ ID NO: 9479
  Cyclic GFR-binding peptide
  MOD_RES (2)..(3): Xaa is C or S

SEQ ID NO: 38267 - protein, 32 aa, Artificial Sequence; identical to SEQ ID NO: 9480
  Cyclic GFR-binding peptide
  MOD_RES (1)..(2): Xaa is C or S

SEQ ID NO: 38268 - protein, 26 aa, Artificial Sequence
  Cyclic GFR-binding peptide
VPTELSPISMLYIDEYDKVVYKQYEE

SEQ ID NO: 38269 - protein, 20 aa, Artificial Sequence
  Cyclic GFR-binding peptide
SPISILYKDKGVVTYLKYHY

SEQ ID NO: 38270 - protein, 21 aa, Artificial Sequence
  Cyclic GFR-binding peptide
SPISVLYIDDMGVPTYKQYEE

SEQ ID NO: 38271 - protein, 31 aa, Artificial Sequence
  Cyclic GFR-binding peptide
  MOD_RES (31)..(31): Xaa is C or S
PTELEPISMLYLDENEKVVKFKYEDMVVEGX

SEQ ID NO: 38272 - protein, 26 aa, Artificial Sequence
  Cyclic GFR-binding peptide
VPARLEPISILYLDAANNVVKFKYED

SEQ ID NO: 38273 - protein, 28 aa, Artificial Sequence
  Cyclic GFR-binding peptide
VPQDLEPISILYLVGRTPKVKFKYEMVV

SEQ ID NO: 38274 - protein, 28 aa, Artificial Sequence
  Cyclic GFR-binding peptide
  MOD_RES (1)..(2): Xaa is C or S
XXVSQDLEPISILYLIGKTPKIKFKYEM

SEQ ID NO: 38275 - protein, 31 aa, Artificial Sequence
  Cyclic GFR-binding peptide
  MOD_RES (2)..(3): Xaa is C or S
PXXAPTQLSPISVLYIDDSSNVIYKQYENMV

SEQ ID NO: 38276 - protein, 40 aa, Artificial Sequence; identical to SEQ ID NO: 9487
  Cyclic GFR-binding peptide
  MOD_RES (6)..(7)..(38)..(40): Xaa is C or S

SEQ ID NO: 38277 - protein, 28 aa, Artificial Sequence
  Cyclic GFR-binding peptide
  MOD_RES (1)..(1): Xaa is C or S
XVPTELSPISMLYIDENEKVVYKQYEDM

SEQ ID NO: 38278 - protein, 36 aa, Artificial Sequence
  Cyclic GFR-binding peptide
  MOD_RES (1)..(2)..(33)..(35): Xaa is C or S
XXVPQALSPISILYIVGRKPKVYKQYEMIVRSXKXS

SEQ ID NO: 38279 - protein, 24 aa, Artificial Sequence
  Cyclic GFR-binding peptide
NAISMLYFDEYDKVVLKKYREMVV

SEQ ID NO: 38280 - protein, 22 aa, Artificial Sequence
  Cyclic GFR-binding peptide
DLEPISILYLVGRTPKVKFKYE

SEQ ID NO: 38281 - protein, 30 aa, Artificial Sequence; identical to SEQ ID NO: 9492
  Cyclic GFR-binding peptide
  MOD_RES (1)..(2): Xaa is C or S

SEQ ID NO: 38282 - protein, 29 aa, Artificial Sequence
  Cyclic GFR-binding peptide
  MOD_RES (29)..(29): Xaa is C or S
LSPISVLYIDDMGVPTYKQYEEGMSVAEX

SEQ ID NO: 38283 - protein, 28 aa, Artificial Sequence
  Cyclic GFR-binding peptide
  MOD_RES (26)..(28): Xaa is C or S
SPISILYIVGRKPKVYKQYEMIVRSXKX

SEQ ID NO: 38284 - protein, 29 aa, Artificial Sequence
  Cyclic GFR-binding peptide
TELSPISMLYIDENEKVVYKQYEDMVVEG

SEQ ID NO: 38285 - protein, 35 aa, Artificial Sequence
  Cyclic GFR-binding peptide
  MOD_RES (1)..(32)..(34): Xaa is C or S
XVSQDLEPISILYLIGKTPKIKFKYEMIVKSXKXS

SEQ ID NO: 38286 - protein, 35 aa, Artificial Sequence
  Cyclic GFR-binding peptide
  MOD_RES (5)..(6): Xaa is C or S
VPKPXXAPTQLSPISVLYIDDSSNVIYKQYENMVV

SEQ ID NO: 38287 - protein, 24 aa, Artificial Sequence
  Cyclic GFR-binding peptide
LSPISILYIVGRTPKVYKQYEMVV

SEQ ID NO: 38288 - protein, 23 aa, Artificial Sequence
  Cyclic GFR-binding peptide
EPISMLYLDEYDKVVKFKYEEMV

SEQ ID NO: 38289 - protein, 30 aa, Artificial Sequence
  Cyclic GFR-binding peptide
  MOD_RES (29)..(29): Xaa is C or S
ELEPISMLYLDENEKVVKFKYEDMVVEGXG

SEQ ID NO: 38290 - protein, 23 aa, Artificial Sequence
  Cyclic GFR-binding peptide
NAISVLYFDSSNNVILKKYRNMV

SEQ ID NO: 38291 - protein, 29 aa, Artificial Sequence
  Cyclic GFR-binding peptide
  MOD_RES (1)..(2): Xaa is C or S
XXVPARLEPISILYLDAANNVVKFKYEDM

SEQ ID NO: 38292 - protein, 38 aa, Artificial Sequence
  Cyclic GFR-binding peptide
  MOD_RES (2)..(3)..(35)..(37): Xaa is C or S
PXXAPTQLEPISVLYLDDSSNVIKFKYENMVVRAXGXH

SEQ ID NO: 38293 - protein, 32 aa, Artificial Sequence; identical to SEQ ID NO: 9500
  Cyclic GFR-binding peptide
  MOD_RES (2)..(3): Xaa is C or S

SEQ ID NO: 38294 - protein, 33 aa, Artificial Sequence; identical to SEQ ID NO: 9501
  Cyclic GFR-binding peptide
  MOD_RES (4)..(5): Xaa is C or S

SEQ ID NO: 38295 - protein, 38 aa, Artificial Sequence
  Cyclic GFR-binding peptide
  MOD_RES (3)..(4)..(36)..(38): Xaa is C or S
KAXXAPTKLSPISVLYIDSSNNVIYKQYENMVVKAXGX

SEQ ID NO: 38296 - protein, 37 aa, Artificial Sequence; identical to SEQ ID NO: 9503
  Cyclic GFR-binding peptide
  MOD_RES (6)..(7): Xaa is C or S

SEQ ID NO: 38297 - protein, 39 aa, Artificial Sequence
  Cyclic GFR-binding peptide
  MOD_RES (6)..(7)..(38): Xaa is C or S
ASAAPXXVPQALEPISILYLVGRKPKVKFKYEMIVRSXK

SEQ ID NO: 38298 - protein, 33 aa, Artificial Sequence
  Cyclic GFR-binding peptide
  MOD_RES (2)..(3): Xaa is C or S
AXXVPTELEPISMLYLDEYDKVVKFKYEEMVVE

SEQ ID NO: 38299 - protein, 25 aa, Artificial Sequence
  Cyclic GFR-binding peptide
ALSPISILYKVGRKPKVLKYHYMIV

SEQ ID NO: 38300 - protein, 33 aa, Artificial Sequence; identical to SEQ ID NO: 9506
  Cyclic GFR-binding peptide
  MOD_RES (2)..(3): Xaa is C or S

SEQ ID NO: 38301 - protein, 29 aa, Artificial Sequence
  Cyclic GFR-binding peptide
  MOD_RES (28)..(28): Xaa is C or S
LSPISMLYIDENEKVVYKQYEDMVVEGXG

SEQ ID NO: 38302 - protein, 34 aa, Artificial Sequence
  Cyclic GFR-binding peptide
  MOD_RES (6)..(6): Xaa is C or S
VTKPTXAPTKLEPISVLYLDDSSNVIKFKYENMV

SEQ ID NO: 38303 - protein, 37 aa, Artificial Sequence; identical to SEQ ID NO: 9508
  Cyclic GFR-binding peptide
  MOD_RES (2)..(3)..(35)..(37): Xaa is C or S

SEQ ID NO: 38304 - protein, 28 aa, Artificial Sequence
  Cyclic GFR-binding peptide
  MOD_RES (27)..(27): Xaa is C or S
SPISVLYIDDSSNVIYKQYENMVVRAXG

SEQ ID NO: 38305 - protein, 27 aa, Artificial Sequence
  Cyclic GFR-binding peptide
  MOD_RES (1)..(2): Xaa is C or S
XXVPQALSPISILYKVGRKPKVLKYHY

SEQ ID NO: 38306 - protein, 31 aa, Artificial Sequence
  Cyclic GFR-binding peptide
  MOD_RES (4)..(5): Xaa is C or S
AAPXXVPQALEPISILYLVGRKPKVKFKYEM

SEQ ID NO: 38307 - protein, 31 aa, Artificial Sequence; identical to SEQ ID NO: 9510
  Cyclic GFR-binding peptide
  MOD_RES (30)..(30): Xaa is C or S

SEQ ID NO: 38308 - protein, 30 aa, Artificial Sequence
  Cyclic GFR-binding peptide
VPTRLSPINILYFDSANNVVYGKIPDMVVE

SEQ ID NO: 38309 - protein, 23 aa, Artificial Sequence
  Cyclic GFR-binding peptide
LSPISILYKVGRTPKVLKYHYMV

SEQ ID NO: 38310 - protein, 36 aa, Artificial Sequence
  Cyclic GFR-binding peptide
  MOD_RES (1)..(33)..(35): Xaa is C or S
XVPTKLNAISILYFDKGVVTYLKKYRGMAVSEXGXR

SEQ ID NO: 38311 - protein, 32 aa, Artificial Sequence; identical to SEQ ID NO: 9514
  Cyclic GFR-binding peptide
  MOD_RES (6)..(6): Xaa is C or S

SEQ ID NO: 38312 - protein, 34 aa, Artificial Sequence; identical to SEQ ID NO: 9515
  Cyclic GFR-binding peptide
  MOD_RES (4)..(5): Xaa is C or S

SEQ ID NO: 38313 - protein, 34 aa, Artificial Sequence; identical to SEQ ID NO: 9517
  Cyclic GFR-binding peptide
  MOD_RES (3)..(4): Xaa is C or S

SEQ ID NO: 38314 - protein, 28 aa, Artificial Sequence
  Cyclic GFR-binding peptide
  MOD_RES (1)..(2): Xaa is C or S
XXVPTELEPISMLYLDEYDKVVKFKYEE

SEQ ID NO: 38315 - protein, 38 aa, Artificial Sequence
  Cyclic GFR-binding peptide
  MOD_RES (6)..(7): Xaa is C or S
SIPKAXXVPTELEPISMLYLDEYDKVVKFKYEEMVVEG

SEQ ID NO: 38316 - protein, 26 aa, Artificial Sequence
  Cyclic GFR-binding peptide
VSQDLSPISILYIIGKTPKIYKQYEM

SEQ ID NO: 38317 - protein, 27 aa, Artificial Sequence
  Cyclic GFR-binding peptide
  MOD_RES (1)..(2): Xaa is C or S
XXAPTKLSPISVLYIDSSNNVIYKQYE

SEQ ID NO: 38318 - protein, 30 aa, Artificial Sequence; identical to SEQ ID NO: 9519
  Cyclic GFR-binding peptide
  MOD_RES (30)..(30): Xaa is C or S

SEQ ID NO: 38319 - protein, 38 aa, Artificial Sequence
  Cyclic GFR-binding peptide
  MOD_RES (4)..(5)..(37): Xaa is C or S
PKPXXAPTQLEPISVLYLDDSSNVIKFKYENMVVRAXG

SEQ ID NO: 38320 - protein, 28 aa, Artificial Sequence
  Cyclic GFR-binding peptide
  MOD_RES (28)..(28): Xaa is C or S
LNAISVLYFDSSNNVILKKYRNMVVKAX

SEQ ID NO: 38321 - protein, 38 aa, Artificial Sequence; identical to SEQ ID NO: 9527
  Cyclic GFR-binding peptide
  MOD_RES (6)..(7): Xaa is C or S

SEQ ID NO: 38322 - protein, 27 aa, Artificial Sequence
  Cyclic GFR-binding peptide
LSPISMLYIDENEKVVYKQYEDMVVEG

SEQ ID NO: 38323 - protein, 33 aa, Artificial Sequence; identical to SEQ ID NO: 9529
  Cyclic GFR-binding peptide
  MOD_RES (6)..(7): Xaa is C or S

SEQ ID NO: 38324 - protein, 33 aa, Artificial Sequence
  Cyclic GFR-binding peptide
  MOD_RES (32)..(32): Xaa is C or S
APTQLEPISVLYLDDSSNVIKFKYENMVVRAXG

SEQ ID NO: 38325 - protein, 36 aa, Artificial Sequence
  Cyclic GFR-binding peptide
  MOD_RES (2)..(3)..(36): Xaa is C or S
AXXVPTKLSPISVLYIDDMGVPTYKQYEEGMSVAEX

SEQ ID NO: 38326 - protein, 38 aa, Artificial Sequence
  Cyclic GFR-binding peptide
  MOD_RES (5)..(6)..(38): Xaa is C or S
VPKPXXAPTKLSPISVLYIDDSSNVIYKQYENMVVRSX

SEQ ID NO: 38327 - protein, 24 aa, Artificial Sequence
  Cyclic GFR-binding peptide
PTELSPISMLYKDENEKVVLKYHY

SEQ ID NO: 38328 - protein, 32 aa, Artificial Sequence
  Cyclic GFR-binding peptide
  MOD_RES (4)..(5): Xaa is C or S
PKPXXAPTQLEPISVLYLDDSSNVIKFKYENM

SEQ ID NO: 38329 - protein, 31 aa, Artificial Sequence
  Cyclic GFR-binding peptide
  MOD_RES (3)..(4): Xaa is C or S
KAXXVPTELSPISMLYIDENEKVVYKQYEDM

SEQ ID NO: 38330 - protein, 30 aa, Artificial Sequence; identical to SEQ ID NO: 9534
  Cyclic GFR-binding peptide
  MOD_RES (4)..(5): Xaa is C or S

SEQ ID NO: 38331 - protein, 21 aa, Artificial Sequence
  Cyclic GFR-binding peptide
LNAISILYFIGKTPKILKKYR

SEQ ID NO: 38332 - protein, 21 aa, Artificial Sequence
  Cyclic GFR-binding peptide
LSPISILYKDAANNVVLKYHY

SEQ ID NO: 38333 - protein, 33 aa, Artificial Sequence; identical to SEQ ID NO: 9537
  Cyclic GFR-binding peptide
  MOD_RES (31)..(33): Xaa is C or S

SEQ ID NO: 38334 - protein, 26 aa, Artificial Sequence
  Cyclic GFR-binding peptide
  MOD_RES (1)..(1): Xaa is C or S
XAPTKLSPISVLYKDDSSNVILKYHY

SEQ ID NO: 38335 - protein, 40 aa, Artificial Sequence; identical to SEQ ID NO: 9541
  Cyclic GFR-binding peptide
  MOD_RES (5)..(6)..(37)..(39): Xaa is C or S

SEQ ID NO: 38336 - protein, 35 aa, Artificial Sequence
  Cyclic GFR-binding peptide
  MOD_RES (6)..(7): Xaa is C or S
ASASPXXVPQDLEPISILYLVGRTPKVKFKYEMVV

SEQ ID NO: 38337 - protein, 30 aa, Artificial Sequence; identical to SEQ ID NO: 9542
  Cyclic GFR-binding peptide
  MOD_RES (1)..(2): Xaa is C or S

SEQ ID NO: 38338 - protein, 29 aa, Artificial Sequence
  Cyclic GFR-binding peptide
  MOD_RES (27)..(29): Xaa is C or S
LSPISILYKVGRTPKVLKYHYMVVKSXKX

SEQ ID NO: 38339 - protein, 26 aa, Artificial Sequence
  Cyclic GFR-binding peptide
LEPISVLYLDDSSNVIKFKYENMVVR

SEQ ID NO: 38340 - protein, 33 aa, Artificial Sequence; identical to SEQ ID NO: 9544
  Cyclic GFR-binding peptide
  MOD_RES (30)..(32): Xaa is C or S

SEQ ID NO: 38341 - protein, 26 aa, Artificial Sequence
  Cyclic GFR-binding peptide
VPARLSPISILYKDAANNVVLKYHYD

SEQ ID NO: 38342 - protein, 25 aa, Artificial Sequence
  Cyclic GFR-binding peptide
ALNAISILYFVGRKPKVLKKYRMIV

SEQ ID NO: 38343 - protein, 29 aa, Artificial Sequence
  Cyclic GFR-binding peptide
  MOD_RES (28)..(28): Xaa is C or S
LSPISVLYIDDSSNVIYKQYENMVVRAXG

SEQ ID NO: 38344 - protein, 29 aa, Artificial Sequence
  Cyclic GFR-binding peptide
TKLNAISILYFDKGVVTYLKKYRGMAVSE

SEQ ID NO: 38345 - protein, 28 aa, Artificial Sequence
  Cyclic GFR-binding peptide
KLSPISILYKDKGVVTYLKYHYGMAVSE

SEQ ID NO: 38346 - protein, 35 aa, Artificial Sequence; identical to SEQ ID NO: 9552
  Cyclic GFR-binding peptide
  MOD_RES (4)..(4): Xaa is C or S

SEQ ID NO: 38347 - protein, 33 aa, Artificial Sequence
  Cyclic GFR-binding peptide
  MOD_RES (1)..(2): Xaa is C or S
XXAPTQLSPISVLYIDDSSNVIYKQYENMVVRA

SEQ ID NO: 38348 - protein, 29 aa, Artificial Sequence
  Cyclic GFR-binding peptide
  MOD_RES (29)..(29): Xaa is C or S
ELSPISMLYIDENEKVVYKQYEDMVVEGX

SEQ ID NO: 38349 - protein, 28 aa, Artificial Sequence
  Cyclic GFR-binding peptide
QDLNAISILYFVGRTPKVLKKYRMVVKS

SEQ ID NO: 38350 - protein, 27 aa, Artificial Sequence
  Cyclic GFR-binding peptide
LSPISILYIDKGVVTYYKQYEGMAVSE

SEQ ID NO: 38351 - protein, 31 aa, Artificial Sequence; identical to SEQ ID NO: 9556
  Cyclic GFR-binding peptide
  MOD_RES (1)..(2): Xaa is C or S

SEQ ID NO: 38352 - protein, 30 aa, Artificial Sequence
  Cyclic GFR-binding peptide
  MOD_RES (1)..(1): Xaa is C or S
XVSQDLSPISILYIIGKTPKIYKQYEMIVK

SEQ ID NO: 38353 - protein, 31 aa, Artificial Sequence
  Cyclic GFR-binding peptide
  MOD_RES (28)..(30): Xaa is C or S
LSPISILYKDKGVVTYLKYHYGMAVSEXGXR

SEQ ID NO: 38354 - protein, 34 aa, Artificial Sequence
  Cyclic GFR-binding peptide
  MOD_RES (32)..(34): Xaa is C or S
VPARLEPISILYLDAANNVVKFKYEDMVVEAXGX

SEQ ID NO: 38355 - protein, 32 aa, Artificial Sequence
  Cyclic GFR-binding peptide
  MOD_RES (1)..(1): Xaa is C or S
XVPTELEPISMLYLDEYDKVVKFKYEEMVVEG

SEQ ID NO: 38356 - protein, 30 aa, Artificial Sequence
  Cyclic GFR-binding peptide
  MOD_RES (30)..(30): Xaa is C or S
SQDLSPISILYIIGKTPKIYKQYEMIVKSX

SEQ ID NO: 38357 - protein, 30 aa, Artificial Sequence
  Cyclic GFR-binding peptide
PTKLSPISILYKDKGVVTYLKYHYGMAVSE

SEQ ID NO: 38358 - protein, 29 aa, Artificial Sequence
  Cyclic GFR-binding peptide
  MOD_RES (29)..(29): Xaa is C or S
ELEPISMLYLDENEKVVKFKYEDMVVEGX

SEQ ID NO: 38359 - protein, 42 aa, Artificial Sequence; identical to SEQ ID NO: 9563
  Cyclic GFR-binding peptide
  MOD_RES (6)..(7)..(39)..(41): Xaa is C or S

SEQ ID NO: 38360 - protein, 32 aa, Artificial Sequence; identical to SEQ ID NO: 9565
  Cyclic GFR-binding peptide
  MOD_RES (29)..(31): Xaa is C or S

SEQ ID NO: 38361 - protein, 30 aa, Artificial Sequence
  Cyclic GFR-binding peptide
VPQDLSPISILYIVGRTPKVYKQYEMVVKS

SEQ ID NO: 38362 - protein, 40 aa, Artificial Sequence
  Cyclic GFR-binding peptide
  MOD_RES (4)..(5)..(38)..(40): Xaa is C or S
GKAXXVPTKLSPISVLYIDDMGVPTYKQYEEGMSVAEXGX

SEQ ID NO: 38363 - protein, 34 aa, Artificial Sequence
  Cyclic GFR-binding peptide
  MOD_RES (31)..(33): Xaa is C or S
PTKLSPISILYIDKGVVTYYKQYEGMAVSEXGXR

SEQ ID NO: 38364 - protein, 38 aa, Artificial Sequence
  Cyclic GFR-binding peptide
  MOD_RES (4)..(5)..(36)..(38): Xaa is C or S
ASPXXVSQDLSPISILYIIGKTPKIYKQYEMIVKSXKX

SEQ ID NO: 38365 - protein, 34 aa, Artificial Sequence; identical to SEQ ID NO: 9573
  Cyclic GFR-binding peptide
  MOD_RES (31)..(33): Xaa is C or S

SEQ ID NO: 38366 - protein, 33 aa, Artificial Sequence; identical to SEQ ID NO: 9575
  Cyclic GFR-binding peptide
  MOD_RES (31)..(33): Xaa is C or S

SEQ ID NO: 38367 - protein, 32 aa, Artificial Sequence
  Cyclic GFR-binding peptide
  MOD_RES (2)..(3): Xaa is C or S
AXXVPTELSPISMLYIDENEKVVYKQYEDMVV

SEQ ID NO: 38368 - protein, 24 aa, Artificial Sequence
  Cyclic GFR-binding peptide
SPISILYKDAANNVVLKYHYDMVV

SEQ ID NO: 38369 - protein, 32 aa, Artificial Sequence
  Cyclic GFR-binding peptide
  MOD_RES (1)..(2): Xaa is C or S
XXVPTKLSPISVLYIDDMGVPTYKQYEEGMSV

SEQ ID NO: 38370 - protein, 27 aa, Artificial Sequence
  Cyclic GFR-binding peptide
PTELSPISMLYIDENEKVVYKQYEDMV

SEQ ID NO: 38371 - protein, 24 aa, Artificial Sequence
  Cyclic GFR-binding peptide
DLSPISILYIVGRTPKVYKQYEMV

SEQ ID NO: 38372 - protein, 34 aa, Artificial Sequence
  Cyclic GFR-binding peptide
  MOD_RES (31)..(33): Xaa is C or S
VSQDLSPISILYIIGKTPKIYKQYEMIVKSXKXS

SEQ ID NO: 38373 - protein, 29 aa, Artificial Sequence
  Cyclic GFR-binding peptide
VSQDLNAISILYFIGKTPKILKKYRMIVK

SEQ ID NO: 38374 - protein, 39 aa, Artificial Sequence; identical to SEQ ID NO: 9580
  Cyclic GFR-binding peptide
  MOD_RES (4)..(5)..(36)..(38): Xaa is C or S

SEQ ID NO: 38375 - protein, 32 aa, Artificial Sequence; identical to SEQ ID NO: 9581
  Cyclic GFR-binding peptide
  MOD_RES (4)..(5): Xaa is C or S

SEQ ID NO: 38376 - protein, 33 aa, Artificial Sequence
  Cyclic GFR-binding peptide
  MOD_RES (6)..(6): Xaa is C or S
VTKPTXAPTKLSPISVLYIDDSSNVIYKQYENM

SEQ ID NO: 38377 - protein, 37 aa, Artificial Sequence; identical to SEQ ID NO: 9585
  Cyclic GFR-binding peptide
  MOD_RES (2)..(3)..(35)..(37): Xaa is C or S

SEQ ID NO: 38378 - protein, 29 aa, Artificial Sequence
  Cyclic GFR-binding peptide
VPTKLNAISILYFDKGVVTYLKKYRGMAV

SEQ ID NO: 38379 - protein, 30 aa, Artificial Sequence
  Cyclic GFR-binding peptide
  MOD_RES (2)..(3): Xaa is C or S
PXXVPQDLEPISILYLVGRTPKVKFKYEMV

SEQ ID NO: 38380 - protein, 28 aa, Artificial Sequence
  Cyclic GFR-binding peptide
  MOD_RES (27)..(27): Xaa is C or S
LEPISILYLVGRKPKVKFKYEMIVRSXK

SEQ ID NO: 38381 - protein, 34 aa, Artificial Sequence
  Cyclic GFR-binding peptide
  MOD_RES (4)..(5): Xaa is C or S
PKAXXVPTELSPISMLYIDEYDKVVYKQYEEMVV

SEQ ID NO: 38382 - protein, 25 aa, Artificial Sequence
  Cyclic GFR-binding peptide
PQDLSPISILYKVGRTPKVLKYHYM

SEQ ID NO: 38383 - protein, 27 aa, Artificial Sequence
  Cyclic GFR-binding peptide
ELSPISMLYKDEYDKVVLKYHYEMVVE

SEQ ID NO: 38384 - protein, 29 aa, Artificial Sequence
  Cyclic GFR-binding peptide
  MOD_RES (27)..(29): Xaa is C or S
EPISVLYLDDSSNVIKFKYENMVVRSXGX

SEQ ID NO: 38385 - protein, 29 aa, Artificial Sequence
  Cyclic GFR-binding peptide
  MOD_RES (27)..(29): Xaa is C or S
EPISMLYLDENEKVVKFKYEDMVVEGXGX

SEQ ID NO: 38386 - protein, 30 aa, Artificial Sequence
  Cyclic GFR-binding peptide
  MOD_RES (1)..(1): Xaa is C or S
XVPTKLSPISILYIDKGVVTYYKQYEGMAV

SEQ ID NO: 38387 - protein, 29 aa, Artificial Sequence
  Cyclic GFR-binding peptide
  MOD_RES (1)..(2): Xaa is C or S
XXVPQDLSPISILYIVGRTPKVYKQYEMV

SEQ ID NO: 38388 - protein, 29 aa, Artificial Sequence
  Cyclic GFR-binding peptide
VPTELSPISMLYKDEYDKVVLKYHYEMVV

SEQ ID NO: 38389 - protein, 38 aa, Artificial Sequence
  Cyclic GFR-binding peptide
  MOD_RES (6)..(7): Xaa is C or S
KVGKAXXVPTKLEPISVLYLDDMGVPTKFKYEEGMSVA

SEQ ID NO: 38390 - protein, 34 aa, Artificial Sequence
  Cyclic GFR-binding peptide
  MOD_RES (31)..(33): Xaa is C or S
PTQLEPISVLYLDDSSNVIKFKYENMVVRAXGXH

SEQ ID NO: 38391 - protein, 33 aa, Artificial Sequence; identical to SEQ ID NO: 9598
  Cyclic GFR-binding peptide
  MOD_RES (31)..(33): Xaa is C or S

SEQ ID NO: 38392 - protein, 26 aa, Artificial Sequence
  Cyclic GFR-binding peptide
  MOD_RES (26)..(26): Xaa is C or S
SPISILYIIGKTPKIYKQYEMIVKSX

SEQ ID NO: 38393 - protein, 41 aa, Artificial Sequence
  Cyclic GFR-binding peptide
  MOD_RES (6)..(7)..(39)..(41): Xaa is C or S
AAPASXXVPARLEPISILYLDAANNVVKFKYEDMVVEAXGX

SEQ ID NO: 38394 - protein, 37 aa, Artificial Sequence; identical to SEQ ID NO: 9601
  Cyclic GFR-binding peptide
  MOD_RES (4)..(5)..(37): Xaa is C or S

SEQ ID NO: 38395 - protein, 37 aa, Artificial Sequence; identical to SEQ ID NO: 9603
  Cyclic GFR-binding peptide
  MOD_RES (5)..(6): Xaa is C or S

SEQ ID NO: 38396 - protein, 29 aa, Artificial Sequence
  Cyclic GFR-binding peptide
  MOD_RES (28)..(28): Xaa is C or S
LEPISVLYLDDSSNVIKFKYENMVVRAXG

SEQ ID NO: 38397 - protein, 39 aa, Artificial Sequence; identical to SEQ ID NO: 9604
  Cyclic GFR-binding peptide
  MOD_RES (4)..(5)..(38): Xaa is C or S

SEQ ID NO: 38398 - protein, 33 aa, Artificial Sequence; identical to SEQ ID NO: 9605
  Cyclic GFR-binding peptide
  MOD_RES (1)..(2)..(33): Xaa is C or S

SEQ ID NO: 38399 - protein, 26 aa, Artificial Sequence
  Cyclic GFR-binding peptide
LSPISVLYIDDMGVPTYKQYEEGMSV

SEQ ID NO: 38400 - protein, 37 aa, Artificial Sequence; identical to SEQ ID NO: 9606
  Cyclic GFR-binding peptide
  MOD_RES (6)..(7): Xaa is C or S

SEQ ID NO: 38401 - protein, 35 aa, Artificial Sequence; identical to SEQ ID NO: 9611
  Cyclic GFR-binding peptide
  MOD_RES (1)..(2)..(33)..(35): Xaa is C or S

SEQ ID NO: 38402 - protein, 27 aa, Artificial Sequence
  Cyclic GFR-binding peptide
  MOD_RES (27)..(27): Xaa is C or S
LEPISILYLVGRKPKVKFKYEMIVRSX

SEQ ID NO: 38403 - protein, 29 aa, Artificial Sequence
  Cyclic GFR-binding peptide
VPTKLSPISILYIDKGVVTYYKQYEGMAV

SEQ ID NO: 38404 - protein, 28 aa, Artificial Sequence
  Cyclic GFR-binding peptide
  MOD_RES (27)..(27): Xaa is C or S
LNAISILYFIGKTPKILKKYRMIVKSXK

SEQ ID NO: 38405 - protein, 30 aa, Artificial Sequence
  Cyclic GFR-binding peptide
  MOD_RES (1)..(1): Xaa is C or S
XVPTKLSPISILYKDKGVVTYLKYHYGMAV

SEQ ID NO: 38406 - protein, 38 aa, Artificial Sequence
  Cyclic GFR-binding peptide
  MOD_RES (5)..(6)..(38): Xaa is C or S
VPKPXXAPTKLEPISVLYLDDSSNVIKFKYENMVVRSX

SEQ ID NO: 38407 - protein, 34 aa, Artificial Sequence
  Cyclic GFR-binding peptide
  MOD_RES (32)..(34): Xaa is C or S
APTKLEPISVLYLDDSSNVIKFKYENMVVRSXGX

SEQ ID NO: 38408 - protein, 31 aa, Artificial Sequence
  Cyclic GFR-binding peptide
  MOD_RES (1)..(2): Xaa is C or S
XXAPTQLSPISVLYIDDSSNVIYKQYENMVV

SEQ ID NO: 38409 - protein, 32 aa, Artificial Sequence
  Cyclic GFR-binding peptide
  MOD_RES (1)..(2): Xaa is C or S
XXAPTQLSPISVLYIDDSSNVIYKQYENMVVR

SEQ ID NO: 38410 - protein, 24 aa, Artificial Sequence
  Cyclic GFR-binding peptide
NAISVLYFDDMGVPTLKKYREGMS

SEQ ID NO: 38411 - protein, 32 aa, Artificial Sequence
  Cyclic GFR-binding peptide
  MOD_RES (1)..(1): Xaa is C or S
XAPTQLSPISVLYIDDSSNVIYKQYENMVVRA

SEQ ID NO: 38412 - protein, 31 aa, Artificial Sequence
  Cyclic GFR-binding peptide
  MOD_RES (29)..(31): Xaa is C or S
RLSPISILYKDAANNVVLKYHYDMVVEAXGX

SEQ ID NO: 38413 - protein, 29 aa, Artificial Sequence
  Cyclic GFR-binding peptide
  MOD_RES (2)..(3): Xaa is C or S
AXXVPTKLSPISVLYIDDMGVPTYKQYEE

SEQ ID NO: 38414 - protein, 28 aa, Artificial Sequence
  Cyclic GFR-binding peptide
KLSPISVLYIDSSNNVIYKQYENMVVKA

SEQ ID NO: 38415 - protein, 39 aa, Artificial Sequence
  Cyclic GFR-binding peptide
  MOD_RES (5)..(6)..(38): Xaa is C or S
IPKAXXVPTELSPISMLYIDEYDKVVYKQYEEMVVEGXG

SEQ ID NO: 38416 - protein, 38 aa, Artificial Sequence; identical to SEQ ID NO: 9624
  Cyclic GFR-binding peptide
  MOD_RES (2)..(3)..(35)..(37): Xaa is C or S

SEQ ID NO: 38417 - protein, 31 aa, Artificial Sequence
  Cyclic GFR-binding peptide
VPTELSPISMLYIDEYDKVVYKQYEEMVVEG

SEQ ID NO: 38418 - protein, 31 aa, Artificial Sequence
  Cyclic GFR-binding peptide
  MOD_RES (30)..(30): Xaa is C or S
TELEPISMLYLDEYDKVVKFKYEEMVVEGXG

SEQ ID NO: 38419 - protein, 35 aa, Artificial Sequence
  Cyclic GFR-binding peptide
  MOD_RES (32)..(34): Xaa is C or S
APTKLEPISVLYLDSSNNVIKFKYENMVVKAXGXH

SEQ ID NO: 38420 - protein, 30 aa, Artificial Sequence
  Cyclic GFR-binding peptide
PTKLSPISVLYIDSSNNVIYKQYENMVVKA

SEQ ID NO: 38421 - protein, 29 aa, Artificial Sequence
  Cyclic GFR-binding peptide
  MOD_RES (27)..(29): Xaa is C or S
LNAISILYFVGRKPKVLKKYRMIVRSXKX

SEQ ID NO: 38422 - protein, 28 aa, Artificial Sequence
  Cyclic GFR-binding peptide
  MOD_RES (26)..(28): Xaa is C or S
NAISILYFVGRTPKVLKKYRMVVKSXKX

SEQ ID NO: 38423 - protein, 22 aa, Artificial Sequence
  Cyclic GFR-binding peptide
ELNAISMLYFDENEKVVLKKYR

SEQ ID NO: 38424 - protein, 23 aa, Artificial Sequence
  Cyclic GFR-binding peptide
SPISVLYIDDMGVPTYKQYEEGM

SEQ ID NO: 38425 - protein, 24 aa, Artificial Sequence
  Cyclic GFR-binding peptide
SPISMLYIDEYDKVVYKQYEEMVV

SEQ ID NO: 38426 - protein, 32 aa, Artificial Sequence; identical to SEQ ID NO: 9632
  Cyclic GFR-binding peptide
  MOD_RES (1)..(1): Xaa is C or S

SEQ ID NO: 38427 - protein, 38 aa, Artificial Sequence
  Cyclic GFR-binding peptide
  MOD_RES (5)..(6)..(38): Xaa is C or S
APASXXVPARLNAISILYFDAANNVVLKKYRDMVVEAX

SEQ ID NO: 38428 - protein, 31 aa, Artificial Sequence
  Cyclic GFR-binding peptide
  MOD_RES (3)..(4): Xaa is C or S
KAXXVPTKLSPISILYKDKGVVTYLKYHYGM

SEQ ID NO: 38429 - protein, 32 aa, Artificial Sequence
  Cyclic GFR-binding peptide
  MOD_RES (4)..(5): Xaa is C or S
PKAXXAPTKLSPISVLYIDSSNNVIYKQYENM

SEQ ID NO: 38430 - protein, 26 aa, Artificial Sequence
  Cyclic GFR-binding peptide
LSPISILYIIGKTPKIYKQYEMIVKS

SEQ ID NO: 38431 - protein, 28 aa, Artificial Sequence
  Cyclic GFR-binding peptide
  MOD_RES (1)..(1): Xaa is C or S
XVPARLEPISILYLDAANNVVKFKYEDM

SEQ ID NO: 38432 - protein, 31 aa, Artificial Sequence; identical to SEQ ID NO: 9638
  Cyclic GFR-binding peptide
  MOD_RES (28)..(30): Xaa is C or S

SEQ ID NO: 38433 - protein, 28 aa, Artificial Sequence
  Cyclic GFR-binding peptide
APTKLEPISVLYLDSSNNVIKFKYENMV

SEQ ID NO: 38434 - protein, 36 aa, Artificial Sequence
  Cyclic GFR-binding peptide
  MOD_RES (5)..(6): Xaa is C or S
VGKAXXVPTKLSPISVLYIDDMGVPTYKQYEEGMSV

SEQ ID NO: 38435 - protein, 24 aa, Artificial Sequence
  Cyclic GFR-binding peptide
DLNAISILYFVGRTPKVLKKYRMV

SEQ ID NO: 38436 - protein, 34 aa, Artificial Sequence
  Cyclic GFR-binding peptide
  MOD_RES (6)..(7): Xaa is C or S
SIPKAXXVPTELEPISMLYLDEYDKVVKFKYEEM

SEQ ID NO: 38437 - protein, 29 aa, Artificial Sequence
  Cyclic GFR-binding peptide
  MOD_RES (1)..(2): Xaa is C or S
XXVPTELSPISMLYIDENEKVVYKQYEDM

SEQ ID NO: 38438 - protein, 27 aa, Artificial Sequence
  Cyclic GFR-binding peptide
  MOD_RES (27)..(27): Xaa is C or S
EPISMLYLDEYDKVVKFKYEEMVVEGX

SEQ ID NO: 38439 - protein, 32 aa, Artificial Sequence; identical to SEQ ID NO: 9643
  Cyclic GFR-binding peptide
  MOD_RES (1)..(1): Xaa is C or S

SEQ ID NO: 38440 - protein, 37 aa, Artificial Sequence
  Cyclic GFR-binding peptide
  MOD_RES (3)..(4)..(36): Xaa is C or S
KAXXVPTKLSPISILYIDKGVVTYYKQYEGMAVSEXG

SEQ ID NO: 38441 - protein, 36 aa, Artificial Sequence
  Cyclic GFR-binding peptide
  MOD_RES (2)..(34)..(36): Xaa is C or S
TXAPTKLEPISVLYLDDSSNVIKFKYENMVVRSXGX

SEQ ID NO: 38442 - protein, 36 aa, Artificial Sequence; identical to SEQ ID NO: 9646
  Cyclic GFR-binding peptide
  MOD_RES (1)..(34)..(36): Xaa is C or S

SEQ ID NO: 38443 - protein, 40 aa, Artificial Sequence; identical to SEQ ID NO: 9647
  Cyclic GFR-binding peptide
  MOD_RES (6)..(7)..(39): Xaa is C or S

SEQ ID NO: 38444 - protein, 25 aa, Artificial Sequence
  Cyclic GFR-binding peptide
ELSPISMLYKDEYDKVVLKYHYEMV

SEQ ID NO: 38445 - protein, 27 aa, Artificial Sequence
  Cyclic GFR-binding peptide
VPTKLSPISILYKDKGVVTYLKYHYGM

SEQ ID NO: 38446 - protein, 30 aa, Artificial Sequence
  Cyclic GFR-binding peptide
APTQLEPISVLYLDDSSNVIKFKYENMVVR

SEQ ID NO: 38447 - protein, 36 aa, Artificial Sequence; identical to SEQ ID NO: 9650
  Cyclic GFR-binding peptide
  MOD_RES (6)..(7): Xaa is C or S

SEQ ID NO: 38448 - protein, 29 aa, Artificial Sequence
  Cyclic GFR-binding peptide
  MOD_RES (1)..(2): Xaa is C or S
XXVSQDLSPISILYIIGKTPKIYKQYEMI

SEQ ID NO: 38449 - protein, 31 aa, Artificial Sequence
  Cyclic GFR-binding peptide
VPTELEPISMLYLDEYDKVVKFKYEEMVVEG

SEQ ID NO: 38450 - protein, 32 aa, Artificial Sequence
  Cyclic GFR-binding peptide
  MOD_RES (29)..(31): Xaa is C or S
KLNAISILYFDKGVVTYLKKYRGMAVSEXGXR

SEQ ID NO: 38451 - protein, 30 aa, Artificial Sequence
  Cyclic GFR-binding peptide
  MOD_RES (28)..(30): Xaa is C or S
LEPISMLYLDEYDKVVKFKYEEMVVEGXGX

SEQ ID NO: 38452 - protein, 30 aa, Artificial Sequence
  Cyclic GFR-binding peptide
  MOD_RES (30)..(30): Xaa is C or S
TELEPISMLYLDENEKVVKFKYEDMVVEGX

SEQ ID NO: 38453 - protein, 35 aa, Artificial Sequence
  Cyclic GFR-binding peptide
  MOD_RES (32)..(34): Xaa is C or S
APTQLEPISVLYLDDSSNVIKFKYENMVVRAXGXH

SEQ ID NO: 38454 - protein, 30 aa, Artificial Sequence
  Cyclic GFR-binding peptide
  MOD_RES (2)..(3): Xaa is C or S
AXXAPTKLEPISVLYLDSSNNVIKFKYENM

SEQ ID NO: 38455 - protein, 41 aa, Artificial Sequence
  Cyclic GFR-binding peptide
  MOD_RES (5)..(6)..(38)..(40): Xaa is C or S
APASXXVPARLNAISILYFDAANNVVLKKYRDMVVEAXGXR

SEQ ID NO: 38456 - protein, 26 aa, Artificial Sequence
  Cyclic GFR-binding peptide
LEPISMLYLDENEKVVKFKYEDMVVE

SEQ ID NO: 38457 - protein, 29 aa, Artificial Sequence
  Cyclic GFR-binding peptide
  MOD_RES (28)..(28): Xaa is C or S
SPISVLYIDDMGVPTYKQYEEGMSVAEXG

SEQ ID NO: 38458 - protein, 26 aa, Artificial Sequence
  Cyclic GFR-binding peptide
PTELSPISMLYIDENEKVVYKQYEDM

SEQ ID NO: 38459 - protein, 26 aa, Artificial Sequence
  Cyclic GFR-binding peptide
VPTKLSPISILYKDKGVVTYLKYHYG

SEQ ID NO: 38460 - protein, 34 aa, Artificial Sequence; identical to SEQ ID NO: 9656
  Cyclic GFR-binding peptide
  MOD_RES (3)..(4): Xaa is C or S

SEQ ID NO: 38461 - protein, 31 aa, Artificial Sequence
  Cyclic GFR-binding peptide
  MOD_RES (1)..(1): Xaa is C or S
XVPTKLSPISILYIDKGVVTYYKQYEGMAVS

SEQ ID NO: 38462 - protein, 20 aa, Artificial Sequence
  Cyclic GFR-binding peptide
EPISVLYLDDSSNVIKFKYE

SEQ ID NO: 38463 - protein, 31 aa, Artificial Sequence; identical to SEQ ID NO: 9657
  Cyclic GFR-binding peptide
  MOD_RES (1)..(2): Xaa is C or S

SEQ ID NO: 38464 - protein, 35 aa, Artificial Sequence
  Cyclic GFR-binding peptide
  MOD_RES (1)..(2)..(33)..(35): Xaa is C or S
XXVPQDLSPISILYIVGRTPKVYKQYEMVVKSXKX

SEQ ID NO: 38465 - protein, 36 aa, Artificial Sequence
  Cyclic GFR-binding peptide
  MOD_RES (3)..(4)..(35): Xaa is C or S
APXXVPQALEPISILYLVGRKPKVKFKYEMIVRSXK

SEQ ID NO: 38466 - protein, 33 aa, Artificial Sequence
  Cyclic GFR-binding peptide
  MOD_RES (4)..(5): Xaa is C or S
PKAXXVPTELEPISMLYLDEYDKVVKFKYEEMV

SEQ ID NO: 38467 - protein, 27 aa, Artificial Sequence
  Cyclic GFR-binding peptide
QDLSPISILYKVGRTPKVLKYHYMVVK

SEQ ID NO: 38468 - protein, 39 aa, Artificial Sequence
  Cyclic GFR-binding peptide
  MOD_RES (6)..(7)..(39): Xaa is C or S
SIPKAXXVPTELSPISMLYIDEYDKVVYKQYEEMVVEGX

SEQ ID NO: 38469 - protein, 31 aa, Artificial Sequence; identical to SEQ ID NO: 9662
  Cyclic GFR-binding peptide
  MOD_RES (2)..(3): Xaa is C or S

SEQ ID NO: 38470 - protein, 25 aa, Artificial Sequence
  Cyclic GFR-binding peptide
LSPISVLYKDDSSNVILKYHYNMVV

SEQ ID NO: 38471 - protein, 25 aa, Artificial Sequence
  Cyclic GFR-binding peptide
TKLEPISVLYLDDSSNVIKFKYENM

SEQ ID NO: 38472 - protein, 41 aa, Artificial Sequence; identical to SEQ ID NO: 9668
  Cyclic GFR-binding peptide
  MOD_RES (6)..(7)..(39)..(41): Xaa is C or S

SEQ ID NO: 38473 - protein, 25 aa, Artificial Sequence
  Cyclic GFR-binding peptide
VPQALSPISILYKVGRKPKVLKYHY

SEQ ID NO: 38474 - protein, 36 aa, Artificial Sequence; identical to SEQ ID NO: 9670
  Cyclic GFR-binding peptide
  MOD_RES (5)..(6): Xaa is C or S

SEQ ID NO: 38475 - protein, 40 aa, Artificial Sequence; identical to SEQ ID NO: 9672
  Cyclic GFR-binding peptide
  MOD_RES (4)..(5)..(37)..(39): Xaa is C or S

SEQ ID NO: 38476 - protein, 29 aa, Artificial Sequence
  Cyclic GFR-binding peptide
  MOD_RES (27)..(29): Xaa is C or S
SPISVLYIDDSSNVIYKQYENMVVRAXGX

SEQ ID NO: 38477 - protein, 32 aa, Artificial Sequence
  Cyclic GFR-binding peptide
  MOD_RES (2)..(3): Xaa is C or S
PXXAPTQLEPISVLYLDDSSNVIKFKYENMVV

SEQ ID NO: 38478 - protein, 34 aa, Artificial Sequence
  Cyclic GFR-binding peptide
  MOD_RES (5)..(6): Xaa is C or S
SASPXXVPQDLSPISILYIVGRTPKVYKQYEMVV

SEQ ID NO: 38479 - protein, 25 aa, Artificial Sequence
  Cyclic GFR-binding peptide
LEPISILYLVGRTPKVKFKYEMVVK

SEQ ID NO: 38480 - protein, 39 aa, Artificial Sequence; identical to SEQ ID NO: 9678
  Cyclic GFR-binding peptide
  MOD_RES (3)..(4)..(36)..(38): Xaa is C or S

SEQ ID NO: 38481 - protein, 35 aa, Artificial Sequence
  Cyclic GFR-binding peptide
  MOD_RES (32)..(34): Xaa is C or S
VPTELSPISMLYIDEYDKVVYKQYEEMVVEGXGXR

SEQ ID NO: 38482 - protein, 33 aa, Artificial Sequence
  Cyclic GFR-binding peptide
  MOD_RES (1)..(1): Xaa is C or S
XVPTKLSPISVLYIDDMGVPTYKQYEEGMSVAE

SEQ ID NO: 38483 - protein, 34 aa, Artificial Sequence; identical to SEQ ID NO: 9681
  Cyclic GFR-binding peptide
  MOD_RES (2)..(3): Xaa is C or S

SEQ ID NO: 38484 - protein, 28 aa, Artificial Sequence
  Cyclic GFR-binding peptide
PTKLSPISILYIDKGVVTYYKQYEGMAV

SEQ ID NO: 38485 - protein, 33 aa, Artificial Sequence
  Cyclic GFR-binding peptide
  MOD_RES (1)..(2): Xaa is C or S
XXAPTQLEPISVLYLDDSSNVIKFKYENMVVRA

SEQ ID NO: 38486 - protein, 33 aa, Artificial Sequence
  Cyclic GFR-binding peptide
  MOD_RES (2)..(3): Xaa is C or S
PXXAPTQLSPISVLYIDDSSNVIYKQYENMVVR

SEQ ID NO: 38487 - protein, 25 aa, Artificial Sequence
  Cyclic GFR-binding peptide
SPISILYKDKGVVTYLKYHYGMAVS

SEQ ID NO: 38488 - protein, 38 aa, Artificial Sequence
  Cyclic GFR-binding peptide
  MOD_RES (6)..(7): Xaa is C or S
AVPKAXXAPTKLEPISVLYLDSSNNVIKFKYENMVVKA

SEQ ID NO: 38489 - protein, 36 aa, Artificial Sequence
  Cyclic GFR-binding peptide
  MOD_RES (5)..(6): Xaa is C or S
SASPXXVSQDLEPISILYLIGKTPKIKFKYEMIVKS

SEQ ID NO: 38490 - protein, 24 aa, Artificial Sequence
  Cyclic GFR-binding peptide
PTELNAISMLYFDEYDKVVLKKYR

SEQ ID NO: 38491 - protein, 29 aa, Artificial Sequence
  Cyclic GFR-binding peptide
  MOD_RES (29)..(29): Xaa is C or S
KLEPISVLYLDSSNNVIKFKYENMVVKAX

SEQ ID NO: 38492 - protein, 32 aa, Artificial Sequence; identical to SEQ ID NO: 9685
  Cyclic GFR-binding peptide

SEQ ID NO: 38493 - protein, 38 aa, Artificial Sequence
  Cyclic GFR-binding peptide
  MOD_RES (6)..(7): Xaa is C or S
KVGKAXXVPTKLSPISVLYIDDMGVPTYKQYEEGMSVA

SEQ ID NO: 38494 - protein, 31 aa, Artificial Sequence; identical to SEQ ID NO: 9686
  Cyclic GFR-binding peptide
  MOD_RES (1)..(1): Xaa is C or S

SEQ ID NO: 38495 - protein, 37 aa, Artificial Sequence; identical to SEQ ID NO: 9687
  Cyclic GFR-binding peptide
  MOD_RES (3)..(4)..(35)..(37): Xaa is C or S

SEQ ID NO: 38496 - protein, 27 aa, Artificial Sequence
  Cyclic GFR-binding peptide
  MOD_RES (1)..(2): Xaa is C or S
XXAPTKLSPISVLYKDDSSNVILKYHY

SEQ ID NO: 38497 - protein, 25 aa, Artificial Sequence
  Cyclic GFR-binding peptide
KLNAISVLYFDDMGVPTLKKYREGM

SEQ ID NO: 38498 - protein, 33 aa, Artificial Sequence; identical to SEQ ID NO: 9691
  Cyclic GFR-binding peptide
  MOD_RES (5)..(6): Xaa is C or S

SEQ ID NO: 38499 - protein, 26 aa, Artificial Sequence
  Cyclic GFR-binding peptide
QLEPISVLYLDDSSNVIKFKYENMVV

SEQ ID NO: 38500 - protein, 28 aa, Artificial Sequence
  Cyclic GFR-binding peptide
  MOD_RES (2)..(3): Xaa is C or S
PXXAPTQLEPISVLYLDDSSNVIKFKYE

SEQ ID NO: 38501 - protein, 34 aa, Artificial Sequence
  Cyclic GFR-binding peptide
  MOD_RES (6)..(7): Xaa is C or S
KIPKAXXVPTELEPISMLYLDENEKVVKFKYEDM

SEQ ID NO: 38502 - protein, 37 aa, Artificial Sequence
  Cyclic GFR-binding peptide
  MOD_RES (4)..(5)..(37): Xaa is C or S
PASXXVPARLNAISILYFDAANNVVLKKYRDMVVEAX

SEQ ID NO: 38503 - protein, 30 aa, Artificial Sequence; identical to SEQ ID NO: 9699
  Cyclic GFR-binding peptide
  MOD_RES (1)..(2): Xaa is C or S

SEQ ID NO: 38504 - protein, 32 aa, Artificial Sequence
  Cyclic GFR-binding peptide
  MOD_RES (29)..(31): Xaa is C or S
ELSPISMLYIDEYDKVVYKQYEEMVVEGXGXR

SEQ ID NO: 38505 - protein, 34 aa, Artificial Sequence; identical to SEQ ID NO: 9701
  Cyclic GFR-binding peptide
  MOD_RES (2)..(3): Xaa is C or S

SEQ ID NO: 38506 - protein, 34 aa, Artificial Sequence; identical to SEQ ID NO: 9702
  Cyclic GFR-binding peptide
  MOD_RES (32)..(34): Xaa is C or S

SEQ ID NO: 38507 - protein, 38 aa, Artificial Sequence; identical to SEQ ID NO: 9703
  Cyclic GFR-binding peptide
  MOD_RES (7)..(7): Xaa is C or S

SEQ ID NO: 38508 - protein, 29 aa, Artificial Sequence
  Cyclic GFR-binding peptide
  MOD_RES (1)..(1): Xaa is C or S
XVPQDLEPISILYLVGRTPKVKFKYEMVV

SEQ ID NO: 38509 - protein, 35 aa, Artificial Sequence
  Cyclic GFR-binding peptide
  MOD_RES (5)..(5): Xaa is C or S
TKPTXAPTKLEPISVLYLDDSSNVIKFKYENMVVR

SEQ ID NO: 38510 - protein, 37 aa, Artificial Sequence
  Cyclic GFR-binding peptide
  MOD_RES (3)..(4)..(36): Xaa is C or S
KAXXVPTELEPISMLYLDENEKVVKFKYEDMVVEGXG

SEQ ID NO: 38511 - protein, 33 aa, Artificial Sequence
  Cyclic GFR-binding peptide
  MOD_RES (1)..(2): Xaa is C or S
XXAPTKLSPISVLYIDDSSNVIYKQYENMVVRS

SEQ ID NO: 38512 - protein, 28 aa, Artificial Sequence
  Cyclic GFR-binding peptide
  MOD_RES (1)..(2): Xaa is C or S
XXVSQDLSPISILYKIGKTPKILKYHYM

SEQ ID NO: 38513 - protein, 27 aa, Artificial Sequence
  Cyclic GFR-binding peptide
VPTELEPISMLYLDEYDKVVKFKYEEM

SEQ ID NO: 38514 - protein, 30 aa, Artificial Sequence
  Cyclic GFR-binding peptide
  MOD_RES (29)..(29): Xaa is C or S
QALSPISILYIVGRKPKVYKQYEMIVRSXK

SEQ ID NO: 38515 - protein, 27 aa, Artificial Sequence
  Cyclic GFR-binding peptide
  MOD_RES (27)..(27): Xaa is C or S
EPISVLYLDDSSNVIKFKYENMVVRSX

SEQ ID NO: 38516 - protein, 31 aa, Artificial Sequence
  Cyclic GFR-binding peptide
  MOD_RES (28)..(30): Xaa is C or S
DLEPISILYLVGRTPKVKFKYEMVVKSXKXS

SEQ ID NO: 38517 - protein, 36 aa, Artificial Sequence
  Cyclic GFR-binding peptide
  MOD_RES (6)..(7): Xaa is C or S
SIPKAXXVPTELEPISMLYLDEYDKVVKFKYEEMVV

SEQ ID NO: 38518 - protein, 32 aa, Artificial Sequence
  Cyclic GFR-binding peptide
  MOD_RES (32)..(32): Xaa is C or S
VPTELEPISMLYLDENEKVVKFKYEDMVVEGX

SEQ ID NO: 38519 - protein, 32 aa, Artificial Sequence; identical to SEQ ID NO: 9706
  Cyclic GFR-binding peptide
  MOD_RES (4)..(5): Xaa is C or S

SEQ ID NO: 38520 - protein, 33 aa, Artificial Sequence; identical to SEQ ID NO: 9707
  Cyclic GFR-binding peptide
  MOD_RES (30)..(32): Xaa is C or S

SEQ ID NO: 38521 - protein, 27 aa, Artificial Sequence
  Cyclic GFR-binding peptide
  MOD_RES (1)..(2): Xaa is C or S
XXVPQALEPISILYLVGRKPKVKFKYE

SEQ ID NO: 38522 - protein, 23 aa, Artificial Sequence
  Cyclic GFR-binding peptide
TKLSPISVLYIDSSNNVIYKQYE

SEQ ID NO: 38523 - protein, 24 aa, Artificial Sequence
  Cyclic GFR-binding peptide
SPISILYKVGRTPKVLKYHYMVVK

SEQ ID NO: 38524 - protein, 31 aa, Artificial Sequence
  Cyclic GFR-binding peptide
  MOD_RES (30)..(30): Xaa is C or S
TKLSPISVLYIDDSSNVIYKQYENMVVRSXG

SEQ ID NO: 38525 - protein, 29 aa, Artificial Sequence
  Cyclic GFR-binding peptide
PQDLNAISILYFVGRTPKVLKKYRMVVKS

SEQ ID NO: 38526 - protein, 29 aa, Artificial Sequence
  Cyclic GFR-binding peptide
  MOD_RES (27)..(29): Xaa is C or S
LSPISILYIVGRTPKVYKQYEMVVKSXKX

SEQ ID NO: 38527 - protein, 28 aa, Artificial Sequence
  Cyclic GFR-binding peptide
  MOD_RES (2)..(3): Xaa is C or S
AXXVPTKLNAISILYFDKGVVTYLKKYR

SEQ ID NO: 38528 - protein, 23 aa, Artificial Sequence
  Cyclic GFR-binding peptide
LSPISMLYIDENEKVVYKQYEDM

SEQ ID NO: 38529 - protein, 39 aa, Artificial Sequence; identical to SEQ ID NO: 9716
  Cyclic GFR-binding peptide
  MOD_RES (6)..(7)..(38): Xaa is C or S

SEQ ID NO: 38530 - protein, 41 aa, Artificial Sequence; identical to SEQ ID NO: 9717
  Cyclic GFR-binding peptide
  MOD_RES (6)..(7)..(38)..(40): Xaa is C or S

SEQ ID NO: 38531 - protein, 26 aa, Artificial Sequence
  Cyclic GFR-binding peptide
KLNAISILYFDKGVVTYLKKYRGMAV

SEQ ID NO: 38532 - protein, 32 aa, Artificial Sequence
  Cyclic GFR-binding peptide
  MOD_RES (5)..(6): Xaa is C or S
VPKPXXAPTQLEPISVLYLDDSSNVIKFKYEN

SEQ ID NO: 38533 - protein, 25 aa, Artificial Sequence
  Cyclic GFR-binding peptide
SPISVLYIDDSSNVIYKQYENMVVR

SEQ ID NO: 38534 - protein, 35 aa, Artificial Sequence
  Cyclic GFR-binding peptide
  MOD_RES (4)..(5): Xaa is C or S
ASPXXVSQDLSPISILYIIGKTPKIYKQYEMIVKS

SEQ ID NO: 38535 - protein, 27 aa, Artificial Sequence
  Cyclic GFR-binding peptide
  MOD_RES (1)..(1): Xaa is C or S
XVPQDLSPISILYIVGRTPKVYKQYEM

SEQ ID NO: 38536 - protein, 38 aa, Artificial Sequence
  Cyclic GFR-binding peptide
  MOD_RES (5)..(6)..(38): Xaa is C or S
IPKAXXVPTELEPISMLYLDENEKVVKFKYEDMVVEGX

SEQ ID NO: 38537 - protein, 36 aa, Artificial Sequence; identical to SEQ ID NO: 9723
  Cyclic GFR-binding peptide
  MOD_RES (5)..(6): Xaa is C or S

SEQ ID NO: 38538 - protein, 30 aa, Artificial Sequence; identical to SEQ ID NO: 9725
  Cyclic GFR-binding peptide
  MOD_RES (1)..(1): Xaa is C or S

SEQ ID NO: 38539 - protein, 25 aa, Artificial Sequence
  Cyclic GFR-binding peptide
TELEPISMLYLDEYDKVVKFKYEEM

SEQ ID NO: 38540 - protein, 32 aa, Artificial Sequence
  Cyclic GFR-binding peptide
  MOD_RES (1)..(1): Xaa is C or S
XVPARLEPISILYLDAANNVVKFKYEDMVVEA

SEQ ID NO: 38541 - protein, 33 aa, Artificial Sequence; identical to SEQ ID NO: 9728
  Cyclic GFR-binding peptide
  MOD_RES (4)..(5): Xaa is C or S

SEQ ID NO: 38542 - protein, 29 aa, Artificial Sequence
  Cyclic GFR-binding peptide
PQALSPISILYIVGRKPKVYKQYEMIVRS

SEQ ID NO: 38543 - protein, 33 aa, Artificial Sequence; identical to SEQ ID NO: 9732
  Cyclic GFR-binding peptide
  MOD_RES (30)..(32): Xaa is C or S

SEQ ID NO: 38544 - protein, 21 aa, Artificial Sequence
  Cyclic GFR-binding peptide
SPISILYIIGKTPKIYKQYEM

SEQ ID NO: 38545 - protein, 25 aa, Artificial Sequence
  Cyclic GFR-binding peptide
QLEPISVLYLDDSSNVIKFKYENMV

SEQ ID NO: 38546 - protein, 25 aa, Artificial Sequence
  Cyclic GFR-binding peptide
KLSPISVLYIDDSSNVIYKQYENMV

SEQ ID NO: 38547 - protein, 27 aa, Artificial Sequence
  Cyclic GFR-binding peptide
  MOD_RES (2)..(2): Xaa is C or S
TXAPTKLEPISVLYLDDSSNVIKFKYE

SEQ ID NO: 38548 - protein, 36 aa, Artificial Sequence
  Cyclic GFR-binding peptide
  MOD_RES (3)..(4)..(36): Xaa is C or S
KAXXVPTELEPISMLYLDENEKVVKFKYEDMVVEGX

SEQ ID NO: 38549 - protein, 32 aa, Artificial Sequence
  Cyclic GFR-binding peptide
  MOD_RES (32)..(32): Xaa is C or S
VPTELEPISMLYLDEYDKVVKFKYEEMVVEGX

SEQ ID NO: 38550 - protein, 30 aa, Artificial Sequence; identical to SEQ ID NO: 9738
  Cyclic GFR-binding peptide
  MOD_RES (2)..(3): Xaa is C or S

SEQ ID NO: 38551 - protein, 28 aa, Artificial Sequence
  Cyclic GFR-binding peptide
PQDLSPISILYIVGRTPKVYKQYEMVVK

SEQ ID NO: 38552 - protein, 32 aa, Artificial Sequence
  Cyclic GFR-binding peptide
  MOD_RES (6)..(7): Xaa is C or S
KVGKAXXVPTKLEPISVLYLDDMGVPTKFKYE

SEQ ID NO: 38553 - protein, 36 aa, Artificial Sequence
  Cyclic GFR-binding peptide
  MOD_RES (3)..(4)..(36): Xaa is C or S
KPXXAPTKLEPISVLYLDDSSNVIKFKYENMVVRSX

SEQ ID NO: 38554 - protein, 21 aa, Artificial Sequence
  Cyclic GFR-binding peptide
NAISMLYFDEYDKVVLKKYRE

SEQ ID NO: 38555 - protein, 25 aa, Artificial Sequence
  Cyclic GFR-binding peptide
SPISMLYIDENEKVVYKQYEDMVVE

SEQ ID NO: 38556 - protein, 36 aa, Artificial Sequence
  Cyclic GFR-binding peptide
  MOD_RES (6)..(7): Xaa is C or S
TVPKPXXAPTQLEPISVLYLDDSSNVIKFKYENMVV

SEQ ID NO: 38557 - protein, 33 aa, Artificial Sequence; identical to SEQ ID NO: 9746
  Cyclic GFR-binding peptide
  MOD_RES (4)..(5): Xaa is C or S

SEQ ID NO: 38558 - protein, 30 aa, Artificial Sequence
  Cyclic GFR-binding peptide
  MOD_RES (3)..(4): Xaa is C or S
KAXXVPTKLEPISVLYLDDMGVPTKFKYEE

SEQ ID NO: 38559 - protein, 35 aa, Artificial Sequence; identical to SEQ ID NO: 9749
  Cyclic GFR-binding peptide
  MOD_RES (2)..(3)..(35): Xaa is C or S

SEQ ID NO: 38560 - protein, 28 aa, Artificial Sequence
  Cyclic GFR-binding peptide
  MOD_RES (28)..(28): Xaa is C or S
LSPISVLYIDDSSNVIYKQYENMVVRSX

SEQ ID NO: 38561 - protein, 32 aa, Artificial Sequence
  Cyclic GFR-binding peptide
  MOD_RES (31)..(31): Xaa is C or S
VSQDLEPISILYLIGKTPKIKFKYEMIVKSXK

SEQ ID NO: 38562 - protein, 31 aa, Artificial Sequence
  Cyclic GFR-binding peptide
  MOD_RES (3)..(4): Xaa is C or S
KAXXVPTELEPISMLYLDEYDKVVKFKYEEM

SEQ ID NO: 38563 - protein, 29 aa, Artificial Sequence
  Cyclic GFR-binding peptide
PTELSPISMLYKDEYDKVVLKYHYEMVVE

SEQ ID NO: 38564 - protein, 34 aa, Artificial Sequence
  Cyclic GFR-binding peptide
  MOD_RES (32)..(34): Xaa is C or S
VPTKLSPISILYKDKGVVTYLKYHYGMAVSEXGX

SEQ ID NO: 38565 - protein, 36 aa, Artificial Sequence
  Cyclic GFR-binding peptide
  MOD_RES (3)..(4)..(36): Xaa is C or S
KAXXVPTKLSPISILYKDKGVVTYLKYHYGMAVSEX

SEQ ID NO: 38566 - protein, 31 aa, Artificial Sequence
  Cyclic GFR-binding peptide
  MOD_RES (4)..(4): Xaa is C or S
KPTXAPTKLEPISVLYLDDSSNVIKFKYENM

SEQ ID NO: 38567 - protein, 33 aa, Artificial Sequence
  Cyclic GFR-binding peptide
  MOD_RES (1)..(2)..(33): Xaa is C or S
XXVPQDLEPISILYLVGRTPKVKFKYEMVVKSX

SEQ ID NO: 38568 - protein, 33 aa, Artificial Sequence
  Cyclic GFR-binding peptide
  MOD_RES (1)..(32): Xaa is C or S
XVPQALEPISILYLVGRKPKVKFKYEMIVRSXK

SEQ ID NO: 38569 - protein, 35 aa, Artificial Sequence
  Cyclic GFR-binding peptide
  MOD_RES (4)..(5): Xaa is C or S
PKPXXAPTKLEPISVLYLDDSSNVIKFKYENMVVR

SEQ ID NO: 38570 - protein, 33 aa, Artificial Sequence
  Cyclic GFR-binding peptide
  MOD_RES (30)..(32): Xaa is C or S
TELEPISMLYLDENEKVVKFKYEDMVVEGXGXR

SEQ ID NO: 38571 - protein, 27 aa, Artificial Sequence
  Cyclic GFR-binding peptide
  MOD_RES (2)..(2): Xaa is C or S
TXAPTKLSPISVLYKDDSSNVILKYHY

SEQ ID NO: 38572 - protein, 21 aa, Artificial Sequence
  Cyclic GFR-binding peptide
LNAISMLYFDENEKVVLKKYR

SEQ ID NO: 38573 - protein, 28 aa, Artificial Sequence
  Cyclic GFR-binding peptide
  MOD_RES (2)..(3): Xaa is C or S
AXXVPTELNAISMLYFDEYDKVVLKKYR

SEQ ID NO: 38574 - protein, 35 aa, Artificial Sequence; identical to SEQ ID NO: 9760
  Cyclic GFR-binding peptide
  MOD_RES (5)..(6): Xaa is C or S

SEQ ID NO: 38575 - protein, 27 aa, Artificial Sequence
  Cyclic GFR-binding peptide
  MOD_RES (1)..(1): Xaa is C or S
XVPTELNAISMLYFDEYDKVVLKKYRE

SEQ ID NO: 38576 - protein, 21 aa, Artificial Sequence
  Cyclic GFR-binding peptide
LSPISMLYKDEYDKVVLKYHY

SEQ ID NO: 38577 - protein, 25 aa, Artificial Sequence
  Cyclic GFR-binding peptide
LSPISVLYIDDSSNVIYKQYENMVV

SEQ ID NO: 38578 - protein, 38 aa, Artificial Sequence; identical to SEQ ID NO: 9764
  Cyclic GFR-binding peptide
  MOD_RES (4)..(36)..(38): Xaa is C or S

SEQ ID NO: 38579 - protein, 39 aa, Artificial Sequence
  Cyclic GFR-binding peptide
  MOD_RES (6)..(7)..(39): Xaa is C or S
TVPKPXXAPTQLEPISVLYLDDSSNVIKFKYENMVVRAX

SEQ ID NO: 38580 - protein, 39 aa, Artificial Sequence
  Cyclic GFR-binding peptide
  MOD_RES (2)..(3)..(36)..(38): Xaa is C or S
AXXVPTKLEPISVLYLDDMGVPTKFKYEEGMSVAEXGXR

SEQ ID NO: 38581 - protein, 34 aa, Artificial Sequence
  Cyclic GFR-binding peptide
  MOD_RES (1)..(2)..(34): Xaa is C or S
XXAPTKLSPISVLYIDDSSNVIYKQYENMVVRSX

SEQ ID NO: 38582 - protein, 34 aa, Artificial Sequence
  Cyclic GFR-binding peptide
  MOD_RES (3)..(4): Xaa is C or S
APXXVPQALSPISILYIVGRKPKVYKQYEMIVRS

SEQ ID NO: 38583 - protein, 37 aa, Artificial Sequence; identical to SEQ ID NO: 9772
  Cyclic GFR-binding peptide
  MOD_RES (3)..(4)..(36): Xaa is C or S

SEQ ID NO: 38584 - protein, 36 aa, Artificial Sequence; identical to SEQ ID NO: 9773
  Cyclic GFR-binding peptide
  MOD_RES (2)..(3)..(35): Xaa is C or S

SEQ ID NO: 38585 - protein, 34 aa, Artificial Sequence; identical to SEQ ID NO: 9774
  Cyclic GFR-binding peptide
  MOD_RES (31)..(33): Xaa is C or S

SEQ ID NO: 38586 - protein, 29 aa, Artificial Sequence
  Cyclic GFR-binding peptide
VSQDLSPISILYIIGKTPKIYKQYEMIVK

SEQ ID NO: 38587 - protein, 31 aa, Artificial Sequence
  Cyclic GFR-binding peptide
  MOD_RES (31)..(31): Xaa is C or S
PTKLSPISVLYIDDSSNVIYKQYENMVVRSX

SEQ ID NO: 38588 - protein, 27 aa, Artificial Sequence
  Cyclic GFR-binding peptide
APTKLEPISVLYLDDSSNVIKFKYENM

SEQ ID NO: 38589 - protein, 29 aa, Artificial Sequence
  Cyclic GFR-binding peptide
  MOD_RES (2)..(3): Xaa is C or S
PXXVPQDLSPISILYIVGRTPKVYKQYEM

SEQ ID NO: 38590 - protein, 24 aa, Artificial Sequence
  Cyclic GFR-binding peptide
LEPISMLYLDEYDKVVKFKYEEMV

SEQ ID NO: 38591 - protein, 30 aa, Artificial Sequence
  Cyclic GFR-binding peptide
TKLEPISVLYLDDMGVPTKFKYEEGMSVAE

SEQ ID NO: 38592 - protein, 30 aa, Artificial Sequence
  Cyclic GFR-binding peptide
  MOD_RES (30)..(30): Xaa is C or S
TELEPISMLYLDEYDKVVKFKYEEMVVEGX

SEQ ID NO: 38593 - protein, 35 aa, Artificial Sequence
  Cyclic GFR-binding peptide
  MOD_RES (6)..(7): Xaa is C or S
TVPKPXXAPTQLEPISVLYLDDSSNVIKFKYENMV

SEQ ID NO: 38594 - protein, 30 aa, Artificial Sequence
  Cyclic GFR-binding peptide
  MOD_RES (4)..(5): Xaa is C or S
ASPXXVSQDLEPISILYLIGKTPKIKFKYE

SEQ ID NO: 38595 - protein, 33 aa, Artificial Sequence
  Cyclic GFR-binding peptide
  MOD_RES (2)..(3): Xaa is C or S
AXXVPTELSPISMLYIDEYDKVVYKQYEEMVVE

SEQ ID NO: 38596 - protein, 30 aa, Artificial Sequence
  Cyclic GFR-binding peptide
  MOD_RES (2)..(3): Xaa is C or S
PXXVPQALSPISILYIVGRKPKVYKQYEMI

SEQ ID NO: 38597 - protein, 23 aa, Artificial Sequence
  Cyclic GFR-binding peptide
SPISILYIVGRTPKVYKQYEMVV

SEQ ID NO: 38598 - protein, 31 aa, Artificial Sequence; identical to SEQ ID NO: 9778
  Cyclic GFR-binding peptide
  MOD_RES (2)..(3): Xaa is C or S

SEQ ID NO: 38599 - protein, 32 aa, Artificial Sequence
  Cyclic GFR-binding peptide
  MOD_RES (6)..(7): Xaa is C or S
AVPKAXXAPTKLSPISVLYIDSSNNVIYKQYE

SEQ ID NO: 38600 - protein, 31 aa, Artificial Sequence; identical to SEQ ID NO: 9783
  Cyclic GFR-binding peptide
  MOD_RES (5)..(6): Xaa is C or S

SEQ ID NO: 38601 - protein, 31 aa, Artificial Sequence
  Cyclic GFR-binding peptide
  MOD_RES (5)..(6): Xaa is C or S
IPKAXXVPTELEPISMLYLDENEKVVKFKYE

SEQ ID NO: 38602 - protein, 32 aa, Artificial Sequence
  Cyclic GFR-binding peptide
  MOD_RES (5)..(6): Xaa is C or S
SASPXXVSQDLEPISILYLIGKTPKIKFKYEM

SEQ ID NO: 38603 - protein, 21 aa, Artificial Sequence
  Cyclic GFR-binding peptide
LSPISVLYKDSSNNVILKYHY

SEQ ID NO: 38604 - protein, 29 aa, Artificial Sequence
  Cyclic GFR-binding peptide
  MOD_RES (29)..(29): Xaa is C or S
QDLSPISILYIIGKTPKIYKQYEMIVKSX

SEQ ID NO: 38605 - protein, 28 aa, Artificial Sequence
  Cyclic GFR-binding peptide
  MOD_RES (27)..(27): Xaa is C or S
NAISILYFDKGVVTYLKKYRGMAVSEXG

SEQ ID NO: 38606 - protein, 30 aa, Artificial Sequence; identical to SEQ ID NO: 9787
  Cyclic GFR-binding peptide
  MOD_RES (29)..(29): Xaa is C or S

SEQ ID NO: 38607 - protein, 37 aa, Artificial Sequence
  Cyclic GFR-binding peptide
  MOD_RES (2)..(3)..(35)..(37): Xaa is C or S
AXXVPTELSPISMLYIDEYDKVVYKQYEEMVVEGXGX

SEQ ID NO: 38608 - protein, 36 aa, Artificial Sequence; identical to SEQ ID NO: 9790
  Cyclic GFR-binding peptide
  MOD_RES (1)..(33)..(35): Xaa is C or S

SEQ ID NO: 38609 - protein, 24 aa, Artificial Sequence
  Cyclic GFR-binding peptide
PTQLSPISVLYKDDSSNVILKYHY

SEQ ID NO: 38610 - protein, 31 aa, Artificial Sequence; identical to SEQ ID NO: 9793
  Cyclic GFR-binding peptide
  MOD_RES (2)..(3): Xaa is C or S

SEQ ID NO: 38611 - protein, 33 aa, Artificial Sequence
  Cyclic GFR-binding peptide
  MOD_RES (5)..(6): Xaa is C or S
IPKAXXVPTELEPISMLYLDENEKVVKFKYEDM

SEQ ID NO: 38612 - protein, 37 aa, Artificial Sequence
  Cyclic GFR-binding peptide
  MOD_RES (3)..(4)..(36): Xaa is C or S
KPXXAPTQLEPISVLYLDDSSNVIKFKYENMVVRAXG

SEQ ID NO: 38613 - protein, 30 aa, Artificial Sequence
  Cyclic GFR-binding peptide
  MOD_RES (1)..(1): Xaa is C or S
XVPTELEPISMLYLDENEKVVKFKYEDMVV

SEQ ID NO: 38614 - protein, 27 aa, Artificial Sequence
  Cyclic GFR-binding peptide
QALSPISILYKVGRKPKVLKYHYMIVR

SEQ ID NO: 38615 - protein, 37 aa, Artificial Sequence
  Cyclic GFR-binding peptide
  MOD_RES (2)..(3)..(34)..(36): Xaa is C or S
PXXVPQALSPISILYIVGRKPKVYKQYEMIVRSXKXS

SEQ ID NO: 38616 - protein, 36 aa, Artificial Sequence; identical to SEQ ID NO: 9799
  Cyclic GFR-binding peptide
  MOD_RES (6)..(7): Xaa is C or S

SEQ ID NO: 38617 - protein, 24 aa, Artificial Sequence
  Cyclic GFR-binding peptide
QALSPISILYIVGRKPKVYKQYEM

SEQ ID NO: 38618 - protein, 30 aa, Artificial Sequence
  Cyclic GFR-binding peptide
  MOD_RES (1)..(2): Xaa is C or S
XXVPARLSPISILYKDAANNVVLKYHYDMV

SEQ ID NO: 38619 - protein, 33 aa, Artificial Sequence; identical to SEQ ID NO: 9801
  Cyclic GFR-binding peptide
  MOD_RES (30)..(32): Xaa is C or S

SEQ ID NO: 38620 - protein, 38 aa, Artificial Sequence; identical to SEQ ID NO: 9803
  Cyclic GFR-binding peptide
  MOD_RES (3)..(4)..(35)..(37): Xaa is C or S

SEQ ID NO: 38621 - protein, 27 aa, Artificial Sequence
  Cyclic GFR-binding peptide
VPTELSPISMLYIDENEKVVYKQYEDM

SEQ ID NO: 38622 - protein, 32 aa, Artificial Sequence
  Cyclic GFR-binding peptide
  MOD_RES (30)..(32): Xaa is C or S
TKLEPISVLYLDDSSNVIKFKYENMVVRSXGX

SEQ ID NO: 38623 - protein, 25 aa, Artificial Sequence
  Cyclic GFR-binding peptide
RLNAISILYFDAANNVVLKKYRDMV

SEQ ID NO: 38624 - protein, 32 aa, Artificial Sequence
  Cyclic GFR-binding peptide
  MOD_RES (3)..(4): Xaa is C or S
KAXXVPTKLSPISVLYIDDMGVPTYKQYEEGM

SEQ ID NO: 38625 - protein, 29 aa, Artificial Sequence
  Cyclic GFR-binding peptide
VPTELSPISMLYIDEYDKVVYKQYEEMVV

SEQ ID NO: 38626 - protein, 25 aa, Artificial Sequence
  Cyclic GFR-binding peptide
NAISVLYFDDMGVPTLKKYREGMSV

SEQ ID NO: 38627 - protein, 36 aa, Artificial Sequence
  Cyclic GFR-binding peptide
  MOD_RES (4)..(5): Xaa is C or S
PKAXXAPTKLSPISVLYIDSSNNVIYKQYENMVVKA

SEQ ID NO: 38628 - protein, 28 aa, Artificial Sequence
  Cyclic GFR-binding peptide
  MOD_RES (3)..(3): Xaa is C or S
PTXAPTKLSPISVLYIDDSSNVIYKQYE

SEQ ID NO: 38629 - protein, 32 aa, Artificial Sequence
  Cyclic GFR-binding peptide
  MOD_RES (3)..(4): Xaa is C or S
KAXXVPTELSPISMLYIDEYDKVVYKQYEEMV

SEQ ID NO: 38630 - protein, 31 aa, Artificial Sequence
  Cyclic GFR-binding peptide
  MOD_RES (5)..(6): Xaa is C or S
APASXXVPARLSPISILYKDAANNVVLKYHY

SEQ ID NO: 38631 - protein, 38 aa, Artificial Sequence; identical to SEQ ID NO: 9809
  Cyclic GFR-binding peptide
  MOD_RES (5)..(6)..(37): Xaa is C or S

SEQ ID NO: 38632 - protein, 26 aa, Artificial Sequence
  Cyclic GFR-binding peptide
DLSPISILYKIGKTPKILKYHYMIVK

SEQ ID NO: 38633 - protein, 24 aa, Artificial Sequence
  Cyclic GFR-binding peptide
QDLSPISILYKVGRTPKVLKYHYM

SEQ ID NO: 38634 - protein, 25 aa, Artificial Sequence
  Cyclic GFR-binding peptide
ELEPISMLYLDEYDKVVKFKYEEMV

SEQ ID NO: 38635 - protein, 31 aa, Artificial Sequence; identical to SEQ ID NO: 9815
  Cyclic GFR-binding peptide
  MOD_RES (2)..(3): Xaa is C or S

SEQ ID NO: 38636 - protein, 32 aa, Artificial Sequence
  Cyclic GFR-binding peptide
  MOD_RES (1)..(1): Xaa is C or S
XVPTKLSPISILYIDKGVVTYYKQYEGMAVSE

SEQ ID NO: 38637 - protein, 23 aa, Artificial Sequence
  Cyclic GFR-binding peptide
TKLSPISILYIDKGVVTYYKQYE

SEQ ID NO: 38638 - protein, 25 aa, Artificial Sequence
  Cyclic GFR-binding peptide
LEPISILYLVGRKPKVKFKYEMIVR

SEQ ID NO: 38639 - protein, 33 aa, Artificial Sequence; identical to SEQ ID NO: 9819
  Cyclic GFR-binding peptide
  MOD_RES (5)..(6): Xaa is C or S

SEQ ID NO: 38640 - protein, 22 aa, Artificial Sequence
  Cyclic GFR-binding peptide
LEPISILYLVGRKPKVKFKYEM

SEQ ID NO: 38641 - protein, 33 aa, Artificial Sequence
  Cyclic GFR-binding peptide
  MOD_RES (1)..(33): Xaa is C or S
XVPTKLNAISILYFDKGVVTYLKKYRGMAVSEX

SEQ ID NO: 38642 - protein, 27 aa, Artificial Sequence
  Cyclic GFR-binding peptide
TELSPISMLYIDENEKVVYKQYEDMVV

SEQ ID NO: 38643 - protein, 35 aa, Artificial Sequence; identical to SEQ ID NO: 9821
  Cyclic GFR-binding peptide
  MOD_RES (1)..(2)..(34): Xaa is C or S

SEQ ID NO: 38644 - protein, 32 aa, Artificial Sequence; identical to SEQ ID NO: 9822
  Cyclic GFR-binding peptide
  MOD_RES (2)..(3): Xaa is C or S

SEQ ID NO: 38645 - protein, 31 aa, Artificial Sequence; identical to SEQ ID NO: 9826
  Cyclic GFR-binding peptide
  MOD_RES (1)..(1): Xaa is C or S

SEQ ID NO: 38646 - protein, 31 aa, Artificial Sequence
  Cyclic GFR-binding peptide
  MOD_RES (1)..(2): Xaa is C or S
XXVPTKLSPISILYIDKGVVTYYKQYEGMAV

SEQ ID NO: 38647 - protein, 30 aa, Artificial Sequence
  Cyclic GFR-binding peptide
  MOD_RES (2)..(3): Xaa is C or S
AXXVPTKLEPISVLYLDDMGVPTKFKYEEG

SEQ ID NO: 38648 - protein, 27 aa, Artificial Sequence
  Cyclic GFR-binding peptide
  MOD_RES (26)..(26): Xaa is C or S
SPISILYKVGRTPKVLKYHYMVVKSXK

SEQ ID NO: 38649 - protein, 31 aa, Artificial Sequence; identical to SEQ ID NO: 9829
  Cyclic GFR-binding peptide
  MOD_RES (30)..(30): Xaa is C or S

SEQ ID NO: 38650 - protein, 39 aa, Artificial Sequence; identical to SEQ ID NO: 9832
  Cyclic GFR-binding peptide
  MOD_RES (4)..(5)..(37)..(39): Xaa is C or S

SEQ ID NO: 38651 - protein, 23 aa, Artificial Sequence
  Cyclic GFR-binding peptide
DLSPISILYKVGRTPKVLKYHYM

SEQ ID NO: 38652 - protein, 31 aa, Artificial Sequence
  Cyclic GFR-binding peptide
  MOD_RES (4)..(5): Xaa is C or S
ASPXXVPQDLEPISILYLVGRTPKVKFKYEM

SEQ ID NO: 38653 - protein, 23 aa, Artificial Sequence
  Cyclic GFR-binding peptide
LEPISVLYLDDSSNVIKFKYENM

SEQ ID NO: 38654 - protein, 37 aa, Artificial Sequence; identical to SEQ ID NO: 9835
  Cyclic GFR-binding peptide
  MOD_RES (3)..(4)..(35)..(37): Xaa is C or S

SEQ ID NO: 38655 - protein, 31 aa, Artificial Sequence
  Cyclic GFR-binding peptide
  MOD_RES (28)..(30): Xaa is C or S
LSPISVLYIDDSSNVIYKQYENMVVRSXGXH

SEQ ID NO: 38656 - protein, 27 aa, Artificial Sequence
  Cyclic GFR-binding peptide
ALEPISILYLVGRKPKVKFKYEMIVRS

SEQ ID NO: 38657 - protein, 27 aa, Artificial Sequence
  Cyclic GFR-binding peptide
  MOD_RES (1)..(2): Xaa is C or S
XXVPTELNAISMLYFDEYDKVVLKKYR

SEQ ID NO: 38658 - protein, 35 aa, Artificial Sequence
  Cyclic GFR-binding peptide
  MOD_RES (5)..(6): Xaa is C or S
VGKAXXVPTKLEPISVLYLDDMGVPTKFKYEEGMS

SEQ ID NO: 38659 - protein, 32 aa, Artificial Sequence
  Cyclic GFR-binding peptide
  MOD_RES (32)..(32): Xaa is C or S
APTKLSPISVLYIDDSSNVIYKQYENMVVRSX

SEQ ID NO: 38660 - protein, 33 aa, Artificial Sequence
  Cyclic GFR-binding peptide
  MOD_RES (4)..(5): Xaa is C or S
GKAXXVPTKLEPISVLYLDDMGVPTKFKYEEGM

SEQ ID NO: 38661 - protein, 35 aa, Artificial Sequence
  Cyclic GFR-binding peptide
  MOD_RES (5)..(6): Xaa is C or S
SASPXXVPQDLEPISILYLVGRTPKVKFKYEMVVK

SEQ ID NO: 38662 - protein, 31 aa, Artificial Sequence
  Cyclic GFR-binding peptide
  MOD_RES (31)..(31): Xaa is C or S
PTKLSPISILYKDKGVVTYLKYHYGMAVSEX

SEQ ID NO: 38663 - protein, 33 aa, Artificial Sequence; identical to SEQ ID NO: 9840
  Cyclic GFR-binding peptide
  MOD_RES (5)..(6): Xaa is C or S

SEQ ID NO: 38664 - protein, 36 aa, Artificial Sequence
  Cyclic GFR-binding peptide
  MOD_RES (3)..(35): Xaa is C or S
PTXAPTKLEPISVLYLDDSSNVIKFKYENMVVRSXG

SEQ ID NO: 38665 - protein, 27 aa, Artificial Sequence
  Cyclic GFR-binding peptide
ALSPISILYKVGRKPKVLKYHYMIVRS

SEQ ID NO: 38666 - protein, 41 aa, Artificial Sequence
  Cyclic GFR-binding peptide
  MOD_RES (6)..(7)..(39)..(41): Xaa is C or S
TVPKPXXAPTQLSPISVLYIDDSSNVIYKQYENMVVRAXGX

SEQ ID NO: 38667 - protein, 32 aa, Artificial Sequence
  Cyclic GFR-binding peptide
  MOD_RES (6)..(7): Xaa is C or S
AAPASXXVPARLEPISILYLDAANNVVKFKYE

SEQ ID NO: 38668 - protein, 37 aa, Artificial Sequence; identical to SEQ ID NO: 9844
  Cyclic GFR-binding peptide
  MOD_RES (5)..(6)..(37): Xaa is C or S

SEQ ID NO: 38669 - protein, 22 aa, Artificial Sequence
  Cyclic GFR-binding peptide
ALSPISILYKVGRKPKVLKYHY

SEQ ID NO: 38670 - protein, 39 aa, Artificial Sequence
  Cyclic GFR-binding peptide
  MOD_RES (7)..(39): Xaa is C or S
HVTKPTXAPTKLEPISVLYLDDSSNVIKFKYENMVVRSX

SEQ ID NO: 38671 - protein, 37 aa, Artificial Sequence; identical to SEQ ID NO: 9849
  Cyclic GFR-binding peptide
  MOD_RES (6)..(7): Xaa is C or S

SEQ ID NO: 38672 - protein, 32 aa, Artificial Sequence
  Cyclic GFR-binding peptide
  MOD_RES (4)..(5): Xaa is C or S
PASXXVPARLEPISILYLDAANNVVKFKYEDM

SEQ ID NO: 38673 - protein, 40 aa, Artificial Sequence
  Cyclic GFR-binding peptide
  MOD_RES (4)..(5)..(37)..(39): Xaa is C or S
SKAXXVPTKLNAISILYFDKGVVTYLKKYRGMAVSEXGXR

SEQ ID NO: 38674 - protein, 34 aa, Artificial Sequence
  Cyclic GFR-binding peptide
  MOD_RES (1)..(33): Xaa is C or S
XVPTKLSPISILYIDKGVVTYYKQYEGMAVSEXG

SEQ ID NO: 38675 - protein, 26 aa, Artificial Sequence
  Cyclic GFR-binding peptide
APTKLSPISVLYKDSSNNVILKYHYN

SEQ ID NO: 38676 - protein, 31 aa, Artificial Sequence; identical to SEQ ID NO: 9855
  Cyclic GFR-binding peptide
  MOD_RES (2)..(3): Xaa is C or S

SEQ ID NO: 38677 - protein, 31 aa, Artificial Sequence
  Cyclic GFR-binding peptide
  MOD_RES (29)..(31): Xaa is C or S
KLSPISVLYIDDSSNVIYKQYENMVVRSXGX

SEQ ID NO: 38678 - protein, 28 aa, Artificial Sequence
  Cyclic GFR-binding peptide
PTKLNAISILYFDKGVVTYLKKYRGMAV

SEQ ID NO: 38679 - protein, 32 aa, Artificial Sequence; identical to SEQ ID NO: 9859
  Cyclic GFR-binding peptide
  MOD_RES (29)..(31): Xaa is C or S

SEQ ID NO: 38680 - protein, 22 aa, Artificial Sequence
  Cyclic GFR-binding peptide
SPISVLYIDDSSNVIYKQYENM

SEQ ID NO: 38681 - protein, 33 aa, Artificial Sequence
  Cyclic GFR-binding peptide
  MOD_RES (32)..(32): Xaa is C or S
PTKLEPISVLYLDDMGVPTKFKYEEGMSVAEXG

SEQ ID NO: 38682 - protein, 32 aa, Artificial Sequence
  Cyclic GFR-binding peptide
  MOD_RES (6)..(6): Xaa is C or S
VTKPTXAPTKLEPISVLYLDDSSNVIKFKYEN

SEQ ID NO: 38683 - protein, 32 aa, Artificial Sequence
  Cyclic GFR-binding peptide
  MOD_RES (1)..(1): Xaa is C or S
XVPTELEPISMLYLDENEKVVKFKYEDMVVEG

SEQ ID NO: 38684 - protein, 33 aa, Artificial Sequence
  Cyclic GFR-binding peptide
  MOD_RES (6)..(7): Xaa is C or S
KASKAXXVPTKLNAISILYFDKGVVTYLKKYRG

SEQ ID NO: 38685 - protein, 39 aa, Artificial Sequence
  Cyclic GFR-binding peptide
  MOD_RES (4)..(5)..(37)..(39): Xaa is C or S
PKPXXAPTQLSPISVLYIDDSSNVIYKQYENMVVRAXGX

SEQ ID NO: 38686 - protein, 33 aa, Artificial Sequence; identical to SEQ ID NO: 9860
  Cyclic GFR-binding peptide
  MOD_RES (2)..(2): Xaa is C or S

SEQ ID NO: 38687 - protein, 33 aa, Artificial Sequence; identical to SEQ ID NO: 9861
  Cyclic GFR-binding peptide
  MOD_RES (2)..(3): Xaa is C or S

SEQ ID NO: 38688 - protein, 29 aa, Artificial Sequence
  Cyclic GFR-binding peptide
TELSPISMLYIDEYDKVVYKQYEEMVVEG

SEQ ID NO: 38689 - protein, 25 aa, Artificial Sequence
  Cyclic GFR-binding peptide
VPQALSPISILYIVGRKPKVYKQYE

SEQ ID NO: 38690 - protein, 27 aa, Artificial Sequence
  Cyclic GFR-binding peptide
  MOD_RES (1)..(1): Xaa is C or S
XVPTELSPISMLYIDEYDKVVYKQYEE

SEQ ID NO: 38691 - protein, 28 aa, Artificial Sequence
  Cyclic GFR-binding peptide
  MOD_RES (1)..(1): Xaa is C or S
XVPTELNAISMLYFDENEKVVLKKYRDM

SEQ ID NO: 38692 - protein, 36 aa, Artificial Sequence
  Cyclic GFR-binding peptide
  MOD_RES (1)..(33)..(35): Xaa is C or S
XAPTKLSPISVLYIDSSNNVIYKQYENMVVKAXGXH

SEQ ID NO: 38693 - protein, 30 aa, Artificial Sequence; identical to SEQ ID NO: 9866
  Cyclic GFR-binding peptide
  MOD_RES (2)..(3): Xaa is C or S

SEQ ID NO: 38694 - protein, 34 aa, Artificial Sequence
  Cyclic GFR-binding peptide
  MOD_RES (1)..(33): Xaa is C or S
XAPTKLSPISVLYIDDSSNVIYKQYENMVVRSXG

SEQ ID NO: 38695 - protein, 30 aa, Artificial Sequence
  Cyclic GFR-binding peptide
  MOD_RES (2)..(3): Xaa is C or S
PXXVSQDLEPISILYLIGKTPKIKFKYEMI

SEQ ID NO: 38696 - protein, 34 aa, Artificial Sequence
  Cyclic GFR-binding peptide
  MOD_RES (1)..(33): Xaa is C or S
XVPARLSPISILYKDAANNVVLKYHYDMVVEAXG

SEQ ID NO: 38697 - protein, 30 aa, Artificial Sequence
  Cyclic GFR-binding peptide
  MOD_RES (3)..(4): Xaa is C or S
KPXXAPTQLEPISVLYLDDSSNVIKFKYEN

SEQ ID NO: 38698 - protein, 31 aa, Artificial Sequence
  Cyclic GFR-binding peptide
  MOD_RES (28)..(30): Xaa is C or S
LSPISMLYIDENEKVVYKQYEDMVVEGXGXR

SEQ ID NO: 38699 - protein, 27 aa, Artificial Sequence
  Cyclic GFR-binding peptide
TELNAISMLYFDEYDKVVLKKYREMVV

SEQ ID NO: 38700 - protein, 30 aa, Artificial Sequence
  Cyclic GFR-binding peptide
VPTELSPISMLYIDENEKVVYKQYEDMVVE

SEQ ID NO: 38701 - protein, 37 aa, Artificial Sequence; identical to SEQ ID NO: 9870
  Cyclic GFR-binding peptide
  MOD_RES (6)..(7): Xaa is C or S

SEQ ID NO: 38702 - protein, 29 aa, Artificial Sequence
  Cyclic GFR-binding peptide
  MOD_RES (28)..(28): Xaa is C or S
LEPISILYLDAANNVVKFKYEDMVVEAXG

SEQ ID NO: 38703 - protein, 27 aa, Artificial Sequence
  Cyclic GFR-binding peptide
LSPISMLYIDEYDKVVYKQYEEMVVEG

SEQ ID NO: 38704 - protein, 22 aa, Artificial Sequence
  Cyclic GFR-binding peptide
EPISMLYLDENEKVVKFKYEDM

SEQ ID NO: 38705 - protein, 35 aa, Artificial Sequence; identical to SEQ ID NO: 9872
  Cyclic GFR-binding peptide
  MOD_RES (1)..(33)..(35): Xaa is C or S

SEQ ID NO: 38706 - protein, 36 aa, Artificial Sequence
  Cyclic GFR-binding peptide
  MOD_RES (1)..(33)..(35): Xaa is C or S
XAPTKLEPISVLYLDSSNNVIKFKYENMVVKAXGXH

SEQ ID NO: 38707 - protein, 38 aa, Artificial Sequence; identical to SEQ ID NO: 9875
  Cyclic GFR-binding peptide
  MOD_RES (1)..(2)..(35)..(37): Xaa is C or S

SEQ ID NO: 38708 - protein, 32 aa, Artificial Sequence
  Cyclic GFR-binding peptide
  MOD_RES (2)..(2): Xaa is C or S
TXAPTKLSPISVLYIDDSSNVIYKQYENMVVR

SEQ ID NO: 38709 - protein, 29 aa, Artificial Sequence
  Cyclic GFR-binding peptide
  MOD_RES (3)..(4): Xaa is C or S
KAXXVPTKLSPISVLYIDDMGVPTYKQYE

SEQ ID NO: 38710 - protein, 29 aa, Artificial Sequence
  Cyclic GFR-binding peptide
  MOD_RES (2)..(3): Xaa is C or S
SXXVPARLEPISILYLDAANNVVKFKYED

SEQ ID NO: 38711 - protein, 37 aa, Artificial Sequence; identical to SEQ ID NO: 9881
  Cyclic GFR-binding peptide
  MOD_RES (5)..(6): Xaa is C or S

SEQ ID NO: 38712 - protein, 39 aa, Artificial Sequence
  Cyclic GFR-binding peptide
  MOD_RES (4)..(5)..(37)..(39): Xaa is C or S
SKAXXVPTKLSPISILYKDKGVVTYLKYHYGMAVSEXGX

SEQ ID NO: 38713 - protein, 33 aa, Artificial Sequence; identical to SEQ ID NO: 9884
  Cyclic GFR-binding peptide
  MOD_RES (31)..(33): Xaa is C or S

SEQ ID NO: 38714 - protein, 23 aa, Artificial Sequence
  Cyclic GFR-binding peptide
TELSPISMLYKDEYDKVVLKYHY

SEQ ID NO: 38715 - protein, 31 aa, Artificial Sequence; identical to SEQ ID NO: 9887
  Cyclic GFR-binding peptide
  MOD_RES (29)..(31): Xaa is C or S

SEQ ID NO: 38716 - protein, 28 aa, Artificial Sequence
  Cyclic GFR-binding peptide
  MOD_RES (1)..(1): Xaa is C or S
XAPTQLEPISVLYLDDSSNVIKFKYENM

SEQ ID NO: 38717 - protein, 31 aa, Artificial Sequence; identical to SEQ ID NO: 9888
  Cyclic GFR-binding peptide
  MOD_RES (30)..(30): Xaa is C or S

SEQ ID NO: 38718 - protein, 30 aa, Artificial Sequence; identical to SEQ ID NO: 9889
  Cyclic GFR-binding peptide
  MOD_RES (27)..(29): Xaa is C or S

SEQ ID NO: 38719 - protein, 32 aa, Artificial Sequence; identical to SEQ ID NO: 9891
  Cyclic GFR-binding peptide
  MOD_RES (31)..(31): Xaa is C or S

SEQ ID NO: 38720 - protein, 23 aa, Artificial Sequence
  Cyclic GFR-binding peptide
LEPISVLYLDDMGVPTKFKYEEG

SEQ ID NO: 38721 - protein, 41 aa, Artificial Sequence
  Cyclic GFR-binding peptide
  MOD_RES (6)..(7)..(38)..(40): Xaa is C or S
ASASPXXVSQDLEPISILYLIGKTPKIKFKYEMIVKSXKXS

SEQ ID NO: 38722 - protein, 40 aa, Artificial Sequence
  Cyclic GFR-binding peptide
  MOD_RES (5)..(6)..(38)..(40): Xaa is C or S
IPKAXXVPTELEPISMLYLDENEKVVKFKYEDMVVEGXGX

SEQ ID NO: 38723 - protein, 25 aa, Artificial Sequence
  Cyclic GFR-binding peptide
QDLSPISILYIIGKTPKIYKQYEMI

SEQ ID NO: 38724 - protein, 34 aa, Artificial Sequence
  Cyclic GFR-binding peptide
  MOD_RES (6)..(7): Xaa is C or S
TVPKPXXAPTQLSPISVLYIDDSSNVIYKQYENM

SEQ ID NO: 38725 - protein, 34 aa, Artificial Sequence
  Cyclic GFR-binding peptide
  MOD_RES (3)..(4): Xaa is C or S
KAXXVPTELEPISMLYLDEYDKVVKFKYEEMVVE

SEQ ID NO: 38726 - protein, 32 aa, Artificial Sequence
  Cyclic GFR-binding peptide
  MOD_RES (3)..(3): Xaa is C or S
PTXAPTKLSPISVLYIDDSSNVIYKQYENMVV

SEQ ID NO: 38727 - protein, 31 aa, Artificial Sequence; identical to SEQ ID NO: 9894
  Cyclic GFR-binding peptide
  MOD_RES (2)..(3): Xaa is C or S

SEQ ID NO: 38728 - protein, 23 aa, Artificial Sequence
  Cyclic GFR-binding peptide
ARLSPISILYKDAANNVVLKYHY

SEQ ID NO: 38729 - protein, 25 aa, Artificial Sequence
  Cyclic GFR-binding peptide
VSQDLEPISILYLIGKTPKIKFKYE

SEQ ID NO: 38730 - protein, 26 aa, Artificial Sequence
  Cyclic GFR-binding peptide
KLSPISILYIDKGVVTYYKQYEGMAV

SEQ ID NO: 38731 - protein, 36 aa, Artificial Sequence
  Cyclic GFR-binding peptide
  MOD_RES (4)..(5): Xaa is C or S
PASXXVPARLSPISILYKDAANNVVLKYHYDMVVEA

SEQ ID NO: 38732 - protein, 28 aa, Artificial Sequence
  Cyclic GFR-binding peptide
RLEPISILYLDAANNVVKFKYEDMVVEA

SEQ ID NO: 38733 - protein, 32 aa, Artificial Sequence
  Cyclic GFR-binding peptide
VPTKLEPISVLYLDDMGVPTKFKYEEGMSVAE

SEQ ID NO: 38734 - protein, 31 aa, Artificial Sequence
  Cyclic GFR-binding peptide
  MOD_RES (1)..(2): Xaa is C or S
XXAPTKLEPISVLYLDDSSNVIKFKYENMVV

SEQ ID NO: 38735 - protein, 33 aa, Artificial Sequence; identical to SEQ ID NO: 9900
  Cyclic GFR-binding peptide
  MOD_RES (30)..(32): Xaa is C or S

SEQ ID NO: 38736 - protein, 32 aa, Artificial Sequence
  Cyclic GFR-binding peptide
  MOD_RES (5)..(6): Xaa is C or S
IPKAXXVPTELSPISMLYIDEYDKVVYKQYEE

SEQ ID NO: 38737 - protein, 33 aa, Artificial Sequence
  Cyclic GFR-binding peptide
  MOD_RES (32)..(32): Xaa is C or S
VPARLEPISILYLDAANNVVKFKYEDMVVEAXG

SEQ ID NO: 38738 - protein, 27 aa, Artificial Sequence
  Cyclic GFR-binding peptide
PTKLNAISILYFDKGVVTYLKKYRGMA

SEQ ID NO: 38739 - protein, 34 aa, Artificial Sequence
  Cyclic GFR-binding peptide
  MOD_RES (5)..(6): Xaa is C or S
VPKPXXAPTKLSPISVLYIDDSSNVIYKQYENMV

SEQ ID NO: 38740 - protein, 26 aa, Artificial Sequence
  Cyclic GFR-binding peptide
VSQDLNAISILYFIGKTPKILKKYRM

SEQ ID NO: 38741 - protein, 29 aa, Artificial Sequence
  Cyclic GFR-binding peptide
APTQLSPISVLYKDDSSNVILKYHYNMVV

SEQ ID NO: 38742 - protein, 32 aa, Artificial Sequence; identical to SEQ ID NO: 9907
  Cyclic GFR-binding peptide
  MOD_RES (2)..(3): Xaa is C or S

SEQ ID NO: 38743 - protein, 31 aa, Artificial Sequence
  Cyclic GFR-binding peptide
  MOD_RES (28)..(30): Xaa is C or S
LEPISILYLDAANNVVKFKYEDMVVEAXGXR

SEQ ID NO: 38744 - protein, 36 aa, Artificial Sequence; identical to SEQ ID NO: 9908
  Cyclic GFR-binding peptide
  MOD_RES (5)..(6): Xaa is C or S

SEQ ID NO: 38745 - protein, 27 aa, Artificial Sequence
  Cyclic GFR-binding peptide
VPTKLNAISILYFDKGVVTYLKKYRGM

SEQ ID NO: 38746 - protein, 34 aa, Artificial Sequence
  Cyclic GFR-binding peptide
  MOD_RES (1)..(33): Xaa is C or S
XAPTQLSPISVLYIDDSSNVIYKQYENMVVRAXG

SEQ ID NO: 38747 - protein, 20 aa, Artificial Sequence
  Cyclic GFR-binding peptide
SPISVLYKDSSNNVILKYHY

SEQ ID NO: 38748 - protein, 31 aa, Artificial Sequence
  Cyclic GFR-binding peptide
  MOD_RES (4)..(5): Xaa is C or S
AAPXXVPQALSPISILYIVGRKPKVYKQYEM

SEQ ID NO: 38749 - protein, 23 aa, Artificial Sequence
  Cyclic GFR-binding peptide
LSPISILYKIGKTPKILKYHYMI

SEQ ID NO: 38750 - protein, 35 aa, Artificial Sequence
  Cyclic GFR-binding peptide
  MOD_RES (3)..(35): Xaa is C or S
PTXAPTKLEPISVLYLDDSSNVIKFKYENMVVRSX

SEQ ID NO: 38751 - protein, 28 aa, Artificial Sequence
  Cyclic GFR-binding peptide
PTKLEPISVLYLDDSSNVIKFKYENMVV

SEQ ID NO: 38752 - protein, 24 aa, Artificial Sequence
  Cyclic GFR-binding peptide
LSPISVLYKDDSSNVILKYHYNMV

SEQ ID NO: 38753 - protein, 25 aa, Artificial Sequence
  Cyclic GFR-binding peptide
TKLNAISILYFDKGVVTYLKKYRGM

SEQ ID NO: 38754 - protein, 36 aa, Artificial Sequence; identical to SEQ ID NO: 9915
  Cyclic GFR-binding peptide
  MOD_RES (5)..(6): Xaa is C or S

SEQ ID NO: 38755 - protein, 28 aa, Artificial Sequence
  Cyclic GFR-binding peptide
TELSPISMLYKDEYDKVVLKYHYEMVVE

SEQ ID NO: 38756 - protein, 34 aa, Artificial Sequence
  Cyclic GFR-binding peptide
  MOD_RES (1)..(33): Xaa is C or S
XVPTELEPISMLYLDENEKVVKFKYEDMVVEGXG

SEQ ID NO: 38757 - protein, 42 aa, Artificial Sequence
  Cyclic GFR-binding peptide
  MOD_RES (6)..(7)..(39)..(41): Xaa is C or S
YVPKPXXAPTKLSPISVLYIDDSSNVIYKQYENMVVRSXGXH

SEQ ID NO: 38758 - protein, 23 aa, Artificial Sequence
  Cyclic GFR-binding peptide
LEPISMLYLDEYDKVVKFKYEEM

SEQ ID NO: 38759 - protein, 33 aa, Artificial Sequence
  Cyclic GFR-binding peptide
  MOD_RES (2)..(3): Xaa is C or S
AXXAPTKLSPISVLYIDSSNNVIYKQYENMVVK

SEQ ID NO: 38760 - protein, 36 aa, Artificial Sequence; identical to SEQ ID NO: 9919
  Cyclic GFR-binding peptide
  MOD_RES (3)..(4)..(36): Xaa is C or S

SEQ ID NO: 38761 - protein, 23 aa, Artificial Sequence
  Cyclic GFR-binding peptide
KLEPISVLYLDDSSNVIKFKYEN

SEQ ID NO: 38762 - protein, 29 aa, Artificial Sequence
  Cyclic GFR-binding peptide
VPTELEPISMLYLDENEKVVKFKYEDMVV

SEQ ID NO: 38763 - protein, 28 aa, Artificial Sequence
  Cyclic GFR-binding peptide
  MOD_RES (28)..(28): Xaa is C or S
DLSPISILYKIGKTPKILKYHYMIVKSX

SEQ ID NO: 38764 - protein, 28 aa, Artificial Sequence
  Cyclic GFR-binding peptide
TQLSPISVLYKDDSSNVILKYHYNMVVR

SEQ ID NO: 38765 - protein, 37 aa, Artificial Sequence
  Cyclic GFR-binding peptide
  MOD_RES (2)..(3)..(36): Xaa is C or S
AXXVPTKLEPISVLYLDDMGVPTKFKYEEGMSVAEXG

SEQ ID NO: 38766 - protein, 28 aa, Artificial Sequence
  Cyclic GFR-binding peptide
APTKLNAISVLYFDSSNNVILKKYRNMV

SEQ ID NO: 38767 - protein, 35 aa, Artificial Sequence; identical to SEQ ID NO: 9924
  Cyclic GFR-binding peptide
  MOD_RES (5)..(5): Xaa is C or S

SEQ ID NO: 38768 - protein, 35 aa, Artificial Sequence
  Cyclic GFR-binding peptide
  MOD_RES (4)..(5): Xaa is C or S
PKAXXVPTELSPISMLYIDEYDKVVYKQYEEMVVE

SEQ ID NO: 38769 - protein, 22 aa, Artificial Sequence
  Cyclic GFR-binding peptide
SPISVLYIDDMGVPTYKQYEEG

SEQ ID NO: 38770 - protein, 35 aa, Artificial Sequence
  Cyclic GFR-binding peptide
  MOD_RES (3)..(4): Xaa is C or S
KAXXVPTKLNAISILYFDKGVVTYLKKYRGMAVSE

SEQ ID NO: 38771 - protein, 28 aa, Artificial Sequence
  Cyclic GFR-binding peptide
  MOD_RES (2)..(3): Xaa is C or S
AXXVPTELSPISMLYKDENEKVVLKYHY

SEQ ID NO: 38772 - protein, 28 aa, Artificial Sequence
  Cyclic GFR-binding peptide
TKLNAISVLYFDSSNNVILKKYRNMVVK

SEQ ID NO: 38773 - protein, 25 aa, Artificial Sequence
  Cyclic GFR-binding peptide
QDLNAISILYFVGRTPKVLKKYRMV

SEQ ID NO: 38774 - protein, 36 aa, Artificial Sequence; identical to SEQ ID NO: 9931
  Cyclic GFR-binding peptide
  MOD_RES (2)..(3)..(35): Xaa is C or S

SEQ ID NO: 38775 - protein, 28 aa, Artificial Sequence
  Cyclic GFR-binding peptide
  MOD_RES (2)..(3): Xaa is C or S
AXXVPTELEPISMLYLDENEKVVKFKYE

SEQ ID NO: 38776 - protein, 31 aa, Artificial Sequence; identical to SEQ ID NO: 9933
  Cyclic GFR-binding peptide
  MOD_RES (29)..(31): Xaa is C or S

SEQ ID NO: 38777 - protein, 34 aa, Artificial Sequence
  Cyclic GFR-binding peptide
  MOD_RES (32)..(34): Xaa is C or S
PTKLSPISVLYIDDMGVPTYKQYEEGMSVAEXGX

SEQ ID NO: 38778 - protein, 27 aa, Artificial Sequence
  Cyclic GFR-binding peptide
PTKLSPISILYKDKGVVTYLKYHYGMA

SEQ ID NO: 38779 - protein, 35 aa, Artificial Sequence
  Cyclic GFR-binding peptide
  MOD_RES (32)..(34): Xaa is C or S
APTKLSPISVLYIDSSNNVIYKQYENMVVKAXGXH

SEQ ID NO: 38780 - protein, 29 aa, Artificial Sequence
  Cyclic GFR-binding peptide
  MOD_RES (28)..(28): Xaa is C or S
DLSPISILYKVGRTPKVLKYHYMVVKSXK

SEQ ID NO: 38781 - protein, 38 aa, Artificial Sequence
  Cyclic GFR-binding peptide
  MOD_RES (4)..(5)..(38): Xaa is C or S
GKAXXVPTKLEPISVLYLDDMGVPTKFKYEEGMSVAEX

SEQ ID NO: 38782 - protein, 26 aa, Artificial Sequence
  Cyclic GFR-binding peptide
LEPISVLYLDSSNNVIKFKYENMVVK

SEQ ID NO: 38783 - protein, 29 aa, Artificial Sequence
  Cyclic GFR-binding peptide
  MOD_RES (1)..(2): Xaa is C or S
XXVPTKLNAISILYFDKGVVTYLKKYRGM

SEQ ID NO: 38784 - protein, 29 aa, Artificial Sequence
  Cyclic GFR-binding peptide
  MOD_RES (2)..(3): Xaa is C or S
SXXVPARLSPISILYKDAANNVVLKYHYD

SEQ ID NO: 38785 - protein, 24 aa, Artificial Sequence
  Cyclic GFR-binding peptide
LSPISVLYIDSSNNVIYKQYENMV

SEQ ID NO: 38786 - protein, 38 aa, Artificial Sequence; identical to SEQ ID NO: 9936
  Cyclic GFR-binding peptide
  MOD_RES (6)..(7): Xaa is C or S

SEQ ID NO: 38787 - protein, 37 aa, Artificial Sequence; identical to SEQ ID NO: 9939
  Cyclic GFR-binding peptide
  MOD_RES (6)..(7): Xaa is C or S

SEQ ID NO: 38788 - protein, 34 aa, Artificial Sequence
  Cyclic GFR-binding peptide
  MOD_RES (1)..(2)..(34): Xaa is C or S
XXVPTKLNAISILYFDKGVVTYLKKYRGMAVSEX

SEQ ID NO: 38789 - protein, 33 aa, Artificial Sequence
  Cyclic GFR-binding peptide
  MOD_RES (1)..(2): Xaa is C or S
XXVPTKLSPISILYIDKGVVTYYKQYEGMAVSE

SEQ ID NO: 38790 - protein, 35 aa, Artificial Sequence
  Cyclic GFR-binding peptide
  MOD_RES (2)..(3)..(34): Xaa is C or S
PXXVSQDLEPISILYLIGKTPKIKFKYEMIVKSXK

SEQ ID NO: 38791 - protein, 35 aa, Artificial Sequence; identical to SEQ ID NO: 9941
  Cyclic GFR-binding peptide
  MOD_RES (1)..(33)..(35): Xaa is C or S

SEQ ID NO: 38792 - protein, 24 aa, Artificial Sequence
  Cyclic GFR-binding peptide
QALNAISILYFVGRKPKVLKKYRM

SEQ ID NO: 38793 - protein, 32 aa, Artificial Sequence
  Cyclic GFR-binding peptide
  MOD_RES (6)..(7): Xaa is C or S
ASASPXXVSQDLSPISILYIIGKTPKIYKQYE

SEQ ID NO: 38794 - protein, 20 aa, Artificial Sequence
  Cyclic GFR-binding peptide
SPISILYIVGRKPKVYKQYE

SEQ ID NO: 38795 - protein, 20 aa, Artificial Sequence
  Cyclic GFR-binding peptide
SPISMLYKDEYDKVVLKYHY

SEQ ID NO: 38796 - protein, 33 aa, Artificial Sequence
  Cyclic GFR-binding peptide
  MOD_RES (30)..(32): Xaa is C or S
SQDLSPISILYIIGKTPKIYKQYEMIVKSXKXS

SEQ ID NO: 38797 - protein, 23 aa, Artificial Sequence
  Cyclic GFR-binding peptide
SPISVLYKDSSNNVILKYHYNMV

SEQ ID NO: 38798 - protein, 26 aa, Artificial Sequence
  Cyclic GFR-binding peptide
PTELEPISMLYLDEYDKVVKFKYEEM

SEQ ID NO: 38799 - protein, 26 aa, Artificial Sequence
  Cyclic GFR-binding peptide
  MOD_RES (1)..(1): Xaa is C or S
XVPTKLNAISVLYFDDMGVPTLKKYR

SEQ ID NO: 38800 - protein, 38 aa, Artificial Sequence
  Cyclic GFR-binding peptide
  MOD_RES (5)..(6)..(38): Xaa is C or S
ASKAXXVPTKLSPISILYIDKGVVTYYKQYEGMAVSEX

SEQ ID NO: 38801 - protein, 30 aa, Artificial Sequence
  Cyclic GFR-binding peptide
  MOD_RES (28)..(30): Xaa is C or S
LSPISILYIDKGVVTYYKQYEGMAVSEXGX

SEQ ID NO: 38802 - protein, 36 aa, Artificial Sequence; identical to SEQ ID NO: 9955
  Cyclic GFR-binding peptide
  MOD_RES (4)..(5)..(36): Xaa is C or S

SEQ ID NO: 38803 - protein, 29 aa, Artificial Sequence
  Cyclic GFR-binding peptide
  MOD_RES (1)..(1): Xaa is C or S
XAPTKLEPISVLYLDSSNNVIKFKYENMV

SEQ ID NO: 38804 - protein, 23 aa, Artificial Sequence
  Cyclic GFR-binding peptide
ALNAISILYFVGRKPKVLKKYRM

SEQ ID NO: 38805 - protein, 25 aa, Artificial Sequence
  Cyclic GFR-binding peptide
RLSPISILYKDAANNVVLKYHYDMV

SEQ ID NO: 38806 - protein, 30 aa, Artificial Sequence; identical to SEQ ID NO: 9960
  Cyclic GFR-binding peptide
  MOD_RES (4)..(5): Xaa is C or S

SEQ ID NO: 38807 - protein, 38 aa, Artificial Sequence
  Cyclic GFR-binding peptide
  MOD_RES (5)..(6)..(37): Xaa is C or S
SAAPXXVPQALSPISILYIVGRKPKVYKQYEMIVRSXK

SEQ ID NO: 38808 - protein, 37 aa, Artificial Sequence; identical to SEQ ID NO: 9965
  Cyclic GFR-binding peptide
  MOD_RES (1)..(2)..(34)..(36): Xaa is C or S

SEQ ID NO: 38809 - protein, 25 aa, Artificial Sequence
  Cyclic GFR-binding peptide
TKLSPISILYIDKGVVTYYKQYEGM

SEQ ID NO: 38810 - protein, 31 aa, Artificial Sequence
  Cyclic GFR-binding peptide
  MOD_RES (1)..(1): Xaa is C or S
XVPTELEPISMLYLDEYDKVVKFKYEEMVVE

SEQ ID NO: 38811 - protein, 33 aa, Artificial Sequence; identical to SEQ ID NO: 9966
  Cyclic GFR-binding peptide
  MOD_RES (4)..(5): Xaa is C or S

SEQ ID NO: 38812 - protein, 34 aa, Artificial Sequence
  Cyclic GFR-binding peptide
  MOD_RES (4)..(5): Xaa is C or S
PKAXXVPTELEPISMLYLDENEKVVKFKYEDMVV

SEQ ID NO: 38813 - protein, 26 aa, Artificial Sequence
  Cyclic GFR-binding peptide
TKLNAISVLYFDDMGVPTLKKYREGM

SEQ ID NO: 38814 - protein, 33 aa, Artificial Sequence; identical to SEQ ID NO: 9968
  Cyclic GFR-binding peptide
  MOD_RES (3)..(4): Xaa is C or S

SEQ ID NO: 38815 - protein, 25 aa, Artificial Sequence
  Cyclic GFR-binding peptide
LEPISILYLDAANNVVKFKYEDMVV

SEQ ID NO: 38816 - protein, 30 aa, Artificial Sequence; identical to SEQ ID NO: 9970
  Cyclic GFR-binding peptide

SEQ ID NO: 38817 - protein, 33 aa, Artificial Sequence
  Cyclic GFR-binding peptide
  MOD_RES (2)..(3): Xaa is C or S
PXXAPTKLEPISVLYLDDSSNVIKFKYENMVVR

SEQ ID NO: 38818 - protein, 30 aa, Artificial Sequence
  Cyclic GFR-binding peptide
  MOD_RES (27)..(29): Xaa is C or S
SPISVLYIDDSSNVIYKQYENMVVRAXGXH

SEQ ID NO: 38819 - protein, 39 aa, Artificial Sequence
  Cyclic GFR-binding peptide
  MOD_RES (4)..(5)..(37)..(39): Xaa is C or S
PKAXXVPTELEPISMLYLDENEKVVKFKYEDMVVEGXGX

SEQ ID NO: 38820 - protein, 26 aa, Artificial Sequence
  Cyclic GFR-binding peptide
TKLSPISVLYIDDSSNVIYKQYENMV

SEQ ID NO: 38821 - protein, 28 aa, Artificial Sequence
  Cyclic GFR-binding peptide
  MOD_RES (28)..(28): Xaa is C or S
LSPISILYKDAANNVVLKYHYDMVVEAX

SEQ ID NO: 38822 - protein, 29 aa, Artificial Sequence
  Cyclic GFR-binding peptide
  MOD_RES (1)..(1): Xaa is C or S
XAPTQLSPISVLYIDDSSNVIYKQYENMV

SEQ ID NO: 38823 - protein, 28 aa, Artificial Sequence
  Cyclic GFR-binding peptide
APTQLSPISVLYIDDSSNVIYKQYENMV

SEQ ID NO: 38824 - protein, 35 aa, Artificial Sequence
  Cyclic GFR-binding peptide
  MOD_RES (1)..(2)..(35): Xaa is C or S
XXVPTKLSPISVLYIDDMGVPTYKQYEEGMSVAEX

SEQ ID NO: 38825 - protein, 36 aa, Artificial Sequence
  Cyclic GFR-binding peptide
  MOD_RES (2)..(3)..(35): Xaa is C or S
SXXVPARLNAISILYFDAANNVVLKKYRDMVVEAXG

SEQ ID NO: 38826 - protein, 34 aa, Artificial Sequence
  Cyclic GFR-binding peptide
  MOD_RES (3)..(4): Xaa is C or S
KPXXAPTQLEPISVLYLDDSSNVIKFKYENMVVR

SEQ ID NO: 38827 - protein, 34 aa, Artificial Sequence; identical to SEQ ID NO: 9975
  Cyclic GFR-binding peptide
  MOD_RES (1)..(33): Xaa is C or S

SEQ ID NO: 38828 - protein, 35 aa, Artificial Sequence; identical to SEQ ID NO: 9977
  Cyclic GFR-binding peptide
  MOD_RES (33)..(35): Xaa is C or S

SEQ ID NO: 38829 - protein, 32 aa, Artificial Sequence
  Cyclic GFR-binding peptide
  MOD_RES (30)..(32): Xaa is C or S
PQDLEPISILYLVGRTPKVKFKYEMVVKSXKX

SEQ ID NO: 38830 - protein, 26 aa, Artificial Sequence
  Cyclic GFR-binding peptide
PTKLSPISILYKDKGVVTYLKYHYGM

SEQ ID NO: 38831 - protein, 31 aa, Artificial Sequence
  Cyclic GFR-binding peptide
  MOD_RES (1)..(1): Xaa is C or S
XAPTKLEPISVLYLDDSSNVIKFKYENMVVR

SEQ ID NO: 38832 - protein, 30 aa, Artificial Sequence; identical to SEQ ID NO: 9980
  Cyclic GFR-binding peptide
  MOD_RES (1)..(2): Xaa is C or S

SEQ ID NO: 38833 - protein, 24 aa, Artificial Sequence
  Cyclic GFR-binding peptide
LNAISILYFDKGVVTYLKKYRGMA

SEQ ID NO: 38834 - protein, 32 aa, Artificial Sequence; identical to SEQ ID NO: 9982
  Cyclic GFR-binding peptide
  MOD_RES (1)..(2): Xaa is C or S

SEQ ID NO: 38835 - protein, 28 aa, Artificial Sequence
  Cyclic GFR-binding peptide
KLEPISVLYLDSSNNVIKFKYENMVVKA

SEQ ID NO: 38836 - protein, 25 aa, Artificial Sequence
  Cyclic GFR-binding peptide
ALEPISILYLVGRKPKVKFKYEMIV

SEQ ID NO: 38837 - protein, 26 aa, Artificial Sequence
  Cyclic GFR-binding peptide
DLEPISILYLVGRTPKVKFKYEMVVK

SEQ ID NO: 38838 - protein, 28 aa, Artificial Sequence
  Cyclic GFR-binding peptide
VSQDLSPISILYIIGKTPKIYKQYEMIV

SEQ ID NO: 38839 - protein, 30 aa, Artificial Sequence
  Cyclic GFR-binding peptide
  MOD_RES (3)..(4): Xaa is C or S
KAXXVPTKLNAISILYFDKGVVTYLKKYRG

SEQ ID NO: 38840 - protein, 26 aa, Artificial Sequence
  Cyclic GFR-binding peptide
SPISVLYKDDSSNVILKYHYNMVVRS

SEQ ID NO: 38841 - protein, 33 aa, Artificial Sequence; identical to SEQ ID NO: 9987
  Cyclic GFR-binding peptide
  MOD_RES (31)..(33): Xaa is C or S

SEQ ID NO: 38842 - protein, 30 aa, Artificial Sequence
  Cyclic GFR-binding peptide
  MOD_RES (4)..(5): Xaa is C or S
SKAXXVPTKLSPISILYIDKGVVTYYKQYE

SEQ ID NO: 38843 - protein, 41 aa, Artificial Sequence; identical to SEQ ID NO: 9989
  Cyclic GFR-binding peptide
  MOD_RES (5)..(6)..(38)..(40): Xaa is C or S

SEQ ID NO: 38844 - protein, 31 aa, Artificial Sequence; identical to SEQ ID NO: 9990
  Cyclic GFR-binding peptide
  MOD_RES (1)..(2): Xaa is C or S

SEQ ID NO: 38845 - protein, 34 aa, Artificial Sequence
  Cyclic GFR-binding peptide
  MOD_RES (3)..(4): Xaa is C or S
SPXXVSQDLSPISILYIIGKTPKIYKQYEMIVKS

SEQ ID NO: 38846 - protein, 26 aa, Artificial Sequence
  Cyclic GFR-binding peptide
LSPISILYKVGRTPKVLKYHYMVVKS

SEQ ID NO: 38847 - protein, 26 aa, Artificial Sequence
  Cyclic GFR-binding peptide
SPISVLYKDDSSNVILKYHYNMVVRA

SEQ ID NO: 38848 - protein, 32 aa, Artificial Sequence
  Cyclic GFR-binding peptide
  MOD_RES (3)..(4): Xaa is C or S
KAXXVPTELEPISMLYLDENEKVVKFKYEDMV

SEQ ID NO: 38849 - protein, 23 aa, Artificial Sequence
  Cyclic GFR-binding peptide
DLSPISILYIIGKTPKIYKQYEM

SEQ ID NO: 38850 - protein, 39 aa, Artificial Sequence
  Cyclic GFR-binding peptide
  MOD_RES (3)..(4)..(36)..(38): Xaa is C or S
ASXXVPARLNAISILYFDAANNVVLKKYRDMVVEAXGXR

SEQ ID NO: 38851 - protein, 31 aa, Artificial Sequence; identical to SEQ ID NO: 9995
  Cyclic GFR-binding peptide
  MOD_RES (5)..(6): Xaa is C or S

SEQ ID NO: 38852 - protein, 28 aa, Artificial Sequence
  Cyclic GFR-binding peptide
  MOD_RES (2)..(3): Xaa is C or S
PXXVSQDLSPISILYKIGKTPKILKYHY

SEQ ID NO: 38853 - protein, 30 aa, Artificial Sequence
  Cyclic GFR-binding peptide
  MOD_RES (4)..(5): Xaa is C or S
PASXXVPARLSPISILYKDAANNVVLKYHY

SEQ ID NO: 38854 - protein, 29 aa, Artificial Sequence
  Cyclic GFR-binding peptide
  MOD_RES (1)..(2): Xaa is C or S
XXAPTKLEPISVLYLDDSSNVIKFKYENM

SEQ ID NO: 38855 - protein, 39 aa, Artificial Sequence
  Cyclic GFR-binding peptide
  MOD_RES (6)..(7)..(39): Xaa is C or S
TVPKPXXAPTQLSPISVLYIDDSSNVIYKQYENMVVRAX

SEQ ID NO: 38856 - protein, 30 aa, Artificial Sequence; identical to SEQ ID NO: 10001
  Cyclic GFR-binding peptide
  MOD_RES (4)..(5): Xaa is C or S

SEQ ID NO: 38857 - protein, 22 aa, Artificial Sequence
  Cyclic GFR-binding peptide
RLEPISILYLDAANNVVKFKYE

SEQ ID NO: 38858 - protein, 25 aa, Artificial Sequence
  Cyclic GFR-binding peptide
VPTKLEPISVLYLDDMGVPTKFKYE

SEQ ID NO: 38859 - protein, 30 aa, Artificial Sequence; identical to SEQ ID NO: 10003
  Cyclic GFR-binding peptide
  MOD_RES (1)..(1): Xaa is C or S

SEQ ID NO: 38860 - protein, 26 aa, Artificial Sequence
  Cyclic GFR-binding peptide
ELEPISMLYLDENEKVVKFKYEDMVV

SEQ ID NO: 38861 - protein, 28 aa, Artificial Sequence
  Cyclic GFR-binding peptide
  MOD_RES (1)..(1): Xaa is C or S
XVSQDLSPISILYIIGKTPKIYKQYEMI

SEQ ID NO: 38862 - protein, 37 aa, Artificial Sequence
  Cyclic GFR-binding peptide
  MOD_RES (6)..(7): Xaa is C or S
KIPKAXXVPTELEPISMLYLDENEKVVKFKYEDMVVE

SEQ ID NO: 38863 - protein, 26 aa, Artificial Sequence
  Cyclic GFR-binding peptide
  MOD_RES (26)..(26): Xaa is C or S
EPISILYLIGKTPKIKFKYEMIVKSX

SEQ ID NO: 38864 - protein, 27 aa, Artificial Sequence
  Cyclic GFR-binding peptide
  MOD_RES (1)..(2): Xaa is C or S
XXVPTELSPISMLYKDENEKVVLKYHY

SEQ ID NO: 38865 - protein, 36 aa, Artificial Sequence
  Cyclic GFR-binding peptide
  MOD_RES (3)..(4)..(36): Xaa is C or S
KPXXAPTKLSPISVLYIDDSSNVIYKQYENMVVRSX

SEQ ID NO: 38866 - protein, 38 aa, Artificial Sequence; identical to SEQ ID NO: 10009
  Cyclic GFR-binding peptide
  MOD_RES (4)..(5)..(37): Xaa is C or S

SEQ ID NO: 38867 - protein, 32 aa, Artificial Sequence; identical to SEQ ID NO: 10010
  Cyclic GFR-binding peptide
  MOD_RES (32)..(32): Xaa is C or S

SEQ ID NO: 38868 - protein, 22 aa, Artificial Sequence
  Cyclic GFR-binding peptide
SPISILYIVGRKPKVYKQYEMI

SEQ ID NO: 38869 - protein, 39 aa, Artificial Sequence
  Cyclic GFR-binding peptide
  MOD_RES (6)..(7)..(39): Xaa is C or S
KASKAXXVPTKLSPISILYKDKGVVTYLKYHYGMAVSEX

SEQ ID NO: 38870 - protein, 24 aa, Artificial Sequence
  Cyclic GFR-binding peptide
DLNAISILYFIGKTPKILKKYRMI

SEQ ID NO: 38871 - protein, 30 aa, Artificial Sequence
  Cyclic GFR-binding peptide
  MOD_RES (4)..(5): Xaa is C or S
PKAXXAPTKLSPISVLYIDSSNNVIYKQYE

SEQ ID NO: 38872 - protein, 33 aa, Artificial Sequence
  Cyclic GFR-binding peptide
  MOD_RES (3)..(4): Xaa is C or S
KAXXVPTELSPISMLYIDEYDKVVYKQYEEMVV

SEQ ID NO: 38873 - protein, 27 aa, Artificial Sequence
  Cyclic GFR-binding peptide
TKLSPISVLYKDDSSNVILKYHYNMVV

SEQ ID NO: 38874 - protein, 34 aa, Artificial Sequence
  Cyclic GFR-binding peptide
  MOD_RES (6)..(7): Xaa is C or S
AAPASXXVPARLEPISILYLDAANNVVKFKYEDM

SEQ ID NO: 38875 - protein, 41 aa, Artificial Sequence
  Cyclic GFR-binding peptide
  MOD_RES (7)..(39)..(41): Xaa is C or S
HVTKPTXAPTKLSPISVLYIDDSSNVIYKQYENMVVRSXGX

SEQ ID NO: 38876 - protein, 31 aa, Artificial Sequence
  Cyclic GFR-binding peptide
  MOD_RES (1)..(2): Xaa is C or S
XXVPTELSPISMLYIDEYDKVVYKQYEEMVV

SEQ ID NO: 38877 - protein, 38 aa, Artificial Sequence
  Cyclic GFR-binding peptide
  MOD_RES (3)..(4)..(36)..(38): Xaa is C or S
KAXXVPTELEPISMLYLDEYDKVVKFKYEEMVVEGXGX

SEQ ID NO: 38878 - protein, 32 aa, Artificial Sequence; identical to SEQ ID NO: 10016
  Cyclic GFR-binding peptide
  MOD_RES (1)..(32): Xaa is C or S

SEQ ID NO: 38879 - protein, 29 aa, Artificial Sequence
  Cyclic GFR-binding peptide
  MOD_RES (1)..(1): Xaa is C or S
XAPTKLNAISVLYFDSSNNVILKKYRNMV

SEQ ID NO: 38880 - protein, 29 aa, Artificial Sequence
  Cyclic GFR-binding peptide
  MOD_RES (2)..(3): Xaa is C or S
PXXVPQDLNAISILYFVGRTPKVLKKYRM

SEQ ID NO: 38881 - protein, 34 aa, Artificial Sequence; identical to SEQ ID NO: 10019
  Cyclic GFR-binding peptide
  MOD_RES (6)..(7): Xaa is C or S

SEQ ID NO: 38882 - protein, 31 aa, Artificial Sequence
  Cyclic GFR-binding peptide
  MOD_RES (3)..(4): Xaa is C or S
APXXVPQALSPISILYIVGRKPKVYKQYEMI

SEQ ID NO: 38883 - protein, 30 aa, Artificial Sequence; identical to SEQ ID NO: 10020
  Cyclic GFR-binding peptide
  MOD_RES (1)..(1): Xaa is C or S

SEQ ID NO: 38884 - protein, 34 aa, Artificial Sequence; identical to SEQ ID NO: 10022
  Cyclic GFR-binding peptide
  MOD_RES (6)..(7): Xaa is C or S

SEQ ID NO: 38885 - protein, 26 aa, Artificial Sequence
  Cyclic GFR-binding peptide
  MOD_RES (1)..(1): Xaa is C or S
XAPTKLSPISVLYIDSSNNVIYKQYE

SEQ ID NO: 38886 - protein, 39 aa, Artificial Sequence; identical to SEQ ID NO: 10023
  Cyclic GFR-binding peptide
  MOD_RES (6)..(7)..(39): Xaa is C or S

SEQ ID NO: 38887 - protein, 36 aa, Artificial Sequence; identical to SEQ ID NO: 10024
  Cyclic GFR-binding peptide
  MOD_RES (1)..(2)..(33)..(35): Xaa is C or S

SEQ ID NO: 38888 - protein, 36 aa, Artificial Sequence
  Cyclic GFR-binding peptide
  MOD_RES (1)..(33)..(35): Xaa is C or S
XAPTQLEPISVLYLDDSSNVIKFKYENMVVRAXGXH

SEQ ID NO: 38889 - protein, 21 aa, Artificial Sequence
  Cyclic GFR-binding peptide
NAISILYFIGKTPKILKKYRM

SEQ ID NO: 38890 - protein, 33 aa, Artificial Sequence; identical to SEQ ID NO: 10028
  Cyclic GFR-binding peptide
  MOD_RES (3)..(4): Xaa is C or S

SEQ ID NO: 38891 - protein, 22 aa, Artificial Sequence
  Cyclic GFR-binding peptide
ELEPISMLYLDEYDKVVKFKYE

SEQ ID NO: 38892 - protein, 30 aa, Artificial Sequence; identical to SEQ ID NO: 10029
  Cyclic GFR-binding peptide

SEQ ID NO: 38893 - protein, 21 aa, Artificial Sequence
  Cyclic GFR-binding peptide
SPISILYKDAANNVVLKYHYD

SEQ ID NO: 38894 - protein, 34 aa, Artificial Sequence
  Cyclic GFR-binding peptide
  MOD_RES (31)..(33): Xaa is C or S
VPQDLEPISILYLVGRTPKVKFKYEMVVKSXKXS

SEQ ID NO: 38895 - protein, 36 aa, Artificial Sequence; identical to SEQ ID NO: 10034
  Cyclic GFR-binding peptide
  MOD_RES (2)..(3)..(35): Xaa is C or S

SEQ ID NO: 38896 - protein, 38 aa, Artificial Sequence
  Cyclic GFR-binding peptide
  MOD_RES (3)..(4)..(35)..(37): Xaa is C or S
SPXXVPQDLSPISILYIVGRTPKVYKQYEMVVKSXKXS

SEQ ID NO: 38897 - protein, 26 aa, Artificial Sequence
  Cyclic GFR-binding peptide
ELSPISMLYIDEYDKVVYKQYEEMVV

SEQ ID NO: 38898 - protein, 35 aa, Artificial Sequence; identical to SEQ ID NO: 10038
  Cyclic GFR-binding peptide
  MOD_RES (1)..(33)..(35): Xaa is C or S

SEQ ID NO: 38899 - protein, 39 aa, Artificial Sequence
  Cyclic GFR-binding peptide
  MOD_RES (6)..(7)..(39): Xaa is C or S
AAPASXXVPARLSPISILYKDAANNVVLKYHYDMVVEAX

SEQ ID NO: 38900 - protein, 35 aa, Artificial Sequence; identical to SEQ ID NO: 10040
  Cyclic GFR-binding peptide
  MOD_RES (32)..(34): Xaa is C or S

SEQ ID NO: 38901 - protein, 36 aa, Artificial Sequence
  Cyclic GFR-binding peptide
  MOD_RES (1)..(2)..(34)..(36): Xaa is C or S
XXVPTKLNAISILYFDKGVVTYLKKYRGMAVSEXGX

SEQ ID NO: 38902 - protein, 27 aa, Artificial Sequence
  Cyclic GFR-binding peptide
  MOD_RES (27)..(27): Xaa is C or S
LNAISILYFVGRKPKVLKKYRMIVRSX

SEQ ID NO: 38903 - protein, 24 aa, Artificial Sequence
  Cyclic GFR-binding peptide
LSPISILYKVGRKPKVLKYHYMIV

SEQ ID NO: 38904 - protein, 27 aa, Artificial Sequence
  Cyclic GFR-binding peptide
QDLEPISILYLVGRTPKVKFKYEMVVK

SEQ ID NO: 38905 - protein, 41 aa, Artificial Sequence; identical to SEQ ID NO: 10043
  Cyclic GFR-binding peptide
  MOD_RES (6)..(38)..(40): Xaa is C or S

SEQ ID NO: 38906 - protein, 39 aa, Artificial Sequence
  Cyclic GFR-binding peptide
  MOD_RES (5)..(6)..(38): Xaa is C or S
VPKAXXAPTKLEPISVLYLDSSNNVIKFKYENMVVKAXG

SEQ ID NO: 38907 - protein, 22 aa, Artificial Sequence
  Cyclic GFR-binding peptide
NAISVLYFDDMGVPTLKKYREG

SEQ ID NO: 38908 - protein, 30 aa, Artificial Sequence; identical to SEQ ID NO: 10046
  Cyclic GFR-binding peptide
  MOD_RES (3)..(3): Xaa is C or S

SEQ ID NO: 38909 - protein, 34 aa, Artificial Sequence; identical to SEQ ID NO: 10048
  Cyclic GFR-binding peptide
  MOD_RES (2)..(3): Xaa is C or S

SEQ ID NO: 38910 - protein, 37 aa, Artificial Sequence
  Cyclic GFR-binding peptide
  MOD_RES (3)..(4)..(36): Xaa is C or S
KPXXAPTKLEPISVLYLDDSSNVIKFKYENMVVRSXG

SEQ ID NO: 38911 - protein, 26 aa, Artificial Sequence
  Cyclic GFR-binding peptide
QALSPISILYKVGRKPKVLKYHYMIV

SEQ ID NO: 38912 - protein, 30 aa, Artificial Sequence; identical to SEQ ID NO: 10052
  Cyclic GFR-binding peptide
  MOD_RES (29)..(29): Xaa is C or S

SEQ ID NO: 38913 - protein, 42 aa, Artificial Sequence
  Cyclic GFR-binding peptide
  MOD_RES (6)..(7)..(39)..(41): Xaa is C or S
YVPKPXXAPTKLEPISVLYLDDSSNVIKFKYENMVVRSXGXH

SEQ ID NO: 38914 - protein, 31 aa, Artificial Sequence; identical to SEQ ID NO: 10056
  Cyclic GFR-binding peptide
  MOD_RES (3)..(4): Xaa is C or S

SEQ ID NO: 38915 - protein, 32 aa, Artificial Sequence; identical to SEQ ID NO: 10057
  Cyclic GFR-binding peptide
  MOD_RES (1)..(2): Xaa is C or S

SEQ ID NO: 38916 - protein, 33 aa, Artificial Sequence
  Cyclic GFR-binding peptide
  MOD_RES (31)..(33): Xaa is C or S
PARLEPISILYLDAANNVVKFKYEDMVVEAXGX

SEQ ID NO: 38917 - protein, 32 aa, Artificial Sequence; identical to SEQ ID NO: 10058
  Cyclic GFR-binding peptide
  MOD_RES (30)..(32): Xaa is C or S

SEQ ID NO: 38918 - protein, 28 aa, Artificial Sequence
  Cyclic GFR-binding peptide
  MOD_RES (1)..(1): Xaa is C or S
XVPQDLSPISILYIVGRTPKVYKQYEMV

SEQ ID NO: 38919 - protein, 32 aa, Artificial Sequence
  Cyclic GFR-binding peptide
  MOD_RES (2)..(3): Xaa is C or S
AXXVPTELEPISMLYLDENEKVVKFKYEDMVV

SEQ ID NO: 38920 - protein, 23 aa, Artificial Sequence
  Cyclic GFR-binding peptide
KLSPISILYIDKGVVTYYKQYEG

SEQ ID NO: 38921 - protein, 23 aa, Artificial Sequence
  Cyclic GFR-binding peptide
TKLSPISVLYIDDSSNVIYKQYE

SEQ ID NO: 38922 - protein, 35 aa, Artificial Sequence; identical to SEQ ID NO: 10060
  Cyclic GFR-binding peptide
  MOD_RES (1)..(2)..(34): Xaa is C or S

SEQ ID NO: 38923 - protein, 29 aa, Artificial Sequence
  Cyclic GFR-binding peptide
  MOD_RES (29)..(29): Xaa is C or S
RLSPISILYKDAANNVVLKYHYDMVVEAX

SEQ ID NO: 38924 - protein, 32 aa, Artificial Sequence
  Cyclic GFR-binding peptide
  MOD_RES (30)..(32): Xaa is C or S
TQLEPISVLYLDDSSNVIKFKYENMVVRAXGX

SEQ ID NO: 38925 - protein, 24 aa, Artificial Sequence
  Cyclic GFR-binding peptide
ARLNAISILYFDAANNVVLKKYRD

SEQ ID NO: 38926 - protein, 29 aa, Artificial Sequence
  Cyclic GFR-binding peptide
  MOD_RES (1)..(1): Xaa is C or S
XVPTKLNAISILYFDKGVVTYLKKYRGMA

SEQ ID NO: 38927 - protein, 34 aa, Artificial Sequence; identical to SEQ ID NO: 10063
  Cyclic GFR-binding peptide
  MOD_RES (6)..(7): Xaa is C or S

SEQ ID NO: 38928 - protein, 34 aa, Artificial Sequence; identical to SEQ ID NO: 10064
  Cyclic GFR-binding peptide
  MOD_RES (1)..(32)..(34): Xaa is C or S

SEQ ID NO: 38929 - protein, 32 aa, Artificial Sequence; identical to SEQ ID NO: 10066
  Cyclic GFR-binding peptide
  MOD_RES (3)..(4): Xaa is C or S

SEQ ID NO: 38930 - protein, 35 aa, Artificial Sequence
  Cyclic GFR-binding peptide
  MOD_RES (4)..(5): Xaa is C or S
SKAXXVPTKLSPISILYIDKGVVTYYKQYEGMAVS

SEQ ID NO: 38931 - protein, 33 aa, Artificial Sequence
  Cyclic GFR-binding peptide
  MOD_RES (31)..(33): Xaa is C or S
PTQLEPISVLYLDDSSNVIKFKYENMVVRAXGX

SEQ ID NO: 38932 - protein, 22 aa, Artificial Sequence
  Cyclic GFR-binding peptide
NAISMLYFDEYDKVVLKKYREM

SEQ ID NO: 38933 - protein, 33 aa, Artificial Sequence; identical to SEQ ID NO: 10071
  Cyclic GFR-binding peptide
  MOD_RES (3)..(4): Xaa is C or S

SEQ ID NO: 38934 - protein, 38 aa, Artificial Sequence
  Cyclic GFR-binding peptide
  MOD_RES (6)..(7): Xaa is C or S
AAPASXXVPARLEPISILYLDAANNVVKFKYEDMVVEA

SEQ ID NO: 38935 - protein, 31 aa, Artificial Sequence; identical to SEQ ID NO: 10073
  Cyclic GFR-binding peptide
  MOD_RES (31)..(31): Xaa is C or S

SEQ ID NO: 38936 - protein, 23 aa, Artificial Sequence
  Cyclic GFR-binding peptide
ARLEPISILYLDAANNVVKFKYE

SEQ ID NO: 38937 - protein, 30 aa, Artificial Sequence
  Cyclic GFR-binding peptide
  MOD_RES (27)..(29): Xaa is C or S
EPISVLYLDDSSNVIKFKYENMVVRAXGXH

SEQ ID NO: 38938 - protein, 29 aa, Artificial Sequence
  Cyclic GFR-binding peptide
  MOD_RES (27)..(29): Xaa is C or S
SPISMLYKDEYDKVVLKYHYEMVVEGXGX

SEQ ID NO: 38939 - protein, 38 aa, Artificial Sequence; identical to SEQ ID NO: 10077
  Cyclic GFR-binding peptide
  MOD_RES (6)..(7)..(38): Xaa is C or S

SEQ ID NO: 38940 - protein, 32 aa, Artificial Sequence; identical to SEQ ID NO: 10078
  Cyclic GFR-binding peptide
  MOD_RES (5)..(6): Xaa is C or S

SEQ ID NO: 38941 - protein, 36 aa, Artificial Sequence; identical to SEQ ID NO: 10081
  Cyclic GFR-binding peptide
  MOD_RES (3)..(4)..(35): Xaa is C or S

SEQ ID NO: 38942 - protein, 37 aa, Artificial Sequence; identical to SEQ ID NO: 10082
  Cyclic GFR-binding peptide
  MOD_RES (5)..(6)..(37): Xaa is C or S

SEQ ID NO: 38943 - protein, 25 aa, Artificial Sequence
  Cyclic GFR-binding peptide
ELNAISMLYFDEYDKVVLKKYREMV

SEQ ID NO: 38944 - protein, 31 aa, Artificial Sequence; identical to SEQ ID NO: 10085
  Cyclic GFR-binding peptide
  MOD_RES (28)..(30): Xaa is C or S

SEQ ID NO: 38945 - protein, 25 aa, Artificial Sequence
  Cyclic GFR-binding peptide
QLSPISVLYKDDSSNVILKYHYNMV

SEQ ID NO: 38946 - protein, 36 aa, Artificial Sequence
  Cyclic GFR-binding peptide
  MOD_RES (2)..(3)..(34)..(36): Xaa is C or S
PXXVPQALSPISILYIVGRKPKVYKQYEMIVRSXKX

SEQ ID NO: 38947 - protein, 26 aa, Artificial Sequence
  Cyclic GFR-binding peptide
QLSPISVLYKDDSSNVILKYHYNMVV

SEQ ID NO: 38948 - protein, 35 aa, Artificial Sequence; identical to SEQ ID NO: 10093
  Cyclic GFR-binding peptide
  MOD_RES (3)..(4)..(35): Xaa is C or S

SEQ ID NO: 38949 - protein, 40 aa, Artificial Sequence
  Cyclic GFR-binding peptide
  MOD_RES (4)..(5)..(37)..(39): Xaa is C or S
PKPXXAPTKLEPISVLYLDDSSNVIKFKYENMVVRSXGXH

SEQ ID NO: 38950 - protein, 36 aa, Artificial Sequence; identical to SEQ ID NO: 10095
  Cyclic GFR-binding peptide
  MOD_RES (4)..(5): Xaa is C or S

SEQ ID NO: 38951 - protein, 34 aa, Artificial Sequence
  Cyclic GFR-binding peptide
  MOD_RES (4)..(5): Xaa is C or S
ASPXXVPQDLSPISILYIVGRTPKVYKQYEMVVK

SEQ ID NO: 38952 - protein, 21 aa, Artificial Sequence
  Cyclic GFR-binding peptide
SPISMLYIDEYDKVVYKQYEE

SEQ ID NO: 38953 - protein, 34 aa, Artificial Sequence
  Cyclic GFR-binding peptide
  MOD_RES (1)..(33): Xaa is C or S
XVPTKLNAISILYFDKGVVTYLKKYRGMAVSEXG

SEQ ID NO: 38954 - protein, 33 aa, Artificial Sequence
  Cyclic GFR-binding peptide
  MOD_RES (2)..(3): Xaa is C or S
SXXVPARLEPISILYLDAANNVVKFKYEDMVVE

SEQ ID NO: 38955 - protein, 26 aa, Artificial Sequence
  Cyclic GFR-binding peptide
VPTKLSPISILYIDKGVVTYYKQYEG

SEQ ID NO: 38956 - protein, 32 aa, Artificial Sequence
  Cyclic GFR-binding peptide
  MOD_RES (2)..(3): Xaa is C or S
SXXVPARLEPISILYLDAANNVVKFKYEDMVV

SEQ ID NO: 38957 - protein, 41 aa, Artificial Sequence; identical to SEQ ID NO: 10096
  Cyclic GFR-binding peptide
  MOD_RES (7)..(39)..(41): Xaa is C or S

SEQ ID NO: 38958 - protein, 38 aa, Artificial Sequence; identical to SEQ ID NO: 10097
  Cyclic GFR-binding peptide
  MOD_RES (5)..(6)..(38): Xaa is C or S

SEQ ID NO: 38959 - protein, 26 aa, Artificial Sequence
  Cyclic GFR-binding peptide
RLNAISILYFDAANNVVLKKYRDMVV

SEQ ID NO: 38960 - protein, 22 aa, Artificial Sequence
  Cyclic GFR-binding peptide
SPISILYKDAANNVVLKYHYDM

SEQ ID NO: 38961 - protein, 36 aa, Artificial Sequence; identical to SEQ ID NO: 10099
  Cyclic GFR-binding peptide
  MOD_RES (3)..(4): Xaa is C or S

SEQ ID NO: 38962 - protein, 27 aa, Artificial Sequence
  Cyclic GFR-binding peptide
ALSPISILYIVGRKPKVYKQYEMIVRS

SEQ ID NO: 38963 - protein, 34 aa, Artificial Sequence
  Cyclic GFR-binding peptide
  MOD_RES (4)..(5): Xaa is C or S
GKAXXVPTKLSPISVLYIDDMGVPTYKQYEEGMS

SEQ ID NO: 38964 - protein, 23 aa, Artificial Sequence
  Cyclic GFR-binding peptide
QDLEPISILYLVGRTPKVKFKYE

SEQ ID NO: 38965 - protein, 30 aa, Artificial Sequence
  Cyclic GFR-binding peptide
  MOD_RES (27)..(29): Xaa is C or S
SPISILYKDKGVVTYLKYHYGMAVSEXGXR

SEQ ID NO: 38966 - protein, 37 aa, Artificial Sequence
  Cyclic GFR-binding peptide
  MOD_RES (3)..(4)..(37): Xaa is C or S
KAXXVPTKLEPISVLYLDDMGVPTKFKYEEGMSVAEX

SEQ ID NO: 38967 - protein, 31 aa, Artificial Sequence; identical to SEQ ID NO: 10102
  Cyclic GFR-binding peptide
  MOD_RES (31)..(31): Xaa is C or S

SEQ ID NO: 38968 - protein, 31 aa, Artificial Sequence; identical to SEQ ID NO: 10104
  Cyclic GFR-binding peptide
  MOD_RES (31)..(31): Xaa is C or S

SEQ ID NO: 38969 - protein, 21 aa, Artificial Sequence
  Cyclic GFR-binding peptide
LSPISVLYKDDSSNVILKYHY

SEQ ID NO: 38970 - protein, 26 aa, Artificial Sequence
  Cyclic GFR-binding peptide
LSPISVLYKDDSSNVILKYHYNMVVR

SEQ ID NO: 38971 - protein, 26 aa, Artificial Sequence
  Cyclic GFR-binding peptide
  MOD_RES (1)..(1): Xaa is C or S
XVSQDLNAISILYFIGKTPKILKKYR

SEQ ID NO: 38972 - protein, 26 aa, Artificial Sequence
  Cyclic GFR-binding peptide
TKLEPISVLYLDSSNNVIKFKYENMV

SEQ ID NO: 38973 - protein, 32 aa, Artificial Sequence; identical to SEQ ID NO: 10110
  Cyclic GFR-binding peptide
  MOD_RES (4)..(5): Xaa is C or S

SEQ ID NO: 38974 - protein, 39 aa, Artificial Sequence
  Cyclic GFR-binding peptide
  MOD_RES (6)..(7)..(39): Xaa is C or S
KIPKAXXVPTELSPISMLYIDENEKVVYKQYEDMVVEGX

SEQ ID NO: 38975 - protein, 26 aa, Artificial Sequence
  Cyclic GFR-binding peptide
VPQALSPISILYKVGRKPKVLKYHYM

SEQ ID NO: 38976 - protein, 30 aa, Artificial Sequence; identical to SEQ ID NO: 10113
  Cyclic GFR-binding peptide
  MOD_RES (28)..(30): Xaa is C or S

SEQ ID NO: 38977 - protein, 27 aa, Artificial Sequence
  Cyclic GFR-binding peptide
QLSPISVLYIDDSSNVIYKQYENMVVR

SEQ ID NO: 38978 - protein, 28 aa, Artificial Sequence
  Cyclic GFR-binding peptide
  MOD_RES (1)..(2): Xaa is C or S
XXVPTKLSPISILYKDKGVVTYLKYHYG

SEQ ID NO: 38979 - protein, 32 aa, Artificial Sequence
  Cyclic GFR-binding peptide
  MOD_RES (6)..(7): Xaa is C or S
ASASPXXVPQDLSPISILYIVGRTPKVYKQYE

SEQ ID NO: 38980 - protein, 26 aa, Artificial Sequence
  Cyclic GFR-binding peptide
SPISMLYKDEYDKVVLKYHYEMVVEG

SEQ ID NO: 38981 - protein, 30 aa, Artificial Sequence
  Cyclic GFR-binding peptide
  MOD_RES (28)..(30): Xaa is C or S
DLEPISILYLIGKTPKIKFKYEMIVKSXKX

SEQ ID NO: 38982 - protein, 33 aa, Artificial Sequence; identical to SEQ ID NO: 10119
  Cyclic GFR-binding peptide
  MOD_RES (31)..(33): Xaa is C or S

SEQ ID NO: 38983 - protein, 31 aa, Artificial Sequence
  Cyclic GFR-binding peptide
  MOD_RES (1)..(1): Xaa is C or S
XVSQDLSPISILYIIGKTPKIYKQYEMIVKS

SEQ ID NO: 38984 - protein, 32 aa, Artificial Sequence
  Cyclic GFR-binding peptide
  MOD_RES (5)..(6): Xaa is C or S
SASPXXVSQDLSPISILYIIGKTPKIYKQYEM

SEQ ID NO: 38985 - protein, 29 aa, Artificial Sequence
  Cyclic GFR-binding peptide
  MOD_RES (3)..(4): Xaa is C or S
KAXXVPTELEPISMLYLDEYDKVVKFKYE

SEQ ID NO: 38986 - protein, 36 aa, Artificial Sequence
  Cyclic GFR-binding peptide
  MOD_RES (3)..(4)..(36): Xaa is C or S
ASXXVPARLSPISILYKDAANNVVLKYHYDMVVEAX

SEQ ID NO: 38987 - protein, 36 aa, Artificial Sequence
  Cyclic GFR-binding peptide
  MOD_RES (5)..(6): Xaa is C or S
VPKAXXAPTKLSPISVLYIDSSNNVIYKQYENMVVK

SEQ ID NO: 38988 - protein, 30 aa, Artificial Sequence
  Cyclic GFR-binding peptide
  MOD_RES (28)..(30): Xaa is C or S
DLSPISILYIVGRTPKVYKQYEMVVKSXKX

SEQ ID NO: 38989 - protein, 35 aa, Artificial Sequence; identical to SEQ ID NO: 10123
  Cyclic GFR-binding peptide
  MOD_RES (1)..(2)..(34): Xaa is C or S

SEQ ID NO: 38990 - protein, 36 aa, Artificial Sequence
  Cyclic GFR-binding peptide
  MOD_RES (5)..(6): Xaa is C or S
ASKAXXVPTKLNAISILYFDKGVVTYLKKYRGMAVS

SEQ ID NO: 38991 - protein, 27 aa, Artificial Sequence
  Cyclic GFR-binding peptide
  MOD_RES (1)..(2): Xaa is C or S
XXVPTELNAISMLYFDENEKVVLKKYR

SEQ ID NO: 38992 - protein, 37 aa, Artificial Sequence; identical to SEQ ID NO: 10127
  Cyclic GFR-binding peptide
  MOD_RES (6)..(7): Xaa is C or S

SEQ ID NO: 38993 - protein, 36 aa, Artificial Sequence
  Cyclic GFR-binding peptide
  MOD_RES (1)..(2)..(34)..(36): Xaa is C or S
XXAPTKLSPISVLYIDSSNNVIYKQYENMVVKAXGX

SEQ ID NO: 38994 - protein, 27 aa, Artificial Sequence
  Cyclic GFR-binding peptide
PTKLSPISVLYIDDSSNVIYKQYENMV

SEQ ID NO: 38995 - protein, 34 aa, Artificial Sequence
  Cyclic GFR-binding peptide
  MOD_RES (31)..(33): Xaa is C or S
TKLEPISVLYLDDMGVPTKFKYEEGMSVAEXGXR

SEQ ID NO: 38996 - protein, 36 aa, Artificial Sequence
  Cyclic GFR-binding peptide
  MOD_RES (2)..(3)..(35): Xaa is C or S
AXXVPTELEPISMLYLDENEKVVKFKYEDMVVEGXG

SEQ ID NO: 38997 - protein, 27 aa, Artificial Sequence
  Cyclic GFR-binding peptide
ELEPISMLYLDEYDKVVKFKYEEMVVE

SEQ ID NO: 38998 - protein, 25 aa, Artificial Sequence
  Cyclic GFR-binding peptide
TKLSPISVLYIDSSNNVIYKQYENM

SEQ ID NO: 38999 - protein, 29 aa, Artificial Sequence
  Cyclic GFR-binding peptide
  MOD_RES (1)..(2): Xaa is C or S
XXAPTQLEPISVLYLDDSSNVIKFKYENM

SEQ ID NO: 39000 - protein, 35 aa, Artificial Sequence
  Cyclic GFR-binding peptide
  MOD_RES (1)..(2)..(34): Xaa is C or S
XXVPARLNAISILYFDAANNVVLKKYRDMVVEAXG

SEQ ID NO: 39001 - protein, 28 aa, Artificial Sequence
  Cyclic GFR-binding peptide
TKLEPISVLYLDDSSNVIKFKYENMVVR

SEQ ID NO: 39002 - protein, 28 aa, Artificial Sequence
  Cyclic GFR-binding peptide
  MOD_RES (1)..(1): Xaa is C or S
XVPTKLEPISVLYLDDMGVPTKFKYEEG

SEQ ID NO: 39003 - protein, 26 aa, Artificial Sequence
  Cyclic GFR-binding peptide
LNAISILYFVGRTPKVLKKYRMVVKS

SEQ ID NO: 39004 - protein, 39 aa, Artificial Sequence
  Cyclic GFR-binding peptide
  MOD_RES (4)..(5)..(37)..(39): Xaa is C or S
PKAXXVPTELEPISMLYLDEYDKVVKFKYEEMVVEGXGX

SEQ ID NO: 39005 - protein, 32 aa, Artificial Sequence; identical to SEQ ID NO: 10130
  Cyclic GFR-binding peptide
  MOD_RES (3)..(4): Xaa is C or S

SEQ ID NO: 39006 - protein, 21 aa, Artificial Sequence
  Cyclic GFR-binding peptide
LEPISMLYLDEYDKVVKFKYE

SEQ ID NO: 39007 - protein, 35 aa, Artificial Sequence
  Cyclic GFR-binding peptide
  MOD_RES (1)..(2)..(34): Xaa is C or S
XXAPTKLEPISVLYLDSSNNVIKFKYENMVVKAXG

SEQ ID NO: 39008 - protein, 35 aa, Artificial Sequence
  Cyclic GFR-binding peptide
  MOD_RES (1)..(2)..(34): Xaa is C or S
XXVPARLEPISILYLDAANNVVKFKYEDMVVEAXG

SEQ ID NO: 39009 - protein, 25 aa, Artificial Sequence
  Cyclic GFR-binding peptide
TELSPISMLYKDEYDKVVLKYHYEM

SEQ ID NO: 39010 - protein, 33 aa, Artificial Sequence
  Cyclic GFR-binding peptide
  MOD_RES (5)..(6): Xaa is C or S
ASKAXXVPTKLNAISILYFDKGVVTYLKKYRGM

SEQ ID NO: 39011 - protein, 27 aa, Artificial Sequence
  Cyclic GFR-binding peptide
KLNAISVLYFDDMGVPTLKKYREGMSV

SEQ ID NO: 39012 - protein, 32 aa, Artificial Sequence; identical to SEQ ID NO: 10137
  Cyclic GFR-binding peptide
  MOD_RES (29)..(31): Xaa is C or S

SEQ ID NO: 39013 - protein, 35 aa, Artificial Sequence; identical to SEQ ID NO: 10139
  Cyclic GFR-binding peptide
  MOD_RES (1)..(32)..(34): Xaa is C or S

SEQ ID NO: 39014 - protein, 35 aa, Artificial Sequence
  Cyclic GFR-binding peptide
  MOD_RES (1)..(2)..(34): Xaa is C or S
XXAPTKLSPISVLYIDDSSNVIYKQYENMVVRSXG

SEQ ID NO: 39015 - protein, 39 aa, Artificial Sequence
  Cyclic GFR-binding peptide
  MOD_RES (5)..(6)..(38): Xaa is C or S
VPKPXXAPTQLSPISVLYIDDSSNVIYKQYENMVVRAXG

SEQ ID NO: 39016 - protein, 36 aa, Artificial Sequence
  Cyclic GFR-binding peptide
  MOD_RES (5)..(6): Xaa is C or S
SAAPXXVPQALEPISILYLVGRKPKVKFKYEMIVRS

SEQ ID NO: 39017 - protein, 31 aa, Artificial Sequence
  Cyclic GFR-binding peptide
  MOD_RES (1)..(1): Xaa is C or S
XAPTKLEPISVLYLDSSNNVIKFKYENMVVK

SEQ ID NO: 39018 - protein, 33 aa, Artificial Sequence
  Cyclic GFR-binding peptide
  MOD_RES (6)..(7): Xaa is C or S
AAPASXXVPARLEPISILYLDAANNVVKFKYED

SEQ ID NO: 39019 - protein, 35 aa, Artificial Sequence
  Cyclic GFR-binding peptide
  MOD_RES (1)..(33)..(35): Xaa is C or S
XVPARLSPISILYKDAANNVVLKYHYDMVVEAXGX

SEQ ID NO: 39020 - protein, 32 aa, Artificial Sequence
  Cyclic GFR-binding peptide
VPTKLSPISVLYIDDMGVPTYKQYEEGMSVAE

SEQ ID NO: 39021 - protein, 25 aa, Artificial Sequence
  Cyclic GFR-binding peptide
APTKLEPISVLYLDDSSNVIKFKYE

SEQ ID NO: 39022 - protein, 22 aa, Artificial Sequence
  Cyclic GFR-binding peptide
LNAISVLYFDDMGVPTLKKYRE

SEQ ID NO: 39023 - protein, 36 aa, Artificial Sequence
  Cyclic GFR-binding peptide
  MOD_RES (6)..(7): Xaa is C or S
KASKAXXVPTKLNAISILYFDKGVVTYLKKYRGMAV

SEQ ID NO: 39024 - protein, 33 aa, Artificial Sequence
  Cyclic GFR-binding peptide
  MOD_RES (7)..(7): Xaa is C or S
HVTKPTXAPTKLSPISVLYIDDSSNVIYKQYEN

SEQ ID NO: 39025 - protein, 36 aa, Artificial Sequence
  Cyclic GFR-binding peptide
  MOD_RES (1)..(33)..(35): Xaa is C or S
XVPTELEPISMLYLDEYDKVVKFKYEEMVVEGXGXR

SEQ ID NO: 39026 - protein, 29 aa, Artificial Sequence
  Cyclic GFR-binding peptide
  MOD_RES (27)..(29): Xaa is C or S
SPISVLYKDSSNNVILKYHYNMVVKAXGX

SEQ ID NO: 39027 - protein, 34 aa, Artificial Sequence; identical to SEQ ID NO: 10151
  Cyclic GFR-binding peptide
  MOD_RES (1)..(32)..(34): Xaa is C or S

SEQ ID NO: 39028 - protein, 29 aa, Artificial Sequence
  Cyclic GFR-binding peptide
  MOD_RES (2)..(3): Xaa is C or S
PXXVPQDLEPISILYLVGRTPKVKFKYEM

SEQ ID NO: 39029 - protein, 30 aa, Artificial Sequence
  Cyclic GFR-binding peptide
TKLSPISVLYIDDMGVPTYKQYEEGMSVAE

SEQ ID NO: 39030 - protein, 32 aa, Artificial Sequence
  Cyclic GFR-binding peptide
  MOD_RES (1)..(2): Xaa is C or S
XXVPTKLSPISILYIDKGVVTYYKQYEGMAVS

SEQ ID NO: 39031 - protein, 34 aa, Artificial Sequence
  Cyclic GFR-binding peptide
  MOD_RES (2)..(3): Xaa is C or S
AXXVPTKLNAISILYFDKGVVTYLKKYRGMAVSE

SEQ ID NO: 39032 - protein, 36 aa, Artificial Sequence
  Cyclic GFR-binding peptide
  MOD_RES (2)..(3)..(35): Xaa is C or S
AXXVPTKLSPISILYIDKGVVTYYKQYEGMAVSEXG

SEQ ID NO: 39033 - protein, 39 aa, Artificial Sequence; identical to SEQ ID NO: 10159
  Cyclic GFR-binding peptide
  MOD_RES (2)..(3)..(36)..(38): Xaa is C or S

SEQ ID NO: 39034 - protein, 35 aa, Artificial Sequence
  Cyclic GFR-binding peptide
  MOD_RES (4)..(5): Xaa is C or S
AAPXXVPQALSPISILYIVGRKPKVYKQYEMIVRS

SEQ ID NO: 39035 - protein, 38 aa, Artificial Sequence; identical to SEQ ID NO: 10161
  Cyclic GFR-binding peptide
  MOD_RES (3)..(4)..(36)..(38): Xaa is C or S

SEQ ID NO: 39036 - protein, 29 aa, Artificial Sequence
  Cyclic GFR-binding peptide
  MOD_RES (2)..(3): Xaa is C or S
PXXVPQALEPISILYLVGRKPKVKFKYEM

SEQ ID NO: 39037 - protein, 26 aa, Artificial Sequence
  Cyclic GFR-binding peptide
VPQDLEPISILYLVGRTPKVKFKYEM

SEQ ID NO: 39038 - protein, 37 aa, Artificial Sequence; identical to SEQ ID NO: 10163
  Cyclic GFR-binding peptide
  MOD_RES (3)..(4)..(37): Xaa is C or S

SEQ ID NO: 39039 - protein, 34 aa, Artificial Sequence; identical to SEQ ID NO: 10164
  Cyclic GFR-binding peptide
  MOD_RES (5)..(6): Xaa is C or S

SEQ ID NO: 39040 - protein, 29 aa, Artificial Sequence
  Cyclic GFR-binding peptide
  MOD_RES (1)..(2): Xaa is C or S
XXVPQALSPISILYIVGRKPKVYKQYEMI

SEQ ID NO: 39041 - protein, 36 aa, Artificial Sequence; identical to SEQ ID NO: 10165
  Cyclic GFR-binding peptide
  MOD_RES (1)..(33)..(35): Xaa is C or S

SEQ ID NO: 39042 - protein, 40 aa, Artificial Sequence; identical to SEQ ID NO: 10166
  Cyclic GFR-binding peptide
  MOD_RES (5)..(6)..(38)..(40): Xaa is C or S

SEQ ID NO: 39043 - protein, 20 aa, Artificial Sequence
  Cyclic GFR-binding peptide
EPISILYLVGRKPKVKFKYE

SEQ ID NO: 39044 - protein, 29 aa, Artificial Sequence
  Cyclic GFR-binding peptide
  MOD_RES (1)..(1): Xaa is C or S
XVPTKLEPISVLYLDDMGVPTKFKYEEGM

SEQ ID NO: 39045 - protein, 25 aa, Artificial Sequence
  Cyclic GFR-binding peptide
ARLSPISILYKDAANNVVLKYHYDM

SEQ ID NO: 39046 - protein, 35 aa, Artificial Sequence
  Cyclic GFR-binding peptide
  MOD_RES (3)..(35): Xaa is C or S
PTXAPTKLSPISVLYIDDSSNVIYKQYENMVVRSX

SEQ ID NO: 39047 - protein, 28 aa, Artificial Sequence
  Cyclic GFR-binding peptide
  MOD_RES (1)..(2): Xaa is C or S
XXAPTQLSPISVLYIDDSSNVIYKQYEN

SEQ ID NO: 39048 - protein, 24 aa, Artificial Sequence
  Cyclic GFR-binding peptide
QALEPISILYLVGRKPKVKFKYEM

SEQ ID NO: 39049 - protein, 39 aa, Artificial Sequence
  Cyclic GFR-binding peptide
  MOD_RES (6)..(7)..(39): Xaa is C or S
YVPKPXXAPTKLEPISVLYLDDSSNVIKFKYENMVVRSX

SEQ ID NO: 39050 - protein, 41 aa, Artificial Sequence
  Cyclic GFR-binding peptide
  MOD_RES (7)..(39)..(41): Xaa is C or S
HVTKPTXAPTKLEPISVLYLDDSSNVIKFKYENMVVRSXGX

SEQ ID NO: 39051 - protein, 32 aa, Artificial Sequence; identical to SEQ ID NO: 10170
  Cyclic GFR-binding peptide
  MOD_RES (31)..(31): Xaa is C or S

SEQ ID NO: 39052 - protein, 20 aa, Artificial Sequence
  Cyclic GFR-binding peptide
EPISILYLVGRTPKVKFKYE

SEQ ID NO: 39053 - protein, 27 aa, Artificial Sequence
  Cyclic GFR-binding peptide
TELNAISMLYFDENEKVVLKKYRDMVV

SEQ ID NO: 39054 - protein, 29 aa, Artificial Sequence
  Cyclic GFR-binding peptide
  MOD_RES (2)..(3): Xaa is C or S
PXXVPQALSPISILYKVGRKPKVLKYHYM

SEQ ID NO: 39055 - protein, 31 aa, Artificial Sequence
  Cyclic GFR-binding peptide
  MOD_RES (5)..(6): Xaa is C or S
IPKAXXVPTELEPISMLYLDEYDKVVKFKYE

SEQ ID NO: 39056 - protein, 29 aa, Artificial Sequence
  Cyclic GFR-binding peptide
  MOD_RES (1)..(1): Xaa is C or S
XVPQDLSPISILYIVGRTPKVYKQYEMVV

SEQ ID NO: 39057 - protein, 37 aa, Artificial Sequence
  Cyclic GFR-binding peptide
  MOD_RES (5)..(6)..(37): Xaa is C or S
SASPXXVPQDLEPISILYLVGRTPKVKFKYEMVVKSX

SEQ ID NO: 39058 - protein, 27 aa, Artificial Sequence
  Cyclic GFR-binding peptide
  MOD_RES (1)..(2): Xaa is C or S
XXVPTKLEPISVLYLDDMGVPTKFKYE

SEQ ID NO: 39059 - protein, 34 aa, Artificial Sequence
  Cyclic GFR-binding peptide
  MOD_RES (2)..(3): Xaa is C or S
AXXVPTELEPISMLYLDENEKVVKFKYEDMVVEG

SEQ ID NO: 39060 - protein, 33 aa, Artificial Sequence
  Cyclic GFR-binding peptide
  MOD_RES (3)..(4): Xaa is C or S
ASXXVPARLNAISILYFDAANNVVLKKYRDMVV

SEQ ID NO: 39061 - protein, 23 aa, Artificial Sequence
  Cyclic GFR-binding peptide
SPISILYKDAANNVVLKYHYDMV

SEQ ID NO: 39062 - protein, 37 aa, Artificial Sequence
  Cyclic GFR-binding peptide
  MOD_RES (2)..(3)..(35)..(37): Xaa is C or S
PXXAPTKLEPISVLYLDDSSNVIKFKYENMVVRSXGX

SEQ ID NO: 39063 - protein, 34 aa, Artificial Sequence; identical to SEQ ID NO: 10183
  Cyclic GFR-binding peptide
  MOD_RES (6)..(7): Xaa is C or S

SEQ ID NO: 39064 - protein, 29 aa, Artificial Sequence
  Cyclic GFR-binding peptide
  MOD_RES (1)..(1): Xaa is C or S
XVPTELEPISMLYLDEYDKVVKFKYEEMV

SEQ ID NO: 39065 - protein, 31 aa, Artificial Sequence
  Cyclic GFR-binding peptide
  MOD_RES (2)..(3): Xaa is C or S
AXXVPTKLEPISVLYLDDMGVPTKFKYEEGM

SEQ ID NO: 39066 - protein, 26 aa, Artificial Sequence
  Cyclic GFR-binding peptide
TELSPISMLYIDENEKVVYKQYEDMV

SEQ ID NO: 39067 - protein, 29 aa, Artificial Sequence
  Cyclic GFR-binding peptide
  MOD_RES (26)..(28): Xaa is C or S
SPISILYKVGRKPKVLKYHYMIVRSXKXS

SEQ ID NO: 39068 - protein, 24 aa, Artificial Sequence
  Cyclic GFR-binding peptide
PTKLSPISILYIDKGVVTYYKQYE

SEQ ID NO: 39069 - protein, 33 aa, Artificial Sequence
  Cyclic GFR-binding peptide
  MOD_RES (1)..(33): Xaa is C or S
XAPTQLSPISVLYIDDSSNVIYKQYENMVVRAX

SEQ ID NO: 39070 - protein, 29 aa, Artificial Sequence
  Cyclic GFR-binding peptide
  MOD_RES (1)..(1): Xaa is C or S
XVSQDLEPISILYLIGKTPKIKFKYEMIV

SEQ ID NO: 39071 - protein, 34 aa, Artificial Sequence
  Cyclic GFR-binding peptide
  MOD_RES (31)..(33): Xaa is C or S
PTKLSPISVLYIDDSSNVIYKQYENMVVRSXGXH

SEQ ID NO: 39072 - protein, 34 aa, Artificial Sequence
  Cyclic GFR-binding peptide
  MOD_RES (3)..(4): Xaa is C or S
KAXXAPTKLSPISVLYIDSSNNVIYKQYENMVVK

SEQ ID NO: 39073 - protein, 39 aa, Artificial Sequence; identical to SEQ ID NO: 10190
  Cyclic GFR-binding peptide
  MOD_RES (5)..(6)..(38): Xaa is C or S

SEQ ID NO: 39074 - protein, 23 aa, Artificial Sequence
  Cyclic GFR-binding peptide
QDLSPISILYKIGKTPKILKYHY

SEQ ID NO: 39075 - protein, 26 aa, Artificial Sequence
  Cyclic GFR-binding peptide
VSQDLSPISILYKIGKTPKILKYHYM

SEQ ID NO: 39076 - protein, 35 aa, Artificial Sequence; identical to SEQ ID NO: 10195
  Cyclic GFR-binding peptide
  MOD_RES (1)..(33)..(35): Xaa is C or S

SEQ ID NO: 39077 - protein, 34 aa, Artificial Sequence
  Cyclic GFR-binding peptide
  MOD_RES (2)..(3): Xaa is C or S
SXXVPARLEPISILYLDAANNVVKFKYEDMVVEA

SEQ ID NO: 39078 - protein, 33 aa, Artificial Sequence; identical to SEQ ID NO: 10197
  Cyclic GFR-binding peptide
  MOD_RES (2)..(3): Xaa is C or S

SEQ ID NO: 39079 - protein, 39 aa, Artificial Sequence
  Cyclic GFR-binding peptide
  MOD_RES (5)..(6)..(37)..(39): Xaa is C or S
SASPXXVSQDLEPISILYLIGKTPKIKFKYEMIVKSXKX

SEQ ID NO: 39080 - protein, 27 aa, Artificial Sequence
  Cyclic GFR-binding peptide
  MOD_RES (27)..(27): Xaa is C or S
LSPISILYIVGRKPKVYKQYEMIVRSX

SEQ ID NO: 39081 - protein, 32 aa, Artificial Sequence; identical to SEQ ID NO: 10200
  Cyclic GFR-binding peptide
  MOD_RES (1)..(2): Xaa is C or S

SEQ ID NO: 39082 - protein, 25 aa, Artificial Sequence
  Cyclic GFR-binding peptide
SPISVLYKDDSSNVILKYHYNMVVR

SEQ ID NO: 39083 - protein, 32 aa, Artificial Sequence
  Cyclic GFR-binding peptide
  MOD_RES (5)..(6): Xaa is C or S
SAAPXXVPQALEPISILYLVGRKPKVKFKYEM

SEQ ID NO: 39084 - protein, 25 aa, Artificial Sequence
  Cyclic GFR-binding peptide
PTELNAISMLYFDENEKVVLKKYRD

SEQ ID NO: 39085 - protein, 20 aa, Artificial Sequence
  Cyclic GFR-binding peptide
NAISILYFIGKTPKILKKYR

SEQ ID NO: 39086 - protein, 36 aa, Artificial Sequence
  Cyclic GFR-binding peptide
  MOD_RES (3)..(4)..(36): Xaa is C or S
ASXXVPARLNAISILYFDAANNVVLKKYRDMVVEAX

SEQ ID NO: 39087 - protein, 37 aa, Artificial Sequence; identical to SEQ ID NO: 10208
  Cyclic GFR-binding peptide
  MOD_RES (5)..(6): Xaa is C or S

SEQ ID NO: 39088 - protein, 29 aa, Artificial Sequence
  Cyclic GFR-binding peptide
PTKLSPISVLYIDDMGVPTYKQYEEGMSV

SEQ ID NO: 39089 - protein, 35 aa, Artificial Sequence
  Cyclic GFR-binding peptide
  MOD_RES (1)..(32)..(34): Xaa is C or S
XVPQALSPISILYIVGRKPKVYKQYEMIVRSXKXS

SEQ ID NO: 39090 - protein, 35 aa, Artificial Sequence; identical to SEQ ID NO: 10210
  Cyclic GFR-binding peptide
  MOD_RES (32)..(34): Xaa is C or S

SEQ ID NO: 39091 - protein, 34 aa, Artificial Sequence
  Cyclic GFR-binding peptide
  MOD_RES (6)..(7): Xaa is C or S
AAPASXXVPARLNAISILYFDAANNVVLKKYRDM

SEQ ID NO: 39092 - protein, 36 aa, Artificial Sequence; identical to SEQ ID NO: 10213
  Cyclic GFR-binding peptide
  MOD_RES (5)..(6): Xaa is C or S

SEQ ID NO: 39093 - protein, 22 aa, Artificial Sequence
  Cyclic GFR-binding peptide
LNAISILYFIGKTPKILKKYRM

SEQ ID NO: 39094 - protein, 29 aa, Artificial Sequence
  Cyclic GFR-binding peptide
APTKLSPISVLYKDDSSNVILKYHYNMVV

SEQ ID NO: 39095 - protein, 30 aa, Artificial Sequence; identical to SEQ ID NO: 10218
  Cyclic GFR-binding peptide
  MOD_RES (4)..(5): Xaa is C or S

SEQ ID NO: 39096 - protein, 27 aa, Artificial Sequence
  Cyclic GFR-binding peptide
VPTKLSPISILYIDKGVVTYYKQYEGM

SEQ ID NO: 39097 - protein, 33 aa, Artificial Sequence; identical to SEQ ID NO: 10219
  Cyclic GFR-binding peptide
  MOD_RES (1)..(2): Xaa is C or S

SEQ ID NO: 39098 - protein, 25 aa, Artificial Sequence
  Cyclic GFR-binding peptide
DLSPISILYIIGKTPKIYKQYEMIV

SEQ ID NO: 39099 - protein, 32 aa, Artificial Sequence
  Cyclic GFR-binding peptide
  MOD_RES (32)..(32): Xaa is C or S
APTQLEPISVLYLDDSSNVIKFKYENMVVRAX

SEQ ID NO: 39100 - protein, 31 aa, Artificial Sequence; identical to SEQ ID NO: 10221
  Cyclic GFR-binding peptide
  MOD_RES (1)..(1): Xaa is C or S

SEQ ID NO: 39101 - protein, 35 aa, Artificial Sequence
  Cyclic GFR-binding peptide
  MOD_RES (1)..(33)..(35): Xaa is C or S
XVPARLEPISILYLDAANNVVKFKYEDMVVEAXGX

SEQ ID NO: 39102 - protein, 39 aa, Artificial Sequence; identical to SEQ ID NO: 10222
  Cyclic GFR-binding peptide
  MOD_RES (3)..(4)..(36)..(38): Xaa is C or S

SEQ ID NO: 39103 - protein, 29 aa, Artificial Sequence
  Cyclic GFR-binding peptide
  MOD_RES (27)..(29): Xaa is C or S
SPISMLYIDEYDKVVYKQYEEMVVEGXGX

SEQ ID NO: 39104 - protein, 34 aa, Artificial Sequence
  Cyclic GFR-binding peptide
  MOD_RES (3)..(4): Xaa is C or S
APXXVPQALEPISILYLVGRKPKVKFKYEMIVRS

SEQ ID NO: 39105 - protein, 38 aa, Artificial Sequence; identical to SEQ ID NO: 10223
  Cyclic GFR-binding peptide
  MOD_RES (5)..(6)..(38): Xaa is C or S

SEQ ID NO: 39106 - protein, 23 aa, Artificial Sequence
  Cyclic GFR-binding peptide
LNAISILYFVGRTPKVLKKYRMV

SEQ ID NO: 39107 - protein, 25 aa, Artificial Sequence
  Cyclic GFR-binding peptide
VPTKLSPISILYKDKGVVTYLKYHY

SEQ ID NO: 39108 - protein, 32 aa, Artificial Sequence; identical to SEQ ID NO: 10226
  Cyclic GFR-binding peptide
  MOD_RES (31)..(31): Xaa is C or S

SEQ ID NO: 39109 - protein, 36 aa, Artificial Sequence
  Cyclic GFR-binding peptide
  MOD_RES (1)..(2)..(33)..(35): Xaa is C or S
XXVPQALEPISILYLVGRKPKVKFKYEMIVRSXKXS

SEQ ID NO: 39110 - protein, 38 aa, Artificial Sequence; identical to SEQ ID NO: 10229
  Cyclic GFR-binding peptide
  MOD_RES (5)..(6)..(37): Xaa is C or S

SEQ ID NO: 39111 - protein, 34 aa, Artificial Sequence
  Cyclic GFR-binding peptide
  MOD_RES (1)..(2): Xaa is C or S
XXVPTKLEPISVLYLDDMGVPTKFKYEEGMSVAE

SEQ ID NO: 39112 - protein, 29 aa, Artificial Sequence
  Cyclic GFR-binding peptide
  MOD_RES (26)..(28): Xaa is C or S
EPISILYLVGRKPKVKFKYEMIVRSXKXS

SEQ ID NO: 39113 - protein, 25 aa, Artificial Sequence
  Cyclic GFR-binding peptide
PTKLNAISILYFDKGVVTYLKKYRG

SEQ ID NO: 39114 - protein, 26 aa, Artificial Sequence
  Cyclic GFR-binding peptide
PTKLSPISILYIDKGVVTYYKQYEGM

SEQ ID NO: 39115 - protein, 28 aa, Artificial Sequence
  Cyclic GFR-binding peptide
  MOD_RES (26)..(28): Xaa is C or S
EPISILYLVGRTPKVKFKYEMVVKSXKX

SEQ ID NO: 39116 - protein, 39 aa, Artificial Sequence
  Cyclic GFR-binding peptide
  MOD_RES (3)..(4)..(36)..(38): Xaa is C or S
KAXXVPTELSPISMLYIDEYDKVVYKQYEEMVVEGXGXR

SEQ ID NO: 39117 - protein, 38 aa, Artificial Sequence
  Cyclic GFR-binding peptide
  MOD_RES (4)..(36)..(38): Xaa is C or S
KPTXAPTKLSPISVLYIDDSSNVIYKQYENMVVRSXGX

SEQ ID NO: 39118 - protein, 31 aa, Artificial Sequence
  Cyclic GFR-binding peptide
VPTKLSPISILYIDKGVVTYYKQYEGMAVSE

SEQ ID NO: 39119 - protein, 30 aa, Artificial Sequence
  Cyclic GFR-binding peptide
  MOD_RES (1)..(1): Xaa is C or S
XVPARLNAISILYFDAANNVVLKKYRDMVV

SEQ ID NO: 39120 - protein, 28 aa, Artificial Sequence
  Cyclic GFR-binding peptide
  MOD_RES (2)..(3): Xaa is C or S
PXXVSQDLEPISILYLIGKTPKIKFKYE

SEQ ID NO: 39121 - protein, 30 aa, Artificial Sequence; identical to SEQ ID NO: 10238
  Cyclic GFR-binding peptide
  MOD_RES (28)..(30): Xaa is C or S

SEQ ID NO: 39122 - protein, 33 aa, Artificial Sequence; identical to SEQ ID NO: 10240
  Cyclic GFR-binding peptide
  MOD_RES (1)..(33): Xaa is C or S

SEQ ID NO: 39123 - protein, 28 aa, Artificial Sequence
  Cyclic GFR-binding peptide
  MOD_RES (2)..(3): Xaa is C or S
PXXVPQALEPISILYLVGRKPKVKFKYE

SEQ ID NO: 39124 - protein, 27 aa, Artificial Sequence
  Cyclic GFR-binding peptide
TKLNAISVLYFDSSNNVILKKYRNMVV

SEQ ID NO: 39125 - protein, 32 aa, Artificial Sequence; identical to SEQ ID NO: 10247
  Cyclic GFR-binding peptide
  MOD_RES (29)..(31): Xaa is C or S

SEQ ID NO: 39126 - protein, 28 aa, Artificial Sequence
  Cyclic GFR-binding peptide
PQDLSPISILYKVGRTPKVLKYHYMVVK

SEQ ID NO: 39127 - protein, 30 aa, Artificial Sequence
  Cyclic GFR-binding peptide
  MOD_RES (30)..(30): Xaa is C or S
TQLEPISVLYLDDSSNVIKFKYENMVVRAX

SEQ ID NO: 39128 - protein, 28 aa, Artificial Sequence
  Cyclic GFR-binding peptide
PTKLEPISVLYLDSSNNVIKFKYENMVV

SEQ ID NO: 39129 - protein, 33 aa, Artificial Sequence; identical to SEQ ID NO: 10249
  Cyclic GFR-binding peptide
  MOD_RES (1)..(33): Xaa is C or S

SEQ ID NO: 39130 - protein, 38 aa, Artificial Sequence
  Cyclic GFR-binding peptide
  MOD_RES (6)..(7): Xaa is C or S
TVPKPXXAPTQLSPISVLYIDDSSNVIYKQYENMVVRA

SEQ ID NO: 39131 - protein, 33 aa, Artificial Sequence
  Cyclic GFR-binding peptide
  MOD_RES (32)..(32): Xaa is C or S
PTKLSPISVLYIDDMGVPTYKQYEEGMSVAEXG

SEQ ID NO: 39132 - protein, 32 aa, Artificial Sequence
  Cyclic GFR-binding peptide
  MOD_RES (29)..(31): Xaa is C or S
KLSPISILYKDKGVVTYLKYHYGMAVSEXGXR

SEQ ID NO: 39133 - protein, 22 aa, Artificial Sequence
  Cyclic GFR-binding peptide
EPISILYLVGRTPKVKFKYEMV

SEQ ID NO: 39134 - protein, 35 aa, Artificial Sequence
  Cyclic GFR-binding peptide
  MOD_RES (4)..(5): Xaa is C or S
PKAXXVPTELEPISMLYLDENEKVVKFKYEDMVVE

SEQ ID NO: 39135 - protein, 29 aa, Artificial Sequence
  Cyclic GFR-binding peptide
TKLEPISVLYLDSSNNVIKFKYENMVVKA

SEQ ID NO: 39136 - protein, 25 aa, Artificial Sequence
  Cyclic GFR-binding peptide
SPISVLYKDSSNNVILKYHYNMVVK

SEQ ID NO: 39137 - protein, 32 aa, Artificial Sequence
  Cyclic GFR-binding peptide
  MOD_RES (1)..(32): Xaa is C or S
XVPQALEPISILYLVGRKPKVKFKYEMIVRSX

SEQ ID NO: 39138 - protein, 25 aa, Artificial Sequence
  Cyclic GFR-binding peptide
TKLSPISVLYIDDMGVPTYKQYEEG

SEQ ID NO: 39139 - protein, 31 aa, Artificial Sequence; identical to SEQ ID NO: 10261
  Cyclic GFR-binding peptide
  MOD_RES (5)..(6): Xaa is C or S

SEQ ID NO: 39140 - protein, 32 aa, Artificial Sequence; identical to SEQ ID NO: 10263
  Cyclic GFR-binding peptide
  MOD_RES (5)..(6): Xaa is C or S

SEQ ID NO: 39141 - protein, 31 aa, Artificial Sequence
  Cyclic GFR-binding peptide
  MOD_RES (30)..(30): Xaa is C or S
ARLEPISILYLDAANNVVKFKYEDMVVEAXG

SEQ ID NO: 39142 - protein, 30 aa, Artificial Sequence; identical to SEQ ID NO: 10264
  Cyclic GFR-binding peptide
  MOD_RES (30)..(30): Xaa is C or S

SEQ ID NO: 39143 - protein, 30 aa, Artificial Sequence; identical to SEQ ID NO: 10265
  Cyclic GFR-binding peptide
  MOD_RES (3)..(4): Xaa is C or S

SEQ ID NO: 39144 - protein, 33 aa, Artificial Sequence
  Cyclic GFR-binding peptide
  MOD_RES (6)..(7): Xaa is C or S
AAPASXXVPARLSPISILYKDAANNVVLKYHYD

SEQ ID NO: 39145 - protein, 31 aa, Artificial Sequence
  Cyclic GFR-binding peptide
APTKLEPISVLYLDDSSNVIKFKYENMVVRS

SEQ ID NO: 39146 - protein, 37 aa, Artificial Sequence
  Cyclic GFR-binding peptide
  MOD_RES (4)..(5)..(37): Xaa is C or S
PKPXXAPTKLSPISVLYIDDSSNVIYKQYENMVVRSX

SEQ ID NO: 39147 - protein, 31 aa, Artificial Sequence; identical to SEQ ID NO: 10268
  Cyclic GFR-binding peptide
  MOD_RES (1)..(1): Xaa is C or S

SEQ ID NO: 39148 - protein, 25 aa, Artificial Sequence
  Cyclic GFR-binding peptide
APTKLSPISVLYKDSSNNVILKYHY

SEQ ID NO: 39149 - protein, 29 aa, Artificial Sequence
  Cyclic GFR-binding peptide
  MOD_RES (29)..(29): Xaa is C or S
QALSPISILYIVGRKPKVYKQYEMIVRSX

SEQ ID NO: 39150 - protein, 25 aa, Artificial Sequence
  Cyclic GFR-binding peptide
APTQLSPISVLYKDDSSNVILKYHY

SEQ ID NO: 39151 - protein, 38 aa, Artificial Sequence; identical to SEQ ID NO: 10274
  Cyclic GFR-binding peptide
  MOD_RES (3)..(4)..(36)..(38): Xaa is C or S

SEQ ID NO: 39152 - protein, 33 aa, Artificial Sequence; identical to SEQ ID NO: 10275
  Cyclic GFR-binding peptide
  MOD_RES (6)..(7): Xaa is C or S

SEQ ID NO: 39153 - protein, 38 aa, Artificial Sequence
  Cyclic GFR-binding peptide
  MOD_RES (4)..(5)..(37): Xaa is C or S
PKAXXAPTKLSPISVLYIDSSNNVIYKQYENMVVKAXG

SEQ ID NO: 39154 - protein, 40 aa, Artificial Sequence
  Cyclic GFR-binding peptide
  MOD_RES (6)..(7)..(39): Xaa is C or S
KASKAXXVPTKLSPISILYKDKGVVTYLKYHYGMAVSEXG

SEQ ID NO: 39155 - protein, 26 aa, Artificial Sequence
  Cyclic GFR-binding peptide
SQDLNAISILYFIGKTPKILKKYRMI

SEQ ID NO: 39156 - protein, 29 aa, Artificial Sequence
  Cyclic GFR-binding peptide
  MOD_RES (1)..(1): Xaa is C or S
XVPQDLNAISILYFVGRTPKVLKKYRMVV

SEQ ID NO: 39157 - protein, 39 aa, Artificial Sequence; identical to SEQ ID NO: 10280
  Cyclic GFR-binding peptide
  MOD_RES (4)..(36)..(38): Xaa is C or S

SEQ ID NO: 39158 - protein, 32 aa, Artificial Sequence; identical to SEQ ID NO: 10281
  Cyclic GFR-binding peptide
  MOD_RES (1)..(2): Xaa is C or S

SEQ ID NO: 39159 - protein, 29 aa, Artificial Sequence
  Cyclic GFR-binding peptide
  MOD_RES (3)..(4): Xaa is C or S
ASXXVPARLSPISILYKDAANNVVLKYHY

SEQ ID NO: 39160 - protein, 24 aa, Artificial Sequence
  Cyclic GFR-binding peptide
RLNAISILYFDAANNVVLKKYRDM

SEQ ID NO: 39161 - protein, 37 aa, Artificial Sequence
  Cyclic GFR-binding peptide
  MOD_RES (3)..(4)..(36): Xaa is C or S
KAXXVPTKLSPISILYKDKGVVTYLKYHYGMAVSEXG

SEQ ID NO: 39162 - protein, 34 aa, Artificial Sequence
  Cyclic GFR-binding peptide
  MOD_RES (4)..(5): Xaa is C or S
ASPXXVPQDLEPISILYLVGRTPKVKFKYEMVVK

SEQ ID NO: 39163 - protein, 33 aa, Artificial Sequence; identical to SEQ ID NO: 10283
  Cyclic GFR-binding peptide
  MOD_RES (1)..(2): Xaa is C or S

SEQ ID NO: 39164 - protein, 32 aa, Artificial Sequence; identical to SEQ ID NO: 10284
  Cyclic GFR-binding peptide
  MOD_RES (1)..(2): Xaa is C or S

SEQ ID NO: 39165 - protein, 26 aa, Artificial Sequence
  Cyclic GFR-binding peptide
  MOD_RES (1)..(1): Xaa is C or S
XVPARLSPISILYKDAANNVVLKYHY

SEQ ID NO: 39166 - protein, 39 aa, Artificial Sequence; identical to SEQ ID NO: 10286
  Cyclic GFR-binding peptide
  MOD_RES (4)..(5)..(37)..(39): Xaa is C or S

SEQ ID NO: 39167 - protein, 32 aa, Artificial Sequence
  Cyclic GFR-binding peptide
  MOD_RES (1)..(2): Xaa is C or S
XXVPARLSPISILYKDAANNVVLKYHYDMVVE

SEQ ID NO: 39168 - protein, 20 aa, Artificial Sequence
  Cyclic GFR-binding peptide
SPISILYKDAANNVVLKYHY

SEQ ID NO: 39169 - protein, 33 aa, Artificial Sequence
  Cyclic GFR-binding peptide
  MOD_RES (1)..(33): Xaa is C or S
XVPTKLSPISILYIDKGVVTYYKQYEGMAVSEX

SEQ ID NO: 39170 - protein, 29 aa, Artificial Sequence
  Cyclic GFR-binding peptide
  MOD_RES (27)..(29): Xaa is C or S
SPISMLYIDENEKVVYKQYEDMVVEGXGX

SEQ ID NO: 39171 - protein, 33 aa, Artificial Sequence; identical to SEQ ID NO: 10291
  Cyclic GFR-binding peptide
  MOD_RES (2)..(3): Xaa is C or S

SEQ ID NO: 39172 - protein, 31 aa, Artificial Sequence; identical to SEQ ID NO: 10294
  Cyclic GFR-binding peptide
  MOD_RES (28)..(30): Xaa is C or S

SEQ ID NO: 39173 - protein, 27 aa, Artificial Sequence
  Cyclic GFR-binding peptide
APTKLNAISVLYFDSSNNVILKKYRNM

SEQ ID NO: 39174 - protein, 28 aa, Artificial Sequence
  Cyclic GFR-binding peptide
  MOD_RES (1)..(1): Xaa is C or S
XVPQALSPISILYIVGRKPKVYKQYEMI

SEQ ID NO: 39175 - protein, 35 aa, Artificial Sequence; identical to SEQ ID NO: 10298
  Cyclic GFR-binding peptide
  MOD_RES (3)..(4): Xaa is C or S

SEQ ID NO: 39176 - protein, 26 aa, Artificial Sequence
  Cyclic GFR-binding peptide
VPQDLSPISILYKVGRTPKVLKYHYM

SEQ ID NO: 39177 - protein, 35 aa, Artificial Sequence; identical to SEQ ID NO: 10300
  Cyclic GFR-binding peptide
  MOD_RES (4)..(5): Xaa is C or S

SEQ ID NO: 39178 - protein, 32 aa, Artificial Sequence
  Cyclic GFR-binding peptide
  MOD_RES (29)..(31): Xaa is C or S
KLEPISVLYLDSSNNVIKFKYENMVVKAXGXH

SEQ ID NO: 39179 - protein, 38 aa, Artificial Sequence
  Cyclic GFR-binding peptide
  MOD_RES (4)..(5)..(36)..(38): Xaa is C or S
AAPXXVPQALEPISILYLVGRKPKVKFKYEMIVRSXKX

SEQ ID NO: 39180 - protein, 24 aa, Artificial Sequence
  Cyclic GFR-binding peptide
TKLSPISILYIDKGVVTYYKQYEG

SEQ ID NO: 39181 - protein, 37 aa, Artificial Sequence
  Cyclic GFR-binding peptide
  MOD_RES (6)..(7): Xaa is C or S
AAPASXXVPARLSPISILYKDAANNVVLKYHYDMVVE

SEQ ID NO: 39182 - protein, 32 aa, Artificial Sequence
  Cyclic GFR-binding peptide
  MOD_RES (2)..(3): Xaa is C or S
AXXVPTKLSPISILYIDKGVVTYYKQYEGMAV

SEQ ID NO: 39183 - protein, 24 aa, Artificial Sequence
  Cyclic GFR-binding peptide
LSPISILYKIGKTPKILKYHYMIV

SEQ ID NO: 39184 - protein, 28 aa, Artificial Sequence
  Cyclic GFR-binding peptide
KLSPISVLYKDSSNNVILKYHYNMVVKA

SEQ ID NO: 39185 - protein, 35 aa, Artificial Sequence; identical to SEQ ID NO: 10308
  Cyclic GFR-binding peptide
  MOD_RES (2)..(3): Xaa is C or S

SEQ ID NO: 39186 - protein, 33 aa, Artificial Sequence; identical to SEQ ID NO: 10310
  Cyclic GFR-binding peptide
  MOD_RES (1)..(33): Xaa is C or S

SEQ ID NO: 39187 - protein, 32 aa, Artificial Sequence
  Cyclic GFR-binding peptide
  MOD_RES (30)..(32): Xaa is C or S
TELEPISMLYLDENEKVVKFKYEDMVVEGXGX

SEQ ID NO: 39188 - protein, 39 aa, Artificial Sequence
  Cyclic GFR-binding peptide
  MOD_RES (5)..(6)..(38): Xaa is C or S
ASKAXXVPTKLSPISILYIDKGVVTYYKQYEGMAVSEXG

SEQ ID NO: 39189 - protein, 29 aa, Artificial Sequence
  Cyclic GFR-binding peptide
  MOD_RES (3)..(4): Xaa is C or S
SPXXVPQDLSPISILYIVGRTPKVYKQYE

SEQ ID NO: 39190 - protein, 33 aa, Artificial Sequence
  Cyclic GFR-binding peptide
  MOD_RES (1)..(33): Xaa is C or S
XAPTKLEPISVLYLDSSNNVIKFKYENMVVKAX

SEQ ID NO: 39191 - protein, 31 aa, Artificial Sequence
  Cyclic GFR-binding peptide
  MOD_RES (5)..(5): Xaa is C or S
TKPTXAPTKLEPISVLYLDDSSNVIKFKYEN

SEQ ID NO: 39192 - protein, 27 aa, Artificial Sequence
  Cyclic GFR-binding peptide
  MOD_RES (1)..(2): Xaa is C or S
XXAPTKLEPISVLYLDSSNNVIKFKYE

SEQ ID NO: 39193 - protein, 26 aa, Artificial Sequence
  Cyclic GFR-binding peptide
TELNAISMLYFDEYDKVVLKKYREMV

SEQ ID NO: 39194 - protein, 20 aa, Artificial Sequence
  Cyclic GFR-binding peptide
SPISILYIDKGVVTYYKQYE

SEQ ID NO: 39195 - protein, 26 aa, Artificial Sequence
  Cyclic GFR-binding peptide
VPQALEPISILYLVGRKPKVKFKYEM

SEQ ID NO: 39196 - protein, 35 aa, Artificial Sequence
  Cyclic GFR-binding peptide
  MOD_RES (4)..(5): Xaa is C or S
SKAXXVPTKLNAISILYFDKGVVTYLKKYRGMAVS

SEQ ID NO: 39197 - protein, 35 aa, Artificial Sequence
  Cyclic GFR-binding peptide
  MOD_RES (5)..(6): Xaa is C or S
ASKAXXVPTKLNAISILYFDKGVVTYLKKYRGMAV

SEQ ID NO: 39198 - protein, 33 aa, Artificial Sequence; identical to SEQ ID NO: 10316
  Cyclic GFR-binding peptide
  MOD_RES (6)..(7): Xaa is C or S

SEQ ID NO: 39199 - protein, 28 aa, Artificial Sequence
  Cyclic GFR-binding peptide
  MOD_RES (1)..(2): Xaa is C or S
XXVPTKLSPISVLYIDDMGVPTYKQYEE

SEQ ID NO: 39200 - protein, 30 aa, Artificial Sequence
  Cyclic GFR-binding peptide
PTELSPISMLYIDENEKVVYKQYEDMVVEG

SEQ ID NO: 39201 - protein, 29 aa, Artificial Sequence
  Cyclic GFR-binding peptide
  MOD_RES (29)..(29): Xaa is C or S
QALSPISILYKVGRKPKVLKYHYMIVRSX

SEQ ID NO: 39202 - protein, 28 aa, Artificial Sequence
  Cyclic GFR-binding peptide
  MOD_RES (27)..(27): Xaa is C or S
SPISILYIDKGVVTYYKQYEGMAVSEXG

SEQ ID NO: 39203 - protein, 28 aa, Artificial Sequence
  Cyclic GFR-binding peptide
VPARLNAISILYFDAANNVVLKKYRDMV

SEQ ID NO: 39204 - protein, 21 aa, Artificial Sequence
  Cyclic GFR-binding peptide
SPISMLYKDEYDKVVLKYHYE

SEQ ID NO: 39205 - protein, 24 aa, Artificial Sequence
  Cyclic GFR-binding peptide
TELNAISMLYFDENEKVVLKKYRD

SEQ ID NO: 39206 - protein, 29 aa, Artificial Sequence
  Cyclic GFR-binding peptide
  MOD_RES (29)..(29): Xaa is C or S
ELSPISMLYIDEYDKVVYKQYEEMVVEGX

SEQ ID NO: 39207 - protein, 36 aa, Artificial Sequence; identical to SEQ ID NO: 10325
  Cyclic GFR-binding peptide
  MOD_RES (6)..(7): Xaa is C or S

SEQ ID NO: 39208 - protein, 33 aa, Artificial Sequence; identical to SEQ ID NO: 10326
  Cyclic GFR-binding peptide
  MOD_RES (3)..(4): Xaa is C or S

SEQ ID NO: 39209 - protein, 21 aa, Artificial Sequence
  Cyclic GFR-binding peptide
LSPISILYIVGRTPKVYKQYE

SEQ ID NO: 39210 - protein, 39 aa, Artificial Sequence
  Cyclic GFR-binding peptide
  MOD_RES (3)..(4)..(36)..(38): Xaa is C or S
KAXXAPTKLEPISVLYLDSSNNVIKFKYENMVVKAXGXH

SEQ ID NO: 39211 - protein, 27 aa, Artificial Sequence
  Cyclic GFR-binding peptide
  MOD_RES (1)..(1): Xaa is C or S
XAPTKLSPISVLYIDDSSNVIYKQYEN

SEQ ID NO: 39212 - protein, 33 aa, Artificial Sequence
  Cyclic GFR-binding peptide
  MOD_RES (32)..(32): Xaa is C or S
VPTKLNAISILYFDKGVVTYLKKYRGMAVSEXG

SEQ ID NO: 39213 - protein, 39 aa, Artificial Sequence
  Cyclic GFR-binding peptide
  MOD_RES (5)..(37)..(39): Xaa is C or S
TKPTXAPTKLSPISVLYIDDSSNVIYKQYENMVVRSXGX

SEQ ID NO: 39214 - protein, 37 aa, Artificial Sequence
  Cyclic GFR-binding peptide
  MOD_RES (1)..(2)..(34)..(36): Xaa is C or S
XXVPTELEPISMLYLDEYDKVVKFKYEEMVVEGXGXR

SEQ ID NO: 39215 - protein, 37 aa, Artificial Sequence; identical to SEQ ID NO: 10337
  Cyclic GFR-binding peptide
  MOD_RES (2)..(3)..(34)..(36): Xaa is C or S

SEQ ID NO: 39216 - protein, 28 aa, Artificial Sequence
  Cyclic GFR-binding peptide
  MOD_RES (28)..(28): Xaa is C or S
LSPISMLYIDENEKVVYKQYEDMVVEGX

SEQ ID NO: 39217 - protein, 34 aa, Artificial Sequence
  Cyclic GFR-binding peptide
  MOD_RES (4)..(5): Xaa is C or S
PKPXXAPTQLSPISVLYIDDSSNVIYKQYENMVV

SEQ ID NO: 39218 - protein, 32 aa, Artificial Sequence
  Cyclic GFR-binding peptide
  MOD_RES (30)..(32): Xaa is C or S
TELEPISMLYLDEYDKVVKFKYEEMVVEGXGX

SEQ ID NO: 39219 - protein, 30 aa, Artificial Sequence; identical to SEQ ID NO: 10338
  Cyclic GFR-binding peptide
  MOD_RES (2)..(3): Xaa is C or S

SEQ ID NO: 39220 - protein, 28 aa, Artificial Sequence
  Cyclic GFR-binding peptide
  MOD_RES (27)..(27): Xaa is C or S
EPISVLYLDSSNNVIKFKYENMVVKAXG

SEQ ID NO: 39221 - protein, 36 aa, Artificial Sequence
  Cyclic GFR-binding peptide
  MOD_RES (1)..(2)..(34)..(36): Xaa is C or S
XXVPTELSPISMLYIDEYDKVVYKQYEEMVVEGXGX

SEQ ID NO: 39222 - protein, 30 aa, Artificial Sequence; identical to SEQ ID NO: 10343
  Cyclic GFR-binding peptide

SEQ ID NO: 39223 - protein, 22 aa, Artificial Sequence
  Cyclic GFR-binding peptide
LNAISMLYFDENEKVVLKKYRD

SEQ ID NO: 39224 - protein, 31 aa, Artificial Sequence
  Cyclic GFR-binding peptide
  MOD_RES (3)..(4): Xaa is C or S
ASXXVPARLNAISILYFDAANNVVLKKYRDM

SEQ ID NO: 39225 - protein, 35 aa, Artificial Sequence; identical to SEQ ID NO: 10345
  Cyclic GFR-binding peptide
  MOD_RES (3)..(4): Xaa is C or S

SEQ ID NO: 39226 - protein, 34 aa, Artificial Sequence
  Cyclic GFR-binding peptide
  MOD_RES (1)..(2)..(33): Xaa is C or S
XXVPQALEPISILYLVGRKPKVKFKYEMIVRSXK

SEQ ID NO: 39227 - protein, 25 aa, Artificial Sequence
  Cyclic GFR-binding peptide
PQALEPISILYLVGRKPKVKFKYEM

SEQ ID NO: 39228 - protein, 35 aa, Artificial Sequence
  Cyclic GFR-binding peptide
  MOD_RES (1)..(33)..(35): Xaa is C or S
XAPTKLSPISVLYIDDSSNVIYKQYENMVVRSXGX

SEQ ID NO: 39229 - protein, 30 aa, Artificial Sequence; identical to SEQ ID NO: 10349
  Cyclic GFR-binding peptide
  MOD_RES (1)..(2): Xaa is C or S

SEQ ID NO: 39230 - protein, 32 aa, Artificial Sequence; identical to SEQ ID NO: 10350
  Cyclic GFR-binding peptide
  MOD_RES (4)..(5): Xaa is C or S

SEQ ID NO: 39231 - protein, 39 aa, Artificial Sequence; identical to SEQ ID NO: 10351
  Cyclic GFR-binding peptide
  MOD_RES (4)..(5)..(36)..(38): Xaa is C or S

SEQ ID NO: 39232 - protein, 24 aa, Artificial Sequence
  Cyclic GFR-binding peptide
ELEPISMLYLDEYDKVVKFKYEEM

SEQ ID NO: 39233 - protein, 29 aa, Artificial Sequence
  Cyclic GFR-binding peptide
PTELNAISMLYFDENEKVVLKKYRDMVVE

SEQ ID NO: 39234 - protein, 30 aa, Artificial Sequence
  Cyclic GFR-binding peptide
  MOD_RES (28)..(30): Xaa is C or S
LNAISILYFDKGVVTYLKKYRGMAVSEXGX

SEQ ID NO: 39235 - protein, 28 aa, Artificial Sequence
  Cyclic GFR-binding peptide
  MOD_RES (28)..(28): Xaa is C or S
DLEPISILYLIGKTPKIKFKYEMIVKSX

SEQ ID NO: 39236 - protein, 33 aa, Artificial Sequence; identical to SEQ ID NO: 10355
  Cyclic GFR-binding peptide
  MOD_RES (5)..(6): Xaa is C or S

SEQ ID NO: 39237 - protein, 32 aa, Artificial Sequence
  Cyclic GFR-binding peptide
  MOD_RES (4)..(5): Xaa is C or S
PASXXVPARLNAISILYFDAANNVVLKKYRDM

SEQ ID NO: 39238 - protein, 35 aa, Artificial Sequence
  Cyclic GFR-binding peptide
  MOD_RES (1)..(32)..(34): Xaa is C or S
XVPQDLEPISILYLVGRTPKVKFKYEMVVKSXKXS

SEQ ID NO: 39239 - protein, 30 aa, Artificial Sequence
  Cyclic GFR-binding peptide
  MOD_RES (1)..(2): Xaa is C or S
XXAPTQLSPISVLYIDDSSNVIYKQYENMV

SEQ ID NO: 39240 - protein, 31 aa, Artificial Sequence; identical to SEQ ID NO: 10357
  Cyclic GFR-binding peptide
  MOD_RES (1)..(1): Xaa is C or S

SEQ ID NO: 39241 - protein, 28 aa, Artificial Sequence
  Cyclic GFR-binding peptide
  MOD_RES (28)..(28): Xaa is C or S
DLNAISILYFVGRTPKVLKKYRMVVKSX

SEQ ID NO: 39242 - protein, 33 aa, Artificial Sequence
  Cyclic GFR-binding peptide
  MOD_RES (6)..(7): Xaa is C or S
AVPKAXXAPTKLEPISVLYLDSSNNVIKFKYEN

SEQ ID NO: 39243 - protein, 26 aa, Artificial Sequence
  Cyclic GFR-binding peptide
TELEPISMLYLDEYDKVVKFKYEEMV

SEQ ID NO: 39244 - protein, 33 aa, Artificial Sequence
  Cyclic GFR-binding peptide
  MOD_RES (30)..(32): Xaa is C or S
ARLEPISILYLDAANNVVKFKYEDMVVEAXGXR

SEQ ID NO: 39245 - protein, 29 aa, Artificial Sequence
  Cyclic GFR-binding peptide
  MOD_RES (26)..(28): Xaa is C or S
SPISILYKIGKTPKILKYHYMIVKSXKXS

SEQ ID NO: 39246 - protein, 28 aa, Artificial Sequence
  Cyclic GFR-binding peptide
KLSPISVLYIDDMGVPTYKQYEEGMSVA

SEQ ID NO: 39247 - protein, 33 aa, Artificial Sequence; identical to SEQ ID NO: 10365
  Cyclic GFR-binding peptide
  MOD_RES (30)..(32): Xaa is C or S

SEQ ID NO: 39248 - protein, 27 aa, Artificial Sequence
  Cyclic GFR-binding peptide
  MOD_RES (26)..(26): Xaa is C or S
EPISILYLVGRTPKVKFKYEMVVKSXK

SEQ ID NO: 39249 - protein, 39 aa, Artificial Sequence; identical to SEQ ID NO: 10367
  Cyclic GFR-binding peptide
  MOD_RES (4)..(5)..(37)..(39): Xaa is C or S

SEQ ID NO: 39250 - protein, 40 aa, Artificial Sequence
  Cyclic GFR-binding peptide
  MOD_RES (5)..(6)..(39): Xaa is C or S
VGKAXXVPTKLEPISVLYLDDMGVPTKFKYEEGMSVAEXG

SEQ ID NO: 39251 - protein, 31 aa, Artificial Sequence
  Cyclic GFR-binding peptide
  MOD_RES (5)..(6): Xaa is C or S
SAAPXXVPQALSPISILYIVGRKPKVYKQYE

SEQ ID NO: 39252 - protein, 23 aa, Artificial Sequence
  Cyclic GFR-binding peptide
TKLSPISVLYKDSSNNVILKYHY

SEQ ID NO: 39253 - protein, 34 aa, Artificial Sequence
  Cyclic GFR-binding peptide
  MOD_RES (5)..(6): Xaa is C or S
ASKAXXVPTKLSPISILYKDKGVVTYLKYHYGMA

SEQ ID NO: 39254 - protein, 24 aa, Artificial Sequence
  Cyclic GFR-binding peptide
KLNAISVLYFDSSNNVILKKYRNM

SEQ ID NO: 39255 - protein, 28 aa, Artificial Sequence
  Cyclic GFR-binding peptide
PTELNAISMLYFDEYDKVVLKKYREMVV

SEQ ID NO: 39256 - protein, 29 aa, Artificial Sequence
  Cyclic GFR-binding peptide
VPQDLSPISILYIVGRTPKVYKQYEMVVK

SEQ ID NO: 39257 - protein, 37 aa, Artificial Sequence
  Cyclic GFR-binding peptide
  MOD_RES (4)..(5)..(36): Xaa is C or S
ASPXXVSQDLSPISILYIIGKTPKIYKQYEMIVKSXK

SEQ ID NO: 39258 - protein, 29 aa, Artificial Sequence
  Cyclic GFR-binding peptide
  MOD_RES (28)..(28): Xaa is C or S
LNAISMLYFDEYDKVVLKKYREMVVEGXG

SEQ ID NO: 39259 - protein, 25 aa, Artificial Sequence
  Cyclic GFR-binding peptide
QDLEPISILYLIGKTPKIKFKYEMI

SEQ ID NO: 39260 - protein, 27 aa, Artificial Sequence
  Cyclic GFR-binding peptide
  MOD_RES (1)..(2): Xaa is C or S
XXAPTQLEPISVLYLDDSSNVIKFKYE

SEQ ID NO: 39261 - protein, 35 aa, Artificial Sequence
  Cyclic GFR-binding peptide
  MOD_RES (5)..(6): Xaa is C or S
IPKAXXVPTELSPISMLYIDENEKVVYKQYEDMVV

SEQ ID NO: 39262 - protein, 30 aa, Artificial Sequence; identical to SEQ ID NO: 10384
  Cyclic GFR-binding peptide
  MOD_RES (1)..(1): Xaa is C or S

SEQ ID NO: 39263 - protein, 39 aa, Artificial Sequence
  Cyclic GFR-binding peptide
  MOD_RES (6)..(7)..(39): Xaa is C or S
KASKAXXVPTKLSPISILYIDKGVVTYYKQYEGMAVSEX

SEQ ID NO: 39264 - protein, 31 aa, Artificial Sequence
  Cyclic GFR-binding peptide
  MOD_RES (29)..(31): Xaa is C or S
LSPISVLYIDDMGVPTYKQYEEGMSVAEXGX

SEQ ID NO: 39265 - protein, 30 aa, Artificial Sequence
  Cyclic GFR-binding peptide
  MOD_RES (28)..(30): Xaa is C or S
LNAISILYFDAANNVVLKKYRDMVVEAXGX

SEQ ID NO: 39266 - protein, 30 aa, Artificial Sequence
  Cyclic GFR-binding peptide
  MOD_RES (30)..(30): Xaa is C or S
SQDLEPISILYLIGKTPKIKFKYEMIVKSX

SEQ ID NO: 39267 - protein, 28 aa, Artificial Sequence
  Cyclic GFR-binding peptide
  MOD_RES (2)..(3): Xaa is C or S
PXXAPTKLSPISVLYIDDSSNVIYKQYE

SEQ ID NO: 39268 - protein, 34 aa, Artificial Sequence; identical to SEQ ID NO: 10387
  Cyclic GFR-binding peptide
  MOD_RES (1)..(33): Xaa is C or S

SEQ ID NO: 39269 - protein, 27 aa, Artificial Sequence
  Cyclic GFR-binding peptide
LEPISVLYLDDSSNVIKFKYENMVVRA

SEQ ID NO: 39270 - protein, 33 aa, Artificial Sequence
  Cyclic GFR-binding peptide
  MOD_RES (3)..(3): Xaa is C or S
PTXAPTKLSPISVLYIDDSSNVIYKQYENMVVR

SEQ ID NO: 39271 - protein, 27 aa, Artificial Sequence
  Cyclic GFR-binding peptide
PARLEPISILYLDAANNVVKFKYEDMV

SEQ ID NO: 39272 - protein, 23 aa, Artificial Sequence
  Cyclic GFR-binding peptide
LSPISVLYIDDSSNVIYKQYENM

SEQ ID NO: 39273 - protein, 32 aa, Artificial Sequence; identical to SEQ ID NO: 10392
  Cyclic GFR-binding peptide
  MOD_RES (30)..(32): Xaa is C or S

SEQ ID NO: 39274 - protein, 24 aa, Artificial Sequence
  Cyclic GFR-binding peptide
TKLNAISILYFDKGVVTYLKKYRG

SEQ ID NO: 39275 - protein, 39 aa, Artificial Sequence
  Cyclic GFR-binding peptide
  MOD_RES (5)..(6)..(38): Xaa is C or S
IPKAXXVPTELEPISMLYLDEYDKVVKFKYEEMVVEGXG

SEQ ID NO: 39276 - protein, 31 aa, Artificial Sequence; identical to SEQ ID NO: 10394
  Cyclic GFR-binding peptide
  MOD_RES (31)..(31): Xaa is C or S

SEQ ID NO: 39277 - protein, 31 aa, Artificial Sequence
  Cyclic GFR-binding peptide
  MOD_RES (30)..(30): Xaa is C or S
SQDLEPISILYLIGKTPKIKFKYEMIVKSXK

SEQ ID NO: 39278 - protein, 37 aa, Artificial Sequence
  Cyclic GFR-binding peptide
  MOD_RES (2)..(34)..(36): Xaa is C or S
TXAPTKLEPISVLYLDDSSNVIKFKYENMVVRSXGXH

SEQ ID NO: 39279 - protein, 29 aa, Artificial Sequence
  Cyclic GFR-binding peptide
  MOD_RES (2)..(3): Xaa is C or S
PXXVPQALNAISILYFVGRKPKVLKKYRM

SEQ ID NO: 39280 - protein, 28 aa, Artificial Sequence
  Cyclic GFR-binding peptide
APTQLEPISVLYLDDSSNVIKFKYENMV

SEQ ID NO: 39281 - protein, 39 aa, Artificial Sequence
  Cyclic GFR-binding peptide
  MOD_RES (3)..(4)..(36)..(38): Xaa is C or S
KAXXVPTELSPISMLYIDENEKVVYKQYEDMVVEGXGXR

SEQ ID NO: 39282 - protein, 34 aa, Artificial Sequence
  Cyclic GFR-binding peptide
  MOD_RES (3)..(4): Xaa is C or S
KAXXVPTKLEPISVLYLDDMGVPTKFKYEEGMSV

SEQ ID NO: 39283 - protein, 38 aa, Artificial Sequence
  Cyclic GFR-binding peptide
  MOD_RES (2)..(3)..(35)..(37): Xaa is C or S
AXXAPTKLSPISVLYIDSSNNVIYKQYENMVVKAXGXH

SEQ ID NO: 39284 - protein, 25 aa, Artificial Sequence
  Cyclic GFR-binding peptide
VPARLSPISILYKDAANNVVLKYHY

SEQ ID NO: 39285 - protein, 26 aa, Artificial Sequence
  Cyclic GFR-binding peptide
EPISVLYLDSSNNVIKFKYENMVVKA

SEQ ID NO: 39286 - protein, 35 aa, Artificial Sequence
  Cyclic GFR-binding peptide
  MOD_RES (3)..(4): Xaa is C or S
KPXXAPTQLEPISVLYLDDSSNVIKFKYENMVVRA

SEQ ID NO: 39287 - protein, 22 aa, Artificial Sequence
  Cyclic GFR-binding peptide
LEPISVLYLDDMGVPTKFKYEE

SEQ ID NO: 39288 - protein, 34 aa, Artificial Sequence
  Cyclic GFR-binding peptide
  MOD_RES (1)..(2)..(34): Xaa is C or S
XXAPTKLEPISVLYLDSSNNVIKFKYENMVVKAX

SEQ ID NO: 39289 - protein, 27 aa, Artificial Sequence
  Cyclic GFR-binding peptide
SQDLNAISILYFIGKTPKILKKYRMIV

SEQ ID NO: 39290 - protein, 25 aa, Artificial Sequence
  Cyclic GFR-binding peptide
NAISILYFIGKTPKILKKYRMIVKS

SEQ ID NO: 39291 - protein, 35 aa, Artificial Sequence
  Cyclic GFR-binding peptide
  MOD_RES (5)..(6): Xaa is C or S
VPKPXXAPTQLEPISVLYLDDSSNVIKFKYENMVV

SEQ ID NO: 39292 - protein, 32 aa, Artificial Sequence
  Cyclic GFR-binding peptide
  MOD_RES (31)..(31): Xaa is C or S
PTELEPISMLYLDENEKVVKFKYEDMVVEGXG

SEQ ID NO: 39293 - protein, 31 aa, Artificial Sequence; identical to SEQ ID NO: 10405
  Cyclic GFR-binding peptide
  MOD_RES (1)..(1): Xaa is C or S

SEQ ID NO: 39294 - protein, 25 aa, Artificial Sequence
  Cyclic GFR-binding peptide
LSPISILYKDAANNVVLKYHYDMVV

SEQ ID NO: 39295 - protein, 37 aa, Artificial Sequence
  Cyclic GFR-binding peptide
  MOD_RES (6)..(6): Xaa is C or S
VTKPTXAPTKLEPISVLYLDDSSNVIKFKYENMVVRS

SEQ ID NO: 39296 - protein, 23 aa, Artificial Sequence
  Cyclic GFR-binding peptide
ALSPISILYIVGRKPKVYKQYEM

SEQ ID NO: 39297 - protein, 23 aa, Artificial Sequence
  Cyclic GFR-binding peptide
TKLEPISVLYLDDSSNVIKFKYE

SEQ ID NO: 39298 - protein, 29 aa, Artificial Sequence
  Cyclic GFR-binding peptide
  MOD_RES (1)..(2): Xaa is C or S
XXAPTKLSPISVLYIDSSNNVIYKQYENM

SEQ ID NO: 39299 - protein, 31 aa, Artificial Sequence
  Cyclic GFR-binding peptide
  MOD_RES (28)..(30): Xaa is C or S
LSPISVLYIDSSNNVIYKQYENMVVKAXGXH

SEQ ID NO: 39300 - protein, 35 aa, Artificial Sequence
  Cyclic GFR-binding peptide
  MOD_RES (3)..(4): Xaa is C or S
KAXXAPTKLEPISVLYLDSSNNVIKFKYENMVVKA

SEQ ID NO: 39301 - protein, 24 aa, Artificial Sequence
  Cyclic GFR-binding peptide
ALSPISILYKVGRKPKVLKYHYMI

SEQ ID NO: 39302 - protein, 26 aa, Artificial Sequence
  Cyclic GFR-binding peptide
SPISMLYIDENEKVVYKQYEDMVVEG

SEQ ID NO: 39303 - protein, 31 aa, Artificial Sequence
  Cyclic GFR-binding peptide
  MOD_RES (28)..(30): Xaa is C or S
LEPISVLYLDSSNNVIKFKYENMVVKAXGXH

SEQ ID NO: 39304 - protein, 25 aa, Artificial Sequence
  Cyclic GFR-binding peptide
TQLEPISVLYLDDSSNVIKFKYENM

SEQ ID NO: 39305 - protein, 34 aa, Artificial Sequence; identical to SEQ ID NO: 10416
  Cyclic GFR-binding peptide
  MOD_RES (6)..(7): Xaa is C or S

SEQ ID NO: 39306 - protein, 29 aa, Artificial Sequence
  Cyclic GFR-binding peptide
  MOD_RES (28)..(28): Xaa is C or S
DLSPISILYIIGKTPKIYKQYEMIVKSXK

SEQ ID NO: 39307 - protein, 28 aa, Artificial Sequence
  Cyclic GFR-binding peptide
  MOD_RES (27)..(27): Xaa is C or S
SPISMLYKDENEKVVLKYHYDMVVEGXG

SEQ ID NO: 39308 - protein, 34 aa, Artificial Sequence; identical to SEQ ID NO: 10422
  Cyclic GFR-binding peptide
  MOD_RES (1)..(33): Xaa is C or S

SEQ ID NO: 39309 - protein, 27 aa, Artificial Sequence
  Cyclic GFR-binding peptide
TQLSPISVLYIDDSSNVIYKQYENMVV

SEQ ID NO: 39310 - protein, 33 aa, Artificial Sequence
  Cyclic GFR-binding peptide
  MOD_RES (4)..(5): Xaa is C or S
SKAXXVPTKLNAISILYFDKGVVTYLKKYRGMA

SEQ ID NO: 39311 - protein, 36 aa, Artificial Sequence
  Cyclic GFR-binding peptide
  MOD_RES (5)..(6): Xaa is C or S
IPKAXXVPTELEPISMLYLDEYDKVVKFKYEEMVVE

SEQ ID NO: 39312 - protein, 36 aa, Artificial Sequence; identical to SEQ ID NO: 10426
  Cyclic GFR-binding peptide
  MOD_RES (5)..(6): Xaa is C or S

SEQ ID NO: 39313 - protein, 38 aa, Artificial Sequence
  Cyclic GFR-binding peptide
  MOD_RES (5)..(6)..(38): Xaa is C or S
ASKAXXVPTKLNAISILYFDKGVVTYLKKYRGMAVSEX

SEQ ID NO: 39314 - protein, 28 aa, Artificial Sequence
  Cyclic GFR-binding peptide
VPARLEPISILYLDAANNVVKFKYEDMV

SEQ ID NO: 39315 - protein, 37 aa, Artificial Sequence
  Cyclic GFR-binding peptide
  MOD_RES (4)..(5)..(37): Xaa is C or S
PKAXXVPTELSPISMLYIDEYDKVVYKQYEEMVVEGX

SEQ ID NO: 39316 - protein, 34 aa, Artificial Sequence; identical to SEQ ID NO: 10428
  Cyclic GFR-binding peptide
  MOD_RES (4)..(5): Xaa is C or S

SEQ ID NO: 39317 - protein, 30 aa, Artificial Sequence
  Cyclic GFR-binding peptide
  MOD_RES (27)..(29): Xaa is C or S
EPISVLYLDDSSNVIKFKYENMVVRSXGXH

SEQ ID NO: 39318 - protein, 32 aa, Artificial Sequence
  Cyclic GFR-binding peptide
  MOD_RES (32)..(32): Xaa is C or S
PTKLEPISVLYLDDMGVPTKFKYEEGMSVAEX

SEQ ID NO: 39319 - protein, 25 aa, Artificial Sequence
  Cyclic GFR-binding peptide
EPISILYLDAANNVVKFKYEDMVVE

SEQ ID NO: 39320 - protein, 33 aa, Artificial Sequence; identical to SEQ ID NO: 10431
  Cyclic GFR-binding peptide
  MOD_RES (6)..(6): Xaa is C or S

SEQ ID NO: 39321 - protein, 32 aa, Artificial Sequence; identical to SEQ ID NO: 10434
  Cyclic GFR-binding peptide
  MOD_RES (30)..(32): Xaa is C or S

SEQ ID NO: 39322 - protein, 34 aa, Artificial Sequence; identical to SEQ ID NO: 10436
  Cyclic GFR-binding peptide
  MOD_RES (32)..(34): Xaa is C or S

SEQ ID NO: 39323 - protein, 32 aa, Artificial Sequence; identical to SEQ ID NO: 10437
  Cyclic GFR-binding peptide
  MOD_RES (6)..(7): Xaa is C or S

SEQ ID NO: 39324 - protein, 31 aa, Artificial Sequence; identical to SEQ ID NO: 10438
  Cyclic GFR-binding peptide
  MOD_RES (30)..(30): Xaa is C or S

SEQ ID NO: 39325 - protein, 23 aa, Artificial Sequence
  Cyclic GFR-binding peptide
TKLEPISVLYLDDMGVPTKFKYE

SEQ ID NO: 39326 - protein, 30 aa, Artificial Sequence; identical to SEQ ID NO: 10441
  Cyclic GFR-binding peptide
  MOD_RES (1)..(2): Xaa is C or S

SEQ ID NO: 39327 - protein, 34 aa, Artificial Sequence
  Cyclic GFR-binding peptide
  MOD_RES (32)..(34): Xaa is C or S
VPTKLNAISILYFDKGVVTYLKKYRGMAVSEXGX

SEQ ID NO: 39328 - protein, 31 aa, Artificial Sequence; identical to SEQ ID NO: 10444
  Cyclic GFR-binding peptide
  MOD_RES (1)..(2): Xaa is C or S

SEQ ID NO: 39329 - protein, 33 aa, Artificial Sequence; identical to SEQ ID NO: 10445
  Cyclic GFR-binding peptide
  MOD_RES (4)..(5): Xaa is C or S

SEQ ID NO: 39330 - protein, 29 aa, Artificial Sequence
  Cyclic GFR-binding peptide
  MOD_RES (3)..(4): Xaa is C or S
KAXXVPTELEPISMLYLDENEKVVKFKYE

SEQ ID NO: 39331 - protein, 31 aa, Artificial Sequence; identical to SEQ ID NO: 10446
  Cyclic GFR-binding peptide
  MOD_RES (5)..(5): Xaa is C or S

SEQ ID NO: 39332 - protein, 35 aa, Artificial Sequence
  Cyclic GFR-binding peptide
  MOD_RES (3)..(4)..(35): Xaa is C or S
APXXVPQALSPISILYIVGRKPKVYKQYEMIVRSX

SEQ ID NO: 39333 - protein, 31 aa, Artificial Sequence
  Cyclic GFR-binding peptide
  MOD_RES (2)..(3): Xaa is C or S
AXXVPTKLNAISILYFDKGVVTYLKKYRGMA

SEQ ID NO: 39334 - protein, 33 aa, Artificial Sequence
  Cyclic GFR-binding peptide
  MOD_RES (31)..(33): Xaa is C or S
PARLSPISILYKDAANNVVLKYHYDMVVEAXGX

SEQ ID NO: 39335 - protein, 33 aa, Artificial Sequence; identical to SEQ ID NO: 10448
  Cyclic GFR-binding peptide
  MOD_RES (30)..(32): Xaa is C or S

SEQ ID NO: 39336 - protein, 34 aa, Artificial Sequence
  Cyclic GFR-binding peptide
  MOD_RES (1)..(33): Xaa is C or S
XAPTKLEPISVLYLDDSSNVIKFKYENMVVRSXG

SEQ ID NO: 39337 - protein, 26 aa, Artificial Sequence
  Cyclic GFR-binding peptide
  MOD_RES (1)..(1): Xaa is C or S
XAPTKLSPISVLYKDSSNNVILKYHY

SEQ ID NO: 39338 - protein, 31 aa, Artificial Sequence; identical to SEQ ID NO: 10452
  Cyclic GFR-binding peptide
  MOD_RES (29)..(31): Xaa is C or S

SEQ ID NO: 39339 - protein, 23 aa, Artificial Sequence
  Cyclic GFR-binding peptide
EPISMLYLDENEKVVKFKYEDMV

SEQ ID NO: 39340 - protein, 28 aa, Artificial Sequence
  Cyclic GFR-binding peptide
  MOD_RES (27)..(27): Xaa is C or S
SPISVLYIDDSSNVIYKQYENMVVRSXG

SEQ ID NO: 39341 - protein, 34 aa, Artificial Sequence
  Cyclic GFR-binding peptide
  MOD_RES (2)..(3)..(34): Xaa is C or S
PXXVPQDLEPISILYLVGRTPKVKFKYEMVVKSX

SEQ ID NO: 39342 - protein, 25 aa, Artificial Sequence
  Cyclic GFR-binding peptide
PTELSPISMLYKDENEKVVLKYHYD

SEQ ID NO: 39343 - protein, 37 aa, Artificial Sequence; identical to SEQ ID NO: 10455
  Cyclic GFR-binding peptide
  MOD_RES (4)..(5)..(37): Xaa is C or S

SEQ ID NO: 39344 - protein, 32 aa, Artificial Sequence; identical to SEQ ID NO: 10457
  Cyclic GFR-binding peptide
  MOD_RES (30)..(32): Xaa is C or S

SEQ ID NO: 39345 - protein, 28 aa, Artificial Sequence
  Cyclic GFR-binding peptide
  MOD_RES (2)..(3): Xaa is C or S
AXXVPTELSPISMLYIDENEKVVYKQYE

SEQ ID NO: 39346 - protein, 35 aa, Artificial Sequence
  Cyclic GFR-binding peptide
  MOD_RES (5)..(6): Xaa is C or S
SASPXXVSQDLSPISILYIIGKTPKIYKQYEMIVK

SEQ ID NO: 39347 - protein, 36 aa, Artificial Sequence
  Cyclic GFR-binding peptide
  MOD_RES (3)..(4)..(36): Xaa is C or S
KAXXVPTKLNAISILYFDKGVVTYLKKYRGMAVSEX

SEQ ID NO: 39348 - protein, 34 aa, Artificial Sequence; identical to SEQ ID NO: 10461
  Cyclic GFR-binding peptide
  MOD_RES (2)..(3): Xaa is C or S

SEQ ID NO: 39349 - protein, 22 aa, Artificial Sequence
  Cyclic GFR-binding peptide
KLSPISVLYKDSSNNVILKYHY

SEQ ID NO: 39350 - protein, 35 aa, Artificial Sequence; identical to SEQ ID NO: 10464
  Cyclic GFR-binding peptide
  MOD_RES (32)..(34): Xaa is C or S

SEQ ID NO: 39351 - protein, 33 aa, Artificial Sequence
  Cyclic GFR-binding peptide
  MOD_RES (2)..(3): Xaa is C or S
AXXVPTKLSPISILYKDKGVVTYLKYHYGMAVS

SEQ ID NO: 39352 - protein, 29 aa, Artificial Sequence
  Cyclic GFR-binding peptide
PTELEPISMLYLDENEKVVKFKYEDMVVE

SEQ ID NO: 39353 - protein, 36 aa, Artificial Sequence
  Cyclic GFR-binding peptide
  MOD_RES (1)..(2)..(34)..(36): Xaa is C or S
XXVPTELSPISMLYIDENEKVVYKQYEDMVVEGXGX

SEQ ID NO: 39354 - protein, 33 aa, Artificial Sequence
  Cyclic GFR-binding peptide
  MOD_RES (1)..(33): Xaa is C or S
XVPARLEPISILYLDAANNVVKFKYEDMVVEAX

SEQ ID NO: 39355 - protein, 32 aa, Artificial Sequence; identical to SEQ ID NO: 10468
  Cyclic GFR-binding peptide
  MOD_RES (1)..(2): Xaa is C or S

SEQ ID NO: 39356 - protein, 32 aa, Artificial Sequence
  Cyclic GFR-binding peptide
  MOD_RES (2)..(3): Xaa is C or S
AXXVPTKLSPISILYKDKGVVTYLKYHYGMAV

SEQ ID NO: 39357 - protein, 31 aa, Artificial Sequence; identical to SEQ ID NO: 10471
  Cyclic GFR-binding peptide
  MOD_RES (5)..(6): Xaa is C or S

SEQ ID NO: 39358 - protein, 38 aa, Artificial Sequence
  Cyclic GFR-binding peptide
  MOD_RES (5)..(6)..(38): Xaa is C or S
VPKPXXAPTQLSPISVLYIDDSSNVIYKQYENMVVRAX

SEQ ID NO: 39359 - protein, 31 aa, Artificial Sequence; identical to SEQ ID NO: 10473
  Cyclic GFR-binding peptide
  MOD_RES (3)..(4): Xaa is C or S

SEQ ID NO: 39360 - protein, 39 aa, Artificial Sequence; identical to SEQ ID NO: 10475
  Cyclic GFR-binding peptide
  MOD_RES (3)..(4)..(37)..(39): Xaa is C or S

SEQ ID NO: 39361 - protein, 38 aa, Artificial Sequence
  Cyclic GFR-binding peptide
  MOD_RES (3)..(4)..(37): Xaa is C or S
KAXXVPTKLEPISVLYLDDMGVPTKFKYEEGMSVAEXG

SEQ ID NO: 39362 - protein, 26 aa, Artificial Sequence
  Cyclic GFR-binding peptide
VPQALNAISILYFVGRKPKVLKKYRM

SEQ ID NO: 39363 - protein, 21 aa, Artificial Sequence
  Cyclic GFR-binding peptide
SPISILYKVGRTPKVLKYHYM

SEQ ID NO: 39364 - protein, 26 aa, Artificial Sequence
  Cyclic GFR-binding peptide
TKLSPISVLYIDDMGVPTYKQYEEGM

SEQ ID NO: 39365 - protein, 34 aa, Artificial Sequence
  Cyclic GFR-binding peptide
  MOD_RES (1)..(2)..(34): Xaa is C or S
XXVPTKLSPISILYIDKGVVTYYKQYEGMAVSEX

SEQ ID NO: 39366 - protein, 32 aa, Artificial Sequence
  Cyclic GFR-binding peptide
  MOD_RES (2)..(3): Xaa is C or S
PXXAPTKLEPISVLYLDDSSNVIKFKYENMVV

SEQ ID NO: 39367 - protein, 31 aa, Artificial Sequence
  Cyclic GFR-binding peptide
  MOD_RES (1)..(1): Xaa is C or S
XVPQALEPISILYLVGRKPKVKFKYEMIVRS

SEQ ID NO: 39368 - protein, 22 aa, Artificial Sequence
  Cyclic GFR-binding peptide
LSPISILYKIGKTPKILKYHYM

SEQ ID NO: 39369 - protein, 36 aa, Artificial Sequence
  Cyclic GFR-binding peptide
  MOD_RES (2)..(3)..(34)..(36): Xaa is C or S
PXXVPQALEPISILYLVGRKPKVKFKYEMIVRSXKX

SEQ ID NO: 39370 - protein, 22 aa, Artificial Sequence
  Cyclic GFR-binding peptide
LEPISVLYLDDSSNVIKFKYEN

SEQ ID NO: 39371 - protein, 30 aa, Artificial Sequence
  Cyclic GFR-binding peptide
  MOD_RES (3)..(4): Xaa is C or S
KAXXVPTKLSPISILYIDKGVVTYYKQYEG

SEQ ID NO: 39372 - protein, 29 aa, Artificial Sequence
  Cyclic GFR-binding peptide
  MOD_RES (27)..(29): Xaa is C or S
LEPISILYLVGRTPKVKFKYEMVVKSXKX

SEQ ID NO: 39373 - protein, 33 aa, Artificial Sequence
  Cyclic GFR-binding peptide
  MOD_RES (31)..(33): Xaa is C or S
TKLEPISVLYLDDMGVPTKFKYEEGMSVAEXGX

SEQ ID NO: 39374 - protein, 28 aa, Artificial Sequence
  Cyclic GFR-binding peptide
  MOD_RES (1)..(2): Xaa is C or S
XXVPTKLNAISILYFDKGVVTYLKKYRG

SEQ ID NO: 39375 - protein, 26 aa, Artificial Sequence
  Cyclic GFR-binding peptide
  MOD_RES (1)..(1): Xaa is C or S
XVPQDLSPISILYKVGRTPKVLKYHY

SEQ ID NO: 39376 - protein, 26 aa, Artificial Sequence
  Cyclic GFR-binding peptide
NAISILYFDKGVVTYLKKYRGMAVSE

SEQ ID NO: 39377 - protein, 31 aa, Artificial Sequence
  Cyclic GFR-binding peptide
  MOD_RES (31)..(31): Xaa is C or S
VPQALEPISILYLVGRKPKVKFKYEMIVRSX

SEQ ID NO: 39378 - protein, 24 aa, Artificial Sequence
  Cyclic GFR-binding peptide
PTKLEPISVLYLDSSNNVIKFKYE

SEQ ID NO: 39379 - protein, 32 aa, Artificial Sequence; identical to SEQ ID NO: 10490
  Cyclic GFR-binding peptide
  MOD_RES (1)..(2): Xaa is C or S

SEQ ID NO: 39380 - protein, 22 aa, Artificial Sequence
  Cyclic GFR-binding peptide
SPISILYIVGRTPKVYKQYEMV

SEQ ID NO: 39381 - protein, 33 aa, Artificial Sequence
  Cyclic GFR-binding peptide
  MOD_RES (1)..(2)..(33): Xaa is C or S
XXVPQALEPISILYLVGRKPKVKFKYEMIVRSX

SEQ ID NO: 39382 - protein, 24 aa, Artificial Sequence
  Cyclic GFR-binding peptide
SPISVLYKDDSSNVILKYHYNMVV

SEQ ID NO: 39383 - protein, 35 aa, Artificial Sequence; identical to SEQ ID NO: 10494
  Cyclic GFR-binding peptide
  MOD_RES (32)..(34): Xaa is C or S

SEQ ID NO: 39384 - protein, 32 aa, Artificial Sequence; identical to SEQ ID NO: 10495
  Cyclic GFR-binding peptide
  MOD_RES (1)..(32): Xaa is C or S

SEQ ID NO: 39385 - protein, 30 aa, Artificial Sequence
  Cyclic GFR-binding peptide
PTKLSPISVLYIDDSSNVIYKQYENMVVRS

SEQ ID NO: 39386 - protein, 21 aa, Artificial Sequence
  Cyclic GFR-binding peptide
EPISILYLVGRTPKVKFKYEM

SEQ ID NO: 39387 - protein, 31 aa, Artificial Sequence
  Cyclic GFR-binding peptide
  MOD_RES (5)..(6): Xaa is C or S
VPKPXXAPTKLSPISVLYIDDSSNVIYKQYE

SEQ ID NO: 39388 - protein, 29 aa, Artificial Sequence
  Cyclic GFR-binding peptide
  MOD_RES (2)..(2): Xaa is C or S
TXAPTKLSPISVLYKDDSSNVILKYHYNM

SEQ ID NO: 39389 - protein, 24 aa, Artificial Sequence
  Cyclic GFR-binding peptide
EPISILYLDAANNVVKFKYEDMVV

SEQ ID NO: 39390 - protein, 25 aa, Artificial Sequence
  Cyclic GFR-binding peptide
DLNAISILYFIGKTPKILKKYRMIV

SEQ ID NO: 39391 - protein, 27 aa, Artificial Sequence
  Cyclic GFR-binding peptide
PTELSPISMLYIDEYDKVVYKQYEEMV

SEQ ID NO: 39392 - protein, 29 aa, Artificial Sequence
  Cyclic GFR-binding peptide
  MOD_RES (1)..(1): Xaa is C or S
XVSQDLNAISILYFIGKTPKILKKYRMIV

SEQ ID NO: 39393 - protein, 41 aa, Artificial Sequence
  Cyclic GFR-binding peptide
  MOD_RES (6)..(7)..(38)..(40): Xaa is C or S
ASAAPXXVPQALSPISILYIVGRKPKVYKQYEMIVRSXKXS

SEQ ID NO: 39394 - protein, 26 aa, Artificial Sequence
  Cyclic GFR-binding peptide
PQDLNAISILYFVGRTPKVLKKYRMV

SEQ ID NO: 39395 - protein, 35 aa, Artificial Sequence; identical to SEQ ID NO: 10504
  Cyclic GFR-binding peptide
  MOD_RES (4)..(5): Xaa is C or S

SEQ ID NO: 39396 - protein, 39 aa, Artificial Sequence
  Cyclic GFR-binding peptide
  MOD_RES (3)..(4)..(36)..(38): Xaa is C or S
KAXXVPTELEPISMLYLDENEKVVKFKYEDMVVEGXGXR

SEQ ID NO: 39397 - protein, 34 aa, Artificial Sequence
  Cyclic GFR-binding peptide
  MOD_RES (1)..(32)..(34): Xaa is C or S
XVSQDLSPISILYIIGKTPKIYKQYEMIVKSXKX

SEQ ID NO: 39398 - protein, 32 aa, Artificial Sequence
  Cyclic GFR-binding peptide
  MOD_RES (30)..(32): Xaa is C or S
KLEPISVLYLDDMGVPTKFKYEEGMSVAEXGX

SEQ ID NO: 39399 - protein, 30 aa, Artificial Sequence; identical to SEQ ID NO: 10505
  Cyclic GFR-binding peptide

SEQ ID NO: 39400 - protein, 28 aa, Artificial Sequence
  Cyclic GFR-binding peptide
  MOD_RES (2)..(3): Xaa is C or S
AXXAPTKLNAISVLYFDSSNNVILKKYR

SEQ ID NO: 39401 - protein, 34 aa, Artificial Sequence
  Cyclic GFR-binding peptide
  MOD_RES (32)..(34): Xaa is C or S
APTKLEPISVLYLDSSNNVIKFKYENMVVKAXGX

SEQ ID NO: 39402 - protein, 30 aa, Artificial Sequence; identical to SEQ ID NO: 10511
  Cyclic GFR-binding peptide
  MOD_RES (2)..(2): Xaa is C or S

SEQ ID NO: 39403 - protein, 34 aa, Artificial Sequence
  Cyclic GFR-binding peptide
  MOD_RES (5)..(6): Xaa is C or S
SASPXXVSQDLEPISILYLIGKTPKIKFKYEMIV

SEQ ID NO: 39404 - protein, 27 aa, Artificial Sequence
  Cyclic GFR-binding peptide
VPQALSPISILYKVGRKPKVLKYHYMI

SEQ ID NO: 39405 - protein, 41 aa, Artificial Sequence
  Cyclic GFR-binding peptide
  MOD_RES (5)..(6)..(38)..(40): Xaa is C or S
IPKAXXVPTELSPISMLYIDEYDKVVYKQYEEMVVEGXGXR

SEQ ID NO: 39406 - protein, 33 aa, Artificial Sequence
  Cyclic GFR-binding peptide
  MOD_RES (31)..(33): Xaa is C or S
PTKLSPISILYKDKGVVTYLKYHYGMAVSEXGX

SEQ ID NO: 39407 - protein, 28 aa, Artificial Sequence
  Cyclic GFR-binding peptide
ELEPISMLYLDEYDKVVKFKYEEMVVEG

SEQ ID NO: 39408 - protein, 26 aa, Artificial Sequence
  Cyclic GFR-binding peptide
TELSPISMLYIDEYDKVVYKQYEEMV

SEQ ID NO: 39409 - protein, 28 aa, Artificial Sequence
  Cyclic GFR-binding peptide
  MOD_RES (2)..(3): Xaa is C or S
PXXVPQDLNAISILYFVGRTPKVLKKYR

SEQ ID NO: 39410 - protein, 34 aa, Artificial Sequence; identical to SEQ ID NO: 10515
  Cyclic GFR-binding peptide
  MOD_RES (31)..(33): Xaa is C or S

SEQ ID NO: 39411 - protein, 31 aa, Artificial Sequence
  Cyclic GFR-binding peptide
  MOD_RES (5)..(6): Xaa is C or S
SASPXXVSQDLEPISILYLIGKTPKIKFKYE

SEQ ID NO: 39412 - protein, 27 aa, Artificial Sequence
  Cyclic GFR-binding peptide
LSPISVLYKDDSSNVILKYHYNMVVRA

SEQ ID NO: 39413 - protein, 33 aa, Artificial Sequence
  Cyclic GFR-binding peptide
  MOD_RES (30)..(32): Xaa is C or S
PQDLEPISILYLVGRTPKVKFKYEMVVKSXKXS

SEQ ID NO: 39414 - protein, 34 aa, Artificial Sequence
  Cyclic GFR-binding peptide
  MOD_RES (5)..(6): Xaa is C or S
VPKAXXAPTKLEPISVLYLDSSNNVIKFKYENMV

SEQ ID NO: 39415 - protein, 32 aa, Artificial Sequence; identical to SEQ ID NO: 10517
  Cyclic GFR-binding peptide
  MOD_RES (3)..(4): Xaa is C or S

SEQ ID NO: 39416 - protein, 36 aa, Artificial Sequence
  Cyclic GFR-binding peptide
  MOD_RES (4)..(5): Xaa is C or S
PASXXVPARLNAISILYFDAANNVVLKKYRDMVVEA

SEQ ID NO: 39417 - protein, 29 aa, Artificial Sequence
  Cyclic GFR-binding peptide
PARLSPISILYKDAANNVVLKYHYDMVVE

SEQ ID NO: 39418 - protein, 22 aa, Artificial Sequence
  Cyclic GFR-binding peptide
KLEPISVLYLDDSSNVIKFKYE

SEQ ID NO: 39419 - protein, 40 aa, Artificial Sequence
  Cyclic GFR-binding peptide
  MOD_RES (4)..(5)..(37)..(39): Xaa is C or S
PKAXXVPTELSPISMLYIDENEKVVYKQYEDMVVEGXGXR

SEQ ID NO: 39420 - protein, 32 aa, Artificial Sequence
  Cyclic GFR-binding peptide
  MOD_RES (1)..(1): Xaa is C or S
XVPARLNAISILYFDAANNVVLKKYRDMVVEA

SEQ ID NO: 39421 - protein, 37 aa, Artificial Sequence; identical to SEQ ID NO: 10521
  Cyclic GFR-binding peptide
  MOD_RES (2)..(3)..(35)..(37): Xaa is C or S

SEQ ID NO: 39422 - protein, 31 aa, Artificial Sequence
  Cyclic GFR-binding peptide
  MOD_RES (2)..(3): Xaa is C or S
PXXVPQALEPISILYLVGRKPKVKFKYEMIV

SEQ ID NO: 39423 - protein, 30 aa, Artificial Sequence; identical to SEQ ID NO: 10522
  Cyclic GFR-binding peptide
  MOD_RES (28)..(30): Xaa is C or S

SEQ ID NO: 39424 - protein, 25 aa, Artificial Sequence
  Cyclic GFR-binding peptide
QDLSPISILYKVGRTPKVLKYHYMV

SEQ ID NO: 39425 - protein, 36 aa, Artificial Sequence
  Cyclic GFR-binding peptide
  MOD_RES (3)..(4)..(35): Xaa is C or S
SPXXVSQDLEPISILYLIGKTPKIKFKYEMIVKSXK

SEQ ID NO: 39426 - protein, 37 aa, Artificial Sequence
  Cyclic GFR-binding peptide
  MOD_RES (4)..(5)..(37): Xaa is C or S
PASXXVPARLEPISILYLDAANNVVKFKYEDMVVEAX

SEQ ID NO: 39427 - protein, 38 aa, Artificial Sequence
  Cyclic GFR-binding peptide
  MOD_RES (5)..(6)..(38): Xaa is C or S
ASKAXXVPTKLSPISILYKDKGVVTYLKYHYGMAVSEX

SEQ ID NO: 39428 - protein, 27 aa, Artificial Sequence
  Cyclic GFR-binding peptide
LSPISVLYKDDSSNVILKYHYNMVVRS

SEQ ID NO: 39429 - protein, 25 aa, Artificial Sequence
  Cyclic GFR-binding peptide
NAISILYFDKGVVTYLKKYRGMAVS

SEQ ID NO: 39430 - protein, 30 aa, Artificial Sequence
  Cyclic GFR-binding peptide
  MOD_RES (28)..(30): Xaa is C or S
LSPISVLYIDDSSNVIYKQYENMVVRAXGX

SEQ ID NO: 39431 - protein, 40 aa, Artificial Sequence; identical to SEQ ID NO: 10528
  Cyclic GFR-binding peptide
  MOD_RES (5)..(6)..(38)..(40): Xaa is C or S

SEQ ID NO: 39432 - protein, 27 aa, Artificial Sequence
  Cyclic GFR-binding peptide
PTKLNAISVLYFDDMGVPTLKKYREGM

SEQ ID NO: 39433 - protein, 32 aa, Artificial Sequence
  Cyclic GFR-binding peptide
  MOD_RES (29)..(31): Xaa is C or S
KLSPISILYIDKGVVTYYKQYEGMAVSEXGXR

SEQ ID NO: 39434 - protein, 26 aa, Artificial Sequence
  Cyclic GFR-binding peptide
LNAISILYFIGKTPKILKKYRMIVKS

SEQ ID NO: 39435 - protein, 26 aa, Artificial Sequence
  Cyclic GFR-binding peptide
PQALSPISILYKVGRKPKVLKYHYMI

SEQ ID NO: 39436 - protein, 33 aa, Artificial Sequence
  Cyclic GFR-binding peptide
  MOD_RES (4)..(5): Xaa is C or S
PKPXXAPTQLSPISVLYIDDSSNVIYKQYENMV

SEQ ID NO: 39437 - protein, 31 aa, Artificial Sequence
  Cyclic GFR-binding peptide
  MOD_RES (31)..(31): Xaa is C or S
PTELSPISMLYIDEYDKVVYKQYEEMVVEGX

SEQ ID NO: 39438 - protein, 33 aa, Artificial Sequence
  Cyclic GFR-binding peptide
  MOD_RES (33)..(33): Xaa is C or S
VPTKLSPISVLYIDDMGVPTYKQYEEGMSVAEX

SEQ ID NO: 39439 - protein, 36 aa, Artificial Sequence; identical to SEQ ID NO: 10538
  Cyclic GFR-binding peptide
  MOD_RES (7)..(7): Xaa is C or S

SEQ ID NO: 39440 - protein, 33 aa, Artificial Sequence; identical to SEQ ID NO: 10541
  Cyclic GFR-binding peptide
  MOD_RES (3)..(4): Xaa is C or S

SEQ ID NO: 39441 - protein, 29 aa, Artificial Sequence
  Cyclic GFR-binding peptide
  MOD_RES (28)..(28): Xaa is C or S
EPISVLYLDDMGVPTKFKYEEGMSVAEXG

SEQ ID NO: 39442 - protein, 33 aa, Artificial Sequence
  Cyclic GFR-binding peptide
  MOD_RES (5)..(6): Xaa is C or S
SASPXXVPQDLSPISILYIVGRTPKVYKQYEMV

SEQ ID NO: 39443 - protein, 32 aa, Artificial Sequence; identical to SEQ ID NO: 10545
  Cyclic GFR-binding peptide
  MOD_RES (30)..(32): Xaa is C or S

SEQ ID NO: 39444 - protein, 28 aa, Artificial Sequence
  Cyclic GFR-binding peptide
  MOD_RES (27)..(27): Xaa is C or S
LEPISILYLVGRTPKVKFKYEMVVKSXK

SEQ ID NO: 39445 - protein, 35 aa, Artificial Sequence
  Cyclic GFR-binding peptide
  MOD_RES (6)..(7): Xaa is C or S
SIPKAXXVPTELSPISMLYIDEYDKVVYKQYEEMV

SEQ ID NO: 39446 - protein, 33 aa, Artificial Sequence
  Cyclic GFR-binding peptide
  MOD_RES (3)..(4): Xaa is C or S
KAXXVPTELEPISMLYLDEYDKVVKFKYEEMVV

SEQ ID NO: 39447 - protein, 32 aa, Artificial Sequence
  Cyclic GFR-binding peptide
  MOD_RES (3)..(4): Xaa is C or S
KAXXVPTKLEPISVLYLDDMGVPTKFKYEEGM

SEQ ID NO: 39448 - protein, 34 aa, Artificial Sequence; identical to SEQ ID NO: 10547
  Cyclic GFR-binding peptide
  MOD_RES (2)..(3)..(34): Xaa is C or S

SEQ ID NO: 39449 - protein, 26 aa, Artificial Sequence
  Cyclic GFR-binding peptide
LNAISILYFDKGVVTYLKKYRGMAVS

SEQ ID NO: 39450 - protein, 32 aa, Artificial Sequence; identical to SEQ ID NO: 10548
  Cyclic GFR-binding peptide
  MOD_RES (6)..(7): Xaa is C or S

SEQ ID NO: 39451 - protein, 33 aa, Artificial Sequence
  Cyclic GFR-binding peptide
  MOD_RES (30)..(32): Xaa is C or S
ARLNAISILYFDAANNVVLKKYRDMVVEAXGXR

SEQ ID NO: 39452 - protein, 35 aa, Artificial Sequence
  Cyclic GFR-binding peptide
  MOD_RES (3)..(4): Xaa is C or S
KPXXAPTKLSPISVLYIDDSSNVIYKQYENMVVRS

SEQ ID NO: 39453 - protein, 25 aa, Artificial Sequence
  Cyclic GFR-binding peptide
QALEPISILYLVGRKPKVKFKYEMI

SEQ ID NO: 39454 - protein, 32 aa, Artificial Sequence
  Cyclic GFR-binding peptide
  MOD_RES (30)..(32): Xaa is C or S
KLSPISVLYIDDMGVPTYKQYEEGMSVAEXGX

SEQ ID NO: 39455 - protein, 31 aa, Artificial Sequence
  Cyclic GFR-binding peptide
  MOD_RES (5)..(6): Xaa is C or S
VGKAXXVPTKLSPISVLYIDDMGVPTYKQYE

SEQ ID NO: 39456 - protein, 26 aa, Artificial Sequence
  Cyclic GFR-binding peptide
TELNAISMLYFDENEKVVLKKYRDMV

SEQ ID NO: 39457 - protein, 37 aa, Artificial Sequence
  Cyclic GFR-binding peptide
  MOD_RES (2)..(3)..(35)..(37): Xaa is C or S
AXXVPTELEPISMLYLDEYDKVVKFKYEEMVVEGXGX

SEQ ID NO: 39458 - protein, 35 aa, Artificial Sequence
  Cyclic GFR-binding peptide
  MOD_RES (2)..(3): Xaa is C or S
AXXVPTKLSPISVLYIDDMGVPTYKQYEEGMSVAE

SEQ ID NO: 39459 - protein, 28 aa, Artificial Sequence
  Cyclic GFR-binding peptide
QALSPISILYIVGRKPKVYKQYEMIVRS

SEQ ID NO: 39460 - protein, 27 aa, Artificial Sequence
  Cyclic GFR-binding peptide
PTKLNAISVLYFDSSNNVILKKYRNMV

SEQ ID NO: 39461 - protein, 22 aa, Artificial Sequence
  Cyclic GFR-binding peptide
SPISILYKVGRKPKVLKYHYMI

SEQ ID NO: 39462 - protein, 28 aa, Artificial Sequence
  Cyclic GFR-binding peptide
  MOD_RES (3)..(3): Xaa is C or S
PTXAPTKLEPISVLYLDDSSNVIKFKYE

SEQ ID NO: 39463 - protein, 33 aa, Artificial Sequence; identical to SEQ ID NO: 10555
  Cyclic GFR-binding peptide
  MOD_RES (1)..(33): Xaa is C or S

SEQ ID NO: 39464 - protein, 32 aa, Artificial Sequence; identical to SEQ ID NO: 10556
  Cyclic GFR-binding peptide
  MOD_RES (5)..(6): Xaa is C or S

SEQ ID NO: 39465 - protein, 27 aa, Artificial Sequence
  Cyclic GFR-binding peptide
  MOD_RES (1)..(1): Xaa is C or S
XVSQDLSPISILYKIGKTPKILKYHYM

SEQ ID NO: 39466 - protein, 22 aa, Artificial Sequence
  Cyclic GFR-binding peptide
ELSPISMLYIDENEKVVYKQYE

SEQ ID NO: 39467 - protein, 29 aa, Artificial Sequence
  Cyclic GFR-binding peptide
  MOD_RES (1)..(1): Xaa is C or S
XVPQALSPISILYKVGRKPKVLKYHYMIV

SEQ ID NO: 39468 - protein, 41 aa, Artificial Sequence
  Cyclic GFR-binding peptide
  MOD_RES (5)..(6)..(39)..(41): Xaa is C or S
VGKAXXVPTKLEPISVLYLDDMGVPTKFKYEEGMSVAEXGX

SEQ ID NO: 39469 - protein, 34 aa, Artificial Sequence
  Cyclic GFR-binding peptide
  MOD_RES (4)..(5): Xaa is C or S
PASXXVPARLEPISILYLDAANNVVKFKYEDMVV

SEQ ID NO: 39470 - protein, 42 aa, Artificial Sequence
  Cyclic GFR-binding peptide
  MOD_RES (7)..(39)..(41): Xaa is C or S
HVTKPTXAPTKLEPISVLYLDDSSNVIKFKYENMVVRSXGXH

SEQ ID NO: 39471 - protein, 42 aa, Artificial Sequence
  Cyclic GFR-binding peptide
  MOD_RES (7)..(39)..(41): Xaa is C or S
HVTKPTXAPTKLSPISVLYIDDSSNVIYKQYENMVVRSXGXH

SEQ ID NO: 39472 - protein, 23 aa, Artificial Sequence
  Cyclic GFR-binding peptide
ELSPISMLYIDEYDKVVYKQYEE

SEQ ID NO: 39473 - protein, 31 aa, Artificial Sequence; identical to SEQ ID NO: 10563
  Cyclic GFR-binding peptide
  MOD_RES (29)..(31): Xaa is C or S

SEQ ID NO: 39474 - protein, 32 aa, Artificial Sequence; identical to SEQ ID NO: 10564
  Cyclic GFR-binding peptide
  MOD_RES (3)..(4): Xaa is C or S

SEQ ID NO: 39475 - protein, 28 aa, Artificial Sequence
  Cyclic GFR-binding peptide
  MOD_RES (2)..(3): Xaa is C or S
AXXAPTKLSPISVLYKDSSNNVILKYHY

SEQ ID NO: 39476 - protein, 31 aa, Artificial Sequence
  Cyclic GFR-binding peptide
  MOD_RES (31)..(31): Xaa is C or S
PARLNAISILYFDAANNVVLKKYRDMVVEAX

SEQ ID NO: 39477 - protein, 35 aa, Artificial Sequence; identical to SEQ ID NO: 10569
  Cyclic GFR-binding peptide
  MOD_RES (6)..(7): Xaa is C or S

SEQ ID NO: 39478 - protein, 39 aa, Artificial Sequence; identical to SEQ ID NO: 10570
  Cyclic GFR-binding peptide
  MOD_RES (3)..(4)..(36)..(38): Xaa is C or S

SEQ ID NO: 39479 - protein, 31 aa, Artificial Sequence
  Cyclic GFR-binding peptide
  MOD_RES (31)..(31): Xaa is C or S
PARLSPISILYKDAANNVVLKYHYDMVVEAX

SEQ ID NO: 39480 - protein, 24 aa, Artificial Sequence
  Cyclic GFR-binding peptide
ELSPISMLYIDEYDKVVYKQYEEM

SEQ ID NO: 39481 - protein, 26 aa, Artificial Sequence
  Cyclic GFR-binding peptide
  MOD_RES (1)..(1): Xaa is C or S
XVPTELSPISMLYIDEYDKVVYKQYE

SEQ ID NO: 39482 - protein, 29 aa, Artificial Sequence
  Cyclic GFR-binding peptide
  MOD_RES (28)..(28): Xaa is C or S
DLSPISILYKIGKTPKILKYHYMIVKSXK

SEQ ID NO: 39483 - protein, 27 aa, Artificial Sequence
  Cyclic GFR-binding peptide
QALEPISILYLVGRKPKVKFKYEMIVR

SEQ ID NO: 39484 - protein, 26 aa, Artificial Sequence
  Cyclic GFR-binding peptide
  MOD_RES (1)..(1): Xaa is C or S
XVPARLNAISILYFDAANNVVLKKYR

SEQ ID NO: 39485 - protein, 40 aa, Artificial Sequence
  Cyclic GFR-binding peptide
  MOD_RES (5)..(6)..(37)..(39): Xaa is C or S
SASPXXVSQDLSPISILYIIGKTPKIYKQYEMIVKSXKXS

SEQ ID NO: 39486 - protein, 38 aa, Artificial Sequence
  Cyclic GFR-binding peptide
  MOD_RES (6)..(38): Xaa is C or S
VTKPTXAPTKLSPISVLYIDDSSNVIYKQYENMVVRSX

SEQ ID NO: 39487 - protein, 30 aa, Artificial Sequence
  Cyclic GFR-binding peptide
PTQLEPISVLYLDDSSNVIKFKYENMVVRA

SEQ ID NO: 39488 - protein, 32 aa, Artificial Sequence
  Cyclic GFR-binding peptide
  MOD_RES (31)..(31): Xaa is C or S
PTKLEPISVLYLDSSNNVIKFKYENMVVKAXG

SEQ ID NO: 39489 - protein, 29 aa, Artificial Sequence
  Cyclic GFR-binding peptide
  MOD_RES (2)..(3): Xaa is C or S
PXXVPQDLSPISILYKVGRTPKVLKYHYM

SEQ ID NO: 39490 - protein, 33 aa, Artificial Sequence; identical to SEQ ID NO: 10579
  Cyclic GFR-binding peptide
  MOD_RES (5)..(6): Xaa is C or S

SEQ ID NO: 39491 - protein, 35 aa, Artificial Sequence
  Cyclic GFR-binding peptide
  MOD_RES (5)..(6): Xaa is C or S
IPKAXXVPTELSPISMLYIDEYDKVVYKQYEEMVV

SEQ ID NO: 39492 - protein, 30 aa, Artificial Sequence
  Cyclic GFR-binding peptide
APTKLSPISVLYIDDSSNVIYKQYENMVVR

SEQ ID NO: 39493 - protein, 30 aa, Artificial Sequence
  Cyclic GFR-binding peptide
  MOD_RES (1)..(2): Xaa is C or S
XXVPARLNAISILYFDAANNVVLKKYRDMV

SEQ ID NO: 39494 - protein, 39 aa, Artificial Sequence
  Cyclic GFR-binding peptide
  MOD_RES (4)..(5)..(36)..(38): Xaa is C or S
ASPXXVPQDLEPISILYLVGRTPKVKFKYEMVVKSXKXS

SEQ ID NO: 39495 - protein, 38 aa, Artificial Sequence; identical to SEQ ID NO: 10582
  Cyclic GFR-binding peptide
  MOD_RES (5)..(6)..(37): Xaa is C or S

SEQ ID NO: 39496 - protein, 25 aa, Artificial Sequence
  Cyclic GFR-binding peptide
NAISILYFVGRKPKVLKKYRMIVRS

SEQ ID NO: 39497 - protein, 38 aa, Artificial Sequence
  Cyclic GFR-binding peptide
  MOD_RES (5)..(6): Xaa is C or S
VGKAXXVPTKLEPISVLYLDDMGVPTKFKYEEGMSVAE

SEQ ID NO: 39498 - protein, 40 aa, Artificial Sequence
  Cyclic GFR-binding peptide
  MOD_RES (6)..(7)..(39): Xaa is C or S
YVPKPXXAPTKLEPISVLYLDDSSNVIKFKYENMVVRSXG

SEQ ID NO: 39499 - protein, 26 aa, Artificial Sequence
  Cyclic GFR-binding peptide
  MOD_RES (26)..(26): Xaa is C or S
EPISILYLVGRKPKVKFKYEMIVRSX

SEQ ID NO: 39500 - protein, 32 aa, Artificial Sequence
  Cyclic GFR-binding peptide
  MOD_RES (29)..(31): Xaa is C or S
KLEPISVLYLDDSSNVIKFKYENMVVRSXGXH

SEQ ID NO: 39501 - protein, 29 aa, Artificial Sequence
  Cyclic GFR-binding peptide
  MOD_RES (1)..(2): Xaa is C or S
XXVPTKLEPISVLYLDDMGVPTKFKYEEG

SEQ ID NO: 39502 - protein, 36 aa, Artificial Sequence; identical to SEQ ID NO: 10590
  Cyclic GFR-binding peptide
  MOD_RES (1)..(33)..(35): Xaa is C or S

SEQ ID NO: 39503 - protein, 31 aa, Artificial Sequence
  Cyclic GFR-binding peptide
VPARLEPISILYLDAANNVVKFKYEDMVVEA

SEQ ID NO: 39504 - protein, 31 aa, Artificial Sequence; identical to SEQ ID NO: 10591
  Cyclic GFR-binding peptide
  MOD_RES (29)..(31): Xaa is C or S

SEQ ID NO: 39505 - protein, 32 aa, Artificial Sequence
  Cyclic GFR-binding peptide
  MOD_RES (31)..(31): Xaa is C or S
PTKLSPISILYKDKGVVTYLKYHYGMAVSEXG

SEQ ID NO: 39506 - protein, 37 aa, Artificial Sequence; identical to SEQ ID NO: 10593
  Cyclic GFR-binding peptide
  MOD_RES (4)..(5)..(36): Xaa is C or S

SEQ ID NO: 39507 - protein, 29 aa, Artificial Sequence
  Cyclic GFR-binding peptide
  MOD_RES (26)..(28): Xaa is C or S
EPISILYLIGKTPKIKFKYEMIVKSXKXS

SEQ ID NO: 39508 - protein, 34 aa, Artificial Sequence; identical to SEQ ID NO: 10595
  Cyclic GFR-binding peptide
  MOD_RES (3)..(4): Xaa is C or S

SEQ ID NO: 39509 - protein, 34 aa, Artificial Sequence
  Cyclic GFR-binding peptide
  MOD_RES (32)..(34): Xaa is C or S
APTKLSPISVLYIDSSNNVIYKQYENMVVKAXGX

SEQ ID NO: 39510 - protein, 29 aa, Artificial Sequence
  Cyclic GFR-binding peptide
  MOD_RES (1)..(2): Xaa is C or S
XXVPTELEPISMLYLDEYDKVVKFKYEEM

SEQ ID NO: 39511 - protein, 26 aa, Artificial Sequence
  Cyclic GFR-binding peptide
VSQDLEPISILYLIGKTPKIKFKYEM

SEQ ID NO: 39512 - protein, 30 aa, Artificial Sequence; identical to SEQ ID NO: 10596
  Cyclic GFR-binding peptide
  MOD_RES (29)..(29): Xaa is C or S

SEQ ID NO: 39513 - protein, 23 aa, Artificial Sequence
  Cyclic GFR-binding peptide
QLEPISVLYLDDSSNVIKFKYEN

SEQ ID NO: 39514 - protein, 29 aa, Artificial Sequence
  Cyclic GFR-binding peptide
  MOD_RES (3)..(4): Xaa is C or S
APXXVPQALSPISILYKVGRKPKVLKYHY

SEQ ID NO: 39515 - protein, 33 aa, Artificial Sequence
  Cyclic GFR-binding peptide
  MOD_RES (32)..(32): Xaa is C or S
VPTELSPISMLYIDENEKVVYKQYEDMVVEGXG

SEQ ID NO: 39516 - protein, 24 aa, Artificial Sequence
  Cyclic GFR-binding peptide
QALSPISILYKVGRKPKVLKYHYM

SEQ ID NO: 39517 - protein, 21 aa, Artificial Sequence
  Cyclic GFR-binding peptide
EPISMLYLDEYDKVVKFKYEE

SEQ ID NO: 39518 - protein, 28 aa, Artificial Sequence
  Cyclic GFR-binding peptide
  MOD_RES (1)..(1): Xaa is C or S
XAPTKLSPISVLYIDSSNNVIYKQYENM

SEQ ID NO: 39519 - protein, 33 aa, Artificial Sequence; identical to SEQ ID NO: 10604
  Cyclic GFR-binding peptide
  MOD_RES (3)..(4): Xaa is C or S

SEQ ID NO: 39520 - protein, 26 aa, Artificial Sequence
  Cyclic GFR-binding peptide
PTQLSPISVLYKDDSSNVILKYHYNM

SEQ ID NO: 39521 - protein, 34 aa, Artificial Sequence
  Cyclic GFR-binding peptide
  MOD_RES (1)..(2)..(34): Xaa is C or S
XXVPTELEPISMLYLDENEKVVKFKYEDMVVEGX

SEQ ID NO: 39522 - protein, 27 aa, Artificial Sequence
  Cyclic GFR-binding peptide
PTKLSPISILYIDKGVVTYYKQYEGMA

SEQ ID NO: 39523 - protein, 30 aa, Artificial Sequence; identical to SEQ ID NO: 10606
  Cyclic GFR-binding peptide
  MOD_RES (3)..(4): Xaa is C or S

SEQ ID NO: 39524 - protein, 34 aa, Artificial Sequence
  Cyclic GFR-binding peptide
  MOD_RES (3)..(4): Xaa is C or S
KPXXAPTQLSPISVLYIDDSSNVIYKQYENMVVR

SEQ ID NO: 39525 - protein, 36 aa, Artificial Sequence
  Cyclic GFR-binding peptide
  MOD_RES (4)..(5)..(36): Xaa is C or S
AAPXXVPQALEPISILYLVGRKPKVKFKYEMIVRSX

SEQ ID NO: 39526 - protein, 36 aa, Artificial Sequence
  Cyclic GFR-binding peptide
  MOD_RES (3)..(4)..(36): Xaa is C or S
KAXXVPTELSPISMLYIDEYDKVVYKQYEEMVVEGX

SEQ ID NO: 39527 - protein, 23 aa, Artificial Sequence
  Cyclic GFR-binding peptide
LSPISILYIDKGVVTYYKQYEGM

SEQ ID NO: 39528 - protein, 30 aa, Artificial Sequence
  Cyclic GFR-binding peptide
  MOD_RES (1)..(1): Xaa is C or S
XVSQDLEPISILYLIGKTPKIKFKYEMIVK

SEQ ID NO: 39529 - protein, 30 aa, Artificial Sequence
  Cyclic GFR-binding peptide
  MOD_RES (29)..(29): Xaa is C or S
QALEPISILYLVGRKPKVKFKYEMIVRSXK

SEQ ID NO: 39530 - protein, 41 aa, Artificial Sequence; identical to SEQ ID NO: 10613
  Cyclic GFR-binding peptide
  MOD_RES (6)..(7)..(38)..(40): Xaa is C or S

SEQ ID NO: 39531 - protein, 23 aa, Artificial Sequence
  Cyclic GFR-binding peptide
KLSPISVLYIDDSSNVIYKQYEN

SEQ ID NO: 39532 - protein, 28 aa, Artificial Sequence
  Cyclic GFR-binding peptide
QDLSPISILYKVGRTPKVLKYHYMVVKS

SEQ ID NO: 39533 - protein, 38 aa, Artificial Sequence
  Cyclic GFR-binding peptide
  MOD_RES (6)..(7)..(38): Xaa is C or S
ASAAPXXVPQALEPISILYLVGRKPKVKFKYEMIVRSX

SEQ ID NO: 39534 - protein, 31 aa, Artificial Sequence; identical to SEQ ID NO: 10615
  Cyclic GFR-binding peptide
  MOD_RES (2)..(3): Xaa is C or S

SEQ ID NO: 39535 - protein, 30 aa, Artificial Sequence; identical to SEQ ID NO: 10617
  Cyclic GFR-binding peptide
  MOD_RES (28)..(30): Xaa is C or S

SEQ ID NO: 39536 - protein, 31 aa, Artificial Sequence
  Cyclic GFR-binding peptide
  MOD_RES (28)..(30): Xaa is C or S
SPISVLYIDDMGVPTYKQYEEGMSVAEXGXR

SEQ ID NO: 39537 - protein, 36 aa, Artificial Sequence
  Cyclic GFR-binding peptide
  MOD_RES (1)..(33)..(35): Xaa is C or S
XVPTELEPISMLYLDENEKVVKFKYEDMVVEGXGXR

SEQ ID NO: 39538 - protein, 39 aa, Artificial Sequence; identical to SEQ ID NO: 10618
  Cyclic GFR-binding peptide
  MOD_RES (4)..(5)..(36)..(38): Xaa is C or S

SEQ ID NO: 39539 - protein, 29 aa, Artificial Sequence
  Cyclic GFR-binding peptide
  MOD_RES (1)..(1): Xaa is C or S
XVPTKLSPISILYIDKGVVTYYKQYEGMA

SEQ ID NO: 39540 - protein, 25 aa, Artificial Sequence
  Cyclic GFR-binding peptide
PTELEPISMLYLDENEKVVKFKYED

SEQ ID NO: 39541 - protein, 34 aa, Artificial Sequence
  Cyclic GFR-binding peptide
  MOD_RES (2)..(3): Xaa is C or S
AXXAPTKLEPISVLYLDSSNNVIKFKYENMVVKA

SEQ ID NO: 39542 - protein, 28 aa, Artificial Sequence
  Cyclic GFR-binding peptide
TKLEPISVLYLDSSNNVIKFKYENMVVK

SEQ ID NO: 39543 - protein, 33 aa, Artificial Sequence; identical to SEQ ID NO: 10624
  Cyclic GFR-binding peptide
  MOD_RES (6)..(7): Xaa is C or S

SEQ ID NO: 39544 - protein, 27 aa, Artificial Sequence
  Cyclic GFR-binding peptide
SPISVLYIDDMGVPTYKQYEEGMSVAE

SEQ ID NO: 39545 - protein, 31 aa, Artificial Sequence
  Cyclic GFR-binding peptide
  MOD_RES (29)..(31): Xaa is C or S
KLSPISILYKDKGVVTYLKYHYGMAVSEXGX

SEQ ID NO: 39546 - protein, 25 aa, Artificial Sequence
  Cyclic GFR-binding peptide
ELSPISMLYIDEYDKVVYKQYEEMV

SEQ ID NO: 39547 - protein, 37 aa, Artificial Sequence
  Cyclic GFR-binding peptide
  MOD_RES (6)..(7): Xaa is C or S
KVGKAXXVPTKLEPISVLYLDDMGVPTKFKYEEGMSV

SEQ ID NO: 39548 - protein, 29 aa, Artificial Sequence
  Cyclic GFR-binding peptide
VSQDLEPISILYLIGKTPKIKFKYEMIVK

SEQ ID NO: 39549 - protein, 21 aa, Artificial Sequence
  Cyclic GFR-binding peptide
LNAISILYFDKGVVTYLKKYR

SEQ ID NO: 39550 - protein, 36 aa, Artificial Sequence
  Cyclic GFR-binding peptide
  MOD_RES (6)..(7): Xaa is C or S
AVPKAXXAPTKLSPISVLYIDSSNNVIYKQYENMVV

SEQ ID NO: 39551 - protein, 40 aa, Artificial Sequence
  Cyclic GFR-binding peptide
  MOD_RES (6)..(7)..(38)..(40): Xaa is C or S
ASASPXXVSQDLEPISILYLIGKTPKIKFKYEMIVKSXKX

SEQ ID NO: 39552 - protein, 30 aa, Artificial Sequence
  Cyclic GFR-binding peptide
  MOD_RES (27)..(29): Xaa is C or S
EPISMLYLDEYDKVVKFKYEEMVVEGXGXR

SEQ ID NO: 39553 - protein, 25 aa, Artificial Sequence
  Cyclic GFR-binding peptide
LEPISVLYLDSSNNVIKFKYENMVV

SEQ ID NO: 39554 - protein, 41 aa, Artificial Sequence
  Cyclic GFR-binding peptide
  MOD_RES (6)..(7)..(39)..(41): Xaa is C or S
AVPKAXXAPTKLSPISVLYIDSSNNVIYKQYENMVVKAXGX

SEQ ID NO: 39555 - protein, 40 aa, Artificial Sequence; identical to SEQ ID NO: 10629
  Cyclic GFR-binding peptide
  MOD_RES (5)..(6)..(38)..(40): Xaa is C or S

SEQ ID NO: 39556 - protein, 30 aa, Artificial Sequence
  Cyclic GFR-binding peptide
  MOD_RES (1)..(2): Xaa is C or S
XXVPARLEPISILYLDAANNVVKFKYEDMV

SEQ ID NO: 39557 - protein, 35 aa, Artificial Sequence
  Cyclic GFR-binding peptide
  MOD_RES (2)..(34): Xaa is C or S
TXAPTKLEPISVLYLDDSSNVIKFKYENMVVRSXG

SEQ ID NO: 39558 - protein, 32 aa, Artificial Sequence; identical to SEQ ID NO: 10631
  Cyclic GFR-binding peptide
  MOD_RES (4)..(5): Xaa is C or S

SEQ ID NO: 39559 - protein, 32 aa, Artificial Sequence
  Cyclic GFR-binding peptide
  MOD_RES (5)..(6): Xaa is C or S
VGKAXXVPTKLEPISVLYLDDMGVPTKFKYEE

SEQ ID NO: 39560 - protein, 28 aa, Artificial Sequence
  Cyclic GFR-binding peptide
  MOD_RES (2)..(3): Xaa is C or S
AXXVPTELSPISMLYIDEYDKVVYKQYE

SEQ ID NO: 39561 - protein, 34 aa, Artificial Sequence; identical to SEQ ID NO: 10634
  Cyclic GFR-binding peptide
  MOD_RES (3)..(4): Xaa is C or S

SEQ ID NO: 39562 - protein, 36 aa, Artificial Sequence
  Cyclic GFR-binding peptide
  MOD_RES (4)..(5)..(36): Xaa is C or S
ASPXXVPQDLSPISILYIVGRTPKVYKQYEMVVKSX

SEQ ID NO: 39563 - protein, 30 aa, Artificial Sequence
  Cyclic GFR-binding peptide
  MOD_RES (29)..(29): Xaa is C or S
QDLSPISILYIVGRTPKVYKQYEMVVKSXK

SEQ ID NO: 39564 - protein, 26 aa, Artificial Sequence
  Cyclic GFR-binding peptide
  MOD_RES (1)..(1): Xaa is C or S
XVPQALSPISILYKVGRKPKVLKYHY

SEQ ID NO: 39565 - protein, 31 aa, Artificial Sequence
  Cyclic GFR-binding peptide
  MOD_RES (1)..(2): Xaa is C or S
XXAPTKLSPISVLYIDDSSNVIYKQYENMVV

SEQ ID NO: 39566 - protein, 31 aa, Artificial Sequence; identical to SEQ ID NO: 10640
  Cyclic GFR-binding peptide
  MOD_RES (29)..(31): Xaa is C or S

SEQ ID NO: 39567 - protein, 31 aa, Artificial Sequence
  Cyclic GFR-binding peptide
  MOD_RES (1)..(1): Xaa is C or S
XVPARLNAISILYFDAANNVVLKKYRDMVVE

SEQ ID NO: 39568 - protein, 35 aa, Artificial Sequence
  Cyclic GFR-binding peptide
  MOD_RES (3)..(4)..(35): Xaa is C or S
SPXXVSQDLEPISILYLIGKTPKIKFKYEMIVKSX

SEQ ID NO: 39569 - protein, 31 aa, Artificial Sequence
  Cyclic GFR-binding peptide
  MOD_RES (30)..(30): Xaa is C or S
TQLEPISVLYLDDSSNVIKFKYENMVVRAXG

SEQ ID NO: 39570 - protein, 31 aa, Artificial Sequence
  Cyclic GFR-binding peptide
  MOD_RES (29)..(31): Xaa is C or S
QDLSPISILYIIGKTPKIYKQYEMIVKSXKX

SEQ ID NO: 39571 - protein, 31 aa, Artificial Sequence
  Cyclic GFR-binding peptide
  MOD_RES (28)..(30): Xaa is C or S
LEPISVLYLDDSSNVIKFKYENMVVRAXGXH

SEQ ID NO: 39572 - protein, 36 aa, Artificial Sequence; identical to SEQ ID NO: 10645
  Cyclic GFR-binding peptide
  MOD_RES (5)..(6): Xaa is C or S

SEQ ID NO: 39573 - protein, 33 aa, Artificial Sequence
  Cyclic GFR-binding peptide
  MOD_RES (2)..(3): Xaa is C or S
PXXVSQDLEPISILYLIGKTPKIKFKYEMIVKS

SEQ ID NO: 39574 - protein, 25 aa, Artificial Sequence
  Cyclic GFR-binding peptide
EPISVLYLDDMGVPTKFKYEEGMSV

SEQ ID NO: 39575 - protein, 40 aa, Artificial Sequence
  Cyclic GFR-binding peptide
  MOD_RES (5)..(6)..(38)..(40): Xaa is C or S
APASXXVPARLNAISILYFDAANNVVLKKYRDMVVEAXGX

SEQ ID NO: 39576 - protein, 30 aa, Artificial Sequence
  Cyclic GFR-binding peptide
  MOD_RES (27)..(29): Xaa is C or S
NAISILYFDKGVVTYLKKYRGMAVSEXGXR

SEQ ID NO: 39577 - protein, 33 aa, Artificial Sequence; identical to SEQ ID NO: 10651
  Cyclic GFR-binding peptide
  MOD_RES (31)..(33): Xaa is C or S

SEQ ID NO: 39578 - protein, 29 aa, Artificial Sequence
  Cyclic GFR-binding peptide
VPARLNAISILYFDAANNVVLKKYRDMVV

SEQ ID NO: 39579 - protein, 26 aa, Artificial Sequence
  Cyclic GFR-binding peptide
TELEPISMLYLDENEKVVKFKYEDMV

SEQ ID NO: 39580 - protein, 24 aa, Artificial Sequence
  Cyclic GFR-binding peptide
TELEPISMLYLDENEKVVKFKYED

SEQ ID NO: 39581 - protein, 39 aa, Artificial Sequence
  Cyclic GFR-binding peptide
  MOD_RES (3)..(4)..(36)..(38): Xaa is C or S
KAXXVPTKLNAISILYFDKGVVTYLKKYRGMAVSEXGXR

SEQ ID NO: 39582 - protein, 29 aa, Artificial Sequence
  Cyclic GFR-binding peptide
  MOD_RES (1)..(1): Xaa is C or S
XVPTKLNAISVLYFDDMGVPTLKKYREGM

SEQ ID NO: 39583 - protein, 29 aa, Artificial Sequence
  Cyclic GFR-binding peptide
  MOD_RES (28)..(28): Xaa is C or S
LSPISMLYKDENEKVVLKYHYDMVVEGXG

SEQ ID NO: 39584 - protein, 35 aa, Artificial Sequence
  Cyclic GFR-binding peptide
  MOD_RES (1)..(33)..(35): Xaa is C or S
XVPTKLSPISILYKDKGVVTYLKYHYGMAVSEXGX

SEQ ID NO: 39585 - protein, 30 aa, Artificial Sequence; identical to SEQ ID NO: 10656
  Cyclic GFR-binding peptide
  MOD_RES (29)..(29): Xaa is C or S

SEQ ID NO: 39586 - protein, 33 aa, Artificial Sequence
  Cyclic GFR-binding peptide
  MOD_RES (6)..(7): Xaa is C or S
ASASPXXVPQDLEPISILYLVGRTPKVKFKYEM

SEQ ID NO: 39587 - protein, 30 aa, Artificial Sequence
  Cyclic GFR-binding peptide
VPTELEPISMLYLDENEKVVKFKYEDMVVE

SEQ ID NO: 39588 - protein, 36 aa, Artificial Sequence
  Cyclic GFR-binding peptide
  MOD_RES (3)..(4)..(36): Xaa is C or S
ASXXVPARLEPISILYLDAANNVVKFKYEDMVVEAX

SEQ ID NO: 39589 - protein, 41 aa, Artificial Sequence; identical to SEQ ID NO: 10658
  Cyclic GFR-binding peptide
  MOD_RES (5)..(6)..(38)..(40): Xaa is C or S

SEQ ID NO: 39590 - protein, 38 aa, Artificial Sequence
  Cyclic GFR-binding peptide
  MOD_RES (6)..(7): Xaa is C or S
SIPKAXXVPTELSPISMLYIDEYDKVVYKQYEEMVVEG

SEQ ID NO: 39591 - protein, 33 aa, Artificial Sequence
  Cyclic GFR-binding peptide
  MOD_RES (3)..(4): Xaa is C or S
SPXXVSQDLSPISILYIIGKTPKIYKQYEMIVK

SEQ ID NO: 39592 - protein, 35 aa, Artificial Sequence; identical to SEQ ID NO: 10660
  Cyclic GFR-binding peptide
  MOD_RES (6)..(7): Xaa is C or S

SEQ ID NO: 39593 - protein, 33 aa, Artificial Sequence
  Cyclic GFR-binding peptide
  MOD_RES (4)..(5): Xaa is C or S
PKPXXAPTKLSPISVLYIDDSSNVIYKQYENMV

SEQ ID NO: 39594 - protein, 37 aa, Artificial Sequence
  Cyclic GFR-binding peptide
  MOD_RES (2)..(3)..(35)..(37): Xaa is C or S
AXXVPTELEPISMLYLDENEKVVKFKYEDMVVEGXGX

SEQ ID NO: 39595 - protein, 27 aa, Artificial Sequence
  Cyclic GFR-binding peptide
  MOD_RES (1)..(1): Xaa is C or S
XVPQDLNAISILYFVGRTPKVLKKYRM

SEQ ID NO: 39596 - protein, 38 aa, Artificial Sequence
  Cyclic GFR-binding peptide
  MOD_RES (3)..(4)..(36)..(38): Xaa is C or S
ASXXVPARLNAISILYFDAANNVVLKKYRDMVVEAXGX

SEQ ID NO: 39597 - protein, 26 aa, Artificial Sequence
  Cyclic GFR-binding peptide
LEPISMLYLDEYDKVVKFKYEEMVVE

SEQ ID NO: 39598 - protein, 34 aa, Artificial Sequence; identical to SEQ ID NO: 10665
  Cyclic GFR-binding peptide
  MOD_RES (6)..(7): Xaa is C or S

SEQ ID NO: 39599 - protein, 25 aa, Artificial Sequence
  Cyclic GFR-binding peptide
PQALSPISILYKVGRKPKVLKYHYM

SEQ ID NO: 39600 - protein, 29 aa, Artificial Sequence
  Cyclic GFR-binding peptide
  MOD_RES (3)..(4): Xaa is C or S
KPXXAPTQLSPISVLYKDDSSNVILKYHY

SEQ ID NO: 39601 - protein, 33 aa, Artificial Sequence
  Cyclic GFR-binding peptide
  MOD_RES (6)..(7): Xaa is C or S
TVPKPXXAPTQLSPISVLYIDDSSNVIYKQYEN

SEQ ID NO: 39602 - protein, 28 aa, Artificial Sequence
  Cyclic GFR-binding peptide
  MOD_RES (2)..(3): Xaa is C or S
SXXVPARLEPISILYLDAANNVVKFKYE

SEQ ID NO: 39603 - protein, 31 aa, Artificial Sequence
  Cyclic GFR-binding peptide
APTQLSPISVLYIDDSSNVIYKQYENMVVRA

SEQ ID NO: 39604 - protein, 30 aa, Artificial Sequence
  Cyclic GFR-binding peptide
  MOD_RES (27)..(29): Xaa is C or S
SPISMLYIDEYDKVVYKQYEEMVVEGXGXR

SEQ ID NO: 39605 - protein, 32 aa, Artificial Sequence; identical to SEQ ID NO: 10674
  Cyclic GFR-binding peptide
  MOD_RES (2)..(3): Xaa is C or S

SEQ ID NO: 39606 - protein, 30 aa, Artificial Sequence; identical to SEQ ID NO: 10677
  Cyclic GFR-binding peptide

SEQ ID NO: 39607 - protein, 36 aa, Artificial Sequence
  Cyclic GFR-binding peptide
  MOD_RES (6)..(7): Xaa is C or S
AAPASXXVPARLNAISILYFDAANNVVLKKYRDMVV

SEQ ID NO: 39608 - protein, 27 aa, Artificial Sequence
  Cyclic GFR-binding peptide
LEPISVLYLDDSSNVIKFKYENMVVRS

SEQ ID NO: 39609 - protein, 23 aa, Artificial Sequence
  Cyclic GFR-binding peptide
KLSPISVLYIDDMGVPTYKQYEE

SEQ ID NO: 39610 - protein, 33 aa, Artificial Sequence
  Cyclic GFR-binding peptide
  MOD_RES (4)..(5): Xaa is C or S
GKAXXVPTKLSPISVLYIDDMGVPTYKQYEEGM

SEQ ID NO: 39611 - protein, 23 aa, Artificial Sequence
  Cyclic GFR-binding peptide
SPISILYKDKGVVTYLKYHYGMA

SEQ ID NO: 39612 - protein, 33 aa, Artificial Sequence
  Cyclic GFR-binding peptide
  MOD_RES (4)..(5): Xaa is C or S
ASPXXVPQDLEPISILYLVGRTPKVKFKYEMVV

SEQ ID NO: 39613 - protein, 31 aa, Artificial Sequence; identical to SEQ ID NO: 10682
  Cyclic GFR-binding peptide
  MOD_RES (1)..(2): Xaa is C or S

SEQ ID NO: 39614 - protein, 24 aa, Artificial Sequence
  Cyclic GFR-binding peptide
PQALSPISILYKVGRKPKVLKYHY

SEQ ID NO: 39615 - protein, 35 aa, Artificial Sequence; identical to SEQ ID NO: 10685
  Cyclic GFR-binding peptide
  MOD_RES (1)..(33)..(35): Xaa is C or S

SEQ ID NO: 39616 - protein, 37 aa, Artificial Sequence
  Cyclic GFR-binding peptide
  MOD_RES (5)..(6): Xaa is C or S
IPKAXXVPTELEPISMLYLDENEKVVKFKYEDMVVEG

SEQ ID NO: 39617 - protein, 33 aa, Artificial Sequence; identical to SEQ ID NO: 10686
  Cyclic GFR-binding peptide
  MOD_RES (5)..(6): Xaa is C or S

SEQ ID NO: 39618 - protein, 32 aa, Artificial Sequence
  Cyclic GFR-binding peptide
  MOD_RES (31)..(31): Xaa is C or S
PTKLSPISILYIDKGVVTYYKQYEGMAVSEXG

SEQ ID NO: 39619 - protein, 29 aa, Artificial Sequence
  Cyclic GFR-binding peptide
  MOD_RES (1)..(1): Xaa is C or S
XVPTELSPISMLYIDENEKVVYKQYEDMV

SEQ ID NO: 39620 - protein, 31 aa, Artificial Sequence
  Cyclic GFR-binding peptide
  MOD_RES (4)..(5): Xaa is C or S
PKAXXVPTELSPISMLYIDENEKVVYKQYED

SEQ ID NO: 39621 - protein, 26 aa, Artificial Sequence
  Cyclic GFR-binding peptide
  MOD_RES (1)..(1): Xaa is C or S
XAPTQLSPISVLYKDDSSNVILKYHY

SEQ ID NO: 39622 - protein, 26 aa, Artificial Sequence
  Cyclic GFR-binding peptide
ELSPISMLYKDEYDKVVLKYHYEMVV

SEQ ID NO: 39623 - protein, 27 aa, Artificial Sequence
  Cyclic GFR-binding peptide
  MOD_RES (1)..(1): Xaa is C or S
XAPTQLSPISVLYKDDSSNVILKYHYN

SEQ ID NO: 39624 - protein, 37 aa, Artificial Sequence; identical to SEQ ID NO: 10693
  Cyclic GFR-binding peptide
  MOD_RES (3)..(4)..(36): Xaa is C or S

SEQ ID NO: 39625 - protein, 27 aa, Artificial Sequence
  Cyclic GFR-binding peptide
PTELNAISMLYFDENEKVVLKKYRDMV

SEQ ID NO: 39626 - protein, 29 aa, Artificial Sequence
  Cyclic GFR-binding peptide
  MOD_RES (3)..(4): Xaa is C or S
KPXXAPTKLSPISVLYKDDSSNVILKYHY

SEQ ID NO: 39627 - protein, 27 aa, Artificial Sequence
  Cyclic GFR-binding peptide
  MOD_RES (27)..(27): Xaa is C or S
LNAISILYFIGKTPKILKKYRMIVKSX

SEQ ID NO: 39628 - protein, 33 aa, Artificial Sequence
  Cyclic GFR-binding peptide
  MOD_RES (4)..(5): Xaa is C or S
PKPXXAPTQLEPISVLYLDDSSNVIKFKYENMV

SEQ ID NO: 39629 - protein, 35 aa, Artificial Sequence; identical to SEQ ID NO: 10700
  Cyclic GFR-binding peptide
  MOD_RES (3)..(4)..(35): Xaa is C or S

SEQ ID NO: 39630 - protein, 34 aa, Artificial Sequence
  Cyclic GFR-binding peptide
  MOD_RES (1)..(2)..(34): Xaa is C or S
XXAPTQLSPISVLYIDDSSNVIYKQYENMVVRAX

SEQ ID NO: 39631 - protein, 29 aa, Artificial Sequence
  Cyclic GFR-binding peptide
  MOD_RES (3)..(4): Xaa is C or S
KAXXVPTELSPISMLYKDENEKVVLKYHY

SEQ ID NO: 39632 - protein, 35 aa, Artificial Sequence; identical to SEQ ID NO: 10702
  Cyclic GFR-binding peptide
  MOD_RES (2)..(3)..(34): Xaa is C or S

SEQ ID NO: 39633 - protein, 29 aa, Artificial Sequence
  Cyclic GFR-binding peptide
APTKLSPISVLYIDSSNNVIYKQYENMVV

SEQ ID NO: 39634 - protein, 22 aa, Artificial Sequence
  Cyclic GFR-binding peptide
SPISILYKVGRTPKVLKYHYMV

SEQ ID NO: 39635 - protein, 28 aa, Artificial Sequence
  Cyclic GFR-binding peptide
  MOD_RES (27)..(27): Xaa is C or S
SPISMLYKDEYDKVVLKYHYEMVVEGXG

SEQ ID NO: 39636 - protein, 32 aa, Artificial Sequence
  Cyclic GFR-binding peptide
  MOD_RES (6)..(7): Xaa is C or S
ASAAPXXVPQALEPISILYLVGRKPKVKFKYE

SEQ ID NO: 39637 - protein, 31 aa, Artificial Sequence
  Cyclic GFR-binding peptide
APTKLEPISVLYLDSSNNVIKFKYENMVVKA

SEQ ID NO: 39638 - protein, 32 aa, Artificial Sequence
  Cyclic GFR-binding peptide
  MOD_RES (30)..(32): Xaa is C or S
TKLSPISVLYIDSSNNVIYKQYENMVVKAXGX

SEQ ID NO: 39639 - protein, 38 aa, Artificial Sequence
  Cyclic GFR-binding peptide
  MOD_RES (4)..(5)..(37): Xaa is C or S
PKAXXVPTELEPISMLYLDEYDKVVKFKYEEMVVEGXG

SEQ ID NO: 39640 - protein, 26 aa, Artificial Sequence
  Cyclic GFR-binding peptide
  MOD_RES (26)..(26): Xaa is C or S
SPISILYKIGKTPKILKYHYMIVKSX

SEQ ID NO: 39641 - protein, 28 aa, Artificial Sequence
  Cyclic GFR-binding peptide
  MOD_RES (2)..(3): Xaa is C or S
SXXVPARLNAISILYFDAANNVVLKKYR

SEQ ID NO: 39642 - protein, 31 aa, Artificial Sequence; identical to SEQ ID NO: 10712
  Cyclic GFR-binding peptide

SEQ ID NO: 39643 - protein, 28 aa, Artificial Sequence
  Cyclic GFR-binding peptide
PTKLSPISILYKDKGVVTYLKYHYGMAV

SEQ ID NO: 39644 - protein, 27 aa, Artificial Sequence
  Cyclic GFR-binding peptide
NAISVLYFDDMGVPTLKKYREGMSVAE

SEQ ID NO: 39645 - protein, 32 aa, Artificial Sequence; identical to SEQ ID NO: 10714
  Cyclic GFR-binding peptide
  MOD_RES (2)..(3): Xaa is C or S

SEQ ID NO: 39646 - protein, 35 aa, Artificial Sequence
  Cyclic GFR-binding peptide
  MOD_RES (32)..(34): Xaa is C or S
VPARLNAISILYFDAANNVVLKKYRDMVVEAXGXR

SEQ ID NO: 39647 - protein, 25 aa, Artificial Sequence
  Cyclic GFR-binding peptide
QDLSPISILYKIGKTPKILKYHYMI

SEQ ID NO: 39648 - protein, 28 aa, Artificial Sequence
  Cyclic GFR-binding peptide
  MOD_RES (2)..(3): Xaa is C or S
PXXVPQDLSPISILYKVGRTPKVLKYHY

SEQ ID NO: 39649 - protein, 25 aa, Artificial Sequence
  Cyclic GFR-binding peptide
TELNAISMLYFDEYDKVVLKKYREM

SEQ ID NO: 39650 - protein, 23 aa, Artificial Sequence
  Cyclic GFR-binding peptide
NAISMLYFDENEKVVLKKYRDMV

SEQ ID NO: 39651 - protein, 38 aa, Artificial Sequence; identical to SEQ ID NO: 10721
  Cyclic GFR-binding peptide
  MOD_RES (3)..(4)..(35)..(37): Xaa is C or S

SEQ ID NO: 39652 - protein, 34 aa, Artificial Sequence
  Cyclic GFR-binding peptide
  MOD_RES (1)..(33): Xaa is C or S
XAPTQLEPISVLYLDDSSNVIKFKYENMVVRAXG

SEQ ID NO: 39653 - protein, 24 aa, Artificial Sequence
  Cyclic GFR-binding peptide
PARLSPISILYKDAANNVVLKYHY

SEQ ID NO: 39654 - protein, 32 aa, Artificial Sequence; identical to SEQ ID NO: 10723
  Cyclic GFR-binding peptide
  MOD_RES (1)..(1): Xaa is C or S

SEQ ID NO: 39655 - protein, 35 aa, Artificial Sequence
  Cyclic GFR-binding peptide
  MOD_RES (3)..(4): Xaa is C or S
KAXXVPTKLEPISVLYLDDMGVPTKFKYEEGMSVA

SEQ ID NO: 39656 - protein, 37 aa, Artificial Sequence
  Cyclic GFR-binding peptide
  MOD_RES (6)..(7): Xaa is C or S
AVPKAXXAPTKLEPISVLYLDSSNNVIKFKYENMVVK

SEQ ID NO: 39657 - protein, 28 aa, Artificial Sequence
  Cyclic GFR-binding peptide
  MOD_RES (2)..(3): Xaa is C or S
AXXVPTKLSPISILYIDKGVVTYYKQYE

SEQ ID NO: 39658 - protein, 39 aa, Artificial Sequence; identical to SEQ ID NO: 10725
  Cyclic GFR-binding peptide
  MOD_RES (5)..(6)..(38): Xaa is C or S

SEQ ID NO: 39659 - protein, 32 aa, Artificial Sequence; identical to SEQ ID NO: 10726
  Cyclic GFR-binding peptide
  MOD_RES (5)..(6): Xaa is C or S

SEQ ID NO: 39660 - protein, 30 aa, Artificial Sequence
  Cyclic GFR-binding peptide
  MOD_RES (30)..(30): Xaa is C or S
ARLSPISILYKDAANNVVLKYHYDMVVEAX

SEQ ID NO: 39661 - protein, 30 aa, Artificial Sequence
  Cyclic GFR-binding peptide
  MOD_RES (1)..(2): Xaa is C or S
XXVPTKLSPISILYKDKGVVTYLKYHYGMA

SEQ ID NO: 39662 - protein, 37 aa, Artificial Sequence; identical to SEQ ID NO: 10728
  Cyclic GFR-binding peptide
  MOD_RES (4)..(5)..(37): Xaa is C or S

SEQ ID NO: 39663 - protein, 37 aa, Artificial Sequence
  Cyclic GFR-binding peptide
  MOD_RES (1)..(34)..(36): Xaa is C or S
XVPTKLEPISVLYLDDMGVPTKFKYEEGMSVAEXGXR

SEQ ID NO: 39664 - protein, 36 aa, Artificial Sequence; identical to SEQ ID NO: 10729
  Cyclic GFR-binding peptide
  MOD_RES (1)..(2)..(34)..(36): Xaa is C or S

SEQ ID NO: 39665 - protein, 32 aa, Artificial Sequence; identical to SEQ ID NO: 10732
  Cyclic GFR-binding peptide
  MOD_RES (4)..(5): Xaa is C or S

SEQ ID NO: 39666 - protein, 38 aa, Artificial Sequence
  Cyclic GFR-binding peptide
  MOD_RES (6)..(7)..(38): Xaa is C or S
ASASPXXVSQDLEPISILYLIGKTPKIKFKYEMIVKSX

SEQ ID NO: 39667 - protein, 31 aa, Artificial Sequence
  Cyclic GFR-binding peptide
  MOD_RES (1)..(1): Xaa is C or S
XVPQDLSPISILYIVGRTPKVYKQYEMVVKS

SEQ ID NO: 39668 - protein, 25 aa, Artificial Sequence
  Cyclic GFR-binding peptide
DLEPISILYLIGKTPKIKFKYEMIV

SEQ ID NO: 39669 - protein, 36 aa, Artificial Sequence
  Cyclic GFR-binding peptide
  MOD_RES (33)..(35): Xaa is C or S
VPTKLSPISVLYIDDMGVPTYKQYEEGMSVAEXGXR

SEQ ID NO: 39670 - protein, 23 aa, Artificial Sequence
  Cyclic GFR-binding peptide
LNAISILYFDAANNVVLKKYRDM

SEQ ID NO: 39671 - protein, 27 aa, Artificial Sequence
  Cyclic GFR-binding peptide
  MOD_RES (27)..(27): Xaa is C or S
NAISMLYFDENEKVVLKKYRDMVVEGX

SEQ ID NO: 39672 - protein, 35 aa, Artificial Sequence; identical to SEQ ID NO: 10735
  Cyclic GFR-binding peptide
  MOD_RES (4)..(5): Xaa is C or S

SEQ ID NO: 39673 - protein, 30 aa, Artificial Sequence
  Cyclic GFR-binding peptide
  MOD_RES (3)..(4): Xaa is C or S
KPXXAPTKLEPISVLYLDDSSNVIKFKYEN

SEQ ID NO: 39674 - protein, 34 aa, Artificial Sequence
  Cyclic GFR-binding peptide
  MOD_RES (6)..(7): Xaa is C or S
KIPKAXXVPTELSPISMLYIDENEKVVYKQYEDM

SEQ ID NO: 39675 - protein, 31 aa, Artificial Sequence; identical to SEQ ID NO: 10739
  Cyclic GFR-binding peptide
  MOD_RES (28)..(30): Xaa is C or S

SEQ ID NO: 39676 - protein, 36 aa, Artificial Sequence
  Cyclic GFR-binding peptide
  MOD_RES (4)..(5): Xaa is C or S
SKAXXVPTKLSPISILYKDKGVVTYLKYHYGMAVSE

SEQ ID NO: 39677 - protein, 26 aa, Artificial Sequence
  Cyclic GFR-binding peptide
  MOD_RES (1)..(1): Xaa is C or S
XVPTELSPISMLYIDENEKVVYKQYE

SEQ ID NO: 39678 - protein, 28 aa, Artificial Sequence
  Cyclic GFR-binding peptide
  MOD_RES (1)..(2): Xaa is C or S
XXAPTQLSPISVLYKDDSSNVILKYHYN

SEQ ID NO: 39679 - protein, 35 aa, Artificial Sequence; identical to SEQ ID NO: 10743
  Cyclic GFR-binding peptide
  MOD_RES (6)..(7): Xaa is C or S

SEQ ID NO: 39680 - protein, 32 aa, Artificial Sequence
  Cyclic GFR-binding peptide
  MOD_RES (2)..(2): Xaa is C or S
TXAPTKLEPISVLYLDDSSNVIKFKYENMVVR

SEQ ID NO: 39681 - protein, 22 aa, Artificial Sequence
  Cyclic GFR-binding peptide
SPISILYIIGKTPKIYKQYEMI

SEQ ID NO: 39682 - protein, 33 aa, Artificial Sequence; identical to SEQ ID NO: 10746
  Cyclic GFR-binding peptide
  MOD_RES (5)..(6): Xaa is C or S

SEQ ID NO: 39683 - protein, 31 aa, Artificial Sequence; identical to SEQ ID NO: 10747
  Cyclic GFR-binding peptide
  MOD_RES (1)..(1): Xaa is C or S

SEQ ID NO: 39684 - protein, 34 aa, Artificial Sequence
  Cyclic GFR-binding peptide
  MOD_RES (6)..(7): Xaa is C or S
KVGKAXXVPTKLEPISVLYLDDMGVPTKFKYEEG

SEQ ID NO: 39685 - protein, 30 aa, Artificial Sequence
  Cyclic GFR-binding peptide
PARLNAISILYFDAANNVVLKKYRDMVVEA

SEQ ID NO: 39686 - protein, 34 aa, Artificial Sequence
  Cyclic GFR-binding peptide
  MOD_RES (2)..(34): Xaa is C or S
TXAPTKLSPISVLYIDDSSNVIYKQYENMVVRSX

SEQ ID NO: 39687 - protein, 22 aa, Artificial Sequence
  Cyclic GFR-binding peptide
EPISILYLVGRKPKVKFKYEMI

SEQ ID NO: 39688 - protein, 34 aa, Artificial Sequence; identical to SEQ ID NO: 10749
  Cyclic GFR-binding peptide
  MOD_RES (1)..(2)..(34): Xaa is C or S

SEQ ID NO: 39689 - protein, 31 aa, Artificial Sequence
  Cyclic GFR-binding peptide
  MOD_RES (5)..(6): Xaa is C or S
APASXXVPARLNAISILYFDAANNVVLKKYR

SEQ ID NO: 39690 - protein, 27 aa, Artificial Sequence
  Cyclic GFR-binding peptide
  MOD_RES (1)..(1): Xaa is C or S
XVPQALEPISILYLVGRKPKVKFKYEM

SEQ ID NO: 39691 - protein, 26 aa, Artificial Sequence
  Cyclic GFR-binding peptide
  MOD_RES (1)..(1): Xaa is C or S
XAPTKLNAISVLYFDSSNNVILKKYR

SEQ ID NO: 39692 - protein, 28 aa, Artificial Sequence
  Cyclic GFR-binding peptide
  MOD_RES (1)..(2): Xaa is C or S
XXVPQALEPISILYLVGRKPKVKFKYEM

SEQ ID NO: 39693 - protein, 31 aa, Artificial Sequence
  Cyclic GFR-binding peptide
  MOD_RES (1)..(1): Xaa is C or S
XVPARLSPISILYKDAANNVVLKYHYDMVVE

SEQ ID NO: 39694 - protein, 27 aa, Artificial Sequence
  Cyclic GFR-binding peptide
ELEPISMLYLDENEKVVKFKYEDMVVE

SEQ ID NO: 39695 - protein, 41 aa, Artificial Sequence; identical to SEQ ID NO: 10754
  Cyclic GFR-binding peptide
  MOD_RES (6)..(7)..(39)..(41): Xaa is C or S

SEQ ID NO: 39696 - protein, 28 aa, Artificial Sequence
  Cyclic GFR-binding peptide
  MOD_RES (1)..(2): Xaa is C or S
XXVPTELSPISMLYKDEYDKVVLKYHYE

SEQ ID NO: 39697 - protein, 26 aa, Artificial Sequence
  Cyclic GFR-binding peptide
LSPISILYKDKGVVTYLKYHYGMAVS

SEQ ID NO: 39698 - protein, 39 aa, Artificial Sequence; identical to SEQ ID NO: 10757
  Cyclic GFR-binding peptide
  MOD_RES (4)..(5)..(36)..(38): Xaa is C or S

SEQ ID NO: 39699 - protein, 22 aa, Artificial Sequence
  Cyclic GFR-binding peptide
KLNAISVLYFDSSNNVILKKYR

SEQ ID NO: 39700 - protein, 27 aa, Artificial Sequence
  Cyclic GFR-binding peptide
PTELEPISMLYLDEYDKVVKFKYEEMV

SEQ ID NO: 39701 - protein, 35 aa, Artificial Sequence
  Cyclic GFR-binding peptide
  MOD_RES (32)..(34): Xaa is C or S
PTKLEPISVLYLDDMGVPTKFKYEEGMSVAEXGXR

SEQ ID NO: 39702 - protein, 33 aa, Artificial Sequence; identical to SEQ ID NO: 10760
  Cyclic GFR-binding peptide
  MOD_RES (32)..(32): Xaa is C or S

SEQ ID NO: 39703 - protein, 37 aa, Artificial Sequence
  Cyclic GFR-binding peptide
  MOD_RES (5)..(6): Xaa is C or S
VPKAXXAPTKLSPISVLYIDSSNNVIYKQYENMVVKA

SEQ ID NO: 39704 - protein, 31 aa, Artificial Sequence
  Cyclic GFR-binding peptide
  MOD_RES (29)..(31): Xaa is C or S
LEPISVLYLDDMGVPTKFKYEEGMSVAEXGX

SEQ ID NO: 39705 - protein, 22 aa, Artificial Sequence
  Cyclic GFR-binding peptide
LSPISVLYIDDMGVPTYKQYEE

SEQ ID NO: 39706 - protein, 31 aa, Artificial Sequence; identical to SEQ ID NO: 10763
  Cyclic GFR-binding peptide
  MOD_RES (29)..(31): Xaa is C or S

SEQ ID NO: 39707 - protein, 21 aa, Artificial Sequence
  Cyclic GFR-binding peptide
LNAISMLYFDEYDKVVLKKYR

SEQ ID NO: 39708 - protein, 39 aa, Artificial Sequence
  Cyclic GFR-binding peptide
  MOD_RES (3)..(4)..(36)..(38): Xaa is C or S
KAXXVPTELEPISMLYLDEYDKVVKFKYEEMVVEGXGXR

SEQ ID NO: 39709 - protein, 27 aa, Artificial Sequence
  Cyclic GFR-binding peptide
TKLSPISVLYIDDMGVPTYKQYEEGMS

SEQ ID NO: 39710 - protein, 27 aa, Artificial Sequence
  Cyclic GFR-binding peptide
  MOD_RES (1)..(2): Xaa is C or S
XXVSQDLSPISILYKIGKTPKILKYHY

SEQ ID NO: 39711 - protein, 30 aa, Artificial Sequence
  Cyclic GFR-binding peptide
  MOD_RES (1)..(2): Xaa is C or S
XXVSQDLSPISILYIIGKTPKIYKQYEMIV

SEQ ID NO: 39712 - protein, 28 aa, Artificial Sequence
  Cyclic GFR-binding peptide
  MOD_RES (27)..(27): Xaa is C or S
EPISVLYLDDSSNVIKFKYENMVVRAXG

SEQ ID NO: 39713 - protein, 36 aa, Artificial Sequence
  Cyclic GFR-binding peptide
  MOD_RES (2)..(3)..(36): Xaa is C or S
AXXVPTKLEPISVLYLDDMGVPTKFKYEEGMSVAEX

SEQ ID NO: 39714 - protein, 31 aa, Artificial Sequence; identical to SEQ ID NO: 10770
  Cyclic GFR-binding peptide
  MOD_RES (1)..(1): Xaa is C or S

SEQ ID NO: 39715 - protein, 25 aa, Artificial Sequence
  Cyclic GFR-binding peptide
SPISILYIIGKTPKIYKQYEMIVKS

SEQ ID NO: 39716 - protein, 37 aa, Artificial Sequence; identical to SEQ ID NO: 10773
  Cyclic GFR-binding peptide
  MOD_RES (2)..(3)..(35)..(37): Xaa is C or S

SEQ ID NO: 39717 - protein, 37 aa, Artificial Sequence
  Cyclic GFR-binding peptide
  MOD_RES (5)..(6): Xaa is C or S
APASXXVPARLEPISILYLDAANNVVKFKYEDMVVEA

SEQ ID NO: 39718 - protein, 32 aa, Artificial Sequence
  Cyclic GFR-binding peptide
  MOD_RES (4)..(5): Xaa is C or S
PASXXVPARLSPISILYKDAANNVVLKYHYDM

SEQ ID NO: 39719 - protein, 32 aa, Artificial Sequence
  Cyclic GFR-binding peptide
  MOD_RES (30)..(32): Xaa is C or S
TELSPISMLYIDENEKVVYKQYEDMVVEGXGX

SEQ ID NO: 39720 - protein, 34 aa, Artificial Sequence; identical to SEQ ID NO: 10778
  Cyclic GFR-binding peptide
  MOD_RES (3)..(4): Xaa is C or S

SEQ ID NO: 39721 - protein, 34 aa, Artificial Sequence
  Cyclic GFR-binding peptide
  MOD_RES (4)..(5): Xaa is C or S
PKPXXAPTKLEPISVLYLDDSSNVIKFKYENMVV

SEQ ID NO: 39722 - protein, 34 aa, Artificial Sequence
  Cyclic GFR-binding peptide
  MOD_RES (6)..(7): Xaa is C or S
AAPASXXVPARLSPISILYKDAANNVVLKYHYDM

SEQ ID NO: 39723 - protein, 27 aa, Artificial Sequence
  Cyclic GFR-binding peptide
PTKLEPISVLYLDDMGVPTKFKYEEGM

SEQ ID NO: 39724 - protein, 25 aa, Artificial Sequence
  Cyclic GFR-binding peptide
EPISVLYLDSSNNVIKFKYENMVVK

SEQ ID NO: 39725 - protein, 24 aa, Artificial Sequence
  Cyclic GFR-binding peptide
PTKLEPISVLYLDDSSNVIKFKYE

SEQ ID NO: 39726 - protein, 30 aa, Artificial Sequence
  Cyclic GFR-binding peptide
  MOD_RES (29)..(29): Xaa is C or S
QLEPISVLYLDDSSNVIKFKYENMVVRAXG

SEQ ID NO: 39727 - protein, 31 aa, Artificial Sequence; identical to SEQ ID NO: 10784
  Cyclic GFR-binding peptide
  MOD_RES (4)..(5): Xaa is C or S

SEQ ID NO: 39728 - protein, 24 aa, Artificial Sequence
  Cyclic GFR-binding peptide
LNAISILYFVGRTPKVLKKYRMVV

SEQ ID NO: 39729 - protein, 33 aa, Artificial Sequence
  Cyclic GFR-binding peptide
  MOD_RES (32)..(32): Xaa is C or S
APTQLSPISVLYIDDSSNVIYKQYENMVVRAXG

SEQ ID NO: 39730 - protein, 37 aa, Artificial Sequence
  Cyclic GFR-binding peptide
  MOD_RES (1)..(2)..(34)..(36): Xaa is C or S
XXVPTELSPISMLYIDEYDKVVYKQYEEMVVEGXGXR

SEQ ID NO: 39731 - protein, 40 aa, Artificial Sequence
  Cyclic GFR-binding peptide
  MOD_RES (6)..(7)..(39): Xaa is C or S
AVPKAXXAPTKLSPISVLYIDSSNNVIYKQYENMVVKAXG

SEQ ID NO: 39732 - protein, 34 aa, Artificial Sequence
  Cyclic GFR-binding peptide
  MOD_RES (1)..(2)..(34): Xaa is C or S
XXAPTQLEPISVLYLDDSSNVIKFKYENMVVRAX

SEQ ID NO: 39733 - protein, 39 aa, Artificial Sequence
  Cyclic GFR-binding peptide
  MOD_RES (5)..(6)..(38): Xaa is C or S
APASXXVPARLNAISILYFDAANNVVLKKYRDMVVEAXG

SEQ ID NO: 39734 - protein, 23 aa, Artificial Sequence
  Cyclic GFR-binding peptide
SPISMLYIDENEKVVYKQYEDMV

SEQ ID NO: 39735 - protein, 31 aa, Artificial Sequence
  Cyclic GFR-binding peptide
  MOD_RES (1)..(2): Xaa is C or S
XXVPQALEPISILYLVGRKPKVKFKYEMIVR

SEQ ID NO: 39736 - protein, 30 aa, Artificial Sequence
  Cyclic GFR-binding peptide
  MOD_RES (4)..(5): Xaa is C or S
PKPXXAPTKLEPISVLYLDDSSNVIKFKYE

SEQ ID NO: 39737 - protein, 29 aa, Artificial Sequence
  Cyclic GFR-binding peptide
  MOD_RES (29)..(29): Xaa is C or S
QDLEPISILYLVGRTPKVKFKYEMVVKSX

SEQ ID NO: 39738 - protein, 35 aa, Artificial Sequence
  Cyclic GFR-binding peptide
  MOD_RES (2)..(3)..(35): Xaa is C or S
AXXAPTKLEPISVLYLDSSNNVIKFKYENMVVKAX

SEQ ID NO: 39739 - protein, 42 aa, Artificial Sequence
  Cyclic GFR-binding peptide
  MOD_RES (6)..(7)..(39)..(41): Xaa is C or S
KIPKAXXVPTELEPISMLYLDENEKVVKFKYEDMVVEGXGXR

SEQ ID NO: 39740 - protein, 23 aa, Artificial Sequence
  Cyclic GFR-binding peptide
LSPISVLYKDDSSNVILKYHYNM

SEQ ID NO: 39741 - protein, 25 aa, Artificial Sequence
  Cyclic GFR-binding peptide
VPTELNAISMLYFDEYDKVVLKKYR

SEQ ID NO: 39742 - protein, 30 aa, Artificial Sequence
  Cyclic GFR-binding peptide
VPTELEPISMLYLDEYDKVVKFKYEEMVVE

SEQ ID NO: 39743 - protein, 29 aa, Artificial Sequence
  Cyclic GFR-binding peptide
PQALSPISILYKVGRKPKVLKYHYMIVRS

SEQ ID NO: 39744 - protein, 29 aa, Artificial Sequence
  Cyclic GFR-binding peptide
VPARLSPISILYKDAANNVVLKYHYDMVV

SEQ ID NO: 39745 - protein, 36 aa, Artificial Sequence
  Cyclic GFR-binding peptide
  MOD_RES (3)..(4)..(35): Xaa is C or S
SPXXVPQDLEPISILYLVGRTPKVKFKYEMVVKSXK

SEQ ID NO: 39746 - protein, 34 aa, Artificial Sequence; identical to SEQ ID NO: 10796
  Cyclic GFR-binding peptide
  MOD_RES (1)..(2)..(34): Xaa is C or S

SEQ ID NO: 39747 - protein, 36 aa, Artificial Sequence; identical to SEQ ID NO: 10797
  Cyclic GFR-binding peptide
  MOD_RES (4)..(5)..(36): Xaa is C or S

SEQ ID NO: 39748 - protein, 31 aa, Artificial Sequence
  Cyclic GFR-binding peptide
  MOD_RES (1)..(2): Xaa is C or S
XXVPARLEPISILYLDAANNVVKFKYEDMVV

SEQ ID NO: 39749 - protein, 25 aa, Artificial Sequence
  Cyclic GFR-binding peptide
LSPISMLYKDEYDKVVLKYHYEMVV

SEQ ID NO: 39750 - protein, 26 aa, Artificial Sequence
  Cyclic GFR-binding peptide
  MOD_RES (1)..(1): Xaa is C or S
XVSQDLEPISILYLIGKTPKIKFKYE

SEQ ID NO: 39751 - protein, 37 aa, Artificial Sequence; identical to SEQ ID NO: 10802
  Cyclic GFR-binding peptide
  MOD_RES (4)..(5)..(36): Xaa is C or S

SEQ ID NO: 39752 - protein, 22 aa, Artificial Sequence
  Cyclic GFR-binding peptide
LSPISILYIIGKTPKIYKQYEM

SEQ ID NO: 39753 - protein, 35 aa, Artificial Sequence
  Cyclic GFR-binding peptide
  MOD_RES (5)..(6): Xaa is C or S
IPKAXXVPTELEPISMLYLDEYDKVVKFKYEEMVV

SEQ ID NO: 39754 - protein, 27 aa, Artificial Sequence
  Cyclic GFR-binding peptide
KLSPISVLYIDDSSNVIYKQYENMVVR

SEQ ID NO: 39755 - protein, 36 aa, Artificial Sequence; identical to SEQ ID NO: 10805
  Cyclic GFR-binding peptide
  MOD_RES (1)..(2)..(35): Xaa is C or S

SEQ ID NO: 39756 - protein, 27 aa, Artificial Sequence
  Cyclic GFR-binding peptide
ELNAISMLYFDENEKVVLKKYRDMVVE

SEQ ID NO: 39757 - protein, 23 aa, Artificial Sequence
  Cyclic GFR-binding peptide
TELSPISMLYIDENEKVVYKQYE

SEQ ID NO: 39758 - protein, 25 aa, Artificial Sequence
  Cyclic GFR-binding peptide
PTELSPISMLYIDENEKVVYKQYED

SEQ ID NO: 39759 - protein, 31 aa, Artificial Sequence
  Cyclic GFR-binding peptide
  MOD_RES (4)..(5): Xaa is C or S
ASPXXVPQDLSPISILYIVGRTPKVYKQYEM

SEQ ID NO: 39760 - protein, 33 aa, Artificial Sequence
  Cyclic GFR-binding peptide
  MOD_RES (5)..(6): Xaa is C or S
ASKAXXVPTKLSPISILYKDKGVVTYLKYHYGM

SEQ ID NO: 39761 - protein, 36 aa, Artificial Sequence
  Cyclic GFR-binding peptide
  MOD_RES (6)..(7): Xaa is C or S
ASASPXXVSQDLSPISILYIIGKTPKIYKQYEMIVK

SEQ ID NO: 39762 - protein, 35 aa, Artificial Sequence; identical to SEQ ID NO: 10814
  Cyclic GFR-binding peptide
  MOD_RES (2)..(3)..(34): Xaa is C or S

SEQ ID NO: 39763 - protein, 31 aa, Artificial Sequence; identical to SEQ ID NO: 10815
  Cyclic GFR-binding peptide
  MOD_RES (2)..(2): Xaa is C or S

SEQ ID NO: 39764 - protein, 27 aa, Artificial Sequence
  Cyclic GFR-binding peptide
  MOD_RES (1)..(1): Xaa is C or S
XVPTKLEPISVLYLDDMGVPTKFKYEE

SEQ ID NO: 39765 - protein, 32 aa, Artificial Sequence; identical to SEQ ID NO: 10816
  Cyclic GFR-binding peptide
  MOD_RES (1)..(32): Xaa is C or S

SEQ ID NO: 39766 - protein, 36 aa, Artificial Sequence
  Cyclic GFR-binding peptide
  MOD_RES (1)..(2)..(34)..(36): Xaa is C or S
XXVPTELEPISMLYLDEYDKVVKFKYEEMVVEGXGX

SEQ ID NO: 39767 - protein, 28 aa, Artificial Sequence
  Cyclic GFR-binding peptide
  MOD_RES (28)..(28): Xaa is C or S
LSPISILYIDKGVVTYYKQYEGMAVSEX

SEQ ID NO: 39768 - protein, 24 aa, Artificial Sequence
  Cyclic GFR-binding peptide
NAISILYFIGKTPKILKKYRMIVK

SEQ ID NO: 39769 - protein, 38 aa, Artificial Sequence
  Cyclic GFR-binding peptide
  MOD_RES (3)..(4)..(36)..(38): Xaa is C or S
KAXXVPTELSPISMLYIDEYDKVVYKQYEEMVVEGXGX

SEQ ID NO: 39770 - protein, 37 aa, Artificial Sequence
  Cyclic GFR-binding peptide
  MOD_RES (7)..(7): Xaa is C or S
HVTKPTXAPTKLSPISVLYIDDSSNVIYKQYENMVVR

SEQ ID NO: 39771 - protein, 21 aa, Artificial Sequence
  Cyclic GFR-binding peptide
NAISILYFVGRTPKVLKKYRM

SEQ ID NO: 39772 - protein, 31 aa, Artificial Sequence; identical to SEQ ID NO: 10821
  Cyclic GFR-binding peptide
  MOD_RES (1)..(2): Xaa is C or S

SEQ ID NO: 39773 - protein, 26 aa, Artificial Sequence
  Cyclic GFR-binding peptide
VPQALSPISILYIVGRKPKVYKQYEM

SEQ ID NO: 39774 - protein, 30 aa, Artificial Sequence
  Cyclic GFR-binding peptide
  MOD_RES (30)..(30): Xaa is C or S
ARLNAISILYFDAANNVVLKKYRDMVVEAX

SEQ ID NO: 39775 - protein, 22 aa, Artificial Sequence
  Cyclic GFR-binding peptide
LSPISVLYIDDSSNVIYKQYEN

SEQ ID NO: 39776 - protein, 22 aa, Artificial Sequence
  Cyclic GFR-binding peptide
QLSPISVLYKDDSSNVILKYHY

SEQ ID NO: 39777 - protein, 34 aa, Artificial Sequence
  Cyclic GFR-binding peptide
  MOD_RES (33)..(33): Xaa is C or S
VPTKLEPISVLYLDDMGVPTKFKYEEGMSVAEXG

SEQ ID NO: 39778 - protein, 35 aa, Artificial Sequence
  Cyclic GFR-binding peptide
  MOD_RES (2)..(3)..(35): Xaa is C or S
AXXAPTKLSPISVLYIDSSNNVIYKQYENMVVKAX

SEQ ID NO: 39779 - protein, 38 aa, Artificial Sequence
  Cyclic GFR-binding peptide
  MOD_RES (3)..(4)..(35)..(37): Xaa is C or S
APXXVPQALEPISILYLVGRKPKVKFKYEMIVRSXKXS

SEQ ID NO: 39780 - protein, 23 aa, Artificial Sequence
  Cyclic GFR-binding peptide
SPISVLYIDSSNNVIYKQYENMV

SEQ ID NO: 39781 - protein, 35 aa, Artificial Sequence
  Cyclic GFR-binding peptide
  MOD_RES (2)..(3)..(35): Xaa is C or S
AXXVPTKLSPISILYIDKGVVTYYKQYEGMAVSEX

SEQ ID NO: 39782 - protein, 24 aa, Artificial Sequence
  Cyclic GFR-binding peptide
EPISVLYLDSSNNVIKFKYENMVV

SEQ ID NO: 39783 - protein, 35 aa, Artificial Sequence
  Cyclic GFR-binding peptide
  MOD_RES (4)..(5): Xaa is C or S
ASPXXVPQDLEPISILYLVGRTPKVKFKYEMVVKS

SEQ ID NO: 39784 - protein, 27 aa, Artificial Sequence
  Cyclic GFR-binding peptide
KLSPISVLYIDSSNNVIYKQYENMVVK

SEQ ID NO: 39785 - protein, 28 aa, Artificial Sequence
  Cyclic GFR-binding peptide
LEPISVLYLDDMGVPTKFKYEEGMSVAE

SEQ ID NO: 39786 - protein, 23 aa, Artificial Sequence
  Cyclic GFR-binding peptide
SPISILYKVGRKPKVLKYHYMIV

SEQ ID NO: 39787 - protein, 23 aa, Artificial Sequence
  Cyclic GFR-binding peptide
TQLSPISVLYKDDSSNVILKYHY

SEQ ID NO: 39788 - protein, 30 aa, Artificial Sequence; identical to SEQ ID NO: 10837
  Cyclic GFR-binding peptide
  MOD_RES (30)..(30): Xaa is C or S

SEQ ID NO: 39789 - protein, 25 aa, Artificial Sequence
  Cyclic GFR-binding peptide
KLNAISVLYFDSSNNVILKKYRNMV

SEQ ID NO: 39790 - protein, 33 aa, Artificial Sequence; identical to SEQ ID NO: 10842
  Cyclic GFR-binding peptide
  MOD_RES (3)..(4): Xaa is C or S

SEQ ID NO: 39791 - protein, 32 aa, Artificial Sequence
  Cyclic GFR-binding peptide
  MOD_RES (32)..(32): Xaa is C or S
APTKLSPISVLYIDSSNNVIYKQYENMVVKAX

SEQ ID NO: 39792 - protein, 26 aa, Artificial Sequence
  Cyclic GFR-binding peptide
TKLSPISVLYKDDSSNVILKYHYNMV

SEQ ID NO: 39793 - protein, 24 aa, Artificial Sequence
  Cyclic GFR-binding peptide
LSPISVLYKDSSNNVILKYHYNMV

SEQ ID NO: 39794 - protein, 22 aa, Artificial Sequence
  Cyclic GFR-binding peptide
NAISILYFDKGVVTYLKKYRGM

SEQ ID NO: 39795 - protein, 34 aa, Artificial Sequence
  Cyclic GFR-binding peptide
  MOD_RES (3)..(4): Xaa is C or S
KAXXVPTELEPISMLYLDENEKVVKFKYEDMVVE

SEQ ID NO: 39796 - protein, 26 aa, Artificial Sequence
  Cyclic GFR-binding peptide
PTKLSPISVLYIDDSSNVIYKQYENM

SEQ ID NO: 39797 - protein, 32 aa, Artificial Sequence
  Cyclic GFR-binding peptide
  MOD_RES (1)..(1): Xaa is C or S
XAPTKLSPISVLYIDSSNNVIYKQYENMVVKA

SEQ ID NO: 39798 - protein, 34 aa, Artificial Sequence; identical to SEQ ID NO: 10853
  Cyclic GFR-binding peptide
  MOD_RES (6)..(7): Xaa is C or S

SEQ ID NO: 39799 - protein, 29 aa, Artificial Sequence
  Cyclic GFR-binding peptide
PTKLSPISVLYIDSSNNVIYKQYENMVVK

SEQ ID NO: 39800 - protein, 28 aa, Artificial Sequence
  Cyclic GFR-binding peptide
VPTELSPISMLYIDEYDKVVYKQYEEMV

SEQ ID NO: 39801 - protein, 31 aa, Artificial Sequence
  Cyclic GFR-binding peptide
  MOD_RES (1)..(2): Xaa is C or S
XXVPTKLEPISVLYLDDMGVPTKFKYEEGMS

SEQ ID NO: 39802 - protein, 23 aa, Artificial Sequence
  Cyclic GFR-binding peptide
LSPISILYIVGRKPKVYKQYEMI

SEQ ID NO: 39803 - protein, 27 aa, Artificial Sequence
  Cyclic GFR-binding peptide
  MOD_RES (1)..(1): Xaa is C or S
XAPTQLEPISVLYLDDSSNVIKFKYEN

SEQ ID NO: 39804 - protein, 29 aa, Artificial Sequence
  Cyclic GFR-binding peptide
  MOD_RES (1)..(1): Xaa is C or S
XAPTKLEPISVLYLDDSSNVIKFKYENMV

SEQ ID NO: 39805 - protein, 30 aa, Artificial Sequence; identical to SEQ ID NO: 10855
  Cyclic GFR-binding peptide
  MOD_RES (4)..(5): Xaa is C or S

SEQ ID NO: 39806 - protein, 23 aa, Artificial Sequence
  Cyclic GFR-binding peptide
QALEPISILYLVGRKPKVKFKYE

SEQ ID NO: 39807 - protein, 34 aa, Artificial Sequence; identical to SEQ ID NO: 10861
  Cyclic GFR-binding peptide
  MOD_RES (5)..(6): Xaa is C or S

SEQ ID NO: 39808 - protein, 30 aa, Artificial Sequence; identical to SEQ ID NO: 10862
  Cyclic GFR-binding peptide

SEQ ID NO: 39809 - protein, 32 aa, Artificial Sequence
  Cyclic GFR-binding peptide
  MOD_RES (5)..(6): Xaa is C or S
IPKAXXVPTELEPISMLYLDENEKVVKFKYED

SEQ ID NO: 39810 - protein, 30 aa, Artificial Sequence
  Cyclic GFR-binding peptide
PTELEPISMLYLDEYDKVVKFKYEEMVVEG

SEQ ID NO: 39811 - protein, 37 aa, Artificial Sequence
  Cyclic GFR-binding peptide
  MOD_RES (3)..(4)..(35)..(37): Xaa is C or S
SPXXVPQDLSPISILYIVGRTPKVYKQYEMVVKSXKX

SEQ ID NO: 39812 - protein, 23 aa, Artificial Sequence
  Cyclic GFR-binding peptide
TKLNAISVLYFDDMGVPTLKKYR

SEQ ID NO: 39813 - protein, 29 aa, Artificial Sequence
  Cyclic GFR-binding peptide
  MOD_RES (2)..(3): Xaa is C or S
AXXVPTELEPISMLYLDEYDKVVKFKYEE

SEQ ID NO: 39814 - protein, 23 aa, Artificial Sequence
  Cyclic GFR-binding peptide
ARLNAISILYFDAANNVVLKKYR

SEQ ID NO: 39815 - protein, 28 aa, Artificial Sequence
  Cyclic GFR-binding peptide
  MOD_RES (1)..(2): Xaa is C or S
XXVPTKLSPISILYIDKGVVTYYKQYEG

SEQ ID NO: 39816 - protein, 38 aa, Artificial Sequence; identical to SEQ ID NO: 10866
  Cyclic GFR-binding peptide
  MOD_RES (6)..(7): Xaa is C or S

SEQ ID NO: 39817 - protein, 33 aa, Artificial Sequence; identical to SEQ ID NO: 10867
  Cyclic GFR-binding peptide
  MOD_RES (30)..(32): Xaa is C or S

SEQ ID NO: 39818 - protein, 28 aa, Artificial Sequence
  Cyclic GFR-binding peptide
QDLEPISILYLVGRTPKVKFKYEMVVKS

SEQ ID NO: 39819 - protein, 31 aa, Artificial Sequence; identical to SEQ ID NO: 10869
  Cyclic GFR-binding peptide

SEQ ID NO: 39820 - protein, 21 aa, Artificial Sequence
  Cyclic GFR-binding peptide
LEPISILYLVGRKPKVKFKYE

SEQ ID NO: 39821 - protein, 30 aa, Artificial Sequence
  Cyclic GFR-binding peptide
  MOD_RES (3)..(4): Xaa is C or S
KAXXVPTELEPISMLYLDEYDKVVKFKYEE

SEQ ID NO: 39822 - protein, 27 aa, Artificial Sequence
  Cyclic GFR-binding peptide
PQDLSPISILYIVGRTPKVYKQYEMVV

SEQ ID NO: 39823 - protein, 28 aa, Artificial Sequence
  Cyclic GFR-binding peptide
  MOD_RES (1)..(2): Xaa is C or S
XXAPTQLEPISVLYLDDSSNVIKFKYEN

SEQ ID NO: 39824 - protein, 28 aa, Artificial Sequence
  Cyclic GFR-binding peptide
APTKLEPISVLYLDDSSNVIKFKYENMV

SEQ ID NO: 39825 - protein, 28 aa, Artificial Sequence
  Cyclic GFR-binding peptide
  MOD_RES (26)..(28): Xaa is C or S
SPISILYKVGRTPKVLKYHYMVVKSXKX

SEQ ID NO: 39826 - protein, 31 aa, Artificial Sequence
  Cyclic GFR-binding peptide
  MOD_RES (29)..(31): Xaa is C or S
RLNAISILYFDAANNVVLKKYRDMVVEAXGX

SEQ ID NO: 39827 - protein, 34 aa, Artificial Sequence
  Cyclic GFR-binding peptide
  MOD_RES (6)..(7): Xaa is C or S
ASAAPXXVPQALSPISILYIVGRKPKVYKQYEMI

SEQ ID NO: 39828 - protein, 36 aa, Artificial Sequence
  Cyclic GFR-binding peptide
  MOD_RES (4)..(5): Xaa is C or S
PKAXXVPTELSPISMLYIDENEKVVYKQYEDMVVEG

SEQ ID NO: 39829 - protein, 31 aa, Artificial Sequence; identical to SEQ ID NO: 10873
  Cyclic GFR-binding peptide
  MOD_RES (5)..(6): Xaa is C or S

SEQ ID NO: 39830 - protein, 40 aa, Artificial Sequence; identical to SEQ ID NO: 10874
  Cyclic GFR-binding peptide
  MOD_RES (4)..(5)..(37)..(39): Xaa is C or S

SEQ ID NO: 39831 - protein, 26 aa, Artificial Sequence
  Cyclic GFR-binding peptide
EPISVLYLDDSSNVIKFKYENMVVRA

SEQ ID NO: 39832 - protein, 38 aa, Artificial Sequence; identical to SEQ ID NO: 10878
  Cyclic GFR-binding peptide
  MOD_RES (2)..(3)..(35)..(37): Xaa is C or S

SEQ ID NO: 39833 - protein, 30 aa, Artificial Sequence
  Cyclic GFR-binding peptide
  MOD_RES (3)..(3): Xaa is C or S
PTXAPTKLEPISVLYLDDSSNVIKFKYENM

SEQ ID NO: 39834 - protein, 27 aa, Artificial Sequence
  Cyclic GFR-binding peptide
  MOD_RES (1)..(1): Xaa is C or S
XVPTKLSPISILYIDKGVVTYYKQYEG

SEQ ID NO: 39835 - protein, 35 aa, Artificial Sequence
  Cyclic GFR-binding peptide
  MOD_RES (3)..(4): Xaa is C or S
ASXXVPARLSPISILYKDAANNVVLKYHYDMVVEA

SEQ ID NO: 39836 - protein, 25 aa, Artificial Sequence
  Cyclic GFR-binding peptide
VPTELSPISMLYKDENEKVVLKYHY

SEQ ID NO: 39837 - protein, 39 aa, Artificial Sequence
  Cyclic GFR-binding peptide
  MOD_RES (4)..(5)..(37)..(39): Xaa is C or S
PKAXXVPTELSPISMLYIDEYDKVVYKQYEEMVVEGXGX

SEQ ID NO: 39838 - protein, 41 aa, Artificial Sequence
  Cyclic GFR-binding peptide
  MOD_RES (6)..(7)..(39)..(41): Xaa is C or S
AAPASXXVPARLNAISILYFDAANNVVLKKYRDMVVEAXGX

SEQ ID NO: 39839 - protein, 31 aa, Artificial Sequence
  Cyclic GFR-binding peptide
  MOD_RES (3)..(4): Xaa is C or S
KAXXAPTKLSPISVLYIDSSNNVIYKQYENM

SEQ ID NO: 39840 - protein, 39 aa, Artificial Sequence; identical to SEQ ID NO: 10885
  Cyclic GFR-binding peptide
  MOD_RES (7)..(39): Xaa is C or S

SEQ ID NO: 39841 - protein, 39 aa, Artificial Sequence; identical to SEQ ID NO: 10886
  Cyclic GFR-binding peptide
  MOD_RES (3)..(4)..(36)..(38): Xaa is C or S

SEQ ID NO: 39842 - protein, 26 aa, Artificial Sequence
  Cyclic GFR-binding peptide
TKLSPISVLYIDSSNNVIYKQYENMV

SEQ ID NO: 39843 - protein, 24 aa, Artificial Sequence
  Cyclic GFR-binding peptide
KLNAISVLYFDDMGVPTLKKYREG

SEQ ID NO: 39844 - protein, 26 aa, Artificial Sequence
  Cyclic GFR-binding peptide
EPISVLYLDDSSNVIKFKYENMVVRS

SEQ ID NO: 39845 - protein, 29 aa, Artificial Sequence
  Cyclic GFR-binding peptide
TKLEPISVLYLDDMGVPTKFKYEEGMSVA

SEQ ID NO: 39846 - protein, 36 aa, Artificial Sequence; identical to SEQ ID NO: 10892
  Cyclic GFR-binding peptide
  MOD_RES (3)..(4)..(35): Xaa is C or S

SEQ ID NO: 39847 - protein, 32 aa, Artificial Sequence
  Cyclic GFR-binding peptide
  MOD_RES (5)..(6): Xaa is C or S
VPKPXXAPTKLEPISVLYLDDSSNVIKFKYEN

SEQ ID NO: 39848 - protein, 27 aa, Artificial Sequence
  Cyclic GFR-binding peptide
  MOD_RES (1)..(1): Xaa is C or S
XVPTELSPISMLYKDEYDKVVLKYHYE

SEQ ID NO: 39849 - protein, 24 aa, Artificial Sequence
  Cyclic GFR-binding peptide
TKLEPISVLYLDSSNNVIKFKYEN

SEQ ID NO: 39850 - protein, 36 aa, Artificial Sequence
  Cyclic GFR-binding peptide
  MOD_RES (1)..(2)..(34)..(36): Xaa is C or S
XXAPTQLEPISVLYLDDSSNVIKFKYENMVVRAXGX

SEQ ID NO: 39851 - protein, 30 aa, Artificial Sequence; identical to SEQ ID NO: 10896
  Cyclic GFR-binding peptide
  MOD_RES (30)..(30): Xaa is C or S

SEQ ID NO: 39852 - protein, 30 aa, Artificial Sequence
  Cyclic GFR-binding peptide
  MOD_RES (3)..(4): Xaa is C or S
KAXXVPTKLSPISVLYIDDMGVPTYKQYEE

SEQ ID NO: 39853 - protein, 36 aa, Artificial Sequence; identical to SEQ ID NO: 10898
  Cyclic GFR-binding peptide
  MOD_RES (1)..(2)..(34)..(36): Xaa is C or S

SEQ ID NO: 39854 - protein, 22 aa, Artificial Sequence
  Cyclic GFR-binding peptide
DLSPISILYKIGKTPKILKYHY

SEQ ID NO: 39855 - protein, 35 aa, Artificial Sequence; identical to SEQ ID NO: 10900
  Cyclic GFR-binding peptide
  MOD_RES (2)..(3)..(34): Xaa is C or S

SEQ ID NO: 39856 - protein, 39 aa, Artificial Sequence; identical to SEQ ID NO: 10902
  Cyclic GFR-binding peptide
  MOD_RES (5)..(6)..(38): Xaa is C or S

SEQ ID NO: 39857 - protein, 26 aa, Artificial Sequence
  Cyclic GFR-binding peptide
LEPISILYLIGKTPKIKFKYEMIVKS

SEQ ID NO: 39858 - protein, 32 aa, Artificial Sequence
  Cyclic GFR-binding peptide
  MOD_RES (2)..(3): Xaa is C or S
AXXAPTKLEPISVLYLDSSNNVIKFKYENMVV

SEQ ID NO: 39859 - protein, 37 aa, Artificial Sequence; identical to SEQ ID NO: 10906
  Cyclic GFR-binding peptide
  MOD_RES (5)..(6): Xaa is C or S

SEQ ID NO: 39860 - protein, 39 aa, Artificial Sequence; identical to SEQ ID NO: 10907
  Cyclic GFR-binding peptide
  MOD_RES (6)..(7)..(38): Xaa is C or S

SEQ ID NO: 39861 - protein, 28 aa, Artificial Sequence
  Cyclic GFR-binding peptide
  MOD_RES (1)..(2): Xaa is C or S
XXVPQDLEPISILYLVGRTPKVKFKYEM

SEQ ID NO: 39862 - protein, 27 aa, Artificial Sequence
  Cyclic GFR-binding peptide
VPQALNAISILYFVGRKPKVLKKYRMI

SEQ ID NO: 39863 - protein, 37 aa, Artificial Sequence
  Cyclic GFR-binding peptide
  MOD_RES (5)..(6): Xaa is C or S
ASKAXXVPTKLNAISILYFDKGVVTYLKKYRGMAVSE

SEQ ID NO: 39864 - protein, 28 aa, Artificial Sequence
  Cyclic GFR-binding peptide
  MOD_RES (26)..(28): Xaa is C or S
NAISILYFIGKTPKILKKYRMIVKSXKX

SEQ ID NO: 39865 - protein, 27 aa, Artificial Sequence
  Cyclic GFR-binding peptide
  MOD_RES (1)..(1): Xaa is C or S
XVPQDLEPISILYLVGRTPKVKFKYEM

SEQ ID NO: 39866 - protein, 35 aa, Artificial Sequence; identical to SEQ ID NO: 10911
  Cyclic GFR-binding peptide
  MOD_RES (1)..(2)..(34): Xaa is C or S

SEQ ID NO: 39867 - protein, 30 aa, Artificial Sequence
  Cyclic GFR-binding peptide
  MOD_RES (1)..(2): Xaa is C or S
XXAPTKLEPISVLYLDSSNNVIKFKYENMV

SEQ ID NO: 39868 - protein, 31 aa, Artificial Sequence; identical to SEQ ID NO: 10912
  Cyclic GFR-binding peptide
  MOD_RES (31)..(31): Xaa is C or S

SEQ ID NO: 39869 - protein, 35 aa, Artificial Sequence
  Cyclic GFR-binding peptide
  MOD_RES (1)..(2)..(33)..(35): Xaa is C or S
XXVPQDLEPISILYLVGRTPKVKFKYEMVVKSXKX

SEQ ID NO: 39870 - protein, 24 aa, Artificial Sequence
  Cyclic GFR-binding peptide
KLSPISVLYIDDMGVPTYKQYEEG

SEQ ID NO: 39871 - protein, 37 aa, Artificial Sequence; identical to SEQ ID NO: 10913
  Cyclic GFR-binding peptide
  MOD_RES (6)..(7): Xaa is C or S

SEQ ID NO: 39872 - protein, 24 aa, Artificial Sequence
  Cyclic GFR-binding peptide
RLSPISILYKDAANNVVLKYHYDM

SEQ ID NO: 39873 - protein, 33 aa, Artificial Sequence
  Cyclic GFR-binding peptide
  MOD_RES (1)..(2): Xaa is C or S
XXVPTKLSPISVLYIDDMGVPTYKQYEEGMSVA

SEQ ID NO: 39874 - protein, 25 aa, Artificial Sequence
  Cyclic GFR-binding peptide
PTKLSPISVLYIDSSNNVIYKQYEN

SEQ ID NO: 39875 - protein, 28 aa, Artificial Sequence
  Cyclic GFR-binding peptide
  MOD_RES (27)..(27): Xaa is C or S
LSPISILYIIGKTPKIYKQYEMIVKSXK

SEQ ID NO: 39876 - protein, 25 aa, Artificial Sequence
  Cyclic GFR-binding peptide
VPTELEPISMLYLDENEKVVKFKYE

SEQ ID NO: 39877 - protein, 31 aa, Artificial Sequence
  Cyclic GFR-binding peptide
  MOD_RES (29)..(31): Xaa is C or S
KLEPISVLYLDDSSNVIKFKYENMVVRSXGX

SEQ ID NO: 39878 - protein, 30 aa, Artificial Sequence
  Cyclic GFR-binding peptide
  MOD_RES (29)..(29): Xaa is C or S
KLSPISVLYIDSSNNVIYKQYENMVVKAXG

SEQ ID NO: 39879 - protein, 33 aa, Artificial Sequence
  Cyclic GFR-binding peptide
  MOD_RES (2)..(3): Xaa is C or S
SXXVPARLSPISILYKDAANNVVLKYHYDMVVE

SEQ ID NO: 39880 - protein, 40 aa, Artificial Sequence; identical to SEQ ID NO: 10922
  Cyclic GFR-binding peptide
  MOD_RES (6)..(7)..(39): Xaa is C or S

SEQ ID NO: 39881 - protein, 25 aa, Artificial Sequence
  Cyclic GFR-binding peptide
TELEPISMLYLDENEKVVKFKYEDM

SEQ ID NO: 39882 - protein, 32 aa, Artificial Sequence; identical to SEQ ID NO: 10923
  Cyclic GFR-binding peptide
  MOD_RES (1)..(2): Xaa is C or S

SEQ ID NO: 39883 - protein, 30 aa, Artificial Sequence
  Cyclic GFR-binding peptide
APTKLSPISVLYIDSSNNVIYKQYENMVVK

SEQ ID NO: 39884 - protein, 30 aa, Artificial Sequence; identical to SEQ ID NO: 10925
  Cyclic GFR-binding peptide
  MOD_RES (1)..(2): Xaa is C or S

SEQ ID NO: 39885 - protein, 24 aa, Artificial Sequence
  Cyclic GFR-binding peptide
KLSPISVLYIDSSNNVIYKQYENM

SEQ ID NO: 39886 - protein, 32 aa, Artificial Sequence
  Cyclic GFR-binding peptide
  MOD_RES (1)..(1): Xaa is C or S
XVPTKLSPISILYKDKGVVTYLKYHYGMAVSE

SEQ ID NO: 39887 - protein, 31 aa, Artificial Sequence
  Cyclic GFR-binding peptide
  MOD_RES (4)..(5): Xaa is C or S
ASPXXVSQDLEPISILYLIGKTPKIKFKYEM

SEQ ID NO: 39888 - protein, 30 aa, Artificial Sequence
  Cyclic GFR-binding peptide
  MOD_RES (30)..(30): Xaa is C or S
TKLSPISVLYIDDSSNVIYKQYENMVVRSX

SEQ ID NO: 39889 - protein, 28 aa, Artificial Sequence
  Cyclic GFR-binding peptide
  MOD_RES (27)..(27): Xaa is C or S
LSPISILYIVGRTPKVYKQYEMVVKSXK

SEQ ID NO: 39890 - protein, 32 aa, Artificial Sequence
  Cyclic GFR-binding peptide
  MOD_RES (4)..(5): Xaa is C or S
PKAXXVPTELEPISMLYLDEYDKVVKFKYEEM

SEQ ID NO: 39891 - protein, 29 aa, Artificial Sequence
  Cyclic GFR-binding peptide
  MOD_RES (2)..(3): Xaa is C or S
AXXVPTELSPISMLYIDEYDKVVYKQYEE

SEQ ID NO: 39892 - protein, 37 aa, Artificial Sequence
  Cyclic GFR-binding peptide
  MOD_RES (6)..(7): Xaa is C or S
TVPKPXXAPTQLSPISVLYIDDSSNVIYKQYENMVVR

SEQ ID NO: 39893 - protein, 24 aa, Artificial Sequence
  Cyclic GFR-binding peptide
PTKLEPISVLYLDDMGVPTKFKYE

SEQ ID NO: 39894 - protein, 41 aa, Artificial Sequence; identical to SEQ ID NO: 10931
  Cyclic GFR-binding peptide
  MOD_RES (6)..(7)..(38)..(40): Xaa is C or S

SEQ ID NO: 39895 - protein, 33 aa, Artificial Sequence; identical to SEQ ID NO: 10932
  Cyclic GFR-binding peptide
  MOD_RES (5)..(6): Xaa is C or S

SEQ ID NO: 39896 - protein, 30 aa, Artificial Sequence
  Cyclic GFR-binding peptide
  MOD_RES (30)..(30): Xaa is C or S
PQALSPISILYIVGRKPKVYKQYEMIVRSX

SEQ ID NO: 39897 - protein, 35 aa, Artificial Sequence; identical to SEQ ID NO: 10934
  Cyclic GFR-binding peptide
  MOD_RES (1)..(2)..(34): Xaa is C or S

SEQ ID NO: 39898 - protein, 36 aa, Artificial Sequence; identical to SEQ ID NO: 10935
  Cyclic GFR-binding peptide
  MOD_RES (1)..(33)..(35): Xaa is C or S

SEQ ID NO: 39899 - protein, 30 aa, Artificial Sequence; identical to SEQ ID NO: 10936
  Cyclic GFR-binding peptide
  MOD_RES (2)..(3): Xaa is C or S

SEQ ID NO: 39900 - protein, 30 aa, Artificial Sequence; identical to SEQ ID NO: 10940
  Cyclic GFR-binding peptide
  MOD_RES (4)..(5): Xaa is C or S

SEQ ID NO: 39901 - protein, 26 aa, Artificial Sequence
  Cyclic GFR-binding peptide
PTKLSPISVLYKDDSSNVILKYHYNM

SEQ ID NO: 39902 - protein, 23 aa, Artificial Sequence
  Cyclic GFR-binding peptide
DLNAISILYFVGRTPKVLKKYRM

SEQ ID NO: 39903 - protein, 28 aa, Artificial Sequence
  Cyclic GFR-binding peptide
SQDLSPISILYIIGKTPKIYKQYEMIVK

SEQ ID NO: 39904 - protein, 26 aa, Artificial Sequence
  Cyclic GFR-binding peptide
NAISMLYFDENEKVVLKKYRDMVVEG

SEQ ID NO: 39905 - protein, 29 aa, Artificial Sequence
  Cyclic GFR-binding peptide
  MOD_RES (1)..(1): Xaa is C or S
XVPTELNAISMLYFDEYDKVVLKKYREMV

SEQ ID NO: 39906 - protein, 29 aa, Artificial Sequence
  Cyclic GFR-binding peptide
  MOD_RES (29)..(29): Xaa is C or S
QALNAISILYFVGRKPKVLKKYRMIVRSX

SEQ ID NO: 39907 - protein, 23 aa, Artificial Sequence
  Cyclic GFR-binding peptide
LNAISILYFVGRKPKVLKKYRMI

SEQ ID NO: 39908 - protein, 35 aa, Artificial Sequence; identical to SEQ ID NO: 10952
  Cyclic GFR-binding peptide
  MOD_RES (5)..(6): Xaa is C or S

SEQ ID NO: 39909 - protein, 30 aa, Artificial Sequence; identical to SEQ ID NO: 10953
  Cyclic GFR-binding peptide
  MOD_RES (1)..(1): Xaa is C or S

SEQ ID NO: 39910 - protein, 30 aa, Artificial Sequence
  Cyclic GFR-binding peptide
  MOD_RES (29)..(29): Xaa is C or S
QDLEPISILYLIGKTPKIKFKYEMIVKSXK

SEQ ID NO: 39911 - protein, 24 aa, Artificial Sequence
  Cyclic GFR-binding peptide
PARLEPISILYLDAANNVVKFKYE

SEQ ID NO: 39912 - protein, 25 aa, Artificial Sequence
  Cyclic GFR-binding peptide
ELSPISMLYIDENEKVVYKQYEDMV

SEQ ID NO: 39913 - protein, 38 aa, Artificial Sequence
  Cyclic GFR-binding peptide
  MOD_RES (6)..(38): Xaa is C or S
VTKPTXAPTKLEPISVLYLDDSSNVIKFKYENMVVRSX

SEQ ID NO: 39914 - protein, 31 aa, Artificial Sequence; identical to SEQ ID NO: 10957
  Cyclic GFR-binding peptide

SEQ ID NO: 39915 - protein, 27 aa, Artificial Sequence
  Cyclic GFR-binding peptide
QALSPISILYIVGRKPKVYKQYEMIVR

SEQ ID NO: 39916 - protein, 26 aa, Artificial Sequence
  Cyclic GFR-binding peptide
LSPISMLYKDEYDKVVLKYHYEMVVE

SEQ ID NO: 39917 - protein, 22 aa, Artificial Sequence
  Cyclic GFR-binding peptide
RLNAISILYFDAANNVVLKKYR

SEQ ID NO: 39918 - protein, 31 aa, Artificial Sequence
  Cyclic GFR-binding peptide
  MOD_RES (3)..(4): Xaa is C or S
ASXXVPARLSPISILYKDAANNVVLKYHYDM

SEQ ID NO: 39919 - protein, 22 aa, Artificial Sequence
  Cyclic GFR-binding peptide
QLEPISVLYLDDSSNVIKFKYE

SEQ ID NO: 39920 - protein, 32 aa, Artificial Sequence
  Cyclic GFR-binding peptide
  MOD_RES (1)..(2): Xaa is C or S
XXVPTELEPISMLYLDENEKVVKFKYEDMVVE

SEQ ID NO: 39921 - protein, 27 aa, Artificial Sequence
  Cyclic GFR-binding peptide
  MOD_RES (1)..(2): Xaa is C or S
XXVSQDLEPISILYLIGKTPKIKFKYE

SEQ ID NO: 39922 - protein, 25 aa, Artificial Sequence
  Cyclic GFR-binding peptide
KLEPISVLYLDSSNNVIKFKYENMV

SEQ ID NO: 39923 - protein, 24 aa, Artificial Sequence
  Cyclic GFR-binding peptide
TKLSPISVLYIDSSNNVIYKQYEN

SEQ ID NO: 39924 - protein, 41 aa, Artificial Sequence
  Cyclic GFR-binding peptide
  MOD_RES (6)..(7)..(38)..(40): Xaa is C or S
ASASPXXVSQDLSPISILYIIGKTPKIYKQYEMIVKSXKXS

SEQ ID NO: 39925 - protein, 34 aa, Artificial Sequence
  Cyclic GFR-binding peptide
  MOD_RES (1)..(2)..(34): Xaa is C or S
XXVPARLEPISILYLDAANNVVKFKYEDMVVEAX

SEQ ID NO: 39926 - protein, 27 aa, Artificial Sequence
  Cyclic GFR-binding peptide
  MOD_RES (27)..(27): Xaa is C or S
LSPISILYIVGRTPKVYKQYEMVVKSX

SEQ ID NO: 39927 - protein, 37 aa, Artificial Sequence
  Cyclic GFR-binding peptide
  MOD_RES (1)..(2)..(34)..(36): Xaa is C or S
XXVPTKLNAISILYFDKGVVTYLKKYRGMAVSEXGXR

SEQ ID NO: 39928 - protein, 36 aa, Artificial Sequence; identical to SEQ ID NO: 10961
  Cyclic GFR-binding peptide
  MOD_RES (3)..(4)..(35): Xaa is C or S

SEQ ID NO: 39929 - protein, 36 aa, Artificial Sequence
  Cyclic GFR-binding peptide
  MOD_RES (6)..(6): Xaa is C or S
VTKPTXAPTKLEPISVLYLDDSSNVIKFKYENMVVR

SEQ ID NO: 39930 - protein, 30 aa, Artificial Sequence
  Cyclic GFR-binding peptide
  MOD_RES (28)..(30): Xaa is C or S
ALSPISILYIVGRKPKVYKQYEMIVRSXKX

SEQ ID NO: 39931 - protein, 28 aa, Artificial Sequence
  Cyclic GFR-binding peptide
  MOD_RES (26)..(28): Xaa is C or S
SPISILYKIGKTPKILKYHYMIVKSXKX

SEQ ID NO: 39932 - protein, 29 aa, Artificial Sequence
  Cyclic GFR-binding peptide
  MOD_RES (1)..(1): Xaa is C or S
XVPTELSPISMLYIDEYDKVVYKQYEEMV

SEQ ID NO: 39933 - protein, 30 aa, Artificial Sequence; identical to SEQ ID NO: 10967
  Cyclic GFR-binding peptide

SEQ ID NO: 39934 - protein, 27 aa, Artificial Sequence
  Cyclic GFR-binding peptide
KLSPISVLYIDDMGVPTYKQYEEGMSV

SEQ ID NO: 39935 - protein, 33 aa, Artificial Sequence
  Cyclic GFR-binding peptide
  MOD_RES (1)..(33): Xaa is C or S
XVPTELSPISMLYIDENEKVVYKQYEDMVVEGX

SEQ ID NO: 39936 - protein, 33 aa, Artificial Sequence
  Cyclic GFR-binding peptide
  MOD_RES (2)..(3): Xaa is C or S
PXXVPQALSPISILYIVGRKPKVYKQYEMIVRS

SEQ ID NO: 39937 - protein, 39 aa, Artificial Sequence
  Cyclic GFR-binding peptide
  MOD_RES (5)..(6)..(38): Xaa is C or S
IPKAXXVPTELEPISMLYLDENEKVVKFKYEDMVVEGXG

SEQ ID NO: 39938 - protein, 29 aa, Artificial Sequence
  Cyclic GFR-binding peptide
  MOD_RES (3)..(4): Xaa is C or S
KAXXVPTELNAISMLYFDEYDKVVLKKYR

SEQ ID NO: 39939 - protein, 38 aa, Artificial Sequence
  Cyclic GFR-binding peptide
  MOD_RES (4)..(5)..(38): Xaa is C or S
GKAXXVPTKLSPISVLYIDDMGVPTYKQYEEGMSVAEX

SEQ ID NO: 39940 - protein, 38 aa, Artificial Sequence; identical to SEQ ID NO: 10969
  Cyclic GFR-binding peptide
  MOD_RES (6)..(7): Xaa is C or S

SEQ ID NO: 39941 - protein, 28 aa, Artificial Sequence
  Cyclic GFR-binding peptide
  MOD_RES (27)..(27): Xaa is C or S
SPISMLYIDENEKVVYKQYEDMVVEGXG

SEQ ID NO: 39942 - protein, 25 aa, Artificial Sequence
  Cyclic GFR-binding peptide
PTKLEPISVLYLDSSNNVIKFKYEN

SEQ ID NO: 39943 - protein, 40 aa, Artificial Sequence; identical to SEQ ID NO: 10971
  Cyclic GFR-binding peptide
  MOD_RES (5)..(6)..(37)..(39): Xaa is C or S

SEQ ID NO: 39944 - protein, 29 aa, Artificial Sequence
  Cyclic GFR-binding peptide
ARLSPISILYKDAANNVVLKYHYDMVVEA

SEQ ID NO: 39945 - protein, 27 aa, Artificial Sequence
  Cyclic GFR-binding peptide
PARLNAISILYFDAANNVVLKKYRDMV

SEQ ID NO: 39946 - protein, 28 aa, Artificial Sequence
  Cyclic GFR-binding peptide
  MOD_RES (27)..(27): Xaa is C or S
LNAISILYFVGRKPKVLKKYRMIVRSXK

SEQ ID NO: 39947 - protein, 24 aa, Artificial Sequence
  Cyclic GFR-binding peptide
EPISILYLVGRKPKVKFKYEMIVR

SEQ ID NO: 39948 - protein, 31 aa, Artificial Sequence
  Cyclic GFR-binding peptide
  MOD_RES (4)..(5): Xaa is C or S
ASPXXVSQDLSPISILYIIGKTPKIYKQYEM

SEQ ID NO: 39949 - protein, 28 aa, Artificial Sequence
  Cyclic GFR-binding peptide
  MOD_RES (1)..(2): Xaa is C or S
XXVPTKLEPISVLYLDDMGVPTKFKYEE

SEQ ID NO: 39950 - protein, 27 aa, Artificial Sequence
  Cyclic GFR-binding peptide
  MOD_RES (27)..(27): Xaa is C or S
SPISMLYKDENEKVVLKYHYDMVVEGX

SEQ ID NO: 39951 - protein, 29 aa, Artificial Sequence
  Cyclic GFR-binding peptide
  MOD_RES (3)..(4): Xaa is C or S
KPXXAPTKLEPISVLYLDDSSNVIKFKYE

SEQ ID NO: 39952 - protein, 30 aa, Artificial Sequence; identical to SEQ ID NO: 10978
  Cyclic GFR-binding peptide
  MOD_RES (27)..(29): Xaa is C or S

SEQ ID NO: 39953 - protein, 33 aa, Artificial Sequence
  Cyclic GFR-binding peptide
  MOD_RES (6)..(7): Xaa is C or S
AAPASXXVPARLNAISILYFDAANNVVLKKYRD

SEQ ID NO: 39954 - protein, 24 aa, Artificial Sequence
  Cyclic GFR-binding peptide
PTELNAISMLYFDENEKVVLKKYR

SEQ ID NO: 39955 - protein, 29 aa, Artificial Sequence
  Cyclic GFR-binding peptide
VPQALNAISILYFVGRKPKVLKKYRMIVR

SEQ ID NO: 39956 - protein, 41 aa, Artificial Sequence
  Cyclic GFR-binding peptide
  MOD_RES (6)..(7)..(39)..(41): Xaa is C or S
KIPKAXXVPTELEPISMLYLDENEKVVKFKYEDMVVEGXGX

SEQ ID NO: 39957 - protein, 29 aa, Artificial Sequence
  Cyclic GFR-binding peptide
  MOD_RES (28)..(28): Xaa is C or S
DLSPISILYIVGRTPKVYKQYEMVVKSXK

SEQ ID NO: 39958 - protein, 35 aa, Artificial Sequence
  Cyclic GFR-binding peptide
  MOD_RES (1)..(2)..(34): Xaa is C or S
XXVPTKLNAISILYFDKGVVTYLKKYRGMAVSEXG

SEQ ID NO: 39959 - protein, 34 aa, Artificial Sequence; identical to SEQ ID NO: 10984
  Cyclic GFR-binding peptide
  MOD_RES (1)..(33): Xaa is C or S

SEQ ID NO: 39960 - protein, 39 aa, Artificial Sequence; identical to SEQ ID NO: 10986
  Cyclic GFR-binding peptide
  MOD_RES (6)..(7)..(38): Xaa is C or S

SEQ ID NO: 39961 - protein, 37 aa, Artificial Sequence; identical to SEQ ID NO: 10987
  Cyclic GFR-binding peptide
  MOD_RES (1)..(2)..(35)..(37): Xaa is C or S

SEQ ID NO: 39962 - protein, 31 aa, Artificial Sequence
  Cyclic GFR-binding peptide
VPTKLEPISVLYLDDMGVPTKFKYEEGMSVA

SEQ ID NO: 39963 - protein, 37 aa, Artificial Sequence
  Cyclic GFR-binding peptide
  MOD_RES (1)..(2)..(34)..(36): Xaa is C or S
XXAPTKLEPISVLYLDSSNNVIKFKYENMVVKAXGXH

SEQ ID NO: 39964 - protein, 26 aa, Artificial Sequence
  Cyclic GFR-binding peptide
  MOD_RES (1)..(1): Xaa is C or S
XVPTELNAISMLYFDENEKVVLKKYR

SEQ ID NO: 39965 - protein, 32 aa, Artificial Sequence; identical to SEQ ID NO: 10989
  Cyclic GFR-binding peptide
  MOD_RES (29)..(31): Xaa is C or S

SEQ ID NO: 39966 - protein, 27 aa, Artificial Sequence
  Cyclic GFR-binding peptide
PTELNAISMLYFDEYDKVVLKKYREMV

SEQ ID NO: 39967 - protein, 33 aa, Artificial Sequence
  Cyclic GFR-binding peptide
  MOD_RES (32)..(32): Xaa is C or S
APTKLSPISVLYIDDSSNVIYKQYENMVVRSXG

SEQ ID NO: 39968 - protein, 32 aa, Artificial Sequence
  Cyclic GFR-binding peptide
  MOD_RES (1)..(32): Xaa is C or S
XVSQDLSPISILYIIGKTPKIYKQYEMIVKSX

SEQ ID NO: 39969 - protein, 20 aa, Artificial Sequence
  Cyclic GFR-binding peptide
SPISILYIIGKTPKIYKQYE

SEQ ID NO: 39970 - protein, 34 aa, Artificial Sequence; identical to SEQ ID NO: 10992
  Cyclic GFR-binding peptide
  MOD_RES (6)..(7): Xaa is C or S

SEQ ID NO: 39971 - protein, 30 aa, Artificial Sequence
  Cyclic GFR-binding peptide
  MOD_RES (2)..(3): Xaa is C or S
AXXVPTELEPISMLYLDENEKVVKFKYEDM

SEQ ID NO: 39972 - protein, 32 aa, Artificial Sequence; identical to SEQ ID NO: 10993
  Cyclic GFR-binding peptide
  MOD_RES (5)..(6): Xaa is C or S

SEQ ID NO: 39973 - protein, 40 aa, Artificial Sequence; identical to SEQ ID NO: 10994
  Cyclic GFR-binding peptide
  MOD_RES (6)..(7)..(40): Xaa is C or S

SEQ ID NO: 39974 - protein, 25 aa, Artificial Sequence
  Cyclic GFR-binding peptide
VPTELSPISMLYIDEYDKVVYKQYE

SEQ ID NO: 39975 - protein, 32 aa, Artificial Sequence; identical to SEQ ID NO: 10997
  Cyclic GFR-binding peptide
  MOD_RES (1)..(1): Xaa is C or S

SEQ ID NO: 39976 - protein, 36 aa, Artificial Sequence
  Cyclic GFR-binding peptide
  MOD_RES (6)..(7): Xaa is C or S
AVPKAXXAPTKLEPISVLYLDSSNNVIKFKYENMVV

SEQ ID NO: 39977 - protein, 30 aa, Artificial Sequence
  Cyclic GFR-binding peptide
  MOD_RES (3)..(4): Xaa is C or S
KPXXAPTKLSPISVLYIDDSSNVIYKQYEN

SEQ ID NO: 39978 - protein, 30 aa, Artificial Sequence; identical to SEQ ID NO: 10999
  Cyclic GFR-binding peptide
  MOD_RES (3)..(4): Xaa is C or S

SEQ ID NO: 39979 - protein, 32 aa, Artificial Sequence
  Cyclic GFR-binding peptide
  MOD_RES (5)..(6): Xaa is C or S
SAAPXXVPQALSPISILYIVGRKPKVYKQYEM

SEQ ID NO: 39980 - protein, 34 aa, Artificial Sequence
  Cyclic GFR-binding peptide
  MOD_RES (1)..(33): Xaa is C or S
XVPTELSPISMLYIDENEKVVYKQYEDMVVEGXG

SEQ ID NO: 39981 - protein, 35 aa, Artificial Sequence; identical to SEQ ID NO: 11002
  Cyclic GFR-binding peptide
  MOD_RES (7)..(7): Xaa is C or S

SEQ ID NO: 39982 - protein, 34 aa, Artificial Sequence; identical to SEQ ID NO: 11003
  Cyclic GFR-binding peptide
  MOD_RES (1)..(32)..(34): Xaa is C or S

SEQ ID NO: 39983 - protein, 36 aa, Artificial Sequence
  Cyclic GFR-binding peptide
  MOD_RES (4)..(5): Xaa is C or S
PKPXXAPTQLEPISVLYLDDSSNVIKFKYENMVVRA

SEQ ID NO: 39984 - protein, 27 aa, Artificial Sequence
  Cyclic GFR-binding peptide
  MOD_RES (1)..(1): Xaa is C or S
XVPQDLSPISILYKVGRTPKVLKYHYM

SEQ ID NO: 39985 - protein, 36 aa, Artificial Sequence; identical to SEQ ID NO: 11008
  Cyclic GFR-binding peptide
  MOD_RES (1)..(33)..(35): Xaa is C or S

SEQ ID NO: 39986 - protein, 26 aa, Artificial Sequence
  Cyclic GFR-binding peptide
KLEPISVLYLDSSNNVIKFKYENMVV

SEQ ID NO: 39987 - protein, 26 aa, Artificial Sequence
  Cyclic GFR-binding peptide
TKLSPISILYKDKGVVTYLKYHYGMA

SEQ ID NO: 39988 - protein, 32 aa, Artificial Sequence
  Cyclic GFR-binding peptide
  MOD_RES (6)..(7): Xaa is C or S
KVGKAXXVPTKLSPISVLYIDDMGVPTYKQYE

SEQ ID NO: 39989 - protein, 29 aa, Artificial Sequence
  Cyclic GFR-binding peptide
  MOD_RES (28)..(28): Xaa is C or S
ALNAISILYFVGRKPKVLKKYRMIVRSXK

SEQ ID NO: 39990 - protein, 21 aa, Artificial Sequence
  Cyclic GFR-binding peptide
LNAISILYFDAANNVVLKKYR

SEQ ID NO: 39991 - protein, 25 aa, Artificial Sequence
  Cyclic GFR-binding peptide
KLSPISVLYKDDSSNVILKYHYNMV

SEQ ID NO: 39992 - protein, 26 aa, Artificial Sequence
  Cyclic GFR-binding peptide
TQLSPISVLYIDDSSNVIYKQYENMV

SEQ ID NO: 39993 - protein, 26 aa, Artificial Sequence
  Cyclic GFR-binding peptide
VPQDLNAISILYFVGRTPKVLKKYRM

SEQ ID NO: 39994 - protein, 39 aa, Artificial Sequence
  Cyclic GFR-binding peptide
  MOD_RES (4)..(5)..(36)..(38): Xaa is C or S
ASPXXVSQDLSPISILYIIGKTPKIYKQYEMIVKSXKXS

SEQ ID NO: 39995 - protein, 21 aa, Artificial Sequence
  Cyclic GFR-binding peptide
LSPISILYIDKGVVTYYKQYE

SEQ ID NO: 39996 - protein, 28 aa, Artificial Sequence
  Cyclic GFR-binding peptide
VPTELEPISMLYLDENEKVVKFKYEDMV

SEQ ID NO: 39997 - protein, 22 aa, Artificial Sequence
  Cyclic GFR-binding peptide
KLNAISVLYFDDMGVPTLKKYR

SEQ ID NO: 39998 - protein, 29 aa, Artificial Sequence
  Cyclic GFR-binding peptide
  MOD_RES (3)..(4): Xaa is C or S
KAXXVPTKLSPISILYKDKGVVTYLKYHY

SEQ ID NO: 39999 - protein, 22 aa, Artificial Sequence
  Cyclic GFR-binding peptide
LSPISMLYIDENEKVVYKQYED

SEQ ID NO: 40000 - protein, 25 aa, Artificial Sequence
  Cyclic GFR-binding peptide
EPISILYLVGRKPKVKFKYEMIVRS

SEQ ID NO: 40001 - protein, 39 aa, Artificial Sequence
  Cyclic GFR-binding peptide
  MOD_RES (4)..(5)..(37)..(39): Xaa is C or S
PKPXXAPTKLEPISVLYLDDSSNVIKFKYENMVVRSXGX

SEQ ID NO: 40002 - protein, 28 aa, Artificial Sequence
  Cyclic GFR-binding peptide
  MOD_RES (2)..(3): Xaa is C or S
PXXVPQDLEPISILYLVGRTPKVKFKYE

SEQ ID NO: 40003 - protein, 38 aa, Artificial Sequence
  Cyclic GFR-binding peptide
  MOD_RES (5)..(6)..(38): Xaa is C or S
VPKAXXAPTKLEPISVLYLDSSNNVIKFKYENMVVKAX

SEQ ID NO: 40004 - protein, 34 aa, Artificial Sequence
  Cyclic GFR-binding peptide
  MOD_RES (4)..(5): Xaa is C or S
PKAXXAPTKLSPISVLYIDSSNNVIYKQYENMVV

SEQ ID NO: 40005 - protein, 33 aa, Artificial Sequence
  Cyclic GFR-binding peptide
  MOD_RES (4)..(4): Xaa is C or S
KPTXAPTKLEPISVLYLDDSSNVIKFKYENMVV

SEQ ID NO: 40006 - protein, 31 aa, Artificial Sequence; identical to SEQ ID NO: 11020
  Cyclic GFR-binding peptide
  MOD_RES (5)..(6): Xaa is C or S

SEQ ID NO: 40007 - protein, 28 aa, Artificial Sequence
  Cyclic GFR-binding peptide
  MOD_RES (28)..(28): Xaa is C or S
LSPISVLYIDSSNNVIYKQYENMVVKAX

SEQ ID NO: 40008 - protein, 26 aa, Artificial Sequence
  Cyclic GFR-binding peptide
APTQLEPISVLYLDDSSNVIKFKYEN

SEQ ID NO: 40009 - protein, 35 aa, Artificial Sequence
  Cyclic GFR-binding peptide
  MOD_RES (6)..(7): Xaa is C or S
SIPKAXXVPTELEPISMLYLDEYDKVVKFKYEEMV

SEQ ID NO: 40010 - protein, 34 aa, Artificial Sequence
  Cyclic GFR-binding peptide
  MOD_RES (31)..(33): Xaa is C or S
PTELEPISMLYLDEYDKVVKFKYEEMVVEGXGXR

SEQ ID NO: 40011 - protein, 21 aa, Artificial Sequence
  Cyclic GFR-binding peptide
LNAISILYFVGRTPKVLKKYR

SEQ ID NO: 40012 - protein, 25 aa, Artificial Sequence
  Cyclic GFR-binding peptide
PTKLSPISILYKDKGVVTYLKYHYG

SEQ ID NO: 40013 - protein, 28 aa, Artificial Sequence
  Cyclic GFR-binding peptide
  MOD_RES (27)..(27): Xaa is C or S
NAISVLYFDSSNNVILKKYRNMVVKAXG

SEQ ID NO: 40014 - protein, 24 aa, Artificial Sequence
  Cyclic GFR-binding peptide
TELSPISMLYIDENEKVVYKQYED

SEQ ID NO: 40015 - protein, 33 aa, Artificial Sequence
  Cyclic GFR-binding peptide
  MOD_RES (3)..(4): Xaa is C or S
ASXXVPARLSPISILYKDAANNVVLKYHYDMVV

SEQ ID NO: 40016 - protein, 34 aa, Artificial Sequence
  Cyclic GFR-binding peptide
  MOD_RES (4)..(5): Xaa is C or S
AAPXXVPQALEPISILYLVGRKPKVKFKYEMIVR

SEQ ID NO: 40017 - protein, 28 aa, Artificial Sequence
  Cyclic GFR-binding peptide
APTKLSPISVLYIDDSSNVIYKQYENMV

SEQ ID NO: 40018 - protein, 29 aa, Artificial Sequence
  Cyclic GFR-binding peptide
  MOD_RES (28)..(28): Xaa is C or S
LSPISILYKDKGVVTYLKYHYGMAVSEXG

SEQ ID NO: 40019 - protein, 38 aa, Artificial Sequence; identical to SEQ ID NO: 11029
  Cyclic GFR-binding peptide
  MOD_RES (4)..(5)..(37): Xaa is C or S

SEQ ID NO: 40020 - protein, 28 aa, Artificial Sequence
  Cyclic GFR-binding peptide
  MOD_RES (2)..(3): Xaa is C or S
PXXVSQDLNAISILYFIGKTPKILKKYR

SEQ ID NO: 40021 - protein, 34 aa, Artificial Sequence; identical to SEQ ID NO: 11031
  Cyclic GFR-binding peptide
  MOD_RES (3)..(4): Xaa is C or S

SEQ ID NO: 40022 - protein, 30 aa, Artificial Sequence
  Cyclic GFR-binding peptide
  MOD_RES (1)..(2): Xaa is C or S
XXAPTQLEPISVLYLDDSSNVIKFKYENMV

SEQ ID NO: 40023 - protein, 29 aa, Artificial Sequence
  Cyclic GFR-binding peptide
  MOD_RES (2)..(3): Xaa is C or S
PXXAPTKLSPISVLYIDDSSNVIYKQYEN

SEQ ID NO: 40024 - protein, 27 aa, Artificial Sequence
  Cyclic GFR-binding peptide
PTELEPISMLYLDENEKVVKFKYEDMV

SEQ ID NO: 40025 - protein, 29 aa, Artificial Sequence
  Cyclic GFR-binding peptide
  MOD_RES (28)..(28): Xaa is C or S
ALSPISILYKVGRKPKVLKYHYMIVRSXK

SEQ ID NO: 40026 - protein, 26 aa, Artificial Sequence
  Cyclic GFR-binding peptide
LNAISMLYFDEYDKVVLKKYREMVVE

SEQ ID NO: 40027 - protein, 39 aa, Artificial Sequence
  Cyclic GFR-binding peptide
  MOD_RES (4)..(36)..(38): Xaa is C or S
KPTXAPTKLEPISVLYLDDSSNVIKFKYENMVVRSXGXH

SEQ ID NO: 40028 - protein, 23 aa, Artificial Sequence
  Cyclic GFR-binding peptide
QDLSPISILYKVGRTPKVLKYHY

SEQ ID NO: 40029 - protein, 38 aa, Artificial Sequence; identical to SEQ ID NO: 11037
  Cyclic GFR-binding peptide
  MOD_RES (6)..(7): Xaa is C or S

SEQ ID NO: 40030 - protein, 39 aa, Artificial Sequence; identical to SEQ ID NO: 11038
  Cyclic GFR-binding peptide
  MOD_RES (5)..(6)..(39): Xaa is C or S

SEQ ID NO: 40031 - protein, 32 aa, Artificial Sequence; identical to SEQ ID NO: 11039
  Cyclic GFR-binding peptide
  MOD_RES (31)..(31): Xaa is C or S

SEQ ID NO: 40032 - protein, 29 aa, Artificial Sequence
  Cyclic GFR-binding peptide
PTQLSPISVLYIDDSSNVIYKQYENMVVR

SEQ ID NO: 40033 - protein, 26 aa, Artificial Sequence
  Cyclic GFR-binding peptide
EPISVLYLDDMGVPTKFKYEEGMSVA

SEQ ID NO: 40034 - protein, 30 aa, Artificial Sequence; identical to SEQ ID NO: 11047
  Cyclic GFR-binding peptide

SEQ ID NO: 40035 - protein, 29 aa, Artificial Sequence
  Cyclic GFR-binding peptide
  MOD_RES (27)..(29): Xaa is C or S
NAISMLYFDEYDKVVLKKYREMVVEGXGX

SEQ ID NO: 40036 - protein, 28 aa, Artificial Sequence
  Cyclic GFR-binding peptide
  MOD_RES (1)..(2): Xaa is C or S
XXVPQDLSPISILYKVGRTPKVLKYHYM

SEQ ID NO: 40037 - protein, 37 aa, Artificial Sequence; identical to SEQ ID NO: 11050
  Cyclic GFR-binding peptide
  MOD_RES (2)..(3)..(35)..(37): Xaa is C or S

SEQ ID NO: 40038 - protein, 32 aa, Artificial Sequence; identical to SEQ ID NO: 11053
  Cyclic GFR-binding peptide
  MOD_RES (30)..(32): Xaa is C or S

SEQ ID NO: 40039 - protein, 28 aa, Artificial Sequence
  Cyclic GFR-binding peptide
  MOD_RES (28)..(28): Xaa is C or S
NAISVLYFDDMGVPTLKKYREGMSVAEX

SEQ ID NO: 40040 - protein, 37 aa, Artificial Sequence
  Cyclic GFR-binding peptide
  MOD_RES (2)..(3)..(35)..(37): Xaa is C or S
SXXVPARLNAISILYFDAANNVVLKKYRDMVVEAXGX

SEQ ID NO: 40041 - protein, 30 aa, Artificial Sequence
  Cyclic GFR-binding peptide
VPTKLSPISVLYIDDMGVPTYKQYEEGMSV

SEQ ID NO: 40042 - protein, 29 aa, Artificial Sequence
  Cyclic GFR-binding peptide
  MOD_RES (27)..(29): Xaa is C or S
SPISVLYIDSSNNVIYKQYENMVVKAXGX

SEQ ID NO: 40043 - protein, 34 aa, Artificial Sequence
  Cyclic GFR-binding peptide
  MOD_RES (1)..(34): Xaa is C or S
XVPTKLSPISVLYIDDMGVPTYKQYEEGMSVAEX

SEQ ID NO: 40044 - protein, 31 aa, Artificial Sequence; identical to SEQ ID NO: 11057
  Cyclic GFR-binding peptide
  MOD_RES (2)..(3): Xaa is C or S

SEQ ID NO: 40045 - protein, 25 aa, Artificial Sequence
  Cyclic GFR-binding peptide
SPISILYKVGRKPKVLKYHYMIVRS

SEQ ID NO: 40046 - protein, 27 aa, Artificial Sequence
  Cyclic GFR-binding peptide
  MOD_RES (1)..(1): Xaa is C or S
XVPTKLNAISVLYFDDMGVPTLKKYRE

SEQ ID NO: 40047 - protein, 33 aa, Artificial Sequence; identical to SEQ ID NO: 11060
  Cyclic GFR-binding peptide
  MOD_RES (3)..(4): Xaa is C or S

SEQ ID NO: 40048 - protein, 28 aa, Artificial Sequence
  Cyclic GFR-binding peptide
  MOD_RES (1)..(2): Xaa is C or S
XXVPTKLNAISVLYFDDMGVPTLKKYRE

SEQ ID NO: 40049 - protein, 37 aa, Artificial Sequence; identical to SEQ ID NO: 11066
  Cyclic GFR-binding peptide
  MOD_RES (4)..(5)..(37): Xaa is C or S

SEQ ID NO: 40050 - protein, 33 aa, Artificial Sequence; identical to SEQ ID NO: 11067
  Cyclic GFR-binding peptide
  MOD_RES (1)..(2): Xaa is C or S

SEQ ID NO: 40051 - protein, 39 aa, Artificial Sequence; identical to SEQ ID NO: 11068
  Cyclic GFR-binding peptide
  MOD_RES (4)..(5)..(37)..(39): Xaa is C or S

SEQ ID NO: 40052 - protein, 32 aa, Artificial Sequence; identical to SEQ ID NO: 11069
  Cyclic GFR-binding peptide
  MOD_RES (30)..(32): Xaa is C or S

SEQ ID NO: 40053 - protein, 33 aa, Artificial Sequence
  Cyclic GFR-binding peptide
  MOD_RES (32)..(32): Xaa is C or S
VPARLNAISILYFDAANNVVLKKYRDMVVEAXG

SEQ ID NO: 40054 - protein, 33 aa, Artificial Sequence
  Cyclic GFR-binding peptide
  MOD_RES (2)..(3): Xaa is C or S
AXXVPTELSPISMLYIDENEKVVYKQYEDMVVE

SEQ ID NO: 40055 - protein, 27 aa, Artificial Sequence
  Cyclic GFR-binding peptide
  MOD_RES (1)..(1): Xaa is C or S
XVPTKLSPISVLYIDDMGVPTYKQYEE

SEQ ID NO: 40056 - protein, 34 aa, Artificial Sequence; identical to SEQ ID NO: 11070
  Cyclic GFR-binding peptide
  MOD_RES (31)..(33): Xaa is C or S

SEQ ID NO: 40057 - protein, 27 aa, Artificial Sequence
  Cyclic GFR-binding peptide
PTKLSPISVLYIDDMGVPTYKQYEEGM

SEQ ID NO: 40058 - protein, 22 aa, Artificial Sequence
  Cyclic GFR-binding peptide
NAISILYFIGKTPKILKKYRMI

SEQ ID NO: 40059 - protein, 28 aa, Artificial Sequence
  Cyclic GFR-binding peptide
SQDLEPISILYLIGKTPKIKFKYEMIVK

SEQ ID NO: 40060 - protein, 29 aa, Artificial Sequence
  Cyclic GFR-binding peptide
  MOD_RES (1)..(1): Xaa is C or S
XAPTKLSPISVLYIDDSSNVIYKQYENMV

SEQ ID NO: 40061 - protein, 31 aa, Artificial Sequence
  Cyclic GFR-binding peptide
  MOD_RES (5)..(6): Xaa is C or S
SASPXXVPQDLEPISILYLVGRTPKVKFKYE

SEQ ID NO: 40062 - protein, 22 aa, Artificial Sequence
  Cyclic GFR-binding peptide
LEPISILYLIGKTPKIKFKYEM

SEQ ID NO: 40063 - protein, 35 aa, Artificial Sequence
  Cyclic GFR-binding peptide
  MOD_RES (33)..(35): Xaa is C or S
VPTKLEPISVLYLDDMGVPTKFKYEEGMSVAEXGX

SEQ ID NO: 40064 - protein, 36 aa, Artificial Sequence; identical to SEQ ID NO: 11074
  Cyclic GFR-binding peptide
  MOD_RES (3)..(4)..(36): Xaa is C or S

SEQ ID NO: 40065 - protein, 31 aa, Artificial Sequence
  Cyclic GFR-binding peptide
  MOD_RES (3)..(4): Xaa is C or S
APXXVPQALEPISILYLVGRKPKVKFKYEMI

SEQ ID NO: 40066 - protein, 32 aa, Artificial Sequence
  Cyclic GFR-binding peptide
  MOD_RES (32)..(32): Xaa is C or S
VPTKLSPISILYIDKGVVTYYKQYEGMAVSEX

SEQ ID NO: 40067 - protein, 38 aa, Artificial Sequence
  Cyclic GFR-binding peptide
  MOD_RES (5)..(6)..(38): Xaa is C or S
VPKAXXAPTKLSPISVLYIDSSNNVIYKQYENMVVKAX

SEQ ID NO: 40068 - protein, 31 aa, Artificial Sequence; identical to SEQ ID NO: 11076
  Cyclic GFR-binding peptide
  MOD_RES (28)..(30): Xaa is C or S

SEQ ID NO: 40069 - protein, 26 aa, Artificial Sequence
  Cyclic GFR-binding peptide
LSPISILYIVGRTPKVYKQYEMVVKS

SEQ ID NO: 40070 - protein, 31 aa, Artificial Sequence
  Cyclic GFR-binding peptide
  MOD_RES (30)..(30): Xaa is C or S
TKLNAISILYFDKGVVTYLKKYRGMAVSEXG

SEQ ID NO: 40071 - protein, 23 aa, Artificial Sequence
  Cyclic GFR-binding peptide
QLSPISVLYKDDSSNVILKYHYN

SEQ ID NO: 40072 - protein, 29 aa, Artificial Sequence
  Cyclic GFR-binding peptide
  MOD_RES (27)..(29): Xaa is C or S
LEPISILYLVGRKPKVKFKYEMIVRSXKX

SEQ ID NO: 40073 - protein, 26 aa, Artificial Sequence
  Cyclic GFR-binding peptide
  MOD_RES (1)..(1): Xaa is C or S
XVPTKLSPISILYIDKGVVTYYKQYE

SEQ ID NO: 40074 - protein, 35 aa, Artificial Sequence
  Cyclic GFR-binding peptide
  MOD_RES (6)..(7): Xaa is C or S
KASKAXXVPTKLSPISILYKDKGVVTYLKYHYGMA

SEQ ID NO: 40075 - protein, 23 aa, Artificial Sequence
  Cyclic GFR-binding peptide
ELNAISMLYFDEYDKVVLKKYRE

SEQ ID NO: 40076 - protein, 30 aa, Artificial Sequence
  Cyclic GFR-binding peptide
  MOD_RES (2)..(3): Xaa is C or S
AXXVPTKLSPISVLYIDDMGVPTYKQYEEG

SEQ ID NO: 40077 - protein, 39 aa, Artificial Sequence
  Cyclic GFR-binding peptide
  MOD_RES (5)..(6)..(37)..(39): Xaa is C or S
SAAPXXVPQALEPISILYLVGRKPKVKFKYEMIVRSXKX

SEQ ID NO: 40078 - protein, 33 aa, Artificial Sequence
  Cyclic GFR-binding peptide
  MOD_RES (2)..(2): Xaa is C or S
TXAPTKLSPISVLYIDDSSNVIYKQYENMVVRS

SEQ ID NO: 40079 - protein, 34 aa, Artificial Sequence
  Cyclic GFR-binding peptide
  MOD_RES (4)..(5): Xaa is C or S
GKAXXVPTKLEPISVLYLDDMGVPTKFKYEEGMS

SEQ ID NO: 40080 - protein, 32 aa, Artificial Sequence
  Cyclic GFR-binding peptide
  MOD_RES (32)..(32): Xaa is C or S
APTKLEPISVLYLDSSNNVIKFKYENMVVKAX

SEQ ID NO: 40081 - protein, 31 aa, Artificial Sequence; identical to SEQ ID NO: 11087
  Cyclic GFR-binding peptide
  MOD_RES (29)..(31): Xaa is C or S

SEQ ID NO: 40082 - protein, 23 aa, Artificial Sequence
  Cyclic GFR-binding peptide
SPISMLYIDEYDKVVYKQYEEMV

SEQ ID NO: 40083 - protein, 39 aa, Artificial Sequence
  Cyclic GFR-binding peptide
  MOD_RES (4)..(5)..(37)..(39): Xaa is C or S
PKPXXAPTQLEPISVLYLDDSSNVIKFKYENMVVRAXGX

SEQ ID NO: 40084 - protein, 35 aa, Artificial Sequence
  Cyclic GFR-binding peptide
  MOD_RES (4)..(5): Xaa is C or S
SKAXXVPTKLSPISILYKDKGVVTYLKYHYGMAVS

SEQ ID NO: 40085 - protein, 37 aa, Artificial Sequence
  Cyclic GFR-binding peptide
  MOD_RES (3)..(4)..(36): Xaa is C or S
KAXXAPTKLEPISVLYLDSSNNVIKFKYENMVVKAXG

SEQ ID NO: 40086 - protein, 38 aa, Artificial Sequence
  Cyclic GFR-binding peptide
  MOD_RES (3)..(4)..(36)..(38): Xaa is C or S
KPXXAPTQLEPISVLYLDDSSNVIKFKYENMVVRAXGX

SEQ ID NO: 40087 - protein, 22 aa, Artificial Sequence
  Cyclic GFR-binding peptide
SPISILYKDKGVVTYLKYHYGM

SEQ ID NO: 40088 - protein, 25 aa, Artificial Sequence
  Cyclic GFR-binding peptide
APTKLSPISVLYKDDSSNVILKYHY

SEQ ID NO: 40089 - protein, 24 aa, Artificial Sequence
  Cyclic GFR-binding peptide
QDLSPISILYKIGKTPKILKYHYM

SEQ ID NO: 40090 - protein, 33 aa, Artificial Sequence; identical to SEQ ID NO: 11092
  Cyclic GFR-binding peptide
  MOD_RES (3)..(4): Xaa is C or S

SEQ ID NO: 40091 - protein, 29 aa, Artificial Sequence
  Cyclic GFR-binding peptide
APTKLEPISVLYLDSSNNVIKFKYENMVV

SEQ ID NO: 40092 - protein, 40 aa, Artificial Sequence
  Cyclic GFR-binding peptide
  MOD_RES (6)..(7)..(39): Xaa is C or S
SIPKAXXVPTELEPISMLYLDEYDKVVKFKYEEMVVEGXG

SEQ ID NO: 40093 - protein, 36 aa, Artificial Sequence
  Cyclic GFR-binding peptide
  MOD_RES (2)..(3)..(34)..(36): Xaa is C or S
PXXVSQDLEPISILYLIGKTPKIKFKYEMIVKSXKX

SEQ ID NO: 40094 - protein, 36 aa, Artificial Sequence; identical to SEQ ID NO: 11096
  Cyclic GFR-binding peptide
  MOD_RES (1)..(2)..(33)..(35): Xaa is C or S

SEQ ID NO: 40095 - protein, 36 aa, Artificial Sequence
  Cyclic GFR-binding peptide
  MOD_RES (2)..(3)..(35): Xaa is C or S
PXXAPTQLEPISVLYLDDSSNVIKFKYENMVVRAXG

SEQ ID NO: 40096 - protein, 33 aa, Artificial Sequence
  Cyclic GFR-binding peptide
  MOD_RES (1)..(2): Xaa is C or S
XXAPTKLSPISVLYIDSSNNVIYKQYENMVVKA

SEQ ID NO: 40097 - protein, 29 aa, Artificial Sequence
  Cyclic GFR-binding peptide
  MOD_RES (1)..(1): Xaa is C or S
XVPTELEPISMLYLDENEKVVKFKYEDMV

SEQ ID NO: 40098 - protein, 25 aa, Artificial Sequence
  Cyclic GFR-binding peptide
QDLEPISILYLVGRTPKVKFKYEMV

SEQ ID NO: 40099 - protein, 36 aa, Artificial Sequence
  Cyclic GFR-binding peptide
  MOD_RES (3)..(4)..(35): Xaa is C or S
SPXXVSQDLSPISILYIIGKTPKIYKQYEMIVKSXK

SEQ ID NO: 40100 - protein, 24 aa, Artificial Sequence
  Cyclic GFR-binding peptide
SPISILYIVGRKPKVYKQYEMIVR

SEQ ID NO: 40101 - protein, 29 aa, Artificial Sequence
  Cyclic GFR-binding peptide
  MOD_RES (28)..(28): Xaa is C or S
LEPISVLYLDSSNNVIKFKYENMVVKAXG

SEQ ID NO: 40102 - protein, 24 aa, Artificial Sequence
  Cyclic GFR-binding peptide
ALNAISILYFVGRKPKVLKKYRMI

SEQ ID NO: 40103 - protein, 29 aa, Artificial Sequence
  Cyclic GFR-binding peptide
PTELSPISMLYKDENEKVVLKYHYDMVVE

SEQ ID NO: 40104 - protein, 33 aa, Artificial Sequence
  Cyclic GFR-binding peptide
  MOD_RES (31)..(33): Xaa is C or S
PTQLSPISVLYIDDSSNVIYKQYENMVVRAXGX

SEQ ID NO: 40105 - protein, 28 aa, Artificial Sequence
  Cyclic GFR-binding peptide
VPTELNAISMLYFDEYDKVVLKKYREMV

SEQ ID NO: 40106 - protein, 35 aa, Artificial Sequence
  Cyclic GFR-binding peptide
  MOD_RES (1)..(34): Xaa is C or S
XVPTKLEPISVLYLDDMGVPTKFKYEEGMSVAEXG

SEQ ID NO: 40107 - protein, 29 aa, Artificial Sequence
  Cyclic GFR-binding peptide
  MOD_RES (27)..(29): Xaa is C or S
LEPISILYLIGKTPKIKFKYEMIVKSXKX

SEQ ID NO: 40108 - protein, 35 aa, Artificial Sequence
  Cyclic GFR-binding peptide
  MOD_RES (1)..(32)..(34): Xaa is C or S
XVSQDLSPISILYIIGKTPKIYKQYEMIVKSXKXS

SEQ ID NO: 40109 - protein, 36 aa, Artificial Sequence; identical to SEQ ID NO: 11114
  Cyclic GFR-binding peptide
  MOD_RES (4)..(5): Xaa is C or S

SEQ ID NO: 40110 - protein, 24 aa, Artificial Sequence
  Cyclic GFR-binding peptide
LEPISILYLVGRTPKVKFKYEMVV

SEQ ID NO: 40111 - protein, 25 aa, Artificial Sequence
  Cyclic GFR-binding peptide
LSPISMLYKDENEKVVLKYHYDMVV

SEQ ID NO: 40112 - protein, 30 aa, Artificial Sequence
  Cyclic GFR-binding peptide
  MOD_RES (29)..(29): Xaa is C or S
ELSPISMLYIDENEKVVYKQYEDMVVEGXG

SEQ ID NO: 40113 - protein, 36 aa, Artificial Sequence
  Cyclic GFR-binding peptide
  MOD_RES (4)..(5): Xaa is C or S
PKAXXVPTELEPISMLYLDEYDKVVKFKYEEMVVEG

SEQ ID NO: 40114 - protein, 36 aa, Artificial Sequence; identical to SEQ ID NO: 11116
  Cyclic GFR-binding peptide
  MOD_RES (4)..(5): Xaa is C or S

SEQ ID NO: 40115 - protein, 33 aa, Artificial Sequence; identical to SEQ ID NO: 11117
  Cyclic GFR-binding peptide
  MOD_RES (32)..(32): Xaa is C or S

SEQ ID NO: 40116 - protein, 37 aa, Artificial Sequence
  Cyclic GFR-binding peptide
  MOD_RES (4)..(36): Xaa is C or S
KPTXAPTKLSPISVLYIDDSSNVIYKQYENMVVRSXG

SEQ ID NO: 40117 - protein, 32 aa, Artificial Sequence
  Cyclic GFR-binding peptide
  MOD_RES (1)..(2): Xaa is C or S
XXVSQDLSPISILYIIGKTPKIYKQYEMIVKS

SEQ ID NO: 40118 - protein, 20 aa, Artificial Sequence
  Cyclic GFR-binding peptide
NAISILYFVGRTPKVLKKYR

SEQ ID NO: 40119 - protein, 36 aa, Artificial Sequence
  Cyclic GFR-binding peptide
  MOD_RES (2)..(3)..(35): Xaa is C or S
PXXAPTKLEPISVLYLDDSSNVIKFKYENMVVRSXG

SEQ ID NO: 40120 - protein, 36 aa, Artificial Sequence
  Cyclic GFR-binding peptide
  MOD_RES (2)..(3)..(35): Xaa is C or S
AXXVPTELSPISMLYIDEYDKVVYKQYEEMVVEGXG

SEQ ID NO: 40121 - protein, 21 aa, Artificial Sequence
  Cyclic GFR-binding peptide
LEPISMLYLDENEKVVKFKYE

SEQ ID NO: 40122 - protein, 33 aa, Artificial Sequence
  Cyclic GFR-binding peptide
  MOD_RES (3)..(4): Xaa is C or S
KAXXVPTKLEPISVLYLDDMGVPTKFKYEEGMS

SEQ ID NO: 40123 - protein, 27 aa, Artificial Sequence
  Cyclic GFR-binding peptide
  MOD_RES (1)..(1): Xaa is C or S
XVPQALNAISILYFVGRKPKVLKKYRM

SEQ ID NO: 40124 - protein, 31 aa, Artificial Sequence; identical to SEQ ID NO: 11129
  Cyclic GFR-binding peptide
  MOD_RES (2)..(3): Xaa is C or S

SEQ ID NO: 40125 - protein, 26 aa, Artificial Sequence
  Cyclic GFR-binding peptide
ALNAISILYFVGRKPKVLKKYRMIVR

SEQ ID NO: 40126 - protein, 41 aa, Artificial Sequence; identical to SEQ ID NO: 11131
  Cyclic GFR-binding peptide
  MOD_RES (5)..(6)..(38)..(40): Xaa is C or S

SEQ ID NO: 40127 - protein, 32 aa, Artificial Sequence
  Cyclic GFR-binding peptide
  MOD_RES (7)..(7): Xaa is C or S
HVTKPTXAPTKLEPISVLYLDDSSNVIKFKYE

SEQ ID NO: 40128 - protein, 33 aa, Artificial Sequence; identical to SEQ ID NO: 11133
  Cyclic GFR-binding peptide
  MOD_RES (30)..(32): Xaa is C or S

SEQ ID NO: 40129 - protein, 32 aa, Artificial Sequence; identical to SEQ ID NO: 11135
  Cyclic GFR-binding peptide
  MOD_RES (31)..(31): Xaa is C or S

SEQ ID NO: 40130 - protein, 25 aa, Artificial Sequence
  Cyclic GFR-binding peptide
KLSPISVLYIDSSNNVIYKQYENMV

SEQ ID NO: 40131 - protein, 32 aa, Artificial Sequence
  Cyclic GFR-binding peptide
  MOD_RES (6)..(7): Xaa is C or S
TVPKPXXAPTQLEPISVLYLDDSSNVIKFKYE

SEQ ID NO: 40132 - protein, 36 aa, Artificial Sequence
  Cyclic GFR-binding peptide
  MOD_RES (4)..(36): Xaa is C or S
KPTXAPTKLSPISVLYIDDSSNVIYKQYENMVVRSX

SEQ ID NO: 40133 - protein, 39 aa, Artificial Sequence
  Cyclic GFR-binding peptide
  MOD_RES (4)..(5)..(37)..(39): Xaa is C or S
PKAXXVPTELSPISMLYIDENEKVVYKQYEDMVVEGXGX

SEQ ID NO: 40134 - protein, 31 aa, Artificial Sequence
  Cyclic GFR-binding peptide
  MOD_RES (28)..(30): Xaa is C or S
ALSPISILYIVGRKPKVYKQYEMIVRSXKXS

SEQ ID NO: 40135 - protein, 27 aa, Artificial Sequence
  Cyclic GFR-binding peptide
LSPISMLYKDEYDKVVLKYHYEMVVEG

SEQ ID NO: 40136 - protein, 35 aa, Artificial Sequence; identical to SEQ ID NO: 11144
  Cyclic GFR-binding peptide
  MOD_RES (6)..(7): Xaa is C or S

SEQ ID NO: 40137 - protein, 39 aa, Artificial Sequence
  Cyclic GFR-binding peptide
  MOD_RES (6)..(7)..(39): Xaa is C or S
AVPKAXXAPTKLSPISVLYIDSSNNVIYKQYENMVVKAX

SEQ ID NO: 40138 - protein, 27 aa, Artificial Sequence
  Cyclic GFR-binding peptide
  MOD_RES (1)..(1): Xaa is C or S
XVPQALSPISILYIVGRKPKVYKQYEM

SEQ ID NO: 40139 - protein, 33 aa, Artificial Sequence
  Cyclic GFR-binding peptide
  MOD_RES (1)..(2): Xaa is C or S
XXVPARLNAISILYFDAANNVVLKKYRDMVVEA

SEQ ID NO: 40140 - protein, 25 aa, Artificial Sequence
  Cyclic GFR-binding peptide
TELSPISMLYIDEYDKVVYKQYEEM

SEQ ID NO: 40141 - protein, 30 aa, Artificial Sequence
  Cyclic GFR-binding peptide
  MOD_RES (1)..(1): Xaa is C or S
XVPQDLSPISILYIVGRTPKVYKQYEMVVK

SEQ ID NO: 40142 - protein, 35 aa, Artificial Sequence; identical to SEQ ID NO: 11147
  Cyclic GFR-binding peptide
  MOD_RES (4)..(5): Xaa is C or S

SEQ ID NO: 40143 - protein, 39 aa, Artificial Sequence
  Cyclic GFR-binding peptide
  MOD_RES (5)..(6)..(38): Xaa is C or S
ASKAXXVPTKLSPISILYKDKGVVTYLKYHYGMAVSEXG

SEQ ID NO: 40144 - protein, 36 aa, Artificial Sequence; identical to SEQ ID NO: 11148
  Cyclic GFR-binding peptide
  MOD_RES (3)..(4)..(36): Xaa is C or S

SEQ ID NO: 40145 - protein, 27 aa, Artificial Sequence
  Cyclic GFR-binding peptide
LEPISVLYLDDMGVPTKFKYEEGMSVA

SEQ ID NO: 40146 - protein, 30 aa, Artificial Sequence
  Cyclic GFR-binding peptide
  MOD_RES (29)..(29): Xaa is C or S
KLEPISVLYLDDSSNVIKFKYENMVVRSXG

SEQ ID NO: 40147 - protein, 31 aa, Artificial Sequence
  Cyclic GFR-binding peptide
  MOD_RES (30)..(30): Xaa is C or S
PQDLSPISILYIVGRTPKVYKQYEMVVKSXK

SEQ ID NO: 40148 - protein, 34 aa, Artificial Sequence; identical to SEQ ID NO: 11151
  Cyclic GFR-binding peptide
  MOD_RES (4)..(5): Xaa is C or S

SEQ ID NO: 40149 - protein, 26 aa, Artificial Sequence
  Cyclic GFR-binding peptide
  MOD_RES (26)..(26): Xaa is C or S
EPISILYLVGRTPKVKFKYEMVVKSX

SEQ ID NO: 40150 - protein, 37 aa, Artificial Sequence
  Cyclic GFR-binding peptide
  MOD_RES (1)..(2)..(34)..(36): Xaa is C or S
XXVPTKLSPISILYKDKGVVTYLKYHYGMAVSEXGXR

SEQ ID NO: 40151 - protein, 25 aa, Artificial Sequence
  Cyclic GFR-binding peptide
EPISVLYLDDSSNVIKFKYENMVVR

SEQ ID NO: 40152 - protein, 26 aa, Artificial Sequence
  Cyclic GFR-binding peptide
  MOD_RES (1)..(1): Xaa is C or S
XAPTQLEPISVLYLDDSSNVIKFKYE

SEQ ID NO: 40153 - protein, 26 aa, Artificial Sequence
  Cyclic GFR-binding peptide
TKLNAISVLYFDSSNNVILKKYRNMV

SEQ ID NO: 40154 - protein, 27 aa, Artificial Sequence
  Cyclic GFR-binding peptide
  MOD_RES (1)..(2): Xaa is C or S
XXAPTQLSPISVLYKDDSSNVILKYHY

SEQ ID NO: 40155 - protein, 30 aa, Artificial Sequence
  Cyclic GFR-binding peptide
  MOD_RES (29)..(29): Xaa is C or S
LSPISVLYIDDMGVPTYKQYEEGMSVAEXG

SEQ ID NO: 40156 - protein, 40 aa, Artificial Sequence
  Cyclic GFR-binding peptide
  MOD_RES (7)..(39): Xaa is C or S
HVTKPTXAPTKLEPISVLYLDDSSNVIKFKYENMVVRSXG

SEQ ID NO: 40157 - protein, 35 aa, Artificial Sequence
  Cyclic GFR-binding peptide
  MOD_RES (33)..(35): Xaa is C or S
VPTKLSPISVLYIDDMGVPTYKQYEEGMSVAEXGX

SEQ ID NO: 40158 - protein, 32 aa, Artificial Sequence
  Cyclic GFR-binding peptide
  MOD_RES (31)..(31): Xaa is C or S
PTELSPISMLYIDEYDKVVYKQYEEMVVEGXG

SEQ ID NO: 40159 - protein, 29 aa, Artificial Sequence
  Cyclic GFR-binding peptide
  MOD_RES (29)..(29): Xaa is C or S
RLEPISILYLDAANNVVKFKYEDMVVEAX

SEQ ID NO: 40160 - protein, 35 aa, Artificial Sequence; identical to SEQ ID NO: 11157
  Cyclic GFR-binding peptide
  MOD_RES (2)..(3)..(34): Xaa is C or S

SEQ ID NO: 40161 - protein, 32 aa, Artificial Sequence
  Cyclic GFR-binding peptide
  MOD_RES (6)..(7): Xaa is C or S
YVPKPXXAPTKLEPISVLYLDDSSNVIKFKYE

SEQ ID NO: 40162 - protein, 22 aa, Artificial Sequence
  Cyclic GFR-binding peptide
EPISVLYLDDSSNVIKFKYENM

SEQ ID NO: 40163 - protein, 31 aa, Artificial Sequence; identical to SEQ ID NO: 11158
  Cyclic GFR-binding peptide
  MOD_RES (29)..(31): Xaa is C or S

SEQ ID NO: 40164 - protein, 39 aa, Artificial Sequence
  Cyclic GFR-binding peptide
  MOD_RES (6)..(7)..(39): Xaa is C or S
YVPKPXXAPTKLSPISVLYIDDSSNVIYKQYENMVVRSX

SEQ ID NO: 40165 - protein, 36 aa, Artificial Sequence
  Cyclic GFR-binding peptide
  MOD_RES (2)..(3)..(35): Xaa is C or S
AXXAPTKLSPISVLYIDSSNNVIYKQYENMVVKAXG

SEQ ID NO: 40166 - protein, 29 aa, Artificial Sequence
  Cyclic GFR-binding peptide
  MOD_RES (1)..(1): Xaa is C or S
XVPTKLSPISVLYIDDMGVPTYKQYEEGM

SEQ ID NO: 40167 - protein, 38 aa, Artificial Sequence; identical to SEQ ID NO: 11160
  Cyclic GFR-binding peptide
  MOD_RES (3)..(4)..(36)..(38): Xaa is C or S

SEQ ID NO: 40168 - protein, 30 aa, Artificial Sequence
  Cyclic GFR-binding peptide
  MOD_RES (30)..(30): Xaa is C or S
TKLEPISVLYLDDSSNVIKFKYENMVVRSX

SEQ ID NO: 40169 - protein, 21 aa, Artificial Sequence
  Cyclic GFR-binding peptide
LSPISILYIIGKTPKIYKQYE

SEQ ID NO: 40170 - protein, 31 aa, Artificial Sequence
  Cyclic GFR-binding peptide
  MOD_RES (1)..(1): Xaa is C or S
XVPARLEPISILYLDAANNVVKFKYEDMVVE

SEQ ID NO: 40171 - protein, 33 aa, Artificial Sequence; identical to SEQ ID NO: 11163
  Cyclic GFR-binding peptide
  MOD_RES (1)..(2)..(33): Xaa is C or S

SEQ ID NO: 40172 - protein, 28 aa, Artificial Sequence
  Cyclic GFR-binding peptide
  MOD_RES (27)..(27): Xaa is C or S
LEPISILYLIGKTPKIKFKYEMIVKSXK

SEQ ID NO: 40173 - protein, 37 aa, Artificial Sequence; identical to SEQ ID NO: 11165
  Cyclic GFR-binding peptide
  MOD_RES (6)..(7): Xaa is C or S

SEQ ID NO: 40174 - protein, 25 aa, Artificial Sequence
  Cyclic GFR-binding peptide
KLSPISILYKDKGVVTYLKYHYGMA

SEQ ID NO: 40175 - protein, 32 aa, Artificial Sequence
  Cyclic GFR-binding peptide
  MOD_RES (2)..(3): Xaa is C or S
PXXAPTKLSPISVLYIDDSSNVIYKQYENMVV

SEQ ID NO: 40176 - protein, 31 aa, Artificial Sequence
  Cyclic GFR-binding peptide
  MOD_RES (28)..(30): Xaa is C or S
LSPISILYIDKGVVTYYKQYEGMAVSEXGXR

SEQ ID NO: 40177 - protein, 34 aa, Artificial Sequence
  Cyclic GFR-binding peptide
  MOD_RES (5)..(6): Xaa is C or S
APASXXVPARLSPISILYKDAANNVVLKYHYDMV

SEQ ID NO: 40178 - protein, 34 aa, Artificial Sequence
  Cyclic GFR-binding peptide
  MOD_RES (4)..(5): Xaa is C or S
PKPXXAPTKLSPISVLYIDDSSNVIYKQYENMVV

SEQ ID NO: 40179 - protein, 30 aa, Artificial Sequence
  Cyclic GFR-binding peptide
  MOD_RES (30)..(30): Xaa is C or S
KLSPISVLYIDDMGVPTYKQYEEGMSVAEX

SEQ ID NO: 40180 - protein, 30 aa, Artificial Sequence; identical to SEQ ID NO: 11167
  Cyclic GFR-binding peptide
  MOD_RES (4)..(5): Xaa is C or S

SEQ ID NO: 40181 - protein, 36 aa, Artificial Sequence; identical to SEQ ID NO: 11172
  Cyclic GFR-binding peptide
  MOD_RES (1)..(2)..(34)..(36): Xaa is C or S

SEQ ID NO: 40182 - protein, 23 aa, Artificial Sequence
  Cyclic GFR-binding peptide
DLSPISILYIVGRTPKVYKQYEM

SEQ ID NO: 40183 - protein, 28 aa, Artificial Sequence
  Cyclic GFR-binding peptide
PTELSPISMLYKDEYDKVVLKYHYEMVV

SEQ ID NO: 40184 - protein, 30 aa, Artificial Sequence
  Cyclic GFR-binding peptide
  MOD_RES (1)..(1): Xaa is C or S
XAPTKLEPISVLYLDSSNNVIKFKYENMVV

SEQ ID NO: 40185 - protein, 36 aa, Artificial Sequence; identical to SEQ ID NO: 11174
  Cyclic GFR-binding peptide
  MOD_RES (5)..(6): Xaa is C or S

SEQ ID NO: 40186 - protein, 30 aa, Artificial Sequence
  Cyclic GFR-binding peptide
  MOD_RES (4)..(5): Xaa is C or S
ASPXXVPQDLEPISILYLVGRTPKVKFKYE

SEQ ID NO: 40187 - protein, 32 aa, Artificial Sequence; identical to SEQ ID NO: 11176
  Cyclic GFR-binding peptide
  MOD_RES (31)..(31): Xaa is C or S

SEQ ID NO: 40188 - protein, 24 aa, Artificial Sequence
  Cyclic GFR-binding peptide
TKLNAISVLYFDSSNNVILKKYRN

SEQ ID NO: 40189 - protein, 34 aa, Artificial Sequence
  Cyclic GFR-binding peptide
  MOD_RES (31)..(33): Xaa is C or S
PTKLEPISVLYLDDSSNVIKFKYENMVVRSXGXH

SEQ ID NO: 40190 - protein, 32 aa, Artificial Sequence
  Cyclic GFR-binding peptide
  MOD_RES (1)..(1): Xaa is C or S
XVPTKLSPISVLYIDDMGVPTYKQYEEGMSVA

SEQ ID NO: 40191 - protein, 40 aa, Artificial Sequence
  Cyclic GFR-binding peptide
  MOD_RES (5)..(6)..(38)..(40): Xaa is C or S
VPKPXXAPTQLEPISVLYLDDSSNVIKFKYENMVVRAXGX

SEQ ID NO: 40192 - protein, 30 aa, Artificial Sequence; identical to SEQ ID NO: 11181
  Cyclic GFR-binding peptide
  MOD_RES (27)..(29): Xaa is C or S

SEQ ID NO: 40193 - protein, 25 aa, Artificial Sequence
  Cyclic GFR-binding peptide
DLSPISILYKVGRTPKVLKYHYMVV

SEQ ID NO: 40194 - protein, 31 aa, Artificial Sequence
  Cyclic GFR-binding peptide
  MOD_RES (30)..(30): Xaa is C or S
PQDLEPISILYLVGRTPKVKFKYEMVVKSXK

SEQ ID NO: 40195 - protein, 33 aa, Artificial Sequence
  Cyclic GFR-binding peptide
  MOD_RES (4)..(5): Xaa is C or S
ASPXXVPQDLSPISILYIVGRTPKVYKQYEMVV

SEQ ID NO: 40196 - protein, 35 aa, Artificial Sequence
  Cyclic GFR-binding peptide
  MOD_RES (1)..(33)..(35): Xaa is C or S
XAPTQLSPISVLYIDDSSNVIYKQYENMVVRAXGX

SEQ ID NO: 40197 - protein, 26 aa, Artificial Sequence
  Cyclic GFR-binding peptide
QDLEPISILYLIGKTPKIKFKYEMIV

SEQ ID NO: 40198 - protein, 31 aa, Artificial Sequence
  Cyclic GFR-binding peptide
  MOD_RES (29)..(31): Xaa is C or S
QLEPISVLYLDDSSNVIKFKYENMVVRAXGX

SEQ ID NO: 40199 - protein, 24 aa, Artificial Sequence
  Cyclic GFR-binding peptide
NAISILYFVGRTPKVLKKYRMVVK

SEQ ID NO: 40200 - protein, 28 aa, Artificial Sequence
  Cyclic GFR-binding peptide
VPTKLSPISVLYIDDMGVPTYKQYEEGM

SEQ ID NO: 40201 - protein, 30 aa, Artificial Sequence
  Cyclic GFR-binding peptide
  MOD_RES (4)..(5): Xaa is C or S
PKAXXVPTELEPISMLYLDEYDKVVKFKYE

SEQ ID NO: 40202 - protein, 33 aa, Artificial Sequence
  Cyclic GFR-binding peptide
  MOD_RES (5)..(6): Xaa is C or S
IPKAXXVPTELEPISMLYLDEYDKVVKFKYEEM

SEQ ID NO: 40203 - protein, 42 aa, Artificial Sequence; identical to SEQ ID NO: 11193
  Cyclic GFR-binding peptide
  MOD_RES (6)..(7)..(40)..(42): Xaa is C or S

SEQ ID NO: 40204 - protein, 32 aa, Artificial Sequence; identical to SEQ ID NO: 11194
  Cyclic GFR-binding peptide
  MOD_RES (6)..(7): Xaa is C or S

SEQ ID NO: 40205 - protein, 29 aa, Artificial Sequence
  Cyclic GFR-binding peptide
  MOD_RES (29)..(29): Xaa is C or S
LEPISVLYLDDMGVPTKFKYEEGMSVAEX

SEQ ID NO: 40206 - protein, 32 aa, Artificial Sequence
  Cyclic GFR-binding peptide
  MOD_RES (2)..(3): Xaa is C or S
PXXVPQALEPISILYLVGRKPKVKFKYEMIVR

SEQ ID NO: 40207 - protein, 31 aa, Artificial Sequence; identical to SEQ ID NO: 11200
  Cyclic GFR-binding peptide
  MOD_RES (30)..(30): Xaa is C or S

SEQ ID NO: 40208 - protein, 30 aa, Artificial Sequence; identical to SEQ ID NO: 11203
  Cyclic GFR-binding peptide

SEQ ID NO: 40209 - protein, 32 aa, Artificial Sequence
  Cyclic GFR-binding peptide
  MOD_RES (1)..(2): Xaa is C or S
XXVPARLEPISILYLDAANNVVKFKYEDMVVE

SEQ ID NO: 40210 - protein, 35 aa, Artificial Sequence
  Cyclic GFR-binding peptide
  MOD_RES (32)..(34): Xaa is C or S
VPTKLSPISILYIDKGVVTYYKQYEGMAVSEXGXR

SEQ ID NO: 40211 - protein, 20 aa, Artificial Sequence
  Cyclic GFR-binding peptide
NAISILYFDAANNVVLKKYR

SEQ ID NO: 40212 - protein, 29 aa, Artificial Sequence
  Cyclic GFR-binding peptide
  MOD_RES (4)..(4): Xaa is C or S
KPTXAPTKLSPISVLYIDDSSNVIYKQYE

SEQ ID NO: 40213 - protein, 38 aa, Artificial Sequence
  Cyclic GFR-binding peptide
  MOD_RES (2)..(3)..(35)..(37): Xaa is C or S
AXXVPTKLNAISILYFDKGVVTYLKKYRGMAVSEXGXR

SEQ ID NO: 40214 - protein, 26 aa, Artificial Sequence
  Cyclic GFR-binding peptide
PQALNAISILYFVGRKPKVLKKYRMI

SEQ ID NO: 40215 - protein, 34 aa, Artificial Sequence; identical to SEQ ID NO: 11209
  Cyclic GFR-binding peptide
  MOD_RES (3)..(4): Xaa is C or S

SEQ ID NO: 40216 - protein, 37 aa, Artificial Sequence
  Cyclic GFR-binding peptide
  MOD_RES (2)..(3)..(34)..(36): Xaa is C or S
PXXVPQALEPISILYLVGRKPKVKFKYEMIVRSXKXS

SEQ ID NO: 40217 - protein, 39 aa, Artificial Sequence
  Cyclic GFR-binding peptide
  MOD_RES (3)..(4)..(36)..(38): Xaa is C or S
ASXXVPARLEPISILYLDAANNVVKFKYEDMVVEAXGXR

SEQ ID NO: 40218 - protein, 27 aa, Artificial Sequence
  Cyclic GFR-binding peptide
  MOD_RES (1)..(2): Xaa is C or S
XXVPARLEPISILYLDAANNVVKFKYE

SEQ ID NO: 40219 - protein, 25 aa, Artificial Sequence
  Cyclic GFR-binding peptide
LNAISVLYFDDMGVPTLKKYREGMS

SEQ ID NO: 40220 - protein, 26 aa, Artificial Sequence
  Cyclic GFR-binding peptide
PQALSPISILYIVGRKPKVYKQYEMI

SEQ ID NO: 40221 - protein, 29 aa, Artificial Sequence
  Cyclic GFR-binding peptide
  MOD_RES (1)..(1): Xaa is C or S
XVPTELNAISMLYFDENEKVVLKKYRDMV

SEQ ID NO: 40222 - protein, 37 aa, Artificial Sequence; identical to SEQ ID NO: 11215
  Cyclic GFR-binding peptide
  MOD_RES (4)..(36): Xaa is C or S

SEQ ID NO: 40223 - protein, 33 aa, Artificial Sequence; identical to SEQ ID NO: 11216
  Cyclic GFR-binding peptide
  MOD_RES (31)..(33): Xaa is C or S

SEQ ID NO: 40224 - protein, 39 aa, Artificial Sequence
  Cyclic GFR-binding peptide
  MOD_RES (6)..(7)..(39): Xaa is C or S
AAPASXXVPARLEPISILYLDAANNVVKFKYEDMVVEAX

SEQ ID NO: 40225 - protein, 26 aa, Artificial Sequence
  Cyclic GFR-binding peptide
VPTKLSPISVLYIDDMGVPTYKQYEE

SEQ ID NO: 40226 - protein, 31 aa, Artificial Sequence
  Cyclic GFR-binding peptide
  MOD_RES (1)..(2): Xaa is C or S
XXVPQALSPISILYIVGRKPKVYKQYEMIVR

SEQ ID NO: 40227 - protein, 34 aa, Artificial Sequence; identical to SEQ ID NO: 11218
  Cyclic GFR-binding peptide
  MOD_RES (5)..(6): Xaa is C or S

SEQ ID NO: 40228 - protein, 33 aa, Artificial Sequence; identical to SEQ ID NO: 11219
  Cyclic GFR-binding peptide
  MOD_RES (6)..(7): Xaa is C or S

SEQ ID NO: 40229 - protein, 33 aa, Artificial Sequence
  Cyclic GFR-binding peptide
  MOD_RES (6)..(7): Xaa is C or S
TVPKPXXAPTQLEPISVLYLDDSSNVIKFKYEN

SEQ ID NO: 40230 - protein, 31 aa, Artificial Sequence
  Cyclic GFR-binding peptide
  MOD_RES (31)..(31): Xaa is C or S
VPQDLSPISILYIVGRTPKVYKQYEMVVKSX

SEQ ID NO: 40231 - protein, 32 aa, Artificial Sequence
  Cyclic GFR-binding peptide
  MOD_RES (1)..(2): Xaa is C or S
XXVPQDLSPISILYIVGRTPKVYKQYEMVVKS

SEQ ID NO: 40232 - protein, 20 aa, Artificial Sequence
  Cyclic GFR-binding peptide
SPISMLYKDENEKVVLKYHY

SEQ ID NO: 40233 - protein, 31 aa, Artificial Sequence; identical to SEQ ID NO: 11227
  Cyclic GFR-binding peptide
  MOD_RES (5)..(6): Xaa is C or S

SEQ ID NO: 40234 - protein, 27 aa, Artificial Sequence
  Cyclic GFR-binding peptide
LSPISILYKDAANNVVLKYHYDMVVEA

SEQ ID NO: 40235 - protein, 24 aa, Artificial Sequence
  Cyclic GFR-binding peptide
SQDLSPISILYKIGKTPKILKYHY

SEQ ID NO: 40236 - protein, 34 aa, Artificial Sequence; identical to SEQ ID NO: 11231
  Cyclic GFR-binding peptide
  MOD_RES (2)..(3): Xaa is C or S

SEQ ID NO: 40237 - protein, 31 aa, Artificial Sequence; identical to SEQ ID NO: 11232
  Cyclic GFR-binding peptide
  MOD_RES (2)..(3): Xaa is C or S

SEQ ID NO: 40238 - protein, 39 aa, Artificial Sequence
  Cyclic GFR-binding peptide
  MOD_RES (4)..(36)..(38): Xaa is C or S
KPTXAPTKLSPISVLYIDDSSNVIYKQYENMVVRSXGXH

SEQ ID NO: 40239 - protein, 33 aa, Artificial Sequence
  Cyclic GFR-binding peptide
  MOD_RES (2)..(3): Xaa is C or S
SXXVPARLNAISILYFDAANNVVLKKYRDMVVE

SEQ ID NO: 40240 - protein, 28 aa, Artificial Sequence
  Cyclic GFR-binding peptide
PTKLSPISVLYIDSSNNVIYKQYENMVV

SEQ ID NO: 40241 - protein, 30 aa, Artificial Sequence
  Cyclic GFR-binding peptide
  MOD_RES (1)..(1): Xaa is C or S
XVPARLSPISILYKDAANNVVLKYHYDMVV

SEQ ID NO: 40242 - protein, 28 aa, Artificial Sequence
  Cyclic GFR-binding peptide
TKLNAISILYFDKGVVTYLKKYRGMAVS

SEQ ID NO: 40243 - protein, 21 aa, Artificial Sequence
  Cyclic GFR-binding peptide
LSPISMLYKDENEKVVLKYHY

SEQ ID NO: 40244 - protein, 37 aa, Artificial Sequence; identical to SEQ ID NO: 11236
  Cyclic GFR-binding peptide
  MOD_RES (4)..(5)..(37): Xaa is C or S

SEQ ID NO: 40245 - protein, 38 aa, Artificial Sequence; identical to SEQ ID NO: 11238
  Cyclic GFR-binding peptide
  MOD_RES (3)..(4)..(36)..(38): Xaa is C or S

SEQ ID NO: 40246 - protein, 26 aa, Artificial Sequence
  Cyclic GFR-binding peptide
  MOD_RES (1)..(1): Xaa is C or S
XVSQDLSPISILYKIGKTPKILKYHY

SEQ ID NO: 40247 - protein, 38 aa, Artificial Sequence; identical to SEQ ID NO: 11242
  Cyclic GFR-binding peptide
  MOD_RES (5)..(37): Xaa is C or S

SEQ ID NO: 40248 - protein, 24 aa, Artificial Sequence
  Cyclic GFR-binding peptide
TKLSPISILYKDKGVVTYLKYHYG

SEQ ID NO: 40249 - protein, 32 aa, Artificial Sequence; identical to SEQ ID NO: 11243
  Cyclic GFR-binding peptide
  MOD_RES (7)..(7): Xaa is C or S

SEQ ID NO: 40250 - protein, 32 aa, Artificial Sequence; identical to SEQ ID NO: 11244
  Cyclic GFR-binding peptide
  MOD_RES (5)..(6): Xaa is C or S

SEQ ID NO: 40251 - protein, 32 aa, Artificial Sequence; identical to SEQ ID NO: 11245
  Cyclic GFR-binding peptide
  MOD_RES (30)..(32): Xaa is C or S

SEQ ID NO: 40252 - protein, 26 aa, Artificial Sequence
  Cyclic GFR-binding peptide
QDLNAISILYFIGKTPKILKKYRMIV

SEQ ID NO: 40253 - protein, 30 aa, Artificial Sequence; identical to SEQ ID NO: 11247
  Cyclic GFR-binding peptide
  MOD_RES (29)..(29): Xaa is C or S

SEQ ID NO: 40254 - protein, 31 aa, Artificial Sequence; identical to SEQ ID NO: 11249
  Cyclic GFR-binding peptide
  MOD_RES (30)..(30): Xaa is C or S

SEQ ID NO: 40255 - protein, 26 aa, Artificial Sequence
  Cyclic GFR-binding peptide
VPTELSPISMLYKDEYDKVVLKYHYE

SEQ ID NO: 40256 - protein, 31 aa, Artificial Sequence
  Cyclic GFR-binding peptide
  MOD_RES (31)..(31): Xaa is C or S
VSQDLSPISILYIIGKTPKIYKQYEMIVKSX

SEQ ID NO: 40257 - protein, 40 aa, Artificial Sequence; identical to SEQ ID NO: 11254
  Cyclic GFR-binding peptide
  MOD_RES (6)..(7)..(39): Xaa is C or S

SEQ ID NO: 40258 - protein, 27 aa, Artificial Sequence
  Cyclic GFR-binding peptide
ELSPISMLYKDENEKVVLKYHYDMVVE

SEQ ID NO: 40259 - protein, 33 aa, Artificial Sequence
  Cyclic GFR-binding peptide
  MOD_RES (30)..(32): Xaa is C or S
ARLSPISILYKDAANNVVLKYHYDMVVEAXGXR

SEQ ID NO: 40260 - protein, 26 aa, Artificial Sequence
  Cyclic GFR-binding peptide
LSPISILYKIGKTPKILKYHYMIVKS

SEQ ID NO: 40261 - protein, 25 aa, Artificial Sequence
  Cyclic GFR-binding peptide
VPTKLNAISILYFDKGVVTYLKKYR

SEQ ID NO: 40262 - protein, 36 aa, Artificial Sequence
  Cyclic GFR-binding peptide
  MOD_RES (1)..(2)..(34)..(36): Xaa is C or S
XXAPTKLEPISVLYLDDSSNVIKFKYENMVVRSXGX

SEQ ID NO: 40263 - protein, 29 aa, Artificial Sequence
  Cyclic GFR-binding peptide
  MOD_RES (27)..(29): Xaa is C or S
NAISMLYFDENEKVVLKKYRDMVVEGXGX

SEQ ID NO: 40264 - protein, 41 aa, Artificial Sequence
  Cyclic GFR-binding peptide
  MOD_RES (6)..(7)..(40): Xaa is C or S
KVGKAXXVPTKLEPISVLYLDDMGVPTKFKYEEGMSVAEXG

SEQ ID NO: 40265 - protein, 40 aa, Artificial Sequence
  Cyclic GFR-binding peptide
  MOD_RES (3)..(4)..(37)..(39): Xaa is C or S
KAXXVPTKLEPISVLYLDDMGVPTKFKYEEGMSVAEXGXR

SEQ ID NO: 40266 - protein, 34 aa, Artificial Sequence
  Cyclic GFR-binding peptide
  MOD_RES (5)..(6): Xaa is C or S
VPKAXXAPTKLSPISVLYIDSSNNVIYKQYENMV

SEQ ID NO: 40267 - protein, 23 aa, Artificial Sequence
  Cyclic GFR-binding peptide
SPISILYKIGKTPKILKYHYMIV

SEQ ID NO: 40268 - protein, 35 aa, Artificial Sequence
  Cyclic GFR-binding peptide
  MOD_RES (5)..(6): Xaa is C or S
SASPXXVSQDLEPISILYLIGKTPKIKFKYEMIVK

SEQ ID NO: 40269 - protein, 31 aa, Artificial Sequence; identical to SEQ ID NO: 11265
  Cyclic GFR-binding peptide
  MOD_RES (1)..(2): Xaa is C or S

SEQ ID NO: 40270 - protein, 39 aa, Artificial Sequence
  Cyclic GFR-binding peptide
  MOD_RES (4)..(5)..(38): Xaa is C or S
GKAXXVPTKLSPISVLYIDDMGVPTYKQYEEGMSVAEXG

SEQ ID NO: 40271 - protein, 28 aa, Artificial Sequence
  Cyclic GFR-binding peptide
TELSPISMLYIDEYDKVVYKQYEEMVVE

SEQ ID NO: 40272 - protein, 20 aa, Artificial Sequence
  Cyclic GFR-binding peptide
NAISMLYFDEYDKVVLKKYR

SEQ ID NO: 40273 - protein, 32 aa, Artificial Sequence
  Cyclic GFR-binding peptide
  MOD_RES (3)..(4): Xaa is C or S
KAXXVPTKLNAISILYFDKGVVTYLKKYRGMA

SEQ ID NO: 40274 - protein, 29 aa, Artificial Sequence
  Cyclic GFR-binding peptide
  MOD_RES (28)..(28): Xaa is C or S
DLEPISILYLVGRTPKVKFKYEMVVKSXK

SEQ ID NO: 40275 - protein, 37 aa, Artificial Sequence
  Cyclic GFR-binding peptide
  MOD_RES (6)..(7): Xaa is C or S
AAPASXXVPARLEPISILYLDAANNVVKFKYEDMVVE

SEQ ID NO: 40276 - protein, 30 aa, Artificial Sequence; identical to SEQ ID NO: 11270
  Cyclic GFR-binding peptide

SEQ ID NO: 40277 - protein, 37 aa, Artificial Sequence; identical to SEQ ID NO: 11273
  Cyclic GFR-binding peptide
  MOD_RES (4)..(5)..(36): Xaa is C or S

SEQ ID NO: 40278 - protein, 34 aa, Artificial Sequence
  Cyclic GFR-binding peptide
  MOD_RES (4)..(5): Xaa is C or S
SKAXXVPTKLSPISILYIDKGVVTYYKQYEGMAV

SEQ ID NO: 40279 - protein, 41 aa, Artificial Sequence
  Cyclic GFR-binding peptide
  MOD_RES (6)..(7)..(39)..(41): Xaa is C or S
YVPKPXXAPTKLEPISVLYLDDSSNVIKFKYENMVVRSXGX

SEQ ID NO: 40280 - protein, 31 aa, Artificial Sequence
  Cyclic GFR-binding peptide
  MOD_RES (30)..(30): Xaa is C or S
ARLNAISILYFDAANNVVLKKYRDMVVEAXG

SEQ ID NO: 40281 - protein, 38 aa, Artificial Sequence
  Cyclic GFR-binding peptide
  MOD_RES (2)..(3)..(35)..(37): Xaa is C or S
AXXVPTELSPISMLYIDEYDKVVYKQYEEMVVEGXGXR

SEQ ID NO: 40282 - protein, 27 aa, Artificial Sequence
  Cyclic GFR-binding peptide
TKLEPISVLYLDDMGVPTKFKYEEGMS

SEQ ID NO: 40283 - protein, 38 aa, Artificial Sequence
  Cyclic GFR-binding peptide
  MOD_RES (3)..(4)..(36)..(38): Xaa is C or S
KAXXVPTELSPISMLYIDENEKVVYKQYEDMVVEGXGX

SEQ ID NO: 40284 - protein, 26 aa, Artificial Sequence
  Cyclic GFR-binding peptide
LSPISMLYIDENEKVVYKQYEDMVVE

SEQ ID NO: 40285 - protein, 40 aa, Artificial Sequence
  Cyclic GFR-binding peptide
  MOD_RES (4)..(5)..(37)..(39): Xaa is C or S
PASXXVPARLNAISILYFDAANNVVLKKYRDMVVEAXGXR

SEQ ID NO: 40286 - protein, 36 aa, Artificial Sequence; identical to SEQ ID NO: 11281
  Cyclic GFR-binding peptide
  MOD_RES (6)..(7): Xaa is C or S

SEQ ID NO: 40287 - protein, 33 aa, Artificial Sequence
  Cyclic GFR-binding peptide
  MOD_RES (1)..(2): Xaa is C or S
XXVPTKLSPISILYKDKGVVTYLKYHYGMAVSE

SEQ ID NO: 40288 - protein, 32 aa, Artificial Sequence; identical to SEQ ID NO: 11282
  Cyclic GFR-binding peptide
  MOD_RES (4)..(5): Xaa is C or S

SEQ ID NO: 40289 - protein, 38 aa, Artificial Sequence
  Cyclic GFR-binding peptide
  MOD_RES (2)..(3)..(35)..(37): Xaa is C or S
AXXVPTELEPISMLYLDEYDKVVKFKYEEMVVEGXGXR

SEQ ID NO: 40290 - protein, 34 aa, Artificial Sequence
  Cyclic GFR-binding peptide
  MOD_RES (5)..(6): Xaa is C or S
VPKPXXAPTQLSPISVLYIDDSSNVIYKQYENMV

SEQ ID NO: 40291 - protein, 23 aa, Artificial Sequence
  Cyclic GFR-binding peptide
QDLNAISILYFIGKTPKILKKYR

SEQ ID NO: 40292 - protein, 31 aa, Artificial Sequence; identical to SEQ ID NO: 11287
  Cyclic GFR-binding peptide
  MOD_RES (28)..(30): Xaa is C or S

SEQ ID NO: 40293 - protein, 33 aa, Artificial Sequence
  Cyclic GFR-binding peptide
  MOD_RES (6)..(6): Xaa is C or S
VTKPTXAPTKLEPISVLYLDDSSNVIKFKYENM

SEQ ID NO: 40294 - protein, 37 aa, Artificial Sequence
  Cyclic GFR-binding peptide
  MOD_RES (1)..(2)..(34)..(36): Xaa is C or S
XXAPTKLSPISVLYIDSSNNVIYKQYENMVVKAXGXH

SEQ ID NO: 40295 - protein, 38 aa, Artificial Sequence
  Cyclic GFR-binding peptide
  MOD_RES (1)..(2)..(35)..(37): Xaa is C or S
XXVPTKLSPISVLYIDDMGVPTYKQYEEGMSVAEXGXR

SEQ ID NO: 40296 - protein, 24 aa, Artificial Sequence
  Cyclic GFR-binding peptide
ELSPISMLYKDEYDKVVLKYHYEM

SEQ ID NO: 40297 - protein, 36 aa, Artificial Sequence
  Cyclic GFR-binding peptide
  MOD_RES (4)..(5): Xaa is C or S
PKPXXAPTKLSPISVLYIDDSSNVIYKQYENMVVRS

SEQ ID NO: 40298 - protein, 31 aa, Artificial Sequence
  Cyclic GFR-binding peptide
  MOD_RES (2)..(3): Xaa is C or S
PXXVPQALSPISILYIVGRKPKVYKQYEMIV

SEQ ID NO: 40299 - protein, 34 aa, Artificial Sequence
  Cyclic GFR-binding peptide
  MOD_RES (32)..(34): Xaa is C or S
VPARLNAISILYFDAANNVVLKKYRDMVVEAXGX

SEQ ID NO: 40300 - protein, 26 aa, Artificial Sequence
  Cyclic GFR-binding peptide
PTQLSPISVLYIDDSSNVIYKQYENM

SEQ ID NO: 40301 - protein, 29 aa, Artificial Sequence
  Cyclic GFR-binding peptide
PARLNAISILYFDAANNVVLKKYRDMVVE

SEQ ID NO: 40302 - protein, 34 aa, Artificial Sequence
  Cyclic GFR-binding peptide
  MOD_RES (3)..(4): Xaa is C or S
KPXXAPTKLSPISVLYIDDSSNVIYKQYENMVVR

SEQ ID NO: 40303 - protein, 30 aa, Artificial Sequence
  Cyclic GFR-binding peptide
APTQLSPISVLYIDDSSNVIYKQYENMVVR

SEQ ID NO: 40304 - protein, 28 aa, Artificial Sequence
  Cyclic GFR-binding peptide
RLSPISILYKDAANNVVLKYHYDMVVEA

SEQ ID NO: 40305 - protein, 40 aa, Artificial Sequence
  Cyclic GFR-binding peptide
  MOD_RES (6)..(7)..(39): Xaa is C or S
TVPKPXXAPTQLEPISVLYLDDSSNVIKFKYENMVVRAXG

SEQ ID NO: 40306 - protein, 36 aa, Artificial Sequence; identical to SEQ ID NO: 11295
  Cyclic GFR-binding peptide
  MOD_RES (6)..(6): Xaa is C or S

SEQ ID NO: 40307 - protein, 28 aa, Artificial Sequence
  Cyclic GFR-binding peptide
  MOD_RES (1)..(2): Xaa is C or S
XXVPQALNAISILYFVGRKPKVLKKYRM

SEQ ID NO: 40308 - protein, 31 aa, Artificial Sequence; identical to SEQ ID NO: 11299
  Cyclic GFR-binding peptide
  MOD_RES (29)..(31): Xaa is C or S

SEQ ID NO: 40309 - protein, 34 aa, Artificial Sequence
  Cyclic GFR-binding peptide
  MOD_RES (3)..(3): Xaa is C or S
PTXAPTKLEPISVLYLDDSSNVIKFKYENMVVRS

SEQ ID NO: 40310 - protein, 25 aa, Artificial Sequence
  Cyclic GFR-binding peptide
LSPISILYKDKGVVTYLKYHYGMAV

SEQ ID NO: 40311 - protein, 22 aa, Artificial Sequence
  Cyclic GFR-binding peptide
NAISMLYFDENEKVVLKKYRDM

SEQ ID NO: 40312 - protein, 34 aa, Artificial Sequence
  Cyclic GFR-binding peptide
  MOD_RES (5)..(6): Xaa is C or S
SASPXXVSQDLSPISILYIIGKTPKIYKQYEMIV

SEQ ID NO: 40313 - protein, 32 aa, Artificial Sequence; identical to SEQ ID NO: 11303
  Cyclic GFR-binding peptide
  MOD_RES (6)..(7): Xaa is C or S

SEQ ID NO: 40314 - protein, 33 aa, Artificial Sequence
  Cyclic GFR-binding peptide
  MOD_RES (4)..(5): Xaa is C or S
PKAXXAPTKLEPISVLYLDSSNNVIKFKYENMV

SEQ ID NO: 40315 - protein, 38 aa, Artificial Sequence
  Cyclic GFR-binding peptide
  MOD_RES (5)..(37): Xaa is C or S
TKPTXAPTKLSPISVLYIDDSSNVIYKQYENMVVRSXG

SEQ ID NO: 40316 - protein, 36 aa, Artificial Sequence; identical to SEQ ID NO: 11305
  Cyclic GFR-binding peptide
  MOD_RES (2)..(3)..(35): Xaa is C or S

SEQ ID NO: 40317 - protein, 27 aa, Artificial Sequence
  Cyclic GFR-binding peptide
  MOD_RES (27)..(27): Xaa is C or S
LSPISILYKVGRKPKVLKYHYMIVRSX

SEQ ID NO: 40318 - protein, 29 aa, Artificial Sequence
  Cyclic GFR-binding peptide
  MOD_RES (2)..(3): Xaa is C or S
AXXVPTELNAISMLYFDEYDKVVLKKYRE

SEQ ID NO: 40319 - protein, 34 aa, Artificial Sequence; identical to SEQ ID NO: 11309
  Cyclic GFR-binding peptide
  MOD_RES (5)..(6): Xaa is C or S

SEQ ID NO: 40320 - protein, 30 aa, Artificial Sequence
  Cyclic GFR-binding peptide
  MOD_RES (29)..(29): Xaa is C or S
QDLSPISILYIIGKTPKIYKQYEMIVKSXK

SEQ ID NO: 40321 - protein, 30 aa, Artificial Sequence; identical to SEQ ID NO: 11311
  Cyclic GFR-binding peptide
  MOD_RES (4)..(5): Xaa is C or S

SEQ ID NO: 40322 - protein, 35 aa, Artificial Sequence; identical to SEQ ID NO: 11312
  Cyclic GFR-binding peptide
  MOD_RES (1)..(32)..(34): Xaa is C or S

SEQ ID NO: 40323 - protein, 33 aa, Artificial Sequence
  Cyclic GFR-binding peptide
  MOD_RES (31)..(33): Xaa is C or S
PTKLSPISVLYIDDSSNVIYKQYENMVVRSXGX

SEQ ID NO: 40324 - protein, 39 aa, Artificial Sequence; identical to SEQ ID NO: 11313
  Cyclic GFR-binding peptide
  MOD_RES (3)..(4)..(36)..(38): Xaa is C or S

SEQ ID NO: 40325 - protein, 32 aa, Artificial Sequence
  Cyclic GFR-binding peptide
  MOD_RES (4)..(5): Xaa is C or S
ASPXXVPQDLSPISILYIVGRTPKVYKQYEMV

SEQ ID NO: 40326 - protein, 27 aa, Artificial Sequence
  Cyclic GFR-binding peptide
  MOD_RES (1)..(2): Xaa is C or S
XXVPTKLSPISILYIDKGVVTYYKQYE

SEQ ID NO: 40327 - protein, 28 aa, Artificial Sequence
  Cyclic GFR-binding peptide
ELNAISMLYFDENEKVVLKKYRDMVVEG

SEQ ID NO: 40328 - protein, 40 aa, Artificial Sequence
  Cyclic GFR-binding peptide
  MOD_RES (5)..(6)..(37)..(39): Xaa is C or S
SASPXXVPQDLEPISILYLVGRTPKVKFKYEMVVKSXKXS

SEQ ID NO: 40329 - protein, 37 aa, Artificial Sequence
  Cyclic GFR-binding peptide
  MOD_RES (6)..(7): Xaa is C or S
ASASPXXVSQDLSPISILYIIGKTPKIYKQYEMIVKS

SEQ ID NO: 40330 - protein, 33 aa, Artificial Sequence; identical to SEQ ID NO: 11316
  Cyclic GFR-binding peptide
  MOD_RES (2)..(3): Xaa is C or S

SEQ ID NO: 40331 - protein, 29 aa, Artificial Sequence
  Cyclic GFR-binding peptide
  MOD_RES (28)..(28): Xaa is C or S
LSPISILYIDKGVVTYYKQYEGMAVSEXG

SEQ ID NO: 40332 - protein, 28 aa, Artificial Sequence
  Cyclic GFR-binding peptide
  MOD_RES (28)..(28): Xaa is C or S
LEPISVLYLDSSNNVIKFKYENMVVKAX

SEQ ID NO: 40333 - protein, 22 aa, Artificial Sequence
  Cyclic GFR-binding peptide
SPISMLYIDENEKVVYKQYEDM

SEQ ID NO: 40334 - protein, 37 aa, Artificial Sequence
  Cyclic GFR-binding peptide
  MOD_RES (3)..(4)..(36): Xaa is C or S
KAXXVPTELEPISMLYLDEYDKVVKFKYEEMVVEGXG

SEQ ID NO: 40335 - protein, 28 aa, Artificial Sequence
  Cyclic GFR-binding peptide
PARLNAISILYFDAANNVVLKKYRDMVV

SEQ ID NO: 40336 - protein, 31 aa, Artificial Sequence; identical to SEQ ID NO: 11321
  Cyclic GFR-binding peptide
  MOD_RES (4)..(5): Xaa is C or S

SEQ ID NO: 40337 - protein, 39 aa, Artificial Sequence
  Cyclic GFR-binding peptide
  MOD_RES (1)..(33)..(34): Xaa is C or S
XSEVVMDPIKGYVVNNASDFYLINIPSLRTPVXXTPPTS

SEQ ID NO: 40338 - protein, 30 aa, Artificial Sequence
  Cyclic GFR-binding peptide
  MOD_RES (26)..(27): Xaa is C or S
PIKGYYTVVGKDFYLINIPSLKTPVXXAKS

SEQ ID NO: 40339 - protein, 37 aa, Artificial Sequence
  Cyclic GFR-binding peptide
  MOD_RES (32)..(33): Xaa is C or S
GEVVMDPIKGYVVKENEDFYLMNIPSLETPVXXAKPI

SEQ ID NO: 40340 - protein, 27 aa, Artificial Sequence
  Cyclic GFR-binding peptide
VVMEPIKGYVVKDYEDFYLMNIPSLET

SEQ ID NO: 40341 - protein, 22 aa, Artificial Sequence
  Cyclic GFR-binding peptide
EPIKGYVVKDYEDFYLMNIPSL

SEQ ID NO: 40342 - protein, 32 aa, Artificial Sequence
  Cyclic GFR-binding peptide
  MOD_RES (2)..(2): Xaa is C or S
GXEEVIMPIKGYLLVRGNDFYLMNIPSTKVPA

SEQ ID NO: 40343 - protein, 35 aa, Artificial Sequence
  Cyclic GFR-binding peptide
  MOD_RES (32)..(33): Xaa is C or S
SEVVMDPIKGYVVNNASDFYLINIPSLRTPVXXTP

SEQ ID NO: 40344 - protein, 25 aa, Artificial Sequence
  Cyclic GFR-binding peptide
PIKGYTPVGMDDFYLVNIPSLKTPV

SEQ ID NO: 40345 - protein, 27 aa, Artificial Sequence
  Cyclic GFR-binding peptide
  MOD_RES (27)..(27): Xaa is C or S
DPIKGYVVKENEDFYLMNIPSLETPVX

SEQ ID NO: 40346 - protein, 29 aa, Artificial Sequence
  Cyclic GFR-binding peptide
VVMDPIKGYVVNNAADFYLINIPSLRAPV

SEQ ID NO: 40347 - protein, 39 aa, Artificial Sequence
  Cyclic GFR-binding peptide
  MOD_RES (2)..(4)..(36)..(37): Xaa is C or S
RXGXESVAMGPIKGYYTVVGKDFYLINIPSLKTPVXXAK

SEQ ID NO: 40348 - protein, 35 aa, Artificial Sequence
  Cyclic GFR-binding peptide
  MOD_RES (1)..(33)..(34): Xaa is C or S
XGEVVMDPIKGYVVKENEDFYLMNIPSLETPVXXA

SEQ ID NO: 40349 - protein, 30 aa, Artificial Sequence
  Cyclic GFR-binding peptide
AEVVMDPIKGYVVNNAADFYLINIPSLRAP

SEQ ID NO: 40350 - protein, 27 aa, Artificial Sequence
  Cyclic GFR-binding peptide
  MOD_RES (26)..(27): Xaa is C or S
PIKGYIVNNSSDFYLVNIPSLKTPAXX

SEQ ID NO: 40351 - protein, 34 aa, Artificial Sequence
  Cyclic GFR-binding peptide
  MOD_RES (30)..(31): Xaa is C or S
VVMDPIKGYVVNNASDFYLINIPSLRTPVXXTPP

SEQ ID NO: 40352 - protein, 40 aa, Artificial Sequence
  Cyclic GFR-binding peptide
  MOD_RES (1)..(3)..(35)..(36): Xaa is C or S
XGXESVAMGPIKGYYTVVGKDFYLINIPSLKTPVXXAKSA

SEQ ID NO: 40353 - protein, 37 aa, Artificial Sequence
  Cyclic GFR-binding peptide
  MOD_RES (2)..(34): Xaa is C or S
GXSRVVMNPIKGYIVNSSDDFYLVNIPSLKTPAXTPK

SEQ ID NO: 40354 - protein, 31 aa, Artificial Sequence
  Cyclic GFR-binding peptide
  MOD_RES (26)..(27): Xaa is C or S
PIKGYVVNNASDFYLINIPSLRTPVXXTPPT

SEQ ID NO: 40355 - protein, 32 aa, Artificial Sequence
  Cyclic GFR-binding peptide
  MOD_RES (2)..(4): Xaa is C or S
HXGXARVVMNPIKGYIVNSSDDFYLVNIPSLQ

SEQ ID NO: 40356 - protein, 34 aa, Artificial Sequence
  Cyclic GFR-binding peptide
  MOD_RES (2)..(34): Xaa is C or S
GXSRVVMNPIKGYIVNSSDDFYLVNIPSLKTPAX

SEQ ID NO: 40357 - protein, 27 aa, Artificial Sequence
  Cyclic GFR-binding peptide
  MOD_RES (2)..(2): Xaa is C or S
GXEEVIMPIKGYLLVRGNDFYLMNIPS

SEQ ID NO: 40358 - protein, 35 aa, Artificial Sequence
  Cyclic GFR-binding peptide
  MOD_RES (32)..(33): Xaa is C or S
GEVVMDPIKGYVVKENEDFYLMNIPSLETPVXXAK

SEQ ID NO: 40359 - protein, 23 aa, Artificial Sequence
  Cyclic GFR-binding peptide
MDPIKGYVVKENEDFYLMNIPSL

SEQ ID NO: 40360 - protein, 29 aa, Artificial Sequence
  Cyclic GFR-binding peptide
EVIMPIKGYLLVRGNDFYLMNIPSTKVPA

SEQ ID NO: 40361 - protein, 34 aa, Artificial Sequence
  Cyclic GFR-binding peptide
  MOD_RES (30)..(31): Xaa is C or S
VAMGPIKGYYTVVGKDFYLINIPSLKTPVXXAKS

SEQ ID NO: 40362 - protein, 36 aa, Artificial Sequence
  Cyclic GFR-binding peptide
  MOD_RES (31)..(32): Xaa is C or S
EVVMDPIKGYVVNNASDFYLINIPSLRTPVXXTPPT

SEQ ID NO: 40363 - protein, 22 aa, Artificial Sequence
  Cyclic GFR-binding peptide
DPIKGYVVNNAADFYLINIPSL

SEQ ID NO: 40364 - protein, 32 aa, Artificial Sequence
  Cyclic GFR-binding peptide
  MOD_RES (29)..(30): Xaa is C or S
VMNPIKGYIVNSSDDFYLVNIPSLQTPAXXPK

SEQ ID NO: 40365 - protein, 39 aa, Artificial Sequence
  Cyclic GFR-binding peptide
  MOD_RES (2)..(4)..(37)..(38): Xaa is C or S
RXGXEAVSMGEPIKGYTPVGMDDFYLVNIPSLKTPVXXA

SEQ ID NO: 40366 - protein, 25 aa, Artificial Sequence
  Cyclic GFR-binding peptide
MGPIKGYYTVVGKDFYLINIPSLKT

SEQ ID NO: 40367 - protein, 36 aa, Artificial Sequence
  Cyclic GFR-binding peptide
  MOD_RES (32)..(33): Xaa is C or S
SEVVMDPIKGYVVNNASDFYLINIPSLRTPVXXTPP

SEQ ID NO: 40368 - protein, 36 aa, Artificial Sequence
  Cyclic GFR-binding peptide
  MOD_RES (2)..(34)..(35): Xaa is C or S
GXAEVVMDPIKGYVVNNAADFYLINIPSLRAPVXXS

SEQ ID NO: 40369 - protein, 21 aa, Artificial Sequence
  Cyclic GFR-binding peptide
PIKGYTPVGMDDFYLVNIPSL

SEQ ID NO: 40370 - protein, 42 aa, Artificial Sequence
  Cyclic GFR-binding peptide
  MOD_RES (2)..(4)..(37)..(38): Xaa is C or S
RXGXEAVSMGEPIKGYTPVGMDDFYLVNIPSLKTPVXXAKGV

SEQ ID NO: 40371 - protein, 30 aa, Artificial Sequence
  Cyclic GFR-binding peptide
GEVVMEPIKGYVVKDYEDFYLMNIPSLETP

SEQ ID NO: 40372 - protein, 33 aa, Artificial Sequence
  Cyclic GFR-binding peptide
  MOD_RES (32)..(33): Xaa is C or S
ESVAMGPIKGYYTVVGKDFYLINIPSLKTPVXX

SEQ ID NO: 40373 - protein, 27 aa, Artificial Sequence
  Cyclic GFR-binding peptide
MDPIKGYVVNNASDFYLINIPSLRTPV

SEQ ID NO: 40374 - protein, 31 aa, Artificial Sequence
  Cyclic GFR-binding peptide
  MOD_RES (30)..(31): Xaa is C or S
VVMNPIKGYIVNSSDDFYLVNIPSLKTPAXX

SEQ ID NO: 40375 - protein, 35 aa, Artificial Sequence
  Cyclic GFR-binding peptide
  MOD_RES (1)..(3)..(35): Xaa is C or S
XGXGEVVMEPIKGYVVKDYEDFYLMNIPSLETPVX

SEQ ID NO: 40376 - protein, 32 aa, Artificial Sequence
  Cyclic GFR-binding peptide
  MOD_RES (1)..(3): Xaa is C or S
XGXEEVIMPIKGYLLVRGNDFYLMNIPSTKVP

SEQ ID NO: 40377 - protein, 39 aa, Artificial Sequence
  Cyclic GFR-binding peptide
  MOD_RES (2)..(4)..(36)..(37): Xaa is C or S
RXGXAEVVMDPIKGYVVNNAADFYLINIPSLRAPVXXSA

SEQ ID NO: 40378 - protein, 35 aa, Artificial Sequence
  Cyclic GFR-binding peptide
  MOD_RES (1)..(34)..(35): Xaa is C or S
XEAVSMGEPIKGYTPVGMDDFYLVNIPSLKTPVXX

SEQ ID NO: 40379 - protein, 30 aa, Artificial Sequence
  Cyclic GFR-binding peptide
  MOD_RES (1)..(3): Xaa is C or S
XGXESVAMGPIKGYYTVVGKDFYLINIPSL

SEQ ID NO: 40380 - protein, 27 aa, Artificial Sequence
  Cyclic GFR-binding peptide
  MOD_RES (26)..(27): Xaa is C or S
PIKGYYTVVGKDFYLINIPSLKTPVXX

SEQ ID NO: 40381 - protein, 38 aa, Artificial Sequence
  Cyclic GFR-binding peptide
  MOD_RES (2)..(33)..(34): Xaa is C or S
GXEEVIMPIKGYLLVRGNDFYLMNIPSTKVPAXXTSPV

SEQ ID NO: 40382 - protein, 21 aa, Artificial Sequence
  Cyclic GFR-binding peptide
PIKGYIVNSSDDFYLVNIPSL

SEQ ID NO: 40383 - protein, 29 aa, Artificial Sequence
  Cyclic GFR-binding peptide
  MOD_RES (1)..(3): Xaa is C or S
XGXESVAMGPIKGYYTVVGKDFYLINIPS

SEQ ID NO: 40384 - protein, 28 aa, Artificial Sequence
  Cyclic GFR-binding peptide
  MOD_RES (27)..(28): Xaa is C or S
DPIKGYVVKENEDFYLMNIPSLETPVXX

SEQ ID NO: 40385 - protein, 29 aa, Artificial Sequence
  Cyclic GFR-binding peptide
EVVMEPIKGYVVKDYEDFYLMNIPSLETP

SEQ ID NO: 40386 - protein, 27 aa, Artificial Sequence
  Cyclic GFR-binding peptide
RVVMNPIKGYIVNSSDDFYLVNIPSLQ

SEQ ID NO: 40387 - protein, 31 aa, Artificial Sequence
  Cyclic GFR-binding peptide
  MOD_RES (2)..(4): Xaa is C or S
RXGXEAVSMGEPIKGYTPVGMDDFYLVNIPS

SEQ ID NO: 40388 - protein, 29 aa, Artificial Sequence
  Cyclic GFR-binding peptide
  MOD_RES (1)..(1): Xaa is C or S
XEEVIMPIKGYLLVRGNDFYLMNIPSTKV

SEQ ID NO: 40389 - protein, 23 aa, Artificial Sequence
  Cyclic GFR-binding peptide
VMDPIKGYVVNNAADFYLINIPS

SEQ ID NO: 40390 - protein, 31 aa, Artificial Sequence
  Cyclic GFR-binding peptide
  MOD_RES (1)..(1): Xaa is C or S
XESVAMGPIKGYYTVVGKDFYLINIPSLKTP

SEQ ID NO: 40391 - protein, 26 aa, Artificial Sequence
  Cyclic GFR-binding peptide
SRVVMNPIKGYIVNSSDDFYLVNIPS

SEQ ID NO: 40392 - protein, 26 aa, Artificial Sequence
  Cyclic GFR-binding peptide
DPIKGYVVNNASDFYLINIPSLRTPV

SEQ ID NO: 40393 - protein, 22 aa, Artificial Sequence
  Cyclic GFR-binding peptide
MEPIKGYVVKDYEDFYLMNIPS

SEQ ID NO: 40394 - protein, 31 aa, Artificial Sequence
  Cyclic GFR-binding peptide
  MOD_RES (28)..(29): Xaa is C or S
MGPIKGYYTVVGKDFYLINIPSLKTPVXXAK

SEQ ID NO: 40395 - protein, 25 aa, Artificial Sequence
  Cyclic GFR-binding peptide
EVVMDPIKGYVVNNAADFYLINIPS

SEQ ID NO: 40396 - protein, 39 aa, Artificial Sequence
  Cyclic GFR-binding peptide
  MOD_RES (1)..(33)..(34): Xaa is C or S
XGEVVMDPIKGYVVKENEDFYLMNIPSLETPVXXAKPIK

SEQ ID NO: 40397 - protein, 34 aa, Artificial Sequence
  Cyclic GFR-binding peptide
  MOD_RES (32)..(33): Xaa is C or S
ARVVMNPIKGYIVNSSDDFYLVNIPSLQTPAXXP

SEQ ID NO: 40398 - protein, 27 aa, Artificial Sequence
  Cyclic GFR-binding peptide
MDPIKGYVVKENEDFYLMNIPSLETPV

SEQ ID NO: 40399 - protein, 24 aa, Artificial Sequence
  Cyclic GFR-binding peptide
EPIKGYTPVGMDDFYLVNIPSLKT

SEQ ID NO: 40400 - protein, 37 aa, Artificial Sequence
  Cyclic GFR-binding peptide
  MOD_RES (2)..(4)..(36): Xaa is C or S
HXGXSRVVMNPIKGYIVNSSDDFYLVNIPSLKTPAXT

SEQ ID NO: 40401 - protein, 24 aa, Artificial Sequence
  Cyclic GFR-binding peptide
EPIKGYVVKDYEDFYLMNIPSLET

SEQ ID NO: 40402 - protein, 31 aa, Artificial Sequence
  Cyclic GFR-binding peptide
  MOD_RES (1)..(3): Xaa is C or S
XGXEEVIMPIKGYLLVRGNDFYLMNIPSTKV

SEQ ID NO: 40403 - protein, 39 aa, Artificial Sequence
  Cyclic GFR-binding peptide
  MOD_RES (2)..(4)..(36)..(37): Xaa is C or S
HXGXAKVVMNPIKGYIVNNSSDFYLVNIPSLKTPAXXAK

SEQ ID NO: 40404 - protein, 37 aa, Artificial Sequence
  Cyclic GFR-binding peptide
  MOD_RES (2)..(35)..(36): Xaa is C or S
GXEAVSMGEPIKGYTPVGMDDFYLVNIPSLKTPVXXA

SEQ ID NO: 40405 - protein, 30 aa, Artificial Sequence
  Cyclic GFR-binding peptide
  MOD_RES (2)..(2): Xaa is C or S
GXSRVVMNPIKGYIVNSSDDFYLVNIPSLK

SEQ ID NO: 40406 - protein, 32 aa, Artificial Sequence
  Cyclic GFR-binding peptide
  MOD_RES (2)..(2): Xaa is C or S
GXESVAMGPIKGYYTVVGKDFYLINIPSLKTP

SEQ ID NO: 40407 - protein, 34 aa, Artificial Sequence
  Cyclic GFR-binding peptide
  MOD_RES (1)..(3)..(34): Xaa is C or S
XGXEEVIMPIKGYLLVRGNDFYLMNIPSTKVPAX

SEQ ID NO: 40408 - protein, 33 aa, Artificial Sequence
  Cyclic GFR-binding peptide
  MOD_RES (30)..(31): Xaa is C or S
SMGEPIKGYTPVGMDDFYLVNIPSLKTPVXXAK

SEQ ID NO: 40409 - protein, 36 aa, Artificial Sequence
  Cyclic GFR-binding peptide
  MOD_RES (2)..(4)..(36): Xaa is C or S
RXGXGEVVMDPIKGYVVKENEDFYLMNIPSLETPVX

SEQ ID NO: 40410 - protein, 30 aa, Artificial Sequence
  Cyclic GFR-binding peptide
  MOD_RES (28)..(29): Xaa is C or S
GEPIKGYTPVGMDDFYLVNIPSLKTPVXXA

SEQ ID NO: 40411 - protein, 29 aa, Artificial Sequence
  Cyclic GFR-binding peptide
  MOD_RES (1)..(3): Xaa is C or S
XGXSEVVMDPIKGYVVNNASDFYLINIPS

SEQ ID NO: 40412 - protein, 37 aa, Artificial Sequence
  Cyclic GFR-binding peptide
  MOD_RES (31)..(32): Xaa is C or S
SVAMGPIKGYYTVVGKDFYLINIPSLKTPVXXAKSAK

SEQ ID NO: 40413 - protein, 31 aa, Artificial Sequence
  Cyclic GFR-binding peptide
  MOD_RES (28)..(29): Xaa is C or S
MDPIKGYVVNNAADFYLINIPSLRAPVXXSA

SEQ ID NO: 40414 - protein, 31 aa, Artificial Sequence
  Cyclic GFR-binding peptide
  MOD_RES (27)..(28): Xaa is C or S
GPIKGYYTVVGKDFYLINIPSLKTPVXXAKS

SEQ ID NO: 40415 - protein, 23 aa, Artificial Sequence
  Cyclic GFR-binding peptide
PIKGYVVKENEDFYLMNIPSLET

SEQ ID NO: 40416 - protein, 40 aa, Artificial Sequence
  Cyclic GFR-binding peptide
  MOD_RES (2)..(34)..(35): Xaa is C or S
GXARVVMNPIKGYIVNSSDDFYLVNIPSLQTPAXXPKPVT

SEQ ID NO: 40417 - protein, 26 aa, Artificial Sequence
  Cyclic GFR-binding peptide
MDPIKGYVVKENEDFYLMNIPSLETP

SEQ ID NO: 40418 - protein, 34 aa, Artificial Sequence
  Cyclic GFR-binding peptide
  MOD_RES (28)..(29): Xaa is C or S
MNPIKGYIVNSSDDFYLVNIPSLKTPAXXPKPVH

SEQ ID NO: 40419 - protein, 24 aa, Artificial Sequence
  Cyclic GFR-binding peptide
VVMDPIKGYVVKENEDFYLMNIPS

SEQ ID NO: 40420 - protein, 35 aa, Artificial Sequence
  Cyclic GFR-binding peptide
  MOD_RES (1)..(3)..(35): Xaa is C or S
XGXESVAMGPIKGYYTVVGKDFYLINIPSLKTPVX

SEQ ID NO: 40421 - protein, 29 aa, Artificial Sequence
  Cyclic GFR-binding peptide
  MOD_RES (28)..(29): Xaa is C or S
MDPIKGYVVKENEDFYLMNIPSLETPVXX

SEQ ID NO: 40422 - protein, 36 aa, Artificial Sequence
  Cyclic GFR-binding peptide
  MOD_RES (31)..(32): Xaa is C or S
EVVMEPIKGYVVKDYEDFYLMNIPSLETPVXXAKPI

SEQ ID NO: 40423 - protein, 28 aa, Artificial Sequence
  Cyclic GFR-binding peptide
  MOD_RES (26)..(27): Xaa is C or S
PIKGYVVNNASDFYLINIPSLRTPVXXT

SEQ ID NO: 40424 - protein, 38 aa, Artificial Sequence
  Cyclic GFR-binding peptide
  MOD_RES (1)..(3)..(35)..(36): Xaa is C or S
XGXGEVVMEPIKGYVVKDYEDFYLMNIPSLETPVXXAK

SEQ ID NO: 40425 - protein, 26 aa, Artificial Sequence
  Cyclic GFR-binding peptide
NPIKGYIVNNSSDFYLVNIPSLKTPA

SEQ ID NO: 40426 - protein, 26 aa, Artificial Sequence
  Cyclic GFR-binding peptide
VMDPIKGYVVKENEDFYLMNIPSLET

SEQ ID NO: 40427 - protein, 27 aa, Artificial Sequence
  Cyclic GFR-binding peptide
SVAMGPIKGYYTVVGKDFYLINIPSLK

SEQ ID NO: 40428 - protein, 26 aa, Artificial Sequence
  Cyclic GFR-binding peptide
ARVVMNPIKGYIVNSSDDFYLVNIPS

SEQ ID NO: 40429 - protein, 28 aa, Artificial Sequence
  Cyclic GFR-binding peptide
  MOD_RES (27)..(28): Xaa is C or S
NPIKGYIVNSSDDFYLVNIPSLKTPAXX

SEQ ID NO: 40430 - protein, 39 aa, Artificial Sequence
  Cyclic GFR-binding peptide
  MOD_RES (2)..(34): Xaa is C or S
GXSRVVMNPIKGYIVNSSDDFYLVNIPSLKTPAXTPKTV

SEQ ID NO: 40431 - protein, 30 aa, Artificial Sequence
  Cyclic GFR-binding peptide
  MOD_RES (1)..(3): Xaa is C or S
XGXARVVMNPIKGYIVNSSDDFYLVNIPSL

SEQ ID NO: 40432 - protein, 30 aa, Artificial Sequence
  Cyclic GFR-binding peptide
  MOD_RES (30)..(30): Xaa is C or S
VAMGPIKGYYTVVGKDFYLINIPSLKTPVX

SEQ ID NO: 40433 - protein, 32 aa, Artificial Sequence
  Cyclic GFR-binding peptide
  MOD_RES (28)..(29): Xaa is C or S
MNPIKGYIVNNSSDFYLVNIPSLKTPAXXAKP

SEQ ID NO: 40434 - protein, 40 aa, Artificial Sequence
  Cyclic GFR-binding peptide
  MOD_RES (2)..(34)..(35): Xaa is C or S
GXSEVVMDPIKGYVVNNASDFYLINIPSLRTPVXXTPPTS

SEQ ID NO: 40435 - protein, 36 aa, Artificial Sequence
  Cyclic GFR-binding peptide
  MOD_RES (30)..(31): Xaa is C or S
VVMEPIKGYVVKDYEDFYLMNIPSLETPVXXAKPIS

SEQ ID NO: 40436 - protein, 27 aa, Artificial Sequence
  Cyclic GFR-binding peptide
VMNPIKGYIVNSSDDFYLVNIPSLKTP

SEQ ID NO: 40437 - protein, 27 aa, Artificial Sequence
  Cyclic GFR-binding peptide
VMNPIKGYIVNNSSDFYLVNIPSLKTP

SEQ ID NO: 40438 - protein, 32 aa, Artificial Sequence
  Cyclic GFR-binding peptide
  MOD_RES (32)..(32): Xaa is C or S
GEVVMDPIKGYVVKENEDFYLMNIPSLETPVX

SEQ ID NO: 40439 - protein, 33 aa, Artificial Sequence
  Cyclic GFR-binding peptide
  MOD_RES (28)..(29): Xaa is C or S
MGPIKGYYTVVGKDFYLINIPSLKTPVXXAKSA

SEQ ID NO: 40440 - protein, 37 aa, Artificial Sequence
  Cyclic GFR-binding peptide
  MOD_RES (2)..(34)..(35): Xaa is C or S
GXGEVVMEPIKGYVVKDYEDFYLMNIPSLETPVXXAK

SEQ ID NO: 40441 - protein, 28 aa, Artificial Sequence
  Cyclic GFR-binding peptide
  MOD_RES (26)..(27): Xaa is C or S
PIKGYYTVVGKDFYLINIPSLKTPVXXA

SEQ ID NO: 40442 - protein, 25 aa, Artificial Sequence
  Cyclic GFR-binding peptide
VVMEPIKGYVVKDYEDFYLMNIPSL

SEQ ID NO: 40443 - protein, 24 aa, Artificial Sequence
  Cyclic GFR-binding peptide
VVMDPIKGYVVNNAADFYLINIPS

SEQ ID NO: 40444 - protein, 40 aa, Artificial Sequence
  Cyclic GFR-binding peptide
  MOD_RES (1)..(3)..(35)..(36): Xaa is C or S
XGXSRVVMNPIKGYIVNSSDDFYLVNIPSLKTPAXXPKPV

SEQ ID NO: 40445 - protein, 30 aa, Artificial Sequence
  Cyclic GFR-binding peptide
  MOD_RES (2)..(2): Xaa is C or S
GXGEVVMEPIKGYVVKDYEDFYLMNIPSLE

SEQ ID NO: 40446 - protein, 32 aa, Artificial Sequence
  Cyclic GFR-binding peptide
  MOD_RES (32)..(32): Xaa is C or S
AVSMGEPIKGYTPVGMDDFYLVNIPSLKTPVX

SEQ ID NO: 40447 - protein, 27 aa, Artificial Sequence
  Cyclic GFR-binding peptide
  MOD_RES (27)..(27): Xaa is C or S
GPIKGYYTVVGKDFYLINIPSLKTPVX

SEQ ID NO: 40448 - protein, 31 aa, Artificial Sequence
  Cyclic GFR-binding peptide
  MOD_RES (26)..(27): Xaa is C or S
PIKGYYTVVGKDFYLINIPSLKTPVXXAKSA

SEQ ID NO: 40449 - protein, 20 aa, Artificial Sequence
  Cyclic GFR-binding peptide
PIKGYVVNNASDFYLINIPS

SEQ ID NO: 40450 - protein, 23 aa, Artificial Sequence
  Cyclic GFR-binding peptide
EPIKGYTPVGMDDFYLVNIPSLK

SEQ ID NO: 40451 - protein, 37 aa, Artificial Sequence
  Cyclic GFR-binding peptide
  MOD_RES (32)..(33): Xaa is C or S
AEVVMDPIKGYVVNNAADFYLINIPSLRAPVXXSAPA

SEQ ID NO: 40452 - protein, 29 aa, Artificial Sequence
  Cyclic GFR-binding peptide
  MOD_RES (1)..(3): Xaa is C or S
XGXAKVVMNPIKGYIVNNSSDFYLVNIPS

SEQ ID NO: 40453 - protein, 34 aa, Artificial Sequence
  Cyclic GFR-binding peptide
  MOD_RES (2)..(34): Xaa is C or S
GXSEVVMDPIKGYVVNNASDFYLINIPSLRTPVX

SEQ ID NO: 40454 - protein, 29 aa, Artificial Sequence
  Cyclic GFR-binding peptide
  MOD_RES (29)..(29): Xaa is C or S
VIMPIKGYLLVRGNDFYLMNIPSTKVPAX

SEQ ID NO: 40455 - protein, 28 aa, Artificial Sequence
  Cyclic GFR-binding peptide
  MOD_RES (28)..(28): Xaa is C or S
MNPIKGYIVNNSSDFYLVNIPSLKTPAX

SEQ ID NO: 40456 - protein, 41 aa, Artificial Sequence
  Cyclic GFR-binding peptide
  MOD_RES (2)..(4)..(36)..(37): Xaa is C or S
RXGXGEVVMEPIKGYVVKDYEDFYLMNIPSLETPVXXAKPI

SEQ ID NO: 40457 - protein, 29 aa, Artificial Sequence
  Cyclic GFR-binding peptide
  MOD_RES (27)..(27): Xaa is C or S
NPIKGYIVNSSDDFYLVNIPSLKTPAXTP

SEQ ID NO: 40458 - protein, 27 aa, Artificial Sequence
  Cyclic GFR-binding peptide
AMGPIKGYYTVVGKDFYLINIPSLKTP

SEQ ID NO: 40459 - protein, 34 aa, Artificial Sequence
  Cyclic GFR-binding peptide
  MOD_RES (31)..(32): Xaa is C or S
EVVMDPIKGYVVKENEDFYLMNIPSLETPVXXAK

SEQ ID NO: 40460 - protein, 41 aa, Artificial Sequence
  Cyclic GFR-binding peptide
  MOD_RES (1)..(3)..(35): Xaa is C or S
XGXSRVVMNPIKGYIVNSSDDFYLVNIPSLKTPAXTPKTVH

SEQ ID NO: 40461 - protein, 30 aa, Artificial Sequence
  Cyclic GFR-binding peptide
  MOD_RES (2)..(4): Xaa is C or S
HXGXAKVVMNPIKGYIVNNSSDFYLVNIPS

SEQ ID NO: 40462 - protein, 31 aa, Artificial Sequence
  Cyclic GFR-binding peptide
  MOD_RES (2)..(4): Xaa is C or S
LXGXEEVIMPIKGYLLVRGNDFYLMNIPSTK

SEQ ID NO: 40463 - protein, 20 aa, Artificial Sequence
  Cyclic GFR-binding peptide
PIKGYLLVRGNDFYLMNIPS

SEQ ID NO: 40464 - protein, 35 aa, Artificial Sequence
  Cyclic GFR-binding peptide
  MOD_RES (31)..(32): Xaa is C or S
RVVMNPIKGYIVNSSDDFYLVNIPSLKTPAXXPKP

SEQ ID NO: 40465 - protein, 31 aa, Artificial Sequence
  Cyclic GFR-binding peptide
  MOD_RES (2)..(4): Xaa is C or S
RXGXSEVVMDPIKGYVVNNASDFYLINIPSL

SEQ ID NO: 40466 - protein, 41 aa, Artificial Sequence
  Cyclic GFR-binding peptide
  MOD_RES (1)..(3)..(35)..(36): Xaa is C or S
XGXSRVVMNPIKGYIVNSSDDFYLVNIPSLKTPAXXPKPVH

SEQ ID NO: 40467 - protein, 31 aa, Artificial Sequence
  Cyclic GFR-binding peptide
  MOD_RES (30)..(31): Xaa is C or S
VVMNPIKGYIVNSSDDFYLVNIPSLQTPAXX

SEQ ID NO: 40468 - protein, 30 aa, Artificial Sequence
  Cyclic GFR-binding peptide
  MOD_RES (29)..(30): Xaa is C or S
VIMPIKGYLLVRGNDFYLMNIPSTKVPAXX

SEQ ID NO: 40469 - protein, 32 aa, Artificial Sequence
  Cyclic GFR-binding peptide
  MOD_RES (2)..(2): Xaa is C or S
GXAKVVMNPIKGYIVNNSSDFYLVNIPSLKTP

SEQ ID NO: 40470 - protein, 38 aa, Artificial Sequence
  Cyclic GFR-binding peptide
  MOD_RES (1)..(33)..(34): Xaa is C or S
XGEVVMEPIKGYVVKDYEDFYLMNIPSLETPVXXAKPI

SEQ ID NO: 40471 - protein, 25 aa, Artificial Sequence
  Cyclic GFR-binding peptide
EVVMEPIKGYVVKDYEDFYLMNIPS

SEQ ID NO: 40472 - protein, 35 aa, Artificial Sequence
  Cyclic GFR-binding peptide
  MOD_RES (31)..(32): Xaa is C or S
EVVMEPIKGYVVKDYEDFYLMNIPSLETPVXXAKP

SEQ ID NO: 40473 - protein, 31 aa, Artificial Sequence
  Cyclic GFR-binding peptide
  MOD_RES (2)..(2): Xaa is C or S
GXAEVVMDPIKGYVVNNAADFYLINIPSLRA

SEQ ID NO: 40474 - protein, 21 aa, Artificial Sequence
  Cyclic GFR-binding peptide
EPIKGYVVKDYEDFYLMNIPS

SEQ ID NO: 40475 - protein, 39 aa, Artificial Sequence
  Cyclic GFR-binding peptide
  MOD_RES (33)..(34): Xaa is C or S
EAVSMGEPIKGYTPVGMDDFYLVNIPSLKTPVXXAKGVK

SEQ ID NO: 40476 - protein, 31 aa, Artificial Sequence
  Cyclic GFR-binding peptide
AEVVMDPIKGYVVNNAADFYLINIPSLRAPV

SEQ ID NO: 40477 - protein, 32 aa, Artificial Sequence
  Cyclic GFR-binding peptide
  MOD_RES (28)..(29): Xaa is C or S
MDPIKGYVVNNAADFYLINIPSLRAPVXXSAP

SEQ ID NO: 40478 - protein, 28 aa, Artificial Sequence
  Cyclic GFR-binding peptide
  MOD_RES (28)..(28): Xaa is C or S
MGPIKGYYTVVGKDFYLINIPSLKTPVX

SEQ ID NO: 40479 - protein, 30 aa, Artificial Sequence
  Cyclic GFR-binding peptide
  MOD_RES (2)..(4): Xaa is C or S
RXGXGEVVMDPIKGYVVKENEDFYLMNIPS

SEQ ID NO: 40480 - protein, 32 aa, Artificial Sequence
  Cyclic GFR-binding peptide
  MOD_RES (30)..(31): Xaa is C or S
VVMNPIKGYIVNSSDDFYLVNIPSLQTPAXXP

SEQ ID NO: 40481 - protein, 38 aa, Artificial Sequence
  Cyclic GFR-binding peptide
  MOD_RES (1)..(3)..(35)..(36): Xaa is C or S
XGXGEVVMDPIKGYVVKENEDFYLMNIPSLETPVXXAK

SEQ ID NO: 40482 - protein, 32 aa, Artificial Sequence
  Cyclic GFR-binding peptide
  MOD_RES (2)..(4): Xaa is C or S
HXGXSRVVMNPIKGYIVNSSDDFYLVNIPSLK

SEQ ID NO: 40483 - protein, 34 aa, Artificial Sequence
  Cyclic GFR-binding peptide
  MOD_RES (30)..(31): Xaa is C or S
VVMDPIKGYVVKENEDFYLMNIPSLETPVXXAKP

SEQ ID NO: 40484 - protein, 34 aa, Artificial Sequence
  Cyclic GFR-binding peptide
  MOD_RES (2)..(34): Xaa is C or S
GXGEVVMDPIKGYVVKENEDFYLMNIPSLETPVX

SEQ ID NO: 40485 - protein, 33 aa, Artificial Sequence
  Cyclic GFR-binding peptide
  MOD_RES (27)..(28): Xaa is C or S
DPIKGYVVNNASDFYLINIPSLRTPVXXTPPTS

SEQ ID NO: 40486 - protein, 35 aa, Artificial Sequence
  Cyclic GFR-binding peptide
  MOD_RES (2)..(34)..(35): Xaa is C or S
GXARVVMNPIKGYIVNSSDDFYLVNIPSLQTPAXX

SEQ ID NO: 40487 - protein, 25 aa, Artificial Sequence
  Cyclic GFR-binding peptide
SMGEPIKGYTPVGMDDFYLVNIPSL

SEQ ID NO: 40488 - protein, 31 aa, Artificial Sequence
  Cyclic GFR-binding peptide
GEVVMEPIKGYVVKDYEDFYLMNIPSLETPV

SEQ ID NO: 40489 - protein, 40 aa, Artificial Sequence
  Cyclic GFR-binding peptide
  MOD_RES (2)..(4)..(36)..(37): Xaa is C or S
RXGXGEVVMDPIKGYVVKENEDFYLMNIPSLETPVXXAKP

SEQ ID NO: 40490 - protein, 38 aa, Artificial Sequence
  Cyclic GFR-binding peptide
  MOD_RES (2)..(4)..(36)..(37): Xaa is C or S
RXGXESVAMGPIKGYYTVVGKDFYLINIPSLKTPVXXA

SEQ ID NO: 40491 - protein, 40 aa, Artificial Sequence
  Cyclic GFR-binding peptide
  MOD_RES (2)..(34)..(35): Xaa is C or S
GXAKVVMNPIKGYIVNNSSDFYLVNIPSLKTPAXXAKPVA

SEQ ID NO: 40492 - protein, 28 aa, Artificial Sequence
  Cyclic GFR-binding peptide
  MOD_RES (27)..(28): Xaa is C or S
DPIKGYVVNNAADFYLINIPSLRAPVXX

SEQ ID NO: 40493 - protein, 36 aa, Artificial Sequence
  Cyclic GFR-binding peptide
  MOD_RES (2)..(34)..(35): Xaa is C or S
GXAKVVMNPIKGYIVNNSSDFYLVNIPSLKTPAXXA

SEQ ID NO: 40494 - protein, 34 aa, Artificial Sequence
  Cyclic GFR-binding peptide
  MOD_RES (1)..(3): Xaa is C or S
XGXSEVVMDPIKGYVVNNASDFYLINIPSLRTPV

SEQ ID NO: 40495 - protein, 37 aa, Artificial Sequence
  Cyclic GFR-binding peptide
  MOD_RES (31)..(32): Xaa is C or S
RVVMNPIKGYIVNSSDDFYLVNIPSLKTPAXXPKPVY

SEQ ID NO: 40496 - protein, 30 aa, Artificial Sequence
  Cyclic GFR-binding peptide
ARVVMNPIKGYIVNSSDDFYLVNIPSLQTP

SEQ ID NO: 40497 - protein, 33 aa, Artificial Sequence
  Cyclic GFR-binding peptide
  MOD_RES (29)..(30): Xaa is C or S
VMDPIKGYVVNNASDFYLINIPSLRTPVXXTPP

SEQ ID NO: 40498 - protein, 39 aa, Artificial Sequence
  Cyclic GFR-binding peptide
  MOD_RES (2)..(34)..(35): Xaa is C or S
GXGEVVMEPIKGYVVKDYEDFYLMNIPSLETPVXXAKPI

SEQ ID NO: 40499 - protein, 27 aa, Artificial Sequence
  Cyclic GFR-binding peptide
MDPIKGYVVNNAADFYLINIPSLRAPV

SEQ ID NO: 40500 - protein, 33 aa, Artificial Sequence
  Cyclic GFR-binding peptide
  MOD_RES (29)..(30): Xaa is C or S
VMNPIKGYIVNSSDDFYLVNIPSLQTPAXXPKP

SEQ ID NO: 40501 - protein, 32 aa, Artificial Sequence
  Cyclic GFR-binding peptide
  MOD_RES (32)..(32): Xaa is C or S
SRVVMNPIKGYIVNSSDDFYLVNIPSLKTPAX

SEQ ID NO: 40502 - protein, 35 aa, Artificial Sequence
  Cyclic GFR-binding peptide
  MOD_RES (1)..(3)..(35): Xaa is C or S
XGXAKVVMNPIKGYIVNNSSDFYLVNIPSLKTPAX

SEQ ID NO: 40503 - protein, 22 aa, Artificial Sequence
  Cyclic GFR-binding peptide
MDPIKGYVVKENEDFYLMNIPS

SEQ ID NO: 40504 - protein, 36 aa, Artificial Sequence
  Cyclic GFR-binding peptide
  MOD_RES (32)..(33): Xaa is C or S
GEVVMDPIKGYVVKENEDFYLMNIPSLETPVXXAKP

SEQ ID NO: 40505 - protein, 35 aa, Artificial Sequence
  Cyclic GFR-binding peptide
  MOD_RES (1)..(32)..(33): Xaa is C or S
XEEVIMPIKGYLLVRGNDFYLMNIPSTKVPAXXTS

SEQ ID NO: 40506 - protein, 24 aa, Artificial Sequence
  Cyclic GFR-binding peptide
PIKGYVVKDYEDFYLMNIPSLETP

SEQ ID NO: 40507 - protein, 36 aa, Artificial Sequence
  Cyclic GFR-binding peptide
  MOD_RES (31)..(31): Xaa is C or S
RVVMNPIKGYIVNSSDDFYLVNIPSLKTPAXTPKTV

SEQ ID NO: 40508 - protein, 35 aa, Artificial Sequence
  Cyclic GFR-binding peptide
  MOD_RES (30)..(31): Xaa is C or S
VVMNPIKGYIVNSSDDFYLVNIPSLQTPAXXPKPV

SEQ ID NO: 40509 - protein, 39 aa, Artificial Sequence
  Cyclic GFR-binding peptide
  MOD_RES (1)..(33)..(34): Xaa is C or S
XSRVVMNPIKGYIVNSSDDFYLVNIPSLKTPAXXPKPVH

SEQ ID NO: 40510 - protein, 40 aa, Artificial Sequence
  Cyclic GFR-binding peptide
  MOD_RES (1)..(3)..(34)..(35): Xaa is C or S
XGXEEVIMPIKGYLLVRGNDFYLMNIPSTKVPAXXTSPVR

SEQ ID NO: 40511 - protein, 28 aa, Artificial Sequence
  Cyclic GFR-binding peptide
GEVVMEPIKGYVVKDYEDFYLMNIPSLE

SEQ ID NO: 40512 - protein, 29 aa, Artificial Sequence
  Cyclic GFR-binding peptide
  MOD_RES (2)..(2): Xaa is C or S
GXGEVVMEPIKGYVVKDYEDFYLMNIPSL

SEQ ID NO: 40513 - protein, 38 aa, Artificial Sequence
  Cyclic GFR-binding peptide
  MOD_RES (2)..(34)..(35): Xaa is C or S
GXSRVVMNPIKGYIVNSSDDFYLVNIPSLKTPAXXPKP

SEQ ID NO: 40514 - protein, 26 aa, Artificial Sequence
  Cyclic GFR-binding peptide
  MOD_RES (26)..(26): Xaa is C or S
PIKGYVVKENEDFYLMNIPSLETPVX

SEQ ID NO: 40515 - protein, 36 aa, Artificial Sequence
  Cyclic GFR-binding peptide
  MOD_RES (1)..(33)..(34): Xaa is C or S
XARVVMNPIKGYIVNSSDDFYLVNIPSLQTPAXXPK

SEQ ID NO: 40516 - protein, 36 aa, Artificial Sequence
  Cyclic GFR-binding peptide
  MOD_RES (2)..(33)..(34): Xaa is C or S
GXEEVIMPIKGYLLVRGNDFYLMNIPSTKVPAXXTS

SEQ ID NO: 40517 - protein, 31 aa, Artificial Sequence
  Cyclic GFR-binding peptide
  MOD_RES (27)..(27): Xaa is C or S
NPIKGYIVNSSDDFYLVNIPSLKTPAXTPKT

SEQ ID NO: 40518 - protein, 23 aa, Artificial Sequence
  Cyclic GFR-binding peptide
VMEPIKGYVVKDYEDFYLMNIPS

SEQ ID NO: 40519 - protein, 29 aa, Artificial Sequence
  Cyclic GFR-binding peptide
SMGEPIKGYTPVGMDDFYLVNIPSLKTPV

SEQ ID NO: 40520 - protein, 32 aa, Artificial Sequence
  Cyclic GFR-binding peptide
  MOD_RES (31)..(32): Xaa is C or S
EVVMDPIKGYVVKENEDFYLMNIPSLETPVXX

SEQ ID NO: 40521 - protein, 28 aa, Artificial Sequence
  Cyclic GFR-binding peptide
ARVVMNPIKGYIVNSSDDFYLVNIPSLQ

SEQ ID NO: 40522 - protein, 33 aa, Artificial Sequence
  Cyclic GFR-binding peptide
  MOD_RES (27)..(28): Xaa is C or S
DPIKGYVVNNAADFYLINIPSLRAPVXXSAPAA

SEQ ID NO: 40523 - protein, 33 aa, Artificial Sequence
  Cyclic GFR-binding peptide
  MOD_RES (2)..(4): Xaa is C or S
RXGXAEVVMDPIKGYVVNNAADFYLINIPSLRA

SEQ ID NO: 40524 - protein, 32 aa, Artificial Sequence
  Cyclic GFR-binding peptide
  MOD_RES (30)..(31): Xaa is C or S
VVMNPIKGYIVNSSDDFYLVNIPSLKTPAXXP

SEQ ID NO: 40525 - protein, 29 aa, Artificial Sequence
  Cyclic GFR-binding peptide
  MOD_RES (2)..(2): Xaa is C or S
GXEAVSMGEPIKGYTPVGMDDFYLVNIPS

SEQ ID NO: 40526 - protein, 33 aa, Artificial Sequence
  Cyclic GFR-binding peptide
  MOD_RES (32)..(33): Xaa is C or S
SRVVMNPIKGYIVNSSDDFYLVNIPSLKTPAXX

SEQ ID NO: 40527 - protein, 32 aa, Artificial Sequence
  Cyclic GFR-binding peptide
  MOD_RES (2)..(4): Xaa is C or S
RXGXGEVVMDPIKGYVVKENEDFYLMNIPSLE

SEQ ID NO: 40528 - protein, 35 aa, Artificial Sequence
  Cyclic GFR-binding peptide
  MOD_RES (30)..(31): Xaa is C or S
VVMNPIKGYIVNSSDDFYLVNIPSLKTPAXXPKPV

SEQ ID NO: 40529 - protein, 35 aa, Artificial Sequence
  Cyclic GFR-binding peptide
  MOD_RES (1)..(3)..(35): Xaa is C or S
XGXAEVVMDPIKGYVVNNAADFYLINIPSLRAPVX

SEQ ID NO: 40530 - protein, 37 aa, Artificial Sequence
  Cyclic GFR-binding peptide
  MOD_RES (2)..(34)..(35): Xaa is C or S
GXARVVMNPIKGYIVNSSDDFYLVNIPSLQTPAXXPK

SEQ ID NO: 40531 - protein, 36 aa, Artificial Sequence
  Cyclic GFR-binding peptide
  MOD_RES (30)..(31): Xaa is C or S
EVIMPIKGYLLVRGNDFYLMNIPSTKVPAXXTSPVR

SEQ ID NO: 40532 - protein, 34 aa, Artificial Sequence
  Cyclic GFR-binding peptide
  MOD_RES (29)..(30): Xaa is C or S
VMDPIKGYVVKENEDFYLMNIPSLETPVXXAKPI

SEQ ID NO: 40533 - protein, 28 aa, Artificial Sequence
  Cyclic GFR-binding peptide
  MOD_RES (28)..(28): Xaa is C or S
MNPIKGYIVNSSDDFYLVNIPSLQTPAX

SEQ ID NO: 40534 - protein, 39 aa, Artificial Sequence
  Cyclic GFR-binding peptide
  MOD_RES (1)..(3)..(34)..(35): Xaa is C or S
XGXEEVIMPIKGYLLVRGNDFYLMNIPSTKVPAXXTSPV

SEQ ID NO: 40535 - protein, 34 aa, Artificial Sequence
  Cyclic GFR-binding peptide
  MOD_RES (31)..(32): Xaa is C or S
KVVMNPIKGYIVNNSSDFYLVNIPSLKTPAXXAK

SEQ ID NO: 40536 - protein, 42 aa, Artificial Sequence
  Cyclic GFR-binding peptide
  MOD_RES (2)..(4)..(36)..(37): Xaa is C or S
HXGXSRVVMNPIKGYIVNSSDDFYLVNIPSLKTPAXXPKPVY

SEQ ID NO: 40537 - protein, 36 aa, Artificial Sequence
  Cyclic GFR-binding peptide
  MOD_RES (2)..(34)..(35): Xaa is C or S
GXSEVVMDPIKGYVVNNASDFYLINIPSLRTPVXXT

SEQ ID NO: 40538 - protein, 33 aa, Artificial Sequence
  Cyclic GFR-binding peptide
  MOD_RES (28)..(29): Xaa is C or S
MNPIKGYIVNSSDDFYLVNIPSLKTPAXXPKPV

SEQ ID NO: 40539 - protein, 38 aa, Artificial Sequence
  Cyclic GFR-binding peptide
  MOD_RES (32)..(33): Xaa is C or S
GEVVMEPIKGYVVKDYEDFYLMNIPSLETPVXXAKPIS

SEQ ID NO: 40540 - protein, 36 aa, Artificial Sequence
  Cyclic GFR-binding peptide
  MOD_RES (31)..(32): Xaa is C or S
KVVMNPIKGYIVNNSSDFYLVNIPSLKTPAXXAKPV

SEQ ID NO: 40541 - protein, 34 aa, Artificial Sequence
  Cyclic GFR-binding peptide
  MOD_RES (30)..(31): Xaa is C or S
VVMDPIKGYVVNNAADFYLINIPSLRAPVXXSAP

SEQ ID NO: 40542 - protein, 27 aa, Artificial Sequence
  Cyclic GFR-binding peptide
VMEPIKGYVVKDYEDFYLMNIPSLETP

SEQ ID NO: 40543 - protein, 29 aa, Artificial Sequence
  Cyclic GFR-binding peptide
  MOD_RES (1)..(3): Xaa is C or S
XGXARVVMNPIKGYIVNSSDDFYLVNIPS

SEQ ID NO: 40544 - protein, 35 aa, Artificial Sequence
  Cyclic GFR-binding peptide
  MOD_RES (30)..(31): Xaa is C or S
SMGEPIKGYTPVGMDDFYLVNIPSLKTPVXXAKGV

SEQ ID NO: 40545 - protein, 31 aa, Artificial Sequence
  Cyclic GFR-binding peptide
EAVSMGEPIKGYTPVGMDDFYLVNIPSLKTP

SEQ ID NO: 40546 - protein, 22 aa, Artificial Sequence
  Cyclic GFR-binding peptide
PIKGYVVKDYEDFYLMNIPSLE

SEQ ID NO: 40547 - protein, 31 aa, Artificial Sequence
  Cyclic GFR-binding peptide
AKVVMNPIKGYIVNNSSDFYLVNIPSLKTPA

SEQ ID NO: 40548 - protein, 40 aa, Artificial Sequence
  Cyclic GFR-binding peptide
  MOD_RES (1)..(3)..(35)..(36): Xaa is C or S
XGXARVVMNPIKGYIVNSSDDFYLVNIPSLQTPAXXPKPV

SEQ ID NO: 40549 - protein, 37 aa, Artificial Sequence
  Cyclic GFR-binding peptide
  MOD_RES (1)..(33)..(34): Xaa is C or S
XSRVVMNPIKGYIVNSSDDFYLVNIPSLKTPAXXPKP

SEQ ID NO: 40550 - protein, 37 aa, Artificial Sequence
  Cyclic GFR-binding peptide
  MOD_RES (31)..(32): Xaa is C or S
EVVMDPIKGYVVNNAADFYLINIPSLRAPVXXSAPAA

SEQ ID NO: 40551 - protein, 34 aa, Artificial Sequence
  Cyclic GFR-binding peptide
  MOD_RES (1)..(32)..(33): Xaa is C or S
XEEVIMPIKGYLLVRGNDFYLMNIPSTKVPAXXT

SEQ ID NO: 40552 - protein, 32 aa, Artificial Sequence
  Cyclic GFR-binding peptide
  MOD_RES (29)..(29): Xaa is C or S
VMNPIKGYIVNSSDDFYLVNIPSLKTPAXTPK

SEQ ID NO: 40553 - protein, 31 aa, Artificial Sequence
  Cyclic GFR-binding peptide
  MOD_RES (31)..(31): Xaa is C or S
RVVMNPIKGYIVNSSDDFYLVNIPSLKTPAX

SEQ ID NO: 40554 - protein, 28 aa, Artificial Sequence
  Cyclic GFR-binding peptide
  MOD_RES (1)..(1): Xaa is C or S
XEAVSMGEPIKGYTPVGMDDFYLVNIPS

SEQ ID NO: 40555 - protein, 41 aa, Artificial Sequence
  Cyclic GFR-binding peptide
  MOD_RES (2)..(35)..(36): Xaa is C or S
GXEAVSMGEPIKGYTPVGMDDFYLVNIPSLKTPVXXAKGVK

SEQ ID NO: 40556 - protein, 33 aa, Artificial Sequence
  Cyclic GFR-binding peptide
  MOD_RES (27)..(28): Xaa is C or S
DPIKGYVVKENEDFYLMNIPSLETPVXXAKPIK

SEQ ID NO: 40557 - protein, 32 aa, Artificial Sequence
  Cyclic GFR-binding peptide
  MOD_RES (31)..(32): Xaa is C or S
EVVMDPIKGYVVNNASDFYLINIPSLRTPVXX

SEQ ID NO: 40558 - protein, 38 aa, Artificial Sequence
  Cyclic GFR-binding peptide
  MOD_RES (1)..(3)..(36)..(37): Xaa is C or S
XGXEAVSMGEPIKGYTPVGMDDFYLVNIPSLKTPVXXA

SEQ ID NO: 40559 - protein, 36 aa, Artificial Sequence
  Cyclic GFR-binding peptide
  MOD_RES (2)..(34)..(35): Xaa is C or S
GXSRVVMNPIKGYIVNSSDDFYLVNIPSLKTPAXXP

SEQ ID NO: 40560 - protein, 22 aa, Artificial Sequence
  Cyclic GFR-binding peptide
PIKGYLLVRGNDFYLMNIPSTK

SEQ ID NO: 40561 - protein, 30 aa, Artificial Sequence
  Cyclic GFR-binding peptide
  MOD_RES (26)..(27): Xaa is C or S
PIKGYIVNNSSDFYLVNIPSLKTPAXXAKP

SEQ ID NO: 40562 - protein, 34 aa, Artificial Sequence
  Cyclic GFR-binding peptide
  MOD_RES (31)..(32): Xaa is C or S
SVAMGPIKGYYTVVGKDFYLINIPSLKTPVXXAK

SEQ ID NO: 40563 - protein, 33 aa, Artificial Sequence
  Cyclic GFR-binding peptide
  MOD_RES (1)..(3): Xaa is C or S
XGXEAVSMGEPIKGYTPVGMDDFYLVNIPSLKT

SEQ ID NO: 40564 - protein, 26 aa, Artificial Sequence
  Cyclic GFR-binding peptide
EVVMDPIKGYVVNNAADFYLINIPSL

SEQ ID NO: 40565 - protein, 28 aa, Artificial Sequence
  Cyclic GFR-binding peptide
  MOD_RES (1)..(1): Xaa is C or S
XSEVVMDPIKGYVVNNASDFYLINIPSL

SEQ ID NO: 40566 - protein, 29 aa, Artificial Sequence
  Cyclic GFR-binding peptide
ESVAMGPIKGYYTVVGKDFYLINIPSLKT

SEQ ID NO: 40567 - protein, 32 aa, Artificial Sequence
  Cyclic GFR-binding peptide
  MOD_RES (31)..(32): Xaa is C or S
EVVMDPIKGYVVNNAADFYLINIPSLRAPVXX

SEQ ID NO: 40568 - protein, 36 aa, Artificial Sequence
  Cyclic GFR-binding peptide
  MOD_RES (32)..(33): Xaa is C or S
AVSMGEPIKGYTPVGMDDFYLVNIPSLKTPVXXAKG

SEQ ID NO: 40569 - protein, 29 aa, Artificial Sequence
  Cyclic GFR-binding peptide
  MOD_RES (28)..(29): Xaa is C or S
MEPIKGYVVKDYEDFYLMNIPSLETPVXX

SEQ ID NO: 40570 - protein, 32 aa, Artificial Sequence
  Cyclic GFR-binding peptide
  MOD_RES (1)..(3): Xaa is C or S
XGXARVVMNPIKGYIVNSSDDFYLVNIPSLQT

SEQ ID NO: 40571 - protein, 36 aa, Artificial Sequence
  Cyclic GFR-binding peptide
  MOD_RES (1)..(3)..(35)..(36): Xaa is C or S
XGXSEVVMDPIKGYVVNNASDFYLINIPSLRTPVXX

SEQ ID NO: 40572 - protein, 28 aa, Artificial Sequence
  Cyclic GFR-binding peptide
  MOD_RES (27)..(28): Xaa is C or S
GPIKGYYTVVGKDFYLINIPSLKTPVXX

SEQ ID NO: 40573 - protein, 38 aa, Artificial Sequence
  Cyclic GFR-binding peptide
  MOD_RES (1)..(33)..(34): Xaa is C or S
XESVAMGPIKGYYTVVGKDFYLINIPSLKTPVXXAKSA

SEQ ID NO: 40574 - protein, 25 aa, Artificial Sequence
  Cyclic GFR-binding peptide
PIKGYIVNSSDDFYLVNIPSLKTPA

SEQ ID NO: 40575 - protein, 31 aa, Artificial Sequence
  Cyclic GFR-binding peptide
  MOD_RES (27)..(28): Xaa is C or S
NPIKGYIVNSSDDFYLVNIPSLKTPAXXPKP

SEQ ID NO: 40576 - protein, 37 aa, Artificial Sequence
  Cyclic GFR-binding peptide
  MOD_RES (1)..(3)..(35)..(36): Xaa is C or S
XGXARVVMNPIKGYIVNSSDDFYLVNIPSLQTPAXXP

SEQ ID NO: 40577 - protein, 34 aa, Artificial Sequence
  Cyclic GFR-binding peptide
  MOD_RES (31)..(32): Xaa is C or S
EVVMDPIKGYVVNNASDFYLINIPSLRTPVXXTP

SEQ ID NO: 40578 - protein, 40 aa, Artificial Sequence
  Cyclic GFR-binding peptide
  MOD_RES (2)..(4)..(36): Xaa is C or S
HXGXSRVVMNPIKGYIVNSSDDFYLVNIPSLKTPAXTPKT

SEQ ID NO: 40579 - protein, 39 aa, Artificial Sequence
  Cyclic GFR-binding peptide
  MOD_RES (1)..(3)..(35)..(36): Xaa is C or S
XGXAKVVMNPIKGYIVNNSSDFYLVNIPSLKTPAXXAKP

SEQ ID NO: 40580 - protein, 26 aa, Artificial Sequence
  Cyclic GFR-binding peptide
MEPIKGYVVKDYEDFYLMNIPSLETP

SEQ ID NO: 40581 - protein, 25 aa, Artificial Sequence
  Cyclic GFR-binding peptide
EPIKGYVVKDYEDFYLMNIPSLETP

SEQ ID NO: 40582 - protein, 34 aa, Artificial Sequence
  Cyclic GFR-binding peptide
  MOD_RES (32)..(33): Xaa is C or S
GEVVMEPIKGYVVKDYEDFYLMNIPSLETPVXXA

SEQ ID NO: 40583 - protein, 38 aa, Artificial Sequence
  Cyclic GFR-binding peptide
  MOD_RES (2)..(4)..(36)..(37): Xaa is C or S
RXGXSEVVMDPIKGYVVNNASDFYLINIPSLRTPVXXT

SEQ ID NO: 40584 - protein, 35 aa, Artificial Sequence
  Cyclic GFR-binding peptide
  MOD_RES (29)..(30): Xaa is C or S
MGEPIKGYTPVGMDDFYLVNIPSLKTPVXXAKGVK

SEQ ID NO: 40585 - protein, 33 aa, Artificial Sequence
  Cyclic GFR-binding peptide
  MOD_RES (31)..(32): Xaa is C or S
RVVMNPIKGYIVNSSDDFYLVNIPSLKTPAXXP

SEQ ID NO: 40586 - protein, 30 aa, Artificial Sequence
  Cyclic GFR-binding peptide
  MOD_RES (27)..(28): Xaa is C or S
GPIKGYYTVVGKDFYLINIPSLKTPVXXAK

SEQ ID NO: 40587 - protein, 32 aa, Artificial Sequence
  Cyclic GFR-binding peptide
  MOD_RES (27)..(28): Xaa is C or S
MPIKGYLLVRGNDFYLMNIPSTKVPAXXTSPV

SEQ ID NO: 40588 - protein, 32 aa, Artificial Sequence
  Cyclic GFR-binding peptide
  MOD_RES (28)..(29): Xaa is C or S
GEPIKGYTPVGMDDFYLVNIPSLKTPVXXAKG

SEQ ID NO: 40589 - protein, 30 aa, Artificial Sequence
  Cyclic GFR-binding peptide
  MOD_RES (1)..(3): Xaa is C or S
XGXAEVVMDPIKGYVVNNAADFYLINIPSL

SEQ ID NO: 40590 - protein, 33 aa, Artificial Sequence
  Cyclic GFR-binding peptide
  MOD_RES (2)..(2): Xaa is C or S
GXAKVVMNPIKGYIVNNSSDFYLVNIPSLKTPA

SEQ ID NO: 40591 - protein, 32 aa, Artificial Sequence
  Cyclic GFR-binding peptide
  MOD_RES (30)..(31): Xaa is C or S
EVIMPIKGYLLVRGNDFYLMNIPSTKVPAXXT

SEQ ID NO: 40592 - protein, 33 aa, Artificial Sequence
  Cyclic GFR-binding peptide
  MOD_RES (2)..(2): Xaa is C or S
GXAEVVMDPIKGYVVNNAADFYLINIPSLRAPV

SEQ ID NO: 40593 - protein, 39 aa, Artificial Sequence
  Cyclic GFR-binding peptide
  MOD_RES (1)..(3)..(35)..(36): Xaa is C or S
XGXGEVVMDPIKGYVVKENEDFYLMNIPSLETPVXXAKP

SEQ ID NO: 40594 - protein, 35 aa, Artificial Sequence
  Cyclic GFR-binding peptide
  MOD_RES (29)..(30): Xaa is C or S
VMNPIKGYIVNSSDDFYLVNIPSLKTPAXXPKPVY

SEQ ID NO: 40595 - protein, 33 aa, Artificial Sequence
  Cyclic GFR-binding peptide
  MOD_RES (2)..(2): Xaa is C or S
GXSRVVMNPIKGYIVNSSDDFYLVNIPSLKTPA

SEQ ID NO: 40596 - protein, 30 aa, Artificial Sequence
  Cyclic GFR-binding peptide
  MOD_RES (30)..(30): Xaa is C or S
VVMNPIKGYIVNNSSDFYLVNIPSLKTPAX

SEQ ID NO: 40597 - protein, 24 aa, Artificial Sequence
  Cyclic GFR-binding peptide
MNPIKGYIVNNSSDFYLVNIPSLK

SEQ ID NO: 40598 - protein, 33 aa, Artificial Sequence
  Cyclic GFR-binding peptide
  MOD_RES (1)..(33): Xaa is C or S
XESVAMGPIKGYYTVVGKDFYLINIPSLKTPVX

SEQ ID NO: 40599 - protein, 23 aa, Artificial Sequence
  Cyclic GFR-binding peptide
EPIKGYVVKDYEDFYLMNIPSLE

SEQ ID NO: 40600 - protein, 29 aa, Artificial Sequence
  Cyclic GFR-binding peptide
  MOD_RES (1)..(1): Xaa is C or S
XARVVMNPIKGYIVNSSDDFYLVNIPSLQ

SEQ ID NO: 40601 - protein, 20 aa, Artificial Sequence
  Cyclic GFR-binding peptide
PIKGYVVKDYEDFYLMNIPS

SEQ ID NO: 40602 - protein, 28 aa, Artificial Sequence
  Cyclic GFR-binding peptide
  MOD_RES (26)..(27): Xaa is C or S
PIKGYLLVRGNDFYLMNIPSTKVPAXXT

SEQ ID NO: 40603 - protein, 35 aa, Artificial Sequence
  Cyclic GFR-binding peptide
  MOD_RES (33)..(34): Xaa is C or S
EAVSMGEPIKGYTPVGMDDFYLVNIPSLKTPVXXA

SEQ ID NO: 40604 - protein, 20 aa, Artificial Sequence
  Cyclic GFR-binding peptide
PIKGYVVKENEDFYLMNIPS

SEQ ID NO: 40605 - protein, 24 aa, Artificial Sequence
  Cyclic GFR-binding peptide
VVMNPIKGYIVNSSDDFYLVNIPS

SEQ ID NO: 40606 - protein, 39 aa, Artificial Sequence
  Cyclic GFR-binding peptide
  MOD_RES (1)..(3)..(35)..(36): Xaa is C or S
XGXSEVVMDPIKGYVVNNASDFYLINIPSLRTPVXXTPP

SEQ ID NO: 40607 - protein, 28 aa, Artificial Sequence
  Cyclic GFR-binding peptide
  MOD_RES (2)..(2): Xaa is C or S
GXGEVVMEPIKGYVVKDYEDFYLMNIPS

SEQ ID NO: 40608 - protein, 32 aa, Artificial Sequence
  Cyclic GFR-binding peptide
  MOD_RES (2)..(4): Xaa is C or S
RXGXGEVVMEPIKGYVVKDYEDFYLMNIPSLE

SEQ ID NO: 40609 - protein, 25 aa, Artificial Sequence
  Cyclic GFR-binding peptide
VMNPIKGYIVNSSDDFYLVNIPSLQ

SEQ ID NO: 40610 - protein, 30 aa, Artificial Sequence
  Cyclic GFR-binding peptide
  MOD_RES (28)..(29): Xaa is C or S
MDPIKGYVVNNAADFYLINIPSLRAPVXXS

SEQ ID NO: 40611 - protein, 34 aa, Artificial Sequence
  Cyclic GFR-binding peptide
  MOD_RES (2)..(4): Xaa is C or S
RXGXGEVVMEPIKGYVVKDYEDFYLMNIPSLETP

SEQ ID NO: 40612 - protein, 33 aa, Artificial Sequence
  Cyclic GFR-binding peptide
  MOD_RES (2)..(2): Xaa is C or S
GXSEVVMDPIKGYVVNNASDFYLINIPSLRTPV

SEQ ID NO: 40613 - protein, 32 aa, Artificial Sequence
  Cyclic GFR-binding peptide
  MOD_RES (28)..(29): Xaa is C or S
MNPIKGYIVNSSDDFYLVNIPSLKTPAXXPKP

SEQ ID NO: 40614 - protein, 23 aa, Artificial Sequence
  Cyclic GFR-binding peptide
MEPIKGYVVKDYEDFYLMNIPSL

SEQ ID NO: 40615 - protein, 29 aa, Artificial Sequence
  Cyclic GFR-binding peptide
VVMNPIKGYIVNNSSDFYLVNIPSLKTPA

SEQ ID NO: 40616 - protein, 30 aa, Artificial Sequence
  Cyclic GFR-binding peptide
  MOD_RES (1)..(3): Xaa is C or S
XGXAKVVMNPIKGYIVNNSSDFYLVNIPSL

SEQ ID NO: 40617 - protein, 35 aa, Artificial Sequence
  Cyclic GFR-binding peptide
  MOD_RES (32)..(33): Xaa is C or S
AEVVMDPIKGYVVNNAADFYLINIPSLRAPVXXSA

SEQ ID NO: 40618 - protein, 35 aa, Artificial Sequence
  Cyclic GFR-binding peptide
  MOD_RES (1)..(3)..(34)..(35): Xaa is C or S
XGXEEVIMPIKGYLLVRGNDFYLMNIPSTKVPAXX

SEQ ID NO: 40619 - protein, 42 aa, Artificial Sequence
  Cyclic GFR-binding peptide
  MOD_RES (2)..(4)..(36)..(37): Xaa is C or S
RXGXESVAMGPIKGYYTVVGKDFYLINIPSLKTPVXXAKSAK

SEQ ID NO: 40620 - protein, 26 aa, Artificial Sequence
  Cyclic GFR-binding peptide
EPIKGYTPVGMDDFYLVNIPSLKTPV

SEQ ID NO: 40621 - protein, 29 aa, Artificial Sequence
  Cyclic GFR-binding peptide
  MOD_RES (28)..(29): Xaa is C or S
MDPIKGYVVNNASDFYLINIPSLRTPVXX

SEQ ID NO: 40622 - protein, 32 aa, Artificial Sequence
  Cyclic GFR-binding peptide
  MOD_RES (26)..(27): Xaa is C or S
PIKGYVVKENEDFYLMNIPSLETPVXXAKPIK

SEQ ID NO: 40623 - protein, 33 aa, Artificial Sequence
  Cyclic GFR-binding peptide
  MOD_RES (32)..(33): Xaa is C or S
GEVVMDPIKGYVVKENEDFYLMNIPSLETPVXX

SEQ ID NO: 40624 - protein, 35 aa, Artificial Sequence
  Cyclic GFR-binding peptide
  MOD_RES (1)..(3)..(35): Xaa is C or S
XGXGEVVMDPIKGYVVKENEDFYLMNIPSLETPVX

SEQ ID NO: 40625 - protein, 29 aa, Artificial Sequence
  Cyclic GFR-binding peptide
  MOD_RES (26)..(27): Xaa is C or S
PIKGYTPVGMDDFYLVNIPSLKTPVXXAK

SEQ ID NO: 40626 - protein, 29 aa, Artificial Sequence
  Cyclic GFR-binding peptide
SEVVMDPIKGYVVNNASDFYLINIPSLRT

SEQ ID NO: 40627 - protein, 40 aa, Artificial Sequence
  Cyclic GFR-binding peptide
  MOD_RES (2)..(4)..(36)..(37): Xaa is C or S
HXGXARVVMNPIKGYIVNSSDDFYLVNIPSLQTPAXXPKP

SEQ ID NO: 40628 - protein, 25 aa, Artificial Sequence
  Cyclic GFR-binding peptide
NPIKGYIVNSSDDFYLVNIPSLKTP

SEQ ID NO: 40629 - protein, 21 aa, Artificial Sequence
  Cyclic GFR-binding peptide
DPIKGYVVNNASDFYLINIPS

SEQ ID NO: 40630 - protein, 41 aa, Artificial Sequence
  Cyclic GFR-binding peptide
  MOD_RES (1)..(3)..(35)..(36): Xaa is C or S
XGXESVAMGPIKGYYTVVGKDFYLINIPSLKTPVXXAKSAK

SEQ ID NO: 40631 - protein, 32 aa, Artificial Sequence
  Cyclic GFR-binding peptide
  MOD_RES (2)..(2): Xaa is C or S
GXSEVVMDPIKGYVVNNASDFYLINIPSLRTP

SEQ ID NO: 40632 - protein, 22 aa, Artificial Sequence
  Cyclic GFR-binding peptide
MNPIKGYIVNSSDDFYLVNIPS

SEQ ID NO: 40633 - protein, 32 aa, Artificial Sequence
  Cyclic GFR-binding peptide
  MOD_RES (31)..(32): Xaa is C or S
RVVMNPIKGYIVNSSDDFYLVNIPSLKTPAXX

SEQ ID NO: 40634 - protein, 30 aa, Artificial Sequence
  Cyclic GFR-binding peptide
  MOD_RES (27)..(28): Xaa is C or S
NPIKGYIVNNSSDFYLVNIPSLKTPAXXAK

SEQ ID NO: 40635 - protein, 28 aa, Artificial Sequence
  Cyclic GFR-binding peptide
VAMGPIKGYYTVVGKDFYLINIPSLKTP

SEQ ID NO: 40636 - protein, 27 aa, Artificial Sequence
  Cyclic GFR-binding peptide
  MOD_RES (27)..(27): Xaa is C or S
NPIKGYIVNSSDDFYLVNIPSLKTPAX

SEQ ID NO: 40637 - protein, 26 aa, Artificial Sequence
  Cyclic GFR-binding peptide
MNPIKGYIVNSSDDFYLVNIPSLKTP

SEQ ID NO: 40638 - protein, 38 aa, Artificial Sequence
  Cyclic GFR-binding peptide
  MOD_RES (1)..(3)..(35)..(36): Xaa is C or S
XGXESVAMGPIKGYYTVVGKDFYLINIPSLKTPVXXAK

SEQ ID NO: 40639 - protein, 23 aa, Artificial Sequence
  Cyclic GFR-binding peptide
VIMPIKGYLLVRGNDFYLMNIPS

SEQ ID NO: 40640 - protein, 25 aa, Artificial Sequence
  Cyclic GFR-binding peptide
PIKGYLLVRGNDFYLMNIPSTKVPA

SEQ ID NO: 40641 - protein, 38 aa, Artificial Sequence
  Cyclic GFR-binding peptide
  MOD_RES (32)..(33): Xaa is C or S
AEVVMDPIKGYVVNNAADFYLINIPSLRAPVXXSAPAA

SEQ ID NO: 40642 - protein, 26 aa, Artificial Sequence
  Cyclic GFR-binding peptide
KVVMNPIKGYIVNNSSDFYLVNIPSL

SEQ ID NO: 40643 - protein, 26 aa, Artificial Sequence
  Cyclic GFR-binding peptide
EPIKGYVVKDYEDFYLMNIPSLETPV

SEQ ID NO: 40644 - protein, 27 aa, Artificial Sequence
  Cyclic GFR-binding peptide
MNPIKGYIVNNSSDFYLVNIPSLKTPA

SEQ ID NO: 40645 - protein, 41 aa, Artificial Sequence
  Cyclic GFR-binding peptide
  MOD_RES (2)..(4)..(36)..(37): Xaa is C or S
RXGXSEVVMDPIKGYVVNNASDFYLINIPSLRTPVXXTPPT

SEQ ID NO: 40646 - protein, 41 aa, Artificial Sequence
  Cyclic GFR-binding peptide
  MOD_RES (1)..(3)..(35)..(36): Xaa is C or S
XGXARVVMNPIKGYIVNSSDDFYLVNIPSLQTPAXXPKPVT

SEQ ID NO: 40647 - protein, 28 aa, Artificial Sequence
  Cyclic GFR-binding peptide
  MOD_RES (26)..(27): Xaa is C or S
PIKGYIVNNSSDFYLVNIPSLKTPAXXA

SEQ ID NO: 40648 - protein, 22 aa, Artificial Sequence
  Cyclic GFR-binding peptide
GPIKGYYTVVGKDFYLINIPSL

SEQ ID NO: 40649 - protein, 24 aa, Artificial Sequence
  Cyclic GFR-binding peptide
NPIKGYIVNSSDDFYLVNIPSLKT

SEQ ID NO: 40650 - protein, 26 aa, Artificial Sequence
  Cyclic GFR-binding peptide
MDPIKGYVVNNASDFYLINIPSLRTP

SEQ ID NO: 40651 - protein, 35 aa, Artificial Sequence
  Cyclic GFR-binding peptide
  MOD_RES (2)..(33)..(34): Xaa is C or S
GXEEVIMPIKGYLLVRGNDFYLMNIPSTKVPAXXT

SEQ ID NO: 40652 - protein, 35 aa, Artificial Sequence
  Cyclic GFR-binding peptide
  MOD_RES (29)..(30): Xaa is C or S
VIMPIKGYLLVRGNDFYLMNIPSTKVPAXXTSPVR

SEQ ID NO: 40653 - protein, 33 aa, Artificial Sequence
  Cyclic GFR-binding peptide
  MOD_RES (2)..(4): Xaa is C or S
RXGXEAVSMGEPIKGYTPVGMDDFYLVNIPSLK

SEQ ID NO: 40654 - protein, 34 aa, Artificial Sequence
  Cyclic GFR-binding peptide
  MOD_RES (1)..(33)..(34): Xaa is C or S
XSEVVMDPIKGYVVNNASDFYLINIPSLRTPVXX

SEQ ID NO: 40655 - protein, 24 aa, Artificial Sequence
  Cyclic GFR-binding peptide
MNPIKGYIVNSSDDFYLVNIPSLQ

SEQ ID NO: 40656 - protein, 24 aa, Artificial Sequence
  Cyclic GFR-binding peptide
VVMEPIKGYVVKDYEDFYLMNIPS

SEQ ID NO: 40657 - protein, 32 aa, Artificial Sequence
  Cyclic GFR-binding peptide
  MOD_RES (2)..(4): Xaa is C or S
HXGXAKVVMNPIKGYIVNNSSDFYLVNIPSLK

SEQ ID NO: 40658 - protein, 33 aa, Artificial Sequence
  Cyclic GFR-binding peptide
  MOD_RES (27)..(28): Xaa is C or S
NPIKGYIVNNSSDFYLVNIPSLKTPAXXAKPVA

SEQ ID NO: 40659 - protein, 35 aa, Artificial Sequence
  Cyclic GFR-binding peptide
  MOD_RES (32)..(33): Xaa is C or S
ESVAMGPIKGYYTVVGKDFYLINIPSLKTPVXXAK

SEQ ID NO: 40660 - protein, 35 aa, Artificial Sequence
  Cyclic GFR-binding peptide
  MOD_RES (31)..(32): Xaa is C or S
VSMGEPIKGYTPVGMDDFYLVNIPSLKTPVXXAKG

SEQ ID NO: 40661 - protein, 40 aa, Artificial Sequence
  Cyclic GFR-binding peptide
  MOD_RES (1)..(3)..(35)..(36): Xaa is C or S
XGXSEVVMDPIKGYVVNNASDFYLINIPSLRTPVXXTPPT

SEQ ID NO: 40662 - protein, 28 aa, Artificial Sequence
  Cyclic GFR-binding peptide
VMNPIKGYIVNSSDDFYLVNIPSLKTPA

SEQ ID NO: 40663 - protein, 31 aa, Artificial Sequence
  Cyclic GFR-binding peptide
  MOD_RES (28)..(29): Xaa is C or S
MNPIKGYIVNSSDDFYLVNIPSLKTPAXXPK

SEQ ID NO: 40664 - protein, 33 aa, Artificial Sequence
  Cyclic GFR-binding peptide
  MOD_RES (33)..(33): Xaa is C or S
EAVSMGEPIKGYTPVGMDDFYLVNIPSLKTPVX

SEQ ID NO: 40665 - protein, 38 aa, Artificial Sequence
  Cyclic GFR-binding peptide
  MOD_RES (2)..(34)..(35): Xaa is C or S
GXESVAMGPIKGYYTVVGKDFYLINIPSLKTPVXXAKS

SEQ ID NO: 40666 - protein, 29 aa, Artificial Sequence
  Cyclic GFR-binding peptide
VAMGPIKGYYTVVGKDFYLINIPSLKTPV

SEQ ID NO: 40667 - protein, 33 aa, Artificial Sequence
  Cyclic GFR-binding peptide
  MOD_RES (1)..(33): Xaa is C or S
XARVVMNPIKGYIVNSSDDFYLVNIPSLQTPAX

SEQ ID NO: 40668 - protein, 29 aa, Artificial Sequence
  Cyclic GFR-binding peptide
  MOD_RES (29)..(29): Xaa is C or S
VMDPIKGYVVNNASDFYLINIPSLRTPVX

SEQ ID NO: 40669 - protein, 21 aa, Artificial Sequence
  Cyclic GFR-binding peptide
DPIKGYVVNNAADFYLINIPS

SEQ ID NO: 40670 - protein, 32 aa, Artificial Sequence
  Cyclic GFR-binding peptide
  MOD_RES (30)..(31): Xaa is C or S
VVMDPIKGYVVKENEDFYLMNIPSLETPVXXA

SEQ ID NO: 40671 - protein, 33 aa, Artificial Sequence
  Cyclic GFR-binding peptide
  MOD_RES (28)..(29): Xaa is C or S
MNPIKGYIVNSSDDFYLVNIPSLQTPAXXPKPV

SEQ ID NO: 40672 - protein, 28 aa, Artificial Sequence
  Cyclic GFR-binding peptide
EVIMPIKGYLLVRGNDFYLMNIPSTKVP

SEQ ID NO: 40673 - protein, 39 aa, Artificial Sequence
  Cyclic GFR-binding peptide
  MOD_RES (1)..(3)..(36)..(37): Xaa is C or S
XGXEAVSMGEPIKGYTPVGMDDFYLVNIPSLKTPVXXAK

SEQ ID NO: 40674 - protein, 35 aa, Artificial Sequence
  Cyclic GFR-binding peptide
  MOD_RES (29)..(30): Xaa is C or S
VMNPIKGYIVNSSDDFYLVNIPSLQTPAXXPKPVT

SEQ ID NO: 40675 - protein, 34 aa, Artificial Sequence
  Cyclic GFR-binding peptide
  MOD_RES (32)..(33): Xaa is C or S
AKVVMNPIKGYIVNNSSDFYLVNIPSLKTPAXXA

SEQ ID NO: 40676 - protein, 34 aa, Artificial Sequence
  Cyclic GFR-binding peptide
  MOD_RES (29)..(30): Xaa is C or S
VMDPIKGYVVNNAADFYLINIPSLRAPVXXSAPA

SEQ ID NO: 40677 - protein, 29 aa, Artificial Sequence
  Cyclic GFR-binding peptide
  MOD_RES (27)..(28): Xaa is C or S
GPIKGYYTVVGKDFYLINIPSLKTPVXXA

SEQ ID NO: 40678 - protein, 32 aa, Artificial Sequence
  Cyclic GFR-binding peptide
  MOD_RES (32)..(32): Xaa is C or S
ARVVMNPIKGYIVNSSDDFYLVNIPSLQTPAX

SEQ ID NO: 40679 - protein, 33 aa, Artificial Sequence
  Cyclic GFR-binding peptide
  MOD_RES (1)..(3): Xaa is C or S
XGXARVVMNPIKGYIVNSSDDFYLVNIPSLQTP

SEQ ID NO: 40680 - protein, 39 aa, Artificial Sequence
  Cyclic GFR-binding peptide
  MOD_RES (1)..(3)..(35)..(36): Xaa is C or S
XGXGEVVMEPIKGYVVKDYEDFYLMNIPSLETPVXXAKP

SEQ ID NO: 40681 - protein, 33 aa, Artificial Sequence
  Cyclic GFR-binding peptide
  MOD_RES (28)..(28): Xaa is C or S
MNPIKGYIVNSSDDFYLVNIPSLKTPAXTPKTV

SEQ ID NO: 40682 - protein, 27 aa, Artificial Sequence
  Cyclic GFR-binding peptide
VVMNPIKGYIVNSSDDFYLVNIPSLQT

SEQ ID NO: 40683 - protein, 34 aa, Artificial Sequence
  Cyclic GFR-binding peptide
  MOD_RES (2)..(4): Xaa is C or S
HXGXAKVVMNPIKGYIVNNSSDFYLVNIPSLKTP

SEQ ID NO: 40684 - protein, 36 aa, Artificial Sequence
  Cyclic GFR-binding peptide
  MOD_RES (1)..(33)..(34): Xaa is C or S
XSEVVMDPIKGYVVNNASDFYLINIPSLRTPVXXTP

SEQ ID NO: 40685 - protein, 29 aa, Artificial Sequence
  Cyclic GFR-binding peptide
  MOD_RES (1)..(1): Xaa is C or S
XESVAMGPIKGYYTVVGKDFYLINIPSLK

SEQ ID NO: 40686 - protein, 29 aa, Artificial Sequence
  Cyclic GFR-binding peptide
  MOD_RES (26)..(26): Xaa is C or S
PIKGYIVNSSDDFYLVNIPSLKTPAXTPK

SEQ ID NO: 40687 - protein, 26 aa, Artificial Sequence
  Cyclic GFR-binding peptide
IMPIKGYLLVRGNDFYLMNIPSTKVP

SEQ ID NO: 40688 - protein, 32 aa, Artificial Sequence
  Cyclic GFR-binding peptide
  MOD_RES (29)..(30): Xaa is C or S
VMEPIKGYVVKDYEDFYLMNIPSLETPVXXAK

SEQ ID NO: 40689 - protein, 28 aa, Artificial Sequence
  Cyclic GFR-binding peptide
EVVMDPIKGYVVNNASDFYLINIPSLRT

SEQ ID NO: 40690 - protein, 32 aa, Artificial Sequence
  Cyclic GFR-binding peptide
  MOD_RES (31)..(32): Xaa is C or S
SVAMGPIKGYYTVVGKDFYLINIPSLKTPVXX

SEQ ID NO: 40691 - protein, 34 aa, Artificial Sequence
  Cyclic GFR-binding peptide
  MOD_RES (29)..(29): Xaa is C or S
VMNPIKGYIVNSSDDFYLVNIPSLKTPAXTPKTV

SEQ ID NO: 40692 - protein, 38 aa, Artificial Sequence
  Cyclic GFR-binding peptide
  MOD_RES (2)..(4)..(36)..(37): Xaa is C or S
HXGXAKVVMNPIKGYIVNNSSDFYLVNIPSLKTPAXXA

SEQ ID NO: 40693 - protein, 29 aa, Artificial Sequence
  Cyclic GFR-binding peptide
  MOD_RES (27)..(28): Xaa is C or S
NPIKGYIVNNSSDFYLVNIPSLKTPAXXA

SEQ ID NO: 40694 - protein, 30 aa, Artificial Sequence
  Cyclic GFR-binding peptide
  MOD_RES (1)..(3): Xaa is C or S
XGXEAVSMGEPIKGYTPVGMDDFYLVNIPS

SEQ ID NO: 40695 - protein, 28 aa, Artificial Sequence
  Cyclic GFR-binding peptide
VIMPIKGYLLVRGNDFYLMNIPSTKVPA

SEQ ID NO: 40696 - protein, 30 aa, Artificial Sequence
  Cyclic GFR-binding peptide
  MOD_RES (29)..(30): Xaa is C or S
VMNPIKGYIVNNSSDFYLVNIPSLKTPAXX

SEQ ID NO: 40697 - protein, 32 aa, Artificial Sequence
  Cyclic GFR-binding peptide
  MOD_RES (2)..(2): Xaa is C or S
GXGEVVMEPIKGYVVKDYEDFYLMNIPSLETP

SEQ ID NO: 40698 - protein, 36 aa, Artificial Sequence
  Cyclic GFR-binding peptide
  MOD_RES (32)..(33): Xaa is C or S
AEVVMDPIKGYVVNNAADFYLINIPSLRAPVXXSAP

SEQ ID NO: 40699 - protein, 31 aa, Artificial Sequence
  Cyclic GFR-binding peptide
  MOD_RES (1)..(1): Xaa is C or S
XEEVIMPIKGYLLVRGNDFYLMNIPSTKVPA

SEQ ID NO: 40700 - protein, 27 aa, Artificial Sequence
  Cyclic GFR-binding peptide
  MOD_RES (26)..(27): Xaa is C or S
PIKGYVVKENEDFYLMNIPSLETPVXX

SEQ ID NO: 40701 - protein, 30 aa, Artificial Sequence
  Cyclic GFR-binding peptide
  MOD_RES (29)..(30): Xaa is C or S
VMNPIKGYIVNSSDDFYLVNIPSLQTPAXX

SEQ ID NO: 40702 - protein, 28 aa, Artificial Sequence
  Cyclic GFR-binding peptide
  MOD_RES (28)..(28): Xaa is C or S
IMPIKGYLLVRGNDFYLMNIPSTKVPAX

SEQ ID NO: 40703 - protein, 39 aa, Artificial Sequence
  Cyclic GFR-binding peptide
  MOD_RES (1)..(33)..(34): Xaa is C or S
XAKVVMNPIKGYIVNNSSDFYLVNIPSLKTPAXXAKPVA

SEQ ID NO: 40704 - protein, 30 aa, Artificial Sequence
  Cyclic GFR-binding peptide
  MOD_RES (30)..(30): Xaa is C or S
VVMNPIKGYIVNSSDDFYLVNIPSLKTPAX

SEQ ID NO: 40705 - protein, 31 aa, Artificial Sequence
  Cyclic GFR-binding peptide
  MOD_RES (28)..(29): Xaa is C or S
MNPIKGYIVNNSSDFYLVNIPSLKTPAXXAK

SEQ ID NO: 40706 - protein, 32 aa, Artificial Sequence
  Cyclic GFR-binding peptide
  MOD_RES (27)..(28): Xaa is C or S
EPIKGYVVKDYEDFYLMNIPSLETPVXXAKPI

SEQ ID NO: 40707 - protein, 23 aa, Artificial Sequence
  Cyclic GFR-binding peptide
PIKGYLLVRGNDFYLMNIPSTKV

SEQ ID NO: 40708 - protein, 32 aa, Artificial Sequence
  Cyclic GFR-binding peptide
  MOD_RES (1)..(3): Xaa is C or S
XGXAEVVMDPIKGYVVNNAADFYLINIPSLRA

SEQ ID NO: 40709 - protein, 25 aa, Artificial Sequence
  Cyclic GFR-binding peptide
EEVIMPIKGYLLVRGNDFYLMNIPS

SEQ ID NO: 40710 - protein, 42 aa, Artificial Sequence
  Cyclic GFR-binding peptide
  MOD_RES (2)..(4)..(36)..(37): Xaa is C or S
RXGXSEVVMDPIKGYVVNNASDFYLINIPSLRTPVXXTPPTS

SEQ ID NO: 40711 - protein, 41 aa, Artificial Sequence
  Cyclic GFR-binding peptide
  MOD_RES (2)..(4)..(36)..(37): Xaa is C or S
RXGXESVAMGPIKGYYTVVGKDFYLINIPSLKTPVXXAKSA

SEQ ID NO: 40712 - protein, 27 aa, Artificial Sequence
  Cyclic GFR-binding peptide
GEVVMDPIKGYVVKENEDFYLMNIPSL

SEQ ID NO: 40713 - protein, 27 aa, Artificial Sequence
  Cyclic GFR-binding peptide
  MOD_RES (1)..(1): Xaa is C or S
XESVAMGPIKGYYTVVGKDFYLINIPS

SEQ ID NO: 40714 - protein, 37 aa, Artificial Sequence
  Cyclic GFR-binding peptide
  MOD_RES (1)..(33)..(34): Xaa is C or S
XGEVVMDPIKGYVVKENEDFYLMNIPSLETPVXXAKP

SEQ ID NO: 40715 - protein, 41 aa, Artificial Sequence
  Cyclic GFR-binding peptide
  MOD_RES (2)..(4)..(36)..(37): Xaa is C or S
HXGXSRVVMNPIKGYIVNSSDDFYLVNIPSLKTPAXXPKPV

SEQ ID NO: 40716 - protein, 35 aa, Artificial Sequence
  Cyclic GFR-binding peptide
  MOD_RES (29)..(30): Xaa is C or S
VMNPIKGYIVNNSSDFYLVNIPSLKTPAXXAKPVA

SEQ ID NO: 40717 - protein, 37 aa, Artificial Sequence
  Cyclic GFR-binding peptide
  MOD_RES (1)..(3)..(35)..(36): Xaa is C or S
XGXGEVVMDPIKGYVVKENEDFYLMNIPSLETPVXXA

SEQ ID NO: 40718 - protein, 27 aa, Artificial Sequence
  Cyclic GFR-binding peptide
EVVMDPIKGYVVNNASDFYLINIPSLR

SEQ ID NO: 40719 - protein, 33 aa, Artificial Sequence
  Cyclic GFR-binding peptide
  MOD_RES (2)..(33): Xaa is C or S
GXEEVIMPIKGYLLVRGNDFYLMNIPSTKVPAX

SEQ ID NO: 40720 - protein, 33 aa, Artificial Sequence
  Cyclic GFR-binding peptide
  MOD_RES (1)..(3): Xaa is C or S
XGXAEVVMDPIKGYVVNNAADFYLINIPSLRAP

SEQ ID NO: 40721 - protein, 32 aa, Artificial Sequence
  Cyclic GFR-binding peptide
  MOD_RES (26)..(26): Xaa is C or S
PIKGYIVNSSDDFYLVNIPSLKTPAXTPKTVH

SEQ ID NO: 40722 - protein, 35 aa, Artificial Sequence
  Cyclic GFR-binding peptide
  MOD_RES (2)..(34)..(35): Xaa is C or S
GXAKVVMNPIKGYIVNNSSDFYLVNIPSLKTPAXX

SEQ ID NO: 40723 - protein, 28 aa, Artificial Sequence
  Cyclic GFR-binding peptide
VMDPIKGYVVNNAADFYLINIPSLRAPV

SEQ ID NO: 40724 - protein, 32 aa, Artificial Sequence
  Cyclic GFR-binding peptide
  MOD_RES (26)..(27): Xaa is C or S
PIKGYIVNSSDDFYLVNIPSLQTPAXXPKPVT

SEQ ID NO: 40725 - protein, 27 aa, Artificial Sequence
  Cyclic GFR-binding peptide
SMGEPIKGYTPVGMDDFYLVNIPSLKT

SEQ ID NO: 40726 - protein, 31 aa, Artificial Sequence
  Cyclic GFR-binding peptide
  MOD_RES (29)..(30): Xaa is C or S
VMNPIKGYIVNNSSDFYLVNIPSLKTPAXXA

SEQ ID NO: 40727 - protein, 26 aa, Artificial Sequence
  Cyclic GFR-binding peptide
VVMNPIKGYIVNSSDDFYLVNIPSLK

SEQ ID NO: 40728 - protein, 36 aa, Artificial Sequence
  Cyclic GFR-binding peptide
  MOD_RES (1)..(33): Xaa is C or S
XSRVVMNPIKGYIVNSSDDFYLVNIPSLKTPAXTPK

SEQ ID NO: 40729 - protein, 41 aa, Artificial Sequence
  Cyclic GFR-binding peptide
  MOD_RES (2)..(4)..(35)..(36): Xaa is C or S
LXGXEEVIMPIKGYLLVRGNDFYLMNIPSTKVPAXXTSPVR

SEQ ID NO: 40730 - protein, 25 aa, Artificial Sequence
  Cyclic GFR-binding peptide
EPIKGYTPVGMDDFYLVNIPSLKTP

SEQ ID NO: 40731 - protein, 27 aa, Artificial Sequence
  Cyclic GFR-binding peptide
VIMPIKGYLLVRGNDFYLMNIPSTKVP

SEQ ID NO: 40732 - protein, 30 aa, Artificial Sequence
  Cyclic GFR-binding peptide
  MOD_RES (30)..(30): Xaa is C or S
SMGEPIKGYTPVGMDDFYLVNIPSLKTPVX

SEQ ID NO: 40733 - protein, 37 aa, Artificial Sequence
  Cyclic GFR-binding peptide
  MOD_RES (31)..(32): Xaa is C or S
VSMGEPIKGYTPVGMDDFYLVNIPSLKTPVXXAKGVK

SEQ ID NO: 40734 - protein, 32 aa, Artificial Sequence
  Cyclic GFR-binding peptide
  MOD_RES (31)..(32): Xaa is C or S
EEVIMPIKGYLLVRGNDFYLMNIPSTKVPAXX

SEQ ID NO: 40735 - protein, 30 aa, Artificial Sequence
  Cyclic GFR-binding peptide
  MOD_RES (29)..(30): Xaa is C or S
VMDPIKGYVVKENEDFYLMNIPSLETPVXX

SEQ ID NO: 40736 - protein, 28 aa, Artificial Sequence
  Cyclic GFR-binding peptide
  MOD_RES (26)..(27): Xaa is C or S
PIKGYIVNSSDDFYLVNIPSLQTPAXXP

SEQ ID NO: 40737 - protein, 31 aa, Artificial Sequence
  Cyclic GFR-binding peptide
  MOD_RES (2)..(2): Xaa is C or S
GXEAVSMGEPIKGYTPVGMDDFYLVNIPSLK

SEQ ID NO: 40738 - protein, 36 aa, Artificial Sequence
  Cyclic GFR-binding peptide
  MOD_RES (2)..(4)..(36): Xaa is C or S
RXGXGEVVMEPIKGYVVKDYEDFYLMNIPSLETPVX

SEQ ID NO: 40739 - protein, 28 aa, Artificial Sequence
  Cyclic GFR-binding peptide
VVMDPIKGYVVNNASDFYLINIPSLRTP

SEQ ID NO: 40740 - protein, 31 aa, Artificial Sequence
  Cyclic GFR-binding peptide
  MOD_RES (1)..(3): Xaa is C or S
XGXGEVVMEPIKGYVVKDYEDFYLMNIPSLE

SEQ ID NO: 40741 - protein, 26 aa, Artificial Sequence
  Cyclic GFR-binding peptide
SVAMGPIKGYYTVVGKDFYLINIPSL

SEQ ID NO: 40742 - protein, 34 aa, Artificial Sequence
  Cyclic GFR-binding peptide
  MOD_RES (29)..(30): Xaa is C or S
VIMPIKGYLLVRGNDFYLMNIPSTKVPAXXTSPV

SEQ ID NO: 40743 - protein, 26 aa, Artificial Sequence
  Cyclic GFR-binding peptide
VAMGPIKGYYTVVGKDFYLINIPSLK

SEQ ID NO: 40744 - protein, 23 aa, Artificial Sequence
  Cyclic GFR-binding peptide
PIKGYVVKDYEDFYLMNIPSLET

SEQ ID NO: 40745 - protein, 31 aa, Artificial Sequence
  Cyclic GFR-binding peptide
  MOD_RES (30)..(31): Xaa is C or S
VVMNPIKGYIVNNSSDFYLVNIPSLKTPAXX

SEQ ID NO: 40746 - protein, 30 aa, Artificial Sequence
  Cyclic GFR-binding peptide
  MOD_RES (2)..(2): Xaa is C or S
GXESVAMGPIKGYYTVVGKDFYLINIPSLK

SEQ ID NO: 40747 - protein, 34 aa, Artificial Sequence
  Cyclic GFR-binding peptide
  MOD_RES (29)..(30): Xaa is C or S
VMDPIKGYVVNNASDFYLINIPSLRTPVXXTPPT

SEQ ID NO: 40748 - protein, 22 aa, Artificial Sequence
  Cyclic GFR-binding peptide
DPIKGYVVNNASDFYLINIPSL

SEQ ID NO: 40749 - protein, 42 aa, Artificial Sequence
  Cyclic GFR-binding peptide
  MOD_RES (2)..(4)..(36)..(37): Xaa is C or S
RXGXAEVVMDPIKGYVVNNAADFYLINIPSLRAPVXXSAPAA

SEQ ID NO: 40750 - protein, 22 aa, Artificial Sequence
  Cyclic GFR-binding peptide
EPIKGYTPVGMDDFYLVNIPSL

SEQ ID NO: 40751 - protein, 37 aa, Artificial Sequence
  Cyclic GFR-binding peptide
  MOD_RES (31)..(32): Xaa is C or S
RVVMNPIKGYIVNSSDDFYLVNIPSLKTPAXXPKPVH

SEQ ID NO: 40752 - protein, 31 aa, Artificial Sequence
  Cyclic GFR-binding peptide
  MOD_RES (28)..(29): Xaa is C or S
MDPIKGYVVKENEDFYLMNIPSLETPVXXAK

SEQ ID NO: 40753 - protein, 30 aa, Artificial Sequence
  Cyclic GFR-binding peptide
  MOD_RES (27)..(28): Xaa is C or S
MPIKGYLLVRGNDFYLMNIPSTKVPAXXTS

SEQ ID NO: 40754 - protein, 29 aa, Artificial Sequence
  Cyclic GFR-binding peptide
  MOD_RES (27)..(28): Xaa is C or S
DPIKGYVVNNASDFYLINIPSLRTPVXXT

SEQ ID NO: 40755 - protein, 29 aa, Artificial Sequence
  Cyclic GFR-binding peptide
  MOD_RES (28)..(29): Xaa is C or S
MNPIKGYIVNSSDDFYLVNIPSLQTPAXX

SEQ ID NO: 40756 - protein, 37 aa, Artificial Sequence
  Cyclic GFR-binding peptide
  MOD_RES (2)..(4)..(37): Xaa is C or S
RXGXEAVSMGEPIKGYTPVGMDDFYLVNIPSLKTPVX

SEQ ID NO: 40757 - protein, 38 aa, Artificial Sequence
  Cyclic GFR-binding peptide
  MOD_RES (2)..(34)..(35): Xaa is C or S
GXARVVMNPIKGYIVNSSDDFYLVNIPSLQTPAXXPKP

SEQ ID NO: 40758 - protein, 27 aa, Artificial Sequence
  Cyclic GFR-binding peptide
EEVIMPIKGYLLVRGNDFYLMNIPSTK

SEQ ID NO: 40759 - protein, 33 aa, Artificial Sequence
  Cyclic GFR-binding peptide
  MOD_RES (31)..(32): Xaa is C or S
EVVMDPIKGYVVKENEDFYLMNIPSLETPVXXA

SEQ ID NO: 40760 - protein, 33 aa, Artificial Sequence
  Cyclic GFR-binding peptide
  MOD_RES (29)..(30): Xaa is C or S
VMEPIKGYVVKDYEDFYLMNIPSLETPVXXAKP

SEQ ID NO: 40761 - protein, 31 aa, Artificial Sequence
  Cyclic GFR-binding peptide
  MOD_RES (1)..(1): Xaa is C or S
XSRVVMNPIKGYIVNSSDDFYLVNIPSLKTP

SEQ ID NO: 40762 - protein, 29 aa, Artificial Sequence
  Cyclic GFR-binding peptide
  MOD_RES (2)..(2): Xaa is C or S
GXARVVMNPIKGYIVNSSDDFYLVNIPSL

SEQ ID NO: 40763 - protein, 21 aa, Artificial Sequence
  Cyclic GFR-binding peptide
PIKGYVVKDYEDFYLMNIPSL

SEQ ID NO: 40764 - protein, 38 aa, Artificial Sequence
  Cyclic GFR-binding peptide
  MOD_RES (2)..(4)..(36): Xaa is C or S
HXGXSRVVMNPIKGYIVNSSDDFYLVNIPSLKTPAXTP

SEQ ID NO: 40765 - protein, 28 aa, Artificial Sequence
  Cyclic GFR-binding peptide
  MOD_RES (28)..(28): Xaa is C or S
GEPIKGYTPVGMDDFYLVNIPSLKTPVX

SEQ ID NO: 40766 - protein, 24 aa, Artificial Sequence
  Cyclic GFR-binding peptide
MGEPIKGYTPVGMDDFYLVNIPSL

SEQ ID NO: 40767 - protein, 25 aa, Artificial Sequence
  Cyclic GFR-binding peptide
PIKGYVVNNAADFYLINIPSLRAPV

SEQ ID NO: 40768 - protein, 26 aa, Artificial Sequence
  Cyclic GFR-binding peptide
NPIKGYIVNSSDDFYLVNIPSLQTPA

SEQ ID NO: 40769 - protein, 31 aa, Artificial Sequence
  Cyclic GFR-binding peptide
  MOD_RES (1)..(3): Xaa is C or S
XGXESVAMGPIKGYYTVVGKDFYLINIPSLK

SEQ ID NO: 40770 - protein, 40 aa, Artificial Sequence
  Cyclic GFR-binding peptide
  MOD_RES (2)..(34)..(35): Xaa is C or S
GXGEVVMDPIKGYVVKENEDFYLMNIPSLETPVXXAKPIK

SEQ ID NO: 40771 - protein, 24 aa, Artificial Sequence
  Cyclic GFR-binding peptide
PIKGYIVNSSDDFYLVNIPSLKTP

SEQ ID NO: 40772 - protein, 30 aa, Artificial Sequence
  Cyclic GFR-binding peptide
  MOD_RES (29)..(30): Xaa is C or S
VMDPIKGYVVNNAADFYLINIPSLRAPVXX

SEQ ID NO: 40773 - protein, 29 aa, Artificial Sequence
  Cyclic GFR-binding peptide
  MOD_RES (27)..(28): Xaa is C or S
DPIKGYVVNNAADFYLINIPSLRAPVXXS

SEQ ID NO: 40774 - protein, 24 aa, Artificial Sequence
  Cyclic GFR-binding peptide
PIKGYTPVGMDDFYLVNIPSLKTP

SEQ ID NO: 40775 - protein, 34 aa, Artificial Sequence
  Cyclic GFR-binding peptide
  MOD_RES (2)..(4): Xaa is C or S
HXGXARVVMNPIKGYIVNSSDDFYLVNIPSLQTP

SEQ ID NO: 40776 - protein, 26 aa, Artificial Sequence
  Cyclic GFR-binding peptide
  MOD_RES (26)..(26): Xaa is C or S
PIKGYYTVVGKDFYLINIPSLKTPVX

SEQ ID NO: 40777 - protein, 24 aa, Artificial Sequence
  Cyclic GFR-binding peptide
NPIKGYIVNSSDDFYLVNIPSLQT

SEQ ID NO: 40778 - protein, 39 aa, Artificial Sequence
  Cyclic GFR-binding peptide
  MOD_RES (2)..(4)..(36)..(37): Xaa is C or S
RXGXGEVVMEPIKGYVVKDYEDFYLMNIPSLETPVXXAK

SEQ ID NO: 40779 - protein, 37 aa, Artificial Sequence
  Cyclic GFR-binding peptide
  MOD_RES (2)..(4)..(35)..(36): Xaa is C or S
LXGXEEVIMPIKGYLLVRGNDFYLMNIPSTKVPAXXT

SEQ ID NO: 40780 - protein, 34 aa, Artificial Sequence
  Cyclic GFR-binding peptide
  MOD_RES (29)..(30): Xaa is C or S
VMNPIKGYIVNSSDDFYLVNIPSLKTPAXXPKPV

SEQ ID NO: 40781 - protein, 34 aa, Artificial Sequence
  Cyclic GFR-binding peptide
  MOD_RES (2)..(4): Xaa is C or S
RXGXAEVVMDPIKGYVVNNAADFYLINIPSLRAP

SEQ ID NO: 40782 - protein, 33 aa, Artificial Sequence
  Cyclic GFR-binding peptide
  MOD_RES (1)..(33): Xaa is C or S
XAKVVMNPIKGYIVNNSSDFYLVNIPSLKTPAX

SEQ ID NO: 40783 - protein, 28 aa, Artificial Sequence
  Cyclic GFR-binding peptide
  MOD_RES (28)..(28): Xaa is C or S
MDPIKGYVVKENEDFYLMNIPSLETPVX

SEQ ID NO: 40784 - protein, 30 aa, Artificial Sequence
  Cyclic GFR-binding peptide
  MOD_RES (1)..(1): Xaa is C or S
XEAVSMGEPIKGYTPVGMDDFYLVNIPSLK

SEQ ID NO: 40785 - protein, 27 aa, Artificial Sequence
  Cyclic GFR-binding peptide
EVVMDPIKGYVVKENEDFYLMNIPSLE

SEQ ID NO: 40786 - protein, 36 aa, Artificial Sequence
  Cyclic GFR-binding peptide
  MOD_RES (2)..(34)..(35): Xaa is C or S
GXGEVVMDPIKGYVVKENEDFYLMNIPSLETPVXXA

SEQ ID NO: 40787 - protein, 34 aa, Artificial Sequence
  Cyclic GFR-binding peptide
  MOD_RES (29)..(30): Xaa is C or S
VMNPIKGYIVNNSSDFYLVNIPSLKTPAXXAKPV

SEQ ID NO: 40788 - protein, 37 aa, Artificial Sequence
  Cyclic GFR-binding peptide
  MOD_RES (33)..(34): Xaa is C or S
EAVSMGEPIKGYTPVGMDDFYLVNIPSLKTPVXXAKG

SEQ ID NO: 40789 - protein, 35 aa, Artificial Sequence
  Cyclic GFR-binding peptide
  MOD_RES (30)..(31): Xaa is C or S
VAMGPIKGYYTVVGKDFYLINIPSLKTPVXXAKSA

SEQ ID NO: 40790 - protein, 26 aa, Artificial Sequence
  Cyclic GFR-binding peptide
EVVMDPIKGYVVNNASDFYLINIPSL

SEQ ID NO: 40791 - protein, 26 aa, Artificial Sequence
  Cyclic GFR-binding peptide
MNPIKGYIVNSSDDFYLVNIPSLQTP

SEQ ID NO: 40792 - protein, 34 aa, Artificial Sequence
  Cyclic GFR-binding peptide
  MOD_RES (30)..(31): Xaa is C or S
VVMNPIKGYIVNSSDDFYLVNIPSLKTPAXXPKP

SEQ ID NO: 40793 - protein, 38 aa, Artificial Sequence
  Cyclic GFR-binding peptide
  MOD_RES (1)..(33)..(34): Xaa is C or S
XAEVVMDPIKGYVVNNAADFYLINIPSLRAPVXXSAPA

SEQ ID NO: 40794 - protein, 29 aa, Artificial Sequence
  Cyclic GFR-binding peptide
RVVMNPIKGYIVNSSDDFYLVNIPSLQTP

SEQ ID NO: 40795 - protein, 30 aa, Artificial Sequence
  Cyclic GFR-binding peptide
  MOD_RES (2)..(2): Xaa is C or S
GXAKVVMNPIKGYIVNNSSDFYLVNIPSLK

SEQ ID NO: 40796 - protein, 26 aa, Artificial Sequence
  Cyclic GFR-binding peptide
RVVMNPIKGYIVNSSDDFYLVNIPSL

SEQ ID NO: 40797 - protein, 31 aa, Artificial Sequence
  Cyclic GFR-binding peptide
  MOD_RES (29)..(30): Xaa is C or S
VMNPIKGYIVNSSDDFYLVNIPSLKTPAXXP

SEQ ID NO: 40798 - protein, 35 aa, Artificial Sequence
  Cyclic GFR-binding peptide
  MOD_RES (29)..(29): Xaa is C or S
VMNPIKGYIVNSSDDFYLVNIPSLKTPAXTPKTVH

SEQ ID NO: 40799 - protein, 36 aa, Artificial Sequence
  Cyclic GFR-binding peptide
  MOD_RES (30)..(31): Xaa is C or S
VAMGPIKGYYTVVGKDFYLINIPSLKTPVXXAKSAK

SEQ ID NO: 40800 - protein, 26 aa, Artificial Sequence
  Cyclic GFR-binding peptide
  MOD_RES (26)..(26): Xaa is C or S
PIKGYIVNNSSDFYLVNIPSLKTPAX

SEQ ID NO: 40801 - protein, 36 aa, Artificial Sequence
  Cyclic GFR-binding peptide
  MOD_RES (2)..(4)..(35)..(36): Xaa is C or S
LXGXEEVIMPIKGYLLVRGNDFYLMNIPSTKVPAXX

SEQ ID NO: 40802 - protein, 30 aa, Artificial Sequence
  Cyclic GFR-binding peptide
RVVMNPIKGYIVNSSDDFYLVNIPSLQTPA

SEQ ID NO: 40803 - protein, 25 aa, Artificial Sequence
  Cyclic GFR-binding peptide
VMNPIKGYIVNSSDDFYLVNIPSLK

SEQ ID NO: 40804 - protein, 30 aa, Artificial Sequence
  Cyclic GFR-binding peptide
  MOD_RES (2)..(4): Xaa is C or S
RXGXGEVVMEPIKGYVVKDYEDFYLMNIPS

SEQ ID NO: 40805 - protein, 37 aa, Artificial Sequence
  Cyclic GFR-binding peptide
  MOD_RES (1)..(34)..(35): Xaa is C or S
XEAVSMGEPIKGYTPVGMDDFYLVNIPSLKTPVXXAK

SEQ ID NO: 40806 - protein, 25 aa, Artificial Sequence
  Cyclic GFR-binding peptide
VMNPIKGYIVNNSSDFYLVNIPSLK

SEQ ID NO: 40807 - protein, 32 aa, Artificial Sequence
  Cyclic GFR-binding peptide
  MOD_RES (1)..(3): Xaa is C or S
XGXESVAMGPIKGYYTVVGKDFYLINIPSLKT

SEQ ID NO: 40808 - protein, 38 aa, Artificial Sequence
  Cyclic GFR-binding peptide
  MOD_RES (2)..(4)..(36)..(37): Xaa is C or S
HXGXSRVVMNPIKGYIVNSSDDFYLVNIPSLKTPAXXP

SEQ ID NO: 40809 - protein, 33 aa, Artificial Sequence
  Cyclic GFR-binding peptide
  MOD_RES (1)..(3): Xaa is C or S
XGXESVAMGPIKGYYTVVGKDFYLINIPSLKTP

SEQ ID NO: 40810 - protein, 33 aa, Artificial Sequence
  Cyclic GFR-binding peptide
  MOD_RES (1)..(33): Xaa is C or S
XGEVVMEPIKGYVVKDYEDFYLMNIPSLETPVX

SEQ ID NO: 40811 - protein, 32 aa, Artificial Sequence
  Cyclic GFR-binding peptide
  MOD_RES (30)..(31): Xaa is C or S
VVMDPIKGYVVNNAADFYLINIPSLRAPVXXS

SEQ ID NO: 40812 - protein, 25 aa, Artificial Sequence
  Cyclic GFR-binding peptide
EVVMDPIKGYVVNNASDFYLINIPS

SEQ ID NO: 40813 - protein, 35 aa, Artificial Sequence
  Cyclic GFR-binding peptide
  MOD_RES (1)..(33)..(34): Xaa is C or S
XSRVVMNPIKGYIVNSSDDFYLVNIPSLKTPAXXP

SEQ ID NO: 40814 - protein, 34 aa, Artificial Sequence
  Cyclic GFR-binding peptide
  MOD_RES (28)..(29): Xaa is C or S
MDPIKGYVVNNAADFYLINIPSLRAPVXXSAPAA

SEQ ID NO: 40815 - protein, 37 aa, Artificial Sequence
  Cyclic GFR-binding peptide
  MOD_RES (32)..(33): Xaa is C or S
AKVVMNPIKGYIVNNSSDFYLVNIPSLKTPAXXAKPV

SEQ ID NO: 40816 - protein, 35 aa, Artificial Sequence
  Cyclic GFR-binding peptide
  MOD_RES (2)..(35): Xaa is C or S
GXEAVSMGEPIKGYTPVGMDDFYLVNIPSLKTPVX

SEQ ID NO: 40817 - protein, 43 aa, Artificial Sequence
  Cyclic GFR-binding peptide
  MOD_RES (2)..(4)..(37)..(38): Xaa is C or S
RXGXEAVSMGEPIKGYTPVGMDDFYLVNIPSLKTPVXXAKGVK

SEQ ID NO: 40818 - protein, 23 aa, Artificial Sequence
  Cyclic GFR-binding peptide
MNPIKGYIVNNSSDFYLVNIPSL

SEQ ID NO: 40819 - protein, 36 aa, Artificial Sequence
  Cyclic GFR-binding peptide
  MOD_RES (1)..(34)..(35): Xaa is C or S
XEAVSMGEPIKGYTPVGMDDFYLVNIPSLKTPVXXA

SEQ ID NO: 40820 - protein, 34 aa, Artificial Sequence
  Cyclic GFR-binding peptide
  MOD_RES (28)..(28): Xaa is C or S
MNPIKGYIVNSSDDFYLVNIPSLKTPAXTPKTVH

SEQ ID NO: 40821 - protein, 33 aa, Artificial Sequence
  Cyclic GFR-binding peptide
  MOD_RES (31)..(32): Xaa is C or S
EVVMEPIKGYVVKDYEDFYLMNIPSLETPVXXA

SEQ ID NO: 40822 - protein, 21 aa, Artificial Sequence
  Cyclic GFR-binding peptide
MPIKGYLLVRGNDFYLMNIPS

SEQ ID NO: 40823 - protein, 26 aa, Artificial Sequence
  Cyclic GFR-binding peptide
AMGPIKGYYTVVGKDFYLINIPSLKT

SEQ ID NO: 40824 - protein, 34 aa, Artificial Sequence
  Cyclic GFR-binding peptide
  MOD_RES (2)..(34): Xaa is C or S
GXARVVMNPIKGYIVNSSDDFYLVNIPSLQTPAX

SEQ ID NO: 40825 - protein, 26 aa, Artificial Sequence
  Cyclic GFR-binding peptide
VMNPIKGYIVNSSDDFYLVNIPSLQT

SEQ ID NO: 40826 - protein, 29 aa, Artificial Sequence
  Cyclic GFR-binding peptide
  MOD_RES (28)..(28): Xaa is C or S
MNPIKGYIVNSSDDFYLVNIPSLKTPAXT

SEQ ID NO: 40827 - protein, 31 aa, Artificial Sequence
  Cyclic GFR-binding peptide
  MOD_RES (29)..(30): Xaa is C or S
VMDPIKGYVVKENEDFYLMNIPSLETPVXXA

SEQ ID NO: 40828 - protein, 28 aa, Artificial Sequence
  Cyclic GFR-binding peptide
VMNPIKGYIVNSSDDFYLVNIPSLQTPA

SEQ ID NO: 40829 - protein, 36 aa, Artificial Sequence
  Cyclic GFR-binding peptide
  MOD_RES (1)..(33)..(34): Xaa is C or S
XGEVVMEPIKGYVVKDYEDFYLMNIPSLETPVXXAK

SEQ ID NO: 40830 - protein, 21 aa, Artificial Sequence
  Cyclic GFR-binding peptide
EPIKGYTPVGMDDFYLVNIPS

SEQ ID NO: 40831 - protein, 29 aa, Artificial Sequence
  Cyclic GFR-binding peptide
  MOD_RES (1)..(1): Xaa is C or S
XGEVVMEPIKGYVVKDYEDFYLMNIPSLE

SEQ ID NO: 40832 - protein, 41 aa, Artificial Sequence
  Cyclic GFR-binding peptide
  MOD_RES (1)..(3)..(36)..(37): Xaa is C or S
XGXEAVSMGEPIKGYTPVGMDDFYLVNIPSLKTPVXXAKGV

SEQ ID NO: 40833 - protein, 40 aa, Artificial Sequence
  Cyclic GFR-binding peptide
  MOD_RES (2)..(4)..(36)..(37): Xaa is C or S
RXGXGEVVMEPIKGYVVKDYEDFYLMNIPSLETPVXXAKP

SEQ ID NO: 40834 - protein, 28 aa, Artificial Sequence
  Cyclic GFR-binding peptide
  MOD_RES (28)..(28): Xaa is C or S
MEPIKGYVVKDYEDFYLMNIPSLETPVX

SEQ ID NO: 40835 - protein, 32 aa, Artificial Sequence
  Cyclic GFR-binding peptide
  MOD_RES (26)..(27): Xaa is C or S
PIKGYIVNNSSDFYLVNIPSLKTPAXXAKPVA

SEQ ID NO: 40836 - protein, 35 aa, Artificial Sequence
  Cyclic GFR-binding peptide
  MOD_RES (2)..(34)..(35): Xaa is C or S
GXAEVVMDPIKGYVVNNAADFYLINIPSLRAPVXX

SEQ ID NO: 40837 - protein, 22 aa, Artificial Sequence
  Cyclic GFR-binding peptide
GEPIKGYTPVGMDDFYLVNIPS

SEQ ID NO: 40838 - protein, 30 aa, Artificial Sequence
  Cyclic GFR-binding peptide
  MOD_RES (2)..(4): Xaa is C or S
SXGXRDVVMGPIKGYIIQQKDNFYLMNIPS

SEQ ID NO: 40839 - protein, 38 aa, Artificial Sequence
  Cyclic GFR-binding peptide
  MOD_RES (1)..(3)..(35)..(36): Xaa is C or S
XGXAEVVMDPIKGYVVNNAADFYLINIPSLRAPVXXSA

SEQ ID NO: 40840 - protein, 30 aa, Artificial Sequence
  Cyclic GFR-binding peptide
  MOD_RES (1)..(3): Xaa is C or S
XGXEEVIMPIKGYLLVRGNDFYLMNIPSTK

SEQ ID NO: 40841 - protein, 34 aa, Artificial Sequence
  Cyclic GFR-binding peptide
  MOD_RES (28)..(29): Xaa is C or S
MNPIKGYIVNNSSDFYLVNIPSLKTPAXXAKPVA

SEQ ID NO: 40842 - protein, 40 aa, Artificial Sequence
  Cyclic GFR-binding peptide
  MOD_RES (2)..(35)..(36): Xaa is C or S
GXEAVSMGEPIKGYTPVGMDDFYLVNIPSLKTPVXXAKGV

SEQ ID NO: 40843 - protein, 36 aa, Artificial Sequence
  Cyclic GFR-binding peptide
  MOD_RES (33)..(34): Xaa is C or S
EAVSMGEPIKGYTPVGMDDFYLVNIPSLKTPVXXAK

SEQ ID NO: 40844 - protein, 24 aa, Artificial Sequence
  Cyclic GFR-binding peptide
PIKGYIVNSSDDFYLVNIPSLQTP

SEQ ID NO: 40845 - protein, 31 aa, Artificial Sequence
  Cyclic GFR-binding peptide
  MOD_RES (30)..(31): Xaa is C or S
VVMDPIKGYVVKENEDFYLMNIPSLETPVXX

SEQ ID NO: 40846 - protein, 39 aa, Artificial Sequence
  Cyclic GFR-binding peptide
  MOD_RES (1)..(3)..(35): Xaa is C or S
XGXSRVVMNPIKGYIVNSSDDFYLVNIPSLKTPAXTPKT

SEQ ID NO: 40847 - protein, 31 aa, Artificial Sequence
  Cyclic GFR-binding peptide
  MOD_RES (27)..(28): Xaa is C or S
DPIKGYVVNNAADFYLINIPSLRAPVXXSAP

SEQ ID NO: 40848 - protein, 33 aa, Artificial Sequence
  Cyclic GFR-binding peptide
  MOD_RES (30)..(31): Xaa is C or S
VVMDPIKGYVVKENEDFYLMNIPSLETPVXXAK

SEQ ID NO: 40849 - protein, 30 aa, Artificial Sequence
  Cyclic GFR-binding peptide
EVVMDPIKGYVVKENEDFYLMNIPSLETPV

SEQ ID NO: 40850 - protein, 28 aa, Artificial Sequence
  Cyclic GFR-binding peptide
  MOD_RES (1)..(1): Xaa is C or S
XGEVVMDPIKGYVVKENEDFYLMNIPSL

SEQ ID NO: 40851 - protein, 26 aa, Artificial Sequence
  Cyclic GFR-binding peptide
  MOD_RES (26)..(26): Xaa is C or S
PIKGYVVNNASDFYLINIPSLRTPVX

SEQ ID NO: 40852 - protein, 25 aa, Artificial Sequence
  Cyclic GFR-binding peptide
GEPIKGYTPVGMDDFYLVNIPSLKT

SEQ ID NO: 40853 - protein, 31 aa, Artificial Sequence
  Cyclic GFR-binding peptide
  MOD_RES (30)..(31): Xaa is C or S
VVMDPIKGYVVNNAADFYLINIPSLRAPVXX

SEQ ID NO: 40854 - protein, 25 aa, Artificial Sequence
  Cyclic GFR-binding peptide
VVMNPIKGYIVNSSDDFYLVNIPSL

SEQ ID NO: 40855 - protein, 31 aa, Artificial Sequence
  Cyclic GFR-binding peptide
  MOD_RES (27)..(28): Xaa is C or S
DPIKGYVVNNASDFYLINIPSLRTPVXXTPP

SEQ ID NO: 40856 - protein, 32 aa, Artificial Sequence
  Cyclic GFR-binding peptide
  MOD_RES (27)..(28): Xaa is C or S
DPIKGYVVNNASDFYLINIPSLRTPVXXTPPT

SEQ ID NO: 40857 - protein, 28 aa, Artificial Sequence
  Cyclic GFR-binding peptide
  MOD_RES (26)..(27): Xaa is C or S
PIKGYTPVGMDDFYLVNIPSLKTPVXXA

SEQ ID NO: 40858 - protein, 21 aa, Artificial Sequence
  Cyclic GFR-binding peptide
PIKGYVVNNASDFYLINIPSL

SEQ ID NO: 40859 - protein, 33 aa, Artificial Sequence
  Cyclic GFR-binding peptide
  MOD_RES (31)..(32): Xaa is C or S
EVVMDPIKGYVVNNAADFYLINIPSLRAPVXXS

SEQ ID NO: 40860 - protein, 29 aa, Artificial Sequence
  Cyclic GFR-binding peptide
  MOD_RES (29)..(29): Xaa is C or S
VMNPIKGYIVNSSDDFYLVNIPSLKTPAX

SEQ ID NO: 40861 - protein, 32 aa, Artificial Sequence
  Cyclic GFR-binding peptide
  MOD_RES (32)..(32): Xaa is C or S
GEVVMEPIKGYVVKDYEDFYLMNIPSLETPVX

SEQ ID NO: 40862 - protein, 34 aa, Artificial Sequence
  Cyclic GFR-binding peptide
  MOD_RES (2)..(34): Xaa is C or S
GXESVAMGPIKGYYTVVGKDFYLINIPSLKTPVX

SEQ ID NO: 40863 - protein, 28 aa, Artificial Sequence
  Cyclic GFR-binding peptide
EEVIMPIKGYLLVRGNDFYLMNIPSTKV

SEQ ID NO: 40864 - protein, 28 aa, Artificial Sequence
  Cyclic GFR-binding peptide
SVAMGPIKGYYTVVGKDFYLINIPSLKT

SEQ ID NO: 40865 - protein, 34 aa, Artificial Sequence
  Cyclic GFR-binding peptide
  MOD_RES (1)..(33)..(34): Xaa is C or S
XGEVVMDPIKGYVVKENEDFYLMNIPSLETPVXX

SEQ ID NO: 40866 - protein, 34 aa, Artificial Sequence
  Cyclic GFR-binding peptide
  MOD_RES (30)..(31): Xaa is C or S
VVMNPIKGYIVNNSSDFYLVNIPSLKTPAXXAKP

SEQ ID NO: 40867 - protein, 38 aa, Artificial Sequence
  Cyclic GFR-binding peptide
  MOD_RES (32)..(33): Xaa is C or S
ARVVMNPIKGYIVNSSDDFYLVNIPSLQTPAXXPKPVT

SEQ ID NO: 40868 - protein, 28 aa, Artificial Sequence
  Cyclic GFR-binding peptide
VVMDPIKGYVVNNAADFYLINIPSLRAP

SEQ ID NO: 40869 - protein, 29 aa, Artificial Sequence
  Cyclic GFR-binding peptide
  MOD_RES (26)..(27): Xaa is C or S
PIKGYVVKDYEDFYLMNIPSLETPVXXAK

SEQ ID NO: 40870 - protein, 34 aa, Artificial Sequence
  Cyclic GFR-binding peptide
  MOD_RES (32)..(33): Xaa is C or S
AVSMGEPIKGYTPVGMDDFYLVNIPSLKTPVXXA

SEQ ID NO: 40871 - protein, 30 aa, Artificial Sequence
  Cyclic GFR-binding peptide
  MOD_RES (26)..(27): Xaa is C or S
PIKGYTPVGMDDFYLVNIPSLKTPVXXAKG

SEQ ID NO: 40872 - protein, 30 aa, Artificial Sequence
  Cyclic GFR-binding peptide
AVSMGEPIKGYTPVGMDDFYLVNIPSLKTP

SEQ ID NO: 40873 - protein, 22 aa, Artificial Sequence
  Cyclic GFR-binding peptide
NPIKGYIVNNSSDFYLVNIPSL

SEQ ID NO: 40874 - protein, 38 aa, Artificial Sequence
  Cyclic GFR-binding peptide
  MOD_RES (2)..(34)..(35): Xaa is C or S
GXGEVVMEPIKGYVVKDYEDFYLMNIPSLETPVXXAKP

SEQ ID NO: 40875 - protein, 31 aa, Artificial Sequence
  Cyclic GFR-binding peptide
  MOD_RES (2)..(4): Xaa is C or S
HXGXARVVMNPIKGYIVNSSDDFYLVNIPSL

SEQ ID NO: 40876 - protein, 26 aa, Artificial Sequence
  Cyclic GFR-binding peptide
GPIKGYYTVVGKDFYLINIPSLKTPV

SEQ ID NO: 40877 - protein, 27 aa, Artificial Sequence
  Cyclic GFR-binding peptide
  MOD_RES (26)..(27): Xaa is C or S
PIKGYIVNSSDDFYLVNIPSLQTPAXX

SEQ ID NO: 40878 - protein, 26 aa, Artificial Sequence
  Cyclic GFR-binding peptide
VVMDPIKGYVVNNAADFYLINIPSLR

SEQ ID NO: 40879 - protein, 28 aa, Artificial Sequence
  Cyclic GFR-binding peptide
VVMNPIKGYIVNSSDDFYLVNIPSLQTP

SEQ ID NO: 40880 - protein, 27 aa, Artificial Sequence
  Cyclic GFR-binding peptide
  MOD_RES (26)..(26): Xaa is C or S
PIKGYIVNSSDDFYLVNIPSLKTPAXT

SEQ ID NO: 40881 - protein, 32 aa, Artificial Sequence
  Cyclic GFR-binding peptide
  MOD_RES (1)..(1): Xaa is C or S
XGEVVMDPIKGYVVKENEDFYLMNIPSLETPV

SEQ ID NO: 40882 - protein, 30 aa, Artificial Sequence
  Cyclic GFR-binding peptide
GEVVMDPIKGYVVKENEDFYLMNIPSLETP

SEQ ID NO: 40883 - protein, 28 aa, Artificial Sequence
  Cyclic GFR-binding peptide
VVMDPIKGYVVKENEDFYLMNIPSLETP

SEQ ID NO: 40884 - protein, 28 aa, Artificial Sequence
  Cyclic GFR-binding peptide
  MOD_RES (1)..(1): Xaa is C or S
XGEVVMEPIKGYVVKDYEDFYLMNIPSL

SEQ ID NO: 40885 - protein, 28 aa, Artificial Sequence
  Cyclic GFR-binding peptide
RVVMNPIKGYIVNSSDDFYLVNIPSLQT

SEQ ID NO: 40886 - protein, 30 aa, Artificial Sequence
  Cyclic GFR-binding peptide
  MOD_RES (2)..(2): Xaa is C or S
GXGEVVMDPIKGYVVKENEDFYLMNIPSLE

SEQ ID NO: 40887 - protein, 38 aa, Artificial Sequence
  Cyclic GFR-binding peptide
  MOD_RES (2)..(4)..(35)..(36): Xaa is C or S
LXGXEEVIMPIKGYLLVRGNDFYLMNIPSTKVPAXXTS

SEQ ID NO: 40888 - protein, 27 aa, Artificial Sequence
  Cyclic GFR-binding peptide
KVVMNPIKGYIVNNSSDFYLVNIPSLK

SEQ ID NO: 40889 - protein, 34 aa, Artificial Sequence
  Cyclic GFR-binding peptide
  MOD_RES (1)..(3): Xaa is C or S
XGXAKVVMNPIKGYIVNNSSDFYLVNIPSLKTPA

SEQ ID NO: 40890 - protein, 32 aa, Artificial Sequence
  Cyclic GFR-binding peptide
  MOD_RES (30)..(31): Xaa is C or S
VAMGPIKGYYTVVGKDFYLINIPSLKTPVXXA

SEQ ID NO: 40891 - protein, 29 aa, Artificial Sequence
  Cyclic GFR-binding peptide
  MOD_RES (1)..(3): Xaa is C or S
XGXAEVVMDPIKGYVVNNAADFYLINIPS

SEQ ID NO: 40892 - protein, 24 aa, Artificial Sequence
  Cyclic GFR-binding peptide
VVMDPIKGYVVNNASDFYLINIPS

SEQ ID NO: 40893 - protein, 27 aa, Artificial Sequence
  Cyclic GFR-binding peptide
VVMDPIKGYVVNNASDFYLINIPSLRT

SEQ ID NO: 40894 - protein, 40 aa, Artificial Sequence
  Cyclic GFR-binding peptide
  MOD_RES (1)..(3)..(35)..(36): Xaa is C or S
XGXGEVVMDPIKGYVVKENEDFYLMNIPSLETPVXXAKPI

SEQ ID NO: 40895 - protein, 34 aa, Artificial Sequence
  Cyclic GFR-binding peptide
  MOD_RES (1)..(33)..(34): Xaa is C or S
XGEVVMEPIKGYVVKDYEDFYLMNIPSLETPVXX

SEQ ID NO: 40896 - protein, 21 aa, Artificial Sequence
  Cyclic GFR-binding peptide
NPIKGYIVNSSDDFYLVNIPS

SEQ ID NO: 40897 - protein, 33 aa, Artificial Sequence
  Cyclic GFR-binding peptide
  MOD_RES (27)..(28): Xaa is C or S
NPIKGYIVNSSDDFYLVNIPSLQTPAXXPKPVT

SEQ ID NO: 40898 - protein, 25 aa, Artificial Sequence
  Cyclic GFR-binding peptide
VIMPIKGYLLVRGNDFYLMNIPSTK

SEQ ID NO: 40899 - protein, 31 aa, Artificial Sequence
  Cyclic GFR-binding peptide
  MOD_RES (2)..(2): Xaa is C or S
GXARVVMNPIKGYIVNSSDDFYLVNIPSLQT

SEQ ID NO: 40900 - protein, 29 aa, Artificial Sequence
  Cyclic GFR-binding peptide
VSMGEPIKGYTPVGMDDFYLVNIPSLKTP

SEQ ID NO: 40901 - protein, 31 aa, Artificial Sequence
  Cyclic GFR-binding peptide
  MOD_RES (28)..(29): Xaa is C or S
MNPIKGYIVNSSDDFYLVNIPSLQTPAXXPK

SEQ ID NO: 40902 - protein, 28 aa, Artificial Sequence
  Cyclic GFR-binding peptide
AVSMGEPIKGYTPVGMDDFYLVNIPSLK

SEQ ID NO: 40903 - protein, 28 aa, Artificial Sequence
  Cyclic GFR-binding peptide
SMGEPIKGYTPVGMDDFYLVNIPSLKTP

SEQ ID NO: 40904 - protein, 28 aa, Artificial Sequence
  Cyclic GFR-binding peptide
  MOD_RES (1)..(1): Xaa is C or S
XSRVVMNPIKGYIVNSSDDFYLVNIPSL

SEQ ID NO: 40905 - protein, 35 aa, Artificial Sequence
  Cyclic GFR-binding peptide
  MOD_RES (29)..(30): Xaa is C or S
VMDPIKGYVVNNAADFYLINIPSLRAPVXXSAPAA

SEQ ID NO: 40906 - protein, 23 aa, Artificial Sequence
  Cyclic GFR-binding peptide
VMDPIKGYVVKENEDFYLMNIPS

SEQ ID NO: 40907 - protein, 37 aa, Artificial Sequence
  Cyclic GFR-binding peptide
  MOD_RES (2)..(4)..(36)..(37): Xaa is C or S
RXGXGEVVMEPIKGYVVKDYEDFYLMNIPSLETPVXX

SEQ ID NO: 40908 - protein, 37 aa, Artificial Sequence
  Cyclic GFR-binding peptide
  MOD_RES (2)..(4)..(36)..(37): Xaa is C or S
RXGXSEVVMDPIKGYVVNNASDFYLINIPSLRTPVXX

SEQ ID NO: 40909 - protein, 37 aa, Artificial Sequence
  Cyclic GFR-binding peptide
  MOD_RES (2)..(34)..(35): Xaa is C or S
GXESVAMGPIKGYYTVVGKDFYLINIPSLKTPVXXAK

SEQ ID NO: 40910 - protein, 34 aa, Artificial Sequence
  Cyclic GFR-binding peptide
  MOD_RES (2)..(4): Xaa is C or S
RXGXGEVVMDPIKGYVVKENEDFYLMNIPSLETP

SEQ ID NO: 40911 - protein, 35 aa, Artificial Sequence
  Cyclic GFR-binding peptide
  MOD_RES (2)..(4): Xaa is C or S
RXGXEAVSMGEPIKGYTPVGMDDFYLVNIPSLKTP

SEQ ID NO: 40912 - protein, 38 aa, Artificial Sequence
  Cyclic GFR-binding peptide
  MOD_RES (1)..(3)..(35)..(36): Xaa is C or S
XGXAKVVMNPIKGYIVNNSSDFYLVNIPSLKTPAXXAK

SEQ ID NO: 40913 - protein, 31 aa, Artificial Sequence
  Cyclic GFR-binding peptide
  MOD_RES (28)..(29): Xaa is C or S
GEPIKGYTPVGMDDFYLVNIPSLKTPVXXAK

SEQ ID NO: 40914 - protein, 36 aa, Artificial Sequence
  Cyclic GFR-binding peptide
  MOD_RES (32)..(33): Xaa is C or S
SRVVMNPIKGYIVNSSDDFYLVNIPSLKTPAXXPKP

SEQ ID NO: 40915 - protein, 28 aa, Artificial Sequence
  Cyclic GFR-binding peptide
  MOD_RES (26)..(27): Xaa is C or S
PIKGYVVNNAADFYLINIPSLRAPVXXS

SEQ ID NO: 40916 - protein, 35 aa, Artificial Sequence
  Cyclic GFR-binding peptide
  MOD_RES (30)..(31): Xaa is C or S
VVMNPIKGYIVNNSSDFYLVNIPSLKTPAXXAKPV

SEQ ID NO: 40917 - protein, 27 aa, Artificial Sequence
  Cyclic GFR-binding peptide
AVSMGEPIKGYTPVGMDDFYLVNIPSL

SEQ ID NO: 40918 - protein, 35 aa, Artificial Sequence
  Cyclic GFR-binding peptide
  MOD_RES (2)..(34)..(35): Xaa is C or S
GXSRVVMNPIKGYIVNSSDDFYLVNIPSLKTPAXX

SEQ ID NO: 40919 - protein, 25 aa, Artificial Sequence
  Cyclic GFR-binding peptide
PIKGYYTVVGKDFYLINIPSLKTPV

SEQ ID NO: 40920 - protein, 28 aa, Artificial Sequence
  Cyclic GFR-binding peptide
GEVVMDPIKGYVVKENEDFYLMNIPSLE

SEQ ID NO: 40921 - protein, 38 aa, Artificial Sequence
  Cyclic GFR-binding peptide
  MOD_RES (1)..(3)..(35)..(36): Xaa is C or S
XGXSEVVMDPIKGYVVNNASDFYLINIPSLRTPVXXTP

SEQ ID NO: 40922 - protein, 38 aa, Artificial Sequence
  Cyclic GFR-binding peptide
  MOD_RES (32)..(32): Xaa is C or S
SRVVMNPIKGYIVNSSDDFYLVNIPSLKTPAXTPKTVH

SEQ ID NO: 40923 - protein, 31 aa, Artificial Sequence
  Cyclic GFR-binding peptide
  MOD_RES (2)..(2): Xaa is C or S
GXSRVVMNPIKGYIVNSSDDFYLVNIPSLKT

SEQ ID NO: 40924 - protein, 29 aa, Artificial Sequence
  Cyclic GFR-binding peptide
  MOD_RES (26)..(27): Xaa is C or S
PIKGYVVNNAADFYLINIPSLRAPVXXSA

SEQ ID NO: 40925 - protein, 34 aa, Artificial Sequence
  Cyclic GFR-binding peptide
  MOD_RES (1)..(3): Xaa is C or S
XGXSRVVMNPIKGYIVNSSDDFYLVNIPSLKTPA

SEQ ID NO: 40926 - protein, 27 aa, Artificial Sequence
  Cyclic GFR-binding peptide
  MOD_RES (1)..(1): Xaa is C or S
XSRVVMNPIKGYIVNSSDDFYLVNIPS

SEQ ID NO: 40927 - protein, 25 aa, Artificial Sequence
  Cyclic GFR-binding peptide
MEPIKGYVVKDYEDFYLMNIPSLET

SEQ ID NO: 40928 - protein, 40 aa, Artificial Sequence
  Cyclic GFR-binding peptide
  MOD_RES (1)..(3)..(35)..(36): Xaa is C or S
XGXGEVVMEPIKGYVVKDYEDFYLMNIPSLETPVXXAKPI

SEQ ID NO: 40929 - protein, 34 aa, Artificial Sequence
  Cyclic GFR-binding peptide
  MOD_RES (30)..(31): Xaa is C or S
VVMEPIKGYVVKDYEDFYLMNIPSLETPVXXAKP

SEQ ID NO: 40930 - protein, 30 aa, Artificial Sequence
  Cyclic GFR-binding peptide
  MOD_RES (27)..(28): Xaa is C or S
EPIKGYVVKDYEDFYLMNIPSLETPVXXAK

SEQ ID NO: 40931 - protein, 32 aa, Artificial Sequence
  Cyclic GFR-binding peptide
  MOD_RES (30)..(31): Xaa is C or S
VVMEPIKGYVVKDYEDFYLMNIPSLETPVXXA

SEQ ID NO: 40932 - protein, 33 aa, Artificial Sequence
  Cyclic GFR-binding peptide
  MOD_RES (31)..(32): Xaa is C or S
VSMGEPIKGYTPVGMDDFYLVNIPSLKTPVXXA

SEQ ID NO: 40933 - protein, 36 aa, Artificial Sequence
  Cyclic GFR-binding peptide
  MOD_RES (30)..(31): Xaa is C or S
SMGEPIKGYTPVGMDDFYLVNIPSLKTPVXXAKGVK

SEQ ID NO: 40934 - protein, 20 aa, Artificial Sequence
  Cyclic GFR-binding peptide
PIKGYVVNNAADFYLINIPS

SEQ ID NO: 40935 - protein, 31 aa, Artificial Sequence
  Cyclic GFR-binding peptide
  MOD_RES (30)..(31): Xaa is C or S
VAMGPIKGYYTVVGKDFYLINIPSLKTPVXX

SEQ ID NO: 40936 - protein, 28 aa, Artificial Sequence
  Cyclic GFR-binding peptide
  MOD_RES (2)..(2): Xaa is C or S
GXSEVVMDPIKGYVVNNASDFYLINIPS

SEQ ID NO: 40937 - protein, 24 aa, Artificial Sequence
  Cyclic GFR-binding peptide
PIKGYYTVVGKDFYLINIPSLKTP

SEQ ID NO: 40938 - protein, 33 aa, Artificial Sequence
  Cyclic GFR-binding peptide
  MOD_RES (1)..(3): Xaa is C or S
XGXEEVIMPIKGYLLVRGNDFYLMNIPSTKVPA

SEQ ID NO: 40939 - protein, 27 aa, Artificial Sequence
  Cyclic GFR-binding peptide
  MOD_RES (27)..(27): Xaa is C or S
NPIKGYIVNSSDDFYLVNIPSLQTPAX

SEQ ID NO: 40940 - protein, 37 aa, Artificial Sequence
  Cyclic GFR-binding peptide
  MOD_RES (31)..(32): Xaa is C or S
EVVMEPIKGYVVKDYEDFYLMNIPSLETPVXXAKPIS

SEQ ID NO: 40941 - protein, 37 aa, Artificial Sequence
  Cyclic GFR-binding peptide
  MOD_RES (32)..(33): Xaa is C or S
SRVVMNPIKGYIVNSSDDFYLVNIPSLKTPAXXPKPV

SEQ ID NO: 40942 - protein, 33 aa, Artificial Sequence
  Cyclic GFR-binding peptide
  MOD_RES (30)..(31): Xaa is C or S
VVMEPIKGYVVKDYEDFYLMNIPSLETPVXXAK

SEQ ID NO: 40943 - protein, 25 aa, Artificial Sequence
  Cyclic GFR-binding peptide
IMPIKGYLLVRGNDFYLMNIPSTKV

SEQ ID NO: 40944 - protein, 25 aa, Artificial Sequence
  Cyclic GFR-binding peptide
PIKGYIVNNSSDFYLVNIPSLKTPA

SEQ ID NO: 40945 - protein, 36 aa, Artificial Sequence
  Cyclic GFR-binding peptide
  MOD_RES (1)..(3)..(35)..(36): Xaa is C or S
XGXARVVMNPIKGYIVNSSDDFYLVNIPSLQTPAXX

SEQ ID NO: 40946 - protein, 27 aa, Artificial Sequence
  Cyclic GFR-binding peptide
  MOD_RES (1)..(1): Xaa is C or S
XEEVIMPIKGYLLVRGNDFYLMNIPST

SEQ ID NO: 40947 - protein, 27 aa, Artificial Sequence
  Cyclic GFR-binding peptide
  MOD_RES (1)..(1): Xaa is C or S
XGEVVMDPIKGYVVKENEDFYLMNIPS

SEQ ID NO: 40948 - protein, 23 aa, Artificial Sequence
  Cyclic GFR-binding peptide
NPIKGYIVNSSDDFYLVNIPSLK

SEQ ID NO: 40949 - protein, 32 aa, Artificial Sequence
  Cyclic GFR-binding peptide
  MOD_RES (27)..(28): Xaa is C or S
DPIKGYVVKENEDFYLMNIPSLETPVXXAKPI

SEQ ID NO: 40950 - protein, 26 aa, Artificial Sequence
  Cyclic GFR-binding peptide
AKVVMNPIKGYIVNNSSDFYLVNIPS

SEQ ID NO: 40951 - protein, 34 aa, Artificial Sequence
  Cyclic GFR-binding peptide
  MOD_RES (2)..(4): Xaa is C or S
SXGXRDVVMGPIKGYIIQQKDNFYLMNIPSMKTP

SEQ ID NO: 40952 - protein, 21 aa, Artificial Sequence
  Cyclic GFR-binding peptide
NPIKGYIVNNSSDFYLVNIPS

SEQ ID NO: 40953 - protein, 31 aa, Artificial Sequence
  Cyclic GFR-binding peptide
  MOD_RES (29)..(29): Xaa is C or S
VMNPIKGYIVNSSDDFYLVNIPSLKTPAXTP

SEQ ID NO: 40954 - protein, 40 aa, Artificial Sequence
  Cyclic GFR-binding peptide
  MOD_RES (1)..(3)..(36)..(37): Xaa is C or S
XGXEAVSMGEPIKGYTPVGMDDFYLVNIPSLKTPVXXAKG

SEQ ID NO: 40955 - protein, 29 aa, Artificial Sequence
  Cyclic GFR-binding peptide
VVMEPIKGYVVKDYEDFYLMNIPSLETPV

SEQ ID NO: 40956 - protein, 37 aa, Artificial Sequence
  Cyclic GFR-binding peptide
  MOD_RES (31)..(32): Xaa is C or S
EVVMDPIKGYVVNNASDFYLINIPSLRTPVXXTPPTS

SEQ ID NO: 40957 - protein, 26 aa, Artificial Sequence
  Cyclic GFR-binding peptide
EVVMEPIKGYVVKDYEDFYLMNIPSL

SEQ ID NO: 40958 - protein, 22 aa, Artificial Sequence
  Cyclic GFR-binding peptide
IMPIKGYLLVRGNDFYLMNIPS

SEQ ID NO: 40959 - protein, 35 aa, Artificial Sequence
  Cyclic GFR-binding peptide
  MOD_RES (32)..(33): Xaa is C or S
AVSMGEPIKGYTPVGMDDFYLVNIPSLKTPVXXAK

SEQ ID NO: 40960 - protein, 36 aa, Artificial Sequence
  Cyclic GFR-binding peptide
  MOD_RES (1)..(33)..(34): Xaa is C or S
XAEVVMDPIKGYVVNNAADFYLINIPSLRAPVXXSA

SEQ ID NO: 40961 - protein, 26 aa, Artificial Sequence
  Cyclic GFR-binding peptide
MDPIKGYVVNNAADFYLINIPSLRAP

SEQ ID NO: 40962 - protein, 30 aa, Artificial Sequence
  Cyclic GFR-binding peptide
  MOD_RES (26)..(27): Xaa is C or S
PIKGYIVNSSDDFYLVNIPSLKTPAXXPKP

SEQ ID NO: 40963 - protein, 36 aa, Artificial Sequence
  Cyclic GFR-binding peptide
  MOD_RES (1)..(3)..(35): Xaa is C or S
XGXSRVVMNPIKGYIVNSSDDFYLVNIPSLKTPAXT

SEQ ID NO: 40964 - protein, 27 aa, Artificial Sequence
  Cyclic GFR-binding peptide
MGEPIKGYTPVGMDDFYLVNIPSLKTP

SEQ ID NO: 40965 - protein, 36 aa, Artificial Sequence
  Cyclic GFR-binding peptide
  MOD_RES (2)..(4)..(36): Xaa is C or S
RXGXSEVVMDPIKGYVVNNASDFYLINIPSLRTPVX

SEQ ID NO: 40966 - protein, 37 aa, Artificial Sequence
  Cyclic GFR-binding peptide
  MOD_RES (1)..(3)..(35): Xaa is C or S
XGXSRVVMNPIKGYIVNSSDDFYLVNIPSLKTPAXTP

SEQ ID NO: 40967 - protein, 37 aa, Artificial Sequence
  Cyclic GFR-binding peptide
  MOD_RES (1)..(33)..(34): Xaa is C or S
XAEVVMDPIKGYVVNNAADFYLINIPSLRAPVXXSAP

SEQ ID NO: 40968 - protein, 39 aa, Artificial Sequence
  Cyclic GFR-binding peptide
  MOD_RES (1)..(34)..(35): Xaa is C or S
XEAVSMGEPIKGYTPVGMDDFYLVNIPSLKTPVXXAKGV

SEQ ID NO: 40969 - protein, 27 aa, Artificial Sequence
  Cyclic GFR-binding peptide
VVMDPIKGYVVNNAADFYLINIPSLRA

SEQ ID NO: 40970 - protein, 31 aa, Artificial Sequence
  Cyclic GFR-binding peptide
  MOD_RES (26)..(27): Xaa is C or S
PIKGYIVNNSSDFYLVNIPSLKTPAXXAKPV

SEQ ID NO: 40971 - protein, 22 aa, Artificial Sequence
  Cyclic GFR-binding peptide
PIKGYYTVVGKDFYLINIPSLK

SEQ ID NO: 40972 - protein, 27 aa, Artificial Sequence
  Cyclic GFR-binding peptide
VVMNPIKGYIVNNSSDFYLVNIPSLKT

SEQ ID NO: 40973 - protein, 28 aa, Artificial Sequence
  Cyclic GFR-binding peptide
EVVMDPIKGYVVNNAADFYLINIPSLRA

SEQ ID NO: 40974 - protein, 26 aa, Artificial Sequence
  Cyclic GFR-binding peptide
  MOD_RES (26)..(26): Xaa is C or S
PIKGYLLVRGNDFYLMNIPSTKVPAX

SEQ ID NO: 40975 - protein, 33 aa, Artificial Sequence
  Cyclic GFR-binding peptide
  MOD_RES (1)..(3): Xaa is C or S
XGXGEVVMDPIKGYVVKENEDFYLMNIPSLETP

SEQ ID NO: 40976 - protein, 22 aa, Artificial Sequence
  Cyclic GFR-binding peptide
MPIKGYLLVRGNDFYLMNIPST

SEQ ID NO: 40977 - protein, 29 aa, Artificial Sequence
  Cyclic GFR-binding peptide
  MOD_RES (2)..(2): Xaa is C or S
GXSRVVMNPIKGYIVNSSDDFYLVNIPSL

SEQ ID NO: 40978 - protein, 32 aa, Artificial Sequence
  Cyclic GFR-binding peptide
  MOD_RES (1)..(3): Xaa is C or S
XGXEAVSMGEPIKGYTPVGMDDFYLVNIPSLK

SEQ ID NO: 40979 - protein, 38 aa, Artificial Sequence
  Cyclic GFR-binding peptide
  MOD_RES (2)..(4)..(36)..(37): Xaa is C or S
RXGXAEVVMDPIKGYVVNNAADFYLINIPSLRAPVXXS

SEQ ID NO: 40980 - protein, 35 aa, Artificial Sequence
  Cyclic GFR-binding peptide
  MOD_RES (30)..(31): Xaa is C or S
VVMDPIKGYVVNNAADFYLINIPSLRAPVXXSAPA

SEQ ID NO: 40981 - protein, 34 aa, Artificial Sequence
  Cyclic GFR-binding peptide
  MOD_RES (28)..(29): Xaa is C or S
MDPIKGYVVKENEDFYLMNIPSLETPVXXAKPIK

SEQ ID NO: 40982 - protein, 27 aa, Artificial Sequence
  Cyclic GFR-binding peptide
EAVSMGEPIKGYTPVGMDDFYLVNIPS

SEQ ID NO: 40983 - protein, 42 aa, Artificial Sequence
  Cyclic GFR-binding peptide
  MOD_RES (2)..(4)..(36)..(37): Xaa is C or S
SXGXRDVVMGPIKGYIIQQKDNFYLMNIPSMKTPTXXPGASG

SEQ ID NO: 40984 - protein, 32 aa, Artificial Sequence
  Cyclic GFR-binding peptide
  MOD_RES (26)..(27): Xaa is C or S
PIKGYLLVRGNDFYLMNIPSTKVPAXXTSPVR

SEQ ID NO: 40985 - protein, 32 aa, Artificial Sequence
  Cyclic GFR-binding peptide
  MOD_RES (32)..(32): Xaa is C or S
ESVAMGPIKGYYTVVGKDFYLINIPSLKTPVX

SEQ ID NO: 40986 - protein, 27 aa, Artificial Sequence
  Cyclic GFR-binding peptide
  MOD_RES (26)..(27): Xaa is C or S
PIKGYVVNNASDFYLINIPSLRTPVXX

SEQ ID NO: 40987 - protein, 29 aa, Artificial Sequence
  Cyclic GFR-binding peptide
  MOD_RES (2)..(2): Xaa is C or S
GXEEVIMPIKGYLLVRGNDFYLMNIPSTK

SEQ ID NO: 40988 - protein, 30 aa, Artificial Sequence
  Cyclic GFR-binding peptide
  MOD_RES (28)..(29): Xaa is C or S
MNPIKGYIVNNSSDFYLVNIPSLKTPAXXA

SEQ ID NO: 40989 - protein, 32 aa, Artificial Sequence
  Cyclic GFR-binding peptide
  MOD_RES (1)..(3): Xaa is C or S
XGXGEVVMDPIKGYVVKENEDFYLMNIPSLET

SEQ ID NO: 40990 - protein, 28 aa, Artificial Sequence
  Cyclic GFR-binding peptide
VVMNPIKGYIVNNSSDFYLVNIPSLKTP

SEQ ID NO: 40991 - protein, 38 aa, Artificial Sequence
  Cyclic GFR-binding peptide
  MOD_RES (33)..(34): Xaa is C or S
EAVSMGEPIKGYTPVGMDDFYLVNIPSLKTPVXXAKGV

SEQ ID NO: 40992 - protein, 34 aa, Artificial Sequence
  Cyclic GFR-binding peptide
  MOD_RES (29)..(30): Xaa is C or S
VMNPIKGYIVNSSDDFYLVNIPSLQTPAXXPKPV

SEQ ID NO: 40993 - protein, 23 aa, Artificial Sequence
  Cyclic GFR-binding peptide
PIKGYTPVGMDDFYLVNIPSLKT

SEQ ID NO: 40994 - protein, 26 aa, Artificial Sequence
  Cyclic GFR-binding peptide
EVVMDPIKGYVVKENEDFYLMNIPSL

SEQ ID NO: 40995 - protein, 30 aa, Artificial Sequence
  Cyclic GFR-binding peptide
  MOD_RES (30)..(30): Xaa is C or S
EVIMPIKGYLLVRGNDFYLMNIPSTKVPAX

SEQ ID NO: 40996 - protein, 28 aa, Artificial Sequence
  Cyclic GFR-binding peptide
EVVMEPIKGYVVKDYEDFYLMNIPSLET

SEQ ID NO: 40997 - protein, 30 aa, Artificial Sequence
  Cyclic GFR-binding peptide
  MOD_RES (2)..(4): Xaa is C or S
RXGXAEVVMDPIKGYVVNNAADFYLINIPS

SEQ ID NO: 40998 - protein, 32 aa, Artificial Sequence
  Cyclic GFR-binding peptide
  MOD_RES (31)..(31): Xaa is C or S
RVVMNPIKGYIVNSSDDFYLVNIPSLKTPAXT

SEQ ID NO: 40999 - protein, 31 aa, Artificial Sequence
  Cyclic GFR-binding peptide
  MOD_RES (29)..(30): Xaa is C or S
VMDPIKGYVVNNASDFYLINIPSLRTPVXXT

SEQ ID NO: 41000 - protein, 37 aa, Artificial Sequence
  Cyclic GFR-binding peptide
  MOD_RES (2)..(4)..(36)..(37): Xaa is C or S
RXGXGEVVMDPIKGYVVKENEDFYLMNIPSLETPVXX

SEQ ID NO: 41001 - protein, 32 aa, Artificial Sequence
  Cyclic GFR-binding peptide
  MOD_RES (28)..(29): Xaa is C or S
IMPIKGYLLVRGNDFYLMNIPSTKVPAXXTSP

SEQ ID NO: 41002 - protein, 30 aa, Artificial Sequence
  Cyclic GFR-binding peptide
  MOD_RES (2)..(4): Xaa is C or S
HXGXSRVVMNPIKGYIVNSSDDFYLVNIPS

SEQ ID NO: 41003 - protein, 37 aa, Artificial Sequence
  Cyclic GFR-binding peptide
  MOD_RES (1)..(3)..(35)..(36): Xaa is C or S
XGXSRVVMNPIKGYIVNSSDDFYLVNIPSLKTPAXXP

SEQ ID NO: 41004 - protein, 37 aa, Artificial Sequence
  Cyclic GFR-binding peptide
  MOD_RES (1)..(3)..(35)..(36): Xaa is C or S
XGXSEVVMDPIKGYVVNNASDFYLINIPSLRTPVXXT

SEQ ID NO: 41005 - protein, 41 aa, Artificial Sequence
  Cyclic GFR-binding peptide
  MOD_RES (2)..(4)..(36)..(37): Xaa is C or S
HXGXAKVVMNPIKGYIVNNSSDFYLVNIPSLKTPAXXAKPV

SEQ ID NO: 41006 - protein, 35 aa, Artificial Sequence
  Cyclic GFR-binding peptide
  MOD_RES (2)..(34): Xaa is C or S
GXSRVVMNPIKGYIVNSSDDFYLVNIPSLKTPAXT

SEQ ID NO: 41007 - protein, 27 aa, Artificial Sequence
  Cyclic GFR-binding peptide
  MOD_RES (26)..(27): Xaa is C or S
PIKGYLLVRGNDFYLMNIPSTKVPAXX

SEQ ID NO: 41008 - protein, 33 aa, Artificial Sequence
  Cyclic GFR-binding peptide
  MOD_RES (2)..(2): Xaa is C or S
GXEAVSMGEPIKGYTPVGMDDFYLVNIPSLKTP

SEQ ID NO: 41009 - protein, 24 aa, Artificial Sequence
  Cyclic GFR-binding peptide
VIMPIKGYLLVRGNDFYLMNIPST

SEQ ID NO: 41010 - protein, 26 aa, Artificial Sequence
  Cyclic GFR-binding peptide
DPIKGYVVKENEDFYLMNIPSLETPV

SEQ ID NO: 41011 - protein, 23 aa, Artificial Sequence
  Cyclic GFR-binding peptide
PIKGYIVNSSDDFYLVNIPSLQT

SEQ ID NO: 41012 - protein, 30 aa, Artificial Sequence
  Cyclic GFR-binding peptide
  MOD_RES (27)..(28): Xaa is C or S
DPIKGYVVKENEDFYLMNIPSLETPVXXAK

SEQ ID NO: 41013 - protein, 25 aa, Artificial Sequence
  Cyclic GFR-binding peptide
MNPIKGYIVNSSDDFYLVNIPSLKT

SEQ ID NO: 41014 - protein, 31 aa, Artificial Sequence
  Cyclic GFR-binding peptide
  MOD_RES (29)..(30): Xaa is C or S
VMDPIKGYVVNNAADFYLINIPSLRAPVXXS

SEQ ID NO: 41015 - protein, 34 aa, Artificial Sequence
  Cyclic GFR-binding peptide
  MOD_RES (2)..(34): Xaa is C or S
GXAEVVMDPIKGYVVNNAADFYLINIPSLRAPVX

SEQ ID NO: 41016 - protein, 35 aa, Artificial Sequence
  Cyclic GFR-binding peptide
  MOD_RES (31)..(32): Xaa is C or S
EVVMDPIKGYVVNNASDFYLINIPSLRTPVXXTPP

SEQ ID NO: 41017 - protein, 29 aa, Artificial Sequence
  Cyclic GFR-binding peptide
GEVVMDPIKGYVVKENEDFYLMNIPSLET

SEQ ID NO: 41018 - protein, 23 aa, Artificial Sequence
  Cyclic GFR-binding peptide
PIKGYVVNNASDFYLINIPSLRT

SEQ ID NO: 41019 - protein, 34 aa, Artificial Sequence
  Cyclic GFR-binding peptide
  MOD_RES (1)..(33)..(34): Xaa is C or S
XAKVVMNPIKGYIVNNSSDFYLVNIPSLKTPAXX

SEQ ID NO: 41020 - protein, 30 aa, Artificial Sequence
  Cyclic GFR-binding peptide
  MOD_RES (2)..(4): Xaa is C or S
RXGXESVAMGPIKGYYTVVGKDFYLINIPS

SEQ ID NO: 41021 - protein, 40 aa, Artificial Sequence
  Cyclic GFR-binding peptide
  MOD_RES (2)..(34)..(35): Xaa is C or S
GXSRVVMNPIKGYIVNSSDDFYLVNIPSLKTPAXXPKPVY

SEQ ID NO: 41022 - protein, 32 aa, Artificial Sequence
  Cyclic GFR-binding peptide
  MOD_RES (26)..(27): Xaa is C or S
PIKGYIVNSSDDFYLVNIPSLKTPAXXPKPVH

SEQ ID NO: 41023 - protein, 24 aa, Artificial Sequence
  Cyclic GFR-binding peptide
PIKGYLLVRGNDFYLMNIPSTKVP

SEQ ID NO: 41024 - protein, 39 aa, Artificial Sequence
  Cyclic GFR-binding peptide
  MOD_RES (2)..(34)..(35): Xaa is C or S
GXESVAMGPIKGYYTVVGKDFYLINIPSLKTPVXXAKSA

SEQ ID NO: 41025 - protein, 32 aa, Artificial Sequence
  Cyclic GFR-binding peptide
  MOD_RES (29)..(30): Xaa is C or S
MGEPIKGYTPVGMDDFYLVNIPSLKTPVXXAK

SEQ ID NO: 41026 - protein, 24 aa, Artificial Sequence
  Cyclic GFR-binding peptide
VMNPIKGYIVNNSSDFYLVNIPSL

SEQ ID NO: 41027 - protein, 30 aa, Artificial Sequence
  Cyclic GFR-binding peptide
  MOD_RES (27)..(28): Xaa is C or S
NPIKGYIVNSSDDFYLVNIPSLQTPAXXPK

SEQ ID NO: 41028 - protein, 31 aa, Artificial Sequence
  Cyclic GFR-binding peptide
  MOD_RES (2)..(2): Xaa is C or S
GXEEVIMPIKGYLLVRGNDFYLMNIPSTKVP

SEQ ID NO: 41029 - protein, 32 aa, Artificial Sequence
  Cyclic GFR-binding peptide
  MOD_RES (1)..(1): Xaa is C or S
XAEVVMDPIKGYVVNNAADFYLINIPSLRAPV

SEQ ID NO: 41030 - protein, 38 aa, Artificial Sequence
  Cyclic GFR-binding peptide
  MOD_RES (2)..(34)..(35): Xaa is C or S
GXAKVVMNPIKGYIVNNSSDFYLVNIPSLKTPAXXAKP

SEQ ID NO: 41031 - protein, 35 aa, Artificial Sequence
  Cyclic GFR-binding peptide
  MOD_RES (31)..(32): Xaa is C or S
KVVMNPIKGYIVNNSSDFYLVNIPSLKTPAXXAKP

SEQ ID NO: 41032 - protein, 34 aa, Artificial Sequence
  Cyclic GFR-binding peptide
  MOD_RES (31)..(32): Xaa is C or S
RVVMNPIKGYIVNSSDDFYLVNIPSLKTPAXXPK

SEQ ID NO: 41033 - protein, 32 aa, Artificial Sequence
  Cyclic GFR-binding peptide
  MOD_RES (2)..(2): Xaa is C or S
GXGEVVMDPIKGYVVKENEDFYLMNIPSLETP

SEQ ID NO: 41034 - protein, 28 aa, Artificial Sequence
  Cyclic GFR-binding peptide
  MOD_RES (26)..(26): Xaa is C or S
PIKGYIVNSSDDFYLVNIPSLKTPAXTP

SEQ ID NO: 41035 - protein, 41 aa, Artificial Sequence
  Cyclic GFR-binding peptide
  MOD_RES (1)..(3)..(35)..(36): Xaa is C or S
XGXGEVVMDPIKGYVVKENEDFYLMNIPSLETPVXXAKPIK

SEQ ID NO: 41036 - protein, 35 aa, Artificial Sequence
  Cyclic GFR-binding peptide
  MOD_RES (31)..(32): Xaa is C or S
SVAMGPIKGYYTVVGKDFYLINIPSLKTPVXXAKS

SEQ ID NO: 41037 - protein, 27 aa, Artificial Sequence
  Cyclic GFR-binding peptide
ESVAMGPIKGYYTVVGKDFYLINIPSL

SEQ ID NO: 41038 - protein, 29 aa, Artificial Sequence
  Cyclic GFR-binding peptide
AVSMGEPIKGYTPVGMDDFYLVNIPSLKT

SEQ ID NO: 41039 - protein, 39 aa, Artificial Sequence
  Cyclic GFR-binding peptide
  MOD_RES (1)..(3)..(35)..(36): Xaa is C or S
XGXAEVVMDPIKGYVVNNAADFYLINIPSLRAPVXXSAP

SEQ ID NO: 41040 - protein, 38 aa, Artificial Sequence
  Cyclic GFR-binding peptide
  MOD_RES (2)..(34)..(35): Xaa is C or S
GXAEVVMDPIKGYVVNNAADFYLINIPSLRAPVXXSAP

SEQ ID NO: 41041 - protein, 30 aa, Artificial Sequence
  Cyclic GFR-binding peptide
VSMGEPIKGYTPVGMDDFYLVNIPSLKTPV

SEQ ID NO: 41042 - protein, 26 aa, Artificial Sequence
  Cyclic GFR-binding peptide
VMNPIKGYIVNSSDDFYLVNIPSLKT

SEQ ID NO: 41043 - protein, 27 aa, Artificial Sequence
  Cyclic GFR-binding peptide
MEPIKGYVVKDYEDFYLMNIPSLETPV

SEQ ID NO: 41044 - protein, 32 aa, Artificial Sequence
  Cyclic GFR-binding peptide
  MOD_RES (32)..(32): Xaa is C or S
AKVVMNPIKGYIVNNSSDFYLVNIPSLKTPAX

SEQ ID NO: 41045 - protein, 38 aa, Artificial Sequence
  Cyclic GFR-binding peptide
  MOD_RES (32)..(33): Xaa is C or S
AKVVMNPIKGYIVNNSSDFYLVNIPSLKTPAXXAKPVA

SEQ ID NO: 41046 - protein, 34 aa, Artificial Sequence
  Cyclic GFR-binding peptide
  MOD_RES (2)..(2): Xaa is C or S
GXEAVSMGEPIKGYTPVGMDDFYLVNIPSLKTPV

SEQ ID NO: 41047 - protein, 36 aa, Artificial Sequence
  Cyclic GFR-binding peptide
  MOD_RES (30)..(31): Xaa is C or S
VVMNPIKGYIVNSSDDFYLVNIPSLQTPAXXPKPVT

SEQ ID NO: 41048 - protein, 28 aa, Artificial Sequence
  Cyclic GFR-binding peptide
  MOD_RES (26)..(27): Xaa is C or S
PIKGYIVNSSDDFYLVNIPSLKTPAXXP

SEQ ID NO: 41049 - protein, 40 aa, Artificial Sequence
  Cyclic GFR-binding peptide
  MOD_RES (1)..(3)..(35): Xaa is C or S
XGXSRVVMNPIKGYIVNSSDDFYLVNIPSLKTPAXTPKTV

SEQ ID NO: 41050 - protein, 30 aa, Artificial Sequence
  Cyclic GFR-binding peptide
  MOD_RES (2)..(4): Xaa is C or S
RXGXSEVVMDPIKGYVVNNASDFYLINIPS

SEQ ID NO: 41051 - protein, 29 aa, Artificial Sequence
  Cyclic GFR-binding peptide
  MOD_RES (28)..(29): Xaa is C or S
MGPIKGYYTVVGKDFYLINIPSLKTPVXX

SEQ ID NO: 41052 - protein, 37 aa, Artificial Sequence
  Cyclic GFR-binding peptide
  MOD_RES (32)..(33): Xaa is C or S
ARVVMNPIKGYIVNSSDDFYLVNIPSLQTPAXXPKPV

SEQ ID NO: 41053 - protein, 27 aa, Artificial Sequence
  Cyclic GFR-binding peptide
EVVMEPIKGYVVKDYEDFYLMNIPSLE

SEQ ID NO: 41054 - protein, 37 aa, Artificial Sequence
  Cyclic GFR-binding peptide
  MOD_RES (31)..(32): Xaa is C or S
KVVMNPIKGYIVNNSSDFYLVNIPSLKTPAXXAKPVA

SEQ ID NO: 41055 - protein, 26 aa, Artificial Sequence
  Cyclic GFR-binding peptide
VVMEPIKGYVVKDYEDFYLMNIPSLE

SEQ ID NO: 41056 - protein, 35 aa, Artificial Sequence
  Cyclic GFR-binding peptide
  MOD_RES (32)..(33): Xaa is C or S
GEVVMEPIKGYVVKDYEDFYLMNIPSLETPVXXAK

SEQ ID NO: 41057 - protein, 33 aa, Artificial Sequence
  Cyclic GFR-binding peptide
  MOD_RES (28)..(29): Xaa is C or S
IMPIKGYLLVRGNDFYLMNIPSTKVPAXXTSPV

SEQ ID NO: 41058 - protein, 36 aa, Artificial Sequence
  Cyclic GFR-binding peptide
  MOD_RES (31)..(32): Xaa is C or S
RVVMNPIKGYIVNSSDDFYLVNIPSLQTPAXXPKPV

SEQ ID NO: 41059 - protein, 26 aa, Artificial Sequence
  Cyclic GFR-binding peptide
VMDPIKGYVVNNAADFYLINIPSLRA

SEQ ID NO: 41060 - protein, 31 aa, Artificial Sequence
  Cyclic GFR-binding peptide
  MOD_RES (1)..(1): Xaa is C or S
XGEVVMDPIKGYVVKENEDFYLMNIPSLETP

SEQ ID NO: 41061 - protein, 31 aa, Artificial Sequence
  Cyclic GFR-binding peptide
  MOD_RES (28)..(28): Xaa is C or S
MNPIKGYIVNSSDDFYLVNIPSLKTPAXTPK

SEQ ID NO: 41062 - protein, 42 aa, Artificial Sequence
  Cyclic GFR-binding peptide
  MOD_RES (2)..(4)..(36): Xaa is C or S
HXGXSRVVMNPIKGYIVNSSDDFYLVNIPSLKTPAXTPKTVH

SEQ ID NO: 41063 - protein, 33 aa, Artificial Sequence
  Cyclic GFR-binding peptide
  MOD_RES (1)..(32)..(33): Xaa is C or S
XEEVIMPIKGYLLVRGNDFYLMNIPSTKVPAXX

SEQ ID NO: 41064 - protein, 23 aa, Artificial Sequence
  Cyclic GFR-binding peptide
DPIKGYVVNNAADFYLINIPSLR

SEQ ID NO: 41065 - protein, 33 aa, Artificial Sequence
  Cyclic GFR-binding peptide
  MOD_RES (30)..(31): Xaa is C or S
VVMNPIKGYIVNNSSDFYLVNIPSLKTPAXXAK

SEQ ID NO: 41066 - protein, 33 aa, Artificial Sequence
  Cyclic GFR-binding peptide
  MOD_RES (1)..(3): Xaa is C or S
XGXGEVVMEPIKGYVVKDYEDFYLMNIPSLETP

SEQ ID NO: 41067 - protein, 32 aa, Artificial Sequence
  Cyclic GFR-binding peptide
  MOD_RES (27)..(28): Xaa is C or S
DPIKGYVVNNAADFYLINIPSLRAPVXXSAPA

SEQ ID NO: 41068 - protein, 30 aa, Artificial Sequence
  Cyclic GFR-binding peptide
  MOD_RES (1)..(1): Xaa is C or S
XSEVVMDPIKGYVVNNASDFYLINIPSLRT

SEQ ID NO: 41069 - protein, 41 aa, Artificial Sequence
  Cyclic GFR-binding peptide
  MOD_RES (2)..(4)..(37)..(38): Xaa is C or S
RXGXEAVSMGEPIKGYTPVGMDDFYLVNIPSLKTPVXXAKG

SEQ ID NO: 41070 - protein, 36 aa, Artificial Sequence
  Cyclic GFR-binding peptide
  MOD_RES (30)..(31): Xaa is C or S
VVMNPIKGYIVNSSDDFYLVNIPSLKTPAXXPKPVY

SEQ ID NO: 41071 - protein, 24 aa, Artificial Sequence
  Cyclic GFR-binding peptide
MDPIKGYVVNNASDFYLINIPSLR

SEQ ID NO: 41072 - protein, 32 aa, Artificial Sequence
  Cyclic GFR-binding peptide
  MOD_RES (1)..(1): Xaa is C or S
XARVVMNPIKGYIVNSSDDFYLVNIPSLQTPA

SEQ ID NO: 41073 - protein, 33 aa, Artificial Sequence
  Cyclic GFR-binding peptide
  MOD_RES (30)..(31): Xaa is C or S
VAMGPIKGYYTVVGKDFYLINIPSLKTPVXXAK

SEQ ID NO: 41074 - protein, 25 aa, Artificial Sequence
  Cyclic GFR-binding peptide
EVIMPIKGYLLVRGNDFYLMNIPST

SEQ ID NO: 41075 - protein, 32 aa, Artificial Sequence
  Cyclic GFR-binding peptide
  MOD_RES (1)..(3): Xaa is C or S
XGXGEVVMEPIKGYVVKDYEDFYLMNIPSLET

SEQ ID NO: 41076 - protein, 41 aa, Artificial Sequence
  Cyclic GFR-binding peptide
  MOD_RES (2)..(4)..(36)..(37): Xaa is C or S
RXGXGEVVMDPIKGYVVKENEDFYLMNIPSLETPVXXAKPI

SEQ ID NO: 41077 - protein, 30 aa, Artificial Sequence
  Cyclic GFR-binding peptide
  MOD_RES (1)..(3): Xaa is C or S
XGXGEVVMEPIKGYVVKDYEDFYLMNIPSL

SEQ ID NO: 41078 - protein, 30 aa, Artificial Sequence
  Cyclic GFR-binding peptide
  MOD_RES (2)..(4): Xaa is C or S
LXGXEEVIMPIKGYLLVRGNDFYLMNIPST

SEQ ID NO: 41079 - protein, 29 aa, Artificial Sequence
  Cyclic GFR-binding peptide
  MOD_RES (29)..(29): Xaa is C or S
VMNPIKGYIVNSSDDFYLVNIPSLQTPAX

SEQ ID NO: 41080 - protein, 39 aa, Artificial Sequence
  Cyclic GFR-binding peptide
  MOD_RES (2)..(4)..(35)..(36): Xaa is C or S
LXGXEEVIMPIKGYLLVRGNDFYLMNIPSTKVPAXXTSP

SEQ ID NO: 41081 - protein, 31 aa, Artificial Sequence
  Cyclic GFR-binding peptide
  MOD_RES (1)..(1): Xaa is C or S
XARVVMNPIKGYIVNSSDDFYLVNIPSLQTP

SEQ ID NO: 41082 - protein, 38 aa, Artificial Sequence
  Cyclic GFR-binding peptide
  MOD_RES (1)..(33)..(34): Xaa is C or S
XARVVMNPIKGYIVNSSDDFYLVNIPSLQTPAXXPKPV

SEQ ID NO: 41083 - protein, 26 aa, Artificial Sequence
  Cyclic GFR-binding peptide
  MOD_RES (1)..(1): Xaa is C or S
XEEVIMPIKGYLLVRGNDFYLMNIPS

SEQ ID NO: 41084 - protein, 31 aa, Artificial Sequence
  Cyclic GFR-binding peptide
  MOD_RES (28)..(29): Xaa is C or S
MEPIKGYVVKDYEDFYLMNIPSLETPVXXAK

SEQ ID NO: 41085 - protein, 35 aa, Artificial Sequence
  Cyclic GFR-binding peptide
  MOD_RES (31)..(32): Xaa is C or S
EEVIMPIKGYLLVRGNDFYLMNIPSTKVPAXXTSP

SEQ ID NO: 41086 - protein, 27 aa, Artificial Sequence
  Cyclic GFR-binding peptide
VVMDPIKGYVVKENEDFYLMNIPSLET

SEQ ID NO: 41087 - protein, 30 aa, Artificial Sequence
  Cyclic GFR-binding peptide
  MOD_RES (1)..(1): Xaa is C or S
XESVAMGPIKGYYTVVGKDFYLINIPSLKT

SEQ ID NO: 41088 - protein, 35 aa, Artificial Sequence
  Cyclic GFR-binding peptide
  MOD_RES (1)..(33)..(34): Xaa is C or S
XAEVVMDPIKGYVVNNAADFYLINIPSLRAPVXXS

SEQ ID NO: 41089 - protein, 29 aa, Artificial Sequence
  Cyclic GFR-binding peptide
EEVIMPIKGYLLVRGNDFYLMNIPSTKVP

SEQ ID NO: 41090 - protein, 29 aa, Artificial Sequence
  Cyclic GFR-binding peptide
  MOD_RES (29)..(29): Xaa is C or S
MGEPIKGYTPVGMDDFYLVNIPSLKTPVX

SEQ ID NO: 41091 - protein, 27 aa, Artificial Sequence
  Cyclic GFR-binding peptide
  MOD_RES (26)..(27): Xaa is C or S
PIKGYTPVGMDDFYLVNIPSLKTPVXX

SEQ ID NO: 41092 - protein, 31 aa, Artificial Sequence
  Cyclic GFR-binding peptide
  MOD_RES (1)..(1): Xaa is C or S
XGEVVMEPIKGYVVKDYEDFYLMNIPSLETP

SEQ ID NO: 41093 - protein, 27 aa, Artificial Sequence
  Cyclic GFR-binding peptide
  MOD_RES (26)..(27): Xaa is C or S
PIKGYIVNSSDDFYLVNIPSLKTPAXX

SEQ ID NO: 41094 - protein, 35 aa, Artificial Sequence
  Cyclic GFR-binding peptide
  MOD_RES (1)..(33)..(34): Xaa is C or S
XESVAMGPIKGYYTVVGKDFYLINIPSLKTPVXXA

SEQ ID NO: 41095 - protein, 28 aa, Artificial Sequence
  Cyclic GFR-binding peptide
  MOD_RES (2)..(2): Xaa is C or S
GXESVAMGPIKGYYTVVGKDFYLINIPS

SEQ ID NO: 41096 - protein, 25 aa, Artificial Sequence
  Cyclic GFR-binding peptide
MDPIKGYVVKENEDFYLMNIPSLET

SEQ ID NO: 41097 - protein, 32 aa, Artificial Sequence
  Cyclic GFR-binding peptide
  MOD_RES (1)..(1): Xaa is C or S
XEAVSMGEPIKGYTPVGMDDFYLVNIPSLKTP

SEQ ID NO: 41098 - protein, 37 aa, Artificial Sequence
  Cyclic GFR-binding peptide
  MOD_RES (1)..(33)..(34): Xaa is C or S
XARVVMNPIKGYIVNSSDDFYLVNIPSLQTPAXXPKP

SEQ ID NO: 41099 - protein, 34 aa, Artificial Sequence
  Cyclic GFR-binding peptide
  MOD_RES (33)..(34): Xaa is C or S
EAVSMGEPIKGYTPVGMDDFYLVNIPSLKTPVXX

SEQ ID NO: 41100 - protein, 22 aa, Artificial Sequence
  Cyclic GFR-binding peptide
PIKGYIVNSSDDFYLVNIPSLK

SEQ ID NO: 41101 - protein, 30 aa, Artificial Sequence
  Cyclic GFR-binding peptide
  MOD_RES (29)..(30): Xaa is C or S
VMEPIKGYVVKDYEDFYLMNIPSLETPVXX

SEQ ID NO: 41102 - protein, 35 aa, Artificial Sequence
  Cyclic GFR-binding peptide
  MOD_RES (1)..(33)..(34): Xaa is C or S
XARVVMNPIKGYIVNSSDDFYLVNIPSLQTPAXXP

SEQ ID NO: 41103 - protein, 40 aa, Artificial Sequence
  Cyclic GFR-binding peptide
  MOD_RES (2)..(4)..(36)..(37): Xaa is C or S
RXGXAEVVMDPIKGYVVNNAADFYLINIPSLRAPVXXSAP

SEQ ID NO: 41104 - protein, 36 aa, Artificial Sequence
  Cyclic GFR-binding peptide
  MOD_RES (1)..(3)..(35)..(36): Xaa is C or S
XGXAEVVMDPIKGYVVNNAADFYLINIPSLRAPVXX

SEQ ID NO: 41105 - protein, 31 aa, Artificial Sequence
  Cyclic GFR-binding peptide
  MOD_RES (2)..(4): Xaa is C or S
SXGXRDVVMGPIKGYIIQQKDNFYLMNIPSM

SEQ ID NO: 41106 - protein, 40 aa, Artificial Sequence
  Cyclic GFR-binding peptide
  MOD_RES (2)..(4)..(36)..(37): Xaa is C or S
HXGXAKVVMNPIKGYIVNNSSDFYLVNIPSLKTPAXXAKP

SEQ ID NO: 41107 - protein, 29 aa, Artificial Sequence
  Cyclic GFR-binding peptide
  MOD_RES (27)..(28): Xaa is C or S
NPIKGYIVNSSDDFYLVNIPSLKTPAXXP

SEQ ID NO: 41108 - protein, 32 aa, Artificial Sequence
  Cyclic GFR-binding peptide
  MOD_RES (29)..(30): Xaa is C or S
VMDPIKGYVVNNAADFYLINIPSLRAPVXXSA

SEQ ID NO: 41109 - protein, 37 aa, Artificial Sequence
  Cyclic GFR-binding peptide
  MOD_RES (1)..(33): Xaa is C or S
XSRVVMNPIKGYIVNSSDDFYLVNIPSLKTPAXTPKT

SEQ ID NO: 41110 - protein, 41 aa, Artificial Sequence
  Cyclic GFR-binding peptide
  MOD_RES (2)..(4)..(36)..(37): Xaa is C or S
RXGXAEVVMDPIKGYVVNNAADFYLINIPSLRAPVXXSAPA

SEQ ID NO: 41111 - protein, 33 aa, Artificial Sequence
  Cyclic GFR-binding peptide
  MOD_RES (27)..(28): Xaa is C or S
EPIKGYVVKDYEDFYLMNIPSLETPVXXAKPIS

SEQ ID NO: 41112 - protein, 30 aa, Artificial Sequence
  Cyclic GFR-binding peptide
  MOD_RES (1)..(1): Xaa is C or S
XAKVVMNPIKGYIVNNSSDFYLVNIPSLKT

SEQ ID NO: 41113 - protein, 24 aa, Artificial Sequence
  Cyclic GFR-binding peptide
PIKGYVVNNAADFYLINIPSLRAP

SEQ ID NO: 41114 - protein, 26 aa, Artificial Sequence
  Cyclic GFR-binding peptide
EEVIMPIKGYLLVRGNDFYLMNIPST

SEQ ID NO: 41115 - protein, 22 aa, Artificial Sequence
  Cyclic GFR-binding peptide
PIKGYVVNNAADFYLINIPSLR

SEQ ID NO: 41116 - protein, 36 aa, Artificial Sequence
  Cyclic GFR-binding peptide
  MOD_RES (30)..(31): Xaa is C or S
VVMNPIKGYIVNNSSDFYLVNIPSLKTPAXXAKPVA

SEQ ID NO: 41117 - protein, 36 aa, Artificial Sequence
  Cyclic GFR-binding peptide
  MOD_RES (2)..(34)..(35): Xaa is C or S
GXGEVVMEPIKGYVVKDYEDFYLMNIPSLETPVXXA

SEQ ID NO: 41118 - protein, 32 aa, Artificial Sequence
  Cyclic GFR-binding peptide
  MOD_RES (31)..(32): Xaa is C or S
VSMGEPIKGYTPVGMDDFYLVNIPSLKTPVXX

SEQ ID NO: 41119 - protein, 27 aa, Artificial Sequence
  Cyclic GFR-binding peptide
  MOD_RES (27)..(27): Xaa is C or S
EPIKGYTPVGMDDFYLVNIPSLKTPVX

SEQ ID NO: 41120 - protein, 29 aa, Artificial Sequence
  Cyclic GFR-binding peptide
  MOD_RES (29)..(29): Xaa is C or S
VMEPIKGYVVKDYEDFYLMNIPSLETPVX

SEQ ID NO: 41121 - protein, 26 aa, Artificial Sequence
  Cyclic GFR-binding peptide
VVMNPIKGYIVNNSSDFYLVNIPSLK

SEQ ID NO: 41122 - protein, 27 aa, Artificial Sequence
  Cyclic GFR-binding peptide
GEVVMEPIKGYVVKDYEDFYLMNIPSL

SEQ ID NO: 41123 - protein, 29 aa, Artificial Sequence
  Cyclic GFR-binding peptide
ARVVMNPIKGYIVNSSDDFYLVNIPSLQT

SEQ ID NO: 41124 - protein, 24 aa, Artificial Sequence
  Cyclic GFR-binding peptide
PIKGYIVNNSSDFYLVNIPSLKTP

SEQ ID NO: 41125 - protein, 28 aa, Artificial Sequence
  Cyclic GFR-binding peptide
KVVMNPIKGYIVNNSSDFYLVNIPSLKT

SEQ ID NO: 41126 - protein, 32 aa, Artificial Sequence
  Cyclic GFR-binding peptide
EAVSMGEPIKGYTPVGMDDFYLVNIPSLKTPV

SEQ ID NO: 41127 - protein, 29 aa, Artificial Sequence
  Cyclic GFR-binding peptide
EVVMDPIKGYVVNNAADFYLINIPSLRAP

SEQ ID NO: 41128 - protein, 29 aa, Artificial Sequence
  Cyclic GFR-binding peptide
  MOD_RES (1)..(3): Xaa is C or S
XGXGEVVMDPIKGYVVKENEDFYLMNIPS

SEQ ID NO: 41129 - protein, 31 aa, Artificial Sequence
  Cyclic GFR-binding peptide
  MOD_RES (27)..(28): Xaa is C or S
NPIKGYIVNNSSDFYLVNIPSLKTPAXXAKP

SEQ ID NO: 41130 - protein, 27 aa, Artificial Sequence
  Cyclic GFR-binding peptide
IMPIKGYLLVRGNDFYLMNIPSTKVPA

SEQ ID NO: 41131 - protein, 35 aa, Artificial Sequence
  Cyclic GFR-binding peptide
  MOD_RES (2)..(34)..(35): Xaa is C or S
GXESVAMGPIKGYYTVVGKDFYLINIPSLKTPVXX

SEQ ID NO: 41132 - protein, 36 aa, Artificial Sequence
  Cyclic GFR-binding peptide
  MOD_RES (31)..(32): Xaa is C or S
EVVMDPIKGYVVKENEDFYLMNIPSLETPVXXAKPI

SEQ ID NO: 41133 - protein, 40 aa, Artificial Sequence
  Cyclic GFR-binding peptide
  MOD_RES (2)..(34): Xaa is C or S
GXSRVVMNPIKGYIVNSSDDFYLVNIPSLKTPAXTPKTVH

SEQ ID NO: 41134 - protein, 39 aa, Artificial Sequence
  Cyclic GFR-binding peptide
  MOD_RES (2)..(4)..(36)..(37): Xaa is C or S
RXGXGEVVMDPIKGYVVKENEDFYLMNIPSLETPVXXAK

SEQ ID NO: 41135 - protein, 36 aa, Artificial Sequence
  Cyclic GFR-binding peptide
  MOD_RES (31)..(32): Xaa is C or S
RVVMNPIKGYIVNSSDDFYLVNIPSLKTPAXXPKPV

SEQ ID NO: 41136 - protein, 35 aa, Artificial Sequence
  Cyclic GFR-binding peptide
  MOD_RES (1)..(3): Xaa is C or S
XGXEAVSMGEPIKGYTPVGMDDFYLVNIPSLKTPV

SEQ ID NO: 41137 - protein, 37 aa, Artificial Sequence
  Cyclic GFR-binding peptide
  MOD_RES (1)..(3)..(34)..(35): Xaa is C or S
XGXEEVIMPIKGYLLVRGNDFYLMNIPSTKVPAXXTS

SEQ ID NO: 41138 - protein, 30 aa, Artificial Sequence
  Cyclic GFR-binding peptide
  MOD_RES (29)..(30): Xaa is C or S
AMGPIKGYYTVVGKDFYLINIPSLKTPVXX

SEQ ID NO: 41139 - protein, 33 aa, Artificial Sequence
  Cyclic GFR-binding peptide
  MOD_RES (28)..(29): Xaa is C or S
MDPIKGYVVKENEDFYLMNIPSLETPVXXAKPI

SEQ ID NO: 41140 - protein, 23 aa, Artificial Sequence
  Cyclic GFR-binding peptide
NPIKGYIVNNSSDFYLVNIPSLK

SEQ ID NO: 41141 - protein, 41 aa, Artificial Sequence
  Cyclic GFR-binding peptide
  MOD_RES (1)..(3)..(35)..(36): Xaa is C or S
XGXSEVVMDPIKGYVVNNASDFYLINIPSLRTPVXXTPPTS

SEQ ID NO: 41142 - protein, 27 aa, Artificial Sequence
  Cyclic GFR-binding peptide
MNPIKGYIVNSSDDFYLVNIPSLKTPA

SEQ ID NO: 41143 - protein, 39 aa, Artificial Sequence
  Cyclic GFR-binding peptide
  MOD_RES (2)..(34)..(35): Xaa is C or S
GXSEVVMDPIKGYVVNNASDFYLINIPSLRTPVXXTPPT

SEQ ID NO: 41144 - protein, 26 aa, Artificial Sequence
  Cyclic GFR-binding peptide
GEPIKGYTPVGMDDFYLVNIPSLKTP

SEQ ID NO: 41145 - protein, 25 aa, Artificial Sequence
  Cyclic GFR-binding peptide
MNPIKGYIVNSSDDFYLVNIPSLQT

SEQ ID NO: 41146 - protein, 36 aa, Artificial Sequence
  Cyclic GFR-binding peptide
  MOD_RES (31)..(32): Xaa is C or S
EEVIMPIKGYLLVRGNDFYLMNIPSTKVPAXXTSPV

SEQ ID NO: 41147 - protein, 37 aa, Artificial Sequence
  Cyclic GFR-binding peptide
  MOD_RES (1)..(3)..(35)..(36): Xaa is C or S
XGXAKVVMNPIKGYIVNNSSDFYLVNIPSLKTPAXXA

SEQ ID NO: 41148 - protein, 28 aa, Artificial Sequence
  Cyclic GFR-binding peptide
  MOD_RES (27)..(28): Xaa is C or S
EPIKGYTPVGMDDFYLVNIPSLKTPVXX

SEQ ID NO: 41149 - protein, 30 aa, Artificial Sequence
  Cyclic GFR-binding peptide
  MOD_RES (1)..(3): Xaa is C or S
XGXGEVVMDPIKGYVVKENEDFYLMNIPSL

SEQ ID NO: 41150 - protein, 26 aa, Artificial Sequence
  Cyclic GFR-binding peptide
VIMPIKGYLLVRGNDFYLMNIPSTKV

SEQ ID NO: 41151 - protein, 29 aa, Artificial Sequence
  Cyclic GFR-binding peptide
  MOD_RES (26)..(27): Xaa is C or S
PIKGYVVNNASDFYLINIPSLRTPVXXTP

SEQ ID NO: 41152 - protein, 35 aa, Artificial Sequence
  Cyclic GFR-binding peptide
  MOD_RES (30)..(31): Xaa is C or S
VVMDPIKGYVVKENEDFYLMNIPSLETPVXXAKPI

SEQ ID NO: 41153 - protein, 23 aa, Artificial Sequence
  Cyclic GFR-binding peptide
AMGPIKGYYTVVGKDFYLINIPS

SEQ ID NO: 41154 - protein, 32 aa, Artificial Sequence
  Cyclic GFR-binding peptide
  MOD_RES (26)..(27): Xaa is C or S
PIKGYVVKDYEDFYLMNIPSLETPVXXAKPIS

SEQ ID NO: 41155 - protein, 27 aa, Artificial Sequence
  Cyclic GFR-binding peptide
  MOD_RES (26)..(27): Xaa is C or S
PIKGYVVKDYEDFYLMNIPSLETPVXX

SEQ ID NO: 41156 - protein, 41 aa, Artificial Sequence
  Cyclic GFR-binding peptide
  MOD_RES (2)..(4)..(36): Xaa is C or S
HXGXSRVVMNPIKGYIVNSSDDFYLVNIPSLKTPAXTPKTV

SEQ ID NO: 41157 - protein, 33 aa, Artificial Sequence
  Cyclic GFR-binding peptide
  MOD_RES (2)..(4): Xaa is C or S
HXGXARVVMNPIKGYIVNSSDDFYLVNIPSLQT

SEQ ID NO: 41158 - protein, 24 aa, Artificial Sequence
  Cyclic GFR-binding peptide
PIKGYVVNNASDFYLINIPSLRTP

SEQ ID NO: 41159 - protein, 22 aa, Artificial Sequence
  Cyclic GFR-binding peptide
MGPIKGYYTVVGKDFYLINIPS

SEQ ID NO: 41160 - protein, 23 aa, Artificial Sequence
  Cyclic GFR-binding peptide
MGEPIKGYTPVGMDDFYLVNIPS

SEQ ID NO: 41161 - protein, 30 aa, Artificial Sequence
  Cyclic GFR-binding peptide
  MOD_RES (28)..(29): Xaa is C or S
MDPIKGYVVKENEDFYLMNIPSLETPVXXA

SEQ ID NO: 41162 - protein, 33 aa, Artificial Sequence
  Cyclic GFR-binding peptide
  MOD_RES (32)..(33): Xaa is C or S
AKVVMNPIKGYIVNNSSDFYLVNIPSLKTPAXX

SEQ ID NO: 41163 - protein, 24 aa, Artificial Sequence
  Cyclic GFR-binding peptide
DPIKGYVVKENEDFYLMNIPSLET

SEQ ID NO: 41164 - protein, 36 aa, Artificial Sequence
  Cyclic GFR-binding peptide
  MOD_RES (2)..(4)..(36): Xaa is C or S
HXGXSRVVMNPIKGYIVNSSDDFYLVNIPSLKTPAX

SEQ ID NO: 41165 - protein, 27 aa, Artificial Sequence
  Cyclic GFR-binding peptide
EVIMPIKGYLLVRGNDFYLMNIPSTKV

SEQ ID NO: 41166 - protein, 32 aa, Artificial Sequence
  Cyclic GFR-binding peptide
  MOD_RES (1)..(1): Xaa is C or S
XSEVVMDPIKGYVVNNASDFYLINIPSLRTPV

SEQ ID NO: 41167 - protein, 29 aa, Artificial Sequence
  Cyclic GFR-binding peptide
GEVVMEPIKGYVVKDYEDFYLMNIPSLET

SEQ ID NO: 41168 - protein, 32 aa, Artificial Sequence
  Cyclic GFR-binding peptide
  MOD_RES (30)..(31): Xaa is C or S
SMGEPIKGYTPVGMDDFYLVNIPSLKTPVXXA

SEQ ID NO: 41169 - protein, 36 aa, Artificial Sequence
  Cyclic GFR-binding peptide
  MOD_RES (2)..(4)..(36): Xaa is C or S
HXGXAKVVMNPIKGYIVNNSSDFYLVNIPSLKTPAX

SEQ ID NO: 41170 - protein, 31 aa, Artificial Sequence
  Cyclic GFR-binding peptide
  MOD_RES (31)..(31): Xaa is C or S
EEVIMPIKGYLLVRGNDFYLMNIPSTKVPAX

SEQ ID NO: 41171 - protein, 33 aa, Artificial Sequence
  Cyclic GFR-binding peptide
  MOD_RES (29)..(30): Xaa is C or S
AMGPIKGYYTVVGKDFYLINIPSLKTPVXXAKS

SEQ ID NO: 41172 - protein, 34 aa, Artificial Sequence
  Cyclic GFR-binding peptide
  MOD_RES (32)..(33): Xaa is C or S
ESVAMGPIKGYYTVVGKDFYLINIPSLKTPVXXA

SEQ ID NO: 41173 - protein, 24 aa, Artificial Sequence
  Cyclic GFR-binding peptide
GPIKGYYTVVGKDFYLINIPSLKT

SEQ ID NO: 41174 - protein, 33 aa, Artificial Sequence
  Cyclic GFR-binding peptide
  MOD_RES (2)..(4): Xaa is C or S
RXGXGEVVMDPIKGYVVKENEDFYLMNIPSLET

SEQ ID NO: 41175 - protein, 34 aa, Artificial Sequence
  Cyclic GFR-binding peptide
  MOD_RES (1)..(3): Xaa is C or S
XGXGEVVMDPIKGYVVKENEDFYLMNIPSLETPV

SEQ ID NO: 41176 - protein, 34 aa, Artificial Sequence
  Cyclic GFR-binding peptide
  MOD_RES (32)..(33): Xaa is C or S
SEVVMDPIKGYVVNNASDFYLINIPSLRTPVXXT

SEQ ID NO: 41177 - protein, 40 aa, Artificial Sequence
  Cyclic GFR-binding peptide
  MOD_RES (2)..(34)..(35): Xaa is C or S
GXGEVVMEPIKGYVVKDYEDFYLMNIPSLETPVXXAKPIS

SEQ ID NO: 41178 - protein, 40 aa, Artificial Sequence
  Cyclic GFR-binding peptide
  MOD_RES (2)..(34)..(35): Xaa is C or S
GXESVAMGPIKGYYTVVGKDFYLINIPSLKTPVXXAKSAK

SEQ ID NO: 41179 - protein, 38 aa, Artificial Sequence
  Cyclic GFR-binding peptide
  MOD_RES (32)..(33): Xaa is C or S
ESVAMGPIKGYYTVVGKDFYLINIPSLKTPVXXAKSAK

SEQ ID NO: 41180 - protein, 23 aa, Artificial Sequence
  Cyclic GFR-binding peptide
VMDPIKGYVVNNASDFYLINIPS

SEQ ID NO: 41181 - protein, 29 aa, Artificial Sequence
  Cyclic GFR-binding peptide
EVVMDPIKGYVVKENEDFYLMNIPSLETP

SEQ ID NO: 41182 - protein, 29 aa, Artificial Sequence
  Cyclic GFR-binding peptide
  MOD_RES (26)..(27): Xaa is C or S
PIKGYVVKENEDFYLMNIPSLETPVXXAK

SEQ ID NO: 41183 - protein, 34 aa, Artificial Sequence
  Cyclic GFR-binding peptide
  MOD_RES (1)..(33): Xaa is C or S
XSRVVMNPIKGYIVNSSDDFYLVNIPSLKTPAXT

SEQ ID NO: 41184 - protein, 28 aa, Artificial Sequence
  Cyclic GFR-binding peptide
  MOD_RES (26)..(27): Xaa is C or S
PIKGYVVKDYEDFYLMNIPSLETPVXXA

SEQ ID NO: 41185 - protein, 24 aa, Artificial Sequence
  Cyclic GFR-binding peptide
MGPIKGYYTVVGKDFYLINIPSLK

SEQ ID NO: 41186 - protein, 36 aa, Artificial Sequence
  Cyclic GFR-binding peptide
  MOD_RES (1)..(3)..(35)..(36): Xaa is C or S
XGXESVAMGPIKGYYTVVGKDFYLINIPSLKTPVXX

SEQ ID NO: 41187 - protein, 40 aa, Artificial Sequence
  Cyclic GFR-binding peptide
  MOD_RES (1)..(3)..(35)..(36): Xaa is C or S
XGXAEVVMDPIKGYVVNNAADFYLINIPSLRAPVXXSAPA

SEQ ID NO: 41188 - protein, 30 aa, Artificial Sequence
  Cyclic GFR-binding peptide
  MOD_RES (1)..(1): Xaa is C or S
XSRVVMNPIKGYIVNSSDDFYLVNIPSLKT

SEQ ID NO: 41189 - protein, 28 aa, Artificial Sequence
  Cyclic GFR-binding peptide
  MOD_RES (27)..(28): Xaa is C or S
MPIKGYLLVRGNDFYLMNIPSTKVPAXX

SEQ ID NO: 41190 - protein, 30 aa, Artificial Sequence; identical to SEQ ID NO: 32604
  Cyclic GFR-binding peptide

SEQ ID NO: 41191 - protein, 35 aa, Artificial Sequence
  Cyclic GFR-binding peptide
  MOD_RES (2)..(34)..(35): Xaa is C or S
GXGEVVMDPIKGYVVKENEDFYLMNIPSLETPVXX

SEQ ID NO: 41192 - protein, 29 aa, Artificial Sequence
  Cyclic GFR-binding peptide
  MOD_RES (28)..(29): Xaa is C or S
GEPIKGYTPVGMDDFYLVNIPSLKTPVXX

SEQ ID NO: 41193 - protein, 30 aa, Artificial Sequence
  Cyclic GFR-binding peptide
  MOD_RES (1)..(3): Xaa is C or S
XGXSRVVMNPIKGYIVNSSDDFYLVNIPSL

SEQ ID NO: 41194 - protein, 26 aa, Artificial Sequence
  Cyclic GFR-binding peptide
NPIKGYIVNSSDDFYLVNIPSLKTPA

SEQ ID NO: 41195 - protein, 27 aa, Artificial Sequence
  Cyclic GFR-binding peptide
VMNPIKGYIVNSSDDFYLVNIPSLQTP

SEQ ID NO: 41196 - protein, 34 aa, Artificial Sequence
  Cyclic GFR-binding peptide
  MOD_RES (1)..(3): Xaa is C or S
XGXAEVVMDPIKGYVVNNAADFYLINIPSLRAPV

SEQ ID NO: 41197 - protein, 33 aa, Artificial Sequence
  Cyclic GFR-binding peptide
  MOD_RES (2)..(2): Xaa is C or S
GXGEVVMEPIKGYVVKDYEDFYLMNIPSLETPV

SEQ ID NO: 41198 - protein, 32 aa, Artificial Sequence
  Cyclic GFR-binding peptide
  MOD_RES (26)..(27): Xaa is C or S
PIKGYIVNSSDDFYLVNIPSLKTPAXXPKPVY

SEQ ID NO: 41199 - protein, 34 aa, Artificial Sequence
  Cyclic GFR-binding peptide
  MOD_RES (2)..(4): Xaa is C or S
RXGXSEVVMDPIKGYVVNNASDFYLINIPSLRTP

SEQ ID NO: 41200 - protein, 32 aa, Artificial Sequence
  Cyclic GFR-binding peptide
  MOD_RES (27)..(28): Xaa is C or S
EPIKGYTPVGMDDFYLVNIPSLKTPVXXAKGV

SEQ ID NO: 41201 - protein, 27 aa, Artificial Sequence
  Cyclic GFR-binding peptide
  MOD_RES (1)..(1): Xaa is C or S
XAKVVMNPIKGYIVNNSSDFYLVNIPS

SEQ ID NO: 41202 - protein, 34 aa, Artificial Sequence
  Cyclic GFR-binding peptide
  MOD_RES (31)..(32): Xaa is C or S
EEVIMPIKGYLLVRGNDFYLMNIPSTKVPAXXTS

SEQ ID NO: 41203 - protein, 23 aa, Artificial Sequence
  Cyclic GFR-binding peptide
DPIKGYVVKENEDFYLMNIPSLE

SEQ ID NO: 41204 - protein, 29 aa, Artificial Sequence
  Cyclic GFR-binding peptide
  MOD_RES (27)..(28): Xaa is C or S
MPIKGYLLVRGNDFYLMNIPSTKVPAXXT

SEQ ID NO: 41205 - protein, 32 aa, Artificial Sequence
  Cyclic GFR-binding peptide
  MOD_RES (2)..(4): Xaa is C or S
RXGXEAVSMGEPIKGYTPVGMDDFYLVNIPSL

SEQ ID NO: 41206 - protein, 30 aa, Artificial Sequence
  Cyclic GFR-binding peptide
  MOD_RES (26)..(27): Xaa is C or S
PIKGYIVNSSDDFYLVNIPSLQTPAXXPKP

SEQ ID NO: 41207 - protein, 30 aa, Artificial Sequence
  Cyclic GFR-binding peptide
  MOD_RES (28)..(29): Xaa is C or S
MNPIKGYIVNSSDDFYLVNIPSLQTPAXXP

SEQ ID NO: 41208 - protein, 32 aa, Artificial Sequence
  Cyclic GFR-binding peptide
  MOD_RES (2)..(4): Xaa is C or S
RXGXESVAMGPIKGYYTVVGKDFYLINIPSLK

SEQ ID NO: 41209 - protein, 37 aa, Artificial Sequence
  Cyclic GFR-binding peptide
  MOD_RES (2)..(4)..(36)..(37): Xaa is C or S
HXGXSRVVMNPIKGYIVNSSDDFYLVNIPSLKTPAXX

SEQ ID NO: 41210 - protein, 41 aa, Artificial Sequence
  Cyclic GFR-binding peptide
  MOD_RES (1)..(3)..(35)..(36): Xaa is C or S
XGXAEVVMDPIKGYVVNNAADFYLINIPSLRAPVXXSAPAA

SEQ ID NO: 41211 - protein, 32 aa, Artificial Sequence
  Cyclic GFR-binding peptide
  MOD_RES (30)..(30): Xaa is C or S
VVMNPIKGYIVNSSDDFYLVNIPSLKTPAXTP

SEQ ID NO: 41212 - protein, 41 aa, Artificial Sequence
  Cyclic GFR-binding peptide
  MOD_RES (1)..(3)..(35)..(36): Xaa is C or S
XGXAKVVMNPIKGYIVNNSSDFYLVNIPSLKTPAXXAKPVA

SEQ ID NO: 41213 - protein, 32 aa, Artificial Sequence
  Cyclic GFR-binding peptide
  MOD_RES (2)..(2): Xaa is C or S
GXEAVSMGEPIKGYTPVGMDDFYLVNIPSLKT

SEQ ID NO: 41214 - protein, 38 aa, Artificial Sequence
  Cyclic GFR-binding peptide
  MOD_RES (2)..(34)..(35): Xaa is C or S
GXGEVVMDPIKGYVVKENEDFYLMNIPSLETPVXXAKP

SEQ ID NO: 41215 - protein, 26 aa, Artificial Sequence
  Cyclic GFR-binding peptide
VMNPIKGYIVNNSSDFYLVNIPSLKT

SEQ ID NO: 41216 - protein, 29 aa, Artificial Sequence
  Cyclic GFR-binding peptide
  MOD_RES (1)..(3): Xaa is C or S
XGXSRVVMNPIKGYIVNSSDDFYLVNIPS

SEQ ID NO: 41217 - protein, 36 aa, Artificial Sequence
  Cyclic GFR-binding peptide
  MOD_RES (30)..(31): Xaa is C or S
VVMDPIKGYVVKENEDFYLMNIPSLETPVXXAKPIK

SEQ ID NO: 41218 - protein, 28 aa, Artificial Sequence
  Cyclic GFR-binding peptide
  MOD_RES (27)..(28): Xaa is C or S
EPIKGYVVKDYEDFYLMNIPSLETPVXX

SEQ ID NO: 41219 - protein, 40 aa, Artificial Sequence
  Cyclic GFR-binding peptide
  MOD_RES (2)..(4)..(35)..(36): Xaa is C or S
LXGXEEVIMPIKGYLLVRGNDFYLMNIPSTKVPAXXTSPV

SEQ ID NO: 41220 - protein, 28 aa, Artificial Sequence
  Cyclic GFR-binding peptide
VVMEPIKGYVVKDYEDFYLMNIPSLETP

SEQ ID NO: 41221 - protein, 31 aa, Artificial Sequence
  Cyclic GFR-binding peptide
  MOD_RES (2)..(4): Xaa is C or S
RXGXGEVVMDPIKGYVVKENEDFYLMNIPSL

SEQ ID NO: 41222 - protein, 35 aa, Artificial Sequence
  Cyclic GFR-binding peptide
  MOD_RES (2)..(34)..(35): Xaa is C or S
GXSEVVMDPIKGYVVNNASDFYLINIPSLRTPVXX

SEQ ID NO: 41223 - protein, 31 aa, Artificial Sequence
  Cyclic GFR-binding peptide
SEVVMDPIKGYVVNNASDFYLINIPSLRTPV

SEQ ID NO: 41224 - protein, 35 aa, Artificial Sequence
  Cyclic GFR-binding peptide
  MOD_RES (31)..(32): Xaa is C or S
EVVMDPIKGYVVKENEDFYLMNIPSLETPVXXAKP

SEQ ID NO: 41225 - protein, 37 aa, Artificial Sequence
  Cyclic GFR-binding peptide
  MOD_RES (2)..(4)..(36)..(37): Xaa is C or S
RXGXAEVVMDPIKGYVVNNAADFYLINIPSLRAPVXX

SEQ ID NO: 41226 - protein, 36 aa, Artificial Sequence
  Cyclic GFR-binding peptide
  MOD_RES (1)..(3)..(35)..(36): Xaa is C or S
XGXGEVVMEPIKGYVVKDYEDFYLMNIPSLETPVXX

SEQ ID NO: 41227 - protein, 33 aa, Artificial Sequence
  Cyclic GFR-binding peptide
  MOD_RES (31)..(32): Xaa is C or S
KVVMNPIKGYIVNNSSDFYLVNIPSLKTPAXXA

SEQ ID NO: 41228 - protein, 33 aa, Artificial Sequence
  Cyclic GFR-binding peptide
  MOD_RES (2)..(4): Xaa is C or S
HXGXAKVVMNPIKGYIVNNSSDFYLVNIPSLKT

SEQ ID NO: 41229 - protein, 34 aa, Artificial Sequence
  Cyclic GFR-binding peptide
  MOD_RES (30)..(31): Xaa is C or S
SMGEPIKGYTPVGMDDFYLVNIPSLKTPVXXAKG

SEQ ID NO: 41230 - protein, 20 aa, Artificial Sequence
  Cyclic GFR-binding peptide
PIKGYYTVVGKDFYLINIPS

SEQ ID NO: 41231 - protein, 33 aa, Artificial Sequence
  Cyclic GFR-binding peptide
  MOD_RES (27)..(28): Xaa is C or S
NPIKGYIVNSSDDFYLVNIPSLKTPAXXPKPVY

SEQ ID NO: 41232 - protein, 36 aa, Artificial Sequence
  Cyclic GFR-binding peptide
  MOD_RES (1)..(3)..(36): Xaa is C or S
XGXEAVSMGEPIKGYTPVGMDDFYLVNIPSLKTPVX

SEQ ID NO: 41233 - protein, 31 aa, Artificial Sequence
  Cyclic GFR-binding peptide
  MOD_RES (31)..(31): Xaa is C or S
EVVMDPIKGYVVNNASDFYLINIPSLRTPVX

SEQ ID NO: 41234 - protein, 30 aa, Artificial Sequence
  Cyclic GFR-binding peptide
EEVIMPIKGYLLVRGNDFYLMNIPSTKVPA

SEQ ID NO: 41235 - protein, 32 aa, Artificial Sequence
  Cyclic GFR-binding peptide
  MOD_RES (26)..(27): Xaa is C or S
PIKGYVVNNASDFYLINIPSLRTPVXXTPPTS

SEQ ID NO: 41236 - protein, 35 aa, Artificial Sequence
  Cyclic GFR-binding peptide
  MOD_RES (29)..(30): Xaa is C or S
VMNPIKGYIVNSSDDFYLVNIPSLKTPAXXPKPVH

SEQ ID NO: 41237 - protein, 33 aa, Artificial Sequence
  Cyclic GFR-binding peptide
  MOD_RES (31)..(32): Xaa is C or S
SVAMGPIKGYYTVVGKDFYLINIPSLKTPVXXA

SEQ ID NO: 41238 - protein, 36 aa, Artificial Sequence
  Cyclic GFR-binding peptide
  MOD_RES (30)..(31): Xaa is C or S
VVMDPIKGYVVNNAADFYLINIPSLRAPVXXSAPAA

SEQ ID NO: 41239 - protein, 36 aa, Artificial Sequence
  Cyclic GFR-binding peptide
  MOD_RES (2)..(4)..(36): Xaa is C or S
RXGXESVAMGPIKGYYTVVGKDFYLINIPSLKTPVX

SEQ ID NO: 41240 - protein, 32 aa, Artificial Sequence
  Cyclic GFR-binding peptide
  MOD_RES (30)..(31): Xaa is C or S
VVMNPIKGYIVNNSSDFYLVNIPSLKTPAXXA

SEQ ID NO: 41241 - protein, 29 aa, Artificial Sequence
  Cyclic GFR-binding peptide
  MOD_RES (26)..(27): Xaa is C or S
PIKGYIVNSSDDFYLVNIPSLKTPAXXPK

SEQ ID NO: 41242 - protein, 28 aa, Artificial Sequence
  Cyclic GFR-binding peptide
  MOD_RES (2)..(2): Xaa is C or S
GXEEVIMPIKGYLLVRGNDFYLMNIPST

SEQ ID NO: 41243 - protein, 27 aa, Artificial Sequence
  Cyclic GFR-binding peptide
GEPIKGYTPVGMDDFYLVNIPSLKTPV

SEQ ID NO: 41244 - protein, 30 aa, Artificial Sequence
  Cyclic GFR-binding peptide
  MOD_RES (27)..(28): Xaa is C or S
DPIKGYVVNNASDFYLINIPSLRTPVXXTP

SEQ ID NO: 41245 - protein, 28 aa, Artificial Sequence
  Cyclic GFR-binding peptide
AEVVMDPIKGYVVNNAADFYLINIPSLR

SEQ ID NO: 41246 - protein, 33 aa, Artificial Sequence
  Cyclic GFR-binding peptide
  MOD_RES (28)..(29): Xaa is C or S
GEPIKGYTPVGMDDFYLVNIPSLKTPVXXAKGV

SEQ ID NO: 41247 - protein, 36 aa, Artificial Sequence
  Cyclic GFR-binding peptide
  MOD_RES (30)..(30): Xaa is C or S
VVMNPIKGYIVNSSDDFYLVNIPSLKTPAXTPKTVH

SEQ ID NO: 41248 - protein, 29 aa, Artificial Sequence
  Cyclic GFR-binding peptide
AEVVMDPIKGYVVNNAADFYLINIPSLRA

SEQ ID NO: 41249 - protein, 30 aa, Artificial Sequence
  Cyclic GFR-binding peptide
SEVVMDPIKGYVVNNASDFYLINIPSLRTP

SEQ ID NO: 41250 - protein, 26 aa, Artificial Sequence
  Cyclic GFR-binding peptide
  MOD_RES (26)..(26): Xaa is C or S
PIKGYTPVGMDDFYLVNIPSLKTPVX

SEQ ID NO: 41251 - protein, 28 aa, Artificial Sequence
  Cyclic GFR-binding peptide
EAVSMGEPIKGYTPVGMDDFYLVNIPSL

SEQ ID NO: 41252 - protein, 36 aa, Artificial Sequence
  Cyclic GFR-binding peptide
  MOD_RES (1)..(33)..(34): Xaa is C or S
XGEVVMDPIKGYVVKENEDFYLMNIPSLETPVXXAK

SEQ ID NO: 41253 - protein, 24 aa, Artificial Sequence
  Cyclic GFR-binding peptide
VAMGPIKGYYTVVGKDFYLINIPS

SEQ ID NO: 41254 - protein, 35 aa, Artificial Sequence
  Cyclic GFR-binding peptide
  MOD_RES (31)..(31): Xaa is C or S
RVVMNPIKGYIVNSSDDFYLVNIPSLKTPAXTPKT

SEQ ID NO: 41255 - protein, 31 aa, Artificial Sequence
  Cyclic GFR-binding peptide
  MOD_RES (26)..(26): Xaa is C or S
PIKGYIVNSSDDFYLVNIPSLKTPAXTPKTV

SEQ ID NO: 41256 - protein, 25 aa, Artificial Sequence
  Cyclic GFR-binding peptide
MDPIKGYVVNNAADFYLINIPSLRA

SEQ ID NO: 41257 - protein, 25 aa, Artificial Sequence
  Cyclic GFR-binding peptide
VSMGEPIKGYTPVGMDDFYLVNIPS

SEQ ID NO: 41258 - protein, 28 aa, Artificial Sequence
  Cyclic GFR-binding peptide
VMEPIKGYVVKDYEDFYLMNIPSLETPV

SEQ ID NO: 41259 - protein, 22 aa, Artificial Sequence
  Cyclic GFR-binding peptide
PIKGYIVNSSDDFYLVNIPSLQ

SEQ ID NO: 41260 - protein, 31 aa, Artificial Sequence
  Cyclic GFR-binding peptide
  MOD_RES (30)..(31): Xaa is C or S
VVMEPIKGYVVKDYEDFYLMNIPSLETPVXX

SEQ ID NO: 41261 - protein, 21 aa, Artificial Sequence
  Cyclic GFR-binding peptide
PIKGYVVNNAADFYLINIPSL

SEQ ID NO: 41262 - protein, 29 aa, Artificial Sequence
  Cyclic GFR-binding peptide
EAVSMGEPIKGYTPVGMDDFYLVNIPSLK

SEQ ID NO: 41263 - protein, 30 aa, Artificial Sequence
  Cyclic GFR-binding peptide
  MOD_RES (30)..(30): Xaa is C or S
VVMDPIKGYVVNNASDFYLINIPSLRTPVX

SEQ ID NO: 41264 - protein, 35 aa, Artificial Sequence
  Cyclic GFR-binding peptide
  MOD_RES (1)..(33)..(34): Xaa is C or S
XSEVVMDPIKGYVVNNASDFYLINIPSLRTPVXXT

SEQ ID NO: 41265 - protein, 33 aa, Artificial Sequence
  Cyclic GFR-binding peptide
  MOD_RES (27)..(28): Xaa is C or S
NPIKGYIVNSSDDFYLVNIPSLKTPAXXPKPVH

SEQ ID NO: 41266 - protein, 28 aa, Artificial Sequence
  Cyclic GFR-binding peptide
MGEPIKGYTPVGMDDFYLVNIPSLKTPV

SEQ ID NO: 41267 - protein, 26 aa, Artificial Sequence
  Cyclic GFR-binding peptide
  MOD_RES (26)..(26): Xaa is C or S
PIKGYIVNSSDDFYLVNIPSLKTPAX

SEQ ID NO: 41268 - protein, 27 aa, Artificial Sequence
  Cyclic GFR-binding peptide
RVVMNPIKGYIVNSSDDFYLVNIPSLK

SEQ ID NO: 41269 - protein, 27 aa, Artificial Sequence
  Cyclic GFR-binding peptide
  MOD_RES (1)..(1): Xaa is C or S
XGEVVMEPIKGYVVKDYEDFYLMNIPS

SEQ ID NO: 41270 - protein, 28 aa, Artificial Sequence
  Cyclic GFR-binding peptide
VVMNPIKGYIVNSSDDFYLVNIPSLKTP

SEQ ID NO: 41271 - protein, 25 aa, Artificial Sequence
  Cyclic GFR-binding peptide
MPIKGYLLVRGNDFYLMNIPSTKVP

SEQ ID NO: 41272 - protein, 28 aa, Artificial Sequence
  Cyclic GFR-binding peptide
  MOD_RES (2)..(2): Xaa is C or S
GXAKVVMNPIKGYIVNNSSDFYLVNIPS

SEQ ID NO: 41273 - protein, 24 aa, Artificial Sequence
  Cyclic GFR-binding peptide
VMNPIKGYIVNSSDDFYLVNIPSL

SEQ ID NO: 41274 - protein, 31 aa, Artificial Sequence
  Cyclic GFR-binding peptide
  MOD_RES (1)..(3): Xaa is C or S
XGXARVVMNPIKGYIVNSSDDFYLVNIPSLQ

SEQ ID NO: 41275 - protein, 40 aa, Artificial Sequence
  Cyclic GFR-binding peptide
  MOD_RES (1)..(3)..(35)..(36): Xaa is C or S
XGXAKVVMNPIKGYIVNNSSDFYLVNIPSLKTPAXXAKPV

SEQ ID NO: 41276 - protein, 33 aa, Artificial Sequence
  Cyclic GFR-binding peptide
  MOD_RES (1)..(33): Xaa is C or S
XGEVVMDPIKGYVVKENEDFYLMNIPSLETPVX

SEQ ID NO: 41277 - protein, 37 aa, Artificial Sequence
  Cyclic GFR-binding peptide
  MOD_RES (1)..(3)..(35)..(36): Xaa is C or S
XGXESVAMGPIKGYYTVVGKDFYLINIPSLKTPVXXA

SEQ ID NO: 41278 - protein, 28 aa, Artificial Sequence
  Cyclic GFR-binding peptide
AMGPIKGYYTVVGKDFYLINIPSLKTPV

SEQ ID NO: 41279 - protein, 38 aa, Artificial Sequence
  Cyclic GFR-binding peptide
  MOD_RES (32)..(33): Xaa is C or S
GEVVMDPIKGYVVKENEDFYLMNIPSLETPVXXAKPIK

SEQ ID NO: 41280 - protein, 22 aa, Artificial Sequence
  Cyclic GFR-binding peptide
DPIKGYVVKENEDFYLMNIPSL

SEQ ID NO: 41281 - protein, 36 aa, Artificial Sequence
  Cyclic GFR-binding peptide
  MOD_RES (2)..(4)..(36): Xaa is C or S
HXGXARVVMNPIKGYIVNSSDDFYLVNIPSLQTPAX

SEQ ID NO: 41282 - protein, 28 aa, Artificial Sequence
  Cyclic GFR-binding peptide
  MOD_RES (27)..(27): Xaa is C or S
NPIKGYIVNSSDDFYLVNIPSLKTPAXT

SEQ ID NO: 41283 - protein, 31 aa, Artificial Sequence
  Cyclic GFR-binding peptide
  MOD_RES (2)..(4): Xaa is C or S
HXGXAKVVMNPIKGYIVNNSSDFYLVNIPSL

SEQ ID NO: 41284 - protein, 28 aa, Artificial Sequence
  Cyclic GFR-binding peptide
SEVVMDPIKGYVVNNASDFYLINIPSLR

SEQ ID NO: 41285 - protein, 38 aa, Artificial Sequence
  Cyclic GFR-binding peptide
  MOD_RES (2)..(4)..(36)..(37): Xaa is C or S
RXGXGEVVMDPIKGYVVKENEDFYLMNIPSLETPVXXA

SEQ ID NO: 41286 - protein, 29 aa, Artificial Sequence
  Cyclic GFR-binding peptide
  MOD_RES (1)..(1): Xaa is C or S
XAKVVMNPIKGYIVNNSSDFYLVNIPSLK

SEQ ID NO: 41287 - protein, 22 aa, Artificial Sequence
  Cyclic GFR-binding peptide
PIKGYTPVGMDDFYLVNIPSLK

SEQ ID NO: 41288 - protein, 28 aa, Artificial Sequence
  Cyclic GFR-binding peptide
  MOD_RES (1)..(1): Xaa is C or S
XAEVVMDPIKGYVVNNAADFYLINIPSL

SEQ ID NO: 41289 - protein, 30 aa, Artificial Sequence
  Cyclic GFR-binding peptide
  MOD_RES (27)..(28): Xaa is C or S
NPIKGYIVNSSDDFYLVNIPSLKTPAXXPK

SEQ ID NO: 41290 - protein, 24 aa, Artificial Sequence
  Cyclic GFR-binding peptide
NPIKGYIVNNSSDFYLVNIPSLKT

SEQ ID NO: 41291 - protein, 24 aa, Artificial Sequence
  Cyclic GFR-binding peptide
DPIKGYVVNNAADFYLINIPSLRA

SEQ ID NO: 41292 - protein, 33 aa, Artificial Sequence
  Cyclic GFR-binding peptide
  MOD_RES (32)..(33): Xaa is C or S
GEVVMEPIKGYVVKDYEDFYLMNIPSLETPVXX

SEQ ID NO: 41293 - protein, 28 aa, Artificial Sequence
  Cyclic GFR-binding peptide
  MOD_RES (2)..(2): Xaa is C or S
GXAEVVMDPIKGYVVNNAADFYLINIPS

SEQ ID NO: 41294 - protein, 23 aa, Artificial Sequence
  Cyclic GFR-binding peptide
GEPIKGYTPVGMDDFYLVNIPSL

SEQ ID NO: 41295 - protein, 28 aa, Artificial Sequence
  Cyclic GFR-binding peptide
ESVAMGPIKGYYTVVGKDFYLINIPSLK

SEQ ID NO: 41296 - protein, 37 aa, Artificial Sequence
  Cyclic GFR-binding peptide
  MOD_RES (1)..(3)..(35)..(36): Xaa is C or S
XGXGEVVMEPIKGYVVKDYEDFYLMNIPSLETPVXXA

SEQ ID NO: 41297 - protein, 35 aa, Artificial Sequence
  Cyclic GFR-binding peptide
  MOD_RES (32)..(33): Xaa is C or S
AKVVMNPIKGYIVNNSSDFYLVNIPSLKTPAXXAK

SEQ ID NO: 41298 - protein, 33 aa, Artificial Sequence
  Cyclic GFR-binding peptide
  MOD_RES (2)..(4): Xaa is C or S
SXGXRDVVMGPIKGYIIQQKDNFYLMNIPSMKT

SEQ ID NO: 41299 - protein, 27 aa, Artificial Sequence
  Cyclic GFR-binding peptide
SRVVMNPIKGYIVNSSDDFYLVNIPSL

SEQ ID NO: 41300 - protein, 34 aa, Artificial Sequence
  Cyclic GFR-binding peptide
  MOD_RES (1)..(3): Xaa is C or S
XGXESVAMGPIKGYYTVVGKDFYLINIPSLKTPV

SEQ ID NO: 41301 - protein, 31 aa, Artificial Sequence
  Cyclic GFR-binding peptide
  MOD_RES (29)..(30): Xaa is C or S
VMNPIKGYIVNSSDDFYLVNIPSLQTPAXXP

SEQ ID NO: 41302 - protein, 30 aa, Artificial Sequence
  Cyclic GFR-binding peptide
  MOD_RES (26)..(27): Xaa is C or S
PIKGYLLVRGNDFYLMNIPSTKVPAXXTSP

SEQ ID NO: 41303 - protein, 35 aa, Artificial Sequence
  Cyclic GFR-binding peptide
  MOD_RES (31)..(32): Xaa is C or S
RVVMNPIKGYIVNSSDDFYLVNIPSLQTPAXXPKP

SEQ ID NO: 41304 - protein, 34 aa, Artificial Sequence
  Cyclic GFR-binding peptide
  MOD_RES (1)..(3): Xaa is C or S
XGXGEVVMEPIKGYVVKDYEDFYLMNIPSLETPV

SEQ ID NO: 41305 - protein, 32 aa, Artificial Sequence
  Cyclic GFR-binding peptide
  MOD_RES (32)..(32): Xaa is C or S
SEVVMDPIKGYVVNNASDFYLINIPSLRTPVX

SEQ ID NO: 41306 - protein, 27 aa, Artificial Sequence
  Cyclic GFR-binding peptide
ARVVMNPIKGYIVNSSDDFYLVNIPSL

SEQ ID NO: 41307 - protein, 31 aa, Artificial Sequence
  Cyclic GFR-binding peptide
  MOD_RES (31)..(31): Xaa is C or S
SVAMGPIKGYYTVVGKDFYLINIPSLKTPVX

SEQ ID NO: 41308 - protein, 31 aa, Artificial Sequence
  Cyclic GFR-binding peptide
  MOD_RES (1)..(3): Xaa is C or S
XGXGEVVMDPIKGYVVKENEDFYLMNIPSLE

SEQ ID NO: 41309 - protein, 25 aa, Artificial Sequence
  Cyclic GFR-binding peptide
NPIKGYIVNSSDDFYLVNIPSLQTP

SEQ ID NO: 41310 - protein, 21 aa, Artificial Sequence
  Cyclic GFR-binding peptide
DPIKGYVVKENEDFYLMNIPS

SEQ ID NO: 41311 - protein, 36 aa, Artificial Sequence
  Cyclic GFR-binding peptide
  MOD_RES (32)..(33): Xaa is C or S
AKVVMNPIKGYIVNNSSDFYLVNIPSLKTPAXXAKP

SEQ ID NO: 41312 - protein, 32 aa, Artificial Sequence
  Cyclic GFR-binding peptide
  MOD_RES (26)..(27): Xaa is C or S
PIKGYVVNNAADFYLINIPSLRAPVXXSAPAA

SEQ ID NO: 41313 - protein, 29 aa, Artificial Sequence
  Cyclic GFR-binding peptide
  MOD_RES (28)..(29): Xaa is C or S
IMPIKGYLLVRGNDFYLMNIPSTKVPAXX

SEQ ID NO: 41314 - protein, 37 aa, Artificial Sequence
  Cyclic GFR-binding peptide
  MOD_RES (32)..(33): Xaa is C or S
SEVVMDPIKGYVVNNASDFYLINIPSLRTPVXXTPPT

SEQ ID NO: 41315 - protein, 29 aa, Artificial Sequence
  Cyclic GFR-binding peptide
  MOD_RES (26)..(27): Xaa is C or S
PIKGYIVNSSDDFYLVNIPSLQTPAXXPK

SEQ ID NO: 41316 - protein, 30 aa, Artificial Sequence
  Cyclic GFR-binding peptide
  MOD_RES (2)..(2): Xaa is C or S
GXSEVVMDPIKGYVVNNASDFYLINIPSLR

SEQ ID NO: 41317 - protein, 36 aa, Artificial Sequence
  Cyclic GFR-binding peptide
  MOD_RES (31)..(32): Xaa is C or S
SVAMGPIKGYYTVVGKDFYLINIPSLKTPVXXAKSA

SEQ ID NO: 41318 - protein, 25 aa, Artificial Sequence
  Cyclic GFR-binding peptide
MGEPIKGYTPVGMDDFYLVNIPSLK

SEQ ID NO: 41319 - protein, 28 aa, Artificial Sequence
  Cyclic GFR-binding peptide
EVVMDPIKGYVVKENEDFYLMNIPSLET

SEQ ID NO: 41320 - protein, 25 aa, Artificial Sequence
  Cyclic GFR-binding peptide
GPIKGYYTVVGKDFYLINIPSLKTP

SEQ ID NO: 41321 - protein, 25 aa, Artificial Sequence
  Cyclic GFR-binding peptide
VMDPIKGYVVNNAADFYLINIPSLR

SEQ ID NO: 41322 - protein, 34 aa, Artificial Sequence
  Cyclic GFR-binding peptide
  MOD_RES (32)..(33): Xaa is C or S
AEVVMDPIKGYVVNNAADFYLINIPSLRAPVXXS

SEQ ID NO: 41323 - protein, 23 aa, Artificial Sequence
  Cyclic GFR-binding peptide
MGPIKGYYTVVGKDFYLINIPSL

SEQ ID NO: 41324 - protein, 29 aa, Artificial Sequence
  Cyclic GFR-binding peptide
  MOD_RES (1)..(1): Xaa is C or S
XGEVVMDPIKGYVVKENEDFYLMNIPSLE

SEQ ID NO: 41325 - protein, 32 aa, Artificial Sequence
  Cyclic GFR-binding peptide
  MOD_RES (1)..(1): Xaa is C or S
XGEVVMEPIKGYVVKDYEDFYLMNIPSLETPV

SEQ ID NO: 41326 - protein, 31 aa, Artificial Sequence
  Cyclic GFR-binding peptide
  MOD_RES (28)..(29): Xaa is C or S
MDPIKGYVVNNASDFYLINIPSLRTPVXXTP

SEQ ID NO: 41327 - protein, 34 aa, Artificial Sequence
  Cyclic GFR-binding peptide
  MOD_RES (28)..(29): Xaa is C or S
MNPIKGYIVNSSDDFYLVNIPSLQTPAXXPKPVT

SEQ ID NO: 41328 - protein, 23 aa, Artificial Sequence
  Cyclic GFR-binding peptide
VMNPIKGYIVNNSSDFYLVNIPS

SEQ ID NO: 41329 - protein, 23 aa, Artificial Sequence
  Cyclic GFR-binding peptide
VMNPIKGYIVNSSDDFYLVNIPS

SEQ ID NO: 41330 - protein, 40 aa, Artificial Sequence
  Cyclic GFR-binding peptide
  MOD_RES (2)..(4)..(36)..(37): Xaa is C or S
RXGXSEVVMDPIKGYVVNNASDFYLINIPSLRTPVXXTPP

SEQ ID NO: 41331 - protein, 29 aa, Artificial Sequence
  Cyclic GFR-binding peptide
  MOD_RES (27)..(28): Xaa is C or S
EPIKGYVVKDYEDFYLMNIPSLETPVXXA

SEQ ID NO: 41332 - protein, 32 aa, Artificial Sequence
  Cyclic GFR-binding peptide
  MOD_RES (26)..(27): Xaa is C or S
PIKGYYTVVGKDFYLINIPSLKTPVXXAKSAK

SEQ ID NO: 41333 - protein, 33 aa, Artificial Sequence
  Cyclic GFR-binding peptide
  MOD_RES (2)..(4): Xaa is C or S
LXGXEEVIMPIKGYLLVRGNDFYLMNIPSTKVP

SEQ ID NO: 41334 - protein, 27 aa, Artificial Sequence
  Cyclic GFR-binding peptide
AEVVMDPIKGYVVNNAADFYLINIPSL

SEQ ID NO: 41335 - protein, 38 aa, Artificial Sequence
  Cyclic GFR-binding peptide
  MOD_RES (1)..(33)..(34): Xaa is C or S
XSEVVMDPIKGYVVNNASDFYLINIPSLRTPVXXTPPT

SEQ ID NO: 41336 - protein, 36 aa, Artificial Sequence
  Cyclic GFR-binding peptide
  MOD_RES (31)..(32): Xaa is C or S
VSMGEPIKGYTPVGMDDFYLVNIPSLKTPVXXAKGV

SEQ ID NO: 41337 - protein, 20 aa, Artificial Sequence
  Cyclic GFR-binding peptide
PIKGYIVNSSDDFYLVNIPS

SEQ ID NO: 41338 - protein, 30 aa, Artificial Sequence
  Cyclic GFR-binding peptide
  MOD_RES (26)..(27): Xaa is C or S
PIKGYVVKENEDFYLMNIPSLETPVXXAKP

SEQ ID NO: 41339 - protein, 36 aa, Artificial Sequence
  Cyclic GFR-binding peptide
  MOD_RES (1)..(3)..(35)..(36): Xaa is C or S
XGXAKVVMNPIKGYIVNNSSDFYLVNIPSLKTPAXX

SEQ ID NO: 41340 - protein, 36 aa, Artificial Sequence
  Cyclic GFR-binding peptide
  MOD_RES (1)..(3)..(34)..(35): Xaa is C or S
XGXEEVIMPIKGYLLVRGNDFYLMNIPSTKVPAXXT

SEQ ID NO: 41341 - protein, 33 aa, Artificial Sequence
  Cyclic GFR-binding peptide
  MOD_RES (31)..(32): Xaa is C or S
EVVMDPIKGYVVNNASDFYLINIPSLRTPVXXT

SEQ ID NO: 41342 - protein, 34 aa, Artificial Sequence
  Cyclic GFR-binding peptide
  MOD_RES (28)..(29): Xaa is C or S
MGPIKGYYTVVGKDFYLINIPSLKTPVXXAKSAK

SEQ ID NO: 41343 - protein, 26 aa, Artificial Sequence
  Cyclic GFR-binding peptide
VMDPIKGYVVNNASDFYLINIPSLRT

SEQ ID NO: 41344 - protein, 34 aa, Artificial Sequence
  Cyclic GFR-binding peptide
  MOD_RES (32)..(33): Xaa is C or S
GEVVMDPIKGYVVKENEDFYLMNIPSLETPVXXA

SEQ ID NO: 41345 - protein, 38 aa, Artificial Sequence
  Cyclic GFR-binding peptide
  MOD_RES (2)..(34): Xaa is C or S
GXSRVVMNPIKGYIVNSSDDFYLVNIPSLKTPAXTPKT

SEQ ID NO: 41346 - protein, 31 aa, Artificial Sequence
  Cyclic GFR-binding peptide
  MOD_RES (26)..(27): Xaa is C or S
PIKGYIVNSSDDFYLVNIPSLQTPAXXPKPV

SEQ ID NO: 41347 - protein, 35 aa, Artificial Sequence
  Cyclic GFR-binding peptide
  MOD_RES (29)..(30): Xaa is C or S
VMDPIKGYVVNNASDFYLINIPSLRTPVXXTPPTS

SEQ ID NO: 41348 - protein, 28 aa, Artificial Sequence
  Cyclic GFR-binding peptide
  MOD_RES (1)..(3): Xaa is C or S
XGXEEVIMPIKGYLLVRGNDFYLMNIPS

SEQ ID NO: 41349 - protein, 30 aa, Artificial Sequence
  Cyclic GFR-binding peptide
KVVMNPIKGYIVNNSSDFYLVNIPSLKTPA

SEQ ID NO: 41350 - protein, 38 aa, Artificial Sequence
  Cyclic GFR-binding peptide
  MOD_RES (1)..(33): Xaa is C or S
XSRVVMNPIKGYIVNSSDDFYLVNIPSLKTPAXTPKTV

SEQ ID NO: 41351 - protein, 31 aa, Artificial Sequence
  Cyclic GFR-binding peptide
  MOD_RES (2)..(2): Xaa is C or S
GXGEVVMEPIKGYVVKDYEDFYLMNIPSLET

SEQ ID NO: 41352 - protein, 31 aa, Artificial Sequence
  Cyclic GFR-binding peptide
  MOD_RES (27)..(28): Xaa is C or S
EPIKGYTPVGMDDFYLVNIPSLKTPVXXAKG

SEQ ID NO: 41353 - protein, 41 aa, Artificial Sequence
  Cyclic GFR-binding peptide
  MOD_RES (1)..(3)..(35)..(36): Xaa is C or S
XGXGEVVMEPIKGYVVKDYEDFYLMNIPSLETPVXXAKPIS

SEQ ID NO: 41354 - protein, 31 aa, Artificial Sequence
  Cyclic GFR-binding peptide
  MOD_RES (2)..(2): Xaa is C or S
GXESVAMGPIKGYYTVVGKDFYLINIPSLKT

SEQ ID NO: 41355 - protein, 29 aa, Artificial Sequence
  Cyclic GFR-binding peptide
  MOD_RES (2)..(2): Xaa is C or S
GXAKVVMNPIKGYIVNNSSDFYLVNIPSL

SEQ ID NO: 41356 - protein, 26 aa, Artificial Sequence
  Cyclic GFR-binding peptide
VSMGEPIKGYTPVGMDDFYLVNIPSL

SEQ ID NO: 41357 - protein, 36 aa, Artificial Sequence
  Cyclic GFR-binding peptide
  MOD_RES (32)..(32): Xaa is C or S
SRVVMNPIKGYIVNSSDDFYLVNIPSLKTPAXTPKT

SEQ ID NO: 41358 - protein, 29 aa, Artificial Sequence
  Cyclic GFR-binding peptide
  MOD_RES (1)..(1): Xaa is C or S
XSEVVMDPIKGYVVNNASDFYLINIPSLR

SEQ ID NO: 41359 - protein, 34 aa, Artificial Sequence
  Cyclic GFR-binding peptide
  MOD_RES (29)..(30): Xaa is C or S
MGEPIKGYTPVGMDDFYLVNIPSLKTPVXXAKGV

SEQ ID NO: 41360 - protein, 23 aa, Artificial Sequence
  Cyclic GFR-binding peptide
PIKGYIVNSSDDFYLVNIPSLKT

SEQ ID NO: 41361 - protein, 34 aa, Artificial Sequence
  Cyclic GFR-binding peptide
  MOD_RES (1)..(33)..(34): Xaa is C or S
XAEVVMDPIKGYVVNNAADFYLINIPSLRAPVXX

SEQ ID NO: 41362 - protein, 29 aa, Artificial Sequence
  Cyclic GFR-binding peptide
  MOD_RES (2)..(2): Xaa is C or S
GXESVAMGPIKGYYTVVGKDFYLINIPSL

SEQ ID NO: 41363 - protein, 40 aa, Artificial Sequence
  Cyclic GFR-binding peptide
  MOD_RES (1)..(34)..(35): Xaa is C or S
XEAVSMGEPIKGYTPVGMDDFYLVNIPSLKTPVXXAKGVK

SEQ ID NO: 41364 - protein, 39 aa, Artificial Sequence
  Cyclic GFR-binding peptide
  MOD_RES (1)..(3)..(35)..(36): Xaa is C or S
XGXESVAMGPIKGYYTVVGKDFYLINIPSLKTPVXXAKS

SEQ ID NO: 41365 - protein, 34 aa, Artificial Sequence
  Cyclic GFR-binding peptide
  MOD_RES (2)..(33)..(34): Xaa is C or S
GXEEVIMPIKGYLLVRGNDFYLMNIPSTKVPAXX

SEQ ID NO: 41366 - protein, 33 aa, Artificial Sequence
  Cyclic GFR-binding peptide
  MOD_RES (30)..(31): Xaa is C or S
VVMDPIKGYVVNNAADFYLINIPSLRAPVXXSA

SEQ ID NO: 41367 - protein, 39 aa, Artificial Sequence
  Cyclic GFR-binding peptide
  MOD_RES (2)..(35)..(36): Xaa is C or S
GXEAVSMGEPIKGYTPVGMDDFYLVNIPSLKTPVXXAKG

SEQ ID NO: 41368 - protein, 29 aa, Artificial Sequence
  Cyclic GFR-binding peptide
  MOD_RES (2)..(2): Xaa is C or S
GXSEVVMDPIKGYVVNNASDFYLINIPSL

SEQ ID NO: 41369 - protein, 31 aa, Artificial Sequence
  Cyclic GFR-binding peptide
  MOD_RES (1)..(1): Xaa is C or S
XAKVVMNPIKGYIVNNSSDFYLVNIPSLKTP

SEQ ID NO: 41370 - protein, 28 aa, Artificial Sequence
  Cyclic GFR-binding peptide
  MOD_RES (27)..(28): Xaa is C or S
NPIKGYIVNNSSDFYLVNIPSLKTPAXX

SEQ ID NO: 41371 - protein, 35 aa, Artificial Sequence
  Cyclic GFR-binding peptide
  MOD_RES (32)..(33): Xaa is C or S
ARVVMNPIKGYIVNSSDDFYLVNIPSLQTPAXXPK

SEQ ID NO: 41372 - protein, 24 aa, Artificial Sequence
  Cyclic GFR-binding peptide
MPIKGYLLVRGNDFYLMNIPSTKV

SEQ ID NO: 41373 - protein, 22 aa, Artificial Sequence
  Cyclic GFR-binding peptide
PIKGYVVNNASDFYLINIPSLR

SEQ ID NO: 41374 - protein, 32 aa, Artificial Sequence
  Cyclic GFR-binding peptide
  MOD_RES (1)..(1): Xaa is C or S
XAKVVMNPIKGYIVNNSSDFYLVNIPSLKTPA

SEQ ID NO: 41375 - protein, 39 aa, Artificial Sequence
  Cyclic GFR-binding peptide
  MOD_RES (1)..(33)..(34): Xaa is C or S
XGEVVMEPIKGYVVKDYEDFYLMNIPSLETPVXXAKPIS

SEQ ID NO: 41376 - protein, 29 aa, Artificial Sequence
  Cyclic GFR-binding peptide
  MOD_RES (28)..(29): Xaa is C or S
MNPIKGYIVNSSDDFYLVNIPSLKTPAXX

SEQ ID NO: 41377 - protein, 20 aa, Artificial Sequence
  Cyclic GFR-binding peptide
PIKGYTPVGMDDFYLVNIPS

SEQ ID NO: 41378 - protein, 33 aa, Artificial Sequence
  Cyclic GFR-binding peptide
  MOD_RES (1)..(33): Xaa is C or S
XSEVVMDPIKGYVVNNASDFYLINIPSLRTPVX

SEQ ID NO: 41379 - protein, 30 aa, Artificial Sequence
  Cyclic GFR-binding peptide
  MOD_RES (27)..(28): Xaa is C or S
EPIKGYTPVGMDDFYLVNIPSLKTPVXXAK

SEQ ID NO: 41380 - protein, 30 aa, Artificial Sequence
  Cyclic GFR-binding peptide
  MOD_RES (26)..(27): Xaa is C or S
PIKGYVVKDYEDFYLMNIPSLETPVXXAKP

SEQ ID NO: 41381 - protein, 32 aa, Artificial Sequence
  Cyclic GFR-binding peptide
  MOD_RES (27)..(28): Xaa is C or S
NPIKGYIVNSSDDFYLVNIPSLQTPAXXPKPV

SEQ ID NO: 41382 - protein, 27 aa, Artificial Sequence
  Cyclic GFR-binding peptide
VAMGPIKGYYTVVGKDFYLINIPSLKT

SEQ ID NO: 41383 - protein, 25 aa, Artificial Sequence
  Cyclic GFR-binding peptide
MNPIKGYIVNNSSDFYLVNIPSLKT

SEQ ID NO: 41384 - protein, 31 aa, Artificial Sequence
  Cyclic GFR-binding peptide
  MOD_RES (26)..(27): Xaa is C or S
PIKGYLLVRGNDFYLMNIPSTKVPAXXTSPV

SEQ ID NO: 41385 - protein, 33 aa, Artificial Sequence
  Cyclic GFR-binding peptide
  MOD_RES (29)..(30): Xaa is C or S
VMDPIKGYVVNNAADFYLINIPSLRAPVXXSAP

SEQ ID NO: 41386 - protein, 31 aa, Artificial Sequence
  Cyclic GFR-binding peptide
  MOD_RES (26)..(27): Xaa is C or S
PIKGYIVNSSDDFYLVNIPSLKTPAXXPKPV

SEQ ID NO: 41387 - protein, 33 aa, Artificial Sequence
  Cyclic GFR-binding peptide
  MOD_RES (28)..(29): Xaa is C or S
MEPIKGYVVKDYEDFYLMNIPSLETPVXXAKPI

SEQ ID NO: 41388 - protein, 37 aa, Artificial Sequence
  Cyclic GFR-binding peptide
  MOD_RES (2)..(34)..(35): Xaa is C or S
GXGEVVMDPIKGYVVKENEDFYLMNIPSLETPVXXAK

SEQ ID NO: 41389 - protein, 31 aa, Artificial Sequence
  Cyclic GFR-binding peptide
ESVAMGPIKGYYTVVGKDFYLINIPSLKTPV

SEQ ID NO: 41390 - protein, 27 aa, Artificial Sequence
  Cyclic GFR-binding peptide
VMDPIKGYVVNNAADFYLINIPSLRAP

SEQ ID NO: 41391 - protein, 38 aa, Artificial Sequence
  Cyclic GFR-binding peptide
  MOD_RES (1)..(33)..(34): Xaa is C or S
XSRVVMNPIKGYIVNSSDDFYLVNIPSLKTPAXXPKPV

SEQ ID NO: 41392 - protein, 34 aa, Artificial Sequence
  Cyclic GFR-binding peptide
  MOD_RES (1)..(3): Xaa is C or S
XGXARVVMNPIKGYIVNSSDDFYLVNIPSLQTPA

SEQ ID NO: 41393 - protein, 32 aa, Artificial Sequence
  Cyclic GFR-binding peptide
  MOD_RES (28)..(29): Xaa is C or S
MGPIKGYYTVVGKDFYLINIPSLKTPVXXAKS

SEQ ID NO: 41394 - protein, 37 aa, Artificial Sequence
  Cyclic GFR-binding peptide
  MOD_RES (2)..(4)..(36)..(37): Xaa is C or S
RXGXESVAMGPIKGYYTVVGKDFYLINIPSLKTPVXX

SEQ ID NO: 41395 - protein, 35 aa, Artificial Sequence
  Cyclic GFR-binding peptide
  MOD_RES (29)..(30): Xaa is C or S
VMDPIKGYVVKENEDFYLMNIPSLETPVXXAKPIK

SEQ ID NO: 41396 - protein, 34 aa, Artificial Sequence
  Cyclic GFR-binding peptide
  MOD_RES (30)..(30): Xaa is C or S
VVMNPIKGYIVNSSDDFYLVNIPSLKTPAXTPKT

SEQ ID NO: 41397 - protein, 30 aa, Artificial Sequence
  Cyclic GFR-binding peptide
  MOD_RES (28)..(29): Xaa is C or S
MEPIKGYVVKDYEDFYLMNIPSLETPVXXA

SEQ ID NO: 41398 - protein, 33 aa, Artificial Sequence
  Cyclic GFR-binding peptide
  MOD_RES (30)..(31): Xaa is C or S
EVIMPIKGYLLVRGNDFYLMNIPSTKVPAXXTS

SEQ ID NO: 41399 - protein, 24 aa, Artificial Sequence
  Cyclic GFR-binding peptide
VMEPIKGYVVKDYEDFYLMNIPSL

SEQ ID NO: 41400 - protein, 31 aa, Artificial Sequence
  Cyclic GFR-binding peptide
  MOD_RES (26)..(27): Xaa is C or S
PIKGYTPVGMDDFYLVNIPSLKTPVXXAKGV

SEQ ID NO: 41401 - protein, 27 aa, Artificial Sequence
  Cyclic GFR-binding peptide
  MOD_RES (27)..(27): Xaa is C or S
DPIKGYVVNNASDFYLINIPSLRTPVX

SEQ ID NO: 41402 - protein, 41 aa, Artificial Sequence
  Cyclic GFR-binding peptide
  MOD_RES (1)..(3)..(35)..(36): Xaa is C or S
XGXSRVVMNPIKGYIVNSSDDFYLVNIPSLKTPAXXPKPVY

SEQ ID NO: 41403 - protein, 25 aa, Artificial Sequence
  Cyclic GFR-binding peptide
VVMDPIKGYVVNNAADFYLINIPSL

SEQ ID NO: 41404 - protein, 24 aa, Artificial Sequence
  Cyclic GFR-binding peptide
VMDPIKGYVVNNASDFYLINIPSL

SEQ ID NO: 41405 - protein, 27 aa, Artificial Sequence
  Cyclic GFR-binding peptide
SEVVMDPIKGYVVNNASDFYLINIPSL

SEQ ID NO: 41406 - protein, 27 aa, Artificial Sequence
  Cyclic GFR-binding peptide
MGPIKGYYTVVGKDFYLINIPSLKTPV

SEQ ID NO: 41407 - protein, 29 aa, Artificial Sequence
  Cyclic GFR-binding peptide
  MOD_RES (26)..(27): Xaa is C or S
PIKGYLLVRGNDFYLMNIPSTKVPAXXTS

SEQ ID NO: 41408 - protein, 37 aa, Artificial Sequence
  Cyclic GFR-binding peptide
  MOD_RES (2)..(33)..(34): Xaa is C or S
GXEEVIMPIKGYLLVRGNDFYLMNIPSTKVPAXXTSP

SEQ ID NO: 41409 - protein, 36 aa, Artificial Sequence
  Cyclic GFR-binding peptide
  MOD_RES (1)..(3)..(35)..(36): Xaa is C or S
XGXSRVVMNPIKGYIVNSSDDFYLVNIPSLKTPAXX

SEQ ID NO: 41410 - protein, 31 aa, Artificial Sequence
  Cyclic GFR-binding peptide
  MOD_RES (2)..(2): Xaa is C or S
GXAKVVMNPIKGYIVNNSSDFYLVNIPSLKT

SEQ ID NO: 41411 - protein, 23 aa, Artificial Sequence
  Cyclic GFR-binding peptide
MDPIKGYVVNNAADFYLINIPSL

SEQ ID NO: 41412 - protein, 37 aa, Artificial Sequence
  Cyclic GFR-binding peptide
  MOD_RES (1)..(32)..(33): Xaa is C or S
XEEVIMPIKGYLLVRGNDFYLMNIPSTKVPAXXTSPV

SEQ ID NO: 41413 - protein, 31 aa, Artificial Sequence
  Cyclic GFR-binding peptide
  MOD_RES (1)..(1): Xaa is C or S
XAEVVMDPIKGYVVNNAADFYLINIPSLRAP

SEQ ID NO: 41414 - protein, 37 aa, Artificial Sequence
  Cyclic GFR-binding peptide
  MOD_RES (1)..(3)..(35)..(36): Xaa is C or S
XGXAEVVMDPIKGYVVNNAADFYLINIPSLRAPVXXS

SEQ ID NO: 41415 - protein, 26 aa, Artificial Sequence
  Cyclic GFR-binding peptide
DPIKGYVVNNAADFYLINIPSLRAPV

SEQ ID NO: 41416 - protein, 25 aa, Artificial Sequence
  Cyclic GFR-binding peptide
VVMNPIKGYIVNNSSDFYLVNIPSL

SEQ ID NO: 41417 - protein, 30 aa, Artificial Sequence
  Cyclic GFR-binding peptide
  MOD_RES (26)..(27): Xaa is C or S
PIKGYVVNNASDFYLINIPSLRTPVXXTPP

SEQ ID NO: 41418 - protein, 30 aa, Artificial Sequence
  Cyclic GFR-binding peptide
  MOD_RES (30)..(30): Xaa is C or S
VVMEPIKGYVVKDYEDFYLMNIPSLETPVX

SEQ ID NO: 41419 - protein, 25 aa, Artificial Sequence
  Cyclic GFR-binding peptide
EVVMDPIKGYVVKENEDFYLMNIPS

SEQ ID NO: 41420 - protein, 32 aa, Artificial Sequence
  Cyclic GFR-binding peptide
  MOD_RES (1)..(1): Xaa is C or S
XSRVVMNPIKGYIVNSSDDFYLVNIPSLKTPA

SEQ ID NO: 41421 - protein, 30 aa, Artificial Sequence
  Cyclic GFR-binding peptide
EVVMEPIKGYVVKDYEDFYLMNIPSLETPV

SEQ ID NO: 41422 - protein, 22 aa, Artificial Sequence
  Cyclic GFR-binding peptide
NPIKGYIVNSSDDFYLVNIPSL

SEQ ID NO: 41423 - protein, 30 aa, Artificial Sequence
  Cyclic GFR-binding peptide
  MOD_RES (1)..(1): Xaa is C or S
XEEVIMPIKGYLLVRGNDFYLMNIPSTKVP

SEQ ID NO: 41424 - protein, 38 aa, Artificial Sequence
  Cyclic GFR-binding peptide
  MOD_RES (32)..(33): Xaa is C or S
SRVVMNPIKGYIVNSSDDFYLVNIPSLKTPAXXPKPVH

SEQ ID NO: 41425 - protein, 25 aa, Artificial Sequence
  Cyclic GFR-binding peptide
AMGPIKGYYTVVGKDFYLINIPSLK

SEQ ID NO: 41426 - protein, 31 aa, Artificial Sequence
  Cyclic GFR-binding peptide
  MOD_RES (29)..(30): Xaa is C or S
AMGPIKGYYTVVGKDFYLINIPSLKTPVXXA

SEQ ID NO: 41427 - skipped

SEQ ID NO: 41428 - protein, 34 aa, Artificial Sequence
  Cyclic GFR-binding peptide
  MOD_RES (1)..(33)..(34): Xaa is C or S
XESVAMGPIKGYYTVVGKDFYLINIPSLKTPVXX

SEQ ID NO: 41429 - protein, 42 aa, Artificial Sequence
  Cyclic GFR-binding peptide
  MOD_RES (2)..(4)..(36)..(37): Xaa is C or S
HXGXARVVMNPIKGYIVNSSDDFYLVNIPSLQTPAXXPKPVT

SEQ ID NO: 41430 - protein, 33 aa, Artificial Sequence
  Cyclic GFR-binding peptide
  MOD_RES (29)..(29): Xaa is C or S
VMNPIKGYIVNSSDDFYLVNIPSLKTPAXTPKT

SEQ ID NO: 41431 - protein, 32 aa, Artificial Sequence
  Cyclic GFR-binding peptide
  MOD_RES (27)..(27): Xaa is C or S
NPIKGYIVNSSDDFYLVNIPSLKTPAXTPKTV

SEQ ID NO: 41432 - protein, 33 aa, Artificial Sequence
  Cyclic GFR-binding peptide
  MOD_RES (28)..(29): Xaa is C or S
MDPIKGYVVNNAADFYLINIPSLRAPVXXSAPA

SEQ ID NO: 41433 - protein, 32 aa, Artificial Sequence
  Cyclic GFR-binding peptide
  MOD_RES (1)..(32): Xaa is C or S
XEEVIMPIKGYLLVRGNDFYLMNIPSTKVPAX

SEQ ID NO: 41434 - protein, 34 aa, Artificial Sequence
  Cyclic GFR-binding peptide
  MOD_RES (32)..(32): Xaa is C or S
SRVVMNPIKGYIVNSSDDFYLVNIPSLKTPAXTP

SEQ ID NO: 41435 - protein, 33 aa, Artificial Sequence
  Cyclic GFR-binding peptide
  MOD_RES (30)..(31): Xaa is C or S
VVMNPIKGYIVNSSDDFYLVNIPSLKTPAXXPK

SEQ ID NO: 41436 - protein, 37 aa, Artificial Sequence
  Cyclic GFR-binding peptide
  MOD_RES (2)..(34)..(35): Xaa is C or S
GXAKVVMNPIKGYIVNNSSDFYLVNIPSLKTPAXXAK

SEQ ID NO: 41437 - protein, 29 aa, Artificial Sequence
  Cyclic GFR-binding peptide
KVVMNPIKGYIVNNSSDFYLVNIPSLKTP

SEQ ID NO: 41438 - protein, 37 aa, Artificial Sequence
  Cyclic GFR-binding peptide
  MOD_RES (31)..(32): Xaa is C or S
RVVMNPIKGYIVNSSDDFYLVNIPSLQTPAXXPKPVT

SEQ ID NO: 41439 - protein, 21 aa, Artificial Sequence
  Cyclic GFR-binding peptide
PIKGYVVKENEDFYLMNIPSL

SEQ ID NO: 41440 - protein, 30 aa, Artificial Sequence
  Cyclic GFR-binding peptide
  MOD_RES (29)..(30): Xaa is C or S
MGEPIKGYTPVGMDDFYLVNIPSLKTPVXX

SEQ ID NO: 41441 - protein, 32 aa, Artificial Sequence
  Cyclic GFR-binding peptide
  MOD_RES (31)..(32): Xaa is C or S
RVVMNPIKGYIVNSSDDFYLVNIPSLQTPAXX

SEQ ID NO: 41442 - protein, 33 aa, Artificial Sequence
  Cyclic GFR-binding peptide
  MOD_RES (29)..(30): Xaa is C or S
VIMPIKGYLLVRGNDFYLMNIPSTKVPAXXTSP

SEQ ID NO: 41443 - protein, 28 aa, Artificial Sequence
  Cyclic GFR-binding peptide
  MOD_RES (27)..(28): Xaa is C or S
NPIKGYIVNSSDDFYLVNIPSLQTPAXX

SEQ ID NO: 41444 - protein, 31 aa, Artificial Sequence
  Cyclic GFR-binding peptide
  MOD_RES (29)..(30): Xaa is C or S
MGEPIKGYTPVGMDDFYLVNIPSLKTPVXXA

SEQ ID NO: 41445 - protein, 36 aa, Artificial Sequence
  Cyclic GFR-binding peptide
  MOD_RES (32)..(33): Xaa is C or S
ARVVMNPIKGYIVNSSDDFYLVNIPSLQTPAXXPKP

SEQ ID NO: 41446 - protein, 32 aa, Artificial Sequence
  Cyclic GFR-binding peptide
  MOD_RES (28)..(29): Xaa is C or S
MDPIKGYVVNNASDFYLINIPSLRTPVXXTPP

SEQ ID NO: 41447 - protein, 32 aa, Artificial Sequence
  Cyclic GFR-binding peptide
  MOD_RES (27)..(28): Xaa is C or S
NPIKGYIVNSSDDFYLVNIPSLKTPAXXPKPV

SEQ ID NO: 41448 - protein, 33 aa, Artificial Sequence
  Cyclic GFR-binding peptide
  MOD_RES (32)..(32): Xaa is C or S
SRVVMNPIKGYIVNSSDDFYLVNIPSLKTPAXT

SEQ ID NO: 41449 - protein, 22 aa, Artificial Sequence
  Cyclic GFR-binding peptide
MDPIKGYVVNNASDFYLINIPS

SEQ ID NO: 41450 - protein, 26 aa, Artificial Sequence
  Cyclic GFR-binding peptide
  MOD_RES (26)..(26): Xaa is C or S
PIKGYIVNSSDDFYLVNIPSLQTPAX

SEQ ID NO: 41451 - protein, 32 aa, Artificial Sequence
  Cyclic GFR-binding peptide
  MOD_RES (29)..(30): Xaa is C or S
VIMPIKGYLLVRGNDFYLMNIPSTKVPAXXTS

SEQ ID NO: 41452 - protein, 38 aa, Artificial Sequence
  Cyclic GFR-binding peptide
  MOD_RES (32)..(33): Xaa is C or S
SRVVMNPIKGYIVNSSDDFYLVNIPSLKTPAXXPKPVY

SEQ ID NO: 41453 - protein, 36 aa, Artificial Sequence
  Cyclic GFR-binding peptide
  MOD_RES (2)..(34)..(35): Xaa is C or S
GXARVVMNPIKGYIVNSSDDFYLVNIPSLQTPAXXP

SEQ ID NO: 41454 - protein, 32 aa, Artificial Sequence
  Cyclic GFR-binding peptide
  MOD_RES (2)..(4): Xaa is C or S
RXGXAEVVMDPIKGYVVNNAADFYLINIPSLR

SEQ ID NO: 41455 - protein, 31 aa, Artificial Sequence
  Cyclic GFR-binding peptide
  MOD_RES (31)..(31): Xaa is C or S
RVVMNPIKGYIVNSSDDFYLVNIPSLQTPAX

SEQ ID NO: 41456 - protein, 23 aa, Artificial Sequence
  Cyclic GFR-binding peptide
MPIKGYLLVRGNDFYLMNIPSTK

SEQ ID NO: 41457 - protein, 35 aa, Artificial Sequence
  Cyclic GFR-binding peptide
  MOD_RES (31)..(32): Xaa is C or S
EVVMDPIKGYVVNNAADFYLINIPSLRAPVXXSAP

SEQ ID NO: 41458 - protein, 33 aa, Artificial Sequence
  Cyclic GFR-binding peptide
  MOD_RES (31)..(32): Xaa is C or S
RVVMNPIKGYIVNSSDDFYLVNIPSLQTPAXXP

SEQ ID NO: 41459 - protein, 35 aa, Artificial Sequence
  Cyclic GFR-binding peptide
  MOD_RES (1)..(33)..(34): Xaa is C or S
XAKVVMNPIKGYIVNNSSDFYLVNIPSLKTPAXXA

SEQ ID NO: 41460 - protein, 33 aa, Artificial Sequence
  Cyclic GFR-binding peptide
  MOD_RES (32)..(33): Xaa is C or S
AEVVMDPIKGYVVNNAADFYLINIPSLRAPVXX

SEQ ID NO: 41461 - protein, 30 aa, Artificial Sequence
  Cyclic GFR-binding peptide
ESVAMGPIKGYYTVVGKDFYLINIPSLKTP

SEQ ID NO: 41462 - protein, 27 aa, Artificial Sequence
  Cyclic GFR-binding peptide
VSMGEPIKGYTPVGMDDFYLVNIPSLK

SEQ ID NO: 41463 - protein, 34 aa, Artificial Sequence
  Cyclic GFR-binding peptide
  MOD_RES (1)..(33)..(34): Xaa is C or S
XARVVMNPIKGYIVNSSDDFYLVNIPSLQTPAXX

SEQ ID NO: 41464 - protein, 39 aa, Artificial Sequence
  Cyclic GFR-binding peptide
  MOD_RES (2)..(4)..(36)..(37): Xaa is C or S
HXGXARVVMNPIKGYIVNSSDDFYLVNIPSLQTPAXXPK

SEQ ID NO: 41465 - protein, 36 aa, Artificial Sequence
  Cyclic GFR-binding peptide
  MOD_RES (2)..(34)..(35): Xaa is C or S
GXESVAMGPIKGYYTVVGKDFYLINIPSLKTPVXXA

SEQ ID NO: 41466 - protein, 24 aa, Artificial Sequence
  Cyclic GFR-binding peptide
IMPIKGYLLVRGNDFYLMNIPSTK

SEQ ID NO: 41467 - protein, 27 aa, Artificial Sequence
  Cyclic GFR-binding peptide
MNPIKGYIVNSSDDFYLVNIPSLQTPA

SEQ ID NO: 41468 - protein, 34 aa, Artificial Sequence
  Cyclic GFR-binding peptide
  MOD_RES (31)..(32): Xaa is C or S
VSMGEPIKGYTPVGMDDFYLVNIPSLKTPVXXAK

SEQ ID NO: 41469 - protein, 39 aa, Artificial Sequence
  Cyclic GFR-binding peptide
  MOD_RES (2)..(34)..(35): Xaa is C or S
GXAEVVMDPIKGYVVNNAADFYLINIPSLRAPVXXSAPA

SEQ ID NO: 41470 - protein, 25 aa, Artificial Sequence
  Cyclic GFR-binding peptide
RVVMNPIKGYIVNSSDDFYLVNIPS

SEQ ID NO: 41471 - protein, 30 aa, Artificial Sequence
  Cyclic GFR-binding peptide
  MOD_RES (27)..(27): Xaa is C or S
NPIKGYIVNSSDDFYLVNIPSLKTPAXTPK

SEQ ID NO: 41472 - protein, 28 aa, Artificial Sequence
  Cyclic GFR-binding peptide
  MOD_RES (2)..(2): Xaa is C or S
GXSRVVMNPIKGYIVNSSDDFYLVNIPS

SEQ ID NO: 41473 - protein, 37 aa, Artificial Sequence
  Cyclic GFR-binding peptide
  MOD_RES (2)..(34)..(35): Xaa is C or S
GXSEVVMDPIKGYVVNNASDFYLINIPSLRTPVXXTP

SEQ ID NO: 41474 - protein, 25 aa, Artificial Sequence
  Cyclic GFR-binding peptide
VMDPIKGYVVKENEDFYLMNIPSLE

SEQ ID NO: 41475 - protein, 27 aa, Artificial Sequence
  Cyclic GFR-binding peptide
  MOD_RES (27)..(27): Xaa is C or S
MPIKGYLLVRGNDFYLMNIPSTKVPAX

SEQ ID NO: 41476 - protein, 36 aa, Artificial Sequence
  Cyclic GFR-binding peptide
  MOD_RES (1)..(3)..(35)..(36): Xaa is C or S
XGXGEVVMDPIKGYVVKENEDFYLMNIPSLETPVXX

SEQ ID NO: 41477 - protein, 36 aa, Artificial Sequence
  Cyclic GFR-binding peptide
  MOD_RES (2)..(4)..(36): Xaa is C or S
RXGXAEVVMDPIKGYVVNNAADFYLINIPSLRAPVX

SEQ ID NO: 41478 - protein, 37 aa, Artificial Sequence
  Cyclic GFR-binding peptide
  MOD_RES (32)..(33): Xaa is C or S
GEVVMEPIKGYVVKDYEDFYLMNIPSLETPVXXAKPI

SEQ ID NO: 41479 - protein, 29 aa, Artificial Sequence
  Cyclic GFR-binding peptide
  MOD_RES (27)..(28): Xaa is C or S
EPIKGYTPVGMDDFYLVNIPSLKTPVXXA

SEQ ID NO: 41480 - protein, 31 aa, Artificial Sequence
  Cyclic GFR-binding peptide
  MOD_RES (30)..(31): Xaa is C or S
EVIMPIKGYLLVRGNDFYLMNIPSTKVPAXX

SEQ ID NO: 41481 - protein, 35 aa, Artificial Sequence
  Cyclic GFR-binding peptide
  MOD_RES (30)..(31): Xaa is C or S
VVMDPIKGYVVNNASDFYLINIPSLRTPVXXTPPT

SEQ ID NO: 41482 - protein, 26 aa, Artificial Sequence
  Cyclic GFR-binding peptide
VVMDPIKGYVVKENEDFYLMNIPSLE

SEQ ID NO: 41483 - protein, 37 aa, Artificial Sequence
  Cyclic GFR-binding peptide
  MOD_RES (2)..(34)..(35): Xaa is C or S
GXAEVVMDPIKGYVVNNAADFYLINIPSLRAPVXXSA

SEQ ID NO: 41484 - protein, 28 aa, Artificial Sequence
  Cyclic GFR-binding peptide
  MOD_RES (1)..(1): Xaa is C or S
XARVVMNPIKGYIVNSSDDFYLVNIPSL

SEQ ID NO: 41485 - protein, 39 aa, Artificial Sequence
  Cyclic GFR-binding peptide
  MOD_RES (2)..(4)..(36)..(37): Xaa is C or S
HXGXSRVVMNPIKGYIVNSSDDFYLVNIPSLKTPAXXPK

SEQ ID NO: 41486 - protein, 39 aa, Artificial Sequence
  Cyclic GFR-binding peptide
  MOD_RES (1)..(33)..(34): Xaa is C or S
XAEVVMDPIKGYVVNNAADFYLINIPSLRAPVXXSAPAA

SEQ ID NO: 41487 - protein, 42 aa, Artificial Sequence
  Cyclic GFR-binding peptide
  MOD_RES (1)..(3)..(36)..(37): Xaa is C or S
XGXEAVSMGEPIKGYTPVGMDDFYLVNIPSLKTPVXXAKGVK

SEQ ID NO: 41488 - protein, 39 aa, Artificial Sequence
  Cyclic GFR-binding peptide
  MOD_RES (1)..(3)..(35)..(36): Xaa is C or S
XGXSRVVMNPIKGYIVNSSDDFYLVNIPSLKTPAXXPKP

SEQ ID NO: 41489 - protein, 26 aa, Artificial Sequence
  Cyclic GFR-binding peptide
AEVVMDPIKGYVVNNAADFYLINIPS

SEQ ID NO: 41490 - protein, 40 aa, Artificial Sequence
  Cyclic GFR-binding peptide
  MOD_RES (2)..(34)..(35): Xaa is C or S
GXAEVVMDPIKGYVVNNAADFYLINIPSLRAPVXXSAPAA

SEQ ID NO: 41491 - protein, 28 aa, Artificial Sequence
  Cyclic GFR-binding peptide
  MOD_RES (28)..(28): Xaa is C or S
MNPIKGYIVNSSDDFYLVNIPSLKTPAX

SEQ ID NO: 41492 - protein, 31 aa, Artificial Sequence
  Cyclic GFR-binding peptide
  MOD_RES (1)..(3): Xaa is C or S
XGXEAVSMGEPIKGYTPVGMDDFYLVNIPSL

SEQ ID NO: 41493 - protein, 23 aa, Artificial Sequence
  Cyclic GFR-binding peptide
IMPIKGYLLVRGNDFYLMNIPST

SEQ ID NO: 41494 - protein, 28 aa, Artificial Sequence
  Cyclic GFR-binding peptide
  MOD_RES (1)..(1): Xaa is C or S
XAKVVMNPIKGYIVNNSSDFYLVNIPSL

SEQ ID NO: 41495 - protein, 35 aa, Artificial Sequence
  Cyclic GFR-binding peptide
  MOD_RES (30)..(31): Xaa is C or S
VVMEPIKGYVVKDYEDFYLMNIPSLETPVXXAKPI

SEQ ID NO: 41496 - protein, 26 aa, Artificial Sequence
  Cyclic GFR-binding peptide
MGEPIKGYTPVGMDDFYLVNIPSLKT

SEQ ID NO: 41497 - protein, 39 aa, Artificial Sequence
  Cyclic GFR-binding peptide
  MOD_RES (2)..(34)..(35): Xaa is C or S
GXAKVVMNPIKGYIVNNSSDFYLVNIPSLKTPAXXAKPV

SEQ ID NO: 41498 - protein, 24 aa, Artificial Sequence
  Cyclic GFR-binding peptide
VMDPIKGYVVNNAADFYLINIPSL

SEQ ID NO: 41499 - protein, 34 aa, Artificial Sequence
  Cyclic GFR-binding peptide
  MOD_RES (1)..(33)..(34): Xaa is C or S
XSRVVMNPIKGYIVNSSDDFYLVNIPSLKTPAXX

SEQ ID NO: 41500 - protein, 37 aa, Artificial Sequence
  Cyclic GFR-binding peptide
  MOD_RES (1)..(33)..(34): Xaa is C or S
XAKVVMNPIKGYIVNNSSDFYLVNIPSLKTPAXXAKP

SEQ ID NO: 41501 - protein, 38 aa, Artificial Sequence
  Cyclic GFR-binding peptide
  MOD_RES (2)..(35)..(36): Xaa is C or S
GXEAVSMGEPIKGYTPVGMDDFYLVNIPSLKTPVXXAK

SEQ ID NO: 41502 - protein, 32 aa, Artificial Sequence
  Cyclic GFR-binding peptide
  MOD_RES (2)..(2): Xaa is C or S
GXSRVVMNPIKGYIVNSSDDFYLVNIPSLKTP

SEQ ID NO: 41503 - protein, 29 aa, Artificial Sequence
  Cyclic GFR-binding peptide
EVVMDPIKGYVVNNASDFYLINIPSLRTP

SEQ ID NO: 41504 - protein, 38 aa, Artificial Sequence
  Cyclic GFR-binding peptide
  MOD_RES (1)..(3)..(35)..(36): Xaa is C or S
XGXSRVVMNPIKGYIVNSSDDFYLVNIPSLKTPAXXPK

SEQ ID NO: 41505 - protein, 28 aa, Artificial Sequence
  Cyclic GFR-binding peptide
  MOD_RES (28)..(28): Xaa is C or S
MDPIKGYVVNNASDFYLINIPSLRTPVX

SEQ ID NO: 41506 - protein, 31 aa, Artificial Sequence
  Cyclic GFR-binding peptide
GEVVMDPIKGYVVKENEDFYLMNIPSLETPV

SEQ ID NO: 41507 - protein, 33 aa, Artificial Sequence
  Cyclic GFR-binding peptide
  MOD_RES (30)..(31): Xaa is C or S
VVMDPIKGYVVNNASDFYLINIPSLRTPVXXTP

SEQ ID NO: 41508 - protein, 32 aa, Artificial Sequence
  Cyclic GFR-binding peptide
  MOD_RES (2)..(4): Xaa is C or S
LXGXEEVIMPIKGYLLVRGNDFYLMNIPSTKV

SEQ ID NO: 41509 - protein, 33 aa, Artificial Sequence
  Cyclic GFR-binding peptide
  MOD_RES (1)..(33): Xaa is C or S
XAEVVMDPIKGYVVNNAADFYLINIPSLRAPVX

SEQ ID NO: 41510 - protein, 35 aa, Artificial Sequence
  Cyclic GFR-binding peptide
  MOD_RES (32)..(32): Xaa is C or S
SRVVMNPIKGYIVNSSDDFYLVNIPSLKTPAXTPK

SEQ ID NO: 41511 - protein, 40 aa, Artificial Sequence
  Cyclic GFR-binding peptide
  MOD_RES (2)..(4)..(36)..(37): Xaa is C or S
HXGXSRVVMNPIKGYIVNSSDDFYLVNIPSLKTPAXXPKP

SEQ ID NO: 41512 - protein, 21 aa, Artificial Sequence
  Cyclic GFR-binding peptide
GPIKGYYTVVGKDFYLINIPS

SEQ ID NO: 41513 - protein, 28 aa, Artificial Sequence
  Cyclic GFR-binding peptide
VMDPIKGYVVNNASDFYLINIPSLRTPV

SEQ ID NO: 41514 - protein, 24 aa, Artificial Sequence
  Cyclic GFR-binding peptide
MDPIKGYVVKENEDFYLMNIPSLE

SEQ ID NO: 41515 - protein, 26 aa, Artificial Sequence
  Cyclic GFR-binding peptide
ESVAMGPIKGYYTVVGKDFYLINIPS

SEQ ID NO: 41516 - protein, 26 aa, Artificial Sequence
  Cyclic GFR-binding peptide
  MOD_RES (26)..(26): Xaa is C or S
PIKGYVVKDYEDFYLMNIPSLETPVX

SEQ ID NO: 41517 - protein, 33 aa, Artificial Sequence
  Cyclic GFR-binding peptide
  MOD_RES (29)..(30): Xaa is C or S
MGEPIKGYTPVGMDDFYLVNIPSLKTPVXXAKG

SEQ ID NO: 41518 - protein, 26 aa, Artificial Sequence
  Cyclic GFR-binding peptide
MGPIKGYYTVVGKDFYLINIPSLKTP

SEQ ID NO: 41519 - protein, 28 aa, Artificial Sequence
  Cyclic GFR-binding peptide
RVVMNPIKGYIVNSSDDFYLVNIPSLKT

SEQ ID NO: 41520 - protein, 28 aa, Artificial Sequence
  Cyclic GFR-binding peptide
  MOD_RES (2)..(2): Xaa is C or S
GXARVVMNPIKGYIVNSSDDFYLVNIPS

SEQ ID NO: 41521 - protein, 26 aa, Artificial Sequence
  Cyclic GFR-binding peptide
SEVVMDPIKGYVVNNASDFYLINIPS

SEQ ID NO: 41522 - protein, 34 aa, Artificial Sequence
  Cyclic GFR-binding peptide
  MOD_RES (2)..(4): Xaa is C or S
RXGXEAVSMGEPIKGYTPVGMDDFYLVNIPSLKT

SEQ ID NO: 41523 - protein, 23 aa, Artificial Sequence
  Cyclic GFR-binding peptide
PIKGYYTVVGKDFYLINIPSLKT

SEQ ID NO: 41524 - protein, 29 aa, Artificial Sequence
  Cyclic GFR-binding peptide
  MOD_RES (29)..(29): Xaa is C or S
VMDPIKGYVVKENEDFYLMNIPSLETPVX

SEQ ID NO: 41525 - protein, 30 aa, Artificial Sequence
  Cyclic GFR-binding peptide
  MOD_RES (28)..(29): Xaa is C or S
IMPIKGYLLVRGNDFYLMNIPSTKVPAXXT

SEQ ID NO: 41526 - protein, 33 aa, Artificial Sequence
  Cyclic GFR-binding peptide
  MOD_RES (1)..(3): Xaa is C or S
XGXAKVVMNPIKGYIVNNSSDFYLVNIPSLKTP

SEQ ID NO: 41527 - protein, 24 aa, Artificial Sequence
  Cyclic GFR-binding peptide
MNPIKGYIVNSSDDFYLVNIPSLK

SEQ ID NO: 41528 - protein, 30 aa, Artificial Sequence
  Cyclic GFR-binding peptide
  MOD_RES (1)..(1): Xaa is C or S
XGEVVMDPIKGYVVKENEDFYLMNIPSLET

SEQ ID NO: 41529 - protein, 25 aa, Artificial Sequence
  Cyclic GFR-binding peptide
NPIKGYIVNNSSDFYLVNIPSLKTP

SEQ ID NO: 41530 - protein, 30 aa, Artificial Sequence
  Cyclic GFR-binding peptide
  MOD_RES (29)..(29): Xaa is C or S
VMNPIKGYIVNSSDDFYLVNIPSLKTPAXT

SEQ ID NO: 41531 - protein, 33 aa, Artificial Sequence
  Cyclic GFR-binding peptide
  MOD_RES (32)..(33): Xaa is C or S
AVSMGEPIKGYTPVGMDDFYLVNIPSLKTPVXX

SEQ ID NO: 41532 - protein, 36 aa, Artificial Sequence
  Cyclic GFR-binding peptide
  MOD_RES (32)..(33): Xaa is C or S
ESVAMGPIKGYYTVVGKDFYLINIPSLKTPVXXAKS

SEQ ID NO: 41533 - protein, 28 aa, Artificial Sequence
  Cyclic GFR-binding peptide
VSMGEPIKGYTPVGMDDFYLVNIPSLKT

SEQ ID NO: 41534 - protein, 25 aa, Artificial Sequence
  Cyclic GFR-binding peptide
DPIKGYVVNNAADFYLINIPSLRAP

SEQ ID NO: 41535 - protein, 42 aa, Artificial Sequence
  Cyclic GFR-binding peptide
  MOD_RES (2)..(4)..(36)..(37): Xaa is C or S
HXGXSRVVMNPIKGYIVNSSDDFYLVNIPSLKTPAXXPKPVH

SEQ ID NO: 41536 - protein, 28 aa, Artificial Sequence
  Cyclic GFR-binding peptide
AKVVMNPIKGYIVNNSSDFYLVNIPSLK

SEQ ID NO: 41537 - protein, 27 aa, Artificial Sequence
  Cyclic GFR-binding peptide
  MOD_RES (27)..(27): Xaa is C or S
NPIKGYIVNNSSDFYLVNIPSLKTPAX

SEQ ID NO: 41538 - protein, 35 aa, Artificial Sequence
  Cyclic GFR-binding peptide
  MOD_RES (1)..(3)..(35): Xaa is C or S
XGXSRVVMNPIKGYIVNSSDDFYLVNIPSLKTPAX

SEQ ID NO: 41539 - protein, 36 aa, Artificial Sequence
  Cyclic GFR-binding peptide
  MOD_RES (2)..(35)..(36): Xaa is C or S
GXEAVSMGEPIKGYTPVGMDDFYLVNIPSLKTPVXX

SEQ ID NO: 41540 - protein, 30 aa, Artificial Sequence
  Cyclic GFR-binding peptide
  MOD_RES (2)..(2): Xaa is C or S
GXEAVSMGEPIKGYTPVGMDDFYLVNIPSL

SEQ ID NO: 41541 - protein, 22 aa, Artificial Sequence
  Cyclic GFR-binding peptide
PIKGYIVNNSSDFYLVNIPSLK

SEQ ID NO: 41542 - protein, 26 aa, Artificial Sequence
  Cyclic GFR-binding peptide
VMEPIKGYVVKDYEDFYLMNIPSLET

SEQ ID NO: 41543 - protein, 37 aa, Artificial Sequence
  Cyclic GFR-binding peptide
  MOD_RES (1)..(33)..(34): Xaa is C or S
XGEVVMEPIKGYVVKDYEDFYLMNIPSLETPVXXAKP

SEQ ID NO: 41544 - protein, 37 aa, Artificial Sequence
  Cyclic GFR-binding peptide
  MOD_RES (1)..(33)..(34): Xaa is C or S
XESVAMGPIKGYYTVVGKDFYLINIPSLKTPVXXAKS

SEQ ID NO: 41545 - protein, 29 aa, Artificial Sequence
  Cyclic GFR-binding peptide
  MOD_RES (1)..(3): Xaa is C or S
XGXEEVIMPIKGYLLVRGNDFYLMNIPST

SEQ ID NO: 41546 - protein, 33 aa, Artificial Sequence
  Cyclic GFR-binding peptide
  MOD_RES (27)..(27): Xaa is C or S
NPIKGYIVNSSDDFYLVNIPSLKTPAXTPKTVH

SEQ ID NO: 41547 - protein, 32 aa, Artificial Sequence
  Cyclic GFR-binding peptide
  MOD_RES (1)..(1): Xaa is C or S
XESVAMGPIKGYYTVVGKDFYLINIPSLKTPV

SEQ ID NO: 41548 - protein, 33 aa, Artificial Sequence
  Cyclic GFR-binding peptide
  MOD_RES (2)..(2): Xaa is C or S
GXARVVMNPIKGYIVNSSDDFYLVNIPSLQTPA

SEQ ID NO: 41549 - protein, 21 aa, Artificial Sequence
  Cyclic GFR-binding peptide
PIKGYIVNNSSDFYLVNIPSL

SEQ ID NO: 41550 - protein, 31 aa, Artificial Sequence
  Cyclic GFR-binding peptide
  MOD_RES (31)..(31): Xaa is C or S
EVVMEPIKGYVVKDYEDFYLMNIPSLETPVX

SEQ ID NO: 41551 - protein, 31 aa, Artificial Sequence
  Cyclic GFR-binding peptide
  MOD_RES (26)..(27): Xaa is C or S
PIKGYVVNNAADFYLINIPSLRAPVXXSAPA

SEQ ID NO: 41552 - protein, 30 aa, Artificial Sequence
  Cyclic GFR-binding peptide
  MOD_RES (28)..(29): Xaa is C or S
MDPIKGYVVNNASDFYLINIPSLRTPVXXT

SEQ ID NO: 41553 - protein, 30 aa, Artificial Sequence
  Cyclic GFR-binding peptide
  MOD_RES (29)..(30): Xaa is C or S
VMDPIKGYVVNNASDFYLINIPSLRTPVXX

SEQ ID NO: 41554 - protein, 34 aa, Artificial Sequence
  Cyclic GFR-binding peptide
  MOD_RES (28)..(29): Xaa is C or S
GEPIKGYTPVGMDDFYLVNIPSLKTPVXXAKGVK

SEQ ID NO: 41555 - protein, 24 aa, Artificial Sequence
  Cyclic GFR-binding peptide
MDPIKGYVVNNAADFYLINIPSLR

SEQ ID NO: 41556 - protein, 39 aa, Artificial Sequence
  Cyclic GFR-binding peptide
  MOD_RES (2)..(34)..(35): Xaa is C or S
GXGEVVMDPIKGYVVKENEDFYLMNIPSLETPVXXAKPI

SEQ ID NO: 41557 - protein, 31 aa, Artificial Sequence
  Cyclic GFR-binding peptide
  MOD_RES (30)..(31): Xaa is C or S
VVMDPIKGYVVNNASDFYLINIPSLRTPVXX

SEQ ID NO: 41558 - protein, 33 aa, Artificial Sequence
  Cyclic GFR-binding peptide
  MOD_RES (2)..(2): Xaa is C or S
GXESVAMGPIKGYYTVVGKDFYLINIPSLKTPV

SEQ ID NO: 41559 - protein, 32 aa, Artificial Sequence
  Cyclic GFR-binding peptide
  MOD_RES (28)..(29): Xaa is C or S
MDPIKGYVVKENEDFYLMNIPSLETPVXXAKP

SEQ ID NO: 41560 - protein, 31 aa, Artificial Sequence
  Cyclic GFR-binding peptide
  MOD_RES (29)..(30): Xaa is C or S
VIMPIKGYLLVRGNDFYLMNIPSTKVPAXXT

SEQ ID NO: 41561 - protein, 27 aa, Artificial Sequence
  Cyclic GFR-binding peptide
AKVVMNPIKGYIVNNSSDFYLVNIPSL

SEQ ID NO: 41562 - protein, 42 aa, Artificial Sequence
  Cyclic GFR-binding peptide
  MOD_RES (2)..(4)..(36)..(37): Xaa is C or S
RXGXGEVVMDPIKGYVVKENEDFYLMNIPSLETPVXXAKPIK

SEQ ID NO: 41563 - protein, 35 aa, Artificial Sequence
  Cyclic GFR-binding peptide
  MOD_RES (32)..(33): Xaa is C or S
SRVVMNPIKGYIVNSSDDFYLVNIPSLKTPAXXPK

SEQ ID NO: 41564 - protein, 29 aa, Artificial Sequence
  Cyclic GFR-binding peptide
SVAMGPIKGYYTVVGKDFYLINIPSLKTP

SEQ ID NO: 41565 - protein, 38 aa, Artificial Sequence
  Cyclic GFR-binding peptide
  MOD_RES (1)..(3)..(35): Xaa is C or S
XGXSRVVMNPIKGYIVNSSDDFYLVNIPSLKTPAXTPK

SEQ ID NO: 41566 - protein, 32 aa, Artificial Sequence
  Cyclic GFR-binding peptide
  MOD_RES (1)..(3): Xaa is C or S
XGXSRVVMNPIKGYIVNSSDDFYLVNIPSLKT

SEQ ID NO: 41567 - protein, 33 aa, Artificial Sequence
  Cyclic GFR-binding peptide
  MOD_RES (32)..(33): Xaa is C or S
SEVVMDPIKGYVVNNASDFYLINIPSLRTPVXX

SEQ ID NO: 41568 - protein, 38 aa, Artificial Sequence
  Cyclic GFR-binding peptide
  MOD_RES (32)..(33): Xaa is C or S
SEVVMDPIKGYVVNNASDFYLINIPSLRTPVXXTPPTS

SEQ ID NO: 41569 - protein, 33 aa, Artificial Sequence
  Cyclic GFR-binding peptide
  MOD_RES (28)..(29): Xaa is C or S
MNPIKGYIVNNSSDFYLVNIPSLKTPAXXAKPV

SEQ ID NO: 41570 - protein, 31 aa, Artificial Sequence
  Cyclic GFR-binding peptide
  MOD_RES (2)..(2): Xaa is C or S
GXSEVVMDPIKGYVVNNASDFYLINIPSLRT

SEQ ID NO: 41571 - protein, 20 aa, Artificial Sequence
  Cyclic GFR-binding peptide
PIKGYIVNNSSDFYLVNIPS

SEQ ID NO: 41572 - protein, 39 aa, Artificial Sequence
  Cyclic GFR-binding peptide
  MOD_RES (1)..(3)..(35)..(36): Xaa is C or S
XGXARVVMNPIKGYIVNSSDDFYLVNIPSLQTPAXXPKP

SEQ ID NO: 41573 - protein, 31 aa, Artificial Sequence
  Cyclic GFR-binding peptide
  MOD_RES (31)..(31): Xaa is C or S
EVVMDPIKGYVVNNAADFYLINIPSLRAPVX

SEQ ID NO: 41574 - protein, 38 aa, Artificial Sequence
  Cyclic GFR-binding peptide
  MOD_RES (1)..(33)..(34): Xaa is C or S
XAKVVMNPIKGYIVNNSSDFYLVNIPSLKTPAXXAKPV

SEQ ID NO: 41575 - protein, 38 aa, Artificial Sequence
  Cyclic GFR-binding peptide
  MOD_RES (2)..(4)..(37)..(38): Xaa is C or S
RXGXEAVSMGEPIKGYTPVGMDDFYLVNIPSLKTPVXX

SEQ ID NO: 41576 - protein, 37 aa, Artificial Sequence
  Cyclic GFR-binding peptide
  MOD_RES (2)..(34)..(35): Xaa is C or S
GXSRVVMNPIKGYIVNSSDDFYLVNIPSLKTPAXXPK

SEQ ID NO: 41577 - protein, 32 aa, Artificial Sequence
  Cyclic GFR-binding peptide
  MOD_RES (29)..(30): Xaa is C or S
VMNPIKGYIVNNSSDFYLVNIPSLKTPAXXAK

SEQ ID NO: 41578 - protein, 30 aa, Artificial Sequence
  Cyclic GFR-binding peptide
  MOD_RES (1)..(1): Xaa is C or S
XGEVVMEPIKGYVVKDYEDFYLMNIPSLET

SEQ ID NO: 41579 - protein, 30 aa, Artificial Sequence
  Cyclic GFR-binding peptide
EVVMDPIKGYVVNNAADFYLINIPSLRAPV

SEQ ID NO: 41580 - protein, 31 aa, Artificial Sequence
  Cyclic GFR-binding peptide
  MOD_RES (1)..(3): Xaa is C or S
XGXAEVVMDPIKGYVVNNAADFYLINIPSLR

SEQ ID NO: 41581 - protein, 33 aa, Artificial Sequence
  Cyclic GFR-binding peptide
  MOD_RES (2)..(4): Xaa is C or S
RXGXGEVVMEPIKGYVVKDYEDFYLMNIPSLET

SEQ ID NO: 41582 - protein, 34 aa, Artificial Sequence
  Cyclic GFR-binding peptide
  MOD_RES (2)..(4): Xaa is C or S
HXGXSRVVMNPIKGYIVNSSDDFYLVNIPSLKTP

SEQ ID NO: 41583 - protein, 28 aa, Artificial Sequence
  Cyclic GFR-binding peptide
VMNPIKGYIVNNSSDFYLVNIPSLKTPA

SEQ ID NO: 41584 - protein, 29 aa, Artificial Sequence
  Cyclic GFR-binding peptide
  MOD_RES (2)..(2): Xaa is C or S
GXGEVVMDPIKGYVVKENEDFYLMNIPSL

SEQ ID NO: 41585 - protein, 31 aa, Artificial Sequence
  Cyclic GFR-binding peptide
  MOD_RES (31)..(31): Xaa is C or S
EVVMDPIKGYVVKENEDFYLMNIPSLETPVX

SEQ ID NO: 41586 - protein, 39 aa, Artificial Sequence
  Cyclic GFR-binding peptide
  MOD_RES (2)..(33)..(34): Xaa is C or S
GXEEVIMPIKGYLLVRGNDFYLMNIPSTKVPAXXTSPVR

SEQ ID NO: 41587 - protein, 31 aa, Artificial Sequence
  Cyclic GFR-binding peptide
  MOD_RES (31)..(31): Xaa is C or S
VSMGEPIKGYTPVGMDDFYLVNIPSLKTPVX

SEQ ID NO: 41588 - protein, 35 aa, Artificial Sequence
  Cyclic GFR-binding peptide
  MOD_RES (1)..(3)..(35): Xaa is C or S
XGXSEVVMDPIKGYVVNNASDFYLINIPSLRTPVX

SEQ ID NO: 41589 - protein, 29 aa, Artificial Sequence
  Cyclic GFR-binding peptide
  MOD_RES (28)..(29): Xaa is C or S
MDPIKGYVVNNAADFYLINIPSLRAPVXX

SEQ ID NO: 41590 - protein, 34 aa, Artificial Sequence
  Cyclic GFR-binding peptide
  MOD_RES (28)..(29): Xaa is C or S
IMPIKGYLLVRGNDFYLMNIPSTKVPAXXTSPVR

SEQ ID NO: 41591 - protein, 33 aa, Artificial Sequence
  Cyclic GFR-binding peptide
  MOD_RES (2)..(4): Xaa is C or S
RXGXSEVVMDPIKGYVVNNASDFYLINIPSLRT

SEQ ID NO: 41592 - protein, 30 aa, Artificial Sequence
  Cyclic GFR-binding peptide
  MOD_RES (27)..(28): Xaa is C or S
DPIKGYVVNNAADFYLINIPSLRAPVXXSA

SEQ ID NO: 41593 - protein, 32 aa, Artificial Sequence
  Cyclic GFR-binding peptide
  MOD_RES (30)..(31): Xaa is C or S
VVMDPIKGYVVNNASDFYLINIPSLRTPVXXT

SEQ ID NO: 41594 - protein, 32 aa, Artificial Sequence
  Cyclic GFR-binding peptide
  MOD_RES (2)..(2): Xaa is C or S
GXAEVVMDPIKGYVVNNAADFYLINIPSLRAP

SEQ ID NO: 41595 - protein, 34 aa, Artificial Sequence
  Cyclic GFR-binding peptide
  MOD_RES (31)..(32): Xaa is C or S
EVVMDPIKGYVVNNAADFYLINIPSLRAPVXXSA

SEQ ID NO: 41596 - protein, 30 aa, Artificial Sequence
  Cyclic GFR-binding peptide
  MOD_RES (1)..(1): Xaa is C or S
XARVVMNPIKGYIVNSSDDFYLVNIPSLQT

SEQ ID NO: 41597 - protein, 30 aa, Artificial Sequence
  Cyclic GFR-binding peptide
  MOD_RES (26)..(27): Xaa is C or S
PIKGYVVNNAADFYLINIPSLRAPVXXSAP

SEQ ID NO: 41598 - protein, 24 aa, Artificial Sequence
  Cyclic GFR-binding peptide
DPIKGYVVNNASDFYLINIPSLRT

SEQ ID NO: 41599 - protein, 32 aa, Artificial Sequence
  Cyclic GFR-binding peptide
  MOD_RES (27)..(28): Xaa is C or S
NPIKGYIVNNSSDFYLVNIPSLKTPAXXAKPV

SEQ ID NO: 41600 - protein, 34 aa, Artificial Sequence
  Cyclic GFR-binding peptide
  MOD_RES (31)..(31): Xaa is C or S
RVVMNPIKGYIVNSSDDFYLVNIPSLKTPAXTPK

SEQ ID NO: 41601 - protein, 36 aa, Artificial Sequence
  Cyclic GFR-binding peptide
  MOD_RES (1)..(33)..(34): Xaa is C or S
XAKVVMNPIKGYIVNNSSDFYLVNIPSLKTPAXXAK

SEQ ID NO: 41602 - protein, 34 aa, Artificial Sequence
  Cyclic GFR-binding peptide
  MOD_RES (2)..(4): Xaa is C or S
RXGXESVAMGPIKGYYTVVGKDFYLINIPSLKTP

SEQ ID NO: 41603 - protein, 32 aa, Artificial Sequence
  Cyclic GFR-binding peptide
  MOD_RES (28)..(29): Xaa is C or S
MNPIKGYIVNSSDDFYLVNIPSLQTPAXXPKP

SEQ ID NO: 41604 - protein, 32 aa, Artificial Sequence
  Cyclic GFR-binding peptide
  MOD_RES (2)..(4): Xaa is C or S
RXGXSEVVMDPIKGYVVNNASDFYLINIPSLR

SEQ ID NO: 41605 - protein, 34 aa, Artificial Sequence
  Cyclic GFR-binding peptide
  MOD_RES (30)..(31): Xaa is C or S
VVMNPIKGYIVNSSDDFYLVNIPSLQTPAXXPKP

SEQ ID NO: 41606 - protein, 29 aa, Artificial Sequence
  Cyclic GFR-binding peptide
  MOD_RES (1)..(1): Xaa is C or S
XSRVVMNPIKGYIVNSSDDFYLVNIPSLK

SEQ ID NO: 41607 - protein, 31 aa, Artificial Sequence
  Cyclic GFR-binding peptide
  MOD_RES (2)..(4): Xaa is C or S
RXGXGEVVMEPIKGYVVKDYEDFYLMNIPSL

SEQ ID NO: 41608 - protein, 28 aa, Artificial Sequence
  Cyclic GFR-binding peptide
  MOD_RES (26)..(27): Xaa is C or S
PIKGYVVKENEDFYLMNIPSLETPVXXA

SEQ ID NO: 41609 - protein, 24 aa, Artificial Sequence
  Cyclic GFR-binding peptide
VVMNPIKGYIVNNSSDFYLVNIPS

SEQ ID NO: 41610 - protein, 36 aa, Artificial Sequence
  Cyclic GFR-binding peptide
  MOD_RES (32)..(33): Xaa is C or S
GEVVMEPIKGYVVKDYEDFYLMNIPSLETPVXXAKP

SEQ ID NO: 41611 - protein, 26 aa, Artificial Sequence
  Cyclic GFR-binding peptide
GEVVMEPIKGYVVKDYEDFYLMNIPS

SEQ ID NO: 41612 - protein, 36 aa, Artificial Sequence
  Cyclic GFR-binding peptide
  MOD_RES (1)..(33)..(34): Xaa is C or S
XSRVVMNPIKGYIVNSSDDFYLVNIPSLKTPAXXPK

SEQ ID NO: 41613 - protein, 29 aa, Artificial Sequence
  Cyclic GFR-binding peptide
  MOD_RES (27)..(28): Xaa is C or S
NPIKGYIVNSSDDFYLVNIPSLQTPAXXP

SEQ ID NO: 41614 - protein, 28 aa, Artificial Sequence
  Cyclic GFR-binding peptide
VMDPIKGYVVKENEDFYLMNIPSLETPV

SEQ ID NO: 41615 - protein, 30 aa, Artificial Sequence
  Cyclic GFR-binding peptide
AKVVMNPIKGYIVNNSSDFYLVNIPSLKTP

SEQ ID NO: 41616 - protein, 29 aa, Artificial Sequence
  Cyclic GFR-binding peptide
  MOD_RES (1)..(1): Xaa is C or S
XAEVVMDPIKGYVVNNAADFYLINIPSLR

SEQ ID NO: 41617 - protein, 37 aa, Artificial Sequence
  Cyclic GFR-binding peptide
  MOD_RES (31)..(31): Xaa is C or S
RVVMNPIKGYIVNSSDDFYLVNIPSLKTPAXTPKTVH

SEQ ID NO: 41618 - protein, 27 aa, Artificial Sequence
  Cyclic GFR-binding peptide
VMDPIKGYVVNNASDFYLINIPSLRTP

SEQ ID NO: 41619 - protein, 38 aa, Artificial Sequence
  Cyclic GFR-binding peptide
  MOD_RES (1)..(33)..(34): Xaa is C or S
XGEVVMDPIKGYVVKENEDFYLMNIPSLETPVXXAKPI

SEQ ID NO: 41620 - protein, 30 aa, Artificial Sequence
  Cyclic GFR-binding peptide
  MOD_RES (29)..(30): Xaa is C or S
VMNPIKGYIVNSSDDFYLVNIPSLKTPAXX

SEQ ID NO: 41621 - protein, 23 aa, Artificial Sequence
  Cyclic GFR-binding peptide
NPIKGYIVNSSDDFYLVNIPSLQ

SEQ ID NO: 41622 - protein, 29 aa, Artificial Sequence
  Cyclic GFR-binding peptide
VVMNPIKGYIVNSSDDFYLVNIPSLQTPA

SEQ ID NO: 41623 - protein, 38 aa, Artificial Sequence
  Cyclic GFR-binding peptide
  MOD_RES (2)..(4)..(36)..(37): Xaa is C or S
HXGXARVVMNPIKGYIVNSSDDFYLVNIPSLQTPAXXP

SEQ ID NO: 41624 - protein, 41 aa, Artificial Sequence
  Cyclic GFR-binding peptide
  MOD_RES (2)..(4)..(36)..(37): Xaa is C or S
HXGXARVVMNPIKGYIVNSSDDFYLVNIPSLQTPAXXPKPV

SEQ ID NO: 41625 - protein, 25 aa, Artificial Sequence
  Cyclic GFR-binding peptide
PIKGYVVNNASDFYLINIPSLRTPV

SEQ ID NO: 41626 - protein, 35 aa, Artificial Sequence
  Cyclic GFR-binding peptide
  MOD_RES (29)..(30): Xaa is C or S
VMEPIKGYVVKDYEDFYLMNIPSLETPVXXAKPIS

SEQ ID NO: 41627 - protein, 35 aa, Artificial Sequence
  Cyclic GFR-binding peptide
  MOD_RES (2)..(34)..(35): Xaa is C or S
GXGEVVMEPIKGYVVKDYEDFYLMNIPSLETPVXX

SEQ ID NO: 41628 - protein, 31 aa, Artificial Sequence
  Cyclic GFR-binding peptide
  MOD_RES (1)..(1): Xaa is C or S
XSEVVMDPIKGYVVNNASDFYLINIPSLRTP

SEQ ID NO: 41629 - protein, 21 aa, Artificial Sequence
  Cyclic GFR-binding peptide
PIKGYYTVVGKDFYLINIPSL

SEQ ID NO: 41630 - protein, 32 aa, Artificial Sequence
  Cyclic GFR-binding peptide
  MOD_RES (28)..(28): Xaa is C or S
MNPIKGYIVNSSDDFYLVNIPSLKTPAXTPKT

SEQ ID NO: 41631 - protein, 33 aa, Artificial Sequence
  Cyclic GFR-binding peptide
  MOD_RES (1)..(1): Xaa is C or S
XEAVSMGEPIKGYTPVGMDDFYLVNIPSLKTPV

SEQ ID NO: 41632 - protein, 31 aa, Artificial Sequence
  Cyclic GFR-binding peptide
  MOD_RES (30)..(30): Xaa is C or S
VVMNPIKGYIVNSSDDFYLVNIPSLKTPAXT

SEQ ID NO: 41633 - protein, 29 aa, Artificial Sequence
  Cyclic GFR-binding peptide
  MOD_RES (26)..(27): Xaa is C or S
PIKGYIVNNSSDFYLVNIPSLKTPAXXAK

SEQ ID NO: 41634 - protein, 27 aa, Artificial Sequence
  Cyclic GFR-binding peptide
VMDPIKGYVVKENEDFYLMNIPSLETP

SEQ ID NO: 41635 - protein, 29 aa, Artificial Sequence
  Cyclic GFR-binding peptide
VVMDPIKGYVVKENEDFYLMNIPSLETPV

SEQ ID NO: 41636 - protein, 36 aa, Artificial Sequence
  Cyclic GFR-binding peptide
  MOD_RES (30)..(31): Xaa is C or S
VVMNPIKGYIVNSSDDFYLVNIPSLKTPAXXPKPVH

SEQ ID NO: 41637 - protein, 31 aa, Artificial Sequence
  Cyclic GFR-binding peptide
  MOD_RES (27)..(28): Xaa is C or S
EPIKGYVVKDYEDFYLMNIPSLETPVXXAKP

SEQ ID NO: 41638 - protein, 29 aa, Artificial Sequence
  Cyclic GFR-binding peptide
AKVVMNPIKGYIVNNSSDFYLVNIPSLKT

SEQ ID NO: 41639 - protein, 29 aa, Artificial Sequence
  Cyclic GFR-binding peptide
  MOD_RES (29)..(29): Xaa is C or S
VMDPIKGYVVNNAADFYLINIPSLRAPVX

SEQ ID NO: 41640 - protein, 31 aa, Artificial Sequence
  Cyclic GFR-binding peptide
  MOD_RES (28)..(29): Xaa is C or S
IMPIKGYLLVRGNDFYLMNIPSTKVPAXXTS

SEQ ID NO: 41641 - protein, 34 aa, Artificial Sequence
  Cyclic GFR-binding peptide
  MOD_RES (1)..(34): Xaa is C or S
XEAVSMGEPIKGYTPVGMDDFYLVNIPSLKTPVX

SEQ ID NO: 41642 - protein, 25 aa, Artificial Sequence
  Cyclic GFR-binding peptide
VVMDPIKGYVVKENEDFYLMNIPSL

SEQ ID NO: 41643 - protein, 24 aa, Artificial Sequence
  Cyclic GFR-binding peptide
GEPIKGYTPVGMDDFYLVNIPSLK

SEQ ID NO: 41644 - protein, 34 aa, Artificial Sequence
  Cyclic GFR-binding peptide
  MOD_RES (29)..(30): Xaa is C or S
VMEPIKGYVVKDYEDFYLMNIPSLETPVXXAKPI

SEQ ID NO: 41645 - protein, 39 aa, Artificial Sequence
  Cyclic GFR-binding peptide
  MOD_RES (1)..(33)..(34): Xaa is C or S
XESVAMGPIKGYYTVVGKDFYLINIPSLKTPVXXAKSAK

SEQ ID NO: 41646 - protein, 22 aa, Artificial Sequence
  Cyclic GFR-binding peptide
PIKGYVVKENEDFYLMNIPSLE

SEQ ID NO: 41647 - protein, 32 aa, Artificial Sequence
  Cyclic GFR-binding peptide
  MOD_RES (26)..(27): Xaa is C or S
PIKGYTPVGMDDFYLVNIPSLKTPVXXAKGVK

SEQ ID NO: 41648 - protein, 38 aa, Artificial Sequence
  Cyclic GFR-binding peptide
  MOD_RES (32)..(33): Xaa is C or S
AVSMGEPIKGYTPVGMDDFYLVNIPSLKTPVXXAKGVK

SEQ ID NO: 41649 - protein, 33 aa, Artificial Sequence
  Cyclic GFR-binding peptide
  MOD_RES (2)..(2): Xaa is C or S
GXGEVVMDPIKGYVVKENEDFYLMNIPSLETPV

SEQ ID NO: 41650 - protein, 34 aa, Artificial Sequence
  Cyclic GFR-binding peptide
  MOD_RES (2)..(34): Xaa is C or S
GXGEVVMEPIKGYVVKDYEDFYLMNIPSLETPVX

SEQ ID NO: 41651 - protein, 30 aa, Artificial Sequence
  Cyclic GFR-binding peptide
  MOD_RES (2)..(2): Xaa is C or S
GXAEVVMDPIKGYVVNNAADFYLINIPSLR

SEQ ID NO: 41652 - protein, 23 aa, Artificial Sequence
  Cyclic GFR-binding peptide
PIKGYVVNNAADFYLINIPSLRA

SEQ ID NO: 41653 - protein, 27 aa, Artificial Sequence
  Cyclic GFR-binding peptide
  MOD_RES (1)..(1): Xaa is C or S
XAEVVMDPIKGYVVNNAADFYLINIPS

SEQ ID NO: 41654 - protein, 29 aa, Artificial Sequence
  Cyclic GFR-binding peptide
VVMNPIKGYIVNSSDDFYLVNIPSLKTPA

SEQ ID NO: 41655 - protein, 29 aa, Artificial Sequence
  Cyclic GFR-binding peptide
  MOD_RES (2)..(4): Xaa is C or S
LXGXEEVIMPIKGYLLVRGNDFYLMNIPS

SEQ ID NO: 41656 - protein, 30 aa, Artificial Sequence
  Cyclic GFR-binding peptide
  MOD_RES (2)..(4): Xaa is C or S
HXGXARVVMNPIKGYIVNSSDDFYLVNIPS

SEQ ID NO: 41657 - protein, 31 aa, Artificial Sequence
  Cyclic GFR-binding peptide
  MOD_RES (27)..(28): Xaa is C or S
MPIKGYLLVRGNDFYLMNIPSTKVPAXXTSP

SEQ ID NO: 41658 - protein, 33 aa, Artificial Sequence
  Cyclic GFR-binding peptide
  MOD_RES (27)..(28): Xaa is C or S
GPIKGYYTVVGKDFYLINIPSLKTPVXXAKSAK

SEQ ID NO: 41659 - protein, 33 aa, Artificial Sequence
  Cyclic GFR-binding peptide
  MOD_RES (28)..(29): Xaa is C or S
MDPIKGYVVNNASDFYLINIPSLRTPVXXTPPT

SEQ ID NO: 41660 - protein, 37 aa, Artificial Sequence
  Cyclic GFR-binding peptide
  MOD_RES (1)..(33)..(34): Xaa is C or S
XSEVVMDPIKGYVVNNASDFYLINIPSLRTPVXXTPP

SEQ ID NO: 41661 - protein, 26 aa, Artificial Sequence
  Cyclic GFR-binding peptide
  MOD_RES (26)..(26): Xaa is C or S
PIKGYVVNNAADFYLINIPSLRAPVX

SEQ ID NO: 41662 - protein, 31 aa, Artificial Sequence
  Cyclic GFR-binding peptide
  MOD_RES (30)..(31): Xaa is C or S
SMGEPIKGYTPVGMDDFYLVNIPSLKTPVXX

SEQ ID NO: 41663 - protein, 23 aa, Artificial Sequence
  Cyclic GFR-binding peptide
DPIKGYVVNNASDFYLINIPSLR

SEQ ID NO: 41664 - protein, 40 aa, Artificial Sequence
  Cyclic GFR-binding peptide
  MOD_RES (2)..(34)..(35): Xaa is C or S
GXSRVVMNPIKGYIVNSSDDFYLVNIPSLKTPAXXPKPVH

SEQ ID NO: 41665 - protein, 33 aa, Artificial Sequence
  Cyclic GFR-binding peptide
  MOD_RES (1)..(3): Xaa is C or S
XGXSEVVMDPIKGYVVNNASDFYLINIPSLRTP

SEQ ID NO: 41666 - protein, 34 aa, Artificial Sequence
  Cyclic GFR-binding peptide
  MOD_RES (32)..(33): Xaa is C or S
SRVVMNPIKGYIVNSSDDFYLVNIPSLKTPAXXP

SEQ ID NO: 41667 - protein, 37 aa, Artificial Sequence
  Cyclic GFR-binding peptide
  MOD_RES (32)..(32): Xaa is C or S
SRVVMNPIKGYIVNSSDDFYLVNIPSLKTPAXTPKTV

SEQ ID NO: 41668 - protein, 34 aa, Artificial Sequence
  Cyclic GFR-binding peptide
  MOD_RES (1)..(3): Xaa is C or S
XGXEAVSMGEPIKGYTPVGMDDFYLVNIPSLKTP

SEQ ID NO: 41669 - protein, 32 aa, Artificial Sequence
  Cyclic GFR-binding peptide
  MOD_RES (29)..(30): Xaa is C or S
VMNPIKGYIVNSSDDFYLVNIPSLKTPAXXPK

SEQ ID NO: 41670 - protein, 31 aa, Artificial Sequence
  Cyclic GFR-binding peptide
  MOD_RES (26)..(27): Xaa is C or S
PIKGYVVKDYEDFYLMNIPSLETPVXXAKPI

SEQ ID NO: 41671 - protein, 26 aa, Artificial Sequence
  Cyclic GFR-binding peptide
MNPIKGYIVNNSSDFYLVNIPSLKTP

SEQ ID NO: 41672 - protein, 30 aa, Artificial Sequence
  Cyclic GFR-binding peptide
  MOD_RES (28)..(28): Xaa is C or S
MNPIKGYIVNSSDDFYLVNIPSLKTPAXTP

SEQ ID NO: 41673 - protein, 35 aa, Artificial Sequence
  Cyclic GFR-binding peptide
  MOD_RES (29)..(30): Xaa is C or S
AMGPIKGYYTVVGKDFYLINIPSLKTPVXXAKSAK

SEQ ID NO: 41674 - protein, 25 aa, Artificial Sequence
  Cyclic GFR-binding peptide
PIKGYVVKENEDFYLMNIPSLETPV

SEQ ID NO: 41675 - protein, 30 aa, Artificial Sequence
  Cyclic GFR-binding peptide
  MOD_RES (30)..(30): Xaa is C or S
VVMNPIKGYIVNSSDDFYLVNIPSLQTPAX

SEQ ID NO: 41676 - protein, 32 aa, Artificial Sequence
  Cyclic GFR-binding peptide
  MOD_RES (29)..(30): Xaa is C or S
AMGPIKGYYTVVGKDFYLINIPSLKTPVXXAK

SEQ ID NO: 41677 - protein, 30 aa, Artificial Sequence
  Cyclic GFR-binding peptide
  MOD_RES (2)..(2): Xaa is C or S
GXARVVMNPIKGYIVNSSDDFYLVNIPSLQ

SEQ ID NO: 41678 - protein, 38 aa, Artificial Sequence
  Cyclic GFR-binding peptide
  MOD_RES (2)..(34)..(35): Xaa is C or S
GXSEVVMDPIKGYVVNNASDFYLINIPSLRTPVXXTPP

SEQ ID NO: 41679 - protein, 29 aa, Artificial Sequence
  Cyclic GFR-binding peptide
  MOD_RES (1)..(3): Xaa is C or S
XGXGEVVMEPIKGYVVKDYEDFYLMNIPS

SEQ ID NO: 41680 - protein, 30 aa, Artificial Sequence
  Cyclic GFR-binding peptide
  MOD_RES (1)..(1): Xaa is C or S
XAEVVMDPIKGYVVNNAADFYLINIPSLRA

SEQ ID NO: 41681 - protein, 31 aa, Artificial Sequence
  Cyclic GFR-binding peptide
ARVVMNPIKGYIVNSSDDFYLVNIPSLQTPA

SEQ ID NO: 41682 - protein, 33 aa, Artificial Sequence
  Cyclic GFR-binding peptide
  MOD_RES (29)..(30): Xaa is C or S
VMNPIKGYIVNNSSDFYLVNIPSLKTPAXXAKP

SEQ ID NO: 41683 - protein, 29 aa, Artificial Sequence
  Cyclic GFR-binding peptide
  MOD_RES (2)..(2): Xaa is C or S
GXAEVVMDPIKGYVVNNAADFYLINIPSL

SEQ ID NO: 41684 - protein, 39 aa, Artificial Sequence
  Cyclic GFR-binding peptide
  MOD_RES (1)..(33)..(34): Xaa is C or S
XSRVVMNPIKGYIVNSSDDFYLVNIPSLKTPAXXPKPVY

SEQ ID NO: 41685 - protein, 36 aa, Artificial Sequence
  Cyclic GFR-binding peptide
  MOD_RES (30)..(31): Xaa is C or S
VVMDPIKGYVVNNASDFYLINIPSLRTPVXXTPPTS

SEQ ID NO: 41686 - protein, 39 aa, Artificial Sequence
  Cyclic GFR-binding peptide
  MOD_RES (2)..(4)..(36)..(37): Xaa is C or S
RXGXSEVVMDPIKGYVVNNASDFYLINIPSLRTPVXXTP

SEQ ID NO: 41687 - protein, 31 aa, Artificial Sequence
  Cyclic GFR-binding peptide
AVSMGEPIKGYTPVGMDDFYLVNIPSLKTPV

SEQ ID NO: 41688 - protein, 27 aa, Artificial Sequence
  Cyclic GFR-binding peptide
  MOD_RES (27)..(27): Xaa is C or S
DPIKGYVVNNAADFYLINIPSLRAPVX

SEQ ID NO: 41689 - protein, 26 aa, Artificial Sequence
  Cyclic GFR-binding peptide
VVMDPIKGYVVNNASDFYLINIPSLR

SEQ ID NO: 41690 - protein, 25 aa, Artificial Sequence
  Cyclic GFR-binding peptide
DPIKGYVVNNASDFYLINIPSLRTP

SEQ ID NO: 41691 - protein, 34 aa, Artificial Sequence
  Cyclic GFR-binding peptide
  MOD_RES (28)..(29): Xaa is C or S
MEPIKGYVVKDYEDFYLMNIPSLETPVXXAKPIS

SEQ ID NO: 41692 - protein, 33 aa, Artificial Sequence
  Cyclic GFR-binding peptide
  MOD_RES (27)..(28): Xaa is C or S
MPIKGYLLVRGNDFYLMNIPSTKVPAXXTSPVR

SEQ ID NO: 41693 - protein, 26 aa, Artificial Sequence
  Cyclic GFR-binding peptide
GEVVMDPIKGYVVKENEDFYLMNIPS

SEQ ID NO: 41694 - protein, 32 aa, Artificial Sequence
  Cyclic GFR-binding peptide
  MOD_RES (29)..(30): Xaa is C or S
VMDPIKGYVVNNASDFYLINIPSLRTPVXXTP

SEQ ID NO: 41695 - protein, 24 aa, Artificial Sequence
  Cyclic GFR-binding peptide
PIKGYVVKENEDFYLMNIPSLETP

SEQ ID NO: 41696 - protein, 30 aa, Artificial Sequence
  Cyclic GFR-binding peptide
RVVMNPIKGYIVNSSDDFYLVNIPSLKTPA

SEQ ID NO: 41697 - protein, 23 aa, Artificial Sequence
  Cyclic GFR-binding peptide
GPIKGYYTVVGKDFYLINIPSLK

SEQ ID NO: 41698 - protein, 31 aa, Artificial Sequence
  Cyclic GFR-binding peptide
  MOD_RES (1)..(1): Xaa is C or S
XEAVSMGEPIKGYTPVGMDDFYLVNIPSLKT

SEQ ID NO: 41699 - protein, 31 aa, Artificial Sequence
  Cyclic GFR-binding peptide
  MOD_RES (2)..(4): Xaa is C or S
RXGXAEVVMDPIKGYVVNNAADFYLINIPSL

SEQ ID NO: 41700 - protein, 32 aa, Artificial Sequence
  Cyclic GFR-binding peptide
  MOD_RES (31)..(32): Xaa is C or S
EVVMEPIKGYVVKDYEDFYLMNIPSLETPVXX

SEQ ID NO: 41701 - protein, 36 aa, Artificial Sequence
  Cyclic GFR-binding peptide
  MOD_RES (31)..(32): Xaa is C or S
EVVMDPIKGYVVNNAADFYLINIPSLRAPVXXSAPA

SEQ ID NO: 41702 - protein, 36 aa, Artificial Sequence
  Cyclic GFR-binding peptide
  MOD_RES (1)..(32)..(33): Xaa is C or S
XEEVIMPIKGYLLVRGNDFYLMNIPSTKVPAXXTSP

SEQ ID NO: 41703 - protein, 35 aa, Artificial Sequence
  Cyclic GFR-binding peptide
  MOD_RES (1)..(33)..(34): Xaa is C or S
XGEVVMEPIKGYVVKDYEDFYLMNIPSLETPVXXA

SEQ ID NO: 41704 - protein, 29 aa, Artificial Sequence
  Cyclic GFR-binding peptide
  MOD_RES (28)..(29): Xaa is C or S
MNPIKGYIVNNSSDFYLVNIPSLKTPAXX

SEQ ID NO: 41705 - protein, 31 aa, Artificial Sequence
  Cyclic GFR-binding peptide
  MOD_RES (31)..(31): Xaa is C or S
KVVMNPIKGYIVNNSSDFYLVNIPSLKTPAX

SEQ ID NO: 41706 - protein, 30 aa, Artificial Sequence
  Cyclic GFR-binding peptide
  MOD_RES (28)..(29): Xaa is C or S
MNPIKGYIVNSSDDFYLVNIPSLKTPAXXP

SEQ ID NO: 41707 - protein, 24 aa, Artificial Sequence
  Cyclic GFR-binding peptide
SMGEPIKGYTPVGMDDFYLVNIPS

SEQ ID NO: 41708 - protein, 33 aa, Artificial Sequence
  Cyclic GFR-binding peptide
  MOD_RES (1)..(33): Xaa is C or S
XSRVVMNPIKGYIVNSSDDFYLVNIPSLKTPAX

SEQ ID NO: 41709 - protein, 35 aa, Artificial Sequence
  Cyclic GFR-binding peptide
  MOD_RES (30)..(30): Xaa is C or S
VVMNPIKGYIVNSSDDFYLVNIPSLKTPAXTPKTV

SEQ ID NO: 41710 - protein, 29 aa, Artificial Sequence
  Cyclic GFR-binding peptide
  MOD_RES (29)..(29): Xaa is C or S
VMNPIKGYIVNNSSDFYLVNIPSLKTPAX

SEQ ID NO: 41711 - protein, 31 aa, Artificial Sequence
  Cyclic GFR-binding peptide
  MOD_RES (1)..(3): Xaa is C or S
XGXSEVVMDPIKGYVVNNASDFYLINIPSLR

SEQ ID NO: 41712 - protein, 40 aa, Artificial Sequence
  Cyclic GFR-binding peptide
  MOD_RES (2)..(4)..(36)..(37): Xaa is C or S
RXGXESVAMGPIKGYYTVVGKDFYLINIPSLKTPVXXAKS

SEQ ID NO: 41713 - protein, 34 aa, Artificial Sequence
  Cyclic GFR-binding peptide
  MOD_RES (31)..(32): Xaa is C or S
RVVMNPIKGYIVNSSDDFYLVNIPSLQTPAXXPK

SEQ ID NO: 41714 - protein, 24 aa, Artificial Sequence
  Cyclic GFR-binding peptide
EVIMPIKGYLLVRGNDFYLMNIPS

SEQ ID NO: 41715 - protein, 32 aa, Artificial Sequence
  Cyclic GFR-binding peptide
  MOD_RES (2)..(2): Xaa is C or S
GXARVVMNPIKGYIVNSSDDFYLVNIPSLQTP

SEQ ID NO: 41716 - protein, 34 aa, Artificial Sequence
  Cyclic GFR-binding peptide
  MOD_RES (28)..(29): Xaa is C or S
MDPIKGYVVNNASDFYLINIPSLRTPVXXTPPTS

SEQ ID NO: 41717 - protein, 32 aa, Artificial Sequence
  Cyclic GFR-binding peptide
  MOD_RES (1)..(3): Xaa is C or S
XGXAKVVMNPIKGYIVNNSSDFYLVNIPSLKT

SEQ ID NO: 41718 - protein, 26 aa, Artificial Sequence
  Cyclic GFR-binding peptide
EVIMPIKGYLLVRGNDFYLMNIPSTK

SEQ ID NO: 41719 - protein, 36 aa, Artificial Sequence
  Cyclic GFR-binding peptide
  MOD_RES (1)..(33)..(34): Xaa is C or S
XESVAMGPIKGYYTVVGKDFYLINIPSLKTPVXXAK

SEQ ID NO: 41720 - protein, 22 aa, Artificial Sequence
  Cyclic GFR-binding peptide
MDPIKGYVVNNAADFYLINIPS

SEQ ID NO: 41721 - protein, 38 aa, Artificial Sequence
  Cyclic GFR-binding peptide
  MOD_RES (1)..(3)..(35)..(36): Xaa is C or S
XGXARVVMNPIKGYIVNSSDDFYLVNIPSLQTPAXXPK

SEQ ID NO: 41722 - protein, 30 aa, Artificial Sequence
  Cyclic GFR-binding peptide
  MOD_RES (2)..(2): Xaa is C or S
GXEEVIMPIKGYLLVRGNDFYLMNIPSTKV

SEQ ID NO: 41723 - protein, 33 aa, Artificial Sequence
  Cyclic GFR-binding peptide
  MOD_RES (2)..(4): Xaa is C or S
HXGXSRVVMNPIKGYIVNSSDDFYLVNIPSLKT

SEQ ID NO: 41724 - protein, 37 aa, Artificial Sequence
  Cyclic GFR-binding peptide
  MOD_RES (31)..(32): Xaa is C or S
EVVMDPIKGYVVKENEDFYLMNIPSLETPVXXAKPIK

SEQ ID NO: 41725 - protein, 28 aa, Artificial Sequence
  Cyclic GFR-binding peptide
  MOD_RES (2)..(2): Xaa is C or S
GXGEVVMDPIKGYVVKENEDFYLMNIPS

SEQ ID NO: 41726 - protein, 22 aa, Artificial Sequence
  Cyclic GFR-binding peptide
MNPIKGYIVNNSSDFYLVNIPS

SEQ ID NO: 41727 - protein, 25 aa, Artificial Sequence
  Cyclic GFR-binding peptide
PIKGYVVKDYEDFYLMNIPSLETPV

SEQ ID NO: 41728 - protein, 38 aa, Artificial Sequence
  Cyclic GFR-binding peptide
  MOD_RES (2)..(4)..(36)..(37): Xaa is C or S
RXGXGEVVMEPIKGYVVKDYEDFYLMNIPSLETPVXXA

SEQ ID NO: 41729 - protein, 23 aa, Artificial Sequence
  Cyclic GFR-binding peptide
MNPIKGYIVNSSDDFYLVNIPSL

SEQ ID NO: 41730 - protein, 35 aa, Artificial Sequence
  Cyclic GFR-binding peptide
  MOD_RES (30)..(31): Xaa is C or S
EVIMPIKGYLLVRGNDFYLMNIPSTKVPAXXTSPV

SEQ ID NO: 41731 - protein, 33 aa, Artificial Sequence
  Cyclic GFR-binding peptide
  MOD_RES (1)..(3): Xaa is C or S
XGXSRVVMNPIKGYIVNSSDDFYLVNIPSLKTP

SEQ ID NO: 41732 - protein, 27 aa, Artificial Sequence
  Cyclic GFR-binding peptide
  MOD_RES (1)..(1): Xaa is C or S
XARVVMNPIKGYIVNSSDDFYLVNIPS

SEQ ID NO: 41733 - protein, 25 aa, Artificial Sequence
  Cyclic GFR-binding peptide
SVAMGPIKGYYTVVGKDFYLINIPS

SEQ ID NO: 41734 - protein, 31 aa, Artificial Sequence
  Cyclic GFR-binding peptide
  MOD_RES (27)..(28): Xaa is C or S
NPIKGYIVNSSDDFYLVNIPSLQTPAXXPKP

SEQ ID NO: 41735 - protein, 39 aa, Artificial Sequence
  Cyclic GFR-binding peptide
  MOD_RES (2)..(4)..(36): Xaa is C or S
HXGXSRVVMNPIKGYIVNSSDDFYLVNIPSLKTPAXTPK

SEQ ID NO: 41736 - protein, 28 aa, Artificial Sequence
  Cyclic GFR-binding peptide
  MOD_RES (27)..(28): Xaa is C or S
DPIKGYVVNNASDFYLINIPSLRTPVXX

SEQ ID NO: 41737 - protein, 29 aa, Artificial Sequence
  Cyclic GFR-binding peptide
SRVVMNPIKGYIVNSSDDFYLVNIPSLKT

SEQ ID NO: 41738 - protein, 32 aa, Artificial Sequence
  Cyclic GFR-binding peptide
  MOD_RES (27)..(28): Xaa is C or S
GPIKGYYTVVGKDFYLINIPSLKTPVXXAKSA

SEQ ID NO: 41739 - protein, 27 aa, Artificial Sequence
  Cyclic GFR-binding peptide
  MOD_RES (26)..(27): Xaa is C or S
PIKGYVVNNAADFYLINIPSLRAPVXX

SEQ ID NO: 41740 - protein, 39 aa, Artificial Sequence
  Cyclic GFR-binding peptide
  MOD_RES (2)..(34)..(35): Xaa is C or S
GXSRVVMNPIKGYIVNSSDDFYLVNIPSLKTPAXXPKPV

SEQ ID NO: 41741 - protein, 39 aa, Artificial Sequence
  Cyclic GFR-binding peptide
  MOD_RES (1)..(33)..(34): Xaa is C or S
XARVVMNPIKGYIVNSSDDFYLVNIPSLQTPAXXPKPVT

SEQ ID NO: 41742 - protein, 30 aa, Artificial Sequence
  Cyclic GFR-binding peptide
  MOD_RES (26)..(26): Xaa is C or S
PIKGYIVNSSDDFYLVNIPSLKTPAXTPKT

SEQ ID NO: 41743 - protein, 24 aa, Artificial Sequence
  Cyclic GFR-binding peptide
AMGPIKGYYTVVGKDFYLINIPSL

SEQ ID NO: 41744 - protein, 40 aa, Artificial Sequence
  Cyclic GFR-binding peptide
  MOD_RES (2)..(4)..(37)..(38): Xaa is C or S
RXGXEAVSMGEPIKGYTPVGMDDFYLVNIPSLKTPVXXAK

SEQ ID NO: 41745 - protein, 30 aa, Artificial Sequence
  Cyclic GFR-binding peptide
  MOD_RES (1)..(3): Xaa is C or S
XGXSEVVMDPIKGYVVNNASDFYLINIPSL

SEQ ID NO: 41746 - protein, 29 aa, Artificial Sequence
  Cyclic GFR-binding peptide
VVMDPIKGYVVNNASDFYLINIPSLRTPV

SEQ ID NO: 41747 - protein, 37 aa, Artificial Sequence
  Cyclic GFR-binding peptide
  MOD_RES (32)..(33): Xaa is C or S
ESVAMGPIKGYYTVVGKDFYLINIPSLKTPVXXAKSA

SEQ ID NO: 41748 - protein, 37 aa, Artificial Sequence
  Cyclic GFR-binding peptide
  MOD_RES (31)..(32): Xaa is C or S
EEVIMPIKGYLLVRGNDFYLMNIPSTKVPAXXTSPVR

SEQ ID NO: 41749 - protein, 31 aa, Artificial Sequence
  Cyclic GFR-binding peptide
  MOD_RES (1)..(3): Xaa is C or S
XGXSRVVMNPIKGYIVNSSDDFYLVNIPSLK

SEQ ID NO: 41750 - protein, 31 aa, Artificial Sequence
  Cyclic GFR-binding peptide
  MOD_RES (26)..(27): Xaa is C or S
PIKGYVVKENEDFYLMNIPSLETPVXXAKPI

SEQ ID NO: 41751 - protein, 26 aa, Artificial Sequence
  Cyclic GFR-binding peptide
AVSMGEPIKGYTPVGMDDFYLVNIPS

SEQ ID NO: 41752 - protein, 34 aa, Artificial Sequence
  Cyclic GFR-binding peptide
  MOD_RES (31)..(32): Xaa is C or S
EVVMEPIKGYVVKDYEDFYLMNIPSLETPVXXAK

SEQ ID NO: 41753 - protein, 33 aa, Artificial Sequence
  Cyclic GFR-binding peptide
  MOD_RES (29)..(30): Xaa is C or S
VMNPIKGYIVNSSDDFYLVNIPSLKTPAXXPKP

SEQ ID NO: 41754 - protein, 37 aa, Artificial Sequence
  Cyclic GFR-binding peptide
  MOD_RES (32)..(33): Xaa is C or S
AVSMGEPIKGYTPVGMDDFYLVNIPSLKTPVXXAKGV

SEQ ID NO: 41755 - protein, 34 aa, Artificial Sequence
  Cyclic GFR-binding peptide
  MOD_RES (29)..(30): Xaa is C or S
AMGPIKGYYTVVGKDFYLINIPSLKTPVXXAKSA

SEQ ID NO: 41756 - protein, 25 aa, Artificial Sequence
  Cyclic GFR-binding peptide
VVMDPIKGYVVNNASDFYLINIPSL

SEQ ID NO: 41757 - protein, 34 aa, Artificial Sequence
  Cyclic GFR-binding peptide
  MOD_RES (30)..(31): Xaa is C or S
EVIMPIKGYLLVRGNDFYLMNIPSTKVPAXXTSP

SEQ ID NO: 41758 - protein, 31 aa, Artificial Sequence
  Cyclic GFR-binding peptide
  MOD_RES (29)..(30): Xaa is C or S
VMEPIKGYVVKDYEDFYLMNIPSLETPVXXA

SEQ ID NO: 41759 - protein, 27 aa, Artificial Sequence
  Cyclic GFR-binding peptide
  MOD_RES (1)..(1): Xaa is C or S
XSEVVMDPIKGYVVNNASDFYLINIPS

SEQ ID NO: 41760 - protein, 33 aa, Artificial Sequence
  Cyclic GFR-binding peptide
  MOD_RES (32)..(33): Xaa is C or S
ARVVMNPIKGYIVNSSDDFYLVNIPSLQTPAXX

SEQ ID NO: 41761 - protein, 32 aa, Artificial Sequence
  Cyclic GFR-binding peptide
  MOD_RES (28)..(29): Xaa is C or S
MEPIKGYVVKDYEDFYLMNIPSLETPVXXAKP

SEQ ID NO: 41762 - protein, 37 aa, Artificial Sequence
  Cyclic GFR-binding peptide
  MOD_RES (2)..(4)..(36)..(37): Xaa is C or S
HXGXAKVVMNPIKGYIVNNSSDFYLVNIPSLKTPAXX

SEQ ID NO: 41763 - protein, 32 aa, Artificial Sequence
  Cyclic GFR-binding peptide
  MOD_RES (31)..(32): Xaa is C or S
KVVMNPIKGYIVNNSSDFYLVNIPSLKTPAXX

SEQ ID NO: 41764 - protein, 30 aa, Artificial Sequence
  Cyclic GFR-binding peptide
SRVVMNPIKGYIVNSSDDFYLVNIPSLKTP

SEQ ID NO: 41765 - protein, 35 aa, Artificial Sequence
  Cyclic GFR-binding peptide
  MOD_RES (2)..(4)..(35): Xaa is C or S
LXGXEEVIMPIKGYLLVRGNDFYLMNIPSTKVPAX

SEQ ID NO: 41766 - protein, 31 aa, Artificial Sequence
  Cyclic GFR-binding peptide
  MOD_RES (2)..(4): Xaa is C or S
HXGXSRVVMNPIKGYIVNSSDDFYLVNIPSL

SEQ ID NO: 41767 - protein, 28 aa, Artificial Sequence
  Cyclic GFR-binding peptide
  MOD_RES (1)..(1): Xaa is C or S
XEEVIMPIKGYLLVRGNDFYLMNIPSTK

SEQ ID NO: 41768 - protein, 25 aa, Artificial Sequence
  Cyclic GFR-binding peptide
PIKGYIVNSSDDFYLVNIPSLQTPA

SEQ ID NO: 41769 - protein, 38 aa, Artificial Sequence
  Cyclic GFR-binding peptide
  MOD_RES (1)..(34)..(35): Xaa is C or S
XEAVSMGEPIKGYTPVGMDDFYLVNIPSLKTPVXXAKG

SEQ ID NO: 41770 - protein, 33 aa, Artificial Sequence
  Cyclic GFR-binding peptide
  MOD_RES (31)..(31): Xaa is C or S
RVVMNPIKGYIVNSSDDFYLVNIPSLKTPAXTP

SEQ ID NO: 41771 - protein, 29 aa, Artificial Sequence
  Cyclic GFR-binding peptide
  MOD_RES (26)..(27): Xaa is C or S
PIKGYYTVVGKDFYLINIPSLKTPVXXAK

SEQ ID NO: 41772 - protein, 25 aa, Artificial Sequence
  Cyclic GFR-binding peptide
VAMGPIKGYYTVVGKDFYLINIPSL

SEQ ID NO: 41773 - protein, 39 aa, Artificial Sequence
  Cyclic GFR-binding peptide
  MOD_RES (2)..(34)..(35): Xaa is C or S
GXARVVMNPIKGYIVNSSDDFYLVNIPSLQTPAXXPKPV

SEQ ID NO: 41774 - protein, 35 aa, Artificial Sequence
  Cyclic GFR-binding peptide
  MOD_RES (1)..(3)..(35): Xaa is C or S
XGXARVVMNPIKGYIVNSSDDFYLVNIPSLQTPAX

SEQ ID NO: 41775 - protein, 42 aa, Artificial Sequence
  Cyclic GFR-binding peptide
  MOD_RES (2)..(4)..(36)..(37): Xaa is C or S
HXGXAKVVMNPIKGYIVNNSSDFYLVNIPSLKTPAXXAKPVA

SEQ ID NO: 41776 - protein, 24 aa, Artificial Sequence
  Cyclic GFR-binding peptide
VMDPIKGYVVKENEDFYLMNIPSL

SEQ ID NO: 41777 - protein, 33 aa, Artificial Sequence
  Cyclic GFR-binding peptide
  MOD_RES (27)..(28): Xaa is C or S
EPIKGYTPVGMDDFYLVNIPSLKTPVXXAKGVK

SEQ ID NO: 41778 - protein, 42 aa, Artificial Sequence
  Cyclic GFR-binding peptide
  MOD_RES (2)..(4)..(36)..(37): Xaa is C or S
RXGXGEVVMEPIKGYVVKDYEDFYLMNIPSLETPVXXAKPIS

SEQ ID NO: 41779 - protein, 33 aa, Artificial Sequence
  Cyclic GFR-binding peptide
  MOD_RES (2)..(4): Xaa is C or S
RXGXESVAMGPIKGYYTVVGKDFYLINIPSLKT

SEQ ID NO: 41780 - protein, 33 aa, Artificial Sequence
  Cyclic GFR-binding peptide
  MOD_RES (30)..(31): Xaa is C or S
VVMNPIKGYIVNSSDDFYLVNIPSLQTPAXXPK

SEQ ID NO: 41781 - protein, 35 aa, Artificial Sequence
  Cyclic GFR-binding peptide
  MOD_RES (1)..(33): Xaa is C or S
XSRVVMNPIKGYIVNSSDDFYLVNIPSLKTPAXTP

SEQ ID NO: 41782 - protein, 30 aa, Artificial Sequence
  Cyclic GFR-binding peptide
  MOD_RES (30)..(30): Xaa is C or S
VVMDPIKGYVVNNAADFYLINIPSLRAPVX

SEQ ID NO: 41783 - protein, 31 aa, Artificial Sequence
  Cyclic GFR-binding peptide
  MOD_RES (2)..(4): Xaa is C or S
RXGXESVAMGPIKGYYTVVGKDFYLINIPSL

SEQ ID NO: 41784 - protein, 28 aa, Artificial Sequence
  Cyclic GFR-binding peptide
  MOD_RES (28)..(28): Xaa is C or S
MDPIKGYVVNNAADFYLINIPSLRAPVX

SEQ ID NO: 41785 - protein, 31 aa, Artificial Sequence
  Cyclic GFR-binding peptide
  MOD_RES (27)..(28): Xaa is C or S
DPIKGYVVKENEDFYLMNIPSLETPVXXAKP

SEQ ID NO: 41786 - protein, 32 aa, Artificial Sequence
  Cyclic GFR-binding peptide
  MOD_RES (2)..(4): Xaa is C or S
SXGXRDVVMGPIKGYIIQQKDNFYLMNIPSMK

SEQ ID NO: 41787 - protein, 27 aa, Artificial Sequence
  Cyclic GFR-binding peptide
EVVMDPIKGYVVNNAADFYLINIPSLR

SEQ ID NO: 41788 - protein, 32 aa, Artificial Sequence
  Cyclic GFR-binding peptide
  MOD_RES (29)..(30): Xaa is C or S
VMDPIKGYVVKENEDFYLMNIPSLETPVXXAK

SEQ ID NO: 41789 - protein, 30 aa, Artificial Sequence
  Cyclic GFR-binding peptide
EAVSMGEPIKGYTPVGMDDFYLVNIPSLKT

SEQ ID NO: 41790 - protein, 27 aa, Artificial Sequence
  Cyclic GFR-binding peptide
VVMNPIKGYIVNSSDDFYLVNIPSLKT

SEQ ID NO: 41791 - protein, 23 aa, Artificial Sequence
  Cyclic GFR-binding peptide
MDPIKGYVVNNASDFYLINIPSL

SEQ ID NO: 41792 - protein, 34 aa, Artificial Sequence
  Cyclic GFR-binding peptide
  MOD_RES (28)..(29): Xaa is C or S
MNPIKGYIVNSSDDFYLVNIPSLKTPAXXPKPVY

SEQ ID NO: 41793 - protein, 28 aa, Artificial Sequence
  Cyclic GFR-binding peptide
  MOD_RES (1)..(1): Xaa is C or S
XESVAMGPIKGYYTVVGKDFYLINIPSL

SEQ ID NO: 41794 - protein, 31 aa, Artificial Sequence
  Cyclic GFR-binding peptide
SRVVMNPIKGYIVNSSDDFYLVNIPSLKTPA

SEQ ID NO: 41795 - protein, 27 aa, Artificial Sequence
  Cyclic GFR-binding peptide
  MOD_RES (27)..(27): Xaa is C or S
EPIKGYVVKDYEDFYLMNIPSLETPVX

SEQ ID NO: 41796 - protein, 25 aa, Artificial Sequence
  Cyclic GFR-binding peptide
VMEPIKGYVVKDYEDFYLMNIPSLE

SEQ ID NO: 41797 - protein, 31 aa, Artificial Sequence
  Cyclic GFR-binding peptide
  MOD_RES (2)..(2): Xaa is C or S
GXGEVVMDPIKGYVVKENEDFYLMNIPSLET

SEQ ID NO: 41798 - protein, 21 aa, Artificial Sequence
  Cyclic GFR-binding peptide
PIKGYLLVRGNDFYLMNIPST

SEQ ID NO: 41799 - protein, 26 aa, Artificial Sequence
  Cyclic GFR-binding peptide
VVMNPIKGYIVNSSDDFYLVNIPSLQ

SEQ ID NO: 41800 - protein, 38 aa, Artificial Sequence
  Cyclic GFR-binding peptide
  MOD_RES (1)..(3)..(34)..(35): Xaa is C or S
XGXEEVIMPIKGYLLVRGNDFYLMNIPSTKVPAXXTSP

SEQ ID NO: 41801 - protein, 37 aa, Artificial Sequence
  Cyclic GFR-binding peptide
  MOD_RES (2)..(4)..(36)..(37): Xaa is C or S
HXGXARVVMNPIKGYIVNSSDDFYLVNIPSLQTPAXX

SEQ ID NO: 41802 - protein, 38 aa, Artificial Sequence
  Cyclic GFR-binding peptide
  MOD_RES (1)..(32)..(33): Xaa is C or S
XEEVIMPIKGYLLVRGNDFYLMNIPSTKVPAXXTSPVR

SEQ ID NO: 41803 - protein, 29 aa, Artificial Sequence
  Cyclic GFR-binding peptide
  MOD_RES (29)..(29): Xaa is C or S
AMGPIKGYYTVVGKDFYLINIPSLKTPVX

SEQ ID NO: 41804 - protein, 29 aa, Artificial Sequence
  Cyclic GFR-binding peptide
  MOD_RES (1)..(1): Xaa is C or S
XEAVSMGEPIKGYTPVGMDDFYLVNIPSL

SEQ ID NO: 41805 - protein, 34 aa, Artificial Sequence
  Cyclic GFR-binding peptide
  MOD_RES (2)..(34): Xaa is C or S
GXAKVVMNPIKGYIVNNSSDFYLVNIPSLKTPAX

SEQ ID NO: 41806 - protein, 29 aa, Artificial Sequence
  Cyclic GFR-binding peptide
  MOD_RES (27)..(28): Xaa is C or S
DPIKGYVVKENEDFYLMNIPSLETPVXXA

SEQ ID NO: 41807 - protein, 25 aa, Artificial Sequence
  Cyclic GFR-binding peptide
KVVMNPIKGYIVNNSSDFYLVNIPS

SEQ ID NO: 41808 - protein, 25 aa, Artificial Sequence
  Cyclic GFR-binding peptide
VMDPIKGYVVNNASDFYLINIPSLR

SEQ ID NO: 41809 - protein, 26 aa, Artificial Sequence
  Cyclic GFR-binding peptide
SMGEPIKGYTPVGMDDFYLVNIPSLK

SEQ ID NO: 41810 - protein, 23 aa, Artificial Sequence
  Cyclic GFR-binding peptide
PIKGYIVNNSSDFYLVNIPSLKT

SEQ ID NO: 41811 - protein, 25 aa, Artificial Sequence
  Cyclic GFR-binding peptide
DPIKGYVVKENEDFYLMNIPSLETP

SEQ ID NO: 41812 - protein, 33 aa, Artificial Sequence
  Cyclic GFR-binding peptide
  MOD_RES (29)..(30): Xaa is C or S
VMDPIKGYVVKENEDFYLMNIPSLETPVXXAKP

SEQ ID NO: 41813 - protein, 30 aa, Artificial Sequence
  Cyclic GFR-binding peptide
SVAMGPIKGYYTVVGKDFYLINIPSLKTPV

SEQ ID NO: 41814 - protein, 31 aa, Artificial Sequence
  Cyclic GFR-binding peptide
  MOD_RES (1)..(3): Xaa is C or S
XGXAKVVMNPIKGYIVNNSSDFYLVNIPSLK

SEQ ID NO: 41815 - protein, 30 aa, Artificial Sequence
  Cyclic GFR-binding peptide
  MOD_RES (28)..(29): Xaa is C or S
MGPIKGYYTVVGKDFYLINIPSLKTPVXXA

SEQ ID NO: 41816 - protein, 39 aa, Artificial Sequence
  Cyclic GFR-binding peptide
  MOD_RES (1)..(33): Xaa is C or S
XSRVVMNPIKGYIVNSSDDFYLVNIPSLKTPAXTPKTVH

SEQ ID NO: 41817 - protein, 32 aa, Artificial Sequence
  Cyclic GFR-binding peptide
  MOD_RES (32)..(32): Xaa is C or S
AEVVMDPIKGYVVNNAADFYLINIPSLRAPVX

SEQ ID NO: 41818 - protein, 36 aa, Artificial Sequence
  Cyclic GFR-binding peptide
  MOD_RES (2)..(34): Xaa is C or S
GXSRVVMNPIKGYIVNSSDDFYLVNIPSLKTPAXTP

SEQ ID NO: 41819 - protein, 26 aa, Artificial Sequence
  Cyclic GFR-binding peptide
MPIKGYLLVRGNDFYLMNIPSTKVPA

SEQ ID NO: 41820 - protein, 33 aa, Artificial Sequence
  Cyclic GFR-binding peptide
  MOD_RES (30)..(30): Xaa is C or S
VVMNPIKGYIVNSSDDFYLVNIPSLKTPAXTPK

SEQ ID NO: 41821 - protein, 28 aa, Artificial Sequence
  Cyclic GFR-binding peptide
SRVVMNPIKGYIVNSSDDFYLVNIPSLK

SEQ ID NO: 41822 - protein, 25 aa, Artificial Sequence
  Cyclic GFR-binding peptide
MDPIKGYVVNNASDFYLINIPSLRT

SEQ ID NO: 41823 - protein, 30 aa, Artificial Sequence
  Cyclic GFR-binding peptide
  MOD_RES (30)..(30): Xaa is C or S
VVMDPIKGYVVKENEDFYLMNIPSLETPVX

SEQ ID NO: 41824 - protein, 32 aa, Artificial Sequence
  Cyclic GFR-binding peptide
  MOD_RES (1)..(3): Xaa is C or S
XGXSEVVMDPIKGYVVNNASDFYLINIPSLRT

SEQ ID NO: 41825 - protein, 33 aa, Artificial Sequence
  Cyclic GFR-binding peptide
  MOD_RES (31)..(32): Xaa is C or S
EEVIMPIKGYLLVRGNDFYLMNIPSTKVPAXXT

SEQ ID NO: 41826 - protein, 37 aa, Artificial Sequence
  Cyclic GFR-binding peptide
  MOD_RES (1)..(3)..(36)..(37): Xaa is C or S
XGXEAVSMGEPIKGYTPVGMDDFYLVNIPSLKTPVXX

SEQ ID NO: 41827 - protein, 24 aa, Artificial Sequence
  Cyclic GFR-binding peptide
MEPIKGYVVKDYEDFYLMNIPSLE

SEQ ID NO: 41828 - protein, 29 aa, Artificial Sequence
  Cyclic GFR-binding peptide
RVVMNPIKGYIVNSSDDFYLVNIPSLKTP

SEQ ID NO: 41829 - protein, 39 aa, Artificial Sequence
  Cyclic GFR-binding peptide
  MOD_RES (6)..(7)..(39): Xaa is C or S
STPPTXXVPTRLSPINILYFDSANNVVYGKIPDMVVESX

SEQ ID NO: 41830 - protein, 30 aa, Artificial Sequence
  Cyclic GFR-binding peptide
  MOD_RES (4)..(5): Xaa is C or S
SKAXXVPTKLSPINILYFDKGVVTYYGKIP

SEQ ID NO: 41831 - protein, 37 aa, Artificial Sequence
  Cyclic GFR-binding peptide
  MOD_RES (5)..(6): Xaa is C or S
IPKAXXVPTELSPINMLYFDENEKVVYGKIPDMVVEG

SEQ ID NO: 41832 - protein, 27 aa, Artificial Sequence
  Cyclic GFR-binding peptide
TELSPINMLYFDEYDKVVYGKIPEMVV

SEQ ID NO: 41833 - protein, 22 aa, Artificial Sequence
  Cyclic GFR-binding peptide
LSPINMLYFDEYDKVVYGKIPE

SEQ ID NO: 41834 - protein, 32 aa, Artificial Sequence
  Cyclic GFR-binding peptide
  MOD_RES (31)..(31): Xaa is C or S
APVKTSPINMLYFDNGRVLLYGKIPMIVEEXG

SEQ ID NO: 41835 - protein, 35 aa, Artificial Sequence
  Cyclic GFR-binding peptide
  MOD_RES (3)..(4): Xaa is C or S
PTXXVPTRLSPINILYFDSANNVVYGKIPDMVVES

SEQ ID NO: 41836 - protein, 25 aa, Artificial Sequence
  Cyclic GFR-binding peptide
VPTKLSPINVLYFDDMGVPTYGKIP

SEQ ID NO: 41837 - protein, 27 aa, Artificial Sequence
  Cyclic GFR-binding peptide
  MOD_RES (1)..(1): Xaa is C or S
XVPTELSPINMLYFDENEKVVYGKIPD

SEQ ID NO: 41838 - protein, 29 aa, Artificial Sequence
  Cyclic GFR-binding peptide
VPARLSPINILYFDAANNVVYGKIPDMVV

SEQ ID NO: 41839 - protein, 39 aa, Artificial Sequence
  Cyclic GFR-binding peptide
  MOD_RES (3)..(4)..(36)..(38): Xaa is C or S
KAXXVPTKLSPINILYFDKGVVTYYGKIPGMAVSEXGXR

SEQ ID NO: 41840 - protein, 35 aa, Artificial Sequence
  Cyclic GFR-binding peptide
  MOD_RES (2)..(3)..(35): Xaa is C or S
AXXVPTELSPINMLYFDENEKVVYGKIPDMVVEGX

SEQ ID NO: 41841 - protein, 30 aa, Artificial Sequence
  Cyclic GFR-binding peptide
PARLSPINILYFDAANNVVYGKIPDMVVEA

SEQ ID NO: 41842 - protein, 27 aa, Artificial Sequence
  Cyclic GFR-binding peptide
  MOD_RES (1)..(2): Xaa is C or S
XXAPTKLSPINVLYFDSSNNVIYGKIP

SEQ ID NO: 41843 - protein, 34 aa, Artificial Sequence
  Cyclic GFR-binding peptide
  MOD_RES (4)..(5): Xaa is C or S
PPTXXVPTRLSPINILYFDSANNVVYGKIPDMVV

SEQ ID NO: 41844 - protein, 40 aa, Artificial Sequence
  Cyclic GFR-binding peptide
  MOD_RES (5)..(6)..(38)..(40): Xaa is C or S
ASKAXXVPTKLSPINILYFDKGVVTYYGKIPGMAVSEXGX

SEQ ID NO: 41845 - protein, 37 aa, Artificial Sequence
  Cyclic GFR-binding peptide
  MOD_RES (4)..(36): Xaa is C or S
KPTXAPTKLSPINVLYFDDSSNVIYGKIPNMVVRSXG

SEQ ID NO: 41846 - protein, 31 aa, Artificial Sequence
  Cyclic GFR-binding peptide
  MOD_RES (5)..(6): Xaa is C or S
TPPTXXVPTRLSPINILYFDSANNVVYGKIP

SEQ ID NO: 41847 - protein, 32 aa, Artificial Sequence
  Cyclic GFR-binding peptide
  MOD_RES (29)..(31): Xaa is C or S
QLSPINVLYFDDSSNVIYGKIPNMVVRAXGXH

SEQ ID NO: 41848 - protein, 34 aa, Artificial Sequence
  Cyclic GFR-binding peptide
  MOD_RES (1)..(33): Xaa is C or S
XAPTKLSPINVLYFDDSSNVIYGKIPNMVVRSXG

SEQ ID NO: 41849 - protein, 27 aa, Artificial Sequence
  Cyclic GFR-binding peptide
  MOD_RES (26)..(26): Xaa is C or S
SPINMLYFDNGRVLLYGKIPMIVEEXG

SEQ ID NO: 41850 - protein, 35 aa, Artificial Sequence
  Cyclic GFR-binding peptide
  MOD_RES (3)..(4): Xaa is C or S
KAXXVPTELSPINMLYFDENEKVVYGKIPDMVVEG

SEQ ID NO: 41851 - protein, 23 aa, Artificial Sequence
  Cyclic GFR-binding peptide
LSPINMLYFDENEKVVYGKIPDM

SEQ ID NO: 41852 - protein, 29 aa, Artificial Sequence
  Cyclic GFR-binding peptide
APVKTSPINMLYFDNGRVLLYGKIPMIVE

SEQ ID NO: 41853 - protein, 34 aa, Artificial Sequence
  Cyclic GFR-binding peptide
  MOD_RES (4)..(5): Xaa is C or S
SKAXXVPTKLSPINILYFDKGVVTYYGKIPGMAV

SEQ ID NO: 41854 - protein, 36 aa, Artificial Sequence
  Cyclic GFR-binding peptide
  MOD_RES (5)..(6): Xaa is C or S
TPPTXXVPTRLSPINILYFDSANNVVYGKIPDMVVE

SEQ ID NO: 41855 - protein, 22 aa, Artificial Sequence
  Cyclic GFR-binding peptide
LSPINILYFDAANNVVYGKIPD

SEQ ID NO: 41856 - protein, 32 aa, Artificial Sequence
  Cyclic GFR-binding peptide
  MOD_RES (3)..(4): Xaa is C or S
KPXXAPTQLSPINVLYFDDSSNVIYGKIPNMV

SEQ ID NO: 41857 - protein, 39 aa, Artificial Sequence
  Cyclic GFR-binding peptide
  MOD_RES (2)..(3)..(36)..(38): Xaa is C or S
AXXVPTKLSPINVLYFDDMGVPTYGKIPEGMSVAEXGXR

SEQ ID NO: 41858 - protein, 25 aa, Artificial Sequence
  Cyclic GFR-binding peptide
TKLSPINILYFDKGVVTYYGKIPGM

SEQ ID NO: 41859 - protein, 36 aa, Artificial Sequence
  Cyclic GFR-binding peptide
  MOD_RES (4)..(5): Xaa is C or S
PPTXXVPTRLSPINILYFDSANNVVYGKIPDMVVES

SEQ ID NO: 41860 - protein, 36 aa, Artificial Sequence
  Cyclic GFR-binding peptide
  MOD_RES (2)..(3)..(35): Xaa is C or S
SXXVPARLSPINILYFDAANNVVYGKIPDMVVEAXG

SEQ ID NO: 41861 - protein, 21 aa, Artificial Sequence
  Cyclic GFR-binding peptide
LSPINVLYFDDMGVPTYGKIP

SEQ ID NO: 41862 - protein, 42 aa, Artificial Sequence
  Cyclic GFR-binding peptide
  MOD_RES (5)..(6)..(39)..(41): Xaa is C or S
VGKAXXVPTKLSPINVLYFDDMGVPTYGKIPEGMSVAEXGXR

SEQ ID NO: 41863 - protein, 30 aa, Artificial Sequence
  Cyclic GFR-binding peptide
PTELSPINMLYFDEYDKVVYGKIPEMVVEG

SEQ ID NO: 41864 - protein, 33 aa, Artificial Sequence
  Cyclic GFR-binding peptide
  MOD_RES (1)..(2): Xaa is C or S
XXVPTKLSPINILYFDKGVVTYYGKIPGMAVSE

SEQ ID NO: 41865 - protein, 27 aa, Artificial Sequence
  Cyclic GFR-binding peptide
VPTRLSPINILYFDSANNVVYGKIPDM

SEQ ID NO: 41866 - protein, 31 aa, Artificial Sequence
  Cyclic GFR-binding peptide
  MOD_RES (1)..(2): Xaa is C or S
XXAPTKLSPINVLYFDDSSNVIYGKIPNMVV

SEQ ID NO: 41867 - protein, 35 aa, Artificial Sequence
  Cyclic GFR-binding peptide
  MOD_RES (1)..(33)..(35): Xaa is C or S
XVPTELSPINMLYFDEYDKVVYGKIPEMVVEGXGX

SEQ ID NO: 41868 - protein, 32 aa, Artificial Sequence
  Cyclic GFR-binding peptide
  MOD_RES (30)..(32): Xaa is C or S
PVKTSPINMLYFDNGRVLLYGKIPMIVEEXGX

SEQ ID NO: 41869 - protein, 39 aa, Artificial Sequence
  Cyclic GFR-binding peptide
  MOD_RES (3)..(4)..(36)..(38): Xaa is C or S
ASXXVPARLSPINILYFDAANNVVYGKIPDMVVEAXGXR

SEQ ID NO: 41870 - protein, 35 aa, Artificial Sequence
  Cyclic GFR-binding peptide
  MOD_RES (1)..(2)..(35): Xaa is C or S
XXVPTKLSPINVLYFDDMGVPTYGKIPEGMSVAEX

SEQ ID NO: 41871 - protein, 30 aa, Artificial Sequence
  Cyclic GFR-binding peptide
  MOD_RES (28)..(30): Xaa is C or S
LSPINILYFDKGVVTYYGKIPGMAVSEXGX

SEQ ID NO: 41872 - protein, 27 aa, Artificial Sequence
  Cyclic GFR-binding peptide
  MOD_RES (1)..(2): Xaa is C or S
XXVPTKLSPINILYFDKGVVTYYGKIP

SEQ ID NO: 41873 - protein, 38 aa, Artificial Sequence
  Cyclic GFR-binding peptide
  MOD_RES (5)..(6)..(37): Xaa is C or S
VPSTXXAPVKTSPINMLYFDNGRVLLYGKIPMIVEEXG

SEQ ID NO: 41874 - protein, 21 aa, Artificial Sequence
  Cyclic GFR-binding peptide
LSPINVLYFDDSSNVIYGKIP

SEQ ID NO: 41875 - protein, 29 aa, Artificial Sequence
  Cyclic GFR-binding peptide
  MOD_RES (27)..(29): Xaa is C or S
SPINILYFDKGVVTYYGKIPGMAVSEXGX

SEQ ID NO: 41876 - protein, 28 aa, Artificial Sequence
  Cyclic GFR-binding peptide
  MOD_RES (1)..(2): Xaa is C or S
XXVPTELSPINMLYFDENEKVVYGKIPD

SEQ ID NO: 41877 - protein, 29 aa, Artificial Sequence
  Cyclic GFR-binding peptide
PTELSPINMLYFDEYDKVVYGKIPEMVVE

SEQ ID NO: 41878 - protein, 27 aa, Artificial Sequence
  Cyclic GFR-binding peptide
QLSPINVLYFDDSSNVIYGKIPNMVVR

SEQ ID NO: 41879 - protein, 31 aa, Artificial Sequence
  Cyclic GFR-binding peptide
  MOD_RES (28)..(30): Xaa is C or S
SPINVLYFDDMGVPTYGKIPEGMSVAEXGXR

SEQ ID NO: 41880 - protein, 29 aa, Artificial Sequence
  Cyclic GFR-binding peptide
  MOD_RES (29)..(29): Xaa is C or S
VKTSPINMLYFDNGRVLLYGKIPMIVEEX

SEQ ID NO: 41881 - protein, 23 aa, Artificial Sequence
  Cyclic GFR-binding peptide
SPINILYFDAANNVVYGKIPDMV

SEQ ID NO: 41882 - protein, 31 aa, Artificial Sequence
  Cyclic GFR-binding peptide
  MOD_RES (31)..(31): Xaa is C or S
PTKLSPINILYFDKGVVTYYGKIPGMAVSEX

SEQ ID NO: 41883 - protein, 26 aa, Artificial Sequence
  Cyclic GFR-binding peptide
SPINVLYFDDSSNVIYGKIPNMVVRS

SEQ ID NO: 41884 - protein, 26 aa, Artificial Sequence
  Cyclic GFR-binding peptide
VPTRLSPINILYFDSANNVVYGKIPD

SEQ ID NO: 41885 - protein, 22 aa, Artificial Sequence
  Cyclic GFR-binding peptide
SPINMLYFDEYDKVVYGKIPEM

SEQ ID NO: 41886 - protein, 31 aa, Artificial Sequence
  Cyclic GFR-binding peptide
  MOD_RES (3)..(4): Xaa is C or S
KAXXVPTKLSPINILYFDKGVVTYYGKIPGM

SEQ ID NO: 41887 - protein, 25 aa, Artificial Sequence
  Cyclic GFR-binding peptide
SPINILYFDAANNVVYGKIPDMVVE

SEQ ID NO: 41888 - protein, 39 aa, Artificial Sequence
  Cyclic GFR-binding peptide
  MOD_RES (6)..(7)..(39): Xaa is C or S
KIPKAXXVPTELSPINMLYFDENEKVVYGKIPDMVVEGX

SEQ ID NO: 41889 - protein, 34 aa, Artificial Sequence
  Cyclic GFR-binding peptide
  MOD_RES (2)..(3): Xaa is C or S
PXXAPTQLSPINVLYFDDSSNVIYGKIPNMVVRA

SEQ ID NO: 41890 - protein, 27 aa, Artificial Sequence
  Cyclic GFR-binding peptide
VPTELSPINMLYFDENEKVVYGKIPDM

SEQ ID NO: 41891 - protein, 24 aa, Artificial Sequence
  Cyclic GFR-binding peptide
TKLSPINVLYFDDMGVPTYGKIPE

SEQ ID NO: 41892 - protein, 37 aa, Artificial Sequence
  Cyclic GFR-binding peptide
  MOD_RES (2)..(34)..(36): Xaa is C or S
TXAPTKLSPINVLYFDDSSNVIYGKIPNMVVRSXGXH

SEQ ID NO: 41893 - protein, 24 aa, Artificial Sequence
  Cyclic GFR-binding peptide
TELSPINMLYFDEYDKVVYGKIPE

SEQ ID NO: 41894 - protein, 31 aa, Artificial Sequence
  Cyclic GFR-binding peptide
  MOD_RES (29)..(31): Xaa is C or S
VKTSPINMLYFDNGRVLLYGKIPMIVEEXGX

SEQ ID NO: 41895 - protein, 39 aa, Artificial Sequence
  Cyclic GFR-binding peptide
  MOD_RES (3)..(4)..(36)..(38): Xaa is C or S
KAXXAPTKLSPINVLYFDSSNNVIYGKIPNMVVKAXGXH

SEQ ID NO: 41896 - protein, 37 aa, Artificial Sequence
  Cyclic GFR-binding peptide
  MOD_RES (2)..(3)..(36): Xaa is C or S
AXXVPTKLSPINVLYFDDMGVPTYGKIPEGMSVAEXG

SEQ ID NO: 41897 - protein, 30 aa, Artificial Sequence
  Cyclic GFR-binding peptide
  MOD_RES (29)..(29): Xaa is C or S
KLSPINVLYFDDSSNVIYGKIPNMVVRSXG

SEQ ID NO: 41898 - protein, 32 aa, Artificial Sequence
  Cyclic GFR-binding peptide
  MOD_RES (31)..(31): Xaa is C or S
PTKLSPINILYFDKGVVTYYGKIPGMAVSEXG

SEQ ID NO: 41899 - protein, 34 aa, Artificial Sequence
  Cyclic GFR-binding peptide
  MOD_RES (1)..(32)..(34): Xaa is C or S
XAPVKTSPINMLYFDNGRVLLYGKIPMIVEEXGX

SEQ ID NO: 41900 - protein, 33 aa, Artificial Sequence
  Cyclic GFR-binding peptide
  MOD_RES (3)..(4): Xaa is C or S
KAXXVPTKLSPINVLYFDDMGVPTYGKIPEGMS

SEQ ID NO: 41901 - protein, 36 aa, Artificial Sequence
  Cyclic GFR-binding peptide
  MOD_RES (1)..(33)..(35): Xaa is C or S
XVPTELSPINMLYFDENEKVVYGKIPDMVVEGXGXR

SEQ ID NO: 41902 - protein, 30 aa, Artificial Sequence
  Cyclic GFR-binding peptide
  MOD_RES (2)..(3): Xaa is C or S
AXXVPTKLSPINVLYFDDMGVPTYGKIPEG

SEQ ID NO: 41903 - protein, 29 aa, Artificial Sequence
  Cyclic GFR-binding peptide
  MOD_RES (27)..(29): Xaa is C or S
SPINILYFDSANNVVYGKIPDMVVESXGX

SEQ ID NO: 41904 - protein, 37 aa, Artificial Sequence
  Cyclic GFR-binding peptide
  MOD_RES (6)..(7): Xaa is C or S
KASKAXXVPTKLSPINILYFDKGVVTYYGKIPGMAVS

SEQ ID NO: 41905 - protein, 31 aa, Artificial Sequence
  Cyclic GFR-binding peptide
  MOD_RES (3)..(4): Xaa is C or S
ASXXVPARLSPINILYFDAANNVVYGKIPDM

SEQ ID NO: 41906 - protein, 31 aa, Artificial Sequence
  Cyclic GFR-binding peptide
  MOD_RES (4)..(5): Xaa is C or S
SKAXXVPTKLSPINILYFDKGVVTYYGKIPG

SEQ ID NO: 41907 - protein, 23 aa, Artificial Sequence
  Cyclic GFR-binding peptide
TELSPINMLYFDENEKVVYGKIP

SEQ ID NO: 41908 - protein, 40 aa, Artificial Sequence
  Cyclic GFR-binding peptide
  MOD_RES (6)..(7)..(39): Xaa is C or S
TVPKPXXAPTQLSPINVLYFDDSSNVIYGKIPNMVVRAXG

SEQ ID NO: 41909 - protein, 26 aa, Artificial Sequence
  Cyclic GFR-binding peptide
PTELSPINMLYFDENEKVVYGKIPDM

SEQ ID NO: 41910 - protein, 34 aa, Artificial Sequence
  Cyclic GFR-binding peptide
  MOD_RES (6)..(7): Xaa is C or S
HVPKPXXAPTKLSPINVLYFDDSSNVIYGKIPNM

SEQ ID NO: 41911 - protein, 24 aa, Artificial Sequence
  Cyclic GFR-binding peptide
SPINMLYFDENEKVVYGKIPDMVV

SEQ ID NO: 41912 - protein, 35 aa, Artificial Sequence
  Cyclic GFR-binding peptide
  MOD_RES (1)..(33)..(35): Xaa is C or S
XVPTKLSPINILYFDKGVVTYYGKIPGMAVSEXGX

SEQ ID NO: 41913 - protein, 29 aa, Artificial Sequence
  Cyclic GFR-binding peptide
  MOD_RES (1)..(2): Xaa is C or S
XXVPTELSPINMLYFDENEKVVYGKIPDM

SEQ ID NO: 41914 - protein, 36 aa, Artificial Sequence
  Cyclic GFR-binding peptide
  MOD_RES (5)..(6): Xaa is C or S
IPKAXXVPTELSPINMLYFDEYDKVVYGKIPEMVVE

SEQ ID NO: 41915 - protein, 28 aa, Artificial Sequence
  Cyclic GFR-binding peptide
  MOD_RES (2)..(3): Xaa is C or S
TXXVPTRLSPINILYFDSANNVVYGKIP

SEQ ID NO: 41916 - protein, 38 aa, Artificial Sequence
  Cyclic GFR-binding peptide
  MOD_RES (3)..(4)..(36)..(38): Xaa is C or S
KAXXVPTELSPINMLYFDEYDKVVYGKIPEMVVEGXGX

SEQ ID NO: 41917 - protein, 26 aa, Artificial Sequence
  Cyclic GFR-binding peptide
APTKLSPINVLYFDSSNNVIYGKIPN

SEQ ID NO: 41918 - protein, 26 aa, Artificial Sequence
  Cyclic GFR-binding peptide
TELSPINMLYFDENEKVVYGKIPDMV

SEQ ID NO: 41919 - protein, 27 aa, Artificial Sequence
  Cyclic GFR-binding peptide
KLSPINILYFDKGVVTYYGKIPGMAVS

SEQ ID NO: 41920 - protein, 26 aa, Artificial Sequence
  Cyclic GFR-binding peptide
SPINVLYFDDSSNVIYGKIPNMVVRA

SEQ ID NO: 41921 - protein, 28 aa, Artificial Sequence
  Cyclic GFR-binding peptide
  MOD_RES (1)..(2): Xaa is C or S
XXAPTKLSPINVLYFDDSSNVIYGKIPN

SEQ ID NO: 41922 - protein, 39 aa, Artificial Sequence
  Cyclic GFR-binding peptide
  MOD_RES (6)..(38): Xaa is C or S
VTKPTXAPTKLSPINVLYFDDSSNVIYGKIPNMVVRSXG

SEQ ID NO: 41923 - protein, 30 aa, Artificial Sequence
  Cyclic GFR-binding peptide
  MOD_RES (28)..(30): Xaa is C or S
LSPINVLYFDDSSNVIYGKIPNMVVRAXGX

SEQ ID NO: 41924 - protein, 30 aa, Artificial Sequence
  Cyclic GFR-binding peptide
  MOD_RES (1)..(1): Xaa is C or S
XVPTKLSPINILYFDKGVVTYYGKIPGMAV

SEQ ID NO: 41925 - protein, 32 aa, Artificial Sequence
  Cyclic GFR-binding peptide
  MOD_RES (4)..(5): Xaa is C or S
PKAXXAPTKLSPINVLYFDSSNNVIYGKIPNM

SEQ ID NO: 41926 - protein, 40 aa, Artificial Sequence
  Cyclic GFR-binding peptide
  MOD_RES (6)..(7)..(39): Xaa is C or S
STPPTXXVPTRLSPINILYFDSANNVVYGKIPDMVVESXG

SEQ ID NO: 41927 - protein, 36 aa, Artificial Sequence
  Cyclic GFR-binding peptide
  MOD_RES (6)..(7): Xaa is C or S
SIPKAXXVPTELSPINMLYFDEYDKVVYGKIPEMVV

SEQ ID NO: 41928 - protein, 27 aa, Artificial Sequence
  Cyclic GFR-binding peptide
PTKLSPINVLYFDDSSNVIYGKIPNMV

SEQ ID NO: 41929 - protein, 27 aa, Artificial Sequence
  Cyclic GFR-binding peptide
PTKLSPINVLYFDSSNNVIYGKIPNMV

SEQ ID NO: 41930 - protein, 32 aa, Artificial Sequence
  Cyclic GFR-binding peptide
  MOD_RES (1)..(1): Xaa is C or S
XVPTELSPINMLYFDENEKVVYGKIPDMVVEG

SEQ ID NO: 41931 - protein, 33 aa, Artificial Sequence
  Cyclic GFR-binding peptide
  MOD_RES (5)..(6): Xaa is C or S
ASKAXXVPTKLSPINILYFDKGVVTYYGKIPGM

SEQ ID NO: 41932 - protein, 37 aa, Artificial Sequence
  Cyclic GFR-binding peptide
  MOD_RES (3)..(4)..(36): Xaa is C or S
KAXXVPTELSPINMLYFDEYDKVVYGKIPEMVVEGXG

SEQ ID NO: 41933 - protein, 28 aa, Artificial Sequence
  Cyclic GFR-binding peptide
  MOD_RES (2)..(3): Xaa is C or S
AXXVPTKLSPINILYFDKGVVTYYGKIP

SEQ ID NO: 41934 - protein, 25 aa, Artificial Sequence
  Cyclic GFR-binding peptide
LSPINMLYFDEYDKVVYGKIPEMVV

SEQ ID NO: 41935 - protein, 24 aa, Artificial Sequence
  Cyclic GFR-binding peptide
SPINILYFDAANNVVYGKIPDMVV

SEQ ID NO: 41936 - protein, 40 aa, Artificial Sequence
  Cyclic GFR-binding peptide
  MOD_RES (5)..(6)..(38)..(40): Xaa is C or S
VPKPXXAPTKLSPINVLYFDDSSNVIYGKIPNMVVRSXGX

SEQ ID NO: 41937 - protein, 30 aa, Artificial Sequence
  Cyclic GFR-binding peptide
  MOD_RES (29)..(29): Xaa is C or S
ELSPINMLYFDEYDKVVYGKIPEMVVEGXG

SEQ ID NO: 41938 - protein, 32 aa, Artificial Sequence
  Cyclic GFR-binding peptide
  MOD_RES (1)..(1): Xaa is C or S
XVPTKLSPINVLYFDDMGVPTYGKIPEGMSVA

SEQ ID NO: 41939 - protein, 27 aa, Artificial Sequence
  Cyclic GFR-binding peptide
  MOD_RES (1)..(1): Xaa is C or S
XVPTKLSPINILYFDKGVVTYYGKIPG

SEQ ID NO: 41940 - protein, 31 aa, Artificial Sequence
  Cyclic GFR-binding peptide
  MOD_RES (5)..(6): Xaa is C or S
ASKAXXVPTKLSPINILYFDKGVVTYYGKIP

SEQ ID NO: 41941 - protein, 20 aa, Artificial Sequence
  Cyclic GFR-binding peptide
SPINILYFDSANNVVYGKIP

SEQ ID NO: 41942 - protein, 23 aa, Artificial Sequence
  Cyclic GFR-binding peptide
KLSPINVLYFDDMGVPTYGKIPE

SEQ ID NO: 41943 - protein, 37 aa, Artificial Sequence
  Cyclic GFR-binding peptide
  MOD_RES (5)..(6): Xaa is C or S
APASXXVPARLSPINILYFDAANNVVYGKIPDMVVEA

SEQ ID NO: 41944 - protein, 29 aa, Artificial Sequence
  Cyclic GFR-binding peptide
  MOD_RES (27)..(29): Xaa is C or S
SPINVLYFDSSNNVIYGKIPNMVVKAXGX

SEQ ID NO: 41945 - protein, 34 aa, Artificial Sequence
  Cyclic GFR-binding peptide
  MOD_RES (1)..(33): Xaa is C or S
XVPTRLSPINILYFDSANNVVYGKIPDMVVESXG

SEQ ID NO: 41946 - protein, 29 aa, Artificial Sequence
  Cyclic GFR-binding peptide
  MOD_RES (1)..(1): Xaa is C or S
XAPVKTSPINMLYFDNGRVLLYGKIPMIV

SEQ ID NO: 41947 - protein, 28 aa, Artificial Sequence
  Cyclic GFR-binding peptide
  MOD_RES (1)..(1): Xaa is C or S
XAPTKLSPINVLYFDSSNNVIYGKIPNM

SEQ ID NO: 41948 - protein, 41 aa, Artificial Sequence
  Cyclic GFR-binding peptide
  MOD_RES (5)..(6)..(38)..(40): Xaa is C or S
IPKAXXVPTELSPINMLYFDEYDKVVYGKIPEMVVEGXGXR

SEQ ID NO: 41949 - protein, 29 aa, Artificial Sequence
  Cyclic GFR-binding peptide
  MOD_RES (3)..(3): Xaa is C or S
PTXAPTKLSPINVLYFDDSSNVIYGKIPN

SEQ ID NO: 41950 - protein, 27 aa, Artificial Sequence
  Cyclic GFR-binding peptide
PTKLSPINILYFDKGVVTYYGKIPGMA

SEQ ID NO: 41951 - protein, 34 aa, Artificial Sequence
  Cyclic GFR-binding peptide
  MOD_RES (3)..(4): Xaa is C or S
KAXXVPTELSPINMLYFDENEKVVYGKIPDMVVE

SEQ ID NO: 41952 - protein, 41 aa, Artificial Sequence
  Cyclic GFR-binding peptide
  MOD_RES (7)..(39)..(41): Xaa is C or S
HVTKPTXAPTKLSPINVLYFDDSSNVIYGKIPNMVVRSXGX

SEQ ID NO: 41953 - protein, 30 aa, Artificial Sequence
  Cyclic GFR-binding peptide
  MOD_RES (27)..(29): Xaa is C or S
SPINVLYFDSSNNVIYGKIPNMVVKAXGXH

SEQ ID NO: 41954 - protein, 31 aa, Artificial Sequence
  Cyclic GFR-binding peptide
  MOD_RES (28)..(30): Xaa is C or S
KTSPINMLYFDNGRVLLYGKIPMIVEEXGXL

SEQ ID NO: 41955 - protein, 20 aa, Artificial Sequence
  Cyclic GFR-binding peptide
SPINMLYFDNGRVLLYGKIP

SEQ ID NO: 41956 - protein, 35 aa, Artificial Sequence
  Cyclic GFR-binding peptide
  MOD_RES (4)..(5): Xaa is C or S
PKPXXAPTKLSPINVLYFDDSSNVIYGKIPNMVVR

SEQ ID NO: 41957 - protein, 31 aa, Artificial Sequence
  Cyclic GFR-binding peptide
  MOD_RES (28)..(30): Xaa is C or S
LSPINILYFDSANNVVYGKIPDMVVESXGXR

SEQ ID NO: 41958 - protein, 41 aa, Artificial Sequence
  Cyclic GFR-binding peptide
  MOD_RES (6)..(7)..(39)..(41): Xaa is C or S
HVPKPXXAPTKLSPINVLYFDDSSNVIYGKIPNMVVRSXGX

SEQ ID NO: 41959 - protein, 31 aa, Artificial Sequence
  Cyclic GFR-binding peptide
  MOD_RES (1)..(2): Xaa is C or S
XXAPTQLSPINVLYFDDSSNVIYGKIPNMVV

SEQ ID NO: 41960 - protein, 30 aa, Artificial Sequence
  Cyclic GFR-binding peptide
  MOD_RES (1)..(2): Xaa is C or S
XXAPVKTSPINMLYFDNGRVLLYGKIPMIV

SEQ ID NO: 41961 - protein, 32 aa, Artificial Sequence
  Cyclic GFR-binding peptide
  MOD_RES (31)..(31): Xaa is C or S
PTKLSPINVLYFDSSNNVIYGKIPNMVVKAXG

SEQ ID NO: 41962 - protein, 38 aa, Artificial Sequence
  Cyclic GFR-binding peptide
  MOD_RES (5)..(6)..(38): Xaa is C or S
IPKAXXVPTELSPINMLYFDEYDKVVYGKIPEMVVEGX

SEQ ID NO: 41963 - protein, 25 aa, Artificial Sequence
  Cyclic GFR-binding peptide
SPINMLYFDEYDKVVYGKIPEMVVE

SEQ ID NO: 41964 - protein, 35 aa, Artificial Sequence
  Cyclic GFR-binding peptide
  MOD_RES (4)..(5): Xaa is C or S
PKAXXVPTELSPINMLYFDEYDKVVYGKIPEMVVE

SEQ ID NO: 41965 - protein, 31 aa, Artificial Sequence
  Cyclic GFR-binding peptide
  MOD_RES (30)..(30): Xaa is C or S
ARLSPINILYFDAANNVVYGKIPDMVVEAXG

SEQ ID NO: 41966 - protein, 21 aa, Artificial Sequence
  Cyclic GFR-binding peptide
SPINMLYFDEYDKVVYGKIPE

SEQ ID NO: 41967 - protein, 39 aa, Artificial Sequence
  Cyclic GFR-binding peptide
  MOD_RES (6)..(7): Xaa is C or S
KVGKAXXVPTKLSPINVLYFDDMGVPTYGKIPEGMSVAE

SEQ ID NO: 41968 - protein, 31 aa, Artificial Sequence
  Cyclic GFR-binding peptide
VPARLSPINILYFDAANNVVYGKIPDMVVEA

SEQ ID NO: 41969 - protein, 32 aa, Artificial Sequence
  Cyclic GFR-binding peptide
  MOD_RES (4)..(5): Xaa is C or S
PASXXVPARLSPINILYFDAANNVVYGKIPDM

SEQ ID NO: 41970 - protein, 28 aa, Artificial Sequence
  Cyclic GFR-binding peptide
  MOD_RES (1)..(1): Xaa is C or S
XVPTKLSPINILYFDKGVVTYYGKIPGM

SEQ ID NO: 41971 - protein, 30 aa, Artificial Sequence
  Cyclic GFR-binding peptide
  MOD_RES (27)..(29): Xaa is C or S
SPINMLYFDENEKVVYGKIPDMVVEGXGXR

SEQ ID NO: 41972 - protein, 32 aa, Artificial Sequence
  Cyclic GFR-binding peptide
  MOD_RES (2)..(3): Xaa is C or S
PXXAPTQLSPINVLYFDDSSNVIYGKIPNMVV

SEQ ID NO: 41973 - protein, 38 aa, Artificial Sequence
  Cyclic GFR-binding peptide
  MOD_RES (3)..(4)..(36)..(38): Xaa is C or S
KAXXVPTELSPINMLYFDENEKVVYGKIPDMVVEGXGX

SEQ ID NO: 41974 - protein, 32 aa, Artificial Sequence
  Cyclic GFR-binding peptide
  MOD_RES (29)..(31): Xaa is C or S
KLSPINVLYFDDSSNVIYGKIPNMVVRSXGXH

SEQ ID NO: 41975 - protein, 34 aa, Artificial Sequence
  Cyclic GFR-binding peptide
  MOD_RES (4)..(5): Xaa is C or S
PKAXXVPTELSPINMLYFDENEKVVYGKIPDMVV

SEQ ID NO: 41976 - protein, 34 aa, Artificial Sequence
  Cyclic GFR-binding peptide
  MOD_RES (1)..(33): Xaa is C or S
XVPTELSPINMLYFDENEKVVYGKIPDMVVEGXG

SEQ ID NO: 41977 - protein, 33 aa, Artificial Sequence
  Cyclic GFR-binding peptide
  MOD_RES (6)..(7): Xaa is C or S
STPPTXXVPTRLSPINILYFDSANNVVYGKIPD

SEQ ID NO: 41978 - protein, 35 aa, Artificial Sequence
  Cyclic GFR-binding peptide
  MOD_RES (1)..(2)..(34): Xaa is C or S
XXAPTQLSPINVLYFDDSSNVIYGKIPNMVVRAXG

SEQ ID NO: 41979 - protein, 25 aa, Artificial Sequence
  Cyclic GFR-binding peptide
LSPINVLYFDDMGVPTYGKIPEGMS

SEQ ID NO: 41980 - protein, 31 aa, Artificial Sequence
  Cyclic GFR-binding peptide
VPTELSPINMLYFDEYDKVVYGKIPEMVVEG

SEQ ID NO: 41981 - protein, 40 aa, Artificial Sequence
  Cyclic GFR-binding peptide
  MOD_RES (4)..(5)..(37)..(39): Xaa is C or S
PKAXXVPTELSPINMLYFDENEKVVYGKIPDMVVEGXGXR

SEQ ID NO: 41982 - protein, 38 aa, Artificial Sequence
  Cyclic GFR-binding peptide
  MOD_RES (2)..(3)..(35)..(37): Xaa is C or S
AXXVPTKLSPINILYFDKGVVTYYGKIPGMAVSEXGXR

SEQ ID NO: 41983 - protein, 40 aa, Artificial Sequence
  Cyclic GFR-binding peptide
  MOD_RES (6)..(7)..(39): Xaa is C or S
AVPKAXXAPTKLSPINVLYFDSSNNVIYGKIPNMVVKAXG

SEQ ID NO: 41984 - protein, 28 aa, Artificial Sequence
  Cyclic GFR-binding peptide
  MOD_RES (1)..(2): Xaa is C or S
XXVPARLSPINILYFDAANNVVYGKIPD

SEQ ID NO: 41985 - protein, 36 aa, Artificial Sequence
  Cyclic GFR-binding peptide
  MOD_RES (2)..(3)..(35): Xaa is C or S
AXXAPTKLSPINVLYFDSSNNVIYGKIPNMVVKAXG

SEQ ID NO: 41986 - protein, 34 aa, Artificial Sequence
  Cyclic GFR-binding peptide
  MOD_RES (32)..(34): Xaa is C or S
VPTRLSPINILYFDSANNVVYGKIPDMVVESXGX

SEQ ID NO: 41987 - protein, 37 aa, Artificial Sequence
  Cyclic GFR-binding peptide
  MOD_RES (6)..(7): Xaa is C or S
YVPKPXXAPTKLSPINVLYFDDSSNVIYGKIPNMVVR

SEQ ID NO: 41988 - protein, 30 aa, Artificial Sequence
  Cyclic GFR-binding peptide
PTQLSPINVLYFDDSSNVIYGKIPNMVVRA

SEQ ID NO: 41989 - protein, 33 aa, Artificial Sequence
  Cyclic GFR-binding peptide
  MOD_RES (4)..(5): Xaa is C or S
PPTXXVPTRLSPINILYFDSANNVVYGKIPDMV

SEQ ID NO: 41990 - protein, 39 aa, Artificial Sequence
  Cyclic GFR-binding peptide
  MOD_RES (5)..(6)..(38): Xaa is C or S
IPKAXXVPTELSPINMLYFDEYDKVVYGKIPEMVVEGXG

SEQ ID NO: 41991 - protein, 27 aa, Artificial Sequence
  Cyclic GFR-binding peptide
VPARLSPINILYFDAANNVVYGKIPDM

SEQ ID NO: 41992 - protein, 33 aa, Artificial Sequence
  Cyclic GFR-binding peptide
  MOD_RES (4)..(5): Xaa is C or S
PKPXXAPTQLSPINVLYFDDSSNVIYGKIPNMV

SEQ ID NO: 41993 - protein, 32 aa, Artificial Sequence
  Cyclic GFR-binding peptide
  MOD_RES (1)..(1): Xaa is C or S
XAPTKLSPINVLYFDDSSNVIYGKIPNMVVRS

SEQ ID NO: 41994 - protein, 35 aa, Artificial Sequence
  Cyclic GFR-binding peptide
  MOD_RES (1)..(33)..(35): Xaa is C or S
XAPTKLSPINVLYFDSSNNVIYGKIPNMVVKAXGX

SEQ ID NO: 41995 - protein, 22 aa, Artificial Sequence
  Cyclic GFR-binding peptide
SPINMLYFDENEKVVYGKIPDM

SEQ ID NO: 41996 - protein, 36 aa, Artificial Sequence
  Cyclic GFR-binding peptide
  MOD_RES (4)..(5): Xaa is C or S
PKAXXVPTELSPINMLYFDENEKVVYGKIPDMVVEG

SEQ ID NO: 41997 - protein, 35 aa, Artificial Sequence
  Cyclic GFR-binding peptide
  MOD_RES (3)..(4)..(35): Xaa is C or S
STXXAPVKTSPINMLYFDNGRVLLYGKIPMIVEEX

SEQ ID NO: 41998 - protein, 24 aa, Artificial Sequence
  Cyclic GFR-binding peptide
PTELSPINMLYFDEYDKVVYGKIP

SEQ ID NO: 41999 - protein, 36 aa, Artificial Sequence
  Cyclic GFR-binding peptide
  MOD_RES (6)..(6): Xaa is C or S
VTKPTXAPTKLSPINVLYFDDSSNVIYGKIPNMVVR

SEQ ID NO: 42000 - protein, 35 aa, Artificial Sequence
  Cyclic GFR-binding peptide
  MOD_RES (5)..(6): Xaa is C or S
VPKPXXAPTQLSPINVLYFDDSSNVIYGKIPNMVV

SEQ ID NO: 42001 - protein, 39 aa, Artificial Sequence
  Cyclic GFR-binding peptide
  MOD_RES (6)..(7)..(39): Xaa is C or S
HVPKPXXAPTKLSPINVLYFDDSSNVIYGKIPNMVVRSX

SEQ ID NO: 42002 - protein, 40 aa, Artificial Sequence
  Cyclic GFR-binding peptide
  MOD_RES (6)..(7)..(38)..(40): Xaa is C or S
RVPSTXXAPVKTSPINMLYFDNGRVLLYGKIPMIVEEXGX

SEQ ID NO: 42003 - protein, 28 aa, Artificial Sequence
  Cyclic GFR-binding peptide
ELSPINMLYFDEYDKVVYGKIPEMVVEG

SEQ ID NO: 42004 - protein, 29 aa, Artificial Sequence
  Cyclic GFR-binding peptide
  MOD_RES (28)..(28): Xaa is C or S
LSPINMLYFDEYDKVVYGKIPEMVVEGXG

SEQ ID NO: 42005 - protein, 38 aa, Artificial Sequence
  Cyclic GFR-binding peptide
  MOD_RES (4)..(5)..(37): Xaa is C or S
PKPXXAPTKLSPINVLYFDDSSNVIYGKIPNMVVRSXG

SEQ ID NO: 42006 - protein, 26 aa, Artificial Sequence
  Cyclic GFR-binding peptide
  MOD_RES (1)..(1): Xaa is C or S
XVPTELSPINMLYFDENEKVVYGKIP

SEQ ID NO: 42007 - protein, 36 aa, Artificial Sequence
  Cyclic GFR-binding peptide
  MOD_RES (3)..(4)..(36): Xaa is C or S
KPXXAPTQLSPINVLYFDDSSNVIYGKIPNMVVRAX

SEQ ID NO: 42008 - protein, 36 aa, Artificial Sequence
  Cyclic GFR-binding peptide
  MOD_RES (3)..(4)..(35): Xaa is C or S
STXXAPVKTSPINMLYFDNGRVLLYGKIPMIVEEXG

SEQ ID NO: 42009 - protein, 31 aa, Artificial Sequence
  Cyclic GFR-binding peptide
  MOD_RES (5)..(5): Xaa is C or S
TKPTXAPTKLSPINVLYFDDSSNVIYGKIPN

SEQ ID NO: 42010 - protein, 23 aa, Artificial Sequence
  Cyclic GFR-binding peptide
SPINMLYFDEYDKVVYGKIPEMV

SEQ ID NO: 42011 - protein, 29 aa, Artificial Sequence
  Cyclic GFR-binding peptide
VPTKLSPINVLYFDDMGVPTYGKIPEGMS

SEQ ID NO: 42012 - protein, 32 aa, Artificial Sequence
  Cyclic GFR-binding peptide
  MOD_RES (1)..(2): Xaa is C or S
XXVPTELSPINMLYFDENEKVVYGKIPDMVVE

SEQ ID NO: 42013 - protein, 28 aa, Artificial Sequence
  Cyclic GFR-binding peptide
QLSPINVLYFDDSSNVIYGKIPNMVVRA

SEQ ID NO: 42014 - protein, 33 aa, Artificial Sequence
  Cyclic GFR-binding peptide
  MOD_RES (6)..(7): Xaa is C or S
AAPASXXVPARLSPINILYFDAANNVVYGKIPD

SEQ ID NO: 42015 - protein, 33 aa, Artificial Sequence
  Cyclic GFR-binding peptide
  MOD_RES (30)..(32): Xaa is C or S
ARLSPINILYFDAANNVVYGKIPDMVVEAXGXR

SEQ ID NO: 42016 - protein, 32 aa, Artificial Sequence
  Cyclic GFR-binding peptide
  MOD_RES (2)..(3): Xaa is C or S
PXXAPTKLSPINVLYFDDSSNVIYGKIPNMVV

SEQ ID NO: 42017 - protein, 29 aa, Artificial Sequence
  Cyclic GFR-binding peptide
  MOD_RES (28)..(28): Xaa is C or S
SPINVLYFDDMGVPTYGKIPEGMSVAEXG

SEQ ID NO: 42018 - protein, 33 aa, Artificial Sequence
  Cyclic GFR-binding peptide
  MOD_RES (1)..(2): Xaa is C or S
XXAPTKLSPINVLYFDDSSNVIYGKIPNMVVRS

SEQ ID NO: 42019 - protein, 32 aa, Artificial Sequence
  Cyclic GFR-binding peptide
  MOD_RES (29)..(31): Xaa is C or S
ELSPINMLYFDENEKVVYGKIPDMVVEGXGXR

SEQ ID NO: 42020 - protein, 35 aa, Artificial Sequence
  Cyclic GFR-binding peptide
  MOD_RES (5)..(6): Xaa is C or S
VPKPXXAPTKLSPINVLYFDDSSNVIYGKIPNMVV

SEQ ID NO: 42021 - protein, 35 aa, Artificial Sequence
  Cyclic GFR-binding peptide
  MOD_RES (1)..(33)..(35): Xaa is C or S
XVPARLSPINILYFDAANNVVYGKIPDMVVEAXGX

SEQ ID NO: 42022 - protein, 37 aa, Artificial Sequence
  Cyclic GFR-binding peptide
  MOD_RES (3)..(4)..(36): Xaa is C or S
KPXXAPTQLSPINVLYFDDSSNVIYGKIPNMVVRAXG

SEQ ID NO: 42023 - protein, 36 aa, Artificial Sequence
  Cyclic GFR-binding peptide
  MOD_RES (6)..(7): Xaa is C or S
RVPSTXXAPVKTSPINMLYFDNGRVLLYGKIPMIVE

SEQ ID NO: 42024 - protein, 34 aa, Artificial Sequence
  Cyclic GFR-binding peptide
  MOD_RES (5)..(6): Xaa is C or S
IPKAXXVPTELSPINMLYFDENEKVVYGKIPDMV

SEQ ID NO: 42025 - protein, 28 aa, Artificial Sequence
  Cyclic GFR-binding peptide
  MOD_RES (1)..(1): Xaa is C or S
XAPTQLSPINVLYFDDSSNVIYGKIPNM

SEQ ID NO: 42026 - protein, 39 aa, Artificial Sequence
  Cyclic GFR-binding peptide
  MOD_RES (5)..(6)..(37)..(39): Xaa is C or S
VPSTXXAPVKTSPINMLYFDNGRVLLYGKIPMIVEEXGX

SEQ ID NO: 42027 - protein, 34 aa, Artificial Sequence
  Cyclic GFR-binding peptide
  MOD_RES (3)..(4): Xaa is C or S
KAXXAPTKLSPINVLYFDSSNNVIYGKIPNMVVK

SEQ ID NO: 42028 - protein, 42 aa, Artificial Sequence
  Cyclic GFR-binding peptide
  MOD_RES (6)..(7)..(39)..(41): Xaa is C or S
YVPKPXXAPTKLSPINVLYFDDSSNVIYGKIPNMVVRSXGXH

SEQ ID NO: 42029 - protein, 36 aa, Artificial Sequence
  Cyclic GFR-binding peptide
  MOD_RES (2)..(3)..(35): Xaa is C or S
TXXVPTRLSPINILYFDSANNVVYGKIPDMVVESXG

SEQ ID NO: 42030 - protein, 33 aa, Artificial Sequence
  Cyclic GFR-binding peptide
  MOD_RES (5)..(6): Xaa is C or S
VPKPXXAPTKLSPINVLYFDDSSNVIYGKIPNM

SEQ ID NO: 42031 - protein, 38 aa, Artificial Sequence
  Cyclic GFR-binding peptide
  MOD_RES (6)..(7): Xaa is C or S
SIPKAXXVPTELSPINMLYFDEYDKVVYGKIPEMVVEG

SEQ ID NO: 42032 - protein, 36 aa, Artificial Sequence
  Cyclic GFR-binding peptide
  MOD_RES (5)..(6): Xaa is C or S
VPKAXXAPTKLSPINVLYFDSSNNVIYGKIPNMVVK

SEQ ID NO: 42033 - protein, 34 aa, Artificial Sequence
  Cyclic GFR-binding peptide
  MOD_RES (4)..(5): Xaa is C or S
PASXXVPARLSPINILYFDAANNVVYGKIPDMVV

SEQ ID NO: 42034 - protein, 27 aa, Artificial Sequence
  Cyclic GFR-binding peptide
PTELSPINMLYFDEYDKVVYGKIPEMV

SEQ ID NO: 42035 - protein, 29 aa, Artificial Sequence
  Cyclic GFR-binding peptide
  MOD_RES (27)..(29): Xaa is C or S
SPINVLYFDDSSNVIYGKIPNMVVRAXGX

SEQ ID NO: 42036 - protein, 35 aa, Artificial Sequence
  Cyclic GFR-binding peptide
  MOD_RES (5)..(6): Xaa is C or S
VGKAXXVPTKLSPINVLYFDDMGVPTYGKIPEGMS

SEQ ID NO: 42037 - protein, 31 aa, Artificial Sequence
  Cyclic GFR-binding peptide
PTKLSPINVLYFDDMGVPTYGKIPEGMSVAE

SEQ ID NO: 42038 - protein, 22 aa, Artificial Sequence
  Cyclic GFR-binding peptide
ELSPINMLYFDEYDKVVYGKIP

SEQ ID NO: 42039 - protein, 31 aa, Artificial Sequence
  Cyclic GFR-binding peptide
APTKLSPINVLYFDSSNNVIYGKIPNMVVKA

SEQ ID NO: 42040 - protein, 40 aa, Artificial Sequence
  Cyclic GFR-binding peptide
  MOD_RES (5)..(6)..(38)..(40): Xaa is C or S
VPKPXXAPTQLSPINVLYFDDSSNVIYGKIPNMVVRAXGX

SEQ ID NO: 42041 - protein, 37 aa, Artificial Sequence
  Cyclic GFR-binding peptide
  MOD_RES (4)..(5)..(37): Xaa is C or S
PKPXXAPTKLSPINVLYFDDSSNVIYGKIPNMVVRSX

SEQ ID NO: 42042 - protein, 37 aa, Artificial Sequence
  Cyclic GFR-binding peptide
  MOD_RES (6)..(7): Xaa is C or S
AAPASXXVPARLSPINILYFDAANNVVYGKIPDMVVE

SEQ ID NO: 42043 - protein, 34 aa, Artificial Sequence
  Cyclic GFR-binding peptide
  MOD_RES (2)..(3)..(34): Xaa is C or S
TXXAPVKTSPINMLYFDNGRVLLYGKIPMIVEEX

SEQ ID NO: 42044 - protein, 32 aa, Artificial Sequence
  Cyclic GFR-binding peptide
  MOD_RES (4)..(4): Xaa is C or S
KPTXAPTKLSPINVLYFDDSSNVIYGKIPNMV

SEQ ID NO: 42045 - protein, 31 aa, Artificial Sequence
  Cyclic GFR-binding peptide
  MOD_RES (1)..(1): Xaa is C or S
XAPTKLSPINVLYFDDSSNVIYGKIPNMVVR

SEQ ID NO: 42046 - protein, 28 aa, Artificial Sequence
  Cyclic GFR-binding peptide
  MOD_RES (28)..(28): Xaa is C or S
SPINVLYFDDMGVPTYGKIPEGMSVAEX

SEQ ID NO: 42047 - protein, 41 aa, Artificial Sequence
  Cyclic GFR-binding peptide
  MOD_RES (6)..(7)..(40): Xaa is C or S
KVGKAXXVPTKLSPINVLYFDDMGVPTYGKIPEGMSVAEXG

SEQ ID NO: 42048 - protein, 33 aa, Artificial Sequence
  Cyclic GFR-binding peptide
  MOD_RES (6)..(7): Xaa is C or S
KIPKAXXVPTELSPINMLYFDENEKVVYGKIPD

SEQ ID NO: 42049 - protein, 32 aa, Artificial Sequence
  Cyclic GFR-binding peptide
  MOD_RES (1)..(2): Xaa is C or S
XXVPTRLSPINILYFDSANNVVYGKIPDMVVE

SEQ ID NO: 42050 - protein, 38 aa, Artificial Sequence
  Cyclic GFR-binding peptide
  MOD_RES (2)..(3)..(36)..(38): Xaa is C or S
AXXVPTKLSPINVLYFDDMGVPTYGKIPEGMSVAEXGX

SEQ ID NO: 42051 - protein, 36 aa, Artificial Sequence
  Cyclic GFR-binding peptide
  MOD_RES (2)..(3)..(35): Xaa is C or S
PXXAPTKLSPINVLYFDDSSNVIYGKIPNMVVRSXG

SEQ ID NO: 42052 - protein, 22 aa, Artificial Sequence
  Cyclic GFR-binding peptide
KTSPINMLYFDNGRVLLYGKIP

SEQ ID NO: 42053 - protein, 30 aa, Artificial Sequence
  Cyclic GFR-binding peptide
  MOD_RES (4)..(5): Xaa is C or S
PKAXXAPTKLSPINVLYFDSSNNVIYGKIP

SEQ ID NO: 42054 - protein, 34 aa, Artificial Sequence
  Cyclic GFR-binding peptide
  MOD_RES (3)..(4): Xaa is C or S
KAXXVPTKLSPINILYFDKGVVTYYGKIPGMAVS

SEQ ID NO: 42055 - protein, 33 aa, Artificial Sequence
  Cyclic GFR-binding peptide
  MOD_RES (31)..(33): Xaa is C or S
TKLSPINVLYFDDMGVPTYGKIPEGMSVAEXGX

SEQ ID NO: 42056 - protein, 26 aa, Artificial Sequence
  Cyclic GFR-binding peptide
LSPINILYFDAANNVVYGKIPDMVVE

SEQ ID NO: 42057 - protein, 28 aa, Artificial Sequence
  Cyclic GFR-binding peptide
  MOD_RES (28)..(28): Xaa is C or S
LSPINILYFDSANNVVYGKIPDMVVESX

SEQ ID NO: 42058 - protein, 29 aa, Artificial Sequence
  Cyclic GFR-binding peptide
TKLSPINILYFDKGVVTYYGKIPGMAVSE

SEQ ID NO: 42059 - protein, 32 aa, Artificial Sequence
  Cyclic GFR-binding peptide
  MOD_RES (1)..(2): Xaa is C or S
XXVPARLSPINILYFDAANNVVYGKIPDMVVE

SEQ ID NO: 42060 - protein, 36 aa, Artificial Sequence
  Cyclic GFR-binding peptide
  MOD_RES (4)..(5): Xaa is C or S
GKAXXVPTKLSPINVLYFDDMGVPTYGKIPEGMSVA

SEQ ID NO: 42061 - protein, 29 aa, Artificial Sequence
  Cyclic GFR-binding peptide
  MOD_RES (1)..(2): Xaa is C or S
XXVPTELSPINMLYFDEYDKVVYGKIPEM

SEQ ID NO: 42062 - protein, 32 aa, Artificial Sequence
  Cyclic GFR-binding peptide
  MOD_RES (30)..(32): Xaa is C or S
TQLSPINVLYFDDSSNVIYGKIPNMVVRAXGX

SEQ ID NO: 42063 - protein, 36 aa, Artificial Sequence
  Cyclic GFR-binding peptide
  MOD_RES (1)..(2)..(34)..(36): Xaa is C or S
XXVPTRLSPINILYFDSANNVVYGKIPDMVVESXGX

SEQ ID NO: 42064 - protein, 28 aa, Artificial Sequence
  Cyclic GFR-binding peptide
  MOD_RES (1)..(2): Xaa is C or S
XXVPTKLSPINILYFDKGVVTYYGKIPG

SEQ ID NO: 42065 - protein, 38 aa, Artificial Sequence
  Cyclic GFR-binding peptide
  MOD_RES (5)..(6)..(38): Xaa is C or S
ASKAXXVPTKLSPINILYFDKGVVTYYGKIPGMAVSEX

SEQ ID NO: 42066 - protein, 25 aa, Artificial Sequence
  Cyclic GFR-binding peptide
APTKLSPINVLYFDDSSNVIYGKIP

SEQ ID NO: 42067 - protein, 31 aa, Artificial Sequence
  Cyclic GFR-binding peptide
  MOD_RES (4)..(5): Xaa is C or S
PKPXXAPTKLSPINVLYFDDSSNVIYGKIPN

SEQ ID NO: 42068 - protein, 37 aa, Artificial Sequence
  Cyclic GFR-binding peptide
  MOD_RES (2)..(3)..(35)..(37): Xaa is C or S
PXXAPTQLSPINVLYFDDSSNVIYGKIPNMVVRAXGX

SEQ ID NO: 42069 - protein, 34 aa, Artificial Sequence
  Cyclic GFR-binding peptide
  MOD_RES (3)..(4): Xaa is C or S
PTXXVPTRLSPINILYFDSANNVVYGKIPDMVVE

SEQ ID NO: 42070 - protein, 40 aa, Artificial Sequence
  Cyclic GFR-binding peptide
  MOD_RES (5)..(37)..(39): Xaa is C or S
TKPTXAPTKLSPINVLYFDDSSNVIYGKIPNMVVRSXGXH

SEQ ID NO: 42071 - protein, 39 aa, Artificial Sequence
  Cyclic GFR-binding peptide
  MOD_RES (4)..(5)..(37)..(39): Xaa is C or S
PKAXXAPTKLSPINVLYFDSSNNVIYGKIPNMVVKAXGX

SEQ ID NO: 42072 - protein, 26 aa, Artificial Sequence
  Cyclic GFR-binding peptide
PTELSPINMLYFDEYDKVVYGKIPEM

SEQ ID NO: 42073 - protein, 25 aa, Artificial Sequence
  Cyclic GFR-binding peptide
PTELSPINMLYFDEYDKVVYGKIPE

SEQ ID NO: 42074 - protein, 34 aa, Artificial Sequence
  Cyclic GFR-binding peptide
  MOD_RES (2)..(3): Xaa is C or S
AXXVPTELSPINMLYFDEYDKVVYGKIPEMVVEG

SEQ ID NO: 42075 - protein, 38 aa, Artificial Sequence
  Cyclic GFR-binding peptide
  MOD_RES (2)..(3)..(35)..(37): Xaa is C or S
TXXVPTRLSPINILYFDSANNVVYGKIPDMVVESXGXR

SEQ ID NO: 42076 - protein, 35 aa, Artificial Sequence
  Cyclic GFR-binding peptide
  MOD_RES (6)..(7): Xaa is C or S
KVGKAXXVPTKLSPINVLYFDDMGVPTYGKIPEGM

SEQ ID NO: 42077 - protein, 33 aa, Artificial Sequence
  Cyclic GFR-binding peptide
  MOD_RES (2)..(3): Xaa is C or S
PXXAPTKLSPINVLYFDDSSNVIYGKIPNMVVR

SEQ ID NO: 42078 - protein, 30 aa, Artificial Sequence
  Cyclic GFR-binding peptide
  MOD_RES (3)..(4): Xaa is C or S
KAXXVPTKLSPINILYFDKGVVTYYGKIPG

SEQ ID NO: 42079 - protein, 32 aa, Artificial Sequence
  Cyclic GFR-binding peptide
  MOD_RES (5)..(6): Xaa is C or S
VPSTXXAPVKTSPINMLYFDNGRVLLYGKIPM

SEQ ID NO: 42080 - protein, 32 aa, Artificial Sequence
  Cyclic GFR-binding peptide
  MOD_RES (4)..(5): Xaa is C or S
GKAXXVPTKLSPINVLYFDDMGVPTYGKIPEG

SEQ ID NO: 42081 - protein, 30 aa, Artificial Sequence
  Cyclic GFR-binding peptide
  MOD_RES (28)..(30): Xaa is C or S
LSPINILYFDAANNVVYGKIPDMVVEAXGX

SEQ ID NO: 42082 - protein, 33 aa, Artificial Sequence
  Cyclic GFR-binding peptide
  MOD_RES (32)..(32): Xaa is C or S
APTKLSPINVLYFDSSNNVIYGKIPNMVVKAXG

SEQ ID NO: 42083 - protein, 32 aa, Artificial Sequence
  Cyclic GFR-binding peptide
  MOD_RES (2)..(3): Xaa is C or S
TXXAPVKTSPINMLYFDNGRVLLYGKIPMIVE

SEQ ID NO: 42084 - protein, 33 aa, Artificial Sequence
  Cyclic GFR-binding peptide
  MOD_RES (32)..(32): Xaa is C or S
VPARLSPINILYFDAANNVVYGKIPDMVVEAXG

SEQ ID NO: 42085 - protein, 39 aa, Artificial Sequence
  Cyclic GFR-binding peptide
  MOD_RES (4)..(5)..(37)..(39): Xaa is C or S
PKAXXVPTELSPINMLYFDENEKVVYGKIPDMVVEGXGX

SEQ ID NO: 42086 - protein, 35 aa, Artificial Sequence
  Cyclic GFR-binding peptide
  MOD_RES (6)..(7): Xaa is C or S
YVPKPXXAPTKLSPINVLYFDDSSNVIYGKIPNMV

SEQ ID NO: 42087 - protein, 33 aa, Artificial Sequence
  Cyclic GFR-binding peptide
  MOD_RES (32)..(32): Xaa is C or S
APTKLSPINVLYFDDSSNVIYGKIPNMVVRSXG

SEQ ID NO: 42088 - protein, 30 aa, Artificial Sequence
  Cyclic GFR-binding peptide
  MOD_RES (1)..(1): Xaa is C or S
XAPTKLSPINVLYFDSSNNVIYGKIPNMVV

SEQ ID NO: 42089 - protein, 24 aa, Artificial Sequence
  Cyclic GFR-binding peptide
KLSPINVLYFDSSNNVIYGKIPNM

SEQ ID NO: 42090 - protein, 33 aa, Artificial Sequence
  Cyclic GFR-binding peptide
  MOD_RES (1)..(33): Xaa is C or S
XVPTKLSPINILYFDKGVVTYYGKIPGMAVSEX

SEQ ID NO: 42091 - protein, 23 aa, Artificial Sequence
  Cyclic GFR-binding peptide
ELSPINMLYFDEYDKVVYGKIPE

SEQ ID NO: 42092 - protein, 29 aa, Artificial Sequence
  Cyclic GFR-binding peptide
  MOD_RES (29)..(29): Xaa is C or S
QLSPINVLYFDDSSNVIYGKIPNMVVRAX

SEQ ID NO: 42093 - protein, 20 aa, Artificial Sequence
  Cyclic GFR-binding peptide
SPINMLYFDEYDKVVYGKIP

SEQ ID NO: 42094 - protein, 28 aa, Artificial Sequence
  Cyclic GFR-binding peptide
  MOD_RES (2)..(3): Xaa is C or S
TXXAPVKTSPINMLYFDNGRVLLYGKIP

SEQ ID NO: 42095 - protein, 35 aa, Artificial Sequence
  Cyclic GFR-binding peptide
  MOD_RES (2)..(3): Xaa is C or S
AXXVPTKLSPINVLYFDDMGVPTYGKIPEGMSVAE

SEQ ID NO: 42096 - protein, 20 aa, Artificial Sequence
  Cyclic GFR-binding peptide
SPINMLYFDENEKVVYGKIP

SEQ ID NO: 42097 - protein, 24 aa, Artificial Sequence
  Cyclic GFR-binding peptide
SPINVLYFDDSSNVIYGKIPNMVV

SEQ ID NO: 42098 - protein, 39 aa, Artificial Sequence
  Cyclic GFR-binding peptide
  MOD_RES (4)..(5)..(37)..(39): Xaa is C or S
PPTXXVPTRLSPINILYFDSANNVVYGKIPDMVVESXGX

SEQ ID NO: 42099 - protein, 28 aa, Artificial Sequence
  Cyclic GFR-binding peptide
  MOD_RES (27)..(27): Xaa is C or S
SPINMLYFDEYDKVVYGKIPEMVVEGXG

SEQ ID NO: 42100 - protein, 32 aa, Artificial Sequence
  Cyclic GFR-binding peptide
  MOD_RES (29)..(31): Xaa is C or S
ELSPINMLYFDEYDKVVYGKIPEMVVEGXGXR

SEQ ID NO: 42101 - protein, 25 aa, Artificial Sequence
  Cyclic GFR-binding peptide
QLSPINVLYFDDSSNVIYGKIPNMV

SEQ ID NO: 42102 - protein, 30 aa, Artificial Sequence
  Cyclic GFR-binding peptide
  MOD_RES (2)..(3): Xaa is C or S
SXXVPARLSPINILYFDAANNVVYGKIPDM

SEQ ID NO: 42103 - protein, 34 aa, Artificial Sequence
  Cyclic GFR-binding peptide
  MOD_RES (31)..(33): Xaa is C or S
PTELSPINMLYFDEYDKVVYGKIPEMVVEGXGXR

SEQ ID NO: 42104 - protein, 33 aa, Artificial Sequence
  Cyclic GFR-binding peptide
  MOD_RES (32)..(32): Xaa is C or S
VPTRLSPINILYFDSANNVVYGKIPDMVVESXG

SEQ ID NO: 42105 - protein, 32 aa, Artificial Sequence
  Cyclic GFR-binding peptide
  MOD_RES (4)..(5): Xaa is C or S
PKPXXAPTKLSPINVLYFDDSSNVIYGKIPNM

SEQ ID NO: 42106 - protein, 23 aa, Artificial Sequence
  Cyclic GFR-binding peptide
LSPINMLYFDEYDKVVYGKIPEM

SEQ ID NO: 42107 - protein, 29 aa, Artificial Sequence
  Cyclic GFR-binding peptide
APTKLSPINVLYFDSSNNVIYGKIPNMVV

SEQ ID NO: 42108 - protein, 30 aa, Artificial Sequence
  Cyclic GFR-binding peptide
  MOD_RES (28)..(30): Xaa is C or S
LSPINVLYFDSSNNVIYGKIPNMVVKAXGX

SEQ ID NO: 42109 - protein, 35 aa, Artificial Sequence
  Cyclic GFR-binding peptide
  MOD_RES (3)..(4): Xaa is C or S
ASXXVPARLSPINILYFDAANNVVYGKIPDMVVEA

SEQ ID NO: 42110 - protein, 35 aa, Artificial Sequence
  Cyclic GFR-binding peptide
  MOD_RES (1)..(2)..(33)..(35): Xaa is C or S
XXAPVKTSPINMLYFDNGRVLLYGKIPMIVEEXGX

SEQ ID NO: 42111 - protein, 42 aa, Artificial Sequence
  Cyclic GFR-binding peptide
  MOD_RES (6)..(7)..(39)..(41): Xaa is C or S
KASKAXXVPTKLSPINILYFDKGVVTYYGKIPGMAVSEXGXR

SEQ ID NO: 42112 - protein, 26 aa, Artificial Sequence
  Cyclic GFR-binding peptide
VPTKLSPINVLYFDDMGVPTYGKIPE

SEQ ID NO: 42113 - protein, 29 aa, Artificial Sequence
  Cyclic GFR-binding peptide
  MOD_RES (1)..(2): Xaa is C or S
XXVPTRLSPINILYFDSANNVVYGKIPDM

SEQ ID NO: 42114 - protein, 32 aa, Artificial Sequence
  Cyclic GFR-binding peptide
  MOD_RES (6)..(7): Xaa is C or S
KIPKAXXVPTELSPINMLYFDENEKVVYGKIP

SEQ ID NO: 42115 - protein, 33 aa, Artificial Sequence
  Cyclic GFR-binding peptide
  MOD_RES (1)..(2): Xaa is C or S
XXVPTELSPINMLYFDENEKVVYGKIPDMVVEG

SEQ ID NO: 42116 - protein, 35 aa, Artificial Sequence
  Cyclic GFR-binding peptide
  MOD_RES (1)..(33)..(35): Xaa is C or S
XVPTELSPINMLYFDENEKVVYGKIPDMVVEGXGX

SEQ ID NO: 42117 - protein, 29 aa, Artificial Sequence
  Cyclic GFR-binding peptide
  MOD_RES (3)..(4): Xaa is C or S
KAXXVPTKLSPINVLYFDDMGVPTYGKIP

SEQ ID NO: 42118 - protein, 29 aa, Artificial Sequence
  Cyclic GFR-binding peptide
TRLSPINILYFDSANNVVYGKIPDMVVES

SEQ ID NO: 42119 - protein, 40 aa, Artificial Sequence
  Cyclic GFR-binding peptide
  MOD_RES (4)..(5)..(37)..(39): Xaa is C or S
PKPXXAPTQLSPINVLYFDDSSNVIYGKIPNMVVRAXGXH

SEQ ID NO: 42120 - protein, 25 aa, Artificial Sequence
  Cyclic GFR-binding peptide
PTKLSPINVLYFDDSSNVIYGKIPN

SEQ ID NO: 42121 - protein, 21 aa, Artificial Sequence
  Cyclic GFR-binding peptide
SPINILYFDSANNVVYGKIPD

SEQ ID NO: 42122 - protein, 41 aa, Artificial Sequence
  Cyclic GFR-binding peptide
  MOD_RES (6)..(7)..(39)..(41): Xaa is C or S
KASKAXXVPTKLSPINILYFDKGVVTYYGKIPGMAVSEXGX

SEQ ID NO: 42123 - protein, 32 aa, Artificial Sequence
  Cyclic GFR-binding peptide
  MOD_RES (31)..(31): Xaa is C or S
PTRLSPINILYFDSANNVVYGKIPDMVVESXG

SEQ ID NO: 42124 - protein, 22 aa, Artificial Sequence
  Cyclic GFR-binding peptide
SPINVLYFDDSSNVIYGKIPNM

SEQ ID NO: 42125 - protein, 32 aa, Artificial Sequence
  Cyclic GFR-binding peptide
  MOD_RES (1)..(2): Xaa is C or S
XXAPTKLSPINVLYFDDSSNVIYGKIPNMVVR

SEQ ID NO: 42126 - protein, 30 aa, Artificial Sequence
  Cyclic GFR-binding peptide
  MOD_RES (3)..(4): Xaa is C or S
KAXXAPTKLSPINVLYFDSSNNVIYGKIPN

SEQ ID NO: 42127 - protein, 28 aa, Artificial Sequence
  Cyclic GFR-binding peptide
PTKLSPINILYFDKGVVTYYGKIPGMAV

SEQ ID NO: 42128 - protein, 27 aa, Artificial Sequence
  Cyclic GFR-binding peptide
  MOD_RES (1)..(1): Xaa is C or S
XAPTKLSPINVLYFDDSSNVIYGKIPN

SEQ ID NO: 42129 - protein, 26 aa, Artificial Sequence
  Cyclic GFR-binding peptide
PTKLSPINVLYFDDSSNVIYGKIPNM

SEQ ID NO: 42130 - protein, 38 aa, Artificial Sequence
  Cyclic GFR-binding peptide
  MOD_RES (3)..(4)..(36)..(38): Xaa is C or S
KAXXVPTKLSPINILYFDKGVVTYYGKIPGMAVSEXGX

SEQ ID NO: 42131 - protein, 23 aa, Artificial Sequence
  Cyclic GFR-binding peptide
SPINMLYFDNGRVLLYGKIPMIV

SEQ ID NO: 42132 - protein, 25 aa, Artificial Sequence
  Cyclic GFR-binding peptide
APVKTSPINMLYFDNGRVLLYGKIP

SEQ ID NO: 42133 - protein, 38 aa, Artificial Sequence
  Cyclic GFR-binding peptide
  MOD_RES (6)..(7): Xaa is C or S
AAPASXXVPARLSPINILYFDAANNVVYGKIPDMVVEA

SEQ ID NO: 42134 - protein, 26 aa, Artificial Sequence
  Cyclic GFR-binding peptide
LSPINVLYFDSSNNVIYGKIPNMVVK

SEQ ID NO: 42135 - protein, 26 aa, Artificial Sequence
  Cyclic GFR-binding peptide
VPTELSPINMLYFDEYDKVVYGKIPE

SEQ ID NO: 42136 - protein, 27 aa, Artificial Sequence
  Cyclic GFR-binding peptide
APTKLSPINVLYFDSSNNVIYGKIPNM

SEQ ID NO: 42137 - protein, 41 aa, Artificial Sequence
  Cyclic GFR-binding peptide
  MOD_RES (5)..(6)..(38)..(40): Xaa is C or S
TPPTXXVPTRLSPINILYFDSANNVVYGKIPDMVVESXGXR

SEQ ID NO: 42138 - protein, 41 aa, Artificial Sequence
  Cyclic GFR-binding peptide
  MOD_RES (6)..(7)..(39)..(41): Xaa is C or S
TVPKPXXAPTQLSPINVLYFDDSSNVIYGKIPNMVVRAXGX

SEQ ID NO: 42139 - protein, 28 aa, Artificial Sequence
  Cyclic GFR-binding peptide
  MOD_RES (2)..(3): Xaa is C or S
AXXAPTKLSPINVLYFDSSNNVIYGKIP

SEQ ID NO: 42140 - protein, 22 aa, Artificial Sequence
  Cyclic GFR-binding peptide
LSPINILYFDKGVVTYYGKIPG

SEQ ID NO: 42141 - protein, 24 aa, Artificial Sequence
  Cyclic GFR-binding peptide
TKLSPINVLYFDDSSNVIYGKIPN

SEQ ID NO: 42142 - protein, 26 aa, Artificial Sequence
  Cyclic GFR-binding peptide
PTRLSPINILYFDSANNVVYGKIPDM

SEQ ID NO: 42143 - protein, 35 aa, Artificial Sequence
  Cyclic GFR-binding peptide
  MOD_RES (2)..(3)..(34): Xaa is C or S
TXXAPVKTSPINMLYFDNGRVLLYGKIPMIVEEXG

SEQ ID NO: 42144 - protein, 35 aa, Artificial Sequence
  Cyclic GFR-binding peptide
  MOD_RES (6)..(7): Xaa is C or S
RVPSTXXAPVKTSPINMLYFDNGRVLLYGKIPMIV

SEQ ID NO: 42145 - protein, 33 aa, Artificial Sequence
  Cyclic GFR-binding peptide
  MOD_RES (30)..(32): Xaa is C or S
KLSPINVLYFDDMGVPTYGKIPEGMSVAEXGXR

SEQ ID NO: 42146 - protein, 34 aa, Artificial Sequence
  Cyclic GFR-binding peptide
  MOD_RES (1)..(2)..(34): Xaa is C or S
XXVPTRLSPINILYFDSANNVVYGKIPDMVVESX

SEQ ID NO: 42147 - protein, 24 aa, Artificial Sequence
  Cyclic GFR-binding peptide
QLSPINVLYFDDSSNVIYGKIPNM

SEQ ID NO: 42148 - protein, 24 aa, Artificial Sequence
  Cyclic GFR-binding peptide
SPINMLYFDEYDKVVYGKIPEMVV

SEQ ID NO: 42149 - protein, 32 aa, Artificial Sequence
  Cyclic GFR-binding peptide
  MOD_RES (29)..(31): Xaa is C or S
KLSPINVLYFDSSNNVIYGKIPNMVVKAXGXH

SEQ ID NO: 42150 - protein, 33 aa, Artificial Sequence
  Cyclic GFR-binding peptide
  MOD_RES (6)..(7): Xaa is C or S
AVPKAXXAPTKLSPINVLYFDSSNNVIYGKIPN

SEQ ID NO: 42151 - protein, 35 aa, Artificial Sequence
  Cyclic GFR-binding peptide
  MOD_RES (3)..(4): Xaa is C or S
KAXXVPTKLSPINILYFDKGVVTYYGKIPGMAVSE

SEQ ID NO: 42152 - protein, 35 aa, Artificial Sequence
  Cyclic GFR-binding peptide
  MOD_RES (4)..(5): Xaa is C or S
GKAXXVPTKLSPINVLYFDDMGVPTYGKIPEGMSV

SEQ ID NO: 42153 - protein, 40 aa, Artificial Sequence
  Cyclic GFR-binding peptide
  MOD_RES (5)..(6)..(38)..(40): Xaa is C or S
TPPTXXVPTRLSPINILYFDSANNVVYGKIPDMVVESXGX

SEQ ID NO: 42154 - protein, 28 aa, Artificial Sequence
  Cyclic GFR-binding peptide
APTKLSPINVLYFDDSSNVIYGKIPNMV

SEQ ID NO: 42155 - protein, 31 aa, Artificial Sequence
  Cyclic GFR-binding peptide
  MOD_RES (3)..(4): Xaa is C or S
KPXXAPTKLSPINVLYFDDSSNVIYGKIPNM

SEQ ID NO: 42156 - protein, 33 aa, Artificial Sequence
  Cyclic GFR-binding peptide
  MOD_RES (1)..(1): Xaa is C or S
XVPTKLSPINVLYFDDMGVPTYGKIPEGMSVAE

SEQ ID NO: 42157 - protein, 38 aa, Artificial Sequence
  Cyclic GFR-binding peptide
  MOD_RES (4)..(5)..(37): Xaa is C or S
SKAXXVPTKLSPINILYFDKGVVTYYGKIPGMAVSEXG

SEQ ID NO: 42158 - protein, 29 aa, Artificial Sequence
  Cyclic GFR-binding peptide
VPTKLSPINILYFDKGVVTYYGKIPGMAV

SEQ ID NO: 42159 - protein, 33 aa, Artificial Sequence
  Cyclic GFR-binding peptide
  MOD_RES (1)..(33): Xaa is C or S
XAPTQLSPINVLYFDDSSNVIYGKIPNMVVRAX

SEQ ID NO: 42160 - protein, 29 aa, Artificial Sequence
  Cyclic GFR-binding peptide
  MOD_RES (1)..(1): Xaa is C or S
XVPTRLSPINILYFDSANNVVYGKIPDMV

SEQ ID NO: 42161 - protein, 21 aa, Artificial Sequence
  Cyclic GFR-binding peptide
SPINILYFDAANNVVYGKIPD

SEQ ID NO: 42162 - protein, 32 aa, Artificial Sequence
  Cyclic GFR-binding peptide
  MOD_RES (2)..(3): Xaa is C or S
AXXVPTELSPINMLYFDENEKVVYGKIPDMVV

SEQ ID NO: 42163 - protein, 33 aa, Artificial Sequence
  Cyclic GFR-binding peptide
  MOD_RES (5)..(6): Xaa is C or S
VPKPXXAPTQLSPINVLYFDDSSNVIYGKIPNM

SEQ ID NO: 42164 - protein, 28 aa, Artificial Sequence
  Cyclic GFR-binding peptide
PVKTSPINMLYFDNGRVLLYGKIPMIVE

SEQ ID NO: 42165 - protein, 39 aa, Artificial Sequence
  Cyclic GFR-binding peptide
  MOD_RES (3)..(4)..(37)..(39): Xaa is C or S
KAXXVPTKLSPINVLYFDDMGVPTYGKIPEGMSVAEXGX

SEQ ID NO: 42166 - protein, 35 aa, Artificial Sequence
  Cyclic GFR-binding peptide
  MOD_RES (6)..(7): Xaa is C or S
TVPKPXXAPTQLSPINVLYFDDSSNVIYGKIPNMV

SEQ ID NO: 42167 - protein, 34 aa, Artificial Sequence
  Cyclic GFR-binding peptide
  MOD_RES (2)..(3): Xaa is C or S
AXXAPTKLSPINVLYFDSSNNVIYGKIPNMVVKA

SEQ ID NO: 42168 - protein, 34 aa, Artificial Sequence
  Cyclic GFR-binding peptide
  MOD_RES (5)..(6): Xaa is C or S
APASXXVPARLSPINILYFDAANNVVYGKIPDMV

SEQ ID NO: 42169 - protein, 29 aa, Artificial Sequence
  Cyclic GFR-binding peptide
  MOD_RES (2)..(3): Xaa is C or S
AXXVPTKLSPINILYFDKGVVTYYGKIPG

SEQ ID NO: 42170 - protein, 32 aa, Artificial Sequence
  Cyclic GFR-binding peptide
  MOD_RES (1)..(1): Xaa is C or S
XAPTQLSPINVLYFDDSSNVIYGKIPNMVVRA

SEQ ID NO: 42171 - protein, 33 aa, Artificial Sequence
  Cyclic GFR-binding peptide
  MOD_RES (31)..(33): Xaa is C or S
PTQLSPINVLYFDDSSNVIYGKIPNMVVRAXGX

SEQ ID NO: 42172 - protein, 39 aa, Artificial Sequence
  Cyclic GFR-binding peptide
  MOD_RES (4)..(5)..(37)..(39): Xaa is C or S
PKAXXVPTELSPINMLYFDEYDKVVYGKIPEMVVEGXGX

SEQ ID NO: 42173 - protein, 33 aa, Artificial Sequence
  Cyclic GFR-binding peptide
  MOD_RES (6)..(6): Xaa is C or S
VTKPTXAPTKLSPINVLYFDDSSNVIYGKIPNM

SEQ ID NO: 42174 - protein, 27 aa, Artificial Sequence
  Cyclic GFR-binding peptide
TQLSPINVLYFDDSSNVIYGKIPNMVV

SEQ ID NO: 42175 - protein, 34 aa, Artificial Sequence
  Cyclic GFR-binding peptide
  MOD_RES (31)..(33): Xaa is C or S
PTKLSPINVLYFDSSNNVIYGKIPNMVVKAXGXH

SEQ ID NO: 42176 - protein, 36 aa, Artificial Sequence
  Cyclic GFR-binding peptide
  MOD_RES (3)..(4)..(36): Xaa is C or S
PTXXVPTRLSPINILYFDSANNVVYGKIPDMVVESX

SEQ ID NO: 42177 - protein, 29 aa, Artificial Sequence
  Cyclic GFR-binding peptide
  MOD_RES (29)..(29): Xaa is C or S
KLSPINILYFDKGVVTYYGKIPGMAVSEX

SEQ ID NO: 42178 - protein, 29 aa, Artificial Sequence
  Cyclic GFR-binding peptide
  MOD_RES (4)..(4): Xaa is C or S
KPTXAPTKLSPINVLYFDDSSNVIYGKIP

SEQ ID NO: 42179 - protein, 26 aa, Artificial Sequence
  Cyclic GFR-binding peptide
PVKTSPINMLYFDNGRVLLYGKIPMI

SEQ ID NO: 42180 - protein, 32 aa, Artificial Sequence
  Cyclic GFR-binding peptide
  MOD_RES (3)..(4): Xaa is C or S
KAXXVPTELSPINMLYFDEYDKVVYGKIPEMV

SEQ ID NO: 42181 - protein, 28 aa, Artificial Sequence
  Cyclic GFR-binding peptide
TRLSPINILYFDSANNVVYGKIPDMVVE

SEQ ID NO: 42182 - protein, 32 aa, Artificial Sequence
  Cyclic GFR-binding peptide
  MOD_RES (1)..(2): Xaa is C or S
XXVPTKLSPINILYFDKGVVTYYGKIPGMAVS

SEQ ID NO: 42183 - protein, 34 aa, Artificial Sequence
  Cyclic GFR-binding peptide
  MOD_RES (6)..(6): Xaa is C or S
VTKPTXAPTKLSPINVLYFDDSSNVIYGKIPNMV

SEQ ID NO: 42184 - protein, 38 aa, Artificial Sequence
  Cyclic GFR-binding peptide
  MOD_RES (2)..(3)..(35)..(37): Xaa is C or S
AXXAPTKLSPINVLYFDSSNNVIYGKIPNMVVKAXGXH

SEQ ID NO: 42185 - protein, 29 aa, Artificial Sequence
  Cyclic GFR-binding peptide
  MOD_RES (2)..(3): Xaa is C or S
AXXAPTKLSPINVLYFDSSNNVIYGKIPN

SEQ ID NO: 42186 - protein, 30 aa, Artificial Sequence
  Cyclic GFR-binding peptide
  MOD_RES (28)..(30): Xaa is C or S
SPINVLYFDDMGVPTYGKIPEGMSVAEXGX

SEQ ID NO: 42187 - protein, 28 aa, Artificial Sequence
  Cyclic GFR-binding peptide
APVKTSPINMLYFDNGRVLLYGKIPMIV

SEQ ID NO: 42188 - protein, 30 aa, Artificial Sequence
  Cyclic GFR-binding peptide
  MOD_RES (1)..(2): Xaa is C or S
XXAPTKLSPINVLYFDSSNNVIYGKIPNMV

SEQ ID NO: 42189 - protein, 32 aa, Artificial Sequence
  Cyclic GFR-binding peptide
  MOD_RES (31)..(31): Xaa is C or S
PTELSPINMLYFDEYDKVVYGKIPEMVVEGXG

SEQ ID NO: 42190 - protein, 36 aa, Artificial Sequence
  Cyclic GFR-binding peptide
  MOD_RES (4)..(5): Xaa is C or S
PASXXVPARLSPINILYFDAANNVVYGKIPDMVVEA

SEQ ID NO: 42191 - protein, 31 aa, Artificial Sequence
  Cyclic GFR-binding peptide
  MOD_RES (31)..(31): Xaa is C or S
APVKTSPINMLYFDNGRVLLYGKIPMIVEEX

SEQ ID NO: 42192 - protein, 27 aa, Artificial Sequence
  Cyclic GFR-binding peptide
  MOD_RES (1)..(2): Xaa is C or S
XXVPTELSPINMLYFDENEKVVYGKIP

SEQ ID NO: 42193 - protein, 30 aa, Artificial Sequence
  Cyclic GFR-binding peptide
  MOD_RES (1)..(2): Xaa is C or S
XXAPTQLSPINVLYFDDSSNVIYGKIPNMV

SEQ ID NO: 42194 - protein, 28 aa, Artificial Sequence
  Cyclic GFR-binding peptide
  MOD_RES (1)..(1): Xaa is C or S
XAPVKTSPINMLYFDNGRVLLYGKIPMI

SEQ ID NO: 42195 - protein, 39 aa, Artificial Sequence
  Cyclic GFR-binding peptide
  MOD_RES (6)..(7)..(39): Xaa is C or S
AVPKAXXAPTKLSPINVLYFDSSNNVIYGKIPNMVVKAX

SEQ ID NO: 42196 - protein, 30 aa, Artificial Sequence
  Cyclic GFR-binding peptide
  MOD_RES (1)..(1): Xaa is C or S
XAPTKLSPINVLYFDDSSNVIYGKIPNMVV

SEQ ID NO: 42197 - protein, 31 aa, Artificial Sequence
  Cyclic GFR-binding peptide
  MOD_RES (3)..(4): Xaa is C or S
KAXXAPTKLSPINVLYFDSSNNVIYGKIPNM

SEQ ID NO: 42198 - protein, 32 aa, Artificial Sequence
  Cyclic GFR-binding peptide
  MOD_RES (5)..(6): Xaa is C or S
IPKAXXVPTELSPINMLYFDEYDKVVYGKIPE

SEQ ID NO: 42199 - protein, 23 aa, Artificial Sequence
  Cyclic GFR-binding peptide
VKTSPINMLYFDNGRVLLYGKIP

SEQ ID NO: 42200 - protein, 32 aa, Artificial Sequence
  Cyclic GFR-binding peptide
  MOD_RES (30)..(32): Xaa is C or S
ARLSPINILYFDAANNVVYGKIPDMVVEAXGX

SEQ ID NO: 42201 - protein, 25 aa, Artificial Sequence
  Cyclic GFR-binding peptide
SPINMLYFDNGRVLLYGKIPMIVEE

SEQ ID NO: 42202 - protein, 42 aa, Artificial Sequence
  Cyclic GFR-binding peptide
  MOD_RES (6)..(7)..(39)..(41): Xaa is C or S
STPPTXXVPTRLSPINILYFDSANNVVYGKIPDMVVESXGXR

SEQ ID NO: 42203 - protein, 41 aa, Artificial Sequence
  Cyclic GFR-binding peptide
  MOD_RES (5)..(6)..(38)..(40): Xaa is C or S
ASKAXXVPTKLSPINILYFDKGVVTYYGKIPGMAVSEXGXR

SEQ ID NO: 42204 - protein, 27 aa, Artificial Sequence
  Cyclic GFR-binding peptide
LSPINMLYFDENEKVVYGKIPDMVVEG

SEQ ID NO: 42205 - protein, 27 aa, Artificial Sequence
  Cyclic GFR-binding peptide
  MOD_RES (27)..(27): Xaa is C or S
SPINILYFDKGVVTYYGKIPGMAVSEX

SEQ ID NO: 42206 - protein, 37 aa, Artificial Sequence
  Cyclic GFR-binding peptide
  MOD_RES (4)..(5)..(37): Xaa is C or S
PKAXXVPTELSPINMLYFDENEKVVYGKIPDMVVEGX

SEQ ID NO: 42207 - protein, 41 aa, Artificial Sequence
  Cyclic GFR-binding peptide
  MOD_RES (5)..(6)..(38)..(40): Xaa is C or S
VPKPXXAPTKLSPINVLYFDDSSNVIYGKIPNMVVRSXGXH

SEQ ID NO: 42208 - protein, 35 aa, Artificial Sequence
  Cyclic GFR-binding peptide
  MOD_RES (6)..(7): Xaa is C or S
AVPKAXXAPTKLSPINVLYFDSSNNVIYGKIPNMV

SEQ ID NO: 42209 - protein, 37 aa, Artificial Sequence
  Cyclic GFR-binding peptide
  MOD_RES (2)..(3)..(35)..(37): Xaa is C or S
AXXVPTELSPINMLYFDENEKVVYGKIPDMVVEGXGX

SEQ ID NO: 42210 - protein, 27 aa, Artificial Sequence
  Cyclic GFR-binding peptide
RLSPINILYFDSANNVVYGKIPDMVVE

SEQ ID NO: 42211 - protein, 33 aa, Artificial Sequence
  Cyclic GFR-binding peptide
  MOD_RES (1)..(32): Xaa is C or S
XAPVKTSPINMLYFDNGRVLLYGKIPMIVEEXG

SEQ ID NO: 42212 - protein, 33 aa, Artificial Sequence
  Cyclic GFR-binding peptide
  MOD_RES (31)..(33): Xaa is C or S
PARLSPINILYFDAANNVVYGKIPDMVVEAXGX

SEQ ID NO: 42213 - protein, 32 aa, Artificial Sequence
  Cyclic GFR-binding peptide
  MOD_RES (7)..(7): Xaa is C or S
HVTKPTXAPTKLSPINVLYFDDSSNVIYGKIP

SEQ ID NO: 42214 - protein, 35 aa, Artificial Sequence
  Cyclic GFR-binding peptide
  MOD_RES (1)..(2)..(34): Xaa is C or S
XXAPTKLSPINVLYFDSSNNVIYGKIPNMVVKAXG

SEQ ID NO: 42215 - protein, 28 aa, Artificial Sequence
  Cyclic GFR-binding peptide
VPARLSPINILYFDAANNVVYGKIPDMV

SEQ ID NO: 42216 - protein, 32 aa, Artificial Sequence
  Cyclic GFR-binding peptide
  MOD_RES (6)..(7): Xaa is C or S
TVPKPXXAPTQLSPINVLYFDDSSNVIYGKIP

SEQ ID NO: 42217 - protein, 27 aa, Artificial Sequence
  Cyclic GFR-binding peptide
TKLSPINVLYFDDMGVPTYGKIPEGMS

SEQ ID NO: 42218 - protein, 31 aa, Artificial Sequence
  Cyclic GFR-binding peptide
  MOD_RES (2)..(3): Xaa is C or S
AXXAPTKLSPINVLYFDSSNNVIYGKIPNMV

SEQ ID NO: 42219 - protein, 26 aa, Artificial Sequence
  Cyclic GFR-binding peptide
KLSPINVLYFDDSSNVIYGKIPNMVV

SEQ ID NO: 42220 - protein, 36 aa, Artificial Sequence
  Cyclic GFR-binding peptide
  MOD_RES (4)..(36): Xaa is C or S
KPTXAPTKLSPINVLYFDDSSNVIYGKIPNMVVRSX

SEQ ID NO: 42221 - protein, 41 aa, Artificial Sequence
  Cyclic GFR-binding peptide
  MOD_RES (6)..(7)..(38)..(40): Xaa is C or S
RVPSTXXAPVKTSPINMLYFDNGRVLLYGKIPMIVEEXGXL

SEQ ID NO: 42222 - protein, 25 aa, Artificial Sequence
  Cyclic GFR-binding peptide
PTKLSPINVLYFDDMGVPTYGKIPE

SEQ ID NO: 42223 - protein, 27 aa, Artificial Sequence
  Cyclic GFR-binding peptide
PVKTSPINMLYFDNGRVLLYGKIPMIV

SEQ ID NO: 42224 - protein, 30 aa, Artificial Sequence
  Cyclic GFR-binding peptide
  MOD_RES (1)..(1): Xaa is C or S
XVPTKLSPINVLYFDDMGVPTYGKIPEGMS

SEQ ID NO: 42225 - protein, 37 aa, Artificial Sequence
  Cyclic GFR-binding peptide
  MOD_RES (6)..(7): Xaa is C or S
KVGKAXXVPTKLSPINVLYFDDMGVPTYGKIPEGMSV

SEQ ID NO: 42226 - protein, 32 aa, Artificial Sequence
  Cyclic GFR-binding peptide
  MOD_RES (1)..(2): Xaa is C or S
XXAPVKTSPINMLYFDNGRVLLYGKIPMIVEE

SEQ ID NO: 42227 - protein, 30 aa, Artificial Sequence
  Cyclic GFR-binding peptide
  MOD_RES (1)..(2): Xaa is C or S
XXVPTELSPINMLYFDENEKVVYGKIPDMV

SEQ ID NO: 42228 - protein, 28 aa, Artificial Sequence
  Cyclic GFR-binding peptide
  MOD_RES (2)..(3): Xaa is C or S
PXXAPTQLSPINVLYFDDSSNVIYGKIP

SEQ ID NO: 42229 - protein, 31 aa, Artificial Sequence
  Cyclic GFR-binding peptide
  MOD_RES (30)..(30): Xaa is C or S
KLSPINVLYFDDMGVPTYGKIPEGMSVAEXG

SEQ ID NO: 42230 - protein, 36 aa, Artificial Sequence
  Cyclic GFR-binding peptide
  MOD_RES (1)..(33)..(35): Xaa is C or S
XVPTELSPINMLYFDEYDKVVYGKIPEMVVEGXGXR

SEQ ID NO: 42231 - protein, 28 aa, Artificial Sequence
  Cyclic GFR-binding peptide
PTRLSPINILYFDSANNVVYGKIPDMVV

SEQ ID NO: 42232 - protein, 31 aa, Artificial Sequence
  Cyclic GFR-binding peptide
  MOD_RES (29)..(31): Xaa is C or S
ELSPINMLYFDEYDKVVYGKIPEMVVEGXGX

SEQ ID NO: 42233 - protein, 26 aa, Artificial Sequence
  Cyclic GFR-binding peptide
LSPINILYFDKGVVTYYGKIPGMAVS

SEQ ID NO: 42234 - protein, 34 aa, Artificial Sequence
  Cyclic GFR-binding peptide
  MOD_RES (5)..(6): Xaa is C or S
VPSTXXAPVKTSPINMLYFDNGRVLLYGKIPMIV

SEQ ID NO: 42235 - protein, 26 aa, Artificial Sequence
  Cyclic GFR-binding peptide
KLSPINILYFDKGVVTYYGKIPGMAV

SEQ ID NO: 42236 - protein, 23 aa, Artificial Sequence
  Cyclic GFR-binding peptide
TELSPINMLYFDEYDKVVYGKIP

SEQ ID NO: 42237 - protein, 31 aa, Artificial Sequence
  Cyclic GFR-binding peptide
  MOD_RES (1)..(2): Xaa is C or S
XXAPTKLSPINVLYFDSSNNVIYGKIPNMVV

SEQ ID NO: 42238 - protein, 30 aa, Artificial Sequence
  Cyclic GFR-binding peptide
  MOD_RES (29)..(29): Xaa is C or S
KLSPINILYFDKGVVTYYGKIPGMAVSEXG

SEQ ID NO: 42239 - protein, 34 aa, Artificial Sequence
  Cyclic GFR-binding peptide
  MOD_RES (5)..(6): Xaa is C or S
TPPTXXVPTRLSPINILYFDSANNVVYGKIPDMV

SEQ ID NO: 42240 - protein, 22 aa, Artificial Sequence
  Cyclic GFR-binding peptide
LSPINILYFDSANNVVYGKIPD

SEQ ID NO: 42241 - protein, 42 aa, Artificial Sequence
  Cyclic GFR-binding peptide
  MOD_RES (6)..(7)..(39)..(41): Xaa is C or S
AAPASXXVPARLSPINILYFDAANNVVYGKIPDMVVEAXGXR

SEQ ID NO: 42242 - protein, 22 aa, Artificial Sequence
  Cyclic GFR-binding peptide
LSPINVLYFDDMGVPTYGKIPE

SEQ ID NO: 42243 - protein, 37 aa, Artificial Sequence
  Cyclic GFR-binding peptide
  MOD_RES (6)..(7): Xaa is C or S
HVPKPXXAPTKLSPINVLYFDDSSNVIYGKIPNMVVR

SEQ ID NO: 42244 - protein, 31 aa, Artificial Sequence
  Cyclic GFR-binding peptide
  MOD_RES (3)..(4): Xaa is C or S
KAXXVPTELSPINMLYFDENEKVVYGKIPDM

SEQ ID NO: 42245 - protein, 30 aa, Artificial Sequence
  Cyclic GFR-binding peptide
  MOD_RES (3)..(4): Xaa is C or S
STXXAPVKTSPINMLYFDNGRVLLYGKIPM

SEQ ID NO: 42246 - protein, 29 aa, Artificial Sequence
  Cyclic GFR-binding peptide
  MOD_RES (2)..(3): Xaa is C or S
TXXVPTRLSPINILYFDSANNVVYGKIPD

SEQ ID NO: 42247 - protein, 29 aa, Artificial Sequence
  Cyclic GFR-binding peptide
  MOD_RES (1)..(2): Xaa is C or S
XXAPTQLSPINVLYFDDSSNVIYGKIPNM

SEQ ID NO: 42248 - protein, 37 aa, Artificial Sequence
  Cyclic GFR-binding peptide
  MOD_RES (1)..(34)..(36): Xaa is C or S
XVPTKLSPINVLYFDDMGVPTYGKIPEGMSVAEXGXR

SEQ ID NO: 42249 - protein, 38 aa, Artificial Sequence
  Cyclic GFR-binding peptide
  MOD_RES (4)..(5)..(37): Xaa is C or S
PKPXXAPTQLSPINVLYFDDSSNVIYGKIPNMVVRAXG

SEQ ID NO: 42250 - protein, 27 aa, Artificial Sequence
  Cyclic GFR-binding peptide
KTSPINMLYFDNGRVLLYGKIPMIVEE

SEQ ID NO: 42251 - protein, 33 aa, Artificial Sequence
  Cyclic GFR-binding peptide
  MOD_RES (2)..(3): Xaa is C or S
AXXVPTELSPINMLYFDENEKVVYGKIPDMVVE

SEQ ID NO: 42252 - protein, 33 aa, Artificial Sequence
  Cyclic GFR-binding peptide
  MOD_RES (4)..(5): Xaa is C or S
PKAXXVPTELSPINMLYFDEYDKVVYGKIPEMV

SEQ ID NO: 42253 - protein, 31 aa, Artificial Sequence
  Cyclic GFR-binding peptide
  MOD_RES (31)..(31): Xaa is C or S
PTKLSPINVLYFDDSSNVIYGKIPNMVVRSX

SEQ ID NO: 42254 - protein, 29 aa, Artificial Sequence
  Cyclic GFR-binding peptide
  MOD_RES (28)..(28): Xaa is C or S
LSPINVLYFDDSSNVIYGKIPNMVVRAXG

SEQ ID NO: 42255 - protein, 21 aa, Artificial Sequence
  Cyclic GFR-binding peptide
LSPINMLYFDEYDKVVYGKIP

SEQ ID NO: 42256 - protein, 38 aa, Artificial Sequence
  Cyclic GFR-binding peptide
  MOD_RES (3)..(35)..(37): Xaa is C or S
PTXAPTKLSPINVLYFDDSSNVIYGKIPNMVVRSXGXH

SEQ ID NO: 42257 - protein, 28 aa, Artificial Sequence
  Cyclic GFR-binding peptide
  MOD_RES (1)..(1): Xaa is C or S
XVPTKLSPINVLYFDDMGVPTYGKIPEG

SEQ ID NO: 42258 - protein, 24 aa, Artificial Sequence
  Cyclic GFR-binding peptide
LSPINVLYFDDMGVPTYGKIPEGM

SEQ ID NO: 42259 - protein, 25 aa, Artificial Sequence
  Cyclic GFR-binding peptide
VPARLSPINILYFDAANNVVYGKIP

SEQ ID NO: 42260 - protein, 26 aa, Artificial Sequence
  Cyclic GFR-binding peptide
APTQLSPINVLYFDDSSNVIYGKIPN

SEQ ID NO: 42261 - protein, 31 aa, Artificial Sequence
  Cyclic GFR-binding peptide
  MOD_RES (29)..(31): Xaa is C or S
KLSPINILYFDKGVVTYYGKIPGMAVSEXGX

SEQ ID NO: 42262 - protein, 40 aa, Artificial Sequence
  Cyclic GFR-binding peptide
  MOD_RES (6)..(7)..(39): Xaa is C or S
KIPKAXXVPTELSPINMLYFDENEKVVYGKIPDMVVEGXG

SEQ ID NO: 42263 - protein, 24 aa, Artificial Sequence
  Cyclic GFR-binding peptide
PTKLSPINVLYFDDSSNVIYGKIP

SEQ ID NO: 42264 - protein, 30 aa, Artificial Sequence
  Cyclic GFR-binding peptide
  MOD_RES (1)..(2): Xaa is C or S
XXVPARLSPINILYFDAANNVVYGKIPDMV

SEQ ID NO: 42265 - protein, 29 aa, Artificial Sequence
  Cyclic GFR-binding peptide
  MOD_RES (2)..(3): Xaa is C or S
SXXVPARLSPINILYFDAANNVVYGKIPD

SEQ ID NO: 42266 - protein, 24 aa, Artificial Sequence
  Cyclic GFR-binding peptide
PTKLSPINVLYFDDMGVPTYGKIP

SEQ ID NO: 42267 - protein, 34 aa, Artificial Sequence
  Cyclic GFR-binding peptide
  MOD_RES (31)..(33): Xaa is C or S
PTQLSPINVLYFDDSSNVIYGKIPNMVVRAXGXH

SEQ ID NO: 42268 - protein, 26 aa, Artificial Sequence
  Cyclic GFR-binding peptide
  MOD_RES (1)..(1): Xaa is C or S
XVPTKLSPINILYFDKGVVTYYGKIP

SEQ ID NO: 42269 - protein, 24 aa, Artificial Sequence
  Cyclic GFR-binding peptide
TQLSPINVLYFDDSSNVIYGKIPN

SEQ ID NO: 42270 - protein, 39 aa, Artificial Sequence
  Cyclic GFR-binding peptide
  MOD_RES (3)..(4)..(36)..(38): Xaa is C or S
KAXXVPTELSPINMLYFDEYDKVVYGKIPEMVVEGXGXR

SEQ ID NO: 42271 - protein, 37 aa, Artificial Sequence
  Cyclic GFR-binding peptide
  MOD_RES (2)..(3)..(34)..(36): Xaa is C or S
TXXAPVKTSPINMLYFDNGRVLLYGKIPMIVEEXGXL

SEQ ID NO: 42272 - protein, 34 aa, Artificial Sequence
  Cyclic GFR-binding peptide
  MOD_RES (5)..(6): Xaa is C or S
VPKPXXAPTKLSPINVLYFDDSSNVIYGKIPNMV

SEQ ID NO: 42273 - protein, 34 aa, Artificial Sequence
  Cyclic GFR-binding peptide
  MOD_RES (31)..(33): Xaa is C or S
PARLSPINILYFDAANNVVYGKIPDMVVEAXGXR

SEQ ID NO: 42274 - protein, 33 aa, Artificial Sequence
  Cyclic GFR-binding peptide
  MOD_RES (1)..(33): Xaa is C or S
XAPTKLSPINVLYFDSSNNVIYGKIPNMVVKAX

SEQ ID NO: 42275 - protein, 28 aa, Artificial Sequence
  Cyclic GFR-binding peptide
  MOD_RES (1)..(1): Xaa is C or S
XVPTELSPINMLYFDENEKVVYGKIPDM

SEQ ID NO: 42276 - protein, 30 aa, Artificial Sequence
  Cyclic GFR-binding peptide
  MOD_RES (30)..(30): Xaa is C or S
KLSPINVLYFDDMGVPTYGKIPEGMSVAEX

SEQ ID NO: 42277 - protein, 27 aa, Artificial Sequence
  Cyclic GFR-binding peptide
ELSPINMLYFDENEKVVYGKIPDMVVE

SEQ ID NO: 42278 - protein, 36 aa, Artificial Sequence
  Cyclic GFR-binding peptide
  MOD_RES (2)..(3)..(35): Xaa is C or S
AXXVPTELSPINMLYFDENEKVVYGKIPDMVVEGXG

SEQ ID NO: 42279 - protein, 34 aa, Artificial Sequence
  Cyclic GFR-binding peptide
  MOD_RES (5)..(6): Xaa is C or S
VPKAXXAPTKLSPINVLYFDSSNNVIYGKIPNMV

SEQ ID NO: 42280 - protein, 37 aa, Artificial Sequence
  Cyclic GFR-binding peptide
  MOD_RES (4)..(5): Xaa is C or S
GKAXXVPTKLSPINVLYFDDMGVPTYGKIPEGMSVAE

SEQ ID NO: 42281 - protein, 35 aa, Artificial Sequence
  Cyclic GFR-binding peptide
  MOD_RES (5)..(6): Xaa is C or S
ASKAXXVPTKLSPINILYFDKGVVTYYGKIPGMAV

SEQ ID NO: 42282 - protein, 26 aa, Artificial Sequence
  Cyclic GFR-binding peptide
LSPINILYFDSANNVVYGKIPDMVVE

SEQ ID NO: 42283 - protein, 26 aa, Artificial Sequence
  Cyclic GFR-binding peptide
PTQLSPINVLYFDDSSNVIYGKIPNM

SEQ ID NO: 42284 - protein, 34 aa, Artificial Sequence
  Cyclic GFR-binding peptide
  MOD_RES (4)..(5): Xaa is C or S
PKPXXAPTKLSPINVLYFDDSSNVIYGKIPNMVV

SEQ ID NO: 42285 - protein, 38 aa, Artificial Sequence
  Cyclic GFR-binding peptide
  MOD_RES (5)..(6)..(38): Xaa is C or S
APASXXVPARLSPINILYFDAANNVVYGKIPDMVVEAX

SEQ ID NO: 42286 - protein, 29 aa, Artificial Sequence
  Cyclic GFR-binding peptide
PTQLSPINVLYFDDSSNVIYGKIPNMVVR

SEQ ID NO: 42287 - protein, 30 aa, Artificial Sequence
  Cyclic GFR-binding peptide
  MOD_RES (29)..(29): Xaa is C or S
KLSPINVLYFDSSNNVIYGKIPNMVVKAXG

SEQ ID NO: 42288 - protein, 26 aa, Artificial Sequence
  Cyclic GFR-binding peptide
LSPINVLYFDDSSNVIYGKIPNMVVR

SEQ ID NO: 42289 - protein, 31 aa, Artificial Sequence
  Cyclic GFR-binding peptide
  MOD_RES (2)..(3): Xaa is C or S
PXXAPTKLSPINVLYFDDSSNVIYGKIPNMV

SEQ ID NO: 42290 - protein, 35 aa, Artificial Sequence
  Cyclic GFR-binding peptide
  MOD_RES (7)..(7): Xaa is C or S
HVTKPTXAPTKLSPINVLYFDDSSNVIYGKIPNMV

SEQ ID NO: 42291 - protein, 36 aa, Artificial Sequence
  Cyclic GFR-binding peptide
  MOD_RES (6)..(7): Xaa is C or S
KASKAXXVPTKLSPINILYFDKGVVTYYGKIPGMAV

SEQ ID NO: 42292 - protein, 26 aa, Artificial Sequence
  Cyclic GFR-binding peptide
  MOD_RES (1)..(1): Xaa is C or S
XAPTKLSPINVLYFDSSNNVIYGKIP

SEQ ID NO: 42293 - protein, 36 aa, Artificial Sequence
  Cyclic GFR-binding peptide
  MOD_RES (1)..(2)..(33)..(35): Xaa is C or S
XXAPVKTSPINMLYFDNGRVLLYGKIPMIVEEXGXL

SEQ ID NO: 42294 - protein, 30 aa, Artificial Sequence
  Cyclic GFR-binding peptide
APTQLSPINVLYFDDSSNVIYGKIPNMVVR

SEQ ID NO: 42295 - protein, 25 aa, Artificial Sequence
  Cyclic GFR-binding peptide
KLSPINVLYFDDSSNVIYGKIPNMV

SEQ ID NO: 42296 - protein, 30 aa, Artificial Sequence
  Cyclic GFR-binding peptide
  MOD_RES (27)..(29): Xaa is C or S
SPINMLYFDEYDKVVYGKIPEMVVEGXGXR

SEQ ID NO: 42297 - protein, 37 aa, Artificial Sequence
  Cyclic GFR-binding peptide
  MOD_RES (3)..(4)..(37): Xaa is C or S
KAXXVPTKLSPINVLYFDDMGVPTYGKIPEGMSVAEX

SEQ ID NO: 42298 - protein, 25 aa, Artificial Sequence
  Cyclic GFR-binding peptide
KLSPINVLYFDSSNNVIYGKIPNMV

SEQ ID NO: 42299 - protein, 32 aa, Artificial Sequence
  Cyclic GFR-binding peptide
  MOD_RES (30)..(32): Xaa is C or S
TKLSPINILYFDKGVVTYYGKIPGMAVSEXGX

SEQ ID NO: 42300 - protein, 38 aa, Artificial Sequence
  Cyclic GFR-binding peptide
  MOD_RES (2)..(3)..(35)..(37): Xaa is C or S
PXXAPTKLSPINVLYFDDSSNVIYGKIPNMVVRSXGXH

SEQ ID NO: 42301 - protein, 33 aa, Artificial Sequence
  Cyclic GFR-binding peptide
  MOD_RES (31)..(33): Xaa is C or S
PTKLSPINILYFDKGVVTYYGKIPGMAVSEXGX

SEQ ID NO: 42302 - protein, 33 aa, Artificial Sequence
  Cyclic GFR-binding peptide
  MOD_RES (1)..(33): Xaa is C or S
XVPTELSPINMLYFDEYDKVVYGKIPEMVVEGX

SEQ ID NO: 42303 - protein, 32 aa, Artificial Sequence
  Cyclic GFR-binding peptide
  MOD_RES (2)..(3): Xaa is C or S
SXXVPARLSPINILYFDAANNVVYGKIPDMVV

SEQ ID NO: 42304 - protein, 25 aa, Artificial Sequence
  Cyclic GFR-binding peptide
SPINILYFDSANNVVYGKIPDMVVE

SEQ ID NO: 42305 - protein, 35 aa, Artificial Sequence
  Cyclic GFR-binding peptide
  MOD_RES (2)..(3)..(35): Xaa is C or S
PXXAPTKLSPINVLYFDDSSNVIYGKIPNMVVRSX

SEQ ID NO: 42306 - protein, 34 aa, Artificial Sequence
  Cyclic GFR-binding peptide
  MOD_RES (6)..(7): Xaa is C or S
AAPASXXVPARLSPINILYFDAANNVVYGKIPDM

SEQ ID NO: 42307 - protein, 37 aa, Artificial Sequence
  Cyclic GFR-binding peptide
  MOD_RES (5)..(6): Xaa is C or S
VPKAXXAPTKLSPINVLYFDSSNNVIYGKIPNMVVKA

SEQ ID NO: 42308 - protein, 35 aa, Artificial Sequence
  Cyclic GFR-binding peptide
  MOD_RES (1)..(34): Xaa is C or S
XVPTKLSPINVLYFDDMGVPTYGKIPEGMSVAEXG

SEQ ID NO: 42309 - protein, 43 aa, Artificial Sequence
  Cyclic GFR-binding peptide
  MOD_RES (6)..(7)..(40)..(42): Xaa is C or S
KVGKAXXVPTKLSPINVLYFDDMGVPTYGKIPEGMSVAEXGXR

SEQ ID NO: 42310 - protein, 23 aa, Artificial Sequence
  Cyclic GFR-binding peptide
LSPINVLYFDSSNNVIYGKIPNM

SEQ ID NO: 42311 - protein, 36 aa, Artificial Sequence
  Cyclic GFR-binding peptide
  MOD_RES (2)..(3)..(36): Xaa is C or S
AXXVPTKLSPINVLYFDDMGVPTYGKIPEGMSVAEX

SEQ ID NO: 42312 - protein, 34 aa, Artificial Sequence
  Cyclic GFR-binding peptide
  MOD_RES (7)..(7): Xaa is C or S
HVTKPTXAPTKLSPINVLYFDDSSNVIYGKIPNM

SEQ ID NO: 42313 - protein, 33 aa, Artificial Sequence
  Cyclic GFR-binding peptide
  MOD_RES (2)..(3): Xaa is C or S
AXXVPTELSPINMLYFDEYDKVVYGKIPEMVVE

SEQ ID NO: 42314 - protein, 21 aa, Artificial Sequence
  Cyclic GFR-binding peptide
SPINMLYFDNGRVLLYGKIPM

SEQ ID NO: 42315 - protein, 26 aa, Artificial Sequence
  Cyclic GFR-binding peptide
TKLSPINILYFDKGVVTYYGKIPGMA

SEQ ID NO: 42316 - protein, 34 aa, Artificial Sequence
  Cyclic GFR-binding peptide
  MOD_RES (1)..(33): Xaa is C or S
XAPTQLSPINVLYFDDSSNVIYGKIPNMVVRAXG

SEQ ID NO: 42317 - protein, 26 aa, Artificial Sequence
  Cyclic GFR-binding peptide
TQLSPINVLYFDDSSNVIYGKIPNMV

SEQ ID NO: 42318 - protein, 29 aa, Artificial Sequence
  Cyclic GFR-binding peptide
  MOD_RES (2)..(2): Xaa is C or S
TXAPTKLSPINVLYFDDSSNVIYGKIPNM

SEQ ID NO: 42319 - protein, 31 aa, Artificial Sequence
  Cyclic GFR-binding peptide
  MOD_RES (2)..(3): Xaa is C or S
AXXVPTELSPINMLYFDENEKVVYGKIPDMV

SEQ ID NO: 42320 - protein, 28 aa, Artificial Sequence
  Cyclic GFR-binding peptide
APTQLSPINVLYFDDSSNVIYGKIPNMV

SEQ ID NO: 42321 - protein, 36 aa, Artificial Sequence
  Cyclic GFR-binding peptide
  MOD_RES (3)..(4)..(36): Xaa is C or S
KAXXVPTELSPINMLYFDEYDKVVYGKIPEMVVEGX

SEQ ID NO: 42322 - protein, 21 aa, Artificial Sequence
  Cyclic GFR-binding peptide
SPINVLYFDDMGVPTYGKIPE

SEQ ID NO: 42323 - protein, 29 aa, Artificial Sequence
  Cyclic GFR-binding peptide
  MOD_RES (29)..(29): Xaa is C or S
ELSPINMLYFDEYDKVVYGKIPEMVVEGX

SEQ ID NO: 42324 - protein, 41 aa, Artificial Sequence
  Cyclic GFR-binding peptide
  MOD_RES (5)..(6)..(39)..(41): Xaa is C or S
VGKAXXVPTKLSPINVLYFDDMGVPTYGKIPEGMSVAEXGX

SEQ ID NO: 42325 - protein, 40 aa, Artificial Sequence
  Cyclic GFR-binding peptide
  MOD_RES (4)..(5)..(37)..(39): Xaa is C or S
PKAXXVPTELSPINMLYFDEYDKVVYGKIPEMVVEGXGXR

SEQ ID NO: 42326 - protein, 28 aa, Artificial Sequence
  Cyclic GFR-binding peptide
  MOD_RES (1)..(1): Xaa is C or S
XVPTELSPINMLYFDEYDKVVYGKIPEM

SEQ ID NO: 42327 - protein, 32 aa, Artificial Sequence
  Cyclic GFR-binding peptide
  MOD_RES (6)..(7): Xaa is C or S
AVPKAXXAPTKLSPINVLYFDSSNNVIYGKIP

SEQ ID NO: 42328 - protein, 35 aa, Artificial Sequence
  Cyclic GFR-binding peptide
  MOD_RES (1)..(2)..(34): Xaa is C or S
XXVPARLSPINILYFDAANNVVYGKIPDMVVEAXG

SEQ ID NO: 42329 - protein, 22 aa, Artificial Sequence
  Cyclic GFR-binding peptide
SPINVLYFDDMGVPTYGKIPEG

SEQ ID NO: 42330 - protein, 38 aa, Artificial Sequence
  Cyclic GFR-binding peptide
  MOD_RES (3)..(4)..(36)..(38): Xaa is C or S
ASXXVPARLSPINILYFDAANNVVYGKIPDMVVEAXGX

SEQ ID NO: 42331 - protein, 30 aa, Artificial Sequence
  Cyclic GFR-binding peptide
  MOD_RES (28)..(30): Xaa is C or S
KTSPINMLYFDNGRVLLYGKIPMIVEEXGX

SEQ ID NO: 42332 - protein, 34 aa, Artificial Sequence
  Cyclic GFR-binding peptide
  MOD_RES (6)..(7): Xaa is C or S
AVPKAXXAPTKLSPINVLYFDSSNNVIYGKIPNM

SEQ ID NO: 42333 - protein, 40 aa, Artificial Sequence
  Cyclic GFR-binding peptide
  MOD_RES (5)..(6)..(39): Xaa is C or S
VGKAXXVPTKLSPINVLYFDDMGVPTYGKIPEGMSVAEXG

SEQ ID NO: 42334 - protein, 36 aa, Artificial Sequence
  Cyclic GFR-binding peptide
  MOD_RES (3)..(4): Xaa is C or S
KAXXVPTKLSPINVLYFDDMGVPTYGKIPEGMSVAE

SEQ ID NO: 42335 - protein, 24 aa, Artificial Sequence
  Cyclic GFR-binding peptide
PTQLSPINVLYFDDSSNVIYGKIP

SEQ ID NO: 42336 - protein, 31 aa, Artificial Sequence
  Cyclic GFR-binding peptide
  MOD_RES (1)..(2): Xaa is C or S
XXVPTELSPINMLYFDENEKVVYGKIPDMVV

SEQ ID NO: 42337 - protein, 39 aa, Artificial Sequence
  Cyclic GFR-binding peptide
  MOD_RES (5)..(37)..(39): Xaa is C or S
TKPTXAPTKLSPINVLYFDDSSNVIYGKIPNMVVRSXGX

SEQ ID NO: 42338 - protein, 31 aa, Artificial Sequence
  Cyclic GFR-binding peptide
  MOD_RES (4)..(5): Xaa is C or S
PASXXVPARLSPINILYFDAANNVVYGKIPD

SEQ ID NO: 42339 - protein, 33 aa, Artificial Sequence
  Cyclic GFR-binding peptide
  MOD_RES (3)..(4): Xaa is C or S
KAXXVPTELSPINMLYFDENEKVVYGKIPDMVV

SEQ ID NO: 42340 - protein, 30 aa, Artificial Sequence
  Cyclic GFR-binding peptide
VPTELSPINMLYFDENEKVVYGKIPDMVVE

SEQ ID NO: 42341 - protein, 28 aa, Artificial Sequence
  Cyclic GFR-binding peptide
  MOD_RES (28)..(28): Xaa is C or S
LSPINMLYFDENEKVVYGKIPDMVVEGX

SEQ ID NO: 42342 - protein, 26 aa, Artificial Sequence
  Cyclic GFR-binding peptide
  MOD_RES (1)..(1): Xaa is C or S
XVPTRLSPINILYFDSANNVVYGKIP

SEQ ID NO: 42343 - protein, 25 aa, Artificial Sequence
  Cyclic GFR-binding peptide
TKLSPINVLYFDDMGVPTYGKIPEG

SEQ ID NO: 42344 - protein, 31 aa, Artificial Sequence
  Cyclic GFR-binding peptide
  MOD_RES (1)..(2): Xaa is C or S
XXVPARLSPINILYFDAANNVVYGKIPDMVV

SEQ ID NO: 42345 - protein, 25 aa, Artificial Sequence
  Cyclic GFR-binding peptide
LSPINVLYFDDSSNVIYGKIPNMVV

SEQ ID NO: 42346 - protein, 31 aa, Artificial Sequence
  Cyclic GFR-binding peptide
  MOD_RES (4)..(5): Xaa is C or S
PPTXXVPTRLSPINILYFDSANNVVYGKIPD

SEQ ID NO: 42347 - protein, 32 aa, Artificial Sequence
  Cyclic GFR-binding peptide
  MOD_RES (5)..(6): Xaa is C or S
TPPTXXVPTRLSPINILYFDSANNVVYGKIPD

SEQ ID NO: 42348 - protein, 28 aa, Artificial Sequence
  Cyclic GFR-binding peptide
  MOD_RES (2)..(3): Xaa is C or S
AXXVPTKLSPINVLYFDDMGVPTYGKIP

SEQ ID NO: 42349 - protein, 21 aa, Artificial Sequence
  Cyclic GFR-binding peptide
LSPINILYFDSANNVVYGKIP

SEQ ID NO: 42350 - protein, 33 aa, Artificial Sequence
  Cyclic GFR-binding peptide
  MOD_RES (2)..(3): Xaa is C or S
SXXVPARLSPINILYFDAANNVVYGKIPDMVVE

SEQ ID NO: 42351 - protein, 29 aa, Artificial Sequence
  Cyclic GFR-binding peptide
  MOD_RES (1)..(1): Xaa is C or S
XAPTKLSPINVLYFDDSSNVIYGKIPNMV

SEQ ID NO: 42352 - protein, 32 aa, Artificial Sequence
  Cyclic GFR-binding peptide
  MOD_RES (1)..(1): Xaa is C or S
XVPTELSPINMLYFDEYDKVVYGKIPEMVVEG

SEQ ID NO: 42353 - protein, 34 aa, Artificial Sequence
  Cyclic GFR-binding peptide
  MOD_RES (1)..(33): Xaa is C or S
XVPTKLSPINILYFDKGVVTYYGKIPGMAVSEXG

SEQ ID NO: 42354 - protein, 28 aa, Artificial Sequence
  Cyclic GFR-binding peptide
VKTSPINMLYFDNGRVLLYGKIPMIVEE

SEQ ID NO: 42355 - protein, 28 aa, Artificial Sequence
  Cyclic GFR-binding peptide
TKLSPINILYFDKGVVTYYGKIPGMAVS

SEQ ID NO: 42356 - protein, 34 aa, Artificial Sequence
  Cyclic GFR-binding peptide
  MOD_RES (1)..(2)..(34): Xaa is C or S
XXVPTELSPINMLYFDENEKVVYGKIPDMVVEGX

SEQ ID NO: 42357 - protein, 34 aa, Artificial Sequence
  Cyclic GFR-binding peptide
  MOD_RES (4)..(5): Xaa is C or S
PKAXXAPTKLSPINVLYFDSSNNVIYGKIPNMVV

SEQ ID NO: 42358 - protein, 38 aa, Artificial Sequence
  Cyclic GFR-binding peptide
  MOD_RES (6)..(7): Xaa is C or S
TVPKPXXAPTQLSPINVLYFDDSSNVIYGKIPNMVVRA

SEQ ID NO: 42359 - protein, 28 aa, Artificial Sequence
  Cyclic GFR-binding peptide
PARLSPINILYFDAANNVVYGKIPDMVV

SEQ ID NO: 42360 - protein, 29 aa, Artificial Sequence
  Cyclic GFR-binding peptide
  MOD_RES (3)..(4): Xaa is C or S
KAXXVPTELSPINMLYFDEYDKVVYGKIP

SEQ ID NO: 42361 - protein, 34 aa, Artificial Sequence
  Cyclic GFR-binding peptide
  MOD_RES (2)..(3): Xaa is C or S
AXXVPTKLSPINVLYFDDMGVPTYGKIPEGMSVA

SEQ ID NO: 42362 - protein, 30 aa, Artificial Sequence
  Cyclic GFR-binding peptide
  MOD_RES (4)..(5): Xaa is C or S
GKAXXVPTKLSPINVLYFDDMGVPTYGKIP

SEQ ID NO: 42363 - protein, 30 aa, Artificial Sequence
  Cyclic GFR-binding peptide
PTKLSPINVLYFDDMGVPTYGKIPEGMSVA

SEQ ID NO: 42364 - protein, 22 aa, Artificial Sequence
  Cyclic GFR-binding peptide
LSPINVLYFDSSNNVIYGKIPN

SEQ ID NO: 42365 - protein, 38 aa, Artificial Sequence
  Cyclic GFR-binding peptide
  MOD_RES (4)..(5)..(37): Xaa is C or S
PKAXXVPTELSPINMLYFDEYDKVVYGKIPEMVVEGXG

SEQ ID NO: 42366 - protein, 31 aa, Artificial Sequence
  Cyclic GFR-binding peptide
  MOD_RES (28)..(30): Xaa is C or S
LSPINVLYFDDSSNVIYGKIPNMVVRAXGXH

SEQ ID NO: 42367 - protein, 26 aa, Artificial Sequence
  Cyclic GFR-binding peptide
VPTKLSPINILYFDKGVVTYYGKIPG

SEQ ID NO: 42368 - protein, 27 aa, Artificial Sequence
  Cyclic GFR-binding peptide
  MOD_RES (1)..(2): Xaa is C or S
XXAPTQLSPINVLYFDDSSNVIYGKIP

SEQ ID NO: 42369 - protein, 26 aa, Artificial Sequence
  Cyclic GFR-binding peptide
RLSPINILYFDAANNVVYGKIPDMVV

SEQ ID NO: 42370 - protein, 28 aa, Artificial Sequence
  Cyclic GFR-binding peptide
PTQLSPINVLYFDDSSNVIYGKIPNMVV

SEQ ID NO: 42371 - protein, 27 aa, Artificial Sequence
  Cyclic GFR-binding peptide
  MOD_RES (2)..(2): Xaa is C or S
TXAPTKLSPINVLYFDDSSNVIYGKIP

SEQ ID NO: 42372 - protein, 32 aa, Artificial Sequence
  Cyclic GFR-binding peptide
  MOD_RES (32)..(32): Xaa is C or S
VPTELSPINMLYFDENEKVVYGKIPDMVVEGX

SEQ ID NO: 42373 - protein, 30 aa, Artificial Sequence
  Cyclic GFR-binding peptide
PTELSPINMLYFDENEKVVYGKIPDMVVEG

SEQ ID NO: 42374 - protein, 28 aa, Artificial Sequence
  Cyclic GFR-binding peptide
PTELSPINMLYFDENEKVVYGKIPDMVV

SEQ ID NO: 42375 - protein, 28 aa, Artificial Sequence
  Cyclic GFR-binding peptide
  MOD_RES (28)..(28): Xaa is C or S
LSPINMLYFDEYDKVVYGKIPEMVVEGX

SEQ ID NO: 42376 - protein, 28 aa, Artificial Sequence
  Cyclic GFR-binding peptide
TQLSPINVLYFDDSSNVIYGKIPNMVVR

SEQ ID NO: 42377 - protein, 30 aa, Artificial Sequence
  Cyclic GFR-binding peptide
  MOD_RES (29)..(29): Xaa is C or S
ELSPINMLYFDENEKVVYGKIPDMVVEGXG

SEQ ID NO: 42378 - protein, 38 aa, Artificial Sequence
  Cyclic GFR-binding peptide
  MOD_RES (3)..(4)..(35)..(37): Xaa is C or S
STXXAPVKTSPINMLYFDNGRVLLYGKIPMIVEEXGXL

SEQ ID NO: 42379 - protein, 27 aa, Artificial Sequence
  Cyclic GFR-binding peptide
KLSPINVLYFDSSNNVIYGKIPNMVVK

SEQ ID NO: 42380 - protein, 34 aa, Artificial Sequence
  Cyclic GFR-binding peptide
  MOD_RES (32)..(34): Xaa is C or S
APTKLSPINVLYFDSSNNVIYGKIPNMVVKAXGX

SEQ ID NO: 42381 - protein, 32 aa, Artificial Sequence
  Cyclic GFR-binding peptide
  MOD_RES (2)..(3): Xaa is C or S
AXXVPTKLSPINILYFDKGVVTYYGKIPGMAV

SEQ ID NO: 42382 - protein, 29 aa, Artificial Sequence
  Cyclic GFR-binding peptide
  MOD_RES (27)..(29): Xaa is C or S
SPINILYFDAANNVVYGKIPDMVVEAXGX

SEQ ID NO: 42383 - protein, 24 aa, Artificial Sequence
  Cyclic GFR-binding peptide
SPINILYFDSANNVVYGKIPDMVV

SEQ ID NO: 42384 - protein, 27 aa, Artificial Sequence
  Cyclic GFR-binding peptide
TRLSPINILYFDSANNVVYGKIPDMVV

SEQ ID NO: 42385 - protein, 40 aa, Artificial Sequence
  Cyclic GFR-binding peptide
  MOD_RES (5)..(6)..(38)..(40): Xaa is C or S
IPKAXXVPTELSPINMLYFDENEKVVYGKIPDMVVEGXGX

SEQ ID NO: 42386 - protein, 34 aa, Artificial Sequence
  Cyclic GFR-binding peptide
  MOD_RES (1)..(2)..(34): Xaa is C or S
XXVPTELSPINMLYFDEYDKVVYGKIPEMVVEGX

SEQ ID NO: 42387 - protein, 21 aa, Artificial Sequence
  Cyclic GFR-binding peptide
SPINVLYFDDSSNVIYGKIPN

SEQ ID NO: 42388 - protein, 33 aa, Artificial Sequence
  Cyclic GFR-binding peptide
  MOD_RES (6)..(7): Xaa is C or S
TVPKPXXAPTQLSPINVLYFDDSSNVIYGKIPN

SEQ ID NO: 42389 - protein, 25 aa, Artificial Sequence
  Cyclic GFR-binding peptide
KTSPINMLYFDNGRVLLYGKIPMIV

SEQ ID NO: 42390 - protein, 31 aa, Artificial Sequence
  Cyclic GFR-binding peptide
  MOD_RES (30)..(30): Xaa is C or S
TQLSPINVLYFDDSSNVIYGKIPNMVVRAXG

SEQ ID NO: 42391 - protein, 29 aa, Artificial Sequence
  Cyclic GFR-binding peptide
PTKLSPINVLYFDDMGVPTYGKIPEGMSV

SEQ ID NO: 42392 - protein, 31 aa, Artificial Sequence
  Cyclic GFR-binding peptide
  MOD_RES (3)..(4): Xaa is C or S
KPXXAPTQLSPINVLYFDDSSNVIYGKIPNM

SEQ ID NO: 42393 - protein, 28 aa, Artificial Sequence
  Cyclic GFR-binding peptide
KLSPINVLYFDDMGVPTYGKIPEGMSVA

SEQ ID NO: 42394 - protein, 28 aa, Artificial Sequence
  Cyclic GFR-binding peptide
PTKLSPINVLYFDDMGVPTYGKIPEGMS

SEQ ID NO: 42395 - protein, 28 aa, Artificial Sequence
  Cyclic GFR-binding peptide
  MOD_RES (28)..(28): Xaa is C or S
LSPINVLYFDDSSNVIYGKIPNMVVRSX

SEQ ID NO: 42396 - protein, 35 aa, Artificial Sequence
  Cyclic GFR-binding peptide
  MOD_RES (6)..(7): Xaa is C or S
AAPASXXVPARLSPINILYFDAANNVVYGKIPDMV

SEQ ID NO: 42397 - protein, 23 aa, Artificial Sequence
  Cyclic GFR-binding peptide
SPINMLYFDENEKVVYGKIPDMV

SEQ ID NO: 42398 - protein, 37 aa, Artificial Sequence
  Cyclic GFR-binding peptide
  MOD_RES (1)..(2)..(34)..(36): Xaa is C or S
XXVPTELSPINMLYFDEYDKVVYGKIPEMVVEGXGXR

SEQ ID NO: 42399 - protein, 37 aa, Artificial Sequence
  Cyclic GFR-binding peptide
  MOD_RES (1)..(2)..(34)..(36): Xaa is C or S
XXVPTRLSPINILYFDSANNVVYGKIPDMVVESXGXR

SEQ ID NO: 42400 - protein, 37 aa, Artificial Sequence
  Cyclic GFR-binding peptide
  MOD_RES (3)..(4)..(36): Xaa is C or S
KAXXVPTKLSPINILYFDKGVVTYYGKIPGMAVSEXG

SEQ ID NO: 42401 - protein, 34 aa, Artificial Sequence
  Cyclic GFR-binding peptide
  MOD_RES (31)..(33): Xaa is C or S
PTELSPINMLYFDENEKVVYGKIPDMVVEGXGXR

SEQ ID NO: 42402 - protein, 35 aa, Artificial Sequence
  Cyclic GFR-binding peptide
  MOD_RES (32)..(34): Xaa is C or S
PTKLSPINVLYFDDMGVPTYGKIPEGMSVAEXGXR

SEQ ID NO: 42403 - protein, 38 aa, Artificial Sequence
  Cyclic GFR-binding peptide
  MOD_RES (3)..(4)..(36)..(38): Xaa is C or S
KAXXAPTKLSPINVLYFDSSNNVIYGKIPNMVVKAXGX

SEQ ID NO: 42404 - protein, 31 aa, Artificial Sequence
  Cyclic GFR-binding peptide
  MOD_RES (3)..(4): Xaa is C or S
KAXXVPTKLSPINVLYFDDMGVPTYGKIPEG

SEQ ID NO: 42405 - protein, 36 aa, Artificial Sequence
  Cyclic GFR-binding peptide
  MOD_RES (4)..(5): Xaa is C or S
PKPXXAPTKLSPINVLYFDDSSNVIYGKIPNMVVRS

SEQ ID NO: 42406 - protein, 28 aa, Artificial Sequence
  Cyclic GFR-binding peptide
  MOD_RES (2)..(3): Xaa is C or S
SXXVPARLSPINILYFDAANNVVYGKIP

SEQ ID NO: 42407 - protein, 35 aa, Artificial Sequence
  Cyclic GFR-binding peptide
  MOD_RES (5)..(6): Xaa is C or S
VPKAXXAPTKLSPINVLYFDSSNNVIYGKIPNMVV

SEQ ID NO: 42408 - protein, 27 aa, Artificial Sequence
  Cyclic GFR-binding peptide
LSPINVLYFDDMGVPTYGKIPEGMSVA

SEQ ID NO: 42409 - protein, 35 aa, Artificial Sequence
  Cyclic GFR-binding peptide
  MOD_RES (1)..(2)..(34): Xaa is C or S
XXAPTKLSPINVLYFDDSSNVIYGKIPNMVVRSXG

SEQ ID NO: 42410 - protein, 25 aa, Artificial Sequence
  Cyclic GFR-binding peptide
VPTKLSPINILYFDKGVVTYYGKIP

SEQ ID NO: 42411 - protein, 28 aa, Artificial Sequence
  Cyclic GFR-binding peptide
ELSPINMLYFDENEKVVYGKIPDMVVEG

SEQ ID NO: 42412 - protein, 38 aa, Artificial Sequence
  Cyclic GFR-binding peptide
  MOD_RES (3)..(4)..(36)..(38): Xaa is C or S
PTXXVPTRLSPINILYFDSANNVVYGKIPDMVVESXGX

SEQ ID NO: 42413 - protein, 38 aa, Artificial Sequence
  Cyclic GFR-binding peptide
  MOD_RES (7)..(7): Xaa is C or S
HVTKPTXAPTKLSPINVLYFDDSSNVIYGKIPNMVVRS

SEQ ID NO: 42414 - protein, 31 aa, Artificial Sequence
  Cyclic GFR-binding peptide
  MOD_RES (30)..(30): Xaa is C or S
TKLSPINVLYFDDSSNVIYGKIPNMVVRSXG

SEQ ID NO: 42415 - protein, 29 aa, Artificial Sequence
  Cyclic GFR-binding peptide
  MOD_RES (3)..(4): Xaa is C or S
ASXXVPARLSPINILYFDAANNVVYGKIP

SEQ ID NO: 42416 - protein, 34 aa, Artificial Sequence
  Cyclic GFR-binding peptide
  MOD_RES (32)..(34): Xaa is C or S
APTKLSPINVLYFDDSSNVIYGKIPNMVVRSXGX

SEQ ID NO: 42417 - protein, 27 aa, Artificial Sequence
  Cyclic GFR-binding peptide
  MOD_RES (27)..(27): Xaa is C or S
SPINVLYFDDSSNVIYGKIPNMVVRSX

SEQ ID NO: 42418 - protein, 25 aa, Artificial Sequence
  Cyclic GFR-binding peptide
TELSPINMLYFDEYDKVVYGKIPEM

SEQ ID NO: 42419 - protein, 40 aa, Artificial Sequence
  Cyclic GFR-binding peptide
  MOD_RES (5)..(6)..(38)..(40): Xaa is C or S
IPKAXXVPTELSPINMLYFDEYDKVVYGKIPEMVVEGXGX

SEQ ID NO: 42420 - protein, 34 aa, Artificial Sequence
  Cyclic GFR-binding peptide
  MOD_RES (4)..(5): Xaa is C or S
PKAXXVPTELSPINMLYFDEYDKVVYGKIPEMVV

SEQ ID NO: 42421 - protein, 30 aa, Artificial Sequence
  Cyclic GFR-binding peptide
  MOD_RES (3)..(4): Xaa is C or S
KAXXVPTELSPINMLYFDEYDKVVYGKIPE

SEQ ID NO: 42422 - protein, 32 aa, Artificial Sequence
  Cyclic GFR-binding peptide
  MOD_RES (2)..(3): Xaa is C or S
AXXVPTELSPINMLYFDEYDKVVYGKIPEMVV

SEQ ID NO: 42423 - protein, 33 aa, Artificial Sequence
  Cyclic GFR-binding peptide
  MOD_RES (2)..(3): Xaa is C or S
AXXVPTKLSPINVLYFDDMGVPTYGKIPEGMSV

SEQ ID NO: 42424 - protein, 36 aa, Artificial Sequence
  Cyclic GFR-binding peptide
  MOD_RES (6)..(7): Xaa is C or S
KVGKAXXVPTKLSPINVLYFDDMGVPTYGKIPEGMS

SEQ ID NO: 42425 - protein, 20 aa, Artificial Sequence
  Cyclic GFR-binding peptide
SPINILYFDAANNVVYGKIP

SEQ ID NO: 42426 - protein, 31 aa, Artificial Sequence
  Cyclic GFR-binding peptide
  MOD_RES (1)..(2): Xaa is C or S
XXVPTKLSPINILYFDKGVVTYYGKIPGMAV

SEQ ID NO: 42427 - protein, 28 aa, Artificial Sequence
  Cyclic GFR-binding peptide
  MOD_RES (27)..(27): Xaa is C or S
SPINILYFDSANNVVYGKIPDMVVESXG

SEQ ID NO: 42428 - protein, 24 aa, Artificial Sequence
  Cyclic GFR-binding peptide
PTKLSPINILYFDKGVVTYYGKIP

SEQ ID NO: 42429 - protein, 33 aa, Artificial Sequence
  Cyclic GFR-binding peptide
  MOD_RES (31)..(33): Xaa is C or S
APVKTSPINMLYFDNGRVLLYGKIPMIVEEXGX

SEQ ID NO: 42430 - protein, 27 aa, Artificial Sequence
  Cyclic GFR-binding peptide
  MOD_RES (1)..(1): Xaa is C or S
XAPTQLSPINVLYFDDSSNVIYGKIPN

SEQ ID NO: 42431 - protein, 37 aa, Artificial Sequence
  Cyclic GFR-binding peptide
  MOD_RES (6)..(7): Xaa is C or S
SIPKAXXVPTELSPINMLYFDEYDKVVYGKIPEMVVE

SEQ ID NO: 42432 - protein, 37 aa, Artificial Sequence
  Cyclic GFR-binding peptide
  MOD_RES (5)..(6): Xaa is C or S
VPKPXXAPTKLSPINVLYFDDSSNVIYGKIPNMVVRS

SEQ ID NO: 42433 - protein, 33 aa, Artificial Sequence
  Cyclic GFR-binding peptide
  MOD_RES (3)..(4): Xaa is C or S
KAXXVPTELSPINMLYFDEYDKVVYGKIPEMVV

SEQ ID NO: 42434 - protein, 25 aa, Artificial Sequence
  Cyclic GFR-binding peptide
VKTSPINMLYFDNGRVLLYGKIPMI

SEQ ID NO: 42435 - protein, 25 aa, Artificial Sequence
  Cyclic GFR-binding peptide
APTKLSPINVLYFDSSNNVIYGKIP

SEQ ID NO: 42436 - protein, 36 aa, Artificial Sequence
  Cyclic GFR-binding peptide
  MOD_RES (1)..(2)..(34)..(36): Xaa is C or S
XXAPTQLSPINVLYFDDSSNVIYGKIPNMVVRAXGX

SEQ ID NO: 42437 - protein, 27 aa, Artificial Sequence
  Cyclic GFR-binding peptide
  MOD_RES (27)..(27): Xaa is C or S
TSPINMLYFDNGRVLLYGKIPMIVEEX

SEQ ID NO: 42438 - protein, 27 aa, Artificial Sequence
  Cyclic GFR-binding peptide
  MOD_RES (27)..(27): Xaa is C or S
SPINMLYFDENEKVVYGKIPDMVVEGX

SEQ ID NO: 42439 - protein, 23 aa, Artificial Sequence
  Cyclic GFR-binding peptide
KLSPINVLYFDDSSNVIYGKIPN

SEQ ID NO: 42440 - protein, 32 aa, Artificial Sequence
  Cyclic GFR-binding peptide
  MOD_RES (5)..(6): Xaa is C or S
IPKAXXVPTELSPINMLYFDENEKVVYGKIPD

SEQ ID NO: 42441 - protein, 26 aa, Artificial Sequence
  Cyclic GFR-binding peptide
SPINVLYFDSSNNVIYGKIPNMVVKA

SEQ ID NO: 42442 - protein, 21 aa, Artificial Sequence
  Cyclic GFR-binding peptide
SPINVLYFDSSNNVIYGKIPN

SEQ ID NO: 42443 - protein, 31 aa, Artificial Sequence
  Cyclic GFR-binding peptide
  MOD_RES (3)..(3): Xaa is C or S
PTXAPTKLSPINVLYFDDSSNVIYGKIPNMV

SEQ ID NO: 42444 - protein, 40 aa, Artificial Sequence
  Cyclic GFR-binding peptide
  MOD_RES (4)..(5)..(38)..(40): Xaa is C or S
GKAXXVPTKLSPINVLYFDDMGVPTYGKIPEGMSVAEXGX

SEQ ID NO: 42445 - protein, 29 aa, Artificial Sequence
  Cyclic GFR-binding peptide
VPTELSPINMLYFDEYDKVVYGKIPEMVV

SEQ ID NO: 42446 - protein, 37 aa, Artificial Sequence
  Cyclic GFR-binding peptide
  MOD_RES (6)..(7): Xaa is C or S
STPPTXXVPTRLSPINILYFDSANNVVYGKIPDMVVE

SEQ ID NO: 42447 - protein, 26 aa, Artificial Sequence
  Cyclic GFR-binding peptide
LSPINMLYFDEYDKVVYGKIPEMVVE

SEQ ID NO: 42448 - protein, 22 aa, Artificial Sequence
  Cyclic GFR-binding peptide
SPINMLYFDNGRVLLYGKIPMI

SEQ ID NO: 42449 - protein, 35 aa, Artificial Sequence
  Cyclic GFR-binding peptide
  MOD_RES (3)..(4): Xaa is C or S
KAXXVPTKLSPINVLYFDDMGVPTYGKIPEGMSVA

SEQ ID NO: 42450 - protein, 36 aa, Artificial Sequence
  Cyclic GFR-binding peptide
  MOD_RES (3)..(4)..(36): Xaa is C or S
ASXXVPARLSPINILYFDAANNVVYGKIPDMVVEAX

SEQ ID NO: 42451 - protein, 26 aa, Artificial Sequence
  Cyclic GFR-binding peptide
PARLSPINILYFDAANNVVYGKIPDM

SEQ ID NO: 42452 - protein, 30 aa, Artificial Sequence
  Cyclic GFR-binding peptide
  MOD_RES (4)..(5): Xaa is C or S
PKPXXAPTKLSPINVLYFDDSSNVIYGKIP

SEQ ID NO: 42453 - protein, 36 aa, Artificial Sequence
  Cyclic GFR-binding peptide
  MOD_RES (2)..(34)..(36): Xaa is C or S
TXAPTKLSPINVLYFDDSSNVIYGKIPNMVVRSXGX

SEQ ID NO: 42454 - protein, 27 aa, Artificial Sequence
  Cyclic GFR-binding peptide
PTKLSPINVLYFDDMGVPTYGKIPEGM

SEQ ID NO: 42455 - protein, 36 aa, Artificial Sequence
  Cyclic GFR-binding peptide
  MOD_RES (1)..(33)..(35): Xaa is C or S
XVPTRLSPINILYFDSANNVVYGKIPDMVVESXGXR

SEQ ID NO: 42456 - protein, 37 aa, Artificial Sequence
  Cyclic GFR-binding peptide
  MOD_RES (3)..(35)..(37): Xaa is C or S
PTXAPTKLSPINVLYFDDSSNVIYGKIPNMVVRSXGX

SEQ ID NO: 42457 - protein, 37 aa, Artificial Sequence
  Cyclic GFR-binding peptide
  MOD_RES (4)..(5)..(37): Xaa is C or S
PASXXVPARLSPINILYFDAANNVVYGKIPDMVVEAX

SEQ ID NO: 42458 - protein, 39 aa, Artificial Sequence
  Cyclic GFR-binding peptide
  MOD_RES (5)..(6)..(39): Xaa is C or S
VGKAXXVPTKLSPINVLYFDDMGVPTYGKIPEGMSVAEX

SEQ ID NO: 42459 - protein, 27 aa, Artificial Sequence
  Cyclic GFR-binding peptide
ARLSPINILYFDAANNVVYGKIPDMVV

SEQ ID NO: 42460 - protein, 31 aa, Artificial Sequence
  Cyclic GFR-binding peptide
  MOD_RES (5)..(6): Xaa is C or S
VPKAXXAPTKLSPINVLYFDSSNNVIYGKIP

SEQ ID NO: 42461 - protein, 22 aa, Artificial Sequence
  Cyclic GFR-binding peptide
KLSPINILYFDKGVVTYYGKIP

SEQ ID NO: 42462 - protein, 27 aa, Artificial Sequence
  Cyclic GFR-binding peptide
TKLSPINVLYFDSSNNVIYGKIPNMVV

SEQ ID NO: 42463 - protein, 28 aa, Artificial Sequence
  Cyclic GFR-binding peptide
ARLSPINILYFDAANNVVYGKIPDMVVE

SEQ ID NO: 42464 - protein, 26 aa, Artificial Sequence
  Cyclic GFR-binding peptide
  MOD_RES (1)..(1): Xaa is C or S
XAPVKTSPINMLYFDNGRVLLYGKIP

SEQ ID NO: 42465 - protein, 33 aa, Artificial Sequence
  Cyclic GFR-binding peptide
  MOD_RES (31)..(33): Xaa is C or S
PTELSPINMLYFDENEKVVYGKIPDMVVEGXGX

SEQ ID NO: 42466 - protein, 22 aa, Artificial Sequence
  Cyclic GFR-binding peptide
TSPINMLYFDNGRVLLYGKIPM

SEQ ID NO: 42467 - protein, 29 aa, Artificial Sequence
  Cyclic GFR-binding peptide
  MOD_RES (28)..(28): Xaa is C or S
LSPINVLYFDDSSNVIYGKIPNMVVRSXG

SEQ ID NO: 42468 - protein, 32 aa, Artificial Sequence
  Cyclic GFR-binding peptide
  MOD_RES (30)..(32): Xaa is C or S
KLSPINVLYFDDMGVPTYGKIPEGMSVAEXGX

SEQ ID NO: 42469 - protein, 38 aa, Artificial Sequence
  Cyclic GFR-binding peptide
  MOD_RES (2)..(3)..(35)..(37): Xaa is C or S
SXXVPARLSPINILYFDAANNVVYGKIPDMVVEAXGXR

SEQ ID NO: 42470 - protein, 35 aa, Artificial Sequence
  Cyclic GFR-binding peptide
  MOD_RES (5)..(6): Xaa is C or S
APASXXVPARLSPINILYFDAANNVVYGKIPDMVV

SEQ ID NO: 42471 - protein, 34 aa, Artificial Sequence
  Cyclic GFR-binding peptide
  MOD_RES (6)..(7): Xaa is C or S
KIPKAXXVPTELSPINMLYFDENEKVVYGKIPDM

SEQ ID NO: 42472 - protein, 27 aa, Artificial Sequence
  Cyclic GFR-binding peptide
SPINVLYFDDMGVPTYGKIPEGMSVAE

SEQ ID NO: 42473 - protein, 32 aa, Artificial Sequence
  Cyclic GFR-binding peptide
  MOD_RES (6)..(7): Xaa is C or S
RVPSTXXAPVKTSPINMLYFDNGRVLLYGKIP

SEQ ID NO: 42474 - protein, 32 aa, Artificial Sequence
  Cyclic GFR-binding peptide
  MOD_RES (1)..(1): Xaa is C or S
XVPTKLSPINILYFDKGVVTYYGKIPGMAVSE

SEQ ID NO: 42475 - protein, 27 aa, Artificial Sequence
  Cyclic GFR-binding peptide
  MOD_RES (1)..(2): Xaa is C or S
XXVPTRLSPINILYFDSANNVVYGKIP

SEQ ID NO: 42476 - protein, 29 aa, Artificial Sequence
  Cyclic GFR-binding peptide
  MOD_RES (28)..(28): Xaa is C or S
KTSPINMLYFDNGRVLLYGKIPMIVEEXG

SEQ ID NO: 42477 - protein, 30 aa, Artificial Sequence
  Cyclic GFR-binding peptide
  MOD_RES (2)..(3): Xaa is C or S
AXXAPTKLSPINVLYFDSSNNVIYGKIPNM

SEQ ID NO: 42478 - protein, 32 aa, Artificial Sequence
  Cyclic GFR-binding peptide
  MOD_RES (30)..(32): Xaa is C or S
TELSPINMLYFDENEKVVYGKIPDMVVEGXGX

SEQ ID NO: 42479 - protein, 28 aa, Artificial Sequence
  Cyclic GFR-binding peptide
PTKLSPINVLYFDSSNNVIYGKIPNMVV

SEQ ID NO: 42480 - protein, 38 aa, Artificial Sequence
  Cyclic GFR-binding peptide
  MOD_RES (5)..(6): Xaa is C or S
VGKAXXVPTKLSPINVLYFDDMGVPTYGKIPEGMSVAE

SEQ ID NO: 42481 - protein, 34 aa, Artificial Sequence
  Cyclic GFR-binding peptide
  MOD_RES (5)..(6): Xaa is C or S
VPKPXXAPTQLSPINVLYFDDSSNVIYGKIPNMV

SEQ ID NO: 42482 - protein, 23 aa, Artificial Sequence
  Cyclic GFR-binding peptide
TKLSPINVLYFDDMGVPTYGKIP

SEQ ID NO: 42483 - protein, 26 aa, Artificial Sequence
  Cyclic GFR-binding peptide
LSPINMLYFDENEKVVYGKIPDMVVE

SEQ ID NO: 42484 - protein, 30 aa, Artificial Sequence
  Cyclic GFR-binding peptide
  MOD_RES (1)..(1): Xaa is C or S
XAPVKTSPINMLYFDNGRVLLYGKIPMIVE

SEQ ID NO: 42485 - protein, 28 aa, Artificial Sequence
  Cyclic GFR-binding peptide
TELSPINMLYFDEYDKVVYGKIPEMVVE

SEQ ID NO: 42486 - protein, 30 aa, Artificial Sequence
  Cyclic GFR-binding peptide
  MOD_RES (27)..(29): Xaa is C or S
SPINILYFDAANNVVYGKIPDMVVEAXGXR

SEQ ID NO: 42487 - protein, 32 aa, Artificial Sequence
  Cyclic GFR-binding peptide
  MOD_RES (2)..(2): Xaa is C or S
TXAPTKLSPINVLYFDDSSNVIYGKIPNMVVR

SEQ ID NO: 42488 - protein, 31 aa, Artificial Sequence
  Cyclic GFR-binding peptide
  MOD_RES (2)..(3): Xaa is C or S
TXXVPTRLSPINILYFDSANNVVYGKIPDMV

SEQ ID NO: 42489 - protein, 37 aa, Artificial Sequence
  Cyclic GFR-binding peptide
  MOD_RES (1)..(2)..(34)..(36): Xaa is C or S
XXVPTELSPINMLYFDENEKVVYGKIPDMVVEGXGXR

SEQ ID NO: 42490 - protein, 32 aa, Artificial Sequence
  Cyclic GFR-binding peptide
  MOD_RES (4)..(5): Xaa is C or S
PSTXXAPVKTSPINMLYFDNGRVLLYGKIPMI

SEQ ID NO: 42491 - protein, 30 aa, Artificial Sequence
  Cyclic GFR-binding peptide
  MOD_RES (27)..(29): Xaa is C or S
SPINVLYFDDSSNVIYGKIPNMVVRSXGXH

SEQ ID NO: 42492 - protein, 37 aa, Artificial Sequence
  Cyclic GFR-binding peptide
  MOD_RES (2)..(3)..(35)..(37): Xaa is C or S
PXXAPTKLSPINVLYFDDSSNVIYGKIPNMVVRSXGX

SEQ ID NO: 42493 - protein, 37 aa, Artificial Sequence
  Cyclic GFR-binding peptide
  MOD_RES (2)..(3)..(35)..(37): Xaa is C or S
TXXVPTRLSPINILYFDSANNVVYGKIPDMVVESXGX

SEQ ID NO: 42494 - protein, 41 aa, Artificial Sequence
  Cyclic GFR-binding peptide
  MOD_RES (5)..(6)..(38)..(40): Xaa is C or S
VPKAXXAPTKLSPINVLYFDSSNNVIYGKIPNMVVKAXGXH

SEQ ID NO: 42495 - protein, 35 aa, Artificial Sequence
  Cyclic GFR-binding peptide
  MOD_RES (2)..(34): Xaa is C or S
TXAPTKLSPINVLYFDDSSNVIYGKIPNMVVRSXG

SEQ ID NO: 42496 - protein, 27 aa, Artificial Sequence
  Cyclic GFR-binding peptide
  MOD_RES (1)..(2): Xaa is C or S
XXAPVKTSPINMLYFDNGRVLLYGKIP

SEQ ID NO: 42497 - protein, 33 aa, Artificial Sequence
  Cyclic GFR-binding peptide
  MOD_RES (32)..(32): Xaa is C or S
PTKLSPINVLYFDDMGVPTYGKIPEGMSVAEXG

SEQ ID NO: 42498 - protein, 24 aa, Artificial Sequence
  Cyclic GFR-binding peptide
TSPINMLYFDNGRVLLYGKIPMIV

SEQ ID NO: 42499 - protein, 26 aa, Artificial Sequence
  Cyclic GFR-binding peptide
VPTELSPINMLYFDENEKVVYGKIPD

SEQ ID NO: 42500 - protein, 23 aa, Artificial Sequence
  Cyclic GFR-binding peptide
TQLSPINVLYFDDSSNVIYGKIP

SEQ ID NO: 42501 - protein, 30 aa, Artificial Sequence
  Cyclic GFR-binding peptide
  MOD_RES (3)..(4): Xaa is C or S
KAXXVPTELSPINMLYFDENEKVVYGKIPD

SEQ ID NO: 42502 - protein, 25 aa, Artificial Sequence
  Cyclic GFR-binding peptide
TKLSPINVLYFDDSSNVIYGKIPNM

SEQ ID NO: 42503 - protein, 31 aa, Artificial Sequence
  Cyclic GFR-binding peptide
  MOD_RES (2)..(3): Xaa is C or S
SXXVPARLSPINILYFDAANNVVYGKIPDMV

SEQ ID NO: 42504 - protein, 34 aa, Artificial Sequence
  Cyclic GFR-binding peptide
  MOD_RES (1)..(33): Xaa is C or S
XVPARLSPINILYFDAANNVVYGKIPDMVVEAXG

SEQ ID NO: 42505 - protein, 35 aa, Artificial Sequence
  Cyclic GFR-binding peptide
  MOD_RES (4)..(5): Xaa is C or S
PPTXXVPTRLSPINILYFDSANNVVYGKIPDMVVE

SEQ ID NO: 42506 - protein, 29 aa, Artificial Sequence
  Cyclic GFR-binding peptide
TELSPINMLYFDENEKVVYGKIPDMVVEG

SEQ ID NO: 42507 - protein, 23 aa, Artificial Sequence
  Cyclic GFR-binding peptide
TRLSPINILYFDSANNVVYGKIP

SEQ ID NO: 42508 - protein, 34 aa, Artificial Sequence
  Cyclic GFR-binding peptide
  MOD_RES (1)..(2)..(34): Xaa is C or S
XXAPTKLSPINVLYFDSSNNVIYGKIPNMVVKAX

SEQ ID NO: 42509 - protein, 30 aa, Artificial Sequence
  Cyclic GFR-binding peptide
  MOD_RES (27)..(29): Xaa is C or S
SPINILYFDKGVVTYYGKIPGMAVSEXGXR

SEQ ID NO: 42510 - protein, 40 aa, Artificial Sequence
  Cyclic GFR-binding peptide
  MOD_RES (6)..(7)..(39): Xaa is C or S
YVPKPXXAPTKLSPINVLYFDDSSNVIYGKIPNMVVRSXG

SEQ ID NO: 42511 - protein, 32 aa, Artificial Sequence
  Cyclic GFR-binding peptide
  MOD_RES (6)..(7): Xaa is C or S
HVPKPXXAPTKLSPINVLYFDDSSNVIYGKIP

SEQ ID NO: 42512 - protein, 24 aa, Artificial Sequence
  Cyclic GFR-binding peptide
PVKTSPINMLYFDNGRVLLYGKIP

SEQ ID NO: 42513 - protein, 39 aa, Artificial Sequence
  Cyclic GFR-binding peptide
  MOD_RES (5)..(6)..(38): Xaa is C or S
ASKAXXVPTKLSPINILYFDKGVVTYYGKIPGMAVSEXG

SEQ ID NO: 42514 - protein, 32 aa, Artificial Sequence
  Cyclic GFR-binding peptide
  MOD_RES (3)..(4): Xaa is C or S
KAXXVPTKLSPINVLYFDDMGVPTYGKIPEGM

SEQ ID NO: 42515 - protein, 24 aa, Artificial Sequence
  Cyclic GFR-binding peptide
LSPINVLYFDSSNNVIYGKIPNMV

SEQ ID NO: 42516 - protein, 30 aa, Artificial Sequence
  Cyclic GFR-binding peptide
  MOD_RES (3)..(4): Xaa is C or S
KPXXAPTQLSPINVLYFDDSSNVIYGKIPN

SEQ ID NO: 42517 - protein, 31 aa, Artificial Sequence
  Cyclic GFR-binding peptide
  MOD_RES (30)..(30): Xaa is C or S
PVKTSPINMLYFDNGRVLLYGKIPMIVEEXG

SEQ ID NO: 42518 - protein, 32 aa, Artificial Sequence
  Cyclic GFR-binding peptide
  MOD_RES (32)..(32): Xaa is C or S
VPARLSPINILYFDAANNVVYGKIPDMVVEAX

SEQ ID NO: 42519 - protein, 38 aa, Artificial Sequence
  Cyclic GFR-binding peptide
  MOD_RES (4)..(5)..(37): Xaa is C or S
PKAXXAPTKLSPINVLYFDSSNNVIYGKIPNMVVKAXG

SEQ ID NO: 42520 - protein, 35 aa, Artificial Sequence
  Cyclic GFR-binding peptide
  MOD_RES (4)..(5): Xaa is C or S
PKAXXAPTKLSPINVLYFDSSNNVIYGKIPNMVVK

SEQ ID NO: 42521 - protein, 34 aa, Artificial Sequence
  Cyclic GFR-binding peptide
  MOD_RES (3)..(4): Xaa is C or S
KPXXAPTKLSPINVLYFDDSSNVIYGKIPNMVVR

SEQ ID NO: 42522 - protein, 32 aa, Artificial Sequence
  Cyclic GFR-binding peptide
  MOD_RES (31)..(31): Xaa is C or S
PTELSPINMLYFDENEKVVYGKIPDMVVEGXG

SEQ ID NO: 42523 - protein, 28 aa, Artificial Sequence
  Cyclic GFR-binding peptide
  MOD_RES (3)..(3): Xaa is C or S
PTXAPTKLSPINVLYFDDSSNVIYGKIP

SEQ ID NO: 42524 - protein, 41 aa, Artificial Sequence
  Cyclic GFR-binding peptide
  MOD_RES (6)..(7)..(39)..(41): Xaa is C or S
KIPKAXXVPTELSPINMLYFDENEKVVYGKIPDMVVEGXGX

SEQ ID NO: 42525 - protein, 35 aa, Artificial Sequence
  Cyclic GFR-binding peptide
  MOD_RES (4)..(5): Xaa is C or S
SKAXXVPTKLSPINILYFDKGVVTYYGKIPGMAVS

SEQ ID NO: 42526 - protein, 27 aa, Artificial Sequence
  Cyclic GFR-binding peptide
LSPINILYFDKGVVTYYGKIPGMAVSE

SEQ ID NO: 42527 - protein, 29 aa, Artificial Sequence
  Cyclic GFR-binding peptide
TKLSPINVLYFDDMGVPTYGKIPEGMSVA

SEQ ID NO: 42528 - protein, 39 aa, Artificial Sequence
  Cyclic GFR-binding peptide
  MOD_RES (4)..(5)..(37)..(39): Xaa is C or S
PASXXVPARLSPINILYFDAANNVVYGKIPDMVVEAXGX

SEQ ID NO: 42529 - protein, 38 aa, Artificial Sequence
  Cyclic GFR-binding peptide
  MOD_RES (4)..(5)..(37): Xaa is C or S
PASXXVPARLSPINILYFDAANNVVYGKIPDMVVEAXG

SEQ ID NO: 42530 - protein, 30 aa, Artificial Sequence
  Cyclic GFR-binding peptide
VPTKLSPINVLYFDDMGVPTYGKIPEGMSV

SEQ ID NO: 42531 - protein, 26 aa, Artificial Sequence
  Cyclic GFR-binding peptide
TKLSPINVLYFDDSSNVIYGKIPNMV

SEQ ID NO: 42532 - protein, 27 aa, Artificial Sequence
  Cyclic GFR-binding peptide
VPTELSPINMLYFDEYDKVVYGKIPEM

SEQ ID NO: 42533 - protein, 32 aa, Artificial Sequence
  Cyclic GFR-binding peptide
  MOD_RES (1)..(1): Xaa is C or S
XAPTKLSPINVLYFDSSNNVIYGKIPNMVVKA

SEQ ID NO: 42534 - protein, 38 aa, Artificial Sequence
  Cyclic GFR-binding peptide
  MOD_RES (6)..(7): Xaa is C or S
AVPKAXXAPTKLSPINVLYFDSSNNVIYGKIPNMVVKA

SEQ ID NO: 42535 - protein, 34 aa, Artificial Sequence
  Cyclic GFR-binding peptide
  MOD_RES (33)..(33): Xaa is C or S
VPTKLSPINVLYFDDMGVPTYGKIPEGMSVAEXG

SEQ ID NO: 42536 - protein, 36 aa, Artificial Sequence
  Cyclic GFR-binding peptide
  MOD_RES (6)..(7): Xaa is C or S
TVPKPXXAPTQLSPINVLYFDDSSNVIYGKIPNMVV

SEQ ID NO: 42537 - protein, 28 aa, Artificial Sequence
  Cyclic GFR-binding peptide
  MOD_RES (2)..(3): Xaa is C or S
PXXAPTKLSPINVLYFDDSSNVIYGKIP

SEQ ID NO: 42538 - protein, 40 aa, Artificial Sequence
  Cyclic GFR-binding peptide
  MOD_RES (6)..(38)..(40): Xaa is C or S
VTKPTXAPTKLSPINVLYFDDSSNVIYGKIPNMVVRSXGX

SEQ ID NO: 42539 - protein, 30 aa, Artificial Sequence
  Cyclic GFR-binding peptide
  MOD_RES (27)..(29): Xaa is C or S
SPINILYFDSANNVVYGKIPDMVVESXGXR

SEQ ID NO: 42540 - protein, 29 aa, Artificial Sequence
  Cyclic GFR-binding peptide
  MOD_RES (1)..(2): Xaa is C or S
XXVPTKLSPINILYFDKGVVTYYGKIPGM

SEQ ID NO: 42541 - protein, 37 aa, Artificial Sequence
  Cyclic GFR-binding peptide
  MOD_RES (5)..(6): Xaa is C or S
VPKPXXAPTQLSPINVLYFDDSSNVIYGKIPNMVVRA

SEQ ID NO: 42542 - protein, 27 aa, Artificial Sequence
  Cyclic GFR-binding peptide
ELSPINMLYFDEYDKVVYGKIPEMVVE

SEQ ID NO: 42543 - protein, 37 aa, Artificial Sequence
  Cyclic GFR-binding peptide
  MOD_RES (6)..(7): Xaa is C or S
AVPKAXXAPTKLSPINVLYFDSSNNVIYGKIPNMVVK

SEQ ID NO: 42544 - protein, 26 aa, Artificial Sequence
  Cyclic GFR-binding peptide
ELSPINMLYFDEYDKVVYGKIPEMVV

SEQ ID NO: 42545 - protein, 35 aa, Artificial Sequence
  Cyclic GFR-binding peptide
  MOD_RES (3)..(4): Xaa is C or S
KAXXVPTELSPINMLYFDEYDKVVYGKIPEMVVEG

SEQ ID NO: 42546 - protein, 33 aa, Artificial Sequence
  Cyclic GFR-binding peptide
  MOD_RES (5)..(6): Xaa is C or S
VPSTXXAPVKTSPINMLYFDNGRVLLYGKIPMI

SEQ ID NO: 42547 - protein, 36 aa, Artificial Sequence
  Cyclic GFR-binding peptide
  MOD_RES (5)..(6): Xaa is C or S
VPKPXXAPTQLSPINVLYFDDSSNVIYGKIPNMVVR

SEQ ID NO: 42548 - protein, 26 aa, Artificial Sequence
  Cyclic GFR-binding peptide
ARLSPINILYFDAANNVVYGKIPDMV

SEQ ID NO: 42549 - protein, 31 aa, Artificial Sequence
  Cyclic GFR-binding peptide
  MOD_RES (31)..(31): Xaa is C or S
PTELSPINMLYFDENEKVVYGKIPDMVVEGX

SEQ ID NO: 42550 - protein, 31 aa, Artificial Sequence
  Cyclic GFR-binding peptide
  MOD_RES (4)..(4): Xaa is C or S
KPTXAPTKLSPINVLYFDDSSNVIYGKIPNM

SEQ ID NO: 42551 - protein, 42 aa, Artificial Sequence
  Cyclic GFR-binding peptide
  MOD_RES (7)..(39)..(41): Xaa is C or S
HVTKPTXAPTKLSPINVLYFDDSSNVIYGKIPNMVVRSXGXH

SEQ ID NO: 42552 - protein, 33 aa, Artificial Sequence
  Cyclic GFR-binding peptide
  MOD_RES (1)..(2)..(33): Xaa is C or S
XXAPVKTSPINMLYFDNGRVLLYGKIPMIVEEX

SEQ ID NO: 42553 - protein, 23 aa, Artificial Sequence
  Cyclic GFR-binding peptide
RLSPINILYFDAANNVVYGKIPD

SEQ ID NO: 42554 - protein, 33 aa, Artificial Sequence
  Cyclic GFR-binding peptide
  MOD_RES (3)..(4): Xaa is C or S
KAXXAPTKLSPINVLYFDSSNNVIYGKIPNMVV

SEQ ID NO: 42555 - protein, 33 aa, Artificial Sequence
  Cyclic GFR-binding peptide
  MOD_RES (31)..(33): Xaa is C or S
PTELSPINMLYFDEYDKVVYGKIPEMVVEGXGX

SEQ ID NO: 42556 - protein, 32 aa, Artificial Sequence
  Cyclic GFR-binding peptide
  MOD_RES (5)..(6): Xaa is C or S
APASXXVPARLSPINILYFDAANNVVYGKIPD

SEQ ID NO: 42557 - protein, 30 aa, Artificial Sequence
  Cyclic GFR-binding peptide
  MOD_RES (30)..(30): Xaa is C or S
TRLSPINILYFDSANNVVYGKIPDMVVESX

SEQ ID NO: 42558 - protein, 41 aa, Artificial Sequence
  Cyclic GFR-binding peptide
  MOD_RES (4)..(5)..(38)..(40): Xaa is C or S
GKAXXVPTKLSPINVLYFDDMGVPTYGKIPEGMSVAEXGXR

SEQ ID NO: 42559 - protein, 36 aa, Artificial Sequence
  Cyclic GFR-binding peptide
  MOD_RES (6)..(7): Xaa is C or S
YVPKPXXAPTKLSPINVLYFDDSSNVIYGKIPNMVV

SEQ ID NO: 42560 - protein, 24 aa, Artificial Sequence
  Cyclic GFR-binding peptide
RLSPINILYFDSANNVVYGKIPDM

SEQ ID NO: 42561 - protein, 32 aa, Artificial Sequence
  Cyclic GFR-binding peptide
  MOD_RES (32)..(32): Xaa is C or S
APTQLSPINVLYFDDSSNVIYGKIPNMVVRAX

SEQ ID NO: 42562 - protein, 33 aa, Artificial Sequence
  Cyclic GFR-binding peptide
  MOD_RES (3)..(4): Xaa is C or S
KAXXVPTKLSPINILYFDKGVVTYYGKIPGMAV

SEQ ID NO: 42563 - protein, 25 aa, Artificial Sequence
  Cyclic GFR-binding peptide
TSPINMLYFDNGRVLLYGKIPMIVE

SEQ ID NO: 42564 - protein, 32 aa, Artificial Sequence
  Cyclic GFR-binding peptide
  MOD_RES (30)..(32): Xaa is C or S
TELSPINMLYFDEYDKVVYGKIPEMVVEGXGX

SEQ ID NO: 42565 - protein, 41 aa, Artificial Sequence
  Cyclic GFR-binding peptide
  MOD_RES (5)..(6)..(38)..(40): Xaa is C or S
IPKAXXVPTELSPINMLYFDENEKVVYGKIPDMVVEGXGXR

SEQ ID NO: 42566 - protein, 30 aa, Artificial Sequence
  Cyclic GFR-binding peptide
  MOD_RES (28)..(30): Xaa is C or S
LSPINMLYFDEYDKVVYGKIPEMVVEGXGX

SEQ ID NO: 42567 - protein, 30 aa, Artificial Sequence
  Cyclic GFR-binding peptide
  MOD_RES (27)..(29): Xaa is C or S
TSPINMLYFDNGRVLLYGKIPMIVEEXGXL

SEQ ID NO: 42568 - protein, 29 aa, Artificial Sequence
  Cyclic GFR-binding peptide
  MOD_RES (1)..(1): Xaa is C or S
XAPTQLSPINVLYFDDSSNVIYGKIPNMV

SEQ ID NO: 42569 - protein, 39 aa, Artificial Sequence
  Cyclic GFR-binding peptide
  MOD_RES (4)..(5)..(36)..(38): Xaa is C or S
PSTXXAPVKTSPINMLYFDNGRVLLYGKIPMIVEEXGXL

SEQ ID NO: 42570 - protein, 31 aa, Artificial Sequence
  Cyclic GFR-binding peptide
  MOD_RES (31)..(31): Xaa is C or S
PTQLSPINVLYFDDSSNVIYGKIPNMVVRAX

SEQ ID NO: 42571 - protein, 38 aa, Artificial Sequence
  Cyclic GFR-binding peptide
  MOD_RES (5)..(6)..(38): Xaa is C or S
VPKPXXAPTQLSPINVLYFDDSSNVIYGKIPNMVVRAX

SEQ ID NO: 42572 - protein, 26 aa, Artificial Sequence
  Cyclic GFR-binding peptide
  MOD_RES (26)..(26): Xaa is C or S
SPINMLYFDNGRVLLYGKIPMIVEEX

SEQ ID NO: 42573 - protein, 31 aa, Artificial Sequence
  Cyclic GFR-binding peptide
  MOD_RES (3)..(4): Xaa is C or S
KAXXVPTELSPINMLYFDEYDKVVYGKIPEM

SEQ ID NO: 42574 - protein, 35 aa, Artificial Sequence
  Cyclic GFR-binding peptide
  MOD_RES (4)..(5): Xaa is C or S
PSTXXAPVKTSPINMLYFDNGRVLLYGKIPMIVEE

SEQ ID NO: 42575 - protein, 27 aa, Artificial Sequence
  Cyclic GFR-binding peptide
TELSPINMLYFDENEKVVYGKIPDMVV

SEQ ID NO: 42576 - protein, 30 aa, Artificial Sequence
  Cyclic GFR-binding peptide
  MOD_RES (30)..(30): Xaa is C or S
TKLSPINILYFDKGVVTYYGKIPGMAVSEX

SEQ ID NO: 42577 - protein, 35 aa, Artificial Sequence
  Cyclic GFR-binding peptide
  MOD_RES (2)..(3)..(35): Xaa is C or S
SXXVPARLSPINILYFDAANNVVYGKIPDMVVEAX

SEQ ID NO: 42578 - protein, 29 aa, Artificial Sequence
  Cyclic GFR-binding peptide
PVKTSPINMLYFDNGRVLLYGKIPMIVEE

SEQ ID NO: 42579 - protein, 29 aa, Artificial Sequence
  Cyclic GFR-binding peptide
  MOD_RES (1)..(1): Xaa is C or S
XVPTKLSPINVLYFDDMGVPTYGKIPEGM

SEQ ID NO: 42580 - protein, 27 aa, Artificial Sequence
  Cyclic GFR-binding peptide
  MOD_RES (1)..(2): Xaa is C or S
XXVPTKLSPINVLYFDDMGVPTYGKIP

SEQ ID NO: 42581 - protein, 31 aa, Artificial Sequence
  Cyclic GFR-binding peptide
  MOD_RES (31)..(31): Xaa is C or S
PTELSPINMLYFDEYDKVVYGKIPEMVVEGX

SEQ ID NO: 42582 - protein, 27 aa, Artificial Sequence
  Cyclic GFR-binding peptide
  MOD_RES (1)..(2): Xaa is C or S
XXAPTKLSPINVLYFDDSSNVIYGKIP

SEQ ID NO: 42583 - protein, 35 aa, Artificial Sequence
  Cyclic GFR-binding peptide
  MOD_RES (2)..(3)..(35): Xaa is C or S
AXXVPTKLSPINILYFDKGVVTYYGKIPGMAVSEX

SEQ ID NO: 42584 - protein, 28 aa, Artificial Sequence
  Cyclic GFR-binding peptide
  MOD_RES (27)..(27): Xaa is C or S
SPINILYFDKGVVTYYGKIPGMAVSEXG

SEQ ID NO: 42585 - protein, 25 aa, Artificial Sequence
  Cyclic GFR-binding peptide
TELSPINMLYFDENEKVVYGKIPDM

SEQ ID NO: 42586 - protein, 32 aa, Artificial Sequence
  Cyclic GFR-binding peptide
  MOD_RES (32)..(32): Xaa is C or S
PTKLSPINVLYFDDMGVPTYGKIPEGMSVAEX

SEQ ID NO: 42587 - protein, 37 aa, Artificial Sequence
  Cyclic GFR-binding peptide
  MOD_RES (4)..(5)..(37): Xaa is C or S
PKPXXAPTQLSPINVLYFDDSSNVIYGKIPNMVVRAX

SEQ ID NO: 42588 - protein, 34 aa, Artificial Sequence
  Cyclic GFR-binding peptide
  MOD_RES (1)..(2): Xaa is C or S
XXVPTKLSPINVLYFDDMGVPTYGKIPEGMSVAE

SEQ ID NO: 42589 - protein, 22 aa, Artificial Sequence
  Cyclic GFR-binding peptide
KLSPINVLYFDDSSNVIYGKIP

SEQ ID NO: 42590 - protein, 30 aa, Artificial Sequence
  Cyclic GFR-binding peptide
  MOD_RES (1)..(2): Xaa is C or S
XXVPTELSPINMLYFDEYDKVVYGKIPEMV

SEQ ID NO: 42591 - protein, 35 aa, Artificial Sequence
  Cyclic GFR-binding peptide
  MOD_RES (2)..(3)..(35): Xaa is C or S
PXXAPTQLSPINVLYFDDSSNVIYGKIPNMVVRAX

SEQ ID NO: 42592 - protein, 40 aa, Artificial Sequence
  Cyclic GFR-binding peptide
  MOD_RES (4)..(5)..(37)..(39): Xaa is C or S
PASXXVPARLSPINILYFDAANNVVYGKIPDMVVEAXGXR

SEQ ID NO: 42593 - protein, 36 aa, Artificial Sequence
  Cyclic GFR-binding peptide
  MOD_RES (1)..(2)..(34)..(36): Xaa is C or S
XXVPARLSPINILYFDAANNVVYGKIPDMVVEAXGX

SEQ ID NO: 42594 - protein, 40 aa, Artificial Sequence
  Cyclic GFR-binding peptide
  MOD_RES (4)..(5)..(37)..(39): Xaa is C or S
PKAXXAPTKLSPINVLYFDSSNNVIYGKIPNMVVKAXGXH

SEQ ID NO: 42595 - protein, 29 aa, Artificial Sequence
  Cyclic GFR-binding peptide
  MOD_RES (2)..(3): Xaa is C or S
PXXAPTKLSPINVLYFDDSSNVIYGKIPN

SEQ ID NO: 42596 - protein, 32 aa, Artificial Sequence
  Cyclic GFR-binding peptide
  MOD_RES (3)..(4): Xaa is C or S
ASXXVPARLSPINILYFDAANNVVYGKIPDMV

SEQ ID NO: 42597 - protein, 37 aa, Artificial Sequence
  Cyclic GFR-binding peptide
  MOD_RES (5)..(37): Xaa is C or S
TKPTXAPTKLSPINVLYFDDSSNVIYGKIPNMVVRSX

SEQ ID NO: 42598 - protein, 41 aa, Artificial Sequence
  Cyclic GFR-binding peptide
  MOD_RES (5)..(6)..(38)..(40): Xaa is C or S
APASXXVPARLSPINILYFDAANNVVYGKIPDMVVEAXGXR

SEQ ID NO: 42599 - protein, 33 aa, Artificial Sequence
  Cyclic GFR-binding peptide
  MOD_RES (6)..(7): Xaa is C or S
SIPKAXXVPTELSPINMLYFDEYDKVVYGKIPE

SEQ ID NO: 42600 - protein, 30 aa, Artificial Sequence
  Cyclic GFR-binding peptide
  MOD_RES (30)..(30): Xaa is C or S
TKLSPINVLYFDSSNNVIYGKIPNMVVKAX

SEQ ID NO: 42601 - protein, 24 aa, Artificial Sequence
  Cyclic GFR-binding peptide
PARLSPINILYFDAANNVVYGKIP

SEQ ID NO: 42602 - protein, 26 aa, Artificial Sequence
  Cyclic GFR-binding peptide
TSPINMLYFDNGRVLLYGKIPMIVEE

SEQ ID NO: 42603 - protein, 22 aa, Artificial Sequence
  Cyclic GFR-binding peptide
RLSPINILYFDAANNVVYGKIP

SEQ ID NO: 42604 - protein, 36 aa, Artificial Sequence
  Cyclic GFR-binding peptide
  MOD_RES (6)..(7): Xaa is C or S
AVPKAXXAPTKLSPINVLYFDSSNNVIYGKIPNMVV

SEQ ID NO: 42605 - protein, 36 aa, Artificial Sequence
  Cyclic GFR-binding peptide
  MOD_RES (2)..(3)..(35): Xaa is C or S
AXXVPTELSPINMLYFDEYDKVVYGKIPEMVVEGXG

SEQ ID NO: 42606 - protein, 32 aa, Artificial Sequence
  Cyclic GFR-binding peptide
  MOD_RES (1)..(2): Xaa is C or S
XXVPTKLSPINVLYFDDMGVPTYGKIPEGMSV

SEQ ID NO: 42607 - protein, 27 aa, Artificial Sequence
  Cyclic GFR-binding peptide
  MOD_RES (1)..(1): Xaa is C or S
XVPTKLSPINVLYFDDMGVPTYGKIPE

SEQ ID NO: 42608 - protein, 29 aa, Artificial Sequence
  Cyclic GFR-binding peptide
  MOD_RES (1)..(1): Xaa is C or S
XVPTELSPINMLYFDEYDKVVYGKIPEMV

SEQ ID NO: 42609 - protein, 26 aa, Artificial Sequence
  Cyclic GFR-binding peptide
KLSPINVLYFDSSNNVIYGKIPNMVV

SEQ ID NO: 42610 - protein, 27 aa, Artificial Sequence
  Cyclic GFR-binding peptide
LSPINMLYFDEYDKVVYGKIPEMVVEG

SEQ ID NO: 42611 - protein, 29 aa, Artificial Sequence
  Cyclic GFR-binding peptide
TQLSPINVLYFDDSSNVIYGKIPNMVVRA

SEQ ID NO: 42612 - protein, 24 aa, Artificial Sequence
  Cyclic GFR-binding peptide
PTKLSPINVLYFDSSNNVIYGKIP

SEQ ID NO: 42613 - protein, 28 aa, Artificial Sequence
  Cyclic GFR-binding peptide
TKLSPINVLYFDSSNNVIYGKIPNMVVK

SEQ ID NO: 42614 - protein, 32 aa, Artificial Sequence
  Cyclic GFR-binding peptide
VPTKLSPINVLYFDDMGVPTYGKIPEGMSVAE

SEQ ID NO: 42615 - protein, 29 aa, Artificial Sequence
  Cyclic GFR-binding peptide
PARLSPINILYFDAANNVVYGKIPDMVVE

SEQ ID NO: 42616 - protein, 29 aa, Artificial Sequence
  Cyclic GFR-binding peptide
  MOD_RES (27)..(29): Xaa is C or S
SPINMLYFDENEKVVYGKIPDMVVEGXGX

SEQ ID NO: 42617 - protein, 31 aa, Artificial Sequence
  Cyclic GFR-binding peptide
  MOD_RES (4)..(5): Xaa is C or S
PKAXXAPTKLSPINVLYFDSSNNVIYGKIPN

SEQ ID NO: 42618 - protein, 27 aa, Artificial Sequence
  Cyclic GFR-binding peptide
APVKTSPINMLYFDNGRVLLYGKIPMI

SEQ ID NO: 42619 - protein, 35 aa, Artificial Sequence
  Cyclic GFR-binding peptide
  MOD_RES (1)..(2)..(34): Xaa is C or S
XXVPTKLSPINILYFDKGVVTYYGKIPGMAVSEXG

SEQ ID NO: 42620 - protein, 36 aa, Artificial Sequence
  Cyclic GFR-binding peptide
  MOD_RES (5)..(6): Xaa is C or S
IPKAXXVPTELSPINMLYFDENEKVVYGKIPDMVVE

SEQ ID NO: 42621 - protein, 40 aa, Artificial Sequence
  Cyclic GFR-binding peptide
  MOD_RES (7)..(39): Xaa is C or S
HVTKPTXAPTKLSPINVLYFDDSSNVIYGKIPNMVVRSXG

SEQ ID NO: 42622 - protein, 39 aa, Artificial Sequence
  Cyclic GFR-binding peptide
  MOD_RES (3)..(4)..(36)..(38): Xaa is C or S
KAXXVPTELSPINMLYFDENEKVVYGKIPDMVVEGXGXR

SEQ ID NO: 42623 - protein, 36 aa, Artificial Sequence
  Cyclic GFR-binding peptide
  MOD_RES (5)..(6): Xaa is C or S
VPKPXXAPTKLSPINVLYFDDSSNVIYGKIPNMVVR

SEQ ID NO: 42624 - protein, 35 aa, Artificial Sequence
  Cyclic GFR-binding peptide
  MOD_RES (33)..(35): Xaa is C or S
VPTKLSPINVLYFDDMGVPTYGKIPEGMSVAEXGX

SEQ ID NO: 42625 - protein, 37 aa, Artificial Sequence
  Cyclic GFR-binding peptide
  MOD_RES (3)..(4)..(35)..(37): Xaa is C or S
STXXAPVKTSPINMLYFDNGRVLLYGKIPMIVEEXGX

SEQ ID NO: 42626 - protein, 30 aa, Artificial Sequence
  Cyclic GFR-binding peptide
  MOD_RES (1)..(2): Xaa is C or S
XXVPTKLSPINILYFDKGVVTYYGKIPGMA

SEQ ID NO: 42627 - protein, 33 aa, Artificial Sequence
  Cyclic GFR-binding peptide
  MOD_RES (5)..(6): Xaa is C or S
IPKAXXVPTELSPINMLYFDENEKVVYGKIPDM

SEQ ID NO: 42628 - protein, 23 aa, Artificial Sequence
  Cyclic GFR-binding peptide
KLSPINVLYFDSSNNVIYGKIPN

SEQ ID NO: 42629 - protein, 41 aa, Artificial Sequence
  Cyclic GFR-binding peptide
  MOD_RES (6)..(7)..(39)..(41): Xaa is C or S
STPPTXXVPTRLSPINILYFDSANNVVYGKIPDMVVESXGX

SEQ ID NO: 42630 - protein, 27 aa, Artificial Sequence
  Cyclic GFR-binding peptide
APTKLSPINVLYFDDSSNVIYGKIPNM

SEQ ID NO: 42631 - protein, 39 aa, Artificial Sequence
  Cyclic GFR-binding peptide
  MOD_RES (5)..(6)..(38): Xaa is C or S
TPPTXXVPTRLSPINILYFDSANNVVYGKIPDMVVESXG

SEQ ID NO: 42632 - protein, 26 aa, Artificial Sequence
  Cyclic GFR-binding peptide
PTKLSPINVLYFDDMGVPTYGKIPEG

SEQ ID NO: 42633 - protein, 25 aa, Artificial Sequence
  Cyclic GFR-binding peptide
TQLSPINVLYFDDSSNVIYGKIPNM

SEQ ID NO: 42634 - protein, 36 aa, Artificial Sequence
  Cyclic GFR-binding peptide
  MOD_RES (5)..(6): Xaa is C or S
VPSTXXAPVKTSPINMLYFDNGRVLLYGKIPMIVEE

SEQ ID NO: 42635 - protein, 37 aa, Artificial Sequence
  Cyclic GFR-binding peptide
  MOD_RES (2)..(3)..(35)..(37): Xaa is C or S
AXXAPTKLSPINVLYFDSSNNVIYGKIPNMVVKAXGX

SEQ ID NO: 42636 - protein, 28 aa, Artificial Sequence
  Cyclic GFR-binding peptide
  MOD_RES (1)..(2): Xaa is C or S
XXVPTKLSPINVLYFDDMGVPTYGKIPE

SEQ ID NO: 42637 - protein, 30 aa, Artificial Sequence
  Cyclic GFR-binding peptide
  MOD_RES (28)..(30): Xaa is C or S
LSPINMLYFDENEKVVYGKIPDMVVEGXGX

SEQ ID NO: 42638 - protein, 26 aa, Artificial Sequence
  Cyclic GFR-binding peptide
VKTSPINMLYFDNGRVLLYGKIPMIV

SEQ ID NO: 42639 - protein, 29 aa, Artificial Sequence
  Cyclic GFR-binding peptide
  MOD_RES (3)..(4): Xaa is C or S
PTXXVPTRLSPINILYFDSANNVVYGKIP

SEQ ID NO: 42640 - protein, 35 aa, Artificial Sequence
  Cyclic GFR-binding peptide
  MOD_RES (5)..(6): Xaa is C or S
IPKAXXVPTELSPINMLYFDENEKVVYGKIPDMVV

SEQ ID NO: 42641 - protein, 23 aa, Artificial Sequence
  Cyclic GFR-binding peptide
SPINILYFDKGVVTYYGKIPGMA

SEQ ID NO: 42642 - protein, 32 aa, Artificial Sequence
  Cyclic GFR-binding peptide
  MOD_RES (6)..(7): Xaa is C or S
SIPKAXXVPTELSPINMLYFDEYDKVVYGKIP

SEQ ID NO: 42643 - protein, 27 aa, Artificial Sequence
  Cyclic GFR-binding peptide
  MOD_RES (1)..(2): Xaa is C or S
XXVPTELSPINMLYFDEYDKVVYGKIP

SEQ ID NO: 42644 - protein, 41 aa, Artificial Sequence
  Cyclic GFR-binding peptide
  MOD_RES (6)..(38)..(40): Xaa is C or S
VTKPTXAPTKLSPINVLYFDDSSNVIYGKIPNMVVRSXGXH

SEQ ID NO: 42645 - protein, 33 aa, Artificial Sequence
  Cyclic GFR-binding peptide
  MOD_RES (30)..(32): Xaa is C or S
TQLSPINVLYFDDSSNVIYGKIPNMVVRAXGXH

SEQ ID NO: 42646 - protein, 24 aa, Artificial Sequence
  Cyclic GFR-binding peptide
PTRLSPINILYFDSANNVVYGKIP

SEQ ID NO: 42647 - protein, 22 aa, Artificial Sequence
  Cyclic GFR-binding peptide
SPINILYFDKGVVTYYGKIPGM

SEQ ID NO: 42648 - protein, 23 aa, Artificial Sequence
  Cyclic GFR-binding peptide
SPINVLYFDDMGVPTYGKIPEGM

SEQ ID NO: 42649 - protein, 30 aa, Artificial Sequence
  Cyclic GFR-binding peptide
  MOD_RES (2)..(3): Xaa is C or S
AXXVPTELSPINMLYFDENEKVVYGKIPDM

SEQ ID NO: 42650 - protein, 33 aa, Artificial Sequence
  Cyclic GFR-binding peptide
  MOD_RES (1)..(2): Xaa is C or S
XXAPTKLSPINVLYFDSSNNVIYGKIPNMVVKA

SEQ ID NO: 42651 - protein, 24 aa, Artificial Sequence
  Cyclic GFR-binding peptide
TELSPINMLYFDENEKVVYGKIPD

SEQ ID NO: 42652 - protein, 36 aa, Artificial Sequence
  Cyclic GFR-binding peptide
  MOD_RES (1)..(33)..(35): Xaa is C or S
XAPTKLSPINVLYFDDSSNVIYGKIPNMVVRSXGXH

SEQ ID NO: 42653 - protein, 27 aa, Artificial Sequence
  Cyclic GFR-binding peptide
VKTSPINMLYFDNGRVLLYGKIPMIVE

SEQ ID NO: 42654 - protein, 32 aa, Artificial Sequence
  Cyclic GFR-binding peptide
  MOD_RES (32)..(32): Xaa is C or S
VPTRLSPINILYFDSANNVVYGKIPDMVVESX

SEQ ID NO: 42655 - protein, 29 aa, Artificial Sequence
  Cyclic GFR-binding peptide
TELSPINMLYFDEYDKVVYGKIPEMVVEG

SEQ ID NO: 42656 - protein, 32 aa, Artificial Sequence
  Cyclic GFR-binding peptide
  MOD_RES (2)..(3): Xaa is C or S
AXXVPTKLSPINVLYFDDMGVPTYGKIPEGMS

SEQ ID NO: 42657 - protein, 36 aa, Artificial Sequence
  Cyclic GFR-binding peptide
  MOD_RES (1)..(33)..(35): Xaa is C or S
XAPTKLSPINVLYFDSSNNVIYGKIPNMVVKAXGXH

SEQ ID NO: 42658 - protein, 31 aa, Artificial Sequence
  Cyclic GFR-binding peptide
  MOD_RES (1)..(1): Xaa is C or S
XAPVKTSPINMLYFDNGRVLLYGKIPMIVEE

SEQ ID NO: 42659 - protein, 33 aa, Artificial Sequence
  Cyclic GFR-binding peptide
  MOD_RES (4)..(5): Xaa is C or S
SKAXXVPTKLSPINILYFDKGVVTYYGKIPGMA

SEQ ID NO: 42660 - protein, 34 aa, Artificial Sequence
  Cyclic GFR-binding peptide
  MOD_RES (2)..(3): Xaa is C or S
AXXVPTKLSPINILYFDKGVVTYYGKIPGMAVSE

SEQ ID NO: 42661 - protein, 24 aa, Artificial Sequence
  Cyclic GFR-binding peptide
TKLSPINILYFDKGVVTYYGKIPG

SEQ ID NO: 42662 - protein, 33 aa, Artificial Sequence
  Cyclic GFR-binding peptide
  MOD_RES (30)..(32): Xaa is C or S
TELSPINMLYFDENEKVVYGKIPDMVVEGXGXR

SEQ ID NO: 42663 - protein, 34 aa, Artificial Sequence
  Cyclic GFR-binding peptide
  MOD_RES (32)..(34): Xaa is C or S
VPTELSPINMLYFDENEKVVYGKIPDMVVEGXGX

SEQ ID NO: 42664 - protein, 34 aa, Artificial Sequence
  Cyclic GFR-binding peptide
  MOD_RES (2)..(3): Xaa is C or S
TXXVPTRLSPINILYFDSANNVVYGKIPDMVVES

SEQ ID NO: 42665 - protein, 40 aa, Artificial Sequence
  Cyclic GFR-binding peptide
  MOD_RES (6)..(7)..(39): Xaa is C or S
SIPKAXXVPTELSPINMLYFDEYDKVVYGKIPEMVVEGXG

SEQ ID NO: 42666 - protein, 40 aa, Artificial Sequence
  Cyclic GFR-binding peptide
  MOD_RES (6)..(7)..(39): Xaa is C or S
KASKAXXVPTKLSPINILYFDKGVVTYYGKIPGMAVSEXG

SEQ ID NO: 42667 - protein, 38 aa, Artificial Sequence
  Cyclic GFR-binding peptide
  MOD_RES (6)..(7): Xaa is C or S
KASKAXXVPTKLSPINILYFDKGVVTYYGKIPGMAVSE

SEQ ID NO: 42668 - protein, 23 aa, Artificial Sequence
  Cyclic GFR-binding peptide
SPINILYFDSANNVVYGKIPDMV

SEQ ID NO: 42669 - protein, 29 aa, Artificial Sequence
  Cyclic GFR-binding peptide
PTELSPINMLYFDENEKVVYGKIPDMVVE

SEQ ID NO: 42670 - protein, 29 aa, Artificial Sequence
  Cyclic GFR-binding peptide
  MOD_RES (3)..(4): Xaa is C or S
KAXXVPTELSPINMLYFDENEKVVYGKIP

SEQ ID NO: 42671 - protein, 34 aa, Artificial Sequence
  Cyclic GFR-binding peptide
  MOD_RES (2)..(34): Xaa is C or S
TXAPTKLSPINVLYFDDSSNVIYGKIPNMVVRSX

SEQ ID NO: 42672 - protein, 28 aa, Artificial Sequence
  Cyclic GFR-binding peptide
  MOD_RES (2)..(3): Xaa is C or S
AXXVPTELSPINMLYFDEYDKVVYGKIP

SEQ ID NO: 42673 - protein, 24 aa, Artificial Sequence
  Cyclic GFR-binding peptide
KLSPINILYFDKGVVTYYGKIPGM

SEQ ID NO: 42674 - protein, 36 aa, Artificial Sequence
  Cyclic GFR-binding peptide
  MOD_RES (1)..(2)..(34)..(36): Xaa is C or S
XXVPTKLSPINILYFDKGVVTYYGKIPGMAVSEXGX

SEQ ID NO: 42675 - protein, 40 aa, Artificial Sequence
  Cyclic GFR-binding peptide
  MOD_RES (5)..(6)..(38)..(40): Xaa is C or S
APASXXVPARLSPINILYFDAANNVVYGKIPDMVVEAXGX

SEQ ID NO: 42676 - protein, 30 aa, Artificial Sequence
  Cyclic GFR-binding peptide
  MOD_RES (30)..(30): Xaa is C or S
TKLSPINVLYFDDSSNVIYGKIPNMVVRSX

SEQ ID NO: 42677 - protein, 28 aa, Artificial Sequence
  Cyclic GFR-binding peptide
  MOD_RES (1)..(2): Xaa is C or S
XXAPVKTSPINMLYFDNGRVLLYGKIPM

SEQ ID NO: 42678 - protein, 30 aa, Artificial Sequence; identical to SEQ ID NO: 38308
  Cyclic GFR-binding peptide

SEQ ID NO: 42679 - protein, 35 aa, Artificial Sequence
  Cyclic GFR-binding peptide
  MOD_RES (1)..(2)..(34): Xaa is C or S
XXVPTELSPINMLYFDENEKVVYGKIPDMVVEGXG

SEQ ID NO: 42680 - protein, 29 aa, Artificial Sequence
  Cyclic GFR-binding peptide
  MOD_RES (1)..(2): Xaa is C or S
XXVPTKLSPINVLYFDDMGVPTYGKIPEG

SEQ ID NO: 42681 - protein, 30 aa, Artificial Sequence
  Cyclic GFR-binding peptide
  MOD_RES (28)..(30): Xaa is C or S
LSPINVLYFDDSSNVIYGKIPNMVVRSXGX

SEQ ID NO: 42682 - protein, 26 aa, Artificial Sequence
  Cyclic GFR-binding peptide
APTKLSPINVLYFDDSSNVIYGKIPN

SEQ ID NO: 42683 - protein, 27 aa, Artificial Sequence
  Cyclic GFR-binding peptide
PTQLSPINVLYFDDSSNVIYGKIPNMV

SEQ ID NO: 42684 - protein, 34 aa, Artificial Sequence
  Cyclic GFR-binding peptide
  MOD_RES (32)..(34): Xaa is C or S
VPARLSPINILYFDAANNVVYGKIPDMVVEAXGX

SEQ ID NO: 42685 - protein, 33 aa, Artificial Sequence
  Cyclic GFR-binding peptide
  MOD_RES (32)..(32): Xaa is C or S
VPTELSPINMLYFDEYDKVVYGKIPEMVVEGXG

SEQ ID NO: 42686 - protein, 32 aa, Artificial Sequence
  Cyclic GFR-binding peptide
  MOD_RES (6)..(7): Xaa is C or S
YVPKPXXAPTKLSPINVLYFDDSSNVIYGKIP

SEQ ID NO: 42687 - protein, 34 aa, Artificial Sequence
  Cyclic GFR-binding peptide
  MOD_RES (31)..(33): Xaa is C or S
PTRLSPINILYFDSANNVVYGKIPDMVVESXGXR

SEQ ID NO: 42688 - protein, 32 aa, Artificial Sequence
  Cyclic GFR-binding peptide
  MOD_RES (5)..(6): Xaa is C or S
VGKAXXVPTKLSPINVLYFDDMGVPTYGKIPE

SEQ ID NO: 42689 - protein, 27 aa, Artificial Sequence
  Cyclic GFR-binding peptide
  MOD_RES (27)..(27): Xaa is C or S
SPINVLYFDSSNNVIYGKIPNMVVKAX

SEQ ID NO: 42690 - protein, 34 aa, Artificial Sequence
  Cyclic GFR-binding peptide
  MOD_RES (3)..(4): Xaa is C or S
STXXAPVKTSPINMLYFDNGRVLLYGKIPMIVEE

SEQ ID NO: 42691 - protein, 23 aa, Artificial Sequence
  Cyclic GFR-binding peptide
ELSPINMLYFDENEKVVYGKIPD

SEQ ID NO: 42692 - protein, 29 aa, Artificial Sequence
  Cyclic GFR-binding peptide
  MOD_RES (2)..(3): Xaa is C or S
TXXAPVKTSPINMLYFDNGRVLLYGKIPM

SEQ ID NO: 42693 - protein, 32 aa, Artificial Sequence
  Cyclic GFR-binding peptide
  MOD_RES (29)..(31): Xaa is C or S
LSPINVLYFDDMGVPTYGKIPEGMSVAEXGXR

SEQ ID NO: 42694 - protein, 30 aa, Artificial Sequence
  Cyclic GFR-binding peptide
  MOD_RES (4)..(5): Xaa is C or S
PKPXXAPTQLSPINVLYFDDSSNVIYGKIP

SEQ ID NO: 42695 - protein, 30 aa, Artificial Sequence
  Cyclic GFR-binding peptide
  MOD_RES (2)..(3): Xaa is C or S
PXXAPTQLSPINVLYFDDSSNVIYGKIPNM

SEQ ID NO: 42696 - protein, 32 aa, Artificial Sequence
  Cyclic GFR-binding peptide
  MOD_RES (29)..(31): Xaa is C or S
KLSPINILYFDKGVVTYYGKIPGMAVSEXGXR

SEQ ID NO: 42697 - protein, 37 aa, Artificial Sequence
  Cyclic GFR-binding peptide
  MOD_RES (1)..(2)..(34)..(36): Xaa is C or S
XXAPTKLSPINVLYFDDSSNVIYGKIPNMVVRSXGXH

SEQ ID NO: 42698 - protein, 41 aa, Artificial Sequence
  Cyclic GFR-binding peptide
  MOD_RES (6)..(7)..(39)..(41): Xaa is C or S
AAPASXXVPARLSPINILYFDAANNVVYGKIPDMVVEAXGX

SEQ ID NO: 42699 - protein, 32 aa, Artificial Sequence
  Cyclic GFR-binding peptide
  MOD_RES (3)..(3): Xaa is C or S
PTXAPTKLSPINVLYFDDSSNVIYGKIPNMVV

SEQ ID NO: 42700 - protein, 41 aa, Artificial Sequence
  Cyclic GFR-binding peptide
  MOD_RES (6)..(7)..(39)..(41): Xaa is C or S
AVPKAXXAPTKLSPINVLYFDSSNNVIYGKIPNMVVKAXGX

SEQ ID NO: 42701 - protein, 32 aa, Artificial Sequence
  Cyclic GFR-binding peptide
  MOD_RES (31)..(31): Xaa is C or S
TKLSPINVLYFDDMGVPTYGKIPEGMSVAEXG

SEQ ID NO: 42702 - protein, 38 aa, Artificial Sequence
  Cyclic GFR-binding peptide
  MOD_RES (4)..(5)..(37): Xaa is C or S
PKAXXVPTELSPINMLYFDENEKVVYGKIPDMVVEGXG

SEQ ID NO: 42703 - protein, 26 aa, Artificial Sequence
  Cyclic GFR-binding peptide
TKLSPINVLYFDSSNNVIYGKIPNMV

SEQ ID NO: 42704 - protein, 29 aa, Artificial Sequence
  Cyclic GFR-binding peptide
  MOD_RES (27)..(29): Xaa is C or S
SPINVLYFDDSSNVIYGKIPNMVVRSXGX

SEQ ID NO: 42705 - protein, 36 aa, Artificial Sequence
  Cyclic GFR-binding peptide
  MOD_RES (6)..(7): Xaa is C or S
KIPKAXXVPTELSPINMLYFDENEKVVYGKIPDMVV

SEQ ID NO: 42706 - protein, 28 aa, Artificial Sequence
  Cyclic GFR-binding peptide
  MOD_RES (1)..(2): Xaa is C or S
XXVPTELSPINMLYFDEYDKVVYGKIPE

SEQ ID NO: 42707 - protein, 40 aa, Artificial Sequence
  Cyclic GFR-binding peptide
  MOD_RES (5)..(6)..(37)..(39): Xaa is C or S
VPSTXXAPVKTSPINMLYFDNGRVLLYGKIPMIVEEXGXL

SEQ ID NO: 42708 - protein, 28 aa, Artificial Sequence
  Cyclic GFR-binding peptide
PTELSPINMLYFDEYDKVVYGKIPEMVV

SEQ ID NO: 42709 - protein, 31 aa, Artificial Sequence
  Cyclic GFR-binding peptide
  MOD_RES (28)..(30): Xaa is C or S
LSPINMLYFDENEKVVYGKIPDMVVEGXGXR

SEQ ID NO: 42710 - protein, 35 aa, Artificial Sequence
  Cyclic GFR-binding peptide
  MOD_RES (1)..(2)..(34): Xaa is C or S
XXVPTRLSPINILYFDSANNVVYGKIPDMVVESXG

SEQ ID NO: 42711 - protein, 31 aa, Artificial Sequence
  Cyclic GFR-binding peptide
VPTRLSPINILYFDSANNVVYGKIPDMVVES

SEQ ID NO: 42712 - protein, 35 aa, Artificial Sequence
  Cyclic GFR-binding peptide
  MOD_RES (4)..(5): Xaa is C or S
PKAXXVPTELSPINMLYFDENEKVVYGKIPDMVVE

SEQ ID NO: 42713 - protein, 37 aa, Artificial Sequence
  Cyclic GFR-binding peptide
  MOD_RES (1)..(2)..(34)..(36): Xaa is C or S
XXVPARLSPINILYFDAANNVVYGKIPDMVVEAXGXR

SEQ ID NO: 42714 - protein, 36 aa, Artificial Sequence
  Cyclic GFR-binding peptide
  MOD_RES (1)..(2)..(34)..(36): Xaa is C or S
XXVPTELSPINMLYFDEYDKVVYGKIPEMVVEGXGX

SEQ ID NO: 42715 - protein, 33 aa, Artificial Sequence
  Cyclic GFR-binding peptide
  MOD_RES (2)..(3): Xaa is C or S
AXXAPTKLSPINVLYFDSSNNVIYGKIPNMVVK

SEQ ID NO: 42716 - protein, 33 aa, Artificial Sequence
  Cyclic GFR-binding peptide
  MOD_RES (30)..(32): Xaa is C or S
TKLSPINVLYFDSSNNVIYGKIPNMVVKAXGXH

SEQ ID NO: 42717 - protein, 34 aa, Artificial Sequence
  Cyclic GFR-binding peptide
  MOD_RES (4)..(5): Xaa is C or S
GKAXXVPTKLSPINVLYFDDMGVPTYGKIPEGMS

SEQ ID NO: 42718 - protein, 20 aa, Artificial Sequence
  Cyclic GFR-binding peptide
SPINILYFDKGVVTYYGKIP

SEQ ID NO: 42719 - protein, 33 aa, Artificial Sequence
  Cyclic GFR-binding peptide
  MOD_RES (6)..(7): Xaa is C or S
YVPKPXXAPTKLSPINVLYFDDSSNVIYGKIPN

SEQ ID NO: 42720 - protein, 36 aa, Artificial Sequence
  Cyclic GFR-binding peptide
  MOD_RES (1)..(34)..(36): Xaa is C or S
XVPTKLSPINVLYFDDMGVPTYGKIPEGMSVAEXGX

SEQ ID NO: 42721 - protein, 31 aa, Artificial Sequence
  Cyclic GFR-binding peptide
  MOD_RES (1)..(1): Xaa is C or S
XVPTRLSPINILYFDSANNVVYGKIPDMVVE

SEQ ID NO: 42722 - protein, 30 aa, Artificial Sequence
  Cyclic GFR-binding peptide
APVKTSPINMLYFDNGRVLLYGKIPMIVEE

SEQ ID NO: 42723 - protein, 32 aa, Artificial Sequence
  Cyclic GFR-binding peptide
  MOD_RES (6)..(7): Xaa is C or S
STPPTXXVPTRLSPINILYFDSANNVVYGKIP

SEQ ID NO: 42724 - protein, 35 aa, Artificial Sequence
  Cyclic GFR-binding peptide
  MOD_RES (6)..(7): Xaa is C or S
HVPKPXXAPTKLSPINVLYFDDSSNVIYGKIPNMV

SEQ ID NO: 42725 - protein, 33 aa, Artificial Sequence
  Cyclic GFR-binding peptide
  MOD_RES (2)..(3): Xaa is C or S
AXXVPTKLSPINILYFDKGVVTYYGKIPGMAVS

SEQ ID NO: 42726 - protein, 36 aa, Artificial Sequence
  Cyclic GFR-binding peptide
  MOD_RES (6)..(7): Xaa is C or S
AAPASXXVPARLSPINILYFDAANNVVYGKIPDMVV

SEQ ID NO: 42727 - protein, 36 aa, Artificial Sequence
  Cyclic GFR-binding peptide
  MOD_RES (1)..(33)..(35): Xaa is C or S
XVPTKLSPINILYFDKGVVTYYGKIPGMAVSEXGXR

SEQ ID NO: 42728 - protein, 32 aa, Artificial Sequence
  Cyclic GFR-binding peptide
  MOD_RES (2)..(3): Xaa is C or S
AXXAPTKLSPINVLYFDSSNNVIYGKIPNMVV

SEQ ID NO: 42729 - protein, 29 aa, Artificial Sequence
  Cyclic GFR-binding peptide
  MOD_RES (3)..(4): Xaa is C or S
KPXXAPTKLSPINVLYFDDSSNVIYGKIP

SEQ ID NO: 42730 - protein, 28 aa, Artificial Sequence
  Cyclic GFR-binding peptide
  MOD_RES (27)..(27): Xaa is C or S
TSPINMLYFDNGRVLLYGKIPMIVEEXG

SEQ ID NO: 42731 - protein, 27 aa, Artificial Sequence
  Cyclic GFR-binding peptide
VPTKLSPINVLYFDDMGVPTYGKIPEG

SEQ ID NO: 42732 - protein, 30 aa, Artificial Sequence
  Cyclic GFR-binding peptide
  MOD_RES (3)..(4): Xaa is C or S
PTXXVPTRLSPINILYFDSANNVVYGKIPD

SEQ ID NO: 42733 - protein, 28 aa, Artificial Sequence
  Cyclic GFR-binding peptide
RLSPINILYFDAANNVVYGKIPDMVVEA

SEQ ID NO: 42734 - protein, 33 aa, Artificial Sequence
  Cyclic GFR-binding peptide
  MOD_RES (5)..(6): Xaa is C or S
VGKAXXVPTKLSPINVLYFDDMGVPTYGKIPEG

SEQ ID NO: 42735 - protein, 36 aa, Artificial Sequence
  Cyclic GFR-binding peptide
  MOD_RES (7)..(7): Xaa is C or S
HVTKPTXAPTKLSPINVLYFDDSSNVIYGKIPNMVV

SEQ ID NO: 42736 - protein, 29 aa, Artificial Sequence
  Cyclic GFR-binding peptide
ARLSPINILYFDAANNVVYGKIPDMVVEA

SEQ ID NO: 42737 - protein, 30 aa, Artificial Sequence
  Cyclic GFR-binding peptide
PTRLSPINILYFDSANNVVYGKIPDMVVES

SEQ ID NO: 42738 - protein, 26 aa, Artificial Sequence
  Cyclic GFR-binding peptide
  MOD_RES (1)..(1): Xaa is C or S
XVPTKLSPINVLYFDDMGVPTYGKIP

SEQ ID NO: 42739 - protein, 28 aa, Artificial Sequence
  Cyclic GFR-binding peptide
LSPINVLYFDDMGVPTYGKIPEGMSVAE

SEQ ID NO: 42740 - protein, 36 aa, Artificial Sequence
  Cyclic GFR-binding peptide
  MOD_RES (3)..(4)..(36): Xaa is C or S
KAXXVPTELSPINMLYFDENEKVVYGKIPDMVVEGX

SEQ ID NO: 42741 - protein, 24 aa, Artificial Sequence
  Cyclic GFR-binding peptide
SPINILYFDKGVVTYYGKIPGMAV

SEQ ID NO: 42742 - protein, 35 aa, Artificial Sequence
  Cyclic GFR-binding peptide
  MOD_RES (5)..(5): Xaa is C or S
TKPTXAPTKLSPINVLYFDDSSNVIYGKIPNMVVR

SEQ ID NO: 42743 - protein, 31 aa, Artificial Sequence
  Cyclic GFR-binding peptide
  MOD_RES (6)..(6): Xaa is C or S
VTKPTXAPTKLSPINVLYFDDSSNVIYGKIP

SEQ ID NO: 42744 - protein, 25 aa, Artificial Sequence
  Cyclic GFR-binding peptide
ARLSPINILYFDAANNVVYGKIPDM

SEQ ID NO: 42745 - protein, 25 aa, Artificial Sequence
  Cyclic GFR-binding peptide
SPINVLYFDDMGVPTYGKIPEGMSV

SEQ ID NO: 42746 - protein, 28 aa, Artificial Sequence
  Cyclic GFR-binding peptide
VPTELSPINMLYFDEYDKVVYGKIPEMV

SEQ ID NO: 42747 - protein, 22 aa, Artificial Sequence
  Cyclic GFR-binding peptide
QLSPINVLYFDDSSNVIYGKIP

SEQ ID NO: 42748 - protein, 31 aa, Artificial Sequence
  Cyclic GFR-binding peptide
  MOD_RES (1)..(2): Xaa is C or S
XXVPTELSPINMLYFDEYDKVVYGKIPEMVV

SEQ ID NO: 42749 - protein, 21 aa, Artificial Sequence
  Cyclic GFR-binding peptide
LSPINILYFDAANNVVYGKIP

SEQ ID NO: 42750 - protein, 29 aa, Artificial Sequence
  Cyclic GFR-binding peptide
KLSPINVLYFDDMGVPTYGKIPEGMSVAE

SEQ ID NO: 42751 - protein, 30 aa, Artificial Sequence
  Cyclic GFR-binding peptide
  MOD_RES (1)..(1): Xaa is C or S
XVPTRLSPINILYFDSANNVVYGKIPDMVV

SEQ ID NO: 42752 - protein, 35 aa, Artificial Sequence
  Cyclic GFR-binding peptide
  MOD_RES (2)..(3)..(35): Xaa is C or S
TXXVPTRLSPINILYFDSANNVVYGKIPDMVVESX

SEQ ID NO: 42753 - protein, 33 aa, Artificial Sequence
  Cyclic GFR-binding peptide
  MOD_RES (6)..(7): Xaa is C or S
HVPKPXXAPTKLSPINVLYFDDSSNVIYGKIPN

SEQ ID NO: 42754 - protein, 28 aa, Artificial Sequence
  Cyclic GFR-binding peptide
VPTKLSPINVLYFDDMGVPTYGKIPEGM

SEQ ID NO: 42755 - protein, 26 aa, Artificial Sequence
  Cyclic GFR-binding peptide
  MOD_RES (1)..(1): Xaa is C or S
XAPTKLSPINVLYFDDSSNVIYGKIP

SEQ ID NO: 42756 - protein, 27 aa, Artificial Sequence
  Cyclic GFR-binding peptide
KLSPINVLYFDDSSNVIYGKIPNMVVR

SEQ ID NO: 42757 - protein, 27 aa, Artificial Sequence
  Cyclic GFR-binding peptide
  MOD_RES (27)..(27): Xaa is C or S
SPINMLYFDEYDKVVYGKIPEMVVEGX

SEQ ID NO: 42758 - protein, 28 aa, Artificial Sequence
  Cyclic GFR-binding peptide
PTKLSPINVLYFDDSSNVIYGKIPNMVV

SEQ ID NO: 42759 - protein, 25 aa, Artificial Sequence
  Cyclic GFR-binding peptide
PVKTSPINMLYFDNGRVLLYGKIPM

SEQ ID NO: 42760 - protein, 28 aa, Artificial Sequence
  Cyclic GFR-binding peptide
  MOD_RES (27)..(27): Xaa is C or S
SPINVLYFDSSNNVIYGKIPNMVVKAXG

SEQ ID NO: 42761 - protein, 24 aa, Artificial Sequence
  Cyclic GFR-binding peptide
LSPINVLYFDDSSNVIYGKIPNMV

SEQ ID NO: 42762 - protein, 31 aa, Artificial Sequence
  Cyclic GFR-binding peptide
  MOD_RES (29)..(31): Xaa is C or S
QLSPINVLYFDDSSNVIYGKIPNMVVRAXGX

SEQ ID NO: 42763 - protein, 40 aa, Artificial Sequence
  Cyclic GFR-binding peptide
  MOD_RES (5)..(6)..(38)..(40): Xaa is C or S
VPKAXXAPTKLSPINVLYFDSSNNVIYGKIPNMVVKAXGX

SEQ ID NO: 42764 - protein, 33 aa, Artificial Sequence
  Cyclic GFR-binding peptide
  MOD_RES (1)..(33): Xaa is C or S
XVPTELSPINMLYFDENEKVVYGKIPDMVVEGX

SEQ ID NO: 42765 - protein, 37 aa, Artificial Sequence
  Cyclic GFR-binding peptide
  MOD_RES (2)..(3)..(35)..(37): Xaa is C or S
AXXVPTKLSPINILYFDKGVVTYYGKIPGMAVSEXGX

SEQ ID NO: 42766 - protein, 28 aa, Artificial Sequence
  Cyclic GFR-binding peptide
VPTKLSPINILYFDKGVVTYYGKIPGMA

SEQ ID NO: 42767 - protein, 38 aa, Artificial Sequence
  Cyclic GFR-binding peptide
  MOD_RES (6)..(7): Xaa is C or S
KIPKAXXVPTELSPINMLYFDENEKVVYGKIPDMVVEG

SEQ ID NO: 42768 - protein, 22 aa, Artificial Sequence
  Cyclic GFR-binding peptide
LSPINMLYFDENEKVVYGKIPD

SEQ ID NO: 42769 - protein, 36 aa, Artificial Sequence
  Cyclic GFR-binding peptide
  MOD_RES (1)..(33)..(35): Xaa is C or S
XAPTQLSPINVLYFDDSSNVIYGKIPNMVVRAXGXH

SEQ ID NO: 42770 - protein, 28 aa, Artificial Sequence
  Cyclic GFR-binding peptide
  MOD_RES (2)..(2): Xaa is C or S
TXAPTKLSPINVLYFDDSSNVIYGKIPN

SEQ ID NO: 42771 - protein, 31 aa, Artificial Sequence
  Cyclic GFR-binding peptide
  MOD_RES (28)..(30): Xaa is C or S
LSPINVLYFDSSNNVIYGKIPNMVVKAXGXH

SEQ ID NO: 42772 - protein, 28 aa, Artificial Sequence
  Cyclic GFR-binding peptide
RLSPINILYFDSANNVVYGKIPDMVVES

SEQ ID NO: 42773 - protein, 38 aa, Artificial Sequence
  Cyclic GFR-binding peptide
  MOD_RES (2)..(3)..(35)..(37): Xaa is C or S
AXXVPTELSPINMLYFDENEKVVYGKIPDMVVEGXGXR

SEQ ID NO: 42774 - protein, 29 aa, Artificial Sequence
  Cyclic GFR-binding peptide
  MOD_RES (29)..(29): Xaa is C or S
KLSPINVLYFDSSNNVIYGKIPNMVVKAX

SEQ ID NO: 42775 - protein, 22 aa, Artificial Sequence
  Cyclic GFR-binding peptide
KLSPINVLYFDDMGVPTYGKIP

SEQ ID NO: 42776 - protein, 28 aa, Artificial Sequence
  Cyclic GFR-binding peptide
  MOD_RES (28)..(28): Xaa is C or S
LSPINILYFDAANNVVYGKIPDMVVEAX

SEQ ID NO: 42777 - protein, 30 aa, Artificial Sequence
  Cyclic GFR-binding peptide
  MOD_RES (3)..(4): Xaa is C or S
KPXXAPTKLSPINVLYFDDSSNVIYGKIPN

SEQ ID NO: 42778 - protein, 24 aa, Artificial Sequence
  Cyclic GFR-binding peptide
TKLSPINVLYFDSSNNVIYGKIPN

SEQ ID NO: 42779 - protein, 24 aa, Artificial Sequence
  Cyclic GFR-binding peptide
ARLSPINILYFDAANNVVYGKIPD

SEQ ID NO: 42780 - protein, 33 aa, Artificial Sequence
  Cyclic GFR-binding peptide
  MOD_RES (1)..(2): Xaa is C or S
XXVPTELSPINMLYFDEYDKVVYGKIPEMVVEG

SEQ ID NO: 42781 - protein, 28 aa, Artificial Sequence
  Cyclic GFR-binding peptide
  MOD_RES (27)..(27): Xaa is C or S
SPINILYFDAANNVVYGKIPDMVVEAXG

SEQ ID NO: 42782 - protein, 23 aa, Artificial Sequence
  Cyclic GFR-binding peptide
LSPINVLYFDDMGVPTYGKIPEG

SEQ ID NO: 42783 - protein, 28 aa, Artificial Sequence
  Cyclic GFR-binding peptide
KLSPINILYFDKGVVTYYGKIPGMAVSE

SEQ ID NO: 42784 - protein, 37 aa, Artificial Sequence
  Cyclic GFR-binding peptide
  MOD_RES (2)..(3)..(35)..(37): Xaa is C or S
AXXVPTELSPINMLYFDEYDKVVYGKIPEMVVEGXGX

SEQ ID NO: 42785 - protein, 35 aa, Artificial Sequence
  Cyclic GFR-binding peptide
  MOD_RES (3)..(4): Xaa is C or S
KAXXAPTKLSPINVLYFDSSNNVIYGKIPNMVVKA

SEQ ID NO: 42786 - protein, 27 aa, Artificial Sequence
  Cyclic GFR-binding peptide
LSPINVLYFDDSSNVIYGKIPNMVVRS

SEQ ID NO: 42787 - protein, 34 aa, Artificial Sequence
  Cyclic GFR-binding peptide
  MOD_RES (32)..(34): Xaa is C or S
VPTKLSPINILYFDKGVVTYYGKIPGMAVSEXGX

SEQ ID NO: 42788 - protein, 31 aa, Artificial Sequence
  Cyclic GFR-binding peptide
  MOD_RES (2)..(3): Xaa is C or S
PXXAPTQLSPINVLYFDDSSNVIYGKIPNMV

SEQ ID NO: 42789 - protein, 30 aa, Artificial Sequence
  Cyclic GFR-binding peptide
  MOD_RES (4)..(5): Xaa is C or S
PSTXXAPVKTSPINMLYFDNGRVLLYGKIP

SEQ ID NO: 42790 - protein, 35 aa, Artificial Sequence
  Cyclic GFR-binding peptide
  MOD_RES (4)..(5): Xaa is C or S
PKPXXAPTQLSPINVLYFDDSSNVIYGKIPNMVVR

SEQ ID NO: 42791 - protein, 34 aa, Artificial Sequence
  Cyclic GFR-binding peptide
  MOD_RES (32)..(34): Xaa is C or S
VPTELSPINMLYFDEYDKVVYGKIPEMVVEGXGX

SEQ ID NO: 42792 - protein, 32 aa, Artificial Sequence
  Cyclic GFR-binding peptide
  MOD_RES (1)..(1): Xaa is C or S
XVPTRLSPINILYFDSANNVVYGKIPDMVVES

SEQ ID NO: 42793 - protein, 27 aa, Artificial Sequence
  Cyclic GFR-binding peptide
LSPINVLYFDDSSNVIYGKIPNMVVRA

SEQ ID NO: 42794 - protein, 31 aa, Artificial Sequence
  Cyclic GFR-binding peptide
  MOD_RES (1)..(1): Xaa is C or S
XVPTKLSPINILYFDKGVVTYYGKIPGMAVS

SEQ ID NO: 42795 - protein, 31 aa, Artificial Sequence
  Cyclic GFR-binding peptide
  MOD_RES (29)..(31): Xaa is C or S
ELSPINMLYFDENEKVVYGKIPDMVVEGXGX

SEQ ID NO: 42796 - protein, 25 aa, Artificial Sequence
  Cyclic GFR-binding peptide
PTQLSPINVLYFDDSSNVIYGKIPN

SEQ ID NO: 42797 - protein, 21 aa, Artificial Sequence
  Cyclic GFR-binding peptide
SPINMLYFDENEKVVYGKIPD

SEQ ID NO: 42798 - protein, 36 aa, Artificial Sequence
  Cyclic GFR-binding peptide
  MOD_RES (4)..(5): Xaa is C or S
PKAXXAPTKLSPINVLYFDSSNNVIYGKIPNMVVKA

SEQ ID NO: 42799 - protein, 32 aa, Artificial Sequence
  Cyclic GFR-binding peptide
  MOD_RES (6)..(7): Xaa is C or S
AAPASXXVPARLSPINILYFDAANNVVYGKIP

SEQ ID NO: 42800 - protein, 29 aa, Artificial Sequence
  Cyclic GFR-binding peptide
  MOD_RES (1)..(2): Xaa is C or S
XXAPVKTSPINMLYFDNGRVLLYGKIPMI

SEQ ID NO: 42801 - protein, 37 aa, Artificial Sequence
  Cyclic GFR-binding peptide
  MOD_RES (5)..(6): Xaa is C or S
TPPTXXVPTRLSPINILYFDSANNVVYGKIPDMVVES

SEQ ID NO: 42802 - protein, 29 aa, Artificial Sequence
  Cyclic GFR-binding peptide
  MOD_RES (3)..(4): Xaa is C or S
KPXXAPTQLSPINVLYFDDSSNVIYGKIP

SEQ ID NO: 42803 - protein, 30 aa, Artificial Sequence
  Cyclic GFR-binding peptide
  MOD_RES (29)..(29): Xaa is C or S
RLSPINILYFDSANNVVYGKIPDMVVESXG

SEQ ID NO: 42804 - protein, 36 aa, Artificial Sequence
  Cyclic GFR-binding peptide
  MOD_RES (5)..(6): Xaa is C or S
ASKAXXVPTKLSPINILYFDKGVVTYYGKIPGMAVS

SEQ ID NO: 42805 - protein, 25 aa, Artificial Sequence
  Cyclic GFR-binding peptide
KLSPINVLYFDDMGVPTYGKIPEGM

SEQ ID NO: 42806 - protein, 28 aa, Artificial Sequence
  Cyclic GFR-binding peptide
TELSPINMLYFDENEKVVYGKIPDMVVE

SEQ ID NO: 42807 - protein, 25 aa, Artificial Sequence
  Cyclic GFR-binding peptide
PTKLSPINILYFDKGVVTYYGKIPG

SEQ ID NO: 42808 - protein, 25 aa, Artificial Sequence
  Cyclic GFR-binding peptide
RLSPINILYFDAANNVVYGKIPDMV

SEQ ID NO: 42809 - protein, 34 aa, Artificial Sequence
  Cyclic GFR-binding peptide
  MOD_RES (2)..(3): Xaa is C or S
SXXVPARLSPINILYFDAANNVVYGKIPDMVVEA

SEQ ID NO: 42810 - protein, 23 aa, Artificial Sequence
  Cyclic GFR-binding peptide
LSPINILYFDKGVVTYYGKIPGM

SEQ ID NO: 42811 - protein, 29 aa, Artificial Sequence
  Cyclic GFR-binding peptide
  MOD_RES (29)..(29): Xaa is C or S
ELSPINMLYFDENEKVVYGKIPDMVVEGX

SEQ ID NO: 42812 - protein, 32 aa, Artificial Sequence
  Cyclic GFR-binding peptide
  MOD_RES (32)..(32): Xaa is C or S
VPTELSPINMLYFDEYDKVVYGKIPEMVVEGX

SEQ ID NO: 42813 - protein, 31 aa, Artificial Sequence
  Cyclic GFR-binding peptide
  MOD_RES (3)..(4): Xaa is C or S
PTXXVPTRLSPINILYFDSANNVVYGKIPDM

SEQ ID NO: 42814 - protein, 34 aa, Artificial Sequence
  Cyclic GFR-binding peptide
  MOD_RES (6)..(7): Xaa is C or S
TVPKPXXAPTQLSPINVLYFDDSSNVIYGKIPNM

SEQ ID NO: 42815 - protein, 23 aa, Artificial Sequence
  Cyclic GFR-binding peptide
SPINVLYFDSSNNVIYGKIPNMV

SEQ ID NO: 42816 - protein, 23 aa, Artificial Sequence
  Cyclic GFR-binding peptide
SPINVLYFDDSSNVIYGKIPNMV

SEQ ID NO: 42817 - protein, 40 aa, Artificial Sequence
  Cyclic GFR-binding peptide
  MOD_RES (4)..(5)..(37)..(39): Xaa is C or S
PPTXXVPTRLSPINILYFDSANNVVYGKIPDMVVESXGXR

SEQ ID NO: 42818 - protein, 29 aa, Artificial Sequence
  Cyclic GFR-binding peptide
  MOD_RES (2)..(3): Xaa is C or S
AXXVPTELSPINMLYFDEYDKVVYGKIPE

SEQ ID NO: 42819 - protein, 32 aa, Artificial Sequence
  Cyclic GFR-binding peptide
  MOD_RES (6)..(7): Xaa is C or S
KASKAXXVPTKLSPINILYFDKGVVTYYGKIP

SEQ ID NO: 42820 - protein, 33 aa, Artificial Sequence
  Cyclic GFR-binding peptide
  MOD_RES (30)..(32): Xaa is C or S
PVKTSPINMLYFDNGRVLLYGKIPMIVEEXGXL

SEQ ID NO: 42821 - protein, 27 aa, Artificial Sequence
  Cyclic GFR-binding peptide
LSPINILYFDAANNVVYGKIPDMVVEA

SEQ ID NO: 42822 - protein, 38 aa, Artificial Sequence
  Cyclic GFR-binding peptide
  MOD_RES (5)..(6)..(38): Xaa is C or S
TPPTXXVPTRLSPINILYFDSANNVVYGKIPDMVVESX

SEQ ID NO: 42823 - protein, 36 aa, Artificial Sequence
  Cyclic GFR-binding peptide
  MOD_RES (5)..(6): Xaa is C or S
VGKAXXVPTKLSPINVLYFDDMGVPTYGKIPEGMSV

SEQ ID NO: 42824 - protein, 20 aa, Artificial Sequence
  Cyclic GFR-binding peptide
SPINVLYFDDSSNVIYGKIP

SEQ ID NO: 42825 - protein, 30 aa, Artificial Sequence
  Cyclic GFR-binding peptide
  MOD_RES (4)..(5): Xaa is C or S
PKAXXVPTELSPINMLYFDENEKVVYGKIP

SEQ ID NO: 42826 - protein, 36 aa, Artificial Sequence
  Cyclic GFR-binding peptide
  MOD_RES (1)..(2)..(34)..(36): Xaa is C or S
XXAPTKLSPINVLYFDSSNNVIYGKIPNMVVKAXGX

SEQ ID NO: 42827 - protein, 36 aa, Artificial Sequence
  Cyclic GFR-binding peptide
  MOD_RES (2)..(3)..(34)..(36): Xaa is C or S
TXXAPVKTSPINMLYFDNGRVLLYGKIPMIVEEXGX

SEQ ID NO: 42828 - protein, 33 aa, Artificial Sequence
  Cyclic GFR-binding peptide
  MOD_RES (2)..(3): Xaa is C or S
TXXVPTRLSPINILYFDSANNVVYGKIPDMVVE

SEQ ID NO: 42829 - protein, 34 aa, Artificial Sequence
  Cyclic GFR-binding peptide
  MOD_RES (6)..(7): Xaa is C or S
KASKAXXVPTKLSPINILYFDKGVVTYYGKIPGM

SEQ ID NO: 42830 - protein, 26 aa, Artificial Sequence
  Cyclic GFR-binding peptide
TRLSPINILYFDSANNVVYGKIPDMV

SEQ ID NO: 42831 - protein, 34 aa, Artificial Sequence
  Cyclic GFR-binding peptide
  MOD_RES (2)..(3): Xaa is C or S
AXXVPTELSPINMLYFDENEKVVYGKIPDMVVEG

SEQ ID NO: 42832 - protein, 38 aa, Artificial Sequence
  Cyclic GFR-binding peptide
  MOD_RES (5)..(37): Xaa is C or S
TKPTXAPTKLSPINVLYFDDSSNVIYGKIPNMVVRSXG

SEQ ID NO: 42833 - protein, 31 aa, Artificial Sequence
  Cyclic GFR-binding peptide
  MOD_RES (5)..(6): Xaa is C or S
VPKPXXAPTQLSPINVLYFDDSSNVIYGKIP

SEQ ID NO: 42834 - protein, 35 aa, Artificial Sequence
  Cyclic GFR-binding peptide
  MOD_RES (6)..(7): Xaa is C or S
STPPTXXVPTRLSPINILYFDSANNVVYGKIPDMV

SEQ ID NO: 42835 - protein, 28 aa, Artificial Sequence
  Cyclic GFR-binding peptide
  MOD_RES (26)..(28): Xaa is C or S
SPINMLYFDNGRVLLYGKIPMIVEEXGX

SEQ ID NO: 42836 - protein, 30 aa, Artificial Sequence
  Cyclic GFR-binding peptide
APTKLSPINVLYFDSSNNVIYGKIPNMVVK

SEQ ID NO: 42837 - protein, 38 aa, Artificial Sequence
  Cyclic GFR-binding peptide
  MOD_RES (6)..(38): Xaa is C or S
VTKPTXAPTKLSPINVLYFDDSSNVIYGKIPNMVVRSX

SEQ ID NO: 42838 - protein, 31 aa, Artificial Sequence
  Cyclic GFR-binding peptide
  MOD_RES (30)..(30): Xaa is C or S
TELSPINMLYFDEYDKVVYGKIPEMVVEGXG

SEQ ID NO: 42839 - protein, 31 aa, Artificial Sequence
  Cyclic GFR-binding peptide
  MOD_RES (4)..(5): Xaa is C or S
GKAXXVPTKLSPINVLYFDDMGVPTYGKIPE

SEQ ID NO: 42840 - protein, 41 aa, Artificial Sequence
  Cyclic GFR-binding peptide
  MOD_RES (6)..(7)..(39)..(41): Xaa is C or S
SIPKAXXVPTELSPINMLYFDEYDKVVYGKIPEMVVEGXGX

SEQ ID NO: 42841 - protein, 31 aa, Artificial Sequence
  Cyclic GFR-binding peptide
  MOD_RES (30)..(30): Xaa is C or S
TKLSPINILYFDKGVVTYYGKIPGMAVSEXG

SEQ ID NO: 42842 - protein, 29 aa, Artificial Sequence
  Cyclic GFR-binding peptide
  MOD_RES (28)..(28): Xaa is C or S
LSPINVLYFDSSNNVIYGKIPNMVVKAXG

SEQ ID NO: 42843 - protein, 26 aa, Artificial Sequence
  Cyclic GFR-binding peptide
LSPINVLYFDDMGVPTYGKIPEGMSV

SEQ ID NO: 42844 - protein, 36 aa, Artificial Sequence
  Cyclic GFR-binding peptide
  MOD_RES (5)..(5): Xaa is C or S
TKPTXAPTKLSPINVLYFDDSSNVIYGKIPNMVVRS

SEQ ID NO: 42845 - protein, 29 aa, Artificial Sequence
  Cyclic GFR-binding peptide
  MOD_RES (29)..(29): Xaa is C or S
RLSPINILYFDSANNVVYGKIPDMVVESX

SEQ ID NO: 42846 - protein, 34 aa, Artificial Sequence
  Cyclic GFR-binding peptide
  MOD_RES (5)..(6): Xaa is C or S
VGKAXXVPTKLSPINVLYFDDMGVPTYGKIPEGM

SEQ ID NO: 42847 - protein, 23 aa, Artificial Sequence
  Cyclic GFR-binding peptide
TKLSPINVLYFDDSSNVIYGKIP

SEQ ID NO: 42848 - protein, 34 aa, Artificial Sequence
  Cyclic GFR-binding peptide
  MOD_RES (1)..(2)..(34): Xaa is C or S
XXVPARLSPINILYFDAANNVVYGKIPDMVVEAX

SEQ ID NO: 42849 - protein, 29 aa, Artificial Sequence
  Cyclic GFR-binding peptide
  MOD_RES (28)..(28): Xaa is C or S
LSPINILYFDKGVVTYYGKIPGMAVSEXG

SEQ ID NO: 42850 - protein, 40 aa, Artificial Sequence
  Cyclic GFR-binding peptide
  MOD_RES (6)..(7)..(40): Xaa is C or S
KVGKAXXVPTKLSPINVLYFDDMGVPTYGKIPEGMSVAEX

SEQ ID NO: 42851 - protein, 39 aa, Artificial Sequence
  Cyclic GFR-binding peptide
  MOD_RES (4)..(5)..(37)..(39): Xaa is C or S
SKAXXVPTKLSPINILYFDKGVVTYYGKIPGMAVSEXGX

SEQ ID NO: 42852 - protein, 34 aa, Artificial Sequence
  Cyclic GFR-binding peptide
  MOD_RES (1)..(2)..(33): Xaa is C or S
XXAPVKTSPINMLYFDNGRVLLYGKIPMIVEEXG

SEQ ID NO: 42853 - protein, 33 aa, Artificial Sequence
  Cyclic GFR-binding peptide
  MOD_RES (3)..(4): Xaa is C or S
ASXXVPARLSPINILYFDAANNVVYGKIPDMVV

SEQ ID NO: 42854 - protein, 39 aa, Artificial Sequence
  Cyclic GFR-binding peptide
  MOD_RES (4)..(5)..(38): Xaa is C or S
GKAXXVPTKLSPINVLYFDDMGVPTYGKIPEGMSVAEXG

SEQ ID NO: 42855 - protein, 29 aa, Artificial Sequence
  Cyclic GFR-binding peptide
  MOD_RES (28)..(28): Xaa is C or S
LSPINILYFDSANNVVYGKIPDMVVESXG

SEQ ID NO: 42856 - protein, 31 aa, Artificial Sequence
  Cyclic GFR-binding peptide
  MOD_RES (31)..(31): Xaa is C or S
PTKLSPINVLYFDSSNNVIYGKIPNMVVKAX

SEQ ID NO: 42857 - protein, 28 aa, Artificial Sequence
  Cyclic GFR-binding peptide
  MOD_RES (1)..(2): Xaa is C or S
XXAPTKLSPINVLYFDSSNNVIYGKIPN

SEQ ID NO: 42858 - protein, 35 aa, Artificial Sequence
  Cyclic GFR-binding peptide
  MOD_RES (3)..(4): Xaa is C or S
KPXXAPTQLSPINVLYFDDSSNVIYGKIPNMVVRA

SEQ ID NO: 42859 - protein, 24 aa, Artificial Sequence
  Cyclic GFR-binding peptide
VKTSPINMLYFDNGRVLLYGKIPM

SEQ ID NO: 42860 - protein, 22 aa, Artificial Sequence
  Cyclic GFR-binding peptide
RLSPINILYFDSANNVVYGKIP

SEQ ID NO: 42861 - protein, 32 aa, Artificial Sequence
  Cyclic GFR-binding peptide
  MOD_RES (32)..(32): Xaa is C or S
APTKLSPINVLYFDSSNNVIYGKIPNMVVKAX

SEQ ID NO: 42862 - protein, 39 aa, Artificial Sequence
  Cyclic GFR-binding peptide
  MOD_RES (6)..(7)..(39): Xaa is C or S
SIPKAXXVPTELSPINMLYFDEYDKVVYGKIPEMVVEGX

SEQ ID NO: 42863 - protein, 29 aa, Artificial Sequence
  Cyclic GFR-binding peptide
  MOD_RES (1)..(2): Xaa is C or S
XXAPTKLSPINVLYFDDSSNVIYGKIPNM

SEQ ID NO: 42864 - protein, 20 aa, Artificial Sequence
  Cyclic GFR-binding peptide
SPINVLYFDDMGVPTYGKIP

SEQ ID NO: 42865 - protein, 33 aa, Artificial Sequence
  Cyclic GFR-binding peptide
  MOD_RES (1)..(33): Xaa is C or S
XVPTRLSPINILYFDSANNVVYGKIPDMVVESX

SEQ ID NO: 42866 - protein, 30 aa, Artificial Sequence
  Cyclic GFR-binding peptide
  MOD_RES (3)..(4): Xaa is C or S
KAXXVPTKLSPINVLYFDDMGVPTYGKIPE

SEQ ID NO: 42867 - protein, 30 aa, Artificial Sequence
  Cyclic GFR-binding peptide
  MOD_RES (4)..(5): Xaa is C or S
PKAXXVPTELSPINMLYFDEYDKVVYGKIP

SEQ ID NO: 42868 - protein, 32 aa, Artificial Sequence
  Cyclic GFR-binding peptide
  MOD_RES (5)..(6): Xaa is C or S
VPKPXXAPTQLSPINVLYFDDSSNVIYGKIPN

SEQ ID NO: 42869 - protein, 27 aa, Artificial Sequence
  Cyclic GFR-binding peptide
TKLSPINILYFDKGVVTYYGKIPGMAV

SEQ ID NO: 42870 - protein, 25 aa, Artificial Sequence
  Cyclic GFR-binding peptide
TKLSPINVLYFDSSNNVIYGKIPNM

SEQ ID NO: 42871 - protein, 31 aa, Artificial Sequence
  Cyclic GFR-binding peptide
  MOD_RES (5)..(6): Xaa is C or S
VPSTXXAPVKTSPINMLYFDNGRVLLYGKIP

SEQ ID NO: 42872 - protein, 33 aa, Artificial Sequence
  Cyclic GFR-binding peptide
  MOD_RES (4)..(5): Xaa is C or S
PASXXVPARLSPINILYFDAANNVVYGKIPDMV

SEQ ID NO: 42873 - protein, 31 aa, Artificial Sequence
  Cyclic GFR-binding peptide
  MOD_RES (5)..(6): Xaa is C or S
VPKPXXAPTKLSPINVLYFDDSSNVIYGKIP

SEQ ID NO: 42874 - protein, 33 aa, Artificial Sequence
  Cyclic GFR-binding peptide
  MOD_RES (5)..(6): Xaa is C or S
IPKAXXVPTELSPINMLYFDEYDKVVYGKIPEM

SEQ ID NO: 42875 - protein, 37 aa, Artificial Sequence
  Cyclic GFR-binding peptide
  MOD_RES (3)..(4)..(36): Xaa is C or S
KAXXVPTELSPINMLYFDENEKVVYGKIPDMVVEGXG

SEQ ID NO: 42876 - protein, 31 aa, Artificial Sequence
  Cyclic GFR-binding peptide
VPTKLSPINILYFDKGVVTYYGKIPGMAVSE

SEQ ID NO: 42877 - protein, 27 aa, Artificial Sequence
  Cyclic GFR-binding peptide
PARLSPINILYFDAANNVVYGKIPDMV

SEQ ID NO: 42878 - protein, 38 aa, Artificial Sequence
  Cyclic GFR-binding peptide
  MOD_RES (5)..(6)..(38): Xaa is C or S
VPKPXXAPTKLSPINVLYFDDSSNVIYGKIPNMVVRSX

SEQ ID NO: 42879 - protein, 34 aa, Artificial Sequence
  Cyclic GFR-binding peptide
  MOD_RES (32)..(34): Xaa is C or S
APTQLSPINVLYFDDSSNVIYGKIPNMVVRAXGX

SEQ ID NO: 42880 - protein, 32 aa, Artificial Sequence
  Cyclic GFR-binding peptide
  MOD_RES (4)..(5): Xaa is C or S
SKAXXVPTKLSPINILYFDKGVVTYYGKIPGM

SEQ ID NO: 42881 - protein, 37 aa, Artificial Sequence
  Cyclic GFR-binding peptide
  MOD_RES (1)..(2)..(34)..(36): Xaa is C or S
XXVPTKLSPINILYFDKGVVTYYGKIPGMAVSEXGXR

SEQ ID NO: 42882 - protein, 35 aa, Artificial Sequence
  Cyclic GFR-binding peptide
  MOD_RES (6)..(7): Xaa is C or S
KIPKAXXVPTELSPINMLYFDENEKVVYGKIPDMV

SEQ ID NO: 42883 - protein, 34 aa, Artificial Sequence
  Cyclic GFR-binding peptide
  MOD_RES (5)..(5): Xaa is C or S
TKPTXAPTKLSPINVLYFDDSSNVIYGKIPNMVV

SEQ ID NO: 42884 - protein, 30 aa, Artificial Sequence
  Cyclic GFR-binding peptide
  MOD_RES (2)..(3): Xaa is C or S
AXXVPTELSPINMLYFDEYDKVVYGKIPEM

SEQ ID NO: 42885 - protein, 33 aa, Artificial Sequence
  Cyclic GFR-binding peptide
  MOD_RES (3)..(4): Xaa is C or S
STXXAPVKTSPINMLYFDNGRVLLYGKIPMIVE

SEQ ID NO: 42886 - protein, 24 aa, Artificial Sequence
  Cyclic GFR-binding peptide
LSPINMLYFDEYDKVVYGKIPEMV

SEQ ID NO: 42887 - protein, 31 aa, Artificial Sequence
  Cyclic GFR-binding peptide
  MOD_RES (5)..(6): Xaa is C or S
VGKAXXVPTKLSPINVLYFDDMGVPTYGKIP

SEQ ID NO: 42888 - protein, 27 aa, Artificial Sequence
  Cyclic GFR-binding peptide
  MOD_RES (1)..(1): Xaa is C or S
XVPTRLSPINILYFDSANNVVYGKIPD

SEQ ID NO: 42889 - protein, 41 aa, Artificial Sequence
  Cyclic GFR-binding peptide
  MOD_RES (6)..(7)..(39)..(41): Xaa is C or S
YVPKPXXAPTKLSPINVLYFDDSSNVIYGKIPNMVVRSXGX

SEQ ID NO: 42890 - protein, 25 aa, Artificial Sequence
  Cyclic GFR-binding peptide
LSPINILYFDAANNVVYGKIPDMVV

SEQ ID NO: 42891 - protein, 24 aa, Artificial Sequence
  Cyclic GFR-binding peptide
LSPINILYFDSANNVVYGKIPDMV

SEQ ID NO: 42892 - protein, 27 aa, Artificial Sequence
  Cyclic GFR-binding peptide
LSPINILYFDSANNVVYGKIPDMVVES

SEQ ID NO: 42893 - protein, 27 aa, Artificial Sequence
  Cyclic GFR-binding peptide
VPTKLSPINILYFDKGVVTYYGKIPGM

SEQ ID NO: 42894 - protein, 29 aa, Artificial Sequence
  Cyclic GFR-binding peptide
  MOD_RES (3)..(4): Xaa is C or S
STXXAPVKTSPINMLYFDNGRVLLYGKIP

SEQ ID NO: 42895 - protein, 37 aa, Artificial Sequence
  Cyclic GFR-binding peptide
  MOD_RES (4)..(5)..(36): Xaa is C or S
PSTXXAPVKTSPINMLYFDNGRVLLYGKIPMIVEEXG

SEQ ID NO: 42896 - protein, 36 aa, Artificial Sequence
  Cyclic GFR-binding peptide
  MOD_RES (1)..(2)..(34)..(36): Xaa is C or S
XXAPTKLSPINVLYFDDSSNVIYGKIPNMVVRSXGX

SEQ ID NO: 42897 - protein, 31 aa, Artificial Sequence
  Cyclic GFR-binding peptide
  MOD_RES (30)..(30): Xaa is C or S
TKLSPINVLYFDSSNNVIYGKIPNMVVKAXG

SEQ ID NO: 42898 - protein, 23 aa, Artificial Sequence
  Cyclic GFR-binding peptide
LSPINILYFDAANNVVYGKIPDM

SEQ ID NO: 42899 - protein, 37 aa, Artificial Sequence
  Cyclic GFR-binding peptide
  MOD_RES (5)..(6)..(37): Xaa is C or S
VPSTXXAPVKTSPINMLYFDNGRVLLYGKIPMIVEEX

SEQ ID NO: 42900 - protein, 31 aa, Artificial Sequence
  Cyclic GFR-binding peptide
  MOD_RES (31)..(31): Xaa is C or S
PARLSPINILYFDAANNVVYGKIPDMVVEAX

SEQ ID NO: 42901 - protein, 37 aa, Artificial Sequence
  Cyclic GFR-binding peptide
  MOD_RES (2)..(3)..(35)..(37): Xaa is C or S
SXXVPARLSPINILYFDAANNVVYGKIPDMVVEAXGX

SEQ ID NO: 42902 - protein, 26 aa, Artificial Sequence
  Cyclic GFR-binding peptide
VPARLSPINILYFDAANNVVYGKIPD

SEQ ID NO: 42903 - protein, 25 aa, Artificial Sequence
  Cyclic GFR-binding peptide
LSPINVLYFDSSNNVIYGKIPNMVV

SEQ ID NO: 42904 - protein, 30 aa, Artificial Sequence
  Cyclic GFR-binding peptide
  MOD_RES (4)..(5): Xaa is C or S
PPTXXVPTRLSPINILYFDSANNVVYGKIP

SEQ ID NO: 42905 - protein, 30 aa, Artificial Sequence
  Cyclic GFR-binding peptide
  MOD_RES (1)..(1): Xaa is C or S
XVPTELSPINMLYFDEYDKVVYGKIPEMVV

SEQ ID NO: 42906 - protein, 25 aa, Artificial Sequence
  Cyclic GFR-binding peptide
SPINMLYFDENEKVVYGKIPDMVVE

SEQ ID NO: 42907 - protein, 32 aa, Artificial Sequence
  Cyclic GFR-binding peptide
  MOD_RES (32)..(32): Xaa is C or S
APTKLSPINVLYFDDSSNVIYGKIPNMVVRSX

SEQ ID NO: 42908 - protein, 30 aa, Artificial Sequence
  Cyclic GFR-binding peptide
VPTELSPINMLYFDEYDKVVYGKIPEMVVE

SEQ ID NO: 42909 - protein, 22 aa, Artificial Sequence
  Cyclic GFR-binding peptide
LSPINVLYFDDSSNVIYGKIPN

SEQ ID NO: 42910 - protein, 30 aa, Artificial Sequence
  Cyclic GFR-binding peptide
  MOD_RES (30)..(30): Xaa is C or S
PVKTSPINMLYFDNGRVLLYGKIPMIVEEX

SEQ ID NO: 42911 - protein, 38 aa, Artificial Sequence
  Cyclic GFR-binding peptide
  MOD_RES (6)..(7): Xaa is C or S
HVPKPXXAPTKLSPINVLYFDDSSNVIYGKIPNMVVRS

SEQ ID NO: 42912 - protein, 25 aa, Artificial Sequence
  Cyclic GFR-binding peptide
KLSPINILYFDKGVVTYYGKIPGMA

SEQ ID NO: 42913 - protein, 31 aa, Artificial Sequence
  Cyclic GFR-binding peptide
  MOD_RES (2)..(3): Xaa is C or S
AXXVPTKLSPINILYFDKGVVTYYGKIPGMA

SEQ ID NO: 42914 - skipped

SEQ ID NO: 42915 - protein, 34 aa, Artificial Sequence
  Cyclic GFR-binding peptide
  MOD_RES (1)..(2)..(34): Xaa is C or S
XXVPTKLSPINILYFDKGVVTYYGKIPGMAVSEX

SEQ ID NO: 42916 - protein, 42 aa, Artificial Sequence
  Cyclic GFR-binding peptide
  MOD_RES (6)..(7)..(39)..(41): Xaa is C or S
TVPKPXXAPTQLSPINVLYFDDSSNVIYGKIPNMVVRAXGXH

SEQ ID NO: 42917 - protein, 33 aa, Artificial Sequence
  Cyclic GFR-binding peptide
  MOD_RES (5)..(5): Xaa is C or S
TKPTXAPTKLSPINVLYFDDSSNVIYGKIPNMV

SEQ ID NO: 42918 - protein, 32 aa, Artificial Sequence
  Cyclic GFR-binding peptide
  MOD_RES (6)..(6): Xaa is C or S
VTKPTXAPTKLSPINVLYFDDSSNVIYGKIPN

SEQ ID NO: 42919 - protein, 33 aa, Artificial Sequence
  Cyclic GFR-binding peptide
  MOD_RES (5)..(6): Xaa is C or S
APASXXVPARLSPINILYFDAANNVVYGKIPDM

SEQ ID NO: 42920 - protein, 32 aa, Artificial Sequence
  Cyclic GFR-binding peptide
  MOD_RES (1)..(32): Xaa is C or S
XAPVKTSPINMLYFDNGRVLLYGKIPMIVEEX

SEQ ID NO: 42921 - protein, 34 aa, Artificial Sequence
  Cyclic GFR-binding peptide
  MOD_RES (3)..(3): Xaa is C or S
PTXAPTKLSPINVLYFDDSSNVIYGKIPNMVVRS

SEQ ID NO: 42922 - protein, 33 aa, Artificial Sequence
  Cyclic GFR-binding peptide
  MOD_RES (3)..(4): Xaa is C or S
KPXXAPTKLSPINVLYFDDSSNVIYGKIPNMVV

SEQ ID NO: 42923 - protein, 37 aa, Artificial Sequence
  Cyclic GFR-binding peptide
  MOD_RES (3)..(4)..(36): Xaa is C or S
KAXXAPTKLSPINVLYFDSSNNVIYGKIPNMVVKAXG

SEQ ID NO: 42924 - protein, 29 aa, Artificial Sequence
  Cyclic GFR-binding peptide
PTKLSPINVLYFDSSNNVIYGKIPNMVVK

SEQ ID NO: 42925 - protein, 37 aa, Artificial Sequence
  Cyclic GFR-binding peptide
  MOD_RES (6)..(7): Xaa is C or S
TVPKPXXAPTQLSPINVLYFDDSSNVIYGKIPNMVVR

SEQ ID NO: 42926 - protein, 21 aa, Artificial Sequence
  Cyclic GFR-binding peptide
LSPINMLYFDENEKVVYGKIP

SEQ ID NO: 42927 - protein, 30 aa, Artificial Sequence
  Cyclic GFR-binding peptide
  MOD_RES (1)..(2): Xaa is C or S
XXVPTKLSPINVLYFDDMGVPTYGKIPEGM

SEQ ID NO: 42928 - protein, 32 aa, Artificial Sequence
  Cyclic GFR-binding peptide
  MOD_RES (1)..(2): Xaa is C or S
XXAPTQLSPINVLYFDDSSNVIYGKIPNMVVR

SEQ ID NO: 42929 - protein, 33 aa, Artificial Sequence
  Cyclic GFR-binding peptide
  MOD_RES (4)..(5): Xaa is C or S
PSTXXAPVKTSPINMLYFDNGRVLLYGKIPMIV

SEQ ID NO: 42930 - protein, 28 aa, Artificial Sequence
  Cyclic GFR-binding peptide
  MOD_RES (1)..(2): Xaa is C or S
XXAPTQLSPINVLYFDDSSNVIYGKIPN

SEQ ID NO: 42931 - protein, 31 aa, Artificial Sequence
  Cyclic GFR-binding peptide
  MOD_RES (2)..(3): Xaa is C or S
AXXVPTKLSPINVLYFDDMGVPTYGKIPEGM

SEQ ID NO: 42932 - protein, 36 aa, Artificial Sequence
  Cyclic GFR-binding peptide
  MOD_RES (4)..(5): Xaa is C or S
PKPXXAPTQLSPINVLYFDDSSNVIYGKIPNMVVRA

SEQ ID NO: 42933 - protein, 32 aa, Artificial Sequence
  Cyclic GFR-binding peptide
  MOD_RES (4)..(5): Xaa is C or S
PPTXXVPTRLSPINILYFDSANNVVYGKIPDM

SEQ ID NO: 42934 - protein, 32 aa, Artificial Sequence
  Cyclic GFR-binding peptide
  MOD_RES (5)..(6): Xaa is C or S
VPKPXXAPTKLSPINVLYFDDSSNVIYGKIPN

SEQ ID NO: 42935 - protein, 33 aa, Artificial Sequence
  Cyclic GFR-binding peptide
  MOD_RES (2)..(2): Xaa is C or S
TXAPTKLSPINVLYFDDSSNVIYGKIPNMVVRS

SEQ ID NO: 42936 - protein, 22 aa, Artificial Sequence
  Cyclic GFR-binding peptide
SPINILYFDSANNVVYGKIPDM

SEQ ID NO: 42937 - protein, 26 aa, Artificial Sequence
  Cyclic GFR-binding peptide
  MOD_RES (1)..(1): Xaa is C or S
XAPTQLSPINVLYFDDSSNVIYGKIP

SEQ ID NO: 42938 - protein, 32 aa, Artificial Sequence
  Cyclic GFR-binding peptide
  MOD_RES (3)..(4): Xaa is C or S
STXXAPVKTSPINMLYFDNGRVLLYGKIPMIV

SEQ ID NO: 42939 - protein, 38 aa, Artificial Sequence
  Cyclic GFR-binding peptide
  MOD_RES (6)..(7): Xaa is C or S
YVPKPXXAPTKLSPINVLYFDDSSNVIYGKIPNMVVRS

SEQ ID NO: 42940 - protein, 36 aa, Artificial Sequence
  Cyclic GFR-binding peptide
  MOD_RES (2)..(3)..(35): Xaa is C or S
PXXAPTQLSPINVLYFDDSSNVIYGKIPNMVVRAXG

SEQ ID NO: 42941 - protein, 32 aa, Artificial Sequence
  Cyclic GFR-binding peptide
  MOD_RES (29)..(31): Xaa is C or S
RLSPINILYFDAANNVVYGKIPDMVVEAXGXR

SEQ ID NO: 42942 - protein, 31 aa, Artificial Sequence
  Cyclic GFR-binding peptide
  MOD_RES (1)..(1): Xaa is C or S
XAPTQLSPINVLYFDDSSNVIYGKIPNMVVR

SEQ ID NO: 42943 - protein, 23 aa, Artificial Sequence
  Cyclic GFR-binding peptide
KTSPINMLYFDNGRVLLYGKIPM

SEQ ID NO: 42944 - protein, 35 aa, Artificial Sequence
  Cyclic GFR-binding peptide
  MOD_RES (4)..(5): Xaa is C or S
PASXXVPARLSPINILYFDAANNVVYGKIPDMVVE

SEQ ID NO: 42945 - protein, 33 aa, Artificial Sequence
  Cyclic GFR-binding peptide
  MOD_RES (2)..(3): Xaa is C or S
PXXAPTQLSPINVLYFDDSSNVIYGKIPNMVVR

SEQ ID NO: 42946 - protein, 35 aa, Artificial Sequence
  Cyclic GFR-binding peptide
  MOD_RES (2)..(3)..(35): Xaa is C or S
AXXAPTKLSPINVLYFDSSNNVIYGKIPNMVVKAX

SEQ ID NO: 42947 - protein, 33 aa, Artificial Sequence
  Cyclic GFR-binding peptide
  MOD_RES (1)..(2): Xaa is C or S
XXVPARLSPINILYFDAANNVVYGKIPDMVVEA

SEQ ID NO: 42948 - protein, 30 aa, Artificial Sequence
  Cyclic GFR-binding peptide
PTKLSPINILYFDKGVVTYYGKIPGMAVSE

SEQ ID NO: 42949 - protein, 27 aa, Artificial Sequence
  Cyclic GFR-binding peptide
KLSPINVLYFDDMGVPTYGKIPEGMSV

SEQ ID NO: 42950 - protein, 34 aa, Artificial Sequence
  Cyclic GFR-binding peptide
  MOD_RES (1)..(2)..(34): Xaa is C or S
XXAPTQLSPINVLYFDDSSNVIYGKIPNMVVRAX

SEQ ID NO: 42951 - protein, 39 aa, Artificial Sequence
  Cyclic GFR-binding peptide
  MOD_RES (3)..(4)..(36)..(38): Xaa is C or S
KPXXAPTQLSPINVLYFDDSSNVIYGKIPNMVVRAXGXH

SEQ ID NO: 42952 - protein, 36 aa, Artificial Sequence
  Cyclic GFR-binding peptide
  MOD_RES (2)..(3)..(35): Xaa is C or S
AXXVPTKLSPINILYFDKGVVTYYGKIPGMAVSEXG

SEQ ID NO: 42953 - protein, 24 aa, Artificial Sequence
  Cyclic GFR-binding peptide
KTSPINMLYFDNGRVLLYGKIPMI

SEQ ID NO: 42954 - protein, 27 aa, Artificial Sequence
  Cyclic GFR-binding peptide
APTQLSPINVLYFDDSSNVIYGKIPNM

SEQ ID NO: 42955 - protein, 34 aa, Artificial Sequence
  Cyclic GFR-binding peptide
  MOD_RES (3)..(4): Xaa is C or S
KAXXVPTKLSPINVLYFDDMGVPTYGKIPEGMSV

SEQ ID NO: 42956 - protein, 39 aa, Artificial Sequence
  Cyclic GFR-binding peptide
  MOD_RES (5)..(6)..(38): Xaa is C or S
APASXXVPARLSPINILYFDAANNVVYGKIPDMVVEAXG

SEQ ID NO: 42957 - protein, 25 aa, Artificial Sequence
  Cyclic GFR-binding peptide
SPINVLYFDDSSNVIYGKIPNMVVR

SEQ ID NO: 42958 - protein, 30 aa, Artificial Sequence
  Cyclic GFR-binding peptide
  MOD_RES (4)..(4): Xaa is C or S
KPTXAPTKLSPINVLYFDDSSNVIYGKIPN

SEQ ID NO: 42959 - protein, 28 aa, Artificial Sequence
  Cyclic GFR-binding peptide
  MOD_RES (27)..(27): Xaa is C or S
SPINVLYFDDSSNVIYGKIPNMVVRSXG

SEQ ID NO: 42960 - protein, 37 aa, Artificial Sequence
  Cyclic GFR-binding peptide
  MOD_RES (3)..(4)..(36): Xaa is C or S
PTXXVPTRLSPINILYFDSANNVVYGKIPDMVVESXG

SEQ ID NO: 42961 - protein, 25 aa, Artificial Sequence
  Cyclic GFR-binding peptide
ELSPINMLYFDENEKVVYGKIPDMV

SEQ ID NO: 42962 - protein, 27 aa, Artificial Sequence
  Cyclic GFR-binding peptide
  MOD_RES (1)..(1): Xaa is C or S
XAPVKTSPINMLYFDNGRVLLYGKIPM

SEQ ID NO: 42963 - protein, 36 aa, Artificial Sequence
  Cyclic GFR-binding peptide
  MOD_RES (1)..(2)..(34)..(36): Xaa is C or S
XXVPTELSPINMLYFDENEKVVYGKIPDMVVEGXGX

SEQ ID NO: 42964 - protein, 36 aa, Artificial Sequence
  Cyclic GFR-binding peptide
  MOD_RES (1)..(33)..(35): Xaa is C or S
XVPARLSPINILYFDAANNVVYGKIPDMVVEAXGXR

SEQ ID NO: 42965 - protein, 37 aa, Artificial Sequence
  Cyclic GFR-binding peptide
  MOD_RES (5)..(6): Xaa is C or S
IPKAXXVPTELSPINMLYFDEYDKVVYGKIPEMVVEG

SEQ ID NO: 42966 - protein, 29 aa, Artificial Sequence
  Cyclic GFR-binding peptide
  MOD_RES (2)..(3): Xaa is C or S
AXXVPTKLSPINVLYFDDMGVPTYGKIPE

SEQ ID NO: 42967 - protein, 31 aa, Artificial Sequence
  Cyclic GFR-binding peptide
  MOD_RES (1)..(2): Xaa is C or S
XXAPVKTSPINMLYFDNGRVLLYGKIPMIVE

SEQ ID NO: 42968 - protein, 35 aa, Artificial Sequence
  Cyclic GFR-binding peptide
  MOD_RES (5)..(6): Xaa is C or S
TPPTXXVPTRLSPINILYFDSANNVVYGKIPDMVV

SEQ ID NO: 42969 - protein, 26 aa, Artificial Sequence
  Cyclic GFR-binding peptide
ELSPINMLYFDENEKVVYGKIPDMVV

SEQ ID NO: 42970 - protein, 37 aa, Artificial Sequence
  Cyclic GFR-binding peptide
  MOD_RES (3)..(4)..(36): Xaa is C or S
ASXXVPARLSPINILYFDAANNVVYGKIPDMVVEAXG

SEQ ID NO: 42971 - protein, 28 aa, Artificial Sequence
  Cyclic GFR-binding peptide
  MOD_RES (28)..(28): Xaa is C or S
LSPINVLYFDDSSNVIYGKIPNMVVRAX

SEQ ID NO: 42972 - protein, 39 aa, Artificial Sequence
  Cyclic GFR-binding peptide
  MOD_RES (3)..(4)..(36)..(38): Xaa is C or S
KPXXAPTKLSPINVLYFDDSSNVIYGKIPNMVVRSXGXH

SEQ ID NO: 42973 - protein, 39 aa, Artificial Sequence
  Cyclic GFR-binding peptide
  MOD_RES (6)..(7)..(39): Xaa is C or S
AAPASXXVPARLSPINILYFDAANNVVYGKIPDMVVEAX

SEQ ID NO: 42974 - protein, 42 aa, Artificial Sequence
  Cyclic GFR-binding peptide
  MOD_RES (6)..(7)..(40)..(42): Xaa is C or S
KVGKAXXVPTKLSPINVLYFDDMGVPTYGKIPEGMSVAEXGX

SEQ ID NO: 42975 - protein, 39 aa, Artificial Sequence
  Cyclic GFR-binding peptide
  MOD_RES (4)..(5)..(37)..(39): Xaa is C or S
PKPXXAPTKLSPINVLYFDDSSNVIYGKIPNMVVRSXGX

SEQ ID NO: 42976 - protein, 26 aa, Artificial Sequence
  Cyclic GFR-binding peptide
SPINILYFDAANNVVYGKIPDMVVEA

SEQ ID NO: 42977 - protein, 40 aa, Artificial Sequence
  Cyclic GFR-binding peptide
  MOD_RES (6)..(7)..(39): Xaa is C or S
AAPASXXVPARLSPINILYFDAANNVVYGKIPDMVVEAXG

SEQ ID NO: 42978 - protein, 28 aa, Artificial Sequence
  Cyclic GFR-binding peptide
  MOD_RES (1)..(1): Xaa is C or S
XAPTKLSPINVLYFDDSSNVIYGKIPNM

SEQ ID NO: 42979 - protein, 31 aa, Artificial Sequence
  Cyclic GFR-binding peptide
  MOD_RES (29)..(31): Xaa is C or S
LSPINVLYFDDMGVPTYGKIPEGMSVAEXGX

SEQ ID NO: 42980 - protein, 23 aa, Artificial Sequence
  Cyclic GFR-binding peptide
TSPINMLYFDNGRVLLYGKIPMI

SEQ ID NO: 42981 - protein, 28 aa, Artificial Sequence
  Cyclic GFR-binding peptide
  MOD_RES (28)..(28): Xaa is C or S
LSPINVLYFDSSNNVIYGKIPNMVVKAX

SEQ ID NO: 42982 - protein, 35 aa, Artificial Sequence
  Cyclic GFR-binding peptide
  MOD_RES (5)..(6): Xaa is C or S
IPKAXXVPTELSPINMLYFDEYDKVVYGKIPEMVV

SEQ ID NO: 42983 - protein, 26 aa, Artificial Sequence
  Cyclic GFR-binding peptide
TKLSPINVLYFDDMGVPTYGKIPEGM

SEQ ID NO: 42984 - protein, 39 aa, Artificial Sequence
  Cyclic GFR-binding peptide
  MOD_RES (5)..(6)..(38): Xaa is C or S
VPKAXXAPTKLSPINVLYFDSSNNVIYGKIPNMVVKAXG

SEQ ID NO: 42985 - protein, 24 aa, Artificial Sequence
  Cyclic GFR-binding peptide
LSPINILYFDAANNVVYGKIPDMV

SEQ ID NO: 42986 - protein, 34 aa, Artificial Sequence
  Cyclic GFR-binding peptide
  MOD_RES (1)..(2)..(34): Xaa is C or S
XXAPTKLSPINVLYFDDSSNVIYGKIPNMVVRSX

SEQ ID NO: 42987 - protein, 37 aa, Artificial Sequence
  Cyclic GFR-binding peptide
  MOD_RES (4)..(5)..(37): Xaa is C or S
PKAXXAPTKLSPINVLYFDSSNNVIYGKIPNMVVKAX

SEQ ID NO: 42988 - protein, 38 aa, Artificial Sequence
  Cyclic GFR-binding peptide
  MOD_RES (3)..(4)..(37): Xaa is C or S
KAXXVPTKLSPINVLYFDDMGVPTYGKIPEGMSVAEXG

SEQ ID NO: 42989 - protein, 32 aa, Artificial Sequence
  Cyclic GFR-binding peptide
  MOD_RES (31)..(31): Xaa is C or S
PTKLSPINVLYFDDSSNVIYGKIPNMVVRSXG

SEQ ID NO: 42990 - protein, 29 aa, Artificial Sequence
  Cyclic GFR-binding peptide
PTRLSPINILYFDSANNVVYGKIPDMVVE

SEQ ID NO: 42991 - protein, 38 aa, Artificial Sequence
  Cyclic GFR-binding peptide
  MOD_RES (3)..(4)..(36)..(38): Xaa is C or S
KPXXAPTKLSPINVLYFDDSSNVIYGKIPNMVVRSXGX

SEQ ID NO: 42992 - protein, 28 aa, Artificial Sequence
  Cyclic GFR-binding peptide
  MOD_RES (1)..(1): Xaa is C or S
XVPTRLSPINILYFDSANNVVYGKIPDM

SEQ ID NO: 42993 - protein, 31 aa, Artificial Sequence
  Cyclic GFR-binding peptide
VPTELSPINMLYFDENEKVVYGKIPDMVVEG

SEQ ID NO: 42994 - protein, 33 aa, Artificial Sequence
  Cyclic GFR-binding peptide
  MOD_RES (3)..(4): Xaa is C or S
PTXXVPTRLSPINILYFDSANNVVYGKIPDMVV

SEQ ID NO: 42995 - protein, 32 aa, Artificial Sequence
  Cyclic GFR-binding peptide
  MOD_RES (29)..(31): Xaa is C or S
VKTSPINMLYFDNGRVLLYGKIPMIVEEXGXL

SEQ ID NO: 42996 - protein, 33 aa, Artificial Sequence
  Cyclic GFR-binding peptide
  MOD_RES (1)..(33): Xaa is C or S
XVPARLSPINILYFDAANNVVYGKIPDMVVEAX

SEQ ID NO: 42997 - protein, 35 aa, Artificial Sequence
  Cyclic GFR-binding peptide
  MOD_RES (4)..(4): Xaa is C or S
KPTXAPTKLSPINVLYFDDSSNVIYGKIPNMVVRS

SEQ ID NO: 42998 - protein, 40 aa, Artificial Sequence
  Cyclic GFR-binding peptide
  MOD_RES (4)..(5)..(37)..(39): Xaa is C or S
PKPXXAPTKLSPINVLYFDDSSNVIYGKIPNMVVRSXGXH

SEQ ID NO: 42999 - protein, 21 aa, Artificial Sequence
  Cyclic GFR-binding peptide
SPINILYFDKGVVTYYGKIPG

SEQ ID NO: 43000 - protein, 28 aa, Artificial Sequence
  Cyclic GFR-binding peptide
VPTRLSPINILYFDSANNVVYGKIPDMV

SEQ ID NO: 43001 - protein, 24 aa, Artificial Sequence
  Cyclic GFR-binding peptide
ELSPINMLYFDENEKVVYGKIPDM

SEQ ID NO: 43002 - protein, 26 aa, Artificial Sequence
  Cyclic GFR-binding peptide
SPINILYFDKGVVTYYGKIPGMAVSE

SEQ ID NO: 43003 - protein, 26 aa, Artificial Sequence
  Cyclic GFR-binding peptide
  MOD_RES (1)..(1): Xaa is C or S
XVPTELSPINMLYFDEYDKVVYGKIP

SEQ ID NO: 43004 - protein, 33 aa, Artificial Sequence
  Cyclic GFR-binding peptide
  MOD_RES (4)..(5): Xaa is C or S
GKAXXVPTKLSPINVLYFDDMGVPTYGKIPEGM

SEQ ID NO: 43005 - protein, 26 aa, Artificial Sequence
  Cyclic GFR-binding peptide
PTKLSPINILYFDKGVVTYYGKIPGM

SEQ ID NO: 43006 - protein, 28 aa, Artificial Sequence
  Cyclic GFR-binding peptide
TKLSPINVLYFDDSSNVIYGKIPNMVVR

SEQ ID NO: 43007 - protein, 28 aa, Artificial Sequence
  Cyclic GFR-binding peptide
  MOD_RES (27)..(27): Xaa is C or S
SPINVLYFDDSSNVIYGKIPNMVVRAXG

SEQ ID NO: 43008 - protein, 26 aa, Artificial Sequence
  Cyclic GFR-binding peptide
SPINILYFDSANNVVYGKIPDMVVES

SEQ ID NO: 43009 - protein, 34 aa, Artificial Sequence
  Cyclic GFR-binding peptide
  MOD_RES (31)..(33): Xaa is C or S
TKLSPINVLYFDDMGVPTYGKIPEGMSVAEXGXR

SEQ ID NO: 43010 - protein, 23 aa, Artificial Sequence
  Cyclic GFR-binding peptide
TKLSPINILYFDKGVVTYYGKIP

SEQ ID NO: 43011 - protein, 29 aa, Artificial Sequence
  Cyclic GFR-binding peptide
  MOD_RES (1)..(1): Xaa is C or S
XVPTELSPINMLYFDENEKVVYGKIPDMV

SEQ ID NO: 43012 - protein, 30 aa, Artificial Sequence
  Cyclic GFR-binding peptide
  MOD_RES (2)..(3): Xaa is C or S
TXXAPVKTSPINMLYFDNGRVLLYGKIPMI

SEQ ID NO: 43013 - protein, 33 aa, Artificial Sequence
  Cyclic GFR-binding peptide
  MOD_RES (31)..(33): Xaa is C or S
PTKLSPINVLYFDSSNNVIYGKIPNMVVKAXGX

SEQ ID NO: 43014 - protein, 24 aa, Artificial Sequence
  Cyclic GFR-binding peptide
KLSPINVLYFDDSSNVIYGKIPNM

SEQ ID NO: 43015 - protein, 30 aa, Artificial Sequence
  Cyclic GFR-binding peptide
  MOD_RES (30)..(30): Xaa is C or S
TELSPINMLYFDENEKVVYGKIPDMVVEGX

SEQ ID NO: 43016 - protein, 25 aa, Artificial Sequence
  Cyclic GFR-binding peptide
PTKLSPINVLYFDSSNNVIYGKIPN

SEQ ID NO: 43017 - protein, 30 aa, Artificial Sequence
  Cyclic GFR-binding peptide
  MOD_RES (2)..(2): Xaa is C or S
TXAPTKLSPINVLYFDDSSNVIYGKIPNMV

SEQ ID NO: 43018 - protein, 33 aa, Artificial Sequence
  Cyclic GFR-binding peptide
  MOD_RES (1)..(2): Xaa is C or S
XXVPTKLSPINVLYFDDMGVPTYGKIPEGMSVA

SEQ ID NO: 43019 - protein, 36 aa, Artificial Sequence
  Cyclic GFR-binding peptide
  MOD_RES (4)..(5): Xaa is C or S
SKAXXVPTKLSPINILYFDKGVVTYYGKIPGMAVSE

SEQ ID NO: 43020 - protein, 28 aa, Artificial Sequence
  Cyclic GFR-binding peptide
TKLSPINVLYFDDMGVPTYGKIPEGMSV

SEQ ID NO: 43021 - protein, 25 aa, Artificial Sequence
  Cyclic GFR-binding peptide
PARLSPINILYFDAANNVVYGKIPD

SEQ ID NO: 43022 - protein, 42 aa, Artificial Sequence
  Cyclic GFR-binding peptide
  MOD_RES (6)..(7)..(39)..(41): Xaa is C or S
HVPKPXXAPTKLSPINVLYFDDSSNVIYGKIPNMVVRSXGXH

SEQ ID NO: 43023 - protein, 28 aa, Artificial Sequence
  Cyclic GFR-binding peptide
KLSPINVLYFDSSNNVIYGKIPNMVVKA

SEQ ID NO: 43024 - protein, 27 aa, Artificial Sequence
  Cyclic GFR-binding peptide
  MOD_RES (1)..(1): Xaa is C or S
XAPTKLSPINVLYFDSSNNVIYGKIPN

SEQ ID NO: 43025 - protein, 35 aa, Artificial Sequence
  Cyclic GFR-binding peptide
  MOD_RES (1)..(33)..(35): Xaa is C or S
XAPTKLSPINVLYFDDSSNVIYGKIPNMVVRSXGX

SEQ ID NO: 43026 - protein, 36 aa, Artificial Sequence
  Cyclic GFR-binding peptide
  MOD_RES (1)..(2)..(35): Xaa is C or S
XXVPTKLSPINVLYFDDMGVPTYGKIPEGMSVAEXG

SEQ ID NO: 43027 - protein, 30 aa, Artificial Sequence
  Cyclic GFR-binding peptide
  MOD_RES (29)..(29): Xaa is C or S
LSPINVLYFDDMGVPTYGKIPEGMSVAEXG

SEQ ID NO: 43028 - protein, 22 aa, Artificial Sequence
  Cyclic GFR-binding peptide
KLSPINVLYFDSSNNVIYGKIP

SEQ ID NO: 43029 - protein, 26 aa, Artificial Sequence
  Cyclic GFR-binding peptide
TELSPINMLYFDEYDKVVYGKIPEMV

SEQ ID NO: 43030 - protein, 37 aa, Artificial Sequence
  Cyclic GFR-binding peptide
  MOD_RES (4)..(5)..(37): Xaa is C or S
PKAXXVPTELSPINMLYFDEYDKVVYGKIPEMVVEGX

SEQ ID NO: 43031 - protein, 37 aa, Artificial Sequence
  Cyclic GFR-binding peptide
  MOD_RES (4)..(5)..(37): Xaa is C or S
SKAXXVPTKLSPINILYFDKGVVTYYGKIPGMAVSEX

SEQ ID NO: 43032 - protein, 29 aa, Artificial Sequence
  Cyclic GFR-binding peptide
  MOD_RES (27)..(29): Xaa is C or S
TSPINMLYFDNGRVLLYGKIPMIVEEXGX

SEQ ID NO: 43033 - protein, 33 aa, Artificial Sequence
  Cyclic GFR-binding peptide
  MOD_RES (7)..(7): Xaa is C or S
HVTKPTXAPTKLSPINVLYFDDSSNVIYGKIPN

SEQ ID NO: 43034 - protein, 32 aa, Artificial Sequence
  Cyclic GFR-binding peptide
  MOD_RES (32)..(32): Xaa is C or S
VPTKLSPINILYFDKGVVTYYGKIPGMAVSEX

SEQ ID NO: 43035 - protein, 33 aa, Artificial Sequence
  Cyclic GFR-binding peptide
  MOD_RES (32)..(32): Xaa is C or S
APTQLSPINVLYFDDSSNVIYGKIPNMVVRAXG

SEQ ID NO: 43036 - protein, 21 aa, Artificial Sequence
  Cyclic GFR-binding peptide
LSPINVLYFDSSNNVIYGKIP

SEQ ID NO: 43037 - protein, 31 aa, Artificial Sequence
  Cyclic GFR-binding peptide
  MOD_RES (1)..(1): Xaa is C or S
XVPTELSPINMLYFDEYDKVVYGKIPEMVVE

SEQ ID NO: 43038 - protein, 31 aa, Artificial Sequence
  Cyclic GFR-binding peptide
  MOD_RES (5)..(6): Xaa is C or S
APASXXVPARLSPINILYFDAANNVVYGKIP

SEQ ID NO: 43039 - protein, 30 aa, Artificial Sequence
  Cyclic GFR-binding peptide
  MOD_RES (2)..(3): Xaa is C or S
TXXVPTRLSPINILYFDSANNVVYGKIPDM

SEQ ID NO: 43040 - protein, 30 aa, Artificial Sequence
  Cyclic GFR-binding peptide
  MOD_RES (1)..(2): Xaa is C or S
XXVPTRLSPINILYFDSANNVVYGKIPDMV

SEQ ID NO: 43041 - protein, 34 aa, Artificial Sequence
  Cyclic GFR-binding peptide
  MOD_RES (6)..(7): Xaa is C or S
KVGKAXXVPTKLSPINVLYFDDMGVPTYGKIPEG

SEQ ID NO: 43042 - protein, 24 aa, Artificial Sequence
  Cyclic GFR-binding peptide
RLSPINILYFDAANNVVYGKIPDM

SEQ ID NO: 43043 - protein, 39 aa, Artificial Sequence
  Cyclic GFR-binding peptide
  MOD_RES (5)..(6)..(38): Xaa is C or S
IPKAXXVPTELSPINMLYFDENEKVVYGKIPDMVVEGXG

SEQ ID NO: 43044 - protein, 31 aa, Artificial Sequence
  Cyclic GFR-binding peptide
  MOD_RES (1)..(2): Xaa is C or S
XXVPTRLSPINILYFDSANNVVYGKIPDMVV

SEQ ID NO: 43045 - protein, 33 aa, Artificial Sequence
  Cyclic GFR-binding peptide
  MOD_RES (32)..(32): Xaa is C or S
VPTKLSPINILYFDKGVVTYYGKIPGMAVSEXG

SEQ ID NO: 43046 - protein, 32 aa, Artificial Sequence
  Cyclic GFR-binding peptide
  MOD_RES (4)..(5): Xaa is C or S
PKAXXVPTELSPINMLYFDENEKVVYGKIPDM

SEQ ID NO: 43047 - protein, 31 aa, Artificial Sequence
  Cyclic GFR-binding peptide
  MOD_RES (2)..(3): Xaa is C or S
TXXAPVKTSPINMLYFDNGRVLLYGKIPMIV

SEQ ID NO: 43048 - protein, 27 aa, Artificial Sequence
  Cyclic GFR-binding peptide
LSPINVLYFDSSNNVIYGKIPNMVVKA

SEQ ID NO: 43049 - protein, 42 aa, Artificial Sequence
  Cyclic GFR-binding peptide
  MOD_RES (6)..(7)..(39)..(41): Xaa is C or S
KIPKAXXVPTELSPINMLYFDENEKVVYGKIPDMVVEGXGXR

SEQ ID NO: 43050 - protein, 35 aa, Artificial Sequence
  Cyclic GFR-binding peptide
  MOD_RES (3)..(4): Xaa is C or S
KPXXAPTKLSPINVLYFDDSSNVIYGKIPNMVVRS

SEQ ID NO: 43051 - protein, 29 aa, Artificial Sequence
  Cyclic GFR-binding peptide
PTKLSPINILYFDKGVVTYYGKIPGMAVS

SEQ ID NO: 43052 - protein, 38 aa, Artificial Sequence
  Cyclic GFR-binding peptide
  MOD_RES (4)..(36)..(38): Xaa is C or S
KPTXAPTKLSPINVLYFDDSSNVIYGKIPNMVVRSXGX

SEQ ID NO: 43053 - protein, 32 aa, Artificial Sequence
  Cyclic GFR-binding peptide
  MOD_RES (30)..(32): Xaa is C or S
TKLSPINVLYFDDSSNVIYGKIPNMVVRSXGX

SEQ ID NO: 43054 - protein, 33 aa, Artificial Sequence
  Cyclic GFR-binding peptide
  MOD_RES (1)..(2): Xaa is C or S
XXVPTRLSPINILYFDSANNVVYGKIPDMVVES

SEQ ID NO: 43055 - protein, 38 aa, Artificial Sequence
  Cyclic GFR-binding peptide
  MOD_RES (6)..(7): Xaa is C or S
STPPTXXVPTRLSPINILYFDSANNVVYGKIPDMVVES

SEQ ID NO: 43056 - protein, 33 aa, Artificial Sequence
  Cyclic GFR-binding peptide
  MOD_RES (5)..(6): Xaa is C or S
VPKAXXAPTKLSPINVLYFDSSNNVIYGKIPNM

SEQ ID NO: 43057 - protein, 31 aa, Artificial Sequence
  Cyclic GFR-binding peptide
  MOD_RES (30)..(30): Xaa is C or S
TRLSPINILYFDSANNVVYGKIPDMVVESXG

SEQ ID NO: 43058 - protein, 20 aa, Artificial Sequence
  Cyclic GFR-binding peptide
SPINVLYFDSSNNVIYGKIP

SEQ ID NO: 43059 - protein, 39 aa, Artificial Sequence
  Cyclic GFR-binding peptide
  MOD_RES (4)..(5)..(37)..(39): Xaa is C or S
PKPXXAPTQLSPINVLYFDDSSNVIYGKIPNMVVRAXGX

SEQ ID NO: 43060 - protein, 31 aa, Artificial Sequence
  Cyclic GFR-binding peptide
  MOD_RES (1)..(1): Xaa is C or S
XVPARLSPINILYFDAANNVVYGKIPDMVVE

SEQ ID NO: 43061 - protein, 38 aa, Artificial Sequence
  Cyclic GFR-binding peptide
  MOD_RES (5)..(6)..(38): Xaa is C or S
VPKAXXAPTKLSPINVLYFDSSNNVIYGKIPNMVVKAX

SEQ ID NO: 43062 - protein, 38 aa, Artificial Sequence
  Cyclic GFR-binding peptide
  MOD_RES (1)..(2)..(35)..(37): Xaa is C or S
XXVPTKLSPINVLYFDDMGVPTYGKIPEGMSVAEXGXR

SEQ ID NO: 43063 - protein, 37 aa, Artificial Sequence
  Cyclic GFR-binding peptide
  MOD_RES (3)..(4)..(36): Xaa is C or S
KPXXAPTKLSPINVLYFDDSSNVIYGKIPNMVVRSXG

SEQ ID NO: 43064 - protein, 32 aa, Artificial Sequence
  Cyclic GFR-binding peptide
  MOD_RES (3)..(4): Xaa is C or S
KAXXAPTKLSPINVLYFDSSNNVIYGKIPNMV

SEQ ID NO: 43065 - protein, 30 aa, Artificial Sequence
  Cyclic GFR-binding peptide
  MOD_RES (30)..(30): Xaa is C or S
TELSPINMLYFDEYDKVVYGKIPEMVVEGX

SEQ ID NO: 43066 - protein, 30 aa, Artificial Sequence
  Cyclic GFR-binding peptide
VPARLSPINILYFDAANNVVYGKIPDMVVE

SEQ ID NO: 43067 - protein, 31 aa, Artificial Sequence
  Cyclic GFR-binding peptide
  MOD_RES (29)..(31): Xaa is C or S
RLSPINILYFDAANNVVYGKIPDMVVEAXGX

SEQ ID NO: 43068 - protein, 33 aa, Artificial Sequence
  Cyclic GFR-binding peptide
  MOD_RES (30)..(32): Xaa is C or S
TELSPINMLYFDEYDKVVYGKIPEMVVEGXGXR

SEQ ID NO: 43069 - protein, 34 aa, Artificial Sequence
  Cyclic GFR-binding peptide
  MOD_RES (31)..(33): Xaa is C or S
PTKLSPINVLYFDDSSNVIYGKIPNMVVRSXGXH

SEQ ID NO: 43070 - protein, 28 aa, Artificial Sequence
  Cyclic GFR-binding peptide
APTKLSPINVLYFDSSNNVIYGKIPNMV

SEQ ID NO: 43071 - protein, 29 aa, Artificial Sequence
  Cyclic GFR-binding peptide
  MOD_RES (28)..(28): Xaa is C or S
LSPINMLYFDENEKVVYGKIPDMVVEGXG

SEQ ID NO: 43072 - protein, 31 aa, Artificial Sequence
  Cyclic GFR-binding peptide
  MOD_RES (1)..(1): Xaa is C or S
XVPTELSPINMLYFDENEKVVYGKIPDMVVE

SEQ ID NO: 43073 - protein, 39 aa, Artificial Sequence
  Cyclic GFR-binding peptide
  MOD_RES (6)..(7)..(38): Xaa is C or S
RVPSTXXAPVKTSPINMLYFDNGRVLLYGKIPMIVEEXG

SEQ ID NO: 43074 - protein, 31 aa, Artificial Sequence
  Cyclic GFR-binding peptide
  MOD_RES (1)..(1): Xaa is C or S
XVPTKLSPINVLYFDDMGVPTYGKIPEGMSV

SEQ ID NO: 43075 - protein, 35 aa, Artificial Sequence
  Cyclic GFR-binding peptide
  MOD_RES (1)..(33)..(35): Xaa is C or S
XVPTRLSPINILYFDSANNVVYGKIPDMVVESXGX

SEQ ID NO: 43076 - protein, 29 aa, Artificial Sequence
  Cyclic GFR-binding peptide
  MOD_RES (1)..(2): Xaa is C or S
XXVPARLSPINILYFDAANNVVYGKIPDM

SEQ ID NO: 43077 - protein, 34 aa, Artificial Sequence
  Cyclic GFR-binding peptide
  MOD_RES (6)..(7): Xaa is C or S
RVPSTXXAPVKTSPINMLYFDNGRVLLYGKIPMI

SEQ ID NO: 43078 - protein, 33 aa, Artificial Sequence
  Cyclic GFR-binding peptide
  MOD_RES (30)..(32): Xaa is C or S
TRLSPINILYFDSANNVVYGKIPDMVVESXGXR

SEQ ID NO: 43079 - protein, 30 aa, Artificial Sequence
  Cyclic GFR-binding peptide
  MOD_RES (3)..(4): Xaa is C or S
ASXXVPARLSPINILYFDAANNVVYGKIPD

SEQ ID NO: 43080 - protein, 32 aa, Artificial Sequence
  Cyclic GFR-binding peptide
  MOD_RES (2)..(3): Xaa is C or S
TXXVPTRLSPINILYFDSANNVVYGKIPDMVV

SEQ ID NO: 43081 - protein, 32 aa, Artificial Sequence
  Cyclic GFR-binding peptide
  MOD_RES (31)..(31): Xaa is C or S
PARLSPINILYFDAANNVVYGKIPDMVVEAXG

SEQ ID NO: 43082 - protein, 34 aa, Artificial Sequence
  Cyclic GFR-binding peptide
  MOD_RES (3)..(4): Xaa is C or S
ASXXVPARLSPINILYFDAANNVVYGKIPDMVVE

SEQ ID NO: 43083 - protein, 30 aa, Artificial Sequence
  Cyclic GFR-binding peptide
  MOD_RES (30)..(30): Xaa is C or S
TQLSPINVLYFDDSSNVIYGKIPNMVVRAX

SEQ ID NO: 43084 - protein, 30 aa, Artificial Sequence
  Cyclic GFR-binding peptide
  MOD_RES (4)..(5): Xaa is C or S
PASXXVPARLSPINILYFDAANNVVYGKIP

SEQ ID NO: 43085 - protein, 24 aa, Artificial Sequence
  Cyclic GFR-binding peptide
TRLSPINILYFDSANNVVYGKIPD

SEQ ID NO: 43086 - protein, 32 aa, Artificial Sequence
  Cyclic GFR-binding peptide
  MOD_RES (5)..(6): Xaa is C or S
VPKAXXAPTKLSPINVLYFDSSNNVIYGKIPN

SEQ ID NO: 43087 - protein, 34 aa, Artificial Sequence
  Cyclic GFR-binding peptide
  MOD_RES (4)..(4): Xaa is C or S
KPTXAPTKLSPINVLYFDDSSNVIYGKIPNMVVR

SEQ ID NO: 43088 - protein, 36 aa, Artificial Sequence
  Cyclic GFR-binding peptide
  MOD_RES (3)..(4)..(36): Xaa is C or S
KAXXAPTKLSPINVLYFDSSNNVIYGKIPNMVVKAX

SEQ ID NO: 43089 - protein, 34 aa, Artificial Sequence
  Cyclic GFR-binding peptide
  MOD_RES (31)..(33): Xaa is C or S
PTKLSPINILYFDKGVVTYYGKIPGMAVSEXGXR

SEQ ID NO: 43090 - protein, 32 aa, Artificial Sequence
  Cyclic GFR-binding peptide
  MOD_RES (4)..(5): Xaa is C or S
PKPXXAPTQLSPINVLYFDDSSNVIYGKIPNM

SEQ ID NO: 43091 - protein, 32 aa, Artificial Sequence
  Cyclic GFR-binding peptide
  MOD_RES (29)..(31): Xaa is C or S
RLSPINILYFDSANNVVYGKIPDMVVESXGXR

SEQ ID NO: 43092 - protein, 34 aa, Artificial Sequence
  Cyclic GFR-binding peptide
  MOD_RES (4)..(5): Xaa is C or S
PKPXXAPTQLSPINVLYFDDSSNVIYGKIPNMVV

SEQ ID NO: 43093 - protein, 29 aa, Artificial Sequence
  Cyclic GFR-binding peptide
  MOD_RES (29)..(29): Xaa is C or S
KLSPINVLYFDDSSNVIYGKIPNMVVRSX

SEQ ID NO: 43094 - protein, 31 aa, Artificial Sequence
  Cyclic GFR-binding peptide
  MOD_RES (28)..(30): Xaa is C or S
LSPINMLYFDEYDKVVYGKIPEMVVEGXGXR

SEQ ID NO: 43095 - protein, 28 aa, Artificial Sequence
  Cyclic GFR-binding peptide
  MOD_RES (2)..(3): Xaa is C or S
AXXVPTELSPINMLYFDENEKVVYGKIP

SEQ ID NO: 43096 - protein, 24 aa, Artificial Sequence
  Cyclic GFR-binding peptide
SPINVLYFDSSNNVIYGKIPNMVV

SEQ ID NO: 43097 - protein, 36 aa, Artificial Sequence
  Cyclic GFR-binding peptide
  MOD_RES (4)..(5): Xaa is C or S
PKAXXVPTELSPINMLYFDEYDKVVYGKIPEMVVEG

SEQ ID NO: 43098 - protein, 26 aa, Artificial Sequence
  Cyclic GFR-binding peptide
SPINMLYFDEYDKVVYGKIPEMVVEG

SEQ ID NO: 43099 - protein, 36 aa, Artificial Sequence
  Cyclic GFR-binding peptide
  MOD_RES (3)..(4)..(36): Xaa is C or S
KPXXAPTKLSPINVLYFDDSSNVIYGKIPNMVVRSX

SEQ ID NO: 43100 - protein, 29 aa, Artificial Sequence
  Cyclic GFR-binding peptide
  MOD_RES (2)..(3): Xaa is C or S
PXXAPTQLSPINVLYFDDSSNVIYGKIPN

SEQ ID NO: 43101 - protein, 28 aa, Artificial Sequence
  Cyclic GFR-binding peptide
VPTELSPINMLYFDENEKVVYGKIPDMV

SEQ ID NO: 43102 - protein, 30 aa, Artificial Sequence
  Cyclic GFR-binding peptide
PTKLSPINVLYFDSSNNVIYGKIPNMVVKA

SEQ ID NO: 43103 - protein, 29 aa, Artificial Sequence
  Cyclic GFR-binding peptide
  MOD_RES (29)..(29): Xaa is C or S
RLSPINILYFDAANNVVYGKIPDMVVEAX

SEQ ID NO: 43104 - protein, 37 aa, Artificial Sequence
  Cyclic GFR-binding peptide
  MOD_RES (7)..(7): Xaa is C or S
HVTKPTXAPTKLSPINVLYFDDSSNVIYGKIPNMVVR

SEQ ID NO: 43105 - protein, 27 aa, Artificial Sequence
  Cyclic GFR-binding peptide
PTRLSPINILYFDSANNVVYGKIPDMV

SEQ ID NO: 43106 - protein, 38 aa, Artificial Sequence
  Cyclic GFR-binding peptide
  MOD_RES (5)..(6)..(38): Xaa is C or S
IPKAXXVPTELSPINMLYFDENEKVVYGKIPDMVVEGX

SEQ ID NO: 43107 - protein, 30 aa, Artificial Sequence
  Cyclic GFR-binding peptide
  MOD_RES (1)..(2): Xaa is C or S
XXAPTKLSPINVLYFDDSSNVIYGKIPNMV

SEQ ID NO: 43108 - protein, 23 aa, Artificial Sequence
  Cyclic GFR-binding peptide
QLSPINVLYFDDSSNVIYGKIPN

SEQ ID NO: 43109 - protein, 29 aa, Artificial Sequence
  Cyclic GFR-binding peptide
APTQLSPINVLYFDDSSNVIYGKIPNMVV

SEQ ID NO: 43110 - protein, 38 aa, Artificial Sequence
  Cyclic GFR-binding peptide
  MOD_RES (2)..(3)..(35)..(37): Xaa is C or S
PXXAPTQLSPINVLYFDDSSNVIYGKIPNMVVRAXGXH

SEQ ID NO: 43111 - protein, 41 aa, Artificial Sequence
  Cyclic GFR-binding peptide
  MOD_RES (5)..(6)..(38)..(40): Xaa is C or S
VPKPXXAPTQLSPINVLYFDDSSNVIYGKIPNMVVRAXGXH

SEQ ID NO: 43112 - protein, 25 aa, Artificial Sequence
  Cyclic GFR-binding peptide
VPTRLSPINILYFDSANNVVYGKIP

SEQ ID NO: 43113 - protein, 35 aa, Artificial Sequence
  Cyclic GFR-binding peptide
  MOD_RES (6)..(7): Xaa is C or S
SIPKAXXVPTELSPINMLYFDEYDKVVYGKIPEMV

SEQ ID NO: 43114 - protein, 35 aa, Artificial Sequence
  Cyclic GFR-binding peptide
  MOD_RES (1)..(2)..(34): Xaa is C or S
XXVPTELSPINMLYFDEYDKVVYGKIPEMVVEGXG

SEQ ID NO: 43115 - protein, 31 aa, Artificial Sequence
  Cyclic GFR-binding peptide
  MOD_RES (31)..(31): Xaa is C or S
PTRLSPINILYFDSANNVVYGKIPDMVVESX

SEQ ID NO: 43116 - protein, 21 aa, Artificial Sequence
  Cyclic GFR-binding peptide
LSPINILYFDKGVVTYYGKIP

SEQ ID NO: 43117 - protein, 32 aa, Artificial Sequence
  Cyclic GFR-binding peptide
  MOD_RES (5)..(5): Xaa is C or S
TKPTXAPTKLSPINVLYFDDSSNVIYGKIPNM

SEQ ID NO: 43118 - protein, 33 aa, Artificial Sequence
  Cyclic GFR-binding peptide
  MOD_RES (33)..(33): Xaa is C or S
VPTKLSPINVLYFDDMGVPTYGKIPEGMSVAEX

SEQ ID NO: 43119 - protein, 31 aa, Artificial Sequence
  Cyclic GFR-binding peptide
  MOD_RES (2)..(2): Xaa is C or S
TXAPTKLSPINVLYFDDSSNVIYGKIPNMVV

SEQ ID NO: 43120 - protein, 29 aa, Artificial Sequence
  Cyclic GFR-binding peptide
  MOD_RES (3)..(4): Xaa is C or S
KAXXAPTKLSPINVLYFDSSNNVIYGKIP

SEQ ID NO: 43121 - protein, 27 aa, Artificial Sequence
  Cyclic GFR-binding peptide
PTELSPINMLYFDENEKVVYGKIPDMV

SEQ ID NO: 43122 - protein, 29 aa, Artificial Sequence
  Cyclic GFR-binding peptide
VPTELSPINMLYFDENEKVVYGKIPDMVV

SEQ ID NO: 43123 - protein, 36 aa, Artificial Sequence
  Cyclic GFR-binding peptide
  MOD_RES (6)..(7): Xaa is C or S
HVPKPXXAPTKLSPINVLYFDDSSNVIYGKIPNMVV

SEQ ID NO: 43124 - protein, 31 aa, Artificial Sequence
  Cyclic GFR-binding peptide
  MOD_RES (4)..(5): Xaa is C or S
PKAXXVPTELSPINMLYFDEYDKVVYGKIPE

SEQ ID NO: 43125 - protein, 29 aa, Artificial Sequence
  Cyclic GFR-binding peptide
TKLSPINVLYFDSSNNVIYGKIPNMVVKA

SEQ ID NO: 43126 - protein, 29 aa, Artificial Sequence
  Cyclic GFR-binding peptide
  MOD_RES (1)..(1): Xaa is C or S
XVPARLSPINILYFDAANNVVYGKIPDMV

SEQ ID NO: 43127 - protein, 31 aa, Artificial Sequence
  Cyclic GFR-binding peptide
  MOD_RES (3)..(4): Xaa is C or S
STXXAPVKTSPINMLYFDNGRVLLYGKIPMI

SEQ ID NO: 43128 - protein, 34 aa, Artificial Sequence
  Cyclic GFR-binding peptide
  MOD_RES (1)..(34): Xaa is C or S
XVPTKLSPINVLYFDDMGVPTYGKIPEGMSVAEX

SEQ ID NO: 43129 - protein, 25 aa, Artificial Sequence
  Cyclic GFR-binding peptide
LSPINMLYFDENEKVVYGKIPDMVV

SEQ ID NO: 43130 - protein, 24 aa, Artificial Sequence
  Cyclic GFR-binding peptide
KLSPINVLYFDDMGVPTYGKIPEG

SEQ ID NO: 43131 - protein, 34 aa, Artificial Sequence
  Cyclic GFR-binding peptide
  MOD_RES (5)..(6): Xaa is C or S
IPKAXXVPTELSPINMLYFDEYDKVVYGKIPEMV

SEQ ID NO: 43132 - protein, 39 aa, Artificial Sequence
  Cyclic GFR-binding peptide
  MOD_RES (6)..(7)..(39): Xaa is C or S
KASKAXXVPTKLSPINILYFDKGVVTYYGKIPGMAVSEX

SEQ ID NO: 43133 - protein, 22 aa, Artificial Sequence
  Cyclic GFR-binding peptide
ELSPINMLYFDENEKVVYGKIP

SEQ ID NO: 43134 - protein, 32 aa, Artificial Sequence
  Cyclic GFR-binding peptide
  MOD_RES (6)..(7): Xaa is C or S
KVGKAXXVPTKLSPINVLYFDDMGVPTYGKIP

SEQ ID NO: 43135 - protein, 38 aa, Artificial Sequence
  Cyclic GFR-binding peptide
  MOD_RES (6)..(7): Xaa is C or S
KVGKAXXVPTKLSPINVLYFDDMGVPTYGKIPEGMSVA

SEQ ID NO: 43136 - protein, 33 aa, Artificial Sequence
  Cyclic GFR-binding peptide
  MOD_RES (32)..(32): Xaa is C or S
VPTELSPINMLYFDENEKVVYGKIPDMVVEGXG

SEQ ID NO: 43137 - protein, 34 aa, Artificial Sequence
  Cyclic GFR-binding peptide
  MOD_RES (1)..(33): Xaa is C or S
XVPTELSPINMLYFDEYDKVVYGKIPEMVVEGXG

SEQ ID NO: 43138 - protein, 30 aa, Artificial Sequence
  Cyclic GFR-binding peptide
  MOD_RES (29)..(29): Xaa is C or S
RLSPINILYFDAANNVVYGKIPDMVVEAXG

SEQ ID NO: 43139 - protein, 23 aa, Artificial Sequence
  Cyclic GFR-binding peptide
ARLSPINILYFDAANNVVYGKIP

SEQ ID NO: 43140 - protein, 27 aa, Artificial Sequence
  Cyclic GFR-binding peptide
  MOD_RES (27)..(27): Xaa is C or S
SPINILYFDAANNVVYGKIPDMVVEAX

SEQ ID NO: 43141 - protein, 29 aa, Artificial Sequence
  Cyclic GFR-binding peptide
APTKLSPINVLYFDDSSNVIYGKIPNMVV

SEQ ID NO: 43142 - protein, 29 aa, Artificial Sequence
  Cyclic GFR-binding peptide
  MOD_RES (26)..(28): Xaa is C or S
SPINMLYFDNGRVLLYGKIPMIVEEXGXL

SEQ ID NO: 43143 - protein, 30 aa, Artificial Sequence
  Cyclic GFR-binding peptide
  MOD_RES (27)..(29): Xaa is C or S
SPINVLYFDDSSNVIYGKIPNMVVRAXGXH

SEQ ID NO: 43144 - protein, 31 aa, Artificial Sequence
  Cyclic GFR-binding peptide
  MOD_RES (4)..(5): Xaa is C or S
PSTXXAPVKTSPINMLYFDNGRVLLYGKIPM

SEQ ID NO: 43145 - protein, 33 aa, Artificial Sequence
  Cyclic GFR-binding peptide
  MOD_RES (6)..(7): Xaa is C or S
KASKAXXVPTKLSPINILYFDKGVVTYYGKIPG

SEQ ID NO: 43146 - protein, 33 aa, Artificial Sequence
  Cyclic GFR-binding peptide
  MOD_RES (5)..(6): Xaa is C or S
TPPTXXVPTRLSPINILYFDSANNVVYGKIPDM

SEQ ID NO: 43147 - protein, 37 aa, Artificial Sequence
  Cyclic GFR-binding peptide
  MOD_RES (4)..(5)..(37): Xaa is C or S
PPTXXVPTRLSPINILYFDSANNVVYGKIPDMVVESX

SEQ ID NO: 43148 - protein, 26 aa, Artificial Sequence
  Cyclic GFR-binding peptide
  MOD_RES (1)..(1): Xaa is C or S
XVPARLSPINILYFDAANNVVYGKIP

SEQ ID NO: 43149 - protein, 31 aa, Artificial Sequence
  Cyclic GFR-binding peptide
  MOD_RES (1)..(2): Xaa is C or S
XXVPTKLSPINVLYFDDMGVPTYGKIPEGMS

SEQ ID NO: 43150 - protein, 23 aa, Artificial Sequence
  Cyclic GFR-binding peptide
RLSPINILYFDSANNVVYGKIPD

SEQ ID NO: 43151 - protein, 40 aa, Artificial Sequence
  Cyclic GFR-binding peptide
  MOD_RES (6)..(7)..(39): Xaa is C or S
HVPKPXXAPTKLSPINVLYFDDSSNVIYGKIPNMVVRSXG

SEQ ID NO: 43152 - protein, 33 aa, Artificial Sequence
  Cyclic GFR-binding peptide
  MOD_RES (31)..(33): Xaa is C or S
PTRLSPINILYFDSANNVVYGKIPDMVVESXGX

SEQ ID NO: 43153 - protein, 34 aa, Artificial Sequence
  Cyclic GFR-binding peptide
  MOD_RES (2)..(3): Xaa is C or S
PXXAPTKLSPINVLYFDDSSNVIYGKIPNMVVRS

SEQ ID NO: 43154 - protein, 37 aa, Artificial Sequence
  Cyclic GFR-binding peptide
  MOD_RES (6)..(6): Xaa is C or S
VTKPTXAPTKLSPINVLYFDDSSNVIYGKIPNMVVRS

SEQ ID NO: 43155 - protein, 34 aa, Artificial Sequence
  Cyclic GFR-binding peptide
  MOD_RES (32)..(34): Xaa is C or S
PTKLSPINVLYFDDMGVPTYGKIPEGMSVAEXGX

SEQ ID NO: 43156 - protein, 32 aa, Artificial Sequence
  Cyclic GFR-binding peptide
  MOD_RES (3)..(4): Xaa is C or S
KPXXAPTKLSPINVLYFDDSSNVIYGKIPNMV

SEQ ID NO: 43157 - protein, 31 aa, Artificial Sequence
  Cyclic GFR-binding peptide
  MOD_RES (5)..(6): Xaa is C or S
IPKAXXVPTELSPINMLYFDEYDKVVYGKIP

SEQ ID NO: 43158 - protein, 26 aa, Artificial Sequence
  Cyclic GFR-binding peptide
PTKLSPINVLYFDSSNNVIYGKIPNM

SEQ ID NO: 43159 - protein, 30 aa, Artificial Sequence
  Cyclic GFR-binding peptide
  MOD_RES (3)..(3): Xaa is C or S
PTXAPTKLSPINVLYFDDSSNVIYGKIPNM

SEQ ID NO: 43160 - protein, 35 aa, Artificial Sequence
  Cyclic GFR-binding peptide
  MOD_RES (6)..(7): Xaa is C or S
KASKAXXVPTKLSPINILYFDKGVVTYYGKIPGMA

SEQ ID NO: 43161 - protein, 25 aa, Artificial Sequence
  Cyclic GFR-binding peptide
VPTELSPINMLYFDENEKVVYGKIP

SEQ ID NO: 43162 - protein, 30 aa, Artificial Sequence
  Cyclic GFR-binding peptide
  MOD_RES (1)..(1): Xaa is C or S
XAPTQLSPINVLYFDDSSNVIYGKIPNMVV

SEQ ID NO: 43163 - protein, 32 aa, Artificial Sequence
  Cyclic GFR-binding peptide
  MOD_RES (3)..(4): Xaa is C or S
KAXXVPTKLSPINILYFDKGVVTYYGKIPGMA

SEQ ID NO: 43164 - protein, 30 aa, Artificial Sequence
  Cyclic GFR-binding peptide
  MOD_RES (29)..(29): Xaa is C or S
QLSPINVLYFDDSSNVIYGKIPNMVVRAXG

SEQ ID NO: 43165 - protein, 38 aa, Artificial Sequence
  Cyclic GFR-binding peptide
  MOD_RES (4)..(5)..(37): Xaa is C or S
PPTXXVPTRLSPINILYFDSANNVVYGKIPDMVVESXG

SEQ ID NO: 43166 - protein, 29 aa, Artificial Sequence
  Cyclic GFR-binding peptide
  MOD_RES (27)..(29): Xaa is C or S
SPINMLYFDEYDKVVYGKIPEMVVEGXGX

SEQ ID NO: 43167 - protein, 30 aa, Artificial Sequence
  Cyclic GFR-binding peptide
  MOD_RES (30)..(30): Xaa is C or S
ARLSPINILYFDAANNVVYGKIPDMVVEAX

SEQ ID NO: 43168 - protein, 31 aa, Artificial Sequence
  Cyclic GFR-binding peptide
APTQLSPINVLYFDDSSNVIYGKIPNMVVRA

SEQ ID NO: 43169 - protein, 33 aa, Artificial Sequence
  Cyclic GFR-binding peptide
  MOD_RES (4)..(5): Xaa is C or S
PKAXXAPTKLSPINVLYFDSSNNVIYGKIPNMV

SEQ ID NO: 43170 - protein, 29 aa, Artificial Sequence
  Cyclic GFR-binding peptide
  MOD_RES (28)..(28): Xaa is C or S
LSPINILYFDAANNVVYGKIPDMVVEAXG

SEQ ID NO: 43171 - protein, 39 aa, Artificial Sequence
  Cyclic GFR-binding peptide
  MOD_RES (6)..(7)..(39): Xaa is C or S
YVPKPXXAPTKLSPINVLYFDDSSNVIYGKIPNMVVRSX

SEQ ID NO: 43172 - protein, 36 aa, Artificial Sequence
  Cyclic GFR-binding peptide
  MOD_RES (6)..(7): Xaa is C or S
STPPTXXVPTRLSPINILYFDSANNVVYGKIPDMVV

SEQ ID NO: 43173 - protein, 39 aa, Artificial Sequence
  Cyclic GFR-binding peptide
  MOD_RES (3)..(4)..(36)..(38): Xaa is C or S
PTXXVPTRLSPINILYFDSANNVVYGKIPDMVVESXGXR

SEQ ID NO: 43174 - protein, 31 aa, Artificial Sequence
  Cyclic GFR-binding peptide
VPTKLSPINVLYFDDMGVPTYGKIPEGMSVA

SEQ ID NO: 43175 - protein, 27 aa, Artificial Sequence
  Cyclic GFR-binding peptide
  MOD_RES (1)..(1): Xaa is C or S
XVPARLSPINILYFDAANNVVYGKIPD

SEQ ID NO: 43176 - protein, 26 aa, Artificial Sequence
  Cyclic GFR-binding peptide
RLSPINILYFDSANNVVYGKIPDMVV

SEQ ID NO: 43177 - protein, 25 aa, Artificial Sequence
  Cyclic GFR-binding peptide
PTRLSPINILYFDSANNVVYGKIPD

SEQ ID NO: 43178 - protein, 34 aa, Artificial Sequence
  Cyclic GFR-binding peptide
  MOD_RES (6)..(7): Xaa is C or S
SIPKAXXVPTELSPINMLYFDEYDKVVYGKIPEM

SEQ ID NO: 43179 - protein, 33 aa, Artificial Sequence
  Cyclic GFR-binding peptide
  MOD_RES (6)..(7): Xaa is C or S
RVPSTXXAPVKTSPINMLYFDNGRVLLYGKIPM

SEQ ID NO: 43180 - protein, 26 aa, Artificial Sequence
  Cyclic GFR-binding peptide
SPINMLYFDENEKVVYGKIPDMVVEG

SEQ ID NO: 43181 - protein, 32 aa, Artificial Sequence
  Cyclic GFR-binding peptide
  MOD_RES (3)..(4): Xaa is C or S
PTXXVPTRLSPINILYFDSANNVVYGKIPDMV

SEQ ID NO: 43182 - protein, 24 aa, Artificial Sequence
  Cyclic GFR-binding peptide
PTELSPINMLYFDENEKVVYGKIP

SEQ ID NO: 43183 - protein, 30 aa, Artificial Sequence
  Cyclic GFR-binding peptide
APTKLSPINVLYFDDSSNVIYGKIPNMVVR

SEQ ID NO: 43184 - protein, 23 aa, Artificial Sequence
  Cyclic GFR-binding peptide
KLSPINILYFDKGVVTYYGKIPG

SEQ ID NO: 43185 - protein, 31 aa, Artificial Sequence
  Cyclic GFR-binding peptide
  MOD_RES (31)..(31): Xaa is C or S
TKLSPINVLYFDDMGVPTYGKIPEGMSVAEX

SEQ ID NO: 43186 - protein, 31 aa, Artificial Sequence
  Cyclic GFR-binding peptide
  MOD_RES (28)..(30): Xaa is C or S
LSPINILYFDAANNVVYGKIPDMVVEAXGXR

SEQ ID NO: 43187 - protein, 32 aa, Artificial Sequence
  Cyclic GFR-binding peptide
  MOD_RES (1)..(2): Xaa is C or S
XXVPTELSPINMLYFDEYDKVVYGKIPEMVVE

SEQ ID NO: 43188 - protein, 36 aa, Artificial Sequence
  Cyclic GFR-binding peptide
  MOD_RES (5)..(6): Xaa is C or S
APASXXVPARLSPINILYFDAANNVVYGKIPDMVVE

SEQ ID NO: 43189 - protein, 36 aa, Artificial Sequence
  Cyclic GFR-binding peptide
  MOD_RES (4)..(5)..(36): Xaa is C or S
PSTXXAPVKTSPINMLYFDNGRVLLYGKIPMIVEEX

SEQ ID NO: 43190 - protein, 35 aa, Artificial Sequence
  Cyclic GFR-binding peptide
  MOD_RES (2)..(3)..(35): Xaa is C or S
AXXVPTELSPINMLYFDEYDKVVYGKIPEMVVEGX

SEQ ID NO: 43191 - protein, 29 aa, Artificial Sequence
  Cyclic GFR-binding peptide
  MOD_RES (1)..(2): Xaa is C or S
XXAPTKLSPINVLYFDSSNNVIYGKIPNM

SEQ ID NO: 43192 - protein, 31 aa, Artificial Sequence
  Cyclic GFR-binding peptide
  MOD_RES (1)..(1): Xaa is C or S
XAPTKLSPINVLYFDSSNNVIYGKIPNMVVK

SEQ ID NO: 43193 - protein, 30 aa, Artificial Sequence
  Cyclic GFR-binding peptide
  MOD_RES (2)..(3): Xaa is C or S
PXXAPTKLSPINVLYFDDSSNVIYGKIPNM

SEQ ID NO: 43194 - protein, 24 aa, Artificial Sequence
  Cyclic GFR-binding peptide
SPINVLYFDDMGVPTYGKIPEGMS

SEQ ID NO: 43195 - protein, 33 aa, Artificial Sequence
  Cyclic GFR-binding peptide
  MOD_RES (1)..(33): Xaa is C or S
XAPTKLSPINVLYFDDSSNVIYGKIPNMVVRSX

SEQ ID NO: 43196 - protein, 35 aa, Artificial Sequence
  Cyclic GFR-binding peptide
  MOD_RES (6)..(6): Xaa is C or S
VTKPTXAPTKLSPINVLYFDDSSNVIYGKIPNMVV

SEQ ID NO: 43197 - protein, 29 aa, Artificial Sequence
  Cyclic GFR-binding peptide
  MOD_RES (1)..(1): Xaa is C or S
XAPTKLSPINVLYFDSSNNVIYGKIPNMV

SEQ ID NO: 43198 - protein, 31 aa, Artificial Sequence
  Cyclic GFR-binding peptide
  MOD_RES (29)..(31): Xaa is C or S
RLSPINILYFDSANNVVYGKIPDMVVESXGX

SEQ ID NO: 43199 - protein, 40 aa, Artificial Sequence
  Cyclic GFR-binding peptide
  MOD_RES (4)..(5)..(37)..(39): Xaa is C or S
SKAXXVPTKLSPINILYFDKGVVTYYGKIPGMAVSEXGXR

SEQ ID NO: 43200 - protein, 34 aa, Artificial Sequence
  Cyclic GFR-binding peptide
  MOD_RES (3)..(4): Xaa is C or S
KPXXAPTQLSPINVLYFDDSSNVIYGKIPNMVVR

SEQ ID NO: 43201 - protein, 24 aa, Artificial Sequence
  Cyclic GFR-binding peptide
SPINMLYFDNGRVLLYGKIPMIVE

SEQ ID NO: 43202 - protein, 32 aa, Artificial Sequence
  Cyclic GFR-binding peptide
  MOD_RES (31)..(31): Xaa is C or S
PTQLSPINVLYFDDSSNVIYGKIPNMVVRAXG

SEQ ID NO: 43203 - protein, 34 aa, Artificial Sequence
  Cyclic GFR-binding peptide
  MOD_RES (6)..(7): Xaa is C or S
STPPTXXVPTRLSPINILYFDSANNVVYGKIPDM

SEQ ID NO: 43204 - protein, 32 aa, Artificial Sequence
  Cyclic GFR-binding peptide
  MOD_RES (30)..(32): Xaa is C or S
TKLSPINVLYFDSSNNVIYGKIPNMVVKAXGX

SEQ ID NO: 43205 - protein, 26 aa, Artificial Sequence
  Cyclic GFR-binding peptide
KTSPINMLYFDNGRVLLYGKIPMIVE

SEQ ID NO: 43206 - protein, 36 aa, Artificial Sequence
  Cyclic GFR-binding peptide
  MOD_RES (3)..(4)..(36): Xaa is C or S
KAXXVPTKLSPINILYFDKGVVTYYGKIPGMAVSEX

SEQ ID NO: 43207 - protein, 22 aa, Artificial Sequence
  Cyclic GFR-binding peptide
SPINILYFDAANNVVYGKIPDM

SEQ ID NO: 43208 - protein, 38 aa, Artificial Sequence
  Cyclic GFR-binding peptide
  MOD_RES (3)..(4)..(36)..(38): Xaa is C or S
KPXXAPTQLSPINVLYFDDSSNVIYGKIPNMVVRAXGX

SEQ ID NO: 43209 - protein, 30 aa, Artificial Sequence
  Cyclic GFR-binding peptide
  MOD_RES (29)..(29): Xaa is C or S
VKTSPINMLYFDNGRVLLYGKIPMIVEEXG

SEQ ID NO: 43210 - protein, 33 aa, Artificial Sequence
  Cyclic GFR-binding peptide
  MOD_RES (30)..(32): Xaa is C or S
TKLSPINVLYFDDSSNVIYGKIPNMVVRSXGXH

SEQ ID NO: 43211 - protein, 37 aa, Artificial Sequence
  Cyclic GFR-binding peptide
  MOD_RES (6)..(7): Xaa is C or S
KIPKAXXVPTELSPINMLYFDENEKVVYGKIPDMVVE

SEQ ID NO: 43212 - protein, 28 aa, Artificial Sequence
  Cyclic GFR-binding peptide
  MOD_RES (27)..(27): Xaa is C or S
SPINMLYFDENEKVVYGKIPDMVVEGXG

SEQ ID NO: 43213 - protein, 22 aa, Artificial Sequence
  Cyclic GFR-binding peptide
SPINVLYFDSSNNVIYGKIPNM

SEQ ID NO: 43214 - protein, 25 aa, Artificial Sequence
  Cyclic GFR-binding peptide
VPTELSPINMLYFDEYDKVVYGKIP

SEQ ID NO: 43215 - protein, 38 aa, Artificial Sequence
  Cyclic GFR-binding peptide
  MOD_RES (2)..(3)..(35)..(37): Xaa is C or S
AXXVPTELSPINMLYFDEYDKVVYGKIPEMVVEGXGXR

SEQ ID NO: 43216 - protein, 23 aa, Artificial Sequence
  Cyclic GFR-binding peptide
LSPINVLYFDDSSNVIYGKIPNM

SEQ ID NO: 43217 - protein, 35 aa, Artificial Sequence
  Cyclic GFR-binding peptide
  MOD_RES (5)..(6): Xaa is C or S
VPSTXXAPVKTSPINMLYFDNGRVLLYGKIPMIVE

SEQ ID NO: 43218 - protein, 33 aa, Artificial Sequence
  Cyclic GFR-binding peptide
  MOD_RES (31)..(33): Xaa is C or S
PTKLSPINVLYFDDSSNVIYGKIPNMVVRSXGX

SEQ ID NO: 43219 - protein, 27 aa, Artificial Sequence
  Cyclic GFR-binding peptide
  MOD_RES (27)..(27): Xaa is C or S
SPINVLYFDDSSNVIYGKIPNMVVRAX

SEQ ID NO: 43220 - protein, 25 aa, Artificial Sequence
  Cyclic GFR-binding peptide
SPINILYFDKGVVTYYGKIPGMAVS

SEQ ID NO: 43221 - protein, 31 aa, Artificial Sequence
  Cyclic GFR-binding peptide
  MOD_RES (4)..(5): Xaa is C or S
PKPXXAPTQLSPINVLYFDDSSNVIYGKIPN

SEQ ID NO: 43222 - protein, 39 aa, Artificial Sequence
  Cyclic GFR-binding peptide
  MOD_RES (4)..(36)..(38): Xaa is C or S
KPTXAPTKLSPINVLYFDDSSNVIYGKIPNMVVRSXGXH

SEQ ID NO: 43223 - protein, 28 aa, Artificial Sequence
  Cyclic GFR-binding peptide
  MOD_RES (1)..(2): Xaa is C or S
XXVPTRLSPINILYFDSANNVVYGKIPD

SEQ ID NO: 43224 - protein, 29 aa, Artificial Sequence
  Cyclic GFR-binding peptide
TKLSPINVLYFDDSSNVIYGKIPNMVVRS

SEQ ID NO: 43225 - protein, 32 aa, Artificial Sequence
  Cyclic GFR-binding peptide
  MOD_RES (5)..(6): Xaa is C or S
ASKAXXVPTKLSPINILYFDKGVVTYYGKIPG

SEQ ID NO: 43226 - protein, 27 aa, Artificial Sequence
  Cyclic GFR-binding peptide
  MOD_RES (1)..(2): Xaa is C or S
XXVPARLSPINILYFDAANNVVYGKIP

SEQ ID NO: 43227 - protein, 39 aa, Artificial Sequence
  Cyclic GFR-binding peptide
  MOD_RES (5)..(6)..(38): Xaa is C or S
VPKPXXAPTKLSPINVLYFDDSSNVIYGKIPNMVVRSXG

SEQ ID NO: 43228 - protein, 39 aa, Artificial Sequence
  Cyclic GFR-binding peptide
  MOD_RES (6)..(7)..(39): Xaa is C or S
TVPKPXXAPTQLSPINVLYFDDSSNVIYGKIPNMVVRAX

SEQ ID NO: 43229 - protein, 30 aa, Artificial Sequence
  Cyclic GFR-binding peptide
  MOD_RES (5)..(5): Xaa is C or S
TKPTXAPTKLSPINVLYFDDSSNVIYGKIP

SEQ ID NO: 43230 - protein, 24 aa, Artificial Sequence
  Cyclic GFR-binding peptide
LSPINILYFDKGVVTYYGKIPGMA

SEQ ID NO: 43231 - protein, 40 aa, Artificial Sequence
  Cyclic GFR-binding peptide
  MOD_RES (3)..(4)..(37)..(39): Xaa is C or S
KAXXVPTKLSPINVLYFDDMGVPTYGKIPEGMSVAEXGXR

SEQ ID NO: 43232 - protein, 30 aa, Artificial Sequence
  Cyclic GFR-binding peptide
  MOD_RES (28)..(30): Xaa is C or S
LSPINILYFDSANNVVYGKIPDMVVESXGX

SEQ ID NO: 43233 - protein, 29 aa, Artificial Sequence
  Cyclic GFR-binding peptide
VPTRLSPINILYFDSANNVVYGKIPDMVV

SEQ ID NO: 43234 - protein, 37 aa, Artificial Sequence
  Cyclic GFR-binding peptide
  MOD_RES (5)..(6): Xaa is C or S
ASKAXXVPTKLSPINILYFDKGVVTYYGKIPGMAVSE

SEQ ID NO: 43235 - protein, 37 aa, Artificial Sequence
  Cyclic GFR-binding peptide
  MOD_RES (6)..(7): Xaa is C or S
RVPSTXXAPVKTSPINMLYFDNGRVLLYGKIPMIVEE

SEQ ID NO: 43236 - protein, 31 aa, Artificial Sequence
  Cyclic GFR-binding peptide
  MOD_RES (29)..(31): Xaa is C or S
KLSPINVLYFDDSSNVIYGKIPNMVVRSXGX

SEQ ID NO: 43237 - protein, 31 aa, Artificial Sequence
  Cyclic GFR-binding peptide
  MOD_RES (5)..(6): Xaa is C or S
IPKAXXVPTELSPINMLYFDENEKVVYGKIP

SEQ ID NO: 43238 - protein, 26 aa, Artificial Sequence
  Cyclic GFR-binding peptide
SPINVLYFDDMGVPTYGKIPEGMSVA

SEQ ID NO: 43239 - protein, 34 aa, Artificial Sequence
  Cyclic GFR-binding peptide
  MOD_RES (3)..(4): Xaa is C or S
KAXXVPTELSPINMLYFDEYDKVVYGKIPEMVVE

SEQ ID NO: 43240 - protein, 33 aa, Artificial Sequence
  Cyclic GFR-binding peptide
  MOD_RES (4)..(5): Xaa is C or S
PKPXXAPTKLSPINVLYFDDSSNVIYGKIPNMV

SEQ ID NO: 43241 - protein, 37 aa, Artificial Sequence
  Cyclic GFR-binding peptide
  MOD_RES (5)..(6): Xaa is C or S
VGKAXXVPTKLSPINVLYFDDMGVPTYGKIPEGMSVA

SEQ ID NO: 43242 - protein, 34 aa, Artificial Sequence
  Cyclic GFR-binding peptide
  MOD_RES (5)..(6): Xaa is C or S
ASKAXXVPTKLSPINILYFDKGVVTYYGKIPGMA

SEQ ID NO: 43243 - protein, 25 aa, Artificial Sequence
  Cyclic GFR-binding peptide
LSPINILYFDSANNVVYGKIPDMVV

SEQ ID NO: 43244 - protein, 34 aa, Artificial Sequence
  Cyclic GFR-binding peptide
  MOD_RES (4)..(5): Xaa is C or S
PSTXXAPVKTSPINMLYFDNGRVLLYGKIPMIVE

SEQ ID NO: 43245 - protein, 31 aa, Artificial Sequence
  Cyclic GFR-binding peptide
  MOD_RES (2)..(3): Xaa is C or S
AXXVPTELSPINMLYFDEYDKVVYGKIPEMV

SEQ ID NO: 43246 - protein, 27 aa, Artificial Sequence
  Cyclic GFR-binding peptide
  MOD_RES (27)..(27): Xaa is C or S
SPINILYFDSANNVVYGKIPDMVVESX

SEQ ID NO: 43247 - protein, 33 aa, Artificial Sequence
  Cyclic GFR-binding peptide
  MOD_RES (1)..(2): Xaa is C or S
XXAPTQLSPINVLYFDDSSNVIYGKIPNMVVRA

SEQ ID NO: 43248 - protein, 32 aa, Artificial Sequence
  Cyclic GFR-binding peptide
  MOD_RES (4)..(5): Xaa is C or S
PKAXXVPTELSPINMLYFDEYDKVVYGKIPEM

SEQ ID NO: 43249 - protein, 37 aa, Artificial Sequence
  Cyclic GFR-binding peptide
  MOD_RES (1)..(2)..(34)..(36): Xaa is C or S
XXAPTKLSPINVLYFDSSNNVIYGKIPNMVVKAXGXH

SEQ ID NO: 43250 - protein, 32 aa, Artificial Sequence
  Cyclic GFR-binding peptide
  MOD_RES (1)..(2): Xaa is C or S
XXAPTKLSPINVLYFDSSNNVIYGKIPNMVVK

SEQ ID NO: 43251 - protein, 30 aa, Artificial Sequence
  Cyclic GFR-binding peptide
PTKLSPINVLYFDDSSNVIYGKIPNMVVRS

SEQ ID NO: 43252 - protein, 35 aa, Artificial Sequence
  Cyclic GFR-binding peptide
  MOD_RES (1)..(32)..(34): Xaa is C or S
XAPVKTSPINMLYFDNGRVLLYGKIPMIVEEXGXL

SEQ ID NO: 43253 - protein, 31 aa, Artificial Sequence
  Cyclic GFR-binding peptide
  MOD_RES (28)..(30): Xaa is C or S
LSPINVLYFDDSSNVIYGKIPNMVVRSXGXH

SEQ ID NO: 43254 - protein, 28 aa, Artificial Sequence
  Cyclic GFR-binding peptide
  MOD_RES (28)..(28): Xaa is C or S
KTSPINMLYFDNGRVLLYGKIPMIVEEX

SEQ ID NO: 43255 - protein, 25 aa, Artificial Sequence
  Cyclic GFR-binding peptide
APTQLSPINVLYFDDSSNVIYGKIP

SEQ ID NO: 43256 - protein, 38 aa, Artificial Sequence
  Cyclic GFR-binding peptide
  MOD_RES (4)..(5)..(38): Xaa is C or S
GKAXXVPTKLSPINVLYFDDMGVPTYGKIPEGMSVAEX

SEQ ID NO: 43257 - protein, 33 aa, Artificial Sequence
  Cyclic GFR-binding peptide
  MOD_RES (3)..(3): Xaa is C or S
PTXAPTKLSPINVLYFDDSSNVIYGKIPNMVVR

SEQ ID NO: 43258 - protein, 29 aa, Artificial Sequence
  Cyclic GFR-binding peptide
  MOD_RES (3)..(4): Xaa is C or S
KAXXVPTKLSPINILYFDKGVVTYYGKIP

SEQ ID NO: 43259 - protein, 25 aa, Artificial Sequence
  Cyclic GFR-binding peptide
LSPINILYFDKGVVTYYGKIPGMAV

SEQ ID NO: 43260 - protein, 39 aa, Artificial Sequence
  Cyclic GFR-binding peptide
  MOD_RES (5)..(6)..(38): Xaa is C or S
VPKPXXAPTQLSPINVLYFDDSSNVIYGKIPNMVVRAXG

SEQ ID NO: 43261 - protein, 35 aa, Artificial Sequence
  Cyclic GFR-binding peptide
  MOD_RES (1)..(33)..(35): Xaa is C or S
XAPTQLSPINVLYFDDSSNVIYGKIPNMVVRAXGX

SEQ ID NO: 43262 - protein, 42 aa, Artificial Sequence
  Cyclic GFR-binding peptide
  MOD_RES (6)..(7)..(39)..(41): Xaa is C or S
AVPKAXXAPTKLSPINVLYFDSSNNVIYGKIPNMVVKAXGXH

SEQ ID NO: 43263 - protein, 24 aa, Artificial Sequence
  Cyclic GFR-binding peptide
LSPINMLYFDENEKVVYGKIPDMV

SEQ ID NO: 43264 - protein, 33 aa, Artificial Sequence
  Cyclic GFR-binding peptide
  MOD_RES (6)..(7): Xaa is C or S
KVGKAXXVPTKLSPINVLYFDDMGVPTYGKIPE

SEQ ID NO: 43265 - protein, 42 aa, Artificial Sequence
  Cyclic GFR-binding peptide
  MOD_RES (6)..(7)..(39)..(41): Xaa is C or S
SIPKAXXVPTELSPINMLYFDEYDKVVYGKIPEMVVEGXGXR

SEQ ID NO: 43266 - protein, 33 aa, Artificial Sequence
  Cyclic GFR-binding peptide
  MOD_RES (30)..(32): Xaa is C or S
TKLSPINILYFDKGVVTYYGKIPGMAVSEXGXR

SEQ ID NO: 43267 - protein, 33 aa, Artificial Sequence
  Cyclic GFR-binding peptide
  MOD_RES (3)..(4): Xaa is C or S
KPXXAPTQLSPINVLYFDDSSNVIYGKIPNMVV

SEQ ID NO: 43268 - protein, 35 aa, Artificial Sequence
  Cyclic GFR-binding peptide
  MOD_RES (3)..(35): Xaa is C or S
PTXAPTKLSPINVLYFDDSSNVIYGKIPNMVVRSX

SEQ ID NO: 43269 - protein, 30 aa, Artificial Sequence
  Cyclic GFR-binding peptide
  MOD_RES (1)..(1): Xaa is C or S
XVPARLSPINILYFDAANNVVYGKIPDMVV

SEQ ID NO: 43270 - protein, 31 aa, Artificial Sequence
  Cyclic GFR-binding peptide
  MOD_RES (28)..(30): Xaa is C or S
LSPINILYFDKGVVTYYGKIPGMAVSEXGXR

SEQ ID NO: 43271 - protein, 28 aa, Artificial Sequence
  Cyclic GFR-binding peptide
  MOD_RES (1)..(1): Xaa is C or S
XVPARLSPINILYFDAANNVVYGKIPDM

SEQ ID NO: 43272 - protein, 31 aa, Artificial Sequence
  Cyclic GFR-binding peptide
  MOD_RES (4)..(5): Xaa is C or S
PKAXXVPTELSPINMLYFDENEKVVYGKIPD

SEQ ID NO: 43273 - protein, 27 aa, Artificial Sequence
  Cyclic GFR-binding peptide
RLSPINILYFDAANNVVYGKIPDMVVE

SEQ ID NO: 43274 - protein, 32 aa, Artificial Sequence
  Cyclic GFR-binding peptide
  MOD_RES (3)..(4): Xaa is C or S
KAXXVPTELSPINMLYFDENEKVVYGKIPDMV

SEQ ID NO: 43275 - protein, 30 aa, Artificial Sequence
  Cyclic GFR-binding peptide
TKLSPINVLYFDDMGVPTYGKIPEGMSVAE

SEQ ID NO: 43276 - protein, 27 aa, Artificial Sequence
  Cyclic GFR-binding peptide
TKLSPINVLYFDDSSNVIYGKIPNMVV

SEQ ID NO: 43277 - protein, 23 aa, Artificial Sequence
  Cyclic GFR-binding peptide
LSPINILYFDSANNVVYGKIPDM

SEQ ID NO: 43278 - protein, 34 aa, Artificial Sequence
  Cyclic GFR-binding peptide
  MOD_RES (6)..(7): Xaa is C or S
YVPKPXXAPTKLSPINVLYFDDSSNVIYGKIPNM

SEQ ID NO: 43279 - protein, 28 aa, Artificial Sequence
  Cyclic GFR-binding peptide
  MOD_RES (28)..(28): Xaa is C or S
LSPINILYFDKGVVTYYGKIPGMAVSEX

SEQ ID NO: 43280 - protein, 31 aa, Artificial Sequence
  Cyclic GFR-binding peptide
APTKLSPINVLYFDDSSNVIYGKIPNMVVRS

SEQ ID NO: 43281 - protein, 27 aa, Artificial Sequence
  Cyclic GFR-binding peptide
  MOD_RES (1)..(1): Xaa is C or S
XVPTELSPINMLYFDEYDKVVYGKIPE

SEQ ID NO: 43282 - protein, 25 aa, Artificial Sequence
  Cyclic GFR-binding peptide
ELSPINMLYFDEYDKVVYGKIPEMV

SEQ ID NO: 43283 - protein, 31 aa, Artificial Sequence
  Cyclic GFR-binding peptide
  MOD_RES (30)..(30): Xaa is C or S
TELSPINMLYFDENEKVVYGKIPDMVVEGXG

SEQ ID NO: 43284 - protein, 21 aa, Artificial Sequence
  Cyclic GFR-binding peptide
TSPINMLYFDNGRVLLYGKIP

SEQ ID NO: 43285 - protein, 26 aa, Artificial Sequence
  Cyclic GFR-binding peptide
QLSPINVLYFDDSSNVIYGKIPNMVV

SEQ ID NO: 43286 - protein, 38 aa, Artificial Sequence
  Cyclic GFR-binding peptide
  MOD_RES (4)..(5)..(36)..(38): Xaa is C or S
PSTXXAPVKTSPINMLYFDNGRVLLYGKIPMIVEEXGX

SEQ ID NO: 43287 - protein, 37 aa, Artificial Sequence
  Cyclic GFR-binding peptide
  MOD_RES (1)..(2)..(34)..(36): Xaa is C or S
XXAPTQLSPINVLYFDDSSNVIYGKIPNMVVRAXGXH

SEQ ID NO: 43288 - protein, 38 aa, Artificial Sequence
  Cyclic GFR-binding peptide
  MOD_RES (6)..(7)..(38): Xaa is C or S
RVPSTXXAPVKTSPINMLYFDNGRVLLYGKIPMIVEEX

SEQ ID NO: 43289 - protein, 29 aa, Artificial Sequence
  Cyclic GFR-binding peptide
  MOD_RES (1)..(1): Xaa is C or S
XVPTKLSPINILYFDKGVVTYYGKIPGMA

SEQ ID NO: 43290 - protein, 29 aa, Artificial Sequence
  Cyclic GFR-binding peptide
  MOD_RES (29)..(29): Xaa is C or S
LSPINVLYFDDMGVPTYGKIPEGMSVAEX

SEQ ID NO: 43291 - protein, 34 aa, Artificial Sequence
  Cyclic GFR-binding peptide
  MOD_RES (1)..(33): Xaa is C or S
XAPTKLSPINVLYFDSSNNVIYGKIPNMVVKAXG

SEQ ID NO: 43292 - protein, 29 aa, Artificial Sequence
  Cyclic GFR-binding peptide
  MOD_RES (2)..(3): Xaa is C or S
AXXVPTELSPINMLYFDENEKVVYGKIPD

SEQ ID NO: 43293 - protein, 25 aa, Artificial Sequence
  Cyclic GFR-binding peptide
SPINVLYFDSSNNVIYGKIPNMVVK

SEQ ID NO: 43294 - protein, 25 aa, Artificial Sequence
  Cyclic GFR-binding peptide
RLSPINILYFDSANNVVYGKIPDMV

SEQ ID NO: 43295 - protein, 26 aa, Artificial Sequence
  Cyclic GFR-binding peptide
KLSPINVLYFDDMGVPTYGKIPEGMS

SEQ ID NO: 43296 - protein, 23 aa, Artificial Sequence
  Cyclic GFR-binding peptide
TKLSPINVLYFDSSNNVIYGKIP

SEQ ID NO: 43297 - protein, 25 aa, Artificial Sequence
  Cyclic GFR-binding peptide
PTELSPINMLYFDENEKVVYGKIPD

SEQ ID NO: 43298 - protein, 33 aa, Artificial Sequence
  Cyclic GFR-binding peptide
  MOD_RES (4)..(5): Xaa is C or S
PKAXXVPTELSPINMLYFDENEKVVYGKIPDMV

SEQ ID NO: 43299 - protein, 30 aa, Artificial Sequence
  Cyclic GFR-binding peptide
VPTKLSPINILYFDKGVVTYYGKIPGMAVS

SEQ ID NO: 43300 - protein, 31 aa, Artificial Sequence
  Cyclic GFR-binding peptide
  MOD_RES (29)..(31): Xaa is C or S
KLSPINVLYFDSSNNVIYGKIPNMVVKAXGX

SEQ ID NO: 43301 - protein, 30 aa, Artificial Sequence
  Cyclic GFR-binding peptide
  MOD_RES (2)..(3): Xaa is C or S
AXXVPTKLSPINILYFDKGVVTYYGKIPGM

SEQ ID NO: 43302 - protein, 39 aa, Artificial Sequence
  Cyclic GFR-binding peptide
  MOD_RES (7)..(39): Xaa is C or S
HVTKPTXAPTKLSPINVLYFDDSSNVIYGKIPNMVVRSX

SEQ ID NO: 43303 - protein, 32 aa, Artificial Sequence
  Cyclic GFR-binding peptide
  MOD_RES (1)..(1): Xaa is C or S
XVPARLSPINILYFDAANNVVYGKIPDMVVEA

SEQ ID NO: 43304 - protein, 36 aa, Artificial Sequence
  Cyclic GFR-binding peptide
  MOD_RES (3)..(35): Xaa is C or S
PTXAPTKLSPINVLYFDDSSNVIYGKIPNMVVRSXG

SEQ ID NO: 43305 - protein, 26 aa, Artificial Sequence
  Cyclic GFR-binding peptide
APVKTSPINMLYFDNGRVLLYGKIPM

SEQ ID NO: 43306 - protein, 33 aa, Artificial Sequence
  Cyclic GFR-binding peptide
  MOD_RES (4)..(4): Xaa is C or S
KPTXAPTKLSPINVLYFDDSSNVIYGKIPNMVV

SEQ ID NO: 43307 - protein, 28 aa, Artificial Sequence
  Cyclic GFR-binding peptide
KLSPINVLYFDDSSNVIYGKIPNMVVRS

SEQ ID NO: 43308 - protein, 25 aa, Artificial Sequence
  Cyclic GFR-binding peptide
TRLSPINILYFDSANNVVYGKIPDM

SEQ ID NO: 43309 - protein, 30 aa, Artificial Sequence
  Cyclic GFR-binding peptide
  MOD_RES (1)..(1): Xaa is C or S
XVPTELSPINMLYFDENEKVVYGKIPDMVV

SEQ ID NO: 43310 - protein, 32 aa, Artificial Sequence
  Cyclic GFR-binding peptide
  MOD_RES (30)..(32): Xaa is C or S
TRLSPINILYFDSANNVVYGKIPDMVVESXGX

SEQ ID NO: 43311 - protein, 33 aa, Artificial Sequence
  Cyclic GFR-binding peptide
  MOD_RES (2)..(3): Xaa is C or S
TXXAPVKTSPINMLYFDNGRVLLYGKIPMIVEE

SEQ ID NO: 43312 - protein, 37 aa, Artificial Sequence
  Cyclic GFR-binding peptide
  MOD_RES (1)..(2)..(35)..(37): Xaa is C or S
XXVPTKLSPINVLYFDDMGVPTYGKIPEGMSVAEXGX

SEQ ID NO: 43313 - protein, 24 aa, Artificial Sequence
  Cyclic GFR-binding peptide
ELSPINMLYFDEYDKVVYGKIPEM

SEQ ID NO: 43314 - protein, 29 aa, Artificial Sequence
  Cyclic GFR-binding peptide
PTKLSPINVLYFDDSSNVIYGKIPNMVVR

SEQ ID NO: 43315 - protein, 39 aa, Artificial Sequence; identical to SEQ ID NO: 40337
  Cyclic GFR-binding peptide
  MOD_RES (1)..(33)..(34): Xaa is C or S

SEQ ID NO: 43316 - protein, 30 aa, Artificial Sequence; identical to SEQ ID NO: 40338
  Cyclic GFR-binding peptide
  MOD_RES (26)..(27): Xaa is C or S

SEQ ID NO: 43317 - protein, 37 aa, Artificial Sequence; identical to SEQ ID NO: 40339
  Cyclic GFR-binding peptide
  MOD_RES (32)..(33): Xaa is C or S

SEQ ID NO: 43318 - protein, 27 aa, Artificial Sequence
  Cyclic GFR-binding peptide
VVMEPIKGYVVKDYEDFYLMNIPSLET

SEQ ID NO: 43319 - protein, 22 aa, Artificial Sequence
  Cyclic GFR-binding peptide
EPIKGYVVKDYEDFYLMNIPSL

SEQ ID NO: 43320 - protein, 32 aa, Artificial Sequence; identical to SEQ ID NO: 40342
  Cyclic GFR-binding peptide
  MOD_RES (2)..(2): Xaa is C or S

SEQ ID NO: 43321 - protein, 35 aa, Artificial Sequence; identical to SEQ ID NO: 40343
  Cyclic GFR-binding peptide
  MOD_RES (32)..(33): Xaa is C or S

SEQ ID NO: 43322 - protein, 25 aa, Artificial Sequence
  Cyclic GFR-binding peptide
PIKGYTPVGMDDFYLVNIPSLKTPV

SEQ ID NO: 43323 - protein, 27 aa, Artificial Sequence
  Cyclic GFR-binding peptide
  MOD_RES (27)..(27): Xaa is C or S
DPIKGYVVKENEDFYLMNIPSLETPVX

SEQ ID NO: 43324 - protein, 29 aa, Artificial Sequence
  Cyclic GFR-binding peptide
VVMDPIKGYVVNNAADFYLINIPSLRAPV

SEQ ID NO: 43325 - protein, 39 aa, Artificial Sequence; identical to SEQ ID NO: 40347
  Cyclic GFR-binding peptide
  MOD_RES (2)..(4)..(36)..(37): Xaa is C or S

SEQ ID NO: 43326 - protein, 35 aa, Artificial Sequence; identical to SEQ ID NO: 40348
  Cyclic GFR-binding peptide
  MOD_RES (1)..(33)..(34): Xaa is C or S

SEQ ID NO: 43327 - protein, 30 aa, Artificial Sequence; identical to SEQ ID NO: 40349
  Cyclic GFR-binding peptide

SEQ ID NO: 43328 - protein, 27 aa, Artificial Sequence
  Cyclic GFR-binding peptide
  MOD_RES (26)..(27): Xaa is C or S
PIKGYIVNNSSDFYLVNIPSLKTPAXX

SEQ ID NO: 43329 - protein, 34 aa, Artificial Sequence; identical to SEQ ID NO: 40351
  Cyclic GFR-binding peptide
  MOD_RES (30)..(31): Xaa is C or S

SEQ ID NO: 43330 - protein, 40 aa, Artificial Sequence; identical to SEQ ID NO: 40352
  Cyclic GFR-binding peptide
  MOD_RES (1)..(3)..(35)..(36): Xaa is C or S

SEQ ID NO: 43331 - protein, 37 aa, Artificial Sequence; identical to SEQ ID NO: 40353
  Cyclic GFR-binding peptide
  MOD_RES (2)..(34): Xaa is C or S

SEQ ID NO: 43332 - protein, 31 aa, Artificial Sequence; identical to SEQ ID NO: 40354
  Cyclic GFR-binding peptide
  MOD_RES (26)..(27): Xaa is C or S

SEQ ID NO: 43333 - protein, 32 aa, Artificial Sequence; identical to SEQ ID NO: 40355
  Cyclic GFR-binding peptide
  MOD_RES (2)..(4): Xaa is C or S

SEQ ID NO: 43334 - protein, 34 aa, Artificial Sequence; identical to SEQ ID NO: 40356
  Cyclic GFR-binding peptide
  MOD_RES (2)..(34): Xaa is C or S

SEQ ID NO: 43335 - protein, 27 aa, Artificial Sequence
  Cyclic GFR-binding peptide
  MOD_RES (2)..(2): Xaa is C or S
GXEEVIMPIKGYLLVRGNDFYLMNIPS

SEQ ID NO: 43336 - protein, 35 aa, Artificial Sequence; identical to SEQ ID NO: 40358
  Cyclic GFR-binding peptide
  MOD_RES (32)..(33): Xaa is C or S

SEQ ID NO: 43337 - protein, 23 aa, Artificial Sequence
  Cyclic GFR-binding peptide
MDPIKGYVVKENEDFYLMNIPSL

SEQ ID NO: 43338 - protein, 29 aa, Artificial Sequence
  Cyclic GFR-binding peptide
EVIMPIKGYLLVRGNDFYLMNIPSTKVPA

SEQ ID NO: 43339 - protein, 34 aa, Artificial Sequence; identical to SEQ ID NO: 40361
  Cyclic GFR-binding peptide
  MOD_RES (30)..(31): Xaa is C or S

SEQ ID NO: 43340 - protein, 36 aa, Artificial Sequence; identical to SEQ ID NO: 40362
  Cyclic GFR-binding peptide
  MOD_RES (31)..(32): Xaa is C or S

SEQ ID NO: 43341 - protein, 22 aa, Artificial Sequence
  Cyclic GFR-binding peptide
DPIKGYVVNNAADFYLINIPSL

SEQ ID NO: 43342 - protein, 32 aa, Artificial Sequence; identical to SEQ ID NO: 40364
  Cyclic GFR-binding peptide
  MOD_RES (29)..(30): Xaa is C or S

SEQ ID NO: 43343 - protein, 39 aa, Artificial Sequence; identical to SEQ ID NO: 40365
  Cyclic GFR-binding peptide
  MOD_RES (2)..(4)..(37)..(38): Xaa is C or S

SEQ ID NO: 43344 - protein, 25 aa, Artificial Sequence
  Cyclic GFR-binding peptide
MGPIKGYYTVVGKDFYLINIPSLKT

SEQ ID NO: 43345 - protein, 36 aa, Artificial Sequence; identical to SEQ ID NO: 40367
  Cyclic GFR-binding peptide
  MOD_RES (32)..(33): Xaa is C or S

SEQ ID NO: 43346 - protein, 36 aa, Artificial Sequence; identical to SEQ ID NO: 40368
  Cyclic GFR-binding peptide
  MOD_RES (2)..(34)..(35): Xaa is C or S

SEQ ID NO: 43347 - protein, 21 aa, Artificial Sequence
  Cyclic GFR-binding peptide
PIKGYTPVGMDDFYLVNIPSL

SEQ ID NO: 43348 - protein, 42 aa, Artificial Sequence; identical to SEQ ID NO: 40370
  Cyclic GFR-binding peptide
  MOD_RES (2)..(4)..(37)..(38): Xaa is C or S

SEQ ID NO: 43349 - protein, 30 aa, Artificial Sequence; identical to SEQ ID NO: 40371
  Cyclic GFR-binding peptide

SEQ ID NO: 43350 - protein, 33 aa, Artificial Sequence; identical to SEQ ID NO: 40372
  Cyclic GFR-binding peptide
  MOD_RES (32)..(33): Xaa is C or S

SEQ ID NO: 43351 - protein, 27 aa, Artificial Sequence
  Cyclic GFR-binding peptide
MDPIKGYVVNNASDFYLINIPSLRTPV

SEQ ID NO: 43352 - protein, 31 aa, Artificial Sequence; identical to SEQ ID NO: 40374
  Cyclic GFR-binding peptide
  MOD_RES (30)..(31): Xaa is C or S

SEQ ID NO: 43353 - protein, 35 aa, Artificial Sequence; identical to SEQ ID NO: 40375
  Cyclic GFR-binding peptide
  MOD_RES (1)..(3)..(35): Xaa is C or S

SEQ ID NO: 43354 - protein, 32 aa, Artificial Sequence; identical to SEQ ID NO: 40376
  Cyclic GFR-binding peptide
  MOD_RES (1)..(3): Xaa is C or S

SEQ ID NO: 43355 - protein, 39 aa, Artificial Sequence; identical to SEQ ID NO: 40377
  Cyclic GFR-binding peptide
  MOD_RES (2)..(4)..(36)..(37): Xaa is C or S

SEQ ID NO: 43356 - protein, 35 aa, Artificial Sequence; identical to SEQ ID NO: 40378
  Cyclic GFR-binding peptide
  MOD_RES (1)..(34)..(35): Xaa is C or S

SEQ ID NO: 43357 - protein, 30 aa, Artificial Sequence; identical to SEQ ID NO: 40379
  Cyclic GFR-binding peptide
  MOD_RES (1)..(3): Xaa is C or S

SEQ ID NO: 43358 - protein, 27 aa, Artificial Sequence
  Cyclic GFR-binding peptide
  MOD_RES (26)..(27): Xaa is C or S
PIKGYYTVVGKDFYLINIPSLKTPVXX

SEQ ID NO: 43359 - protein, 38 aa, Artificial Sequence; identical to SEQ ID NO: 40381
  Cyclic GFR-binding peptide
  MOD_RES (2)..(33)..(34): Xaa is C or S

SEQ ID NO: 43360 - protein, 21 aa, Artificial Sequence
  Cyclic GFR-binding peptide
PIKGYIVNSSDDFYLVNIPSL

SEQ ID NO: 43361 - protein, 29 aa, Artificial Sequence
  Cyclic GFR-binding peptide
  MOD_RES (1)..(3): Xaa is C or S
XGXESVAMGPIKGYYTVVGKDFYLINIPS

SEQ ID NO: 43362 - protein, 28 aa, Artificial Sequence
  Cyclic GFR-binding peptide
  MOD_RES (27)..(28): Xaa is C or S
DPIKGYVVKENEDFYLMNIPSLETPVXX

SEQ ID NO: 43363 - protein, 29 aa, Artificial Sequence
  Cyclic GFR-binding peptide
EVVMEPIKGYVVKDYEDFYLMNIPSLETP

SEQ ID NO: 43364 - protein, 27 aa, Artificial Sequence
  Cyclic GFR-binding peptide
RVVMNPIKGYIVNSSDDFYLVNIPSLQ

SEQ ID NO: 43365 - protein, 31 aa, Artificial Sequence; identical to SEQ ID NO: 40387
  Cyclic GFR-binding peptide
  MOD_RES (2)..(4): Xaa is C or S

SEQ ID NO: 43366 - protein, 29 aa, Artificial Sequence
  Cyclic GFR-binding peptide
  MOD_RES (1)..(1): Xaa is C or S
XEEVIMPIKGYLLVRGNDFYLMNIPSTKV

SEQ ID NO: 43367 - protein, 23 aa, Artificial Sequence
  Cyclic GFR-binding peptide
VMDPIKGYVVNNAADFYLINIPS

SEQ ID NO: 43368 - protein, 31 aa, Artificial Sequence; identical to SEQ ID NO: 40390
  Cyclic GFR-binding peptide
  MOD_RES (1)..(1): Xaa is C or S

SEQ ID NO: 43369 - protein, 26 aa, Artificial Sequence
  Cyclic GFR-binding peptide
SRVVMNPIKGYIVNSSDDFYLVNIPS

SEQ ID NO: 43370 - protein, 26 aa, Artificial Sequence
  Cyclic GFR-binding peptide
DPIKGYVVNNASDFYLINIPSLRTPV

SEQ ID NO: 43371 - protein, 22 aa, Artificial Sequence
  Cyclic GFR-binding peptide
MEPIKGYVVKDYEDFYLMNIPS

SEQ ID NO: 43372 - protein, 31 aa, Artificial Sequence; identical to SEQ ID NO: 40394
  Cyclic GFR-binding peptide
  MOD_RES (28)..(29): Xaa is C or S

SEQ ID NO: 43373 - protein, 25 aa, Artificial Sequence
  Cyclic GFR-binding peptide
EVVMDPIKGYVVNNAADFYLINIPS

SEQ ID NO: 43374 - protein, 39 aa, Artificial Sequence; identical to SEQ ID NO: 40396
  Cyclic GFR-binding peptide
  MOD_RES (1)..(33)..(34): Xaa is C or S

SEQ ID NO: 43375 - protein, 34 aa, Artificial Sequence; identical to SEQ ID NO: 40397
  Cyclic GFR-binding peptide
  MOD_RES (32)..(33): Xaa is C or S

SEQ ID NO: 43376 - protein, 27 aa, Artificial Sequence
  Cyclic GFR-binding peptide
MDPIKGYVVKENEDFYLMNIPSLETPV

SEQ ID NO: 43377 - protein, 24 aa, Artificial Sequence
  Cyclic GFR-binding peptide
EPIKGYTPVGMDDFYLVNIPSLKT

SEQ ID NO: 43378 - protein, 37 aa, Artificial Sequence; identical to SEQ ID NO: 40400
  Cyclic GFR-binding peptide
  MOD_RES (2)..(4)..(36): Xaa is C or S

SEQ ID NO: 43379 - protein, 24 aa, Artificial Sequence
  Cyclic GFR-binding peptide
EPIKGYVVKDYEDFYLMNIPSLET

SEQ ID NO: 43380 - protein, 31 aa, Artificial Sequence; identical to SEQ ID NO: 40402
  Cyclic GFR-binding peptide
  MOD_RES (1)..(3): Xaa is C or S

SEQ ID NO: 43381 - protein, 39 aa, Artificial Sequence; identical to SEQ ID NO: 40403
  Cyclic GFR-binding peptide
  MOD_RES (2)..(4)..(36)..(37): Xaa is C or S

SEQ ID NO: 43382 - protein, 37 aa, Artificial Sequence; identical to SEQ ID NO: 40404
  Cyclic GFR-binding peptide
  MOD_RES (2)..(35)..(36): Xaa is C or S

SEQ ID NO: 43383 - protein, 30 aa, Artificial Sequence; identical to SEQ ID NO: 40405
  Cyclic GFR-binding peptide
  MOD_RES (2)..(2): Xaa is C or S

SEQ ID NO: 43384 - protein, 32 aa, Artificial Sequence; identical to SEQ ID NO: 40406
  Cyclic GFR-binding peptide
  MOD_RES (2)..(2): Xaa is C or S

SEQ ID NO: 43385 - protein, 34 aa, Artificial Sequence; identical to SEQ ID NO: 40407
  Cyclic GFR-binding peptide
  MOD_RES (1)..(3)..(34): Xaa is C or S

SEQ ID NO: 43386 - protein, 33 aa, Artificial Sequence; identical to SEQ ID NO: 40408
  Cyclic GFR-binding peptide
  MOD_RES (30)..(31): Xaa is C or S

SEQ ID NO: 43387 - protein, 36 aa, Artificial Sequence; identical to SEQ ID NO: 40409
  Cyclic GFR-binding peptide
  MOD_RES (2)..(4)..(36): Xaa is C or S

SEQ ID NO: 43388 - protein, 30 aa, Artificial Sequence; identical to SEQ ID NO: 40410
  Cyclic GFR-binding peptide
  MOD_RES (28)..(29): Xaa is C or S

SEQ ID NO: 43389 - protein, 29 aa, Artificial Sequence
  Cyclic GFR-binding peptide
  MOD_RES (1)..(3): Xaa is C or S
XGXSEVVMDPIKGYVVNNASDFYLINIPS

SEQ ID NO: 43390 - protein, 37 aa, Artificial Sequence; identical to SEQ ID NO: 40412
  Cyclic GFR-binding peptide
  MOD_RES (31)..(32): Xaa is C or S

SEQ ID NO: 43391 - protein, 31 aa, Artificial Sequence; identical to SEQ ID NO: 40413
  Cyclic GFR-binding peptide
  MOD_RES (28)..(29): Xaa is C or S

SEQ ID NO: 43392 - protein, 31 aa, Artificial Sequence; identical to SEQ ID NO: 40414
  Cyclic GFR-binding peptide
  MOD_RES (27)..(28): Xaa is C or S

SEQ ID NO: 43393 - protein, 23 aa, Artificial Sequence
  Cyclic GFR-binding peptide
PIKGYVVKENEDFYLMNIPSLET

SEQ ID NO: 43394 - protein, 40 aa, Artificial Sequence; identical to SEQ ID NO: 40416
  Cyclic GFR-binding peptide
  MOD_RES (2)..(34)..(35): Xaa is C or S

SEQ ID NO: 43395 - protein, 26 aa, Artificial Sequence
  Cyclic GFR-binding peptide
MDPIKGYVVKENEDFYLMNIPSLETP

SEQ ID NO: 43396 - protein, 34 aa, Artificial Sequence; identical to SEQ ID NO: 40418
  Cyclic GFR-binding peptide
  MOD_RES (28)..(29): Xaa is C or S

SEQ ID NO: 43397 - protein, 24 aa, Artificial Sequence
  Cyclic GFR-binding peptide
VVMDPIKGYVVKENEDFYLMNIPS

SEQ ID NO: 43398 - protein, 35 aa, Artificial Sequence; identical to SEQ ID NO: 40420
  Cyclic GFR-binding peptide
  MOD_RES (1)..(3)..(35): Xaa is C or S

SEQ ID NO: 43399 - protein, 29 aa, Artificial Sequence
  Cyclic GFR-binding peptide
  MOD_RES (28)..(29): Xaa is C or S
MDPIKGYVVKENEDFYLMNIPSLETPVXX

SEQ ID NO: 43400 - protein, 36 aa, Artificial Sequence; identical to SEQ ID NO: 40422
  Cyclic GFR-binding peptide
  MOD_RES (31)..(32): Xaa is C or S

SEQ ID NO: 43401 - protein, 28 aa, Artificial Sequence
  Cyclic GFR-binding peptide
  MOD_RES (26)..(27): Xaa is C or S
PIKGYVVNNASDFYLINIPSLRTPVXXT

SEQ ID NO: 43402 - protein, 38 aa, Artificial Sequence; identical to SEQ ID NO: 40424
  Cyclic GFR-binding peptide
  MOD_RES (1)..(3)..(35)..(36): Xaa is C or S

SEQ ID NO: 43403 - protein, 26 aa, Artificial Sequence
  Cyclic GFR-binding peptide
NPIKGYIVNNSSDFYLVNIPSLKTPA

SEQ ID NO: 43404 - protein, 26 aa, Artificial Sequence
  Cyclic GFR-binding peptide
VMDPIKGYVVKENEDFYLMNIPSLET

SEQ ID NO: 43405 - protein, 27 aa, Artificial Sequence
  Cyclic GFR-binding peptide
SVAMGPIKGYYTVVGKDFYLINIPSLK

SEQ ID NO: 43406 - protein, 26 aa, Artificial Sequence
  Cyclic GFR-binding peptide
ARVVMNPIKGYIVNSSDDFYLVNIPS

SEQ ID NO: 43407 - protein, 28 aa, Artificial Sequence
  Cyclic GFR-binding peptide
  MOD_RES (27)..(28): Xaa is C or S
NPIKGYIVNSSDDFYLVNIPSLKTPAXX

SEQ ID NO: 43408 - protein, 39 aa, Artificial Sequence; identical to SEQ ID NO: 40430
  Cyclic GFR-binding peptide
  MOD_RES (2)..(34): Xaa is C or S

SEQ ID NO: 43409 - protein, 30 aa, Artificial Sequence; identical to SEQ ID NO: 40431
  Cyclic GFR-binding peptide
  MOD_RES (1)..(3): Xaa is C or S

SEQ ID NO: 43410 - protein, 30 aa, Artificial Sequence; identical to SEQ ID NO: 40432
  Cyclic GFR-binding peptide
  MOD_RES (30)..(30): Xaa is C or S

SEQ ID NO: 43411 - protein, 32 aa, Artificial Sequence; identical to SEQ ID NO: 40433
  Cyclic GFR-binding peptide
  MOD_RES (28)..(29): Xaa is C or S

SEQ ID NO: 43412 - protein, 40 aa, Artificial Sequence; identical to SEQ ID NO: 40434
  Cyclic GFR-binding peptide
  MOD_RES (2)..(34)..(35): Xaa is C or S

SEQ ID NO: 43413 - protein, 36 aa, Artificial Sequence; identical to SEQ ID NO: 40435
  Cyclic GFR-binding peptide
  MOD_RES (30)..(31): Xaa is C or S

SEQ ID NO: 43414 - protein, 27 aa, Artificial Sequence
  Cyclic GFR-binding peptide
VMNPIKGYIVNSSDDFYLVNIPSLKTP

SEQ ID NO: 43415 - protein, 27 aa, Artificial Sequence
  Cyclic GFR-binding peptide
VMNPIKGYIVNNSSDFYLVNIPSLKTP

SEQ ID NO: 43416 - protein, 32 aa, Artificial Sequence; identical to SEQ ID NO: 40438
  Cyclic GFR-binding peptide
  MOD_RES (32)..(32): Xaa is C or S

SEQ ID NO: 43417 - protein, 33 aa, Artificial Sequence; identical to SEQ ID NO: 40439
  Cyclic GFR-binding peptide
  MOD_RES (28)..(29): Xaa is C or S

SEQ ID NO: 43418 - protein, 37 aa, Artificial Sequence; identical to SEQ ID NO: 40440
  Cyclic GFR-binding peptide
  MOD_RES (2)..(34)..(35): Xaa is C or S

SEQ ID NO: 43419 - protein, 28 aa, Artificial Sequence
  Cyclic GFR-binding peptide
  MOD_RES (26)..(27): Xaa is C or S
PIKGYYTVVGKDFYLINIPSLKTPVXXA

SEQ ID NO: 43420 - protein, 25 aa, Artificial Sequence
  Cyclic GFR-binding peptide
VVMEPIKGYVVKDYEDFYLMNIPSL

SEQ ID NO: 43421 - protein, 24 aa, Artificial Sequence
  Cyclic GFR-binding peptide
VVMDPIKGYVVNNAADFYLINIPS

SEQ ID NO: 43422 - protein, 40 aa, Artificial Sequence; identical to SEQ ID NO: 40444
  Cyclic GFR-binding peptide
  MOD_RES (1)..(3)..(35)..(36): Xaa is C or S

SEQ ID NO: 43423 - protein, 30 aa, Artificial Sequence; identical to SEQ ID NO: 40445
  Cyclic GFR-binding peptide
  MOD_RES (2)..(2): Xaa is C or S

SEQ ID NO: 43424 - protein, 32 aa, Artificial Sequence; identical to SEQ ID NO: 40446
  Cyclic GFR-binding peptide
  MOD_RES (32)..(32): Xaa is C or S

SEQ ID NO: 43425 - protein, 27 aa, Artificial Sequence
  Cyclic GFR-binding peptide
  MOD_RES (27)..(27): Xaa is C or S
GPIKGYYTVVGKDFYLINIPSLKTPVX

SEQ ID NO: 43426 - protein, 31 aa, Artificial Sequence; identical to SEQ ID NO: 40448
  Cyclic GFR-binding peptide
  MOD_RES (26)..(27): Xaa is C or S

SEQ ID NO: 43427 - protein, 20 aa, Artificial Sequence
  Cyclic GFR-binding peptide
PIKGYVVNNASDFYLINIPS

SEQ ID NO: 43428 - protein, 23 aa, Artificial Sequence
  Cyclic GFR-binding peptide
EPIKGYTPVGMDDFYLVNIPSLK

SEQ ID NO: 43429 - protein, 37 aa, Artificial Sequence; identical to SEQ ID NO: 40451
  Cyclic GFR-binding peptide
  MOD_RES (32)..(33): Xaa is C or S

SEQ ID NO: 43430 - protein, 29 aa, Artificial Sequence
  Cyclic GFR-binding peptide
  MOD_RES (1)..(3): Xaa is C or S
XGXAKVVMNPIKGYIVNNSSDFYLVNIPS

SEQ ID NO: 43431 - protein, 34 aa, Artificial Sequence; identical to SEQ ID NO: 40453
  Cyclic GFR-binding peptide
  MOD_RES (2)..(34): Xaa is C or S

SEQ ID NO: 43432 - protein, 29 aa, Artificial Sequence
  Cyclic GFR-binding peptide
  MOD_RES (29)..(29): Xaa is C or S
VIMPIKGYLLVRGNDFYLMNIPSTKVPAX

SEQ ID NO: 43433 - protein, 28 aa, Artificial Sequence
  Cyclic GFR-binding peptide
  MOD_RES (28)..(28): Xaa is C or S
MNPIKGYIVNNSSDFYLVNIPSLKTPAX

SEQ ID NO: 43434 - protein, 41 aa, Artificial Sequence; identical to SEQ ID NO: 40456
  Cyclic GFR-binding peptide
  MOD_RES (2)..(4)..(36)..(37): Xaa is C or S

SEQ ID NO: 43435 - protein, 29 aa, Artificial Sequence
  Cyclic GFR-binding peptide
  MOD_RES (27)..(27): Xaa is C or S
NPIKGYIVNSSDDFYLVNIPSLKTPAXTP

SEQ ID NO: 43436 - protein, 27 aa, Artificial Sequence
  Cyclic GFR-binding peptide
AMGPIKGYYTVVGKDFYLINIPSLKTP

SEQ ID NO: 43437 - protein, 34 aa, Artificial Sequence; identical to SEQ ID NO: 40459
  Cyclic GFR-binding peptide
  MOD_RES (31)..(32): Xaa is C or S

SEQ ID NO: 43438 - protein, 41 aa, Artificial Sequence; identical to SEQ ID NO: 40460
  Cyclic GFR-binding peptide
  MOD_RES (1)..(3)..(35): Xaa is C or S

SEQ ID NO: 43439 - protein, 30 aa, Artificial Sequence; identical to SEQ ID NO: 40461
  Cyclic GFR-binding peptide
  MOD_RES (2)..(4): Xaa is C or S

SEQ ID NO: 43440 - protein, 31 aa, Artificial Sequence; identical to SEQ ID NO: 40462
  Cyclic GFR-binding peptide
  MOD_RES (2)..(4): Xaa is C or S

SEQ ID NO: 43441 - protein, 20 aa, Artificial Sequence
  Cyclic GFR-binding peptide
PIKGYLLVRGNDFYLMNIPS

SEQ ID NO: 43442 - protein, 35 aa, Artificial Sequence; identical to SEQ ID NO: 40464
  Cyclic GFR-binding peptide
  MOD_RES (31)..(32): Xaa is C or S

SEQ ID NO: 43443 - protein, 31 aa, Artificial Sequence; identical to SEQ ID NO: 40465
  Cyclic GFR-binding peptide
  MOD_RES (2)..(4): Xaa is C or S

SEQ ID NO: 43444 - protein, 41 aa, Artificial Sequence; identical to SEQ ID NO: 40466
  Cyclic GFR-binding peptide
  MOD_RES (1)..(3)..(35)..(36): Xaa is C or S

SEQ ID NO: 43445 - protein, 31 aa, Artificial Sequence; identical to SEQ ID NO: 40467
  Cyclic GFR-binding peptide
  MOD_RES (30)..(31): Xaa is C or S

SEQ ID NO: 43446 - protein, 30 aa, Artificial Sequence; identical to SEQ ID NO: 40468
  Cyclic GFR-binding peptide
  MOD_RES (29)..(30): Xaa is C or S

SEQ ID NO: 43447 - protein, 32 aa, Artificial Sequence; identical to SEQ ID NO: 40469
  Cyclic GFR-binding peptide
  MOD_RES (2)..(2): Xaa is C or S

SEQ ID NO: 43448 - protein, 38 aa, Artificial Sequence; identical to SEQ ID NO: 40470
  Cyclic GFR-binding peptide
  MOD_RES (1)..(33)..(34): Xaa is C or S

SEQ ID NO: 43449 - protein, 25 aa, Artificial Sequence
  Cyclic GFR-binding peptide
EVVMEPIKGYVVKDYEDFYLMNIPS

SEQ ID NO: 43450 - protein, 35 aa, Artificial Sequence; identical to SEQ ID NO: 40472
  Cyclic GFR-binding peptide
  MOD_RES (31)..(32): Xaa is C or S

SEQ ID NO: 43451 - protein, 31 aa, Artificial Sequence; identical to SEQ ID NO: 40473
  Cyclic GFR-binding peptide
  MOD_RES (2)..(2): Xaa is C or S

SEQ ID NO: 43452 - protein, 21 aa, Artificial Sequence
  Cyclic GFR-binding peptide
EPIKGYVVKDYEDFYLMNIPS

SEQ ID NO: 43453 - protein, 39 aa, Artificial Sequence; identical to SEQ ID NO: 40475
  Cyclic GFR-binding peptide
  MOD_RES (33)..(34): Xaa is C or S

SEQ ID NO: 43454 - protein, 31 aa, Artificial Sequence; identical to SEQ ID NO: 40476
  Cyclic GFR-binding peptide

SEQ ID NO: 43455 - protein, 32 aa, Artificial Sequence; identical to SEQ ID NO: 40477
  Cyclic GFR-binding peptide
  MOD_RES (28)..(29): Xaa is C or S

SEQ ID NO: 43456 - protein, 28 aa, Artificial Sequence
  Cyclic GFR-binding peptide
  MOD_RES (28)..(28): Xaa is C or S
MGPIKGYYTVVGKDFYLINIPSLKTPVX

SEQ ID NO: 43457 - protein, 30 aa, Artificial Sequence; identical to SEQ ID NO: 40479
  Cyclic GFR-binding peptide
  MOD_RES (2)..(4): Xaa is C or S

SEQ ID NO: 43458 - protein, 32 aa, Artificial Sequence; identical to SEQ ID NO: 40480
  Cyclic GFR-binding peptide
  MOD_RES (30)..(31): Xaa is C or S

SEQ ID NO: 43459 - protein, 38 aa, Artificial Sequence; identical to SEQ ID NO: 40481
  Cyclic GFR-binding peptide
  MOD_RES (1)..(3)..(35)..(36): Xaa is C or S

SEQ ID NO: 43460 - protein, 32 aa, Artificial Sequence; identical to SEQ ID NO: 40482
  Cyclic GFR-binding peptide
  MOD_RES (2)..(4): Xaa is C or S

SEQ ID NO: 43461 - protein, 34 aa, Artificial Sequence; identical to SEQ ID NO: 40483
  Cyclic GFR-binding peptide
  MOD_RES (30)..(31): Xaa is C or S

SEQ ID NO: 43462 - protein, 34 aa, Artificial Sequence; identical to SEQ ID NO: 40484
  Cyclic GFR-binding peptide
  MOD_RES (2)..(34): Xaa is C or S

SEQ ID NO: 43463 - protein, 33 aa, Artificial Sequence; identical to SEQ ID NO: 40485
  Cyclic GFR-binding peptide
  MOD_RES (27)..(28): Xaa is C or S

SEQ ID NO: 43464 - protein, 35 aa, Artificial Sequence; identical to SEQ ID NO: 40486
  Cyclic GFR-binding peptide
  MOD_RES (2)..(34)..(35): Xaa is C or S

SEQ ID NO: 43465 - protein, 25 aa, Artificial Sequence
  Cyclic GFR-binding peptide
SMGEPIKGYTPVGMDDFYLVNIPSL

SEQ ID NO: 43466 - protein, 31 aa, Artificial Sequence; identical to SEQ ID NO: 40488
  Cyclic GFR-binding peptide

SEQ ID NO: 43467 - protein, 40 aa, Artificial Sequence; identical to SEQ ID NO: 40489
  Cyclic GFR-binding peptide
  MOD_RES (2)..(4)..(36)..(37): Xaa is C or S

SEQ ID NO: 43468 - protein, 38 aa, Artificial Sequence; identical to SEQ ID NO: 40490
  Cyclic GFR-binding peptide
  MOD_RES (2)..(4)..(36)..(37): Xaa is C or S

SEQ ID NO: 43469 - protein, 40 aa, Artificial Sequence; identical to SEQ ID NO: 40491
  Cyclic GFR-binding peptide
  MOD_RES (2)..(34)..(35): Xaa is C or S

SEQ ID NO: 43470 - protein, 28 aa, Artificial Sequence
  Cyclic GFR-binding peptide
  MOD_RES (27)..(28): Xaa is C or S
DPIKGYVVNNAADFYLINIPSLRAPVXX

SEQ ID NO: 43471 - protein, 36 aa, Artificial Sequence; identical to SEQ ID NO: 40493
  Cyclic GFR-binding peptide
  MOD_RES (2)..(34)..(35): Xaa is C or S

SEQ ID NO: 43472 - protein, 34 aa, Artificial Sequence; identical to SEQ ID NO: 40494
  Cyclic GFR-binding peptide
  MOD_RES (1)..(3): Xaa is C or S

SEQ ID NO: 43473 - protein, 37 aa, Artificial Sequence; identical to SEQ ID NO: 40495
  Cyclic GFR-binding peptide
  MOD_RES (31)..(32): Xaa is C or S

SEQ ID NO: 43474 - protein, 30 aa, Artificial Sequence; identical to SEQ ID NO: 40496
  Cyclic GFR-binding peptide

SEQ ID NO: 43475 - protein, 33 aa, Artificial Sequence; identical to SEQ ID NO: 40497
  Cyclic GFR-binding peptide
  MOD_RES (29)..(30): Xaa is C or S

SEQ ID NO: 43476 - protein, 39 aa, Artificial Sequence; identical to SEQ ID NO: 40498
  Cyclic GFR-binding peptide
  MOD_RES (2)..(34)..(35): Xaa is C or S

SEQ ID NO: 43477 - protein, 27 aa, Artificial Sequence
  Cyclic GFR-binding peptide
MDPIKGYVVNNAADFYLINIPSLRAPV

SEQ ID NO: 43478 - protein, 33 aa, Artificial Sequence; identical to SEQ ID NO: 40500
  Cyclic GFR-binding peptide
  MOD_RES (29)..(30): Xaa is C or S

SEQ ID NO: 43479 - protein, 32 aa, Artificial Sequence; identical to SEQ ID NO: 40501
  Cyclic GFR-binding peptide
  MOD_RES (32)..(32): Xaa is C or S

SEQ ID NO: 43480 - protein, 35 aa, Artificial Sequence; identical to SEQ ID NO: 40502
  Cyclic GFR-binding peptide
  MOD_RES (1)..(3)..(35): Xaa is C or S

SEQ ID NO: 43481 - protein, 22 aa, Artificial Sequence
  Cyclic GFR-binding peptide
MDPIKGYVVKENEDFYLMNIPS

SEQ ID NO: 43482 - protein, 36 aa, Artificial Sequence; identical to SEQ ID NO: 40504
  Cyclic GFR-binding peptide
  MOD_RES (32)..(33): Xaa is C or S

SEQ ID NO: 43483 - protein, 35 aa, Artificial Sequence; identical to SEQ ID NO: 40505
  Cyclic GFR-binding peptide
  MOD_RES (1)..(32)..(33): Xaa is C or S

SEQ ID NO: 43484 - protein, 24 aa, Artificial Sequence
  Cyclic GFR-binding peptide
PIKGYVVKDYEDFYLMNIPSLETP

SEQ ID NO: 43485 - protein, 36 aa, Artificial Sequence; identical to SEQ ID NO: 40507
  Cyclic GFR-binding peptide
  MOD_RES (31)..(31): Xaa is C or S

SEQ ID NO: 43486 - protein, 35 aa, Artificial Sequence; identical to SEQ ID NO: 40508
  Cyclic GFR-binding peptide
  MOD_RES (30)..(31): Xaa is C or S

SEQ ID NO: 43487 - protein, 39 aa, Artificial Sequence; identical to SEQ ID NO: 40509
  Cyclic GFR-binding peptide
  MOD_RES (1)..(33)..(34): Xaa is C or S

SEQ ID NO: 43488 - protein, 40 aa, Artificial Sequence; identical to SEQ ID NO: 40510
  Cyclic GFR-binding peptide
  MOD_RES (1)..(3)..(34)..(35): Xaa is C or S

SEQ ID NO: 43489 - protein, 28 aa, Artificial Sequence
  Cyclic GFR-binding peptide
GEVVMEPIKGYVVKDYEDFYLMNIPSLE

SEQ ID NO: 43490 - protein, 29 aa, Artificial Sequence
  Cyclic GFR-binding peptide
  MOD_RES (2)..(2): Xaa is C or S
GXGEVVMEPIKGYVVKDYEDFYLMNIPSL

SEQ ID NO: 43491 - protein, 38 aa, Artificial Sequence; identical to SEQ ID NO: 40513
  Cyclic GFR-binding peptide
  MOD_RES (2)..(34)..(35): Xaa is C or S

SEQ ID NO: 43492 - protein, 26 aa, Artificial Sequence
  Cyclic GFR-binding peptide
  MOD_RES (26)..(26): Xaa is C or S
PIKGYVVKENEDFYLMNIPSLETPVX

SEQ ID NO: 43493 - protein, 36 aa, Artificial Sequence; identical to SEQ ID NO: 40515
  Cyclic GFR-binding peptide
  MOD_RES (1)..(33)..(34): Xaa is C or S

SEQ ID NO: 43494 - protein, 36 aa, Artificial Sequence; identical to SEQ ID NO: 40516
  Cyclic GFR-binding peptide
  MOD_RES (2)..(33)..(34): Xaa is C or S

SEQ ID NO: 43495 - protein, 31 aa, Artificial Sequence; identical to SEQ ID NO: 40517
  Cyclic GFR-binding peptide
  MOD_RES (27)..(27): Xaa is C or S

SEQ ID NO: 43496 - protein, 23 aa, Artificial Sequence
  Cyclic GFR-binding peptide
VMEPIKGYVVKDYEDFYLMNIPS

SEQ ID NO: 43497 - protein, 29 aa, Artificial Sequence
  Cyclic GFR-binding peptide
SMGEPIKGYTPVGMDDFYLVNIPSLKTPV

SEQ ID NO: 43498 - protein, 32 aa, Artificial Sequence; identical to SEQ ID NO: 40520
  Cyclic GFR-binding peptide
  MOD_RES (31)..(32): Xaa is C or S

SEQ ID NO: 43499 - protein, 28 aa, Artificial Sequence
  Cyclic GFR-binding peptide
ARVVMNPIKGYIVNSSDDFYLVNIPSLQ

SEQ ID NO: 43500 - protein, 33 aa, Artificial Sequence; identical to SEQ ID NO: 40522
  Cyclic GFR-binding peptide
  MOD_RES (27)..(28): Xaa is C or S

SEQ ID NO: 43501 - protein, 33 aa, Artificial Sequence; identical to SEQ ID NO: 40523
  Cyclic GFR-binding peptide
  MOD_RES (2)..(4): Xaa is C or S

SEQ ID NO: 43502 - protein, 32 aa, Artificial Sequence; identical to SEQ ID NO: 40524
  Cyclic GFR-binding peptide
  MOD_RES (30)..(31): Xaa is C or S

SEQ ID NO: 43503 - protein, 29 aa, Artificial Sequence
  Cyclic GFR-binding peptide
  MOD_RES (2)..(2): Xaa is C or S
GXEAVSMGEPIKGYTPVGMDDFYLVNIPS

SEQ ID NO: 43504 - protein, 33 aa, Artificial Sequence; identical to SEQ ID NO: 40526
  Cyclic GFR-binding peptide
  MOD_RES (32)..(33): Xaa is C or S

SEQ ID NO: 43505 - protein, 32 aa, Artificial Sequence; identical to SEQ ID NO: 40527
  Cyclic GFR-binding peptide
  MOD_RES (2)..(4): Xaa is C or S

SEQ ID NO: 43506 - protein, 35 aa, Artificial Sequence; identical to SEQ ID NO: 40528
  Cyclic GFR-binding peptide
  MOD_RES (30)..(31): Xaa is C or S

SEQ ID NO: 43507 - protein, 35 aa, Artificial Sequence; identical to SEQ ID NO: 40529
  Cyclic GFR-binding peptide
  MOD_RES (1)..(3)..(35): Xaa is C or S

SEQ ID NO: 43508 - protein, 37 aa, Artificial Sequence; identical to SEQ ID NO: 40530
  Cyclic GFR-binding peptide
  MOD_RES (2)..(34)..(35): Xaa is C or S

SEQ ID NO: 43509 - protein, 36 aa, Artificial Sequence; identical to SEQ ID NO: 40531
  Cyclic GFR-binding peptide
  MOD_RES (30)..(31): Xaa is C or S

SEQ ID NO: 43510 - protein, 34 aa, Artificial Sequence; identical to SEQ ID NO: 40532
  Cyclic GFR-binding peptide
  MOD_RES (29)..(30): Xaa is C or S

SEQ ID NO: 43511 - protein, 28 aa, Artificial Sequence
  Cyclic GFR-binding peptide
  MOD_RES (28)..(28): Xaa is C or S
MNPIKGYIVNSSDDFYLVNIPSLQTPAX

SEQ ID NO: 43512 - protein, 39 aa, Artificial Sequence; identical to SEQ ID NO: 40534
  Cyclic GFR-binding peptide
  MOD_RES (1)..(3)..(34)..(35): Xaa is C or S

SEQ ID NO: 43513 - protein, 34 aa, Artificial Sequence; identical to SEQ ID NO: 40535
  Cyclic GFR-binding peptide
  MOD_RES (31)..(32): Xaa is C or S

SEQ ID NO: 43514 - protein, 42 aa, Artificial Sequence; identical to SEQ ID NO: 40536
  Cyclic GFR-binding peptide
  MOD_RES (2)..(4)..(36)..(37): Xaa is C or S

SEQ ID NO: 43515 - protein, 36 aa, Artificial Sequence; identical to SEQ ID NO: 40537
  Cyclic GFR-binding peptide
  MOD_RES (2)..(34)..(35): Xaa is C or S

SEQ ID NO: 43516 - protein, 33 aa, Artificial Sequence; identical to SEQ ID NO: 40538
  Cyclic GFR-binding peptide
  MOD_RES (28)..(29): Xaa is C or S

SEQ ID NO: 43517 - protein, 38 aa, Artificial Sequence; identical to SEQ ID NO: 40539
  Cyclic GFR-binding peptide
  MOD_RES (32)..(33): Xaa is C or S

SEQ ID NO: 43518 - protein, 36 aa, Artificial Sequence; identical to SEQ ID NO: 40540
  Cyclic GFR-binding peptide
  MOD_RES (31)..(32): Xaa is C or S

SEQ ID NO: 43519 - protein, 34 aa, Artificial Sequence; identical to SEQ ID NO: 40541
  Cyclic GFR-binding peptide
  MOD_RES (30)..(31): Xaa is C or S

SEQ ID NO: 43520 - protein, 27 aa, Artificial Sequence
  Cyclic GFR-binding peptide
VMEPIKGYVVKDYEDFYLMNIPSLETP

SEQ ID NO: 43521 - protein, 29 aa, Artificial Sequence
  Cyclic GFR-binding peptide
  MOD_RES (1)..(3): Xaa is C or S
XGXARVVMNPIKGYIVNSSDDFYLVNIPS

SEQ ID NO: 43522 - protein, 35 aa, Artificial Sequence; identical to SEQ ID NO: 40544
  Cyclic GFR-binding peptide
  MOD_RES (30)..(31): Xaa is C or S

SEQ ID NO: 43523 - protein, 31 aa, Artificial Sequence; identical to SEQ ID NO: 40545
  Cyclic GFR-binding peptide

SEQ ID NO: 43524 - protein, 22 aa, Artificial Sequence
  Cyclic GFR-binding peptide
PIKGYVVKDYEDFYLMNIPSLE

SEQ ID NO: 43525 - protein, 31 aa, Artificial Sequence; identical to SEQ ID NO: 40547
  Cyclic GFR-binding peptide

SEQ ID NO: 43526 - protein, 40 aa, Artificial Sequence; identical to SEQ ID NO: 40548
  Cyclic GFR-binding peptide
  MOD_RES (1)..(3)..(35)..(36): Xaa is C or S

SEQ ID NO: 43527 - protein, 37 aa, Artificial Sequence; identical to SEQ ID NO: 40549
  Cyclic GFR-binding peptide
  MOD_RES (1)..(33)..(34): Xaa is C or S

SEQ ID NO: 43528 - protein, 37 aa, Artificial Sequence; identical to SEQ ID NO: 40550
  Cyclic GFR-binding peptide
  MOD_RES (31)..(32): Xaa is C or S

SEQ ID NO: 43529 - protein, 34 aa, Artificial Sequence; identical to SEQ ID NO: 40551
  Cyclic GFR-binding peptide
  MOD_RES (1)..(32)..(33): Xaa is C or S

SEQ ID NO: 43530 - protein, 32 aa, Artificial Sequence; identical to SEQ ID NO: 40552
  Cyclic GFR-binding peptide
  MOD_RES (29)..(29): Xaa is C or S

SEQ ID NO: 43531 - protein, 31 aa, Artificial Sequence; identical to SEQ ID NO: 40553
  Cyclic GFR-binding peptide
  MOD_RES (31)..(31): Xaa is C or S

SEQ ID NO: 43532 - protein, 28 aa, Artificial Sequence
  Cyclic GFR-binding peptide
  MOD_RES (1)..(1): Xaa is C or S
XEAVSMGEPIKGYTPVGMDDFYLVNIPS

SEQ ID NO: 43533 - protein, 41 aa, Artificial Sequence; identical to SEQ ID NO: 40555
  Cyclic GFR-binding peptide
  MOD_RES (2)..(35)..(36): Xaa is C or S

SEQ ID NO: 43534 - protein, 33 aa, Artificial Sequence; identical to SEQ ID NO: 40556
  Cyclic GFR-binding peptide
  MOD_RES (27)..(28): Xaa is C or S

SEQ ID NO: 43535 - protein, 32 aa, Artificial Sequence; identical to SEQ ID NO: 40557
  Cyclic GFR-binding peptide
  MOD_RES (31)..(32): Xaa is C or S

SEQ ID NO: 43536 - protein, 38 aa, Artificial Sequence; identical to SEQ ID NO: 40558
  Cyclic GFR-binding peptide
  MOD_RES (1)..(3)..(36)..(37): Xaa is C or S

SEQ ID NO: 43537 - protein, 36 aa, Artificial Sequence; identical to SEQ ID NO: 40559
  Cyclic GFR-binding peptide
  MOD_RES (2)..(34)..(35): Xaa is C or S

SEQ ID NO: 43538 - protein, 22 aa, Artificial Sequence
  Cyclic GFR-binding peptide
PIKGYLLVRGNDFYLMNIPSTK

SEQ ID NO: 43539 - protein, 30 aa, Artificial Sequence; identical to SEQ ID NO: 40561
  Cyclic GFR-binding peptide
  MOD_RES (26)..(27): Xaa is C or S

SEQ ID NO: 43540 - protein, 34 aa, Artificial Sequence; identical to SEQ ID NO: 40562
  Cyclic GFR-binding peptide
  MOD_RES (31)..(32): Xaa is C or S

SEQ ID NO: 43541 - protein, 33 aa, Artificial Sequence; identical to SEQ ID NO: 40563
  Cyclic GFR-binding peptide
  MOD_RES (1)..(3): Xaa is C or S

SEQ ID NO: 43542 - protein, 26 aa, Artificial Sequence
  Cyclic GFR-binding peptide
EVVMDPIKGYVVNNAADFYLINIPSL

SEQ ID NO: 43543 - protein, 28 aa, Artificial Sequence
  Cyclic GFR-binding peptide
  MOD_RES (1)..(1): Xaa is C or S
XSEVVMDPIKGYVVNNASDFYLINIPSL

SEQ ID NO: 43544 - protein, 29 aa, Artificial Sequence
  Cyclic GFR-binding peptide
ESVAMGPIKGYYTVVGKDFYLINIPSLKT

SEQ ID NO: 43545 - protein, 32 aa, Artificial Sequence; identical to SEQ ID NO: 40567
  Cyclic GFR-binding peptide
  MOD_RES (31)..(32): Xaa is C or S

SEQ ID NO: 43546 - protein, 36 aa, Artificial Sequence; identical to SEQ ID NO: 40568
  Cyclic GFR-binding peptide
  MOD_RES (32)..(33): Xaa is C or S

SEQ ID NO: 43547 - protein, 29 aa, Artificial Sequence
  Cyclic GFR-binding peptide
  MOD_RES (28)..(29): Xaa is C or S
MEPIKGYVVKDYEDFYLMNIPSLETPVXX

SEQ ID NO: 43548 - protein, 32 aa, Artificial Sequence; identical to SEQ ID NO: 40570
  Cyclic GFR-binding peptide
  MOD_RES (1)..(3): Xaa is C or S

SEQ ID NO: 43549 - protein, 36 aa, Artificial Sequence; identical to SEQ ID NO: 40571
  Cyclic GFR-binding peptide
  MOD_RES (1)..(3)..(35)..(36): Xaa is C or S

SEQ ID NO: 43550 - protein, 28 aa, Artificial Sequence
  Cyclic GFR-binding peptide
  MOD_RES (27)..(28): Xaa is C or S
GPIKGYYTVVGKDFYLINIPSLKTPVXX

SEQ ID NO: 43551 - protein, 38 aa, Artificial Sequence; identical to SEQ ID NO: 40573
  Cyclic GFR-binding peptide
  MOD_RES (1)..(33)..(34): Xaa is C or S

SEQ ID NO: 43552 - protein, 25 aa, Artificial Sequence
  Cyclic GFR-binding peptide
PIKGYIVNSSDDFYLVNIPSLKTPA

SEQ ID NO: 43553 - protein, 31 aa, Artificial Sequence; identical to SEQ ID NO: 40575
  Cyclic GFR-binding peptide
  MOD_RES (27)..(28): Xaa is C or S

SEQ ID NO: 43554 - protein, 37 aa, Artificial Sequence; identical to SEQ ID NO: 40576
  Cyclic GFR-binding peptide
  MOD_RES (1)..(3)..(35)..(36): Xaa is C or S

SEQ ID NO: 43555 - protein, 34 aa, Artificial Sequence; identical to SEQ ID NO: 40577
  Cyclic GFR-binding peptide
  MOD_RES (31)..(32): Xaa is C or S

SEQ ID NO: 43556 - protein, 40 aa, Artificial Sequence; identical to SEQ ID NO: 40578
  Cyclic GFR-binding peptide
  MOD_RES (2)..(4)..(36): Xaa is C or S

SEQ ID NO: 43557 - protein, 39 aa, Artificial Sequence; identical to SEQ ID NO: 40579
  Cyclic GFR-binding peptide
  MOD_RES (1)..(3)..(35)..(36): Xaa is C or S

SEQ ID NO: 43558 - protein, 26 aa, Artificial Sequence
  Cyclic GFR-binding peptide
MEPIKGYVVKDYEDFYLMNIPSLETP

SEQ ID NO: 43559 - protein, 25 aa, Artificial Sequence
  Cyclic GFR-binding peptide
EPIKGYVVKDYEDFYLMNIPSLETP

SEQ ID NO: 43560 - protein, 34 aa, Artificial Sequence; identical to SEQ ID NO: 40582
  Cyclic GFR-binding peptide
  MOD_RES (32)..(33): Xaa is C or S

SEQ ID NO: 43561 - protein, 38 aa, Artificial Sequence; identical to SEQ ID NO: 40583
  Cyclic GFR-binding peptide
  MOD_RES (2)..(4)..(36)..(37): Xaa is C or S

SEQ ID NO: 43562 - protein, 35 aa, Artificial Sequence; identical to SEQ ID NO: 40584
  Cyclic GFR-binding peptide
  MOD_RES (29)..(30): Xaa is C or S

SEQ ID NO: 43563 - protein, 33 aa, Artificial Sequence; identical to SEQ ID NO: 40585
  Cyclic GFR-binding peptide
  MOD_RES (31)..(32): Xaa is C or S

SEQ ID NO: 43564 - protein, 30 aa, Artificial Sequence; identical to SEQ ID NO: 40586
  Cyclic GFR-binding peptide
  MOD_RES (27)..(28): Xaa is C or S

SEQ ID NO: 43565 - protein, 32 aa, Artificial Sequence; identical to SEQ ID NO: 40587
  Cyclic GFR-binding peptide
  MOD_RES (27)..(28): Xaa is C or S

SEQ ID NO: 43566 - protein, 32 aa, Artificial Sequence; identical to SEQ ID NO: 40588
  Cyclic GFR-binding peptide
  MOD_RES (28)..(29): Xaa is C or S

SEQ ID NO: 43567 - protein, 30 aa, Artificial Sequence; identical to SEQ ID NO: 40589
  Cyclic GFR-binding peptide
  MOD_RES (1)..(3): Xaa is C or S

SEQ ID NO: 43568 - protein, 33 aa, Artificial Sequence; identical to SEQ ID NO: 40590
  Cyclic GFR-binding peptide
  MOD_RES (2)..(2): Xaa is C or S

SEQ ID NO: 43569 - protein, 32 aa, Artificial Sequence; identical to SEQ ID NO: 40591
  Cyclic GFR-binding peptide
  MOD_RES (30)..(31): Xaa is C or S

SEQ ID NO: 43570 - protein, 33 aa, Artificial Sequence; identical to SEQ ID NO: 40592
  Cyclic GFR-binding peptide
  MOD_RES (2)..(2): Xaa is C or S

SEQ ID NO: 43571 - protein, 39 aa, Artificial Sequence; identical to SEQ ID NO: 40593
  Cyclic GFR-binding peptide
  MOD_RES (1)..(3)..(35)..(36): Xaa is C or S

SEQ ID NO: 43572 - protein, 35 aa, Artificial Sequence; identical to SEQ ID NO: 40594
  Cyclic GFR-binding peptide
  MOD_RES (29)..(30): Xaa is C or S

SEQ ID NO: 43573 - protein, 33 aa, Artificial Sequence; identical to SEQ ID NO: 40595
  Cyclic GFR-binding peptide
  MOD_RES (2)..(2): Xaa is C or S

SEQ ID NO: 43574 - protein, 30 aa, Artificial Sequence; identical to SEQ ID NO: 40596
  Cyclic GFR-binding peptide
  MOD_RES (30)..(30): Xaa is C or S

SEQ ID NO: 43575 - protein, 24 aa, Artificial Sequence
  Cyclic GFR-binding peptide
MNPIKGYIVNNSSDFYLVNIPSLK

SEQ ID NO: 43576 - protein, 33 aa, Artificial Sequence; identical to SEQ ID NO: 40598
  Cyclic GFR-binding peptide
  MOD_RES (1)..(33): Xaa is C or S

SEQ ID NO: 43577 - protein, 23 aa, Artificial Sequence
  Cyclic GFR-binding peptide
EPIKGYVVKDYEDFYLMNIPSLE

SEQ ID NO: 43578 - protein, 29 aa, Artificial Sequence
  Cyclic GFR-binding peptide
  MOD_RES (1)..(1): Xaa is C or S
XARVVMNPIKGYIVNSSDDFYLVNIPSLQ

SEQ ID NO: 43579 - protein, 20 aa, Artificial Sequence
  Cyclic GFR-binding peptide
PIKGYVVKDYEDFYLMNIPS

SEQ ID NO: 43580 - protein, 28 aa, Artificial Sequence
  Cyclic GFR-binding peptide
  MOD_RES (26)..(27): Xaa is C or S
PIKGYLLVRGNDFYLMNIPSTKVPAXXT

SEQ ID NO: 43581 - protein, 35 aa, Artificial Sequence; identical to SEQ ID NO: 40603
  Cyclic GFR-binding peptide
  MOD_RES (33)..(34): Xaa is C or S

SEQ ID NO: 43582 - protein, 20 aa, Artificial Sequence
  Cyclic GFR-binding peptide
PIKGYVVKENEDFYLMNIPS

SEQ ID NO: 43583 - protein, 24 aa, Artificial Sequence
  Cyclic GFR-binding peptide
VVMNPIKGYIVNSSDDFYLVNIPS

SEQ ID NO: 43584 - protein, 39 aa, Artificial Sequence; identical to SEQ ID NO: 40606
  Cyclic GFR-binding peptide
  MOD_RES (1)..(3)..(35)..(36): Xaa is C or S

SEQ ID NO: 43585 - protein, 28 aa, Artificial Sequence
  Cyclic GFR-binding peptide
  MOD_RES (2)..(2): Xaa is C or S
GXGEVVMEPIKGYVVKDYEDFYLMNIPS

SEQ ID NO: 43586 - protein, 32 aa, Artificial Sequence; identical to SEQ ID NO: 40608
  Cyclic GFR-binding peptide
  MOD_RES (2)..(4): Xaa is C or S

SEQ ID NO: 43587 - protein, 25 aa, Artificial Sequence
  Cyclic GFR-binding peptide
VMNPIKGYIVNSSDDFYLVNIPSLQ

SEQ ID NO: 43588 - protein, 30 aa, Artificial Sequence; identical to SEQ ID NO: 40610
  Cyclic GFR-binding peptide
  MOD_RES (28)..(29): Xaa is C or S

SEQ ID NO: 43589 - protein, 34 aa, Artificial Sequence; identical to SEQ ID NO: 40611
  Cyclic GFR-binding peptide
  MOD_RES (2)..(4): Xaa is C or S

SEQ ID NO: 43590 - protein, 33 aa, Artificial Sequence; identical to SEQ ID NO: 40612
  Cyclic GFR-binding peptide
  MOD_RES (2)..(2): Xaa is C or S

SEQ ID NO: 43591 - protein, 32 aa, Artificial Sequence; identical to SEQ ID NO: 40613
  Cyclic GFR-binding peptide
  MOD_RES (28)..(29): Xaa is C or S

SEQ ID NO: 43592 - protein, 23 aa, Artificial Sequence
  Cyclic GFR-binding peptide
MEPIKGYVVKDYEDFYLMNIPSL

SEQ ID NO: 43593 - protein, 29 aa, Artificial Sequence
  Cyclic GFR-binding peptide
VVMNPIKGYIVNNSSDFYLVNIPSLKTPA

SEQ ID NO: 43594 - protein, 30 aa, Artificial Sequence; identical to SEQ ID NO: 40616
  Cyclic GFR-binding peptide
  MOD_RES (1)..(3): Xaa is C or S

SEQ ID NO: 43595 - protein, 35 aa, Artificial Sequence; identical to SEQ ID NO: 40617
  Cyclic GFR-binding peptide
  MOD_RES (32)..(33): Xaa is C or S

SEQ ID NO: 43596 - protein, 35 aa, Artificial Sequence; identical to SEQ ID NO: 40618
  Cyclic GFR-binding peptide
  MOD_RES (1)..(3)..(34)..(35): Xaa is C or S

SEQ ID NO: 43597 - protein, 42 aa, Artificial Sequence; identical to SEQ ID NO: 40619
  Cyclic GFR-binding peptide
  MOD_RES (2)..(4)..(36)..(37): Xaa is C or S

SEQ ID NO: 43598 - protein, 26 aa, Artificial Sequence
  Cyclic GFR-binding peptide
EPIKGYTPVGMDDFYLVNIPSLKTPV

SEQ ID NO: 43599 - protein, 29 aa, Artificial Sequence
  Cyclic GFR-binding peptide
  MOD_RES (28)..(29): Xaa is C or S
MDPIKGYVVNNASDFYLINIPSLRTPVXX

SEQ ID NO: 43600 - protein, 32 aa, Artificial Sequence; identical to SEQ ID NO: 40622
  Cyclic GFR-binding peptide
  MOD_RES (26)..(27): Xaa is C or S

SEQ ID NO: 43601 - protein, 33 aa, Artificial Sequence; identical to SEQ ID NO: 40623
  Cyclic GFR-binding peptide
  MOD_RES (32)..(33): Xaa is C or S

SEQ ID NO: 43602 - protein, 35 aa, Artificial Sequence; identical to SEQ ID NO: 40624
  Cyclic GFR-binding peptide
  MOD_RES (1)..(3)..(35): Xaa is C or S

SEQ ID NO: 43603 - protein, 29 aa, Artificial Sequence
  Cyclic GFR-binding peptide
  MOD_RES (26)..(27): Xaa is C or S
PIKGYTPVGMDDFYLVNIPSLKTPVXXAK

SEQ ID NO: 43604 - protein, 29 aa, Artificial Sequence
  Cyclic GFR-binding peptide
SEVVMDPIKGYVVNNASDFYLINIPSLRT

SEQ ID NO: 43605 - protein, 40 aa, Artificial Sequence; identical to SEQ ID NO: 40627
  Cyclic GFR-binding peptide
  MOD_RES (2)..(4)..(36)..(37): Xaa is C or S

SEQ ID NO: 43606 - protein, 25 aa, Artificial Sequence
  Cyclic GFR-binding peptide
NPIKGYIVNSSDDFYLVNIPSLKTP

SEQ ID NO: 43607 - protein, 21 aa, Artificial Sequence
  Cyclic GFR-binding peptide
DPIKGYVVNNASDFYLINIPS

SEQ ID NO: 43608 - protein, 41 aa, Artificial Sequence; identical to SEQ ID NO: 40630
  Cyclic GFR-binding peptide
  MOD_RES (1)..(3)..(35)..(36): Xaa is C or S

SEQ ID NO: 43609 - protein, 32 aa, Artificial Sequence; identical to SEQ ID NO: 40631
  Cyclic GFR-binding peptide
  MOD_RES (2)..(2): Xaa is C or S

SEQ ID NO: 43610 - protein, 22 aa, Artificial Sequence
  Cyclic GFR-binding peptide
MNPIKGYIVNSSDDFYLVNIPS

SEQ ID NO: 43611 - protein, 32 aa, Artificial Sequence; identical to SEQ ID NO: 40633
  Cyclic GFR-binding peptide
  MOD_RES (31)..(32): Xaa is C or S

SEQ ID NO: 43612 - protein, 30 aa, Artificial Sequence; identical to SEQ ID NO: 40634
  Cyclic GFR-binding peptide
  MOD_RES (27)..(28): Xaa is C or S

SEQ ID NO: 43613 - protein, 28 aa, Artificial Sequence
  Cyclic GFR-binding peptide
VAMGPIKGYYTVVGKDFYLINIPSLKTP

SEQ ID NO: 43614 - protein, 27 aa, Artificial Sequence
  Cyclic GFR-binding peptide
  MOD_RES (27)..(27): Xaa is C or S
NPIKGYIVNSSDDFYLVNIPSLKTPAX

SEQ ID NO: 43615 - protein, 26 aa, Artificial Sequence
  Cyclic GFR-binding peptide
MNPIKGYIVNSSDDFYLVNIPSLKTP

SEQ ID NO: 43616 - protein, 38 aa, Artificial Sequence; identical to SEQ ID NO: 40638
  Cyclic GFR-binding peptide
  MOD_RES (1)..(3)..(35)..(36): Xaa is C or S

SEQ ID NO: 43617 - protein, 23 aa, Artificial Sequence
  Cyclic GFR-binding peptide
VIMPIKGYLLVRGNDFYLMNIPS

SEQ ID NO: 43618 - protein, 25 aa, Artificial Sequence
  Cyclic GFR-binding peptide
PIKGYLLVRGNDFYLMNIPSTKVPA

SEQ ID NO: 43619 - protein, 38 aa, Artificial Sequence; identical to SEQ ID NO: 40641
  Cyclic GFR-binding peptide
  MOD_RES (32)..(33): Xaa is C or S

SEQ ID NO: 43620 - protein, 26 aa, Artificial Sequence
  Cyclic GFR-binding peptide
KVVMNPIKGYIVNNSSDFYLVNIPSL

SEQ ID NO: 43621 - protein, 26 aa, Artificial Sequence
  Cyclic GFR-binding peptide
EPIKGYVVKDYEDFYLMNIPSLETPV

SEQ ID NO: 43622 - protein, 27 aa, Artificial Sequence
  Cyclic GFR-binding peptide
MNPIKGYIVNNSSDFYLVNIPSLKTPA

SEQ ID NO: 43623 - protein, 41 aa, Artificial Sequence; identical to SEQ ID NO: 40645
  Cyclic GFR-binding peptide
  MOD_RES (2)..(4)..(36)..(37): Xaa is C or S

SEQ ID NO: 43624 - protein, 41 aa, Artificial Sequence; identical to SEQ ID NO: 40646
  Cyclic GFR-binding peptide
  MOD_RES (1)..(3)..(35)..(36): Xaa is C or S

SEQ ID NO: 43625 - protein, 28 aa, Artificial Sequence
  Cyclic GFR-binding peptide
  MOD_RES (26)..(27): Xaa is C or S
PIKGYIVNNSSDFYLVNIPSLKTPAXXA

SEQ ID NO: 43626 - protein, 22 aa, Artificial Sequence
  Cyclic GFR-binding peptide
GPIKGYYTVVGKDFYLINIPSL

SEQ ID NO: 43627 - protein, 24 aa, Artificial Sequence
  Cyclic GFR-binding peptide
NPIKGYIVNSSDDFYLVNIPSLKT

SEQ ID NO: 43628 - protein, 26 aa, Artificial Sequence
  Cyclic GFR-binding peptide
MDPIKGYVVNNASDFYLINIPSLRTP

SEQ ID NO: 43629 - protein, 35 aa, Artificial Sequence; identical to SEQ ID NO: 40651
  Cyclic GFR-binding peptide
  MOD_RES (2)..(33)..(34): Xaa is C or S

SEQ ID NO: 43630 - protein, 35 aa, Artificial Sequence; identical to SEQ ID NO: 40652
  Cyclic GFR-binding peptide
  MOD_RES (29)..(30): Xaa is C or S

SEQ ID NO: 43631 - protein, 33 aa, Artificial Sequence; identical to SEQ ID NO: 40653
  Cyclic GFR-binding peptide
  MOD_RES (2)..(4): Xaa is C or S

SEQ ID NO: 43632 - protein, 34 aa, Artificial Sequence; identical to SEQ ID NO: 40654
  Cyclic GFR-binding peptide
  MOD_RES (1)..(33)..(34): Xaa is C or S

SEQ ID NO: 43633 - protein, 24 aa, Artificial Sequence
  Cyclic GFR-binding peptide
MNPIKGYIVNSSDDFYLVNIPSLQ

SEQ ID NO: 43634 - protein, 24 aa, Artificial Sequence
  Cyclic GFR-binding peptide
VVMEPIKGYVVKDYEDFYLMNIPS

SEQ ID NO: 43635 - protein, 32 aa, Artificial Sequence; identical to SEQ ID NO: 40657
  Cyclic GFR-binding peptide
  MOD_RES (2)..(4): Xaa is C or S

SEQ ID NO: 43636 - protein, 33 aa, Artificial Sequence; identical to SEQ ID NO: 40658
  Cyclic GFR-binding peptide
  MOD_RES (27)..(28): Xaa is C or S

SEQ ID NO: 43637 - protein, 35 aa, Artificial Sequence; identical to SEQ ID NO: 40659
  Cyclic GFR-binding peptide
  MOD_RES (32)..(33): Xaa is C or S

SEQ ID NO: 43638 - protein, 35 aa, Artificial Sequence; identical to SEQ ID NO: 40660
  Cyclic GFR-binding peptide
  MOD_RES (31)..(32): Xaa is C or S

SEQ ID NO: 43639 - protein, 40 aa, Artificial Sequence; identical to SEQ ID NO: 40661
  Cyclic GFR-binding peptide
  MOD_RES (1)..(3)..(35)..(36): Xaa is C or S

SEQ ID NO: 43640 - protein, 28 aa, Artificial Sequence
  Cyclic GFR-binding peptide
VMNPIKGYIVNSSDDFYLVNIPSLKTPA

SEQ ID NO: 43641 - protein, 31 aa, Artificial Sequence; identical to SEQ ID NO: 40663
  Cyclic GFR-binding peptide
  MOD_RES (28)..(29): Xaa is C or S

SEQ ID NO: 43642 - protein, 33 aa, Artificial Sequence; identical to SEQ ID NO: 40664
  Cyclic GFR-binding peptide
  MOD_RES (33)..(33): Xaa is C or S

SEQ ID NO: 43643 - protein, 38 aa, Artificial Sequence; identical to SEQ ID NO: 40665
  Cyclic GFR-binding peptide
  MOD_RES (2)..(34)..(35): Xaa is C or S

SEQ ID NO: 43644 - protein, 29 aa, Artificial Sequence
  Cyclic GFR-binding peptide
VAMGPIKGYYTVVGKDFYLINIPSLKTPV

SEQ ID NO: 43645 - protein, 33 aa, Artificial Sequence; identical to SEQ ID NO: 40667
  Cyclic GFR-binding peptide
  MOD_RES (1)..(33): Xaa is C or S

SEQ ID NO: 43646 - protein, 29 aa, Artificial Sequence
  Cyclic GFR-binding peptide
  MOD_RES (29)..(29): Xaa is C or S
VMDPIKGYVVNNASDFYLINIPSLRTPVX

SEQ ID NO: 43647 - protein, 21 aa, Artificial Sequence
  Cyclic GFR-binding peptide
DPIKGYVVNNAADFYLINIPS

SEQ ID NO: 43648 - protein, 32 aa, Artificial Sequence; identical to SEQ ID NO: 40670
  Cyclic GFR-binding peptide
  MOD_RES (30)..(31): Xaa is C or S

SEQ ID NO: 43649 - protein, 33 aa, Artificial Sequence; identical to SEQ ID NO: 40671
  Cyclic GFR-binding peptide
  MOD_RES (28)..(29): Xaa is C or S

SEQ ID NO: 43650 - protein, 28 aa, Artificial Sequence
  Cyclic GFR-binding peptide
EVIMPIKGYLLVRGNDFYLMNIPSTKVP

SEQ ID NO: 43651 - protein, 39 aa, Artificial Sequence; identical to SEQ ID NO: 40673
  Cyclic GFR-binding peptide
  MOD_RES (1)..(3)..(36)..(37): Xaa is C or S

SEQ ID NO: 43652 - protein, 35 aa, Artificial Sequence; identical to SEQ ID NO: 40674
  Cyclic GFR-binding peptide
  MOD_RES (29)..(30): Xaa is C or S

SEQ ID NO: 43653 - protein, 34 aa, Artificial Sequence; identical to SEQ ID NO: 40675
  Cyclic GFR-binding peptide
  MOD_RES (32)..(33): Xaa is C or S

SEQ ID NO: 43654 - protein, 34 aa, Artificial Sequence; identical to SEQ ID NO: 40676
  Cyclic GFR-binding peptide
  MOD_RES (29)..(30): Xaa is C or S

SEQ ID NO: 43655 - protein, 29 aa, Artificial Sequence
  Cyclic GFR-binding peptide
  MOD_RES (27)..(28): Xaa is C or S
GPIKGYYTVVGKDFYLINIPSLKTPVXXA

SEQ ID NO: 43656 - protein, 32 aa, Artificial Sequence; identical to SEQ ID NO: 40678
  Cyclic GFR-binding peptide
  MOD_RES (32)..(32): Xaa is C or S

SEQ ID NO: 43657 - protein, 33 aa, Artificial Sequence; identical to SEQ ID NO: 40679
  Cyclic GFR-binding peptide
  MOD_RES (1)..(3): Xaa is C or S

SEQ ID NO: 43658 - protein, 39 aa, Artificial Sequence; identical to SEQ ID NO: 40680
  Cyclic GFR-binding peptide
  MOD_RES (1)..(3)..(35)..(36): Xaa is C or S

SEQ ID NO: 43659 - protein, 33 aa, Artificial Sequence; identical to SEQ ID NO: 40681
  Cyclic GFR-binding peptide
  MOD_RES (28)..(28): Xaa is C or S

SEQ ID NO: 43660 - protein, 27 aa, Artificial Sequence
  Cyclic GFR-binding peptide
VVMNPIKGYIVNSSDDFYLVNIPSLQT

SEQ ID NO: 43661 - protein, 34 aa, Artificial Sequence; identical to SEQ ID NO: 40683
  Cyclic GFR-binding peptide
  MOD_RES (2)..(4): Xaa is C or S

SEQ ID NO: 43662 - protein, 36 aa, Artificial Sequence; identical to SEQ ID NO: 40684
  Cyclic GFR-binding peptide
  MOD_RES (1)..(33)..(34): Xaa is C or S

SEQ ID NO: 43663 - protein, 29 aa, Artificial Sequence
  Cyclic GFR-binding peptide
  MOD_RES (1)..(1): Xaa is C or S
XESVAMGPIKGYYTVVGKDFYLINIPSLK

SEQ ID NO: 43664 - protein, 29 aa, Artificial Sequence
  Cyclic GFR-binding peptide
  MOD_RES (26)..(26): Xaa is C or S
PIKGYIVNSSDDFYLVNIPSLKTPAXTPK

SEQ ID NO: 43665 - protein, 26 aa, Artificial Sequence
  Cyclic GFR-binding peptide
IMPIKGYLLVRGNDFYLMNIPSTKVP

SEQ ID NO: 43666 - protein, 32 aa, Artificial Sequence; identical to SEQ ID NO: 40688
  Cyclic GFR-binding peptide
  MOD_RES (29)..(30): Xaa is C or S

SEQ ID NO: 43667 - protein, 28 aa, Artificial Sequence
  Cyclic GFR-binding peptide
EVVMDPIKGYVVNNASDFYLINIPSLRT

SEQ ID NO: 43668 - protein, 32 aa, Artificial Sequence; identical to SEQ ID NO: 40690
  Cyclic GFR-binding peptide
  MOD_RES (31)..(32): Xaa is C or S

SEQ ID NO: 43669 - protein, 34 aa, Artificial Sequence; identical to SEQ ID NO: 40691
  Cyclic GFR-binding peptide
  MOD_RES (29)..(29): Xaa is C or S

SEQ ID NO: 43670 - protein, 38 aa, Artificial Sequence; identical to SEQ ID NO: 40692
  Cyclic GFR-binding peptide
  MOD_RES (2)..(4)..(36)..(37): Xaa is C or S

SEQ ID NO: 43671 - protein, 29 aa, Artificial Sequence
  Cyclic GFR-binding peptide
  MOD_RES (27)..(28): Xaa is C or S
NPIKGYIVNNSSDFYLVNIPSLKTPAXXA

SEQ ID NO: 43672 - protein, 30 aa, Artificial Sequence; identical to SEQ ID NO: 40694
  Cyclic GFR-binding peptide
  MOD_RES (1)..(3): Xaa is C or S

SEQ ID NO: 43673 - protein, 28 aa, Artificial Sequence
  Cyclic GFR-binding peptide
VIMPIKGYLLVRGNDFYLMNIPSTKVPA

SEQ ID NO: 43674 - protein, 30 aa, Artificial Sequence; identical to SEQ ID NO: 40696
  Cyclic GFR-binding peptide
  MOD_RES (29)..(30): Xaa is C or S

SEQ ID NO: 43675 - protein, 32 aa, Artificial Sequence; identical to SEQ ID NO: 40697
  Cyclic GFR-binding peptide
  MOD_RES (2)..(2): Xaa is C or S

SEQ ID NO: 43676 - protein, 36 aa, Artificial Sequence; identical to SEQ ID NO: 40698
  Cyclic GFR-binding peptide
  MOD_RES (32)..(33): Xaa is C or S

SEQ ID NO: 43677 - protein, 31 aa, Artificial Sequence; identical to SEQ ID NO: 40699
  Cyclic GFR-binding peptide
  MOD_RES (1)..(1): Xaa is C or S

SEQ ID NO: 43678 - protein, 27 aa, Artificial Sequence
  Cyclic GFR-binding peptide
  MOD_RES (26)..(27): Xaa is C or S
PIKGYVVKENEDFYLMNIPSLETPVXX

SEQ ID NO: 43679 - protein, 30 aa, Artificial Sequence; identical to SEQ ID NO: 40701
  Cyclic GFR-binding peptide
  MOD_RES (29)..(30): Xaa is C or S

SEQ ID NO: 43680 - protein, 28 aa, Artificial Sequence
  Cyclic GFR-binding peptide
  MOD_RES (28)..(28): Xaa is C or S
IMPIKGYLLVRGNDFYLMNIPSTKVPAX

SEQ ID NO: 43681 - protein, 39 aa, Artificial Sequence; identical to SEQ ID NO: 40703
  Cyclic GFR-binding peptide
  MOD_RES (1)..(33)..(34): Xaa is C or S

SEQ ID NO: 43682 - protein, 30 aa, Artificial Sequence; identical to SEQ ID NO: 40704
  Cyclic GFR-binding peptide
  MOD_RES (30)..(30): Xaa is C or S

SEQ ID NO: 43683 - protein, 31 aa, Artificial Sequence; identical to SEQ ID NO: 40705
  Cyclic GFR-binding peptide
  MOD_RES (28)..(29): Xaa is C or S

SEQ ID NO: 43684 - protein, 32 aa, Artificial Sequence; identical to SEQ ID NO: 40706
  Cyclic GFR-binding peptide
  MOD_RES (27)..(28): Xaa is C or S

SEQ ID NO: 43685 - protein, 23 aa, Artificial Sequence
  Cyclic GFR-binding peptide
PIKGYLLVRGNDFYLMNIPSTKV

SEQ ID NO: 43686 - protein, 32 aa, Artificial Sequence; identical to SEQ ID NO: 40708
  Cyclic GFR-binding peptide
  MOD_RES (1)..(3): Xaa is C or S

SEQ ID NO: 43687 - protein, 25 aa, Artificial Sequence
  Cyclic GFR-binding peptide
EEVIMPIKGYLLVRGNDFYLMNIPS

SEQ ID NO: 43688 - protein, 42 aa, Artificial Sequence; identical to SEQ ID NO: 40710
  Cyclic GFR-binding peptide
  MOD_RES (2)..(4)..(36)..(37): Xaa is C or S

SEQ ID NO: 43689 - protein, 41 aa, Artificial Sequence; identical to SEQ ID NO: 40711
  Cyclic GFR-binding peptide
  MOD_RES (2)..(4)..(36)..(37): Xaa is C or S

SEQ ID NO: 43690 - protein, 27 aa, Artificial Sequence
  Cyclic GFR-binding peptide
GEVVMDPIKGYVVKENEDFYLMNIPSL

SEQ ID NO: 43691 - protein, 27 aa, Artificial Sequence
  Cyclic GFR-binding peptide
  MOD_RES (1)..(1): Xaa is C or S
XESVAMGPIKGYYTVVGKDFYLINIPS

SEQ ID NO: 43692 - protein, 37 aa, Artificial Sequence; identical to SEQ ID NO: 40714
  Cyclic GFR-binding peptide
  MOD_RES (1)..(33)..(34): Xaa is C or S

SEQ ID NO: 43693 - protein, 41 aa, Artificial Sequence; identical to SEQ ID NO: 40715
  Cyclic GFR-binding peptide
  MOD_RES (2)..(4)..(36)..(37): Xaa is C or S

SEQ ID NO: 43694 - protein, 35 aa, Artificial Sequence; identical to SEQ ID NO: 40716
  Cyclic GFR-binding peptide
  MOD_RES (29)..(30): Xaa is C or S

SEQ ID NO: 43695 - protein, 37 aa, Artificial Sequence; identical to SEQ ID NO: 40717
  Cyclic GFR-binding peptide
  MOD_RES (1)..(3)..(35)..(36): Xaa is C or S

SEQ ID NO: 43696 - protein, 27 aa, Artificial Sequence
  Cyclic GFR-binding peptide
EVVMDPIKGYVVNNASDFYLINIPSLR

SEQ ID NO: 43697 - protein, 33 aa, Artificial Sequence; identical to SEQ ID NO: 40719
  Cyclic GFR-binding peptide
  MOD_RES (2)..(33): Xaa is C or S

SEQ ID NO: 43698 - protein, 33 aa, Artificial Sequence; identical to SEQ ID NO: 40720
  Cyclic GFR-binding peptide
  MOD_RES (1)..(3): Xaa is C or S

SEQ ID NO: 43699 - protein, 32 aa, Artificial Sequence; identical to SEQ ID NO: 40721
  Cyclic GFR-binding peptide
  MOD_RES (26)..(26): Xaa is C or S

SEQ ID NO: 43700 - protein, 35 aa, Artificial Sequence; identical to SEQ ID NO: 40722
  Cyclic GFR-binding peptide
  MOD_RES (2)..(34)..(35): Xaa is C or S

SEQ ID NO: 43701 - protein, 28 aa, Artificial Sequence
  Cyclic GFR-binding peptide
VMDPIKGYVVNNAADFYLINIPSLRAPV

SEQ ID NO: 43702 - protein, 32 aa, Artificial Sequence; identical to SEQ ID NO: 40724
  Cyclic GFR-binding peptide
  MOD_RES (26)..(27): Xaa is C or S

SEQ ID NO: 43703 - protein, 27 aa, Artificial Sequence
  Cyclic GFR-binding peptide
SMGEPIKGYTPVGMDDFYLVNIPSLKT

SEQ ID NO: 43704 - protein, 31 aa, Artificial Sequence; identical to SEQ ID NO: 40726
  Cyclic GFR-binding peptide
  MOD_RES (29)..(30): Xaa is C or S

SEQ ID NO: 43705 - protein, 26 aa, Artificial Sequence
  Cyclic GFR-binding peptide
VVMNPIKGYIVNSSDDFYLVNIPSLK

SEQ ID NO: 43706 - protein, 36 aa, Artificial Sequence; identical to SEQ ID NO: 40728
  Cyclic GFR-binding peptide
  MOD_RES (1)..(33): Xaa is C or S

SEQ ID NO: 43707 - protein, 41 aa, Artificial Sequence; identical to SEQ ID NO: 40729
  Cyclic GFR-binding peptide
  MOD_RES (2)..(4)..(35)..(36): Xaa is C or S

SEQ ID NO: 43708 - protein, 25 aa, Artificial Sequence
  Cyclic GFR-binding peptide
EPIKGYTPVGMDDFYLVNIPSLKTP

SEQ ID NO: 43709 - protein, 27 aa, Artificial Sequence
  Cyclic GFR-binding peptide
VIMPIKGYLLVRGNDFYLMNIPSTKVP

SEQ ID NO: 43710 - protein, 30 aa, Artificial Sequence; identical to SEQ ID NO: 40732
  Cyclic GFR-binding peptide
  MOD_RES (30)..(30): Xaa is C or S

SEQ ID NO: 43711 - protein, 37 aa, Artificial Sequence; identical to SEQ ID NO: 40733
  Cyclic GFR-binding peptide
  MOD_RES (31)..(32): Xaa is C or S

SEQ ID NO: 43712 - protein, 32 aa, Artificial Sequence; identical to SEQ ID NO: 40734
  Cyclic GFR-binding peptide
  MOD_RES (31)..(32): Xaa is C or S

SEQ ID NO: 43713 - protein, 30 aa, Artificial Sequence; identical to SEQ ID NO: 40735
  Cyclic GFR-binding peptide
  MOD_RES (29)..(30): Xaa is C or S

SEQ ID NO: 43714 - protein, 28 aa, Artificial Sequence
  Cyclic GFR-binding peptide
  MOD_RES (26)..(27): Xaa is C or S
PIKGYIVNSSDDFYLVNIPSLQTPAXXP

SEQ ID NO: 43715 - protein, 31 aa, Artificial Sequence; identical to SEQ ID NO: 40737
  Cyclic GFR-binding peptide
  MOD_RES (2)..(2): Xaa is C or S

SEQ ID NO: 43716 - protein, 36 aa, Artificial Sequence; identical to SEQ ID NO: 40738
  Cyclic GFR-binding peptide
  MOD_RES (2)..(4)..(36): Xaa is C or S

SEQ ID NO: 43717 - protein, 28 aa, Artificial Sequence
  Cyclic GFR-binding peptide
VVMDPIKGYVVNNASDFYLINIPSLRTP

SEQ ID NO: 43718 - protein, 31 aa, Artificial Sequence; identical to SEQ ID NO: 40740
  Cyclic GFR-binding peptide
  MOD_RES (1)..(3): Xaa is C or S

SEQ ID NO: 43719 - protein, 26 aa, Artificial Sequence
  Cyclic GFR-binding peptide
SVAMGPIKGYYTVVGKDFYLINIPSL

SEQ ID NO: 43720 - protein, 34 aa, Artificial Sequence; identical to SEQ ID NO: 40742
  Cyclic GFR-binding peptide
  MOD_RES (29)..(30): Xaa is C or S

SEQ ID NO: 43721 - protein, 26 aa, Artificial Sequence
  Cyclic GFR-binding peptide
VAMGPIKGYYTVVGKDFYLINIPSLK

SEQ ID NO: 43722 - protein, 23 aa, Artificial Sequence
  Cyclic GFR-binding peptide
PIKGYVVKDYEDFYLMNIPSLET

SEQ ID NO: 43723 - protein, 31 aa, Artificial Sequence; identical to SEQ ID NO: 40745
  Cyclic GFR-binding peptide
  MOD_RES (30)..(31): Xaa is C or S

SEQ ID NO: 43724 - protein, 30 aa, Artificial Sequence; identical to SEQ ID NO: 40746
  Cyclic GFR-binding peptide
  MOD_RES (2)..(2): Xaa is C or S

SEQ ID NO: 43725 - protein, 34 aa, Artificial Sequence; identical to SEQ ID NO: 40747
  Cyclic GFR-binding peptide
  MOD_RES (29)..(30): Xaa is C or S

SEQ ID NO: 43726 - protein, 22 aa, Artificial Sequence
  Cyclic GFR-binding peptide
DPIKGYVVNNASDFYLINIPSL

SEQ ID NO: 43727 - protein, 42 aa, Artificial Sequence; identical to SEQ ID NO: 40749
  Cyclic GFR-binding peptide
  MOD_RES (2)..(4)..(36)..(37): Xaa is C or S

SEQ ID NO: 43728 - protein, 22 aa, Artificial Sequence
  Cyclic GFR-binding peptide
EPIKGYTPVGMDDFYLVNIPSL

SEQ ID NO: 43729 - protein, 37 aa, Artificial Sequence; identical to SEQ ID NO: 40751
  Cyclic GFR-binding peptide
  MOD_RES (31)..(32): Xaa is C or S

SEQ ID NO: 43730 - protein, 31 aa, Artificial Sequence; identical to SEQ ID NO: 40752
  Cyclic GFR-binding peptide
  MOD_RES (28)..(29): Xaa is C or S

SEQ ID NO: 43731 - protein, 30 aa, Artificial Sequence; identical to SEQ ID NO: 40753
  Cyclic GFR-binding peptide
  MOD_RES (27)..(28): Xaa is C or S

SEQ ID NO: 43732 - protein, 29 aa, Artificial Sequence
  Cyclic GFR-binding peptide
  MOD_RES (27)..(28): Xaa is C or S
DPIKGYVVNNASDFYLINIPSLRTPVXXT

SEQ ID NO: 43733 - protein, 29 aa, Artificial Sequence
  Cyclic GFR-binding peptide
  MOD_RES (28)..(29): Xaa is C or S
MNPIKGYIVNSSDDFYLVNIPSLQTPAXX

SEQ ID NO: 43734 - protein, 37 aa, Artificial Sequence; identical to SEQ ID NO: 40756
  Cyclic GFR-binding peptide
  MOD_RES (2)..(4)..(37): Xaa is C or S

SEQ ID NO: 43735 - protein, 38 aa, Artificial Sequence; identical to SEQ ID NO: 40757
  Cyclic GFR-binding peptide
  MOD_RES (2)..(34)..(35): Xaa is C or S

SEQ ID NO: 43736 - protein, 27 aa, Artificial Sequence
  Cyclic GFR-binding peptide
EEVIMPIKGYLLVRGNDFYLMNIPSTK

SEQ ID NO: 43737 - protein, 33 aa, Artificial Sequence; identical to SEQ ID NO: 40759
  Cyclic GFR-binding peptide
  MOD_RES (31)..(32): Xaa is C or S

SEQ ID NO: 43738 - protein, 33 aa, Artificial Sequence; identical to SEQ ID NO: 40760
  Cyclic GFR-binding peptide
  MOD_RES (29)..(30): Xaa is C or S

SEQ ID NO: 43739 - protein, 31 aa, Artificial Sequence; identical to SEQ ID NO: 40761
  Cyclic GFR-binding peptide
  MOD_RES (1)..(1): Xaa is C or S

SEQ ID NO: 43740 - protein, 29 aa, Artificial Sequence
  Cyclic GFR-binding peptide
  MOD_RES (2)..(2): Xaa is C or S
GXARVVMNPIKGYIVNSSDDFYLVNIPSL

SEQ ID NO: 43741 - protein, 21 aa, Artificial Sequence
  Cyclic GFR-binding peptide
PIKGYVVKDYEDFYLMNIPSL

SEQ ID NO: 43742 - protein, 38 aa, Artificial Sequence; identical to SEQ ID NO: 40764
  Cyclic GFR-binding peptide
  MOD_RES (2)..(4)..(36): Xaa is C or S

SEQ ID NO: 43743 - protein, 28 aa, Artificial Sequence
  Cyclic GFR-binding peptide
  MOD_RES (28)..(28): Xaa is C or S
GEPIKGYTPVGMDDFYLVNIPSLKTPVX

SEQ ID NO: 43744 - protein, 24 aa, Artificial Sequence
  Cyclic GFR-binding peptide
MGEPIKGYTPVGMDDFYLVNIPSL

SEQ ID NO: 43745 - protein, 25 aa, Artificial Sequence
  Cyclic GFR-binding peptide
PIKGYVVNNAADFYLINIPSLRAPV

SEQ ID NO: 43746 - protein, 26 aa, Artificial Sequence
  Cyclic GFR-binding peptide
NPIKGYIVNSSDDFYLVNIPSLQTPA

SEQ ID NO: 43747 - protein, 31 aa, Artificial Sequence; identical to SEQ ID NO: 40769
  Cyclic GFR-binding peptide
  MOD_RES (1)..(3): Xaa is C or S

SEQ ID NO: 43748 - protein, 40 aa, Artificial Sequence; identical to SEQ ID NO: 40770
  Cyclic GFR-binding peptide
  MOD_RES (2)..(34)..(35): Xaa is C or S

SEQ ID NO: 43749 - protein, 24 aa, Artificial Sequence
  Cyclic GFR-binding peptide
PIKGYIVNSSDDFYLVNIPSLKTP

SEQ ID NO: 43750 - protein, 30 aa, Artificial Sequence; identical to SEQ ID NO: 40772
  Cyclic GFR-binding peptide
  MOD_RES (29)..(30): Xaa is C or S

SEQ ID NO: 43751 - protein, 29 aa, Artificial Sequence
  Cyclic GFR-binding peptide
  MOD_RES (27)..(28): Xaa is C or S
DPIKGYVVNNAADFYLINIPSLRAPVXXS

SEQ ID NO: 43752 - protein, 24 aa, Artificial Sequence
  Cyclic GFR-binding peptide
PIKGYTPVGMDDFYLVNIPSLKTP

SEQ ID NO: 43753 - protein, 34 aa, Artificial Sequence; identical to SEQ ID NO: 40775
  Cyclic GFR-binding peptide
  MOD_RES (2)..(4): Xaa is C or S

SEQ ID NO: 43754 - protein, 26 aa, Artificial Sequence
  Cyclic GFR-binding peptide
  MOD_RES (26)..(26): Xaa is C or S
PIKGYYTVVGKDFYLINIPSLKTPVX

SEQ ID NO: 43755 - protein, 24 aa, Artificial Sequence
  Cyclic GFR-binding peptide
NPIKGYIVNSSDDFYLVNIPSLQT

SEQ ID NO: 43756 - protein, 39 aa, Artificial Sequence; identical to SEQ ID NO: 40778
  Cyclic GFR-binding peptide
  MOD_RES (2)..(4)..(36)..(37): Xaa is C or S

SEQ ID NO: 43757 - protein, 37 aa, Artificial Sequence; identical to SEQ ID NO: 40779
  Cyclic GFR-binding peptide
  MOD_RES (2)..(4)..(35)..(36): Xaa is C or S

SEQ ID NO: 43758 - protein, 34 aa, Artificial Sequence; identical to SEQ ID NO: 40780
  Cyclic GFR-binding peptide
  MOD_RES (29)..(30): Xaa is C or S

SEQ ID NO: 43759 - protein, 34 aa, Artificial Sequence; identical to SEQ ID NO: 40781
  Cyclic GFR-binding peptide
  MOD_RES (2)..(4): Xaa is C or S

SEQ ID NO: 43760 - protein, 33 aa, Artificial Sequence; identical to SEQ ID NO: 40782
  Cyclic GFR-binding peptide
  MOD_RES (1)..(33): Xaa is C or S

SEQ ID NO: 43761 - protein, 28 aa, Artificial Sequence
  Cyclic GFR-binding peptide
  MOD_RES (28)..(28): Xaa is C or S
MDPIKGYVVKENEDFYLMNIPSLETPVX

SEQ ID NO: 43762 - protein, 30 aa, Artificial Sequence; identical to SEQ ID NO: 40784
  Cyclic GFR-binding peptide
  MOD_RES (1)..(1): Xaa is C or S

SEQ ID NO: 43763 - protein, 27 aa, Artificial Sequence
  Cyclic GFR-binding peptide
EVVMDPIKGYVVKENEDFYLMNIPSLE

SEQ ID NO: 43764 - protein, 36 aa, Artificial Sequence; identical to SEQ ID NO: 40786
  Cyclic GFR-binding peptide
  MOD_RES (2)..(34)..(35): Xaa is C or S

SEQ ID NO: 43765 - protein, 34 aa, Artificial Sequence; identical to SEQ ID NO: 40787
  Cyclic GFR-binding peptide
  MOD_RES (29)..(30): Xaa is C or S

SEQ ID NO: 43766 - protein, 37 aa, Artificial Sequence; identical to SEQ ID NO: 40788
  Cyclic GFR-binding peptide
  MOD_RES (33)..(34): Xaa is C or S

SEQ ID NO: 43767 - protein, 35 aa, Artificial Sequence; identical to SEQ ID NO: 40789
  Cyclic GFR-binding peptide
  MOD_RES (30)..(31): Xaa is C or S

SEQ ID NO: 43768 - protein, 26 aa, Artificial Sequence
  Cyclic GFR-binding peptide
EVVMDPIKGYVVNNASDFYLINIPSL

SEQ ID NO: 43769 - protein, 26 aa, Artificial Sequence
  Cyclic GFR-binding peptide
MNPIKGYIVNSSDDFYLVNIPSLQTP

SEQ ID NO: 43770 - protein, 34 aa, Artificial Sequence; identical to SEQ ID NO: 40792
  Cyclic GFR-binding peptide
  MOD_RES (30)..(31): Xaa is C or S

SEQ ID NO: 43771 - protein, 38 aa, Artificial Sequence; identical to SEQ ID NO: 40793
  Cyclic GFR-binding peptide
  MOD_RES (1)..(33)..(34): Xaa is C or S

SEQ ID NO: 43772 - protein, 29 aa, Artificial Sequence
  Cyclic GFR-binding peptide
RVVMNPIKGYIVNSSDDFYLVNIPSLQTP

SEQ ID NO: 43773 - protein, 30 aa, Artificial Sequence; identical to SEQ ID NO: 40795
  Cyclic GFR-binding peptide
  MOD_RES (2)..(2): Xaa is C or S

SEQ ID NO: 43774 - protein, 26 aa, Artificial Sequence
  Cyclic GFR-binding peptide
RVVMNPIKGYIVNSSDDFYLVNIPSL

SEQ ID NO: 43775 - protein, 31 aa, Artificial Sequence; identical to SEQ ID NO: 40797
  Cyclic GFR-binding peptide
  MOD_RES (29)..(30): Xaa is C or S

SEQ ID NO: 43776 - protein, 35 aa, Artificial Sequence; identical to SEQ ID NO: 40798
  Cyclic GFR-binding peptide
  MOD_RES (29)..(29): Xaa is C or S

SEQ ID NO: 43777 - protein, 36 aa, Artificial Sequence; identical to SEQ ID NO: 40799
  Cyclic GFR-binding peptide
  MOD_RES (30)..(31): Xaa is C or S

SEQ ID NO: 43778 - protein, 26 aa, Artificial Sequence
  Cyclic GFR-binding peptide
  MOD_RES (26)..(26): Xaa is C or S
PIKGYIVNNSSDFYLVNIPSLKTPAX

SEQ ID NO: 43779 - protein, 36 aa, Artificial Sequence; identical to SEQ ID NO: 40801
  Cyclic GFR-binding peptide
  MOD_RES (2)..(4)..(35)..(36): Xaa is C or S

SEQ ID NO: 43780 - protein, 30 aa, Artificial Sequence; identical to SEQ ID NO: 40802
  Cyclic GFR-binding peptide

SEQ ID NO: 43781 - protein, 25 aa, Artificial Sequence
  Cyclic GFR-binding peptide
VMNPIKGYIVNSSDDFYLVNIPSLK

SEQ ID NO: 43782 - protein, 30 aa, Artificial Sequence; identical to SEQ ID NO: 40804
  Cyclic GFR-binding peptide
  MOD_RES (2)..(4): Xaa is C or S

SEQ ID NO: 43783 - protein, 37 aa, Artificial Sequence; identical to SEQ ID NO: 40805
  Cyclic GFR-binding peptide
  MOD_RES (1)..(34)..(35): Xaa is C or S

SEQ ID NO: 43784 - protein, 25 aa, Artificial Sequence
  Cyclic GFR-binding peptide
VMNPIKGYIVNNSSDFYLVNIPSLK

SEQ ID NO: 43785 - protein, 32 aa, Artificial Sequence; identical to SEQ ID NO: 40807
  Cyclic GFR-binding peptide
  MOD_RES (1)..(3): Xaa is C or S

SEQ ID NO: 43786 - protein, 38 aa, Artificial Sequence; identical to SEQ ID NO: 40808
  Cyclic GFR-binding peptide
  MOD_RES (2)..(4)..(36)..(37): Xaa is C or S

SEQ ID NO: 43787 - protein, 33 aa, Artificial Sequence; identical to SEQ ID NO: 40809
  Cyclic GFR-binding peptide
  MOD_RES (1)..(3): Xaa is C or S

SEQ ID NO: 43788 - protein, 33 aa, Artificial Sequence; identical to SEQ ID NO: 40810
  Cyclic GFR-binding peptide
  MOD_RES (1)..(33): Xaa is C or S

SEQ ID NO: 43789 - protein, 32 aa, Artificial Sequence; identical to SEQ ID NO: 40811
  Cyclic GFR-binding peptide
  MOD_RES (30)..(31): Xaa is C or S

SEQ ID NO: 43790 - protein, 25 aa, Artificial Sequence
  Cyclic GFR-binding peptide
EVVMDPIKGYVVNNASDFYLINIPS

SEQ ID NO: 43791 - protein, 35 aa, Artificial Sequence; identical to SEQ ID NO: 40813
  Cyclic GFR-binding peptide
  MOD_RES (1)..(33)..(34): Xaa is C or S

SEQ ID NO: 43792 - protein, 34 aa, Artificial Sequence; identical to SEQ ID NO: 40814
  Cyclic GFR-binding peptide
  MOD_RES (28)..(29): Xaa is C or S

SEQ ID NO: 43793 - protein, 37 aa, Artificial Sequence; identical to SEQ ID NO: 40815
  Cyclic GFR-binding peptide
  MOD_RES (32)..(33): Xaa is C or S

SEQ ID NO: 43794 - protein, 35 aa, Artificial Sequence; identical to SEQ ID NO: 40816
  Cyclic GFR-binding peptide
  MOD_RES (2)..(35): Xaa is C or S

SEQ ID NO: 43795 - protein, 43 aa, Artificial Sequence; identical to SEQ ID NO: 40817
  Cyclic GFR-binding peptide
  MOD_RES (2)..(4)..(37)..(38): Xaa is C or S

SEQ ID NO: 43796 - protein, 23 aa, Artificial Sequence
  Cyclic GFR-binding peptide
MNPIKGYIVNNSSDFYLVNIPSL

SEQ ID NO: 43797 - protein, 36 aa, Artificial Sequence; identical to SEQ ID NO: 40819
  Cyclic GFR-binding peptide
  MOD_RES (1)..(34)..(35): Xaa is C or S

SEQ ID NO: 43798 - protein, 34 aa, Artificial Sequence; identical to SEQ ID NO: 40820
  Cyclic GFR-binding peptide
  MOD_RES (28)..(28): Xaa is C or S

SEQ ID NO: 43799 - protein, 33 aa, Artificial Sequence; identical to SEQ ID NO: 40821
  Cyclic GFR-binding peptide
  MOD_RES (31)..(32): Xaa is C or S

SEQ ID NO: 43800 - protein, 21 aa, Artificial Sequence
  Cyclic GFR-binding peptide
MPIKGYLLVRGNDFYLMNIPS

SEQ ID NO: 43801 - protein, 26 aa, Artificial Sequence
  Cyclic GFR-binding peptide
AMGPIKGYYTVVGKDFYLINIPSLKT

SEQ ID NO: 43802 - protein, 34 aa, Artificial Sequence; identical to SEQ ID NO: 40824
  Cyclic GFR-binding peptide
  MOD_RES (2)..(34): Xaa is C or S

SEQ ID NO: 43803 - protein, 26 aa, Artificial Sequence
  Cyclic GFR-binding peptide
VMNPIKGYIVNSSDDFYLVNIPSLQT

SEQ ID NO: 43804 - protein, 29 aa, Artificial Sequence
  Cyclic GFR-binding peptide
  MOD_RES (28)..(28): Xaa is C or S
MNPIKGYIVNSSDDFYLVNIPSLKTPAXT

SEQ ID NO: 43805 - protein, 31 aa, Artificial Sequence; identical to SEQ ID NO: 40827
  Cyclic GFR-binding peptide
  MOD_RES (29)..(30): Xaa is C or S

SEQ ID NO: 43806 - protein, 28 aa, Artificial Sequence
  Cyclic GFR-binding peptide
VMNPIKGYIVNSSDDFYLVNIPSLQTPA

SEQ ID NO: 43807 - protein, 36 aa, Artificial Sequence; identical to SEQ ID NO: 40829
  Cyclic GFR-binding peptide
  MOD_RES (1)..(33)..(34): Xaa is C or S

SEQ ID NO: 43808 - protein, 21 aa, Artificial Sequence
  Cyclic GFR-binding peptide
EPIKGYTPVGMDDFYLVNIPS

SEQ ID NO: 43809 - protein, 29 aa, Artificial Sequence
  Cyclic GFR-binding peptide
  MOD_RES (1)..(1): Xaa is C or S
XGEVVMEPIKGYVVKDYEDFYLMNIPSLE

SEQ ID NO: 43810 - protein, 41 aa, Artificial Sequence; identical to SEQ ID NO: 40832
  Cyclic GFR-binding peptide
  MOD_RES (1)..(3)..(36)..(37): Xaa is C or S

SEQ ID NO: 43811 - protein, 40 aa, Artificial Sequence; identical to SEQ ID NO: 40833
  Cyclic GFR-binding peptide
  MOD_RES (2)..(4)..(36)..(37): Xaa is C or S

SEQ ID NO: 43812 - protein, 28 aa, Artificial Sequence
  Cyclic GFR-binding peptide
  MOD_RES (28)..(28): Xaa is C or S
MEPIKGYVVKDYEDFYLMNIPSLETPVX

SEQ ID NO: 43813 - protein, 32 aa, Artificial Sequence; identical to SEQ ID NO: 40835
  Cyclic GFR-binding peptide
  MOD_RES (26)..(27): Xaa is C or S

SEQ ID NO: 43814 - protein, 35 aa, Artificial Sequence; identical to SEQ ID NO: 40836
  Cyclic GFR-binding peptide
  MOD_RES (2)..(34)..(35): Xaa is C or S

SEQ ID NO: 43815 - protein, 22 aa, Artificial Sequence
  Cyclic GFR-binding peptide
GEPIKGYTPVGMDDFYLVNIPS

SEQ ID NO: 43816 - protein, 30 aa, Artificial Sequence; identical to SEQ ID NO: 40838
  Cyclic GFR-binding peptide
  MOD_RES (2)..(4): Xaa is C or S

SEQ ID NO: 43817 - protein, 38 aa, Artificial Sequence; identical to SEQ ID NO: 40839
  Cyclic GFR-binding peptide
  MOD_RES (1)..(3)..(35)..(36): Xaa is C or S

SEQ ID NO: 43818 - protein, 30 aa, Artificial Sequence; identical to SEQ ID NO: 40840
  Cyclic GFR-binding peptide
  MOD_RES (1)..(3): Xaa is C or S

SEQ ID NO: 43819 - protein, 34 aa, Artificial Sequence; identical to SEQ ID NO: 40841
  Cyclic GFR-binding peptide
  MOD_RES (28)..(29): Xaa is C or S

SEQ ID NO: 43820 - protein, 40 aa, Artificial Sequence; identical to SEQ ID NO: 40842
  Cyclic GFR-binding peptide
  MOD_RES (2)..(35)..(36): Xaa is C or S

SEQ ID NO: 43821 - protein, 36 aa, Artificial Sequence; identical to SEQ ID NO: 40843
  Cyclic GFR-binding peptide
  MOD_RES (33)..(34): Xaa is C or S

SEQ ID NO: 43822 - protein, 24 aa, Artificial Sequence
  Cyclic GFR-binding peptide
PIKGYIVNSSDDFYLVNIPSLQTP

SEQ ID NO: 43823 - protein, 31 aa, Artificial Sequence; identical to SEQ ID NO: 40845
  Cyclic GFR-binding peptide
  MOD_RES (30)..(31): Xaa is C or S

SEQ ID NO: 43824 - protein, 39 aa, Artificial Sequence; identical to SEQ ID NO: 40846
  Cyclic GFR-binding peptide
  MOD_RES (1)..(3)..(35): Xaa is C or S

SEQ ID NO: 43825 - protein, 31 aa, Artificial Sequence; identical to SEQ ID NO: 40847
  Cyclic GFR-binding peptide
  MOD_RES (27)..(28): Xaa is C or S

SEQ ID NO: 43826 - protein, 33 aa, Artificial Sequence; identical to SEQ ID NO: 40848
  Cyclic GFR-binding peptide
  MOD_RES (30)..(31): Xaa is C or S

SEQ ID NO: 43827 - protein, 30 aa, Artificial Sequence; identical to SEQ ID NO: 40849
  Cyclic GFR-binding peptide

SEQ ID NO: 43828 - protein, 28 aa, Artificial Sequence
  Cyclic GFR-binding peptide
  MOD_RES (1)..(1): Xaa is C or S
XGEVVMDPIKGYVVKENEDFYLMNIPSL

SEQ ID NO: 43829 - protein, 26 aa, Artificial Sequence
  Cyclic GFR-binding peptide
  MOD_RES (26)..(26): Xaa is C or S
PIKGYVVNNASDFYLINIPSLRTPVX

SEQ ID NO: 43830 - protein, 25 aa, Artificial Sequence
  Cyclic GFR-binding peptide
GEPIKGYTPVGMDDFYLVNIPSLKT

SEQ ID NO: 43831 - protein, 31 aa, Artificial Sequence; identical to SEQ ID NO: 40853
  Cyclic GFR-binding peptide
  MOD_RES (30)..(31): Xaa is C or S

SEQ ID NO: 43832 - protein, 25 aa, Artificial Sequence
  Cyclic GFR-binding peptide
VVMNPIKGYIVNSSDDFYLVNIPSL

SEQ ID NO: 43833 - protein, 31 aa, Artificial Sequence; identical to SEQ ID NO: 40855
  Cyclic GFR-binding peptide
  MOD_RES (27)..(28): Xaa is C or S

SEQ ID NO: 43834 - protein, 32 aa, Artificial Sequence; identical to SEQ ID NO: 40856
  Cyclic GFR-binding peptide
  MOD_RES (27)..(28): Xaa is C or S

SEQ ID NO: 43835 - protein, 28 aa, Artificial Sequence
  Cyclic GFR-binding peptide
  MOD_RES (26)..(27): Xaa is C or S
PIKGYTPVGMDDFYLVNIPSLKTPVXXA

SEQ ID NO: 43836 - protein, 21 aa, Artificial Sequence
  Cyclic GFR-binding peptide
PIKGYVVNNASDFYLINIPSL

SEQ ID NO: 43837 - protein, 33 aa, Artificial Sequence; identical to SEQ ID NO: 40859
  Cyclic GFR-binding peptide
  MOD_RES (31)..(32): Xaa is C or S

SEQ ID NO: 43838 - protein, 29 aa, Artificial Sequence
  Cyclic GFR-binding peptide
  MOD_RES (29)..(29): Xaa is C or S
VMNPIKGYIVNSSDDFYLVNIPSLKTPAX

SEQ ID NO: 43839 - protein, 32 aa, Artificial Sequence; identical to SEQ ID NO: 40861
  Cyclic GFR-binding peptide
  MOD_RES (32)..(32): Xaa is C or S

SEQ ID NO: 43840 - protein, 34 aa, Artificial Sequence; identical to SEQ ID NO: 40862
  Cyclic GFR-binding peptide
  MOD_RES (2)..(34): Xaa is C or S

SEQ ID NO: 43841 - protein, 28 aa, Artificial Sequence
  Cyclic GFR-binding peptide
EEVIMPIKGYLLVRGNDFYLMNIPSTKV

SEQ ID NO: 43842 - protein, 28 aa, Artificial Sequence
  Cyclic GFR-binding peptide
SVAMGPIKGYYTVVGKDFYLINIPSLKT

SEQ ID NO: 43843 - protein, 34 aa, Artificial Sequence; identical to SEQ ID NO: 40865
  Cyclic GFR-binding peptide
  MOD_RES (1)..(33)..(34): Xaa is C or S

SEQ ID NO: 43844 - protein, 34 aa, Artificial Sequence; identical to SEQ ID NO: 40866
  Cyclic GFR-binding peptide
  MOD_RES (30)..(31): Xaa is C or S

SEQ ID NO: 43845 - protein, 38 aa, Artificial Sequence; identical to SEQ ID NO: 40867
  Cyclic GFR-binding peptide
  MOD_RES (32)..(33): Xaa is C or S

SEQ ID NO: 43846 - protein, 28 aa, Artificial Sequence
  Cyclic GFR-binding peptide
VVMDPIKGYVVNNAADFYLINIPSLRAP

SEQ ID NO: 43847 - protein, 29 aa, Artificial Sequence
  Cyclic GFR-binding peptide
  MOD_RES (26)..(27): Xaa is C or S
PIKGYVVKDYEDFYLMNIPSLETPVXXAK

SEQ ID NO: 43848 - protein, 34 aa, Artificial Sequence; identical to SEQ ID NO: 40870
  Cyclic GFR-binding peptide
  MOD_RES (32)..(33): Xaa is C or S

SEQ ID NO: 43849 - protein, 30 aa, Artificial Sequence; identical to SEQ ID NO: 40871
  Cyclic GFR-binding peptide
  MOD_RES (26)..(27): Xaa is C or S

SEQ ID NO: 43850 - protein, 30 aa, Artificial Sequence; identical to SEQ ID NO: 40872
  Cyclic GFR-binding peptide

SEQ ID NO: 43851 - protein, 22 aa, Artificial Sequence
  Cyclic GFR-binding peptide
NPIKGYIVNNSSDFYLVNIPSL

SEQ ID NO: 43852 - protein, 38 aa, Artificial Sequence; identical to SEQ ID NO: 40874
  Cyclic GFR-binding peptide
  MOD_RES (2)..(34)..(35): Xaa is C or S

SEQ ID NO: 43853 - protein, 31 aa, Artificial Sequence; identical to SEQ ID NO: 40875
  Cyclic GFR-binding peptide
  MOD_RES (2)..(4): Xaa is C or S

SEQ ID NO: 43854 - protein, 26 aa, Artificial Sequence
  Cyclic GFR-binding peptide
GPIKGYYTVVGKDFYLINIPSLKTPV

SEQ ID NO: 43855 - protein, 27 aa, Artificial Sequence
  Cyclic GFR-binding peptide
  MOD_RES (26)..(27): Xaa is C or S
PIKGYIVNSSDDFYLVNIPSLQTPAXX

SEQ ID NO: 43856 - protein, 26 aa, Artificial Sequence
  Cyclic GFR-binding peptide
VVMDPIKGYVVNNAADFYLINIPSLR

SEQ ID NO: 43857 - protein, 28 aa, Artificial Sequence
  Cyclic GFR-binding peptide
VVMNPIKGYIVNSSDDFYLVNIPSLQTP

SEQ ID NO: 43858 - protein, 27 aa, Artificial Sequence
  Cyclic GFR-binding peptide
  MOD_RES (26)..(26): Xaa is C or S
PIKGYIVNSSDDFYLVNIPSLKTPAXT

SEQ ID NO: 43859 - protein, 32 aa, Artificial Sequence; identical to SEQ ID NO: 40881
  Cyclic GFR-binding peptide
  MOD_RES (1)..(1): Xaa is C or S

SEQ ID NO: 43860 - protein, 30 aa, Artificial Sequence; identical to SEQ ID NO: 40882
  Cyclic GFR-binding peptide

SEQ ID NO: 43861 - protein, 28 aa, Artificial Sequence
  Cyclic GFR-binding peptide
VVMDPIKGYVVKENEDFYLMNIPSLETP

SEQ ID NO: 43862 - protein, 28 aa, Artificial Sequence
  Cyclic GFR-binding peptide
  MOD_RES (1)..(1): Xaa is C or S
XGEVVMEPIKGYVVKDYEDFYLMNIPSL

SEQ ID NO: 43863 - protein, 28 aa, Artificial Sequence
  Cyclic GFR-binding peptide
RVVMNPIKGYIVNSSDDFYLVNIPSLQT

SEQ ID NO: 43864 - protein, 30 aa, Artificial Sequence; identical to SEQ ID NO: 40886
  Cyclic GFR-binding peptide
  MOD_RES (2)..(2): Xaa is C or S

SEQ ID NO: 43865 - protein, 38 aa, Artificial Sequence; identical to SEQ ID NO: 40887
  Cyclic GFR-binding peptide
  MOD_RES (2)..(4)..(35)..(36): Xaa is C or S

SEQ ID NO: 43866 - protein, 27 aa, Artificial Sequence
  Cyclic GFR-binding peptide
KVVMNPIKGYIVNNSSDFYLVNIPSLK

SEQ ID NO: 43867 - protein, 34 aa, Artificial Sequence; identical to SEQ ID NO: 40889
  Cyclic GFR-binding peptide
  MOD_RES (1)..(3): Xaa is C or S

SEQ ID NO: 43868 - protein, 32 aa, Artificial Sequence; identical to SEQ ID NO: 40890
  Cyclic GFR-binding peptide
  MOD_RES (30)..(31): Xaa is C or S

SEQ ID NO: 43869 - protein, 29 aa, Artificial Sequence
  Cyclic GFR-binding peptide
  MOD_RES (1)..(3): Xaa is C or S
XGXAEVVMDPIKGYVVNNAADFYLINIPS

SEQ ID NO: 43870 - protein, 24 aa, Artificial Sequence
  Cyclic GFR-binding peptide
VVMDPIKGYVVNNASDFYLINIPS

SEQ ID NO: 43871 - protein, 27 aa, Artificial Sequence
  Cyclic GFR-binding peptide
VVMDPIKGYVVNNASDFYLINIPSLRT

SEQ ID NO: 43872 - protein, 40 aa, Artificial Sequence; identical to SEQ ID NO: 40894
  Cyclic GFR-binding peptide
  MOD_RES (1)..(3)..(35)..(36): Xaa is C or S

SEQ ID NO: 43873 - protein, 34 aa, Artificial Sequence; identical to SEQ ID NO: 40895
  Cyclic GFR-binding peptide
  MOD_RES (1)..(33)..(34): Xaa is C or S

SEQ ID NO: 43874 - protein, 21 aa, Artificial Sequence
  Cyclic GFR-binding peptide
NPIKGYIVNSSDDFYLVNIPS

SEQ ID NO: 43875 - protein, 33 aa, Artificial Sequence; identical to SEQ ID NO: 40897
  Cyclic GFR-binding peptide
  MOD_RES (27)..(28): Xaa is C or S

SEQ ID NO: 43876 - protein, 25 aa, Artificial Sequence
  Cyclic GFR-binding peptide
VIMPIKGYLLVRGNDFYLMNIPSTK

SEQ ID NO: 43877 - protein, 31 aa, Artificial Sequence; identical to SEQ ID NO: 40899
  Cyclic GFR-binding peptide
  MOD_RES (2)..(2): Xaa is C or S

SEQ ID NO: 43878 - protein, 29 aa, Artificial Sequence
  Cyclic GFR-binding peptide
VSMGEPIKGYTPVGMDDFYLVNIPSLKTP

SEQ ID NO: 43879 - protein, 31 aa, Artificial Sequence; identical to SEQ ID NO: 40901
  Cyclic GFR-binding peptide
  MOD_RES (28)..(29): Xaa is C or S

SEQ ID NO: 43880 - protein, 28 aa, Artificial Sequence
  Cyclic GFR-binding peptide
AVSMGEPIKGYTPVGMDDFYLVNIPSLK

SEQ ID NO: 43881 - protein, 28 aa, Artificial Sequence
  Cyclic GFR-binding peptide
SMGEPIKGYTPVGMDDFYLVNIPSLKTP

SEQ ID NO: 43882 - protein, 28 aa, Artificial Sequence
  Cyclic GFR-binding peptide
  MOD_RES (1)..(1): Xaa is C or S
XSRVVMNPIKGYIVNSSDDFYLVNIPSL

SEQ ID NO: 43883 - protein, 35 aa, Artificial Sequence; identical to SEQ ID NO: 40905
  Cyclic GFR-binding peptide
  MOD_RES (29)..(30): Xaa is C or S

SEQ ID NO: 43884 - protein, 23 aa, Artificial Sequence
  Cyclic GFR-binding peptide
VMDPIKGYVVKENEDFYLMNIPS

SEQ ID NO: 43885 - protein, 37 aa, Artificial Sequence; identical to SEQ ID NO: 40907
  Cyclic GFR-binding peptide
  MOD_RES (2)..(4)..(36)..(37): Xaa is C or S

SEQ ID NO: 43886 - protein, 37 aa, Artificial Sequence; identical to SEQ ID NO: 40908
  Cyclic GFR-binding peptide
  MOD_RES (2)..(4)..(36)..(37): Xaa is C or S

SEQ ID NO: 43887 - protein, 37 aa, Artificial Sequence; identical to SEQ ID NO: 40909
  Cyclic GFR-binding peptide
  MOD_RES (2)..(34)..(35): Xaa is C or S

SEQ ID NO: 43888 - protein, 34 aa, Artificial Sequence; identical to SEQ ID NO: 40910
  Cyclic GFR-binding peptide
  MOD_RES (2)..(4): Xaa is C or S

SEQ ID NO: 43889 - protein, 35 aa, Artificial Sequence; identical to SEQ ID NO: 40911
  Cyclic GFR-binding peptide
  MOD_RES (2)..(4): Xaa is C or S

SEQ ID NO: 43890 - protein, 38 aa, Artificial Sequence; identical to SEQ ID NO: 40912
  Cyclic GFR-binding peptide
  MOD_RES (1)..(3)..(35)..(36): Xaa is C or S

SEQ ID NO: 43891 - protein, 31 aa, Artificial Sequence; identical to SEQ ID NO: 40913
  Cyclic GFR-binding peptide
  MOD_RES (28)..(29): Xaa is C or S

SEQ ID NO: 43892 - protein, 36 aa, Artificial Sequence; identical to SEQ ID NO: 40914
  Cyclic GFR-binding peptide
  MOD_RES (32)..(33): Xaa is C or S

SEQ ID NO: 43893 - protein, 28 aa, Artificial Sequence
  Cyclic GFR-binding peptide
  MOD_RES (26)..(27): Xaa is C or S
PIKGYVVNNAADFYLINIPSLRAPVXXS

SEQ ID NO: 43894 - protein, 35 aa, Artificial Sequence; identical to SEQ ID NO: 40916
  Cyclic GFR-binding peptide
  MOD_RES (30)..(31): Xaa is C or S

SEQ ID NO: 43895 - protein, 27 aa, Artificial Sequence
  Cyclic GFR-binding peptide
AVSMGEPIKGYTPVGMDDFYLVNIPSL

SEQ ID NO: 43896 - protein, 35 aa, Artificial Sequence; identical to SEQ ID NO: 40918
  Cyclic GFR-binding peptide
  MOD_RES (2)..(34)..(35): Xaa is C or S

SEQ ID NO: 43897 - protein, 25 aa, Artificial Sequence
  Cyclic GFR-binding peptide
PIKGYYTVVGKDFYLINIPSLKTPV

SEQ ID NO: 43898 - protein, 28 aa, Artificial Sequence
  Cyclic GFR-binding peptide
GEVVMDPIKGYVVKENEDFYLMNIPSLE

SEQ ID NO: 43899 - protein, 38 aa, Artificial Sequence; identical to SEQ ID NO: 40921
  Cyclic GFR-binding peptide
  MOD_RES (1)..(3)..(35)..(36): Xaa is C or S

SEQ ID NO: 43900 - protein, 38 aa, Artificial Sequence; identical to SEQ ID NO: 40922
  Cyclic GFR-binding peptide
  MOD_RES (32)..(32): Xaa is C or S

SEQ ID NO: 43901 - protein, 31 aa, Artificial Sequence; identical to SEQ ID NO: 40923
  Cyclic GFR-binding peptide
  MOD_RES (2)..(2): Xaa is C or S

SEQ ID NO: 43902 - protein, 29 aa, Artificial Sequence
  Cyclic GFR-binding peptide
  MOD_RES (26)..(27): Xaa is C or S
PIKGYVVNNAADFYLINIPSLRAPVXXSA

SEQ ID NO: 43903 - protein, 34 aa, Artificial Sequence; identical to SEQ ID NO: 40925
  Cyclic GFR-binding peptide
  MOD_RES (1)..(3): Xaa is C or S

SEQ ID NO: 43904 - protein, 27 aa, Artificial Sequence
  Cyclic GFR-binding peptide
  MOD_RES (1)..(1): Xaa is C or S
XSRVVMNPIKGYIVNSSDDFYLVNIPS

SEQ ID NO: 43905 - protein, 25 aa, Artificial Sequence
  Cyclic GFR-binding peptide
MEPIKGYVVKDYEDFYLMNIPSLET

SEQ ID NO: 43906 - protein, 40 aa, Artificial Sequence; identical to SEQ ID NO: 40928
  Cyclic GFR-binding peptide
  MOD_RES (1)..(3)..(35)..(36): Xaa is C or S

SEQ ID NO: 43907 - protein, 34 aa, Artificial Sequence; identical to SEQ ID NO: 40929
  Cyclic GFR-binding peptide
  MOD_RES (30)..(31): Xaa is C or S

SEQ ID NO: 43908 - protein, 30 aa, Artificial Sequence; identical to SEQ ID NO: 40930
  Cyclic GFR-binding peptide
  MOD_RES (27)..(28): Xaa is C or S

SEQ ID NO: 43909 - protein, 32 aa, Artificial Sequence; identical to SEQ ID NO: 40931
  Cyclic GFR-binding peptide
  MOD_RES (30)..(31): Xaa is C or S

SEQ ID NO: 43910 - protein, 33 aa, Artificial Sequence; identical to SEQ ID NO: 40932
  Cyclic GFR-binding peptide
  MOD_RES (31)..(32): Xaa is C or S

SEQ ID NO: 43911 - protein, 36 aa, Artificial Sequence; identical to SEQ ID NO: 40933
  Cyclic GFR-binding peptide
  MOD_RES (30)..(31): Xaa is C or S

SEQ ID NO: 43912 - protein, 20 aa, Artificial Sequence
  Cyclic GFR-binding peptide
PIKGYVVNNAADFYLINIPS

SEQ ID NO: 43913 - protein, 31 aa, Artificial Sequence; identical to SEQ ID NO: 40935
  Cyclic GFR-binding peptide
  MOD_RES (30)..(31): Xaa is C or S

SEQ ID NO: 43914 - protein, 28 aa, Artificial Sequence
  Cyclic GFR-binding peptide
  MOD_RES (2)..(2): Xaa is C or S
GXSEVVMDPIKGYVVNNASDFYLINIPS

SEQ ID NO: 43915 - protein, 24 aa, Artificial Sequence
  Cyclic GFR-binding peptide
PIKGYYTVVGKDFYLINIPSLKTP

SEQ ID NO: 43916 - protein, 33 aa, Artificial Sequence; identical to SEQ ID NO: 40938
  Cyclic GFR-binding peptide
  MOD_RES (1)..(3): Xaa is C or S

SEQ ID NO: 43917 - protein, 27 aa, Artificial Sequence
  Cyclic GFR-binding peptide
  MOD_RES (27)..(27): Xaa is C or S
NPIKGYIVNSSDDFYLVNIPSLQTPAX

SEQ ID NO: 43918 - protein, 37 aa, Artificial Sequence; identical to SEQ ID NO: 40940
  Cyclic GFR-binding peptide
  MOD_RES (31)..(32): Xaa is C or S

SEQ ID NO: 43919 - protein, 37 aa, Artificial Sequence; identical to SEQ ID NO: 40941
  Cyclic GFR-binding peptide
  MOD_RES (32)..(33): Xaa is C or S

SEQ ID NO: 43920 - protein, 33 aa, Artificial Sequence; identical to SEQ ID NO: 40942
  Cyclic GFR-binding peptide
  MOD_RES (30)..(31): Xaa is C or S

SEQ ID NO: 43921 - protein, 25 aa, Artificial Sequence
  Cyclic GFR-binding peptide
IMPIKGYLLVRGNDFYLMNIPSTKV

SEQ ID NO: 43922 - protein, 25 aa, Artificial Sequence
  Cyclic GFR-binding peptide
PIKGYIVNNSSDFYLVNIPSLKTPA

SEQ ID NO: 43923 - protein, 36 aa, Artificial Sequence; identical to SEQ ID NO: 40945
  Cyclic GFR-binding peptide
  MOD_RES (1)..(3)..(35)..(36): Xaa is C or S

SEQ ID NO: 43924 - protein, 27 aa, Artificial Sequence
  Cyclic GFR-binding peptide
  MOD_RES (1)..(1): Xaa is C or S
XEEVIMPIKGYLLVRGNDFYLMNIPST

SEQ ID NO: 43925 - protein, 27 aa, Artificial Sequence
  Cyclic GFR-binding peptide
  MOD_RES (1)..(1): Xaa is C or S
XGEVVMDPIKGYVVKENEDFYLMNIPS

SEQ ID NO: 43926 - protein, 23 aa, Artificial Sequence
  Cyclic GFR-binding peptide
NPIKGYIVNSSDDFYLVNIPSLK

SEQ ID NO: 43927 - protein, 32 aa, Artificial Sequence; identical to SEQ ID NO: 40949
  Cyclic GFR-binding peptide
  MOD_RES (27)..(28): Xaa is C or S

SEQ ID NO: 43928 - protein, 26 aa, Artificial Sequence
  Cyclic GFR-binding peptide
AKVVMNPIKGYIVNNSSDFYLVNIPS

SEQ ID NO: 43929 - protein, 34 aa, Artificial Sequence; identical to SEQ ID NO: 40951
  Cyclic GFR-binding peptide
  MOD_RES (2)..(4): Xaa is C or S

SEQ ID NO: 43930 - protein, 21 aa, Artificial Sequence
  Cyclic GFR-binding peptide
NPIKGYIVNNSSDFYLVNIPS

SEQ ID NO: 43931 - protein, 31 aa, Artificial Sequence; identical to SEQ ID NO: 40953
  Cyclic GFR-binding peptide
  MOD_RES (29)..(29): Xaa is C or S

SEQ ID NO: 43932 - protein, 40 aa, Artificial Sequence; identical to SEQ ID NO: 40954
  Cyclic GFR-binding peptide
  MOD_RES (1)..(3)..(36)..(37): Xaa is C or S

SEQ ID NO: 43933 - protein, 29 aa, Artificial Sequence
  Cyclic GFR-binding peptide
VVMEPIKGYVVKDYEDFYLMNIPSLETPV

SEQ ID NO: 43934 - protein, 37 aa, Artificial Sequence; identical to SEQ ID NO: 40956
  Cyclic GFR-binding peptide
  MOD_RES (31)..(32): Xaa is C or S

SEQ ID NO: 43935 - protein, 26 aa, Artificial Sequence
  Cyclic GFR-binding peptide
EVVMEPIKGYVVKDYEDFYLMNIPSL

SEQ ID NO: 43936 - protein, 22 aa, Artificial Sequence
  Cyclic GFR-binding peptide
IMPIKGYLLVRGNDFYLMNIPS

SEQ ID NO: 43937 - protein, 35 aa, Artificial Sequence; identical to SEQ ID NO: 40959
  Cyclic GFR-binding peptide
  MOD_RES (32)..(33): Xaa is C or S

SEQ ID NO: 43938 - protein, 36 aa, Artificial Sequence; identical to SEQ ID NO: 40960
  Cyclic GFR-binding peptide
  MOD_RES (1)..(33)..(34): Xaa is C or S

SEQ ID NO: 43939 - protein, 26 aa, Artificial Sequence
  Cyclic GFR-binding peptide
MDPIKGYVVNNAADFYLINIPSLRAP

SEQ ID NO: 43940 - protein, 30 aa, Artificial Sequence; identical to SEQ ID NO: 40962
  Cyclic GFR-binding peptide
  MOD_RES (26)..(27): Xaa is C or S

SEQ ID NO: 43941 - protein, 36 aa, Artificial Sequence; identical to SEQ ID NO: 40963
  Cyclic GFR-binding peptide
  MOD_RES (1)..(3)..(35): Xaa is C or S

SEQ ID NO: 43942 - protein, 27 aa, Artificial Sequence
  Cyclic GFR-binding peptide
MGEPIKGYTPVGMDDFYLVNIPSLKTP

SEQ ID NO: 43943 - protein, 36 aa, Artificial Sequence; identical to SEQ ID NO: 40965
  Cyclic GFR-binding peptide
  MOD_RES (2)..(4)..(36): Xaa is C or S

SEQ ID NO: 43944 - protein, 37 aa, Artificial Sequence; identical to SEQ ID NO: 40966
  Cyclic GFR-binding peptide
  MOD_RES (1)..(3)..(35): Xaa is C or S

SEQ ID NO: 43945 - protein, 37 aa, Artificial Sequence; identical to SEQ ID NO: 40967
  Cyclic GFR-binding peptide
  MOD_RES (1)..(33)..(34): Xaa is C or S

SEQ ID NO: 43946 - protein, 39 aa, Artificial Sequence; identical to SEQ ID NO: 40968
  Cyclic GFR-binding peptide
  MOD_RES (1)..(34)..(35): Xaa is C or S

SEQ ID NO: 43947 - protein, 27 aa, Artificial Sequence
  Cyclic GFR-binding peptide
VVMDPIKGYVVNNAADFYLINIPSLRA

SEQ ID NO: 43948 - protein, 31 aa, Artificial Sequence; identical to SEQ ID NO: 40970
  Cyclic GFR-binding peptide
  MOD_RES (26)..(27): Xaa is C or S

SEQ ID NO: 43949 - protein, 22 aa, Artificial Sequence
  Cyclic GFR-binding peptide
PIKGYYTVVGKDFYLINIPSLK

SEQ ID NO: 43950 - protein, 27 aa, Artificial Sequence
  Cyclic GFR-binding peptide
VVMNPIKGYIVNNSSDFYLVNIPSLKT

SEQ ID NO: 43951 - protein, 28 aa, Artificial Sequence
  Cyclic GFR-binding peptide
EVVMDPIKGYVVNNAADFYLINIPSLRA

SEQ ID NO: 43952 - protein, 26 aa, Artificial Sequence
  Cyclic GFR-binding peptide
  MOD_RES (26)..(26): Xaa is C or S
PIKGYLLVRGNDFYLMNIPSTKVPAX

SEQ ID NO: 43953 - protein, 33 aa, Artificial Sequence; identical to SEQ ID NO: 40975
  Cyclic GFR-binding peptide
  MOD_RES (1)..(3): Xaa is C or S

SEQ ID NO: 43954 - protein, 22 aa, Artificial Sequence
  Cyclic GFR-binding peptide
MPIKGYLLVRGNDFYLMNIPST

SEQ ID NO: 43955 - protein, 29 aa, Artificial Sequence
  Cyclic GFR-binding peptide
  MOD_RES (2)..(2): Xaa is C or S
GXSRVVMNPIKGYIVNSSDDFYLVNIPSL

SEQ ID NO: 43956 - protein, 32 aa, Artificial Sequence; identical to SEQ ID NO: 40978
  Cyclic GFR-binding peptide
  MOD_RES (1)..(3): Xaa is C or S

SEQ ID NO: 43957 - protein, 38 aa, Artificial Sequence; identical to SEQ ID NO: 40979
  Cyclic GFR-binding peptide
  MOD_RES (2)..(4)..(36)..(37): Xaa is C or S

SEQ ID NO: 43958 - protein, 35 aa, Artificial Sequence; identical to SEQ ID NO: 40980
  Cyclic GFR-binding peptide
  MOD_RES (30)..(31): Xaa is C or S

SEQ ID NO: 43959 - protein, 34 aa, Artificial Sequence; identical to SEQ ID NO: 40981
  Cyclic GFR-binding peptide
  MOD_RES (28)..(29): Xaa is C or S

SEQ ID NO: 43960 - protein, 27 aa, Artificial Sequence
  Cyclic GFR-binding peptide
EAVSMGEPIKGYTPVGMDDFYLVNIPS

SEQ ID NO: 43961 - protein, 42 aa, Artificial Sequence; identical to SEQ ID NO: 40983
  Cyclic GFR-binding peptide
  MOD_RES (2)..(4)..(36)..(37): Xaa is C or S

SEQ ID NO: 43962 - protein, 32 aa, Artificial Sequence; identical to SEQ ID NO: 40984
  Cyclic GFR-binding peptide
  MOD_RES (26)..(27): Xaa is C or S

SEQ ID NO: 43963 - protein, 32 aa, Artificial Sequence; identical to SEQ ID NO: 40985
  Cyclic GFR-binding peptide
  MOD_RES (32)..(32): Xaa is C or S

SEQ ID NO: 43964 - protein, 27 aa, Artificial Sequence
  Cyclic GFR-binding peptide
  MOD_RES (26)..(27): Xaa is C or S
PIKGYVVNNASDFYLINIPSLRTPVXX

SEQ ID NO: 43965 - protein, 29 aa, Artificial Sequence
  Cyclic GFR-binding peptide
  MOD_RES (2)..(2): Xaa is C or S
GXEEVIMPIKGYLLVRGNDFYLMNIPSTK

SEQ ID NO: 43966 - protein, 30 aa, Artificial Sequence; identical to SEQ ID NO: 40988
  Cyclic GFR-binding peptide
  MOD_RES (28)..(29): Xaa is C or S

SEQ ID NO: 43967 - protein, 32 aa, Artificial Sequence; identical to SEQ ID NO: 40989
  Cyclic GFR-binding peptide
  MOD_RES (1)..(3): Xaa is C or S

SEQ ID NO: 43968 - protein, 28 aa, Artificial Sequence
  Cyclic GFR-binding peptide
VVMNPIKGYIVNNSSDFYLVNIPSLKTP

SEQ ID NO: 43969 - protein, 38 aa, Artificial Sequence; identical to SEQ ID NO: 40991
  Cyclic GFR-binding peptide
  MOD_RES (33)..(34): Xaa is C or S

SEQ ID NO: 43970 - protein, 34 aa, Artificial Sequence; identical to SEQ ID NO: 40992
  Cyclic GFR-binding peptide
  MOD_RES (29)..(30): Xaa is C or S

SEQ ID NO: 43971 - protein, 23 aa, Artificial Sequence
  Cyclic GFR-binding peptide
PIKGYTPVGMDDFYLVNIPSLKT

SEQ ID NO: 43972 - protein, 26 aa, Artificial Sequence
  Cyclic GFR-binding peptide
EVVMDPIKGYVVKENEDFYLMNIPSL

SEQ ID NO: 43973 - protein, 30 aa, Artificial Sequence; identical to SEQ ID NO: 40995
  Cyclic GFR-binding peptide
  MOD_RES (30)..(30): Xaa is C or S

SEQ ID NO: 43974 - protein, 28 aa, Artificial Sequence
  Cyclic GFR-binding peptide
EVVMEPIKGYVVKDYEDFYLMNIPSLET

SEQ ID NO: 43975 - protein, 30 aa, Artificial Sequence; identical to SEQ ID NO: 40997
  Cyclic GFR-binding peptide
  MOD_RES (2)..(4): Xaa is C or S

SEQ ID NO: 43976 - protein, 32 aa, Artificial Sequence; identical to SEQ ID NO: 40998
  Cyclic GFR-binding peptide
  MOD_RES (31)..(31): Xaa is C or S

SEQ ID NO: 43977 - protein, 31 aa, Artificial Sequence; identical to SEQ ID NO: 40999
  Cyclic GFR-binding peptide
  MOD_RES (29)..(30): Xaa is C or S

SEQ ID NO: 43978 - protein, 37 aa, Artificial Sequence; identical to SEQ ID NO: 41000
  Cyclic GFR-binding peptide
  MOD_RES (2)..(4)..(36)..(37): Xaa is C or S

SEQ ID NO: 43979 - protein, 32 aa, Artificial Sequence; identical to SEQ ID NO: 41001
  Cyclic GFR-binding peptide
  MOD_RES (28)..(29): Xaa is C or S

SEQ ID NO: 43980 - protein, 30 aa, Artificial Sequence; identical to SEQ ID NO: 41002
  Cyclic GFR-binding peptide
  MOD_RES (2)..(4): Xaa is C or S

SEQ ID NO: 43981 - protein, 37 aa, Artificial Sequence; identical to SEQ ID NO: 41003
  Cyclic GFR-binding peptide
  MOD_RES (1)..(3)..(35)..(36): Xaa is C or S

SEQ ID NO: 43982 - protein, 37 aa, Artificial Sequence; identical to SEQ ID NO: 41004
  Cyclic GFR-binding peptide
  MOD_RES (1)..(3)..(35)..(36): Xaa is C or S

SEQ ID NO: 43983 - protein, 41 aa, Artificial Sequence; identical to SEQ ID NO: 41005
  Cyclic GFR-binding peptide
  MOD_RES (2)..(4)..(36)..(37): Xaa is C or S

SEQ ID NO: 43984 - protein, 35 aa, Artificial Sequence; identical to SEQ ID NO: 41006
  Cyclic GFR-binding peptide
  MOD_RES (2)..(34): Xaa is C or S

SEQ ID NO: 43985 - protein, 27 aa, Artificial Sequence
  Cyclic GFR-binding peptide
  MOD_RES (26)..(27): Xaa is C or S
PIKGYLLVRGNDFYLMNIPSTKVPAXX

SEQ ID NO: 43986 - protein, 33 aa, Artificial Sequence; identical to SEQ ID NO: 41008
  Cyclic GFR-binding peptide
  MOD_RES (2)..(2): Xaa is C or S

SEQ ID NO: 43987 - protein, 24 aa, Artificial Sequence
  Cyclic GFR-binding peptide
VIMPIKGYLLVRGNDFYLMNIPST

SEQ ID NO: 43988 - protein, 26 aa, Artificial Sequence
  Cyclic GFR-binding peptide
DPIKGYVVKENEDFYLMNIPSLETPV

SEQ ID NO: 43989 - protein, 23 aa, Artificial Sequence
  Cyclic GFR-binding peptide
PIKGYIVNSSDDFYLVNIPSLQT

SEQ ID NO: 43990 - protein, 30 aa, Artificial Sequence; identical to SEQ ID NO: 41012
  Cyclic GFR-binding peptide
  MOD_RES (27)..(28): Xaa is C or S

SEQ ID NO: 43991 - protein, 25 aa, Artificial Sequence
  Cyclic GFR-binding peptide
MNPIKGYIVNSSDDFYLVNIPSLKT

SEQ ID NO: 43992 - protein, 31 aa, Artificial Sequence; identical to SEQ ID NO: 41014
  Cyclic GFR-binding peptide
  MOD_RES (29)..(30): Xaa is C or S

SEQ ID NO: 43993 - protein, 34 aa, Artificial Sequence; identical to SEQ ID NO: 41015
  Cyclic GFR-binding peptide
  MOD_RES (2)..(34): Xaa is C or S

SEQ ID NO: 43994 - protein, 35 aa, Artificial Sequence; identical to SEQ ID NO: 41016
  Cyclic GFR-binding peptide
  MOD_RES (31)..(32): Xaa is C or S

SEQ ID NO: 43995 - protein, 29 aa, Artificial Sequence
  Cyclic GFR-binding peptide
GEVVMDPIKGYVVKENEDFYLMNIPSLET

SEQ ID NO: 43996 - protein, 23 aa, Artificial Sequence
  Cyclic GFR-binding peptide
PIKGYVVNNASDFYLINIPSLRT

SEQ ID NO: 43997 - protein, 34 aa, Artificial Sequence; identical to SEQ ID NO: 41019
  Cyclic GFR-binding peptide
  MOD_RES (1)..(33)..(34): Xaa is C or S

SEQ ID NO: 43998 - protein, 30 aa, Artificial Sequence; identical to SEQ ID NO: 41020
  Cyclic GFR-binding peptide
  MOD_RES (2)..(4): Xaa is C or S

SEQ ID NO: 43999 - protein, 40 aa, Artificial Sequence; identical to SEQ ID NO: 41021
  Cyclic GFR-binding peptide
  MOD_RES (2)..(34)..(35): Xaa is C or S

SEQ ID NO: 44000 - protein, 32 aa, Artificial Sequence; identical to SEQ ID NO: 41022
  Cyclic GFR-binding peptide
  MOD_RES (26)..(27): Xaa is C or S

SEQ ID NO: 44001 - protein, 24 aa, Artificial Sequence
  Cyclic GFR-binding peptide
PIKGYLLVRGNDFYLMNIPSTKVP

SEQ ID NO: 44002 - protein, 39 aa, Artificial Sequence; identical to SEQ ID NO: 41024
  Cyclic GFR-binding peptide
  MOD_RES (2)..(34)..(35): Xaa is C or S

SEQ ID NO: 44003 - protein, 32 aa, Artificial Sequence; identical to SEQ ID NO: 41025
  Cyclic GFR-binding peptide
  MOD_RES (29)..(30): Xaa is C or S

SEQ ID NO: 44004 - protein, 24 aa, Artificial Sequence
  Cyclic GFR-binding peptide
VMNPIKGYIVNNSSDFYLVNIPSL

SEQ ID NO: 44005 - protein, 30 aa, Artificial Sequence; identical to SEQ ID NO: 41027
  Cyclic GFR-binding peptide
  MOD_RES (27)..(28): Xaa is C or S

SEQ ID NO: 44006 - protein, 31 aa, Artificial Sequence; identical to SEQ ID NO: 41028
  Cyclic GFR-binding peptide
  MOD_RES (2)..(2): Xaa is C or S

SEQ ID NO: 44007 - protein, 32 aa, Artificial Sequence; identical to SEQ ID NO: 41029
  Cyclic GFR-binding peptide
  MOD_RES (1)..(1): Xaa is C or S

SEQ ID NO: 44008 - protein, 38 aa, Artificial Sequence; identical to SEQ ID NO: 41030
  Cyclic GFR-binding peptide
  MOD_RES (2)..(34)..(35): Xaa is C or S

SEQ ID NO: 44009 - protein, 35 aa, Artificial Sequence; identical to SEQ ID NO: 41031
  Cyclic GFR-binding peptide
  MOD_RES (31)..(32): Xaa is C or S

SEQ ID NO: 44010 - protein, 34 aa, Artificial Sequence; identical to SEQ ID NO: 41032
  Cyclic GFR-binding peptide
  MOD_RES (31)..(32): Xaa is C or S

SEQ ID NO: 44011 - protein, 32 aa, Artificial Sequence; identical to SEQ ID NO: 41033
  Cyclic GFR-binding peptide
  MOD_RES (2)..(2): Xaa is C or S

SEQ ID NO: 44012 - protein, 28 aa, Artificial Sequence
  Cyclic GFR-binding peptide
  MOD_RES (26)..(26): Xaa is C or S
PIKGYIVNSSDDFYLVNIPSLKTPAXTP

SEQ ID NO: 44013 - protein, 41 aa, Artificial Sequence; identical to SEQ ID NO: 41035
  Cyclic GFR-binding peptide
  MOD_RES (1)..(3)..(35)..(36): Xaa is C or S

SEQ ID NO: 44014 - protein, 35 aa, Artificial Sequence; identical to SEQ ID NO: 41036
  Cyclic GFR-binding peptide
  MOD_RES (31)..(32): Xaa is C or S

SEQ ID NO: 44015 - protein, 27 aa, Artificial Sequence
  Cyclic GFR-binding peptide
ESVAMGPIKGYYTVVGKDFYLINIPSL

SEQ ID NO: 44016 - protein, 29 aa, Artificial Sequence
  Cyclic GFR-binding peptide
AVSMGEPIKGYTPVGMDDFYLVNIPSLKT

SEQ ID NO: 44017 - protein, 39 aa, Artificial Sequence; identical to SEQ ID NO: 41039
  Cyclic GFR-binding peptide
  MOD_RES (1)..(3)..(35)..(36): Xaa is C or S

SEQ ID NO: 44018 - protein, 38 aa, Artificial Sequence; identical to SEQ ID NO: 41040
  Cyclic GFR-binding peptide
  MOD_RES (2)..(34)..(35): Xaa is C or S

SEQ ID NO: 44019 - protein, 30 aa, Artificial Sequence; identical to SEQ ID NO: 41041
  Cyclic GFR-binding peptide

SEQ ID NO: 44020 - protein, 26 aa, Artificial Sequence
  Cyclic GFR-binding peptide
VMNPIKGYIVNSSDDFYLVNIPSLKT

SEQ ID NO: 44021 - protein, 27 aa, Artificial Sequence
  Cyclic GFR-binding peptide
MEPIKGYVVKDYEDFYLMNIPSLETPV

SEQ ID NO: 44022 - protein, 32 aa, Artificial Sequence; identical to SEQ ID NO: 41044
  Cyclic GFR-binding peptide
  MOD_RES (32)..(32): Xaa is C or S

SEQ ID NO: 44023 - protein, 38 aa, Artificial Sequence; identical to SEQ ID NO: 41045
  Cyclic GFR-binding peptide
  MOD_RES (32)..(33): Xaa is C or S

SEQ ID NO: 44024 - protein, 34 aa, Artificial Sequence; identical to SEQ ID NO: 41046
  Cyclic GFR-binding peptide
  MOD_RES (2)..(2): Xaa is C or S

SEQ ID NO: 44025 - protein, 36 aa, Artificial Sequence; identical to SEQ ID NO: 41047
  Cyclic GFR-binding peptide
  MOD_RES (30)..(31): Xaa is C or S

SEQ ID NO: 44026 - protein, 28 aa, Artificial Sequence
  Cyclic GFR-binding peptide
  MOD_RES (26)..(27): Xaa is C or S
PIKGYIVNSSDDFYLVNIPSLKTPAXXP

SEQ ID NO: 44027 - protein, 40 aa, Artificial Sequence; identical to SEQ ID NO: 41049
  Cyclic GFR-binding peptide
  MOD_RES (1)..(3)..(35): Xaa is C or S

SEQ ID NO: 44028 - protein, 30 aa, Artificial Sequence; identical to SEQ ID NO: 41050
  Cyclic GFR-binding peptide
  MOD_RES (2)..(4): Xaa is C or S

SEQ ID NO: 44029 - protein, 29 aa, Artificial Sequence
  Cyclic GFR-binding peptide
  MOD_RES (28)..(29): Xaa is C or S
MGPIKGYYTVVGKDFYLINIPSLKTPVXX

SEQ ID NO: 44030 - protein, 37 aa, Artificial Sequence; identical to SEQ ID NO: 41052
  Cyclic GFR-binding peptide
  MOD_RES (32)..(33): Xaa is C or S

SEQ ID NO: 44031 - protein, 27 aa, Artificial Sequence
  Cyclic GFR-binding peptide
EVVMEPIKGYVVKDYEDFYLMNIPSLE

SEQ ID NO: 44032 - protein, 37 aa, Artificial Sequence; identical to SEQ ID NO: 41054
  Cyclic GFR-binding peptide
  MOD_RES (31)..(32): Xaa is C or S

SEQ ID NO: 44033 - protein, 26 aa, Artificial Sequence
  Cyclic GFR-binding peptide
VVMEPIKGYVVKDYEDFYLMNIPSLE

SEQ ID NO: 44034 - protein, 35 aa, Artificial Sequence; identical to SEQ ID NO: 41056
  Cyclic GFR-binding peptide
  MOD_RES (32)..(33): Xaa is C or S

SEQ ID NO: 44035 - protein, 33 aa, Artificial Sequence; identical to SEQ ID NO: 41057
  Cyclic GFR-binding peptide
  MOD_RES (28)..(29): Xaa is C or S

SEQ ID NO: 44036 - protein, 36 aa, Artificial Sequence; identical to SEQ ID NO: 41058
  Cyclic GFR-binding peptide
  MOD_RES (31)..(32): Xaa is C or S

SEQ ID NO: 44037 - protein, 26 aa, Artificial Sequence
  Cyclic GFR-binding peptide
VMDPIKGYVVNNAADFYLINIPSLRA

SEQ ID NO: 44038 - protein, 31 aa, Artificial Sequence; identical to SEQ ID NO: 41060
  Cyclic GFR-binding peptide
  MOD_RES (1)..(1): Xaa is C or S

SEQ ID NO: 44039 - protein, 31 aa, Artificial Sequence; identical to SEQ ID NO: 41061
  Cyclic GFR-binding peptide
  MOD_RES (28)..(28): Xaa is C or S

SEQ ID NO: 44040 - protein, 42 aa, Artificial Sequence; identical to SEQ ID NO: 41062
  Cyclic GFR-binding peptide
  MOD_RES (2)..(4)..(36): Xaa is C or S

SEQ ID NO: 44041 - protein, 33 aa, Artificial Sequence; identical to SEQ ID NO: 41063
  Cyclic GFR-binding peptide
  MOD_RES (1)..(32)..(33): Xaa is C or S

SEQ ID NO: 44042 - protein, 23 aa, Artificial Sequence
  Cyclic GFR-binding peptide
DPIKGYVVNNAADFYLINIPSLR

SEQ ID NO: 44043 - protein, 33 aa, Artificial Sequence; identical to SEQ ID NO: 41065
  Cyclic GFR-binding peptide
  MOD_RES (30)..(31): Xaa is C or S

SEQ ID NO: 44044 - protein, 33 aa, Artificial Sequence; identical to SEQ ID NO: 41066
  Cyclic GFR-binding peptide
  MOD_RES (1)..(3): Xaa is C or S

SEQ ID NO: 44045 - protein, 32 aa, Artificial Sequence; identical to SEQ ID NO: 41067
  Cyclic GFR-binding peptide
  MOD_RES (27)..(28): Xaa is C or S

SEQ ID NO: 44046 - protein, 30 aa, Artificial Sequence; identical to SEQ ID NO: 41068
  Cyclic GFR-binding peptide
  MOD_RES (1)..(1): Xaa is C or S

SEQ ID NO: 44047 - protein, 41 aa, Artificial Sequence; identical to SEQ ID NO: 41069
  Cyclic GFR-binding peptide
  MOD_RES (2)..(4)..(37)..(38): Xaa is C or S

SEQ ID NO: 44048 - protein, 36 aa, Artificial Sequence; identical to SEQ ID NO: 41070
  Cyclic GFR-binding peptide
  MOD_RES (30)..(31): Xaa is C or S

SEQ ID NO: 44049 - protein, 24 aa, Artificial Sequence
  Cyclic GFR-binding peptide
MDPIKGYVVNNASDFYLINIPSLR

SEQ ID NO: 44050 - protein, 32 aa, Artificial Sequence; identical to SEQ ID NO: 41072
  Cyclic GFR-binding peptide
  MOD_RES (1)..(1): Xaa is C or S

SEQ ID NO: 44051 - protein, 33 aa, Artificial Sequence; identical to SEQ ID NO: 41073
  Cyclic GFR-binding peptide
  MOD_RES (30)..(31): Xaa is C or S

SEQ ID NO: 44052 - protein, 25 aa, Artificial Sequence
  Cyclic GFR-binding peptide
EVIMPIKGYLLVRGNDFYLMNIPST

SEQ ID NO: 44053 - protein, 32 aa, Artificial Sequence; identical to SEQ ID NO: 41075
  Cyclic GFR-binding peptide
  MOD_RES (1)..(3): Xaa is C or S

SEQ ID NO: 44054 - protein, 41 aa, Artificial Sequence; identical to SEQ ID NO: 41076
  Cyclic GFR-binding peptide
  MOD_RES (2)..(4)..(36)..(37): Xaa is C or S

SEQ ID NO: 44055 - protein, 30 aa, Artificial Sequence; identical to SEQ ID NO: 41077
  Cyclic GFR-binding peptide
  MOD_RES (1)..(3): Xaa is C or S

SEQ ID NO: 44056 - protein, 30 aa, Artificial Sequence; identical to SEQ ID NO: 41078
  Cyclic GFR-binding peptide
  MOD_RES (2)..(4): Xaa is C or S

SEQ ID NO: 44057 - protein, 29 aa, Artificial Sequence
  Cyclic GFR-binding peptide
  MOD_RES (29)..(29): Xaa is C or S
VMNPIKGYIVNSSDDFYLVNIPSLQTPAX

SEQ ID NO: 44058 - protein, 39 aa, Artificial Sequence; identical to SEQ ID NO: 41080
  Cyclic GFR-binding peptide
  MOD_RES (2)..(4)..(35)..(36): Xaa is C or S

SEQ ID NO: 44059 - protein, 31 aa, Artificial Sequence; identical to SEQ ID NO: 41081
  Cyclic GFR-binding peptide
  MOD_RES (1)..(1): Xaa is C or S

SEQ ID NO: 44060 - protein, 38 aa, Artificial Sequence; identical to SEQ ID NO: 41082
  Cyclic GFR-binding peptide
  MOD_RES (1)..(33)..(34): Xaa is C or S

SEQ ID NO: 44061 - protein, 26 aa, Artificial Sequence
  Cyclic GFR-binding peptide
  MOD_RES (1)..(1): Xaa is C or S
XEEVIMPIKGYLLVRGNDFYLMNIPS

SEQ ID NO: 44062 - protein, 31 aa, Artificial Sequence; identical to SEQ ID NO: 41084
  Cyclic GFR-binding peptide
  MOD_RES (28)..(29): Xaa is C or S

SEQ ID NO: 44063 - protein, 35 aa, Artificial Sequence; identical to SEQ ID NO: 41085
  Cyclic GFR-binding peptide
  MOD_RES (31)..(32): Xaa is C or S

SEQ ID NO: 44064 - protein, 27 aa, Artificial Sequence
  Cyclic GFR-binding peptide
VVMDPIKGYVVKENEDFYLMNIPSLET

SEQ ID NO: 44065 - protein, 30 aa, Artificial Sequence; identical to SEQ ID NO: 41087
  Cyclic GFR-binding peptide
  MOD_RES (1)..(1): Xaa is C or S

SEQ ID NO: 44066 - protein, 35 aa, Artificial Sequence; identical to SEQ ID NO: 41088
  Cyclic GFR-binding peptide
  MOD_RES (1)..(33)..(34): Xaa is C or S

SEQ ID NO: 44067 - protein, 29 aa, Artificial Sequence
  Cyclic GFR-binding peptide
EEVIMPIKGYLLVRGNDFYLMNIPSTKVP

SEQ ID NO: 44068 - protein, 29 aa, Artificial Sequence
  Cyclic GFR-binding peptide
  MOD_RES (29)..(29): Xaa is C or S
MGEPIKGYTPVGMDDFYLVNIPSLKTPVX

SEQ ID NO: 44069 - protein, 27 aa, Artificial Sequence
  Cyclic GFR-binding peptide
  MOD_RES (26)..(27): Xaa is C or S
PIKGYTPVGMDDFYLVNIPSLKTPVXX

SEQ ID NO: 44070 - protein, 31 aa, Artificial Sequence; identical to SEQ ID NO: 41092
  Cyclic GFR-binding peptide
  MOD_RES (1)..(1): Xaa is C or S

SEQ ID NO: 44071 - protein, 27 aa, Artificial Sequence
  Cyclic GFR-binding peptide
  MOD_RES (26)..(27): Xaa is C or S
PIKGYIVNSSDDFYLVNIPSLKTPAXX

SEQ ID NO: 44072 - protein, 35 aa, Artificial Sequence; identical to SEQ ID NO: 41094
  Cyclic GFR-binding peptide
  MOD_RES (1)..(33)..(34): Xaa is C or S

SEQ ID NO: 44073 - protein, 28 aa, Artificial Sequence
  Cyclic GFR-binding peptide
  MOD_RES (2)..(2): Xaa is C or S
GXESVAMGPIKGYYTVVGKDFYLINIPS

SEQ ID NO: 44074 - protein, 25 aa, Artificial Sequence
  Cyclic GFR-binding peptide
MDPIKGYVVKENEDFYLMNIPSLET

SEQ ID NO: 44075 - protein, 32 aa, Artificial Sequence; identical to SEQ ID NO: 41097
  Cyclic GFR-binding peptide
  MOD_RES (1)..(1): Xaa is C or S

SEQ ID NO: 44076 - protein, 37 aa, Artificial Sequence; identical to SEQ ID NO: 41098
  Cyclic GFR-binding peptide
  MOD_RES (1)..(33)..(34): Xaa is C or S

SEQ ID NO: 44077 - protein, 34 aa, Artificial Sequence; identical to SEQ ID NO: 41099
  Cyclic GFR-binding peptide
  MOD_RES (33)..(34): Xaa is C or S

SEQ ID NO: 44078 - protein, 22 aa, Artificial Sequence
  Cyclic GFR-binding peptide
PIKGYIVNSSDDFYLVNIPSLK

SEQ ID NO: 44079 - protein, 30 aa, Artificial Sequence; identical to SEQ ID NO: 41101
  Cyclic GFR-binding peptide
  MOD_RES (29)..(30): Xaa is C or S

SEQ ID NO: 44080 - protein, 35 aa, Artificial Sequence; identical to SEQ ID NO: 41102
  Cyclic GFR-binding peptide
  MOD_RES (1)..(33)..(34): Xaa is C or S

SEQ ID NO: 44081 - protein, 40 aa, Artificial Sequence; identical to SEQ ID NO: 41103
  Cyclic GFR-binding peptide
  MOD_RES (2)..(4)..(36)..(37): Xaa is C or S

SEQ ID NO: 44082 - protein, 36 aa, Artificial Sequence; identical to SEQ ID NO: 41104
  Cyclic GFR-binding peptide
  MOD_RES (1)..(3)..(35)..(36): Xaa is C or S

SEQ ID NO: 44083 - protein, 31 aa, Artificial Sequence; identical to SEQ ID NO: 41105
  Cyclic GFR-binding peptide
  MOD_RES (2)..(4): Xaa is C or S

SEQ ID NO: 44084 - protein, 40 aa, Artificial Sequence; identical to SEQ ID NO: 41106
  Cyclic GFR-binding peptide
  MOD_RES (2)..(4)..(36)..(37): Xaa is C or S

SEQ ID NO: 44085 - protein, 29 aa, Artificial Sequence
  Cyclic GFR-binding peptide
  MOD_RES (27)..(28): Xaa is C or S
NPIKGYIVNSSDDFYLVNIPSLKTPAXXP

SEQ ID NO: 44086 - protein, 32 aa, Artificial Sequence; identical to SEQ ID NO: 41108
  Cyclic GFR-binding peptide
  MOD_RES (29)..(30): Xaa is C or S

SEQ ID NO: 44087 - protein, 37 aa, Artificial Sequence; identical to SEQ ID NO: 41109
  Cyclic GFR-binding peptide
  MOD_RES (1)..(33): Xaa is C or S

SEQ ID NO: 44088 - protein, 41 aa, Artificial Sequence; identical to SEQ ID NO: 41110
  Cyclic GFR-binding peptide
  MOD_RES (2)..(4)..(36)..(37): Xaa is C or S

SEQ ID NO: 44089 - protein, 33 aa, Artificial Sequence; identical to SEQ ID NO: 41111
  Cyclic GFR-binding peptide
  MOD_RES (27)..(28): Xaa is C or S

SEQ ID NO: 44090 - protein, 30 aa, Artificial Sequence; identical to SEQ ID NO: 41112
  Cyclic GFR-binding peptide
  MOD_RES (1)..(1): Xaa is C or S

SEQ ID NO: 44091 - protein, 24 aa, Artificial Sequence
  Cyclic GFR-binding peptide
PIKGYVVNNAADFYLINIPSLRAP

SEQ ID NO: 44092 - protein, 26 aa, Artificial Sequence
  Cyclic GFR-binding peptide
EEVIMPIKGYLLVRGNDFYLMNIPST

SEQ ID NO: 44093 - protein, 22 aa, Artificial Sequence
  Cyclic GFR-binding peptide
PIKGYVVNNAADFYLINIPSLR

SEQ ID NO: 44094 - protein, 36 aa, Artificial Sequence; identical to SEQ ID NO: 41116
  Cyclic GFR-binding peptide
  MOD_RES (30)..(31): Xaa is C or S

SEQ ID NO: 44095 - protein, 36 aa, Artificial Sequence; identical to SEQ ID NO: 41117
  Cyclic GFR-binding peptide
  MOD_RES (2)..(34)..(35): Xaa is C or S

SEQ ID NO: 44096 - protein, 32 aa, Artificial Sequence; identical to SEQ ID NO: 41118
  Cyclic GFR-binding peptide
  MOD_RES (31)..(32): Xaa is C or S

SEQ ID NO: 44097 - protein, 27 aa, Artificial Sequence
  Cyclic GFR-binding peptide
  MOD_RES (27)..(27): Xaa is C or S
EPIKGYTPVGMDDFYLVNIPSLKTPVX

SEQ ID NO: 44098 - protein, 29 aa, Artificial Sequence
  Cyclic GFR-binding peptide
  MOD_RES (29)..(29): Xaa is C or S
VMEPIKGYVVKDYEDFYLMNIPSLETPVX

SEQ ID NO: 44099 - protein, 26 aa, Artificial Sequence
  Cyclic GFR-binding peptide
VVMNPIKGYIVNNSSDFYLVNIPSLK

SEQ ID NO: 44100 - protein, 27 aa, Artificial Sequence
  Cyclic GFR-binding peptide
GEVVMEPIKGYVVKDYEDFYLMNIPSL

SEQ ID NO: 44101 - protein, 29 aa, Artificial Sequence
  Cyclic GFR-binding peptide
ARVVMNPIKGYIVNSSDDFYLVNIPSLQT

SEQ ID NO: 44102 - protein, 24 aa, Artificial Sequence
  Cyclic GFR-binding peptide
PIKGYIVNNSSDFYLVNIPSLKTP

SEQ ID NO: 44103 - protein, 28 aa, Artificial Sequence
  Cyclic GFR-binding peptide
KVVMNPIKGYIVNNSSDFYLVNIPSLKT

SEQ ID NO: 44104 - protein, 32 aa, Artificial Sequence; identical to SEQ ID NO: 41126
  Cyclic GFR-binding peptide

SEQ ID NO: 44105 - protein, 29 aa, Artificial Sequence
  Cyclic GFR-binding peptide
EVVMDPIKGYVVNNAADFYLINIPSLRAP

SEQ ID NO: 44106 - protein, 29 aa, Artificial Sequence
  Cyclic GFR-binding peptide
  MOD_RES (1)..(3): Xaa is C or S
XGXGEVVMDPIKGYVVKENEDFYLMNIPS

SEQ ID NO: 44107 - protein, 31 aa, Artificial Sequence; identical to SEQ ID NO: 41129
  Cyclic GFR-binding peptide
  MOD_RES (27)..(28): Xaa is C or S

SEQ ID NO: 44108 - protein, 27 aa, Artificial Sequence
  Cyclic GFR-binding peptide
IMPIKGYLLVRGNDFYLMNIPSTKVPA

SEQ ID NO: 44109 - protein, 35 aa, Artificial Sequence; identical to SEQ ID NO: 41131
  Cyclic GFR-binding peptide
  MOD_RES (2)..(34)..(35): Xaa is C or S

SEQ ID NO: 44110 - protein, 36 aa, Artificial Sequence; identical to SEQ ID NO: 41132
  Cyclic GFR-binding peptide
  MOD_RES (31)..(32): Xaa is C or S

SEQ ID NO: 44111 - protein, 40 aa, Artificial Sequence; identical to SEQ ID NO: 41133
  Cyclic GFR-binding peptide
  MOD_RES (2)..(34): Xaa is C or S

SEQ ID NO: 44112 - protein, 39 aa, Artificial Sequence; identical to SEQ ID NO: 41134
  Cyclic GFR-binding peptide
  MOD_RES (2)..(4)..(36)..(37): Xaa is C or S

SEQ ID NO: 44113 - protein, 36 aa, Artificial Sequence; identical to SEQ ID NO: 41135
  Cyclic GFR-binding peptide
  MOD_RES (31)..(32): Xaa is C or S

SEQ ID NO: 44114 - protein, 35 aa, Artificial Sequence; identical to SEQ ID NO: 41136
  Cyclic GFR-binding peptide
  MOD_RES (1)..(3): Xaa is C or S

SEQ ID NO: 44115 - protein, 37 aa, Artificial Sequence; identical to SEQ ID NO: 41137
  Cyclic GFR-binding peptide
  MOD_RES (1)..(3)..(34)..(35): Xaa is C or S

SEQ ID NO: 44116 - protein, 30 aa, Artificial Sequence; identical to SEQ ID NO: 41138
  Cyclic GFR-binding peptide
  MOD_RES (29)..(30): Xaa is C or S

SEQ ID NO: 44117 - protein, 33 aa, Artificial Sequence; identical to SEQ ID NO: 41139
  Cyclic GFR-binding peptide
  MOD_RES (28)..(29): Xaa is C or S

SEQ ID NO: 44118 - protein, 23 aa, Artificial Sequence
  Cyclic GFR-binding peptide
NPIKGYIVNNSSDFYLVNIPSLK

SEQ ID NO: 44119 - protein, 41 aa, Artificial Sequence; identical to SEQ ID NO: 41141
  Cyclic GFR-binding peptide
  MOD_RES (1)..(3)..(35)..(36): Xaa is C or S

SEQ ID NO: 44120 - protein, 27 aa, Artificial Sequence
  Cyclic GFR-binding peptide
MNPIKGYIVNSSDDFYLVNIPSLKTPA

SEQ ID NO: 44121 - protein, 39 aa, Artificial Sequence; identical to SEQ ID NO: 41143
  Cyclic GFR-binding peptide
  MOD_RES (2)..(34)..(35): Xaa is C or S

SEQ ID NO: 44122 - protein, 26 aa, Artificial Sequence
  Cyclic GFR-binding peptide
GEPIKGYTPVGMDDFYLVNIPSLKTP

SEQ ID NO: 44123 - protein, 25 aa, Artificial Sequence
  Cyclic GFR-binding peptide
MNPIKGYIVNSSDDFYLVNIPSLQT

SEQ ID NO: 44124 - protein, 36 aa, Artificial Sequence; identical to SEQ ID NO: 41146
  Cyclic GFR-binding peptide
  MOD_RES (31)..(32): Xaa is C or S

SEQ ID NO: 44125 - protein, 37 aa, Artificial Sequence; identical to SEQ ID NO: 41147
  Cyclic GFR-binding peptide
  MOD_RES (1)..(3)..(35)..(36): Xaa is C or S

SEQ ID NO: 44126 - protein, 28 aa, Artificial Sequence
  Cyclic GFR-binding peptide
  MOD_RES (27)..(28): Xaa is C or S
EPIKGYTPVGMDDFYLVNIPSLKTPVXX

SEQ ID NO: 44127 - protein, 30 aa, Artificial Sequence; identical to SEQ ID NO: 41149
  Cyclic GFR-binding peptide
  MOD_RES (1)..(3): Xaa is C or S

SEQ ID NO: 44128 - protein, 26 aa, Artificial Sequence
  Cyclic GFR-binding peptide
VIMPIKGYLLVRGNDFYLMNIPSTKV

SEQ ID NO: 44129 - protein, 29 aa, Artificial Sequence
  Cyclic GFR-binding peptide
  MOD_RES (26)..(27): Xaa is C or S
PIKGYVVNNASDFYLINIPSLRTPVXXTP

SEQ ID NO: 44130 - protein, 35 aa, Artificial Sequence; identical to SEQ ID NO: 41152
  Cyclic GFR-binding peptide
  MOD_RES (30)..(31): Xaa is C or S

SEQ ID NO: 44131 - protein, 23 aa, Artificial Sequence
  Cyclic GFR-binding peptide
AMGPIKGYYTVVGKDFYLINIPS

SEQ ID NO: 44132 - protein, 32 aa, Artificial Sequence; identical to SEQ ID NO: 41154
  Cyclic GFR-binding peptide
  MOD_RES (26)..(27): Xaa is C or S

SEQ ID NO: 44133 - protein, 27 aa, Artificial Sequence
  Cyclic GFR-binding peptide
  MOD_RES (26)..(27): Xaa is C or S
PIKGYVVKDYEDFYLMNIPSLETPVXX

SEQ ID NO: 44134 - protein, 41 aa, Artificial Sequence; identical to SEQ ID NO: 41156
  Cyclic GFR-binding peptide
  MOD_RES (2)..(4)..(36): Xaa is C or S

SEQ ID NO: 44135 - protein, 33 aa, Artificial Sequence; identical to SEQ ID NO: 41157
  Cyclic GFR-binding peptide
  MOD_RES (2)..(4): Xaa is C or S

SEQ ID NO: 44136 - protein, 24 aa, Artificial Sequence
  Cyclic GFR-binding peptide
PIKGYVVNNASDFYLINIPSLRTP

SEQ ID NO: 44137 - protein, 22 aa, Artificial Sequence
  Cyclic GFR-binding peptide
MGPIKGYYTVVGKDFYLINIPS

SEQ ID NO: 44138 - protein, 23 aa, Artificial Sequence
  Cyclic GFR-binding peptide
MGEPIKGYTPVGMDDFYLVNIPS

SEQ ID NO: 44139 - protein, 30 aa, Artificial Sequence; identical to SEQ ID NO: 41161
  Cyclic GFR-binding peptide
  MOD_RES (28)..(29): Xaa is C or S

SEQ ID NO: 44140 - protein, 33 aa, Artificial Sequence; identical to SEQ ID NO: 41162
  Cyclic GFR-binding peptide
  MOD_RES (32)..(33): Xaa is C or S

SEQ ID NO: 44141 - protein, 24 aa, Artificial Sequence
  Cyclic GFR-binding peptide
DPIKGYVVKENEDFYLMNIPSLET

SEQ ID NO: 44142 - protein, 36 aa, Artificial Sequence; identical to SEQ ID NO: 41164
  Cyclic GFR-binding peptide
  MOD_RES (2)..(4)..(36): Xaa is C or S

SEQ ID NO: 44143 - protein, 27 aa, Artificial Sequence
  Cyclic GFR-binding peptide
EVIMPIKGYLLVRGNDFYLMNIPSTKV

SEQ ID NO: 44144 - protein, 32 aa, Artificial Sequence; identical to SEQ ID NO: 41166
  Cyclic GFR-binding peptide
  MOD_RES (1)..(1): Xaa is C or S

SEQ ID NO: 44145 - protein, 29 aa, Artificial Sequence
  Cyclic GFR-binding peptide
GEVVMEPIKGYVVKDYEDFYLMNIPSLET

SEQ ID NO: 44146 - protein, 32 aa, Artificial Sequence; identical to SEQ ID NO: 41168
  Cyclic GFR-binding peptide
  MOD_RES (30)..(31): Xaa is C or S

SEQ ID NO: 44147 - protein, 36 aa, Artificial Sequence; identical to SEQ ID NO: 41169
  Cyclic GFR-binding peptide
  MOD_RES (2)..(4)..(36): Xaa is C or S

SEQ ID NO: 44148 - protein, 31 aa, Artificial Sequence; identical to SEQ ID NO: 41170
  Cyclic GFR-binding peptide
  MOD_RES (31)..(31): Xaa is C or S

SEQ ID NO: 44149 - protein, 33 aa, Artificial Sequence; identical to SEQ ID NO: 41171
  Cyclic GFR-binding peptide
  MOD_RES (29)..(30): Xaa is C or S

SEQ ID NO: 44150 - protein, 34 aa, Artificial Sequence; identical to SEQ ID NO: 41172
  Cyclic GFR-binding peptide
  MOD_RES (32)..(33): Xaa is C or S

SEQ ID NO: 44151 - protein, 24 aa, Artificial Sequence
  Cyclic GFR-binding peptide
GPIKGYYTVVGKDFYLINIPSLKT

SEQ ID NO: 44152 - protein, 33 aa, Artificial Sequence; identical to SEQ ID NO: 41174
  Cyclic GFR-binding peptide
  MOD_RES (2)..(4): Xaa is C or S

SEQ ID NO: 44153 - protein, 34 aa, Artificial Sequence; identical to SEQ ID NO: 41175
  Cyclic GFR-binding peptide
  MOD_RES (1)..(3): Xaa is C or S

SEQ ID NO: 44154 - protein, 34 aa, Artificial Sequence; identical to SEQ ID NO: 41176
  Cyclic GFR-binding peptide
  MOD_RES (32)..(33): Xaa is C or S

SEQ ID NO: 44155 - protein, 40 aa, Artificial Sequence; identical to SEQ ID NO: 41177
  Cyclic GFR-binding peptide
  MOD_RES (2)..(34)..(35): Xaa is C or S

SEQ ID NO: 44156 - protein, 40 aa, Artificial Sequence; identical to SEQ ID NO: 41178
  Cyclic GFR-binding peptide
  MOD_RES (2)..(34)..(35): Xaa is C or S

SEQ ID NO: 44157 - protein, 38 aa, Artificial Sequence; identical to SEQ ID NO: 41179
  Cyclic GFR-binding peptide
  MOD_RES (32)..(33): Xaa is C or S

SEQ ID NO: 44158 - protein, 23 aa, Artificial Sequence
  Cyclic GFR-binding peptide
VMDPIKGYVVNNASDFYLINIPS

SEQ ID NO: 44159 - protein, 29 aa, Artificial Sequence
  Cyclic GFR-binding peptide
EVVMDPIKGYVVKENEDFYLMNIPSLETP

SEQ ID NO: 44160 - protein, 29 aa, Artificial Sequence
  Cyclic GFR-binding peptide
  MOD_RES (26)..(27): Xaa is C or S
PIKGYVVKENEDFYLMNIPSLETPVXXAK

SEQ ID NO: 44161 - protein, 34 aa, Artificial Sequence; identical to SEQ ID NO: 41183
  Cyclic GFR-binding peptide
  MOD_RES (1)..(33): Xaa is C or S

SEQ ID NO: 44162 - protein, 28 aa, Artificial Sequence
  Cyclic GFR-binding peptide
  MOD_RES (26)..(27): Xaa is C or S
PIKGYVVKDYEDFYLMNIPSLETPVXXA

SEQ ID NO: 44163 - protein, 24 aa, Artificial Sequence
  Cyclic GFR-binding peptide
MGPIKGYYTVVGKDFYLINIPSLK

SEQ ID NO: 44164 - protein, 36 aa, Artificial Sequence; identical to SEQ ID NO: 41186
  Cyclic GFR-binding peptide
  MOD_RES (1)..(3)..(35)..(36): Xaa is C or S

SEQ ID NO: 44165 - protein, 40 aa, Artificial Sequence; identical to SEQ ID NO: 41187
  Cyclic GFR-binding peptide
  MOD_RES (1)..(3)..(35)..(36): Xaa is C or S

SEQ ID NO: 44166 - protein, 30 aa, Artificial Sequence; identical to SEQ ID NO: 41188
  Cyclic GFR-binding peptide
  MOD_RES (1)..(1): Xaa is C or S

SEQ ID NO: 44167 - protein, 28 aa, Artificial Sequence
  Cyclic GFR-binding peptide
  MOD_RES (27)..(28): Xaa is C or S
MPIKGYLLVRGNDFYLMNIPSTKVPAXX

SEQ ID NO: 44168 - protein, 30 aa, Artificial Sequence; identical to SEQ ID NO: 32604
  Cyclic GFR-binding peptide

SEQ ID NO: 44169 - protein, 35 aa, Artificial Sequence; identical to SEQ ID NO: 41191
  Cyclic GFR-binding peptide
  MOD_RES (2)..(34)..(35): Xaa is C or S

SEQ ID NO: 44170 - protein, 29 aa, Artificial Sequence
  Cyclic GFR-binding peptide
  MOD_RES (28)..(29): Xaa is C or S
GEPIKGYTPVGMDDFYLVNIPSLKTPVXX

SEQ ID NO: 44171 - protein, 30 aa, Artificial Sequence; identical to SEQ ID NO: 41193
  Cyclic GFR-binding peptide
  MOD_RES (1)..(3): Xaa is C or S

SEQ ID NO: 44172 - protein, 26 aa, Artificial Sequence
  Cyclic GFR-binding peptide
NPIKGYIVNSSDDFYLVNIPSLKTPA

SEQ ID NO: 44173 - protein, 27 aa, Artificial Sequence
  Cyclic GFR-binding peptide
VMNPIKGYIVNSSDDFYLVNIPSLQTP

SEQ ID NO: 44174 - protein, 34 aa, Artificial Sequence; identical to SEQ ID NO: 41196
  Cyclic GFR-binding peptide
  MOD_RES (1)..(3): Xaa is C or S

SEQ ID NO: 44175 - protein, 33 aa, Artificial Sequence; identical to SEQ ID NO: 41197
  Cyclic GFR-binding peptide
  MOD_RES (2)..(2): Xaa is C or S

SEQ ID NO: 44176 - protein, 32 aa, Artificial Sequence; identical to SEQ ID NO: 41198
  Cyclic GFR-binding peptide
  MOD_RES (26)..(27): Xaa is C or S

SEQ ID NO: 44177 - protein, 34 aa, Artificial Sequence; identical to SEQ ID NO: 41199
  Cyclic GFR-binding peptide
  MOD_RES (2)..(4): Xaa is C or S

SEQ ID NO: 44178 - protein, 32 aa, Artificial Sequence; identical to SEQ ID NO: 41200
  Cyclic GFR-binding peptide
  MOD_RES (27)..(28): Xaa is C or S

SEQ ID NO: 44179 - protein, 27 aa, Artificial Sequence
  Cyclic GFR-binding peptide
  MOD_RES (1)..(1): Xaa is C or S
XAKVVMNPIKGYIVNNSSDFYLVNIPS

SEQ ID NO: 44180 - protein, 34 aa, Artificial Sequence; identical to SEQ ID NO: 41202
  Cyclic GFR-binding peptide
  MOD_RES (31)..(32): Xaa is C or S

SEQ ID NO: 44181 - protein, 23 aa, Artificial Sequence
  Cyclic GFR-binding peptide
DPIKGYVVKENEDFYLMNIPSLE

SEQ ID NO: 44182 - protein, 29 aa, Artificial Sequence
  Cyclic GFR-binding peptide
  MOD_RES (27)..(28): Xaa is C or S
MPIKGYLLVRGNDFYLMNIPSTKVPAXXT

SEQ ID NO: 44183 - protein, 32 aa, Artificial Sequence; identical to SEQ ID NO: 41205
  Cyclic GFR-binding peptide
  MOD_RES (2)..(4): Xaa is C or S

SEQ ID NO: 44184 - protein, 30 aa, Artificial Sequence; identical to SEQ ID NO: 41206
  Cyclic GFR-binding peptide
  MOD_RES (26)..(27): Xaa is C or S

SEQ ID NO: 44185 - protein, 30 aa, Artificial Sequence; identical to SEQ ID NO: 41207
  Cyclic GFR-binding peptide
  MOD_RES (28)..(29): Xaa is C or S

SEQ ID NO: 44186 - protein, 32 aa, Artificial Sequence; identical to SEQ ID NO: 41208
  Cyclic GFR-binding peptide
  MOD_RES (2)..(4): Xaa is C or S

SEQ ID NO: 44187 - protein, 37 aa, Artificial Sequence; identical to SEQ ID NO: 41209
  Cyclic GFR-binding peptide
  MOD_RES (2)..(4)..(36)..(37): Xaa is C or S

SEQ ID NO: 44188 - protein, 41 aa, Artificial Sequence; identical to SEQ ID NO: 41210
  Cyclic GFR-binding peptide
  MOD_RES (1)..(3)..(35)..(36): Xaa is C or S

SEQ ID NO: 44189 - protein, 32 aa, Artificial Sequence; identical to SEQ ID NO: 41211
  Cyclic GFR-binding peptide
  MOD_RES (30)..(30): Xaa is C or S

SEQ ID NO: 44190 - protein, 41 aa, Artificial Sequence; identical to SEQ ID NO: 41212
  Cyclic GFR-binding peptide
  MOD_RES (1)..(3)..(35)..(36): Xaa is C or S

SEQ ID NO: 44191 - protein, 32 aa, Artificial Sequence; identical to SEQ ID NO: 41213
  Cyclic GFR-binding peptide
  MOD_RES (2)..(2): Xaa is C or S

SEQ ID NO: 44192 - protein, 38 aa, Artificial Sequence; identical to SEQ ID NO: 41214
  Cyclic GFR-binding peptide
  MOD_RES (2)..(34)..(35): Xaa is C or S

SEQ ID NO: 44193 - protein, 26 aa, Artificial Sequence
  Cyclic GFR-binding peptide
VMNPIKGYIVNNSSDFYLVNIPSLKT

SEQ ID NO: 44194 - protein, 29 aa, Artificial Sequence
  Cyclic GFR-binding peptide
  MOD_RES (1)..(3): Xaa is C or S
XGXSRVVMNPIKGYIVNSSDDFYLVNIPS

SEQ ID NO: 44195 - protein, 36 aa, Artificial Sequence; identical to SEQ ID NO: 41217
  Cyclic GFR-binding peptide
  MOD_RES (30)..(31): Xaa is C or S

SEQ ID NO: 44196 - protein, 28 aa, Artificial Sequence
  Cyclic GFR-binding peptide
  MOD_RES (27)..(28): Xaa is C or S
EPIKGYVVKDYEDFYLMNIPSLETPVXX

SEQ ID NO: 44197 - protein, 40 aa, Artificial Sequence; identical to SEQ ID NO: 41219
  Cyclic GFR-binding peptide
  MOD_RES (2)..(4)..(35)..(36): Xaa is C or S

SEQ ID NO: 44198 - protein, 28 aa, Artificial Sequence
  Cyclic GFR-binding peptide
VVMEPIKGYVVKDYEDFYLMNIPSLETP

SEQ ID NO: 44199 - protein, 31 aa, Artificial Sequence; identical to SEQ ID NO: 41221
  Cyclic GFR-binding peptide
  MOD_RES (2)..(4): Xaa is C or S

SEQ ID NO: 44200 - protein, 35 aa, Artificial Sequence; identical to SEQ ID NO: 41222
  Cyclic GFR-binding peptide
  MOD_RES (2)..(34)..(35): Xaa is C or S

SEQ ID NO: 44201 - protein, 31 aa, Artificial Sequence; identical to SEQ ID NO: 41223
  Cyclic GFR-binding peptide

SEQ ID NO: 44202 - protein, 35 aa, Artificial Sequence; identical to SEQ ID NO: 41224
  Cyclic GFR-binding peptide
  MOD_RES (31)..(32): Xaa is C or S

SEQ ID NO: 44203 - protein, 37 aa, Artificial Sequence; identical to SEQ ID NO: 41225
  Cyclic GFR-binding peptide
  MOD_RES (2)..(4)..(36)..(37): Xaa is C or S

SEQ ID NO: 44204 - protein, 36 aa, Artificial Sequence; identical to SEQ ID NO: 41226
  Cyclic GFR-binding peptide
  MOD_RES (1)..(3)..(35)..(36): Xaa is C or S

SEQ ID NO: 44205 - protein, 33 aa, Artificial Sequence; identical to SEQ ID NO: 41227
  Cyclic GFR-binding peptide
  MOD_RES (31)..(32): Xaa is C or S

SEQ ID NO: 44206 - protein, 33 aa, Artificial Sequence; identical to SEQ ID NO: 41228
  Cyclic GFR-binding peptide
  MOD_RES (2)..(4): Xaa is C or S

SEQ ID NO: 44207 - protein, 34 aa, Artificial Sequence; identical to SEQ ID NO: 41229
  Cyclic GFR-binding peptide
  MOD_RES (30)..(31): Xaa is C or S

SEQ ID NO: 44208 - protein, 20 aa, Artificial Sequence
  Cyclic GFR-binding peptide
PIKGYYTVVGKDFYLINIPS

SEQ ID NO: 44209 - protein, 33 aa, Artificial Sequence; identical to SEQ ID NO: 41231
  Cyclic GFR-binding peptide
  MOD_RES (27)..(28): Xaa is C or S

SEQ ID NO: 44210 - protein, 36 aa, Artificial Sequence; identical to SEQ ID NO: 41232
  Cyclic GFR-binding peptide
  MOD_RES (1)..(3)..(36): Xaa is C or S

SEQ ID NO: 44211 - protein, 31 aa, Artificial Sequence; identical to SEQ ID NO: 41233
  Cyclic GFR-binding peptide
  MOD_RES (31)..(31): Xaa is C or S

SEQ ID NO: 44212 - protein, 30 aa, Artificial Sequence; identical to SEQ ID NO: 41234
  Cyclic GFR-binding peptide

SEQ ID NO: 44213 - protein, 32 aa, Artificial Sequence; identical to SEQ ID NO: 41235
  Cyclic GFR-binding peptide
  MOD_RES (26)..(27): Xaa is C or S

SEQ ID NO: 44214 - protein, 35 aa, Artificial Sequence; identical to SEQ ID NO: 41236
  Cyclic GFR-binding peptide
  MOD_RES (29)..(30): Xaa is C or S

SEQ ID NO: 44215 - protein, 33 aa, Artificial Sequence; identical to SEQ ID NO: 41237
  Cyclic GFR-binding peptide
  MOD_RES (31)..(32): Xaa is C or S

SEQ ID NO: 44216 - protein, 36 aa, Artificial Sequence; identical to SEQ ID NO: 41238
  Cyclic GFR-binding peptide
  MOD_RES (30)..(31): Xaa is C or S

SEQ ID NO: 44217 - protein, 36 aa, Artificial Sequence; identical to SEQ ID NO: 41239
  Cyclic GFR-binding peptide
  MOD_RES (2)..(4)..(36): Xaa is C or S

SEQ ID NO: 44218 - protein, 32 aa, Artificial Sequence; identical to SEQ ID NO: 41240
  Cyclic GFR-binding peptide
  MOD_RES (30)..(31): Xaa is C or S

SEQ ID NO: 44219 - protein, 29 aa, Artificial Sequence
  Cyclic GFR-binding peptide
  MOD_RES (26)..(27): Xaa is C or S
PIKGYIVNSSDDFYLVNIPSLKTPAXXPK

SEQ ID NO: 44220 - protein, 28 aa, Artificial Sequence
  Cyclic GFR-binding peptide
  MOD_RES (2)..(2): Xaa is C or S
GXEEVIMPIKGYLLVRGNDFYLMNIPST

SEQ ID NO: 44221 - protein, 27 aa, Artificial Sequence
  Cyclic GFR-binding peptide
GEPIKGYTPVGMDDFYLVNIPSLKTPV

SEQ ID NO: 44222 - protein, 30 aa, Artificial Sequence; identical to SEQ ID NO: 41244
  Cyclic GFR-binding peptide
  MOD_RES (27)..(28): Xaa is C or S

SEQ ID NO: 44223 - protein, 28 aa, Artificial Sequence
  Cyclic GFR-binding peptide
AEVVMDPIKGYVVNNAADFYLINIPSLR

SEQ ID NO: 44224 - protein, 33 aa, Artificial Sequence; identical to SEQ ID NO: 41246
  Cyclic GFR-binding peptide
  MOD_RES (28)..(29): Xaa is C or S

SEQ ID NO: 44225 - protein, 36 aa, Artificial Sequence; identical to SEQ ID NO: 41247
  Cyclic GFR-binding peptide
  MOD_RES (30)..(30): Xaa is C or S

SEQ ID NO: 44226 - protein, 29 aa, Artificial Sequence
  Cyclic GFR-binding peptide
AEVVMDPIKGYVVNNAADFYLINIPSLRA

SEQ ID NO: 44227 - protein, 30 aa, Artificial Sequence; identical to SEQ ID NO: 41249
  Cyclic GFR-binding peptide

SEQ ID NO: 44228 - protein, 26 aa, Artificial Sequence
  Cyclic GFR-binding peptide
  MOD_RES (26)..(26): Xaa is C or S
PIKGYTPVGMDDFYLVNIPSLKTPVX

SEQ ID NO: 44229 - protein, 28 aa, Artificial Sequence
  Cyclic GFR-binding peptide
EAVSMGEPIKGYTPVGMDDFYLVNIPSL

SEQ ID NO: 44230 - protein, 36 aa, Artificial Sequence; identical to SEQ ID NO: 41252
  Cyclic GFR-binding peptide
  MOD_RES (1)..(33)..(34): Xaa is C or S

SEQ ID NO: 44231 - protein, 24 aa, Artificial Sequence
  Cyclic GFR-binding peptide
VAMGPIKGYYTVVGKDFYLINIPS

SEQ ID NO: 44232 - protein, 35 aa, Artificial Sequence; identical to SEQ ID NO: 41254
  Cyclic GFR-binding peptide
  MOD_RES (31)..(31): Xaa is C or S

SEQ ID NO: 44233 - protein, 31 aa, Artificial Sequence; identical to SEQ ID NO: 41255
  Cyclic GFR-binding peptide
  MOD_RES (26)..(26): Xaa is C or S

SEQ ID NO: 44234 - protein, 25 aa, Artificial Sequence
  Cyclic GFR-binding peptide
MDPIKGYVVNNAADFYLINIPSLRA

SEQ ID NO: 44235 - protein, 25 aa, Artificial Sequence
  Cyclic GFR-binding peptide
VSMGEPIKGYTPVGMDDFYLVNIPS

SEQ ID NO: 44236 - protein, 28 aa, Artificial Sequence
  Cyclic GFR-binding peptide
VMEPIKGYVVKDYEDFYLMNIPSLETPV

SEQ ID NO: 44237 - protein, 22 aa, Artificial Sequence
  Cyclic GFR-binding peptide
PIKGYIVNSSDDFYLVNIPSLQ

SEQ ID NO: 44238 - protein, 31 aa, Artificial Sequence; identical to SEQ ID NO: 41260
  Cyclic GFR-binding peptide
  MOD_RES (30)..(31): Xaa is C or S

SEQ ID NO: 44239 - protein, 21 aa, Artificial Sequence
  Cyclic GFR-binding peptide
PIKGYVVNNAADFYLINIPSL

SEQ ID NO: 44240 - protein, 29 aa, Artificial Sequence
  Cyclic GFR-binding peptide
EAVSMGEPIKGYTPVGMDDFYLVNIPSLK

SEQ ID NO: 44241 - protein, 30 aa, Artificial Sequence; identical to SEQ ID NO: 41263
  Cyclic GFR-binding peptide
  MOD_RES (30)..(30): Xaa is C or S

SEQ ID NO: 44242 - protein, 35 aa, Artificial Sequence; identical to SEQ ID NO: 41264
  Cyclic GFR-binding peptide
  MOD_RES (1)..(33)..(34): Xaa is C or S

SEQ ID NO: 44243 - protein, 33 aa, Artificial Sequence; identical to SEQ ID NO: 41265
  Cyclic GFR-binding peptide
  MOD_RES (27)..(28): Xaa is C or S

SEQ ID NO: 44244 - protein, 28 aa, Artificial Sequence
  Cyclic GFR-binding peptide
MGEPIKGYTPVGMDDFYLVNIPSLKTPV

SEQ ID NO: 44245 - protein, 26 aa, Artificial Sequence
  Cyclic GFR-binding peptide
  MOD_RES (26)..(26): Xaa is C or S
PIKGYIVNSSDDFYLVNIPSLKTPAX

SEQ ID NO: 44246 - protein, 27 aa, Artificial Sequence
  Cyclic GFR-binding peptide
RVVMNPIKGYIVNSSDDFYLVNIPSLK

SEQ ID NO: 44247 - protein, 27 aa, Artificial Sequence
  Cyclic GFR-binding peptide
  MOD_RES (1)..(1): Xaa is C or S
XGEVVMEPIKGYVVKDYEDFYLMNIPS

SEQ ID NO: 44248 - protein, 28 aa, Artificial Sequence
  Cyclic GFR-binding peptide
VVMNPIKGYIVNSSDDFYLVNIPSLKTP

SEQ ID NO: 44249 - protein, 25 aa, Artificial Sequence
  Cyclic GFR-binding peptide
MPIKGYLLVRGNDFYLMNIPSTKVP

SEQ ID NO: 44250 - protein, 28 aa, Artificial Sequence
  Cyclic GFR-binding peptide
  MOD_RES (2)..(2): Xaa is C or S
GXAKVVMNPIKGYIVNNSSDFYLVNIPS

SEQ ID NO: 44251 - protein, 24 aa, Artificial Sequence
  Cyclic GFR-binding peptide
VMNPIKGYIVNSSDDFYLVNIPSL

SEQ ID NO: 44252 - protein, 31 aa, Artificial Sequence; identical to SEQ ID NO: 41274
  Cyclic GFR-binding peptide
  MOD_RES (1)..(3): Xaa is C or S

SEQ ID NO: 44253 - protein, 40 aa, Artificial Sequence; identical to SEQ ID NO: 41275
  Cyclic GFR-binding peptide
  MOD_RES (1)..(3)..(35)..(36): Xaa is C or S

SEQ ID NO: 44254 - protein, 33 aa, Artificial Sequence; identical to SEQ ID NO: 41276
  Cyclic GFR-binding peptide
  MOD_RES (1)..(33): Xaa is C or S

SEQ ID NO: 44255 - protein, 37 aa, Artificial Sequence; identical to SEQ ID NO: 41277
  Cyclic GFR-binding peptide
  MOD_RES (1)..(3)..(35)..(36): Xaa is C or S

SEQ ID NO: 44256 - protein, 28 aa, Artificial Sequence
  Cyclic GFR-binding peptide
AMGPIKGYYTVVGKDFYLINIPSLKTPV

SEQ ID NO: 44257 - protein, 38 aa, Artificial Sequence; identical to SEQ ID NO: 41279
  Cyclic GFR-binding peptide
  MOD_RES (32)..(33): Xaa is C or S

SEQ ID NO: 44258 - protein, 22 aa, Artificial Sequence
  Cyclic GFR-binding peptide
DPIKGYVVKENEDFYLMNIPSL

SEQ ID NO: 44259 - protein, 36 aa, Artificial Sequence; identical to SEQ ID NO: 41281
  Cyclic GFR-binding peptide
  MOD_RES (2)..(4)..(36): Xaa is C or S

SEQ ID NO: 44260 - protein, 28 aa, Artificial Sequence
  Cyclic GFR-binding peptide
  MOD_RES (27)..(27): Xaa is C or S
NPIKGYIVNSSDDFYLVNIPSLKTPAXT

SEQ ID NO: 44261 - protein, 31 aa, Artificial Sequence; identical to SEQ ID NO: 41283
  Cyclic GFR-binding peptide
  MOD_RES (2)..(4): Xaa is C or S

SEQ ID NO: 44262 - protein, 28 aa, Artificial Sequence
  Cyclic GFR-binding peptide
SEVVMDPIKGYVVNNASDFYLINIPSLR

SEQ ID NO: 44263 - protein, 38 aa, Artificial Sequence; identical to SEQ ID NO: 41285
  Cyclic GFR-binding peptide
  MOD_RES (2)..(4)..(36)..(37): Xaa is C or S

SEQ ID NO: 44264 - protein, 29 aa, Artificial Sequence
  Cyclic GFR-binding peptide
  MOD_RES (1)..(1): Xaa is C or S
XAKVVMNPIKGYIVNNSSDFYLVNIPSLK

SEQ ID NO: 44265 - protein, 22 aa, Artificial Sequence
  Cyclic GFR-binding peptide
PIKGYTPVGMDDFYLVNIPSLK

SEQ ID NO: 44266 - protein, 28 aa, Artificial Sequence
  Cyclic GFR-binding peptide
  MOD_RES (1)..(1): Xaa is C or S
XAEVVMDPIKGYVVNNAADFYLINIPSL

SEQ ID NO: 44267 - protein, 30 aa, Artificial Sequence; identical to SEQ ID NO: 41289
  Cyclic GFR-binding peptide
  MOD_RES (27)..(28): Xaa is C or S

SEQ ID NO: 44268 - protein, 24 aa, Artificial Sequence
  Cyclic GFR-binding peptide
NPIKGYIVNNSSDFYLVNIPSLKT

SEQ ID NO: 44269 - protein, 24 aa, Artificial Sequence
  Cyclic GFR-binding peptide
DPIKGYVVNNAADFYLINIPSLRA

SEQ ID NO: 44270 - protein, 33 aa, Artificial Sequence; identical to SEQ ID NO: 41292
  Cyclic GFR-binding peptide
  MOD_RES (32)..(33): Xaa is C or S

SEQ ID NO: 44271 - protein, 28 aa, Artificial Sequence
  Cyclic GFR-binding peptide
  MOD_RES (2)..(2): Xaa is C or S
GXAEVVMDPIKGYVVNNAADFYLINIPS

SEQ ID NO: 44272 - protein, 23 aa, Artificial Sequence
  Cyclic GFR-binding peptide
GEPIKGYTPVGMDDFYLVNIPSL

SEQ ID NO: 44273 - protein, 28 aa, Artificial Sequence
  Cyclic GFR-binding peptide
ESVAMGPIKGYYTVVGKDFYLINIPSLK

SEQ ID NO: 44274 - protein, 37 aa, Artificial Sequence; identical to SEQ ID NO: 41296
  Cyclic GFR-binding peptide
  MOD_RES (1)..(3)..(35)..(36): Xaa is C or S

SEQ ID NO: 44275 - protein, 35 aa, Artificial Sequence; identical to SEQ ID NO: 41297
  Cyclic GFR-binding peptide
  MOD_RES (32)..(33): Xaa is C or S

SEQ ID NO: 44276 - protein, 33 aa, Artificial Sequence; identical to SEQ ID NO: 41298
  Cyclic GFR-binding peptide
  MOD_RES (2)..(4): Xaa is C or S

SEQ ID NO: 44277 - protein, 27 aa, Artificial Sequence
  Cyclic GFR-binding peptide
SRVVMNPIKGYIVNSSDDFYLVNIPSL

SEQ ID NO: 44278 - protein, 34 aa, Artificial Sequence; identical to SEQ ID NO: 41300
  Cyclic GFR-binding peptide
  MOD_RES (1)..(3): Xaa is C or S

SEQ ID NO: 44279 - protein, 31 aa, Artificial Sequence; identical to SEQ ID NO: 41301
  Cyclic GFR-binding peptide
  MOD_RES (29)..(30): Xaa is C or S

SEQ ID NO: 44280 - protein, 30 aa, Artificial Sequence; identical to SEQ ID NO: 41302
  Cyclic GFR-binding peptide
  MOD_RES (26)..(27): Xaa is C or S

SEQ ID NO: 44281 - protein, 35 aa, Artificial Sequence; identical to SEQ ID NO: 41303
  Cyclic GFR-binding peptide
  MOD_RES (31)..(32): Xaa is C or S

SEQ ID NO: 44282 - protein, 34 aa, Artificial Sequence; identical to SEQ ID NO: 41304
  Cyclic GFR-binding peptide
  MOD_RES (1)..(3): Xaa is C or S

SEQ ID NO: 44283 - protein, 32 aa, Artificial Sequence; identical to SEQ ID NO: 41305
  Cyclic GFR-binding peptide
  MOD_RES (32)..(32): Xaa is C or S

SEQ ID NO: 44284 - protein, 27 aa, Artificial Sequence
  Cyclic GFR-binding peptide
ARVVMNPIKGYIVNSSDDFYLVNIPSL

SEQ ID NO: 44285 - protein, 31 aa, Artificial Sequence; identical to SEQ ID NO: 41307
  Cyclic GFR-binding peptide
  MOD_RES (31)..(31): Xaa is C or S

SEQ ID NO: 44286 - protein, 31 aa, Artificial Sequence; identical to SEQ ID NO: 41308
  Cyclic GFR-binding peptide
  MOD_RES (1)..(3): Xaa is C or S

SEQ ID NO: 44287 - protein, 25 aa, Artificial Sequence
  Cyclic GFR-binding peptide
NPIKGYIVNSSDDFYLVNIPSLQTP

SEQ ID NO: 44288 - protein, 21 aa, Artificial Sequence
  Cyclic GFR-binding peptide
DPIKGYVVKENEDFYLMNIPS

SEQ ID NO: 44289 - protein, 36 aa, Artificial Sequence; identical to SEQ ID NO: 41311
  Cyclic GFR-binding peptide
  MOD_RES (32)..(33): Xaa is C or S

SEQ ID NO: 44290 - protein, 32 aa, Artificial Sequence; identical to SEQ ID NO: 41312
  Cyclic GFR-binding peptide
  MOD_RES (26)..(27): Xaa is C or S

SEQ ID NO: 44291 - protein, 29 aa, Artificial Sequence
  Cyclic GFR-binding peptide
  MOD_RES (28)..(29): Xaa is C or S
IMPIKGYLLVRGNDFYLMNIPSTKVPAXX

SEQ ID NO: 44292 - protein, 37 aa, Artificial Sequence; identical to SEQ ID NO: 41314
  Cyclic GFR-binding peptide
  MOD_RES (32)..(33): Xaa is C or S

SEQ ID NO: 44293 - protein, 29 aa, Artificial Sequence
  Cyclic GFR-binding peptide
  MOD_RES (26)..(27): Xaa is C or S
PIKGYIVNSSDDFYLVNIPSLQTPAXXPK

SEQ ID NO: 44294 - protein, 30 aa, Artificial Sequence; identical to SEQ ID NO: 41316
  Cyclic GFR-binding peptide
  MOD_RES (2)..(2): Xaa is C or S

SEQ ID NO: 44295 - protein, 36 aa, Artificial Sequence; identical to SEQ ID NO: 41317
  Cyclic GFR-binding peptide
  MOD_RES (31)..(32): Xaa is C or S

SEQ ID NO: 44296 - protein, 25 aa, Artificial Sequence
  Cyclic GFR-binding peptide
MGEPIKGYTPVGMDDFYLVNIPSLK

SEQ ID NO: 44297 - protein, 28 aa, Artificial Sequence
  Cyclic GFR-binding peptide
EVVMDPIKGYVVKENEDFYLMNIPSLET

SEQ ID NO: 44298 - protein, 25 aa, Artificial Sequence
  Cyclic GFR-binding peptide
GPIKGYYTVVGKDFYLINIPSLKTP

SEQ ID NO: 44299 - protein, 25 aa, Artificial Sequence
  Cyclic GFR-binding peptide
VMDPIKGYVVNNAADFYLINIPSLR

SEQ ID NO: 44300 - protein, 34 aa, Artificial Sequence; identical to SEQ ID NO: 41322
  Cyclic GFR-binding peptide
  MOD_RES (32)..(33): Xaa is C or S

SEQ ID NO: 44301 - protein, 23 aa, Artificial Sequence
  Cyclic GFR-binding peptide
MGPIKGYYTVVGKDFYLINIPSL

SEQ ID NO: 44302 - protein, 29 aa, Artificial Sequence
  Cyclic GFR-binding peptide
  MOD_RES (1)..(1): Xaa is C or S
XGEVVMDPIKGYVVKENEDFYLMNIPSLE

SEQ ID NO: 44303 - protein, 32 aa, Artificial Sequence; identical to SEQ ID NO: 41325
  Cyclic GFR-binding peptide
  MOD_RES (1)..(1): Xaa is C or S

SEQ ID NO: 44304 - protein, 31 aa, Artificial Sequence; identical to SEQ ID NO: 41326
  Cyclic GFR-binding peptide
  MOD_RES (28)..(29): Xaa is C or S

SEQ ID NO: 44305 - protein, 34 aa, Artificial Sequence; identical to SEQ ID NO: 41327
  Cyclic GFR-binding peptide
  MOD_RES (28)..(29): Xaa is C or S

SEQ ID NO: 44306 - protein, 23 aa, Artificial Sequence
  Cyclic GFR-binding peptide
VMNPIKGYIVNNSSDFYLVNIPS

SEQ ID NO: 44307 - protein, 23 aa, Artificial Sequence
  Cyclic GFR-binding peptide
VMNPIKGYIVNSSDDFYLVNIPS

SEQ ID NO: 44308 - protein, 40 aa, Artificial Sequence; identical to SEQ ID NO: 41330
  Cyclic GFR-binding peptide
  MOD_RES (2)..(4)..(36)..(37): Xaa is C or S

SEQ ID NO: 44309 - protein, 29 aa, Artificial Sequence
  Cyclic GFR-binding peptide
  MOD_RES (27)..(28): Xaa is C or S
EPIKGYVVKDYEDFYLMNIPSLETPVXXA

SEQ ID NO: 44310 - protein, 32 aa, Artificial Sequence; identical to SEQ ID NO: 41332
  Cyclic GFR-binding peptide
  MOD_RES (26)..(27): Xaa is C or S

SEQ ID NO: 44311 - protein, 33 aa, Artificial Sequence; identical to SEQ ID NO: 41333
  Cyclic GFR-binding peptide
  MOD_RES (2)..(4): Xaa is C or S

SEQ ID NO: 44312 - protein, 27 aa, Artificial Sequence
  Cyclic GFR-binding peptide
AEVVMDPIKGYVVNNAADFYLINIPSL

SEQ ID NO: 44313 - protein, 38 aa, Artificial Sequence; identical to SEQ ID NO: 41335
  Cyclic GFR-binding peptide
  MOD_RES (1)..(33)..(34): Xaa is C or S

SEQ ID NO: 44314 - protein, 36 aa, Artificial Sequence; identical to SEQ ID NO: 41336
  Cyclic GFR-binding peptide
  MOD_RES (31)..(32): Xaa is C or S

SEQ ID NO: 44315 - protein, 20 aa, Artificial Sequence
  Cyclic GFR-binding peptide
PIKGYIVNSSDDFYLVNIPS

SEQ ID NO: 44316 - protein, 30 aa, Artificial Sequence; identical to SEQ ID NO: 41338
  Cyclic GFR-binding peptide
  MOD_RES (26)..(27): Xaa is C or S

SEQ ID NO: 44317 - protein, 36 aa, Artificial Sequence; identical to SEQ ID NO: 41339
  Cyclic GFR-binding peptide
  MOD_RES (1)..(3)..(35)..(36): Xaa is C or S

SEQ ID NO: 44318 - protein, 36 aa, Artificial Sequence; identical to SEQ ID NO: 41340
  Cyclic GFR-binding peptide
  MOD_RES (1)..(3)..(34)..(35): Xaa is C or S

SEQ ID NO: 44319 - protein, 33 aa, Artificial Sequence; identical to SEQ ID NO: 41341
  Cyclic GFR-binding peptide
  MOD_RES (31)..(32): Xaa is C or S

SEQ ID NO: 44320 - protein, 34 aa, Artificial Sequence; identical to SEQ ID NO: 41342
  Cyclic GFR-binding peptide
  MOD_RES (28)..(29): Xaa is C or S

SEQ ID NO: 44321 - protein, 26 aa, Artificial Sequence
  Cyclic GFR-binding peptide
VMDPIKGYVVNNASDFYLINIPSLRT

SEQ ID NO: 44322 - protein, 34 aa, Artificial Sequence; identical to SEQ ID NO: 41344
  Cyclic GFR-binding peptide
  MOD_RES (32)..(33): Xaa is C or S

SEQ ID NO: 44323 - protein, 38 aa, Artificial Sequence; identical to SEQ ID NO: 41345
  Cyclic GFR-binding peptide
  MOD_RES (2)..(34): Xaa is C or S

SEQ ID NO: 44324 - protein, 31 aa, Artificial Sequence; identical to SEQ ID NO: 41346
  Cyclic GFR-binding peptide
  MOD_RES (26)..(27): Xaa is C or S

SEQ ID NO: 44325 - protein, 35 aa, Artificial Sequence; identical to SEQ ID NO: 41347
  Cyclic GFR-binding peptide
  MOD_RES (29)..(30): Xaa is C or S

SEQ ID NO: 44326 - protein, 28 aa, Artificial Sequence
  Cyclic GFR-binding peptide
  MOD_RES (1)..(3): Xaa is C or S
XGXEEVIMPIKGYLLVRGNDFYLMNIPS

SEQ ID NO: 44327 - protein, 30 aa, Artificial Sequence; identical to SEQ ID NO: 41349
  Cyclic GFR-binding peptide

SEQ ID NO: 44328 - protein, 38 aa, Artificial Sequence; identical to SEQ ID NO: 41350
  Cyclic GFR-binding peptide
  MOD_RES (1)..(33): Xaa is C or S

SEQ ID NO: 44329 - protein, 31 aa, Artificial Sequence; identical to SEQ ID NO: 41351
  Cyclic GFR-binding peptide
  MOD_RES (2)..(2): Xaa is C or S

SEQ ID NO: 44330 - protein, 31 aa, Artificial Sequence; identical to SEQ ID NO: 41352
  Cyclic GFR-binding peptide
  MOD_RES (27)..(28): Xaa is C or S

SEQ ID NO: 44331 - protein, 41 aa, Artificial Sequence; identical to SEQ ID NO: 41353
  Cyclic GFR-binding peptide
  MOD_RES (1)..(3)..(35)..(36): Xaa is C or S

SEQ ID NO: 44332 - protein, 31 aa, Artificial Sequence; identical to SEQ ID NO: 41354
  Cyclic GFR-binding peptide
  MOD_RES (2)..(2): Xaa is C or S

SEQ ID NO: 44333 - protein, 29 aa, Artificial Sequence
  Cyclic GFR-binding peptide
  MOD_RES (2)..(2): Xaa is C or S
GXAKVVMNPIKGYIVNNSSDFYLVNIPSL

SEQ ID NO: 44334 - protein, 26 aa, Artificial Sequence
  Cyclic GFR-binding peptide
VSMGEPIKGYTPVGMDDFYLVNIPSL

SEQ ID NO: 44335 - protein, 36 aa, Artificial Sequence; identical to SEQ ID NO: 41357
  Cyclic GFR-binding peptide
  MOD_RES (32)..(32): Xaa is C or S

SEQ ID NO: 44336 - protein, 29 aa, Artificial Sequence
  Cyclic GFR-binding peptide
  MOD_RES (1)..(1): Xaa is C or S
XSEVVMDPIKGYVVNNASDFYLINIPSLR

SEQ ID NO: 44337 - protein, 34 aa, Artificial Sequence; identical to SEQ ID NO: 41359
  Cyclic GFR-binding peptide
  MOD_RES (29)..(30): Xaa is C or S

SEQ ID NO: 44338 - protein, 23 aa, Artificial Sequence
  Cyclic GFR-binding peptide
PIKGYIVNSSDDFYLVNIPSLKT

SEQ ID NO: 44339 - protein, 34 aa, Artificial Sequence; identical to SEQ ID NO: 41361
  Cyclic GFR-binding peptide
  MOD_RES (1)..(33)..(34): Xaa is C or S

SEQ ID NO: 44340 - protein, 29 aa, Artificial Sequence
  Cyclic GFR-binding peptide
  MOD_RES (2)..(2): Xaa is C or S
GXESVAMGPIKGYYTVVGKDFYLINIPSL

SEQ ID NO: 44341 - protein, 40 aa, Artificial Sequence; identical to SEQ ID NO: 41363
  Cyclic GFR-binding peptide
  MOD_RES (1)..(34)..(35): Xaa is C or S

SEQ ID NO: 44342 - protein, 39 aa, Artificial Sequence; identical to SEQ ID NO: 41364
  Cyclic GFR-binding peptide
  MOD_RES (1)..(3)..(35)..(36): Xaa is C or S

SEQ ID NO: 44343 - protein, 34 aa, Artificial Sequence; identical to SEQ ID NO: 41365
  Cyclic GFR-binding peptide
  MOD_RES (2)..(33)..(34): Xaa is C or S

SEQ ID NO: 44344 - protein, 33 aa, Artificial Sequence; identical to SEQ ID NO: 41366
  Cyclic GFR-binding peptide
  MOD_RES (30)..(31): Xaa is C or S

SEQ ID NO: 44345 - protein, 39 aa, Artificial Sequence; identical to SEQ ID NO: 41367
  Cyclic GFR-binding peptide
  MOD_RES (2)..(35)..(36): Xaa is C or S

SEQ ID NO: 44346 - protein, 29 aa, Artificial Sequence
  Cyclic GFR-binding peptide
  MOD_RES (2)..(2): Xaa is C or S
GXSEVVMDPIKGYVVNNASDFYLINIPSL

SEQ ID NO: 44347 - protein, 31 aa, Artificial Sequence; identical to SEQ ID NO: 41369
  Cyclic GFR-binding peptide
  MOD_RES (1)..(1): Xaa is C or S

SEQ ID NO: 44348 - protein, 28 aa, Artificial Sequence
  Cyclic GFR-binding peptide
  MOD_RES (27)..(28): Xaa is C or S
NPIKGYIVNNSSDFYLVNIPSLKTPAXX

SEQ ID NO: 44349 - protein, 35 aa, Artificial Sequence; identical to SEQ ID NO: 41371
  Cyclic GFR-binding peptide
  MOD_RES (32)..(33): Xaa is C or S

SEQ ID NO: 44350 - protein, 24 aa, Artificial Sequence
  Cyclic GFR-binding peptide
MPIKGYLLVRGNDFYLMNIPSTKV

SEQ ID NO: 44351 - protein, 22 aa, Artificial Sequence
  Cyclic GFR-binding peptide
PIKGYVVNNASDFYLINIPSLR

SEQ ID NO: 44352 - protein, 32 aa, Artificial Sequence; identical to SEQ ID NO: 41374
  Cyclic GFR-binding peptide
  MOD_RES (1)..(1): Xaa is C or S

SEQ ID NO: 44353 - protein, 39 aa, Artificial Sequence; identical to SEQ ID NO: 41375
  Cyclic GFR-binding peptide
  MOD_RES (1)..(33)..(34): Xaa is C or S

SEQ ID NO: 44354 - protein, 29 aa, Artificial Sequence
  Cyclic GFR-binding peptide
  MOD_RES (28)..(29): Xaa is C or S
MNPIKGYIVNSSDDFYLVNIPSLKTPAXX

SEQ ID NO: 44355 - protein, 20 aa, Artificial Sequence
  Cyclic GFR-binding peptide
PIKGYTPVGMDDFYLVNIPS

SEQ ID NO: 44356 - protein, 33 aa, Artificial Sequence; identical to SEQ ID NO: 41378
  Cyclic GFR-binding peptide
  MOD_RES (1)..(33): Xaa is C or S

SEQ ID NO: 44357 - protein, 30 aa, Artificial Sequence; identical to SEQ ID NO: 41379
  Cyclic GFR-binding peptide
  MOD_RES (27)..(28): Xaa is C or S

SEQ ID NO: 44358 - protein, 30 aa, Artificial Sequence; identical to SEQ ID NO: 41380
  Cyclic GFR-binding peptide
  MOD_RES (26)..(27): Xaa is C or S

SEQ ID NO: 44359 - protein, 32 aa, Artificial Sequence; identical to SEQ ID NO: 41381
  Cyclic GFR-binding peptide
  MOD_RES (27)..(28): Xaa is C or S

SEQ ID NO: 44360 - protein, 27 aa, Artificial Sequence
  Cyclic GFR-binding peptide
VAMGPIKGYYTVVGKDFYLINIPSLKT

SEQ ID NO: 44361 - protein, 25 aa, Artificial Sequence
  Cyclic GFR-binding peptide
MNPIKGYIVNNSSDFYLVNIPSLKT

SEQ ID NO: 44362 - protein, 31 aa, Artificial Sequence; identical to SEQ ID NO: 41384
  Cyclic GFR-binding peptide
  MOD_RES (26)..(27): Xaa is C or S

SEQ ID NO: 44363 - protein, 33 aa, Artificial Sequence; identical to SEQ ID NO: 41385
  Cyclic GFR-binding peptide
  MOD_RES (29)..(30): Xaa is C or S

SEQ ID NO: 44364 - protein, 31 aa, Artificial Sequence; identical to SEQ ID NO: 41386
  Cyclic GFR-binding peptide
  MOD_RES (26)..(27): Xaa is C or S

SEQ ID NO: 44365 - protein, 33 aa, Artificial Sequence; identical to SEQ ID NO: 41387
  Cyclic GFR-binding peptide
  MOD_RES (28)..(29): Xaa is C or S

SEQ ID NO: 44366 - protein, 37 aa, Artificial Sequence; identical to SEQ ID NO: 41388
  Cyclic GFR-binding peptide
  MOD_RES (2)..(34)..(35): Xaa is C or S

SEQ ID NO: 44367 - protein, 31 aa, Artificial Sequence; identical to SEQ ID NO: 41389
  Cyclic GFR-binding peptide

SEQ ID NO: 44368 - protein, 27 aa, Artificial Sequence
  Cyclic GFR-binding peptide
VMDPIKGYVVNNAADFYLINIPSLRAP

SEQ ID NO: 44369 - protein, 38 aa, Artificial Sequence; identical to SEQ ID NO: 41391
  Cyclic GFR-binding peptide
  MOD_RES (1)..(33)..(34): Xaa is C or S

SEQ ID NO: 44370 - protein, 34 aa, Artificial Sequence; identical to SEQ ID NO: 41392
  Cyclic GFR-binding peptide
  MOD_RES (1)..(3): Xaa is C or S

SEQ ID NO: 44371 - protein, 32 aa, Artificial Sequence; identical to SEQ ID NO: 41393
  Cyclic GFR-binding peptide
  MOD_RES (28)..(29): Xaa is C or S

SEQ ID NO: 44372 - protein, 37 aa, Artificial Sequence; identical to SEQ ID NO: 41394
  Cyclic GFR-binding peptide
  MOD_RES (2)..(4)..(36)..(37): Xaa is C or S

SEQ ID NO: 44373 - protein, 35 aa, Artificial Sequence; identical to SEQ ID NO: 41395
  Cyclic GFR-binding peptide
  MOD_RES (29)..(30): Xaa is C or S

SEQ ID NO: 44374 - protein, 34 aa, Artificial Sequence; identical to SEQ ID NO: 41396
  Cyclic GFR-binding peptide
  MOD_RES (30)..(30): Xaa is C or S

SEQ ID NO: 44375 - protein, 30 aa, Artificial Sequence; identical to SEQ ID NO: 41397
  Cyclic GFR-binding peptide
  MOD_RES (28)..(29): Xaa is C or S

SEQ ID NO: 44376 - protein, 33 aa, Artificial Sequence; identical to SEQ ID NO: 41398
  Cyclic GFR-binding peptide
  MOD_RES (30)..(31): Xaa is C or S

SEQ ID NO: 44377 - protein, 24 aa, Artificial Sequence
  Cyclic GFR-binding peptide
VMEPIKGYVVKDYEDFYLMNIPSL

SEQ ID NO: 44378 - protein, 31 aa, Artificial Sequence; identical to SEQ ID NO: 41400
  Cyclic GFR-binding peptide
  MOD_RES (26)..(27): Xaa is C or S

SEQ ID NO: 44379 - protein, 27 aa, Artificial Sequence
  Cyclic GFR-binding peptide
  MOD_RES (27)..(27): Xaa is C or S
DPIKGYVVNNASDFYLINIPSLRTPVX

SEQ ID NO: 44380 - protein, 41 aa, Artificial Sequence; identical to SEQ ID NO: 41402
  Cyclic GFR-binding peptide
  MOD_RES (1)..(3)..(35)..(36): Xaa is C or S

SEQ ID NO: 44381 - protein, 25 aa, Artificial Sequence
  Cyclic GFR-binding peptide
VVMDPIKGYVVNNAADFYLINIPSL

SEQ ID NO: 44382 - protein, 24 aa, Artificial Sequence
  Cyclic GFR-binding peptide
VMDPIKGYVVNNASDFYLINIPSL

SEQ ID NO: 44383 - protein, 27 aa, Artificial Sequence
  Cyclic GFR-binding peptide
SEVVMDPIKGYVVNNASDFYLINIPSL

SEQ ID NO: 44384 - protein, 27 aa, Artificial Sequence
  Cyclic GFR-binding peptide
MGPIKGYYTVVGKDFYLINIPSLKTPV

SEQ ID NO: 44385 - protein, 29 aa, Artificial Sequence
  Cyclic GFR-binding peptide
  MOD_RES (26)..(27): Xaa is C or S
PIKGYLLVRGNDFYLMNIPSTKVPAXXTS

SEQ ID NO: 44386 - protein, 37 aa, Artificial Sequence; identical to SEQ ID NO: 41408
  Cyclic GFR-binding peptide
  MOD_RES (2)..(33)..(34): Xaa is C or S

SEQ ID NO: 44387 - protein, 36 aa, Artificial Sequence; identical to SEQ ID NO: 41409
  Cyclic GFR-binding peptide
  MOD_RES (1)..(3)..(35)..(36): Xaa is C or S

SEQ ID NO: 44388 - protein, 31 aa, Artificial Sequence; identical to SEQ ID NO: 41410
  Cyclic GFR-binding peptide
  MOD_RES (2)..(2): Xaa is C or S

SEQ ID NO: 44389 - protein, 23 aa, Artificial Sequence
  Cyclic GFR-binding peptide
MDPIKGYVVNNAADFYLINIPSL

SEQ ID NO: 44390 - protein, 37 aa, Artificial Sequence; identical to SEQ ID NO: 41412
  Cyclic GFR-binding peptide
  MOD_RES (1)..(32)..(33): Xaa is C or S

SEQ ID NO: 44391 - protein, 31 aa, Artificial Sequence; identical to SEQ ID NO: 41413
  Cyclic GFR-binding peptide
  MOD_RES (1)..(1): Xaa is C or S

SEQ ID NO: 44392 - protein, 37 aa, Artificial Sequence; identical to SEQ ID NO: 41414
  Cyclic GFR-binding peptide
  MOD_RES (1)..(3)..(35)..(36): Xaa is C or S

SEQ ID NO: 44393 - protein, 26 aa, Artificial Sequence
  Cyclic GFR-binding peptide
DPIKGYVVNNAADFYLINIPSLRAPV

SEQ ID NO: 44394 - protein, 25 aa, Artificial Sequence
  Cyclic GFR-binding peptide
VVMNPIKGYIVNNSSDFYLVNIPSL

SEQ ID NO: 44395 - protein, 30 aa, Artificial Sequence; identical to SEQ ID NO: 41417
  Cyclic GFR-binding peptide
  MOD_RES (26)..(27): Xaa is C or S

SEQ ID NO: 44396 - protein, 30 aa, Artificial Sequence; identical to SEQ ID NO: 41418
  Cyclic GFR-binding peptide
  MOD_RES (30)..(30): Xaa is C or S

SEQ ID NO: 44397 - protein, 25 aa, Artificial Sequence
  Cyclic GFR-binding peptide
EVVMDPIKGYVVKENEDFYLMNIPS

SEQ ID NO: 44398 - protein, 32 aa, Artificial Sequence; identical to SEQ ID NO: 41420
  Cyclic GFR-binding peptide
  MOD_RES (1)..(1): Xaa is C or S

SEQ ID NO: 44399 - protein, 30 aa, Artificial Sequence; identical to SEQ ID NO: 41421
  Cyclic GFR-binding peptide

SEQ ID NO: 44400 - protein, 22 aa, Artificial Sequence
  Cyclic GFR-binding peptide
NPIKGYIVNSSDDFYLVNIPSL

SEQ ID NO: 44401 - protein, 30 aa, Artificial Sequence; identical to SEQ ID NO: 41423
  Cyclic GFR-binding peptide
  MOD_RES (1)..(1): Xaa is C or S

SEQ ID NO: 44402 - protein, 38 aa, Artificial Sequence; identical to SEQ ID NO: 41424
  Cyclic GFR-binding peptide
  MOD_RES (32)..(33): Xaa is C or S

SEQ ID NO: 44403 - protein, 25 aa, Artificial Sequence
  Cyclic GFR-binding peptide
AMGPIKGYYTVVGKDFYLINIPSLK

SEQ ID NO: 44404 - protein, 31 aa, Artificial Sequence; identical to SEQ ID NO: 41426
  Cyclic GFR-binding peptide
  MOD_RES (29)..(30): Xaa is C or S

SEQ ID NO: 44405 - skipped

SEQ ID NO: 44406 - protein, 34 aa, Artificial Sequence; identical to SEQ ID NO: 41428
  Cyclic GFR-binding peptide
  MOD_RES (1)..(33)..(34): Xaa is C or S

SEQ ID NO: 44407 - protein, 42 aa, Artificial Sequence; identical to SEQ ID NO: 41429
  Cyclic GFR-binding peptide
  MOD_RES (2)..(4)..(36)..(37): Xaa is C or S

SEQ ID NO: 44408 - protein, 33 aa, Artificial Sequence; identical to SEQ ID NO: 41430
  Cyclic GFR-binding peptide
  MOD_RES (29)..(29): Xaa is C or S

SEQ ID NO: 44409 - protein, 32 aa, Artificial Sequence; identical to SEQ ID NO: 41431
  Cyclic GFR-binding peptide
  MOD_RES (27)..(27): Xaa is C or S

SEQ ID NO: 44410 - protein, 33 aa, Artificial Sequence; identical to SEQ ID NO: 41432
  Cyclic GFR-binding peptide
  MOD_RES (28)..(29): Xaa is C or S

SEQ ID NO: 44411 - protein, 32 aa, Artificial Sequence; identical to SEQ ID NO: 41433
  Cyclic GFR-binding peptide
  MOD_RES (1)..(32): Xaa is C or S

SEQ ID NO: 44412 - protein, 34 aa, Artificial Sequence; identical to SEQ ID NO: 41434
  Cyclic GFR-binding peptide
  MOD_RES (32)..(32): Xaa is C or S

SEQ ID NO: 44413 - protein, 33 aa, Artificial Sequence; identical to SEQ ID NO: 41435
  Cyclic GFR-binding peptide
  MOD_RES (30)..(31): Xaa is C or S

SEQ ID NO: 44414 - protein, 37 aa, Artificial Sequence; identical to SEQ ID NO: 41436
  Cyclic GFR-binding peptide
  MOD_RES (2)..(34)..(35): Xaa is C or S

SEQ ID NO: 44415 - protein, 29 aa, Artificial Sequence
  Cyclic GFR-binding peptide
KVVMNPIKGYIVNNSSDFYLVNIPSLKTP

SEQ ID NO: 44416 - protein, 37 aa, Artificial Sequence; identical to SEQ ID NO: 41438
  Cyclic GFR-binding peptide
  MOD_RES (31)..(32): Xaa is C or S

SEQ ID NO: 44417 - protein, 21 aa, Artificial Sequence
  Cyclic GFR-binding peptide
PIKGYVVKENEDFYLMNIPSL

SEQ ID NO: 44418 - protein, 30 aa, Artificial Sequence; identical to SEQ ID NO: 41440
  Cyclic GFR-binding peptide
  MOD_RES (29)..(30): Xaa is C or S

SEQ ID NO: 44419 - protein, 32 aa, Artificial Sequence; identical to SEQ ID NO: 41441
  Cyclic GFR-binding peptide
  MOD_RES (31)..(32): Xaa is C or S

SEQ ID NO: 44420 - protein, 33 aa, Artificial Sequence; identical to SEQ ID NO: 41442
  Cyclic GFR-binding peptide
  MOD_RES (29)..(30): Xaa is C or S

SEQ ID NO: 44421 - protein, 28 aa, Artificial Sequence
  Cyclic GFR-binding peptide
  MOD_RES (27)..(28): Xaa is C or S
NPIKGYIVNSSDDFYLVNIPSLQTPAXX

SEQ ID NO: 44422 - protein, 31 aa, Artificial Sequence; identical to SEQ ID NO: 41444
  Cyclic GFR-binding peptide
  MOD_RES (29)..(30): Xaa is C or S

SEQ ID NO: 44423 - protein, 36 aa, Artificial Sequence; identical to SEQ ID NO: 41445
  Cyclic GFR-binding peptide
  MOD_RES (32)..(33): Xaa is C or S

SEQ ID NO: 44424 - protein, 32 aa, Artificial Sequence; identical to SEQ ID NO: 41446
  Cyclic GFR-binding peptide
  MOD_RES (28)..(29): Xaa is C or S

SEQ ID NO: 44425 - protein, 32 aa, Artificial Sequence; identical to SEQ ID NO: 41447
  Cyclic GFR-binding peptide
  MOD_RES (27)..(28): Xaa is C or S

SEQ ID NO: 44426 - protein, 33 aa, Artificial Sequence; identical to SEQ ID NO: 41448
  Cyclic GFR-binding peptide
  MOD_RES (32)..(32): Xaa is C or S

SEQ ID NO: 44427 - protein, 22 aa, Artificial Sequence
  Cyclic GFR-binding peptide
MDPIKGYVVNNASDFYLINIPS

SEQ ID NO: 44428 - protein, 26 aa, Artificial Sequence
  Cyclic GFR-binding peptide
  MOD_RES (26)..(26): Xaa is C or S
PIKGYIVNSSDDFYLVNIPSLQTPAX

SEQ ID NO: 44429 - protein, 32 aa, Artificial Sequence; identical to SEQ ID NO: 41451
  Cyclic GFR-binding peptide
  MOD_RES (29)..(30): Xaa is C or S

SEQ ID NO: 44430 - protein, 38 aa, Artificial Sequence; identical to SEQ ID NO: 41452
  Cyclic GFR-binding peptide
  MOD_RES (32)..(33): Xaa is C or S

SEQ ID NO: 44431 - protein, 36 aa, Artificial Sequence; identical to SEQ ID NO: 41453
  Cyclic GFR-binding peptide
  MOD_RES (2)..(34)..(35): Xaa is C or S

SEQ ID NO: 44432 - protein, 32 aa, Artificial Sequence; identical to SEQ ID NO: 41454
  Cyclic GFR-binding peptide
  MOD_RES (2)..(4): Xaa is C or S

SEQ ID NO: 44433 - protein, 31 aa, Artificial Sequence; identical to SEQ ID NO: 41455
  Cyclic GFR-binding peptide
  MOD_RES (31)..(31): Xaa is C or S

SEQ ID NO: 44434 - protein, 23 aa, Artificial Sequence
  Cyclic GFR-binding peptide
MPIKGYLLVRGNDFYLMNIPSTK

SEQ ID NO: 44435 - protein, 35 aa, Artificial Sequence; identical to SEQ ID NO: 41457
  Cyclic GFR-binding peptide
  MOD_RES (31)..(32): Xaa is C or S

SEQ ID NO: 44436 - protein, 33 aa, Artificial Sequence; identical to SEQ ID NO: 41458
  Cyclic GFR-binding peptide
  MOD_RES (31)..(32): Xaa is C or S

SEQ ID NO: 44437 - protein, 35 aa, Artificial Sequence; identical to SEQ ID NO: 41459
  Cyclic GFR-binding peptide
  MOD_RES (1)..(33)..(34): Xaa is C or S

SEQ ID NO: 44438 - protein, 33 aa, Artificial Sequence; identical to SEQ ID NO: 41460
  Cyclic GFR-binding peptide
  MOD_RES (32)..(33): Xaa is C or S

SEQ ID NO: 44439 - protein, 30 aa, Artificial Sequence; identical to SEQ ID NO: 41461
  Cyclic GFR-binding peptide

SEQ ID NO: 44440 - protein, 27 aa, Artificial Sequence
  Cyclic GFR-binding peptide
VSMGEPIKGYTPVGMDDFYLVNIPSLK

SEQ ID NO: 44441 - protein, 34 aa, Artificial Sequence; identical to SEQ ID NO: 41463
  Cyclic GFR-binding peptide
  MOD_RES (1)..(33)..(34): Xaa is C or S

SEQ ID NO: 44442 - protein, 39 aa, Artificial Sequence; identical to SEQ ID NO: 41464
  Cyclic GFR-binding peptide
  MOD_RES (2)..(4)..(36)..(37): Xaa is C or S

SEQ ID NO: 44443 - protein, 36 aa, Artificial Sequence; identical to SEQ ID NO: 41465
  Cyclic GFR-binding peptide
  MOD_RES (2)..(34)..(35): Xaa is C or S

SEQ ID NO: 44444 - protein, 24 aa, Artificial Sequence
  Cyclic GFR-binding peptide
IMPIKGYLLVRGNDFYLMNIPSTK

SEQ ID NO: 44445 - protein, 27 aa, Artificial Sequence
  Cyclic GFR-binding peptide
MNPIKGYIVNSSDDFYLVNIPSLQTPA

SEQ ID NO: 44446 - protein, 34 aa, Artificial Sequence; identical to SEQ ID NO: 41468
  Cyclic GFR-binding peptide
  MOD_RES (31)..(32): Xaa is C or S

SEQ ID NO: 44447 - protein, 39 aa, Artificial Sequence; identical to SEQ ID NO: 41469
  Cyclic GFR-binding peptide
  MOD_RES (2)..(34)..(35): Xaa is C or S

SEQ ID NO: 44448 - protein, 25 aa, Artificial Sequence
  Cyclic GFR-binding peptide
RVVMNPIKGYIVNSSDDFYLVNIPS

SEQ ID NO: 44449 - protein, 30 aa, Artificial Sequence; identical to SEQ ID NO: 41471
  Cyclic GFR-binding peptide
  MOD_RES (27)..(27): Xaa is C or S

SEQ ID NO: 44450 - protein, 28 aa, Artificial Sequence
  Cyclic GFR-binding peptide
  MOD_RES (2)..(2): Xaa is C or S
GXSRVVMNPIKGYIVNSSDDFYLVNIPS

SEQ ID NO: 44451 - protein, 37 aa, Artificial Sequence; identical to SEQ ID NO: 41473
  Cyclic GFR-binding peptide
  MOD_RES (2)..(34)..(35): Xaa is C or S

SEQ ID NO: 44452 - protein, 25 aa, Artificial Sequence
  Cyclic GFR-binding peptide
VMDPIKGYVVKENEDFYLMNIPSLE

SEQ ID NO: 44453 - protein, 27 aa, Artificial Sequence
  Cyclic GFR-binding peptide
  MOD_RES (27)..(27): Xaa is C or S
MPIKGYLLVRGNDFYLMNIPSTKVPAX

SEQ ID NO: 44454 - protein, 36 aa, Artificial Sequence; identical to SEQ ID NO: 41476
  Cyclic GFR-binding peptide
  MOD_RES (1)..(3)..(35)..(36): Xaa is C or S

SEQ ID NO: 44455 - protein, 36 aa, Artificial Sequence; identical to SEQ ID NO: 41477
  Cyclic GFR-binding peptide
  MOD_RES (2)..(4)..(36): Xaa is C or S

SEQ ID NO: 44456 - protein, 37 aa, Artificial Sequence; identical to SEQ ID NO: 41478
  Cyclic GFR-binding peptide
  MOD_RES (32)..(33): Xaa is C or S

SEQ ID NO: 44457 - protein, 29 aa, Artificial Sequence
  Cyclic GFR-binding peptide
  MOD_RES (27)..(28): Xaa is C or S
EPIKGYTPVGMDDFYLVNIPSLKTPVXXA

SEQ ID NO: 44458 - protein, 31 aa, Artificial Sequence; identical to SEQ ID NO: 41480
  Cyclic GFR-binding peptide
  MOD_RES (30)..(31): Xaa is C or S

SEQ ID NO: 44459 - protein, 35 aa, Artificial Sequence; identical to SEQ ID NO: 41481
  Cyclic GFR-binding peptide
  MOD_RES (30)..(31): Xaa is C or S

SEQ ID NO: 44460 - protein, 26 aa, Artificial Sequence
  Cyclic GFR-binding peptide
VVMDPIKGYVVKENEDFYLMNIPSLE

SEQ ID NO: 44461 - protein, 37 aa, Artificial Sequence; identical to SEQ ID NO: 41483
  Cyclic GFR-binding peptide
  MOD_RES (2)..(34)..(35): Xaa is C or S

SEQ ID NO: 44462 - protein, 28 aa, Artificial Sequence
  Cyclic GFR-binding peptide
  MOD_RES (1)..(1): Xaa is C or S
XARVVMNPIKGYIVNSSDDFYLVNIPSL

SEQ ID NO: 44463 - protein, 39 aa, Artificial Sequence; identical to SEQ ID NO: 41485
  Cyclic GFR-binding peptide
  MOD_RES (2)..(4)..(36)..(37): Xaa is C or S

SEQ ID NO: 44464 - protein, 39 aa, Artificial Sequence; identical to SEQ ID NO: 41486
  Cyclic GFR-binding peptide
  MOD_RES (1)..(33)..(34): Xaa is C or S

SEQ ID NO: 44465 - protein, 42 aa, Artificial Sequence; identical to SEQ ID NO: 41487
  Cyclic GFR-binding peptide
  MOD_RES (1)..(3)..(36)..(37): Xaa is C or S

SEQ ID NO: 44466 - protein, 39 aa, Artificial Sequence; identical to SEQ ID NO: 41488
  Cyclic GFR-binding peptide
  MOD_RES (1)..(3)..(35)..(36): Xaa is C or S

SEQ ID NO: 44467 - protein, 26 aa, Artificial Sequence
  Cyclic GFR-binding peptide
AEVVMDPIKGYVVNNAADFYLINIPS

SEQ ID NO: 44468 - protein, 40 aa, Artificial Sequence; identical to SEQ ID NO: 41490
  Cyclic GFR-binding peptide
  MOD_RES (2)..(34)..(35): Xaa is C or S

SEQ ID NO: 44469 - protein, 28 aa, Artificial Sequence
  Cyclic GFR-binding peptide
  MOD_RES (28)..(28): Xaa is C or S
MNPIKGYIVNSSDDFYLVNIPSLKTPAX

SEQ ID NO: 44470 - protein, 31 aa, Artificial Sequence; identical to SEQ ID NO: 41492
  Cyclic GFR-binding peptide
  MOD_RES (1)..(3): Xaa is C or S

SEQ ID NO: 44471 - protein, 23 aa, Artificial Sequence
  Cyclic GFR-binding peptide
IMPIKGYLLVRGNDFYLMNIPST

SEQ ID NO: 44472 - protein, 28 aa, Artificial Sequence
  Cyclic GFR-binding peptide
  MOD_RES (1)..(1): Xaa is C or S
XAKVVMNPIKGYIVNNSSDFYLVNIPSL

SEQ ID NO: 44473 - protein, 35 aa, Artificial Sequence; identical to SEQ ID NO: 41495
  Cyclic GFR-binding peptide
  MOD_RES (30)..(31): Xaa is C or S

SEQ ID NO: 44474 - protein, 26 aa, Artificial Sequence
  Cyclic GFR-binding peptide
MGEPIKGYTPVGMDDFYLVNIPSLKT

SEQ ID NO: 44475 - protein, 39 aa, Artificial Sequence; identical to SEQ ID NO: 41497
  Cyclic GFR-binding peptide
  MOD_RES (2)..(34)..(35): Xaa is C or S

SEQ ID NO: 44476 - protein, 24 aa, Artificial Sequence
  Cyclic GFR-binding peptide
VMDPIKGYVVNNAADFYLINIPSL

SEQ ID NO: 44477 - protein, 34 aa, Artificial Sequence; identical to SEQ ID NO: 41499
  Cyclic GFR-binding peptide
  MOD_RES (1)..(33)..(34): Xaa is C or S

SEQ ID NO: 44478 - protein, 37 aa, Artificial Sequence; identical to SEQ ID NO: 41500
  Cyclic GFR-binding peptide
  MOD_RES (1)..(33)..(34): Xaa is C or S

SEQ ID NO: 44479 - protein, 38 aa, Artificial Sequence; identical to SEQ ID NO: 41501
  Cyclic GFR-binding peptide
  MOD_RES (2)..(35)..(36): Xaa is C or S

SEQ ID NO: 44480 - protein, 32 aa, Artificial Sequence; identical to SEQ ID NO: 41502
  Cyclic GFR-binding peptide
  MOD_RES (2)..(2): Xaa is C or S

SEQ ID NO: 44481 - protein, 29 aa, Artificial Sequence
  Cyclic GFR-binding peptide
EVVMDPIKGYVVNNASDFYLINIPSLRTP

SEQ ID NO: 44482 - protein, 38 aa, Artificial Sequence; identical to SEQ ID NO: 41504
  Cyclic GFR-binding peptide
  MOD_RES (1)..(3)..(35)..(36): Xaa is C or S

SEQ ID NO: 44483 - protein, 28 aa, Artificial Sequence
  Cyclic GFR-binding peptide
  MOD_RES (28)..(28): Xaa is C or S
MDPIKGYVVNNASDFYLINIPSLRTPVX

SEQ ID NO: 44484 - protein, 31 aa, Artificial Sequence; identical to SEQ ID NO: 41506
  Cyclic GFR-binding peptide

SEQ ID NO: 44485 - protein, 33 aa, Artificial Sequence; identical to SEQ ID NO: 41507
  Cyclic GFR-binding peptide
  MOD_RES (30)..(31): Xaa is C or S

SEQ ID NO: 44486 - protein, 32 aa, Artificial Sequence; identical to SEQ ID NO: 41508
  Cyclic GFR-binding peptide
  MOD_RES (2)..(4): Xaa is C or S

SEQ ID NO: 44487 - protein, 33 aa, Artificial Sequence; identical to SEQ ID NO: 41509
  Cyclic GFR-binding peptide
  MOD_RES (1)..(33): Xaa is C or S

SEQ ID NO: 44488 - protein, 35 aa, Artificial Sequence; identical to SEQ ID NO: 41510
  Cyclic GFR-binding peptide
  MOD_RES (32)..(32): Xaa is C or S

SEQ ID NO: 44489 - protein, 40 aa, Artificial Sequence; identical to SEQ ID NO: 41511
  Cyclic GFR-binding peptide
  MOD_RES (2)..(4)..(36)..(37): Xaa is C or S

SEQ ID NO: 44490 - protein, 21 aa, Artificial Sequence
  Cyclic GFR-binding peptide
GPIKGYYTVVGKDFYLINIPS

SEQ ID NO: 44491 - protein, 28 aa, Artificial Sequence
  Cyclic GFR-binding peptide
VMDPIKGYVVNNASDFYLINIPSLRTPV

SEQ ID NO: 44492 - protein, 24 aa, Artificial Sequence
  Cyclic GFR-binding peptide
MDPIKGYVVKENEDFYLMNIPSLE

SEQ ID NO: 44493 - protein, 26 aa, Artificial Sequence
  Cyclic GFR-binding peptide
ESVAMGPIKGYYTVVGKDFYLINIPS

SEQ ID NO: 44494 - protein, 26 aa, Artificial Sequence
  Cyclic GFR-binding peptide
  MOD_RES (26)..(26): Xaa is C or S
PIKGYVVKDYEDFYLMNIPSLETPVX

SEQ ID NO: 44495 - protein, 33 aa, Artificial Sequence; identical to SEQ ID NO: 41517
  Cyclic GFR-binding peptide
  MOD_RES (29)..(30): Xaa is C or S

SEQ ID NO: 44496 - protein, 26 aa, Artificial Sequence
  Cyclic GFR-binding peptide
MGPIKGYYTVVGKDFYLINIPSLKTP

SEQ ID NO: 44497 - protein, 28 aa, Artificial Sequence
  Cyclic GFR-binding peptide
RVVMNPIKGYIVNSSDDFYLVNIPSLKT

SEQ ID NO: 44498 - protein, 28 aa, Artificial Sequence
  Cyclic GFR-binding peptide
  MOD_RES (2)..(2): Xaa is C or S
GXARVVMNPIKGYIVNSSDDFYLVNIPS

SEQ ID NO: 44499 - protein, 26 aa, Artificial Sequence
  Cyclic GFR-binding peptide
SEVVMDPIKGYVVNNASDFYLINIPS

SEQ ID NO: 44500 - protein, 34 aa, Artificial Sequence; identical to SEQ ID NO: 41522
  Cyclic GFR-binding peptide
  MOD_RES (2)..(4): Xaa is C or S

SEQ ID NO: 44501 - protein, 23 aa, Artificial Sequence
  Cyclic GFR-binding peptide
PIKGYYTVVGKDFYLINIPSLKT

SEQ ID NO: 44502 - protein, 29 aa, Artificial Sequence
  Cyclic GFR-binding peptide
  MOD_RES (29)..(29): Xaa is C or S
VMDPIKGYVVKENEDFYLMNIPSLETPVX

SEQ ID NO: 44503 - protein, 30 aa, Artificial Sequence; identical to SEQ ID NO: 41525
  Cyclic GFR-binding peptide
  MOD_RES (28)..(29): Xaa is C or S

SEQ ID NO: 44504 - protein, 33 aa, Artificial Sequence; identical to SEQ ID NO: 41526
  Cyclic GFR-binding peptide
  MOD_RES (1)..(3): Xaa is C or S

SEQ ID NO: 44505 - protein, 24 aa, Artificial Sequence
  Cyclic GFR-binding peptide
MNPIKGYIVNSSDDFYLVNIPSLK

SEQ ID NO: 44506 - protein, 30 aa, Artificial Sequence; identical to SEQ ID NO: 41528
  Cyclic GFR-binding peptide
  MOD_RES (1)..(1): Xaa is C or S

SEQ ID NO: 44507 - protein, 25 aa, Artificial Sequence
  Cyclic GFR-binding peptide
NPIKGYIVNNSSDFYLVNIPSLKTP

SEQ ID NO: 44508 - protein, 30 aa, Artificial Sequence; identical to SEQ ID NO: 41530
  Cyclic GFR-binding peptide
  MOD_RES (29)..(29): Xaa is C or S

SEQ ID NO: 44509 - protein, 33 aa, Artificial Sequence; identical to SEQ ID NO: 41531
  Cyclic GFR-binding peptide
  MOD_RES (32)..(33): Xaa is C or S

SEQ ID NO: 44510 - protein, 36 aa, Artificial Sequence; identical to SEQ ID NO: 41532
  Cyclic GFR-binding peptide
  MOD_RES (32)..(33): Xaa is C or S

SEQ ID NO: 44511 - protein, 28 aa, Artificial Sequence
  Cyclic GFR-binding peptide
VSMGEPIKGYTPVGMDDFYLVNIPSLKT

SEQ ID NO: 44512 - protein, 25 aa, Artificial Sequence
  Cyclic GFR-binding peptide
DPIKGYVVNNAADFYLINIPSLRAP

SEQ ID NO: 44513 - protein, 42 aa, Artificial Sequence; identical to SEQ ID NO: 41535
  Cyclic GFR-binding peptide
  MOD_RES (2)..(4)..(36)..(37): Xaa is C or S

SEQ ID NO: 44514 - protein, 28 aa, Artificial Sequence
  Cyclic GFR-binding peptide
AKVVMNPIKGYIVNNSSDFYLVNIPSLK

SEQ ID NO: 44515 - protein, 27 aa, Artificial Sequence
  Cyclic GFR-binding peptide
  MOD_RES (27)..(27): Xaa is C or S
NPIKGYIVNNSSDFYLVNIPSLKTPAX

SEQ ID NO: 44516 - protein, 35 aa, Artificial Sequence; identical to SEQ ID NO: 41538
  Cyclic GFR-binding peptide
  MOD_RES (1)..(3)..(35): Xaa is C or S

SEQ ID NO: 44517 - protein, 36 aa, Artificial Sequence; identical to SEQ ID NO: 41539
  Cyclic GFR-binding peptide
  MOD_RES (2)..(35)..(36): Xaa is C or S

SEQ ID NO: 44518 - protein, 30 aa, Artificial Sequence; identical to SEQ ID NO: 41540
  Cyclic GFR-binding peptide
  MOD_RES (2)..(2): Xaa is C or S

SEQ ID NO: 44519 - protein, 22 aa, Artificial Sequence
  Cyclic GFR-binding peptide
PIKGYIVNNSSDFYLVNIPSLK

SEQ ID NO: 44520 - protein, 26 aa, Artificial Sequence
  Cyclic GFR-binding peptide
VMEPIKGYVVKDYEDFYLMNIPSLET

SEQ ID NO: 44521 - protein, 37 aa, Artificial Sequence; identical to SEQ ID NO: 41543
  Cyclic GFR-binding peptide
  MOD_RES (1)..(33)..(34): Xaa is C or S

SEQ ID NO: 44522 - protein, 37 aa, Artificial Sequence; identical to SEQ ID NO: 41544
  Cyclic GFR-binding peptide
  MOD_RES (1)..(33)..(34): Xaa is C or S

SEQ ID NO: 44523 - protein, 29 aa, Artificial Sequence
  Cyclic GFR-binding peptide
  MOD_RES (1)..(3): Xaa is C or S
XGXEEVIMPIKGYLLVRGNDFYLMNIPST

SEQ ID NO: 44524 - protein, 33 aa, Artificial Sequence; identical to SEQ ID NO: 41546
  Cyclic GFR-binding peptide
  MOD_RES (27)..(27): Xaa is C or S

SEQ ID NO: 44525 - protein, 32 aa, Artificial Sequence; identical to SEQ ID NO: 41547
  Cyclic GFR-binding peptide
  MOD_RES (1)..(1): Xaa is C or S

SEQ ID NO: 44526 - protein, 33 aa, Artificial Sequence; identical to SEQ ID NO: 41548
  Cyclic GFR-binding peptide
  MOD_RES (2)..(2): Xaa is C or S

SEQ ID NO: 44527 - protein, 21 aa, Artificial Sequence
  Cyclic GFR-binding peptide
PIKGYIVNNSSDFYLVNIPSL

SEQ ID NO: 44528 - protein, 31 aa, Artificial Sequence; identical to SEQ ID NO: 41550
  Cyclic GFR-binding peptide
  MOD_RES (31)..(31): Xaa is C or S

SEQ ID NO: 44529 - protein, 31 aa, Artificial Sequence; identical to SEQ ID NO: 41551
  Cyclic GFR-binding peptide
  MOD_RES (26)..(27): Xaa is C or S

SEQ ID NO: 44530 - protein, 30 aa, Artificial Sequence; identical to SEQ ID NO: 41552
  Cyclic GFR-binding peptide
  MOD_RES (28)..(29): Xaa is C or S

SEQ ID NO: 44531 - protein, 30 aa, Artificial Sequence; identical to SEQ ID NO: 41553
  Cyclic GFR-binding peptide
  MOD_RES (29)..(30): Xaa is C or S

SEQ ID NO: 44532 - protein, 34 aa, Artificial Sequence; identical to SEQ ID NO: 41554
  Cyclic GFR-binding peptide
  MOD_RES (28)..(29): Xaa is C or S

SEQ ID NO: 44533 - protein, 24 aa, Artificial Sequence
  Cyclic GFR-binding peptide
MDPIKGYVVNNAADFYLINIPSLR

SEQ ID NO: 44534 - protein, 39 aa, Artificial Sequence; identical to SEQ ID NO: 41556
  Cyclic GFR-binding peptide
  MOD_RES (2)..(34)..(35): Xaa is C or S

SEQ ID NO: 44535 - protein, 31 aa, Artificial Sequence; identical to SEQ ID NO: 41557
  Cyclic GFR-binding peptide
  MOD_RES (30)..(31): Xaa is C or S

SEQ ID NO: 44536 - protein, 33 aa, Artificial Sequence; identical to SEQ ID NO: 41558
  Cyclic GFR-binding peptide
  MOD_RES (2)..(2): Xaa is C or S

SEQ ID NO: 44537 - protein, 32 aa, Artificial Sequence; identical to SEQ ID NO: 41559
  Cyclic GFR-binding peptide
  MOD_RES (28)..(29): Xaa is C or S

SEQ ID NO: 44538 - protein, 31 aa, Artificial Sequence; identical to SEQ ID NO: 41560
  Cyclic GFR-binding peptide
  MOD_RES (29)..(30): Xaa is C or S

SEQ ID NO: 44539 - protein, 27 aa, Artificial Sequence
  Cyclic GFR-binding peptide
AKVVMNPIKGYIVNNSSDFYLVNIPSL

SEQ ID NO: 44540 - protein, 42 aa, Artificial Sequence; identical to SEQ ID NO: 41562
  Cyclic GFR-binding peptide
  MOD_RES (2)..(4)..(36)..(37): Xaa is C or S

SEQ ID NO: 44541 - protein, 35 aa, Artificial Sequence; identical to SEQ ID NO: 41563
  Cyclic GFR-binding peptide
  MOD_RES (32)..(33): Xaa is C or S

SEQ ID NO: 44542 - protein, 29 aa, Artificial Sequence
  Cyclic GFR-binding peptide
SVAMGPIKGYYTVVGKDFYLINIPSLKTP

SEQ ID NO: 44543 - protein, 38 aa, Artificial Sequence; identical to SEQ ID NO: 41565
  Cyclic GFR-binding peptide
  MOD_RES (1)..(3)..(35): Xaa is C or S

SEQ ID NO: 44544 - protein, 32 aa, Artificial Sequence; identical to SEQ ID NO: 41566
  Cyclic GFR-binding peptide
  MOD_RES (1)..(3): Xaa is C or S

SEQ ID NO: 44545 - protein, 33 aa, Artificial Sequence; identical to SEQ ID NO: 41567
  Cyclic GFR-binding peptide
  MOD_RES (32)..(33): Xaa is C or S

SEQ ID NO: 44546 - protein, 38 aa, Artificial Sequence; identical to SEQ ID NO: 41568
  Cyclic GFR-binding peptide
  MOD_RES (32)..(33): Xaa is C or S

SEQ ID NO: 44547 - protein, 33 aa, Artificial Sequence; identical to SEQ ID NO: 41569
  Cyclic GFR-binding peptide
  MOD_RES (28)..(29): Xaa is C or S

SEQ ID NO: 44548 - protein, 31 aa, Artificial Sequence; identical to SEQ ID NO: 41570
  Cyclic GFR-binding peptide
  MOD_RES (2)..(2): Xaa is C or S

SEQ ID NO: 44549 - protein, 20 aa, Artificial Sequence
  Cyclic GFR-binding peptide
PIKGYIVNNSSDFYLVNIPS

SEQ ID NO: 44550 - protein, 39 aa, Artificial Sequence; identical to SEQ ID NO: 41572
  Cyclic GFR-binding peptide
  MOD_RES (1)..(3)..(35)..(36): Xaa is C or S

SEQ ID NO: 44551 - protein, 31 aa, Artificial Sequence; identical to SEQ ID NO: 41573
  Cyclic GFR-binding peptide
  MOD_RES (31)..(31): Xaa is C or S

SEQ ID NO: 44552 - protein, 38 aa, Artificial Sequence; identical to SEQ ID NO: 41574
  Cyclic GFR-binding peptide
  MOD_RES (1)..(33)..(34): Xaa is C or S

SEQ ID NO: 44553 - protein, 38 aa, Artificial Sequence; identical to SEQ ID NO: 41575
  Cyclic GFR-binding peptide
  MOD_RES (2)..(4)..(37)..(38): Xaa is C or S

SEQ ID NO: 44554 - protein, 37 aa, Artificial Sequence; identical to SEQ ID NO: 41576
  Cyclic GFR-binding peptide
  MOD_RES (2)..(34)..(35): Xaa is C or S

SEQ ID NO: 44555 - protein, 32 aa, Artificial Sequence; identical to SEQ ID NO: 41577
  Cyclic GFR-binding peptide
  MOD_RES (29)..(30): Xaa is C or S

SEQ ID NO: 44556 - protein, 30 aa, Artificial Sequence; identical to SEQ ID NO: 41578
  Cyclic GFR-binding peptide
  MOD_RES (1)..(1): Xaa is C or S

SEQ ID NO: 44557 - protein, 30 aa, Artificial Sequence; identical to SEQ ID NO: 41579
  Cyclic GFR-binding peptide

SEQ ID NO: 44558 - protein, 31 aa, Artificial Sequence; identical to SEQ ID NO: 41580
  Cyclic GFR-binding peptide
  MOD_RES (1)..(3): Xaa is C or S

SEQ ID NO: 44559 - protein, 33 aa, Artificial Sequence; identical to SEQ ID NO: 41581
  Cyclic GFR-binding peptide
  MOD_RES (2)..(4): Xaa is C or S

SEQ ID NO: 44560 - protein, 34 aa, Artificial Sequence; identical to SEQ ID NO: 41582
  Cyclic GFR-binding peptide
  MOD_RES (2)..(4): Xaa is C or S

SEQ ID NO: 44561 - protein, 28 aa, Artificial Sequence
  Cyclic GFR-binding peptide
VMNPIKGYIVNNSSDFYLVNIPSLKTPA

SEQ ID NO: 44562 - protein, 29 aa, Artificial Sequence
  Cyclic GFR-binding peptide
  MOD_RES (2)..(2): Xaa is C or S
GXGEVVMDPIKGYVVKENEDFYLMNIPSL

SEQ ID NO: 44563 - protein, 31 aa, Artificial Sequence; identical to SEQ ID NO: 41585
  Cyclic GFR-binding peptide
  MOD_RES (31)..(31): Xaa is C or S

SEQ ID NO: 44564 - protein, 39 aa, Artificial Sequence; identical to SEQ ID NO: 41586
  Cyclic GFR-binding peptide
  MOD_RES (2)..(33)..(34): Xaa is C or S

SEQ ID NO: 44565 - protein, 31 aa, Artificial Sequence; identical to SEQ ID NO: 41587
  Cyclic GFR-binding peptide
  MOD_RES (31)..(31): Xaa is C or S

SEQ ID NO: 44566 - protein, 35 aa, Artificial Sequence; identical to SEQ ID NO: 41588
  Cyclic GFR-binding peptide
  MOD_RES (1)..(3)..(35): Xaa is C or S

SEQ ID NO: 44567 - protein, 29 aa, Artificial Sequence
  Cyclic GFR-binding peptide
  MOD_RES (28)..(29): Xaa is C or S
MDPIKGYVVNNAADFYLINIPSLRAPVXX

SEQ ID NO: 44568 - protein, 34 aa, Artificial Sequence; identical to SEQ ID NO: 41590
  Cyclic GFR-binding peptide
  MOD_RES (28)..(29): Xaa is C or S

SEQ ID NO: 44569 - protein, 33 aa, Artificial Sequence; identical to SEQ ID NO: 41591
  Cyclic GFR-binding peptide
  MOD_RES (2)..(4): Xaa is C or S

SEQ ID NO: 44570 - protein, 30 aa, Artificial Sequence; identical to SEQ ID NO: 41592
  Cyclic GFR-binding peptide
  MOD_RES (27)..(28): Xaa is C or S

SEQ ID NO: 44571 - protein, 32 aa, Artificial Sequence; identical to SEQ ID NO: 41593
  Cyclic GFR-binding peptide
  MOD_RES (30)..(31): Xaa is C or S

SEQ ID NO: 44572 - protein, 32 aa, Artificial Sequence; identical to SEQ ID NO: 41594
  Cyclic GFR-binding peptide
  MOD_RES (2)..(2): Xaa is C or S

SEQ ID NO: 44573 - protein, 34 aa, Artificial Sequence; identical to SEQ ID NO: 41595
  Cyclic GFR-binding peptide
  MOD_RES (31)..(32): Xaa is C or S

SEQ ID NO: 44574 - protein, 30 aa, Artificial Sequence; identical to SEQ ID NO: 41596
  Cyclic GFR-binding peptide
  MOD_RES (1)..(1): Xaa is C or S

SEQ ID NO: 44575 - protein, 30 aa, Artificial Sequence; identical to SEQ ID NO: 41597
  Cyclic GFR-binding peptide
  MOD_RES (26)..(27): Xaa is C or S

SEQ ID NO: 44576 - protein, 24 aa, Artificial Sequence
  Cyclic GFR-binding peptide
DPIKGYVVNNASDFYLINIPSLRT

SEQ ID NO: 44577 - protein, 32 aa, Artificial Sequence; identical to SEQ ID NO: 41599
  Cyclic GFR-binding peptide
  MOD_RES (27)..(28): Xaa is C or S

SEQ ID NO: 44578 - protein, 34 aa, Artificial Sequence; identical to SEQ ID NO: 41600
  Cyclic GFR-binding peptide
  MOD_RES (31)..(31): Xaa is C or S

SEQ ID NO: 44579 - protein, 36 aa, Artificial Sequence; identical to SEQ ID NO: 41601
  Cyclic GFR-binding peptide
  MOD_RES (1)..(33)..(34): Xaa is C or S

SEQ ID NO: 44580 - protein, 34 aa, Artificial Sequence; identical to SEQ ID NO: 41602
  Cyclic GFR-binding peptide
  MOD_RES (2)..(4): Xaa is C or S

SEQ ID NO: 44581 - protein, 32 aa, Artificial Sequence; identical to SEQ ID NO: 41603
  Cyclic GFR-binding peptide
  MOD_RES (28)..(29): Xaa is C or S

SEQ ID NO: 44582 - protein, 32 aa, Artificial Sequence; identical to SEQ ID NO: 41604
  Cyclic GFR-binding peptide
  MOD_RES (2)..(4): Xaa is C or S

SEQ ID NO: 44583 - protein, 34 aa, Artificial Sequence; identical to SEQ ID NO: 41605
  Cyclic GFR-binding peptide
  MOD_RES (30)..(31): Xaa is C or S

SEQ ID NO: 44584 - protein, 29 aa, Artificial Sequence
  Cyclic GFR-binding peptide
  MOD_RES (1)..(1): Xaa is C or S
XSRVVMNPIKGYIVNSSDDFYLVNIPSLK

SEQ ID NO: 44585 - protein, 31 aa, Artificial Sequence; identical to SEQ ID NO: 41607
  Cyclic GFR-binding peptide
  MOD_RES (2)..(4): Xaa is C or S

SEQ ID NO: 44586 - protein, 28 aa, Artificial Sequence
  Cyclic GFR-binding peptide
  MOD_RES (26)..(27): Xaa is C or S
PIKGYVVKENEDFYLMNIPSLETPVXXA

SEQ ID NO: 44587 - protein, 24 aa, Artificial Sequence
  Cyclic GFR-binding peptide
VVMNPIKGYIVNNSSDFYLVNIPS

SEQ ID NO: 44588 - protein, 36 aa, Artificial Sequence; identical to SEQ ID NO: 41610
  Cyclic GFR-binding peptide
  MOD_RES (32)..(33): Xaa is C or S

SEQ ID NO: 44589 - protein, 26 aa, Artificial Sequence
  Cyclic GFR-binding peptide
GEVVMEPIKGYVVKDYEDFYLMNIPS

SEQ ID NO: 44590 - protein, 36 aa, Artificial Sequence; identical to SEQ ID NO: 41612
  Cyclic GFR-binding peptide
  MOD_RES (1)..(33)..(34): Xaa is C or S

SEQ ID NO: 44591 - protein, 29 aa, Artificial Sequence
  Cyclic GFR-binding peptide
  MOD_RES (27)..(28): Xaa is C or S
NPIKGYIVNSSDDFYLVNIPSLQTPAXXP

SEQ ID NO: 44592 - protein, 28 aa, Artificial Sequence
  Cyclic GFR-binding peptide
VMDPIKGYVVKENEDFYLMNIPSLETPV

SEQ ID NO: 44593 - protein, 30 aa, Artificial Sequence; identical to SEQ ID NO: 41615
  Cyclic GFR-binding peptide

SEQ ID NO: 44594 - protein, 29 aa, Artificial Sequence
  Cyclic GFR-binding peptide
  MOD_RES (1)..(1): Xaa is C or S
XAEVVMDPIKGYVVNNAADFYLINIPSLR

SEQ ID NO: 44595 - protein, 37 aa, Artificial Sequence; identical to SEQ ID NO: 41617
  Cyclic GFR-binding peptide
  MOD_RES (31)..(31): Xaa is C or S

SEQ ID NO: 44596 - protein, 27 aa, Artificial Sequence
  Cyclic GFR-binding peptide
VMDPIKGYVVNNASDFYLINIPSLRTP

SEQ ID NO: 44597 - protein, 38 aa, Artificial Sequence; identical to SEQ ID NO: 41619
  Cyclic GFR-binding peptide
  MOD_RES (1)..(33)..(34): Xaa is C or S

SEQ ID NO: 44598 - protein, 30 aa, Artificial Sequence; identical to SEQ ID NO: 41620
  Cyclic GFR-binding peptide
  MOD_RES (29)..(30): Xaa is C or S

SEQ ID NO: 44599 - protein, 23 aa, Artificial Sequence
  Cyclic GFR-binding peptide
NPIKGYIVNSSDDFYLVNIPSLQ

SEQ ID NO: 44600 - protein, 29 aa, Artificial Sequence
  Cyclic GFR-binding peptide
VVMNPIKGYIVNSSDDFYLVNIPSLQTPA

SEQ ID NO: 44601 - protein, 38 aa, Artificial Sequence; identical to SEQ ID NO: 41623
  Cyclic GFR-binding peptide
  MOD_RES (2)..(4)..(36)..(37): Xaa is C or S

SEQ ID NO: 44602 - protein, 41 aa, Artificial Sequence; identical to SEQ ID NO: 41624
  Cyclic GFR-binding peptide
  MOD_RES (2)..(4)..(36)..(37): Xaa is C or S

SEQ ID NO: 44603 - protein, 25 aa, Artificial Sequence
  Cyclic GFR-binding peptide
PIKGYVVNNASDFYLINIPSLRTPV

SEQ ID NO: 44604 - protein, 35 aa, Artificial Sequence; identical to SEQ ID NO: 41626
  Cyclic GFR-binding peptide
  MOD_RES (29)..(30): Xaa is C or S

SEQ ID NO: 44605 - protein, 35 aa, Artificial Sequence; identical to SEQ ID NO: 41627
  Cyclic GFR-binding peptide
  MOD_RES (2)..(34)..(35): Xaa is C or S

SEQ ID NO: 44606 - protein, 31 aa, Artificial Sequence; identical to SEQ ID NO: 41628
  Cyclic GFR-binding peptide
  MOD_RES (1)..(1): Xaa is C or S

SEQ ID NO: 44607 - protein, 21 aa, Artificial Sequence
  Cyclic GFR-binding peptide
PIKGYYTVVGKDFYLINIPSL

SEQ ID NO: 44608 - protein, 32 aa, Artificial Sequence; identical to SEQ ID NO: 41630
  Cyclic GFR-binding peptide
  MOD_RES (28)..(28): Xaa is C or S

SEQ ID NO: 44609 - protein, 33 aa, Artificial Sequence; identical to SEQ ID NO: 41631
  Cyclic GFR-binding peptide
  MOD_RES (1)..(1): Xaa is C or S

SEQ ID NO: 44610 - protein, 31 aa, Artificial Sequence; identical to SEQ ID NO: 41632
  Cyclic GFR-binding peptide
  MOD_RES (30)..(30): Xaa is C or S

SEQ ID NO: 44611 - protein, 29 aa, Artificial Sequence
  Cyclic GFR-binding peptide
  MOD_RES (26)..(27): Xaa is C or S
PIKGYIVNNSSDFYLVNIPSLKTPAXXAK

SEQ ID NO: 44612 - protein, 27 aa, Artificial Sequence
  Cyclic GFR-binding peptide
VMDPIKGYVVKENEDFYLMNIPSLETP

SEQ ID NO: 44613 - protein, 29 aa, Artificial Sequence
  Cyclic GFR-binding peptide
VVMDPIKGYVVKENEDFYLMNIPSLETPV

SEQ ID NO: 44614 - protein, 36 aa, Artificial Sequence; identical to SEQ ID NO: 41636
  Cyclic GFR-binding peptide
  MOD_RES (30)..(31): Xaa is C or S

SEQ ID NO: 44615 - protein, 31 aa, Artificial Sequence; identical to SEQ ID NO: 41637
  Cyclic GFR-binding peptide
  MOD_RES (27)..(28): Xaa is C or S

SEQ ID NO: 44616 - protein, 29 aa, Artificial Sequence
  Cyclic GFR-binding peptide
AKVVMNPIKGYIVNNSSDFYLVNIPSLKT

SEQ ID NO: 44617 - protein, 29 aa, Artificial Sequence
  Cyclic GFR-binding peptide
  MOD_RES (29)..(29): Xaa is C or S
VMDPIKGYVVNNAADFYLINIPSLRAPVX

SEQ ID NO: 44618 - protein, 31 aa, Artificial Sequence; identical to SEQ ID NO: 41640
  Cyclic GFR-binding peptide
  MOD_RES (28)..(29): Xaa is C or S

SEQ ID NO: 44619 - protein, 34 aa, Artificial Sequence; identical to SEQ ID NO: 41641
  Cyclic GFR-binding peptide
  MOD_RES (1)..(34): Xaa is C or S

SEQ ID NO: 44620 - protein, 25 aa, Artificial Sequence
  Cyclic GFR-binding peptide
VVMDPIKGYVVKENEDFYLMNIPSL

SEQ ID NO: 44621 - protein, 24 aa, Artificial Sequence
  Cyclic GFR-binding peptide
GEPIKGYTPVGMDDFYLVNIPSLK

SEQ ID NO: 44622 - protein, 34 aa, Artificial Sequence; identical to SEQ ID NO: 41644
  Cyclic GFR-binding peptide
  MOD_RES (29)..(30): Xaa is C or S

SEQ ID NO: 44623 - protein, 39 aa, Artificial Sequence; identical to SEQ ID NO: 41645
  Cyclic GFR-binding peptide
  MOD_RES (1)..(33)..(34): Xaa is C or S

SEQ ID NO: 44624 - protein, 22 aa, Artificial Sequence
  Cyclic GFR-binding peptide
PIKGYVVKENEDFYLMNIPSLE

SEQ ID NO: 44625 - protein, 32 aa, Artificial Sequence; identical to SEQ ID NO: 41647
  Cyclic GFR-binding peptide
  MOD_RES (26)..(27): Xaa is C or S

SEQ ID NO: 44626 - protein, 38 aa, Artificial Sequence; identical to SEQ ID NO: 41648
  Cyclic GFR-binding peptide
  MOD_RES (32)..(33): Xaa is C or S

SEQ ID NO: 44627 - protein, 33 aa, Artificial Sequence; identical to SEQ ID NO: 41649
  Cyclic GFR-binding peptide
  MOD_RES (2)..(2): Xaa is C or S

SEQ ID NO: 44628 - protein, 34 aa, Artificial Sequence; identical to SEQ ID NO: 41650
  Cyclic GFR-binding peptide
  MOD_RES (2)..(34): Xaa is C or S

SEQ ID NO: 44629 - protein, 30 aa, Artificial Sequence; identical to SEQ ID NO: 41651
  Cyclic GFR-binding peptide
  MOD_RES (2)..(2): Xaa is C or S

SEQ ID NO: 44630 - protein, 23 aa, Artificial Sequence
  Cyclic GFR-binding peptide
PIKGYVVNNAADFYLINIPSLRA

SEQ ID NO: 44631 - protein, 27 aa, Artificial Sequence
  Cyclic GFR-binding peptide
  MOD_RES (1)..(1): Xaa is C or S
XAEVVMDPIKGYVVNNAADFYLINIPS

SEQ ID NO: 44632 - protein, 29 aa, Artificial Sequence
  Cyclic GFR-binding peptide
VVMNPIKGYIVNSSDDFYLVNIPSLKTPA

SEQ ID NO: 44633 - protein, 29 aa, Artificial Sequence
  Cyclic GFR-binding peptide
  MOD_RES (2)..(4): Xaa is C or S
LXGXEEVIMPIKGYLLVRGNDFYLMNIPS

SEQ ID NO: 44634 - protein, 30 aa, Artificial Sequence; identical to SEQ ID NO: 41656
  Cyclic GFR-binding peptide
  MOD_RES (2)..(4): Xaa is C or S

SEQ ID NO: 44635 - protein, 31 aa, Artificial Sequence; identical to SEQ ID NO: 41657
  Cyclic GFR-binding peptide
  MOD_RES (27)..(28): Xaa is C or S

SEQ ID NO: 44636 - protein, 33 aa, Artificial Sequence; identical to SEQ ID NO: 41658
  Cyclic GFR-binding peptide
  MOD_RES (27)..(28): Xaa is C or S

SEQ ID NO: 44637 - protein, 33 aa, Artificial Sequence; identical to SEQ ID NO: 41659
  Cyclic GFR-binding peptide
  MOD_RES (28)..(29): Xaa is C or S

SEQ ID NO: 44638 - protein, 37 aa, Artificial Sequence; identical to SEQ ID NO: 41660
  Cyclic GFR-binding peptide
  MOD_RES (1)..(33)..(34): Xaa is C or S

SEQ ID NO: 44639 - protein, 26 aa, Artificial Sequence
  Cyclic GFR-binding peptide
  MOD_RES (26)..(26): Xaa is C or S
PIKGYVVNNAADFYLINIPSLRAPVX

SEQ ID NO: 44640 - protein, 31 aa, Artificial Sequence; identical to SEQ ID NO: 41662
  Cyclic GFR-binding peptide
  MOD_RES (30)..(31): Xaa is C or S

SEQ ID NO: 44641 - protein, 23 aa, Artificial Sequence
  Cyclic GFR-binding peptide
DPIKGYVVNNASDFYLINIPSLR

SEQ ID NO: 44642 - protein, 40 aa, Artificial Sequence; identical to SEQ ID NO: 41664
  Cyclic GFR-binding peptide
  MOD_RES (2)..(34)..(35): Xaa is C or S

SEQ ID NO: 44643 - protein, 33 aa, Artificial Sequence; identical to SEQ ID NO: 41665
  Cyclic GFR-binding peptide
  MOD_RES (1)..(3): Xaa is C or S

SEQ ID NO: 44644 - protein, 34 aa, Artificial Sequence; identical to SEQ ID NO: 41666
  Cyclic GFR-binding peptide
  MOD_RES (32)..(33): Xaa is C or S

SEQ ID NO: 44645 - protein, 37 aa, Artificial Sequence; identical to SEQ ID NO: 41667
  Cyclic GFR-binding peptide
  MOD_RES (32)..(32): Xaa is C or S

SEQ ID NO: 44646 - protein, 34 aa, Artificial Sequence; identical to SEQ ID NO: 41668
  Cyclic GFR-binding peptide
  MOD_RES (1)..(3): Xaa is C or S

SEQ ID NO: 44647 - protein, 32 aa, Artificial Sequence; identical to SEQ ID NO: 41669
  Cyclic GFR-binding peptide
  MOD_RES (29)..(30): Xaa is C or S

SEQ ID NO: 44648 - protein, 31 aa, Artificial Sequence; identical to SEQ ID NO: 41670
  Cyclic GFR-binding peptide
  MOD_RES (26)..(27): Xaa is C or S

SEQ ID NO: 44649 - protein, 26 aa, Artificial Sequence
  Cyclic GFR-binding peptide
MNPIKGYIVNNSSDFYLVNIPSLKTP

SEQ ID NO: 44650 - protein, 30 aa, Artificial Sequence; identical to SEQ ID NO: 41672
  Cyclic GFR-binding peptide
  MOD_RES (28)..(28): Xaa is C or S

SEQ ID NO: 44651 - protein, 35 aa, Artificial Sequence; identical to SEQ ID NO: 41673
  Cyclic GFR-binding peptide
  MOD_RES (29)..(30): Xaa is C or S

SEQ ID NO: 44652 - protein, 25 aa, Artificial Sequence
  Cyclic GFR-binding peptide
PIKGYVVKENEDFYLMNIPSLETPV

SEQ ID NO: 44653 - protein, 30 aa, Artificial Sequence; identical to SEQ ID NO: 41675
  Cyclic GFR-binding peptide
  MOD_RES (30)..(30): Xaa is C or S

SEQ ID NO: 44654 - protein, 32 aa, Artificial Sequence; identical to SEQ ID NO: 41676
  Cyclic GFR-binding peptide
  MOD_RES (29)..(30): Xaa is C or S

SEQ ID NO: 44655 - protein, 30 aa, Artificial Sequence; identical to SEQ ID NO: 41677
  Cyclic GFR-binding peptide
  MOD_RES (2)..(2): Xaa is C or S

SEQ ID NO: 44656 - protein, 38 aa, Artificial Sequence; identical to SEQ ID NO: 41678
  Cyclic GFR-binding peptide
  MOD_RES (2)..(34)..(35): Xaa is C or S

SEQ ID NO: 44657 - protein, 29 aa, Artificial Sequence
  Cyclic GFR-binding peptide
  MOD_RES (1)..(3): Xaa is C or S
XGXGEVVMEPIKGYVVKDYEDFYLMNIPS

SEQ ID NO: 44658 - protein, 30 aa, Artificial Sequence; identical to SEQ ID NO: 41680
  Cyclic GFR-binding peptide
  MOD_RES (1)..(1): Xaa is C or S

SEQ ID NO: 44659 - protein, 31 aa, Artificial Sequence; identical to SEQ ID NO: 41681
  Cyclic GFR-binding peptide

SEQ ID NO: 44660 - protein, 33 aa, Artificial Sequence; identical to SEQ ID NO: 41682
  Cyclic GFR-binding peptide
  MOD_RES (29)..(30): Xaa is C or S

SEQ ID NO: 44661 - protein, 29 aa, Artificial Sequence
  Cyclic GFR-binding peptide
  MOD_RES (2)..(2): Xaa is C or S
GXAEVVMDPIKGYVVNNAADFYLINIPSL

SEQ ID NO: 44662 - protein, 39 aa, Artificial Sequence; identical to SEQ ID NO: 41684
  Cyclic GFR-binding peptide
  MOD_RES (1)..(33)..(34): Xaa is C or S

SEQ ID NO: 44663 - protein, 36 aa, Artificial Sequence; identical to SEQ ID NO: 41685
  Cyclic GFR-binding peptide
  MOD_RES (30)..(31): Xaa is C or S

SEQ ID NO: 44664 - protein, 39 aa, Artificial Sequence; identical to SEQ ID NO: 41686
  Cyclic GFR-binding peptide
  MOD_RES (2)..(4)..(36)..(37): Xaa is C or S

SEQ ID NO: 44665 - protein, 31 aa, Artificial Sequence; identical to SEQ ID NO: 41687
  Cyclic GFR-binding peptide

SEQ ID NO: 44666 - protein, 27 aa, Artificial Sequence
  Cyclic GFR-binding peptide
  MOD_RES (27)..(27): Xaa is C or S
DPIKGYVVNNAADFYLINIPSLRAPVX

SEQ ID NO: 44667 - protein, 26 aa, Artificial Sequence
  Cyclic GFR-binding peptide
VVMDPIKGYVVNNASDFYLINIPSLR

SEQ ID NO: 44668 - protein, 25 aa, Artificial Sequence
  Cyclic GFR-binding peptide
DPIKGYVVNNASDFYLINIPSLRTP

SEQ ID NO: 44669 - protein, 34 aa, Artificial Sequence; identical to SEQ ID NO: 41691
  Cyclic GFR-binding peptide
  MOD_RES (28)..(29): Xaa is C or S

SEQ ID NO: 44670 - protein, 33 aa, Artificial Sequence; identical to SEQ ID NO: 41692
  Cyclic GFR-binding peptide
  MOD_RES (27)..(28): Xaa is C or S

SEQ ID NO: 44671 - protein, 26 aa, Artificial Sequence
  Cyclic GFR-binding peptide
GEVVMDPIKGYVVKENEDFYLMNIPS

SEQ ID NO: 44672 - protein, 32 aa, Artificial Sequence; identical to SEQ ID NO: 41694
  Cyclic GFR-binding peptide
  MOD_RES (29)..(30): Xaa is C or S

SEQ ID NO: 44673 - protein, 24 aa, Artificial Sequence
  Cyclic GFR-binding peptide
PIKGYVVKENEDFYLMNIPSLETP

SEQ ID NO: 44674 - protein, 30 aa, Artificial Sequence; identical to SEQ ID NO: 41696
  Cyclic GFR-binding peptide

SEQ ID NO: 44675 - protein, 23 aa, Artificial Sequence
  Cyclic GFR-binding peptide
GPIKGYYTVVGKDFYLINIPSLK

SEQ ID NO: 44676 - protein, 31 aa, Artificial Sequence; identical to SEQ ID NO: 41698
  Cyclic GFR-binding peptide
  MOD_RES (1)..(1): Xaa is C or S

SEQ ID NO: 44677 - protein, 31 aa, Artificial Sequence; identical to SEQ ID NO: 41699
  Cyclic GFR-binding peptide
  MOD_RES (2)..(4): Xaa is C or S

SEQ ID NO: 44678 - protein, 32 aa, Artificial Sequence; identical to SEQ ID NO: 41700
  Cyclic GFR-binding peptide
  MOD_RES (31)..(32): Xaa is C or S

SEQ ID NO: 44679 - protein, 36 aa, Artificial Sequence; identical to SEQ ID NO: 41701
  Cyclic GFR-binding peptide
  MOD_RES (31)..(32): Xaa is C or S

SEQ ID NO: 44680 - protein, 36 aa, Artificial Sequence; identical to SEQ ID NO: 41702
  Cyclic GFR-binding peptide
  MOD_RES (1)..(32)..(33): Xaa is C or S

SEQ ID NO: 44681 - protein, 35 aa, Artificial Sequence; identical to SEQ ID NO: 41703
  Cyclic GFR-binding peptide
  MOD_RES (1)..(33)..(34): Xaa is C or S

SEQ ID NO: 44682 - protein, 29 aa, Artificial Sequence
  Cyclic GFR-binding peptide
  MOD_RES (28)..(29): Xaa is C or S
MNPIKGYIVNNSSDFYLVNIPSLKTPAXX

SEQ ID NO: 44683 - protein, 31 aa, Artificial Sequence; identical to SEQ ID NO: 41705
  Cyclic GFR-binding peptide
  MOD_RES (31)..(31): Xaa is C or S

SEQ ID NO: 44684 - protein, 30 aa, Artificial Sequence; identical to SEQ ID NO: 41706
  Cyclic GFR-binding peptide
  MOD_RES (28)..(29): Xaa is C or S

SEQ ID NO: 44685 - protein, 24 aa, Artificial Sequence
  Cyclic GFR-binding peptide
SMGEPIKGYTPVGMDDFYLVNIPS

SEQ ID NO: 44686 - protein, 33 aa, Artificial Sequence; identical to SEQ ID NO: 41708
  Cyclic GFR-binding peptide
  MOD_RES (1)..(33): Xaa is C or S

SEQ ID NO: 44687 - protein, 35 aa, Artificial Sequence; identical to SEQ ID NO: 41709
  Cyclic GFR-binding peptide
  MOD_RES (30)..(30): Xaa is C or S

SEQ ID NO: 44688 - protein, 29 aa, Artificial Sequence
  Cyclic GFR-binding peptide
  MOD_RES (29)..(29): Xaa is C or S
VMNPIKGYIVNNSSDFYLVNIPSLKTPAX

SEQ ID NO: 44689 - protein, 31 aa, Artificial Sequence; identical to SEQ ID NO: 41711
  Cyclic GFR-binding peptide
  MOD_RES (1)..(3): Xaa is C or S

SEQ ID NO: 44690 - protein, 40 aa, Artificial Sequence; identical to SEQ ID NO: 41712
  Cyclic GFR-binding peptide
  MOD_RES (2)..(4)..(36)..(37): Xaa is C or S

SEQ ID NO: 44691 - protein, 34 aa, Artificial Sequence; identical to SEQ ID NO: 41713
  Cyclic GFR-binding peptide
  MOD_RES (31)..(32): Xaa is C or S

SEQ ID NO: 44692 - protein, 24 aa, Artificial Sequence
  Cyclic GFR-binding peptide
EVIMPIKGYLLVRGNDFYLMNIPS

SEQ ID NO: 44693 - protein, 32 aa, Artificial Sequence; identical to SEQ ID NO: 41715
  Cyclic GFR-binding peptide
  MOD_RES (2)..(2): Xaa is C or S

SEQ ID NO: 44694 - protein, 34 aa, Artificial Sequence; identical to SEQ ID NO: 41716
  Cyclic GFR-binding peptide
  MOD_RES (28)..(29): Xaa is C or S

SEQ ID NO: 44695 - protein, 32 aa, Artificial Sequence; identical to SEQ ID NO: 41717
  Cyclic GFR-binding peptide
  MOD_RES (1)..(3): Xaa is C or S

SEQ ID NO: 44696 - protein, 26 aa, Artificial Sequence
  Cyclic GFR-binding peptide
EVIMPIKGYLLVRGNDFYLMNIPSTK

SEQ ID NO: 44697 - protein, 36 aa, Artificial Sequence; identical to SEQ ID NO: 41719
  Cyclic GFR-binding peptide
  MOD_RES (1)..(33)..(34): Xaa is C or S

SEQ ID NO: 44698 - protein, 22 aa, Artificial Sequence
  Cyclic GFR-binding peptide
MDPIKGYVVNNAADFYLINIPS

SEQ ID NO: 44699 - protein, 38 aa, Artificial Sequence; identical to SEQ ID NO: 41721
  Cyclic GFR-binding peptide
  MOD_RES (1)..(3)..(35)..(36): Xaa is C or S

SEQ ID NO: 44700 - protein, 30 aa, Artificial Sequence; identical to SEQ ID NO: 41722
  Cyclic GFR-binding peptide
  MOD_RES (2)..(2): Xaa is C or S

SEQ ID NO: 44701 - protein, 33 aa, Artificial Sequence; identical to SEQ ID NO: 41723
  Cyclic GFR-binding peptide
  MOD_RES (2)..(4): Xaa is C or S

SEQ ID NO: 44702 - protein, 37 aa, Artificial Sequence; identical to SEQ ID NO: 41724
  Cyclic GFR-binding peptide
  MOD_RES (31)..(32): Xaa is C or S

SEQ ID NO: 44703 - protein, 28 aa, Artificial Sequence
  Cyclic GFR-binding peptide
  MOD_RES (2)..(2): Xaa is C or S
GXGEVVMDPIKGYVVKENEDFYLMNIPS

SEQ ID NO: 44704 - protein, 22 aa, Artificial Sequence
  Cyclic GFR-binding peptide
MNPIKGYIVNNSSDFYLVNIPS

SEQ ID NO: 44705 - protein, 25 aa, Artificial Sequence
  Cyclic GFR-binding peptide
PIKGYVVKDYEDFYLMNIPSLETPV

SEQ ID NO: 44706 - protein, 38 aa, Artificial Sequence; identical to SEQ ID NO: 41728
  Cyclic GFR-binding peptide
  MOD_RES (2)..(4)..(36)..(37): Xaa is C or S

SEQ ID NO: 44707 - protein, 23 aa, Artificial Sequence
  Cyclic GFR-binding peptide
MNPIKGYIVNSSDDFYLVNIPSL

SEQ ID NO: 44708 - protein, 35 aa, Artificial Sequence; identical to SEQ ID NO: 41730
  Cyclic GFR-binding peptide
  MOD_RES (30)..(31): Xaa is C or S

SEQ ID NO: 44709 - protein, 33 aa, Artificial Sequence; identical to SEQ ID NO: 41731
  Cyclic GFR-binding peptide
  MOD_RES (1)..(3): Xaa is C or S

SEQ ID NO: 44710 - protein, 27 aa, Artificial Sequence
  Cyclic GFR-binding peptide
  MOD_RES (1)..(1): Xaa is C or S
XARVVMNPIKGYIVNSSDDFYLVNIPS

SEQ ID NO: 44711 - protein, 25 aa, Artificial Sequence
  Cyclic GFR-binding peptide
SVAMGPIKGYYTVVGKDFYLINIPS

SEQ ID NO: 44712 - protein, 31 aa, Artificial Sequence; identical to SEQ ID NO: 41734
  Cyclic GFR-binding peptide
  MOD_RES (27)..(28): Xaa is C or S

SEQ ID NO: 44713 - protein, 39 aa, Artificial Sequence; identical to SEQ ID NO: 41735
  Cyclic GFR-binding peptide
  MOD_RES (2)..(4)..(36): Xaa is C or S

SEQ ID NO: 44714 - protein, 28 aa, Artificial Sequence
  Cyclic GFR-binding peptide
  MOD_RES (27)..(28): Xaa is C or S
DPIKGYVVNNASDFYLINIPSLRTPVXX

SEQ ID NO: 44715 - protein, 29 aa, Artificial Sequence
  Cyclic GFR-binding peptide
SRVVMNPIKGYIVNSSDDFYLVNIPSLKT

SEQ ID NO: 44716 - protein, 32 aa, Artificial Sequence; identical to SEQ ID NO: 41738
  Cyclic GFR-binding peptide
  MOD_RES (27)..(28): Xaa is C or S

SEQ ID NO: 44717 - protein, 27 aa, Artificial Sequence
  Cyclic GFR-binding peptide
  MOD_RES (26)..(27): Xaa is C or S
PIKGYVVNNAADFYLINIPSLRAPVXX

SEQ ID NO: 44718 - protein, 39 aa, Artificial Sequence; identical to SEQ ID NO: 41740
  Cyclic GFR-binding peptide
  MOD_RES (2)..(34)..(35): Xaa is C or S

SEQ ID NO: 44719 - protein, 39 aa, Artificial Sequence; identical to SEQ ID NO: 41741
  Cyclic GFR-binding peptide
  MOD_RES (1)..(33)..(34): Xaa is C or S

SEQ ID NO: 44720 - protein, 30 aa, Artificial Sequence; identical to SEQ ID NO: 41742
  Cyclic GFR-binding peptide
  MOD_RES (26)..(26): Xaa is C or S

SEQ ID NO: 44721 - protein, 24 aa, Artificial Sequence
  Cyclic GFR-binding peptide
AMGPIKGYYTVVGKDFYLINIPSL

SEQ ID NO: 44722 - protein, 40 aa, Artificial Sequence; identical to SEQ ID NO: 41744
  Cyclic GFR-binding peptide
  MOD_RES (2)..(4)..(37)..(38): Xaa is C or S

SEQ ID NO: 44723 - protein, 30 aa, Artificial Sequence; identical to SEQ ID NO: 41745
  Cyclic GFR-binding peptide
  MOD_RES (1)..(3): Xaa is C or S

SEQ ID NO: 44724 - protein, 29 aa, Artificial Sequence
  Cyclic GFR-binding peptide
VVMDPIKGYVVNNASDFYLINIPSLRTPV

SEQ ID NO: 44725 - protein, 37 aa, Artificial Sequence; identical to SEQ ID NO: 41747
  Cyclic GFR-binding peptide
  MOD_RES (32)..(33): Xaa is C or S

SEQ ID NO: 44726 - protein, 37 aa, Artificial Sequence; identical to SEQ ID NO: 41748
  Cyclic GFR-binding peptide
  MOD_RES (31)..(32): Xaa is C or S

SEQ ID NO: 44727 - protein, 31 aa, Artificial Sequence; identical to SEQ ID NO: 41749
  Cyclic GFR-binding peptide
  MOD_RES (1)..(3): Xaa is C or S

SEQ ID NO: 44728 - protein, 31 aa, Artificial Sequence; identical to SEQ ID NO: 41750
  Cyclic GFR-binding peptide
  MOD_RES (26)..(27): Xaa is C or S

SEQ ID NO: 44729 - protein, 26 aa, Artificial Sequence
  Cyclic GFR-binding peptide
AVSMGEPIKGYTPVGMDDFYLVNIPS

SEQ ID NO: 44730 - protein, 34 aa, Artificial Sequence; identical to SEQ ID NO: 41752
  Cyclic GFR-binding peptide
  MOD_RES (31)..(32): Xaa is C or S

SEQ ID NO: 44731 - protein, 33 aa, Artificial Sequence; identical to SEQ ID NO: 41753
  Cyclic GFR-binding peptide
  MOD_RES (29)..(30): Xaa is C or S

SEQ ID NO: 44732 - protein, 37 aa, Artificial Sequence; identical to SEQ ID NO: 41754
  Cyclic GFR-binding peptide
  MOD_RES (32)..(33): Xaa is C or S

SEQ ID NO: 44733 - protein, 34 aa, Artificial Sequence; identical to SEQ ID NO: 41755
  Cyclic GFR-binding peptide
  MOD_RES (29)..(30): Xaa is C or S

SEQ ID NO: 44734 - protein, 25 aa, Artificial Sequence
  Cyclic GFR-binding peptide
VVMDPIKGYVVNNASDFYLINIPSL

SEQ ID NO: 44735 - protein, 34 aa, Artificial Sequence; identical to SEQ ID NO: 41757
  Cyclic GFR-binding peptide
  MOD_RES (30)..(31): Xaa is C or S

SEQ ID NO: 44736 - protein, 31 aa, Artificial Sequence; identical to SEQ ID NO: 41758
  Cyclic GFR-binding peptide
  MOD_RES (29)..(30): Xaa is C or S

SEQ ID NO: 44737 - protein, 27 aa, Artificial Sequence
  Cyclic GFR-binding peptide
  MOD_RES (1)..(1): Xaa is C or S
XSEVVMDPIKGYVVNNASDFYLINIPS

SEQ ID NO: 44738 - protein, 33 aa, Artificial Sequence; identical to SEQ ID NO: 41760
  Cyclic GFR-binding peptide
  MOD_RES (32)..(33): Xaa is C or S

SEQ ID NO: 44739 - protein, 32 aa, Artificial Sequence; identical to SEQ ID NO: 41761
  Cyclic GFR-binding peptide
  MOD_RES (28)..(29): Xaa is C or S

SEQ ID NO: 44740 - protein, 37 aa, Artificial Sequence; identical to SEQ ID NO: 41762
  Cyclic GFR-binding peptide
  MOD_RES (2)..(4)..(36)..(37): Xaa is C or S

SEQ ID NO: 44741 - protein, 32 aa, Artificial Sequence; identical to SEQ ID NO: 41763
  Cyclic GFR-binding peptide
  MOD_RES (31)..(32): Xaa is C or S

SEQ ID NO: 44742 - protein, 30 aa, Artificial Sequence; identical to SEQ ID NO: 41764
  Cyclic GFR-binding peptide

SEQ ID NO: 44743 - protein, 35 aa, Artificial Sequence; identical to SEQ ID NO: 41765
  Cyclic GFR-binding peptide
  MOD_RES (2)..(4)..(35): Xaa is C or S

SEQ ID NO: 44744 - protein, 31 aa, Artificial Sequence; identical to SEQ ID NO: 41766
  Cyclic GFR-binding peptide
  MOD_RES (2)..(4): Xaa is C or S

SEQ ID NO: 44745 - protein, 28 aa, Artificial Sequence
  Cyclic GFR-binding peptide
  MOD_RES (1)..(1): Xaa is C or S
XEEVIMPIKGYLLVRGNDFYLMNIPSTK

SEQ ID NO: 44746 - protein, 25 aa, Artificial Sequence
  Cyclic GFR-binding peptide
PIKGYIVNSSDDFYLVNIPSLQTPA

SEQ ID NO: 44747 - protein, 38 aa, Artificial Sequence; identical to SEQ ID NO: 41769
  Cyclic GFR-binding peptide
  MOD_RES (1)..(34)..(35): Xaa is C or S

SEQ ID NO: 44748 - protein, 33 aa, Artificial Sequence; identical to SEQ ID NO: 41770
  Cyclic GFR-binding peptide
  MOD_RES (31)..(31): Xaa is C or S

SEQ ID NO: 44749 - protein, 29 aa, Artificial Sequence
  Cyclic GFR-binding peptide
  MOD_RES (26)..(27): Xaa is C or S
PIKGYYTVVGKDFYLINIPSLKTPVXXAK

SEQ ID NO: 44750 - protein, 25 aa, Artificial Sequence
  Cyclic GFR-binding peptide
VAMGPIKGYYTVVGKDFYLINIPSL

SEQ ID NO: 44751 - protein, 39 aa, Artificial Sequence; identical to SEQ ID NO: 41773
  Cyclic GFR-binding peptide
  MOD_RES (2)..(34)..(35): Xaa is C or S

SEQ ID NO: 44752 - protein, 35 aa, Artificial Sequence; identical to SEQ ID NO: 41774
  Cyclic GFR-binding peptide
  MOD_RES (1)..(3)..(35): Xaa is C or S

SEQ ID NO: 44753 - protein, 42 aa, Artificial Sequence; identical to SEQ ID NO: 41775
  Cyclic GFR-binding peptide
  MOD_RES (2)..(4)..(36)..(37): Xaa is C or S

SEQ ID NO: 44754 - protein, 24 aa, Artificial Sequence
  Cyclic GFR-binding peptide
VMDPIKGYVVKENEDFYLMNIPSL

SEQ ID NO: 44755 - protein, 33 aa, Artificial Sequence; identical to SEQ ID NO: 41777
  Cyclic GFR-binding peptide
  MOD_RES (27)..(28): Xaa is C or S

SEQ ID NO: 44756 - protein, 42 aa, Artificial Sequence; identical to SEQ ID NO: 41778
  Cyclic GFR-binding peptide
  MOD_RES (2)..(4)..(36)..(37): Xaa is C or S

SEQ ID NO: 44757 - protein, 33 aa, Artificial Sequence; identical to SEQ ID NO: 41779
  Cyclic GFR-binding peptide
  MOD_RES (2)..(4): Xaa is C or S

SEQ ID NO: 44758 - protein, 33 aa, Artificial Sequence; identical to SEQ ID NO: 41780
  Cyclic GFR-binding peptide
  MOD_RES (30)..(31): Xaa is C or S

SEQ ID NO: 44759 - protein, 35 aa, Artificial Sequence; identical to SEQ ID NO: 41781
  Cyclic GFR-binding peptide
  MOD_RES (1)..(33): Xaa is C or S

SEQ ID NO: 44760 - protein, 30 aa, Artificial Sequence; identical to SEQ ID NO: 41782
  Cyclic GFR-binding peptide
  MOD_RES (30)..(30): Xaa is C or S

SEQ ID NO: 44761 - protein, 31 aa, Artificial Sequence; identical to SEQ ID NO: 41783
  Cyclic GFR-binding peptide
  MOD_RES (2)..(4): Xaa is C or S

SEQ ID NO: 44762 - protein, 28 aa, Artificial Sequence
  Cyclic GFR-binding peptide
  MOD_RES (28)..(28): Xaa is C or S
MDPIKGYVVNNAADFYLINIPSLRAPVX

SEQ ID NO: 44763 - protein, 31 aa, Artificial Sequence; identical to SEQ ID NO: 41785
  Cyclic GFR-binding peptide
  MOD_RES (27)..(28): Xaa is C or S

SEQ ID NO: 44764 - protein, 32 aa, Artificial Sequence; identical to SEQ ID NO: 41786
  Cyclic GFR-binding peptide
  MOD_RES (2)..(4): Xaa is C or S

SEQ ID NO: 44765 - protein, 27 aa, Artificial Sequence
  Cyclic GFR-binding peptide
EVVMDPIKGYVVNNAADFYLINIPSLR

SEQ ID NO: 44766 - protein, 32 aa, Artificial Sequence; identical to SEQ ID NO: 41788
  Cyclic GFR-binding peptide
  MOD_RES (29)..(30): Xaa is C or S

SEQ ID NO: 44767 - protein, 30 aa, Artificial Sequence; identical to SEQ ID NO: 41789
  Cyclic GFR-binding peptide

SEQ ID NO: 44768 - protein, 27 aa, Artificial Sequence
  Cyclic GFR-binding peptide
VVMNPIKGYIVNSSDDFYLVNIPSLKT

SEQ ID NO: 44769 - protein, 23 aa, Artificial Sequence
  Cyclic GFR-binding peptide
MDPIKGYVVNNASDFYLINIPSL

SEQ ID NO: 44770 - protein, 34 aa, Artificial Sequence; identical to SEQ ID NO: 41792
  Cyclic GFR-binding peptide
  MOD_RES (28)..(29): Xaa is C or S

SEQ ID NO: 44771 - protein, 28 aa, Artificial Sequence
  Cyclic GFR-binding peptide
  MOD_RES (1)..(1): Xaa is C or S
XESVAMGPIKGYYTVVGKDFYLINIPSL

SEQ ID NO: 44772 - protein, 31 aa, Artificial Sequence; identical to SEQ ID NO: 41794
  Cyclic GFR-binding peptide

SEQ ID NO: 44773 - protein, 27 aa, Artificial Sequence
  Cyclic GFR-binding peptide
  MOD_RES (27)..(27): Xaa is C or S
EPIKGYVVKDYEDFYLMNIPSLETPVX

SEQ ID NO: 44774 - protein, 25 aa, Artificial Sequence
  Cyclic GFR-binding peptide
VMEPIKGYVVKDYEDFYLMNIPSLE

SEQ ID NO: 44775 - protein, 31 aa, Artificial Sequence; identical to SEQ ID NO: 41797
  Cyclic GFR-binding peptide
  MOD_RES (2)..(2): Xaa is C or S

SEQ ID NO: 44776 - protein, 21 aa, Artificial Sequence
  Cyclic GFR-binding peptide
PIKGYLLVRGNDFYLMNIPST

SEQ ID NO: 44777 - protein, 26 aa, Artificial Sequence
  Cyclic GFR-binding peptide
VVMNPIKGYIVNSSDDFYLVNIPSLQ

SEQ ID NO: 44778 - protein, 38 aa, Artificial Sequence; identical to SEQ ID NO: 41800
  Cyclic GFR-binding peptide
  MOD_RES (1)..(3)..(34)..(35): Xaa is C or S

SEQ ID NO: 44779 - protein, 37 aa, Artificial Sequence; identical to SEQ ID NO: 41801
  Cyclic GFR-binding peptide
  MOD_RES (2)..(4)..(36)..(37): Xaa is C or S

SEQ ID NO: 44780 - protein, 38 aa, Artificial Sequence; identical to SEQ ID NO: 41802
  Cyclic GFR-binding peptide
  MOD_RES (1)..(32)..(33): Xaa is C or S

SEQ ID NO: 44781 - protein, 29 aa, Artificial Sequence
  Cyclic GFR-binding peptide
  MOD_RES (29)..(29): Xaa is C or S
AMGPIKGYYTVVGKDFYLINIPSLKTPVX

SEQ ID NO: 44782 - protein, 29 aa, Artificial Sequence
  Cyclic GFR-binding peptide
  MOD_RES (1)..(1): Xaa is C or S
XEAVSMGEPIKGYTPVGMDDFYLVNIPSL

SEQ ID NO: 44783 - protein, 34 aa, Artificial Sequence; identical to SEQ ID NO: 41805
  Cyclic GFR-binding peptide
  MOD_RES (2)..(34): Xaa is C or S

SEQ ID NO: 44784 - protein, 29 aa, Artificial Sequence
  Cyclic GFR-binding peptide
  MOD_RES (27)..(28): Xaa is C or S
DPIKGYVVKENEDFYLMNIPSLETPVXXA

SEQ ID NO: 44785 - protein, 25 aa, Artificial Sequence
  Cyclic GFR-binding peptide
KVVMNPIKGYIVNNSSDFYLVNIPS

SEQ ID NO: 44786 - protein, 25 aa, Artificial Sequence
  Cyclic GFR-binding peptide
VMDPIKGYVVNNASDFYLINIPSLR

SEQ ID NO: 44787 - protein, 26 aa, Artificial Sequence
  Cyclic GFR-binding peptide
SMGEPIKGYTPVGMDDFYLVNIPSLK

SEQ ID NO: 44788 - protein, 23 aa, Artificial Sequence
  Cyclic GFR-binding peptide
PIKGYIVNNSSDFYLVNIPSLKT

SEQ ID NO: 44789 - protein, 25 aa, Artificial Sequence
  Cyclic GFR-binding peptide
DPIKGYVVKENEDFYLMNIPSLETP

SEQ ID NO: 44790 - protein, 33 aa, Artificial Sequence; identical to SEQ ID NO: 41812
  Cyclic GFR-binding peptide
  MOD_RES (29)..(30): Xaa is C or S

SEQ ID NO: 44791 - protein, 30 aa, Artificial Sequence; identical to SEQ ID NO: 41813
  Cyclic GFR-binding peptide

SEQ ID NO: 44792 - protein, 31 aa, Artificial Sequence; identical to SEQ ID NO: 41814
  Cyclic GFR-binding peptide
  MOD_RES (1)..(3): Xaa is C or S

SEQ ID NO: 44793 - protein, 30 aa, Artificial Sequence; identical to SEQ ID NO: 41815
  Cyclic GFR-binding peptide
  MOD_RES (28)..(29): Xaa is C or S

SEQ ID NO: 44794 - protein, 39 aa, Artificial Sequence; identical to SEQ ID NO: 41816
  Cyclic GFR-binding peptide
  MOD_RES (1)..(33): Xaa is C or S

SEQ ID NO: 44795 - protein, 32 aa, Artificial Sequence; identical to SEQ ID NO: 41817
  Cyclic GFR-binding peptide
  MOD_RES (32)..(32): Xaa is C or S

SEQ ID NO: 44796 - protein, 36 aa, Artificial Sequence; identical to SEQ ID NO: 41818
  Cyclic GFR-binding peptide
  MOD_RES (2)..(34): Xaa is C or S

SEQ ID NO: 44797 - protein, 26 aa, Artificial Sequence
  Cyclic GFR-binding peptide
MPIKGYLLVRGNDFYLMNIPSTKVPA

SEQ ID NO: 44798 - protein, 33 aa, Artificial Sequence; identical to SEQ ID NO: 41820
  Cyclic GFR-binding peptide
  MOD_RES (30)..(30): Xaa is C or S

SEQ ID NO: 44799 - protein, 28 aa, Artificial Sequence
  Cyclic GFR-binding peptide
SRVVMNPIKGYIVNSSDDFYLVNIPSLK

SEQ ID NO: 44800 - protein, 25 aa, Artificial Sequence
  Cyclic GFR-binding peptide
MDPIKGYVVNNASDFYLINIPSLRT

SEQ ID NO: 44801 - protein, 30 aa, Artificial Sequence; identical to SEQ ID NO: 41823
  Cyclic GFR-binding peptide
  MOD_RES (30)..(30): Xaa is C or S

SEQ ID NO: 44802 - protein, 32 aa, Artificial Sequence; identical to SEQ ID NO: 41824
  Cyclic GFR-binding peptide
  MOD_RES (1)..(3): Xaa is C or S

SEQ ID NO: 44803 - protein, 33 aa, Artificial Sequence; identical to SEQ ID NO: 41825
  Cyclic GFR-binding peptide
  MOD_RES (31)..(32): Xaa is C or S

SEQ ID NO: 44804 - protein, 37 aa, Artificial Sequence; identical to SEQ ID NO: 41826
  Cyclic GFR-binding peptide
  MOD_RES (1)..(3)..(36)..(37): Xaa is C or S

SEQ ID NO: 44805 - protein, 24 aa, Artificial Sequence
  Cyclic GFR-binding peptide
MEPIKGYVVKDYEDFYLMNIPSLE

SEQ ID NO: 44806 - protein, 29 aa, Artificial Sequence
  Cyclic GFR-binding peptide
RVVMNPIKGYIVNSSDDFYLVNIPSLKTP

SEQ ID NO: 44807 - protein, 39 aa, Artificial Sequence; identical to SEQ ID NO: 41829
  Cyclic GFR-binding peptide
  MOD_RES (6)..(7)..(39): Xaa is C or S

SEQ ID NO: 44808 - protein, 30 aa, Artificial Sequence; identical to SEQ ID NO: 41830
  Cyclic GFR-binding peptide
  MOD_RES (4)..(5): Xaa is C or S

SEQ ID NO: 44809 - protein, 37 aa, Artificial Sequence; identical to SEQ ID NO: 41831
  Cyclic GFR-binding peptide
  MOD_RES (5)..(6): Xaa is C or S

SEQ ID NO: 44810 - protein, 27 aa, Artificial Sequence
  Cyclic GFR-binding peptide
TELSPINMLYFDEYDKVVYGKIPEMVV

SEQ ID NO: 44811 - protein, 22 aa, Artificial Sequence
  Cyclic GFR-binding peptide
LSPINMLYFDEYDKVVYGKIPE

SEQ ID NO: 44812 - protein, 32 aa, Artificial Sequence; identical to SEQ ID NO: 41834
  Cyclic GFR-binding peptide
  MOD_RES (31)..(31): Xaa is C or S

SEQ ID NO: 44813 - protein, 35 aa, Artificial Sequence; identical to SEQ ID NO: 41835
  Cyclic GFR-binding peptide
  MOD_RES (3)..(4): Xaa is C or S

SEQ ID NO: 44814 - protein, 25 aa, Artificial Sequence
  Cyclic GFR-binding peptide
VPTKLSPINVLYFDDMGVPTYGKIP

SEQ ID NO: 44815 - protein, 27 aa, Artificial Sequence
  Cyclic GFR-binding peptide
  MOD_RES (1)..(1): Xaa is C or S
XVPTELSPINMLYFDENEKVVYGKIPD

SEQ ID NO: 44816 - protein, 29 aa, Artificial Sequence
  Cyclic GFR-binding peptide
VPARLSPINILYFDAANNVVYGKIPDMVV

SEQ ID NO: 44817 - protein, 39 aa, Artificial Sequence; identical to SEQ ID NO: 41839
  Cyclic GFR-binding peptide
  MOD_RES (3)..(4)..(36)..(38): Xaa is C or S

SEQ ID NO: 44818 - protein, 35 aa, Artificial Sequence; identical to SEQ ID NO: 41840
  Cyclic GFR-binding peptide
  MOD_RES (2)..(3)..(35): Xaa is C or S

SEQ ID NO: 44819 - protein, 30 aa, Artificial Sequence; identical to SEQ ID NO: 41841
  Cyclic GFR-binding peptide

SEQ ID NO: 44820 - protein, 27 aa, Artificial Sequence
  Cyclic GFR-binding peptide
  MOD_RES (1)..(2): Xaa is C or S
XXAPTKLSPINVLYFDSSNNVIYGKIP

SEQ ID NO: 44821 - protein, 34 aa, Artificial Sequence; identical to SEQ ID NO: 41843
  Cyclic GFR-binding peptide
  MOD_RES (4)..(5): Xaa is C or S

SEQ ID NO: 44822 - protein, 40 aa, Artificial Sequence; identical to SEQ ID NO: 41844
  Cyclic GFR-binding peptide
  MOD_RES (5)..(6)..(38)..(40): Xaa is C or S

SEQ ID NO: 44823 - protein, 37 aa, Artificial Sequence; identical to SEQ ID NO: 41845
  Cyclic GFR-binding peptide
  MOD_RES (4)..(36): Xaa is C or S

SEQ ID NO: 44824 - protein, 31 aa, Artificial Sequence; identical to SEQ ID NO: 41846
  Cyclic GFR-binding peptide
  MOD_RES (5)..(6): Xaa is C or S

SEQ ID NO: 44825 - protein, 32 aa, Artificial Sequence; identical to SEQ ID NO: 41847
  Cyclic GFR-binding peptide
  MOD_RES (29)..(31): Xaa is C or S

SEQ ID NO: 44826 - protein, 34 aa, Artificial Sequence; identical to SEQ ID NO: 41848
  Cyclic GFR-binding peptide
  MOD_RES (1)..(33): Xaa is C or S

SEQ ID NO: 44827 - protein, 27 aa, Artificial Sequence
  Cyclic GFR-binding peptide
  MOD_RES (26)..(26): Xaa is C or S
SPINMLYFDNGRVLLYGKIPMIVEEXG

SEQ ID NO: 44828 - protein, 35 aa, Artificial Sequence; identical to SEQ ID NO: 41850
  Cyclic GFR-binding peptide
  MOD_RES (3)..(4): Xaa is C or S

SEQ ID NO: 44829 - protein, 23 aa, Artificial Sequence
  Cyclic GFR-binding peptide
LSPINMLYFDENEKVVYGKIPDM

SEQ ID NO: 44830 - protein, 29 aa, Artificial Sequence
  Cyclic GFR-binding peptide
APVKTSPINMLYFDNGRVLLYGKIPMIVE

SEQ ID NO: 44831 - protein, 34 aa, Artificial Sequence; identical to SEQ ID NO: 41853
  Cyclic GFR-binding peptide
  MOD_RES (4)..(5): Xaa is C or S

SEQ ID NO: 44832 - protein, 36 aa, Artificial Sequence; identical to SEQ ID NO: 41854
  Cyclic GFR-binding peptide
  MOD_RES (5)..(6): Xaa is C or S

SEQ ID NO: 44833 - protein, 22 aa, Artificial Sequence
  Cyclic GFR-binding peptide
LSPINILYFDAANNVVYGKIPD

SEQ ID NO: 44834 - protein, 32 aa, Artificial Sequence; identical to SEQ ID NO: 41856
  Cyclic GFR-binding peptide
  MOD_RES (3)..(4): Xaa is C or S

SEQ ID NO: 44835 - protein, 39 aa, Artificial Sequence; identical to SEQ ID NO: 41857
  Cyclic GFR-binding peptide
  MOD_RES (2)..(3)..(36)..(38): Xaa is C or S

SEQ ID NO: 44836 - protein, 25 aa, Artificial Sequence
  Cyclic GFR-binding peptide
TKLSPINILYFDKGVVTYYGKIPGM

SEQ ID NO: 44837 - protein, 36 aa, Artificial Sequence; identical to SEQ ID NO: 41859
  Cyclic GFR-binding peptide
  MOD_RES (4)..(5): Xaa is C or S

SEQ ID NO: 44838 - protein, 36 aa, Artificial Sequence; identical to SEQ ID NO: 41860
  Cyclic GFR-binding peptide
  MOD_RES (2)..(3)..(35): Xaa is C or S

SEQ ID NO: 44839 - protein, 21 aa, Artificial Sequence
  Cyclic GFR-binding peptide
LSPINVLYFDDMGVPTYGKIP

SEQ ID NO: 44840 - protein, 42 aa, Artificial Sequence; identical to SEQ ID NO: 41862
  Cyclic GFR-binding peptide
  MOD_RES (5)..(6)..(39)..(41): Xaa is C or S

SEQ ID NO: 44841 - protein, 30 aa, Artificial Sequence; identical to SEQ ID NO: 41863
  Cyclic GFR-binding peptide

SEQ ID NO: 44842 - protein, 33 aa, Artificial Sequence; identical to SEQ ID NO: 41864
  Cyclic GFR-binding peptide
  MOD_RES (1)..(2): Xaa is C or S

SEQ ID NO: 44843 - protein, 27 aa, Artificial Sequence
  Cyclic GFR-binding peptide
VPTRLSPINILYFDSANNVVYGKIPDM

SEQ ID NO: 44844 - protein, 31 aa, Artificial Sequence; identical to SEQ ID NO: 41866
  Cyclic GFR-binding peptide
  MOD_RES (1)..(2): Xaa is C or S

SEQ ID NO: 44845 - protein, 35 aa, Artificial Sequence; identical to SEQ ID NO: 41867
  Cyclic GFR-binding peptide
  MOD_RES (1)..(33)..(35): Xaa is C or S

SEQ ID NO: 44846 - protein, 32 aa, Artificial Sequence; identical to SEQ ID NO: 41868
  Cyclic GFR-binding peptide
  MOD_RES (30)..(32): Xaa is C or S

SEQ ID NO: 44847 - protein, 39 aa, Artificial Sequence; identical to SEQ ID NO: 41869
  Cyclic GFR-binding peptide
  MOD_RES (3)..(4)..(36)..(38): Xaa is C or S

SEQ ID NO: 44848 - protein, 35 aa, Artificial Sequence; identical to SEQ ID NO: 41870
  Cyclic GFR-binding peptide
  MOD_RES (1)..(2)..(35): Xaa is C or S

SEQ ID NO: 44849 - protein, 30 aa, Artificial Sequence; identical to SEQ ID NO: 41871
  Cyclic GFR-binding peptide
  MOD_RES (28)..(30): Xaa is C or S

SEQ ID NO: 44850 - protein, 27 aa, Artificial Sequence
  Cyclic GFR-binding peptide
  MOD_RES (1)..(2): Xaa is C or S
XXVPTKLSPINILYFDKGVVTYYGKIP

SEQ ID NO: 44851 - protein, 38 aa, Artificial Sequence; identical to SEQ ID NO: 41873
  Cyclic GFR-binding peptide
  MOD_RES (5)..(6)..(37): Xaa is C or S

SEQ ID NO: 44852 - protein, 21 aa, Artificial Sequence
  Cyclic GFR-binding peptide
LSPINVLYFDDSSNVIYGKIP

SEQ ID NO: 44853 - protein, 29 aa, Artificial Sequence
  Cyclic GFR-binding peptide
  MOD_RES (27)..(29): Xaa is C or S
SPINILYFDKGVVTYYGKIPGMAVSEXGX

SEQ ID NO: 44854 - protein, 28 aa, Artificial Sequence
  Cyclic GFR-binding peptide
  MOD_RES (1)..(2): Xaa is C or S
XXVPTELSPINMLYFDENEKVVYGKIPD

SEQ ID NO: 44855 - protein, 29 aa, Artificial Sequence
  Cyclic GFR-binding peptide
PTELSPINMLYFDEYDKVVYGKIPEMVVE

SEQ ID NO: 44856 - protein, 27 aa, Artificial Sequence
  Cyclic GFR-binding peptide
QLSPINVLYFDDSSNVIYGKIPNMVVR

SEQ ID NO: 44857 - protein, 31 aa, Artificial Sequence; identical to SEQ ID NO: 41879
  Cyclic GFR-binding peptide
  MOD_RES (28)..(30): Xaa is C or S

SEQ ID NO: 44858 - protein, 29 aa, Artificial Sequence
  Cyclic GFR-binding peptide
  MOD_RES (29)..(29): Xaa is C or S
VKTSPINMLYFDNGRVLLYGKIPMIVEEX

SEQ ID NO: 44859 - protein, 23 aa, Artificial Sequence
  Cyclic GFR-binding peptide
SPINILYFDAANNVVYGKIPDMV

SEQ ID NO: 44860 - protein, 31 aa, Artificial Sequence; identical to SEQ ID NO: 41882
  Cyclic GFR-binding peptide
  MOD_RES (31)..(31): Xaa is C or S

SEQ ID NO: 44861 - protein, 26 aa, Artificial Sequence
  Cyclic GFR-binding peptide
SPINVLYFDDSSNVIYGKIPNMVVRS

SEQ ID NO: 44862 - protein, 26 aa, Artificial Sequence
  Cyclic GFR-binding peptide
VPTRLSPINILYFDSANNVVYGKIPD

SEQ ID NO: 44863 - protein, 22 aa, Artificial Sequence
  Cyclic GFR-binding peptide
SPINMLYFDEYDKVVYGKIPEM

SEQ ID NO: 44864 - protein, 31 aa, Artificial Sequence; identical to SEQ ID NO: 41886
  Cyclic GFR-binding peptide
  MOD_RES (3)..(4): Xaa is C or S

SEQ ID NO: 44865 - protein, 25 aa, Artificial Sequence
  Cyclic GFR-binding peptide
SPINILYFDAANNVVYGKIPDMVVE

SEQ ID NO: 44866 - protein, 39 aa, Artificial Sequence; identical to SEQ ID NO: 41888
  Cyclic GFR-binding peptide
  MOD_RES (6)..(7)..(39): Xaa is C or S

SEQ ID NO: 44867 - protein, 34 aa, Artificial Sequence; identical to SEQ ID NO: 41889
  Cyclic GFR-binding peptide
  MOD_RES (2)..(3): Xaa is C or S

SEQ ID NO: 44868 - protein, 27 aa, Artificial Sequence
  Cyclic GFR-binding peptide
VPTELSPINMLYFDENEKVVYGKIPDM

SEQ ID NO: 44869 - protein, 24 aa, Artificial Sequence
  Cyclic GFR-binding peptide
TKLSPINVLYFDDMGVPTYGKIPE

SEQ ID NO: 44870 - protein, 37 aa, Artificial Sequence; identical to SEQ ID NO: 41892
  Cyclic GFR-binding peptide
  MOD_RES (2)..(34)..(36): Xaa is C or S

SEQ ID NO: 44871 - protein, 24 aa, Artificial Sequence
  Cyclic GFR-binding peptide
TELSPINMLYFDEYDKVVYGKIPE

SEQ ID NO: 44872 - protein, 31 aa, Artificial Sequence; identical to SEQ ID NO: 41894
  Cyclic GFR-binding peptide
  MOD_RES (29)..(31): Xaa is C or S

SEQ ID NO: 44873 - protein, 39 aa, Artificial Sequence; identical to SEQ ID NO: 41895
  Cyclic GFR-binding peptide
  MOD_RES (3)..(4)..(36)..(38): Xaa is C or S

SEQ ID NO: 44874 - protein, 37 aa, Artificial Sequence; identical to SEQ ID NO: 41896
  Cyclic GFR-binding peptide
  MOD_RES (2)..(3)..(36): Xaa is C or S

SEQ ID NO: 44875 - protein, 30 aa, Artificial Sequence; identical to SEQ ID NO: 41897
  Cyclic GFR-binding peptide
  MOD_RES (29)..(29): Xaa is C or S

SEQ ID NO: 44876 - protein, 32 aa, Artificial Sequence; identical to SEQ ID NO: 41898
  Cyclic GFR-binding peptide
  MOD_RES (31)..(31): Xaa is C or S

SEQ ID NO: 44877 - protein, 34 aa, Artificial Sequence; identical to SEQ ID NO: 41899
  Cyclic GFR-binding peptide
  MOD_RES (1)..(32)..(34): Xaa is C or S

SEQ ID NO: 44878 - protein, 33 aa, Artificial Sequence; identical to SEQ ID NO: 41900
  Cyclic GFR-binding peptide
  MOD_RES (3)..(4): Xaa is C or S

SEQ ID NO: 44879 - protein, 36 aa, Artificial Sequence; identical to SEQ ID NO: 41901
  Cyclic GFR-binding peptide
  MOD_RES (1)..(33)..(35): Xaa is C or S

SEQ ID NO: 44880 - protein, 30 aa, Artificial Sequence; identical to SEQ ID NO: 41902
  Cyclic GFR-binding peptide
  MOD_RES (2)..(3): Xaa is C or S

SEQ ID NO: 44881 - protein, 29 aa, Artificial Sequence
  Cyclic GFR-binding peptide
  MOD_RES (27)..(29): Xaa is C or S
SPINILYFDSANNVVYGKIPDMVVESXGX

SEQ ID NO: 44882 - protein, 37 aa, Artificial Sequence; identical to SEQ ID NO: 41904
  Cyclic GFR-binding peptide
  MOD_RES (6)..(7): Xaa is C or S

SEQ ID NO: 44883 - protein, 31 aa, Artificial Sequence; identical to SEQ ID NO: 41905
  Cyclic GFR-binding peptide
  MOD_RES (3)..(4): Xaa is C or S

SEQ ID NO: 44884 - protein, 31 aa, Artificial Sequence; identical to SEQ ID NO: 41906
  Cyclic GFR-binding peptide
  MOD_RES (4)..(5): Xaa is C or S

SEQ ID NO: 44885 - protein, 23 aa, Artificial Sequence
  Cyclic GFR-binding peptide
TELSPINMLYFDENEKVVYGKIP

SEQ ID NO: 44886 - protein, 40 aa, Artificial Sequence; identical to SEQ ID NO: 41908
  Cyclic GFR-binding peptide
  MOD_RES (6)..(7)..(39): Xaa is C or S

SEQ ID NO: 44887 - protein, 26 aa, Artificial Sequence
  Cyclic GFR-binding peptide
PTELSPINMLYFDENEKVVYGKIPDM

SEQ ID NO: 44888 - protein, 34 aa, Artificial Sequence; identical to SEQ ID NO: 41910
  Cyclic GFR-binding peptide
  MOD_RES (6)..(7): Xaa is C or S

SEQ ID NO: 44889 - protein, 24 aa, Artificial Sequence
  Cyclic GFR-binding peptide
SPINMLYFDENEKVVYGKIPDMVV

SEQ ID NO: 44890 - protein, 35 aa, Artificial Sequence; identical to SEQ ID NO: 41912
  Cyclic GFR-binding peptide
  MOD_RES (1)..(33)..(35): Xaa is C or S

SEQ ID NO: 44891 - protein, 29 aa, Artificial Sequence
  Cyclic GFR-binding peptide
  MOD_RES (1)..(2): Xaa is C or S
XXVPTELSPINMLYFDENEKVVYGKIPDM

SEQ ID NO: 44892 - protein, 36 aa, Artificial Sequence; identical to SEQ ID NO: 41914
  Cyclic GFR-binding peptide
  MOD_RES (5)..(6): Xaa is C or S

SEQ ID NO: 44893 - protein, 28 aa, Artificial Sequence
  Cyclic GFR-binding peptide
  MOD_RES (2)..(3): Xaa is C or S
TXXVPTRLSPINILYFDSANNVVYGKIP

SEQ ID NO: 44894 - protein, 38 aa, Artificial Sequence; identical to SEQ ID NO: 41916
  Cyclic GFR-binding peptide
  MOD_RES (3)..(4)..(36)..(38): Xaa is C or S

SEQ ID NO: 44895 - protein, 26 aa, Artificial Sequence
  Cyclic GFR-binding peptide
APTKLSPINVLYFDSSNNVIYGKIPN

SEQ ID NO: 44896 - protein, 26 aa, Artificial Sequence
  Cyclic GFR-binding peptide
TELSPINMLYFDENEKVVYGKIPDMV

SEQ ID NO: 44897 - protein, 27 aa, Artificial Sequence
  Cyclic GFR-binding peptide
KLSPINILYFDKGVVTYYGKIPGMAVS

SEQ ID NO: 44898 - protein, 26 aa, Artificial Sequence
  Cyclic GFR-binding peptide
SPINVLYFDDSSNVIYGKIPNMVVRA

SEQ ID NO: 44899 - protein, 28 aa, Artificial Sequence
  Cyclic GFR-binding peptide
  MOD_RES (1)..(2): Xaa is C or S
XXAPTKLSPINVLYFDDSSNVIYGKIPN

SEQ ID NO: 44900 - protein, 39 aa, Artificial Sequence; identical to SEQ ID NO: 41922
  Cyclic GFR-binding peptide
  MOD_RES (6)..(38): Xaa is C or S

SEQ ID NO: 44901 - protein, 30 aa, Artificial Sequence; identical to SEQ ID NO: 41923
  Cyclic GFR-binding peptide
  MOD_RES (28)..(30): Xaa is C or S

SEQ ID NO: 44902 - protein, 30 aa, Artificial Sequence; identical to SEQ ID NO: 41924
  Cyclic GFR-binding peptide
  MOD_RES (1)..(1): Xaa is C or S

SEQ ID NO: 44903 - protein, 32 aa, Artificial Sequence; identical to SEQ ID NO: 41925
  Cyclic GFR-binding peptide
  MOD_RES (4)..(5): Xaa is C or S

SEQ ID NO: 44904 - protein, 40 aa, Artificial Sequence; identical to SEQ ID NO: 41926
  Cyclic GFR-binding peptide
  MOD_RES (6)..(7)..(39): Xaa is C or S

SEQ ID NO: 44905 - protein, 36 aa, Artificial Sequence; identical to SEQ ID NO: 41927
  Cyclic GFR-binding peptide
  MOD_RES (6)..(7): Xaa is C or S

SEQ ID NO: 44906 - protein, 27 aa, Artificial Sequence
  Cyclic GFR-binding peptide
PTKLSPINVLYFDDSSNVIYGKIPNMV

SEQ ID NO: 44907 - protein, 27 aa, Artificial Sequence
  Cyclic GFR-binding peptide
PTKLSPINVLYFDSSNNVIYGKIPNMV

SEQ ID NO: 44908 - protein, 32 aa, Artificial Sequence; identical to SEQ ID NO: 41930
  Cyclic GFR-binding peptide
  MOD_RES (1)..(1): Xaa is C or S

SEQ ID NO: 44909 - protein, 33 aa, Artificial Sequence; identical to SEQ ID NO: 41931
  Cyclic GFR-binding peptide
  MOD_RES (5)..(6): Xaa is C or S

SEQ ID NO: 44910 - protein, 37 aa, Artificial Sequence; identical to SEQ ID NO: 41932
  Cyclic GFR-binding peptide
  MOD_RES (3)..(4)..(36): Xaa is C or S

SEQ ID NO: 44911 - protein, 28 aa, Artificial Sequence
  Cyclic GFR-binding peptide
  MOD_RES (2)..(3): Xaa is C or S
AXXVPTKLSPINILYFDKGVVTYYGKIP

SEQ ID NO: 44912 - protein, 25 aa, Artificial Sequence
  Cyclic GFR-binding peptide
LSPINMLYFDEYDKVVYGKIPEMVV

SEQ ID NO: 44913 - protein, 24 aa, Artificial Sequence
  Cyclic GFR-binding peptide
SPINILYFDAANNVVYGKIPDMVV

SEQ ID NO: 44914 - protein, 40 aa, Artificial Sequence; identical to SEQ ID NO: 41936
  Cyclic GFR-binding peptide
  MOD_RES (5)..(6)..(38)..(40): Xaa is C or S

SEQ ID NO: 44915 - protein, 30 aa, Artificial Sequence; identical to SEQ ID NO: 41937
  Cyclic GFR-binding peptide
  MOD_RES (29)..(29): Xaa is C or S

SEQ ID NO: 44916 - protein, 32 aa, Artificial Sequence; identical to SEQ ID NO: 41938
  Cyclic GFR-binding peptide
  MOD_RES (1)..(1): Xaa is C or S

SEQ ID NO: 44917 - protein, 27 aa, Artificial Sequence
  Cyclic GFR-binding peptide
  MOD_RES (1)..(1): Xaa is C or S
XVPTKLSPINILYFDKGVVTYYGKIPG

SEQ ID NO: 44918 - protein, 31 aa, Artificial Sequence; identical to SEQ ID NO: 41940
  Cyclic GFR-binding peptide
  MOD_RES (5)..(6): Xaa is C or S

SEQ ID NO: 44919 - protein, 20 aa, Artificial Sequence
  Cyclic GFR-binding peptide
SPINILYFDSANNVVYGKIP

SEQ ID NO: 44920 - protein, 23 aa, Artificial Sequence
  Cyclic GFR-binding peptide
KLSPINVLYFDDMGVPTYGKIPE

SEQ ID NO: 44921 - protein, 37 aa, Artificial Sequence; identical to SEQ ID NO: 41943
  Cyclic GFR-binding peptide
  MOD_RES (5)..(6): Xaa is C or S

SEQ ID NO: 44922 - protein, 29 aa, Artificial Sequence
  Cyclic GFR-binding peptide
  MOD_RES (27)..(29): Xaa is C or S
SPINVLYFDSSNNVIYGKIPNMVVKAXGX

SEQ ID NO: 44923 - protein, 34 aa, Artificial Sequence; identical to SEQ ID NO: 41945
  Cyclic GFR-binding peptide
  MOD_RES (1)..(33): Xaa is C or S

SEQ ID NO: 44924 - protein, 29 aa, Artificial Sequence
  Cyclic GFR-binding peptide
  MOD_RES (1)..(1): Xaa is C or S
XAPVKTSPINMLYFDNGRVLLYGKIPMIV

SEQ ID NO: 44925 - protein, 28 aa, Artificial Sequence
  Cyclic GFR-binding peptide
  MOD_RES (1)..(1): Xaa is C or S
XAPTKLSPINVLYFDSSNNVIYGKIPNM

SEQ ID NO: 44926 - protein, 41 aa, Artificial Sequence; identical to SEQ ID NO: 41948
  Cyclic GFR-binding peptide
  MOD_RES (5)..(6)..(38)..(40): Xaa is C or S

SEQ ID NO: 44927 - protein, 29 aa, Artificial Sequence
  Cyclic GFR-binding peptide
  MOD_RES (3)..(3): Xaa is C or S
PTXAPTKLSPINVLYFDDSSNVIYGKIPN

SEQ ID NO: 44928 - protein, 27 aa, Artificial Sequence
  Cyclic GFR-binding peptide
PTKLSPINILYFDKGVVTYYGKIPGMA

SEQ ID NO: 44929 - protein, 34 aa, Artificial Sequence; identical to SEQ ID NO: 41951
  Cyclic GFR-binding peptide
  MOD_RES (3)..(4): Xaa is C or S

SEQ ID NO: 44930 - protein, 41 aa, Artificial Sequence; identical to SEQ ID NO: 41952
  Cyclic GFR-binding peptide
  MOD_RES (7)..(39)..(41): Xaa is C or S

SEQ ID NO: 44931 - protein, 30 aa, Artificial Sequence; identical to SEQ ID NO: 41953
  Cyclic GFR-binding peptide
  MOD_RES (27)..(29): Xaa is C or S

SEQ ID NO: 44932 - protein, 31 aa, Artificial Sequence; identical to SEQ ID NO: 41954
  Cyclic GFR-binding peptide
  MOD_RES (28)..(30): Xaa is C or S

SEQ ID NO: 44933 - protein, 20 aa, Artificial Sequence
  Cyclic GFR-binding peptide
SPINMLYFDNGRVLLYGKIP

SEQ ID NO: 44934 - protein, 35 aa, Artificial Sequence; identical to SEQ ID NO: 41956
  Cyclic GFR-binding peptide
  MOD_RES (4)..(5): Xaa is C or S

SEQ ID NO: 44935 - protein, 31 aa, Artificial Sequence; identical to SEQ ID NO: 41957
  Cyclic GFR-binding peptide
  MOD_RES (28)..(30): Xaa is C or S

SEQ ID NO: 44936 - protein, 41 aa, Artificial Sequence; identical to SEQ ID NO: 41958
  Cyclic GFR-binding peptide
  MOD_RES (6)..(7)..(39)..(41): Xaa is C or S

SEQ ID NO: 44937 - protein, 31 aa, Artificial Sequence; identical to SEQ ID NO: 41959
  Cyclic GFR-binding peptide
  MOD_RES (1)..(2): Xaa is C or S

SEQ ID NO: 44938 - protein, 30 aa, Artificial Sequence; identical to SEQ ID NO: 41960
  Cyclic GFR-binding peptide
  MOD_RES (1)..(2): Xaa is C or S

SEQ ID NO: 44939 - protein, 32 aa, Artificial Sequence; identical to SEQ ID NO: 41961
  Cyclic GFR-binding peptide
  MOD_RES (31)..(31): Xaa is C or S

SEQ ID NO: 44940 - protein, 38 aa, Artificial Sequence; identical to SEQ ID NO: 41962
  Cyclic GFR-binding peptide
  MOD_RES (5)..(6)..(38): Xaa is C or S

SEQ ID NO: 44941 - protein, 25 aa, Artificial Sequence
  Cyclic GFR-binding peptide
SPINMLYFDEYDKVVYGKIPEMVVE

SEQ ID NO: 44942 - protein, 35 aa, Artificial Sequence; identical to SEQ ID NO: 41964
  Cyclic GFR-binding peptide
  MOD_RES (4)..(5): Xaa is C or S

SEQ ID NO: 44943 - protein, 31 aa, Artificial Sequence; identical to SEQ ID NO: 41965
  Cyclic GFR-binding peptide
  MOD_RES (30)..(30): Xaa is C or S

SEQ ID NO: 44944 - protein, 21 aa, Artificial Sequence
  Cyclic GFR-binding peptide
SPINMLYFDEYDKVVYGKIPE

SEQ ID NO: 44945 - protein, 39 aa, Artificial Sequence; identical to SEQ ID NO: 41967
  Cyclic GFR-binding peptide
  MOD_RES (6)..(7): Xaa is C or S

SEQ ID NO: 44946 - protein, 31 aa, Artificial Sequence; identical to SEQ ID NO: 41968
  Cyclic GFR-binding peptide

SEQ ID NO: 44947 - protein, 32 aa, Artificial Sequence; identical to SEQ ID NO: 41969
  Cyclic GFR-binding peptide
  MOD_RES (4)..(5): Xaa is C or S

SEQ ID NO: 44948 - protein, 28 aa, Artificial Sequence
  Cyclic GFR-binding peptide
  MOD_RES (1)..(1): Xaa is C or S
XVPTKLSPINILYFDKGVVTYYGKIPGM

SEQ ID NO: 44949 - protein, 30 aa, Artificial Sequence; identical to SEQ ID NO: 41971
  Cyclic GFR-binding peptide
  MOD_RES (27)..(29): Xaa is C or S

SEQ ID NO: 44950 - protein, 32 aa, Artificial Sequence; identical to SEQ ID NO: 41972
  Cyclic GFR-binding peptide
  MOD_RES (2)..(3): Xaa is C or S

SEQ ID NO: 44951 - protein, 38 aa, Artificial Sequence; identical to SEQ ID NO: 41973
  Cyclic GFR-binding peptide
  MOD_RES (3)..(4)..(36)..(38): Xaa is C or S

SEQ ID NO: 44952 - protein, 32 aa, Artificial Sequence; identical to SEQ ID NO: 41974
  Cyclic GFR-binding peptide
  MOD_RES (29)..(31): Xaa is C or S

SEQ ID NO: 44953 - protein, 34 aa, Artificial Sequence; identical to SEQ ID NO: 41975
  Cyclic GFR-binding peptide
  MOD_RES (4)..(5): Xaa is C or S

SEQ ID NO: 44954 - protein, 34 aa, Artificial Sequence; identical to SEQ ID NO: 41976
  Cyclic GFR-binding peptide
  MOD_RES (1)..(33): Xaa is C or S

SEQ ID NO: 44955 - protein, 33 aa, Artificial Sequence; identical to SEQ ID NO: 41977
  Cyclic GFR-binding peptide
  MOD_RES (6)..(7): Xaa is C or S

SEQ ID NO: 44956 - protein, 35 aa, Artificial Sequence; identical to SEQ ID NO: 41978
  Cyclic GFR-binding peptide
  MOD_RES (1)..(2)..(34): Xaa is C or S

SEQ ID NO: 44957 - protein, 25 aa, Artificial Sequence
  Cyclic GFR-binding peptide
LSPINVLYFDDMGVPTYGKIPEGMS

SEQ ID NO: 44958 - protein, 31 aa, Artificial Sequence; identical to SEQ ID NO: 41980
  Cyclic GFR-binding peptide

SEQ ID NO: 44959 - protein, 40 aa, Artificial Sequence; identical to SEQ ID NO: 41981
  Cyclic GFR-binding peptide
  MOD_RES (4)..(5)..(37)..(39): Xaa is C or S

SEQ ID NO: 44960 - protein, 38 aa, Artificial Sequence; identical to SEQ ID NO: 41982
  Cyclic GFR-binding peptide
  MOD_RES (2)..(3)..(35)..(37): Xaa is C or S

SEQ ID NO: 44961 - protein, 40 aa, Artificial Sequence; identical to SEQ ID NO: 41983
  Cyclic GFR-binding peptide
  MOD_RES (6)..(7)..(39): Xaa is C or S

SEQ ID NO: 44962 - protein, 28 aa, Artificial Sequence
  Cyclic GFR-binding peptide
  MOD_RES (1)..(2): Xaa is C or S
XXVPARLSPINILYFDAANNVVYGKIPD

SEQ ID NO: 44963 - protein, 36 aa, Artificial Sequence; identical to SEQ ID NO: 41985
  Cyclic GFR-binding peptide
  MOD_RES (2)..(3)..(35): Xaa is C or S

SEQ ID NO: 44964 - protein, 34 aa, Artificial Sequence; identical to SEQ ID NO: 41986
  Cyclic GFR-binding peptide
  MOD_RES (32)..(34): Xaa is C or S

SEQ ID NO: 44965 - protein, 37 aa, Artificial Sequence; identical to SEQ ID NO: 41987
  Cyclic GFR-binding peptide
  MOD_RES (6)..(7): Xaa is C or S

SEQ ID NO: 44966 - protein, 30 aa, Artificial Sequence; identical to SEQ ID NO: 41988
  Cyclic GFR-binding peptide

SEQ ID NO: 44967 - protein, 33 aa, Artificial Sequence; identical to SEQ ID NO: 41989
  Cyclic GFR-binding peptide
  MOD_RES (4)..(5): Xaa is C or S

SEQ ID NO: 44968 - protein, 39 aa, Artificial Sequence; identical to SEQ ID NO: 41990
  Cyclic GFR-binding peptide
  MOD_RES (5)..(6)..(38): Xaa is C or S

SEQ ID NO: 44969 - protein, 27 aa, Artificial Sequence
  Cyclic GFR-binding peptide
VPARLSPINILYFDAANNVVYGKIPDM

SEQ ID NO: 44970 - protein, 33 aa, Artificial Sequence; identical to SEQ ID NO: 41992
  Cyclic GFR-binding peptide
  MOD_RES (4)..(5): Xaa is C or S

SEQ ID NO: 44971 - protein, 32 aa, Artificial Sequence; identical to SEQ ID NO: 41993
  Cyclic GFR-binding peptide
  MOD_RES (1)..(1): Xaa is C or S

SEQ ID NO: 44972 - protein, 35 aa, Artificial Sequence; identical to SEQ ID NO: 41994
  Cyclic GFR-binding peptide
  MOD_RES (1)..(33)..(35): Xaa is C or S

SEQ ID NO: 44973 - protein, 22 aa, Artificial Sequence
  Cyclic GFR-binding peptide
SPINMLYFDENEKVVYGKIPDM

SEQ ID NO: 44974 - protein, 36 aa, Artificial Sequence; identical to SEQ ID NO: 41996
  Cyclic GFR-binding peptide
  MOD_RES (4)..(5): Xaa is C or S

SEQ ID NO: 44975 - protein, 35 aa, Artificial Sequence; identical to SEQ ID NO: 41997
  Cyclic GFR-binding peptide
  MOD_RES (3)..(4)..(35): Xaa is C or S

SEQ ID NO: 44976 - protein, 24 aa, Artificial Sequence
  Cyclic GFR-binding peptide
PTELSPINMLYFDEYDKVVYGKIP

SEQ ID NO: 44977 - protein, 36 aa, Artificial Sequence; identical to SEQ ID NO: 41999
  Cyclic GFR-binding peptide
  MOD_RES (6)..(6): Xaa is C or S

SEQ ID NO: 44978 - protein, 35 aa, Artificial Sequence; identical to SEQ ID NO: 42000
  Cyclic GFR-binding peptide
  MOD_RES (5)..(6): Xaa is C or S

SEQ ID NO: 44979 - protein, 39 aa, Artificial Sequence; identical to SEQ ID NO: 42001
  Cyclic GFR-binding peptide
  MOD_RES (6)..(7)..(39): Xaa is C or S

SEQ ID NO: 44980 - protein, 40 aa, Artificial Sequence; identical to SEQ ID NO: 42002
  Cyclic GFR-binding peptide
  MOD_RES (6)..(7)..(38)..(40): Xaa is C or S

SEQ ID NO: 44981 - protein, 28 aa, Artificial Sequence
  Cyclic GFR-binding peptide
ELSPINMLYFDEYDKVVYGKIPEMVVEG

SEQ ID NO: 44982 - protein, 29 aa, Artificial Sequence
  Cyclic GFR-binding peptide
  MOD_RES (28)..(28): Xaa is C or S
LSPINMLYFDEYDKVVYGKIPEMVVEGXG

SEQ ID NO: 44983 - protein, 38 aa, Artificial Sequence; identical to SEQ ID NO: 42005
  Cyclic GFR-binding peptide
  MOD_RES (4)..(5)..(37): Xaa is C or S

SEQ ID NO: 44984 - protein, 26 aa, Artificial Sequence
  Cyclic GFR-binding peptide
  MOD_RES (1)..(1): Xaa is C or S
XVPTELSPINMLYFDENEKVVYGKIP

SEQ ID NO: 44985 - protein, 36 aa, Artificial Sequence; identical to SEQ ID NO: 42007
  Cyclic GFR-binding peptide
  MOD_RES (3)..(4)..(36): Xaa is C or S

SEQ ID NO: 44986 - protein, 36 aa, Artificial Sequence; identical to SEQ ID NO: 42008
  Cyclic GFR-binding peptide
  MOD_RES (3)..(4)..(35): Xaa is C or S

SEQ ID NO: 44987 - protein, 31 aa, Artificial Sequence; identical to SEQ ID NO: 42009
  Cyclic GFR-binding peptide
  MOD_RES (5)..(5): Xaa is C or S

SEQ ID NO: 44988 - protein, 23 aa, Artificial Sequence
  Cyclic GFR-binding peptide
SPINMLYFDEYDKVVYGKIPEMV

SEQ ID NO: 44989 - protein, 29 aa, Artificial Sequence
  Cyclic GFR-binding peptide
VPTKLSPINVLYFDDMGVPTYGKIPEGMS

SEQ ID NO: 44990 - protein, 32 aa, Artificial Sequence; identical to SEQ ID NO: 42012
  Cyclic GFR-binding peptide
  MOD_RES (1)..(2): Xaa is C or S

SEQ ID NO: 44991 - protein, 28 aa, Artificial Sequence
  Cyclic GFR-binding peptide
QLSPINVLYFDDSSNVIYGKIPNMVVRA

SEQ ID NO: 44992 - protein, 33 aa, Artificial Sequence; identical to SEQ ID NO: 42014
  Cyclic GFR-binding peptide
  MOD_RES (6)..(7): Xaa is C or S

SEQ ID NO: 44993 - protein, 33 aa, Artificial Sequence; identical to SEQ ID NO: 42015
  Cyclic GFR-binding peptide
  MOD_RES (30)..(32): Xaa is C or S

SEQ ID NO: 44994 - protein, 32 aa, Artificial Sequence; identical to SEQ ID NO: 42016
  Cyclic GFR-binding peptide
  MOD_RES (2)..(3): Xaa is C or S

SEQ ID NO: 44995 - protein, 29 aa, Artificial Sequence
  Cyclic GFR-binding peptide
  MOD_RES (28)..(28): Xaa is C or S
SPINVLYFDDMGVPTYGKIPEGMSVAEXG

SEQ ID NO: 44996 - protein, 33 aa, Artificial Sequence; identical to SEQ ID NO: 42018
  Cyclic GFR-binding peptide
  MOD_RES (1)..(2): Xaa is C or S

SEQ ID NO: 44997 - protein, 32 aa, Artificial Sequence; identical to SEQ ID NO: 42019
  Cyclic GFR-binding peptide
  MOD_RES (29)..(31): Xaa is C or S

SEQ ID NO: 44998 - protein, 35 aa, Artificial Sequence; identical to SEQ ID NO: 42020
  Cyclic GFR-binding peptide
  MOD_RES (5)..(6): Xaa is C or S

SEQ ID NO: 44999 - protein, 35 aa, Artificial Sequence; identical to SEQ ID NO: 42021
  Cyclic GFR-binding peptide
  MOD_RES (1)..(33)..(35): Xaa is C or S

SEQ ID NO: 45000 - protein, 37 aa, Artificial Sequence; identical to SEQ ID NO: 42022
  Cyclic GFR-binding peptide
  MOD_RES (3)..(4)..(36): Xaa is C or S

SEQ ID NO: 45001 - protein, 36 aa, Artificial Sequence; identical to SEQ ID NO: 42023
  Cyclic GFR-binding peptide
  MOD_RES (6)..(7): Xaa is C or S

SEQ ID NO: 45002 - protein, 34 aa, Artificial Sequence; identical to SEQ ID NO: 42024
  Cyclic GFR-binding peptide
  MOD_RES (5)..(6): Xaa is C or S

SEQ ID NO: 45003 - protein, 28 aa, Artificial Sequence
  Cyclic GFR-binding peptide
  MOD_RES (1)..(1): Xaa is C or S
XAPTQLSPINVLYFDDSSNVIYGKIPNM

SEQ ID NO: 45004 - protein, 39 aa, Artificial Sequence; identical to SEQ ID NO: 42026
  Cyclic GFR-binding peptide
  MOD_RES (5)..(6)..(37)..(39): Xaa is C or S

SEQ ID NO: 45005 - protein, 34 aa, Artificial Sequence; identical to SEQ ID NO: 42027
  Cyclic GFR-binding peptide
  MOD_RES (3)..(4): Xaa is C or S

SEQ ID NO: 45006 - protein, 42 aa, Artificial Sequence; identical to SEQ ID NO: 42028
  Cyclic GFR-binding peptide
  MOD_RES (6)..(7)..(39)..(41): Xaa is C or S

SEQ ID NO: 45007 - protein, 36 aa, Artificial Sequence; identical to SEQ ID NO: 42029
  Cyclic GFR-binding peptide
  MOD_RES (2)..(3)..(35): Xaa is C or S

SEQ ID NO: 45008 - protein, 33 aa, Artificial Sequence; identical to SEQ ID NO: 42030
  Cyclic GFR-binding peptide
  MOD_RES (5)..(6): Xaa is C or S

SEQ ID NO: 45009 - protein, 38 aa, Artificial Sequence; identical to SEQ ID NO: 42031
  Cyclic GFR-binding peptide
  MOD_RES (6)..(7): Xaa is C or S

SEQ ID NO: 45010 - protein, 36 aa, Artificial Sequence; identical to SEQ ID NO: 42032
  Cyclic GFR-binding peptide
  MOD_RES (5)..(6): Xaa is C or S

SEQ ID NO: 45011 - protein, 34 aa, Artificial Sequence; identical to SEQ ID NO: 42033
  Cyclic GFR-binding peptide
  MOD_RES (4)..(5): Xaa is C or S

SEQ ID NO: 45012 - protein, 27 aa, Artificial Sequence
  Cyclic GFR-binding peptide
PTELSPINMLYFDEYDKVVYGKIPEMV

SEQ ID NO: 45013 - protein, 29 aa, Artificial Sequence
  Cyclic GFR-binding peptide
  MOD_RES (27)..(29): Xaa is C or S
SPINVLYFDDSSNVIYGKIPNMVVRAXGX

SEQ ID NO: 45014 - protein, 35 aa, Artificial Sequence; identical to SEQ ID NO: 42036
  Cyclic GFR-binding peptide
  MOD_RES (5)..(6): Xaa is C or S

SEQ ID NO: 45015 - protein, 31 aa, Artificial Sequence; identical to SEQ ID NO: 42037
  Cyclic GFR-binding peptide

SEQ ID NO: 45016 - protein, 22 aa, Artificial Sequence
  Cyclic GFR-binding peptide
ELSPINMLYFDEYDKVVYGKIP

SEQ ID NO: 45017 - protein, 31 aa, Artificial Sequence; identical to SEQ ID NO: 42039
  Cyclic GFR-binding peptide

SEQ ID NO: 45018 - protein, 40 aa, Artificial Sequence; identical to SEQ ID NO: 42040
  Cyclic GFR-binding peptide
  MOD_RES (5)..(6)..(38)..(40): Xaa is C or S

SEQ ID NO: 45019 - protein, 37 aa, Artificial Sequence; identical to SEQ ID NO: 42041
  Cyclic GFR-binding peptide
  MOD_RES (4)..(5)..(37): Xaa is C or S

SEQ ID NO: 45020 - protein, 37 aa, Artificial Sequence; identical to SEQ ID NO: 42042
  Cyclic GFR-binding peptide
  MOD_RES (6)..(7): Xaa is C or S

SEQ ID NO: 45021 - protein, 34 aa, Artificial Sequence; identical to SEQ ID NO: 42043
  Cyclic GFR-binding peptide
  MOD_RES (2)..(3)..(34): Xaa is C or S

SEQ ID NO: 45022 - protein, 32 aa, Artificial Sequence; identical to SEQ ID NO: 42044
  Cyclic GFR-binding peptide
  MOD_RES (4)..(4): Xaa is C or S

SEQ ID NO: 45023 - protein, 31 aa, Artificial Sequence; identical to SEQ ID NO: 42045
  Cyclic GFR-binding peptide
  MOD_RES (1)..(1): Xaa is C or S

SEQ ID NO: 45024 - protein, 28 aa, Artificial Sequence
  Cyclic GFR-binding peptide
  MOD_RES (28)..(28): Xaa is C or S
SPINVLYFDDMGVPTYGKIPEGMSVAEX

SEQ ID NO: 45025 - protein, 41 aa, Artificial Sequence; identical to SEQ ID NO: 42047
  Cyclic GFR-binding peptide
  MOD_RES (6)..(7)..(40): Xaa is C or S

SEQ ID NO: 45026 - protein, 33 aa, Artificial Sequence; identical to SEQ ID NO: 42048
  Cyclic GFR-binding peptide
  MOD_RES (6)..(7): Xaa is C or S

SEQ ID NO: 45027 - protein, 32 aa, Artificial Sequence; identical to SEQ ID NO: 42049
  Cyclic GFR-binding peptide
  MOD_RES (1)..(2): Xaa is C or S

SEQ ID NO: 45028 - protein, 38 aa, Artificial Sequence; identical to SEQ ID NO: 42050
  Cyclic GFR-binding peptide
  MOD_RES (2)..(3)..(36)..(38): Xaa is C or S

SEQ ID NO: 45029 - protein, 36 aa, Artificial Sequence; identical to SEQ ID NO: 42051
  Cyclic GFR-binding peptide
  MOD_RES (2)..(3)..(35): Xaa is C or S

SEQ ID NO: 45030 - protein, 22 aa, Artificial Sequence
  Cyclic GFR-binding peptide
KTSPINMLYFDNGRVLLYGKIP

SEQ ID NO: 45031 - protein, 30 aa, Artificial Sequence; identical to SEQ ID NO: 42053
  Cyclic GFR-binding peptide
  MOD_RES (4)..(5): Xaa is C or S

SEQ ID NO: 45032 - protein, 34 aa, Artificial Sequence; identical to SEQ ID NO: 42054
  Cyclic GFR-binding peptide
  MOD_RES (3)..(4): Xaa is C or S

SEQ ID NO: 45033 - protein, 33 aa, Artificial Sequence; identical to SEQ ID NO: 42055
  Cyclic GFR-binding peptide
  MOD_RES (31)..(33): Xaa is C or S

SEQ ID NO: 45034 - protein, 26 aa, Artificial Sequence
  Cyclic GFR-binding peptide
LSPINILYFDAANNVVYGKIPDMVVE

SEQ ID NO: 45035 - protein, 28 aa, Artificial Sequence
  Cyclic GFR-binding peptide
  MOD_RES (28)..(28): Xaa is C or S
LSPINILYFDSANNVVYGKIPDMVVESX

SEQ ID NO: 45036 - protein, 29 aa, Artificial Sequence
  Cyclic GFR-binding peptide
TKLSPINILYFDKGVVTYYGKIPGMAVSE

SEQ ID NO: 45037 - protein, 32 aa, Artificial Sequence; identical to SEQ ID NO: 42059
  Cyclic GFR-binding peptide
  MOD_RES (1)..(2): Xaa is C or S

SEQ ID NO: 45038 - protein, 36 aa, Artificial Sequence; identical to SEQ ID NO: 42060
  Cyclic GFR-binding peptide
  MOD_RES (4)..(5): Xaa is C or S

SEQ ID NO: 45039 - protein, 29 aa, Artificial Sequence
  Cyclic GFR-binding peptide
  MOD_RES (1)..(2): Xaa is C or S
XXVPTELSPINMLYFDEYDKVVYGKIPEM

SEQ ID NO: 45040 - protein, 32 aa, Artificial Sequence; identical to SEQ ID NO: 42062
  Cyclic GFR-binding peptide
  MOD_RES (30)..(32): Xaa is C or S

SEQ ID NO: 45041 - protein, 36 aa, Artificial Sequence; identical to SEQ ID NO: 42063
  Cyclic GFR-binding peptide
  MOD_RES (1)..(2)..(34)..(36): Xaa is C or S

SEQ ID NO: 45042 - protein, 28 aa, Artificial Sequence
  Cyclic GFR-binding peptide
  MOD_RES (1)..(2): Xaa is C or S
XXVPTKLSPINILYFDKGVVTYYGKIPG

SEQ ID NO: 45043 - protein, 38 aa, Artificial Sequence; identical to SEQ ID NO: 42065
  Cyclic GFR-binding peptide
  MOD_RES (5)..(6)..(38): Xaa is C or S

SEQ ID NO: 45044 - protein, 25 aa, Artificial Sequence
  Cyclic GFR-binding peptide
APTKLSPINVLYFDDSSNVIYGKIP

SEQ ID NO: 45045 - protein, 31 aa, Artificial Sequence; identical to SEQ ID NO: 42067
  Cyclic GFR-binding peptide
  MOD_RES (4)..(5): Xaa is C or S

SEQ ID NO: 45046 - protein, 37 aa, Artificial Sequence; identical to SEQ ID NO: 42068
  Cyclic GFR-binding peptide
  MOD_RES (2)..(3)..(35)..(37): Xaa is C or S

SEQ ID NO: 45047 - protein, 34 aa, Artificial Sequence; identical to SEQ ID NO: 42069
  Cyclic GFR-binding peptide
  MOD_RES (3)..(4): Xaa is C or S

SEQ ID NO: 45048 - protein, 40 aa, Artificial Sequence; identical to SEQ ID NO: 42070
  Cyclic GFR-binding peptide
  MOD_RES (5)..(37)..(39): Xaa is C or S

SEQ ID NO: 45049 - protein, 39 aa, Artificial Sequence; identical to SEQ ID NO: 42071
  Cyclic GFR-binding peptide
  MOD_RES (4)..(5)..(37)..(39): Xaa is C or S

SEQ ID NO: 45050 - protein, 26 aa, Artificial Sequence
  Cyclic GFR-binding peptide
PTELSPINMLYFDEYDKVVYGKIPEM

SEQ ID NO: 45051 - protein, 25 aa, Artificial Sequence
  Cyclic GFR-binding peptide
PTELSPINMLYFDEYDKVVYGKIPE

SEQ ID NO: 45052 - protein, 34 aa, Artificial Sequence; identical to SEQ ID NO: 42074
  Cyclic GFR-binding peptide
  MOD_RES (2)..(3): Xaa is C or S

SEQ ID NO: 45053 - protein, 38 aa, Artificial Sequence; identical to SEQ ID NO: 42075
  Cyclic GFR-binding peptide
  MOD_RES (2)..(3)..(35)..(37): Xaa is C or S

SEQ ID NO: 45054 - protein, 35 aa, Artificial Sequence; identical to SEQ ID NO: 42076
  Cyclic GFR-binding peptide
  MOD_RES (6)..(7): Xaa is C or S

SEQ ID NO: 45055 - protein, 33 aa, Artificial Sequence; identical to SEQ ID NO: 42077
  Cyclic GFR-binding peptide
  MOD_RES (2)..(3): Xaa is C or S

SEQ ID NO: 45056 - protein, 30 aa, Artificial Sequence; identical to SEQ ID NO: 42078
  Cyclic GFR-binding peptide
  MOD_RES (3)..(4): Xaa is C or S

SEQ ID NO: 45057 - protein, 32 aa, Artificial Sequence; identical to SEQ ID NO: 42079
  Cyclic GFR-binding peptide
  MOD_RES (5)..(6): Xaa is C or S

SEQ ID NO: 45058 - protein, 32 aa, Artificial Sequence; identical to SEQ ID NO: 42080
  Cyclic GFR-binding peptide
  MOD_RES (4)..(5): Xaa is C or S

SEQ ID NO: 45059 - protein, 30 aa, Artificial Sequence; identical to SEQ ID NO: 42081
  Cyclic GFR-binding peptide
  MOD_RES (28)..(30): Xaa is C or S

SEQ ID NO: 45060 - protein, 33 aa, Artificial Sequence; identical to SEQ ID NO: 42082
  Cyclic GFR-binding peptide
  MOD_RES (32)..(32): Xaa is C or S

SEQ ID NO: 45061 - protein, 32 aa, Artificial Sequence; identical to SEQ ID NO: 42083
  Cyclic GFR-binding peptide
  MOD_RES (2)..(3): Xaa is C or S

SEQ ID NO: 45062 - protein, 33 aa, Artificial Sequence; identical to SEQ ID NO: 42084
  Cyclic GFR-binding peptide
  MOD_RES (32)..(32): Xaa is C or S

SEQ ID NO: 45063 - protein, 39 aa, Artificial Sequence; identical to SEQ ID NO: 42085
  Cyclic GFR-binding peptide
  MOD_RES (4)..(5)..(37)..(39): Xaa is C or S

SEQ ID NO: 45064 - protein, 35 aa, Artificial Sequence; identical to SEQ ID NO: 42086
  Cyclic GFR-binding peptide
  MOD_RES (6)..(7): Xaa is C or S

SEQ ID NO: 45065 - protein, 33 aa, Artificial Sequence; identical to SEQ ID NO: 42087
  Cyclic GFR-binding peptide
  MOD_RES (32)..(32): Xaa is C or S

SEQ ID NO: 45066 - protein, 30 aa, Artificial Sequence; identical to SEQ ID NO: 42088
  Cyclic GFR-binding peptide
  MOD_RES (1)..(1): Xaa is C or S

SEQ ID NO: 45067 - protein, 24 aa, Artificial Sequence
  Cyclic GFR-binding peptide
KLSPINVLYFDSSNNVIYGKIPNM

SEQ ID NO: 45068 - protein, 33 aa, Artificial Sequence; identical to SEQ ID NO: 42090
  Cyclic GFR-binding peptide
  MOD_RES (1)..(33): Xaa is C or S

SEQ ID NO: 45069 - protein, 23 aa, Artificial Sequence
  Cyclic GFR-binding peptide
ELSPINMLYFDEYDKVVYGKIPE

SEQ ID NO: 45070 - protein, 29 aa, Artificial Sequence
  Cyclic GFR-binding peptide
  MOD_RES (29)..(29): Xaa is C or S
QLSPINVLYFDDSSNVIYGKIPNMVVRAX

SEQ ID NO: 45071 - protein, 20 aa, Artificial Sequence
  Cyclic GFR-binding peptide
SPINMLYFDEYDKVVYGKIP

SEQ ID NO: 45072 - protein, 28 aa, Artificial Sequence
  Cyclic GFR-binding peptide
  MOD_RES (2)..(3): Xaa is C or S
TXXAPVKTSPINMLYFDNGRVLLYGKIP

SEQ ID NO: 45073 - protein, 35 aa, Artificial Sequence; identical to SEQ ID NO: 42095
  Cyclic GFR-binding peptide
  MOD_RES (2)..(3): Xaa is C or S

SEQ ID NO: 45074 - protein, 20 aa, Artificial Sequence
  Cyclic GFR-binding peptide
SPINMLYFDENEKVVYGKIP

SEQ ID NO: 45075 - protein, 24 aa, Artificial Sequence
  Cyclic GFR-binding peptide
SPINVLYFDDSSNVIYGKIPNMVV

SEQ ID NO: 45076 - protein, 39 aa, Artificial Sequence; identical to SEQ ID NO: 42098
  Cyclic GFR-binding peptide
  MOD_RES (4)..(5)..(37)..(39): Xaa is C or S

SEQ ID NO: 45077 - protein, 28 aa, Artificial Sequence
  Cyclic GFR-binding peptide
  MOD_RES (27)..(27): Xaa is C or S
SPINMLYFDEYDKVVYGKIPEMVVEGXG

SEQ ID NO: 45078 - protein, 32 aa, Artificial Sequence; identical to SEQ ID NO: 42100
  Cyclic GFR-binding peptide
  MOD_RES (29)..(31): Xaa is C or S

SEQ ID NO: 45079 - protein, 25 aa, Artificial Sequence
  Cyclic GFR-binding peptide
QLSPINVLYFDDSSNVIYGKIPNMV

SEQ ID NO: 45080 - protein, 30 aa, Artificial Sequence; identical to SEQ ID NO: 42102
  Cyclic GFR-binding peptide
  MOD_RES (2)..(3): Xaa is C or S

SEQ ID NO: 45081 - protein, 34 aa, Artificial Sequence; identical to SEQ ID NO: 42103
  Cyclic GFR-binding peptide
  MOD_RES (31)..(33): Xaa is C or S

SEQ ID NO: 45082 - protein, 33 aa, Artificial Sequence; identical to SEQ ID NO: 42104
  Cyclic GFR-binding peptide
  MOD_RES (32)..(32): Xaa is C or S

SEQ ID NO: 45083 - protein, 32 aa, Artificial Sequence; identical to SEQ ID NO: 42105
  Cyclic GFR-binding peptide
  MOD_RES (4)..(5): Xaa is C or S

SEQ ID NO: 45084 - protein, 23 aa, Artificial Sequence
  Cyclic GFR-binding peptide
LSPINMLYFDEYDKVVYGKIPEM

SEQ ID NO: 45085 - protein, 29 aa, Artificial Sequence
  Cyclic GFR-binding peptide
APTKLSPINVLYFDSSNNVIYGKIPNMVV

SEQ ID NO: 45086 - protein, 30 aa, Artificial Sequence; identical to SEQ ID NO: 42108
  Cyclic GFR-binding peptide
  MOD_RES (28)..(30): Xaa is C or S

SEQ ID NO: 45087 - protein, 35 aa, Artificial Sequence; identical to SEQ ID NO: 42109
  Cyclic GFR-binding peptide
  MOD_RES (3)..(4): Xaa is C or S

SEQ ID NO: 45088 - protein, 35 aa, Artificial Sequence; identical to SEQ ID NO: 42110
  Cyclic GFR-binding peptide
  MOD_RES (1)..(2)..(33)..(35): Xaa is C or S

SEQ ID NO: 45089 - protein, 42 aa, Artificial Sequence; identical to SEQ ID NO: 42111
  Cyclic GFR-binding peptide
  MOD_RES (6)..(7)..(39)..(41): Xaa is C or S

SEQ ID NO: 45090 - protein, 26 aa, Artificial Sequence
  Cyclic GFR-binding peptide
VPTKLSPINVLYFDDMGVPTYGKIPE

SEQ ID NO: 45091 - protein, 29 aa, Artificial Sequence
  Cyclic GFR-binding peptide
  MOD_RES (1)..(2): Xaa is C or S
XXVPTRLSPINILYFDSANNVVYGKIPDM

SEQ ID NO: 45092 - protein, 32 aa, Artificial Sequence; identical to SEQ ID NO: 42114
  Cyclic GFR-binding peptide
  MOD_RES (6)..(7): Xaa is C or S

SEQ ID NO: 45093 - protein, 33 aa, Artificial Sequence; identical to SEQ ID NO: 42115
  Cyclic GFR-binding peptide
  MOD_RES (1)..(2): Xaa is C or S

SEQ ID NO: 45094 - protein, 35 aa, Artificial Sequence; identical to SEQ ID NO: 42116
  Cyclic GFR-binding peptide
  MOD_RES (1)..(33)..(35): Xaa is C or S

SEQ ID NO: 45095 - protein, 29 aa, Artificial Sequence
  Cyclic GFR-binding peptide
  MOD_RES (3)..(4): Xaa is C or S
KAXXVPTKLSPINVLYFDDMGVPTYGKIP

SEQ ID NO: 45096 - protein, 29 aa, Artificial Sequence
  Cyclic GFR-binding peptide
TRLSPINILYFDSANNVVYGKIPDMVVES

SEQ ID NO: 45097 - protein, 40 aa, Artificial Sequence; identical to SEQ ID NO: 42119
  Cyclic GFR-binding peptide
  MOD_RES (4)..(5)..(37)..(39): Xaa is C or S

SEQ ID NO: 45098 - protein, 25 aa, Artificial Sequence
  Cyclic GFR-binding peptide
PTKLSPINVLYFDDSSNVIYGKIPN

SEQ ID NO: 45099 - protein, 21 aa, Artificial Sequence
  Cyclic GFR-binding peptide
SPINILYFDSANNVVYGKIPD

SEQ ID NO: 45100 - protein, 41 aa, Artificial Sequence; identical to SEQ ID NO: 42122
  Cyclic GFR-binding peptide
  MOD_RES (6)..(7)..(39)..(41): Xaa is C or S

SEQ ID NO: 45101 - protein, 32 aa, Artificial Sequence; identical to SEQ ID NO: 42123
  Cyclic GFR-binding peptide
  MOD_RES (31)..(31): Xaa is C or S

SEQ ID NO: 45102 - protein, 22 aa, Artificial Sequence
  Cyclic GFR-binding peptide
SPINVLYFDDSSNVIYGKIPNM

SEQ ID NO: 45103 - protein, 32 aa, Artificial Sequence; identical to SEQ ID NO: 42125
  Cyclic GFR-binding peptide
  MOD_RES (1)..(2): Xaa is C or S

SEQ ID NO: 45104 - protein, 30 aa, Artificial Sequence; identical to SEQ ID NO: 42126
  Cyclic GFR-binding peptide
  MOD_RES (3)..(4): Xaa is C or S

SEQ ID NO: 45105 - protein, 28 aa, Artificial Sequence
  Cyclic GFR-binding peptide
PTKLSPINILYFDKGVVTYYGKIPGMAV

SEQ ID NO: 45106 - protein, 27 aa, Artificial Sequence
  Cyclic GFR-binding peptide
  MOD_RES (1)..(1): Xaa is C or S
XAPTKLSPINVLYFDDSSNVIYGKIPN

SEQ ID NO: 45107 - protein, 26 aa, Artificial Sequence
  Cyclic GFR-binding peptide
PTKLSPINVLYFDDSSNVIYGKIPNM

SEQ ID NO: 45108 - protein, 38 aa, Artificial Sequence; identical to SEQ ID NO: 42130
  Cyclic GFR-binding peptide
  MOD_RES (3)..(4)..(36)..(38): Xaa is C or S

SEQ ID NO: 45109 - protein, 23 aa, Artificial Sequence
  Cyclic GFR-binding peptide
SPINMLYFDNGRVLLYGKIPMIV

SEQ ID NO: 45110 - protein, 25 aa, Artificial Sequence
  Cyclic GFR-binding peptide
APVKTSPINMLYFDNGRVLLYGKIP

SEQ ID NO: 45111 - protein, 38 aa, Artificial Sequence; identical to SEQ ID NO: 42133
  Cyclic GFR-binding peptide
  MOD_RES (6)..(7): Xaa is C or S

SEQ ID NO: 45112 - protein, 26 aa, Artificial Sequence
  Cyclic GFR-binding peptide
LSPINVLYFDSSNNVIYGKIPNMVVK

SEQ ID NO: 45113 - protein, 26 aa, Artificial Sequence
  Cyclic GFR-binding peptide
VPTELSPINMLYFDEYDKVVYGKIPE

SEQ ID NO: 45114 - protein, 27 aa, Artificial Sequence
  Cyclic GFR-binding peptide
APTKLSPINVLYFDSSNNVIYGKIPNM

SEQ ID NO: 45115 - protein, 41 aa, Artificial Sequence; identical to SEQ ID NO: 42137
  Cyclic GFR-binding peptide
  MOD_RES (5)..(6)..(38)..(40): Xaa is C or S

SEQ ID NO: 45116 - protein, 41 aa, Artificial Sequence; identical to SEQ ID NO: 42138
  Cyclic GFR-binding peptide
  MOD_RES (6)..(7)..(39)..(41): Xaa is C or S

SEQ ID NO: 45117 - protein, 28 aa, Artificial Sequence
  Cyclic GFR-binding peptide
  MOD_RES (2)..(3): Xaa is C or S
AXXAPTKLSPINVLYFDSSNNVIYGKIP

SEQ ID NO: 45118 - protein, 22 aa, Artificial Sequence
  Cyclic GFR-binding peptide
LSPINILYFDKGVVTYYGKIPG

SEQ ID NO: 45119 - protein, 24 aa, Artificial Sequence
  Cyclic GFR-binding peptide
TKLSPINVLYFDDSSNVIYGKIPN

SEQ ID NO: 45120 - protein, 26 aa, Artificial Sequence
  Cyclic GFR-binding peptide
PTRLSPINILYFDSANNVVYGKIPDM

SEQ ID NO: 45121 - protein, 35 aa, Artificial Sequence; identical to SEQ ID NO: 42143
  Cyclic GFR-binding peptide
  MOD_RES (2)..(3)..(34): Xaa is C or S

SEQ ID NO: 45122 - protein, 35 aa, Artificial Sequence; identical to SEQ ID NO: 42144
  Cyclic GFR-binding peptide
  MOD_RES (6)..(7): Xaa is C or S

SEQ ID NO: 45123 - protein, 33 aa, Artificial Sequence; identical to SEQ ID NO: 42145
  Cyclic GFR-binding peptide
  MOD_RES (30)..(32): Xaa is C or S

SEQ ID NO: 45124 - protein, 34 aa, Artificial Sequence; identical to SEQ ID NO: 42146
  Cyclic GFR-binding peptide
  MOD_RES (1)..(2)..(34): Xaa is C or S

SEQ ID NO: 45125 - protein, 24 aa, Artificial Sequence
  Cyclic GFR-binding peptide
QLSPINVLYFDDSSNVIYGKIPNM

SEQ ID NO: 45126 - protein, 24 aa, Artificial Sequence
  Cyclic GFR-binding peptide
SPINMLYFDEYDKVVYGKIPEMVV

SEQ ID NO: 45127 - protein, 32 aa, Artificial Sequence; identical to SEQ ID NO: 42149
  Cyclic GFR-binding peptide
  MOD_RES (29)..(31): Xaa is C or S

SEQ ID NO: 45128 - protein, 33 aa, Artificial Sequence; identical to SEQ ID NO: 42150
  Cyclic GFR-binding peptide
  MOD_RES (6)..(7): Xaa is C or S

SEQ ID NO: 45129 - protein, 35 aa, Artificial Sequence; identical to SEQ ID NO: 42151
  Cyclic GFR-binding peptide
  MOD_RES (3)..(4): Xaa is C or S

SEQ ID NO: 45130 - protein, 35 aa, Artificial Sequence; identical to SEQ ID NO: 42152
  Cyclic GFR-binding peptide
  MOD_RES (4)..(5): Xaa is C or S

SEQ ID NO: 45131 - protein, 40 aa, Artificial Sequence; identical to SEQ ID NO: 42153
  Cyclic GFR-binding peptide
  MOD_RES (5)..(6)..(38)..(40): Xaa is C or S

SEQ ID NO: 45132 - protein, 28 aa, Artificial Sequence
  Cyclic GFR-binding peptide
APTKLSPINVLYFDDSSNVIYGKIPNMV

SEQ ID NO: 45133 - protein, 31 aa, Artificial Sequence; identical to SEQ ID NO: 42155
  Cyclic GFR-binding peptide
  MOD_RES (3)..(4): Xaa is C or S

SEQ ID NO: 45134 - protein, 33 aa, Artificial Sequence; identical to SEQ ID NO: 42156
  Cyclic GFR-binding peptide
  MOD_RES (1)..(1): Xaa is C or S

SEQ ID NO: 45135 - protein, 38 aa, Artificial Sequence; identical to SEQ ID NO: 42157
  Cyclic GFR-binding peptide
  MOD_RES (4)..(5)..(37): Xaa is C or S

SEQ ID NO: 45136 - protein, 29 aa, Artificial Sequence
  Cyclic GFR-binding peptide
VPTKLSPINILYFDKGVVTYYGKIPGMAV

SEQ ID NO: 45137 - protein, 33 aa, Artificial Sequence; identical to SEQ ID NO: 42159
  Cyclic GFR-binding peptide
  MOD_RES (1)..(33): Xaa is C or S

SEQ ID NO: 45138 - protein, 29 aa, Artificial Sequence
  Cyclic GFR-binding peptide
  MOD_RES (1)..(1): Xaa is C or S
XVPTRLSPINILYFDSANNVVYGKIPDMV

SEQ ID NO: 45139 - protein, 21 aa, Artificial Sequence
  Cyclic GFR-binding peptide
SPINILYFDAANNVVYGKIPD

SEQ ID NO: 45140 - protein, 32 aa, Artificial Sequence; identical to SEQ ID NO: 42162
  Cyclic GFR-binding peptide
  MOD_RES (2)..(3): Xaa is C or S

SEQ ID NO: 45141 - protein, 33 aa, Artificial Sequence; identical to SEQ ID NO: 42163
  Cyclic GFR-binding peptide
  MOD_RES (5)..(6): Xaa is C or S

SEQ ID NO: 45142 - protein, 28 aa, Artificial Sequence
  Cyclic GFR-binding peptide
PVKTSPINMLYFDNGRVLLYGKIPMIVE

SEQ ID NO: 45143 - protein, 39 aa, Artificial Sequence; identical to SEQ ID NO: 42165
  Cyclic GFR-binding peptide
  MOD_RES (3)..(4)..(37)..(39): Xaa is C or S

SEQ ID NO: 45144 - protein, 35 aa, Artificial Sequence; identical to SEQ ID NO: 42166
  Cyclic GFR-binding peptide
  MOD_RES (6)..(7): Xaa is C or S

SEQ ID NO: 45145 - protein, 34 aa, Artificial Sequence; identical to SEQ ID NO: 42167
  Cyclic GFR-binding peptide
  MOD_RES (2)..(3): Xaa is C or S

SEQ ID NO: 45146 - protein, 34 aa, Artificial Sequence; identical to SEQ ID NO: 42168
  Cyclic GFR-binding peptide
  MOD_RES (5)..(6): Xaa is C or S

SEQ ID NO: 45147 - protein, 29 aa, Artificial Sequence
  Cyclic GFR-binding peptide
  MOD_RES (2)..(3): Xaa is C or S
AXXVPTKLSPINILYFDKGVVTYYGKIPG

SEQ ID NO: 45148 - protein, 32 aa, Artificial Sequence; identical to SEQ ID NO: 42170
  Cyclic GFR-binding peptide
  MOD_RES (1)..(1): Xaa is C or S

SEQ ID NO: 45149 - protein, 33 aa, Artificial Sequence; identical to SEQ ID NO: 42171
  Cyclic GFR-binding peptide
  MOD_RES (31)..(33): Xaa is C or S

SEQ ID NO: 45150 - protein, 39 aa, Artificial Sequence; identical to SEQ ID NO: 42172
  Cyclic GFR-binding peptide
  MOD_RES (4)..(5)..(37)..(39): Xaa is C or S

SEQ ID NO: 45151 - protein, 33 aa, Artificial Sequence; identical to SEQ ID NO: 42173
  Cyclic GFR-binding peptide
  MOD_RES (6)..(6): Xaa is C or S

SEQ ID NO: 45152 - protein, 27 aa, Artificial Sequence
  Cyclic GFR-binding peptide
TQLSPINVLYFDDSSNVIYGKIPNMVV

SEQ ID NO: 45153 - protein, 34 aa, Artificial Sequence; identical to SEQ ID NO: 42175
  Cyclic GFR-binding peptide
  MOD_RES (31)..(33): Xaa is C or S

SEQ ID NO: 45154 - protein, 36 aa, Artificial Sequence; identical to SEQ ID NO: 42176
  Cyclic GFR-binding peptide
  MOD_RES (3)..(4)..(36): Xaa is C or S

SEQ ID NO: 45155 - protein, 29 aa, Artificial Sequence
  Cyclic GFR-binding peptide
  MOD_RES (29)..(29): Xaa is C or S
KLSPINILYFDKGVVTYYGKIPGMAVSEX

SEQ ID NO: 45156 - protein, 29 aa, Artificial Sequence
  Cyclic GFR-binding peptide
  MOD_RES (4)..(4): Xaa is C or S
KPTXAPTKLSPINVLYFDDSSNVIYGKIP

SEQ ID NO: 45157 - protein, 26 aa, Artificial Sequence
  Cyclic GFR-binding peptide
PVKTSPINMLYFDNGRVLLYGKIPMI

SEQ ID NO: 45158 - protein, 32 aa, Artificial Sequence; identical to SEQ ID NO: 42180
  Cyclic GFR-binding peptide
  MOD_RES (3)..(4): Xaa is C or S

SEQ ID NO: 45159 - protein, 28 aa, Artificial Sequence
  Cyclic GFR-binding peptide
TRLSPINILYFDSANNVVYGKIPDMVVE

SEQ ID NO: 45160 - protein, 32 aa, Artificial Sequence; identical to SEQ ID NO: 42182
  Cyclic GFR-binding peptide
  MOD_RES (1)..(2): Xaa is C or S

SEQ ID NO: 45161 - protein, 34 aa, Artificial Sequence; identical to SEQ ID NO: 42183
  Cyclic GFR-binding peptide
  MOD_RES (6)..(6): Xaa is C or S

SEQ ID NO: 45162 - protein, 38 aa, Artificial Sequence; identical to SEQ ID NO: 42184
  Cyclic GFR-binding peptide
  MOD_RES (2)..(3)..(35)..(37): Xaa is C or S

SEQ ID NO: 45163 - protein, 29 aa, Artificial Sequence
  Cyclic GFR-binding peptide
  MOD_RES (2)..(3): Xaa is C or S
AXXAPTKLSPINVLYFDSSNNVIYGKIPN

SEQ ID NO: 45164 - protein, 30 aa, Artificial Sequence; identical to SEQ ID NO: 42186
  Cyclic GFR-binding peptide
  MOD_RES (28)..(30): Xaa is C or S

SEQ ID NO: 45165 - protein, 28 aa, Artificial Sequence
  Cyclic GFR-binding peptide
APVKTSPINMLYFDNGRVLLYGKIPMIV

SEQ ID NO: 45166 - protein, 30 aa, Artificial Sequence; identical to SEQ ID NO: 42188
  Cyclic GFR-binding peptide
  MOD_RES (1)..(2): Xaa is C or S

SEQ ID NO: 45167 - protein, 32 aa, Artificial Sequence; identical to SEQ ID NO: 42189
  Cyclic GFR-binding peptide
  MOD_RES (31)..(31): Xaa is C or S

SEQ ID NO: 45168 - protein, 36 aa, Artificial Sequence; identical to SEQ ID NO: 42190
  Cyclic GFR-binding peptide
  MOD_RES (4)..(5): Xaa is C or S

SEQ ID NO: 45169 - protein, 31 aa, Artificial Sequence; identical to SEQ ID NO: 42191
  Cyclic GFR-binding peptide
  MOD_RES (31)..(31): Xaa is C or S

SEQ ID NO: 45170 - protein, 27 aa, Artificial Sequence
  Cyclic GFR-binding peptide
  MOD_RES (1)..(2): Xaa is C or S
XXVPTELSPINMLYFDENEKVVYGKIP

SEQ ID NO: 45171 - protein, 30 aa, Artificial Sequence; identical to SEQ ID NO: 42193
  Cyclic GFR-binding peptide
  MOD_RES (1)..(2): Xaa is C or S

SEQ ID NO: 45172 - protein, 28 aa, Artificial Sequence
  Cyclic GFR-binding peptide
  MOD_RES (1)..(1): Xaa is C or S
XAPVKTSPINMLYFDNGRVLLYGKIPMI

SEQ ID NO: 45173 - protein, 39 aa, Artificial Sequence; identical to SEQ ID NO: 42195
  Cyclic GFR-binding peptide
  MOD_RES (6)..(7)..(39): Xaa is C or S

SEQ ID NO: 45174 - protein, 30 aa, Artificial Sequence; identical to SEQ ID NO: 42196
  Cyclic GFR-binding peptide
  MOD_RES (1)..(1): Xaa is C or S

SEQ ID NO: 45175 - protein, 31 aa, Artificial Sequence; identical to SEQ ID NO: 42197
  Cyclic GFR-binding peptide
  MOD_RES (3)..(4): Xaa is C or S

SEQ ID NO: 45176 - protein, 32 aa, Artificial Sequence; identical to SEQ ID NO: 42198
  Cyclic GFR-binding peptide
  MOD_RES (5)..(6): Xaa is C or S

SEQ ID NO: 45177 - protein, 23 aa, Artificial Sequence
  Cyclic GFR-binding peptide
VKTSPINMLYFDNGRVLLYGKIP

SEQ ID NO: 45178 - protein, 32 aa, Artificial Sequence; identical to SEQ ID NO: 42200
  Cyclic GFR-binding peptide
  MOD_RES (30)..(32): Xaa is C or S

SEQ ID NO: 45179 - protein, 25 aa, Artificial Sequence
  Cyclic GFR-binding peptide
SPINMLYFDNGRVLLYGKIPMIVEE

SEQ ID NO: 45180 - protein, 42 aa, Artificial Sequence; identical to SEQ ID NO: 42202
  Cyclic GFR-binding peptide
  MOD_RES (6)..(7)..(39)..(41): Xaa is C or S

SEQ ID NO: 45181 - protein, 41 aa, Artificial Sequence; identical to SEQ ID NO: 42203
  Cyclic GFR-binding peptide
  MOD_RES (5)..(6)..(38)..(40): Xaa is C or S

SEQ ID NO: 45182 - protein, 27 aa, Artificial Sequence
  Cyclic GFR-binding peptide
LSPINMLYFDENEKVVYGKIPDMVVEG

SEQ ID NO: 45183 - protein, 27 aa, Artificial Sequence
  Cyclic GFR-binding peptide
  MOD_RES (27)..(27): Xaa is C or S
SPINILYFDKGVVTYYGKIPGMAVSEX

SEQ ID NO: 45184 - protein, 37 aa, Artificial Sequence; identical to SEQ ID NO: 42206
  Cyclic GFR-binding peptide
  MOD_RES (4)..(5)..(37): Xaa is C or S

SEQ ID NO: 45185 - protein, 41 aa, Artificial Sequence; identical to SEQ ID NO: 42207
  Cyclic GFR-binding peptide
  MOD_RES (5)..(6)..(38)..(40): Xaa is C or S

SEQ ID NO: 45186 - protein, 35 aa, Artificial Sequence; identical to SEQ ID NO: 42208
  Cyclic GFR-binding peptide
  MOD_RES (6)..(7): Xaa is C or S

SEQ ID NO: 45187 - protein, 37 aa, Artificial Sequence; identical to SEQ ID NO: 42209
  Cyclic GFR-binding peptide
  MOD_RES (2)..(3)..(35)..(37): Xaa is C or S

SEQ ID NO: 45188 - protein, 27 aa, Artificial Sequence
  Cyclic GFR-binding peptide
RLSPINILYFDSANNVVYGKIPDMVVE

SEQ ID NO: 45189 - protein, 33 aa, Artificial Sequence; identical to SEQ ID NO: 42211
  Cyclic GFR-binding peptide
  MOD_RES (1)..(32): Xaa is C or S

SEQ ID NO: 45190 - protein, 33 aa, Artificial Sequence; identical to SEQ ID NO: 42212
  Cyclic GFR-binding peptide
  MOD_RES (31)..(33): Xaa is C or S

SEQ ID NO: 45191 - protein, 32 aa, Artificial Sequence; identical to SEQ ID NO: 42213
  Cyclic GFR-binding peptide
  MOD_RES (7)..(7): Xaa is C or S

SEQ ID NO: 45192 - protein, 35 aa, Artificial Sequence; identical to SEQ ID NO: 42214
  Cyclic GFR-binding peptide
  MOD_RES (1)..(2)..(34): Xaa is C or S

SEQ ID NO: 45193 - protein, 28 aa, Artificial Sequence
  Cyclic GFR-binding peptide
VPARLSPINILYFDAANNVVYGKIPDMV

SEQ ID NO: 45194 - protein, 32 aa, Artificial Sequence; identical to SEQ ID NO: 42216
  Cyclic GFR-binding peptide
  MOD_RES (6)..(7): Xaa is C or S

SEQ ID NO: 45195 - protein, 27 aa, Artificial Sequence
  Cyclic GFR-binding peptide
TKLSPINVLYFDDMGVPTYGKIPEGMS

SEQ ID NO: 45196 - protein, 31 aa, Artificial Sequence; identical to SEQ ID NO: 42218
  Cyclic GFR-binding peptide
  MOD_RES (2)..(3): Xaa is C or S

SEQ ID NO: 45197 - protein, 26 aa, Artificial Sequence
  Cyclic GFR-binding peptide
KLSPINVLYFDDSSNVIYGKIPNMVV

SEQ ID NO: 45198 - protein, 36 aa, Artificial Sequence; identical to SEQ ID NO: 42220
  Cyclic GFR-binding peptide
  MOD_RES (4)..(36): Xaa is C or S

SEQ ID NO: 45199 - protein, 41 aa, Artificial Sequence; identical to SEQ ID NO: 42221
  Cyclic GFR-binding peptide
  MOD_RES (6)..(7)..(38)..(40): Xaa is C or S

SEQ ID NO: 45200 - protein, 25 aa, Artificial Sequence
  Cyclic GFR-binding peptide
PTKLSPINVLYFDDMGVPTYGKIPE

SEQ ID NO: 45201 - protein, 27 aa, Artificial Sequence
  Cyclic GFR-binding peptide
PVKTSPINMLYFDNGRVLLYGKIPMIV

SEQ ID NO: 45202 - protein, 30 aa, Artificial Sequence; identical to SEQ ID NO: 42224
  Cyclic GFR-binding peptide
  MOD_RES (1)..(1): Xaa is C or S

SEQ ID NO: 45203 - protein, 37 aa, Artificial Sequence; identical to SEQ ID NO: 42225
  Cyclic GFR-binding peptide
  MOD_RES (6)..(7): Xaa is C or S

SEQ ID NO: 45204 - protein, 32 aa, Artificial Sequence; identical to SEQ ID NO: 42226
  Cyclic GFR-binding peptide
  MOD_RES (1)..(2): Xaa is C or S

SEQ ID NO: 45205 - protein, 30 aa, Artificial Sequence; identical to SEQ ID NO: 42227
  Cyclic GFR-binding peptide
  MOD_RES (1)..(2): Xaa is C or S

SEQ ID NO: 45206 - protein, 28 aa, Artificial Sequence
  Cyclic GFR-binding peptide
  MOD_RES (2)..(3): Xaa is C or S
PXXAPTQLSPINVLYFDDSSNVIYGKIP

SEQ ID NO: 45207 - protein, 31 aa, Artificial Sequence; identical to SEQ ID NO: 42229
  Cyclic GFR-binding peptide
  MOD_RES (30)..(30): Xaa is C or S

SEQ ID NO: 45208 - protein, 36 aa, Artificial Sequence; identical to SEQ ID NO: 42230
  Cyclic GFR-binding peptide
  MOD_RES (1)..(33)..(35): Xaa is C or S

SEQ ID NO: 45209 - protein, 28 aa, Artificial Sequence
  Cyclic GFR-binding peptide
PTRLSPINILYFDSANNVVYGKIPDMVV

SEQ ID NO: 45210 - protein, 31 aa, Artificial Sequence; identical to SEQ ID NO: 42232
  Cyclic GFR-binding peptide
  MOD_RES (29)..(31): Xaa is C or S

SEQ ID NO: 45211 - protein, 26 aa, Artificial Sequence
  Cyclic GFR-binding peptide
LSPINILYFDKGVVTYYGKIPGMAVS

SEQ ID NO: 45212 - protein, 34 aa, Artificial Sequence; identical to SEQ ID NO: 42234
  Cyclic GFR-binding peptide
  MOD_RES (5)..(6): Xaa is C or S

SEQ ID NO: 45213 - protein, 26 aa, Artificial Sequence
  Cyclic GFR-binding peptide
KLSPINILYFDKGVVTYYGKIPGMAV

SEQ ID NO: 45214 - protein, 23 aa, Artificial Sequence
  Cyclic GFR-binding peptide
TELSPINMLYFDEYDKVVYGKIP

SEQ ID NO: 45215 - protein, 31 aa, Artificial Sequence; identical to SEQ ID NO: 42237
  Cyclic GFR-binding peptide
  MOD_RES (1)..(2): Xaa is C or S

SEQ ID NO: 45216 - protein, 30 aa, Artificial Sequence; identical to SEQ ID NO: 42238
  Cyclic GFR-binding peptide
  MOD_RES (29)..(29): Xaa is C or S

SEQ ID NO: 45217 - protein, 34 aa, Artificial Sequence; identical to SEQ ID NO: 42239
  Cyclic GFR-binding peptide
  MOD_RES (5)..(6): Xaa is C or S

SEQ ID NO: 45218 - protein, 22 aa, Artificial Sequence
  Cyclic GFR-binding peptide
LSPINILYFDSANNVVYGKIPD

SEQ ID NO: 45219 - protein, 42 aa, Artificial Sequence; identical to SEQ ID NO: 42241
  Cyclic GFR-binding peptide
  MOD_RES (6)..(7)..(39)..(41): Xaa is C or S

SEQ ID NO: 45220 - protein, 22 aa, Artificial Sequence
  Cyclic GFR-binding peptide
LSPINVLYFDDMGVPTYGKIPE

SEQ ID NO: 45221 - protein, 37 aa, Artificial Sequence; identical to SEQ ID NO: 42243
  Cyclic GFR-binding peptide
  MOD_RES (6)..(7): Xaa is C or S

SEQ ID NO: 45222 - protein, 31 aa, Artificial Sequence; identical to SEQ ID NO: 42244
  Cyclic GFR-binding peptide
  MOD_RES (3)..(4): Xaa is C or S

SEQ ID NO: 45223 - protein, 30 aa, Artificial Sequence; identical to SEQ ID NO: 42245
  Cyclic GFR-binding peptide
  MOD_RES (3)..(4): Xaa is C or S

SEQ ID NO: 45224 - protein, 29 aa, Artificial Sequence
  Cyclic GFR-binding peptide
  MOD_RES (2)..(3): Xaa is C or S
TXXVPTRLSPINILYFDSANNVVYGKIPD

SEQ ID NO: 45225 - protein, 29 aa, Artificial Sequence
  Cyclic GFR-binding peptide
  MOD_RES (1)..(2): Xaa is C or S
XXAPTQLSPINVLYFDDSSNVIYGKIPNM

SEQ ID NO: 45226 - protein, 37 aa, Artificial Sequence; identical to SEQ ID NO: 42248
  Cyclic GFR-binding peptide
  MOD_RES (1)..(34)..(36): Xaa is C or S

SEQ ID NO: 45227 - protein, 38 aa, Artificial Sequence; identical to SEQ ID NO: 42249
  Cyclic GFR-binding peptide
  MOD_RES (4)..(5)..(37): Xaa is C or S

SEQ ID NO: 45228 - protein, 27 aa, Artificial Sequence
  Cyclic GFR-binding peptide
KTSPINMLYFDNGRVLLYGKIPMIVEE

SEQ ID NO: 45229 - protein, 33 aa, Artificial Sequence; identical to SEQ ID NO: 42251
  Cyclic GFR-binding peptide
  MOD_RES (2)..(3): Xaa is C or S

SEQ ID NO: 45230 - protein, 33 aa, Artificial Sequence; identical to SEQ ID NO: 42252
  Cyclic GFR-binding peptide
  MOD_RES (4)..(5): Xaa is C or S

SEQ ID NO: 45231 - protein, 31 aa, Artificial Sequence; identical to SEQ ID NO: 42253
  Cyclic GFR-binding peptide
  MOD_RES (31)..(31): Xaa is C or S

SEQ ID NO: 45232 - protein, 29 aa, Artificial Sequence
  Cyclic GFR-binding peptide
  MOD_RES (28)..(28): Xaa is C or S
LSPINVLYFDDSSNVIYGKIPNMVVRAXG

SEQ ID NO: 45233 - protein, 21 aa, Artificial Sequence
  Cyclic GFR-binding peptide
LSPINMLYFDEYDKVVYGKIP

SEQ ID NO: 45234 - protein, 38 aa, Artificial Sequence; identical to SEQ ID NO: 42256
  Cyclic GFR-binding peptide
  MOD_RES (3)..(35)..(37): Xaa is C or S

SEQ ID NO: 45235 - protein, 28 aa, Artificial Sequence
  Cyclic GFR-binding peptide
  MOD_RES (1)..(1): Xaa is C or S
XVPTKLSPINVLYFDDMGVPTYGKIPEG

SEQ ID NO: 45236 - protein, 24 aa, Artificial Sequence
  Cyclic GFR-binding peptide
LSPINVLYFDDMGVPTYGKIPEGM

SEQ ID NO: 45237 - protein, 25 aa, Artificial Sequence
  Cyclic GFR-binding peptide
VPARLSPINILYFDAANNVVYGKIP

SEQ ID NO: 45238 - protein, 26 aa, Artificial Sequence
  Cyclic GFR-binding peptide
APTQLSPINVLYFDDSSNVIYGKIPN

SEQ ID NO: 45239 - protein, 31 aa, Artificial Sequence; identical to SEQ ID NO: 42261
  Cyclic GFR-binding peptide
  MOD_RES (29)..(31): Xaa is C or S

SEQ ID NO: 45240 - protein, 40 aa, Artificial Sequence; identical to SEQ ID NO: 42262
  Cyclic GFR-binding peptide
  MOD_RES (6)..(7)..(39): Xaa is C or S

SEQ ID NO: 45241 - protein, 24 aa, Artificial Sequence
  Cyclic GFR-binding peptide
PTKLSPINVLYFDDSSNVIYGKIP

SEQ ID NO: 45242 - protein, 30 aa, Artificial Sequence; identical to SEQ ID NO: 42264
  Cyclic GFR-binding peptide
  MOD_RES (1)..(2): Xaa is C or S

SEQ ID NO: 45243 - protein, 29 aa, Artificial Sequence
  Cyclic GFR-binding peptide
  MOD_RES (2)..(3): Xaa is C or S
SXXVPARLSPINILYFDAANNVVYGKIPD

SEQ ID NO: 45244 - protein, 24 aa, Artificial Sequence
  Cyclic GFR-binding peptide
PTKLSPINVLYFDDMGVPTYGKIP

SEQ ID NO: 45245 - protein, 34 aa, Artificial Sequence; identical to SEQ ID NO: 42267
  Cyclic GFR-binding peptide
  MOD_RES (31)..(33): Xaa is C or S

SEQ ID NO: 45246 - protein, 26 aa, Artificial Sequence
  Cyclic GFR-binding peptide
  MOD_RES (1)..(1): Xaa is C or S
XVPTKLSPINILYFDKGVVTYYGKIP

SEQ ID NO: 45247 - protein, 24 aa, Artificial Sequence
  Cyclic GFR-binding peptide
TQLSPINVLYFDDSSNVIYGKIPN

SEQ ID NO: 45248 - protein, 39 aa, Artificial Sequence; identical to SEQ ID NO: 42270
  Cyclic GFR-binding peptide
  MOD_RES (3)..(4)..(36)..(38): Xaa is C or S

SEQ ID NO: 45249 - protein, 37 aa, Artificial Sequence; identical to SEQ ID NO: 42271
  Cyclic GFR-binding peptide
  MOD_RES (2)..(3)..(34)..(36): Xaa is C or S

SEQ ID NO: 45250 - protein, 34 aa, Artificial Sequence; identical to SEQ ID NO: 42272
  Cyclic GFR-binding peptide
  MOD_RES (5)..(6): Xaa is C or S

SEQ ID NO: 45251 - protein, 34 aa, Artificial Sequence; identical to SEQ ID NO: 42273
  Cyclic GFR-binding peptide
  MOD_RES (31)..(33): Xaa is C or S

SEQ ID NO: 45252 - protein, 33 aa, Artificial Sequence; identical to SEQ ID NO: 42274
  Cyclic GFR-binding peptide
  MOD_RES (1)..(33): Xaa is C or S

SEQ ID NO: 45253 - protein, 28 aa, Artificial Sequence
  Cyclic GFR-binding peptide
  MOD_RES (1)..(1): Xaa is C or S
XVPTELSPINMLYFDENEKVVYGKIPDM

SEQ ID NO: 45254 - protein, 30 aa, Artificial Sequence; identical to SEQ ID NO: 42276
  Cyclic GFR-binding peptide
  MOD_RES (30)..(30): Xaa is C or S

SEQ ID NO: 45255 - protein, 27 aa, Artificial Sequence
  Cyclic GFR-binding peptide
ELSPINMLYFDENEKVVYGKIPDMVVE

SEQ ID NO: 45256 - protein, 36 aa, Artificial Sequence; identical to SEQ ID NO: 42278
  Cyclic GFR-binding peptide
  MOD_RES (2)..(3)..(35): Xaa is C or S

SEQ ID NO: 45257 - protein, 34 aa, Artificial Sequence; identical to SEQ ID NO: 42279
  Cyclic GFR-binding peptide
  MOD_RES (5)..(6): Xaa is C or S

SEQ ID NO: 45258 - protein, 37 aa, Artificial Sequence; identical to SEQ ID NO: 42280
  Cyclic GFR-binding peptide
  MOD_RES (4)..(5): Xaa is C or S

SEQ ID NO: 45259 - protein, 35 aa, Artificial Sequence; identical to SEQ ID NO: 42281
  Cyclic GFR-binding peptide
  MOD_RES (5)..(6): Xaa is C or S

SEQ ID NO: 45260 - protein, 26 aa, Artificial Sequence
  Cyclic GFR-binding peptide
LSPINILYFDSANNVVYGKIPDMVVE

SEQ ID NO: 45261 - protein, 26 aa, Artificial Sequence
  Cyclic GFR-binding peptide
PTQLSPINVLYFDDSSNVIYGKIPNM

SEQ ID NO: 45262 - protein, 34 aa, Artificial Sequence; identical to SEQ ID NO: 42284
  Cyclic GFR-binding peptide
  MOD_RES (4)..(5): Xaa is C or S

SEQ ID NO: 45263 - protein, 38 aa, Artificial Sequence; identical to SEQ ID NO: 42285
  Cyclic GFR-binding peptide
  MOD_RES (5)..(6)..(38): Xaa is C or S

SEQ ID NO: 45264 - protein, 29 aa, Artificial Sequence
  Cyclic GFR-binding peptide
PTQLSPINVLYFDDSSNVIYGKIPNMVVR

SEQ ID NO: 45265 - protein, 30 aa, Artificial Sequence; identical to SEQ ID NO: 42287
  Cyclic GFR-binding peptide
  MOD_RES (29)..(29): Xaa is C or S

SEQ ID NO: 45266 - protein, 26 aa, Artificial Sequence
  Cyclic GFR-binding peptide
LSPINVLYFDDSSNVIYGKIPNMVVR

SEQ ID NO: 45267 - protein, 31 aa, Artificial Sequence; identical to SEQ ID NO: 42289
  Cyclic GFR-binding peptide
  MOD_RES (2)..(3): Xaa is C or S

SEQ ID NO: 45268 - protein, 35 aa, Artificial Sequence; identical to SEQ ID NO: 42290
  Cyclic GFR-binding peptide
  MOD_RES (7)..(7): Xaa is C or S

SEQ ID NO: 45269 - protein, 36 aa, Artificial Sequence; identical to SEQ ID NO: 42291
  Cyclic GFR-binding peptide
  MOD_RES (6)..(7): Xaa is C or S

SEQ ID NO: 45270 - protein, 26 aa, Artificial Sequence
  Cyclic GFR-binding peptide
  MOD_RES (1)..(1): Xaa is C or S
XAPTKLSPINVLYFDSSNNVIYGKIP

SEQ ID NO: 45271 - protein, 36 aa, Artificial Sequence; identical to SEQ ID NO: 42293
  Cyclic GFR-binding peptide
  MOD_RES (1)..(2)..(33)..(35): Xaa is C or S

SEQ ID NO: 45272 - protein, 30 aa, Artificial Sequence; identical to SEQ ID NO: 42294
  Cyclic GFR-binding peptide

SEQ ID NO: 45273 - protein, 25 aa, Artificial Sequence
  Cyclic GFR-binding peptide
KLSPINVLYFDDSSNVIYGKIPNMV

SEQ ID NO: 45274 - protein, 30 aa, Artificial Sequence; identical to SEQ ID NO: 42296
  Cyclic GFR-binding peptide
  MOD_RES (27)..(29): Xaa is C or S

SEQ ID NO: 45275 - protein, 37 aa, Artificial Sequence; identical to SEQ ID NO: 42297
  Cyclic GFR-binding peptide
  MOD_RES (3)..(4)..(37): Xaa is C or S

SEQ ID NO: 45276 - protein, 25 aa, Artificial Sequence
  Cyclic GFR-binding peptide
KLSPINVLYFDSSNNVIYGKIPNMV

SEQ ID NO: 45277 - protein, 32 aa, Artificial Sequence; identical to SEQ ID NO: 42299
  Cyclic GFR-binding peptide
  MOD_RES (30)..(32): Xaa is C or S

SEQ ID NO: 45278 - protein, 38 aa, Artificial Sequence; identical to SEQ ID NO: 42300
  Cyclic GFR-binding peptide
  MOD_RES (2)..(3)..(35)..(37): Xaa is C or S

SEQ ID NO: 45279 - protein, 33 aa, Artificial Sequence; identical to SEQ ID NO: 42301
  Cyclic GFR-binding peptide
  MOD_RES (31)..(33): Xaa is C or S

SEQ ID NO: 45280 - protein, 33 aa, Artificial Sequence; identical to SEQ ID NO: 42302
  Cyclic GFR-binding peptide
  MOD_RES (1)..(33): Xaa is C or S

SEQ ID NO: 45281 - protein, 32 aa, Artificial Sequence; identical to SEQ ID NO: 42303
  Cyclic GFR-binding peptide
  MOD_RES (2)..(3): Xaa is C or S

SEQ ID NO: 45282 - protein, 25 aa, Artificial Sequence
  Cyclic GFR-binding peptide
SPINILYFDSANNVVYGKIPDMVVE

SEQ ID NO: 45283 - protein, 35 aa, Artificial Sequence; identical to SEQ ID NO: 42305
  Cyclic GFR-binding peptide
  MOD_RES (2)..(3)..(35): Xaa is C or S

SEQ ID NO: 45284 - protein, 34 aa, Artificial Sequence; identical to SEQ ID NO: 42306
  Cyclic GFR-binding peptide
  MOD_RES (6)..(7): Xaa is C or S

SEQ ID NO: 45285 - protein, 37 aa, Artificial Sequence; identical to SEQ ID NO: 42307
  Cyclic GFR-binding peptide
  MOD_RES (5)..(6): Xaa is C or S

SEQ ID NO: 45286 - protein, 35 aa, Artificial Sequence; identical to SEQ ID NO: 42308
  Cyclic GFR-binding peptide
  MOD_RES (1)..(34): Xaa is C or S

SEQ ID NO: 45287 - protein, 43 aa, Artificial Sequence; identical to SEQ ID NO: 42309
  Cyclic GFR-binding peptide
  MOD_RES (6)..(7)..(40)..(42): Xaa is C or S

SEQ ID NO: 45288 - protein, 23 aa, Artificial Sequence
  Cyclic GFR-binding peptide
LSPINVLYFDSSNNVIYGKIPNM

SEQ ID NO: 45289 - protein, 36 aa, Artificial Sequence; identical to SEQ ID NO: 42311
  Cyclic GFR-binding peptide
  MOD_RES (2)..(3)..(36): Xaa is C or S

SEQ ID NO: 45290 - protein, 34 aa, Artificial Sequence; identical to SEQ ID NO: 42312
  Cyclic GFR-binding peptide
  MOD_RES (7)..(7): Xaa is C or S

SEQ ID NO: 45291 - protein, 33 aa, Artificial Sequence; identical to SEQ ID NO: 42313
  Cyclic GFR-binding peptide
  MOD_RES (2)..(3): Xaa is C or S

SEQ ID NO: 45292 - protein, 21 aa, Artificial Sequence
  Cyclic GFR-binding peptide
SPINMLYFDNGRVLLYGKIPM

SEQ ID NO: 45293 - protein, 26 aa, Artificial Sequence
  Cyclic GFR-binding peptide
TKLSPINILYFDKGVVTYYGKIPGMA

SEQ ID NO: 45294 - protein, 34 aa, Artificial Sequence; identical to SEQ ID NO: 42316
  Cyclic GFR-binding peptide
  MOD_RES (1)..(33): Xaa is C or S

SEQ ID NO: 45295 - protein, 26 aa, Artificial Sequence
  Cyclic GFR-binding peptide
TQLSPINVLYFDDSSNVIYGKIPNMV

SEQ ID NO: 45296 - protein, 29 aa, Artificial Sequence
  Cyclic GFR-binding peptide
  MOD_RES (2)..(2): Xaa is C or S
TXAPTKLSPINVLYFDDSSNVIYGKIPNM

SEQ ID NO: 45297 - protein, 31 aa, Artificial Sequence; identical to SEQ ID NO: 42319
  Cyclic GFR-binding peptide
  MOD_RES (2)..(3): Xaa is C or S

SEQ ID NO: 45298 - protein, 28 aa, Artificial Sequence
  Cyclic GFR-binding peptide
APTQLSPINVLYFDDSSNVIYGKIPNMV

SEQ ID NO: 45299 - protein, 36 aa, Artificial Sequence; identical to SEQ ID NO: 42321
  Cyclic GFR-binding peptide
  MOD_RES (3)..(4)..(36): Xaa is C or S

SEQ ID NO: 45300 - protein, 21 aa, Artificial Sequence
  Cyclic GFR-binding peptide
SPINVLYFDDMGVPTYGKIPE

SEQ ID NO: 45301 - protein, 29 aa, Artificial Sequence
  Cyclic GFR-binding peptide
  MOD_RES (29)..(29): Xaa is C or S
ELSPINMLYFDEYDKVVYGKIPEMVVEGX

SEQ ID NO: 45302 - protein, 41 aa, Artificial Sequence; identical to SEQ ID NO: 42324
  Cyclic GFR-binding peptide
  MOD_RES (5)..(6)..(39)..(41): Xaa is C or S

SEQ ID NO: 45303 - protein, 40 aa, Artificial Sequence; identical to SEQ ID NO: 42325
  Cyclic GFR-binding peptide
  MOD_RES (4)..(5)..(37)..(39): Xaa is C or S

SEQ ID NO: 45304 - protein, 28 aa, Artificial Sequence
  Cyclic GFR-binding peptide
  MOD_RES (1)..(1): Xaa is C or S
XVPTELSPINMLYFDEYDKVVYGKIPEM

SEQ ID NO: 45305 - protein, 32 aa, Artificial Sequence; identical to SEQ ID NO: 42327
  Cyclic GFR-binding peptide
  MOD_RES (6)..(7): Xaa is C or S

SEQ ID NO: 45306 - protein, 35 aa, Artificial Sequence; identical to SEQ ID NO: 42328
  Cyclic GFR-binding peptide
  MOD_RES (1)..(2)..(34): Xaa is C or S

SEQ ID NO: 45307 - protein, 22 aa, Artificial Sequence
  Cyclic GFR-binding peptide
SPINVLYFDDMGVPTYGKIPEG

SEQ ID NO: 45308 - protein, 38 aa, Artificial Sequence; identical to SEQ ID NO: 42330
  Cyclic GFR-binding peptide
  MOD_RES (3)..(4)..(36)..(38): Xaa is C or S

SEQ ID NO: 45309 - protein, 30 aa, Artificial Sequence; identical to SEQ ID NO: 42331
  Cyclic GFR-binding peptide
  MOD_RES (28)..(30): Xaa is C or S

SEQ ID NO: 45310 - protein, 34 aa, Artificial Sequence; identical to SEQ ID NO: 42332
  Cyclic GFR-binding peptide
  MOD_RES (6)..(7): Xaa is C or S

SEQ ID NO: 45311 - protein, 40 aa, Artificial Sequence; identical to SEQ ID NO: 42333
  Cyclic GFR-binding peptide
  MOD_RES (5)..(6)..(39): Xaa is C or S

SEQ ID NO: 45312 - protein, 36 aa, Artificial Sequence; identical to SEQ ID NO: 42334
  Cyclic GFR-binding peptide
  MOD_RES (3)..(4): Xaa is C or S

SEQ ID NO: 45313 - protein, 24 aa, Artificial Sequence
  Cyclic GFR-binding peptide
PTQLSPINVLYFDDSSNVIYGKIP

SEQ ID NO: 45314 - protein, 31 aa, Artificial Sequence; identical to SEQ ID NO: 42336
  Cyclic GFR-binding peptide
  MOD_RES (1)..(2): Xaa is C or S

SEQ ID NO: 45315 - protein, 39 aa, Artificial Sequence; identical to SEQ ID NO: 42337
  Cyclic GFR-binding peptide
  MOD_RES (5)..(37)..(39): Xaa is C or S

SEQ ID NO: 45316 - protein, 31 aa, Artificial Sequence; identical to SEQ ID NO: 42338
  Cyclic GFR-binding peptide
  MOD_RES (4)..(5): Xaa is C or S

SEQ ID NO: 45317 - protein, 33 aa, Artificial Sequence; identical to SEQ ID NO: 42339
  Cyclic GFR-binding peptide
  MOD_RES (3)..(4): Xaa is C or S

SEQ ID NO: 45318 - protein, 30 aa, Artificial Sequence; identical to SEQ ID NO: 42340
  Cyclic GFR-binding peptide

SEQ ID NO: 45319 - protein, 28 aa, Artificial Sequence
  Cyclic GFR-binding peptide
  MOD_RES (28)..(28): Xaa is C or S
LSPINMLYFDENEKVVYGKIPDMVVEGX

SEQ ID NO: 45320 - protein, 26 aa, Artificial Sequence
  Cyclic GFR-binding peptide
  MOD_RES (1)..(1): Xaa is C or S
XVPTRLSPINILYFDSANNVVYGKIP

SEQ ID NO: 45321 - protein, 25 aa, Artificial Sequence
  Cyclic GFR-binding peptide
TKLSPINVLYFDDMGVPTYGKIPEG

SEQ ID NO: 45322 - protein, 31 aa, Artificial Sequence; identical to SEQ ID NO: 42344
  Cyclic GFR-binding peptide
  MOD_RES (1)..(2): Xaa is C or S

SEQ ID NO: 45323 - protein, 25 aa, Artificial Sequence
  Cyclic GFR-binding peptide
LSPINVLYFDDSSNVIYGKIPNMVV

SEQ ID NO: 45324 - protein, 31 aa, Artificial Sequence; identical to SEQ ID NO: 42346
  Cyclic GFR-binding peptide
  MOD_RES (4)..(5): Xaa is C or S

SEQ ID NO: 45325 - protein, 32 aa, Artificial Sequence; identical to SEQ ID NO: 42347
  Cyclic GFR-binding peptide
  MOD_RES (5)..(6): Xaa is C or S

SEQ ID NO: 45326 - protein, 28 aa, Artificial Sequence
  Cyclic GFR-binding peptide
  MOD_RES (2)..(3): Xaa is C or S
AXXVPTKLSPINVLYFDDMGVPTYGKIP

SEQ ID NO: 45327 - protein, 21 aa, Artificial Sequence
  Cyclic GFR-binding peptide
LSPINILYFDSANNVVYGKIP

SEQ ID NO: 45328 - protein, 33 aa, Artificial Sequence; identical to SEQ ID NO: 42350
  Cyclic GFR-binding peptide
  MOD_RES (2)..(3): Xaa is C or S

SEQ ID NO: 45329 - protein, 29 aa, Artificial Sequence
  Cyclic GFR-binding peptide
  MOD_RES (1)..(1): Xaa is C or S
XAPTKLSPINVLYFDDSSNVIYGKIPNMV

SEQ ID NO: 45330 - protein, 32 aa, Artificial Sequence; identical to SEQ ID NO: 42352
  Cyclic GFR-binding peptide
  MOD_RES (1)..(1): Xaa is C or S

SEQ ID NO: 45331 - protein, 34 aa, Artificial Sequence; identical to SEQ ID NO: 42353
  Cyclic GFR-binding peptide
  MOD_RES (1)..(33): Xaa is C or S

SEQ ID NO: 45332 - protein, 28 aa, Artificial Sequence
  Cyclic GFR-binding peptide
VKTSPINMLYFDNGRVLLYGKIPMIVEE

SEQ ID NO: 45333 - protein, 28 aa, Artificial Sequence
  Cyclic GFR-binding peptide
TKLSPINILYFDKGVVTYYGKIPGMAVS

SEQ ID NO: 45334 - protein, 34 aa, Artificial Sequence; identical to SEQ ID NO: 42356
  Cyclic GFR-binding peptide
  MOD_RES (1)..(2)..(34): Xaa is C or S

SEQ ID NO: 45335 - protein, 34 aa, Artificial Sequence; identical to SEQ ID NO: 42357
  Cyclic GFR-binding peptide
  MOD_RES (4)..(5): Xaa is C or S

SEQ ID NO: 45336 - protein, 38 aa, Artificial Sequence; identical to SEQ ID NO: 42358
  Cyclic GFR-binding peptide
  MOD_RES (6)..(7): Xaa is C or S

SEQ ID NO: 45337 - protein, 28 aa, Artificial Sequence
  Cyclic GFR-binding peptide
PARLSPINILYFDAANNVVYGKIPDMVV

SEQ ID NO: 45338 - protein, 29 aa, Artificial Sequence
  Cyclic GFR-binding peptide
  MOD_RES (3)..(4): Xaa is C or S
KAXXVPTELSPINMLYFDEYDKVVYGKIP

SEQ ID NO: 45339 - protein, 34 aa, Artificial Sequence; identical to SEQ ID NO: 42361
  Cyclic GFR-binding peptide
  MOD_RES (2)..(3): Xaa is C or S

SEQ ID NO: 45340 - protein, 30 aa, Artificial Sequence; identical to SEQ ID NO: 42362
  Cyclic GFR-binding peptide
  MOD_RES (4)..(5): Xaa is C or S

SEQ ID NO: 45341 - protein, 30 aa, Artificial Sequence; identical to SEQ ID NO: 42363
  Cyclic GFR-binding peptide

SEQ ID NO: 45342 - protein, 22 aa, Artificial Sequence
  Cyclic GFR-binding peptide
LSPINVLYFDSSNNVIYGKIPN

SEQ ID NO: 45343 - protein, 38 aa, Artificial Sequence; identical to SEQ ID NO: 42365
  Cyclic GFR-binding peptide
  MOD_RES (4)..(5)..(37): Xaa is C or S

SEQ ID NO: 45344 - protein, 31 aa, Artificial Sequence; identical to SEQ ID NO: 42366
  Cyclic GFR-binding peptide
  MOD_RES (28)..(30): Xaa is C or S

SEQ ID NO: 45345 - protein, 26 aa, Artificial Sequence
  Cyclic GFR-binding peptide
VPTKLSPINILYFDKGVVTYYGKIPG

SEQ ID NO: 45346 - protein, 27 aa, Artificial Sequence
  Cyclic GFR-binding peptide
  MOD_RES (1)..(2): Xaa is C or S
XXAPTQLSPINVLYFDDSSNVIYGKIP

SEQ ID NO: 45347 - protein, 26 aa, Artificial Sequence
  Cyclic GFR-binding peptide
RLSPINILYFDAANNVVYGKIPDMVV

SEQ ID NO: 45348 - protein, 28 aa, Artificial Sequence
  Cyclic GFR-binding peptide
PTQLSPINVLYFDDSSNVIYGKIPNMVV

SEQ ID NO: 45349 - protein, 27 aa, Artificial Sequence
  Cyclic GFR-binding peptide
  MOD_RES (2)..(2): Xaa is C or S
TXAPTKLSPINVLYFDDSSNVIYGKIP

SEQ ID NO: 45350 - protein, 32 aa, Artificial Sequence; identical to SEQ ID NO: 42372
  Cyclic GFR-binding peptide
  MOD_RES (32)..(32): Xaa is C or S

SEQ ID NO: 45351 - protein, 30 aa, Artificial Sequence; identical to SEQ ID NO: 42373
  Cyclic GFR-binding peptide

SEQ ID NO: 45352 - protein, 28 aa, Artificial Sequence
  Cyclic GFR-binding peptide
PTELSPINMLYFDENEKVVYGKIPDMVV

SEQ ID NO: 45353 - protein, 28 aa, Artificial Sequence
  Cyclic GFR-binding peptide
  MOD_RES (28)..(28): Xaa is C or S
LSPINMLYFDEYDKVVYGKIPEMVVEGX

SEQ ID NO: 45354 - protein, 28 aa, Artificial Sequence
  Cyclic GFR-binding peptide
TQLSPINVLYFDDSSNVIYGKIPNMVVR

SEQ ID NO: 45355 - protein, 30 aa, Artificial Sequence; identical to SEQ ID NO: 42377
  Cyclic GFR-binding peptide
  MOD_RES (29)..(29): Xaa is C or S

SEQ ID NO: 45356 - protein, 38 aa, Artificial Sequence; identical to SEQ ID NO: 42378
  Cyclic GFR-binding peptide
  MOD_RES (3)..(4)..(35)..(37): Xaa is C or S

SEQ ID NO: 45357 - protein, 27 aa, Artificial Sequence
  Cyclic GFR-binding peptide
KLSPINVLYFDSSNNVIYGKIPNMVVK

SEQ ID NO: 45358 - protein, 34 aa, Artificial Sequence; identical to SEQ ID NO: 42380
  Cyclic GFR-binding peptide
  MOD_RES (32)..(34): Xaa is C or S

SEQ ID NO: 45359 - protein, 32 aa, Artificial Sequence; identical to SEQ ID NO: 42381
  Cyclic GFR-binding peptide
  MOD_RES (2)..(3): Xaa is C or S

SEQ ID NO: 45360 - protein, 29 aa, Artificial Sequence
  Cyclic GFR-binding peptide
  MOD_RES (27)..(29): Xaa is C or S
SPINILYFDAANNVVYGKIPDMVVEAXGX

SEQ ID NO: 45361 - protein, 24 aa, Artificial Sequence
  Cyclic GFR-binding peptide
SPINILYFDSANNVVYGKIPDMVV

SEQ ID NO: 45362 - protein, 27 aa, Artificial Sequence
  Cyclic GFR-binding peptide
TRLSPINILYFDSANNVVYGKIPDMVV

SEQ ID NO: 45363 - protein, 40 aa, Artificial Sequence; identical to SEQ ID NO: 42385
  Cyclic GFR-binding peptide
  MOD_RES (5)..(6)..(38)..(40): Xaa is C or S

SEQ ID NO: 45364 - protein, 34 aa, Artificial Sequence; identical to SEQ ID NO: 42386
  Cyclic GFR-binding peptide
  MOD_RES (1)..(2)..(34): Xaa is C or S

SEQ ID NO: 45365 - protein, 21 aa, Artificial Sequence
  Cyclic GFR-binding peptide
SPINVLYFDDSSNVIYGKIPN

SEQ ID NO: 45366 - protein, 33 aa, Artificial Sequence; identical to SEQ ID NO: 42388
  Cyclic GFR-binding peptide
  MOD_RES (6)..(7): Xaa is C or S

SEQ ID NO: 45367 - protein, 25 aa, Artificial Sequence
  Cyclic GFR-binding peptide
KTSPINMLYFDNGRVLLYGKIPMIV

SEQ ID NO: 45368 - protein, 31 aa, Artificial Sequence; identical to SEQ ID NO: 42390
  Cyclic GFR-binding peptide
  MOD_RES (30)..(30): Xaa is C or S

SEQ ID NO: 45369 - protein, 29 aa, Artificial Sequence
  Cyclic GFR-binding peptide
PTKLSPINVLYFDDMGVPTYGKIPEGMSV

SEQ ID NO: 45370 - protein, 31 aa, Artificial Sequence; identical to SEQ ID NO: 42392
  Cyclic GFR-binding peptide
  MOD_RES (3)..(4): Xaa is C or S

SEQ ID NO: 45371 - protein, 28 aa, Artificial Sequence
  Cyclic GFR-binding peptide
KLSPINVLYFDDMGVPTYGKIPEGMSVA

SEQ ID NO: 45372 - protein, 28 aa, Artificial Sequence
  Cyclic GFR-binding peptide
PTKLSPINVLYFDDMGVPTYGKIPEGMS

SEQ ID NO: 45373 - protein, 28 aa, Artificial Sequence
  Cyclic GFR-binding peptide
  MOD_RES (28)..(28): Xaa is C or S
LSPINVLYFDDSSNVIYGKIPNMVVRSX

SEQ ID NO: 45374 - protein, 35 aa, Artificial Sequence; identical to SEQ ID NO: 42396
  Cyclic GFR-binding peptide
  MOD_RES (6)..(7): Xaa is C or S

SEQ ID NO: 45375 - protein, 23 aa, Artificial Sequence
  Cyclic GFR-binding peptide
SPINMLYFDENEKVVYGKIPDMV

SEQ ID NO: 45376 - protein, 37 aa, Artificial Sequence; identical to SEQ ID NO: 42398
  Cyclic GFR-binding peptide
  MOD_RES (1)..(2)..(34)..(36): Xaa is C or S

SEQ ID NO: 45377 - protein, 37 aa, Artificial Sequence; identical to SEQ ID NO: 42399
  Cyclic GFR-binding peptide
  MOD_RES (1)..(2)..(34)..(36): Xaa is C or S

SEQ ID NO: 45378 - protein, 37 aa, Artificial Sequence; identical to SEQ ID NO: 42400
  Cyclic GFR-binding peptide
  MOD_RES (3)..(4)..(36): Xaa is C or S

SEQ ID NO: 45379 - protein, 34 aa, Artificial Sequence; identical to SEQ ID NO: 42401
  Cyclic GFR-binding peptide
  MOD_RES (31)..(33): Xaa is C or S

SEQ ID NO: 45380 - protein, 35 aa, Artificial Sequence; identical to SEQ ID NO: 42402
  Cyclic GFR-binding peptide
  MOD_RES (32)..(34): Xaa is C or S

SEQ ID NO: 45381 - protein, 38 aa, Artificial Sequence; identical to SEQ ID NO: 42403
  Cyclic GFR-binding peptide
  MOD_RES (3)..(4)..(36)..(38): Xaa is C or S

SEQ ID NO: 45382 - protein, 31 aa, Artificial Sequence; identical to SEQ ID NO: 42404
  Cyclic GFR-binding peptide
  MOD_RES (3)..(4): Xaa is C or S

SEQ ID NO: 45383 - protein, 36 aa, Artificial Sequence; identical to SEQ ID NO: 42405
  Cyclic GFR-binding peptide
  MOD_RES (4)..(5): Xaa is C or S

SEQ ID NO: 45384 - protein, 28 aa, Artificial Sequence
  Cyclic GFR-binding peptide
  MOD_RES (2)..(3): Xaa is C or S
SXXVPARLSPINILYFDAANNVVYGKIP

SEQ ID NO: 45385 - protein, 35 aa, Artificial Sequence; identical to SEQ ID NO: 42407
  Cyclic GFR-binding peptide
  MOD_RES (5)..(6): Xaa is C or S

SEQ ID NO: 45386 - protein, 27 aa, Artificial Sequence
  Cyclic GFR-binding peptide
LSPINVLYFDDMGVPTYGKIPEGMSVA

SEQ ID NO: 45387 - protein, 35 aa, Artificial Sequence; identical to SEQ ID NO: 42409
  Cyclic GFR-binding peptide
  MOD_RES (1)..(2)..(34): Xaa is C or S

SEQ ID NO: 45388 - protein, 25 aa, Artificial Sequence
  Cyclic GFR-binding peptide
VPTKLSPINILYFDKGVVTYYGKIP

SEQ ID NO: 45389 - protein, 28 aa, Artificial Sequence
  Cyclic GFR-binding peptide
ELSPINMLYFDENEKVVYGKIPDMVVEG

SEQ ID NO: 45390 - protein, 38 aa, Artificial Sequence; identical to SEQ ID NO: 42412
  Cyclic GFR-binding peptide
  MOD_RES (3)..(4)..(36)..(38): Xaa is C or S

SEQ ID NO: 45391 - protein, 38 aa, Artificial Sequence; identical to SEQ ID NO: 42413
  Cyclic GFR-binding peptide
  MOD_RES (7)..(7): Xaa is C or S

SEQ ID NO: 45392 - protein, 31 aa, Artificial Sequence; identical to SEQ ID NO: 42414
  Cyclic GFR-binding peptide
  MOD_RES (30)..(30): Xaa is C or S

SEQ ID NO: 45393 - protein, 29 aa, Artificial Sequence
  Cyclic GFR-binding peptide
  MOD_RES (3)..(4): Xaa is C or S
ASXXVPARLSPINILYFDAANNVVYGKIP

SEQ ID NO: 45394 - protein, 34 aa, Artificial Sequence; identical to SEQ ID NO: 42416
  Cyclic GFR-binding peptide
  MOD_RES (32)..(34): Xaa is C or S

SEQ ID NO: 45395 - protein, 27 aa, Artificial Sequence
  Cyclic GFR-binding peptide
  MOD_RES (27)..(27): Xaa is C or S
SPINVLYFDDSSNVIYGKIPNMVVRSX

SEQ ID NO: 45396 - protein, 25 aa, Artificial Sequence
  Cyclic GFR-binding peptide
TELSPINMLYFDEYDKVVYGKIPEM

SEQ ID NO: 45397 - protein, 40 aa, Artificial Sequence; identical to SEQ ID NO: 42419
  Cyclic GFR-binding peptide
  MOD_RES (5)..(6)..(38)..(40): Xaa is C or S

SEQ ID NO: 45398 - protein, 34 aa, Artificial Sequence; identical to SEQ ID NO: 42420
  Cyclic GFR-binding peptide
  MOD_RES (4)..(5): Xaa is C or S

SEQ ID NO: 45399 - protein, 30 aa, Artificial Sequence; identical to SEQ ID NO: 42421
  Cyclic GFR-binding peptide
  MOD_RES (3)..(4): Xaa is C or S

SEQ ID NO: 45400 - protein, 32 aa, Artificial Sequence; identical to SEQ ID NO: 42422
  Cyclic GFR-binding peptide
  MOD_RES (2)..(3): Xaa is C or S

SEQ ID NO: 45401 - protein, 33 aa, Artificial Sequence; identical to SEQ ID NO: 42423
  Cyclic GFR-binding peptide
  MOD_RES (2)..(3): Xaa is C or S

SEQ ID NO: 45402 - protein, 36 aa, Artificial Sequence; identical to SEQ ID NO: 42424
  Cyclic GFR-binding peptide
  MOD_RES (6)..(7): Xaa is C or S

SEQ ID NO: 45403 - protein, 20 aa, Artificial Sequence
  Cyclic GFR-binding peptide
SPINILYFDAANNVVYGKIP

SEQ ID NO: 45404 - protein, 31 aa, Artificial Sequence; identical to SEQ ID NO: 42426
  Cyclic GFR-binding peptide
  MOD_RES (1)..(2): Xaa is C or S

SEQ ID NO: 45405 - protein, 28 aa, Artificial Sequence
  Cyclic GFR-binding peptide
  MOD_RES (27)..(27): Xaa is C or S
SPINILYFDSANNVVYGKIPDMVVESXG

SEQ ID NO: 45406 - protein, 24 aa, Artificial Sequence
  Cyclic GFR-binding peptide
PTKLSPINILYFDKGVVTYYGKIP

SEQ ID NO: 45407 - protein, 33 aa, Artificial Sequence; identical to SEQ ID NO: 42429
  Cyclic GFR-binding peptide
  MOD_RES (31)..(33): Xaa is C or S

SEQ ID NO: 45408 - protein, 27 aa, Artificial Sequence
  Cyclic GFR-binding peptide
  MOD_RES (1)..(1): Xaa is C or S
XAPTQLSPINVLYFDDSSNVIYGKIPN

SEQ ID NO: 45409 - protein, 37 aa, Artificial Sequence; identical to SEQ ID NO: 42431
  Cyclic GFR-binding peptide
  MOD_RES (6)..(7): Xaa is C or S

SEQ ID NO: 45410 - protein, 37 aa, Artificial Sequence; identical to SEQ ID NO: 42432
  Cyclic GFR-binding peptide
  MOD_RES (5)..(6): Xaa is C or S

SEQ ID NO: 45411 - protein, 33 aa, Artificial Sequence; identical to SEQ ID NO: 42433
  Cyclic GFR-binding peptide
  MOD_RES (3)..(4): Xaa is C or S

SEQ ID NO: 45412 - protein, 25 aa, Artificial Sequence
  Cyclic GFR-binding peptide
VKTSPINMLYFDNGRVLLYGKIPMI

SEQ ID NO: 45413 - protein, 25 aa, Artificial Sequence
  Cyclic GFR-binding peptide
APTKLSPINVLYFDSSNNVIYGKIP

SEQ ID NO: 45414 - protein, 36 aa, Artificial Sequence; identical to SEQ ID NO: 42436
  Cyclic GFR-binding peptide
  MOD_RES (1)..(2)..(34)..(36): Xaa is C or S

SEQ ID NO: 45415 - protein, 27 aa, Artificial Sequence
  Cyclic GFR-binding peptide
  MOD_RES (27)..(27): Xaa is C or S
TSPINMLYFDNGRVLLYGKIPMIVEEX

SEQ ID NO: 45416 - protein, 27 aa, Artificial Sequence
  Cyclic GFR-binding peptide
  MOD_RES (27)..(27): Xaa is C or S
SPINMLYFDENEKVVYGKIPDMVVEGX

SEQ ID NO: 45417 - protein, 23 aa, Artificial Sequence
  Cyclic GFR-binding peptide
KLSPINVLYFDDSSNVIYGKIPN

SEQ ID NO: 45418 - protein, 32 aa, Artificial Sequence; identical to SEQ ID NO: 42440
  Cyclic GFR-binding peptide
  MOD_RES (5)..(6): Xaa is C or S

SEQ ID NO: 45419 - protein, 26 aa, Artificial Sequence
  Cyclic GFR-binding peptide
SPINVLYFDSSNNVIYGKIPNMVVKA

SEQ ID NO: 45420 - protein, 21 aa, Artificial Sequence
  Cyclic GFR-binding peptide
SPINVLYFDSSNNVIYGKIPN

SEQ ID NO: 45421 - protein, 31 aa, Artificial Sequence; identical to SEQ ID NO: 42443
  Cyclic GFR-binding peptide
  MOD_RES (3)..(3): Xaa is C or S

SEQ ID NO: 45422 - protein, 40 aa, Artificial Sequence; identical to SEQ ID NO: 42444
  Cyclic GFR-binding peptide
  MOD_RES (4)..(5)..(38)..(40): Xaa is C or S

SEQ ID NO: 45423 - protein, 29 aa, Artificial Sequence
  Cyclic GFR-binding peptide
VPTELSPINMLYFDEYDKVVYGKIPEMVV

SEQ ID NO: 45424 - protein, 37 aa, Artificial Sequence; identical to SEQ ID NO: 42446
  Cyclic GFR-binding peptide
  MOD_RES (6)..(7): Xaa is C or S

SEQ ID NO: 45425 - protein, 26 aa, Artificial Sequence
  Cyclic GFR-binding peptide
LSPINMLYFDEYDKVVYGKIPEMVVE

SEQ ID NO: 45426 - protein, 22 aa, Artificial Sequence
  Cyclic GFR-binding peptide
SPINMLYFDNGRVLLYGKIPMI

SEQ ID NO: 45427 - protein, 35 aa, Artificial Sequence; identical to SEQ ID NO: 42449
  Cyclic GFR-binding peptide
  MOD_RES (3)..(4): Xaa is C or S

SEQ ID NO: 45428 - protein, 36 aa, Artificial Sequence; identical to SEQ ID NO: 42450
  Cyclic GFR-binding peptide
  MOD_RES (3)..(4)..(36): Xaa is C or S

SEQ ID NO: 45429 - protein, 26 aa, Artificial Sequence
  Cyclic GFR-binding peptide
PARLSPINILYFDAANNVVYGKIPDM

SEQ ID NO: 45430 - protein, 30 aa, Artificial Sequence; identical to SEQ ID NO: 42452
  Cyclic GFR-binding peptide
  MOD_RES (4)..(5): Xaa is C or S

SEQ ID NO: 45431 - protein, 36 aa, Artificial Sequence; identical to SEQ ID NO: 42453
  Cyclic GFR-binding peptide
  MOD_RES (2)..(34)..(36): Xaa is C or S

SEQ ID NO: 45432 - protein, 27 aa, Artificial Sequence
  Cyclic GFR-binding peptide
PTKLSPINVLYFDDMGVPTYGKIPEGM

SEQ ID NO: 45433 - protein, 36 aa, Artificial Sequence; identical to SEQ ID NO: 42455
  Cyclic GFR-binding peptide
  MOD_RES (1)..(33)..(35): Xaa is C or S

SEQ ID NO: 45434 - protein, 37 aa, Artificial Sequence; identical to SEQ ID NO: 42456
  Cyclic GFR-binding peptide
  MOD_RES (3)..(35)..(37): Xaa is C or S

SEQ ID NO: 45435 - protein, 37 aa, Artificial Sequence; identical to SEQ ID NO: 42457
  Cyclic GFR-binding peptide
  MOD_RES (4)..(5)..(37): Xaa is C or S

SEQ ID NO: 45436 - protein, 39 aa, Artificial Sequence; identical to SEQ ID NO: 42458
  Cyclic GFR-binding peptide
  MOD_RES (5)..(6)..(39): Xaa is C or S

SEQ ID NO: 45437 - protein, 27 aa, Artificial Sequence
  Cyclic GFR-binding peptide
ARLSPINILYFDAANNVVYGKIPDMVV

SEQ ID NO: 45438 - protein, 31 aa, Artificial Sequence; identical to SEQ ID NO: 42460
  Cyclic GFR-binding peptide
  MOD_RES (5)..(6): Xaa is C or S

SEQ ID NO: 45439 - protein, 22 aa, Artificial Sequence
  Cyclic GFR-binding peptide
KLSPINILYFDKGVVTYYGKIP

SEQ ID NO: 45440 - protein, 27 aa, Artificial Sequence
  Cyclic GFR-binding peptide
TKLSPINVLYFDSSNNVIYGKIPNMVV

SEQ ID NO: 45441 - protein, 28 aa, Artificial Sequence
  Cyclic GFR-binding peptide
ARLSPINILYFDAANNVVYGKIPDMVVE

SEQ ID NO: 45442 - protein, 26 aa, Artificial Sequence
  Cyclic GFR-binding peptide
  MOD_RES (1)..(1): Xaa is C or S
XAPVKTSPINMLYFDNGRVLLYGKIP

SEQ ID NO: 45443 - protein, 33 aa, Artificial Sequence; identical to SEQ ID NO: 42465
  Cyclic GFR-binding peptide
  MOD_RES (31)..(33): Xaa is C or S

SEQ ID NO: 45444 - protein, 22 aa, Artificial Sequence
  Cyclic GFR-binding peptide
TSPINMLYFDNGRVLLYGKIPM

SEQ ID NO: 45445 - protein, 29 aa, Artificial Sequence
  Cyclic GFR-binding peptide
  MOD_RES (28)..(28): Xaa is C or S
LSPINVLYFDDSSNVIYGKIPNMVVRSXG

SEQ ID NO: 45446 - protein, 32 aa, Artificial Sequence; identical to SEQ ID NO: 42468
  Cyclic GFR-binding peptide
  MOD_RES (30)..(32): Xaa is C or S

SEQ ID NO: 45447 - protein, 38 aa, Artificial Sequence; identical to SEQ ID NO: 42469
  Cyclic GFR-binding peptide
  MOD_RES (2)..(3)..(35)..(37): Xaa is C or S

SEQ ID NO: 45448 - protein, 35 aa, Artificial Sequence; identical to SEQ ID NO: 42470
  Cyclic GFR-binding peptide
  MOD_RES (5)..(6): Xaa is C or S

SEQ ID NO: 45449 - protein, 34 aa, Artificial Sequence; identical to SEQ ID NO: 42471
  Cyclic GFR-binding peptide
  MOD_RES (6)..(7): Xaa is C or S

SEQ ID NO: 45450 - protein, 27 aa, Artificial Sequence
  Cyclic GFR-binding peptide
SPINVLYFDDMGVPTYGKIPEGMSVAE

SEQ ID NO: 45451 - protein, 32 aa, Artificial Sequence; identical to SEQ ID NO: 42473
  Cyclic GFR-binding peptide
  MOD_RES (6)..(7): Xaa is C or S

SEQ ID NO: 45452 - protein, 32 aa, Artificial Sequence; identical to SEQ ID NO: 42474
  Cyclic GFR-binding peptide
  MOD_RES (1)..(1): Xaa is C or S

SEQ ID NO: 45453 - protein, 27 aa, Artificial Sequence
  Cyclic GFR-binding peptide
  MOD_RES (1)..(2): Xaa is C or S
XXVPTRLSPINILYFDSANNVVYGKIP

SEQ ID NO: 45454 - protein, 29 aa, Artificial Sequence
  Cyclic GFR-binding peptide
  MOD_RES (28)..(28): Xaa is C or S
KTSPINMLYFDNGRVLLYGKIPMIVEEXG

SEQ ID NO: 45455 - protein, 30 aa, Artificial Sequence; identical to SEQ ID NO: 42477
  Cyclic GFR-binding peptide
  MOD_RES (2)..(3): Xaa is C or S

SEQ ID NO: 45456 - protein, 32 aa, Artificial Sequence; identical to SEQ ID NO: 42478
  Cyclic GFR-binding peptide
  MOD_RES (30)..(32): Xaa is C or S

SEQ ID NO: 45457 - protein, 28 aa, Artificial Sequence
  Cyclic GFR-binding peptide
PTKLSPINVLYFDSSNNVIYGKIPNMVV

SEQ ID NO: 45458 - protein, 38 aa, Artificial Sequence; identical to SEQ ID NO: 42480
  Cyclic GFR-binding peptide
  MOD_RES (5)..(6): Xaa is C or S

SEQ ID NO: 45459 - protein, 34 aa, Artificial Sequence; identical to SEQ ID NO: 42481
  Cyclic GFR-binding peptide
  MOD_RES (5)..(6): Xaa is C or S

SEQ ID NO: 45460 - protein, 23 aa, Artificial Sequence
  Cyclic GFR-binding peptide
TKLSPINVLYFDDMGVPTYGKIP

SEQ ID NO: 45461 - protein, 26 aa, Artificial Sequence
  Cyclic GFR-binding peptide
LSPINMLYFDENEKVVYGKIPDMVVE

SEQ ID NO: 45462 - protein, 30 aa, Artificial Sequence; identical to SEQ ID NO: 42484
  Cyclic GFR-binding peptide
  MOD_RES (1)..(1): Xaa is C or S

SEQ ID NO: 45463 - protein, 28 aa, Artificial Sequence
  Cyclic GFR-binding peptide
TELSPINMLYFDEYDKVVYGKIPEMVVE

SEQ ID NO: 45464 - protein, 30 aa, Artificial Sequence; identical to SEQ ID NO: 42486
  Cyclic GFR-binding peptide
  MOD_RES (27)..(29): Xaa is C or S

SEQ ID NO: 45465 - protein, 32 aa, Artificial Sequence; identical to SEQ ID NO: 42487
  Cyclic GFR-binding peptide
  MOD_RES (2)..(2): Xaa is C or S

SEQ ID NO: 45466 - protein, 31 aa, Artificial Sequence; identical to SEQ ID NO: 42488
  Cyclic GFR-binding peptide
  MOD_RES (2)..(3): Xaa is C or S

SEQ ID NO: 45467 - protein, 37 aa, Artificial Sequence; identical to SEQ ID NO: 42489
  Cyclic GFR-binding peptide
  MOD_RES (1)..(2)..(34)..(36): Xaa is C or S

SEQ ID NO: 45468 - protein, 32 aa, Artificial Sequence; identical to SEQ ID NO: 42490
  Cyclic GFR-binding peptide
  MOD_RES (4)..(5): Xaa is C or S

SEQ ID NO: 45469 - protein, 30 aa, Artificial Sequence; identical to SEQ ID NO: 42491
  Cyclic GFR-binding peptide
  MOD_RES (27)..(29): Xaa is C or S

SEQ ID NO: 45470 - protein, 37 aa, Artificial Sequence; identical to SEQ ID NO: 42492
  Cyclic GFR-binding peptide
  MOD_RES (2)..(3)..(35)..(37): Xaa is C or S

SEQ ID NO: 45471 - protein, 37 aa, Artificial Sequence; identical to SEQ ID NO: 42493
  Cyclic GFR-binding peptide
  MOD_RES (2)..(3)..(35)..(37): Xaa is C or S

SEQ ID NO: 45472 - protein, 41 aa, Artificial Sequence; identical to SEQ ID NO: 42494
  Cyclic GFR-binding peptide
  MOD_RES (5)..(6)..(38)..(40): Xaa is C or S

SEQ ID NO: 45473 - protein, 35 aa, Artificial Sequence; identical to SEQ ID NO: 42495
  Cyclic GFR-binding peptide
  MOD_RES (2)..(34): Xaa is C or S

SEQ ID NO: 45474 - protein, 27 aa, Artificial Sequence
  Cyclic GFR-binding peptide
  MOD_RES (1)..(2): Xaa is C or S
XXAPVKTSPINMLYFDNGRVLLYGKIP

SEQ ID NO: 45475 - protein, 33 aa, Artificial Sequence; identical to SEQ ID NO: 42497
  Cyclic GFR-binding peptide
  MOD_RES (32)..(32): Xaa is C or S

SEQ ID NO: 45476 - protein, 24 aa, Artificial Sequence
  Cyclic GFR-binding peptide
TSPINMLYFDNGRVLLYGKIPMIV

SEQ ID NO: 45477 - protein, 26 aa, Artificial Sequence
  Cyclic GFR-binding peptide
VPTELSPINMLYFDENEKVVYGKIPD

SEQ ID NO: 45478 - protein, 23 aa, Artificial Sequence
  Cyclic GFR-binding peptide
TQLSPINVLYFDDSSNVIYGKIP

SEQ ID NO: 45479 - protein, 30 aa, Artificial Sequence; identical to SEQ ID NO: 42501
  Cyclic GFR-binding peptide
  MOD_RES (3)..(4): Xaa is C or S

SEQ ID NO: 45480 - protein, 25 aa, Artificial Sequence
  Cyclic GFR-binding peptide
TKLSPINVLYFDDSSNVIYGKIPNM

SEQ ID NO: 45481 - protein, 31 aa, Artificial Sequence; identical to SEQ ID NO: 42503
  Cyclic GFR-binding peptide
  MOD_RES (2)..(3): Xaa is C or S

SEQ ID NO: 45482 - protein, 34 aa, Artificial Sequence; identical to SEQ ID NO: 42504
  Cyclic GFR-binding peptide
  MOD_RES (1)..(33): Xaa is C or S

SEQ ID NO: 45483 - protein, 35 aa, Artificial Sequence; identical to SEQ ID NO: 42505
  Cyclic GFR-binding peptide
  MOD_RES (4)..(5): Xaa is C or S

SEQ ID NO: 45484 - protein, 29 aa, Artificial Sequence
  Cyclic GFR-binding peptide
TELSPINMLYFDENEKVVYGKIPDMVVEG

SEQ ID NO: 45485 - protein, 23 aa, Artificial Sequence
  Cyclic GFR-binding peptide
TRLSPINILYFDSANNVVYGKIP

SEQ ID NO: 45486 - protein, 34 aa, Artificial Sequence; identical to SEQ ID NO: 42508
  Cyclic GFR-binding peptide
  MOD_RES (1)..(2)..(34): Xaa is C or S

SEQ ID NO: 45487 - protein, 30 aa, Artificial Sequence; identical to SEQ ID NO: 42509
  Cyclic GFR-binding peptide
  MOD_RES (27)..(29): Xaa is C or S

SEQ ID NO: 45488 - protein, 40 aa, Artificial Sequence; identical to SEQ ID NO: 42510
  Cyclic GFR-binding peptide
  MOD_RES (6)..(7)..(39): Xaa is C or S

SEQ ID NO: 45489 - protein, 32 aa, Artificial Sequence; identical to SEQ ID NO: 42511
  Cyclic GFR-binding peptide
  MOD_RES (6)..(7): Xaa is C or S

SEQ ID NO: 45490 - protein, 24 aa, Artificial Sequence
  Cyclic GFR-binding peptide
PVKTSPINMLYFDNGRVLLYGKIP

SEQ ID NO: 45491 - protein, 39 aa, Artificial Sequence; identical to SEQ ID NO: 42513
  Cyclic GFR-binding peptide
  MOD_RES (5)..(6)..(38): Xaa is C or S

SEQ ID NO: 45492 - protein, 32 aa, Artificial Sequence; identical to SEQ ID NO: 42514
  Cyclic GFR-binding peptide
  MOD_RES (3)..(4): Xaa is C or S

SEQ ID NO: 45493 - protein, 24 aa, Artificial Sequence
  Cyclic GFR-binding peptide
LSPINVLYFDSSNNVIYGKIPNMV

SEQ ID NO: 45494 - protein, 30 aa, Artificial Sequence; identical to SEQ ID NO: 42516
  Cyclic GFR-binding peptide
  MOD_RES (3)..(4): Xaa is C or S

SEQ ID NO: 45495 - protein, 31 aa, Artificial Sequence; identical to SEQ ID NO: 42517
  Cyclic GFR-binding peptide
  MOD_RES (30)..(30): Xaa is C or S

SEQ ID NO: 45496 - protein, 32 aa, Artificial Sequence; identical to SEQ ID NO: 42518
  Cyclic GFR-binding peptide
  MOD_RES (32)..(32): Xaa is C or S

SEQ ID NO: 45497 - protein, 38 aa, Artificial Sequence; identical to SEQ ID NO: 42519
  Cyclic GFR-binding peptide
  MOD_RES (4)..(5)..(37): Xaa is C or S

SEQ ID NO: 45498 - protein, 35 aa, Artificial Sequence; identical to SEQ ID NO: 42520
  Cyclic GFR-binding peptide
  MOD_RES (4)..(5): Xaa is C or S

SEQ ID NO: 45499 - protein, 34 aa, Artificial Sequence; identical to SEQ ID NO: 42521
  Cyclic GFR-binding peptide
  MOD_RES (3)..(4): Xaa is C or S

SEQ ID NO: 45500 - protein, 32 aa, Artificial Sequence; identical to SEQ ID NO: 42522
  Cyclic GFR-binding peptide
  MOD_RES (31)..(31): Xaa is C or S

SEQ ID NO: 45501 - protein, 28 aa, Artificial Sequence
  Cyclic GFR-binding peptide
  MOD_RES (3)..(3): Xaa is C or S
PTXAPTKLSPINVLYFDDSSNVIYGKIP

SEQ ID NO: 45502 - protein, 41 aa, Artificial Sequence; identical to SEQ ID NO: 42524
  Cyclic GFR-binding peptide
  MOD_RES (6)..(7)..(39)..(41): Xaa is C or S

SEQ ID NO: 45503 - protein, 35 aa, Artificial Sequence; identical to SEQ ID NO: 42525
  Cyclic GFR-binding peptide
  MOD_RES (4)..(5): Xaa is C or S

SEQ ID NO: 45504 - protein, 27 aa, Artificial Sequence
  Cyclic GFR-binding peptide
LSPINILYFDKGVVTYYGKIPGMAVSE

SEQ ID NO: 45505 - protein, 29 aa, Artificial Sequence
  Cyclic GFR-binding peptide
TKLSPINVLYFDDMGVPTYGKIPEGMSVA

SEQ ID NO: 45506 - protein, 39 aa, Artificial Sequence; identical to SEQ ID NO: 42528
  Cyclic GFR-binding peptide
  MOD_RES (4)..(5)..(37)..(39): Xaa is C or S

SEQ ID NO: 45507 - protein, 38 aa, Artificial Sequence; identical to SEQ ID NO: 42529
  Cyclic GFR-binding peptide
  MOD_RES (4)..(5)..(37): Xaa is C or S

SEQ ID NO: 45508 - protein, 30 aa, Artificial Sequence; identical to SEQ ID NO: 42530
  Cyclic GFR-binding peptide

SEQ ID NO: 45509 - protein, 26 aa, Artificial Sequence
  Cyclic GFR-binding peptide
TKLSPINVLYFDDSSNVIYGKIPNMV

SEQ ID NO: 45510 - protein, 27 aa, Artificial Sequence
  Cyclic GFR-binding peptide
VPTELSPINMLYFDEYDKVVYGKIPEM

SEQ ID NO: 45511 - protein, 32 aa, Artificial Sequence; identical to SEQ ID NO: 42533
  Cyclic GFR-binding peptide
  MOD_RES (1)..(1): Xaa is C or S

SEQ ID NO: 45512 - protein, 38 aa, Artificial Sequence; identical to SEQ ID NO: 42534
  Cyclic GFR-binding peptide
  MOD_RES (6)..(7): Xaa is C or S

SEQ ID NO: 45513 - protein, 34 aa, Artificial Sequence; identical to SEQ ID NO: 42535
  Cyclic GFR-binding peptide
  MOD_RES (33)..(33): Xaa is C or S

SEQ ID NO: 45514 - protein, 36 aa, Artificial Sequence; identical to SEQ ID NO: 42536
  Cyclic GFR-binding peptide
  MOD_RES (6)..(7): Xaa is C or S

SEQ ID NO: 45515 - protein, 28 aa, Artificial Sequence
  Cyclic GFR-binding peptide
  MOD_RES (2)..(3): Xaa is C or S
PXXAPTKLSPINVLYFDDSSNVIYGKIP

SEQ ID NO: 45516 - protein, 40 aa, Artificial Sequence; identical to SEQ ID NO: 42538
  Cyclic GFR-binding peptide
  MOD_RES (6)..(38)..(40): Xaa is C or S

SEQ ID NO: 45517 - protein, 30 aa, Artificial Sequence; identical to SEQ ID NO: 42539
  Cyclic GFR-binding peptide
  MOD_RES (27)..(29): Xaa is C or S

SEQ ID NO: 45518 - protein, 29 aa, Artificial Sequence
  Cyclic GFR-binding peptide
  MOD_RES (1)..(2): Xaa is C or S
XXVPTKLSPINILYFDKGVVTYYGKIPGM

SEQ ID NO: 45519 - protein, 37 aa, Artificial Sequence; identical to SEQ ID NO: 42541
  Cyclic GFR-binding peptide
  MOD_RES (5)..(6): Xaa is C or S

SEQ ID NO: 45520 - protein, 27 aa, Artificial Sequence
  Cyclic GFR-binding peptide
ELSPINMLYFDEYDKVVYGKIPEMVVE

SEQ ID NO: 45521 - protein, 37 aa, Artificial Sequence; identical to SEQ ID NO: 42543
  Cyclic GFR-binding peptide
  MOD_RES (6)..(7): Xaa is C or S

SEQ ID NO: 45522 - protein, 26 aa, Artificial Sequence
  Cyclic GFR-binding peptide
ELSPINMLYFDEYDKVVYGKIPEMVV

SEQ ID NO: 45523 - protein, 35 aa, Artificial Sequence; identical to SEQ ID NO: 42545
  Cyclic GFR-binding peptide
  MOD_RES (3)..(4): Xaa is C or S

SEQ ID NO: 45524 - protein, 33 aa, Artificial Sequence; identical to SEQ ID NO: 42546
  Cyclic GFR-binding peptide
  MOD_RES (5)..(6): Xaa is C or S

SEQ ID NO: 45525 - protein, 36 aa, Artificial Sequence; identical to SEQ ID NO: 42547
  Cyclic GFR-binding peptide
  MOD_RES (5)..(6): Xaa is C or S

SEQ ID NO: 45526 - protein, 26 aa, Artificial Sequence
  Cyclic GFR-binding peptide
ARLSPINILYFDAANNVVYGKIPDMV

SEQ ID NO: 45527 - protein, 31 aa, Artificial Sequence; identical to SEQ ID NO: 42549
  Cyclic GFR-binding peptide
  MOD_RES (31)..(31): Xaa is C or S

SEQ ID NO: 45528 - protein, 31 aa, Artificial Sequence; identical to SEQ ID NO: 42550
  Cyclic GFR-binding peptide
  MOD_RES (4)..(4): Xaa is C or S

SEQ ID NO: 45529 - protein, 42 aa, Artificial Sequence; identical to SEQ ID NO: 42551
  Cyclic GFR-binding peptide
  MOD_RES (7)..(39)..(41): Xaa is C or S

SEQ ID NO: 45530 - protein, 33 aa, Artificial Sequence; identical to SEQ ID NO: 42552
  Cyclic GFR-binding peptide
  MOD_RES (1)..(2)..(33): Xaa is C or S

SEQ ID NO: 45531 - protein, 23 aa, Artificial Sequence
  Cyclic GFR-binding peptide
RLSPINILYFDAANNVVYGKIPD

SEQ ID NO: 45532 - protein, 33 aa, Artificial Sequence; identical to SEQ ID NO: 42554
  Cyclic GFR-binding peptide
  MOD_RES (3)..(4): Xaa is C or S

SEQ ID NO: 45533 - protein, 33 aa, Artificial Sequence; identical to SEQ ID NO: 42555
  Cyclic GFR-binding peptide
  MOD_RES (31)..(33): Xaa is C or S

SEQ ID NO: 45534 - protein, 32 aa, Artificial Sequence; identical to SEQ ID NO: 42556
  Cyclic GFR-binding peptide
  MOD_RES (5)..(6): Xaa is C or S

SEQ ID NO: 45535 - protein, 30 aa, Artificial Sequence; identical to SEQ ID NO: 42557
  Cyclic GFR-binding peptide
  MOD_RES (30)..(30): Xaa is C or S

SEQ ID NO: 45536 - protein, 41 aa, Artificial Sequence; identical to SEQ ID NO: 42558
  Cyclic GFR-binding peptide
  MOD_RES (4)..(5)..(38)..(40): Xaa is C or S

SEQ ID NO: 45537 - protein, 36 aa, Artificial Sequence; identical to SEQ ID NO: 42559
  Cyclic GFR-binding peptide
  MOD_RES (6)..(7): Xaa is C or S

SEQ ID NO: 45538 - protein, 24 aa, Artificial Sequence
  Cyclic GFR-binding peptide
RLSPINILYFDSANNVVYGKIPDM

SEQ ID NO: 45539 - protein, 32 aa, Artificial Sequence; identical to SEQ ID NO: 42561
  Cyclic GFR-binding peptide
  MOD_RES (32)..(32): Xaa is C or S

SEQ ID NO: 45540 - protein, 33 aa, Artificial Sequence; identical to SEQ ID NO: 42562
  Cyclic GFR-binding peptide
  MOD_RES (3)..(4): Xaa is C or S

SEQ ID NO: 45541 - protein, 25 aa, Artificial Sequence
  Cyclic GFR-binding peptide
TSPINMLYFDNGRVLLYGKIPMIVE

SEQ ID NO: 45542 - protein, 32 aa, Artificial Sequence; identical to SEQ ID NO: 42564
  Cyclic GFR-binding peptide
  MOD_RES (30)..(32): Xaa is C or S

SEQ ID NO: 45543 - protein, 41 aa, Artificial Sequence; identical to SEQ ID NO: 42565
  Cyclic GFR-binding peptide
  MOD_RES (5)..(6)..(38)..(40): Xaa is C or S

SEQ ID NO: 45544 - protein, 30 aa, Artificial Sequence; identical to SEQ ID NO: 42566
  Cyclic GFR-binding peptide
  MOD_RES (28)..(30): Xaa is C or S

SEQ ID NO: 45545 - protein, 30 aa, Artificial Sequence; identical to SEQ ID NO: 42567
  Cyclic GFR-binding peptide
  MOD_RES (27)..(29): Xaa is C or S

SEQ ID NO: 45546 - protein, 29 aa, Artificial Sequence
  Cyclic GFR-binding peptide
  MOD_RES (1)..(1): Xaa is C or S
XAPTQLSPINVLYFDDSSNVIYGKIPNMV

SEQ ID NO: 45547 - protein, 39 aa, Artificial Sequence; identical to SEQ ID NO: 42569
  Cyclic GFR-binding peptide
  MOD_RES (4)..(5)..(36)..(38): Xaa is C or S

SEQ ID NO: 45548 - protein, 31 aa, Artificial Sequence; identical to SEQ ID NO: 42570
  Cyclic GFR-binding peptide
  MOD_RES (31)..(31): Xaa is C or S

SEQ ID NO: 45549 - protein, 38 aa, Artificial Sequence; identical to SEQ ID NO: 42571
  Cyclic GFR-binding peptide
  MOD_RES (5)..(6)..(38): Xaa is C or S

SEQ ID NO: 45550 - protein, 26 aa, Artificial Sequence
  Cyclic GFR-binding peptide
  MOD_RES (26)..(26): Xaa is C or S
SPINMLYFDNGRVLLYGKIPMIVEEX

SEQ ID NO: 45551 - protein, 31 aa, Artificial Sequence; identical to SEQ ID NO: 42573
  Cyclic GFR-binding peptide
  MOD_RES (3)..(4): Xaa is C or S

SEQ ID NO: 45552 - protein, 35 aa, Artificial Sequence; identical to SEQ ID NO: 42574
  Cyclic GFR-binding peptide
  MOD_RES (4)..(5): Xaa is C or S

SEQ ID NO: 45553 - protein, 27 aa, Artificial Sequence
  Cyclic GFR-binding peptide
TELSPINMLYFDENEKVVYGKIPDMVV

SEQ ID NO: 45554 - protein, 30 aa, Artificial Sequence; identical to SEQ ID NO: 42576
  Cyclic GFR-binding peptide
  MOD_RES (30)..(30): Xaa is C or S

SEQ ID NO: 45555 - protein, 35 aa, Artificial Sequence; identical to SEQ ID NO: 42577
  Cyclic GFR-binding peptide
  MOD_RES (2)..(3)..(35): Xaa is C or S

SEQ ID NO: 45556 - protein, 29 aa, Artificial Sequence
  Cyclic GFR-binding peptide
PVKTSPINMLYFDNGRVLLYGKIPMIVEE

SEQ ID NO: 45557 - protein, 29 aa, Artificial Sequence
  Cyclic GFR-binding peptide
  MOD_RES (1)..(1): Xaa is C or S
XVPTKLSPINVLYFDDMGVPTYGKIPEGM

SEQ ID NO: 45558 - protein, 27 aa, Artificial Sequence
  Cyclic GFR-binding peptide
  MOD_RES (1)..(2): Xaa is C or S
XXVPTKLSPINVLYFDDMGVPTYGKIP

SEQ ID NO: 45559 - protein, 31 aa, Artificial Sequence; identical to SEQ ID NO: 42581
  Cyclic GFR-binding peptide
  MOD_RES (31)..(31): Xaa is C or S

SEQ ID NO: 45560 - protein, 27 aa, Artificial Sequence
  Cyclic GFR-binding peptide
  MOD_RES (1)..(2): Xaa is C or S
XXAPTKLSPINVLYFDDSSNVIYGKIP

SEQ ID NO: 45561 - protein, 35 aa, Artificial Sequence; identical to SEQ ID NO: 42583
  Cyclic GFR-binding peptide
  MOD_RES (2)..(3)..(35): Xaa is C or S

SEQ ID NO: 45562 - protein, 28 aa, Artificial Sequence
  Cyclic GFR-binding peptide
  MOD_RES (27)..(27): Xaa is C or S
SPINILYFDKGVVTYYGKIPGMAVSEXG

SEQ ID NO: 45563 - protein, 25 aa, Artificial Sequence
  Cyclic GFR-binding peptide
TELSPINMLYFDENEKVVYGKIPDM

SEQ ID NO: 45564 - protein, 32 aa, Artificial Sequence; identical to SEQ ID NO: 42586
  Cyclic GFR-binding peptide
  MOD_RES (32)..(32): Xaa is C or S

SEQ ID NO: 45565 - protein, 37 aa, Artificial Sequence; identical to SEQ ID NO: 42587
  Cyclic GFR-binding peptide
  MOD_RES (4)..(5)..(37): Xaa is C or S

SEQ ID NO: 45566 - protein, 34 aa, Artificial Sequence; identical to SEQ ID NO: 42588
  Cyclic GFR-binding peptide
  MOD_RES (1)..(2): Xaa is C or S

SEQ ID NO: 45567 - protein, 22 aa, Artificial Sequence
  Cyclic GFR-binding peptide
KLSPINVLYFDDSSNVIYGKIP

SEQ ID NO: 45568 - protein, 30 aa, Artificial Sequence; identical to SEQ ID NO: 42590
  Cyclic GFR-binding peptide
  MOD_RES (1)..(2): Xaa is C or S

SEQ ID NO: 45569 - protein, 35 aa, Artificial Sequence; identical to SEQ ID NO: 42591
  Cyclic GFR-binding peptide
  MOD_RES (2)..(3)..(35): Xaa is C or S

SEQ ID NO: 45570 - protein, 40 aa, Artificial Sequence; identical to SEQ ID NO: 42592
  Cyclic GFR-binding peptide
  MOD_RES (4)..(5)..(37)..(39): Xaa is C or S

SEQ ID NO: 45571 - protein, 36 aa, Artificial Sequence; identical to SEQ ID NO: 42593
  Cyclic GFR-binding peptide
  MOD_RES (1)..(2)..(34)..(36): Xaa is C or S

SEQ ID NO: 45572 - protein, 40 aa, Artificial Sequence; identical to SEQ ID NO: 42594
  Cyclic GFR-binding peptide
  MOD_RES (4)..(5)..(37)..(39): Xaa is C or S

SEQ ID NO: 45573 - protein, 29 aa, Artificial Sequence
  Cyclic GFR-binding peptide
  MOD_RES (2)..(3): Xaa is C or S
PXXAPTKLSPINVLYFDDSSNVIYGKIPN

SEQ ID NO: 45574 - protein, 32 aa, Artificial Sequence; identical to SEQ ID NO: 42596
  Cyclic GFR-binding peptide
  MOD_RES (3)..(4): Xaa is C or S

SEQ ID NO: 45575 - protein, 37 aa, Artificial Sequence; identical to SEQ ID NO: 42597
  Cyclic GFR-binding peptide
  MOD_RES (5)..(37): Xaa is C or S

SEQ ID NO: 45576 - protein, 41 aa, Artificial Sequence; identical to SEQ ID NO: 42598
  Cyclic GFR-binding peptide
  MOD_RES (5)..(6)..(38)..(40): Xaa is C or S

SEQ ID NO: 45577 - protein, 33 aa, Artificial Sequence; identical to SEQ ID NO: 42599
  Cyclic GFR-binding peptide
  MOD_RES (6)..(7): Xaa is C or S

SEQ ID NO: 45578 - protein, 30 aa, Artificial Sequence; identical to SEQ ID NO: 42600
  Cyclic GFR-binding peptide
  MOD_RES (30)..(30): Xaa is C or S

SEQ ID NO: 45579 - protein, 24 aa, Artificial Sequence
  Cyclic GFR-binding peptide
PARLSPINILYFDAANNVVYGKIP

SEQ ID NO: 45580 - protein, 26 aa, Artificial Sequence
  Cyclic GFR-binding peptide
TSPINMLYFDNGRVLLYGKIPMIVEE

SEQ ID NO: 45581 - protein, 22 aa, Artificial Sequence
  Cyclic GFR-binding peptide
RLSPINILYFDAANNVVYGKIP

SEQ ID NO: 45582 - protein, 36 aa, Artificial Sequence; identical to SEQ ID NO: 42604
  Cyclic GFR-binding peptide
  MOD_RES (6)..(7): Xaa is C or S

SEQ ID NO: 45583 - protein, 36 aa, Artificial Sequence; identical to SEQ ID NO: 42605
  Cyclic GFR-binding peptide
  MOD_RES (2)..(3)..(35): Xaa is C or S

SEQ ID NO: 45584 - protein, 32 aa, Artificial Sequence; identical to SEQ ID NO: 42606
  Cyclic GFR-binding peptide
  MOD_RES (1)..(2): Xaa is C or S

SEQ ID NO: 45585 - protein, 27 aa, Artificial Sequence
  Cyclic GFR-binding peptide
  MOD_RES (1)..(1): Xaa is C or S
XVPTKLSPINVLYFDDMGVPTYGKIPE

SEQ ID NO: 45586 - protein, 29 aa, Artificial Sequence
  Cyclic GFR-binding peptide
  MOD_RES (1)..(1): Xaa is C or S
XVPTELSPINMLYFDEYDKVVYGKIPEMV

SEQ ID NO: 45587 - protein, 26 aa, Artificial Sequence
  Cyclic GFR-binding peptide
KLSPINVLYFDSSNNVIYGKIPNMVV

SEQ ID NO: 45588 - protein, 27 aa, Artificial Sequence
  Cyclic GFR-binding peptide
LSPINMLYFDEYDKVVYGKIPEMVVEG

SEQ ID NO: 45589 - protein, 29 aa, Artificial Sequence
  Cyclic GFR-binding peptide
TQLSPINVLYFDDSSNVIYGKIPNMVVRA

SEQ ID NO: 45590 - protein, 24 aa, Artificial Sequence
  Cyclic GFR-binding peptide
PTKLSPINVLYFDSSNNVIYGKIP

SEQ ID NO: 45591 - protein, 28 aa, Artificial Sequence
  Cyclic GFR-binding peptide
TKLSPINVLYFDSSNNVIYGKIPNMVVK

SEQ ID NO: 45592 - protein, 32 aa, Artificial Sequence; identical to SEQ ID NO: 42614
  Cyclic GFR-binding peptide

SEQ ID NO: 45593 - protein, 29 aa, Artificial Sequence
  Cyclic GFR-binding peptide
PARLSPINILYFDAANNVVYGKIPDMVVE

SEQ ID NO: 45594 - protein, 29 aa, Artificial Sequence
  Cyclic GFR-binding peptide
  MOD_RES (27)..(29): Xaa is C or S
SPINMLYFDENEKVVYGKIPDMVVEGXGX

SEQ ID NO: 45595 - protein, 31 aa, Artificial Sequence; identical to SEQ ID NO: 42617
  Cyclic GFR-binding peptide
  MOD_RES (4)..(5): Xaa is C or S

SEQ ID NO: 45596 - protein, 27 aa, Artificial Sequence
  Cyclic GFR-binding peptide
APVKTSPINMLYFDNGRVLLYGKIPMI

SEQ ID NO: 45597 - protein, 35 aa, Artificial Sequence; identical to SEQ ID NO: 42619
  Cyclic GFR-binding peptide
  MOD_RES (1)..(2)..(34): Xaa is C or S

SEQ ID NO: 45598 - protein, 36 aa, Artificial Sequence; identical to SEQ ID NO: 42620
  Cyclic GFR-binding peptide
  MOD_RES (5)..(6): Xaa is C or S

SEQ ID NO: 45599 - protein, 40 aa, Artificial Sequence; identical to SEQ ID NO: 42621
  Cyclic GFR-binding peptide
  MOD_RES (7)..(39): Xaa is C or S

SEQ ID NO: 45600 - protein, 39 aa, Artificial Sequence; identical to SEQ ID NO: 42622
  Cyclic GFR-binding peptide
  MOD_RES (3)..(4)..(36)..(38): Xaa is C or S

SEQ ID NO: 45601 - protein, 36 aa, Artificial Sequence; identical to SEQ ID NO: 42623
  Cyclic GFR-binding peptide
  MOD_RES (5)..(6): Xaa is C or S

SEQ ID NO: 45602 - protein, 35 aa, Artificial Sequence; identical to SEQ ID NO: 42624
  Cyclic GFR-binding peptide
  MOD_RES (33)..(35): Xaa is C or S

SEQ ID NO: 45603 - protein, 37 aa, Artificial Sequence; identical to SEQ ID NO: 42625
  Cyclic GFR-binding peptide
  MOD_RES (3)..(4)..(35)..(37): Xaa is C or S

SEQ ID NO: 45604 - protein, 30 aa, Artificial Sequence; identical to SEQ ID NO: 42626
  Cyclic GFR-binding peptide
  MOD_RES (1)..(2): Xaa is C or S

SEQ ID NO: 45605 - protein, 33 aa, Artificial Sequence; identical to SEQ ID NO: 42627
  Cyclic GFR-binding peptide
  MOD_RES (5)..(6): Xaa is C or S

SEQ ID NO: 45606 - protein, 23 aa, Artificial Sequence
  Cyclic GFR-binding peptide
KLSPINVLYFDSSNNVIYGKIPN

SEQ ID NO: 45607 - protein, 41 aa, Artificial Sequence; identical to SEQ ID NO: 42629
  Cyclic GFR-binding peptide
  MOD_RES (6)..(7)..(39)..(41): Xaa is C or S

SEQ ID NO: 45608 - protein, 27 aa, Artificial Sequence
  Cyclic GFR-binding peptide
APTKLSPINVLYFDDSSNVIYGKIPNM

SEQ ID NO: 45609 - protein, 39 aa, Artificial Sequence; identical to SEQ ID NO: 42631
  Cyclic GFR-binding peptide
  MOD_RES (5)..(6)..(38): Xaa is C or S

SEQ ID NO: 45610 - protein, 26 aa, Artificial Sequence
  Cyclic GFR-binding peptide
PTKLSPINVLYFDDMGVPTYGKIPEG

SEQ ID NO: 45611 - protein, 25 aa, Artificial Sequence
  Cyclic GFR-binding peptide
TQLSPINVLYFDDSSNVIYGKIPNM

SEQ ID NO: 45612 - protein, 36 aa, Artificial Sequence; identical to SEQ ID NO: 42634
  Cyclic GFR-binding peptide
  MOD_RES (5)..(6): Xaa is C or S

SEQ ID NO: 45613 - protein, 37 aa, Artificial Sequence; identical to SEQ ID NO: 42635
  Cyclic GFR-binding peptide
  MOD_RES (2)..(3)..(35)..(37): Xaa is C or S

SEQ ID NO: 45614 - protein, 28 aa, Artificial Sequence
  Cyclic GFR-binding peptide
  MOD_RES (1)..(2): Xaa is C or S
XXVPTKLSPINVLYFDDMGVPTYGKIPE

SEQ ID NO: 45615 - protein, 30 aa, Artificial Sequence; identical to SEQ ID NO: 42637
  Cyclic GFR-binding peptide
  MOD_RES (28)..(30): Xaa is C or S

SEQ ID NO: 45616 - protein, 26 aa, Artificial Sequence
  Cyclic GFR-binding peptide
VKTSPINMLYFDNGRVLLYGKIPMIV

SEQ ID NO: 45617 - protein, 29 aa, Artificial Sequence
  Cyclic GFR-binding peptide
  MOD_RES (3)..(4): Xaa is C or S
PTXXVPTRLSPINILYFDSANNVVYGKIP

SEQ ID NO: 45618 - protein, 35 aa, Artificial Sequence; identical to SEQ ID NO: 42640
  Cyclic GFR-binding peptide
  MOD_RES (5)..(6): Xaa is C or S

SEQ ID NO: 45619 - protein, 23 aa, Artificial Sequence
  Cyclic GFR-binding peptide
SPINILYFDKGVVTYYGKIPGMA

SEQ ID NO: 45620 - protein, 32 aa, Artificial Sequence; identical to SEQ ID NO: 42642
  Cyclic GFR-binding peptide
  MOD_RES (6)..(7): Xaa is C or S

SEQ ID NO: 45621 - protein, 27 aa, Artificial Sequence
  Cyclic GFR-binding peptide
  MOD_RES (1)..(2): Xaa is C or S
XXVPTELSPINMLYFDEYDKVVYGKIP

SEQ ID NO: 45622 - protein, 41 aa, Artificial Sequence; identical to SEQ ID NO: 42644
  Cyclic GFR-binding peptide
  MOD_RES (6)..(38)..(40): Xaa is C or S

SEQ ID NO: 45623 - protein, 33 aa, Artificial Sequence; identical to SEQ ID NO: 42645
  Cyclic GFR-binding peptide
  MOD_RES (30)..(32): Xaa is C or S

SEQ ID NO: 45624 - protein, 24 aa, Artificial Sequence
  Cyclic GFR-binding peptide
PTRLSPINILYFDSANNVVYGKIP

SEQ ID NO: 45625 - protein, 22 aa, Artificial Sequence
  Cyclic GFR-binding peptide
SPINILYFDKGVVTYYGKIPGM

SEQ ID NO: 45626 - protein, 23 aa, Artificial Sequence
  Cyclic GFR-binding peptide
SPINVLYFDDMGVPTYGKIPEGM

SEQ ID NO: 45627 - protein, 30 aa, Artificial Sequence; identical to SEQ ID NO: 42649
  Cyclic GFR-binding peptide
  MOD_RES (2)..(3): Xaa is C or S

SEQ ID NO: 45628 - protein, 33 aa, Artificial Sequence; identical to SEQ ID NO: 42650
  Cyclic GFR-binding peptide
  MOD_RES (1)..(2): Xaa is C or S

SEQ ID NO: 45629 - protein, 24 aa, Artificial Sequence
  Cyclic GFR-binding peptide
TELSPINMLYFDENEKVVYGKIPD

SEQ ID NO: 45630 - protein, 36 aa, Artificial Sequence; identical to SEQ ID NO: 42652
  Cyclic GFR-binding peptide
  MOD_RES (1)..(33)..(35): Xaa is C or S

SEQ ID NO: 45631 - protein, 27 aa, Artificial Sequence
  Cyclic GFR-binding peptide
VKTSPINMLYFDNGRVLLYGKIPMIVE

SEQ ID NO: 45632 - protein, 32 aa, Artificial Sequence; identical to SEQ ID NO: 42654
  Cyclic GFR-binding peptide
  MOD_RES (32)..(32): Xaa is C or S

SEQ ID NO: 45633 - protein, 29 aa, Artificial Sequence
  Cyclic GFR-binding peptide
TELSPINMLYFDEYDKVVYGKIPEMVVEG

SEQ ID NO: 45634 - protein, 32 aa, Artificial Sequence; identical to SEQ ID NO: 42656
  Cyclic GFR-binding peptide
  MOD_RES (2)..(3): Xaa is C or S

SEQ ID NO: 45635 - protein, 36 aa, Artificial Sequence; identical to SEQ ID NO: 42657
  Cyclic GFR-binding peptide
  MOD_RES (1)..(33)..(35): Xaa is C or S

SEQ ID NO: 45636 - protein, 31 aa, Artificial Sequence; identical to SEQ ID NO: 42658
  Cyclic GFR-binding peptide
  MOD_RES (1)..(1): Xaa is C or S

SEQ ID NO: 45637 - protein, 33 aa, Artificial Sequence; identical to SEQ ID NO: 42659
  Cyclic GFR-binding peptide
  MOD_RES (4)..(5): Xaa is C or S

SEQ ID NO: 45638 - protein, 34 aa, Artificial Sequence; identical to SEQ ID NO: 42660
  Cyclic GFR-binding peptide
  MOD_RES (2)..(3): Xaa is C or S

SEQ ID NO: 45639 - protein, 24 aa, Artificial Sequence
  Cyclic GFR-binding peptide
TKLSPINILYFDKGVVTYYGKIPG

SEQ ID NO: 45640 - protein, 33 aa, Artificial Sequence; identical to SEQ ID NO: 42662
  Cyclic GFR-binding peptide
  MOD_RES (30)..(32): Xaa is C or S

SEQ ID NO: 45641 - protein, 34 aa, Artificial Sequence; identical to SEQ ID NO: 42663
  Cyclic GFR-binding peptide
  MOD_RES (32)..(34): Xaa is C or S

SEQ ID NO: 45642 - protein, 34 aa, Artificial Sequence; identical to SEQ ID NO: 42664
  Cyclic GFR-binding peptide
  MOD_RES (2)..(3): Xaa is C or S

SEQ ID NO: 45643 - protein, 40 aa, Artificial Sequence; identical to SEQ ID NO: 42665
  Cyclic GFR-binding peptide
  MOD_RES (6)..(7)..(39): Xaa is C or S

SEQ ID NO: 45644 - protein, 40 aa, Artificial Sequence; identical to SEQ ID NO: 42666
  Cyclic GFR-binding peptide
  MOD_RES (6)..(7)..(39): Xaa is C or S

SEQ ID NO: 45645 - protein, 38 aa, Artificial Sequence; identical to SEQ ID NO: 42667
  Cyclic GFR-binding peptide
  MOD_RES (6)..(7): Xaa is C or S

SEQ ID NO: 45646 - protein, 23 aa, Artificial Sequence
  Cyclic GFR-binding peptide
SPINILYFDSANNVVYGKIPDMV

SEQ ID NO: 45647 - protein, 29 aa, Artificial Sequence
  Cyclic GFR-binding peptide
PTELSPINMLYFDENEKVVYGKIPDMVVE

SEQ ID NO: 45648 - protein, 29 aa, Artificial Sequence
  Cyclic GFR-binding peptide
  MOD_RES (3)..(4): Xaa is C or S
KAXXVPTELSPINMLYFDENEKVVYGKIP

SEQ ID NO: 45649 - protein, 34 aa, Artificial Sequence; identical to SEQ ID NO: 42671
  Cyclic GFR-binding peptide
  MOD_RES (2)..(34): Xaa is C or S

SEQ ID NO: 45650 - protein, 28 aa, Artificial Sequence
  Cyclic GFR-binding peptide
  MOD_RES (2)..(3): Xaa is C or S
AXXVPTELSPINMLYFDEYDKVVYGKIP

SEQ ID NO: 45651 - protein, 24 aa, Artificial Sequence
  Cyclic GFR-binding peptide
KLSPINILYFDKGVVTYYGKIPGM

SEQ ID NO: 45652 - protein, 36 aa, Artificial Sequence; identical to SEQ ID NO: 42674
  Cyclic GFR-binding peptide
  MOD_RES (1)..(2)..(34)..(36): Xaa is C or S

SEQ ID NO: 45653 - protein, 40 aa, Artificial Sequence; identical to SEQ ID NO: 42675
  Cyclic GFR-binding peptide
  MOD_RES (5)..(6)..(38)..(40): Xaa is C or S

SEQ ID NO: 45654 - protein, 30 aa, Artificial Sequence; identical to SEQ ID NO: 42676
  Cyclic GFR-binding peptide
  MOD_RES (30)..(30): Xaa is C or S

SEQ ID NO: 45655 - protein, 28 aa, Artificial Sequence
  Cyclic GFR-binding peptide
  MOD_RES (1)..(2): Xaa is C or S
XXAPVKTSPINMLYFDNGRVLLYGKIPM

SEQ ID NO: 45656 - protein, 30 aa, Artificial Sequence; identical to SEQ ID NO: 38308
  Cyclic GFR-binding peptide

SEQ ID NO: 45657 - protein, 35 aa, Artificial Sequence; identical to SEQ ID NO: 42679
  Cyclic GFR-binding peptide
  MOD_RES (1)..(2)..(34): Xaa is C or S

SEQ ID NO: 45658 - protein, 29 aa, Artificial Sequence
  Cyclic GFR-binding peptide
  MOD_RES (1)..(2): Xaa is C or S
XXVPTKLSPINVLYFDDMGVPTYGKIPEG

SEQ ID NO: 45659 - protein, 30 aa, Artificial Sequence; identical to SEQ ID NO: 42681
  Cyclic GFR-binding peptide
  MOD_RES (28)..(30): Xaa is C or S

SEQ ID NO: 45660 - protein, 26 aa, Artificial Sequence
  Cyclic GFR-binding peptide
APTKLSPINVLYFDDSSNVIYGKIPN

SEQ ID NO: 45661 - protein, 27 aa, Artificial Sequence
  Cyclic GFR-binding peptide
PTQLSPINVLYFDDSSNVIYGKIPNMV

SEQ ID NO: 45662 - protein, 34 aa, Artificial Sequence; identical to SEQ ID NO: 42684
  Cyclic GFR-binding peptide
  MOD_RES (32)..(34): Xaa is C or S

SEQ ID NO: 45663 - protein, 33 aa, Artificial Sequence; identical to SEQ ID NO: 42685
  Cyclic GFR-binding peptide
  MOD_RES (32)..(32): Xaa is C or S

SEQ ID NO: 45664 - protein, 32 aa, Artificial Sequence; identical to SEQ ID NO: 42686
  Cyclic GFR-binding peptide
  MOD_RES (6)..(7): Xaa is C or S

SEQ ID NO: 45665 - protein, 34 aa, Artificial Sequence; identical to SEQ ID NO: 42687
  Cyclic GFR-binding peptide
  MOD_RES (31)..(33): Xaa is C or S

SEQ ID NO: 45666 - protein, 32 aa, Artificial Sequence; identical to SEQ ID NO: 42688
  Cyclic GFR-binding peptide
  MOD_RES (5)..(6): Xaa is C or S

SEQ ID NO: 45667 - protein, 27 aa, Artificial Sequence
  Cyclic GFR-binding peptide
  MOD_RES (27)..(27): Xaa is C or S
SPINVLYFDSSNNVIYGKIPNMVVKAX

SEQ ID NO: 45668 - protein, 34 aa, Artificial Sequence; identical to SEQ ID NO: 42690
  Cyclic GFR-binding peptide
  MOD_RES (3)..(4): Xaa is C or S

SEQ ID NO: 45669 - protein, 23 aa, Artificial Sequence
  Cyclic GFR-binding peptide
ELSPINMLYFDENEKVVYGKIPD

SEQ ID NO: 45670 - protein, 29 aa, Artificial Sequence
  Cyclic GFR-binding peptide
  MOD_RES (2)..(3): Xaa is C or S
TXXAPVKTSPINMLYFDNGRVLLYGKIPM

SEQ ID NO: 45671 - protein, 32 aa, Artificial Sequence; identical to SEQ ID NO: 42693
  Cyclic GFR-binding peptide
  MOD_RES (29)..(31): Xaa is C or S

SEQ ID NO: 45672 - protein, 30 aa, Artificial Sequence; identical to SEQ ID NO: 42694
  Cyclic GFR-binding peptide
  MOD_RES (4)..(5): Xaa is C or S

SEQ ID NO: 45673 - protein, 30 aa, Artificial Sequence; identical to SEQ ID NO: 42695
  Cyclic GFR-binding peptide
  MOD_RES (2)..(3): Xaa is C or S

SEQ ID NO: 45674 - protein, 32 aa, Artificial Sequence; identical to SEQ ID NO: 42696
  Cyclic GFR-binding peptide
  MOD_RES (29)..(31): Xaa is C or S

SEQ ID NO: 45675 - protein, 37 aa, Artificial Sequence; identical to SEQ ID NO: 42697
  Cyclic GFR-binding peptide
  MOD_RES (1)..(2)..(34)..(36): Xaa is C or S

SEQ ID NO: 45676 - protein, 41 aa, Artificial Sequence; identical to SEQ ID NO: 42698
  Cyclic GFR-binding peptide
  MOD_RES (6)..(7)..(39)..(41): Xaa is C or S

SEQ ID NO: 45677 - protein, 32 aa, Artificial Sequence; identical to SEQ ID NO: 42699
  Cyclic GFR-binding peptide
  MOD_RES (3)..(3): Xaa is C or S

SEQ ID NO: 45678 - protein, 41 aa, Artificial Sequence; identical to SEQ ID NO: 42700
  Cyclic GFR-binding peptide
  MOD_RES (6)..(7)..(39)..(41): Xaa is C or S

SEQ ID NO: 45679 - protein, 32 aa, Artificial Sequence; identical to SEQ ID NO: 42701
  Cyclic GFR-binding peptide
  MOD_RES (31)..(31): Xaa is C or S

SEQ ID NO: 45680 - protein, 38 aa, Artificial Sequence; identical to SEQ ID NO: 42702
  Cyclic GFR-binding peptide
  MOD_RES (4)..(5)..(37): Xaa is C or S

SEQ ID NO: 45681 - protein, 26 aa, Artificial Sequence
  Cyclic GFR-binding peptide
TKLSPINVLYFDSSNNVIYGKIPNMV

SEQ ID NO: 45682 - protein, 29 aa, Artificial Sequence
  Cyclic GFR-binding peptide
  MOD_RES (27)..(29): Xaa is C or S
SPINVLYFDDSSNVIYGKIPNMVVRSXGX

SEQ ID NO: 45683 - protein, 36 aa, Artificial Sequence; identical to SEQ ID NO: 42705
  Cyclic GFR-binding peptide
  MOD_RES (6)..(7): Xaa is C or S

SEQ ID NO: 45684 - protein, 28 aa, Artificial Sequence
  Cyclic GFR-binding peptide
  MOD_RES (1)..(2): Xaa is C or S
XXVPTELSPINMLYFDEYDKVVYGKIPE

SEQ ID NO: 45685 - protein, 40 aa, Artificial Sequence; identical to SEQ ID NO: 42707
  Cyclic GFR-binding peptide
  MOD_RES (5)..(6)..(37)..(39): Xaa is C or S

SEQ ID NO: 45686 - protein, 28 aa, Artificial Sequence
  Cyclic GFR-binding peptide
PTELSPINMLYFDEYDKVVYGKIPEMVV

SEQ ID NO: 45687 - protein, 31 aa, Artificial Sequence; identical to SEQ ID NO: 42709
  Cyclic GFR-binding peptide
  MOD_RES (28)..(30): Xaa is C or S

SEQ ID NO: 45688 - protein, 35 aa, Artificial Sequence; identical to SEQ ID NO: 42710
  Cyclic GFR-binding peptide
  MOD_RES (1)..(2)..(34): Xaa is C or S

SEQ ID NO: 45689 - protein, 31 aa, Artificial Sequence; identical to SEQ ID NO: 42711
  Cyclic GFR-binding peptide

SEQ ID NO: 45690 - protein, 35 aa, Artificial Sequence; identical to SEQ ID NO: 42712
  Cyclic GFR-binding peptide
  MOD_RES (4)..(5): Xaa is C or S

SEQ ID NO: 45691 - protein, 37 aa, Artificial Sequence; identical to SEQ ID NO: 42713
  Cyclic GFR-binding peptide
  MOD_RES (1)..(2)..(34)..(36): Xaa is C or S

SEQ ID NO: 45692 - protein, 36 aa, Artificial Sequence; identical to SEQ ID NO: 42714
  Cyclic GFR-binding peptide
  MOD_RES (1)..(2)..(34)..(36): Xaa is C or S

SEQ ID NO: 45693 - protein, 33 aa, Artificial Sequence; identical to SEQ ID NO: 42715
  Cyclic GFR-binding peptide
  MOD_RES (2)..(3): Xaa is C or S

SEQ ID NO: 45694 - protein, 33 aa, Artificial Sequence; identical to SEQ ID NO: 42716
  Cyclic GFR-binding peptide
  MOD_RES (30)..(32): Xaa is C or S

SEQ ID NO: 45695 - protein, 34 aa, Artificial Sequence; identical to SEQ ID NO: 42717
  Cyclic GFR-binding peptide
  MOD_RES (4)..(5): Xaa is C or S

SEQ ID NO: 45696 - protein, 20 aa, Artificial Sequence
  Cyclic GFR-binding peptide
SPINILYFDKGVVTYYGKIP

SEQ ID NO: 45697 - protein, 33 aa, Artificial Sequence; identical to SEQ ID NO: 42719
  Cyclic GFR-binding peptide
  MOD_RES (6)..(7): Xaa is C or S

SEQ ID NO: 45698 - protein, 36 aa, Artificial Sequence; identical to SEQ ID NO: 42720
  Cyclic GFR-binding peptide
  MOD_RES (1)..(34)..(36): Xaa is C or S

SEQ ID NO: 45699 - protein, 31 aa, Artificial Sequence; identical to SEQ ID NO: 42721
  Cyclic GFR-binding peptide
  MOD_RES (1)..(1): Xaa is C or S

SEQ ID NO: 45700 - protein, 30 aa, Artificial Sequence; identical to SEQ ID NO: 42722
  Cyclic GFR-binding peptide

SEQ ID NO: 45701 - protein, 32 aa, Artificial Sequence; identical to SEQ ID NO: 42723
  Cyclic GFR-binding peptide
  MOD_RES (6)..(7): Xaa is C or S

SEQ ID NO: 45702 - protein, 35 aa, Artificial Sequence; identical to SEQ ID NO: 42724
  Cyclic GFR-binding peptide
  MOD_RES (6)..(7): Xaa is C or S

SEQ ID NO: 45703 - protein, 33 aa, Artificial Sequence; identical to SEQ ID NO: 42725
  Cyclic GFR-binding peptide
  MOD_RES (2)..(3): Xaa is C or S

SEQ ID NO: 45704 - protein, 36 aa, Artificial Sequence; identical to SEQ ID NO: 42726
  Cyclic GFR-binding peptide
  MOD_RES (6)..(7): Xaa is C or S

SEQ ID NO: 45705 - protein, 36 aa, Artificial Sequence; identical to SEQ ID NO: 42727
  Cyclic GFR-binding peptide
  MOD_RES (1)..(33)..(35): Xaa is C or S

SEQ ID NO: 45706 - protein, 32 aa, Artificial Sequence; identical to SEQ ID NO: 42728
  Cyclic GFR-binding peptide
  MOD_RES (2)..(3): Xaa is C or S

SEQ ID NO: 45707 - protein, 29 aa, Artificial Sequence
  Cyclic GFR-binding peptide
  MOD_RES (3)..(4): Xaa is C or S
KPXXAPTKLSPINVLYFDDSSNVIYGKIP

SEQ ID NO: 45708 - protein, 28 aa, Artificial Sequence
  Cyclic GFR-binding peptide
  MOD_RES (27)..(27): Xaa is C or S
TSPINMLYFDNGRVLLYGKIPMIVEEXG

SEQ ID NO: 45709 - protein, 27 aa, Artificial Sequence
  Cyclic GFR-binding peptide
VPTKLSPINVLYFDDMGVPTYGKIPEG

SEQ ID NO: 45710 - protein, 30 aa, Artificial Sequence; identical to SEQ ID NO: 42732
  Cyclic GFR-binding peptide
  MOD_RES (3)..(4): Xaa is C or S

SEQ ID NO: 45711 - protein, 28 aa, Artificial Sequence
  Cyclic GFR-binding peptide
RLSPINILYFDAANNVVYGKIPDMVVEA

SEQ ID NO: 45712 - protein, 33 aa, Artificial Sequence; identical to SEQ ID NO: 42734
  Cyclic GFR-binding peptide
  MOD_RES (5)..(6): Xaa is C or S

SEQ ID NO: 45713 - protein, 36 aa, Artificial Sequence; identical to SEQ ID NO: 42735
  Cyclic GFR-binding peptide
  MOD_RES (7)..(7): Xaa is C or S

SEQ ID NO: 45714 - protein, 29 aa, Artificial Sequence
  Cyclic GFR-binding peptide
ARLSPINILYFDAANNVVYGKIPDMVVEA

SEQ ID NO: 45715 - protein, 30 aa, Artificial Sequence; identical to SEQ ID NO: 42737
  Cyclic GFR-binding peptide

SEQ ID NO: 45716 - protein, 26 aa, Artificial Sequence
  Cyclic GFR-binding peptide
  MOD_RES (1)..(1): Xaa is C or S
XVPTKLSPINVLYFDDMGVPTYGKIP

SEQ ID NO: 45717 - protein, 28 aa, Artificial Sequence
  Cyclic GFR-binding peptide
LSPINVLYFDDMGVPTYGKIPEGMSVAE

SEQ ID NO: 45718 - protein, 36 aa, Artificial Sequence; identical to SEQ ID NO: 42740
  Cyclic GFR-binding peptide
  MOD_RES (3)..(4)..(36): Xaa is C or S

SEQ ID NO: 45719 - protein, 24 aa, Artificial Sequence
  Cyclic GFR-binding peptide
SPINILYFDKGVVTYYGKIPGMAV

SEQ ID NO: 45720 - protein, 35 aa, Artificial Sequence; identical to SEQ ID NO: 42742
  Cyclic GFR-binding peptide
  MOD_RES (5)..(5): Xaa is C or S

SEQ ID NO: 45721 - protein, 31 aa, Artificial Sequence; identical to SEQ ID NO: 42743
  Cyclic GFR-binding peptide
  MOD_RES (6)..(6): Xaa is C or S

SEQ ID NO: 45722 - protein, 25 aa, Artificial Sequence
  Cyclic GFR-binding peptide
ARLSPINILYFDAANNVVYGKIPDM

SEQ ID NO: 45723 - protein, 25 aa, Artificial Sequence
  Cyclic GFR-binding peptide
SPINVLYFDDMGVPTYGKIPEGMSV

SEQ ID NO: 45724 - protein, 28 aa, Artificial Sequence
  Cyclic GFR-binding peptide
VPTELSPINMLYFDEYDKVVYGKIPEMV

SEQ ID NO: 45725 - protein, 22 aa, Artificial Sequence
  Cyclic GFR-binding peptide
QLSPINVLYFDDSSNVIYGKIP

SEQ ID NO: 45726 - protein, 31 aa, Artificial Sequence; identical to SEQ ID NO: 42748
  Cyclic GFR-binding peptide
  MOD_RES (1)..(2): Xaa is C or S

SEQ ID NO: 45727 - protein, 21 aa, Artificial Sequence
  Cyclic GFR-binding peptide
LSPINILYFDAANNVVYGKIP

SEQ ID NO: 45728 - protein, 29 aa, Artificial Sequence
  Cyclic GFR-binding peptide
KLSPINVLYFDDMGVPTYGKIPEGMSVAE

SEQ ID NO: 45729 - protein, 30 aa, Artificial Sequence; identical to SEQ ID NO: 42751
  Cyclic GFR-binding peptide
  MOD_RES (1)..(1): Xaa is C or S

SEQ ID NO: 45730 - protein, 35 aa, Artificial Sequence; identical to SEQ ID NO: 42752
  Cyclic GFR-binding peptide
  MOD_RES (2)..(3)..(35): Xaa is C or S

SEQ ID NO: 45731 - protein, 33 aa, Artificial Sequence; identical to SEQ ID NO: 42753
  Cyclic GFR-binding peptide
  MOD_RES (6)..(7): Xaa is C or S

SEQ ID NO: 45732 - protein, 28 aa, Artificial Sequence
  Cyclic GFR-binding peptide
VPTKLSPINVLYFDDMGVPTYGKIPEGM

SEQ ID NO: 45733 - protein, 26 aa, Artificial Sequence
  Cyclic GFR-binding peptide
  MOD_RES (1)..(1): Xaa is C or S
XAPTKLSPINVLYFDDSSNVIYGKIP

SEQ ID NO: 45734 - protein, 27 aa, Artificial Sequence
  Cyclic GFR-binding peptide
KLSPINVLYFDDSSNVIYGKIPNMVVR

SEQ ID NO: 45735 - protein, 27 aa, Artificial Sequence
  Cyclic GFR-binding peptide
  MOD_RES (27)..(27): Xaa is C or S
SPINMLYFDEYDKVVYGKIPEMVVEGX

SEQ ID NO: 45736 - protein, 28 aa, Artificial Sequence
  Cyclic GFR-binding peptide
PTKLSPINVLYFDDSSNVIYGKIPNMVV

SEQ ID NO: 45737 - protein, 25 aa, Artificial Sequence
  Cyclic GFR-binding peptide
PVKTSPINMLYFDNGRVLLYGKIPM

SEQ ID NO: 45738 - protein, 28 aa, Artificial Sequence
  Cyclic GFR-binding peptide
  MOD_RES (27)..(27): Xaa is C or S
SPINVLYFDSSNNVIYGKIPNMVVKAXG

SEQ ID NO: 45739 - protein, 24 aa, Artificial Sequence
  Cyclic GFR-binding peptide
LSPINVLYFDDSSNVIYGKIPNMV

SEQ ID NO: 45740 - protein, 31 aa, Artificial Sequence; identical to SEQ ID NO: 42762
  Cyclic GFR-binding peptide
  MOD_RES (29)..(31): Xaa is C or S

SEQ ID NO: 45741 - protein, 40 aa, Artificial Sequence; identical to SEQ ID NO: 42763
  Cyclic GFR-binding peptide
  MOD_RES (5)..(6)..(38)..(40): Xaa is C or S

SEQ ID NO: 45742 - protein, 33 aa, Artificial Sequence; identical to SEQ ID NO: 42764
  Cyclic GFR-binding peptide
  MOD_RES (1)..(33): Xaa is C or S

SEQ ID NO: 45743 - protein, 37 aa, Artificial Sequence; identical to SEQ ID NO: 42765
  Cyclic GFR-binding peptide
  MOD_RES (2)..(3)..(35)..(37): Xaa is C or S

SEQ ID NO: 45744 - protein, 28 aa, Artificial Sequence
  Cyclic GFR-binding peptide
VPTKLSPINILYFDKGVVTYYGKIPGMA

SEQ ID NO: 45745 - protein, 38 aa, Artificial Sequence; identical to SEQ ID NO: 42767
  Cyclic GFR-binding peptide
  MOD_RES (6)..(7): Xaa is C or S

SEQ ID NO: 45746 - protein, 22 aa, Artificial Sequence
  Cyclic GFR-binding peptide
LSPINMLYFDENEKVVYGKIPD

SEQ ID NO: 45747 - protein, 36 aa, Artificial Sequence; identical to SEQ ID NO: 42769
  Cyclic GFR-binding peptide
  MOD_RES (1)..(33)..(35): Xaa is C or S

SEQ ID NO: 45748 - protein, 28 aa, Artificial Sequence
  Cyclic GFR-binding peptide
  MOD_RES (2)..(2): Xaa is C or S
TXAPTKLSPINVLYFDDSSNVIYGKIPN

SEQ ID NO: 45749 - protein, 31 aa, Artificial Sequence; identical to SEQ ID NO: 42771
  Cyclic GFR-binding peptide
  MOD_RES (28)..(30): Xaa is C or S

SEQ ID NO: 45750 - protein, 28 aa, Artificial Sequence
  Cyclic GFR-binding peptide
RLSPINILYFDSANNVVYGKIPDMVVES

SEQ ID NO: 45751 - protein, 38 aa, Artificial Sequence; identical to SEQ ID NO: 42773
  Cyclic GFR-binding peptide
  MOD_RES (2)..(3)..(35)..(37): Xaa is C or S

SEQ ID NO: 45752 - protein, 29 aa, Artificial Sequence
  Cyclic GFR-binding peptide
  MOD_RES (29)..(29): Xaa is C or S
KLSPINVLYFDSSNNVIYGKIPNMVVKAX

SEQ ID NO: 45753 - protein, 22 aa, Artificial Sequence
  Cyclic GFR-binding peptide
KLSPINVLYFDDMGVPTYGKIP

SEQ ID NO: 45754 - protein, 28 aa, Artificial Sequence
  Cyclic GFR-binding peptide
  MOD_RES (28)..(28): Xaa is C or S
LSPINILYFDAANNVVYGKIPDMVVEAX

SEQ ID NO: 45755 - protein, 30 aa, Artificial Sequence; identical to SEQ ID NO: 42777
  Cyclic GFR-binding peptide
  MOD_RES (3)..(4): Xaa is C or S

SEQ ID NO: 45756 - protein, 24 aa, Artificial Sequence
  Cyclic GFR-binding peptide
TKLSPINVLYFDSSNNVIYGKIPN

SEQ ID NO: 45757 - protein, 24 aa, Artificial Sequence
  Cyclic GFR-binding peptide
ARLSPINILYFDAANNVVYGKIPD

SEQ ID NO: 45758 - protein, 33 aa, Artificial Sequence; identical to SEQ ID NO: 42780
  Cyclic GFR-binding peptide
  MOD_RES (1)..(2): Xaa is C or S

SEQ ID NO: 45759 - protein, 28 aa, Artificial Sequence
  Cyclic GFR-binding peptide
  MOD_RES (27)..(27): Xaa is C or S
SPINILYFDAANNVVYGKIPDMVVEAXG

SEQ ID NO: 45760 - protein, 23 aa, Artificial Sequence
  Cyclic GFR-binding peptide
LSPINVLYFDDMGVPTYGKIPEG

SEQ ID NO: 45761 - protein, 28 aa, Artificial Sequence
  Cyclic GFR-binding peptide
KLSPINILYFDKGVVTYYGKIPGMAVSE

SEQ ID NO: 45762 - protein, 37 aa, Artificial Sequence; identical to SEQ ID NO: 42784
  Cyclic GFR-binding peptide
  MOD_RES (2)..(3)..(35)..(37): Xaa is C or S

SEQ ID NO: 45763 - protein, 35 aa, Artificial Sequence; identical to SEQ ID NO: 42785
  Cyclic GFR-binding peptide
  MOD_RES (3)..(4): Xaa is C or S

SEQ ID NO: 45764 - protein, 27 aa, Artificial Sequence
  Cyclic GFR-binding peptide
LSPINVLYFDDSSNVIYGKIPNMVVRS

SEQ ID NO: 45765 - protein, 34 aa, Artificial Sequence; identical to SEQ ID NO: 42787
  Cyclic GFR-binding peptide
  MOD_RES (32)..(34): Xaa is C or S

SEQ ID NO: 45766 - protein, 31 aa, Artificial Sequence; identical to SEQ ID NO: 42788
  Cyclic GFR-binding peptide
  MOD_RES (2)..(3): Xaa is C or S

SEQ ID NO: 45767 - protein, 30 aa, Artificial Sequence; identical to SEQ ID NO: 42789
  Cyclic GFR-binding peptide
  MOD_RES (4)..(5): Xaa is C or S

SEQ ID NO: 45768 - protein, 35 aa, Artificial Sequence; identical to SEQ ID NO: 42790
  Cyclic GFR-binding peptide
  MOD_RES (4)..(5): Xaa is C or S

SEQ ID NO: 45769 - protein, 34 aa, Artificial Sequence; identical to SEQ ID NO: 42791
  Cyclic GFR-binding peptide
  MOD_RES (32)..(34): Xaa is C or S

SEQ ID NO: 45770 - protein, 32 aa, Artificial Sequence; identical to SEQ ID NO: 42792
  Cyclic GFR-binding peptide
  MOD_RES (1)..(1): Xaa is C or S

SEQ ID NO: 45771 - protein, 27 aa, Artificial Sequence
  Cyclic GFR-binding peptide
LSPINVLYFDDSSNVIYGKIPNMVVRA

SEQ ID NO: 45772 - protein, 31 aa, Artificial Sequence; identical to SEQ ID NO: 42794
  Cyclic GFR-binding peptide
  MOD_RES (1)..(1): Xaa is C or S

SEQ ID NO: 45773 - protein, 31 aa, Artificial Sequence; identical to SEQ ID NO: 42795
  Cyclic GFR-binding peptide
  MOD_RES (29)..(31): Xaa is C or S

SEQ ID NO: 45774 - protein, 25 aa, Artificial Sequence
  Cyclic GFR-binding peptide
PTQLSPINVLYFDDSSNVIYGKIPN

SEQ ID NO: 45775 - protein, 21 aa, Artificial Sequence
  Cyclic GFR-binding peptide
SPINMLYFDENEKVVYGKIPD

SEQ ID NO: 45776 - protein, 36 aa, Artificial Sequence; identical to SEQ ID NO: 42798
  Cyclic GFR-binding peptide
  MOD_RES (4)..(5): Xaa is C or S

SEQ ID NO: 45777 - protein, 32 aa, Artificial Sequence; identical to SEQ ID NO: 42799
  Cyclic GFR-binding peptide
  MOD_RES (6)..(7): Xaa is C or S

SEQ ID NO: 45778 - protein, 29 aa, Artificial Sequence
  Cyclic GFR-binding peptide
  MOD_RES (1)..(2): Xaa is C or S
XXAPVKTSPINMLYFDNGRVLLYGKIPMI

SEQ ID NO: 45779 - protein, 37 aa, Artificial Sequence; identical to SEQ ID NO: 42801
  Cyclic GFR-binding peptide
  MOD_RES (5)..(6): Xaa is C or S

SEQ ID NO: 45780 - protein, 29 aa, Artificial Sequence
  Cyclic GFR-binding peptide
  MOD_RES (3)..(4): Xaa is C or S
KPXXAPTQLSPINVLYFDDSSNVIYGKIP

SEQ ID NO: 45781 - protein, 30 aa, Artificial Sequence; identical to SEQ ID NO: 42803
  Cyclic GFR-binding peptide
  MOD_RES (29)..(29): Xaa is C or S

SEQ ID NO: 45782 - protein, 36 aa, Artificial Sequence; identical to SEQ ID NO: 42804
  Cyclic GFR-binding peptide
  MOD_RES (5)..(6): Xaa is C or S

SEQ ID NO: 45783 - protein, 25 aa, Artificial Sequence
  Cyclic GFR-binding peptide
KLSPINVLYFDDMGVPTYGKIPEGM

SEQ ID NO: 45784 - protein, 28 aa, Artificial Sequence
  Cyclic GFR-binding peptide
TELSPINMLYFDENEKVVYGKIPDMVVE

SEQ ID NO: 45785 - protein, 25 aa, Artificial Sequence
  Cyclic GFR-binding peptide
PTKLSPINILYFDKGVVTYYGKIPG

SEQ ID NO: 45786 - protein, 25 aa, Artificial Sequence
  Cyclic GFR-binding peptide
RLSPINILYFDAANNVVYGKIPDMV

SEQ ID NO: 45787 - protein, 34 aa, Artificial Sequence; identical to SEQ ID NO: 42809
  Cyclic GFR-binding peptide
  MOD_RES (2)..(3): Xaa is C or S

SEQ ID NO: 45788 - protein, 23 aa, Artificial Sequence
  Cyclic GFR-binding peptide
LSPINILYFDKGVVTYYGKIPGM

SEQ ID NO: 45789 - protein, 29 aa, Artificial Sequence
  Cyclic GFR-binding peptide
  MOD_RES (29)..(29): Xaa is C or S
ELSPINMLYFDENEKVVYGKIPDMVVEGX

SEQ ID NO: 45790 - protein, 32 aa, Artificial Sequence; identical to SEQ ID NO: 42812
  Cyclic GFR-binding peptide
  MOD_RES (32)..(32): Xaa is C or S

SEQ ID NO: 45791 - protein, 31 aa, Artificial Sequence; identical to SEQ ID NO: 42813
  Cyclic GFR-binding peptide
  MOD_RES (3)..(4): Xaa is C or S

SEQ ID NO: 45792 - protein, 34 aa, Artificial Sequence; identical to SEQ ID NO: 42814
  Cyclic GFR-binding peptide
  MOD_RES (6)..(7): Xaa is C or S

SEQ ID NO: 45793 - protein, 23 aa, Artificial Sequence
  Cyclic GFR-binding peptide
SPINVLYFDSSNNVIYGKIPNMV

SEQ ID NO: 45794 - protein, 23 aa, Artificial Sequence
  Cyclic GFR-binding peptide
SPINVLYFDDSSNVIYGKIPNMV

SEQ ID NO: 45795 - protein, 40 aa, Artificial Sequence; identical to SEQ ID NO: 42817
  Cyclic GFR-binding peptide
  MOD_RES (4)..(5)..(37)..(39): Xaa is C or S

SEQ ID NO: 45796 - protein, 29 aa, Artificial Sequence
  Cyclic GFR-binding peptide
  MOD_RES (2)..(3): Xaa is C or S
AXXVPTELSPINMLYFDEYDKVVYGKIPE

SEQ ID NO: 45797 - protein, 32 aa, Artificial Sequence; identical to SEQ ID NO: 42819
  Cyclic GFR-binding peptide
  MOD_RES (6)..(7): Xaa is C or S

SEQ ID NO: 45798 - protein, 33 aa, Artificial Sequence; identical to SEQ ID NO: 42820
  Cyclic GFR-binding peptide
  MOD_RES (30)..(32): Xaa is C or S

SEQ ID NO: 45799 - protein, 27 aa, Artificial Sequence
  Cyclic GFR-binding peptide
LSPINILYFDAANNVVYGKIPDMVVEA

SEQ ID NO: 45800 - protein, 38 aa, Artificial Sequence; identical to SEQ ID NO: 42822
  Cyclic GFR-binding peptide
  MOD_RES (5)..(6)..(38): Xaa is C or S

SEQ ID NO: 45801 - protein, 36 aa, Artificial Sequence; identical to SEQ ID NO: 42823
  Cyclic GFR-binding peptide
  MOD_RES (5)..(6): Xaa is C or S

SEQ ID NO: 45802 - protein, 20 aa, Artificial Sequence
  Cyclic GFR-binding peptide
SPINVLYFDDSSNVIYGKIP

SEQ ID NO: 45803 - protein, 30 aa, Artificial Sequence; identical to SEQ ID NO: 42825
  Cyclic GFR-binding peptide
  MOD_RES (4)..(5): Xaa is C or S

SEQ ID NO: 45804 - protein, 36 aa, Artificial Sequence; identical to SEQ ID NO: 42826
  Cyclic GFR-binding peptide
  MOD_RES (1)..(2)..(34)..(36): Xaa is C or S

SEQ ID NO: 45805 - protein, 36 aa, Artificial Sequence; identical to SEQ ID NO: 42827
  Cyclic GFR-binding peptide
  MOD_RES (2)..(3)..(34)..(36): Xaa is C or S

SEQ ID NO: 45806 - protein, 33 aa, Artificial Sequence; identical to SEQ ID NO: 42828
  Cyclic GFR-binding peptide
  MOD_RES (2)..(3): Xaa is C or S

SEQ ID NO: 45807 - protein, 34 aa, Artificial Sequence; identical to SEQ ID NO: 42829
  Cyclic GFR-binding peptide
  MOD_RES (6)..(7): Xaa is C or S

SEQ ID NO: 45808 - protein, 26 aa, Artificial Sequence
  Cyclic GFR-binding peptide
TRLSPINILYFDSANNVVYGKIPDMV

SEQ ID NO: 45809 - protein, 34 aa, Artificial Sequence; identical to SEQ ID NO: 42831
  Cyclic GFR-binding peptide
  MOD_RES (2)..(3): Xaa is C or S

SEQ ID NO: 45810 - protein, 38 aa, Artificial Sequence; identical to SEQ ID NO: 42832
  Cyclic GFR-binding peptide
  MOD_RES (5)..(37): Xaa is C or S

SEQ ID NO: 45811 - protein, 31 aa, Artificial Sequence; identical to SEQ ID NO: 42833
  Cyclic GFR-binding peptide
  MOD_RES (5)..(6): Xaa is C or S

SEQ ID NO: 45812 - protein, 35 aa, Artificial Sequence; identical to SEQ ID NO: 42834
  Cyclic GFR-binding peptide
  MOD_RES (6)..(7): Xaa is C or S

SEQ ID NO: 45813 - protein, 28 aa, Artificial Sequence
  Cyclic GFR-binding peptide
  MOD_RES (26)..(28): Xaa is C or S
SPINMLYFDNGRVLLYGKIPMIVEEXGX

SEQ ID NO: 45814 - protein, 30 aa, Artificial Sequence; identical to SEQ ID NO: 42836
  Cyclic GFR-binding peptide

SEQ ID NO: 45815 - protein, 38 aa, Artificial Sequence; identical to SEQ ID NO: 42837
  Cyclic GFR-binding peptide
  MOD_RES (6)..(38): Xaa is C or S

SEQ ID NO: 45816 - protein, 31 aa, Artificial Sequence; identical to SEQ ID NO: 42838
  Cyclic GFR-binding peptide
  MOD_RES (30)..(30): Xaa is C or S

SEQ ID NO: 45817 - protein, 31 aa, Artificial Sequence; identical to SEQ ID NO: 42839
  Cyclic GFR-binding peptide
  MOD_RES (4)..(5): Xaa is C or S

SEQ ID NO: 45818 - protein, 41 aa, Artificial Sequence; identical to SEQ ID NO: 42840
  Cyclic GFR-binding peptide
  MOD_RES (6)..(7)..(39)..(41): Xaa is C or S

SEQ ID NO: 45819 - protein, 31 aa, Artificial Sequence; identical to SEQ ID NO: 42841
  Cyclic GFR-binding peptide
  MOD_RES (30)..(30): Xaa is C or S

SEQ ID NO: 45820 - protein, 29 aa, Artificial Sequence
  Cyclic GFR-binding peptide
  MOD_RES (28)..(28): Xaa is C or S
LSPINVLYFDSSNNVIYGKIPNMVVKAXG

SEQ ID NO: 45821 - protein, 26 aa, Artificial Sequence
  Cyclic GFR-binding peptide
LSPINVLYFDDMGVPTYGKIPEGMSV

SEQ ID NO: 45822 - protein, 36 aa, Artificial Sequence; identical to SEQ ID NO: 42844
  Cyclic GFR-binding peptide
  MOD_RES (5)..(5): Xaa is C or S

SEQ ID NO: 45823 - protein, 29 aa, Artificial Sequence
  Cyclic GFR-binding peptide
  MOD_RES (29)..(29): Xaa is C or S
RLSPINILYFDSANNVVYGKIPDMVVESX

SEQ ID NO: 45824 - protein, 34 aa, Artificial Sequence; identical to SEQ ID NO: 42846
  Cyclic GFR-binding peptide
  MOD_RES (5)..(6): Xaa is C or S

SEQ ID NO: 45825 - protein, 23 aa, Artificial Sequence
  Cyclic GFR-binding peptide
TKLSPINVLYFDDSSNVIYGKIP

SEQ ID NO: 45826 - protein, 34 aa, Artificial Sequence; identical to SEQ ID NO: 42848
  Cyclic GFR-binding peptide
  MOD_RES (1)..(2)..(34): Xaa is C or S

SEQ ID NO: 45827 - protein, 29 aa, Artificial Sequence
  Cyclic GFR-binding peptide
  MOD_RES (28)..(28): Xaa is C or S
LSPINILYFDKGVVTYYGKIPGMAVSEXG

SEQ ID NO: 45828 - protein, 40 aa, Artificial Sequence; identical to SEQ ID NO: 42850
  Cyclic GFR-binding peptide
  MOD_RES (6)..(7)..(40): Xaa is C or S

SEQ ID NO: 45829 - protein, 39 aa, Artificial Sequence; identical to SEQ ID NO: 42851
  Cyclic GFR-binding peptide
  MOD_RES (4)..(5)..(37)..(39): Xaa is C or S

SEQ ID NO: 45830 - protein, 34 aa, Artificial Sequence; identical to SEQ ID NO: 42852
  Cyclic GFR-binding peptide
  MOD_RES (1)..(2)..(33): Xaa is C or S

SEQ ID NO: 45831 - protein, 33 aa, Artificial Sequence; identical to SEQ ID NO: 42853
  Cyclic GFR-binding peptide
  MOD_RES (3)..(4): Xaa is C or S

SEQ ID NO: 45832 - protein, 39 aa, Artificial Sequence; identical to SEQ ID NO: 42854
  Cyclic GFR-binding peptide
  MOD_RES (4)..(5)..(38): Xaa is C or S

SEQ ID NO: 45833 - protein, 29 aa, Artificial Sequence
  Cyclic GFR-binding peptide
  MOD_RES (28)..(28): Xaa is C or S
LSPINILYFDSANNVVYGKIPDMVVESXG

SEQ ID NO: 45834 - protein, 31 aa, Artificial Sequence; identical to SEQ ID NO: 42856
  Cyclic GFR-binding peptide
  MOD_RES (31)..(31): Xaa is C or S

SEQ ID NO: 45835 - protein, 28 aa, Artificial Sequence
  Cyclic GFR-binding peptide
  MOD_RES (1)..(2): Xaa is C or S
XXAPTKLSPINVLYFDSSNNVIYGKIPN

SEQ ID NO: 45836 - protein, 35 aa, Artificial Sequence; identical to SEQ ID NO: 42858
  Cyclic GFR-binding peptide
  MOD_RES (3)..(4): Xaa is C or S

SEQ ID NO: 45837 - protein, 24 aa, Artificial Sequence
  Cyclic GFR-binding peptide
VKTSPINMLYFDNGRVLLYGKIPM

SEQ ID NO: 45838 - protein, 22 aa, Artificial Sequence
  Cyclic GFR-binding peptide
RLSPINILYFDSANNVVYGKIP

SEQ ID NO: 45839 - protein, 32 aa, Artificial Sequence; identical to SEQ ID NO: 42861
  Cyclic GFR-binding peptide
  MOD_RES (32)..(32): Xaa is C or S

SEQ ID NO: 45840 - protein, 39 aa, Artificial Sequence; identical to SEQ ID NO: 42862
  Cyclic GFR-binding peptide
  MOD_RES (6)..(7)..(39): Xaa is C or S

SEQ ID NO: 45841 - protein, 29 aa, Artificial Sequence
  Cyclic GFR-binding peptide
  MOD_RES (1)..(2): Xaa is C or S
XXAPTKLSPINVLYFDDSSNVIYGKIPNM

SEQ ID NO: 45842 - protein, 20 aa, Artificial Sequence
  Cyclic GFR-binding peptide
SPINVLYFDDMGVPTYGKIP

SEQ ID NO: 45843 - protein, 33 aa, Artificial Sequence; identical to SEQ ID NO: 42865
  Cyclic GFR-binding peptide
  MOD_RES (1)..(33): Xaa is C or S

SEQ ID NO: 45844 - protein, 30 aa, Artificial Sequence; identical to SEQ ID NO: 42866
  Cyclic GFR-binding peptide
  MOD_RES (3)..(4): Xaa is C or S

SEQ ID NO: 45845 - protein, 30 aa, Artificial Sequence; identical to SEQ ID NO: 42867
  Cyclic GFR-binding peptide
  MOD_RES (4)..(5): Xaa is C or S

SEQ ID NO: 45846 - protein, 32 aa, Artificial Sequence; identical to SEQ ID NO: 42868
  Cyclic GFR-binding peptide
  MOD_RES (5)..(6): Xaa is C or S

SEQ ID NO: 45847 - protein, 27 aa, Artificial Sequence
  Cyclic GFR-binding peptide
TKLSPINILYFDKGVVTYYGKIPGMAV

SEQ ID NO: 45848 - protein, 25 aa, Artificial Sequence
  Cyclic GFR-binding peptide
TKLSPINVLYFDSSNNVIYGKIPNM

SEQ ID NO: 45849 - protein, 31 aa, Artificial Sequence; identical to SEQ ID NO: 42871
  Cyclic GFR-binding peptide
  MOD_RES (5)..(6): Xaa is C or S

SEQ ID NO: 45850 - protein, 33 aa, Artificial Sequence; identical to SEQ ID NO: 42872
  Cyclic GFR-binding peptide
  MOD_RES (4)..(5): Xaa is C or S

SEQ ID NO: 45851 - protein, 31 aa, Artificial Sequence; identical to SEQ ID NO: 42873
  Cyclic GFR-binding peptide
  MOD_RES (5)..(6): Xaa is C or S

SEQ ID NO: 45852 - protein, 33 aa, Artificial Sequence; identical to SEQ ID NO: 42874
  Cyclic GFR-binding peptide
  MOD_RES (5)..(6): Xaa is C or S

SEQ ID NO: 45853 - protein, 37 aa, Artificial Sequence; identical to SEQ ID NO: 42875
  Cyclic GFR-binding peptide
  MOD_RES (3)..(4)..(36): Xaa is C or S

SEQ ID NO: 45854 - protein, 31 aa, Artificial Sequence; identical to SEQ ID NO: 42876
  Cyclic GFR-binding peptide

SEQ ID NO: 45855 - protein, 27 aa, Artificial Sequence
  Cyclic GFR-binding peptide
PARLSPINILYFDAANNVVYGKIPDMV

SEQ ID NO: 45856 - protein, 38 aa, Artificial Sequence; identical to SEQ ID NO: 42878
  Cyclic GFR-binding peptide
  MOD_RES (5)..(6)..(38): Xaa is C or S

SEQ ID NO: 45857 - protein, 34 aa, Artificial Sequence; identical to SEQ ID NO: 42879
  Cyclic GFR-binding peptide
  MOD_RES (32)..(34): Xaa is C or S

SEQ ID NO: 45858 - protein, 32 aa, Artificial Sequence; identical to SEQ ID NO: 42880
  Cyclic GFR-binding peptide
  MOD_RES (4)..(5): Xaa is C or S

SEQ ID NO: 45859 - protein, 37 aa, Artificial Sequence; identical to SEQ ID NO: 42881
  Cyclic GFR-binding peptide
  MOD_RES (1)..(2)..(34)..(36): Xaa is C or S

SEQ ID NO: 45860 - protein, 35 aa, Artificial Sequence; identical to SEQ ID NO: 42882
  Cyclic GFR-binding peptide
  MOD_RES (6)..(7): Xaa is C or S

SEQ ID NO: 45861 - protein, 34 aa, Artificial Sequence; identical to SEQ ID NO: 42883
  Cyclic GFR-binding peptide
  MOD_RES (5)..(5): Xaa is C or S

SEQ ID NO: 45862 - protein, 30 aa, Artificial Sequence; identical to SEQ ID NO: 42884
  Cyclic GFR-binding peptide
  MOD_RES (2)..(3): Xaa is C or S

SEQ ID NO: 45863 - protein, 33 aa, Artificial Sequence; identical to SEQ ID NO: 42885
  Cyclic GFR-binding peptide
  MOD_RES (3)..(4): Xaa is C or S

SEQ ID NO: 45864 - protein, 24 aa, Artificial Sequence
  Cyclic GFR-binding peptide
LSPINMLYFDEYDKVVYGKIPEMV

SEQ ID NO: 45865 - protein, 31 aa, Artificial Sequence; identical to SEQ ID NO: 42887
  Cyclic GFR-binding peptide
  MOD_RES (5)..(6): Xaa is C or S

SEQ ID NO: 45866 - protein, 27 aa, Artificial Sequence
  Cyclic GFR-binding peptide
  MOD_RES (1)..(1): Xaa is C or S
XVPTRLSPINILYFDSANNVVYGKIPD

SEQ ID NO: 45867 - protein, 41 aa, Artificial Sequence; identical to SEQ ID NO: 42889
  Cyclic GFR-binding peptide
  MOD_RES (6)..(7)..(39)..(41): Xaa is C or S

SEQ ID NO: 45868 - protein, 25 aa, Artificial Sequence
  Cyclic GFR-binding peptide
LSPINILYFDAANNVVYGKIPDMVV

SEQ ID NO: 45869 - protein, 24 aa, Artificial Sequence
  Cyclic GFR-binding peptide
LSPINILYFDSANNVVYGKIPDMV

SEQ ID NO: 45870 - protein, 27 aa, Artificial Sequence
  Cyclic GFR-binding peptide
LSPINILYFDSANNVVYGKIPDMVVES

SEQ ID NO: 45871 - protein, 27 aa, Artificial Sequence
  Cyclic GFR-binding peptide
VPTKLSPINILYFDKGVVTYYGKIPGM

SEQ ID NO: 45872 - protein, 29 aa, Artificial Sequence
  Cyclic GFR-binding peptide
  MOD_RES (3)..(4): Xaa is C or S
STXXAPVKTSPINMLYFDNGRVLLYGKIP

SEQ ID NO: 45873 - protein, 37 aa, Artificial Sequence; identical to SEQ ID NO: 42895
  Cyclic GFR-binding peptide
  MOD_RES (4)..(5)..(36): Xaa is C or S

SEQ ID NO: 45874 - protein, 36 aa, Artificial Sequence; identical to SEQ ID NO: 42896
  Cyclic GFR-binding peptide
  MOD_RES (1)..(2)..(34)..(36): Xaa is C or S

SEQ ID NO: 45875 - protein, 31 aa, Artificial Sequence; identical to SEQ ID NO: 42897
  Cyclic GFR-binding peptide
  MOD_RES (30)..(30): Xaa is C or S

SEQ ID NO: 45876 - protein, 23 aa, Artificial Sequence
  Cyclic GFR-binding peptide
LSPINILYFDAANNVVYGKIPDM

SEQ ID NO: 45877 - protein, 37 aa, Artificial Sequence; identical to SEQ ID NO: 42899
  Cyclic GFR-binding peptide
  MOD_RES (5)..(6)..(37): Xaa is C or S

SEQ ID NO: 45878 - protein, 31 aa, Artificial Sequence; identical to SEQ ID NO: 42900
  Cyclic GFR-binding peptide
  MOD_RES (31)..(31): Xaa is C or S

SEQ ID NO: 45879 - protein, 37 aa, Artificial Sequence; identical to SEQ ID NO: 42901
  Cyclic GFR-binding peptide
  MOD_RES (2)..(3)..(35)..(37): Xaa is C or S

SEQ ID NO: 45880 - protein, 26 aa, Artificial Sequence
  Cyclic GFR-binding peptide
VPARLSPINILYFDAANNVVYGKIPD

SEQ ID NO: 45881 - protein, 25 aa, Artificial Sequence
  Cyclic GFR-binding peptide
LSPINVLYFDSSNNVIYGKIPNMVV

SEQ ID NO: 45882 - protein, 30 aa, Artificial Sequence; identical to SEQ ID NO: 42904
  Cyclic GFR-binding peptide
  MOD_RES (4)..(5): Xaa is C or S

SEQ ID NO: 45883 - protein, 30 aa, Artificial Sequence; identical to SEQ ID NO: 42905
  Cyclic GFR-binding peptide
  MOD_RES (1)..(1): Xaa is C or S

SEQ ID NO: 45884 - protein, 25 aa, Artificial Sequence
  Cyclic GFR-binding peptide
SPINMLYFDENEKVVYGKIPDMVVE

SEQ ID NO: 45885 - protein, 32 aa, Artificial Sequence; identical to SEQ ID NO: 42907
  Cyclic GFR-binding peptide
  MOD_RES (32)..(32): Xaa is C or S

SEQ ID NO: 45886 - protein, 30 aa, Artificial Sequence; identical to SEQ ID NO: 42908
  Cyclic GFR-binding peptide

SEQ ID NO: 45887 - protein, 22 aa, Artificial Sequence
  Cyclic GFR-binding peptide
LSPINVLYFDDSSNVIYGKIPN

SEQ ID NO: 45888 - protein, 30 aa, Artificial Sequence; identical to SEQ ID NO: 42910
  Cyclic GFR-binding peptide
  MOD_RES (30)..(30): Xaa is C or S

SEQ ID NO: 45889 - protein, 38 aa, Artificial Sequence; identical to SEQ ID NO: 42911
  Cyclic GFR-binding peptide
  MOD_RES (6)..(7): Xaa is C or S

SEQ ID NO: 45890 - protein, 25 aa, Artificial Sequence
  Cyclic GFR-binding peptide
KLSPINILYFDKGVVTYYGKIPGMA

SEQ ID NO: 45891 - protein, 31 aa, Artificial Sequence; identical to SEQ ID NO: 42913
  Cyclic GFR-binding peptide
  MOD_RES (2)..(3): Xaa is C or S

SEQ ID NO: 45892 - skipped

SEQ ID NO: 45893 - protein, 34 aa, Artificial Sequence; identical to SEQ ID NO: 42915
  Cyclic GFR-binding peptide
  MOD_RES (1)..(2)..(34): Xaa is C or S

SEQ ID NO: 45894 - protein, 42 aa, Artificial Sequence; identical to SEQ ID NO: 42916
  Cyclic GFR-binding peptide
  MOD_RES (6)..(7)..(39)..(41): Xaa is C or S

SEQ ID NO: 45895 - protein, 33 aa, Artificial Sequence; identical to SEQ ID NO: 42917
  Cyclic GFR-binding peptide
  MOD_RES (5)..(5): Xaa is C or S

SEQ ID NO: 45896 - protein, 32 aa, Artificial Sequence; identical to SEQ ID NO: 42918
  Cyclic GFR-binding peptide
  MOD_RES (6)..(6): Xaa is C or S

SEQ ID NO: 45897 - protein, 33 aa, Artificial Sequence; identical to SEQ ID NO: 42919
  Cyclic GFR-binding peptide
  MOD_RES (5)..(6): Xaa is C or S

SEQ ID NO: 45898 - protein, 32 aa, Artificial Sequence; identical to SEQ ID NO: 42920
  Cyclic GFR-binding peptide
  MOD_RES (1)..(32): Xaa is C or S

SEQ ID NO: 45899 - protein, 34 aa, Artificial Sequence; identical to SEQ ID NO: 42921
  Cyclic GFR-binding peptide
  MOD_RES (3)..(3): Xaa is C or S

SEQ ID NO: 45900 - protein, 33 aa, Artificial Sequence; identical to SEQ ID NO: 42922
  Cyclic GFR-binding peptide
  MOD_RES (3)..(4): Xaa is C or S

SEQ ID NO: 45901 - protein, 37 aa, Artificial Sequence; identical to SEQ ID NO: 42923
  Cyclic GFR-binding peptide
  MOD_RES (3)..(4)..(36): Xaa is C or S

SEQ ID NO: 45902 - protein, 29 aa, Artificial Sequence
  Cyclic GFR-binding peptide
PTKLSPINVLYFDSSNNVIYGKIPNMVVK

SEQ ID NO: 45903 - protein, 37 aa, Artificial Sequence; identical to SEQ ID NO: 42925
  Cyclic GFR-binding peptide
  MOD_RES (6)..(7): Xaa is C or S

SEQ ID NO: 45904 - protein, 21 aa, Artificial Sequence
  Cyclic GFR-binding peptide
LSPINMLYFDENEKVVYGKIP

SEQ ID NO: 45905 - protein, 30 aa, Artificial Sequence; identical to SEQ ID NO: 42927
  Cyclic GFR-binding peptide
  MOD_RES (1)..(2): Xaa is C or S

SEQ ID NO: 45906 - protein, 32 aa, Artificial Sequence; identical to SEQ ID NO: 42928
  Cyclic GFR-binding peptide
  MOD_RES (1)..(2): Xaa is C or S

SEQ ID NO: 45907 - protein, 33 aa, Artificial Sequence; identical to SEQ ID NO: 42929
  Cyclic GFR-binding peptide
  MOD_RES (4)..(5): Xaa is C or S

SEQ ID NO: 45908 - protein, 28 aa, Artificial Sequence
  Cyclic GFR-binding peptide
  MOD_RES (1)..(2): Xaa is C or S
XXAPTQLSPINVLYFDDSSNVIYGKIPN

SEQ ID NO: 45909 - protein, 31 aa, Artificial Sequence; identical to SEQ ID NO: 42931
  Cyclic GFR-binding peptide
  MOD_RES (2)..(3): Xaa is C or S

SEQ ID NO: 45910 - protein, 36 aa, Artificial Sequence; identical to SEQ ID NO: 42932
  Cyclic GFR-binding peptide
  MOD_RES (4)..(5): Xaa is C or S

SEQ ID NO: 45911 - protein, 32 aa, Artificial Sequence; identical to SEQ ID NO: 42933
  Cyclic GFR-binding peptide
  MOD_RES (4)..(5): Xaa is C or S

SEQ ID NO: 45912 - protein, 32 aa, Artificial Sequence; identical to SEQ ID NO: 42934
  Cyclic GFR-binding peptide
  MOD_RES (5)..(6): Xaa is C or S

SEQ ID NO: 45913 - protein, 33 aa, Artificial Sequence; identical to SEQ ID NO: 42935
  Cyclic GFR-binding peptide
  MOD_RES (2)..(2): Xaa is C or S

SEQ ID NO: 45914 - protein, 22 aa, Artificial Sequence
  Cyclic GFR-binding peptide
SPINILYFDSANNVVYGKIPDM

SEQ ID NO: 45915 - protein, 26 aa, Artificial Sequence
  Cyclic GFR-binding peptide
  MOD_RES (1)..(1): Xaa is C or S
XAPTQLSPINVLYFDDSSNVIYGKIP

SEQ ID NO: 45916 - protein, 32 aa, Artificial Sequence; identical to SEQ ID NO: 42938
  Cyclic GFR-binding peptide
  MOD_RES (3)..(4): Xaa is C or S

SEQ ID NO: 45917 - protein, 38 aa, Artificial Sequence; identical to SEQ ID NO: 42939
  Cyclic GFR-binding peptide
  MOD_RES (6)..(7): Xaa is C or S

SEQ ID NO: 45918 - protein, 36 aa, Artificial Sequence; identical to SEQ ID NO: 42940
  Cyclic GFR-binding peptide
  MOD_RES (2)..(3)..(35): Xaa is C or S

SEQ ID NO: 45919 - protein, 32 aa, Artificial Sequence; identical to SEQ ID NO: 42941
  Cyclic GFR-binding peptide
  MOD_RES (29)..(31): Xaa is C or S

SEQ ID NO: 45920 - protein, 31 aa, Artificial Sequence; identical to SEQ ID NO: 42942
  Cyclic GFR-binding peptide
  MOD_RES (1)..(1): Xaa is C or S

SEQ ID NO: 45921 - protein, 23 aa, Artificial Sequence
  Cyclic GFR-binding peptide
KTSPINMLYFDNGRVLLYGKIPM

SEQ ID NO: 45922 - protein, 35 aa, Artificial Sequence; identical to SEQ ID NO: 42944
  Cyclic GFR-binding peptide
  MOD_RES (4)..(5): Xaa is C or S

SEQ ID NO: 45923 - protein, 33 aa, Artificial Sequence; identical to SEQ ID NO: 42945
  Cyclic GFR-binding peptide
  MOD_RES (2)..(3): Xaa is C or S

SEQ ID NO: 45924 - protein, 35 aa, Artificial Sequence; identical to SEQ ID NO: 42946
  Cyclic GFR-binding peptide
  MOD_RES (2)..(3)..(35): Xaa is C or S

SEQ ID NO: 45925 - protein, 33 aa, Artificial Sequence; identical to SEQ ID NO: 42947
  Cyclic GFR-binding peptide
  MOD_RES (1)..(2): Xaa is C or S

SEQ ID NO: 45926 - protein, 30 aa, Artificial Sequence; identical to SEQ ID NO: 42948
  Cyclic GFR-binding peptide

SEQ ID NO: 45927 - protein, 27 aa, Artificial Sequence
  Cyclic GFR-binding peptide
KLSPINVLYFDDMGVPTYGKIPEGMSV

SEQ ID NO: 45928 - protein, 34 aa, Artificial Sequence; identical to SEQ ID NO: 42950
  Cyclic GFR-binding peptide
  MOD_RES (1)..(2)..(34): Xaa is C or S

SEQ ID NO: 45929 - protein, 39 aa, Artificial Sequence; identical to SEQ ID NO: 42951
  Cyclic GFR-binding peptide
  MOD_RES (3)..(4)..(36)..(38): Xaa is C or S

SEQ ID NO: 45930 - protein, 36 aa, Artificial Sequence; identical to SEQ ID NO: 42952
  Cyclic GFR-binding peptide
  MOD_RES (2)..(3)..(35): Xaa is C or S

SEQ ID NO: 45931 - protein, 24 aa, Artificial Sequence
  Cyclic GFR-binding peptide
KTSPINMLYFDNGRVLLYGKIPMI

SEQ ID NO: 45932 - protein, 27 aa, Artificial Sequence
  Cyclic GFR-binding peptide
APTQLSPINVLYFDDSSNVIYGKIPNM

SEQ ID NO: 45933 - protein, 34 aa, Artificial Sequence; identical to SEQ ID NO: 42955
  Cyclic GFR-binding peptide
  MOD_RES (3)..(4): Xaa is C or S

SEQ ID NO: 45934 - protein, 39 aa, Artificial Sequence; identical to SEQ ID NO: 42956
  Cyclic GFR-binding peptide
  MOD_RES (5)..(6)..(38): Xaa is C or S

SEQ ID NO: 45935 - protein, 25 aa, Artificial Sequence
  Cyclic GFR-binding peptide
SPINVLYFDDSSNVIYGKIPNMVVR

SEQ ID NO: 45936 - protein, 30 aa, Artificial Sequence; identical to SEQ ID NO: 42958
  Cyclic GFR-binding peptide
  MOD_RES (4)..(4): Xaa is C or S

SEQ ID NO: 45937 - protein, 28 aa, Artificial Sequence
  Cyclic GFR-binding peptide
  MOD_RES (27)..(27): Xaa is C or S
SPINVLYFDDSSNVIYGKIPNMVVRSXG

SEQ ID NO: 45938 - protein, 37 aa, Artificial Sequence; identical to SEQ ID NO: 42960
  Cyclic GFR-binding peptide
  MOD_RES (3)..(4)..(36): Xaa is C or S

SEQ ID NO: 45939 - protein, 25 aa, Artificial Sequence
  Cyclic GFR-binding peptide
ELSPINMLYFDENEKVVYGKIPDMV

SEQ ID NO: 45940 - protein, 27 aa, Artificial Sequence
  Cyclic GFR-binding peptide
  MOD_RES (1)..(1): Xaa is C or S
XAPVKTSPINMLYFDNGRVLLYGKIPM

SEQ ID NO: 45941 - protein, 36 aa, Artificial Sequence; identical to SEQ ID NO: 42963
  Cyclic GFR-binding peptide
  MOD_RES (1)..(2)..(34)..(36): Xaa is C or S

SEQ ID NO: 45942 - protein, 36 aa, Artificial Sequence; identical to SEQ ID NO: 42964
  Cyclic GFR-binding peptide
  MOD_RES (1)..(33)..(35): Xaa is C or S

SEQ ID NO: 45943 - protein, 37 aa, Artificial Sequence; identical to SEQ ID NO: 42965
  Cyclic GFR-binding peptide
  MOD_RES (5)..(6): Xaa is C or S

SEQ ID NO: 45944 - protein, 29 aa, Artificial Sequence
  Cyclic GFR-binding peptide
  MOD_RES (2)..(3): Xaa is C or S
AXXVPTKLSPINVLYFDDMGVPTYGKIPE

SEQ ID NO: 45945 - protein, 31 aa, Artificial Sequence; identical to SEQ ID NO: 42967
  Cyclic GFR-binding peptide
  MOD_RES (1)..(2): Xaa is C or S

SEQ ID NO: 45946 - protein, 35 aa, Artificial Sequence; identical to SEQ ID NO: 42968
  Cyclic GFR-binding peptide
  MOD_RES (5)..(6): Xaa is C or S

SEQ ID NO: 45947 - protein, 26 aa, Artificial Sequence
  Cyclic GFR-binding peptide
ELSPINMLYFDENEKVVYGKIPDMVV

SEQ ID NO: 45948 - protein, 37 aa, Artificial Sequence; identical to SEQ ID NO: 42970
  Cyclic GFR-binding peptide
  MOD_RES (3)..(4)..(36): Xaa is C or S

SEQ ID NO: 45949 - protein, 28 aa, Artificial Sequence
  Cyclic GFR-binding peptide
  MOD_RES (28)..(28): Xaa is C or S
LSPINVLYFDDSSNVIYGKIPNMVVRAX

SEQ ID NO: 45950 - protein, 39 aa, Artificial Sequence; identical to SEQ ID NO: 42972
  Cyclic GFR-binding peptide
  MOD_RES (3)..(4)..(36)..(38): Xaa is C or S

SEQ ID NO: 45951 - protein, 39 aa, Artificial Sequence; identical to SEQ ID NO: 42973
  Cyclic GFR-binding peptide
  MOD_RES (6)..(7)..(39): Xaa is C or S

SEQ ID NO: 45952 - protein, 42 aa, Artificial Sequence; identical to SEQ ID NO: 42974
  Cyclic GFR-binding peptide
  MOD_RES (6)..(7)..(40)..(42): Xaa is C or S

SEQ ID NO: 45953 - protein, 39 aa, Artificial Sequence; identical to SEQ ID NO: 42975
  Cyclic GFR-binding peptide
  MOD_RES (4)..(5)..(37)..(39): Xaa is C or S

SEQ ID NO: 45954 - protein, 26 aa, Artificial Sequence
  Cyclic GFR-binding peptide
SPINILYFDAANNVVYGKIPDMVVEA

SEQ ID NO: 45955 - protein, 40 aa, Artificial Sequence; identical to SEQ ID NO: 42977
  Cyclic GFR-binding peptide
  MOD_RES (6)..(7)..(39): Xaa is C or S

SEQ ID NO: 45956 - protein, 28 aa, Artificial Sequence
  Cyclic GFR-binding peptide
  MOD_RES (1)..(1): Xaa is C or S
XAPTKLSPINVLYFDDSSNVIYGKIPNM

SEQ ID NO: 45957 - protein, 31 aa, Artificial Sequence; identical to SEQ ID NO: 42979
  Cyclic GFR-binding peptide
  MOD_RES (29)..(31): Xaa is C or S

SEQ ID NO: 45958 - protein, 23 aa, Artificial Sequence
  Cyclic GFR-binding peptide
TSPINMLYFDNGRVLLYGKIPMI

SEQ ID NO: 45959 - protein, 28 aa, Artificial Sequence
  Cyclic GFR-binding peptide
  MOD_RES (28)..(28): Xaa is C or S
LSPINVLYFDSSNNVIYGKIPNMVVKAX

SEQ ID NO: 45960 - protein, 35 aa, Artificial Sequence; identical to SEQ ID NO: 42982
  Cyclic GFR-binding peptide
  MOD_RES (5)..(6): Xaa is C or S

SEQ ID NO: 45961 - protein, 26 aa, Artificial Sequence
  Cyclic GFR-binding peptide
TKLSPINVLYFDDMGVPTYGKIPEGM

SEQ ID NO: 45962 - protein, 39 aa, Artificial Sequence; identical to SEQ ID NO: 42984
  Cyclic GFR-binding peptide
  MOD_RES (5)..(6)..(38): Xaa is C or S

SEQ ID NO: 45963 - protein, 24 aa, Artificial Sequence
  Cyclic GFR-binding peptide
LSPINILYFDAANNVVYGKIPDMV

SEQ ID NO: 45964 - protein, 34 aa, Artificial Sequence; identical to SEQ ID NO: 42986
  Cyclic GFR-binding peptide
  MOD_RES (1)..(2)..(34): Xaa is C or S

SEQ ID NO: 45965 - protein, 37 aa, Artificial Sequence; identical to SEQ ID NO: 42987
  Cyclic GFR-binding peptide
  MOD_RES (4)..(5)..(37): Xaa is C or S

SEQ ID NO: 45966 - protein, 38 aa, Artificial Sequence; identical to SEQ ID NO: 42988
  Cyclic GFR-binding peptide
  MOD_RES (3)..(4)..(37): Xaa is C or S

SEQ ID NO: 45967 - protein, 32 aa, Artificial Sequence; identical to SEQ ID NO: 42989
  Cyclic GFR-binding peptide
  MOD_RES (31)..(31): Xaa is C or S

SEQ ID NO: 45968 - protein, 29 aa, Artificial Sequence
  Cyclic GFR-binding peptide
PTRLSPINILYFDSANNVVYGKIPDMVVE

SEQ ID NO: 45969 - protein, 38 aa, Artificial Sequence; identical to SEQ ID NO: 42991
  Cyclic GFR-binding peptide
  MOD_RES (3)..(4)..(36)..(38): Xaa is C or S

SEQ ID NO: 45970 - protein, 28 aa, Artificial Sequence
  Cyclic GFR-binding peptide
  MOD_RES (1)..(1): Xaa is C or S
XVPTRLSPINILYFDSANNVVYGKIPDM

SEQ ID NO: 45971 - protein, 31 aa, Artificial Sequence; identical to SEQ ID NO: 42993
  Cyclic GFR-binding peptide

SEQ ID NO: 45972 - protein, 33 aa, Artificial Sequence; identical to SEQ ID NO: 42994
  Cyclic GFR-binding peptide
  MOD_RES (3)..(4): Xaa is C or S

SEQ ID NO: 45973 - protein, 32 aa, Artificial Sequence; identical to SEQ ID NO: 42995
  Cyclic GFR-binding peptide
  MOD_RES (29)..(31): Xaa is C or S

SEQ ID NO: 45974 - protein, 33 aa, Artificial Sequence; identical to SEQ ID NO: 42996
  Cyclic GFR-binding peptide
  MOD_RES (1)..(33): Xaa is C or S

SEQ ID NO: 45975 - protein, 35 aa, Artificial Sequence; identical to SEQ ID NO: 42997
  Cyclic GFR-binding peptide
  MOD_RES (4)..(4): Xaa is C or S

SEQ ID NO: 45976 - protein, 40 aa, Artificial Sequence; identical to SEQ ID NO: 42998
  Cyclic GFR-binding peptide
  MOD_RES (4)..(5)..(37)..(39): Xaa is C or S

SEQ ID NO: 45977 - protein, 21 aa, Artificial Sequence
  Cyclic GFR-binding peptide
SPINILYFDKGVVTYYGKIPG

SEQ ID NO: 45978 - protein, 28 aa, Artificial Sequence
  Cyclic GFR-binding peptide
VPTRLSPINILYFDSANNVVYGKIPDMV

SEQ ID NO: 45979 - protein, 24 aa, Artificial Sequence
  Cyclic GFR-binding peptide
ELSPINMLYFDENEKVVYGKIPDM

SEQ ID NO: 45980 - protein, 26 aa, Artificial Sequence
  Cyclic GFR-binding peptide
SPINILYFDKGVVTYYGKIPGMAVSE

SEQ ID NO: 45981 - protein, 26 aa, Artificial Sequence
  Cyclic GFR-binding peptide
  MOD_RES (1)..(1): Xaa is C or S
XVPTELSPINMLYFDEYDKVVYGKIP

SEQ ID NO: 45982 - protein, 33 aa, Artificial Sequence; identical to SEQ ID NO: 43004
  Cyclic GFR-binding peptide
  MOD_RES (4)..(5): Xaa is C or S

SEQ ID NO: 45983 - protein, 26 aa, Artificial Sequence
  Cyclic GFR-binding peptide
PTKLSPINILYFDKGVVTYYGKIPGM

SEQ ID NO: 45984 - protein, 28 aa, Artificial Sequence
  Cyclic GFR-binding peptide
TKLSPINVLYFDDSSNVIYGKIPNMVVR

SEQ ID NO: 45985 - protein, 28 aa, Artificial Sequence
  Cyclic GFR-binding peptide
  MOD_RES (27)..(27): Xaa is C or S
SPINVLYFDDSSNVIYGKIPNMVVRAXG

SEQ ID NO: 45986 - protein, 26 aa, Artificial Sequence
  Cyclic GFR-binding peptide
SPINILYFDSANNVVYGKIPDMVVES

SEQ ID NO: 45987 - protein, 34 aa, Artificial Sequence; identical to SEQ ID NO: 43009
  Cyclic GFR-binding peptide
  MOD_RES (31)..(33): Xaa is C or S

SEQ ID NO: 45988 - protein, 23 aa, Artificial Sequence
  Cyclic GFR-binding peptide
TKLSPINILYFDKGVVTYYGKIP

SEQ ID NO: 45989 - protein, 29 aa, Artificial Sequence
  Cyclic GFR-binding peptide
  MOD_RES (1)..(1): Xaa is C or S
XVPTELSPINMLYFDENEKVVYGKIPDMV

SEQ ID NO: 45990 - protein, 30 aa, Artificial Sequence; identical to SEQ ID NO: 43012
  Cyclic GFR-binding peptide
  MOD_RES (2)..(3): Xaa is C or S

SEQ ID NO: 45991 - protein, 33 aa, Artificial Sequence; identical to SEQ ID NO: 43013
  Cyclic GFR-binding peptide
  MOD_RES (31)..(33): Xaa is C or S

SEQ ID NO: 45992 - protein, 24 aa, Artificial Sequence
  Cyclic GFR-binding peptide
KLSPINVLYFDDSSNVIYGKIPNM

SEQ ID NO: 45993 - protein, 30 aa, Artificial Sequence; identical to SEQ ID NO: 43015
  Cyclic GFR-binding peptide
  MOD_RES (30)..(30): Xaa is C or S

SEQ ID NO: 45994 - protein, 25 aa, Artificial Sequence
  Cyclic GFR-binding peptide
PTKLSPINVLYFDSSNNVIYGKIPN

SEQ ID NO: 45995 - protein, 30 aa, Artificial Sequence; identical to SEQ ID NO: 43017
  Cyclic GFR-binding peptide
  MOD_RES (2)..(2): Xaa is C or S

SEQ ID NO: 45996 - protein, 33 aa, Artificial Sequence; identical to SEQ ID NO: 43018
  Cyclic GFR-binding peptide
  MOD_RES (1)..(2): Xaa is C or S

SEQ ID NO: 45997 - protein, 36 aa, Artificial Sequence; identical to SEQ ID NO: 43019
  Cyclic GFR-binding peptide
  MOD_RES (4)..(5): Xaa is C or S

SEQ ID NO: 45998 - protein, 28 aa, Artificial Sequence
  Cyclic GFR-binding peptide
TKLSPINVLYFDDMGVPTYGKIPEGMSV

SEQ ID NO: 45999 - protein, 25 aa, Artificial Sequence
  Cyclic GFR-binding peptide
PARLSPINILYFDAANNVVYGKIPD

SEQ ID NO: 46000 - protein, 42 aa, Artificial Sequence; identical to SEQ ID NO: 43022
  Cyclic GFR-binding peptide
  MOD_RES (6)..(7)..(39)..(41): Xaa is C or S

SEQ ID NO: 46001 - protein, 28 aa, Artificial Sequence
  Cyclic GFR-binding peptide
KLSPINVLYFDSSNNVIYGKIPNMVVKA

SEQ ID NO: 46002 - protein, 27 aa, Artificial Sequence
  Cyclic GFR-binding peptide
  MOD_RES (1)..(1): Xaa is C or S
XAPTKLSPINVLYFDSSNNVIYGKIPN

SEQ ID NO: 46003 - protein, 35 aa, Artificial Sequence; identical to SEQ ID NO: 43025
  Cyclic GFR-binding peptide
  MOD_RES (1)..(33)..(35): Xaa is C or S

SEQ ID NO: 46004 - protein, 36 aa, Artificial Sequence; identical to SEQ ID NO: 43026
  Cyclic GFR-binding peptide
  MOD_RES (1)..(2)..(35): Xaa is C or S

SEQ ID NO: 46005 - protein, 30 aa, Artificial Sequence; identical to SEQ ID NO: 43027
  Cyclic GFR-binding peptide
  MOD_RES (29)..(29): Xaa is C or S

SEQ ID NO: 46006 - protein, 22 aa, Artificial Sequence
  Cyclic GFR-binding peptide
KLSPINVLYFDSSNNVIYGKIP

SEQ ID NO: 46007 - protein, 26 aa, Artificial Sequence
  Cyclic GFR-binding peptide
TELSPINMLYFDEYDKVVYGKIPEMV

SEQ ID NO: 46008 - protein, 37 aa, Artificial Sequence; identical to SEQ ID NO: 43030
  Cyclic GFR-binding peptide
  MOD_RES (4)..(5)..(37): Xaa is C or S

SEQ ID NO: 46009 - protein, 37 aa, Artificial Sequence; identical to SEQ ID NO: 43031
  Cyclic GFR-binding peptide
  MOD_RES (4)..(5)..(37): Xaa is C or S

SEQ ID NO: 46010 - protein, 29 aa, Artificial Sequence
  Cyclic GFR-binding peptide
  MOD_RES (27)..(29): Xaa is C or S
TSPINMLYFDNGRVLLYGKIPMIVEEXGX

SEQ ID NO: 46011 - protein, 33 aa, Artificial Sequence; identical to SEQ ID NO: 43033
  Cyclic GFR-binding peptide
  MOD_RES (7)..(7): Xaa is C or S

SEQ ID NO: 46012 - protein, 32 aa, Artificial Sequence; identical to SEQ ID NO: 43034
  Cyclic GFR-binding peptide
  MOD_RES (32)..(32): Xaa is C or S

SEQ ID NO: 46013 - protein, 33 aa, Artificial Sequence; identical to SEQ ID NO: 43035
  Cyclic GFR-binding peptide
  MOD_RES (32)..(32): Xaa is C or S

SEQ ID NO: 46014 - protein, 21 aa, Artificial Sequence
  Cyclic GFR-binding peptide
LSPINVLYFDSSNNVIYGKIP

SEQ ID NO: 46015 - protein, 31 aa, Artificial Sequence; identical to SEQ ID NO: 43037
  Cyclic GFR-binding peptide
  MOD_RES (1)..(1): Xaa is C or S

SEQ ID NO: 46016 - protein, 31 aa, Artificial Sequence; identical to SEQ ID NO: 43038
  Cyclic GFR-binding peptide
  MOD_RES (5)..(6): Xaa is C or S

SEQ ID NO: 46017 - protein, 30 aa, Artificial Sequence; identical to SEQ ID NO: 43039
  Cyclic GFR-binding peptide
  MOD_RES (2)..(3): Xaa is C or S

SEQ ID NO: 46018 - protein, 30 aa, Artificial Sequence; identical to SEQ ID NO: 43040
  Cyclic GFR-binding peptide
  MOD_RES (1)..(2): Xaa is C or S

SEQ ID NO: 46019 - protein, 34 aa, Artificial Sequence; identical to SEQ ID NO: 43041
  Cyclic GFR-binding peptide
  MOD_RES (6)..(7): Xaa is C or S

SEQ ID NO: 46020 - protein, 24 aa, Artificial Sequence
  Cyclic GFR-binding peptide
RLSPINILYFDAANNVVYGKIPDM

SEQ ID NO: 46021 - protein, 39 aa, Artificial Sequence; identical to SEQ ID NO: 43043
  Cyclic GFR-binding peptide
  MOD_RES (5)..(6)..(38): Xaa is C or S

SEQ ID NO: 46022 - protein, 31 aa, Artificial Sequence; identical to SEQ ID NO: 43044
  Cyclic GFR-binding peptide
  MOD_RES (1)..(2): Xaa is C or S

SEQ ID NO: 46023 - protein, 33 aa, Artificial Sequence; identical to SEQ ID NO: 43045
  Cyclic GFR-binding peptide
  MOD_RES (32)..(32): Xaa is C or S

SEQ ID NO: 46024 - protein, 32 aa, Artificial Sequence; identical to SEQ ID NO: 43046
  Cyclic GFR-binding peptide
  MOD_RES (4)..(5): Xaa is C or S

SEQ ID NO: 46025 - protein, 31 aa, Artificial Sequence; identical to SEQ ID NO: 43047
  Cyclic GFR-binding peptide
  MOD_RES (2)..(3): Xaa is C or S

SEQ ID NO: 46026 - protein, 27 aa, Artificial Sequence
  Cyclic GFR-binding peptide
LSPINVLYFDSSNNVIYGKIPNMVVKA

SEQ ID NO: 46027 - protein, 42 aa, Artificial Sequence; identical to SEQ ID NO: 43049
  Cyclic GFR-binding peptide
  MOD_RES (6)..(7)..(39)..(41): Xaa is C or S

SEQ ID NO: 46028 - protein, 35 aa, Artificial Sequence; identical to SEQ ID NO: 43050
  Cyclic GFR-binding peptide
  MOD_RES (3)..(4): Xaa is C or S

SEQ ID NO: 46029 - protein, 29 aa, Artificial Sequence
  Cyclic GFR-binding peptide
PTKLSPINILYFDKGVVTYYGKIPGMAVS

SEQ ID NO: 46030 - protein, 38 aa, Artificial Sequence; identical to SEQ ID NO: 43052
  Cyclic GFR-binding peptide
  MOD_RES (4)..(36)..(38): Xaa is C or S

SEQ ID NO: 46031 - protein, 32 aa, Artificial Sequence; identical to SEQ ID NO: 43053
  Cyclic GFR-binding peptide
  MOD_RES (30)..(32): Xaa is C or S

SEQ ID NO: 46032 - protein, 33 aa, Artificial Sequence; identical to SEQ ID NO: 43054
  Cyclic GFR-binding peptide
  MOD_RES (1)..(2): Xaa is C or S

SEQ ID NO: 46033 - protein, 38 aa, Artificial Sequence; identical to SEQ ID NO: 43055
  Cyclic GFR-binding peptide
  MOD_RES (6)..(7): Xaa is C or S

SEQ ID NO: 46034 - protein, 33 aa, Artificial Sequence; identical to SEQ ID NO: 43056
  Cyclic GFR-binding peptide
  MOD_RES (5)..(6): Xaa is C or S

SEQ ID NO: 46035 - protein, 31 aa, Artificial Sequence; identical to SEQ ID NO: 43057
  Cyclic GFR-binding peptide
  MOD_RES (30)..(30): Xaa is C or S

SEQ ID NO: 46036 - protein, 20 aa, Artificial Sequence
  Cyclic GFR-binding peptide
SPINVLYFDSSNNVIYGKIP

SEQ ID NO: 46037 - protein, 39 aa, Artificial Sequence; identical to SEQ ID NO: 43059
  Cyclic GFR-binding peptide
  MOD_RES (4)..(5)..(37)..(39): Xaa is C or S

SEQ ID NO: 46038 - protein, 31 aa, Artificial Sequence; identical to SEQ ID NO: 43060
  Cyclic GFR-binding peptide
  MOD_RES (1)..(1): Xaa is C or S

SEQ ID NO: 46039 - protein, 38 aa, Artificial Sequence; identical to SEQ ID NO: 43061
  Cyclic GFR-binding peptide
  MOD_RES (5)..(6)..(38): Xaa is C or S

SEQ ID NO: 46040 - protein, 38 aa, Artificial Sequence; identical to SEQ ID NO: 43062
  Cyclic GFR-binding peptide
  MOD_RES (1)..(2)..(35)..(37): Xaa is C or S

SEQ ID NO: 46041 - protein, 37 aa, Artificial Sequence; identical to SEQ ID NO: 43063
  Cyclic GFR-binding peptide
  MOD_RES (3)..(4)..(36): Xaa is C or S

SEQ ID NO: 46042 - protein, 32 aa, Artificial Sequence; identical to SEQ ID NO: 43064
  Cyclic GFR-binding peptide
  MOD_RES (3)..(4): Xaa is C or S

SEQ ID NO: 46043 - protein, 30 aa, Artificial Sequence; identical to SEQ ID NO: 43065
  Cyclic GFR-binding peptide
  MOD_RES (30)..(30): Xaa is C or S

SEQ ID NO: 46044 - protein, 30 aa, Artificial Sequence; identical to SEQ ID NO: 43066
  Cyclic GFR-binding peptide

SEQ ID NO: 46045 - protein, 31 aa, Artificial Sequence; identical to SEQ ID NO: 43067
  Cyclic GFR-binding peptide
  MOD_RES (29)..(31): Xaa is C or S

SEQ ID NO: 46046 - protein, 33 aa, Artificial Sequence; identical to SEQ ID NO: 43068
  Cyclic GFR-binding peptide
  MOD_RES (30)..(32): Xaa is C or S

SEQ ID NO: 46047 - protein, 34 aa, Artificial Sequence; identical to SEQ ID NO: 43069
  Cyclic GFR-binding peptide
  MOD_RES (31)..(33): Xaa is C or S

SEQ ID NO: 46048 - protein, 28 aa, Artificial Sequence
  Cyclic GFR-binding peptide
APTKLSPINVLYFDSSNNVIYGKIPNMV

SEQ ID NO: 46049 - protein, 29 aa, Artificial Sequence
  Cyclic GFR-binding peptide
  MOD_RES (28)..(28): Xaa is C or S
LSPINMLYFDENEKVVYGKIPDMVVEGXG

SEQ ID NO: 46050 - protein, 31 aa, Artificial Sequence; identical to SEQ ID NO: 43072
  Cyclic GFR-binding peptide
  MOD_RES (1)..(1): Xaa is C or S

SEQ ID NO: 46051 - protein, 39 aa, Artificial Sequence; identical to SEQ ID NO: 43073
  Cyclic GFR-binding peptide
  MOD_RES (6)..(7)..(38): Xaa is C or S

SEQ ID NO: 46052 - protein, 31 aa, Artificial Sequence; identical to SEQ ID NO: 43074
  Cyclic GFR-binding peptide
  MOD_RES (1)..(1): Xaa is C or S

SEQ ID NO: 46053 - protein, 35 aa, Artificial Sequence; identical to SEQ ID NO: 43075
  Cyclic GFR-binding peptide
  MOD_RES (1)..(33)..(35): Xaa is C or S

SEQ ID NO: 46054 - protein, 29 aa, Artificial Sequence
  Cyclic GFR-binding peptide
  MOD_RES (1)..(2): Xaa is C or S
XXVPARLSPINILYFDAANNVVYGKIPDM

SEQ ID NO: 46055 - protein, 34 aa, Artificial Sequence; identical to SEQ ID NO: 43077
  Cyclic GFR-binding peptide
  MOD_RES (6)..(7): Xaa is C or S

SEQ ID NO: 46056 - protein, 33 aa, Artificial Sequence; identical to SEQ ID NO: 43078
  Cyclic GFR-binding peptide
  MOD_RES (30)..(32): Xaa is C or S

SEQ ID NO: 46057 - protein, 30 aa, Artificial Sequence; identical to SEQ ID NO: 43079
  Cyclic GFR-binding peptide
  MOD_RES (3)..(4): Xaa is C or S

SEQ ID NO: 46058 - protein, 32 aa, Artificial Sequence; identical to SEQ ID NO: 43080
  Cyclic GFR-binding peptide
  MOD_RES (2)..(3): Xaa is C or S

SEQ ID NO: 46059 - protein, 32 aa, Artificial Sequence; identical to SEQ ID NO: 43081
  Cyclic GFR-binding peptide
  MOD_RES (31)..(31): Xaa is C or S

SEQ ID NO: 46060 - protein, 34 aa, Artificial Sequence; identical to SEQ ID NO: 43082
  Cyclic GFR-binding peptide
  MOD_RES (3)..(4): Xaa is C or S

SEQ ID NO: 46061 - protein, 30 aa, Artificial Sequence; identical to SEQ ID NO: 43083
  Cyclic GFR-binding peptide
  MOD_RES (30)..(30): Xaa is C or S

SEQ ID NO: 46062 - protein, 30 aa, Artificial Sequence; identical to SEQ ID NO: 43084
  Cyclic GFR-binding peptide
  MOD_RES (4)..(5): Xaa is C or S

SEQ ID NO: 46063 - protein, 24 aa, Artificial Sequence
  Cyclic GFR-binding peptide
TRLSPINILYFDSANNVVYGKIPD

SEQ ID NO: 46064 - protein, 32 aa, Artificial Sequence; identical to SEQ ID NO: 43086
  Cyclic GFR-binding peptide
  MOD_RES (5)..(6): Xaa is C or S

SEQ ID NO: 46065 - protein, 34 aa, Artificial Sequence; identical to SEQ ID NO: 43087
  Cyclic GFR-binding peptide
  MOD_RES (4)..(4): Xaa is C or S

SEQ ID NO: 46066 - protein, 36 aa, Artificial Sequence; identical to SEQ ID NO: 43088
  Cyclic GFR-binding peptide
  MOD_RES (3)..(4)..(36): Xaa is C or S

SEQ ID NO: 46067 - protein, 34 aa, Artificial Sequence; identical to SEQ ID NO: 43089
  Cyclic GFR-binding peptide
  MOD_RES (31)..(33): Xaa is C or S

SEQ ID NO: 46068 - protein, 32 aa, Artificial Sequence; identical to SEQ ID NO: 43090
  Cyclic GFR-binding peptide
  MOD_RES (4)..(5): Xaa is C or S

SEQ ID NO: 46069 - protein, 32 aa, Artificial Sequence; identical to SEQ ID NO: 43091
  Cyclic GFR-binding peptide
  MOD_RES (29)..(31): Xaa is C or S

SEQ ID NO: 46070 - protein, 34 aa, Artificial Sequence; identical to SEQ ID NO: 43092
  Cyclic GFR-binding peptide
  MOD_RES (4)..(5): Xaa is C or S

SEQ ID NO: 46071 - protein, 29 aa, Artificial Sequence
  Cyclic GFR-binding peptide
  MOD_RES (29)..(29): Xaa is C or S
KLSPINVLYFDDSSNVIYGKIPNMVVRSX

SEQ ID NO: 46072 - protein, 31 aa, Artificial Sequence; identical to SEQ ID NO: 43094
  Cyclic GFR-binding peptide
  MOD_RES (28)..(30): Xaa is C or S

SEQ ID NO: 46073 - protein, 28 aa, Artificial Sequence
  Cyclic GFR-binding peptide
  MOD_RES (2)..(3): Xaa is C or S
AXXVPTELSPINMLYFDENEKVVYGKIP

SEQ ID NO: 46074 - protein, 24 aa, Artificial Sequence
  Cyclic GFR-binding peptide
SPINVLYFDSSNNVIYGKIPNMVV

SEQ ID NO: 46075 - protein, 36 aa, Artificial Sequence; identical to SEQ ID NO: 43097
  Cyclic GFR-binding peptide
  MOD_RES (4)..(5): Xaa is C or S

SEQ ID NO: 46076 - protein, 26 aa, Artificial Sequence
  Cyclic GFR-binding peptide
SPINMLYFDEYDKVVYGKIPEMVVEG

SEQ ID NO: 46077 - protein, 36 aa, Artificial Sequence; identical to SEQ ID NO: 43099
  Cyclic GFR-binding peptide
  MOD_RES (3)..(4)..(36): Xaa is C or S

SEQ ID NO: 46078 - protein, 29 aa, Artificial Sequence
  Cyclic GFR-binding peptide
  MOD_RES (2)..(3): Xaa is C or S
PXXAPTQLSPINVLYFDDSSNVIYGKIPN

SEQ ID NO: 46079 - protein, 28 aa, Artificial Sequence
  Cyclic GFR-binding peptide
VPTELSPINMLYFDENEKVVYGKIPDMV

SEQ ID NO: 46080 - protein, 30 aa, Artificial Sequence; identical to SEQ ID NO: 43102
  Cyclic GFR-binding peptide

SEQ ID NO: 46081 - protein, 29 aa, Artificial Sequence
  Cyclic GFR-binding peptide
  MOD_RES (29)..(29): Xaa is C or S
RLSPINILYFDAANNVVYGKIPDMVVEAX

SEQ ID NO: 46082 - protein, 37 aa, Artificial Sequence; identical to SEQ ID NO: 43104
  Cyclic GFR-binding peptide
  MOD_RES (7)..(7): Xaa is C or S

SEQ ID NO: 46083 - protein, 27 aa, Artificial Sequence
  Cyclic GFR-binding peptide
PTRLSPINILYFDSANNVVYGKIPDMV

SEQ ID NO: 46084 - protein, 38 aa, Artificial Sequence; identical to SEQ ID NO: 43106
  Cyclic GFR-binding peptide
  MOD_RES (5)..(6)..(38): Xaa is C or S

SEQ ID NO: 46085 - protein, 30 aa, Artificial Sequence; identical to SEQ ID NO: 43107
  Cyclic GFR-binding peptide
  MOD_RES (1)..(2): Xaa is C or S

SEQ ID NO: 46086 - protein, 23 aa, Artificial Sequence
  Cyclic GFR-binding peptide
QLSPINVLYFDDSSNVIYGKIPN

SEQ ID NO: 46087 - protein, 29 aa, Artificial Sequence
  Cyclic GFR-binding peptide
APTQLSPINVLYFDDSSNVIYGKIPNMVV

SEQ ID NO: 46088 - protein, 38 aa, Artificial Sequence; identical to SEQ ID NO: 43110
  Cyclic GFR-binding peptide
  MOD_RES (2)..(3)..(35)..(37): Xaa is C or S

SEQ ID NO: 46089 - protein, 41 aa, Artificial Sequence; identical to SEQ ID NO: 43111
  Cyclic GFR-binding peptide
  MOD_RES (5)..(6)..(38)..(40): Xaa is C or S

SEQ ID NO: 46090 - protein, 25 aa, Artificial Sequence
  Cyclic GFR-binding peptide
VPTRLSPINILYFDSANNVVYGKIP

SEQ ID NO: 46091 - protein, 35 aa, Artificial Sequence; identical to SEQ ID NO: 43113
  Cyclic GFR-binding peptide
  MOD_RES (6)..(7): Xaa is C or S

SEQ ID NO: 46092 - protein, 35 aa, Artificial Sequence; identical to SEQ ID NO: 43114
  Cyclic GFR-binding peptide
  MOD_RES (1)..(2)..(34): Xaa is C or S

SEQ ID NO: 46093 - protein, 31 aa, Artificial Sequence; identical to SEQ ID NO: 43115
  Cyclic GFR-binding peptide
  MOD_RES (31)..(31): Xaa is C or S

SEQ ID NO: 46094 - protein, 21 aa, Artificial Sequence
  Cyclic GFR-binding peptide
LSPINILYFDKGVVTYYGKIP

SEQ ID NO: 46095 - protein, 32 aa, Artificial Sequence; identical to SEQ ID NO: 43117
  Cyclic GFR-binding peptide
  MOD_RES (5)..(5): Xaa is C or S

SEQ ID NO: 46096 - protein, 33 aa, Artificial Sequence; identical to SEQ ID NO: 43118
  Cyclic GFR-binding peptide
  MOD_RES (33)..(33): Xaa is C or S

SEQ ID NO: 46097 - protein, 31 aa, Artificial Sequence; identical to SEQ ID NO: 43119
  Cyclic GFR-binding peptide
  MOD_RES (2)..(2): Xaa is C or S

SEQ ID NO: 46098 - protein, 29 aa, Artificial Sequence
  Cyclic GFR-binding peptide
  MOD_RES (3)..(4): Xaa is C or S
KAXXAPTKLSPINVLYFDSSNNVIYGKIP

SEQ ID NO: 46099 - protein, 27 aa, Artificial Sequence
  Cyclic GFR-binding peptide
PTELSPINMLYFDENEKVVYGKIPDMV

SEQ ID NO: 46100 - protein, 29 aa, Artificial Sequence
  Cyclic GFR-binding peptide
VPTELSPINMLYFDENEKVVYGKIPDMVV

SEQ ID NO: 46101 - protein, 36 aa, Artificial Sequence; identical to SEQ ID NO: 43123
  Cyclic GFR-binding peptide
  MOD_RES (6)..(7): Xaa is C or S

SEQ ID NO: 46102 - protein, 31 aa, Artificial Sequence; identical to SEQ ID NO: 43124
  Cyclic GFR-binding peptide
  MOD_RES (4)..(5): Xaa is C or S

SEQ ID NO: 46103 - protein, 29 aa, Artificial Sequence
  Cyclic GFR-binding peptide
TKLSPINVLYFDSSNNVIYGKIPNMVVKA

SEQ ID NO: 46104 - protein, 29 aa, Artificial Sequence
  Cyclic GFR-binding peptide
  MOD_RES (1)..(1): Xaa is C or S
XVPARLSPINILYFDAANNVVYGKIPDMV

SEQ ID NO: 46105 - protein, 31 aa, Artificial Sequence; identical to SEQ ID NO: 43127
  Cyclic GFR-binding peptide
  MOD_RES (3)..(4): Xaa is C or S

SEQ ID NO: 46106 - protein, 34 aa, Artificial Sequence; identical to SEQ ID NO: 43128
  Cyclic GFR-binding peptide
  MOD_RES (1)..(34): Xaa is C or S

SEQ ID NO: 46107 - protein, 25 aa, Artificial Sequence
  Cyclic GFR-binding peptide
LSPINMLYFDENEKVVYGKIPDMVV

SEQ ID NO: 46108 - protein, 24 aa, Artificial Sequence
  Cyclic GFR-binding peptide
KLSPINVLYFDDMGVPTYGKIPEG

SEQ ID NO: 46109 - protein, 34 aa, Artificial Sequence; identical to SEQ ID NO: 43131
  Cyclic GFR-binding peptide
  MOD_RES (5)..(6): Xaa is C or S

SEQ ID NO: 46110 - protein, 39 aa, Artificial Sequence; identical to SEQ ID NO: 43132
  Cyclic GFR-binding peptide
  MOD_RES (6)..(7)..(39): Xaa is C or S

SEQ ID NO: 46111 - protein, 22 aa, Artificial Sequence
  Cyclic GFR-binding peptide
ELSPINMLYFDENEKVVYGKIP

SEQ ID NO: 46112 - protein, 32 aa, Artificial Sequence; identical to SEQ ID NO: 43134
  Cyclic GFR-binding peptide
  MOD_RES (6)..(7): Xaa is C or S

SEQ ID NO: 46113 - protein, 38 aa, Artificial Sequence; identical to SEQ ID NO: 43135
  Cyclic GFR-binding peptide
  MOD_RES (6)..(7): Xaa is C or S

SEQ ID NO: 46114 - protein, 33 aa, Artificial Sequence; identical to SEQ ID NO: 43136
  Cyclic GFR-binding peptide
  MOD_RES (32)..(32): Xaa is C or S

SEQ ID NO: 46115 - protein, 34 aa, Artificial Sequence; identical to SEQ ID NO: 43137
  Cyclic GFR-binding peptide
  MOD_RES (1)..(33): Xaa is C or S

SEQ ID NO: 46116 - protein, 30 aa, Artificial Sequence; identical to SEQ ID NO: 43138
  Cyclic GFR-binding peptide
  MOD_RES (29)..(29): Xaa is C or S

SEQ ID NO: 46117 - protein, 23 aa, Artificial Sequence
  Cyclic GFR-binding peptide
ARLSPINILYFDAANNVVYGKIP

SEQ ID NO: 46118 - protein, 27 aa, Artificial Sequence
  Cyclic GFR-binding peptide
  MOD_RES (27)..(27): Xaa is C or S
SPINILYFDAANNVVYGKIPDMVVEAX

SEQ ID NO: 46119 - protein, 29 aa, Artificial Sequence
  Cyclic GFR-binding peptide
APTKLSPINVLYFDDSSNVIYGKIPNMVV

SEQ ID NO: 46120 - protein, 29 aa, Artificial Sequence
  Cyclic GFR-binding peptide
  MOD_RES (26)..(28): Xaa is C or S
SPINMLYFDNGRVLLYGKIPMIVEEXGXL

SEQ ID NO: 46121 - protein, 30 aa, Artificial Sequence; identical to SEQ ID NO: 43143
  Cyclic GFR-binding peptide
  MOD_RES (27)..(29): Xaa is C or S

SEQ ID NO: 46122 - protein, 31 aa, Artificial Sequence; identical to SEQ ID NO: 43144
  Cyclic GFR-binding peptide
  MOD_RES (4)..(5): Xaa is C or S

SEQ ID NO: 46123 - protein, 33 aa, Artificial Sequence; identical to SEQ ID NO: 43145
  Cyclic GFR-binding peptide
  MOD_RES (6)..(7): Xaa is C or S

SEQ ID NO: 46124 - protein, 33 aa, Artificial Sequence; identical to SEQ ID NO: 43146
  Cyclic GFR-binding peptide
  MOD_RES (5)..(6): Xaa is C or S

SEQ ID NO: 46125 - protein, 37 aa, Artificial Sequence; identical to SEQ ID NO: 43147
  Cyclic GFR-binding peptide
  MOD_RES (4)..(5)..(37): Xaa is C or S

SEQ ID NO: 46126 - protein, 26 aa, Artificial Sequence
  Cyclic GFR-binding peptide
  MOD_RES (1)..(1): Xaa is C or S
XVPARLSPINILYFDAANNVVYGKIP

SEQ ID NO: 46127 - protein, 31 aa, Artificial Sequence; identical to SEQ ID NO: 43149
  Cyclic GFR-binding peptide
  MOD_RES (1)..(2): Xaa is C or S

SEQ ID NO: 46128 - protein, 23 aa, Artificial Sequence
  Cyclic GFR-binding peptide
RLSPINILYFDSANNVVYGKIPD

SEQ ID NO: 46129 - protein, 40 aa, Artificial Sequence; identical to SEQ ID NO: 43151
  Cyclic GFR-binding peptide
  MOD_RES (6)..(7)..(39): Xaa is C or S

SEQ ID NO: 46130 - protein, 33 aa, Artificial Sequence; identical to SEQ ID NO: 43152
  Cyclic GFR-binding peptide
  MOD_RES (31)..(33): Xaa is C or S

SEQ ID NO: 46131 - protein, 34 aa, Artificial Sequence; identical to SEQ ID NO: 43153
  Cyclic GFR-binding peptide
  MOD_RES (2)..(3): Xaa is C or S

SEQ ID NO: 46132 - protein, 37 aa, Artificial Sequence; identical to SEQ ID NO: 43154
  Cyclic GFR-binding peptide
  MOD_RES (6)..(6): Xaa is C or S

SEQ ID NO: 46133 - protein, 34 aa, Artificial Sequence; identical to SEQ ID NO: 43155
  Cyclic GFR-binding peptide
  MOD_RES (32)..(34): Xaa is C or S

SEQ ID NO: 46134 - protein, 32 aa, Artificial Sequence; identical to SEQ ID NO: 43156
  Cyclic GFR-binding peptide
  MOD_RES (3)..(4): Xaa is C or S

SEQ ID NO: 46135 - protein, 31 aa, Artificial Sequence; identical to SEQ ID NO: 43157
  Cyclic GFR-binding peptide
  MOD_RES (5)..(6): Xaa is C or S

SEQ ID NO: 46136 - protein, 26 aa, Artificial Sequence
  Cyclic GFR-binding peptide
PTKLSPINVLYFDSSNNVIYGKIPNM

SEQ ID NO: 46137 - protein, 30 aa, Artificial Sequence; identical to SEQ ID NO: 43159
  Cyclic GFR-binding peptide
  MOD_RES (3)..(3): Xaa is C or S

SEQ ID NO: 46138 - protein, 35 aa, Artificial Sequence; identical to SEQ ID NO: 43160
  Cyclic GFR-binding peptide
  MOD_RES (6)..(7): Xaa is C or S

SEQ ID NO: 46139 - protein, 25 aa, Artificial Sequence
  Cyclic GFR-binding peptide
VPTELSPINMLYFDENEKVVYGKIP

SEQ ID NO: 46140 - protein, 30 aa, Artificial Sequence; identical to SEQ ID NO: 43162
  Cyclic GFR-binding peptide
  MOD_RES (1)..(1): Xaa is C or S

SEQ ID NO: 46141 - protein, 32 aa, Artificial Sequence; identical to SEQ ID NO: 43163
  Cyclic GFR-binding peptide
  MOD_RES (3)..(4): Xaa is C or S

SEQ ID NO: 46142 - protein, 30 aa, Artificial Sequence; identical to SEQ ID NO: 43164
  Cyclic GFR-binding peptide
  MOD_RES (29)..(29): Xaa is C or S

SEQ ID NO: 46143 - protein, 38 aa, Artificial Sequence; identical to SEQ ID NO: 43165
  Cyclic GFR-binding peptide
  MOD_RES (4)..(5)..(37): Xaa is C or S

SEQ ID NO: 46144 - protein, 29 aa, Artificial Sequence
  Cyclic GFR-binding peptide
  MOD_RES (27)..(29): Xaa is C or S
SPINMLYFDEYDKVVYGKIPEMVVEGXGX

SEQ ID NO: 46145 - protein, 30 aa, Artificial Sequence; identical to SEQ ID NO: 43167
  Cyclic GFR-binding peptide
  MOD_RES (30)..(30): Xaa is C or S

SEQ ID NO: 46146 - protein, 31 aa, Artificial Sequence; identical to SEQ ID NO: 43168
  Cyclic GFR-binding peptide

SEQ ID NO: 46147 - protein, 33 aa, Artificial Sequence; identical to SEQ ID NO: 43169
  Cyclic GFR-binding peptide
  MOD_RES (4)..(5): Xaa is C or S

SEQ ID NO: 46148 - protein, 29 aa, Artificial Sequence
  Cyclic GFR-binding peptide
  MOD_RES (28)..(28): Xaa is C or S
LSPINILYFDAANNVVYGKIPDMVVEAXG

SEQ ID NO: 46149 - protein, 39 aa, Artificial Sequence; identical to SEQ ID NO: 43171
  Cyclic GFR-binding peptide
  MOD_RES (6)..(7)..(39): Xaa is C or S

SEQ ID NO: 46150 - protein, 36 aa, Artificial Sequence; identical to SEQ ID NO: 43172
  Cyclic GFR-binding peptide
  MOD_RES (6)..(7): Xaa is C or S

SEQ ID NO: 46151 - protein, 39 aa, Artificial Sequence; identical to SEQ ID NO: 43173
  Cyclic GFR-binding peptide
  MOD_RES (3)..(4)..(36)..(38): Xaa is C or S

SEQ ID NO: 46152 - protein, 31 aa, Artificial Sequence; identical to SEQ ID NO: 43174
  Cyclic GFR-binding peptide

SEQ ID NO: 46153 - protein, 27 aa, Artificial Sequence
  Cyclic GFR-binding peptide
  MOD_RES (1)..(1): Xaa is C or S
XVPARLSPINILYFDAANNVVYGKIPD

SEQ ID NO: 46154 - protein, 26 aa, Artificial Sequence
  Cyclic GFR-binding peptide
RLSPINILYFDSANNVVYGKIPDMVV

SEQ ID NO: 46155 - protein, 25 aa, Artificial Sequence
  Cyclic GFR-binding peptide
PTRLSPINILYFDSANNVVYGKIPD

SEQ ID NO: 46156 - protein, 34 aa, Artificial Sequence; identical to SEQ ID NO: 43178
  Cyclic GFR-binding peptide
  MOD_RES (6)..(7): Xaa is C or S

SEQ ID NO: 46157 - protein, 33 aa, Artificial Sequence; identical to SEQ ID NO: 43179
  Cyclic GFR-binding peptide
  MOD_RES (6)..(7): Xaa is C or S

SEQ ID NO: 46158 - protein, 26 aa, Artificial Sequence
  Cyclic GFR-binding peptide
SPINMLYFDENEKVVYGKIPDMVVEG

SEQ ID NO: 46159 - protein, 32 aa, Artificial Sequence; identical to SEQ ID NO: 43181
  Cyclic GFR-binding peptide
  MOD_RES (3)..(4): Xaa is C or S

SEQ ID NO: 46160 - protein, 24 aa, Artificial Sequence
  Cyclic GFR-binding peptide
PTELSPINMLYFDENEKVVYGKIP

SEQ ID NO: 46161 - protein, 30 aa, Artificial Sequence; identical to SEQ ID NO: 43183
  Cyclic GFR-binding peptide

SEQ ID NO: 46162 - protein, 23 aa, Artificial Sequence
  Cyclic GFR-binding peptide
KLSPINILYFDKGVVTYYGKIPG

SEQ ID NO: 46163 - protein, 31 aa, Artificial Sequence; identical to SEQ ID NO: 43185
  Cyclic GFR-binding peptide
  MOD_RES (31)..(31): Xaa is C or S

SEQ ID NO: 46164 - protein, 31 aa, Artificial Sequence; identical to SEQ ID NO: 43186
  Cyclic GFR-binding peptide
  MOD_RES (28)..(30): Xaa is C or S

SEQ ID NO: 46165 - protein, 32 aa, Artificial Sequence; identical to SEQ ID NO: 43187
  Cyclic GFR-binding peptide
  MOD_RES (1)..(2): Xaa is C or S

SEQ ID NO: 46166 - protein, 36 aa, Artificial Sequence; identical to SEQ ID NO: 43188
  Cyclic GFR-binding peptide
  MOD_RES (5)..(6): Xaa is C or S

SEQ ID NO: 46167 - protein, 36 aa, Artificial Sequence; identical to SEQ ID NO: 43189
  Cyclic GFR-binding peptide
  MOD_RES (4)..(5)..(36): Xaa is C or S

SEQ ID NO: 46168 - protein, 35 aa, Artificial Sequence; identical to SEQ ID NO: 43190
  Cyclic GFR-binding peptide
  MOD_RES (2)..(3)..(35): Xaa is C or S

SEQ ID NO: 46169 - protein, 29 aa, Artificial Sequence
  Cyclic GFR-binding peptide
  MOD_RES (1)..(2): Xaa is C or S
XXAPTKLSPINVLYFDSSNNVIYGKIPNM

SEQ ID NO: 46170 - protein, 31 aa, Artificial Sequence; identical to SEQ ID NO: 43192
  Cyclic GFR-binding peptide
  MOD_RES (1)..(1): Xaa is C or S

SEQ ID NO: 46171 - protein, 30 aa, Artificial Sequence; identical to SEQ ID NO: 43193
  Cyclic GFR-binding peptide
  MOD_RES (2)..(3): Xaa is C or S

SEQ ID NO: 46172 - protein, 24 aa, Artificial Sequence
  Cyclic GFR-binding peptide
SPINVLYFDDMGVPTYGKIPEGMS

SEQ ID NO: 46173 - protein, 33 aa, Artificial Sequence; identical to SEQ ID NO: 43195
  Cyclic GFR-binding peptide
  MOD_RES (1)..(33): Xaa is C or S

SEQ ID NO: 46174 - protein, 35 aa, Artificial Sequence; identical to SEQ ID NO: 43196
  Cyclic GFR-binding peptide
  MOD_RES (6)..(6): Xaa is C or S

SEQ ID NO: 46175 - protein, 29 aa, Artificial Sequence
  Cyclic GFR-binding peptide
  MOD_RES (1)..(1): Xaa is C or S
XAPTKLSPINVLYFDSSNNVIYGKIPNMV

SEQ ID NO: 46176 - protein, 31 aa, Artificial Sequence; identical to SEQ ID NO: 43198
  Cyclic GFR-binding peptide
  MOD_RES (29)..(31): Xaa is C or S

SEQ ID NO: 46177 - protein, 40 aa, Artificial Sequence; identical to SEQ ID NO: 43199
  Cyclic GFR-binding peptide
  MOD_RES (4)..(5)..(37)..(39): Xaa is C or S

SEQ ID NO: 46178 - protein, 34 aa, Artificial Sequence; identical to SEQ ID NO: 43200
  Cyclic GFR-binding peptide
  MOD_RES (3)..(4): Xaa is C or S

SEQ ID NO: 46179 - protein, 24 aa, Artificial Sequence
  Cyclic GFR-binding peptide
SPINMLYFDNGRVLLYGKIPMIVE

SEQ ID NO: 46180 - protein, 32 aa, Artificial Sequence; identical to SEQ ID NO: 43202
  Cyclic GFR-binding peptide
  MOD_RES (31)..(31): Xaa is C or S

SEQ ID NO: 46181 - protein, 34 aa, Artificial Sequence; identical to SEQ ID NO: 43203
  Cyclic GFR-binding peptide
  MOD_RES (6)..(7): Xaa is C or S

SEQ ID NO: 46182 - protein, 32 aa, Artificial Sequence; identical to SEQ ID NO: 43204
  Cyclic GFR-binding peptide
  MOD_RES (30)..(32): Xaa is C or S

SEQ ID NO: 46183 - protein, 26 aa, Artificial Sequence
  Cyclic GFR-binding peptide
KTSPINMLYFDNGRVLLYGKIPMIVE

SEQ ID NO: 46184 - protein, 36 aa, Artificial Sequence; identical to SEQ ID NO: 43206
  Cyclic GFR-binding peptide
  MOD_RES (3)..(4)..(36): Xaa is C or S

SEQ ID NO: 46185 - protein, 22 aa, Artificial Sequence
  Cyclic GFR-binding peptide
SPINILYFDAANNVVYGKIPDM

SEQ ID NO: 46186 - protein, 38 aa, Artificial Sequence; identical to SEQ ID NO: 43208
  Cyclic GFR-binding peptide
  MOD_RES (3)..(4)..(36)..(38): Xaa is C or S

SEQ ID NO: 46187 - protein, 30 aa, Artificial Sequence; identical to SEQ ID NO: 43209
  Cyclic GFR-binding peptide
  MOD_RES (29)..(29): Xaa is C or S

SEQ ID NO: 46188 - protein, 33 aa, Artificial Sequence; identical to SEQ ID NO: 43210
  Cyclic GFR-binding peptide
  MOD_RES (30)..(32): Xaa is C or S

SEQ ID NO: 46189 - protein, 37 aa, Artificial Sequence; identical to SEQ ID NO: 43211
  Cyclic GFR-binding peptide
  MOD_RES (6)..(7): Xaa is C or S

SEQ ID NO: 46190 - protein, 28 aa, Artificial Sequence
  Cyclic GFR-binding peptide
  MOD_RES (27)..(27): Xaa is C or S
SPINMLYFDENEKVVYGKIPDMVVEGXG

SEQ ID NO: 46191 - protein, 22 aa, Artificial Sequence
  Cyclic GFR-binding peptide
SPINVLYFDSSNNVIYGKIPNM

SEQ ID NO: 46192 - protein, 25 aa, Artificial Sequence
  Cyclic GFR-binding peptide
VPTELSPINMLYFDEYDKVVYGKIP

SEQ ID NO: 46193 - protein, 38 aa, Artificial Sequence; identical to SEQ ID NO: 43215
  Cyclic GFR-binding peptide
  MOD_RES (2)..(3)..(35)..(37): Xaa is C or S

SEQ ID NO: 46194 - protein, 23 aa, Artificial Sequence
  Cyclic GFR-binding peptide
LSPINVLYFDDSSNVIYGKIPNM

SEQ ID NO: 46195 - protein, 35 aa, Artificial Sequence; identical to SEQ ID NO: 43217
  Cyclic GFR-binding peptide
  MOD_RES (5)..(6): Xaa is C or S

SEQ ID NO: 46196 - protein, 33 aa, Artificial Sequence; identical to SEQ ID NO: 43218
  Cyclic GFR-binding peptide
  MOD_RES (31)..(33): Xaa is C or S

SEQ ID NO: 46197 - protein, 27 aa, Artificial Sequence
  Cyclic GFR-binding peptide
  MOD_RES (27)..(27): Xaa is C or S
SPINVLYFDDSSNVIYGKIPNMVVRAX

SEQ ID NO: 46198 - protein, 25 aa, Artificial Sequence
  Cyclic GFR-binding peptide
SPINILYFDKGVVTYYGKIPGMAVS

SEQ ID NO: 46199 - protein, 31 aa, Artificial Sequence; identical to SEQ ID NO: 43221
  Cyclic GFR-binding peptide
  MOD_RES (4)..(5): Xaa is C or S

SEQ ID NO: 46200 - protein, 39 aa, Artificial Sequence; identical to SEQ ID NO: 43222
  Cyclic GFR-binding peptide
  MOD_RES (4)..(36)..(38): Xaa is C or S

SEQ ID NO: 46201 - protein, 28 aa, Artificial Sequence
  Cyclic GFR-binding peptide
  MOD_RES (1)..(2): Xaa is C or S
XXVPTRLSPINILYFDSANNVVYGKIPD

SEQ ID NO: 46202 - protein, 29 aa, Artificial Sequence
  Cyclic GFR-binding peptide
TKLSPINVLYFDDSSNVIYGKIPNMVVRS

SEQ ID NO: 46203 - protein, 32 aa, Artificial Sequence; identical to SEQ ID NO: 43225
  Cyclic GFR-binding peptide
  MOD_RES (5)..(6): Xaa is C or S

SEQ ID NO: 46204 - protein, 27 aa, Artificial Sequence
  Cyclic GFR-binding peptide
  MOD_RES (1)..(2): Xaa is C or S
XXVPARLSPINILYFDAANNVVYGKIP

SEQ ID NO: 46205 - protein, 39 aa, Artificial Sequence; identical to SEQ ID NO: 43227
  Cyclic GFR-binding peptide
  MOD_RES (5)..(6)..(38): Xaa is C or S

SEQ ID NO: 46206 - protein, 39 aa, Artificial Sequence; identical to SEQ ID NO: 43228
  Cyclic GFR-binding peptide
  MOD_RES (6)..(7)..(39): Xaa is C or S

SEQ ID NO: 46207 - protein, 30 aa, Artificial Sequence; identical to SEQ ID NO: 43229
  Cyclic GFR-binding peptide
  MOD_RES (5)..(5): Xaa is C or S

SEQ ID NO: 46208 - protein, 24 aa, Artificial Sequence
  Cyclic GFR-binding peptide
LSPINILYFDKGVVTYYGKIPGMA

SEQ ID NO: 46209 - protein, 40 aa, Artificial Sequence; identical to SEQ ID NO: 43231
  Cyclic GFR-binding peptide
  MOD_RES (3)..(4)..(37)..(39): Xaa is C or S

SEQ ID NO: 46210 - protein, 30 aa, Artificial Sequence; identical to SEQ ID NO: 43232
  Cyclic GFR-binding peptide
  MOD_RES (28)..(30): Xaa is C or S

SEQ ID NO: 46211 - protein, 29 aa, Artificial Sequence
  Cyclic GFR-binding peptide
VPTRLSPINILYFDSANNVVYGKIPDMVV

SEQ ID NO: 46212 - protein, 37 aa, Artificial Sequence; identical to SEQ ID NO: 43234
  Cyclic GFR-binding peptide
  MOD_RES (5)..(6): Xaa is C or S

SEQ ID NO: 46213 - protein, 37 aa, Artificial Sequence; identical to SEQ ID NO: 43235
  Cyclic GFR-binding peptide
  MOD_RES (6)..(7): Xaa is C or S

SEQ ID NO: 46214 - protein, 31 aa, Artificial Sequence; identical to SEQ ID NO: 43236
  Cyclic GFR-binding peptide
  MOD_RES (29)..(31): Xaa is C or S

SEQ ID NO: 46215 - protein, 31 aa, Artificial Sequence; identical to SEQ ID NO: 43237
  Cyclic GFR-binding peptide
  MOD_RES (5)..(6): Xaa is C or S

SEQ ID NO: 46216 - protein, 26 aa, Artificial Sequence
  Cyclic GFR-binding peptide
SPINVLYFDDMGVPTYGKIPEGMSVA

SEQ ID NO: 46217 - protein, 34 aa, Artificial Sequence; identical to SEQ ID NO: 43239
  Cyclic GFR-binding peptide
  MOD_RES (3)..(4): Xaa is C or S

SEQ ID NO: 46218 - protein, 33 aa, Artificial Sequence; identical to SEQ ID NO: 43240
  Cyclic GFR-binding peptide
  MOD_RES (4)..(5): Xaa is C or S

SEQ ID NO: 46219 - protein, 37 aa, Artificial Sequence; identical to SEQ ID NO: 43241
  Cyclic GFR-binding peptide
  MOD_RES (5)..(6): Xaa is C or S

SEQ ID NO: 46220 - protein, 34 aa, Artificial Sequence; identical to SEQ ID NO: 43242
  Cyclic GFR-binding peptide
  MOD_RES (5)..(6): Xaa is C or S

SEQ ID NO: 46221 - protein, 25 aa, Artificial Sequence
  Cyclic GFR-binding peptide
LSPINILYFDSANNVVYGKIPDMVV

SEQ ID NO: 46222 - protein, 34 aa, Artificial Sequence; identical to SEQ ID NO: 43244
  Cyclic GFR-binding peptide
  MOD_RES (4)..(5): Xaa is C or S

SEQ ID NO: 46223 - protein, 31 aa, Artificial Sequence; identical to SEQ ID NO: 43245
  Cyclic GFR-binding peptide
  MOD_RES (2)..(3): Xaa is C or S

SEQ ID NO: 46224 - protein, 27 aa, Artificial Sequence
  Cyclic GFR-binding peptide
  MOD_RES (27)..(27): Xaa is C or S
SPINILYFDSANNVVYGKIPDMVVESX

SEQ ID NO: 46225 - protein, 33 aa, Artificial Sequence; identical to SEQ ID NO: 43247
  Cyclic GFR-binding peptide
  MOD_RES (1)..(2): Xaa is C or S

SEQ ID NO: 46226 - protein, 32 aa, Artificial Sequence; identical to SEQ ID NO: 43248
  Cyclic GFR-binding peptide
  MOD_RES (4)..(5): Xaa is C or S

SEQ ID NO: 46227 - protein, 37 aa, Artificial Sequence; identical to SEQ ID NO: 43249
  Cyclic GFR-binding peptide
  MOD_RES (1)..(2)..(34)..(36): Xaa is C or S

SEQ ID NO: 46228 - protein, 32 aa, Artificial Sequence; identical to SEQ ID NO: 43250
  Cyclic GFR-binding peptide
  MOD_RES (1)..(2): Xaa is C or S

SEQ ID NO: 46229 - protein, 30 aa, Artificial Sequence; identical to SEQ ID NO: 43251
  Cyclic GFR-binding peptide

SEQ ID NO: 46230 - protein, 35 aa, Artificial Sequence; identical to SEQ ID NO: 43252
  Cyclic GFR-binding peptide
  MOD_RES (1)..(32)..(34): Xaa is C or S

SEQ ID NO: 46231 - protein, 31 aa, Artificial Sequence; identical to SEQ ID NO: 43253
  Cyclic GFR-binding peptide
  MOD_RES (28)..(30): Xaa is C or S

SEQ ID NO: 46232 - protein, 28 aa, Artificial Sequence
  Cyclic GFR-binding peptide
  MOD_RES (28)..(28): Xaa is C or S
KTSPINMLYFDNGRVLLYGKIPMIVEEX

SEQ ID NO: 46233 - protein, 25 aa, Artificial Sequence
  Cyclic GFR-binding peptide
APTQLSPINVLYFDDSSNVIYGKIP

SEQ ID NO: 46234 - protein, 38 aa, Artificial Sequence; identical to SEQ ID NO: 43256
  Cyclic GFR-binding peptide
  MOD_RES (4)..(5)..(38): Xaa is C or S

SEQ ID NO: 46235 - protein, 33 aa, Artificial Sequence; identical to SEQ ID NO: 43257
  Cyclic GFR-binding peptide
  MOD_RES (3)..(3): Xaa is C or S

SEQ ID NO: 46236 - protein, 29 aa, Artificial Sequence
  Cyclic GFR-binding peptide
  MOD_RES (3)..(4): Xaa is C or S
KAXXVPTKLSPINILYFDKGVVTYYGKIP

SEQ ID NO: 46237 - protein, 25 aa, Artificial Sequence
  Cyclic GFR-binding peptide
LSPINILYFDKGVVTYYGKIPGMAV

SEQ ID NO: 46238 - protein, 39 aa, Artificial Sequence; identical to SEQ ID NO: 43260
  Cyclic GFR-binding peptide
  MOD_RES (5)..(6)..(38): Xaa is C or S

SEQ ID NO: 46239 - protein, 35 aa, Artificial Sequence; identical to SEQ ID NO: 43261
  Cyclic GFR-binding peptide
  MOD_RES (1)..(33)..(35): Xaa is C or S

SEQ ID NO: 46240 - protein, 42 aa, Artificial Sequence; identical to SEQ ID NO: 43262
  Cyclic GFR-binding peptide
  MOD_RES (6)..(7)..(39)..(41): Xaa is C or S

SEQ ID NO: 46241 - protein, 24 aa, Artificial Sequence
  Cyclic GFR-binding peptide
LSPINMLYFDENEKVVYGKIPDMV

SEQ ID NO: 46242 - protein, 33 aa, Artificial Sequence; identical to SEQ ID NO: 43264
  Cyclic GFR-binding peptide
  MOD_RES (6)..(7): Xaa is C or S

SEQ ID NO: 46243 - protein, 42 aa, Artificial Sequence; identical to SEQ ID NO: 43265
  Cyclic GFR-binding peptide
  MOD_RES (6)..(7)..(39)..(41): Xaa is C or S

SEQ ID NO: 46244 - protein, 33 aa, Artificial Sequence; identical to SEQ ID NO: 43266
  Cyclic GFR-binding peptide
  MOD_RES (30)..(32): Xaa is C or S

SEQ ID NO: 46245 - protein, 33 aa, Artificial Sequence; identical to SEQ ID NO: 43267
  Cyclic GFR-binding peptide
  MOD_RES (3)..(4): Xaa is C or S

SEQ ID NO: 46246 - protein, 35 aa, Artificial Sequence; identical to SEQ ID NO: 43268
  Cyclic GFR-binding peptide
  MOD_RES (3)..(35): Xaa is C or S

SEQ ID NO: 46247 - protein, 30 aa, Artificial Sequence; identical to SEQ ID NO: 43269
  Cyclic GFR-binding peptide
  MOD_RES (1)..(1): Xaa is C or S

SEQ ID NO: 46248 - protein, 31 aa, Artificial Sequence; identical to SEQ ID NO: 43270
  Cyclic GFR-binding peptide
  MOD_RES (28)..(30): Xaa is C or S

SEQ ID NO: 46249 - protein, 28 aa, Artificial Sequence
  Cyclic GFR-binding peptide
  MOD_RES (1)..(1): Xaa is C or S
XVPARLSPINILYFDAANNVVYGKIPDM

SEQ ID NO: 46250 - protein, 31 aa, Artificial Sequence; identical to SEQ ID NO: 43272
  Cyclic GFR-binding peptide
  MOD_RES (4)..(5): Xaa is C or S

SEQ ID NO: 46251 - protein, 27 aa, Artificial Sequence
  Cyclic GFR-binding peptide
RLSPINILYFDAANNVVYGKIPDMVVE

SEQ ID NO: 46252 - protein, 32 aa, Artificial Sequence; identical to SEQ ID NO: 43274
  Cyclic GFR-binding peptide
  MOD_RES (3)..(4): Xaa is C or S

SEQ ID NO: 46253 - protein, 30 aa, Artificial Sequence; identical to SEQ ID NO: 43275
  Cyclic GFR-binding peptide

SEQ ID NO: 46254 - protein, 27 aa, Artificial Sequence
  Cyclic GFR-binding peptide
TKLSPINVLYFDDSSNVIYGKIPNMVV

SEQ ID NO: 46255 - protein, 23 aa, Artificial Sequence
  Cyclic GFR-binding peptide
LSPINILYFDSANNVVYGKIPDM

SEQ ID NO: 46256 - protein, 34 aa, Artificial Sequence; identical to SEQ ID NO: 43278
  Cyclic GFR-binding peptide
  MOD_RES (6)..(7): Xaa is C or S

SEQ ID NO: 46257 - protein, 28 aa, Artificial Sequence
  Cyclic GFR-binding peptide
  MOD_RES (28)..(28): Xaa is C or S
LSPINILYFDKGVVTYYGKIPGMAVSEX

SEQ ID NO: 46258 - protein, 31 aa, Artificial Sequence; identical to SEQ ID NO: 43280
  Cyclic GFR-binding peptide

SEQ ID NO: 46259 - protein, 27 aa, Artificial Sequence
  Cyclic GFR-binding peptide
  MOD_RES (1)..(1): Xaa is C or S
XVPTELSPINMLYFDEYDKVVYGKIPE

SEQ ID NO: 46260 - protein, 25 aa, Artificial Sequence
  Cyclic GFR-binding peptide
ELSPINMLYFDEYDKVVYGKIPEMV

SEQ ID NO: 46261 - protein, 31 aa, Artificial Sequence; identical to SEQ ID NO: 43283
  Cyclic GFR-binding peptide
  MOD_RES (30)..(30): Xaa is C or S

SEQ ID NO: 46262 - protein, 21 aa, Artificial Sequence
  Cyclic GFR-binding peptide
TSPINMLYFDNGRVLLYGKIP

SEQ ID NO: 46263 - protein, 26 aa, Artificial Sequence
  Cyclic GFR-binding peptide
QLSPINVLYFDDSSNVIYGKIPNMVV

SEQ ID NO: 46264 - protein, 38 aa, Artificial Sequence; identical to SEQ ID NO: 43286
  Cyclic GFR-binding peptide
  MOD_RES (4)..(5)..(36)..(38): Xaa is C or S

SEQ ID NO: 46265 - protein, 37 aa, Artificial Sequence; identical to SEQ ID NO: 43287
  Cyclic GFR-binding peptide
  MOD_RES (1)..(2)..(34)..(36): Xaa is C or S

SEQ ID NO: 46266 - protein, 38 aa, Artificial Sequence; identical to SEQ ID NO: 43288
  Cyclic GFR-binding peptide
  MOD_RES (6)..(7)..(38): Xaa is C or S

SEQ ID NO: 46267 - protein, 29 aa, Artificial Sequence
  Cyclic GFR-binding peptide
  MOD_RES (1)..(1): Xaa is C or S
XVPTKLSPINILYFDKGVVTYYGKIPGMA

SEQ ID NO: 46268 - protein, 29 aa, Artificial Sequence
  Cyclic GFR-binding peptide
  MOD_RES (29)..(29): Xaa is C or S
LSPINVLYFDDMGVPTYGKIPEGMSVAEX

SEQ ID NO: 46269 - protein, 34 aa, Artificial Sequence; identical to SEQ ID NO: 43291
  Cyclic GFR-binding peptide
  MOD_RES (1)..(33): Xaa is C or S

SEQ ID NO: 46270 - protein, 29 aa, Artificial Sequence
  Cyclic GFR-binding peptide
  MOD_RES (2)..(3): Xaa is C or S
AXXVPTELSPINMLYFDENEKVVYGKIPD

SEQ ID NO: 46271 - protein, 25 aa, Artificial Sequence
  Cyclic GFR-binding peptide
SPINVLYFDSSNNVIYGKIPNMVVK

SEQ ID NO: 46272 - protein, 25 aa, Artificial Sequence
  Cyclic GFR-binding peptide
RLSPINILYFDSANNVVYGKIPDMV

SEQ ID NO: 46273 - protein, 26 aa, Artificial Sequence
  Cyclic GFR-binding peptide
KLSPINVLYFDDMGVPTYGKIPEGMS

SEQ ID NO: 46274 - protein, 23 aa, Artificial Sequence
  Cyclic GFR-binding peptide
TKLSPINVLYFDSSNNVIYGKIP

SEQ ID NO: 46275 - protein, 25 aa, Artificial Sequence
  Cyclic GFR-binding peptide
PTELSPINMLYFDENEKVVYGKIPD

SEQ ID NO: 46276 - protein, 33 aa, Artificial Sequence; identical to SEQ ID NO: 43298
  Cyclic GFR-binding peptide
  MOD_RES (4)..(5): Xaa is C or S

SEQ ID NO: 46277 - protein, 30 aa, Artificial Sequence; identical to SEQ ID NO: 43299
  Cyclic GFR-binding peptide

SEQ ID NO: 46278 - protein, 31 aa, Artificial Sequence; identical to SEQ ID NO: 43300
  Cyclic GFR-binding peptide
  MOD_RES (29)..(31): Xaa is C or S

SEQ ID NO: 46279 - protein, 30 aa, Artificial Sequence; identical to SEQ ID NO: 43301
  Cyclic GFR-binding peptide
  MOD_RES (2)..(3): Xaa is C or S

SEQ ID NO: 46280 - protein, 39 aa, Artificial Sequence; identical to SEQ ID NO: 43302
  Cyclic GFR-binding peptide
  MOD_RES (7)..(39): Xaa is C or S

SEQ ID NO: 46281 - protein, 32 aa, Artificial Sequence; identical to SEQ ID NO: 43303
  Cyclic GFR-binding peptide
  MOD_RES (1)..(1): Xaa is C or S

SEQ ID NO: 46282 - protein, 36 aa, Artificial Sequence; identical to SEQ ID NO: 43304
  Cyclic GFR-binding peptide
  MOD_RES (3)..(35): Xaa is C or S

SEQ ID NO: 46283 - protein, 26 aa, Artificial Sequence
  Cyclic GFR-binding peptide
APVKTSPINMLYFDNGRVLLYGKIPM

SEQ ID NO: 46284 - protein, 33 aa, Artificial Sequence; identical to SEQ ID NO: 43306
  Cyclic GFR-binding peptide
  MOD_RES (4)..(4): Xaa is C or S

SEQ ID NO: 46285 - protein, 28 aa, Artificial Sequence
  Cyclic GFR-binding peptide
KLSPINVLYFDDSSNVIYGKIPNMVVRS

SEQ ID NO: 46286 - protein, 25 aa, Artificial Sequence
  Cyclic GFR-binding peptide
TRLSPINILYFDSANNVVYGKIPDM

SEQ ID NO: 46287 - protein, 30 aa, Artificial Sequence; identical to SEQ ID NO: 43309
  Cyclic GFR-binding peptide
  MOD_RES (1)..(1): Xaa is C or S

SEQ ID NO: 46288 - protein, 32 aa, Artificial Sequence; identical to SEQ ID NO: 43310
  Cyclic GFR-binding peptide
  MOD_RES (30)..(32): Xaa is C or S

SEQ ID NO: 46289 - protein, 33 aa, Artificial Sequence; identical to SEQ ID NO: 43311
  Cyclic GFR-binding peptide
  MOD_RES (2)..(3): Xaa is C or S

SEQ ID NO: 46290 - protein, 37 aa, Artificial Sequence; identical to SEQ ID NO: 43312
  Cyclic GFR-binding peptide
  MOD_RES (1)..(2)..(35)..(37): Xaa is C or S

SEQ ID NO: 46291 - protein, 24 aa, Artificial Sequence
  Cyclic GFR-binding peptide
ELSPINMLYFDEYDKVVYGKIPEM

SEQ ID NO: 46292 - protein, 29 aa, Artificial Sequence
  Cyclic GFR-binding peptide
PTKLSPINVLYFDDSSNVIYGKIPNMVVR

SEQ ID NO: 46293 - protein, 38 aa, Artificial Sequence; identical to SEQ ID NO: 749
  Cyclic GFR-binding peptide
  MOD_RES (32)..(33): Xaa is C or S

SEQ ID NO: 46294 - protein, 30 aa, Artificial Sequence; identical to SEQ ID NO: 11324
  Cyclic GFR-binding peptide
  MOD_RES (29)..(30): Xaa is C or S

SEQ ID NO: 46295 - protein, 36 aa, Artificial Sequence; identical to SEQ ID NO: 11325
  Cyclic GFR-binding peptide
  MOD_RES (2)..(4)..(36): Xaa is C or S

SEQ ID NO: 46296 - protein, 24 aa, Artificial Sequence
  Cyclic GFR-binding peptide
MRYKKLIKPTKGIFYLISIANLDQ

SEQ ID NO: 46297 - protein, 29 aa, Artificial Sequence
  Cyclic GFR-binding peptide
  MOD_RES (1)..(1): Xaa is C or S
XSKVVMRYKKLVKPTRGVFYLISIANLDQ

SEQ ID NO: 46298 - protein, 30 aa, Artificial Sequence; identical to SEQ ID NO: 757
  Cyclic GFR-binding peptide
  MOD_RES (1)..(1): Xaa is C or S

SEQ ID NO: 46299 - protein, 33 aa, Artificial Sequence; identical to SEQ ID NO: 760
  Cyclic GFR-binding peptide
  MOD_RES (2)..(2): Xaa is C or S

SEQ ID NO: 46300 - protein, 28 aa, Artificial Sequence
  Cyclic GFR-binding peptide
RVIMRYKKLVKPKRGVFYLISIANLAQP

SEQ ID NO: 46301 - protein, 25 aa, Artificial Sequence
  Cyclic GFR-binding peptide
VVMDRYKKLVVKENEDFYLMSIANL

SEQ ID NO: 46302 - protein, 32 aa, Artificial Sequence; identical to SEQ ID NO: 11335
  Cyclic GFR-binding peptide
  MOD_RES (26)..(27): Xaa is C or S

SEQ ID NO: 46303 - protein, 35 aa, Artificial Sequence; identical to SEQ ID NO: 11337
  Cyclic GFR-binding peptide
  MOD_RES (1)..(33)..(34): Xaa is C or S

SEQ ID NO: 46304 - protein, 34 aa, Artificial Sequence; identical to SEQ ID NO: 11338
  Cyclic GFR-binding peptide
  MOD_RES (2)..(34): Xaa is C or S

SEQ ID NO: 46305 - protein, 25 aa, Artificial Sequence
  Cyclic GFR-binding peptide
RYKKLVVNNASDFYLISIANLRTPV

SEQ ID NO: 46306 - protein, 25 aa, Artificial Sequence
  Cyclic GFR-binding peptide
EYQKYIVNSSDDIFLVSIPSLKTPA

SEQ ID NO: 46307 - protein, 28 aa, Artificial Sequence
  Cyclic GFR-binding peptide
  MOD_RES (27)..(28): Xaa is C or S
DNSLQEVVNNASDYYVIPLPELRTPVXX

SEQ ID NO: 46308 - protein, 24 aa, Artificial Sequence
  Cyclic GFR-binding peptide
KVIMNSLQEIKPTKGIYYLITLPE

SEQ ID NO: 46309 - protein, 32 aa, Artificial Sequence; identical to SEQ ID NO: 11343
  Cyclic GFR-binding peptide
  MOD_RES (26)..(27): Xaa is C or S

SEQ ID NO: 46310 - protein, 40 aa, Artificial Sequence; identical to SEQ ID NO: 11344
  Cyclic GFR-binding peptide
  MOD_RES (2)..(34)..(35): Xaa is C or S

SEQ ID NO: 46311 - protein, 27 aa, Artificial Sequence
  Cyclic GFR-binding peptide
  MOD_RES (26)..(26): Xaa is C or S
NSLQEIVNSSDDYYLVTLPELKTPAXT

SEQ ID NO: 46312 - protein, 26 aa, Artificial Sequence
  Cyclic GFR-binding peptide
VMNNSLQEIVNSSDDYYLVTLPELQT

SEQ ID NO: 46313 - protein, 35 aa, Artificial Sequence; identical to SEQ ID NO: 11349
  Cyclic GFR-binding peptide
  MOD_RES (1)..(33)..(34): Xaa is C or S

SEQ ID NO: 46314 - protein, 34 aa, Artificial Sequence; identical to SEQ ID NO: 11350
  Cyclic GFR-binding peptide
  MOD_RES (28)..(29): Xaa is C or S

SEQ ID NO: 46315 - protein, 31 aa, Artificial Sequence; identical to SEQ ID NO: 11351
  Cyclic GFR-binding peptide
  MOD_RES (29)..(30): Xaa is C or S

SEQ ID NO: 46316 - protein, 22 aa, Artificial Sequence
  Cyclic GFR-binding peptide
MRYKKLVKPKRGVFYLISIANL

SEQ ID NO: 46317 - protein, 35 aa, Artificial Sequence; identical to SEQ ID NO: 775
  Cyclic GFR-binding peptide
  MOD_RES (31)..(32): Xaa is C or S

SEQ ID NO: 46318 - protein, 29 aa, Artificial Sequence
  Cyclic GFR-binding peptide
RVVMNEYQKYIVNSSDDIFLVSIPSLQTP

SEQ ID NO: 46319 - protein, 42 aa, Artificial Sequence; identical to SEQ ID NO: 777
  Cyclic GFR-binding peptide
  MOD_RES (2)..(4)..(36)..(37): Xaa is C or S

SEQ ID NO: 46320 - protein, 36 aa, Artificial Sequence; identical to SEQ ID NO: 11358
  Cyclic GFR-binding peptide
  MOD_RES (30)..(31): Xaa is C or S

SEQ ID NO: 46321 - protein, 23 aa, Artificial Sequence
  Cyclic GFR-binding peptide
MNRYKKLIVNSSDDFYLVSIANL

SEQ ID NO: 46322 - protein, 33 aa, Artificial Sequence; identical to SEQ ID NO: 11360
  Cyclic GFR-binding peptide
  MOD_RES (27)..(28): Xaa is C or S

SEQ ID NO: 46323 - protein, 35 aa, Artificial Sequence; identical to SEQ ID NO: 11361
  Cyclic GFR-binding peptide
  MOD_RES (1)..(33)..(34): Xaa is C or S

SEQ ID NO: 46324 - protein, 35 aa, Artificial Sequence; identical to SEQ ID NO: 11362
  Cyclic GFR-binding peptide
  MOD_RES (2)..(34)..(35): Xaa is C or S

SEQ ID NO: 46325 - protein, 39 aa, Artificial Sequence; identical to SEQ ID NO: 784
  Cyclic GFR-binding peptide
  MOD_RES (1)..(3)..(35)..(36): Xaa is C or S

SEQ ID NO: 46326 - protein, 38 aa, Artificial Sequence; identical to SEQ ID NO: 785
  Cyclic GFR-binding peptide
  MOD_RES (1)..(33): Xaa is C or S

SEQ ID NO: 46327 - protein, 27 aa, Artificial Sequence
  Cyclic GFR-binding peptide
  MOD_RES (27)..(27): Xaa is C or S
DRYKKLVVNNASDFYLISIANLRTPVX

SEQ ID NO: 46328 - protein, 39 aa, Artificial Sequence
  Cyclic GFR-binding peptide
  MOD_RES (1)..(3)..(34)..(35): Xaa is C or S
XKXSKVVMNSLQEVKPTRGVYYLITLPELDQPVXXPSAS

SEQ ID NO: 46329 - protein, 30 aa, Artificial Sequence; identical to SEQ ID NO: 11368
  Cyclic GFR-binding peptide
  MOD_RES (27)..(28): Xaa is C or S

SEQ ID NO: 46330 - protein, 27 aa, Artificial Sequence
  Cyclic GFR-binding peptide
EVVMDEYQKYVVKENEDIFLMSIPSLE

SEQ ID NO: 46331 - protein, 37 aa, Artificial Sequence; identical to SEQ ID NO: 11370
  Cyclic GFR-binding peptide
  MOD_RES (32)..(33): Xaa is C or S

SEQ ID NO: 46332 - protein, 36 aa, Artificial Sequence; identical to SEQ ID NO: 11371
  Cyclic GFR-binding peptide
  MOD_RES (1)..(32)..(33): Xaa is C or S

SEQ ID NO: 46333 - protein, 22 aa, Artificial Sequence
  Cyclic GFR-binding peptide
NNSLQEIVNSSDDYYVVPLPEL

SEQ ID NO: 46334 - protein, 27 aa, Artificial Sequence
  Cyclic GFR-binding peptide
VVMDEYQKYVVKENEDIFLMSIPSLET

SEQ ID NO: 46335 - protein, 35 aa, Artificial Sequence; identical to SEQ ID NO: 11376
  Cyclic GFR-binding peptide
  MOD_RES (31)..(32): Xaa is C or S

SEQ ID NO: 46336 - protein, 25 aa, Artificial Sequence
  Cyclic GFR-binding peptide
DNSLQEVVKENEDYYVMPLPELETP

SEQ ID NO: 46337 - protein, 29 aa, Artificial Sequence
  Cyclic GFR-binding peptide
SRVIMRYKKLVKPKRGVFYLISIANLAQP

SEQ ID NO: 46338 - protein, 30 aa, Artificial Sequence; identical to SEQ ID NO: 808
  Cyclic GFR-binding peptide
  MOD_RES (2)..(2): Xaa is C or S

SEQ ID NO: 46339 - protein, 33 aa, Artificial Sequence; identical to SEQ ID NO: 11383
  Cyclic GFR-binding peptide
  MOD_RES (2)..(2): Xaa is C or S

SEQ ID NO: 46340 - protein, 37 aa, Artificial Sequence; identical to SEQ ID NO: 11384
  Cyclic GFR-binding peptide
  MOD_RES (1)..(33)..(34): Xaa is C or S

SEQ ID NO: 46341 - protein, 24 aa, Artificial Sequence
  Cyclic GFR-binding peptide
NSLQEIVNSSDDYYLVTLPELKTP

SEQ ID NO: 46342 - protein, 30 aa, Artificial Sequence; identical to SEQ ID NO: 11386
  Cyclic GFR-binding peptide
  MOD_RES (1)..(1): Xaa is C or S

SEQ ID NO: 46343 - protein, 26 aa, Artificial Sequence
  Cyclic GFR-binding peptide
SEVVMDNSLQEVVNNASDYYLITLPE

SEQ ID NO: 46344 - protein, 33 aa, Artificial Sequence; identical to SEQ ID NO: 813
  Cyclic GFR-binding peptide
  MOD_RES (30)..(31): Xaa is C or S

SEQ ID NO: 46345 - protein, 25 aa, Artificial Sequence
  Cyclic GFR-binding peptide
IMEYQKYVKPKRGVIFLISIPSLAQ

SEQ ID NO: 46346 - protein, 20 aa, Artificial Sequence
  Cyclic GFR-binding peptide
EYQKYVKPKRGVIFLISIPS

SEQ ID NO: 46347 - protein, 29 aa, Artificial Sequence
  Cyclic GFR-binding peptide
  MOD_RES (1)..(3): Xaa is C or S
XGXGEVVMEEYQKYVVKDYEDIFLMSIPS

SEQ ID NO: 46348 - protein, 26 aa, Artificial Sequence
  Cyclic GFR-binding peptide
  MOD_RES (26)..(26): Xaa is C or S
RYKKLVVKDYEDFYLMSIANLETPVX

SEQ ID NO: 46349 - protein, 30 aa, Artificial Sequence; identical to SEQ ID NO: 11398
  Cyclic GFR-binding peptide
  MOD_RES (27)..(28): Xaa is C or S

SEQ ID NO: 46350 - protein, 40 aa, Artificial Sequence; identical to SEQ ID NO: 824
  Cyclic GFR-binding peptide
  MOD_RES (1)..(3)..(35): Xaa is C or S

SEQ ID NO: 46351 - protein, 40 aa, Artificial Sequence; identical to SEQ ID NO: 11402
  Cyclic GFR-binding peptide
  MOD_RES (1)..(3)..(34)..(35): Xaa is C or S

SEQ ID NO: 46352 - protein, 35 aa, Artificial Sequence; identical to SEQ ID NO: 11404
  Cyclic GFR-binding peptide
  MOD_RES (2)..(4): Xaa is C or S

SEQ ID NO: 46353 - protein, 40 aa, Artificial Sequence; identical to SEQ ID NO: 11405
  Cyclic GFR-binding peptide
  MOD_RES (1)..(3)..(34)..(35): Xaa is C or S

SEQ ID NO: 46354 - protein, 25 aa, Artificial Sequence
  Cyclic GFR-binding peptide
MNSLQEVKPTRGVYYLITLPELDQP

SEQ ID NO: 46355 - protein, 25 aa, Artificial Sequence
  Cyclic GFR-binding peptide
VMNNSLQEIVNSSDDYYLVTLPELK

SEQ ID NO: 46356 - protein, 34 aa, Artificial Sequence; identical to SEQ ID NO: 11407
  Cyclic GFR-binding peptide
  MOD_RES (28)..(29): Xaa is C or S

SEQ ID NO: 46357 - protein, 25 aa, Artificial Sequence
  Cyclic GFR-binding peptide
VVMNEYQKYIVNSSDDIFLVSIPSL

SEQ ID NO: 46358 - protein, 25 aa, Artificial Sequence
  Cyclic GFR-binding peptide
IMRYKKLIKPTKGIFYLISIANLDQ

SEQ ID NO: 46359 - protein, 31 aa, Artificial Sequence; identical to SEQ ID NO: 11410
  Cyclic GFR-binding peptide

SEQ ID NO: 46360 - protein, 24 aa, Artificial Sequence
  Cyclic GFR-binding peptide
EYQKYVVKDYEDIFLMSIPSLETP

SEQ ID NO: 46361 - protein, 32 aa, Artificial Sequence; identical to SEQ ID NO: 11413
  Cyclic GFR-binding peptide
  MOD_RES (1)..(1): Xaa is C or S

SEQ ID NO: 46362 - protein, 24 aa, Artificial Sequence
  Cyclic GFR-binding peptide
MDNSLQEVVKENEDYYVMPLPELE

SEQ ID NO: 46363 - protein, 30 aa, Artificial Sequence; identical to SEQ ID NO: 11415
  Cyclic GFR-binding peptide
  MOD_RES (30)..(30): Xaa is C or S

SEQ ID NO: 46364 - protein, 27 aa, Artificial Sequence
  Cyclic GFR-binding peptide
  MOD_RES (26)..(27): Xaa is C or S
EYQKYIVNSSDDIFLVSIPSLQTPAXX

SEQ ID NO: 46365 - protein, 27 aa, Artificial Sequence
  Cyclic GFR-binding peptide
  MOD_RES (1)..(1): Xaa is C or S
XSRVIMEYQKYVKPKRGVIFLISIPSL

SEQ ID NO: 46366 - protein, 33 aa, Artificial Sequence; identical to SEQ ID NO: 839
  Cyclic GFR-binding peptide
  MOD_RES (2)..(4): Xaa is C or S

SEQ ID NO: 46367 - protein, 35 aa, Artificial Sequence; identical to SEQ ID NO: 11419
  Cyclic GFR-binding peptide
  MOD_RES (31)..(32): Xaa is C or S

SEQ ID NO: 46368 - protein, 27 aa, Artificial Sequence
  Cyclic GFR-binding peptide
VMNNSLQEIVNSSDDYYVVPLPELQTP

SEQ ID NO: 46369 - protein, 28 aa, Artificial Sequence
  Cyclic GFR-binding peptide
  MOD_RES (26)..(26): Xaa is C or S
NSLQEIVNSSDDYYLVTLPELKTPAXTP

SEQ ID NO: 46370 - protein, 25 aa, Artificial Sequence
  Cyclic GFR-binding peptide
NSLQEVVKENEDYYVMPLPELETPV

SEQ ID NO: 46371 - protein, 36 aa, Artificial Sequence; identical to SEQ ID NO: 11426
  Cyclic GFR-binding peptide
  MOD_RES (1)..(33)..(34): Xaa is C or S

SEQ ID NO: 46372 - protein, 35 aa, Artificial Sequence; identical to SEQ ID NO: 11427
  Cyclic GFR-binding peptide
  MOD_RES (2)..(33)..(34): Xaa is C or S

SEQ ID NO: 46373 - protein, 32 aa, Artificial Sequence; identical to SEQ ID NO: 845
  Cyclic GFR-binding peptide
  MOD_RES (2)..(4): Xaa is C or S

SEQ ID NO: 46374 - protein, 27 aa, Artificial Sequence
  Cyclic GFR-binding peptide
SKVIMNSLQEIKPTKGIYYVIPLPELD

SEQ ID NO: 46375 - protein, 21 aa, Artificial Sequence
  Cyclic GFR-binding peptide
NSLQEVKPTRGVYYVIPLPEL

SEQ ID NO: 46376 - protein, 30 aa, Artificial Sequence; identical to SEQ ID NO: 11434
  Cyclic GFR-binding peptide
  MOD_RES (27)..(28): Xaa is C or S

SEQ ID NO: 46377 - protein, 27 aa, Artificial Sequence
  Cyclic GFR-binding peptide
EVVMDNSLQEVVNNASDYYVIPLPELR

SEQ ID NO: 46378 - protein, 31 aa, Artificial Sequence; identical to SEQ ID NO: 11436
  Cyclic GFR-binding peptide
  MOD_RES (1)..(3): Xaa is C or S

SEQ ID NO: 46379 - protein, 30 aa, Artificial Sequence; identical to SEQ ID NO: 851
  Cyclic GFR-binding peptide
  MOD_RES (29)..(30): Xaa is C or S

SEQ ID NO: 46380 - protein, 27 aa, Artificial Sequence
  Cyclic GFR-binding peptide
GEVVMERYKKLVVKDYEDFYLMSIANL

SEQ ID NO: 46381 - protein, 27 aa, Artificial Sequence
  Cyclic GFR-binding peptide
VVMNEYQKYIVNSSDDIFLVSIPSLKT

SEQ ID NO: 46382 - protein, 27 aa, Artificial Sequence
  Cyclic GFR-binding peptide
  MOD_RES (2)..(2): Xaa is C or S
KXSKVIMRYKKLIKPTKGIFYLISIAN

SEQ ID NO: 46383 - protein, 41 aa, Artificial Sequence; identical to SEQ ID NO: 11443
  Cyclic GFR-binding peptide
  MOD_RES (2)..(4)..(36)..(37): Xaa is C or S

SEQ ID NO: 46384 - protein, 32 aa, Artificial Sequence; identical to SEQ ID NO: 11445
  Cyclic GFR-binding peptide
  MOD_RES (30)..(30): Xaa is C or S

SEQ ID NO: 46385 - protein, 32 aa, Artificial Sequence; identical to SEQ ID NO: 859
  Cyclic GFR-binding peptide
  MOD_RES (2)..(2): Xaa is C or S

SEQ ID NO: 46386 - protein, 38 aa, Artificial Sequence
  Cyclic GFR-binding peptide
  MOD_RES (2)..(33)..(34): Xaa is C or S
KXSKVVMNSLQEVKPTRGVYYLITLPELDQPVXXPSAS

SEQ ID NO: 46387 - protein, 29 aa, Artificial Sequence
  Cyclic GFR-binding peptide
SKVVMEYQKYVKPTRGVIFLISIPSLDQP

SEQ ID NO: 46388 - protein, 34 aa, Artificial Sequence; identical to SEQ ID NO: 11448
  Cyclic GFR-binding peptide
  MOD_RES (30)..(31): Xaa is C or S

SEQ ID NO: 46389 - protein, 32 aa, Artificial Sequence; identical to SEQ ID NO: 11451
  Cyclic GFR-binding peptide
  MOD_RES (31)..(32): Xaa is C or S

SEQ ID NO: 46390 - protein, 30 aa, Artificial Sequence; identical to SEQ ID NO: 11453
  Cyclic GFR-binding peptide
  MOD_RES (2)..(2): Xaa is C or S

SEQ ID NO: 46391 - protein, 40 aa, Artificial Sequence; identical to SEQ ID NO: 11454
  Cyclic GFR-binding peptide
  MOD_RES (2)..(4)..(35)..(36): Xaa is C or S

SEQ ID NO: 46392 - protein, 30 aa, Artificial Sequence; identical to SEQ ID NO: 11457
  Cyclic GFR-binding peptide
  MOD_RES (1)..(3): Xaa is C or S

SEQ ID NO: 46393 - protein, 30 aa, Artificial Sequence; identical to SEQ ID NO: 11458
  Cyclic GFR-binding peptide
  MOD_RES (26)..(27): Xaa is C or S

SEQ ID NO: 46394 - protein, 31 aa, Artificial Sequence; identical to SEQ ID NO: 877
  Cyclic GFR-binding peptide
  MOD_RES (27)..(28): Xaa is C or S

SEQ ID NO: 46395 - protein, 32 aa, Artificial Sequence; identical to SEQ ID NO: 11462
  Cyclic GFR-binding peptide
  MOD_RES (32)..(32): Xaa is C or S

SEQ ID NO: 46396 - protein, 39 aa, Artificial Sequence; identical to SEQ ID NO: 11463
  Cyclic GFR-binding peptide
  MOD_RES (1)..(3)..(35)..(36): Xaa is C or S

SEQ ID NO: 46397 - protein, 26 aa, Artificial Sequence
  Cyclic GFR-binding peptide
  MOD_RES (26)..(26): Xaa is C or S
NSLQEIVNSSDDYYVVPLPELQTPAX

SEQ ID NO: 46398 - protein, 32 aa, Artificial Sequence; identical to SEQ ID NO: 11466
  Cyclic GFR-binding peptide
  MOD_RES (26)..(27): Xaa is C or S

SEQ ID NO: 46399 - protein, 32 aa, Artificial Sequence; identical to SEQ ID NO: 11467
  Cyclic GFR-binding peptide
  MOD_RES (28)..(29): Xaa is C or S

SEQ ID NO: 46400 - protein, 25 aa, Artificial Sequence
  Cyclic GFR-binding peptide
MNNSLQEIVNSSDDYYLVTLPELKT

SEQ ID NO: 46401 - protein, 33 aa, Artificial Sequence; identical to SEQ ID NO: 11469
  Cyclic GFR-binding peptide
  MOD_RES (1)..(3): Xaa is C or S

SEQ ID NO: 46402 - protein, 28 aa, Artificial Sequence
  Cyclic GFR-binding peptide
  MOD_RES (26)..(27): Xaa is C or S
RYKKLIVNSSDDFYLVSIANLKTPAXXP

SEQ ID NO: 46403 - protein, 31 aa, Artificial Sequence; identical to SEQ ID NO: 11471
  Cyclic GFR-binding peptide
  MOD_RES (29)..(30): Xaa is C or S

SEQ ID NO: 46404 - protein, 28 aa, Artificial Sequence
  Cyclic GFR-binding peptide
SRVIMRYKKLVKPKRGVFYLISIANLAQ

SEQ ID NO: 46405 - protein, 31 aa, Artificial Sequence; identical to SEQ ID NO: 11474
  Cyclic GFR-binding peptide
  MOD_RES (31)..(31): Xaa is C or S

SEQ ID NO: 46406 - protein, 32 aa, Artificial Sequence; identical to SEQ ID NO: 11476
  Cyclic GFR-binding peptide
  MOD_RES (31)..(32): Xaa is C or S

SEQ ID NO: 46407 - protein, 35 aa, Artificial Sequence; identical to SEQ ID NO: 897
  Cyclic GFR-binding peptide
  MOD_RES (1)..(32)..(33): Xaa is C or S

SEQ ID NO: 46408 - protein, 29 aa, Artificial Sequence
  Cyclic GFR-binding peptide
VVMDNSLQEVVNNASDYYVIPLPELRTPV

SEQ ID NO: 46409 - protein, 30 aa, Artificial Sequence; identical to SEQ ID NO: 11480
  Cyclic GFR-binding peptide
  MOD_RES (30)..(30): Xaa is C or S

SEQ ID NO: 46410 - protein, 29 aa, Artificial Sequence
  Cyclic GFR-binding peptide
  MOD_RES (26)..(27): Xaa is C or S
NSLQEVKPTRGVYYLITLPELDQPVXXPS

SEQ ID NO: 46411 - protein, 31 aa, Artificial Sequence; identical to SEQ ID NO: 11481
  Cyclic GFR-binding peptide
  MOD_RES (28)..(29): Xaa is C or S

SEQ ID NO: 46412 - protein, 23 aa, Artificial Sequence
  Cyclic GFR-binding peptide
NNSLQEIVNSSDDYYLVTLPELQ

SEQ ID NO: 46413 - protein, 32 aa, Artificial Sequence; identical to SEQ ID NO: 904
  Cyclic GFR-binding peptide
  MOD_RES (2)..(2): Xaa is C or S

SEQ ID NO: 46414 - protein, 34 aa, Artificial Sequence; identical to SEQ ID NO: 11484
  Cyclic GFR-binding peptide
  MOD_RES (31)..(31): Xaa is C or S

SEQ ID NO: 46415 - protein, 25 aa, Artificial Sequence
  Cyclic GFR-binding peptide
NEYQKYIVNSSDDIFLVSIPSLKTP

SEQ ID NO: 46416 - protein, 28 aa, Artificial Sequence
  Cyclic GFR-binding peptide
  MOD_RES (2)..(2): Xaa is C or S
GXSRVVMNNSLQEIVNSSDDYYVVPLPE

SEQ ID NO: 46417 - protein, 30 aa, Artificial Sequence; identical to SEQ ID NO: 11489
  Cyclic GFR-binding peptide
  MOD_RES (29)..(30): Xaa is C or S

SEQ ID NO: 46418 - protein, 39 aa, Artificial Sequence; identical to SEQ ID NO: 11490
  Cyclic GFR-binding peptide
  MOD_RES (2)..(34): Xaa is C or S

SEQ ID NO: 46419 - protein, 33 aa, Artificial Sequence; identical to SEQ ID NO: 11491
  Cyclic GFR-binding peptide
  MOD_RES (27)..(28): Xaa is C or S

SEQ ID NO: 46420 - protein, 23 aa, Artificial Sequence
  Cyclic GFR-binding peptide
MDRYKKLVVKENEDFYLMSIANL

SEQ ID NO: 46421 - protein, 34 aa, Artificial Sequence; identical to SEQ ID NO: 11493
  Cyclic GFR-binding peptide
  MOD_RES (30)..(31): Xaa is C or S

SEQ ID NO: 46422 - protein, 32 aa, Artificial Sequence; identical to SEQ ID NO: 11494
  Cyclic GFR-binding peptide
  MOD_RES (26)..(26): Xaa is C or S

SEQ ID NO: 46423 - protein, 30 aa, Artificial Sequence; identical to SEQ ID NO: 11495
  Cyclic GFR-binding peptide
  MOD_RES (27)..(28): Xaa is C or S

SEQ ID NO: 46424 - protein, 29 aa, Artificial Sequence
  Cyclic GFR-binding peptide
KVVMRYKKLVKPTRGVFYLISIANLDQPV

SEQ ID NO: 46425 - protein, 28 aa, Artificial Sequence
  Cyclic GFR-binding peptide
GEVVMENSLQEVVKDYEDYYVMPLPELE

SEQ ID NO: 46426 - protein, 30 aa, Artificial Sequence; identical to SEQ ID NO: 11499
  Cyclic GFR-binding peptide
  MOD_RES (1)..(1): Xaa is C or S

SEQ ID NO: 46427 - protein, 35 aa, Artificial Sequence; identical to SEQ ID NO: 11502
  Cyclic GFR-binding peptide
  MOD_RES (1)..(3)..(34)..(35): Xaa is C or S

SEQ ID NO: 46428 - protein, 38 aa, Artificial Sequence; identical to SEQ ID NO: 11503
  Cyclic GFR-binding peptide
  MOD_RES (2)..(4)..(36)..(37): Xaa is C or S

SEQ ID NO: 46429 - protein, 30 aa, Artificial Sequence; identical to SEQ ID NO: 11504
  Cyclic GFR-binding peptide
  MOD_RES (29)..(30): Xaa is C or S

SEQ ID NO: 46430 - protein, 29 aa, Artificial Sequence
  Cyclic GFR-binding peptide
SRVVMNRYKKLIVNSSDDFYLVSIANLKT

SEQ ID NO: 46431 - protein, 34 aa, Artificial Sequence; identical to SEQ ID NO: 11507
  Cyclic GFR-binding peptide
  MOD_RES (32)..(33): Xaa is C or S

SEQ ID NO: 46432 - protein, 40 aa, Artificial Sequence; identical to SEQ ID NO: 11508
  Cyclic GFR-binding peptide
  MOD_RES (2)..(34)..(35): Xaa is C or S

SEQ ID NO: 46433 - protein, 32 aa, Artificial Sequence; identical to SEQ ID NO: 11509
  Cyclic GFR-binding peptide
  MOD_RES (28)..(29): Xaa is C or S

SEQ ID NO: 46434 - protein, 33 aa, Artificial Sequence; identical to SEQ ID NO: 11510
  Cyclic GFR-binding peptide
  MOD_RES (30)..(31): Xaa is C or S

SEQ ID NO: 46435 - protein, 29 aa, Artificial Sequence
  Cyclic GFR-binding peptide
  MOD_RES (2)..(2): Xaa is C or S
GXGEVVMDNSLQEVVKENEDYYLMTLPEL

SEQ ID NO: 46436 - protein, 36 aa, Artificial Sequence; identical to SEQ ID NO: 938
  Cyclic GFR-binding peptide
  MOD_RES (1)..(32)..(33): Xaa is C or S

SEQ ID NO: 46437 - protein, 26 aa, Artificial Sequence
  Cyclic GFR-binding peptide
MDRYKKLVVKENEDFYLMSIANLETP

SEQ ID NO: 46438 - protein, 34 aa, Artificial Sequence; identical to SEQ ID NO: 11515
  Cyclic GFR-binding peptide
  MOD_RES (1)..(3): Xaa is C or S

SEQ ID NO: 46439 - protein, 30 aa, Artificial Sequence; identical to SEQ ID NO: 11516
  Cyclic GFR-binding peptide
  MOD_RES (1)..(1): Xaa is C or S

SEQ ID NO: 46440 - protein, 22 aa, Artificial Sequence
  Cyclic GFR-binding peptide
MEEYQKYVVKDYEDIFLMSIPS

SEQ ID NO: 46441 - protein, 35 aa, Artificial Sequence; identical to SEQ ID NO: 944
  Cyclic GFR-binding peptide
  MOD_RES (29)..(30): Xaa is C or S

SEQ ID NO: 46442 - protein, 30 aa, Artificial Sequence; identical to SEQ ID NO: 11520
  Cyclic GFR-binding peptide

SEQ ID NO: 46443 - protein, 37 aa, Artificial Sequence; identical to SEQ ID NO: 11521
  Cyclic GFR-binding peptide
  MOD_RES (1)..(3)..(34)..(35): Xaa is C or S

SEQ ID NO: 46444 - protein, 26 aa, Artificial Sequence
  Cyclic GFR-binding peptide
VVMDNSLQEVVNNASDYYVIPLPELR

SEQ ID NO: 46445 - protein, 32 aa, Artificial Sequence; identical to SEQ ID NO: 951
  Cyclic GFR-binding peptide
  MOD_RES (1)..(3): Xaa is C or S

SEQ ID NO: 46446 - protein, 24 aa, Artificial Sequence
  Cyclic GFR-binding peptide
DNSLQEVVKENEDYYVMPLPELET

SEQ ID NO: 46447 - protein, 38 aa, Artificial Sequence; identical to SEQ ID NO: 11526
  Cyclic GFR-binding peptide
  MOD_RES (2)..(4)..(36)..(37): Xaa is C or S

SEQ ID NO: 46448 - protein, 32 aa, Artificial Sequence; identical to SEQ ID NO: 11527
  Cyclic GFR-binding peptide
  MOD_RES (1)..(3): Xaa is C or S

SEQ ID NO: 46449 - protein, 27 aa, Artificial Sequence
  Cyclic GFR-binding peptide
  MOD_RES (26)..(27): Xaa is C or S
RYKKLVKPTRGVFYLISIANLDQPVXX

SEQ ID NO: 46450 - protein, 24 aa, Artificial Sequence
  Cyclic GFR-binding peptide
VVMDNSLQEVVKENEDYYLMTLPE

SEQ ID NO: 46451 - protein, 31 aa, Artificial Sequence; identical to SEQ ID NO: 11530
  Cyclic GFR-binding peptide
  MOD_RES (31)..(31): Xaa is C or S

SEQ ID NO: 46452 - protein, 23 aa, Artificial Sequence
  Cyclic GFR-binding peptide
NRYKKLIVNSSDDFYLVSIANLK

SEQ ID NO: 46453 - protein, 20 aa, Artificial Sequence
  Cyclic GFR-binding peptide
RYKKLVVNNASDFYLISIAN

SEQ ID NO: 46454 - protein, 22 aa, Artificial Sequence
  Cyclic GFR-binding peptide
DNSLQEVVKENEDYYVMPLPEL

SEQ ID NO: 46455 - protein, 33 aa, Artificial Sequence; identical to SEQ ID NO: 967
  Cyclic GFR-binding peptide
  MOD_RES (31)..(32): Xaa is C or S

SEQ ID NO: 46456 - protein, 37 aa, Artificial Sequence; identical to SEQ ID NO: 11539
  Cyclic GFR-binding peptide
  MOD_RES (31)..(32): Xaa is C or S

SEQ ID NO: 46457 - protein, 33 aa, Artificial Sequence; identical to SEQ ID NO: 11540
  Cyclic GFR-binding peptide
  MOD_RES (28)..(29): Xaa is C or S

SEQ ID NO: 46458 - protein, 36 aa, Artificial Sequence; identical to SEQ ID NO: 11541
  Cyclic GFR-binding peptide
  MOD_RES (32)..(33): Xaa is C or S

SEQ ID NO: 46459 - protein, 31 aa, Artificial Sequence; identical to SEQ ID NO: 11543
  Cyclic GFR-binding peptide
  MOD_RES (28)..(29): Xaa is C or S

SEQ ID NO: 46460 - protein, 31 aa, Artificial Sequence; identical to SEQ ID NO: 11544
  Cyclic GFR-binding peptide
  MOD_RES (1)..(1): Xaa is C or S

SEQ ID NO: 46461 - protein, 28 aa, Artificial Sequence
  Cyclic GFR-binding peptide
RVVMNEYQKYIVNSSDDIFLVSIPSLQT

SEQ ID NO: 46462 - protein, 28 aa, Artificial Sequence
  Cyclic GFR-binding peptide
  MOD_RES (26)..(27): Xaa is C or S
EYQKYIKPTKGIIFLISIPSLDQSVXXP

SEQ ID NO: 46463 - protein, 34 aa, Artificial Sequence; identical to SEQ ID NO: 11549
  Cyclic GFR-binding peptide
  MOD_RES (1)..(3): Xaa is C or S

SEQ ID NO: 46464 - protein, 33 aa, Artificial Sequence; identical to SEQ ID NO: 11551
  Cyclic GFR-binding peptide
  MOD_RES (29)..(30): Xaa is C or S

SEQ ID NO: 46465 - protein, 35 aa, Artificial Sequence; identical to SEQ ID NO: 11552
  Cyclic GFR-binding peptide
  MOD_RES (29)..(30): Xaa is C or S

SEQ ID NO: 46466 - protein, 26 aa, Artificial Sequence
  Cyclic GFR-binding peptide
MNEYQKYIVNSSDDIFLVSIPSLKTP

SEQ ID NO: 46467 - protein, 29 aa, Artificial Sequence
  Cyclic GFR-binding peptide
RVIMNSLQEVKPKRGVYYLITLPELAQPV

SEQ ID NO: 46468 - protein, 28 aa, Artificial Sequence
  Cyclic GFR-binding peptide
GEVVMDNSLQEVVKENEDYYVMPLPELE

SEQ ID NO: 46469 - protein, 31 aa, Artificial Sequence; identical to SEQ ID NO: 986
  Cyclic GFR-binding peptide
  MOD_RES (31)..(31): Xaa is C or S

SEQ ID NO: 46470 - protein, 31 aa, Artificial Sequence
  Cyclic GFR-binding peptide
  MOD_RES (1)..(3): Xaa is C or S
XKXSKVVMNSLQEVKPTRGVYYLITLPELDQ

SEQ ID NO: 46471 - protein, 30 aa, Artificial Sequence; identical to SEQ ID NO: 11557
  Cyclic GFR-binding peptide
  MOD_RES (29)..(30): Xaa is C or S

SEQ ID NO: 46472 - protein, 34 aa, Artificial Sequence; identical to SEQ ID NO: 11558
  Cyclic GFR-binding peptide
  MOD_RES (32)..(33): Xaa is C or S

SEQ ID NO: 46473 - protein, 31 aa, Artificial Sequence; identical to SEQ ID NO: 988
  Cyclic GFR-binding peptide
  MOD_RES (27)..(28): Xaa is C or S

SEQ ID NO: 46474 - protein, 27 aa, Artificial Sequence
  Cyclic GFR-binding peptide
RVVMNRYKKLIVNSSDDFYLVSIANLK

SEQ ID NO: 46475 - protein, 41 aa, Artificial Sequence; identical to SEQ ID NO: 11562
  Cyclic GFR-binding peptide
  MOD_RES (2)..(4)..(36)..(37): Xaa is C or S

SEQ ID NO: 46476 - protein, 31 aa, Artificial Sequence; identical to SEQ ID NO: 11563
  Cyclic GFR-binding peptide
  MOD_RES (30)..(31): Xaa is C or S

SEQ ID NO: 46477 - protein, 30 aa, Artificial Sequence; identical to SEQ ID NO: 11564
  Cyclic GFR-binding peptide
  MOD_RES (27)..(28): Xaa is C or S

SEQ ID NO: 46478 - protein, 40 aa, Artificial Sequence; identical to SEQ ID NO: 993
  Cyclic GFR-binding peptide
  MOD_RES (2)..(4)..(36)..(37): Xaa is C or S

SEQ ID NO: 46479 - protein, 23 aa, Artificial Sequence
  Cyclic GFR-binding peptide
VMDNSLQEVVNNASDYYVIPLPE

SEQ ID NO: 46480 - protein, 29 aa, Artificial Sequence
  Cyclic GFR-binding peptide
VVMDRYKKLVVNNASDFYLISIANLRTPV

SEQ ID NO: 46481 - protein, 28 aa, Artificial Sequence
  Cyclic GFR-binding peptide
  MOD_RES (28)..(28): Xaa is C or S
IMRYKKLVKPKRGVFYLISIANLAQPVX

SEQ ID NO: 46482 - protein, 33 aa, Artificial Sequence; identical to SEQ ID NO: 998
  Cyclic GFR-binding peptide
  MOD_RES (29)..(30): Xaa is C or S

SEQ ID NO: 46483 - protein, 28 aa, Artificial Sequence
  Cyclic GFR-binding peptide
SKVVMEYQKYVKPTRGVIFLISIPSLDQ

SEQ ID NO: 46484 - protein, 33 aa, Artificial Sequence; identical to SEQ ID NO: 11574
  Cyclic GFR-binding peptide
  MOD_RES (1)..(33): Xaa is C or S

SEQ ID NO: 46485 - protein, 30 aa, Artificial Sequence; identical to SEQ ID NO: 1001
  Cyclic GFR-binding peptide
  MOD_RES (26)..(27): Xaa is C or S

SEQ ID NO: 46486 - protein, 35 aa, Artificial Sequence; identical to SEQ ID NO: 11576
  Cyclic GFR-binding peptide
  MOD_RES (1)..(33)..(34): Xaa is C or S

SEQ ID NO: 46487 - protein, 37 aa, Artificial Sequence; identical to SEQ ID NO: 11577
  Cyclic GFR-binding peptide
  MOD_RES (32)..(33): Xaa is C or S

SEQ ID NO: 46488 - protein, 26 aa, Artificial Sequence
  Cyclic GFR-binding peptide
  MOD_RES (1)..(1): Xaa is C or S
XSKVVMNSLQEVKPTRGVYYLITLPE

SEQ ID NO: 46489 - protein, 31 aa, Artificial Sequence; identical to SEQ ID NO: 11578
  Cyclic GFR-binding peptide
  MOD_RES (28)..(29): Xaa is C or S

SEQ ID NO: 46490 - protein, 28 aa, Artificial Sequence
  Cyclic GFR-binding peptide
VMDEYQKYVVKENEDIFLMSIPSLETPV

SEQ ID NO: 46491 - protein, 38 aa, Artificial Sequence; identical to SEQ ID NO: 11580
  Cyclic GFR-binding peptide
  MOD_RES (1)..(33)..(34): Xaa is C or S

SEQ ID NO: 46492 - protein, 26 aa, Artificial Sequence
  Cyclic GFR-binding peptide
EVVMDNSLQEVVNNASDYYVIPLPEL

SEQ ID NO: 46493 - protein, 31 aa, Artificial Sequence; identical to SEQ ID NO: 11583
  Cyclic GFR-binding peptide
  MOD_RES (1)..(3): Xaa is C or S

SEQ ID NO: 46494 - protein, 37 aa, Artificial Sequence; identical to SEQ ID NO: 11585
  Cyclic GFR-binding peptide
  MOD_RES (1)..(3)..(34)..(35): Xaa is C or S

SEQ ID NO: 46495 - protein, 35 aa, Artificial Sequence; identical to SEQ ID NO: 11586
  Cyclic GFR-binding peptide
  MOD_RES (1)..(32)..(33): Xaa is C or S

SEQ ID NO: 46496 - protein, 33 aa, Artificial Sequence; identical to SEQ ID NO: 11587
  Cyclic GFR-binding peptide
  MOD_RES (28)..(29): Xaa is C or S

SEQ ID NO: 46497 - protein, 34 aa, Artificial Sequence; identical to SEQ ID NO: 11588
  Cyclic GFR-binding peptide
  MOD_RES (31)..(32): Xaa is C or S

SEQ ID NO: 46498 - protein, 30 aa, Artificial Sequence; identical to SEQ ID NO: 11591
  Cyclic GFR-binding peptide

SEQ ID NO: 46499 - protein, 21 aa, Artificial Sequence
  Cyclic GFR-binding peptide
EYQKYVVKDYEDIFLMSIPSL

SEQ ID NO: 46500 - protein, 32 aa, Artificial Sequence; identical to SEQ ID NO: 11594
  Cyclic GFR-binding peptide
  MOD_RES (29)..(30): Xaa is C or S

SEQ ID NO: 46501 - protein, 33 aa, Artificial Sequence; identical to SEQ ID NO: 11595
  Cyclic GFR-binding peptide
  MOD_RES (1)..(3): Xaa is C or S

SEQ ID NO: 46502 - protein, 28 aa, Artificial Sequence
  Cyclic GFR-binding peptide
  MOD_RES (26)..(27): Xaa is C or S
RYKKLVVNNASDFYLISIANLRTPVXXT

SEQ ID NO: 46503 - protein, 21 aa, Artificial Sequence
  Cyclic GFR-binding peptide
EYQKYIKPTKGIIFLISIPSL

SEQ ID NO: 46504 - protein, 34 aa, Artificial Sequence; identical to SEQ ID NO: 11600
  Cyclic GFR-binding peptide
  MOD_RES (1)..(33)..(34): Xaa is C or S

SEQ ID NO: 46505 - protein, 25 aa, Artificial Sequence
  Cyclic GFR-binding peptide
MNSLQEIKPTKGIYYLITLPELDQS

SEQ ID NO: 46506 - protein, 27 aa, Artificial Sequence
  Cyclic GFR-binding peptide
VMNEYQKYIVNSSDDIFLVSIPSLQTP

SEQ ID NO: 46507 - protein, 25 aa, Artificial Sequence
  Cyclic GFR-binding peptide
KVIMRYKKLIKPTKGIFYLISIANL

SEQ ID NO: 46508 - protein, 39 aa, Artificial Sequence
  Cyclic GFR-binding peptide
  MOD_RES (2)..(4)..(35)..(36): Xaa is C or S
SXKXSKVVMNSLQEVKPTRGVYYLITLPELDQPVXXPSA

SEQ ID NO: 46509 - protein, 34 aa, Artificial Sequence; identical to SEQ ID NO: 11605
  Cyclic GFR-binding peptide
  MOD_RES (1)..(3): Xaa is C or S

SEQ ID NO: 46510 - protein, 31 aa, Artificial Sequence
  Cyclic GFR-binding peptide
  MOD_RES (1)..(1): Xaa is C or S
XSKVVMNSLQEVKPTRGVYYLITLPELDQPV

SEQ ID NO: 46511 - protein, 41 aa, Artificial Sequence; identical to SEQ ID NO: 1026
  Cyclic GFR-binding peptide
  MOD_RES (2)..(4)..(36)..(37): Xaa is C or S

SEQ ID NO: 46512 - protein, 31 aa, Artificial Sequence; identical to SEQ ID NO: 11607
  Cyclic GFR-binding peptide
  MOD_RES (30)..(31): Xaa is C or S

SEQ ID NO: 46513 - protein, 28 aa, Artificial Sequence
  Cyclic GFR-binding peptide
  MOD_RES (26)..(27): Xaa is C or S
NSLQEVVKDYEDYYLMTLPELETPVXXA

SEQ ID NO: 46514 - protein, 27 aa, Artificial Sequence
  Cyclic GFR-binding peptide
SKVVMEYQKYVKPTRGVIFLISIPSLD

SEQ ID NO: 46515 - protein, 34 aa, Artificial Sequence; identical to SEQ ID NO: 11612
  Cyclic GFR-binding peptide
  MOD_RES (32)..(32): Xaa is C or S

SEQ ID NO: 46516 - protein, 33 aa, Artificial Sequence; identical to SEQ ID NO: 1028
  Cyclic GFR-binding peptide
  MOD_RES (1)..(33): Xaa is C or S

SEQ ID NO: 46517 - protein, 39 aa, Artificial Sequence; identical to SEQ ID NO: 1029
  Cyclic GFR-binding peptide
  MOD_RES (2)..(4)..(35)..(36): Xaa is C or S

SEQ ID NO: 46518 - protein, 34 aa, Artificial Sequence; identical to SEQ ID NO: 11616
  Cyclic GFR-binding peptide
  MOD_RES (2)..(33)..(34): Xaa is C or S

SEQ ID NO: 46519 - protein, 36 aa, Artificial Sequence; identical to SEQ ID NO: 11620
  Cyclic GFR-binding peptide
  MOD_RES (31)..(31): Xaa is C or S

SEQ ID NO: 46520 - protein, 29 aa, Artificial Sequence
  Cyclic GFR-binding peptide
VVMEEYQKYVVKDYEDIFLMSIPSLETPV

SEQ ID NO: 46521 - protein, 33 aa, Artificial Sequence; identical to SEQ ID NO: 11623
  Cyclic GFR-binding peptide
  MOD_RES (27)..(28): Xaa is C or S

SEQ ID NO: 46522 - protein, 41 aa, Artificial Sequence; identical to SEQ ID NO: 11624
  Cyclic GFR-binding peptide
  MOD_RES (2)..(4)..(36)..(37): Xaa is C or S

SEQ ID NO: 46523 - protein, 30 aa, Artificial Sequence; identical to SEQ ID NO: 11626
  Cyclic GFR-binding peptide
  MOD_RES (1)..(3): Xaa is C or S

SEQ ID NO: 46524 - protein, 34 aa, Artificial Sequence; identical to SEQ ID NO: 11627
  Cyclic GFR-binding peptide
  MOD_RES (1)..(33)..(34): Xaa is C or S

SEQ ID NO: 46525 - protein, 29 aa, Artificial Sequence
  Cyclic GFR-binding peptide
RVVMNNSLQEIVNSSDDYYLVTLPELKTP

SEQ ID NO: 46526 - protein, 28 aa, Artificial Sequence
  Cyclic GFR-binding peptide
VVMEEYQKYVVKDYEDIFLMSIPSLETP

SEQ ID NO: 46527 - protein, 30 aa, Artificial Sequence; identical to SEQ ID NO: 11631
  Cyclic GFR-binding peptide

SEQ ID NO: 46528 - protein, 32 aa, Artificial Sequence; identical to SEQ ID NO: 1052
  Cyclic GFR-binding peptide
  MOD_RES (29)..(29): Xaa is C or S

SEQ ID NO: 46529 - protein, 25 aa, Artificial Sequence
  Cyclic GFR-binding peptide
VMDRYKKLVVKENEDFYLMSIANLE

SEQ ID NO: 46530 - protein, 35 aa, Artificial Sequence; identical to SEQ ID NO: 1056
  Cyclic GFR-binding peptide
  MOD_RES (29)..(30): Xaa is C or S

SEQ ID NO: 46531 - protein, 36 aa, Artificial Sequence; identical to SEQ ID NO: 11635
  Cyclic GFR-binding peptide
  MOD_RES (30)..(31): Xaa is C or S

SEQ ID NO: 46532 - protein, 34 aa, Artificial Sequence
  Cyclic GFR-binding peptide
  MOD_RES (29)..(30): Xaa is C or S
VVMNSLQEVKPTRGVYYLITLPELDQPVXXPSAS

SEQ ID NO: 46533 - protein, 26 aa, Artificial Sequence
  Cyclic GFR-binding peptide
NNSLQEIVNSSDDYYVVPLPELKTPA

SEQ ID NO: 46534 - protein, 28 aa, Artificial Sequence
  Cyclic GFR-binding peptide
  MOD_RES (26)..(27): Xaa is C or S
NSLQEVVKENEDYYLMTLPELETPVXXA

SEQ ID NO: 46535 - protein, 26 aa, Artificial Sequence
  Cyclic GFR-binding peptide
EVVMENSLQEVVKDYEDYYVMPLPEL

SEQ ID NO: 46536 - protein, 28 aa, Artificial Sequence
  Cyclic GFR-binding peptide
SEVVMDRYKKLVVNNASDFYLISIANLR

SEQ ID NO: 46537 - protein, 39 aa, Artificial Sequence; identical to SEQ ID NO: 11641
  Cyclic GFR-binding peptide
  MOD_RES (2)..(34)..(35): Xaa is C or S

SEQ ID NO: 46538 - protein, 35 aa, Artificial Sequence; identical to SEQ ID NO: 11643
  Cyclic GFR-binding peptide
  MOD_RES (31)..(32): Xaa is C or S

SEQ ID NO: 46539 - protein, 35 aa, Artificial Sequence; identical to SEQ ID NO: 11645
  Cyclic GFR-binding peptide
  MOD_RES (1)..(33)..(34): Xaa is C or S

SEQ ID NO: 46540 - protein, 36 aa, Artificial Sequence; identical to SEQ ID NO: 11646
  Cyclic GFR-binding peptide
  MOD_RES (2)..(34)..(35): Xaa is C or S

SEQ ID NO: 46541 - protein, 36 aa, Artificial Sequence; identical to SEQ ID NO: 11647
  Cyclic GFR-binding peptide
  MOD_RES (2)..(34)..(35): Xaa is C or S

SEQ ID NO: 46542 - protein, 24 aa, Artificial Sequence
  Cyclic GFR-binding peptide
NSLQEVKPTRGVYYVIPLPELDQP

SEQ ID NO: 46543 - protein, 33 aa, Artificial Sequence; identical to SEQ ID NO: 11650
  Cyclic GFR-binding peptide
  MOD_RES (27)..(28): Xaa is C or S

SEQ ID NO: 46544 - protein, 30 aa, Artificial Sequence; identical to SEQ ID NO: 11651
  Cyclic GFR-binding peptide
  MOD_RES (28)..(29): Xaa is C or S

SEQ ID NO: 46545 - protein, 34 aa, Artificial Sequence; identical to SEQ ID NO: 11652
  Cyclic GFR-binding peptide
  MOD_RES (1)..(3): Xaa is C or S

SEQ ID NO: 46546 - protein, 27 aa, Artificial Sequence
  Cyclic GFR-binding peptide
  MOD_RES (26)..(27): Xaa is C or S
NSLQEIKPTKGIYYVIPLPELDQSVXX

SEQ ID NO: 46547 - protein, 32 aa, Artificial Sequence; identical to SEQ ID NO: 1079
  Cyclic GFR-binding peptide
  MOD_RES (26)..(27): Xaa is C or S

SEQ ID NO: 46548 - protein, 28 aa, Artificial Sequence
  Cyclic GFR-binding peptide
VVMNNSLQEIVNSSDDYYLVTLPELKTP

SEQ ID NO: 46549 - protein, 39 aa, Artificial Sequence; identical to SEQ ID NO: 11657
  Cyclic GFR-binding peptide
  MOD_RES (1)..(3)..(35)..(36): Xaa is C or S

SEQ ID NO: 46550 - protein, 28 aa, Artificial Sequence
  Cyclic GFR-binding peptide
  MOD_RES (27)..(28): Xaa is C or S
MRYKKLIKPTKGIFYLISIANLDQSVXX

SEQ ID NO: 46551 - protein, 23 aa, Artificial Sequence
  Cyclic GFR-binding peptide
VMNEYQKYIVNSSDDIFLVSIPS

SEQ ID NO: 46552 - protein, 35 aa, Artificial Sequence; identical to SEQ ID NO: 11660
  Cyclic GFR-binding peptide
  MOD_RES (1)..(32)..(33): Xaa is C or S

SEQ ID NO: 46553 - protein, 29 aa, Artificial Sequence
  Cyclic GFR-binding peptide
  MOD_RES (28)..(29): Xaa is C or S
MEEYQKYVVKDYEDIFLMSIPSLETPVXX

SEQ ID NO: 46554 - protein, 35 aa, Artificial Sequence; identical to SEQ ID NO: 11662
  Cyclic GFR-binding peptide
  MOD_RES (1)..(33)..(34): Xaa is C or S

SEQ ID NO: 46555 - protein, 25 aa, Artificial Sequence
  Cyclic GFR-binding peptide
VVMDNSLQEVVKENEDYYVMPLPEL

SEQ ID NO: 46556 - protein, 25 aa, Artificial Sequence
  Cyclic GFR-binding peptide
VMEEYQKYVVKDYEDIFLMSIPSLE

SEQ ID NO: 46557 - protein, 35 aa, Artificial Sequence; identical to SEQ ID NO: 11665
  Cyclic GFR-binding peptide
  MOD_RES (1)..(33)..(34): Xaa is C or S

SEQ ID NO: 46558 - protein, 22 aa, Artificial Sequence
  Cyclic GFR-binding peptide
NSLQEIVNSSDDYYLVTLPELQ

SEQ ID NO: 46559 - protein, 34 aa, Artificial Sequence; identical to SEQ ID NO: 11667
  Cyclic GFR-binding peptide
  MOD_RES (2)..(34): Xaa is C or S

SEQ ID NO: 46560 - protein, 28 aa, Artificial Sequence
  Cyclic GFR-binding peptide
EVVMERYKKLVVKDYEDFYLMSIANLET

SEQ ID NO: 46561 - protein, 32 aa, Artificial Sequence; identical to SEQ ID NO: 11669
  Cyclic GFR-binding peptide
  MOD_RES (1)..(1): Xaa is C or S

SEQ ID NO: 46562 - protein, 32 aa, Artificial Sequence; identical to SEQ ID NO: 11671
  Cyclic GFR-binding peptide
  MOD_RES (2)..(2): Xaa is C or S

SEQ ID NO: 46563 - protein, 31 aa, Artificial Sequence; identical to SEQ ID NO: 11672
  Cyclic GFR-binding peptide
  MOD_RES (26)..(26): Xaa is C or S

SEQ ID NO: 46564 - protein, 36 aa, Artificial Sequence; identical to SEQ ID NO: 11673
  Cyclic GFR-binding peptide
  MOD_RES (2)..(4)..(36): Xaa is C or S

SEQ ID NO: 46565 - protein, 32 aa, Artificial Sequence; identical to SEQ ID NO: 11674
  Cyclic GFR-binding peptide
  MOD_RES (31)..(32): Xaa is C or S

SEQ ID NO: 46566 - protein, 37 aa, Artificial Sequence; identical to SEQ ID NO: 1101
  Cyclic GFR-binding peptide
  MOD_RES (2)..(33)..(34): Xaa is C or S

SEQ ID NO: 46567 - protein, 33 aa, Artificial Sequence; identical to SEQ ID NO: 11676
  Cyclic GFR-binding peptide
  MOD_RES (29)..(29): Xaa is C or S

SEQ ID NO: 46568 - protein, 28 aa, Artificial Sequence
  Cyclic GFR-binding peptide
VVMDNSLQEVVNNASDYYVIPLPELRTP

SEQ ID NO: 46569 - protein, 26 aa, Artificial Sequence
  Cyclic GFR-binding peptide
  MOD_RES (1)..(1): Xaa is C or S
XSKVVMRYKKLVKPTRGVFYLISIAN

SEQ ID NO: 46570 - protein, 41 aa, Artificial Sequence; identical to SEQ ID NO: 1105
  Cyclic GFR-binding peptide
  MOD_RES (2)..(4)..(36)..(37): Xaa is C or S

SEQ ID NO: 46571 - protein, 24 aa, Artificial Sequence
  Cyclic GFR-binding peptide
VIMRYKKLIKPTKGIFYLISIANL

SEQ ID NO: 46572 - protein, 39 aa, Artificial Sequence; identical to SEQ ID NO: 11683
  Cyclic GFR-binding peptide
  MOD_RES (2)..(33)..(34): Xaa is C or S

SEQ ID NO: 46573 - protein, 34 aa, Artificial Sequence; identical to SEQ ID NO: 11684
  Cyclic GFR-binding peptide
  MOD_RES (28)..(29): Xaa is C or S

SEQ ID NO: 46574 - protein, 31 aa, Artificial Sequence; identical to SEQ ID NO: 11686
  Cyclic GFR-binding peptide
  MOD_RES (31)..(31): Xaa is C or S

SEQ ID NO: 46575 - protein, 35 aa, Artificial Sequence; identical to SEQ ID NO: 11687
  Cyclic GFR-binding peptide
  MOD_RES (1)..(33)..(34): Xaa is C or S

SEQ ID NO: 46576 - protein, 39 aa, Artificial Sequence; identical to SEQ ID NO: 11688
  Cyclic GFR-binding peptide
  MOD_RES (1)..(3)..(35): Xaa is C or S

SEQ ID NO: 46577 - protein, 41 aa, Artificial Sequence; identical to SEQ ID NO: 11690
  Cyclic GFR-binding peptide
  MOD_RES (2)..(4)..(36): Xaa is C or S

SEQ ID NO: 46578 - protein, 36 aa, Artificial Sequence; identical to SEQ ID NO: 11691
  Cyclic GFR-binding peptide
  MOD_RES (2)..(34)..(35): Xaa is C or S

SEQ ID NO: 46579 - protein, 36 aa, Artificial Sequence; identical to SEQ ID NO: 11694
  Cyclic GFR-binding peptide
  MOD_RES (31)..(32): Xaa is C or S

SEQ ID NO: 46580 - protein, 29 aa, Artificial Sequence
  Cyclic GFR-binding peptide
  MOD_RES (2)..(2): Xaa is C or S
KXSKVVMEYQKYVKPTRGVIFLISIPSLD

SEQ ID NO: 46581 - protein, 26 aa, Artificial Sequence
  Cyclic GFR-binding peptide
IMNSLQEIKPTKGIYYVIPLPELDQS

SEQ ID NO: 46582 - protein, 36 aa, Artificial Sequence; identical to SEQ ID NO: 1117
  Cyclic GFR-binding peptide
  MOD_RES (32)..(33): Xaa is C or S

SEQ ID NO: 46583 - protein, 34 aa, Artificial Sequence; identical to SEQ ID NO: 1122
  Cyclic GFR-binding peptide
  MOD_RES (2)..(4): Xaa is C or S

SEQ ID NO: 46584 - protein, 29 aa, Artificial Sequence
  Cyclic GFR-binding peptide
RVVMNNSLQEIVNSSDDYYVVPLPELKTP

SEQ ID NO: 46585 - protein, 30 aa, Artificial Sequence; identical to SEQ ID NO: 11701
  Cyclic GFR-binding peptide
  MOD_RES (27)..(27): Xaa is C or S

SEQ ID NO: 46586 - protein, 33 aa, Artificial Sequence; identical to SEQ ID NO: 11702
  Cyclic GFR-binding peptide
  MOD_RES (27)..(28): Xaa is C or S

SEQ ID NO: 46587 - protein, 27 aa, Artificial Sequence
  Cyclic GFR-binding peptide
  MOD_RES (2)..(2): Xaa is C or S
KXSKVIMNSLQEIKPTKGIYYVIPLPE

SEQ ID NO: 46588 - protein, 29 aa, Artificial Sequence
  Cyclic GFR-binding peptide
  MOD_RES (27)..(28): Xaa is C or S
NEYQKYIVNSSDDIFLVSIPSLKTPAXXP

SEQ ID NO: 46589 - protein, 25 aa, Artificial Sequence
  Cyclic GFR-binding peptide
VMNSLQEVKPTRGVYYVIPLPELDQ

SEQ ID NO: 46590 - protein, 25 aa, Artificial Sequence
  Cyclic GFR-binding peptide
RVVMNRYKKLIVNSSDDFYLVSIAN

SEQ ID NO: 46591 - protein, 28 aa, Artificial Sequence
  Cyclic GFR-binding peptide
  MOD_RES (1)..(1): Xaa is C or S
XARVVMNNSLQEIVNSSDDYYLVTLPEL

SEQ ID NO: 46592 - protein, 24 aa, Artificial Sequence
  Cyclic GFR-binding peptide
VMEEYQKYVVKDYEDIFLMSIPSL

SEQ ID NO: 46593 - protein, 23 aa, Artificial Sequence
  Cyclic GFR-binding peptide
EYQKYIVNSSDDIFLVSIPSLKT

SEQ ID NO: 46594 - protein, 29 aa, Artificial Sequence
  Cyclic GFR-binding peptide
  MOD_RES (28)..(29): Xaa is C or S
IMRYKKLVKPKRGVFYLISIANLAQPVXX

SEQ ID NO: 46595 - protein, 35 aa, Artificial Sequence; identical to SEQ ID NO: 1142
  Cyclic GFR-binding peptide
  MOD_RES (1)..(33)..(34): Xaa is C or S

SEQ ID NO: 46596 - protein, 28 aa, Artificial Sequence
  Cyclic GFR-binding peptide
  MOD_RES (27)..(28): Xaa is C or S
DNSLQEVVKENEDYYLMTLPELETPVXX

SEQ ID NO: 46597 - protein, 27 aa, Artificial Sequence
  Cyclic GFR-binding peptide
KVIMRYKKLIKPTKGIFYLISIANLDQ

SEQ ID NO: 46598 - protein, 35 aa, Artificial Sequence; identical to SEQ ID NO: 1144
  Cyclic GFR-binding peptide
  MOD_RES (31)..(31): Xaa is C or S

SEQ ID NO: 46599 - protein, 35 aa, Artificial Sequence
  Cyclic GFR-binding peptide
  MOD_RES (2)..(33)..(34): Xaa is C or S
KXSKVVMNSLQEVKPTRGVYYLITLPELDQPVXXP

SEQ ID NO: 46600 - protein, 40 aa, Artificial Sequence; identical to SEQ ID NO: 11720
  Cyclic GFR-binding peptide
  MOD_RES (1)..(3)..(35): Xaa is C or S

SEQ ID NO: 46601 - protein, 31 aa, Artificial Sequence; identical to SEQ ID NO: 11721
  Cyclic GFR-binding peptide
  MOD_RES (1)..(1): Xaa is C or S

SEQ ID NO: 46602 - protein, 36 aa, Artificial Sequence; identical to SEQ ID NO: 1148
  Cyclic GFR-binding peptide
  MOD_RES (30)..(31): Xaa is C or S

SEQ ID NO: 46603 - protein, 25 aa, Artificial Sequence
  Cyclic GFR-binding peptide
VMNNSLQEIVNSSDDYYVVPLPELQ

SEQ ID NO: 46604 - protein, 30 aa, Artificial Sequence; identical to SEQ ID NO: 11725
  Cyclic GFR-binding peptide
  MOD_RES (30)..(30): Xaa is C or S

SEQ ID NO: 46605 - protein, 36 aa, Artificial Sequence; identical to SEQ ID NO: 11727
  Cyclic GFR-binding peptide
  MOD_RES (2)..(4)..(35)..(36): Xaa is C or S

SEQ ID NO: 46606 - protein, 33 aa, Artificial Sequence; identical to SEQ ID NO: 11729
  Cyclic GFR-binding peptide
  MOD_RES (1)..(3): Xaa is C or S

SEQ ID NO: 46607 - protein, 33 aa, Artificial Sequence; identical to SEQ ID NO: 11730
  Cyclic GFR-binding peptide
  MOD_RES (1)..(3): Xaa is C or S

SEQ ID NO: 46608 - protein, 31 aa, Artificial Sequence; identical to SEQ ID NO: 11731
  Cyclic GFR-binding peptide
  MOD_RES (30)..(31): Xaa is C or S

SEQ ID NO: 46609 - protein, 36 aa, Artificial Sequence; identical to SEQ ID NO: 11732
  Cyclic GFR-binding peptide
  MOD_RES (31)..(32): Xaa is C or S

SEQ ID NO: 46610 - protein, 25 aa, Artificial Sequence
  Cyclic GFR-binding peptide
EYQKYVKPKRGVIFLISIPSLAQPV

SEQ ID NO: 46611 - protein, 35 aa, Artificial Sequence; identical to SEQ ID NO: 11736
  Cyclic GFR-binding peptide
  MOD_RES (32)..(33): Xaa is C or S

SEQ ID NO: 46612 - protein, 26 aa, Artificial Sequence
  Cyclic GFR-binding peptide
KVVMNSLQEVKPTRGVYYLITLPELD

SEQ ID NO: 46613 - protein, 33 aa, Artificial Sequence; identical to SEQ ID NO: 1160
  Cyclic GFR-binding peptide
  MOD_RES (27)..(28): Xaa is C or S

SEQ ID NO: 46614 - protein, 33 aa, Artificial Sequence; identical to SEQ ID NO: 11739
  Cyclic GFR-binding peptide
  MOD_RES (31)..(32): Xaa is C or S

SEQ ID NO: 46615 - protein, 29 aa, Artificial Sequence
  Cyclic GFR-binding peptide
  MOD_RES (28)..(29): Xaa is C or S
MDNSLQEVVNNASDYYVIPLPELRTPVXX

SEQ ID NO: 46616 - protein, 34 aa, Artificial Sequence; identical to SEQ ID NO: 11742
  Cyclic GFR-binding peptide
  MOD_RES (31)..(32): Xaa is C or S

SEQ ID NO: 46617 - protein, 27 aa, Artificial Sequence
  Cyclic GFR-binding peptide
  MOD_RES (1)..(1): Xaa is C or S
XARVVMNEYQKYIVNSSDDIFLVSIPS

SEQ ID NO: 46618 - protein, 38 aa, Artificial Sequence; identical to SEQ ID NO: 11744
  Cyclic GFR-binding peptide
  MOD_RES (1)..(32)..(33): Xaa is C or S

SEQ ID NO: 46619 - protein, 32 aa, Artificial Sequence; identical to SEQ ID NO: 1165
  Cyclic GFR-binding peptide
  MOD_RES (1)..(3): Xaa is C or S

SEQ ID NO: 46620 - protein, 33 aa, Artificial Sequence; identical to SEQ ID NO: 11746
  Cyclic GFR-binding peptide
  MOD_RES (27)..(28): Xaa is C or S

SEQ ID NO: 46621 - protein, 34 aa, Artificial Sequence; identical to SEQ ID NO: 11747
  Cyclic GFR-binding peptide
  MOD_RES (28)..(29): Xaa is C or S

SEQ ID NO: 46622 - protein, 22 aa, Artificial Sequence
  Cyclic GFR-binding peptide
NSLQEIKPTKGIYYVIPLPELD

SEQ ID NO: 46623 - protein, 37 aa, Artificial Sequence; identical to SEQ ID NO: 11754
  Cyclic GFR-binding peptide
  MOD_RES (31)..(32): Xaa is C or S

SEQ ID NO: 46624 - protein, 27 aa, Artificial Sequence
  Cyclic GFR-binding peptide
GEVVMDRYKKLVVKENEDFYLMSIANL

SEQ ID NO: 46625 - protein, 27 aa, Artificial Sequence
  Cyclic GFR-binding peptide
  MOD_RES (27)..(27): Xaa is C or S
DRYKKLVVKENEDFYLMSIANLETPVX

SEQ ID NO: 46626 - protein, 35 aa, Artificial Sequence; identical to SEQ ID NO: 11761
  Cyclic GFR-binding peptide
  MOD_RES (29)..(30): Xaa is C or S

SEQ ID NO: 46627 - protein, 26 aa, Artificial Sequence
  Cyclic GFR-binding peptide
EVVMENSLQEVVKDYEDYYLMTLPEL

SEQ ID NO: 46628 - protein, 30 aa, Artificial Sequence; identical to SEQ ID NO: 11763
  Cyclic GFR-binding peptide

SEQ ID NO: 46629 - protein, 28 aa, Artificial Sequence
  Cyclic GFR-binding peptide
VIMNSLQEIKPTKGIYYLITLPELDQSV

SEQ ID NO: 46630 - protein, 35 aa, Artificial Sequence; identical to SEQ ID NO: 11765
  Cyclic GFR-binding peptide
  MOD_RES (30)..(31): Xaa is C or S

SEQ ID NO: 46631 - protein, 31 aa, Artificial Sequence; identical to SEQ ID NO: 11766
  Cyclic GFR-binding peptide
  MOD_RES (26)..(27): Xaa is C or S

SEQ ID NO: 46632 - protein, 26 aa, Artificial Sequence
  Cyclic GFR-binding peptide
DRYKKLVVNNASDFYLISIANLRTPV

SEQ ID NO: 46633 - protein, 37 aa, Artificial Sequence; identical to SEQ ID NO: 11768
  Cyclic GFR-binding peptide
  MOD_RES (2)..(4)..(36)..(37): Xaa is C or S

SEQ ID NO: 46634 - protein, 38 aa, Artificial Sequence; identical to SEQ ID NO: 11770
  Cyclic GFR-binding peptide
  MOD_RES (1)..(33)..(34): Xaa is C or S

SEQ ID NO: 46635 - protein, 37 aa, Artificial Sequence; identical to SEQ ID NO: 1197
  Cyclic GFR-binding peptide
  MOD_RES (1)..(3)..(35)..(36): Xaa is C or S

SEQ ID NO: 46636 - protein, 33 aa, Artificial Sequence; identical to SEQ ID NO: 11772
  Cyclic GFR-binding peptide
  MOD_RES (31)..(32): Xaa is C or S

SEQ ID NO: 46637 - protein, 32 aa, Artificial Sequence; identical to SEQ ID NO: 11773
  Cyclic GFR-binding peptide
  MOD_RES (2)..(2): Xaa is C or S

SEQ ID NO: 46638 - protein, 28 aa, Artificial Sequence
  Cyclic GFR-binding peptide
  MOD_RES (26)..(27): Xaa is C or S
NSLQEIKPTKGIYYLITLPELDQSVXXP

SEQ ID NO: 46639 - protein, 28 aa, Artificial Sequence
  Cyclic GFR-binding peptide
VMDNSLQEVVKENEDYYVMPLPELETPV

SEQ ID NO: 46640 - protein, 28 aa, Artificial Sequence
  Cyclic GFR-binding peptide
  MOD_RES (2)..(2): Xaa is C or S
GXGEVVMDRYKKLVVKENEDFYLMSIAN

SEQ ID NO: 46641 - protein, 38 aa, Artificial Sequence; identical to SEQ ID NO: 11777
  Cyclic GFR-binding peptide
  MOD_RES (1)..(3)..(34)..(35): Xaa is C or S

SEQ ID NO: 46642 - protein, 26 aa, Artificial Sequence
  Cyclic GFR-binding peptide
VIMEYQKYIKPTKGIIFLISIPSLDQ

SEQ ID NO: 46643 - protein, 34 aa, Artificial Sequence; identical to SEQ ID NO: 11780
  Cyclic GFR-binding peptide
  MOD_RES (1)..(3): Xaa is C or S

SEQ ID NO: 46644 - protein, 33 aa, Artificial Sequence; identical to SEQ ID NO: 11781
  Cyclic GFR-binding peptide
  MOD_RES (28)..(29): Xaa is C or S

SEQ ID NO: 46645 - protein, 33 aa, Artificial Sequence; identical to SEQ ID NO: 11782
  Cyclic GFR-binding peptide
  MOD_RES (30)..(31): Xaa is C or S

SEQ ID NO: 46646 - protein, 34 aa, Artificial Sequence; identical to SEQ ID NO: 11783
  Cyclic GFR-binding peptide
  MOD_RES (30)..(31): Xaa is C or S

SEQ ID NO: 46647 - protein, 35 aa, Artificial Sequence; identical to SEQ ID NO: 11786
  Cyclic GFR-binding peptide
  MOD_RES (2)..(4)..(35): Xaa is C or S

SEQ ID NO: 46648 - protein, 30 aa, Artificial Sequence; identical to SEQ ID NO: 1215
  Cyclic GFR-binding peptide
  MOD_RES (26)..(26): Xaa is C or S

SEQ ID NO: 46649 - protein, 36 aa, Artificial Sequence; identical to SEQ ID NO: 11789
  Cyclic GFR-binding peptide
  MOD_RES (1)..(32)..(33): Xaa is C or S

SEQ ID NO: 46650 - protein, 30 aa, Artificial Sequence; identical to SEQ ID NO: 11790
  Cyclic GFR-binding peptide
  MOD_RES (30)..(30): Xaa is C or S

SEQ ID NO: 46651 - protein, 35 aa, Artificial Sequence; identical to SEQ ID NO: 11792
  Cyclic GFR-binding peptide
  MOD_RES (29)..(30): Xaa is C or S

SEQ ID NO: 46652 - protein, 40 aa, Artificial Sequence; identical to SEQ ID NO: 11793
  Cyclic GFR-binding peptide
  MOD_RES (1)..(3)..(35)..(36): Xaa is C or S

SEQ ID NO: 46653 - protein, 30 aa, Artificial Sequence; identical to SEQ ID NO: 1220
  Cyclic GFR-binding peptide
  MOD_RES (30)..(30): Xaa is C or S

SEQ ID NO: 46654 - protein, 40 aa, Artificial Sequence; identical to SEQ ID NO: 11798
  Cyclic GFR-binding peptide
  MOD_RES (2)..(4)..(36)..(37): Xaa is C or S

SEQ ID NO: 46655 - protein, 30 aa, Artificial Sequence; identical to SEQ ID NO: 11799
  Cyclic GFR-binding peptide
  MOD_RES (28)..(29): Xaa is C or S

SEQ ID NO: 46656 - protein, 31 aa, Artificial Sequence; identical to SEQ ID NO: 11800
  Cyclic GFR-binding peptide
  MOD_RES (1)..(3): Xaa is C or S

SEQ ID NO: 46657 - protein, 33 aa, Artificial Sequence; identical to SEQ ID NO: 1226
  Cyclic GFR-binding peptide
  MOD_RES (30)..(31): Xaa is C or S

SEQ ID NO: 46658 - protein, 31 aa, Artificial Sequence; identical to SEQ ID NO: 1231
  Cyclic GFR-binding peptide
  MOD_RES (31)..(31): Xaa is C or S

SEQ ID NO: 46659 - protein, 32 aa, Artificial Sequence; identical to SEQ ID NO: 11806
  Cyclic GFR-binding peptide
  MOD_RES (26)..(26): Xaa is C or S

SEQ ID NO: 46660 - protein, 24 aa, Artificial Sequence
  Cyclic GFR-binding peptide
IMNSLQEIKPTKGIYYVIPLPELD

SEQ ID NO: 46661 - protein, 28 aa, Artificial Sequence
  Cyclic GFR-binding peptide
  MOD_RES (26)..(27): Xaa is C or S
NSLQEIVNSSDDYYVVPLPELKTPAXXP

SEQ ID NO: 46662 - protein, 40 aa, Artificial Sequence
  Cyclic GFR-binding peptide
  MOD_RES (1)..(3)..(34)..(35): Xaa is C or S
XKXSKVVMNSLQEVKPTRGVYYLITLPELDQPVXXPSASA

SEQ ID NO: 46663 - protein, 25 aa, Artificial Sequence
  Cyclic GFR-binding peptide
EVVMDRYKKLVVNNASDFYLISIAN

SEQ ID NO: 46664 - protein, 35 aa, Artificial Sequence; identical to SEQ ID NO: 11813
  Cyclic GFR-binding peptide
  MOD_RES (1)..(3)..(35): Xaa is C or S

SEQ ID NO: 46665 - protein, 30 aa, Artificial Sequence; identical to SEQ ID NO: 11814
  Cyclic GFR-binding peptide
  MOD_RES (27)..(27): Xaa is C or S

SEQ ID NO: 46666 - protein, 29 aa, Artificial Sequence
  Cyclic GFR-binding peptide
  MOD_RES (26)..(27): Xaa is C or S
NSLQEIVNSSDDYYVVPLPELQTPAXXPK

SEQ ID NO: 46667 - protein, 27 aa, Artificial Sequence
  Cyclic GFR-binding peptide
KVIMNSLQEIKPTKGIYYLITLPELDQ

SEQ ID NO: 46668 - protein, 35 aa, Artificial Sequence; identical to SEQ ID NO: 11819
  Cyclic GFR-binding peptide
  MOD_RES (30)..(30): Xaa is C or S

SEQ ID NO: 46669 - protein, 37 aa, Artificial Sequence; identical to SEQ ID NO: 1243
  Cyclic GFR-binding peptide
  MOD_RES (31)..(32): Xaa is C or S

SEQ ID NO: 46670 - protein, 36 aa, Artificial Sequence; identical to SEQ ID NO: 11821
  Cyclic GFR-binding peptide
  MOD_RES (1)..(3)..(35): Xaa is C or S

SEQ ID NO: 46671 - protein, 33 aa, Artificial Sequence; identical to SEQ ID NO: 11824
  Cyclic GFR-binding peptide
  MOD_RES (1)..(3): Xaa is C or S

SEQ ID NO: 46672 - protein, 32 aa, Artificial Sequence; identical to SEQ ID NO: 11825
  Cyclic GFR-binding peptide
  MOD_RES (2)..(2): Xaa is C or S

SEQ ID NO: 46673 - protein, 32 aa, Artificial Sequence; identical to SEQ ID NO: 11826
  Cyclic GFR-binding peptide
  MOD_RES (29)..(30): Xaa is C or S

SEQ ID NO: 46674 - protein, 33 aa, Artificial Sequence
  Cyclic GFR-binding peptide
  MOD_RES (28)..(29): Xaa is C or S
VMNSLQEVKPTRGVYYLITLPELDQPVXXPSAS

SEQ ID NO: 46675 - protein, 31 aa, Artificial Sequence
  Cyclic GFR-binding peptide
  MOD_RES (30)..(31): Xaa is C or S
KVVMNSLQEVKPTRGVYYLITLPELDQPVXX

SEQ ID NO: 46676 - protein, 36 aa, Artificial Sequence; identical to SEQ ID NO: 11828
  Cyclic GFR-binding peptide
  MOD_RES (2)..(34)..(35): Xaa is C or S

SEQ ID NO: 46677 - protein, 30 aa, Artificial Sequence; identical to SEQ ID NO: 11831
  Cyclic GFR-binding peptide
  MOD_RES (28)..(29): Xaa is C or S

SEQ ID NO: 46678 - protein, 23 aa, Artificial Sequence
  Cyclic GFR-binding peptide
NSLQEVVNNASDYYVIPLPELRT

SEQ ID NO: 46679 - protein, 24 aa, Artificial Sequence
  Cyclic GFR-binding peptide
EYQKYIVNSSDDIFLVSIPSLKTP

SEQ ID NO: 46680 - protein, 35 aa, Artificial Sequence; identical to SEQ ID NO: 1258
  Cyclic GFR-binding peptide
  MOD_RES (2)..(4)..(35): Xaa is C or S

SEQ ID NO: 46681 - protein, 28 aa, Artificial Sequence
  Cyclic GFR-binding peptide
  MOD_RES (27)..(28): Xaa is C or S
MRYKKLVKPTRGVFYLISIANLDQPVXX

SEQ ID NO: 46682 - protein, 20 aa, Artificial Sequence
  Cyclic GFR-binding peptide
NSLQEVVNNASDYYVIPLPE

SEQ ID NO: 46683 - protein, 34 aa, Artificial Sequence; identical to SEQ ID NO: 11840
  Cyclic GFR-binding peptide
  MOD_RES (28)..(29): Xaa is C or S

SEQ ID NO: 46684 - protein, 29 aa, Artificial Sequence
  Cyclic GFR-binding peptide
  MOD_RES (1)..(1): Xaa is C or S
XSKVIMNSLQEIKPTKGIYYLITLPELDQ

SEQ ID NO: 46685 - protein, 37 aa, Artificial Sequence; identical to SEQ ID NO: 11843
  Cyclic GFR-binding peptide
  MOD_RES (31)..(32): Xaa is C or S

SEQ ID NO: 46686 - protein, 35 aa, Artificial Sequence; identical to SEQ ID NO: 11844
  Cyclic GFR-binding peptide
  MOD_RES (2)..(4)..(35): Xaa is C or S

SEQ ID NO: 46687 - protein, 21 aa, Artificial Sequence
  Cyclic GFR-binding peptide
DNSLQEVVKENEDYYLMTLPE

SEQ ID NO: 46688 - protein, 35 aa, Artificial Sequence; identical to SEQ ID NO: 11846
  Cyclic GFR-binding peptide
  MOD_RES (31)..(32): Xaa is C or S

SEQ ID NO: 46689 - protein, 28 aa, Artificial Sequence
  Cyclic GFR-binding peptide
VVMNSLQEVKPTRGVYYVIPLPELDQPV

SEQ ID NO: 46690 - protein, 29 aa, Artificial Sequence
  Cyclic GFR-binding peptide
  MOD_RES (27)..(28): Xaa is C or S
NNSLQEIVNSSDDYYVVPLPELKTPAXXP

SEQ ID NO: 46691 - protein, 34 aa, Artificial Sequence; identical to SEQ ID NO: 11851
  Cyclic GFR-binding peptide
  MOD_RES (30)..(31): Xaa is C or S

SEQ ID NO: 46692 - protein, 38 aa, Artificial Sequence; identical to SEQ ID NO: 11856
  Cyclic GFR-binding peptide
  MOD_RES (1)..(3)..(34)..(35): Xaa is C or S

SEQ ID NO: 46693 - protein, 33 aa, Artificial Sequence; identical to SEQ ID NO: 11857
  Cyclic GFR-binding peptide
  MOD_RES (31)..(32): Xaa is C or S

SEQ ID NO: 46694 - protein, 31 aa, Artificial Sequence; identical to SEQ ID NO: 11860
  Cyclic GFR-binding peptide
  MOD_RES (29)..(30): Xaa is C or S

SEQ ID NO: 46695 - protein, 30 aa, Artificial Sequence; identical to SEQ ID NO: 11863
  Cyclic GFR-binding peptide
  MOD_RES (1)..(3): Xaa is C or S

SEQ ID NO: 46696 - protein, 34 aa, Artificial Sequence; identical to SEQ ID NO: 11864
  Cyclic GFR-binding peptide
  MOD_RES (1)..(3)..(34): Xaa is C or S

SEQ ID NO: 46697 - protein, 39 aa, Artificial Sequence; identical to SEQ ID NO: 11865
  Cyclic GFR-binding peptide
  MOD_RES (2)..(4)..(36)..(37): Xaa is C or S

SEQ ID NO: 46698 - protein, 24 aa, Artificial Sequence
  Cyclic GFR-binding peptide
MNNSLQEIVNSSDDYYVVPLPELQ

SEQ ID NO: 46699 - protein, 32 aa, Artificial Sequence; identical to SEQ ID NO: 11868
  Cyclic GFR-binding peptide
  MOD_RES (28)..(29): Xaa is C or S

SEQ ID NO: 46700 - protein, 28 aa, Artificial Sequence
  Cyclic GFR-binding peptide
  MOD_RES (2)..(2): Xaa is C or S
KXSRVIMNSLQEVKPKRGVYYLITLPEL

SEQ ID NO: 46701 - protein, 32 aa, Artificial Sequence; identical to SEQ ID NO: 11870
  Cyclic GFR-binding peptide
  MOD_RES (26)..(27): Xaa is C or S

SEQ ID NO: 46702 - protein, 26 aa, Artificial Sequence
  Cyclic GFR-binding peptide
SEVVMDNSLQEVVNNASDYYVIPLPE

SEQ ID NO: 46703 - protein, 38 aa, Artificial Sequence; identical to SEQ ID NO: 11873
  Cyclic GFR-binding peptide
  MOD_RES (32)..(33): Xaa is C or S

SEQ ID NO: 46704 - protein, 29 aa, Artificial Sequence
  Cyclic GFR-binding peptide
  MOD_RES (2)..(2): Xaa is C or S
GXGEVVMDRYKKLVVKENEDFYLMSIANL

SEQ ID NO: 46705 - protein, 31 aa, Artificial Sequence; identical to SEQ ID NO: 11875
  Cyclic GFR-binding peptide

SEQ ID NO: 46706 - protein, 27 aa, Artificial Sequence
  Cyclic GFR-binding peptide
MNNSLQEIVNSSDDYYVVPLPELQTPA

SEQ ID NO: 46707 - protein, 41 aa, Artificial Sequence; identical to SEQ ID NO: 11877
  Cyclic GFR-binding peptide
  MOD_RES (2)..(4)..(36)..(37): Xaa is C or S

SEQ ID NO: 46708 - protein, 35 aa, Artificial Sequence; identical to SEQ ID NO: 11879
  Cyclic GFR-binding peptide
  MOD_RES (32)..(33): Xaa is C or S

SEQ ID NO: 46709 - protein, 31 aa, Artificial Sequence; identical to SEQ ID NO: 11880
  Cyclic GFR-binding peptide
  MOD_RES (2)..(2): Xaa is C or S

SEQ ID NO: 46710 - protein, 31 aa, Artificial Sequence; identical to SEQ ID NO: 11882
  Cyclic GFR-binding peptide
  MOD_RES (31)..(31): Xaa is C or S

SEQ ID NO: 46711 - protein, 40 aa, Artificial Sequence; identical to SEQ ID NO: 1310
  Cyclic GFR-binding peptide
  MOD_RES (2)..(34): Xaa is C or S

SEQ ID NO: 46712 - protein, 21 aa, Artificial Sequence
  Cyclic GFR-binding peptide
DRYKKLVVKENEDFYLMSIAN

SEQ ID NO: 46713 - protein, 29 aa, Artificial Sequence
  Cyclic GFR-binding peptide
  MOD_RES (26)..(27): Xaa is C or S
EYQKYVKPTRGVIFLISIPSLDQPVXXPS

SEQ ID NO: 46714 - protein, 30 aa, Artificial Sequence; identical to SEQ ID NO: 11887
  Cyclic GFR-binding peptide
  MOD_RES (26)..(27): Xaa is C or S

SEQ ID NO: 46715 - protein, 25 aa, Artificial Sequence
  Cyclic GFR-binding peptide
MDNSLQEVVNNASDYYLITLPELRT

SEQ ID NO: 46716 - protein, 37 aa, Artificial Sequence; identical to SEQ ID NO: 1313
  Cyclic GFR-binding peptide
  MOD_RES (2)..(4)..(36)..(37): Xaa is C or S

SEQ ID NO: 46717 - protein, 28 aa, Artificial Sequence
  Cyclic GFR-binding peptide
SRVVMNNSLQEIVNSSDDYYVVPLPELK

SEQ ID NO: 46718 - protein, 34 aa, Artificial Sequence; identical to SEQ ID NO: 11892
  Cyclic GFR-binding peptide
  MOD_RES (1)..(3)..(34): Xaa is C or S

SEQ ID NO: 46719 - protein, 22 aa, Artificial Sequence
  Cyclic GFR-binding peptide
NSLQEVVNNASDYYLITLPELR

SEQ ID NO: 46720 - protein, 31 aa, Artificial Sequence; identical to SEQ ID NO: 11894
  Cyclic GFR-binding peptide
  MOD_RES (2)..(2): Xaa is C or S

SEQ ID NO: 46721 - protein, 30 aa, Artificial Sequence; identical to SEQ ID NO: 1320
  Cyclic GFR-binding peptide
  MOD_RES (27)..(28): Xaa is C or S

SEQ ID NO: 46722 - protein, 24 aa, Artificial Sequence
  Cyclic GFR-binding peptide
MERYKKLVVKDYEDFYLMSIANLE

SEQ ID NO: 46723 - protein, 31 aa, Artificial Sequence; identical to SEQ ID NO: 11900
  Cyclic GFR-binding peptide
  MOD_RES (30)..(31): Xaa is C or S

SEQ ID NO: 46724 - protein, 25 aa, Artificial Sequence
  Cyclic GFR-binding peptide
RVIMNSLQEVKPKRGVYYLITLPEL

SEQ ID NO: 46725 - protein, 41 aa, Artificial Sequence; identical to SEQ ID NO: 11902
  Cyclic GFR-binding peptide
  MOD_RES (2)..(4)..(36)..(37): Xaa is C or S

SEQ ID NO: 46726 - protein, 26 aa, Artificial Sequence
  Cyclic GFR-binding peptide
VVMDRYKKLVVNNASDFYLISIANLR

SEQ ID NO: 46727 - protein, 29 aa, Artificial Sequence
  Cyclic GFR-binding peptide
  MOD_RES (1)..(1): Xaa is C or S
XSKVVMNSLQEVKPTRGVYYLITLPELDQ

SEQ ID NO: 46728 - protein, 35 aa, Artificial Sequence; identical to SEQ ID NO: 11905
  Cyclic GFR-binding peptide
  MOD_RES (1)..(32)..(33): Xaa is C or S

SEQ ID NO: 46729 - protein, 28 aa, Artificial Sequence
  Cyclic GFR-binding peptide
  MOD_RES (1)..(1): Xaa is C or S
XSRVIMNSLQEVKPKRGVYYLITLPELA

SEQ ID NO: 46730 - protein, 28 aa, Artificial Sequence
  Cyclic GFR-binding peptide
  MOD_RES (1)..(1): Xaa is C or S
XGEVVMDRYKKLVVKENEDFYLMSIANL

SEQ ID NO: 46731 - protein, 29 aa, Artificial Sequence
  Cyclic GFR-binding peptide
  MOD_RES (1)..(1): Xaa is C or S
XSKVVMNSLQEVKPTRGVYYVIPLPELDQ

SEQ ID NO: 46732 - protein, 30 aa, Artificial Sequence; identical to SEQ ID NO: 1334
  Cyclic GFR-binding peptide

SEQ ID NO: 46733 - protein, 22 aa, Artificial Sequence
  Cyclic GFR-binding peptide
IMNSLQEIKPTKGIYYVIPLPE

SEQ ID NO: 46734 - protein, 28 aa, Artificial Sequence
  Cyclic GFR-binding peptide
RVVMNNSLQEIVNSSDDYYLVTLPELKT

SEQ ID NO: 46735 - protein, 25 aa, Artificial Sequence
  Cyclic GFR-binding peptide
RYKKLVVKENEDFYLMSIANLETPV

SEQ ID NO: 46736 - protein, 30 aa, Artificial Sequence; identical to SEQ ID NO: 11918
  Cyclic GFR-binding peptide
  MOD_RES (1)..(1): Xaa is C or S

SEQ ID NO: 46737 - protein, 30 aa, Artificial Sequence; identical to SEQ ID NO: 1349
  Cyclic GFR-binding peptide
  MOD_RES (29)..(30): Xaa is C or S

SEQ ID NO: 46738 - protein, 34 aa, Artificial Sequence; identical to SEQ ID NO: 11921
  Cyclic GFR-binding peptide
  MOD_RES (31)..(31): Xaa is C or S

SEQ ID NO: 46739 - protein, 31 aa, Artificial Sequence; identical to SEQ ID NO: 11922
  Cyclic GFR-binding peptide
  MOD_RES (29)..(30): Xaa is C or S

SEQ ID NO: 46740 - protein, 31 aa, Artificial Sequence; identical to SEQ ID NO: 11923
  Cyclic GFR-binding peptide
  MOD_RES (26)..(27): Xaa is C or S

SEQ ID NO: 46741 - protein, 34 aa, Artificial Sequence; identical to SEQ ID NO: 11925
  Cyclic GFR-binding peptide
  MOD_RES (29)..(30): Xaa is C or S

SEQ ID NO: 46742 - protein, 37 aa, Artificial Sequence; identical to SEQ ID NO: 11926
  Cyclic GFR-binding peptide
  MOD_RES (31)..(31): Xaa is C or S

SEQ ID NO: 46743 - protein, 30 aa, Artificial Sequence; identical to SEQ ID NO: 11927
  Cyclic GFR-binding peptide

SEQ ID NO: 46744 - protein, 32 aa, Artificial Sequence; identical to SEQ ID NO: 11928
  Cyclic GFR-binding peptide
  MOD_RES (32)..(32): Xaa is C or S

SEQ ID NO: 46745 - protein, 25 aa, Artificial Sequence
  Cyclic GFR-binding peptide
EVVMDRYKKLVVKENEDFYLMSIAN

SEQ ID NO: 46746 - protein, 26 aa, Artificial Sequence
  Cyclic GFR-binding peptide
KVIMEYQKYIKPTKGIIFLISIPSLD

SEQ ID NO: 46747 - protein, 27 aa, Artificial Sequence
  Cyclic GFR-binding peptide
IMNSLQEIKPTKGIYYVIPLPELDQSV

SEQ ID NO: 46748 - protein, 28 aa, Artificial Sequence
  Cyclic GFR-binding peptide
VIMRYKKLIKPTKGIFYLISIANLDQSV

SEQ ID NO: 46749 - protein, 33 aa, Artificial Sequence; identical to SEQ ID NO: 1365
  Cyclic GFR-binding peptide
  MOD_RES (32)..(33): Xaa is C or S

SEQ ID NO: 46750 - protein, 28 aa, Artificial Sequence
  Cyclic GFR-binding peptide
SRVVMNNSLQEIVNSSDDYYLVTLPELK

SEQ ID NO: 46751 - protein, 25 aa, Artificial Sequence
  Cyclic GFR-binding peptide
VIMEYQKYVKPKRGVIFLISIPSLA

SEQ ID NO: 46752 - protein, 27 aa, Artificial Sequence
  Cyclic GFR-binding peptide
VVMNNSLQEIVNSSDDYYVVPLPELQT

SEQ ID NO: 46753 - protein, 34 aa, Artificial Sequence; identical to SEQ ID NO: 11943
  Cyclic GFR-binding peptide
  MOD_RES (1)..(33): Xaa is C or S

SEQ ID NO: 46754 - protein, 36 aa, Artificial Sequence; identical to SEQ ID NO: 11946
  Cyclic GFR-binding peptide
  MOD_RES (1)..(33)..(34): Xaa is C or S

SEQ ID NO: 46755 - protein, 28 aa, Artificial Sequence
  Cyclic GFR-binding peptide
SKVIMNSLQEIKPTKGIYYLITLPELDQ

SEQ ID NO: 46756 - protein, 33 aa, Artificial Sequence; identical to SEQ ID NO: 11948
  Cyclic GFR-binding peptide
  MOD_RES (31)..(32): Xaa is C or S

SEQ ID NO: 46757 - protein, 37 aa, Artificial Sequence; identical to SEQ ID NO: 11949
  Cyclic GFR-binding peptide
  MOD_RES (1)..(32)..(33): Xaa is C or S

SEQ ID NO: 46758 - protein, 28 aa, Artificial Sequence
  Cyclic GFR-binding peptide
SKVIMNSLQEIKPTKGIYYVIPLPELDQ

SEQ ID NO: 46759 - protein, 32 aa, Artificial Sequence; identical to SEQ ID NO: 1380
  Cyclic GFR-binding peptide
  MOD_RES (27)..(28): Xaa is C or S

SEQ ID NO: 46760 - protein, 28 aa, Artificial Sequence
  Cyclic GFR-binding peptide
  MOD_RES (26)..(27): Xaa is C or S
NSLQEVVNNASDYYVIPLPELRTPVXXT

SEQ ID NO: 46761 - protein, 30 aa, Artificial Sequence; identical to SEQ ID NO: 11960
  Cyclic GFR-binding peptide

SEQ ID NO: 46762 - protein, 28 aa, Artificial Sequence
  Cyclic GFR-binding peptide
  MOD_RES (28)..(28): Xaa is C or S
MEEYQKYVVKDYEDIFLMSIPSLETPVX

SEQ ID NO: 46763 - protein, 31 aa, Artificial Sequence; identical to SEQ ID NO: 11963
  Cyclic GFR-binding peptide
  MOD_RES (27)..(28): Xaa is C or S

SEQ ID NO: 46764 - protein, 25 aa, Artificial Sequence
  Cyclic GFR-binding peptide
VIMNSLQEIKPTKGIYYLITLPELD

SEQ ID NO: 46765 - protein, 23 aa, Artificial Sequence
  Cyclic GFR-binding peptide
NSLQEIVNSSDDYYVVPLPELQT

SEQ ID NO: 46766 - protein, 31 aa, Artificial Sequence; identical to SEQ ID NO: 1394
  Cyclic GFR-binding peptide
  MOD_RES (1)..(1): Xaa is C or S

SEQ ID NO: 46767 - protein, 33 aa, Artificial Sequence; identical to SEQ ID NO: 11968
  Cyclic GFR-binding peptide
  MOD_RES (27)..(28): Xaa is C or S

SEQ ID NO: 46768 - protein, 24 aa, Artificial Sequence
  Cyclic GFR-binding peptide
MNSLQEVKPTRGVYYLITLPELDQ

SEQ ID NO: 46769 - protein, 40 aa, Artificial Sequence; identical to SEQ ID NO: 11969
  Cyclic GFR-binding peptide
  MOD_RES (2)..(34): Xaa is C or S

SEQ ID NO: 46770 - protein, 28 aa, Artificial Sequence
  Cyclic GFR-binding peptide
  MOD_RES (26)..(27): Xaa is C or S
RYKKLVKPKRGVFYLISIANLAQPVXXP

SEQ ID NO: 46771 - protein, 21 aa, Artificial Sequence
  Cyclic GFR-binding peptide
NRYKKLIVNSSDDFYLVSIAN

SEQ ID NO: 46772 - protein, 28 aa, Artificial Sequence
  Cyclic GFR-binding peptide
  MOD_RES (2)..(2): Xaa is C or S
GXGEVVMDNSLQEVVKENEDYYLMTLPE

SEQ ID NO: 46773 - protein, 31 aa, Artificial Sequence; identical to SEQ ID NO: 11973
  Cyclic GFR-binding peptide

SEQ ID NO: 46774 - protein, 26 aa, Artificial Sequence
  Cyclic GFR-binding peptide
MNSLQEVKPKRGVYYLITLPELAQPV

SEQ ID NO: 46775 - protein, 25 aa, Artificial Sequence
  Cyclic GFR-binding peptide
VVMDNSLQEVVKENEDYYLMTLPEL

SEQ ID NO: 46776 - protein, 32 aa, Artificial Sequence; identical to SEQ ID NO: 11977
  Cyclic GFR-binding peptide
  MOD_RES (28)..(29): Xaa is C or S

SEQ ID NO: 46777 - protein, 30 aa, Artificial Sequence; identical to SEQ ID NO: 11978
  Cyclic GFR-binding peptide
  MOD_RES (1)..(3): Xaa is C or S

SEQ ID NO: 46778 - protein, 36 aa, Artificial Sequence; identical to SEQ ID NO: 11979
  Cyclic GFR-binding peptide
  MOD_RES (1)..(3)..(35)..(36): Xaa is C or S

SEQ ID NO: 46779 - protein, 28 aa, Artificial Sequence
  Cyclic GFR-binding peptide
  MOD_RES (26)..(26): Xaa is C or S
EYQKYIVNSSDDIFLVSIPSLKTPAXTP

SEQ ID NO: 46780 - protein, 28 aa, Artificial Sequence
  Cyclic GFR-binding peptide
  MOD_RES (27)..(28): Xaa is C or S
MNSLQEVKPTRGVYYLITLPELDQPVXX

SEQ ID NO: 46781 - protein, 37 aa, Artificial Sequence; identical to SEQ ID NO: 1408
  Cyclic GFR-binding peptide
  MOD_RES (1)..(33)..(34): Xaa is C or S

SEQ ID NO: 46782 - protein, 30 aa, Artificial Sequence; identical to SEQ ID NO: 11983
  Cyclic GFR-binding peptide

SEQ ID NO: 46783 - protein, 27 aa, Artificial Sequence
  Cyclic GFR-binding peptide
EVVMDNSLQEVVNNASDYYLITLPELR

SEQ ID NO: 46784 - protein, 21 aa, Artificial Sequence
  Cyclic GFR-binding peptide
NSLQEVVNNASDYYVIPLPEL

SEQ ID NO: 46785 - protein, 27 aa, Artificial Sequence
  Cyclic GFR-binding peptide
SRVIMRYKKLVKPKRGVFYLISIANLA

SEQ ID NO: 46786 - protein, 27 aa, Artificial Sequence
  Cyclic GFR-binding peptide
VMNSLQEVKPTRGVYYVIPLPELDQPV

SEQ ID NO: 46787 - protein, 37 aa, Artificial Sequence; identical to SEQ ID NO: 11988
  Cyclic GFR-binding peptide
  MOD_RES (31)..(32): Xaa is C or S

SEQ ID NO: 46788 - protein, 24 aa, Artificial Sequence
  Cyclic GFR-binding peptide
RYKKLVKPTRGVFYLISIANLDQP

SEQ ID NO: 46789 - protein, 33 aa, Artificial Sequence; identical to SEQ ID NO: 1417
  Cyclic GFR-binding peptide
  MOD_RES (31)..(32): Xaa is C or S

SEQ ID NO: 46790 - protein, 36 aa, Artificial Sequence; identical to SEQ ID NO: 11992
  Cyclic GFR-binding peptide
  MOD_RES (2)..(4)..(36): Xaa is C or S

SEQ ID NO: 46791 - protein, 33 aa, Artificial Sequence; identical to SEQ ID NO: 11993
  Cyclic GFR-binding peptide
  MOD_RES (28)..(29): Xaa is C or S

SEQ ID NO: 46792 - protein, 28 aa, Artificial Sequence
  Cyclic GFR-binding peptide
  MOD_RES (1)..(1): Xaa is C or S
XGEVVMDNSLQEVVKENEDYYVMPLPEL

SEQ ID NO: 46793 - protein, 40 aa, Artificial Sequence; identical to SEQ ID NO: 11995
  Cyclic GFR-binding peptide
  MOD_RES (2)..(34)..(35): Xaa is C or S

SEQ ID NO: 46794 - protein, 28 aa, Artificial Sequence
  Cyclic GFR-binding peptide
KVVMNSLQEVKPTRGVYYVIPLPELDQP

SEQ ID NO: 46795 - protein, 33 aa, Artificial Sequence; identical to SEQ ID NO: 11997
  Cyclic GFR-binding peptide
  MOD_RES (30)..(31): Xaa is C or S

SEQ ID NO: 46796 - protein, 32 aa, Artificial Sequence; identical to SEQ ID NO: 11998
  Cyclic GFR-binding peptide
  MOD_RES (30)..(31): Xaa is C or S

SEQ ID NO: 46797 - protein, 28 aa, Artificial Sequence
  Cyclic GFR-binding peptide
RVVMNNSLQEIVNSSDDYYVVPLPELKT

SEQ ID NO: 46798 - protein, 35 aa, Artificial Sequence; identical to SEQ ID NO: 12000
  Cyclic GFR-binding peptide
  MOD_RES (1)..(3)..(34)..(35): Xaa is C or S

SEQ ID NO: 46799 - protein, 36 aa, Artificial Sequence; identical to SEQ ID NO: 12001
  Cyclic GFR-binding peptide
  MOD_RES (32)..(32): Xaa is C or S

SEQ ID NO: 46800 - protein, 35 aa, Artificial Sequence; identical to SEQ ID NO: 12002
  Cyclic GFR-binding peptide
  MOD_RES (1)..(3)..(34)..(35): Xaa is C or S

SEQ ID NO: 46801 - protein, 31 aa, Artificial Sequence; identical to SEQ ID NO: 12004
  Cyclic GFR-binding peptide
  MOD_RES (27)..(28): Xaa is C or S

SEQ ID NO: 46802 - protein, 28 aa, Artificial Sequence
  Cyclic GFR-binding peptide
EVVMDNSLQEVVNNASDYYLITLPELRT

SEQ ID NO: 46803 - protein, 25 aa, Artificial Sequence
  Cyclic GFR-binding peptide
MDNSLQEVVKENEDYYVMPLPELET

SEQ ID NO: 46804 - protein, 23 aa, Artificial Sequence
  Cyclic GFR-binding peptide
NSLQEVVKENEDYYVMPLPELET

SEQ ID NO: 46805 - protein, 30 aa, Artificial Sequence
  Cyclic GFR-binding peptide
  MOD_RES (27)..(28): Xaa is C or S
MNSLQEVKPTRGVYYLITLPELDQPVXXPS

SEQ ID NO: 46806 - protein, 28 aa, Artificial Sequence
  Cyclic GFR-binding peptide
  MOD_RES (1)..(1): Xaa is C or S
XSKVIMNSLQEIKPTKGIYYVIPLPELD

SEQ ID NO: 46807 - protein, 28 aa, Artificial Sequence
  Cyclic GFR-binding peptide
KVVMEYQKYVKPTRGVIFLISIPSLDQP

SEQ ID NO: 46808 - protein, 23 aa, Artificial Sequence
  Cyclic GFR-binding peptide
NNSLQEIVNSSDDYYVVPLPELQ

SEQ ID NO: 46809 - protein, 35 aa, Artificial Sequence; identical to SEQ ID NO: 1444
  Cyclic GFR-binding peptide
  MOD_RES (2)..(4): Xaa is C or S

SEQ ID NO: 46810 - protein, 31 aa, Artificial Sequence; identical to SEQ ID NO: 12017
  Cyclic GFR-binding peptide
  MOD_RES (29)..(29): Xaa is C or S

SEQ ID NO: 46811 - protein, 36 aa, Artificial Sequence; identical to SEQ ID NO: 1457
  Cyclic GFR-binding peptide
  MOD_RES (32)..(33): Xaa is C or S

SEQ ID NO: 46812 - protein, 31 aa, Artificial Sequence; identical to SEQ ID NO: 12021
  Cyclic GFR-binding peptide
  MOD_RES (30)..(31): Xaa is C or S

SEQ ID NO: 46813 - protein, 31 aa, Artificial Sequence; identical to SEQ ID NO: 12022
  Cyclic GFR-binding peptide
  MOD_RES (2)..(2): Xaa is C or S

SEQ ID NO: 46814 - protein, 34 aa, Artificial Sequence; identical to SEQ ID NO: 12026
  Cyclic GFR-binding peptide
  MOD_RES (29)..(30): Xaa is C or S

SEQ ID NO: 46815 - protein, 35 aa, Artificial Sequence; identical to SEQ ID NO: 12027
  Cyclic GFR-binding peptide
  MOD_RES (1)..(3)..(34)..(35): Xaa is C or S

SEQ ID NO: 46816 - protein, 27 aa, Artificial Sequence
  Cyclic GFR-binding peptide
  MOD_RES (26)..(27): Xaa is C or S
NSLQEIVNSSDDYYLVTLPELQTPAXX

SEQ ID NO: 46817 - protein, 32 aa, Artificial Sequence; identical to SEQ ID NO: 12029
  Cyclic GFR-binding peptide
  MOD_RES (2)..(2): Xaa is C or S

SEQ ID NO: 46818 - protein, 37 aa, Artificial Sequence; identical to SEQ ID NO: 12031
  Cyclic GFR-binding peptide
  MOD_RES (1)..(3)..(35)..(36): Xaa is C or S

SEQ ID NO: 46819 - protein, 27 aa, Artificial Sequence
  Cyclic GFR-binding peptide
KVIMNSLQEIKPTKGIYYVIPLPELDQ

SEQ ID NO: 46820 - protein, 33 aa, Artificial Sequence; identical to SEQ ID NO: 12033
  Cyclic GFR-binding peptide
  MOD_RES (1)..(3): Xaa is C or S

SEQ ID NO: 46821 - protein, 28 aa, Artificial Sequence
  Cyclic GFR-binding peptide
  MOD_RES (28)..(28): Xaa is C or S
MDNSLQEVVNNASDYYVIPLPELRTPVX

SEQ ID NO: 46822 - protein, 31 aa, Artificial Sequence; identical to SEQ ID NO: 12038
  Cyclic GFR-binding peptide

SEQ ID NO: 46823 - protein, 27 aa, Artificial Sequence
  Cyclic GFR-binding peptide
VIMNSLQEVKPKRGVYYLITLPELAQP

SEQ ID NO: 46824 - protein, 39 aa, Artificial Sequence; identical to SEQ ID NO: 12040
  Cyclic GFR-binding peptide
  MOD_RES (1)..(3)..(35): Xaa is C or S

SEQ ID NO: 46825 - protein, 33 aa, Artificial Sequence
  Cyclic GFR-binding peptide
  MOD_RES (27)..(28): Xaa is C or S
MNSLQEVKPTRGVYYLITLPELDQPVXXPSASA

SEQ ID NO: 46826 - protein, 28 aa, Artificial Sequence
  Cyclic GFR-binding peptide
VVMDRYKKLVVNNASDFYLISIANLRTP

SEQ ID NO: 46827 - protein, 31 aa, Artificial Sequence; identical to SEQ ID NO: 12044
  Cyclic GFR-binding peptide
  MOD_RES (28)..(29): Xaa is C or S

SEQ ID NO: 46828 - protein, 37 aa, Artificial Sequence; identical to SEQ ID NO: 12046
  Cyclic GFR-binding peptide
  MOD_RES (1)..(33): Xaa is C or S

SEQ ID NO: 46829 - protein, 33 aa, Artificial Sequence; identical to SEQ ID NO: 12047
  Cyclic GFR-binding peptide
  MOD_RES (31)..(32): Xaa is C or S

SEQ ID NO: 46830 - protein, 35 aa, Artificial Sequence; identical to SEQ ID NO: 1483
  Cyclic GFR-binding peptide
  MOD_RES (32)..(33): Xaa is C or S

SEQ ID NO: 46831 - protein, 32 aa, Artificial Sequence; identical to SEQ ID NO: 12052
  Cyclic GFR-binding peptide
  MOD_RES (1)..(32): Xaa is C or S

SEQ ID NO: 46832 - protein, 34 aa, Artificial Sequence; identical to SEQ ID NO: 12053
  Cyclic GFR-binding peptide
  MOD_RES (1)..(3)..(34): Xaa is C or S

SEQ ID NO: 46833 - protein, 29 aa, Artificial Sequence
  Cyclic GFR-binding peptide
  MOD_RES (1)..(3): Xaa is C or S
XKXSKVVMNSLQEVKPTRGVYYVIPLPEL

SEQ ID NO: 46834 - protein, 37 aa, Artificial Sequence
  Cyclic GFR-binding peptide
  MOD_RES (1)..(32)..(33): Xaa is C or S
XSKVVMNSLQEVKPTRGVYYLITLPELDQPVXXPSAS

SEQ ID NO: 46835 - protein, 33 aa, Artificial Sequence; identical to SEQ ID NO: 12055
  Cyclic GFR-binding peptide
  MOD_RES (27)..(28): Xaa is C or S

SEQ ID NO: 46836 - protein, 32 aa, Artificial Sequence; identical to SEQ ID NO: 12056
  Cyclic GFR-binding peptide
  MOD_RES (31)..(31): Xaa is C or S

SEQ ID NO: 46837 - protein, 24 aa, Artificial Sequence
  Cyclic GFR-binding peptide
MNSLQEIKPTKGIYYLITLPELDQ

SEQ ID NO: 46838 - protein, 34 aa, Artificial Sequence; identical to SEQ ID NO: 12059
  Cyclic GFR-binding peptide
  MOD_RES (1)..(3)..(34): Xaa is C or S

SEQ ID NO: 46839 - protein, 32 aa, Artificial Sequence; identical to SEQ ID NO: 12060
  Cyclic GFR-binding peptide
  MOD_RES (28)..(29): Xaa is C or S

SEQ ID NO: 46840 - protein, 33 aa, Artificial Sequence; identical to SEQ ID NO: 1496
  Cyclic GFR-binding peptide
  MOD_RES (32)..(33): Xaa is C or S

SEQ ID NO: 46841 - protein, 27 aa, Artificial Sequence
  Cyclic GFR-binding peptide
ARVVMNNSLQEIVNSSDDYYVVPLPEL

SEQ ID NO: 46842 - protein, 26 aa, Artificial Sequence
  Cyclic GFR-binding peptide
  MOD_RES (1)..(1): Xaa is C or S
XSRVIMRYKKLVKPKRGVFYLISIAN

SEQ ID NO: 46843 - protein, 29 aa, Artificial Sequence
  Cyclic GFR-binding peptide
KVVMNSLQEVKPTRGVYYLITLPELDQPV

SEQ ID NO: 46844 - protein, 31 aa, Artificial Sequence; identical to SEQ ID NO: 12065
  Cyclic GFR-binding peptide
  MOD_RES (27)..(27): Xaa is C or S

SEQ ID NO: 46845 - protein, 32 aa, Artificial Sequence; identical to SEQ ID NO: 12067
  Cyclic GFR-binding peptide
  MOD_RES (2)..(2): Xaa is C or S

SEQ ID NO: 46846 - protein, 27 aa, Artificial Sequence
  Cyclic GFR-binding peptide
  MOD_RES (27)..(27): Xaa is C or S
DNSLQEVVNNASDYYLITLPELRTPVX

SEQ ID NO: 46847 - protein, 38 aa, Artificial Sequence; identical to SEQ ID NO: 12069
  Cyclic GFR-binding peptide
  MOD_RES (32)..(33): Xaa is C or S

SEQ ID NO: 46848 - protein, 27 aa, Artificial Sequence
  Cyclic GFR-binding peptide
SRVVMNNSLQEIVNSSDDYYVVPLPEL

SEQ ID NO: 46849 - protein, 37 aa, Artificial Sequence; identical to SEQ ID NO: 12071
  Cyclic GFR-binding peptide
  MOD_RES (1)..(33)..(34): Xaa is C or S

SEQ ID NO: 46850 - protein, 37 aa, Artificial Sequence; identical to SEQ ID NO: 12072
  Cyclic GFR-binding peptide
  MOD_RES (1)..(3)..(35)..(36): Xaa is C or S

SEQ ID NO: 46851 - protein, 32 aa, Artificial Sequence; identical to SEQ ID NO: 12074
  Cyclic GFR-binding peptide
  MOD_RES (30)..(31): Xaa is C or S

SEQ ID NO: 46852 - protein, 35 aa, Artificial Sequence; identical to SEQ ID NO: 12075
  Cyclic GFR-binding peptide
  MOD_RES (1)..(3)..(35): Xaa is C or S

SEQ ID NO: 46853 - protein, 32 aa, Artificial Sequence; identical to SEQ ID NO: 12076
  Cyclic GFR-binding peptide
  MOD_RES (28)..(29): Xaa is C or S

SEQ ID NO: 46854 - protein, 29 aa, Artificial Sequence
  Cyclic GFR-binding peptide
  MOD_RES (2)..(2): Xaa is C or S
GXSRVVMNEYQKYIVNSSDDIFLVSIPSL

SEQ ID NO: 46855 - protein, 28 aa, Artificial Sequence
  Cyclic GFR-binding peptide
KVVMRYKKLVKPTRGVFYLISIANLDQP

SEQ ID NO: 46856 - protein, 30 aa, Artificial Sequence; identical to SEQ ID NO: 1519
  Cyclic GFR-binding peptide
  MOD_RES (26)..(27): Xaa is C or S

SEQ ID NO: 46857 - protein, 30 aa, Artificial Sequence; identical to SEQ ID NO: 12080
  Cyclic GFR-binding peptide

SEQ ID NO: 46858 - protein, 37 aa, Artificial Sequence; identical to SEQ ID NO: 12081
  Cyclic GFR-binding peptide
  MOD_RES (1)..(3)..(35)..(36): Xaa is C or S

SEQ ID NO: 46859 - protein, 27 aa, Artificial Sequence
  Cyclic GFR-binding peptide
SKVIMNSLQEIKPTKGIYYLITLPELD

SEQ ID NO: 46860 - protein, 34 aa, Artificial Sequence; identical to SEQ ID NO: 12083
  Cyclic GFR-binding peptide
  MOD_RES (32)..(32): Xaa is C or S

SEQ ID NO: 46861 - protein, 20 aa, Artificial Sequence
  Cyclic GFR-binding peptide
EYQKYIVNSSDDIFLVSIPS

SEQ ID NO: 46862 - protein, 33 aa, Artificial Sequence; identical to SEQ ID NO: 12085
  Cyclic GFR-binding peptide
  MOD_RES (31)..(32): Xaa is C or S

SEQ ID NO: 46863 - protein, 22 aa, Artificial Sequence
  Cyclic GFR-binding peptide
MDRYKKLVVNNASDFYLISIAN

SEQ ID NO: 46864 - protein, 31 aa, Artificial Sequence; identical to SEQ ID NO: 12087
  Cyclic GFR-binding peptide
  MOD_RES (28)..(29): Xaa is C or S

SEQ ID NO: 46865 - protein, 27 aa, Artificial Sequence
  Cyclic GFR-binding peptide
  MOD_RES (26)..(26): Xaa is C or S
EYQKYIVNSSDDIFLVSIPSLKTPAXT

SEQ ID NO: 46866 - protein, 33 aa, Artificial Sequence; identical to SEQ ID NO: 12090
  Cyclic GFR-binding peptide
  MOD_RES (2)..(2): Xaa is C or S

SEQ ID NO: 46867 - protein, 38 aa, Artificial Sequence; identical to SEQ ID NO: 12091
  Cyclic GFR-binding peptide
  MOD_RES (2)..(4)..(35)..(36): Xaa is C or S

SEQ ID NO: 46868 - protein, 32 aa, Artificial Sequence; identical to SEQ ID NO: 1527
  Cyclic GFR-binding peptide
  MOD_RES (27)..(28): Xaa is C or S

SEQ ID NO: 46869 - protein, 28 aa, Artificial Sequence
  Cyclic GFR-binding peptide
  MOD_RES (1)..(1): Xaa is C or S
XGEVVMERYKKLVVKDYEDFYLMSIANL

SEQ ID NO: 46870 - protein, 35 aa, Artificial Sequence; identical to SEQ ID NO: 12095
  Cyclic GFR-binding peptide
  MOD_RES (31)..(32): Xaa is C or S

SEQ ID NO: 46871 - protein, 27 aa, Artificial Sequence
  Cyclic GFR-binding peptide
  MOD_RES (26)..(27): Xaa is C or S
NSLQEIVNSSDDYYLVTLPELKTPAXX

SEQ ID NO: 46872 - protein, 32 aa, Artificial Sequence; identical to SEQ ID NO: 1538
  Cyclic GFR-binding peptide
  MOD_RES (2)..(4): Xaa is C or S

SEQ ID NO: 46873 - protein, 38 aa, Artificial Sequence; identical to SEQ ID NO: 1542
  Cyclic GFR-binding peptide
  MOD_RES (2)..(4)..(36)..(37): Xaa is C or S

SEQ ID NO: 46874 - protein, 31 aa, Artificial Sequence; identical to SEQ ID NO: 12101
  Cyclic GFR-binding peptide
  MOD_RES (2)..(2): Xaa is C or S

SEQ ID NO: 46875 - protein, 29 aa, Artificial Sequence
  Cyclic GFR-binding peptide
  MOD_RES (1)..(1): Xaa is C or S
XGEVVMDNSLQEVVKENEDYYLMTLPELE

SEQ ID NO: 46876 - protein, 26 aa, Artificial Sequence
  Cyclic GFR-binding peptide
EVVMDRYKKLVVNNASDFYLISIANL

SEQ ID NO: 46877 - protein, 35 aa, Artificial Sequence; identical to SEQ ID NO: 12104
  Cyclic GFR-binding peptide
  MOD_RES (29)..(30): Xaa is C or S

SEQ ID NO: 46878 - protein, 31 aa, Artificial Sequence; identical to SEQ ID NO: 12105
  Cyclic GFR-binding peptide
  MOD_RES (2)..(2): Xaa is C or S

SEQ ID NO: 46879 - protein, 24 aa, Artificial Sequence
  Cyclic GFR-binding peptide
EYQKYIVNSSDDIFLVSIPSLQTP

SEQ ID NO: 46880 - protein, 38 aa, Artificial Sequence; identical to SEQ ID NO: 12107
  Cyclic GFR-binding peptide
  MOD_RES (1)..(33)..(34): Xaa is C or S

SEQ ID NO: 46881 - protein, 26 aa, Artificial Sequence
  Cyclic GFR-binding peptide
EEYQKYVVKDYEDIFLMSIPSLETPV

SEQ ID NO: 46882 - protein, 31 aa, Artificial Sequence; identical to SEQ ID NO: 12110
  Cyclic GFR-binding peptide
  MOD_RES (2)..(2): Xaa is C or S

SEQ ID NO: 46883 - protein, 35 aa, Artificial Sequence; identical to SEQ ID NO: 12114
  Cyclic GFR-binding peptide
  MOD_RES (31)..(32): Xaa is C or S

SEQ ID NO: 46884 - protein, 30 aa, Artificial Sequence; identical to SEQ ID NO: 12115
  Cyclic GFR-binding peptide
  MOD_RES (29)..(30): Xaa is C or S

SEQ ID NO: 46885 - protein, 29 aa, Artificial Sequence
  Cyclic GFR-binding peptide
KVIMEYQKYIKPTKGIIFLISIPSLDQSV

SEQ ID NO: 46886 - protein, 28 aa, Artificial Sequence
  Cyclic GFR-binding peptide
  MOD_RES (1)..(1): Xaa is C or S
XSEVVMDNSLQEVVNNASDYYVIPLPEL

SEQ ID NO: 46887 - protein, 29 aa, Artificial Sequence
  Cyclic GFR-binding peptide
  MOD_RES (2)..(2): Xaa is C or S
GXSRVVMNRYKKLIVNSSDDFYLVSIANL

SEQ ID NO: 46888 - protein, 20 aa, Artificial Sequence
  Cyclic GFR-binding peptide
NSLQEVKPKRGVYYLITLPE

SEQ ID NO: 46889 - protein, 30 aa, Artificial Sequence
  Cyclic GFR-binding peptide
  MOD_RES (26)..(27): Xaa is C or S
NSLQEVKPTRGVYYLITLPELDQPVXXPSA

SEQ ID NO: 46890 - protein, 31 aa, Artificial Sequence; identical to SEQ ID NO: 12122
  Cyclic GFR-binding peptide
  MOD_RES (1)..(3): Xaa is C or S

SEQ ID NO: 46891 - protein, 34 aa, Artificial Sequence; identical to SEQ ID NO: 12123
  Cyclic GFR-binding peptide
  MOD_RES (1)..(3)..(34): Xaa is C or S

SEQ ID NO: 46892 - protein, 28 aa, Artificial Sequence
  Cyclic GFR-binding peptide
VVMEYQKYVKPTRGVIFLISIPSLDQPV

SEQ ID NO: 46893 - protein, 31 aa, Artificial Sequence; identical to SEQ ID NO: 12125
  Cyclic GFR-binding peptide
  MOD_RES (28)..(29): Xaa is C or S

SEQ ID NO: 46894 - protein, 38 aa, Artificial Sequence; identical to SEQ ID NO: 12126
  Cyclic GFR-binding peptide
  MOD_RES (2)..(4)..(36)..(37): Xaa is C or S

SEQ ID NO: 46895 - protein, 32 aa, Artificial Sequence; identical to SEQ ID NO: 12127
  Cyclic GFR-binding peptide
  MOD_RES (28)..(29): Xaa is C or S

SEQ ID NO: 46896 - protein, 25 aa, Artificial Sequence
  Cyclic GFR-binding peptide
NNSLQEIVNSSDDYYVVPLPELKTP

SEQ ID NO: 46897 - protein, 23 aa, Artificial Sequence
  Cyclic GFR-binding peptide
EYQKYVVKDYEDIFLMSIPSLET

SEQ ID NO: 46898 - protein, 41 aa, Artificial Sequence; identical to SEQ ID NO: 12132
  Cyclic GFR-binding peptide
  MOD_RES (2)..(4)..(36)..(37): Xaa is C or S

SEQ ID NO: 46899 - protein, 29 aa, Artificial Sequence
  Cyclic GFR-binding peptide
  MOD_RES (28)..(29): Xaa is C or S
VMRYKKLVKPTRGVFYLISIANLDQPVXX

SEQ ID NO: 46900 - protein, 29 aa, Artificial Sequence
  Cyclic GFR-binding peptide
VVMDNSLQEVVNNASDYYLITLPELRTPV

SEQ ID NO: 46901 - protein, 29 aa, Artificial Sequence
  Cyclic GFR-binding peptide
  MOD_RES (29)..(29): Xaa is C or S
VMNNSLQEIVNSSDDYYLVTLPELQTPAX

SEQ ID NO: 46902 - protein, 29 aa, Artificial Sequence
  Cyclic GFR-binding peptide
  MOD_RES (2)..(2): Xaa is C or S
KXSKVIMRYKKLIKPTKGIFYLISIANLD

SEQ ID NO: 46903 - protein, 23 aa, Artificial Sequence
  Cyclic GFR-binding peptide
VMNSLQEVKPTRGVYYLITLPEL

SEQ ID NO: 46904 - protein, 30 aa, Artificial Sequence; identical to SEQ ID NO: 12139
  Cyclic GFR-binding peptide
  MOD_RES (27)..(28): Xaa is C or S

SEQ ID NO: 46905 - protein, 37 aa, Artificial Sequence; identical to SEQ ID NO: 12141
  Cyclic GFR-binding peptide
  MOD_RES (2)..(4)..(35)..(36): Xaa is C or S

SEQ ID NO: 46906 - protein, 37 aa, Artificial Sequence; identical to SEQ ID NO: 12142
  Cyclic GFR-binding peptide
  MOD_RES (32)..(33): Xaa is C or S

SEQ ID NO: 46907 - protein, 26 aa, Artificial Sequence
  Cyclic GFR-binding peptide
  MOD_RES (26)..(26): Xaa is C or S
EYQKYIVNSSDDIFLVSIPSLKTPAX

SEQ ID NO: 46908 - protein, 36 aa, Artificial Sequence; identical to SEQ ID NO: 1578
  Cyclic GFR-binding peptide
  MOD_RES (1)..(3)..(35)..(36): Xaa is C or S

SEQ ID NO: 46909 - protein, 22 aa, Artificial Sequence
  Cyclic GFR-binding peptide
VMNSLQEVKPTRGVYYLITLPE

SEQ ID NO: 46910 - protein, 31 aa, Artificial Sequence; identical to SEQ ID NO: 12146
  Cyclic GFR-binding peptide
  MOD_RES (1)..(3): Xaa is C or S

SEQ ID NO: 46911 - protein, 33 aa, Artificial Sequence; identical to SEQ ID NO: 12147
  Cyclic GFR-binding peptide
  MOD_RES (28)..(29): Xaa is C or S

SEQ ID NO: 46912 - protein, 36 aa, Artificial Sequence; identical to SEQ ID NO: 1581
  Cyclic GFR-binding peptide
  MOD_RES (1)..(3)..(35): Xaa is C or S

SEQ ID NO: 46913 - protein, 27 aa, Artificial Sequence
  Cyclic GFR-binding peptide
EVVMEEYQKYVVKDYEDIFLMSIPSLE

SEQ ID NO: 46914 - protein, 33 aa, Artificial Sequence; identical to SEQ ID NO: 12150
  Cyclic GFR-binding peptide
  MOD_RES (29)..(30): Xaa is C or S

SEQ ID NO: 46915 - protein, 39 aa, Artificial Sequence; identical to SEQ ID NO: 12151
  Cyclic GFR-binding peptide
  MOD_RES (1)..(3)..(35)..(36): Xaa is C or S

SEQ ID NO: 46916 - protein, 32 aa, Artificial Sequence; identical to SEQ ID NO: 12152
  Cyclic GFR-binding peptide
  MOD_RES (31)..(32): Xaa is C or S

SEQ ID NO: 46917 - protein, 23 aa, Artificial Sequence
  Cyclic GFR-binding peptide
VIMNSLQEVKPKRGVYYLITLPE

SEQ ID NO: 46918 - protein, 29 aa, Artificial Sequence
  Cyclic GFR-binding peptide
  MOD_RES (29)..(29): Xaa is C or S
VVMEYQKYVKPTRGVIFLISIPSLDQPVX

SEQ ID NO: 46919 - protein, 31 aa, Artificial Sequence; identical to SEQ ID NO: 1590
  Cyclic GFR-binding peptide
  MOD_RES (26)..(27): Xaa is C or S

SEQ ID NO: 46920 - protein, 26 aa, Artificial Sequence
  Cyclic GFR-binding peptide
  MOD_RES (1)..(1): Xaa is C or S
XSKVVMNSLQEVKPTRGVYYVIPLPE

SEQ ID NO: 46921 - protein, 23 aa, Artificial Sequence
  Cyclic GFR-binding peptide
NNSLQEIVNSSDDYYLVTLPELK

SEQ ID NO: 46922 - protein, 37 aa, Artificial Sequence; identical to SEQ ID NO: 1595
  Cyclic GFR-binding peptide
  MOD_RES (2)..(4)..(35)..(36): Xaa is C or S

SEQ ID NO: 46923 - protein, 32 aa, Artificial Sequence; identical to SEQ ID NO: 1598
  Cyclic GFR-binding peptide
  MOD_RES (27)..(27): Xaa is C or S

SEQ ID NO: 46924 - protein, 38 aa, Artificial Sequence; identical to SEQ ID NO: 12163
  Cyclic GFR-binding peptide
  MOD_RES (32)..(33): Xaa is C or S

SEQ ID NO: 46925 - protein, 41 aa, Artificial Sequence; identical to SEQ ID NO: 1600
  Cyclic GFR-binding peptide
  MOD_RES (2)..(4)..(36): Xaa is C or S

SEQ ID NO: 46926 - protein, 26 aa, Artificial Sequence
  Cyclic GFR-binding peptide
VVMNNSLQEIVNSSDDYYLVTLPELK

SEQ ID NO: 46927 - protein, 25 aa, Artificial Sequence
  Cyclic GFR-binding peptide
SKVIMNSLQEIKPTKGIYYVIPLPE

SEQ ID NO: 46928 - protein, 36 aa, Artificial Sequence; identical to SEQ ID NO: 12167
  Cyclic GFR-binding peptide
  MOD_RES (2)..(34)..(35): Xaa is C or S

SEQ ID NO: 46929 - protein, 29 aa, Artificial Sequence
  Cyclic GFR-binding peptide
SEVVMDNSLQEVVNNASDYYLITLPELRT

SEQ ID NO: 46930 - protein, 34 aa, Artificial Sequence; identical to SEQ ID NO: 12169
  Cyclic GFR-binding peptide
  MOD_RES (2)..(34): Xaa is C or S

SEQ ID NO: 46931 - protein, 27 aa, Artificial Sequence
  Cyclic GFR-binding peptide
  MOD_RES (26)..(27): Xaa is C or S
EYQKYVVKENEDIFLMSIPSLETPVXX

SEQ ID NO: 46932 - protein, 31 aa, Artificial Sequence
  Cyclic GFR-binding peptide
  MOD_RES (28)..(29): Xaa is C or S
VMNSLQEVKPTRGVYYLITLPELDQPVXXPS

SEQ ID NO: 46933 - protein, 32 aa, Artificial Sequence; identical to SEQ ID NO: 12172
  Cyclic GFR-binding peptide
  MOD_RES (1)..(32): Xaa is C or S

SEQ ID NO: 46934 - protein, 24 aa, Artificial Sequence
  Cyclic GFR-binding peptide
RYKKLIKPTKGIFYLISIANLDQS

SEQ ID NO: 46935 - protein, 33 aa, Artificial Sequence; identical to SEQ ID NO: 12174
  Cyclic GFR-binding peptide
  MOD_RES (1)..(32)..(33): Xaa is C or S

SEQ ID NO: 46936 - protein, 24 aa, Artificial Sequence
  Cyclic GFR-binding peptide
NSLQEVVKDYEDYYLMTLPELETP

SEQ ID NO: 46937 - protein, 26 aa, Artificial Sequence
  Cyclic GFR-binding peptide
RVVMNRYKKLIVNSSDDFYLVSIANL

SEQ ID NO: 46938 - protein, 32 aa, Artificial Sequence; identical to SEQ ID NO: 1611
  Cyclic GFR-binding peptide
  MOD_RES (32)..(32): Xaa is C or S

SEQ ID NO: 46939 - protein, 30 aa, Artificial Sequence; identical to SEQ ID NO: 12179
  Cyclic GFR-binding peptide

SEQ ID NO: 46940 - protein, 33 aa, Artificial Sequence; identical to SEQ ID NO: 12181
  Cyclic GFR-binding peptide
  MOD_RES (27)..(28): Xaa is C or S

SEQ ID NO: 46941 - protein, 38 aa, Artificial Sequence; identical to SEQ ID NO: 12182
  Cyclic GFR-binding peptide
  MOD_RES (1)..(3)..(34)..(35): Xaa is C or S

SEQ ID NO: 46942 - protein, 37 aa, Artificial Sequence; identical to SEQ ID NO: 12184
  Cyclic GFR-binding peptide
  MOD_RES (1)..(33)..(34): Xaa is C or S

SEQ ID NO: 46943 - protein, 24 aa, Artificial Sequence
  Cyclic GFR-binding peptide
VVMNNSLQEIVNSSDDYYVVPLPE

SEQ ID NO: 46944 - protein, 36 aa, Artificial Sequence; identical to SEQ ID NO: 12187
  Cyclic GFR-binding peptide
  MOD_RES (31)..(32): Xaa is C or S

SEQ ID NO: 46945 - protein, 38 aa, Artificial Sequence; identical to SEQ ID NO: 12188
  Cyclic GFR-binding peptide
  MOD_RES (1)..(3)..(35): Xaa is C or S

SEQ ID NO: 46946 - protein, 39 aa, Artificial Sequence; identical to SEQ ID NO: 12189
  Cyclic GFR-binding peptide
  MOD_RES (2)..(4)..(36)..(37): Xaa is C or S

SEQ ID NO: 46947 - protein, 26 aa, Artificial Sequence
  Cyclic GFR-binding peptide
MNNSLQEIVNSSDDYYLVTLPELKTP

SEQ ID NO: 46948 - protein, 26 aa, Artificial Sequence
  Cyclic GFR-binding peptide
  MOD_RES (26)..(26): Xaa is C or S
EYQKYVKPKRGVIFLISIPSLAQPVX

SEQ ID NO: 46949 - protein, 38 aa, Artificial Sequence; identical to SEQ ID NO: 12193
  Cyclic GFR-binding peptide
  MOD_RES (1)..(3)..(35)..(36): Xaa is C or S

SEQ ID NO: 46950 - protein, 28 aa, Artificial Sequence
  Cyclic GFR-binding peptide
VMNEYQKYIVNSSDDIFLVSIPSLKTPA

SEQ ID NO: 46951 - protein, 27 aa, Artificial Sequence
  Cyclic GFR-binding peptide
  MOD_RES (1)..(1): Xaa is C or S
XSRVVMNEYQKYIVNSSDDIFLVSIPS

SEQ ID NO: 46952 - protein, 31 aa, Artificial Sequence; identical to SEQ ID NO: 1628
  Cyclic GFR-binding peptide
  MOD_RES (26)..(27): Xaa is C or S

SEQ ID NO: 46953 - protein, 28 aa, Artificial Sequence
  Cyclic GFR-binding peptide
  MOD_RES (27)..(28): Xaa is C or S
DNSLQEVVNNASDYYLITLPELRTPVXX

SEQ ID NO: 46954 - protein, 23 aa, Artificial Sequence
  Cyclic GFR-binding peptide
RYKKLVVNNASDFYLISIANLRT

SEQ ID NO: 46955 - protein, 40 aa, Artificial Sequence; identical to SEQ ID NO: 12204
  Cyclic GFR-binding peptide
  MOD_RES (2)..(34)..(35): Xaa is C or S

SEQ ID NO: 46956 - protein, 32 aa, Artificial Sequence; identical to SEQ ID NO: 1636
  Cyclic GFR-binding peptide
  MOD_RES (30)..(31): Xaa is C or S

SEQ ID NO: 46957 - protein, 25 aa, Artificial Sequence
  Cyclic GFR-binding peptide
NSLQEVKPKRGVYYLITLPELAQPV

SEQ ID NO: 46958 - protein, 30 aa, Artificial Sequence; identical to SEQ ID NO: 12208
  Cyclic GFR-binding peptide
  MOD_RES (1)..(1): Xaa is C or S

SEQ ID NO: 46959 - protein, 38 aa, Artificial Sequence
  Cyclic GFR-binding peptide
  MOD_RES (1)..(32)..(33): Xaa is C or S
XSKVVMNSLQEVKPTRGVYYLITLPELDQPVXXPSASA

SEQ ID NO: 46960 - protein, 30 aa, Artificial Sequence; identical to SEQ ID NO: 12211
  Cyclic GFR-binding peptide
  MOD_RES (26)..(27): Xaa is C or S

SEQ ID NO: 46961 - protein, 33 aa, Artificial Sequence; identical to SEQ ID NO: 12212
  Cyclic GFR-binding peptide
  MOD_RES (2)..(2): Xaa is C or S

SEQ ID NO: 46962 - protein, 39 aa, Artificial Sequence; identical to SEQ ID NO: 12213
  Cyclic GFR-binding peptide
  MOD_RES (1)..(3)..(34)..(35): Xaa is C or S

SEQ ID NO: 46963 - protein, 39 aa, Artificial Sequence; identical to SEQ ID NO: 12215
  Cyclic GFR-binding peptide
  MOD_RES (1)..(3)..(34)..(35): Xaa is C or S

SEQ ID NO: 46964 - protein, 38 aa, Artificial Sequence; identical to SEQ ID NO: 12216
  Cyclic GFR-binding peptide
  MOD_RES (1)..(3)..(35)..(36): Xaa is C or S

SEQ ID NO: 46965 - protein, 26 aa, Artificial Sequence
  Cyclic GFR-binding peptide
MENSLQEVVKDYEDYYLMTLPELETP

SEQ ID NO: 46966 - protein, 35 aa, Artificial Sequence; identical to SEQ ID NO: 12218
  Cyclic GFR-binding peptide
  MOD_RES (31)..(32): Xaa is C or S

SEQ ID NO: 46967 - protein, 26 aa, Artificial Sequence
  Cyclic GFR-binding peptide
VMDRYKKLVVNNASDFYLISIANLRT

SEQ ID NO: 46968 - protein, 28 aa, Artificial Sequence
  Cyclic GFR-binding peptide
RVIMNSLQEVKPKRGVYYLITLPELAQP

SEQ ID NO: 46969 - protein, 34 aa, Artificial Sequence; identical to SEQ ID NO: 12222
  Cyclic GFR-binding peptide
  MOD_RES (2)..(34): Xaa is C or S

SEQ ID NO: 46970 - protein, 27 aa, Artificial Sequence
  Cyclic GFR-binding peptide
VVMNNSLQEIVNSSDDYYVVPLPELKT

SEQ ID NO: 46971 - protein, 36 aa, Artificial Sequence; identical to SEQ ID NO: 12226
  Cyclic GFR-binding peptide
  MOD_RES (30)..(31): Xaa is C or S

SEQ ID NO: 46972 - protein, 38 aa, Artificial Sequence; identical to SEQ ID NO: 12227
  Cyclic GFR-binding peptide
  MOD_RES (1)..(33)..(34): Xaa is C or S

SEQ ID NO: 46973 - protein, 23 aa, Artificial Sequence
  Cyclic GFR-binding peptide
MDNSLQEVVNNASDYYVIPLPEL

SEQ ID NO: 46974 - protein, 26 aa, Artificial Sequence
  Cyclic GFR-binding peptide
SKVVMEYQKYVKPTRGVIFLISIPSL

SEQ ID NO: 46975 - protein, 32 aa, Artificial Sequence; identical to SEQ ID NO: 12231
  Cyclic GFR-binding peptide
  MOD_RES (26)..(27): Xaa is C or S

SEQ ID NO: 46976 - protein, 30 aa, Artificial Sequence; identical to SEQ ID NO: 12232
  Cyclic GFR-binding peptide
  MOD_RES (2)..(2): Xaa is C or S

SEQ ID NO: 46977 - protein, 35 aa, Artificial Sequence; identical to SEQ ID NO: 1669
  Cyclic GFR-binding peptide
  MOD_RES (1)..(33)..(34): Xaa is C or S

SEQ ID NO: 46978 - protein, 38 aa, Artificial Sequence; identical to SEQ ID NO: 12236
  Cyclic GFR-binding peptide
  MOD_RES (1)..(3)..(35)..(36): Xaa is C or S

SEQ ID NO: 46979 - protein, 23 aa, Artificial Sequence
  Cyclic GFR-binding peptide
NSLQEIVNSSDDYYLVTLPELKT

SEQ ID NO: 46980 - protein, 30 aa, Artificial Sequence
  Cyclic GFR-binding peptide
  MOD_RES (28)..(29): Xaa is C or S
VMNSLQEVKPTRGVYYLITLPELDQPVXXP

SEQ ID NO: 46981 - protein, 31 aa, Artificial Sequence
  Cyclic GFR-binding peptide
  MOD_RES (27)..(28): Xaa is C or S
MNSLQEVKPTRGVYYLITLPELDQPVXXPSA

SEQ ID NO: 46982 - protein, 25 aa, Artificial Sequence
  Cyclic GFR-binding peptide
EVVMERYKKLVVKDYEDFYLMSIAN

SEQ ID NO: 46983 - protein, 29 aa, Artificial Sequence
  Cyclic GFR-binding peptide
  MOD_RES (29)..(29): Xaa is C or S
VMNEYQKYIVNSSDDIFLVSIPSLKTPAX

SEQ ID NO: 46984 - protein, 27 aa, Artificial Sequence
  Cyclic GFR-binding peptide
VIMNSLQEIKPTKGIYYVIPLPELDQS

SEQ ID NO: 46985 - protein, 29 aa, Artificial Sequence
  Cyclic GFR-binding peptide
  MOD_RES (28)..(29): Xaa is C or S
MNEYQKYIVNSSDDIFLVSIPSLKTPAXX

SEQ ID NO: 46986 - protein, 23 aa, Artificial Sequence
  Cyclic GFR-binding peptide
MENSLQEVVKDYEDYYLMTLPEL

SEQ ID NO: 46987 - protein, 22 aa, Artificial Sequence
  Cyclic GFR-binding peptide
NSLQEVVKENEDYYLMTLPELE

SEQ ID NO: 46988 - protein, 33 aa, Artificial Sequence; identical to SEQ ID NO: 12249
  Cyclic GFR-binding peptide
  MOD_RES (1)..(33): Xaa is C or S

SEQ ID NO: 46989 - protein, 26 aa, Artificial Sequence
  Cyclic GFR-binding peptide
VVMNSLQEVKPTRGVYYVIPLPELDQ

SEQ ID NO: 46990 - protein, 39 aa, Artificial Sequence; identical to SEQ ID NO: 12252
  Cyclic GFR-binding peptide
  MOD_RES (1)..(33)..(34): Xaa is C or S

SEQ ID NO: 46991 - protein, 36 aa, Artificial Sequence; identical to SEQ ID NO: 12253
  Cyclic GFR-binding peptide
  MOD_RES (32)..(33): Xaa is C or S

SEQ ID NO: 46992 - protein, 25 aa, Artificial Sequence
  Cyclic GFR-binding peptide
IMNSLQEVKPKRGVYYLITLPELAQ

SEQ ID NO: 46993 - protein, 30 aa, Artificial Sequence; identical to SEQ ID NO: 12256
  Cyclic GFR-binding peptide
  MOD_RES (27)..(28): Xaa is C or S

SEQ ID NO: 46994 - protein, 23 aa, Artificial Sequence
  Cyclic GFR-binding peptide
VVMRYKKLVKPTRGVFYLISIAN

SEQ ID NO: 46995 - protein, 40 aa, Artificial Sequence; identical to SEQ ID NO: 12258
  Cyclic GFR-binding peptide
  MOD_RES (2)..(4)..(36)..(37): Xaa is C or S

SEQ ID NO: 46996 - protein, 20 aa, Artificial Sequence
  Cyclic GFR-binding peptide
NSLQEVVKENEDYYVMPLPE

SEQ ID NO: 46997 - protein, 26 aa, Artificial Sequence
  Cyclic GFR-binding peptide
IMEYQKYVKPKRGVIFLISIPSLAQP

SEQ ID NO: 46998 - protein, 35 aa, Artificial Sequence; identical to SEQ ID NO: 12261
  Cyclic GFR-binding peptide
  MOD_RES (2)..(4)..(35): Xaa is C or S

SEQ ID NO: 46999 - protein, 35 aa, Artificial Sequence; identical to SEQ ID NO: 12262
  Cyclic GFR-binding peptide
  MOD_RES (30)..(30): Xaa is C or S

SEQ ID NO: 47000 - protein, 28 aa, Artificial Sequence
  Cyclic GFR-binding peptide
  MOD_RES (28)..(28): Xaa is C or S
MNNSLQEIVNSSDDYYLVTLPELKTPAX

SEQ ID NO: 47001 - protein, 29 aa, Artificial Sequence
  Cyclic GFR-binding peptide
  MOD_RES (26)..(27): Xaa is C or S
RYKKLVVKENEDFYLMSIANLETPVXXAK

SEQ ID NO: 47002 - protein, 27 aa, Artificial Sequence
  Cyclic GFR-binding peptide
  MOD_RES (1)..(1): Xaa is C or S
XGEVVMEEYQKYVVKDYEDIFLMSIPS

SEQ ID NO: 47003 - protein, 36 aa, Artificial Sequence; identical to SEQ ID NO: 12266
  Cyclic GFR-binding peptide
  MOD_RES (32)..(33): Xaa is C or S

SEQ ID NO: 47004 - protein, 27 aa, Artificial Sequence
  Cyclic GFR-binding peptide
VMDNSLQEVVNNASDYYLITLPELRTP

SEQ ID NO: 47005 - protein, 29 aa, Artificial Sequence
  Cyclic GFR-binding peptide
  MOD_RES (29)..(29): Xaa is C or S
VIMNSLQEIKPTKGIYYLITLPELDQSVX

SEQ ID NO: 47006 - protein, 26 aa, Artificial Sequence
  Cyclic GFR-binding peptide
VIMRYKKLVKPKRGVFYLISIANLAQ

SEQ ID NO: 47007 - protein, 34 aa, Artificial Sequence; identical to SEQ ID NO: 12270
  Cyclic GFR-binding peptide
  MOD_RES (2)..(4): Xaa is C or S

SEQ ID NO: 47008 - protein, 40 aa, Artificial Sequence; identical to SEQ ID NO: 1707
  Cyclic GFR-binding peptide
  MOD_RES (1)..(3)..(34)..(35): Xaa is C or S

SEQ ID NO: 47009 - protein, 30 aa, Artificial Sequence; identical to SEQ ID NO: 12274
  Cyclic GFR-binding peptide
  MOD_RES (1)..(1): Xaa is C or S

SEQ ID NO: 47010 - protein, 23 aa, Artificial Sequence
  Cyclic GFR-binding peptide
RYKKLVKPTRGVFYLISIANLDQ

SEQ ID NO: 47011 - protein, 28 aa, Artificial Sequence
  Cyclic GFR-binding peptide
VMENSLQEVVKDYEDYYLMTLPELETPV

SEQ ID NO: 47012 - protein, 34 aa, Artificial Sequence; identical to SEQ ID NO: 1715
  Cyclic GFR-binding peptide
  MOD_RES (30)..(31): Xaa is C or S

SEQ ID NO: 47013 - protein, 28 aa, Artificial Sequence
  Cyclic GFR-binding peptide
  MOD_RES (1)..(1): Xaa is C or S
XSRVIMRYKKLVKPKRGVFYLISIANLA

SEQ ID NO: 47014 - protein, 30 aa, Artificial Sequence; identical to SEQ ID NO: 12281
  Cyclic GFR-binding peptide
  MOD_RES (2)..(2): Xaa is C or S

SEQ ID NO: 47015 - protein, 35 aa, Artificial Sequence; identical to SEQ ID NO: 12282
  Cyclic GFR-binding peptide
  MOD_RES (1)..(33)..(34): Xaa is C or S

SEQ ID NO: 47016 - protein, 33 aa, Artificial Sequence; identical to SEQ ID NO: 12283
  Cyclic GFR-binding peptide
  MOD_RES (2)..(2): Xaa is C or S

SEQ ID NO: 47017 - protein, 40 aa, Artificial Sequence; identical to SEQ ID NO: 12284
  Cyclic GFR-binding peptide
  MOD_RES (2)..(4)..(36)..(37): Xaa is C or S

SEQ ID NO: 47018 - protein, 27 aa, Artificial Sequence
  Cyclic GFR-binding peptide
SKVIMRYKKLIKPTKGIFYLISIANLD

SEQ ID NO: 47019 - protein, 32 aa, Artificial Sequence; identical to SEQ ID NO: 12286
  Cyclic GFR-binding peptide
  MOD_RES (2)..(2): Xaa is C or S

SEQ ID NO: 47020 - protein, 32 aa, Artificial Sequence; identical to SEQ ID NO: 12287
  Cyclic GFR-binding peptide
  MOD_RES (28)..(29): Xaa is C or S

SEQ ID NO: 47021 - protein, 20 aa, Artificial Sequence
  Cyclic GFR-binding peptide
EYQKYIKPTKGIIFLISIPS

SEQ ID NO: 47022 - protein, 30 aa, Artificial Sequence; identical to SEQ ID NO: 1724
  Cyclic GFR-binding peptide
  MOD_RES (1)..(3): Xaa is C or S

SEQ ID NO: 47023 - protein, 25 aa, Artificial Sequence
  Cyclic GFR-binding peptide
NSLQEIVNSSDDYYLVTLPELKTPA

SEQ ID NO: 47024 - protein, 34 aa, Artificial Sequence; identical to SEQ ID NO: 12291
  Cyclic GFR-binding peptide
  MOD_RES (31)..(32): Xaa is C or S

SEQ ID NO: 47025 - protein, 34 aa, Artificial Sequence; identical to SEQ ID NO: 12292
  Cyclic GFR-binding peptide
  MOD_RES (30)..(31): Xaa is C or S

SEQ ID NO: 47026 - protein, 27 aa, Artificial Sequence
  Cyclic GFR-binding peptide
VVMRYKKLVKPTRGVFYLISIANLDQP

SEQ ID NO: 47027 - protein, 33 aa, Artificial Sequence; identical to SEQ ID NO: 1732
  Cyclic GFR-binding peptide
  MOD_RES (1)..(32)..(33): Xaa is C or S

SEQ ID NO: 47028 - protein, 35 aa, Artificial Sequence; identical to SEQ ID NO: 12295
  Cyclic GFR-binding peptide
  MOD_RES (29)..(30): Xaa is C or S

SEQ ID NO: 47029 - protein, 25 aa, Artificial Sequence
  Cyclic GFR-binding peptide
VMENSLQEVVKDYEDYYVMPLPELE

SEQ ID NO: 47030 - protein, 34 aa, Artificial Sequence; identical to SEQ ID NO: 12299
  Cyclic GFR-binding peptide
  MOD_RES (30)..(31): Xaa is C or S

SEQ ID NO: 47031 - protein, 40 aa, Artificial Sequence; identical to SEQ ID NO: 12300
  Cyclic GFR-binding peptide
  MOD_RES (2)..(4)..(35)..(36): Xaa is C or S

SEQ ID NO: 47032 - protein, 21 aa, Artificial Sequence
  Cyclic GFR-binding peptide
RYKKLVVNNASDFYLISIANL

SEQ ID NO: 47033 - protein, 28 aa, Artificial Sequence
  Cyclic GFR-binding peptide
  MOD_RES (27)..(28): Xaa is C or S
DNSLQEVVKENEDYYVMPLPELETPVXX

SEQ ID NO: 47034 - protein, 26 aa, Artificial Sequence
  Cyclic GFR-binding peptide
EVVMDRYKKLVVKENEDFYLMSIANL

SEQ ID NO: 47035 - protein, 30 aa, Artificial Sequence; identical to SEQ ID NO: 12306
  Cyclic GFR-binding peptide
  MOD_RES (28)..(29): Xaa is C or S

SEQ ID NO: 47036 - protein, 27 aa, Artificial Sequence
  Cyclic GFR-binding peptide
  MOD_RES (1)..(1): Xaa is C or S
XARVVMNNSLQEIVNSSDDYYVVPLPE

SEQ ID NO: 47037 - protein, 28 aa, Artificial Sequence
  Cyclic GFR-binding peptide
  MOD_RES (1)..(1): Xaa is C or S
XSRVVMNNSLQEIVNSSDDYYLVTLPEL

SEQ ID NO: 47038 - protein, 30 aa, Artificial Sequence; identical to SEQ ID NO: 12309
  Cyclic GFR-binding peptide
  MOD_RES (30)..(30): Xaa is C or S

SEQ ID NO: 47039 - protein, 33 aa, Artificial Sequence; identical to SEQ ID NO: 12310
  Cyclic GFR-binding peptide
  MOD_RES (2)..(33): Xaa is C or S

SEQ ID NO: 47040 - protein, 32 aa, Artificial Sequence; identical to SEQ ID NO: 1750
  Cyclic GFR-binding peptide
  MOD_RES (29)..(30): Xaa is C or S

SEQ ID NO: 47041 - protein, 34 aa, Artificial Sequence; identical to SEQ ID NO: 12312
  Cyclic GFR-binding peptide
  MOD_RES (29)..(30): Xaa is C or S

SEQ ID NO: 47042 - protein, 34 aa, Artificial Sequence; identical to SEQ ID NO: 12313
  Cyclic GFR-binding peptide
  MOD_RES (30)..(31): Xaa is C or S

SEQ ID NO: 47043 - protein, 36 aa, Artificial Sequence; identical to SEQ ID NO: 12316
  Cyclic GFR-binding peptide
  MOD_RES (32)..(33): Xaa is C or S

SEQ ID NO: 47044 - protein, 36 aa, Artificial Sequence; identical to SEQ ID NO: 12317
  Cyclic GFR-binding peptide
  MOD_RES (2)..(34)..(35): Xaa is C or S

SEQ ID NO: 47045 - protein, 33 aa, Artificial Sequence; identical to SEQ ID NO: 1761
  Cyclic GFR-binding peptide
  MOD_RES (2)..(2): Xaa is C or S

SEQ ID NO: 47046 - protein, 34 aa, Artificial Sequence; identical to SEQ ID NO: 12321
  Cyclic GFR-binding peptide
  MOD_RES (32)..(32): Xaa is C or S

SEQ ID NO: 47047 - protein, 27 aa, Artificial Sequence
  Cyclic GFR-binding peptide
  MOD_RES (26)..(27): Xaa is C or S
RYKKLIKPTKGIFYLISIANLDQSVXX

SEQ ID NO: 47048 - protein, 31 aa, Artificial Sequence; identical to SEQ ID NO: 12323
  Cyclic GFR-binding peptide
  MOD_RES (1)..(3): Xaa is C or S

SEQ ID NO: 47049 - protein, 39 aa, Artificial Sequence; identical to SEQ ID NO: 12324
  Cyclic GFR-binding peptide
  MOD_RES (2)..(34): Xaa is C or S

SEQ ID NO: 47050 - protein, 27 aa, Artificial Sequence
  Cyclic GFR-binding peptide
MNEYQKYIVNSSDDIFLVSIPSLQTPA

SEQ ID NO: 47051 - protein, 28 aa, Artificial Sequence
  Cyclic GFR-binding peptide
  MOD_RES (27)..(28): Xaa is C or S
DEYQKYVVKENEDIFLMSIPSLETPVXX

SEQ ID NO: 47052 - protein, 39 aa, Artificial Sequence; identical to SEQ ID NO: 12327
  Cyclic GFR-binding peptide
  MOD_RES (2)..(4)..(35)..(36): Xaa is C or S

SEQ ID NO: 47053 - protein, 35 aa, Artificial Sequence; identical to SEQ ID NO: 12328
  Cyclic GFR-binding peptide
  MOD_RES (2)..(4): Xaa is C or S

SEQ ID NO: 47054 - protein, 36 aa, Artificial Sequence; identical to SEQ ID NO: 12329
  Cyclic GFR-binding peptide
  MOD_RES (2)..(4)..(36): Xaa is C or S

SEQ ID NO: 47055 - protein, 24 aa, Artificial Sequence
  Cyclic GFR-binding peptide
EYQKYVVKENEDIFLMSIPSLETP

SEQ ID NO: 47056 - protein, 26 aa, Artificial Sequence
  Cyclic GFR-binding peptide
RVVMNNSLQEIVNSSDDYYVVPLPEL

SEQ ID NO: 47057 - protein, 34 aa, Artificial Sequence; identical to SEQ ID NO: 12332
  Cyclic GFR-binding peptide
  MOD_RES (29)..(30): Xaa is C or S

SEQ ID NO: 47058 - protein, 34 aa, Artificial Sequence; identical to SEQ ID NO: 12333
  Cyclic GFR-binding peptide
  MOD_RES (30)..(31): Xaa is C or S

SEQ ID NO: 47059 - protein, 37 aa, Artificial Sequence; identical to SEQ ID NO: 12334
  Cyclic GFR-binding peptide
  MOD_RES (31)..(32): Xaa is C or S

SEQ ID NO: 47060 - protein, 31 aa, Artificial Sequence; identical to SEQ ID NO: 12335
  Cyclic GFR-binding peptide
  MOD_RES (1)..(1): Xaa is C or S

SEQ ID NO: 47061 - protein, 24 aa, Artificial Sequence
  Cyclic GFR-binding peptide
VMNRYKKLIVNSSDDFYLVSIANL

SEQ ID NO: 47062 - protein, 36 aa, Artificial Sequence; identical to SEQ ID NO: 12338
  Cyclic GFR-binding peptide
  MOD_RES (32)..(33): Xaa is C or S

SEQ ID NO: 47063 - protein, 30 aa, Artificial Sequence; identical to SEQ ID NO: 12339
  Cyclic GFR-binding peptide
  MOD_RES (2)..(2): Xaa is C or S

SEQ ID NO: 47064 - protein, 36 aa, Artificial Sequence; identical to SEQ ID NO: 12340
  Cyclic GFR-binding peptide
  MOD_RES (31)..(32): Xaa is C or S

SEQ ID NO: 47065 - protein, 28 aa, Artificial Sequence
  Cyclic GFR-binding peptide
  MOD_RES (27)..(28): Xaa is C or S
DRYKKLVVKENEDFYLMSIANLETPVXX

SEQ ID NO: 47066 - protein, 24 aa, Artificial Sequence
  Cyclic GFR-binding peptide
VMDRYKKLVVKENEDFYLMSIANL

SEQ ID NO: 47067 - protein, 33 aa, Artificial Sequence; identical to SEQ ID NO: 12345
  Cyclic GFR-binding peptide
  MOD_RES (2)..(2): Xaa is C or S

SEQ ID NO: 47068 - protein, 35 aa, Artificial Sequence; identical to SEQ ID NO: 12346
  Cyclic GFR-binding peptide
  MOD_RES (30)..(31): Xaa is C or S

SEQ ID NO: 47069 - protein, 32 aa, Artificial Sequence; identical to SEQ ID NO: 12347
  Cyclic GFR-binding peptide
  MOD_RES (29)..(30): Xaa is C or S

SEQ ID NO: 47070 - protein, 23 aa, Artificial Sequence
  Cyclic GFR-binding peptide
RYKKLVVKENEDFYLMSIANLET

SEQ ID NO: 47071 - protein, 29 aa, Artificial Sequence
  Cyclic GFR-binding peptide
  MOD_RES (26)..(27): Xaa is C or S
NSLQEIVNSSDDYYLVTLPELKTPAXXPK

SEQ ID NO: 47072 - protein, 34 aa, Artificial Sequence; identical to SEQ ID NO: 12350
  Cyclic GFR-binding peptide
  MOD_RES (1)..(33)..(34): Xaa is C or S

SEQ ID NO: 47073 - protein, 27 aa, Artificial Sequence
  Cyclic GFR-binding peptide
  MOD_RES (27)..(27): Xaa is C or S
EEYQKYVVKDYEDIFLMSIPSLETPVX

SEQ ID NO: 47074 - protein, 26 aa, Artificial Sequence
  Cyclic GFR-binding peptide
RVIMNSLQEVKPKRGVYYLITLPELA

SEQ ID NO: 47075 - protein, 37 aa, Artificial Sequence; identical to SEQ ID NO: 12355
  Cyclic GFR-binding peptide
  MOD_RES (2)..(34): Xaa is C or S

SEQ ID NO: 47076 - protein, 35 aa, Artificial Sequence; identical to SEQ ID NO: 12356
  Cyclic GFR-binding peptide
  MOD_RES (30)..(31): Xaa is C or S

SEQ ID NO: 47077 - protein, 24 aa, Artificial Sequence
  Cyclic GFR-binding peptide
VVMDRYKKLVVKENEDFYLMSIAN

SEQ ID NO: 47078 - protein, 30 aa, Artificial Sequence; identical to SEQ ID NO: 1804
  Cyclic GFR-binding peptide
  MOD_RES (29)..(30): Xaa is C or S

SEQ ID NO: 47079 - protein, 37 aa, Artificial Sequence; identical to SEQ ID NO: 12359
  Cyclic GFR-binding peptide
  MOD_RES (32)..(33): Xaa is C or S

SEQ ID NO: 47080 - protein, 26 aa, Artificial Sequence
  Cyclic GFR-binding peptide
MDNSLQEVVNNASDYYVIPLPELRTP

SEQ ID NO: 47081 - protein, 35 aa, Artificial Sequence; identical to SEQ ID NO: 1812
  Cyclic GFR-binding peptide
  MOD_RES (32)..(33): Xaa is C or S

SEQ ID NO: 47082 - protein, 31 aa, Artificial Sequence; identical to SEQ ID NO: 12363
  Cyclic GFR-binding peptide
  MOD_RES (30)..(31): Xaa is C or S

SEQ ID NO: 47083 - protein, 32 aa, Artificial Sequence; identical to SEQ ID NO: 1815
  Cyclic GFR-binding peptide
  MOD_RES (2)..(2): Xaa is C or S

SEQ ID NO: 47084 - protein, 29 aa, Artificial Sequence
  Cyclic GFR-binding peptide
  MOD_RES (1)..(3): Xaa is C or S
XGXGEVVMENSLQEVVKDYEDYYVMPLPE

SEQ ID NO: 47085 - protein, 32 aa, Artificial Sequence; identical to SEQ ID NO: 1817
  Cyclic GFR-binding peptide
  MOD_RES (26)..(27): Xaa is C or S

SEQ ID NO: 47086 - protein, 28 aa, Artificial Sequence
  Cyclic GFR-binding peptide
  MOD_RES (26)..(27): Xaa is C or S
NSLQEVKPTRGVYYLITLPELDQPVXXP

SEQ ID NO: 47087 - protein, 35 aa, Artificial Sequence; identical to SEQ ID NO: 12367
  Cyclic GFR-binding peptide
  MOD_RES (1)..(3)..(35): Xaa is C or S

SEQ ID NO: 47088 - protein, 35 aa, Artificial Sequence; identical to SEQ ID NO: 12370
  Cyclic GFR-binding peptide
  MOD_RES (2)..(4): Xaa is C or S

SEQ ID NO: 47089 - protein, 28 aa, Artificial Sequence
  Cyclic GFR-binding peptide
  MOD_RES (27)..(28): Xaa is C or S
ERYKKLVVKDYEDFYLMSIANLETPVXX

SEQ ID NO: 47090 - protein, 27 aa, Artificial Sequence
  Cyclic GFR-binding peptide
MDNSLQEVVNNASDYYVIPLPELRTPV

SEQ ID NO: 47091 - protein, 34 aa, Artificial Sequence
  Cyclic GFR-binding peptide
  MOD_RES (31)..(32): Xaa is C or S
SKVVMNSLQEVKPTRGVYYLITLPELDQPVXXPS

SEQ ID NO: 47092 - protein, 27 aa, Artificial Sequence
  Cyclic GFR-binding peptide
  MOD_RES (1)..(1): Xaa is C or S
XSRVVMNNSLQEIVNSSDDYYVVPLPE

SEQ ID NO: 47093 - protein, 25 aa, Artificial Sequence
  Cyclic GFR-binding peptide
VMNEYQKYIVNSSDDIFLVSIPSLQ

SEQ ID NO: 47094 - protein, 39 aa, Artificial Sequence; identical to SEQ ID NO: 12378
  Cyclic GFR-binding peptide
  MOD_RES (1)..(3)..(34)..(35): Xaa is C or S

SEQ ID NO: 47095 - protein, 33 aa, Artificial Sequence; identical to SEQ ID NO: 12379
  Cyclic GFR-binding peptide
  MOD_RES (1)..(3): Xaa is C or S

SEQ ID NO: 47096 - protein, 30 aa, Artificial Sequence; identical to SEQ ID NO: 12380
  Cyclic GFR-binding peptide
  MOD_RES (28)..(29): Xaa is C or S

SEQ ID NO: 47097 - protein, 33 aa, Artificial Sequence; identical to SEQ ID NO: 12381
  Cyclic GFR-binding peptide
  MOD_RES (31)..(32): Xaa is C or S

SEQ ID NO: 47098 - protein, 31 aa, Artificial Sequence; identical to SEQ ID NO: 12382
  Cyclic GFR-binding peptide
  MOD_RES (29)..(30): Xaa is C or S

SEQ ID NO: 47099 - protein, 35 aa, Artificial Sequence; identical to SEQ ID NO: 1842
  Cyclic GFR-binding peptide
  MOD_RES (32)..(33): Xaa is C or S

SEQ ID NO: 47100 - protein, 31 aa, Artificial Sequence; identical to SEQ ID NO: 12385
  Cyclic GFR-binding peptide
  MOD_RES (27)..(28): Xaa is C or S

SEQ ID NO: 47101 - protein, 32 aa, Artificial Sequence; identical to SEQ ID NO: 1846
  Cyclic GFR-binding peptide
  MOD_RES (26)..(27): Xaa is C or S

SEQ ID NO: 47102 - protein, 26 aa, Artificial Sequence
  Cyclic GFR-binding peptide
NEYQKYIVNSSDDIFLVSIPSLKTPA

SEQ ID NO: 47103 - protein, 36 aa, Artificial Sequence; identical to SEQ ID NO: 1849
  Cyclic GFR-binding peptide
  MOD_RES (2)..(34)..(35): Xaa is C or S

SEQ ID NO: 47104 - protein, 32 aa, Artificial Sequence; identical to SEQ ID NO: 12389
  Cyclic GFR-binding peptide
  MOD_RES (31)..(32): Xaa is C or S

SEQ ID NO: 47105 - protein, 30 aa, Artificial Sequence; identical to SEQ ID NO: 12390
  Cyclic GFR-binding peptide

SEQ ID NO: 47106 - protein, 29 aa, Artificial Sequence
  Cyclic GFR-binding peptide
  MOD_RES (26)..(27): Xaa is C or S
EYQKYVKPKRGVIFLISIPSLAQPVXXPA

SEQ ID NO: 47107 - protein, 30 aa, Artificial Sequence; identical to SEQ ID NO: 12392
  Cyclic GFR-binding peptide
  MOD_RES (1)..(3): Xaa is C or S

SEQ ID NO: 47108 - protein, 31 aa, Artificial Sequence; identical to SEQ ID NO: 12393
  Cyclic GFR-binding peptide
  MOD_RES (30)..(31): Xaa is C or S

SEQ ID NO: 47109 - protein, 31 aa, Artificial Sequence; identical to SEQ ID NO: 1852
  Cyclic GFR-binding peptide
  MOD_RES (31)..(31): Xaa is C or S

SEQ ID NO: 47110 - protein, 34 aa, Artificial Sequence; identical to SEQ ID NO: 12395
  Cyclic GFR-binding peptide
  MOD_RES (31)..(32): Xaa is C or S

SEQ ID NO: 47111 - protein, 32 aa, Artificial Sequence; identical to SEQ ID NO: 12397
  Cyclic GFR-binding peptide
  MOD_RES (27)..(27): Xaa is C or S

SEQ ID NO: 47112 - protein, 25 aa, Artificial Sequence
  Cyclic GFR-binding peptide
SRVIMNSLQEVKPKRGVYYLITLPE

SEQ ID NO: 47113 - protein, 26 aa, Artificial Sequence
  Cyclic GFR-binding peptide
VVMERYKKLVVKDYEDFYLMSIANLE

SEQ ID NO: 47114 - protein, 36 aa, Artificial Sequence; identical to SEQ ID NO: 12400
  Cyclic GFR-binding peptide
  MOD_RES (31)..(32): Xaa is C or S

SEQ ID NO: 47115 - protein, 24 aa, Artificial Sequence
  Cyclic GFR-binding peptide
VIMEYQKYVKPKRGVIFLISIPSL

SEQ ID NO: 47116 - protein, 35 aa, Artificial Sequence; identical to SEQ ID NO: 1861
  Cyclic GFR-binding peptide
  MOD_RES (30)..(31): Xaa is C or S

SEQ ID NO: 47117 - protein, 32 aa, Artificial Sequence; identical to SEQ ID NO: 12404
  Cyclic GFR-binding peptide
  MOD_RES (1)..(32): Xaa is C or S

SEQ ID NO: 47118 - protein, 32 aa, Artificial Sequence; identical to SEQ ID NO: 12405
  Cyclic GFR-binding peptide
  MOD_RES (2)..(4): Xaa is C or S

SEQ ID NO: 47119 - protein, 28 aa, Artificial Sequence
  Cyclic GFR-binding peptide
  MOD_RES (26)..(27): Xaa is C or S
EYQKYVVKENEDIFLMSIPSLETPVXXA

SEQ ID NO: 47120 - protein, 29 aa, Artificial Sequence
  Cyclic GFR-binding peptide
  MOD_RES (28)..(29): Xaa is C or S
IMRYKKLIKPTKGIFYLISIANLDQSVXX

SEQ ID NO: 47121 - protein, 37 aa, Artificial Sequence; identical to SEQ ID NO: 12411
  Cyclic GFR-binding peptide
  MOD_RES (31)..(32): Xaa is C or S

SEQ ID NO: 47122 - protein, 31 aa, Artificial Sequence; identical to SEQ ID NO: 12412
  Cyclic GFR-binding peptide
  MOD_RES (26)..(27): Xaa is C or S

SEQ ID NO: 47123 - protein, 33 aa, Artificial Sequence; identical to SEQ ID NO: 12414
  Cyclic GFR-binding peptide
  MOD_RES (32)..(32): Xaa is C or S

SEQ ID NO: 47124 - protein, 32 aa, Artificial Sequence; identical to SEQ ID NO: 12415
  Cyclic GFR-binding peptide
  MOD_RES (1)..(1): Xaa is C or S

SEQ ID NO: 47125 - protein, 34 aa, Artificial Sequence; identical to SEQ ID NO: 1874
  Cyclic GFR-binding peptide
  MOD_RES (1)..(32)..(33): Xaa is C or S

SEQ ID NO: 47126 - protein, 35 aa, Artificial Sequence; identical to SEQ ID NO: 12418
  Cyclic GFR-binding peptide
  MOD_RES (2)..(34): Xaa is C or S

SEQ ID NO: 47127 - protein, 32 aa, Artificial Sequence; identical to SEQ ID NO: 12419
  Cyclic GFR-binding peptide
  MOD_RES (28)..(29): Xaa is C or S

SEQ ID NO: 47128 - protein, 38 aa, Artificial Sequence; identical to SEQ ID NO: 1878
  Cyclic GFR-binding peptide
  MOD_RES (1)..(32)..(33): Xaa is C or S

SEQ ID NO: 47129 - protein, 28 aa, Artificial Sequence
  Cyclic GFR-binding peptide
VMNNSLQEIVNSSDDYYVVPLPELQTPA

SEQ ID NO: 47130 - protein, 35 aa, Artificial Sequence; identical to SEQ ID NO: 12422
  Cyclic GFR-binding peptide
  MOD_RES (2)..(4): Xaa is C or S

SEQ ID NO: 47131 - protein, 30 aa, Artificial Sequence; identical to SEQ ID NO: 12423
  Cyclic GFR-binding peptide

SEQ ID NO: 47132 - protein, 29 aa, Artificial Sequence
  Cyclic GFR-binding peptide
  MOD_RES (1)..(1): Xaa is C or S
XSRVIMEYQKYVKPKRGVIFLISIPSLAQ

SEQ ID NO: 47133 - protein, 39 aa, Artificial Sequence; identical to SEQ ID NO: 1881
  Cyclic GFR-binding peptide
  MOD_RES (2)..(4)..(36): Xaa is C or S

SEQ ID NO: 47134 - protein, 37 aa, Artificial Sequence; identical to SEQ ID NO: 12427
  Cyclic GFR-binding peptide
  MOD_RES (1)..(32)..(33): Xaa is C or S

SEQ ID NO: 47135 - protein, 35 aa, Artificial Sequence; identical to SEQ ID NO: 12428
  Cyclic GFR-binding peptide
  MOD_RES (1)..(3)..(34)..(35): Xaa is C or S

SEQ ID NO: 47136 - protein, 37 aa, Artificial Sequence; identical to SEQ ID NO: 1884
  Cyclic GFR-binding peptide
  MOD_RES (31)..(31): Xaa is C or S

SEQ ID NO: 47137 - protein, 30 aa, Artificial Sequence; identical to SEQ ID NO: 12430
  Cyclic GFR-binding peptide

SEQ ID NO: 47138 - protein, 29 aa, Artificial Sequence
  Cyclic GFR-binding peptide
EVVMERYKKLVVKDYEDFYLMSIANLETP

SEQ ID NO: 47139 - protein, 24 aa, Artificial Sequence
  Cyclic GFR-binding peptide
IMNSLQEVKPKRGVYYLITLPELA

SEQ ID NO: 47140 - protein, 30 aa, Artificial Sequence; identical to SEQ ID NO: 12433
  Cyclic GFR-binding peptide
  MOD_RES (26)..(27): Xaa is C or S

SEQ ID NO: 47141 - protein, 36 aa, Artificial Sequence; identical to SEQ ID NO: 12434
  Cyclic GFR-binding peptide
  MOD_RES (2)..(4)..(36): Xaa is C or S

SEQ ID NO: 47142 - protein, 37 aa, Artificial Sequence; identical to SEQ ID NO: 1889
  Cyclic GFR-binding peptide
  MOD_RES (1)..(3)..(35)..(36): Xaa is C or S

SEQ ID NO: 47143 - protein, 28 aa, Artificial Sequence
  Cyclic GFR-binding peptide
  MOD_RES (27)..(28): Xaa is C or S
MNSLQEIKPTKGIYYLITLPELDQSVXX

SEQ ID NO: 47144 - protein, 37 aa, Artificial Sequence; identical to SEQ ID NO: 1891
  Cyclic GFR-binding peptide
  MOD_RES (31)..(32): Xaa is C or S

SEQ ID NO: 47145 - protein, 35 aa, Artificial Sequence; identical to SEQ ID NO: 12439
  Cyclic GFR-binding peptide
  MOD_RES (2)..(34)..(35): Xaa is C or S

SEQ ID NO: 47146 - protein, 30 aa, Artificial Sequence
  Cyclic GFR-binding peptide
  MOD_RES (30)..(30): Xaa is C or S
KVVMNSLQEVKPTRGVYYLITLPELDQPVX

SEQ ID NO: 47147 - protein, 29 aa, Artificial Sequence
  Cyclic GFR-binding peptide
  MOD_RES (2)..(2): Xaa is C or S
KXSKVVMRYKKLVKPTRGVFYLISIANLD

SEQ ID NO: 47148 - protein, 31 aa, Artificial Sequence; identical to SEQ ID NO: 12441
  Cyclic GFR-binding peptide
  MOD_RES (1)..(3): Xaa is C or S

SEQ ID NO: 47149 - protein, 39 aa, Artificial Sequence; identical to SEQ ID NO: 12442
  Cyclic GFR-binding peptide
  MOD_RES (1)..(3)..(34)..(35): Xaa is C or S

SEQ ID NO: 47150 - protein, 34 aa, Artificial Sequence; identical to SEQ ID NO: 12444
  Cyclic GFR-binding peptide
  MOD_RES (28)..(29): Xaa is C or S

SEQ ID NO: 47151 - protein, 29 aa, Artificial Sequence
  Cyclic GFR-binding peptide
  MOD_RES (28)..(29): Xaa is C or S
MNNSLQEIVNSSDDYYLVTLPELKTPAXX

SEQ ID NO: 47152 - protein, 27 aa, Artificial Sequence
  Cyclic GFR-binding peptide
  MOD_RES (27)..(27): Xaa is C or S
MRYKKLIKPTKGIFYLISIANLDQSVX

SEQ ID NO: 47153 - protein, 29 aa, Artificial Sequence
  Cyclic GFR-binding peptide
  MOD_RES (27)..(28): Xaa is C or S
NNSLQEIVNSSDDYYVVPLPELQTPAXXP

SEQ ID NO: 47154 - protein, 24 aa, Artificial Sequence
  Cyclic GFR-binding peptide
NEYQKYIVNSSDDIFLVSIPSLKT

SEQ ID NO: 47155 - protein, 30 aa, Artificial Sequence; identical to SEQ ID NO: 12450
  Cyclic GFR-binding peptide

SEQ ID NO: 47156 - protein, 39 aa, Artificial Sequence; identical to SEQ ID NO: 1899
  Cyclic GFR-binding peptide
  MOD_RES (1)..(3)..(35)..(36): Xaa is C or S

SEQ ID NO: 47157 - protein, 31 aa, Artificial Sequence; identical to SEQ ID NO: 1901
  Cyclic GFR-binding peptide
  MOD_RES (27)..(28): Xaa is C or S

SEQ ID NO: 47158 - protein, 31 aa, Artificial Sequence; identical to SEQ ID NO: 12453
  Cyclic GFR-binding peptide
  MOD_RES (27)..(27): Xaa is C or S

SEQ ID NO: 47159 - protein, 26 aa, Artificial Sequence
  Cyclic GFR-binding peptide
EVVMDNSLQEVVKENEDYYVMPLPEL

SEQ ID NO: 47160 - protein, 29 aa, Artificial Sequence
  Cyclic GFR-binding peptide
  MOD_RES (28)..(28): Xaa is C or S
MNRYKKLIVNSSDDFYLVSIANLKTPAXT

SEQ ID NO: 47161 - protein, 26 aa, Artificial Sequence
  Cyclic GFR-binding peptide
MEEYQKYVVKDYEDIFLMSIPSLETP

SEQ ID NO: 47162 - protein, 33 aa, Artificial Sequence; identical to SEQ ID NO: 1911
  Cyclic GFR-binding peptide
  MOD_RES (28)..(28): Xaa is C or S

SEQ ID NO: 47163 - protein, 23 aa, Artificial Sequence
  Cyclic GFR-binding peptide
MEEYQKYVVKDYEDIFLMSIPSL

SEQ ID NO: 47164 - protein, 33 aa, Artificial Sequence; identical to SEQ ID NO: 12461
  Cyclic GFR-binding peptide
  MOD_RES (1)..(3): Xaa is C or S

SEQ ID NO: 47165 - protein, 26 aa, Artificial Sequence
  Cyclic GFR-binding peptide
VVMEEYQKYVVKDYEDIFLMSIPSLE

SEQ ID NO: 47166 - protein, 23 aa, Artificial Sequence
  Cyclic GFR-binding peptide
MEYQKYVKPKRGVIFLISIPSLA

SEQ ID NO: 47167 - protein, 28 aa, Artificial Sequence
  Cyclic GFR-binding peptide
  MOD_RES (1)..(1): Xaa is C or S
XSKVIMNSLQEIKPTKGIYYLITLPELD

SEQ ID NO: 47168 - protein, 30 aa, Artificial Sequence; identical to SEQ ID NO: 1916
  Cyclic GFR-binding peptide
  MOD_RES (29)..(30): Xaa is C or S

SEQ ID NO: 47169 - protein, 21 aa, Artificial Sequence
  Cyclic GFR-binding peptide
NSLQEVKPKRGVYYLITLPEL

SEQ ID NO: 47170 - protein, 32 aa, Artificial Sequence; identical to SEQ ID NO: 12468
  Cyclic GFR-binding peptide
  MOD_RES (32)..(32): Xaa is C or S

SEQ ID NO: 47171 - protein, 41 aa, Artificial Sequence; identical to SEQ ID NO: 12469
  Cyclic GFR-binding peptide
  MOD_RES (2)..(4)..(36)..(37): Xaa is C or S

SEQ ID NO: 47172 - protein, 27 aa, Artificial Sequence
  Cyclic GFR-binding peptide
VMRYKKLVKPTRGVFYLISIANLDQPV

SEQ ID NO: 47173 - protein, 28 aa, Artificial Sequence
  Cyclic GFR-binding peptide
  MOD_RES (28)..(28): Xaa is C or S
MNEYQKYIVNSSDDIFLVSIPSLKTPAX

SEQ ID NO: 47174 - protein, 29 aa, Artificial Sequence
  Cyclic GFR-binding peptide
  MOD_RES (1)..(1): Xaa is C or S
XSEVVMDNSLQEVVNNASDYYVIPLPELR

SEQ ID NO: 47175 - protein, 30 aa, Artificial Sequence; identical to SEQ ID NO: 12475
  Cyclic GFR-binding peptide
  MOD_RES (28)..(29): Xaa is C or S

SEQ ID NO: 47176 - protein, 33 aa, Artificial Sequence; identical to SEQ ID NO: 12476
  Cyclic GFR-binding peptide
  MOD_RES (1)..(33): Xaa is C or S

SEQ ID NO: 47177 - protein, 28 aa, Artificial Sequence
  Cyclic GFR-binding peptide
SRVVMNEYQKYIVNSSDDIFLVSIPSLK

SEQ ID NO: 47178 - protein, 31 aa, Artificial Sequence; identical to SEQ ID NO: 1933
  Cyclic GFR-binding peptide
  MOD_RES (2)..(4): Xaa is C or S

SEQ ID NO: 47179 - protein, 30 aa, Artificial Sequence; identical to SEQ ID NO: 1935
  Cyclic GFR-binding peptide
  MOD_RES (27)..(28): Xaa is C or S

SEQ ID NO: 47180 - protein, 32 aa, Artificial Sequence; identical to SEQ ID NO: 12482
  Cyclic GFR-binding peptide
  MOD_RES (28)..(29): Xaa is C or S

SEQ ID NO: 47181 - protein, 39 aa, Artificial Sequence; identical to SEQ ID NO: 12483
  Cyclic GFR-binding peptide
  MOD_RES (2)..(4)..(36)..(37): Xaa is C or S

SEQ ID NO: 47182 - protein, 24 aa, Artificial Sequence
  Cyclic GFR-binding peptide
RVIMNSLQEVKPKRGVYYLITLPE

SEQ ID NO: 47183 - protein, 27 aa, Artificial Sequence
  Cyclic GFR-binding peptide
  MOD_RES (2)..(2): Xaa is C or S
KXSKVVMRYKKLVKPTRGVFYLISIAN

SEQ ID NO: 47184 - protein, 27 aa, Artificial Sequence
  Cyclic GFR-binding peptide
  MOD_RES (26)..(27): Xaa is C or S
EYQKYVKPKRGVIFLISIPSLAQPVXX

SEQ ID NO: 47185 - protein, 35 aa, Artificial Sequence; identical to SEQ ID NO: 12487
  Cyclic GFR-binding peptide
  MOD_RES (31)..(31): Xaa is C or S

SEQ ID NO: 47186 - protein, 27 aa, Artificial Sequence
  Cyclic GFR-binding peptide
MENSLQEVVKDYEDYYLMTLPELETPV

SEQ ID NO: 47187 - protein, 31 aa, Artificial Sequence; identical to SEQ ID NO: 12491
  Cyclic GFR-binding peptide
  MOD_RES (27)..(27): Xaa is C or S

SEQ ID NO: 47188 - protein, 28 aa, Artificial Sequence
  Cyclic GFR-binding peptide
VVMDRYKKLVVKENEDFYLMSIANLETP

SEQ ID NO: 47189 - protein, 31 aa, Artificial Sequence; identical to SEQ ID NO: 1951
  Cyclic GFR-binding peptide
  MOD_RES (31)..(31): Xaa is C or S

SEQ ID NO: 47190 - protein, 29 aa, Artificial Sequence
  Cyclic GFR-binding peptide
GEVVMDRYKKLVVKENEDFYLMSIANLET

SEQ ID NO: 47191 - protein, 36 aa, Artificial Sequence; identical to SEQ ID NO: 12498
  Cyclic GFR-binding peptide
  MOD_RES (30)..(31): Xaa is C or S

SEQ ID NO: 47192 - protein, 22 aa, Artificial Sequence
  Cyclic GFR-binding peptide
MNSLQEVKPTRGVYYLITLPEL

SEQ ID NO: 47193 - protein, 23 aa, Artificial Sequence
  Cyclic GFR-binding peptide
NSLQEVKPTRGVYYVIPLPELDQ

SEQ ID NO: 47194 - protein, 31 aa, Artificial Sequence; identical to SEQ ID NO: 1954
  Cyclic GFR-binding peptide
  MOD_RES (27)..(27): Xaa is C or S

SEQ ID NO: 47195 - protein, 34 aa, Artificial Sequence; identical to SEQ ID NO: 12501
  Cyclic GFR-binding peptide
  MOD_RES (30)..(31): Xaa is C or S

SEQ ID NO: 47196 - protein, 30 aa, Artificial Sequence; identical to SEQ ID NO: 12503
  Cyclic GFR-binding peptide
  MOD_RES (29)..(30): Xaa is C or S

SEQ ID NO: 47197 - protein, 31 aa, Artificial Sequence; identical to SEQ ID NO: 12504
  Cyclic GFR-binding peptide
  MOD_RES (2)..(2): Xaa is C or S

SEQ ID NO: 47198 - protein, 25 aa, Artificial Sequence
  Cyclic GFR-binding peptide
MDRYKKLVVKENEDFYLMSIANLET

SEQ ID NO: 47199 - protein, 28 aa, Artificial Sequence
  Cyclic GFR-binding peptide
EVVMENSLQEVVKDYEDYYVMPLPELET

SEQ ID NO: 47200 - protein, 32 aa, Artificial Sequence; identical to SEQ ID NO: 1958
  Cyclic GFR-binding peptide
  MOD_RES (29)..(30): Xaa is C or S

SEQ ID NO: 47201 - protein, 38 aa, Artificial Sequence; identical to SEQ ID NO: 12510
  Cyclic GFR-binding peptide
  MOD_RES (2)..(34)..(35): Xaa is C or S

SEQ ID NO: 47202 - protein, 33 aa, Artificial Sequence; identical to SEQ ID NO: 1966
  Cyclic GFR-binding peptide
  MOD_RES (29)..(30): Xaa is C or S

SEQ ID NO: 47203 - protein, 29 aa, Artificial Sequence
  Cyclic GFR-binding peptide
KVVMNSLQEVKPTRGVYYVIPLPELDQPV

SEQ ID NO: 47204 - protein, 28 aa, Artificial Sequence
  Cyclic GFR-binding peptide
  MOD_RES (2)..(2): Xaa is C or S
GXSEVVMDNSLQEVVNNASDYYVIPLPE

SEQ ID NO: 47205 - protein, 35 aa, Artificial Sequence; identical to SEQ ID NO: 12518
  Cyclic GFR-binding peptide
  MOD_RES (1)..(3)..(35): Xaa is C or S

SEQ ID NO: 47206 - protein, 35 aa, Artificial Sequence; identical to SEQ ID NO: 12519
  Cyclic GFR-binding peptide
  MOD_RES (1)..(33)..(34): Xaa is C or S

SEQ ID NO: 47207 - protein, 38 aa, Artificial Sequence; identical to SEQ ID NO: 12521
  Cyclic GFR-binding peptide
  MOD_RES (1)..(3)..(35): Xaa is C or S

SEQ ID NO: 47208 - protein, 40 aa, Artificial Sequence; identical to SEQ ID NO: 12522
  Cyclic GFR-binding peptide
  MOD_RES (2)..(34)..(35): Xaa is C or S

SEQ ID NO: 47209 - protein, 34 aa, Artificial Sequence; identical to SEQ ID NO: 12523
  Cyclic GFR-binding peptide
  MOD_RES (29)..(30): Xaa is C or S

SEQ ID NO: 47210 - protein, 37 aa, Artificial Sequence; identical to SEQ ID NO: 12525
  Cyclic GFR-binding peptide
  MOD_RES (1)..(33)..(34): Xaa is C or S

SEQ ID NO: 47211 - protein, 31 aa, Artificial Sequence; identical to SEQ ID NO: 12527
  Cyclic GFR-binding peptide
  MOD_RES (29)..(30): Xaa is C or S

SEQ ID NO: 47212 - protein, 27 aa, Artificial Sequence
  Cyclic GFR-binding peptide
VMDNSLQEVVKENEDYYLMTLPELETP

SEQ ID NO: 47213 - protein, 29 aa, Artificial Sequence
  Cyclic GFR-binding peptide
  MOD_RES (26)..(27): Xaa is C or S
NSLQEIKPTKGIYYLITLPELDQSVXXPS

SEQ ID NO: 47214 - protein, 40 aa, Artificial Sequence; identical to SEQ ID NO: 12531
  Cyclic GFR-binding peptide
  MOD_RES (1)..(3)..(34)..(35): Xaa is C or S

SEQ ID NO: 47215 - protein, 33 aa, Artificial Sequence; identical to SEQ ID NO: 12532
  Cyclic GFR-binding peptide
  MOD_RES (28)..(29): Xaa is C or S

SEQ ID NO: 47216 - protein, 29 aa, Artificial Sequence
  Cyclic GFR-binding peptide
GEVVMERYKKLVVKDYEDFYLMSIANLET

SEQ ID NO: 47217 - protein, 35 aa, Artificial Sequence; identical to SEQ ID NO: 12534
  Cyclic GFR-binding peptide
  MOD_RES (1)..(3)..(35): Xaa is C or S

SEQ ID NO: 47218 - protein, 32 aa, Artificial Sequence; identical to SEQ ID NO: 12535
  Cyclic GFR-binding peptide
  MOD_RES (31)..(32): Xaa is C or S

SEQ ID NO: 47219 - protein, 28 aa, Artificial Sequence
  Cyclic GFR-binding peptide
  MOD_RES (28)..(28): Xaa is C or S
IMRYKKLIKPTKGIFYLISIANLDQSVX

SEQ ID NO: 47220 - protein, 31 aa, Artificial Sequence; identical to SEQ ID NO: 12537
  Cyclic GFR-binding peptide
  MOD_RES (26)..(27): Xaa is C or S

SEQ ID NO: 47221 - protein, 36 aa, Artificial Sequence; identical to SEQ ID NO: 1990
  Cyclic GFR-binding peptide
  MOD_RES (2)..(4)..(35)..(36): Xaa is C or S

SEQ ID NO: 47222 - protein, 24 aa, Artificial Sequence
  Cyclic GFR-binding peptide
NSLQEIKPTKGIYYVIPLPELDQS

SEQ ID NO: 47223 - protein, 29 aa, Artificial Sequence
  Cyclic GFR-binding peptide
  MOD_RES (2)..(2): Xaa is C or S
GXGEVVMENSLQEVVKDYEDYYLMTLPEL

SEQ ID NO: 47224 - protein, 29 aa, Artificial Sequence
  Cyclic GFR-binding peptide
  MOD_RES (1)..(3): Xaa is C or S
XKXSKVVMEYQKYVKPTRGVIFLISIPSL

SEQ ID NO: 47225 - protein, 26 aa, Artificial Sequence
  Cyclic GFR-binding peptide
  MOD_RES (1)..(1): Xaa is C or S
XSKVVMEYQKYVKPTRGVIFLISIPS

SEQ ID NO: 47226 - protein, 27 aa, Artificial Sequence
  Cyclic GFR-binding peptide
IMRYKKLIKPTKGIFYLISIANLDQSV

SEQ ID NO: 47227 - protein, 38 aa, Artificial Sequence; identical to SEQ ID NO: 12545
  Cyclic GFR-binding peptide
  MOD_RES (2)..(33)..(34): Xaa is C or S

SEQ ID NO: 47228 - protein, 25 aa, Artificial Sequence
  Cyclic GFR-binding peptide
EVVMENSLQEVVKDYEDYYVMPLPE

SEQ ID NO: 47229 - protein, 31 aa, Artificial Sequence; identical to SEQ ID NO: 12547
  Cyclic GFR-binding peptide
  MOD_RES (28)..(29): Xaa is C or S

SEQ ID NO: 47230 - protein, 33 aa, Artificial Sequence; identical to SEQ ID NO: 12548
  Cyclic GFR-binding peptide
  MOD_RES (29)..(30): Xaa is C or S

SEQ ID NO: 47231 - protein, 29 aa, Artificial Sequence
  Cyclic GFR-binding peptide
  MOD_RES (1)..(3): Xaa is C or S
XGXGEVVMDNSLQEVVKENEDYYLMTLPE

SEQ ID NO: 47232 - protein, 25 aa, Artificial Sequence
  Cyclic GFR-binding peptide
EVVMDNSLQEVVNNASDYYLITLPE

SEQ ID NO: 47233 - protein, 26 aa, Artificial Sequence
  Cyclic GFR-binding peptide
SKVIMNSLQEIKPTKGIYYLITLPEL

SEQ ID NO: 47234 - protein, 21 aa, Artificial Sequence
  Cyclic GFR-binding peptide
MNSLQEIKPTKGIYYVIPLPE

SEQ ID NO: 47235 - protein, 20 aa, Artificial Sequence
  Cyclic GFR-binding peptide
RYKKLVVKENEDFYLMSIAN

SEQ ID NO: 47236 - protein, 26 aa, Artificial Sequence
  Cyclic GFR-binding peptide
  MOD_RES (26)..(26): Xaa is C or S
NSLQEVVKDYEDYYVMPLPELETPVX

SEQ ID NO: 47237 - protein, 22 aa, Artificial Sequence
  Cyclic GFR-binding peptide
RYKKLIKPTKGIFYLISIANLD

SEQ ID NO: 47238 - protein, 26 aa, Artificial Sequence
  Cyclic GFR-binding peptide
VMDEYQKYVVKENEDIFLMSIPSLET

SEQ ID NO: 47239 - protein, 36 aa, Artificial Sequence; identical to SEQ ID NO: 2013
  Cyclic GFR-binding peptide
  MOD_RES (1)..(3)..(35)..(36): Xaa is C or S

SEQ ID NO: 47240 - protein, 24 aa, Artificial Sequence
  Cyclic GFR-binding peptide
VVMEEYQKYVVKDYEDIFLMSIPS

SEQ ID NO: 47241 - protein, 31 aa, Artificial Sequence; identical to SEQ ID NO: 12562
  Cyclic GFR-binding peptide
  MOD_RES (1)..(1): Xaa is C or S

SEQ ID NO: 47242 - protein, 24 aa, Artificial Sequence
  Cyclic GFR-binding peptide
KVIMNSLQEIKPTKGIYYVIPLPE

SEQ ID NO: 47243 - protein, 33 aa, Artificial Sequence; identical to SEQ ID NO: 12566
  Cyclic GFR-binding peptide
  MOD_RES (30)..(31): Xaa is C or S

SEQ ID NO: 47244 - protein, 23 aa, Artificial Sequence
  Cyclic GFR-binding peptide
NSLQEVKPKRGVYYLITLPELAQ

SEQ ID NO: 47245 - protein, 31 aa, Artificial Sequence; identical to SEQ ID NO: 2023
  Cyclic GFR-binding peptide
  MOD_RES (28)..(29): Xaa is C or S

SEQ ID NO: 47246 - protein, 22 aa, Artificial Sequence
  Cyclic GFR-binding peptide
EYQKYVKPKRGVIFLISIPSLA

SEQ ID NO: 47247 - protein, 37 aa, Artificial Sequence; identical to SEQ ID NO: 12571
  Cyclic GFR-binding peptide
  MOD_RES (32)..(33): Xaa is C or S

SEQ ID NO: 47248 - protein, 27 aa, Artificial Sequence
  Cyclic GFR-binding peptide
  MOD_RES (27)..(27): Xaa is C or S
NEYQKYIVNSSDDIFLVSIPSLKTPAX

SEQ ID NO: 47249 - protein, 33 aa, Artificial Sequence; identical to SEQ ID NO: 12573
  Cyclic GFR-binding peptide
  MOD_RES (30)..(31): Xaa is C or S

SEQ ID NO: 47250 - protein, 24 aa, Artificial Sequence
  Cyclic GFR-binding peptide
MDRYKKLVVNNASDFYLISIANLR

SEQ ID NO: 47251 - protein, 36 aa, Artificial Sequence; identical to SEQ ID NO: 12576
  Cyclic GFR-binding peptide
  MOD_RES (2)..(34)..(35): Xaa is C or S

SEQ ID NO: 47252 - protein, 37 aa, Artificial Sequence; identical to SEQ ID NO: 12578
  Cyclic GFR-binding peptide
  MOD_RES (2)..(33)..(34): Xaa is C or S

SEQ ID NO: 47253 - protein, 27 aa, Artificial Sequence
  Cyclic GFR-binding peptide
MDRYKKLVVKENEDFYLMSIANLETPV

SEQ ID NO: 47254 - protein, 31 aa, Artificial Sequence; identical to SEQ ID NO: 12582
  Cyclic GFR-binding peptide
  MOD_RES (30)..(31): Xaa is C or S

SEQ ID NO: 47255 - protein, 24 aa, Artificial Sequence
  Cyclic GFR-binding peptide
VMDNSLQEVVNNASDYYVIPLPEL

SEQ ID NO: 47256 - protein, 24 aa, Artificial Sequence
  Cyclic GFR-binding peptide
VMENSLQEVVKDYEDYYVMPLPEL

SEQ ID NO: 47257 - protein, 24 aa, Artificial Sequence
  Cyclic GFR-binding peptide
NNSLQEIVNSSDDYYVVPLPELKT

SEQ ID NO: 47258 - protein, 34 aa, Artificial Sequence; identical to SEQ ID NO: 12586
  Cyclic GFR-binding peptide
  MOD_RES (30)..(31): Xaa is C or S

SEQ ID NO: 47259 - protein, 34 aa, Artificial Sequence; identical to SEQ ID NO: 12587
  Cyclic GFR-binding peptide
  MOD_RES (31)..(32): Xaa is C or S

SEQ ID NO: 47260 - protein, 31 aa, Artificial Sequence; identical to SEQ ID NO: 2039
  Cyclic GFR-binding peptide
  MOD_RES (30)..(31): Xaa is C or S

SEQ ID NO: 47261 - protein, 31 aa, Artificial Sequence; identical to SEQ ID NO: 12590
  Cyclic GFR-binding peptide
  MOD_RES (26)..(27): Xaa is C or S

SEQ ID NO: 47262 - protein, 27 aa, Artificial Sequence
  Cyclic GFR-binding peptide
  MOD_RES (27)..(27): Xaa is C or S
NNSLQEIVNSSDDYYVVPLPELKTPAX

SEQ ID NO: 47263 - protein, 36 aa, Artificial Sequence; identical to SEQ ID NO: 12593
  Cyclic GFR-binding peptide
  MOD_RES (1)..(33)..(34): Xaa is C or S

SEQ ID NO: 47264 - protein, 39 aa, Artificial Sequence; identical to SEQ ID NO: 12595
  Cyclic GFR-binding peptide
  MOD_RES (1)..(33)..(34): Xaa is C or S

SEQ ID NO: 47265 - protein, 29 aa, Artificial Sequence
  Cyclic GFR-binding peptide
  MOD_RES (2)..(2): Xaa is C or S
GXSRVVMNNSLQEIVNSSDDYYLVTLPEL

SEQ ID NO: 47266 - protein, 25 aa, Artificial Sequence
  Cyclic GFR-binding peptide
EVVMDNSLQEVVKENEDYYLMTLPE

SEQ ID NO: 47267 - protein, 25 aa, Artificial Sequence
  Cyclic GFR-binding peptide
RVVMNNSLQEIVNSSDDYYLVTLPE

SEQ ID NO: 47268 - protein, 22 aa, Artificial Sequence
  Cyclic GFR-binding peptide
VMEYQKYVKPTRGVIFLISIPS

SEQ ID NO: 47269 - protein, 24 aa, Artificial Sequence
  Cyclic GFR-binding peptide
VVMNSLQEVKPTRGVYYLITLPEL

SEQ ID NO: 47270 - protein, 22 aa, Artificial Sequence
  Cyclic GFR-binding peptide
MRYKKLVKPTRGVFYLISIANL

SEQ ID NO: 47271 - protein, 35 aa, Artificial Sequence; identical to SEQ ID NO: 12603
  Cyclic GFR-binding peptide
  MOD_RES (29)..(30): Xaa is C or S

SEQ ID NO: 47272 - protein, 32 aa, Artificial Sequence; identical to SEQ ID NO: 12604
  Cyclic GFR-binding peptide
  MOD_RES (27)..(27): Xaa is C or S

SEQ ID NO: 47273 - protein, 25 aa, Artificial Sequence
  Cyclic GFR-binding peptide
EYQKYIVNSSDDIFLVSIPSLQTPA

SEQ ID NO: 47274 - protein, 32 aa, Artificial Sequence; identical to SEQ ID NO: 2059
  Cyclic GFR-binding peptide
  MOD_RES (29)..(30): Xaa is C or S

SEQ ID NO: 47275 - protein, 39 aa, Artificial Sequence; identical to SEQ ID NO: 12608
  Cyclic GFR-binding peptide
  MOD_RES (2)..(34)..(35): Xaa is C or S

SEQ ID NO: 47276 - protein, 42 aa, Artificial Sequence; identical to SEQ ID NO: 2061
  Cyclic GFR-binding peptide
  MOD_RES (2)..(4)..(36)..(37): Xaa is C or S

SEQ ID NO: 47277 - protein, 32 aa, Artificial Sequence; identical to SEQ ID NO: 12611
  Cyclic GFR-binding peptide
  MOD_RES (30)..(31): Xaa is C or S

SEQ ID NO: 47278 - protein, 30 aa, Artificial Sequence; identical to SEQ ID NO: 12613
  Cyclic GFR-binding peptide
  MOD_RES (30)..(30): Xaa is C or S

SEQ ID NO: 47279 - protein, 31 aa, Artificial Sequence; identical to SEQ ID NO: 12614
  Cyclic GFR-binding peptide
  MOD_RES (29)..(30): Xaa is C or S

SEQ ID NO: 47280 - protein, 29 aa, Artificial Sequence
  Cyclic GFR-binding peptide
  MOD_RES (27)..(28): Xaa is C or S
NEYQKYIVNSSDDIFLVSIPSLQTPAXXP

SEQ ID NO: 47281 - protein, 37 aa, Artificial Sequence; identical to SEQ ID NO: 12618
  Cyclic GFR-binding peptide
  MOD_RES (2)..(4)..(36)..(37): Xaa is C or S

SEQ ID NO: 47282 - protein, 40 aa, Artificial Sequence; identical to SEQ ID NO: 12621
  Cyclic GFR-binding peptide
  MOD_RES (1)..(3)..(35)..(36): Xaa is C or S

SEQ ID NO: 47283 - protein, 22 aa, Artificial Sequence
  Cyclic GFR-binding peptide
IMRYKKLVKPKRGVFYLISIAN

SEQ ID NO: 47284 - protein, 34 aa, Artificial Sequence; identical to SEQ ID NO: 12625
  Cyclic GFR-binding peptide
  MOD_RES (28)..(29): Xaa is C or S

SEQ ID NO: 47285 - protein, 30 aa, Artificial Sequence; identical to SEQ ID NO: 2080
  Cyclic GFR-binding peptide
  MOD_RES (1)..(1): Xaa is C or S

SEQ ID NO: 47286 - protein, 32 aa, Artificial Sequence; identical to SEQ ID NO: 2081
  Cyclic GFR-binding peptide
  MOD_RES (30)..(30): Xaa is C or S

SEQ ID NO: 47287 - protein, 27 aa, Artificial Sequence
  Cyclic GFR-binding peptide
  MOD_RES (2)..(2): Xaa is C or S
KXSRVIMRYKKLVKPKRGVFYLISIAN

SEQ ID NO: 47288 - protein, 34 aa, Artificial Sequence; identical to SEQ ID NO: 12632
  Cyclic GFR-binding peptide
  MOD_RES (29)..(29): Xaa is C or S

SEQ ID NO: 47289 - protein, 33 aa, Artificial Sequence; identical to SEQ ID NO: 2086
  Cyclic GFR-binding peptide
  MOD_RES (31)..(32): Xaa is C or S

SEQ ID NO: 47290 - protein, 35 aa, Artificial Sequence; identical to SEQ ID NO: 12636
  Cyclic GFR-binding peptide
  MOD_RES (1)..(3)..(35): Xaa is C or S

SEQ ID NO: 47291 - protein, 36 aa, Artificial Sequence; identical to SEQ ID NO: 12638
  Cyclic GFR-binding peptide
  MOD_RES (31)..(32): Xaa is C or S

SEQ ID NO: 47292 - protein, 33 aa, Artificial Sequence; identical to SEQ ID NO: 12639
  Cyclic GFR-binding peptide
  MOD_RES (29)..(30): Xaa is C or S

SEQ ID NO: 47293 - protein, 25 aa, Artificial Sequence
  Cyclic GFR-binding peptide
NSLQEVVNNASDYYVIPLPELRTPV

SEQ ID NO: 47294 - protein, 41 aa, Artificial Sequence; identical to SEQ ID NO: 12642
  Cyclic GFR-binding peptide
  MOD_RES (2)..(4)..(36)..(37): Xaa is C or S

SEQ ID NO: 47295 - protein, 30 aa, Artificial Sequence; identical to SEQ ID NO: 2092
  Cyclic GFR-binding peptide
  MOD_RES (28)..(29): Xaa is C or S

SEQ ID NO: 47296 - protein, 22 aa, Artificial Sequence
  Cyclic GFR-binding peptide
MDNSLQEVVKENEDYYLMTLPE

SEQ ID NO: 47297 - protein, 40 aa, Artificial Sequence; identical to SEQ ID NO: 12645
  Cyclic GFR-binding peptide
  MOD_RES (1)..(3)..(34)..(35): Xaa is C or S

SEQ ID NO: 47298 - protein, 33 aa, Artificial Sequence; identical to SEQ ID NO: 2094
  Cyclic GFR-binding peptide
  MOD_RES (29)..(30): Xaa is C or S

SEQ ID NO: 47299 - protein, 40 aa, Artificial Sequence; identical to SEQ ID NO: 12647
  Cyclic GFR-binding peptide
  MOD_RES (1)..(3)..(34)..(35): Xaa is C or S

SEQ ID NO: 47300 - protein, 25 aa, Artificial Sequence
  Cyclic GFR-binding peptide
VMDRYKKLVVNNASDFYLISIANLR

SEQ ID NO: 47301 - protein, 33 aa, Artificial Sequence; identical to SEQ ID NO: 2095
  Cyclic GFR-binding peptide
  MOD_RES (2)..(4): Xaa is C or S

SEQ ID NO: 47302 - protein, 30 aa, Artificial Sequence; identical to SEQ ID NO: 12650
  Cyclic GFR-binding peptide
  MOD_RES (30)..(30): Xaa is C or S

SEQ ID NO: 47303 - protein, 38 aa, Artificial Sequence; identical to SEQ ID NO: 2096
  Cyclic GFR-binding peptide
  MOD_RES (1)..(3)..(35)..(36): Xaa is C or S

SEQ ID NO: 47304 - protein, 35 aa, Artificial Sequence; identical to SEQ ID NO: 12652
  Cyclic GFR-binding peptide
  MOD_RES (32)..(33): Xaa is C or S

SEQ ID NO: 47305 - protein, 35 aa, Artificial Sequence; identical to SEQ ID NO: 12655
  Cyclic GFR-binding peptide
  MOD_RES (2)..(4)..(35): Xaa is C or S

SEQ ID NO: 47306 - protein, 22 aa, Artificial Sequence
  Cyclic GFR-binding peptide
MNSLQEVKPKRGVYYLITLPEL

SEQ ID NO: 47307 - protein, 33 aa, Artificial Sequence; identical to SEQ ID NO: 12657
  Cyclic GFR-binding peptide
  MOD_RES (1)..(3): Xaa is C or S

SEQ ID NO: 47308 - protein, 32 aa, Artificial Sequence; identical to SEQ ID NO: 12659
  Cyclic GFR-binding peptide
  MOD_RES (30)..(30): Xaa is C or S

SEQ ID NO: 47309 - protein, 32 aa, Artificial Sequence; identical to SEQ ID NO: 12660
  Cyclic GFR-binding peptide
  MOD_RES (2)..(2): Xaa is C or S

SEQ ID NO: 47310 - protein, 21 aa, Artificial Sequence
  Cyclic GFR-binding peptide
MEYQKYIKPTKGIIFLISIPS

SEQ ID NO: 47311 - protein, 28 aa, Artificial Sequence
  Cyclic GFR-binding peptide
  MOD_RES (28)..(28): Xaa is C or S
VMRYKKLVKPTRGVFYLISIANLDQPVX

SEQ ID NO: 47312 - protein, 23 aa, Artificial Sequence
  Cyclic GFR-binding peptide
VMEEYQKYVVKDYEDIFLMSIPS

SEQ ID NO: 47313 - protein, 42 aa, Artificial Sequence; identical to SEQ ID NO: 2114
  Cyclic GFR-binding peptide
  MOD_RES (2)..(4)..(36)..(37): Xaa is C or S

SEQ ID NO: 47314 - protein, 35 aa, Artificial Sequence; identical to SEQ ID NO: 12667
  Cyclic GFR-binding peptide
  MOD_RES (2)..(4): Xaa is C or S

SEQ ID NO: 47315 - protein, 24 aa, Artificial Sequence
  Cyclic GFR-binding peptide
EYQKYVKPKRGVIFLISIPSLAQP

SEQ ID NO: 47316 - protein, 32 aa, Artificial Sequence; identical to SEQ ID NO: 12669
  Cyclic GFR-binding peptide
  MOD_RES (28)..(29): Xaa is C or S

SEQ ID NO: 47317 - protein, 29 aa, Artificial Sequence
  Cyclic GFR-binding peptide
  MOD_RES (1)..(3): Xaa is C or S
XGXSRVVMNEYQKYIVNSSDDIFLVSIPS

SEQ ID NO: 47318 - protein, 32 aa, Artificial Sequence; identical to SEQ ID NO: 2124
  Cyclic GFR-binding peptide
  MOD_RES (1)..(1): Xaa is C or S

SEQ ID NO: 47319 - protein, 24 aa, Artificial Sequence
  Cyclic GFR-binding peptide
EYQKYIKPTKGIIFLISIPSLDQS

SEQ ID NO: 47320 - protein, 28 aa, Artificial Sequence
  Cyclic GFR-binding peptide
VMNNSLQEIVNSSDDYYLVTLPELKTPA

SEQ ID NO: 47321 - protein, 33 aa, Artificial Sequence; identical to SEQ ID NO: 12674
  Cyclic GFR-binding peptide
  MOD_RES (28)..(29): Xaa is C or S

SEQ ID NO: 47322 - protein, 29 aa, Artificial Sequence
  Cyclic GFR-binding peptide
  MOD_RES (2)..(2): Xaa is C or S
KXSKVIMEYQKYIKPTKGIIFLISIPSLD

SEQ ID NO: 47323 - protein, 33 aa, Artificial Sequence; identical to SEQ ID NO: 2126
  Cyclic GFR-binding peptide
  MOD_RES (2)..(33): Xaa is C or S

SEQ ID NO: 47324 - protein, 31 aa, Artificial Sequence; identical to SEQ ID NO: 2127
  Cyclic GFR-binding peptide
  MOD_RES (2)..(2): Xaa is C or S

SEQ ID NO: 47325 - protein, 36 aa, Artificial Sequence; identical to SEQ ID NO: 12678
  Cyclic GFR-binding peptide
  MOD_RES (1)..(32)..(33): Xaa is C or S

SEQ ID NO: 47326 - protein, 23 aa, Artificial Sequence
  Cyclic GFR-binding peptide
NSLQEVVKDYEDYYLMTLPELET

SEQ ID NO: 47327 - protein, 29 aa, Artificial Sequence
  Cyclic GFR-binding peptide
  MOD_RES (29)..(29): Xaa is C or S
VMDNSLQEVVNNASDYYLITLPELRTPVX

SEQ ID NO: 47328 - protein, 34 aa, Artificial Sequence; identical to SEQ ID NO: 2137
  Cyclic GFR-binding peptide
  MOD_RES (30)..(31): Xaa is C or S

SEQ ID NO: 47329 - protein, 27 aa, Artificial Sequence
  Cyclic GFR-binding peptide
SEVVMDRYKKLVVNNASDFYLISIANL

SEQ ID NO: 47330 - protein, 26 aa, Artificial Sequence
  Cyclic GFR-binding peptide
  MOD_RES (26)..(26): Xaa is C or S
RYKKLVKPKRGVFYLISIANLAQPVX

SEQ ID NO: 47331 - protein, 30 aa, Artificial Sequence; identical to SEQ ID NO: 12688
  Cyclic GFR-binding peptide
  MOD_RES (27)..(28): Xaa is C or S

SEQ ID NO: 47332 - protein, 26 aa, Artificial Sequence
  Cyclic GFR-binding peptide
KVIMRYKKLIKPTKGIFYLISIANLD

SEQ ID NO: 47333 - protein, 38 aa, Artificial Sequence; identical to SEQ ID NO: 12690
  Cyclic GFR-binding peptide
  MOD_RES (2)..(34)..(35): Xaa is C or S

SEQ ID NO: 47334 - protein, 34 aa, Artificial Sequence; identical to SEQ ID NO: 12691
  Cyclic GFR-binding peptide
  MOD_RES (30)..(31): Xaa is C or S

SEQ ID NO: 47335 - protein, 39 aa, Artificial Sequence; identical to SEQ ID NO: 12693
  Cyclic GFR-binding peptide
  MOD_RES (1)..(33): Xaa is C or S

SEQ ID NO: 47336 - protein, 26 aa, Artificial Sequence
  Cyclic GFR-binding peptide
  MOD_RES (26)..(26): Xaa is C or S
NSLQEIVNSSDDYYVVPLPELKTPAX

SEQ ID NO: 47337 - protein, 31 aa, Artificial Sequence; identical to SEQ ID NO: 2151
  Cyclic GFR-binding peptide
  MOD_RES (29)..(30): Xaa is C or S

SEQ ID NO: 47338 - protein, 36 aa, Artificial Sequence; identical to SEQ ID NO: 12696
  Cyclic GFR-binding peptide
  MOD_RES (2)..(4)..(36): Xaa is C or S

SEQ ID NO: 47339 - protein, 39 aa, Artificial Sequence; identical to SEQ ID NO: 12698
  Cyclic GFR-binding peptide
  MOD_RES (2)..(4)..(35)..(36): Xaa is C or S

SEQ ID NO: 47340 - protein, 31 aa, Artificial Sequence; identical to SEQ ID NO: 12699
  Cyclic GFR-binding peptide
  MOD_RES (1)..(1): Xaa is C or S

SEQ ID NO: 47341 - protein, 30 aa, Artificial Sequence; identical to SEQ ID NO: 12700
  Cyclic GFR-binding peptide
  MOD_RES (1)..(1): Xaa is C or S

SEQ ID NO: 47342 - protein, 22 aa, Artificial Sequence
  Cyclic GFR-binding peptide
NSLQEIVNSSDDYYVVPLPELK

SEQ ID NO: 47343 - protein, 26 aa, Artificial Sequence
  Cyclic GFR-binding peptide
VVMDRYKKLVVKENEDFYLMSIANLE

SEQ ID NO: 47344 - protein, 30 aa, Artificial Sequence; identical to SEQ ID NO: 2158
  Cyclic GFR-binding peptide
  MOD_RES (1)..(1): Xaa is C or S

SEQ ID NO: 47345 - protein, 32 aa, Artificial Sequence; identical to SEQ ID NO: 12706
  Cyclic GFR-binding peptide
  MOD_RES (27)..(28): Xaa is C or S

SEQ ID NO: 47346 - protein, 31 aa, Artificial Sequence; identical to SEQ ID NO: 2160
  Cyclic GFR-binding peptide
  MOD_RES (30)..(31): Xaa is C or S

SEQ ID NO: 47347 - protein, 38 aa, Artificial Sequence; identical to SEQ ID NO: 12708
  Cyclic GFR-binding peptide
  MOD_RES (1)..(33)..(34): Xaa is C or S

SEQ ID NO: 47348 - protein, 29 aa, Artificial Sequence
  Cyclic GFR-binding peptide
SKVIMRYKKLIKPTKGIFYLISIANLDQS

SEQ ID NO: 47349 - protein, 38 aa, Artificial Sequence
  Cyclic GFR-binding peptide
  MOD_RES (2)..(4)..(35)..(36): Xaa is C or S
SXKXSKVVMNSLQEVKPTRGVYYLITLPELDQPVXXPS

SEQ ID NO: 47350 - protein, 33 aa, Artificial Sequence; identical to SEQ ID NO: 12713
  Cyclic GFR-binding peptide
  MOD_RES (32)..(33): Xaa is C or S

SEQ ID NO: 47351 - protein, 28 aa, Artificial Sequence
  Cyclic GFR-binding peptide
  MOD_RES (1)..(1): Xaa is C or S
XSKVVMNSLQEVKPTRGVYYVIPLPELD

SEQ ID NO: 47352 - protein, 37 aa, Artificial Sequence; identical to SEQ ID NO: 12715
  Cyclic GFR-binding peptide
  MOD_RES (1)..(3)..(35)..(36): Xaa is C or S

SEQ ID NO: 47353 - protein, 31 aa, Artificial Sequence; identical to SEQ ID NO: 12717
  Cyclic GFR-binding peptide
  MOD_RES (27)..(28): Xaa is C or S

SEQ ID NO: 47354 - protein, 37 aa, Artificial Sequence; identical to SEQ ID NO: 12719
  Cyclic GFR-binding peptide
  MOD_RES (32)..(33): Xaa is C or S

SEQ ID NO: 47355 - protein, 35 aa, Artificial Sequence; identical to SEQ ID NO: 12720
  Cyclic GFR-binding peptide
  MOD_RES (2)..(34)..(35): Xaa is C or S

SEQ ID NO: 47356 - protein, 37 aa, Artificial Sequence; identical to SEQ ID NO: 12721
  Cyclic GFR-binding peptide
  MOD_RES (1)..(33)..(34): Xaa is C or S

SEQ ID NO: 47357 - protein, 39 aa, Artificial Sequence; identical to SEQ ID NO: 12722
  Cyclic GFR-binding peptide
  MOD_RES (1)..(33)..(34): Xaa is C or S

SEQ ID NO: 47358 - protein, 36 aa, Artificial Sequence; identical to SEQ ID NO: 12723
  Cyclic GFR-binding peptide
  MOD_RES (1)..(3)..(34)..(35): Xaa is C or S

SEQ ID NO: 47359 - protein, 29 aa, Artificial Sequence
  Cyclic GFR-binding peptide
  MOD_RES (27)..(28): Xaa is C or S
ENSLQEVVKDYEDYYVMPLPELETPVXXA

SEQ ID NO: 47360 - protein, 32 aa, Artificial Sequence; identical to SEQ ID NO: 12725
  Cyclic GFR-binding peptide
  MOD_RES (26)..(27): Xaa is C or S

SEQ ID NO: 47361 - protein, 31 aa, Artificial Sequence; identical to SEQ ID NO: 12727
  Cyclic GFR-binding peptide
  MOD_RES (1)..(3): Xaa is C or S

SEQ ID NO: 47362 - protein, 30 aa, Artificial Sequence; identical to SEQ ID NO: 12728
  Cyclic GFR-binding peptide
  MOD_RES (2)..(2): Xaa is C or S

SEQ ID NO: 47363 - protein, 31 aa, Artificial Sequence; identical to SEQ ID NO: 12729
  Cyclic GFR-binding peptide
  MOD_RES (29)..(30): Xaa is C or S

SEQ ID NO: 47364 - protein, 31 aa, Artificial Sequence; identical to SEQ ID NO: 12730
  Cyclic GFR-binding peptide
  MOD_RES (1)..(3): Xaa is C or S

SEQ ID NO: 47365 - protein, 30 aa, Artificial Sequence; identical to SEQ ID NO: 12731
  Cyclic GFR-binding peptide

SEQ ID NO: 47366 - protein, 32 aa, Artificial Sequence; identical to SEQ ID NO: 2194
  Cyclic GFR-binding peptide
  MOD_RES (2)..(4): Xaa is C or S

SEQ ID NO: 47367 - protein, 38 aa, Artificial Sequence; identical to SEQ ID NO: 12733
  Cyclic GFR-binding peptide
  MOD_RES (2)..(34)..(35): Xaa is C or S

SEQ ID NO: 47368 - protein, 33 aa, Artificial Sequence; identical to SEQ ID NO: 12736
  Cyclic GFR-binding peptide
  MOD_RES (30)..(31): Xaa is C or S

SEQ ID NO: 47369 - protein, 28 aa, Artificial Sequence
  Cyclic GFR-binding peptide
  MOD_RES (27)..(28): Xaa is C or S
MNSLQEVKPTRGVYYVIPLPELDQPVXX

SEQ ID NO: 47370 - protein, 29 aa, Artificial Sequence
  Cyclic GFR-binding peptide
  MOD_RES (1)..(1): Xaa is C or S
XSEVVMDRYKKLVVNNASDFYLISIANLR

SEQ ID NO: 47371 - protein, 35 aa, Artificial Sequence; identical to SEQ ID NO: 12740
  Cyclic GFR-binding peptide
  MOD_RES (29)..(29): Xaa is C or S

SEQ ID NO: 47372 - protein, 20 aa, Artificial Sequence
  Cyclic GFR-binding peptide
EYQKYVVKENEDIFLMSIPS

SEQ ID NO: 47373 - protein, 32 aa, Artificial Sequence; identical to SEQ ID NO: 12743
  Cyclic GFR-binding peptide
  MOD_RES (28)..(28): Xaa is C or S

SEQ ID NO: 47374 - protein, 23 aa, Artificial Sequence
  Cyclic GFR-binding peptide
MRYKKLIKPTKGIFYLISIANLD

SEQ ID NO: 47375 - protein, 39 aa, Artificial Sequence; identical to SEQ ID NO: 2205
  Cyclic GFR-binding peptide
  MOD_RES (1)..(33)..(34): Xaa is C or S

SEQ ID NO: 47376 - protein, 31 aa, Artificial Sequence; identical to SEQ ID NO: 12747
  Cyclic GFR-binding peptide
  MOD_RES (1)..(3): Xaa is C or S

SEQ ID NO: 47377 - protein, 33 aa, Artificial Sequence; identical to SEQ ID NO: 12748
  Cyclic GFR-binding peptide
  MOD_RES (31)..(31): Xaa is C or S

SEQ ID NO: 47378 - protein, 25 aa, Artificial Sequence
  Cyclic GFR-binding peptide
RYKKLVKPTRGVFYLISIANLDQPV

SEQ ID NO: 47379 - protein, 33 aa, Artificial Sequence; identical to SEQ ID NO: 12751
  Cyclic GFR-binding peptide
  MOD_RES (29)..(30): Xaa is C or S

SEQ ID NO: 47380 - protein, 25 aa, Artificial Sequence
  Cyclic GFR-binding peptide
VVMDEYQKYVVKENEDIFLMSIPSL

SEQ ID NO: 47381 - protein, 41 aa, Artificial Sequence; identical to SEQ ID NO: 12754
  Cyclic GFR-binding peptide
  MOD_RES (1)..(3)..(35)..(36): Xaa is C or S

SEQ ID NO: 47382 - protein, 24 aa, Artificial Sequence
  Cyclic GFR-binding peptide
NSLQEIVNSSDDYYLVTLPELQTP

SEQ ID NO: 47383 - protein, 35 aa, Artificial Sequence; identical to SEQ ID NO: 12757
  Cyclic GFR-binding peptide
  MOD_RES (31)..(32): Xaa is C or S

SEQ ID NO: 47384 - protein, 23 aa, Artificial Sequence
  Cyclic GFR-binding peptide
VIMRYKKLIKPTKGIFYLISIAN

SEQ ID NO: 47385 - protein, 37 aa, Artificial Sequence; identical to SEQ ID NO: 2221
  Cyclic GFR-binding peptide
  MOD_RES (1)..(32)..(33): Xaa is C or S

SEQ ID NO: 47386 - protein, 29 aa, Artificial Sequence
  Cyclic GFR-binding peptide
  MOD_RES (28)..(29): Xaa is C or S
MNNSLQEIVNSSDDYYVVPLPELQTPAXX

SEQ ID NO: 47387 - protein, 33 aa, Artificial Sequence; identical to SEQ ID NO: 12763
  Cyclic GFR-binding peptide
  MOD_RES (27)..(28): Xaa is C or S

SEQ ID NO: 47388 - protein, 27 aa, Artificial Sequence
  Cyclic GFR-binding peptide
MNNSLQEIVNSSDDYYLVTLPELKTPA

SEQ ID NO: 47389 - protein, 26 aa, Artificial Sequence
  Cyclic GFR-binding peptide
  MOD_RES (26)..(26): Xaa is C or S
NSLQEIKPTKGIYYLITLPELDQSVX

SEQ ID NO: 47390 - protein, 30 aa, Artificial Sequence; identical to SEQ ID NO: 2231
  Cyclic GFR-binding peptide
  MOD_RES (2)..(4): Xaa is C or S

SEQ ID NO: 47391 - protein, 34 aa, Artificial Sequence; identical to SEQ ID NO: 2236
  Cyclic GFR-binding peptide
  MOD_RES (29)..(30): Xaa is C or S

SEQ ID NO: 47392 - protein, 22 aa, Artificial Sequence
  Cyclic GFR-binding peptide
MDEYQKYVVKENEDIFLMSIPS

SEQ ID NO: 47393 - protein, 33 aa, Artificial Sequence; identical to SEQ ID NO: 12770
  Cyclic GFR-binding peptide
  MOD_RES (27)..(27): Xaa is C or S

SEQ ID NO: 47394 - protein, 24 aa, Artificial Sequence
  Cyclic GFR-binding peptide
RVIMRYKKLVKPKRGVFYLISIAN

SEQ ID NO: 47395 - protein, 40 aa, Artificial Sequence; identical to SEQ ID NO: 12772
  Cyclic GFR-binding peptide
  MOD_RES (2)..(34)..(35): Xaa is C or S

SEQ ID NO: 47396 - protein, 32 aa, Artificial Sequence; identical to SEQ ID NO: 12773
  Cyclic GFR-binding peptide
  MOD_RES (2)..(2): Xaa is C or S

SEQ ID NO: 47397 - protein, 34 aa, Artificial Sequence; identical to SEQ ID NO: 12775
  Cyclic GFR-binding peptide
  MOD_RES (28)..(29): Xaa is C or S

SEQ ID NO: 47398 - protein, 38 aa, Artificial Sequence; identical to SEQ ID NO: 12776
  Cyclic GFR-binding peptide
  MOD_RES (32)..(33): Xaa is C or S

SEQ ID NO: 47399 - protein, 22 aa, Artificial Sequence
  Cyclic GFR-binding peptide
MNRYKKLIVNSSDDFYLVSIAN

SEQ ID NO: 47400 - protein, 25 aa, Artificial Sequence
  Cyclic GFR-binding peptide
MENSLQEVVKDYEDYYLMTLPELET

SEQ ID NO: 47401 - protein, 28 aa, Artificial Sequence
  Cyclic GFR-binding peptide
  MOD_RES (28)..(28): Xaa is C or S
MNNSLQEIVNSSDDYYVVPLPELKTPAX

SEQ ID NO: 47402 - protein, 32 aa, Artificial Sequence; identical to SEQ ID NO: 2253
  Cyclic GFR-binding peptide
  MOD_RES (26)..(27): Xaa is C or S

SEQ ID NO: 47403 - protein, 34 aa, Artificial Sequence; identical to SEQ ID NO: 12782
  Cyclic GFR-binding peptide
  MOD_RES (1)..(3)..(34): Xaa is C or S

SEQ ID NO: 47404 - protein, 35 aa, Artificial Sequence; identical to SEQ ID NO: 12783
  Cyclic GFR-binding peptide
  MOD_RES (32)..(32): Xaa is C or S

SEQ ID NO: 47405 - protein, 29 aa, Artificial Sequence
  Cyclic GFR-binding peptide
  MOD_RES (2)..(4): Xaa is C or S
SXKXSKVVMRYKKLVKPTRGVFYLISIAN

SEQ ID NO: 47406 - protein, 35 aa, Artificial Sequence; identical to SEQ ID NO: 12786
  Cyclic GFR-binding peptide
  MOD_RES (31)..(32): Xaa is C or S

SEQ ID NO: 47407 - protein, 37 aa, Artificial Sequence; identical to SEQ ID NO: 2258
  Cyclic GFR-binding peptide
  MOD_RES (2)..(4)..(36)..(37): Xaa is C or S

SEQ ID NO: 47408 - protein, 24 aa, Artificial Sequence
  Cyclic GFR-binding peptide
DNSLQEVVNNASDYYLITLPELRT

SEQ ID NO: 47409 - protein, 21 aa, Artificial Sequence
  Cyclic GFR-binding peptide
MEYQKYVKPTRGVIFLISIPS

SEQ ID NO: 47410 - protein, 31 aa, Artificial Sequence; identical to SEQ ID NO: 2262
  Cyclic GFR-binding peptide
  MOD_RES (2)..(4): Xaa is C or S

SEQ ID NO: 47411 - protein, 31 aa, Artificial Sequence; identical to SEQ ID NO: 12792
  Cyclic GFR-binding peptide

SEQ ID NO: 47412 - protein, 37 aa, Artificial Sequence; identical to SEQ ID NO: 2265
  Cyclic GFR-binding peptide
  MOD_RES (1)..(3)..(34)..(35): Xaa is C or S

SEQ ID NO: 47413 - protein, 33 aa, Artificial Sequence; identical to SEQ ID NO: 12794
  Cyclic GFR-binding peptide
  MOD_RES (30)..(31): Xaa is C or S

SEQ ID NO: 47414 - protein, 26 aa, Artificial Sequence
  Cyclic GFR-binding peptide
VVMNEYQKYIVNSSDDIFLVSIPSLQ

SEQ ID NO: 47415 - protein, 40 aa, Artificial Sequence; identical to SEQ ID NO: 12797
  Cyclic GFR-binding peptide
  MOD_RES (2)..(34)..(35): Xaa is C or S

SEQ ID NO: 47416 - protein, 28 aa, Artificial Sequence
  Cyclic GFR-binding peptide
  MOD_RES (2)..(2): Xaa is C or S
GXGEVVMDNSLQEVVKENEDYYVMPLPE

SEQ ID NO: 47417 - protein, 34 aa, Artificial Sequence; identical to SEQ ID NO: 2270
  Cyclic GFR-binding peptide
  MOD_RES (29)..(30): Xaa is C or S

SEQ ID NO: 47418 - protein, 36 aa, Artificial Sequence; identical to SEQ ID NO: 12802
  Cyclic GFR-binding peptide
  MOD_RES (30)..(31): Xaa is C or S

SEQ ID NO: 47419 - protein, 29 aa, Artificial Sequence
  Cyclic GFR-binding peptide
  MOD_RES (26)..(27): Xaa is C or S
NSLQEVVNNASDYYVIPLPELRTPVXXTP

SEQ ID NO: 47420 - protein, 32 aa, Artificial Sequence; identical to SEQ ID NO: 12804
  Cyclic GFR-binding peptide
  MOD_RES (1)..(3): Xaa is C or S

SEQ ID NO: 47421 - protein, 31 aa, Artificial Sequence; identical to SEQ ID NO: 12806
  Cyclic GFR-binding peptide
  MOD_RES (2)..(4): Xaa is C or S

SEQ ID NO: 47422 - protein, 39 aa, Artificial Sequence; identical to SEQ ID NO: 12808
  Cyclic GFR-binding peptide
  MOD_RES (2)..(34)..(35): Xaa is C or S

SEQ ID NO: 47423 - protein, 32 aa, Artificial Sequence; identical to SEQ ID NO: 12809
  Cyclic GFR-binding peptide
  MOD_RES (27)..(28): Xaa is C or S

SEQ ID NO: 47424 - protein, 26 aa, Artificial Sequence
  Cyclic GFR-binding peptide
NNSLQEIVNSSDDYYVVPLPELQTPA

SEQ ID NO: 47425 - protein, 29 aa, Artificial Sequence
  Cyclic GFR-binding peptide
  MOD_RES (29)..(29): Xaa is C or S
VMEEYQKYVVKDYEDIFLMSIPSLETPVX

SEQ ID NO: 47426 - protein, 38 aa, Artificial Sequence; identical to SEQ ID NO: 12815
  Cyclic GFR-binding peptide
  MOD_RES (2)..(34)..(35): Xaa is C or S

SEQ ID NO: 47427 - protein, 30 aa, Artificial Sequence; identical to SEQ ID NO: 2279
  Cyclic GFR-binding peptide
  MOD_RES (30)..(30): Xaa is C or S

SEQ ID NO: 47428 - protein, 40 aa, Artificial Sequence; identical to SEQ ID NO: 12818
  Cyclic GFR-binding peptide
  MOD_RES (1)..(3)..(35)..(36): Xaa is C or S

SEQ ID NO: 47429 - protein, 25 aa, Artificial Sequence
  Cyclic GFR-binding peptide
VVMNSLQEVKPTRGVYYLITLPELD

SEQ ID NO: 47430 - protein, 30 aa, Artificial Sequence; identical to SEQ ID NO: 2284
  Cyclic GFR-binding peptide
  MOD_RES (27)..(28): Xaa is C or S

SEQ ID NO: 47431 - protein, 36 aa, Artificial Sequence; identical to SEQ ID NO: 2285
  Cyclic GFR-binding peptide
  MOD_RES (2)..(4)..(36): Xaa is C or S

SEQ ID NO: 47432 - protein, 28 aa, Artificial Sequence
  Cyclic GFR-binding peptide
VVMDNSLQEVVNNASDYYLITLPELRTP

SEQ ID NO: 47433 - protein, 28 aa, Artificial Sequence
  Cyclic GFR-binding peptide
  MOD_RES (26)..(27): Xaa is C or S
NSLQEVKPTRGVYYVIPLPELDQPVXXP

SEQ ID NO: 47434 - protein, 28 aa, Artificial Sequence
  Cyclic GFR-binding peptide
  MOD_RES (2)..(2): Xaa is C or S
KXSKVVMRYKKLVKPTRGVFYLISIANL

SEQ ID NO: 47435 - protein, 27 aa, Artificial Sequence
  Cyclic GFR-binding peptide
  MOD_RES (1)..(1): Xaa is C or S
XSRVVMNRYKKLIVNSSDDFYLVSIAN

SEQ ID NO: 47436 - protein, 26 aa, Artificial Sequence
  Cyclic GFR-binding peptide
GEVVMENSLQEVVKDYEDYYLMTLPE

SEQ ID NO: 47437 - protein, 26 aa, Artificial Sequence
  Cyclic GFR-binding peptide
  MOD_RES (26)..(26): Xaa is C or S
EYQKYVKPTRGVIFLISIPSLDQPVX

SEQ ID NO: 47438 - protein, 32 aa, Artificial Sequence; identical to SEQ ID NO: 12830
  Cyclic GFR-binding peptide
  MOD_RES (28)..(29): Xaa is C or S

SEQ ID NO: 47439 - protein, 24 aa, Artificial Sequence
  Cyclic GFR-binding peptide
VMNNSLQEIVNSSDDYYVVPLPEL

SEQ ID NO: 47440 - protein, 25 aa, Artificial Sequence
  Cyclic GFR-binding peptide
SKVVMRYKKLVKPTRGVFYLISIAN

SEQ ID NO: 47441 - protein, 24 aa, Artificial Sequence
  Cyclic GFR-binding peptide
MNRYKKLIVNSSDDFYLVSIANLK

SEQ ID NO: 47442 - protein, 26 aa, Artificial Sequence
  Cyclic GFR-binding peptide
  MOD_RES (26)..(26): Xaa is C or S
NSLQEVKPKRGVYYLITLPELAQPVX

SEQ ID NO: 47443 - protein, 23 aa, Artificial Sequence
  Cyclic GFR-binding peptide
MNSLQEVKPTRGVYYLITLPELD

SEQ ID NO: 47444 - protein, 35 aa, Artificial Sequence; identical to SEQ ID NO: 12840
  Cyclic GFR-binding peptide
  MOD_RES (2)..(4)..(35): Xaa is C or S

SEQ ID NO: 47445 - protein, 28 aa, Artificial Sequence
  Cyclic GFR-binding peptide
SKVIMRYKKLIKPTKGIFYLISIANLDQ

SEQ ID NO: 47446 - protein, 24 aa, Artificial Sequence
  Cyclic GFR-binding peptide
MNSLQEIKPTKGIYYVIPLPELDQ

SEQ ID NO: 47447 - protein, 30 aa, Artificial Sequence; identical to SEQ ID NO: 12844
  Cyclic GFR-binding peptide
  MOD_RES (30)..(30): Xaa is C or S

SEQ ID NO: 47448 - protein, 30 aa, Artificial Sequence; identical to SEQ ID NO: 2311
  Cyclic GFR-binding peptide
  MOD_RES (1)..(1): Xaa is C or S

SEQ ID NO: 47449 - protein, 38 aa, Artificial Sequence; identical to SEQ ID NO: 12846
  Cyclic GFR-binding peptide
  MOD_RES (2)..(4)..(36): Xaa is C or S

SEQ ID NO: 47450 - protein, 33 aa, Artificial Sequence; identical to SEQ ID NO: 12847
  Cyclic GFR-binding peptide
  MOD_RES (28)..(29): Xaa is C or S

SEQ ID NO: 47451 - protein, 27 aa, Artificial Sequence
  Cyclic GFR-binding peptide
VVMNRYKKLIVNSSDDFYLVSIANLKT

SEQ ID NO: 47452 - protein, 32 aa, Artificial Sequence; identical to SEQ ID NO: 12851
  Cyclic GFR-binding peptide
  MOD_RES (1)..(3): Xaa is C or S

SEQ ID NO: 47453 - protein, 25 aa, Artificial Sequence
  Cyclic GFR-binding peptide
KVIMEYQKYIKPTKGIIFLISIPSL

SEQ ID NO: 47454 - protein, 27 aa, Artificial Sequence
  Cyclic GFR-binding peptide
  MOD_RES (1)..(1): Xaa is C or S
XGEVVMERYKKLVVKDYEDFYLMSIAN

SEQ ID NO: 47455 - protein, 40 aa, Artificial Sequence; identical to SEQ ID NO: 12854
  Cyclic GFR-binding peptide
  MOD_RES (2)..(4)..(36)..(37): Xaa is C or S

SEQ ID NO: 47456 - protein, 36 aa, Artificial Sequence; identical to SEQ ID NO: 12855
  Cyclic GFR-binding peptide
  MOD_RES (1)..(33): Xaa is C or S

SEQ ID NO: 47457 - protein, 34 aa, Artificial Sequence; identical to SEQ ID NO: 2319
  Cyclic GFR-binding peptide
  MOD_RES (29)..(30): Xaa is C or S

SEQ ID NO: 47458 - protein, 32 aa, Artificial Sequence; identical to SEQ ID NO: 12859
  Cyclic GFR-binding peptide
  MOD_RES (27)..(28): Xaa is C or S

SEQ ID NO: 47459 - protein, 26 aa, Artificial Sequence
  Cyclic GFR-binding peptide
SRVIMEYQKYVKPKRGVIFLISIPSL

SEQ ID NO: 47460 - protein, 24 aa, Artificial Sequence
  Cyclic GFR-binding peptide
VMDRYKKLVVNNASDFYLISIANL

SEQ ID NO: 47461 - protein, 27 aa, Artificial Sequence
  Cyclic GFR-binding peptide
  MOD_RES (1)..(1): Xaa is C or S
XGEVVMDEYQKYVVKENEDIFLMSIPS

SEQ ID NO: 47462 - protein, 37 aa, Artificial Sequence; identical to SEQ ID NO: 12864
  Cyclic GFR-binding peptide
  MOD_RES (1)..(33)..(34): Xaa is C or S

SEQ ID NO: 47463 - protein, 30 aa, Artificial Sequence; identical to SEQ ID NO: 12865
  Cyclic GFR-binding peptide
  MOD_RES (1)..(3): Xaa is C or S

SEQ ID NO: 47464 - protein, 33 aa, Artificial Sequence; identical to SEQ ID NO: 12866
  Cyclic GFR-binding peptide
  MOD_RES (32)..(33): Xaa is C or S

SEQ ID NO: 47465 - protein, 28 aa, Artificial Sequence
  Cyclic GFR-binding peptide
  MOD_RES (1)..(1): Xaa is C or S
XSRVIMEYQKYVKPKRGVIFLISIPSLA

SEQ ID NO: 47466 - protein, 25 aa, Artificial Sequence
  Cyclic GFR-binding peptide
DNSLQEVVNNASDYYLITLPELRTP

SEQ ID NO: 47467 - protein, 31 aa, Artificial Sequence; identical to SEQ ID NO: 12869
  Cyclic GFR-binding peptide
  MOD_RES (27)..(28): Xaa is C or S

SEQ ID NO: 47468 - protein, 37 aa, Artificial Sequence; identical to SEQ ID NO: 12870
  Cyclic GFR-binding peptide
  MOD_RES (1)..(33): Xaa is C or S

SEQ ID NO: 47469 - protein, 36 aa, Artificial Sequence; identical to SEQ ID NO: 12873
  Cyclic GFR-binding peptide
  MOD_RES (31)..(32): Xaa is C or S

SEQ ID NO: 47470 - protein, 40 aa, Artificial Sequence; identical to SEQ ID NO: 2337
  Cyclic GFR-binding peptide
  MOD_RES (2)..(34)..(35): Xaa is C or S

SEQ ID NO: 47471 - protein, 32 aa, Artificial Sequence; identical to SEQ ID NO: 12877
  Cyclic GFR-binding peptide
  MOD_RES (27)..(27): Xaa is C or S

SEQ ID NO: 47472 - protein, 30 aa, Artificial Sequence; identical to SEQ ID NO: 12878
  Cyclic GFR-binding peptide
  MOD_RES (2)..(2): Xaa is C or S

SEQ ID NO: 47473 - protein, 35 aa, Artificial Sequence; identical to SEQ ID NO: 12879
  Cyclic GFR-binding peptide
  MOD_RES (31)..(32): Xaa is C or S

SEQ ID NO: 47474 - protein, 32 aa, Artificial Sequence; identical to SEQ ID NO: 12880
  Cyclic GFR-binding peptide
  MOD_RES (26)..(27): Xaa is C or S

SEQ ID NO: 47475 - protein, 30 aa, Artificial Sequence; identical to SEQ ID NO: 12881
  Cyclic GFR-binding peptide

SEQ ID NO: 47476 - protein, 34 aa, Artificial Sequence; identical to SEQ ID NO: 12882
  Cyclic GFR-binding peptide
  MOD_RES (28)..(29): Xaa is C or S

SEQ ID NO: 47477 - protein, 28 aa, Artificial Sequence
  Cyclic GFR-binding peptide
KVVMNSLQEVKPTRGVYYLITLPELDQP

SEQ ID NO: 47478 - protein, 27 aa, Artificial Sequence
  Cyclic GFR-binding peptide
SRVVMNNSLQEIVNSSDDYYLVTLPEL

SEQ ID NO: 47479 - protein, 27 aa, Artificial Sequence
  Cyclic GFR-binding peptide
IMNSLQEVKPKRGVYYLITLPELAQPV

SEQ ID NO: 47480 - protein, 31 aa, Artificial Sequence; identical to SEQ ID NO: 12887
  Cyclic GFR-binding peptide
  MOD_RES (29)..(30): Xaa is C or S

SEQ ID NO: 47481 - protein, 33 aa, Artificial Sequence; identical to SEQ ID NO: 12888
  Cyclic GFR-binding peptide
  MOD_RES (28)..(29): Xaa is C or S

SEQ ID NO: 47482 - protein, 22 aa, Artificial Sequence
  Cyclic GFR-binding peptide
RYKKLVVKDYEDFYLMSIANLE

SEQ ID NO: 47483 - protein, 28 aa, Artificial Sequence
  Cyclic GFR-binding peptide
VVMNNSLQEIVNSSDDYYVVPLPELKTP

SEQ ID NO: 47484 - protein, 29 aa, Artificial Sequence
  Cyclic GFR-binding peptide
  MOD_RES (29)..(29): Xaa is C or S
VMDEYQKYVVKENEDIFLMSIPSLETPVX

SEQ ID NO: 47485 - protein, 27 aa, Artificial Sequence
  Cyclic GFR-binding peptide
  MOD_RES (26)..(27): Xaa is C or S
NSLQEVVKDYEDYYVMPLPELETPVXX

SEQ ID NO: 47486 - protein, 31 aa, Artificial Sequence; identical to SEQ ID NO: 12894
  Cyclic GFR-binding peptide
  MOD_RES (27)..(28): Xaa is C or S

SEQ ID NO: 47487 - protein, 28 aa, Artificial Sequence
  Cyclic GFR-binding peptide
  MOD_RES (2)..(2): Xaa is C or S
GXARVVMNNSLQEIVNSSDDYYLVTLPE

SEQ ID NO: 47488 - protein, 32 aa, Artificial Sequence; identical to SEQ ID NO: 12896
  Cyclic GFR-binding peptide
  MOD_RES (26)..(27): Xaa is C or S

SEQ ID NO: 47489 - protein, 37 aa, Artificial Sequence; identical to SEQ ID NO: 12901
  Cyclic GFR-binding peptide
  MOD_RES (2)..(4)..(36)..(37): Xaa is C or S

SEQ ID NO: 47490 - protein, 30 aa, Artificial Sequence; identical to SEQ ID NO: 12903
  Cyclic GFR-binding peptide
  MOD_RES (1)..(1): Xaa is C or S

SEQ ID NO: 47491 - protein, 40 aa, Artificial Sequence; identical to SEQ ID NO: 2370
  Cyclic GFR-binding peptide
  MOD_RES (2)..(4)..(35)..(36): Xaa is C or S

SEQ ID NO: 47492 - protein, 41 aa, Artificial Sequence; identical to SEQ ID NO: 12906
  Cyclic GFR-binding peptide
  MOD_RES (1)..(3)..(35)..(36): Xaa is C or S

SEQ ID NO: 47493 - protein, 28 aa, Artificial Sequence
  Cyclic GFR-binding peptide
  MOD_RES (27)..(28): Xaa is C or S
NEYQKYIVNSSDDIFLVSIPSLKTPAXX

SEQ ID NO: 47494 - protein, 22 aa, Artificial Sequence
  Cyclic GFR-binding peptide
RYKKLVKPTRGVFYLISIANLD

SEQ ID NO: 47495 - protein, 38 aa, Artificial Sequence; identical to SEQ ID NO: 12909
  Cyclic GFR-binding peptide
  MOD_RES (2)..(4)..(35)..(36): Xaa is C or S

SEQ ID NO: 47496 - protein, 34 aa, Artificial Sequence; identical to SEQ ID NO: 2376
  Cyclic GFR-binding peptide
  MOD_RES (1)..(33): Xaa is C or S

SEQ ID NO: 47497 - protein, 32 aa, Artificial Sequence; identical to SEQ ID NO: 12912
  Cyclic GFR-binding peptide
  MOD_RES (31)..(32): Xaa is C or S

SEQ ID NO: 47498 - protein, 37 aa, Artificial Sequence; identical to SEQ ID NO: 12913
  Cyclic GFR-binding peptide
  MOD_RES (31)..(32): Xaa is C or S

SEQ ID NO: 47499 - protein, 34 aa, Artificial Sequence; identical to SEQ ID NO: 12914
  Cyclic GFR-binding peptide
  MOD_RES (1)..(33)..(34): Xaa is C or S

SEQ ID NO: 47500 - protein, 38 aa, Artificial Sequence; identical to SEQ ID NO: 12915
  Cyclic GFR-binding peptide
  MOD_RES (2)..(4)..(36)..(37): Xaa is C or S

SEQ ID NO: 47501 - protein, 33 aa, Artificial Sequence; identical to SEQ ID NO: 12916
  Cyclic GFR-binding peptide
  MOD_RES (31)..(31): Xaa is C or S

SEQ ID NO: 47502 - protein, 38 aa, Artificial Sequence; identical to SEQ ID NO: 12917
  Cyclic GFR-binding peptide
  MOD_RES (2)..(4)..(36)..(37): Xaa is C or S

SEQ ID NO: 47503 - protein, 29 aa, Artificial Sequence
  Cyclic GFR-binding peptide
RVVMNRYKKLIVNSSDDFYLVSIANLKTP

SEQ ID NO: 47504 - protein, 36 aa, Artificial Sequence; identical to SEQ ID NO: 12920
  Cyclic GFR-binding peptide
  MOD_RES (2)..(33)..(34): Xaa is C or S

SEQ ID NO: 47505 - protein, 30 aa, Artificial Sequence; identical to SEQ ID NO: 12921
  Cyclic GFR-binding peptide

SEQ ID NO: 47506 - protein, 34 aa, Artificial Sequence
  Cyclic GFR-binding peptide
  MOD_RES (2)..(33)..(34): Xaa is C or S
KXSKVVMNSLQEVKPTRGVYYLITLPELDQPVXX

SEQ ID NO: 47507 - protein, 29 aa, Artificial Sequence
  Cyclic GFR-binding peptide
  MOD_RES (1)..(1): Xaa is C or S
XARVVMNNSLQEIVNSSDDYYLVTLPELQ

SEQ ID NO: 47508 - protein, 23 aa, Artificial Sequence
  Cyclic GFR-binding peptide
NEYQKYIVNSSDDIFLVSIPSLQ

SEQ ID NO: 47509 - protein, 28 aa, Artificial Sequence
  Cyclic GFR-binding peptide
SRVIMNSLQEVKPKRGVYYLITLPELAQ

SEQ ID NO: 47510 - protein, 39 aa, Artificial Sequence; identical to SEQ ID NO: 2394
  Cyclic GFR-binding peptide
  MOD_RES (1)..(33)..(34): Xaa is C or S

SEQ ID NO: 47511 - protein, 22 aa, Artificial Sequence
  Cyclic GFR-binding peptide
NSLQEVKPTRGVYYLITLPELD

SEQ ID NO: 47512 - protein, 31 aa, Artificial Sequence; identical to SEQ ID NO: 12928
  Cyclic GFR-binding peptide
  MOD_RES (30)..(31): Xaa is C or S

SEQ ID NO: 47513 - protein, 31 aa, Artificial Sequence; identical to SEQ ID NO: 12929
  Cyclic GFR-binding peptide
  MOD_RES (27)..(28): Xaa is C or S

SEQ ID NO: 47514 - protein, 41 aa, Artificial Sequence; identical to SEQ ID NO: 12930
  Cyclic GFR-binding peptide
  MOD_RES (1)..(3)..(35)..(36): Xaa is C or S

SEQ ID NO: 47515 - protein, 28 aa, Artificial Sequence
  Cyclic GFR-binding peptide
  MOD_RES (26)..(27): Xaa is C or S
NSLQEIVNSSDDYYVVPLPELQTPAXXP

SEQ ID NO: 47516 - protein, 26 aa, Artificial Sequence
  Cyclic GFR-binding peptide
SKVIMEYQKYIKPTKGIIFLISIPSL

SEQ ID NO: 47517 - protein, 27 aa, Artificial Sequence
  Cyclic GFR-binding peptide
  MOD_RES (1)..(1): Xaa is C or S
XSKVVMEYQKYVKPTRGVIFLISIPSL

SEQ ID NO: 47518 - protein, 34 aa, Artificial Sequence; identical to SEQ ID NO: 2399
  Cyclic GFR-binding peptide
  MOD_RES (31)..(32): Xaa is C or S

SEQ ID NO: 47519 - protein, 31 aa, Artificial Sequence; identical to SEQ ID NO: 12936
  Cyclic GFR-binding peptide
  MOD_RES (29)..(30): Xaa is C or S

SEQ ID NO: 47520 - protein, 39 aa, Artificial Sequence; identical to SEQ ID NO: 12937
  Cyclic GFR-binding peptide
  MOD_RES (2)..(4)..(35)..(36): Xaa is C or S

SEQ ID NO: 47521 - protein, 34 aa, Artificial Sequence; identical to SEQ ID NO: 12938
  Cyclic GFR-binding peptide
  MOD_RES (31)..(32): Xaa is C or S

SEQ ID NO: 47522 - protein, 39 aa, Artificial Sequence; identical to SEQ ID NO: 2403
  Cyclic GFR-binding peptide
  MOD_RES (2)..(34)..(35): Xaa is C or S

SEQ ID NO: 47523 - protein, 29 aa, Artificial Sequence
  Cyclic GFR-binding peptide
  MOD_RES (1)..(3): Xaa is C or S
XGXSRVVMNNSLQEIVNSSDDYYLVTLPE

SEQ ID NO: 47524 - protein, 34 aa, Artificial Sequence; identical to SEQ ID NO: 12942
  Cyclic GFR-binding peptide
  MOD_RES (31)..(32): Xaa is C or S

SEQ ID NO: 47525 - protein, 33 aa, Artificial Sequence; identical to SEQ ID NO: 12943
  Cyclic GFR-binding peptide
  MOD_RES (30)..(31): Xaa is C or S

SEQ ID NO: 47526 - protein, 26 aa, Artificial Sequence
  Cyclic GFR-binding peptide
VMNNSLQEIVNSSDDYYVVPLPELKT

SEQ ID NO: 47527 - protein, 33 aa, Artificial Sequence; identical to SEQ ID NO: 2410
  Cyclic GFR-binding peptide
  MOD_RES (2)..(2): Xaa is C or S

SEQ ID NO: 47528 - protein, 38 aa, Artificial Sequence; identical to SEQ ID NO: 12946
  Cyclic GFR-binding peptide
  MOD_RES (2)..(4)..(36)..(37): Xaa is C or S

SEQ ID NO: 47529 - protein, 29 aa, Artificial Sequence
  Cyclic GFR-binding peptide
  MOD_RES (28)..(29): Xaa is C or S
MDRYKKLVVNNASDFYLISIANLRTPVXX

SEQ ID NO: 47530 - protein, 21 aa, Artificial Sequence
  Cyclic GFR-binding peptide
EYQKYIVNSSDDIFLVSIPSL

SEQ ID NO: 47531 - protein, 34 aa, Artificial Sequence; identical to SEQ ID NO: 2416
  Cyclic GFR-binding peptide
  MOD_RES (2)..(4): Xaa is C or S

SEQ ID NO: 47532 - protein, 35 aa, Artificial Sequence; identical to SEQ ID NO: 2419
  Cyclic GFR-binding peptide
  MOD_RES (31)..(32): Xaa is C or S

SEQ ID NO: 47533 - protein, 25 aa, Artificial Sequence
  Cyclic GFR-binding peptide
VVMEEYQKYVVKDYEDIFLMSIPSL

SEQ ID NO: 47534 - protein, 27 aa, Artificial Sequence
  Cyclic GFR-binding peptide
EVVMERYKKLVVKDYEDFYLMSIANLE

SEQ ID NO: 47535 - protein, 36 aa, Artificial Sequence; identical to SEQ ID NO: 12955
  Cyclic GFR-binding peptide
  MOD_RES (1)..(33)..(34): Xaa is C or S

SEQ ID NO: 47536 - protein, 31 aa, Artificial Sequence; identical to SEQ ID NO: 12956
  Cyclic GFR-binding peptide
  MOD_RES (2)..(2): Xaa is C or S

SEQ ID NO: 47537 - protein, 32 aa, Artificial Sequence; identical to SEQ ID NO: 2423
  Cyclic GFR-binding peptide
  MOD_RES (26)..(27): Xaa is C or S

SEQ ID NO: 47538 - protein, 34 aa, Artificial Sequence; identical to SEQ ID NO: 2424
  Cyclic GFR-binding peptide
  MOD_RES (31)..(31): Xaa is C or S

SEQ ID NO: 47539 - protein, 29 aa, Artificial Sequence
  Cyclic GFR-binding peptide
  MOD_RES (2)..(2): Xaa is C or S
KXSRVIMEYQKYVKPKRGVIFLISIPSLA

SEQ ID NO: 47540 - protein, 25 aa, Artificial Sequence
  Cyclic GFR-binding peptide
IMNSLQEIKPTKGIYYVIPLPELDQ

SEQ ID NO: 47541 - protein, 25 aa, Artificial Sequence
  Cyclic GFR-binding peptide
VVMDNSLQEVVNNASDYYVIPLPEL

SEQ ID NO: 47542 - protein, 28 aa, Artificial Sequence
  Cyclic GFR-binding peptide
  MOD_RES (27)..(28): Xaa is C or S
DRYKKLVVNNASDFYLISIANLRTPVXX

SEQ ID NO: 47543 - protein, 37 aa, Artificial Sequence; identical to SEQ ID NO: 2427
  Cyclic GFR-binding peptide
  MOD_RES (1)..(33): Xaa is C or S

SEQ ID NO: 47544 - protein, 36 aa, Artificial Sequence; identical to SEQ ID NO: 12965
  Cyclic GFR-binding peptide
  MOD_RES (2)..(34)..(35): Xaa is C or S

SEQ ID NO: 47545 - protein, 32 aa, Artificial Sequence; identical to SEQ ID NO: 12967
  Cyclic GFR-binding peptide
  MOD_RES (1)..(1): Xaa is C or S

SEQ ID NO: 47546 - protein, 27 aa, Artificial Sequence
  Cyclic GFR-binding peptide
  MOD_RES (27)..(27): Xaa is C or S
ENSLQEVVKDYEDYYVMPLPELETPVX

SEQ ID NO: 47547 - protein, 24 aa, Artificial Sequence
  Cyclic GFR-binding peptide
VMNEYQKYIVNSSDDIFLVSIPSL

SEQ ID NO: 47548 - protein, 33 aa, Artificial Sequence; identical to SEQ ID NO: 12970
  Cyclic GFR-binding peptide
  MOD_RES (2)..(2): Xaa is C or S

SEQ ID NO: 47549 - protein, 29 aa, Artificial Sequence
  Cyclic GFR-binding peptide
  MOD_RES (28)..(29): Xaa is C or S
MDRYKKLVVKENEDFYLMSIANLETPVXX

SEQ ID NO: 47550 - protein, 21 aa, Artificial Sequence
  Cyclic GFR-binding peptide
EEYQKYVVKDYEDIFLMSIPS

SEQ ID NO: 47551 - protein, 27 aa, Artificial Sequence
  Cyclic GFR-binding peptide
IMEYQKYIKPTKGIIFLISIPSLDQSV

SEQ ID NO: 47552 - protein, 32 aa, Artificial Sequence; identical to SEQ ID NO: 12975
  Cyclic GFR-binding peptide
  MOD_RES (32)..(32): Xaa is C or S

SEQ ID NO: 47553 - protein, 29 aa, Artificial Sequence
  Cyclic GFR-binding peptide
  MOD_RES (26)..(27): Xaa is C or S
NSLQEIVNSSDDYYVVPLPELKTPAXXPK

SEQ ID NO: 47554 - protein, 23 aa, Artificial Sequence
  Cyclic GFR-binding peptide
VMENSLQEVVKDYEDYYLMTLPE

SEQ ID NO: 47555 - protein, 40 aa, Artificial Sequence; identical to SEQ ID NO: 12979
  Cyclic GFR-binding peptide
  MOD_RES (2)..(34)..(35): Xaa is C or S

SEQ ID NO: 47556 - protein, 27 aa, Artificial Sequence
  Cyclic GFR-binding peptide
ARVVMNNSLQEIVNSSDDYYLVTLPEL

SEQ ID NO: 47557 - protein, 32 aa, Artificial Sequence; identical to SEQ ID NO: 12981
  Cyclic GFR-binding peptide
  MOD_RES (29)..(30): Xaa is C or S

SEQ ID NO: 47558 - protein, 37 aa, Artificial Sequence; identical to SEQ ID NO: 12982
  Cyclic GFR-binding peptide
  MOD_RES (32)..(32): Xaa is C or S

SEQ ID NO: 47559 - protein, 30 aa, Artificial Sequence; identical to SEQ ID NO: 12983
  Cyclic GFR-binding peptide
  MOD_RES (29)..(30): Xaa is C or S

SEQ ID NO: 47560 - protein, 23 aa, Artificial Sequence
  Cyclic GFR-binding peptide
VMEYQKYVKPTRGVIFLISIPSL

SEQ ID NO: 47561 - protein, 25 aa, Artificial Sequence
  Cyclic GFR-binding peptide
NSLQEVKPTRGVYYLITLPELDQPV

SEQ ID NO: 47562 - protein, 32 aa, Artificial Sequence; identical to SEQ ID NO: 12985
  Cyclic GFR-binding peptide
  MOD_RES (31)..(31): Xaa is C or S

SEQ ID NO: 47563 - protein, 31 aa, Artificial Sequence; identical to SEQ ID NO: 2439
  Cyclic GFR-binding peptide
  MOD_RES (2)..(2): Xaa is C or S

SEQ ID NO: 47564 - protein, 25 aa, Artificial Sequence
  Cyclic GFR-binding peptide
KVVMEYQKYVKPTRGVIFLISIPSL

SEQ ID NO: 47565 - protein, 23 aa, Artificial Sequence
  Cyclic GFR-binding peptide
MERYKKLVVKDYEDFYLMSIANL

SEQ ID NO: 47566 - protein, 34 aa, Artificial Sequence; identical to SEQ ID NO: 12991
  Cyclic GFR-binding peptide
  MOD_RES (2)..(33)..(34): Xaa is C or S

SEQ ID NO: 47567 - protein, 40 aa, Artificial Sequence; identical to SEQ ID NO: 2444
  Cyclic GFR-binding peptide
  MOD_RES (1)..(3)..(35)..(36): Xaa is C or S

SEQ ID NO: 47568 - protein, 28 aa, Artificial Sequence
  Cyclic GFR-binding peptide
RVIMEYQKYVKPKRGVIFLISIPSLAQP

SEQ ID NO: 47569 - protein, 35 aa, Artificial Sequence; identical to SEQ ID NO: 12994
  Cyclic GFR-binding peptide
  MOD_RES (31)..(32): Xaa is C or S

SEQ ID NO: 47570 - protein, 29 aa, Artificial Sequence
  Cyclic GFR-binding peptide
VVMERYKKLVVKDYEDFYLMSIANLETPV

SEQ ID NO: 47571 - protein, 22 aa, Artificial Sequence
  Cyclic GFR-binding peptide
NSLQEVVKDYEDYYLMTLPELE

SEQ ID NO: 47572 - protein, 33 aa, Artificial Sequence; identical to SEQ ID NO: 12997
  Cyclic GFR-binding peptide
  MOD_RES (31)..(32): Xaa is C or S

SEQ ID NO: 47573 - protein, 28 aa, Artificial Sequence
  Cyclic GFR-binding peptide
VMNEYQKYIVNSSDDIFLVSIPSLQTPA

SEQ ID NO: 47574 - protein, 34 aa, Artificial Sequence; identical to SEQ ID NO: 13001
  Cyclic GFR-binding peptide
  MOD_RES (30)..(31): Xaa is C or S

SEQ ID NO: 47575 - protein, 37 aa, Artificial Sequence; identical to SEQ ID NO: 2452
  Cyclic GFR-binding peptide
  MOD_RES (2)..(4)..(35)..(36): Xaa is C or S

SEQ ID NO: 47576 - protein, 30 aa, Artificial Sequence; identical to SEQ ID NO: 2453
  Cyclic GFR-binding peptide
  MOD_RES (28)..(29): Xaa is C or S

SEQ ID NO: 47577 - protein, 32 aa, Artificial Sequence; identical to SEQ ID NO: 13004
  Cyclic GFR-binding peptide
  MOD_RES (2)..(2): Xaa is C or S

SEQ ID NO: 47578 - protein, 41 aa, Artificial Sequence; identical to SEQ ID NO: 13006
  Cyclic GFR-binding peptide
  MOD_RES (1)..(3)..(35)..(36): Xaa is C or S

SEQ ID NO: 47579 - protein, 37 aa, Artificial Sequence; identical to SEQ ID NO: 13007
  Cyclic GFR-binding peptide
  MOD_RES (2)..(34)..(35): Xaa is C or S

SEQ ID NO: 47580 - protein, 29 aa, Artificial Sequence
  Cyclic GFR-binding peptide
EVVMENSLQEVVKDYEDYYVMPLPELETP

SEQ ID NO: 47581 - protein, 37 aa, Artificial Sequence
  Cyclic GFR-binding peptide
  MOD_RES (2)..(33)..(34): Xaa is C or S
KXSKVVMNSLQEVKPTRGVYYLITLPELDQPVXXPSA

SEQ ID NO: 47582 - protein, 23 aa, Artificial Sequence
  Cyclic GFR-binding peptide
NNSLQEIVNSSDDYYVVPLPELK

SEQ ID NO: 47583 - protein, 42 aa, Artificial Sequence; identical to SEQ ID NO: 2461
  Cyclic GFR-binding peptide
  MOD_RES (2)..(4)..(36): Xaa is C or S

SEQ ID NO: 47584 - protein, 39 aa, Artificial Sequence; identical to SEQ ID NO: 13013
  Cyclic GFR-binding peptide
  MOD_RES (2)..(4)..(36)..(37): Xaa is C or S

SEQ ID NO: 47585 - protein, 26 aa, Artificial Sequence
  Cyclic GFR-binding peptide
SRVIMRYKKLVKPKRGVFYLISIANL

SEQ ID NO: 47586 - protein, 26 aa, Artificial Sequence
  Cyclic GFR-binding peptide
MEYQKYVKPTRGVIFLISIPSLDQPV

SEQ ID NO: 47587 - protein, 31 aa, Artificial Sequence; identical to SEQ ID NO: 13017
  Cyclic GFR-binding peptide
  MOD_RES (30)..(31): Xaa is C or S

SEQ ID NO: 47588 - protein, 28 aa, Artificial Sequence
  Cyclic GFR-binding peptide
  MOD_RES (1)..(1): Xaa is C or S
XGEVVMENSLQEVVKDYEDYYLMTLPEL

SEQ ID NO: 47589 - protein, 36 aa, Artificial Sequence; identical to SEQ ID NO: 2468
  Cyclic GFR-binding peptide
  MOD_RES (1)..(3)..(34)..(35): Xaa is C or S

SEQ ID NO: 47590 - protein, 20 aa, Artificial Sequence
  Cyclic GFR-binding peptide
NSLQEIKPTKGIYYVIPLPE

SEQ ID NO: 47591 - protein, 41 aa, Artificial Sequence; identical to SEQ ID NO: 13022
  Cyclic GFR-binding peptide
  MOD_RES (1)..(3)..(35)..(36): Xaa is C or S

SEQ ID NO: 47592 - protein, 32 aa, Artificial Sequence; identical to SEQ ID NO: 13023
  Cyclic GFR-binding peptide
  MOD_RES (28)..(29): Xaa is C or S

SEQ ID NO: 47593 - protein, 32 aa, Artificial Sequence; identical to SEQ ID NO: 2472
  Cyclic GFR-binding peptide
  MOD_RES (2)..(4): Xaa is C or S

SEQ ID NO: 47594 - protein, 32 aa, Artificial Sequence; identical to SEQ ID NO: 2473
  Cyclic GFR-binding peptide
  MOD_RES (28)..(29): Xaa is C or S

SEQ ID NO: 47595 - protein, 35 aa, Artificial Sequence; identical to SEQ ID NO: 2475
  Cyclic GFR-binding peptide
  MOD_RES (29)..(30): Xaa is C or S

SEQ ID NO: 47596 - protein, 31 aa, Artificial Sequence; identical to SEQ ID NO: 13028
  Cyclic GFR-binding peptide
  MOD_RES (29)..(30): Xaa is C or S

SEQ ID NO: 47597 - protein, 23 aa, Artificial Sequence
  Cyclic GFR-binding peptide
VIMNSLQEIKPTKGIYYVIPLPE

SEQ ID NO: 47598 - protein, 36 aa, Artificial Sequence; identical to SEQ ID NO: 13030
  Cyclic GFR-binding peptide
  MOD_RES (2)..(4)..(36): Xaa is C or S

SEQ ID NO: 47599 - protein, 30 aa, Artificial Sequence; identical to SEQ ID NO: 13031
  Cyclic GFR-binding peptide

SEQ ID NO: 47600 - protein, 29 aa, Artificial Sequence
  Cyclic GFR-binding peptide
  MOD_RES (26)..(27): Xaa is C or S
NSLQEVVKENEDYYLMTLPELETPVXXAK

SEQ ID NO: 47601 - protein, 32 aa, Artificial Sequence; identical to SEQ ID NO: 13034
  Cyclic GFR-binding peptide
  MOD_RES (1)..(3): Xaa is C or S

SEQ ID NO: 47602 - protein, 23 aa, Artificial Sequence
  Cyclic GFR-binding peptide
VMDEYQKYVVKENEDIFLMSIPS

SEQ ID NO: 47603 - protein, 31 aa, Artificial Sequence; identical to SEQ ID NO: 13037
  Cyclic GFR-binding peptide
  MOD_RES (28)..(29): Xaa is C or S

SEQ ID NO: 47604 - protein, 30 aa, Artificial Sequence; identical to SEQ ID NO: 13038
  Cyclic GFR-binding peptide
  MOD_RES (1)..(3): Xaa is C or S

SEQ ID NO: 47605 - protein, 35 aa, Artificial Sequence; identical to SEQ ID NO: 13039
  Cyclic GFR-binding peptide
  MOD_RES (1)..(3)..(35): Xaa is C or S

SEQ ID NO: 47606 - protein, 38 aa, Artificial Sequence; identical to SEQ ID NO: 13040
  Cyclic GFR-binding peptide
  MOD_RES (1)..(3)..(34)..(35): Xaa is C or S

SEQ ID NO: 47607 - protein, 29 aa, Artificial Sequence
  Cyclic GFR-binding peptide
RVIMEYQKYVKPKRGVIFLISIPSLAQPV

SEQ ID NO: 47608 - protein, 30 aa, Artificial Sequence; identical to SEQ ID NO: 2485
  Cyclic GFR-binding peptide
  MOD_RES (30)..(30): Xaa is C or S

SEQ ID NO: 47609 - protein, 28 aa, Artificial Sequence
  Cyclic GFR-binding peptide
EVVMDRYKKLVVKENEDFYLMSIANLET

SEQ ID NO: 47610 - protein, 29 aa, Artificial Sequence
  Cyclic GFR-binding peptide
  MOD_RES (26)..(27): Xaa is C or S
EYQKYIVNSSDDIFLVSIPSLQTPAXXPK

SEQ ID NO: 47611 - protein, 27 aa, Artificial Sequence
  Cyclic GFR-binding peptide
  MOD_RES (27)..(27): Xaa is C or S
NNSLQEIVNSSDDYYVVPLPELQTPAX

SEQ ID NO: 47612 - protein, 33 aa, Artificial Sequence; identical to SEQ ID NO: 2492
  Cyclic GFR-binding peptide
  MOD_RES (1)..(3): Xaa is C or S

SEQ ID NO: 47613 - protein, 29 aa, Artificial Sequence
  Cyclic GFR-binding peptide
EVVMDEYQKYVVKENEDIFLMSIPSLETP

SEQ ID NO: 47614 - protein, 30 aa, Artificial Sequence; identical to SEQ ID NO: 2497
  Cyclic GFR-binding peptide
  MOD_RES (2)..(4): Xaa is C or S

SEQ ID NO: 47615 - protein, 36 aa, Artificial Sequence; identical to SEQ ID NO: 13052
  Cyclic GFR-binding peptide
  MOD_RES (2)..(4)..(36): Xaa is C or S

SEQ ID NO: 47616 - protein, 35 aa, Artificial Sequence; identical to SEQ ID NO: 13053
  Cyclic GFR-binding peptide
  MOD_RES (2)..(34)..(35): Xaa is C or S

SEQ ID NO: 47617 - protein, 30 aa, Artificial Sequence; identical to SEQ ID NO: 2501
  Cyclic GFR-binding peptide
  MOD_RES (28)..(29): Xaa is C or S

SEQ ID NO: 47618 - protein, 34 aa, Artificial Sequence; identical to SEQ ID NO: 13056
  Cyclic GFR-binding peptide
  MOD_RES (1)..(3): Xaa is C or S

SEQ ID NO: 47619 - protein, 31 aa, Artificial Sequence; identical to SEQ ID NO: 2502
  Cyclic GFR-binding peptide
  MOD_RES (29)..(29): Xaa is C or S

SEQ ID NO: 47620 - protein, 24 aa, Artificial Sequence
  Cyclic GFR-binding peptide
DNSLQEVVKENEDYYLMTLPELET

SEQ ID NO: 47621 - protein, 30 aa, Artificial Sequence
  Cyclic GFR-binding peptide
  MOD_RES (29)..(30): Xaa is C or S
VVMNSLQEVKPTRGVYYLITLPELDQPVXX

SEQ ID NO: 47622 - protein, 32 aa, Artificial Sequence; identical to SEQ ID NO: 13059
  Cyclic GFR-binding peptide
  MOD_RES (30)..(31): Xaa is C or S

SEQ ID NO: 47623 - protein, 27 aa, Artificial Sequence
  Cyclic GFR-binding peptide
  MOD_RES (2)..(2): Xaa is C or S
KXSRVIMNSLQEVKPKRGVYYLITLPE

SEQ ID NO: 47624 - protein, 32 aa, Artificial Sequence; identical to SEQ ID NO: 13062
  Cyclic GFR-binding peptide
  MOD_RES (1)..(1): Xaa is C or S

SEQ ID NO: 47625 - protein, 37 aa, Artificial Sequence; identical to SEQ ID NO: 13063
  Cyclic GFR-binding peptide
  MOD_RES (1)..(3)..(35)..(36): Xaa is C or S

SEQ ID NO: 47626 - protein, 26 aa, Artificial Sequence
  Cyclic GFR-binding peptide
  MOD_RES (1)..(1): Xaa is C or S
XSKVIMRYKKLIKPTKGIFYLISIAN

SEQ ID NO: 47627 - protein, 36 aa, Artificial Sequence; identical to SEQ ID NO: 13065
  Cyclic GFR-binding peptide
  MOD_RES (2)..(4)..(36): Xaa is C or S

SEQ ID NO: 47628 - protein, 22 aa, Artificial Sequence
  Cyclic GFR-binding peptide
EYQKYIKPTKGIIFLISIPSLD

SEQ ID NO: 47629 - protein, 29 aa, Artificial Sequence
  Cyclic GFR-binding peptide
EVVMDNSLQEVVNNASDYYVIPLPELRTP

SEQ ID NO: 47630 - protein, 34 aa, Artificial Sequence; identical to SEQ ID NO: 13070
  Cyclic GFR-binding peptide
  MOD_RES (30)..(31): Xaa is C or S

SEQ ID NO: 47631 - protein, 38 aa, Artificial Sequence; identical to SEQ ID NO: 13071
  Cyclic GFR-binding peptide
  MOD_RES (32)..(33): Xaa is C or S

SEQ ID NO: 47632 - protein, 23 aa, Artificial Sequence
  Cyclic GFR-binding peptide
EYQKYIKPTKGIIFLISIPSLDQ

SEQ ID NO: 47633 - protein, 37 aa, Artificial Sequence; identical to SEQ ID NO: 13074
  Cyclic GFR-binding peptide
  MOD_RES (2)..(4)..(36): Xaa is C or S

SEQ ID NO: 47634 - protein, 31 aa, Artificial Sequence; identical to SEQ ID NO: 13078
  Cyclic GFR-binding peptide
  MOD_RES (31)..(31): Xaa is C or S

SEQ ID NO: 47635 - protein, 28 aa, Artificial Sequence
  Cyclic GFR-binding peptide
ARVVMNNSLQEIVNSSDDYYLVTLPELQ

SEQ ID NO: 47636 - protein, 29 aa, Artificial Sequence
  Cyclic GFR-binding peptide
VVMNNSLQEIVNSSDDYYVVPLPELQTPA

SEQ ID NO: 47637 - protein, 33 aa, Artificial Sequence; identical to SEQ ID NO: 13081
  Cyclic GFR-binding peptide
  MOD_RES (30)..(31): Xaa is C or S

SEQ ID NO: 47638 - protein, 33 aa, Artificial Sequence; identical to SEQ ID NO: 2526
  Cyclic GFR-binding peptide
  MOD_RES (27)..(28): Xaa is C or S

SEQ ID NO: 47639 - protein, 34 aa, Artificial Sequence; identical to SEQ ID NO: 13084
  Cyclic GFR-binding peptide
  MOD_RES (1)..(3): Xaa is C or S

SEQ ID NO: 47640 - protein, 39 aa, Artificial Sequence; identical to SEQ ID NO: 2529
  Cyclic GFR-binding peptide
  MOD_RES (2)..(33)..(34): Xaa is C or S

SEQ ID NO: 47641 - protein, 41 aa, Artificial Sequence; identical to SEQ ID NO: 13086
  Cyclic GFR-binding peptide
  MOD_RES (1)..(3)..(35)..(36): Xaa is C or S

SEQ ID NO: 47642 - protein, 32 aa, Artificial Sequence; identical to SEQ ID NO: 13087
  Cyclic GFR-binding peptide
  MOD_RES (1)..(3): Xaa is C or S

SEQ ID NO: 47643 - protein, 30 aa, Artificial Sequence; identical to SEQ ID NO: 13088
  Cyclic GFR-binding peptide

SEQ ID NO: 47644 - protein, 21 aa, Artificial Sequence
  Cyclic GFR-binding peptide
RYKKLIVNSSDDFYLVSIANL

SEQ ID NO: 47645 - protein, 35 aa, Artificial Sequence; identical to SEQ ID NO: 2538
  Cyclic GFR-binding peptide
  MOD_RES (2)..(4): Xaa is C or S

SEQ ID NO: 47646 - protein, 36 aa, Artificial Sequence; identical to SEQ ID NO: 2539
  Cyclic GFR-binding peptide
  MOD_RES (31)..(32): Xaa is C or S

SEQ ID NO: 47647 - protein, 33 aa, Artificial Sequence; identical to SEQ ID NO: 13094
  Cyclic GFR-binding peptide
  MOD_RES (32)..(33): Xaa is C or S

SEQ ID NO: 47648 - protein, 27 aa, Artificial Sequence
  Cyclic GFR-binding peptide
KVIMEYQKYIKPTKGIIFLISIPSLDQ

SEQ ID NO: 47649 - protein, 36 aa, Artificial Sequence; identical to SEQ ID NO: 13097
  Cyclic GFR-binding peptide
  MOD_RES (2)..(34): Xaa is C or S

SEQ ID NO: 47650 - protein, 23 aa, Artificial Sequence
  Cyclic GFR-binding peptide
IMNSLQEIKPTKGIYYLITLPEL

SEQ ID NO: 47651 - protein, 32 aa, Artificial Sequence; identical to SEQ ID NO: 2546
  Cyclic GFR-binding peptide
  MOD_RES (27)..(28): Xaa is C or S

SEQ ID NO: 47652 - protein, 29 aa, Artificial Sequence
  Cyclic GFR-binding peptide
  MOD_RES (27)..(28): Xaa is C or S
NNSLQEIVNSSDDYYLVTLPELKTPAXXP

SEQ ID NO: 47653 - protein, 32 aa, Artificial Sequence; identical to SEQ ID NO: 13101
  Cyclic GFR-binding peptide
  MOD_RES (1)..(3): Xaa is C or S

SEQ ID NO: 47654 - protein, 23 aa, Artificial Sequence
  Cyclic GFR-binding peptide
EYQKYIVNSSDDIFLVSIPSLQT

SEQ ID NO: 47655 - protein, 35 aa, Artificial Sequence
  Cyclic GFR-binding peptide
  MOD_RES (1)..(3)..(34)..(35): Xaa is C or S
XKXSKVVMNSLQEVKPTRGVYYLITLPELDQPVXX

SEQ ID NO: 47656 - protein, 36 aa, Artificial Sequence; identical to SEQ ID NO: 13104
  Cyclic GFR-binding peptide
  MOD_RES (30)..(31): Xaa is C or S

SEQ ID NO: 47657 - protein, 32 aa, Artificial Sequence; identical to SEQ ID NO: 13105
  Cyclic GFR-binding peptide
  MOD_RES (1)..(3): Xaa is C or S

SEQ ID NO: 47658 - protein, 35 aa, Artificial Sequence; identical to SEQ ID NO: 13106
  Cyclic GFR-binding peptide
  MOD_RES (1)..(3)..(35): Xaa is C or S

SEQ ID NO: 47659 - protein, 24 aa, Artificial Sequence
  Cyclic GFR-binding peptide
IMEYQKYIKPTKGIIFLISIPSLD

SEQ ID NO: 47660 - protein, 33 aa, Artificial Sequence; identical to SEQ ID NO: 13108
  Cyclic GFR-binding peptide
  MOD_RES (28)..(29): Xaa is C or S

SEQ ID NO: 47661 - protein, 30 aa, Artificial Sequence; identical to SEQ ID NO: 2554
  Cyclic GFR-binding peptide

SEQ ID NO: 47662 - protein, 36 aa, Artificial Sequence; identical to SEQ ID NO: 13110
  Cyclic GFR-binding peptide
  MOD_RES (2)..(34)..(35): Xaa is C or S

SEQ ID NO: 47663 - protein, 26 aa, Artificial Sequence
  Cyclic GFR-binding peptide
  MOD_RES (1)..(1): Xaa is C or S
XSRVIMNSLQEVKPKRGVYYLITLPE

SEQ ID NO: 47664 - protein, 27 aa, Artificial Sequence
  Cyclic GFR-binding peptide
VVMDNSLQEVVKENEDYYVMPLPELET

SEQ ID NO: 47665 - protein, 35 aa, Artificial Sequence; identical to SEQ ID NO: 13114
  Cyclic GFR-binding peptide
  MOD_RES (1)..(3)..(34)..(35): Xaa is C or S

SEQ ID NO: 47666 - protein, 31 aa, Artificial Sequence; identical to SEQ ID NO: 13115
  Cyclic GFR-binding peptide
  MOD_RES (26)..(26): Xaa is C or S

SEQ ID NO: 47667 - protein, 40 aa, Artificial Sequence; identical to SEQ ID NO: 13116
  Cyclic GFR-binding peptide
  MOD_RES (2)..(34)..(35): Xaa is C or S

SEQ ID NO: 47668 - protein, 38 aa, Artificial Sequence; identical to SEQ ID NO: 2558
  Cyclic GFR-binding peptide
  MOD_RES (2)..(4)..(35)..(36): Xaa is C or S

SEQ ID NO: 47669 - protein, 32 aa, Artificial Sequence; identical to SEQ ID NO: 13119
  Cyclic GFR-binding peptide
  MOD_RES (2)..(2): Xaa is C or S

SEQ ID NO: 47670 - protein, 24 aa, Artificial Sequence
  Cyclic GFR-binding peptide
NSLQEVVNNASDYYLITLPELRTP

SEQ ID NO: 47671 - protein, 20 aa, Artificial Sequence
  Cyclic GFR-binding peptide
EYQKYVVKDYEDIFLMSIPS

SEQ ID NO: 47672 - protein, 30 aa, Artificial Sequence; identical to SEQ ID NO: 2563
  Cyclic GFR-binding peptide
  MOD_RES (2)..(4): Xaa is C or S

SEQ ID NO: 47673 - protein, 37 aa, Artificial Sequence; identical to SEQ ID NO: 13123
  Cyclic GFR-binding peptide
  MOD_RES (31)..(31): Xaa is C or S

SEQ ID NO: 47674 - protein, 37 aa, Artificial Sequence; identical to SEQ ID NO: 13124
  Cyclic GFR-binding peptide
  MOD_RES (2)..(34)..(35): Xaa is C or S

SEQ ID NO: 47675 - protein, 27 aa, Artificial Sequence
  Cyclic GFR-binding peptide
VVMNNSLQEIVNSSDDYYLVTLPELKT

SEQ ID NO: 47676 - protein, 30 aa, Artificial Sequence; identical to SEQ ID NO: 13128
  Cyclic GFR-binding peptide
  MOD_RES (26)..(27): Xaa is C or S

SEQ ID NO: 47677 - protein, 37 aa, Artificial Sequence; identical to SEQ ID NO: 13129
  Cyclic GFR-binding peptide
  MOD_RES (2)..(34)..(35): Xaa is C or S

SEQ ID NO: 47678 - protein, 31 aa, Artificial Sequence; identical to SEQ ID NO: 13130
  Cyclic GFR-binding peptide
  MOD_RES (29)..(30): Xaa is C or S

SEQ ID NO: 47679 - protein, 33 aa, Artificial Sequence; identical to SEQ ID NO: 2574
  Cyclic GFR-binding peptide
  MOD_RES (30)..(30): Xaa is C or S

SEQ ID NO: 47680 - protein, 37 aa, Artificial Sequence; identical to SEQ ID NO: 13136
  Cyclic GFR-binding peptide
  MOD_RES (2)..(4)..(35)..(36): Xaa is C or S

SEQ ID NO: 47681 - protein, 34 aa, Artificial Sequence; identical to SEQ ID NO: 2579
  Cyclic GFR-binding peptide
  MOD_RES (2)..(4): Xaa is C or S

SEQ ID NO: 47682 - protein, 29 aa, Artificial Sequence
  Cyclic GFR-binding peptide
  MOD_RES (29)..(29): Xaa is C or S
VMENSLQEVVKDYEDYYLMTLPELETPVX

SEQ ID NO: 47683 - protein, 31 aa, Artificial Sequence; identical to SEQ ID NO: 13140
  Cyclic GFR-binding peptide
  MOD_RES (31)..(31): Xaa is C or S

SEQ ID NO: 47684 - protein, 35 aa, Artificial Sequence; identical to SEQ ID NO: 13142
  Cyclic GFR-binding peptide
  MOD_RES (31)..(32): Xaa is C or S

SEQ ID NO: 47685 - protein, 37 aa, Artificial Sequence; identical to SEQ ID NO: 13143
  Cyclic GFR-binding peptide
  MOD_RES (2)..(4)..(36): Xaa is C or S

SEQ ID NO: 47686 - protein, 41 aa, Artificial Sequence; identical to SEQ ID NO: 2594
  Cyclic GFR-binding peptide
  MOD_RES (1)..(3)..(35)..(36): Xaa is C or S

SEQ ID NO: 47687 - protein, 25 aa, Artificial Sequence
  Cyclic GFR-binding peptide
VVMDRYKKLVVNNASDFYLISIANL

SEQ ID NO: 47688 - protein, 39 aa, Artificial Sequence; identical to SEQ ID NO: 2597
  Cyclic GFR-binding peptide
  MOD_RES (1)..(3)..(34)..(35): Xaa is C or S

SEQ ID NO: 47689 - protein, 34 aa, Artificial Sequence; identical to SEQ ID NO: 13149
  Cyclic GFR-binding peptide
  MOD_RES (2)..(34): Xaa is C or S

SEQ ID NO: 47690 - protein, 30 aa, Artificial Sequence; identical to SEQ ID NO: 13150
  Cyclic GFR-binding peptide
  MOD_RES (29)..(30): Xaa is C or S

SEQ ID NO: 47691 - protein, 33 aa, Artificial Sequence; identical to SEQ ID NO: 13151
  Cyclic GFR-binding peptide
  MOD_RES (28)..(29): Xaa is C or S

SEQ ID NO: 47692 - protein, 32 aa, Artificial Sequence; identical to SEQ ID NO: 13152
  Cyclic GFR-binding peptide
  MOD_RES (28)..(29): Xaa is C or S

SEQ ID NO: 47693 - protein, 21 aa, Artificial Sequence
  Cyclic GFR-binding peptide
NSLQEIKPTKGIYYVIPLPEL

SEQ ID NO: 47694 - protein, 30 aa, Artificial Sequence; identical to SEQ ID NO: 2599
  Cyclic GFR-binding peptide
  MOD_RES (2)..(2): Xaa is C or S

SEQ ID NO: 47695 - protein, 31 aa, Artificial Sequence; identical to SEQ ID NO: 2600
  Cyclic GFR-binding peptide

SEQ ID NO: 47696 - protein, 40 aa, Artificial Sequence; identical to SEQ ID NO: 13156
  Cyclic GFR-binding peptide
  MOD_RES (2)..(34): Xaa is C or S

SEQ ID NO: 47697 - protein, 30 aa, Artificial Sequence; identical to SEQ ID NO: 2602
  Cyclic GFR-binding peptide
  MOD_RES (27)..(27): Xaa is C or S

SEQ ID NO: 47698 - protein, 29 aa, Artificial Sequence
  Cyclic GFR-binding peptide
  MOD_RES (28)..(29): Xaa is C or S
MDEYQKYVVKENEDIFLMSIPSLETPVXX

SEQ ID NO: 47699 - protein, 39 aa, Artificial Sequence; identical to SEQ ID NO: 13159
  Cyclic GFR-binding peptide
  MOD_RES (1)..(33)..(34): Xaa is C or S

SEQ ID NO: 47700 - protein, 21 aa, Artificial Sequence
  Cyclic GFR-binding peptide
NSLQEVVKENEDYYLMTLPEL

SEQ ID NO: 47701 - protein, 37 aa, Artificial Sequence; identical to SEQ ID NO: 13161
  Cyclic GFR-binding peptide
  MOD_RES (2)..(34)..(35): Xaa is C or S

SEQ ID NO: 47702 - protein, 34 aa, Artificial Sequence; identical to SEQ ID NO: 2606
  Cyclic GFR-binding peptide
  MOD_RES (31)..(32): Xaa is C or S

SEQ ID NO: 47703 - protein, 35 aa, Artificial Sequence; identical to SEQ ID NO: 2608
  Cyclic GFR-binding peptide
  MOD_RES (30)..(31): Xaa is C or S

SEQ ID NO: 47704 - protein, 34 aa, Artificial Sequence; identical to SEQ ID NO: 2609
  Cyclic GFR-binding peptide
  MOD_RES (30)..(31): Xaa is C or S

SEQ ID NO: 47705 - protein, 22 aa, Artificial Sequence
  Cyclic GFR-binding peptide
EYQKYIVNSSDDIFLVSIPSLQ

SEQ ID NO: 47706 - protein, 27 aa, Artificial Sequence
  Cyclic GFR-binding peptide
ARVVMNEYQKYIVNSSDDIFLVSIPSL

SEQ ID NO: 47707 - protein, 36 aa, Artificial Sequence; identical to SEQ ID NO: 13168
  Cyclic GFR-binding peptide
  MOD_RES (31)..(32): Xaa is C or S

SEQ ID NO: 47708 - protein, 31 aa, Artificial Sequence; identical to SEQ ID NO: 13169
  Cyclic GFR-binding peptide
  MOD_RES (2)..(2): Xaa is C or S

SEQ ID NO: 47709 - protein, 29 aa, Artificial Sequence
  Cyclic GFR-binding peptide
  MOD_RES (1)..(3): Xaa is C or S
XKXSKVIMRYKKLIKPTKGIFYLISIANL

SEQ ID NO: 47710 - protein, 37 aa, Artificial Sequence; identical to SEQ ID NO: 13171
  Cyclic GFR-binding peptide
  MOD_RES (2)..(4)..(36)..(37): Xaa is C or S

SEQ ID NO: 47711 - protein, 30 aa, Artificial Sequence; identical to SEQ ID NO: 13172
  Cyclic GFR-binding peptide
  MOD_RES (30)..(30): Xaa is C or S

SEQ ID NO: 47712 - protein, 24 aa, Artificial Sequence
  Cyclic GFR-binding peptide
MNNSLQEIVNSSDDYYLVTLPELK

SEQ ID NO: 47713 - protein, 29 aa, Artificial Sequence
  Cyclic GFR-binding peptide
  MOD_RES (27)..(28): Xaa is C or S
MEYQKYVKPKRGVIFLISIPSLAQPVXXP

SEQ ID NO: 47714 - protein, 28 aa, Artificial Sequence
  Cyclic GFR-binding peptide
  MOD_RES (27)..(28): Xaa is C or S
MEYQKYVKPTRGVIFLISIPSLDQPVXX

SEQ ID NO: 47715 - protein, 31 aa, Artificial Sequence; identical to SEQ ID NO: 13177
  Cyclic GFR-binding peptide
  MOD_RES (30)..(31): Xaa is C or S

SEQ ID NO: 47716 - protein, 33 aa, Artificial Sequence; identical to SEQ ID NO: 2617
  Cyclic GFR-binding peptide
  MOD_RES (28)..(29): Xaa is C or S

SEQ ID NO: 47717 - protein, 27 aa, Artificial Sequence
  Cyclic GFR-binding peptide
SRVVMNEYQKYIVNSSDDIFLVSIPSL

SEQ ID NO: 47718 - protein, 29 aa, Artificial Sequence
  Cyclic GFR-binding peptide
  MOD_RES (27)..(28): Xaa is C or S
MRYKKLIKPTKGIFYLISIANLDQSVXXP

SEQ ID NO: 47719 - protein, 30 aa, Artificial Sequence; identical to SEQ ID NO: 13181
  Cyclic GFR-binding peptide
  MOD_RES (28)..(29): Xaa is C or S

SEQ ID NO: 47720 - protein, 30 aa, Artificial Sequence; identical to SEQ ID NO: 13182
  Cyclic GFR-binding peptide

SEQ ID NO: 47721 - protein, 39 aa, Artificial Sequence; identical to SEQ ID NO: 13183
  Cyclic GFR-binding peptide
  MOD_RES (2)..(4)..(36)..(37): Xaa is C or S

SEQ ID NO: 47722 - protein, 26 aa, Artificial Sequence
  Cyclic GFR-binding peptide
MEYQKYVKPKRGVIFLISIPSLAQPV

SEQ ID NO: 47723 - protein, 22 aa, Artificial Sequence
  Cyclic GFR-binding peptide
DNSLQEVVKENEDYYLMTLPEL

SEQ ID NO: 47724 - protein, 31 aa, Artificial Sequence; identical to SEQ ID NO: 2625
  Cyclic GFR-binding peptide
  MOD_RES (2)..(2): Xaa is C or S

SEQ ID NO: 47725 - protein, 32 aa, Artificial Sequence; identical to SEQ ID NO: 13187
  Cyclic GFR-binding peptide
  MOD_RES (29)..(30): Xaa is C or S

SEQ ID NO: 47726 - protein, 33 aa, Artificial Sequence; identical to SEQ ID NO: 2628
  Cyclic GFR-binding peptide
  MOD_RES (1)..(33): Xaa is C or S

SEQ ID NO: 47727 - protein, 32 aa, Artificial Sequence; identical to SEQ ID NO: 13192
  Cyclic GFR-binding peptide
  MOD_RES (2)..(2): Xaa is C or S

SEQ ID NO: 47728 - protein, 32 aa, Artificial Sequence; identical to SEQ ID NO: 2632
  Cyclic GFR-binding peptide
  MOD_RES (27)..(28): Xaa is C or S

SEQ ID NO: 47729 - protein, 34 aa, Artificial Sequence; identical to SEQ ID NO: 2634
  Cyclic GFR-binding peptide
  MOD_RES (1)..(33)..(34): Xaa is C or S

SEQ ID NO: 47730 - protein, 24 aa, Artificial Sequence
  Cyclic GFR-binding peptide
RYKKLVKPKRGVFYLISIANLAQP

SEQ ID NO: 47731 - protein, 34 aa, Artificial Sequence; identical to SEQ ID NO: 13197
  Cyclic GFR-binding peptide
  MOD_RES (2)..(33)..(34): Xaa is C or S

SEQ ID NO: 47732 - protein, 37 aa, Artificial Sequence; identical to SEQ ID NO: 13198
  Cyclic GFR-binding peptide
  MOD_RES (2)..(34)..(35): Xaa is C or S

SEQ ID NO: 47733 - protein, 38 aa, Artificial Sequence; identical to SEQ ID NO: 13199
  Cyclic GFR-binding peptide
  MOD_RES (2)..(33)..(34): Xaa is C or S

SEQ ID NO: 47734 - protein, 34 aa, Artificial Sequence; identical to SEQ ID NO: 13201
  Cyclic GFR-binding peptide
  MOD_RES (32)..(33): Xaa is C or S

SEQ ID NO: 47735 - protein, 27 aa, Artificial Sequence
  Cyclic GFR-binding peptide
  MOD_RES (27)..(27): Xaa is C or S
MNSLQEVKPTRGVYYLITLPELDQPVX

SEQ ID NO: 47736 - protein, 37 aa, Artificial Sequence; identical to SEQ ID NO: 13206
  Cyclic GFR-binding peptide
  MOD_RES (1)..(33)..(34): Xaa is C or S

SEQ ID NO: 47737 - protein, 36 aa, Artificial Sequence; identical to SEQ ID NO: 2647
  Cyclic GFR-binding peptide
  MOD_RES (2)..(4)..(35)..(36): Xaa is C or S

SEQ ID NO: 47738 - protein, 29 aa, Artificial Sequence
  Cyclic GFR-binding peptide
  MOD_RES (27)..(28): Xaa is C or S
DNSLQEVVNNASDYYVIPLPELRTPVXXT

SEQ ID NO: 47739 - protein, 23 aa, Artificial Sequence
  Cyclic GFR-binding peptide
NSLQEIVNSSDDYYVVPLPELKT

SEQ ID NO: 47740 - protein, 28 aa, Artificial Sequence
  Cyclic GFR-binding peptide
  MOD_RES (1)..(1): Xaa is C or S
XSRVVMNRYKKLIVNSSDDFYLVSIANL

SEQ ID NO: 47741 - protein, 26 aa, Artificial Sequence
  Cyclic GFR-binding peptide
  MOD_RES (26)..(26): Xaa is C or S
RYKKLVKPTRGVFYLISIANLDQPVX

SEQ ID NO: 47742 - protein, 29 aa, Artificial Sequence
  Cyclic GFR-binding peptide
  MOD_RES (26)..(27): Xaa is C or S
RYKKLVKPKRGVFYLISIANLAQPVXXPA

SEQ ID NO: 47743 - protein, 33 aa, Artificial Sequence; identical to SEQ ID NO: 13216
  Cyclic GFR-binding peptide
  MOD_RES (32)..(33): Xaa is C or S

SEQ ID NO: 47744 - protein, 38 aa, Artificial Sequence; identical to SEQ ID NO: 2655
  Cyclic GFR-binding peptide
  MOD_RES (1)..(33)..(34): Xaa is C or S

SEQ ID NO: 47745 - protein, 40 aa, Artificial Sequence; identical to SEQ ID NO: 13219
  Cyclic GFR-binding peptide
  MOD_RES (1)..(3)..(35)..(36): Xaa is C or S

SEQ ID NO: 47746 - protein, 31 aa, Artificial Sequence; identical to SEQ ID NO: 13224
  Cyclic GFR-binding peptide
  MOD_RES (31)..(31): Xaa is C or S

SEQ ID NO: 47747 - protein, 30 aa, Artificial Sequence; identical to SEQ ID NO: 13225
  Cyclic GFR-binding peptide
  MOD_RES (27)..(28): Xaa is C or S

SEQ ID NO: 47748 - protein, 27 aa, Artificial Sequence
  Cyclic GFR-binding peptide
IMEYQKYVKPKRGVIFLISIPSLAQPV

SEQ ID NO: 47749 - protein, 27 aa, Artificial Sequence
  Cyclic GFR-binding peptide
RVVMNNSLQEIVNSSDDYYLVTLPELK

SEQ ID NO: 47750 - protein, 30 aa, Artificial Sequence; identical to SEQ ID NO: 13231
  Cyclic GFR-binding peptide
  MOD_RES (2)..(2): Xaa is C or S

SEQ ID NO: 47751 - protein, 37 aa, Artificial Sequence; identical to SEQ ID NO: 13232
  Cyclic GFR-binding peptide
  MOD_RES (2)..(4)..(36)..(37): Xaa is C or S

SEQ ID NO: 47752 - protein, 30 aa, Artificial Sequence; identical to SEQ ID NO: 13234
  Cyclic GFR-binding peptide

SEQ ID NO: 47753 - protein, 31 aa, Artificial Sequence; identical to SEQ ID NO: 13236
  Cyclic GFR-binding peptide
  MOD_RES (1)..(3): Xaa is C or S

SEQ ID NO: 47754 - protein, 24 aa, Artificial Sequence
  Cyclic GFR-binding peptide
VVMDNSLQEVVNNASDYYVIPLPE

SEQ ID NO: 47755 - protein, 40 aa, Artificial Sequence; identical to SEQ ID NO: 13241
  Cyclic GFR-binding peptide
  MOD_RES (2)..(4)..(35)..(36): Xaa is C or S

SEQ ID NO: 47756 - protein, 28 aa, Artificial Sequence
  Cyclic GFR-binding peptide
  MOD_RES (28)..(28): Xaa is C or S
MNNSLQEIVNSSDDYYVVPLPELQTPAX

SEQ ID NO: 47757 - protein, 34 aa, Artificial Sequence; identical to SEQ ID NO: 13244
  Cyclic GFR-binding peptide
  MOD_RES (28)..(29): Xaa is C or S

SEQ ID NO: 47758 - protein, 33 aa, Artificial Sequence; identical to SEQ ID NO: 13245
  Cyclic GFR-binding peptide
  MOD_RES (1)..(3): Xaa is C or S

SEQ ID NO: 47759 - protein, 32 aa, Artificial Sequence; identical to SEQ ID NO: 2685
  Cyclic GFR-binding peptide
  MOD_RES (28)..(29): Xaa is C or S

SEQ ID NO: 47760 - protein, 26 aa, Artificial Sequence
  Cyclic GFR-binding peptide
DRYKKLVVKENEDFYLMSIANLETPV

SEQ ID NO: 47761 - protein, 30 aa, Artificial Sequence; identical to SEQ ID NO: 13252
  Cyclic GFR-binding peptide
  MOD_RES (26)..(27): Xaa is C or S

SEQ ID NO: 47762 - protein, 41 aa, Artificial Sequence; identical to SEQ ID NO: 2695
  Cyclic GFR-binding peptide
  MOD_RES (1)..(3)..(35)..(36): Xaa is C or S

SEQ ID NO: 47763 - protein, 28 aa, Artificial Sequence
  Cyclic GFR-binding peptide
  MOD_RES (1)..(1): Xaa is C or S
XSRVVMNNSLQEIVNSSDDYYVVPLPEL

SEQ ID NO: 47764 - protein, 32 aa, Artificial Sequence; identical to SEQ ID NO: 13256
  Cyclic GFR-binding peptide
  MOD_RES (1)..(1): Xaa is C or S

SEQ ID NO: 47765 - protein, 37 aa, Artificial Sequence; identical to SEQ ID NO: 2701
  Cyclic GFR-binding peptide
  MOD_RES (2)..(4)..(36): Xaa is C or S

SEQ ID NO: 47766 - protein, 36 aa, Artificial Sequence; identical to SEQ ID NO: 13258
  Cyclic GFR-binding peptide
  MOD_RES (31)..(32): Xaa is C or S

SEQ ID NO: 47767 - protein, 21 aa, Artificial Sequence
  Cyclic GFR-binding peptide
EYQKYVKPTRGVIFLISIPSL

SEQ ID NO: 47768 - protein, 32 aa, Artificial Sequence; identical to SEQ ID NO: 13260
  Cyclic GFR-binding peptide
  MOD_RES (31)..(32): Xaa is C or S

SEQ ID NO: 47769 - protein, 38 aa, Artificial Sequence; identical to SEQ ID NO: 13261
  Cyclic GFR-binding peptide
  MOD_RES (1)..(3)..(34)..(35): Xaa is C or S

SEQ ID NO: 47770 - protein, 24 aa, Artificial Sequence
  Cyclic GFR-binding peptide
MDRYKKLVVKENEDFYLMSIANLE

SEQ ID NO: 47771 - protein, 35 aa, Artificial Sequence; identical to SEQ ID NO: 13263
  Cyclic GFR-binding peptide
  MOD_RES (29)..(29): Xaa is C or S

SEQ ID NO: 47772 - protein, 34 aa, Artificial Sequence; identical to SEQ ID NO: 2709
  Cyclic GFR-binding peptide
  MOD_RES (1)..(32)..(33): Xaa is C or S

SEQ ID NO: 47773 - protein, 27 aa, Artificial Sequence
  Cyclic GFR-binding peptide
  MOD_RES (26)..(27): Xaa is C or S
NSLQEVVNNASDYYLITLPELRTPVXX

SEQ ID NO: 47774 - protein, 31 aa, Artificial Sequence; identical to SEQ ID NO: 13267
  Cyclic GFR-binding peptide
  MOD_RES (29)..(30): Xaa is C or S

SEQ ID NO: 47775 - protein, 28 aa, Artificial Sequence
  Cyclic GFR-binding peptide
  MOD_RES (2)..(2): Xaa is C or S
GXGEVVMERYKKLVVKDYEDFYLMSIAN

SEQ ID NO: 47776 - protein, 33 aa, Artificial Sequence; identical to SEQ ID NO: 13269
  Cyclic GFR-binding peptide
  MOD_RES (1)..(3): Xaa is C or S

SEQ ID NO: 47777 - protein, 26 aa, Artificial Sequence
  Cyclic GFR-binding peptide
VVMRYKKLVKPTRGVFYLISIANLDQ

SEQ ID NO: 47778 - protein, 34 aa, Artificial Sequence; identical to SEQ ID NO: 13271
  Cyclic GFR-binding peptide
  MOD_RES (32)..(33): Xaa is C or S

SEQ ID NO: 47779 - protein, 32 aa, Artificial Sequence; identical to SEQ ID NO: 13272
  Cyclic GFR-binding peptide
  MOD_RES (1)..(32): Xaa is C or S

SEQ ID NO: 47780 - protein, 25 aa, Artificial Sequence
  Cyclic GFR-binding peptide
RVIMRYKKLVKPKRGVFYLISIANL

SEQ ID NO: 47781 - protein, 37 aa, Artificial Sequence; identical to SEQ ID NO: 13275
  Cyclic GFR-binding peptide
  MOD_RES (2)..(34)..(35): Xaa is C or S

SEQ ID NO: 47782 - protein, 28 aa, Artificial Sequence
  Cyclic GFR-binding peptide
GEVVMEEYQKYVVKDYEDIFLMSIPSLE

SEQ ID NO: 47783 - protein, 34 aa, Artificial Sequence; identical to SEQ ID NO: 2727
  Cyclic GFR-binding peptide
  MOD_RES (2)..(34): Xaa is C or S

SEQ ID NO: 47784 - protein, 32 aa, Artificial Sequence; identical to SEQ ID NO: 13281
  Cyclic GFR-binding peptide
  MOD_RES (1)..(3): Xaa is C or S

SEQ ID NO: 47785 - protein, 37 aa, Artificial Sequence; identical to SEQ ID NO: 2734
  Cyclic GFR-binding peptide
  MOD_RES (31)..(32): Xaa is C or S

SEQ ID NO: 47786 - protein, 32 aa, Artificial Sequence; identical to SEQ ID NO: 13284
  Cyclic GFR-binding peptide
  MOD_RES (31)..(31): Xaa is C or S

SEQ ID NO: 47787 - protein, 29 aa, Artificial Sequence
  Cyclic GFR-binding peptide
VVMDRYKKLVVKENEDFYLMSIANLETPV

SEQ ID NO: 47788 - protein, 33 aa, Artificial Sequence; identical to SEQ ID NO: 13288
  Cyclic GFR-binding peptide
  MOD_RES (29)..(30): Xaa is C or S

SEQ ID NO: 47789 - protein, 30 aa, Artificial Sequence; identical to SEQ ID NO: 13289
  Cyclic GFR-binding peptide
  MOD_RES (1)..(1): Xaa is C or S

SEQ ID NO: 47790 - protein, 37 aa, Artificial Sequence; identical to SEQ ID NO: 13290
  Cyclic GFR-binding peptide
  MOD_RES (1)..(3)..(35): Xaa is C or S

SEQ ID NO: 47791 - protein, 32 aa, Artificial Sequence; identical to SEQ ID NO: 13291
  Cyclic GFR-binding peptide
  MOD_RES (2)..(2): Xaa is C or S

SEQ ID NO: 47792 - protein, 33 aa, Artificial Sequence; identical to SEQ ID NO: 2743
  Cyclic GFR-binding peptide
  MOD_RES (27)..(28): Xaa is C or S

SEQ ID NO: 47793 - protein, 26 aa, Artificial Sequence
  Cyclic GFR-binding peptide
ENSLQEVVKDYEDYYLMTLPELETPV

SEQ ID NO: 47794 - protein, 33 aa, Artificial Sequence; identical to SEQ ID NO: 2746
  Cyclic GFR-binding peptide
  MOD_RES (32)..(33): Xaa is C or S

SEQ ID NO: 47795 - protein, 32 aa, Artificial Sequence; identical to SEQ ID NO: 2749
  Cyclic GFR-binding peptide
  MOD_RES (30)..(31): Xaa is C or S

SEQ ID NO: 47796 - protein, 31 aa, Artificial Sequence; identical to SEQ ID NO: 13298
  Cyclic GFR-binding peptide
  MOD_RES (1)..(3): Xaa is C or S

SEQ ID NO: 47797 - protein, 28 aa, Artificial Sequence
  Cyclic GFR-binding peptide
  MOD_RES (1)..(1): Xaa is C or S
XGEVVMENSLQEVVKDYEDYYVMPLPEL

SEQ ID NO: 47798 - protein, 37 aa, Artificial Sequence; identical to SEQ ID NO: 13300
  Cyclic GFR-binding peptide
  MOD_RES (2)..(33)..(34): Xaa is C or S

SEQ ID NO: 47799 - protein, 25 aa, Artificial Sequence
  Cyclic GFR-binding peptide
VVMNSLQEVKPTRGVYYVIPLPELD

SEQ ID NO: 47800 - protein, 32 aa, Artificial Sequence; identical to SEQ ID NO: 13303
  Cyclic GFR-binding peptide
  MOD_RES (28)..(28): Xaa is C or S

SEQ ID NO: 47801 - protein, 26 aa, Artificial Sequence
  Cyclic GFR-binding peptide
ENSLQEVVKDYEDYYVMPLPELETPV

SEQ ID NO: 47802 - protein, 27 aa, Artificial Sequence
  Cyclic GFR-binding peptide
MDNSLQEVVNNASDYYLITLPELRTPV

SEQ ID NO: 47803 - protein, 37 aa, Artificial Sequence; identical to SEQ ID NO: 2755
  Cyclic GFR-binding peptide
  MOD_RES (2)..(4)..(36)..(37): Xaa is C or S

SEQ ID NO: 47804 - protein, 32 aa, Artificial Sequence; identical to SEQ ID NO: 2758
  Cyclic GFR-binding peptide
  MOD_RES (28)..(28): Xaa is C or S

SEQ ID NO: 47805 - protein, 26 aa, Artificial Sequence
  Cyclic GFR-binding peptide
GEVVMENSLQEVVKDYEDYYVMPLPE

SEQ ID NO: 47806 - protein, 36 aa, Artificial Sequence; identical to SEQ ID NO: 2764
  Cyclic GFR-binding peptide
  MOD_RES (31)..(32): Xaa is C or S

SEQ ID NO: 47807 - protein, 31 aa, Artificial Sequence; identical to SEQ ID NO: 13311
  Cyclic GFR-binding peptide
  MOD_RES (30)..(30): Xaa is C or S

SEQ ID NO: 47808 - protein, 39 aa, Artificial Sequence; identical to SEQ ID NO: 13312
  Cyclic GFR-binding peptide
  MOD_RES (2)..(4)..(35)..(36): Xaa is C or S

SEQ ID NO: 47809 - protein, 22 aa, Artificial Sequence
  Cyclic GFR-binding peptide
NNSLQEIVNSSDDYYLVTLPEL

SEQ ID NO: 47810 - protein, 40 aa, Artificial Sequence; identical to SEQ ID NO: 13314
  Cyclic GFR-binding peptide
  MOD_RES (1)..(3)..(35)..(36): Xaa is C or S

SEQ ID NO: 47811 - protein, 27 aa, Artificial Sequence
  Cyclic GFR-binding peptide
  MOD_RES (1)..(1): Xaa is C or S
XGEVVMDNSLQEVVKENEDYYLMTLPE

SEQ ID NO: 47812 - protein, 32 aa, Artificial Sequence; identical to SEQ ID NO: 13316
  Cyclic GFR-binding peptide
  MOD_RES (31)..(32): Xaa is C or S

SEQ ID NO: 47813 - protein, 32 aa, Artificial Sequence; identical to SEQ ID NO: 13318
  Cyclic GFR-binding peptide
  MOD_RES (27)..(28): Xaa is C or S

SEQ ID NO: 47814 - protein, 34 aa, Artificial Sequence; identical to SEQ ID NO: 13319
  Cyclic GFR-binding peptide
  MOD_RES (32)..(33): Xaa is C or S

SEQ ID NO: 47815 - protein, 25 aa, Artificial Sequence
  Cyclic GFR-binding peptide
VVMNNSLQEIVNSSDDYYVVPLPEL

SEQ ID NO: 47816 - protein, 40 aa, Artificial Sequence; identical to SEQ ID NO: 13321
  Cyclic GFR-binding peptide
  MOD_RES (2)..(34): Xaa is C or S

SEQ ID NO: 47817 - protein, 23 aa, Artificial Sequence
  Cyclic GFR-binding peptide
VMDNSLQEVVKENEDYYLMTLPE

SEQ ID NO: 47818 - protein, 32 aa, Artificial Sequence; identical to SEQ ID NO: 13323
  Cyclic GFR-binding peptide
  MOD_RES (28)..(29): Xaa is C or S

SEQ ID NO: 47819 - protein, 38 aa, Artificial Sequence; identical to SEQ ID NO: 13324
  Cyclic GFR-binding peptide
  MOD_RES (1)..(32)..(33): Xaa is C or S

SEQ ID NO: 47820 - protein, 27 aa, Artificial Sequence
  Cyclic GFR-binding peptide
KVVMEYQKYVKPTRGVIFLISIPSLDQ

SEQ ID NO: 47821 - protein, 41 aa, Artificial Sequence; identical to SEQ ID NO: 13326
  Cyclic GFR-binding peptide
  MOD_RES (1)..(3)..(35)..(36): Xaa is C or S

SEQ ID NO: 47822 - protein, 35 aa, Artificial Sequence; identical to SEQ ID NO: 13327
  Cyclic GFR-binding peptide
  MOD_RES (1)..(3)..(35): Xaa is C or S

SEQ ID NO: 47823 - protein, 27 aa, Artificial Sequence
  Cyclic GFR-binding peptide
  MOD_RES (27)..(27): Xaa is C or S
NEYQKYIVNSSDDIFLVSIPSLQTPAX

SEQ ID NO: 47824 - protein, 26 aa, Artificial Sequence
  Cyclic GFR-binding peptide
KVVMRYKKLVKPTRGVFYLISIANLD

SEQ ID NO: 47825 - protein, 31 aa, Artificial Sequence; identical to SEQ ID NO: 13330
  Cyclic GFR-binding peptide
  MOD_RES (28)..(29): Xaa is C or S

SEQ ID NO: 47826 - protein, 27 aa, Artificial Sequence
  Cyclic GFR-binding peptide
VMEEYQKYVVKDYEDIFLMSIPSLETP

SEQ ID NO: 47827 - protein, 34 aa, Artificial Sequence; identical to SEQ ID NO: 13332
  Cyclic GFR-binding peptide
  MOD_RES (2)..(4): Xaa is C or S

SEQ ID NO: 47828 - protein, 33 aa, Artificial Sequence; identical to SEQ ID NO: 13333
  Cyclic GFR-binding peptide
  MOD_RES (28)..(28): Xaa is C or S

SEQ ID NO: 47829 - protein, 29 aa, Artificial Sequence
  Cyclic GFR-binding peptide
  MOD_RES (28)..(29): Xaa is C or S
MNNSLQEIVNSSDDYYVVPLPELKTPAXX

SEQ ID NO: 47830 - protein, 28 aa, Artificial Sequence
  Cyclic GFR-binding peptide
  MOD_RES (27)..(28): Xaa is C or S
NNSLQEIVNSSDDYYLVTLPELQTPAXX

SEQ ID NO: 47831 - protein, 36 aa, Artificial Sequence; identical to SEQ ID NO: 13339
  Cyclic GFR-binding peptide
  MOD_RES (1)..(3)..(35)..(36): Xaa is C or S

SEQ ID NO: 47832 - protein, 36 aa, Artificial Sequence; identical to SEQ ID NO: 13341
  Cyclic GFR-binding peptide
  MOD_RES (2)..(34): Xaa is C or S

SEQ ID NO: 47833 - protein, 29 aa, Artificial Sequence
  Cyclic GFR-binding peptide
  MOD_RES (1)..(3): Xaa is C or S
XKXSKVVMNSLQEVKPTRGVYYLITLPEL

SEQ ID NO: 47834 - protein, 39 aa, Artificial Sequence; identical to SEQ ID NO: 13342
  Cyclic GFR-binding peptide
  MOD_RES (1)..(33)..(34): Xaa is C or S

SEQ ID NO: 47835 - protein, 32 aa, Artificial Sequence; identical to SEQ ID NO: 13343
  Cyclic GFR-binding peptide
  MOD_RES (2)..(2): Xaa is C or S

SEQ ID NO: 47836 - protein, 28 aa, Artificial Sequence
  Cyclic GFR-binding peptide
  MOD_RES (28)..(28): Xaa is C or S
MDEYQKYVVKENEDIFLMSIPSLETPVX

SEQ ID NO: 47837 - protein, 29 aa, Artificial Sequence
  Cyclic GFR-binding peptide
SRVVMNNSLQEIVNSSDDYYVVPLPELKT

SEQ ID NO: 47838 - protein, 37 aa, Artificial Sequence; identical to SEQ ID NO: 2798
  Cyclic GFR-binding peptide
  MOD_RES (1)..(3)..(35): Xaa is C or S

SEQ ID NO: 47839 - protein, 27 aa, Artificial Sequence
  Cyclic GFR-binding peptide
  MOD_RES (26)..(27): Xaa is C or S
EYQKYIVNSSDDIFLVSIPSLKTPAXX

SEQ ID NO: 47840 - protein, 29 aa, Artificial Sequence
  Cyclic GFR-binding peptide
VVMDNSLQEVVKENEDYYLMTLPELETPV

SEQ ID NO: 47841 - protein, 30 aa, Artificial Sequence; identical to SEQ ID NO: 2800
  Cyclic GFR-binding peptide
  MOD_RES (28)..(29): Xaa is C or S

SEQ ID NO: 47842 - protein, 39 aa, Artificial Sequence; identical to SEQ ID NO: 13351
  Cyclic GFR-binding peptide
  MOD_RES (1)..(3)..(35)..(36): Xaa is C or S

SEQ ID NO: 47843 - protein, 29 aa, Artificial Sequence
  Cyclic GFR-binding peptide
  MOD_RES (2)..(2): Xaa is C or S
KXSRVIMNSLQEVKPKRGVYYLITLPELA

SEQ ID NO: 47844 - protein, 33 aa, Artificial Sequence; identical to SEQ ID NO: 13353
  Cyclic GFR-binding peptide
  MOD_RES (1)..(3): Xaa is C or S

SEQ ID NO: 47845 - protein, 34 aa, Artificial Sequence; identical to SEQ ID NO: 2808
  Cyclic GFR-binding peptide
  MOD_RES (30)..(31): Xaa is C or S

SEQ ID NO: 47846 - protein, 35 aa, Artificial Sequence; identical to SEQ ID NO: 13356
  Cyclic GFR-binding peptide
  MOD_RES (1)..(3)..(35): Xaa is C or S

SEQ ID NO: 47847 - protein, 37 aa, Artificial Sequence; identical to SEQ ID NO: 13357
  Cyclic GFR-binding peptide
  MOD_RES (1)..(3)..(35): Xaa is C or S

SEQ ID NO: 47848 - protein, 26 aa, Artificial Sequence
  Cyclic GFR-binding peptide
VMNRYKKLIVNSSDDFYLVSIANLKT

SEQ ID NO: 47849 - protein, 26 aa, Artificial Sequence
  Cyclic GFR-binding peptide
VVMDNSLQEVVNNASDYYLITLPELR

SEQ ID NO: 47850 - protein, 29 aa, Artificial Sequence
  Cyclic GFR-binding peptide
  MOD_RES (26)..(27): Xaa is C or S
NSLQEVVKDYEDYYVMPLPELETPVXXAK

SEQ ID NO: 47851 - protein, 30 aa, Artificial Sequence; identical to SEQ ID NO: 13363
  Cyclic GFR-binding peptide
  MOD_RES (2)..(2): Xaa is C or S

SEQ ID NO: 47852 - protein, 24 aa, Artificial Sequence
  Cyclic GFR-binding peptide
IMEYQKYVKPKRGVIFLISIPSLA

SEQ ID NO: 47853 - protein, 29 aa, Artificial Sequence
  Cyclic GFR-binding peptide
EVVMEEYQKYVVKDYEDIFLMSIPSLETP

SEQ ID NO: 47854 - protein, 29 aa, Artificial Sequence
  Cyclic GFR-binding peptide
  MOD_RES (1)..(1): Xaa is C or S
XARVVMNNSLQEIVNSSDDYYVVPLPELQ

SEQ ID NO: 47855 - protein, 31 aa, Artificial Sequence; identical to SEQ ID NO: 13367
  Cyclic GFR-binding peptide
  MOD_RES (29)..(30): Xaa is C or S

SEQ ID NO: 47856 - protein, 32 aa, Artificial Sequence; identical to SEQ ID NO: 13369
  Cyclic GFR-binding peptide
  MOD_RES (28)..(29): Xaa is C or S

SEQ ID NO: 47857 - protein, 35 aa, Artificial Sequence; identical to SEQ ID NO: 13370
  Cyclic GFR-binding peptide
  MOD_RES (29)..(30): Xaa is C or S

SEQ ID NO: 47858 - protein, 33 aa, Artificial Sequence; identical to SEQ ID NO: 13371
  Cyclic GFR-binding peptide
  MOD_RES (1)..(3): Xaa is C or S

SEQ ID NO: 47859 - protein, 24 aa, Artificial Sequence
  Cyclic GFR-binding peptide
VMDNSLQEVVNNASDYYLITLPEL

SEQ ID NO: 47860 - protein, 23 aa, Artificial Sequence
  Cyclic GFR-binding peptide
MNSLQEVKPTRGVYYVIPLPELD

SEQ ID NO: 47861 - protein, 31 aa, Artificial Sequence; identical to SEQ ID NO: 13374
  Cyclic GFR-binding peptide
  MOD_RES (27)..(28): Xaa is C or S

SEQ ID NO: 47862 - protein, 39 aa, Artificial Sequence; identical to SEQ ID NO: 2828
  Cyclic GFR-binding peptide
  MOD_RES (1)..(3)..(34)..(35): Xaa is C or S

SEQ ID NO: 47863 - protein, 36 aa, Artificial Sequence; identical to SEQ ID NO: 13377
  Cyclic GFR-binding peptide
  MOD_RES (2)..(4)..(36): Xaa is C or S

SEQ ID NO: 47864 - protein, 32 aa, Artificial Sequence; identical to SEQ ID NO: 13378
  Cyclic GFR-binding peptide
  MOD_RES (29)..(30): Xaa is C or S

SEQ ID NO: 47865 - protein, 22 aa, Artificial Sequence
  Cyclic GFR-binding peptide
RYKKLVKPKRGVFYLISIANLA

SEQ ID NO: 47866 - protein, 28 aa, Artificial Sequence
  Cyclic GFR-binding peptide
  MOD_RES (26)..(27): Xaa is C or S
NSLQEIKPTKGIYYVIPLPELDQSVXXP

SEQ ID NO: 47867 - protein, 38 aa, Artificial Sequence; identical to SEQ ID NO: 13382
  Cyclic GFR-binding peptide
  MOD_RES (1)..(3)..(35)..(36): Xaa is C or S

SEQ ID NO: 47868 - protein, 37 aa, Artificial Sequence
  Cyclic GFR-binding peptide
  MOD_RES (31)..(32): Xaa is C or S
SKVVMNSLQEVKPTRGVYYLITLPELDQPVXXPSASA

SEQ ID NO: 47869 - protein, 37 aa, Artificial Sequence; identical to SEQ ID NO: 2837
  Cyclic GFR-binding peptide
  MOD_RES (31)..(32): Xaa is C or S

SEQ ID NO: 47870 - protein, 33 aa, Artificial Sequence
  Cyclic GFR-binding peptide
  MOD_RES (30)..(31): Xaa is C or S
KVVMNSLQEVKPTRGVYYLITLPELDQPVXXPS

SEQ ID NO: 47871 - protein, 29 aa, Artificial Sequence
  Cyclic GFR-binding peptide
VVMNEYQKYIVNSSDDIFLVSIPSLQTPA

SEQ ID NO: 47872 - protein, 32 aa, Artificial Sequence; identical to SEQ ID NO: 13392
  Cyclic GFR-binding peptide
  MOD_RES (31)..(32): Xaa is C or S

SEQ ID NO: 47873 - protein, 26 aa, Artificial Sequence
  Cyclic GFR-binding peptide
NNSLQEIVNSSDDYYLVTLPELQTPA

SEQ ID NO: 47874 - protein, 32 aa, Artificial Sequence; identical to SEQ ID NO: 13395
  Cyclic GFR-binding peptide
  MOD_RES (1)..(3): Xaa is C or S

SEQ ID NO: 47875 - protein, 26 aa, Artificial Sequence
  Cyclic GFR-binding peptide
NEYQKYIVNSSDDIFLVSIPSLQTPA

SEQ ID NO: 47876 - protein, 29 aa, Artificial Sequence
  Cyclic GFR-binding peptide
  MOD_RES (27)..(28): Xaa is C or S
DNSLQEVVNNASDYYLITLPELRTPVXXT

SEQ ID NO: 47877 - protein, 26 aa, Artificial Sequence
  Cyclic GFR-binding peptide
GEVVMEEYQKYVVKDYEDIFLMSIPS

SEQ ID NO: 47878 - protein, 36 aa, Artificial Sequence; identical to SEQ ID NO: 13403
  Cyclic GFR-binding peptide
  MOD_RES (2)..(34)..(35): Xaa is C or S

SEQ ID NO: 47879 - protein, 30 aa, Artificial Sequence; identical to SEQ ID NO: 13404
  Cyclic GFR-binding peptide
  MOD_RES (26)..(27): Xaa is C or S

SEQ ID NO: 47880 - protein, 27 aa, Artificial Sequence
  Cyclic GFR-binding peptide
VVMENSLQEVVKDYEDYYVMPLPELET

SEQ ID NO: 47881 - protein, 31 aa, Artificial Sequence; identical to SEQ ID NO: 13406
  Cyclic GFR-binding peptide
  MOD_RES (30)..(31): Xaa is C or S

SEQ ID NO: 47882 - protein, 38 aa, Artificial Sequence; identical to SEQ ID NO: 13407
  Cyclic GFR-binding peptide
  MOD_RES (1)..(32)..(33): Xaa is C or S

SEQ ID NO: 47883 - protein, 35 aa, Artificial Sequence; identical to SEQ ID NO: 13409
  Cyclic GFR-binding peptide
  MOD_RES (2)..(4): Xaa is C or S

SEQ ID NO: 47884 - protein, 40 aa, Artificial Sequence; identical to SEQ ID NO: 13410
  Cyclic GFR-binding peptide
  MOD_RES (1)..(3)..(35)..(36): Xaa is C or S

SEQ ID NO: 47885 - protein, 31 aa, Artificial Sequence; identical to SEQ ID NO: 13412
  Cyclic GFR-binding peptide
  MOD_RES (29)..(30): Xaa is C or S

SEQ ID NO: 47886 - protein, 31 aa, Artificial Sequence; identical to SEQ ID NO: 13413
  Cyclic GFR-binding peptide
  MOD_RES (28)..(29): Xaa is C or S

SEQ ID NO: 47887 - protein, 31 aa, Artificial Sequence; identical to SEQ ID NO: 13415
  Cyclic GFR-binding peptide
  MOD_RES (26)..(27): Xaa is C or S

SEQ ID NO: 47888 - protein, 28 aa, Artificial Sequence
  Cyclic GFR-binding peptide
EVVMDRYKKLVVNNASDFYLISIANLRT

SEQ ID NO: 47889 - protein, 28 aa, Artificial Sequence
  Cyclic GFR-binding peptide
KVIMNSLQEIKPTKGIYYVIPLPELDQS

SEQ ID NO: 47890 - protein, 34 aa, Artificial Sequence; identical to SEQ ID NO: 2879
  Cyclic GFR-binding peptide
  MOD_RES (28)..(29): Xaa is C or S

SEQ ID NO: 47891 - protein, 33 aa, Artificial Sequence; identical to SEQ ID NO: 13419
  Cyclic GFR-binding peptide
  MOD_RES (27)..(28): Xaa is C or S

SEQ ID NO: 47892 - protein, 23 aa, Artificial Sequence
  Cyclic GFR-binding peptide
VMNRYKKLIVNSSDDFYLVSIAN

SEQ ID NO: 47893 - protein, 30 aa, Artificial Sequence; identical to SEQ ID NO: 2882
  Cyclic GFR-binding peptide
  MOD_RES (27)..(28): Xaa is C or S

SEQ ID NO: 47894 - protein, 29 aa, Artificial Sequence
  Cyclic GFR-binding peptide
GEVVMDEYQKYVVKENEDIFLMSIPSLET

SEQ ID NO: 47895 - protein, 33 aa, Artificial Sequence; identical to SEQ ID NO: 13423
  Cyclic GFR-binding peptide
  MOD_RES (1)..(32)..(33): Xaa is C or S

SEQ ID NO: 47896 - protein, 25 aa, Artificial Sequence
  Cyclic GFR-binding peptide
EYQKYVVKENEDIFLMSIPSLETPV

SEQ ID NO: 47897 - protein, 26 aa, Artificial Sequence
  Cyclic GFR-binding peptide
  MOD_RES (26)..(26): Xaa is C or S
NSLQEVVKENEDYYVMPLPELETPVX

SEQ ID NO: 47898 - protein, 30 aa, Artificial Sequence; identical to SEQ ID NO: 13426
  Cyclic GFR-binding peptide
  MOD_RES (1)..(1): Xaa is C or S

SEQ ID NO: 47899 - protein, 34 aa, Artificial Sequence; identical to SEQ ID NO: 13427
  Cyclic GFR-binding peptide
  MOD_RES (28)..(29): Xaa is C or S

SEQ ID NO: 47900 - protein, 27 aa, Artificial Sequence
  Cyclic GFR-binding peptide
VIMEYQKYIKPTKGIIFLISIPSLDQS

SEQ ID NO: 47901 - protein, 35 aa, Artificial Sequence
  Cyclic GFR-binding peptide
  MOD_RES (1)..(32)..(33): Xaa is C or S
XSKVVMNSLQEVKPTRGVYYLITLPELDQPVXXPS

SEQ ID NO: 47902 - protein, 26 aa, Artificial Sequence
  Cyclic GFR-binding peptide
SRVVMNRYKKLIVNSSDDFYLVSIAN

SEQ ID NO: 47903 - protein, 30 aa, Artificial Sequence; identical to SEQ ID NO: 2892
  Cyclic GFR-binding peptide
  MOD_RES (29)..(29): Xaa is C or S

SEQ ID NO: 47904 - protein, 25 aa, Artificial Sequence
  Cyclic GFR-binding peptide
MRYKKLIKPTKGIFYLISIANLDQS

SEQ ID NO: 47905 - protein, 28 aa, Artificial Sequence
  Cyclic GFR-binding peptide
  MOD_RES (28)..(28): Xaa is C or S
MENSLQEVVKDYEDYYVMPLPELETPVX

SEQ ID NO: 47906 - protein, 26 aa, Artificial Sequence
  Cyclic GFR-binding peptide
VMENSLQEVVKDYEDYYLMTLPELET

SEQ ID NO: 47907 - protein, 32 aa, Artificial Sequence; identical to SEQ ID NO: 13439
  Cyclic GFR-binding peptide
  MOD_RES (29)..(30): Xaa is C or S

SEQ ID NO: 47908 - protein, 33 aa, Artificial Sequence; identical to SEQ ID NO: 2902
  Cyclic GFR-binding peptide
  MOD_RES (29)..(29): Xaa is C or S

SEQ ID NO: 47909 - protein, 29 aa, Artificial Sequence
  Cyclic GFR-binding peptide
  MOD_RES (1)..(3): Xaa is C or S
XKXSKVIMNSLQEIKPTKGIYYVIPLPEL

SEQ ID NO: 47910 - protein, 36 aa, Artificial Sequence; identical to SEQ ID NO: 13443
  Cyclic GFR-binding peptide
  MOD_RES (31)..(32): Xaa is C or S

SEQ ID NO: 47911 - protein, 35 aa, Artificial Sequence; identical to SEQ ID NO: 13444
  Cyclic GFR-binding peptide
  MOD_RES (30)..(31): Xaa is C or S

SEQ ID NO: 47912 - protein, 22 aa, Artificial Sequence
  Cyclic GFR-binding peptide
MDNSLQEVVNNASDYYVIPLPE

SEQ ID NO: 47913 - protein, 30 aa, Artificial Sequence; identical to SEQ ID NO: 13448
  Cyclic GFR-binding peptide
  MOD_RES (30)..(30): Xaa is C or S

SEQ ID NO: 47914 - protein, 34 aa, Artificial Sequence; identical to SEQ ID NO: 13449
  Cyclic GFR-binding peptide
  MOD_RES (28)..(28): Xaa is C or S

SEQ ID NO: 47915 - protein, 26 aa, Artificial Sequence
  Cyclic GFR-binding peptide
  MOD_RES (26)..(26): Xaa is C or S
NSLQEVVNNASDYYLITLPELRTPVX

SEQ ID NO: 47916 - protein, 24 aa, Artificial Sequence
  Cyclic GFR-binding peptide
MRYKKLVKPTRGVFYLISIANLDQ

SEQ ID NO: 47917 - protein, 32 aa, Artificial Sequence; identical to SEQ ID NO: 13453
  Cyclic GFR-binding peptide
  MOD_RES (31)..(32): Xaa is C or S

SEQ ID NO: 47918 - protein, 26 aa, Artificial Sequence
  Cyclic GFR-binding peptide
VVMDNSLQEVVKENEDYYLMTLPELE

SEQ ID NO: 47919 - protein, 29 aa, Artificial Sequence
  Cyclic GFR-binding peptide
  MOD_RES (27)..(28): Xaa is C or S
DRYKKLVVKENEDFYLMSIANLETPVXXA

SEQ ID NO: 47920 - protein, 30 aa, Artificial Sequence; identical to SEQ ID NO: 2918
  Cyclic GFR-binding peptide
  MOD_RES (1)..(3): Xaa is C or S

SEQ ID NO: 47921 - protein, 30 aa, Artificial Sequence; identical to SEQ ID NO: 13457
  Cyclic GFR-binding peptide
  MOD_RES (1)..(1): Xaa is C or S

SEQ ID NO: 47922 - protein, 35 aa, Artificial Sequence
  Cyclic GFR-binding peptide
  MOD_RES (30)..(31): Xaa is C or S
KVVMNSLQEVKPTRGVYYLITLPELDQPVXXPSAS

SEQ ID NO: 47923 - protein, 27 aa, Artificial Sequence
  Cyclic GFR-binding peptide
IMNSLQEIKPTKGIYYLITLPELDQSV

SEQ ID NO: 47924 - protein, 32 aa, Artificial Sequence; identical to SEQ ID NO: 13461
  Cyclic GFR-binding peptide
  MOD_RES (27)..(28): Xaa is C or S

SEQ ID NO: 47925 - protein, 35 aa, Artificial Sequence; identical to SEQ ID NO: 2922
  Cyclic GFR-binding peptide
  MOD_RES (2)..(33)..(34): Xaa is C or S

SEQ ID NO: 47926 - protein, 29 aa, Artificial Sequence
  Cyclic GFR-binding peptide
  MOD_RES (1)..(1): Xaa is C or S
XGEVVMEEYQKYVVKDYEDIFLMSIPSLE

SEQ ID NO: 47927 - protein, 36 aa, Artificial Sequence; identical to SEQ ID NO: 2925
  Cyclic GFR-binding peptide
  MOD_RES (2)..(4)..(36): Xaa is C or S

SEQ ID NO: 47928 - protein, 33 aa, Artificial Sequence; identical to SEQ ID NO: 13465
  Cyclic GFR-binding peptide
  MOD_RES (30)..(30): Xaa is C or S

SEQ ID NO: 47929 - protein, 35 aa, Artificial Sequence; identical to SEQ ID NO: 2927
  Cyclic GFR-binding peptide
  MOD_RES (31)..(32): Xaa is C or S

SEQ ID NO: 47930 - protein, 25 aa, Artificial Sequence
  Cyclic GFR-binding peptide
MNRYKKLIVNSSDDFYLVSIANLKT

SEQ ID NO: 47931 - protein, 32 aa, Artificial Sequence; identical to SEQ ID NO: 13468
  Cyclic GFR-binding peptide
  MOD_RES (29)..(30): Xaa is C or S

SEQ ID NO: 47932 - protein, 28 aa, Artificial Sequence
  Cyclic GFR-binding peptide
  MOD_RES (1)..(1): Xaa is C or S
XGEVVMDEYQKYVVKENEDIFLMSIPSL

SEQ ID NO: 47933 - protein, 37 aa, Artificial Sequence; identical to SEQ ID NO: 13471
  Cyclic GFR-binding peptide
  MOD_RES (2)..(34)..(35): Xaa is C or S

SEQ ID NO: 47934 - protein, 30 aa, Artificial Sequence; identical to SEQ ID NO: 2934
  Cyclic GFR-binding peptide
  MOD_RES (1)..(3): Xaa is C or S

SEQ ID NO: 47935 - protein, 20 aa, Artificial Sequence
  Cyclic GFR-binding peptide
NSLQEVKPTRGVYYVIPLPE

SEQ ID NO: 47936 - protein, 30 aa, Artificial Sequence; identical to SEQ ID NO: 13475
  Cyclic GFR-binding peptide
  MOD_RES (28)..(29): Xaa is C or S

SEQ ID NO: 47937 - protein, 40 aa, Artificial Sequence; identical to SEQ ID NO: 13477
  Cyclic GFR-binding peptide
  MOD_RES (2)..(34)..(35): Xaa is C or S

SEQ ID NO: 47938 - protein, 29 aa, Artificial Sequence
  Cyclic GFR-binding peptide
SRVIMEYQKYVKPKRGVIFLISIPSLAQP

SEQ ID NO: 47939 - protein, 27 aa, Artificial Sequence
  Cyclic GFR-binding peptide
RVIMRYKKLVKPKRGVFYLISIANLAQ

SEQ ID NO: 47940 - protein, 22 aa, Artificial Sequence
  Cyclic GFR-binding peptide
NEYQKYIVNSSDDIFLVSIPSL

SEQ ID NO: 47941 - protein, 21 aa, Artificial Sequence
  Cyclic GFR-binding peptide
MNSLQEVKPTRGVYYVIPLPE

SEQ ID NO: 47942 - protein, 32 aa, Artificial Sequence; identical to SEQ ID NO: 2942
  Cyclic GFR-binding peptide
  MOD_RES (1)..(1): Xaa is C or S

SEQ ID NO: 47943 - protein, 36 aa, Artificial Sequence; identical to SEQ ID NO: 13484
  Cyclic GFR-binding peptide
  MOD_RES (1)..(32)..(33): Xaa is C or S

SEQ ID NO: 47944 - protein, 24 aa, Artificial Sequence
  Cyclic GFR-binding peptide
NSLQEVKPKRGVYYLITLPELAQP

SEQ ID NO: 47945 - protein, 33 aa, Artificial Sequence; identical to SEQ ID NO: 13487
  Cyclic GFR-binding peptide
  MOD_RES (27)..(28): Xaa is C or S

SEQ ID NO: 47946 - protein, 33 aa, Artificial Sequence; identical to SEQ ID NO: 13488
  Cyclic GFR-binding peptide
  MOD_RES (32)..(33): Xaa is C or S

SEQ ID NO: 47947 - protein, 33 aa, Artificial Sequence; identical to SEQ ID NO: 13489
  Cyclic GFR-binding peptide
  MOD_RES (32)..(33): Xaa is C or S

SEQ ID NO: 47948 - protein, 32 aa, Artificial Sequence; identical to SEQ ID NO: 13490
  Cyclic GFR-binding peptide
  MOD_RES (31)..(32): Xaa is C or S

SEQ ID NO: 47949 - protein, 31 aa, Artificial Sequence; identical to SEQ ID NO: 2948
  Cyclic GFR-binding peptide
  MOD_RES (28)..(29): Xaa is C or S

SEQ ID NO: 47950 - protein, 35 aa, Artificial Sequence; identical to SEQ ID NO: 2949
  Cyclic GFR-binding peptide
  MOD_RES (30)..(31): Xaa is C or S

SEQ ID NO: 47951 - protein, 31 aa, Artificial Sequence; identical to SEQ ID NO: 13493
  Cyclic GFR-binding peptide
  MOD_RES (2)..(2): Xaa is C or S

SEQ ID NO: 47952 - protein, 28 aa, Artificial Sequence
  Cyclic GFR-binding peptide
  MOD_RES (2)..(2): Xaa is C or S
GXSRVVMNRYKKLIVNSSDDFYLVSIAN

SEQ ID NO: 47953 - protein, 22 aa, Artificial Sequence
  Cyclic GFR-binding peptide
NSLQEVKPKRGVYYLITLPELA

SEQ ID NO: 47954 - protein, 29 aa, Artificial Sequence
  Cyclic GFR-binding peptide
EVVMDNSLQEVVKENEDYYVMPLPELETP

SEQ ID NO: 47955 - protein, 25 aa, Artificial Sequence
  Cyclic GFR-binding peptide
MRYKKLVKPTRGVFYLISIANLDQP

SEQ ID NO: 47956 - protein, 28 aa, Artificial Sequence
  Cyclic GFR-binding peptide
  MOD_RES (28)..(28): Xaa is C or S
VMEYQKYVKPTRGVIFLISIPSLDQPVX

SEQ ID NO: 47957 - protein, 31 aa, Artificial Sequence; identical to SEQ ID NO: 13499
  Cyclic GFR-binding peptide
  MOD_RES (27)..(28): Xaa is C or S

SEQ ID NO: 47958 - protein, 26 aa, Artificial Sequence
  Cyclic GFR-binding peptide
KVIMNSLQEIKPTKGIYYLITLPELD

SEQ ID NO: 47959 - protein, 31 aa, Artificial Sequence; identical to SEQ ID NO: 13501
  Cyclic GFR-binding peptide
  MOD_RES (27)..(28): Xaa is C or S

SEQ ID NO: 47960 - protein, 29 aa, Artificial Sequence
  Cyclic GFR-binding peptide
  MOD_RES (1)..(1): Xaa is C or S
XSKVIMRYKKLIKPTKGIFYLISIANLDQ

SEQ ID NO: 47961 - protein, 37 aa, Artificial Sequence; identical to SEQ ID NO: 13503
  Cyclic GFR-binding peptide
  MOD_RES (32)..(33): Xaa is C or S

SEQ ID NO: 47962 - protein, 34 aa, Artificial Sequence; identical to SEQ ID NO: 2957
  Cyclic GFR-binding peptide
  MOD_RES (2)..(4): Xaa is C or S

SEQ ID NO: 47963 - protein, 31 aa, Artificial Sequence; identical to SEQ ID NO: 2958
  Cyclic GFR-binding peptide
  MOD_RES (2)..(4): Xaa is C or S

SEQ ID NO: 47964 - protein, 39 aa, Artificial Sequence; identical to SEQ ID NO: 13507
  Cyclic GFR-binding peptide
  MOD_RES (1)..(3)..(35)..(36): Xaa is C or S

SEQ ID NO: 47965 - protein, 32 aa, Artificial Sequence; identical to SEQ ID NO: 13508
  Cyclic GFR-binding peptide
  MOD_RES (30)..(31): Xaa is C or S

SEQ ID NO: 47966 - protein, 33 aa, Artificial Sequence; identical to SEQ ID NO: 13510
  Cyclic GFR-binding peptide
  MOD_RES (2)..(2): Xaa is C or S

SEQ ID NO: 47967 - protein, 35 aa, Artificial Sequence; identical to SEQ ID NO: 13511
  Cyclic GFR-binding peptide
  MOD_RES (29)..(30): Xaa is C or S

SEQ ID NO: 47968 - protein, 25 aa, Artificial Sequence
  Cyclic GFR-binding peptide
KVIMNSLQEIKPTKGIYYVIPLPEL

SEQ ID NO: 47969 - protein, 39 aa, Artificial Sequence
  Cyclic GFR-binding peptide
  MOD_RES (2)..(33)..(34): Xaa is C or S
KXSKVVMNSLQEVKPTRGVYYLITLPELDQPVXXPSASA

SEQ ID NO: 47970 - protein, 29 aa, Artificial Sequence
  Cyclic GFR-binding peptide
EVVMDNSLQEVVNNASDYYLITLPELRTP

SEQ ID NO: 47971 - protein, 22 aa, Artificial Sequence
  Cyclic GFR-binding peptide
MEYQKYIKPTKGIIFLISIPSL

SEQ ID NO: 47972 - protein, 31 aa, Artificial Sequence; identical to SEQ ID NO: 13517
  Cyclic GFR-binding peptide
  MOD_RES (1)..(1): Xaa is C or S

SEQ ID NO: 47973 - protein, 34 aa, Artificial Sequence; identical to SEQ ID NO: 13518
  Cyclic GFR-binding peptide
  MOD_RES (2)..(4): Xaa is C or S

SEQ ID NO: 47974 - protein, 34 aa, Artificial Sequence; identical to SEQ ID NO: 13521
  Cyclic GFR-binding peptide
  MOD_RES (31)..(32): Xaa is C or S

SEQ ID NO: 47975 - protein, 25 aa, Artificial Sequence
  Cyclic GFR-binding peptide
VMDNSLQEVVKENEDYYLMTLPELE

SEQ ID NO: 47976 - protein, 39 aa, Artificial Sequence; identical to SEQ ID NO: 13524
  Cyclic GFR-binding peptide
  MOD_RES (2)..(4)..(36)..(37): Xaa is C or S

SEQ ID NO: 47977 - protein, 34 aa, Artificial Sequence; identical to SEQ ID NO: 2977
  Cyclic GFR-binding peptide
  MOD_RES (2)..(33)..(34): Xaa is C or S

SEQ ID NO: 47978 - protein, 34 aa, Artificial Sequence; identical to SEQ ID NO: 13526
  Cyclic GFR-binding peptide
  MOD_RES (29)..(30): Xaa is C or S

SEQ ID NO: 47979 - protein, 23 aa, Artificial Sequence
  Cyclic GFR-binding peptide
NSLQEVVNNASDYYLITLPELRT

SEQ ID NO: 47980 - protein, 32 aa, Artificial Sequence; identical to SEQ ID NO: 13528
  Cyclic GFR-binding peptide
  MOD_RES (27)..(28): Xaa is C or S

SEQ ID NO: 47981 - protein, 38 aa, Artificial Sequence; identical to SEQ ID NO: 13529
  Cyclic GFR-binding peptide
  MOD_RES (2)..(33)..(34): Xaa is C or S

SEQ ID NO: 47982 - protein, 38 aa, Artificial Sequence; identical to SEQ ID NO: 13530
  Cyclic GFR-binding peptide
  MOD_RES (1)..(3)..(35)..(36): Xaa is C or S

SEQ ID NO: 47983 - protein, 31 aa, Artificial Sequence; identical to SEQ ID NO: 13531
  Cyclic GFR-binding peptide
  MOD_RES (1)..(1): Xaa is C or S

SEQ ID NO: 47984 - protein, 23 aa, Artificial Sequence
  Cyclic GFR-binding peptide
VVMEYQKYVKPTRGVIFLISIPS

SEQ ID NO: 47985 - protein, 34 aa, Artificial Sequence; identical to SEQ ID NO: 2983
  Cyclic GFR-binding peptide
  MOD_RES (29)..(30): Xaa is C or S

SEQ ID NO: 47986 - protein, 35 aa, Artificial Sequence; identical to SEQ ID NO: 13536
  Cyclic GFR-binding peptide
  MOD_RES (32)..(33): Xaa is C or S

SEQ ID NO: 47987 - protein, 25 aa, Artificial Sequence
  Cyclic GFR-binding peptide
DEYQKYVVKENEDIFLMSIPSLETP

SEQ ID NO: 47988 - protein, 35 aa, Artificial Sequence; identical to SEQ ID NO: 13538
  Cyclic GFR-binding peptide
  MOD_RES (2)..(34)..(35): Xaa is C or S

SEQ ID NO: 47989 - protein, 35 aa, Artificial Sequence; identical to SEQ ID NO: 13540
  Cyclic GFR-binding peptide
  MOD_RES (31)..(32): Xaa is C or S

SEQ ID NO: 47990 - protein, 34 aa, Artificial Sequence; identical to SEQ ID NO: 13542
  Cyclic GFR-binding peptide
  MOD_RES (29)..(29): Xaa is C or S

SEQ ID NO: 47991 - protein, 37 aa, Artificial Sequence; identical to SEQ ID NO: 13543
  Cyclic GFR-binding peptide
  MOD_RES (1)..(3)..(34)..(35): Xaa is C or S

SEQ ID NO: 47992 - protein, 36 aa, Artificial Sequence; identical to SEQ ID NO: 13544
  Cyclic GFR-binding peptide
  MOD_RES (30)..(31): Xaa is C or S

SEQ ID NO: 47993 - protein, 26 aa, Artificial Sequence
  Cyclic GFR-binding peptide
  MOD_RES (1)..(1): Xaa is C or S
XSKVIMEYQKYIKPTKGIIFLISIPS

SEQ ID NO: 47994 - protein, 36 aa, Artificial Sequence; identical to SEQ ID NO: 2998
  Cyclic GFR-binding peptide
  MOD_RES (1)..(3)..(34)..(35): Xaa is C or S

SEQ ID NO: 47995 - protein, 37 aa, Artificial Sequence
  Cyclic GFR-binding peptide
  MOD_RES (2)..(4)..(35)..(36): Xaa is C or S
SXKXSKVVMNSLQEVKPTRGVYYLITLPELDQPVXXP

SEQ ID NO: 47996 - protein, 35 aa, Artificial Sequence; identical to SEQ ID NO: 3001
  Cyclic GFR-binding peptide
  MOD_RES (29)..(29): Xaa is C or S

SEQ ID NO: 47997 - protein, 24 aa, Artificial Sequence
  Cyclic GFR-binding peptide
VMDNSLQEVVKENEDYYLMTLPEL

SEQ ID NO: 47998 - protein, 34 aa, Artificial Sequence; identical to SEQ ID NO: 13551
  Cyclic GFR-binding peptide
  MOD_RES (1)..(3): Xaa is C or S

SEQ ID NO: 47999 - protein, 30 aa, Artificial Sequence; identical to SEQ ID NO: 13552
  Cyclic GFR-binding peptide
  MOD_RES (27)..(28): Xaa is C or S

SEQ ID NO: 48000 - protein, 28 aa, Artificial Sequence
  Cyclic GFR-binding peptide
  MOD_RES (28)..(28): Xaa is C or S
MDRYKKLVVNNASDFYLISIANLRTPVX

SEQ ID NO: 48001 - protein, 35 aa, Artificial Sequence; identical to SEQ ID NO: 3007
  Cyclic GFR-binding peptide
  MOD_RES (1)..(33): Xaa is C or S

SEQ ID NO: 48002 - protein, 36 aa, Artificial Sequence; identical to SEQ ID NO: 3008
  Cyclic GFR-binding peptide
  MOD_RES (30)..(31): Xaa is C or S

SEQ ID NO: 48003 - protein, 29 aa, Artificial Sequence
  Cyclic GFR-binding peptide
  MOD_RES (28)..(29): Xaa is C or S
MDNSLQEVVKENEDYYLMTLPELETPVXX

SEQ ID NO: 48004 - protein, 27 aa, Artificial Sequence
  Cyclic GFR-binding peptide
  MOD_RES (2)..(2): Xaa is C or S
KXSKVVMEYQKYVKPTRGVIFLISIPS

SEQ ID NO: 48005 - protein, 21 aa, Artificial Sequence
  Cyclic GFR-binding peptide
EYQKYVVKENEDIFLMSIPSL

SEQ ID NO: 48006 - protein, 32 aa, Artificial Sequence; identical to SEQ ID NO: 3017
  Cyclic GFR-binding peptide
  MOD_RES (26)..(27): Xaa is C or S

SEQ ID NO: 48007 - protein, 36 aa, Artificial Sequence; identical to SEQ ID NO: 13563
  Cyclic GFR-binding peptide
  MOD_RES (1)..(3)..(34)..(35): Xaa is C or S

SEQ ID NO: 48008 - protein, 34 aa, Artificial Sequence; identical to SEQ ID NO: 13565
  Cyclic GFR-binding peptide
  MOD_RES (29)..(30): Xaa is C or S

SEQ ID NO: 48009 - protein, 25 aa, Artificial Sequence
  Cyclic GFR-binding peptide
RYKKLVKPKRGVFYLISIANLAQPV

SEQ ID NO: 48010 - protein, 31 aa, Artificial Sequence; identical to SEQ ID NO: 13567
  Cyclic GFR-binding peptide
  MOD_RES (28)..(28): Xaa is C or S

SEQ ID NO: 48011 - protein, 29 aa, Artificial Sequence
  Cyclic GFR-binding peptide
  MOD_RES (1)..(1): Xaa is C or S
XSKVIMEYQKYIKPTKGIIFLISIPSLDQ

SEQ ID NO: 48012 - protein, 26 aa, Artificial Sequence
  Cyclic GFR-binding peptide
GEVVMERYKKLVVKDYEDFYLMSIAN

SEQ ID NO: 48013 - protein, 23 aa, Artificial Sequence
  Cyclic GFR-binding peptide
NSLQEIVNSSDDYYLVTLPELQT

SEQ ID NO: 48014 - protein, 40 aa, Artificial Sequence; identical to SEQ ID NO: 13571
  Cyclic GFR-binding peptide
  MOD_RES (2)..(4)..(36): Xaa is C or S

SEQ ID NO: 48015 - protein, 29 aa, Artificial Sequence
  Cyclic GFR-binding peptide
  MOD_RES (1)..(3): Xaa is C or S
XGXSEVVMDNSLQEVVNNASDYYVIPLPE

SEQ ID NO: 48016 - protein, 25 aa, Artificial Sequence
  Cyclic GFR-binding peptide
RYKKLIKPTKGIFYLISIANLDQSV

SEQ ID NO: 48017 - protein, 31 aa, Artificial Sequence; identical to SEQ ID NO: 3035
  Cyclic GFR-binding peptide
  MOD_RES (26)..(27): Xaa is C or S

SEQ ID NO: 48018 - protein, 32 aa, Artificial Sequence; identical to SEQ ID NO: 13577
  Cyclic GFR-binding peptide
  MOD_RES (29)..(30): Xaa is C or S

SEQ ID NO: 48019 - protein, 29 aa, Artificial Sequence
  Cyclic GFR-binding peptide
  MOD_RES (2)..(2): Xaa is C or S
GXSEVVMDNSLQEVVNNASDYYVIPLPEL

SEQ ID NO: 48020 - protein, 26 aa, Artificial Sequence
  Cyclic GFR-binding peptide
  MOD_RES (26)..(26): Xaa is C or S
EYQKYIKPTKGIIFLISIPSLDQSVX

SEQ ID NO: 48021 - protein, 27 aa, Artificial Sequence
  Cyclic GFR-binding peptide
  MOD_RES (26)..(27): Xaa is C or S
EYQKYIKPTKGIIFLISIPSLDQSVXX

SEQ ID NO: 48022 - protein, 26 aa, Artificial Sequence
  Cyclic GFR-binding peptide
IMNSLQEIKPTKGIYYLITLPELDQS

SEQ ID NO: 48023 - protein, 31 aa, Artificial Sequence; identical to SEQ ID NO: 13585
  Cyclic GFR-binding peptide
  MOD_RES (2)..(2): Xaa is C or S

SEQ ID NO: 48024 - protein, 26 aa, Artificial Sequence
  Cyclic GFR-binding peptide
MDNSLQEVVNNASDYYLITLPELRTP

SEQ ID NO: 48025 - protein, 28 aa, Artificial Sequence
  Cyclic GFR-binding peptide
  MOD_RES (28)..(28): Xaa is C or S
MERYKKLVVKDYEDFYLMSIANLETPVX

SEQ ID NO: 48026 - protein, 27 aa, Artificial Sequence
  Cyclic GFR-binding peptide
MNRYKKLIVNSSDDFYLVSIANLKTPA

SEQ ID NO: 48027 - protein, 39 aa, Artificial Sequence; identical to SEQ ID NO: 13589
  Cyclic GFR-binding peptide
  MOD_RES (1)..(3)..(35)..(36): Xaa is C or S

SEQ ID NO: 48028 - protein, 30 aa, Artificial Sequence; identical to SEQ ID NO: 13591
  Cyclic GFR-binding peptide
  MOD_RES (1)..(3): Xaa is C or S

SEQ ID NO: 48029 - protein, 39 aa, Artificial Sequence; identical to SEQ ID NO: 13592
  Cyclic GFR-binding peptide
  MOD_RES (2)..(34)..(35): Xaa is C or S

SEQ ID NO: 48030 - protein, 33 aa, Artificial Sequence; identical to SEQ ID NO: 13593
  Cyclic GFR-binding peptide
  MOD_RES (30)..(31): Xaa is C or S

SEQ ID NO: 48031 - protein, 35 aa, Artificial Sequence; identical to SEQ ID NO: 13595
  Cyclic GFR-binding peptide
  MOD_RES (30)..(31): Xaa is C or S

SEQ ID NO: 48032 - protein, 33 aa, Artificial Sequence; identical to SEQ ID NO: 13597
  Cyclic GFR-binding peptide
  MOD_RES (28)..(29): Xaa is C or S

SEQ ID NO: 48033 - protein, 32 aa, Artificial Sequence; identical to SEQ ID NO: 3056
  Cyclic GFR-binding peptide
  MOD_RES (29)..(30): Xaa is C or S

SEQ ID NO: 48034 - protein, 38 aa, Artificial Sequence; identical to SEQ ID NO: 3057
  Cyclic GFR-binding peptide
  MOD_RES (1)..(3)..(34)..(35): Xaa is C or S

SEQ ID NO: 48035 - protein, 32 aa, Artificial Sequence; identical to SEQ ID NO: 13600
  Cyclic GFR-binding peptide
  MOD_RES (26)..(27): Xaa is C or S

SEQ ID NO: 48036 - protein, 27 aa, Artificial Sequence
  Cyclic GFR-binding peptide
GEVVMENSLQEVVKDYEDYYVMPLPEL

SEQ ID NO: 48037 - protein, 37 aa, Artificial Sequence; identical to SEQ ID NO: 13602
  Cyclic GFR-binding peptide
  MOD_RES (1)..(32)..(33): Xaa is C or S

SEQ ID NO: 48038 - protein, 21 aa, Artificial Sequence
  Cyclic GFR-binding peptide
NSLQEVVKDYEDYYVMPLPEL

SEQ ID NO: 48039 - protein, 21 aa, Artificial Sequence
  Cyclic GFR-binding peptide
NSLQEVVNNASDYYLITLPEL

SEQ ID NO: 48040 - protein, 27 aa, Artificial Sequence
  Cyclic GFR-binding peptide
VVMNNSLQEIVNSSDDYYLVTLPELQT

SEQ ID NO: 48041 - protein, 41 aa, Artificial Sequence; identical to SEQ ID NO: 13606
  Cyclic GFR-binding peptide
  MOD_RES (1)..(3)..(35): Xaa is C or S

SEQ ID NO: 48042 - protein, 27 aa, Artificial Sequence
  Cyclic GFR-binding peptide
  MOD_RES (1)..(1): Xaa is C or S
XSKVIMNSLQEIKPTKGIYYVIPLPEL

SEQ ID NO: 48043 - protein, 35 aa, Artificial Sequence; identical to SEQ ID NO: 13609
  Cyclic GFR-binding peptide
  MOD_RES (31)..(32): Xaa is C or S

SEQ ID NO: 48044 - protein, 34 aa, Artificial Sequence; identical to SEQ ID NO: 3067
  Cyclic GFR-binding peptide
  MOD_RES (1)..(3): Xaa is C or S

SEQ ID NO: 48045 - protein, 29 aa, Artificial Sequence
  Cyclic GFR-binding peptide
  MOD_RES (26)..(27): Xaa is C or S
NSLQEIVNSSDDYYLVTLPELQTPAXXPK

SEQ ID NO: 48046 - protein, 42 aa, Artificial Sequence; identical to SEQ ID NO: 3070
  Cyclic GFR-binding peptide
  MOD_RES (2)..(4)..(36)..(37): Xaa is C or S

SEQ ID NO: 48047 - protein, 33 aa, Artificial Sequence
  Cyclic GFR-binding peptide
  MOD_RES (29)..(30): Xaa is C or S
VVMNSLQEVKPTRGVYYLITLPELDQPVXXPSA

SEQ ID NO: 48048 - protein, 25 aa, Artificial Sequence
  Cyclic GFR-binding peptide
VMNRYKKLIVNSSDDFYLVSIANLK

SEQ ID NO: 48049 - protein, 36 aa, Artificial Sequence; identical to SEQ ID NO: 3076
  Cyclic GFR-binding peptide
  MOD_RES (2)..(34)..(35): Xaa is C or S

SEQ ID NO: 48050 - protein, 26 aa, Artificial Sequence
  Cyclic GFR-binding peptide
MNSLQEVKPTRGVYYVIPLPELDQPV

SEQ ID NO: 48051 - protein, 30 aa, Artificial Sequence; identical to SEQ ID NO: 13618
  Cyclic GFR-binding peptide
  MOD_RES (1)..(1): Xaa is C or S

SEQ ID NO: 48052 - protein, 33 aa, Artificial Sequence; identical to SEQ ID NO: 13619
  Cyclic GFR-binding peptide
  MOD_RES (2)..(33): Xaa is C or S

SEQ ID NO: 48053 - protein, 38 aa, Artificial Sequence; identical to SEQ ID NO: 13621
  Cyclic GFR-binding peptide
  MOD_RES (2)..(34)..(35): Xaa is C or S

SEQ ID NO: 48054 - protein, 30 aa, Artificial Sequence; identical to SEQ ID NO: 13622
  Cyclic GFR-binding peptide

SEQ ID NO: 48055 - protein, 31 aa, Artificial Sequence; identical to SEQ ID NO: 13623
  Cyclic GFR-binding peptide
  MOD_RES (28)..(29): Xaa is C or S

SEQ ID NO: 48056 - protein, 27 aa, Artificial Sequence
  Cyclic GFR-binding peptide
  MOD_RES (1)..(1): Xaa is C or S
XSKVIMNSLQEIKPTKGIYYLITLPEL

SEQ ID NO: 48057 - protein, 29 aa, Artificial Sequence
  Cyclic GFR-binding peptide
  MOD_RES (26)..(26): Xaa is C or S
NSLQEIVNSSDDYYVVPLPELKTPAXTPK

SEQ ID NO: 48058 - protein, 28 aa, Artificial Sequence
  Cyclic GFR-binding peptide
VVMENSLQEVVKDYEDYYLMTLPELETP

SEQ ID NO: 48059 - protein, 24 aa, Artificial Sequence
  Cyclic GFR-binding peptide
VMEYQKYVKPTRGVIFLISIPSLD

SEQ ID NO: 48060 - protein, 21 aa, Artificial Sequence
  Cyclic GFR-binding peptide
EYQKYVKPKRGVIFLISIPSL

SEQ ID NO: 48061 - protein, 35 aa, Artificial Sequence; identical to SEQ ID NO: 13631
  Cyclic GFR-binding peptide
  MOD_RES (2)..(34)..(35): Xaa is C or S

SEQ ID NO: 48062 - protein, 34 aa, Artificial Sequence; identical to SEQ ID NO: 3091
  Cyclic GFR-binding peptide
  MOD_RES (32)..(33): Xaa is C or S

SEQ ID NO: 48063 - protein, 35 aa, Artificial Sequence; identical to SEQ ID NO: 3092
  Cyclic GFR-binding peptide
  MOD_RES (31)..(32): Xaa is C or S

SEQ ID NO: 48064 - protein, 26 aa, Artificial Sequence
  Cyclic GFR-binding peptide
  MOD_RES (26)..(26): Xaa is C or S
EYQKYIVNSSDDIFLVSIPSLQTPAX

SEQ ID NO: 48065 - protein, 37 aa, Artificial Sequence; identical to SEQ ID NO: 13635
  Cyclic GFR-binding peptide
  MOD_RES (32)..(33): Xaa is C or S

SEQ ID NO: 48066 - protein, 30 aa, Artificial Sequence; identical to SEQ ID NO: 13637
  Cyclic GFR-binding peptide
  MOD_RES (30)..(30): Xaa is C or S

SEQ ID NO: 48067 - protein, 23 aa, Artificial Sequence
  Cyclic GFR-binding peptide
NSLQEIKPTKGIYYVIPLPELDQ

SEQ ID NO: 48068 - protein, 30 aa, Artificial Sequence; identical to SEQ ID NO: 13639
  Cyclic GFR-binding peptide
  MOD_RES (29)..(30): Xaa is C or S

SEQ ID NO: 48069 - protein, 37 aa, Artificial Sequence; identical to SEQ ID NO: 3098
  Cyclic GFR-binding peptide
  MOD_RES (32)..(32): Xaa is C or S

SEQ ID NO: 48070 - protein, 24 aa, Artificial Sequence
  Cyclic GFR-binding peptide
DEYQKYVVKENEDIFLMSIPSLET

SEQ ID NO: 48071 - protein, 27 aa, Artificial Sequence
  Cyclic GFR-binding peptide
  MOD_RES (27)..(27): Xaa is C or S
MNSLQEVKPKRGVYYLITLPELAQPVX

SEQ ID NO: 48072 - protein, 31 aa, Artificial Sequence; identical to SEQ ID NO: 13643
  Cyclic GFR-binding peptide
  MOD_RES (31)..(31): Xaa is C or S

SEQ ID NO: 48073 - protein, 29 aa, Artificial Sequence
  Cyclic GFR-binding peptide
VVMNEYQKYIVNSSDDIFLVSIPSLKTPA

SEQ ID NO: 48074 - protein, 26 aa, Artificial Sequence
  Cyclic GFR-binding peptide
EVVMDNSLQEVVNNASDYYLITLPEL

SEQ ID NO: 48075 - protein, 24 aa, Artificial Sequence
  Cyclic GFR-binding peptide
DNSLQEVVNNASDYYVIPLPELRT

SEQ ID NO: 48076 - protein, 29 aa, Artificial Sequence
  Cyclic GFR-binding peptide
  MOD_RES (1)..(3): Xaa is C or S
XGXSRVVMNRYKKLIVNSSDDFYLVSIAN

SEQ ID NO: 48077 - protein, 34 aa, Artificial Sequence; identical to SEQ ID NO: 13651
  Cyclic GFR-binding peptide
  MOD_RES (2)..(4): Xaa is C or S

SEQ ID NO: 48078 - protein, 34 aa, Artificial Sequence; identical to SEQ ID NO: 13653
  Cyclic GFR-binding peptide
  MOD_RES (1)..(32)..(33): Xaa is C or S

SEQ ID NO: 48079 - protein, 26 aa, Artificial Sequence
  Cyclic GFR-binding peptide
MDNSLQEVVKENEDYYLMTLPELETP

SEQ ID NO: 48080 - protein, 35 aa, Artificial Sequence; identical to SEQ ID NO: 3111
  Cyclic GFR-binding peptide
  MOD_RES (1)..(33)..(34): Xaa is C or S

SEQ ID NO: 48081 - protein, 32 aa, Artificial Sequence; identical to SEQ ID NO: 13657
  Cyclic GFR-binding peptide
  MOD_RES (29)..(30): Xaa is C or S

SEQ ID NO: 48082 - protein, 31 aa, Artificial Sequence; identical to SEQ ID NO: 13658
  Cyclic GFR-binding peptide
  MOD_RES (27)..(28): Xaa is C or S

SEQ ID NO: 48083 - protein, 32 aa, Artificial Sequence; identical to SEQ ID NO: 13659
  Cyclic GFR-binding peptide
  MOD_RES (32)..(32): Xaa is C or S

SEQ ID NO: 48084 - protein, 35 aa, Artificial Sequence; identical to SEQ ID NO: 3117
  Cyclic GFR-binding peptide
  MOD_RES (1)..(3)..(34)..(35): Xaa is C or S

SEQ ID NO: 48085 - protein, 27 aa, Artificial Sequence
  Cyclic GFR-binding peptide
VMEYQKYVKPTRGVIFLISIPSLDQPV

SEQ ID NO: 48086 - protein, 35 aa, Artificial Sequence; identical to SEQ ID NO: 13664
  Cyclic GFR-binding peptide
  MOD_RES (32)..(33): Xaa is C or S

SEQ ID NO: 48087 - protein, 33 aa, Artificial Sequence; identical to SEQ ID NO: 13665
  Cyclic GFR-binding peptide
  MOD_RES (1)..(3): Xaa is C or S

SEQ ID NO: 48088 - protein, 39 aa, Artificial Sequence; identical to SEQ ID NO: 13667
  Cyclic GFR-binding peptide
  MOD_RES (2)..(4)..(36): Xaa is C or S

SEQ ID NO: 48089 - protein, 29 aa, Artificial Sequence
  Cyclic GFR-binding peptide
RVVMNNSLQEIVNSSDDYYLVTLPELQTP

SEQ ID NO: 48090 - protein, 35 aa, Artificial Sequence; identical to SEQ ID NO: 13669
  Cyclic GFR-binding peptide
  MOD_RES (29)..(30): Xaa is C or S

SEQ ID NO: 48091 - protein, 34 aa, Artificial Sequence; identical to SEQ ID NO: 13670
  Cyclic GFR-binding peptide
  MOD_RES (2)..(4): Xaa is C or S

SEQ ID NO: 48092 - protein, 25 aa, Artificial Sequence
  Cyclic GFR-binding peptide
DNSLQEVVNNASDYYVIPLPELRTP

SEQ ID NO: 48093 - protein, 32 aa, Artificial Sequence; identical to SEQ ID NO: 13674
  Cyclic GFR-binding peptide
  MOD_RES (28)..(29): Xaa is C or S

SEQ ID NO: 48094 - protein, 35 aa, Artificial Sequence; identical to SEQ ID NO: 3128
  Cyclic GFR-binding peptide
  MOD_RES (1)..(3)..(34)..(35): Xaa is C or S

SEQ ID NO: 48095 - protein, 29 aa, Artificial Sequence
  Cyclic GFR-binding peptide
  MOD_RES (1)..(1): Xaa is C or S
XSRVVMNNSLQEIVNSSDDYYVVPLPELK

SEQ ID NO: 48096 - protein, 25 aa, Artificial Sequence
  Cyclic GFR-binding peptide
VVMRYKKLVKPTRGVFYLISIANLD

SEQ ID NO: 48097 - protein, 33 aa, Artificial Sequence; identical to SEQ ID NO: 13678
  Cyclic GFR-binding peptide
  MOD_RES (30)..(31): Xaa is C or S

SEQ ID NO: 48098 - protein, 20 aa, Artificial Sequence
  Cyclic GFR-binding peptide
NSLQEVVKDYEDYYVMPLPE

SEQ ID NO: 48099 - protein, 34 aa, Artificial Sequence; identical to SEQ ID NO: 3143
  Cyclic GFR-binding peptide
  MOD_RES (1)..(3): Xaa is C or S

SEQ ID NO: 48100 - protein, 38 aa, Artificial Sequence; identical to SEQ ID NO: 13684
  Cyclic GFR-binding peptide
  MOD_RES (1)..(33)..(34): Xaa is C or S

SEQ ID NO: 48101 - protein, 34 aa, Artificial Sequence; identical to SEQ ID NO: 3145
  Cyclic GFR-binding peptide
  MOD_RES (28)..(28): Xaa is C or S

SEQ ID NO: 48102 - protein, 29 aa, Artificial Sequence
  Cyclic GFR-binding peptide
  MOD_RES (28)..(29): Xaa is C or S
IMEYQKYVKPKRGVIFLISIPSLAQPVXX

SEQ ID NO: 48103 - protein, 36 aa, Artificial Sequence
  Cyclic GFR-binding peptide
  MOD_RES (1)..(3)..(34)..(35): Xaa is C or S
XKXSKVVMNSLQEVKPTRGVYYLITLPELDQPVXXP

SEQ ID NO: 48104 - protein, 23 aa, Artificial Sequence
  Cyclic GFR-binding peptide
MDNSLQEVVKENEDYYLMTLPEL

SEQ ID NO: 48105 - protein, 40 aa, Artificial Sequence; identical to SEQ ID NO: 13688
  Cyclic GFR-binding peptide
  MOD_RES (2)..(4)..(36)..(37): Xaa is C or S

SEQ ID NO: 48106 - protein, 33 aa, Artificial Sequence; identical to SEQ ID NO: 13689
  Cyclic GFR-binding peptide
  MOD_RES (32)..(33): Xaa is C or S

SEQ ID NO: 48107 - protein, 38 aa, Artificial Sequence; identical to SEQ ID NO: 13690
  Cyclic GFR-binding peptide
  MOD_RES (1)..(33): Xaa is C or S

SEQ ID NO: 48108 - protein, 25 aa, Artificial Sequence
  Cyclic GFR-binding peptide
MNNSLQEIVNSSDDYYVVPLPELKT

SEQ ID NO: 48109 - protein, 34 aa, Artificial Sequence; identical to SEQ ID NO: 13693
  Cyclic GFR-binding peptide
  MOD_RES (30)..(31): Xaa is C or S

SEQ ID NO: 48110 - protein, 39 aa, Artificial Sequence; identical to SEQ ID NO: 3150
  Cyclic GFR-binding peptide
  MOD_RES (2)..(4)..(36)..(37): Xaa is C or S

SEQ ID NO: 48111 - protein, 34 aa, Artificial Sequence; identical to SEQ ID NO: 3156
  Cyclic GFR-binding peptide
  MOD_RES (2)..(4): Xaa is C or S

SEQ ID NO: 48112 - protein, 33 aa, Artificial Sequence; identical to SEQ ID NO: 13697
  Cyclic GFR-binding peptide
  MOD_RES (29)..(30): Xaa is C or S

SEQ ID NO: 48113 - protein, 38 aa, Artificial Sequence; identical to SEQ ID NO: 3157
  Cyclic GFR-binding peptide
  MOD_RES (2)..(4)..(36): Xaa is C or S

SEQ ID NO: 48114 - protein, 30 aa, Artificial Sequence; identical to SEQ ID NO: 13699
  Cyclic GFR-binding peptide
  MOD_RES (26)..(27): Xaa is C or S

SEQ ID NO: 48115 - protein, 39 aa, Artificial Sequence; identical to SEQ ID NO: 13700
  Cyclic GFR-binding peptide
  MOD_RES (2)..(34): Xaa is C or S

SEQ ID NO: 48116 - protein, 27 aa, Artificial Sequence
  Cyclic GFR-binding peptide
SEVVMDNSLQEVVNNASDYYLITLPEL

SEQ ID NO: 48117 - protein, 22 aa, Artificial Sequence
  Cyclic GFR-binding peptide
DEYQKYVVKENEDIFLMSIPSL

SEQ ID NO: 48118 - protein, 27 aa, Artificial Sequence
  Cyclic GFR-binding peptide
  MOD_RES (2)..(2): Xaa is C or S
KXSKVIMEYQKYIKPTKGIIFLISIPS

SEQ ID NO: 48119 - protein, 29 aa, Artificial Sequence
  Cyclic GFR-binding peptide
  MOD_RES (27)..(28): Xaa is C or S
MNSLQEVKPKRGVYYLITLPELAQPVXXP

SEQ ID NO: 48120 - protein, 33 aa, Artificial Sequence; identical to SEQ ID NO: 13705
  Cyclic GFR-binding peptide
  MOD_RES (31)..(31): Xaa is C or S

SEQ ID NO: 48121 - protein, 28 aa, Artificial Sequence
  Cyclic GFR-binding peptide
RVVMNEYQKYIVNSSDDIFLVSIPSLKT

SEQ ID NO: 48122 - protein, 36 aa, Artificial Sequence; identical to SEQ ID NO: 13710
  Cyclic GFR-binding peptide
  MOD_RES (1)..(33)..(34): Xaa is C or S

SEQ ID NO: 48123 - protein, 33 aa, Artificial Sequence; identical to SEQ ID NO: 3168
  Cyclic GFR-binding peptide
  MOD_RES (28)..(29): Xaa is C or S

SEQ ID NO: 48124 - protein, 24 aa, Artificial Sequence
  Cyclic GFR-binding peptide
VIMNSLQEIKPTKGIYYVIPLPEL

SEQ ID NO: 48125 - protein, 34 aa, Artificial Sequence; identical to SEQ ID NO: 3170
  Cyclic GFR-binding peptide
  MOD_RES (1)..(33)..(34): Xaa is C or S

SEQ ID NO: 48126 - protein, 32 aa, Artificial Sequence; identical to SEQ ID NO: 13715
  Cyclic GFR-binding peptide
  MOD_RES (26)..(27): Xaa is C or S

SEQ ID NO: 48127 - protein, 25 aa, Artificial Sequence
  Cyclic GFR-binding peptide
DNSLQEVVKENEDYYLMTLPELETP

SEQ ID NO: 48128 - protein, 39 aa, Artificial Sequence; identical to SEQ ID NO: 13720
  Cyclic GFR-binding peptide
  MOD_RES (1)..(3)..(34)..(35): Xaa is C or S

SEQ ID NO: 48129 - protein, 38 aa, Artificial Sequence; identical to SEQ ID NO: 3176
  Cyclic GFR-binding peptide
  MOD_RES (2)..(34): Xaa is C or S

SEQ ID NO: 48130 - protein, 29 aa, Artificial Sequence
  Cyclic GFR-binding peptide
  MOD_RES (2)..(4): Xaa is C or S
SXKXSKVIMRYKKLIKPTKGIFYLISIAN

SEQ ID NO: 48131 - protein, 31 aa, Artificial Sequence; identical to SEQ ID NO: 13724
  Cyclic GFR-binding peptide
  MOD_RES (28)..(29): Xaa is C or S

SEQ ID NO: 48132 - protein, 21 aa, Artificial Sequence
  Cyclic GFR-binding peptide
NSLQEIVNSSDDYYLVTLPEL

SEQ ID NO: 48133 - protein, 31 aa, Artificial Sequence; identical to SEQ ID NO: 13726
  Cyclic GFR-binding peptide
  MOD_RES (26)..(27): Xaa is C or S

SEQ ID NO: 48134 - protein, 34 aa, Artificial Sequence; identical to SEQ ID NO: 3180
  Cyclic GFR-binding peptide
  MOD_RES (31)..(32): Xaa is C or S

SEQ ID NO: 48135 - protein, 30 aa, Artificial Sequence; identical to SEQ ID NO: 13728
  Cyclic GFR-binding peptide

SEQ ID NO: 48136 - protein, 32 aa, Artificial Sequence; identical to SEQ ID NO: 3183
  Cyclic GFR-binding peptide
  MOD_RES (30)..(31): Xaa is C or S

SEQ ID NO: 48137 - protein, 36 aa, Artificial Sequence; identical to SEQ ID NO: 3184
  Cyclic GFR-binding peptide
  MOD_RES (1)..(3)..(34)..(35): Xaa is C or S

SEQ ID NO: 48138 - protein, 25 aa, Artificial Sequence
  Cyclic GFR-binding peptide
SKVIMNSLQEIKPTKGIYYLITLPE

SEQ ID NO: 48139 - protein, 28 aa, Artificial Sequence
  Cyclic GFR-binding peptide
GEVVMENSLQEVVKDYEDYYLMTLPELE

SEQ ID NO: 48140 - protein, 27 aa, Artificial Sequence
  Cyclic GFR-binding peptide
VMNNSLQEIVNSSDDYYLVTLPELKTP

SEQ ID NO: 48141 - protein, 28 aa, Artificial Sequence
  Cyclic GFR-binding peptide
  MOD_RES (27)..(28): Xaa is C or S
MNSLQEVKPKRGVYYLITLPELAQPVXX

SEQ ID NO: 48142 - protein, 32 aa, Artificial Sequence; identical to SEQ ID NO: 13737
  Cyclic GFR-binding peptide
  MOD_RES (30)..(31): Xaa is C or S

SEQ ID NO: 48143 - protein, 31 aa, Artificial Sequence; identical to SEQ ID NO: 3192
  Cyclic GFR-binding peptide
  MOD_RES (29)..(30): Xaa is C or S

SEQ ID NO: 48144 - protein, 23 aa, Artificial Sequence
  Cyclic GFR-binding peptide
DRYKKLVVKENEDFYLMSIANLE

SEQ ID NO: 48145 - protein, 31 aa, Artificial Sequence; identical to SEQ ID NO: 13741
  Cyclic GFR-binding peptide
  MOD_RES (1)..(1): Xaa is C or S

SEQ ID NO: 48146 - protein, 39 aa, Artificial Sequence; identical to SEQ ID NO: 13742
  Cyclic GFR-binding peptide
  MOD_RES (1)..(3)..(35)..(36): Xaa is C or S

SEQ ID NO: 48147 - protein, 28 aa, Artificial Sequence
  Cyclic GFR-binding peptide
EVVMENSLQEVVKDYEDYYLMTLPELET

SEQ ID NO: 48148 - protein, 25 aa, Artificial Sequence
  Cyclic GFR-binding peptide
NSLQEVVKDYEDYYVMPLPELETPV

SEQ ID NO: 48149 - protein, 28 aa, Artificial Sequence
  Cyclic GFR-binding peptide
  MOD_RES (1)..(3): Xaa is C or S
XKXSKVVMNSLQEVKPTRGVYYVIPLPE

SEQ ID NO: 48150 - protein, 29 aa, Artificial Sequence
  Cyclic GFR-binding peptide
  MOD_RES (1)..(3): Xaa is C or S
XKXSKVIMNSLQEIKPTKGIYYLITLPEL

SEQ ID NO: 48151 - protein, 23 aa, Artificial Sequence
  Cyclic GFR-binding peptide
ENSLQEVVKDYEDYYVMPLPELE

SEQ ID NO: 48152 - protein, 27 aa, Artificial Sequence
  Cyclic GFR-binding peptide
VMDEYQKYVVKENEDIFLMSIPSLETP

SEQ ID NO: 48153 - protein, 31 aa, Artificial Sequence; identical to SEQ ID NO: 3203
  Cyclic GFR-binding peptide
  MOD_RES (28)..(28): Xaa is C or S

SEQ ID NO: 48154 - protein, 34 aa, Artificial Sequence; identical to SEQ ID NO: 13753
  Cyclic GFR-binding peptide
  MOD_RES (32)..(33): Xaa is C or S

SEQ ID NO: 48155 - protein, 23 aa, Artificial Sequence
  Cyclic GFR-binding peptide
VMNNSLQEIVNSSDDYYVVPLPE

SEQ ID NO: 48156 - protein, 33 aa, Artificial Sequence; identical to SEQ ID NO: 13758
  Cyclic GFR-binding peptide
  MOD_RES (29)..(30): Xaa is C or S

SEQ ID NO: 48157 - protein, 34 aa, Artificial Sequence; identical to SEQ ID NO: 13760
  Cyclic GFR-binding peptide
  MOD_RES (31)..(32): Xaa is C or S

SEQ ID NO: 48158 - protein, 29 aa, Artificial Sequence
  Cyclic GFR-binding peptide
  MOD_RES (1)..(3): Xaa is C or S
XKXSRVIMNSLQEVKPKRGVYYLITLPEL

SEQ ID NO: 48159 - protein, 25 aa, Artificial Sequence
  Cyclic GFR-binding peptide
SRVIMEYQKYVKPKRGVIFLISIPS

SEQ ID NO: 48160 - protein, 29 aa, Artificial Sequence
  Cyclic GFR-binding peptide
VVMENSLQEVVKDYEDYYLMTLPELETPV

SEQ ID NO: 48161 - protein, 31 aa, Artificial Sequence; identical to SEQ ID NO: 13766
  Cyclic GFR-binding peptide
  MOD_RES (31)..(31): Xaa is C or S

SEQ ID NO: 48162 - protein, 33 aa, Artificial Sequence; identical to SEQ ID NO: 13767
  Cyclic GFR-binding peptide
  MOD_RES (32)..(33): Xaa is C or S

SEQ ID NO: 48163 - protein, 34 aa, Artificial Sequence; identical to SEQ ID NO: 13769
  Cyclic GFR-binding peptide
  MOD_RES (1)..(3): Xaa is C or S

SEQ ID NO: 48164 - protein, 27 aa, Artificial Sequence
  Cyclic GFR-binding peptide
  MOD_RES (26)..(27): Xaa is C or S
NSLQEVVKENEDYYVMPLPELETPVXX

SEQ ID NO: 48165 - protein, 33 aa, Artificial Sequence
  Cyclic GFR-binding peptide
  MOD_RES (2)..(33): Xaa is C or S
KXSKVVMNSLQEVKPTRGVYYLITLPELDQPVX

SEQ ID NO: 48166 - protein, 38 aa, Artificial Sequence; identical to SEQ ID NO: 13772
  Cyclic GFR-binding peptide
  MOD_RES (1)..(3)..(35)..(36): Xaa is C or S

SEQ ID NO: 48167 - protein, 34 aa, Artificial Sequence; identical to SEQ ID NO: 13775
  Cyclic GFR-binding peptide
  MOD_RES (32)..(33): Xaa is C or S

SEQ ID NO: 48168 - protein, 40 aa, Artificial Sequence; identical to SEQ ID NO: 13776
  Cyclic GFR-binding peptide
  MOD_RES (2)..(4)..(36)..(37): Xaa is C or S

SEQ ID NO: 48169 - protein, 32 aa, Artificial Sequence; identical to SEQ ID NO: 13777
  Cyclic GFR-binding peptide
  MOD_RES (27)..(28): Xaa is C or S

SEQ ID NO: 48170 - protein, 33 aa, Artificial Sequence; identical to SEQ ID NO: 13778
  Cyclic GFR-binding peptide
  MOD_RES (29)..(30): Xaa is C or S

SEQ ID NO: 48171 - protein, 28 aa, Artificial Sequence
  Cyclic GFR-binding peptide
  MOD_RES (26)..(27): Xaa is C or S
NSLQEVVKENEDYYVMPLPELETPVXXA

SEQ ID NO: 48172 - protein, 36 aa, Artificial Sequence; identical to SEQ ID NO: 3224
  Cyclic GFR-binding peptide
  MOD_RES (1)..(32)..(33): Xaa is C or S

SEQ ID NO: 48173 - protein, 26 aa, Artificial Sequence
  Cyclic GFR-binding peptide
VMDNSLQEVVNNASDYYLITLPELRT

SEQ ID NO: 48174 - protein, 31 aa, Artificial Sequence; identical to SEQ ID NO: 13783
  Cyclic GFR-binding peptide
  MOD_RES (26)..(27): Xaa is C or S

SEQ ID NO: 48175 - protein, 26 aa, Artificial Sequence
  Cyclic GFR-binding peptide
EVVMDNSLQEVVKENEDYYLMTLPEL

SEQ ID NO: 48176 - protein, 30 aa, Artificial Sequence; identical to SEQ ID NO: 3229
  Cyclic GFR-binding peptide
  MOD_RES (30)..(30): Xaa is C or S

SEQ ID NO: 48177 - protein, 37 aa, Artificial Sequence; identical to SEQ ID NO: 13788
  Cyclic GFR-binding peptide
  MOD_RES (1)..(3)..(34)..(35): Xaa is C or S

SEQ ID NO: 48178 - protein, 38 aa, Artificial Sequence; identical to SEQ ID NO: 13789
  Cyclic GFR-binding peptide
  MOD_RES (2)..(34)..(35): Xaa is C or S

SEQ ID NO: 48179 - protein, 26 aa, Artificial Sequence
  Cyclic GFR-binding peptide
MERYKKLVVKDYEDFYLMSIANLETP

SEQ ID NO: 48180 - protein, 28 aa, Artificial Sequence
  Cyclic GFR-binding peptide
VIMRYKKLVKPKRGVFYLISIANLAQPV

SEQ ID NO: 48181 - protein, 34 aa, Artificial Sequence; identical to SEQ ID NO: 13795
  Cyclic GFR-binding peptide
  MOD_RES (2)..(33)..(34): Xaa is C or S

SEQ ID NO: 48182 - protein, 29 aa, Artificial Sequence
  Cyclic GFR-binding peptide
  MOD_RES (29)..(29): Xaa is C or S
VIMRYKKLVKPKRGVFYLISIANLAQPVX

SEQ ID NO: 48183 - protein, 36 aa, Artificial Sequence; identical to SEQ ID NO: 13798
  Cyclic GFR-binding peptide
  MOD_RES (30)..(30): Xaa is C or S

SEQ ID NO: 48184 - protein, 29 aa, Artificial Sequence
  Cyclic GFR-binding peptide
SRVVMNEYQKYIVNSSDDIFLVSIPSLKT

SEQ ID NO: 48185 - protein, 39 aa, Artificial Sequence; identical to SEQ ID NO: 13800
  Cyclic GFR-binding peptide
  MOD_RES (2)..(4)..(36)..(37): Xaa is C or S

SEQ ID NO: 48186 - protein, 26 aa, Artificial Sequence
  Cyclic GFR-binding peptide
VVMENSLQEVVKDYEDYYLMTLPELE

SEQ ID NO: 48187 - protein, 35 aa, Artificial Sequence; identical to SEQ ID NO: 13804
  Cyclic GFR-binding peptide
  MOD_RES (1)..(32)..(33): Xaa is C or S

SEQ ID NO: 48188 - protein, 30 aa, Artificial Sequence; identical to SEQ ID NO: 13805
  Cyclic GFR-binding peptide
  MOD_RES (26)..(27): Xaa is C or S

SEQ ID NO: 48189 - protein, 30 aa, Artificial Sequence; identical to SEQ ID NO: 13806
  Cyclic GFR-binding peptide
  MOD_RES (29)..(30): Xaa is C or S

SEQ ID NO: 48190 - protein, 30 aa, Artificial Sequence; identical to SEQ ID NO: 13807
  Cyclic GFR-binding peptide
  MOD_RES (1)..(1): Xaa is C or S

SEQ ID NO: 48191 - protein, 24 aa, Artificial Sequence
  Cyclic GFR-binding peptide
ERYKKLVVKDYEDFYLMSIANLET

SEQ ID NO: 48192 - protein, 24 aa, Artificial Sequence
  Cyclic GFR-binding peptide
RYKKLVVNNASDFYLISIANLRTP

SEQ ID NO: 48193 - protein, 34 aa, Artificial Sequence; identical to SEQ ID NO: 13811
  Cyclic GFR-binding peptide
  MOD_RES (2)..(34): Xaa is C or S

SEQ ID NO: 48194 - protein, 35 aa, Artificial Sequence; identical to SEQ ID NO: 13812
  Cyclic GFR-binding peptide
  MOD_RES (31)..(32): Xaa is C or S

SEQ ID NO: 48195 - protein, 36 aa, Artificial Sequence; identical to SEQ ID NO: 13813
  Cyclic GFR-binding peptide
  MOD_RES (1)..(3)..(35)..(36): Xaa is C or S

SEQ ID NO: 48196 - protein, 32 aa, Artificial Sequence; identical to SEQ ID NO: 13814
  Cyclic GFR-binding peptide
  MOD_RES (26)..(27): Xaa is C or S

SEQ ID NO: 48197 - protein, 29 aa, Artificial Sequence
  Cyclic GFR-binding peptide
  MOD_RES (26)..(27): Xaa is C or S
EYQKYIVNSSDDIFLVSIPSLKTPAXXPK

SEQ ID NO: 48198 - protein, 38 aa, Artificial Sequence; identical to SEQ ID NO: 13816
  Cyclic GFR-binding peptide
  MOD_RES (2)..(4)..(36)..(37): Xaa is C or S

SEQ ID NO: 48199 - protein, 33 aa, Artificial Sequence; identical to SEQ ID NO: 13817
  Cyclic GFR-binding peptide
  MOD_RES (1)..(32)..(33): Xaa is C or S

SEQ ID NO: 48200 - protein, 27 aa, Artificial Sequence
  Cyclic GFR-binding peptide
RVVMNNSLQEIVNSSDDYYLVTLPELQ

SEQ ID NO: 48201 - protein, 31 aa, Artificial Sequence; identical to SEQ ID NO: 13819
  Cyclic GFR-binding peptide
  MOD_RES (1)..(1): Xaa is C or S

SEQ ID NO: 48202 - protein, 29 aa, Artificial Sequence
  Cyclic GFR-binding peptide
  MOD_RES (28)..(29): Xaa is C or S
MNRYKKLIVNSSDDFYLVSIANLKTPAXX

SEQ ID NO: 48203 - protein, 27 aa, Artificial Sequence
  Cyclic GFR-binding peptide
  MOD_RES (27)..(27): Xaa is C or S
MEYQKYVKPKRGVIFLISIPSLAQPVX

SEQ ID NO: 48204 - protein, 30 aa, Artificial Sequence; identical to SEQ ID NO: 13822
  Cyclic GFR-binding peptide
  MOD_RES (30)..(30): Xaa is C or S

SEQ ID NO: 48205 - protein, 26 aa, Artificial Sequence
  Cyclic GFR-binding peptide
ARVVMNNSLQEIVNSSDDYYLVTLPE

SEQ ID NO: 48206 - protein, 36 aa, Artificial Sequence; identical to SEQ ID NO: 13824
  Cyclic GFR-binding peptide
  MOD_RES (30)..(31): Xaa is C or S

SEQ ID NO: 48207 - protein, 32 aa, Artificial Sequence; identical to SEQ ID NO: 13825
  Cyclic GFR-binding peptide
  MOD_RES (30)..(31): Xaa is C or S

SEQ ID NO: 48208 - protein, 28 aa, Artificial Sequence
  Cyclic GFR-binding peptide
  MOD_RES (2)..(2): Xaa is C or S
GXSEVVMDNSLQEVVNNASDYYLITLPE

SEQ ID NO: 48209 - protein, 35 aa, Artificial Sequence; identical to SEQ ID NO: 13828
  Cyclic GFR-binding peptide
  MOD_RES (2)..(34): Xaa is C or S

SEQ ID NO: 48210 - protein, 27 aa, Artificial Sequence
  Cyclic GFR-binding peptide
  MOD_RES (26)..(27): Xaa is C or S
NSLQEVKPTRGVYYLITLPELDQPVXX

SEQ ID NO: 48211 - protein, 25 aa, Artificial Sequence
  Cyclic GFR-binding peptide
MNNSLQEIVNSSDDYYVVPLPELQT

SEQ ID NO: 48212 - protein, 30 aa, Artificial Sequence; identical to SEQ ID NO: 13832
  Cyclic GFR-binding peptide
  MOD_RES (26)..(26): Xaa is C or S

SEQ ID NO: 48213 - protein, 33 aa, Artificial Sequence; identical to SEQ ID NO: 13833
  Cyclic GFR-binding peptide
  MOD_RES (30)..(31): Xaa is C or S

SEQ ID NO: 48214 - protein, 25 aa, Artificial Sequence
  Cyclic GFR-binding peptide
RVVMNNSLQEIVNSSDDYYVVPLPE

SEQ ID NO: 48215 - protein, 27 aa, Artificial Sequence
  Cyclic GFR-binding peptide
SRVIMNSLQEVKPKRGVYYLITLPELA

SEQ ID NO: 48216 - protein, 23 aa, Artificial Sequence
  Cyclic GFR-binding peptide
EEYQKYVVKDYEDIFLMSIPSLE

SEQ ID NO: 48217 - protein, 35 aa, Artificial Sequence; identical to SEQ ID NO: 13838
  Cyclic GFR-binding peptide
  MOD_RES (32)..(33): Xaa is C or S

SEQ ID NO: 48218 - protein, 40 aa, Artificial Sequence; identical to SEQ ID NO: 13839
  Cyclic GFR-binding peptide
  MOD_RES (2)..(4)..(35)..(36): Xaa is C or S

SEQ ID NO: 48219 - protein, 28 aa, Artificial Sequence
  Cyclic GFR-binding peptide
VVMNSLQEVKPTRGVYYLITLPELDQPV

SEQ ID NO: 48220 - protein, 27 aa, Artificial Sequence
  Cyclic GFR-binding peptide
  MOD_RES (1)..(1): Xaa is C or S
XSEVVMDNSLQEVVNNASDYYVIPLPE

SEQ ID NO: 48221 - protein, 38 aa, Artificial Sequence; identical to SEQ ID NO: 13842
  Cyclic GFR-binding peptide
  MOD_RES (2)..(33)..(34): Xaa is C or S

SEQ ID NO: 48222 - protein, 24 aa, Artificial Sequence
  Cyclic GFR-binding peptide
VMNSLQEVKPTRGVYYLITLPELD

SEQ ID NO: 48223 - protein, 34 aa, Artificial Sequence; identical to SEQ ID NO: 3283
  Cyclic GFR-binding peptide
  MOD_RES (29)..(30): Xaa is C or S

SEQ ID NO: 48224 - protein, 28 aa, Artificial Sequence
  Cyclic GFR-binding peptide
  MOD_RES (28)..(28): Xaa is C or S
MDNSLQEVVKENEDYYLMTLPELETPVX

SEQ ID NO: 48225 - protein, 33 aa, Artificial Sequence; identical to SEQ ID NO: 13846
  Cyclic GFR-binding peptide
  MOD_RES (28)..(29): Xaa is C or S

SEQ ID NO: 48226 - protein, 38 aa, Artificial Sequence; identical to SEQ ID NO: 3284
  Cyclic GFR-binding peptide
  MOD_RES (2)..(4)..(36)..(37): Xaa is C or S

SEQ ID NO: 48227 - protein, 23 aa, Artificial Sequence
  Cyclic GFR-binding peptide
IMEYQKYIKPTKGIIFLISIPSL

SEQ ID NO: 48228 - protein, 30 aa, Artificial Sequence; identical to SEQ ID NO: 13849
  Cyclic GFR-binding peptide
  MOD_RES (27)..(28): Xaa is C or S

SEQ ID NO: 48229 - protein, 33 aa, Artificial Sequence; identical to SEQ ID NO: 13851
  Cyclic GFR-binding peptide
  MOD_RES (29)..(30): Xaa is C or S

SEQ ID NO: 48230 - protein, 33 aa, Artificial Sequence; identical to SEQ ID NO: 13852
  Cyclic GFR-binding peptide
  MOD_RES (27)..(28): Xaa is C or S

SEQ ID NO: 48231 - protein, 29 aa, Artificial Sequence
  Cyclic GFR-binding peptide
  MOD_RES (28)..(29): Xaa is C or S
IMNSLQEIKPTKGIYYLITLPELDQSVXX

SEQ ID NO: 48232 - protein, 38 aa, Artificial Sequence; identical to SEQ ID NO: 13854
  Cyclic GFR-binding peptide
  MOD_RES (2)..(34)..(35): Xaa is C or S

SEQ ID NO: 48233 - protein, 29 aa, Artificial Sequence
  Cyclic GFR-binding peptide
GEVVMDNSLQEVVKENEDYYVMPLPELET

SEQ ID NO: 48234 - protein, 25 aa, Artificial Sequence
  Cyclic GFR-binding peptide
NSLQEIKPTKGIYYLITLPELDQSV

SEQ ID NO: 48235 - protein, 32 aa, Artificial Sequence; identical to SEQ ID NO: 3289
  Cyclic GFR-binding peptide
  MOD_RES (2)..(2): Xaa is C or S

SEQ ID NO: 48236 - protein, 30 aa, Artificial Sequence; identical to SEQ ID NO: 13860
  Cyclic GFR-binding peptide
  MOD_RES (28)..(28): Xaa is C or S

SEQ ID NO: 48237 - protein, 32 aa, Artificial Sequence; identical to SEQ ID NO: 13861
  Cyclic GFR-binding peptide
  MOD_RES (27)..(28): Xaa is C or S

SEQ ID NO: 48238 - protein, 33 aa, Artificial Sequence; identical to SEQ ID NO: 13862
  Cyclic GFR-binding peptide
  MOD_RES (30)..(31): Xaa is C or S

SEQ ID NO: 48239 - protein, 31 aa, Artificial Sequence; identical to SEQ ID NO: 13863
  Cyclic GFR-binding peptide
  MOD_RES (28)..(29): Xaa is C or S

SEQ ID NO: 48240 - protein, 25 aa, Artificial Sequence
  Cyclic GFR-binding peptide
EVVMENSLQEVVKDYEDYYLMTLPE

SEQ ID NO: 48241 - protein, 27 aa, Artificial Sequence
  Cyclic GFR-binding peptide
GEVVMEEYQKYVVKDYEDIFLMSIPSL

SEQ ID NO: 48242 - protein, 41 aa, Artificial Sequence; identical to SEQ ID NO: 13868
  Cyclic GFR-binding peptide
  MOD_RES (2)..(4)..(36)..(37): Xaa is C or S

SEQ ID NO: 48243 - protein, 25 aa, Artificial Sequence
  Cyclic GFR-binding peptide
VMDNSLQEVVNNASDYYLITLPELR

SEQ ID NO: 48244 - protein, 35 aa, Artificial Sequence; identical to SEQ ID NO: 13871
  Cyclic GFR-binding peptide
  MOD_RES (30)..(31): Xaa is C or S

SEQ ID NO: 48245 - protein, 33 aa, Artificial Sequence; identical to SEQ ID NO: 3300
  Cyclic GFR-binding peptide
  MOD_RES (27)..(28): Xaa is C or S

SEQ ID NO: 48246 - protein, 39 aa, Artificial Sequence; identical to SEQ ID NO: 13873
  Cyclic GFR-binding peptide
  MOD_RES (2)..(34)..(35): Xaa is C or S

SEQ ID NO: 48247 - protein, 26 aa, Artificial Sequence
  Cyclic GFR-binding peptide
SRVVMNNSLQEIVNSSDDYYLVTLPE

SEQ ID NO: 48248 - protein, 29 aa, Artificial Sequence
  Cyclic GFR-binding peptide
  MOD_RES (29)..(29): Xaa is C or S
VMNEYQKYIVNSSDDIFLVSIPSLQTPAX

SEQ ID NO: 48249 - protein, 26 aa, Artificial Sequence
  Cyclic GFR-binding peptide
MNSLQEVKPTRGVYYLITLPELDQPV

SEQ ID NO: 48250 - protein, 34 aa, Artificial Sequence; identical to SEQ ID NO: 13878
  Cyclic GFR-binding peptide
  MOD_RES (29)..(30): Xaa is C or S

SEQ ID NO: 48251 - protein, 31 aa, Artificial Sequence; identical to SEQ ID NO: 3308
  Cyclic GFR-binding peptide
  MOD_RES (28)..(29): Xaa is C or S

SEQ ID NO: 48252 - protein, 27 aa, Artificial Sequence
  Cyclic GFR-binding peptide
VVMNSLQEVKPTRGVYYLITLPELDQP

SEQ ID NO: 48253 - protein, 22 aa, Artificial Sequence
  Cyclic GFR-binding peptide
ERYKKLVVKDYEDFYLMSIANL

SEQ ID NO: 48254 - protein, 32 aa, Artificial Sequence
  Cyclic GFR-binding peptide
  MOD_RES (31)..(32): Xaa is C or S
SKVVMNSLQEVKPTRGVYYLITLPELDQPVXX

SEQ ID NO: 48255 - protein, 21 aa, Artificial Sequence
  Cyclic GFR-binding peptide
DNSLQEVVNNASDYYVIPLPE

SEQ ID NO: 48256 - protein, 31 aa, Artificial Sequence; identical to SEQ ID NO: 13886
  Cyclic GFR-binding peptide
  MOD_RES (26)..(27): Xaa is C or S

SEQ ID NO: 48257 - protein, 30 aa, Artificial Sequence; identical to SEQ ID NO: 13887
  Cyclic GFR-binding peptide
  MOD_RES (27)..(28): Xaa is C or S

SEQ ID NO: 48258 - protein, 25 aa, Artificial Sequence
  Cyclic GFR-binding peptide
NSLQEIVNSSDDYYLVTLPELQTPA

SEQ ID NO: 48259 - protein, 25 aa, Artificial Sequence
  Cyclic GFR-binding peptide
VMENSLQEVVKDYEDYYLMTLPELE

SEQ ID NO: 48260 - protein, 40 aa, Artificial Sequence; identical to SEQ ID NO: 3316
  Cyclic GFR-binding peptide
  MOD_RES (2)..(4)..(36)..(37): Xaa is C or S

SEQ ID NO: 48261 - protein, 31 aa, Artificial Sequence
  Cyclic GFR-binding peptide
  MOD_RES (31)..(31): Xaa is C or S
SKVVMNSLQEVKPTRGVYYLITLPELDQPVX

SEQ ID NO: 48262 - protein, 33 aa, Artificial Sequence; identical to SEQ ID NO: 13891
  Cyclic GFR-binding peptide
  MOD_RES (27)..(27): Xaa is C or S

SEQ ID NO: 48263 - protein, 27 aa, Artificial Sequence
  Cyclic GFR-binding peptide
SRVVMNRYKKLIVNSSDDFYLVSIANL

SEQ ID NO: 48264 - protein, 27 aa, Artificial Sequence
  Cyclic GFR-binding peptide
  MOD_RES (1)..(1): Xaa is C or S
XSEVVMDNSLQEVVNNASDYYLITLPE

SEQ ID NO: 48265 - protein, 23 aa, Artificial Sequence
  Cyclic GFR-binding peptide
VIMRYKKLVKPKRGVFYLISIAN

SEQ ID NO: 48266 - protein, 34 aa, Artificial Sequence; identical to SEQ ID NO: 13895
  Cyclic GFR-binding peptide
  MOD_RES (32)..(33): Xaa is C or S

SEQ ID NO: 48267 - protein, 27 aa, Artificial Sequence
  Cyclic GFR-binding peptide
VMNSLQEVKPTRGVYYLITLPELDQPV

SEQ ID NO: 48268 - protein, 37 aa, Artificial Sequence; identical to SEQ ID NO: 13896
  Cyclic GFR-binding peptide
  MOD_RES (1)..(33)..(34): Xaa is C or S

SEQ ID NO: 48269 - protein, 29 aa, Artificial Sequence
  Cyclic GFR-binding peptide
  MOD_RES (27)..(28): Xaa is C or S
EEYQKYVVKDYEDIFLMSIPSLETPVXXA

SEQ ID NO: 48270 - protein, 23 aa, Artificial Sequence
  Cyclic GFR-binding peptide
MDEYQKYVVKENEDIFLMSIPSL

SEQ ID NO: 48271 - protein, 35 aa, Artificial Sequence; identical to SEQ ID NO: 13900
  Cyclic GFR-binding peptide
  MOD_RES (29)..(30): Xaa is C or S

SEQ ID NO: 48272 - protein, 29 aa, Artificial Sequence
  Cyclic GFR-binding peptide
  MOD_RES (1)..(3): Xaa is C or S
XKXSKVVMRYKKLVKPTRGVFYLISIANL

SEQ ID NO: 48273 - protein, 28 aa, Artificial Sequence
  Cyclic GFR-binding peptide
  MOD_RES (1)..(1): Xaa is C or S
XSKVIMRYKKLIKPTKGIFYLISIANLD

SEQ ID NO: 48274 - protein, 40 aa, Artificial Sequence; identical to SEQ ID NO: 3331
  Cyclic GFR-binding peptide
  MOD_RES (1)..(3)..(34)..(35): Xaa is C or S

SEQ ID NO: 48275 - protein, 30 aa, Artificial Sequence; identical to SEQ ID NO: 13905
  Cyclic GFR-binding peptide
  MOD_RES (27)..(28): Xaa is C or S

SEQ ID NO: 48276 - protein, 38 aa, Artificial Sequence; identical to SEQ ID NO: 3333
  Cyclic GFR-binding peptide
  MOD_RES (1)..(32)..(33): Xaa is C or S

SEQ ID NO: 48277 - protein, 27 aa, Artificial Sequence
  Cyclic GFR-binding peptide
  MOD_RES (26)..(27): Xaa is C or S
RYKKLVVNNASDFYLISIANLRTPVXX

SEQ ID NO: 48278 - protein, 30 aa, Artificial Sequence; identical to SEQ ID NO: 13908
  Cyclic GFR-binding peptide
  MOD_RES (28)..(29): Xaa is C or S

SEQ ID NO: 48279 - protein, 39 aa, Artificial Sequence; identical to SEQ ID NO: 3336
  Cyclic GFR-binding peptide
  MOD_RES (1)..(3)..(34)..(35): Xaa is C or S

SEQ ID NO: 48280 - protein, 31 aa, Artificial Sequence; identical to SEQ ID NO: 13910
  Cyclic GFR-binding peptide

SEQ ID NO: 48281 - protein, 25 aa, Artificial Sequence
  Cyclic GFR-binding peptide
VMNNSLQEIVNSSDDYYLVTLPELQ

SEQ ID NO: 48282 - protein, 40 aa, Artificial Sequence; identical to SEQ ID NO: 13914
  Cyclic GFR-binding peptide
  MOD_RES (2)..(34)..(35): Xaa is C or S

SEQ ID NO: 48283 - protein, 29 aa, Artificial Sequence
  Cyclic GFR-binding peptide
  MOD_RES (27)..(28): Xaa is C or S
ENSLQEVVKDYEDYYLMTLPELETPVXXA

SEQ ID NO: 48284 - protein, 35 aa, Artificial Sequence; identical to SEQ ID NO: 13916
  Cyclic GFR-binding peptide
  MOD_RES (2)..(4): Xaa is C or S

SEQ ID NO: 48285 - protein, 40 aa, Artificial Sequence; identical to SEQ ID NO: 13917
  Cyclic GFR-binding peptide
  MOD_RES (1)..(3)..(34)..(35): Xaa is C or S

SEQ ID NO: 48286 - protein, 32 aa, Artificial Sequence; identical to SEQ ID NO: 13918
  Cyclic GFR-binding peptide
  MOD_RES (27)..(28): Xaa is C or S

SEQ ID NO: 48287 - protein, 29 aa, Artificial Sequence
  Cyclic GFR-binding peptide
  MOD_RES (28)..(29): Xaa is C or S
VMNSLQEVKPTRGVYYLITLPELDQPVXX

SEQ ID NO: 48288 - protein, 33 aa, Artificial Sequence; identical to SEQ ID NO: 13919
  Cyclic GFR-binding peptide
  MOD_RES (2)..(33): Xaa is C or S

SEQ ID NO: 48289 - protein, 31 aa, Artificial Sequence; identical to SEQ ID NO: 13920
  Cyclic GFR-binding peptide
  MOD_RES (28)..(29): Xaa is C or S

SEQ ID NO: 48290 - protein, 32 aa, Artificial Sequence
  Cyclic GFR-binding peptide
  MOD_RES (2)..(2): Xaa is C or S
KXSKVVMNSLQEVKPTRGVYYLITLPELDQPV

SEQ ID NO: 48291 - protein, 26 aa, Artificial Sequence
  Cyclic GFR-binding peptide
  MOD_RES (26)..(26): Xaa is C or S
RYKKLVVNNASDFYLISIANLRTPVX

SEQ ID NO: 48292 - protein, 31 aa, Artificial Sequence; identical to SEQ ID NO: 3350
  Cyclic GFR-binding peptide
  MOD_RES (2)..(4): Xaa is C or S

SEQ ID NO: 48293 - protein, 32 aa, Artificial Sequence; identical to SEQ ID NO: 13923
  Cyclic GFR-binding peptide
  MOD_RES (32)..(32): Xaa is C or S

SEQ ID NO: 48294 - protein, 36 aa, Artificial Sequence; identical to SEQ ID NO: 3355
  Cyclic GFR-binding peptide
  MOD_RES (1)..(33)..(34): Xaa is C or S

SEQ ID NO: 48295 - protein, 29 aa, Artificial Sequence
  Cyclic GFR-binding peptide
  MOD_RES (29)..(29): Xaa is C or S
VIMEYQKYIKPTKGIIFLISIPSLDQSVX

SEQ ID NO: 48296 - protein, 30 aa, Artificial Sequence; identical to SEQ ID NO: 13927
  Cyclic GFR-binding peptide
  MOD_RES (30)..(30): Xaa is C or S

SEQ ID NO: 48297 - protein, 34 aa, Artificial Sequence; identical to SEQ ID NO: 13928
  Cyclic GFR-binding peptide
  MOD_RES (1)..(32)..(33): Xaa is C or S

SEQ ID NO: 48298 - protein, 26 aa, Artificial Sequence
  Cyclic GFR-binding peptide
VMEYQKYVKPTRGVIFLISIPSLDQP

SEQ ID NO: 48299 - protein, 29 aa, Artificial Sequence
  Cyclic GFR-binding peptide
  MOD_RES (28)..(29): Xaa is C or S
MENSLQEVVKDYEDYYVMPLPELETPVXX

SEQ ID NO: 48300 - protein, 30 aa, Artificial Sequence; identical to SEQ ID NO: 13932
  Cyclic GFR-binding peptide
  MOD_RES (1)..(3): Xaa is C or S

SEQ ID NO: 48301 - protein, 37 aa, Artificial Sequence; identical to SEQ ID NO: 13933
  Cyclic GFR-binding peptide
  MOD_RES (31)..(32): Xaa is C or S

SEQ ID NO: 48302 - protein, 28 aa, Artificial Sequence
  Cyclic GFR-binding peptide
  MOD_RES (27)..(27): Xaa is C or S
NRYKKLIVNSSDDFYLVSIANLKTPAXT

SEQ ID NO: 48303 - protein, 24 aa, Artificial Sequence
  Cyclic GFR-binding peptide
KVIMEYQKYIKPTKGIIFLISIPS

SEQ ID NO: 48304 - protein, 37 aa, Artificial Sequence; identical to SEQ ID NO: 13937
  Cyclic GFR-binding peptide
  MOD_RES (32)..(33): Xaa is C or S

SEQ ID NO: 48305 - protein, 26 aa, Artificial Sequence
  Cyclic GFR-binding peptide
RVIMEYQKYVKPKRGVIFLISIPSLA

SEQ ID NO: 48306 - protein, 23 aa, Artificial Sequence
  Cyclic GFR-binding peptide
EYQKYVKPKRGVIFLISIPSLAQ

SEQ ID NO: 48307 - protein, 31 aa, Artificial Sequence; identical to SEQ ID NO: 13940
  Cyclic GFR-binding peptide

SEQ ID NO: 48308 - protein, 32 aa, Artificial Sequence; identical to SEQ ID NO: 13941
  Cyclic GFR-binding peptide
  MOD_RES (32)..(32): Xaa is C or S

SEQ ID NO: 48309 - protein, 29 aa, Artificial Sequence
  Cyclic GFR-binding peptide
  MOD_RES (1)..(3): Xaa is C or S
XGXARVVMNNSLQEIVNSSDDYYLVTLPE

SEQ ID NO: 48310 - protein, 37 aa, Artificial Sequence; identical to SEQ ID NO: 3366
  Cyclic GFR-binding peptide
  MOD_RES (1)..(32)..(33): Xaa is C or S

SEQ ID NO: 48311 - protein, 36 aa, Artificial Sequence
  Cyclic GFR-binding peptide
  MOD_RES (2)..(4)..(35)..(36): Xaa is C or S
SXKXSKVVMNSLQEVKPTRGVYYLITLPELDQPVXX

SEQ ID NO: 48312 - protein, 30 aa, Artificial Sequence; identical to SEQ ID NO: 13945
  Cyclic GFR-binding peptide
  MOD_RES (29)..(29): Xaa is C or S

SEQ ID NO: 48313 - protein, 29 aa, Artificial Sequence
  Cyclic GFR-binding peptide
  MOD_RES (26)..(27): Xaa is C or S
NSLQEVKPKRGVYYLITLPELAQPVXXPA

SEQ ID NO: 48314 - protein, 37 aa, Artificial Sequence; identical to SEQ ID NO: 3370
  Cyclic GFR-binding peptide
  MOD_RES (1)..(33)..(34): Xaa is C or S

SEQ ID NO: 48315 - protein, 38 aa, Artificial Sequence; identical to SEQ ID NO: 13950
  Cyclic GFR-binding peptide
  MOD_RES (2)..(34)..(35): Xaa is C or S

SEQ ID NO: 48316 - protein, 37 aa, Artificial Sequence; identical to SEQ ID NO: 13951
  Cyclic GFR-binding peptide
  MOD_RES (1)..(3)..(35)..(36): Xaa is C or S

SEQ ID NO: 48317 - protein, 27 aa, Artificial Sequence
  Cyclic GFR-binding peptide
VIMRYKKLVKPKRGVFYLISIANLAQP

SEQ ID NO: 48318 - protein, 37 aa, Artificial Sequence; identical to SEQ ID NO: 13953
  Cyclic GFR-binding peptide
  MOD_RES (2)..(33)..(34): Xaa is C or S

SEQ ID NO: 48319 - protein, 20 aa, Artificial Sequence
  Cyclic GFR-binding peptide
NSLQEIVNSSDDYYLVTLPE

SEQ ID NO: 48320 - protein, 23 aa, Artificial Sequence
  Cyclic GFR-binding peptide
ENSLQEVVKDYEDYYLMTLPELE

SEQ ID NO: 48321 - protein, 33 aa, Artificial Sequence; identical to SEQ ID NO: 13959
  Cyclic GFR-binding peptide
  MOD_RES (27)..(27): Xaa is C or S

SEQ ID NO: 48322 - protein, 24 aa, Artificial Sequence
  Cyclic GFR-binding peptide
KVVMEYQKYVKPTRGVIFLISIPS

SEQ ID NO: 48323 - protein, 21 aa, Artificial Sequence
  Cyclic GFR-binding peptide
DNSLQEVVNNASDYYLITLPE

SEQ ID NO: 48324 - protein, 30 aa, Artificial Sequence
  Cyclic GFR-binding peptide
  MOD_RES (1)..(1): Xaa is C or S
XSKVVMNSLQEVKPTRGVYYLITLPELDQP

SEQ ID NO: 48325 - protein, 28 aa, Artificial Sequence
  Cyclic GFR-binding peptide
  MOD_RES (1)..(1): Xaa is C or S
XSKVVMNSLQEVKPTRGVYYLITLPELD

SEQ ID NO: 48326 - protein, 34 aa, Artificial Sequence; identical to SEQ ID NO: 13966
  Cyclic GFR-binding peptide
  MOD_RES (28)..(29): Xaa is C or S

SEQ ID NO: 48327 - protein, 29 aa, Artificial Sequence
  Cyclic GFR-binding peptide
KVIMNSLQEIKPTKGIYYVIPLPELDQSV

SEQ ID NO: 48328 - protein, 27 aa, Artificial Sequence
  Cyclic GFR-binding peptide
MERYKKLVVKDYEDFYLMSIANLETPV

SEQ ID NO: 48329 - protein, 30 aa, Artificial Sequence; identical to SEQ ID NO: 13974
  Cyclic GFR-binding peptide
  MOD_RES (2)..(2): Xaa is C or S

SEQ ID NO: 48330 - protein, 31 aa, Artificial Sequence; identical to SEQ ID NO: 13976
  Cyclic GFR-binding peptide
  MOD_RES (28)..(29): Xaa is C or S

SEQ ID NO: 48331 - protein, 30 aa, Artificial Sequence; identical to SEQ ID NO: 3422
  Cyclic GFR-binding peptide

SEQ ID NO: 48332 - protein, 38 aa, Artificial Sequence; identical to SEQ ID NO: 13979
  Cyclic GFR-binding peptide
  MOD_RES (2)..(4)..(36)..(37): Xaa is C or S

SEQ ID NO: 48333 - protein, 37 aa, Artificial Sequence; identical to SEQ ID NO: 13980
  Cyclic GFR-binding peptide
  MOD_RES (2)..(33)..(34): Xaa is C or S

SEQ ID NO: 48334 - protein, 39 aa, Artificial Sequence; identical to SEQ ID NO: 13981
  Cyclic GFR-binding peptide
  MOD_RES (2)..(4)..(36): Xaa is C or S

SEQ ID NO: 48335 - protein, 28 aa, Artificial Sequence
  Cyclic GFR-binding peptide
  MOD_RES (28)..(28): Xaa is C or S
IMNSLQEIKPTKGIYYLITLPELDQSVX

SEQ ID NO: 48336 - protein, 27 aa, Artificial Sequence
  Cyclic GFR-binding peptide
EVVMDNSLQEVVKENEDYYVMPLPELE

SEQ ID NO: 48337 - protein, 31 aa, Artificial Sequence; identical to SEQ ID NO: 13986
  Cyclic GFR-binding peptide
  MOD_RES (27)..(28): Xaa is C or S

SEQ ID NO: 48338 - protein, 24 aa, Artificial Sequence
  Cyclic GFR-binding peptide
NSLQEVKPTRGVYYLITLPELDQP

SEQ ID NO: 48339 - protein, 30 aa, Artificial Sequence; identical to SEQ ID NO: 13987
  Cyclic GFR-binding peptide
  MOD_RES (26)..(27): Xaa is C or S

SEQ ID NO: 48340 - protein, 36 aa, Artificial Sequence; identical to SEQ ID NO: 13988
  Cyclic GFR-binding peptide
  MOD_RES (2)..(4)..(35)..(36): Xaa is C or S

SEQ ID NO: 48341 - protein, 41 aa, Artificial Sequence; identical to SEQ ID NO: 13989
  Cyclic GFR-binding peptide
  MOD_RES (2)..(4)..(36): Xaa is C or S

SEQ ID NO: 48342 - protein, 26 aa, Artificial Sequence
  Cyclic GFR-binding peptide
  MOD_RES (26)..(26): Xaa is C or S
NSLQEVKPTRGVYYLITLPELDQPVX

SEQ ID NO: 48343 - protein, 22 aa, Artificial Sequence
  Cyclic GFR-binding peptide
MNSLQEIKPTKGIYYLITLPEL

SEQ ID NO: 48344 - protein, 28 aa, Artificial Sequence
  Cyclic GFR-binding peptide
  MOD_RES (26)..(27): Xaa is C or S
EYQKYVKPTRGVIFLISIPSLDQPVXXP

SEQ ID NO: 48345 - protein, 37 aa, Artificial Sequence; identical to SEQ ID NO: 3446
  Cyclic GFR-binding peptide
  MOD_RES (2)..(34): Xaa is C or S

SEQ ID NO: 48346 - protein, 36 aa, Artificial Sequence; identical to SEQ ID NO: 13996
  Cyclic GFR-binding peptide
  MOD_RES (32)..(33): Xaa is C or S

SEQ ID NO: 48347 - protein, 38 aa, Artificial Sequence; identical to SEQ ID NO: 3450
  Cyclic GFR-binding peptide
  MOD_RES (1)..(32)..(33): Xaa is C or S

SEQ ID NO: 48348 - protein, 34 aa, Artificial Sequence; identical to SEQ ID NO: 13999
  Cyclic GFR-binding peptide
  MOD_RES (30)..(30): Xaa is C or S

SEQ ID NO: 48349 - protein, 34 aa, Artificial Sequence; identical to SEQ ID NO: 3452
  Cyclic GFR-binding peptide
  MOD_RES (32)..(33): Xaa is C or S

SEQ ID NO: 48350 - protein, 29 aa, Artificial Sequence
  Cyclic GFR-binding peptide
  MOD_RES (1)..(3): Xaa is C or S
XGXARVVMNEYQKYIVNSSDDIFLVSIPS

SEQ ID NO: 48351 - protein, 23 aa, Artificial Sequence
  Cyclic GFR-binding peptide
DRYKKLVVNNASDFYLISIANLR

SEQ ID NO: 48352 - protein, 28 aa, Artificial Sequence
  Cyclic GFR-binding peptide
VVMDNSLQEVVKENEDYYLMTLPELETP

SEQ ID NO: 48353 - protein, 31 aa, Artificial Sequence; identical to SEQ ID NO: 14004
  Cyclic GFR-binding peptide
  MOD_RES (1)..(3): Xaa is C or S

SEQ ID NO: 48354 - protein, 33 aa, Artificial Sequence; identical to SEQ ID NO: 14006
  Cyclic GFR-binding peptide
  MOD_RES (29)..(29): Xaa is C or S

SEQ ID NO: 48355 - protein, 32 aa, Artificial Sequence; identical to SEQ ID NO: 14007
  Cyclic GFR-binding peptide
  MOD_RES (27)..(28): Xaa is C or S

SEQ ID NO: 48356 - protein, 21 aa, Artificial Sequence
  Cyclic GFR-binding peptide
MRYKKLVKPKRGVFYLISIAN

SEQ ID NO: 48357 - protein, 27 aa, Artificial Sequence
  Cyclic GFR-binding peptide
MDNSLQEVVKENEDYYLMTLPELETPV

SEQ ID NO: 48358 - protein, 32 aa, Artificial Sequence; identical to SEQ ID NO: 14011
  Cyclic GFR-binding peptide
  MOD_RES (2)..(2): Xaa is C or S

SEQ ID NO: 48359 - protein, 36 aa, Artificial Sequence; identical to SEQ ID NO: 14013
  Cyclic GFR-binding peptide
  MOD_RES (1)..(3)..(35)..(36): Xaa is C or S

SEQ ID NO: 48360 - protein, 34 aa, Artificial Sequence; identical to SEQ ID NO: 14014
  Cyclic GFR-binding peptide
  MOD_RES (2)..(34): Xaa is C or S

SEQ ID NO: 48361 - protein, 30 aa, Artificial Sequence; identical to SEQ ID NO: 3463
  Cyclic GFR-binding peptide
  MOD_RES (2)..(4): Xaa is C or S

SEQ ID NO: 48362 - protein, 29 aa, Artificial Sequence
  Cyclic GFR-binding peptide
  MOD_RES (29)..(29): Xaa is C or S
VVMNSLQEVKPTRGVYYLITLPELDQPVX

SEQ ID NO: 48363 - protein, 24 aa, Artificial Sequence
  Cyclic GFR-binding peptide
NSLQEVVKENEDYYVMPLPELETP

SEQ ID NO: 48364 - protein, 41 aa, Artificial Sequence; identical to SEQ ID NO: 3470
  Cyclic GFR-binding peptide
  MOD_RES (2)..(4)..(35)..(36): Xaa is C or S

SEQ ID NO: 48365 - protein, 26 aa, Artificial Sequence
  Cyclic GFR-binding peptide
SKVIMNSLQEIKPTKGIYYVIPLPEL

SEQ ID NO: 48366 - protein, 28 aa, Artificial Sequence
  Cyclic GFR-binding peptide
  MOD_RES (27)..(28): Xaa is C or S
MEYQKYVKPKRGVIFLISIPSLAQPVXX

SEQ ID NO: 48367 - protein, 30 aa, Artificial Sequence; identical to SEQ ID NO: 14022
  Cyclic GFR-binding peptide
  MOD_RES (28)..(29): Xaa is C or S

SEQ ID NO: 48368 - protein, 28 aa, Artificial Sequence
  Cyclic GFR-binding peptide
GEVVMERYKKLVVKDYEDFYLMSIANLE

SEQ ID NO: 48369 - protein, 31 aa, Artificial Sequence; identical to SEQ ID NO: 3479
  Cyclic GFR-binding peptide
  MOD_RES (27)..(28): Xaa is C or S

SEQ ID NO: 48370 - protein, 32 aa, Artificial Sequence; identical to SEQ ID NO: 14027
  Cyclic GFR-binding peptide
  MOD_RES (31)..(32): Xaa is C or S

SEQ ID NO: 48371 - protein, 24 aa, Artificial Sequence
  Cyclic GFR-binding peptide
IMNSLQEIKPTKGIYYLITLPELD

SEQ ID NO: 48372 - protein, 35 aa, Artificial Sequence; identical to SEQ ID NO: 14029
  Cyclic GFR-binding peptide
  MOD_RES (1)..(3)..(35): Xaa is C or S

SEQ ID NO: 48373 - protein, 30 aa, Artificial Sequence; identical to SEQ ID NO: 14030
  Cyclic GFR-binding peptide
  MOD_RES (28)..(29): Xaa is C or S

SEQ ID NO: 48374 - protein, 22 aa, Artificial Sequence
  Cyclic GFR-binding peptide
MENSLQEVVKDYEDYYLMTLPE

SEQ ID NO: 48375 - protein, 32 aa, Artificial Sequence; identical to SEQ ID NO: 14032
  Cyclic GFR-binding peptide
  MOD_RES (26)..(27): Xaa is C or S

SEQ ID NO: 48376 - protein, 27 aa, Artificial Sequence
  Cyclic GFR-binding peptide
  MOD_RES (26)..(27): Xaa is C or S
NSLQEVKPKRGVYYLITLPELAQPVXX

SEQ ID NO: 48377 - protein, 31 aa, Artificial Sequence; identical to SEQ ID NO: 3484
  Cyclic GFR-binding peptide
  MOD_RES (2)..(4): Xaa is C or S

SEQ ID NO: 48378 - protein, 30 aa, Artificial Sequence; identical to SEQ ID NO: 14036
  Cyclic GFR-binding peptide
  MOD_RES (27)..(28): Xaa is C or S

SEQ ID NO: 48379 - protein, 29 aa, Artificial Sequence
  Cyclic GFR-binding peptide
  MOD_RES (1)..(1): Xaa is C or S
XSRVVMNNSLQEIVNSSDDYYLVTLPELK

SEQ ID NO: 48380 - protein, 35 aa, Artificial Sequence; identical to SEQ ID NO: 14038
  Cyclic GFR-binding peptide
  MOD_RES (30)..(31): Xaa is C or S

SEQ ID NO: 48381 - protein, 25 aa, Artificial Sequence
  Cyclic GFR-binding peptide
ERYKKLVVKDYEDFYLMSIANLETP

SEQ ID NO: 48382 - protein, 28 aa, Artificial Sequence
  Cyclic GFR-binding peptide
  MOD_RES (1)..(1): Xaa is C or S
XARVVMNNSLQEIVNSSDDYYVVPLPEL

SEQ ID NO: 48383 - protein, 31 aa, Artificial Sequence; identical to SEQ ID NO: 14042
  Cyclic GFR-binding peptide
  MOD_RES (31)..(31): Xaa is C or S

SEQ ID NO: 48384 - protein, 32 aa, Artificial Sequence; identical to SEQ ID NO: 3494
  Cyclic GFR-binding peptide
  MOD_RES (1)..(32): Xaa is C or S

SEQ ID NO: 48385 - protein, 31 aa, Artificial Sequence; identical to SEQ ID NO: 3495
  Cyclic GFR-binding peptide
  MOD_RES (1)..(1): Xaa is C or S

SEQ ID NO: 48386 - protein, 23 aa, Artificial Sequence
  Cyclic GFR-binding peptide
RYKKLVVKDYEDFYLMSIANLET

SEQ ID NO: 48387 - protein, 24 aa, Artificial Sequence
  Cyclic GFR-binding peptide
VVMNEYQKYIVNSSDDIFLVSIPS

SEQ ID NO: 48388 - protein, 30 aa, Artificial Sequence; identical to SEQ ID NO: 3501
  Cyclic GFR-binding peptide
  MOD_RES (27)..(28): Xaa is C or S

SEQ ID NO: 48389 - protein, 35 aa, Artificial Sequence; identical to SEQ ID NO: 14049
  Cyclic GFR-binding peptide
  MOD_RES (2)..(34): Xaa is C or S

SEQ ID NO: 48390 - protein, 40 aa, Artificial Sequence; identical to SEQ ID NO: 3504
  Cyclic GFR-binding peptide
  MOD_RES (1)..(3)..(34)..(35): Xaa is C or S

SEQ ID NO: 48391 - protein, 26 aa, Artificial Sequence
  Cyclic GFR-binding peptide
IMEYQKYIKPTKGIIFLISIPSLDQS

SEQ ID NO: 48392 - protein, 30 aa, Artificial Sequence; identical to SEQ ID NO: 3507
  Cyclic GFR-binding peptide
  MOD_RES (2)..(2): Xaa is C or S

SEQ ID NO: 48393 - protein, 27 aa, Artificial Sequence
  Cyclic GFR-binding peptide
  MOD_RES (26)..(26): Xaa is C or S
RYKKLIVNSSDDFYLVSIANLKTPAXT

SEQ ID NO: 48394 - protein, 28 aa, Artificial Sequence
  Cyclic GFR-binding peptide
  MOD_RES (28)..(28): Xaa is C or S
VMNSLQEVKPTRGVYYLITLPELDQPVX

SEQ ID NO: 48395 - protein, 24 aa, Artificial Sequence
  Cyclic GFR-binding peptide
NNSLQEIVNSSDDYYLVTLPELQT

SEQ ID NO: 48396 - protein, 36 aa, Artificial Sequence; identical to SEQ ID NO: 3514
  Cyclic GFR-binding peptide
  MOD_RES (1)..(33)..(34): Xaa is C or S

SEQ ID NO: 48397 - protein, 25 aa, Artificial Sequence
  Cyclic GFR-binding peptide
VMDEYQKYVVKENEDIFLMSIPSLE

SEQ ID NO: 48398 - protein, 37 aa, Artificial Sequence; identical to SEQ ID NO: 3517
  Cyclic GFR-binding peptide
  MOD_RES (2)..(4)..(35)..(36): Xaa is C or S

SEQ ID NO: 48399 - protein, 34 aa, Artificial Sequence; identical to SEQ ID NO: 14063
  Cyclic GFR-binding peptide
  MOD_RES (1)..(32)..(33): Xaa is C or S

SEQ ID NO: 48400 - protein, 26 aa, Artificial Sequence
  Cyclic GFR-binding peptide
SKVVMNSLQEVKPTRGVYYLITLPEL

SEQ ID NO: 48401 - protein, 28 aa, Artificial Sequence
  Cyclic GFR-binding peptide
  MOD_RES (28)..(28): Xaa is C or S
MNEYQKYIVNSSDDIFLVSIPSLQTPAX

SEQ ID NO: 48402 - protein, 31 aa, Artificial Sequence; identical to SEQ ID NO: 14065
  Cyclic GFR-binding peptide
  MOD_RES (27)..(28): Xaa is C or S

SEQ ID NO: 48403 - protein, 29 aa, Artificial Sequence
  Cyclic GFR-binding peptide
  MOD_RES (1)..(1): Xaa is C or S
XGEVVMDNSLQEVVKENEDYYVMPLPELE

SEQ ID NO: 48404 - protein, 39 aa, Artificial Sequence; identical to SEQ ID NO: 14067
  Cyclic GFR-binding peptide
  MOD_RES (2)..(33)..(34): Xaa is C or S

SEQ ID NO: 48405 - protein, 27 aa, Artificial Sequence
  Cyclic GFR-binding peptide
GEVVMDNSLQEVVKENEDYYLMTLPEL

SEQ ID NO: 48406 - protein, 36 aa, Artificial Sequence; identical to SEQ ID NO: 14069
  Cyclic GFR-binding peptide
  MOD_RES (31)..(31): Xaa is C or S

SEQ ID NO: 48407 - protein, 32 aa, Artificial Sequence; identical to SEQ ID NO: 14070
  Cyclic GFR-binding peptide
  MOD_RES (27)..(28): Xaa is C or S

SEQ ID NO: 48408 - protein, 26 aa, Artificial Sequence
  Cyclic GFR-binding peptide
  MOD_RES (26)..(26): Xaa is C or S
NSLQEVVKDYEDYYLMTLPELETPVX

SEQ ID NO: 48409 - protein, 29 aa, Artificial Sequence
  Cyclic GFR-binding peptide
  MOD_RES (2)..(4): Xaa is C or S
SXKXSRVIMRYKKLVKPKRGVFYLISIAN

SEQ ID NO: 48410 - protein, 28 aa, Artificial Sequence
  Cyclic GFR-binding peptide
  MOD_RES (2)..(2): Xaa is C or S
GXGEVVMEEYQKYVVKDYEDIFLMSIPS

SEQ ID NO: 48411 - protein, 29 aa, Artificial Sequence
  Cyclic GFR-binding peptide
  MOD_RES (2)..(2): Xaa is C or S
GXGEVVMEEYQKYVVKDYEDIFLMSIPSL

SEQ ID NO: 48412 - protein, 35 aa, Artificial Sequence; identical to SEQ ID NO: 14075
  Cyclic GFR-binding peptide
  MOD_RES (29)..(30): Xaa is C or S

SEQ ID NO: 48413 - protein, 27 aa, Artificial Sequence
  Cyclic GFR-binding peptide
VVMDRYKKLVVNNASDFYLISIANLRT

SEQ ID NO: 48414 - protein, 34 aa, Artificial Sequence; identical to SEQ ID NO: 14077
  Cyclic GFR-binding peptide
  MOD_RES (28)..(29): Xaa is C or S

SEQ ID NO: 48415 - protein, 35 aa, Artificial Sequence; identical to SEQ ID NO: 14078
  Cyclic GFR-binding peptide
  MOD_RES (1)..(3)..(35): Xaa is C or S

SEQ ID NO: 48416 - protein, 34 aa, Artificial Sequence
  Cyclic GFR-binding peptide
  MOD_RES (30)..(31): Xaa is C or S
KVVMNSLQEVKPTRGVYYLITLPELDQPVXXPSA

SEQ ID NO: 48417 - protein, 29 aa, Artificial Sequence
  Cyclic GFR-binding peptide
  MOD_RES (1)..(1): Xaa is C or S
XSRVVMNRYKKLIVNSSDDFYLVSIANLK

SEQ ID NO: 48418 - protein, 34 aa, Artificial Sequence; identical to SEQ ID NO: 14080
  Cyclic GFR-binding peptide
  MOD_RES (32)..(33): Xaa is C or S

SEQ ID NO: 48419 - protein, 33 aa, Artificial Sequence; identical to SEQ ID NO: 14082
  Cyclic GFR-binding peptide
  MOD_RES (31)..(32): Xaa is C or S

SEQ ID NO: 48420 - protein, 28 aa, Artificial Sequence
  Cyclic GFR-binding peptide
  MOD_RES (26)..(26): Xaa is C or S
RYKKLIVNSSDDFYLVSIANLKTPAXTP

SEQ ID NO: 48421 - protein, 34 aa, Artificial Sequence; identical to SEQ ID NO: 14084
  Cyclic GFR-binding peptide
  MOD_RES (1)..(32)..(33): Xaa is C or S

SEQ ID NO: 48422 - protein, 30 aa, Artificial Sequence; identical to SEQ ID NO: 14085
  Cyclic GFR-binding peptide
  MOD_RES (1)..(3): Xaa is C or S

SEQ ID NO: 48423 - protein, 29 aa, Artificial Sequence
  Cyclic GFR-binding peptide
  MOD_RES (26)..(27): Xaa is C or S
EYQKYVVKDYEDIFLMSIPSLETPVXXAK

SEQ ID NO: 48424 - protein, 35 aa, Artificial Sequence; identical to SEQ ID NO: 14087
  Cyclic GFR-binding peptide
  MOD_RES (29)..(30): Xaa is C or S

SEQ ID NO: 48425 - protein, 35 aa, Artificial Sequence; identical to SEQ ID NO: 3544
  Cyclic GFR-binding peptide
  MOD_RES (2)..(4)..(35): Xaa is C or S

SEQ ID NO: 48426 - protein, 29 aa, Artificial Sequence
  Cyclic GFR-binding peptide
  MOD_RES (26)..(27): Xaa is C or S
RYKKLVKPTRGVFYLISIANLDQPVXXPS

SEQ ID NO: 48427 - protein, 32 aa, Artificial Sequence; identical to SEQ ID NO: 14091
  Cyclic GFR-binding peptide
  MOD_RES (29)..(30): Xaa is C or S

SEQ ID NO: 48428 - protein, 32 aa, Artificial Sequence; identical to SEQ ID NO: 14092
  Cyclic GFR-binding peptide
  MOD_RES (1)..(1): Xaa is C or S

SEQ ID NO: 48429 - protein, 27 aa, Artificial Sequence
  Cyclic GFR-binding peptide
RVIMNSLQEVKPKRGVYYLITLPELAQ

SEQ ID NO: 48430 - protein, 32 aa, Artificial Sequence; identical to SEQ ID NO: 14095
  Cyclic GFR-binding peptide
  MOD_RES (27)..(28): Xaa is C or S

SEQ ID NO: 48431 - protein, 39 aa, Artificial Sequence; identical to SEQ ID NO: 14096
  Cyclic GFR-binding peptide
  MOD_RES (2)..(4)..(36)..(37): Xaa is C or S

SEQ ID NO: 48432 - protein, 27 aa, Artificial Sequence
  Cyclic GFR-binding peptide
  MOD_RES (1)..(1): Xaa is C or S
XSKVVMRYKKLVKPTRGVFYLISIANL

SEQ ID NO: 48433 - protein, 28 aa, Artificial Sequence
  Cyclic GFR-binding peptide
VMDRYKKLVVKENEDFYLMSIANLETPV

SEQ ID NO: 48434 - protein, 38 aa, Artificial Sequence; identical to SEQ ID NO: 14100
  Cyclic GFR-binding peptide
  MOD_RES (2)..(34)..(35): Xaa is C or S

SEQ ID NO: 48435 - protein, 41 aa, Artificial Sequence; identical to SEQ ID NO: 3561
  Cyclic GFR-binding peptide
  MOD_RES (2)..(4)..(36)..(37): Xaa is C or S

SEQ ID NO: 48436 - protein, 36 aa, Artificial Sequence; identical to SEQ ID NO: 14102
  Cyclic GFR-binding peptide
  MOD_RES (1)..(3)..(34)..(35): Xaa is C or S

SEQ ID NO: 48437 - protein, 41 aa, Artificial Sequence; identical to SEQ ID NO: 3563
  Cyclic GFR-binding peptide
  MOD_RES (1)..(3)..(35): Xaa is C or S

SEQ ID NO: 48438 - protein, 24 aa, Artificial Sequence
  Cyclic GFR-binding peptide
VIMRYKKLVKPKRGVFYLISIANL

SEQ ID NO: 48439 - protein, 37 aa, Artificial Sequence; identical to SEQ ID NO: 14106
  Cyclic GFR-binding peptide
  MOD_RES (32)..(32): Xaa is C or S

SEQ ID NO: 48440 - protein, 31 aa, Artificial Sequence; identical to SEQ ID NO: 14107
  Cyclic GFR-binding peptide
  MOD_RES (26)..(27): Xaa is C or S

SEQ ID NO: 48441 - protein, 36 aa, Artificial Sequence; identical to SEQ ID NO: 14109
  Cyclic GFR-binding peptide
  MOD_RES (1)..(3)..(35)..(36): Xaa is C or S

SEQ ID NO: 48442 - protein, 33 aa, Artificial Sequence; identical to SEQ ID NO: 14110
  Cyclic GFR-binding peptide
  MOD_RES (1)..(33): Xaa is C or S

SEQ ID NO: 48443 - protein, 23 aa, Artificial Sequence
  Cyclic GFR-binding peptide
EYQKYVKPTRGVIFLISIPSLDQ

SEQ ID NO: 48444 - protein, 29 aa, Artificial Sequence
  Cyclic GFR-binding peptide
  MOD_RES (1)..(3): Xaa is C or S
XGXGEVVMENSLQEVVKDYEDYYLMTLPE

SEQ ID NO: 48445 - protein, 27 aa, Artificial Sequence
  Cyclic GFR-binding peptide
KVVMRYKKLVKPTRGVFYLISIANLDQ

SEQ ID NO: 48446 - protein, 32 aa, Artificial Sequence; identical to SEQ ID NO: 14115
  Cyclic GFR-binding peptide
  MOD_RES (30)..(31): Xaa is C or S

SEQ ID NO: 48447 - protein, 35 aa, Artificial Sequence; identical to SEQ ID NO: 14116
  Cyclic GFR-binding peptide
  MOD_RES (1)..(33)..(34): Xaa is C or S

SEQ ID NO: 48448 - protein, 33 aa, Artificial Sequence; identical to SEQ ID NO: 14118
  Cyclic GFR-binding peptide
  MOD_RES (30)..(31): Xaa is C or S

SEQ ID NO: 48449 - protein, 37 aa, Artificial Sequence; identical to SEQ ID NO: 14119
  Cyclic GFR-binding peptide
  MOD_RES (31)..(32): Xaa is C or S

SEQ ID NO: 48450 - protein, 22 aa, Artificial Sequence
  Cyclic GFR-binding peptide
MNSLQEIKPTKGIYYVIPLPEL

SEQ ID NO: 48451 - protein, 40 aa, Artificial Sequence; identical to SEQ ID NO: 14122
  Cyclic GFR-binding peptide
  MOD_RES (2)..(4)..(36)..(37): Xaa is C or S

SEQ ID NO: 48452 - protein, 35 aa, Artificial Sequence; identical to SEQ ID NO: 3581
  Cyclic GFR-binding peptide
  MOD_RES (30)..(31): Xaa is C or S

SEQ ID NO: 48453 - protein, 27 aa, Artificial Sequence
  Cyclic GFR-binding peptide
  MOD_RES (27)..(27): Xaa is C or S
MNSLQEVKPTRGVYYVIPLPELDQPVX

SEQ ID NO: 48454 - protein, 26 aa, Artificial Sequence
  Cyclic GFR-binding peptide
VVMNEYQKYIVNSSDDIFLVSIPSLK

SEQ ID NO: 48455 - protein, 36 aa, Artificial Sequence; identical to SEQ ID NO: 14127
  Cyclic GFR-binding peptide
  MOD_RES (1)..(3)..(35)..(36): Xaa is C or S

SEQ ID NO: 48456 - protein, 28 aa, Artificial Sequence
  Cyclic GFR-binding peptide
  MOD_RES (2)..(2): Xaa is C or S
GXARVVMNNSLQEIVNSSDDYYVVPLPE

SEQ ID NO: 48457 - protein, 23 aa, Artificial Sequence
  Cyclic GFR-binding peptide
MDNSLQEVVNNASDYYLITLPEL

SEQ ID NO: 48458 - protein, 26 aa, Artificial Sequence
  Cyclic GFR-binding peptide
VVMNSLQEVKPTRGVYYLITLPELDQ

SEQ ID NO: 48459 - protein, 22 aa, Artificial Sequence
  Cyclic GFR-binding peptide
DRYKKLVVNNASDFYLISIANL

SEQ ID NO: 48460 - protein, 30 aa, Artificial Sequence; identical to SEQ ID NO: 14132
  Cyclic GFR-binding peptide
  MOD_RES (30)..(30): Xaa is C or S

SEQ ID NO: 48461 - protein, 36 aa, Artificial Sequence; identical to SEQ ID NO: 14133
  Cyclic GFR-binding peptide
  MOD_RES (30)..(31): Xaa is C or S

SEQ ID NO: 48462 - protein, 24 aa, Artificial Sequence
  Cyclic GFR-binding peptide
RVIMEYQKYVKPKRGVIFLISIPS

SEQ ID NO: 48463 - protein, 27 aa, Artificial Sequence
  Cyclic GFR-binding peptide
EVVMENSLQEVVKDYEDYYLMTLPELE

SEQ ID NO: 48464 - protein, 38 aa, Artificial Sequence; identical to SEQ ID NO: 14136
  Cyclic GFR-binding peptide
  MOD_RES (2)..(34)..(35): Xaa is C or S

SEQ ID NO: 48465 - protein, 39 aa, Artificial Sequence; identical to SEQ ID NO: 14137
  Cyclic GFR-binding peptide
  MOD_RES (2)..(33)..(34): Xaa is C or S

SEQ ID NO: 48466 - protein, 28 aa, Artificial Sequence
  Cyclic GFR-binding peptide
SKVVMNSLQEVKPTRGVYYVIPLPELDQ

SEQ ID NO: 48467 - protein, 24 aa, Artificial Sequence
  Cyclic GFR-binding peptide
MDNSLQEVVNNASDYYVIPLPELR

SEQ ID NO: 48468 - protein, 25 aa, Artificial Sequence
  Cyclic GFR-binding peptide
MNSLQEVKPKRGVYYLITLPELAQP

SEQ ID NO: 48469 - protein, 28 aa, Artificial Sequence
  Cyclic GFR-binding peptide
  MOD_RES (26)..(27): Xaa is C or S
RYKKLVVKENEDFYLMSIANLETPVXXA

SEQ ID NO: 48470 - protein, 30 aa, Artificial Sequence; identical to SEQ ID NO: 14143
  Cyclic GFR-binding peptide
  MOD_RES (30)..(30): Xaa is C or S

SEQ ID NO: 48471 - protein, 36 aa, Artificial Sequence; identical to SEQ ID NO: 14144
  Cyclic GFR-binding peptide
  MOD_RES (2)..(33)..(34): Xaa is C or S

SEQ ID NO: 48472 - protein, 36 aa, Artificial Sequence; identical to SEQ ID NO: 14145
  Cyclic GFR-binding peptide
  MOD_RES (1)..(33)..(34): Xaa is C or S

SEQ ID NO: 48473 - protein, 25 aa, Artificial Sequence
  Cyclic GFR-binding peptide
IMEYQKYIKPTKGIIFLISIPSLDQ

SEQ ID NO: 48474 - protein, 31 aa, Artificial Sequence; identical to SEQ ID NO: 14148
  Cyclic GFR-binding peptide
  MOD_RES (31)..(31): Xaa is C or S

SEQ ID NO: 48475 - protein, 36 aa, Artificial Sequence; identical to SEQ ID NO: 14150
  Cyclic GFR-binding peptide
  MOD_RES (2)..(33)..(34): Xaa is C or S

SEQ ID NO: 48476 - protein, 30 aa, Artificial Sequence; identical to SEQ ID NO: 3602
  Cyclic GFR-binding peptide
  MOD_RES (1)..(3): Xaa is C or S

SEQ ID NO: 48477 - protein, 26 aa, Artificial Sequence
  Cyclic GFR-binding peptide
VVMDEYQKYVVKENEDIFLMSIPSLE

SEQ ID NO: 48478 - protein, 40 aa, Artificial Sequence; identical to SEQ ID NO: 14153
  Cyclic GFR-binding peptide
  MOD_RES (2)..(4)..(36)..(37): Xaa is C or S

SEQ ID NO: 48479 - protein, 31 aa, Artificial Sequence; identical to SEQ ID NO: 14154
  Cyclic GFR-binding peptide
  MOD_RES (1)..(1): Xaa is C or S

SEQ ID NO: 48480 - protein, 29 aa, Artificial Sequence
  Cyclic GFR-binding peptide
  MOD_RES (27)..(28): Xaa is C or S
DRYKKLVVNNASDFYLISIANLRTPVXXT

SEQ ID NO: 48481 - protein, 31 aa, Artificial Sequence; identical to SEQ ID NO: 3606
  Cyclic GFR-binding peptide
  MOD_RES (29)..(30): Xaa is C or S

SEQ ID NO: 48482 - protein, 35 aa, Artificial Sequence; identical to SEQ ID NO: 14158
  Cyclic GFR-binding peptide
  MOD_RES (1)..(3)..(35): Xaa is C or S

SEQ ID NO: 48483 - protein, 22 aa, Artificial Sequence
  Cyclic GFR-binding peptide
VMRYKKLVKPTRGVFYLISIAN

SEQ ID NO: 48484 - protein, 35 aa, Artificial Sequence; identical to SEQ ID NO: 14163
  Cyclic GFR-binding peptide
  MOD_RES (2)..(34)..(35): Xaa is C or S

SEQ ID NO: 48485 - protein, 37 aa, Artificial Sequence; identical to SEQ ID NO: 14164
  Cyclic GFR-binding peptide
  MOD_RES (2)..(34)..(35): Xaa is C or S

SEQ ID NO: 48486 - protein, 24 aa, Artificial Sequence
  Cyclic GFR-binding peptide
MEEYQKYVVKDYEDIFLMSIPSLE

SEQ ID NO: 48487 - protein, 40 aa, Artificial Sequence; identical to SEQ ID NO: 14167
  Cyclic GFR-binding peptide
  MOD_RES (2)..(4)..(35)..(36): Xaa is C or S

SEQ ID NO: 48488 - protein, 39 aa, Artificial Sequence; identical to SEQ ID NO: 14170
  Cyclic GFR-binding peptide
  MOD_RES (2)..(4)..(36)..(37): Xaa is C or S

SEQ ID NO: 48489 - protein, 31 aa, Artificial Sequence; identical to SEQ ID NO: 3624
  Cyclic GFR-binding peptide
  MOD_RES (28)..(29): Xaa is C or S

SEQ ID NO: 48490 - protein, 32 aa, Artificial Sequence; identical to SEQ ID NO: 14172
  Cyclic GFR-binding peptide
  MOD_RES (28)..(28): Xaa is C or S

SEQ ID NO: 48491 - protein, 33 aa, Artificial Sequence; identical to SEQ ID NO: 3631
  Cyclic GFR-binding peptide
  MOD_RES (2)..(33): Xaa is C or S

SEQ ID NO: 48492 - protein, 30 aa, Artificial Sequence; identical to SEQ ID NO: 3633
  Cyclic GFR-binding peptide
  MOD_RES (2)..(4): Xaa is C or S

SEQ ID NO: 48493 - protein, 28 aa, Artificial Sequence
  Cyclic GFR-binding peptide
VIMEYQKYIKPTKGIIFLISIPSLDQSV

SEQ ID NO: 48494 - protein, 33 aa, Artificial Sequence; identical to SEQ ID NO: 3636
  Cyclic GFR-binding peptide
  MOD_RES (2)..(33): Xaa is C or S

SEQ ID NO: 48495 - protein, 28 aa, Artificial Sequence
  Cyclic GFR-binding peptide
  MOD_RES (26)..(27): Xaa is C or S
NSLQEVVKDYEDYYVMPLPELETPVXXA

SEQ ID NO: 48496 - protein, 32 aa, Artificial Sequence; identical to SEQ ID NO: 14183
  Cyclic GFR-binding peptide
  MOD_RES (30)..(31): Xaa is C or S

SEQ ID NO: 48497 - protein, 24 aa, Artificial Sequence
  Cyclic GFR-binding peptide
VMDEYQKYVVKENEDIFLMSIPSL

SEQ ID NO: 48498 - protein, 39 aa, Artificial Sequence; identical to SEQ ID NO: 14185
  Cyclic GFR-binding peptide
  MOD_RES (2)..(34)..(35): Xaa is C or S

SEQ ID NO: 48499 - protein, 40 aa, Artificial Sequence; identical to SEQ ID NO: 3646
  Cyclic GFR-binding peptide
  MOD_RES (2)..(4)..(36)..(37): Xaa is C or S

SEQ ID NO: 48500 - protein, 36 aa, Artificial Sequence; identical to SEQ ID NO: 14188
  Cyclic GFR-binding peptide
  MOD_RES (1)..(3)..(35)..(36): Xaa is C or S

SEQ ID NO: 48501 - protein, 32 aa, Artificial Sequence; identical to SEQ ID NO: 3648
  Cyclic GFR-binding peptide
  MOD_RES (31)..(32): Xaa is C or S

SEQ ID NO: 48502 - protein, 32 aa, Artificial Sequence; identical to SEQ ID NO: 14190
  Cyclic GFR-binding peptide
  MOD_RES (27)..(28): Xaa is C or S

SEQ ID NO: 48503 - protein, 33 aa, Artificial Sequence; identical to SEQ ID NO: 14191
  Cyclic GFR-binding peptide
  MOD_RES (29)..(30): Xaa is C or S

SEQ ID NO: 48504 - protein, 28 aa, Artificial Sequence
  Cyclic GFR-binding peptide
VMENSLQEVVKDYEDYYVMPLPELETPV

SEQ ID NO: 48505 - protein, 29 aa, Artificial Sequence
  Cyclic GFR-binding peptide
SKVIMNSLQEIKPTKGIYYLITLPELDQS

SEQ ID NO: 48506 - protein, 28 aa, Artificial Sequence
  Cyclic GFR-binding peptide
  MOD_RES (26)..(27): Xaa is C or S
EYQKYVKPKRGVIFLISIPSLAQPVXXP

SEQ ID NO: 48507 - protein, 26 aa, Artificial Sequence
  Cyclic GFR-binding peptide
RVVMNEYQKYIVNSSDDIFLVSIPSL

SEQ ID NO: 48508 - protein, 32 aa, Artificial Sequence; identical to SEQ ID NO: 3653
  Cyclic GFR-binding peptide
  MOD_RES (1)..(1): Xaa is C or S

SEQ ID NO: 48509 - protein, 35 aa, Artificial Sequence; identical to SEQ ID NO: 14197
  Cyclic GFR-binding peptide
  MOD_RES (29)..(30): Xaa is C or S

SEQ ID NO: 48510 - protein, 23 aa, Artificial Sequence
  Cyclic GFR-binding peptide
RYKKLVKPKRGVFYLISIANLAQ

SEQ ID NO: 48511 - protein, 36 aa, Artificial Sequence; identical to SEQ ID NO: 14200
  Cyclic GFR-binding peptide
  MOD_RES (2)..(33)..(34): Xaa is C or S

SEQ ID NO: 48512 - protein, 29 aa, Artificial Sequence
  Cyclic GFR-binding peptide
  MOD_RES (27)..(28): Xaa is C or S
DEYQKYVVKENEDIFLMSIPSLETPVXXA

SEQ ID NO: 48513 - protein, 30 aa, Artificial Sequence; identical to SEQ ID NO: 14202
  Cyclic GFR-binding peptide
  MOD_RES (28)..(29): Xaa is C or S

SEQ ID NO: 48514 - protein, 34 aa, Artificial Sequence; identical to SEQ ID NO: 14203
  Cyclic GFR-binding peptide
  MOD_RES (29)..(29): Xaa is C or S

SEQ ID NO: 48515 - protein, 27 aa, Artificial Sequence
  Cyclic GFR-binding peptide
VVMEYQKYVKPTRGVIFLISIPSLDQP

SEQ ID NO: 48516 - protein, 32 aa, Artificial Sequence; identical to SEQ ID NO: 14206
  Cyclic GFR-binding peptide
  MOD_RES (29)..(30): Xaa is C or S

SEQ ID NO: 48517 - protein, 33 aa, Artificial Sequence; identical to SEQ ID NO: 14208
  Cyclic GFR-binding peptide
  MOD_RES (2)..(2): Xaa is C or S

SEQ ID NO: 48518 - protein, 24 aa, Artificial Sequence
  Cyclic GFR-binding peptide
VVMENSLQEVVKDYEDYYLMTLPE

SEQ ID NO: 48519 - protein, 28 aa, Artificial Sequence
  Cyclic GFR-binding peptide
  MOD_RES (1)..(1): Xaa is C or S
XSEVVMDNSLQEVVNNASDYYLITLPEL

SEQ ID NO: 48520 - protein, 26 aa, Artificial Sequence
  Cyclic GFR-binding peptide
MDEYQKYVVKENEDIFLMSIPSLETP

SEQ ID NO: 48521 - protein, 27 aa, Artificial Sequence
  Cyclic GFR-binding peptide
MDEYQKYVVKENEDIFLMSIPSLETPV

SEQ ID NO: 48522 - protein, 24 aa, Artificial Sequence
  Cyclic GFR-binding peptide
RYKKLIVNSSDDFYLVSIANLKTP

SEQ ID NO: 48523 - protein, 30 aa, Artificial Sequence; identical to SEQ ID NO: 14215
  Cyclic GFR-binding peptide
  MOD_RES (26)..(27): Xaa is C or S

SEQ ID NO: 48524 - protein, 31 aa, Artificial Sequence; identical to SEQ ID NO: 14218
  Cyclic GFR-binding peptide
  MOD_RES (2)..(2): Xaa is C or S

SEQ ID NO: 48525 - protein, 33 aa, Artificial Sequence; identical to SEQ ID NO: 14220
  Cyclic GFR-binding peptide
  MOD_RES (29)..(30): Xaa is C or S

SEQ ID NO: 48526 - protein, 28 aa, Artificial Sequence
  Cyclic GFR-binding peptide
KVIMNSLQEIKPTKGIYYLITLPELDQS

SEQ ID NO: 48527 - protein, 37 aa, Artificial Sequence; identical to SEQ ID NO: 14222
  Cyclic GFR-binding peptide
  MOD_RES (2)..(34)..(35): Xaa is C or S

SEQ ID NO: 48528 - protein, 31 aa, Artificial Sequence; identical to SEQ ID NO: 14223
  Cyclic GFR-binding peptide
  MOD_RES (2)..(2): Xaa is C or S

SEQ ID NO: 48529 - protein, 28 aa, Artificial Sequence
  Cyclic GFR-binding peptide
  MOD_RES (1)..(3): Xaa is C or S
XKXSRVIMRYKKLVKPKRGVFYLISIAN

SEQ ID NO: 48530 - protein, 27 aa, Artificial Sequence
  Cyclic GFR-binding peptide
VMENSLQEVVKDYEDYYLMTLPELETP

SEQ ID NO: 48531 - protein, 27 aa, Artificial Sequence
  Cyclic GFR-binding peptide
VIMNSLQEIKPTKGIYYLITLPELDQS

SEQ ID NO: 48532 - protein, 26 aa, Artificial Sequence
  Cyclic GFR-binding peptide
  MOD_RES (26)..(26): Xaa is C or S
EYQKYVVKENEDIFLMSIPSLETPVX

SEQ ID NO: 48533 - protein, 23 aa, Artificial Sequence
  Cyclic GFR-binding peptide
IMNSLQEVKPKRGVYYLITLPEL

SEQ ID NO: 48534 - protein, 25 aa, Artificial Sequence
  Cyclic GFR-binding peptide
RVVMNEYQKYIVNSSDDIFLVSIPS

SEQ ID NO: 48535 - protein, 32 aa, Artificial Sequence; identical to SEQ ID NO: 14235
  Cyclic GFR-binding peptide
  MOD_RES (31)..(32): Xaa is C or S

SEQ ID NO: 48536 - protein, 32 aa, Artificial Sequence
  Cyclic GFR-binding peptide
  MOD_RES (1)..(3): Xaa is C or S
XKXSKVVMNSLQEVKPTRGVYYLITLPELDQP

SEQ ID NO: 48537 - protein, 36 aa, Artificial Sequence; identical to SEQ ID NO: 14236
  Cyclic GFR-binding peptide
  MOD_RES (2)..(34)..(35): Xaa is C or S

SEQ ID NO: 48538 - protein, 34 aa, Artificial Sequence; identical to SEQ ID NO: 3711
  Cyclic GFR-binding peptide
  MOD_RES (1)..(32)..(33): Xaa is C or S

SEQ ID NO: 48539 - protein, 34 aa, Artificial Sequence; identical to SEQ ID NO: 14238
  Cyclic GFR-binding peptide
  MOD_RES (1)..(3): Xaa is C or S

SEQ ID NO: 48540 - protein, 37 aa, Artificial Sequence; identical to SEQ ID NO: 14240
  Cyclic GFR-binding peptide
  MOD_RES (31)..(32): Xaa is C or S

SEQ ID NO: 48541 - protein, 28 aa, Artificial Sequence
  Cyclic GFR-binding peptide
SEVVMDNSLQEVVNNASDYYLITLPELR

SEQ ID NO: 48542 - protein, 36 aa, Artificial Sequence; identical to SEQ ID NO: 3718
  Cyclic GFR-binding peptide
  MOD_RES (31)..(32): Xaa is C or S

SEQ ID NO: 48543 - protein, 33 aa, Artificial Sequence; identical to SEQ ID NO: 14243
  Cyclic GFR-binding peptide
  MOD_RES (31)..(32): Xaa is C or S

SEQ ID NO: 48544 - protein, 34 aa, Artificial Sequence; identical to SEQ ID NO: 14244
  Cyclic GFR-binding peptide
  MOD_RES (30)..(31): Xaa is C or S

SEQ ID NO: 48545 - protein, 28 aa, Artificial Sequence
  Cyclic GFR-binding peptide
VIMNSLQEIKPTKGIYYVIPLPELDQSV

SEQ ID NO: 48546 - protein, 26 aa, Artificial Sequence
  Cyclic GFR-binding peptide
EVVMDEYQKYVVKENEDIFLMSIPSL

SEQ ID NO: 48547 - protein, 38 aa, Artificial Sequence; identical to SEQ ID NO: 14247
  Cyclic GFR-binding peptide
  MOD_RES (2)..(4)..(35)..(36): Xaa is C or S

SEQ ID NO: 48548 - protein, 31 aa, Artificial Sequence; identical to SEQ ID NO: 14248
  Cyclic GFR-binding peptide
  MOD_RES (26)..(27): Xaa is C or S

SEQ ID NO: 48549 - protein, 28 aa, Artificial Sequence
  Cyclic GFR-binding peptide
  MOD_RES (28)..(28): Xaa is C or S
IMEYQKYVKPKRGVIFLISIPSLAQPVX

SEQ ID NO: 48550 - protein, 35 aa, Artificial Sequence; identical to SEQ ID NO: 14250
  Cyclic GFR-binding peptide
  MOD_RES (30)..(31): Xaa is C or S

SEQ ID NO: 48551 - protein, 25 aa, Artificial Sequence
  Cyclic GFR-binding peptide
SKVVMNSLQEVKPTRGVYYLITLPE

SEQ ID NO: 48552 - protein, 34 aa, Artificial Sequence; identical to SEQ ID NO: 14253
  Cyclic GFR-binding peptide
  MOD_RES (31)..(32): Xaa is C or S

SEQ ID NO: 48553 - protein, 23 aa, Artificial Sequence
  Cyclic GFR-binding peptide
VMNNSLQEIVNSSDDYYLVTLPE

SEQ ID NO: 48554 - protein, 26 aa, Artificial Sequence
  Cyclic GFR-binding peptide
MDRYKKLVVNNASDFYLISIANLRTP

SEQ ID NO: 48555 - protein, 32 aa, Artificial Sequence
  Cyclic GFR-binding peptide
  MOD_RES (1)..(32): Xaa is C or S
XSKVVMNSLQEVKPTRGVYYLITLPELDQPVX

SEQ ID NO: 48556 - protein, 36 aa, Artificial Sequence; identical to SEQ ID NO: 14259
  Cyclic GFR-binding peptide
  MOD_RES (30)..(31): Xaa is C or S

SEQ ID NO: 48557 - protein, 36 aa, Artificial Sequence; identical to SEQ ID NO: 14260
  Cyclic GFR-binding peptide
  MOD_RES (31)..(32): Xaa is C or S

SEQ ID NO: 48558 - protein, 28 aa, Artificial Sequence
  Cyclic GFR-binding peptide
  MOD_RES (28)..(28): Xaa is C or S
MDNSLQEVVNNASDYYLITLPELRTPVX

SEQ ID NO: 48559 - protein, 37 aa, Artificial Sequence; identical to SEQ ID NO: 14262
  Cyclic GFR-binding peptide
  MOD_RES (2)..(34)..(35): Xaa is C or S

SEQ ID NO: 48560 - protein, 34 aa, Artificial Sequence; identical to SEQ ID NO: 14264
  Cyclic GFR-binding peptide
  MOD_RES (1)..(3): Xaa is C or S

SEQ ID NO: 48561 - protein, 28 aa, Artificial Sequence
  Cyclic GFR-binding peptide
  MOD_RES (28)..(28): Xaa is C or S
MNRYKKLIVNSSDDFYLVSIANLKTPAX

SEQ ID NO: 48562 - protein, 27 aa, Artificial Sequence
  Cyclic GFR-binding peptide
SKVIMEYQKYIKPTKGIIFLISIPSLD

SEQ ID NO: 48563 - protein, 35 aa, Artificial Sequence; identical to SEQ ID NO: 14267
  Cyclic GFR-binding peptide
  MOD_RES (31)..(31): Xaa is C or S

SEQ ID NO: 48564 - protein, 30 aa, Artificial Sequence; identical to SEQ ID NO: 14268
  Cyclic GFR-binding peptide

SEQ ID NO: 48565 - protein, 35 aa, Artificial Sequence; identical to SEQ ID NO: 14269
  Cyclic GFR-binding peptide
  MOD_RES (2)..(4): Xaa is C or S

SEQ ID NO: 48566 - protein, 33 aa, Artificial Sequence; identical to SEQ ID NO: 14270
  Cyclic GFR-binding peptide
  MOD_RES (29)..(29): Xaa is C or S

SEQ ID NO: 48567 - protein, 30 aa, Artificial Sequence; identical to SEQ ID NO: 14273
  Cyclic GFR-binding peptide
  MOD_RES (26)..(27): Xaa is C or S

SEQ ID NO: 48568 - protein, 37 aa, Artificial Sequence; identical to SEQ ID NO: 3765
  Cyclic GFR-binding peptide
  MOD_RES (2)..(34)..(35): Xaa is C or S

SEQ ID NO: 48569 - protein, 32 aa, Artificial Sequence; identical to SEQ ID NO: 14277
  Cyclic GFR-binding peptide
  MOD_RES (28)..(29): Xaa is C or S

SEQ ID NO: 48570 - protein, 39 aa, Artificial Sequence; identical to SEQ ID NO: 14278
  Cyclic GFR-binding peptide
  MOD_RES (2)..(33)..(34): Xaa is C or S

SEQ ID NO: 48571 - protein, 28 aa, Artificial Sequence
  Cyclic GFR-binding peptide
VIMNSLQEVKPKRGVYYLITLPELAQPV

SEQ ID NO: 48572 - protein, 37 aa, Artificial Sequence; identical to SEQ ID NO: 14281
  Cyclic GFR-binding peptide
  MOD_RES (2)..(33)..(34): Xaa is C or S

SEQ ID NO: 48573 - protein, 25 aa, Artificial Sequence
  Cyclic GFR-binding peptide
MNNSLQEIVNSSDDYYLVTLPELQT

SEQ ID NO: 48574 - protein, 28 aa, Artificial Sequence
  Cyclic GFR-binding peptide
VVMRYKKLVKPTRGVFYLISIANLDQPV

SEQ ID NO: 48575 - protein, 29 aa, Artificial Sequence
  Cyclic GFR-binding peptide
  MOD_RES (26)..(27): Xaa is C or S
NSLQEIKPTKGIYYVIPLPELDQSVXXPS

SEQ ID NO: 48576 - protein, 27 aa, Artificial Sequence
  Cyclic GFR-binding peptide
SKVVMRYKKLVKPTRGVFYLISIANLD

SEQ ID NO: 48577 - protein, 35 aa, Artificial Sequence; identical to SEQ ID NO: 14293
  Cyclic GFR-binding peptide
  MOD_RES (32)..(33): Xaa is C or S

SEQ ID NO: 48578 - protein, 36 aa, Artificial Sequence; identical to SEQ ID NO: 14294
  Cyclic GFR-binding peptide
  MOD_RES (30)..(30): Xaa is C or S

SEQ ID NO: 48579 - protein, 36 aa, Artificial Sequence; identical to SEQ ID NO: 14297
  Cyclic GFR-binding peptide
  MOD_RES (31)..(32): Xaa is C or S

SEQ ID NO: 48580 - protein, 35 aa, Artificial Sequence; identical to SEQ ID NO: 3792
  Cyclic GFR-binding peptide
  MOD_RES (2)..(34)..(35): Xaa is C or S

SEQ ID NO: 48581 - protein, 36 aa, Artificial Sequence; identical to SEQ ID NO: 14299
  Cyclic GFR-binding peptide
  MOD_RES (30)..(31): Xaa is C or S

SEQ ID NO: 48582 - protein, 33 aa, Artificial Sequence; identical to SEQ ID NO: 14301
  Cyclic GFR-binding peptide
  MOD_RES (28)..(28): Xaa is C or S

SEQ ID NO: 48583 - protein, 25 aa, Artificial Sequence
  Cyclic GFR-binding peptide
IMRYKKLVKPKRGVFYLISIANLAQ

SEQ ID NO: 48584 - protein, 38 aa, Artificial Sequence; identical to SEQ ID NO: 14303
  Cyclic GFR-binding peptide
  MOD_RES (32)..(33): Xaa is C or S

SEQ ID NO: 48585 - protein, 25 aa, Artificial Sequence
  Cyclic GFR-binding peptide
VVMENSLQEVVKDYEDYYLMTLPEL

SEQ ID NO: 48586 - protein, 34 aa, Artificial Sequence; identical to SEQ ID NO: 3801
  Cyclic GFR-binding peptide
  MOD_RES (2)..(34): Xaa is C or S

SEQ ID NO: 48587 - protein, 28 aa, Artificial Sequence
  Cyclic GFR-binding peptide
VMDNSLQEVVNNASDYYLITLPELRTPV

SEQ ID NO: 48588 - protein, 22 aa, Artificial Sequence
  Cyclic GFR-binding peptide
NSLQEIVNSSDDYYVVPLPELQ

SEQ ID NO: 48589 - protein, 32 aa, Artificial Sequence; identical to SEQ ID NO: 14311
  Cyclic GFR-binding peptide
  MOD_RES (1)..(1): Xaa is C or S

SEQ ID NO: 48590 - protein, 35 aa, Artificial Sequence; identical to SEQ ID NO: 3805
  Cyclic GFR-binding peptide
  MOD_RES (1)..(3)..(34)..(35): Xaa is C or S

SEQ ID NO: 48591 - protein, 32 aa, Artificial Sequence; identical to SEQ ID NO: 14314
  Cyclic GFR-binding peptide
  MOD_RES (32)..(32): Xaa is C or S

SEQ ID NO: 48592 - protein, 21 aa, Artificial Sequence
  Cyclic GFR-binding peptide
MNSLQEVKPTRGVYYLITLPE

SEQ ID NO: 48593 - protein, 29 aa, Artificial Sequence
  Cyclic GFR-binding peptide
RVVMNNSLQEIVNSSDDYYVVPLPELQTP

SEQ ID NO: 48594 - protein, 39 aa, Artificial Sequence; identical to SEQ ID NO: 14317
  Cyclic GFR-binding peptide
  MOD_RES (2)..(4)..(36)..(37): Xaa is C or S

SEQ ID NO: 48595 - protein, 38 aa, Artificial Sequence; identical to SEQ ID NO: 14318
  Cyclic GFR-binding peptide
  MOD_RES (1)..(32)..(33): Xaa is C or S

SEQ ID NO: 48596 - protein, 31 aa, Artificial Sequence; identical to SEQ ID NO: 14320
  Cyclic GFR-binding peptide
  MOD_RES (29)..(29): Xaa is C or S

SEQ ID NO: 48597 - protein, 33 aa, Artificial Sequence; identical to SEQ ID NO: 3813
  Cyclic GFR-binding peptide
  MOD_RES (31)..(32): Xaa is C or S

SEQ ID NO: 48598 - protein, 24 aa, Artificial Sequence
  Cyclic GFR-binding peptide
VMDNSLQEVVKENEDYYVMPLPEL

SEQ ID NO: 48599 - protein, 25 aa, Artificial Sequence
  Cyclic GFR-binding peptide
NSLQEVVNNASDYYLITLPELRTPV

SEQ ID NO: 48600 - protein, 32 aa, Artificial Sequence; identical to SEQ ID NO: 14325
  Cyclic GFR-binding peptide
  MOD_RES (30)..(31): Xaa is C or S

SEQ ID NO: 48601 - protein, 38 aa, Artificial Sequence; identical to SEQ ID NO: 14328
  Cyclic GFR-binding peptide
  MOD_RES (2)..(4)..(36)..(37): Xaa is C or S

SEQ ID NO: 48602 - protein, 36 aa, Artificial Sequence; identical to SEQ ID NO: 14331
  Cyclic GFR-binding peptide
  MOD_RES (30)..(31): Xaa is C or S

SEQ ID NO: 48603 - protein, 34 aa, Artificial Sequence; identical to SEQ ID NO: 14332
  Cyclic GFR-binding peptide
  MOD_RES (1)..(3): Xaa is C or S

SEQ ID NO: 48604 - protein, 34 aa, Artificial Sequence; identical to SEQ ID NO: 14333
  Cyclic GFR-binding peptide
  MOD_RES (1)..(32)..(33): Xaa is C or S

SEQ ID NO: 48605 - protein, 36 aa, Artificial Sequence; identical to SEQ ID NO: 14335
  Cyclic GFR-binding peptide
  MOD_RES (1)..(3)..(34)..(35): Xaa is C or S

SEQ ID NO: 48606 - protein, 38 aa, Artificial Sequence; identical to SEQ ID NO: 3825
  Cyclic GFR-binding peptide
  MOD_RES (2)..(33)..(34): Xaa is C or S

SEQ ID NO: 48607 - protein, 27 aa, Artificial Sequence
  Cyclic GFR-binding peptide
  MOD_RES (27)..(27): Xaa is C or S
ENSLQEVVKDYEDYYLMTLPELETPVX

SEQ ID NO: 48608 - protein, 25 aa, Artificial Sequence
  Cyclic GFR-binding peptide
VVMERYKKLVVKDYEDFYLMSIANL

SEQ ID NO: 48609 - protein, 25 aa, Artificial Sequence
  Cyclic GFR-binding peptide
KVVMRYKKLVKPTRGVFYLISIANL

SEQ ID NO: 48610 - protein, 37 aa, Artificial Sequence; identical to SEQ ID NO: 14343
  Cyclic GFR-binding peptide
  MOD_RES (31)..(31): Xaa is C or S

SEQ ID NO: 48611 - protein, 20 aa, Artificial Sequence
  Cyclic GFR-binding peptide
NSLQEIVNSSDDYYVVPLPE

SEQ ID NO: 48612 - protein, 38 aa, Artificial Sequence; identical to SEQ ID NO: 14345
  Cyclic GFR-binding peptide
  MOD_RES (2)..(4)..(36)..(37): Xaa is C or S

SEQ ID NO: 48613 - protein, 29 aa, Artificial Sequence
  Cyclic GFR-binding peptide
  MOD_RES (29)..(29): Xaa is C or S
VMNNSLQEIVNSSDDYYVVPLPELQTPAX

SEQ ID NO: 48614 - protein, 23 aa, Artificial Sequence
  Cyclic GFR-binding peptide
MEYQKYVKPTRGVIFLISIPSLD

SEQ ID NO: 48615 - protein, 38 aa, Artificial Sequence; identical to SEQ ID NO: 14348
  Cyclic GFR-binding peptide
  MOD_RES (32)..(33): Xaa is C or S

SEQ ID NO: 48616 - protein, 33 aa, Artificial Sequence; identical to SEQ ID NO: 3842
  Cyclic GFR-binding peptide
  MOD_RES (1)..(32)..(33): Xaa is C or S

SEQ ID NO: 48617 - protein, 27 aa, Artificial Sequence
  Cyclic GFR-binding peptide
  MOD_RES (26)..(26): Xaa is C or S
NSLQEIVNSSDDYYVVPLPELKTPAXT

SEQ ID NO: 48618 - protein, 31 aa, Artificial Sequence; identical to SEQ ID NO: 14351
  Cyclic GFR-binding peptide

SEQ ID NO: 48619 - protein, 32 aa, Artificial Sequence; identical to SEQ ID NO: 14352
  Cyclic GFR-binding peptide
  MOD_RES (26)..(27): Xaa is C or S

SEQ ID NO: 48620 - protein, 32 aa, Artificial Sequence; identical to SEQ ID NO: 14353
  Cyclic GFR-binding peptide
  MOD_RES (30)..(31): Xaa is C or S

SEQ ID NO: 48621 - protein, 20 aa, Artificial Sequence
  Cyclic GFR-binding peptide
NSLQEVVNNASDYYLITLPE

SEQ ID NO: 48622 - protein, 36 aa, Artificial Sequence; identical to SEQ ID NO: 14355
  Cyclic GFR-binding peptide
  MOD_RES (1)..(33)..(34): Xaa is C or S

SEQ ID NO: 48623 - protein, 25 aa, Artificial Sequence
  Cyclic GFR-binding peptide
VIMNSLQEVKPKRGVYYLITLPELA

SEQ ID NO: 48624 - protein, 32 aa, Artificial Sequence; identical to SEQ ID NO: 3849
  Cyclic GFR-binding peptide
  MOD_RES (2)..(4): Xaa is C or S

SEQ ID NO: 48625 - protein, 30 aa, Artificial Sequence; identical to SEQ ID NO: 14358
  Cyclic GFR-binding peptide
  MOD_RES (26)..(27): Xaa is C or S

SEQ ID NO: 48626 - protein, 36 aa, Artificial Sequence; identical to SEQ ID NO: 14361
  Cyclic GFR-binding peptide
  MOD_RES (1)..(3)..(35): Xaa is C or S

SEQ ID NO: 48627 - protein, 24 aa, Artificial Sequence
  Cyclic GFR-binding peptide
MNNSLQEIVNSSDDYYVVPLPELK

SEQ ID NO: 48628 - protein, 33 aa, Artificial Sequence; identical to SEQ ID NO: 14364
  Cyclic GFR-binding peptide
  MOD_RES (29)..(30): Xaa is C or S

SEQ ID NO: 48629 - protein, 29 aa, Artificial Sequence
  Cyclic GFR-binding peptide
  MOD_RES (2)..(2): Xaa is C or S
GXARVVMNNSLQEIVNSSDDYYVVPLPEL

SEQ ID NO: 48630 - protein, 23 aa, Artificial Sequence
  Cyclic GFR-binding peptide
MNSLQEIKPTKGIYYVIPLPELD

SEQ ID NO: 48631 - protein, 31 aa, Artificial Sequence; identical to SEQ ID NO: 3860
  Cyclic GFR-binding peptide
  MOD_RES (1)..(1): Xaa is C or S

SEQ ID NO: 48632 - protein, 33 aa, Artificial Sequence; identical to SEQ ID NO: 14368
  Cyclic GFR-binding peptide
  MOD_RES (28)..(29): Xaa is C or S

SEQ ID NO: 48633 - protein, 32 aa, Artificial Sequence; identical to SEQ ID NO: 14370
  Cyclic GFR-binding peptide
  MOD_RES (2)..(2): Xaa is C or S

SEQ ID NO: 48634 - protein, 32 aa, Artificial Sequence; identical to SEQ ID NO: 14371
  Cyclic GFR-binding peptide
  MOD_RES (29)..(30): Xaa is C or S

SEQ ID NO: 48635 - protein, 27 aa, Artificial Sequence
  Cyclic GFR-binding peptide
  MOD_RES (26)..(27): Xaa is C or S
RYKKLVKPKRGVFYLISIANLAQPVXX

SEQ ID NO: 48636 - protein, 31 aa, Artificial Sequence; identical to SEQ ID NO: 14375
  Cyclic GFR-binding peptide
  MOD_RES (31)..(31): Xaa is C or S

SEQ ID NO: 48637 - protein, 29 aa, Artificial Sequence
  Cyclic GFR-binding peptide
  MOD_RES (28)..(29): Xaa is C or S
MERYKKLVVKDYEDFYLMSIANLETPVXX

SEQ ID NO: 48638 - protein, 37 aa, Artificial Sequence; identical to SEQ ID NO: 14378
  Cyclic GFR-binding peptide
  MOD_RES (2)..(4)..(35)..(36): Xaa is C or S

SEQ ID NO: 48639 - protein, 24 aa, Artificial Sequence
  Cyclic GFR-binding peptide
VVMNSLQEVKPTRGVYYVIPLPEL

SEQ ID NO: 48640 - protein, 27 aa, Artificial Sequence
  Cyclic GFR-binding peptide
MENSLQEVVKDYEDYYVMPLPELETPV

SEQ ID NO: 48641 - protein, 37 aa, Artificial Sequence; identical to SEQ ID NO: 14381
  Cyclic GFR-binding peptide
  MOD_RES (2)..(34)..(35): Xaa is C or S

SEQ ID NO: 48642 - protein, 36 aa, Artificial Sequence; identical to SEQ ID NO: 14385
  Cyclic GFR-binding peptide
  MOD_RES (1)..(3)..(35)..(36): Xaa is C or S

SEQ ID NO: 48643 - protein, 32 aa, Artificial Sequence; identical to SEQ ID NO: 14387
  Cyclic GFR-binding peptide
  MOD_RES (27)..(28): Xaa is C or S

SEQ ID NO: 48644 - protein, 37 aa, Artificial Sequence; identical to SEQ ID NO: 14388
  Cyclic GFR-binding peptide
  MOD_RES (2)..(34)..(35): Xaa is C or S

SEQ ID NO: 48645 - protein, 34 aa, Artificial Sequence; identical to SEQ ID NO: 3880
  Cyclic GFR-binding peptide
  MOD_RES (1)..(3)..(34): Xaa is C or S

SEQ ID NO: 48646 - protein, 36 aa, Artificial Sequence
  Cyclic GFR-binding peptide
  MOD_RES (30)..(31): Xaa is C or S
KVVMNSLQEVKPTRGVYYLITLPELDQPVXXPSASA

SEQ ID NO: 48647 - protein, 38 aa, Artificial Sequence; identical to SEQ ID NO: 14390
  Cyclic GFR-binding peptide
  MOD_RES (1)..(32)..(33): Xaa is C or S

SEQ ID NO: 48648 - protein, 26 aa, Artificial Sequence
  Cyclic GFR-binding peptide
VMDNSLQEVVKENEDYYLMTLPELET

SEQ ID NO: 48649 - protein, 28 aa, Artificial Sequence
  Cyclic GFR-binding peptide
  MOD_RES (26)..(26): Xaa is C or S
NSLQEIVNSSDDYYVVPLPELKTPAXTP

SEQ ID NO: 48650 - protein, 32 aa, Artificial Sequence; identical to SEQ ID NO: 14394
  Cyclic GFR-binding peptide
  MOD_RES (29)..(30): Xaa is C or S

SEQ ID NO: 48651 - protein, 32 aa, Artificial Sequence; identical to SEQ ID NO: 14398
  Cyclic GFR-binding peptide
  MOD_RES (29)..(29): Xaa is C or S

SEQ ID NO: 48652 - protein, 30 aa, Artificial Sequence; identical to SEQ ID NO: 3892
  Cyclic GFR-binding peptide
  MOD_RES (28)..(28): Xaa is C or S

SEQ ID NO: 48653 - protein, 30 aa, Artificial Sequence; identical to SEQ ID NO: 14400
  Cyclic GFR-binding peptide
  MOD_RES (28)..(29): Xaa is C or S

SEQ ID NO: 48654 - protein, 31 aa, Artificial Sequence; identical to SEQ ID NO: 14401
  Cyclic GFR-binding peptide
  MOD_RES (31)..(31): Xaa is C or S

SEQ ID NO: 48655 - protein, 35 aa, Artificial Sequence
  Cyclic GFR-binding peptide
  MOD_RES (2)..(4)..(35): Xaa is C or S
SXKXSKVVMNSLQEVKPTRGVYYLITLPELDQPVX

SEQ ID NO: 48656 - protein, 38 aa, Artificial Sequence; identical to SEQ ID NO: 14402
  Cyclic GFR-binding peptide
  MOD_RES (32)..(33): Xaa is C or S

SEQ ID NO: 48657 - protein, 31 aa, Artificial Sequence; identical to SEQ ID NO: 14403
  Cyclic GFR-binding peptide
  MOD_RES (1)..(3): Xaa is C or S

SEQ ID NO: 48658 - protein, 27 aa, Artificial Sequence
  Cyclic GFR-binding peptide
  MOD_RES (26)..(27): Xaa is C or S
NSLQEIVNSSDDYYVVPLPELKTPAXX

SEQ ID NO: 48659 - protein, 36 aa, Artificial Sequence; identical to SEQ ID NO: 14406
  Cyclic GFR-binding peptide
  MOD_RES (1)..(33)..(34): Xaa is C or S

SEQ ID NO: 48660 - protein, 25 aa, Artificial Sequence
  Cyclic GFR-binding peptide
RVIMEYQKYVKPKRGVIFLISIPSL

SEQ ID NO: 48661 - protein, 33 aa, Artificial Sequence; identical to SEQ ID NO: 3901
  Cyclic GFR-binding peptide
  MOD_RES (29)..(30): Xaa is C or S

SEQ ID NO: 48662 - protein, 30 aa, Artificial Sequence; identical to SEQ ID NO: 14409
  Cyclic GFR-binding peptide
  MOD_RES (2)..(2): Xaa is C or S

SEQ ID NO: 48663 - protein, 28 aa, Artificial Sequence
  Cyclic GFR-binding peptide
  MOD_RES (26)..(27): Xaa is C or S
NSLQEVVNNASDYYLITLPELRTPVXXT

SEQ ID NO: 48664 - protein, 35 aa, Artificial Sequence; identical to SEQ ID NO: 14411
  Cyclic GFR-binding peptide
  MOD_RES (30)..(31): Xaa is C or S

SEQ ID NO: 48665 - protein, 26 aa, Artificial Sequence
  Cyclic GFR-binding peptide
  MOD_RES (26)..(26): Xaa is C or S
NSLQEIVNSSDDYYLVTLPELQTPAX

SEQ ID NO: 48666 - protein, 24 aa, Artificial Sequence
  Cyclic GFR-binding peptide
VVMEYQKYVKPTRGVIFLISIPSL

SEQ ID NO: 48667 - protein, 34 aa, Artificial Sequence; identical to SEQ ID NO: 14414
  Cyclic GFR-binding peptide
  MOD_RES (28)..(29): Xaa is C or S

SEQ ID NO: 48668 - protein, 31 aa, Artificial Sequence; identical to SEQ ID NO: 14415
  Cyclic GFR-binding peptide
  MOD_RES (2)..(2): Xaa is C or S

SEQ ID NO: 48669 - protein, 32 aa, Artificial Sequence; identical to SEQ ID NO: 3910
  Cyclic GFR-binding peptide
  MOD_RES (29)..(30): Xaa is C or S

SEQ ID NO: 48670 - protein, 35 aa, Artificial Sequence; identical to SEQ ID NO: 14417
  Cyclic GFR-binding peptide
  MOD_RES (2)..(33)..(34): Xaa is C or S

SEQ ID NO: 48671 - protein, 38 aa, Artificial Sequence; identical to SEQ ID NO: 14418
  Cyclic GFR-binding peptide
  MOD_RES (1)..(3)..(35)..(36): Xaa is C or S

SEQ ID NO: 48672 - protein, 33 aa, Artificial Sequence; identical to SEQ ID NO: 14419
  Cyclic GFR-binding peptide
  MOD_RES (30)..(31): Xaa is C or S

SEQ ID NO: 48673 - protein, 36 aa, Artificial Sequence; identical to SEQ ID NO: 14420
  Cyclic GFR-binding peptide
  MOD_RES (2)..(4)..(36): Xaa is C or S

SEQ ID NO: 48674 - protein, 27 aa, Artificial Sequence
  Cyclic GFR-binding peptide
VVMDNSLQEVVNNASDYYVIPLPELRT

SEQ ID NO: 48675 - protein, 21 aa, Artificial Sequence
  Cyclic GFR-binding peptide
NSLQEVKPTRGVYYLITLPEL

SEQ ID NO: 48676 - protein, 31 aa, Artificial Sequence; identical to SEQ ID NO: 3915
  Cyclic GFR-binding peptide
  MOD_RES (1)..(1): Xaa is C or S

SEQ ID NO: 48677 - protein, 35 aa, Artificial Sequence; identical to SEQ ID NO: 14424
  Cyclic GFR-binding peptide
  MOD_RES (1)..(33)..(34): Xaa is C or S

SEQ ID NO: 48678 - protein, 35 aa, Artificial Sequence; identical to SEQ ID NO: 3919
  Cyclic GFR-binding peptide
  MOD_RES (29)..(30): Xaa is C or S

SEQ ID NO: 48679 - protein, 27 aa, Artificial Sequence
  Cyclic GFR-binding peptide
  MOD_RES (27)..(27): Xaa is C or S
DEYQKYVVKENEDIFLMSIPSLETPVX

SEQ ID NO: 48680 - protein, 33 aa, Artificial Sequence; identical to SEQ ID NO: 14428
  Cyclic GFR-binding peptide
  MOD_RES (30)..(30): Xaa is C or S

SEQ ID NO: 48681 - protein, 33 aa, Artificial Sequence; identical to SEQ ID NO: 14431
  Cyclic GFR-binding peptide
  MOD_RES (32)..(33): Xaa is C or S

SEQ ID NO: 48682 - protein, 30 aa, Artificial Sequence; identical to SEQ ID NO: 14432
  Cyclic GFR-binding peptide
  MOD_RES (30)..(30): Xaa is C or S

SEQ ID NO: 48683 - protein, 23 aa, Artificial Sequence
  Cyclic GFR-binding peptide
VMDNSLQEVVNNASDYYLITLPE

SEQ ID NO: 48684 - protein, 30 aa, Artificial Sequence; identical to SEQ ID NO: 14434
  Cyclic GFR-binding peptide
  MOD_RES (1)..(3): Xaa is C or S

SEQ ID NO: 48685 - protein, 31 aa, Artificial Sequence; identical to SEQ ID NO: 14437
  Cyclic GFR-binding peptide
  MOD_RES (28)..(28): Xaa is C or S

SEQ ID NO: 48686 - protein, 31 aa, Artificial Sequence; identical to SEQ ID NO: 14438
  Cyclic GFR-binding peptide
  MOD_RES (29)..(30): Xaa is C or S

SEQ ID NO: 48687 - protein, 36 aa, Artificial Sequence; identical to SEQ ID NO: 14439
  Cyclic GFR-binding peptide
  MOD_RES (2)..(33)..(34): Xaa is C or S

SEQ ID NO: 48688 - protein, 36 aa, Artificial Sequence; identical to SEQ ID NO: 14440
  Cyclic GFR-binding peptide
  MOD_RES (32)..(33): Xaa is C or S

SEQ ID NO: 48689 - protein, 37 aa, Artificial Sequence; identical to SEQ ID NO: 3944
  Cyclic GFR-binding peptide
  MOD_RES (2)..(34)..(35): Xaa is C or S

SEQ ID NO: 48690 - protein, 29 aa, Artificial Sequence
  Cyclic GFR-binding peptide
  MOD_RES (27)..(28): Xaa is C or S
MNSLQEIKPTKGIYYVIPLPELDQSVXXP

SEQ ID NO: 48691 - protein, 27 aa, Artificial Sequence
  Cyclic GFR-binding peptide
  MOD_RES (26)..(27): Xaa is C or S
NSLQEIKPTKGIYYLITLPELDQSVXX

SEQ ID NO: 48692 - protein, 27 aa, Artificial Sequence
  Cyclic GFR-binding peptide
GEVVMENSLQEVVKDYEDYYLMTLPEL

SEQ ID NO: 48693 - protein, 29 aa, Artificial Sequence
  Cyclic GFR-binding peptide
  MOD_RES (26)..(27): Xaa is C or S
NSLQEVKPTRGVYYVIPLPELDQPVXXPS

SEQ ID NO: 48694 - protein, 34 aa, Artificial Sequence; identical to SEQ ID NO: 14450
  Cyclic GFR-binding peptide
  MOD_RES (1)..(33)..(34): Xaa is C or S

SEQ ID NO: 48695 - protein, 30 aa, Artificial Sequence; identical to SEQ ID NO: 3949
  Cyclic GFR-binding peptide
  MOD_RES (2)..(2): Xaa is C or S

SEQ ID NO: 48696 - protein, 31 aa, Artificial Sequence; identical to SEQ ID NO: 3950
  Cyclic GFR-binding peptide
  MOD_RES (30)..(31): Xaa is C or S

SEQ ID NO: 48697 - protein, 41 aa, Artificial Sequence; identical to SEQ ID NO: 14454
  Cyclic GFR-binding peptide
  MOD_RES (2)..(4)..(36)..(37): Xaa is C or S

SEQ ID NO: 48698 - protein, 23 aa, Artificial Sequence
  Cyclic GFR-binding peptide
MENSLQEVVKDYEDYYVMPLPEL

SEQ ID NO: 48699 - protein, 33 aa, Artificial Sequence; identical to SEQ ID NO: 14457
  Cyclic GFR-binding peptide
  MOD_RES (1)..(3): Xaa is C or S

SEQ ID NO: 48700 - protein, 29 aa, Artificial Sequence
  Cyclic GFR-binding peptide
  MOD_RES (28)..(29): Xaa is C or S
IMNSLQEVKPKRGVYYLITLPELAQPVXX

SEQ ID NO: 48701 - protein, 37 aa, Artificial Sequence; identical to SEQ ID NO: 14461
  Cyclic GFR-binding peptide
  MOD_RES (2)..(4)..(36)..(37): Xaa is C or S

SEQ ID NO: 48702 - protein, 26 aa, Artificial Sequence
  Cyclic GFR-binding peptide
VMNSLQEVKPTRGVYYLITLPELDQP

SEQ ID NO: 48703 - protein, 21 aa, Artificial Sequence
  Cyclic GFR-binding peptide
RYKKLVKPKRGVFYLISIANL

SEQ ID NO: 48704 - protein, 29 aa, Artificial Sequence
  Cyclic GFR-binding peptide
SEVVMDRYKKLVVNNASDFYLISIANLRT

SEQ ID NO: 48705 - protein, 36 aa, Artificial Sequence; identical to SEQ ID NO: 14464
  Cyclic GFR-binding peptide
  MOD_RES (32)..(33): Xaa is C or S

SEQ ID NO: 48706 - protein, 30 aa, Artificial Sequence; identical to SEQ ID NO: 14465
  Cyclic GFR-binding peptide
  MOD_RES (28)..(29): Xaa is C or S

SEQ ID NO: 48707 - protein, 29 aa, Artificial Sequence
  Cyclic GFR-binding peptide
SRVVMNNSLQEIVNSSDDYYLVTLPELKT

SEQ ID NO: 48708 - protein, 32 aa, Artificial Sequence
  Cyclic GFR-binding peptide
  MOD_RES (26)..(27): Xaa is C or S
NSLQEVKPTRGVYYLITLPELDQPVXXPSASA

SEQ ID NO: 48709 - protein, 38 aa, Artificial Sequence; identical to SEQ ID NO: 14467
  Cyclic GFR-binding peptide
  MOD_RES (32)..(33): Xaa is C or S

SEQ ID NO: 48710 - protein, 35 aa, Artificial Sequence; identical to SEQ ID NO: 14468
  Cyclic GFR-binding peptide
  MOD_RES (30)..(31): Xaa is C or S

SEQ ID NO: 48711 - protein, 32 aa, Artificial Sequence; identical to SEQ ID NO: 14469
  Cyclic GFR-binding peptide
  MOD_RES (32)..(32): Xaa is C or S

SEQ ID NO: 48712 - protein, 29 aa, Artificial Sequence
  Cyclic GFR-binding peptide
GEVVMEEYQKYVVKDYEDIFLMSIPSLET

SEQ ID NO: 48713 - protein, 31 aa, Artificial Sequence; identical to SEQ ID NO: 14471
  Cyclic GFR-binding peptide
  MOD_RES (2)..(2): Xaa is C or S

SEQ ID NO: 48714 - protein, 26 aa, Artificial Sequence
  Cyclic GFR-binding peptide
MENSLQEVVKDYEDYYVMPLPELETP

SEQ ID NO: 48715 - protein, 38 aa, Artificial Sequence; identical to SEQ ID NO: 14473
  Cyclic GFR-binding peptide
  MOD_RES (2)..(4)..(36): Xaa is C or S

SEQ ID NO: 48716 - protein, 27 aa, Artificial Sequence
  Cyclic GFR-binding peptide
VMDNSLQEVVKENEDYYVMPLPELETP

SEQ ID NO: 48717 - protein, 29 aa, Artificial Sequence
  Cyclic GFR-binding peptide
ARVVMNNSLQEIVNSSDDYYVVPLPELQT

SEQ ID NO: 48718 - protein, 21 aa, Artificial Sequence
  Cyclic GFR-binding peptide
ENSLQEVVKDYEDYYLMTLPE

SEQ ID NO: 48719 - protein, 28 aa, Artificial Sequence
  Cyclic GFR-binding peptide
  MOD_RES (2)..(2): Xaa is C or S
GXARVVMNEYQKYIVNSSDDIFLVSIPS

SEQ ID NO: 48720 - protein, 26 aa, Artificial Sequence
  Cyclic GFR-binding peptide
MNEYQKYIVNSSDDIFLVSIPSLQTP

SEQ ID NO: 48721 - protein, 29 aa, Artificial Sequence
  Cyclic GFR-binding peptide
  MOD_RES (1)..(1): Xaa is C or S
XSEVVMDNSLQEVVNNASDYYLITLPELR

SEQ ID NO: 48722 - protein, 40 aa, Artificial Sequence; identical to SEQ ID NO: 14485
  Cyclic GFR-binding peptide
  MOD_RES (1)..(3)..(34)..(35): Xaa is C or S

SEQ ID NO: 48723 - protein, 34 aa, Artificial Sequence; identical to SEQ ID NO: 14486
  Cyclic GFR-binding peptide
  MOD_RES (29)..(30): Xaa is C or S

SEQ ID NO: 48724 - protein, 26 aa, Artificial Sequence
  Cyclic GFR-binding peptide
SEVVMDRYKKLVVNNASDFYLISIAN

SEQ ID NO: 48725 - protein, 33 aa, Artificial Sequence; identical to SEQ ID NO: 14491
  Cyclic GFR-binding peptide
  MOD_RES (2)..(33): Xaa is C or S

SEQ ID NO: 48726 - protein, 30 aa, Artificial Sequence; identical to SEQ ID NO: 14492
  Cyclic GFR-binding peptide
  MOD_RES (28)..(29): Xaa is C or S

SEQ ID NO: 48727 - protein, 36 aa, Artificial Sequence; identical to SEQ ID NO: 14493
  Cyclic GFR-binding peptide
  MOD_RES (1)..(3)..(35): Xaa is C or S

SEQ ID NO: 48728 - protein, 34 aa, Artificial Sequence; identical to SEQ ID NO: 3991
  Cyclic GFR-binding peptide
  MOD_RES (2)..(33)..(34): Xaa is C or S

SEQ ID NO: 48729 - protein, 30 aa, Artificial Sequence; identical to SEQ ID NO: 3992
  Cyclic GFR-binding peptide
  MOD_RES (29)..(30): Xaa is C or S

SEQ ID NO: 48730 - protein, 38 aa, Artificial Sequence; identical to SEQ ID NO: 14498
  Cyclic GFR-binding peptide
  MOD_RES (1)..(3)..(35)..(36): Xaa is C or S

SEQ ID NO: 48731 - protein, 26 aa, Artificial Sequence
  Cyclic GFR-binding peptide
  MOD_RES (1)..(1): Xaa is C or S
XSRVIMEYQKYVKPKRGVIFLISIPS

SEQ ID NO: 48732 - protein, 32 aa, Artificial Sequence; identical to SEQ ID NO: 14501
  Cyclic GFR-binding peptide
  MOD_RES (31)..(32): Xaa is C or S

SEQ ID NO: 48733 - protein, 29 aa, Artificial Sequence
  Cyclic GFR-binding peptide
  MOD_RES (28)..(29): Xaa is C or S
MNEYQKYIVNSSDDIFLVSIPSLQTPAXX

SEQ ID NO: 48734 - protein, 24 aa, Artificial Sequence
  Cyclic GFR-binding peptide
NSLQEIVNSSDDYYVVPLPELKTP

SEQ ID NO: 48735 - protein, 26 aa, Artificial Sequence
  Cyclic GFR-binding peptide
DNSLQEVVKENEDYYVMPLPELETPV

SEQ ID NO: 48736 - protein, 34 aa, Artificial Sequence; identical to SEQ ID NO: 3998
  Cyclic GFR-binding peptide
  MOD_RES (32)..(32): Xaa is C or S

SEQ ID NO: 48737 - protein, 28 aa, Artificial Sequence
  Cyclic GFR-binding peptide
  MOD_RES (1)..(1): Xaa is C or S
XSKVIMEYQKYIKPTKGIIFLISIPSLD

SEQ ID NO: 48738 - protein, 28 aa, Artificial Sequence
  Cyclic GFR-binding peptide
  MOD_RES (28)..(28): Xaa is C or S
IMEYQKYIKPTKGIIFLISIPSLDQSVX

SEQ ID NO: 48739 - protein, 31 aa, Artificial Sequence; identical to SEQ ID NO: 14510
  Cyclic GFR-binding peptide
  MOD_RES (26)..(27): Xaa is C or S

SEQ ID NO: 48740 - protein, 38 aa, Artificial Sequence; identical to SEQ ID NO: 14511
  Cyclic GFR-binding peptide
  MOD_RES (2)..(4)..(35)..(36): Xaa is C or S

SEQ ID NO: 48741 - protein, 38 aa, Artificial Sequence; identical to SEQ ID NO: 14512
  Cyclic GFR-binding peptide
  MOD_RES (32)..(33): Xaa is C or S

SEQ ID NO: 48742 - protein, 35 aa, Artificial Sequence; identical to SEQ ID NO: 14513
  Cyclic GFR-binding peptide
  MOD_RES (2)..(33)..(34): Xaa is C or S

SEQ ID NO: 48743 - protein, 22 aa, Artificial Sequence
  Cyclic GFR-binding peptide
MDNSLQEVVKENEDYYVMPLPE

SEQ ID NO: 48744 - protein, 30 aa, Artificial Sequence; identical to SEQ ID NO: 14515
  Cyclic GFR-binding peptide
  MOD_RES (2)..(2): Xaa is C or S

SEQ ID NO: 48745 - protein, 35 aa, Artificial Sequence; identical to SEQ ID NO: 4001
  Cyclic GFR-binding peptide
  MOD_RES (29)..(30): Xaa is C or S

SEQ ID NO: 48746 - protein, 27 aa, Artificial Sequence
  Cyclic GFR-binding peptide
  MOD_RES (27)..(27): Xaa is C or S
NNSLQEIVNSSDDYYLVTLPELQTPAX

SEQ ID NO: 48747 - protein, 34 aa, Artificial Sequence; identical to SEQ ID NO: 14518
  Cyclic GFR-binding peptide
  MOD_RES (28)..(28): Xaa is C or S

SEQ ID NO: 48748 - protein, 36 aa, Artificial Sequence; identical to SEQ ID NO: 4005
  Cyclic GFR-binding peptide
  MOD_RES (2)..(34): Xaa is C or S

SEQ ID NO: 48749 - protein, 37 aa, Artificial Sequence; identical to SEQ ID NO: 14521
  Cyclic GFR-binding peptide
  MOD_RES (32)..(32): Xaa is C or S

SEQ ID NO: 48750 - protein, 35 aa, Artificial Sequence; identical to SEQ ID NO: 14523
  Cyclic GFR-binding peptide
  MOD_RES (31)..(32): Xaa is C or S

SEQ ID NO: 48751 - protein, 34 aa, Artificial Sequence; identical to SEQ ID NO: 14524
  Cyclic GFR-binding peptide
  MOD_RES (28)..(29): Xaa is C or S

SEQ ID NO: 48752 - protein, 23 aa, Artificial Sequence
  Cyclic GFR-binding peptide
VMERYKKLVVKDYEDFYLMSIAN

SEQ ID NO: 48753 - protein, 41 aa, Artificial Sequence; identical to SEQ ID NO: 14526
  Cyclic GFR-binding peptide
  MOD_RES (2)..(4)..(36)..(37): Xaa is C or S

SEQ ID NO: 48754 - protein, 28 aa, Artificial Sequence
  Cyclic GFR-binding peptide
  MOD_RES (1)..(3): Xaa is C or S
XKXSKVIMNSLQEIKPTKGIYYVIPLPE

SEQ ID NO: 48755 - protein, 22 aa, Artificial Sequence
  Cyclic GFR-binding peptide
IMEYQKYVKPKRGVIFLISIPS

SEQ ID NO: 48756 - protein, 28 aa, Artificial Sequence
  Cyclic GFR-binding peptide
KVIMRYKKLIKPTKGIFYLISIANLDQS

SEQ ID NO: 48757 - protein, 33 aa, Artificial Sequence; identical to SEQ ID NO: 14531
  Cyclic GFR-binding peptide
  MOD_RES (1)..(3): Xaa is C or S

SEQ ID NO: 48758 - protein, 28 aa, Artificial Sequence
  Cyclic GFR-binding peptide
  MOD_RES (1)..(3): Xaa is C or S
XKXSKVIMEYQKYIKPTKGIIFLISIPS

SEQ ID NO: 48759 - protein, 28 aa, Artificial Sequence
  Cyclic GFR-binding peptide
  MOD_RES (2)..(2): Xaa is C or S
GXGEVVMENSLQEVVKDYEDYYVMPLPE

SEQ ID NO: 48760 - protein, 40 aa, Artificial Sequence; identical to SEQ ID NO: 14534
  Cyclic GFR-binding peptide
  MOD_RES (2)..(34)..(35): Xaa is C or S

SEQ ID NO: 48761 - protein, 39 aa, Artificial Sequence; identical to SEQ ID NO: 4022
  Cyclic GFR-binding peptide
  MOD_RES (1)..(3)..(35)..(36): Xaa is C or S

SEQ ID NO: 48762 - protein, 27 aa, Artificial Sequence
  Cyclic GFR-binding peptide
KVVMNSLQEVKPTRGVYYVIPLPELDQ

SEQ ID NO: 48763 - protein, 28 aa, Artificial Sequence
  Cyclic GFR-binding peptide
  MOD_RES (28)..(28): Xaa is C or S
VMNSLQEVKPTRGVYYVIPLPELDQPVX

SEQ ID NO: 48764 - protein, 40 aa, Artificial Sequence; identical to SEQ ID NO: 14538
  Cyclic GFR-binding peptide
  MOD_RES (2)..(34)..(35): Xaa is C or S

SEQ ID NO: 48765 - protein, 28 aa, Artificial Sequence
  Cyclic GFR-binding peptide
VVMNEYQKYIVNSSDDIFLVSIPSLKTP

SEQ ID NO: 48766 - protein, 33 aa, Artificial Sequence; identical to SEQ ID NO: 14541
  Cyclic GFR-binding peptide
  MOD_RES (32)..(33): Xaa is C or S

SEQ ID NO: 48767 - protein, 31 aa, Artificial Sequence; identical to SEQ ID NO: 14542
  Cyclic GFR-binding peptide
  MOD_RES (28)..(29): Xaa is C or S

SEQ ID NO: 48768 - protein, 28 aa, Artificial Sequence
  Cyclic GFR-binding peptide
  MOD_RES (27)..(28): Xaa is C or S
NEYQKYIVNSSDDIFLVSIPSLQTPAXX

SEQ ID NO: 48769 - protein, 33 aa, Artificial Sequence; identical to SEQ ID NO: 14544
  Cyclic GFR-binding peptide
  MOD_RES (30)..(31): Xaa is C or S

SEQ ID NO: 48770 - protein, 22 aa, Artificial Sequence
  Cyclic GFR-binding peptide
NSLQEIKPTKGIYYLITLPELD

SEQ ID NO: 48771 - protein, 24 aa, Artificial Sequence
  Cyclic GFR-binding peptide
VMENSLQEVVKDYEDYYLMTLPEL

SEQ ID NO: 48772 - protein, 39 aa, Artificial Sequence; identical to SEQ ID NO: 14547
  Cyclic GFR-binding peptide
  MOD_RES (2)..(33)..(34): Xaa is C or S

SEQ ID NO: 48773 - protein, 31 aa, Artificial Sequence; identical to SEQ ID NO: 14549
  Cyclic GFR-binding peptide
  MOD_RES (26)..(27): Xaa is C or S

SEQ ID NO: 48774 - protein, 28 aa, Artificial Sequence
  Cyclic GFR-binding peptide
VVMNNSLQEIVNSSDDYYVVPLPELQTP

SEQ ID NO: 48775 - protein, 35 aa, Artificial Sequence; identical to SEQ ID NO: 14552
  Cyclic GFR-binding peptide
  MOD_RES (32)..(33): Xaa is C or S

SEQ ID NO: 48776 - protein, 29 aa, Artificial Sequence
  Cyclic GFR-binding peptide
  MOD_RES (28)..(28): Xaa is C or S
MNNSLQEIVNSSDDYYVVPLPELKTPAXT

SEQ ID NO: 48777 - protein, 25 aa, Artificial Sequence
  Cyclic GFR-binding peptide
KVVMNSLQEVKPTRGVYYVIPLPEL

SEQ ID NO: 48778 - protein, 27 aa, Artificial Sequence
  Cyclic GFR-binding peptide
MDRYKKLVVNNASDFYLISIANLRTPV

SEQ ID NO: 48779 - protein, 36 aa, Artificial Sequence; identical to SEQ ID NO: 14557
  Cyclic GFR-binding peptide
  MOD_RES (2)..(4)..(36): Xaa is C or S

SEQ ID NO: 48780 - protein, 29 aa, Artificial Sequence
  Cyclic GFR-binding peptide
VVMNNSLQEIVNSSDDYYLVTLPELQTPA

SEQ ID NO: 48781 - protein, 20 aa, Artificial Sequence
  Cyclic GFR-binding peptide
NSLQEVKPTRGVYYLITLPE

SEQ ID NO: 48782 - protein, 29 aa, Artificial Sequence
  Cyclic GFR-binding peptide
SKVVMNSLQEVKPTRGVYYVIPLPELDQP

SEQ ID NO: 48783 - protein, 34 aa, Artificial Sequence; identical to SEQ ID NO: 14565
  Cyclic GFR-binding peptide
  MOD_RES (30)..(31): Xaa is C or S

SEQ ID NO: 48784 - protein, 32 aa, Artificial Sequence; identical to SEQ ID NO: 14566
  Cyclic GFR-binding peptide
  MOD_RES (28)..(29): Xaa is C or S

SEQ ID NO: 48785 - protein, 27 aa, Artificial Sequence
  Cyclic GFR-binding peptide
KVVMNSLQEVKPTRGVYYLITLPELDQ

SEQ ID NO: 48786 - protein, 38 aa, Artificial Sequence; identical to SEQ ID NO: 4069
  Cyclic GFR-binding peptide
  MOD_RES (2)..(4)..(36)..(37): Xaa is C or S

SEQ ID NO: 48787 - protein, 34 aa, Artificial Sequence; identical to SEQ ID NO: 4070
  Cyclic GFR-binding peptide
  MOD_RES (1)..(3)..(34): Xaa is C or S

SEQ ID NO: 48788 - protein, 35 aa, Artificial Sequence; identical to SEQ ID NO: 14569
  Cyclic GFR-binding peptide
  MOD_RES (32)..(32): Xaa is C or S

SEQ ID NO: 48789 - protein, 30 aa, Artificial Sequence; identical to SEQ ID NO: 14571
  Cyclic GFR-binding peptide
  MOD_RES (2)..(2): Xaa is C or S

SEQ ID NO: 48790 - protein, 31 aa, Artificial Sequence; identical to SEQ ID NO: 14572
  Cyclic GFR-binding peptide
  MOD_RES (28)..(29): Xaa is C or S

SEQ ID NO: 48791 - protein, 30 aa, Artificial Sequence; identical to SEQ ID NO: 14573
  Cyclic GFR-binding peptide
  MOD_RES (27)..(28): Xaa is C or S

SEQ ID NO: 48792 - protein, 39 aa, Artificial Sequence; identical to SEQ ID NO: 4077
  Cyclic GFR-binding peptide
  MOD_RES (1)..(3)..(35): Xaa is C or S

SEQ ID NO: 48793 - protein, 34 aa, Artificial Sequence; identical to SEQ ID NO: 14578
  Cyclic GFR-binding peptide
  MOD_RES (30)..(31): Xaa is C or S

SEQ ID NO: 48794 - protein, 34 aa, Artificial Sequence; identical to SEQ ID NO: 14579
  Cyclic GFR-binding peptide
  MOD_RES (29)..(30): Xaa is C or S

SEQ ID NO: 48795 - protein, 34 aa, Artificial Sequence; identical to SEQ ID NO: 14580
  Cyclic GFR-binding peptide
  MOD_RES (29)..(30): Xaa is C or S

SEQ ID NO: 48796 - protein, 29 aa, Artificial Sequence
  Cyclic GFR-binding peptide
  MOD_RES (28)..(29): Xaa is C or S
VMEYQKYVKPTRGVIFLISIPSLDQPVXX

SEQ ID NO: 48797 - protein, 23 aa, Artificial Sequence
  Cyclic GFR-binding peptide
VMDRYKKLVVNNASDFYLISIAN

SEQ ID NO: 48798 - protein, 26 aa, Artificial Sequence
  Cyclic GFR-binding peptide
ERYKKLVVKDYEDFYLMSIANLETPV

SEQ ID NO: 48799 - protein, 32 aa, Artificial Sequence; identical to SEQ ID NO: 14585
  Cyclic GFR-binding peptide
  MOD_RES (29)..(30): Xaa is C or S

SEQ ID NO: 48800 - protein, 31 aa, Artificial Sequence; identical to SEQ ID NO: 14586
  Cyclic GFR-binding peptide
  MOD_RES (26)..(26): Xaa is C or S

SEQ ID NO: 48801 - protein, 25 aa, Artificial Sequence
  Cyclic GFR-binding peptide
VMNNSLQEIVNSSDDYYVVPLPELK

SEQ ID NO: 48802 - protein, 30 aa, Artificial Sequence; identical to SEQ ID NO: 14588
  Cyclic GFR-binding peptide
  MOD_RES (1)..(3): Xaa is C or S

SEQ ID NO: 48803 - protein, 36 aa, Artificial Sequence; identical to SEQ ID NO: 14589
  Cyclic GFR-binding peptide
  MOD_RES (2)..(34): Xaa is C or S

SEQ ID NO: 48804 - protein, 20 aa, Artificial Sequence
  Cyclic GFR-binding peptide
RYKKLVKPKRGVFYLISIAN

SEQ ID NO: 48805 - protein, 37 aa, Artificial Sequence
  Cyclic GFR-binding peptide
  MOD_RES (1)..(3)..(34)..(35): Xaa is C or S
XKXSKVVMNSLQEVKPTRGVYYLITLPELDQPVXXPS

SEQ ID NO: 48806 - protein, 39 aa, Artificial Sequence; identical to SEQ ID NO: 14592
  Cyclic GFR-binding peptide
  MOD_RES (1)..(3)..(35): Xaa is C or S

SEQ ID NO: 48807 - protein, 34 aa, Artificial Sequence; identical to SEQ ID NO: 14593
  Cyclic GFR-binding peptide
  MOD_RES (31)..(32): Xaa is C or S

SEQ ID NO: 48808 - protein, 24 aa, Artificial Sequence
  Cyclic GFR-binding peptide
MENSLQEVVKDYEDYYLMTLPELE

SEQ ID NO: 48809 - protein, 30 aa, Artificial Sequence; identical to SEQ ID NO: 14596
  Cyclic GFR-binding peptide
  MOD_RES (26)..(27): Xaa is C or S

SEQ ID NO: 48810 - protein, 36 aa, Artificial Sequence; identical to SEQ ID NO: 14597
  Cyclic GFR-binding peptide
  MOD_RES (30)..(31): Xaa is C or S

SEQ ID NO: 48811 - protein, 32 aa, Artificial Sequence; identical to SEQ ID NO: 14599
  Cyclic GFR-binding peptide
  MOD_RES (27)..(28): Xaa is C or S

SEQ ID NO: 48812 - protein, 33 aa, Artificial Sequence; identical to SEQ ID NO: 4104
  Cyclic GFR-binding peptide
  MOD_RES (1)..(3): Xaa is C or S

SEQ ID NO: 48813 - protein, 29 aa, Artificial Sequence
  Cyclic GFR-binding peptide
  MOD_RES (1)..(1): Xaa is C or S
XGEVVMERYKKLVVKDYEDFYLMSIANLE

SEQ ID NO: 48814 - protein, 29 aa, Artificial Sequence
  Cyclic GFR-binding peptide
  MOD_RES (26)..(27): Xaa is C or S
EYQKYVVKENEDIFLMSIPSLETPVXXAK

SEQ ID NO: 48815 - protein, 29 aa, Artificial Sequence
  Cyclic GFR-binding peptide
  MOD_RES (1)..(3): Xaa is C or S
XKXSKVIMEYQKYIKPTKGIIFLISIPSL

SEQ ID NO: 48816 - protein, 33 aa, Artificial Sequence; identical to SEQ ID NO: 14606
  Cyclic GFR-binding peptide
  MOD_RES (1)..(32)..(33): Xaa is C or S

SEQ ID NO: 48817 - protein, 33 aa, Artificial Sequence; identical to SEQ ID NO: 14607
  Cyclic GFR-binding peptide
  MOD_RES (31)..(32): Xaa is C or S

SEQ ID NO: 48818 - protein, 31 aa, Artificial Sequence; identical to SEQ ID NO: 4110
  Cyclic GFR-binding peptide
  MOD_RES (1)..(3): Xaa is C or S

SEQ ID NO: 48819 - protein, 26 aa, Artificial Sequence
  Cyclic GFR-binding peptide
DEYQKYVVKENEDIFLMSIPSLETPV

SEQ ID NO: 48820 - protein, 28 aa, Artificial Sequence
  Cyclic GFR-binding peptide
  MOD_RES (26)..(27): Xaa is C or S
NSLQEIVNSSDDYYLVTLPELKTPAXXP

SEQ ID NO: 48821 - protein, 23 aa, Artificial Sequence
  Cyclic GFR-binding peptide
IMRYKKLIKPTKGIFYLISIANL

SEQ ID NO: 48822 - protein, 29 aa, Artificial Sequence
  Cyclic GFR-binding peptide
VVMDEYQKYVVKENEDIFLMSIPSLETPV

SEQ ID NO: 48823 - protein, 30 aa, Artificial Sequence; identical to SEQ ID NO: 14615
  Cyclic GFR-binding peptide
  MOD_RES (29)..(30): Xaa is C or S

SEQ ID NO: 48824 - protein, 40 aa, Artificial Sequence; identical to SEQ ID NO: 14616
  Cyclic GFR-binding peptide
  MOD_RES (1)..(3)..(35): Xaa is C or S

SEQ ID NO: 48825 - protein, 38 aa, Artificial Sequence; identical to SEQ ID NO: 14617
  Cyclic GFR-binding peptide
  MOD_RES (1)..(33)..(34): Xaa is C or S

SEQ ID NO: 48826 - protein, 35 aa, Artificial Sequence; identical to SEQ ID NO: 14619
  Cyclic GFR-binding peptide
  MOD_RES (29)..(30): Xaa is C or S

SEQ ID NO: 48827 - protein, 28 aa, Artificial Sequence
  Cyclic GFR-binding peptide
VMEEYQKYVVKDYEDIFLMSIPSLETPV

SEQ ID NO: 48828 - protein, 31 aa, Artificial Sequence; identical to SEQ ID NO: 4121
  Cyclic GFR-binding peptide
  MOD_RES (1)..(1): Xaa is C or S

SEQ ID NO: 48829 - protein, 29 aa, Artificial Sequence
  Cyclic GFR-binding peptide
  MOD_RES (28)..(29): Xaa is C or S
IMEYQKYIKPTKGIIFLISIPSLDQSVXX

SEQ ID NO: 48830 - protein, 36 aa, Artificial Sequence; identical to SEQ ID NO: 14624
  Cyclic GFR-binding peptide
  MOD_RES (32)..(33): Xaa is C or S

SEQ ID NO: 48831 - protein, 31 aa, Artificial Sequence; identical to SEQ ID NO: 14625
  Cyclic GFR-binding peptide
  MOD_RES (30)..(30): Xaa is C or S

SEQ ID NO: 48832 - protein, 25 aa, Artificial Sequence
  Cyclic GFR-binding peptide
VVMDNSLQEVVNNASDYYLITLPEL

SEQ ID NO: 48833 - protein, 34 aa, Artificial Sequence
  Cyclic GFR-binding peptide
  MOD_RES (1)..(32)..(33): Xaa is C or S
XSKVVMNSLQEVKPTRGVYYLITLPELDQPVXXP

SEQ ID NO: 48834 - protein, 30 aa, Artificial Sequence; identical to SEQ ID NO: 14627
  Cyclic GFR-binding peptide
  MOD_RES (1)..(3): Xaa is C or S

SEQ ID NO: 48835 - protein, 27 aa, Artificial Sequence
  Cyclic GFR-binding peptide
  MOD_RES (1)..(1): Xaa is C or S
XGEVVMENSLQEVVKDYEDYYLMTLPE

SEQ ID NO: 48836 - protein, 38 aa, Artificial Sequence; identical to SEQ ID NO: 14629
  Cyclic GFR-binding peptide
  MOD_RES (2)..(34)..(35): Xaa is C or S

SEQ ID NO: 48837 - protein, 38 aa, Artificial Sequence; identical to SEQ ID NO: 4131
  Cyclic GFR-binding peptide
  MOD_RES (1)..(3)..(34)..(35): Xaa is C or S

SEQ ID NO: 48838 - protein, 22 aa, Artificial Sequence
  Cyclic GFR-binding peptide
MNNSLQEIVNSSDDYYVVPLPE

SEQ ID NO: 48839 - protein, 34 aa, Artificial Sequence; identical to SEQ ID NO: 14633
  Cyclic GFR-binding peptide
  MOD_RES (28)..(29): Xaa is C or S

SEQ ID NO: 48840 - protein, 33 aa, Artificial Sequence; identical to SEQ ID NO: 14635
  Cyclic GFR-binding peptide
  MOD_RES (2)..(33): Xaa is C or S

SEQ ID NO: 48841 - protein, 31 aa, Artificial Sequence; identical to SEQ ID NO: 14637
  Cyclic GFR-binding peptide
  MOD_RES (27)..(28): Xaa is C or S

SEQ ID NO: 48842 - protein, 30 aa, Artificial Sequence; identical to SEQ ID NO: 14640
  Cyclic GFR-binding peptide

SEQ ID NO: 48843 - protein, 39 aa, Artificial Sequence; identical to SEQ ID NO: 14641
  Cyclic GFR-binding peptide
  MOD_RES (1)..(3)..(34)..(35): Xaa is C or S

SEQ ID NO: 48844 - protein, 41 aa, Artificial Sequence; identical to SEQ ID NO: 14642
  Cyclic GFR-binding peptide
  MOD_RES (2)..(4)..(36)..(37): Xaa is C or S

SEQ ID NO: 48845 - protein, 34 aa, Artificial Sequence; identical to SEQ ID NO: 14643
  Cyclic GFR-binding peptide
  MOD_RES (29)..(30): Xaa is C or S

SEQ ID NO: 48846 - protein, 32 aa, Artificial Sequence; identical to SEQ ID NO: 4145
  Cyclic GFR-binding peptide
  MOD_RES (28)..(29): Xaa is C or S

SEQ ID NO: 48847 - protein, 33 aa, Artificial Sequence; identical to SEQ ID NO: 14645
  Cyclic GFR-binding peptide
  MOD_RES (1)..(3): Xaa is C or S

SEQ ID NO: 48848 - protein, 32 aa, Artificial Sequence; identical to SEQ ID NO: 4147
  Cyclic GFR-binding peptide
  MOD_RES (1)..(3): Xaa is C or S

SEQ ID NO: 48849 - protein, 32 aa, Artificial Sequence; identical to SEQ ID NO: 14648
  Cyclic GFR-binding peptide
  MOD_RES (27)..(28): Xaa is C or S

SEQ ID NO: 48850 - protein, 36 aa, Artificial Sequence; identical to SEQ ID NO: 14649
  Cyclic GFR-binding peptide
  MOD_RES (1)..(3)..(35)..(36): Xaa is C or S

SEQ ID NO: 48851 - protein, 36 aa, Artificial Sequence; identical to SEQ ID NO: 14650
  Cyclic GFR-binding peptide
  MOD_RES (31)..(32): Xaa is C or S

SEQ ID NO: 48852 - protein, 38 aa, Artificial Sequence; identical to SEQ ID NO: 4151
  Cyclic GFR-binding peptide
  MOD_RES (1)..(3)..(34)..(35): Xaa is C or S

SEQ ID NO: 48853 - protein, 28 aa, Artificial Sequence
  Cyclic GFR-binding peptide
  MOD_RES (27)..(28): Xaa is C or S
NNSLQEIVNSSDDYYVVPLPELQTPAXX

SEQ ID NO: 48854 - protein, 28 aa, Artificial Sequence
  Cyclic GFR-binding peptide
  MOD_RES (26)..(27): Xaa is C or S
EYQKYIVNSSDDIFLVSIPSLKTPAXXP

SEQ ID NO: 48855 - protein, 32 aa, Artificial Sequence; identical to SEQ ID NO: 14655
  Cyclic GFR-binding peptide
  MOD_RES (1)..(3): Xaa is C or S

SEQ ID NO: 48856 - protein, 27 aa, Artificial Sequence
  Cyclic GFR-binding peptide
SKVVMNSLQEVKPTRGVYYVIPLPELD

SEQ ID NO: 48857 - protein, 36 aa, Artificial Sequence; identical to SEQ ID NO: 14658
  Cyclic GFR-binding peptide
  MOD_RES (31)..(32): Xaa is C or S

SEQ ID NO: 48858 - protein, 34 aa, Artificial Sequence; identical to SEQ ID NO: 14661
  Cyclic GFR-binding peptide
  MOD_RES (2)..(34): Xaa is C or S

SEQ ID NO: 48859 - protein, 31 aa, Artificial Sequence; identical to SEQ ID NO: 14662
  Cyclic GFR-binding peptide
  MOD_RES (1)..(1): Xaa is C or S

SEQ ID NO: 48860 - protein, 20 aa, Artificial Sequence
  Cyclic GFR-binding peptide
RYKKLIVNSSDDFYLVSIAN

SEQ ID NO: 48861 - protein, 31 aa, Artificial Sequence; identical to SEQ ID NO: 4170
  Cyclic GFR-binding peptide

SEQ ID NO: 48862 - protein, 34 aa, Artificial Sequence; identical to SEQ ID NO: 14666
  Cyclic GFR-binding peptide
  MOD_RES (2)..(34): Xaa is C or S

SEQ ID NO: 48863 - protein, 36 aa, Artificial Sequence; identical to SEQ ID NO: 14667
  Cyclic GFR-binding peptide
  MOD_RES (1)..(32)..(33): Xaa is C or S

SEQ ID NO: 48864 - protein, 32 aa, Artificial Sequence; identical to SEQ ID NO: 14668
  Cyclic GFR-binding peptide
  MOD_RES (27)..(28): Xaa is C or S

SEQ ID NO: 48865 - protein, 20 aa, Artificial Sequence
  Cyclic GFR-binding peptide
EYQKYVKPTRGVIFLISIPS

SEQ ID NO: 48866 - protein, 27 aa, Artificial Sequence
  Cyclic GFR-binding peptide
  MOD_RES (2)..(2): Xaa is C or S
KXSKVVMNSLQEVKPTRGVYYLITLPE

SEQ ID NO: 48867 - protein, 35 aa, Artificial Sequence; identical to SEQ ID NO: 14670
  Cyclic GFR-binding peptide
  MOD_RES (2)..(4)..(35): Xaa is C or S

SEQ ID NO: 48868 - protein, 29 aa, Artificial Sequence
  Cyclic GFR-binding peptide
  MOD_RES (27)..(28): Xaa is C or S
MNSLQEIKPTKGIYYLITLPELDQSVXXP

SEQ ID NO: 48869 - protein, 27 aa, Artificial Sequence
  Cyclic GFR-binding peptide
  MOD_RES (27)..(27): Xaa is C or S
MEYQKYVKPTRGVIFLISIPSLDQPVX

SEQ ID NO: 48870 - protein, 29 aa, Artificial Sequence
  Cyclic GFR-binding peptide
  MOD_RES (29)..(29): Xaa is C or S
VMNNSLQEIVNSSDDYYLVTLPELKTPAX

SEQ ID NO: 48871 - protein, 32 aa, Artificial Sequence; identical to SEQ ID NO: 4185
  Cyclic GFR-binding peptide
  MOD_RES (1)..(3): Xaa is C or S

SEQ ID NO: 48872 - protein, 27 aa, Artificial Sequence
  Cyclic GFR-binding peptide
  MOD_RES (1)..(1): Xaa is C or S
XSRVVMNNSLQEIVNSSDDYYLVTLPE

SEQ ID NO: 48873 - protein, 29 aa, Artificial Sequence
  Cyclic GFR-binding peptide
  MOD_RES (1)..(1): Xaa is C or S
XGEVVMDRYKKLVVKENEDFYLMSIANLE

SEQ ID NO: 48874 - protein, 34 aa, Artificial Sequence; identical to SEQ ID NO: 14681
  Cyclic GFR-binding peptide
  MOD_RES (31)..(32): Xaa is C or S

SEQ ID NO: 48875 - protein, 31 aa, Artificial Sequence; identical to SEQ ID NO: 14682
  Cyclic GFR-binding peptide
  MOD_RES (30)..(31): Xaa is C or S

SEQ ID NO: 48876 - protein, 39 aa, Artificial Sequence; identical to SEQ ID NO: 14683
  Cyclic GFR-binding peptide
  MOD_RES (2)..(34)..(35): Xaa is C or S

SEQ ID NO: 48877 - protein, 33 aa, Artificial Sequence; identical to SEQ ID NO: 14684
  Cyclic GFR-binding peptide
  MOD_RES (27)..(28): Xaa is C or S

SEQ ID NO: 48878 - protein, 25 aa, Artificial Sequence
  Cyclic GFR-binding peptide
NNSLQEIVNSSDDYYLVTLPELQTP

SEQ ID NO: 48879 - protein, 29 aa, Artificial Sequence
  Cyclic GFR-binding peptide
  MOD_RES (26)..(27): Xaa is C or S
RYKKLIKPTKGIFYLISIANLDQSVXXPS

SEQ ID NO: 48880 - protein, 36 aa, Artificial Sequence; identical to SEQ ID NO: 4193
  Cyclic GFR-binding peptide
  MOD_RES (1)..(33): Xaa is C or S

SEQ ID NO: 48881 - protein, 34 aa, Artificial Sequence; identical to SEQ ID NO: 14690
  Cyclic GFR-binding peptide
  MOD_RES (2)..(33)..(34): Xaa is C or S

SEQ ID NO: 48882 - protein, 36 aa, Artificial Sequence; identical to SEQ ID NO: 4199
  Cyclic GFR-binding peptide
  MOD_RES (2)..(33)..(34): Xaa is C or S

SEQ ID NO: 48883 - protein, 31 aa, Artificial Sequence; identical to SEQ ID NO: 4201
  Cyclic GFR-binding peptide
  MOD_RES (30)..(30): Xaa is C or S

SEQ ID NO: 48884 - protein, 26 aa, Artificial Sequence
  Cyclic GFR-binding peptide
EVVMEEYQKYVVKDYEDIFLMSIPSL

SEQ ID NO: 48885 - protein, 28 aa, Artificial Sequence
  Cyclic GFR-binding peptide
  MOD_RES (2)..(2): Xaa is C or S
KXSKVIMEYQKYIKPTKGIIFLISIPSL

SEQ ID NO: 48886 - protein, 32 aa, Artificial Sequence; identical to SEQ ID NO: 4204
  Cyclic GFR-binding peptide
  MOD_RES (1)..(32): Xaa is C or S

SEQ ID NO: 48887 - protein, 31 aa, Artificial Sequence; identical to SEQ ID NO: 4205
  Cyclic GFR-binding peptide
  MOD_RES (27)..(28): Xaa is C or S

SEQ ID NO: 48888 - protein, 27 aa, Artificial Sequence
  Cyclic GFR-binding peptide
  MOD_RES (1)..(1): Xaa is C or S
XSKVVMNSLQEVKPTRGVYYLITLPEL

SEQ ID NO: 48889 - protein, 21 aa, Artificial Sequence
  Cyclic GFR-binding peptide
NEYQKYIVNSSDDIFLVSIPS

SEQ ID NO: 48890 - protein, 26 aa, Artificial Sequence
  Cyclic GFR-binding peptide
KVVMEYQKYVKPTRGVIFLISIPSLD

SEQ ID NO: 48891 - protein, 28 aa, Artificial Sequence
  Cyclic GFR-binding peptide
SKVVMNSLQEVKPTRGVYYLITLPELDQ

SEQ ID NO: 48892 - protein, 35 aa, Artificial Sequence; identical to SEQ ID NO: 14699
  Cyclic GFR-binding peptide
  MOD_RES (30)..(31): Xaa is C or S

SEQ ID NO: 48893 - protein, 31 aa, Artificial Sequence; identical to SEQ ID NO: 14700
  Cyclic GFR-binding peptide
  MOD_RES (30)..(31): Xaa is C or S

SEQ ID NO: 48894 - protein, 28 aa, Artificial Sequence
  Cyclic GFR-binding peptide
VMNNSLQEIVNSSDDYYLVTLPELQTPA

SEQ ID NO: 48895 - protein, 34 aa, Artificial Sequence; identical to SEQ ID NO: 14702
  Cyclic GFR-binding peptide
  MOD_RES (31)..(32): Xaa is C or S

SEQ ID NO: 48896 - protein, 29 aa, Artificial Sequence
  Cyclic GFR-binding peptide
  MOD_RES (1)..(1): Xaa is C or S
XGEVVMENSLQEVVKDYEDYYVMPLPELE

SEQ ID NO: 48897 - protein, 33 aa, Artificial Sequence; identical to SEQ ID NO: 14704
  Cyclic GFR-binding peptide
  MOD_RES (32)..(33): Xaa is C or S

SEQ ID NO: 48898 - protein, 27 aa, Artificial Sequence
  Cyclic GFR-binding peptide
  MOD_RES (1)..(1): Xaa is C or S
XSKVVMNSLQEVKPTRGVYYVIPLPEL

SEQ ID NO: 48899 - protein, 22 aa, Artificial Sequence
  Cyclic GFR-binding peptide
EYQKYIVNSSDDIFLVSIPSLK

SEQ ID NO: 48900 - protein, 32 aa, Artificial Sequence; identical to SEQ ID NO: 14707
  Cyclic GFR-binding peptide
  MOD_RES (30)..(31): Xaa is C or S

SEQ ID NO: 48901 - protein, 32 aa, Artificial Sequence; identical to SEQ ID NO: 4212
  Cyclic GFR-binding peptide
  MOD_RES (31)..(32): Xaa is C or S

SEQ ID NO: 48902 - protein, 30 aa, Artificial Sequence; identical to SEQ ID NO: 14709
  Cyclic GFR-binding peptide
  MOD_RES (29)..(30): Xaa is C or S

SEQ ID NO: 48903 - protein, 25 aa, Artificial Sequence
  Cyclic GFR-binding peptide
VMDNSLQEVVKENEDYYVMPLPELE

SEQ ID NO: 48904 - protein, 38 aa, Artificial Sequence; identical to SEQ ID NO: 4215
  Cyclic GFR-binding peptide
  MOD_RES (1)..(33)..(34): Xaa is C or S

SEQ ID NO: 48905 - protein, 27 aa, Artificial Sequence
  Cyclic GFR-binding peptide
VVMNSLQEVKPTRGVYYVIPLPELDQP

SEQ ID NO: 48906 - protein, 30 aa, Artificial Sequence; identical to SEQ ID NO: 14713
  Cyclic GFR-binding peptide
  MOD_RES (2)..(2): Xaa is C or S

SEQ ID NO: 48907 - protein, 30 aa, Artificial Sequence; identical to SEQ ID NO: 14714
  Cyclic GFR-binding peptide
  MOD_RES (26)..(27): Xaa is C or S

SEQ ID NO: 48908 - protein, 33 aa, Artificial Sequence; identical to SEQ ID NO: 14715
  Cyclic GFR-binding peptide
  MOD_RES (2)..(33): Xaa is C or S

SEQ ID NO: 48909 - protein, 31 aa, Artificial Sequence; identical to SEQ ID NO: 14717
  Cyclic GFR-binding peptide
  MOD_RES (2)..(2): Xaa is C or S

SEQ ID NO: 48910 - protein, 32 aa, Artificial Sequence; identical to SEQ ID NO: 14718
  Cyclic GFR-binding peptide
  MOD_RES (28)..(29): Xaa is C or S

SEQ ID NO: 48911 - protein, 38 aa, Artificial Sequence; identical to SEQ ID NO: 14719
  Cyclic GFR-binding peptide
  MOD_RES (2)..(4)..(36): Xaa is C or S

SEQ ID NO: 48912 - protein, 35 aa, Artificial Sequence; identical to SEQ ID NO: 14720
  Cyclic GFR-binding peptide
  MOD_RES (32)..(32): Xaa is C or S

SEQ ID NO: 48913 - protein, 24 aa, Artificial Sequence
  Cyclic GFR-binding peptide
MNNSLQEIVNSSDDYYLVTLPELQ

SEQ ID NO: 48914 - protein, 35 aa, Artificial Sequence; identical to SEQ ID NO: 14722
  Cyclic GFR-binding peptide
  MOD_RES (1)..(3)..(35): Xaa is C or S

SEQ ID NO: 48915 - protein, 34 aa, Artificial Sequence; identical to SEQ ID NO: 4225
  Cyclic GFR-binding peptide
  MOD_RES (2)..(33)..(34): Xaa is C or S

SEQ ID NO: 48916 - protein, 38 aa, Artificial Sequence; identical to SEQ ID NO: 14725
  Cyclic GFR-binding peptide
  MOD_RES (2)..(33)..(34): Xaa is C or S

SEQ ID NO: 48917 - protein, 29 aa, Artificial Sequence
  Cyclic GFR-binding peptide
  MOD_RES (28)..(29): Xaa is C or S
VMNSLQEVKPTRGVYYVIPLPELDQPVXX

SEQ ID NO: 48918 - protein, 29 aa, Artificial Sequence
  Cyclic GFR-binding peptide
SKVVMNSLQEVKPTRGVYYLITLPELDQP

SEQ ID NO: 48919 - protein, 23 aa, Artificial Sequence
  Cyclic GFR-binding peptide
MNNSLQEIVNSSDDYYLVTLPEL

SEQ ID NO: 48920 - protein, 31 aa, Artificial Sequence; identical to SEQ ID NO: 14732
  Cyclic GFR-binding peptide
  MOD_RES (30)..(31): Xaa is C or S

SEQ ID NO: 48921 - protein, 31 aa, Artificial Sequence; identical to SEQ ID NO: 14737
  Cyclic GFR-binding peptide
  MOD_RES (2)..(2): Xaa is C or S

SEQ ID NO: 48922 - protein, 38 aa, Artificial Sequence; identical to SEQ ID NO: 4238
  Cyclic GFR-binding peptide
  MOD_RES (2)..(4)..(35)..(36): Xaa is C or S

SEQ ID NO: 48923 - protein, 22 aa, Artificial Sequence
  Cyclic GFR-binding peptide
DNSLQEVVNNASDYYLITLPEL

SEQ ID NO: 48924 - protein, 37 aa, Artificial Sequence; identical to SEQ ID NO: 14740
  Cyclic GFR-binding peptide
  MOD_RES (1)..(3)..(35)..(36): Xaa is C or S

SEQ ID NO: 48925 - protein, 30 aa, Artificial Sequence; identical to SEQ ID NO: 14742
  Cyclic GFR-binding peptide
  MOD_RES (29)..(30): Xaa is C or S

SEQ ID NO: 48926 - protein, 32 aa, Artificial Sequence; identical to SEQ ID NO: 14743
  Cyclic GFR-binding peptide
  MOD_RES (1)..(3): Xaa is C or S

SEQ ID NO: 48927 - protein, 28 aa, Artificial Sequence
  Cyclic GFR-binding peptide
SKVIMEYQKYIKPTKGIIFLISIPSLDQ

SEQ ID NO: 48928 - protein, 36 aa, Artificial Sequence; identical to SEQ ID NO: 4241
  Cyclic GFR-binding peptide
  MOD_RES (1)..(3)..(35)..(36): Xaa is C or S

SEQ ID NO: 48929 - protein, 37 aa, Artificial Sequence; identical to SEQ ID NO: 4246
  Cyclic GFR-binding peptide
  MOD_RES (1)..(32)..(33): Xaa is C or S

SEQ ID NO: 48930 - protein, 33 aa, Artificial Sequence; identical to SEQ ID NO: 14749
  Cyclic GFR-binding peptide
  MOD_RES (27)..(28): Xaa is C or S

SEQ ID NO: 48931 - protein, 37 aa, Artificial Sequence; identical to SEQ ID NO: 14751
  Cyclic GFR-binding peptide
  MOD_RES (1)..(32)..(33): Xaa is C or S

SEQ ID NO: 48932 - protein, 27 aa, Artificial Sequence
  Cyclic GFR-binding peptide
  MOD_RES (1)..(1): Xaa is C or S
XSEVVMDRYKKLVVNNASDFYLISIAN

SEQ ID NO: 48933 - protein, 37 aa, Artificial Sequence; identical to SEQ ID NO: 14753
  Cyclic GFR-binding peptide
  MOD_RES (31)..(32): Xaa is C or S

SEQ ID NO: 48934 - protein, 25 aa, Artificial Sequence
  Cyclic GFR-binding peptide
MRYKKLVKPKRGVFYLISIANLAQP

SEQ ID NO: 48935 - protein, 35 aa, Artificial Sequence
  Cyclic GFR-binding peptide
  MOD_RES (31)..(32): Xaa is C or S
SKVVMNSLQEVKPTRGVYYLITLPELDQPVXXPSA

SEQ ID NO: 48936 - protein, 24 aa, Artificial Sequence
  Cyclic GFR-binding peptide
VMERYKKLVVKDYEDFYLMSIANL

SEQ ID NO: 48937 - protein, 38 aa, Artificial Sequence; identical to SEQ ID NO: 14756
  Cyclic GFR-binding peptide
  MOD_RES (1)..(3)..(35)..(36): Xaa is C or S

SEQ ID NO: 48938 - protein, 22 aa, Artificial Sequence
  Cyclic GFR-binding peptide
MNSLQEVKPTRGVYYVIPLPEL

SEQ ID NO: 48939 - protein, 33 aa, Artificial Sequence; identical to SEQ ID NO: 14760
  Cyclic GFR-binding peptide
  MOD_RES (28)..(29): Xaa is C or S

SEQ ID NO: 48940 - protein, 31 aa, Artificial Sequence; identical to SEQ ID NO: 14761
  Cyclic GFR-binding peptide
  MOD_RES (1)..(1): Xaa is C or S

SEQ ID NO: 48941 - protein, 32 aa, Artificial Sequence; identical to SEQ ID NO: 14762
  Cyclic GFR-binding peptide
  MOD_RES (2)..(2): Xaa is C or S

SEQ ID NO: 48942 - protein, 28 aa, Artificial Sequence
  Cyclic GFR-binding peptide
  MOD_RES (28)..(28): Xaa is C or S
MNNSLQEIVNSSDDYYLVTLPELQTPAX

SEQ ID NO: 48943 - protein, 28 aa, Artificial Sequence
  Cyclic GFR-binding peptide
  MOD_RES (1)..(3): Xaa is C or S
XKXSKVIMNSLQEIKPTKGIYYLITLPE

SEQ ID NO: 48944 - protein, 32 aa, Artificial Sequence; identical to SEQ ID NO: 14765
  Cyclic GFR-binding peptide
  MOD_RES (30)..(31): Xaa is C or S

SEQ ID NO: 48945 - protein, 32 aa, Artificial Sequence; identical to SEQ ID NO: 4262
  Cyclic GFR-binding peptide
  MOD_RES (31)..(32): Xaa is C or S

SEQ ID NO: 48946 - protein, 36 aa, Artificial Sequence; identical to SEQ ID NO: 14770
  Cyclic GFR-binding peptide
  MOD_RES (32)..(33): Xaa is C or S

SEQ ID NO: 48947 - protein, 32 aa, Artificial Sequence; identical to SEQ ID NO: 14771
  Cyclic GFR-binding peptide
  MOD_RES (26)..(26): Xaa is C or S

SEQ ID NO: 48948 - protein, 36 aa, Artificial Sequence; identical to SEQ ID NO: 14774
  Cyclic GFR-binding peptide
  MOD_RES (1)..(33)..(34): Xaa is C or S

SEQ ID NO: 48949 - protein, 39 aa, Artificial Sequence; identical to SEQ ID NO: 4273
  Cyclic GFR-binding peptide
  MOD_RES (2)..(34)..(35): Xaa is C or S

SEQ ID NO: 48950 - protein, 25 aa, Artificial Sequence
  Cyclic GFR-binding peptide
MDNSLQEVVNNASDYYVIPLPELRT

SEQ ID NO: 48951 - protein, 38 aa, Artificial Sequence; identical to SEQ ID NO: 14778
  Cyclic GFR-binding peptide
  MOD_RES (1)..(33)..(34): Xaa is C or S

SEQ ID NO: 48952 - protein, 24 aa, Artificial Sequence
  Cyclic GFR-binding peptide
VVMERYKKLVVKDYEDFYLMSIAN

SEQ ID NO: 48953 - protein, 22 aa, Artificial Sequence
  Cyclic GFR-binding peptide
EYQKYVKPTRGVIFLISIPSLD

SEQ ID NO: 48954 - protein, 23 aa, Artificial Sequence
  Cyclic GFR-binding peptide
MEYQKYIKPTKGIIFLISIPSLD

SEQ ID NO: 48955 - protein, 32 aa, Artificial Sequence; identical to SEQ ID NO: 14784
  Cyclic GFR-binding peptide
  MOD_RES (1)..(1): Xaa is C or S

SEQ ID NO: 48956 - protein, 32 aa, Artificial Sequence; identical to SEQ ID NO: 14786
  Cyclic GFR-binding peptide
  MOD_RES (1)..(3): Xaa is C or S

SEQ ID NO: 48957 - protein, 23 aa, Artificial Sequence
  Cyclic GFR-binding peptide
NSLQEVKPTRGVYYLITLPELDQ

SEQ ID NO: 48958 - protein, 33 aa, Artificial Sequence; identical to SEQ ID NO: 14787
  Cyclic GFR-binding peptide
  MOD_RES (31)..(32): Xaa is C or S

SEQ ID NO: 48959 - protein, 24 aa, Artificial Sequence
  Cyclic GFR-binding peptide
MEYQKYIKPTKGIIFLISIPSLDQ

SEQ ID NO: 48960 - protein, 32 aa, Artificial Sequence; identical to SEQ ID NO: 14789
  Cyclic GFR-binding peptide
  MOD_RES (26)..(27): Xaa is C or S

SEQ ID NO: 48961 - protein, 25 aa, Artificial Sequence
  Cyclic GFR-binding peptide
VVMENSLQEVVKDYEDYYVMPLPEL

SEQ ID NO: 48962 - protein, 29 aa, Artificial Sequence
  Cyclic GFR-binding peptide
  MOD_RES (29)..(29): Xaa is C or S
VIMEYQKYVKPKRGVIFLISIPSLAQPVX

SEQ ID NO: 48963 - protein, 25 aa, Artificial Sequence
  Cyclic GFR-binding peptide
MEEYQKYVVKDYEDIFLMSIPSLET

SEQ ID NO: 48964 - protein, 32 aa, Artificial Sequence; identical to SEQ ID NO: 4285
  Cyclic GFR-binding peptide
  MOD_RES (30)..(31): Xaa is C or S

SEQ ID NO: 48965 - protein, 28 aa, Artificial Sequence
  Cyclic GFR-binding peptide
  MOD_RES (1)..(3): Xaa is C or S
XKXSKVVMNSLQEVKPTRGVYYLITLPE

SEQ ID NO: 48966 - protein, 39 aa, Artificial Sequence; identical to SEQ ID NO: 14794
  Cyclic GFR-binding peptide
  MOD_RES (2)..(4)..(36)..(37): Xaa is C or S

SEQ ID NO: 48967 - protein, 34 aa, Artificial Sequence; identical to SEQ ID NO: 14795
  Cyclic GFR-binding peptide
  MOD_RES (31)..(32): Xaa is C or S

SEQ ID NO: 48968 - protein, 36 aa, Artificial Sequence; identical to SEQ ID NO: 14796
  Cyclic GFR-binding peptide
  MOD_RES (1)..(33)..(34): Xaa is C or S

SEQ ID NO: 48969 - protein, 35 aa, Artificial Sequence; identical to SEQ ID NO: 14797
  Cyclic GFR-binding peptide
  MOD_RES (2)..(4): Xaa is C or S

SEQ ID NO: 48970 - protein, 32 aa, Artificial Sequence; identical to SEQ ID NO: 14798
  Cyclic GFR-binding peptide
  MOD_RES (31)..(32): Xaa is C or S

SEQ ID NO: 48971 - protein, 37 aa, Artificial Sequence; identical to SEQ ID NO: 4288
  Cyclic GFR-binding peptide
  MOD_RES (31)..(32): Xaa is C or S

SEQ ID NO: 48972 - protein, 31 aa, Artificial Sequence; identical to SEQ ID NO: 14801
  Cyclic GFR-binding peptide
  MOD_RES (28)..(29): Xaa is C or S

SEQ ID NO: 48973 - protein, 35 aa, Artificial Sequence; identical to SEQ ID NO: 14802
  Cyclic GFR-binding peptide
  MOD_RES (29)..(30): Xaa is C or S

SEQ ID NO: 48974 - protein, 34 aa, Artificial Sequence; identical to SEQ ID NO: 14803
  Cyclic GFR-binding peptide
  MOD_RES (1)..(33)..(34): Xaa is C or S

SEQ ID NO: 48975 - protein, 30 aa, Artificial Sequence; identical to SEQ ID NO: 14804
  Cyclic GFR-binding peptide
  MOD_RES (2)..(4): Xaa is C or S

SEQ ID NO: 48976 - protein, 31 aa, Artificial Sequence; identical to SEQ ID NO: 14805
  Cyclic GFR-binding peptide
  MOD_RES (31)..(31): Xaa is C or S

SEQ ID NO: 48977 - protein, 28 aa, Artificial Sequence
  Cyclic GFR-binding peptide
SEVVMDNSLQEVVNNASDYYVIPLPELR

SEQ ID NO: 48978 - protein, 33 aa, Artificial Sequence; identical to SEQ ID NO: 4292
  Cyclic GFR-binding peptide
  MOD_RES (31)..(32): Xaa is C or S

SEQ ID NO: 48979 - protein, 34 aa, Artificial Sequence; identical to SEQ ID NO: 14809
  Cyclic GFR-binding peptide
  MOD_RES (31)..(31): Xaa is C or S

SEQ ID NO: 48980 - protein, 35 aa, Artificial Sequence; identical to SEQ ID NO: 14810
  Cyclic GFR-binding peptide
  MOD_RES (29)..(30): Xaa is C or S

SEQ ID NO: 48981 - protein, 35 aa, Artificial Sequence; identical to SEQ ID NO: 14811
  Cyclic GFR-binding peptide
  MOD_RES (1)..(33)..(34): Xaa is C or S

SEQ ID NO: 48982 - protein, 37 aa, Artificial Sequence; identical to SEQ ID NO: 4294
  Cyclic GFR-binding peptide
  MOD_RES (1)..(3)..(35)..(36): Xaa is C or S

SEQ ID NO: 48983 - protein, 34 aa, Artificial Sequence; identical to SEQ ID NO: 4295
  Cyclic GFR-binding peptide
  MOD_RES (1)..(3): Xaa is C or S

SEQ ID NO: 48984 - protein, 31 aa, Artificial Sequence; identical to SEQ ID NO: 4296
  Cyclic GFR-binding peptide
  MOD_RES (2)..(2): Xaa is C or S

SEQ ID NO: 48985 - protein, 31 aa, Artificial Sequence; identical to SEQ ID NO: 4298
  Cyclic GFR-binding peptide
  MOD_RES (2)..(2): Xaa is C or S

SEQ ID NO: 48986 - protein, 39 aa, Artificial Sequence; identical to SEQ ID NO: 14816
  Cyclic GFR-binding peptide
  MOD_RES (1)..(3)..(35)..(36): Xaa is C or S

SEQ ID NO: 48987 - protein, 34 aa, Artificial Sequence; identical to SEQ ID NO: 4304
  Cyclic GFR-binding peptide
  MOD_RES (30)..(31): Xaa is C or S

SEQ ID NO: 48988 - protein, 32 aa, Artificial Sequence; identical to SEQ ID NO: 14819
  Cyclic GFR-binding peptide
  MOD_RES (30)..(31): Xaa is C or S

SEQ ID NO: 48989 - protein, 34 aa, Artificial Sequence; identical to SEQ ID NO: 4306
  Cyclic GFR-binding peptide
  MOD_RES (31)..(32): Xaa is C or S

SEQ ID NO: 48990 - protein, 32 aa, Artificial Sequence; identical to SEQ ID NO: 14821
  Cyclic GFR-binding peptide
  MOD_RES (27)..(28): Xaa is C or S

SEQ ID NO: 48991 - protein, 34 aa, Artificial Sequence; identical to SEQ ID NO: 14823
  Cyclic GFR-binding peptide
  MOD_RES (30)..(31): Xaa is C or S

SEQ ID NO: 48992 - protein, 30 aa, Artificial Sequence; identical to SEQ ID NO: 4308
  Cyclic GFR-binding peptide
  MOD_RES (1)..(1): Xaa is C or S

SEQ ID NO: 48993 - protein, 26 aa, Artificial Sequence
  Cyclic GFR-binding peptide
VVMNNSLQEIVNSSDDYYLVTLPELQ

SEQ ID NO: 48994 - protein, 29 aa, Artificial Sequence
  Cyclic GFR-binding peptide
  MOD_RES (29)..(29): Xaa is C or S
VMDNSLQEVVKENEDYYLMTLPELETPVX

SEQ ID NO: 48995 - protein, 33 aa, Artificial Sequence; identical to SEQ ID NO: 4318
  Cyclic GFR-binding peptide
  MOD_RES (27)..(28): Xaa is C or S

SEQ ID NO: 48996 - protein, 37 aa, Artificial Sequence; identical to SEQ ID NO: 14829
  Cyclic GFR-binding peptide
  MOD_RES (2)..(4)..(36)..(37): Xaa is C or S

SEQ ID NO: 48997 - protein, 30 aa, Artificial Sequence; identical to SEQ ID NO: 4323
  Cyclic GFR-binding peptide
  MOD_RES (26)..(27): Xaa is C or S

SEQ ID NO: 48998 - protein, 21 aa, Artificial Sequence
  Cyclic GFR-binding peptide
RYKKLIKPTKGIFYLISIANL

SEQ ID NO: 48999 - protein, 31 aa, Artificial Sequence; identical to SEQ ID NO: 14833
  Cyclic GFR-binding peptide
  MOD_RES (26)..(27): Xaa is C or S

SEQ ID NO: 49000 - protein, 37 aa, Artificial Sequence; identical to SEQ ID NO: 14834
  Cyclic GFR-binding peptide
  MOD_RES (2)..(34)..(35): Xaa is C or S

SEQ ID NO: 49001 - protein, 40 aa, Artificial Sequence; identical to SEQ ID NO: 4330
  Cyclic GFR-binding peptide
  MOD_RES (2)..(4)..(35)..(36): Xaa is C or S

SEQ ID NO: 49002 - protein, 36 aa, Artificial Sequence; identical to SEQ ID NO: 14836
  Cyclic GFR-binding peptide
  MOD_RES (1)..(32)..(33): Xaa is C or S

SEQ ID NO: 49003 - protein, 33 aa, Artificial Sequence; identical to SEQ ID NO: 4333
  Cyclic GFR-binding peptide
  MOD_RES (2)..(4): Xaa is C or S

SEQ ID NO: 49004 - protein, 29 aa, Artificial Sequence
  Cyclic GFR-binding peptide
  MOD_RES (27)..(28): Xaa is C or S
NNSLQEIVNSSDDYYLVTLPELQTPAXXP

SEQ ID NO: 49005 - protein, 31 aa, Artificial Sequence; identical to SEQ ID NO: 4334
  Cyclic GFR-binding peptide
  MOD_RES (1)..(3): Xaa is C or S

SEQ ID NO: 49006 - protein, 25 aa, Artificial Sequence
  Cyclic GFR-binding peptide
VIMRYKKLVKPKRGVFYLISIANLA

SEQ ID NO: 49007 - protein, 31 aa, Artificial Sequence; identical to SEQ ID NO: 14842
  Cyclic GFR-binding peptide
  MOD_RES (1)..(3): Xaa is C or S

SEQ ID NO: 49008 - protein, 28 aa, Artificial Sequence
  Cyclic GFR-binding peptide
  MOD_RES (28)..(28): Xaa is C or S
IMNSLQEIKPTKGIYYVIPLPELDQSVX

SEQ ID NO: 49009 - protein, 31 aa, Artificial Sequence; identical to SEQ ID NO: 14847
  Cyclic GFR-binding peptide
  MOD_RES (30)..(31): Xaa is C or S

SEQ ID NO: 49010 - protein, 28 aa, Artificial Sequence
  Cyclic GFR-binding peptide
SKVVMRYKKLVKPTRGVFYLISIANLDQ

SEQ ID NO: 49011 - protein, 36 aa, Artificial Sequence; identical to SEQ ID NO: 14852
  Cyclic GFR-binding peptide
  MOD_RES (32)..(33): Xaa is C or S

SEQ ID NO: 49012 - protein, 34 aa, Artificial Sequence; identical to SEQ ID NO: 14853
  Cyclic GFR-binding peptide
  MOD_RES (30)..(30): Xaa is C or S

SEQ ID NO: 49013 - protein, 30 aa, Artificial Sequence; identical to SEQ ID NO: 14854
  Cyclic GFR-binding peptide
  MOD_RES (29)..(30): Xaa is C or S

SEQ ID NO: 49014 - protein, 34 aa, Artificial Sequence; identical to SEQ ID NO: 14855
  Cyclic GFR-binding peptide
  MOD_RES (31)..(32): Xaa is C or S

SEQ ID NO: 49015 - protein, 20 aa, Artificial Sequence
  Cyclic GFR-binding peptide
NSLQEVVKENEDYYLMTLPE

SEQ ID NO: 49016 - protein, 34 aa, Artificial Sequence; identical to SEQ ID NO: 14860
  Cyclic GFR-binding peptide
  MOD_RES (31)..(32): Xaa is C or S

SEQ ID NO: 49017 - protein, 33 aa, Artificial Sequence; identical to SEQ ID NO: 14864
  Cyclic GFR-binding peptide
  MOD_RES (1)..(33): Xaa is C or S

SEQ ID NO: 49018 - protein, 36 aa, Artificial Sequence; identical to SEQ ID NO: 14865
  Cyclic GFR-binding peptide
  MOD_RES (1)..(33)..(34): Xaa is C or S

SEQ ID NO: 49019 - protein, 34 aa, Artificial Sequence; identical to SEQ ID NO: 14866
  Cyclic GFR-binding peptide
  MOD_RES (31)..(32): Xaa is C or S

SEQ ID NO: 49020 - protein, 36 aa, Artificial Sequence; identical to SEQ ID NO: 14868
  Cyclic GFR-binding peptide
  MOD_RES (31)..(32): Xaa is C or S

SEQ ID NO: 49021 - protein, 28 aa, Artificial Sequence
  Cyclic GFR-binding peptide
  MOD_RES (27)..(28): Xaa is C or S
NNSLQEIVNSSDDYYVVPLPELKTPAXX

SEQ ID NO: 49022 - protein, 36 aa, Artificial Sequence; identical to SEQ ID NO: 14872
  Cyclic GFR-binding peptide
  MOD_RES (2)..(34)..(35): Xaa is C or S

SEQ ID NO: 49023 - protein, 39 aa, Artificial Sequence; identical to SEQ ID NO: 14873
  Cyclic GFR-binding peptide
  MOD_RES (1)..(33)..(34): Xaa is C or S

SEQ ID NO: 49024 - protein, 29 aa, Artificial Sequence
  Cyclic GFR-binding peptide
KVIMRYKKLIKPTKGIFYLISIANLDQSV

SEQ ID NO: 49025 - protein, 32 aa, Artificial Sequence; identical to SEQ ID NO: 4376
  Cyclic GFR-binding peptide
  MOD_RES (28)..(29): Xaa is C or S

SEQ ID NO: 49026 - protein, 39 aa, Artificial Sequence; identical to SEQ ID NO: 14877
  Cyclic GFR-binding peptide
  MOD_RES (2)..(4)..(35)..(36): Xaa is C or S

SEQ ID NO: 49027 - protein, 39 aa, Artificial Sequence; identical to SEQ ID NO: 14878
  Cyclic GFR-binding peptide
  MOD_RES (1)..(33)..(34): Xaa is C or S

SEQ ID NO: 49028 - protein, 24 aa, Artificial Sequence
  Cyclic GFR-binding peptide
VIMEYQKYIKPTKGIIFLISIPSL

SEQ ID NO: 49029 - protein, 23 aa, Artificial Sequence
  Cyclic GFR-binding peptide
IMEYQKYVKPKRGVIFLISIPSL

SEQ ID NO: 49030 - protein, 31 aa, Artificial Sequence; identical to SEQ ID NO: 14881
  Cyclic GFR-binding peptide
  MOD_RES (27)..(28): Xaa is C or S

SEQ ID NO: 49031 - protein, 38 aa, Artificial Sequence
  Cyclic GFR-binding peptide
  MOD_RES (1)..(3)..(34)..(35): Xaa is C or S
XKXSKVVMNSLQEVKPTRGVYYLITLPELDQPVXXPSA

SEQ ID NO: 49032 - protein, 37 aa, Artificial Sequence; identical to SEQ ID NO: 14883
  Cyclic GFR-binding peptide
  MOD_RES (2)..(34)..(35): Xaa is C or S

SEQ ID NO: 49033 - protein, 37 aa, Artificial Sequence; identical to SEQ ID NO: 14884
  Cyclic GFR-binding peptide
  MOD_RES (31)..(32): Xaa is C or S

SEQ ID NO: 49034 - protein, 31 aa, Artificial Sequence; identical to SEQ ID NO: 14886
  Cyclic GFR-binding peptide
  MOD_RES (28)..(29): Xaa is C or S

SEQ ID NO: 49035 - protein, 32 aa, Artificial Sequence; identical to SEQ ID NO: 14888
  Cyclic GFR-binding peptide
  MOD_RES (32)..(32): Xaa is C or S

SEQ ID NO: 49036 - protein, 39 aa, Artificial Sequence; identical to SEQ ID NO: 14889
  Cyclic GFR-binding peptide
  MOD_RES (1)..(3)..(35)..(36): Xaa is C or S

SEQ ID NO: 49037 - protein, 21 aa, Artificial Sequence
  Cyclic GFR-binding peptide
MNSLQEIKPTKGIYYLITLPE

SEQ ID NO: 49038 - protein, 22 aa, Artificial Sequence
  Cyclic GFR-binding peptide
MEYQKYVKPKRGVIFLISIPSL

SEQ ID NO: 49039 - protein, 33 aa, Artificial Sequence; identical to SEQ ID NO: 4395
  Cyclic GFR-binding peptide
  MOD_RES (1)..(3): Xaa is C or S

SEQ ID NO: 49040 - protein, 37 aa, Artificial Sequence; identical to SEQ ID NO: 14895
  Cyclic GFR-binding peptide
  MOD_RES (1)..(3)..(34)..(35): Xaa is C or S

SEQ ID NO: 49041 - protein, 37 aa, Artificial Sequence; identical to SEQ ID NO: 4400
  Cyclic GFR-binding peptide
  MOD_RES (32)..(33): Xaa is C or S

SEQ ID NO: 49042 - protein, 33 aa, Artificial Sequence; identical to SEQ ID NO: 4402
  Cyclic GFR-binding peptide
  MOD_RES (1)..(32)..(33): Xaa is C or S

SEQ ID NO: 49043 - protein, 36 aa, Artificial Sequence; identical to SEQ ID NO: 14901
  Cyclic GFR-binding peptide
  MOD_RES (30)..(31): Xaa is C or S

SEQ ID NO: 49044 - protein, 26 aa, Artificial Sequence
  Cyclic GFR-binding peptide
VMNNSLQEIVNSSDDYYLVTLPELKT

SEQ ID NO: 49045 - protein, 32 aa, Artificial Sequence; identical to SEQ ID NO: 14909
  Cyclic GFR-binding peptide
  MOD_RES (1)..(1): Xaa is C or S

SEQ ID NO: 49046 - protein, 28 aa, Artificial Sequence
  Cyclic GFR-binding peptide
SRVVMNRYKKLIVNSSDDFYLVSIANLK

SEQ ID NO: 49047 - protein, 28 aa, Artificial Sequence
  Cyclic GFR-binding peptide
  MOD_RES (2)..(2): Xaa is C or S
KXSKVIMRYKKLIKPTKGIFYLISIANL

SEQ ID NO: 49048 - protein, 28 aa, Artificial Sequence
  Cyclic GFR-binding peptide
ARVVMNEYQKYIVNSSDDIFLVSIPSLQ

SEQ ID NO: 49049 - protein, 30 aa, Artificial Sequence; identical to SEQ ID NO: 14918
  Cyclic GFR-binding peptide
  MOD_RES (26)..(27): Xaa is C or S

SEQ ID NO: 49050 - protein, 35 aa, Artificial Sequence; identical to SEQ ID NO: 14919
  Cyclic GFR-binding peptide
  MOD_RES (2)..(34)..(35): Xaa is C or S

SEQ ID NO: 49051 - protein, 26 aa, Artificial Sequence
  Cyclic GFR-binding peptide
SRVVMNEYQKYIVNSSDDIFLVSIPS

SEQ ID NO: 49052 - protein, 33 aa, Artificial Sequence; identical to SEQ ID NO: 14921
  Cyclic GFR-binding peptide
  MOD_RES (32)..(32): Xaa is C or S

SEQ ID NO: 49053 - protein, 39 aa, Artificial Sequence; identical to SEQ ID NO: 14923
  Cyclic GFR-binding peptide
  MOD_RES (2)..(33)..(34): Xaa is C or S

SEQ ID NO: 49054 - protein, 31 aa, Artificial Sequence; identical to SEQ ID NO: 14924
  Cyclic GFR-binding peptide
  MOD_RES (26)..(27): Xaa is C or S

SEQ ID NO: 49055 - protein, 29 aa, Artificial Sequence
  Cyclic GFR-binding peptide
  MOD_RES (1)..(3): Xaa is C or S
XKXSRVIMRYKKLVKPKRGVFYLISIANL

SEQ ID NO: 49056 - protein, 25 aa, Artificial Sequence
  Cyclic GFR-binding peptide
NRYKKLIVNSSDDFYLVSIANLKTP

SEQ ID NO: 49057 - protein, 28 aa, Artificial Sequence
  Cyclic GFR-binding peptide
EVVMEEYQKYVVKDYEDIFLMSIPSLET

SEQ ID NO: 49058 - protein, 34 aa, Artificial Sequence; identical to SEQ ID NO: 14928
  Cyclic GFR-binding peptide
  MOD_RES (2)..(4): Xaa is C or S

SEQ ID NO: 49059 - protein, 28 aa, Artificial Sequence
  Cyclic GFR-binding peptide
  MOD_RES (1)..(3): Xaa is C or S
XKXSKVVMRYKKLVKPTRGVFYLISIAN

SEQ ID NO: 49060 - protein, 22 aa, Artificial Sequence
  Cyclic GFR-binding peptide
RYKKLVVKENEDFYLMSIANLE

SEQ ID NO: 49061 - protein, 32 aa, Artificial Sequence; identical to SEQ ID NO: 4434
  Cyclic GFR-binding peptide
  MOD_RES (32)..(32): Xaa is C or S

SEQ ID NO: 49062 - protein, 24 aa, Artificial Sequence
  Cyclic GFR-binding peptide
EYQKYVKPTRGVIFLISIPSLDQP

SEQ ID NO: 49063 - protein, 30 aa, Artificial Sequence; identical to SEQ ID NO: 14939
  Cyclic GFR-binding peptide
  MOD_RES (30)..(30): Xaa is C or S

SEQ ID NO: 49064 - protein, 26 aa, Artificial Sequence
  Cyclic GFR-binding peptide
MNSLQEIKPTKGIYYLITLPELDQSV

SEQ ID NO: 49065 - protein, 36 aa, Artificial Sequence; identical to SEQ ID NO: 14942
  Cyclic GFR-binding peptide
  MOD_RES (1)..(3)..(34)..(35): Xaa is C or S

SEQ ID NO: 49066 - protein, 36 aa, Artificial Sequence; identical to SEQ ID NO: 14943
  Cyclic GFR-binding peptide
  MOD_RES (30)..(31): Xaa is C or S

SEQ ID NO: 49067 - protein, 30 aa, Artificial Sequence; identical to SEQ ID NO: 4444
  Cyclic GFR-binding peptide

SEQ ID NO: 49068 - protein, 24 aa, Artificial Sequence
  Cyclic GFR-binding peptide
VMRYKKLVKPTRGVFYLISIANLD

SEQ ID NO: 49069 - protein, 32 aa, Artificial Sequence; identical to SEQ ID NO: 4447
  Cyclic GFR-binding peptide
  MOD_RES (32)..(32): Xaa is C or S

SEQ ID NO: 49070 - protein, 28 aa, Artificial Sequence
  Cyclic GFR-binding peptide
  MOD_RES (27)..(28): Xaa is C or S
NRYKKLIVNSSDDFYLVSIANLKTPAXX

SEQ ID NO: 49071 - protein, 31 aa, Artificial Sequence; identical to SEQ ID NO: 14949
  Cyclic GFR-binding peptide
  MOD_RES (1)..(3): Xaa is C or S

SEQ ID NO: 49072 - protein, 28 aa, Artificial Sequence
  Cyclic GFR-binding peptide
  MOD_RES (26)..(27): Xaa is C or S
EYQKYIVNSSDDIFLVSIPSLQTPAXXP

SEQ ID NO: 49073 - protein, 27 aa, Artificial Sequence
  Cyclic GFR-binding peptide
VMNEYQKYIVNSSDDIFLVSIPSLKTP

SEQ ID NO: 49074 - protein, 40 aa, Artificial Sequence; identical to SEQ ID NO: 4453
  Cyclic GFR-binding peptide
  MOD_RES (2)..(34)..(35): Xaa is C or S

SEQ ID NO: 49075 - protein, 39 aa, Artificial Sequence; identical to SEQ ID NO: 4455
  Cyclic GFR-binding peptide
  MOD_RES (2)..(4)..(36)..(37): Xaa is C or S

SEQ ID NO: 49076 - protein, 36 aa, Artificial Sequence; identical to SEQ ID NO: 4457
  Cyclic GFR-binding peptide
  MOD_RES (30)..(31): Xaa is C or S

SEQ ID NO: 49077 - protein, 38 aa, Artificial Sequence; identical to SEQ ID NO: 14958
  Cyclic GFR-binding peptide
  MOD_RES (1)..(33)..(34): Xaa is C or S

SEQ ID NO: 49078 - protein, 37 aa, Artificial Sequence; identical to SEQ ID NO: 14961
  Cyclic GFR-binding peptide
  MOD_RES (1)..(33)..(34): Xaa is C or S

SEQ ID NO: 49079 - protein, 35 aa, Artificial Sequence; identical to SEQ ID NO: 14962
  Cyclic GFR-binding peptide
  MOD_RES (1)..(32)..(33): Xaa is C or S

SEQ ID NO: 49080 - protein, 35 aa, Artificial Sequence; identical to SEQ ID NO: 14963
  Cyclic GFR-binding peptide
  MOD_RES (31)..(32): Xaa is C or S

SEQ ID NO: 49081 - protein, 32 aa, Artificial Sequence; identical to SEQ ID NO: 14965
  Cyclic GFR-binding peptide
  MOD_RES (1)..(32): Xaa is C or S

SEQ ID NO: 49082 - protein, 34 aa, Artificial Sequence; identical to SEQ ID NO: 14966
  Cyclic GFR-binding peptide
  MOD_RES (30)..(31): Xaa is C or S

SEQ ID NO: 49083 - protein, 30 aa, Artificial Sequence; identical to SEQ ID NO: 14967
  Cyclic GFR-binding peptide
  MOD_RES (29)..(30): Xaa is C or S

SEQ ID NO: 49084 - protein, 31 aa, Artificial Sequence; identical to SEQ ID NO: 4464
  Cyclic GFR-binding peptide
  MOD_RES (30)..(31): Xaa is C or S

SEQ ID NO: 49085 - protein, 36 aa, Artificial Sequence; identical to SEQ ID NO: 14970
  Cyclic GFR-binding peptide
  MOD_RES (1)..(3)..(34)..(35): Xaa is C or S

SEQ ID NO: 49086 - protein, 23 aa, Artificial Sequence
  Cyclic GFR-binding peptide
NEYQKYIVNSSDDIFLVSIPSLK

SEQ ID NO: 49087 - protein, 31 aa, Artificial Sequence; identical to SEQ ID NO: 14972
  Cyclic GFR-binding peptide
  MOD_RES (1)..(1): Xaa is C or S

SEQ ID NO: 49088 - protein, 37 aa, Artificial Sequence; identical to SEQ ID NO: 14973
  Cyclic GFR-binding peptide
  MOD_RES (1)..(3)..(35)..(36): Xaa is C or S

SEQ ID NO: 49089 - protein, 31 aa, Artificial Sequence; identical to SEQ ID NO: 14974
  Cyclic GFR-binding peptide
  MOD_RES (1)..(1): Xaa is C or S

SEQ ID NO: 49090 - protein, 40 aa, Artificial Sequence; identical to SEQ ID NO: 14976
  Cyclic GFR-binding peptide
  MOD_RES (2)..(4)..(36)..(37): Xaa is C or S

SEQ ID NO: 49091 - protein, 26 aa, Artificial Sequence
  Cyclic GFR-binding peptide
ARVVMNEYQKYIVNSSDDIFLVSIPS

SEQ ID NO: 49092 - protein, 33 aa, Artificial Sequence; identical to SEQ ID NO: 14979
  Cyclic GFR-binding peptide
  MOD_RES (1)..(3): Xaa is C or S

SEQ ID NO: 49093 - protein, 41 aa, Artificial Sequence; identical to SEQ ID NO: 14981
  Cyclic GFR-binding peptide
  MOD_RES (2)..(4)..(36)..(37): Xaa is C or S

SEQ ID NO: 49094 - protein, 41 aa, Artificial Sequence; identical to SEQ ID NO: 4476
  Cyclic GFR-binding peptide
  MOD_RES (1)..(3)..(35)..(36): Xaa is C or S

SEQ ID NO: 49095 - protein, 32 aa, Artificial Sequence; identical to SEQ ID NO: 14983
  Cyclic GFR-binding peptide
  MOD_RES (30)..(31): Xaa is C or S

SEQ ID NO: 49096 - protein, 29 aa, Artificial Sequence
  Cyclic GFR-binding peptide
  MOD_RES (1)..(1): Xaa is C or S
XSRVVMNEYQKYIVNSSDDIFLVSIPSLK

SEQ ID NO: 49097 - protein, 30 aa, Artificial Sequence; identical to SEQ ID NO: 14988
  Cyclic GFR-binding peptide
  MOD_RES (29)..(30): Xaa is C or S

SEQ ID NO: 49098 - protein, 35 aa, Artificial Sequence; identical to SEQ ID NO: 14989
  Cyclic GFR-binding peptide
  MOD_RES (32)..(33): Xaa is C or S

SEQ ID NO: 49099 - protein, 21 aa, Artificial Sequence
  Cyclic GFR-binding peptide
ENSLQEVVKDYEDYYVMPLPE

SEQ ID NO: 49100 - protein, 28 aa, Artificial Sequence
  Cyclic GFR-binding peptide
  MOD_RES (28)..(28): Xaa is C or S
IMNSLQEVKPKRGVYYLITLPELAQPVX

SEQ ID NO: 49101 - protein, 39 aa, Artificial Sequence; identical to SEQ ID NO: 4487
  Cyclic GFR-binding peptide
  MOD_RES (2)..(4)..(36)..(37): Xaa is C or S

SEQ ID NO: 49102 - protein, 25 aa, Artificial Sequence
  Cyclic GFR-binding peptide
RYKKLIVNSSDDFYLVSIANLKTPA

SEQ ID NO: 49103 - protein, 40 aa, Artificial Sequence; identical to SEQ ID NO: 14996
  Cyclic GFR-binding peptide
  MOD_RES (2)..(4)..(36)..(37): Xaa is C or S

SEQ ID NO: 49104 - protein, 32 aa, Artificial Sequence; identical to SEQ ID NO: 15001
  Cyclic GFR-binding peptide
  MOD_RES (26)..(27): Xaa is C or S

SEQ ID NO: 49105 - protein, 38 aa, Artificial Sequence; identical to SEQ ID NO: 15002
  Cyclic GFR-binding peptide
  MOD_RES (2)..(4)..(36)..(37): Xaa is C or S

SEQ ID NO: 49106 - protein, 29 aa, Artificial Sequence
  Cyclic GFR-binding peptide
  MOD_RES (26)..(27): Xaa is C or S
NSLQEVVKDYEDYYLMTLPELETPVXXAK

SEQ ID NO: 49107 - protein, 24 aa, Artificial Sequence
  Cyclic GFR-binding peptide
RYKKLVVKDYEDFYLMSIANLETP

SEQ ID NO: 49108 - protein, 36 aa, Artificial Sequence; identical to SEQ ID NO: 15005
  Cyclic GFR-binding peptide
  MOD_RES (1)..(33)..(34): Xaa is C or S

SEQ ID NO: 49109 - protein, 37 aa, Artificial Sequence; identical to SEQ ID NO: 4499
  Cyclic GFR-binding peptide
  MOD_RES (1)..(3)..(34)..(35): Xaa is C or S

SEQ ID NO: 49110 - protein, 34 aa, Artificial Sequence; identical to SEQ ID NO: 15007
  Cyclic GFR-binding peptide
  MOD_RES (28)..(29): Xaa is C or S

SEQ ID NO: 49111 - protein, 40 aa, Artificial Sequence; identical to SEQ ID NO: 15009
  Cyclic GFR-binding peptide
  MOD_RES (2)..(4)..(36)..(37): Xaa is C or S

SEQ ID NO: 49112 - protein, 33 aa, Artificial Sequence; identical to SEQ ID NO: 4503
  Cyclic GFR-binding peptide
  MOD_RES (28)..(29): Xaa is C or S

SEQ ID NO: 49113 - protein, 35 aa, Artificial Sequence; identical to SEQ ID NO: 15013
  Cyclic GFR-binding peptide
  MOD_RES (2)..(34)..(35): Xaa is C or S

SEQ ID NO: 49114 - protein, 29 aa, Artificial Sequence
  Cyclic GFR-binding peptide
  MOD_RES (2)..(2): Xaa is C or S
GXSEVVMDNSLQEVVNNASDYYLITLPEL

SEQ ID NO: 49115 - protein, 25 aa, Artificial Sequence
  Cyclic GFR-binding peptide
EVVMEEYQKYVVKDYEDIFLMSIPS

SEQ ID NO: 49116 - protein, 39 aa, Artificial Sequence; identical to SEQ ID NO: 15018
  Cyclic GFR-binding peptide
  MOD_RES (1)..(3)..(35)..(36): Xaa is C or S

SEQ ID NO: 49117 - protein, 28 aa, Artificial Sequence
  Cyclic GFR-binding peptide
  MOD_RES (28)..(28): Xaa is C or S
MDNSLQEVVKENEDYYVMPLPELETPVX

SEQ ID NO: 49118 - protein, 24 aa, Artificial Sequence
  Cyclic GFR-binding peptide
NSLQEIKPTKGIYYLITLPELDQS

SEQ ID NO: 49119 - protein, 32 aa, Artificial Sequence; identical to SEQ ID NO: 15021
  Cyclic GFR-binding peptide
  MOD_RES (1)..(3): Xaa is C or S

SEQ ID NO: 49120 - protein, 37 aa, Artificial Sequence; identical to SEQ ID NO: 15022
  Cyclic GFR-binding peptide
  MOD_RES (32)..(33): Xaa is C or S

SEQ ID NO: 49121 - protein, 31 aa, Artificial Sequence
  Cyclic GFR-binding peptide
  MOD_RES (26)..(27): Xaa is C or S
NSLQEVKPTRGVYYLITLPELDQPVXXPSAS

SEQ ID NO: 49122 - protein, 29 aa, Artificial Sequence
  Cyclic GFR-binding peptide
  MOD_RES (28)..(29): Xaa is C or S
MDNSLQEVVNNASDYYLITLPELRTPVXX

SEQ ID NO: 49123 - protein, 28 aa, Artificial Sequence
  Cyclic GFR-binding peptide
VVMNEYQKYIVNSSDDIFLVSIPSLQTP

SEQ ID NO: 49124 - protein, 23 aa, Artificial Sequence
  Cyclic GFR-binding peptide
MNSLQEIKPTKGIYYLITLPELD

SEQ ID NO: 49125 - protein, 25 aa, Artificial Sequence
  Cyclic GFR-binding peptide
VIMEYQKYIKPTKGIIFLISIPSLD

SEQ ID NO: 49126 - protein, 27 aa, Artificial Sequence
  Cyclic GFR-binding peptide
MNNSLQEIVNSSDDYYVVPLPELKTPA

SEQ ID NO: 49127 - protein, 29 aa, Artificial Sequence
  Cyclic GFR-binding peptide
  MOD_RES (2)..(2): Xaa is C or S
GXARVVMNEYQKYIVNSSDDIFLVSIPSL

SEQ ID NO: 49128 - protein, 32 aa, Artificial Sequence; identical to SEQ ID NO: 15031
  Cyclic GFR-binding peptide
  MOD_RES (31)..(32): Xaa is C or S

SEQ ID NO: 49129 - protein, 33 aa, Artificial Sequence; identical to SEQ ID NO: 4519
  Cyclic GFR-binding peptide
  MOD_RES (2)..(4): Xaa is C or S

SEQ ID NO: 49130 - protein, 32 aa, Artificial Sequence; identical to SEQ ID NO: 15033
  Cyclic GFR-binding peptide
  MOD_RES (2)..(2): Xaa is C or S

SEQ ID NO: 49131 - protein, 36 aa, Artificial Sequence; identical to SEQ ID NO: 15034
  Cyclic GFR-binding peptide
  MOD_RES (1)..(3)..(34)..(35): Xaa is C or S

SEQ ID NO: 49132 - protein, 29 aa, Artificial Sequence
  Cyclic GFR-binding peptide
SKVVMRYKKLVKPTRGVFYLISIANLDQP

SEQ ID NO: 49133 - protein, 39 aa, Artificial Sequence; identical to SEQ ID NO: 15038
  Cyclic GFR-binding peptide
  MOD_RES (1)..(33)..(34): Xaa is C or S

SEQ ID NO: 49134 - protein, 27 aa, Artificial Sequence
  Cyclic GFR-binding peptide
  MOD_RES (26)..(27): Xaa is C or S
NSLQEIVNSSDDYYVVPLPELQTPAXX

SEQ ID NO: 49135 - protein, 40 aa, Artificial Sequence; identical to SEQ ID NO: 15040
  Cyclic GFR-binding peptide
  MOD_RES (2)..(4)..(35)..(36): Xaa is C or S

SEQ ID NO: 49136 - protein, 39 aa, Artificial Sequence; identical to SEQ ID NO: 15042
  Cyclic GFR-binding peptide
  MOD_RES (2)..(4)..(35)..(36): Xaa is C or S

SEQ ID NO: 49137 - protein, 39 aa, Artificial Sequence; identical to SEQ ID NO: 4528
  Cyclic GFR-binding peptide
  MOD_RES (2)..(33)..(34): Xaa is C or S

SEQ ID NO: 49138 - protein, 30 aa, Artificial Sequence; identical to SEQ ID NO: 15045
  Cyclic GFR-binding peptide

SEQ ID NO: 49139 - protein, 35 aa, Artificial Sequence; identical to SEQ ID NO: 15048
  Cyclic GFR-binding peptide
  MOD_RES (29)..(30): Xaa is C or S

SEQ ID NO: 49140 - protein, 29 aa, Artificial Sequence
  Cyclic GFR-binding peptide
  MOD_RES (28)..(29): Xaa is C or S
IMNSLQEIKPTKGIYYVIPLPELDQSVXX

SEQ ID NO: 49141 - protein, 37 aa, Artificial Sequence; identical to SEQ ID NO: 15055
  Cyclic GFR-binding peptide
  MOD_RES (31)..(32): Xaa is C or S

SEQ ID NO: 49142 - protein, 30 aa, Artificial Sequence; identical to SEQ ID NO: 4556
  Cyclic GFR-binding peptide
  MOD_RES (28)..(29): Xaa is C or S

SEQ ID NO: 49143 - protein, 25 aa, Artificial Sequence
  Cyclic GFR-binding peptide
VMDNSLQEVVNNASDYYVIPLPELR

SEQ ID NO: 49144 - protein, 34 aa, Artificial Sequence; identical to SEQ ID NO: 4561
  Cyclic GFR-binding peptide
  MOD_RES (29)..(29): Xaa is C or S

SEQ ID NO: 49145 - protein, 27 aa, Artificial Sequence
  Cyclic GFR-binding peptide
  MOD_RES (1)..(1): Xaa is C or S
XGEVVMDNSLQEVVKENEDYYVMPLPE

SEQ ID NO: 49146 - protein, 32 aa, Artificial Sequence; identical to SEQ ID NO: 15064
  Cyclic GFR-binding peptide
  MOD_RES (29)..(30): Xaa is C or S

SEQ ID NO: 49147 - protein, 21 aa, Artificial Sequence
  Cyclic GFR-binding peptide
ERYKKLVVKDYEDFYLMSIAN

SEQ ID NO: 49148 - protein, 33 aa, Artificial Sequence; identical to SEQ ID NO: 4568
  Cyclic GFR-binding peptide
  MOD_RES (29)..(30): Xaa is C or S

SEQ ID NO: 49149 - protein, 38 aa, Artificial Sequence; identical to SEQ ID NO: 15070
  Cyclic GFR-binding peptide
  MOD_RES (2)..(4)..(36)..(37): Xaa is C or S

SEQ ID NO: 49150 - protein, 35 aa, Artificial Sequence; identical to SEQ ID NO: 15072
  Cyclic GFR-binding peptide
  MOD_RES (1)..(33)..(34): Xaa is C or S

SEQ ID NO: 49151 - protein, 21 aa, Artificial Sequence
  Cyclic GFR-binding peptide
RYKKLVVKENEDFYLMSIANL

SEQ ID NO: 49152 - protein, 34 aa, Artificial Sequence; identical to SEQ ID NO: 15076
  Cyclic GFR-binding peptide
  MOD_RES (32)..(33): Xaa is C or S

SEQ ID NO: 49153 - protein, 37 aa, Artificial Sequence; identical to SEQ ID NO: 15077
  Cyclic GFR-binding peptide
  MOD_RES (2)..(4)..(36)..(37): Xaa is C or S

SEQ ID NO: 49154 - protein, 28 aa, Artificial Sequence
  Cyclic GFR-binding peptide
  MOD_RES (26)..(27): Xaa is C or S
RYKKLVVKDYEDFYLMSIANLETPVXXA

SEQ ID NO: 49155 - protein, 35 aa, Artificial Sequence; identical to SEQ ID NO: 4582
  Cyclic GFR-binding peptide
  MOD_RES (30)..(31): Xaa is C or S

SEQ ID NO: 49156 - protein, 27 aa, Artificial Sequence
  Cyclic GFR-binding peptide
  MOD_RES (27)..(27): Xaa is C or S
ERYKKLVVKDYEDFYLMSIANLETPVX

SEQ ID NO: 49157 - protein, 29 aa, Artificial Sequence
  Cyclic GFR-binding peptide
  MOD_RES (26)..(27): Xaa is C or S
RYKKLVVNNASDFYLISIANLRTPVXXTP

SEQ ID NO: 49158 - protein, 32 aa, Artificial Sequence; identical to SEQ ID NO: 15084
  Cyclic GFR-binding peptide
  MOD_RES (29)..(29): Xaa is C or S

SEQ ID NO: 49159 - protein, 30 aa, Artificial Sequence; identical to SEQ ID NO: 15087
  Cyclic GFR-binding peptide

SEQ ID NO: 49160 - protein, 31 aa, Artificial Sequence; identical to SEQ ID NO: 15088
  Cyclic GFR-binding peptide
  MOD_RES (1)..(1): Xaa is C or S

SEQ ID NO: 49161 - protein, 35 aa, Artificial Sequence; identical to SEQ ID NO: 15090
  Cyclic GFR-binding peptide
  MOD_RES (2)..(34)..(35): Xaa is C or S

SEQ ID NO: 49162 - protein, 35 aa, Artificial Sequence; identical to SEQ ID NO: 15092
  Cyclic GFR-binding peptide
  MOD_RES (2)..(34)..(35): Xaa is C or S

SEQ ID NO: 49163 - protein, 29 aa, Artificial Sequence
  Cyclic GFR-binding peptide
  MOD_RES (28)..(29): Xaa is C or S
MDNSLQEVVKENEDYYVMPLPELETPVXX

SEQ ID NO: 49164 - protein, 39 aa, Artificial Sequence; identical to SEQ ID NO: 15094
  Cyclic GFR-binding peptide
  MOD_RES (1)..(33): Xaa is C or S

SEQ ID NO: 49165 - protein, 32 aa, Artificial Sequence; identical to SEQ ID NO: 15095
  Cyclic GFR-binding peptide
  MOD_RES (2)..(2): Xaa is C or S

SEQ ID NO: 49166 - protein, 32 aa, Artificial Sequence; identical to SEQ ID NO: 15096
  Cyclic GFR-binding peptide
  MOD_RES (28)..(29): Xaa is C or S

SEQ ID NO: 49167 - protein, 22 aa, Artificial Sequence
  Cyclic GFR-binding peptide
IMEYQKYIKPTKGIIFLISIPS

SEQ ID NO: 49168 - protein, 30 aa, Artificial Sequence; identical to SEQ ID NO: 4601
  Cyclic GFR-binding peptide

SEQ ID NO: 49169 - protein, 34 aa, Artificial Sequence; identical to SEQ ID NO: 15100
  Cyclic GFR-binding peptide
  MOD_RES (2)..(33)..(34): Xaa is C or S

SEQ ID NO: 49170 - protein, 32 aa, Artificial Sequence; identical to SEQ ID NO: 15102
  Cyclic GFR-binding peptide
  MOD_RES (2)..(2): Xaa is C or S

SEQ ID NO: 49171 - protein, 32 aa, Artificial Sequence; identical to SEQ ID NO: 15103
  Cyclic GFR-binding peptide
  MOD_RES (1)..(1): Xaa is C or S

SEQ ID NO: 49172 - protein, 31 aa, Artificial Sequence; identical to SEQ ID NO: 4608
  Cyclic GFR-binding peptide
  MOD_RES (26)..(27): Xaa is C or S

SEQ ID NO: 49173 - protein, 31 aa, Artificial Sequence; identical to SEQ ID NO: 15106
  Cyclic GFR-binding peptide
  MOD_RES (28)..(28): Xaa is C or S

SEQ ID NO: 49174 - protein, 27 aa, Artificial Sequence
  Cyclic GFR-binding peptide
  MOD_RES (27)..(27): Xaa is C or S
MEYQKYIKPTKGIIFLISIPSLDQSVX

SEQ ID NO: 49175 - protein, 34 aa, Artificial Sequence; identical to SEQ ID NO: 15109
  Cyclic GFR-binding peptide
  MOD_RES (1)..(33)..(34): Xaa is C or S

SEQ ID NO: 49176 - protein, 30 aa, Artificial Sequence; identical to SEQ ID NO: 4613
  Cyclic GFR-binding peptide
  MOD_RES (2)..(2): Xaa is C or S

SEQ ID NO: 49177 - protein, 22 aa, Artificial Sequence
  Cyclic GFR-binding peptide
NSLQEVVNNASDYYVIPLPELR

SEQ ID NO: 49178 - protein, 31 aa, Artificial Sequence; identical to SEQ ID NO: 4620
  Cyclic GFR-binding peptide
  MOD_RES (29)..(30): Xaa is C or S

SEQ ID NO: 49179 - protein, 34 aa, Artificial Sequence; identical to SEQ ID NO: 15114
  Cyclic GFR-binding peptide
  MOD_RES (28)..(29): Xaa is C or S

SEQ ID NO: 49180 - protein, 26 aa, Artificial Sequence
  Cyclic GFR-binding peptide
NRYKKLIVNSSDDFYLVSIANLKTPA

SEQ ID NO: 49181 - protein, 37 aa, Artificial Sequence; identical to SEQ ID NO: 15119
  Cyclic GFR-binding peptide
  MOD_RES (1)..(3)..(35)..(36): Xaa is C or S

SEQ ID NO: 49182 - protein, 32 aa, Artificial Sequence; identical to SEQ ID NO: 4628
  Cyclic GFR-binding peptide
  MOD_RES (26)..(26): Xaa is C or S

SEQ ID NO: 49183 - protein, 22 aa, Artificial Sequence
  Cyclic GFR-binding peptide
EYQKYVVKDYEDIFLMSIPSLE

SEQ ID NO: 49184 - protein, 36 aa, Artificial Sequence; identical to SEQ ID NO: 4629
  Cyclic GFR-binding peptide
  MOD_RES (30)..(31): Xaa is C or S

SEQ ID NO: 49185 - protein, 27 aa, Artificial Sequence
  Cyclic GFR-binding peptide
  MOD_RES (27)..(27): Xaa is C or S
MNSLQEIKPTKGIYYLITLPELDQSVX

SEQ ID NO: 49186 - protein, 24 aa, Artificial Sequence
  Cyclic GFR-binding peptide
NRYKKLIVNSSDDFYLVSIANLKT

SEQ ID NO: 49187 - protein, 34 aa, Artificial Sequence; identical to SEQ ID NO: 15125
  Cyclic GFR-binding peptide
  MOD_RES (1)..(33): Xaa is C or S

SEQ ID NO: 49188 - protein, 32 aa, Artificial Sequence; identical to SEQ ID NO: 15127
  Cyclic GFR-binding peptide
  MOD_RES (29)..(30): Xaa is C or S

SEQ ID NO: 49189 - protein, 34 aa, Artificial Sequence; identical to SEQ ID NO: 15128
  Cyclic GFR-binding peptide
  MOD_RES (29)..(30): Xaa is C or S

SEQ ID NO: 49190 - protein, 38 aa, Artificial Sequence; identical to SEQ ID NO: 4634
  Cyclic GFR-binding peptide
  MOD_RES (2)..(4)..(35)..(36): Xaa is C or S

SEQ ID NO: 49191 - protein, 29 aa, Artificial Sequence
  Cyclic GFR-binding peptide
  MOD_RES (1)..(1): Xaa is C or S
XSRVIMNSLQEVKPKRGVYYLITLPELAQ

SEQ ID NO: 49192 - protein, 27 aa, Artificial Sequence
  Cyclic GFR-binding peptide
MNNSLQEIVNSSDDYYLVTLPELQTPA

SEQ ID NO: 49193 - protein, 34 aa, Artificial Sequence; identical to SEQ ID NO: 4637
  Cyclic GFR-binding peptide
  MOD_RES (2)..(4): Xaa is C or S

SEQ ID NO: 49194 - protein, 32 aa, Artificial Sequence; identical to SEQ ID NO: 15134
  Cyclic GFR-binding peptide
  MOD_RES (1)..(3): Xaa is C or S

SEQ ID NO: 49195 - protein, 26 aa, Artificial Sequence
  Cyclic GFR-binding peptide
VVMNNSLQEIVNSSDDYYVVPLPELK

SEQ ID NO: 49196 - protein, 32 aa, Artificial Sequence; identical to SEQ ID NO: 15136
  Cyclic GFR-binding peptide
  MOD_RES (31)..(32): Xaa is C or S

SEQ ID NO: 49197 - protein, 31 aa, Artificial Sequence; identical to SEQ ID NO: 15137
  Cyclic GFR-binding peptide
  MOD_RES (26)..(27): Xaa is C or S

SEQ ID NO: 49198 - protein, 30 aa, Artificial Sequence; identical to SEQ ID NO: 15138
  Cyclic GFR-binding peptide
  MOD_RES (26)..(27): Xaa is C or S

SEQ ID NO: 49199 - protein, 38 aa, Artificial Sequence; identical to SEQ ID NO: 15140
  Cyclic GFR-binding peptide
  MOD_RES (1)..(3)..(35)..(36): Xaa is C or S

SEQ ID NO: 49200 - protein, 38 aa, Artificial Sequence; identical to SEQ ID NO: 4642
  Cyclic GFR-binding peptide
  MOD_RES (2)..(33)..(34): Xaa is C or S

SEQ ID NO: 49201 - protein, 34 aa, Artificial Sequence; identical to SEQ ID NO: 4644
  Cyclic GFR-binding peptide
  MOD_RES (31)..(32): Xaa is C or S

SEQ ID NO: 49202 - protein, 39 aa, Artificial Sequence; identical to SEQ ID NO: 15143
  Cyclic GFR-binding peptide
  MOD_RES (1)..(3)..(35)..(36): Xaa is C or S

SEQ ID NO: 49203 - protein, 22 aa, Artificial Sequence
  Cyclic GFR-binding peptide
IMNSLQEIKPTKGIYYLITLPE

SEQ ID NO: 49204 - protein, 31 aa, Artificial Sequence; identical to SEQ ID NO: 4650
  Cyclic GFR-binding peptide
  MOD_RES (29)..(30): Xaa is C or S

SEQ ID NO: 49205 - protein, 26 aa, Artificial Sequence
  Cyclic GFR-binding peptide
MNSLQEIKPTKGIYYVIPLPELDQSV

SEQ ID NO: 49206 - protein, 32 aa, Artificial Sequence; identical to SEQ ID NO: 15148
  Cyclic GFR-binding peptide
  MOD_RES (32)..(32): Xaa is C or S

SEQ ID NO: 49207 - protein, 40 aa, Artificial Sequence; identical to SEQ ID NO: 15149
  Cyclic GFR-binding peptide
  MOD_RES (2)..(34)..(35): Xaa is C or S

SEQ ID NO: 49208 - protein, 26 aa, Artificial Sequence
  Cyclic GFR-binding peptide
VVMNNSLQEIVNSSDDYYVVPLPELQ

SEQ ID NO: 49209 - protein, 35 aa, Artificial Sequence; identical to SEQ ID NO: 4656
  Cyclic GFR-binding peptide
  MOD_RES (2)..(34)..(35): Xaa is C or S

SEQ ID NO: 49210 - protein, 31 aa, Artificial Sequence; identical to SEQ ID NO: 4659
  Cyclic GFR-binding peptide
  MOD_RES (28)..(29): Xaa is C or S

SEQ ID NO: 49211 - protein, 35 aa, Artificial Sequence; identical to SEQ ID NO: 15156
  Cyclic GFR-binding peptide
  MOD_RES (30)..(31): Xaa is C or S

SEQ ID NO: 49212 - protein, 31 aa, Artificial Sequence; identical to SEQ ID NO: 15157
  Cyclic GFR-binding peptide
  MOD_RES (1)..(1): Xaa is C or S

SEQ ID NO: 49213 - protein, 37 aa, Artificial Sequence; identical to SEQ ID NO: 4671
  Cyclic GFR-binding peptide
  MOD_RES (1)..(3)..(34)..(35): Xaa is C or S

SEQ ID NO: 49214 - protein, 27 aa, Artificial Sequence
  Cyclic GFR-binding peptide
  MOD_RES (26)..(27): Xaa is C or S
RYKKLVVKDYEDFYLMSIANLETPVXX

SEQ ID NO: 49215 - protein, 33 aa, Artificial Sequence; identical to SEQ ID NO: 15162
  Cyclic GFR-binding peptide
  MOD_RES (31)..(32): Xaa is C or S

SEQ ID NO: 49216 - protein, 31 aa, Artificial Sequence; identical to SEQ ID NO: 15163
  Cyclic GFR-binding peptide
  MOD_RES (27)..(28): Xaa is C or S

SEQ ID NO: 49217 - protein, 26 aa, Artificial Sequence
  Cyclic GFR-binding peptide
VIMEYQKYVKPKRGVIFLISIPSLAQ

SEQ ID NO: 49218 - protein, 37 aa, Artificial Sequence; identical to SEQ ID NO: 15168
  Cyclic GFR-binding peptide
  MOD_RES (1)..(3)..(35)..(36): Xaa is C or S

SEQ ID NO: 49219 - protein, 28 aa, Artificial Sequence
  Cyclic GFR-binding peptide
  MOD_RES (27)..(28): Xaa is C or S
NNSLQEIVNSSDDYYLVTLPELKTPAXX

SEQ ID NO: 49220 - protein, 39 aa, Artificial Sequence; identical to SEQ ID NO: 15170
  Cyclic GFR-binding peptide
  MOD_RES (2)..(34)..(35): Xaa is C or S

SEQ ID NO: 49221 - protein, 31 aa, Artificial Sequence; identical to SEQ ID NO: 15171
  Cyclic GFR-binding peptide
  MOD_RES (29)..(30): Xaa is C or S

SEQ ID NO: 49222 - protein, 32 aa, Artificial Sequence; identical to SEQ ID NO: 15174
  Cyclic GFR-binding peptide
  MOD_RES (30)..(31): Xaa is C or S

SEQ ID NO: 49223 - protein, 24 aa, Artificial Sequence
  Cyclic GFR-binding peptide
MNSLQEVKPKRGVYYLITLPELAQ

SEQ ID NO: 49224 - protein, 28 aa, Artificial Sequence
  Cyclic GFR-binding peptide
  MOD_RES (27)..(28): Xaa is C or S
ENSLQEVVKDYEDYYLMTLPELETPVXX

SEQ ID NO: 49225 - protein, 33 aa, Artificial Sequence; identical to SEQ ID NO: 15178
  Cyclic GFR-binding peptide
  MOD_RES (29)..(30): Xaa is C or S

SEQ ID NO: 49226 - protein, 38 aa, Artificial Sequence; identical to SEQ ID NO: 15179
  Cyclic GFR-binding peptide
  MOD_RES (2)..(4)..(36)..(37): Xaa is C or S

SEQ ID NO: 49227 - protein, 29 aa, Artificial Sequence
  Cyclic GFR-binding peptide
  MOD_RES (27)..(27): Xaa is C or S
NNSLQEIVNSSDDYYLVTLPELKTPAXTP

SEQ ID NO: 49228 - protein, 33 aa, Artificial Sequence; identical to SEQ ID NO: 15181
  Cyclic GFR-binding peptide
  MOD_RES (30)..(31): Xaa is C or S

SEQ ID NO: 49229 - protein, 26 aa, Artificial Sequence
  Cyclic GFR-binding peptide
VIMNSLQEIKPTKGIYYLITLPELDQ

SEQ ID NO: 49230 - protein, 32 aa, Artificial Sequence; identical to SEQ ID NO: 4696
  Cyclic GFR-binding peptide
  MOD_RES (2)..(4): Xaa is C or S

SEQ ID NO: 49231 - protein, 27 aa, Artificial Sequence
  Cyclic GFR-binding peptide
SRVIMEYQKYVKPKRGVIFLISIPSLA

SEQ ID NO: 49232 - protein, 33 aa, Artificial Sequence; identical to SEQ ID NO: 15187
  Cyclic GFR-binding peptide
  MOD_RES (1)..(3): Xaa is C or S

SEQ ID NO: 49233 - protein, 28 aa, Artificial Sequence
  Cyclic GFR-binding peptide
  MOD_RES (28)..(28): Xaa is C or S
MDRYKKLVVKENEDFYLMSIANLETPVX

SEQ ID NO: 49234 - protein, 38 aa, Artificial Sequence; identical to SEQ ID NO: 15189
  Cyclic GFR-binding peptide
  MOD_RES (2)..(34): Xaa is C or S

SEQ ID NO: 49235 - protein, 32 aa, Artificial Sequence; identical to SEQ ID NO: 15190
  Cyclic GFR-binding peptide
  MOD_RES (26)..(27): Xaa is C or S

SEQ ID NO: 49236 - protein, 28 aa, Artificial Sequence
  Cyclic GFR-binding peptide
  MOD_RES (27)..(28): Xaa is C or S
ENSLQEVVKDYEDYYVMPLPELETPVXX

SEQ ID NO: 49237 - protein, 29 aa, Artificial Sequence
  Cyclic GFR-binding peptide
EVVMDNSLQEVVKENEDYYLMTLPELETP

SEQ ID NO: 49238 - protein, 29 aa, Artificial Sequence
  Cyclic GFR-binding peptide
  MOD_RES (2)..(2): Xaa is C or S
GXSEVVMDRYKKLVVNNASDFYLISIANL

SEQ ID NO: 49239 - protein, 33 aa, Artificial Sequence; identical to SEQ ID NO: 15198
  Cyclic GFR-binding peptide
  MOD_RES (2)..(2): Xaa is C or S

SEQ ID NO: 49240 - protein, 33 aa, Artificial Sequence; identical to SEQ ID NO: 15199
  Cyclic GFR-binding peptide
  MOD_RES (29)..(30): Xaa is C or S

SEQ ID NO: 49241 - protein, 27 aa, Artificial Sequence
  Cyclic GFR-binding peptide
VVMERYKKLVVKDYEDFYLMSIANLET

SEQ ID NO: 49242 - protein, 32 aa, Artificial Sequence; identical to SEQ ID NO: 15202
  Cyclic GFR-binding peptide
  MOD_RES (1)..(1): Xaa is C or S

SEQ ID NO: 49243 - protein, 35 aa, Artificial Sequence; identical to SEQ ID NO: 15203
  Cyclic GFR-binding peptide
  MOD_RES (30)..(31): Xaa is C or S

SEQ ID NO: 49244 - protein, 38 aa, Artificial Sequence; identical to SEQ ID NO: 15204
  Cyclic GFR-binding peptide
  MOD_RES (2)..(34)..(35): Xaa is C or S

SEQ ID NO: 49245 - protein, 35 aa, Artificial Sequence; identical to SEQ ID NO: 15205
  Cyclic GFR-binding peptide
  MOD_RES (1)..(33): Xaa is C or S

SEQ ID NO: 49246 - protein, 30 aa, Artificial Sequence; identical to SEQ ID NO: 15206
  Cyclic GFR-binding peptide

SEQ ID NO: 49247 - protein, 33 aa, Artificial Sequence; identical to SEQ ID NO: 15209
  Cyclic GFR-binding peptide
  MOD_RES (31)..(32): Xaa is C or S

SEQ ID NO: 49248 - protein, 32 aa, Artificial Sequence; identical to SEQ ID NO: 15211
  Cyclic GFR-binding peptide
  MOD_RES (1)..(3): Xaa is C or S

SEQ ID NO: 49249 - protein, 37 aa, Artificial Sequence; identical to SEQ ID NO: 4721
  Cyclic GFR-binding peptide
  MOD_RES (32)..(33): Xaa is C or S

SEQ ID NO: 49250 - protein, 27 aa, Artificial Sequence
  Cyclic GFR-binding peptide
SEVVMDNSLQEVVNNASDYYVIPLPEL

SEQ ID NO: 49251 - protein, 30 aa, Artificial Sequence; identical to SEQ ID NO: 15214
  Cyclic GFR-binding peptide
  MOD_RES (27)..(28): Xaa is C or S

SEQ ID NO: 49252 - protein, 38 aa, Artificial Sequence; identical to SEQ ID NO: 15215
  Cyclic GFR-binding peptide
  MOD_RES (32)..(32): Xaa is C or S

SEQ ID NO: 49253 - protein, 31 aa, Artificial Sequence; identical to SEQ ID NO: 15216
  Cyclic GFR-binding peptide
  MOD_RES (27)..(28): Xaa is C or S

SEQ ID NO: 49254 - protein, 31 aa, Artificial Sequence; identical to SEQ ID NO: 15217
  Cyclic GFR-binding peptide
  MOD_RES (1)..(1): Xaa is C or S

SEQ ID NO: 49255 - protein, 40 aa, Artificial Sequence; identical to SEQ ID NO: 15218
  Cyclic GFR-binding peptide
  MOD_RES (1)..(3)..(35)..(36): Xaa is C or S

SEQ ID NO: 49256 - protein, 35 aa, Artificial Sequence; identical to SEQ ID NO: 15219
  Cyclic GFR-binding peptide
  MOD_RES (32)..(33): Xaa is C or S

SEQ ID NO: 49257 - protein, 30 aa, Artificial Sequence; identical to SEQ ID NO: 4732
  Cyclic GFR-binding peptide
  MOD_RES (26)..(27): Xaa is C or S

SEQ ID NO: 49258 - protein, 24 aa, Artificial Sequence
  Cyclic GFR-binding peptide
KVVMNSLQEVKPTRGVYYLITLPE

SEQ ID NO: 49259 - protein, 35 aa, Artificial Sequence; identical to SEQ ID NO: 15221
  Cyclic GFR-binding peptide
  MOD_RES (31)..(32): Xaa is C or S

SEQ ID NO: 49260 - protein, 27 aa, Artificial Sequence
  Cyclic GFR-binding peptide
VVMEEYQKYVVKDYEDIFLMSIPSLET

SEQ ID NO: 49261 - protein, 35 aa, Artificial Sequence; identical to SEQ ID NO: 15224
  Cyclic GFR-binding peptide
  MOD_RES (2)..(33)..(34): Xaa is C or S

SEQ ID NO: 49262 - protein, 29 aa, Artificial Sequence
  Cyclic GFR-binding peptide
  MOD_RES (27)..(28): Xaa is C or S
MNSLQEVKPTRGVYYLITLPELDQPVXXP

SEQ ID NO: 49263 - protein, 31 aa, Artificial Sequence; identical to SEQ ID NO: 15228
  Cyclic GFR-binding peptide
  MOD_RES (27)..(28): Xaa is C or S

SEQ ID NO: 49264 - protein, 33 aa, Artificial Sequence; identical to SEQ ID NO: 4741
  Cyclic GFR-binding peptide
  MOD_RES (2)..(4): Xaa is C or S

SEQ ID NO: 49265 - protein, 27 aa, Artificial Sequence
  Cyclic GFR-binding peptide
EVVMENSLQEVVKDYEDYYVMPLPELE

SEQ ID NO: 49266 - protein, 40 aa, Artificial Sequence; identical to SEQ ID NO: 15231
  Cyclic GFR-binding peptide
  MOD_RES (2)..(4)..(36)..(37): Xaa is C or S

SEQ ID NO: 49267 - protein, 26 aa, Artificial Sequence
  Cyclic GFR-binding peptide
MRYKKLIKPTKGIFYLISIANLDQSV

SEQ ID NO: 49268 - protein, 32 aa, Artificial Sequence; identical to SEQ ID NO: 4748
  Cyclic GFR-binding peptide
  MOD_RES (30)..(31): Xaa is C or S

SEQ ID NO: 49269 - protein, 36 aa, Artificial Sequence; identical to SEQ ID NO: 15234
  Cyclic GFR-binding peptide
  MOD_RES (32)..(33): Xaa is C or S

SEQ ID NO: 49270 - protein, 31 aa, Artificial Sequence; identical to SEQ ID NO: 15235
  Cyclic GFR-binding peptide
  MOD_RES (2)..(2): Xaa is C or S

SEQ ID NO: 49271 - protein, 36 aa, Artificial Sequence; identical to SEQ ID NO: 4749
  Cyclic GFR-binding peptide
  MOD_RES (31)..(32): Xaa is C or S

SEQ ID NO: 49272 - protein, 26 aa, Artificial Sequence
  Cyclic GFR-binding peptide
  MOD_RES (26)..(26): Xaa is C or S
NSLQEIKPTKGIYYVIPLPELDQSVX

SEQ ID NO: 49273 - protein, 35 aa, Artificial Sequence; identical to SEQ ID NO: 15239
  Cyclic GFR-binding peptide
  MOD_RES (2)..(33)..(34): Xaa is C or S

SEQ ID NO: 49274 - protein, 31 aa, Artificial Sequence; identical to SEQ ID NO: 4755
  Cyclic GFR-binding peptide
  MOD_RES (26)..(27): Xaa is C or S

SEQ ID NO: 49275 - protein, 36 aa, Artificial Sequence; identical to SEQ ID NO: 15241
  Cyclic GFR-binding peptide
  MOD_RES (31)..(31): Xaa is C or S

SEQ ID NO: 49276 - protein, 36 aa, Artificial Sequence; identical to SEQ ID NO: 15242
  Cyclic GFR-binding peptide
  MOD_RES (32)..(33): Xaa is C or S

SEQ ID NO: 49277 - protein, 31 aa, Artificial Sequence; identical to SEQ ID NO: 15243
  Cyclic GFR-binding peptide
  MOD_RES (31)..(31): Xaa is C or S

SEQ ID NO: 49278 - protein, 37 aa, Artificial Sequence; identical to SEQ ID NO: 15244
  Cyclic GFR-binding peptide
  MOD_RES (31)..(32): Xaa is C or S

SEQ ID NO: 49279 - protein, 32 aa, Artificial Sequence; identical to SEQ ID NO: 15245
  Cyclic GFR-binding peptide
  MOD_RES (26)..(27): Xaa is C or S

SEQ ID NO: 49280 - protein, 33 aa, Artificial Sequence; identical to SEQ ID NO: 15246
  Cyclic GFR-binding peptide
  MOD_RES (28)..(29): Xaa is C or S

SEQ ID NO: 49281 - protein, 28 aa, Artificial Sequence
  Cyclic GFR-binding peptide
  MOD_RES (2)..(2): Xaa is C or S
KXSRVIMEYQKYVKPKRGVIFLISIPSL

SEQ ID NO: 49282 - protein, 27 aa, Artificial Sequence
  Cyclic GFR-binding peptide
  MOD_RES (27)..(27): Xaa is C or S
NRYKKLIVNSSDDFYLVSIANLKTPAX

SEQ ID NO: 49283 - protein, 34 aa, Artificial Sequence; identical to SEQ ID NO: 15249
  Cyclic GFR-binding peptide
  MOD_RES (1)..(33)..(34): Xaa is C or S

SEQ ID NO: 49284 - protein, 26 aa, Artificial Sequence
  Cyclic GFR-binding peptide
MEYQKYIKPTKGIIFLISIPSLDQSV

SEQ ID NO: 49285 - protein, 28 aa, Artificial Sequence
  Cyclic GFR-binding peptide
RVVMNNSLQEIVNSSDDYYVVPLPELQT

SEQ ID NO: 49286 - protein, 33 aa, Artificial Sequence; identical to SEQ ID NO: 15253
  Cyclic GFR-binding peptide
  MOD_RES (1)..(33): Xaa is C or S

SEQ ID NO: 49287 - protein, 32 aa, Artificial Sequence; identical to SEQ ID NO: 15255
  Cyclic GFR-binding peptide
  MOD_RES (1)..(32): Xaa is C or S

SEQ ID NO: 49288 - protein, 29 aa, Artificial Sequence
  Cyclic GFR-binding peptide
  MOD_RES (27)..(27): Xaa is C or S
NRYKKLIVNSSDDFYLVSIANLKTPAXTP

SEQ ID NO: 49289 - protein, 25 aa, Artificial Sequence
  Cyclic GFR-binding peptide
VMRYKKLVKPTRGVFYLISIANLDQ

SEQ ID NO: 49290 - protein, 35 aa, Artificial Sequence; identical to SEQ ID NO: 4778
  Cyclic GFR-binding peptide
  MOD_RES (30)..(31): Xaa is C or S

SEQ ID NO: 49291 - protein, 37 aa, Artificial Sequence; identical to SEQ ID NO: 15260
  Cyclic GFR-binding peptide
  MOD_RES (1)..(33)..(34): Xaa is C or S

SEQ ID NO: 49292 - protein, 39 aa, Artificial Sequence; identical to SEQ ID NO: 15261
  Cyclic GFR-binding peptide
  MOD_RES (2)..(34)..(35): Xaa is C or S

SEQ ID NO: 49293 - protein, 31 aa, Artificial Sequence; identical to SEQ ID NO: 15263
  Cyclic GFR-binding peptide
  MOD_RES (1)..(1): Xaa is C or S

SEQ ID NO: 49294 - protein, 27 aa, Artificial Sequence
  Cyclic GFR-binding peptide
VMNNSLQEIVNSSDDYYLVTLPELQTP

SEQ ID NO: 49295 - protein, 24 aa, Artificial Sequence
  Cyclic GFR-binding peptide
MNEYQKYIVNSSDDIFLVSIPSLK

SEQ ID NO: 49296 - protein, 36 aa, Artificial Sequence; identical to SEQ ID NO: 15266
  Cyclic GFR-binding peptide
  MOD_RES (31)..(32): Xaa is C or S

SEQ ID NO: 49297 - protein, 24 aa, Artificial Sequence
  Cyclic GFR-binding peptide
KVVMNSLQEVKPTRGVYYVIPLPE

SEQ ID NO: 49298 - protein, 37 aa, Artificial Sequence; identical to SEQ ID NO: 15270
  Cyclic GFR-binding peptide
  MOD_RES (31)..(32): Xaa is C or S

SEQ ID NO: 49299 - protein, 24 aa, Artificial Sequence
  Cyclic GFR-binding peptide
MRYKKLVKPKRGVFYLISIANLAQ

SEQ ID NO: 49300 - protein, 34 aa, Artificial Sequence; identical to SEQ ID NO: 15278
  Cyclic GFR-binding peptide
  MOD_RES (2)..(34): Xaa is C or S

SEQ ID NO: 49301 - protein, 22 aa, Artificial Sequence
  Cyclic GFR-binding peptide
NSLQEVVKENEDYYVMPLPELE

SEQ ID NO: 49302 - protein, 32 aa, Artificial Sequence; identical to SEQ ID NO: 15280
  Cyclic GFR-binding peptide
  MOD_RES (27)..(28): Xaa is C or S

SEQ ID NO: 49303 - protein, 36 aa, Artificial Sequence; identical to SEQ ID NO: 15282
  Cyclic GFR-binding peptide
  MOD_RES (32)..(33): Xaa is C or S

SEQ ID NO: 49304 - protein, 36 aa, Artificial Sequence; identical to SEQ ID NO: 4805
  Cyclic GFR-binding peptide
  MOD_RES (1)..(32)..(33): Xaa is C or S

SEQ ID NO: 49305 - protein, 32 aa, Artificial Sequence
  Cyclic GFR-binding peptide
  MOD_RES (30)..(31): Xaa is C or S
KVVMNSLQEVKPTRGVYYLITLPELDQPVXXP

SEQ ID NO: 49306 - protein, 27 aa, Artificial Sequence
  Cyclic GFR-binding peptide
  MOD_RES (1)..(1): Xaa is C or S
XARVVMNNSLQEIVNSSDDYYLVTLPE

SEQ ID NO: 49307 - protein, 23 aa, Artificial Sequence
  Cyclic GFR-binding peptide
MRYKKLVKPKRGVFYLISIANLA

SEQ ID NO: 49308 - protein, 30 aa, Artificial Sequence; identical to SEQ ID NO: 15288
  Cyclic GFR-binding peptide
  MOD_RES (1)..(3): Xaa is C or S

SEQ ID NO: 49309 - protein, 35 aa, Artificial Sequence; identical to SEQ ID NO: 15289
  Cyclic GFR-binding peptide
  MOD_RES (29)..(30): Xaa is C or S

SEQ ID NO: 49310 - protein, 22 aa, Artificial Sequence
  Cyclic GFR-binding peptide
MEYQKYVKPTRGVIFLISIPSL

SEQ ID NO: 49311 - protein, 29 aa, Artificial Sequence
  Cyclic GFR-binding peptide
  MOD_RES (1)..(3): Xaa is C or S
XGXGEVVMDEYQKYVVKENEDIFLMSIPS

SEQ ID NO: 49312 - protein, 25 aa, Artificial Sequence
  Cyclic GFR-binding peptide
NSLQEIVNSSDDYYVVPLPELKTPA

SEQ ID NO: 49313 - protein, 27 aa, Artificial Sequence
  Cyclic GFR-binding peptide
  MOD_RES (27)..(27): Xaa is C or S
NNSLQEIVNSSDDYYLVTLPELKTPAX

SEQ ID NO: 49314 - protein, 29 aa, Artificial Sequence
  Cyclic GFR-binding peptide
  MOD_RES (27)..(27): Xaa is C or S
NEYQKYIVNSSDDIFLVSIPSLKTPAXTP

SEQ ID NO: 49315 - protein, 27 aa, Artificial Sequence
  Cyclic GFR-binding peptide
  MOD_RES (27)..(27): Xaa is C or S
MNSLQEIKPTKGIYYVIPLPELDQSVX

SEQ ID NO: 49316 - protein, 33 aa, Artificial Sequence; identical to SEQ ID NO: 4819
  Cyclic GFR-binding peptide
  MOD_RES (30)..(31): Xaa is C or S

SEQ ID NO: 49317 - protein, 29 aa, Artificial Sequence
  Cyclic GFR-binding peptide
  MOD_RES (27)..(28): Xaa is C or S
MNSLQEVKPTRGVYYVIPLPELDQPVXXP

SEQ ID NO: 49318 - protein, 30 aa, Artificial Sequence; identical to SEQ ID NO: 4821
  Cyclic GFR-binding peptide

SEQ ID NO: 49319 - protein, 31 aa, Artificial Sequence; identical to SEQ ID NO: 15303
  Cyclic GFR-binding peptide
  MOD_RES (31)..(31): Xaa is C or S

SEQ ID NO: 49320 - protein, 34 aa, Artificial Sequence; identical to SEQ ID NO: 15305
  Cyclic GFR-binding peptide
  MOD_RES (31)..(32): Xaa is C or S

SEQ ID NO: 49321 - protein, 29 aa, Artificial Sequence
  Cyclic GFR-binding peptide
VVMNNSLQEIVNSSDDYYVVPLPELKTPA

SEQ ID NO: 49322 - protein, 28 aa, Artificial Sequence
  Cyclic GFR-binding peptide
VMDNSLQEVVKENEDYYLMTLPELETPV

SEQ ID NO: 49323 - protein, 34 aa, Artificial Sequence; identical to SEQ ID NO: 15311
  Cyclic GFR-binding peptide
  MOD_RES (2)..(34): Xaa is C or S

SEQ ID NO: 49324 - protein, 30 aa, Artificial Sequence; identical to SEQ ID NO: 4833
  Cyclic GFR-binding peptide
  MOD_RES (29)..(30): Xaa is C or S

SEQ ID NO: 49325 - protein, 33 aa, Artificial Sequence; identical to SEQ ID NO: 15314
  Cyclic GFR-binding peptide
  MOD_RES (1)..(33): Xaa is C or S

SEQ ID NO: 49326 - protein, 32 aa, Artificial Sequence; identical to SEQ ID NO: 4836
  Cyclic GFR-binding peptide
  MOD_RES (31)..(32): Xaa is C or S

SEQ ID NO: 49327 - protein, 27 aa, Artificial Sequence
  Cyclic GFR-binding peptide
  MOD_RES (2)..(2): Xaa is C or S
KXSKVIMNSLQEIKPTKGIYYLITLPE

SEQ ID NO: 49328 - protein, 29 aa, Artificial Sequence
  Cyclic GFR-binding peptide
  MOD_RES (1)..(3): Xaa is C or S
XGXGEVVMDNSLQEVVKENEDYYVMPLPE

SEQ ID NO: 49329 - protein, 39 aa, Artificial Sequence; identical to SEQ ID NO: 15319
  Cyclic GFR-binding peptide
  MOD_RES (2)..(34)..(35): Xaa is C or S

SEQ ID NO: 49330 - protein, 26 aa, Artificial Sequence
  Cyclic GFR-binding peptide
IMNSLQEVKPKRGVYYLITLPELAQP

SEQ ID NO: 49331 - protein, 25 aa, Artificial Sequence
  Cyclic GFR-binding peptide
EYQKYVVKDYEDIFLMSIPSLETPV

SEQ ID NO: 49332 - protein, 30 aa, Artificial Sequence; identical to SEQ ID NO: 15323
  Cyclic GFR-binding peptide
  MOD_RES (29)..(30): Xaa is C or S

SEQ ID NO: 49333 - protein, 25 aa, Artificial Sequence
  Cyclic GFR-binding peptide
NNSLQEIVNSSDDYYLVTLPELKTP

SEQ ID NO: 49334 - protein, 38 aa, Artificial Sequence; identical to SEQ ID NO: 15326
  Cyclic GFR-binding peptide
  MOD_RES (2)..(34)..(35): Xaa is C or S

SEQ ID NO: 49335 - protein, 26 aa, Artificial Sequence
  Cyclic GFR-binding peptide
SKVVMNSLQEVKPTRGVYYVIPLPEL

SEQ ID NO: 49336 - protein, 31 aa, Artificial Sequence; identical to SEQ ID NO: 15329
  Cyclic GFR-binding peptide
  MOD_RES (1)..(1): Xaa is C or S

SEQ ID NO: 49337 - protein, 30 aa, Artificial Sequence; identical to SEQ ID NO: 15330
  Cyclic GFR-binding peptide
  MOD_RES (30)..(30): Xaa is C or S

SEQ ID NO: 49338 - protein, 23 aa, Artificial Sequence
  Cyclic GFR-binding peptide
VIMNSLQEIKPTKGIYYLITLPE

SEQ ID NO: 49339 - protein, 35 aa, Artificial Sequence; identical to SEQ ID NO: 15333
  Cyclic GFR-binding peptide
  MOD_RES (1)..(3)..(35): Xaa is C or S

SEQ ID NO: 49340 - protein, 30 aa, Artificial Sequence; identical to SEQ ID NO: 15334
  Cyclic GFR-binding peptide
  MOD_RES (2)..(2): Xaa is C or S

SEQ ID NO: 49341 - protein, 38 aa, Artificial Sequence; identical to SEQ ID NO: 15335
  Cyclic GFR-binding peptide
  MOD_RES (1)..(33)..(34): Xaa is C or S

SEQ ID NO: 49342 - protein, 37 aa, Artificial Sequence; identical to SEQ ID NO: 15336
  Cyclic GFR-binding peptide
  MOD_RES (2)..(4)..(36)..(37): Xaa is C or S

SEQ ID NO: 49343 - protein, 32 aa, Artificial Sequence; identical to SEQ ID NO: 15337
  Cyclic GFR-binding peptide
  MOD_RES (1)..(32): Xaa is C or S

SEQ ID NO: 49344 - protein, 29 aa, Artificial Sequence
  Cyclic GFR-binding peptide
  MOD_RES (27)..(28): Xaa is C or S
MEYQKYVKPTRGVIFLISIPSLDQPVXXP

SEQ ID NO: 49345 - protein, 30 aa, Artificial Sequence; identical to SEQ ID NO: 4855
  Cyclic GFR-binding peptide
  MOD_RES (26)..(27): Xaa is C or S

SEQ ID NO: 49346 - protein, 27 aa, Artificial Sequence
  Cyclic GFR-binding peptide
EVVMDNSLQEVVKENEDYYLMTLPELE

SEQ ID NO: 49347 - protein, 37 aa, Artificial Sequence; identical to SEQ ID NO: 4858
  Cyclic GFR-binding peptide
  MOD_RES (32)..(33): Xaa is C or S

SEQ ID NO: 49348 - protein, 35 aa, Artificial Sequence; identical to SEQ ID NO: 15345
  Cyclic GFR-binding peptide
  MOD_RES (30)..(31): Xaa is C or S

SEQ ID NO: 49349 - protein, 30 aa, Artificial Sequence; identical to SEQ ID NO: 4859
  Cyclic GFR-binding peptide
  MOD_RES (30)..(30): Xaa is C or S

SEQ ID NO: 49350 - protein, 23 aa, Artificial Sequence
  Cyclic GFR-binding peptide
MNSLQEVKPKRGVYYLITLPELA

SEQ ID NO: 49351 - protein, 29 aa, Artificial Sequence
  Cyclic GFR-binding peptide
  MOD_RES (28)..(29): Xaa is C or S
MNNSLQEIVNSSDDYYLVTLPELQTPAXX

SEQ ID NO: 49352 - protein, 31 aa, Artificial Sequence; identical to SEQ ID NO: 15350
  Cyclic GFR-binding peptide
  MOD_RES (1)..(3): Xaa is C or S

SEQ ID NO: 49353 - protein, 38 aa, Artificial Sequence; identical to SEQ ID NO: 4865
  Cyclic GFR-binding peptide
  MOD_RES (2)..(34)..(35): Xaa is C or S

SEQ ID NO: 49354 - protein, 31 aa, Artificial Sequence; identical to SEQ ID NO: 15353
  Cyclic GFR-binding peptide
  MOD_RES (2)..(2): Xaa is C or S

SEQ ID NO: 49355 - protein, 28 aa, Artificial Sequence
  Cyclic GFR-binding peptide
VVMDEYQKYVVKENEDIFLMSIPSLETP

SEQ ID NO: 49356 - protein, 24 aa, Artificial Sequence
  Cyclic GFR-binding peptide
IMRYKKLIKPTKGIFYLISIANLD

SEQ ID NO: 49357 - protein, 35 aa, Artificial Sequence; identical to SEQ ID NO: 15357
  Cyclic GFR-binding peptide
  MOD_RES (1)..(33)..(34): Xaa is C or S

SEQ ID NO: 49358 - protein, 28 aa, Artificial Sequence
  Cyclic GFR-binding peptide
  MOD_RES (2)..(2): Xaa is C or S
KXSKVVMEYQKYVKPTRGVIFLISIPSL

SEQ ID NO: 49359 - protein, 34 aa, Artificial Sequence; identical to SEQ ID NO: 15359
  Cyclic GFR-binding peptide
  MOD_RES (1)..(33)..(34): Xaa is C or S

SEQ ID NO: 49360 - protein, 29 aa, Artificial Sequence
  Cyclic GFR-binding peptide
GEVVMDNSLQEVVKENEDYYLMTLPELET

SEQ ID NO: 49361 - protein, 30 aa, Artificial Sequence; identical to SEQ ID NO: 15361
  Cyclic GFR-binding peptide
  MOD_RES (1)..(1): Xaa is C or S

SEQ ID NO: 49362 - protein, 26 aa, Artificial Sequence
  Cyclic GFR-binding peptide
SRVVMNNSLQEIVNSSDDYYVVPLPE

SEQ ID NO: 49363 - protein, 29 aa, Artificial Sequence
  Cyclic GFR-binding peptide
  MOD_RES (27)..(28): Xaa is C or S
MRYKKLVKPTRGVFYLISIANLDQPVXXP

SEQ ID NO: 49364 - protein, 28 aa, Artificial Sequence
  Cyclic GFR-binding peptide
  MOD_RES (27)..(28): Xaa is C or S
EEYQKYVVKDYEDIFLMSIPSLETPVXX

SEQ ID NO: 49365 - protein, 31 aa, Artificial Sequence; identical to SEQ ID NO: 15368
  Cyclic GFR-binding peptide
  MOD_RES (31)..(31): Xaa is C or S

SEQ ID NO: 49366 - protein, 28 aa, Artificial Sequence
  Cyclic GFR-binding peptide
  MOD_RES (26)..(27): Xaa is C or S
NSLQEVKPKRGVYYLITLPELAQPVXXP

SEQ ID NO: 49367 - protein, 38 aa, Artificial Sequence; identical to SEQ ID NO: 15370
  Cyclic GFR-binding peptide
  MOD_RES (1)..(33)..(34): Xaa is C or S

SEQ ID NO: 49368 - protein, 34 aa, Artificial Sequence; identical to SEQ ID NO: 4879
  Cyclic GFR-binding peptide
  MOD_RES (28)..(29): Xaa is C or S

SEQ ID NO: 49369 - protein, 39 aa, Artificial Sequence; identical to SEQ ID NO: 4881
  Cyclic GFR-binding peptide
  MOD_RES (1)..(33)..(34): Xaa is C or S

SEQ ID NO: 49370 - protein, 34 aa, Artificial Sequence; identical to SEQ ID NO: 15374
  Cyclic GFR-binding peptide
  MOD_RES (30)..(31): Xaa is C or S

SEQ ID NO: 49371 - protein, 36 aa, Artificial Sequence; identical to SEQ ID NO: 4882
  Cyclic GFR-binding peptide
  MOD_RES (2)..(4)..(35)..(36): Xaa is C or S

SEQ ID NO: 49372 - protein, 29 aa, Artificial Sequence
  Cyclic GFR-binding peptide
  MOD_RES (27)..(27): Xaa is C or S
NNSLQEIVNSSDDYYVVPLPELKTPAXTP

SEQ ID NO: 49373 - protein, 34 aa, Artificial Sequence; identical to SEQ ID NO: 15377
  Cyclic GFR-binding peptide
  MOD_RES (29)..(30): Xaa is C or S

SEQ ID NO: 49374 - protein, 21 aa, Artificial Sequence
  Cyclic GFR-binding peptide
MRYKKLIKPTKGIFYLISIAN

SEQ ID NO: 49375 - protein, 33 aa, Artificial Sequence; identical to SEQ ID NO: 15381
  Cyclic GFR-binding peptide
  MOD_RES (31)..(32): Xaa is C or S

SEQ ID NO: 49376 - protein, 35 aa, Artificial Sequence; identical to SEQ ID NO: 15382
  Cyclic GFR-binding peptide
  MOD_RES (2)..(33)..(34): Xaa is C or S

SEQ ID NO: 49377 - protein, 22 aa, Artificial Sequence
  Cyclic GFR-binding peptide
RYKKLVVNNASDFYLISIANLR

SEQ ID NO: 49378 - protein, 36 aa, Artificial Sequence; identical to SEQ ID NO: 4893
  Cyclic GFR-binding peptide
  MOD_RES (2)..(34)..(35): Xaa is C or S

SEQ ID NO: 49379 - protein, 24 aa, Artificial Sequence
  Cyclic GFR-binding peptide
NSLQEVVKDYEDYYVMPLPELETP

SEQ ID NO: 49380 - protein, 38 aa, Artificial Sequence; identical to SEQ ID NO: 15389
  Cyclic GFR-binding peptide
  MOD_RES (1)..(3)..(35): Xaa is C or S

SEQ ID NO: 49381 - protein, 34 aa, Artificial Sequence; identical to SEQ ID NO: 4899
  Cyclic GFR-binding peptide
  MOD_RES (2)..(34): Xaa is C or S

SEQ ID NO: 49382 - protein, 23 aa, Artificial Sequence
  Cyclic GFR-binding peptide
MNEYQKYIVNSSDDIFLVSIPSL

SEQ ID NO: 49383 - protein, 27 aa, Artificial Sequence
  Cyclic GFR-binding peptide
  MOD_RES (1)..(1): Xaa is C or S
XSRVIMRYKKLVKPKRGVFYLISIANL

SEQ ID NO: 49384 - protein, 35 aa, Artificial Sequence; identical to SEQ ID NO: 15398
  Cyclic GFR-binding peptide
  MOD_RES (32)..(33): Xaa is C or S

SEQ ID NO: 49385 - protein, 32 aa, Artificial Sequence; identical to SEQ ID NO: 15399
  Cyclic GFR-binding peptide
  MOD_RES (29)..(30): Xaa is C or S

SEQ ID NO: 49386 - protein, 27 aa, Artificial Sequence
  Cyclic GFR-binding peptide
MNEYQKYIVNSSDDIFLVSIPSLKTPA

SEQ ID NO: 49387 - protein, 29 aa, Artificial Sequence
  Cyclic GFR-binding peptide
GEVVMENSLQEVVKDYEDYYLMTLPELET

SEQ ID NO: 49388 - protein, 36 aa, Artificial Sequence; identical to SEQ ID NO: 15402
  Cyclic GFR-binding peptide
  MOD_RES (2)..(33)..(34): Xaa is C or S

SEQ ID NO: 49389 - protein, 30 aa, Artificial Sequence; identical to SEQ ID NO: 15403
  Cyclic GFR-binding peptide
  MOD_RES (1)..(1): Xaa is C or S

SEQ ID NO: 49390 - protein, 32 aa, Artificial Sequence
  Cyclic GFR-binding peptide
  MOD_RES (28)..(29): Xaa is C or S
VMNSLQEVKPTRGVYYLITLPELDQPVXXPSA

SEQ ID NO: 49391 - protein, 25 aa, Artificial Sequence
  Cyclic GFR-binding peptide
SKVIMEYQKYIKPTKGIIFLISIPS

SEQ ID NO: 49392 - protein, 31 aa, Artificial Sequence; identical to SEQ ID NO: 4918
  Cyclic GFR-binding peptide
  MOD_RES (28)..(29): Xaa is C or S

SEQ ID NO: 49393 - protein, 32 aa, Artificial Sequence; identical to SEQ ID NO: 4919
  Cyclic GFR-binding peptide
  MOD_RES (31)..(32): Xaa is C or S

SEQ ID NO: 49394 - protein, 24 aa, Artificial Sequence
  Cyclic GFR-binding peptide
MEYQKYVKPKRGVIFLISIPSLAQ

SEQ ID NO: 49395 - protein, 25 aa, Artificial Sequence
  Cyclic GFR-binding peptide
NSLQEVVKENEDYYLMTLPELETPV

SEQ ID NO: 49396 - protein, 32 aa, Artificial Sequence; identical to SEQ ID NO: 4920
  Cyclic GFR-binding peptide
  MOD_RES (1)..(3): Xaa is C or S

SEQ ID NO: 49397 - protein, 33 aa, Artificial Sequence; identical to SEQ ID NO: 15411
  Cyclic GFR-binding peptide
  MOD_RES (1)..(33): Xaa is C or S

SEQ ID NO: 49398 - protein, 36 aa, Artificial Sequence; identical to SEQ ID NO: 15413
  Cyclic GFR-binding peptide
  MOD_RES (1)..(33)..(34): Xaa is C or S

SEQ ID NO: 49399 - protein, 33 aa, Artificial Sequence; identical to SEQ ID NO: 15416
  Cyclic GFR-binding peptide
  MOD_RES (2)..(33): Xaa is C or S

SEQ ID NO: 49400 - protein, 36 aa, Artificial Sequence; identical to SEQ ID NO: 15417
  Cyclic GFR-binding peptide
  MOD_RES (30)..(30): Xaa is C or S

SEQ ID NO: 49401 - protein, 34 aa, Artificial Sequence; identical to SEQ ID NO: 4925
  Cyclic GFR-binding peptide
  MOD_RES (28)..(29): Xaa is C or S

SEQ ID NO: 49402 - protein, 32 aa, Artificial Sequence; identical to SEQ ID NO: 15419
  Cyclic GFR-binding peptide
  MOD_RES (27)..(28): Xaa is C or S

SEQ ID NO: 49403 - protein, 31 aa, Artificial Sequence; identical to SEQ ID NO: 15420
  Cyclic GFR-binding peptide
  MOD_RES (26)..(27): Xaa is C or S

SEQ ID NO: 49404 - protein, 32 aa, Artificial Sequence; identical to SEQ ID NO: 4928
  Cyclic GFR-binding peptide
  MOD_RES (29)..(30): Xaa is C or S

SEQ ID NO: 49405 - protein, 26 aa, Artificial Sequence
  Cyclic GFR-binding peptide
ARVVMNNSLQEIVNSSDDYYVVPLPE

SEQ ID NO: 49406 - protein, 34 aa, Artificial Sequence; identical to SEQ ID NO: 15424
  Cyclic GFR-binding peptide
  MOD_RES (32)..(33): Xaa is C or S

SEQ ID NO: 49407 - protein, 27 aa, Artificial Sequence
  Cyclic GFR-binding peptide
  MOD_RES (26)..(27): Xaa is C or S
EYQKYVKPTRGVIFLISIPSLDQPVXX

SEQ ID NO: 49408 - protein, 24 aa, Artificial Sequence
  Cyclic GFR-binding peptide
NNSLQEIVNSSDDYYLVTLPELKT

SEQ ID NO: 49409 - protein, 26 aa, Artificial Sequence
  Cyclic GFR-binding peptide
VMNEYQKYIVNSSDDIFLVSIPSLQT

SEQ ID NO: 49410 - protein, 22 aa, Artificial Sequence
  Cyclic GFR-binding peptide
MERYKKLVVKDYEDFYLMSIAN

SEQ ID NO: 49411 - protein, 35 aa, Artificial Sequence; identical to SEQ ID NO: 15430
  Cyclic GFR-binding peptide
  MOD_RES (31)..(32): Xaa is C or S

SEQ ID NO: 49412 - protein, 36 aa, Artificial Sequence; identical to SEQ ID NO: 4946
  Cyclic GFR-binding peptide
  MOD_RES (2)..(33)..(34): Xaa is C or S

SEQ ID NO: 49413 - protein, 28 aa, Artificial Sequence
  Cyclic GFR-binding peptide
EVVMDNSLQEVVKENEDYYLMTLPELET

SEQ ID NO: 49414 - protein, 35 aa, Artificial Sequence; identical to SEQ ID NO: 15436
  Cyclic GFR-binding peptide
  MOD_RES (2)..(4)..(35): Xaa is C or S

SEQ ID NO: 49415 - protein, 25 aa, Artificial Sequence
  Cyclic GFR-binding peptide
VMERYKKLVVKDYEDFYLMSIANLE

SEQ ID NO: 49416 - protein, 25 aa, Artificial Sequence
  Cyclic GFR-binding peptide
EYQKYIKPTKGIIFLISIPSLDQSV

SEQ ID NO: 49417 - protein, 26 aa, Artificial Sequence
  Cyclic GFR-binding peptide
MNNSLQEIVNSSDDYYLVTLPELQTP

SEQ ID NO: 49418 - protein, 23 aa, Artificial Sequence
  Cyclic GFR-binding peptide
VVMNSLQEVKPTRGVYYVIPLPE

SEQ ID NO: 49419 - protein, 30 aa, Artificial Sequence
  Cyclic GFR-binding peptide
  MOD_RES (1)..(3): Xaa is C or S
XKXSKVVMNSLQEVKPTRGVYYLITLPELD

SEQ ID NO: 49420 - protein, 35 aa, Artificial Sequence; identical to SEQ ID NO: 4959
  Cyclic GFR-binding peptide
  MOD_RES (1)..(32)..(33): Xaa is C or S

SEQ ID NO: 49421 - protein, 30 aa, Artificial Sequence; identical to SEQ ID NO: 15443
  Cyclic GFR-binding peptide
  MOD_RES (26)..(26): Xaa is C or S

SEQ ID NO: 49422 - protein, 30 aa, Artificial Sequence; identical to SEQ ID NO: 15444
  Cyclic GFR-binding peptide
  MOD_RES (1)..(1): Xaa is C or S

SEQ ID NO: 49423 - protein, 41 aa, Artificial Sequence; identical to SEQ ID NO: 15445
  Cyclic GFR-binding peptide
  MOD_RES (1)..(3)..(35)..(36): Xaa is C or S

SEQ ID NO: 49424 - protein, 39 aa, Artificial Sequence; identical to SEQ ID NO: 15446
  Cyclic GFR-binding peptide
  MOD_RES (2)..(4)..(36)..(37): Xaa is C or S

SEQ ID NO: 49425 - protein, 33 aa, Artificial Sequence; identical to SEQ ID NO: 4964
  Cyclic GFR-binding peptide
  MOD_RES (28)..(29): Xaa is C or S

SEQ ID NO: 49426 - protein, 39 aa, Artificial Sequence; identical to SEQ ID NO: 15449
  Cyclic GFR-binding peptide
  MOD_RES (1)..(33)..(34): Xaa is C or S

SEQ ID NO: 49427 - protein, 26 aa, Artificial Sequence
  Cyclic GFR-binding peptide
  MOD_RES (26)..(26): Xaa is C or S
RYKKLIKPTKGIFYLISIANLDQSVX

SEQ ID NO: 49428 - protein, 30 aa, Artificial Sequence; identical to SEQ ID NO: 15452
  Cyclic GFR-binding peptide
  MOD_RES (26)..(27): Xaa is C or S

SEQ ID NO: 49429 - protein, 30 aa, Artificial Sequence; identical to SEQ ID NO: 15453
  Cyclic GFR-binding peptide
  MOD_RES (2)..(2): Xaa is C or S

SEQ ID NO: 49430 - protein, 34 aa, Artificial Sequence; identical to SEQ ID NO: 15454
  Cyclic GFR-binding peptide
  MOD_RES (2)..(4): Xaa is C or S

SEQ ID NO: 49431 - protein, 30 aa, Artificial Sequence; identical to SEQ ID NO: 15455
  Cyclic GFR-binding peptide
  MOD_RES (30)..(30): Xaa is C or S

SEQ ID NO: 49432 - protein, 32 aa, Artificial Sequence; identical to SEQ ID NO: 4977
  Cyclic GFR-binding peptide
  MOD_RES (28)..(29): Xaa is C or S

SEQ ID NO: 49433 - protein, 30 aa, Artificial Sequence; identical to SEQ ID NO: 15457
  Cyclic GFR-binding peptide
  MOD_RES (2)..(2): Xaa is C or S

SEQ ID NO: 49434 - protein, 40 aa, Artificial Sequence; identical to SEQ ID NO: 15458
  Cyclic GFR-binding peptide
  MOD_RES (2)..(4)..(36)..(37): Xaa is C or S

SEQ ID NO: 49435 - protein, 37 aa, Artificial Sequence; identical to SEQ ID NO: 15459
  Cyclic GFR-binding peptide
  MOD_RES (1)..(33)..(34): Xaa is C or S

SEQ ID NO: 49436 - protein, 34 aa, Artificial Sequence; identical to SEQ ID NO: 15460
  Cyclic GFR-binding peptide
  MOD_RES (1)..(33)..(34): Xaa is C or S

SEQ ID NO: 49437 - protein, 36 aa, Artificial Sequence; identical to SEQ ID NO: 15463
  Cyclic GFR-binding peptide
  MOD_RES (1)..(32)..(33): Xaa is C or S

SEQ ID NO: 49438 - protein, 30 aa, Artificial Sequence; identical to SEQ ID NO: 15464
  Cyclic GFR-binding peptide
  MOD_RES (28)..(29): Xaa is C or S

SEQ ID NO: 49439 - protein, 27 aa, Artificial Sequence
  Cyclic GFR-binding peptide
  MOD_RES (26)..(27): Xaa is C or S
RYKKLVVKENEDFYLMSIANLETPVXX

SEQ ID NO: 49440 - protein, 32 aa, Artificial Sequence; identical to SEQ ID NO: 15467
  Cyclic GFR-binding peptide
  MOD_RES (31)..(32): Xaa is C or S

SEQ ID NO: 49441 - protein, 37 aa, Artificial Sequence; identical to SEQ ID NO: 4995
  Cyclic GFR-binding peptide
  MOD_RES (31)..(32): Xaa is C or S

SEQ ID NO: 49442 - protein, 29 aa, Artificial Sequence
  Cyclic GFR-binding peptide
  MOD_RES (26)..(26): Xaa is C or S
EYQKYIVNSSDDIFLVSIPSLKTPAXTPK

SEQ ID NO: 49443 - protein, 21 aa, Artificial Sequence
  Cyclic GFR-binding peptide
DNSLQEVVKENEDYYVMPLPE

SEQ ID NO: 49444 - protein, 24 aa, Artificial Sequence
  Cyclic GFR-binding peptide
NEYQKYIVNSSDDIFLVSIPSLQT

SEQ ID NO: 49445 - protein, 29 aa, Artificial Sequence
  Cyclic GFR-binding peptide
SRVIMNSLQEVKPKRGVYYLITLPELAQP

SEQ ID NO: 49446 - protein, 26 aa, Artificial Sequence
  Cyclic GFR-binding peptide
SKVVMRYKKLVKPTRGVFYLISIANL

SEQ ID NO: 49447 - protein, 28 aa, Artificial Sequence
  Cyclic GFR-binding peptide
  MOD_RES (1)..(1): Xaa is C or S
XGEVVMEEYQKYVVKDYEDIFLMSIPSL

SEQ ID NO: 49448 - protein, 31 aa, Artificial Sequence; identical to SEQ ID NO: 15478
  Cyclic GFR-binding peptide

SEQ ID NO: 49449 - protein, 34 aa, Artificial Sequence; identical to SEQ ID NO: 15479
  Cyclic GFR-binding peptide
  MOD_RES (1)..(3): Xaa is C or S

SEQ ID NO: 49450 - protein, 35 aa, Artificial Sequence; identical to SEQ ID NO: 15480
  Cyclic GFR-binding peptide
  MOD_RES (30)..(31): Xaa is C or S

SEQ ID NO: 49451 - protein, 37 aa, Artificial Sequence; identical to SEQ ID NO: 15481
  Cyclic GFR-binding peptide
  MOD_RES (1)..(3)..(35)..(36): Xaa is C or S

SEQ ID NO: 49452 - protein, 30 aa, Artificial Sequence; identical to SEQ ID NO: 15483
  Cyclic GFR-binding peptide
  MOD_RES (30)..(30): Xaa is C or S

SEQ ID NO: 49453 - protein, 28 aa, Artificial Sequence
  Cyclic GFR-binding peptide
  MOD_RES (1)..(3): Xaa is C or S
XKXSRVIMNSLQEVKPKRGVYYLITLPE

SEQ ID NO: 49454 - protein, 24 aa, Artificial Sequence
  Cyclic GFR-binding peptide
MENSLQEVVKDYEDYYVMPLPELE

SEQ ID NO: 49455 - protein, 35 aa, Artificial Sequence; identical to SEQ ID NO: 15486
  Cyclic GFR-binding peptide
  MOD_RES (29)..(30): Xaa is C or S

SEQ ID NO: 49456 - protein, 24 aa, Artificial Sequence
  Cyclic GFR-binding peptide
NSLQEVVNNASDYYVIPLPELRTP

SEQ ID NO: 49457 - protein, 28 aa, Artificial Sequence
  Cyclic GFR-binding peptide
  MOD_RES (27)..(27): Xaa is C or S
NNSLQEIVNSSDDYYVVPLPELKTPAXT

SEQ ID NO: 49458 - protein, 38 aa, Artificial Sequence; identical to SEQ ID NO: 15492
  Cyclic GFR-binding peptide
  MOD_RES (32)..(32): Xaa is C or S

SEQ ID NO: 49459 - protein, 21 aa, Artificial Sequence
  Cyclic GFR-binding peptide
NSLQEVVKENEDYYVMPLPEL

SEQ ID NO: 49460 - protein, 28 aa, Artificial Sequence
  Cyclic GFR-binding peptide
  MOD_RES (26)..(27): Xaa is C or S
NSLQEIVNSSDDYYLVTLPELQTPAXXP

SEQ ID NO: 49461 - protein, 32 aa, Artificial Sequence
  Cyclic GFR-binding peptide
  MOD_RES (29)..(30): Xaa is C or S
VVMNSLQEVKPTRGVYYLITLPELDQPVXXPS

SEQ ID NO: 49462 - protein, 25 aa, Artificial Sequence
  Cyclic GFR-binding peptide
MEYQKYVKPKRGVIFLISIPSLAQP

SEQ ID NO: 49463 - protein, 27 aa, Artificial Sequence
  Cyclic GFR-binding peptide
  MOD_RES (1)..(1): Xaa is C or S
XSRVIMNSLQEVKPKRGVYYLITLPEL

SEQ ID NO: 49464 - protein, 40 aa, Artificial Sequence; identical to SEQ ID NO: 5025
  Cyclic GFR-binding peptide
  MOD_RES (2)..(4)..(36): Xaa is C or S

SEQ ID NO: 49465 - protein, 33 aa, Artificial Sequence; identical to SEQ ID NO: 15502
  Cyclic GFR-binding peptide
  MOD_RES (2)..(2): Xaa is C or S

SEQ ID NO: 49466 - protein, 38 aa, Artificial Sequence; identical to SEQ ID NO: 15503
  Cyclic GFR-binding peptide
  MOD_RES (1)..(3)..(34)..(35): Xaa is C or S

SEQ ID NO: 49467 - protein, 24 aa, Artificial Sequence
  Cyclic GFR-binding peptide
VVMNNSLQEIVNSSDDYYLVTLPE

SEQ ID NO: 49468 - protein, 38 aa, Artificial Sequence; identical to SEQ ID NO: 5032
  Cyclic GFR-binding peptide
  MOD_RES (1)..(3)..(35)..(36): Xaa is C or S

SEQ ID NO: 49469 - protein, 33 aa, Artificial Sequence; identical to SEQ ID NO: 15507
  Cyclic GFR-binding peptide
  MOD_RES (1)..(33): Xaa is C or S

SEQ ID NO: 49470 - protein, 34 aa, Artificial Sequence; identical to SEQ ID NO: 5035
  Cyclic GFR-binding peptide
  MOD_RES (29)..(30): Xaa is C or S

SEQ ID NO: 49471 - protein, 40 aa, Artificial Sequence; identical to SEQ ID NO: 5037
  Cyclic GFR-binding peptide
  MOD_RES (1)..(3)..(35)..(36): Xaa is C or S

SEQ ID NO: 49472 - protein, 33 aa, Artificial Sequence; identical to SEQ ID NO: 15510
  Cyclic GFR-binding peptide
  MOD_RES (1)..(3): Xaa is C or S

SEQ ID NO: 49473 - protein, 33 aa, Artificial Sequence
  Cyclic GFR-binding peptide
  MOD_RES (31)..(32): Xaa is C or S
SKVVMNSLQEVKPTRGVYYLITLPELDQPVXXP

SEQ ID NO: 49474 - protein, 35 aa, Artificial Sequence; identical to SEQ ID NO: 15512
  Cyclic GFR-binding peptide
  MOD_RES (30)..(31): Xaa is C or S

SEQ ID NO: 49475 - protein, 25 aa, Artificial Sequence
  Cyclic GFR-binding peptide
MEYQKYIKPTKGIIFLISIPSLDQS

SEQ ID NO: 49476 - protein, 28 aa, Artificial Sequence
  Cyclic GFR-binding peptide
VVMENSLQEVVKDYEDYYVMPLPELETP

SEQ ID NO: 49477 - protein, 33 aa, Artificial Sequence; identical to SEQ ID NO: 15515
  Cyclic GFR-binding peptide
  MOD_RES (31)..(32): Xaa is C or S

SEQ ID NO: 49478 - protein, 33 aa, Artificial Sequence; identical to SEQ ID NO: 15517
  Cyclic GFR-binding peptide
  MOD_RES (2)..(2): Xaa is C or S

SEQ ID NO: 49479 - protein, 28 aa, Artificial Sequence
  Cyclic GFR-binding peptide
  MOD_RES (2)..(2): Xaa is C or S
GXSRVVMNNSLQEIVNSSDDYYLVTLPE

SEQ ID NO: 49480 - protein, 27 aa, Artificial Sequence
  Cyclic GFR-binding peptide
VVMDRYKKLVVKENEDFYLMSIANLET

SEQ ID NO: 49481 - protein, 36 aa, Artificial Sequence; identical to SEQ ID NO: 15522
  Cyclic GFR-binding peptide
  MOD_RES (32)..(33): Xaa is C or S

SEQ ID NO: 49482 - protein, 27 aa, Artificial Sequence
  Cyclic GFR-binding peptide
RVVMNNSLQEIVNSSDDYYVVPLPELQ

SEQ ID NO: 49483 - protein, 35 aa, Artificial Sequence; identical to SEQ ID NO: 15524
  Cyclic GFR-binding peptide
  MOD_RES (1)..(33): Xaa is C or S

SEQ ID NO: 49484 - protein, 33 aa, Artificial Sequence; identical to SEQ ID NO: 5049
  Cyclic GFR-binding peptide
  MOD_RES (32)..(32): Xaa is C or S

SEQ ID NO: 49485 - protein, 38 aa, Artificial Sequence; identical to SEQ ID NO: 15528
  Cyclic GFR-binding peptide
  MOD_RES (32)..(33): Xaa is C or S

SEQ ID NO: 49486 - protein, 26 aa, Artificial Sequence
  Cyclic GFR-binding peptide
KVVMNSLQEVKPTRGVYYVIPLPELD

SEQ ID NO: 49487 - protein, 27 aa, Artificial Sequence
  Cyclic GFR-binding peptide
  MOD_RES (27)..(27): Xaa is C or S
DNSLQEVVNNASDYYVIPLPELRTPVX

SEQ ID NO: 49488 - protein, 26 aa, Artificial Sequence
  Cyclic GFR-binding peptide
VMENSLQEVVKDYEDYYVMPLPELET

SEQ ID NO: 49489 - protein, 38 aa, Artificial Sequence; identical to SEQ ID NO: 5052
  Cyclic GFR-binding peptide
  MOD_RES (32)..(33): Xaa is C or S

SEQ ID NO: 49490 - protein, 24 aa, Artificial Sequence
  Cyclic GFR-binding peptide
MEYQKYVKPTRGVIFLISIPSLDQ

SEQ ID NO: 49491 - protein, 33 aa, Artificial Sequence; identical to SEQ ID NO: 5057
  Cyclic GFR-binding peptide
  MOD_RES (1)..(3): Xaa is C or S

SEQ ID NO: 49492 - protein, 36 aa, Artificial Sequence; identical to SEQ ID NO: 5058
  Cyclic GFR-binding peptide
  MOD_RES (30)..(31): Xaa is C or S

SEQ ID NO: 49493 - protein, 29 aa, Artificial Sequence
  Cyclic GFR-binding peptide
  MOD_RES (2)..(2): Xaa is C or S
GXGEVVMDNSLQEVVKENEDYYVMPLPEL

SEQ ID NO: 49494 - protein, 31 aa, Artificial Sequence; identical to SEQ ID NO: 15541
  Cyclic GFR-binding peptide
  MOD_RES (27)..(28): Xaa is C or S

SEQ ID NO: 49495 - protein, 35 aa, Artificial Sequence
  Cyclic GFR-binding peptide
  MOD_RES (29)..(30): Xaa is C or S
VVMNSLQEVKPTRGVYYLITLPELDQPVXXPSASA

SEQ ID NO: 49496 - protein, 39 aa, Artificial Sequence; identical to SEQ ID NO: 15543
  Cyclic GFR-binding peptide
  MOD_RES (2)..(4)..(36)..(37): Xaa is C or S

SEQ ID NO: 49497 - protein, 34 aa, Artificial Sequence; identical to SEQ ID NO: 15544
  Cyclic GFR-binding peptide
  MOD_RES (1)..(33)..(34): Xaa is C or S

SEQ ID NO: 49498 - protein, 20 aa, Artificial Sequence
  Cyclic GFR-binding peptide
NSLQEIKPTKGIYYLITLPE

SEQ ID NO: 49499 - protein, 26 aa, Artificial Sequence
  Cyclic GFR-binding peptide
VVMNRYKKLIVNSSDDFYLVSIANLK

SEQ ID NO: 49500 - protein, 27 aa, Artificial Sequence
  Cyclic GFR-binding peptide
VMDRYKKLVVNNASDFYLISIANLRTP

SEQ ID NO: 49501 - protein, 35 aa, Artificial Sequence; identical to SEQ ID NO: 5073
  Cyclic GFR-binding peptide
  MOD_RES (1)..(3)..(35): Xaa is C or S

SEQ ID NO: 49502 - protein, 38 aa, Artificial Sequence; identical to SEQ ID NO: 15553
  Cyclic GFR-binding peptide
  MOD_RES (1)..(32)..(33): Xaa is C or S

SEQ ID NO: 49503 - protein, 28 aa, Artificial Sequence
  Cyclic GFR-binding peptide
RVVMNRYKKLIVNSSDDFYLVSIANLKT

SEQ ID NO: 49504 - protein, 29 aa, Artificial Sequence
  Cyclic GFR-binding peptide
  MOD_RES (2)..(2): Xaa is C or S
GXARVVMNNSLQEIVNSSDDYYLVTLPEL

SEQ ID NO: 49505 - protein, 25 aa, Artificial Sequence
  Cyclic GFR-binding peptide
DRYKKLVVKENEDFYLMSIANLETP

SEQ ID NO: 49506 - protein, 30 aa, Artificial Sequence; identical to SEQ ID NO: 15559
  Cyclic GFR-binding peptide
  MOD_RES (1)..(3): Xaa is C or S

SEQ ID NO: 49507 - protein, 20 aa, Artificial Sequence
  Cyclic GFR-binding peptide
RYKKLIKPTKGIFYLISIAN

SEQ ID NO: 49508 - protein, 27 aa, Artificial Sequence
  Cyclic GFR-binding peptide
VVMNEYQKYIVNSSDDIFLVSIPSLQT

SEQ ID NO: 49509 - protein, 35 aa, Artificial Sequence; identical to SEQ ID NO: 5091
  Cyclic GFR-binding peptide
  MOD_RES (2)..(4): Xaa is C or S

SEQ ID NO: 49510 - protein, 34 aa, Artificial Sequence; identical to SEQ ID NO: 15564
  Cyclic GFR-binding peptide
  MOD_RES (1)..(32)..(33): Xaa is C or S

SEQ ID NO: 49511 - protein, 33 aa, Artificial Sequence; identical to SEQ ID NO: 15565
  Cyclic GFR-binding peptide
  MOD_RES (30)..(30): Xaa is C or S

SEQ ID NO: 49512 - protein, 29 aa, Artificial Sequence
  Cyclic GFR-binding peptide
SEVVMDNSLQEVVNNASDYYVIPLPELRT

SEQ ID NO: 49513 - protein, 33 aa, Artificial Sequence; identical to SEQ ID NO: 15567
  Cyclic GFR-binding peptide
  MOD_RES (27)..(28): Xaa is C or S

SEQ ID NO: 49514 - protein, 36 aa, Artificial Sequence; identical to SEQ ID NO: 5094
  Cyclic GFR-binding peptide
  MOD_RES (31)..(32): Xaa is C or S

SEQ ID NO: 49515 - protein, 26 aa, Artificial Sequence
  Cyclic GFR-binding peptide
VMNEYQKYIVNSSDDIFLVSIPSLKT

SEQ ID NO: 49516 - protein, 40 aa, Artificial Sequence; identical to SEQ ID NO: 15570
  Cyclic GFR-binding peptide
  MOD_RES (2)..(4)..(36): Xaa is C or S

SEQ ID NO: 49517 - protein, 30 aa, Artificial Sequence; identical to SEQ ID NO: 15571
  Cyclic GFR-binding peptide

SEQ ID NO: 49518 - protein, 34 aa, Artificial Sequence; identical to SEQ ID NO: 15572
  Cyclic GFR-binding peptide
  MOD_RES (2)..(4): Xaa is C or S

SEQ ID NO: 49519 - protein, 22 aa, Artificial Sequence
  Cyclic GFR-binding peptide
MRYKKLIKPTKGIFYLISIANL

SEQ ID NO: 49520 - protein, 37 aa, Artificial Sequence; identical to SEQ ID NO: 15574
  Cyclic GFR-binding peptide
  MOD_RES (31)..(32): Xaa is C or S

SEQ ID NO: 49521 - protein, 27 aa, Artificial Sequence
  Cyclic GFR-binding peptide
  MOD_RES (26)..(27): Xaa is C or S
NSLQEVVKENEDYYLMTLPELETPVXX

SEQ ID NO: 49522 - protein, 41 aa, Artificial Sequence; identical to SEQ ID NO: 15578
  Cyclic GFR-binding peptide
  MOD_RES (1)..(3)..(35)..(36): Xaa is C or S

SEQ ID NO: 49523 - protein, 24 aa, Artificial Sequence
  Cyclic GFR-binding peptide
VIMNSLQEIKPTKGIYYLITLPEL

SEQ ID NO: 49524 - protein, 32 aa, Artificial Sequence; identical to SEQ ID NO: 15580
  Cyclic GFR-binding peptide
  MOD_RES (29)..(30): Xaa is C or S

SEQ ID NO: 49525 - protein, 34 aa, Artificial Sequence; identical to SEQ ID NO: 15581
  Cyclic GFR-binding peptide
  MOD_RES (2)..(34): Xaa is C or S

SEQ ID NO: 49526 - protein, 26 aa, Artificial Sequence
  Cyclic GFR-binding peptide
  MOD_RES (1)..(1): Xaa is C or S
XSKVIMNSLQEIKPTKGIYYVIPLPE

SEQ ID NO: 49527 - protein, 23 aa, Artificial Sequence
  Cyclic GFR-binding peptide
VVMNSLQEVKPTRGVYYLITLPE

SEQ ID NO: 49528 - protein, 38 aa, Artificial Sequence; identical to SEQ ID NO: 5105
  Cyclic GFR-binding peptide
  MOD_RES (1)..(33)..(34): Xaa is C or S

SEQ ID NO: 49529 - protein, 23 aa, Artificial Sequence
  Cyclic GFR-binding peptide
VMRYKKLVKPTRGVFYLISIANL

SEQ ID NO: 49530 - protein, 41 aa, Artificial Sequence; identical to SEQ ID NO: 15587
  Cyclic GFR-binding peptide
  MOD_RES (1)..(3)..(35)..(36): Xaa is C or S

SEQ ID NO: 49531 - protein, 32 aa, Artificial Sequence; identical to SEQ ID NO: 5109
  Cyclic GFR-binding peptide
  MOD_RES (2)..(2): Xaa is C or S

SEQ ID NO: 49532 - protein, 30 aa, Artificial Sequence; identical to SEQ ID NO: 15589
  Cyclic GFR-binding peptide
  MOD_RES (1)..(3): Xaa is C or S

SEQ ID NO: 49533 - protein, 31 aa, Artificial Sequence; identical to SEQ ID NO: 15590
  Cyclic GFR-binding peptide
  MOD_RES (1)..(1): Xaa is C or S

SEQ ID NO: 49534 - protein, 24 aa, Artificial Sequence
  Cyclic GFR-binding peptide
MNEYQKYIVNSSDDIFLVSIPSLQ

SEQ ID NO: 49535 - protein, 33 aa, Artificial Sequence; identical to SEQ ID NO: 15592
  Cyclic GFR-binding peptide
  MOD_RES (31)..(32): Xaa is C or S

SEQ ID NO: 49536 - protein, 23 aa, Artificial Sequence
  Cyclic GFR-binding peptide
DNSLQEVVNNASDYYLITLPELR

SEQ ID NO: 49537 - protein, 22 aa, Artificial Sequence
  Cyclic GFR-binding peptide
EYQKYVVKENEDIFLMSIPSLE

SEQ ID NO: 49538 - protein, 34 aa, Artificial Sequence; identical to SEQ ID NO: 15595
  Cyclic GFR-binding peptide
  MOD_RES (30)..(30): Xaa is C or S

SEQ ID NO: 49539 - protein, 30 aa, Artificial Sequence; identical to SEQ ID NO: 15596
  Cyclic GFR-binding peptide

SEQ ID NO: 49540 - protein, 32 aa, Artificial Sequence; identical to SEQ ID NO: 15597
  Cyclic GFR-binding peptide
  MOD_RES (26)..(27): Xaa is C or S

SEQ ID NO: 49541 - protein, 39 aa, Artificial Sequence; identical to SEQ ID NO: 15598
  Cyclic GFR-binding peptide
  MOD_RES (1)..(3)..(34)..(35): Xaa is C or S

SEQ ID NO: 49542 - protein, 22 aa, Artificial Sequence
  Cyclic GFR-binding peptide
NRYKKLIVNSSDDFYLVSIANL

SEQ ID NO: 49543 - protein, 23 aa, Artificial Sequence
  Cyclic GFR-binding peptide
MNNSLQEIVNSSDDYYVVPLPEL

SEQ ID NO: 49544 - protein, 28 aa, Artificial Sequence
  Cyclic GFR-binding peptide
  MOD_RES (28)..(28): Xaa is C or S
MENSLQEVVKDYEDYYLMTLPELETPVX

SEQ ID NO: 49545 - protein, 32 aa, Artificial Sequence; identical to SEQ ID NO: 5132
  Cyclic GFR-binding peptide
  MOD_RES (2)..(4): Xaa is C or S

SEQ ID NO: 49546 - protein, 33 aa, Artificial Sequence; identical to SEQ ID NO: 5134
  Cyclic GFR-binding peptide
  MOD_RES (1)..(33): Xaa is C or S

SEQ ID NO: 49547 - protein, 41 aa, Artificial Sequence; identical to SEQ ID NO: 15609
  Cyclic GFR-binding peptide
  MOD_RES (1)..(3)..(35)..(36): Xaa is C or S

SEQ ID NO: 49548 - protein, 27 aa, Artificial Sequence
  Cyclic GFR-binding peptide
VMNRYKKLIVNSSDDFYLVSIANLKTP

SEQ ID NO: 49549 - protein, 30 aa, Artificial Sequence; identical to SEQ ID NO: 15612
  Cyclic GFR-binding peptide
  MOD_RES (28)..(29): Xaa is C or S

SEQ ID NO: 49550 - protein, 32 aa, Artificial Sequence; identical to SEQ ID NO: 15613
  Cyclic GFR-binding peptide
  MOD_RES (27)..(28): Xaa is C or S

SEQ ID NO: 49551 - protein, 32 aa, Artificial Sequence; identical to SEQ ID NO: 15614
  Cyclic GFR-binding peptide
  MOD_RES (2)..(2): Xaa is C or S

SEQ ID NO: 49552 - protein, 24 aa, Artificial Sequence
  Cyclic GFR-binding peptide
VVMDRYKKLVVNNASDFYLISIAN

SEQ ID NO: 49553 - protein, 21 aa, Artificial Sequence
  Cyclic GFR-binding peptide
DRYKKLVVNNASDFYLISIAN

SEQ ID NO: 49554 - protein, 37 aa, Artificial Sequence; identical to SEQ ID NO: 15617
  Cyclic GFR-binding peptide
  MOD_RES (31)..(32): Xaa is C or S

SEQ ID NO: 49555 - protein, 33 aa, Artificial Sequence; identical to SEQ ID NO: 15618
  Cyclic GFR-binding peptide
  MOD_RES (32)..(33): Xaa is C or S

SEQ ID NO: 49556 - protein, 31 aa, Artificial Sequence; identical to SEQ ID NO: 5154
  Cyclic GFR-binding peptide
  MOD_RES (31)..(31): Xaa is C or S

SEQ ID NO: 49557 - protein, 30 aa, Artificial Sequence; identical to SEQ ID NO: 15621
  Cyclic GFR-binding peptide
  MOD_RES (28)..(29): Xaa is C or S

SEQ ID NO: 49558 - protein, 34 aa, Artificial Sequence; identical to SEQ ID NO: 15622
  Cyclic GFR-binding peptide
  MOD_RES (29)..(30): Xaa is C or S

SEQ ID NO: 49559 - protein, 35 aa, Artificial Sequence; identical to SEQ ID NO: 15623
  Cyclic GFR-binding peptide
  MOD_RES (1)..(3)..(34)..(35): Xaa is C or S

SEQ ID NO: 49560 - protein, 38 aa, Artificial Sequence; identical to SEQ ID NO: 5161
  Cyclic GFR-binding peptide
  MOD_RES (1)..(3)..(35)..(36): Xaa is C or S

SEQ ID NO: 49561 - protein, 30 aa, Artificial Sequence; identical to SEQ ID NO: 15627
  Cyclic GFR-binding peptide

SEQ ID NO: 49562 - protein, 26 aa, Artificial Sequence
  Cyclic GFR-binding peptide
IMRYKKLIKPTKGIFYLISIANLDQS

SEQ ID NO: 49563 - protein, 29 aa, Artificial Sequence
  Cyclic GFR-binding peptide
  MOD_RES (29)..(29): Xaa is C or S
VVMRYKKLVKPTRGVFYLISIANLDQPVX

SEQ ID NO: 49564 - protein, 29 aa, Artificial Sequence
  Cyclic GFR-binding peptide
  MOD_RES (29)..(29): Xaa is C or S
VMDNSLQEVVKENEDYYVMPLPELETPVX

SEQ ID NO: 49565 - protein, 35 aa, Artificial Sequence; identical to SEQ ID NO: 15631
  Cyclic GFR-binding peptide
  MOD_RES (2)..(33)..(34): Xaa is C or S

SEQ ID NO: 49566 - protein, 31 aa, Artificial Sequence; identical to SEQ ID NO: 15632
  Cyclic GFR-binding peptide

SEQ ID NO: 49567 - protein, 32 aa, Artificial Sequence
  Cyclic GFR-binding peptide
  MOD_RES (27)..(28): Xaa is C or S
MNSLQEVKPTRGVYYLITLPELDQPVXXPSAS

SEQ ID NO: 49568 - protein, 36 aa, Artificial Sequence; identical to SEQ ID NO: 15633
  Cyclic GFR-binding peptide
  MOD_RES (2)..(4)..(35)..(36): Xaa is C or S

SEQ ID NO: 49569 - protein, 32 aa, Artificial Sequence; identical to SEQ ID NO: 5171
  Cyclic GFR-binding peptide
  MOD_RES (31)..(32): Xaa is C or S

SEQ ID NO: 49570 - protein, 33 aa, Artificial Sequence; identical to SEQ ID NO: 15637
  Cyclic GFR-binding peptide
  MOD_RES (1)..(33): Xaa is C or S

SEQ ID NO: 49571 - protein, 39 aa, Artificial Sequence; identical to SEQ ID NO: 15638
  Cyclic GFR-binding peptide
  MOD_RES (1)..(33): Xaa is C or S

SEQ ID NO: 49572 - protein, 36 aa, Artificial Sequence; identical to SEQ ID NO: 15642
  Cyclic GFR-binding peptide
  MOD_RES (31)..(32): Xaa is C or S

SEQ ID NO: 49573 - protein, 34 aa, Artificial Sequence; identical to SEQ ID NO: 15643
  Cyclic GFR-binding peptide
  MOD_RES (30)..(31): Xaa is C or S

SEQ ID NO: 49574 - protein, 36 aa, Artificial Sequence; identical to SEQ ID NO: 15644
  Cyclic GFR-binding peptide
  MOD_RES (30)..(31): Xaa is C or S

SEQ ID NO: 49575 - protein, 37 aa, Artificial Sequence; identical to SEQ ID NO: 15645
  Cyclic GFR-binding peptide
  MOD_RES (32)..(33): Xaa is C or S

SEQ ID NO: 49576 - protein, 29 aa, Artificial Sequence
  Cyclic GFR-binding peptide
  MOD_RES (1)..(1): Xaa is C or S
XSKVVMEYQKYVKPTRGVIFLISIPSLDQ

SEQ ID NO: 49577 - protein, 26 aa, Artificial Sequence
  Cyclic GFR-binding peptide
VMEEYQKYVVKDYEDIFLMSIPSLET

SEQ ID NO: 49578 - protein, 38 aa, Artificial Sequence; identical to SEQ ID NO: 15648
  Cyclic GFR-binding peptide
  MOD_RES (32)..(33): Xaa is C or S

SEQ ID NO: 49579 - protein, 32 aa, Artificial Sequence; identical to SEQ ID NO: 15649
  Cyclic GFR-binding peptide
  MOD_RES (30)..(31): Xaa is C or S

SEQ ID NO: 49580 - protein, 37 aa, Artificial Sequence; identical to SEQ ID NO: 15650
  Cyclic GFR-binding peptide
  MOD_RES (2)..(34)..(35): Xaa is C or S

SEQ ID NO: 49581 - protein, 37 aa, Artificial Sequence; identical to SEQ ID NO: 15651
  Cyclic GFR-binding peptide
  MOD_RES (1)..(33)..(34): Xaa is C or S

SEQ ID NO: 49582 - protein, 23 aa, Artificial Sequence
  Cyclic GFR-binding peptide
EYQKYVVKENEDIFLMSIPSLET

SEQ ID NO: 49583 - protein, 40 aa, Artificial Sequence
  Cyclic GFR-binding peptide
  MOD_RES (2)..(4)..(35)..(36): Xaa is C or S
SXKXSKVVMNSLQEVKPTRGVYYLITLPELDQPVXXPSAS

SEQ ID NO: 49584 - protein, 34 aa, Artificial Sequence; identical to SEQ ID NO: 15654
  Cyclic GFR-binding peptide
  MOD_RES (28)..(29): Xaa is C or S

SEQ ID NO: 49585 - protein, 29 aa, Artificial Sequence
  Cyclic GFR-binding peptide
ARVVMNEYQKYIVNSSDDIFLVSIPSLQT

SEQ ID NO: 49586 - protein, 27 aa, Artificial Sequence
  Cyclic GFR-binding peptide
  MOD_RES (1)..(1): Xaa is C or S
XGEVVMENSLQEVVKDYEDYYVMPLPE

SEQ ID NO: 49587 - protein, 37 aa, Artificial Sequence; identical to SEQ ID NO: 15657
  Cyclic GFR-binding peptide
  MOD_RES (1)..(3)..(34)..(35): Xaa is C or S

SEQ ID NO: 49588 - protein, 30 aa, Artificial Sequence; identical to SEQ ID NO: 15658
  Cyclic GFR-binding peptide
  MOD_RES (2)..(2): Xaa is C or S

SEQ ID NO: 49589 - protein, 33 aa, Artificial Sequence; identical to SEQ ID NO: 15659
  Cyclic GFR-binding peptide
  MOD_RES (29)..(30): Xaa is C or S

SEQ ID NO: 49590 - protein, 28 aa, Artificial Sequence
  Cyclic GFR-binding peptide
VVMDNSLQEVVKENEDYYVMPLPELETP

SEQ ID NO: 49591 - protein, 31 aa, Artificial Sequence; identical to SEQ ID NO: 15663
  Cyclic GFR-binding peptide
  MOD_RES (1)..(3): Xaa is C or S

SEQ ID NO: 49592 - protein, 26 aa, Artificial Sequence
  Cyclic GFR-binding peptide
DNSLQEVVKENEDYYLMTLPELETPV

SEQ ID NO: 49593 - protein, 28 aa, Artificial Sequence
  Cyclic GFR-binding peptide
EVVMDEYQKYVVKENEDIFLMSIPSLET

SEQ ID NO: 49594 - protein, 35 aa, Artificial Sequence; identical to SEQ ID NO: 15666
  Cyclic GFR-binding peptide
  MOD_RES (29)..(30): Xaa is C or S

SEQ ID NO: 49595 - protein, 25 aa, Artificial Sequence
  Cyclic GFR-binding peptide
MEYQKYVKPTRGVIFLISIPSLDQP

SEQ ID NO: 49596 - protein, 31 aa, Artificial Sequence; identical to SEQ ID NO: 15669
  Cyclic GFR-binding peptide
  MOD_RES (1)..(1): Xaa is C or S

SEQ ID NO: 49597 - protein, 30 aa, Artificial Sequence; identical to SEQ ID NO: 15670
  Cyclic GFR-binding peptide
  MOD_RES (29)..(29): Xaa is C or S

SEQ ID NO: 49598 - protein, 39 aa, Artificial Sequence; identical to SEQ ID NO: 15671
  Cyclic GFR-binding peptide
  MOD_RES (2)..(4)..(36): Xaa is C or S

SEQ ID NO: 49599 - protein, 30 aa, Artificial Sequence; identical to SEQ ID NO: 15674
  Cyclic GFR-binding peptide
  MOD_RES (27)..(28): Xaa is C or S

SEQ ID NO: 49600 - protein, 36 aa, Artificial Sequence; identical to SEQ ID NO: 15675
  Cyclic GFR-binding peptide
  MOD_RES (31)..(32): Xaa is C or S

SEQ ID NO: 49601 - protein, 22 aa, Artificial Sequence
  Cyclic GFR-binding peptide
MDNSLQEVVNNASDYYLITLPE

SEQ ID NO: 49602 - protein, 26 aa, Artificial Sequence
  Cyclic GFR-binding peptide
VMERYKKLVVKDYEDFYLMSIANLET

SEQ ID NO: 49603 - protein, 29 aa, Artificial Sequence
  Cyclic GFR-binding peptide
  MOD_RES (29)..(29): Xaa is C or S
VIMNSLQEVKPKRGVYYLITLPELAQPVX

SEQ ID NO: 49604 - protein, 27 aa, Artificial Sequence
  Cyclic GFR-binding peptide
VVMENSLQEVVKDYEDYYLMTLPELET

SEQ ID NO: 49605 - protein, 25 aa, Artificial Sequence
  Cyclic GFR-binding peptide
VVMNRYKKLIVNSSDDFYLVSIANL

SEQ ID NO: 49606 - protein, 39 aa, Artificial Sequence; identical to SEQ ID NO: 15682
  Cyclic GFR-binding peptide
  MOD_RES (2)..(4)..(35)..(36): Xaa is C or S

SEQ ID NO: 49607 - protein, 33 aa, Artificial Sequence; identical to SEQ ID NO: 15683
  Cyclic GFR-binding peptide
  MOD_RES (29)..(30): Xaa is C or S

SEQ ID NO: 49608 - protein, 33 aa, Artificial Sequence; identical to SEQ ID NO: 5207
  Cyclic GFR-binding peptide
  MOD_RES (27)..(28): Xaa is C or S

SEQ ID NO: 49609 - protein, 29 aa, Artificial Sequence
  Cyclic GFR-binding peptide
VVMNNSLQEIVNSSDDYYLVTLPELKTPA

SEQ ID NO: 49610 - protein, 32 aa, Artificial Sequence; identical to SEQ ID NO: 15686
  Cyclic GFR-binding peptide
  MOD_RES (31)..(32): Xaa is C or S

SEQ ID NO: 49611 - protein, 23 aa, Artificial Sequence
  Cyclic GFR-binding peptide
NSLQEVVKDYEDYYVMPLPELET

SEQ ID NO: 49612 - protein, 39 aa, Artificial Sequence; identical to SEQ ID NO: 15688
  Cyclic GFR-binding peptide
  MOD_RES (2)..(4)..(36)..(37): Xaa is C or S

SEQ ID NO: 49613 - protein, 24 aa, Artificial Sequence
  Cyclic GFR-binding peptide
DRYKKLVVKENEDFYLMSIANLET

SEQ ID NO: 49614 - protein, 35 aa, Artificial Sequence; identical to SEQ ID NO: 15692
  Cyclic GFR-binding peptide
  MOD_RES (2)..(4): Xaa is C or S

SEQ ID NO: 49615 - protein, 34 aa, Artificial Sequence; identical to SEQ ID NO: 15693
  Cyclic GFR-binding peptide
  MOD_RES (28)..(28): Xaa is C or S

SEQ ID NO: 49616 - protein, 36 aa, Artificial Sequence; identical to SEQ ID NO: 5217
  Cyclic GFR-binding peptide
  MOD_RES (30)..(31): Xaa is C or S

SEQ ID NO: 49617 - protein, 28 aa, Artificial Sequence
  Cyclic GFR-binding peptide
  MOD_RES (27)..(28): Xaa is C or S
MNSLQEIKPTKGIYYVIPLPELDQSVXX

SEQ ID NO: 49618 - protein, 42 aa, Artificial Sequence; identical to SEQ ID NO: 15700
  Cyclic GFR-binding peptide
  MOD_RES (2)..(4)..(36)..(37): Xaa is C or S

SEQ ID NO: 49619 - protein, 36 aa, Artificial Sequence; identical to SEQ ID NO: 15701
  Cyclic GFR-binding peptide
  MOD_RES (2)..(4)..(36): Xaa is C or S

SEQ ID NO: 49620 - protein, 30 aa, Artificial Sequence; identical to SEQ ID NO: 15702
  Cyclic GFR-binding peptide
  MOD_RES (2)..(2): Xaa is C or S

SEQ ID NO: 49621 - protein, 34 aa, Artificial Sequence; identical to SEQ ID NO: 15705
  Cyclic GFR-binding peptide
  MOD_RES (29)..(30): Xaa is C or S

SEQ ID NO: 49622 - protein, 37 aa, Artificial Sequence; identical to SEQ ID NO: 15706
  Cyclic GFR-binding peptide
  MOD_RES (1)..(32)..(33): Xaa is C or S

SEQ ID NO: 49623 - protein, 29 aa, Artificial Sequence
  Cyclic GFR-binding peptide
  MOD_RES (26)..(27): Xaa is C or S
NSLQEVVNNASDYYLITLPELRTPVXXTP

SEQ ID NO: 49624 - protein, 29 aa, Artificial Sequence
  Cyclic GFR-binding peptide
  MOD_RES (1)..(1): Xaa is C or S
XGEVVMENSLQEVVKDYEDYYLMTLPELE

SEQ ID NO: 49625 - protein, 31 aa, Artificial Sequence; identical to SEQ ID NO: 15709
  Cyclic GFR-binding peptide
  MOD_RES (31)..(31): Xaa is C or S

SEQ ID NO: 49626 - protein, 35 aa, Artificial Sequence; identical to SEQ ID NO: 15712
  Cyclic GFR-binding peptide
  MOD_RES (2)..(4): Xaa is C or S

SEQ ID NO: 49627 - protein, 28 aa, Artificial Sequence
  Cyclic GFR-binding peptide
  MOD_RES (1)..(1): Xaa is C or S
XGEVVMDNSLQEVVKENEDYYLMTLPEL

SEQ ID NO: 49628 - protein, 32 aa, Artificial Sequence; identical to SEQ ID NO: 15714
  Cyclic GFR-binding peptide
  MOD_RES (31)..(32): Xaa is C or S

SEQ ID NO: 49629 - protein, 34 aa, Artificial Sequence; identical to SEQ ID NO: 15715
  Cyclic GFR-binding peptide
  MOD_RES (29)..(30): Xaa is C or S

SEQ ID NO: 49630 - protein, 31 aa, Artificial Sequence; identical to SEQ ID NO: 15716
  Cyclic GFR-binding peptide
  MOD_RES (30)..(31): Xaa is C or S

SEQ ID NO: 49631 - protein, 29 aa, Artificial Sequence
  Cyclic GFR-binding peptide
VVMDNSLQEVVKENEDYYVMPLPELETPV

SEQ ID NO: 49632 - protein, 22 aa, Artificial Sequence
  Cyclic GFR-binding peptide
DRYKKLVVKENEDFYLMSIANL

SEQ ID NO: 49633 - protein, 32 aa, Artificial Sequence; identical to SEQ ID NO: 15720
  Cyclic GFR-binding peptide
  MOD_RES (1)..(1): Xaa is C or S

SEQ ID NO: 49634 - protein, 24 aa, Artificial Sequence
  Cyclic GFR-binding peptide
VVMDEYQKYVVKENEDIFLMSIPS

SEQ ID NO: 49635 - protein, 39 aa, Artificial Sequence; identical to SEQ ID NO: 15723
  Cyclic GFR-binding peptide
  MOD_RES (1)..(3)..(35)..(36): Xaa is C or S

SEQ ID NO: 49636 - protein, 36 aa, Artificial Sequence; identical to SEQ ID NO: 15725
  Cyclic GFR-binding peptide
  MOD_RES (32)..(32): Xaa is C or S

SEQ ID NO: 49637 - protein, 29 aa, Artificial Sequence
  Cyclic GFR-binding peptide
EVVMDRYKKLVVKENEDFYLMSIANLETP

SEQ ID NO: 49638 - protein, 33 aa, Artificial Sequence; identical to SEQ ID NO: 15728
  Cyclic GFR-binding peptide
  MOD_RES (30)..(31): Xaa is C or S

SEQ ID NO: 49639 - protein, 30 aa, Artificial Sequence; identical to SEQ ID NO: 15729
  Cyclic GFR-binding peptide
  MOD_RES (2)..(2): Xaa is C or S

SEQ ID NO: 49640 - protein, 28 aa, Artificial Sequence
  Cyclic GFR-binding peptide
  MOD_RES (1)..(1): Xaa is C or S
XSKVVMRYKKLVKPTRGVFYLISIANLD

SEQ ID NO: 49641 - protein, 22 aa, Artificial Sequence
  Cyclic GFR-binding peptide
MNEYQKYIVNSSDDIFLVSIPS

SEQ ID NO: 49642 - protein, 33 aa, Artificial Sequence; identical to SEQ ID NO: 15734
  Cyclic GFR-binding peptide
  MOD_RES (28)..(29): Xaa is C or S

SEQ ID NO: 49643 - protein, 34 aa, Artificial Sequence; identical to SEQ ID NO: 15735
  Cyclic GFR-binding peptide
  MOD_RES (1)..(33): Xaa is C or S

SEQ ID NO: 49644 - protein, 35 aa, Artificial Sequence; identical to SEQ ID NO: 15736
  Cyclic GFR-binding peptide
  MOD_RES (31)..(32): Xaa is C or S

SEQ ID NO: 49645 - protein, 29 aa, Artificial Sequence
  Cyclic GFR-binding peptide
  MOD_RES (28)..(28): Xaa is C or S
MNEYQKYIVNSSDDIFLVSIPSLKTPAXT

SEQ ID NO: 49646 - protein, 28 aa, Artificial Sequence
  Cyclic GFR-binding peptide
VVMERYKKLVVKDYEDFYLMSIANLETP

SEQ ID NO: 49647 - protein, 24 aa, Artificial Sequence
  Cyclic GFR-binding peptide
NSLQEIVNSSDDYYVVPLPELQTP

SEQ ID NO: 49648 - protein, 29 aa, Artificial Sequence
  Cyclic GFR-binding peptide
  MOD_RES (2)..(2): Xaa is C or S
GXGEVVMERYKKLVVKDYEDFYLMSIANL

SEQ ID NO: 49649 - protein, 30 aa, Artificial Sequence; identical to SEQ ID NO: 15745
  Cyclic GFR-binding peptide
  MOD_RES (1)..(1): Xaa is C or S

SEQ ID NO: 49650 - protein, 22 aa, Artificial Sequence
  Cyclic GFR-binding peptide
VMNSLQEVKPTRGVYYVIPLPE

SEQ ID NO: 49651 - protein, 22 aa, Artificial Sequence
  Cyclic GFR-binding peptide
DNSLQEVVNNASDYYVIPLPEL

SEQ ID NO: 49652 - protein, 37 aa, Artificial Sequence; identical to SEQ ID NO: 15750
  Cyclic GFR-binding peptide
  MOD_RES (2)..(33)..(34): Xaa is C or S

SEQ ID NO: 49653 - protein, 37 aa, Artificial Sequence; identical to SEQ ID NO: 15751
  Cyclic GFR-binding peptide
  MOD_RES (2)..(4)..(35)..(36): Xaa is C or S

SEQ ID NO: 49654 - protein, 37 aa, Artificial Sequence; identical to SEQ ID NO: 15753
  Cyclic GFR-binding peptide
  MOD_RES (2)..(4)..(35)..(36): Xaa is C or S

SEQ ID NO: 49655 - protein, 39 aa, Artificial Sequence; identical to SEQ ID NO: 15756
  Cyclic GFR-binding peptide
  MOD_RES (1)..(3)..(35)..(36): Xaa is C or S

SEQ ID NO: 49656 - protein, 29 aa, Artificial Sequence
  Cyclic GFR-binding peptide
  MOD_RES (27)..(28): Xaa is C or S
DNSLQEVVKENEDYYLMTLPELETPVXXA

SEQ ID NO: 49657 - protein, 32 aa, Artificial Sequence; identical to SEQ ID NO: 15760
  Cyclic GFR-binding peptide
  MOD_RES (30)..(31): Xaa is C or S

SEQ ID NO: 49658 - protein, 36 aa, Artificial Sequence; identical to SEQ ID NO: 5299
  Cyclic GFR-binding peptide
  MOD_RES (32)..(33): Xaa is C or S

SEQ ID NO: 49659 - protein, 31 aa, Artificial Sequence; identical to SEQ ID NO: 15764
  Cyclic GFR-binding peptide
  MOD_RES (31)..(31): Xaa is C or S

SEQ ID NO: 49660 - protein, 31 aa, Artificial Sequence; identical to SEQ ID NO: 5300
  Cyclic GFR-binding peptide
  MOD_RES (1)..(1): Xaa is C or S

SEQ ID NO: 49661 - protein, 29 aa, Artificial Sequence
  Cyclic GFR-binding peptide
  MOD_RES (27)..(28): Xaa is C or S
MRYKKLVKPKRGVFYLISIANLAQPVXXP

SEQ ID NO: 49662 - protein, 36 aa, Artificial Sequence; identical to SEQ ID NO: 15768
  Cyclic GFR-binding peptide
  MOD_RES (31)..(32): Xaa is C or S

SEQ ID NO: 49663 - protein, 33 aa, Artificial Sequence; identical to SEQ ID NO: 15769
  Cyclic GFR-binding peptide
  MOD_RES (32)..(32): Xaa is C or S

SEQ ID NO: 49664 - protein, 35 aa, Artificial Sequence; identical to SEQ ID NO: 15770
  Cyclic GFR-binding peptide
  MOD_RES (30)..(30): Xaa is C or S

SEQ ID NO: 49665 - protein, 28 aa, Artificial Sequence
  Cyclic GFR-binding peptide
KVIMEYQKYIKPTKGIIFLISIPSLDQS

SEQ ID NO: 49666 - protein, 27 aa, Artificial Sequence
  Cyclic GFR-binding peptide
  MOD_RES (26)..(27): Xaa is C or S
NSLQEVVKDYEDYYLMTLPELETPVXX

SEQ ID NO: 49667 - protein, 27 aa, Artificial Sequence
  Cyclic GFR-binding peptide
VIMRYKKLIKPTKGIFYLISIANLDQS

SEQ ID NO: 49668 - protein, 25 aa, Artificial Sequence
  Cyclic GFR-binding peptide
SKVIMRYKKLIKPTKGIFYLISIAN

SEQ ID NO: 49669 - protein, 36 aa, Artificial Sequence; identical to SEQ ID NO: 15779
  Cyclic GFR-binding peptide
  MOD_RES (1)..(33): Xaa is C or S

SEQ ID NO: 49670 - protein, 37 aa, Artificial Sequence; identical to SEQ ID NO: 15780
  Cyclic GFR-binding peptide
  MOD_RES (1)..(32)..(33): Xaa is C or S

SEQ ID NO: 49671 - protein, 30 aa, Artificial Sequence; identical to SEQ ID NO: 15781
  Cyclic GFR-binding peptide
  MOD_RES (26)..(27): Xaa is C or S

SEQ ID NO: 49672 - protein, 26 aa, Artificial Sequence
  Cyclic GFR-binding peptide
MNNSLQEIVNSSDDYYVVPLPELKTP

SEQ ID NO: 49673 - protein, 28 aa, Artificial Sequence
  Cyclic GFR-binding peptide
  MOD_RES (27)..(28): Xaa is C or S
MEYQKYIKPTKGIIFLISIPSLDQSVXX

SEQ ID NO: 49674 - protein, 38 aa, Artificial Sequence; identical to SEQ ID NO: 15786
  Cyclic GFR-binding peptide
  MOD_RES (2)..(34): Xaa is C or S

SEQ ID NO: 49675 - protein, 29 aa, Artificial Sequence
  Cyclic GFR-binding peptide
  MOD_RES (2)..(2): Xaa is C or S
KXSKVIMNSLQEIKPTKGIYYLITLPELD

SEQ ID NO: 49676 - protein, 31 aa, Artificial Sequence; identical to SEQ ID NO: 15789
  Cyclic GFR-binding peptide
  MOD_RES (26)..(27): Xaa is C or S

SEQ ID NO: 49677 - protein, 33 aa, Artificial Sequence; identical to SEQ ID NO: 15791
  Cyclic GFR-binding peptide
  MOD_RES (31)..(32): Xaa is C or S

SEQ ID NO: 49678 - protein, 25 aa, Artificial Sequence
  Cyclic GFR-binding peptide
NNSLQEIVNSSDDYYVVPLPELQTP

SEQ ID NO: 49679 - protein, 32 aa, Artificial Sequence; identical to SEQ ID NO: 15794
  Cyclic GFR-binding peptide
  MOD_RES (26)..(27): Xaa is C or S

SEQ ID NO: 49680 - protein, 28 aa, Artificial Sequence
  Cyclic GFR-binding peptide
  MOD_RES (2)..(2): Xaa is C or S
GXGEVVMDEYQKYVVKENEDIFLMSIPS

SEQ ID NO: 49681 - protein, 26 aa, Artificial Sequence
  Cyclic GFR-binding peptide
VVMDNSLQEVVKENEDYYVMPLPELE

SEQ ID NO: 49682 - protein, 40 aa, Artificial Sequence; identical to SEQ ID NO: 15800
  Cyclic GFR-binding peptide
  MOD_RES (1)..(3)..(35)..(36): Xaa is C or S

SEQ ID NO: 49683 - protein, 32 aa, Artificial Sequence; identical to SEQ ID NO: 15801
  Cyclic GFR-binding peptide
  MOD_RES (32)..(32): Xaa is C or S

SEQ ID NO: 49684 - protein, 29 aa, Artificial Sequence
  Cyclic GFR-binding peptide
  MOD_RES (28)..(29): Xaa is C or S
MENSLQEVVKDYEDYYLMTLPELETPVXX

SEQ ID NO: 49685 - protein, 25 aa, Artificial Sequence
  Cyclic GFR-binding peptide
NSLQEVKPTRGVYYVIPLPELDQPV

SEQ ID NO: 49686 - protein, 26 aa, Artificial Sequence
  Cyclic GFR-binding peptide
VMDNSLQEVVNNASDYYVIPLPELRT

SEQ ID NO: 49687 - protein, 31 aa, Artificial Sequence; identical to SEQ ID NO: 15805
  Cyclic GFR-binding peptide
  MOD_RES (2)..(2): Xaa is C or S

SEQ ID NO: 49688 - protein, 32 aa, Artificial Sequence; identical to SEQ ID NO: 5345
  Cyclic GFR-binding peptide
  MOD_RES (1)..(3): Xaa is C or S

SEQ ID NO: 49689 - protein, 30 aa, Artificial Sequence; identical to SEQ ID NO: 15808
  Cyclic GFR-binding peptide
  MOD_RES (30)..(30): Xaa is C or S

SEQ ID NO: 49690 - protein, 35 aa, Artificial Sequence; identical to SEQ ID NO: 15809
  Cyclic GFR-binding peptide
  MOD_RES (1)..(32)..(33): Xaa is C or S

SEQ ID NO: 49691 - protein, 38 aa, Artificial Sequence; identical to SEQ ID NO: 15810
  Cyclic GFR-binding peptide
  MOD_RES (1)..(3)..(34)..(35): Xaa is C or S

SEQ ID NO: 49692 - protein, 35 aa, Artificial Sequence; identical to SEQ ID NO: 15811
  Cyclic GFR-binding peptide
  MOD_RES (32)..(33): Xaa is C or S

SEQ ID NO: 49693 - protein, 31 aa, Artificial Sequence; identical to SEQ ID NO: 15812
  Cyclic GFR-binding peptide
  MOD_RES (30)..(31): Xaa is C or S

SEQ ID NO: 49694 - protein, 31 aa, Artificial Sequence; identical to SEQ ID NO: 5355
  Cyclic GFR-binding peptide
  MOD_RES (30)..(31): Xaa is C or S

SEQ ID NO: 49695 - protein, 33 aa, Artificial Sequence; identical to SEQ ID NO: 5356
  Cyclic GFR-binding peptide
  MOD_RES (29)..(30): Xaa is C or S

SEQ ID NO: 49696 - protein, 37 aa, Artificial Sequence; identical to SEQ ID NO: 15815
  Cyclic GFR-binding peptide
  MOD_RES (1)..(33)..(34): Xaa is C or S

SEQ ID NO: 49697 - protein, 27 aa, Artificial Sequence
  Cyclic GFR-binding peptide
RVVMNEYQKYIVNSSDDIFLVSIPSLQ

SEQ ID NO: 49698 - protein, 30 aa, Artificial Sequence; identical to SEQ ID NO: 15817
  Cyclic GFR-binding peptide
  MOD_RES (26)..(27): Xaa is C or S

SEQ ID NO: 49699 - protein, 31 aa, Artificial Sequence; identical to SEQ ID NO: 5363
  Cyclic GFR-binding peptide
  MOD_RES (1)..(3): Xaa is C or S

SEQ ID NO: 49700 - protein, 35 aa, Artificial Sequence; identical to SEQ ID NO: 15819
  Cyclic GFR-binding peptide
  MOD_RES (1)..(33): Xaa is C or S

SEQ ID NO: 49701 - protein, 27 aa, Artificial Sequence
  Cyclic GFR-binding peptide
  MOD_RES (27)..(27): Xaa is C or S
DNSLQEVVKENEDYYLMTLPELETPVX

SEQ ID NO: 49702 - protein, 29 aa, Artificial Sequence
  Cyclic GFR-binding peptide
  MOD_RES (1)..(3): Xaa is C or S
XGXSRVVMNNSLQEIVNSSDDYYVVPLPE

SEQ ID NO: 49703 - protein, 40 aa, Artificial Sequence; identical to SEQ ID NO: 15823
  Cyclic GFR-binding peptide
  MOD_RES (1)..(3)..(35)..(36): Xaa is C or S

SEQ ID NO: 49704 - protein, 38 aa, Artificial Sequence; identical to SEQ ID NO: 15824
  Cyclic GFR-binding peptide
  MOD_RES (32)..(33): Xaa is C or S

SEQ ID NO: 49705 - protein, 32 aa, Artificial Sequence; identical to SEQ ID NO: 15825
  Cyclic GFR-binding peptide
  MOD_RES (1)..(3): Xaa is C or S

SEQ ID NO: 49706 - protein, 26 aa, Artificial Sequence
  Cyclic GFR-binding peptide
DNSLQEVVNNASDYYLITLPELRTPV

SEQ ID NO: 49707 - protein, 26 aa, Artificial Sequence
  Cyclic GFR-binding peptide
NNSLQEIVNSSDDYYLVTLPELKTPA

SEQ ID NO: 49708 - protein, 31 aa, Artificial Sequence; identical to SEQ ID NO: 15829
  Cyclic GFR-binding peptide
  MOD_RES (26)..(27): Xaa is C or S

SEQ ID NO: 49709 - protein, 30 aa, Artificial Sequence; identical to SEQ ID NO: 15830
  Cyclic GFR-binding peptide

SEQ ID NO: 49710 - protein, 31 aa, Artificial Sequence; identical to SEQ ID NO: 15831
  Cyclic GFR-binding peptide

SEQ ID NO: 49711 - protein, 37 aa, Artificial Sequence; identical to SEQ ID NO: 15832
  Cyclic GFR-binding peptide
  MOD_RES (1)..(33)..(34): Xaa is C or S

SEQ ID NO: 49712 - protein, 31 aa, Artificial Sequence; identical to SEQ ID NO: 15833
  Cyclic GFR-binding peptide
  MOD_RES (1)..(3): Xaa is C or S

SEQ ID NO: 49713 - protein, 38 aa, Artificial Sequence; identical to SEQ ID NO: 15836
  Cyclic GFR-binding peptide
  MOD_RES (1)..(33)..(34): Xaa is C or S

SEQ ID NO: 49714 - protein, 35 aa, Artificial Sequence; identical to SEQ ID NO: 15838
  Cyclic GFR-binding peptide
  MOD_RES (31)..(32): Xaa is C or S

SEQ ID NO: 49715 - protein, 33 aa, Artificial Sequence; identical to SEQ ID NO: 15839
  Cyclic GFR-binding peptide
  MOD_RES (31)..(32): Xaa is C or S

SEQ ID NO: 49716 - protein, 35 aa, Artificial Sequence; identical to SEQ ID NO: 5382
  Cyclic GFR-binding peptide
  MOD_RES (32)..(32): Xaa is C or S

SEQ ID NO: 49717 - protein, 36 aa, Artificial Sequence; identical to SEQ ID NO: 15841
  Cyclic GFR-binding peptide
  MOD_RES (2)..(34)..(35): Xaa is C or S

SEQ ID NO: 49718 - protein, 35 aa, Artificial Sequence; identical to SEQ ID NO: 5385
  Cyclic GFR-binding peptide
  MOD_RES (31)..(32): Xaa is C or S

SEQ ID NO: 49719 - protein, 36 aa, Artificial Sequence; identical to SEQ ID NO: 15843
  Cyclic GFR-binding peptide
  MOD_RES (30)..(31): Xaa is C or S

SEQ ID NO: 49720 - protein, 30 aa, Artificial Sequence; identical to SEQ ID NO: 15844
  Cyclic GFR-binding peptide
  MOD_RES (1)..(1): Xaa is C or S

SEQ ID NO: 49721 - protein, 23 aa, Artificial Sequence
  Cyclic GFR-binding peptide
NSLQEVVKENEDYYLMTLPELET

SEQ ID NO: 49722 - protein, 32 aa, Artificial Sequence; identical to SEQ ID NO: 15846
  Cyclic GFR-binding peptide
  MOD_RES (30)..(31): Xaa is C or S

SEQ ID NO: 49723 - protein, 36 aa, Artificial Sequence; identical to SEQ ID NO: 15847
  Cyclic GFR-binding peptide
  MOD_RES (2)..(34)..(35): Xaa is C or S

SEQ ID NO: 49724 - protein, 29 aa, Artificial Sequence
  Cyclic GFR-binding peptide
EVVMENSLQEVVKDYEDYYLMTLPELETP

SEQ ID NO: 49725 - protein, 26 aa, Artificial Sequence
  Cyclic GFR-binding peptide
MRYKKLVKPKRGVFYLISIANLAQPV

SEQ ID NO: 49726 - protein, 36 aa, Artificial Sequence; identical to SEQ ID NO: 15851
  Cyclic GFR-binding peptide
  MOD_RES (32)..(32): Xaa is C or S

SEQ ID NO: 49727 - protein, 40 aa, Artificial Sequence; identical to SEQ ID NO: 15852
  Cyclic GFR-binding peptide
  MOD_RES (2)..(4)..(35)..(36): Xaa is C or S

SEQ ID NO: 49728 - protein, 22 aa, Artificial Sequence
  Cyclic GFR-binding peptide
NSLQEIVNSSDDYYLVTLPELK

SEQ ID NO: 49729 - protein, 40 aa, Artificial Sequence; identical to SEQ ID NO: 15855
  Cyclic GFR-binding peptide
  MOD_RES (2)..(34)..(35): Xaa is C or S

SEQ ID NO: 49730 - protein, 28 aa, Artificial Sequence
  Cyclic GFR-binding peptide
ARVVMNNSLQEIVNSSDDYYVVPLPELQ

SEQ ID NO: 49731 - protein, 29 aa, Artificial Sequence
  Cyclic GFR-binding peptide
  MOD_RES (27)..(28): Xaa is C or S
MEYQKYIKPTKGIIFLISIPSLDQSVXXP

SEQ ID NO: 49732 - protein, 34 aa, Artificial Sequence; identical to SEQ ID NO: 15859
  Cyclic GFR-binding peptide
  MOD_RES (32)..(33): Xaa is C or S

SEQ ID NO: 49733 - protein, 38 aa, Artificial Sequence; identical to SEQ ID NO: 15860
  Cyclic GFR-binding peptide
  MOD_RES (2)..(34)..(35): Xaa is C or S

SEQ ID NO: 49734 - protein, 33 aa, Artificial Sequence; identical to SEQ ID NO: 15861
  Cyclic GFR-binding peptide
  MOD_RES (27)..(28): Xaa is C or S

SEQ ID NO: 49735 - protein, 32 aa, Artificial Sequence; identical to SEQ ID NO: 15862
  Cyclic GFR-binding peptide
  MOD_RES (29)..(29): Xaa is C or S

SEQ ID NO: 49736 - protein, 33 aa, Artificial Sequence; identical to SEQ ID NO: 15863
  Cyclic GFR-binding peptide
  MOD_RES (27)..(28): Xaa is C or S

SEQ ID NO: 49737 - protein, 37 aa, Artificial Sequence; identical to SEQ ID NO: 15864
  Cyclic GFR-binding peptide
  MOD_RES (2)..(4)..(36)..(37): Xaa is C or S

SEQ ID NO: 49738 - protein, 31 aa, Artificial Sequence; identical to SEQ ID NO: 15866
  Cyclic GFR-binding peptide

SEQ ID NO: 49739 - protein, 36 aa, Artificial Sequence; identical to SEQ ID NO: 15867
  Cyclic GFR-binding peptide
  MOD_RES (30)..(31): Xaa is C or S

SEQ ID NO: 49740 - protein, 25 aa, Artificial Sequence
  Cyclic GFR-binding peptide
NEYQKYIVNSSDDIFLVSIPSLQTP

SEQ ID NO: 49741 - protein, 30 aa, Artificial Sequence; identical to SEQ ID NO: 15869
  Cyclic GFR-binding peptide
  MOD_RES (27)..(28): Xaa is C or S

SEQ ID NO: 49742 - protein, 29 aa, Artificial Sequence
  Cyclic GFR-binding peptide
  MOD_RES (1)..(1): Xaa is C or S
XSKVIMNSLQEIKPTKGIYYVIPLPELDQ

SEQ ID NO: 49743 - protein, 35 aa, Artificial Sequence; identical to SEQ ID NO: 5411
  Cyclic GFR-binding peptide
  MOD_RES (30)..(30): Xaa is C or S

SEQ ID NO: 49744 - protein, 30 aa, Artificial Sequence; identical to SEQ ID NO: 15873
  Cyclic GFR-binding peptide
  MOD_RES (1)..(3): Xaa is C or S

SEQ ID NO: 49745 - protein, 25 aa, Artificial Sequence
  Cyclic GFR-binding peptide
VIMRYKKLIKPTKGIFYLISIANLD

SEQ ID NO: 49746 - protein, 27 aa, Artificial Sequence
  Cyclic GFR-binding peptide
MDNSLQEVVKENEDYYVMPLPELETPV

SEQ ID NO: 49747 - protein, 37 aa, Artificial Sequence; identical to SEQ ID NO: 15879
  Cyclic GFR-binding peptide
  MOD_RES (32)..(33): Xaa is C or S

SEQ ID NO: 49748 - protein, 27 aa, Artificial Sequence
  Cyclic GFR-binding peptide
MEEYQKYVVKDYEDIFLMSIPSLETPV

SEQ ID NO: 49749 - protein, 29 aa, Artificial Sequence
  Cyclic GFR-binding peptide
  MOD_RES (29)..(29): Xaa is C or S
VIMRYKKLIKPTKGIFYLISIANLDQSVX

SEQ ID NO: 49750 - protein, 25 aa, Artificial Sequence
  Cyclic GFR-binding peptide
MNSLQEVKPTRGVYYVIPLPELDQP

SEQ ID NO: 49751 - protein, 26 aa, Artificial Sequence
  Cyclic GFR-binding peptide
VMRYKKLVKPTRGVFYLISIANLDQP

SEQ ID NO: 49752 - protein, 31 aa, Artificial Sequence; identical to SEQ ID NO: 15885
  Cyclic GFR-binding peptide
  MOD_RES (31)..(31): Xaa is C or S

SEQ ID NO: 49753 - protein, 26 aa, Artificial Sequence
  Cyclic GFR-binding peptide
KVIMNSLQEIKPTKGIYYVIPLPELD

SEQ ID NO: 49754 - protein, 36 aa, Artificial Sequence; identical to SEQ ID NO: 15887
  Cyclic GFR-binding peptide
  MOD_RES (1)..(3)..(35)..(36): Xaa is C or S

SEQ ID NO: 49755 - protein, 28 aa, Artificial Sequence
  Cyclic GFR-binding peptide
  MOD_RES (1)..(3): Xaa is C or S
XKXSRVIMEYQKYVKPKRGVIFLISIPS

SEQ ID NO: 49756 - protein, 26 aa, Artificial Sequence
  Cyclic GFR-binding peptide
MDNSLQEVVKENEDYYVMPLPELETP

SEQ ID NO: 49757 - protein, 29 aa, Artificial Sequence
  Cyclic GFR-binding peptide
  MOD_RES (29)..(29): Xaa is C or S
VMNRYKKLIVNSSDDFYLVSIANLKTPAX

SEQ ID NO: 49758 - protein, 33 aa, Artificial Sequence; identical to SEQ ID NO: 15893
  Cyclic GFR-binding peptide
  MOD_RES (29)..(30): Xaa is C or S

SEQ ID NO: 49759 - protein, 34 aa, Artificial Sequence; identical to SEQ ID NO: 15894
  Cyclic GFR-binding peptide
  MOD_RES (28)..(29): Xaa is C or S

SEQ ID NO: 49760 - protein, 27 aa, Artificial Sequence
  Cyclic GFR-binding peptide
  MOD_RES (26)..(27): Xaa is C or S
NSLQEVVNNASDYYVIPLPELRTPVXX

SEQ ID NO: 49761 - protein, 28 aa, Artificial Sequence
  Cyclic GFR-binding peptide
  MOD_RES (26)..(27): Xaa is C or S
RYKKLVKPTRGVFYLISIANLDQPVXXP

SEQ ID NO: 49762 - protein, 23 aa, Artificial Sequence
  Cyclic GFR-binding peptide
MDNSLQEVVKENEDYYVMPLPEL

SEQ ID NO: 49763 - protein, 34 aa, Artificial Sequence; identical to SEQ ID NO: 5435
  Cyclic GFR-binding peptide
  MOD_RES (2)..(4): Xaa is C or S

SEQ ID NO: 49764 - protein, 35 aa, Artificial Sequence; identical to SEQ ID NO: 15901
  Cyclic GFR-binding peptide
  MOD_RES (30)..(31): Xaa is C or S

SEQ ID NO: 49765 - protein, 29 aa, Artificial Sequence
  Cyclic GFR-binding peptide
  MOD_RES (29)..(29): Xaa is C or S
VVMNSLQEVKPTRGVYYVIPLPELDQPVX

SEQ ID NO: 49766 - protein, 34 aa, Artificial Sequence; identical to SEQ ID NO: 15903
  Cyclic GFR-binding peptide
  MOD_RES (1)..(32)..(33): Xaa is C or S

SEQ ID NO: 49767 - protein, 27 aa, Artificial Sequence
  Cyclic GFR-binding peptide
SKVVMNSLQEVKPTRGVYYLITLPELD

SEQ ID NO: 49768 - protein, 37 aa, Artificial Sequence; identical to SEQ ID NO: 15906
  Cyclic GFR-binding peptide
  MOD_RES (31)..(32): Xaa is C or S

SEQ ID NO: 49769 - protein, 32 aa, Artificial Sequence; identical to SEQ ID NO: 15907
  Cyclic GFR-binding peptide
  MOD_RES (1)..(3): Xaa is C or S

SEQ ID NO: 49770 - protein, 30 aa, Artificial Sequence; identical to SEQ ID NO: 5443
  Cyclic GFR-binding peptide
  MOD_RES (1)..(3): Xaa is C or S

SEQ ID NO: 49771 - protein, 22 aa, Artificial Sequence
  Cyclic GFR-binding peptide
MENSLQEVVKDYEDYYVMPLPE

SEQ ID NO: 49772 - protein, 37 aa, Artificial Sequence; identical to SEQ ID NO: 15910
  Cyclic GFR-binding peptide
  MOD_RES (2)..(4)..(36)..(37): Xaa is C or S

SEQ ID NO: 49773 - protein, 29 aa, Artificial Sequence
  Cyclic GFR-binding peptide
  MOD_RES (2)..(2): Xaa is C or S
GXGEVVMDEYQKYVVKENEDIFLMSIPSL

SEQ ID NO: 49774 - protein, 26 aa, Artificial Sequence
  Cyclic GFR-binding peptide
SKVIMRYKKLIKPTKGIFYLISIANL

SEQ ID NO: 49775 - protein, 27 aa, Artificial Sequence
  Cyclic GFR-binding peptide
  MOD_RES (27)..(27): Xaa is C or S
DNSLQEVVKENEDYYVMPLPELETPVX

SEQ ID NO: 49776 - protein, 36 aa, Artificial Sequence; identical to SEQ ID NO: 15917
  Cyclic GFR-binding peptide
  MOD_RES (1)..(3)..(35)..(36): Xaa is C or S

SEQ ID NO: 49777 - protein, 26 aa, Artificial Sequence
  Cyclic GFR-binding peptide
GEVVMDNSLQEVVKENEDYYLMTLPE

SEQ ID NO: 49778 - protein, 38 aa, Artificial Sequence; identical to SEQ ID NO: 15919
  Cyclic GFR-binding peptide
  MOD_RES (2)..(33)..(34): Xaa is C or S

SEQ ID NO: 49779 - protein, 38 aa, Artificial Sequence; identical to SEQ ID NO: 15921
  Cyclic GFR-binding peptide
  MOD_RES (1)..(33)..(34): Xaa is C or S

SEQ ID NO: 49780 - protein, 34 aa, Artificial Sequence; identical to SEQ ID NO: 15922
  Cyclic GFR-binding peptide
  MOD_RES (2)..(34): Xaa is C or S

SEQ ID NO: 49781 - protein, 34 aa, Artificial Sequence; identical to SEQ ID NO: 5462
  Cyclic GFR-binding peptide
  MOD_RES (28)..(29): Xaa is C or S

SEQ ID NO: 49782 - protein, 37 aa, Artificial Sequence; identical to SEQ ID NO: 15924
  Cyclic GFR-binding peptide
  MOD_RES (1)..(32)..(33): Xaa is C or S

SEQ ID NO: 49783 - protein, 29 aa, Artificial Sequence
  Cyclic GFR-binding peptide
VVMENSLQEVVKDYEDYYVMPLPELETPV

SEQ ID NO: 49784 - protein, 36 aa, Artificial Sequence; identical to SEQ ID NO: 15927
  Cyclic GFR-binding peptide
  MOD_RES (2)..(4)..(35)..(36): Xaa is C or S

SEQ ID NO: 49785 - protein, 34 aa, Artificial Sequence; identical to SEQ ID NO: 15928
  Cyclic GFR-binding peptide
  MOD_RES (31)..(32): Xaa is C or S

SEQ ID NO: 49786 - protein, 33 aa, Artificial Sequence; identical to SEQ ID NO: 15929
  Cyclic GFR-binding peptide
  MOD_RES (29)..(30): Xaa is C or S

SEQ ID NO: 49787 - protein, 26 aa, Artificial Sequence
  Cyclic GFR-binding peptide
VMDRYKKLVVKENEDFYLMSIANLET

SEQ ID NO: 49788 - protein, 28 aa, Artificial Sequence
  Cyclic GFR-binding peptide
EVVMDNSLQEVVNNASDYYVIPLPELRT

SEQ ID NO: 49789 - protein, 29 aa, Artificial Sequence
  Cyclic GFR-binding peptide
  MOD_RES (29)..(29): Xaa is C or S
VIMNSLQEIKPTKGIYYVIPLPELDQSVX

SEQ ID NO: 49790 - protein, 39 aa, Artificial Sequence; identical to SEQ ID NO: 15935
  Cyclic GFR-binding peptide
  MOD_RES (2)..(34)..(35): Xaa is C or S

SEQ ID NO: 49791 - protein, 31 aa, Artificial Sequence; identical to SEQ ID NO: 15937
  Cyclic GFR-binding peptide
  MOD_RES (1)..(1): Xaa is C or S

SEQ ID NO: 49792 - protein, 21 aa, Artificial Sequence
  Cyclic GFR-binding peptide
DEYQKYVVKENEDIFLMSIPS

SEQ ID NO: 49793 - protein, 38 aa, Artificial Sequence; identical to SEQ ID NO: 15939
  Cyclic GFR-binding peptide
  MOD_RES (2)..(34)..(35): Xaa is C or S

SEQ ID NO: 49794 - protein, 31 aa, Artificial Sequence; identical to SEQ ID NO: 15940
  Cyclic GFR-binding peptide
  MOD_RES (27)..(28): Xaa is C or S

SEQ ID NO: 49795 - protein, 30 aa, Artificial Sequence; identical to SEQ ID NO: 15941
  Cyclic GFR-binding peptide
  MOD_RES (1)..(3): Xaa is C or S

SEQ ID NO: 49796 - protein, 34 aa, Artificial Sequence; identical to SEQ ID NO: 15945
  Cyclic GFR-binding peptide
  MOD_RES (2)..(34): Xaa is C or S

SEQ ID NO: 49797 - protein, 35 aa, Artificial Sequence; identical to SEQ ID NO: 15946
  Cyclic GFR-binding peptide
  MOD_RES (32)..(33): Xaa is C or S

SEQ ID NO: 49798 - protein, 32 aa, Artificial Sequence; identical to SEQ ID NO: 15947
  Cyclic GFR-binding peptide
  MOD_RES (27)..(28): Xaa is C or S

SEQ ID NO: 49799 - protein, 32 aa, Artificial Sequence; identical to SEQ ID NO: 15949
  Cyclic GFR-binding peptide
  MOD_RES (30)..(31): Xaa is C or S

SEQ ID NO: 49800 - protein, 33 aa, Artificial Sequence; identical to SEQ ID NO: 5509
  Cyclic GFR-binding peptide
  MOD_RES (28)..(29): Xaa is C or S

SEQ ID NO: 49801 - protein, 35 aa, Artificial Sequence; identical to SEQ ID NO: 15951
  Cyclic GFR-binding peptide
  MOD_RES (30)..(31): Xaa is C or S

SEQ ID NO: 49802 - protein, 34 aa, Artificial Sequence; identical to SEQ ID NO: 15952
  Cyclic GFR-binding peptide
  MOD_RES (1)..(33)..(34): Xaa is C or S

SEQ ID NO: 49803 - protein, 38 aa, Artificial Sequence; identical to SEQ ID NO: 5513
  Cyclic GFR-binding peptide
  MOD_RES (2)..(33)..(34): Xaa is C or S

SEQ ID NO: 49804 - protein, 25 aa, Artificial Sequence
  Cyclic GFR-binding peptide
SRVIMRYKKLVKPKRGVFYLISIAN

SEQ ID NO: 49805 - protein, 25 aa, Artificial Sequence
  Cyclic GFR-binding peptide
MDEYQKYVVKENEDIFLMSIPSLET

SEQ ID NO: 49806 - protein, 24 aa, Artificial Sequence
  Cyclic GFR-binding peptide
NNSLQEIVNSSDDYYVVPLPELQT

SEQ ID NO: 49807 - protein, 36 aa, Artificial Sequence; identical to SEQ ID NO: 5521
  Cyclic GFR-binding peptide
  MOD_RES (2)..(4)..(36): Xaa is C or S

SEQ ID NO: 49808 - protein, 31 aa, Artificial Sequence; identical to SEQ ID NO: 5522
  Cyclic GFR-binding peptide
  MOD_RES (1)..(3): Xaa is C or S

SEQ ID NO: 49809 - protein, 31 aa, Artificial Sequence; identical to SEQ ID NO: 15962
  Cyclic GFR-binding peptide
  MOD_RES (26)..(27): Xaa is C or S

SEQ ID NO: 49810 - protein, 37 aa, Artificial Sequence; identical to SEQ ID NO: 5524
  Cyclic GFR-binding peptide
  MOD_RES (2)..(33)..(34): Xaa is C or S

SEQ ID NO: 49811 - protein, 34 aa, Artificial Sequence; identical to SEQ ID NO: 5526
  Cyclic GFR-binding peptide
  MOD_RES (31)..(32): Xaa is C or S

SEQ ID NO: 49812 - protein, 41 aa, Artificial Sequence; identical to SEQ ID NO: 15965
  Cyclic GFR-binding peptide
  MOD_RES (1)..(3)..(35)..(36): Xaa is C or S

SEQ ID NO: 49813 - protein, 30 aa, Artificial Sequence; identical to SEQ ID NO: 15967
  Cyclic GFR-binding peptide
  MOD_RES (1)..(3): Xaa is C or S

SEQ ID NO: 49814 - protein, 30 aa, Artificial Sequence; identical to SEQ ID NO: 5528
  Cyclic GFR-binding peptide
  MOD_RES (2)..(2): Xaa is C or S

SEQ ID NO: 49815 - protein, 32 aa, Artificial Sequence; identical to SEQ ID NO: 15970
  Cyclic GFR-binding peptide
  MOD_RES (31)..(32): Xaa is C or S

SEQ ID NO: 49816 - protein, 29 aa, Artificial Sequence
  Cyclic GFR-binding peptide
  MOD_RES (2)..(2): Xaa is C or S
KXSKVIMNSLQEIKPTKGIYYVIPLPELD

SEQ ID NO: 49817 - protein, 38 aa, Artificial Sequence; identical to SEQ ID NO: 15972
  Cyclic GFR-binding peptide
  MOD_RES (1)..(33): Xaa is C or S

SEQ ID NO: 49818 - protein, 33 aa, Artificial Sequence; identical to SEQ ID NO: 5536
  Cyclic GFR-binding peptide
  MOD_RES (30)..(31): Xaa is C or S

SEQ ID NO: 49819 - protein, 20 aa, Artificial Sequence
  Cyclic GFR-binding peptide
NSLQEVVKDYEDYYLMTLPE

SEQ ID NO: 49820 - protein, 36 aa, Artificial Sequence; identical to SEQ ID NO: 15976
  Cyclic GFR-binding peptide
  MOD_RES (31)..(32): Xaa is C or S

SEQ ID NO: 49821 - protein, 31 aa, Artificial Sequence; identical to SEQ ID NO: 15977
  Cyclic GFR-binding peptide
  MOD_RES (2)..(2): Xaa is C or S

SEQ ID NO: 49822 - protein, 29 aa, Artificial Sequence
  Cyclic GFR-binding peptide
  MOD_RES (26)..(26): Xaa is C or S
RYKKLIVNSSDDFYLVSIANLKTPAXTPK

SEQ ID NO: 49823 - protein, 23 aa, Artificial Sequence
  Cyclic GFR-binding peptide
NSLQEIKPTKGIYYLITLPELDQ

SEQ ID NO: 49824 - protein, 30 aa, Artificial Sequence; identical to SEQ ID NO: 15981
  Cyclic GFR-binding peptide
  MOD_RES (29)..(29): Xaa is C or S

SEQ ID NO: 49825 - protein, 27 aa, Artificial Sequence
  Cyclic GFR-binding peptide
VMNNSLQEIVNSSDDYYVVPLPELKTP

SEQ ID NO: 49826 - protein, 28 aa, Artificial Sequence
  Cyclic GFR-binding peptide
  MOD_RES (2)..(2): Xaa is C or S
KXSKVVMNSLQEVKPTRGVYYVIPLPEL

SEQ ID NO: 49827 - protein, 38 aa, Artificial Sequence; identical to SEQ ID NO: 15984
  Cyclic GFR-binding peptide
  MOD_RES (2)..(4)..(36)..(37): Xaa is C or S

SEQ ID NO: 49828 - protein, 21 aa, Artificial Sequence
  Cyclic GFR-binding peptide
NNSLQEIVNSSDDYYVVPLPE

SEQ ID NO: 49829 - protein, 41 aa, Artificial Sequence; identical to SEQ ID NO: 5546
  Cyclic GFR-binding peptide
  MOD_RES (2)..(4)..(35)..(36): Xaa is C or S

SEQ ID NO: 49830 - protein, 36 aa, Artificial Sequence; identical to SEQ ID NO: 15987
  Cyclic GFR-binding peptide
  MOD_RES (1)..(33)..(34): Xaa is C or S

SEQ ID NO: 49831 - protein, 30 aa, Artificial Sequence; identical to SEQ ID NO: 15988
  Cyclic GFR-binding peptide

SEQ ID NO: 49832 - protein, 31 aa, Artificial Sequence; identical to SEQ ID NO: 5548
  Cyclic GFR-binding peptide
  MOD_RES (29)..(30): Xaa is C or S

SEQ ID NO: 49833 - protein, 32 aa, Artificial Sequence; identical to SEQ ID NO: 15991
  Cyclic GFR-binding peptide
  MOD_RES (29)..(30): Xaa is C or S

SEQ ID NO: 49834 - protein, 30 aa, Artificial Sequence; identical to SEQ ID NO: 5550
  Cyclic GFR-binding peptide
  MOD_RES (1)..(3): Xaa is C or S

SEQ ID NO: 49835 - protein, 26 aa, Artificial Sequence
  Cyclic GFR-binding peptide
  MOD_RES (26)..(26): Xaa is C or S
NSLQEIVNSSDDYYLVTLPELKTPAX

SEQ ID NO: 49836 - protein, 39 aa, Artificial Sequence; identical to SEQ ID NO: 5551
  Cyclic GFR-binding peptide
  MOD_RES (2)..(4)..(35)..(36): Xaa is C or S

SEQ ID NO: 49837 - protein, 37 aa, Artificial Sequence; identical to SEQ ID NO: 15998
  Cyclic GFR-binding peptide
  MOD_RES (2)..(4)..(36)..(37): Xaa is C or S

SEQ ID NO: 49838 - protein, 36 aa, Artificial Sequence; identical to SEQ ID NO: 15999
  Cyclic GFR-binding peptide
  MOD_RES (30)..(31): Xaa is C or S

SEQ ID NO: 49839 - protein, 27 aa, Artificial Sequence
  Cyclic GFR-binding peptide
VIMEYQKYVKPKRGVIFLISIPSLAQP

SEQ ID NO: 49840 - protein, 33 aa, Artificial Sequence; identical to SEQ ID NO: 16001
  Cyclic GFR-binding peptide
  MOD_RES (1)..(33): Xaa is C or S

SEQ ID NO: 49841 - protein, 36 aa, Artificial Sequence; identical to SEQ ID NO: 16002
  Cyclic GFR-binding peptide
  MOD_RES (1)..(3)..(35)..(36): Xaa is C or S

SEQ ID NO: 49842 - protein, 38 aa, Artificial Sequence; identical to SEQ ID NO: 16003
  Cyclic GFR-binding peptide
  MOD_RES (1)..(32)..(33): Xaa is C or S

SEQ ID NO: 49843 - protein, 33 aa, Artificial Sequence; identical to SEQ ID NO: 16004
  Cyclic GFR-binding peptide
  MOD_RES (1)..(3): Xaa is C or S

SEQ ID NO: 49844 - protein, 24 aa, Artificial Sequence
  Cyclic GFR-binding peptide
MDNSLQEVVKENEDYYLMTLPELE

SEQ ID NO: 49845 - protein, 30 aa, Artificial Sequence; identical to SEQ ID NO: 16007
  Cyclic GFR-binding peptide
  MOD_RES (1)..(3): Xaa is C or S

SEQ ID NO: 49846 - protein, 31 aa, Artificial Sequence; identical to SEQ ID NO: 16008
  Cyclic GFR-binding peptide

SEQ ID NO: 49847 - protein, 30 aa, Artificial Sequence; identical to SEQ ID NO: 16010
  Cyclic GFR-binding peptide
  MOD_RES (27)..(27): Xaa is C or S

SEQ ID NO: 49848 - protein, 25 aa, Artificial Sequence
  Cyclic GFR-binding peptide
MNEYQKYIVNSSDDIFLVSIPSLKT

SEQ ID NO: 49849 - protein, 37 aa, Artificial Sequence; identical to SEQ ID NO: 16012
  Cyclic GFR-binding peptide
  MOD_RES (2)..(4)..(35)..(36): Xaa is C or S

SEQ ID NO: 49850 - protein, 30 aa, Artificial Sequence
  Cyclic GFR-binding peptide
  MOD_RES (2)..(2): Xaa is C or S
KXSKVVMNSLQEVKPTRGVYYLITLPELDQ

SEQ ID NO: 49851 - protein, 29 aa, Artificial Sequence
  Cyclic GFR-binding peptide
  MOD_RES (26)..(27): Xaa is C or S
RYKKLIVNSSDDFYLVSIANLKTPAXXPK

SEQ ID NO: 49852 - protein, 35 aa, Artificial Sequence; identical to SEQ ID NO: 16015
  Cyclic GFR-binding peptide
  MOD_RES (31)..(32): Xaa is C or S

SEQ ID NO: 49853 - protein, 40 aa, Artificial Sequence; identical to SEQ ID NO: 16016
  Cyclic GFR-binding peptide
  MOD_RES (2)..(4)..(36)..(37): Xaa is C or S

SEQ ID NO: 49854 - protein, 40 aa, Artificial Sequence; identical to SEQ ID NO: 5566
  Cyclic GFR-binding peptide
  MOD_RES (1)..(3)..(35)..(36): Xaa is C or S

SEQ ID NO: 49855 - protein, 28 aa, Artificial Sequence
  Cyclic GFR-binding peptide
VVMNRYKKLIVNSSDDFYLVSIANLKTP

SEQ ID NO: 49856 - protein, 29 aa, Artificial Sequence
  Cyclic GFR-binding peptide
  MOD_RES (1)..(3): Xaa is C or S
XGXSEVVMDRYKKLVVNNASDFYLISIAN

SEQ ID NO: 49857 - protein, 26 aa, Artificial Sequence
  Cyclic GFR-binding peptide
GEVVMDNSLQEVVKENEDYYVMPLPE

SEQ ID NO: 49858 - protein, 30 aa, Artificial Sequence; identical to SEQ ID NO: 16021
  Cyclic GFR-binding peptide
  MOD_RES (28)..(28): Xaa is C or S

SEQ ID NO: 49859 - protein, 29 aa, Artificial Sequence
  Cyclic GFR-binding peptide
  MOD_RES (26)..(27): Xaa is C or S
NSLQEVVKENEDYYVMPLPELETPVXXAK

SEQ ID NO: 49860 - protein, 37 aa, Artificial Sequence; identical to SEQ ID NO: 16023
  Cyclic GFR-binding peptide
  MOD_RES (2)..(33)..(34): Xaa is C or S

SEQ ID NO: 49861 - protein, 30 aa, Artificial Sequence; identical to SEQ ID NO: 5574
  Cyclic GFR-binding peptide
  MOD_RES (2)..(4): Xaa is C or S

SEQ ID NO: 49862 - protein, 31 aa, Artificial Sequence; identical to SEQ ID NO: 16025
  Cyclic GFR-binding peptide
  MOD_RES (31)..(31): Xaa is C or S

SEQ ID NO: 49863 - protein, 29 aa, Artificial Sequence
  Cyclic GFR-binding peptide
  MOD_RES (27)..(28): Xaa is C or S
NRYKKLIVNSSDDFYLVSIANLKTPAXXP

SEQ ID NO: 49864 - protein, 35 aa, Artificial Sequence; identical to SEQ ID NO: 16027
  Cyclic GFR-binding peptide
  MOD_RES (2)..(4): Xaa is C or S

SEQ ID NO: 49865 - protein, 34 aa, Artificial Sequence; identical to SEQ ID NO: 16028
  Cyclic GFR-binding peptide
  MOD_RES (32)..(33): Xaa is C or S

SEQ ID NO: 49866 - protein, 40 aa, Artificial Sequence; identical to SEQ ID NO: 16029
  Cyclic GFR-binding peptide
  MOD_RES (1)..(3)..(35)..(36): Xaa is C or S

SEQ ID NO: 49867 - protein, 31 aa, Artificial Sequence; identical to SEQ ID NO: 5580
  Cyclic GFR-binding peptide
  MOD_RES (1)..(3): Xaa is C or S

SEQ ID NO: 49868 - protein, 40 aa, Artificial Sequence; identical to SEQ ID NO: 16032
  Cyclic GFR-binding peptide
  MOD_RES (1)..(3)..(35)..(36): Xaa is C or S

SEQ ID NO: 49869 - protein, 34 aa, Artificial Sequence; identical to SEQ ID NO: 16034
  Cyclic GFR-binding peptide
  MOD_RES (2)..(33)..(34): Xaa is C or S

SEQ ID NO: 49870 - protein, 29 aa, Artificial Sequence
  Cyclic GFR-binding peptide
  MOD_RES (1)..(3): Xaa is C or S
XGXSEVVMDNSLQEVVNNASDYYLITLPE

SEQ ID NO: 49871 - protein, 23 aa, Artificial Sequence
  Cyclic GFR-binding peptide
VIMEYQKYVKPKRGVIFLISIPS

SEQ ID NO: 49872 - protein, 33 aa, Artificial Sequence; identical to SEQ ID NO: 5591
  Cyclic GFR-binding peptide
  MOD_RES (1)..(3): Xaa is C or S

SEQ ID NO: 49873 - protein, 37 aa, Artificial Sequence; identical to SEQ ID NO: 16038
  Cyclic GFR-binding peptide
  MOD_RES (32)..(33): Xaa is C or S

SEQ ID NO: 49874 - protein, 34 aa, Artificial Sequence; identical to SEQ ID NO: 16039
  Cyclic GFR-binding peptide
  MOD_RES (1)..(33)..(34): Xaa is C or S

SEQ ID NO: 49875 - protein, 41 aa, Artificial Sequence; identical to SEQ ID NO: 16040
  Cyclic GFR-binding peptide
  MOD_RES (2)..(4)..(36): Xaa is C or S

SEQ ID NO: 49876 - protein, 39 aa, Artificial Sequence; identical to SEQ ID NO: 16041
  Cyclic GFR-binding peptide
  MOD_RES (2)..(34)..(35): Xaa is C or S

SEQ ID NO: 49877 - protein, 31 aa, Artificial Sequence; identical to SEQ ID NO: 16043
  Cyclic GFR-binding peptide
  MOD_RES (28)..(29): Xaa is C or S

SEQ ID NO: 49878 - protein, 39 aa, Artificial Sequence; identical to SEQ ID NO: 16044
  Cyclic GFR-binding peptide
  MOD_RES (2)..(34)..(35): Xaa is C or S

SEQ ID NO: 49879 - protein, 38 aa, Artificial Sequence; identical to SEQ ID NO: 16045
  Cyclic GFR-binding peptide
  MOD_RES (2)..(4)..(36)..(37): Xaa is C or S

SEQ ID NO: 49880 - protein, 27 aa, Artificial Sequence
  Cyclic GFR-binding peptide
  MOD_RES (27)..(27): Xaa is C or S
MRYKKLVKPTRGVFYLISIANLDQPVX

SEQ ID NO: 49881 - protein, 30 aa, Artificial Sequence; identical to SEQ ID NO: 16050
  Cyclic GFR-binding peptide
  MOD_RES (28)..(29): Xaa is C or S

SEQ ID NO: 49882 - protein, 36 aa, Artificial Sequence; identical to SEQ ID NO: 16051
  Cyclic GFR-binding peptide
  MOD_RES (31)..(32): Xaa is C or S

SEQ ID NO: 49883 - protein, 28 aa, Artificial Sequence
  Cyclic GFR-binding peptide
GEVVMDEYQKYVVKENEDIFLMSIPSLE

SEQ ID NO: 49884 - protein, 31 aa, Artificial Sequence; identical to SEQ ID NO: 5619
  Cyclic GFR-binding peptide
  MOD_RES (31)..(31): Xaa is C or S

SEQ ID NO: 49885 - protein, 30 aa, Artificial Sequence; identical to SEQ ID NO: 16058
  Cyclic GFR-binding peptide
  MOD_RES (29)..(30): Xaa is C or S

SEQ ID NO: 49886 - protein, 35 aa, Artificial Sequence; identical to SEQ ID NO: 16061
  Cyclic GFR-binding peptide
  MOD_RES (2)..(4): Xaa is C or S

SEQ ID NO: 49887 - protein, 33 aa, Artificial Sequence; identical to SEQ ID NO: 16062
  Cyclic GFR-binding peptide
  MOD_RES (30)..(31): Xaa is C or S

SEQ ID NO: 49888 - protein, 35 aa, Artificial Sequence; identical to SEQ ID NO: 5629
  Cyclic GFR-binding peptide
  MOD_RES (1)..(3)..(35): Xaa is C or S

SEQ ID NO: 49889 - protein, 34 aa, Artificial Sequence; identical to SEQ ID NO: 16064
  Cyclic GFR-binding peptide
  MOD_RES (29)..(30): Xaa is C or S

SEQ ID NO: 49890 - protein, 33 aa, Artificial Sequence; identical to SEQ ID NO: 5630
  Cyclic GFR-binding peptide
  MOD_RES (28)..(29): Xaa is C or S

SEQ ID NO: 49891 - protein, 25 aa, Artificial Sequence
  Cyclic GFR-binding peptide
SKVVMEYQKYVKPTRGVIFLISIPS

SEQ ID NO: 49892 - protein, 37 aa, Artificial Sequence; identical to SEQ ID NO: 5637
  Cyclic GFR-binding peptide
  MOD_RES (2)..(34)..(35): Xaa is C or S

SEQ ID NO: 49893 - protein, 32 aa, Artificial Sequence; identical to SEQ ID NO: 16069
  Cyclic GFR-binding peptide
  MOD_RES (1)..(1): Xaa is C or S

SEQ ID NO: 49894 - protein, 27 aa, Artificial Sequence
  Cyclic GFR-binding peptide
VMDRYKKLVVKENEDFYLMSIANLETP

SEQ ID NO: 49895 - protein, 28 aa, Artificial Sequence
  Cyclic GFR-binding peptide
  MOD_RES (2)..(2): Xaa is C or S
GXSRVVMNEYQKYIVNSSDDIFLVSIPS

SEQ ID NO: 49896 - protein, 28 aa, Artificial Sequence
  Cyclic GFR-binding peptide
  MOD_RES (1)..(1): Xaa is C or S
XARVVMNEYQKYIVNSSDDIFLVSIPSL

SEQ ID NO: 49897 - protein, 27 aa, Artificial Sequence
  Cyclic GFR-binding peptide
  MOD_RES (1)..(1): Xaa is C or S
XSKVIMRYKKLIKPTKGIFYLISIANL

SEQ ID NO: 49898 - protein, 24 aa, Artificial Sequence
  Cyclic GFR-binding peptide
DRYKKLVVNNASDFYLISIANLRT

SEQ ID NO: 49899 - protein, 35 aa, Artificial Sequence; identical to SEQ ID NO: 5644
  Cyclic GFR-binding peptide
  MOD_RES (1)..(32)..(33): Xaa is C or S

SEQ ID NO: 49900 - protein, 36 aa, Artificial Sequence; identical to SEQ ID NO: 16077
  Cyclic GFR-binding peptide
  MOD_RES (30)..(31): Xaa is C or S

SEQ ID NO: 49901 - protein, 24 aa, Artificial Sequence
  Cyclic GFR-binding peptide
VVMDNSLQEVVKENEDYYVMPLPE

SEQ ID NO: 49902 - protein, 21 aa, Artificial Sequence
  Cyclic GFR-binding peptide
NSLQEVVKDYEDYYLMTLPEL

SEQ ID NO: 49903 - protein, 35 aa, Artificial Sequence; identical to SEQ ID NO: 5646
  Cyclic GFR-binding peptide
  MOD_RES (2)..(33)..(34): Xaa is C or S

SEQ ID NO: 49904 - protein, 34 aa, Artificial Sequence; identical to SEQ ID NO: 16081
  Cyclic GFR-binding peptide
  MOD_RES (29)..(30): Xaa is C or S

SEQ ID NO: 49905 - protein, 25 aa, Artificial Sequence
  Cyclic GFR-binding peptide
ENSLQEVVKDYEDYYVMPLPELETP

SEQ ID NO: 49906 - protein, 33 aa, Artificial Sequence; identical to SEQ ID NO: 16083
  Cyclic GFR-binding peptide
  MOD_RES (28)..(29): Xaa is C or S

SEQ ID NO: 49907 - protein, 37 aa, Artificial Sequence; identical to SEQ ID NO: 16084
  Cyclic GFR-binding peptide
  MOD_RES (31)..(32): Xaa is C or S

SEQ ID NO: 49908 - protein, 35 aa, Artificial Sequence; identical to SEQ ID NO: 16085
  Cyclic GFR-binding peptide
  MOD_RES (29)..(30): Xaa is C or S

SEQ ID NO: 49909 - protein, 21 aa, Artificial Sequence
  Cyclic GFR-binding peptide
NNSLQEIVNSSDDYYLVTLPE

SEQ ID NO: 49910 - protein, 29 aa, Artificial Sequence
  Cyclic GFR-binding peptide
  MOD_RES (27)..(28): Xaa is C or S
DNSLQEVVKENEDYYVMPLPELETPVXXA

SEQ ID NO: 49911 - protein, 31 aa, Artificial Sequence; identical to SEQ ID NO: 5657
  Cyclic GFR-binding peptide

SEQ ID NO: 49912 - protein, 33 aa, Artificial Sequence; identical to SEQ ID NO: 16091
  Cyclic GFR-binding peptide
  MOD_RES (31)..(32): Xaa is C or S

SEQ ID NO: 49913 - protein, 41 aa, Artificial Sequence; identical to SEQ ID NO: 16092
  Cyclic GFR-binding peptide
  MOD_RES (1)..(3)..(35)..(36): Xaa is C or S

SEQ ID NO: 49914 - protein, 32 aa, Artificial Sequence; identical to SEQ ID NO: 5659
  Cyclic GFR-binding peptide
  MOD_RES (30)..(31): Xaa is C or S

SEQ ID NO: 49915 - protein, 31 aa, Artificial Sequence; identical to SEQ ID NO: 16094
  Cyclic GFR-binding peptide
  MOD_RES (29)..(30): Xaa is C or S

SEQ ID NO: 49916 - protein, 40 aa, Artificial Sequence; identical to SEQ ID NO: 16095
  Cyclic GFR-binding peptide
  MOD_RES (1)..(3)..(35)..(36): Xaa is C or S

SEQ ID NO: 49917 - protein, 23 aa, Artificial Sequence
  Cyclic GFR-binding peptide
DNSLQEVVNNASDYYVIPLPELR

SEQ ID NO: 49918 - protein, 39 aa, Artificial Sequence; identical to SEQ ID NO: 16097
  Cyclic GFR-binding peptide
  MOD_RES (2)..(4)..(36)..(37): Xaa is C or S

SEQ ID NO: 49919 - protein, 30 aa, Artificial Sequence; identical to SEQ ID NO: 16098
  Cyclic GFR-binding peptide
  MOD_RES (28)..(29): Xaa is C or S

SEQ ID NO: 49920 - protein, 25 aa, Artificial Sequence
  Cyclic GFR-binding peptide
MERYKKLVVKDYEDFYLMSIANLET

SEQ ID NO: 49921 - protein, 23 aa, Artificial Sequence
  Cyclic GFR-binding peptide
VMDRYKKLVVKENEDFYLMSIAN

SEQ ID NO: 49922 - protein, 31 aa, Artificial Sequence; identical to SEQ ID NO: 16102
  Cyclic GFR-binding peptide
  MOD_RES (30)..(31): Xaa is C or S

SEQ ID NO: 49923 - protein, 32 aa, Artificial Sequence; identical to SEQ ID NO: 16105
  Cyclic GFR-binding peptide
  MOD_RES (1)..(3): Xaa is C or S

SEQ ID NO: 49924 - protein, 33 aa, Artificial Sequence; identical to SEQ ID NO: 16106
  Cyclic GFR-binding peptide
  MOD_RES (31)..(32): Xaa is C or S

SEQ ID NO: 49925 - protein, 24 aa, Artificial Sequence
  Cyclic GFR-binding peptide
VMNSLQEVKPTRGVYYVIPLPELD

SEQ ID NO: 49926 - protein, 27 aa, Artificial Sequence
  Cyclic GFR-binding peptide
RVVMNNSLQEIVNSSDDYYVVPLPELK

SEQ ID NO: 49927 - protein, 30 aa, Artificial Sequence; identical to SEQ ID NO: 16110
  Cyclic GFR-binding peptide
  MOD_RES (26)..(26): Xaa is C or S

SEQ ID NO: 49928 - protein, 27 aa, Artificial Sequence
  Cyclic GFR-binding peptide
  MOD_RES (26)..(27): Xaa is C or S
RYKKLIVNSSDDFYLVSIANLKTPAXX

SEQ ID NO: 49929 - protein, 34 aa, Artificial Sequence; identical to SEQ ID NO: 16112
  Cyclic GFR-binding peptide
  MOD_RES (30)..(31): Xaa is C or S

SEQ ID NO: 49930 - protein, 24 aa, Artificial Sequence
  Cyclic GFR-binding peptide
MNSLQEVKPTRGVYYVIPLPELDQ

SEQ ID NO: 49931 - protein, 31 aa, Artificial Sequence; identical to SEQ ID NO: 16114
  Cyclic GFR-binding peptide
  MOD_RES (29)..(29): Xaa is C or S

SEQ ID NO: 49932 - protein, 39 aa, Artificial Sequence; identical to SEQ ID NO: 5673
  Cyclic GFR-binding peptide
  MOD_RES (2)..(34)..(35): Xaa is C or S

SEQ ID NO: 49933 - protein, 40 aa, Artificial Sequence; identical to SEQ ID NO: 16116
  Cyclic GFR-binding peptide
  MOD_RES (1)..(3)..(35)..(36): Xaa is C or S

SEQ ID NO: 49934 - protein, 39 aa, Artificial Sequence; identical to SEQ ID NO: 16117
  Cyclic GFR-binding peptide
  MOD_RES (1)..(33)..(34): Xaa is C or S

SEQ ID NO: 49935 - protein, 31 aa, Artificial Sequence; identical to SEQ ID NO: 16118
  Cyclic GFR-binding peptide
  MOD_RES (30)..(31): Xaa is C or S

SEQ ID NO: 49936 - protein, 39 aa, Artificial Sequence; identical to SEQ ID NO: 16119
  Cyclic GFR-binding peptide
  MOD_RES (2)..(34)..(35): Xaa is C or S

SEQ ID NO: 49937 - protein, 28 aa, Artificial Sequence
  Cyclic GFR-binding peptide
GEVVMDNSLQEVVKENEDYYLMTLPELE

SEQ ID NO: 49938 - protein, 27 aa, Artificial Sequence
  Cyclic GFR-binding peptide
  MOD_RES (1)..(1): Xaa is C or S
XGEVVMDRYKKLVVKENEDFYLMSIAN

SEQ ID NO: 49939 - protein, 35 aa, Artificial Sequence; identical to SEQ ID NO: 5683
  Cyclic GFR-binding peptide
  MOD_RES (31)..(32): Xaa is C or S

SEQ ID NO: 49940 - protein, 21 aa, Artificial Sequence
  Cyclic GFR-binding peptide
NSLQEIKPTKGIYYLITLPEL

SEQ ID NO: 49941 - protein, 36 aa, Artificial Sequence; identical to SEQ ID NO: 16125
  Cyclic GFR-binding peptide
  MOD_RES (2)..(4)..(35)..(36): Xaa is C or S

SEQ ID NO: 49942 - protein, 36 aa, Artificial Sequence; identical to SEQ ID NO: 16127
  Cyclic GFR-binding peptide
  MOD_RES (2)..(4)..(36): Xaa is C or S

SEQ ID NO: 49943 - protein, 31 aa, Artificial Sequence; identical to SEQ ID NO: 5688
  Cyclic GFR-binding peptide
  MOD_RES (2)..(4): Xaa is C or S

SEQ ID NO: 49944 - protein, 35 aa, Artificial Sequence; identical to SEQ ID NO: 5692
  Cyclic GFR-binding peptide
  MOD_RES (29)..(30): Xaa is C or S

SEQ ID NO: 49945 - protein, 36 aa, Artificial Sequence; identical to SEQ ID NO: 16132
  Cyclic GFR-binding peptide
  MOD_RES (2)..(4)..(35)..(36): Xaa is C or S

SEQ ID NO: 49946 - protein, 30 aa, Artificial Sequence; identical to SEQ ID NO: 16134
  Cyclic GFR-binding peptide
  MOD_RES (2)..(2): Xaa is C or S

SEQ ID NO: 49947 - protein, 32 aa, Artificial Sequence; identical to SEQ ID NO: 16135
  Cyclic GFR-binding peptide
  MOD_RES (30)..(31): Xaa is C or S

SEQ ID NO: 49948 - protein, 38 aa, Artificial Sequence; identical to SEQ ID NO: 16136
  Cyclic GFR-binding peptide
  MOD_RES (1)..(3)..(35)..(36): Xaa is C or S

SEQ ID NO: 49949 - protein, 30 aa, Artificial Sequence; identical to SEQ ID NO: 16137
  Cyclic GFR-binding peptide

SEQ ID NO: 49950 - protein, 39 aa, Artificial Sequence; identical to SEQ ID NO: 16138
  Cyclic GFR-binding peptide
  MOD_RES (1)..(3)..(35)..(36): Xaa is C or S

SEQ ID NO: 49951 - protein, 25 aa, Artificial Sequence
  Cyclic GFR-binding peptide
KVVMNSLQEVKPTRGVYYLITLPEL

SEQ ID NO: 49952 - protein, 35 aa, Artificial Sequence; identical to SEQ ID NO: 16139
  Cyclic GFR-binding peptide
  MOD_RES (29)..(30): Xaa is C or S

SEQ ID NO: 49953 - protein, 23 aa, Artificial Sequence
  Cyclic GFR-binding peptide
MDRYKKLVVNNASDFYLISIANL

SEQ ID NO: 49954 - protein, 35 aa, Artificial Sequence; identical to SEQ ID NO: 16141
  Cyclic GFR-binding peptide
  MOD_RES (30)..(31): Xaa is C or S

SEQ ID NO: 49955 - protein, 33 aa, Artificial Sequence; identical to SEQ ID NO: 16142
  Cyclic GFR-binding peptide
  MOD_RES (2)..(2): Xaa is C or S

SEQ ID NO: 49956 - protein, 33 aa, Artificial Sequence; identical to SEQ ID NO: 16143
  Cyclic GFR-binding peptide
  MOD_RES (1)..(32)..(33): Xaa is C or S

SEQ ID NO: 49957 - protein, 25 aa, Artificial Sequence
  Cyclic GFR-binding peptide
NSLQEIVNSSDDYYVVPLPELQTPA

SEQ ID NO: 49958 - protein, 39 aa, Artificial Sequence; identical to SEQ ID NO: 5708
  Cyclic GFR-binding peptide
  MOD_RES (2)..(4)..(35)..(36): Xaa is C or S

SEQ ID NO: 49959 - protein, 28 aa, Artificial Sequence
  Cyclic GFR-binding peptide
VIMEYQKYVKPKRGVIFLISIPSLAQPV

SEQ ID NO: 49960 - protein, 32 aa, Artificial Sequence; identical to SEQ ID NO: 16149
  Cyclic GFR-binding peptide
  MOD_RES (2)..(2): Xaa is C or S

SEQ ID NO: 49961 - protein, 33 aa, Artificial Sequence; identical to SEQ ID NO: 16150
  Cyclic GFR-binding peptide
  MOD_RES (1)..(32)..(33): Xaa is C or S

SEQ ID NO: 49962 - protein, 33 aa, Artificial Sequence; identical to SEQ ID NO: 16151
  Cyclic GFR-binding peptide
  MOD_RES (32)..(33): Xaa is C or S

SEQ ID NO: 49963 - protein, 27 aa, Artificial Sequence
  Cyclic GFR-binding peptide
  MOD_RES (2)..(2): Xaa is C or S
KXSKVVMNSLQEVKPTRGVYYVIPLPE

SEQ ID NO: 49964 - protein, 35 aa, Artificial Sequence; identical to SEQ ID NO: 16153
  Cyclic GFR-binding peptide
  MOD_RES (1)..(32)..(33): Xaa is C or S

SEQ ID NO: 49965 - protein, 41 aa, Artificial Sequence; identical to SEQ ID NO: 16154
  Cyclic GFR-binding peptide
  MOD_RES (2)..(4)..(36)..(37): Xaa is C or S

SEQ ID NO: 49966 - protein, 21 aa, Artificial Sequence
  Cyclic GFR-binding peptide
RYKKLVVKDYEDFYLMSIANL

SEQ ID NO: 49967 - protein, 32 aa, Artificial Sequence; identical to SEQ ID NO: 16156
  Cyclic GFR-binding peptide
  MOD_RES (1)..(3): Xaa is C or S

SEQ ID NO: 49968 - protein, 32 aa, Artificial Sequence; identical to SEQ ID NO: 16160
  Cyclic GFR-binding peptide
  MOD_RES (1)..(3): Xaa is C or S

SEQ ID NO: 49969 - protein, 25 aa, Artificial Sequence
  Cyclic GFR-binding peptide
MDRYKKLVVNNASDFYLISIANLRT

SEQ ID NO: 49970 - protein, 33 aa, Artificial Sequence; identical to SEQ ID NO: 5727
  Cyclic GFR-binding peptide
  MOD_RES (2)..(4): Xaa is C or S

SEQ ID NO: 49971 - protein, 31 aa, Artificial Sequence; identical to SEQ ID NO: 16165
  Cyclic GFR-binding peptide
  MOD_RES (2)..(2): Xaa is C or S

SEQ ID NO: 49972 - protein, 29 aa, Artificial Sequence
  Cyclic GFR-binding peptide
  MOD_RES (1)..(3): Xaa is C or S
XKXSRVIMEYQKYVKPKRGVIFLISIPSL

SEQ ID NO: 49973 - protein, 30 aa, Artificial Sequence; identical to SEQ ID NO: 5733
  Cyclic GFR-binding peptide
  MOD_RES (30)..(30): Xaa is C or S

SEQ ID NO: 49974 - protein, 29 aa, Artificial Sequence
  Cyclic GFR-binding peptide
  MOD_RES (26)..(26): Xaa is C or S
NSLQEIVNSSDDYYLVTLPELKTPAXTPK

SEQ ID NO: 49975 - protein, 40 aa, Artificial Sequence; identical to SEQ ID NO: 16170
  Cyclic GFR-binding peptide
  MOD_RES (1)..(3)..(35)..(36): Xaa is C or S

SEQ ID NO: 49976 - protein, 22 aa, Artificial Sequence
  Cyclic GFR-binding peptide
MNNSLQEIVNSSDDYYLVTLPE

SEQ ID NO: 49977 - protein, 33 aa, Artificial Sequence; identical to SEQ ID NO: 16173
  Cyclic GFR-binding peptide
  MOD_RES (31)..(32): Xaa is C or S

SEQ ID NO: 49978 - protein, 39 aa, Artificial Sequence; identical to SEQ ID NO: 16174
  Cyclic GFR-binding peptide
  MOD_RES (1)..(33)..(34): Xaa is C or S

SEQ ID NO: 49979 - protein, 33 aa, Artificial Sequence; identical to SEQ ID NO: 5742
  Cyclic GFR-binding peptide
  MOD_RES (31)..(31): Xaa is C or S

SEQ ID NO: 49980 - protein, 33 aa, Artificial Sequence; identical to SEQ ID NO: 16177
  Cyclic GFR-binding peptide
  MOD_RES (29)..(30): Xaa is C or S

SEQ ID NO: 49981 - protein, 26 aa, Artificial Sequence
  Cyclic GFR-binding peptide
  MOD_RES (26)..(26): Xaa is C or S
EYQKYVVKDYEDIFLMSIPSLETPVX

SEQ ID NO: 49982 - protein, 24 aa, Artificial Sequence
  Cyclic GFR-binding peptide
VVMRYKKLVKPTRGVFYLISIANL

SEQ ID NO: 49983 - protein, 33 aa, Artificial Sequence; identical to SEQ ID NO: 16181
  Cyclic GFR-binding peptide
  MOD_RES (1)..(33): Xaa is C or S

SEQ ID NO: 49984 - protein, 37 aa, Artificial Sequence; identical to SEQ ID NO: 16183
  Cyclic GFR-binding peptide
  MOD_RES (1)..(3)..(35)..(36): Xaa is C or S

SEQ ID NO: 49985 - protein, 30 aa, Artificial Sequence; identical to SEQ ID NO: 16184
  Cyclic GFR-binding peptide
  MOD_RES (28)..(29): Xaa is C or S

SEQ ID NO: 49986 - protein, 29 aa, Artificial Sequence
  Cyclic GFR-binding peptide
  MOD_RES (29)..(29): Xaa is C or S
VMNNSLQEIVNSSDDYYVVPLPELKTPAX

SEQ ID NO: 49987 - protein, 30 aa, Artificial Sequence; identical to SEQ ID NO: 16187
  Cyclic GFR-binding peptide
  MOD_RES (2)..(2): Xaa is C or S

SEQ ID NO: 49988 - protein, 29 aa, Artificial Sequence
  Cyclic GFR-binding peptide
RVVMNEYQKYIVNSSDDIFLVSIPSLKTP

SEQ ID NO: 49989 - protein, 40 aa, Artificial Sequence; identical to SEQ ID NO: 16189
  Cyclic GFR-binding peptide
  MOD_RES (2)..(4)..(36)..(37): Xaa is C or S

SEQ ID NO: 49990 - protein, 25 aa, Artificial Sequence
  Cyclic GFR-binding peptide
RYKKLVVKDYEDFYLMSIANLETPV

SEQ ID NO: 49991 - protein, 35 aa, Artificial Sequence; identical to SEQ ID NO: 16191
  Cyclic GFR-binding peptide
  MOD_RES (32)..(33): Xaa is C or S

SEQ ID NO: 49992 - protein, 32 aa, Artificial Sequence; identical to SEQ ID NO: 16192
  Cyclic GFR-binding peptide
  MOD_RES (28)..(29): Xaa is C or S

SEQ ID NO: 49993 - protein, 27 aa, Artificial Sequence
  Cyclic GFR-binding peptide
RVIMEYQKYVKPKRGVIFLISIPSLAQ

SEQ ID NO: 49994 - protein, 34 aa, Artificial Sequence; identical to SEQ ID NO: 5755
  Cyclic GFR-binding peptide
  MOD_RES (1)..(33)..(34): Xaa is C or S

SEQ ID NO: 49995 - protein, 33 aa, Artificial Sequence; identical to SEQ ID NO: 16195
  Cyclic GFR-binding peptide
  MOD_RES (2)..(2): Xaa is C or S

SEQ ID NO: 49996 - protein, 30 aa, Artificial Sequence; identical to SEQ ID NO: 5761
  Cyclic GFR-binding peptide
  MOD_RES (2)..(4): Xaa is C or S

SEQ ID NO: 49997 - protein, 37 aa, Artificial Sequence; identical to SEQ ID NO: 5762
  Cyclic GFR-binding peptide
  MOD_RES (2)..(33)..(34): Xaa is C or S

SEQ ID NO: 49998 - protein, 23 aa, Artificial Sequence
  Cyclic GFR-binding peptide
VMENSLQEVVKDYEDYYVMPLPE

SEQ ID NO: 49999 - protein, 27 aa, Artificial Sequence
  Cyclic GFR-binding peptide
EVVMDRYKKLVVKENEDFYLMSIANLE

SEQ ID NO: 50000 - protein, 25 aa, Artificial Sequence
  Cyclic GFR-binding peptide
MNEYQKYIVNSSDDIFLVSIPSLQT

SEQ ID NO: 50001 - protein, 36 aa, Artificial Sequence; identical to SEQ ID NO: 16208
  Cyclic GFR-binding peptide
  MOD_RES (30)..(31): Xaa is C or S

SEQ ID NO: 50002 - protein, 25 aa, Artificial Sequence
  Cyclic GFR-binding peptide
VIMNSLQEIKPTKGIYYVIPLPELD

SEQ ID NO: 50003 - protein, 32 aa, Artificial Sequence; identical to SEQ ID NO: 5776
  Cyclic GFR-binding peptide
  MOD_RES (31)..(31): Xaa is C or S

SEQ ID NO: 50004 - protein, 25 aa, Artificial Sequence
  Cyclic GFR-binding peptide
EVVMDNSLQEVVKENEDYYVMPLPE

SEQ ID NO: 50005 - protein, 27 aa, Artificial Sequence
  Cyclic GFR-binding peptide
GEVVMDEYQKYVVKENEDIFLMSIPSL

SEQ ID NO: 50006 - protein, 32 aa, Artificial Sequence; identical to SEQ ID NO: 5778
  Cyclic GFR-binding peptide
  MOD_RES (1)..(32): Xaa is C or S

SEQ ID NO: 50007 - protein, 33 aa, Artificial Sequence; identical to SEQ ID NO: 16215
  Cyclic GFR-binding peptide
  MOD_RES (28)..(29): Xaa is C or S

SEQ ID NO: 50008 - protein, 31 aa, Artificial Sequence; identical to SEQ ID NO: 16216
  Cyclic GFR-binding peptide
  MOD_RES (28)..(29): Xaa is C or S

SEQ ID NO: 50009 - protein, 24 aa, Artificial Sequence
  Cyclic GFR-binding peptide
KVIMRYKKLIKPTKGIFYLISIAN

SEQ ID NO: 50010 - protein, 21 aa, Artificial Sequence
  Cyclic GFR-binding peptide
MRYKKLVKPTRGVFYLISIAN

SEQ ID NO: 50011 - protein, 31 aa, Artificial Sequence; identical to SEQ ID NO: 5784
  Cyclic GFR-binding peptide
  MOD_RES (30)..(31): Xaa is C or S

SEQ ID NO: 50012 - protein, 32 aa, Artificial Sequence; identical to SEQ ID NO: 16221
  Cyclic GFR-binding peptide
  MOD_RES (1)..(1): Xaa is C or S

SEQ ID NO: 50013 - protein, 27 aa, Artificial Sequence
  Cyclic GFR-binding peptide
  MOD_RES (2)..(2): Xaa is C or S
KXSRVIMEYQKYVKPKRGVIFLISIPS

SEQ ID NO: 50014 - protein, 37 aa, Artificial Sequence; identical to SEQ ID NO: 16223
  Cyclic GFR-binding peptide
  MOD_RES (1)..(3)..(35): Xaa is C or S

SEQ ID NO: 50015 - protein, 26 aa, Artificial Sequence
  Cyclic GFR-binding peptide
MNNSLQEIVNSSDDYYVVPLPELQTP

SEQ ID NO: 50016 - protein, 28 aa, Artificial Sequence
  Cyclic GFR-binding peptide
RVVMNNSLQEIVNSSDDYYLVTLPELQT

SEQ ID NO: 50017 - protein, 26 aa, Artificial Sequence
  Cyclic GFR-binding peptide
VMNNSLQEIVNSSDDYYVVPLPELQT

SEQ ID NO: 50018 - protein, 21 aa, Artificial Sequence
  Cyclic GFR-binding peptide
MNSLQEVKPKRGVYYLITLPE

SEQ ID NO: 50019 - protein, 34 aa, Artificial Sequence; identical to SEQ ID NO: 16229
  Cyclic GFR-binding peptide
  MOD_RES (1)..(33)..(34): Xaa is C or S

SEQ ID NO: 50020 - protein, 33 aa, Artificial Sequence; identical to SEQ ID NO: 16230
  Cyclic GFR-binding peptide
  MOD_RES (30)..(31): Xaa is C or S

SEQ ID NO: 50021 - protein, 27 aa, Artificial Sequence
  Cyclic GFR-binding peptide
VMENSLQEVVKDYEDYYVMPLPELETP

SEQ ID NO: 50022 - protein, 29 aa, Artificial Sequence
  Cyclic GFR-binding peptide
  MOD_RES (29)..(29): Xaa is C or S
VMDRYKKLVVNNASDFYLISIANLRTPVX

SEQ ID NO: 50023 - protein, 33 aa, Artificial Sequence; identical to SEQ ID NO: 16234
  Cyclic GFR-binding peptide
  MOD_RES (29)..(30): Xaa is C or S

SEQ ID NO: 50024 - protein, 41 aa, Artificial Sequence; identical to SEQ ID NO: 16235
  Cyclic GFR-binding peptide
  MOD_RES (1)..(3)..(35): Xaa is C or S

SEQ ID NO: 50025 - protein, 28 aa, Artificial Sequence
  Cyclic GFR-binding peptide
  MOD_RES (26)..(27): Xaa is C or S
EYQKYVVKDYEDIFLMSIPSLETPVXXA

SEQ ID NO: 50026 - protein, 25 aa, Artificial Sequence
  Cyclic GFR-binding peptide
EYQKYVKPTRGVIFLISIPSLDQPV

SEQ ID NO: 50027 - protein, 31 aa, Artificial Sequence; identical to SEQ ID NO: 16240
  Cyclic GFR-binding peptide

SEQ ID NO: 50028 - protein, 38 aa, Artificial Sequence; identical to SEQ ID NO: 16242
  Cyclic GFR-binding peptide
  MOD_RES (32)..(33): Xaa is C or S

SEQ ID NO: 50029 - protein, 25 aa, Artificial Sequence
  Cyclic GFR-binding peptide
VMEYQKYVKPTRGVIFLISIPSLDQ

SEQ ID NO: 50030 - protein, 41 aa, Artificial Sequence; identical to SEQ ID NO: 16246
  Cyclic GFR-binding peptide
  MOD_RES (1)..(3)..(35)..(36): Xaa is C or S

SEQ ID NO: 50031 - protein, 22 aa, Artificial Sequence
  Cyclic GFR-binding peptide
ENSLQEVVKDYEDYYVMPLPEL

SEQ ID NO: 50032 - protein, 31 aa, Artificial Sequence; identical to SEQ ID NO: 16249
  Cyclic GFR-binding peptide
  MOD_RES (29)..(30): Xaa is C or S

SEQ ID NO: 50033 - protein, 28 aa, Artificial Sequence
  Cyclic GFR-binding peptide
VMNRYKKLIVNSSDDFYLVSIANLKTPA

SEQ ID NO: 50034 - protein, 34 aa, Artificial Sequence; identical to SEQ ID NO: 5820
  Cyclic GFR-binding peptide
  MOD_RES (28)..(29): Xaa is C or S

SEQ ID NO: 50035 - protein, 33 aa, Artificial Sequence; identical to SEQ ID NO: 16253
  Cyclic GFR-binding peptide
  MOD_RES (28)..(28): Xaa is C or S

SEQ ID NO: 50036 - protein, 37 aa, Artificial Sequence; identical to SEQ ID NO: 16255
  Cyclic GFR-binding peptide
  MOD_RES (2)..(4)..(36)..(37): Xaa is C or S

SEQ ID NO: 50037 - protein, 35 aa, Artificial Sequence; identical to SEQ ID NO: 16257
  Cyclic GFR-binding peptide
  MOD_RES (30)..(31): Xaa is C or S

SEQ ID NO: 50038 - protein, 30 aa, Artificial Sequence; identical to SEQ ID NO: 5829
  Cyclic GFR-binding peptide

SEQ ID NO: 50039 - protein, 34 aa, Artificial Sequence; identical to SEQ ID NO: 16259
  Cyclic GFR-binding peptide
  MOD_RES (28)..(29): Xaa is C or S

SEQ ID NO: 50040 - protein, 36 aa, Artificial Sequence
  Cyclic GFR-binding peptide
  MOD_RES (2)..(33)..(34): Xaa is C or S
KXSKVVMNSLQEVKPTRGVYYLITLPELDQPVXXPS

SEQ ID NO: 50041 - protein, 26 aa, Artificial Sequence
  Cyclic GFR-binding peptide
  MOD_RES (26)..(26): Xaa is C or S
NSLQEVKPTRGVYYVIPLPELDQPVX

SEQ ID NO: 50042 - protein, 23 aa, Artificial Sequence
  Cyclic GFR-binding peptide
RYKKLIVNSSDDFYLVSIANLKT

SEQ ID NO: 50043 - protein, 31 aa, Artificial Sequence
  Cyclic GFR-binding peptide
  MOD_RES (29)..(30): Xaa is C or S
VVMNSLQEVKPTRGVYYLITLPELDQPVXXP

SEQ ID NO: 50044 - protein, 26 aa, Artificial Sequence
  Cyclic GFR-binding peptide
DNSLQEVVNNASDYYVIPLPELRTPV

SEQ ID NO: 50045 - protein, 36 aa, Artificial Sequence; identical to SEQ ID NO: 16264
  Cyclic GFR-binding peptide
  MOD_RES (2)..(34)..(35): Xaa is C or S

SEQ ID NO: 50046 - protein, 33 aa, Artificial Sequence; identical to SEQ ID NO: 5835
  Cyclic GFR-binding peptide
  MOD_RES (2)..(4): Xaa is C or S

SEQ ID NO: 50047 - protein, 31 aa, Artificial Sequence; identical to SEQ ID NO: 16269
  Cyclic GFR-binding peptide
  MOD_RES (26)..(27): Xaa is C or S

SEQ ID NO: 50048 - protein, 31 aa, Artificial Sequence; identical to SEQ ID NO: 16271
  Cyclic GFR-binding peptide
  MOD_RES (31)..(31): Xaa is C or S

SEQ ID NO: 50049 - protein, 29 aa, Artificial Sequence
  Cyclic GFR-binding peptide
VVMNRYKKLIVNSSDDFYLVSIANLKTPA

SEQ ID NO: 50050 - protein, 28 aa, Artificial Sequence
  Cyclic GFR-binding peptide
VMDNSLQEVVNNASDYYVIPLPELRTPV

SEQ ID NO: 50051 - protein, 30 aa, Artificial Sequence; identical to SEQ ID NO: 16274
  Cyclic GFR-binding peptide
  MOD_RES (1)..(1): Xaa is C or S

SEQ ID NO: 50052 - protein, 33 aa, Artificial Sequence; identical to SEQ ID NO: 16275
  Cyclic GFR-binding peptide
  MOD_RES (2)..(2): Xaa is C or S

SEQ ID NO: 50053 - protein, 38 aa, Artificial Sequence; identical to SEQ ID NO: 16276
  Cyclic GFR-binding peptide
  MOD_RES (2)..(4)..(35)..(36): Xaa is C or S

SEQ ID NO: 50054 - protein, 38 aa, Artificial Sequence; identical to SEQ ID NO: 16278
  Cyclic GFR-binding peptide
  MOD_RES (2)..(33)..(34): Xaa is C or S

SEQ ID NO: 50055 - protein, 36 aa, Artificial Sequence; identical to SEQ ID NO: 16279
  Cyclic GFR-binding peptide
  MOD_RES (2)..(4)..(36): Xaa is C or S

SEQ ID NO: 50056 - protein, 41 aa, Artificial Sequence; identical to SEQ ID NO: 16280
  Cyclic GFR-binding peptide
  MOD_RES (2)..(4)..(36)..(37): Xaa is C or S

SEQ ID NO: 50057 - protein, 36 aa, Artificial Sequence; identical to SEQ ID NO: 5855
  Cyclic GFR-binding peptide
  MOD_RES (31)..(31): Xaa is C or S

SEQ ID NO: 50058 - protein, 24 aa, Artificial Sequence
  Cyclic GFR-binding peptide
NSLQEVVKENEDYYLMTLPELETP

SEQ ID NO: 50059 - protein, 25 aa, Artificial Sequence
  Cyclic GFR-binding peptide
DRYKKLVVNNASDFYLISIANLRTP

SEQ ID NO: 50060 - protein, 34 aa, Artificial Sequence; identical to SEQ ID NO: 16285
  Cyclic GFR-binding peptide
  MOD_RES (31)..(32): Xaa is C or S

SEQ ID NO: 50061 - protein, 33 aa, Artificial Sequence; identical to SEQ ID NO: 16286
  Cyclic GFR-binding peptide
  MOD_RES (1)..(33): Xaa is C or S

SEQ ID NO: 50062 - protein, 27 aa, Artificial Sequence
  Cyclic GFR-binding peptide
GEVVMDNSLQEVVKENEDYYVMPLPEL

SEQ ID NO: 50063 - protein, 32 aa, Artificial Sequence; identical to SEQ ID NO: 16289
  Cyclic GFR-binding peptide
  MOD_RES (26)..(27): Xaa is C or S

SEQ ID NO: 50064 - protein, 36 aa, Artificial Sequence; identical to SEQ ID NO: 5864
  Cyclic GFR-binding peptide
  MOD_RES (2)..(33)..(34): Xaa is C or S

SEQ ID NO: 50065 - protein, 39 aa, Artificial Sequence; identical to SEQ ID NO: 16292
  Cyclic GFR-binding peptide
  MOD_RES (1)..(33)..(34): Xaa is C or S

SEQ ID NO: 50066 - protein, 30 aa, Artificial Sequence; identical to SEQ ID NO: 5868
  Cyclic GFR-binding peptide
  MOD_RES (1)..(1): Xaa is C or S

SEQ ID NO: 50067 - protein, 29 aa, Artificial Sequence
  Cyclic GFR-binding peptide
EVVMDRYKKLVVNNASDFYLISIANLRTP

SEQ ID NO: 50068 - protein, 21 aa, Artificial Sequence
  Cyclic GFR-binding peptide
NSLQEIVNSSDDYYVVPLPEL

SEQ ID NO: 50069 - protein, 40 aa, Artificial Sequence; identical to SEQ ID NO: 16298
  Cyclic GFR-binding peptide
  MOD_RES (1)..(3)..(35): Xaa is C or S

SEQ ID NO: 50070 - protein, 26 aa, Artificial Sequence
  Cyclic GFR-binding peptide
VVMEYQKYVKPTRGVIFLISIPSLDQ

SEQ ID NO: 50071 - protein, 35 aa, Artificial Sequence; identical to SEQ ID NO: 5872
  Cyclic GFR-binding peptide
  MOD_RES (2)..(33)..(34): Xaa is C or S

SEQ ID NO: 50072 - protein, 34 aa, Artificial Sequence; identical to SEQ ID NO: 16301
  Cyclic GFR-binding peptide
  MOD_RES (2)..(34): Xaa is C or S

SEQ ID NO: 50073 - protein, 29 aa, Artificial Sequence
  Cyclic GFR-binding peptide
  MOD_RES (2)..(2): Xaa is C or S
GXGEVVMENSLQEVVKDYEDYYVMPLPEL

SEQ ID NO: 50074 - protein, 29 aa, Artificial Sequence
  Cyclic GFR-binding peptide
SKVIMNSLQEIKPTKGIYYVIPLPELDQS

SEQ ID NO: 50075 - protein, 26 aa, Artificial Sequence
  Cyclic GFR-binding peptide
RVVMNNSLQEIVNSSDDYYLVTLPEL

SEQ ID NO: 50076 - protein, 40 aa, Artificial Sequence; identical to SEQ ID NO: 16306
  Cyclic GFR-binding peptide
  MOD_RES (2)..(4)..(36): Xaa is C or S

SEQ ID NO: 50077 - protein, 30 aa, Artificial Sequence; identical to SEQ ID NO: 16307
  Cyclic GFR-binding peptide

SEQ ID NO: 50078 - protein, 31 aa, Artificial Sequence; identical to SEQ ID NO: 16308
  Cyclic GFR-binding peptide
  MOD_RES (30)..(30): Xaa is C or S

SEQ ID NO: 50079 - protein, 23 aa, Artificial Sequence
  Cyclic GFR-binding peptide
IMNSLQEIKPTKGIYYVIPLPEL

SEQ ID NO: 50080 - protein, 27 aa, Artificial Sequence
  Cyclic GFR-binding peptide
IMRYKKLVKPKRGVFYLISIANLAQPV

SEQ ID NO: 50081 - protein, 26 aa, Artificial Sequence
  Cyclic GFR-binding peptide
VMDNSLQEVVKENEDYYVMPLPELET

SEQ ID NO: 50082 - protein, 28 aa, Artificial Sequence
  Cyclic GFR-binding peptide
  MOD_RES (1)..(3): Xaa is C or S
XKXSKVIMRYKKLIKPTKGIFYLISIAN

SEQ ID NO: 50083 - protein, 35 aa, Artificial Sequence; identical to SEQ ID NO: 16314
  Cyclic GFR-binding peptide
  MOD_RES (2)..(4): Xaa is C or S

SEQ ID NO: 50084 - protein, 25 aa, Artificial Sequence
  Cyclic GFR-binding peptide
VVMNNSLQEIVNSSDDYYLVTLPEL

SEQ ID NO: 50085 - protein, 34 aa, Artificial Sequence; identical to SEQ ID NO: 16318
  Cyclic GFR-binding peptide
  MOD_RES (1)..(3): Xaa is C or S

SEQ ID NO: 50086 - protein, 30 aa, Artificial Sequence; identical to SEQ ID NO: 16319
  Cyclic GFR-binding peptide
  MOD_RES (1)..(1): Xaa is C or S

SEQ ID NO: 50087 - protein, 27 aa, Artificial Sequence
  Cyclic GFR-binding peptide
VVMDNSLQEVVNNASDYYLITLPELRT

SEQ ID NO: 50088 - protein, 31 aa, Artificial Sequence; identical to SEQ ID NO: 5892
  Cyclic GFR-binding peptide
  MOD_RES (26)..(26): Xaa is C or S

SEQ ID NO: 50089 - protein, 30 aa, Artificial Sequence; identical to SEQ ID NO: 16325
  Cyclic GFR-binding peptide

SEQ ID NO: 50090 - protein, 27 aa, Artificial Sequence
  Cyclic GFR-binding peptide
  MOD_RES (26)..(27): Xaa is C or S
EYQKYVVKDYEDIFLMSIPSLETPVXX

SEQ ID NO: 50091 - protein, 32 aa, Artificial Sequence; identical to SEQ ID NO: 16329
  Cyclic GFR-binding peptide
  MOD_RES (26)..(27): Xaa is C or S

SEQ ID NO: 50092 - protein, 38 aa, Artificial Sequence; identical to SEQ ID NO: 16331
  Cyclic GFR-binding peptide
  MOD_RES (2)..(34): Xaa is C or S

SEQ ID NO: 50093 - protein, 24 aa, Artificial Sequence
  Cyclic GFR-binding peptide
VVMDNSLQEVVNNASDYYLITLPE

SEQ ID NO: 50094 - protein, 39 aa, Artificial Sequence; identical to SEQ ID NO: 5899
  Cyclic GFR-binding peptide
  MOD_RES (1)..(33): Xaa is C or S

SEQ ID NO: 50095 - protein, 28 aa, Artificial Sequence
  Cyclic GFR-binding peptide
  MOD_RES (2)..(2): Xaa is C or S
KXSKVIMNSLQEIKPTKGIYYLITLPEL

SEQ ID NO: 50096 - protein, 34 aa, Artificial Sequence; identical to SEQ ID NO: 16337
  Cyclic GFR-binding peptide
  MOD_RES (31)..(32): Xaa is C or S

SEQ ID NO: 50097 - protein, 26 aa, Artificial Sequence
  Cyclic GFR-binding peptide
VVMENSLQEVVKDYEDYYVMPLPELE

SEQ ID NO: 50098 - protein, 30 aa, Artificial Sequence; identical to SEQ ID NO: 16340
  Cyclic GFR-binding peptide
  MOD_RES (26)..(27): Xaa is C or S

SEQ ID NO: 50099 - protein, 36 aa, Artificial Sequence
  Cyclic GFR-binding peptide
  MOD_RES (1)..(32)..(33): Xaa is C or S
XSKVVMNSLQEVKPTRGVYYLITLPELDQPVXXPSA

SEQ ID NO: 50100 - protein, 41 aa, Artificial Sequence; identical to SEQ ID NO: 5910
  Cyclic GFR-binding peptide
  MOD_RES (2)..(4)..(35)..(36): Xaa is C or S

SEQ ID NO: 50101 - protein, 27 aa, Artificial Sequence
  Cyclic GFR-binding peptide
RVVMNEYQKYIVNSSDDIFLVSIPSLK

SEQ ID NO: 50102 - protein, 41 aa, Artificial Sequence; identical to SEQ ID NO: 16346
  Cyclic GFR-binding peptide
  MOD_RES (1)..(3)..(35): Xaa is C or S

SEQ ID NO: 50103 - protein, 31 aa, Artificial Sequence; identical to SEQ ID NO: 16348
  Cyclic GFR-binding peptide
  MOD_RES (29)..(30): Xaa is C or S

SEQ ID NO: 50104 - protein, 35 aa, Artificial Sequence; identical to SEQ ID NO: 5913
  Cyclic GFR-binding peptide
  MOD_RES (2)..(34)..(35): Xaa is C or S

SEQ ID NO: 50105 - protein, 30 aa, Artificial Sequence; identical to SEQ ID NO: 5915
  Cyclic GFR-binding peptide
  MOD_RES (28)..(29): Xaa is C or S

SEQ ID NO: 50106 - protein, 30 aa, Artificial Sequence; identical to SEQ ID NO: 16351
  Cyclic GFR-binding peptide
  MOD_RES (1)..(1): Xaa is C or S

SEQ ID NO: 50107 - protein, 28 aa, Artificial Sequence
  Cyclic GFR-binding peptide
  MOD_RES (2)..(2): Xaa is C or S
KXSKVVMNSLQEVKPTRGVYYLITLPEL

SEQ ID NO: 50108 - protein, 23 aa, Artificial Sequence
  Cyclic GFR-binding peptide
MRYKKLVKPTRGVFYLISIANLD

SEQ ID NO: 50109 - protein, 30 aa, Artificial Sequence; identical to SEQ ID NO: 16353
  Cyclic GFR-binding peptide

SEQ ID NO: 50110 - protein, 26 aa, Artificial Sequence
  Cyclic GFR-binding peptide
GEVVMDRYKKLVVKENEDFYLMSIAN

SEQ ID NO: 50111 - protein, 29 aa, Artificial Sequence
  Cyclic GFR-binding peptide
  MOD_RES (29)..(29): Xaa is C or S
VMERYKKLVVKDYEDFYLMSIANLETPVX

SEQ ID NO: 50112 - protein, 29 aa, Artificial Sequence
  Cyclic GFR-binding peptide
  MOD_RES (1)..(1): Xaa is C or S
XSRVIMRYKKLVKPKRGVFYLISIANLAQ

SEQ ID NO: 50113 - protein, 25 aa, Artificial Sequence
  Cyclic GFR-binding peptide
MENSLQEVVKDYEDYYVMPLPELET

SEQ ID NO: 50114 - protein, 23 aa, Artificial Sequence
  Cyclic GFR-binding peptide
IMRYKKLVKPKRGVFYLISIANL

SEQ ID NO: 50115 - protein, 32 aa, Artificial Sequence; identical to SEQ ID NO: 16360
  Cyclic GFR-binding peptide
  MOD_RES (32)..(32): Xaa is C or S

SEQ ID NO: 50116 - protein, 40 aa, Artificial Sequence; identical to SEQ ID NO: 16361
  Cyclic GFR-binding peptide
  MOD_RES (1)..(3)..(35)..(36): Xaa is C or S

SEQ ID NO: 50117 - protein, 36 aa, Artificial Sequence; identical to SEQ ID NO: 16362
  Cyclic GFR-binding peptide
  MOD_RES (30)..(31): Xaa is C or S

SEQ ID NO: 50118 - protein, 30 aa, Artificial Sequence; identical to SEQ ID NO: 16363
  Cyclic GFR-binding peptide
  MOD_RES (27)..(28): Xaa is C or S

SEQ ID NO: 50119 - protein, 35 aa, Artificial Sequence; identical to SEQ ID NO: 16364
  Cyclic GFR-binding peptide
  MOD_RES (2)..(4): Xaa is C or S

SEQ ID NO: 50120 - protein, 33 aa, Artificial Sequence; identical to SEQ ID NO: 16365
  Cyclic GFR-binding peptide
  MOD_RES (30)..(31): Xaa is C or S

SEQ ID NO: 50121 - protein, 25 aa, Artificial Sequence
  Cyclic GFR-binding peptide
SKVVMNSLQEVKPTRGVYYVIPLPE

SEQ ID NO: 50122 - protein, 33 aa, Artificial Sequence; identical to SEQ ID NO: 16367
  Cyclic GFR-binding peptide
  MOD_RES (1)..(33): Xaa is C or S

SEQ ID NO: 50123 - protein, 34 aa, Artificial Sequence; identical to SEQ ID NO: 16370
  Cyclic GFR-binding peptide
  MOD_RES (32)..(33): Xaa is C or S

SEQ ID NO: 50124 - protein, 29 aa, Artificial Sequence
  Cyclic GFR-binding peptide
  MOD_RES (2)..(2): Xaa is C or S
KXSKVVMNSLQEVKPTRGVYYLITLPELD

SEQ ID NO: 50125 - protein, 35 aa, Artificial Sequence; identical to SEQ ID NO: 16374
  Cyclic GFR-binding peptide
  MOD_RES (32)..(33): Xaa is C or S

SEQ ID NO: 50126 - protein, 29 aa, Artificial Sequence
  Cyclic GFR-binding peptide
  MOD_RES (26)..(27): Xaa is C or S
RYKKLVVKDYEDFYLMSIANLETPVXXAK

SEQ ID NO: 50127 - protein, 38 aa, Artificial Sequence; identical to SEQ ID NO: 5952
  Cyclic GFR-binding peptide
  MOD_RES (32)..(33): Xaa is C or S

SEQ ID NO: 50128 - protein, 37 aa, Artificial Sequence; identical to SEQ ID NO: 16379
  Cyclic GFR-binding peptide
  MOD_RES (2)..(4)..(35)..(36): Xaa is C or S

SEQ ID NO: 50129 - protein, 26 aa, Artificial Sequence
  Cyclic GFR-binding peptide
  MOD_RES (26)..(26): Xaa is C or S
NSLQEVVKENEDYYLMTLPELETPVX

SEQ ID NO: 50130 - protein, 26 aa, Artificial Sequence
  Cyclic GFR-binding peptide
  MOD_RES (26)..(26): Xaa is C or S
NSLQEVVNNASDYYVIPLPELRTPVX

SEQ ID NO: 50131 - protein, 33 aa, Artificial Sequence; identical to SEQ ID NO: 16386
  Cyclic GFR-binding peptide
  MOD_RES (32)..(33): Xaa is C or S

SEQ ID NO: 50132 - protein, 28 aa, Artificial Sequence
  Cyclic GFR-binding peptide
  MOD_RES (2)..(2): Xaa is C or S
GXGEVVMENSLQEVVKDYEDYYLMTLPE

SEQ ID NO: 50133 - protein, 40 aa, Artificial Sequence; identical to SEQ ID NO: 5956
  Cyclic GFR-binding peptide
  MOD_RES (2)..(4)..(35)..(36): Xaa is C or S

SEQ ID NO: 50134 - protein, 26 aa, Artificial Sequence
  Cyclic GFR-binding peptide
VMNSLQEVKPTRGVYYVIPLPELDQP

SEQ ID NO: 50135 - protein, 32 aa, Artificial Sequence; identical to SEQ ID NO: 16391
  Cyclic GFR-binding peptide
  MOD_RES (26)..(27): Xaa is C or S

SEQ ID NO: 50136 - protein, 28 aa, Artificial Sequence
  Cyclic GFR-binding peptide
  MOD_RES (2)..(2): Xaa is C or S
KXSRVIMRYKKLVKPKRGVFYLISIANL

SEQ ID NO: 50137 - protein, 29 aa, Artificial Sequence
  Cyclic GFR-binding peptide
ARVVMNNSLQEIVNSSDDYYLVTLPELQT

SEQ ID NO: 50138 - protein, 38 aa, Artificial Sequence; identical to SEQ ID NO: 16394
  Cyclic GFR-binding peptide
  MOD_RES (32)..(33): Xaa is C or S

SEQ ID NO: 50139 - protein, 37 aa, Artificial Sequence; identical to SEQ ID NO: 16395
  Cyclic GFR-binding peptide
  MOD_RES (31)..(32): Xaa is C or S

SEQ ID NO: 50140 - protein, 24 aa, Artificial Sequence
  Cyclic GFR-binding peptide
RYKKLVVKENEDFYLMSIANLETP

SEQ ID NO: 50141 - protein, 29 aa, Artificial Sequence
  Cyclic GFR-binding peptide
RVIMRYKKLVKPKRGVFYLISIANLAQPV

SEQ ID NO: 50142 - protein, 39 aa, Artificial Sequence; identical to SEQ ID NO: 5972
  Cyclic GFR-binding peptide
  MOD_RES (2)..(33)..(34): Xaa is C or S

SEQ ID NO: 50143 - protein, 25 aa, Artificial Sequence
  Cyclic GFR-binding peptide
MNSLQEIKPTKGIYYVIPLPELDQS

SEQ ID NO: 50144 - protein, 26 aa, Artificial Sequence
  Cyclic GFR-binding peptide
  MOD_RES (26)..(26): Xaa is C or S
RYKKLVVKENEDFYLMSIANLETPVX

SEQ ID NO: 50145 - protein, 25 aa, Artificial Sequence
  Cyclic GFR-binding peptide
KVIMNSLQEIKPTKGIYYLITLPEL

SEQ ID NO: 50146 - protein, 27 aa, Artificial Sequence
  Cyclic GFR-binding peptide
VMERYKKLVVKDYEDFYLMSIANLETP

SEQ ID NO: 50147 - protein, 33 aa, Artificial Sequence; identical to SEQ ID NO: 5977
  Cyclic GFR-binding peptide
  MOD_RES (30)..(31): Xaa is C or S

SEQ ID NO: 50148 - protein, 37 aa, Artificial Sequence; identical to SEQ ID NO: 16406
  Cyclic GFR-binding peptide
  MOD_RES (1)..(33): Xaa is C or S

SEQ ID NO: 50149 - protein, 31 aa, Artificial Sequence; identical to SEQ ID NO: 16408
  Cyclic GFR-binding peptide
  MOD_RES (1)..(3): Xaa is C or S

SEQ ID NO: 50150 - protein, 35 aa, Artificial Sequence; identical to SEQ ID NO: 16409
  Cyclic GFR-binding peptide
  MOD_RES (31)..(31): Xaa is C or S

SEQ ID NO: 50151 - protein, 36 aa, Artificial Sequence; identical to SEQ ID NO: 16410
  Cyclic GFR-binding peptide
  MOD_RES (1)..(33)..(34): Xaa is C or S

SEQ ID NO: 50152 - protein, 34 aa, Artificial Sequence; identical to SEQ ID NO: 5981
  Cyclic GFR-binding peptide
  MOD_RES (28)..(29): Xaa is C or S

SEQ ID NO: 50153 - protein, 33 aa, Artificial Sequence; identical to SEQ ID NO: 16413
  Cyclic GFR-binding peptide
  MOD_RES (28)..(29): Xaa is C or S

SEQ ID NO: 50154 - protein, 34 aa, Artificial Sequence; identical to SEQ ID NO: 16414
  Cyclic GFR-binding peptide
  MOD_RES (29)..(30): Xaa is C or S

SEQ ID NO: 50155 - protein, 24 aa, Artificial Sequence
  Cyclic GFR-binding peptide
EEYQKYVVKDYEDIFLMSIPSLET

SEQ ID NO: 50156 - protein, 39 aa, Artificial Sequence; identical to SEQ ID NO: 16416
  Cyclic GFR-binding peptide
  MOD_RES (2)..(34)..(35): Xaa is C or S

SEQ ID NO: 50157 - protein, 33 aa, Artificial Sequence; identical to SEQ ID NO: 16417
  Cyclic GFR-binding peptide
  MOD_RES (30)..(31): Xaa is C or S

SEQ ID NO: 50158 - protein, 33 aa, Artificial Sequence; identical to SEQ ID NO: 16418
  Cyclic GFR-binding peptide
  MOD_RES (27)..(28): Xaa is C or S

SEQ ID NO: 50159 - protein, 35 aa, Artificial Sequence; identical to SEQ ID NO: 16419
  Cyclic GFR-binding peptide
  MOD_RES (2)..(34)..(35): Xaa is C or S

SEQ ID NO: 50160 - protein, 36 aa, Artificial Sequence; identical to SEQ ID NO: 16420
  Cyclic GFR-binding peptide
  MOD_RES (31)..(32): Xaa is C or S

SEQ ID NO: 50161 - protein, 34 aa, Artificial Sequence; identical to SEQ ID NO: 5992
  Cyclic GFR-binding peptide
  MOD_RES (1)..(3)..(34): Xaa is C or S

SEQ ID NO: 50162 - protein, 37 aa, Artificial Sequence; identical to SEQ ID NO: 16423
  Cyclic GFR-binding peptide
  MOD_RES (31)..(32): Xaa is C or S

SEQ ID NO: 50163 - protein, 33 aa, Artificial Sequence; identical to SEQ ID NO: 16424
  Cyclic GFR-binding peptide
  MOD_RES (29)..(30): Xaa is C or S

SEQ ID NO: 50164 - protein, 29 aa, Artificial Sequence
  Cyclic GFR-binding peptide
  MOD_RES (28)..(28): Xaa is C or S
MNNSLQEIVNSSDDYYLVTLPELKTPAXT

SEQ ID NO: 50165 - protein, 33 aa, Artificial Sequence; identical to SEQ ID NO: 16426
  Cyclic GFR-binding peptide
  MOD_RES (1)..(33): Xaa is C or S

SEQ ID NO: 50166 - protein, 33 aa, Artificial Sequence; identical to SEQ ID NO: 16427
  Cyclic GFR-binding peptide
  MOD_RES (1)..(32)..(33): Xaa is C or S

SEQ ID NO: 50167 - protein, 41 aa, Artificial Sequence; identical to SEQ ID NO: 16428
  Cyclic GFR-binding peptide
  MOD_RES (1)..(3)..(35)..(36): Xaa is C or S

SEQ ID NO: 50168 - protein, 35 aa, Artificial Sequence; identical to SEQ ID NO: 5999
  Cyclic GFR-binding peptide
  MOD_RES (2)..(34): Xaa is C or S

SEQ ID NO: 50169 - protein, 34 aa, Artificial Sequence; identical to SEQ ID NO: 16430
  Cyclic GFR-binding peptide
  MOD_RES (29)..(30): Xaa is C or S

SEQ ID NO: 50170 - protein, 34 aa, Artificial Sequence
  Cyclic GFR-binding peptide
  MOD_RES (1)..(3)..(34): Xaa is C or S
XKXSKVVMNSLQEVKPTRGVYYLITLPELDQPVX

SEQ ID NO: 50171 - protein, 29 aa, Artificial Sequence
  Cyclic GFR-binding peptide
  MOD_RES (2)..(2): Xaa is C or S
KXSRVIMRYKKLVKPKRGVFYLISIANLA

SEQ ID NO: 50172 - protein, 26 aa, Artificial Sequence
  Cyclic GFR-binding peptide
GEVVMDEYQKYVVKENEDIFLMSIPS

SEQ ID NO: 50173 - protein, 26 aa, Artificial Sequence
  Cyclic GFR-binding peptide
MRYKKLVKPTRGVFYLISIANLDQPV

SEQ ID NO: 50174 - protein, 31 aa, Artificial Sequence; identical to SEQ ID NO: 16434
  Cyclic GFR-binding peptide
  MOD_RES (1)..(3): Xaa is C or S

SEQ ID NO: 50175 - protein, 36 aa, Artificial Sequence; identical to SEQ ID NO: 16435
  Cyclic GFR-binding peptide
  MOD_RES (1)..(3)..(35)..(36): Xaa is C or S

SEQ ID NO: 50176 - protein, 22 aa, Artificial Sequence
  Cyclic GFR-binding peptide
RYKKLIVNSSDDFYLVSIANLK

SEQ ID NO: 50177 - protein, 26 aa, Artificial Sequence
  Cyclic GFR-binding peptide
SRVIMNSLQEVKPKRGVYYLITLPEL

SEQ ID NO: 50178 - protein, 24 aa, Artificial Sequence
  Cyclic GFR-binding peptide
ENSLQEVVKDYEDYYLMTLPELET

SEQ ID NO: 50179 - protein, 26 aa, Artificial Sequence
  Cyclic GFR-binding peptide
VIMNSLQEIKPTKGIYYVIPLPELDQ

SEQ ID NO: 50180 - protein, 33 aa, Artificial Sequence; identical to SEQ ID NO: 16442
  Cyclic GFR-binding peptide
  MOD_RES (27)..(28): Xaa is C or S

SEQ ID NO: 50181 - protein, 31 aa, Artificial Sequence; identical to SEQ ID NO: 6012
  Cyclic GFR-binding peptide
  MOD_RES (26)..(27): Xaa is C or S

SEQ ID NO: 50182 - protein, 30 aa, Artificial Sequence; identical to SEQ ID NO: 16445
  Cyclic GFR-binding peptide

SEQ ID NO: 50183 - protein, 22 aa, Artificial Sequence
  Cyclic GFR-binding peptide
ENSLQEVVKDYEDYYLMTLPEL

SEQ ID NO: 50184 - protein, 21 aa, Artificial Sequence
  Cyclic GFR-binding peptide
RYKKLVKPTRGVFYLISIANL

SEQ ID NO: 50185 - protein, 26 aa, Artificial Sequence
  Cyclic GFR-binding peptide
  MOD_RES (26)..(26): Xaa is C or S
RYKKLIVNSSDDFYLVSIANLKTPAX

SEQ ID NO: 50186 - protein, 38 aa, Artificial Sequence; identical to SEQ ID NO: 16449
  Cyclic GFR-binding peptide
  MOD_RES (1)..(33)..(34): Xaa is C or S

SEQ ID NO: 50187 - protein, 38 aa, Artificial Sequence; identical to SEQ ID NO: 16450
  Cyclic GFR-binding peptide
  MOD_RES (1)..(3)..(35)..(36): Xaa is C or S

SEQ ID NO: 50188 - protein, 38 aa, Artificial Sequence; identical to SEQ ID NO: 16451
  Cyclic GFR-binding peptide
  MOD_RES (1)..(33): Xaa is C or S

SEQ ID NO: 50189 - protein, 33 aa, Artificial Sequence; identical to SEQ ID NO: 16452
  Cyclic GFR-binding peptide
  MOD_RES (2)..(4): Xaa is C or S

SEQ ID NO: 50190 - protein, 34 aa, Artificial Sequence; identical to SEQ ID NO: 16453
  Cyclic GFR-binding peptide
  MOD_RES (29)..(30): Xaa is C or S

SEQ ID NO: 50191 - protein, 36 aa, Artificial Sequence; identical to SEQ ID NO: 6024
  Cyclic GFR-binding peptide
  MOD_RES (32)..(32): Xaa is C or S

SEQ ID NO: 50192 - protein, 32 aa, Artificial Sequence; identical to SEQ ID NO: 16455
  Cyclic GFR-binding peptide
  MOD_RES (1)..(3): Xaa is C or S

SEQ ID NO: 50193 - protein, 38 aa, Artificial Sequence; identical to SEQ ID NO: 6025
  Cyclic GFR-binding peptide
  MOD_RES (1)..(3)..(35): Xaa is C or S

SEQ ID NO: 50194 - protein, 37 aa, Artificial Sequence; identical to SEQ ID NO: 16457
  Cyclic GFR-binding peptide
  MOD_RES (32)..(33): Xaa is C or S

SEQ ID NO: 50195 - protein, 38 aa, Artificial Sequence; identical to SEQ ID NO: 6026
  Cyclic GFR-binding peptide
  MOD_RES (2)..(34)..(35): Xaa is C or S

SEQ ID NO: 50196 - protein, 28 aa, Artificial Sequence
  Cyclic GFR-binding peptide
  MOD_RES (26)..(27): Xaa is C or S
RYKKLIKPTKGIFYLISIANLDQSVXXP

SEQ ID NO: 50197 - protein, 26 aa, Artificial Sequence
  Cyclic GFR-binding peptide
EVVMERYKKLVVKDYEDFYLMSIANL

SEQ ID NO: 50198 - protein, 29 aa, Artificial Sequence
  Cyclic GFR-binding peptide
  MOD_RES (1)..(3): Xaa is C or S
XGXGEVVMERYKKLVVKDYEDFYLMSIAN

SEQ ID NO: 50199 - protein, 28 aa, Artificial Sequence
  Cyclic GFR-binding peptide
VVMNNSLQEIVNSSDDYYLVTLPELQTP

SEQ ID NO: 50200 - protein, 38 aa, Artificial Sequence; identical to SEQ ID NO: 16470
  Cyclic GFR-binding peptide
  MOD_RES (2)..(4)..(35)..(36): Xaa is C or S

SEQ ID NO: 50201 - protein, 32 aa, Artificial Sequence; identical to SEQ ID NO: 16472
  Cyclic GFR-binding peptide
  MOD_RES (1)..(3): Xaa is C or S

SEQ ID NO: 50202 - protein, 23 aa, Artificial Sequence
  Cyclic GFR-binding peptide
VIMEYQKYIKPTKGIIFLISIPS

SEQ ID NO: 50203 - protein, 33 aa, Artificial Sequence; identical to SEQ ID NO: 16476
  Cyclic GFR-binding peptide
  MOD_RES (1)..(3): Xaa is C or S

SEQ ID NO: 50204 - protein, 23 aa, Artificial Sequence
  Cyclic GFR-binding peptide
DNSLQEVVKENEDYYVMPLPELE

SEQ ID NO: 50205 - protein, 22 aa, Artificial Sequence
  Cyclic GFR-binding peptide
IMRYKKLIKPTKGIFYLISIAN

SEQ ID NO: 50206 - protein, 37 aa, Artificial Sequence; identical to SEQ ID NO: 16480
  Cyclic GFR-binding peptide
  MOD_RES (1)..(3)..(35)..(36): Xaa is C or S

SEQ ID NO: 50207 - protein, 37 aa, Artificial Sequence; identical to SEQ ID NO: 16481
  Cyclic GFR-binding peptide
  MOD_RES (1)..(3)..(35)..(36): Xaa is C or S

SEQ ID NO: 50208 - protein, 33 aa, Artificial Sequence; identical to SEQ ID NO: 16482
  Cyclic GFR-binding peptide
  MOD_RES (2)..(2): Xaa is C or S

SEQ ID NO: 50209 - protein, 28 aa, Artificial Sequence
  Cyclic GFR-binding peptide
  MOD_RES (1)..(1): Xaa is C or S
XSKVVMEYQKYVKPTRGVIFLISIPSLD

SEQ ID NO: 50210 - protein, 39 aa, Artificial Sequence; identical to SEQ ID NO: 6085
  Cyclic GFR-binding peptide
  MOD_RES (2)..(34): Xaa is C or S

SEQ ID NO: 50211 - protein, 23 aa, Artificial Sequence
  Cyclic GFR-binding peptide
ERYKKLVVKDYEDFYLMSIANLE

SEQ ID NO: 50212 - protein, 37 aa, Artificial Sequence; identical to SEQ ID NO: 16491
  Cyclic GFR-binding peptide
  MOD_RES (2)..(34): Xaa is C or S

SEQ ID NO: 50213 - protein, 31 aa, Artificial Sequence; identical to SEQ ID NO: 6090
  Cyclic GFR-binding peptide
  MOD_RES (1)..(3): Xaa is C or S

SEQ ID NO: 50214 - protein, 35 aa, Artificial Sequence; identical to SEQ ID NO: 6091
  Cyclic GFR-binding peptide
  MOD_RES (1)..(3)..(35): Xaa is C or S

SEQ ID NO: 50215 - protein, 38 aa, Artificial Sequence; identical to SEQ ID NO: 16495
  Cyclic GFR-binding peptide
  MOD_RES (1)..(33)..(34): Xaa is C or S

SEQ ID NO: 50216 - protein, 32 aa, Artificial Sequence; identical to SEQ ID NO: 16496
  Cyclic GFR-binding peptide
  MOD_RES (30)..(30): Xaa is C or S

SEQ ID NO: 50217 - protein, 33 aa, Artificial Sequence; identical to SEQ ID NO: 6096
  Cyclic GFR-binding peptide
  MOD_RES (30)..(31): Xaa is C or S

SEQ ID NO: 50218 - protein, 32 aa, Artificial Sequence; identical to SEQ ID NO: 16498
  Cyclic GFR-binding peptide
  MOD_RES (2)..(2): Xaa is C or S

SEQ ID NO: 50219 - protein, 33 aa, Artificial Sequence; identical to SEQ ID NO: 16499
  Cyclic GFR-binding peptide
  MOD_RES (28)..(29): Xaa is C or S

SEQ ID NO: 50220 - protein, 32 aa, Artificial Sequence; identical to SEQ ID NO: 16502
  Cyclic GFR-binding peptide
  MOD_RES (29)..(30): Xaa is C or S

SEQ ID NO: 50221 - protein, 28 aa, Artificial Sequence
  Cyclic GFR-binding peptide
  MOD_RES (2)..(2): Xaa is C or S
GXSEVVMDRYKKLVVNNASDFYLISIAN

SEQ ID NO: 50222 - protein, 31 aa, Artificial Sequence; identical to SEQ ID NO: 16504
  Cyclic GFR-binding peptide
  MOD_RES (1)..(3): Xaa is C or S

SEQ ID NO: 50223 - protein, 39 aa, Artificial Sequence; identical to SEQ ID NO: 16506
  Cyclic GFR-binding peptide
  MOD_RES (1)..(3)..(35)..(36): Xaa is C or S

SEQ ID NO: 50224 - protein, 25 aa, Artificial Sequence
  Cyclic GFR-binding peptide
VVMEYQKYVKPTRGVIFLISIPSLD

SEQ ID NO: 50225 - protein, 38 aa, Artificial Sequence; identical to SEQ ID NO: 16509
  Cyclic GFR-binding peptide
  MOD_RES (1)..(3)..(35)..(36): Xaa is C or S

SEQ ID NO: 50226 - protein, 26 aa, Artificial Sequence
  Cyclic GFR-binding peptide
MNRYKKLIVNSSDDFYLVSIANLKTP

SEQ ID NO: 50227 - protein, 24 aa, Artificial Sequence
  Cyclic GFR-binding peptide
IMRYKKLVKPKRGVFYLISIANLA

SEQ ID NO: 50228 - protein, 29 aa, Artificial Sequence
  Cyclic GFR-binding peptide
  MOD_RES (1)..(3): Xaa is C or S
XGXARVVMNNSLQEIVNSSDDYYVVPLPE

SEQ ID NO: 50229 - protein, 28 aa, Artificial Sequence
  Cyclic GFR-binding peptide
VMERYKKLVVKDYEDFYLMSIANLETPV

SEQ ID NO: 50230 - protein, 37 aa, Artificial Sequence; identical to SEQ ID NO: 16514
  Cyclic GFR-binding peptide
  MOD_RES (1)..(3)..(35)..(36): Xaa is C or S

SEQ ID NO: 50231 - protein, 24 aa, Artificial Sequence
  Cyclic GFR-binding peptide
VVMENSLQEVVKDYEDYYVMPLPE

SEQ ID NO: 50232 - protein, 29 aa, Artificial Sequence
  Cyclic GFR-binding peptide
KVIMNSLQEIKPTKGIYYLITLPELDQSV

SEQ ID NO: 50233 - protein, 25 aa, Artificial Sequence
  Cyclic GFR-binding peptide
NSLQEIKPTKGIYYVIPLPELDQSV

SEQ ID NO: 50234 - protein, 35 aa, Artificial Sequence; identical to SEQ ID NO: 16519
  Cyclic GFR-binding peptide
  MOD_RES (30)..(31): Xaa is C or S

SEQ ID NO: 50235 - protein, 36 aa, Artificial Sequence; identical to SEQ ID NO: 16520
  Cyclic GFR-binding peptide
  MOD_RES (2)..(33)..(34): Xaa is C or S

SEQ ID NO: 50236 - protein, 36 aa, Artificial Sequence; identical to SEQ ID NO: 16522
  Cyclic GFR-binding peptide
  MOD_RES (1)..(3)..(35)..(36): Xaa is C or S

SEQ ID NO: 50237 - protein, 22 aa, Artificial Sequence
  Cyclic GFR-binding peptide
EEYQKYVVKDYEDIFLMSIPSL

SEQ ID NO: 50238 - protein, 30 aa, Artificial Sequence; identical to SEQ ID NO: 16524
  Cyclic GFR-binding peptide
  MOD_RES (1)..(3): Xaa is C or S

SEQ ID NO: 50239 - protein, 20 aa, Artificial Sequence
  Cyclic GFR-binding peptide
RYKKLVKPTRGVFYLISIAN

SEQ ID NO: 50240 - protein, 29 aa, Artificial Sequence
  Cyclic GFR-binding peptide
  MOD_RES (26)..(27): Xaa is C or S
EYQKYIKPTKGIIFLISIPSLDQSVXXPS

SEQ ID NO: 50241 - protein, 36 aa, Artificial Sequence; identical to SEQ ID NO: 16527
  Cyclic GFR-binding peptide
  MOD_RES (1)..(33): Xaa is C or S

SEQ ID NO: 50242 - protein, 24 aa, Artificial Sequence
  Cyclic GFR-binding peptide
ENSLQEVVKDYEDYYVMPLPELET

SEQ ID NO: 50243 - protein, 23 aa, Artificial Sequence
  Cyclic GFR-binding peptide
VMDNSLQEVVKENEDYYVMPLPE

SEQ ID NO: 50244 - protein, 24 aa, Artificial Sequence
  Cyclic GFR-binding peptide
MDEYQKYVVKENEDIFLMSIPSLE

SEQ ID NO: 50245 - protein, 37 aa, Artificial Sequence; identical to SEQ ID NO: 16533
  Cyclic GFR-binding peptide
  MOD_RES (31)..(32): Xaa is C or S

SEQ ID NO: 50246 - protein, 27 aa, Artificial Sequence
  Cyclic GFR-binding peptide
  MOD_RES (27)..(27): Xaa is C or S
MRYKKLVKPKRGVFYLISIANLAQPVX

SEQ ID NO: 50247 - protein, 26 aa, Artificial Sequence
  Cyclic GFR-binding peptide
RVIMRYKKLVKPKRGVFYLISIANLA

SEQ ID NO: 50248 - protein, 31 aa, Artificial Sequence; identical to SEQ ID NO: 16537
  Cyclic GFR-binding peptide
  MOD_RES (29)..(30): Xaa is C or S

SEQ ID NO: 50249 - protein, 36 aa, Artificial Sequence
  Cyclic GFR-binding peptide
  MOD_RES (31)..(32): Xaa is C or S
SKVVMNSLQEVKPTRGVYYLITLPELDQPVXXPSAS

SEQ ID NO: 50250 - protein, 31 aa, Artificial Sequence
  Cyclic GFR-binding peptide
  MOD_RES (2)..(2): Xaa is C or S
KXSKVVMNSLQEVKPTRGVYYLITLPELDQP

SEQ ID NO: 50251 - protein, 30 aa, Artificial Sequence; identical to SEQ ID NO: 16538
  Cyclic GFR-binding peptide
  MOD_RES (1)..(3): Xaa is C or S

SEQ ID NO: 50252 - protein, 27 aa, Artificial Sequence
  Cyclic GFR-binding peptide
VMDNSLQEVVNNASDYYVIPLPELRTP

SEQ ID NO: 50253 - protein, 32 aa, Artificial Sequence; identical to SEQ ID NO: 6142
  Cyclic GFR-binding peptide
  MOD_RES (2)..(2): Xaa is C or S

SEQ ID NO: 50254 - protein, 37 aa, Artificial Sequence; identical to SEQ ID NO: 16543
  Cyclic GFR-binding peptide
  MOD_RES (1)..(33)..(34): Xaa is C or S

SEQ ID NO: 50255 - protein, 37 aa, Artificial Sequence; identical to SEQ ID NO: 16546
  Cyclic GFR-binding peptide
  MOD_RES (1)..(3)..(34)..(35): Xaa is C or S

SEQ ID NO: 50256 - protein, 34 aa, Artificial Sequence; identical to SEQ ID NO: 16547
  Cyclic GFR-binding peptide
  MOD_RES (2)..(4): Xaa is C or S

SEQ ID NO: 50257 - protein, 25 aa, Artificial Sequence
  Cyclic GFR-binding peptide
EVVMDEYQKYVVKENEDIFLMSIPS

SEQ ID NO: 50258 - protein, 29 aa, Artificial Sequence
  Cyclic GFR-binding peptide
KVVMEYQKYVKPTRGVIFLISIPSLDQPV

SEQ ID NO: 50259 - protein, 23 aa, Artificial Sequence
  Cyclic GFR-binding peptide
DNSLQEVVKENEDYYLMTLPELE

SEQ ID NO: 50260 - protein, 33 aa, Artificial Sequence; identical to SEQ ID NO: 16553
  Cyclic GFR-binding peptide
  MOD_RES (28)..(29): Xaa is C or S

SEQ ID NO: 50261 - protein, 30 aa, Artificial Sequence; identical to SEQ ID NO: 16554
  Cyclic GFR-binding peptide
  MOD_RES (29)..(30): Xaa is C or S

SEQ ID NO: 50262 - protein, 36 aa, Artificial Sequence; identical to SEQ ID NO: 6156
  Cyclic GFR-binding peptide
  MOD_RES (1)..(33)..(34): Xaa is C or S

SEQ ID NO: 50263 - protein, 30 aa, Artificial Sequence; identical to SEQ ID NO: 16556
  Cyclic GFR-binding peptide
  MOD_RES (28)..(28): Xaa is C or S

SEQ ID NO: 50264 - protein, 32 aa, Artificial Sequence; identical to SEQ ID NO: 16557
  Cyclic GFR-binding peptide
  MOD_RES (29)..(30): Xaa is C or S

SEQ ID NO: 50265 - protein, 34 aa, Artificial Sequence; identical to SEQ ID NO: 6159
  Cyclic GFR-binding peptide
  MOD_RES (30)..(31): Xaa is C or S

SEQ ID NO: 50266 - protein, 35 aa, Artificial Sequence; identical to SEQ ID NO: 16560
  Cyclic GFR-binding peptide
  MOD_RES (2)..(34)..(35): Xaa is C or S

SEQ ID NO: 50267 - protein, 32 aa, Artificial Sequence; identical to SEQ ID NO: 6161
  Cyclic GFR-binding peptide
  MOD_RES (27)..(28): Xaa is C or S

SEQ ID NO: 50268 - protein, 28 aa, Artificial Sequence
  Cyclic GFR-binding peptide
  MOD_RES (27)..(27): Xaa is C or S
NNSLQEIVNSSDDYYLVTLPELKTPAXT

SEQ ID NO: 50269 - protein, 29 aa, Artificial Sequence
  Cyclic GFR-binding peptide
  MOD_RES (1)..(1): Xaa is C or S
XGEVVMDEYQKYVVKENEDIFLMSIPSLE

SEQ ID NO: 50270 - protein, 28 aa, Artificial Sequence
  Cyclic GFR-binding peptide
  MOD_RES (27)..(27): Xaa is C or S
NEYQKYIVNSSDDIFLVSIPSLKTPAXT

SEQ ID NO: 50271 - protein, 30 aa, Artificial Sequence; identical to SEQ ID NO: 16566
  Cyclic GFR-binding peptide
  MOD_RES (29)..(30): Xaa is C or S

SEQ ID NO: 50272 - protein, 23 aa, Artificial Sequence
  Cyclic GFR-binding peptide
VMNSLQEVKPTRGVYYVIPLPEL

SEQ ID NO: 50273 - protein, 34 aa, Artificial Sequence; identical to SEQ ID NO: 16568
  Cyclic GFR-binding peptide
  MOD_RES (32)..(33): Xaa is C or S

SEQ ID NO: 50274 - protein, 24 aa, Artificial Sequence
  Cyclic GFR-binding peptide
VMNNSLQEIVNSSDDYYLVTLPEL

SEQ ID NO: 50275 - protein, 31 aa, Artificial Sequence; identical to SEQ ID NO: 16570
  Cyclic GFR-binding peptide

SEQ ID NO: 50276 - protein, 34 aa, Artificial Sequence
  Cyclic GFR-binding peptide
  MOD_RES (28)..(29): Xaa is C or S
VMNSLQEVKPTRGVYYLITLPELDQPVXXPSASA

SEQ ID NO: 50277 - protein, 29 aa, Artificial Sequence
  Cyclic GFR-binding peptide
GEVVMENSLQEVVKDYEDYYVMPLPELET

SEQ ID NO: 50278 - protein, 22 aa, Artificial Sequence
  Cyclic GFR-binding peptide
NSLQEVKPTRGVYYVIPLPELD

SEQ ID NO: 50279 - protein, 33 aa, Artificial Sequence; identical to SEQ ID NO: 16574
  Cyclic GFR-binding peptide
  MOD_RES (27)..(28): Xaa is C or S

SEQ ID NO: 50280 - protein, 29 aa, Artificial Sequence
  Cyclic GFR-binding peptide
  MOD_RES (29)..(29): Xaa is C or S
VMENSLQEVVKDYEDYYVMPLPELETPVX

SEQ ID NO: 50281 - protein, 31 aa, Artificial Sequence; identical to SEQ ID NO: 16577
  Cyclic GFR-binding peptide
  MOD_RES (26)..(27): Xaa is C or S

SEQ ID NO: 50282 - protein, 29 aa, Artificial Sequence
  Cyclic GFR-binding peptide
  MOD_RES (2)..(2): Xaa is C or S
KXSKVVMNSLQEVKPTRGVYYVIPLPELD

SEQ ID NO: 50283 - protein, 24 aa, Artificial Sequence
  Cyclic GFR-binding peptide
VVMNRYKKLIVNSSDDFYLVSIAN

SEQ ID NO: 50284 - protein, 28 aa, Artificial Sequence
  Cyclic GFR-binding peptide
  MOD_RES (1)..(3): Xaa is C or S
XKXSKVVMEYQKYVKPTRGVIFLISIPS

SEQ ID NO: 50285 - protein, 33 aa, Artificial Sequence
  Cyclic GFR-binding peptide
  MOD_RES (1)..(3): Xaa is C or S
XKXSKVVMNSLQEVKPTRGVYYLITLPELDQPV

SEQ ID NO: 50286 - protein, 38 aa, Artificial Sequence; identical to SEQ ID NO: 16582
  Cyclic GFR-binding peptide
  MOD_RES (32)..(32): Xaa is C or S

SEQ ID NO: 50287 - protein, 27 aa, Artificial Sequence
  Cyclic GFR-binding peptide
  MOD_RES (26)..(27): Xaa is C or S
NSLQEVKPTRGVYYVIPLPELDQPVXX

SEQ ID NO: 50288 - protein, 35 aa, Artificial Sequence; identical to SEQ ID NO: 16584
  Cyclic GFR-binding peptide
  MOD_RES (2)..(34)..(35): Xaa is C or S

SEQ ID NO: 50289 - protein, 30 aa, Artificial Sequence; identical to SEQ ID NO: 16585
  Cyclic GFR-binding peptide
  MOD_RES (29)..(30): Xaa is C or S

SEQ ID NO: 50290 - protein, 25 aa, Artificial Sequence
  Cyclic GFR-binding peptide
ENSLQEVVKDYEDYYLMTLPELETP

SEQ ID NO: 50291 - protein, 27 aa, Artificial Sequence
  Cyclic GFR-binding peptide
  MOD_RES (1)..(1): Xaa is C or S
XSKVIMEYQKYIKPTKGIIFLISIPSL

SEQ ID NO: 50292 - protein, 32 aa, Artificial Sequence; identical to SEQ ID NO: 16588
  Cyclic GFR-binding peptide
  MOD_RES (32)..(32): Xaa is C or S

SEQ ID NO: 50293 - protein, 33 aa, Artificial Sequence; identical to SEQ ID NO: 16589
  Cyclic GFR-binding peptide
  MOD_RES (27)..(28): Xaa is C or S

SEQ ID NO: 50294 - protein, 36 aa, Artificial Sequence; identical to SEQ ID NO: 6185
  Cyclic GFR-binding peptide
  MOD_RES (31)..(32): Xaa is C or S

SEQ ID NO: 50295 - protein, 30 aa, Artificial Sequence; identical to SEQ ID NO: 16593
  Cyclic GFR-binding peptide
  MOD_RES (27)..(28): Xaa is C or S

SEQ ID NO: 50296 - protein, 39 aa, Artificial Sequence; identical to SEQ ID NO: 16594
  Cyclic GFR-binding peptide
  MOD_RES (1)..(33)..(34): Xaa is C or S

SEQ ID NO: 50297 - protein, 26 aa, Artificial Sequence
  Cyclic GFR-binding peptide
  MOD_RES (1)..(1): Xaa is C or S
XSKVIMNSLQEIKPTKGIYYLITLPE

SEQ ID NO: 50298 - protein, 30 aa, Artificial Sequence; identical to SEQ ID NO: 16597
  Cyclic GFR-binding peptide
  MOD_RES (27)..(28): Xaa is C or S

SEQ ID NO: 50299 - protein, 30 aa, Artificial Sequence; identical to SEQ ID NO: 16598
  Cyclic GFR-binding peptide
  MOD_RES (27)..(28): Xaa is C or S

SEQ ID NO: 50300 - protein, 34 aa, Artificial Sequence; identical to SEQ ID NO: 16600
  Cyclic GFR-binding peptide
  MOD_RES (1)..(3)..(34): Xaa is C or S

SEQ ID NO: 50301 - protein, 27 aa, Artificial Sequence
  Cyclic GFR-binding peptide
VVMDNSLQEVVKENEDYYLMTLPELET

SEQ ID NO: 50302 - protein, 29 aa, Artificial Sequence
  Cyclic GFR-binding peptide
  MOD_RES (2)..(2): Xaa is C or S
GXSRVVMNNSLQEIVNSSDDYYVVPLPEL

SEQ ID NO: 50303 - protein, 34 aa, Artificial Sequence; identical to SEQ ID NO: 16603
  Cyclic GFR-binding peptide
  MOD_RES (1)..(33)..(34): Xaa is C or S

SEQ ID NO: 50304 - protein, 24 aa, Artificial Sequence
  Cyclic GFR-binding peptide
KVVMRYKKLVKPTRGVFYLISIAN

SEQ ID NO: 50305 - protein, 30 aa, Artificial Sequence; identical to SEQ ID NO: 16605
  Cyclic GFR-binding peptide
  MOD_RES (26)..(27): Xaa is C or S

SEQ ID NO: 50306 - protein, 25 aa, Artificial Sequence
  Cyclic GFR-binding peptide
VMNSLQEVKPTRGVYYLITLPELDQ

SEQ ID NO: 50307 - protein, 25 aa, Artificial Sequence
  Cyclic GFR-binding peptide
IMNSLQEIKPTKGIYYLITLPELDQ

SEQ ID NO: 50308 - protein, 26 aa, Artificial Sequence
  Cyclic GFR-binding peptide
VIMNSLQEVKPKRGVYYLITLPELAQ

SEQ ID NO: 50309 - protein, 34 aa, Artificial Sequence; identical to SEQ ID NO: 6204
  Cyclic GFR-binding peptide
  MOD_RES (30)..(30): Xaa is C or S

SEQ ID NO: 50310 - protein, 38 aa, Artificial Sequence; identical to SEQ ID NO: 16611
  Cyclic GFR-binding peptide
  MOD_RES (2)..(4)..(35)..(36): Xaa is C or S

SEQ ID NO: 50311 - protein, 33 aa, Artificial Sequence; identical to SEQ ID NO: 6206
  Cyclic GFR-binding peptide
  MOD_RES (27)..(27): Xaa is C or S

SEQ ID NO: 50312 - protein, 31 aa, Artificial Sequence; identical to SEQ ID NO: 16613
  Cyclic GFR-binding peptide
  MOD_RES (27)..(28): Xaa is C or S

SEQ ID NO: 50313 - protein, 39 aa, Artificial Sequence; identical to SEQ ID NO: 16614
  Cyclic GFR-binding peptide
  MOD_RES (1)..(33)..(34): Xaa is C or S

SEQ ID NO: 50314 - protein, 36 aa, Artificial Sequence; identical to SEQ ID NO: 16615
  Cyclic GFR-binding peptide
  MOD_RES (1)..(3)..(35)..(36): Xaa is C or S

SEQ ID NO: 50315 - protein, 28 aa, Artificial Sequence
  Cyclic GFR-binding peptide
  MOD_RES (2)..(2): Xaa is C or S
KXSKVIMNSLQEIKPTKGIYYVIPLPEL

SEQ ID NO: 50316 - protein, 28 aa, Artificial Sequence
  Cyclic GFR-binding peptide
VMDRYKKLVVNNASDFYLISIANLRTPV

SEQ ID NO: 50317 - protein, 27 aa, Artificial Sequence
  Cyclic GFR-binding peptide
EVVMDRYKKLVVNNASDFYLISIANLR

SEQ ID NO: 50318 - protein, 30 aa, Artificial Sequence; identical to SEQ ID NO: 6219
  Cyclic GFR-binding peptide

SEQ ID NO: 50319 - protein, 29 aa, Artificial Sequence
  Cyclic GFR-binding peptide
  MOD_RES (1)..(1): Xaa is C or S
XARVVMNEYQKYIVNSSDDIFLVSIPSLQ

SEQ ID NO: 50320 - protein, 37 aa, Artificial Sequence; identical to SEQ ID NO: 16626
  Cyclic GFR-binding peptide
  MOD_RES (32)..(33): Xaa is C or S

SEQ ID NO: 50321 - protein, 34 aa, Artificial Sequence; identical to SEQ ID NO: 16628
  Cyclic GFR-binding peptide
  MOD_RES (1)..(3): Xaa is C or S

SEQ ID NO: 50322 - protein, 25 aa, Artificial Sequence
  Cyclic GFR-binding peptide
NSLQEVVKDYEDYYLMTLPELETPV

SEQ ID NO: 50323 - protein, 24 aa, Artificial Sequence
  Cyclic GFR-binding peptide
VIMNSLQEVKPKRGVYYLITLPEL

SEQ ID NO: 50324 - protein, 26 aa, Artificial Sequence
  Cyclic GFR-binding peptide
IMRYKKLVKPKRGVFYLISIANLAQP

SEQ ID NO: 50325 - protein, 25 aa, Artificial Sequence
  Cyclic GFR-binding peptide
VMNEYQKYIVNSSDDIFLVSIPSLK

SEQ ID NO: 50326 - protein, 37 aa, Artificial Sequence; identical to SEQ ID NO: 16634
  Cyclic GFR-binding peptide
  MOD_RES (2)..(4)..(36): Xaa is C or S

SEQ ID NO: 50327 - protein, 25 aa, Artificial Sequence
  Cyclic GFR-binding peptide
MDNSLQEVVKENEDYYLMTLPELET

SEQ ID NO: 50328 - protein, 33 aa, Artificial Sequence
  Cyclic GFR-binding peptide
  MOD_RES (1)..(32)..(33): Xaa is C or S
XSKVVMNSLQEVKPTRGVYYLITLPELDQPVXX

SEQ ID NO: 50329 - protein, 29 aa, Artificial Sequence
  Cyclic GFR-binding peptide
  MOD_RES (29)..(29): Xaa is C or S
VMDRYKKLVVKENEDFYLMSIANLETPVX

SEQ ID NO: 50330 - protein, 37 aa, Artificial Sequence; identical to SEQ ID NO: 16637
  Cyclic GFR-binding peptide
  MOD_RES (2)..(34): Xaa is C or S

SEQ ID NO: 50331 - protein, 33 aa, Artificial Sequence; identical to SEQ ID NO: 6234
  Cyclic GFR-binding peptide
  MOD_RES (1)..(3): Xaa is C or S

SEQ ID NO: 50332 - protein, 39 aa, Artificial Sequence; identical to SEQ ID NO: 16639
  Cyclic GFR-binding peptide
  MOD_RES (2)..(33)..(34): Xaa is C or S

SEQ ID NO: 50333 - protein, 29 aa, Artificial Sequence
  Cyclic GFR-binding peptide
SKVIMEYQKYIKPTKGIIFLISIPSLDQS

SEQ ID NO: 50334 - protein, 28 aa, Artificial Sequence
  Cyclic GFR-binding peptide
EVVMDNSLQEVVKENEDYYVMPLPELET

SEQ ID NO: 50335 - protein, 24 aa, Artificial Sequence
  Cyclic GFR-binding peptide
MDNSLQEVVNNASDYYLITLPELR

SEQ ID NO: 50336 - protein, 35 aa, Artificial Sequence; identical to SEQ ID NO: 16647
  Cyclic GFR-binding peptide
  MOD_RES (29)..(29): Xaa is C or S

SEQ ID NO: 50337 - protein, 22 aa, Artificial Sequence
  Cyclic GFR-binding peptide
NSLQEVVKDYEDYYVMPLPELE

SEQ ID NO: 50338 - protein, 31 aa, Artificial Sequence; identical to SEQ ID NO: 16650
  Cyclic GFR-binding peptide
  MOD_RES (29)..(30): Xaa is C or S

SEQ ID NO: 50339 - protein, 30 aa, Artificial Sequence; identical to SEQ ID NO: 16651
  Cyclic GFR-binding peptide
  MOD_RES (1)..(1): Xaa is C or S

SEQ ID NO: 50340 - protein, 37 aa, Artificial Sequence; identical to SEQ ID NO: 16652
  Cyclic GFR-binding peptide
  MOD_RES (2)..(4)..(36)..(37): Xaa is C or S

SEQ ID NO: 50341 - protein, 28 aa, Artificial Sequence
  Cyclic GFR-binding peptide
  MOD_RES (1)..(1): Xaa is C or S
XSEVVMDRYKKLVVNNASDFYLISIANL

SEQ ID NO: 50342 - protein, 36 aa, Artificial Sequence; identical to SEQ ID NO: 6252
  Cyclic GFR-binding peptide
  MOD_RES (30)..(30): Xaa is C or S

SEQ ID NO: 50343 - protein, 34 aa, Artificial Sequence; identical to SEQ ID NO: 6254
  Cyclic GFR-binding peptide
  MOD_RES (32)..(33): Xaa is C or S

SEQ ID NO: 50344 - protein, 35 aa, Artificial Sequence; identical to SEQ ID NO: 16657
  Cyclic GFR-binding peptide
  MOD_RES (30)..(31): Xaa is C or S

SEQ ID NO: 50345 - protein, 35 aa, Artificial Sequence; identical to SEQ ID NO: 16658
  Cyclic GFR-binding peptide
  MOD_RES (2)..(34)..(35): Xaa is C or S

SEQ ID NO: 50346 - protein, 38 aa, Artificial Sequence; identical to SEQ ID NO: 16659
  Cyclic GFR-binding peptide
  MOD_RES (1)..(3)..(35)..(36): Xaa is C or S

SEQ ID NO: 50347 - protein, 37 aa, Artificial Sequence; identical to SEQ ID NO: 6259
  Cyclic GFR-binding peptide
  MOD_RES (1)..(33)..(34): Xaa is C or S

SEQ ID NO: 50348 - protein, 30 aa, Artificial Sequence; identical to SEQ ID NO: 6261
  Cyclic GFR-binding peptide
  MOD_RES (27)..(28): Xaa is C or S

SEQ ID NO: 50349 - protein, 22 aa, Artificial Sequence
  Cyclic GFR-binding peptide
IMNSLQEVKPKRGVYYLITLPE

SEQ ID NO: 50350 - protein, 38 aa, Artificial Sequence; identical to SEQ ID NO: 6268
  Cyclic GFR-binding peptide
  MOD_RES (32)..(32): Xaa is C or S

SEQ ID NO: 50351 - protein, 32 aa, Artificial Sequence; identical to SEQ ID NO: 6271
  Cyclic GFR-binding peptide
  MOD_RES (27)..(28): Xaa is C or S

SEQ ID NO: 50352 - protein, 31 aa, Artificial Sequence; identical to SEQ ID NO: 16669
  Cyclic GFR-binding peptide
  MOD_RES (30)..(31): Xaa is C or S

SEQ ID NO: 50353 - protein, 26 aa, Artificial Sequence
  Cyclic GFR-binding peptide
VIMRYKKLIKPTKGIFYLISIANLDQ

SEQ ID NO: 50354 - protein, 31 aa, Artificial Sequence; identical to SEQ ID NO: 6276
  Cyclic GFR-binding peptide
  MOD_RES (2)..(2): Xaa is C or S

SEQ ID NO: 50355 - protein, 31 aa, Artificial Sequence; identical to SEQ ID NO: 16673
  Cyclic GFR-binding peptide
  MOD_RES (28)..(29): Xaa is C or S

SEQ ID NO: 50356 - protein, 40 aa, Artificial Sequence; identical to SEQ ID NO: 6282
  Cyclic GFR-binding peptide
  MOD_RES (2)..(34)..(35): Xaa is C or S

SEQ ID NO: 50357 - protein, 29 aa, Artificial Sequence
  Cyclic GFR-binding peptide
  MOD_RES (1)..(3): Xaa is C or S
XGXGEVVMDRYKKLVVKENEDFYLMSIAN

SEQ ID NO: 50358 - protein, 34 aa, Artificial Sequence; identical to SEQ ID NO: 16680
  Cyclic GFR-binding peptide
  MOD_RES (28)..(29): Xaa is C or S

SEQ ID NO: 50359 - protein, 30 aa, Artificial Sequence; identical to SEQ ID NO: 16682
  Cyclic GFR-binding peptide
  MOD_RES (30)..(30): Xaa is C or S

SEQ ID NO: 50360 - protein, 20 aa, Artificial Sequence
  Cyclic GFR-binding peptide
RYKKLVVKDYEDFYLMSIAN

SEQ ID NO: 50361 - protein, 32 aa, Artificial Sequence; identical to SEQ ID NO: 16684
  Cyclic GFR-binding peptide
  MOD_RES (30)..(31): Xaa is C or S

SEQ ID NO: 50362 - protein, 28 aa, Artificial Sequence
  Cyclic GFR-binding peptide
VMNNSLQEIVNSSDDYYVVPLPELKTPA

SEQ ID NO: 50363 - protein, 30 aa, Artificial Sequence; identical to SEQ ID NO: 6298
  Cyclic GFR-binding peptide

SEQ ID NO: 50364 - protein, 39 aa, Artificial Sequence; identical to SEQ ID NO: 16689
  Cyclic GFR-binding peptide
  MOD_RES (1)..(33)..(34): Xaa is C or S

SEQ ID NO: 50365 - protein, 25 aa, Artificial Sequence
  Cyclic GFR-binding peptide
EEYQKYVVKDYEDIFLMSIPSLETP

SEQ ID NO: 50366 - protein, 28 aa, Artificial Sequence
  Cyclic GFR-binding peptide
  MOD_RES (1)..(1): Xaa is C or S
XSRVVMNEYQKYIVNSSDDIFLVSIPSL

SEQ ID NO: 50367 - protein, 36 aa, Artificial Sequence; identical to SEQ ID NO: 16692
  Cyclic GFR-binding peptide
  MOD_RES (2)..(4)..(35)..(36): Xaa is C or S

SEQ ID NO: 50368 - protein, 29 aa, Artificial Sequence
  Cyclic GFR-binding peptide
  MOD_RES (29)..(29): Xaa is C or S
VMDNSLQEVVNNASDYYVIPLPELRTPVX

SEQ ID NO: 50369 - protein, 23 aa, Artificial Sequence
  Cyclic GFR-binding peptide
DEYQKYVVKENEDIFLMSIPSLE

SEQ ID NO: 50370 - protein, 32 aa, Artificial Sequence; identical to SEQ ID NO: 6311
  Cyclic GFR-binding peptide
  MOD_RES (28)..(29): Xaa is C or S

SEQ ID NO: 50371 - protein, 23 aa, Artificial Sequence
  Cyclic GFR-binding peptide
RYKKLIKPTKGIFYLISIANLDQ

SEQ ID NO: 50372 - protein, 31 aa, Artificial Sequence; identical to SEQ ID NO: 6316
  Cyclic GFR-binding peptide
  MOD_RES (2)..(4): Xaa is C or S

SEQ ID NO: 50373 - protein, 30 aa, Artificial Sequence; identical to SEQ ID NO: 16704
  Cyclic GFR-binding peptide
  MOD_RES (2)..(2): Xaa is C or S

SEQ ID NO: 50374 - protein, 28 aa, Artificial Sequence
  Cyclic GFR-binding peptide
SRVIMEYQKYVKPKRGVIFLISIPSLAQ

SEQ ID NO: 50375 - protein, 32 aa, Artificial Sequence; identical to SEQ ID NO: 16707
  Cyclic GFR-binding peptide
  MOD_RES (32)..(32): Xaa is C or S

SEQ ID NO: 50376 - protein, 25 aa, Artificial Sequence
  Cyclic GFR-binding peptide
EVVMDNSLQEVVNNASDYYVIPLPE

SEQ ID NO: 50377 - protein, 21 aa, Artificial Sequence
  Cyclic GFR-binding peptide
MEYQKYVKPKRGVIFLISIPS

SEQ ID NO: 50378 - protein, 30 aa, Artificial Sequence; identical to SEQ ID NO: 16711
  Cyclic GFR-binding peptide
  MOD_RES (29)..(30): Xaa is C or S

SEQ ID NO: 50379 - protein, 33 aa, Artificial Sequence; identical to SEQ ID NO: 16712
  Cyclic GFR-binding peptide
  MOD_RES (32)..(33): Xaa is C or S

SEQ ID NO: 50380 - protein, 34 aa, Artificial Sequence; identical to SEQ ID NO: 16713
  Cyclic GFR-binding peptide
  MOD_RES (31)..(32): Xaa is C or S

SEQ ID NO: 50381 - protein, 28 aa, Artificial Sequence
  Cyclic GFR-binding peptide
  MOD_RES (27)..(28): Xaa is C or S
MRYKKLVKPKRGVFYLISIANLAQPVXX

SEQ ID NO: 50382 - protein, 22 aa, Artificial Sequence
  Cyclic GFR-binding peptide
MDRYKKLVVKENEDFYLMSIAN

SEQ ID NO: 50383 - protein, 37 aa, Artificial Sequence; identical to SEQ ID NO: 16716
  Cyclic GFR-binding peptide
  MOD_RES (2)..(4)..(36)..(37): Xaa is C or S

SEQ ID NO: 50384 - protein, 38 aa, Artificial Sequence; identical to SEQ ID NO: 6333
  Cyclic GFR-binding peptide
  MOD_RES (2)..(34)..(35): Xaa is C or S

SEQ ID NO: 50385 - protein, 31 aa, Artificial Sequence; identical to SEQ ID NO: 16719
  Cyclic GFR-binding peptide
  MOD_RES (27)..(28): Xaa is C or S

SEQ ID NO: 50386 - protein, 30 aa, Artificial Sequence; identical to SEQ ID NO: 16720
  Cyclic GFR-binding peptide
  MOD_RES (28)..(29): Xaa is C or S

SEQ ID NO: 50387 - protein, 29 aa, Artificial Sequence
  Cyclic GFR-binding peptide
  MOD_RES (27)..(28): Xaa is C or S
ERYKKLVVKDYEDFYLMSIANLETPVXXA

SEQ ID NO: 50388 - protein, 31 aa, Artificial Sequence; identical to SEQ ID NO: 16722
  Cyclic GFR-binding peptide
  MOD_RES (30)..(31): Xaa is C or S

SEQ ID NO: 50389 - protein, 30 aa, Artificial Sequence; identical to SEQ ID NO: 6342
  Cyclic GFR-binding peptide
  MOD_RES (26)..(27): Xaa is C or S

SEQ ID NO: 50390 - protein, 35 aa, Artificial Sequence; identical to SEQ ID NO: 6343
  Cyclic GFR-binding peptide
  MOD_RES (2)..(4)..(35): Xaa is C or S

SEQ ID NO: 50391 - protein, 30 aa, Artificial Sequence; identical to SEQ ID NO: 16725
  Cyclic GFR-binding peptide

SEQ ID NO: 50392 - protein, 28 aa, Artificial Sequence
  Cyclic GFR-binding peptide
GEVVMDRYKKLVVKENEDFYLMSIANLE

SEQ ID NO: 50393 - protein, 38 aa, Artificial Sequence; identical to SEQ ID NO: 16729
  Cyclic GFR-binding peptide
  MOD_RES (1)..(3)..(35)..(36): Xaa is C or S

SEQ ID NO: 50394 - protein, 33 aa, Artificial Sequence; identical to SEQ ID NO: 6348
  Cyclic GFR-binding peptide
  MOD_RES (31)..(32): Xaa is C or S

SEQ ID NO: 50395 - protein, 31 aa, Artificial Sequence; identical to SEQ ID NO: 6353
  Cyclic GFR-binding peptide
  MOD_RES (27)..(28): Xaa is C or S

SEQ ID NO: 50396 - protein, 38 aa, Artificial Sequence; identical to SEQ ID NO: 6355
  Cyclic GFR-binding peptide
  MOD_RES (6)..(7): Xaa is C or S

SEQ ID NO: 50397 - protein, 30 aa, Artificial Sequence; identical to SEQ ID NO: 16736
  Cyclic GFR-binding peptide
  MOD_RES (1)..(2): Xaa is C or S

SEQ ID NO: 50398 - protein, 36 aa, Artificial Sequence; identical to SEQ ID NO: 16737
  Cyclic GFR-binding peptide
  MOD_RES (1)..(33)..(35): Xaa is C or S

SEQ ID NO: 50399 - protein, 24 aa, Artificial Sequence
  Cyclic GFR-binding peptide
QDLNAISILYFIGKTPKILKKYRM

SEQ ID NO: 50400 - protein, 29 aa, Artificial Sequence
  Cyclic GFR-binding peptide
  MOD_RES (29)..(29): Xaa is C or S
QDLNAISILYFVGRTPKVLKKYRMVVKSX

SEQ ID NO: 50401 - protein, 30 aa, Artificial Sequence; identical to SEQ ID NO: 6363
  Cyclic GFR-binding peptide
  MOD_RES (30)..(30): Xaa is C or S

SEQ ID NO: 50402 - protein, 33 aa, Artificial Sequence; identical to SEQ ID NO: 6366
  Cyclic GFR-binding peptide
  MOD_RES (32)..(32): Xaa is C or S

SEQ ID NO: 50403 - protein, 28 aa, Artificial Sequence
  Cyclic GFR-binding peptide
PQALNAISILYFVGRKPKVLKKYRMIVR

SEQ ID NO: 50404 - protein, 25 aa, Artificial Sequence
  Cyclic GFR-binding peptide
LNAISMLYFDENEKVVLKKYRDMVV

SEQ ID NO: 50405 - protein, 32 aa, Artificial Sequence; identical to SEQ ID NO: 16747
  Cyclic GFR-binding peptide
  MOD_RES (6)..(7): Xaa is C or S

SEQ ID NO: 50406 - protein, 35 aa, Artificial Sequence; identical to SEQ ID NO: 16749
  Cyclic GFR-binding peptide
  MOD_RES (2)..(3)..(35): Xaa is C or S

SEQ ID NO: 50407 - protein, 34 aa, Artificial Sequence; identical to SEQ ID NO: 16750
  Cyclic GFR-binding peptide
  MOD_RES (1)..(33): Xaa is C or S

SEQ ID NO: 50408 - protein, 25 aa, Artificial Sequence
  Cyclic GFR-binding peptide
VPTRLNAISILYFDSANNVVLKKYR

SEQ ID NO: 50409 - protein, 25 aa, Artificial Sequence
  Cyclic GFR-binding peptide
APTKLSPISVLFIDDSSNVIYKQYE

SEQ ID NO: 50410 - protein, 28 aa, Artificial Sequence
  Cyclic GFR-binding peptide
  MOD_RES (1)..(2): Xaa is C or S
XXVPTRLEPLPIVYYDSANNVVEQLSND

SEQ ID NO: 50411 - protein, 32 aa, Artificial Sequence; identical to SEQ ID NO: 16754
  Cyclic GFR-binding peptide
  MOD_RES (6)..(7): Xaa is C or S

SEQ ID NO: 50412 - protein, 40 aa, Artificial Sequence; identical to SEQ ID NO: 16755
  Cyclic GFR-binding peptide
  MOD_RES (6)..(7)..(39): Xaa is C or S

SEQ ID NO: 50413 - protein, 27 aa, Artificial Sequence
  Cyclic GFR-binding peptide
  MOD_RES (2)..(2): Xaa is C or S
TXAPTKLEPLTVLYYDDSSNVIEQLSN

SEQ ID NO: 50414 - protein, 26 aa, Artificial Sequence
  Cyclic GFR-binding peptide
TQLEPLTVLYYDDSSNVIEQLSNNMV

SEQ ID NO: 50415 - protein, 35 aa, Artificial Sequence; identical to SEQ ID NO: 16759
  Cyclic GFR-binding peptide
  MOD_RES (2)..(3)..(35): Xaa is C or S

SEQ ID NO: 50416 - protein, 34 aa, Artificial Sequence; identical to SEQ ID NO: 16760
  Cyclic GFR-binding peptide
  MOD_RES (6)..(7): Xaa is C or S

SEQ ID NO: 50417 - protein, 31 aa, Artificial Sequence; identical to SEQ ID NO: 16761
  Cyclic GFR-binding peptide
  MOD_RES (2)..(3): Xaa is C or S

SEQ ID NO: 50418 - protein, 22 aa, Artificial Sequence
  Cyclic GFR-binding peptide
LNAISILYFVGRKPKVLKKYRM

SEQ ID NO: 50419 - protein, 35 aa, Artificial Sequence; identical to SEQ ID NO: 6380
  Cyclic GFR-binding peptide
  MOD_RES (4)..(5): Xaa is C or S

SEQ ID NO: 50420 - protein, 29 aa, Artificial Sequence
  Cyclic GFR-binding peptide
PTQLSPISVLFIDDSSNVIYKQYENMVVR

SEQ ID NO: 50421 - protein, 36 aa, Artificial Sequence; identical to SEQ ID NO: 16766
  Cyclic GFR-binding peptide
  MOD_RES (6)..(7): Xaa is C or S

SEQ ID NO: 50422 - protein, 33 aa, Artificial Sequence; identical to SEQ ID NO: 16767
  Cyclic GFR-binding peptide
  MOD_RES (6)..(7): Xaa is C or S

SEQ ID NO: 50423 - protein, 35 aa, Artificial Sequence; identical to SEQ ID NO: 16768
  Cyclic GFR-binding peptide
  MOD_RES (2)..(3)..(35): Xaa is C or S

SEQ ID NO: 50424 - protein, 35 aa, Artificial Sequence; identical to SEQ ID NO: 16769
  Cyclic GFR-binding peptide
  MOD_RES (1)..(2)..(34): Xaa is C or S

SEQ ID NO: 50425 - protein, 39 aa, Artificial Sequence; identical to SEQ ID NO: 6386
  Cyclic GFR-binding peptide
  MOD_RES (4)..(5)..(37)..(39): Xaa is C or S

SEQ ID NO: 50426 - protein, 27 aa, Artificial Sequence
  Cyclic GFR-binding peptide
  MOD_RES (1)..(1): Xaa is C or S
XVPTRLNAISILYFDSANNVVLKKYRD

SEQ ID NO: 50427 - protein, 30 aa, Artificial Sequence; identical to SEQ ID NO: 16773
  Cyclic GFR-binding peptide
  MOD_RES (3)..(4): Xaa is C or S

SEQ ID NO: 50428 - protein, 27 aa, Artificial Sequence
  Cyclic GFR-binding peptide
ELSPISMLFIDENEKVVYKQYEDMVVE

SEQ ID NO: 50429 - protein, 37 aa, Artificial Sequence; identical to SEQ ID NO: 16775
  Cyclic GFR-binding peptide
  MOD_RES (5)..(6): Xaa is C or S

SEQ ID NO: 50430 - protein, 22 aa, Artificial Sequence
  Cyclic GFR-binding peptide
LEPLPVVYYDDSSNVIEQLSNN

SEQ ID NO: 50431 - protein, 27 aa, Artificial Sequence
  Cyclic GFR-binding peptide
TELSPISMLFIDENEKVVYKQYEDMVV

SEQ ID NO: 50432 - protein, 35 aa, Artificial Sequence; identical to SEQ ID NO: 16779
  Cyclic GFR-binding peptide
  MOD_RES (4)..(5): Xaa is C or S

SEQ ID NO: 50433 - protein, 25 aa, Artificial Sequence
  Cyclic GFR-binding peptide
PTELEPLPMVYYDENEKVVEQLSND

SEQ ID NO: 50434 - protein, 29 aa, Artificial Sequence
  Cyclic GFR-binding peptide
PQALNAISILYFVGRKPKVLKKYRMIVRS

SEQ ID NO: 50435 - protein, 30 aa, Artificial Sequence; identical to SEQ ID NO: 6407
  Cyclic GFR-binding peptide
  MOD_RES (29)..(29): Xaa is C or S

SEQ ID NO: 50436 - protein, 33 aa, Artificial Sequence; identical to SEQ ID NO: 16786
  Cyclic GFR-binding peptide
  MOD_RES (32)..(32): Xaa is C or S

SEQ ID NO: 50437 - protein, 37 aa, Artificial Sequence; identical to SEQ ID NO: 16787
  Cyclic GFR-binding peptide
  MOD_RES (4)..(5)..(37): Xaa is C or S

SEQ ID NO: 50438 - protein, 24 aa, Artificial Sequence
  Cyclic GFR-binding peptide
PTKLEPLTVLYYDDSSNVIEQLSN

SEQ ID NO: 50439 - protein, 30 aa, Artificial Sequence; identical to SEQ ID NO: 16789
  Cyclic GFR-binding peptide
  MOD_RES (30)..(30): Xaa is C or S

SEQ ID NO: 50440 - protein, 26 aa, Artificial Sequence
  Cyclic GFR-binding peptide
EPLTILYYDSANNVVEQLSNDMVVES

SEQ ID NO: 50441 - protein, 33 aa, Artificial Sequence; identical to SEQ ID NO: 6412
  Cyclic GFR-binding peptide
  MOD_RES (3)..(4): Xaa is C or S

SEQ ID NO: 50442 - protein, 25 aa, Artificial Sequence
  Cyclic GFR-binding peptide
QALSPISILFIVGRKPKVYKQYEMI

SEQ ID NO: 50443 - protein, 20 aa, Artificial Sequence
  Cyclic GFR-binding peptide
SPISILFIVGRKPKVYKQYE

SEQ ID NO: 50444 - protein, 29 aa, Artificial Sequence
  Cyclic GFR-binding peptide
  MOD_RES (27)..(29): Xaa is C or S
SPISMLFIDEYDKVVYKQYEEMVVEGXGX

SEQ ID NO: 50445 - protein, 26 aa, Artificial Sequence
  Cyclic GFR-binding peptide
  MOD_RES (1)..(1): Xaa is C or S
XVPTELNAISMLYFDEYDKVVLKKYR

SEQ ID NO: 50446 - protein, 30 aa, Artificial Sequence; identical to SEQ ID NO: 16800
  Cyclic GFR-binding peptide
  MOD_RES (3)..(4): Xaa is C or S

SEQ ID NO: 50447 - protein, 40 aa, Artificial Sequence; identical to SEQ ID NO: 16802
  Cyclic GFR-binding peptide
  MOD_RES (6)..(7)..(38)..(40): Xaa is C or S

SEQ ID NO: 50448 - protein, 35 aa, Artificial Sequence; identical to SEQ ID NO: 16804
  Cyclic GFR-binding peptide
  MOD_RES (32)..(34): Xaa is C or S

SEQ ID NO: 50449 - protein, 25 aa, Artificial Sequence
  Cyclic GFR-binding peptide
KLEPLTVLYYDDSSNVIEQLSNNMV

SEQ ID NO: 50450 - protein, 34 aa, Artificial Sequence; identical to SEQ ID NO: 16806
  Cyclic GFR-binding peptide
  MOD_RES (6)..(7): Xaa is C or S

SEQ ID NO: 50451 - protein, 25 aa, Artificial Sequence
  Cyclic GFR-binding peptide
LSPISVLFIDDSSNVIYKQYENMVV

SEQ ID NO: 50452 - protein, 25 aa, Artificial Sequence
  Cyclic GFR-binding peptide
QDLNAISILYFIGKTPKILKKYRMI

SEQ ID NO: 50453 - protein, 31 aa, Artificial Sequence; identical to SEQ ID NO: 16809
  Cyclic GFR-binding peptide

SEQ ID NO: 50454 - protein, 24 aa, Artificial Sequence
  Cyclic GFR-binding peptide
PTELSPISMLFIDEYDKVVYKQYE

SEQ ID NO: 50455 - protein, 32 aa, Artificial Sequence; identical to SEQ ID NO: 16812
  Cyclic GFR-binding peptide
  MOD_RES (32)..(32): Xaa is C or S

SEQ ID NO: 50456 - protein, 24 aa, Artificial Sequence
  Cyclic GFR-binding peptide
ELEPLPMVYYDENEKVVEQLSNDM

SEQ ID NO: 50457 - protein, 30 aa, Artificial Sequence; identical to SEQ ID NO: 16814
  Cyclic GFR-binding peptide
  MOD_RES (1)..(1): Xaa is C or S

SEQ ID NO: 50458 - protein, 27 aa, Artificial Sequence
  Cyclic GFR-binding peptide
  MOD_RES (1)..(2): Xaa is C or S
XXAPTQLSPISVLFIDDSSNVIYKQYE

SEQ ID NO: 50459 - protein, 27 aa, Artificial Sequence
  Cyclic GFR-binding peptide
  MOD_RES (27)..(27): Xaa is C or S
LSPISILFIVGRKPKVYKQYEMIVRSX

SEQ ID NO: 50460 - protein, 33 aa, Artificial Sequence; identical to SEQ ID NO: 6435
  Cyclic GFR-binding peptide
  MOD_RES (30)..(32): Xaa is C or S

SEQ ID NO: 50461 - protein, 35 aa, Artificial Sequence; identical to SEQ ID NO: 16818
  Cyclic GFR-binding peptide
  MOD_RES (4)..(5): Xaa is C or S

SEQ ID NO: 50462 - protein, 27 aa, Artificial Sequence
  Cyclic GFR-binding peptide
PTQLEPLPVVYYDDSSNVIEQLSNNMV

SEQ ID NO: 50463 - protein, 28 aa, Artificial Sequence
  Cyclic GFR-binding peptide
  MOD_RES (3)..(3): Xaa is C or S
PTXAPTKLEPLTVLYYDDSSNVIEQLSN

SEQ ID NO: 50464 - protein, 25 aa, Artificial Sequence
  Cyclic GFR-binding peptide
VPTELEPLPMVYYDENEKVVEQLSN

SEQ ID NO: 50465 - protein, 36 aa, Artificial Sequence; identical to SEQ ID NO: 16825
  Cyclic GFR-binding peptide
  MOD_RES (3)..(4)..(36): Xaa is C or S

SEQ ID NO: 50466 - protein, 32 aa, Artificial Sequence; identical to SEQ ID NO: 6441
  Cyclic GFR-binding peptide
  MOD_RES (29)..(31): Xaa is C or S

SEQ ID NO: 50467 - protein, 27 aa, Artificial Sequence
  Cyclic GFR-binding peptide
DLEPLPIVYYIGKTPKIEQLSNMIVKS

SEQ ID NO: 50468 - protein, 21 aa, Artificial Sequence
  Cyclic GFR-binding peptide
LEPLPIVYYVGRTPKVEQLSN

SEQ ID NO: 50469 - protein, 30 aa, Artificial Sequence; identical to SEQ ID NO: 16830
  Cyclic GFR-binding peptide
  MOD_RES (3)..(4): Xaa is C or S

SEQ ID NO: 50470 - protein, 27 aa, Artificial Sequence
  Cyclic GFR-binding peptide
RLEPLPIVYYDSANNVVEQLSNDMVVE

SEQ ID NO: 50471 - protein, 31 aa, Artificial Sequence; identical to SEQ ID NO: 16832
  Cyclic GFR-binding peptide
  MOD_RES (29)..(31): Xaa is C or S

SEQ ID NO: 50472 - protein, 30 aa, Artificial Sequence; identical to SEQ ID NO: 6445
  Cyclic GFR-binding peptide
  MOD_RES (1)..(2): Xaa is C or S

SEQ ID NO: 50473 - protein, 27 aa, Artificial Sequence
  Cyclic GFR-binding peptide
LNAISMLYFDEYDKVVLKKYREMVVEG

SEQ ID NO: 50474 - protein, 27 aa, Artificial Sequence
  Cyclic GFR-binding peptide
TKLSPISVLFIDDSSNVIYKQYENMVV

SEQ ID NO: 50475 - protein, 27 aa, Artificial Sequence
  Cyclic GFR-binding peptide
  MOD_RES (26)..(26): Xaa is C or S
NAISILYFIGKTPKILKKYRMIVKSXK

SEQ ID NO: 50476 - protein, 41 aa, Artificial Sequence; identical to SEQ ID NO: 16838
  Cyclic GFR-binding peptide
  MOD_RES (5)..(6)..(38)..(40): Xaa is C or S

SEQ ID NO: 50477 - protein, 32 aa, Artificial Sequence; identical to SEQ ID NO: 16840
  Cyclic GFR-binding peptide
  MOD_RES (3)..(3): Xaa is C or S

SEQ ID NO: 50478 - protein, 29 aa, Artificial Sequence
  Cyclic GFR-binding peptide
PQDLSPISILFIVGRTPKVYKQYEMVVKS

SEQ ID NO: 50479 - protein, 34 aa, Artificial Sequence; identical to SEQ ID NO: 16842
  Cyclic GFR-binding peptide
  MOD_RES (4)..(5): Xaa is C or S

SEQ ID NO: 50480 - protein, 32 aa, Artificial Sequence; identical to SEQ ID NO: 16845
  Cyclic GFR-binding peptide
  MOD_RES (1)..(2): Xaa is C or S

SEQ ID NO: 50481 - protein, 30 aa, Artificial Sequence; identical to SEQ ID NO: 16847
  Cyclic GFR-binding peptide
  MOD_RES (29)..(29): Xaa is C or S

SEQ ID NO: 50482 - protein, 40 aa, Artificial Sequence; identical to SEQ ID NO: 16848
  Cyclic GFR-binding peptide
  MOD_RES (5)..(6)..(37)..(39): Xaa is C or S

SEQ ID NO: 50483 - protein, 30 aa, Artificial Sequence; identical to SEQ ID NO: 16850
  Cyclic GFR-binding peptide
  MOD_RES (28)..(30): Xaa is C or S

SEQ ID NO: 50484 - protein, 30 aa, Artificial Sequence; identical to SEQ ID NO: 16851
  Cyclic GFR-binding peptide
  MOD_RES (4)..(5): Xaa is C or S

SEQ ID NO: 50485 - protein, 31 aa, Artificial Sequence; identical to SEQ ID NO: 6468
  Cyclic GFR-binding peptide
  MOD_RES (4)..(5): Xaa is C or S

SEQ ID NO: 50486 - protein, 32 aa, Artificial Sequence; identical to SEQ ID NO: 16855
  Cyclic GFR-binding peptide
  MOD_RES (1)..(1): Xaa is C or S

SEQ ID NO: 50487 - protein, 39 aa, Artificial Sequence; identical to SEQ ID NO: 16856
  Cyclic GFR-binding peptide
  MOD_RES (4)..(5)..(37)..(39): Xaa is C or S

SEQ ID NO: 50488 - protein, 26 aa, Artificial Sequence
  Cyclic GFR-binding peptide
  MOD_RES (1)..(1): Xaa is C or S
XAPTQLEPLPVVYYDDSSNVIEQLSN

SEQ ID NO: 50489 - protein, 32 aa, Artificial Sequence; identical to SEQ ID NO: 16858
  Cyclic GFR-binding peptide
  MOD_RES (6)..(7): Xaa is C or S

SEQ ID NO: 50490 - protein, 32 aa, Artificial Sequence; identical to SEQ ID NO: 16859
  Cyclic GFR-binding peptide
  MOD_RES (4)..(5): Xaa is C or S

SEQ ID NO: 50491 - protein, 25 aa, Artificial Sequence
  Cyclic GFR-binding peptide
TKLEPLTVLYYDDSSNVIEQLSNNM

SEQ ID NO: 50492 - protein, 33 aa, Artificial Sequence; identical to SEQ ID NO: 16861
  Cyclic GFR-binding peptide
  MOD_RES (31)..(33): Xaa is C or S

SEQ ID NO: 50493 - protein, 31 aa, Artificial Sequence; identical to SEQ ID NO: 16862
  Cyclic GFR-binding peptide
  MOD_RES (2)..(3): Xaa is C or S

SEQ ID NO: 50494 - protein, 28 aa, Artificial Sequence
  Cyclic GFR-binding peptide
QALNAISILYFVGRKPKVLKKYRMIVRS

SEQ ID NO: 50495 - protein, 31 aa, Artificial Sequence; identical to SEQ ID NO: 16864
  Cyclic GFR-binding peptide
  MOD_RES (1)..(1): Xaa is C or S

SEQ ID NO: 50496 - protein, 32 aa, Artificial Sequence; identical to SEQ ID NO: 16865
  Cyclic GFR-binding peptide
  MOD_RES (1)..(2): Xaa is C or S

SEQ ID NO: 50497 - protein, 35 aa, Artificial Sequence; identical to SEQ ID NO: 6484
  Cyclic GFR-binding peptide
  MOD_RES (3)..(4)..(35): Xaa is C or S

SEQ ID NO: 50498 - protein, 29 aa, Artificial Sequence
  Cyclic GFR-binding peptide
VPTRLEPLPIVYYDSANNVVEQLSNDMVV

SEQ ID NO: 50499 - protein, 30 aa, Artificial Sequence; identical to SEQ ID NO: 16868
  Cyclic GFR-binding peptide
  MOD_RES (1)..(1): Xaa is C or S

SEQ ID NO: 50500 - protein, 31 aa, Artificial Sequence; identical to SEQ ID NO: 16869
  Cyclic GFR-binding peptide
  MOD_RES (3)..(4): Xaa is C or S

SEQ ID NO: 50501 - protein, 23 aa, Artificial Sequence
  Cyclic GFR-binding peptide
QLEPLTVLYYDDSSNVIEQLSNN

SEQ ID NO: 50502 - protein, 32 aa, Artificial Sequence; identical to SEQ ID NO: 6490
  Cyclic GFR-binding peptide
  MOD_RES (31)..(31): Xaa is C or S

SEQ ID NO: 50503 - protein, 34 aa, Artificial Sequence; identical to SEQ ID NO: 16872
  Cyclic GFR-binding peptide
  MOD_RES (4)..(4): Xaa is C or S

SEQ ID NO: 50504 - protein, 25 aa, Artificial Sequence
  Cyclic GFR-binding peptide
PTKLSPISVLFIDDSSNVIYKQYEN

SEQ ID NO: 50505 - protein, 28 aa, Artificial Sequence
  Cyclic GFR-binding peptide
  MOD_RES (27)..(27): Xaa is C or S
EPLPVVYYDDSSNVIEQLSNNMVVRSXG

SEQ ID NO: 50506 - protein, 30 aa, Artificial Sequence; identical to SEQ ID NO: 16877
  Cyclic GFR-binding peptide
  MOD_RES (1)..(2): Xaa is C or S

SEQ ID NO: 50507 - protein, 39 aa, Artificial Sequence; identical to SEQ ID NO: 16878
  Cyclic GFR-binding peptide
  MOD_RES (6)..(38): Xaa is C or S

SEQ ID NO: 50508 - protein, 33 aa, Artificial Sequence; identical to SEQ ID NO: 16879
  Cyclic GFR-binding peptide
  MOD_RES (6)..(7): Xaa is C or S

SEQ ID NO: 50509 - protein, 23 aa, Artificial Sequence
  Cyclic GFR-binding peptide
LNAISMLYFDENEKVVLKKYRDM

SEQ ID NO: 50510 - protein, 34 aa, Artificial Sequence; identical to SEQ ID NO: 16881
  Cyclic GFR-binding peptide
  MOD_RES (4)..(5): Xaa is C or S

SEQ ID NO: 50511 - protein, 32 aa, Artificial Sequence; identical to SEQ ID NO: 16882
  Cyclic GFR-binding peptide
  MOD_RES (7)..(7): Xaa is C or S

SEQ ID NO: 50512 - protein, 30 aa, Artificial Sequence; identical to SEQ ID NO: 16883
  Cyclic GFR-binding peptide
  MOD_RES (3)..(4): Xaa is C or S

SEQ ID NO: 50513 - protein, 29 aa, Artificial Sequence
  Cyclic GFR-binding peptide
VPQDLNAISILYFVGRTPKVLKKYRMVVK

SEQ ID NO: 50514 - protein, 28 aa, Artificial Sequence
  Cyclic GFR-binding peptide
ELEPLPMVYYDEYDKVVEQLSNEMVVEG

SEQ ID NO: 50515 - protein, 30 aa, Artificial Sequence; identical to SEQ ID NO: 16887
  Cyclic GFR-binding peptide
  MOD_RES (30)..(30): Xaa is C or S

SEQ ID NO: 50516 - protein, 35 aa, Artificial Sequence; identical to SEQ ID NO: 16889
  Cyclic GFR-binding peptide
  MOD_RES (1)..(2)..(33)..(35): Xaa is C or S

SEQ ID NO: 50517 - protein, 38 aa, Artificial Sequence; identical to SEQ ID NO: 16890
  Cyclic GFR-binding peptide
  MOD_RES (2)..(3)..(35)..(37): Xaa is C or S

SEQ ID NO: 50518 - protein, 30 aa, Artificial Sequence; identical to SEQ ID NO: 16891
  Cyclic GFR-binding peptide
  MOD_RES (1)..(2): Xaa is C or S

SEQ ID NO: 50519 - protein, 34 aa, Artificial Sequence; identical to SEQ ID NO: 16892
  Cyclic GFR-binding peptide
  MOD_RES (2)..(3): Xaa is C or S

SEQ ID NO: 50520 - protein, 40 aa, Artificial Sequence; identical to SEQ ID NO: 16893
  Cyclic GFR-binding peptide
  MOD_RES (6)..(7)..(39): Xaa is C or S

SEQ ID NO: 50521 - protein, 32 aa, Artificial Sequence; identical to SEQ ID NO: 16894
  Cyclic GFR-binding peptide
  MOD_RES (4)..(5): Xaa is C or S

SEQ ID NO: 50522 - protein, 33 aa, Artificial Sequence; identical to SEQ ID NO: 16895
  Cyclic GFR-binding peptide
  MOD_RES (3)..(4): Xaa is C or S

SEQ ID NO: 50523 - protein, 29 aa, Artificial Sequence
  Cyclic GFR-binding peptide
  MOD_RES (28)..(28): Xaa is C or S
LEPLTMLYYDENEKVVEQLSNDMVVEGXG

SEQ ID NO: 50524 - protein, 36 aa, Artificial Sequence; identical to SEQ ID NO: 6521
  Cyclic GFR-binding peptide
  MOD_RES (4)..(5)..(36): Xaa is C or S

SEQ ID NO: 50525 - protein, 26 aa, Artificial Sequence
  Cyclic GFR-binding peptide
PTELNAISMLYFDENEKVVLKKYRDM

SEQ ID NO: 50526 - protein, 34 aa, Artificial Sequence; identical to SEQ ID NO: 16900
  Cyclic GFR-binding peptide
  MOD_RES (32)..(34): Xaa is C or S

SEQ ID NO: 50527 - protein, 30 aa, Artificial Sequence; identical to SEQ ID NO: 16901
  Cyclic GFR-binding peptide
  MOD_RES (30)..(30): Xaa is C or S

SEQ ID NO: 50528 - protein, 22 aa, Artificial Sequence
  Cyclic GFR-binding peptide
SPISMLFIDEYDKVVYKQYEEM

SEQ ID NO: 50529 - protein, 35 aa, Artificial Sequence; identical to SEQ ID NO: 6527
  Cyclic GFR-binding peptide
  MOD_RES (6)..(7): Xaa is C or S

SEQ ID NO: 50530 - protein, 30 aa, Artificial Sequence; identical to SEQ ID NO: 16905
  Cyclic GFR-binding peptide

SEQ ID NO: 50531 - protein, 37 aa, Artificial Sequence; identical to SEQ ID NO: 16906
  Cyclic GFR-binding peptide
  MOD_RES (3)..(4)..(35)..(37): Xaa is C or S

SEQ ID NO: 50532 - protein, 26 aa, Artificial Sequence
  Cyclic GFR-binding peptide
RLEPLPIVYYDSANNVVEQLSNDMVV

SEQ ID NO: 50533 - protein, 24 aa, Artificial Sequence
  Cyclic GFR-binding peptide
TELEPLPMVYYDENEKVVEQLSND

SEQ ID NO: 50534 - protein, 38 aa, Artificial Sequence; identical to SEQ ID NO: 16910
  Cyclic GFR-binding peptide
  MOD_RES (2)..(3)..(35)..(37): Xaa is C or S

SEQ ID NO: 50535 - protein, 32 aa, Artificial Sequence; identical to SEQ ID NO: 16911
  Cyclic GFR-binding peptide
  MOD_RES (30)..(32): Xaa is C or S

SEQ ID NO: 50536 - protein, 27 aa, Artificial Sequence
  Cyclic GFR-binding peptide
  MOD_RES (1)..(2): Xaa is C or S
XXVPQDLNAISILYFVGRTPKVLKKYR

SEQ ID NO: 50537 - protein, 24 aa, Artificial Sequence
  Cyclic GFR-binding peptide
EPLTMLYYDENEKVVEQLSNDMVV

SEQ ID NO: 50538 - protein, 31 aa, Artificial Sequence; identical to SEQ ID NO: 16914
  Cyclic GFR-binding peptide
  MOD_RES (1)..(1): Xaa is C or S

SEQ ID NO: 50539 - protein, 20 aa, Artificial Sequence
  Cyclic GFR-binding peptide
NAISILYFDSANNVVLKKYR

SEQ ID NO: 50540 - protein, 22 aa, Artificial Sequence
  Cyclic GFR-binding peptide
LEPLPMVYYDENEKVVEQLSND

SEQ ID NO: 50541 - protein, 33 aa, Artificial Sequence; identical to SEQ ID NO: 6548
  Cyclic GFR-binding peptide
  MOD_RES (2)..(3): Xaa is C or S

SEQ ID NO: 50542 - protein, 37 aa, Artificial Sequence; identical to SEQ ID NO: 16922
  Cyclic GFR-binding peptide
  MOD_RES (6)..(7): Xaa is C or S

SEQ ID NO: 50543 - protein, 33 aa, Artificial Sequence; identical to SEQ ID NO: 16923
  Cyclic GFR-binding peptide
  MOD_RES (5)..(6): Xaa is C or S

SEQ ID NO: 50544 - protein, 36 aa, Artificial Sequence; identical to SEQ ID NO: 16924
  Cyclic GFR-binding peptide
  MOD_RES (4)..(5): Xaa is C or S

SEQ ID NO: 50545 - protein, 31 aa, Artificial Sequence; identical to SEQ ID NO: 16926
  Cyclic GFR-binding peptide
  MOD_RES (3)..(4): Xaa is C or S

SEQ ID NO: 50546 - protein, 31 aa, Artificial Sequence; identical to SEQ ID NO: 16927
  Cyclic GFR-binding peptide
  MOD_RES (31)..(31): Xaa is C or S

SEQ ID NO: 50547 - protein, 28 aa, Artificial Sequence
  Cyclic GFR-binding peptide
TQLSPISVLFIDDSSNVIYKQYENMVVR

SEQ ID NO: 50548 - protein, 28 aa, Artificial Sequence
  Cyclic GFR-binding peptide
  MOD_RES (2)..(3): Xaa is C or S
PXXVSQDLSPISILFIIGKTPKIYKQYE

SEQ ID NO: 50549 - protein, 34 aa, Artificial Sequence; identical to SEQ ID NO: 16932
  Cyclic GFR-binding peptide
  MOD_RES (32)..(34): Xaa is C or S

SEQ ID NO: 50550 - protein, 33 aa, Artificial Sequence; identical to SEQ ID NO: 16934
  Cyclic GFR-binding peptide
  MOD_RES (4)..(5): Xaa is C or S

SEQ ID NO: 50551 - protein, 35 aa, Artificial Sequence; identical to SEQ ID NO: 16935
  Cyclic GFR-binding peptide
  MOD_RES (6)..(7): Xaa is C or S

SEQ ID NO: 50552 - protein, 26 aa, Artificial Sequence
  Cyclic GFR-binding peptide
PTKLSPISVLFIDDSSNVIYKQYENM

SEQ ID NO: 50553 - protein, 29 aa, Artificial Sequence
  Cyclic GFR-binding peptide
VPQALEPLTILYYVGRKPKVEQLSNMIVR

SEQ ID NO: 50554 - protein, 28 aa, Artificial Sequence
  Cyclic GFR-binding peptide
ELEPLPMVYYDENEKVVEQLSNDMVVEG

SEQ ID NO: 50555 - protein, 31 aa, Artificial Sequence; identical to SEQ ID NO: 6567
  Cyclic GFR-binding peptide
  MOD_RES (1)..(1): Xaa is C or S

SEQ ID NO: 50556 - protein, 30 aa, Artificial Sequence; identical to SEQ ID NO: 16940
  Cyclic GFR-binding peptide
  MOD_RES (1)..(2): Xaa is C or S

SEQ ID NO: 50557 - protein, 34 aa, Artificial Sequence; identical to SEQ ID NO: 16941
  Cyclic GFR-binding peptide
  MOD_RES (2)..(3): Xaa is C or S

SEQ ID NO: 50558 - protein, 31 aa, Artificial Sequence; identical to SEQ ID NO: 6569
  Cyclic GFR-binding peptide
  MOD_RES (4)..(5): Xaa is C or S

SEQ ID NO: 50559 - protein, 41 aa, Artificial Sequence; identical to SEQ ID NO: 16944
  Cyclic GFR-binding peptide
  MOD_RES (5)..(6)..(38)..(40): Xaa is C or S

SEQ ID NO: 50560 - protein, 31 aa, Artificial Sequence; identical to SEQ ID NO: 16945
  Cyclic GFR-binding peptide
  MOD_RES (1)..(2): Xaa is C or S

SEQ ID NO: 50561 - protein, 30 aa, Artificial Sequence; identical to SEQ ID NO: 16946
  Cyclic GFR-binding peptide
  MOD_RES (3)..(4): Xaa is C or S

SEQ ID NO: 50562 - protein, 40 aa, Artificial Sequence; identical to SEQ ID NO: 6573
  Cyclic GFR-binding peptide
  MOD_RES (4)..(5)..(37)..(39): Xaa is C or S

SEQ ID NO: 50563 - protein, 23 aa, Artificial Sequence
  Cyclic GFR-binding peptide
EPLPIVYYDSANNVVEQLSNDMV

SEQ ID NO: 50564 - protein, 29 aa, Artificial Sequence
  Cyclic GFR-binding peptide
VPTRLNAISILYFDSANNVVLKKYRDMVV

SEQ ID NO: 50565 - protein, 28 aa, Artificial Sequence
  Cyclic GFR-binding peptide
  MOD_RES (1)..(1): Xaa is C or S
XVPQALNAISILYFVGRKPKVLKKYRMI

SEQ ID NO: 50566 - protein, 33 aa, Artificial Sequence; identical to SEQ ID NO: 6578
  Cyclic GFR-binding peptide
  MOD_RES (4)..(5): Xaa is C or S

SEQ ID NO: 50567 - protein, 28 aa, Artificial Sequence
  Cyclic GFR-binding peptide
QDLSPISILFIVGRTPKVYKQYEMVVKS

SEQ ID NO: 50568 - protein, 33 aa, Artificial Sequence; identical to SEQ ID NO: 16956
  Cyclic GFR-binding peptide
  MOD_RES (1)..(33): Xaa is C or S

SEQ ID NO: 50569 - protein, 30 aa, Artificial Sequence; identical to SEQ ID NO: 6581
  Cyclic GFR-binding peptide
  MOD_RES (4)..(5): Xaa is C or S

SEQ ID NO: 50570 - protein, 35 aa, Artificial Sequence; identical to SEQ ID NO: 16958
  Cyclic GFR-binding peptide
  MOD_RES (2)..(3)..(35): Xaa is C or S

SEQ ID NO: 50571 - protein, 37 aa, Artificial Sequence; identical to SEQ ID NO: 16959
  Cyclic GFR-binding peptide
  MOD_RES (5)..(6): Xaa is C or S

SEQ ID NO: 50572 - protein, 31 aa, Artificial Sequence; identical to SEQ ID NO: 16960
  Cyclic GFR-binding peptide
  MOD_RES (3)..(4): Xaa is C or S

SEQ ID NO: 50573 - protein, 28 aa, Artificial Sequence
  Cyclic GFR-binding peptide
VPTELSPISMLFIDENEKVVYKQYEDMV

SEQ ID NO: 50574 - protein, 38 aa, Artificial Sequence; identical to SEQ ID NO: 16962
  Cyclic GFR-binding peptide
  MOD_RES (5)..(6)..(38): Xaa is C or S

SEQ ID NO: 50575 - protein, 26 aa, Artificial Sequence
  Cyclic GFR-binding peptide
LEPLPIVYYDSANNVVEQLSNDMVVE

SEQ ID NO: 50576 - protein, 31 aa, Artificial Sequence; identical to SEQ ID NO: 16965
  Cyclic GFR-binding peptide
  MOD_RES (29)..(31): Xaa is C or S

SEQ ID NO: 50577 - protein, 37 aa, Artificial Sequence; identical to SEQ ID NO: 16966
  Cyclic GFR-binding peptide
  MOD_RES (3)..(4)..(35)..(37): Xaa is C or S

SEQ ID NO: 50578 - protein, 35 aa, Artificial Sequence; identical to SEQ ID NO: 16967
  Cyclic GFR-binding peptide
  MOD_RES (3)..(4)..(35): Xaa is C or S

SEQ ID NO: 50579 - protein, 33 aa, Artificial Sequence; identical to SEQ ID NO: 16968
  Cyclic GFR-binding peptide
  MOD_RES (5)..(6): Xaa is C or S

SEQ ID NO: 50580 - protein, 34 aa, Artificial Sequence; identical to SEQ ID NO: 16969
  Cyclic GFR-binding peptide
  MOD_RES (3)..(4): Xaa is C or S

SEQ ID NO: 50581 - protein, 30 aa, Artificial Sequence; identical to SEQ ID NO: 16971
  Cyclic GFR-binding peptide

SEQ ID NO: 50582 - protein, 21 aa, Artificial Sequence
  Cyclic GFR-binding peptide
LSPISMLFIDEYDKVVYKQYE

SEQ ID NO: 50583 - protein, 32 aa, Artificial Sequence; identical to SEQ ID NO: 16974
  Cyclic GFR-binding peptide
  MOD_RES (3)..(4): Xaa is C or S

SEQ ID NO: 50584 - protein, 33 aa, Artificial Sequence; identical to SEQ ID NO: 16975
  Cyclic GFR-binding peptide
  MOD_RES (31)..(33): Xaa is C or S

SEQ ID NO: 50585 - protein, 28 aa, Artificial Sequence
  Cyclic GFR-binding peptide
  MOD_RES (2)..(3): Xaa is C or S
TXXVPTRLNAISILYFDSANNVVLKKYR

SEQ ID NO: 50586 - protein, 21 aa, Artificial Sequence
  Cyclic GFR-binding peptide
LSPISILFIIGKTPKIYKQYE

SEQ ID NO: 50587 - protein, 34 aa, Artificial Sequence; identical to SEQ ID NO: 16980
  Cyclic GFR-binding peptide
  MOD_RES (1)..(2)..(34): Xaa is C or S

SEQ ID NO: 50588 - protein, 27 aa, Artificial Sequence
  Cyclic GFR-binding peptide
PTQLSPISVLFIDDSSNVIYKQYENMV

SEQ ID NO: 50589 - protein, 25 aa, Artificial Sequence
  Cyclic GFR-binding peptide
LNAISILYFIGKTPKILKKYRMIVK

SEQ ID NO: 50590 - protein, 34 aa, Artificial Sequence; identical to SEQ ID NO: 16983
  Cyclic GFR-binding peptide
  MOD_RES (32)..(34): Xaa is C or S

SEQ ID NO: 50591 - protein, 31 aa, Artificial Sequence; identical to SEQ ID NO: 16984
  Cyclic GFR-binding peptide
  MOD_RES (1)..(2): Xaa is C or S

SEQ ID NO: 50592 - protein, 28 aa, Artificial Sequence
  Cyclic GFR-binding peptide
  MOD_RES (2)..(3): Xaa is C or S
AXXVPTELEPLTMLYYDEYDKVVEQLSN

SEQ ID NO: 50593 - protein, 27 aa, Artificial Sequence
  Cyclic GFR-binding peptide
DLSPISILFIVGRTPKVYKQYEMVVKS

SEQ ID NO: 50594 - protein, 34 aa, Artificial Sequence; identical to SEQ ID NO: 16989
  Cyclic GFR-binding peptide
  MOD_RES (3)..(3): Xaa is C or S

SEQ ID NO: 50595 - protein, 39 aa, Artificial Sequence; identical to SEQ ID NO: 6604
  Cyclic GFR-binding peptide
  MOD_RES (4)..(5)..(36)..(38): Xaa is C or S

SEQ ID NO: 50596 - protein, 34 aa, Artificial Sequence; identical to SEQ ID NO: 16992
  Cyclic GFR-binding peptide
  MOD_RES (1)..(2)..(33): Xaa is C or S

SEQ ID NO: 50597 - protein, 36 aa, Artificial Sequence; identical to SEQ ID NO: 16996
  Cyclic GFR-binding peptide
  MOD_RES (6)..(6): Xaa is C or S

SEQ ID NO: 50598 - protein, 29 aa, Artificial Sequence
  Cyclic GFR-binding peptide
VPTELSPISMLFIDEYDKVVYKQYEEMVV

SEQ ID NO: 50599 - protein, 33 aa, Artificial Sequence; identical to SEQ ID NO: 16999
  Cyclic GFR-binding peptide
  MOD_RES (6)..(7): Xaa is C or S

SEQ ID NO: 50600 - protein, 41 aa, Artificial Sequence; identical to SEQ ID NO: 17000
  Cyclic GFR-binding peptide
  MOD_RES (5)..(6)..(38)..(40): Xaa is C or S

SEQ ID NO: 50601 - protein, 30 aa, Artificial Sequence; identical to SEQ ID NO: 17002
  Cyclic GFR-binding peptide
  MOD_RES (28)..(30): Xaa is C or S

SEQ ID NO: 50602 - protein, 34 aa, Artificial Sequence; identical to SEQ ID NO: 17003
  Cyclic GFR-binding peptide
  MOD_RES (1)..(2)..(34): Xaa is C or S

SEQ ID NO: 50603 - protein, 29 aa, Artificial Sequence
  Cyclic GFR-binding peptide
PTKLEPLTVLYYDDSSNVIEQLSNNMVVR

SEQ ID NO: 50604 - protein, 28 aa, Artificial Sequence
  Cyclic GFR-binding peptide
PTELSPISMLFIDEYDKVVYKQYEEMVV

SEQ ID NO: 50605 - protein, 30 aa, Artificial Sequence; identical to SEQ ID NO: 17007
  Cyclic GFR-binding peptide

SEQ ID NO: 50606 - protein, 25 aa, Artificial Sequence
  Cyclic GFR-binding peptide
ELNAISMLYFDENEKVVLKKYRDMV

SEQ ID NO: 50607 - protein, 35 aa, Artificial Sequence; identical to SEQ ID NO: 6630
  Cyclic GFR-binding peptide
  MOD_RES (6)..(7): Xaa is C or S

SEQ ID NO: 50608 - protein, 36 aa, Artificial Sequence; identical to SEQ ID NO: 17010
  Cyclic GFR-binding peptide
  MOD_RES (6)..(7): Xaa is C or S

SEQ ID NO: 50609 - protein, 26 aa, Artificial Sequence
  Cyclic GFR-binding peptide
APTKLEPLPVVYYDDSSNVIEQLSNN

SEQ ID NO: 50610 - protein, 28 aa, Artificial Sequence
  Cyclic GFR-binding peptide
  MOD_RES (2)..(3): Xaa is C or S
AXXVPTELEPLTMLYYDENEKVVEQLSN

SEQ ID NO: 50611 - protein, 26 aa, Artificial Sequence
  Cyclic GFR-binding peptide
LEPLPMVYYDEYDKVVEQLSNEMVVE

SEQ ID NO: 50612 - protein, 28 aa, Artificial Sequence
  Cyclic GFR-binding peptide
RLNAISILYFDSANNVVLKKYRDMVVES

SEQ ID NO: 50613 - protein, 39 aa, Artificial Sequence; identical to SEQ ID NO: 17016
  Cyclic GFR-binding peptide
  MOD_RES (5)..(6)..(38): Xaa is C or S

SEQ ID NO: 50614 - protein, 35 aa, Artificial Sequence; identical to SEQ ID NO: 17018
  Cyclic GFR-binding peptide
  MOD_RES (4)..(5): Xaa is C or S

SEQ ID NO: 50615 - protein, 35 aa, Artificial Sequence; identical to SEQ ID NO: 17020
  Cyclic GFR-binding peptide
  MOD_RES (2)..(3)..(35): Xaa is C or S

SEQ ID NO: 50616 - protein, 36 aa, Artificial Sequence; identical to SEQ ID NO: 17021
  Cyclic GFR-binding peptide
  MOD_RES (2)..(3)..(35): Xaa is C or S

SEQ ID NO: 50617 - protein, 36 aa, Artificial Sequence; identical to SEQ ID NO: 17022
  Cyclic GFR-binding peptide
  MOD_RES (2)..(3)..(35): Xaa is C or S

SEQ ID NO: 50618 - protein, 24 aa, Artificial Sequence
  Cyclic GFR-binding peptide
PQDLEPLPIVYYVGRTPKVEQLSN

SEQ ID NO: 50619 - protein, 33 aa, Artificial Sequence; identical to SEQ ID NO: 17025
  Cyclic GFR-binding peptide
  MOD_RES (6)..(7): Xaa is C or S

SEQ ID NO: 50620 - protein, 30 aa, Artificial Sequence; identical to SEQ ID NO: 17026
  Cyclic GFR-binding peptide
  MOD_RES (2)..(3): Xaa is C or S

SEQ ID NO: 50621 - protein, 34 aa, Artificial Sequence; identical to SEQ ID NO: 17027
  Cyclic GFR-binding peptide
  MOD_RES (32)..(34): Xaa is C or S

SEQ ID NO: 50622 - protein, 27 aa, Artificial Sequence
  Cyclic GFR-binding peptide
  MOD_RES (1)..(2): Xaa is C or S
XXVSQDLEPLPIVYYIGKTPKIEQLSN

SEQ ID NO: 50623 - protein, 32 aa, Artificial Sequence; identical to SEQ ID NO: 6653
  Cyclic GFR-binding peptide
  MOD_RES (6)..(7): Xaa is C or S

SEQ ID NO: 50624 - protein, 28 aa, Artificial Sequence
  Cyclic GFR-binding peptide
PTKLEPLTVLYYDDSSNVIEQLSNNMVV

SEQ ID NO: 50625 - protein, 39 aa, Artificial Sequence; identical to SEQ ID NO: 17032
  Cyclic GFR-binding peptide
  MOD_RES (4)..(5)..(37)..(39): Xaa is C or S

SEQ ID NO: 50626 - protein, 28 aa, Artificial Sequence
  Cyclic GFR-binding peptide
  MOD_RES (1)..(2): Xaa is C or S
XXVSQDLNAISILYFIGKTPKILKKYRM

SEQ ID NO: 50627 - protein, 23 aa, Artificial Sequence
  Cyclic GFR-binding peptide
SPISVLFIDDSSNVIYKQYENMV

SEQ ID NO: 50628 - protein, 29 aa, Artificial Sequence
  Cyclic GFR-binding peptide
  MOD_RES (1)..(2): Xaa is C or S
XXVPTELSPISMLFIDEYDKVVYKQYEEM

SEQ ID NO: 50629 - protein, 35 aa, Artificial Sequence; identical to SEQ ID NO: 17036
  Cyclic GFR-binding peptide
  MOD_RES (2)..(3)..(35): Xaa is C or S

SEQ ID NO: 50630 - protein, 25 aa, Artificial Sequence
  Cyclic GFR-binding peptide
LEPLPMVYYDENEKVVEQLSNDMVV

SEQ ID NO: 50631 - protein, 25 aa, Artificial Sequence
  Cyclic GFR-binding peptide
ELSPISMLFIDEYDKVVYKQYEEMV

SEQ ID NO: 50632 - protein, 35 aa, Artificial Sequence; identical to SEQ ID NO: 17039
  Cyclic GFR-binding peptide
  MOD_RES (2)..(3)..(35): Xaa is C or S

SEQ ID NO: 50633 - protein, 22 aa, Artificial Sequence
  Cyclic GFR-binding peptide
QLEPLTVLYYDDSSNVIEQLSN

SEQ ID NO: 50634 - protein, 34 aa, Artificial Sequence; identical to SEQ ID NO: 17041
  Cyclic GFR-binding peptide
  MOD_RES (1)..(33): Xaa is C or S

SEQ ID NO: 50635 - protein, 28 aa, Artificial Sequence
  Cyclic GFR-binding peptide
TELNAISMLYFDEYDKVVLKKYREMVVE

SEQ ID NO: 50636 - protein, 32 aa, Artificial Sequence; identical to SEQ ID NO: 17043
  Cyclic GFR-binding peptide
  MOD_RES (32)..(32): Xaa is C or S

SEQ ID NO: 50637 - protein, 32 aa, Artificial Sequence; identical to SEQ ID NO: 17045
  Cyclic GFR-binding peptide
  MOD_RES (31)..(31): Xaa is C or S

SEQ ID NO: 50638 - protein, 31 aa, Artificial Sequence; identical to SEQ ID NO: 17046
  Cyclic GFR-binding peptide
  MOD_RES (6)..(6): Xaa is C or S

SEQ ID NO: 50639 - protein, 36 aa, Artificial Sequence; identical to SEQ ID NO: 17047
  Cyclic GFR-binding peptide
  MOD_RES (1)..(33)..(35): Xaa is C or S

SEQ ID NO: 50640 - protein, 32 aa, Artificial Sequence; identical to SEQ ID NO: 17048
  Cyclic GFR-binding peptide
  MOD_RES (1)..(2): Xaa is C or S

SEQ ID NO: 50641 - protein, 37 aa, Artificial Sequence; identical to SEQ ID NO: 6675
  Cyclic GFR-binding peptide
  MOD_RES (4)..(5)..(36): Xaa is C or S

SEQ ID NO: 50642 - protein, 33 aa, Artificial Sequence; identical to SEQ ID NO: 17050
  Cyclic GFR-binding peptide
  MOD_RES (5)..(5): Xaa is C or S

SEQ ID NO: 50643 - protein, 28 aa, Artificial Sequence
  Cyclic GFR-binding peptide
PTRLEPLPIVYYDSANNVVEQLSNDMVV

SEQ ID NO: 50644 - protein, 26 aa, Artificial Sequence
  Cyclic GFR-binding peptide
  MOD_RES (26)..(26): Xaa is C or S
NAISILYFVGRTPKVLKKYRMVVKSX

SEQ ID NO: 50645 - protein, 41 aa, Artificial Sequence; identical to SEQ ID NO: 6678
  Cyclic GFR-binding peptide
  MOD_RES (5)..(6)..(38)..(40): Xaa is C or S

SEQ ID NO: 50646 - protein, 24 aa, Artificial Sequence
  Cyclic GFR-binding peptide
LNAISILYFIGKTPKILKKYRMIV

SEQ ID NO: 50647 - protein, 34 aa, Artificial Sequence; identical to SEQ ID NO: 17056
  Cyclic GFR-binding peptide
  MOD_RES (6)..(7): Xaa is C or S

SEQ ID NO: 50648 - protein, 31 aa, Artificial Sequence; identical to SEQ ID NO: 17058
  Cyclic GFR-binding peptide
  MOD_RES (1)..(1): Xaa is C or S

SEQ ID NO: 50649 - protein, 35 aa, Artificial Sequence; identical to SEQ ID NO: 17059
  Cyclic GFR-binding peptide
  MOD_RES (2)..(3)..(35): Xaa is C or S

SEQ ID NO: 50650 - protein, 39 aa, Artificial Sequence; identical to SEQ ID NO: 17060
  Cyclic GFR-binding peptide
  MOD_RES (5)..(37)..(39): Xaa is C or S

SEQ ID NO: 50651 - protein, 41 aa, Artificial Sequence; identical to SEQ ID NO: 17062
  Cyclic GFR-binding peptide
  MOD_RES (6)..(38)..(40): Xaa is C or S

SEQ ID NO: 50652 - protein, 36 aa, Artificial Sequence; identical to SEQ ID NO: 17063
  Cyclic GFR-binding peptide
  MOD_RES (2)..(3)..(35): Xaa is C or S

SEQ ID NO: 50653 - protein, 36 aa, Artificial Sequence; identical to SEQ ID NO: 17064
  Cyclic GFR-binding peptide
  MOD_RES (5)..(6): Xaa is C or S

SEQ ID NO: 50654 - protein, 29 aa, Artificial Sequence
  Cyclic GFR-binding peptide
  MOD_RES (28)..(28): Xaa is C or S
DLSPISILFIVGRTPKVYKQYEMVVKSXK

SEQ ID NO: 50655 - protein, 26 aa, Artificial Sequence
  Cyclic GFR-binding peptide
SQDLEPLPIVYYIGKTPKIEQLSNMI

SEQ ID NO: 50656 - protein, 36 aa, Artificial Sequence; identical to SEQ ID NO: 6688
  Cyclic GFR-binding peptide
  MOD_RES (4)..(5): Xaa is C or S

SEQ ID NO: 50657 - protein, 34 aa, Artificial Sequence; identical to SEQ ID NO: 6693
  Cyclic GFR-binding peptide
  MOD_RES (31)..(33): Xaa is C or S

SEQ ID NO: 50658 - protein, 29 aa, Artificial Sequence
  Cyclic GFR-binding peptide
PTKLEPLPVVYYDDSSNVIEQLSNNMVVR

SEQ ID NO: 50659 - protein, 30 aa, Artificial Sequence; identical to SEQ ID NO: 17071
  Cyclic GFR-binding peptide
  MOD_RES (4)..(4): Xaa is C or S

SEQ ID NO: 50660 - protein, 33 aa, Artificial Sequence; identical to SEQ ID NO: 17072
  Cyclic GFR-binding peptide
  MOD_RES (6)..(7): Xaa is C or S

SEQ ID NO: 50661 - protein, 27 aa, Artificial Sequence
  Cyclic GFR-binding peptide
  MOD_RES (26)..(26): Xaa is C or S
EPLPIVYYIGKTPKIEQLSNMIVKSXK

SEQ ID NO: 50662 - protein, 29 aa, Artificial Sequence
  Cyclic GFR-binding peptide
  MOD_RES (2)..(3): Xaa is C or S
PXXAPTKLSPISVLFIDDSSNVIYKQYEN

SEQ ID NO: 50663 - protein, 25 aa, Artificial Sequence
  Cyclic GFR-binding peptide
QDLEPLPIVYYVGRTPKVEQLSNMV

SEQ ID NO: 50664 - protein, 28 aa, Artificial Sequence
  Cyclic GFR-binding peptide
  MOD_RES (28)..(28): Xaa is C or S
LEPLTVLYYDDSSNVIEQLSNNMVVRAX

SEQ ID NO: 50665 - protein, 24 aa, Artificial Sequence
  Cyclic GFR-binding peptide
LSPISMLFIDEYDKVVYKQYEEMV

SEQ ID NO: 50666 - protein, 23 aa, Artificial Sequence
  Cyclic GFR-binding peptide
TKLSPISVLFIDDSSNVIYKQYE

SEQ ID NO: 50667 - protein, 29 aa, Artificial Sequence
  Cyclic GFR-binding peptide
  MOD_RES (1)..(2): Xaa is C or S
XXVPQALNAISILYFVGRKPKVLKKYRMI

SEQ ID NO: 50668 - protein, 35 aa, Artificial Sequence; identical to SEQ ID NO: 6711
  Cyclic GFR-binding peptide
  MOD_RES (2)..(3)..(35): Xaa is C or S

SEQ ID NO: 50669 - protein, 28 aa, Artificial Sequence
  Cyclic GFR-binding peptide
  MOD_RES (1)..(2): Xaa is C or S
XXVPTELEPLTMLYYDENEKVVEQLSND

SEQ ID NO: 50670 - protein, 27 aa, Artificial Sequence
  Cyclic GFR-binding peptide
QDLNAISILYFIGKTPKILKKYRMIVK

SEQ ID NO: 50671 - protein, 40 aa, Artificial Sequence; identical to SEQ ID NO: 17087
  Cyclic GFR-binding peptide
  MOD_RES (6)..(38)..(40): Xaa is C or S

SEQ ID NO: 50672 - protein, 31 aa, Artificial Sequence; identical to SEQ ID NO: 17088
  Cyclic GFR-binding peptide
  MOD_RES (31)..(31): Xaa is C or S

SEQ ID NO: 50673 - protein, 36 aa, Artificial Sequence; identical to SEQ ID NO: 6716
  Cyclic GFR-binding peptide
  MOD_RES (6)..(7): Xaa is C or S

SEQ ID NO: 50674 - protein, 25 aa, Artificial Sequence
  Cyclic GFR-binding peptide
QLEPLPVVYYDDSSNVIEQLSNNMV

SEQ ID NO: 50675 - protein, 30 aa, Artificial Sequence; identical to SEQ ID NO: 17092
  Cyclic GFR-binding peptide
  MOD_RES (1)..(1): Xaa is C or S

SEQ ID NO: 50676 - protein, 36 aa, Artificial Sequence; identical to SEQ ID NO: 17094
  Cyclic GFR-binding peptide
  MOD_RES (1)..(2)..(33)..(35): Xaa is C or S

SEQ ID NO: 50677 - protein, 33 aa, Artificial Sequence; identical to SEQ ID NO: 17095
  Cyclic GFR-binding peptide
  MOD_RES (31)..(33): Xaa is C or S

SEQ ID NO: 50678 - protein, 33 aa, Artificial Sequence; identical to SEQ ID NO: 17096
  Cyclic GFR-binding peptide
  MOD_RES (31)..(33): Xaa is C or S

SEQ ID NO: 50679 - protein, 31 aa, Artificial Sequence; identical to SEQ ID NO: 17097
  Cyclic GFR-binding peptide
  MOD_RES (1)..(2): Xaa is C or S

SEQ ID NO: 50680 - protein, 36 aa, Artificial Sequence; identical to SEQ ID NO: 17098
  Cyclic GFR-binding peptide
  MOD_RES (5)..(6): Xaa is C or S

SEQ ID NO: 50681 - protein, 25 aa, Artificial Sequence
  Cyclic GFR-binding peptide
VPQALSPISILFIVGRKPKVYKQYE

SEQ ID NO: 50682 - protein, 35 aa, Artificial Sequence; identical to SEQ ID NO: 17102
  Cyclic GFR-binding peptide
  MOD_RES (3)..(4): Xaa is C or S

SEQ ID NO: 50683 - protein, 33 aa, Artificial Sequence; identical to SEQ ID NO: 6727
  Cyclic GFR-binding peptide
  MOD_RES (6)..(7): Xaa is C or S

SEQ ID NO: 50684 - protein, 33 aa, Artificial Sequence; identical to SEQ ID NO: 17105
  Cyclic GFR-binding peptide
  MOD_RES (2)..(3): Xaa is C or S

SEQ ID NO: 50685 - protein, 29 aa, Artificial Sequence
  Cyclic GFR-binding peptide
  MOD_RES (1)..(2): Xaa is C or S
XXVPTRLEPLPIVYYDSANNVVEQLSNDM

SEQ ID NO: 50686 - protein, 34 aa, Artificial Sequence; identical to SEQ ID NO: 17108
  Cyclic GFR-binding peptide
  MOD_RES (3)..(4): Xaa is C or S

SEQ ID NO: 50687 - protein, 27 aa, Artificial Sequence
  Cyclic GFR-binding peptide
  MOD_RES (27)..(27): Xaa is C or S
SPISVLFIDDSSNVIYKQYENMVVRAX

SEQ ID NO: 50688 - protein, 38 aa, Artificial Sequence; identical to SEQ ID NO: 17110
  Cyclic GFR-binding peptide
  MOD_RES (6)..(7)..(38): Xaa is C or S

SEQ ID NO: 50689 - protein, 32 aa, Artificial Sequence; identical to SEQ ID NO: 6732
  Cyclic GFR-binding peptide
  MOD_RES (30)..(32): Xaa is C or S

SEQ ID NO: 50690 - protein, 33 aa, Artificial Sequence; identical to SEQ ID NO: 17112
  Cyclic GFR-binding peptide
  MOD_RES (6)..(7): Xaa is C or S

SEQ ID NO: 50691 - protein, 34 aa, Artificial Sequence; identical to SEQ ID NO: 17113
  Cyclic GFR-binding peptide
  MOD_RES (6)..(7): Xaa is C or S

SEQ ID NO: 50692 - protein, 22 aa, Artificial Sequence
  Cyclic GFR-binding peptide
DLEPLPIVYYIGKTPKIEQLSN

SEQ ID NO: 50693 - protein, 37 aa, Artificial Sequence; identical to SEQ ID NO: 17119
  Cyclic GFR-binding peptide
  MOD_RES (6)..(7): Xaa is C or S

SEQ ID NO: 50694 - protein, 27 aa, Artificial Sequence
  Cyclic GFR-binding peptide
LNAISMLYFDENEKVVLKKYRDMVVEG

SEQ ID NO: 50695 - protein, 27 aa, Artificial Sequence
  Cyclic GFR-binding peptide
  MOD_RES (1)..(1): Xaa is C or S
XVPTELNAISMLYFDENEKVVLKKYRD

SEQ ID NO: 50696 - protein, 35 aa, Artificial Sequence; identical to SEQ ID NO: 17126
  Cyclic GFR-binding peptide
  MOD_RES (6)..(7): Xaa is C or S

SEQ ID NO: 50697 - protein, 26 aa, Artificial Sequence
  Cyclic GFR-binding peptide
LEPLTMLYYDEYDKVVEQLSNEMVVE

SEQ ID NO: 50698 - protein, 30 aa, Artificial Sequence; identical to SEQ ID NO: 17128
  Cyclic GFR-binding peptide

SEQ ID NO: 50699 - protein, 35 aa, Artificial Sequence; identical to SEQ ID NO: 17129
  Cyclic GFR-binding peptide
  MOD_RES (5)..(6): Xaa is C or S

SEQ ID NO: 50700 - protein, 31 aa, Artificial Sequence; identical to SEQ ID NO: 17130
  Cyclic GFR-binding peptide
  MOD_RES (5)..(6): Xaa is C or S

SEQ ID NO: 50701 - protein, 26 aa, Artificial Sequence
  Cyclic GFR-binding peptide
VPTRLNAISILYFDSANNVVLKKYRD

SEQ ID NO: 50702 - protein, 37 aa, Artificial Sequence; identical to SEQ ID NO: 17132
  Cyclic GFR-binding peptide
  MOD_RES (1)..(2)..(34)..(36): Xaa is C or S

SEQ ID NO: 50703 - protein, 38 aa, Artificial Sequence; identical to SEQ ID NO: 17134
  Cyclic GFR-binding peptide
  MOD_RES (5)..(6)..(38): Xaa is C or S

SEQ ID NO: 50704 - protein, 33 aa, Artificial Sequence; identical to SEQ ID NO: 17135
  Cyclic GFR-binding peptide
  MOD_RES (2)..(3): Xaa is C or S

SEQ ID NO: 50705 - protein, 32 aa, Artificial Sequence; identical to SEQ ID NO: 17136
  Cyclic GFR-binding peptide
  MOD_RES (31)..(31): Xaa is C or S

SEQ ID NO: 50706 - protein, 28 aa, Artificial Sequence
  Cyclic GFR-binding peptide
VPTELEPLPMVYYDENEKVVEQLSNDMV

SEQ ID NO: 50707 - protein, 28 aa, Artificial Sequence
  Cyclic GFR-binding peptide
  MOD_RES (27)..(27): Xaa is C or S
NAISMLYFDENEKVVLKKYRDMVVEGXG

SEQ ID NO: 50708 - protein, 38 aa, Artificial Sequence; identical to SEQ ID NO: 17139
  Cyclic GFR-binding peptide
  MOD_RES (4)..(5)..(36)..(38): Xaa is C or S

SEQ ID NO: 50709 - protein, 26 aa, Artificial Sequence
  Cyclic GFR-binding peptide
QDLSPISILFIIGKTPKIYKQYEMIV

SEQ ID NO: 50710 - protein, 34 aa, Artificial Sequence; identical to SEQ ID NO: 17142
  Cyclic GFR-binding peptide
  MOD_RES (32)..(34): Xaa is C or S

SEQ ID NO: 50711 - protein, 33 aa, Artificial Sequence; identical to SEQ ID NO: 17143
  Cyclic GFR-binding peptide
  MOD_RES (5)..(6): Xaa is C or S

SEQ ID NO: 50712 - protein, 33 aa, Artificial Sequence; identical to SEQ ID NO: 17144
  Cyclic GFR-binding peptide
  MOD_RES (3)..(4): Xaa is C or S

SEQ ID NO: 50713 - protein, 34 aa, Artificial Sequence; identical to SEQ ID NO: 17145
  Cyclic GFR-binding peptide
  MOD_RES (4)..(5): Xaa is C or S

SEQ ID NO: 50714 - protein, 35 aa, Artificial Sequence; identical to SEQ ID NO: 17148
  Cyclic GFR-binding peptide
  MOD_RES (1)..(32)..(34): Xaa is C or S

SEQ ID NO: 50715 - protein, 36 aa, Artificial Sequence; identical to SEQ ID NO: 17149
  Cyclic GFR-binding peptide
  MOD_RES (4)..(5)..(36): Xaa is C or S

SEQ ID NO: 50716 - protein, 30 aa, Artificial Sequence; identical to SEQ ID NO: 17150
  Cyclic GFR-binding peptide
  MOD_RES (1)..(1): Xaa is C or S

SEQ ID NO: 50717 - protein, 35 aa, Artificial Sequence; identical to SEQ ID NO: 17151
  Cyclic GFR-binding peptide
  MOD_RES (6)..(7): Xaa is C or S

SEQ ID NO: 50718 - protein, 40 aa, Artificial Sequence; identical to SEQ ID NO: 17152
  Cyclic GFR-binding peptide
  MOD_RES (5)..(6)..(38)..(40): Xaa is C or S

SEQ ID NO: 50719 - protein, 30 aa, Artificial Sequence; identical to SEQ ID NO: 6782
  Cyclic GFR-binding peptide
  MOD_RES (1)..(1): Xaa is C or S

SEQ ID NO: 50720 - protein, 40 aa, Artificial Sequence; identical to SEQ ID NO: 17157
  Cyclic GFR-binding peptide
  MOD_RES (4)..(5)..(37)..(39): Xaa is C or S

SEQ ID NO: 50721 - protein, 30 aa, Artificial Sequence; identical to SEQ ID NO: 17158
  Cyclic GFR-binding peptide
  MOD_RES (2)..(3): Xaa is C or S

SEQ ID NO: 50722 - protein, 31 aa, Artificial Sequence; identical to SEQ ID NO: 17159
  Cyclic GFR-binding peptide
  MOD_RES (29)..(31): Xaa is C or S

SEQ ID NO: 50723 - protein, 33 aa, Artificial Sequence; identical to SEQ ID NO: 6787
  Cyclic GFR-binding peptide
  MOD_RES (3)..(4): Xaa is C or S

SEQ ID NO: 50724 - protein, 31 aa, Artificial Sequence; identical to SEQ ID NO: 6792
  Cyclic GFR-binding peptide
  MOD_RES (1)..(1): Xaa is C or S

SEQ ID NO: 50725 - protein, 32 aa, Artificial Sequence; identical to SEQ ID NO: 17164
  Cyclic GFR-binding peptide
  MOD_RES (7)..(7): Xaa is C or S

SEQ ID NO: 50726 - protein, 24 aa, Artificial Sequence
  Cyclic GFR-binding peptide
DLEPLPIVYYIGKTPKIEQLSNMI

SEQ ID NO: 50727 - protein, 28 aa, Artificial Sequence
  Cyclic GFR-binding peptide
  MOD_RES (2)..(3): Xaa is C or S
PXXAPTKLEPLPVVYYDDSSNVIEQLSN

SEQ ID NO: 50728 - protein, 25 aa, Artificial Sequence
  Cyclic GFR-binding peptide
NAISILYFDSANNVVLKKYRDMVVE

SEQ ID NO: 50729 - protein, 35 aa, Artificial Sequence; identical to SEQ ID NO: 17170
  Cyclic GFR-binding peptide
  MOD_RES (1)..(33)..(35): Xaa is C or S

SEQ ID NO: 50730 - protein, 30 aa, Artificial Sequence; identical to SEQ ID NO: 17171
  Cyclic GFR-binding peptide
  MOD_RES (4)..(4): Xaa is C or S

SEQ ID NO: 50731 - protein, 29 aa, Artificial Sequence
  Cyclic GFR-binding peptide
  MOD_RES (3)..(4): Xaa is C or S
KPXXAPTQLEPLPVVYYDDSSNVIEQLSN

SEQ ID NO: 50732 - protein, 35 aa, Artificial Sequence; identical to SEQ ID NO: 17175
  Cyclic GFR-binding peptide
  MOD_RES (6)..(6): Xaa is C or S

SEQ ID NO: 50733 - protein, 37 aa, Artificial Sequence; identical to SEQ ID NO: 6803
  Cyclic GFR-binding peptide
  MOD_RES (6)..(7): Xaa is C or S

SEQ ID NO: 50734 - protein, 36 aa, Artificial Sequence; identical to SEQ ID NO: 17177
  Cyclic GFR-binding peptide
  MOD_RES (2)..(34)..(36): Xaa is C or S

SEQ ID NO: 50735 - protein, 33 aa, Artificial Sequence; identical to SEQ ID NO: 17180
  Cyclic GFR-binding peptide
  MOD_RES (31)..(33): Xaa is C or S

SEQ ID NO: 50736 - protein, 32 aa, Artificial Sequence; identical to SEQ ID NO: 17181
  Cyclic GFR-binding peptide
  MOD_RES (31)..(31): Xaa is C or S

SEQ ID NO: 50737 - protein, 32 aa, Artificial Sequence; identical to SEQ ID NO: 17182
  Cyclic GFR-binding peptide
  MOD_RES (3)..(4): Xaa is C or S

SEQ ID NO: 50738 - protein, 36 aa, Artificial Sequence; identical to SEQ ID NO: 17184
  Cyclic GFR-binding peptide
  MOD_RES (2)..(3)..(35): Xaa is C or S

SEQ ID NO: 50739 - protein, 30 aa, Artificial Sequence; identical to SEQ ID NO: 17187
  Cyclic GFR-binding peptide
  MOD_RES (2)..(3): Xaa is C or S

SEQ ID NO: 50740 - protein, 23 aa, Artificial Sequence
  Cyclic GFR-binding peptide
TRLEPLPIVYYDSANNVVEQLSN

SEQ ID NO: 50741 - protein, 24 aa, Artificial Sequence
  Cyclic GFR-binding peptide
PTKLSPISVLFIDDSSNVIYKQYE

SEQ ID NO: 50742 - protein, 35 aa, Artificial Sequence; identical to SEQ ID NO: 6818
  Cyclic GFR-binding peptide
  MOD_RES (1)..(32)..(34): Xaa is C or S

SEQ ID NO: 50743 - protein, 28 aa, Artificial Sequence
  Cyclic GFR-binding peptide
  MOD_RES (1)..(2): Xaa is C or S
XXVPQDLNAISILYFVGRTPKVLKKYRM

SEQ ID NO: 50744 - protein, 20 aa, Artificial Sequence
  Cyclic GFR-binding peptide
EPLPIVYYDSANNVVEQLSN

SEQ ID NO: 50745 - protein, 34 aa, Artificial Sequence; identical to SEQ ID NO: 17196
  Cyclic GFR-binding peptide
  MOD_RES (6)..(7): Xaa is C or S

SEQ ID NO: 50746 - protein, 37 aa, Artificial Sequence; identical to SEQ ID NO: 17198
  Cyclic GFR-binding peptide
  MOD_RES (6)..(7): Xaa is C or S

SEQ ID NO: 50747 - protein, 35 aa, Artificial Sequence; identical to SEQ ID NO: 17199
  Cyclic GFR-binding peptide
  MOD_RES (1)..(32)..(34): Xaa is C or S

SEQ ID NO: 50748 - protein, 21 aa, Artificial Sequence
  Cyclic GFR-binding peptide
EPLTMLYYDENEKVVEQLSND

SEQ ID NO: 50749 - protein, 35 aa, Artificial Sequence; identical to SEQ ID NO: 17201
  Cyclic GFR-binding peptide
  MOD_RES (4)..(5): Xaa is C or S

SEQ ID NO: 50750 - protein, 28 aa, Artificial Sequence
  Cyclic GFR-binding peptide
VPQDLEPLPIVYYVGRTPKVEQLSNMVV

SEQ ID NO: 50751 - protein, 29 aa, Artificial Sequence
  Cyclic GFR-binding peptide
  MOD_RES (2)..(3): Xaa is C or S
PXXAPTKLEPLPVVYYDDSSNVIEQLSNN

SEQ ID NO: 50752 - protein, 34 aa, Artificial Sequence; identical to SEQ ID NO: 17206
  Cyclic GFR-binding peptide
  MOD_RES (4)..(5): Xaa is C or S

SEQ ID NO: 50753 - protein, 38 aa, Artificial Sequence; identical to SEQ ID NO: 17208
  Cyclic GFR-binding peptide
  MOD_RES (4)..(5)..(36)..(38): Xaa is C or S

SEQ ID NO: 50754 - protein, 33 aa, Artificial Sequence; identical to SEQ ID NO: 17209
  Cyclic GFR-binding peptide
  MOD_RES (2)..(3): Xaa is C or S

SEQ ID NO: 50755 - protein, 31 aa, Artificial Sequence; identical to SEQ ID NO: 17212
  Cyclic GFR-binding peptide
  MOD_RES (2)..(3): Xaa is C or S

SEQ ID NO: 50756 - protein, 30 aa, Artificial Sequence; identical to SEQ ID NO: 17215
  Cyclic GFR-binding peptide
  MOD_RES (28)..(30): Xaa is C or S

SEQ ID NO: 50757 - protein, 34 aa, Artificial Sequence; identical to SEQ ID NO: 17216
  Cyclic GFR-binding peptide
  MOD_RES (1)..(32)..(34): Xaa is C or S

SEQ ID NO: 50758 - protein, 39 aa, Artificial Sequence; identical to SEQ ID NO: 17217
  Cyclic GFR-binding peptide
  MOD_RES (3)..(4)..(36)..(38): Xaa is C or S

SEQ ID NO: 50759 - protein, 24 aa, Artificial Sequence
  Cyclic GFR-binding peptide
QLEPLPVVYYDDSSNVIEQLSNNM

SEQ ID NO: 50760 - protein, 32 aa, Artificial Sequence; identical to SEQ ID NO: 17219
  Cyclic GFR-binding peptide
  MOD_RES (4)..(5): Xaa is C or S

SEQ ID NO: 50761 - protein, 28 aa, Artificial Sequence
  Cyclic GFR-binding peptide
  MOD_RES (27)..(27): Xaa is C or S
LEPLTILYYVGRKPKVEQLSNMIVRSXK

SEQ ID NO: 50762 - protein, 32 aa, Artificial Sequence; identical to SEQ ID NO: 17221
  Cyclic GFR-binding peptide
  MOD_RES (6)..(7): Xaa is C or S

SEQ ID NO: 50763 - protein, 26 aa, Artificial Sequence
  Cyclic GFR-binding peptide
EPLPIVYYDSANNVVEQLSNDMVVES

SEQ ID NO: 50764 - protein, 38 aa, Artificial Sequence; identical to SEQ ID NO: 17223
  Cyclic GFR-binding peptide
  MOD_RES (6)..(7): Xaa is C or S

SEQ ID NO: 50765 - protein, 29 aa, Artificial Sequence
  Cyclic GFR-binding peptide
  MOD_RES (28)..(28): Xaa is C or S
LNAISMLYFDENEKVVLKKYRDMVVEGXG

SEQ ID NO: 50766 - protein, 31 aa, Artificial Sequence; identical to SEQ ID NO: 17225
  Cyclic GFR-binding peptide

SEQ ID NO: 50767 - protein, 27 aa, Artificial Sequence
  Cyclic GFR-binding peptide
APTQLEPLPVVYYDDSSNVIEQLSNNM

SEQ ID NO: 50768 - protein, 41 aa, Artificial Sequence; identical to SEQ ID NO: 17227
  Cyclic GFR-binding peptide
  MOD_RES (5)..(6)..(38)..(40): Xaa is C or S

SEQ ID NO: 50769 - protein, 35 aa, Artificial Sequence; identical to SEQ ID NO: 17229
  Cyclic GFR-binding peptide
  MOD_RES (3)..(4): Xaa is C or S

SEQ ID NO: 50770 - protein, 31 aa, Artificial Sequence; identical to SEQ ID NO: 17230
  Cyclic GFR-binding peptide
  MOD_RES (30)..(30): Xaa is C or S

SEQ ID NO: 50771 - protein, 31 aa, Artificial Sequence; identical to SEQ ID NO: 17232
  Cyclic GFR-binding peptide
  MOD_RES (1)..(1): Xaa is C or S

SEQ ID NO: 50772 - protein, 21 aa, Artificial Sequence
  Cyclic GFR-binding peptide
NAISMLYFDENEKVVLKKYRD

SEQ ID NO: 50773 - protein, 29 aa, Artificial Sequence
  Cyclic GFR-binding peptide
  MOD_RES (3)..(4): Xaa is C or S
SPXXVPQDLSPISILFIVGRTPKVYKQYE

SEQ ID NO: 50774 - protein, 30 aa, Artificial Sequence; identical to SEQ ID NO: 17236
  Cyclic GFR-binding peptide
  MOD_RES (4)..(5): Xaa is C or S

SEQ ID NO: 50775 - protein, 25 aa, Artificial Sequence
  Cyclic GFR-binding peptide
TRLEPLTILYYDSANNVVEQLSNDM

SEQ ID NO: 50776 - protein, 28 aa, Artificial Sequence
  Cyclic GFR-binding peptide
KLEPLPVVYYDDSSNVIEQLSNNMVVRS

SEQ ID NO: 50777 - protein, 34 aa, Artificial Sequence; identical to SEQ ID NO: 17239
  Cyclic GFR-binding peptide
  MOD_RES (1)..(32)..(34): Xaa is C or S

SEQ ID NO: 50778 - protein, 22 aa, Artificial Sequence
  Cyclic GFR-binding peptide
RLEPLTILYYDSANNVVEQLSN

SEQ ID NO: 50779 - protein, 31 aa, Artificial Sequence; identical to SEQ ID NO: 17241
  Cyclic GFR-binding peptide
  MOD_RES (30)..(30): Xaa is C or S

SEQ ID NO: 50780 - protein, 30 aa, Artificial Sequence; identical to SEQ ID NO: 6872
  Cyclic GFR-binding peptide
  MOD_RES (3)..(4): Xaa is C or S

SEQ ID NO: 50781 - protein, 24 aa, Artificial Sequence
  Cyclic GFR-binding peptide
ELNAISMLYFDEYDKVVLKKYREM

SEQ ID NO: 50782 - protein, 31 aa, Artificial Sequence; identical to SEQ ID NO: 17246
  Cyclic GFR-binding peptide
  MOD_RES (1)..(2): Xaa is C or S

SEQ ID NO: 50783 - protein, 25 aa, Artificial Sequence
  Cyclic GFR-binding peptide
LEPLTILYYVGRKPKVEQLSNMIVR

SEQ ID NO: 50784 - protein, 41 aa, Artificial Sequence; identical to SEQ ID NO: 17248
  Cyclic GFR-binding peptide
  MOD_RES (5)..(6)..(38)..(40): Xaa is C or S

SEQ ID NO: 50785 - protein, 26 aa, Artificial Sequence
  Cyclic GFR-binding peptide
RLNAISILYFDSANNVVLKKYRDMVV

SEQ ID NO: 50786 - protein, 35 aa, Artificial Sequence; identical to SEQ ID NO: 17251
  Cyclic GFR-binding peptide
  MOD_RES (3)..(4)..(35): Xaa is C or S

SEQ ID NO: 50787 - protein, 28 aa, Artificial Sequence
  Cyclic GFR-binding peptide
  MOD_RES (28)..(28): Xaa is C or S
ALEPLTILYYVGRKPKVEQLSNMIVRSX

SEQ ID NO: 50788 - protein, 28 aa, Artificial Sequence
  Cyclic GFR-binding peptide
  MOD_RES (28)..(28): Xaa is C or S
LNAISMLYFDENEKVVLKKYRDMVVEGX

SEQ ID NO: 50789 - protein, 29 aa, Artificial Sequence
  Cyclic GFR-binding peptide
  MOD_RES (29)..(29): Xaa is C or S
QDLEPLPIVYYVGRTPKVEQLSNMVVKSX

SEQ ID NO: 50790 - protein, 30 aa, Artificial Sequence; identical to SEQ ID NO: 6885
  Cyclic GFR-binding peptide

SEQ ID NO: 50791 - protein, 22 aa, Artificial Sequence
  Cyclic GFR-binding peptide
EPLPIVYYIGKTPKIEQLSNMI

SEQ ID NO: 50792 - protein, 28 aa, Artificial Sequence
  Cyclic GFR-binding peptide
TKLEPLTVLYYDDSSNVIEQLSNNMVVR

SEQ ID NO: 50793 - protein, 25 aa, Artificial Sequence
  Cyclic GFR-binding peptide
VPTELNAISMLYFDENEKVVLKKYR

SEQ ID NO: 50794 - protein, 30 aa, Artificial Sequence; identical to SEQ ID NO: 17261
  Cyclic GFR-binding peptide
  MOD_RES (30)..(30): Xaa is C or S

SEQ ID NO: 50795 - protein, 30 aa, Artificial Sequence; identical to SEQ ID NO: 6898
  Cyclic GFR-binding peptide
  MOD_RES (1)..(2): Xaa is C or S

SEQ ID NO: 50796 - protein, 34 aa, Artificial Sequence; identical to SEQ ID NO: 17264
  Cyclic GFR-binding peptide
  MOD_RES (4)..(4): Xaa is C or S

SEQ ID NO: 50797 - protein, 31 aa, Artificial Sequence; identical to SEQ ID NO: 17265
  Cyclic GFR-binding peptide
  MOD_RES (2)..(3): Xaa is C or S

SEQ ID NO: 50798 - protein, 31 aa, Artificial Sequence; identical to SEQ ID NO: 17266
  Cyclic GFR-binding peptide
  MOD_RES (5)..(6): Xaa is C or S

SEQ ID NO: 50799 - protein, 34 aa, Artificial Sequence; identical to SEQ ID NO: 17268
  Cyclic GFR-binding peptide
  MOD_RES (5)..(6): Xaa is C or S

SEQ ID NO: 50800 - protein, 37 aa, Artificial Sequence; identical to SEQ ID NO: 17269
  Cyclic GFR-binding peptide
  MOD_RES (7)..(7): Xaa is C or S

SEQ ID NO: 50801 - protein, 30 aa, Artificial Sequence; identical to SEQ ID NO: 17270
  Cyclic GFR-binding peptide

SEQ ID NO: 50802 - protein, 32 aa, Artificial Sequence; identical to SEQ ID NO: 17271
  Cyclic GFR-binding peptide
  MOD_RES (1)..(1): Xaa is C or S

SEQ ID NO: 50803 - protein, 25 aa, Artificial Sequence
  Cyclic GFR-binding peptide
NAISMLYFDENEKVVLKKYRDMVVE

SEQ ID NO: 50804 - protein, 26 aa, Artificial Sequence
  Cyclic GFR-binding peptide
DLSPISILFIIGKTPKIYKQYEMIVK

SEQ ID NO: 50805 - protein, 27 aa, Artificial Sequence
  Cyclic GFR-binding peptide
VSQDLEPLPIVYYIGKTPKIEQLSNMI

SEQ ID NO: 50806 - protein, 28 aa, Artificial Sequence
  Cyclic GFR-binding peptide
VSQDLNAISILYFIGKTPKILKKYRMIV

SEQ ID NO: 50807 - protein, 28 aa, Artificial Sequence
  Cyclic GFR-binding peptide
KLEPLTVLYYDDSSNVIEQLSNNMVVRS

SEQ ID NO: 50808 - protein, 25 aa, Artificial Sequence
  Cyclic GFR-binding peptide
ALSPISILFIVGRKPKVYKQYEMIV

SEQ ID NO: 50809 - protein, 27 aa, Artificial Sequence
  Cyclic GFR-binding peptide
TQLEPLPVVYYDDSSNVIEQLSNNMVV

SEQ ID NO: 50810 - protein, 34 aa, Artificial Sequence; identical to SEQ ID NO: 17284
  Cyclic GFR-binding peptide
  MOD_RES (2)..(34): Xaa is C or S

SEQ ID NO: 50811 - protein, 36 aa, Artificial Sequence; identical to SEQ ID NO: 17287
  Cyclic GFR-binding peptide
  MOD_RES (3)..(4)..(36): Xaa is C or S

SEQ ID NO: 50812 - protein, 33 aa, Artificial Sequence; identical to SEQ ID NO: 17288
  Cyclic GFR-binding peptide
  MOD_RES (2)..(3): Xaa is C or S

SEQ ID NO: 50813 - protein, 37 aa, Artificial Sequence; identical to SEQ ID NO: 17289
  Cyclic GFR-binding peptide
  MOD_RES (5)..(6)..(37): Xaa is C or S

SEQ ID NO: 50814 - protein, 28 aa, Artificial Sequence
  Cyclic GFR-binding peptide
QDLEPLPIVYYIGKTPKIEQLSNMIVKS

SEQ ID NO: 50815 - protein, 32 aa, Artificial Sequence; identical to SEQ ID NO: 6924
  Cyclic GFR-binding peptide
  MOD_RES (5)..(6): Xaa is C or S

SEQ ID NO: 50816 - protein, 28 aa, Artificial Sequence
  Cyclic GFR-binding peptide
  MOD_RES (2)..(3): Xaa is C or S
TXXVPTRLEPLPIVYYDSANNVVEQLSN

SEQ ID NO: 50817 - protein, 30 aa, Artificial Sequence; identical to SEQ ID NO: 17297
  Cyclic GFR-binding peptide

SEQ ID NO: 50818 - protein, 28 aa, Artificial Sequence
  Cyclic GFR-binding peptide
  MOD_RES (1)..(1): Xaa is C or S
XVPTELSPISMLFIDEYDKVVYKQYEEM

SEQ ID NO: 50819 - protein, 31 aa, Artificial Sequence; identical to SEQ ID NO: 17300
  Cyclic GFR-binding peptide
  MOD_RES (4)..(5): Xaa is C or S

SEQ ID NO: 50820 - protein, 23 aa, Artificial Sequence
  Cyclic GFR-binding peptide
TQLEPLPVVYYDDSSNVIEQLSN

SEQ ID NO: 50821 - protein, 31 aa, Artificial Sequence; identical to SEQ ID NO: 6936
  Cyclic GFR-binding peptide
  MOD_RES (31)..(31): Xaa is C or S

SEQ ID NO: 50822 - protein, 33 aa, Artificial Sequence; identical to SEQ ID NO: 17303
  Cyclic GFR-binding peptide
  MOD_RES (6)..(7): Xaa is C or S

SEQ ID NO: 50823 - protein, 40 aa, Artificial Sequence; identical to SEQ ID NO: 17304
  Cyclic GFR-binding peptide
  MOD_RES (7)..(39): Xaa is C or S

SEQ ID NO: 50824 - protein, 28 aa, Artificial Sequence
  Cyclic GFR-binding peptide
  MOD_RES (2)..(3): Xaa is C or S
PXXVPQALNAISILYFVGRKPKVLKKYR

SEQ ID NO: 50825 - protein, 28 aa, Artificial Sequence
  Cyclic GFR-binding peptide
  MOD_RES (27)..(27): Xaa is C or S
EPLTMLYYDENEKVVEQLSNDMVVEGXG

SEQ ID NO: 50826 - protein, 31 aa, Artificial Sequence; identical to SEQ ID NO: 17307
  Cyclic GFR-binding peptide

SEQ ID NO: 50827 - protein, 26 aa, Artificial Sequence
  Cyclic GFR-binding peptide
VPQALEPLTILYYVGRKPKVEQLSNM

SEQ ID NO: 50828 - protein, 25 aa, Artificial Sequence
  Cyclic GFR-binding peptide
LEPLTMLYYDENEKVVEQLSNDMVV

SEQ ID NO: 50829 - protein, 32 aa, Artificial Sequence; identical to SEQ ID NO: 17311
  Cyclic GFR-binding peptide
  MOD_RES (4)..(5): Xaa is C or S

SEQ ID NO: 50830 - protein, 36 aa, Artificial Sequence; identical to SEQ ID NO: 17312
  Cyclic GFR-binding peptide
  MOD_RES (1)..(2)..(34)..(36): Xaa is C or S

SEQ ID NO: 50831 - protein, 28 aa, Artificial Sequence
  Cyclic GFR-binding peptide
  MOD_RES (3)..(3): Xaa is C or S
PTXAPTKLSPISVLFIDDSSNVIYKQYE

SEQ ID NO: 50832 - protein, 30 aa, Artificial Sequence; identical to SEQ ID NO: 17314
  Cyclic GFR-binding peptide

SEQ ID NO: 50833 - protein, 27 aa, Artificial Sequence
  Cyclic GFR-binding peptide
RLEPLTILYYDSANNVVEQLSNDMVVE

SEQ ID NO: 50834 - protein, 21 aa, Artificial Sequence
  Cyclic GFR-binding peptide
LEPLPIVYYDSANNVVEQLSN

SEQ ID NO: 50835 - protein, 27 aa, Artificial Sequence
  Cyclic GFR-binding peptide
ALNAISILYFVGRKPKVLKKYRMIVRS

SEQ ID NO: 50836 - protein, 27 aa, Artificial Sequence
  Cyclic GFR-binding peptide
VPQDLEPLPIVYYVGRTPKVEQLSNMV

SEQ ID NO: 50837 - protein, 37 aa, Artificial Sequence; identical to SEQ ID NO: 17319
  Cyclic GFR-binding peptide
  MOD_RES (6)..(7): Xaa is C or S

SEQ ID NO: 50838 - protein, 24 aa, Artificial Sequence
  Cyclic GFR-binding peptide
PQDLNAISILYFVGRTPKVLKKYR

SEQ ID NO: 50839 - protein, 36 aa, Artificial Sequence; identical to SEQ ID NO: 17321
  Cyclic GFR-binding peptide
  MOD_RES (1)..(33)..(35): Xaa is C or S

SEQ ID NO: 50840 - protein, 28 aa, Artificial Sequence
  Cyclic GFR-binding peptide
  MOD_RES (28)..(28): Xaa is C or S
LEPLPMVYYDENEKVVEQLSNDMVVEGX

SEQ ID NO: 50841 - protein, 40 aa, Artificial Sequence; identical to SEQ ID NO: 17323
  Cyclic GFR-binding peptide
  MOD_RES (6)..(7)..(39): Xaa is C or S

SEQ ID NO: 50842 - protein, 28 aa, Artificial Sequence
  Cyclic GFR-binding peptide
PQDLEPLPIVYYVGRTPKVEQLSNMVVK

SEQ ID NO: 50843 - protein, 33 aa, Artificial Sequence; identical to SEQ ID NO: 17325
  Cyclic GFR-binding peptide
  MOD_RES (3)..(4): Xaa is C or S

SEQ ID NO: 50844 - protein, 32 aa, Artificial Sequence; identical to SEQ ID NO: 17326
  Cyclic GFR-binding peptide
  MOD_RES (2)..(3): Xaa is C or S

SEQ ID NO: 50845 - protein, 28 aa, Artificial Sequence
  Cyclic GFR-binding peptide
TKLEPLPVVYYDDSSNVIEQLSNNMVVR

SEQ ID NO: 50846 - protein, 35 aa, Artificial Sequence; identical to SEQ ID NO: 17328
  Cyclic GFR-binding peptide
  MOD_RES (1)..(2)..(33)..(35): Xaa is C or S

SEQ ID NO: 50847 - protein, 36 aa, Artificial Sequence; identical to SEQ ID NO: 17329
  Cyclic GFR-binding peptide
  MOD_RES (5)..(5): Xaa is C or S

SEQ ID NO: 50848 - protein, 35 aa, Artificial Sequence; identical to SEQ ID NO: 17330
  Cyclic GFR-binding peptide
  MOD_RES (1)..(2)..(33)..(35): Xaa is C or S

SEQ ID NO: 50849 - protein, 31 aa, Artificial Sequence; identical to SEQ ID NO: 17331
  Cyclic GFR-binding peptide
  MOD_RES (4)..(5): Xaa is C or S

SEQ ID NO: 50850 - protein, 28 aa, Artificial Sequence
  Cyclic GFR-binding peptide
TRLEPLTILYYDSANNVVEQLSNDMVVE

SEQ ID NO: 50851 - protein, 25 aa, Artificial Sequence
  Cyclic GFR-binding peptide
TELEPLPMVYYDENEKVVEQLSNDM

SEQ ID NO: 50852 - protein, 23 aa, Artificial Sequence
  Cyclic GFR-binding peptide
TELEPLPMVYYDENEKVVEQLSN

SEQ ID NO: 50853 - protein, 28 aa, Artificial Sequence
  Cyclic GFR-binding peptide
  MOD_RES (28)..(28): Xaa is C or S
DLEPLPIVYYIGKTPKIEQLSNMIVKSX

SEQ ID NO: 50854 - protein, 28 aa, Artificial Sequence
  Cyclic GFR-binding peptide
PQDLSPISILFIVGRTPKVYKQYEMVVK

SEQ ID NO: 50855 - protein, 23 aa, Artificial Sequence
  Cyclic GFR-binding peptide
QLEPLPVVYYDDSSNVIEQLSNN

SEQ ID NO: 50856 - protein, 31 aa, Artificial Sequence; identical to SEQ ID NO: 17341
  Cyclic GFR-binding peptide
  MOD_RES (3)..(3): Xaa is C or S

SEQ ID NO: 50857 - protein, 36 aa, Artificial Sequence; identical to SEQ ID NO: 6989
  Cyclic GFR-binding peptide
  MOD_RES (4)..(5): Xaa is C or S

SEQ ID NO: 50858 - protein, 31 aa, Artificial Sequence; identical to SEQ ID NO: 17344
  Cyclic GFR-binding peptide
  MOD_RES (1)..(2): Xaa is C or S

SEQ ID NO: 50859 - protein, 31 aa, Artificial Sequence; identical to SEQ ID NO: 17345
  Cyclic GFR-binding peptide
  MOD_RES (30)..(30): Xaa is C or S

SEQ ID NO: 50860 - protein, 34 aa, Artificial Sequence; identical to SEQ ID NO: 17348
  Cyclic GFR-binding peptide
  MOD_RES (5)..(6): Xaa is C or S

SEQ ID NO: 50861 - protein, 35 aa, Artificial Sequence; identical to SEQ ID NO: 17349
  Cyclic GFR-binding peptide
  MOD_RES (1)..(2)..(33)..(35): Xaa is C or S

SEQ ID NO: 50862 - protein, 27 aa, Artificial Sequence
  Cyclic GFR-binding peptide
  MOD_RES (1)..(2): Xaa is C or S
XXAPTQLEPLTVLYYDDSSNVIEQLSN

SEQ ID NO: 50863 - protein, 32 aa, Artificial Sequence; identical to SEQ ID NO: 17351
  Cyclic GFR-binding peptide
  MOD_RES (31)..(31): Xaa is C or S

SEQ ID NO: 50864 - protein, 37 aa, Artificial Sequence; identical to SEQ ID NO: 17353
  Cyclic GFR-binding peptide
  MOD_RES (2)..(3)..(35)..(37): Xaa is C or S

SEQ ID NO: 50865 - protein, 27 aa, Artificial Sequence
  Cyclic GFR-binding peptide
QDLEPLPIVYYIGKTPKIEQLSNMIVK

SEQ ID NO: 50866 - protein, 33 aa, Artificial Sequence; identical to SEQ ID NO: 17355
  Cyclic GFR-binding peptide
  MOD_RES (31)..(33): Xaa is C or S

SEQ ID NO: 50867 - protein, 28 aa, Artificial Sequence
  Cyclic GFR-binding peptide
  MOD_RES (1)..(1): Xaa is C or S
XVPTRLEPLPIVYYDSANNVVEQLSNDM

SEQ ID NO: 50868 - protein, 31 aa, Artificial Sequence; identical to SEQ ID NO: 17359
  Cyclic GFR-binding peptide

SEQ ID NO: 50869 - protein, 27 aa, Artificial Sequence
  Cyclic GFR-binding peptide
PQALEPLTILYYVGRKPKVEQLSNMIV

SEQ ID NO: 50870 - protein, 39 aa, Artificial Sequence; identical to SEQ ID NO: 17361
  Cyclic GFR-binding peptide
  MOD_RES (5)..(37)..(39): Xaa is C or S

SEQ ID NO: 50871 - protein, 28 aa, Artificial Sequence
  Cyclic GFR-binding peptide
PTRLNAISILYFDSANNVVLKKYRDMVV

SEQ ID NO: 50872 - protein, 31 aa, Artificial Sequence; identical to SEQ ID NO: 17365
  Cyclic GFR-binding peptide
  MOD_RES (3)..(4): Xaa is C or S

SEQ ID NO: 50873 - protein, 37 aa, Artificial Sequence; identical to SEQ ID NO: 17366
  Cyclic GFR-binding peptide
  MOD_RES (5)..(37): Xaa is C or S

SEQ ID NO: 50874 - protein, 33 aa, Artificial Sequence; identical to SEQ ID NO: 17367
  Cyclic GFR-binding peptide
  MOD_RES (2)..(3): Xaa is C or S

SEQ ID NO: 50875 - protein, 35 aa, Artificial Sequence; identical to SEQ ID NO: 7013
  Cyclic GFR-binding peptide
  MOD_RES (3)..(4): Xaa is C or S

SEQ ID NO: 50876 - protein, 32 aa, Artificial Sequence; identical to SEQ ID NO: 17371
  Cyclic GFR-binding peptide
  MOD_RES (1)..(32): Xaa is C or S

SEQ ID NO: 50877 - protein, 34 aa, Artificial Sequence; identical to SEQ ID NO: 17372
  Cyclic GFR-binding peptide
  MOD_RES (1)..(32)..(34): Xaa is C or S

SEQ ID NO: 50878 - protein, 29 aa, Artificial Sequence
  Cyclic GFR-binding peptide
  MOD_RES (27)..(29): Xaa is C or S
LEPLPIVYYVGRTPKVEQLSNMVVKSXKX

SEQ ID NO: 50879 - protein, 33 aa, Artificial Sequence; identical to SEQ ID NO: 17374
  Cyclic GFR-binding peptide
  MOD_RES (6)..(7): Xaa is C or S

SEQ ID NO: 50880 - protein, 32 aa, Artificial Sequence; identical to SEQ ID NO: 17375
  Cyclic GFR-binding peptide
  MOD_RES (2)..(2): Xaa is C or S

SEQ ID NO: 50881 - protein, 34 aa, Artificial Sequence; identical to SEQ ID NO: 17377
  Cyclic GFR-binding peptide
  MOD_RES (1)..(32)..(34): Xaa is C or S

SEQ ID NO: 50882 - protein, 32 aa, Artificial Sequence; identical to SEQ ID NO: 17378
  Cyclic GFR-binding peptide
  MOD_RES (4)..(5): Xaa is C or S

SEQ ID NO: 50883 - protein, 33 aa, Artificial Sequence; identical to SEQ ID NO: 7025
  Cyclic GFR-binding peptide
  MOD_RES (1)..(2): Xaa is C or S

SEQ ID NO: 50884 - protein, 27 aa, Artificial Sequence
  Cyclic GFR-binding peptide
LEPLPVVYYDDSSNVIEQLSNNMVVRA

SEQ ID NO: 50885 - protein, 26 aa, Artificial Sequence
  Cyclic GFR-binding peptide
  MOD_RES (26)..(26): Xaa is C or S
NAISILYFVGRKPKVLKKYRMIVRSX

SEQ ID NO: 50886 - protein, 31 aa, Artificial Sequence; identical to SEQ ID NO: 17383
  Cyclic GFR-binding peptide
  MOD_RES (5)..(5): Xaa is C or S

SEQ ID NO: 50887 - protein, 32 aa, Artificial Sequence; identical to SEQ ID NO: 17384
  Cyclic GFR-binding peptide
  MOD_RES (31)..(31): Xaa is C or S

SEQ ID NO: 50888 - protein, 27 aa, Artificial Sequence
  Cyclic GFR-binding peptide
  MOD_RES (1)..(1): Xaa is C or S
XVPTRLEPLTILYYDSANNVVEQLSND

SEQ ID NO: 50889 - protein, 38 aa, Artificial Sequence; identical to SEQ ID NO: 17386
  Cyclic GFR-binding peptide
  MOD_RES (6)..(7): Xaa is C or S

SEQ ID NO: 50890 - protein, 27 aa, Artificial Sequence
  Cyclic GFR-binding peptide
LEPLPVVYYDDSSNVIEQLSNNMVVRS

SEQ ID NO: 50891 - protein, 37 aa, Artificial Sequence; identical to SEQ ID NO: 17388
  Cyclic GFR-binding peptide
  MOD_RES (4)..(5)..(37): Xaa is C or S

SEQ ID NO: 50892 - protein, 37 aa, Artificial Sequence; identical to SEQ ID NO: 17389
  Cyclic GFR-binding peptide
  MOD_RES (2)..(3)..(35)..(37): Xaa is C or S

SEQ ID NO: 50893 - protein, 32 aa, Artificial Sequence; identical to SEQ ID NO: 17391
  Cyclic GFR-binding peptide
  MOD_RES (2)..(3): Xaa is C or S

SEQ ID NO: 50894 - protein, 35 aa, Artificial Sequence; identical to SEQ ID NO: 17392
  Cyclic GFR-binding peptide
  MOD_RES (1)..(33)..(35): Xaa is C or S

SEQ ID NO: 50895 - protein, 32 aa, Artificial Sequence; identical to SEQ ID NO: 17393
  Cyclic GFR-binding peptide
  MOD_RES (4)..(5): Xaa is C or S

SEQ ID NO: 50896 - protein, 29 aa, Artificial Sequence
  Cyclic GFR-binding peptide
  MOD_RES (28)..(28): Xaa is C or S
LSPISVLFIDDSSNVIYKQYENMVVRSXG

SEQ ID NO: 50897 - protein, 28 aa, Artificial Sequence
  Cyclic GFR-binding peptide
PQDLNAISILYFVGRTPKVLKKYRMVVK

SEQ ID NO: 50898 - protein, 30 aa, Artificial Sequence; identical to SEQ ID NO: 7048
  Cyclic GFR-binding peptide
  MOD_RES (4)..(5): Xaa is C or S

SEQ ID NO: 50899 - protein, 30 aa, Artificial Sequence; identical to SEQ ID NO: 17397
  Cyclic GFR-binding peptide

SEQ ID NO: 50900 - protein, 37 aa, Artificial Sequence; identical to SEQ ID NO: 17398
  Cyclic GFR-binding peptide
  MOD_RES (2)..(3)..(35)..(37): Xaa is C or S

SEQ ID NO: 50901 - protein, 34 aa, Artificial Sequence; identical to SEQ ID NO: 17399
  Cyclic GFR-binding peptide
  MOD_RES (3)..(3): Xaa is C or S

SEQ ID NO: 50902 - protein, 20 aa, Artificial Sequence
  Cyclic GFR-binding peptide
SPISVLFIDDSSNVIYKQYE

SEQ ID NO: 50903 - protein, 33 aa, Artificial Sequence; identical to SEQ ID NO: 17401
  Cyclic GFR-binding peptide
  MOD_RES (2)..(3): Xaa is C or S

SEQ ID NO: 50904 - protein, 22 aa, Artificial Sequence
  Cyclic GFR-binding peptide
NAISILYFDSANNVVLKKYRDM

SEQ ID NO: 50905 - protein, 31 aa, Artificial Sequence; identical to SEQ ID NO: 17403
  Cyclic GFR-binding peptide
  MOD_RES (3)..(4): Xaa is C or S

SEQ ID NO: 50906 - protein, 27 aa, Artificial Sequence
  Cyclic GFR-binding peptide
  MOD_RES (2)..(2): Xaa is C or S
TXAPTKLSPISVLFIDDSSNVIYKQYE

SEQ ID NO: 50907 - protein, 33 aa, Artificial Sequence; identical to SEQ ID NO: 17406
  Cyclic GFR-binding peptide
  MOD_RES (32)..(32): Xaa is C or S

SEQ ID NO: 50908 - protein, 32 aa, Artificial Sequence; identical to SEQ ID NO: 7056
  Cyclic GFR-binding peptide
  MOD_RES (5)..(6): Xaa is C or S

SEQ ID NO: 50909 - protein, 28 aa, Artificial Sequence
  Cyclic GFR-binding peptide
  MOD_RES (28)..(28): Xaa is C or S
LNAISMLYFDEYDKVVLKKYREMVVEGX

SEQ ID NO: 50910 - protein, 35 aa, Artificial Sequence; identical to SEQ ID NO: 17410
  Cyclic GFR-binding peptide
  MOD_RES (4)..(5): Xaa is C or S

SEQ ID NO: 50911 - protein, 27 aa, Artificial Sequence
  Cyclic GFR-binding peptide
  MOD_RES (1)..(2): Xaa is C or S
XXAPTKLEPLTVLYYDDSSNVIEQLSN

SEQ ID NO: 50912 - protein, 32 aa, Artificial Sequence; identical to SEQ ID NO: 7066
  Cyclic GFR-binding peptide
  MOD_RES (29)..(31): Xaa is C or S

SEQ ID NO: 50913 - protein, 38 aa, Artificial Sequence; identical to SEQ ID NO: 7070
  Cyclic GFR-binding peptide
  MOD_RES (2)..(3)..(35)..(37): Xaa is C or S

SEQ ID NO: 50914 - protein, 31 aa, Artificial Sequence; identical to SEQ ID NO: 17415
  Cyclic GFR-binding peptide
  MOD_RES (30)..(30): Xaa is C or S

SEQ ID NO: 50915 - protein, 29 aa, Artificial Sequence
  Cyclic GFR-binding peptide
  MOD_RES (29)..(29): Xaa is C or S
ELEPLTMLYYDENEKVVEQLSNDMVVEGX

SEQ ID NO: 50916 - protein, 26 aa, Artificial Sequence
  Cyclic GFR-binding peptide
LNAISILYFDSANNVVLKKYRDMVVE

SEQ ID NO: 50917 - protein, 31 aa, Artificial Sequence; identical to SEQ ID NO: 17418
  Cyclic GFR-binding peptide
  MOD_RES (30)..(30): Xaa is C or S

SEQ ID NO: 50918 - protein, 24 aa, Artificial Sequence
  Cyclic GFR-binding peptide
PTQLSPISVLFIDDSSNVIYKQYE

SEQ ID NO: 50919 - protein, 38 aa, Artificial Sequence; identical to SEQ ID NO: 17420
  Cyclic GFR-binding peptide
  MOD_RES (5)..(6)..(38): Xaa is C or S

SEQ ID NO: 50920 - protein, 26 aa, Artificial Sequence
  Cyclic GFR-binding peptide
VPTELSPISMLFIDEYDKVVYKQYEE

SEQ ID NO: 50921 - protein, 31 aa, Artificial Sequence; identical to SEQ ID NO: 17423
  Cyclic GFR-binding peptide
  MOD_RES (30)..(30): Xaa is C or S

SEQ ID NO: 50922 - protein, 35 aa, Artificial Sequence; identical to SEQ ID NO: 17425
  Cyclic GFR-binding peptide
  MOD_RES (4)..(5): Xaa is C or S

SEQ ID NO: 50923 - protein, 30 aa, Artificial Sequence; identical to SEQ ID NO: 17426
  Cyclic GFR-binding peptide
  MOD_RES (1)..(2): Xaa is C or S

SEQ ID NO: 50924 - protein, 29 aa, Artificial Sequence
  Cyclic GFR-binding peptide
VSQDLSPISILFIIGKTPKIYKQYEMIVK

SEQ ID NO: 50925 - protein, 28 aa, Artificial Sequence
  Cyclic GFR-binding peptide
  MOD_RES (28)..(28): Xaa is C or S
LEPLPIVYYDSANNVVEQLSNDMVVESX

SEQ ID NO: 50926 - protein, 20 aa, Artificial Sequence
  Cyclic GFR-binding peptide
EPLTILYYVGRKPKVEQLSN

SEQ ID NO: 50927 - protein, 31 aa, Artificial Sequence; identical to SEQ ID NO: 17432
  Cyclic GFR-binding peptide
  MOD_RES (29)..(31): Xaa is C or S

SEQ ID NO: 50928 - protein, 34 aa, Artificial Sequence; identical to SEQ ID NO: 17433
  Cyclic GFR-binding peptide
  MOD_RES (1)..(32)..(34): Xaa is C or S

SEQ ID NO: 50929 - protein, 28 aa, Artificial Sequence
  Cyclic GFR-binding peptide
VPQDLSPISILFIVGRTPKVYKQYEMVV

SEQ ID NO: 50930 - protein, 38 aa, Artificial Sequence; identical to SEQ ID NO: 17435
  Cyclic GFR-binding peptide
  MOD_RES (2)..(3)..(35)..(37): Xaa is C or S

SEQ ID NO: 50931 - protein, 32 aa, Artificial Sequence; identical to SEQ ID NO: 17436
  Cyclic GFR-binding peptide
  MOD_RES (4)..(5): Xaa is C or S

SEQ ID NO: 50932 - protein, 25 aa, Artificial Sequence
  Cyclic GFR-binding peptide
PTKLEPLPVVYYDDSSNVIEQLSNN

SEQ ID NO: 50933 - protein, 23 aa, Artificial Sequence
  Cyclic GFR-binding peptide
TELSPISMLFIDEYDKVVYKQYE

SEQ ID NO: 50934 - protein, 41 aa, Artificial Sequence; identical to SEQ ID NO: 17441
  Cyclic GFR-binding peptide
  MOD_RES (5)..(6)..(38)..(40): Xaa is C or S

SEQ ID NO: 50935 - protein, 29 aa, Artificial Sequence
  Cyclic GFR-binding peptide
  MOD_RES (1)..(2): Xaa is C or S
XXVPQDLNAISILYFVGRTPKVLKKYRMV

SEQ ID NO: 50936 - protein, 29 aa, Artificial Sequence
  Cyclic GFR-binding peptide
VPTRLEPLTILYYDSANNVVEQLSNDMVV

SEQ ID NO: 50937 - protein, 29 aa, Artificial Sequence
  Cyclic GFR-binding peptide
  MOD_RES (1)..(1): Xaa is C or S
XAPTQLEPLTVLYYDDSSNVIEQLSNNMV

SEQ ID NO: 50938 - protein, 29 aa, Artificial Sequence
  Cyclic GFR-binding peptide
  MOD_RES (28)..(28): Xaa is C or S
DLNAISILYFIGKTPKILKKYRMIVKSXK

SEQ ID NO: 50939 - protein, 30 aa, Artificial Sequence; identical to SEQ ID NO: 17447
  Cyclic GFR-binding peptide
  MOD_RES (3)..(4): Xaa is C or S

SEQ ID NO: 50940 - protein, 37 aa, Artificial Sequence; identical to SEQ ID NO: 17449
  Cyclic GFR-binding peptide
  MOD_RES (2)..(3)..(34)..(36): Xaa is C or S

SEQ ID NO: 50941 - protein, 37 aa, Artificial Sequence; identical to SEQ ID NO: 17450
  Cyclic GFR-binding peptide
  MOD_RES (5)..(6): Xaa is C or S

SEQ ID NO: 50942 - protein, 26 aa, Artificial Sequence
  Cyclic GFR-binding peptide
  MOD_RES (1)..(1): Xaa is C or S
XAPTKLSPISVLFIDDSSNVIYKQYE

SEQ ID NO: 50943 - protein, 31 aa, Artificial Sequence; identical to SEQ ID NO: 17453
  Cyclic GFR-binding peptide
  MOD_RES (29)..(31): Xaa is C or S

SEQ ID NO: 50944 - protein, 33 aa, Artificial Sequence; identical to SEQ ID NO: 17454
  Cyclic GFR-binding peptide
  MOD_RES (5)..(6): Xaa is C or S

SEQ ID NO: 50945 - protein, 27 aa, Artificial Sequence
  Cyclic GFR-binding peptide
ELSPISMLFIDEYDKVVYKQYEEMVVE

SEQ ID NO: 50946 - protein, 33 aa, Artificial Sequence; identical to SEQ ID NO: 17456
  Cyclic GFR-binding peptide
  MOD_RES (4)..(5): Xaa is C or S

SEQ ID NO: 50947 - protein, 39 aa, Artificial Sequence; identical to SEQ ID NO: 17457
  Cyclic GFR-binding peptide
  MOD_RES (4)..(5)..(37)..(39): Xaa is C or S

SEQ ID NO: 50948 - protein, 32 aa, Artificial Sequence; identical to SEQ ID NO: 17458
  Cyclic GFR-binding peptide
  MOD_RES (1)..(2): Xaa is C or S

SEQ ID NO: 50949 - protein, 23 aa, Artificial Sequence
  Cyclic GFR-binding peptide
EPLTILYYVGRKPKVEQLSNMIV

SEQ ID NO: 50950 - protein, 29 aa, Artificial Sequence
  Cyclic GFR-binding peptide
  MOD_RES (1)..(1): Xaa is C or S
XVPQDLSPISILFIVGRTPKVYKQYEMVV

SEQ ID NO: 50951 - protein, 31 aa, Artificial Sequence; identical to SEQ ID NO: 7112
  Cyclic GFR-binding peptide
  MOD_RES (5)..(6): Xaa is C or S

SEQ ID NO: 50952 - protein, 26 aa, Artificial Sequence
  Cyclic GFR-binding peptide
  MOD_RES (26)..(26): Xaa is C or S
EPLPIVYYVGRTPKVEQLSNMVVKSX

SEQ ID NO: 50953 - protein, 23 aa, Artificial Sequence
  Cyclic GFR-binding peptide
KLEPLTVLYYDDSSNVIEQLSNN

SEQ ID NO: 50954 - protein, 37 aa, Artificial Sequence; identical to SEQ ID NO: 7116
  Cyclic GFR-binding peptide
  MOD_RES (2)..(3)..(34)..(36): Xaa is C or S

SEQ ID NO: 50955 - protein, 38 aa, Artificial Sequence; identical to SEQ ID NO: 17467
  Cyclic GFR-binding peptide
  MOD_RES (6)..(7): Xaa is C or S

SEQ ID NO: 50956 - protein, 26 aa, Artificial Sequence
  Cyclic GFR-binding peptide
KLEPLTVLYYDDSSNVIEQLSNNMVV

SEQ ID NO: 50957 - protein, 25 aa, Artificial Sequence
  Cyclic GFR-binding peptide
EPLPIVYYIGKTPKIEQLSNMIVKS

SEQ ID NO: 50958 - protein, 36 aa, Artificial Sequence; identical to SEQ ID NO: 17470
  Cyclic GFR-binding peptide
  MOD_RES (2)..(3)..(35): Xaa is C or S

SEQ ID NO: 50959 - protein, 29 aa, Artificial Sequence
  Cyclic GFR-binding peptide
TRLEPLTILYYDSANNVVEQLSNDMVVES

SEQ ID NO: 50960 - protein, 34 aa, Artificial Sequence; identical to SEQ ID NO: 17472
  Cyclic GFR-binding peptide
  MOD_RES (1)..(33): Xaa is C or S

SEQ ID NO: 50961 - protein, 27 aa, Artificial Sequence
  Cyclic GFR-binding peptide
  MOD_RES (1)..(2): Xaa is C or S
XXVPTELSPISMLFIDENEKVVYKQYE

SEQ ID NO: 50962 - protein, 24 aa, Artificial Sequence
  Cyclic GFR-binding peptide
SQDLNAISILYFIGKTPKILKKYR

SEQ ID NO: 50963 - protein, 33 aa, Artificial Sequence; identical to SEQ ID NO: 17475
  Cyclic GFR-binding peptide
  MOD_RES (1)..(2)..(33): Xaa is C or S

SEQ ID NO: 50964 - protein, 24 aa, Artificial Sequence
  Cyclic GFR-binding peptide
PTELEPLTMLYYDEYDKVVEQLSN

SEQ ID NO: 50965 - protein, 30 aa, Artificial Sequence; identical to SEQ ID NO: 17478
  Cyclic GFR-binding peptide

SEQ ID NO: 50966 - protein, 38 aa, Artificial Sequence; identical to SEQ ID NO: 17479
  Cyclic GFR-binding peptide
  MOD_RES (4)..(5)..(36)..(38): Xaa is C or S

SEQ ID NO: 50967 - protein, 37 aa, Artificial Sequence; identical to SEQ ID NO: 17481
  Cyclic GFR-binding peptide
  MOD_RES (4)..(5)..(37): Xaa is C or S

SEQ ID NO: 50968 - protein, 24 aa, Artificial Sequence
  Cyclic GFR-binding peptide
EPLPVVYYDDSSNVIEQLSNNMVV

SEQ ID NO: 50969 - protein, 36 aa, Artificial Sequence; identical to SEQ ID NO: 17484
  Cyclic GFR-binding peptide
  MOD_RES (5)..(6): Xaa is C or S

SEQ ID NO: 50970 - protein, 38 aa, Artificial Sequence; identical to SEQ ID NO: 17485
  Cyclic GFR-binding peptide
  MOD_RES (4)..(36)..(38): Xaa is C or S

SEQ ID NO: 50971 - protein, 39 aa, Artificial Sequence; identical to SEQ ID NO: 17486
  Cyclic GFR-binding peptide
  MOD_RES (3)..(4)..(36)..(38): Xaa is C or S

SEQ ID NO: 50972 - protein, 26 aa, Artificial Sequence
  Cyclic GFR-binding peptide
PTKLEPLTVLYYDDSSNVIEQLSNNM

SEQ ID NO: 50973 - protein, 26 aa, Artificial Sequence
  Cyclic GFR-binding peptide
  MOD_RES (1)..(1): Xaa is C or S
XVPQALSPISILFIVGRKPKVYKQYE

SEQ ID NO: 50974 - protein, 38 aa, Artificial Sequence; identical to SEQ ID NO: 17490
  Cyclic GFR-binding peptide
  MOD_RES (3)..(4)..(36)..(38): Xaa is C or S

SEQ ID NO: 50975 - protein, 28 aa, Artificial Sequence
  Cyclic GFR-binding peptide
APTKLSPISVLFIDDSSNVIYKQYENMV

SEQ ID NO: 50976 - protein, 27 aa, Artificial Sequence
  Cyclic GFR-binding peptide
  MOD_RES (27)..(27): Xaa is C or S
SPISVLFIDDSSNVIYKQYENMVVRSX

SEQ ID NO: 50977 - protein, 31 aa, Artificial Sequence; identical to SEQ ID NO: 7143
  Cyclic GFR-binding peptide
  MOD_RES (5)..(6): Xaa is C or S

SEQ ID NO: 50978 - protein, 28 aa, Artificial Sequence
  Cyclic GFR-binding peptide
  MOD_RES (1)..(2): Xaa is C or S
XXVPTRLEPLTILYYDSANNVVEQLSND

SEQ ID NO: 50979 - protein, 23 aa, Artificial Sequence
  Cyclic GFR-binding peptide
TRLNAISILYFDSANNVVLKKYR

SEQ ID NO: 50980 - protein, 40 aa, Artificial Sequence; identical to SEQ ID NO: 17500
  Cyclic GFR-binding peptide
  MOD_RES (6)..(7)..(39): Xaa is C or S

SEQ ID NO: 50981 - protein, 32 aa, Artificial Sequence; identical to SEQ ID NO: 7150
  Cyclic GFR-binding peptide
  MOD_RES (2)..(3): Xaa is C or S

SEQ ID NO: 50982 - protein, 25 aa, Artificial Sequence
  Cyclic GFR-binding peptide
VPQALEPLTILYYVGRKPKVEQLSN

SEQ ID NO: 50983 - protein, 30 aa, Artificial Sequence; identical to SEQ ID NO: 17504
  Cyclic GFR-binding peptide
  MOD_RES (30)..(30): Xaa is C or S

SEQ ID NO: 50984 - protein, 30 aa, Artificial Sequence; identical to SEQ ID NO: 17507
  Cyclic GFR-binding peptide
  MOD_RES (4)..(5): Xaa is C or S

SEQ ID NO: 50985 - protein, 33 aa, Artificial Sequence; identical to SEQ ID NO: 17508
  Cyclic GFR-binding peptide
  MOD_RES (32)..(32): Xaa is C or S

SEQ ID NO: 50986 - protein, 39 aa, Artificial Sequence; identical to SEQ ID NO: 17509
  Cyclic GFR-binding peptide
  MOD_RES (5)..(6)..(37)..(39): Xaa is C or S

SEQ ID NO: 50987 - protein, 38 aa, Artificial Sequence; identical to SEQ ID NO: 17510
  Cyclic GFR-binding peptide
  MOD_RES (3)..(4)..(36)..(38): Xaa is C or S

SEQ ID NO: 50988 - protein, 26 aa, Artificial Sequence
  Cyclic GFR-binding peptide
PTELEPLTMLYYDEYDKVVEQLSNEM

SEQ ID NO: 50989 - protein, 35 aa, Artificial Sequence; identical to SEQ ID NO: 17512
  Cyclic GFR-binding peptide
  MOD_RES (4)..(5): Xaa is C or S

SEQ ID NO: 50990 - protein, 26 aa, Artificial Sequence
  Cyclic GFR-binding peptide
TRLNAISILYFDSANNVVLKKYRDMV

SEQ ID NO: 50991 - protein, 28 aa, Artificial Sequence
  Cyclic GFR-binding peptide
PQALEPLTILYYVGRKPKVEQLSNMIVR

SEQ ID NO: 50992 - protein, 34 aa, Artificial Sequence; identical to SEQ ID NO: 17516
  Cyclic GFR-binding peptide
  MOD_RES (1)..(33): Xaa is C or S

SEQ ID NO: 50993 - protein, 27 aa, Artificial Sequence
  Cyclic GFR-binding peptide
TKLEPLPVVYYDDSSNVIEQLSNNMVV

SEQ ID NO: 50994 - protein, 36 aa, Artificial Sequence; identical to SEQ ID NO: 17520
  Cyclic GFR-binding peptide
  MOD_RES (6)..(7): Xaa is C or S

SEQ ID NO: 50995 - protein, 38 aa, Artificial Sequence; identical to SEQ ID NO: 17521
  Cyclic GFR-binding peptide
  MOD_RES (5)..(6)..(38): Xaa is C or S

SEQ ID NO: 50996 - protein, 23 aa, Artificial Sequence
  Cyclic GFR-binding peptide
LEPLPIVYYDSANNVVEQLSNDM

SEQ ID NO: 50997 - protein, 26 aa, Artificial Sequence
  Cyclic GFR-binding peptide
LSPISILFIVGRTPKVYKQYEMVVKS

SEQ ID NO: 50998 - protein, 32 aa, Artificial Sequence; identical to SEQ ID NO: 17524
  Cyclic GFR-binding peptide
  MOD_RES (6)..(7): Xaa is C or S

SEQ ID NO: 50999 - protein, 30 aa, Artificial Sequence; identical to SEQ ID NO: 17525
  Cyclic GFR-binding peptide
  MOD_RES (29)..(29): Xaa is C or S

SEQ ID NO: 51000 - protein, 38 aa, Artificial Sequence; identical to SEQ ID NO: 17527
  Cyclic GFR-binding peptide
  MOD_RES (3)..(4)..(36)..(38): Xaa is C or S

SEQ ID NO: 51001 - protein, 23 aa, Artificial Sequence
  Cyclic GFR-binding peptide
TKLEPLTVLYYDDSSNVIEQLSN

SEQ ID NO: 51002 - protein, 25 aa, Artificial Sequence
  Cyclic GFR-binding peptide
NAISMLYFDEYDKVVLKKYREMVVE

SEQ ID NO: 51003 - protein, 29 aa, Artificial Sequence
  Cyclic GFR-binding peptide
  MOD_RES (1)..(1): Xaa is C or S
XAPTKLSPISVLFIDDSSNVIYKQYENMV

SEQ ID NO: 51004 - protein, 27 aa, Artificial Sequence
  Cyclic GFR-binding peptide
SQDLEPLPIVYYIGKTPKIEQLSNMIV

SEQ ID NO: 51005 - protein, 29 aa, Artificial Sequence
  Cyclic GFR-binding peptide
  MOD_RES (1)..(2): Xaa is C or S
XXAPTKLSPISVLFIDDSSNVIYKQYENM

SEQ ID NO: 51006 - protein, 23 aa, Artificial Sequence
  Cyclic GFR-binding peptide
LEPLTMLYYDEYDKVVEQLSNEM

SEQ ID NO: 51007 - protein, 22 aa, Artificial Sequence
  Cyclic GFR-binding peptide
ELEPLTMLYYDENEKVVEQLSN

SEQ ID NO: 51008 - protein, 33 aa, Artificial Sequence; identical to SEQ ID NO: 17539
  Cyclic GFR-binding peptide
  MOD_RES (1)..(33): Xaa is C or S

SEQ ID NO: 51009 - protein, 26 aa, Artificial Sequence
  Cyclic GFR-binding peptide
QDLEPLPIVYYVGRTPKVEQLSNMVV

SEQ ID NO: 51010 - protein, 39 aa, Artificial Sequence; identical to SEQ ID NO: 17542
  Cyclic GFR-binding peptide
  MOD_RES (6)..(7)..(39): Xaa is C or S

SEQ ID NO: 51011 - protein, 36 aa, Artificial Sequence; identical to SEQ ID NO: 17543
  Cyclic GFR-binding peptide
  MOD_RES (4)..(5): Xaa is C or S

SEQ ID NO: 51012 - protein, 25 aa, Artificial Sequence
  Cyclic GFR-binding peptide
QALEPLTILYYVGRKPKVEQLSNMI

SEQ ID NO: 51013 - protein, 30 aa, Artificial Sequence; identical to SEQ ID NO: 17546
  Cyclic GFR-binding peptide
  MOD_RES (3)..(4): Xaa is C or S

SEQ ID NO: 51014 - protein, 23 aa, Artificial Sequence
  Cyclic GFR-binding peptide
NAISILYFVGRTPKVLKKYRMVV

SEQ ID NO: 51015 - protein, 40 aa, Artificial Sequence; identical to SEQ ID NO: 17548
  Cyclic GFR-binding peptide
  MOD_RES (4)..(5)..(37)..(39): Xaa is C or S

SEQ ID NO: 51016 - protein, 20 aa, Artificial Sequence
  Cyclic GFR-binding peptide
EPLPMVYYDENEKVVEQLSN

SEQ ID NO: 51017 - protein, 26 aa, Artificial Sequence
  Cyclic GFR-binding peptide
PQALSPISILFIVGRKPKVYKQYEMI

SEQ ID NO: 51018 - protein, 35 aa, Artificial Sequence; identical to SEQ ID NO: 17551
  Cyclic GFR-binding peptide
  MOD_RES (1)..(32)..(34): Xaa is C or S

SEQ ID NO: 51019 - protein, 35 aa, Artificial Sequence; identical to SEQ ID NO: 17552
  Cyclic GFR-binding peptide
  MOD_RES (6)..(6): Xaa is C or S

SEQ ID NO: 51020 - protein, 28 aa, Artificial Sequence
  Cyclic GFR-binding peptide
  MOD_RES (1)..(1): Xaa is C or S
XAPTKLEPLTVLYYDDSSNVIEQLSNNM

SEQ ID NO: 51021 - protein, 29 aa, Artificial Sequence
  Cyclic GFR-binding peptide
  MOD_RES (3)..(4): Xaa is C or S
KAXXVPTELNAISMLYFDENEKVVLKKYR

SEQ ID NO: 51022 - protein, 27 aa, Artificial Sequence
  Cyclic GFR-binding peptide
  MOD_RES (27)..(27): Xaa is C or S
SPISMLFIDEYDKVVYKQYEEMVVEGX

SEQ ID NO: 51023 - protein, 36 aa, Artificial Sequence; identical to SEQ ID NO: 17556
  Cyclic GFR-binding peptide
  MOD_RES (4)..(5): Xaa is C or S

SEQ ID NO: 51024 - protein, 27 aa, Artificial Sequence
  Cyclic GFR-binding peptide
PTRLEPLTILYYDSANNVVEQLSNDMV

SEQ ID NO: 51025 - protein, 26 aa, Artificial Sequence
  Cyclic GFR-binding peptide
QALNAISILYFVGRKPKVLKKYRMIV

SEQ ID NO: 51026 - protein, 34 aa, Artificial Sequence; identical to SEQ ID NO: 17559
  Cyclic GFR-binding peptide
  MOD_RES (31)..(33): Xaa is C or S

SEQ ID NO: 51027 - protein, 40 aa, Artificial Sequence; identical to SEQ ID NO: 7216
  Cyclic GFR-binding peptide
  MOD_RES (6)..(7)..(38)..(40): Xaa is C or S

SEQ ID NO: 51028 - protein, 30 aa, Artificial Sequence; identical to SEQ ID NO: 17562
  Cyclic GFR-binding peptide
  MOD_RES (30)..(30): Xaa is C or S

SEQ ID NO: 51029 - protein, 23 aa, Artificial Sequence
  Cyclic GFR-binding peptide
QDLNAISILYFVGRTPKVLKKYR

SEQ ID NO: 51030 - protein, 28 aa, Artificial Sequence
  Cyclic GFR-binding peptide
VPTELEPLTMLYYDEYDKVVEQLSNEMV

SEQ ID NO: 51031 - protein, 34 aa, Artificial Sequence; identical to SEQ ID NO: 7221
  Cyclic GFR-binding peptide
  MOD_RES (4)..(5): Xaa is C or S

SEQ ID NO: 51032 - protein, 28 aa, Artificial Sequence
  Cyclic GFR-binding peptide
  MOD_RES (28)..(28): Xaa is C or S
ALNAISILYFVGRKPKVLKKYRMIVRSX

SEQ ID NO: 51033 - protein, 30 aa, Artificial Sequence; identical to SEQ ID NO: 17567
  Cyclic GFR-binding peptide
  MOD_RES (29)..(29): Xaa is C or S

SEQ ID NO: 51034 - protein, 35 aa, Artificial Sequence; identical to SEQ ID NO: 17568
  Cyclic GFR-binding peptide
  MOD_RES (2)..(3)..(35): Xaa is C or S

SEQ ID NO: 51035 - protein, 33 aa, Artificial Sequence; identical to SEQ ID NO: 17569
  Cyclic GFR-binding peptide
  MOD_RES (32)..(32): Xaa is C or S

SEQ ID NO: 51036 - protein, 40 aa, Artificial Sequence; identical to SEQ ID NO: 17570
  Cyclic GFR-binding peptide
  MOD_RES (4)..(5)..(37)..(39): Xaa is C or S

SEQ ID NO: 51037 - protein, 27 aa, Artificial Sequence
  Cyclic GFR-binding peptide
DLNAISILYFIGKTPKILKKYRMIVKS

SEQ ID NO: 51038 - protein, 32 aa, Artificial Sequence; identical to SEQ ID NO: 17572
  Cyclic GFR-binding peptide
  MOD_RES (31)..(31): Xaa is C or S

SEQ ID NO: 51039 - protein, 32 aa, Artificial Sequence; identical to SEQ ID NO: 17573
  Cyclic GFR-binding peptide
  MOD_RES (4)..(5): Xaa is C or S

SEQ ID NO: 51040 - protein, 20 aa, Artificial Sequence
  Cyclic GFR-binding peptide
SPISILFIIGKTPKIYKQYE

SEQ ID NO: 51041 - protein, 25 aa, Artificial Sequence
  Cyclic GFR-binding peptide
APTKLEPLTVLYYDDSSNVIEQLSN

SEQ ID NO: 51042 - protein, 34 aa, Artificial Sequence; identical to SEQ ID NO: 17576
  Cyclic GFR-binding peptide
  MOD_RES (4)..(5): Xaa is C or S

SEQ ID NO: 51043 - protein, 27 aa, Artificial Sequence
  Cyclic GFR-binding peptide
PQDLNAISILYFVGRTPKVLKKYRMVV

SEQ ID NO: 51044 - protein, 33 aa, Artificial Sequence; identical to SEQ ID NO: 7237
  Cyclic GFR-binding peptide
  MOD_RES (1)..(2)..(33): Xaa is C or S

SEQ ID NO: 51045 - protein, 35 aa, Artificial Sequence; identical to SEQ ID NO: 17579
  Cyclic GFR-binding peptide
  MOD_RES (6)..(7): Xaa is C or S

SEQ ID NO: 51046 - protein, 25 aa, Artificial Sequence
  Cyclic GFR-binding peptide
ELEPLPMVYYDEYDKVVEQLSNEMV

SEQ ID NO: 51047 - protein, 34 aa, Artificial Sequence; identical to SEQ ID NO: 17581
  Cyclic GFR-binding peptide
  MOD_RES (4)..(5): Xaa is C or S

SEQ ID NO: 51048 - protein, 21 aa, Artificial Sequence
  Cyclic GFR-binding peptide
LNAISILYFDSANNVVLKKYR

SEQ ID NO: 51049 - protein, 28 aa, Artificial Sequence
  Cyclic GFR-binding peptide
  MOD_RES (1)..(2): Xaa is C or S
XXVPTELEPLPMVYYDENEKVVEQLSND

SEQ ID NO: 51050 - protein, 26 aa, Artificial Sequence
  Cyclic GFR-binding peptide
LNAISMLYFDENEKVVLKKYRDMVVE

SEQ ID NO: 51051 - protein, 27 aa, Artificial Sequence
  Cyclic GFR-binding peptide
  MOD_RES (27)..(27): Xaa is C or S
EPLPVVYYDDSSNVIEQLSNNMVVRAX

SEQ ID NO: 51052 - protein, 28 aa, Artificial Sequence
  Cyclic GFR-binding peptide
  MOD_RES (28)..(28): Xaa is C or S
LEPLTVLYYDDSSNVIEQLSNNMVVRSX

SEQ ID NO: 51053 - protein, 30 aa, Artificial Sequence; identical to SEQ ID NO: 17588
  Cyclic GFR-binding peptide
  MOD_RES (1)..(1): Xaa is C or S

SEQ ID NO: 51054 - protein, 33 aa, Artificial Sequence; identical to SEQ ID NO: 17589
  Cyclic GFR-binding peptide
  MOD_RES (1)..(32): Xaa is C or S

SEQ ID NO: 51055 - protein, 32 aa, Artificial Sequence; identical to SEQ ID NO: 7252
  Cyclic GFR-binding peptide
  MOD_RES (3)..(4): Xaa is C or S

SEQ ID NO: 51056 - protein, 34 aa, Artificial Sequence; identical to SEQ ID NO: 17591
  Cyclic GFR-binding peptide
  MOD_RES (5)..(6): Xaa is C or S

SEQ ID NO: 51057 - protein, 34 aa, Artificial Sequence; identical to SEQ ID NO: 17592
  Cyclic GFR-binding peptide
  MOD_RES (4)..(5): Xaa is C or S

SEQ ID NO: 51058 - protein, 36 aa, Artificial Sequence; identical to SEQ ID NO: 17594
  Cyclic GFR-binding peptide
  MOD_RES (4)..(5): Xaa is C or S

SEQ ID NO: 51059 - protein, 36 aa, Artificial Sequence; identical to SEQ ID NO: 17595
  Cyclic GFR-binding peptide
  MOD_RES (2)..(3)..(35): Xaa is C or S

SEQ ID NO: 51060 - protein, 33 aa, Artificial Sequence; identical to SEQ ID NO: 7262
  Cyclic GFR-binding peptide
  MOD_RES (32)..(32): Xaa is C or S

SEQ ID NO: 51061 - protein, 34 aa, Artificial Sequence; identical to SEQ ID NO: 17599
  Cyclic GFR-binding peptide
  MOD_RES (3)..(3): Xaa is C or S

SEQ ID NO: 51062 - protein, 27 aa, Artificial Sequence
  Cyclic GFR-binding peptide
  MOD_RES (1)..(2): Xaa is C or S
XXVSQDLNAISILYFIGKTPKILKKYR

SEQ ID NO: 51063 - protein, 31 aa, Artificial Sequence; identical to SEQ ID NO: 17601
  Cyclic GFR-binding peptide
  MOD_RES (29)..(31): Xaa is C or S

SEQ ID NO: 51064 - protein, 39 aa, Artificial Sequence; identical to SEQ ID NO: 17602
  Cyclic GFR-binding peptide
  MOD_RES (6)..(38): Xaa is C or S

SEQ ID NO: 51065 - protein, 27 aa, Artificial Sequence
  Cyclic GFR-binding peptide
APTQLSPISVLFIDDSSNVIYKQYENM

SEQ ID NO: 51066 - protein, 28 aa, Artificial Sequence
  Cyclic GFR-binding peptide
  MOD_RES (1)..(2): Xaa is C or S
XXVPTELSPISMLFIDENEKVVYKQYED

SEQ ID NO: 51067 - protein, 35 aa, Artificial Sequence; identical to SEQ ID NO: 17605
  Cyclic GFR-binding peptide
  MOD_RES (32)..(34): Xaa is C or S

SEQ ID NO: 51068 - protein, 36 aa, Artificial Sequence; identical to SEQ ID NO: 17606
  Cyclic GFR-binding peptide
  MOD_RES (1)..(33)..(35): Xaa is C or S

SEQ ID NO: 51069 - protein, 24 aa, Artificial Sequence
  Cyclic GFR-binding peptide
PTELSPISMLFIDENEKVVYKQYE

SEQ ID NO: 51070 - protein, 26 aa, Artificial Sequence
  Cyclic GFR-binding peptide
LEPLPVVYYDDSSNVIEQLSNNMVVR

SEQ ID NO: 51071 - protein, 34 aa, Artificial Sequence; identical to SEQ ID NO: 17609
  Cyclic GFR-binding peptide
  MOD_RES (5)..(6): Xaa is C or S

SEQ ID NO: 51072 - protein, 37 aa, Artificial Sequence; identical to SEQ ID NO: 17610
  Cyclic GFR-binding peptide
  MOD_RES (6)..(7): Xaa is C or S

SEQ ID NO: 51073 - protein, 31 aa, Artificial Sequence; identical to SEQ ID NO: 17611
  Cyclic GFR-binding peptide
  MOD_RES (31)..(31): Xaa is C or S

SEQ ID NO: 51074 - protein, 36 aa, Artificial Sequence; identical to SEQ ID NO: 17613
  Cyclic GFR-binding peptide
  MOD_RES (4)..(5): Xaa is C or S

SEQ ID NO: 51075 - protein, 30 aa, Artificial Sequence; identical to SEQ ID NO: 17614
  Cyclic GFR-binding peptide
  MOD_RES (29)..(29): Xaa is C or S

SEQ ID NO: 51076 - protein, 36 aa, Artificial Sequence; identical to SEQ ID NO: 17615
  Cyclic GFR-binding peptide
  MOD_RES (5)..(6): Xaa is C or S

SEQ ID NO: 51077 - protein, 28 aa, Artificial Sequence
  Cyclic GFR-binding peptide
  MOD_RES (1)..(2): Xaa is C or S
XXVPTELNAISMLYFDENEKVVLKKYRD

SEQ ID NO: 51078 - protein, 24 aa, Artificial Sequence
  Cyclic GFR-binding peptide
LNAISMLYFDENEKVVLKKYRDMV

SEQ ID NO: 51079 - protein, 33 aa, Artificial Sequence; identical to SEQ ID NO: 17620
  Cyclic GFR-binding peptide
  MOD_RES (32)..(32): Xaa is C or S

SEQ ID NO: 51080 - protein, 35 aa, Artificial Sequence; identical to SEQ ID NO: 17621
  Cyclic GFR-binding peptide
  MOD_RES (5)..(6): Xaa is C or S

SEQ ID NO: 51081 - protein, 32 aa, Artificial Sequence; identical to SEQ ID NO: 17622
  Cyclic GFR-binding peptide
  MOD_RES (3)..(4): Xaa is C or S

SEQ ID NO: 51082 - protein, 23 aa, Artificial Sequence
  Cyclic GFR-binding peptide
TELNAISMLYFDENEKVVLKKYR

SEQ ID NO: 51083 - protein, 29 aa, Artificial Sequence
  Cyclic GFR-binding peptide
  MOD_RES (3)..(4): Xaa is C or S
KPXXAPTKLEPLTVLYYDDSSNVIEQLSN

SEQ ID NO: 51084 - protein, 34 aa, Artificial Sequence; identical to SEQ ID NO: 17625
  Cyclic GFR-binding peptide
  MOD_RES (1)..(2)..(34): Xaa is C or S

SEQ ID NO: 51085 - protein, 27 aa, Artificial Sequence
  Cyclic GFR-binding peptide
  MOD_RES (1)..(1): Xaa is C or S
XVPTELSPISMLFIDEYDKVVYKQYEE

SEQ ID NO: 51086 - protein, 26 aa, Artificial Sequence
  Cyclic GFR-binding peptide
ALEPLTILYYVGRKPKVEQLSNMIVR

SEQ ID NO: 51087 - protein, 37 aa, Artificial Sequence; identical to SEQ ID NO: 17630
  Cyclic GFR-binding peptide
  MOD_RES (4)..(36): Xaa is C or S

SEQ ID NO: 51088 - protein, 35 aa, Artificial Sequence; identical to SEQ ID NO: 17631
  Cyclic GFR-binding peptide
  MOD_RES (5)..(6): Xaa is C or S

SEQ ID NO: 51089 - protein, 24 aa, Artificial Sequence
  Cyclic GFR-binding peptide
NAISMLYFDENEKVVLKKYRDMVV

SEQ ID NO: 51090 - protein, 30 aa, Artificial Sequence; identical to SEQ ID NO: 7304
  Cyclic GFR-binding peptide
  MOD_RES (1)..(2): Xaa is C or S

SEQ ID NO: 51091 - protein, 37 aa, Artificial Sequence; identical to SEQ ID NO: 17634
  Cyclic GFR-binding peptide
  MOD_RES (5)..(6): Xaa is C or S

SEQ ID NO: 51092 - protein, 26 aa, Artificial Sequence
  Cyclic GFR-binding peptide
PTRLEPLPIVYYDSANNVVEQLSNDM

SEQ ID NO: 51093 - protein, 35 aa, Artificial Sequence; identical to SEQ ID NO: 7312
  Cyclic GFR-binding peptide
  MOD_RES (3)..(4): Xaa is C or S

SEQ ID NO: 51094 - protein, 31 aa, Artificial Sequence; identical to SEQ ID NO: 17638
  Cyclic GFR-binding peptide
  MOD_RES (1)..(2): Xaa is C or S

SEQ ID NO: 51095 - protein, 32 aa, Artificial Sequence; identical to SEQ ID NO: 7315
  Cyclic GFR-binding peptide
  MOD_RES (31)..(31): Xaa is C or S

SEQ ID NO: 51096 - protein, 29 aa, Artificial Sequence
  Cyclic GFR-binding peptide
  MOD_RES (27)..(29): Xaa is C or S
EPLPMVYYDEYDKVVEQLSNEMVVEGXGX

SEQ ID NO: 51097 - protein, 35 aa, Artificial Sequence; identical to SEQ ID NO: 17641
  Cyclic GFR-binding peptide
  MOD_RES (1)..(33)..(35): Xaa is C or S

SEQ ID NO: 51098 - protein, 35 aa, Artificial Sequence; identical to SEQ ID NO: 17643
  Cyclic GFR-binding peptide
  MOD_RES (32)..(34): Xaa is C or S

SEQ ID NO: 51099 - protein, 28 aa, Artificial Sequence
  Cyclic GFR-binding peptide
  MOD_RES (1)..(2): Xaa is C or S
XXVPTELNAISMLYFDEYDKVVLKKYRE

SEQ ID NO: 51100 - protein, 27 aa, Artificial Sequence
  Cyclic GFR-binding peptide
VPTRLEPLPIVYYDSANNVVEQLSNDM

SEQ ID NO: 51101 - protein, 27 aa, Artificial Sequence
  Cyclic GFR-binding peptide
  MOD_RES (27)..(27): Xaa is C or S
EPLPVVYYDDSSNVIEQLSNNMVVRSX

SEQ ID NO: 51102 - protein, 25 aa, Artificial Sequence
  Cyclic GFR-binding peptide
QLSPISVLFIDDSSNVIYKQYENMV

SEQ ID NO: 51103 - protein, 39 aa, Artificial Sequence; identical to SEQ ID NO: 17651
  Cyclic GFR-binding peptide
  MOD_RES (5)..(6)..(37)..(39): Xaa is C or S

SEQ ID NO: 51104 - protein, 33 aa, Artificial Sequence; identical to SEQ ID NO: 17652
  Cyclic GFR-binding peptide
  MOD_RES (31)..(33): Xaa is C or S

SEQ ID NO: 51105 - protein, 30 aa, Artificial Sequence; identical to SEQ ID NO: 17653
  Cyclic GFR-binding peptide
  MOD_RES (2)..(3): Xaa is C or S

SEQ ID NO: 51106 - protein, 33 aa, Artificial Sequence; identical to SEQ ID NO: 17654
  Cyclic GFR-binding peptide
  MOD_RES (2)..(3): Xaa is C or S

SEQ ID NO: 51107 - protein, 31 aa, Artificial Sequence; identical to SEQ ID NO: 17655
  Cyclic GFR-binding peptide
  MOD_RES (2)..(3): Xaa is C or S

SEQ ID NO: 51108 - protein, 31 aa, Artificial Sequence; identical to SEQ ID NO: 17657
  Cyclic GFR-binding peptide
  MOD_RES (4)..(5): Xaa is C or S

SEQ ID NO: 51109 - protein, 32 aa, Artificial Sequence; identical to SEQ ID NO: 7343
  Cyclic GFR-binding peptide
  MOD_RES (6)..(7): Xaa is C or S

SEQ ID NO: 51110 - protein, 26 aa, Artificial Sequence
  Cyclic GFR-binding peptide
APTKLSPISVLFIDDSSNVIYKQYEN

SEQ ID NO: 51111 - protein, 32 aa, Artificial Sequence; identical to SEQ ID NO: 17660
  Cyclic GFR-binding peptide
  MOD_RES (1)..(2): Xaa is C or S

SEQ ID NO: 51112 - protein, 29 aa, Artificial Sequence
  Cyclic GFR-binding peptide
  MOD_RES (3)..(4): Xaa is C or S
APXXVPQALSPISILFIVGRKPKVYKQYE

SEQ ID NO: 51113 - protein, 30 aa, Artificial Sequence; identical to SEQ ID NO: 17662
  Cyclic GFR-binding peptide
  MOD_RES (28)..(30): Xaa is C or S

SEQ ID NO: 51114 - protein, 31 aa, Artificial Sequence; identical to SEQ ID NO: 17663
  Cyclic GFR-binding peptide
  MOD_RES (1)..(2): Xaa is C or S

SEQ ID NO: 51115 - protein, 31 aa, Artificial Sequence; identical to SEQ ID NO: 7348
  Cyclic GFR-binding peptide
  MOD_RES (1)..(1): Xaa is C or S

SEQ ID NO: 51116 - protein, 34 aa, Artificial Sequence; identical to SEQ ID NO: 17665
  Cyclic GFR-binding peptide
  MOD_RES (3)..(4): Xaa is C or S

SEQ ID NO: 51117 - protein, 32 aa, Artificial Sequence; identical to SEQ ID NO: 17666
  Cyclic GFR-binding peptide
  MOD_RES (6)..(6): Xaa is C or S

SEQ ID NO: 51118 - protein, 25 aa, Artificial Sequence
  Cyclic GFR-binding peptide
EPLTILYYVGRKPKVEQLSNMIVRS

SEQ ID NO: 51119 - protein, 26 aa, Artificial Sequence
  Cyclic GFR-binding peptide
ELNAISMLYFDEYDKVVLKKYREMVV

SEQ ID NO: 51120 - protein, 36 aa, Artificial Sequence; identical to SEQ ID NO: 17669
  Cyclic GFR-binding peptide
  MOD_RES (5)..(6): Xaa is C or S

SEQ ID NO: 51121 - protein, 24 aa, Artificial Sequence
  Cyclic GFR-binding peptide
LSPISILFIVGRKPKVYKQYEMIV

SEQ ID NO: 51122 - protein, 35 aa, Artificial Sequence; identical to SEQ ID NO: 7356
  Cyclic GFR-binding peptide
  MOD_RES (5)..(6): Xaa is C or S

SEQ ID NO: 51123 - protein, 32 aa, Artificial Sequence; identical to SEQ ID NO: 17673
  Cyclic GFR-binding peptide
  MOD_RES (1)..(32): Xaa is C or S

SEQ ID NO: 51124 - protein, 32 aa, Artificial Sequence; identical to SEQ ID NO: 17674
  Cyclic GFR-binding peptide
  MOD_RES (29)..(31): Xaa is C or S

SEQ ID NO: 51125 - protein, 28 aa, Artificial Sequence
  Cyclic GFR-binding peptide
  MOD_RES (2)..(3): Xaa is C or S
AXXVPTELSPISMLFIDENEKVVYKQYE

SEQ ID NO: 51126 - protein, 29 aa, Artificial Sequence
  Cyclic GFR-binding peptide
  MOD_RES (1)..(2): Xaa is C or S
XXVSQDLNAISILYFIGKTPKILKKYRMI

SEQ ID NO: 51127 - protein, 37 aa, Artificial Sequence; identical to SEQ ID NO: 17679
  Cyclic GFR-binding peptide
  MOD_RES (6)..(7): Xaa is C or S

SEQ ID NO: 51128 - protein, 31 aa, Artificial Sequence; identical to SEQ ID NO: 17680
  Cyclic GFR-binding peptide
  MOD_RES (5)..(6): Xaa is C or S

SEQ ID NO: 51129 - protein, 33 aa, Artificial Sequence; identical to SEQ ID NO: 17682
  Cyclic GFR-binding peptide
  MOD_RES (2)..(2): Xaa is C or S

SEQ ID NO: 51130 - protein, 32 aa, Artificial Sequence; identical to SEQ ID NO: 17683
  Cyclic GFR-binding peptide
  MOD_RES (32)..(32): Xaa is C or S

SEQ ID NO: 51131 - protein, 34 aa, Artificial Sequence; identical to SEQ ID NO: 7368
  Cyclic GFR-binding peptide
  MOD_RES (2)..(3)..(34): Xaa is C or S

SEQ ID NO: 51132 - protein, 35 aa, Artificial Sequence; identical to SEQ ID NO: 17686
  Cyclic GFR-binding peptide
  MOD_RES (2)..(34): Xaa is C or S

SEQ ID NO: 51133 - protein, 32 aa, Artificial Sequence; identical to SEQ ID NO: 17687
  Cyclic GFR-binding peptide
  MOD_RES (4)..(5): Xaa is C or S

SEQ ID NO: 51134 - protein, 38 aa, Artificial Sequence; identical to SEQ ID NO: 7372
  Cyclic GFR-binding peptide
  MOD_RES (6)..(7)..(38): Xaa is C or S

SEQ ID NO: 51135 - protein, 28 aa, Artificial Sequence
  Cyclic GFR-binding peptide
APTQLEPLPVVYYDDSSNVIEQLSNNMV

SEQ ID NO: 51136 - protein, 35 aa, Artificial Sequence; identical to SEQ ID NO: 17690
  Cyclic GFR-binding peptide
  MOD_RES (32)..(34): Xaa is C or S

SEQ ID NO: 51137 - protein, 30 aa, Artificial Sequence; identical to SEQ ID NO: 17691
  Cyclic GFR-binding peptide

SEQ ID NO: 51138 - protein, 29 aa, Artificial Sequence
  Cyclic GFR-binding peptide
  MOD_RES (29)..(29): Xaa is C or S
QALSPISILFIVGRKPKVYKQYEMIVRSX

SEQ ID NO: 51139 - protein, 37 aa, Artificial Sequence; identical to SEQ ID NO: 17694
  Cyclic GFR-binding peptide
  MOD_RES (5)..(6)..(37): Xaa is C or S

SEQ ID NO: 51140 - protein, 35 aa, Artificial Sequence; identical to SEQ ID NO: 17695
  Cyclic GFR-binding peptide
  MOD_RES (1)..(2)..(33)..(35): Xaa is C or S

SEQ ID NO: 51141 - protein, 29 aa, Artificial Sequence
  Cyclic GFR-binding peptide
PTELNAISMLYFDEYDKVVLKKYREMVVE

SEQ ID NO: 51142 - protein, 24 aa, Artificial Sequence
  Cyclic GFR-binding peptide
ALEPLTILYYVGRKPKVEQLSNMI

SEQ ID NO: 51143 - protein, 30 aa, Artificial Sequence; identical to SEQ ID NO: 17698
  Cyclic GFR-binding peptide
  MOD_RES (4)..(5): Xaa is C or S

SEQ ID NO: 51144 - protein, 36 aa, Artificial Sequence; identical to SEQ ID NO: 17699
  Cyclic GFR-binding peptide
  MOD_RES (1)..(33)..(35): Xaa is C or S

SEQ ID NO: 51145 - protein, 37 aa, Artificial Sequence; identical to SEQ ID NO: 7381
  Cyclic GFR-binding peptide
  MOD_RES (2)..(3)..(35)..(37): Xaa is C or S

SEQ ID NO: 51146 - protein, 35 aa, Artificial Sequence; identical to SEQ ID NO: 17702
  Cyclic GFR-binding peptide
  MOD_RES (1)..(2)..(34): Xaa is C or S

SEQ ID NO: 51147 - protein, 29 aa, Artificial Sequence
  Cyclic GFR-binding peptide
  MOD_RES (28)..(28): Xaa is C or S
DLNAISILYFVGRTPKVLKKYRMVVKSXK

SEQ ID NO: 51148 - protein, 31 aa, Artificial Sequence; identical to SEQ ID NO: 17704
  Cyclic GFR-binding peptide
  MOD_RES (29)..(31): Xaa is C or S

SEQ ID NO: 51149 - protein, 39 aa, Artificial Sequence; identical to SEQ ID NO: 17705
  Cyclic GFR-binding peptide
  MOD_RES (5)..(6)..(37)..(39): Xaa is C or S

SEQ ID NO: 51150 - protein, 34 aa, Artificial Sequence; identical to SEQ ID NO: 17707
  Cyclic GFR-binding peptide
  MOD_RES (6)..(7): Xaa is C or S

SEQ ID NO: 51151 - protein, 29 aa, Artificial Sequence
  Cyclic GFR-binding peptide
  MOD_RES (1)..(2): Xaa is C or S
XXAPTKLEPLTVLYYDDSSNVIEQLSNNM

SEQ ID NO: 51152 - protein, 27 aa, Artificial Sequence
  Cyclic GFR-binding peptide
  MOD_RES (1)..(1): Xaa is C or S
XVSQDLNAISILYFIGKTPKILKKYRM

SEQ ID NO: 51153 - protein, 29 aa, Artificial Sequence
  Cyclic GFR-binding peptide
  MOD_RES (2)..(3): Xaa is C or S
PXXAPTQLEPLPVVYYDDSSNVIEQLSNN

SEQ ID NO: 51154 - protein, 24 aa, Artificial Sequence
  Cyclic GFR-binding peptide
TKLSPISVLFIDDSSNVIYKQYEN

SEQ ID NO: 51155 - protein, 30 aa, Artificial Sequence; identical to SEQ ID NO: 17712
  Cyclic GFR-binding peptide

SEQ ID NO: 51156 - protein, 31 aa, Artificial Sequence; identical to SEQ ID NO: 7390
  Cyclic GFR-binding peptide
  MOD_RES (4)..(5): Xaa is C or S

SEQ ID NO: 51157 - protein, 31 aa, Artificial Sequence; identical to SEQ ID NO: 17714
  Cyclic GFR-binding peptide
  MOD_RES (5)..(5): Xaa is C or S

SEQ ID NO: 51158 - protein, 26 aa, Artificial Sequence
  Cyclic GFR-binding peptide
LEPLPMVYYDENEKVVEQLSNDMVVE

SEQ ID NO: 51159 - protein, 26 aa, Artificial Sequence
  Cyclic GFR-binding peptide
PTELSPISMLFIDEYDKVVYKQYEEM

SEQ ID NO: 51160 - protein, 23 aa, Artificial Sequence
  Cyclic GFR-binding peptide
LSPISMLFIDEYDKVVYKQYEEM

SEQ ID NO: 51161 - protein, 33 aa, Artificial Sequence; identical to SEQ ID NO: 17720
  Cyclic GFR-binding peptide
  MOD_RES (31)..(33): Xaa is C or S

SEQ ID NO: 51162 - protein, 26 aa, Artificial Sequence
  Cyclic GFR-binding peptide
ELSPISMLFIDEYDKVVYKQYEEMVV

SEQ ID NO: 51163 - protein, 23 aa, Artificial Sequence
  Cyclic GFR-binding peptide
ALSPISILFIVGRKPKVYKQYEM

SEQ ID NO: 51164 - protein, 21 aa, Artificial Sequence
  Cyclic GFR-binding peptide
LEPLTILYYVGRKPKVEQLSN

SEQ ID NO: 51165 - protein, 32 aa, Artificial Sequence; identical to SEQ ID NO: 17724
  Cyclic GFR-binding peptide
  MOD_RES (1)..(1): Xaa is C or S

SEQ ID NO: 51166 - protein, 41 aa, Artificial Sequence; identical to SEQ ID NO: 17725
  Cyclic GFR-binding peptide
  MOD_RES (5)..(6)..(38)..(40): Xaa is C or S

SEQ ID NO: 51167 - protein, 27 aa, Artificial Sequence
  Cyclic GFR-binding peptide
VPQDLNAISILYFVGRTPKVLKKYRMV

SEQ ID NO: 51168 - protein, 28 aa, Artificial Sequence
  Cyclic GFR-binding peptide
  MOD_RES (1)..(1): Xaa is C or S
XAPTKLSPISVLFIDDSSNVIYKQYENM

SEQ ID NO: 51169 - protein, 29 aa, Artificial Sequence
  Cyclic GFR-binding peptide
  MOD_RES (29)..(29): Xaa is C or S
RLEPLPIVYYDSANNVVEQLSNDMVVESX

SEQ ID NO: 51170 - protein, 30 aa, Artificial Sequence; identical to SEQ ID NO: 17731
  Cyclic GFR-binding peptide
  MOD_RES (2)..(3): Xaa is C or S

SEQ ID NO: 51171 - protein, 33 aa, Artificial Sequence; identical to SEQ ID NO: 17732
  Cyclic GFR-binding peptide
  MOD_RES (1)..(33): Xaa is C or S

SEQ ID NO: 51172 - protein, 28 aa, Artificial Sequence
  Cyclic GFR-binding peptide
KLSPISVLFIDDSSNVIYKQYENMVVRS

SEQ ID NO: 51173 - protein, 31 aa, Artificial Sequence; identical to SEQ ID NO: 7417
  Cyclic GFR-binding peptide
  MOD_RES (28)..(30): Xaa is C or S

SEQ ID NO: 51174 - protein, 30 aa, Artificial Sequence; identical to SEQ ID NO: 7419
  Cyclic GFR-binding peptide
  MOD_RES (3)..(4): Xaa is C or S

SEQ ID NO: 51175 - protein, 32 aa, Artificial Sequence; identical to SEQ ID NO: 17737
  Cyclic GFR-binding peptide
  MOD_RES (4)..(5): Xaa is C or S

SEQ ID NO: 51176 - protein, 39 aa, Artificial Sequence; identical to SEQ ID NO: 17738
  Cyclic GFR-binding peptide
  MOD_RES (3)..(4)..(36)..(38): Xaa is C or S

SEQ ID NO: 51177 - protein, 24 aa, Artificial Sequence
  Cyclic GFR-binding peptide
EPLTILYYVGRKPKVEQLSNMIVR

SEQ ID NO: 51178 - protein, 27 aa, Artificial Sequence
  Cyclic GFR-binding peptide
  MOD_RES (26)..(26): Xaa is C or S
NAISILYFVGRTPKVLKKYRMVVKSXK

SEQ ID NO: 51179 - protein, 27 aa, Artificial Sequence
  Cyclic GFR-binding peptide
  MOD_RES (1)..(2): Xaa is C or S
XXVPQALSPISILFIVGRKPKVYKQYE

SEQ ID NO: 51180 - protein, 35 aa, Artificial Sequence; identical to SEQ ID NO: 17742
  Cyclic GFR-binding peptide
  MOD_RES (5)..(5): Xaa is C or S

SEQ ID NO: 51181 - protein, 27 aa, Artificial Sequence
  Cyclic GFR-binding peptide
VPTELEPLTMLYYDEYDKVVEQLSNEM

SEQ ID NO: 51182 - protein, 31 aa, Artificial Sequence; identical to SEQ ID NO: 17746
  Cyclic GFR-binding peptide
  MOD_RES (5)..(5): Xaa is C or S

SEQ ID NO: 51183 - protein, 28 aa, Artificial Sequence
  Cyclic GFR-binding peptide
PTELNAISMLYFDENEKVVLKKYRDMVV

SEQ ID NO: 51184 - protein, 31 aa, Artificial Sequence; identical to SEQ ID NO: 7435
  Cyclic GFR-binding peptide
  MOD_RES (1)..(1): Xaa is C or S

SEQ ID NO: 51185 - protein, 29 aa, Artificial Sequence
  Cyclic GFR-binding peptide
TELNAISMLYFDENEKVVLKKYRDMVVEG

SEQ ID NO: 51186 - protein, 36 aa, Artificial Sequence; identical to SEQ ID NO: 17753
  Cyclic GFR-binding peptide
  MOD_RES (6)..(7): Xaa is C or S

SEQ ID NO: 51187 - protein, 23 aa, Artificial Sequence
  Cyclic GFR-binding peptide
QDLEPLPIVYYVGRTPKVEQLSN

SEQ ID NO: 51188 - protein, 34 aa, Artificial Sequence; identical to SEQ ID NO: 17755
  Cyclic GFR-binding peptide
  MOD_RES (4)..(5): Xaa is C or S

SEQ ID NO: 51189 - protein, 30 aa, Artificial Sequence; identical to SEQ ID NO: 17756
  Cyclic GFR-binding peptide
  MOD_RES (1)..(2): Xaa is C or S

SEQ ID NO: 51190 - protein, 31 aa, Artificial Sequence; identical to SEQ ID NO: 17757
  Cyclic GFR-binding peptide
  MOD_RES (30)..(30): Xaa is C or S

SEQ ID NO: 51191 - protein, 25 aa, Artificial Sequence
  Cyclic GFR-binding peptide
TELNAISMLYFDENEKVVLKKYRDM

SEQ ID NO: 51192 - protein, 28 aa, Artificial Sequence
  Cyclic GFR-binding peptide
TELEPLPMVYYDEYDKVVEQLSNEMVVE

SEQ ID NO: 51193 - protein, 32 aa, Artificial Sequence; identical to SEQ ID NO: 7440
  Cyclic GFR-binding peptide
  MOD_RES (3)..(4): Xaa is C or S

SEQ ID NO: 51194 - protein, 38 aa, Artificial Sequence; identical to SEQ ID NO: 17762
  Cyclic GFR-binding peptide
  MOD_RES (4)..(5)..(37): Xaa is C or S

SEQ ID NO: 51195 - protein, 29 aa, Artificial Sequence
  Cyclic GFR-binding peptide
VPQDLEPLPIVYYVGRTPKVEQLSNMVVK

SEQ ID NO: 51196 - protein, 28 aa, Artificial Sequence
  Cyclic GFR-binding peptide
  MOD_RES (27)..(27): Xaa is C or S
EPLPIVYYDSANNVVEQLSNDMVVESXG

SEQ ID NO: 51197 - protein, 35 aa, Artificial Sequence; identical to SEQ ID NO: 17769
  Cyclic GFR-binding peptide
  MOD_RES (1)..(33)..(35): Xaa is C or S

SEQ ID NO: 51198 - protein, 35 aa, Artificial Sequence; identical to SEQ ID NO: 17770
  Cyclic GFR-binding peptide
  MOD_RES (2)..(3)..(35): Xaa is C or S

SEQ ID NO: 51199 - protein, 38 aa, Artificial Sequence; identical to SEQ ID NO: 17771
  Cyclic GFR-binding peptide
  MOD_RES (4)..(36)..(38): Xaa is C or S

SEQ ID NO: 51200 - protein, 40 aa, Artificial Sequence; identical to SEQ ID NO: 17772
  Cyclic GFR-binding peptide
  MOD_RES (6)..(7)..(39): Xaa is C or S

SEQ ID NO: 51201 - protein, 34 aa, Artificial Sequence; identical to SEQ ID NO: 17773
  Cyclic GFR-binding peptide
  MOD_RES (5)..(6): Xaa is C or S

SEQ ID NO: 51202 - protein, 37 aa, Artificial Sequence; identical to SEQ ID NO: 17775
  Cyclic GFR-binding peptide
  MOD_RES (4)..(5)..(37): Xaa is C or S

SEQ ID NO: 51203 - protein, 27 aa, Artificial Sequence
  Cyclic GFR-binding peptide
PTELEPLTMLYYDENEKVVEQLSNDMV

SEQ ID NO: 51204 - protein, 40 aa, Artificial Sequence; identical to SEQ ID NO: 17778
  Cyclic GFR-binding peptide
  MOD_RES (6)..(7)..(38)..(40): Xaa is C or S

SEQ ID NO: 51205 - protein, 33 aa, Artificial Sequence; identical to SEQ ID NO: 17779
  Cyclic GFR-binding peptide
  MOD_RES (5)..(6): Xaa is C or S

SEQ ID NO: 51206 - protein, 29 aa, Artificial Sequence
  Cyclic GFR-binding peptide
TELNAISMLYFDEYDKVVLKKYREMVVEG

SEQ ID NO: 51207 - protein, 35 aa, Artificial Sequence; identical to SEQ ID NO: 17781
  Cyclic GFR-binding peptide
  MOD_RES (1)..(33)..(35): Xaa is C or S

SEQ ID NO: 51208 - protein, 32 aa, Artificial Sequence; identical to SEQ ID NO: 17782
  Cyclic GFR-binding peptide
  MOD_RES (1)..(2): Xaa is C or S

SEQ ID NO: 51209 - protein, 28 aa, Artificial Sequence
  Cyclic GFR-binding peptide
  MOD_RES (1)..(1): Xaa is C or S
XVSQDLNAISILYFIGKTPKILKKYRMI

SEQ ID NO: 51210 - protein, 31 aa, Artificial Sequence; identical to SEQ ID NO: 17784
  Cyclic GFR-binding peptide
  MOD_RES (5)..(6): Xaa is C or S

SEQ ID NO: 51211 - protein, 36 aa, Artificial Sequence; identical to SEQ ID NO: 7469
  Cyclic GFR-binding peptide
  MOD_RES (1)..(2)..(33)..(35): Xaa is C or S

SEQ ID NO: 51212 - protein, 24 aa, Artificial Sequence
  Cyclic GFR-binding peptide
SQDLEPLPIVYYIGKTPKIEQLSN

SEQ ID NO: 51213 - protein, 29 aa, Artificial Sequence
  Cyclic GFR-binding peptide
  MOD_RES (28)..(28): Xaa is C or S
LEPLTMLYYDEYDKVVEQLSNEMVVEGXG

SEQ ID NO: 51214 - protein, 29 aa, Artificial Sequence
  Cyclic GFR-binding peptide
  MOD_RES (27)..(29): Xaa is C or S
LSPISILFIVGRTPKVYKQYEMVVKSXKX

SEQ ID NO: 51215 - protein, 26 aa, Artificial Sequence
  Cyclic GFR-binding peptide
  MOD_RES (26)..(26): Xaa is C or S
SPISILFIVGRTPKVYKQYEMVVKSX

SEQ ID NO: 51216 - protein, 27 aa, Artificial Sequence
  Cyclic GFR-binding peptide
VSQDLNAISILYFIGKTPKILKKYRMI

SEQ ID NO: 51217 - protein, 38 aa, Artificial Sequence; identical to SEQ ID NO: 17792
  Cyclic GFR-binding peptide
  MOD_RES (5)..(6)..(37): Xaa is C or S

SEQ ID NO: 51218 - protein, 25 aa, Artificial Sequence
  Cyclic GFR-binding peptide
EPLPMVYYDEYDKVVEQLSNEMVVE

SEQ ID NO: 51219 - protein, 31 aa, Artificial Sequence; identical to SEQ ID NO: 17794
  Cyclic GFR-binding peptide
  MOD_RES (3)..(4): Xaa is C or S

SEQ ID NO: 51220 - protein, 33 aa, Artificial Sequence; identical to SEQ ID NO: 17795
  Cyclic GFR-binding peptide
  MOD_RES (4)..(5): Xaa is C or S

SEQ ID NO: 51221 - protein, 29 aa, Artificial Sequence
  Cyclic GFR-binding peptide
  MOD_RES (27)..(29): Xaa is C or S
EPLTMLYYDENEKVVEQLSNDMVVEGXGX

SEQ ID NO: 51222 - protein, 25 aa, Artificial Sequence
  Cyclic GFR-binding peptide
EPLTILYYDSANNVVEQLSNDMVVE

SEQ ID NO: 51223 - protein, 21 aa, Artificial Sequence
  Cyclic GFR-binding peptide
EPLPIVYYIGKTPKIEQLSNM

SEQ ID NO: 51224 - protein, 20 aa, Artificial Sequence
  Cyclic GFR-binding peptide
NAISMLYFDENEKVVLKKYR

SEQ ID NO: 51225 - protein, 26 aa, Artificial Sequence
  Cyclic GFR-binding peptide
  MOD_RES (1)..(1): Xaa is C or S
XVPTELEPLPMVYYDEYDKVVEQLSN

SEQ ID NO: 51226 - protein, 22 aa, Artificial Sequence
  Cyclic GFR-binding peptide
DLNAISILYFIGKTPKILKKYR

SEQ ID NO: 51227 - protein, 26 aa, Artificial Sequence
  Cyclic GFR-binding peptide
TELSPISMLFIDENEKVVYKQYEDMV

SEQ ID NO: 51228 - protein, 36 aa, Artificial Sequence; identical to SEQ ID NO: 7491
  Cyclic GFR-binding peptide
  MOD_RES (1)..(2)..(34)..(36): Xaa is C or S

SEQ ID NO: 51229 - protein, 24 aa, Artificial Sequence
  Cyclic GFR-binding peptide
SPISMLFIDEYDKVVYKQYEEMVV

SEQ ID NO: 51230 - protein, 31 aa, Artificial Sequence; identical to SEQ ID NO: 17807
  Cyclic GFR-binding peptide
  MOD_RES (31)..(31): Xaa is C or S

SEQ ID NO: 51231 - protein, 24 aa, Artificial Sequence
  Cyclic GFR-binding peptide
EPLPIVYYIGKTPKIEQLSNMIVK

SEQ ID NO: 51232 - protein, 33 aa, Artificial Sequence; identical to SEQ ID NO: 17809
  Cyclic GFR-binding peptide
  MOD_RES (3)..(4): Xaa is C or S

SEQ ID NO: 51233 - protein, 23 aa, Artificial Sequence
  Cyclic GFR-binding peptide
QALEPLTILYYVGRKPKVEQLSN

SEQ ID NO: 51234 - protein, 31 aa, Artificial Sequence; identical to SEQ ID NO: 7499
  Cyclic GFR-binding peptide
  MOD_RES (3)..(4): Xaa is C or S

SEQ ID NO: 51235 - protein, 22 aa, Artificial Sequence
  Cyclic GFR-binding peptide
ALSPISILFIVGRKPKVYKQYE

SEQ ID NO: 51236 - protein, 37 aa, Artificial Sequence; identical to SEQ ID NO: 17814
  Cyclic GFR-binding peptide
  MOD_RES (5)..(6): Xaa is C or S

SEQ ID NO: 51237 - protein, 27 aa, Artificial Sequence
  Cyclic GFR-binding peptide
  MOD_RES (1)..(1): Xaa is C or S
XAPTKLSPISVLFIDDSSNVIYKQYEN

SEQ ID NO: 51238 - protein, 33 aa, Artificial Sequence; identical to SEQ ID NO: 17816
  Cyclic GFR-binding peptide
  MOD_RES (3)..(4): Xaa is C or S

SEQ ID NO: 51239 - protein, 24 aa, Artificial Sequence
  Cyclic GFR-binding peptide
RLNAISILYFDSANNVVLKKYRDM

SEQ ID NO: 51240 - protein, 36 aa, Artificial Sequence; identical to SEQ ID NO: 17819
  Cyclic GFR-binding peptide
  MOD_RES (2)..(3)..(35): Xaa is C or S

SEQ ID NO: 51241 - protein, 37 aa, Artificial Sequence; identical to SEQ ID NO: 17821
  Cyclic GFR-binding peptide
  MOD_RES (4)..(5)..(36): Xaa is C or S

SEQ ID NO: 51242 - protein, 27 aa, Artificial Sequence
  Cyclic GFR-binding peptide
VPTELNAISMLYFDENEKVVLKKYRDM

SEQ ID NO: 51243 - protein, 31 aa, Artificial Sequence; identical to SEQ ID NO: 17824
  Cyclic GFR-binding peptide
  MOD_RES (1)..(2): Xaa is C or S

SEQ ID NO: 51244 - protein, 24 aa, Artificial Sequence
  Cyclic GFR-binding peptide
LEPLPIVYYDSANNVVEQLSNDMV

SEQ ID NO: 51245 - protein, 24 aa, Artificial Sequence
  Cyclic GFR-binding peptide
LEPLPMVYYDEYDKVVEQLSNEMV

SEQ ID NO: 51246 - protein, 24 aa, Artificial Sequence
  Cyclic GFR-binding peptide
TKLEPLPVVYYDDSSNVIEQLSNN

SEQ ID NO: 51247 - protein, 34 aa, Artificial Sequence; identical to SEQ ID NO: 17828
  Cyclic GFR-binding peptide
  MOD_RES (4)..(5): Xaa is C or S

SEQ ID NO: 51248 - protein, 34 aa, Artificial Sequence; identical to SEQ ID NO: 17829
  Cyclic GFR-binding peptide
  MOD_RES (3)..(4): Xaa is C or S

SEQ ID NO: 51249 - protein, 31 aa, Artificial Sequence; identical to SEQ ID NO: 7514
  Cyclic GFR-binding peptide
  MOD_RES (1)..(2): Xaa is C or S

SEQ ID NO: 51250 - protein, 31 aa, Artificial Sequence; identical to SEQ ID NO: 17832
  Cyclic GFR-binding peptide
  MOD_RES (5)..(6): Xaa is C or S

SEQ ID NO: 51251 - protein, 27 aa, Artificial Sequence
  Cyclic GFR-binding peptide
  MOD_RES (1)..(1): Xaa is C or S
XAPTKLEPLPVVYYDDSSNVIEQLSNN

SEQ ID NO: 51252 - protein, 36 aa, Artificial Sequence; identical to SEQ ID NO: 17835
  Cyclic GFR-binding peptide
  MOD_RES (3)..(4)..(36): Xaa is C or S

SEQ ID NO: 51253 - protein, 39 aa, Artificial Sequence; identical to SEQ ID NO: 17836
  Cyclic GFR-binding peptide
  MOD_RES (6)..(7)..(39): Xaa is C or S

SEQ ID NO: 51254 - protein, 29 aa, Artificial Sequence
  Cyclic GFR-binding peptide
  MOD_RES (28)..(28): Xaa is C or S
LEPLTVLYYDDSSNVIEQLSNNMVVRSXG

SEQ ID NO: 51255 - protein, 25 aa, Artificial Sequence
  Cyclic GFR-binding peptide
EPLTMLYYDENEKVVEQLSNDMVVE

SEQ ID NO: 51256 - protein, 25 aa, Artificial Sequence
  Cyclic GFR-binding peptide
EPLTVLYYDDSSNVIEQLSNNMVVR

SEQ ID NO: 51257 - protein, 22 aa, Artificial Sequence
  Cyclic GFR-binding peptide
SPISILFIVGRTPKVYKQYEMV

SEQ ID NO: 51258 - protein, 22 aa, Artificial Sequence
  Cyclic GFR-binding peptide
LNAISILYFVGRTPKVLKKYRM

SEQ ID NO: 51259 - protein, 35 aa, Artificial Sequence; identical to SEQ ID NO: 17843
  Cyclic GFR-binding peptide
  MOD_RES (6)..(7): Xaa is C or S

SEQ ID NO: 51260 - protein, 32 aa, Artificial Sequence; identical to SEQ ID NO: 17844
  Cyclic GFR-binding peptide
  MOD_RES (6)..(6): Xaa is C or S

SEQ ID NO: 51261 - protein, 25 aa, Artificial Sequence
  Cyclic GFR-binding peptide
APTQLSPISVLFIDDSSNVIYKQYE

SEQ ID NO: 51262 - protein, 39 aa, Artificial Sequence; identical to SEQ ID NO: 17847
  Cyclic GFR-binding peptide
  MOD_RES (5)..(6)..(38): Xaa is C or S

SEQ ID NO: 51263 - protein, 42 aa, Artificial Sequence; identical to SEQ ID NO: 7533
  Cyclic GFR-binding peptide
  MOD_RES (6)..(7)..(39)..(41): Xaa is C or S

SEQ ID NO: 51264 - protein, 32 aa, Artificial Sequence; identical to SEQ ID NO: 17849
  Cyclic GFR-binding peptide
  MOD_RES (2)..(3): Xaa is C or S

SEQ ID NO: 51265 - protein, 30 aa, Artificial Sequence; identical to SEQ ID NO: 17851
  Cyclic GFR-binding peptide
  MOD_RES (1)..(1): Xaa is C or S

SEQ ID NO: 51266 - protein, 31 aa, Artificial Sequence; identical to SEQ ID NO: 17852
  Cyclic GFR-binding peptide
  MOD_RES (2)..(3): Xaa is C or S

SEQ ID NO: 51267 - protein, 29 aa, Artificial Sequence
  Cyclic GFR-binding peptide
  MOD_RES (2)..(3): Xaa is C or S
PXXAPTQLSPISVLFIDDSSNVIYKQYEN

SEQ ID NO: 51268 - protein, 37 aa, Artificial Sequence; identical to SEQ ID NO: 17856
  Cyclic GFR-binding peptide
  MOD_RES (1)..(2)..(34)..(36): Xaa is C or S

SEQ ID NO: 51269 - protein, 40 aa, Artificial Sequence; identical to SEQ ID NO: 17859
  Cyclic GFR-binding peptide
  MOD_RES (5)..(6)..(38)..(40): Xaa is C or S

SEQ ID NO: 51270 - protein, 22 aa, Artificial Sequence
  Cyclic GFR-binding peptide
NAISILYFVGRKPKVLKKYRMI

SEQ ID NO: 51271 - protein, 34 aa, Artificial Sequence; identical to SEQ ID NO: 17863
  Cyclic GFR-binding peptide
  MOD_RES (6)..(7): Xaa is C or S

SEQ ID NO: 51272 - protein, 30 aa, Artificial Sequence; identical to SEQ ID NO: 7551
  Cyclic GFR-binding peptide
  MOD_RES (30)..(30): Xaa is C or S

SEQ ID NO: 51273 - protein, 27 aa, Artificial Sequence
  Cyclic GFR-binding peptide
  MOD_RES (26)..(26): Xaa is C or S
NAISILYFVGRKPKVLKKYRMIVRSXK

SEQ ID NO: 51274 - protein, 34 aa, Artificial Sequence; identical to SEQ ID NO: 17868
  Cyclic GFR-binding peptide
  MOD_RES (6)..(6): Xaa is C or S

SEQ ID NO: 51275 - protein, 33 aa, Artificial Sequence; identical to SEQ ID NO: 7556
  Cyclic GFR-binding peptide
  MOD_RES (2)..(3): Xaa is C or S

SEQ ID NO: 51276 - protein, 35 aa, Artificial Sequence; identical to SEQ ID NO: 17872
  Cyclic GFR-binding peptide
  MOD_RES (1)..(33)..(35): Xaa is C or S

SEQ ID NO: 51277 - protein, 36 aa, Artificial Sequence; identical to SEQ ID NO: 17873
  Cyclic GFR-binding peptide
  MOD_RES (5)..(6): Xaa is C or S

SEQ ID NO: 51278 - protein, 33 aa, Artificial Sequence; identical to SEQ ID NO: 17874
  Cyclic GFR-binding peptide
  MOD_RES (4)..(5): Xaa is C or S

SEQ ID NO: 51279 - protein, 25 aa, Artificial Sequence
  Cyclic GFR-binding peptide
VPTRLEPLPIVYYDSANNVVEQLSN

SEQ ID NO: 51280 - protein, 41 aa, Artificial Sequence; identical to SEQ ID NO: 17877
  Cyclic GFR-binding peptide
  MOD_RES (5)..(6)..(38)..(40): Xaa is C or S

SEQ ID NO: 51281 - protein, 30 aa, Artificial Sequence; identical to SEQ ID NO: 7561
  Cyclic GFR-binding peptide
  MOD_RES (2)..(3): Xaa is C or S

SEQ ID NO: 51282 - protein, 22 aa, Artificial Sequence
  Cyclic GFR-binding peptide
EPLTMLYYDENEKVVEQLSNDM

SEQ ID NO: 51283 - protein, 40 aa, Artificial Sequence; identical to SEQ ID NO: 17880
  Cyclic GFR-binding peptide
  MOD_RES (6)..(7)..(38)..(40): Xaa is C or S

SEQ ID NO: 51284 - protein, 33 aa, Artificial Sequence; identical to SEQ ID NO: 7563
  Cyclic GFR-binding peptide
  MOD_RES (4)..(5): Xaa is C or S

SEQ ID NO: 51285 - protein, 40 aa, Artificial Sequence; identical to SEQ ID NO: 17882
  Cyclic GFR-binding peptide
  MOD_RES (6)..(7)..(38)..(40): Xaa is C or S

SEQ ID NO: 51286 - protein, 25 aa, Artificial Sequence
  Cyclic GFR-binding peptide
RLNAISILYFDSANNVVLKKYRDMV

SEQ ID NO: 51287 - protein, 30 aa, Artificial Sequence; identical to SEQ ID NO: 17884
  Cyclic GFR-binding peptide
  MOD_RES (1)..(1): Xaa is C or S

SEQ ID NO: 51288 - protein, 35 aa, Artificial Sequence; identical to SEQ ID NO: 17885
  Cyclic GFR-binding peptide
  MOD_RES (3)..(4): Xaa is C or S

SEQ ID NO: 51289 - protein, 35 aa, Artificial Sequence; identical to SEQ ID NO: 17888
  Cyclic GFR-binding peptide
  MOD_RES (1)..(32)..(34): Xaa is C or S

SEQ ID NO: 51290 - protein, 22 aa, Artificial Sequence
  Cyclic GFR-binding peptide
LEPLTILYYVGRKPKVEQLSNM

SEQ ID NO: 51291 - protein, 33 aa, Artificial Sequence; identical to SEQ ID NO: 17890
  Cyclic GFR-binding peptide
  MOD_RES (31)..(33): Xaa is C or S

SEQ ID NO: 51292 - protein, 32 aa, Artificial Sequence; identical to SEQ ID NO: 17892
  Cyclic GFR-binding peptide
  MOD_RES (3)..(3): Xaa is C or S

SEQ ID NO: 51293 - protein, 32 aa, Artificial Sequence; identical to SEQ ID NO: 17893
  Cyclic GFR-binding peptide
  MOD_RES (31)..(31): Xaa is C or S

SEQ ID NO: 51294 - protein, 21 aa, Artificial Sequence
  Cyclic GFR-binding peptide
SPISILFIIGKTPKIYKQYEM

SEQ ID NO: 51295 - protein, 28 aa, Artificial Sequence
  Cyclic GFR-binding peptide
  MOD_RES (1)..(1): Xaa is C or S
XVPQDLNAISILYFVGRTPKVLKKYRMV

SEQ ID NO: 51296 - protein, 23 aa, Artificial Sequence
  Cyclic GFR-binding peptide
SPISMLFIDEYDKVVYKQYEEMV

SEQ ID NO: 51297 - protein, 42 aa, Artificial Sequence; identical to SEQ ID NO: 7581
  Cyclic GFR-binding peptide
  MOD_RES (6)..(7)..(39)..(41): Xaa is C or S

SEQ ID NO: 51298 - protein, 35 aa, Artificial Sequence; identical to SEQ ID NO: 17900
  Cyclic GFR-binding peptide
  MOD_RES (32)..(34): Xaa is C or S

SEQ ID NO: 51299 - protein, 24 aa, Artificial Sequence
  Cyclic GFR-binding peptide
PQALSPISILFIVGRKPKVYKQYE

SEQ ID NO: 51300 - protein, 32 aa, Artificial Sequence; identical to SEQ ID NO: 17902
  Cyclic GFR-binding peptide
  MOD_RES (4)..(5): Xaa is C or S

SEQ ID NO: 51301 - protein, 29 aa, Artificial Sequence
  Cyclic GFR-binding peptide
  MOD_RES (27)..(29): Xaa is C or S
SPISVLFIDDSSNVIYKQYENMVVRSXGX

SEQ ID NO: 51302 - protein, 24 aa, Artificial Sequence
  Cyclic GFR-binding peptide
SQDLSPISILFIIGKTPKIYKQYE

SEQ ID NO: 51303 - protein, 28 aa, Artificial Sequence
  Cyclic GFR-binding peptide
APTKLEPLTVLYYDDSSNVIEQLSNNMV

SEQ ID NO: 51304 - protein, 33 aa, Artificial Sequence; identical to SEQ ID NO: 17906
  Cyclic GFR-binding peptide
  MOD_RES (5)..(6): Xaa is C or S

SEQ ID NO: 51305 - protein, 29 aa, Artificial Sequence
  Cyclic GFR-binding peptide
  MOD_RES (28)..(28): Xaa is C or S
DLSPISILFIIGKTPKIYKQYEMIVKSXK

SEQ ID NO: 51306 - protein, 33 aa, Artificial Sequence; identical to SEQ ID NO: 7592
  Cyclic GFR-binding peptide
  MOD_RES (1)..(32): Xaa is C or S

SEQ ID NO: 51307 - protein, 31 aa, Artificial Sequence; identical to SEQ ID NO: 7593
  Cyclic GFR-binding peptide
  MOD_RES (30)..(30): Xaa is C or S

SEQ ID NO: 51308 - protein, 36 aa, Artificial Sequence; identical to SEQ ID NO: 17910
  Cyclic GFR-binding peptide
  MOD_RES (4)..(5)..(36): Xaa is C or S

SEQ ID NO: 51309 - protein, 23 aa, Artificial Sequence
  Cyclic GFR-binding peptide
TELEPLTMLYYDEYDKVVEQLSN

SEQ ID NO: 51310 - protein, 29 aa, Artificial Sequence
  Cyclic GFR-binding peptide
  MOD_RES (1)..(1): Xaa is C or S
XVPTRLEPLTILYYDSANNVVEQLSNDMV

SEQ ID NO: 51311 - protein, 27 aa, Artificial Sequence
  Cyclic GFR-binding peptide
LNAISILYFDSANNVVLKKYRDMVVES

SEQ ID NO: 51312 - protein, 26 aa, Artificial Sequence
  Cyclic GFR-binding peptide
  MOD_RES (1)..(1): Xaa is C or S
XVPQALNAISILYFVGRKPKVLKKYR

SEQ ID NO: 51313 - protein, 30 aa, Artificial Sequence; identical to SEQ ID NO: 17919
  Cyclic GFR-binding peptide
  MOD_RES (3)..(4): Xaa is C or S

SEQ ID NO: 51314 - protein, 26 aa, Artificial Sequence
  Cyclic GFR-binding peptide
DLNAISILYFIGKTPKILKKYRMIVK

SEQ ID NO: 51315 - protein, 38 aa, Artificial Sequence; identical to SEQ ID NO: 17921
  Cyclic GFR-binding peptide
  MOD_RES (4)..(5)..(37): Xaa is C or S

SEQ ID NO: 51316 - protein, 34 aa, Artificial Sequence; identical to SEQ ID NO: 17922
  Cyclic GFR-binding peptide
  MOD_RES (4)..(5): Xaa is C or S

SEQ ID NO: 51317 - protein, 39 aa, Artificial Sequence; identical to SEQ ID NO: 17924
  Cyclic GFR-binding peptide
  MOD_RES (7)..(39): Xaa is C or S

SEQ ID NO: 51318 - protein, 26 aa, Artificial Sequence
  Cyclic GFR-binding peptide
  MOD_RES (1)..(1): Xaa is C or S
XAPTKLEPLPVVYYDDSSNVIEQLSN

SEQ ID NO: 51319 - protein, 31 aa, Artificial Sequence; identical to SEQ ID NO: 7616
  Cyclic GFR-binding peptide
  MOD_RES (2)..(3): Xaa is C or S

SEQ ID NO: 51320 - protein, 36 aa, Artificial Sequence; identical to SEQ ID NO: 17927
  Cyclic GFR-binding peptide
  MOD_RES (1)..(33)..(35): Xaa is C or S

SEQ ID NO: 51321 - protein, 39 aa, Artificial Sequence; identical to SEQ ID NO: 17929
  Cyclic GFR-binding peptide
  MOD_RES (4)..(5)..(36)..(38): Xaa is C or S

SEQ ID NO: 51322 - protein, 31 aa, Artificial Sequence; identical to SEQ ID NO: 17930
  Cyclic GFR-binding peptide
  MOD_RES (31)..(31): Xaa is C or S

SEQ ID NO: 51323 - protein, 30 aa, Artificial Sequence; identical to SEQ ID NO: 17931
  Cyclic GFR-binding peptide
  MOD_RES (30)..(30): Xaa is C or S

SEQ ID NO: 51324 - protein, 22 aa, Artificial Sequence
  Cyclic GFR-binding peptide
KLEPLPVVYYDDSSNVIEQLSN

SEQ ID NO: 51325 - protein, 26 aa, Artificial Sequence
  Cyclic GFR-binding peptide
ELNAISMLYFDENEKVVLKKYRDMVV

SEQ ID NO: 51326 - protein, 30 aa, Artificial Sequence; identical to SEQ ID NO: 7623
  Cyclic GFR-binding peptide
  MOD_RES (30)..(30): Xaa is C or S

SEQ ID NO: 51327 - protein, 32 aa, Artificial Sequence; identical to SEQ ID NO: 17937
  Cyclic GFR-binding peptide
  MOD_RES (5)..(6): Xaa is C or S

SEQ ID NO: 51328 - protein, 31 aa, Artificial Sequence; identical to SEQ ID NO: 7625
  Cyclic GFR-binding peptide
  MOD_RES (1)..(2): Xaa is C or S

SEQ ID NO: 51329 - protein, 38 aa, Artificial Sequence; identical to SEQ ID NO: 17939
  Cyclic GFR-binding peptide
  MOD_RES (5)..(6)..(38): Xaa is C or S

SEQ ID NO: 51330 - protein, 29 aa, Artificial Sequence
  Cyclic GFR-binding peptide
SQDLNAISILYFIGKTPKILKKYRMIVKS

SEQ ID NO: 51331 - protein, 33 aa, Artificial Sequence; identical to SEQ ID NO: 17944
  Cyclic GFR-binding peptide
  MOD_RES (1)..(2): Xaa is C or S

SEQ ID NO: 51332 - protein, 28 aa, Artificial Sequence
  Cyclic GFR-binding peptide
  MOD_RES (28)..(28): Xaa is C or S
DLEPLPIVYYVGRTPKVEQLSNMVVKSX

SEQ ID NO: 51333 - protein, 37 aa, Artificial Sequence; identical to SEQ ID NO: 17946
  Cyclic GFR-binding peptide
  MOD_RES (2)..(3)..(35)..(37): Xaa is C or S

SEQ ID NO: 51334 - protein, 31 aa, Artificial Sequence; identical to SEQ ID NO: 17948
  Cyclic GFR-binding peptide
  MOD_RES (4)..(5): Xaa is C or S

SEQ ID NO: 51335 - protein, 37 aa, Artificial Sequence; identical to SEQ ID NO: 17950
  Cyclic GFR-binding peptide
  MOD_RES (5)..(6): Xaa is C or S

SEQ ID NO: 51336 - protein, 35 aa, Artificial Sequence; identical to SEQ ID NO: 17951
  Cyclic GFR-binding peptide
  MOD_RES (1)..(2)..(34): Xaa is C or S

SEQ ID NO: 51337 - protein, 37 aa, Artificial Sequence; identical to SEQ ID NO: 17952
  Cyclic GFR-binding peptide
  MOD_RES (4)..(5)..(37): Xaa is C or S

SEQ ID NO: 51338 - protein, 39 aa, Artificial Sequence; identical to SEQ ID NO: 17953
  Cyclic GFR-binding peptide
  MOD_RES (6)..(7)..(39): Xaa is C or S

SEQ ID NO: 51339 - protein, 36 aa, Artificial Sequence; identical to SEQ ID NO: 17954
  Cyclic GFR-binding peptide
  MOD_RES (2)..(3)..(34)..(36): Xaa is C or S

SEQ ID NO: 51340 - protein, 29 aa, Artificial Sequence
  Cyclic GFR-binding peptide
  MOD_RES (2)..(3): Xaa is C or S
AXXVPTELEPLPMVYYDEYDKVVEQLSNE

SEQ ID NO: 51341 - protein, 32 aa, Artificial Sequence; identical to SEQ ID NO: 17956
  Cyclic GFR-binding peptide
  MOD_RES (6)..(7): Xaa is C or S

SEQ ID NO: 51342 - protein, 31 aa, Artificial Sequence; identical to SEQ ID NO: 17958
  Cyclic GFR-binding peptide
  MOD_RES (29)..(31): Xaa is C or S

SEQ ID NO: 51343 - protein, 30 aa, Artificial Sequence; identical to SEQ ID NO: 17959
  Cyclic GFR-binding peptide
  MOD_RES (29)..(29): Xaa is C or S

SEQ ID NO: 51344 - protein, 31 aa, Artificial Sequence; identical to SEQ ID NO: 17960
  Cyclic GFR-binding peptide
  MOD_RES (2)..(3): Xaa is C or S

SEQ ID NO: 51345 - protein, 31 aa, Artificial Sequence; identical to SEQ ID NO: 17961
  Cyclic GFR-binding peptide
  MOD_RES (29)..(31): Xaa is C or S

SEQ ID NO: 51346 - protein, 30 aa, Artificial Sequence; identical to SEQ ID NO: 17962
  Cyclic GFR-binding peptide

SEQ ID NO: 51347 - protein, 38 aa, Artificial Sequence; identical to SEQ ID NO: 17963
  Cyclic GFR-binding peptide
  MOD_RES (4)..(5)..(37): Xaa is C or S

SEQ ID NO: 51348 - protein, 33 aa, Artificial Sequence; identical to SEQ ID NO: 17966
  Cyclic GFR-binding peptide
  MOD_RES (3)..(4): Xaa is C or S

SEQ ID NO: 51349 - protein, 28 aa, Artificial Sequence
  Cyclic GFR-binding peptide
  MOD_RES (1)..(2): Xaa is C or S
XXVPQDLEPLPIVYYVGRTPKVEQLSNM

SEQ ID NO: 51350 - protein, 29 aa, Artificial Sequence
  Cyclic GFR-binding peptide
  MOD_RES (29)..(29): Xaa is C or S
RLNAISILYFDSANNVVLKKYRDMVVESX

SEQ ID NO: 51351 - protein, 35 aa, Artificial Sequence; identical to SEQ ID NO: 17970
  Cyclic GFR-binding peptide
  MOD_RES (7)..(7): Xaa is C or S

SEQ ID NO: 51352 - protein, 20 aa, Artificial Sequence
  Cyclic GFR-binding peptide
SPISMLFIDENEKVVYKQYE

SEQ ID NO: 51353 - protein, 32 aa, Artificial Sequence; identical to SEQ ID NO: 17972
  Cyclic GFR-binding peptide
  MOD_RES (5)..(5): Xaa is C or S

SEQ ID NO: 51354 - protein, 23 aa, Artificial Sequence
  Cyclic GFR-binding peptide
DLNAISILYFIGKTPKILKKYRM

SEQ ID NO: 51355 - protein, 39 aa, Artificial Sequence; identical to SEQ ID NO: 7668
  Cyclic GFR-binding peptide
  MOD_RES (6)..(7)..(39): Xaa is C or S

SEQ ID NO: 51356 - protein, 31 aa, Artificial Sequence; identical to SEQ ID NO: 17976
  Cyclic GFR-binding peptide
  MOD_RES (29)..(31): Xaa is C or S

SEQ ID NO: 51357 - protein, 33 aa, Artificial Sequence; identical to SEQ ID NO: 17977
  Cyclic GFR-binding peptide
  MOD_RES (3)..(3): Xaa is C or S

SEQ ID NO: 51358 - protein, 25 aa, Artificial Sequence
  Cyclic GFR-binding peptide
VPQDLNAISILYFVGRTPKVLKKYR

SEQ ID NO: 51359 - protein, 33 aa, Artificial Sequence; identical to SEQ ID NO: 17980
  Cyclic GFR-binding peptide
  MOD_RES (4)..(5): Xaa is C or S

SEQ ID NO: 51360 - protein, 25 aa, Artificial Sequence
  Cyclic GFR-binding peptide
LSPISMLFIDENEKVVYKQYEDMVV

SEQ ID NO: 51361 - protein, 41 aa, Artificial Sequence; identical to SEQ ID NO: 17982
  Cyclic GFR-binding peptide
  MOD_RES (6)..(7)..(39)..(41): Xaa is C or S

SEQ ID NO: 51362 - protein, 24 aa, Artificial Sequence
  Cyclic GFR-binding peptide
PTQLEPLTVLYYDDSSNVIEQLSN

SEQ ID NO: 51363 - protein, 23 aa, Artificial Sequence
  Cyclic GFR-binding peptide
NAISILYFIGKTPKILKKYRMIV

SEQ ID NO: 51364 - protein, 37 aa, Artificial Sequence; identical to SEQ ID NO: 7683
  Cyclic GFR-binding peptide
  MOD_RES (5)..(6)..(37): Xaa is C or S

SEQ ID NO: 51365 - protein, 29 aa, Artificial Sequence
  Cyclic GFR-binding peptide
  MOD_RES (1)..(2): Xaa is C or S
XXAPTQLEPLPVVYYDDSSNVIEQLSNNM

SEQ ID NO: 51366 - protein, 33 aa, Artificial Sequence; identical to SEQ ID NO: 17990
  Cyclic GFR-binding peptide
  MOD_RES (6)..(7): Xaa is C or S

SEQ ID NO: 51367 - protein, 27 aa, Artificial Sequence
  Cyclic GFR-binding peptide
APTKLEPLTVLYYDDSSNVIEQLSNNM

SEQ ID NO: 51368 - protein, 30 aa, Artificial Sequence; identical to SEQ ID NO: 7693
  Cyclic GFR-binding peptide
  MOD_RES (27)..(29): Xaa is C or S

SEQ ID NO: 51369 - protein, 22 aa, Artificial Sequence
  Cyclic GFR-binding peptide
SPISMLFIDENEKVVYKQYEDM

SEQ ID NO: 51370 - protein, 33 aa, Artificial Sequence; identical to SEQ ID NO: 17994
  Cyclic GFR-binding peptide
  MOD_RES (7)..(7): Xaa is C or S

SEQ ID NO: 51371 - protein, 24 aa, Artificial Sequence
  Cyclic GFR-binding peptide
NAISILYFVGRKPKVLKKYRMIVR

SEQ ID NO: 51372 - protein, 40 aa, Artificial Sequence; identical to SEQ ID NO: 17996
  Cyclic GFR-binding peptide
  MOD_RES (6)..(7)..(39): Xaa is C or S

SEQ ID NO: 51373 - protein, 32 aa, Artificial Sequence; identical to SEQ ID NO: 17997
  Cyclic GFR-binding peptide
  MOD_RES (31)..(31): Xaa is C or S

SEQ ID NO: 51374 - protein, 34 aa, Artificial Sequence; identical to SEQ ID NO: 17998
  Cyclic GFR-binding peptide
  MOD_RES (6)..(7): Xaa is C or S

SEQ ID NO: 51375 - protein, 38 aa, Artificial Sequence; identical to SEQ ID NO: 17999
  Cyclic GFR-binding peptide
  MOD_RES (6)..(7): Xaa is C or S

SEQ ID NO: 51376 - protein, 25 aa, Artificial Sequence
  Cyclic GFR-binding peptide
TELEPLTMLYYDEYDKVVEQLSNEM

SEQ ID NO: 51377 - protein, 28 aa, Artificial Sequence
  Cyclic GFR-binding peptide
  MOD_RES (1)..(1): Xaa is C or S
XAPTKLEPLPVVYYDDSSNVIEQLSNNM

SEQ ID NO: 51378 - protein, 32 aa, Artificial Sequence; identical to SEQ ID NO: 7711
  Cyclic GFR-binding peptide
  MOD_RES (6)..(7): Xaa is C or S

SEQ ID NO: 51379 - protein, 34 aa, Artificial Sequence; identical to SEQ ID NO: 18004
  Cyclic GFR-binding peptide
  MOD_RES (1)..(32)..(34): Xaa is C or S

SEQ ID NO: 51380 - protein, 35 aa, Artificial Sequence; identical to SEQ ID NO: 18005
  Cyclic GFR-binding peptide
  MOD_RES (4)..(4): Xaa is C or S

SEQ ID NO: 51381 - protein, 29 aa, Artificial Sequence
  Cyclic GFR-binding peptide
  MOD_RES (26)..(28): Xaa is C or S
NAISILYFVGRTPKVLKKYRMVVKSXKXS

SEQ ID NO: 51382 - protein, 35 aa, Artificial Sequence; identical to SEQ ID NO: 18007
  Cyclic GFR-binding peptide
  MOD_RES (4)..(5): Xaa is C or S

SEQ ID NO: 51383 - protein, 37 aa, Artificial Sequence; identical to SEQ ID NO: 7715
  Cyclic GFR-binding peptide
  MOD_RES (1)..(2)..(34)..(36): Xaa is C or S

SEQ ID NO: 51384 - protein, 24 aa, Artificial Sequence
  Cyclic GFR-binding peptide
TRLEPLTILYYDSANNVVEQLSND

SEQ ID NO: 51385 - protein, 21 aa, Artificial Sequence
  Cyclic GFR-binding peptide
SPISILFIVGRTPKVYKQYEM

SEQ ID NO: 51386 - protein, 31 aa, Artificial Sequence; identical to SEQ ID NO: 18012
  Cyclic GFR-binding peptide

SEQ ID NO: 51387 - protein, 37 aa, Artificial Sequence; identical to SEQ ID NO: 7720
  Cyclic GFR-binding peptide
  MOD_RES (3)..(4)..(35)..(37): Xaa is C or S

SEQ ID NO: 51388 - protein, 33 aa, Artificial Sequence; identical to SEQ ID NO: 18014
  Cyclic GFR-binding peptide
  MOD_RES (3)..(4): Xaa is C or S

SEQ ID NO: 51389 - protein, 26 aa, Artificial Sequence
  Cyclic GFR-binding peptide
QLSPISVLFIDDSSNVIYKQYENMVV

SEQ ID NO: 51390 - protein, 40 aa, Artificial Sequence; identical to SEQ ID NO: 18016
  Cyclic GFR-binding peptide
  MOD_RES (6)..(7)..(39): Xaa is C or S

SEQ ID NO: 51391 - protein, 28 aa, Artificial Sequence
  Cyclic GFR-binding peptide
  MOD_RES (27)..(27): Xaa is C or S
EPLPMVYYDENEKVVEQLSNDMVVEGXG

SEQ ID NO: 51392 - protein, 34 aa, Artificial Sequence; identical to SEQ ID NO: 7723
  Cyclic GFR-binding peptide
  MOD_RES (5)..(6): Xaa is C or S

SEQ ID NO: 51393 - protein, 29 aa, Artificial Sequence
  Cyclic GFR-binding peptide
  MOD_RES (3)..(4): Xaa is C or S
PTXXVPTRLEPLPIVYYDSANNVVEQLSN

SEQ ID NO: 51394 - protein, 32 aa, Artificial Sequence; identical to SEQ ID NO: 18021
  Cyclic GFR-binding peptide
  MOD_RES (30)..(32): Xaa is C or S

SEQ ID NO: 51395 - protein, 31 aa, Artificial Sequence; identical to SEQ ID NO: 18023
  Cyclic GFR-binding peptide
  MOD_RES (28)..(30): Xaa is C or S

SEQ ID NO: 51396 - protein, 39 aa, Artificial Sequence; identical to SEQ ID NO: 18025
  Cyclic GFR-binding peptide
  MOD_RES (5)..(6)..(38): Xaa is C or S

SEQ ID NO: 51397 - protein, 32 aa, Artificial Sequence; identical to SEQ ID NO: 18026
  Cyclic GFR-binding peptide
  MOD_RES (5)..(6): Xaa is C or S

SEQ ID NO: 51398 - protein, 26 aa, Artificial Sequence
  Cyclic GFR-binding peptide
APTQLEPLPVVYYDDSSNVIEQLSNN

SEQ ID NO: 51399 - protein, 29 aa, Artificial Sequence
  Cyclic GFR-binding peptide
  MOD_RES (1)..(1): Xaa is C or S
XVPTELSPISMLFIDEYDKVVYKQYEEMV

SEQ ID NO: 51400 - protein, 38 aa, Artificial Sequence; identical to SEQ ID NO: 18032
  Cyclic GFR-binding peptide
  MOD_RES (4)..(5)..(37): Xaa is C or S

SEQ ID NO: 51401 - protein, 30 aa, Artificial Sequence; identical to SEQ ID NO: 7732
  Cyclic GFR-binding peptide
  MOD_RES (1)..(1): Xaa is C or S

SEQ ID NO: 51402 - protein, 40 aa, Artificial Sequence; identical to SEQ ID NO: 18035
  Cyclic GFR-binding peptide
  MOD_RES (5)..(6)..(38)..(40): Xaa is C or S

SEQ ID NO: 51403 - protein, 30 aa, Artificial Sequence; identical to SEQ ID NO: 7737
  Cyclic GFR-binding peptide
  MOD_RES (3)..(4): Xaa is C or S

SEQ ID NO: 51404 - protein, 36 aa, Artificial Sequence; identical to SEQ ID NO: 7738
  Cyclic GFR-binding peptide
  MOD_RES (1)..(33)..(35): Xaa is C or S

SEQ ID NO: 51405 - protein, 28 aa, Artificial Sequence
  Cyclic GFR-binding peptide
PTRLEPLTILYYDSANNVVEQLSNDMVV

SEQ ID NO: 51406 - protein, 28 aa, Artificial Sequence
  Cyclic GFR-binding peptide
  MOD_RES (2)..(3): Xaa is C or S
PXXVPQDLEPLPIVYYVGRTPKVEQLSN

SEQ ID NO: 51407 - protein, 28 aa, Artificial Sequence
  Cyclic GFR-binding peptide
  MOD_RES (27)..(27): Xaa is C or S
LNAISILYFVGRTPKVLKKYRMVVKSXK

SEQ ID NO: 51408 - protein, 26 aa, Artificial Sequence
  Cyclic GFR-binding peptide
EPLTMLYYDEYDKVVEQLSNEMVVEG

SEQ ID NO: 51409 - protein, 26 aa, Artificial Sequence
  Cyclic GFR-binding peptide
  MOD_RES (1)..(1): Xaa is C or S
XVPQDLSPISILFIVGRTPKVYKQYE

SEQ ID NO: 51410 - protein, 32 aa, Artificial Sequence; identical to SEQ ID NO: 18046
  Cyclic GFR-binding peptide
  MOD_RES (4)..(5): Xaa is C or S

SEQ ID NO: 51411 - protein, 24 aa, Artificial Sequence
  Cyclic GFR-binding peptide
LEPLPVVYYDDSSNVIEQLSNNMV

SEQ ID NO: 51412 - protein, 25 aa, Artificial Sequence
  Cyclic GFR-binding peptide
NAISILYFVGRTPKVLKKYRMVVKS

SEQ ID NO: 51413 - protein, 26 aa, Artificial Sequence
  Cyclic GFR-binding peptide
  MOD_RES (1)..(1): Xaa is C or S
XVPQALEPLTILYYVGRKPKVEQLSN

SEQ ID NO: 51414 - protein, 35 aa, Artificial Sequence; identical to SEQ ID NO: 18054
  Cyclic GFR-binding peptide
  MOD_RES (1)..(32)..(34): Xaa is C or S

SEQ ID NO: 51415 - protein, 28 aa, Artificial Sequence
  Cyclic GFR-binding peptide
QDLNAISILYFIGKTPKILKKYRMIVKS

SEQ ID NO: 51416 - protein, 24 aa, Artificial Sequence
  Cyclic GFR-binding peptide
QDLEPLPIVYYIGKTPKIEQLSNM

SEQ ID NO: 51417 - protein, 30 aa, Artificial Sequence; identical to SEQ ID NO: 18057
  Cyclic GFR-binding peptide
  MOD_RES (1)..(1): Xaa is C or S

SEQ ID NO: 51418 - protein, 38 aa, Artificial Sequence; identical to SEQ ID NO: 18058
  Cyclic GFR-binding peptide
  MOD_RES (3)..(35)..(37): Xaa is C or S

SEQ ID NO: 51419 - protein, 33 aa, Artificial Sequence; identical to SEQ ID NO: 18059
  Cyclic GFR-binding peptide
  MOD_RES (5)..(6): Xaa is C or S

SEQ ID NO: 51420 - protein, 32 aa, Artificial Sequence; identical to SEQ ID NO: 18060
  Cyclic GFR-binding peptide
  MOD_RES (30)..(32): Xaa is C or S

SEQ ID NO: 51421 - protein, 25 aa, Artificial Sequence
  Cyclic GFR-binding peptide
LSPISILFIIGKTPKIYKQYEMIVK

SEQ ID NO: 51422 - protein, 27 aa, Artificial Sequence
  Cyclic GFR-binding peptide
  MOD_RES (27)..(27): Xaa is C or S
NAISMLYFDEYDKVVLKKYREMVVEGX

SEQ ID NO: 51423 - protein, 40 aa, Artificial Sequence; identical to SEQ ID NO: 18063
  Cyclic GFR-binding peptide
  MOD_RES (4)..(5)..(37)..(39): Xaa is C or S

SEQ ID NO: 51424 - protein, 36 aa, Artificial Sequence; identical to SEQ ID NO: 18064
  Cyclic GFR-binding peptide
  MOD_RES (4)..(36): Xaa is C or S

SEQ ID NO: 51425 - protein, 34 aa, Artificial Sequence; identical to SEQ ID NO: 7765
  Cyclic GFR-binding peptide
  MOD_RES (5)..(6): Xaa is C or S

SEQ ID NO: 51426 - protein, 32 aa, Artificial Sequence; identical to SEQ ID NO: 18068
  Cyclic GFR-binding peptide
  MOD_RES (5)..(6): Xaa is C or S

SEQ ID NO: 51427 - protein, 26 aa, Artificial Sequence
  Cyclic GFR-binding peptide
LSPISILFIVGRKPKVYKQYEMIVRS

SEQ ID NO: 51428 - protein, 24 aa, Artificial Sequence
  Cyclic GFR-binding peptide
LNAISILYFDSANNVVLKKYRDMV

SEQ ID NO: 51429 - protein, 27 aa, Artificial Sequence
  Cyclic GFR-binding peptide
  MOD_RES (27)..(27): Xaa is C or S
SPISMLFIDENEKVVYKQYEDMVVEGX

SEQ ID NO: 51430 - protein, 37 aa, Artificial Sequence; identical to SEQ ID NO: 18072
  Cyclic GFR-binding peptide
  MOD_RES (4)..(5)..(37): Xaa is C or S

SEQ ID NO: 51431 - protein, 30 aa, Artificial Sequence; identical to SEQ ID NO: 18073
  Cyclic GFR-binding peptide
  MOD_RES (28)..(30): Xaa is C or S

SEQ ID NO: 51432 - protein, 33 aa, Artificial Sequence; identical to SEQ ID NO: 18074
  Cyclic GFR-binding peptide
  MOD_RES (1)..(2): Xaa is C or S

SEQ ID NO: 51433 - protein, 28 aa, Artificial Sequence
  Cyclic GFR-binding peptide
  MOD_RES (28)..(28): Xaa is C or S
ALSPISILFIVGRKPKVYKQYEMIVRSX

SEQ ID NO: 51434 - protein, 25 aa, Artificial Sequence
  Cyclic GFR-binding peptide
PTRLEPLTILYYDSANNVVEQLSND

SEQ ID NO: 51435 - protein, 31 aa, Artificial Sequence; identical to SEQ ID NO: 18077
  Cyclic GFR-binding peptide
  MOD_RES (4)..(5): Xaa is C or S

SEQ ID NO: 51436 - protein, 37 aa, Artificial Sequence; identical to SEQ ID NO: 18078
  Cyclic GFR-binding peptide
  MOD_RES (5)..(37): Xaa is C or S

SEQ ID NO: 51437 - protein, 36 aa, Artificial Sequence; identical to SEQ ID NO: 18080
  Cyclic GFR-binding peptide
  MOD_RES (5)..(6): Xaa is C or S

SEQ ID NO: 51438 - protein, 32 aa, Artificial Sequence; identical to SEQ ID NO: 18082
  Cyclic GFR-binding peptide
  MOD_RES (6)..(6): Xaa is C or S

SEQ ID NO: 51439 - protein, 30 aa, Artificial Sequence; identical to SEQ ID NO: 18083
  Cyclic GFR-binding peptide
  MOD_RES (29)..(29): Xaa is C or S

SEQ ID NO: 51440 - protein, 35 aa, Artificial Sequence; identical to SEQ ID NO: 18084
  Cyclic GFR-binding peptide
  MOD_RES (4)..(5): Xaa is C or S

SEQ ID NO: 51441 - protein, 32 aa, Artificial Sequence; identical to SEQ ID NO: 18085
  Cyclic GFR-binding peptide
  MOD_RES (6)..(7): Xaa is C or S

SEQ ID NO: 51442 - protein, 30 aa, Artificial Sequence; identical to SEQ ID NO: 18086
  Cyclic GFR-binding peptide

SEQ ID NO: 51443 - protein, 34 aa, Artificial Sequence; identical to SEQ ID NO: 18087
  Cyclic GFR-binding peptide
  MOD_RES (6)..(7): Xaa is C or S

SEQ ID NO: 51444 - protein, 27 aa, Artificial Sequence
  Cyclic GFR-binding peptide
LEPLTVLYYDDSSNVIEQLSNNMVVRS

SEQ ID NO: 51445 - protein, 27 aa, Artificial Sequence
  Cyclic GFR-binding peptide
VPQALEPLTILYYVGRKPKVEQLSNMI

SEQ ID NO: 51446 - protein, 31 aa, Artificial Sequence; identical to SEQ ID NO: 18091
  Cyclic GFR-binding peptide
  MOD_RES (2)..(3): Xaa is C or S

SEQ ID NO: 51447 - protein, 33 aa, Artificial Sequence; identical to SEQ ID NO: 18092
  Cyclic GFR-binding peptide
  MOD_RES (5)..(6): Xaa is C or S

SEQ ID NO: 51448 - protein, 22 aa, Artificial Sequence
  Cyclic GFR-binding peptide
ELNAISMLYFDEYDKVVLKKYR

SEQ ID NO: 51449 - protein, 28 aa, Artificial Sequence
  Cyclic GFR-binding peptide
PTKLEPLPVVYYDDSSNVIEQLSNNMVV

SEQ ID NO: 51450 - protein, 29 aa, Artificial Sequence
  Cyclic GFR-binding peptide
  MOD_RES (1)..(1): Xaa is C or S
XVPTELSPISMLFIDENEKVVYKQYEDMV

SEQ ID NO: 51451 - protein, 27 aa, Artificial Sequence
  Cyclic GFR-binding peptide
  MOD_RES (1)..(2): Xaa is C or S
XXVPTELEPLPMVYYDEYDKVVEQLSN

SEQ ID NO: 51452 - protein, 31 aa, Artificial Sequence; identical to SEQ ID NO: 18098
  Cyclic GFR-binding peptide
  MOD_RES (4)..(5): Xaa is C or S

SEQ ID NO: 51453 - protein, 28 aa, Artificial Sequence
  Cyclic GFR-binding peptide
  MOD_RES (27)..(27): Xaa is C or S
EPLTVLYYDDSSNVIEQLSNNMVVRAXG

SEQ ID NO: 51454 - protein, 32 aa, Artificial Sequence; identical to SEQ ID NO: 18100
  Cyclic GFR-binding peptide
  MOD_RES (6)..(7): Xaa is C or S

SEQ ID NO: 51455 - protein, 37 aa, Artificial Sequence; identical to SEQ ID NO: 18103
  Cyclic GFR-binding peptide
  MOD_RES (1)..(2)..(34)..(36): Xaa is C or S

SEQ ID NO: 51456 - protein, 30 aa, Artificial Sequence; identical to SEQ ID NO: 18105
  Cyclic GFR-binding peptide
  MOD_RES (30)..(30): Xaa is C or S

SEQ ID NO: 51457 - protein, 40 aa, Artificial Sequence; identical to SEQ ID NO: 7808
  Cyclic GFR-binding peptide
  MOD_RES (5)..(6)..(37)..(39): Xaa is C or S

SEQ ID NO: 51458 - protein, 41 aa, Artificial Sequence; identical to SEQ ID NO: 18107
  Cyclic GFR-binding peptide
  MOD_RES (6)..(7)..(39)..(41): Xaa is C or S

SEQ ID NO: 51459 - protein, 28 aa, Artificial Sequence
  Cyclic GFR-binding peptide
  MOD_RES (1)..(2): Xaa is C or S
XXAPTKLSPISVLFIDDSSNVIYKQYEN

SEQ ID NO: 51460 - protein, 22 aa, Artificial Sequence
  Cyclic GFR-binding peptide
DLNAISILYFVGRTPKVLKKYR

SEQ ID NO: 51461 - protein, 38 aa, Artificial Sequence; identical to SEQ ID NO: 18110
  Cyclic GFR-binding peptide
  MOD_RES (3)..(4)..(35)..(37): Xaa is C or S

SEQ ID NO: 51462 - protein, 32 aa, Artificial Sequence; identical to SEQ ID NO: 18112
  Cyclic GFR-binding peptide
  MOD_RES (1)..(2): Xaa is C or S

SEQ ID NO: 51463 - protein, 37 aa, Artificial Sequence; identical to SEQ ID NO: 18113
  Cyclic GFR-binding peptide
  MOD_RES (6)..(7): Xaa is C or S

SEQ ID NO: 51464 - protein, 34 aa, Artificial Sequence; identical to SEQ ID NO: 18114
  Cyclic GFR-binding peptide
  MOD_RES (1)..(2)..(34): Xaa is C or S

SEQ ID NO: 51465 - protein, 38 aa, Artificial Sequence; identical to SEQ ID NO: 18115
  Cyclic GFR-binding peptide
  MOD_RES (2)..(3)..(35)..(37): Xaa is C or S

SEQ ID NO: 51466 - protein, 33 aa, Artificial Sequence; identical to SEQ ID NO: 18116
  Cyclic GFR-binding peptide
  MOD_RES (3)..(3): Xaa is C or S

SEQ ID NO: 51467 - protein, 38 aa, Artificial Sequence; identical to SEQ ID NO: 18117
  Cyclic GFR-binding peptide
  MOD_RES (2)..(3)..(35)..(37): Xaa is C or S

SEQ ID NO: 51468 - protein, 36 aa, Artificial Sequence; identical to SEQ ID NO: 18119
  Cyclic GFR-binding peptide
  MOD_RES (3)..(4)..(35): Xaa is C or S

SEQ ID NO: 51469 - protein, 30 aa, Artificial Sequence; identical to SEQ ID NO: 18120
  Cyclic GFR-binding peptide

SEQ ID NO: 51470 - protein, 29 aa, Artificial Sequence
  Cyclic GFR-binding peptide
  MOD_RES (29)..(29): Xaa is C or S
QLEPLTVLYYDDSSNVIEQLSNNMVVRAX

SEQ ID NO: 51471 - protein, 23 aa, Artificial Sequence
  Cyclic GFR-binding peptide
QLSPISVLFIDDSSNVIYKQYEN

SEQ ID NO: 51472 - protein, 28 aa, Artificial Sequence
  Cyclic GFR-binding peptide
QALEPLTILYYVGRKPKVEQLSNMIVRS

SEQ ID NO: 51473 - protein, 31 aa, Artificial Sequence; identical to SEQ ID NO: 18126
  Cyclic GFR-binding peptide
  MOD_RES (1)..(2): Xaa is C or S

SEQ ID NO: 51474 - protein, 31 aa, Artificial Sequence; identical to SEQ ID NO: 18127
  Cyclic GFR-binding peptide
  MOD_RES (4)..(5): Xaa is C or S

SEQ ID NO: 51475 - protein, 41 aa, Artificial Sequence; identical to SEQ ID NO: 18128
  Cyclic GFR-binding peptide
  MOD_RES (6)..(7)..(39)..(41): Xaa is C or S

SEQ ID NO: 51476 - protein, 28 aa, Artificial Sequence
  Cyclic GFR-binding peptide
  MOD_RES (2)..(3): Xaa is C or S
PXXAPTQLEPLPVVYYDDSSNVIEQLSN

SEQ ID NO: 51477 - protein, 26 aa, Artificial Sequence
  Cyclic GFR-binding peptide
LSPISILFIIGKTPKIYKQYEMIVKS

SEQ ID NO: 51478 - protein, 27 aa, Artificial Sequence
  Cyclic GFR-binding peptide
  MOD_RES (27)..(27): Xaa is C or S
LSPISILFIVGRTPKVYKQYEMVVKSX

SEQ ID NO: 51479 - protein, 34 aa, Artificial Sequence; identical to SEQ ID NO: 7834
  Cyclic GFR-binding peptide
  MOD_RES (3)..(4): Xaa is C or S

SEQ ID NO: 51480 - protein, 31 aa, Artificial Sequence; identical to SEQ ID NO: 18134
  Cyclic GFR-binding peptide
  MOD_RES (2)..(3): Xaa is C or S

SEQ ID NO: 51481 - protein, 39 aa, Artificial Sequence; identical to SEQ ID NO: 18135
  Cyclic GFR-binding peptide
  MOD_RES (4)..(5)..(36)..(38): Xaa is C or S

SEQ ID NO: 51482 - protein, 34 aa, Artificial Sequence; identical to SEQ ID NO: 18136
  Cyclic GFR-binding peptide
  MOD_RES (3)..(4): Xaa is C or S

SEQ ID NO: 51483 - protein, 39 aa, Artificial Sequence; identical to SEQ ID NO: 7838
  Cyclic GFR-binding peptide
  MOD_RES (5)..(6)..(38): Xaa is C or S

SEQ ID NO: 51484 - protein, 29 aa, Artificial Sequence
  Cyclic GFR-binding peptide
  MOD_RES (27)..(29): Xaa is C or S
EPLTVLYYDDSSNVIEQLSNNMVVRSXGX

SEQ ID NO: 51485 - protein, 34 aa, Artificial Sequence; identical to SEQ ID NO: 18140
  Cyclic GFR-binding peptide
  MOD_RES (3)..(4): Xaa is C or S

SEQ ID NO: 51486 - protein, 33 aa, Artificial Sequence; identical to SEQ ID NO: 18141
  Cyclic GFR-binding peptide
  MOD_RES (3)..(4): Xaa is C or S

SEQ ID NO: 51487 - protein, 26 aa, Artificial Sequence
  Cyclic GFR-binding peptide
TKLEPLPVVYYDDSSNVIEQLSNNMV

SEQ ID NO: 51488 - protein, 38 aa, Artificial Sequence; identical to SEQ ID NO: 18143
  Cyclic GFR-binding peptide
  MOD_RES (2)..(3)..(35)..(37): Xaa is C or S

SEQ ID NO: 51489 - protein, 29 aa, Artificial Sequence
  Cyclic GFR-binding peptide
  MOD_RES (1)..(2): Xaa is C or S
XXVPTRLNAISILYFDSANNVVLKKYRDM

SEQ ID NO: 51490 - protein, 21 aa, Artificial Sequence
  Cyclic GFR-binding peptide
LSPISVLFIDDSSNVIYKQYE

SEQ ID NO: 51491 - protein, 34 aa, Artificial Sequence; identical to SEQ ID NO: 7849
  Cyclic GFR-binding peptide
  MOD_RES (31)..(33): Xaa is C or S

SEQ ID NO: 51492 - protein, 35 aa, Artificial Sequence; identical to SEQ ID NO: 7852
  Cyclic GFR-binding peptide
  MOD_RES (4)..(5): Xaa is C or S

SEQ ID NO: 51493 - protein, 25 aa, Artificial Sequence
  Cyclic GFR-binding peptide
LSPISMLFIDEYDKVVYKQYEEMVV

SEQ ID NO: 51494 - protein, 27 aa, Artificial Sequence
  Cyclic GFR-binding peptide
ELNAISMLYFDEYDKVVLKKYREMVVE

SEQ ID NO: 51495 - protein, 36 aa, Artificial Sequence; identical to SEQ ID NO: 18151
  Cyclic GFR-binding peptide
  MOD_RES (3)..(4)..(36): Xaa is C or S

SEQ ID NO: 51496 - protein, 31 aa, Artificial Sequence; identical to SEQ ID NO: 18152
  Cyclic GFR-binding peptide
  MOD_RES (30)..(30): Xaa is C or S

SEQ ID NO: 51497 - protein, 32 aa, Artificial Sequence; identical to SEQ ID NO: 7856
  Cyclic GFR-binding peptide
  MOD_RES (6)..(7): Xaa is C or S

SEQ ID NO: 51498 - protein, 29 aa, Artificial Sequence
  Cyclic GFR-binding peptide
  MOD_RES (28)..(28): Xaa is C or S
ALSPISILFIVGRKPKVYKQYEMIVRSXK

SEQ ID NO: 51499 - protein, 25 aa, Artificial Sequence
  Cyclic GFR-binding peptide
QDLEPLPIVYYIGKTPKIEQLSNMI

SEQ ID NO: 51500 - protein, 25 aa, Artificial Sequence
  Cyclic GFR-binding peptide
LEPLPIVYYDSANNVVEQLSNDMVV

SEQ ID NO: 51501 - protein, 28 aa, Artificial Sequence
  Cyclic GFR-binding peptide
  MOD_RES (1)..(2): Xaa is C or S
XXVPTRLNAISILYFDSANNVVLKKYRD

SEQ ID NO: 51502 - protein, 36 aa, Artificial Sequence; identical to SEQ ID NO: 18159
  Cyclic GFR-binding peptide
  MOD_RES (2)..(3)..(35): Xaa is C or S

SEQ ID NO: 51503 - protein, 32 aa, Artificial Sequence; identical to SEQ ID NO: 18161
  Cyclic GFR-binding peptide
  MOD_RES (32)..(32): Xaa is C or S

SEQ ID NO: 51504 - protein, 27 aa, Artificial Sequence
  Cyclic GFR-binding peptide
  MOD_RES (1)..(1): Xaa is C or S
XVPTELEPLPMVYYDEYDKVVEQLSNE

SEQ ID NO: 51505 - protein, 24 aa, Artificial Sequence
  Cyclic GFR-binding peptide
LSPISVLFIDDSSNVIYKQYENMV

SEQ ID NO: 51506 - protein, 33 aa, Artificial Sequence; identical to SEQ ID NO: 18164
  Cyclic GFR-binding peptide
  MOD_RES (32)..(32): Xaa is C or S

SEQ ID NO: 51507 - protein, 29 aa, Artificial Sequence
  Cyclic GFR-binding peptide
  MOD_RES (1)..(2): Xaa is C or S
XXVPTELNAISMLYFDENEKVVLKKYRDM

SEQ ID NO: 51508 - protein, 21 aa, Artificial Sequence
  Cyclic GFR-binding peptide
SPISMLFIDEYDKVVYKQYEE

SEQ ID NO: 51509 - protein, 27 aa, Artificial Sequence
  Cyclic GFR-binding peptide
VSQDLSPISILFIIGKTPKIYKQYEMI

SEQ ID NO: 51510 - protein, 32 aa, Artificial Sequence; identical to SEQ ID NO: 18168
  Cyclic GFR-binding peptide
  MOD_RES (1)..(1): Xaa is C or S

SEQ ID NO: 51511 - protein, 29 aa, Artificial Sequence
  Cyclic GFR-binding peptide
  MOD_RES (3)..(4): Xaa is C or S
KPXXAPTKLEPLPVVYYDDSSNVIEQLSN

SEQ ID NO: 51512 - protein, 23 aa, Artificial Sequence
  Cyclic GFR-binding peptide
EPLTMLYYDEYDKVVEQLSNEMV

SEQ ID NO: 51513 - protein, 40 aa, Artificial Sequence; identical to SEQ ID NO: 18171
  Cyclic GFR-binding peptide
  MOD_RES (6)..(7)..(39): Xaa is C or S

SEQ ID NO: 51514 - protein, 27 aa, Artificial Sequence
  Cyclic GFR-binding peptide
LEPLTVLYYDDSSNVIEQLSNNMVVRA

SEQ ID NO: 51515 - protein, 32 aa, Artificial Sequence; identical to SEQ ID NO: 18173
  Cyclic GFR-binding peptide
  MOD_RES (3)..(4): Xaa is C or S

SEQ ID NO: 51516 - protein, 37 aa, Artificial Sequence; identical to SEQ ID NO: 18174
  Cyclic GFR-binding peptide
  MOD_RES (6)..(6): Xaa is C or S

SEQ ID NO: 51517 - protein, 30 aa, Artificial Sequence; identical to SEQ ID NO: 18175
  Cyclic GFR-binding peptide
  MOD_RES (1)..(2): Xaa is C or S

SEQ ID NO: 51518 - protein, 23 aa, Artificial Sequence
  Cyclic GFR-binding peptide
LSPISILFIVGRTPKVYKQYEMV

SEQ ID NO: 51519 - protein, 32 aa, Artificial Sequence; identical to SEQ ID NO: 18177
  Cyclic GFR-binding peptide
  MOD_RES (2)..(2): Xaa is C or S

SEQ ID NO: 51520 - protein, 31 aa, Artificial Sequence; identical to SEQ ID NO: 7868
  Cyclic GFR-binding peptide
  MOD_RES (30)..(30): Xaa is C or S

SEQ ID NO: 51521 - protein, 25 aa, Artificial Sequence
  Cyclic GFR-binding peptide
LSPISILFIVGRTPKVYKQYEMVVK

SEQ ID NO: 51522 - protein, 23 aa, Artificial Sequence
  Cyclic GFR-binding peptide
LNAISMLYFDEYDKVVLKKYREM

SEQ ID NO: 51523 - protein, 28 aa, Artificial Sequence
  Cyclic GFR-binding peptide
PQALSPISILFIVGRKPKVYKQYEMIVR

SEQ ID NO: 51524 - protein, 35 aa, Artificial Sequence; identical to SEQ ID NO: 18184
  Cyclic GFR-binding peptide
  MOD_RES (4)..(5): Xaa is C or S

SEQ ID NO: 51525 - protein, 29 aa, Artificial Sequence
  Cyclic GFR-binding peptide
VPTELNAISMLYFDEYDKVVLKKYREMVV

SEQ ID NO: 51526 - protein, 22 aa, Artificial Sequence
  Cyclic GFR-binding peptide
ELEPLTMLYYDEYDKVVEQLSN

SEQ ID NO: 51527 - protein, 33 aa, Artificial Sequence; identical to SEQ ID NO: 18187
  Cyclic GFR-binding peptide
  MOD_RES (2)..(3): Xaa is C or S

SEQ ID NO: 51528 - protein, 28 aa, Artificial Sequence
  Cyclic GFR-binding peptide
APTQLSPISVLFIDDSSNVIYKQYENMV

SEQ ID NO: 51529 - protein, 34 aa, Artificial Sequence; identical to SEQ ID NO: 18190
  Cyclic GFR-binding peptide
  MOD_RES (4)..(5): Xaa is C or S

SEQ ID NO: 51530 - protein, 37 aa, Artificial Sequence; identical to SEQ ID NO: 7879
  Cyclic GFR-binding peptide
  MOD_RES (2)..(3)..(34)..(36): Xaa is C or S

SEQ ID NO: 51531 - protein, 30 aa, Artificial Sequence; identical to SEQ ID NO: 7880
  Cyclic GFR-binding peptide
  MOD_RES (2)..(3): Xaa is C or S

SEQ ID NO: 51532 - protein, 32 aa, Artificial Sequence; identical to SEQ ID NO: 18193
  Cyclic GFR-binding peptide
  MOD_RES (31)..(31): Xaa is C or S

SEQ ID NO: 51533 - protein, 41 aa, Artificial Sequence; identical to SEQ ID NO: 18195
  Cyclic GFR-binding peptide
  MOD_RES (6)..(7)..(39)..(41): Xaa is C or S

SEQ ID NO: 51534 - protein, 37 aa, Artificial Sequence; identical to SEQ ID NO: 18196
  Cyclic GFR-binding peptide
  MOD_RES (3)..(4)..(36): Xaa is C or S

SEQ ID NO: 51535 - protein, 29 aa, Artificial Sequence
  Cyclic GFR-binding peptide
PTELEPLPMVYYDEYDKVVEQLSNEMVVE

SEQ ID NO: 51536 - protein, 23 aa, Artificial Sequence
  Cyclic GFR-binding peptide
KLEPLPVVYYDDSSNVIEQLSNN

SEQ ID NO: 51537 - protein, 39 aa, Artificial Sequence; identical to SEQ ID NO: 18200
  Cyclic GFR-binding peptide
  MOD_RES (3)..(4)..(36)..(38): Xaa is C or S

SEQ ID NO: 51538 - protein, 26 aa, Artificial Sequence
  Cyclic GFR-binding peptide
LNAISILYFVGRKPKVLKKYRMIVRS

SEQ ID NO: 51539 - protein, 26 aa, Artificial Sequence
  Cyclic GFR-binding peptide
VPQDLSPISILFIVGRTPKVYKQYEM

SEQ ID NO: 51540 - protein, 31 aa, Artificial Sequence; identical to SEQ ID NO: 18204
  Cyclic GFR-binding peptide
  MOD_RES (1)..(2): Xaa is C or S

SEQ ID NO: 51541 - protein, 28 aa, Artificial Sequence
  Cyclic GFR-binding peptide
  MOD_RES (28)..(28): Xaa is C or S
LEPLTMLYYDEYDKVVEQLSNEMVVEGX

SEQ ID NO: 51542 - protein, 36 aa, Artificial Sequence; identical to SEQ ID NO: 7893
  Cyclic GFR-binding peptide
  MOD_RES (2)..(3)..(34)..(36): Xaa is C or S

SEQ ID NO: 51543 - protein, 20 aa, Artificial Sequence
  Cyclic GFR-binding peptide
EPLPIVYYIGKTPKIEQLSN

SEQ ID NO: 51544 - protein, 41 aa, Artificial Sequence; identical to SEQ ID NO: 18209
  Cyclic GFR-binding peptide
  MOD_RES (6)..(7)..(39)..(41): Xaa is C or S

SEQ ID NO: 51545 - protein, 32 aa, Artificial Sequence; identical to SEQ ID NO: 18210
  Cyclic GFR-binding peptide
  MOD_RES (4)..(5): Xaa is C or S

SEQ ID NO: 51546 - protein, 32 aa, Artificial Sequence; identical to SEQ ID NO: 7897
  Cyclic GFR-binding peptide
  MOD_RES (29)..(31): Xaa is C or S

SEQ ID NO: 51547 - protein, 31 aa, Artificial Sequence; identical to SEQ ID NO: 18212
  Cyclic GFR-binding peptide
  MOD_RES (2)..(3): Xaa is C or S

SEQ ID NO: 51548 - protein, 23 aa, Artificial Sequence
  Cyclic GFR-binding peptide
EPLPIVYYIGKTPKIEQLSNMIV

SEQ ID NO: 51549 - protein, 36 aa, Artificial Sequence; identical to SEQ ID NO: 18214
  Cyclic GFR-binding peptide
  MOD_RES (1)..(33)..(35): Xaa is C or S

SEQ ID NO: 51550 - protein, 30 aa, Artificial Sequence; identical to SEQ ID NO: 18215
  Cyclic GFR-binding peptide

SEQ ID NO: 51551 - protein, 29 aa, Artificial Sequence
  Cyclic GFR-binding peptide
  MOD_RES (3)..(4): Xaa is C or S
KAXXVPTELEPLTMLYYDENEKVVEQLSN

SEQ ID NO: 51552 - protein, 32 aa, Artificial Sequence; identical to SEQ ID NO: 18217
  Cyclic GFR-binding peptide
  MOD_RES (30)..(32): Xaa is C or S

SEQ ID NO: 51553 - protein, 23 aa, Artificial Sequence
  Cyclic GFR-binding peptide
SPISMLFIDENEKVVYKQYEDMV

SEQ ID NO: 51554 - protein, 31 aa, Artificial Sequence; identical to SEQ ID NO: 18220
  Cyclic GFR-binding peptide
  MOD_RES (3)..(4): Xaa is C or S

SEQ ID NO: 51555 - protein, 30 aa, Artificial Sequence; identical to SEQ ID NO: 18221
  Cyclic GFR-binding peptide
  MOD_RES (28)..(30): Xaa is C or S

SEQ ID NO: 51556 - protein, 35 aa, Artificial Sequence; identical to SEQ ID NO: 18222
  Cyclic GFR-binding peptide
  MOD_RES (1)..(33)..(35): Xaa is C or S

SEQ ID NO: 51557 - protein, 38 aa, Artificial Sequence; identical to SEQ ID NO: 18223
  Cyclic GFR-binding peptide
  MOD_RES (4)..(5)..(36)..(38): Xaa is C or S

SEQ ID NO: 51558 - protein, 29 aa, Artificial Sequence
  Cyclic GFR-binding peptide
VPQALSPISILFIVGRKPKVYKQYEMIVR

SEQ ID NO: 51559 - protein, 30 aa, Artificial Sequence; identical to SEQ ID NO: 7906
  Cyclic GFR-binding peptide
  MOD_RES (1)..(1): Xaa is C or S

SEQ ID NO: 51560 - protein, 28 aa, Artificial Sequence
  Cyclic GFR-binding peptide
TELNAISMLYFDENEKVVLKKYRDMVVE

SEQ ID NO: 51561 - protein, 29 aa, Artificial Sequence
  Cyclic GFR-binding peptide
  MOD_RES (3)..(4): Xaa is C or S
KPXXAPTQLSPISVLFIDDSSNVIYKQYE

SEQ ID NO: 51562 - protein, 27 aa, Artificial Sequence
  Cyclic GFR-binding peptide
  MOD_RES (1)..(1): Xaa is C or S
XAPTQLEPLPVVYYDDSSNVIEQLSNN

SEQ ID NO: 51563 - protein, 33 aa, Artificial Sequence; identical to SEQ ID NO: 7913
  Cyclic GFR-binding peptide
  MOD_RES (31)..(33): Xaa is C or S

SEQ ID NO: 51564 - protein, 29 aa, Artificial Sequence
  Cyclic GFR-binding peptide
PTELSPISMLFIDENEKVVYKQYEDMVVE

SEQ ID NO: 51565 - protein, 30 aa, Artificial Sequence; identical to SEQ ID NO: 7918
  Cyclic GFR-binding peptide
  MOD_RES (27)..(29): Xaa is C or S

SEQ ID NO: 51566 - protein, 36 aa, Artificial Sequence; identical to SEQ ID NO: 18235
  Cyclic GFR-binding peptide
  MOD_RES (1)..(33)..(35): Xaa is C or S

SEQ ID NO: 51567 - protein, 35 aa, Artificial Sequence; identical to SEQ ID NO: 18236
  Cyclic GFR-binding peptide
  MOD_RES (1)..(2)..(34): Xaa is C or S

SEQ ID NO: 51568 - protein, 30 aa, Artificial Sequence; identical to SEQ ID NO: 7922
  Cyclic GFR-binding peptide
  MOD_RES (2)..(3): Xaa is C or S

SEQ ID NO: 51569 - protein, 34 aa, Artificial Sequence; identical to SEQ ID NO: 18239
  Cyclic GFR-binding peptide
  MOD_RES (32)..(34): Xaa is C or S

SEQ ID NO: 51570 - protein, 24 aa, Artificial Sequence
  Cyclic GFR-binding peptide
TELEPLTMLYYDENEKVVEQLSND

SEQ ID NO: 51571 - protein, 32 aa, Artificial Sequence; identical to SEQ ID NO: 18241
  Cyclic GFR-binding peptide
  MOD_RES (2)..(3): Xaa is C or S

SEQ ID NO: 51572 - protein, 27 aa, Artificial Sequence
  Cyclic GFR-binding peptide
  MOD_RES (26)..(26): Xaa is C or S
EPLTILYYVGRKPKVEQLSNMIVRSXK

SEQ ID NO: 51573 - protein, 32 aa, Artificial Sequence; identical to SEQ ID NO: 18243
  Cyclic GFR-binding peptide
  MOD_RES (32)..(32): Xaa is C or S

SEQ ID NO: 51574 - protein, 37 aa, Artificial Sequence; identical to SEQ ID NO: 18244
  Cyclic GFR-binding peptide
  MOD_RES (2)..(3)..(35)..(37): Xaa is C or S

SEQ ID NO: 51575 - protein, 26 aa, Artificial Sequence
  Cyclic GFR-binding peptide
  MOD_RES (26)..(26): Xaa is C or S
NAISILYFIGKTPKILKKYRMIVKSX

SEQ ID NO: 51576 - protein, 36 aa, Artificial Sequence; identical to SEQ ID NO: 18246
  Cyclic GFR-binding peptide
  MOD_RES (1)..(33)..(35): Xaa is C or S

SEQ ID NO: 51577 - protein, 22 aa, Artificial Sequence
  Cyclic GFR-binding peptide
DLSPISILFIIGKTPKIYKQYE

SEQ ID NO: 51578 - protein, 29 aa, Artificial Sequence
  Cyclic GFR-binding peptide
PTRLEPLPIVYYDSANNVVEQLSNDMVVE

SEQ ID NO: 51579 - protein, 34 aa, Artificial Sequence; identical to SEQ ID NO: 18249
  Cyclic GFR-binding peptide
  MOD_RES (4)..(5): Xaa is C or S

SEQ ID NO: 51580 - protein, 38 aa, Artificial Sequence; identical to SEQ ID NO: 18250
  Cyclic GFR-binding peptide
  MOD_RES (6)..(7): Xaa is C or S

SEQ ID NO: 51581 - protein, 23 aa, Artificial Sequence
  Cyclic GFR-binding peptide
QDLSPISILFIIGKTPKIYKQYE

SEQ ID NO: 51582 - protein, 37 aa, Artificial Sequence; identical to SEQ ID NO: 18253
  Cyclic GFR-binding peptide
  MOD_RES (2)..(34)..(36): Xaa is C or S

SEQ ID NO: 51583 - protein, 31 aa, Artificial Sequence; identical to SEQ ID NO: 18257
  Cyclic GFR-binding peptide
  MOD_RES (1)..(1): Xaa is C or S

SEQ ID NO: 51584 - protein, 28 aa, Artificial Sequence
  Cyclic GFR-binding peptide
QLEPLTVLYYDDSSNVIEQLSNNMVVRA

SEQ ID NO: 51585 - protein, 29 aa, Artificial Sequence
  Cyclic GFR-binding peptide
APTQLEPLPVVYYDDSSNVIEQLSNNMVV

SEQ ID NO: 51586 - protein, 34 aa, Artificial Sequence; identical to SEQ ID NO: 18261
  Cyclic GFR-binding peptide
  MOD_RES (32)..(34): Xaa is C or S

SEQ ID NO: 51587 - protein, 39 aa, Artificial Sequence; identical to SEQ ID NO: 7945
  Cyclic GFR-binding peptide
  MOD_RES (6)..(7)..(38): Xaa is C or S

SEQ ID NO: 51588 - protein, 41 aa, Artificial Sequence; identical to SEQ ID NO: 18263
  Cyclic GFR-binding peptide
  MOD_RES (6)..(7)..(39)..(41): Xaa is C or S

SEQ ID NO: 51589 - protein, 32 aa, Artificial Sequence; identical to SEQ ID NO: 18264
  Cyclic GFR-binding peptide
  MOD_RES (30)..(32): Xaa is C or S

SEQ ID NO: 51590 - protein, 30 aa, Artificial Sequence; identical to SEQ ID NO: 18265
  Cyclic GFR-binding peptide

SEQ ID NO: 51591 - protein, 35 aa, Artificial Sequence; identical to SEQ ID NO: 7953
  Cyclic GFR-binding peptide
  MOD_RES (32)..(34): Xaa is C or S

SEQ ID NO: 51592 - protein, 36 aa, Artificial Sequence; identical to SEQ ID NO: 7954
  Cyclic GFR-binding peptide
  MOD_RES (5)..(6): Xaa is C or S

SEQ ID NO: 51593 - protein, 33 aa, Artificial Sequence; identical to SEQ ID NO: 18269
  Cyclic GFR-binding peptide
  MOD_RES (1)..(2): Xaa is C or S

SEQ ID NO: 51594 - protein, 27 aa, Artificial Sequence
  Cyclic GFR-binding peptide
QDLSPISILFIIGKTPKIYKQYEMIVK

SEQ ID NO: 51595 - protein, 36 aa, Artificial Sequence; identical to SEQ ID NO: 18272
  Cyclic GFR-binding peptide
  MOD_RES (3)..(35): Xaa is C or S

SEQ ID NO: 51596 - protein, 32 aa, Artificial Sequence; identical to SEQ ID NO: 7960
  Cyclic GFR-binding peptide
  MOD_RES (5)..(6): Xaa is C or S

SEQ ID NO: 51597 - protein, 29 aa, Artificial Sequence
  Cyclic GFR-binding peptide
  MOD_RES (2)..(3): Xaa is C or S
PXXAPTKLEPLTVLYYDDSSNVIEQLSNN

SEQ ID NO: 51598 - protein, 32 aa, Artificial Sequence; identical to SEQ ID NO: 18275
  Cyclic GFR-binding peptide
  MOD_RES (30)..(32): Xaa is C or S

SEQ ID NO: 51599 - protein, 23 aa, Artificial Sequence
  Cyclic GFR-binding peptide
TQLSPISVLFIDDSSNVIYKQYE

SEQ ID NO: 51600 - protein, 36 aa, Artificial Sequence; identical to SEQ ID NO: 18278
  Cyclic GFR-binding peptide
  MOD_RES (6)..(7): Xaa is C or S

SEQ ID NO: 51601 - protein, 32 aa, Artificial Sequence; identical to SEQ ID NO: 18279
  Cyclic GFR-binding peptide
  MOD_RES (30)..(32): Xaa is C or S

SEQ ID NO: 51602 - protein, 35 aa, Artificial Sequence; identical to SEQ ID NO: 18280
  Cyclic GFR-binding peptide
  MOD_RES (1)..(33)..(35): Xaa is C or S

SEQ ID NO: 51603 - protein, 24 aa, Artificial Sequence
  Cyclic GFR-binding peptide
DLSPISILFIIGKTPKIYKQYEMI

SEQ ID NO: 51604 - protein, 33 aa, Artificial Sequence; identical to SEQ ID NO: 18282
  Cyclic GFR-binding peptide
  MOD_RES (5)..(6): Xaa is C or S

SEQ ID NO: 51605 - protein, 30 aa, Artificial Sequence; identical to SEQ ID NO: 7968
  Cyclic GFR-binding peptide

SEQ ID NO: 51606 - protein, 36 aa, Artificial Sequence; identical to SEQ ID NO: 18284
  Cyclic GFR-binding peptide
  MOD_RES (2)..(3)..(35): Xaa is C or S

SEQ ID NO: 51607 - protein, 26 aa, Artificial Sequence
  Cyclic GFR-binding peptide
  MOD_RES (26)..(26): Xaa is C or S
EPLTILYYVGRKPKVEQLSNMIVRSX

SEQ ID NO: 51608 - protein, 27 aa, Artificial Sequence
  Cyclic GFR-binding peptide
TELEPLPMVYYDENEKVVEQLSNDMVV

SEQ ID NO: 51609 - protein, 31 aa, Artificial Sequence; identical to SEQ ID NO: 18288
  Cyclic GFR-binding peptide
  MOD_RES (6)..(6): Xaa is C or S

SEQ ID NO: 51610 - protein, 40 aa, Artificial Sequence; identical to SEQ ID NO: 18289
  Cyclic GFR-binding peptide
  MOD_RES (6)..(7)..(39): Xaa is C or S

SEQ ID NO: 51611 - protein, 38 aa, Artificial Sequence; identical to SEQ ID NO: 7972
  Cyclic GFR-binding peptide
  MOD_RES (3)..(4)..(35)..(37): Xaa is C or S

SEQ ID NO: 51612 - protein, 32 aa, Artificial Sequence; identical to SEQ ID NO: 18292
  Cyclic GFR-binding peptide
  MOD_RES (31)..(31): Xaa is C or S

SEQ ID NO: 51613 - protein, 24 aa, Artificial Sequence
  Cyclic GFR-binding peptide
PTRLEPLTILYYDSANNVVEQLSN

SEQ ID NO: 51614 - protein, 20 aa, Artificial Sequence
  Cyclic GFR-binding peptide
SPISMLFIDEYDKVVYKQYE

SEQ ID NO: 51615 - protein, 30 aa, Artificial Sequence; identical to SEQ ID NO: 7977
  Cyclic GFR-binding peptide
  MOD_RES (27)..(29): Xaa is C or S

SEQ ID NO: 51616 - protein, 37 aa, Artificial Sequence; identical to SEQ ID NO: 18296
  Cyclic GFR-binding peptide
  MOD_RES (7)..(7): Xaa is C or S

SEQ ID NO: 51617 - protein, 37 aa, Artificial Sequence; identical to SEQ ID NO: 18297
  Cyclic GFR-binding peptide
  MOD_RES (3)..(4)..(36): Xaa is C or S

SEQ ID NO: 51618 - protein, 27 aa, Artificial Sequence
  Cyclic GFR-binding peptide
TKLEPLTVLYYDDSSNVIEQLSNNMVV

SEQ ID NO: 51619 - protein, 30 aa, Artificial Sequence; identical to SEQ ID NO: 18300
  Cyclic GFR-binding peptide
  MOD_RES (4)..(5): Xaa is C or S

SEQ ID NO: 51620 - protein, 37 aa, Artificial Sequence; identical to SEQ ID NO: 18301
  Cyclic GFR-binding peptide
  MOD_RES (3)..(4)..(36): Xaa is C or S

SEQ ID NO: 51621 - protein, 31 aa, Artificial Sequence; identical to SEQ ID NO: 18302
  Cyclic GFR-binding peptide
  MOD_RES (2)..(3): Xaa is C or S

SEQ ID NO: 51622 - protein, 37 aa, Artificial Sequence; identical to SEQ ID NO: 18305
  Cyclic GFR-binding peptide
  MOD_RES (2)..(3)..(34)..(36): Xaa is C or S

SEQ ID NO: 51623 - protein, 34 aa, Artificial Sequence; identical to SEQ ID NO: 7990
  Cyclic GFR-binding peptide
  MOD_RES (31)..(33): Xaa is C or S

SEQ ID NO: 51624 - protein, 29 aa, Artificial Sequence
  Cyclic GFR-binding peptide
  MOD_RES (1)..(1): Xaa is C or S
XVPTELEPLTMLYYDEYDKVVEQLSNEMV

SEQ ID NO: 51625 - protein, 35 aa, Artificial Sequence; identical to SEQ ID NO: 18309
  Cyclic GFR-binding peptide
  MOD_RES (4)..(5): Xaa is C or S

SEQ ID NO: 51626 - protein, 37 aa, Artificial Sequence; identical to SEQ ID NO: 18310
  Cyclic GFR-binding peptide
  MOD_RES (2)..(34)..(36): Xaa is C or S

SEQ ID NO: 51627 - protein, 25 aa, Artificial Sequence
  Cyclic GFR-binding peptide
LNAISILYFDSANNVVLKKYRDMVV

SEQ ID NO: 51628 - protein, 39 aa, Artificial Sequence; identical to SEQ ID NO: 8006
  Cyclic GFR-binding peptide
  MOD_RES (5)..(6)..(37)..(39): Xaa is C or S

SEQ ID NO: 51629 - protein, 34 aa, Artificial Sequence; identical to SEQ ID NO: 18315
  Cyclic GFR-binding peptide
  MOD_RES (1)..(33): Xaa is C or S

SEQ ID NO: 51630 - protein, 30 aa, Artificial Sequence; identical to SEQ ID NO: 18316
  Cyclic GFR-binding peptide
  MOD_RES (1)..(2): Xaa is C or S

SEQ ID NO: 51631 - protein, 33 aa, Artificial Sequence; identical to SEQ ID NO: 18317
  Cyclic GFR-binding peptide
  MOD_RES (5)..(6): Xaa is C or S

SEQ ID NO: 51632 - protein, 32 aa, Artificial Sequence; identical to SEQ ID NO: 18318
  Cyclic GFR-binding peptide
  MOD_RES (4)..(5): Xaa is C or S

SEQ ID NO: 51633 - protein, 21 aa, Artificial Sequence
  Cyclic GFR-binding peptide
LEPLPIVYYIGKTPKIEQLSN

SEQ ID NO: 51634 - protein, 30 aa, Artificial Sequence; identical to SEQ ID NO: 8008
  Cyclic GFR-binding peptide
  MOD_RES (29)..(29): Xaa is C or S

SEQ ID NO: 51635 - protein, 40 aa, Artificial Sequence; identical to SEQ ID NO: 18321
  Cyclic GFR-binding peptide
  MOD_RES (7)..(39): Xaa is C or S

SEQ ID NO: 51636 - protein, 29 aa, Artificial Sequence
  Cyclic GFR-binding peptide
  MOD_RES (1)..(2): Xaa is C or S
XXVPTELSPISMLFIDENEKVVYKQYEDM

SEQ ID NO: 51637 - protein, 39 aa, Artificial Sequence; identical to SEQ ID NO: 18323
  Cyclic GFR-binding peptide
  MOD_RES (6)..(7)..(39): Xaa is C or S

SEQ ID NO: 51638 - protein, 21 aa, Artificial Sequence
  Cyclic GFR-binding peptide
LEPLTMLYYDENEKVVEQLSN

SEQ ID NO: 51639 - protein, 37 aa, Artificial Sequence; identical to SEQ ID NO: 18325
  Cyclic GFR-binding peptide
  MOD_RES (3)..(4)..(36): Xaa is C or S

SEQ ID NO: 51640 - protein, 34 aa, Artificial Sequence; identical to SEQ ID NO: 8013
  Cyclic GFR-binding peptide
  MOD_RES (3)..(4): Xaa is C or S

SEQ ID NO: 51641 - protein, 35 aa, Artificial Sequence; identical to SEQ ID NO: 8015
  Cyclic GFR-binding peptide
  MOD_RES (5)..(6): Xaa is C or S

SEQ ID NO: 51642 - protein, 34 aa, Artificial Sequence; identical to SEQ ID NO: 8016
  Cyclic GFR-binding peptide
  MOD_RES (4)..(5): Xaa is C or S

SEQ ID NO: 51643 - protein, 22 aa, Artificial Sequence
  Cyclic GFR-binding peptide
QLSPISVLFIDDSSNVIYKQYE

SEQ ID NO: 51644 - protein, 27 aa, Artificial Sequence
  Cyclic GFR-binding peptide
LSPISVLFIDDSSNVIYKQYENMVVRA

SEQ ID NO: 51645 - protein, 36 aa, Artificial Sequence; identical to SEQ ID NO: 18332
  Cyclic GFR-binding peptide
  MOD_RES (5)..(6): Xaa is C or S

SEQ ID NO: 51646 - protein, 31 aa, Artificial Sequence; identical to SEQ ID NO: 18333
  Cyclic GFR-binding peptide
  MOD_RES (30)..(30): Xaa is C or S

SEQ ID NO: 51647 - protein, 29 aa, Artificial Sequence
  Cyclic GFR-binding peptide
  MOD_RES (27)..(29): Xaa is C or S
LNAISILYFIGKTPKILKKYRMIVKSXKX

SEQ ID NO: 51648 - protein, 37 aa, Artificial Sequence; identical to SEQ ID NO: 18335
  Cyclic GFR-binding peptide
  MOD_RES (1)..(2)..(34)..(36): Xaa is C or S

SEQ ID NO: 51649 - protein, 30 aa, Artificial Sequence; identical to SEQ ID NO: 18336
  Cyclic GFR-binding peptide
  MOD_RES (1)..(1): Xaa is C or S

SEQ ID NO: 51650 - protein, 24 aa, Artificial Sequence
  Cyclic GFR-binding peptide
KLEPLTVLYYDDSSNVIEQLSNNM

SEQ ID NO: 51651 - protein, 29 aa, Artificial Sequence
  Cyclic GFR-binding peptide
  MOD_RES (2)..(3): Xaa is C or S
PXXVPQALSPISILFIVGRKPKVYKQYEM

SEQ ID NO: 51652 - protein, 28 aa, Artificial Sequence
  Cyclic GFR-binding peptide
  MOD_RES (1)..(2): Xaa is C or S
XXVPQDLSPISILFIVGRTPKVYKQYEM

SEQ ID NO: 51653 - protein, 33 aa, Artificial Sequence; identical to SEQ ID NO: 8024
  Cyclic GFR-binding peptide
  MOD_RES (5)..(6): Xaa is C or S

SEQ ID NO: 51654 - protein, 27 aa, Artificial Sequence
  Cyclic GFR-binding peptide
LSPISVLFIDDSSNVIYKQYENMVVRS

SEQ ID NO: 51655 - protein, 29 aa, Artificial Sequence
  Cyclic GFR-binding peptide
  MOD_RES (2)..(3): Xaa is C or S
PXXVSQDLNAISILYFIGKTPKILKKYRM

SEQ ID NO: 51656 - protein, 30 aa, Artificial Sequence; identical to SEQ ID NO: 18344
  Cyclic GFR-binding peptide
  MOD_RES (2)..(3): Xaa is C or S

SEQ ID NO: 51657 - protein, 30 aa, Artificial Sequence; identical to SEQ ID NO: 18345
  Cyclic GFR-binding peptide

SEQ ID NO: 51658 - protein, 39 aa, Artificial Sequence; identical to SEQ ID NO: 18346
  Cyclic GFR-binding peptide
  MOD_RES (3)..(4)..(36)..(38): Xaa is C or S

SEQ ID NO: 51659 - protein, 26 aa, Artificial Sequence
  Cyclic GFR-binding peptide
VPQALSPISILFIVGRKPKVYKQYEM

SEQ ID NO: 51660 - protein, 22 aa, Artificial Sequence
  Cyclic GFR-binding peptide
LEPLTMLYYDENEKVVEQLSND

SEQ ID NO: 51661 - protein, 31 aa, Artificial Sequence; identical to SEQ ID NO: 8031
  Cyclic GFR-binding peptide
  MOD_RES (30)..(30): Xaa is C or S

SEQ ID NO: 51662 - protein, 32 aa, Artificial Sequence; identical to SEQ ID NO: 18350
  Cyclic GFR-binding peptide
  MOD_RES (3)..(4): Xaa is C or S

SEQ ID NO: 51663 - protein, 33 aa, Artificial Sequence; identical to SEQ ID NO: 8034
  Cyclic GFR-binding peptide
  MOD_RES (1)..(33): Xaa is C or S

SEQ ID NO: 51664 - protein, 32 aa, Artificial Sequence; identical to SEQ ID NO: 18355
  Cyclic GFR-binding peptide
  MOD_RES (31)..(31): Xaa is C or S

SEQ ID NO: 51665 - protein, 32 aa, Artificial Sequence; identical to SEQ ID NO: 8038
  Cyclic GFR-binding peptide
  MOD_RES (5)..(6): Xaa is C or S

SEQ ID NO: 51666 - protein, 34 aa, Artificial Sequence; identical to SEQ ID NO: 8040
  Cyclic GFR-binding peptide
  MOD_RES (1)..(2)..(34): Xaa is C or S

SEQ ID NO: 51667 - protein, 24 aa, Artificial Sequence
  Cyclic GFR-binding peptide
PQALNAISILYFVGRKPKVLKKYR

SEQ ID NO: 51668 - protein, 34 aa, Artificial Sequence; identical to SEQ ID NO: 18360
  Cyclic GFR-binding peptide
  MOD_RES (1)..(2)..(33): Xaa is C or S

SEQ ID NO: 51669 - protein, 37 aa, Artificial Sequence; identical to SEQ ID NO: 18361
  Cyclic GFR-binding peptide
  MOD_RES (3)..(4)..(36): Xaa is C or S

SEQ ID NO: 51670 - protein, 38 aa, Artificial Sequence; identical to SEQ ID NO: 18362
  Cyclic GFR-binding peptide
  MOD_RES (5)..(6)..(37): Xaa is C or S

SEQ ID NO: 51671 - protein, 34 aa, Artificial Sequence; identical to SEQ ID NO: 18364
  Cyclic GFR-binding peptide
  MOD_RES (2)..(3): Xaa is C or S

SEQ ID NO: 51672 - protein, 37 aa, Artificial Sequence; identical to SEQ ID NO: 18369
  Cyclic GFR-binding peptide
  MOD_RES (4)..(5)..(37): Xaa is C or S

SEQ ID NO: 51673 - protein, 36 aa, Artificial Sequence; identical to SEQ ID NO: 8053
  Cyclic GFR-binding peptide
  MOD_RES (1)..(2)..(33)..(35): Xaa is C or S

SEQ ID NO: 51674 - protein, 29 aa, Artificial Sequence
  Cyclic GFR-binding peptide
  MOD_RES (2)..(3): Xaa is C or S
TXXVPTRLEPLPIVYYDSANNVVEQLSND

SEQ ID NO: 51675 - protein, 23 aa, Artificial Sequence
  Cyclic GFR-binding peptide
TKLEPLPVVYYDDSSNVIEQLSN

SEQ ID NO: 51676 - protein, 26 aa, Artificial Sequence
  Cyclic GFR-binding peptide
  MOD_RES (1)..(1): Xaa is C or S
XVPQDLNAISILYFVGRTPKVLKKYR

SEQ ID NO: 51677 - protein, 29 aa, Artificial Sequence
  Cyclic GFR-binding peptide
  MOD_RES (3)..(4): Xaa is C or S
APXXVPQALNAISILYFVGRKPKVLKKYR

SEQ ID NO: 51678 - protein, 33 aa, Artificial Sequence; identical to SEQ ID NO: 18378
  Cyclic GFR-binding peptide
  MOD_RES (1)..(2): Xaa is C or S

SEQ ID NO: 51679 - protein, 38 aa, Artificial Sequence; identical to SEQ ID NO: 8060
  Cyclic GFR-binding peptide
  MOD_RES (5)..(6)..(38): Xaa is C or S

SEQ ID NO: 51680 - protein, 40 aa, Artificial Sequence; identical to SEQ ID NO: 18381
  Cyclic GFR-binding peptide
  MOD_RES (5)..(6)..(38)..(40): Xaa is C or S

SEQ ID NO: 51681 - protein, 31 aa, Artificial Sequence; identical to SEQ ID NO: 18385
  Cyclic GFR-binding peptide
  MOD_RES (1)..(1): Xaa is C or S

SEQ ID NO: 51682 - protein, 30 aa, Artificial Sequence; identical to SEQ ID NO: 18386
  Cyclic GFR-binding peptide
  MOD_RES (3)..(4): Xaa is C or S

SEQ ID NO: 51683 - protein, 27 aa, Artificial Sequence
  Cyclic GFR-binding peptide
VPQALSPISILFIVGRKPKVYKQYEMI

SEQ ID NO: 51684 - protein, 27 aa, Artificial Sequence
  Cyclic GFR-binding peptide
KLEPLTVLYYDDSSNVIEQLSNNMVVR

SEQ ID NO: 51685 - protein, 30 aa, Artificial Sequence; identical to SEQ ID NO: 18389
  Cyclic GFR-binding peptide
  MOD_RES (29)..(29): Xaa is C or S

SEQ ID NO: 51686 - protein, 37 aa, Artificial Sequence; identical to SEQ ID NO: 18390
  Cyclic GFR-binding peptide
  MOD_RES (1)..(2)..(34)..(36): Xaa is C or S

SEQ ID NO: 51687 - protein, 30 aa, Artificial Sequence; identical to SEQ ID NO: 18392
  Cyclic GFR-binding peptide

SEQ ID NO: 51688 - protein, 31 aa, Artificial Sequence; identical to SEQ ID NO: 18394
  Cyclic GFR-binding peptide
  MOD_RES (29)..(31): Xaa is C or S

SEQ ID NO: 51689 - protein, 24 aa, Artificial Sequence
  Cyclic GFR-binding peptide
EPLPIVYYDSANNVVEQLSNDMVV

SEQ ID NO: 51690 - protein, 40 aa, Artificial Sequence; identical to SEQ ID NO: 18397
  Cyclic GFR-binding peptide
  MOD_RES (5)..(6)..(37)..(39): Xaa is C or S

SEQ ID NO: 51691 - protein, 28 aa, Artificial Sequence
  Cyclic GFR-binding peptide
  MOD_RES (1)..(1): Xaa is C or S
XAPTQLEPLPVVYYDDSSNVIEQLSNNM

SEQ ID NO: 51692 - protein, 34 aa, Artificial Sequence; identical to SEQ ID NO: 18400
  Cyclic GFR-binding peptide
  MOD_RES (6)..(7): Xaa is C or S

SEQ ID NO: 51693 - protein, 33 aa, Artificial Sequence; identical to SEQ ID NO: 18401
  Cyclic GFR-binding peptide
  MOD_RES (31)..(33): Xaa is C or S

SEQ ID NO: 51694 - protein, 32 aa, Artificial Sequence; identical to SEQ ID NO: 8085
  Cyclic GFR-binding peptide
  MOD_RES (4)..(5): Xaa is C or S

SEQ ID NO: 51695 - protein, 26 aa, Artificial Sequence
  Cyclic GFR-binding peptide
VPTELNAISMLYFDENEKVVLKKYRD

SEQ ID NO: 51696 - protein, 30 aa, Artificial Sequence; identical to SEQ ID NO: 18407
  Cyclic GFR-binding peptide
  MOD_RES (4)..(5): Xaa is C or S

SEQ ID NO: 51697 - protein, 41 aa, Artificial Sequence; identical to SEQ ID NO: 8094
  Cyclic GFR-binding peptide
  MOD_RES (6)..(7)..(39)..(41): Xaa is C or S

SEQ ID NO: 51698 - protein, 28 aa, Artificial Sequence
  Cyclic GFR-binding peptide
  MOD_RES (28)..(28): Xaa is C or S
LEPLPVVYYDDSSNVIEQLSNNMVVRSX

SEQ ID NO: 51699 - protein, 32 aa, Artificial Sequence; identical to SEQ ID NO: 18411
  Cyclic GFR-binding peptide
  MOD_RES (32)..(32): Xaa is C or S

SEQ ID NO: 51700 - protein, 36 aa, Artificial Sequence; identical to SEQ ID NO: 18412
  Cyclic GFR-binding peptide
  MOD_RES (5)..(6): Xaa is C or S

SEQ ID NO: 51701 - protein, 21 aa, Artificial Sequence
  Cyclic GFR-binding peptide
LSPISILFIVGRTPKVYKQYE

SEQ ID NO: 51702 - protein, 32 aa, Artificial Sequence; identical to SEQ ID NO: 18414
  Cyclic GFR-binding peptide
  MOD_RES (1)..(2): Xaa is C or S

SEQ ID NO: 51703 - protein, 38 aa, Artificial Sequence; identical to SEQ ID NO: 18415
  Cyclic GFR-binding peptide
  MOD_RES (4)..(5)..(36)..(38): Xaa is C or S

SEQ ID NO: 51704 - protein, 24 aa, Artificial Sequence
  Cyclic GFR-binding peptide
ELNAISMLYFDENEKVVLKKYRDM

SEQ ID NO: 51705 - protein, 35 aa, Artificial Sequence; identical to SEQ ID NO: 18417
  Cyclic GFR-binding peptide
  MOD_RES (7)..(7): Xaa is C or S

SEQ ID NO: 51706 - protein, 34 aa, Artificial Sequence; identical to SEQ ID NO: 8107
  Cyclic GFR-binding peptide
  MOD_RES (2)..(3)..(34): Xaa is C or S

SEQ ID NO: 51707 - protein, 27 aa, Artificial Sequence
  Cyclic GFR-binding peptide
  MOD_RES (1)..(2): Xaa is C or S
XXVPTRLEPLTILYYDSANNVVEQLSN

SEQ ID NO: 51708 - protein, 31 aa, Artificial Sequence; identical to SEQ ID NO: 18421
  Cyclic GFR-binding peptide
  MOD_RES (2)..(3): Xaa is C or S

SEQ ID NO: 51709 - protein, 28 aa, Artificial Sequence
  Cyclic GFR-binding peptide
  MOD_RES (27)..(27): Xaa is C or S
NAISMLYFDEYDKVVLKKYREMVVEGXG

SEQ ID NO: 51710 - protein, 33 aa, Artificial Sequence; identical to SEQ ID NO: 18423
  Cyclic GFR-binding peptide
  MOD_RES (31)..(33): Xaa is C or S

SEQ ID NO: 51711 - protein, 26 aa, Artificial Sequence
  Cyclic GFR-binding peptide
QDLNAISILYFVGRTPKVLKKYRMVV

SEQ ID NO: 51712 - protein, 34 aa, Artificial Sequence; identical to SEQ ID NO: 18425
  Cyclic GFR-binding peptide
  MOD_RES (2)..(3): Xaa is C or S

SEQ ID NO: 51713 - protein, 32 aa, Artificial Sequence; identical to SEQ ID NO: 18426
  Cyclic GFR-binding peptide
  MOD_RES (1)..(32): Xaa is C or S

SEQ ID NO: 51714 - protein, 25 aa, Artificial Sequence
  Cyclic GFR-binding peptide
LNAISILYFVGRKPKVLKKYRMIVR

SEQ ID NO: 51715 - protein, 37 aa, Artificial Sequence; identical to SEQ ID NO: 18429
  Cyclic GFR-binding peptide
  MOD_RES (3)..(4)..(36): Xaa is C or S

SEQ ID NO: 51716 - protein, 28 aa, Artificial Sequence
  Cyclic GFR-binding peptide
ELSPISMLFIDEYDKVVYKQYEEMVVEG

SEQ ID NO: 51717 - protein, 34 aa, Artificial Sequence; identical to SEQ ID NO: 8125
  Cyclic GFR-binding peptide
  MOD_RES (1)..(33): Xaa is C or S

SEQ ID NO: 51718 - protein, 32 aa, Artificial Sequence; identical to SEQ ID NO: 18433
  Cyclic GFR-binding peptide
  MOD_RES (30)..(32): Xaa is C or S

SEQ ID NO: 51719 - protein, 37 aa, Artificial Sequence; identical to SEQ ID NO: 8130
  Cyclic GFR-binding peptide
  MOD_RES (6)..(7): Xaa is C or S

SEQ ID NO: 51720 - protein, 32 aa, Artificial Sequence; identical to SEQ ID NO: 18435
  Cyclic GFR-binding peptide
  MOD_RES (2)..(2): Xaa is C or S

SEQ ID NO: 51721 - protein, 29 aa, Artificial Sequence
  Cyclic GFR-binding peptide
VPTELNAISMLYFDENEKVVLKKYRDMVV

SEQ ID NO: 51722 - protein, 33 aa, Artificial Sequence; identical to SEQ ID NO: 18439
  Cyclic GFR-binding peptide
  MOD_RES (4)..(5): Xaa is C or S

SEQ ID NO: 51723 - protein, 30 aa, Artificial Sequence; identical to SEQ ID NO: 18440
  Cyclic GFR-binding peptide
  MOD_RES (30)..(30): Xaa is C or S

SEQ ID NO: 51724 - protein, 37 aa, Artificial Sequence; identical to SEQ ID NO: 18441
  Cyclic GFR-binding peptide
  MOD_RES (3)..(35)..(37): Xaa is C or S

SEQ ID NO: 51725 - protein, 32 aa, Artificial Sequence; identical to SEQ ID NO: 18442
  Cyclic GFR-binding peptide
  MOD_RES (31)..(31): Xaa is C or S

SEQ ID NO: 51726 - protein, 33 aa, Artificial Sequence; identical to SEQ ID NO: 8138
  Cyclic GFR-binding peptide
  MOD_RES (6)..(7): Xaa is C or S

SEQ ID NO: 51727 - protein, 26 aa, Artificial Sequence
  Cyclic GFR-binding peptide
VPTELEPLTMLYYDEYDKVVEQLSNE

SEQ ID NO: 51728 - protein, 33 aa, Artificial Sequence; identical to SEQ ID NO: 8140
  Cyclic GFR-binding peptide
  MOD_RES (1)..(2): Xaa is C or S

SEQ ID NO: 51729 - protein, 32 aa, Artificial Sequence; identical to SEQ ID NO: 8143
  Cyclic GFR-binding peptide
  MOD_RES (2)..(3): Xaa is C or S

SEQ ID NO: 51730 - protein, 31 aa, Artificial Sequence; identical to SEQ ID NO: 18448
  Cyclic GFR-binding peptide
  MOD_RES (29)..(31): Xaa is C or S

SEQ ID NO: 51731 - protein, 28 aa, Artificial Sequence
  Cyclic GFR-binding peptide
  MOD_RES (28)..(28): Xaa is C or S
LEPLPMVYYDEYDKVVEQLSNEMVVEGX

SEQ ID NO: 51732 - protein, 37 aa, Artificial Sequence; identical to SEQ ID NO: 18450
  Cyclic GFR-binding peptide
  MOD_RES (4)..(5)..(36): Xaa is C or S

SEQ ID NO: 51733 - protein, 25 aa, Artificial Sequence
  Cyclic GFR-binding peptide
DLEPLPIVYYVGRTPKVEQLSNMVV

SEQ ID NO: 51734 - protein, 32 aa, Artificial Sequence; identical to SEQ ID NO: 18453
  Cyclic GFR-binding peptide
  MOD_RES (5)..(5): Xaa is C or S

SEQ ID NO: 51735 - protein, 26 aa, Artificial Sequence
  Cyclic GFR-binding peptide
VPTELEPLPMVYYDEYDKVVEQLSNE

SEQ ID NO: 51736 - protein, 27 aa, Artificial Sequence
  Cyclic GFR-binding peptide
VPTRLEPLTILYYDSANNVVEQLSNDM

SEQ ID NO: 51737 - protein, 37 aa, Artificial Sequence; identical to SEQ ID NO: 8149
  Cyclic GFR-binding peptide
  MOD_RES (1)..(2)..(34)..(36): Xaa is C or S

SEQ ID NO: 51738 - protein, 26 aa, Artificial Sequence
  Cyclic GFR-binding peptide
EPLPMVYYDEYDKVVEQLSNEMVVEG

SEQ ID NO: 51739 - protein, 36 aa, Artificial Sequence; identical to SEQ ID NO: 8157
  Cyclic GFR-binding peptide
  MOD_RES (5)..(6): Xaa is C or S

SEQ ID NO: 51740 - protein, 31 aa, Artificial Sequence; identical to SEQ ID NO: 18460
  Cyclic GFR-binding peptide
  MOD_RES (2)..(2): Xaa is C or S

SEQ ID NO: 51741 - protein, 39 aa, Artificial Sequence; identical to SEQ ID NO: 18461
  Cyclic GFR-binding peptide
  MOD_RES (4)..(5)..(36)..(38): Xaa is C or S

SEQ ID NO: 51742 - protein, 22 aa, Artificial Sequence
  Cyclic GFR-binding peptide
LEPLTVLYYDDSSNVIEQLSNN

SEQ ID NO: 51743 - protein, 40 aa, Artificial Sequence; identical to SEQ ID NO: 18463
  Cyclic GFR-binding peptide
  MOD_RES (5)..(6)..(38)..(40): Xaa is C or S

SEQ ID NO: 51744 - protein, 27 aa, Artificial Sequence
  Cyclic GFR-binding peptide
  MOD_RES (27)..(27): Xaa is C or S
EPLTMLYYDENEKVVEQLSNDMVVEGX

SEQ ID NO: 51745 - protein, 32 aa, Artificial Sequence; identical to SEQ ID NO: 18465
  Cyclic GFR-binding peptide
  MOD_RES (1)..(2): Xaa is C or S

SEQ ID NO: 51746 - protein, 32 aa, Artificial Sequence; identical to SEQ ID NO: 18467
  Cyclic GFR-binding peptide
  MOD_RES (5)..(6): Xaa is C or S

SEQ ID NO: 51747 - protein, 34 aa, Artificial Sequence; identical to SEQ ID NO: 18468
  Cyclic GFR-binding peptide
  MOD_RES (2)..(3): Xaa is C or S

SEQ ID NO: 51748 - protein, 25 aa, Artificial Sequence
  Cyclic GFR-binding peptide
LEPLPVVYYDDSSNVIEQLSNNMVV

SEQ ID NO: 51749 - protein, 40 aa, Artificial Sequence; identical to SEQ ID NO: 18470
  Cyclic GFR-binding peptide
  MOD_RES (7)..(39): Xaa is C or S

SEQ ID NO: 51750 - protein, 23 aa, Artificial Sequence
  Cyclic GFR-binding peptide
EPLTMLYYDENEKVVEQLSNDMV

SEQ ID NO: 51751 - protein, 32 aa, Artificial Sequence; identical to SEQ ID NO: 18472
  Cyclic GFR-binding peptide
  MOD_RES (4)..(5): Xaa is C or S

SEQ ID NO: 51752 - protein, 38 aa, Artificial Sequence; identical to SEQ ID NO: 18473
  Cyclic GFR-binding peptide
  MOD_RES (6)..(7)..(38): Xaa is C or S

SEQ ID NO: 51753 - protein, 27 aa, Artificial Sequence
  Cyclic GFR-binding peptide
QDLSPISILFIVGRTPKVYKQYEMVVK

SEQ ID NO: 51754 - protein, 41 aa, Artificial Sequence; identical to SEQ ID NO: 18475
  Cyclic GFR-binding peptide
  MOD_RES (6)..(7)..(39)..(41): Xaa is C or S

SEQ ID NO: 51755 - protein, 35 aa, Artificial Sequence; identical to SEQ ID NO: 18476
  Cyclic GFR-binding peptide
  MOD_RES (1)..(33)..(35): Xaa is C or S

SEQ ID NO: 51756 - protein, 27 aa, Artificial Sequence
  Cyclic GFR-binding peptide
  MOD_RES (1)..(1): Xaa is C or S
XAPTQLSPISVLFIDDSSNVIYKQYEN

SEQ ID NO: 51757 - protein, 26 aa, Artificial Sequence
  Cyclic GFR-binding peptide
DLNAISILYFVGRTPKVLKKYRMVVK

SEQ ID NO: 51758 - protein, 31 aa, Artificial Sequence; identical to SEQ ID NO: 18479
  Cyclic GFR-binding peptide
  MOD_RES (3)..(4): Xaa is C or S

SEQ ID NO: 51759 - protein, 27 aa, Artificial Sequence
  Cyclic GFR-binding peptide
PTELSPISMLFIDEYDKVVYKQYEEMV

SEQ ID NO: 51760 - protein, 34 aa, Artificial Sequence; identical to SEQ ID NO: 18481
  Cyclic GFR-binding peptide
  MOD_RES (31)..(33): Xaa is C or S

SEQ ID NO: 51761 - protein, 33 aa, Artificial Sequence; identical to SEQ ID NO: 18482
  Cyclic GFR-binding peptide
  MOD_RES (6)..(6): Xaa is C or S

SEQ ID NO: 51762 - protein, 29 aa, Artificial Sequence
  Cyclic GFR-binding peptide
  MOD_RES (1)..(2): Xaa is C or S
XXAPTKLEPLPVVYYDDSSNVIEQLSNNM

SEQ ID NO: 51763 - protein, 28 aa, Artificial Sequence
  Cyclic GFR-binding peptide
  MOD_RES (1)..(2): Xaa is C or S
XXAPTQLEPLTVLYYDDSSNVIEQLSNN

SEQ ID NO: 51764 - protein, 36 aa, Artificial Sequence; identical to SEQ ID NO: 18488
  Cyclic GFR-binding peptide
  MOD_RES (1)..(2)..(34)..(36): Xaa is C or S

SEQ ID NO: 51765 - protein, 36 aa, Artificial Sequence; identical to SEQ ID NO: 18489
  Cyclic GFR-binding peptide
  MOD_RES (3)..(35): Xaa is C or S

SEQ ID NO: 51766 - protein, 39 aa, Artificial Sequence; identical to SEQ ID NO: 18490
  Cyclic GFR-binding peptide
  MOD_RES (6)..(7)..(39): Xaa is C or S

SEQ ID NO: 51767 - protein, 32 aa, Artificial Sequence; identical to SEQ ID NO: 18491
  Cyclic GFR-binding peptide
  MOD_RES (31)..(31): Xaa is C or S

SEQ ID NO: 51768 - protein, 28 aa, Artificial Sequence
  Cyclic GFR-binding peptide
  MOD_RES (1)..(1): Xaa is C or S
XVPTELSPISMLFIDENEKVVYKQYEDM

SEQ ID NO: 51769 - protein, 29 aa, Artificial Sequence
  Cyclic GFR-binding peptide
TKLEPLPVVYYDDSSNVIEQLSNNMVVRS

SEQ ID NO: 51770 - protein, 27 aa, Artificial Sequence
  Cyclic GFR-binding peptide
  MOD_RES (1)..(2): Xaa is C or S
XXAPTKLSPISVLFIDDSSNVIYKQYE

SEQ ID NO: 51771 - protein, 29 aa, Artificial Sequence
  Cyclic GFR-binding peptide
VPTELEPLTMLYYDENEKVVEQLSNDMVV

SEQ ID NO: 51772 - protein, 39 aa, Artificial Sequence; identical to SEQ ID NO: 18497
  Cyclic GFR-binding peptide
  MOD_RES (4)..(5)..(37)..(39): Xaa is C or S

SEQ ID NO: 51773 - protein, 29 aa, Artificial Sequence
  Cyclic GFR-binding peptide
  MOD_RES (28)..(28): Xaa is C or S
ALEPLTILYYVGRKPKVEQLSNMIVRSXK

SEQ ID NO: 51774 - protein, 33 aa, Artificial Sequence; identical to SEQ ID NO: 18499
  Cyclic GFR-binding peptide
  MOD_RES (31)..(33): Xaa is C or S

SEQ ID NO: 51775 - protein, 34 aa, Artificial Sequence; identical to SEQ ID NO: 8198
  Cyclic GFR-binding peptide
  MOD_RES (4)..(5): Xaa is C or S

SEQ ID NO: 51776 - protein, 35 aa, Artificial Sequence; identical to SEQ ID NO: 18502
  Cyclic GFR-binding peptide
  MOD_RES (1)..(33)..(35): Xaa is C or S

SEQ ID NO: 51777 - protein, 37 aa, Artificial Sequence; identical to SEQ ID NO: 18503
  Cyclic GFR-binding peptide
  MOD_RES (3)..(35)..(37): Xaa is C or S

SEQ ID NO: 51778 - protein, 26 aa, Artificial Sequence
  Cyclic GFR-binding peptide
RLEPLTILYYDSANNVVEQLSNDMVV

SEQ ID NO: 51779 - protein, 29 aa, Artificial Sequence
  Cyclic GFR-binding peptide
  MOD_RES (3)..(4): Xaa is C or S
KAXXVPTELEPLPMVYYDEYDKVVEQLSN

SEQ ID NO: 51780 - protein, 30 aa, Artificial Sequence; identical to SEQ ID NO: 18508
  Cyclic GFR-binding peptide
  MOD_RES (29)..(29): Xaa is C or S

SEQ ID NO: 51781 - protein, 24 aa, Artificial Sequence
  Cyclic GFR-binding peptide
ALSPISILFIVGRKPKVYKQYEMI

SEQ ID NO: 51782 - protein, 29 aa, Artificial Sequence
  Cyclic GFR-binding peptide
PTELSPISMLFIDEYDKVVYKQYEEMVVE

SEQ ID NO: 51783 - protein, 29 aa, Artificial Sequence
  Cyclic GFR-binding peptide
  MOD_RES (29)..(29): Xaa is C or S
QLEPLPVVYYDDSSNVIEQLSNNMVVRAX

SEQ ID NO: 51784 - protein, 31 aa, Artificial Sequence; identical to SEQ ID NO: 18512
  Cyclic GFR-binding peptide
  MOD_RES (2)..(3): Xaa is C or S

SEQ ID NO: 51785 - protein, 32 aa, Artificial Sequence; identical to SEQ ID NO: 18514
  Cyclic GFR-binding peptide
  MOD_RES (4)..(5): Xaa is C or S

SEQ ID NO: 51786 - protein, 35 aa, Artificial Sequence; identical to SEQ ID NO: 18515
  Cyclic GFR-binding peptide
  MOD_RES (6)..(7): Xaa is C or S

SEQ ID NO: 51787 - protein, 33 aa, Artificial Sequence; identical to SEQ ID NO: 18516
  Cyclic GFR-binding peptide
  MOD_RES (31)..(33): Xaa is C or S

SEQ ID NO: 51788 - protein, 24 aa, Artificial Sequence
  Cyclic GFR-binding peptide
LEPLTILYYDSANNVVEQLSNDMV

SEQ ID NO: 51789 - protein, 23 aa, Artificial Sequence
  Cyclic GFR-binding peptide
DLEPLPIVYYVGRTPKVEQLSNM

SEQ ID NO: 51790 - protein, 31 aa, Artificial Sequence; identical to SEQ ID NO: 18519
  Cyclic GFR-binding peptide
  MOD_RES (4)..(5): Xaa is C or S

SEQ ID NO: 51791 - protein, 39 aa, Artificial Sequence; identical to SEQ ID NO: 8216
  Cyclic GFR-binding peptide
  MOD_RES (5)..(6)..(37)..(39): Xaa is C or S

SEQ ID NO: 51792 - protein, 36 aa, Artificial Sequence; identical to SEQ ID NO: 18521
  Cyclic GFR-binding peptide
  MOD_RES (1)..(33)..(35): Xaa is C or S

SEQ ID NO: 51793 - protein, 22 aa, Artificial Sequence
  Cyclic GFR-binding peptide
ALNAISILYFVGRKPKVLKKYR

SEQ ID NO: 51794 - protein, 28 aa, Artificial Sequence
  Cyclic GFR-binding peptide
  MOD_RES (2)..(3): Xaa is C or S
PXXVSQDLEPLPIVYYIGKTPKIEQLSN

SEQ ID NO: 51795 - protein, 38 aa, Artificial Sequence; identical to SEQ ID NO: 18524
  Cyclic GFR-binding peptide
  MOD_RES (3)..(4)..(36)..(38): Xaa is C or S

SEQ ID NO: 51796 - protein, 37 aa, Artificial Sequence; identical to SEQ ID NO: 8225
  Cyclic GFR-binding peptide
  MOD_RES (6)..(7): Xaa is C or S

SEQ ID NO: 51797 - protein, 29 aa, Artificial Sequence
  Cyclic GFR-binding peptide
APTQLSPISVLFIDDSSNVIYKQYENMVV

SEQ ID NO: 51798 - protein, 32 aa, Artificial Sequence; identical to SEQ ID NO: 18533
  Cyclic GFR-binding peptide
  MOD_RES (1)..(2): Xaa is C or S

SEQ ID NO: 51799 - protein, 26 aa, Artificial Sequence
  Cyclic GFR-binding peptide
APTQLEPLTVLYYDDSSNVIEQLSNN

SEQ ID NO: 51800 - protein, 32 aa, Artificial Sequence; identical to SEQ ID NO: 18536
  Cyclic GFR-binding peptide
  MOD_RES (30)..(32): Xaa is C or S

SEQ ID NO: 51801 - protein, 26 aa, Artificial Sequence
  Cyclic GFR-binding peptide
APTQLSPISVLFIDDSSNVIYKQYEN

SEQ ID NO: 51802 - protein, 29 aa, Artificial Sequence
  Cyclic GFR-binding peptide
  MOD_RES (2)..(3): Xaa is C or S
TXXVPTRLEPLTILYYDSANNVVEQLSND

SEQ ID NO: 51803 - protein, 26 aa, Artificial Sequence
  Cyclic GFR-binding peptide
SPISMLFIDEYDKVVYKQYEEMVVEG

SEQ ID NO: 51804 - protein, 36 aa, Artificial Sequence; identical to SEQ ID NO: 18543
  Cyclic GFR-binding peptide
  MOD_RES (2)..(3)..(35): Xaa is C or S

SEQ ID NO: 51805 - protein, 30 aa, Artificial Sequence; identical to SEQ ID NO: 18544
  Cyclic GFR-binding peptide
  MOD_RES (4)..(5): Xaa is C or S

SEQ ID NO: 51806 - protein, 27 aa, Artificial Sequence
  Cyclic GFR-binding peptide
TELEPLPMVYYDEYDKVVEQLSNEMVV

SEQ ID NO: 51807 - protein, 31 aa, Artificial Sequence; identical to SEQ ID NO: 18546
  Cyclic GFR-binding peptide
  MOD_RES (1)..(2): Xaa is C or S

SEQ ID NO: 51808 - protein, 38 aa, Artificial Sequence; identical to SEQ ID NO: 18547
  Cyclic GFR-binding peptide
  MOD_RES (6)..(7)..(38): Xaa is C or S

SEQ ID NO: 51809 - protein, 35 aa, Artificial Sequence; identical to SEQ ID NO: 18549
  Cyclic GFR-binding peptide
  MOD_RES (32)..(34): Xaa is C or S

SEQ ID NO: 51810 - protein, 40 aa, Artificial Sequence; identical to SEQ ID NO: 18550
  Cyclic GFR-binding peptide
  MOD_RES (5)..(6)..(38)..(40): Xaa is C or S

SEQ ID NO: 51811 - protein, 31 aa, Artificial Sequence; identical to SEQ ID NO: 18552
  Cyclic GFR-binding peptide
  MOD_RES (2)..(3): Xaa is C or S

SEQ ID NO: 51812 - protein, 31 aa, Artificial Sequence; identical to SEQ ID NO: 18553
  Cyclic GFR-binding peptide
  MOD_RES (3)..(4): Xaa is C or S

SEQ ID NO: 51813 - protein, 31 aa, Artificial Sequence; identical to SEQ ID NO: 18554
  Cyclic GFR-binding peptide
  MOD_RES (5)..(6): Xaa is C or S

SEQ ID NO: 51814 - protein, 28 aa, Artificial Sequence
  Cyclic GFR-binding peptide
TRLNAISILYFDSANNVVLKKYRDMVVE

SEQ ID NO: 51815 - protein, 28 aa, Artificial Sequence
  Cyclic GFR-binding peptide
SQDLEPLPIVYYIGKTPKIEQLSNMIVK

SEQ ID NO: 51816 - protein, 34 aa, Artificial Sequence; identical to SEQ ID NO: 8264
  Cyclic GFR-binding peptide
  MOD_RES (6)..(7): Xaa is C or S

SEQ ID NO: 51817 - protein, 33 aa, Artificial Sequence; identical to SEQ ID NO: 18558
  Cyclic GFR-binding peptide
  MOD_RES (6)..(7): Xaa is C or S

SEQ ID NO: 51818 - protein, 30 aa, Artificial Sequence; identical to SEQ ID NO: 8266
  Cyclic GFR-binding peptide
  MOD_RES (3)..(4): Xaa is C or S

SEQ ID NO: 51819 - protein, 29 aa, Artificial Sequence
  Cyclic GFR-binding peptide
TELSPISMLFIDENEKVVYKQYEDMVVEG

SEQ ID NO: 51820 - protein, 33 aa, Artificial Sequence; identical to SEQ ID NO: 18561
  Cyclic GFR-binding peptide
  MOD_RES (1)..(2)..(33): Xaa is C or S

SEQ ID NO: 51821 - protein, 25 aa, Artificial Sequence
  Cyclic GFR-binding peptide
VPTELSPISMLFIDENEKVVYKQYE

SEQ ID NO: 51822 - protein, 26 aa, Artificial Sequence
  Cyclic GFR-binding peptide
  MOD_RES (1)..(1): Xaa is C or S
XVPTELEPLPMVYYDENEKVVEQLSN

SEQ ID NO: 51823 - protein, 30 aa, Artificial Sequence; identical to SEQ ID NO: 18564
  Cyclic GFR-binding peptide
  MOD_RES (30)..(30): Xaa is C or S

SEQ ID NO: 51824 - protein, 34 aa, Artificial Sequence; identical to SEQ ID NO: 18565
  Cyclic GFR-binding peptide
  MOD_RES (6)..(7): Xaa is C or S

SEQ ID NO: 51825 - protein, 27 aa, Artificial Sequence
  Cyclic GFR-binding peptide
SQDLSPISILFIIGKTPKIYKQYEMIV

SEQ ID NO: 51826 - protein, 25 aa, Artificial Sequence
  Cyclic GFR-binding peptide
SQDLNAISILYFIGKTPKILKKYRM

SEQ ID NO: 51827 - protein, 28 aa, Artificial Sequence
  Cyclic GFR-binding peptide
  MOD_RES (1)..(1): Xaa is C or S
XVPTELEPLPMVYYDEYDKVVEQLSNEM

SEQ ID NO: 51828 - protein, 26 aa, Artificial Sequence
  Cyclic GFR-binding peptide
TELEPLTMLYYDEYDKVVEQLSNEMV

SEQ ID NO: 51829 - protein, 32 aa, Artificial Sequence; identical to SEQ ID NO: 18572
  Cyclic GFR-binding peptide
  MOD_RES (3)..(4): Xaa is C or S

SEQ ID NO: 51830 - protein, 29 aa, Artificial Sequence
  Cyclic GFR-binding peptide
  MOD_RES (27)..(29): Xaa is C or S
LEPLPIVYYIGKTPKIEQLSNMIVKSXKX

SEQ ID NO: 51831 - protein, 36 aa, Artificial Sequence; identical to SEQ ID NO: 18575
  Cyclic GFR-binding peptide
  MOD_RES (5)..(6): Xaa is C or S

SEQ ID NO: 51832 - protein, 35 aa, Artificial Sequence; identical to SEQ ID NO: 18576
  Cyclic GFR-binding peptide
  MOD_RES (5)..(6): Xaa is C or S

SEQ ID NO: 51833 - protein, 22 aa, Artificial Sequence
  Cyclic GFR-binding peptide
EPLPIVYYDSANNVVEQLSNDM

SEQ ID NO: 51834 - protein, 30 aa, Artificial Sequence; identical to SEQ ID NO: 18580
  Cyclic GFR-binding peptide
  MOD_RES (1)..(1): Xaa is C or S

SEQ ID NO: 51835 - protein, 34 aa, Artificial Sequence; identical to SEQ ID NO: 18581
  Cyclic GFR-binding peptide
  MOD_RES (7)..(7): Xaa is C or S

SEQ ID NO: 51836 - protein, 26 aa, Artificial Sequence
  Cyclic GFR-binding peptide
  MOD_RES (1)..(1): Xaa is C or S
XVPTRLEPLTILYYDSANNVVEQLSN

SEQ ID NO: 51837 - protein, 24 aa, Artificial Sequence
  Cyclic GFR-binding peptide
QDLNAISILYFVGRTPKVLKKYRM

SEQ ID NO: 51838 - protein, 32 aa, Artificial Sequence; identical to SEQ ID NO: 18585
  Cyclic GFR-binding peptide
  MOD_RES (1)..(2): Xaa is C or S

SEQ ID NO: 51839 - protein, 26 aa, Artificial Sequence
  Cyclic GFR-binding peptide
ELEPLTMLYYDENEKVVEQLSNDMVV

SEQ ID NO: 51840 - protein, 29 aa, Artificial Sequence
  Cyclic GFR-binding peptide
  MOD_RES (2)..(3): Xaa is C or S
AXXVPTELNAISMLYFDENEKVVLKKYRD

SEQ ID NO: 51841 - protein, 30 aa, Artificial Sequence; identical to SEQ ID NO: 8296
  Cyclic GFR-binding peptide
  MOD_RES (28)..(30): Xaa is C or S

SEQ ID NO: 51842 - protein, 30 aa, Artificial Sequence; identical to SEQ ID NO: 18589
  Cyclic GFR-binding peptide
  MOD_RES (30)..(30): Xaa is C or S

SEQ ID NO: 51843 - protein, 32 aa, Artificial Sequence; identical to SEQ ID NO: 18592
  Cyclic GFR-binding peptide
  MOD_RES (5)..(6): Xaa is C or S

SEQ ID NO: 51844 - protein, 35 aa, Artificial Sequence; identical to SEQ ID NO: 8300
  Cyclic GFR-binding peptide
  MOD_RES (2)..(3)..(34): Xaa is C or S

SEQ ID NO: 51845 - protein, 29 aa, Artificial Sequence
  Cyclic GFR-binding peptide
  MOD_RES (29)..(29): Xaa is C or S
ELSPISMLFIDEYDKVVYKQYEEMVVEGX

SEQ ID NO: 51846 - protein, 33 aa, Artificial Sequence; identical to SEQ ID NO: 18595
  Cyclic GFR-binding peptide
  MOD_RES (4)..(4): Xaa is C or S

SEQ ID NO: 51847 - protein, 35 aa, Artificial Sequence; identical to SEQ ID NO: 8304
  Cyclic GFR-binding peptide
  MOD_RES (4)..(5): Xaa is C or S

SEQ ID NO: 51848 - protein, 32 aa, Artificial Sequence; identical to SEQ ID NO: 18597
  Cyclic GFR-binding peptide
  MOD_RES (3)..(4): Xaa is C or S

SEQ ID NO: 51849 - protein, 28 aa, Artificial Sequence
  Cyclic GFR-binding peptide
  MOD_RES (28)..(28): Xaa is C or S
LSPISMLFIDENEKVVYKQYEDMVVEGX

SEQ ID NO: 51850 - protein, 37 aa, Artificial Sequence; identical to SEQ ID NO: 18599
  Cyclic GFR-binding peptide
  MOD_RES (3)..(4)..(36): Xaa is C or S

SEQ ID NO: 51851 - protein, 30 aa, Artificial Sequence; identical to SEQ ID NO: 8309
  Cyclic GFR-binding peptide
  MOD_RES (28)..(30): Xaa is C or S

SEQ ID NO: 51852 - protein, 20 aa, Artificial Sequence
  Cyclic GFR-binding peptide
EPLPIVYYVGRTPKVEQLSN

SEQ ID NO: 51853 - protein, 30 aa, Artificial Sequence; identical to SEQ ID NO: 18603
  Cyclic GFR-binding peptide
  MOD_RES (2)..(3): Xaa is C or S

SEQ ID NO: 51854 - protein, 40 aa, Artificial Sequence; identical to SEQ ID NO: 18604
  Cyclic GFR-binding peptide
  MOD_RES (6)..(7)..(39): Xaa is C or S

SEQ ID NO: 51855 - protein, 29 aa, Artificial Sequence
  Cyclic GFR-binding peptide
PQALSPISILFIVGRKPKVYKQYEMIVRS

SEQ ID NO: 51856 - protein, 27 aa, Artificial Sequence
  Cyclic GFR-binding peptide
QALNAISILYFVGRKPKVLKKYRMIVR

SEQ ID NO: 51857 - protein, 22 aa, Artificial Sequence
  Cyclic GFR-binding peptide
LSPISVLFIDDSSNVIYKQYEN

SEQ ID NO: 51858 - protein, 21 aa, Artificial Sequence
  Cyclic GFR-binding peptide
EPLPIVYYVGRTPKVEQLSNM

SEQ ID NO: 51859 - protein, 32 aa, Artificial Sequence; identical to SEQ ID NO: 8316
  Cyclic GFR-binding peptide
  MOD_RES (32)..(32): Xaa is C or S

SEQ ID NO: 51860 - protein, 36 aa, Artificial Sequence; identical to SEQ ID NO: 18611
  Cyclic GFR-binding peptide
  MOD_RES (4)..(5)..(36): Xaa is C or S

SEQ ID NO: 51861 - protein, 24 aa, Artificial Sequence
  Cyclic GFR-binding peptide
PQALEPLTILYYVGRKPKVEQLSN

SEQ ID NO: 51862 - protein, 33 aa, Artificial Sequence; identical to SEQ ID NO: 18614
  Cyclic GFR-binding peptide
  MOD_RES (6)..(7): Xaa is C or S

SEQ ID NO: 51863 - protein, 33 aa, Artificial Sequence; identical to SEQ ID NO: 18615
  Cyclic GFR-binding peptide
  MOD_RES (1)..(2): Xaa is C or S

SEQ ID NO: 51864 - protein, 33 aa, Artificial Sequence; identical to SEQ ID NO: 18616
  Cyclic GFR-binding peptide
  MOD_RES (1)..(2): Xaa is C or S

SEQ ID NO: 51865 - protein, 31 aa, Artificial Sequence; identical to SEQ ID NO: 8322
  Cyclic GFR-binding peptide
  MOD_RES (3)..(4): Xaa is C or S

SEQ ID NO: 51866 - protein, 35 aa, Artificial Sequence; identical to SEQ ID NO: 8323
  Cyclic GFR-binding peptide
  MOD_RES (5)..(6): Xaa is C or S

SEQ ID NO: 51867 - protein, 31 aa, Artificial Sequence; identical to SEQ ID NO: 18619
  Cyclic GFR-binding peptide
  MOD_RES (30)..(30): Xaa is C or S

SEQ ID NO: 51868 - protein, 22 aa, Artificial Sequence
  Cyclic GFR-binding peptide
ALEPLTILYYVGRKPKVEQLSN

SEQ ID NO: 51869 - protein, 29 aa, Artificial Sequence
  Cyclic GFR-binding peptide
PTELEPLPMVYYDENEKVVEQLSNDMVVE

SEQ ID NO: 51870 - protein, 25 aa, Artificial Sequence
  Cyclic GFR-binding peptide
PQDLNAISILYFVGRTPKVLKKYRM

SEQ ID NO: 51871 - protein, 28 aa, Artificial Sequence
  Cyclic GFR-binding peptide
  MOD_RES (1)..(1): Xaa is C or S
XVPQDLSPISILFIVGRTPKVYKQYEMV

SEQ ID NO: 51872 - protein, 31 aa, Artificial Sequence; identical to SEQ ID NO: 18624
  Cyclic GFR-binding peptide
  MOD_RES (4)..(5): Xaa is C or S

SEQ ID NO: 51873 - protein, 29 aa, Artificial Sequence
  Cyclic GFR-binding peptide
  MOD_RES (29)..(29): Xaa is C or S
QDLNAISILYFIGKTPKILKKYRMIVKSX

SEQ ID NO: 51874 - protein, 37 aa, Artificial Sequence; identical to SEQ ID NO: 18626
  Cyclic GFR-binding peptide
  MOD_RES (5)..(6): Xaa is C or S

SEQ ID NO: 51875 - protein, 34 aa, Artificial Sequence; identical to SEQ ID NO: 8330
  Cyclic GFR-binding peptide
  MOD_RES (31)..(33): Xaa is C or S

SEQ ID NO: 51876 - protein, 31 aa, Artificial Sequence; identical to SEQ ID NO: 8331
  Cyclic GFR-binding peptide
  MOD_RES (28)..(30): Xaa is C or S

SEQ ID NO: 51877 - protein, 39 aa, Artificial Sequence; identical to SEQ ID NO: 18629
  Cyclic GFR-binding peptide
  MOD_RES (4)..(5)..(37)..(39): Xaa is C or S

SEQ ID NO: 51878 - protein, 32 aa, Artificial Sequence; identical to SEQ ID NO: 18630
  Cyclic GFR-binding peptide
  MOD_RES (2)..(3): Xaa is C or S

SEQ ID NO: 51879 - protein, 33 aa, Artificial Sequence; identical to SEQ ID NO: 18631
  Cyclic GFR-binding peptide
  MOD_RES (32)..(32): Xaa is C or S

SEQ ID NO: 51880 - protein, 35 aa, Artificial Sequence; identical to SEQ ID NO: 18632
  Cyclic GFR-binding peptide
  MOD_RES (6)..(7): Xaa is C or S

SEQ ID NO: 51881 - protein, 25 aa, Artificial Sequence
  Cyclic GFR-binding peptide
LEPLPIVYYIGKTPKIEQLSNMIVK

SEQ ID NO: 51882 - protein, 29 aa, Artificial Sequence
  Cyclic GFR-binding peptide
PTRLEPLTILYYDSANNVVEQLSNDMVVE

SEQ ID NO: 51883 - protein, 22 aa, Artificial Sequence
  Cyclic GFR-binding peptide
LSPISILFIIGKTPKIYKQYEM

SEQ ID NO: 51884 - protein, 31 aa, Artificial Sequence; identical to SEQ ID NO: 18638
  Cyclic GFR-binding peptide
  MOD_RES (31)..(31): Xaa is C or S

SEQ ID NO: 51885 - protein, 34 aa, Artificial Sequence; identical to SEQ ID NO: 18639
  Cyclic GFR-binding peptide
  MOD_RES (31)..(33): Xaa is C or S

SEQ ID NO: 51886 - protein, 34 aa, Artificial Sequence; identical to SEQ ID NO: 18642
  Cyclic GFR-binding peptide
  MOD_RES (3)..(4): Xaa is C or S

SEQ ID NO: 51887 - protein, 25 aa, Artificial Sequence
  Cyclic GFR-binding peptide
ELEPLTMLYYDENEKVVEQLSNDMV

SEQ ID NO: 51888 - protein, 39 aa, Artificial Sequence; identical to SEQ ID NO: 18645
  Cyclic GFR-binding peptide
  MOD_RES (3)..(4)..(36)..(38): Xaa is C or S

SEQ ID NO: 51889 - protein, 34 aa, Artificial Sequence; identical to SEQ ID NO: 8348
  Cyclic GFR-binding peptide
  MOD_RES (1)..(2)..(33): Xaa is C or S

SEQ ID NO: 51890 - protein, 34 aa, Artificial Sequence; identical to SEQ ID NO: 18647
  Cyclic GFR-binding peptide
  MOD_RES (5)..(6): Xaa is C or S

SEQ ID NO: 51891 - protein, 23 aa, Artificial Sequence
  Cyclic GFR-binding peptide
TRLEPLTILYYDSANNVVEQLSN

SEQ ID NO: 51892 - protein, 32 aa, Artificial Sequence; identical to SEQ ID NO: 18649
  Cyclic GFR-binding peptide
  MOD_RES (5)..(6): Xaa is C or S

SEQ ID NO: 51893 - protein, 38 aa, Artificial Sequence; identical to SEQ ID NO: 18650
  Cyclic GFR-binding peptide
  MOD_RES (5)..(6)..(37): Xaa is C or S

SEQ ID NO: 51894 - protein, 38 aa, Artificial Sequence; identical to SEQ ID NO: 18651
  Cyclic GFR-binding peptide
  MOD_RES (3)..(4)..(36)..(38): Xaa is C or S

SEQ ID NO: 51895 - protein, 31 aa, Artificial Sequence; identical to SEQ ID NO: 18652
  Cyclic GFR-binding peptide
  MOD_RES (31)..(31): Xaa is C or S

SEQ ID NO: 51896 - protein, 23 aa, Artificial Sequence
  Cyclic GFR-binding peptide
SPISILFIVGRTPKVYKQYEMVV

SEQ ID NO: 51897 - protein, 34 aa, Artificial Sequence; identical to SEQ ID NO: 8353
  Cyclic GFR-binding peptide
  MOD_RES (5)..(6): Xaa is C or S

SEQ ID NO: 51898 - protein, 35 aa, Artificial Sequence; identical to SEQ ID NO: 18656
  Cyclic GFR-binding peptide
  MOD_RES (3)..(4): Xaa is C or S

SEQ ID NO: 51899 - protein, 25 aa, Artificial Sequence
  Cyclic GFR-binding peptide
PTELSPISMLFIDENEKVVYKQYED

SEQ ID NO: 51900 - protein, 35 aa, Artificial Sequence; identical to SEQ ID NO: 18658
  Cyclic GFR-binding peptide
  MOD_RES (1)..(2)..(34): Xaa is C or S

SEQ ID NO: 51901 - protein, 35 aa, Artificial Sequence; identical to SEQ ID NO: 18659
  Cyclic GFR-binding peptide
  MOD_RES (4)..(5): Xaa is C or S

SEQ ID NO: 51902 - protein, 34 aa, Artificial Sequence; identical to SEQ ID NO: 18660
  Cyclic GFR-binding peptide
  MOD_RES (6)..(6): Xaa is C or S

SEQ ID NO: 51903 - protein, 37 aa, Artificial Sequence; identical to SEQ ID NO: 18661
  Cyclic GFR-binding peptide
  MOD_RES (3)..(4)..(35)..(37): Xaa is C or S

SEQ ID NO: 51904 - protein, 36 aa, Artificial Sequence; identical to SEQ ID NO: 18662
  Cyclic GFR-binding peptide
  MOD_RES (6)..(7): Xaa is C or S

SEQ ID NO: 51905 - protein, 26 aa, Artificial Sequence
  Cyclic GFR-binding peptide
  MOD_RES (26)..(26): Xaa is C or S
SPISILFIIGKTPKIYKQYEMIVKSX

SEQ ID NO: 51906 - protein, 36 aa, Artificial Sequence; identical to SEQ ID NO: 8366
  Cyclic GFR-binding peptide
  MOD_RES (2)..(3)..(34)..(36): Xaa is C or S

SEQ ID NO: 51907 - protein, 24 aa, Artificial Sequence
  Cyclic GFR-binding peptide
LEPLTMLYYDENEKVVEQLSNDMV

SEQ ID NO: 51908 - protein, 34 aa, Artificial Sequence; identical to SEQ ID NO: 18668
  Cyclic GFR-binding peptide
  MOD_RES (32)..(34): Xaa is C or S

SEQ ID NO: 51909 - protein, 30 aa, Artificial Sequence; identical to SEQ ID NO: 18669
  Cyclic GFR-binding peptide
  MOD_RES (3)..(4): Xaa is C or S

SEQ ID NO: 51910 - protein, 28 aa, Artificial Sequence
  Cyclic GFR-binding peptide
  MOD_RES (1)..(1): Xaa is C or S
XVPTRLNAISILYFDSANNVVLKKYRDM

SEQ ID NO: 51911 - protein, 36 aa, Artificial Sequence; identical to SEQ ID NO: 8374
  Cyclic GFR-binding peptide
  MOD_RES (6)..(7): Xaa is C or S

SEQ ID NO: 51912 - protein, 29 aa, Artificial Sequence
  Cyclic GFR-binding peptide
  MOD_RES (1)..(2): Xaa is C or S
XXVPTELEPLTMLYYDENEKVVEQLSNDM

SEQ ID NO: 51913 - protein, 27 aa, Artificial Sequence
  Cyclic GFR-binding peptide
  MOD_RES (26)..(26): Xaa is C or S
SPISILFIVGRTPKVYKQYEMVVKSXK

SEQ ID NO: 51914 - protein, 21 aa, Artificial Sequence
  Cyclic GFR-binding peptide
LSPISMLFIDENEKVVYKQYE

SEQ ID NO: 51915 - protein, 32 aa, Artificial Sequence; identical to SEQ ID NO: 8382
  Cyclic GFR-binding peptide
  MOD_RES (6)..(7): Xaa is C or S

SEQ ID NO: 51916 - protein, 34 aa, Artificial Sequence; identical to SEQ ID NO: 18679
  Cyclic GFR-binding peptide
  MOD_RES (5)..(6): Xaa is C or S

SEQ ID NO: 51917 - protein, 25 aa, Artificial Sequence
  Cyclic GFR-binding peptide
VPQALNAISILYFVGRKPKVLKKYR

SEQ ID NO: 51918 - protein, 31 aa, Artificial Sequence; identical to SEQ ID NO: 18681
  Cyclic GFR-binding peptide
  MOD_RES (4)..(4): Xaa is C or S

SEQ ID NO: 51919 - protein, 29 aa, Artificial Sequence
  Cyclic GFR-binding peptide
  MOD_RES (29)..(29): Xaa is C or S
QDLSPISILFIIGKTPKIYKQYEMIVKSX

SEQ ID NO: 51920 - protein, 26 aa, Artificial Sequence
  Cyclic GFR-binding peptide
NAISMLYFDEYDKVVLKKYREMVVEG

SEQ ID NO: 51921 - protein, 23 aa, Artificial Sequence
  Cyclic GFR-binding peptide
TQLEPLTVLYYDDSSNVIEQLSN

SEQ ID NO: 51922 - protein, 40 aa, Artificial Sequence; identical to SEQ ID NO: 18685
  Cyclic GFR-binding peptide
  MOD_RES (5)..(37)..(39): Xaa is C or S

SEQ ID NO: 51923 - protein, 29 aa, Artificial Sequence
  Cyclic GFR-binding peptide
  MOD_RES (27)..(29): Xaa is C or S
EPLPIVYYDSANNVVEQLSNDMVVESXGX

SEQ ID NO: 51924 - protein, 25 aa, Artificial Sequence
  Cyclic GFR-binding peptide
VSQDLNAISILYFIGKTPKILKKYR

SEQ ID NO: 51925 - protein, 31 aa, Artificial Sequence; identical to SEQ ID NO: 8398
  Cyclic GFR-binding peptide
  MOD_RES (5)..(6): Xaa is C or S

SEQ ID NO: 51926 - protein, 32 aa, Artificial Sequence; identical to SEQ ID NO: 18689
  Cyclic GFR-binding peptide
  MOD_RES (3)..(4): Xaa is C or S

SEQ ID NO: 51927 - protein, 29 aa, Artificial Sequence
  Cyclic GFR-binding peptide
  MOD_RES (28)..(28): Xaa is C or S
LEPLPIVYYDSANNVVEQLSNDMVVESXG

SEQ ID NO: 51928 - protein, 26 aa, Artificial Sequence
  Cyclic GFR-binding peptide
  MOD_RES (1)..(1): Xaa is C or S
XVSQDLSPISILFIIGKTPKIYKQYE

SEQ ID NO: 51929 - protein, 27 aa, Artificial Sequence
  Cyclic GFR-binding peptide
  MOD_RES (1)..(2): Xaa is C or S
XXVSQDLSPISILFIIGKTPKIYKQYE

SEQ ID NO: 51930 - protein, 31 aa, Artificial Sequence; identical to SEQ ID NO: 18695
  Cyclic GFR-binding peptide
  MOD_RES (30)..(30): Xaa is C or S

SEQ ID NO: 51931 - protein, 26 aa, Artificial Sequence
  Cyclic GFR-binding peptide
PTRLEPLTILYYDSANNVVEQLSNDM

SEQ ID NO: 51932 - protein, 28 aa, Artificial Sequence
  Cyclic GFR-binding peptide
  MOD_RES (1)..(1): Xaa is C or S
XVPTELNAISMLYFDEYDKVVLKKYREM

SEQ ID NO: 51933 - protein, 39 aa, Artificial Sequence; identical to SEQ ID NO: 18698
  Cyclic GFR-binding peptide
  MOD_RES (4)..(5)..(37)..(39): Xaa is C or S

SEQ ID NO: 51934 - protein, 30 aa, Artificial Sequence; identical to SEQ ID NO: 18700
  Cyclic GFR-binding peptide
  MOD_RES (28)..(30): Xaa is C or S

SEQ ID NO: 51935 - protein, 39 aa, Artificial Sequence; identical to SEQ ID NO: 18701
  Cyclic GFR-binding peptide
  MOD_RES (5)..(6)..(38): Xaa is C or S

SEQ ID NO: 51936 - protein, 33 aa, Artificial Sequence; identical to SEQ ID NO: 18702
  Cyclic GFR-binding peptide
  MOD_RES (3)..(4): Xaa is C or S

SEQ ID NO: 51937 - protein, 35 aa, Artificial Sequence; identical to SEQ ID NO: 18703
  Cyclic GFR-binding peptide
  MOD_RES (5)..(6): Xaa is C or S

SEQ ID NO: 51938 - protein, 33 aa, Artificial Sequence; identical to SEQ ID NO: 18704
  Cyclic GFR-binding peptide
  MOD_RES (5)..(6): Xaa is C or S

SEQ ID NO: 51939 - protein, 32 aa, Artificial Sequence; identical to SEQ ID NO: 8415
  Cyclic GFR-binding peptide
  MOD_RES (3)..(4): Xaa is C or S

SEQ ID NO: 51940 - protein, 38 aa, Artificial Sequence; identical to SEQ ID NO: 8416
  Cyclic GFR-binding peptide
  MOD_RES (4)..(5)..(36)..(38): Xaa is C or S

SEQ ID NO: 51941 - protein, 32 aa, Artificial Sequence; identical to SEQ ID NO: 18707
  Cyclic GFR-binding peptide
  MOD_RES (6)..(7): Xaa is C or S

SEQ ID NO: 51942 - protein, 27 aa, Artificial Sequence
  Cyclic GFR-binding peptide
LEPLPMVYYDEYDKVVEQLSNEMVVEG

SEQ ID NO: 51943 - protein, 37 aa, Artificial Sequence; identical to SEQ ID NO: 18709
  Cyclic GFR-binding peptide
  MOD_RES (5)..(6)..(37): Xaa is C or S

SEQ ID NO: 51944 - protein, 21 aa, Artificial Sequence
  Cyclic GFR-binding peptide
LEPLPMVYYDEYDKVVEQLSN

SEQ ID NO: 51945 - protein, 21 aa, Artificial Sequence
  Cyclic GFR-binding peptide
LEPLTILYYDSANNVVEQLSN

SEQ ID NO: 51946 - protein, 27 aa, Artificial Sequence
  Cyclic GFR-binding peptide
TQLEPLTVLYYDDSSNVIEQLSNNMVV

SEQ ID NO: 51947 - protein, 41 aa, Artificial Sequence; identical to SEQ ID NO: 18713
  Cyclic GFR-binding peptide
  MOD_RES (7)..(39)..(41): Xaa is C or S

SEQ ID NO: 51948 - protein, 27 aa, Artificial Sequence
  Cyclic GFR-binding peptide
  MOD_RES (27)..(27): Xaa is C or S
LEPLPIVYYIGKTPKIEQLSNMIVKSX

SEQ ID NO: 51949 - protein, 35 aa, Artificial Sequence; identical to SEQ ID NO: 18716
  Cyclic GFR-binding peptide
  MOD_RES (4)..(5): Xaa is C or S

SEQ ID NO: 51950 - protein, 34 aa, Artificial Sequence; identical to SEQ ID NO: 8426
  Cyclic GFR-binding peptide
  MOD_RES (32)..(34): Xaa is C or S

SEQ ID NO: 51951 - protein, 29 aa, Artificial Sequence
  Cyclic GFR-binding peptide
  MOD_RES (3)..(4): Xaa is C or S
KPXXAPTQLEPLTVLYYDDSSNVIEQLSN

SEQ ID NO: 51952 - protein, 36 aa, Artificial Sequence; identical to SEQ ID NO: 8432
  Cyclic GFR-binding peptide
  MOD_RES (2)..(3)..(35): Xaa is C or S

SEQ ID NO: 51953 - protein, 26 aa, Artificial Sequence
  Cyclic GFR-binding peptide
VPQDLEPLPIVYYVGRTPKVEQLSNM

SEQ ID NO: 51954 - protein, 38 aa, Artificial Sequence; identical to SEQ ID NO: 18723
  Cyclic GFR-binding peptide
  MOD_RES (4)..(5)..(37): Xaa is C or S

SEQ ID NO: 51955 - protein, 30 aa, Artificial Sequence; identical to SEQ ID NO: 18724
  Cyclic GFR-binding peptide

SEQ ID NO: 51956 - protein, 31 aa, Artificial Sequence; identical to SEQ ID NO: 18725
  Cyclic GFR-binding peptide
  MOD_RES (3)..(4): Xaa is C or S

SEQ ID NO: 51957 - protein, 29 aa, Artificial Sequence
  Cyclic GFR-binding peptide
  MOD_RES (4)..(4): Xaa is C or S
KPTXAPTKLEPLPVVYYDDSSNVIEQLSN

SEQ ID NO: 51958 - protein, 28 aa, Artificial Sequence
  Cyclic GFR-binding peptide
PTELEPLTMLYYDEYDKVVEQLSNEMVV

SEQ ID NO: 51959 - protein, 24 aa, Artificial Sequence
  Cyclic GFR-binding peptide
DLSPISILFIVGRTPKVYKQYEMV

SEQ ID NO: 51960 - protein, 21 aa, Artificial Sequence
  Cyclic GFR-binding peptide
LSPISILFIVGRKPKVYKQYE

SEQ ID NO: 51961 - protein, 35 aa, Artificial Sequence; identical to SEQ ID NO: 18731
  Cyclic GFR-binding peptide
  MOD_RES (1)..(2)..(34): Xaa is C or S

SEQ ID NO: 51962 - protein, 35 aa, Artificial Sequence; identical to SEQ ID NO: 8446
  Cyclic GFR-binding peptide
  MOD_RES (4)..(5): Xaa is C or S

SEQ ID NO: 51963 - protein, 26 aa, Artificial Sequence
  Cyclic GFR-binding peptide
  MOD_RES (1)..(1): Xaa is C or S
XAPTQLSPISVLFIDDSSNVIYKQYE

SEQ ID NO: 51964 - protein, 37 aa, Artificial Sequence; identical to SEQ ID NO: 18734
  Cyclic GFR-binding peptide
  MOD_RES (5)..(6): Xaa is C or S

SEQ ID NO: 51965 - protein, 30 aa, Artificial Sequence; identical to SEQ ID NO: 18736
  Cyclic GFR-binding peptide
  MOD_RES (1)..(1): Xaa is C or S

SEQ ID NO: 51966 - protein, 23 aa, Artificial Sequence
  Cyclic GFR-binding peptide
QDLEPLPIVYYIGKTPKIEQLSN

SEQ ID NO: 51967 - protein, 30 aa, Artificial Sequence; identical to SEQ ID NO: 18738
  Cyclic GFR-binding peptide
  MOD_RES (1)..(2): Xaa is C or S

SEQ ID NO: 51968 - protein, 24 aa, Artificial Sequence
  Cyclic GFR-binding peptide
TELSPISMLFIDENEKVVYKQYED

SEQ ID NO: 51969 - protein, 27 aa, Artificial Sequence
  Cyclic GFR-binding peptide
  MOD_RES (1)..(1): Xaa is C or S
XVPQALEPLTILYYVGRKPKVEQLSNM

SEQ ID NO: 51970 - protein, 31 aa, Artificial Sequence; identical to SEQ ID NO: 18741
  Cyclic GFR-binding peptide
  MOD_RES (1)..(1): Xaa is C or S

SEQ ID NO: 51971 - protein, 29 aa, Artificial Sequence
  Cyclic GFR-binding peptide
APTKLSPISVLFIDDSSNVIYKQYENMVV

SEQ ID NO: 51972 - protein, 26 aa, Artificial Sequence
  Cyclic GFR-binding peptide
LEPLTILYYDSANNVVEQLSNDMVVE

SEQ ID NO: 51973 - protein, 24 aa, Artificial Sequence
  Cyclic GFR-binding peptide
TRLEPLPIVYYDSANNVVEQLSND

SEQ ID NO: 51974 - protein, 34 aa, Artificial Sequence; identical to SEQ ID NO: 18749
  Cyclic GFR-binding peptide
  MOD_RES (2)..(3)..(34): Xaa is C or S

SEQ ID NO: 51975 - protein, 26 aa, Artificial Sequence
  Cyclic GFR-binding peptide
PTELEPLTMLYYDENEKVVEQLSNDM

SEQ ID NO: 51976 - protein, 35 aa, Artificial Sequence; identical to SEQ ID NO: 8463
  Cyclic GFR-binding peptide
  MOD_RES (2)..(3)..(35): Xaa is C or S

SEQ ID NO: 51977 - protein, 32 aa, Artificial Sequence; identical to SEQ ID NO: 18753
  Cyclic GFR-binding peptide
  MOD_RES (3)..(4): Xaa is C or S

SEQ ID NO: 51978 - protein, 31 aa, Artificial Sequence; identical to SEQ ID NO: 18754
  Cyclic GFR-binding peptide
  MOD_RES (4)..(5): Xaa is C or S

SEQ ID NO: 51979 - protein, 32 aa, Artificial Sequence; identical to SEQ ID NO: 18755
  Cyclic GFR-binding peptide
  MOD_RES (1)..(1): Xaa is C or S

SEQ ID NO: 51980 - protein, 35 aa, Artificial Sequence; identical to SEQ ID NO: 8469
  Cyclic GFR-binding peptide
  MOD_RES (1)..(2)..(33)..(35): Xaa is C or S

SEQ ID NO: 51981 - protein, 27 aa, Artificial Sequence
  Cyclic GFR-binding peptide
VPQDLSPISILFIVGRTPKVYKQYEMV

SEQ ID NO: 51982 - protein, 35 aa, Artificial Sequence; identical to SEQ ID NO: 18759
  Cyclic GFR-binding peptide
  MOD_RES (3)..(4): Xaa is C or S

SEQ ID NO: 51983 - protein, 33 aa, Artificial Sequence; identical to SEQ ID NO: 18760
  Cyclic GFR-binding peptide
  MOD_RES (31)..(33): Xaa is C or S

SEQ ID NO: 51984 - protein, 39 aa, Artificial Sequence; identical to SEQ ID NO: 18762
  Cyclic GFR-binding peptide
  MOD_RES (4)..(36)..(38): Xaa is C or S

SEQ ID NO: 51985 - protein, 29 aa, Artificial Sequence
  Cyclic GFR-binding peptide
PTQLEPLTVLYYDDSSNVIEQLSNNMVVR

SEQ ID NO: 51986 - protein, 35 aa, Artificial Sequence; identical to SEQ ID NO: 18764
  Cyclic GFR-binding peptide
  MOD_RES (6)..(7): Xaa is C or S

SEQ ID NO: 51987 - protein, 34 aa, Artificial Sequence; identical to SEQ ID NO: 18765
  Cyclic GFR-binding peptide
  MOD_RES (31)..(33): Xaa is C or S

SEQ ID NO: 51988 - protein, 25 aa, Artificial Sequence
  Cyclic GFR-binding peptide
PTRLEPLPIVYYDSANNVVEQLSND

SEQ ID NO: 51989 - protein, 32 aa, Artificial Sequence; identical to SEQ ID NO: 18769
  Cyclic GFR-binding peptide
  MOD_RES (4)..(5): Xaa is C or S

SEQ ID NO: 51990 - protein, 35 aa, Artificial Sequence; identical to SEQ ID NO: 8479
  Cyclic GFR-binding peptide
  MOD_RES (1)..(2)..(33)..(35): Xaa is C or S

SEQ ID NO: 51991 - protein, 29 aa, Artificial Sequence
  Cyclic GFR-binding peptide
  MOD_RES (29)..(29): Xaa is C or S
KLEPLPVVYYDDSSNVIEQLSNNMVVRSX

SEQ ID NO: 51992 - protein, 25 aa, Artificial Sequence
  Cyclic GFR-binding peptide
DLNAISILYFVGRTPKVLKKYRMVV

SEQ ID NO: 51993 - protein, 33 aa, Artificial Sequence; identical to SEQ ID NO: 18773
  Cyclic GFR-binding peptide
  MOD_RES (3)..(4): Xaa is C or S

SEQ ID NO: 51994 - protein, 20 aa, Artificial Sequence
  Cyclic GFR-binding peptide
EPLPMVYYDEYDKVVEQLSN

SEQ ID NO: 51995 - protein, 34 aa, Artificial Sequence; identical to SEQ ID NO: 8494
  Cyclic GFR-binding peptide
  MOD_RES (32)..(34): Xaa is C or S

SEQ ID NO: 51996 - protein, 38 aa, Artificial Sequence; identical to SEQ ID NO: 18779
  Cyclic GFR-binding peptide
  MOD_RES (5)..(6)..(38): Xaa is C or S

SEQ ID NO: 51997 - protein, 29 aa, Artificial Sequence
  Cyclic GFR-binding peptide
  MOD_RES (1)..(2): Xaa is C or S
XXVPQALSPISILFIVGRKPKVYKQYEMI

SEQ ID NO: 51998 - protein, 23 aa, Artificial Sequence
  Cyclic GFR-binding peptide
LEPLTMLYYDENEKVVEQLSNDM

SEQ ID NO: 51999 - protein, 40 aa, Artificial Sequence; identical to SEQ ID NO: 18782
  Cyclic GFR-binding peptide
  MOD_RES (4)..(5)..(37)..(39): Xaa is C or S

SEQ ID NO: 52000 - protein, 33 aa, Artificial Sequence; identical to SEQ ID NO: 18783
  Cyclic GFR-binding peptide
  MOD_RES (1)..(2): Xaa is C or S

SEQ ID NO: 52001 - protein, 38 aa, Artificial Sequence; identical to SEQ ID NO: 18784
  Cyclic GFR-binding peptide
  MOD_RES (6)..(38): Xaa is C or S

SEQ ID NO: 52002 - protein, 25 aa, Artificial Sequence
  Cyclic GFR-binding peptide
TKLEPLPVVYYDDSSNVIEQLSNNM

SEQ ID NO: 52003 - protein, 34 aa, Artificial Sequence; identical to SEQ ID NO: 18787
  Cyclic GFR-binding peptide
  MOD_RES (4)..(5): Xaa is C or S

SEQ ID NO: 52004 - protein, 39 aa, Artificial Sequence; identical to SEQ ID NO: 8499
  Cyclic GFR-binding peptide
  MOD_RES (3)..(4)..(36)..(38): Xaa is C or S

SEQ ID NO: 52005 - protein, 33 aa, Artificial Sequence; identical to SEQ ID NO: 18790
  Cyclic GFR-binding peptide
  MOD_RES (4)..(5): Xaa is C or S

SEQ ID NO: 52006 - protein, 30 aa, Artificial Sequence; identical to SEQ ID NO: 18791
  Cyclic GFR-binding peptide
  MOD_RES (4)..(5): Xaa is C or S

SEQ ID NO: 52007 - protein, 39 aa, Artificial Sequence; identical to SEQ ID NO: 18792
  Cyclic GFR-binding peptide
  MOD_RES (6)..(38): Xaa is C or S

SEQ ID NO: 52008 - protein, 27 aa, Artificial Sequence
  Cyclic GFR-binding peptide
LEPLTILYYDSANNVVEQLSNDMVVES

SEQ ID NO: 52009 - protein, 22 aa, Artificial Sequence
  Cyclic GFR-binding peptide
LSPISMLFIDENEKVVYKQYED

SEQ ID NO: 52010 - protein, 27 aa, Artificial Sequence
  Cyclic GFR-binding peptide
  MOD_RES (26)..(26): Xaa is C or S
SPISILFIIGKTPKIYKQYEMIVKSXK

SEQ ID NO: 52011 - protein, 29 aa, Artificial Sequence
  Cyclic GFR-binding peptide
  MOD_RES (2)..(3): Xaa is C or S
PXXVPQALEPLTILYYVGRKPKVEQLSNM

SEQ ID NO: 52012 - protein, 33 aa, Artificial Sequence; identical to SEQ ID NO: 18797
  Cyclic GFR-binding peptide
  MOD_RES (3)..(3): Xaa is C or S

SEQ ID NO: 52013 - protein, 28 aa, Artificial Sequence
  Cyclic GFR-binding peptide
TKLSPISVLFIDDSSNVIYKQYENMVVR

SEQ ID NO: 52014 - protein, 36 aa, Artificial Sequence; identical to SEQ ID NO: 18800
  Cyclic GFR-binding peptide
  MOD_RES (3)..(4)..(36): Xaa is C or S

SEQ ID NO: 52015 - protein, 33 aa, Artificial Sequence; identical to SEQ ID NO: 8513
  Cyclic GFR-binding peptide
  MOD_RES (5)..(6): Xaa is C or S

SEQ ID NO: 52016 - protein, 24 aa, Artificial Sequence
  Cyclic GFR-binding peptide
LEPLPIVYYIGKTPKIEQLSNMIV

SEQ ID NO: 52017 - protein, 32 aa, Artificial Sequence; identical to SEQ ID NO: 18803
  Cyclic GFR-binding peptide
  MOD_RES (6)..(7): Xaa is C or S

SEQ ID NO: 52018 - protein, 25 aa, Artificial Sequence
  Cyclic GFR-binding peptide
PTELEPLTMLYYDENEKVVEQLSND

SEQ ID NO: 52019 - protein, 39 aa, Artificial Sequence; identical to SEQ ID NO: 18807
  Cyclic GFR-binding peptide
  MOD_RES (5)..(6)..(37)..(39): Xaa is C or S

SEQ ID NO: 52020 - protein, 29 aa, Artificial Sequence
  Cyclic GFR-binding peptide
  MOD_RES (26)..(28): Xaa is C or S
NAISILYFIGKTPKILKKYRMIVKSXKXS

SEQ ID NO: 52021 - protein, 31 aa, Artificial Sequence; identical to SEQ ID NO: 18810
  Cyclic GFR-binding peptide
  MOD_RES (3)..(4): Xaa is C or S

SEQ ID NO: 52022 - protein, 21 aa, Artificial Sequence
  Cyclic GFR-binding peptide
LEPLTVLYYDDSSNVIEQLSN

SEQ ID NO: 52023 - protein, 31 aa, Artificial Sequence; identical to SEQ ID NO: 18812
  Cyclic GFR-binding peptide
  MOD_RES (5)..(6): Xaa is C or S

SEQ ID NO: 52024 - protein, 34 aa, Artificial Sequence; identical to SEQ ID NO: 8522
  Cyclic GFR-binding peptide
  MOD_RES (3)..(4): Xaa is C or S

SEQ ID NO: 52025 - protein, 30 aa, Artificial Sequence; identical to SEQ ID NO: 18814
  Cyclic GFR-binding peptide

SEQ ID NO: 52026 - protein, 36 aa, Artificial Sequence; identical to SEQ ID NO: 8525
  Cyclic GFR-binding peptide
  MOD_RES (2)..(3)..(34)..(36): Xaa is C or S

SEQ ID NO: 52027 - protein, 28 aa, Artificial Sequence
  Cyclic GFR-binding peptide
ELEPLTMLYYDEYDKVVEQLSNEMVVEG

SEQ ID NO: 52028 - protein, 27 aa, Artificial Sequence
  Cyclic GFR-binding peptide
PTKLEPLTVLYYDDSSNVIEQLSNNMV

SEQ ID NO: 52029 - protein, 28 aa, Artificial Sequence
  Cyclic GFR-binding peptide
  MOD_RES (1)..(2): Xaa is C or S
XXVPQALEPLTILYYVGRKPKVEQLSNM

SEQ ID NO: 52030 - protein, 32 aa, Artificial Sequence; identical to SEQ ID NO: 18819
  Cyclic GFR-binding peptide
  MOD_RES (2)..(3): Xaa is C or S

SEQ ID NO: 52031 - protein, 31 aa, Artificial Sequence; identical to SEQ ID NO: 8531
  Cyclic GFR-binding peptide
  MOD_RES (2)..(3): Xaa is C or S

SEQ ID NO: 52032 - protein, 23 aa, Artificial Sequence
  Cyclic GFR-binding peptide
ELNAISMLYFDENEKVVLKKYRD

SEQ ID NO: 52033 - protein, 31 aa, Artificial Sequence; identical to SEQ ID NO: 18823
  Cyclic GFR-binding peptide
  MOD_RES (31)..(31): Xaa is C or S

SEQ ID NO: 52034 - protein, 39 aa, Artificial Sequence; identical to SEQ ID NO: 18824
  Cyclic GFR-binding peptide
  MOD_RES (4)..(5)..(37)..(39): Xaa is C or S

SEQ ID NO: 52035 - protein, 28 aa, Artificial Sequence
  Cyclic GFR-binding peptide
TELEPLTMLYYDEYDKVVEQLSNEMVVE

SEQ ID NO: 52036 - protein, 25 aa, Artificial Sequence
  Cyclic GFR-binding peptide
VPTELEPLPMVYYDEYDKVVEQLSN

SEQ ID NO: 52037 - protein, 28 aa, Artificial Sequence
  Cyclic GFR-binding peptide
  MOD_RES (26)..(28): Xaa is C or S
EPLPIVYYVGRTPKVEQLSNMVVKSXKX

SEQ ID NO: 52038 - protein, 23 aa, Artificial Sequence
  Cyclic GFR-binding peptide
ELEPLPMVYYDEYDKVVEQLSNE

SEQ ID NO: 52039 - protein, 27 aa, Artificial Sequence
  Cyclic GFR-binding peptide
PTELSPISMLFIDENEKVVYKQYEDMV

SEQ ID NO: 52040 - protein, 34 aa, Artificial Sequence; identical to SEQ ID NO: 18833
  Cyclic GFR-binding peptide
  MOD_RES (2)..(3): Xaa is C or S

SEQ ID NO: 52041 - protein, 23 aa, Artificial Sequence
  Cyclic GFR-binding peptide
EPLPVVYYDDSSNVIEQLSNNMV

SEQ ID NO: 52042 - protein, 33 aa, Artificial Sequence; identical to SEQ ID NO: 18837
  Cyclic GFR-binding peptide
  MOD_RES (4)..(5): Xaa is C or S

SEQ ID NO: 52043 - protein, 34 aa, Artificial Sequence; identical to SEQ ID NO: 18838
  Cyclic GFR-binding peptide
  MOD_RES (3)..(4): Xaa is C or S

SEQ ID NO: 52044 - protein, 29 aa, Artificial Sequence
  Cyclic GFR-binding peptide
  MOD_RES (27)..(29): Xaa is C or S
LEPLTILYYVGRKPKVEQLSNMIVRSXKX

SEQ ID NO: 52045 - protein, 25 aa, Artificial Sequence
  Cyclic GFR-binding peptide
SPISILFIVGRKPKVYKQYEMIVRS

SEQ ID NO: 52046 - protein, 29 aa, Artificial Sequence
  Cyclic GFR-binding peptide
VPTELEPLTMLYYDEYDKVVEQLSNEMVV

SEQ ID NO: 52047 - protein, 31 aa, Artificial Sequence; identical to SEQ ID NO: 18843
  Cyclic GFR-binding peptide
  MOD_RES (1)..(1): Xaa is C or S

SEQ ID NO: 52048 - protein, 33 aa, Artificial Sequence; identical to SEQ ID NO: 18844
  Cyclic GFR-binding peptide
  MOD_RES (1)..(2): Xaa is C or S

SEQ ID NO: 52049 - protein, 34 aa, Artificial Sequence; identical to SEQ ID NO: 18846
  Cyclic GFR-binding peptide
  MOD_RES (32)..(34): Xaa is C or S

SEQ ID NO: 52050 - protein, 27 aa, Artificial Sequence
  Cyclic GFR-binding peptide
  MOD_RES (1)..(2): Xaa is C or S
XXVPTELEPLPMVYYDENEKVVEQLSN

SEQ ID NO: 52051 - protein, 38 aa, Artificial Sequence; identical to SEQ ID NO: 18849
  Cyclic GFR-binding peptide
  MOD_RES (3)..(4)..(36)..(38): Xaa is C or S

SEQ ID NO: 52052 - protein, 34 aa, Artificial Sequence; identical to SEQ ID NO: 18851
  Cyclic GFR-binding peptide
  MOD_RES (2)..(3): Xaa is C or S

SEQ ID NO: 52053 - protein, 40 aa, Artificial Sequence; identical to SEQ ID NO: 18852
  Cyclic GFR-binding peptide
  MOD_RES (4)..(5)..(37)..(39): Xaa is C or S

SEQ ID NO: 52054 - protein, 32 aa, Artificial Sequence; identical to SEQ ID NO: 18853
  Cyclic GFR-binding peptide
  MOD_RES (5)..(6): Xaa is C or S

SEQ ID NO: 52055 - protein, 33 aa, Artificial Sequence; identical to SEQ ID NO: 18854
  Cyclic GFR-binding peptide
  MOD_RES (4)..(5): Xaa is C or S

SEQ ID NO: 52056 - protein, 28 aa, Artificial Sequence
  Cyclic GFR-binding peptide
  MOD_RES (2)..(3): Xaa is C or S
AXXVPTELEPLPMVYYDENEKVVEQLSN

SEQ ID NO: 52057 - protein, 36 aa, Artificial Sequence; identical to SEQ ID NO: 8558
  Cyclic GFR-binding peptide
  MOD_RES (4)..(5)..(36): Xaa is C or S

SEQ ID NO: 52058 - protein, 26 aa, Artificial Sequence
  Cyclic GFR-binding peptide
TRLEPLTILYYDSANNVVEQLSNDMV

SEQ ID NO: 52059 - protein, 31 aa, Artificial Sequence; identical to SEQ ID NO: 18859
  Cyclic GFR-binding peptide
  MOD_RES (5)..(6): Xaa is C or S

SEQ ID NO: 52060 - protein, 26 aa, Artificial Sequence
  Cyclic GFR-binding peptide
LEPLTMLYYDENEKVVEQLSNDMVVE

SEQ ID NO: 52061 - protein, 30 aa, Artificial Sequence; identical to SEQ ID NO: 8563
  Cyclic GFR-binding peptide
  MOD_RES (1)..(1): Xaa is C or S

SEQ ID NO: 52062 - protein, 37 aa, Artificial Sequence; identical to SEQ ID NO: 18864
  Cyclic GFR-binding peptide
  MOD_RES (3)..(4)..(35)..(37): Xaa is C or S

SEQ ID NO: 52063 - protein, 38 aa, Artificial Sequence; identical to SEQ ID NO: 18865
  Cyclic GFR-binding peptide
  MOD_RES (4)..(5)..(37): Xaa is C or S

SEQ ID NO: 52064 - protein, 26 aa, Artificial Sequence
  Cyclic GFR-binding peptide
PTELNAISMLYFDEYDKVVLKKYREM

SEQ ID NO: 52065 - protein, 28 aa, Artificial Sequence
  Cyclic GFR-binding peptide
VPQALNAISILYFVGRKPKVLKKYRMIV

SEQ ID NO: 52066 - protein, 34 aa, Artificial Sequence; identical to SEQ ID NO: 18871
  Cyclic GFR-binding peptide
  MOD_RES (1)..(2)..(33): Xaa is C or S

SEQ ID NO: 52067 - protein, 29 aa, Artificial Sequence
  Cyclic GFR-binding peptide
  MOD_RES (1)..(1): Xaa is C or S
XVPQALNAISILYFVGRKPKVLKKYRMIV

SEQ ID NO: 52068 - protein, 36 aa, Artificial Sequence; identical to SEQ ID NO: 18874
  Cyclic GFR-binding peptide
  MOD_RES (7)..(7): Xaa is C or S

SEQ ID NO: 52069 - protein, 29 aa, Artificial Sequence
  Cyclic GFR-binding peptide
TKLSPISVLFIDDSSNVIYKQYENMVVRS

SEQ ID NO: 52070 - protein, 39 aa, Artificial Sequence; identical to SEQ ID NO: 18876
  Cyclic GFR-binding peptide
  MOD_RES (3)..(4)..(36)..(38): Xaa is C or S

SEQ ID NO: 52071 - protein, 26 aa, Artificial Sequence
  Cyclic GFR-binding peptide
ELEPLTMLYYDEYDKVVEQLSNEMVV

SEQ ID NO: 52072 - protein, 35 aa, Artificial Sequence; identical to SEQ ID NO: 18878
  Cyclic GFR-binding peptide
  MOD_RES (3)..(4)..(35): Xaa is C or S

SEQ ID NO: 52073 - protein, 30 aa, Artificial Sequence; identical to SEQ ID NO: 18879
  Cyclic GFR-binding peptide
  MOD_RES (4)..(5): Xaa is C or S

SEQ ID NO: 52074 - protein, 30 aa, Artificial Sequence; identical to SEQ ID NO: 18880
  Cyclic GFR-binding peptide
  MOD_RES (1)..(2): Xaa is C or S

SEQ ID NO: 52075 - protein, 30 aa, Artificial Sequence; identical to SEQ ID NO: 18881
  Cyclic GFR-binding peptide
  MOD_RES (30)..(30): Xaa is C or S

SEQ ID NO: 52076 - protein, 24 aa, Artificial Sequence
  Cyclic GFR-binding peptide
TELNAISMLYFDEYDKVVLKKYRE

SEQ ID NO: 52077 - protein, 24 aa, Artificial Sequence
  Cyclic GFR-binding peptide
PTRLNAISILYFDSANNVVLKKYR

SEQ ID NO: 52078 - protein, 34 aa, Artificial Sequence; identical to SEQ ID NO: 18884
  Cyclic GFR-binding peptide
  MOD_RES (1)..(33): Xaa is C or S

SEQ ID NO: 52079 - protein, 35 aa, Artificial Sequence; identical to SEQ ID NO: 18885
  Cyclic GFR-binding peptide
  MOD_RES (4)..(5): Xaa is C or S

SEQ ID NO: 52080 - protein, 36 aa, Artificial Sequence; identical to SEQ ID NO: 18886
  Cyclic GFR-binding peptide
  MOD_RES (1)..(2)..(34)..(36): Xaa is C or S

SEQ ID NO: 52081 - protein, 32 aa, Artificial Sequence; identical to SEQ ID NO: 18887
  Cyclic GFR-binding peptide
  MOD_RES (6)..(7): Xaa is C or S

SEQ ID NO: 52082 - protein, 29 aa, Artificial Sequence
  Cyclic GFR-binding peptide
  MOD_RES (3)..(4): Xaa is C or S
KPXXAPTKLSPISVLFIDDSSNVIYKQYE

SEQ ID NO: 52083 - protein, 38 aa, Artificial Sequence; identical to SEQ ID NO: 18889
  Cyclic GFR-binding peptide
  MOD_RES (2)..(3)..(35)..(37): Xaa is C or S

SEQ ID NO: 52084 - protein, 33 aa, Artificial Sequence; identical to SEQ ID NO: 18890
  Cyclic GFR-binding peptide
  MOD_RES (1)..(2)..(33): Xaa is C or S

SEQ ID NO: 52085 - protein, 27 aa, Artificial Sequence
  Cyclic GFR-binding peptide
QLEPLTVLYYDDSSNVIEQLSNNMVVR

SEQ ID NO: 52086 - protein, 31 aa, Artificial Sequence; identical to SEQ ID NO: 18892
  Cyclic GFR-binding peptide
  MOD_RES (31)..(31): Xaa is C or S

SEQ ID NO: 52087 - protein, 27 aa, Artificial Sequence
  Cyclic GFR-binding peptide
  MOD_RES (1)..(1): Xaa is C or S
XVPQALSPISILFIVGRKPKVYKQYEM

SEQ ID NO: 52088 - protein, 30 aa, Artificial Sequence; identical to SEQ ID NO: 18894
  Cyclic GFR-binding peptide
  MOD_RES (1)..(1): Xaa is C or S

SEQ ID NO: 52089 - protein, 26 aa, Artificial Sequence
  Cyclic GFR-binding peptide
EPLTVLYYDDSSNVIEQLSNNMVVRA

SEQ ID NO: 52090 - protein, 36 aa, Artificial Sequence; identical to SEQ ID NO: 18896
  Cyclic GFR-binding peptide
  MOD_RES (6)..(7): Xaa is C or S

SEQ ID NO: 52091 - protein, 28 aa, Artificial Sequence
  Cyclic GFR-binding peptide
  MOD_RES (27)..(27): Xaa is C or S
EPLTILYYDSANNVVEQLSNDMVVESXG

SEQ ID NO: 52092 - protein, 35 aa, Artificial Sequence; identical to SEQ ID NO: 18899
  Cyclic GFR-binding peptide
  MOD_RES (2)..(34): Xaa is C or S

SEQ ID NO: 52093 - protein, 25 aa, Artificial Sequence
  Cyclic GFR-binding peptide
TQLEPLPVVYYDDSSNVIEQLSNNM

SEQ ID NO: 52094 - protein, 30 aa, Artificial Sequence; identical to SEQ ID NO: 18902
  Cyclic GFR-binding peptide
  MOD_RES (5)..(5): Xaa is C or S

SEQ ID NO: 52095 - protein, 33 aa, Artificial Sequence; identical to SEQ ID NO: 18903
  Cyclic GFR-binding peptide
  MOD_RES (3)..(4): Xaa is C or S

SEQ ID NO: 52096 - protein, 25 aa, Artificial Sequence
  Cyclic GFR-binding peptide
EPLPVVYYDDSSNVIEQLSNNMVVR

SEQ ID NO: 52097 - protein, 27 aa, Artificial Sequence
  Cyclic GFR-binding peptide
ALEPLTILYYVGRKPKVEQLSNMIVRS

SEQ ID NO: 52098 - protein, 23 aa, Artificial Sequence
  Cyclic GFR-binding peptide
ELSPISMLFIDEYDKVVYKQYEE

SEQ ID NO: 52099 - protein, 35 aa, Artificial Sequence; identical to SEQ ID NO: 18908
  Cyclic GFR-binding peptide
  MOD_RES (3)..(4): Xaa is C or S

SEQ ID NO: 52100 - protein, 40 aa, Artificial Sequence; identical to SEQ ID NO: 18909
  Cyclic GFR-binding peptide
  MOD_RES (5)..(6)..(37)..(39): Xaa is C or S

SEQ ID NO: 52101 - protein, 27 aa, Artificial Sequence
  Cyclic GFR-binding peptide
  MOD_RES (27)..(27): Xaa is C or S
EPLPIVYYDSANNVVEQLSNDMVVESX

SEQ ID NO: 52102 - protein, 34 aa, Artificial Sequence; identical to SEQ ID NO: 8612
  Cyclic GFR-binding peptide
  MOD_RES (5)..(6): Xaa is C or S

SEQ ID NO: 52103 - protein, 28 aa, Artificial Sequence
  Cyclic GFR-binding peptide
  MOD_RES (1)..(1): Xaa is C or S
XVPTELEPLTMLYYDENEKVVEQLSNDM

SEQ ID NO: 52104 - protein, 33 aa, Artificial Sequence; identical to SEQ ID NO: 18915
  Cyclic GFR-binding peptide
  MOD_RES (5)..(6): Xaa is C or S

SEQ ID NO: 52105 - protein, 38 aa, Artificial Sequence; identical to SEQ ID NO: 8613
  Cyclic GFR-binding peptide
  MOD_RES (2)..(3)..(35)..(37): Xaa is C or S

SEQ ID NO: 52106 - protein, 23 aa, Artificial Sequence
  Cyclic GFR-binding peptide
LSPISILFIIGKTPKIYKQYEMI

SEQ ID NO: 52107 - protein, 30 aa, Artificial Sequence; identical to SEQ ID NO: 18918
  Cyclic GFR-binding peptide
  MOD_RES (3)..(4): Xaa is C or S

SEQ ID NO: 52108 - protein, 33 aa, Artificial Sequence; identical to SEQ ID NO: 18920
  Cyclic GFR-binding peptide
  MOD_RES (4)..(5): Xaa is C or S

SEQ ID NO: 52109 - protein, 33 aa, Artificial Sequence; identical to SEQ ID NO: 18921
  Cyclic GFR-binding peptide
  MOD_RES (6)..(7): Xaa is C or S

SEQ ID NO: 52110 - protein, 38 aa, Artificial Sequence; identical to SEQ ID NO: 18922
  Cyclic GFR-binding peptide
  MOD_RES (4)..(5)..(37): Xaa is C or S

SEQ ID NO: 52111 - protein, 29 aa, Artificial Sequence
  Cyclic GFR-binding peptide
TELEPLPMVYYDENEKVVEQLSNDMVVEG

SEQ ID NO: 52112 - protein, 32 aa, Artificial Sequence; identical to SEQ ID NO: 8618
  Cyclic GFR-binding peptide
  MOD_RES (31)..(31): Xaa is C or S

SEQ ID NO: 52113 - protein, 30 aa, Artificial Sequence; identical to SEQ ID NO: 18927
  Cyclic GFR-binding peptide
  MOD_RES (3)..(3): Xaa is C or S

SEQ ID NO: 52114 - protein, 32 aa, Artificial Sequence; identical to SEQ ID NO: 18928
  Cyclic GFR-binding peptide
  MOD_RES (5)..(6): Xaa is C or S

SEQ ID NO: 52115 - protein, 33 aa, Artificial Sequence; identical to SEQ ID NO: 18929
  Cyclic GFR-binding peptide
  MOD_RES (3)..(4): Xaa is C or S

SEQ ID NO: 52116 - protein, 31 aa, Artificial Sequence; identical to SEQ ID NO: 18930
  Cyclic GFR-binding peptide
  MOD_RES (3)..(4): Xaa is C or S

SEQ ID NO: 52117 - protein, 25 aa, Artificial Sequence
  Cyclic GFR-binding peptide
EPLTMLYYDEYDKVVEQLSNEMVVE

SEQ ID NO: 52118 - protein, 27 aa, Artificial Sequence
  Cyclic GFR-binding peptide
LSPISMLFIDEYDKVVYKQYEEMVVEG

SEQ ID NO: 52119 - protein, 41 aa, Artificial Sequence; identical to SEQ ID NO: 18933
  Cyclic GFR-binding peptide
  MOD_RES (5)..(6)..(38)..(40): Xaa is C or S

SEQ ID NO: 52120 - protein, 25 aa, Artificial Sequence
  Cyclic GFR-binding peptide
RLEPLTILYYDSANNVVEQLSNDMV

SEQ ID NO: 52121 - protein, 35 aa, Artificial Sequence; identical to SEQ ID NO: 18936
  Cyclic GFR-binding peptide
  MOD_RES (5)..(6): Xaa is C or S

SEQ ID NO: 52122 - protein, 33 aa, Artificial Sequence; identical to SEQ ID NO: 8627
  Cyclic GFR-binding peptide
  MOD_RES (6)..(7): Xaa is C or S

SEQ ID NO: 52123 - protein, 39 aa, Artificial Sequence; identical to SEQ ID NO: 18938
  Cyclic GFR-binding peptide
  MOD_RES (5)..(6)..(38): Xaa is C or S

SEQ ID NO: 52124 - protein, 26 aa, Artificial Sequence
  Cyclic GFR-binding peptide
EPLTVLYYDDSSNVIEQLSNNMVVRS

SEQ ID NO: 52125 - protein, 29 aa, Artificial Sequence
  Cyclic GFR-binding peptide
  MOD_RES (1)..(1): Xaa is C or S
XAPTQLSPISVLFIDDSSNVIYKQYENMV

SEQ ID NO: 52126 - protein, 34 aa, Artificial Sequence; identical to SEQ ID NO: 18942
  Cyclic GFR-binding peptide
  MOD_RES (5)..(6): Xaa is C or S

SEQ ID NO: 52127 - protein, 31 aa, Artificial Sequence; identical to SEQ ID NO: 8634
  Cyclic GFR-binding peptide
  MOD_RES (3)..(4): Xaa is C or S

SEQ ID NO: 52128 - protein, 22 aa, Artificial Sequence
  Cyclic GFR-binding peptide
LNAISMLYFDEYDKVVLKKYRE

SEQ ID NO: 52129 - protein, 21 aa, Artificial Sequence
  Cyclic GFR-binding peptide
EPLPIVYYDSANNVVEQLSND

SEQ ID NO: 52130 - protein, 31 aa, Artificial Sequence; identical to SEQ ID NO: 18950
  Cyclic GFR-binding peptide
  MOD_RES (5)..(6): Xaa is C or S

SEQ ID NO: 52131 - protein, 30 aa, Artificial Sequence; identical to SEQ ID NO: 18951
  Cyclic GFR-binding peptide
  MOD_RES (3)..(4): Xaa is C or S

SEQ ID NO: 52132 - protein, 25 aa, Artificial Sequence
  Cyclic GFR-binding peptide
APTQLEPLTVLYYDDSSNVIEQLSN

SEQ ID NO: 52133 - protein, 25 aa, Artificial Sequence
  Cyclic GFR-binding peptide
ELEPLTMLYYDEYDKVVEQLSNEMV

SEQ ID NO: 52134 - protein, 33 aa, Artificial Sequence; identical to SEQ ID NO: 18954
  Cyclic GFR-binding peptide
  MOD_RES (7)..(7): Xaa is C or S

SEQ ID NO: 52135 - protein, 27 aa, Artificial Sequence
  Cyclic GFR-binding peptide
  MOD_RES (27)..(27): Xaa is C or S
EPLTILYYDSANNVVEQLSNDMVVESX

SEQ ID NO: 52136 - protein, 23 aa, Artificial Sequence
  Cyclic GFR-binding peptide
NAISILYFVGRKPKVLKKYRMIV

SEQ ID NO: 52137 - protein, 34 aa, Artificial Sequence; identical to SEQ ID NO: 18957
  Cyclic GFR-binding peptide
  MOD_RES (2)..(3): Xaa is C or S

SEQ ID NO: 52138 - protein, 37 aa, Artificial Sequence; identical to SEQ ID NO: 18958
  Cyclic GFR-binding peptide
  MOD_RES (4)..(5)..(37): Xaa is C or S

SEQ ID NO: 52139 - protein, 29 aa, Artificial Sequence
  Cyclic GFR-binding peptide
  MOD_RES (2)..(3): Xaa is C or S
AXXVPTELSPISMLFIDEYDKVVYKQYEE

SEQ ID NO: 52140 - protein, 23 aa, Artificial Sequence
  Cyclic GFR-binding peptide
LSPISMLFIDENEKVVYKQYEDM

SEQ ID NO: 52141 - protein, 35 aa, Artificial Sequence; identical to SEQ ID NO: 18962
  Cyclic GFR-binding peptide
  MOD_RES (6)..(7): Xaa is C or S

SEQ ID NO: 52142 - protein, 29 aa, Artificial Sequence
  Cyclic GFR-binding peptide
  MOD_RES (27)..(29): Xaa is C or S
LNAISILYFVGRTPKVLKKYRMVVKSXKX

SEQ ID NO: 52143 - protein, 28 aa, Artificial Sequence
  Cyclic GFR-binding peptide
  MOD_RES (28)..(28): Xaa is C or S
DLNAISILYFIGKTPKILKKYRMIVKSX

SEQ ID NO: 52144 - protein, 40 aa, Artificial Sequence; identical to SEQ ID NO: 8654
  Cyclic GFR-binding peptide
  MOD_RES (6)..(7)..(38)..(40): Xaa is C or S

SEQ ID NO: 52145 - protein, 30 aa, Artificial Sequence; identical to SEQ ID NO: 18966
  Cyclic GFR-binding peptide
  MOD_RES (3)..(4): Xaa is C or S

SEQ ID NO: 52146 - protein, 38 aa, Artificial Sequence; identical to SEQ ID NO: 8656
  Cyclic GFR-binding peptide
  MOD_RES (6)..(7)..(38): Xaa is C or S

SEQ ID NO: 52147 - protein, 27 aa, Artificial Sequence
  Cyclic GFR-binding peptide
  MOD_RES (1)..(2): Xaa is C or S
XXVPTRLNAISILYFDSANNVVLKKYR

SEQ ID NO: 52148 - protein, 30 aa, Artificial Sequence; identical to SEQ ID NO: 18969
  Cyclic GFR-binding peptide
  MOD_RES (2)..(3): Xaa is C or S

SEQ ID NO: 52149 - protein, 39 aa, Artificial Sequence; identical to SEQ ID NO: 8659
  Cyclic GFR-binding peptide
  MOD_RES (5)..(6)..(37)..(39): Xaa is C or S

SEQ ID NO: 52150 - protein, 31 aa, Artificial Sequence; identical to SEQ ID NO: 18971
  Cyclic GFR-binding peptide

SEQ ID NO: 52151 - protein, 25 aa, Artificial Sequence
  Cyclic GFR-binding peptide
QLEPLTVLYYDDSSNVIEQLSNNMV

SEQ ID NO: 52152 - protein, 40 aa, Artificial Sequence; identical to SEQ ID NO: 18975
  Cyclic GFR-binding peptide
  MOD_RES (6)..(7)..(39): Xaa is C or S

SEQ ID NO: 52153 - protein, 29 aa, Artificial Sequence
  Cyclic GFR-binding peptide
  MOD_RES (2)..(3): Xaa is C or S
AXXVPTELEPLTMLYYDEYDKVVEQLSNE

SEQ ID NO: 52154 - protein, 35 aa, Artificial Sequence; identical to SEQ ID NO: 18977
  Cyclic GFR-binding peptide
  MOD_RES (32)..(34): Xaa is C or S

SEQ ID NO: 52155 - protein, 40 aa, Artificial Sequence; identical to SEQ ID NO: 18978
  Cyclic GFR-binding peptide
  MOD_RES (6)..(7)..(38)..(40): Xaa is C or S

SEQ ID NO: 52156 - protein, 32 aa, Artificial Sequence; identical to SEQ ID NO: 18979
  Cyclic GFR-binding peptide
  MOD_RES (5)..(6): Xaa is C or S

SEQ ID NO: 52157 - protein, 33 aa, Artificial Sequence; identical to SEQ ID NO: 18980
  Cyclic GFR-binding peptide
  MOD_RES (1)..(32): Xaa is C or S

SEQ ID NO: 52158 - protein, 31 aa, Artificial Sequence; identical to SEQ ID NO: 18981
  Cyclic GFR-binding peptide
  MOD_RES (3)..(4): Xaa is C or S

SEQ ID NO: 52159 - protein, 26 aa, Artificial Sequence
  Cyclic GFR-binding peptide
  MOD_RES (1)..(1): Xaa is C or S
XVPTRLNAISILYFDSANNVVLKKYR

SEQ ID NO: 52160 - protein, 31 aa, Artificial Sequence; identical to SEQ ID NO: 8673
  Cyclic GFR-binding peptide
  MOD_RES (28)..(30): Xaa is C or S

SEQ ID NO: 52161 - protein, 32 aa, Artificial Sequence; identical to SEQ ID NO: 18984
  Cyclic GFR-binding peptide
  MOD_RES (1)..(1): Xaa is C or S

SEQ ID NO: 52162 - protein, 36 aa, Artificial Sequence; identical to SEQ ID NO: 8678
  Cyclic GFR-binding peptide
  MOD_RES (3)..(4)..(36): Xaa is C or S

SEQ ID NO: 52163 - protein, 29 aa, Artificial Sequence
  Cyclic GFR-binding peptide
  MOD_RES (1)..(1): Xaa is C or S
XVSQDLSPISILFIIGKTPKIYKQYEMIV

SEQ ID NO: 52164 - protein, 30 aa, Artificial Sequence; identical to SEQ ID NO: 18988
  Cyclic GFR-binding peptide
  MOD_RES (1)..(1): Xaa is C or S

SEQ ID NO: 52165 - protein, 34 aa, Artificial Sequence; identical to SEQ ID NO: 18989
  Cyclic GFR-binding peptide
  MOD_RES (2)..(3)..(34): Xaa is C or S

SEQ ID NO: 52166 - protein, 26 aa, Artificial Sequence
  Cyclic GFR-binding peptide
PQDLSPISILFIVGRTPKVYKQYEMV

SEQ ID NO: 52167 - protein, 29 aa, Artificial Sequence
  Cyclic GFR-binding peptide
  MOD_RES (1)..(2): Xaa is C or S
XXVPTELEPLPMVYYDEYDKVVEQLSNEM

SEQ ID NO: 52168 - protein, 30 aa, Artificial Sequence; identical to SEQ ID NO: 18993
  Cyclic GFR-binding peptide
  MOD_RES (28)..(30): Xaa is C or S

SEQ ID NO: 52169 - protein, 37 aa, Artificial Sequence; identical to SEQ ID NO: 18994
  Cyclic GFR-binding peptide
  MOD_RES (6)..(7): Xaa is C or S

SEQ ID NO: 52170 - protein, 24 aa, Artificial Sequence
  Cyclic GFR-binding peptide
SPISILFIIGKTPKIYKQYEMIVK

SEQ ID NO: 52171 - protein, 37 aa, Artificial Sequence; identical to SEQ ID NO: 18996
  Cyclic GFR-binding peptide
  MOD_RES (5)..(6): Xaa is C or S

SEQ ID NO: 52172 - protein, 26 aa, Artificial Sequence
  Cyclic GFR-binding peptide
ALSPISILFIVGRKPKVYKQYEMIVR

SEQ ID NO: 52173 - protein, 23 aa, Artificial Sequence
  Cyclic GFR-binding peptide
QALSPISILFIVGRKPKVYKQYE

SEQ ID NO: 52174 - protein, 31 aa, Artificial Sequence; identical to SEQ ID NO: 18999
  Cyclic GFR-binding peptide

SEQ ID NO: 52175 - protein, 32 aa, Artificial Sequence; identical to SEQ ID NO: 19000
  Cyclic GFR-binding peptide
  MOD_RES (1)..(1): Xaa is C or S

SEQ ID NO: 52176 - protein, 29 aa, Artificial Sequence
  Cyclic GFR-binding peptide
  MOD_RES (27)..(29): Xaa is C or S
EPLTVLYYDDSSNVIEQLSNNMVVRAXGX

SEQ ID NO: 52177 - protein, 37 aa, Artificial Sequence; identical to SEQ ID NO: 8687
  Cyclic GFR-binding peptide
  MOD_RES (5)..(6)..(37): Xaa is C or S

SEQ ID NO: 52178 - protein, 30 aa, Artificial Sequence; identical to SEQ ID NO: 19004
  Cyclic GFR-binding peptide
  MOD_RES (2)..(2): Xaa is C or S

SEQ ID NO: 52179 - protein, 29 aa, Artificial Sequence
  Cyclic GFR-binding peptide
  MOD_RES (3)..(4): Xaa is C or S
APXXVPQALEPLTILYYVGRKPKVEQLSN

SEQ ID NO: 52180 - protein, 37 aa, Artificial Sequence; identical to SEQ ID NO: 8690
  Cyclic GFR-binding peptide
  MOD_RES (4)..(5)..(37): Xaa is C or S

SEQ ID NO: 52181 - protein, 38 aa, Artificial Sequence; identical to SEQ ID NO: 19007
  Cyclic GFR-binding peptide
  MOD_RES (4)..(5)..(37): Xaa is C or S

SEQ ID NO: 52182 - protein, 37 aa, Artificial Sequence; identical to SEQ ID NO: 19008
  Cyclic GFR-binding peptide
  MOD_RES (2)..(3)..(35)..(37): Xaa is C or S

SEQ ID NO: 52183 - protein, 27 aa, Artificial Sequence
  Cyclic GFR-binding peptide
PQALNAISILYFVGRKPKVLKKYRMIV

SEQ ID NO: 52184 - protein, 37 aa, Artificial Sequence; identical to SEQ ID NO: 19010
  Cyclic GFR-binding peptide
  MOD_RES (4)..(5)..(36): Xaa is C or S

SEQ ID NO: 52185 - protein, 20 aa, Artificial Sequence
  Cyclic GFR-binding peptide
EPLTVLYYDDSSNVIEQLSN

SEQ ID NO: 52186 - protein, 23 aa, Artificial Sequence
  Cyclic GFR-binding peptide
ELEPLTMLYYDEYDKVVEQLSNE

SEQ ID NO: 52187 - protein, 33 aa, Artificial Sequence; identical to SEQ ID NO: 19013
  Cyclic GFR-binding peptide
  MOD_RES (7)..(7): Xaa is C or S

SEQ ID NO: 52188 - protein, 24 aa, Artificial Sequence
  Cyclic GFR-binding peptide
SPISILFIVGRTPKVYKQYEMVVK

SEQ ID NO: 52189 - protein, 21 aa, Artificial Sequence
  Cyclic GFR-binding peptide
EPLTILYYDSANNVVEQLSND

SEQ ID NO: 52190 - protein, 34 aa, Artificial Sequence; identical to SEQ ID NO: 19017
  Cyclic GFR-binding peptide
  MOD_RES (6)..(7): Xaa is C or S

SEQ ID NO: 52191 - protein, 29 aa, Artificial Sequence
  Cyclic GFR-binding peptide
VSQDLEPLPIVYYIGKTPKIEQLSNMIVK

SEQ ID NO: 52192 - protein, 27 aa, Artificial Sequence
  Cyclic GFR-binding peptide
VPTELNAISMLYFDEYDKVVLKKYREM

SEQ ID NO: 52193 - protein, 30 aa, Artificial Sequence; identical to SEQ ID NO: 19024
  Cyclic GFR-binding peptide
  MOD_RES (29)..(29): Xaa is C or S

SEQ ID NO: 52194 - protein, 31 aa, Artificial Sequence; identical to SEQ ID NO: 19026
  Cyclic GFR-binding peptide
  MOD_RES (3)..(4): Xaa is C or S

SEQ ID NO: 52195 - protein, 30 aa, Artificial Sequence; identical to SEQ ID NO: 8733
  Cyclic GFR-binding peptide

SEQ ID NO: 52196 - protein, 38 aa, Artificial Sequence; identical to SEQ ID NO: 19028
  Cyclic GFR-binding peptide
  MOD_RES (2)..(3)..(35)..(37): Xaa is C or S

SEQ ID NO: 52197 - protein, 37 aa, Artificial Sequence; identical to SEQ ID NO: 19029
  Cyclic GFR-binding peptide
  MOD_RES (4)..(5)..(36): Xaa is C or S

SEQ ID NO: 52198 - protein, 39 aa, Artificial Sequence; identical to SEQ ID NO: 19030
  Cyclic GFR-binding peptide
  MOD_RES (4)..(36)..(38): Xaa is C or S

SEQ ID NO: 52199 - protein, 27 aa, Artificial Sequence
  Cyclic GFR-binding peptide
ELEPLPMVYYDENEKVVEQLSNDMVVE

SEQ ID NO: 52200 - protein, 31 aa, Artificial Sequence; identical to SEQ ID NO: 19033
  Cyclic GFR-binding peptide
  MOD_RES (4)..(5): Xaa is C or S

SEQ ID NO: 52201 - protein, 30 aa, Artificial Sequence; identical to SEQ ID NO: 19034
  Cyclic GFR-binding peptide
  MOD_RES (4)..(5): Xaa is C or S

SEQ ID NO: 52202 - protein, 36 aa, Artificial Sequence; identical to SEQ ID NO: 19035
  Cyclic GFR-binding peptide
  MOD_RES (1)..(2)..(33)..(35): Xaa is C or S

SEQ ID NO: 52203 - protein, 41 aa, Artificial Sequence; identical to SEQ ID NO: 19036
  Cyclic GFR-binding peptide
  MOD_RES (6)..(38)..(40): Xaa is C or S

SEQ ID NO: 52204 - protein, 28 aa, Artificial Sequence
  Cyclic GFR-binding peptide
  MOD_RES (2)..(3): Xaa is C or S
PXXVPQDLSPISILFIVGRTPKVYKQYE

SEQ ID NO: 52205 - protein, 36 aa, Artificial Sequence; identical to SEQ ID NO: 19040
  Cyclic GFR-binding peptide
  MOD_RES (4)..(5): Xaa is C or S

SEQ ID NO: 52206 - protein, 38 aa, Artificial Sequence; identical to SEQ ID NO: 8758
  Cyclic GFR-binding peptide
  MOD_RES (6)..(7)..(38): Xaa is C or S

SEQ ID NO: 52207 - protein, 34 aa, Artificial Sequence; identical to SEQ ID NO: 19043
  Cyclic GFR-binding peptide
  MOD_RES (5)..(5): Xaa is C or S

SEQ ID NO: 52208 - protein, 34 aa, Artificial Sequence; identical to SEQ ID NO: 8760
  Cyclic GFR-binding peptide
  MOD_RES (2)..(3): Xaa is C or S

SEQ ID NO: 52209 - protein, 29 aa, Artificial Sequence
  Cyclic GFR-binding peptide
  MOD_RES (27)..(29): Xaa is C or S
SPISVLFIDDSSNVIYKQYENMVVRAXGX

SEQ ID NO: 52210 - protein, 23 aa, Artificial Sequence
  Cyclic GFR-binding peptide
RLNAISILYFDSANNVVLKKYRD

SEQ ID NO: 52211 - protein, 28 aa, Artificial Sequence
  Cyclic GFR-binding peptide
PTELEPLTMLYYDENEKVVEQLSNDMVV

SEQ ID NO: 52212 - protein, 31 aa, Artificial Sequence; identical to SEQ ID NO: 19048
  Cyclic GFR-binding peptide
  MOD_RES (29)..(31): Xaa is C or S

SEQ ID NO: 52213 - protein, 33 aa, Artificial Sequence; identical to SEQ ID NO: 19050
  Cyclic GFR-binding peptide
  MOD_RES (5)..(5): Xaa is C or S

SEQ ID NO: 52214 - protein, 32 aa, Artificial Sequence; identical to SEQ ID NO: 19051
  Cyclic GFR-binding peptide
  MOD_RES (5)..(6): Xaa is C or S

SEQ ID NO: 52215 - protein, 21 aa, Artificial Sequence
  Cyclic GFR-binding peptide
NAISILYFVGRKPKVLKKYRM

SEQ ID NO: 52216 - protein, 27 aa, Artificial Sequence
  Cyclic GFR-binding peptide
VPTELEPLTMLYYDENEKVVEQLSNDM

SEQ ID NO: 52217 - protein, 32 aa, Artificial Sequence; identical to SEQ ID NO: 19055
  Cyclic GFR-binding peptide
  MOD_RES (31)..(31): Xaa is C or S

SEQ ID NO: 52218 - protein, 36 aa, Artificial Sequence; identical to SEQ ID NO: 19056
  Cyclic GFR-binding peptide
  MOD_RES (1)..(2)..(34)..(36): Xaa is C or S

SEQ ID NO: 52219 - protein, 34 aa, Artificial Sequence; identical to SEQ ID NO: 19057
  Cyclic GFR-binding peptide
  MOD_RES (1)..(33): Xaa is C or S

SEQ ID NO: 52220 - protein, 30 aa, Artificial Sequence; identical to SEQ ID NO: 8770
  Cyclic GFR-binding peptide
  MOD_RES (27)..(29): Xaa is C or S

SEQ ID NO: 52221 - protein, 24 aa, Artificial Sequence
  Cyclic GFR-binding peptide
PTELEPLPMVYYDENEKVVEQLSN

SEQ ID NO: 52222 - protein, 41 aa, Artificial Sequence; identical to SEQ ID NO: 8776
  Cyclic GFR-binding peptide
  MOD_RES (6)..(7)..(38)..(40): Xaa is C or S

SEQ ID NO: 52223 - protein, 26 aa, Artificial Sequence
  Cyclic GFR-binding peptide
LEPLPIVYYIGKTPKIEQLSNMIVKS

SEQ ID NO: 52224 - protein, 28 aa, Artificial Sequence
  Cyclic GFR-binding peptide
  MOD_RES (1)..(2): Xaa is C or S
XXVPQALSPISILFIVGRKPKVYKQYEM

SEQ ID NO: 52225 - protein, 30 aa, Artificial Sequence; identical to SEQ ID NO: 19064
  Cyclic GFR-binding peptide
  MOD_RES (2)..(3): Xaa is C or S

SEQ ID NO: 52226 - protein, 28 aa, Artificial Sequence
  Cyclic GFR-binding peptide
ELNAISMLYFDEYDKVVLKKYREMVVEG

SEQ ID NO: 52227 - protein, 31 aa, Artificial Sequence; identical to SEQ ID NO: 8784
  Cyclic GFR-binding peptide
  MOD_RES (4)..(5): Xaa is C or S

SEQ ID NO: 52228 - protein, 32 aa, Artificial Sequence; identical to SEQ ID NO: 19068
  Cyclic GFR-binding peptide
  MOD_RES (1)..(2): Xaa is C or S

SEQ ID NO: 52229 - protein, 35 aa, Artificial Sequence; identical to SEQ ID NO: 19069
  Cyclic GFR-binding peptide
  MOD_RES (1)..(33)..(35): Xaa is C or S

SEQ ID NO: 52230 - protein, 30 aa, Artificial Sequence; identical to SEQ ID NO: 19070
  Cyclic GFR-binding peptide
  MOD_RES (2)..(3): Xaa is C or S

SEQ ID NO: 52231 - protein, 22 aa, Artificial Sequence
  Cyclic GFR-binding peptide
EPLTMLYYDEYDKVVEQLSNEM

SEQ ID NO: 52232 - protein, 32 aa, Artificial Sequence; identical to SEQ ID NO: 19072
  Cyclic GFR-binding peptide
  MOD_RES (6)..(7): Xaa is C or S

SEQ ID NO: 52233 - protein, 27 aa, Artificial Sequence
  Cyclic GFR-binding peptide
  MOD_RES (1)..(2): Xaa is C or S
XXVPQALEPLTILYYVGRKPKVEQLSN

SEQ ID NO: 52234 - protein, 30 aa, Artificial Sequence; identical to SEQ ID NO: 19075
  Cyclic GFR-binding peptide
  MOD_RES (3)..(4): Xaa is C or S

SEQ ID NO: 52235 - protein, 29 aa, Artificial Sequence
  Cyclic GFR-binding peptide
  MOD_RES (29)..(29): Xaa is C or S
KLEPLTVLYYDDSSNVIEQLSNNMVVRSX

SEQ ID NO: 52236 - protein, 35 aa, Artificial Sequence; identical to SEQ ID NO: 19077
  Cyclic GFR-binding peptide
  MOD_RES (5)..(6): Xaa is C or S

SEQ ID NO: 52237 - protein, 25 aa, Artificial Sequence
  Cyclic GFR-binding peptide
PTELNAISMLYFDEYDKVVLKKYRE

SEQ ID NO: 52238 - protein, 28 aa, Artificial Sequence
  Cyclic GFR-binding peptide
  MOD_RES (28)..(28): Xaa is C or S
LEPLPVVYYDDSSNVIEQLSNNMVVRAX

SEQ ID NO: 52239 - protein, 31 aa, Artificial Sequence; identical to SEQ ID NO: 19080
  Cyclic GFR-binding peptide
  MOD_RES (1)..(1): Xaa is C or S

SEQ ID NO: 52240 - protein, 32 aa, Artificial Sequence; identical to SEQ ID NO: 8797
  Cyclic GFR-binding peptide
  MOD_RES (1)..(32): Xaa is C or S

SEQ ID NO: 52241 - protein, 31 aa, Artificial Sequence; identical to SEQ ID NO: 8798
  Cyclic GFR-binding peptide
  MOD_RES (31)..(31): Xaa is C or S

SEQ ID NO: 52242 - protein, 23 aa, Artificial Sequence
  Cyclic GFR-binding peptide
TELNAISMLYFDEYDKVVLKKYR

SEQ ID NO: 52243 - protein, 24 aa, Artificial Sequence
  Cyclic GFR-binding peptide
SPISVLFIDDSSNVIYKQYENMVV

SEQ ID NO: 52244 - protein, 30 aa, Artificial Sequence; identical to SEQ ID NO: 8804
  Cyclic GFR-binding peptide
  MOD_RES (3)..(4): Xaa is C or S

SEQ ID NO: 52245 - protein, 35 aa, Artificial Sequence; identical to SEQ ID NO: 19087
  Cyclic GFR-binding peptide
  MOD_RES (2)..(34): Xaa is C or S

SEQ ID NO: 52246 - protein, 40 aa, Artificial Sequence; identical to SEQ ID NO: 8807
  Cyclic GFR-binding peptide
  MOD_RES (6)..(7)..(38)..(40): Xaa is C or S

SEQ ID NO: 52247 - protein, 26 aa, Artificial Sequence
  Cyclic GFR-binding peptide
SQDLSPISILFIIGKTPKIYKQYEMI

SEQ ID NO: 52248 - protein, 30 aa, Artificial Sequence; identical to SEQ ID NO: 8810
  Cyclic GFR-binding peptide
  MOD_RES (29)..(29): Xaa is C or S

SEQ ID NO: 52249 - protein, 24 aa, Artificial Sequence
  Cyclic GFR-binding peptide
TQLEPLTVLYYDDSSNVIEQLSNN

SEQ ID NO: 52250 - protein, 25 aa, Artificial Sequence
  Cyclic GFR-binding peptide
ELSPISMLFIDENEKVVYKQYEDMV

SEQ ID NO: 52251 - protein, 37 aa, Artificial Sequence; identical to SEQ ID NO: 8814
  Cyclic GFR-binding peptide
  MOD_RES (2)..(3)..(34)..(36): Xaa is C or S

SEQ ID NO: 52252 - protein, 34 aa, Artificial Sequence; identical to SEQ ID NO: 19095
  Cyclic GFR-binding peptide
  MOD_RES (2)..(3)..(34): Xaa is C or S

SEQ ID NO: 52253 - protein, 28 aa, Artificial Sequence
  Cyclic GFR-binding peptide
  MOD_RES (1)..(1): Xaa is C or S
XAPTQLSPISVLFIDDSSNVIYKQYENM

SEQ ID NO: 52254 - protein, 31 aa, Artificial Sequence; identical to SEQ ID NO: 19097
  Cyclic GFR-binding peptide
  MOD_RES (4)..(5): Xaa is C or S

SEQ ID NO: 52255 - protein, 29 aa, Artificial Sequence
  Cyclic GFR-binding peptide
  MOD_RES (29)..(29): Xaa is C or S
ELEPLPMVYYDENEKVVEQLSNDMVVEGX

SEQ ID NO: 52256 - protein, 39 aa, Artificial Sequence; identical to SEQ ID NO: 19099
  Cyclic GFR-binding peptide
  MOD_RES (6)..(7)..(38): Xaa is C or S

SEQ ID NO: 52257 - protein, 27 aa, Artificial Sequence
  Cyclic GFR-binding peptide
LEPLTMLYYDENEKVVEQLSNDMVVEG

SEQ ID NO: 52258 - protein, 36 aa, Artificial Sequence; identical to SEQ ID NO: 19101
  Cyclic GFR-binding peptide
  MOD_RES (6)..(6): Xaa is C or S

SEQ ID NO: 52259 - protein, 32 aa, Artificial Sequence; identical to SEQ ID NO: 19102
  Cyclic GFR-binding peptide
  MOD_RES (5)..(6): Xaa is C or S

SEQ ID NO: 52260 - protein, 26 aa, Artificial Sequence
  Cyclic GFR-binding peptide
  MOD_RES (1)..(1): Xaa is C or S
XVPTELEPLTMLYYDEYDKVVEQLSN

SEQ ID NO: 52261 - protein, 29 aa, Artificial Sequence
  Cyclic GFR-binding peptide
  MOD_RES (26)..(28): Xaa is C or S
NAISILYFVGRKPKVLKKYRMIVRSXKXS

SEQ ID NO: 52262 - protein, 28 aa, Artificial Sequence
  Cyclic GFR-binding peptide
  MOD_RES (27)..(27): Xaa is C or S
SPISMLFIDEYDKVVYKQYEEMVVEGXG

SEQ ID NO: 52263 - protein, 29 aa, Artificial Sequence
  Cyclic GFR-binding peptide
  MOD_RES (28)..(28): Xaa is C or S
LSPISMLFIDEYDKVVYKQYEEMVVEGXG

SEQ ID NO: 52264 - protein, 35 aa, Artificial Sequence; identical to SEQ ID NO: 19107
  Cyclic GFR-binding peptide
  MOD_RES (6)..(7): Xaa is C or S

SEQ ID NO: 52265 - protein, 27 aa, Artificial Sequence
  Cyclic GFR-binding peptide
TRLNAISILYFDSANNVVLKKYRDMVV

SEQ ID NO: 52266 - protein, 34 aa, Artificial Sequence; identical to SEQ ID NO: 19109
  Cyclic GFR-binding peptide
  MOD_RES (6)..(7): Xaa is C or S

SEQ ID NO: 52267 - protein, 35 aa, Artificial Sequence; identical to SEQ ID NO: 19110
  Cyclic GFR-binding peptide
  MOD_RES (1)..(33)..(35): Xaa is C or S

SEQ ID NO: 52268 - protein, 34 aa, Artificial Sequence; identical to SEQ ID NO: 19111
  Cyclic GFR-binding peptide
  MOD_RES (2)..(3): Xaa is C or S

SEQ ID NO: 52269 - protein, 33 aa, Artificial Sequence; identical to SEQ ID NO: 19112
  Cyclic GFR-binding peptide
  MOD_RES (2)..(3): Xaa is C or S

SEQ ID NO: 52270 - protein, 34 aa, Artificial Sequence; identical to SEQ ID NO: 19113
  Cyclic GFR-binding peptide
  MOD_RES (2)..(3)..(34): Xaa is C or S

SEQ ID NO: 52271 - protein, 30 aa, Artificial Sequence; identical to SEQ ID NO: 19114
  Cyclic GFR-binding peptide
  MOD_RES (28)..(30): Xaa is C or S

SEQ ID NO: 52272 - protein, 29 aa, Artificial Sequence
  Cyclic GFR-binding peptide
  MOD_RES (3)..(4): Xaa is C or S
KAXXVPTELSPISMLFIDEYDKVVYKQYE

SEQ ID NO: 52273 - protein, 35 aa, Artificial Sequence; identical to SEQ ID NO: 19116
  Cyclic GFR-binding peptide
  MOD_RES (6)..(7): Xaa is C or S

SEQ ID NO: 52274 - protein, 35 aa, Artificial Sequence; identical to SEQ ID NO: 8838
  Cyclic GFR-binding peptide
  MOD_RES (1)..(32)..(34): Xaa is C or S

SEQ ID NO: 52275 - protein, 29 aa, Artificial Sequence
  Cyclic GFR-binding peptide
  MOD_RES (3)..(4): Xaa is C or S
SPXXVPQDLNAISILYFVGRTPKVLKKYR

SEQ ID NO: 52276 - protein, 32 aa, Artificial Sequence; identical to SEQ ID NO: 19119
  Cyclic GFR-binding peptide
  MOD_RES (3)..(4): Xaa is C or S

SEQ ID NO: 52277 - protein, 32 aa, Artificial Sequence; identical to SEQ ID NO: 19120
  Cyclic GFR-binding peptide
  MOD_RES (32)..(32): Xaa is C or S

SEQ ID NO: 52278 - protein, 27 aa, Artificial Sequence
  Cyclic GFR-binding peptide
QALEPLTILYYVGRKPKVEQLSNMIVR

SEQ ID NO: 52279 - protein, 32 aa, Artificial Sequence; identical to SEQ ID NO: 19123
  Cyclic GFR-binding peptide
  MOD_RES (5)..(6): Xaa is C or S

SEQ ID NO: 52280 - protein, 39 aa, Artificial Sequence; identical to SEQ ID NO: 19124
  Cyclic GFR-binding peptide
  MOD_RES (3)..(4)..(36)..(38): Xaa is C or S

SEQ ID NO: 52281 - protein, 27 aa, Artificial Sequence
  Cyclic GFR-binding peptide
  MOD_RES (27)..(27): Xaa is C or S
LNAISILYFVGRTPKVLKKYRMVVKSX

SEQ ID NO: 52282 - protein, 28 aa, Artificial Sequence
  Cyclic GFR-binding peptide
VPTELNAISMLYFDENEKVVLKKYRDMV

SEQ ID NO: 52283 - protein, 38 aa, Artificial Sequence; identical to SEQ ID NO: 19128
  Cyclic GFR-binding peptide
  MOD_RES (4)..(5)..(37): Xaa is C or S

SEQ ID NO: 52284 - protein, 41 aa, Artificial Sequence; identical to SEQ ID NO: 8854
  Cyclic GFR-binding peptide
  MOD_RES (5)..(6)..(38)..(40): Xaa is C or S

SEQ ID NO: 52285 - protein, 36 aa, Artificial Sequence; identical to SEQ ID NO: 19130
  Cyclic GFR-binding peptide
  MOD_RES (2)..(3)..(34)..(36): Xaa is C or S

SEQ ID NO: 52286 - protein, 24 aa, Artificial Sequence
  Cyclic GFR-binding peptide
LNAISILYFVGRKPKVLKKYRMIV

SEQ ID NO: 52287 - protein, 37 aa, Artificial Sequence; identical to SEQ ID NO: 19132
  Cyclic GFR-binding peptide
  MOD_RES (6)..(6): Xaa is C or S

SEQ ID NO: 52288 - protein, 31 aa, Artificial Sequence; identical to SEQ ID NO: 19133
  Cyclic GFR-binding peptide
  MOD_RES (5)..(6): Xaa is C or S

SEQ ID NO: 52289 - protein, 36 aa, Artificial Sequence; identical to SEQ ID NO: 19134
  Cyclic GFR-binding peptide
  MOD_RES (1)..(2)..(34)..(36): Xaa is C or S

SEQ ID NO: 52290 - protein, 33 aa, Artificial Sequence; identical to SEQ ID NO: 19135
  Cyclic GFR-binding peptide
  MOD_RES (1)..(33): Xaa is C or S

SEQ ID NO: 52291 - protein, 23 aa, Artificial Sequence
  Cyclic GFR-binding peptide
QDLSPISILFIVGRTPKVYKQYE

SEQ ID NO: 52292 - protein, 29 aa, Artificial Sequence
  Cyclic GFR-binding peptide
  MOD_RES (27)..(29): Xaa is C or S
EPLTMLYYDEYDKVVEQLSNEMVVEGXGX

SEQ ID NO: 52293 - protein, 27 aa, Artificial Sequence
  Cyclic GFR-binding peptide
QDLNAISILYFVGRTPKVLKKYRMVVK

SEQ ID NO: 52294 - protein, 32 aa, Artificial Sequence; identical to SEQ ID NO: 19140
  Cyclic GFR-binding peptide
  MOD_RES (2)..(3): Xaa is C or S

SEQ ID NO: 52295 - protein, 35 aa, Artificial Sequence; identical to SEQ ID NO: 19141
  Cyclic GFR-binding peptide
  MOD_RES (2)..(3)..(35): Xaa is C or S

SEQ ID NO: 52296 - protein, 33 aa, Artificial Sequence; identical to SEQ ID NO: 19142
  Cyclic GFR-binding peptide
  MOD_RES (3)..(4): Xaa is C or S

SEQ ID NO: 52297 - protein, 22 aa, Artificial Sequence
  Cyclic GFR-binding peptide
LEPLPIVYYIGKTPKIEQLSNM

SEQ ID NO: 52298 - protein, 40 aa, Artificial Sequence; identical to SEQ ID NO: 19145
  Cyclic GFR-binding peptide
  MOD_RES (4)..(5)..(37)..(39): Xaa is C or S

SEQ ID NO: 52299 - protein, 35 aa, Artificial Sequence; identical to SEQ ID NO: 8869
  Cyclic GFR-binding peptide
  MOD_RES (5)..(6): Xaa is C or S

SEQ ID NO: 52300 - protein, 27 aa, Artificial Sequence
  Cyclic GFR-binding peptide
  MOD_RES (1)..(1): Xaa is C or S
XVPQDLEPLPIVYYVGRTPKVEQLSNM

SEQ ID NO: 52301 - protein, 26 aa, Artificial Sequence
  Cyclic GFR-binding peptide
KLSPISVLFIDDSSNVIYKQYENMVV

SEQ ID NO: 52302 - protein, 36 aa, Artificial Sequence; identical to SEQ ID NO: 19150
  Cyclic GFR-binding peptide
  MOD_RES (1)..(2)..(34)..(36): Xaa is C or S

SEQ ID NO: 52303 - protein, 28 aa, Artificial Sequence
  Cyclic GFR-binding peptide
  MOD_RES (27)..(27): Xaa is C or S
EPLPVVYYDDSSNVIEQLSNNMVVRAXG

SEQ ID NO: 52304 - protein, 23 aa, Artificial Sequence
  Cyclic GFR-binding peptide
LEPLTILYYDSANNVVEQLSNDM

SEQ ID NO: 52305 - protein, 22 aa, Artificial Sequence
  Cyclic GFR-binding peptide
LNAISILYFDSANNVVLKKYRD

SEQ ID NO: 52306 - protein, 36 aa, Artificial Sequence; identical to SEQ ID NO: 19155
  Cyclic GFR-binding peptide
  MOD_RES (6)..(7): Xaa is C or S

SEQ ID NO: 52307 - protein, 24 aa, Artificial Sequence
  Cyclic GFR-binding peptide
SPISILFIVGRKPKVYKQYEMIVR

SEQ ID NO: 52308 - protein, 27 aa, Artificial Sequence
  Cyclic GFR-binding peptide
ELEPLTMLYYDEYDKVVEQLSNEMVVE

SEQ ID NO: 52309 - protein, 38 aa, Artificial Sequence; identical to SEQ ID NO: 19158
  Cyclic GFR-binding peptide
  MOD_RES (4)..(5)..(37): Xaa is C or S

SEQ ID NO: 52310 - protein, 39 aa, Artificial Sequence; identical to SEQ ID NO: 19159
  Cyclic GFR-binding peptide
  MOD_RES (6)..(7)..(38): Xaa is C or S

SEQ ID NO: 52311 - protein, 28 aa, Artificial Sequence
  Cyclic GFR-binding peptide
QDLEPLPIVYYVGRTPKVEQLSNMVVKS

SEQ ID NO: 52312 - protein, 24 aa, Artificial Sequence
  Cyclic GFR-binding peptide
RLEPLPIVYYDSANNVVEQLSNDM

SEQ ID NO: 52313 - protein, 25 aa, Artificial Sequence
  Cyclic GFR-binding peptide
PQALEPLTILYYVGRKPKVEQLSNM

SEQ ID NO: 52314 - protein, 28 aa, Artificial Sequence
  Cyclic GFR-binding peptide
  MOD_RES (2)..(3): Xaa is C or S
AXXVPTELNAISMLYFDENEKVVLKKYR

SEQ ID NO: 52315 - protein, 30 aa, Artificial Sequence; identical to SEQ ID NO: 19165
  Cyclic GFR-binding peptide
  MOD_RES (1)..(1): Xaa is C or S

SEQ ID NO: 52316 - protein, 36 aa, Artificial Sequence; identical to SEQ ID NO: 19166
  Cyclic GFR-binding peptide
  MOD_RES (3)..(4)..(35): Xaa is C or S

SEQ ID NO: 52317 - protein, 36 aa, Artificial Sequence; identical to SEQ ID NO: 19167
  Cyclic GFR-binding peptide
  MOD_RES (3)..(4)..(36): Xaa is C or S

SEQ ID NO: 52318 - protein, 25 aa, Artificial Sequence
  Cyclic GFR-binding peptide
QDLSPISILFIIGKTPKIYKQYEMI

SEQ ID NO: 52319 - protein, 31 aa, Artificial Sequence; identical to SEQ ID NO: 19170
  Cyclic GFR-binding peptide
  MOD_RES (1)..(1): Xaa is C or S

SEQ ID NO: 52320 - protein, 36 aa, Artificial Sequence; identical to SEQ ID NO: 19172
  Cyclic GFR-binding peptide
  MOD_RES (3)..(4)..(35): Xaa is C or S

SEQ ID NO: 52321 - protein, 30 aa, Artificial Sequence; identical to SEQ ID NO: 8890
  Cyclic GFR-binding peptide
  MOD_RES (28)..(30): Xaa is C or S

SEQ ID NO: 52322 - protein, 26 aa, Artificial Sequence
  Cyclic GFR-binding peptide
ELSPISMLFIDENEKVVYKQYEDMVV

SEQ ID NO: 52323 - protein, 40 aa, Artificial Sequence; identical to SEQ ID NO: 19175
  Cyclic GFR-binding peptide
  MOD_RES (4)..(5)..(37)..(39): Xaa is C or S

SEQ ID NO: 52324 - protein, 31 aa, Artificial Sequence; identical to SEQ ID NO: 19176
  Cyclic GFR-binding peptide
  MOD_RES (31)..(31): Xaa is C or S

SEQ ID NO: 52325 - protein, 29 aa, Artificial Sequence
  Cyclic GFR-binding peptide
  MOD_RES (2)..(3): Xaa is C or S
TXXVPTRLNAISILYFDSANNVVLKKYRD

SEQ ID NO: 52326 - protein, 35 aa, Artificial Sequence; identical to SEQ ID NO: 19179
  Cyclic GFR-binding peptide
  MOD_RES (1)..(33)..(35): Xaa is C or S

SEQ ID NO: 52327 - protein, 22 aa, Artificial Sequence
  Cyclic GFR-binding peptide
NAISILYFVGRTPKVLKKYRMV

SEQ ID NO: 52328 - protein, 35 aa, Artificial Sequence; identical to SEQ ID NO: 19183
  Cyclic GFR-binding peptide
  MOD_RES (1)..(2)..(34): Xaa is C or S

SEQ ID NO: 52329 - protein, 37 aa, Artificial Sequence; identical to SEQ ID NO: 19184
  Cyclic GFR-binding peptide
  MOD_RES (3)..(4)..(36): Xaa is C or S

SEQ ID NO: 52330 - protein, 24 aa, Artificial Sequence
  Cyclic GFR-binding peptide
ELSPISMLFIDEYDKVVYKQYEEM

SEQ ID NO: 52331 - protein, 40 aa, Artificial Sequence; identical to SEQ ID NO: 19187
  Cyclic GFR-binding peptide
  MOD_RES (5)..(6)..(37)..(39): Xaa is C or S

SEQ ID NO: 52332 - protein, 39 aa, Artificial Sequence; identical to SEQ ID NO: 19189
  Cyclic GFR-binding peptide
  MOD_RES (3)..(4)..(36)..(38): Xaa is C or S

SEQ ID NO: 52333 - protein, 31 aa, Artificial Sequence; identical to SEQ ID NO: 8909
  Cyclic GFR-binding peptide
  MOD_RES (3)..(4): Xaa is C or S

SEQ ID NO: 52334 - protein, 32 aa, Artificial Sequence; identical to SEQ ID NO: 19191
  Cyclic GFR-binding peptide
  MOD_RES (5)..(5): Xaa is C or S

SEQ ID NO: 52335 - protein, 33 aa, Artificial Sequence; identical to SEQ ID NO: 8916
  Cyclic GFR-binding peptide
  MOD_RES (1)..(32): Xaa is C or S

SEQ ID NO: 52336 - protein, 30 aa, Artificial Sequence; identical to SEQ ID NO: 8918
  Cyclic GFR-binding peptide
  MOD_RES (27)..(29): Xaa is C or S

SEQ ID NO: 52337 - protein, 28 aa, Artificial Sequence
  Cyclic GFR-binding peptide
VSQDLSPISILFIIGKTPKIYKQYEMIV

SEQ ID NO: 52338 - protein, 33 aa, Artificial Sequence; identical to SEQ ID NO: 8921
  Cyclic GFR-binding peptide
  MOD_RES (1)..(32): Xaa is C or S

SEQ ID NO: 52339 - protein, 28 aa, Artificial Sequence
  Cyclic GFR-binding peptide
  MOD_RES (2)..(3): Xaa is C or S
AXXVPTELEPLPMVYYDEYDKVVEQLSN

SEQ ID NO: 52340 - protein, 32 aa, Artificial Sequence; identical to SEQ ID NO: 19200
  Cyclic GFR-binding peptide
  MOD_RES (2)..(3): Xaa is C or S

SEQ ID NO: 52341 - protein, 24 aa, Artificial Sequence
  Cyclic GFR-binding peptide
LSPISMLFIDENEKVVYKQYEDMV

SEQ ID NO: 52342 - protein, 39 aa, Artificial Sequence; identical to SEQ ID NO: 19202
  Cyclic GFR-binding peptide
  MOD_RES (5)..(6)..(38): Xaa is C or S

SEQ ID NO: 52343 - protein, 40 aa, Artificial Sequence; identical to SEQ ID NO: 8929
  Cyclic GFR-binding peptide
  MOD_RES (4)..(5)..(37)..(39): Xaa is C or S

SEQ ID NO: 52344 - protein, 36 aa, Artificial Sequence; identical to SEQ ID NO: 19205
  Cyclic GFR-binding peptide
  MOD_RES (1)..(2)..(34)..(36): Xaa is C or S

SEQ ID NO: 52345 - protein, 32 aa, Artificial Sequence; identical to SEQ ID NO: 8931
  Cyclic GFR-binding peptide
  MOD_RES (1)..(2): Xaa is C or S

SEQ ID NO: 52346 - protein, 32 aa, Artificial Sequence; identical to SEQ ID NO: 19207
  Cyclic GFR-binding peptide
  MOD_RES (5)..(6): Xaa is C or S

SEQ ID NO: 52347 - protein, 33 aa, Artificial Sequence; identical to SEQ ID NO: 19208
  Cyclic GFR-binding peptide
  MOD_RES (4)..(5): Xaa is C or S

SEQ ID NO: 52348 - protein, 28 aa, Artificial Sequence
  Cyclic GFR-binding peptide
VPTELEPLPMVYYDEYDKVVEQLSNEMV

SEQ ID NO: 52349 - protein, 28 aa, Artificial Sequence
  Cyclic GFR-binding peptide
  MOD_RES (2)..(3): Xaa is C or S
PXXVPQALSPISILFIVGRKPKVYKQYE

SEQ ID NO: 52350 - protein, 26 aa, Artificial Sequence
  Cyclic GFR-binding peptide
LSPISVLFIDDSSNVIYKQYENMVVR

SEQ ID NO: 52351 - protein, 32 aa, Artificial Sequence; identical to SEQ ID NO: 8936
  Cyclic GFR-binding peptide
  MOD_RES (32)..(32): Xaa is C or S

SEQ ID NO: 52352 - protein, 35 aa, Artificial Sequence; identical to SEQ ID NO: 19213
  Cyclic GFR-binding peptide
  MOD_RES (6)..(7): Xaa is C or S

SEQ ID NO: 52353 - protein, 23 aa, Artificial Sequence
  Cyclic GFR-binding peptide
QALNAISILYFVGRKPKVLKKYR

SEQ ID NO: 52354 - protein, 36 aa, Artificial Sequence; identical to SEQ ID NO: 19215
  Cyclic GFR-binding peptide
  MOD_RES (3)..(4)..(35): Xaa is C or S

SEQ ID NO: 52355 - protein, 29 aa, Artificial Sequence
  Cyclic GFR-binding peptide
  MOD_RES (2)..(3): Xaa is C or S
AXXVPTELSPISMLFIDENEKVVYKQYED

SEQ ID NO: 52356 - protein, 30 aa, Artificial Sequence; identical to SEQ ID NO: 19217
  Cyclic GFR-binding peptide
  MOD_RES (2)..(3): Xaa is C or S

SEQ ID NO: 52357 - protein, 34 aa, Artificial Sequence; identical to SEQ ID NO: 19218
  Cyclic GFR-binding peptide
  MOD_RES (6)..(6): Xaa is C or S

SEQ ID NO: 52358 - protein, 27 aa, Artificial Sequence
  Cyclic GFR-binding peptide
PQDLSPISILFIVGRTPKVYKQYEMVV

SEQ ID NO: 52359 - protein, 32 aa, Artificial Sequence; identical to SEQ ID NO: 19220
  Cyclic GFR-binding peptide
  MOD_RES (3)..(4): Xaa is C or S

SEQ ID NO: 52360 - protein, 33 aa, Artificial Sequence; identical to SEQ ID NO: 19221
  Cyclic GFR-binding peptide
  MOD_RES (32)..(32): Xaa is C or S

SEQ ID NO: 52361 - protein, 24 aa, Artificial Sequence
  Cyclic GFR-binding peptide
EPLTMLYYDEYDKVVEQLSNEMVV

SEQ ID NO: 52362 - protein, 28 aa, Artificial Sequence
  Cyclic GFR-binding peptide
  MOD_RES (28)..(28): Xaa is C or S
LEPLTILYYDSANNVVEQLSNDMVVESX

SEQ ID NO: 52363 - protein, 26 aa, Artificial Sequence
  Cyclic GFR-binding peptide
PTELSPISMLFIDENEKVVYKQYEDM

SEQ ID NO: 52364 - protein, 27 aa, Artificial Sequence
  Cyclic GFR-binding peptide
VPTELSPISMLFIDENEKVVYKQYEDM

SEQ ID NO: 52365 - protein, 30 aa, Artificial Sequence; identical to SEQ ID NO: 19227
  Cyclic GFR-binding peptide
  MOD_RES (4)..(5): Xaa is C or S

SEQ ID NO: 52366 - protein, 31 aa, Artificial Sequence; identical to SEQ ID NO: 19230
  Cyclic GFR-binding peptide
  MOD_RES (30)..(30): Xaa is C or S

SEQ ID NO: 52367 - protein, 33 aa, Artificial Sequence; identical to SEQ ID NO: 19231
  Cyclic GFR-binding peptide
  MOD_RES (4)..(5): Xaa is C or S

SEQ ID NO: 52368 - protein, 37 aa, Artificial Sequence; identical to SEQ ID NO: 19232
  Cyclic GFR-binding peptide
  MOD_RES (3)..(4)..(36): Xaa is C or S

SEQ ID NO: 52369 - protein, 31 aa, Artificial Sequence; identical to SEQ ID NO: 19233
  Cyclic GFR-binding peptide
  MOD_RES (30)..(30): Xaa is C or S

SEQ ID NO: 52370 - protein, 28 aa, Artificial Sequence
  Cyclic GFR-binding peptide
  MOD_RES (26)..(28): Xaa is C or S
NAISILYFVGRKPKVLKKYRMIVRSXKX

SEQ ID NO: 52371 - protein, 27 aa, Artificial Sequence
  Cyclic GFR-binding peptide
PTELEPLTMLYYDEYDKVVEQLSNEMV

SEQ ID NO: 52372 - protein, 26 aa, Artificial Sequence
  Cyclic GFR-binding peptide
  MOD_RES (1)..(1): Xaa is C or S
XVPTELSPISMLFIDENEKVVYKQYE

SEQ ID NO: 52373 - protein, 23 aa, Artificial Sequence
  Cyclic GFR-binding peptide
LEPLTILYYVGRKPKVEQLSNMI

SEQ ID NO: 52374 - protein, 25 aa, Artificial Sequence
  Cyclic GFR-binding peptide
SPISVLFIDDSSNVIYKQYENMVVR

SEQ ID NO: 52375 - protein, 32 aa, Artificial Sequence; identical to SEQ ID NO: 19243
  Cyclic GFR-binding peptide
  MOD_RES (1)..(2): Xaa is C or S

SEQ ID NO: 52376 - protein, 36 aa, Artificial Sequence; identical to SEQ ID NO: 19244
  Cyclic GFR-binding peptide
  MOD_RES (2)..(3)..(35): Xaa is C or S

SEQ ID NO: 52377 - protein, 34 aa, Artificial Sequence; identical to SEQ ID NO: 8988
  Cyclic GFR-binding peptide
  MOD_RES (2)..(3)..(34): Xaa is C or S

SEQ ID NO: 52378 - protein, 34 aa, Artificial Sequence; identical to SEQ ID NO: 19246
  Cyclic GFR-binding peptide
  MOD_RES (32)..(34): Xaa is C or S

SEQ ID NO: 52379 - protein, 37 aa, Artificial Sequence; identical to SEQ ID NO: 19247
  Cyclic GFR-binding peptide
  MOD_RES (6)..(7): Xaa is C or S

SEQ ID NO: 52380 - protein, 28 aa, Artificial Sequence
  Cyclic GFR-binding peptide
RLEPLTILYYDSANNVVEQLSNDMVVES

SEQ ID NO: 52381 - protein, 33 aa, Artificial Sequence; identical to SEQ ID NO: 19249
  Cyclic GFR-binding peptide
  MOD_RES (2)..(3): Xaa is C or S

SEQ ID NO: 52382 - protein, 34 aa, Artificial Sequence; identical to SEQ ID NO: 19250
  Cyclic GFR-binding peptide
  MOD_RES (4)..(5): Xaa is C or S

SEQ ID NO: 52383 - protein, 28 aa, Artificial Sequence
  Cyclic GFR-binding peptide
VSQDLEPLPIVYYIGKTPKIEQLSNMIV

SEQ ID NO: 52384 - protein, 26 aa, Artificial Sequence
  Cyclic GFR-binding peptide
LSPISMLFIDENEKVVYKQYEDMVVE

SEQ ID NO: 52385 - protein, 38 aa, Artificial Sequence; identical to SEQ ID NO: 19253
  Cyclic GFR-binding peptide
  MOD_RES (3)..(4)..(35)..(37): Xaa is C or S

SEQ ID NO: 52386 - protein, 31 aa, Artificial Sequence; identical to SEQ ID NO: 19254
  Cyclic GFR-binding peptide
  MOD_RES (5)..(6): Xaa is C or S

SEQ ID NO: 52387 - protein, 28 aa, Artificial Sequence
  Cyclic GFR-binding peptide
  MOD_RES (1)..(1): Xaa is C or S
XVPQALSPISILFIVGRKPKVYKQYEMI

SEQ ID NO: 52388 - protein, 35 aa, Artificial Sequence; identical to SEQ ID NO: 19256
  Cyclic GFR-binding peptide
  MOD_RES (5)..(6): Xaa is C or S

SEQ ID NO: 52389 - protein, 34 aa, Artificial Sequence; identical to SEQ ID NO: 19258
  Cyclic GFR-binding peptide
  MOD_RES (3)..(4): Xaa is C or S

SEQ ID NO: 52390 - protein, 23 aa, Artificial Sequence
  Cyclic GFR-binding peptide
EPLTVLYYDDSSNVIEQLSNNMV

SEQ ID NO: 52391 - protein, 26 aa, Artificial Sequence
  Cyclic GFR-binding peptide
PTRLNAISILYFDSANNVVLKKYRDM

SEQ ID NO: 52392 - protein, 36 aa, Artificial Sequence; identical to SEQ ID NO: 19263
  Cyclic GFR-binding peptide
  MOD_RES (6)..(7): Xaa is C or S

SEQ ID NO: 52393 - protein, 36 aa, Artificial Sequence; identical to SEQ ID NO: 19264
  Cyclic GFR-binding peptide
  MOD_RES (5)..(6): Xaa is C or S

SEQ ID NO: 52394 - protein, 28 aa, Artificial Sequence
  Cyclic GFR-binding peptide
  MOD_RES (1)..(1): Xaa is C or S
XVPTRLEPLTILYYDSANNVVEQLSNDM

SEQ ID NO: 52395 - protein, 37 aa, Artificial Sequence; identical to SEQ ID NO: 19266
  Cyclic GFR-binding peptide
  MOD_RES (3)..(4)..(36): Xaa is C or S

SEQ ID NO: 52396 - protein, 34 aa, Artificial Sequence; identical to SEQ ID NO: 19268
  Cyclic GFR-binding peptide
  MOD_RES (32)..(34): Xaa is C or S

SEQ ID NO: 52397 - protein, 27 aa, Artificial Sequence
  Cyclic GFR-binding peptide
DLSPISILFIIGKTPKIYKQYEMIVKS

SEQ ID NO: 52398 - protein, 35 aa, Artificial Sequence; identical to SEQ ID NO: 19270
  Cyclic GFR-binding peptide
  MOD_RES (5)..(5): Xaa is C or S

SEQ ID NO: 52399 - protein, 30 aa, Artificial Sequence; identical to SEQ ID NO: 19271
  Cyclic GFR-binding peptide

SEQ ID NO: 52400 - protein, 35 aa, Artificial Sequence; identical to SEQ ID NO: 19272
  Cyclic GFR-binding peptide
  MOD_RES (32)..(34): Xaa is C or S

SEQ ID NO: 52401 - protein, 33 aa, Artificial Sequence; identical to SEQ ID NO: 19273
  Cyclic GFR-binding peptide
  MOD_RES (5)..(5): Xaa is C or S

SEQ ID NO: 52402 - protein, 30 aa, Artificial Sequence; identical to SEQ ID NO: 19275
  Cyclic GFR-binding peptide
  MOD_RES (4)..(5): Xaa is C or S

SEQ ID NO: 52403 - protein, 32 aa, Artificial Sequence; identical to SEQ ID NO: 19277
  Cyclic GFR-binding peptide
  MOD_RES (4)..(5): Xaa is C or S

SEQ ID NO: 52404 - protein, 39 aa, Artificial Sequence; identical to SEQ ID NO: 19278
  Cyclic GFR-binding peptide
  MOD_RES (6)..(7)..(38): Xaa is C or S

SEQ ID NO: 52405 - protein, 28 aa, Artificial Sequence
  Cyclic GFR-binding peptide
VPQALEPLTILYYVGRKPKVEQLSNMIV

SEQ ID NO: 52406 - protein, 37 aa, Artificial Sequence; identical to SEQ ID NO: 19281
  Cyclic GFR-binding peptide
  MOD_RES (4)..(5)..(36): Xaa is C or S

SEQ ID NO: 52407 - protein, 25 aa, Artificial Sequence
  Cyclic GFR-binding peptide
TQLEPLTVLYYDDSSNVIEQLSNNM

SEQ ID NO: 52408 - protein, 28 aa, Artificial Sequence
  Cyclic GFR-binding peptide
VPQDLNAISILYFVGRTPKVLKKYRMVV

SEQ ID NO: 52409 - protein, 29 aa, Artificial Sequence
  Cyclic GFR-binding peptide
  MOD_RES (3)..(4): Xaa is C or S
SPXXVSQDLEPLPIVYYIGKTPKIEQLSN

SEQ ID NO: 52410 - protein, 27 aa, Artificial Sequence
  Cyclic GFR-binding peptide
DLNAISILYFVGRTPKVLKKYRMVVKS

SEQ ID NO: 52411 - protein, 35 aa, Artificial Sequence; identical to SEQ ID NO: 19293
  Cyclic GFR-binding peptide
  MOD_RES (3)..(4): Xaa is C or S

SEQ ID NO: 52412 - protein, 36 aa, Artificial Sequence; identical to SEQ ID NO: 19294
  Cyclic GFR-binding peptide
  MOD_RES (7)..(7): Xaa is C or S

SEQ ID NO: 52413 - protein, 36 aa, Artificial Sequence; identical to SEQ ID NO: 19297
  Cyclic GFR-binding peptide
  MOD_RES (5)..(6): Xaa is C or S

SEQ ID NO: 52414 - protein, 36 aa, Artificial Sequence; identical to SEQ ID NO: 19298
  Cyclic GFR-binding peptide
  MOD_RES (6)..(7): Xaa is C or S

SEQ ID NO: 52415 - protein, 33 aa, Artificial Sequence; identical to SEQ ID NO: 19300
  Cyclic GFR-binding peptide
  MOD_RES (6)..(6): Xaa is C or S

SEQ ID NO: 52416 - protein, 25 aa, Artificial Sequence
  Cyclic GFR-binding peptide
QALNAISILYFVGRKPKVLKKYRMI

SEQ ID NO: 52417 - protein, 38 aa, Artificial Sequence; identical to SEQ ID NO: 19302
  Cyclic GFR-binding peptide
  MOD_RES (6)..(7): Xaa is C or S

SEQ ID NO: 52418 - protein, 25 aa, Artificial Sequence
  Cyclic GFR-binding peptide
LEPLTMLYYDEYDKVVEQLSNEMVV

SEQ ID NO: 52419 - protein, 34 aa, Artificial Sequence; identical to SEQ ID NO: 9068
  Cyclic GFR-binding peptide
  MOD_RES (1)..(33): Xaa is C or S

SEQ ID NO: 52420 - protein, 28 aa, Artificial Sequence
  Cyclic GFR-binding peptide
VPTRLEPLTILYYDSANNVVEQLSNDMV

SEQ ID NO: 52421 - protein, 22 aa, Artificial Sequence
  Cyclic GFR-binding peptide
QLEPLPVVYYDDSSNVIEQLSN

SEQ ID NO: 52422 - protein, 32 aa, Artificial Sequence; identical to SEQ ID NO: 19309
  Cyclic GFR-binding peptide
  MOD_RES (32)..(32): Xaa is C or S

SEQ ID NO: 52423 - protein, 35 aa, Artificial Sequence; identical to SEQ ID NO: 9072
  Cyclic GFR-binding peptide
  MOD_RES (1)..(2)..(33)..(35): Xaa is C or S

SEQ ID NO: 52424 - protein, 32 aa, Artificial Sequence; identical to SEQ ID NO: 19312
  Cyclic GFR-binding peptide
  MOD_RES (1)..(1): Xaa is C or S

SEQ ID NO: 52425 - protein, 29 aa, Artificial Sequence
  Cyclic GFR-binding peptide
PTQLEPLPVVYYDDSSNVIEQLSNNMVVR

SEQ ID NO: 52426 - protein, 39 aa, Artificial Sequence; identical to SEQ ID NO: 19315
  Cyclic GFR-binding peptide
  MOD_RES (3)..(4)..(36)..(38): Xaa is C or S

SEQ ID NO: 52427 - protein, 31 aa, Artificial Sequence; identical to SEQ ID NO: 19317
  Cyclic GFR-binding peptide
  MOD_RES (3)..(3): Xaa is C or S

SEQ ID NO: 52428 - protein, 33 aa, Artificial Sequence; identical to SEQ ID NO: 9080
  Cyclic GFR-binding peptide
  MOD_RES (2)..(3): Xaa is C or S

SEQ ID NO: 52429 - protein, 24 aa, Artificial Sequence
  Cyclic GFR-binding peptide
LEPLPMVYYDENEKVVEQLSNDMV

SEQ ID NO: 52430 - protein, 25 aa, Artificial Sequence
  Cyclic GFR-binding peptide
VPTRLEPLTILYYDSANNVVEQLSN

SEQ ID NO: 52431 - protein, 32 aa, Artificial Sequence; identical to SEQ ID NO: 19322
  Cyclic GFR-binding peptide
  MOD_RES (2)..(3): Xaa is C or S

SEQ ID NO: 52432 - protein, 38 aa, Artificial Sequence; identical to SEQ ID NO: 19323
  Cyclic GFR-binding peptide
  MOD_RES (2)..(3)..(35)..(37): Xaa is C or S

SEQ ID NO: 52433 - protein, 36 aa, Artificial Sequence; identical to SEQ ID NO: 19326
  Cyclic GFR-binding peptide
  MOD_RES (6)..(7): Xaa is C or S

SEQ ID NO: 52434 - protein, 34 aa, Artificial Sequence; identical to SEQ ID NO: 19327
  Cyclic GFR-binding peptide
  MOD_RES (32)..(34): Xaa is C or S

SEQ ID NO: 52435 - protein, 34 aa, Artificial Sequence; identical to SEQ ID NO: 19328
  Cyclic GFR-binding peptide
  MOD_RES (2)..(3)..(34): Xaa is C or S

SEQ ID NO: 52436 - protein, 36 aa, Artificial Sequence; identical to SEQ ID NO: 19330
  Cyclic GFR-binding peptide
  MOD_RES (2)..(3)..(34)..(36): Xaa is C or S

SEQ ID NO: 52437 - protein, 38 aa, Artificial Sequence; identical to SEQ ID NO: 9090
  Cyclic GFR-binding peptide
  MOD_RES (5)..(6)..(37): Xaa is C or S

SEQ ID NO: 52438 - protein, 27 aa, Artificial Sequence
  Cyclic GFR-binding peptide
  MOD_RES (1)..(1): Xaa is C or S
XVPTELEPLTMLYYDEYDKVVEQLSNE

SEQ ID NO: 52439 - protein, 25 aa, Artificial Sequence
  Cyclic GFR-binding peptide
LNAISMLYFDEYDKVVLKKYREMVV

SEQ ID NO: 52440 - protein, 25 aa, Artificial Sequence
  Cyclic GFR-binding peptide
LNAISILYFVGRTPKVLKKYRMVVK

SEQ ID NO: 52441 - protein, 37 aa, Artificial Sequence; identical to SEQ ID NO: 19338
  Cyclic GFR-binding peptide
  MOD_RES (7)..(7): Xaa is C or S

SEQ ID NO: 52442 - protein, 20 aa, Artificial Sequence
  Cyclic GFR-binding peptide
EPLPVVYYDDSSNVIEQLSN

SEQ ID NO: 52443 - protein, 38 aa, Artificial Sequence; identical to SEQ ID NO: 19340
  Cyclic GFR-binding peptide
  MOD_RES (2)..(3)..(35)..(37): Xaa is C or S

SEQ ID NO: 52444 - protein, 29 aa, Artificial Sequence
  Cyclic GFR-binding peptide
  MOD_RES (1)..(1): Xaa is C or S
XAPTQLEPLPVVYYDDSSNVIEQLSNNMV

SEQ ID NO: 52445 - protein, 23 aa, Artificial Sequence
  Cyclic GFR-binding peptide
DLSPISILFIVGRTPKVYKQYEM

SEQ ID NO: 52446 - protein, 38 aa, Artificial Sequence; identical to SEQ ID NO: 19343
  Cyclic GFR-binding peptide
  MOD_RES (6)..(7): Xaa is C or S

SEQ ID NO: 52447 - protein, 33 aa, Artificial Sequence; identical to SEQ ID NO: 9107
  Cyclic GFR-binding peptide
  MOD_RES (1)..(2)..(33): Xaa is C or S

SEQ ID NO: 52448 - protein, 27 aa, Artificial Sequence
  Cyclic GFR-binding peptide
  MOD_RES (2)..(2): Xaa is C or S
TXAPTKLEPLPVVYYDDSSNVIEQLSN

SEQ ID NO: 52449 - protein, 31 aa, Artificial Sequence; identical to SEQ ID NO: 19346
  Cyclic GFR-binding peptide

SEQ ID NO: 52450 - protein, 32 aa, Artificial Sequence; identical to SEQ ID NO: 19347
  Cyclic GFR-binding peptide
  MOD_RES (6)..(7): Xaa is C or S

SEQ ID NO: 52451 - protein, 32 aa, Artificial Sequence; identical to SEQ ID NO: 19348
  Cyclic GFR-binding peptide
  MOD_RES (2)..(3): Xaa is C or S

SEQ ID NO: 52452 - protein, 20 aa, Artificial Sequence
  Cyclic GFR-binding peptide
EPLTILYYDSANNVVEQLSN

SEQ ID NO: 52453 - protein, 36 aa, Artificial Sequence; identical to SEQ ID NO: 19350
  Cyclic GFR-binding peptide
  MOD_RES (3)..(4)..(36): Xaa is C or S

SEQ ID NO: 52454 - protein, 25 aa, Artificial Sequence
  Cyclic GFR-binding peptide
ALEPLTILYYVGRKPKVEQLSNMIV

SEQ ID NO: 52455 - protein, 30 aa, Artificial Sequence; identical to SEQ ID NO: 19352
  Cyclic GFR-binding peptide
  MOD_RES (4)..(5): Xaa is C or S

SEQ ID NO: 52456 - protein, 36 aa, Artificial Sequence; identical to SEQ ID NO: 19355
  Cyclic GFR-binding peptide
  MOD_RES (2)..(34)..(36): Xaa is C or S

SEQ ID NO: 52457 - protein, 24 aa, Artificial Sequence
  Cyclic GFR-binding peptide
KLEPLPVVYYDDSSNVIEQLSNNM

SEQ ID NO: 52458 - protein, 33 aa, Artificial Sequence; identical to SEQ ID NO: 19358
  Cyclic GFR-binding peptide
  MOD_RES (4)..(5): Xaa is C or S

SEQ ID NO: 52459 - protein, 29 aa, Artificial Sequence
  Cyclic GFR-binding peptide
  MOD_RES (28)..(28): Xaa is C or S
LEPLPVVYYDDSSNVIEQLSNNMVVRAXG

SEQ ID NO: 52460 - protein, 23 aa, Artificial Sequence
  Cyclic GFR-binding peptide
DLEPLPIVYYIGKTPKIEQLSNM

SEQ ID NO: 52461 - protein, 31 aa, Artificial Sequence; identical to SEQ ID NO: 9124
  Cyclic GFR-binding peptide
  MOD_RES (31)..(31): Xaa is C or S

SEQ ID NO: 52462 - protein, 33 aa, Artificial Sequence; identical to SEQ ID NO: 19362
  Cyclic GFR-binding peptide
  MOD_RES (5)..(6): Xaa is C or S

SEQ ID NO: 52463 - protein, 32 aa, Artificial Sequence; identical to SEQ ID NO: 19363
  Cyclic GFR-binding peptide
  MOD_RES (31)..(31): Xaa is C or S

SEQ ID NO: 52464 - protein, 32 aa, Artificial Sequence; identical to SEQ ID NO: 19364
  Cyclic GFR-binding peptide
  MOD_RES (3)..(4): Xaa is C or S

SEQ ID NO: 52465 - protein, 27 aa, Artificial Sequence
  Cyclic GFR-binding peptide
  MOD_RES (1)..(2): Xaa is C or S
XXVPQALNAISILYFVGRKPKVLKKYR

SEQ ID NO: 52466 - protein, 31 aa, Artificial Sequence; identical to SEQ ID NO: 19368
  Cyclic GFR-binding peptide
  MOD_RES (1)..(1): Xaa is C or S

SEQ ID NO: 52467 - protein, 29 aa, Artificial Sequence
  Cyclic GFR-binding peptide
  MOD_RES (1)..(2): Xaa is C or S
XXVPTELNAISMLYFDEYDKVVLKKYREM

SEQ ID NO: 52468 - protein, 37 aa, Artificial Sequence; identical to SEQ ID NO: 19371
  Cyclic GFR-binding peptide
  MOD_RES (2)..(3)..(34)..(36): Xaa is C or S

SEQ ID NO: 52469 - protein, 24 aa, Artificial Sequence
  Cyclic GFR-binding peptide
LEPLPIVYYVGRTPKVEQLSNMVV

SEQ ID NO: 52470 - protein, 27 aa, Artificial Sequence
  Cyclic GFR-binding peptide
VPTELEPLPMVYYDEYDKVVEQLSNEM

SEQ ID NO: 52471 - protein, 37 aa, Artificial Sequence; identical to SEQ ID NO: 19374
  Cyclic GFR-binding peptide
  MOD_RES (3)..(4)..(36): Xaa is C or S

SEQ ID NO: 52472 - protein, 36 aa, Artificial Sequence; identical to SEQ ID NO: 19377
  Cyclic GFR-binding peptide
  MOD_RES (1)..(2)..(34)..(36): Xaa is C or S

SEQ ID NO: 52473 - protein, 32 aa, Artificial Sequence; identical to SEQ ID NO: 19378
  Cyclic GFR-binding peptide
  MOD_RES (5)..(6): Xaa is C or S

SEQ ID NO: 52474 - protein, 37 aa, Artificial Sequence; identical to SEQ ID NO: 19379
  Cyclic GFR-binding peptide
  MOD_RES (3)..(4)..(36): Xaa is C or S

SEQ ID NO: 52475 - protein, 34 aa, Artificial Sequence; identical to SEQ ID NO: 9141
  Cyclic GFR-binding peptide
  MOD_RES (1)..(32)..(34): Xaa is C or S

SEQ ID NO: 52476 - protein, 38 aa, Artificial Sequence; identical to SEQ ID NO: 19381
  Cyclic GFR-binding peptide
  MOD_RES (6)..(7)..(38): Xaa is C or S

SEQ ID NO: 52477 - protein, 26 aa, Artificial Sequence
  Cyclic GFR-binding peptide
TELEPLTMLYYDENEKVVEQLSNDMV

SEQ ID NO: 52478 - protein, 28 aa, Artificial Sequence
  Cyclic GFR-binding peptide
  MOD_RES (3)..(3): Xaa is C or S
PTXAPTKLEPLPVVYYDDSSNVIEQLSN

SEQ ID NO: 52479 - protein, 32 aa, Artificial Sequence; identical to SEQ ID NO: 19384
  Cyclic GFR-binding peptide
  MOD_RES (3)..(4): Xaa is C or S

SEQ ID NO: 52480 - protein, 32 aa, Artificial Sequence; identical to SEQ ID NO: 19387
  Cyclic GFR-binding peptide
  MOD_RES (4)..(4): Xaa is C or S

SEQ ID NO: 52481 - protein, 30 aa, Artificial Sequence; identical to SEQ ID NO: 19388
  Cyclic GFR-binding peptide
  MOD_RES (2)..(3): Xaa is C or S

SEQ ID NO: 52482 - protein, 31 aa, Artificial Sequence; identical to SEQ ID NO: 19389
  Cyclic GFR-binding peptide
  MOD_RES (1)..(1): Xaa is C or S

SEQ ID NO: 52483 - protein, 38 aa, Artificial Sequence; identical to SEQ ID NO: 19390
  Cyclic GFR-binding peptide
  MOD_RES (6)..(7): Xaa is C or S

SEQ ID NO: 52484 - protein, 31 aa, Artificial Sequence; identical to SEQ ID NO: 19391
  Cyclic GFR-binding peptide
  MOD_RES (29)..(31): Xaa is C or S

SEQ ID NO: 52485 - protein, 27 aa, Artificial Sequence
  Cyclic GFR-binding peptide
  MOD_RES (1)..(2): Xaa is C or S
XXAPTKLEPLPVVYYDDSSNVIEQLSN

SEQ ID NO: 52486 - protein, 36 aa, Artificial Sequence; identical to SEQ ID NO: 19394
  Cyclic GFR-binding peptide
  MOD_RES (3)..(4)..(36): Xaa is C or S

SEQ ID NO: 52487 - protein, 25 aa, Artificial Sequence
  Cyclic GFR-binding peptide
LSPISILFIVGRKPKVYKQYEMIVR

SEQ ID NO: 52488 - protein, 33 aa, Artificial Sequence; identical to SEQ ID NO: 9158
  Cyclic GFR-binding peptide
  MOD_RES (4)..(5): Xaa is C or S

SEQ ID NO: 52489 - protein, 30 aa, Artificial Sequence; identical to SEQ ID NO: 19397
  Cyclic GFR-binding peptide
  MOD_RES (29)..(29): Xaa is C or S

SEQ ID NO: 52490 - protein, 28 aa, Artificial Sequence
  Cyclic GFR-binding peptide
  MOD_RES (2)..(3): Xaa is C or S
TXXVPTRLEPLTILYYDSANNVVEQLSN

SEQ ID NO: 52491 - protein, 35 aa, Artificial Sequence; identical to SEQ ID NO: 19399
  Cyclic GFR-binding peptide
  MOD_RES (5)..(6): Xaa is C or S

SEQ ID NO: 52492 - protein, 26 aa, Artificial Sequence
  Cyclic GFR-binding peptide
  MOD_RES (1)..(1): Xaa is C or S
XAPTQLEPLTVLYYDDSSNVIEQLSN

SEQ ID NO: 52493 - protein, 24 aa, Artificial Sequence
  Cyclic GFR-binding peptide
LSPISILFIVGRTPKVYKQYEMVV

SEQ ID NO: 52494 - protein, 34 aa, Artificial Sequence; identical to SEQ ID NO: 19402
  Cyclic GFR-binding peptide
  MOD_RES (6)..(7): Xaa is C or S

SEQ ID NO: 52495 - protein, 31 aa, Artificial Sequence; identical to SEQ ID NO: 19403
  Cyclic GFR-binding peptide
  MOD_RES (30)..(30): Xaa is C or S

SEQ ID NO: 52496 - protein, 32 aa, Artificial Sequence; identical to SEQ ID NO: 9167
  Cyclic GFR-binding peptide
  MOD_RES (3)..(4): Xaa is C or S

SEQ ID NO: 52497 - protein, 35 aa, Artificial Sequence; identical to SEQ ID NO: 19405
  Cyclic GFR-binding peptide
  MOD_RES (2)..(3)..(34): Xaa is C or S

SEQ ID NO: 52498 - protein, 38 aa, Artificial Sequence; identical to SEQ ID NO: 19406
  Cyclic GFR-binding peptide
  MOD_RES (3)..(4)..(36)..(38): Xaa is C or S

SEQ ID NO: 52499 - protein, 33 aa, Artificial Sequence; identical to SEQ ID NO: 19407
  Cyclic GFR-binding peptide
  MOD_RES (3)..(4): Xaa is C or S

SEQ ID NO: 52500 - protein, 36 aa, Artificial Sequence; identical to SEQ ID NO: 19408
  Cyclic GFR-binding peptide
  MOD_RES (1)..(33)..(35): Xaa is C or S

SEQ ID NO: 52501 - protein, 27 aa, Artificial Sequence
  Cyclic GFR-binding peptide
TRLEPLPIVYYDSANNVVEQLSNDMVV

SEQ ID NO: 52502 - protein, 31 aa, Artificial Sequence; identical to SEQ ID NO: 9172
  Cyclic GFR-binding peptide
  MOD_RES (31)..(31): Xaa is C or S

SEQ ID NO: 52503 - protein, 35 aa, Artificial Sequence; identical to SEQ ID NO: 19412
  Cyclic GFR-binding peptide
  MOD_RES (2)..(3)..(35): Xaa is C or S

SEQ ID NO: 52504 - protein, 35 aa, Artificial Sequence; identical to SEQ ID NO: 9176
  Cyclic GFR-binding peptide
  MOD_RES (6)..(7): Xaa is C or S

SEQ ID NO: 52505 - protein, 27 aa, Artificial Sequence
  Cyclic GFR-binding peptide
  MOD_RES (1)..(1): Xaa is C or S
XVPTELSPISMLFIDENEKVVYKQYED

SEQ ID NO: 52506 - protein, 33 aa, Artificial Sequence; identical to SEQ ID NO: 19416
  Cyclic GFR-binding peptide
  MOD_RES (4)..(4): Xaa is C or S

SEQ ID NO: 52507 - protein, 33 aa, Artificial Sequence; identical to SEQ ID NO: 19418
  Cyclic GFR-binding peptide
  MOD_RES (1)..(2): Xaa is C or S

SEQ ID NO: 52508 - protein, 30 aa, Artificial Sequence; identical to SEQ ID NO: 19419
  Cyclic GFR-binding peptide
  MOD_RES (1)..(1): Xaa is C or S

SEQ ID NO: 52509 - protein, 23 aa, Artificial Sequence
  Cyclic GFR-binding peptide
EPLTILYYDSANNVVEQLSNDMV

SEQ ID NO: 52510 - protein, 30 aa, Artificial Sequence; identical to SEQ ID NO: 19421
  Cyclic GFR-binding peptide
  MOD_RES (28)..(30): Xaa is C or S

SEQ ID NO: 52511 - protein, 31 aa, Artificial Sequence; identical to SEQ ID NO: 19424
  Cyclic GFR-binding peptide
  MOD_RES (4)..(4): Xaa is C or S

SEQ ID NO: 52512 - protein, 31 aa, Artificial Sequence; identical to SEQ ID NO: 19425
  Cyclic GFR-binding peptide
  MOD_RES (2)..(3): Xaa is C or S

SEQ ID NO: 52513 - protein, 36 aa, Artificial Sequence; identical to SEQ ID NO: 19426
  Cyclic GFR-binding peptide
  MOD_RES (3)..(4)..(35): Xaa is C or S

SEQ ID NO: 52514 - protein, 36 aa, Artificial Sequence; identical to SEQ ID NO: 19427
  Cyclic GFR-binding peptide
  MOD_RES (4)..(5): Xaa is C or S

SEQ ID NO: 52515 - protein, 37 aa, Artificial Sequence; identical to SEQ ID NO: 9199
  Cyclic GFR-binding peptide
  MOD_RES (3)..(4)..(36): Xaa is C or S

SEQ ID NO: 52516 - protein, 29 aa, Artificial Sequence
  Cyclic GFR-binding peptide
  MOD_RES (2)..(3): Xaa is C or S
PXXVSQDLEPLPIVYYIGKTPKIEQLSNM

SEQ ID NO: 52517 - protein, 27 aa, Artificial Sequence
  Cyclic GFR-binding peptide
LEPLTMLYYDEYDKVVEQLSNEMVVEG

SEQ ID NO: 52518 - protein, 29 aa, Artificial Sequence
  Cyclic GFR-binding peptide
  MOD_RES (3)..(4): Xaa is C or S
SPXXVPQDLEPLPIVYYVGRTPKVEQLSN

SEQ ID NO: 52519 - protein, 34 aa, Artificial Sequence; identical to SEQ ID NO: 19434
  Cyclic GFR-binding peptide
  MOD_RES (1)..(2)..(34): Xaa is C or S

SEQ ID NO: 52520 - protein, 41 aa, Artificial Sequence; identical to SEQ ID NO: 19435
  Cyclic GFR-binding peptide
  MOD_RES (5)..(6)..(38)..(40): Xaa is C or S

SEQ ID NO: 52521 - protein, 23 aa, Artificial Sequence
  Cyclic GFR-binding peptide
LEPLPMVYYDEYDKVVEQLSNEM

SEQ ID NO: 52522 - protein, 33 aa, Artificial Sequence; identical to SEQ ID NO: 19438
  Cyclic GFR-binding peptide
  MOD_RES (31)..(33): Xaa is C or S

SEQ ID NO: 52523 - protein, 29 aa, Artificial Sequence
  Cyclic GFR-binding peptide
  MOD_RES (1)..(2): Xaa is C or S
XXVPQALEPLTILYYVGRKPKVEQLSNMI

SEQ ID NO: 52524 - protein, 37 aa, Artificial Sequence; identical to SEQ ID NO: 19441
  Cyclic GFR-binding peptide
  MOD_RES (1)..(2)..(34)..(36): Xaa is C or S

SEQ ID NO: 52525 - protein, 21 aa, Artificial Sequence
  Cyclic GFR-binding peptide
LNAISILYFVGRKPKVLKKYR

SEQ ID NO: 52526 - protein, 29 aa, Artificial Sequence
  Cyclic GFR-binding peptide
TRLNAISILYFDSANNVVLKKYRDMVVES

SEQ ID NO: 52527 - protein, 36 aa, Artificial Sequence; identical to SEQ ID NO: 19444
  Cyclic GFR-binding peptide
  MOD_RES (4)..(5): Xaa is C or S

SEQ ID NO: 52528 - protein, 30 aa, Artificial Sequence; identical to SEQ ID NO: 19445
  Cyclic GFR-binding peptide
  MOD_RES (2)..(3): Xaa is C or S

SEQ ID NO: 52529 - protein, 29 aa, Artificial Sequence
  Cyclic GFR-binding peptide
TKLEPLTVLYYDDSSNVIEQLSNNMVVRS

SEQ ID NO: 52530 - protein, 38 aa, Artificial Sequence; identical to SEQ ID NO: 19447
  Cyclic GFR-binding peptide
  MOD_RES (6)..(7): Xaa is C or S

SEQ ID NO: 52531 - protein, 35 aa, Artificial Sequence; identical to SEQ ID NO: 19448
  Cyclic GFR-binding peptide
  MOD_RES (5)..(6): Xaa is C or S

SEQ ID NO: 52532 - protein, 32 aa, Artificial Sequence; identical to SEQ ID NO: 19449
  Cyclic GFR-binding peptide
  MOD_RES (1)..(1): Xaa is C or S

SEQ ID NO: 52533 - protein, 29 aa, Artificial Sequence
  Cyclic GFR-binding peptide
TELSPISMLFIDEYDKVVYKQYEEMVVEG

SEQ ID NO: 52534 - protein, 26 aa, Artificial Sequence
  Cyclic GFR-binding peptide
PTELEPLPMVYYDEYDKVVEQLSNEM

SEQ ID NO: 52535 - protein, 38 aa, Artificial Sequence; identical to SEQ ID NO: 19452
  Cyclic GFR-binding peptide
  MOD_RES (3)..(35)..(37): Xaa is C or S

SEQ ID NO: 52536 - protein, 27 aa, Artificial Sequence
  Cyclic GFR-binding peptide
PTELEPLPMVYYDENEKVVEQLSNDMV

SEQ ID NO: 52537 - protein, 29 aa, Artificial Sequence
  Cyclic GFR-binding peptide
TQLEPLPVVYYDDSSNVIEQLSNNMVVRA

SEQ ID NO: 52538 - protein, 21 aa, Artificial Sequence
  Cyclic GFR-binding peptide
EPLTMLYYDEYDKVVEQLSNE

SEQ ID NO: 52539 - protein, 28 aa, Artificial Sequence
  Cyclic GFR-binding peptide
  MOD_RES (27)..(27): Xaa is C or S
SPISVLFIDDSSNVIYKQYENMVVRAXG

SEQ ID NO: 52540 - protein, 26 aa, Artificial Sequence
  Cyclic GFR-binding peptide
PTQLSPISVLFIDDSSNVIYKQYENM

SEQ ID NO: 52541 - protein, 29 aa, Artificial Sequence
  Cyclic GFR-binding peptide
  MOD_RES (29)..(29): Xaa is C or S
RLEPLTILYYDSANNVVEQLSNDMVVESX

SEQ ID NO: 52542 - protein, 40 aa, Artificial Sequence; identical to SEQ ID NO: 19462
  Cyclic GFR-binding peptide
  MOD_RES (6)..(7)..(38)..(40): Xaa is C or S

SEQ ID NO: 52543 - protein, 34 aa, Artificial Sequence; identical to SEQ ID NO: 19463
  Cyclic GFR-binding peptide
  MOD_RES (5)..(6): Xaa is C or S

SEQ ID NO: 52544 - protein, 26 aa, Artificial Sequence
  Cyclic GFR-binding peptide
NAISILYFDSANNVVLKKYRDMVVES

SEQ ID NO: 52545 - protein, 33 aa, Artificial Sequence; identical to SEQ ID NO: 19467
  Cyclic GFR-binding peptide
  MOD_RES (1)..(32): Xaa is C or S

SEQ ID NO: 52546 - protein, 30 aa, Artificial Sequence; identical to SEQ ID NO: 19468
  Cyclic GFR-binding peptide
  MOD_RES (2)..(3): Xaa is C or S

SEQ ID NO: 52547 - protein, 36 aa, Artificial Sequence; identical to SEQ ID NO: 19469
  Cyclic GFR-binding peptide
  MOD_RES (2)..(34)..(36): Xaa is C or S

SEQ ID NO: 52548 - protein, 34 aa, Artificial Sequence; identical to SEQ ID NO: 9238
  Cyclic GFR-binding peptide
  MOD_RES (1)..(2)..(33): Xaa is C or S

SEQ ID NO: 52549 - protein, 30 aa, Artificial Sequence; identical to SEQ ID NO: 9239
  Cyclic GFR-binding peptide
  MOD_RES (1)..(2): Xaa is C or S

SEQ ID NO: 52550 - protein, 38 aa, Artificial Sequence; identical to SEQ ID NO: 19473
  Cyclic GFR-binding peptide
  MOD_RES (3)..(4)..(36)..(38): Xaa is C or S

SEQ ID NO: 52551 - protein, 26 aa, Artificial Sequence
  Cyclic GFR-binding peptide
  MOD_RES (26)..(26): Xaa is C or S
SPISILFIVGRKPKVYKQYEMIVRSX

SEQ ID NO: 52552 - protein, 32 aa, Artificial Sequence; identical to SEQ ID NO: 19476
  Cyclic GFR-binding peptide
  MOD_RES (1)..(2): Xaa is C or S

SEQ ID NO: 52553 - protein, 29 aa, Artificial Sequence
  Cyclic GFR-binding peptide
  MOD_RES (1)..(2): Xaa is C or S
XXAPTQLSPISVLFIDDSSNVIYKQYENM

SEQ ID NO: 52554 - protein, 24 aa, Artificial Sequence
  Cyclic GFR-binding peptide
PTKLEPLPVVYYDDSSNVIEQLSN

SEQ ID NO: 52555 - protein, 26 aa, Artificial Sequence
  Cyclic GFR-binding peptide
VPTELEPLPMVYYDENEKVVEQLSND

SEQ ID NO: 52556 - protein, 28 aa, Artificial Sequence
  Cyclic GFR-binding peptide
  MOD_RES (28)..(28): Xaa is C or S
DLSPISILFIIGKTPKIYKQYEMIVKSX

SEQ ID NO: 52557 - protein, 28 aa, Artificial Sequence
  Cyclic GFR-binding peptide
  MOD_RES (1)..(1): Xaa is C or S
XVSQDLSPISILFIIGKTPKIYKQYEMI

SEQ ID NO: 52558 - protein, 38 aa, Artificial Sequence; identical to SEQ ID NO: 19483
  Cyclic GFR-binding peptide
  MOD_RES (3)..(4)..(35)..(37): Xaa is C or S

SEQ ID NO: 52559 - protein, 38 aa, Artificial Sequence; identical to SEQ ID NO: 19484
  Cyclic GFR-binding peptide
  MOD_RES (6)..(7): Xaa is C or S

SEQ ID NO: 52560 - protein, 35 aa, Artificial Sequence; identical to SEQ ID NO: 19485
  Cyclic GFR-binding peptide
  MOD_RES (2)..(3)..(34): Xaa is C or S

SEQ ID NO: 52561 - protein, 22 aa, Artificial Sequence
  Cyclic GFR-binding peptide
EPLPMVYYDENEKVVEQLSNDM

SEQ ID NO: 52562 - protein, 30 aa, Artificial Sequence; identical to SEQ ID NO: 19487
  Cyclic GFR-binding peptide
  MOD_RES (29)..(29): Xaa is C or S

SEQ ID NO: 52563 - protein, 35 aa, Artificial Sequence; identical to SEQ ID NO: 9246
  Cyclic GFR-binding peptide
  MOD_RES (6)..(7): Xaa is C or S

SEQ ID NO: 52564 - protein, 27 aa, Artificial Sequence
  Cyclic GFR-binding peptide
  MOD_RES (1)..(1): Xaa is C or S
XAPTQLEPLTVLYYDDSSNVIEQLSNN

SEQ ID NO: 52565 - protein, 34 aa, Artificial Sequence; identical to SEQ ID NO: 19490
  Cyclic GFR-binding peptide
  MOD_RES (7)..(7): Xaa is C or S

SEQ ID NO: 52566 - protein, 37 aa, Artificial Sequence; identical to SEQ ID NO: 19492
  Cyclic GFR-binding peptide
  MOD_RES (6)..(6): Xaa is C or S

SEQ ID NO: 52567 - protein, 35 aa, Artificial Sequence; identical to SEQ ID NO: 19493
  Cyclic GFR-binding peptide
  MOD_RES (4)..(5): Xaa is C or S

SEQ ID NO: 52568 - protein, 34 aa, Artificial Sequence; identical to SEQ ID NO: 19494
  Cyclic GFR-binding peptide
  MOD_RES (6)..(7): Xaa is C or S

SEQ ID NO: 52569 - protein, 23 aa, Artificial Sequence
  Cyclic GFR-binding peptide
NAISMLYFDEYDKVVLKKYREMV

SEQ ID NO: 52570 - protein, 41 aa, Artificial Sequence; identical to SEQ ID NO: 19496
  Cyclic GFR-binding peptide
  MOD_RES (5)..(6)..(38)..(40): Xaa is C or S

SEQ ID NO: 52571 - protein, 28 aa, Artificial Sequence
  Cyclic GFR-binding peptide
  MOD_RES (26)..(28): Xaa is C or S
EPLPIVYYIGKTPKIEQLSNMIVKSXKX

SEQ ID NO: 52572 - protein, 22 aa, Artificial Sequence
  Cyclic GFR-binding peptide
SPISILFIVGRKPKVYKQYEMI

SEQ ID NO: 52573 - protein, 28 aa, Artificial Sequence
  Cyclic GFR-binding peptide
SQDLNAISILYFIGKTPKILKKYRMIVK

SEQ ID NO: 52574 - protein, 33 aa, Artificial Sequence; identical to SEQ ID NO: 19501
  Cyclic GFR-binding peptide
  MOD_RES (31)..(33): Xaa is C or S

SEQ ID NO: 52575 - protein, 28 aa, Artificial Sequence
  Cyclic GFR-binding peptide
  MOD_RES (26)..(28): Xaa is C or S
SPISILFIIGKTPKIYKQYEMIVKSXKX

SEQ ID NO: 52576 - protein, 28 aa, Artificial Sequence
  Cyclic GFR-binding peptide
  MOD_RES (27)..(27): Xaa is C or S
EPLPMVYYDEYDKVVEQLSNEMVVEGXG

SEQ ID NO: 52577 - protein, 40 aa, Artificial Sequence; identical to SEQ ID NO: 19504
  Cyclic GFR-binding peptide
  MOD_RES (6)..(7)..(39): Xaa is C or S

SEQ ID NO: 52578 - protein, 39 aa, Artificial Sequence; identical to SEQ ID NO: 9265
  Cyclic GFR-binding peptide
  MOD_RES (4)..(5)..(37)..(39): Xaa is C or S

SEQ ID NO: 52579 - protein, 27 aa, Artificial Sequence
  Cyclic GFR-binding peptide
QDLEPLPIVYYVGRTPKVEQLSNMVVK

SEQ ID NO: 52580 - protein, 28 aa, Artificial Sequence
  Cyclic GFR-binding peptide
  MOD_RES (1)..(1): Xaa is C or S
XVPQDLEPLPIVYYVGRTPKVEQLSNMV

SEQ ID NO: 52581 - protein, 40 aa, Artificial Sequence; identical to SEQ ID NO: 19508
  Cyclic GFR-binding peptide
  MOD_RES (6)..(7)..(39): Xaa is C or S

SEQ ID NO: 52582 - protein, 28 aa, Artificial Sequence
  Cyclic GFR-binding peptide
PTKLSPISVLFIDDSSNVIYKQYENMVV

SEQ ID NO: 52583 - protein, 33 aa, Artificial Sequence; identical to SEQ ID NO: 19511
  Cyclic GFR-binding peptide
  MOD_RES (1)..(2): Xaa is C or S

SEQ ID NO: 52584 - protein, 31 aa, Artificial Sequence; identical to SEQ ID NO: 19512
  Cyclic GFR-binding peptide
  MOD_RES (3)..(4): Xaa is C or S

SEQ ID NO: 52585 - protein, 28 aa, Artificial Sequence
  Cyclic GFR-binding peptide
  MOD_RES (1)..(2): Xaa is C or S
XXAPTQLSPISVLFIDDSSNVIYKQYEN

SEQ ID NO: 52586 - protein, 33 aa, Artificial Sequence; identical to SEQ ID NO: 19514
  Cyclic GFR-binding peptide
  MOD_RES (3)..(4): Xaa is C or S

SEQ ID NO: 52587 - protein, 24 aa, Artificial Sequence
  Cyclic GFR-binding peptide
LEPLTMLYYDEYDKVVEQLSNEMV

SEQ ID NO: 52588 - protein, 39 aa, Artificial Sequence; identical to SEQ ID NO: 19516
  Cyclic GFR-binding peptide
  MOD_RES (6)..(7)..(38): Xaa is C or S

SEQ ID NO: 52589 - protein, 31 aa, Artificial Sequence; identical to SEQ ID NO: 19518
  Cyclic GFR-binding peptide
  MOD_RES (5)..(6): Xaa is C or S

SEQ ID NO: 52590 - protein, 28 aa, Artificial Sequence
  Cyclic GFR-binding peptide
PTQLEPLPVVYYDDSSNVIEQLSNNMVV

SEQ ID NO: 52591 - protein, 35 aa, Artificial Sequence; identical to SEQ ID NO: 19521
  Cyclic GFR-binding peptide
  MOD_RES (3)..(4): Xaa is C or S

SEQ ID NO: 52592 - protein, 29 aa, Artificial Sequence
  Cyclic GFR-binding peptide
  MOD_RES (2)..(2): Xaa is C or S
TXAPTKLEPLPVVYYDDSSNVIEQLSNNM

SEQ ID NO: 52593 - protein, 25 aa, Artificial Sequence
  Cyclic GFR-binding peptide
LEPLPIVYYVGRTPKVEQLSNMVVK

SEQ ID NO: 52594 - protein, 27 aa, Artificial Sequence
  Cyclic GFR-binding peptide
VPTRLNAISILYFDSANNVVLKKYRDM

SEQ ID NO: 52595 - protein, 36 aa, Artificial Sequence; identical to SEQ ID NO: 19526
  Cyclic GFR-binding peptide
  MOD_RES (1)..(33)..(35): Xaa is C or S

SEQ ID NO: 52596 - protein, 29 aa, Artificial Sequence
  Cyclic GFR-binding peptide
APTQLEPLTVLYYDDSSNVIEQLSNNMVV

SEQ ID NO: 52597 - protein, 29 aa, Artificial Sequence
  Cyclic GFR-binding peptide
PQDLEPLPIVYYVGRTPKVEQLSNMVVKS

SEQ ID NO: 52598 - protein, 34 aa, Artificial Sequence; identical to SEQ ID NO: 19534
  Cyclic GFR-binding peptide
  MOD_RES (4)..(5): Xaa is C or S

SEQ ID NO: 52599 - protein, 32 aa, Artificial Sequence; identical to SEQ ID NO: 19535
  Cyclic GFR-binding peptide
  MOD_RES (4)..(5): Xaa is C or S

SEQ ID NO: 52600 - protein, 34 aa, Artificial Sequence; identical to SEQ ID NO: 9312
  Cyclic GFR-binding peptide
  MOD_RES (1)..(32)..(34): Xaa is C or S

SEQ ID NO: 52601 - protein, 35 aa, Artificial Sequence; identical to SEQ ID NO: 19537
  Cyclic GFR-binding peptide
  MOD_RES (4)..(4): Xaa is C or S

SEQ ID NO: 52602 - protein, 30 aa, Artificial Sequence; identical to SEQ ID NO: 19539
  Cyclic GFR-binding peptide
  MOD_RES (29)..(29): Xaa is C or S

SEQ ID NO: 52603 - protein, 31 aa, Artificial Sequence; identical to SEQ ID NO: 19540
  Cyclic GFR-binding peptide
  MOD_RES (3)..(4): Xaa is C or S

SEQ ID NO: 52604 - protein, 30 aa, Artificial Sequence; identical to SEQ ID NO: 19541
  Cyclic GFR-binding peptide
  MOD_RES (3)..(4): Xaa is C or S

SEQ ID NO: 52605 - protein, 34 aa, Artificial Sequence; identical to SEQ ID NO: 19543
  Cyclic GFR-binding peptide
  MOD_RES (4)..(5): Xaa is C or S

SEQ ID NO: 52606 - protein, 34 aa, Artificial Sequence; identical to SEQ ID NO: 19544
  Cyclic GFR-binding peptide
  MOD_RES (5)..(6): Xaa is C or S

SEQ ID NO: 52607 - protein, 29 aa, Artificial Sequence
  Cyclic GFR-binding peptide
  MOD_RES (1)..(2): Xaa is C or S
XXVPQDLSPISILFIVGRTPKVYKQYEMV

SEQ ID NO: 52608 - protein, 23 aa, Artificial Sequence
  Cyclic GFR-binding peptide
NAISILYFDSANNVVLKKYRDMV

SEQ ID NO: 52609 - protein, 26 aa, Artificial Sequence
  Cyclic GFR-binding peptide
VPTELNAISMLYFDEYDKVVLKKYRE

SEQ ID NO: 52610 - protein, 32 aa, Artificial Sequence; identical to SEQ ID NO: 19549
  Cyclic GFR-binding peptide
  MOD_RES (3)..(4): Xaa is C or S

SEQ ID NO: 52611 - protein, 31 aa, Artificial Sequence; identical to SEQ ID NO: 19550
  Cyclic GFR-binding peptide
  MOD_RES (6)..(6): Xaa is C or S

SEQ ID NO: 52612 - protein, 25 aa, Artificial Sequence
  Cyclic GFR-binding peptide
KLEPLPVVYYDDSSNVIEQLSNNMV

SEQ ID NO: 52613 - protein, 30 aa, Artificial Sequence; identical to SEQ ID NO: 19552
  Cyclic GFR-binding peptide
  MOD_RES (28)..(30): Xaa is C or S

SEQ ID NO: 52614 - protein, 36 aa, Artificial Sequence; identical to SEQ ID NO: 19553
  Cyclic GFR-binding peptide
  MOD_RES (3)..(35): Xaa is C or S

SEQ ID NO: 52615 - protein, 20 aa, Artificial Sequence
  Cyclic GFR-binding peptide
NAISILYFVGRKPKVLKKYR

SEQ ID NO: 52616 - protein, 39 aa, Artificial Sequence; identical to SEQ ID NO: 19556
  Cyclic GFR-binding peptide
  MOD_RES (5)..(37)..(39): Xaa is C or S

SEQ ID NO: 52617 - protein, 34 aa, Artificial Sequence; identical to SEQ ID NO: 19557
  Cyclic GFR-binding peptide
  MOD_RES (3)..(4): Xaa is C or S

SEQ ID NO: 52618 - protein, 24 aa, Artificial Sequence
  Cyclic GFR-binding peptide
ELEPLTMLYYDEYDKVVEQLSNEM

SEQ ID NO: 52619 - protein, 30 aa, Artificial Sequence; identical to SEQ ID NO: 19560
  Cyclic GFR-binding peptide
  MOD_RES (4)..(5): Xaa is C or S

SEQ ID NO: 52620 - protein, 36 aa, Artificial Sequence; identical to SEQ ID NO: 19561
  Cyclic GFR-binding peptide
  MOD_RES (6)..(7): Xaa is C or S

SEQ ID NO: 52621 - protein, 32 aa, Artificial Sequence; identical to SEQ ID NO: 19563
  Cyclic GFR-binding peptide
  MOD_RES (5)..(6): Xaa is C or S

SEQ ID NO: 52622 - protein, 33 aa, Artificial Sequence; identical to SEQ ID NO: 9343
  Cyclic GFR-binding peptide
  MOD_RES (31)..(33): Xaa is C or S

SEQ ID NO: 52623 - protein, 29 aa, Artificial Sequence
  Cyclic GFR-binding peptide
  MOD_RES (29)..(29): Xaa is C or S
ELNAISMLYFDEYDKVVLKKYREMVVEGX

SEQ ID NO: 52624 - protein, 29 aa, Artificial Sequence
  Cyclic GFR-binding peptide
  MOD_RES (3)..(4): Xaa is C or S
KAXXVPTELSPISMLFIDENEKVVYKQYE

SEQ ID NO: 52625 - protein, 29 aa, Artificial Sequence
  Cyclic GFR-binding peptide
  MOD_RES (27)..(29): Xaa is C or S
LSPISILFIIGKTPKIYKQYEMIVKSXKX

SEQ ID NO: 52626 - protein, 33 aa, Artificial Sequence; identical to SEQ ID NO: 19570
  Cyclic GFR-binding peptide
  MOD_RES (1)..(2)..(33): Xaa is C or S

SEQ ID NO: 52627 - protein, 33 aa, Artificial Sequence; identical to SEQ ID NO: 19571
  Cyclic GFR-binding peptide
  MOD_RES (2)..(3): Xaa is C or S

SEQ ID NO: 52628 - protein, 31 aa, Artificial Sequence; identical to SEQ ID NO: 9349
  Cyclic GFR-binding peptide
  MOD_RES (29)..(31): Xaa is C or S

SEQ ID NO: 52629 - protein, 26 aa, Artificial Sequence
  Cyclic GFR-binding peptide
VPTELSPISMLFIDENEKVVYKQYED

SEQ ID NO: 52630 - protein, 28 aa, Artificial Sequence
  Cyclic GFR-binding peptide
  MOD_RES (2)..(3): Xaa is C or S
PXXAPTKLEPLTVLYYDDSSNVIEQLSN

SEQ ID NO: 52631 - protein, 23 aa, Artificial Sequence
  Cyclic GFR-binding peptide
LNAISILYFIGKTPKILKKYRMI

SEQ ID NO: 52632 - protein, 29 aa, Artificial Sequence
  Cyclic GFR-binding peptide
VPTELSPISMLFIDENEKVVYKQYEDMVV

SEQ ID NO: 52633 - protein, 30 aa, Artificial Sequence; identical to SEQ ID NO: 19579
  Cyclic GFR-binding peptide
  MOD_RES (1)..(2): Xaa is C or S

SEQ ID NO: 52634 - protein, 40 aa, Artificial Sequence; identical to SEQ ID NO: 19580
  Cyclic GFR-binding peptide
  MOD_RES (6)..(38)..(40): Xaa is C or S

SEQ ID NO: 52635 - protein, 38 aa, Artificial Sequence; identical to SEQ ID NO: 19581
  Cyclic GFR-binding peptide
  MOD_RES (5)..(6)..(38): Xaa is C or S

SEQ ID NO: 52636 - protein, 35 aa, Artificial Sequence; identical to SEQ ID NO: 19583
  Cyclic GFR-binding peptide
  MOD_RES (6)..(7): Xaa is C or S

SEQ ID NO: 52637 - protein, 28 aa, Artificial Sequence
  Cyclic GFR-binding peptide
VPTELSPISMLFIDEYDKVVYKQYEEMV

SEQ ID NO: 52638 - protein, 29 aa, Artificial Sequence
  Cyclic GFR-binding peptide
  MOD_RES (1)..(2): Xaa is C or S
XXVSQDLSPISILFIIGKTPKIYKQYEMI

SEQ ID NO: 52639 - protein, 36 aa, Artificial Sequence; identical to SEQ ID NO: 19586
  Cyclic GFR-binding peptide
  MOD_RES (4)..(5): Xaa is C or S

SEQ ID NO: 52640 - protein, 31 aa, Artificial Sequence; identical to SEQ ID NO: 19587
  Cyclic GFR-binding peptide
  MOD_RES (2)..(2): Xaa is C or S

SEQ ID NO: 52641 - protein, 25 aa, Artificial Sequence
  Cyclic GFR-binding peptide
LEPLTILYYDSANNVVEQLSNDMVV

SEQ ID NO: 52642 - protein, 30 aa, Artificial Sequence; identical to SEQ ID NO: 19589
  Cyclic GFR-binding peptide
  MOD_RES (28)..(30): Xaa is C or S

SEQ ID NO: 52643 - protein, 27 aa, Artificial Sequence
  Cyclic GFR-binding peptide
  MOD_RES (27)..(27): Xaa is C or S
EPLTMLYYDEYDKVVEQLSNEMVVEGX

SEQ ID NO: 52644 - protein, 38 aa, Artificial Sequence; identical to SEQ ID NO: 19591
  Cyclic GFR-binding peptide
  MOD_RES (4)..(5)..(37): Xaa is C or S

SEQ ID NO: 52645 - protein, 38 aa, Artificial Sequence; identical to SEQ ID NO: 9368
  Cyclic GFR-binding peptide
  MOD_RES (4)..(5)..(36)..(38): Xaa is C or S

SEQ ID NO: 52646 - protein, 22 aa, Artificial Sequence
  Cyclic GFR-binding peptide
EPLPVVYYDDSSNVIEQLSNNM

SEQ ID NO: 52647 - protein, 34 aa, Artificial Sequence; identical to SEQ ID NO: 19595
  Cyclic GFR-binding peptide
  MOD_RES (6)..(7): Xaa is C or S

SEQ ID NO: 52648 - protein, 33 aa, Artificial Sequence; identical to SEQ ID NO: 19596
  Cyclic GFR-binding peptide
  MOD_RES (1)..(32): Xaa is C or S

SEQ ID NO: 52649 - protein, 31 aa, Artificial Sequence; identical to SEQ ID NO: 19597
  Cyclic GFR-binding peptide
  MOD_RES (4)..(5): Xaa is C or S

SEQ ID NO: 52650 - protein, 30 aa, Artificial Sequence; identical to SEQ ID NO: 19599
  Cyclic GFR-binding peptide

SEQ ID NO: 52651 - protein, 39 aa, Artificial Sequence; identical to SEQ ID NO: 19600
  Cyclic GFR-binding peptide
  MOD_RES (5)..(6)..(37)..(39): Xaa is C or S

SEQ ID NO: 52652 - protein, 41 aa, Artificial Sequence; identical to SEQ ID NO: 19601
  Cyclic GFR-binding peptide
  MOD_RES (5)..(6)..(38)..(40): Xaa is C or S

SEQ ID NO: 52653 - protein, 34 aa, Artificial Sequence; identical to SEQ ID NO: 19602
  Cyclic GFR-binding peptide
  MOD_RES (5)..(6): Xaa is C or S

SEQ ID NO: 52654 - protein, 32 aa, Artificial Sequence; identical to SEQ ID NO: 9379
  Cyclic GFR-binding peptide
  MOD_RES (4)..(5): Xaa is C or S

SEQ ID NO: 52655 - protein, 33 aa, Artificial Sequence; identical to SEQ ID NO: 19604
  Cyclic GFR-binding peptide
  MOD_RES (31)..(33): Xaa is C or S

SEQ ID NO: 52656 - protein, 32 aa, Artificial Sequence; identical to SEQ ID NO: 9381
  Cyclic GFR-binding peptide
  MOD_RES (30)..(32): Xaa is C or S

SEQ ID NO: 52657 - protein, 32 aa, Artificial Sequence; identical to SEQ ID NO: 19607
  Cyclic GFR-binding peptide
  MOD_RES (5)..(6): Xaa is C or S

SEQ ID NO: 52658 - protein, 36 aa, Artificial Sequence; identical to SEQ ID NO: 19608
  Cyclic GFR-binding peptide
  MOD_RES (1)..(2)..(34)..(36): Xaa is C or S

SEQ ID NO: 52659 - protein, 36 aa, Artificial Sequence; identical to SEQ ID NO: 19609
  Cyclic GFR-binding peptide
  MOD_RES (5)..(6): Xaa is C or S

SEQ ID NO: 52660 - protein, 38 aa, Artificial Sequence; identical to SEQ ID NO: 9385
  Cyclic GFR-binding peptide
  MOD_RES (4)..(5)..(36)..(38): Xaa is C or S

SEQ ID NO: 52661 - protein, 28 aa, Artificial Sequence
  Cyclic GFR-binding peptide
  MOD_RES (1)..(2): Xaa is C or S
XXAPTQLEPLPVVYYDDSSNVIEQLSNN

SEQ ID NO: 52662 - protein, 28 aa, Artificial Sequence
  Cyclic GFR-binding peptide
  MOD_RES (2)..(3): Xaa is C or S
PXXAPTKLSPISVLFIDDSSNVIYKQYE

SEQ ID NO: 52663 - protein, 32 aa, Artificial Sequence; identical to SEQ ID NO: 19614
  Cyclic GFR-binding peptide
  MOD_RES (30)..(32): Xaa is C or S

SEQ ID NO: 52664 - protein, 27 aa, Artificial Sequence
  Cyclic GFR-binding peptide
DLEPLPIVYYVGRTPKVEQLSNMVVKS

SEQ ID NO: 52665 - protein, 36 aa, Artificial Sequence; identical to SEQ ID NO: 19617
  Cyclic GFR-binding peptide
  MOD_RES (5)..(6): Xaa is C or S

SEQ ID NO: 52666 - protein, 34 aa, Artificial Sequence; identical to SEQ ID NO: 19620
  Cyclic GFR-binding peptide
  MOD_RES (1)..(33): Xaa is C or S

SEQ ID NO: 52667 - protein, 31 aa, Artificial Sequence; identical to SEQ ID NO: 19621
  Cyclic GFR-binding peptide
  MOD_RES (31)..(31): Xaa is C or S

SEQ ID NO: 52668 - protein, 31 aa, Artificial Sequence; identical to SEQ ID NO: 9403
  Cyclic GFR-binding peptide

SEQ ID NO: 52669 - protein, 34 aa, Artificial Sequence; identical to SEQ ID NO: 19624
  Cyclic GFR-binding peptide
  MOD_RES (1)..(33): Xaa is C or S

SEQ ID NO: 52670 - protein, 36 aa, Artificial Sequence; identical to SEQ ID NO: 19625
  Cyclic GFR-binding peptide
  MOD_RES (4)..(5)..(36): Xaa is C or S

SEQ ID NO: 52671 - protein, 32 aa, Artificial Sequence; identical to SEQ ID NO: 19626
  Cyclic GFR-binding peptide
  MOD_RES (5)..(6): Xaa is C or S

SEQ ID NO: 52672 - protein, 20 aa, Artificial Sequence
  Cyclic GFR-binding peptide
SPISILFIVGRTPKVYKQYE

SEQ ID NO: 52673 - protein, 35 aa, Artificial Sequence; identical to SEQ ID NO: 19628
  Cyclic GFR-binding peptide
  MOD_RES (1)..(32)..(34): Xaa is C or S

SEQ ID NO: 52674 - protein, 27 aa, Artificial Sequence
  Cyclic GFR-binding peptide
  MOD_RES (1)..(1): Xaa is C or S
XVPQDLSPISILFIVGRTPKVYKQYEM

SEQ ID NO: 52675 - protein, 29 aa, Artificial Sequence
  Cyclic GFR-binding peptide
  MOD_RES (1)..(1): Xaa is C or S
XAPTKLEPLTVLYYDDSSNVIEQLSNNMV

SEQ ID NO: 52676 - protein, 32 aa, Artificial Sequence; identical to SEQ ID NO: 9417
  Cyclic GFR-binding peptide
  MOD_RES (30)..(32): Xaa is C or S

SEQ ID NO: 52677 - protein, 27 aa, Artificial Sequence
  Cyclic GFR-binding peptide
  MOD_RES (27)..(27): Xaa is C or S
EPLTVLYYDDSSNVIEQLSNNMVVRSX

SEQ ID NO: 52678 - protein, 29 aa, Artificial Sequence
  Cyclic GFR-binding peptide
  MOD_RES (29)..(29): Xaa is C or S
ELNAISMLYFDENEKVVLKKYRDMVVEGX

SEQ ID NO: 52679 - protein, 34 aa, Artificial Sequence; identical to SEQ ID NO: 19637
  Cyclic GFR-binding peptide
  MOD_RES (3)..(4): Xaa is C or S

SEQ ID NO: 52680 - protein, 31 aa, Artificial Sequence; identical to SEQ ID NO: 19638
  Cyclic GFR-binding peptide
  MOD_RES (1)..(2): Xaa is C or S

SEQ ID NO: 52681 - protein, 39 aa, Artificial Sequence; identical to SEQ ID NO: 19639
  Cyclic GFR-binding peptide
  MOD_RES (5)..(6)..(38): Xaa is C or S

SEQ ID NO: 52682 - protein, 33 aa, Artificial Sequence; identical to SEQ ID NO: 19640
  Cyclic GFR-binding peptide
  MOD_RES (6)..(7): Xaa is C or S

SEQ ID NO: 52683 - protein, 25 aa, Artificial Sequence
  Cyclic GFR-binding peptide
PTQLEPLTVLYYDDSSNVIEQLSNN

SEQ ID NO: 52684 - protein, 29 aa, Artificial Sequence
  Cyclic GFR-binding peptide
  MOD_RES (3)..(4): Xaa is C or S
SPXXVSQDLNAISILYFIGKTPKILKKYR

SEQ ID NO: 52685 - protein, 34 aa, Artificial Sequence; identical to SEQ ID NO: 19644
  Cyclic GFR-binding peptide
  MOD_RES (1)..(2)..(33): Xaa is C or S

SEQ ID NO: 52686 - protein, 36 aa, Artificial Sequence; identical to SEQ ID NO: 9429
  Cyclic GFR-binding peptide
  MOD_RES (3)..(4)..(35): Xaa is C or S

SEQ ID NO: 52687 - protein, 26 aa, Artificial Sequence
  Cyclic GFR-binding peptide
LSPISMLFIDEYDKVVYKQYEEMVVE

SEQ ID NO: 52688 - protein, 28 aa, Artificial Sequence
  Cyclic GFR-binding peptide
  MOD_RES (27)..(27): Xaa is C or S
LSPISILFIIGKTPKIYKQYEMIVKSXK

SEQ ID NO: 52689 - protein, 32 aa, Artificial Sequence; identical to SEQ ID NO: 9433
  Cyclic GFR-binding peptide
  MOD_RES (1)..(32): Xaa is C or S

SEQ ID NO: 52690 - protein, 21 aa, Artificial Sequence
  Cyclic GFR-binding peptide
SPISVLFIDDSSNVIYKQYEN

SEQ ID NO: 52691 - protein, 26 aa, Artificial Sequence
  Cyclic GFR-binding peptide
DLSPISILFIVGRTPKVYKQYEMVVK

SEQ ID NO: 52692 - protein, 35 aa, Artificial Sequence; identical to SEQ ID NO: 19651
  Cyclic GFR-binding peptide
  MOD_RES (5)..(6): Xaa is C or S

SEQ ID NO: 52693 - protein, 31 aa, Artificial Sequence; identical to SEQ ID NO: 19652
  Cyclic GFR-binding peptide
  MOD_RES (1)..(2): Xaa is C or S

SEQ ID NO: 52694 - protein, 28 aa, Artificial Sequence
  Cyclic GFR-binding peptide
APTQLEPLTVLYYDDSSNVIEQLSNNMV

SEQ ID NO: 52695 - protein, 34 aa, Artificial Sequence; identical to SEQ ID NO: 19654
  Cyclic GFR-binding peptide
  MOD_RES (3)..(4): Xaa is C or S

SEQ ID NO: 52696 - protein, 29 aa, Artificial Sequence
  Cyclic GFR-binding peptide
  MOD_RES (29)..(29): Xaa is C or S
ELEPLPMVYYDEYDKVVEQLSNEMVVEGX

SEQ ID NO: 52697 - protein, 33 aa, Artificial Sequence; identical to SEQ ID NO: 19656
  Cyclic GFR-binding peptide
  MOD_RES (1)..(2): Xaa is C or S

SEQ ID NO: 52698 - protein, 27 aa, Artificial Sequence
  Cyclic GFR-binding peptide
  MOD_RES (27)..(27): Xaa is C or S
LEPLPIVYYVGRTPKVEQLSNMVVKSX

SEQ ID NO: 52699 - protein, 22 aa, Artificial Sequence
  Cyclic GFR-binding peptide
KLSPISVLFIDDSSNVIYKQYE

SEQ ID NO: 52700 - protein, 32 aa, Artificial Sequence; identical to SEQ ID NO: 19659
  Cyclic GFR-binding peptide
  MOD_RES (2)..(3): Xaa is C or S

SEQ ID NO: 52701 - protein, 25 aa, Artificial Sequence
  Cyclic GFR-binding peptide
ELEPLPMVYYDENEKVVEQLSNDMV

SEQ ID NO: 52702 - protein, 27 aa, Artificial Sequence
  Cyclic GFR-binding peptide
PQDLEPLPIVYYVGRTPKVEQLSNMVV

SEQ ID NO: 52703 - protein, 30 aa, Artificial Sequence; identical to SEQ ID NO: 19662
  Cyclic GFR-binding peptide
  MOD_RES (29)..(29): Xaa is C or S

SEQ ID NO: 52704 - protein, 30 aa, Artificial Sequence; identical to SEQ ID NO: 19663
  Cyclic GFR-binding peptide
  MOD_RES (4)..(5): Xaa is C or S

SEQ ID NO: 52705 - protein, 33 aa, Artificial Sequence; identical to SEQ ID NO: 19664
  Cyclic GFR-binding peptide
  MOD_RES (1)..(32): Xaa is C or S

SEQ ID NO: 52706 - protein, 31 aa, Artificial Sequence; identical to SEQ ID NO: 19665
  Cyclic GFR-binding peptide
  MOD_RES (30)..(30): Xaa is C or S

SEQ ID NO: 52707 - protein, 32 aa, Artificial Sequence; identical to SEQ ID NO: 19666
  Cyclic GFR-binding peptide
  MOD_RES (4)..(5): Xaa is C or S

SEQ ID NO: 52708 - protein, 38 aa, Artificial Sequence; identical to SEQ ID NO: 19667
  Cyclic GFR-binding peptide
  MOD_RES (3)..(35)..(37): Xaa is C or S

SEQ ID NO: 52709 - protein, 35 aa, Artificial Sequence; identical to SEQ ID NO: 19668
  Cyclic GFR-binding peptide
  MOD_RES (4)..(4): Xaa is C or S

SEQ ID NO: 52710 - protein, 24 aa, Artificial Sequence
  Cyclic GFR-binding peptide
QLEPLTVLYYDDSSNVIEQLSNNM

SEQ ID NO: 52711 - protein, 35 aa, Artificial Sequence; identical to SEQ ID NO: 19670
  Cyclic GFR-binding peptide
  MOD_RES (1)..(33)..(35): Xaa is C or S

SEQ ID NO: 52712 - protein, 34 aa, Artificial Sequence; identical to SEQ ID NO: 9450
  Cyclic GFR-binding peptide
  MOD_RES (1)..(2)..(33): Xaa is C or S

SEQ ID NO: 52713 - protein, 38 aa, Artificial Sequence; identical to SEQ ID NO: 19673
  Cyclic GFR-binding peptide
  MOD_RES (5)..(6)..(37): Xaa is C or S

SEQ ID NO: 52714 - protein, 29 aa, Artificial Sequence
  Cyclic GFR-binding peptide
  MOD_RES (1)..(2): Xaa is C or S
XXVPQDLEPLPIVYYVGRTPKVEQLSNMV

SEQ ID NO: 52715 - protein, 23 aa, Artificial Sequence
  Cyclic GFR-binding peptide
LEPLTVLYYDDSSNVIEQLSNNM

SEQ ID NO: 52716 - protein, 31 aa, Artificial Sequence; identical to SEQ ID NO: 19679
  Cyclic GFR-binding peptide
  MOD_RES (1)..(2): Xaa is C or S

SEQ ID NO: 52717 - protein, 31 aa, Artificial Sequence; identical to SEQ ID NO: 19681
  Cyclic GFR-binding peptide
  MOD_RES (30)..(30): Xaa is C or S

SEQ ID NO: 52718 - protein, 38 aa, Artificial Sequence; identical to SEQ ID NO: 9459
  Cyclic GFR-binding peptide
  MOD_RES (3)..(4)..(35)..(37): Xaa is C or S

SEQ ID NO: 52719 - protein, 22 aa, Artificial Sequence
  Cyclic GFR-binding peptide
LEPLTILYYDSANNVVEQLSND

SEQ ID NO: 52720 - protein, 37 aa, Artificial Sequence; identical to SEQ ID NO: 19684
  Cyclic GFR-binding peptide
  MOD_RES (2)..(3)..(35)..(37): Xaa is C or S

SEQ ID NO: 52721 - protein, 30 aa, Artificial Sequence; identical to SEQ ID NO: 19685
  Cyclic GFR-binding peptide
  MOD_RES (1)..(2): Xaa is C or S

SEQ ID NO: 52722 - protein, 28 aa, Artificial Sequence
  Cyclic GFR-binding peptide
QDLSPISILFIIGKTPKIYKQYEMIVKS

SEQ ID NO: 52723 - protein, 36 aa, Artificial Sequence; identical to SEQ ID NO: 9461
  Cyclic GFR-binding peptide
  MOD_RES (1)..(2)..(34)..(36): Xaa is C or S

SEQ ID NO: 52724 - protein, 37 aa, Artificial Sequence; identical to SEQ ID NO: 9465
  Cyclic GFR-binding peptide
  MOD_RES (5)..(6)..(37): Xaa is C or S

SEQ ID NO: 52725 - protein, 33 aa, Artificial Sequence; identical to SEQ ID NO: 19689
  Cyclic GFR-binding peptide
  MOD_RES (6)..(7): Xaa is C or S

SEQ ID NO: 52726 - protein, 37 aa, Artificial Sequence; identical to SEQ ID NO: 19691
  Cyclic GFR-binding peptide
  MOD_RES (5)..(6)..(37): Xaa is C or S

SEQ ID NO: 52727 - protein, 27 aa, Artificial Sequence
  Cyclic GFR-binding peptide
  MOD_RES (27)..(27): Xaa is C or S
NAISILYFDSANNVVLKKYRDMVVESX

SEQ ID NO: 52728 - protein, 37 aa, Artificial Sequence; identical to SEQ ID NO: 19693
  Cyclic GFR-binding peptide
  MOD_RES (6)..(7): Xaa is C or S

SEQ ID NO: 52729 - protein, 25 aa, Artificial Sequence
  Cyclic GFR-binding peptide
PQALNAISILYFVGRKPKVLKKYRM

SEQ ID NO: 52730 - protein, 24 aa, Artificial Sequence
  Cyclic GFR-binding peptide
LNAISMLYFDEYDKVVLKKYREMV

SEQ ID NO: 52731 - protein, 38 aa, Artificial Sequence; identical to SEQ ID NO: 19696
  Cyclic GFR-binding peptide
  MOD_RES (3)..(4)..(36)..(38): Xaa is C or S

SEQ ID NO: 52732 - protein, 22 aa, Artificial Sequence
  Cyclic GFR-binding peptide
LEPLPIVYYVGRTPKVEQLSNM

SEQ ID NO: 52733 - protein, 33 aa, Artificial Sequence; identical to SEQ ID NO: 19699
  Cyclic GFR-binding peptide
  MOD_RES (5)..(6): Xaa is C or S

SEQ ID NO: 52734 - protein, 31 aa, Artificial Sequence; identical to SEQ ID NO: 19700
  Cyclic GFR-binding peptide
  MOD_RES (31)..(31): Xaa is C or S

SEQ ID NO: 52735 - protein, 28 aa, Artificial Sequence
  Cyclic GFR-binding peptide
  MOD_RES (1)..(1): Xaa is C or S
XAPTQLEPLTVLYYDDSSNVIEQLSNNM

SEQ ID NO: 52736 - protein, 32 aa, Artificial Sequence; identical to SEQ ID NO: 19702
  Cyclic GFR-binding peptide
  MOD_RES (2)..(3): Xaa is C or S

SEQ ID NO: 52737 - protein, 32 aa, Artificial Sequence; identical to SEQ ID NO: 9480
  Cyclic GFR-binding peptide
  MOD_RES (1)..(2): Xaa is C or S

SEQ ID NO: 52738 - protein, 36 aa, Artificial Sequence; identical to SEQ ID NO: 19706
  Cyclic GFR-binding peptide
  MOD_RES (4)..(5): Xaa is C or S

SEQ ID NO: 52739 - protein, 32 aa, Artificial Sequence; identical to SEQ ID NO: 19707
  Cyclic GFR-binding peptide
  MOD_RES (7)..(7): Xaa is C or S

SEQ ID NO: 52740 - protein, 36 aa, Artificial Sequence; identical to SEQ ID NO: 19710
  Cyclic GFR-binding peptide
  MOD_RES (3)..(4)..(36): Xaa is C or S

SEQ ID NO: 52741 - protein, 25 aa, Artificial Sequence
  Cyclic GFR-binding peptide
TRLEPLPIVYYDSANNVVEQLSNDM

SEQ ID NO: 52742 - protein, 38 aa, Artificial Sequence; identical to SEQ ID NO: 19713
  Cyclic GFR-binding peptide
  MOD_RES (5)..(6)..(38): Xaa is C or S

SEQ ID NO: 52743 - protein, 24 aa, Artificial Sequence
  Cyclic GFR-binding peptide
NAISMLYFDEYDKVVLKKYREMVV

SEQ ID NO: 52744 - protein, 22 aa, Artificial Sequence
  Cyclic GFR-binding peptide
DLSPISILFIVGRTPKVYKQYE

SEQ ID NO: 52745 - protein, 23 aa, Artificial Sequence
  Cyclic GFR-binding peptide
DLSPISILFIIGKTPKIYKQYEM

SEQ ID NO: 52746 - protein, 32 aa, Artificial Sequence; identical to SEQ ID NO: 19719
  Cyclic GFR-binding peptide
  MOD_RES (32)..(32): Xaa is C or S

SEQ ID NO: 52747 - protein, 32 aa, Artificial Sequence; identical to SEQ ID NO: 19720
  Cyclic GFR-binding peptide
  MOD_RES (30)..(32): Xaa is C or S

SEQ ID NO: 52748 - protein, 33 aa, Artificial Sequence; identical to SEQ ID NO: 19721
  Cyclic GFR-binding peptide
  MOD_RES (2)..(3): Xaa is C or S

SEQ ID NO: 52749 - protein, 24 aa, Artificial Sequence
  Cyclic GFR-binding peptide
QDLSPISILFIIGKTPKIYKQYEM

SEQ ID NO: 52750 - protein, 32 aa, Artificial Sequence; identical to SEQ ID NO: 19723
  Cyclic GFR-binding peptide
  MOD_RES (6)..(7): Xaa is C or S

SEQ ID NO: 52751 - protein, 25 aa, Artificial Sequence
  Cyclic GFR-binding peptide
LEPLPMVYYDEYDKVVEQLSNEMVV

SEQ ID NO: 52752 - protein, 29 aa, Artificial Sequence
  Cyclic GFR-binding peptide
  MOD_RES (1)..(1): Xaa is C or S
XVPQALSPISILFIVGRKPKVYKQYEMIV

SEQ ID NO: 52753 - protein, 25 aa, Artificial Sequence
  Cyclic GFR-binding peptide
TELSPISMLFIDEYDKVVYKQYEEM

SEQ ID NO: 52754 - protein, 32 aa, Artificial Sequence; identical to SEQ ID NO: 9500
  Cyclic GFR-binding peptide
  MOD_RES (2)..(3): Xaa is C or S

SEQ ID NO: 52755 - protein, 39 aa, Artificial Sequence; identical to SEQ ID NO: 19728
  Cyclic GFR-binding peptide
  MOD_RES (3)..(4)..(36)..(38): Xaa is C or S

SEQ ID NO: 52756 - protein, 34 aa, Artificial Sequence; identical to SEQ ID NO: 19729
  Cyclic GFR-binding peptide
  MOD_RES (3)..(4): Xaa is C or S

SEQ ID NO: 52757 - protein, 36 aa, Artificial Sequence; identical to SEQ ID NO: 19730
  Cyclic GFR-binding peptide
  MOD_RES (3)..(4)..(36): Xaa is C or S

SEQ ID NO: 52758 - protein, 35 aa, Artificial Sequence; identical to SEQ ID NO: 19731
  Cyclic GFR-binding peptide
  MOD_RES (32)..(34): Xaa is C or S

SEQ ID NO: 52759 - protein, 32 aa, Artificial Sequence; identical to SEQ ID NO: 19732
  Cyclic GFR-binding peptide
  MOD_RES (1)..(2): Xaa is C or S

SEQ ID NO: 52760 - protein, 37 aa, Artificial Sequence; identical to SEQ ID NO: 9503
  Cyclic GFR-binding peptide
  MOD_RES (6)..(7): Xaa is C or S

SEQ ID NO: 52761 - protein, 31 aa, Artificial Sequence; identical to SEQ ID NO: 19734
  Cyclic GFR-binding peptide
  MOD_RES (3)..(4): Xaa is C or S

SEQ ID NO: 52762 - protein, 35 aa, Artificial Sequence; identical to SEQ ID NO: 19735
  Cyclic GFR-binding peptide
  MOD_RES (6)..(7): Xaa is C or S

SEQ ID NO: 52763 - protein, 34 aa, Artificial Sequence; identical to SEQ ID NO: 19736
  Cyclic GFR-binding peptide
  MOD_RES (1)..(2)..(34): Xaa is C or S

SEQ ID NO: 52764 - protein, 30 aa, Artificial Sequence; identical to SEQ ID NO: 19737
  Cyclic GFR-binding peptide
  MOD_RES (27)..(29): Xaa is C or S

SEQ ID NO: 52765 - protein, 31 aa, Artificial Sequence; identical to SEQ ID NO: 19738
  Cyclic GFR-binding peptide
  MOD_RES (1)..(1): Xaa is C or S

SEQ ID NO: 52766 - protein, 28 aa, Artificial Sequence
  Cyclic GFR-binding peptide
RLEPLPIVYYDSANNVVEQLSNDMVVES

SEQ ID NO: 52767 - protein, 33 aa, Artificial Sequence; identical to SEQ ID NO: 9506
  Cyclic GFR-binding peptide
  MOD_RES (2)..(3): Xaa is C or S

SEQ ID NO: 52768 - protein, 34 aa, Artificial Sequence; identical to SEQ ID NO: 19742
  Cyclic GFR-binding peptide
  MOD_RES (4)..(4): Xaa is C or S

SEQ ID NO: 52769 - protein, 35 aa, Artificial Sequence; identical to SEQ ID NO: 19743
  Cyclic GFR-binding peptide
  MOD_RES (6)..(7): Xaa is C or S

SEQ ID NO: 52770 - protein, 35 aa, Artificial Sequence; identical to SEQ ID NO: 19744
  Cyclic GFR-binding peptide
  MOD_RES (2)..(3)..(35): Xaa is C or S

SEQ ID NO: 52771 - protein, 37 aa, Artificial Sequence; identical to SEQ ID NO: 9508
  Cyclic GFR-binding peptide
  MOD_RES (2)..(3)..(35)..(37): Xaa is C or S

SEQ ID NO: 52772 - protein, 31 aa, Artificial Sequence; identical to SEQ ID NO: 9510
  Cyclic GFR-binding peptide
  MOD_RES (30)..(30): Xaa is C or S
